United States Patent Application Publication US 2005/0244851 A1 - sequence listing, part 75

SEQ ID NO: 2918638 - DNA, 25 bp, Homo sapien
tgtatgcataccctatggcccagga

SEQ ID NO: 2918639 - DNA, 25 bp, Homo sapien
gctgggggaggctgtaaccaagagg

SEQ ID NO: 2918640 - DNA, 25 bp, Homo sapien
tttcccgtgtcctcggcagcgtggc

SEQ ID NO: 2918641 - DNA, 25 bp, Homo sapien
tctttcccgtgtcctcggcagcgtg

SEQ ID NO: 2918642 - DNA, 25 bp, Homo sapien
ggaggctgtaaccaagaggccttcc

SEQ ID NO: 2918643 - DNA, 25 bp, Homo sapien
tgttcatcagagtgacttccagccc

SEQ ID NO: 2918644 - DNA, 25 bp, Homo sapien
aagtatcttcatgccacccatggag

SEQ ID NO: 2918645 - DNA, 25 bp, Homo sapien
aagggtagctgtgcctcatcatgcc

SEQ ID NO: 2918646 - DNA, 25 bp, Homo sapien
agaaggcaaagcaaactgagcgtcc

SEQ ID NO: 2918647 - DNA, 25 bp, Homo sapien
ggctcgtgagagaaaaccaaccaga

SEQ ID NO: 2918648 - DNA, 25 bp, Homo sapien
cagggaagctcactagggactcagc

SEQ ID NO: 2918649 - DNA, 25 bp, Homo sapien
gccttgctaaagagagccgtcccag

SEQ ID NO: 2918650 - DNA, 25 bp, Homo sapien
gatgtgcccagcttagacttgtcag

SEQ ID NO: 2918651 - DNA, 25 bp, Homo sapien
aagatgtagattttgcacccagctc

SEQ ID NO: 2918652 - DNA, 25 bp, Homo sapien
tttcacctggcaacacgtcttcagg

SEQ ID NO: 2918653 - DNA, 25 bp, Homo sapien
aggcatgagctatcgtgtctgttca

SEQ ID NO: 2918654 - DNA, 25 bp, Homo sapien
gcttttagcacattcccaatgttgt

SEQ ID NO: 2918655 - DNA, 25 bp, Homo sapien
gacacttgagctcccactgaggtaa

SEQ ID NO: 2918656 - DNA, 25 bp, Homo sapien
tgactcagaatccagcagatcaagt

SEQ ID NO: 2918657 - DNA, 25 bp, Homo sapien
ccagcagatcaagtggccacatggg

SEQ ID NO: 2918658 - DNA, 25 bp, Homo sapien
ccactgatgggccttcggctgctca

SEQ ID NO: 2918659 - DNA, 25 bp, Homo sapien
cttcttgttcccaggtacggccctg

SEQ ID NO: 2918660 - DNA, 25 bp, Homo sapien
ggtacggccctgacttcgggctgct

SEQ ID NO: 2918661 - DNA, 25 bp, Homo sapien
tgttcccaggtacggccctgacttc

SEQ ID NO: 2918662 - DNA, 25 bp, Homo sapien
ggccagtggacttggcccttgccca

SEQ ID NO: 2918663 - DNA, 25 bp, Homo sapien
atccgagcccgactcctccaactca

SEQ ID NO: 2918664 - DNA, 25 bp, Homo sapien
ctatccgagcccgactcctccaact

SEQ ID NO: 2918665 - DNA, 25 bp, Homo sapien
gctgctatccgagcccgactcctcc

SEQ ID NO: 2918666 - DNA, 25 bp, Homo sapien
aggctgctatccgagcccgactcct

SEQ ID NO: 2918667 - DNA, 25 bp, Homo sapien
gctgctggcatacttgacccatgga

SEQ ID NO: 2918668 - DNA, 25 bp, Homo sapien
tggtgttgggcagtgttatgctgca

SEQ ID NO: 2918669 - DNA, 25 bp, Homo sapien
gcagctgctggcatacttgacccat

SEQ ID NO: 2918670 - DNA, 25 bp, Homo sapien
agcagctgctggcatacttgaccca

SEQ ID NO: 2918671 - DNA, 25 bp, Homo sapien
cctcacacagcacccgaacgcaggc

SEQ ID NO: 2918672 - DNA, 25 bp, Homo sapien
tccactggcagtgctagcctcacac

SEQ ID NO: 2918673 - DNA, 25 bp, Homo sapien
ctgacccctaggaccatgctcaggc

SEQ ID NO: 2918674 - DNA, 25 bp, Homo sapien
aacgcaggcgaagccccgcggctca

SEQ ID NO: 2918675 - DNA, 25 bp, Homo sapien
ggttaactggctttggcattgtgac

SEQ ID NO: 2918676 - DNA, 25 bp, Homo sapien
aggttaactggctttggcattgtga

SEQ ID NO: 2918677 - DNA, 25 bp, Homo sapien
caggcagatgctgcacagtccctcc

SEQ ID NO: 2918678 - DNA, 25 bp, Homo sapien
tcaggcagatgctgcacagtccctc

SEQ ID NO: 2918679 - DNA, 25 bp, Homo sapien
ccagatggctaagcttaaaaaccaa

SEQ ID NO: 2918680 - DNA, 25 bp, Homo sapien
gagctggtgagctggccatcactgc

SEQ ID NO: 2918681 - DNA, 25 bp, Homo sapien
tctcccagggattagtctcgcatcg

SEQ ID NO: 2918682 - DNA, 25 bp, Homo sapien
gagacctgcacatagactcctgggc

SEQ ID NO: 2918683 - DNA, 25 bp, Homo sapien
gtaaacctcgagtggcctcgtcctg

SEQ ID NO: 2918684 - DNA, 25 bp, Homo sapien
ctgatctcagactatctggtaaacc

SEQ ID NO: 2918685 - DNA, 25 bp, Homo sapien
tcagactatctggtaaacctcgagt

SEQ ID NO: 2918686 - DNA, 25 bp, Homo sapien
tgcacacggacagcacaacccttgg

SEQ ID NO: 2918687 - DNA, 25 bp, Homo sapien
actgtgctaaattcaatcgaggaca

SEQ ID NO: 2918688 - DNA, 25 bp, Homo sapien
gaatgaactgactctgtgtacacta

SEQ ID NO: 2918689 - DNA, 25 bp, Homo sapien
caatcgaggacacagctggattccg

SEQ ID NO: 2918690 - DNA, 25 bp, Homo sapien
ccttcaccaaggacctccaggtgcc

SEQ ID NO: 2918691 - DNA, 25 bp, Homo sapien
acatcaatcactggggggacaagct

SEQ ID NO: 2918692 - DNA, 25 bp, Homo sapien
tcaatcactggggggacaagctgca

SEQ ID NO: 2918693 - DNA, 25 bp, Homo sapien
caatcactggggggacaagctgcag

SEQ ID NO: 2918694 - DNA, 25 bp, Homo sapien
catcaatcactggggggacaagctg

SEQ ID NO: 2918695 - DNA, 25 bp, Homo sapien
tctggtattttccttgatattcatc

SEQ ID NO: 2918696 - DNA, 25 bp, Homo sapien
ctggtattttccttgatattcatcc

SEQ ID NO: 2918697 - DNA, 25 bp, Homo sapien
tgctgcgcgacagtcctcaatgctc

SEQ ID NO: 2918698 - DNA, 25 bp, Homo sapien
tggcacaggccttaaagtagagagg

SEQ ID NO: 2918699 - DNA, 25 bp, Homo sapien
gggatgactagagctggcacaggcc

SEQ ID NO: 2918700 - DNA, 25 bp, Homo sapien
catttttggcgaggggatgactaga

SEQ ID NO: 2918701 - DNA, 25 bp, Homo sapien
aaatcttcagaagcatttgagaggt

SEQ ID NO: 2918702 - DNA, 25 bp, Homo sapien
ccacaaccaagaaggcgcccatatg

SEQ ID NO: 2918703 - DNA, 25 bp, Homo sapien
catttgagaggtcagatggatccgg

SEQ ID NO: 2918704 - DNA, 25 bp, Homo sapien
ggaagctcaacaatgccaccatctc

SEQ ID NO: 2918705 - DNA, 25 bp, Homo sapien
agtaataaacaagaactattgcaaa

SEQ ID NO: 2918706 - DNA, 25 bp, Homo sapien
tagtaataaacaagaactattgcaa

SEQ ID NO: 2918707 - DNA, 25 bp, Homo sapien
ctgctgctgaaattggtgatgtcaa

SEQ ID NO: 2918708 - DNA, 25 bp, Homo sapien
tcctgactattcagctcctggtagg

SEQ ID NO: 2918709 - DNA, 25 bp, Homo sapien
tctcctgactattcagctcctggta

SEQ ID NO: 2918710 - DNA, 25 bp, Homo sapien
ttctcctgactattcagctcctggt

SEQ ID NO: 2918711 - DNA, 25 bp, Homo sapien
gcacacacactgtcaggaggacgta

SEQ ID NO: 2918712 - DNA, 25 bp, Homo sapien
gatttgctgtgcaatcgcctgcctg

SEQ ID NO: 2918713 - DNA, 25 bp, Homo sapien
catagatgacacctgtgacccgtga

SEQ ID NO: 2918714 - DNA, 25 bp, Homo sapien
caggaacctgcattagacagcatgg

SEQ ID NO: 2918715 - DNA, 25 bp, Homo sapien
gctctttcatttgatcactgtcacc

SEQ ID NO: 2918716 - DNA, 25 bp, Homo sapien
tatacagggtgacatagaatacaga

SEQ ID NO: 2918717 - DNA, 25 bp, Homo sapien
gaccaagtgttattatcccaatgct

SEQ ID NO: 2918718 - DNA, 25 bp, Homo sapien
acagacaagcagcagctccgaaggg

SEQ ID NO: 2918719 - DNA, 25 bp, Homo sapien
gcgacgggttttccctgacactgaa

SEQ ID NO: 2918720 - DNA, 25 bp, Homo sapien
catctagagcctgaagcgacgggtt

SEQ ID NO: 2918721 - DNA, 25 bp, Homo sapien
tgtggcccatgccttggaaagctgt

SEQ ID NO: 2918722 - DNA, 25 bp, Homo sapien
ttttagatgggctcactactgcagc

SEQ ID NO: 2918723 - DNA, 25 bp, Homo sapien
taacaaagttgcttaatcatgatgc

SEQ ID NO: 2918724 - DNA, 25 bp, Homo sapien
ctaacattactgattgacacctatc

SEQ ID NO: 2918725 - DNA, 25 bp, Homo sapien
taaagcgaagaatagtaagtcaagt

SEQ ID NO: 2918726 - DNA, 25 bp, Homo sapien
aaatcaacaggttgcaactgcacca

SEQ ID NO: 2918727 - DNA, 25 bp, Homo sapien
tcagccgcttcaaatgccaacaaga

SEQ ID NO: 2918728 - DNA, 25 bp, Homo sapien
ctttcagccgcttcaaatgccaaca

SEQ ID NO: 2918729 - DNA, 25 bp, Homo sapien
cagccgcttcaaatgccaacaagag

SEQ ID NO: 2918730 - DNA, 25 bp, Homo sapien
ttcagccgcttcaaatgccaacaag

SEQ ID NO: 2918731 - DNA, 25 bp, Homo sapien
tacaattaaagtatcacaaggatac

SEQ ID NO: 2918732 - DNA, 25 bp, Homo sapien
tttatcagatggcataaagtcattt

SEQ ID NO: 2918733 - DNA, 25 bp, Homo sapien
tggcataaagtcatttctcatacaa

SEQ ID NO: 2918734 - DNA, 25 bp, Homo sapien
atcagatggcataaagtcatttctc

SEQ ID NO: 2918735 - DNA, 25 bp, Homo sapien
caagttctggtagataatccttttg

SEQ ID NO: 2918736 - DNA, 25 bp, Homo sapien
tctgctgactagctcaagtagatca

SEQ ID NO: 2918737 - DNA, 25 bp, Homo sapien
gggcttcctgcatctaagagtatac

SEQ ID NO: 2918738 - DNA, 25 bp, Homo sapien
gggcttcatgcagcacagatattat

SEQ ID NO: 2918739 - DNA, 25 bp, Homo sapien
ccagctggaattgttatctcatttt

SEQ ID NO: 2918740 - DNA, 25 bp, Homo sapien
ttagtaggtacgggctttcacaatg

SEQ ID NO: 2918741 - DNA, 25 bp, Homo sapien
agtaggtacgggctttcacaatgtt

SEQ ID NO: 2918742 - DNA, 25 bp, Homo sapien
tgcacccagctggaattgttatctc

SEQ ID NO: 2918743 - DNA, 25 bp, Homo sapien
catgcaggtttagctaagtctcagg

SEQ ID NO: 2918744 - DNA, 25 bp, Homo sapien
caaatggcacgcagattggaaaggg

SEQ ID NO: 2918745 - DNA, 25 bp, Homo sapien
tatagagtgcatccaccttgcagga

SEQ ID NO: 2918746 - DNA, 25 bp, Homo sapien
ttggaaagggagacataaaactgcc

SEQ ID NO: 2918747 - DNA, 25 bp, Homo sapien
gaattgggcatgcaatttggacata

SEQ ID NO: 2918748 - DNA, 25 bp, Homo sapien
gaaaggaactgatgaagaattgggc

SEQ ID NO: 2918749 - DNA, 25 bp, Homo sapien
tggacatagatgagctctgggaaaa

SEQ ID NO: 2918750 - DNA, 25 bp, Homo sapien
catgcaatttggacatagatgagct

SEQ ID NO: 2918751 - DNA, 25 bp, Homo sapien
tccctggtgatgctaaaaaattatc

SEQ ID NO: 2918752 - DNA, 25 bp, Homo sapien
tatcagcctatcattagtcatggga

SEQ ID NO: 2918753 - DNA, 25 bp, Homo sapien
gaacattccgtgcaggtacacctag

SEQ ID NO: 2918754 - DNA, 25 bp, Homo sapien
cagagatgccatggaaaagtaaggc

SEQ ID NO: 2918755 - DNA, 25 bp, Homo sapien
cgcgctattacgtgggctgtgccat

SEQ ID NO: 2918756 - DNA, 25 bp, Homo sapien
cattacgtgggctgagcatttcaca

SEQ ID NO: 2918757 - DNA, 25 bp, Homo sapien
caggagatactgtccctttccaaaa

SEQ ID NO: 2918758 - DNA, 25 bp, Homo sapien
ggttagggcttacactgcctggaaa

SEQ ID NO: 2918759 - DNA, 25 bp, Homo sapien
aaagtacttgtagatttgggccacg

SEQ ID NO: 2918760 - DNA, 25 bp, Homo sapien
acactctgccagtcgggccggtctg

SEQ ID NO: 2918761 - DNA, 25 bp, Homo sapien
acttgtagatttgggccacgtactg

SEQ ID NO: 2918762 - DNA, 25 bp, Homo sapien
ctgtgtacagcatctcgctgagttc

SEQ ID NO: 2918763 - DNA, 25 bp, Homo sapien
ggtcagtggacagtaatcaggcgct

SEQ ID NO: 2918764 - DNA, 25 bp, Homo sapien
gagtccccaatttacagtccagctg

SEQ ID NO: 2918765 - DNA, 25 bp, Homo sapien
catttcagacaggtacatcgtggga

SEQ ID NO: 2918766 - DNA, 25 bp, Homo sapien
gataatgtgttcgttcagccaccca

SEQ ID NO: 2918767 - DNA, 25 bp, Homo sapien
taaaggccaaatcagtccagagccg

SEQ ID NO: 2918768 - DNA, 25 bp, Homo sapien
cctactgtgaaagccgcgagctgct

SEQ ID NO: 2918769 - DNA, 25 bp, Homo sapien
ttcccatgccgatgaaagaggcctg

SEQ ID NO: 2918770 - DNA, 25 bp, Homo sapien
taaacgaatgggaggacaaaggcgc

SEQ ID NO: 2918771 - DNA, 25 bp, Homo sapien
gagctggttctagatgatttacacg

SEQ ID NO: 2918772 - DNA, 25 bp, Homo sapien
cactcaaaatagagccaatcacagg

SEQ ID NO: 2918773 - DNA, 25 bp, Homo sapien
cacagtcattggcaacttgggctcc

SEQ ID NO: 2918774 - DNA, 25 bp, Homo sapien
cgcaacgccattgctcagagctggt

SEQ ID NO: 2918775 - DNA, 25 bp, Homo sapien
ctaccccttggcctagctgggttgg

SEQ ID NO: 2918776 - DNA, 25 bp, Homo sapien
cttgggggagccctactagctgctg

SEQ ID NO: 2918777 - DNA, 25 bp, Homo sapien
gctgctgtgctagaaggcctattcc

SEQ ID NO: 2918778 - DNA, 25 bp, Homo sapien
acctccacacgccagcggatggctt

SEQ ID NO: 2918779 - DNA, 25 bp, Homo sapien
tgagaatgttatccccgcagggcgg

SEQ ID NO: 2918780 - DNA, 25 bp, Homo sapien
aatggcactcgagctttggaagggt

SEQ ID NO: 2918781 - DNA, 25 bp, Homo sapien
tctccgtaacgtttgtgggcagcag

SEQ ID NO: 2918782 - DNA, 25 bp, Homo sapien
tggatcagaggagtgaaatgccccg

SEQ ID NO: 2918783 - DNA, 25 bp, Homo sapien
tgccaggacgcaagcggagtctgat

SEQ ID NO: 2918784 - DNA, 25 bp, Homo sapien
aatgcctggtgccaccgggattgct

SEQ ID NO: 2918785 - DNA, 25 bp, Homo sapien
tctgcccagggtccgtgcagctggc

SEQ ID NO: 2918786 - DNA, 25 bp, Homo sapien
tctgatggctgggtcagagcggcct

SEQ ID NO: 2918787 - DNA, 25 bp, Homo sapien
cttggccactgcagcgaagttgccc

SEQ ID NO: 2918788 - DNA, 25 bp, Homo sapien
tgcagcgaagttgccctagggtccg

SEQ ID NO: 2918789 - DNA, 25 bp, Homo sapien
gctcctaggcttgctcggttcaggg

SEQ ID NO: 2918790 - DNA, 25 bp, Homo sapien
ctgctcctaggcttgctcggttcag

SEQ ID NO: 2918791 - DNA, 25 bp, Homo sapien
cctgtcatgagtgccgcttcacagc

SEQ ID NO: 2918792 - DNA, 25 bp, Homo sapien
gtcacggaacctgtgacttcactgc

SEQ ID NO: 2918793 - DNA, 25 bp, Homo sapien
tcatgagtgccgcttcacagcgccg

SEQ ID NO: 2918794 - DNA, 25 bp, Homo sapien
tgtgacgtcacggaacctgtgactt

SEQ ID NO: 2918795 - DNA, 25 bp, Homo sapien
gttacagactagtgcgcctgcccac

SEQ ID NO: 2918796 - DNA, 25 bp, Homo sapien
agcctcgcgggtaaggccaagccaa

SEQ ID NO: 2918797 - DNA, 25 bp, Homo sapien
caatccgttacagactagtgcgcct

SEQ ID NO: 2918798 - DNA, 25 bp, Homo sapien
taaggccaagccaatccgttacaga

SEQ ID NO: 2918799 - DNA, 25 bp, Homo sapien
aaatgccaagccaagcgatcactgc

SEQ ID NO: 2918800 - DNA, 25 bp, Homo sapien
gaaatgccaagccaagcgatcactg

SEQ ID NO: 2918801 - DNA, 25 bp, Homo sapien
agaaatgccaagccaagcgatcact

SEQ ID NO: 2918802 - DNA, 25 bp, Homo sapien
tcccagcaggatagcccgcggtttc

SEQ ID NO: 2918803 - DNA, 25 bp, Homo sapien
cagtagcgagctactgcctcggcca

SEQ ID NO: 2918804 - DNA, 25 bp, Homo sapien
tagcgagctactgcctcggccacaa

SEQ ID NO: 2918805 - DNA, 25 bp, Homo sapien
tcggccacaacctcccagcaggata

SEQ ID NO: 2918806 - DNA, 25 bp, Homo sapien
ctatccctcttgtccacgccagtgt

SEQ ID NO: 2918807 - DNA, 25 bp, Homo sapien
gtctaaggcgccctcaccgtgcttg

SEQ ID NO: 2918808 - DNA, 25 bp, Homo sapien
tgtggagctcgccaagatcttccag

SEQ ID NO: 2918809 - DNA, 25 bp, Homo sapien
accgtgcttgctctcgctgccgacg

SEQ ID NO: 2918810 - DNA, 25 bp, Homo sapien
aaaatctgtgcatcatccttatgca

SEQ ID NO: 2918811 - DNA, 25 bp, Homo sapien
cttcaaaaatctgtgcatcatcctt

SEQ ID NO: 2918812 - DNA, 25 bp, Homo sapien
gccatgctaatttctctccattttg

SEQ ID NO: 2918813 - DNA, 25 bp, Homo sapien
tatggaccacttcaaaaatctgtgc

SEQ ID NO: 2918814 - DNA, 25 bp, Homo sapien
cttatattcaggaactagttgctga

SEQ ID NO: 2918815 - DNA, 25 bp, Homo sapien
ccttatattcaggaactagttgctg

SEQ ID NO: 2918816 - DNA, 25 bp, Homo sapien
tccttatattcaggaactagttgct

SEQ ID NO: 2918817 - DNA, 25 bp, Homo sapien
cactgtgctggccccaacagtattt

SEQ ID NO: 2918818 - DNA, 25 bp, Homo sapien
caccactgtgctggccccaacagta

SEQ ID NO: 2918819 - DNA, 25 bp, Homo sapien
ctgtgctggccccaacagtattttt

SEQ ID NO: 2918820 - DNA, 25 bp, Homo sapien
ccactgtgctggccccaacagtatt

SEQ ID NO: 2918821 - DNA, 25 bp, Homo sapien
cttgaggctaggaactaaagctgca

SEQ ID NO: 2918822 - DNA, 25 bp, Homo sapien
tgccttggagattcctgtacttcta

SEQ ID NO: 2918823 - DNA, 25 bp, Homo sapien
tatatccaccggactaaaggcatta

SEQ ID NO: 2918824 - DNA, 25 bp, Homo sapien
cagtcaattttctcccactaggtag

SEQ ID NO: 2918825 - DNA, 25 bp, Homo sapien
ctaagggtcaaattagtaggatgcc

SEQ ID NO: 2918826 - DNA, 25 bp, Homo sapien
tcccagttctttggttgctgactga

SEQ ID NO: 2918827 - DNA, 25 bp, Homo sapien
tctggtagctgtgattggcacaggt

SEQ ID NO: 2918828 - DNA, 25 bp, Homo sapien
tatcattccctgagagaagtacaac

SEQ ID NO: 2918829 - DNA, 25 bp, Homo sapien
caaggtggtagctcatgtggacaca

SEQ ID NO: 2918830 - DNA, 25 bp, Homo sapien
gccaaaaggtattctgttcagtgca

SEQ ID NO: 2918831 - DNA, 25 bp, Homo sapien
tatagctctatgcagccaagcagag

SEQ ID NO: 2918832 - DNA, 25 bp, Homo sapien
cacagccaaggagatactatgcagc

SEQ ID NO: 2918833 - DNA, 25 bp, Homo sapien
agcaggacaggaccagcagttcagt

SEQ ID NO: 2918834 - DNA, 25 bp, Homo sapien
gaccagcagttcagtaaggccagag

SEQ ID NO: 2918835 - DNA, 25 bp, Homo sapien
caggacaggaccagcagttcagtaa

SEQ ID NO: 2918836 - DNA, 25 bp, Homo sapien
cagagaaggggcacacgggggaaag

SEQ ID NO: 2918837 - DNA, 25 bp, Homo sapien
taggtatctccttccttagggctgc

SEQ ID NO: 2918838 - DNA, 25 bp, Homo sapien
gacactagatgccaccaggttaaag

SEQ ID NO: 2918839 - DNA, 25 bp, Homo sapien
cagactgctaggtgaagttgaccct

SEQ ID NO: 2918840 - DNA, 25 bp, Homo sapien
tagggctgccctagaactttactga

SEQ ID NO: 2918841 - DNA, 25 bp, Homo sapien
gcttattttcgcatcctttaagtct

SEQ ID NO: 2918842 - DNA, 25 bp, Homo sapien
cttattttcgcatcctttaagtctt

SEQ ID NO: 2918843 - DNA, 25 bp, Homo sapien
ctctgttgggctacatgttttaaaa

SEQ ID NO: 2918844 - DNA, 25 bp, Homo sapien
tctctgttgggctacatgttttaaa

SEQ ID NO: 2918845 - DNA, 25 bp, Homo sapien
tctgttgggctacatgttttaaaaa

SEQ ID NO: 2918846 - DNA, 25 bp, Homo sapien
cttctctgttgggctacatgtttta

SEQ ID NO: 2918847 - DNA, 25 bp, Homo sapien
tgcacatgaggaagtactggatata

SEQ ID NO: 2918848 - DNA, 25 bp, Homo sapien
gatatataggtatatcctctctatc

SEQ ID NO: 2918849 - DNA, 25 bp, Homo sapien
ttcctcagatttttgcacatgagga

SEQ ID NO: 2918850 - DNA, 25 bp, Homo sapien
catgaggaagtactggatatatagg

SEQ ID NO: 2918851 - DNA, 25 bp, Homo sapien
gaactcttcttctaatgtgttgacc

SEQ ID NO: 2918852 - DNA, 25 bp, Homo sapien
gagttatcaagtagtggctcttcct

SEQ ID NO: 2918853 - DNA, 25 bp, Homo sapien
ggaaatgtctcgaataccactgaga

SEQ ID NO: 2918854 - DNA, 25 bp, Homo sapien
tcctcaggacaagccggaattttgt

SEQ ID NO: 2918855 - DNA, 25 bp, Homo sapien
cagcacaggagttacttatgacctg

SEQ ID NO: 2918856 - DNA, 25 bp, Homo sapien
cactacggcccagaatgcctggcct

SEQ ID NO: 2918857 - DNA, 25 bp, Homo sapien
gagttacttatgacctgctccattt

SEQ ID NO: 2918858 - DNA, 25 bp, Homo sapien
ttctttagcaaatctggtggtgccc

SEQ ID NO: 2918859 - DNA, 25 bp, Homo sapien
tctgctgatttagtccatcatcatc

SEQ ID NO: 2918860 - DNA, 25 bp, Homo sapien
catcatcattgccaacagtagtacc

SEQ ID NO: 2918861 - DNA, 25 bp, Homo sapien
taccatcagttagggttcctgataa

SEQ ID NO: 2918862 - DNA, 25 bp, Homo sapien
gtgctattacttctgtgcttctcca

SEQ ID NO: 2918863 - DNA, 25 bp, Homo sapien
accacacttgaccaattgtctcctg

SEQ ID NO: 2918864 - DNA, 25 bp, Homo sapien
cacacttgaccaattgtctcctgtt

SEQ ID NO: 2918865 - DNA, 25 bp, Homo sapien
tgtctcctgttaaacgctgctatag

SEQ ID NO: 2918866 - DNA, 25 bp, Homo sapien
ctgttaaacgctgctataggcttac

SEQ ID NO: 2918867 - DNA, 25 bp, Homo sapien
gactggcttctggatatattcttca

SEQ ID NO: 2918868 - DNA, 25 bp, Homo sapien
catattgtgtgttgccttctaggta

SEQ ID NO: 2918869 - DNA, 25 bp, Homo sapien
gaaatgggaggcaatcagatggatc

SEQ ID NO: 2918870 - DNA, 25 bp, Homo sapien
tcaggtactcctgacaagatctgct

SEQ ID NO: 2918871 - DNA, 25 bp, Homo sapien
gttactaaattagccttctcaaaca

SEQ ID NO: 2918872 - DNA, 25 bp, Homo sapien
ttgtagcagaccacaagttactaaa

SEQ ID NO: 2918873 - DNA, 25 bp, Homo sapien
tcatctccttgtagcagaccacaag

SEQ ID NO: 2918874 - DNA, 25 bp, Homo sapien
ttctcaaacactggtgtaatcagag

SEQ ID NO: 2918875 - DNA, 25 bp, Homo sapien
tcgttcttttcattagatgttttat

SEQ ID NO: 2918876 - DNA, 25 bp, Homo sapien
ctcgttcttttcattagatgtttta

SEQ ID NO: 2918877 - DNA, 25 bp, Homo sapien
aggctatttcagatggctccattga

SEQ ID NO: 2918878 - DNA, 25 bp, Homo sapien
gctccattgagtcagcaaagtcagc

SEQ ID NO: 2918879 - DNA, 25 bp, Homo sapien
attctcataaacagagtgagacaat

SEQ ID NO: 2918880 - DNA, 25 bp, Homo sapien
gctatttcagatggctccattgagt

SEQ ID NO: 2918881 - DNA, 25 bp, Homo sapien
tctggccacaatggacagcaagtac

SEQ ID NO: 2918882 - DNA, 25 bp, Homo sapien
ccacaatggacagcaagtactgatt

SEQ ID NO: 2918883 - DNA, 25 bp, Homo sapien
caatggacagcaagtactgatttac

SEQ ID NO: 2918884 - DNA, 25 bp, Homo sapien
tggccacaatggacagcaagtactg

SEQ ID NO: 2918885 - DNA, 25 bp, Homo sapien
ctcaaatcgtacagctctttctccc

SEQ ID NO: 2918886 - DNA, 25 bp, Homo sapien
taagttttactgtaagttggtcaca

SEQ ID NO: 2918887 - DNA, 25 bp, Homo sapien
tcattttgtagtacactgaccatat

SEQ ID NO: 2918888 - DNA, 25 bp, Homo sapien
tcttaagtttcagtaagtgttcaca

SEQ ID NO: 2918889 - DNA, 25 bp, Homo sapien
ttgttgctttgtttcaaccactttc

SEQ ID NO: 2918890 - DNA, 25 bp, Homo sapien
caacatatcggcatttcttttctcc

SEQ ID NO: 2918891 - DNA, 25 bp, Homo sapien
ctgttcactatctttattatacaac

SEQ ID NO: 2918892 - DNA, 25 bp, Homo sapien
ccttaacaagtcttctcagattcca

SEQ ID NO: 2918893 - DNA, 25 bp, Homo sapien
gaaagttgcttctgggcatcgtttc

SEQ ID NO: 2918894 - DNA, 25 bp, Homo sapien
ttgcttctgggcatcgtttctctcc

SEQ ID NO: 2918895 - DNA, 25 bp, Homo sapien
gttgcttctgggcatcgtttctctc

SEQ ID NO: 2918896 - DNA, 25 bp, Homo sapien
aagttgcttctgggcatcgtttctc

SEQ ID NO: 2918897 - DNA, 25 bp, Homo sapien
tccttttctttctgatgcctatgag

SEQ ID NO: 2918898 - DNA, 25 bp, Homo sapien
catgcaattttcatgaaagagatcc

SEQ ID NO: 2918899 - DNA, 25 bp, Homo sapien
caattttcatgaaagagatcctttt

SEQ ID NO: 2918900 - DNA, 25 bp, Homo sapien
ttcatgaaagagatccttttctttc

SEQ ID NO: 2918901 - DNA, 25 bp, Homo sapien
cagattgttcagctgtccactgtac

SEQ ID NO: 2918902 - DNA, 25 bp, Homo sapien
ggaaatcaagttttaggtctcttgc

SEQ ID NO: 2918903 - DNA, 25 bp, Homo sapien
tagcttgtaggccagacatatcaac

SEQ ID NO: 2918904 - DNA, 25 bp, Homo sapien
cattttgtcatgtaaacgaacccac

SEQ ID NO: 2918905 - DNA, 25 bp, Homo sapien
tgattatattcatccatcagctcct

SEQ ID NO: 2918906 - DNA, 25 bp, Homo sapien
tgaaagaatctgcttttcactctca

SEQ ID NO: 2918907 - DNA, 25 bp, Homo sapien
ttaaatgattatattcatccatcag

SEQ ID NO: 2918908 - DNA, 25 bp, Homo sapien
aatgattatattcatccatcagctc

SEQ ID NO: 2918909 - DNA, 25 bp, Homo sapien
gccataaccaaatattactttacat

SEQ ID NO: 2918910 - DNA, 25 bp, Homo sapien
ttacattttctttcaggaaggttga

SEQ ID NO: 2918911 - DNA, 25 bp, Homo sapien
ttagccataaccaaatattacttta

SEQ ID NO: 2918912 - DNA, 25 bp, Homo sapien
tacattttctttcaggaaggttgaa

SEQ ID NO: 2918913 - DNA, 25 bp, Homo sapien
tgacgtaggttgttgttttaggaga

SEQ ID NO: 2918914 - DNA, 25 bp, Homo sapien
tgaggtagcctctgacgtaggttgt

SEQ ID NO: 2918915 - DNA, 25 bp, Homo sapien
gttttaggagatcggtccattcttg

SEQ ID NO: 2918916 - DNA, 25 bp, Homo sapien
tgtgacaacgtgaggtagcctctga

SEQ ID NO: 2918917 - DNA, 25 bp, Homo sapien
atagattaactgttgacatgttatg

SEQ ID NO: 2918918 - DNA, 25 bp, Homo sapien
ttgacatgttatgtttcatacatac

SEQ ID NO: 2918919 - DNA, 25 bp, Homo sapien
ctatagattaactgttgacatgtta

SEQ ID NO: 2918920 - DNA, 25 bp, Homo sapien
actgttgacatgttatgtttcatac

SEQ ID NO: 2918921 - DNA, 25 bp, Homo sapien
cactacacctggcttggctagctaa

SEQ ID NO: 2918922 - DNA, 25 bp, Homo sapien
cctggcttggctagctaatatttaa

SEQ ID NO: 2918923 - DNA, 25 bp, Homo sapien
gtttgaggtgatggaatatattaat

SEQ ID NO: 2918924 - DNA, 25 bp, Homo sapien
tgaccattatacattgtttacacat

SEQ ID NO: 2918925 - DNA, 25 bp, Homo sapien
gactgtcagtgtaaggccctatttt

SEQ ID NO: 2918926 - DNA, 25 bp, Homo sapien
gtggtgcctcaaattcccttaaaga

SEQ ID NO: 2918927 - DNA, 25 bp, Homo sapien
gaagctggctgaagaaactacttag

SEQ ID NO: 2918928 - DNA, 25 bp, Homo sapien
taaacccatcctaatctgaggagca

SEQ ID NO: 2918929 - DNA, 25 bp, Homo sapien
tgtagacatcgtgaaggtacagttt

SEQ ID NO: 2918930 - DNA, 25 bp, Homo sapien
tcatagagaataatgtctgttgaag

SEQ ID NO: 2918931 - DNA, 25 bp, Homo sapien
tagacatcgtgaaggtacagtttcc

SEQ ID NO: 2918932 - DNA, 25 bp, Homo sapien
gaataatgtctgttgaagttgaaga

SEQ ID NO: 2918933 - DNA, 25 bp, Homo sapien
tgagttcatttgacaaggattctct

SEQ ID NO: 2918934 - DNA, 25 bp, Homo sapien
gttcatttgacaaggattctctaac

SEQ ID NO: 2918935 - DNA, 25 bp, Homo sapien
tcggcttgcgaagtttttattctgg

SEQ ID NO: 2918936 - DNA, 25 bp, Homo sapien
agtcggcttgcgaagtttttattct

SEQ ID NO: 2918937 - DNA, 25 bp, Homo sapien
cactgaggaatcattcacggcgact

SEQ ID NO: 2918938 - DNA, 25 bp, Homo sapien
catttggcactgaggaatcattcac

SEQ ID NO: 2918939 - DNA, 25 bp, Homo sapien
tttggcactgaggaatcattcacgg

SEQ ID NO: 2918940 - DNA, 25 bp, Homo sapien
ttgagcatttggcactgaggaatca

SEQ ID NO: 2918941 - DNA, 25 bp, Homo sapien
tatcagaaatctgaacgccgaagga

SEQ ID NO: 2918942 - DNA, 25 bp, Homo sapien
tccatgtccttaagagcagacctct

SEQ ID NO: 2918943 - DNA, 25 bp, Homo sapien
tgttgagaccttcactatcattaag

SEQ ID NO: 2918944 - DNA, 25 bp, Homo sapien
ctggccttgtagcataagcagtgaa

SEQ ID NO: 2918945 - DNA, 25 bp, Homo sapien
tcacatatgatgacgggtagaaaac

SEQ ID NO: 2918946 - DNA, 25 bp, Homo sapien
tctgcagttaggtcattttgcaact

SEQ ID NO: 2918947 - DNA, 25 bp, Homo sapien
tgcagttaggtcattttgcaacttc

SEQ ID NO: 2918948 - DNA, 25 bp, Homo sapien
tgctacttctgcagttaggtcattt

SEQ ID NO: 2918949 - DNA, 25 bp, Homo sapien
tacttctgcagttaggtcattttgc

SEQ ID NO: 2918950 - DNA, 25 bp, Homo sapien
aatatcatgtgaatagcccaaataa

SEQ ID NO: 2918951 - DNA, 25 bp, Homo sapien
atagcccaaataaaattgccttatc

SEQ ID NO: 2918952 - DNA, 25 bp, Homo sapien
ccaaataaaattgccttatctttca

SEQ ID NO: 2918953 - DNA, 25 bp, Homo sapien
aaattgccttatctttcagagtatg

SEQ ID NO: 2918954 - DNA, 25 bp, Homo sapien
aaagatgctggcaagattatggaga

SEQ ID NO: 2918955 - DNA, 25 bp, Homo sapien
gaaaagatgctggcaagattatgga

SEQ ID NO: 2918956 - DNA, 25 bp, Homo sapien
aaaagatgctggcaagattatggag

SEQ ID NO: 2918957 - DNA, 25 bp, Homo sapien
aagatgctggcaagattatggagaa

SEQ ID NO: 2918958 - DNA, 25 bp, Homo sapien
tcaggacacaggcaagggcaaagat

SEQ ID NO: 2918959 - DNA, 25 bp, Homo sapien
gcaatgccattcaggacacaggcaa

SEQ ID NO: 2918960 - DNA, 25 bp, Homo sapien
aggacacaggcaagggcaaagattt

SEQ ID NO: 2918961 - DNA, 25 bp, Homo sapien
atgccattcaggacacaggcaaggg

SEQ ID NO: 2918962 - DNA, 25 bp, Homo sapien
tatgcagcaaattgacactggaccc

SEQ ID NO: 2918963 - DNA, 25 bp, Homo sapien
cagcaaattgacactggaccccttc

SEQ ID NO: 2918964 - DNA, 25 bp, Homo sapien
tgcagcaaattgacactggacccct

SEQ ID NO: 2918965 - DNA, 25 bp, Homo sapien
atatgcagcaaattgacactggacc

SEQ ID NO: 2918966 - DNA, 25 bp, Homo sapien
gaatgtcccgtgttctgatgtatac

SEQ ID NO: 2918967 - DNA, 25 bp, Homo sapien
tgtgtccatttagacgaagtgtctt

SEQ ID NO: 2918968 - DNA, 25 bp, Homo sapien
tgctgccagcggagtattaacatcc

SEQ ID NO: 2918969 - DNA, 25 bp, Homo sapien
ttgcctgagtacctgaaaacctgga

SEQ ID NO: 2918970 - DNA, 25 bp, Homo sapien
ggatttggactgttctagtttctcc

SEQ ID NO: 2918971 - DNA, 25 bp, Homo sapien
atttttttgaggattactgcatctc

SEQ ID NO: 2918972 - DNA, 25 bp, Homo sapien
gctgagggtcttaataaaataagga

SEQ ID NO: 2918973 - DNA, 25 bp, Homo sapien
gatgctggattttctcaagtggttt

SEQ ID NO: 2918974 - DNA, 25 bp, Homo sapien
ttagattcagctagctagtattttt

SEQ ID NO: 2918975 - DNA, 25 bp, Homo sapien
ggtcttaagttcttgatccatcttg

SEQ ID NO: 2918976 - DNA, 25 bp, Homo sapien
gtcttaagttcttgatccatcttga

SEQ ID NO: 2918977 - DNA, 25 bp, Homo sapien
aggtcttaagttcttgatccatctt

SEQ ID NO: 2918978 - DNA, 25 bp, Homo sapien
caggtcttaagttcttgatccatct

SEQ ID NO: 2918979 - DNA, 25 bp, Homo sapien
cataactcacctgttagagctgaaa

SEQ ID NO: 2918980 - DNA, 25 bp, Homo sapien
gacagccaaaatagccggtctagag

SEQ ID NO: 2918981 - DNA, 25 bp, Homo sapien
tgaacttcaatgacctaaaggagca

SEQ ID NO: 2918982 - DNA, 25 bp, Homo sapien
ggctgaaatgacagagtaggcttca

SEQ ID NO: 2918983 - DNA, 25 bp, Homo sapien
taagtggagttgttgaaggttggat

SEQ ID NO: 2918984 - DNA, 25 bp, Homo sapien
tgtttagtcattgcggaaagcagtt

SEQ ID NO: 2918985 - DNA, 25 bp, Homo sapien
tagtcattgcggaaagcagtttggc

SEQ ID NO: 2918986 - DNA, 25 bp, Homo sapien
acttgtttagtcattgcggaaagca

SEQ ID NO: 2918987 - DNA, 25 bp, Homo sapien
cctgtgatcagaggaaggtcagccc

SEQ ID NO: 2918988 - DNA, 25 bp, Homo sapien
gtgatcagaggaaggtcagcccagc

SEQ ID NO: 2918989 - DNA, 25 bp, Homo sapien
tgcctgtgatcagaggaaggtcagc

SEQ ID NO: 2918990 - DNA, 25 bp, Homo sapien
tgtgatcagaggaaggtcagcccag

SEQ ID NO: 2918991 - DNA, 25 bp, Homo sapien
cagaaagagataggcctcaagattc

SEQ ID NO: 2918992 - DNA, 25 bp, Homo sapien
ttcctggtttagaggaagacaaagc

SEQ ID NO: 2918993 - DNA, 25 bp, Homo sapien
ccaggttctgtaagcattgggagca

SEQ ID NO: 2918994 - DNA, 25 bp, Homo sapien
ccttccagaaagagataggcctcaa

SEQ ID NO: 2918995 - DNA, 25 bp, Homo sapien
tgtgagcccctacctctcagacatg

SEQ ID NO: 2918996 - DNA, 25 bp, Homo sapien
aaaggtcttacaccagttccacagt

SEQ ID NO: 2918997 - DNA, 25 bp, Homo sapien
aaagctcagcgctggaacagatccc

SEQ ID NO: 2918998 - DNA, 25 bp, Homo sapien
cctgttagtagctgggaaaagacaa

SEQ ID NO: 2918999 - DNA, 25 bp, Homo sapien
tgacccttgaggaccgggaaggcaa

SEQ ID NO: 2919000 - DNA, 25 bp, Homo sapien
catcaagctgtcaatggcaatcaag

SEQ ID NO: 2919001 - DNA, 25 bp, Homo sapien
gacctgatccggctttatgacatca

SEQ ID NO: 2919002 - DNA, 25 bp, Homo sapien
gagagcatggccaaaggtctgcaga

SEQ ID NO: 2919003 - DNA, 25 bp, Homo sapien
ggattacagggtcccttgaagccca

SEQ ID NO: 2919004 - DNA, 25 bp, Homo sapien
gctgacgtgtggtgcattccaccta

SEQ ID NO: 2919005 - DNA, 25 bp, Homo sapien
gcttctctgagtataacttgagctg

SEQ ID NO: 2919006 - DNA, 25 bp, Homo sapien
tgggtcagccccaactcgtagtgca

SEQ ID NO: 2919007 - DNA, 25 bp, Homo sapien
tgcccaaagaaggtatctgcaagcc

SEQ ID NO: 2919008 - DNA, 25 bp, Homo sapien
ttatcaggaggcatacacccaaaca

SEQ ID NO: 2919009 - DNA, 25 bp, Homo sapien
tatgtaagtaggcacagagcttgcc

SEQ ID NO: 2919010 - DNA, 25 bp, Homo sapien
tgcaagccaggtacaaaccagcagt

SEQ ID NO: 2919011 - DNA, 25 bp, Homo sapien
cagaatgtgtacgttggggagcagc

SEQ ID NO: 2919012 - DNA, 25 bp, Homo sapien
gccgacagcttccttagtattgaaa

SEQ ID NO: 2919013 - DNA, 25 bp, Homo sapien
aatgtgtacgttggggagcagcgat

SEQ ID NO: 2919014 - DNA, 25 bp, Homo sapien
gacagcttccttagtattgaaatca

SEQ ID NO: 2919015 - DNA, 25 bp, Homo sapien
ttcaccctcagcttctatttgttca

SEQ ID NO: 2919016 - DNA, 25 bp, Homo sapien
tcaccctcagcttctatttgttcac

SEQ ID NO: 2919017 - DNA, 25 bp, Homo sapien
aaggataagagtgagtgtccctgta

SEQ ID NO: 2919018 - DNA, 25 bp, Homo sapien
ggataagagtgagtgtccctgtatt

SEQ ID NO: 2919019 - DNA, 25 bp, Homo sapien
gataagagtgagtgtccctgtattt

SEQ ID NO: 2919020 - DNA, 25 bp, Homo sapien
taagagtgagtgtccctgtattttt

SEQ ID NO: 2919021 - DNA, 25 bp, Homo sapien
ttctttttcagagttgctttaaagc

SEQ ID NO: 2919022 - DNA, 25 bp, Homo sapien
cctcttctttttcagagttgcttta

SEQ ID NO: 2919023 - DNA, 25 bp, Homo sapien
ctttttcagagttgctttaaagctc

SEQ ID NO: 2919024 - DNA, 25 bp, Homo sapien
ttttcagagttgctttaaagctcat

SEQ ID NO: 2919025 - DNA, 25 bp, Homo sapien
caaattggcacagctcaagacacgc

SEQ ID NO: 2919026 - DNA, 25 bp, Homo sapien
taggctgcctggaatacaaattggc

SEQ ID NO: 2919027 - DNA, 25 bp, Homo sapien
gaaactcacgatgggaaccttaggc

SEQ ID NO: 2919028 - DNA, 25 bp, Homo sapien
tagcatgggttttcaggcgagactt

SEQ ID NO: 2919029 - DNA, 25 bp, Homo sapien
ccctctaatgtatgggaaggtgggt

SEQ ID NO: 2919030 - DNA, 25 bp, Homo sapien
ggtgaagcatcagggttatgaatgc

SEQ ID NO: 2919031 - DNA, 25 bp, Homo sapien
gatccttctgtttgtccctctaatg

SEQ ID NO: 2919032 - DNA, 25 bp, Homo sapien
atcaagaaccatagagctgggatcc

SEQ ID NO: 2919033 - DNA, 25 bp, Homo sapien
tggagcaagaaggagttaagtgtaa

SEQ ID NO: 2919034 - DNA, 25 bp, Homo sapien
gagagcaaagaatgggcggggtgca

SEQ ID NO: 2919035 - DNA, 25 bp, Homo sapien
caagaaggagttaagtgtaagaaag

SEQ ID NO: 2919036 - DNA, 25 bp, Homo sapien
ggatctagagtgcagcagaaaagaa

SEQ ID NO: 2919037 - DNA, 25 bp, Homo sapien
taccaagtctatacttatctgtctc

SEQ ID NO: 2919038 - DNA, 25 bp, Homo sapien
gagttatcagaataccaagtctata

SEQ ID NO: 2919039 - DNA, 25 bp, Homo sapien
ccaagtctatacttatctgtctcct

SEQ ID NO: 2919040 - DNA, 25 bp, Homo sapien
acagagttatcagaataccaagtct

SEQ ID NO: 2919041 - DNA, 25 bp, Homo sapien
tacaactcatttacatctgatccca

SEQ ID NO: 2919042 - DNA, 25 bp, Homo sapien
cagggtacaactcatttacatctga

SEQ ID NO: 2919043 - DNA, 25 bp, Homo sapien
cacagggtacaactcatttacatct

SEQ ID NO: 2919044 - DNA, 25 bp, Homo sapien
gggtacaactcatttacatctgatc

SEQ ID NO: 2919045 - DNA, 25 bp, Homo sapien
gtttacagaggctaggagaaataac

SEQ ID NO: 2919046 - DNA, 25 bp, Homo sapien
gcagagtttacagaggctaggagaa

SEQ ID NO: 2919047 - DNA, 25 bp, Homo sapien
tacagaggctaggagaaataacatg

SEQ ID NO: 2919048 - DNA, 25 bp, Homo sapien
cagagtttacagaggctaggagaaa

SEQ ID NO: 2919049 - DNA, 25 bp, Homo sapien
cacggagacagctgtccaggttgat

SEQ ID NO: 2919050 - DNA, 25 bp, Homo sapien
gaaagcacggagacagctgtccagg

SEQ ID NO: 2919051 - DNA, 25 bp, Homo sapien
agcacggagacagctgtccaggttg

SEQ ID NO: 2919052 - DNA, 25 bp, Homo sapien
agtgggtcttacacttggaacagta

SEQ ID NO: 2919053 - DNA, 25 bp, Homo sapien
ctgatcatttacaaattgaaatcac

SEQ ID NO: 2919054 - DNA, 25 bp, Homo sapien
caaattgaaatcacttaaggtgaat

SEQ ID NO: 2919055 - DNA, 25 bp, Homo sapien
atttacaaattgaaatcacttaagg

SEQ ID NO: 2919056 - DNA, 25 bp, Homo sapien
tacaaattgaaatcacttaaggtga

SEQ ID NO: 2919057 - DNA, 25 bp, Homo sapien
cagagagctgggtctcgtggtacca

SEQ ID NO: 2919058 - DNA, 25 bp, Homo sapien
ccaaaaaagcactcggatcaaaact

SEQ ID NO: 2919059 - DNA, 25 bp, Homo sapien
gagctgggtctcgtggtaccaaaaa

SEQ ID NO: 2919060 - DNA, 25 bp, Homo sapien
cactcggatcaaaactttcccgagg

SEQ ID NO: 2919061 - DNA, 25 bp, Homo sapien
atgttagcgctgagtgaggatgggc

SEQ ID NO: 2919062 - DNA, 25 bp, Homo sapien
tgttagcgctgagtgaggatgggct

SEQ ID NO: 2919063 - DNA, 25 bp, Homo sapien
tgatgttagcgctgagtgaggatgg

SEQ ID NO: 2919064 - DNA, 25 bp, Homo sapien
tagcgctgagtgaggatgggctttt

SEQ ID NO: 2919065 - DNA, 25 bp, Homo sapien
cgaagcaggaggttcacttgggtgc

SEQ ID NO: 2919066 - DNA, 25 bp, Homo sapien
caggaggttcacttgggtgcaggag

SEQ ID NO: 2919067 - DNA, 25 bp, Homo sapien
ccgaagcaggaggttcacttgggtg

SEQ ID NO: 2919068 - DNA, 25 bp, Homo sapien
ggttcacttgggtgcaggagttcga

SEQ ID NO: 2919069 - DNA, 25 bp, Homo sapien
gctcctccccaaagtccgtgggctg

SEQ ID NO: 2919070 - DNA, 25 bp, Homo sapien
gggctgctattagggctgctgtttt

SEQ ID NO: 2919071 - DNA, 25 bp, Homo sapien
ttgctgccaatctggggcagccgga

SEQ ID NO: 2919072 - DNA, 25 bp, Homo sapien
aagtccgtgggctgctattagggct

SEQ ID NO: 2919073 - DNA, 25 bp, Homo sapien
tgcccagccccattctctttgctgg

SEQ ID NO: 2919074 - DNA, 25 bp, Homo sapien
cagccccattctctttgctggcatc

SEQ ID NO: 2919075 - DNA, 25 bp, Homo sapien
cccagccccattctctttgctggca

SEQ ID NO: 2919076 - DNA, 25 bp, Homo sapien
ttgctggcatccaagttcttcttac

SEQ ID NO: 2919077 - DNA, 25 bp, Homo sapien
tatgccctcggctcaaggcgtcagc

SEQ ID NO: 2919078 - DNA, 25 bp, Homo sapien
cgcatatgccctcggctcaaggcgt

SEQ ID NO: 2919079 - DNA, 25 bp, Homo sapien
catatgccctcggctcaaggcgtca

SEQ ID NO: 2919080 - DNA, 25 bp, Homo sapien
tgccctcggctcaaggcgtcagcca

SEQ ID NO: 2919081 - DNA, 25 bp, Homo sapien
ctgaggagtgaccagctctggttgg

SEQ ID NO: 2919082 - DNA, 25 bp, Homo sapien
ttcatgctcataaaggaatccattg

SEQ ID NO: 2919083 - DNA, 25 bp, Homo sapien
gcttcatgctcataaaggaatccat

SEQ ID NO: 2919084 - DNA, 25 bp, Homo sapien
tgcttcatgctcataaaggaatcca

SEQ ID NO: 2919085 - DNA, 25 bp, Homo sapien
atgcttcatgctcataaaggaatcc

SEQ ID NO: 2919086 - DNA, 25 bp, Homo sapien
cagtttgggtttttcgcataagtga

SEQ ID NO: 2919087 - DNA, 25 bp, Homo sapien
gccattgtagcagtaccacttgcag

SEQ ID NO: 2919088 - DNA, 25 bp, Homo sapien
ttcgcataagtgacgtaacggcccc

SEQ ID NO: 2919089 - DNA, 25 bp, Homo sapien
tttttcgcataagtgacgtaacggc

SEQ ID NO: 2919090 - DNA, 25 bp, Homo sapien
tcatccatactgcttgtgtctgcca

SEQ ID NO: 2919091 - DNA, 25 bp, Homo sapien
gaaattgtgcgtagtctatcctctg

SEQ ID NO: 2919092 - DNA, 25 bp, Homo sapien
tagaaaagaatgtaggcagagtcgg

SEQ ID NO: 2919093 - DNA, 25 bp, Homo sapien
tgtaatcagactcaaagtcttcatc

SEQ ID NO: 2919094 - DNA, 25 bp, Homo sapien
aattcttatttggtcccaggtggct

SEQ ID NO: 2919095 - DNA, 25 bp, Homo sapien
ttcttatttggtcccaggtggctgg

SEQ ID NO: 2919096 - DNA, 25 bp, Homo sapien
attcttatttggtcccaggtggctg

SEQ ID NO: 2919097 - DNA, 25 bp, Homo sapien
ttaagagagcctccctttcagactg

SEQ ID NO: 2919098 - DNA, 25 bp, Homo sapien
aagatggtgcaaatattggcaactg

SEQ ID NO: 2919099 - DNA, 25 bp, Homo sapien
catgtgaagatggtgcaaatattgg

SEQ ID NO: 2919100 - DNA, 25 bp, Homo sapien
aaatattggcaactgctccccttcc

SEQ ID NO: 2919101 - DNA, 25 bp, Homo sapien
tgcaaatattggcaactgctcccct

SEQ ID NO: 2919102 - DNA, 25 bp, Homo sapien
gaactcctaatgtctgggatgtgtt

SEQ ID NO: 2919103 - DNA, 25 bp, Homo sapien
acttatgaactcctaatgtctggga

SEQ ID NO: 2919104 - DNA, 25 bp, Homo sapien
agtggacatgcaaacaaagcaaaac

SEQ ID NO: 2919105 - DNA, 25 bp, Homo sapien
caacttgcagggtctaaatgaataa

SEQ ID NO: 2919106 - DNA, 25 bp, Homo sapien
ttttaatgggacatgtccaggtagg

SEQ ID NO: 2919107 - DNA, 25 bp, Homo sapien
ctttttaatgggacatgtccaggta

SEQ ID NO: 2919108 - DNA, 25 bp, Homo sapien
cactttttaatgggacatgtccagg

SEQ ID NO: 2919109 - DNA, 25 bp, Homo sapien
actttttaatgggacatgtccaggt

SEQ ID NO: 2919110 - DNA, 25 bp, Homo sapien
tgtaccttatacagctgccttggat

SEQ ID NO: 2919111 - DNA, 25 bp, Homo sapien
tctcttctacagtccggaacgatct

SEQ ID NO: 2919112 - DNA, 25 bp, Homo sapien
ccagcatacaggagatagtcaagaa

SEQ ID NO: 2919113 - DNA, 25 bp, Homo sapien
gcatttctctcctgatgaagttgga

SEQ ID NO: 2919114 - DNA, 25 bp, Homo sapien
tctgccgaagccatgcccaagcagt

SEQ ID NO: 2919115 - DNA, 25 bp, Homo sapien
tgcccaagcagttccctttgcctgg

SEQ ID NO: 2919116 - DNA, 25 bp, Homo sapien
gttctctgccgaagccatgcccaag

SEQ ID NO: 2919117 - DNA, 25 bp, Homo sapien
gaagccatgcccaagcagttccctt

SEQ ID NO: 2919118 - DNA, 25 bp, Homo sapien
cattagaaacttgttctgacaccag

SEQ ID NO: 2919119 - DNA, 25 bp, Homo sapien
ttctgctttagtagactgggagcaa

SEQ ID NO: 2919120 - DNA, 25 bp, Homo sapien
ggttcatgtcacctaacgcccagtc

SEQ ID NO: 2919121 - DNA, 25 bp, Homo sapien
agaggccagagaaccttggaggcct

SEQ ID NO: 2919122 - DNA, 25 bp, Homo sapien
tatcagagcttgaatagagaatccc

SEQ ID NO: 2919123 - DNA, 25 bp, Homo sapien
tcgctgagggagagacgataagcca

SEQ ID NO: 2919124 - DNA, 25 bp, Homo sapien
tttcagattgggtgtccagagggcc

SEQ ID NO: 2919125 - DNA, 25 bp, Homo sapien
tgacccaagtgagtgcctgaagcca

SEQ ID NO: 2919126 - DNA, 25 bp, Homo sapien
acgtggggctgttggtgaacttcca

SEQ ID NO: 2919127 - DNA, 25 bp, Homo sapien
agggatgggaactcctccagcaact

SEQ ID NO: 2919128 - DNA, 25 bp, Homo sapien
gctgatggagtaaaacctgggcttc

SEQ ID NO: 2919129 - DNA, 25 bp, Homo sapien
acttccacttgctgtactctgagga

SEQ ID NO: 2919130 - DNA, 25 bp, Homo sapien
tgtgcgtgctcatgagcgtggccct

SEQ ID NO: 2919131 - DNA, 25 bp, Homo sapien
tactgctgtgcgtgctcatgagcgt

SEQ ID NO: 2919132 - DNA, 25 bp, Homo sapien
ggtggctactgctgtgcgtgctcat

SEQ ID NO: 2919133 - DNA, 25 bp, Homo sapien
gctcatgagcgtggcccttgctggt

SEQ ID NO: 2919134 - DNA, 25 bp, Homo sapien
cagttgttgagccatgtgccgcaga

SEQ ID NO: 2919135 - DNA, 25 bp, Homo sapien
catgtgccgcagacgccgtggtgca

SEQ ID NO: 2919136 - DNA, 25 bp, Homo sapien
acaaagcaggacacttggtcttggg

SEQ ID NO: 2919137 - DNA, 25 bp, Homo sapien
ttccgcacaaagcaggacacttggt

SEQ ID NO: 2919138 - DNA, 25 bp, Homo sapien
ggacacgaggatgggaggggtcctc

SEQ ID NO: 2919139 - DNA, 25 bp, Homo sapien
caggcccgatgaggacacgaggatg

SEQ ID NO: 2919140 - DNA, 25 bp, Homo sapien
aggacacgaggatgggaggggtcct

SEQ ID NO: 2919141 - DNA, 25 bp, Homo sapien
ccgatgaggacacgaggatgggagg

SEQ ID NO: 2919142 - DNA, 25 bp, Homo sapien
ctcatttgggctgcggcactcgaac

SEQ ID NO: 2919143 - DNA, 25 bp, Homo sapien
tcgaacaccggggtcatgcggcctc

SEQ ID NO: 2919144 - DNA, 25 bp, Homo sapien
tggtcctcatttgggctgcggcact

SEQ ID NO: 2919145 - DNA, 25 bp, Homo sapien
tttgggctgcggcactcgaacaccg

SEQ ID NO: 2919146 - DNA, 25 bp, Homo sapien
cacggagcacctcgctggccagctg

SEQ ID NO: 2919147 - DNA, 25 bp, Homo sapien
ggagcacacggagcacctcgctggc

SEQ ID NO: 2919148 - DNA, 25 bp, Homo sapien
cggagcacctcgctggccagctgct

SEQ ID NO: 2919149 - DNA, 25 bp, Homo sapien
tccttgtggagcacacggagcacct

SEQ ID NO: 2919150 - DNA, 25 bp, Homo sapien
caccagctgctagggtgtgggccac

SEQ ID NO: 2919151 - DNA, 25 bp, Homo sapien
gcagccaccagctgctagggtgtgg

SEQ ID NO: 2919152 - DNA, 25 bp, Homo sapien
ccaccagctgctagggtgtgggcca

SEQ ID NO: 2919153 - DNA, 25 bp, Homo sapien
ctaggcagccaccagctgctagggt

SEQ ID NO: 2919154 - DNA, 25 bp, Homo sapien
gaaagaaatagtcctcgacctgctc

SEQ ID NO: 2919155 - DNA, 25 bp, Homo sapien
ctgaaagaaatagtcctcgacctgc

SEQ ID NO: 2919156 - DNA, 25 bp, Homo sapien
gaaatagtcctcgacctgctcctca

SEQ ID NO: 2919157 - DNA, 25 bp, Homo sapien
aagaaatagtcctcgacctgctcct

SEQ ID NO: 2919158 - DNA, 25 bp, Homo sapien
ccaaagatatcgtcatggaagtgct

SEQ ID NO: 2919159 - DNA, 25 bp, Homo sapien
tatcgtcatggaagtgcttctggct

SEQ ID NO: 2919160 - DNA, 25 bp, Homo sapien
agcaccaaagatatcgtcatggaag

SEQ ID NO: 2919161 - DNA, 25 bp, Homo sapien
gcttgatggggaacgaggtgagaaa

SEQ ID NO: 2919162 - DNA, 25 bp, Homo sapien
aagagctgcactgtcaaggccgaca

SEQ ID NO: 2919163 - DNA, 25 bp, Homo sapien
agaggctcagcacatggcatcgcac

SEQ ID NO: 2919164 - DNA, 25 bp, Homo sapien
agctctgctttgacttccaggtagg

SEQ ID NO: 2919165 - DNA, 25 bp, Homo sapien
cggtctctgggcacaaccaggaaca

SEQ ID NO: 2919166 - DNA, 25 bp, Homo sapien
gagtgggtgggctgatgggcccttc

SEQ ID NO: 2919167 - DNA, 25 bp, Homo sapien
gccttggcaaagagcttcccgaggg

SEQ ID NO: 2919168 - DNA, 25 bp, Homo sapien
ggctgatgggcccttcctgagtggg

SEQ ID NO: 2919169 - DNA, 25 bp, Homo sapien
ttggcaaagagcttcccgaggggct

SEQ ID NO: 2919170 - DNA, 25 bp, Homo sapien
cggcatcgggggcggcatcgggggc

SEQ ID NO: 2919171 - DNA, 25 bp, Homo sapien
aagggctcctgcggcatcgggggcg

SEQ ID NO: 2919172 - DNA, 25 bp, Homo sapien
ctgcggcatcgggggcggcatcggg

SEQ ID NO: 2919173 - DNA, 25 bp, Homo sapien
ctcctgcggcatcgggggcggcatc

SEQ ID NO: 2919174 - DNA, 25 bp, Homo sapien
tccctcctcggcaccatgagcacct

SEQ ID NO: 2919175 - DNA, 25 bp, Homo sapien
ctcctcggcaccatgagcacctgca

SEQ ID NO: 2919176 - DNA, 25 bp, Homo sapien
atgagcacctgcagccgccagttca

SEQ ID NO: 2919177 - DNA, 25 bp, Homo sapien
ctccctcctcggcaccatgagcacc

SEQ ID NO: 2919178 - DNA, 25 bp, Homo sapien
ttgctggcagatttggggagcccac

SEQ ID NO: 2919179 - DNA, 25 bp, Homo sapien
ctttgctggcagatttggggagccc

SEQ ID NO: 2919180 - DNA, 25 bp, Homo sapien
tttgctggcagatttggggagccca

SEQ ID NO: 2919181 - DNA, 25 bp, Homo sapien
tgctggcagatttggggagcccaca

SEQ ID NO: 2919182 - DNA, 25 bp, Homo sapien
tcaggctccaggttaggccacggtt

SEQ ID NO: 2919183 - DNA, 25 bp, Homo sapien
tggccgggctgtttgcagctccttg

SEQ ID NO: 2919184 - DNA, 25 bp, Homo sapien
tcctgcagtatcgggggcagcatcg

SEQ ID NO: 2919185 - DNA, 25 bp, Homo sapien
cagtatcgggggcagcatcgggggc

SEQ ID NO: 2919186 - DNA, 25 bp, Homo sapien
ggctcctgcagtatcgggggcagca

SEQ ID NO: 2919187 - DNA, 25 bp, Homo sapien
cagatccatgaagggctcctgcagt

SEQ ID NO: 2919188 - DNA, 25 bp, Homo sapien
tgagcacctgcagccaccagttcac

SEQ ID NO: 2919189 - DNA, 25 bp, Homo sapien
ctccttggcacgatgagcacctgca

SEQ ID NO: 2919190 - DNA, 25 bp, Homo sapien
tccctccttggcacgatgagcacct

SEQ ID NO: 2919191 - DNA, 25 bp, Homo sapien
ctccctccttggcacgatgagcacc

SEQ ID NO: 2919192 - DNA, 25 bp, Homo sapien
tgagccagcacacagcggagttgat

SEQ ID NO: 2919193 - DNA, 25 bp, Homo sapien
gctccacactctcaaagctgggtgg

SEQ ID NO: 2919194 - DNA, 25 bp, Homo sapien
tctctcagctccacactctcaaagc

SEQ ID NO: 2919195 - DNA, 25 bp, Homo sapien
cacagcggagttgatcctgggctga

SEQ ID NO: 2919196 - DNA, 25 bp, Homo sapien
gggcggtagaggagtggaggagcta

SEQ ID NO: 2919197 - DNA, 25 bp, Homo sapien
cgcgtagcggttcgggagggtgcca

SEQ ID NO: 2919198 - DNA, 25 bp, Homo sapien
cctgtgattaggagagggcggtaga

SEQ ID NO: 2919199 - DNA, 25 bp, Homo sapien
gccagtgtgtagaggtgagtgtgag

SEQ ID NO: 2919200 - DNA, 25 bp, Homo sapien
tgcagtggcaggacggggctccctc

SEQ ID NO: 2919201 - DNA, 25 bp, Homo sapien
gctgcagtggcaggacggggctccc

SEQ ID NO: 2919202 - DNA, 25 bp, Homo sapien
tggctgcagtggcaggacggggctc

SEQ ID NO: 2919203 - DNA, 25 bp, Homo sapien
ctggctgcagtggcaggacggggct

SEQ ID NO: 2919204 - DNA, 25 bp, Homo sapien
tgggaacggatccccagccagtcct

SEQ ID NO: 2919205 - DNA, 25 bp, Homo sapien
ccagtcctgtttctacagggtaggg

SEQ ID NO: 2919206 - DNA, 25 bp, Homo sapien
aactctgaggcccacggcggggtca

SEQ ID NO: 2919207 - DNA, 25 bp, Homo sapien
gagagaactgctgggaacggatccc

SEQ ID NO: 2919208 - DNA, 25 bp, Homo sapien
agtgggcccatgaccggtgctctcc

SEQ ID NO: 2919209 - DNA, 25 bp, Homo sapien
tgagtgggcccatgaccggtgctct

SEQ ID NO: 2919210 - DNA, 25 bp, Homo sapien
cctgagtgggcccatgaccggtgct

SEQ ID NO: 2919211 - DNA, 25 bp, Homo sapien
gtgcctgagtgggcccatgaccggt

SEQ ID NO: 2919212 - DNA, 25 bp, Homo sapien
tgagagttgggtatactggccccgc

SEQ ID NO: 2919213 - DNA, 25 bp, Homo sapien
cagacctcatgccagtgatcgtggg

SEQ ID NO: 2919214 - DNA, 25 bp, Homo sapien
tgtctctggttacccctctgtcccc

SEQ ID NO: 2919215 - DNA, 25 bp, Homo sapien
tgaggaggccccgtcttggtgccca

SEQ ID NO: 2919216 - DNA, 25 bp, Homo sapien
gggagatgtagcagcgacaaaaccc

SEQ ID NO: 2919217 - DNA, 25 bp, Homo sapien
aaaaccctggttctgctgagacaag

SEQ ID NO: 2919218 - DNA, 25 bp, Homo sapien
gagacaaggaattgcctgccccagt

SEQ ID NO: 2919219 - DNA, 25 bp, Homo sapien
tagcagcgacaaaaccctggttctg

SEQ ID NO: 2919220 - DNA, 25 bp, Homo sapien
gaaggcatgtgcatccattctgctc

SEQ ID NO: 2919221 - DNA, 25 bp, Homo sapien
aaggcatgtgcatccattctgctct

SEQ ID NO: 2919222 - DNA, 25 bp, Homo sapien
gcatgtgcatccattctgctcttac

SEQ ID NO: 2919223 - DNA, 25 bp, Homo sapien
ggaactcggagactggggccagcgt

SEQ ID NO: 2919224 - DNA, 25 bp, Homo sapien
ggcccaccctgacacctgaacgctg

SEQ ID NO: 2919225 - DNA, 25 bp, Homo sapien
gaacgctgaggtttttgtccaagat

SEQ ID NO: 2919226 - DNA, 25 bp, Homo sapien
gggtctgtggttggactggaactcc

SEQ ID NO: 2919227 - DNA, 25 bp, Homo sapien
cacctgaacgctgaggtttttgtcc

SEQ ID NO: 2919228 - DNA, 25 bp, Homo sapien
tccctggcggtctggatcctctttg

SEQ ID NO: 2919229 - DNA, 25 bp, Homo sapien
ggtctggatcctctttggttcccca

SEQ ID NO: 2919230 - DNA, 25 bp, Homo sapien
agctgttgctcaggatgcggacagg

SEQ ID NO: 2919231 - DNA, 25 bp, Homo sapien
ctcaggatgcggacagggcagagtg

SEQ ID NO: 2919232 - DNA, 25 bp, Homo sapien
tttccataggagatgaacgccccgc

SEQ ID NO: 2919233 - DNA, 25 bp, Homo sapien
atcaatgtggagatgggcgctgccc

SEQ ID NO: 2919234 - DNA, 25 bp, Homo sapien
tacgtgagcagtatgagaagatggc

SEQ ID NO: 2919235 - DNA, 25 bp, Homo sapien
tgagcctcatcctgaacgagatacg

SEQ ID NO: 2919236 - DNA, 25 bp, Homo sapien
cagtgttagctgctggaataaggtg

SEQ ID NO: 2919237 - DNA, 25 bp, Homo sapien
gtacattcagaatgtcgccacagat

SEQ ID NO: 2919238 - DNA, 25 bp, Homo sapien
cattcagaatgtcgccacagattaa

SEQ ID NO: 2919239 - DNA, 25 bp, Homo sapien
taaggtgtttgtccagtacattcag

SEQ ID NO: 2919240 - DNA, 25 bp, Homo sapien
cagtgcggatactgacttgtgttcc

SEQ ID NO: 2919241 - DNA, 25 bp, Homo sapien
tgaacgtgtgctgtaagtgaacccg

SEQ ID NO: 2919242 - DNA, 25 bp, Homo sapien
aaagcttgggtaatattcagtgcgg

SEQ ID NO: 2919243 - DNA, 25 bp, Homo sapien
tagttagcggaagccttttcatggg

SEQ ID NO: 2919244 - DNA, 25 bp, Homo sapien
tcaatgatcagaaaacggaaaagtc

SEQ ID NO: 2919245 - DNA, 25 bp, Homo sapien
tcactaggattctctcagagagtca

SEQ ID NO: 2919246 - DNA, 25 bp, Homo sapien
gcatctgtaaccatctgatcaatga

SEQ ID NO: 2919247 - DNA, 25 bp, Homo sapien
taaggaatgttctcagtatcatcta

SEQ ID NO: 2919248 - DNA, 25 bp, Homo sapien
tatgatgtgccatgttctgaatagg

SEQ ID NO: 2919249 - DNA, 25 bp, Homo sapien
ttttcagtctagaagaatgtcatca

SEQ ID NO: 2919250 - DNA, 25 bp, Homo sapien
ggtcaaggacacgtgcatttttcag

SEQ ID NO: 2919251 - DNA, 25 bp, Homo sapien
taattgttggtactgagcgttcaca

SEQ ID NO: 2919252 - DNA, 25 bp, Homo sapien
ctgtaaccggtgtgatcaatcagtt

SEQ ID NO: 2919253 - DNA, 25 bp, Homo sapien
gaaagcagtgcttactaaggaccta

SEQ ID NO: 2919254 - DNA, 25 bp, Homo sapien
tcttattttttgtcacagcgtagac

SEQ ID NO: 2919255 - DNA, 25 bp, Homo sapien
taaaagagaaatggcactatttgtc

SEQ ID NO: 2919256 - DNA, 25 bp, Homo sapien
ggatacctaatctgtctttatcaga

SEQ ID NO: 2919257 - DNA, 25 bp, Homo sapien
tgaagtaagcctacgagagccacag

SEQ ID NO: 2919258 - DNA, 25 bp, Homo sapien
tgtcaggaacccacctagaggctgg

SEQ ID NO: 2919259 - DNA, 25 bp, Homo sapien
gaaccgtggaggaactgtacaccca

SEQ ID NO: 2919260 - DNA, 25 bp, Homo sapien
cattcagagtgaaaaggatcggtca

SEQ ID NO: 2919261 - DNA, 25 bp, Homo sapien
tgctgtgtgccgtgctagacttcag

SEQ ID NO: 2919262 - DNA, 25 bp, Homo sapien
tagacttcaggcctcaaccctgaga

SEQ ID NO: 2919263 - DNA, 25 bp, Homo sapien
ttcccgaatgtacccattcgacagg

SEQ ID NO: 2919264 - DNA, 25 bp, Homo sapien
cggtaaccggcctgggaatcagaca

SEQ ID NO: 2919265 - DNA, 25 bp, Homo sapien
ttttcagctcttgccgcacgtgcag

SEQ ID NO: 2919266 - DNA, 25 bp, Homo sapien
caggaataggcccagacagtgcatc

SEQ ID NO: 2919267 - DNA, 25 bp, Homo sapien
agtctcaagggttctgggccggtca

SEQ ID NO: 2919268 - DNA, 25 bp, Homo sapien
cttgtggcacaagcgtgaagctcag

SEQ ID NO: 2919269 - DNA, 25 bp, Homo sapien
tatgcatgctgacacgaacttgctc

SEQ ID NO: 2919270 - DNA, 25 bp, Homo sapien
catgctgacacgaacttgctcggag

SEQ ID NO: 2919271 - DNA, 25 bp, Homo sapien
tgcatgctgacacgaacttgctcgg

SEQ ID NO: 2919272 - DNA, 25 bp, Homo sapien
ctgacacgaacttgctcggaggcat

SEQ ID NO: 2919273 - DNA, 25 bp, Homo sapien
ggtgcttgggccctacatgcttctt

SEQ ID NO: 2919274 - DNA, 25 bp, Homo sapien
ctctcatgcctgtgcttggggttaa

SEQ ID NO: 2919275 - DNA, 25 bp, Homo sapien
ttgggccctacatgcttcttgtggg

SEQ ID NO: 2919276 - DNA, 25 bp, Homo sapien
tcatgcctgtgcttggggttaagag

SEQ ID NO: 2919277 - DNA, 25 bp, Homo sapien
tgccacagggccacagcggggacac

SEQ ID NO: 2919278 - DNA, 25 bp, Homo sapien
gacactgcccggggtgactgagcat

SEQ ID NO: 2919279 - DNA, 25 bp, Homo sapien
cacagggccacagcggggacactgc

SEQ ID NO: 2919280 - DNA, 25 bp, Homo sapien
ggccacagcggggacactgcccggg

SEQ ID NO: 2919281 - DNA, 25 bp, Homo sapien
caggttgtaggcctcccagcaagcc

SEQ ID NO: 2919282 - DNA, 25 bp, Homo sapien
tcatctcgcgccaggttgtaggcct

SEQ ID NO: 2919283 - DNA, 25 bp, Homo sapien
caagccgtcatctcgcgccaggttg

SEQ ID NO: 2919284 - DNA, 25 bp, Homo sapien
cagcaagcctctttgtcaaccttgg

SEQ ID NO: 2919285 - DNA, 25 bp, Homo sapien
tccttgcccgatacggacgatggtg

SEQ ID NO: 2919286 - DNA, 25 bp, Homo sapien
ttccactccttgcccgatacggacg

SEQ ID NO: 2919287 - DNA, 25 bp, Homo sapien
cactccttgcccgatacggacgatg

SEQ ID NO: 2919288 - DNA, 25 bp, Homo sapien
ccttgcccgatacggacgatggtgg

SEQ ID NO: 2919289 - DNA, 25 bp, Homo sapien
caaactccttagtgaaatcctgtat

SEQ ID NO: 2919290 - DNA, 25 bp, Homo sapien
ctggagtcttcttcagttcactttt

SEQ ID NO: 2919291 - DNA, 25 bp, Homo sapien
tccagctccttctgatcactgatca

SEQ ID NO: 2919292 - DNA, 25 bp, Homo sapien
gttcacttttcattacatctccctc

SEQ ID NO: 2919293 - DNA, 25 bp, Homo sapien
cacatgcaaaggcaaccataactgc

SEQ ID NO: 2919294 - DNA, 25 bp, Homo sapien
gcaccgactccacatgcaaaggcaa

SEQ ID NO: 2919295 - DNA, 25 bp, Homo sapien
gcagggctgtgccatagtgagcacc

SEQ ID NO: 2919296 - DNA, 25 bp, Homo sapien
tgtgccatagtgagcaccgactcca

SEQ ID NO: 2919297 - DNA, 25 bp, Homo sapien
ctgaagcagcaacctctcgaagtgg

SEQ ID NO: 2919298 - DNA, 25 bp, Homo sapien
tgaagcagcaacctctcgaagtggg

SEQ ID NO: 2919299 - DNA, 25 bp, Homo sapien
gcaacctctcgaagtggggaagcaa

SEQ ID NO: 2919300 - DNA, 25 bp, Homo sapien
acctctcgaagtggggaagcaacag

SEQ ID NO: 2919301 - DNA, 25 bp, Homo sapien
gaaaaggctctcactccctccattc

SEQ ID NO: 2919302 - DNA, 25 bp, Homo sapien
cggaaaaggctctcactccctccat

SEQ ID NO: 2919303 - DNA, 25 bp, Homo sapien
tgtcggaaaaggctctcactccctc

SEQ ID NO: 2919304 - DNA, 25 bp, Homo sapien
gtcggaaaaggctctcactccctcc

SEQ ID NO: 2919305 - DNA, 25 bp, Homo sapien
ctgggtgcgccttcttacaaagggc

SEQ ID NO: 2919306 - DNA, 25 bp, Homo sapien
tgggtgcgccttcttacaaagggcc

SEQ ID NO: 2919307 - DNA, 25 bp, Homo sapien
gggtgcgccttcttacaaagggcca

SEQ ID NO: 2919308 - DNA, 25 bp, Homo sapien
gcctgccccgggctgtcctgtggta

SEQ ID NO: 2919309 - DNA, 25 bp, Homo sapien
ccccgatgggatctctggtgtggcc

SEQ ID NO: 2919310 - DNA, 25 bp, Homo sapien
gggctcccgaatctcctcctggaca

SEQ ID NO: 2919311 - DNA, 25 bp, Homo sapien
gtgtctgtgcctccatgggctcccg

SEQ ID NO: 2919312 - DNA, 25 bp, Homo sapien
tttggctcgacagccggtgccgcaa

SEQ ID NO: 2919313 - DNA, 25 bp, Homo sapien
ccatgctggctttggctcgacagcc

SEQ ID NO: 2919314 - DNA, 25 bp, Homo sapien
gccggtgccgcaagtgctgctatgt

SEQ ID NO: 2919315 - DNA, 25 bp, Homo sapien
ccgcaagtgctgctatgtctgcgta

SEQ ID NO: 2919316 - DNA, 25 bp, Homo sapien
ctccagcattaaggccagtggctac

SEQ ID NO: 2919317 - DNA, 25 bp, Homo sapien
cagccacgttttcagctccagcatt

SEQ ID NO: 2919318 - DNA, 25 bp, Homo sapien
ttttcagctccagcattaaggccag

SEQ ID NO: 2919319 - DNA, 25 bp, Homo sapien
gccacgttttcagctccagcattaa

SEQ ID NO: 2919320 - DNA, 25 bp, Homo sapien
gtggttccggcgaatgagagaagcc

SEQ ID NO: 2919321 - DNA, 25 bp, Homo sapien
tggttccggcgaatgagagaagcct

SEQ ID NO: 2919322 - DNA, 25 bp, Homo sapien
ggagaagattgcgtctgagagcagg

SEQ ID NO: 2919323 - DNA, 25 bp, Homo sapien
aggagaagattgcgtctgagagcag

SEQ ID NO: 2919324 - DNA, 25 bp, Homo sapien
gaggagaagattgcgtctgagagca

SEQ ID NO: 2919325 - DNA, 25 bp, Homo sapien
ttaagagcccgttcggggcagcaca

SEQ ID NO: 2919326 - DNA, 25 bp, Homo sapien
taagagcccgttcggggcagcacat

SEQ ID NO: 2919327 - DNA, 25 bp, Homo sapien
gagcacaacagctgtctttaaaagc

SEQ ID NO: 2919328 - DNA, 25 bp, Homo sapien
agagcctggagcacaacagctgtct

SEQ ID NO: 2919329 - DNA, 25 bp, Homo sapien
aaagctttccttgctgtaccctttg

SEQ ID NO: 2919330 - DNA, 25 bp, Homo sapien
ttccttgctgtaccctttggagcca

SEQ ID NO: 2919331 - DNA, 25 bp, Homo sapien
gtagtgcggcagctcatcgtacctc

SEQ ID NO: 2919332 - DNA, 25 bp, Homo sapien
gccatccgcgatgcttgggtagtgc

SEQ ID NO: 2919333 - DNA, 25 bp, Homo sapien
tgcggcagctcatcgtacctccggg

SEQ ID NO: 2919334 - DNA, 25 bp, Homo sapien
tgcttgggtagtgcggcagctcatc

SEQ ID NO: 2919335 - DNA, 25 bp, Homo sapien
ggagagcatgtagccagttcacatt

SEQ ID NO: 2919336 - DNA, 25 bp, Homo sapien
tcacggggagagcatgtagccagtt

SEQ ID NO: 2919337 - DNA, 25 bp, Homo sapien
caggccgtcgctgtccaagcctggg

SEQ ID NO: 2919338 - DNA, 25 bp, Homo sapien
cggggagagcatgtagccagttcac

SEQ ID NO: 2919339 - DNA, 25 bp, Homo sapien
accgcagcacttggatggcctggat

SEQ ID NO: 2919340 - DNA, 25 bp, Homo sapien
ctccagcaggtggaaccgcagcact

SEQ ID NO: 2919341 - DNA, 25 bp, Homo sapien
ggtcgatgggcatctttcccttctc

SEQ ID NO: 2919342 - DNA, 25 bp, Homo sapien
cgatgggcatctttcccttctccag

SEQ ID NO: 2919343 - DNA, 25 bp, Homo sapien
gtagtcctcgaagtcctccctgcag

SEQ ID NO: 2919344 - DNA, 25 bp, Homo sapien
tgggtagtcctcgaagtcctccctg

SEQ ID NO: 2919345 - DNA, 25 bp, Homo sapien
ggctgggtagtcctcgaagtcctcc

SEQ ID NO: 2919346 - DNA, 25 bp, Homo sapien
gaggctgggtagtcctcgaagtcct

SEQ ID NO: 2919347 - DNA, 25 bp, Homo sapien
tggagttgtccccactctgggaggc

SEQ ID NO: 2919348 - DNA, 25 bp, Homo sapien
ggagttgtccccactctgggaggcc

SEQ ID NO: 2919349 - DNA, 25 bp, Homo sapien
tgggaggccaggcccccgctggatg

SEQ ID NO: 2919350 - DNA, 25 bp, Homo sapien
gaggccaggcccccgctggatggac

SEQ ID NO: 2919351 - DNA, 25 bp, Homo sapien
tggtgtccagcccgactccttggtc

SEQ ID NO: 2919352 - DNA, 25 bp, Homo sapien
ctggtgtccagcccgactccttggt

SEQ ID NO: 2919353 - DNA, 25 bp, Homo sapien
ggtgtccagcccgactccttggtca

SEQ ID NO: 2919354 - DNA, 25 bp, Homo sapien
gtgtccagcccgactccttggtcac

SEQ ID NO: 2919355 - DNA, 25 bp, Homo sapien
aacaaccaggctcgcatgatgttgg

SEQ ID NO: 2919356 - DNA, 25 bp, Homo sapien
ggaacaaccaggctcgcatgatgtt

SEQ ID NO: 2919357 - DNA, 25 bp, Homo sapien
caggctcgcatgatgttggtggcca

SEQ ID NO: 2919358 - DNA, 25 bp, Homo sapien
caaccaggctcgcatgatgttggtg

SEQ ID NO: 2919359 - DNA, 25 bp, Homo sapien
ctccgggcattaatgaaccagttgt

SEQ ID NO: 2919360 - DNA, 25 bp, Homo sapien
gggcattaatgaaccagttgttgac

SEQ ID NO: 2919361 - DNA, 25 bp, Homo sapien
cgggcattaatgaaccagttgttga

SEQ ID NO: 2919362 - DNA, 25 bp, Homo sapien
tccgggcattaatgaaccagttgtt

SEQ ID NO: 2919363 - DNA, 25 bp, Homo sapien
tctcggtatagcccccgatgggctg

SEQ ID NO: 2919364 - DNA, 25 bp, Homo sapien
tggattgatcgatcataggttgcac

SEQ ID NO: 2919365 - DNA, 25 bp, Homo sapien
tgcggttggattgatcgatcatagg

SEQ ID NO: 2919366 - DNA, 25 bp, Homo sapien
gttggattgatcgatcataggttgc

SEQ ID NO: 2919367 - DNA, 25 bp, Homo sapien
tctgcctccatgtcgcatgtggtgg

SEQ ID NO: 2919368 - DNA, 25 bp, Homo sapien
aagcccctatatttagcctctgcct

SEQ ID NO: 2919369 - DNA, 25 bp, Homo sapien
gtataaagtgcttcatctacctaat

SEQ ID NO: 2919370 - DNA, 25 bp, Homo sapien
tcatctacctaattctctgaagtct

SEQ ID NO: 2919371 - DNA, 25 bp, Homo sapien
acatcaacacgtagattactctaag

SEQ ID NO: 2919372 - DNA, 25 bp, Homo sapien
attatcttgtgtgaatttgggtctg

SEQ ID NO: 2919373 - DNA, 25 bp, Homo sapien
gtagattactctaagacatgctcgg

SEQ ID NO: 2919374 - DNA, 25 bp, Homo sapien
gagaaaagttgcagctaaacattac

SEQ ID NO: 2919375 - DNA, 25 bp, Homo sapien
tgccctgcatggaggtttgttctgc

SEQ ID NO: 2919376 - DNA, 25 bp, Homo sapien
gtttgttctgcccgaaatgccccat

SEQ ID NO: 2919377 - DNA, 25 bp, Homo sapien
ccctgcatggaggtttgttctgccc

SEQ ID NO: 2919378 - DNA, 25 bp, Homo sapien
tgtgccctgcatggaggtttgttct

SEQ ID NO: 2919379 - DNA, 25 bp, Homo sapien
ggcctcctccccagggccccagctc

SEQ ID NO: 2919380 - DNA, 25 bp, Homo sapien
tgtctggggcctcctccccagggcc

SEQ ID NO: 2919381 - DNA, 25 bp, Homo sapien
gatgtctggggcctcctccccaggg

SEQ ID NO: 2919382 - DNA, 25 bp, Homo sapien
cctcctccccagggccccagctcat

SEQ ID NO: 2919383 - DNA, 25 bp, Homo sapien
tcctcagacaggccgagatccatca

SEQ ID NO: 2919384 - DNA, 25 bp, Homo sapien
cacagggcgggagaagtggtcctca

SEQ ID NO: 2919385 - DNA, 25 bp, Homo sapien
ttctgcttctccgactgctcgggca

SEQ ID NO: 2919386 - DNA, 25 bp, Homo sapien
gaatcacctgcttgcactcctcgat

SEQ ID NO: 2919387 - DNA, 25 bp, Homo sapien
tcgtagaagccgtgttcaaggagca

SEQ ID NO: 2919388 - DNA, 25 bp, Homo sapien
cgtagaagccgtgttcaaggagcac

SEQ ID NO: 2919389 - DNA, 25 bp, Homo sapien
ctcgtagaagccgtgttcaaggagc

SEQ ID NO: 2919390 - DNA, 25 bp, Homo sapien
cacaggtctgcttgacgctcttgct

SEQ ID NO: 2919391 - DNA, 25 bp, Homo sapien
tcacaggtctgcttgacgctcttgc

SEQ ID NO: 2919392 - DNA, 25 bp, Homo sapien
aggtgtaccaggtctgaatgagccc

SEQ ID NO: 2919393 - DNA, 25 bp, Homo sapien
gcacagcggtaatcctggctgtcca

SEQ ID NO: 2919394 - DNA, 25 bp, Homo sapien
tttggagctcacacagggcttggag

SEQ ID NO: 2919395 - DNA, 25 bp, Homo sapien
gactttggagctcacacagggcttg

SEQ ID NO: 2919396 - DNA, 25 bp, Homo sapien
cacagcggtaatcctggctgtccag

SEQ ID NO: 2919397 - DNA, 25 bp, Homo sapien
caccctgcagagagatgggcgcctg

SEQ ID NO: 2919398 - DNA, 25 bp, Homo sapien
ctgggcacaccctgcagagagatgg

SEQ ID NO: 2919399 - DNA, 25 bp, Homo sapien
ctgcagagagatgggcgcctggcac

SEQ ID NO: 2919400 - DNA, 25 bp, Homo sapien
accctgcagagagatgggcgcctgg

SEQ ID NO: 2919401 - DNA, 25 bp, Homo sapien
caaagtcccagttgcgtacaatgca

SEQ ID NO: 2919402 - DNA, 25 bp, Homo sapien
aaagtcccagttgcgtacaatgcat

SEQ ID NO: 2919403 - DNA, 25 bp, Homo sapien
ggtgcaaagtcccagttgcgtacaa

SEQ ID NO: 2919404 - DNA, 25 bp, Homo sapien
tgcaaagtcccagttgcgtacaatg

SEQ ID NO: 2919405 - DNA, 25 bp, Homo sapien
gcagaaggttgatctcccggagcct

SEQ ID NO: 2919406 - DNA, 25 bp, Homo sapien
agctcctccacgtagttgaacagca

SEQ ID NO: 2919407 - DNA, 25 bp, Homo sapien
tgagcacgggccgagacaccatcag

SEQ ID NO: 2919408 - DNA, 25 bp, Homo sapien
caccatcagcgccaggtagcacatg

SEQ ID NO: 2919409 - DNA, 25 bp, Homo sapien
gaggtcctggacagagtacatctca

SEQ ID NO: 2919410 - DNA, 25 bp, Homo sapien
gtacatctcatcgttctccacaaaa

SEQ ID NO: 2919411 - DNA, 25 bp, Homo sapien
tggagctgcagcaacagacgagcct

SEQ ID NO: 2919412 - DNA, 25 bp, Homo sapien
agtaccgcttcatgagcaggatgtc

SEQ ID NO: 2919413 - DNA, 25 bp, Homo sapien
tgtgagtctcggtgagtgagcagcc

SEQ ID NO: 2919414 - DNA, 25 bp, Homo sapien
tggtgaagagcgtgtgagtctcggt

SEQ ID NO: 2919415 - DNA, 25 bp, Homo sapien
agagcgtgtgagtctcggtgagtga

SEQ ID NO: 2919416 - DNA, 25 bp, Homo sapien
tgcttggtgaagagcgtgtgagtct

SEQ ID NO: 2919417 - DNA, 25 bp, Homo sapien
tgtggaagacggtggagcagtcggt

SEQ ID NO: 2919418 - DNA, 25 bp, Homo sapien
tggagcagtcggtgcatacagacgt

SEQ ID NO: 2919419 - DNA, 25 bp, Homo sapien
gacggtggagcagtcggtgcataca

SEQ ID NO: 2919420 - DNA, 25 bp, Homo sapien
ggaagacggtggagcagtcggtgca

SEQ ID NO: 2919421 - DNA, 25 bp, Homo sapien
ccatatgtggtcttccatgaggtgc

SEQ ID NO: 2919422 - DNA, 25 bp, Homo sapien
gattctgtttacagactgtatcacc

SEQ ID NO: 2919423 - DNA, 25 bp, Homo sapien
tagaaagacccatacgtgattctgt

SEQ ID NO: 2919424 - DNA, 25 bp, Homo sapien
tcttcctgctgtgctacggacccat

SEQ ID NO: 2919425 - DNA, 25 bp, Homo sapien
gtgcatacctggaaataatggtcag

SEQ ID NO: 2919426 - DNA, 25 bp, Homo sapien
ttatgatttttggacaggtgcggtg

SEQ ID NO: 2919427 - DNA, 25 bp, Homo sapien
caggagaaaccctttgtgttgataa

SEQ ID NO: 2919428 - DNA, 25 bp, Homo sapien
aaatttatgatttttggacaggtgc

SEQ ID NO: 2919429 - DNA, 25 bp, Homo sapien
cgaaagtcctccaggaacacgtgaa

SEQ ID NO: 2919430 - DNA, 25 bp, Homo sapien
gccgaaagtcctccaggaacacgtg

SEQ ID NO: 2919431 - DNA, 25 bp, Homo sapien
gaaagtcctccaggaacacgtgaag

SEQ ID NO: 2919432 - DNA, 25 bp, Homo sapien
gagccgaaagtcctccaggaacacg

SEQ ID NO: 2919433 - DNA, 25 bp, Homo sapien
ctccttcaggtatgaatattctttt

SEQ ID NO: 2919434 - DNA, 25 bp, Homo sapien
ccttcaggtatgaatattctttttc

SEQ ID NO: 2919435 - DNA, 25 bp, Homo sapien
cttcaggtatgaatattctttttcc

SEQ ID NO: 2919436 - DNA, 25 bp, Homo sapien
ttcaggtatgaatattctttttcca

SEQ ID NO: 2919437 - DNA, 25 bp, Homo sapien
ttcttgcagctttaggctggttctg

SEQ ID NO: 2919438 - DNA, 25 bp, Homo sapien
tactgtgtaacttgataacccagtg

SEQ ID NO: 2919439 - DNA, 25 bp, Homo sapien
gataagttgagtactgtgtaacttg

SEQ ID NO: 2919440 - DNA, 25 bp, Homo sapien
ttgagtactgtgtaacttgataacc

SEQ ID NO: 2919441 - DNA, 25 bp, Homo sapien
gtaacttgataacccagtgctgttc

SEQ ID NO: 2919442 - DNA, 25 bp, Homo sapien
gcaagttcctccaaaatagggaaca

SEQ ID NO: 2919443 - DNA, 25 bp, Homo sapien
acattgttggccactgccaccgcag

SEQ ID NO: 2919444 - DNA, 25 bp, Homo sapien
ttgttggccactgccaccgcagtct

SEQ ID NO: 2919445 - DNA, 25 bp, Homo sapien
tgccaccgcagtctgcagatctggc

SEQ ID NO: 2919446 - DNA, 25 bp, Homo sapien
cactgccaccgcagtctgcagatct

SEQ ID NO: 2919447 - DNA, 25 bp, Homo sapien
gaaccaaggatgacttttgagttct

SEQ ID NO: 2919448 - DNA, 25 bp, Homo sapien
tcagttgtacttgaagatctcatca

SEQ ID NO: 2919449 - DNA, 25 bp, Homo sapien
gatctcatcagagaatgttctgcaa

SEQ ID NO: 2919450 - DNA, 25 bp, Homo sapien
tgcaagttcttttgctgtggctgaa

SEQ ID NO: 2919451 - DNA, 25 bp, Homo sapien
cactggccagcagcatcgaccttgg

SEQ ID NO: 2919452 - DNA, 25 bp, Homo sapien
actggccagcagcatcgaccttggg

SEQ ID NO: 2919453 - DNA, 25 bp, Homo sapien
cgaccttgggggactctggctcttc

SEQ ID NO: 2919454 - DNA, 25 bp, Homo sapien
agcagcatcgaccttgggggactct

SEQ ID NO: 2919455 - DNA, 25 bp, Homo sapien
ggaggcttctaagggccttatggac

SEQ ID NO: 2919456 - DNA, 25 bp, Homo sapien
ctcactggtatttcgcttaggaggc

SEQ ID NO: 2919457 - DNA, 25 bp, Homo sapien
gggccttatggacagaagtattctg

SEQ ID NO: 2919458 - DNA, 25 bp, Homo sapien
tcgcttaggaggcttctaagggcct

SEQ ID NO: 2919459 - DNA, 25 bp, Homo sapien
tgcttcgtggttccctctttcttgg

SEQ ID NO: 2919460 - DNA, 25 bp, Homo sapien
ctgaaactgcttcgtggttccctct

SEQ ID NO: 2919461 - DNA, 25 bp, Homo sapien
ccactttccctctggtggaggtgct

SEQ ID NO: 2919462 - DNA, 25 bp, Homo sapien
tctggtggaggtgctcagcagtctc

SEQ ID NO: 2919463 - DNA, 25 bp, Homo sapien
caaggccaccagagggtttcttctt

SEQ ID NO: 2919464 - DNA, 25 bp, Homo sapien
catttcagtacagcattgcacttga

SEQ ID NO: 2919465 - DNA, 25 bp, Homo sapien
ttgcacttgaaaccgccatattccc

SEQ ID NO: 2919466 - DNA, 25 bp, Homo sapien
gccaaggccaccagagggtttcttc

SEQ ID NO: 2919467 - DNA, 25 bp, Homo sapien
ccaaggaaaccatcaagcattaggg

SEQ ID NO: 2919468 - DNA, 25 bp, Homo sapien
taacagggaatctgtgcaccaggca

SEQ ID NO: 2919469 - DNA, 25 bp, Homo sapien
tggaagataaacttagggaagcctc

SEQ ID NO: 2919470 - DNA, 25 bp, Homo sapien
ttctatgaacccattctcagggaga

SEQ ID NO: 2919471 - DNA, 25 bp, Homo sapien
cagcgtcagctgctgaatgaggtgc

SEQ ID NO: 2919472 - DNA, 25 bp, Homo sapien
ttgccagcgtcagctgctgaatgag

SEQ ID NO: 2919473 - DNA, 25 bp, Homo sapien
gcgtcagctgctgaatgaggtgctt

SEQ ID NO: 2919474 - DNA, 25 bp, Homo sapien
ggacttgccagcgtcagctgctgaa

SEQ ID NO: 2919475 - DNA, 25 bp, Homo sapien
tgtatgagctgtatctttagcattt

SEQ ID NO: 2919476 - DNA, 25 bp, Homo sapien
gtatgagctgtatctttagcatttc

SEQ ID NO: 2919477 - DNA, 25 bp, Homo sapien
ttttgtatgagctgtatctttagca

SEQ ID NO: 2919478 - DNA, 25 bp, Homo sapien
tttgtatgagctgtatctttagcat

SEQ ID NO: 2919479 - DNA, 25 bp, Homo sapien
tccataaatattccctctctttcta

SEQ ID NO: 2919480 - DNA, 25 bp, Homo sapien
gtgtcttccataaatattccctctc

SEQ ID NO: 2919481 - DNA, 25 bp, Homo sapien
gtcttccataaatattccctctctt

SEQ ID NO: 2919482 - DNA, 25 bp, Homo sapien
cagtgtcttccataaatattccctc

SEQ ID NO: 2919483 - DNA, 25 bp, Homo sapien
agtctctgtagatgatccccttttg

SEQ ID NO: 2919484 - DNA, 25 bp, Homo sapien
catgatattctccagcttcaagtct

SEQ ID NO: 2919485 - DNA, 25 bp, Homo sapien
cttggtgattaagcatgatattctc

SEQ ID NO: 2919486 - DNA, 25 bp, Homo sapien
tgtagatgatccccttttgatgtaa

SEQ ID NO: 2919487 - DNA, 25 bp, Homo sapien
ctgttccgtcatgaatgattctttg

SEQ ID NO: 2919488 - DNA, 25 bp, Homo sapien
gttccgtcatgaatgattctttgca

SEQ ID NO: 2919489 - DNA, 25 bp, Homo sapien
gactgttccgtcatgaatgattctt

SEQ ID NO: 2919490 - DNA, 25 bp, Homo sapien
gtgactgttccgtcatgaatgattc

SEQ ID NO: 2919491 - DNA, 25 bp, Homo sapien
catacattaatgctcccaaactcca

SEQ ID NO: 2919492 - DNA, 25 bp, Homo sapien
tgtcatacattaatgctcccaaact

SEQ ID NO: 2919493 - DNA, 25 bp, Homo sapien
catgtcatacattaatgctcccaaa

SEQ ID NO: 2919494 - DNA, 25 bp, Homo sapien
gtcatacattaatgctcccaaactc

SEQ ID NO: 2919495 - DNA, 25 bp, Homo sapien
cttgtgtgaggtagggaggcaaatt

SEQ ID NO: 2919496 - DNA, 25 bp, Homo sapien
cccaggaccagctcccagatgagaa

SEQ ID NO: 2919497 - DNA, 25 bp, Homo sapien
aggaccagctcccagatgagaagca

SEQ ID NO: 2919498 - DNA, 25 bp, Homo sapien
gaccagctcccagatgagaagcagc

SEQ ID NO: 2919499 - DNA, 25 bp, Homo sapien
ttgaacatctccagcatccccagga

SEQ ID NO: 2919500 - DNA, 25 bp, Homo sapien
tccacctttcgagccagaagttctt

SEQ ID NO: 2919501 - DNA, 25 bp, Homo sapien
taaatgggggctccacctttcgagc

SEQ ID NO: 2919502 - DNA, 25 bp, Homo sapien
cctttcgagccagaagttcttccca

SEQ ID NO: 2919503 - DNA, 25 bp, Homo sapien
tgggggctccacctttcgagccaga

SEQ ID NO: 2919504 - DNA, 25 bp, Homo sapien
acattatgctccatgaccaaaaaat

SEQ ID NO: 2919505 - DNA, 25 bp, Homo sapien
ggtcacattatgctccatgaccaaa

SEQ ID NO: 2919506 - DNA, 25 bp, Homo sapien
tcacattatgctccatgaccaaaaa

SEQ ID NO: 2919507 - DNA, 25 bp, Homo sapien
gggtcacattatgctccatgaccaa

SEQ ID NO: 2919508 - DNA, 25 bp, Homo sapien
aaactgacttacatcctcttcagat

SEQ ID NO: 2919509 - DNA, 25 bp, Homo sapien
gtctgacgtgtaaacttggaatcaa

SEQ ID NO: 2919510 - DNA, 25 bp, Homo sapien
tcgacaggtgtctgacgtgtaaact

SEQ ID NO: 2919511 - DNA, 25 bp, Homo sapien
catctgggctgtcgacaggtgtctg

SEQ ID NO: 2919512 - DNA, 25 bp, Homo sapien
cttcaagtacagatggagccacata

SEQ ID NO: 2919513 - DNA, 25 bp, Homo sapien
agtacagatggagccacataagtaa

SEQ ID NO: 2919514 - DNA, 25 bp, Homo sapien
tacagatggagccacataagtaaaa

SEQ ID NO: 2919515 - DNA, 25 bp, Homo sapien
tcaagtacagatggagccacataag

SEQ ID NO: 2919516 - DNA, 25 bp, Homo sapien
tcgtgggctgccaataaatcttcga

SEQ ID NO: 2919517 - DNA, 25 bp, Homo sapien
caataaatcttcgaggtgatcggat

SEQ ID NO: 2919518 - DNA, 25 bp, Homo sapien
ctgacaggtgttcgtgggctgccaa

SEQ ID NO: 2919519 - DNA, 25 bp, Homo sapien
cgaggtgatcggatttttggttcaa

SEQ ID NO: 2919520 - DNA, 25 bp, Homo sapien
catagattcatacgcaggtgctctg

SEQ ID NO: 2919521 - DNA, 25 bp, Homo sapien
tccacaggtgtctgaggatttgctg

SEQ ID NO: 2919522 - DNA, 25 bp, Homo sapien
ctggccgtttggagatcatgggaaa

SEQ ID NO: 2919523 - DNA, 25 bp, Homo sapien
ccagagttcggctgtcgtattggaa

SEQ ID NO: 2919524 - DNA, 25 bp, Homo sapien
accctgtaggatgctcacacatcgg

SEQ ID NO: 2919525 - DNA, 25 bp, Homo sapien
tgtaggatgctcacacatcggcctc

SEQ ID NO: 2919526 - DNA, 25 bp, Homo sapien
taggatgctcacacatcggcctctc

SEQ ID NO: 2919527 - DNA, 25 bp, Homo sapien
cctgtaggatgctcacacatcggcc

SEQ ID NO: 2919528 - DNA, 25 bp, Homo sapien
ctggtgtaagaacaggtggcgattt

SEQ ID NO: 2919529 - DNA, 25 bp, Homo sapien
ttttttccagtgcaatgcaggcccg

SEQ ID NO: 2919530 - DNA, 25 bp, Homo sapien
gcaggcccgggacaatgatgaaatg

SEQ ID NO: 2919531 - DNA, 25 bp, Homo sapien
tgcccattccaaggcttccagttaa

SEQ ID NO: 2919532 - DNA, 25 bp, Homo sapien
gtattttttatcctgactctcttct

SEQ ID NO: 2919533 - DNA, 25 bp, Homo sapien
agtatgtattttttatcctgactct

SEQ ID NO: 2919534 - DNA, 25 bp, Homo sapien
cagtatgtattttttatcctgactc

SEQ ID NO: 2919535 - DNA, 25 bp, Homo sapien
catccaaacacctagtgctccaggg

SEQ ID NO: 2919536 - DNA, 25 bp, Homo sapien
gggctgtgcgtttgtcactatgcca

SEQ ID NO: 2919537 - DNA, 25 bp, Homo sapien
gtggtcatgagacatccaaacacct

SEQ ID NO: 2919538 - DNA, 25 bp, Homo sapien
catgagacatccaaacacctagtgc

SEQ ID NO: 2919539 - DNA, 25 bp, Homo sapien
cttggcgatgacacggggtcccagc

SEQ ID NO: 2919540 - DNA, 25 bp, Homo sapien
cgtgctcggccttggcgatgacacg

SEQ ID NO: 2919541 - DNA, 25 bp, Homo sapien
gtcccagcggctgcgagagaaaggt

SEQ ID NO: 2919542 - DNA, 25 bp, Homo sapien
tcccagcggctgcgagagaaaggtc

SEQ ID NO: 2919543 - DNA, 25 bp, Homo sapien
attttccaacatttagcaatccacc

SEQ ID NO: 2919544 - DNA, 25 bp, Homo sapien
tcaatggtgccaaataggaagtttt

SEQ ID NO: 2919545 - DNA, 25 bp, Homo sapien
gtgccaaataggaagttttctgctg

SEQ ID NO: 2919546 - DNA, 25 bp, Homo sapien
tggtgccaaataggaagttttctgc

SEQ ID NO: 2919547 - DNA, 25 bp, Homo sapien
tgccatcacaggcattaatatgaga

SEQ ID NO: 2919548 - DNA, 25 bp, Homo sapien
cagtatccactatatttagaaaggc

SEQ ID NO: 2919549 - DNA, 25 bp, Homo sapien
gatgccatcacaggcattaatatga

SEQ ID NO: 2919550 - DNA, 25 bp, Homo sapien
tcacaaggccagcagtatccactat

SEQ ID NO: 2919551 - DNA, 25 bp, Homo sapien
ttccggcagccttgactgcatttca

SEQ ID NO: 2919552 - DNA, 25 bp, Homo sapien
tgcatttcagaaccttcccatttaa

SEQ ID NO: 2919553 - DNA, 25 bp, Homo sapien
tcccatttaaaatcttcgtatttca

SEQ ID NO: 2919554 - DNA, 25 bp, Homo sapien
ggcagccttgactgcatttcagaac

SEQ ID NO: 2919555 - DNA, 25 bp, Homo sapien
ccaaactgcttttgatcttctgatt

SEQ ID NO: 2919556 - DNA, 25 bp, Homo sapien
tctggctttcccaaactgcttttga

SEQ ID NO: 2919557 - DNA, 25 bp, Homo sapien
tcaccccagttgccaaacagaaccc

SEQ ID NO: 2919558 - DNA, 25 bp, Homo sapien
ctccatccctgacggttctggcttt

SEQ ID NO: 2919559 - DNA, 25 bp, Homo sapien
tgagccgcggcgccttgcacgctag

SEQ ID NO: 2919560 - DNA, 25 bp, Homo sapien
gaccgtgtccggtatttcctcagcc

SEQ ID NO: 2919561 - DNA, 25 bp, Homo sapien
gggaggagacagaggccgaggctcg

SEQ ID NO: 2919562 - DNA, 25 bp, Homo sapien
aaggctagagctggcaacgggtgac

SEQ ID NO: 2919563 - DNA, 25 bp, Homo sapien
taggagctagagatatcgtcctgca

SEQ ID NO: 2919564 - DNA, 25 bp, Homo sapien
aggagctagagatatcgtcctgcag

SEQ ID NO: 2919565 - DNA, 25 bp, Homo sapien
ataggagctagagatatcgtcctgc

SEQ ID NO: 2919566 - DNA, 25 bp, Homo sapien
cagagacataaggatgatgtttctc

SEQ ID NO: 2919567 - DNA, 25 bp, Homo sapien
agagacataaggatgatgtttctcc

SEQ ID NO: 2919568 - DNA, 25 bp, Homo sapien
ccaggtgtataagttgcaggtagga

SEQ ID NO: 2919569 - DNA, 25 bp, Homo sapien
tgtataagttgcaggtaggaatcaa

SEQ ID NO: 2919570 - DNA, 25 bp, Homo sapien
taagttgcaggtaggaatcaaagtg

SEQ ID NO: 2919571 - DNA, 25 bp, Homo sapien
cccaaagccaggtgtataagttgca

SEQ ID NO: 2919572 - DNA, 25 bp, Homo sapien
tgtaagatcagtggctccacagagg

SEQ ID NO: 2919573 - DNA, 25 bp, Homo sapien
gatcagtggctccacagaggatgag

SEQ ID NO: 2919574 - DNA, 25 bp, Homo sapien
gtaagatcagtggctccacagagga

SEQ ID NO: 2919575 - DNA, 25 bp, Homo sapien
gccacagggacagccgagctttgta

SEQ ID NO: 2919576 - DNA, 25 bp, Homo sapien
gaattatgaggatcagcatgtgttt

SEQ ID NO: 2919577 - DNA, 25 bp, Homo sapien
ggaattatgaggatcagcatgtgtt

SEQ ID NO: 2919578 - DNA, 25 bp, Homo sapien
agcagccaacccacgtgagagaaga

SEQ ID NO: 2919579 - DNA, 25 bp, Homo sapien
tgggtgtttgcgcacaagcagccaa

SEQ ID NO: 2919580 - DNA, 25 bp, Homo sapien
caagcagccaacccacgtgagagaa

SEQ ID NO: 2919581 - DNA, 25 bp, Homo sapien
ggtgtttgcgcacaagcagccaacc

SEQ ID NO: 2919582 - DNA, 25 bp, Homo sapien
tctaggtcagacaagtctagcgtac

SEQ ID NO: 2919583 - DNA, 25 bp, Homo sapien
ctaggtcagacaagtctagcgtact

SEQ ID NO: 2919584 - DNA, 25 bp, Homo sapien
gcttctaggtcagacaagtctagcg

SEQ ID NO: 2919585 - DNA, 25 bp, Homo sapien
ttctaggtcagacaagtctagcgta

SEQ ID NO: 2919586 - DNA, 25 bp, Homo sapien
agcacatcaacagcaagccgggttt

SEQ ID NO: 2919587 - DNA, 25 bp, Homo sapien
cagcaagccgggtttgtagtacctc

SEQ ID NO: 2919588 - DNA, 25 bp, Homo sapien
caagcgtgggcaggatgaagcacat

SEQ ID NO: 2919589 - DNA, 25 bp, Homo sapien
gtttcaccccagaaacaccagggca

SEQ ID NO: 2919590 - DNA, 25 bp, Homo sapien
cttctggtcgtaggccagaccgaag

SEQ ID NO: 2919591 - DNA, 25 bp, Homo sapien
tggtcgtaggccagaccgaaggcgg

SEQ ID NO: 2919592 - DNA, 25 bp, Homo sapien
tcttctggtcgtaggccagaccgaa

SEQ ID NO: 2919593 - DNA, 25 bp, Homo sapien
tctggtcgtaggccagaccgaaggc

SEQ ID NO: 2919594 - DNA, 25 bp, Homo sapien
tcttctttatccttggcctaaacta

SEQ ID NO: 2919595 - DNA, 25 bp, Homo sapien
aacctccccatctcatgtacagcag

SEQ ID NO: 2919596 - DNA, 25 bp, Homo sapien
acctccccatctcatgtacagcagt

SEQ ID NO: 2919597 - DNA, 25 bp, Homo sapien
tatttcttgtttgacccgactccac

SEQ ID NO: 2919598 - DNA, 25 bp, Homo sapien
tatatttcttgtttgacccgactcc

SEQ ID NO: 2919599 - DNA, 25 bp, Homo sapien
ctccggaggccatgcgaaagtggca

SEQ ID NO: 2919600 - DNA, 25 bp, Homo sapien
cactgattcaggtggggcaccctta

SEQ ID NO: 2919601 - DNA, 25 bp, Homo sapien
ccccaggcagttctatacttaggct

SEQ ID NO: 2919602 - DNA, 25 bp, Homo sapien
tggggcacccttaccgagcaagcag

SEQ ID NO: 2919603 - DNA, 25 bp, Homo sapien
cacagccccgaagcaaggactgtta

SEQ ID NO: 2919604 - DNA, 25 bp, Homo sapien
tatactattccctaggctataggga

SEQ ID NO: 2919605 - DNA, 25 bp, Homo sapien
cacccgagttaagttgccagcacag

SEQ ID NO: 2919606 - DNA, 25 bp, Homo sapien
tagcctccatgcaattaacacagga

SEQ ID NO: 2919607 - DNA, 25 bp, Homo sapien
ggagaaccatatagactaatgacag

SEQ ID NO: 2919608 - DNA, 25 bp, Homo sapien
ccatatagactaatgacagcatctg

SEQ ID NO: 2919609 - DNA, 25 bp, Homo sapien
gaaccatatagactaatgacagcat

SEQ ID NO: 2919610 - DNA, 25 bp, Homo sapien
gagaaccatatagactaatgacagc

SEQ ID NO: 2919611 - DNA, 25 bp, Homo sapien
tccgtggcaatgtgttttttatgca

SEQ ID NO: 2919612 - DNA, 25 bp, Homo sapien
ttccgtggcaatgtgttttttatgc

SEQ ID NO: 2919613 - DNA, 25 bp, Homo sapien
taatatcataaaggtgctaattctt

SEQ ID NO: 2919614 - DNA, 25 bp, Homo sapien
taaaactagaattccagatcagtgg

SEQ ID NO: 2919615 - DNA, 25 bp, Homo sapien
ctaaatcatcactttatgccaaaat

SEQ ID NO: 2919616 - DNA, 25 bp, Homo sapien
taaatgtaatgagacaactggttag

SEQ ID NO: 2919617 - DNA, 25 bp, Homo sapien
caggcctgctgtgataagaacccat

SEQ ID NO: 2919618 - DNA, 25 bp, Homo sapien
acaggcctgctgtgataagaaccca

SEQ ID NO: 2919619 - DNA, 25 bp, Homo sapien
gacaggcctgctgtgataagaaccc

SEQ ID NO: 2919620 - DNA, 25 bp, Homo sapien
cttggcagcgatgcggccggggcag

SEQ ID NO: 2919621 - DNA, 25 bp, Homo sapien
gcgagcttggcagcgatgcggccgg

SEQ ID NO: 2919622 - DNA, 25 bp, Homo sapien
gagcttggcagcgatgcggccgggg

SEQ ID NO: 2919623 - DNA, 25 bp, Homo sapien
gcttggcagcgatgcggccggggca

SEQ ID NO: 2919624 - DNA, 25 bp, Homo sapien
tggaagtcggtatgctccgtcaggt

SEQ ID NO: 2919625 - DNA, 25 bp, Homo sapien
ctggaagtcggtatgctccgtcagg

SEQ ID NO: 2919626 - DNA, 25 bp, Homo sapien
gaagtcggtatgctccgtcaggtgc

SEQ ID NO: 2919627 - DNA, 25 bp, Homo sapien
agtcggtatgctccgtcaggtgcag

SEQ ID NO: 2919628 - DNA, 25 bp, Homo sapien
tggtgtccagctcgcgctggctgta

SEQ ID NO: 2919629 - DNA, 25 bp, Homo sapien
cgcagcgaacatacatgcaggagac

SEQ ID NO: 2919630 - DNA, 25 bp, Homo sapien
cacgcagcgaacatacatgcaggag

SEQ ID NO: 2919631 - DNA, 25 bp, Homo sapien
atggtgtccagctcgcgctggctgt

SEQ ID NO: 2919632 - DNA, 25 bp, Homo sapien
tctgccggtacaggatgatgctgtc

SEQ ID NO: 2919633 - DNA, 25 bp, Homo sapien
gcggcacactcgtagcgcgaggcca

SEQ ID NO: 2919634 - DNA, 25 bp, Homo sapien
cactcgtagcgcgaggccaggtcca

SEQ ID NO: 2919635 - DNA, 25 bp, Homo sapien
ggcaccgtgccgatgctctgccggt

SEQ ID NO: 2919636 - DNA, 25 bp, Homo sapien
ggcgacgcgcatgcccgaggtgagc

SEQ ID NO: 2919637 - DNA, 25 bp, Homo sapien
ggaaggcgacgcgcatgcccgaggt

SEQ ID NO: 2919638 - DNA, 25 bp, Homo sapien
aaggcgacgcgcatgcccgaggtga

SEQ ID NO: 2919639 - DNA, 25 bp, Homo sapien
aggcgacgcgcatgcccgaggtgag

SEQ ID NO: 2919640 - DNA, 25 bp, Homo sapien
ggcgtggagcgggtgagacttagcg

SEQ ID NO: 2919641 - DNA, 25 bp, Homo sapien
gagcgggtgagacttagcgcccggc

SEQ ID NO: 2919642 - DNA, 25 bp, Homo sapien
cgggtgagacttagcgcccggcccg

SEQ ID NO: 2919643 - DNA, 25 bp, Homo sapien
cgtggagcgggtgagacttagcgcc

SEQ ID NO: 2919644 - DNA, 25 bp, Homo sapien
ctccgtgccgtggatgatgagcacg

SEQ ID NO: 2919645 - DNA, 25 bp, Homo sapien
ggatgatgagcacgggcgacgtgat

SEQ ID NO: 2919646 - DNA, 25 bp, Homo sapien
ccgtggatgatgagcacgggcgacg

SEQ ID NO: 2919647 - DNA, 25 bp, Homo sapien
tggatgatgagcacgggcgacgtga

SEQ ID NO: 2919648 - DNA, 25 bp, Homo sapien
agcccgtgcgagaagtcgatcacct

SEQ ID NO: 2919649 - DNA, 25 bp, Homo sapien
agcgccagcccgtgcgagaagtcga

SEQ ID NO: 2919650 - DNA, 25 bp, Homo sapien
cgtgcgagaagtcgatcacctcgtc

SEQ ID NO: 2919651 - DNA, 25 bp, Homo sapien
ctcgtagagcgccagcccgtgcgag

SEQ ID NO: 2919652 - DNA, 25 bp, Homo sapien
tccaaaaggaaaggagtgcgtagct

SEQ ID NO: 2919653 - DNA, 25 bp, Homo sapien
aaaaggaaaggagtgcgtagctctg

SEQ ID NO: 2919654 - DNA, 25 bp, Homo sapien
aaggaaaggagtgcgtagctctgtt

SEQ ID NO: 2919655 - DNA, 25 bp, Homo sapien
ccaaaaggaaaggagtgcgtagctc

SEQ ID NO: 2919656 - DNA, 25 bp, Homo sapien
cccacggaggttcctggactgcatg

SEQ ID NO: 2919657 - DNA, 25 bp, Homo sapien
tcatttatatactgcggtaatgccc

SEQ ID NO: 2919658 - DNA, 25 bp, Homo sapien
tgcggtaatgcccacggaggttcct

SEQ ID NO: 2919659 - DNA, 25 bp, Homo sapien
tatatactgcggtaatgcccacgga

SEQ ID NO: 2919660 - DNA, 25 bp, Homo sapien
ctttcgcggttgcttgtagtcttca

SEQ ID NO: 2919661 - DNA, 25 bp, Homo sapien
ttgtagtcttcatatctggtgtgtg

SEQ ID NO: 2919662 - DNA, 25 bp, Homo sapien
tgtggctgggacagtggaacacgat

SEQ ID NO: 2919663 - DNA, 25 bp, Homo sapien
gacagtggaacacgatgggaagact

SEQ ID NO: 2919664 - DNA, 25 bp, Homo sapien
gtcagctagtttaccaggaataacc

SEQ ID NO: 2919665 - DNA, 25 bp, Homo sapien
agctagtttaccaggaataacccag

SEQ ID NO: 2919666 - DNA, 25 bp, Homo sapien
gagcccttctggtgtcaggaagaag

SEQ ID NO: 2919667 - DNA, 25 bp, Homo sapien
ctaagaagagcccttctggtgtcag

SEQ ID NO: 2919668 - DNA, 25 bp, Homo sapien
tagtttacagtccagcagtttcgac

SEQ ID NO: 2919669 - DNA, 25 bp, Homo sapien
tctgacatggaatcgtaatacagcc

SEQ ID NO: 2919670 - DNA, 25 bp, Homo sapien
tggaagccactaccagatgcacgta

SEQ ID NO: 2919671 - DNA, 25 bp, Homo sapien
cgtatatatccttcctctgacatgg

SEQ ID NO: 2919672 - DNA, 25 bp, Homo sapien
tattggctgggtcctaccacatgct

SEQ ID NO: 2919673 - DNA, 25 bp, Homo sapien
gtgttcctccagcaagacagagcag

SEQ ID NO: 2919674 - DNA, 25 bp, Homo sapien
ggactcactattgggtagggagaca

SEQ ID NO: 2919675 - DNA, 25 bp, Homo sapien
gctcattcctaaaccaggcactggg

SEQ ID NO: 2919676 - DNA, 25 bp, Homo sapien
gaagattggtcttcgctgtctcagg

SEQ ID NO: 2919677 - DNA, 25 bp, Homo sapien
gaaaatctgctcataagtagacccc

SEQ ID NO: 2919678 - DNA, 25 bp, Homo sapien
tgcaagtagatcattatataactct

SEQ ID NO: 2919679 - DNA, 25 bp, Homo sapien
tcaaatccgtgttgttcaaaggcta

SEQ ID NO: 2919680 - DNA, 25 bp, Homo sapien
tccagttagcagagacacgttttcc

SEQ ID NO: 2919681 - DNA, 25 bp, Homo sapien
tatgcaagcacatgaagccgagggt

SEQ ID NO: 2919682 - DNA, 25 bp, Homo sapien
taagtatgcatatgttcctgagcgc

SEQ ID NO: 2919683 - DNA, 25 bp, Homo sapien
tcaggaaatctgcaagcccggaagt

SEQ ID NO: 2919684 - DNA, 25 bp, Homo sapien
tgccctgatcaagccagagacaagt

SEQ ID NO: 2919685 - DNA, 25 bp, Homo sapien
tacatagttatatgccctgatcaag

SEQ ID NO: 2919686 - DNA, 25 bp, Homo sapien
acaagtaaaacaggcatgcgtaatt

SEQ ID NO: 2919687 - DNA, 25 bp, Homo sapien
taaaacaggcatgcgtaatttttgt

SEQ ID NO: 2919688 - DNA, 25 bp, Homo sapien
gggaagattatgcacttcatgcccc

SEQ ID NO: 2919689 - DNA, 25 bp, Homo sapien
gaatggatctatttcggactggtaa

SEQ ID NO: 2919690 - DNA, 25 bp, Homo sapien
tgaagtttcataggcaaacccgtca

SEQ ID NO: 2919691 - DNA, 25 bp, Homo sapien
tatgttttttgtaatctagggaaga

SEQ ID NO: 2919692 - DNA, 25 bp, Homo sapien
acaatccagtccataacagttactg

SEQ ID NO: 2919693 - DNA, 25 bp, Homo sapien
agttactggtcactatgattccatg

SEQ ID NO: 2919694 - DNA, 25 bp, Homo sapien
tgaagcagcaccataactgaattgg

SEQ ID NO: 2919695 - DNA, 25 bp, Homo sapien
gcagcaccataactgaattggaggg

SEQ ID NO: 2919696 - DNA, 25 bp, Homo sapien
gctcggagatgggaacataaactca

SEQ ID NO: 2919697 - DNA, 25 bp, Homo sapien
cacaatcaatccctgtgctcggaga

SEQ ID NO: 2919698 - DNA, 25 bp, Homo sapien
tgcacacactcgtcgtgaggacagg

SEQ ID NO: 2919699 - DNA, 25 bp, Homo sapien
taaactcatccggaccaggaggtgc

SEQ ID NO: 2919700 - DNA, 25 bp, Homo sapien
ccttctttctcacatccatctgcat

SEQ ID NO: 2919701 - DNA, 25 bp, Homo sapien
cccttctttctcacatccatctgca

SEQ ID NO: 2919702 - DNA, 25 bp, Homo sapien
gcccttctttctcacatccatctgc

SEQ ID NO: 2919703 - DNA, 25 bp, Homo sapien
agcccttctttctcacatccatctg

SEQ ID NO: 2919704 - DNA, 25 bp, Homo sapien
gggatacatcctccatggatatggg

SEQ ID NO: 2919705 - DNA, 25 bp, Homo sapien
catatgctgaagaaggctaatcacg

SEQ ID NO: 2919706 - DNA, 25 bp, Homo sapien
gctaatcacgagttcaatccatcct

SEQ ID NO: 2919707 - DNA, 25 bp, Homo sapien
tcttccctgtgtagccaaatgttgg

SEQ ID NO: 2919708 - DNA, 25 bp, Homo sapien
tattgtttttaatctcctgtgccta

SEQ ID NO: 2919709 - DNA, 25 bp, Homo sapien
ttatgagttattgtttttaatctcc

SEQ ID NO: 2919710 - DNA, 25 bp, Homo sapien
tcctgtgcctagtttatacactcac

SEQ ID NO: 2919711 - DNA, 25 bp, Homo sapien
gagttattgtttttaatctcctgtg

SEQ ID NO: 2919712 - DNA, 25 bp, Homo sapien
ccaaattagaacctgggtgatgtaa

SEQ ID NO: 2919713 - DNA, 25 bp, Homo sapien
cagtgagcaccagaagaggacagag

SEQ ID NO: 2919714 - DNA, 25 bp, Homo sapien
caacatcagaagtggattctagcac

SEQ ID NO: 2919715 - DNA, 25 bp, Homo sapien
gaatggaagctgtgtcagagcagcc

SEQ ID NO: 2919716 - DNA, 25 bp, Homo sapien
ggaaaaacctacatgttcctgagga

SEQ ID NO: 2919717 - DNA, 25 bp, Homo sapien
cccttattaatgtcaagtatgcatt

SEQ ID NO: 2919718 - DNA, 25 bp, Homo sapien
tcatagtgaatagattgtaaatccc

SEQ ID NO: 2919719 - DNA, 25 bp, Homo sapien
taattgacatatgacttaaatgaaa

SEQ ID NO: 2919720 - DNA, 25 bp, Homo sapien
cgtcaggaagcgagacccgcactgg

SEQ ID NO: 2919721 - DNA, 25 bp, Homo sapien
ccaaggcgcacctgcgtcaggaagc

SEQ ID NO: 2919722 - DNA, 25 bp, Homo sapien
tgtagactagccgtggagaaggatg

SEQ ID NO: 2919723 - DNA, 25 bp, Homo sapien
tagactagccgtggagaaggatgtc

SEQ ID NO: 2919724 - DNA, 25 bp, Homo sapien
gtagactagccgtggagaaggatgt

SEQ ID NO: 2919725 - DNA, 25 bp, Homo sapien
cttctctgcgttggggtcagccagg

SEQ ID NO: 2919726 - DNA, 25 bp, Homo sapien
tcttctctgcgttggggtcagccag

SEQ ID NO: 2919727 - DNA, 25 bp, Homo sapien
atcttctctgcgttggggtcagcca

SEQ ID NO: 2919728 - DNA, 25 bp, Homo sapien
aatcttaaccaatcagagttggaga

SEQ ID NO: 2919729 - DNA, 25 bp, Homo sapien
tgctctcatcctatcagaacgaggc

SEQ ID NO: 2919730 - DNA, 25 bp, Homo sapien
gaggcaaatgtccacgcctgctgtg

SEQ ID NO: 2919731 - DNA, 25 bp, Homo sapien
ccaatccgtgttgtagtacagagtc

SEQ ID NO: 2919732 - DNA, 25 bp, Homo sapien
atggaggacgctttgcctacatctg

SEQ ID NO: 2919733 - DNA, 25 bp, Homo sapien
tccaggaacacatggaggacgcttt

SEQ ID NO: 2919734 - DNA, 25 bp, Homo sapien
gacgctttgcctacatctgggacac

SEQ ID NO: 2919735 - DNA, 25 bp, Homo sapien
ggaggacgctttgcctacatctggg

SEQ ID NO: 2919736 - DNA, 25 bp, Homo sapien
tgaaccatcagtgagtaactcccaa

SEQ ID NO: 2919737 - DNA, 25 bp, Homo sapien
ggcaatcaccggtacttgtctgact

SEQ ID NO: 2919738 - DNA, 25 bp, Homo sapien
cactgaatggcttccggagctttga

SEQ ID NO: 2919739 - DNA, 25 bp, Homo sapien
tgaggacctcgtcagagaatgctct

SEQ ID NO: 2919740 - DNA, 25 bp, Homo sapien
tatgtaatataaatgcgtcttcaag

SEQ ID NO: 2919741 - DNA, 25 bp, Homo sapien
tgtaatataaatgcgtcttcaagag

SEQ ID NO: 2919742 - DNA, 25 bp, Homo sapien
aagagccttccatcgcgtttaagtc

SEQ ID NO: 2919743 - DNA, 25 bp, Homo sapien
agccttccatcgcgtttaagtcatg

SEQ ID NO: 2919744 - DNA, 25 bp, Homo sapien
ttaaacacgacagaatcctaactga

SEQ ID NO: 2919745 - DNA, 25 bp, Homo sapien
caacgagagtgggatccattaaaca

SEQ ID NO: 2919746 - DNA, 25 bp, Homo sapien
cagaatcctaactgaagacactctg

SEQ ID NO: 2919747 - DNA, 25 bp, Homo sapien
tgggatccattaaacacgacagaat

SEQ ID NO: 2919748 - DNA, 25 bp, Homo sapien
ctatgtcgacagagacttagcagag

SEQ ID NO: 2919749 - DNA, 25 bp, Homo sapien
gcagggcacagggtattcactatgt

SEQ ID NO: 2919750 - DNA, 25 bp, Homo sapien
tctggtgctggtaattgcggtggca

SEQ ID NO: 2919751 - DNA, 25 bp, Homo sapien
taattgcggtggcaggtttccaagt

SEQ ID NO: 2919752 - DNA, 25 bp, Homo sapien
acccccacgtagcacacagaggttg

SEQ ID NO: 2919753 - DNA, 25 bp, Homo sapien
atttaagtcccaccaatcagaaaga

SEQ ID NO: 2919754 - DNA, 25 bp, Homo sapien
gtggttgcaaggcttgtcagcaagt

SEQ ID NO: 2919755 - DNA, 25 bp, Homo sapien
atggtggttgcaaggcttgtcagca

SEQ ID NO: 2919756 - DNA, 25 bp, Homo sapien
aaagagcaaatcagattgaaaaggt

SEQ ID NO: 2919757 - DNA, 25 bp, Homo sapien
gcaaatcagattgaaaaggtggagg

SEQ ID NO: 2919758 - DNA, 25 bp, Homo sapien
gagcaaatcagattgaaaaggtgga

SEQ ID NO: 2919759 - DNA, 25 bp, Homo sapien
agagcaaatcagattgaaaaggtgg

SEQ ID NO: 2919760 - DNA, 25 bp, Homo sapien
caggccactggccaggagcatttac

SEQ ID NO: 2919761 - DNA, 25 bp, Homo sapien
gggggattctaatagtcttatggac

SEQ ID NO: 2919762 - DNA, 25 bp, Homo sapien
gattctaatagtcttatggacagaa

SEQ ID NO: 2919763 - DNA, 25 bp, Homo sapien
ctttgggggattctaatagtcttat

SEQ ID NO: 2919764 - DNA, 25 bp, Homo sapien
ccactttgggggattctaatagtct

SEQ ID NO: 2919765 - DNA, 25 bp, Homo sapien
gagagaacaagcctatgacaatcag

SEQ ID NO: 2919766 - DNA, 25 bp, Homo sapien
caaggttacaccatagaaggccacc

SEQ ID NO: 2919767 - DNA, 25 bp, Homo sapien
tgaagagtaagtaaagcagacacac

SEQ ID NO: 2919768 - DNA, 25 bp, Homo sapien
tgcaatctcagtacaacaaggttac

SEQ ID NO: 2919769 - DNA, 25 bp, Homo sapien
tagaaagtaggaaatcaatccagag

SEQ ID NO: 2919770 - DNA, 25 bp, Homo sapien
agaaagtaggaaatcaatccagagc

SEQ ID NO: 2919771 - DNA, 25 bp, Homo sapien
tctctcattgttgatgcccacaggg

SEQ ID NO: 2919772 - DNA, 25 bp, Homo sapien
gactggagtgcctgatcgcatctga

SEQ ID NO: 2919773 - DNA, 25 bp, Homo sapien
caagctaagctgacagtcaagtcca

SEQ ID NO: 2919774 - DNA, 25 bp, Homo sapien
gaagcaccaagtatctctgacagca

SEQ ID NO: 2919775 - DNA, 25 bp, Homo sapien
tgtgtctttacagcccacatggaga

SEQ ID NO: 2919776 - DNA, 25 bp, Homo sapien
tgagtcctcagaacctagatagtac

SEQ ID NO: 2919777 - DNA, 25 bp, Homo sapien
tagatagtacttaggacacagcacc

SEQ ID NO: 2919778 - DNA, 25 bp, Homo sapien
tttaagtgcggaccaagtcagtgcc

SEQ ID NO: 2919779 - DNA, 25 bp, Homo sapien
ctagcagtacaaaggagggcccagt

SEQ ID NO: 2919780 - DNA, 25 bp, Homo sapien
catggcatgttcgacactgaaagga

SEQ ID NO: 2919781 - DNA, 25 bp, Homo sapien
caggcagcgggaacaacatgtgcaa

SEQ ID NO: 2919782 - DNA, 25 bp, Homo sapien
acatgcaggtgcctagcagagcagc

SEQ ID NO: 2919783 - DNA, 25 bp, Homo sapien
cacagttccaggtctcactaaggag

SEQ ID NO: 2919784 - DNA, 25 bp, Homo sapien
tgtggtaatgccgaccctactggca

SEQ ID NO: 2919785 - DNA, 25 bp, Homo sapien
tgcagctgggttatgtggcctccgt

SEQ ID NO: 2919786 - DNA, 25 bp, Homo sapien
cagcgactgcatgaggtgaacaacc

SEQ ID NO: 2919787 - DNA, 25 bp, Homo sapien
gagccaccgcagcatgaaacactca

SEQ ID NO: 2919788 - DNA, 25 bp, Homo sapien
gccaccgcagcatgaaacactcaat

SEQ ID NO: 2919789 - DNA, 25 bp, Homo sapien
aggagccaccgcagcatgaaacact

SEQ ID NO: 2919790 - DNA, 25 bp, Homo sapien
tggaggagccaccgcagcatgaaac

SEQ ID NO: 2919791 - DNA, 25 bp, Homo sapien
tcctgaggaccacgttgtcctccgg

SEQ ID NO: 2919792 - DNA, 25 bp, Homo sapien
aaaaagtcgctcctgaaactcccag

SEQ ID NO: 2919793 - DNA, 25 bp, Homo sapien
tggcaggtcccagtgtttccttgtg

SEQ ID NO: 2919794 - DNA, 25 bp, Homo sapien
ccttgtgagttccttcacggaggtt

SEQ ID NO: 2919795 - DNA, 25 bp, Homo sapien
gccaggctccggggtgcagactgcc

SEQ ID NO: 2919796 - DNA, 25 bp, Homo sapien
ccaggctccggggtgcagactgcct

SEQ ID NO: 2919797 - DNA, 25 bp, Homo sapien
ctagggcactcggggcgctgttggg

SEQ ID NO: 2919798 - DNA, 25 bp, Homo sapien
gggcactcggggcgctgttgggcca

SEQ ID NO: 2919799 - DNA, 25 bp, Homo sapien
gcctccgggtaccatgttggcatag

SEQ ID NO: 2919800 - DNA, 25 bp, Homo sapien
cctccgggtaccatgttggcatagt

SEQ ID NO: 2919801 - DNA, 25 bp, Homo sapien
tccgggtaccatgttggcatagtgg

SEQ ID NO: 2919802 - DNA, 25 bp, Homo sapien
ccgggtaccatgttggcatagtgga

SEQ ID NO: 2919803 - DNA, 25 bp, Homo sapien
ggccatggcggactctataacatcc

SEQ ID NO: 2919804 - DNA, 25 bp, Homo sapien
tctgagttctgaatagttctgcccc

SEQ ID NO: 2919805 - DNA, 25 bp, Homo sapien
tcagcgggtcaggaatcttctcggc

SEQ ID NO: 2919806 - DNA, 25 bp, Homo sapien
ctgtgacaggtcacgaggccatggc

SEQ ID NO: 2919807 - DNA, 25 bp, Homo sapien
gacctgaagcccttgacatgctgaa

SEQ ID NO: 2919808 - DNA, 25 bp, Homo sapien
ggaggccacgcactcaacgtttcgt

SEQ ID NO: 2919809 - DNA, 25 bp, Homo sapien
tgccaggcttggattgcaagacccg

SEQ ID NO: 2919810 - DNA, 25 bp, Homo sapien
tggcctgctgcggtttgagcctcgt

SEQ ID NO: 2919811 - DNA, 25 bp, Homo sapien
ggcttctgccacacatgatggttct

SEQ ID NO: 2919812 - DNA, 25 bp, Homo sapien
tgaacagagcacgtgggcaagaaac

SEQ ID NO: 2919813 - DNA, 25 bp, Homo sapien
taactgcttagaacggcaatgccac

SEQ ID NO: 2919814 - DNA, 25 bp, Homo sapien
tgattactaggcaacgggaggtttc

SEQ ID NO: 2919815 - DNA, 25 bp, Homo sapien
aaaagactgcacatcctcaaaggag

SEQ ID NO: 2919816 - DNA, 25 bp, Homo sapien
ttaacactgctgtgaatgtgctggg

SEQ ID NO: 2919817 - DNA, 25 bp, Homo sapien
gttgcctagtaatcaccccatgtag

SEQ ID NO: 2919818 - DNA, 25 bp, Homo sapien
cctgggcttcgtggtgagcactgca

SEQ ID NO: 2919819 - DNA, 25 bp, Homo sapien
gatgcggtttcttgcccacgtgctc

SEQ ID NO: 2919820 - DNA, 25 bp, Homo sapien
agaaccatcatgtgtggcagaagcc

SEQ ID NO: 2919821 - DNA, 25 bp, Homo sapien
tggcactgccccttgcattaggtct

SEQ ID NO: 2919822 - DNA, 25 bp, Homo sapien
tggcattgccgttctaagcagttac

SEQ ID NO: 2919823 - DNA, 25 bp, Homo sapien
gcttgaaaacgcgacgtagtgtccg

SEQ ID NO: 2919824 - DNA, 25 bp, Homo sapien
cgtacttccgaagctaggaggctgc

SEQ ID NO: 2919825 - DNA, 25 bp, Homo sapien
caccaaatgtaaagcagaggcagac

SEQ ID NO: 2919826 - DNA, 25 bp, Homo sapien
gagatgacagacacaccgtatgagc

SEQ ID NO: 2919827 - DNA, 25 bp, Homo sapien
tagaaaaccgcgagatgcttccacg

SEQ ID NO: 2919828 - DNA, 25 bp, Homo sapien
gaaaggcatctgcaaggccctctgt

SEQ ID NO: 2919829 - DNA, 25 bp, Homo sapien
aatgggtgccgtttatgttgctgcc

SEQ ID NO: 2919830 - DNA, 25 bp, Homo sapien
gacagagggccttgcagatgccttt

SEQ ID NO: 2919831 - DNA, 25 bp, Homo sapien
taacagcatcaagctgcacgtggaa

SEQ ID NO: 2919832 - DNA, 25 bp, Homo sapien
tgtgctgcagctcatacggtgtgtc

SEQ ID NO: 2919833 - DNA, 25 bp, Homo sapien
tagcttcggaagtacggacactacg

SEQ ID NO: 2919834 - DNA, 25 bp, Homo sapien
cacgtggaagcatctcgcggttttc

SEQ ID NO: 2919835 - DNA, 25 bp, Homo sapien
gaggagccgatcttggctcaagtca

SEQ ID NO: 2919836 - DNA, 25 bp, Homo sapien
cactgggatctccaccatgaggagt

SEQ ID NO: 2919837 - DNA, 25 bp, Homo sapien
tctgcctgtatggatagacttcagc

SEQ ID NO: 2919838 - DNA, 25 bp, Homo sapien
gctgcaggtccctcacactgggatc

SEQ ID NO: 2919839 - DNA, 25 bp, Homo sapien
aggaagacctgcaagtgaccagccc

SEQ ID NO: 2919840 - DNA, 25 bp, Homo sapien
atcagaaacgccagcacgggcttta

SEQ ID NO: 2919841 - DNA, 25 bp, Homo sapien
taaagcccgtgctggcgtttctgat

SEQ ID NO: 2919842 - DNA, 25 bp, Homo sapien
tgaatgacttgagccaagatcggct

SEQ ID NO: 2919843 - DNA, 25 bp, Homo sapien
gatcccagtgtgagggacctgcagc

SEQ ID NO: 2919844 - DNA, 25 bp, Homo sapien
tgaagtctatccatacaggcagaga

SEQ ID NO: 2919845 - DNA, 25 bp, Homo sapien
cactcctcatggtggagatcccagt

SEQ ID NO: 2919846 - DNA, 25 bp, Homo sapien
tgggctggtcacttgcaggtcttcc

SEQ ID NO: 2919847 - DNA, 25 bp, Homo sapien
taggcccgtgctttaagtgctctgc

SEQ ID NO: 2919848 - DNA, 25 bp, Homo sapien
acaggtgtcaggttcatatgtttcc

SEQ ID NO: 2919849 - DNA, 25 bp, Homo sapien
gaaagagcccctgttgctattcttc

SEQ ID NO: 2919850 - DNA, 25 bp, Homo sapien
ttttcaatggagagtaatcaaggca

SEQ ID NO: 2919851 - DNA, 25 bp, Homo sapien
tgctaccagggagatcagatgctca

SEQ ID NO: 2919852 - DNA, 25 bp, Homo sapien
tgctctgcacagaataatacaccca

SEQ ID NO: 2919853 - DNA, 25 bp, Homo sapien
catagtggttgacagtgatagtgac

SEQ ID NO: 2919854 - DNA, 25 bp, Homo sapien
tgagcatctgatctccctggtagca

SEQ ID NO: 2919855 - DNA, 25 bp, Homo sapien
tgggtgtattattctgtgcagagca

SEQ ID NO: 2919856 - DNA, 25 bp, Homo sapien
tgccttgattactctccattgaaaa

SEQ ID NO: 2919857 - DNA, 25 bp, Homo sapien
tgcagagcacttaaagcacgggcct

SEQ ID NO: 2919858 - DNA, 25 bp, Homo sapien
ggaaacatatgaacctgacacctgt

SEQ ID NO: 2919859 - DNA, 25 bp, Homo sapien
tcccctgcggtaagatgctgatagc

SEQ ID NO: 2919860 - DNA, 25 bp, Homo sapien
cagggaagtcttggaacaccacagt

SEQ ID NO: 2919861 - DNA, 25 bp, Homo sapien
taaaatcctggtgggagctgtcgca

SEQ ID NO: 2919862 - DNA, 25 bp, Homo sapien
tataacttaagtgcatccccggata

SEQ ID NO: 2919863 - DNA, 25 bp, Homo sapien
tatttcaggtcttaagctactacga

SEQ ID NO: 2919864 - DNA, 25 bp, Homo sapien
caacggtactagtgcttcccagagc

SEQ ID NO: 2919865 - DNA, 25 bp, Homo sapien
tggcaaaggttgatggctgagctct

SEQ ID NO: 2919866 - DNA, 25 bp, Homo sapien
ttttgagtagggcagaaggtagccc

SEQ ID NO: 2919867 - DNA, 25 bp, Homo sapien
tgcgacagctcccaccaggatttta

SEQ ID NO: 2919868 - DNA, 25 bp, Homo sapien
tgtggtgttccaagacttccctgtt

SEQ ID NO: 2919869 - DNA, 25 bp, Homo sapien
gagtaattgatgaaaggtgcacagc

SEQ ID NO: 2919870 - DNA, 25 bp, Homo sapien
gctctgggaagcactagtaccgttg

SEQ ID NO: 2919871 - DNA, 25 bp, Homo sapien
gacagaaggtagattcaagtcacca

SEQ ID NO: 2919872 - DNA, 25 bp, Homo sapien
gatgaatcacaaatgcatgcttgcg

SEQ ID NO: 2919873 - DNA, 25 bp, Homo sapien
gagagagagcaacaggcagtgatct

SEQ ID NO: 2919874 - DNA, 25 bp, Homo sapien
gcagtgatctgttaacgacgcattc

SEQ ID NO: 2919875 - DNA, 25 bp, Homo sapien
tgtgctaaatgtcaccgacttgtag

SEQ ID NO: 2919876 - DNA, 25 bp, Homo sapien
gacgcattcctctgtggtgcaaaaa

SEQ ID NO: 2919877 - DNA, 25 bp, Homo sapien
gaatgcgtcgttaacagatcactgc

SEQ ID NO: 2919878 - DNA, 25 bp, Homo sapien
tggtgacttgaatctaccttctgtc

SEQ ID NO: 2919879 - DNA, 25 bp, Homo sapien
catttttaagtctacaagtcggtga

SEQ ID NO: 2919880 - DNA, 25 bp, Homo sapien
tctttccgcaagcatgcatttgtga

SEQ ID NO: 2919881 - DNA, 25 bp, Homo sapien
ttttgcaccacagaggaatgcgtcg

SEQ ID NO: 2919882 - DNA, 25 bp, Homo sapien
agatcactgcctgttgctctctctc

SEQ ID NO: 2919883 - DNA, 25 bp, Homo sapien
tcgggcttcactaaacttcataggg

SEQ ID NO: 2919884 - DNA, 25 bp, Homo sapien
ggaagagcatgtgtctgccacagct

SEQ ID NO: 2919885 - DNA, 25 bp, Homo sapien
gccatgttggatctcaggcttgcac

SEQ ID NO: 2919886 - DNA, 25 bp, Homo sapien
acaaaactgagcttgtcctgttcag

SEQ ID NO: 2919887 - DNA, 25 bp, Homo sapien
tacctacgggaatggacctttctgc

SEQ ID NO: 2919888 - DNA, 25 bp, Homo sapien
tacacgatgggtactagtgaggcgc

SEQ ID NO: 2919889 - DNA, 25 bp, Homo sapien
gagagatgagacctgcaacactggg

SEQ ID NO: 2919890 - DNA, 25 bp, Homo sapien
tgaacgccactagcagagactcatg

SEQ ID NO: 2919891 - DNA, 25 bp, Homo sapien
agtgggcacctctaattaacatttc

SEQ ID NO: 2919892 - DNA, 25 bp, Homo sapien
gaataacatgagcactgaggtctcc

SEQ ID NO: 2919893 - DNA, 25 bp, Homo sapien
acagtcctggatagtctgtccctgg

SEQ ID NO: 2919894 - DNA, 25 bp, Homo sapien
gactctgaggttaatcaccacccac

SEQ ID NO: 2919895 - DNA, 25 bp, Homo sapien
tagttgatagttgttgctctggtga

SEQ ID NO: 2919896 - DNA, 25 bp, Homo sapien
ctggtgatagtgttgtcatgggcat

SEQ ID NO: 2919897 - DNA, 25 bp, Homo sapien
cttagttgatagttgttgctctggt

SEQ ID NO: 2919898 - DNA, 25 bp, Homo sapien
ttagttgatagttgttgctctggtg

SEQ ID NO: 2919899 - DNA, 25 bp, Homo sapien
gcagtggtgcgatcacagccctgca

SEQ ID NO: 2919900 - DNA, 25 bp, Homo sapien
caacctcctgggcttgagtgatcct

SEQ ID NO: 2919901 - DNA, 25 bp, Homo sapien
agtggtgcgatcacagccctgcagc

SEQ ID NO: 2919902 - DNA, 25 bp, Homo sapien
tggtgcgatcacagccctgcagcct

SEQ ID NO: 2919903 - DNA, 25 bp, Homo sapien
tagggcaccagcaaagcagaggcaa

SEQ ID NO: 2919904 - DNA, 25 bp, Homo sapien
ttagggcaccagcaaagcagaggca

SEQ ID NO: 2919905 - DNA, 25 bp, Homo sapien
gcaccagcaaagcagaggcaacccc

SEQ ID NO: 2919906 - DNA, 25 bp, Homo sapien
gggcaccagcaaagcagaggcaacc

SEQ ID NO: 2919907 - DNA, 25 bp, Homo sapien
ggcctggacgtgtctcccaggagtc

SEQ ID NO: 2919908 - DNA, 25 bp, Homo sapien
tggggcctggacgtgtctcccagga

SEQ ID NO: 2919909 - DNA, 25 bp, Homo sapien
ggtggggcctggacgtgtctcccag

SEQ ID NO: 2919910 - DNA, 25 bp, Homo sapien
ggcggtggggcctggacgtgtctcc

SEQ ID NO: 2919911 - DNA, 25 bp, Homo sapien
atgagctgcacggaaacagcgccac

SEQ ID NO: 2919912 - DNA, 25 bp, Homo sapien
ggaggctgcggaaacgtctccacca

SEQ ID NO: 2919913 - DNA, 25 bp, Homo sapien
ttggaggctgcggaaacgtctccac

SEQ ID NO: 2919914 - DNA, 25 bp, Homo sapien
tacctgatgagctgcacggaaacag

SEQ ID NO: 2919915 - DNA, 25 bp, Homo sapien
aagccggggcgtcgcctcagctcaa

SEQ ID NO: 2919916 - DNA, 25 bp, Homo sapien
ctatcgcctcatctcggaggttcct

SEQ ID NO: 2919917 - DNA, 25 bp, Homo sapien
agctcaaggccagaccctatcgcct

SEQ ID NO: 2919918 - DNA, 25 bp, Homo sapien
ttagctcgaccactacaccgcttcc

SEQ ID NO: 2919919 - DNA, 25 bp, Homo sapien
gagtgccgtagtattatcacagttt

SEQ ID NO: 2919920 - DNA, 25 bp, Homo sapien
tggagtgccgtagtattatcacagt

SEQ ID NO: 2919921 - DNA, 25 bp, Homo sapien
ctggagtgccgtagtattatcacag

SEQ ID NO: 2919922 - DNA, 25 bp, Homo sapien
agatacaagctcctcctagtctcaa

SEQ ID NO: 2919923 - DNA, 25 bp, Homo sapien
ttgatatgtatgcaaatctttttaa

SEQ ID NO: 2919924 - DNA, 25 bp, Homo sapien
aataaactacccctagcttagcttg

SEQ ID NO: 2919925 - DNA, 25 bp, Homo sapien
tccttttcctcacagcatttctttg

SEQ ID NO: 2919926 - DNA, 25 bp, Homo sapien
cctttacaaacgtacgtacatacat

SEQ ID NO: 2919927 - DNA, 25 bp, Homo sapien
tgcaattaaagccttgtcttcaggc

SEQ ID NO: 2919928 - DNA, 25 bp, Homo sapien
actgcaattaaagccttgtcttcag

SEQ ID NO: 2919929 - DNA, 25 bp, Homo sapien
ctgactgcaattaaagccttgtctt

SEQ ID NO: 2919930 - DNA, 25 bp, Homo sapien
gactgcaattaaagccttgtcttca

SEQ ID NO: 2919931 - DNA, 25 bp, Homo sapien
ttaaggtgtcaaaatatggcacggg

SEQ ID NO: 2919932 - DNA, 25 bp, Homo sapien
taccataacttctaacctcatggct

SEQ ID NO: 2919933 - DNA, 25 bp, Homo sapien
caaggacagattggaggttaagagc

SEQ ID NO: 2919934 - DNA, 25 bp, Homo sapien
gcgtggcctaatcaagcagtttcat

SEQ ID NO: 2919935 - DNA, 25 bp, Homo sapien
ggttgacctgcaaactacagagttc

SEQ ID NO: 2919936 - DNA, 25 bp, Homo sapien
ggaggcctaaggttgacctgcaaac

SEQ ID NO: 2919937 - DNA, 25 bp, Homo sapien
caaactacagagttcctaagtactc

SEQ ID NO: 2919938 - DNA, 25 bp, Homo sapien
ctaaggttgacctgcaaactacaga

SEQ ID NO: 2919939 - DNA, 25 bp, Homo sapien
catttgtgtgagaaattgaactgct

SEQ ID NO: 2919940 - DNA, 25 bp, Homo sapien
ggagcgctcagtgatcctattgctg

SEQ ID NO: 2919941 - DNA, 25 bp, Homo sapien
tgttaaggaacctaattctagttca

SEQ ID NO: 2919942 - DNA, 25 bp, Homo sapien
tggtcgtaattcctccttaccattg

SEQ ID NO: 2919943 - DNA, 25 bp, Homo sapien
gctgcatgtctacatcaggtgagtg

SEQ ID NO: 2919944 - DNA, 25 bp, Homo sapien
tacaagcatcctctactgctgcatg

SEQ ID NO: 2919945 - DNA, 25 bp, Homo sapien
gacgtaaagaggtaacagttcctca

SEQ ID NO: 2919946 - DNA, 25 bp, Homo sapien
agtctgctggaatgatctgtcctca

SEQ ID NO: 2919947 - DNA, 25 bp, Homo sapien
aacttgggtgaatcagtaaacctgg

SEQ ID NO: 2919948 - DNA, 25 bp, Homo sapien
ccgtgcatggcctacaggttgattt

SEQ ID NO: 2919949 - DNA, 25 bp, Homo sapien
tgaagcccatctgtacactccaagt

SEQ ID NO: 2919950 - DNA, 25 bp, Homo sapien
tatagttactgcatgttggagcaac

SEQ ID NO: 2919951 - DNA, 25 bp, Homo sapien
aaatgtcttcatagtagtgcacggc

SEQ ID NO: 2919952 - DNA, 25 bp, Homo sapien
aacagtggcagcgtttaaaatgtcc

SEQ ID NO: 2919953 - DNA, 25 bp, Homo sapien
gacaaaaaaccctaatcacacagaa

SEQ ID NO: 2919954 - DNA, 25 bp, Homo sapien
tcaacagactctaagcgccacaaat

SEQ ID NO: 2919955 - DNA, 25 bp, Homo sapien
tgttcagtgggctgacttccatgtg

SEQ ID NO: 2919956 - DNA, 25 bp, Homo sapien
cttcagagtcttcactgatataagg

SEQ ID NO: 2919957 - DNA, 25 bp, Homo sapien
ggccccaagttctgccatagcccaa

SEQ ID NO: 2919958 - DNA, 25 bp, Homo sapien
tcttcactgatataaggcacactgg

SEQ ID NO: 2919959 - DNA, 25 bp, Homo sapien
tgctatttaattggagaactgagtt

SEQ ID NO: 2919960 - DNA, 25 bp, Homo sapien
agaactgagttcattaacattcagt

SEQ ID NO: 2919961 - DNA, 25 bp, Homo sapien
gaactgagttcattaacattcagtg

SEQ ID NO: 2919962 - DNA, 25 bp, Homo sapien
ctatgctatttaattggagaactga

SEQ ID NO: 2919963 - DNA, 25 bp, Homo sapien
gaacagggagtagttgagagtggga

SEQ ID NO: 2919964 - DNA, 25 bp, Homo sapien
aacagggagtagttgagagtgggag

SEQ ID NO: 2919965 - DNA, 25 bp, Homo sapien
ggtgaacagggagtagttgagagtg

SEQ ID NO: 2919966 - DNA, 25 bp, Homo sapien
tgaacagggagtagttgagagtggg

SEQ ID NO: 2919967 - DNA, 25 bp, Homo sapien
aaacttacggaaagcatgagcaccc

SEQ ID NO: 2919968 - DNA, 25 bp, Homo sapien
gtctctccaatattcattgtgaggg

SEQ ID NO: 2919969 - DNA, 25 bp, Homo sapien
gaggtaaaacttacggaaagcatga

SEQ ID NO: 2919970 - DNA, 25 bp, Homo sapien
atgagcaccccccatgactgggtcc

SEQ ID NO: 2919971 - DNA, 25 bp, Homo sapien
cacgtgaggacacttagatggcacc

SEQ ID NO: 2919972 - DNA, 25 bp, Homo sapien
ttctatcccgtctgccacgtgagga

SEQ ID NO: 2919973 - DNA, 25 bp, Homo sapien
ggactaagacatcctgcttggtgtt

SEQ ID NO: 2919974 - DNA, 25 bp, Homo sapien
ccttgttctgcgatttggtgtctga

SEQ ID NO: 2919975 - DNA, 25 bp, Homo sapien
aaataacactatatcactccacagg

SEQ ID NO: 2919976 - DNA, 25 bp, Homo sapien
tcatagcttatcaactatgcttctt

SEQ ID NO: 2919977 - DNA, 25 bp, Homo sapien
gcattgcaagtatcatataataaca

SEQ ID NO: 2919978 - DNA, 25 bp, Homo sapien
ctccacaggcattgcaagtatcata

SEQ ID NO: 2919979 - DNA, 25 bp, Homo sapien
tgttgtttaatcactaactatttgg

SEQ ID NO: 2919980 - DNA, 25 bp, Homo sapien
ttttgctgcattctacaaatttggt

SEQ ID NO: 2919981 - DNA, 25 bp, Homo sapien
cttttgctgcattctacaaatttgg

SEQ ID NO: 2919982 - DNA, 25 bp, Homo sapien
gtatgttgtttaatcactaactatt

SEQ ID NO: 2919983 - DNA, 25 bp, Homo sapien
gagttttaatcatgaatcagagata

SEQ ID NO: 2919984 - DNA, 25 bp, Homo sapien
taatcatgaatcagagatagatatt

SEQ ID NO: 2919985 - DNA, 25 bp, Homo sapien
agttttaatcatgaatcagagatag

SEQ ID NO: 2919986 - DNA, 25 bp, Homo sapien
ttttaatcatgaatcagagatagat

SEQ ID NO: 2919987 - DNA, 25 bp, Homo sapien
acttgttgtttcaccaatatcactg

SEQ ID NO: 2919988 - DNA, 25 bp, Homo sapien
catcacagttttatagtctgcctca

SEQ ID NO: 2919989 - DNA, 25 bp, Homo sapien
gcattgactccatagataagctagg

SEQ ID NO: 2919990 - DNA, 25 bp, Homo sapien
tactaagtcttggagtcaggtagcg

SEQ ID NO: 2919991 - DNA, 25 bp, Homo sapien
gaaactggacaaggcactgactgtg

SEQ ID NO: 2919992 - DNA, 25 bp, Homo sapien
agaaaacaccaagccagcatggggg

SEQ ID NO: 2919993 - DNA, 25 bp, Homo sapien
actggacaaggcactgactgtggtg

SEQ ID NO: 2919994 - DNA, 25 bp, Homo sapien
gagaaaacaccaagccagcatgggg

SEQ ID NO: 2919995 - DNA, 25 bp, Homo sapien
agatggcagctaccttgccagtggc

SEQ ID NO: 2919996 - DNA, 25 bp, Homo sapien
gtacaggctggctttagtaaaaata

SEQ ID NO: 2919997 - DNA, 25 bp, Homo sapien
ggacaccttcaggtcagcaagccct

SEQ ID NO: 2919998 - DNA, 25 bp, Homo sapien
agcaagccctccctggaatgcctga

SEQ ID NO: 2919999 - DNA, 25 bp, Homo sapien
tccaactggaaggaaagacactgaa

SEQ ID NO: 2920000 - DNA, 25 bp, Homo sapien
gaagctactcagaaaccacatacag

SEQ ID NO: 2920001 - DNA, 25 bp, Homo sapien
gaaatcacacggcaaggagtggctt

SEQ ID NO: 2920002 - DNA, 25 bp, Homo sapien
tcaggtctgtaagaaggattagcca

SEQ ID NO: 2920003 - DNA, 25 bp, Homo sapien
gaaacctgtgttggccttacctcaa

SEQ ID NO: 2920004 - DNA, 25 bp, Homo sapien
tgacatgagcggacagaaaagccac

SEQ ID NO: 2920005 - DNA, 25 bp, Homo sapien
gaacaagcggagattgccattcagc

SEQ ID NO: 2920006 - DNA, 25 bp, Homo sapien
taagccctagcaagcattgacccag

SEQ ID NO: 2920007 - DNA, 25 bp, Homo sapien
ggccttcaccttcggcagactcttc

SEQ ID NO: 2920008 - DNA, 25 bp, Homo sapien
ccgcgcacccactgcagcagccgga

SEQ ID NO: 2920009 - DNA, 25 bp, Homo sapien
gtggcgcctgtgatcaccaccacag

SEQ ID NO: 2920010 - DNA, 25 bp, Homo sapien
ggaagaggccgaagacgcccaggca

SEQ ID NO: 2920011 - DNA, 25 bp, Homo sapien
accaccacagcattccgcaggtagg

SEQ ID NO: 2920012 - DNA, 25 bp, Homo sapien
tgggccgctcctcatccctggctga

SEQ ID NO: 2920013 - DNA, 25 bp, Homo sapien
ccacttgtaccaaggacagtgccat

SEQ ID NO: 2920014 - DNA, 25 bp, Homo sapien
tgccgcttcgggcatttgcgctggt

SEQ ID NO: 2920015 - DNA, 25 bp, Homo sapien
aaggacagtgccatccggcccactt

SEQ ID NO: 2920016 - DNA, 25 bp, Homo sapien
tccaaggtacgatatatgaagggct

SEQ ID NO: 2920017 - DNA, 25 bp, Homo sapien
catggatgggagcacttgcgactca

SEQ ID NO: 2920018 - DNA, 25 bp, Homo sapien
gaagcaaggcaacatcagaacgtcc

SEQ ID NO: 2920019 - DNA, 25 bp, Homo sapien
tgcataactccaaaccttccgggtg

SEQ ID NO: 2920020 - DNA, 25 bp, Homo sapien
agtttaaattcacccagcgttgctg

SEQ ID NO: 2920021 - DNA, 25 bp, Homo sapien
ctgtgtggcccagcatgaagctggg

SEQ ID NO: 2920022 - DNA, 25 bp, Homo sapien
gagctagggcccaatgccgggctca

SEQ ID NO: 2920023 - DNA, 25 bp, Homo sapien
ttcttcctcagtgccgttcagttta

SEQ ID NO: 2920024 - DNA, 25 bp, Homo sapien
ctgatgagctcttctagggccccac

SEQ ID NO: 2920025 - DNA, 25 bp, Homo sapien
gcagcatagaagacttttgcacatt

SEQ ID NO: 2920026 - DNA, 25 bp, Homo sapien
acagagcaccagtttagcacccgca

SEQ ID NO: 2920027 - DNA, 25 bp, Homo sapien
tggtggcatgagaagcggtgagttc

SEQ ID NO: 2920028 - DNA, 25 bp, Homo sapien
gggcatcaggatgtaaaccactgga

SEQ ID NO: 2920029 - DNA, 25 bp, Homo sapien
ggcccggttcgctatggagacctgc

SEQ ID NO: 2920030 - DNA, 25 bp, Homo sapien
ttcgctatggagacctgctgccttc

SEQ ID NO: 2920031 - DNA, 25 bp, Homo sapien
tctccctatgcagtgggcccggttc

SEQ ID NO: 2920032 - DNA, 25 bp, Homo sapien
tggtcaaatacaacagatacaaatt

SEQ ID NO: 2920033 - DNA, 25 bp, Homo sapien
ggtcaaatacaacagatacaaattc

SEQ ID NO: 2920034 - DNA, 25 bp, Homo sapien
atacaacagatacaaattcactttc

SEQ ID NO: 2920035 - DNA, 25 bp, Homo sapien
ctggtcaaatacaacagatacaaat

SEQ ID NO: 2920036 - DNA, 25 bp, Homo sapien
gtcgaaggtcaccaagtaaggcttg

SEQ ID NO: 2920037 - DNA, 25 bp, Homo sapien
gatggtaccacggtagctgatccca

SEQ ID NO: 2920038 - DNA, 25 bp, Homo sapien
tgctgcaactatggccccagagtct

SEQ ID NO: 2920039 - DNA, 25 bp, Homo sapien
ctttcgttagagcaactgggccaaa

SEQ ID NO: 2920040 - DNA, 25 bp, Homo sapien
acaatgtggccttgcctcctcttga

SEQ ID NO: 2920041 - DNA, 25 bp, Homo sapien
tcctcttgatcatggagggcaggag

SEQ ID NO: 2920042 - DNA, 25 bp, Homo sapien
tgctgatcgaaaaggaatgctcatc

SEQ ID NO: 2920043 - DNA, 25 bp, Homo sapien
gctgctgatggcgacaatgtggcct

SEQ ID NO: 2920044 - DNA, 25 bp, Homo sapien
ccatttgagtgcccagagatataaa

SEQ ID NO: 2920045 - DNA, 25 bp, Homo sapien
cccatttgagtgcccagagatataa

SEQ ID NO: 2920046 - DNA, 25 bp, Homo sapien
tcccatttgagtgcccagagatata

SEQ ID NO: 2920047 - DNA, 25 bp, Homo sapien
gtttcctccaattcagaattgtaaa

SEQ ID NO: 2920048 - DNA, 25 bp, Homo sapien
agtttcctccaattcagaattgtaa

SEQ ID NO: 2920049 - DNA, 25 bp, Homo sapien
catctcggcacgcagacagtcaaag

SEQ ID NO: 2920050 - DNA, 25 bp, Homo sapien
catttacagagaggttggtgtggat

SEQ ID NO: 2920051 - DNA, 25 bp, Homo sapien
catccgcggtgatggcatttacaga

SEQ ID NO: 2920052 - DNA, 25 bp, Homo sapien
aatttcatactgttccatctcggca

SEQ ID NO: 2920053 - DNA, 25 bp, Homo sapien
tggatttccgctcttttctggccct

SEQ ID NO: 2920054 - DNA, 25 bp, Homo sapien
gagttcgaagataaacagccaagga

SEQ ID NO: 2920055 - DNA, 25 bp, Homo sapien
gagttcttggatttccgctcttttc

SEQ ID NO: 2920056 - DNA, 25 bp, Homo sapien
gcccaggagccagagttcgaagata

SEQ ID NO: 2920057 - DNA, 25 bp, Homo sapien
agtgttaaaccccagctccatattt

SEQ ID NO: 2920058 - DNA, 25 bp, Homo sapien
caactgtcccttgtagagtaagcaa

SEQ ID NO: 2920059 - DNA, 25 bp, Homo sapien
gagtaagcaagcctaagagtgctgc

SEQ ID NO: 2920060 - DNA, 25 bp, Homo sapien
gtcgtttttgattgtcctctgccag

SEQ ID NO: 2920061 - DNA, 25 bp, Homo sapien
ccttctgcttggagtggtgcctggc

SEQ ID NO: 2920062 - DNA, 25 bp, Homo sapien
tatgaggtgctaaagcaggcatccc

SEQ ID NO: 2920063 - DNA, 25 bp, Homo sapien
ggtctttctgccacaacaatgaggt

SEQ ID NO: 2920064 - DNA, 25 bp, Homo sapien
gtttcacttctagaggatgcacggg

SEQ ID NO: 2920065 - DNA, 25 bp, Homo sapien
tgagggcagcctatcacatcaacct

SEQ ID NO: 2920066 - DNA, 25 bp, Homo sapien
tgtgagtcagaacacaacggcccca

SEQ ID NO: 2920067 - DNA, 25 bp, Homo sapien
cattcaaccttagactcgggctgag

SEQ ID NO: 2920068 - DNA, 25 bp, Homo sapien
catttccatctaaagggagagcgcc

SEQ ID NO: 2920069 - DNA, 25 bp, Homo sapien
gatggtccagtttagcacgtgtagc

SEQ ID NO: 2920070 - DNA, 25 bp, Homo sapien
aacacagcagttcagtagtcaccag

SEQ ID NO: 2920071 - DNA, 25 bp, Homo sapien
gagtgacactttgggcacacttgcc

SEQ ID NO: 2920072 - DNA, 25 bp, Homo sapien
cacttgccagatttgccagcggcta

SEQ ID NO: 2920073 - DNA, 25 bp, Homo sapien
taggagcgtgtttcttccaacaggg

SEQ ID NO: 2920074 - DNA, 25 bp, Homo sapien
tatagcagcggtcagcaaaaaagga

SEQ ID NO: 2920075 - DNA, 25 bp, Homo sapien
ggagccacctggattaactgtccgc

SEQ ID NO: 2920076 - DNA, 25 bp, Homo sapien
agctgttcagccactagaaatttgg

SEQ ID NO: 2920077 - DNA, 25 bp, Homo sapien
gtttcttcagaaatgctcgaaccag

SEQ ID NO: 2920078 - DNA, 25 bp, Homo sapien
ggctgcgaacgccgggaactcagtt

SEQ ID NO: 2920079 - DNA, 25 bp, Homo sapien
gtgactcccaggctgcgaacgccgg

SEQ ID NO: 2920080 - DNA, 25 bp, Homo sapien
caggacggctcctggagtcctcgcg

SEQ ID NO: 2920081 - DNA, 25 bp, Homo sapien
cagttgtgtgtcagtagtaccaggc

SEQ ID NO: 2920082 - DNA, 25 bp, Homo sapien
caggaagtggcgcaaacatgtttac

SEQ ID NO: 2920083 - DNA, 25 bp, Homo sapien
gagactggctgatacaattatggca

SEQ ID NO: 2920084 - DNA, 25 bp, Homo sapien
caagataggcgctgtgtgaatggca

SEQ ID NO: 2920085 - DNA, 25 bp, Homo sapien
agagcatcatattcaaaacgttcca

SEQ ID NO: 2920086 - DNA, 25 bp, Homo sapien
tattaactgaactcaagaccccatt

SEQ ID NO: 2920087 - DNA, 25 bp, Homo sapien
tctgtatagccttcatcctggttcc

SEQ ID NO: 2920088 - DNA, 25 bp, Homo sapien
cagagaagtcgcaaaaatagtacag

SEQ ID NO: 2920089 - DNA, 25 bp, Homo sapien
ggatggaatgagaaatacaatctcc

SEQ ID NO: 2920090 - DNA, 25 bp, Homo sapien
gaagctgcacattaatggatggaat

SEQ ID NO: 2920091 - DNA, 25 bp, Homo sapien
aagctgcacattaatggatggaatg

SEQ ID NO: 2920092 - DNA, 25 bp, Homo sapien
atacaatctccagtaacagaaattt

SEQ ID NO: 2920093 - DNA, 25 bp, Homo sapien
gacatgtcactgaagaacaagatcc

SEQ ID NO: 2920094 - DNA, 25 bp, Homo sapien
tattaactcttatgacatgtcactg

SEQ ID NO: 2920095 - DNA, 25 bp, Homo sapien
gtggcttgtggaattattaactctt

SEQ ID NO: 2920096 - DNA, 25 bp, Homo sapien
catgtcactgaagaacaagatcctg

SEQ ID NO: 2920097 - DNA, 25 bp, Homo sapien
agcttggcatttagaacgaggaaac

SEQ ID NO: 2920098 - DNA, 25 bp, Homo sapien
gggtcttaacccaatctgacaagta

SEQ ID NO: 2920099 - DNA, 25 bp, Homo sapien
tgacaagtatccatctaagaagagc

SEQ ID NO: 2920100 - DNA, 25 bp, Homo sapien
aggccatgagagtgggtcttaaccc

SEQ ID NO: 2920101 - DNA, 25 bp, Homo sapien
ccaggctgctgtagacaggttcaaa

SEQ ID NO: 2920102 - DNA, 25 bp, Homo sapien
ggctcactacgctgaaactccctgt

SEQ ID NO: 2920103 - DNA, 25 bp, Homo sapien
tgaatgactccacaggatacaccgt

SEQ ID NO: 2920104 - DNA, 25 bp, Homo sapien
gacagaggtggtgaactcccttcta

SEQ ID NO: 2920105 - DNA, 25 bp, Homo sapien
tatgatgggatcaaatggagatgga

SEQ ID NO: 2920106 - DNA, 25 bp, Homo sapien
atatattagggcttcctcactccag

SEQ ID NO: 2920107 - DNA, 25 bp, Homo sapien
tgaggcttccagattaacagttgac

SEQ ID NO: 2920108 - DNA, 25 bp, Homo sapien
gaccagtaagactgacagtgctcct

SEQ ID NO: 2920109 - DNA, 25 bp, Homo sapien
ctttacgattctcagggtcccactc

SEQ ID NO: 2920110 - DNA, 25 bp, Homo sapien
tttacataagagttccggcaaggct

SEQ ID NO: 2920111 - DNA, 25 bp, Homo sapien
cgggacatgcccattattaggccta

SEQ ID NO: 2920112 - DNA, 25 bp, Homo sapien
ggtcctgcctcgagccataaggtga

SEQ ID NO: 2920113 - DNA, 25 bp, Homo sapien
aagtgaaaatcttgcaccaggccca

SEQ ID NO: 2920114 - DNA, 25 bp, Homo sapien
gaatttctggtccaatgcagggagg

SEQ ID NO: 2920115 - DNA, 25 bp, Homo sapien
tccgctgtgccataagaagttgctt

SEQ ID NO: 2920116 - DNA, 25 bp, Homo sapien
gatgccatgcatgagatccgctgtg

SEQ ID NO: 2920117 - DNA, 25 bp, Homo sapien
tgtgacttggatccctgcatctcag

SEQ ID NO: 2920118 - DNA, 25 bp, Homo sapien
gaatcaaaggagataccaagagcca

SEQ ID NO: 2920119 - DNA, 25 bp, Homo sapien
tgggctccagcgtcatcttggcctg

SEQ ID NO: 2920120 - DNA, 25 bp, Homo sapien
gggagatgaattgtagccactctcc

SEQ ID NO: 2920121 - DNA, 25 bp, Homo sapien
cagttttgttcgctgctgcctgccc

SEQ ID NO: 2920122 - DNA, 25 bp, Homo sapien
cctggcccctgtattatttataatg

SEQ ID NO: 2920123 - DNA, 25 bp, Homo sapien
catcagtacgtaagatctccatgag

SEQ ID NO: 2920124 - DNA, 25 bp, Homo sapien
gcccaaaccctactgggacacagta

SEQ ID NO: 2920125 - DNA, 25 bp, Homo sapien
gaaaagccggccagggtgtctgctt

SEQ ID NO: 2920126 - DNA, 25 bp, Homo sapien
gatccaggctctacttacagaggtg

SEQ ID NO: 2920127 - DNA, 25 bp, Homo sapien
ccctggatgcagtggagctaagatc

SEQ ID NO: 2920128 - DNA, 25 bp, Homo sapien
tatattcgcgttttgatctgccagc

SEQ ID NO: 2920129 - DNA, 25 bp, Homo sapien
caggtcgtcgaagttcaaaaatggg

SEQ ID NO: 2920130 - DNA, 25 bp, Homo sapien
ctgccttcctacagaccaaaggtgg

SEQ ID NO: 2920131 - DNA, 25 bp, Homo sapien
cagggaactggaaaggcccacgtgt

SEQ ID NO: 2920132 - DNA, 25 bp, Homo sapien
gcacacaagaccgaaggagcagaga

SEQ ID NO: 2920133 - DNA, 25 bp, Homo sapien
caagtgactggctccactagcaaaa

SEQ ID NO: 2920134 - DNA, 25 bp, Homo sapien
tcctatttttacagctcctactatg

SEQ ID NO: 2920135 - DNA, 25 bp, Homo sapien
ccaagcacagcatcttatggactca

SEQ ID NO: 2920136 - DNA, 25 bp, Homo sapien
actagcaaaacagcaagtcctattt

SEQ ID NO: 2920137 - DNA, 25 bp, Homo sapien
cctggacggcggtggagactaatct

SEQ ID NO: 2920138 - DNA, 25 bp, Homo sapien
ccgagcacgctcatggctgcgggca

SEQ ID NO: 2920139 - DNA, 25 bp, Homo sapien
actgcagcaaggacgagtccgcgac

SEQ ID NO: 2920140 - DNA, 25 bp, Homo sapien
ctaatctagaggactgcgggctcca

SEQ ID NO: 2920141 - DNA, 25 bp, Homo sapien
gctggctcgaggcgggcgactccat

SEQ ID NO: 2920142 - DNA, 25 bp, Homo sapien
ggctggctcgaggcgggcgactcca

SEQ ID NO: 2920143 - DNA, 25 bp, Homo sapien
agcagcaggggccaggaagagccca

SEQ ID NO: 2920144 - DNA, 25 bp, Homo sapien
gctccagccaccatagcagccagca

SEQ ID NO: 2920145 - DNA, 25 bp, Homo sapien
gcagcaggggccaggaagagcccat

SEQ ID NO: 2920146 - DNA, 25 bp, Homo sapien
ccggctccagccaccatagcagcca

SEQ ID NO: 2920147 - DNA, 25 bp, Homo sapien
tcctcacacgggccaactgagaact

SEQ ID NO: 2920148 - DNA, 25 bp, Homo sapien
ttctcctcacacgggccaactgaga

SEQ ID NO: 2920149 - DNA, 25 bp, Homo sapien
gccttctcctcacacgggccaactg

SEQ ID NO: 2920150 - DNA, 25 bp, Homo sapien
ctcacacgggccaactgagaacttt

SEQ ID NO: 2920151 - DNA, 25 bp, Homo sapien
gcacagctgaacctgaggtgtcccc

SEQ ID NO: 2920152 - DNA, 25 bp, Homo sapien
gccaagggtggtaaacagtcactgc

SEQ ID NO: 2920153 - DNA, 25 bp, Homo sapien
caagggtggtaaacagtcactgcca

SEQ ID NO: 2920154 - DNA, 25 bp, Homo sapien
agctgcacagctgaacctgaggtgt

SEQ ID NO: 2920155 - DNA, 25 bp, Homo sapien
gcactgtcgacaggccagtgctgct

SEQ ID NO: 2920156 - DNA, 25 bp, Homo sapien
cttgcaccaggatcgtaggctgtgc

SEQ ID NO: 2920157 - DNA, 25 bp, Homo sapien
accaggatcgtaggctgtgctccaa

SEQ ID NO: 2920158 - DNA, 25 bp, Homo sapien
gggcccggctcgaggtcagcaaggc

SEQ ID NO: 2920159 - DNA, 25 bp, Homo sapien
agagcatcagaagaatgggacattc

SEQ ID NO: 2920160 - DNA, 25 bp, Homo sapien
aagtgatgctcagccctcccagagc

SEQ ID NO: 2920161 - DNA, 25 bp, Homo sapien
gccctcccagagcatcagaagaatg

SEQ ID NO: 2920162 - DNA, 25 bp, Homo sapien
cccagagcatcagaagaatgggaca

SEQ ID NO: 2920163 - DNA, 25 bp, Homo sapien
gccccagagactgtccagtgcagat

SEQ ID NO: 2920164 - DNA, 25 bp, Homo sapien
gtgccccagagactgtccagtgcag

SEQ ID NO: 2920165 - DNA, 25 bp, Homo sapien
agggtgccccagagactgtccagtg

SEQ ID NO: 2920166 - DNA, 25 bp, Homo sapien
cagagactgtccagtgcagatgctg

SEQ ID NO: 2920167 - DNA, 25 bp, Homo sapien
tgagcacagtacagcccccgcagca

SEQ ID NO: 2920168 - DNA, 25 bp, Homo sapien
gcccagcagagacaaccatggcccg

SEQ ID NO: 2920169 - DNA, 25 bp, Homo sapien
gggtcctcccgcccaatgccaacag

SEQ ID NO: 2920170 - DNA, 25 bp, Homo sapien
ctgccagagggtcctcccgcccaat

SEQ ID NO: 2920171 - DNA, 25 bp, Homo sapien
acaaccatggcccgcctgcaacatg

SEQ ID NO: 2920172 - DNA, 25 bp, Homo sapien
cccggtgatgctccggaccagcatg

SEQ ID NO: 2920173 - DNA, 25 bp, Homo sapien
cctaacatccggtggggaggccaga

SEQ ID NO: 2920174 - DNA, 25 bp, Homo sapien
tgatgctccggaccagcatggctcg

SEQ ID NO: 2920175 - DNA, 25 bp, Homo sapien
atggctcgggagcacccctaacatc

SEQ ID NO: 2920176 - DNA, 25 bp, Homo sapien
gagaacgggggatccccagactatc

SEQ ID NO: 2920177 - DNA, 25 bp, Homo sapien
cagagaacgggggatccccagacta

SEQ ID NO: 2920178 - DNA, 25 bp, Homo sapien
ctgcagagaacgggggatccccaga

SEQ ID NO: 2920179 - DNA, 25 bp, Homo sapien
gaacgggggatccccagactatcca

SEQ ID NO: 2920180 - DNA, 25 bp, Homo sapien
ttccggatgttccaggaggtccctg

SEQ ID NO: 2920181 - DNA, 25 bp, Homo sapien
ccctgttctactgcagaagttctgg

SEQ ID NO: 2920182 - DNA, 25 bp, Homo sapien
tccaggaggtccctgttctactgca

SEQ ID NO: 2920183 - DNA, 25 bp, Homo sapien
ggaggtccctgttctactgcagaag

SEQ ID NO: 2920184 - DNA, 25 bp, Homo sapien
agaagtaatccctgctcctagttca

SEQ ID NO: 2920185 - DNA, 25 bp, Homo sapien
gacaacagaagtaatccctgctcct

SEQ ID NO: 2920186 - DNA, 25 bp, Homo sapien
ggtttctgacaacagaagtaatccc

SEQ ID NO: 2920187 - DNA, 25 bp, Homo sapien
gcatcaccaggtttctgacaacaga

SEQ ID NO: 2920188 - DNA, 25 bp, Homo sapien
tcaagggcacttgcacatatgggct

SEQ ID NO: 2920189 - DNA, 25 bp, Homo sapien
ctgtcaagggcacttgcacatatgg

SEQ ID NO: 2920190 - DNA, 25 bp, Homo sapien
cacttgcacatatgggctggatggg

SEQ ID NO: 2920191 - DNA, 25 bp, Homo sapien
gggtggtatatggactggcctctgc

SEQ ID NO: 2920192 - DNA, 25 bp, Homo sapien
gctgcaggacgaagcaagatcacgt

SEQ ID NO: 2920193 - DNA, 25 bp, Homo sapien
tgtggcccataaatggtcaccatgg

SEQ ID NO: 2920194 - DNA, 25 bp, Homo sapien
gctcagcacagggttcactgcgcag

SEQ ID NO: 2920195 - DNA, 25 bp, Homo sapien
ggtcaccatggatatgaccagcctc

SEQ ID NO: 2920196 - DNA, 25 bp, Homo sapien
ccagatggagggcgaagggtggtta

SEQ ID NO: 2920197 - DNA, 25 bp, Homo sapien
cagatggagggcgaagggtggttac

SEQ ID NO: 2920198 - DNA, 25 bp, Homo sapien
tggcctatcccttgacatcaatgtc

SEQ ID NO: 2920199 - DNA, 25 bp, Homo sapien
tccccatctgtgaggtgtcctcact

SEQ ID NO: 2920200 - DNA, 25 bp, Homo sapien
tgccctgcctgactagtcaatggga

SEQ ID NO: 2920201 - DNA, 25 bp, Homo sapien
caagccaggccgttaggccttcaaa

SEQ ID NO: 2920202 - DNA, 25 bp, Homo sapien
aggatatccgtagatccttcttcct

SEQ ID NO: 2920203 - DNA, 25 bp, Homo sapien
gcaggatatccgtagatccttcttc

SEQ ID NO: 2920204 - DNA, 25 bp, Homo sapien
ggatatccgtagatccttcttcctc

SEQ ID NO: 2920205 - DNA, 25 bp, Homo sapien
caggatatccgtagatccttcttcc

SEQ ID NO: 2920206 - DNA, 25 bp, Homo sapien
tggggttgggtgcgggtggcttgga

SEQ ID NO: 2920207 - DNA, 25 bp, Homo sapien
cattgagccctgttcgggaagcctc

SEQ ID NO: 2920208 - DNA, 25 bp, Homo sapien
tcacctggctgtatgcacagcaggg

SEQ ID NO: 2920209 - DNA, 25 bp, Homo sapien
tgcccaggacaggacgaggtaaagc

SEQ ID NO: 2920210 - DNA, 25 bp, Homo sapien
tcatcgagcctccaagacagggtga

SEQ ID NO: 2920211 - DNA, 25 bp, Homo sapien
ccaatggtgatgaaggtccgggagt

SEQ ID NO: 2920212 - DNA, 25 bp, Homo sapien
aatggtgatgaaggtccgggagtcc

SEQ ID NO: 2920213 - DNA, 25 bp, Homo sapien
tggtgatgaaggtccgggagtccag

SEQ ID NO: 2920214 - DNA, 25 bp, Homo sapien
ggtgatgaaggtccgggagtccagg

SEQ ID NO: 2920215 - DNA, 25 bp, Homo sapien
tgggcgtgccgcaccttctctacca

SEQ ID NO: 2920216 - DNA, 25 bp, Homo sapien
gtcaccaagtcatcagcctccacct

SEQ ID NO: 2920217 - DNA, 25 bp, Homo sapien
tctaccaccccataggctccacggc

SEQ ID NO: 2920218 - DNA, 25 bp, Homo sapien
tccacggcccagttctgagatggtc

SEQ ID NO: 2920219 - DNA, 25 bp, Homo sapien
gtcgaccgtgcgcatgttgatgtcc

SEQ ID NO: 2920220 - DNA, 25 bp, Homo sapien
aatagtgccccgtagaaggtgacag

SEQ ID NO: 2920221 - DNA, 25 bp, Homo sapien
cagtgtagaaacagtcgaccgtgcg

SEQ ID NO: 2920222 - DNA, 25 bp, Homo sapien
gctcctgtgagttcacggtggcccg

SEQ ID NO: 2920223 - DNA, 25 bp, Homo sapien
gtagaacttgtccaaggatgtgtcc

SEQ ID NO: 2920224 - DNA, 25 bp, Homo sapien
gcaatctccccaaggatgtcctctg

SEQ ID NO: 2920225 - DNA, 25 bp, Homo sapien
agacacagcaatctccccaaggatg

SEQ ID NO: 2920226 - DNA, 25 bp, Homo sapien
agcaccttccggtagaacttgtcca

SEQ ID NO: 2920227 - DNA, 25 bp, Homo sapien
tgtggatcaccgacagcttgctgtg

SEQ ID NO: 2920228 - DNA, 25 bp, Homo sapien
caccgacagcttgctgtgcagatgc

SEQ ID NO: 2920229 - DNA, 25 bp, Homo sapien
ggatcaccgacagcttgctgtgcag

SEQ ID NO: 2920230 - DNA, 25 bp, Homo sapien
ctctgtggatcaccgacagcttgct

SEQ ID NO: 2920231 - DNA, 25 bp, Homo sapien
gtggaaagcggctggaaccccatcg

SEQ ID NO: 2920232 - DNA, 25 bp, Homo sapien
taaactatacatcagaacagaaccc

SEQ ID NO: 2920233 - DNA, 25 bp, Homo sapien
tgattatatgcactctatgctggag

SEQ ID NO: 2920234 - DNA, 25 bp, Homo sapien
tatgctggagtttcacgatttgtaa

SEQ ID NO: 2920235 - DNA, 25 bp, Homo sapien
ctgccagggagggacatgcctcagc

SEQ ID NO: 2920236 - DNA, 25 bp, Homo sapien
tgccagggagggacatgcctcagcc

SEQ ID NO: 2920237 - DNA, 25 bp, Homo sapien
gggcttgcagccggcatccatcgtc

SEQ ID NO: 2920238 - DNA, 25 bp, Homo sapien
tgttgataaggacattggagggctt

SEQ ID NO: 2920239 - DNA, 25 bp, Homo sapien
gttgataaggacattggagggcttc

SEQ ID NO: 2920240 - DNA, 25 bp, Homo sapien
cggcatccatcgtcttggccacaga

SEQ ID NO: 2920241 - DNA, 25 bp, Homo sapien
gtcggacttgacattgtagcccttc

SEQ ID NO: 2920242 - DNA, 25 bp, Homo sapien
cgtcggacttgacattgtagccctt

SEQ ID NO: 2920243 - DNA, 25 bp, Homo sapien
agacgtcggacttgacattgtagcc

SEQ ID NO: 2920244 - DNA, 25 bp, Homo sapien
gacgtcggacttgacattgtagccc

SEQ ID NO: 2920245 - DNA, 25 bp, Homo sapien
ctgaccaccaagggcaggccctggc

SEQ ID NO: 2920246 - DNA, 25 bp, Homo sapien
ggcaggccctggccccccacagtac

SEQ ID NO: 2920247 - DNA, 25 bp, Homo sapien
tgaccaccaagggcaggccctggcc

SEQ ID NO: 2920248 - DNA, 25 bp, Homo sapien
aagggcaggccctggccccccacag

SEQ ID NO: 2920249 - DNA, 25 bp, Homo sapien
ccacaccgggactggtgggaccatc

SEQ ID NO: 2920250 - DNA, 25 bp, Homo sapien
ggtaccagagccaggcgtcaaagct

SEQ ID NO: 2920251 - DNA, 25 bp, Homo sapien
caactttgggccgtagcctcatgag

SEQ ID NO: 2920252 - DNA, 25 bp, Homo sapien
aaagctgcacagctgatctccctac

SEQ ID NO: 2920253 - DNA, 25 bp, Homo sapien
gcacccaggagcgagggttgggggc

SEQ ID NO: 2920254 - DNA, 25 bp, Homo sapien
caggagcgagggttgggggctccca

SEQ ID NO: 2920255 - DNA, 25 bp, Homo sapien
cacccaggagcgagggttgggggct

SEQ ID NO: 2920256 - DNA, 25 bp, Homo sapien
ctgcacccaggagcgagggttgggg

SEQ ID NO: 2920257 - DNA, 25 bp, Homo sapien
gccccggccccagatacaaccacgc

SEQ ID NO: 2920258 - DNA, 25 bp, Homo sapien
ccccggccccagatacaaccacgct

SEQ ID NO: 2920259 - DNA, 25 bp, Homo sapien
cccaggactcgtaagggaaccgcag

SEQ ID NO: 2920260 - DNA, 25 bp, Homo sapien
gggaaccgcaggatggccatctcaa

SEQ ID NO: 2920261 - DNA, 25 bp, Homo sapien
gggagaaacggtcggctgggagctg

SEQ ID NO: 2920262 - DNA, 25 bp, Homo sapien
gagcagtgaagtccacaaactcggg

SEQ ID NO: 2920263 - DNA, 25 bp, Homo sapien
ctaggagagaatagtgcagctgtgg

SEQ ID NO: 2920264 - DNA, 25 bp, Homo sapien
tacgctctgcggggttcttcctcag

SEQ ID NO: 2920265 - DNA, 25 bp, Homo sapien
acgctctgcggggttcttcctcagg

SEQ ID NO: 2920266 - DNA, 25 bp, Homo sapien
gctccaggtagctcatacgctctgc

SEQ ID NO: 2920267 - DNA, 25 bp, Homo sapien
ccaggtagctcatacgctctgcggg

SEQ ID NO: 2920268 - DNA, 25 bp, Homo sapien
agcaatgtccgtcttcttggttttg

SEQ ID NO: 2920269 - DNA, 25 bp, Homo sapien
ccttcacgaaggcagcaatgtccgt

SEQ ID NO: 2920270 - DNA, 25 bp, Homo sapien
aaggcagcaatgtccgtcttcttgg

SEQ ID NO: 2920271 - DNA, 25 bp, Homo sapien
gatctccttcacgaaggcagcaatg

SEQ ID NO: 2920272 - DNA, 25 bp, Homo sapien
ccaggatggcagtagcttatggtgt

SEQ ID NO: 2920273 - DNA, 25 bp, Homo sapien
acttgggacaaatggctcgccacag

SEQ ID NO: 2920274 - DNA, 25 bp, Homo sapien
gtctgcttctttggcacttgggaca

SEQ ID NO: 2920275 - DNA, 25 bp, Homo sapien
ggctgggagccccaatggtctgctt

SEQ ID NO: 2920276 - DNA, 25 bp, Homo sapien
cccctcagtccaggatctcagcagc

SEQ ID NO: 2920277 - DNA, 25 bp, Homo sapien
agcatccacagggggcatccaggcc

SEQ ID NO: 2920278 - DNA, 25 bp, Homo sapien
catccaggccccctcagtccaggat

SEQ ID NO: 2920279 - DNA, 25 bp, Homo sapien
aggccccctcagtccaggatctcag

SEQ ID NO: 2920280 - DNA, 25 bp, Homo sapien
tgaatgacaccgataacggtggcgg

SEQ ID NO: 2920281 - DNA, 25 bp, Homo sapien
gcaaagtccattcagtcgagagatt

SEQ ID NO: 2920282 - DNA, 25 bp, Homo sapien
ggctctgcctgctggtaccctaggg

SEQ ID NO: 2920283 - DNA, 25 bp, Homo sapien
gccaccctgggccaaagtgtgcaaa

SEQ ID NO: 2920284 - DNA, 25 bp, Homo sapien
gtgagcaaattccctgctgccccag

SEQ ID NO: 2920285 - DNA, 25 bp, Homo sapien
gagcaaattccctgctgccccagcc

SEQ ID NO: 2920286 - DNA, 25 bp, Homo sapien
tgagcaaattccctgctgccccagc

SEQ ID NO: 2920287 - DNA, 25 bp, Homo sapien
gcaaattccctgctgccccagccat

SEQ ID NO: 2920288 - DNA, 25 bp, Homo sapien
cgcttgagacctccacgggtagtat

SEQ ID NO: 2920289 - DNA, 25 bp, Homo sapien
gatggctggacacgctctgtaaaag

SEQ ID NO: 2920290 - DNA, 25 bp, Homo sapien
aatctctaggcgttgggtctgctgc

SEQ ID NO: 2920291 - DNA, 25 bp, Homo sapien
taaatgttagtgacctgcgcactgg

SEQ ID NO: 2920292 - DNA, 25 bp, Homo sapien
ccccagtatactccggtggatacca

SEQ ID NO: 2920293 - DNA, 25 bp, Homo sapien
cccacctagagcctgtgcagacatg

SEQ ID NO: 2920294 - DNA, 25 bp, Homo sapien
cggtggataccacgggcatccttcc

SEQ ID NO: 2920295 - DNA, 25 bp, Homo sapien
tatactccggtggataccacgggca

SEQ ID NO: 2920296 - DNA, 25 bp, Homo sapien
ccatctgccaggatgagtcacgtgg

SEQ ID NO: 2920297 - DNA, 25 bp, Homo sapien
tccactgcggttggtgcaggtcccc

SEQ ID NO: 2920298 - DNA, 25 bp, Homo sapien
tggcctcaactcaacaggcagggag

SEQ ID NO: 2920299 - DNA, 25 bp, Homo sapien
aactgtctccactgcggttggtgca

SEQ ID NO: 2920300 - DNA, 25 bp, Homo sapien
caaggttgaggccaggacgtttagc

SEQ ID NO: 2920301 - DNA, 25 bp, Homo sapien
gttgacttatttcccgtgtgcaggc

SEQ ID NO: 2920302 - DNA, 25 bp, Homo sapien
ggacgtttagccatgctccatctgg

SEQ ID NO: 2920303 - DNA, 25 bp, Homo sapien
atgcactaactgtggccaggagggc

SEQ ID NO: 2920304 - DNA, 25 bp, Homo sapien
acttcaggaacggttggcggccctg

SEQ ID NO: 2920305 - DNA, 25 bp, Homo sapien
gccctggaaacaggacactgagtcc

SEQ ID NO: 2920306 - DNA, 25 bp, Homo sapien
aggcaggcattgatcagctgggcct

SEQ ID NO: 2920307 - DNA, 25 bp, Homo sapien
gaaacaggacactgagtccctcctg

SEQ ID NO: 2920308 - DNA, 25 bp, Homo sapien
cctgcagcattgatctgaggcacac

SEQ ID NO: 2920309 - DNA, 25 bp, Homo sapien
gagggaaggttgctacgatgaccac

SEQ ID NO: 2920310 - DNA, 25 bp, Homo sapien
gctgccagctcttgtggtaatcaca

SEQ ID NO: 2920311 - DNA, 25 bp, Homo sapien
atcttgatgccacaatgccgatgcg

SEQ ID NO: 2920312 - DNA, 25 bp, Homo sapien
gctggtttcgctgccctgtgtgtag

SEQ ID NO: 2920313 - DNA, 25 bp, Homo sapien
tcggtccctcggtccggctgtgagc

SEQ ID NO: 2920314 - DNA, 25 bp, Homo sapien
cccggctactgttcccagggaggcg

SEQ ID NO: 2920315 - DNA, 25 bp, Homo sapien
agcagtggcggtgtggccgggagaa

SEQ ID NO: 2920316 - DNA, 25 bp, Homo sapien
gttatctgatctcgggcagggcccg

SEQ ID NO: 2920317 - DNA, 25 bp, Homo sapien
tcccgggggcgctccatgccgaggg

SEQ ID NO: 2920318 - DNA, 25 bp, Homo sapien
gcgctccatgccgaggggcgcgtct

SEQ ID NO: 2920319 - DNA, 25 bp, Homo sapien
cgggggcgctccatgccgaggggcg

SEQ ID NO: 2920320 - DNA, 25 bp, Homo sapien
cgctccatgccgaggggcgcgtctt

SEQ ID NO: 2920321 - DNA, 25 bp, Homo sapien
tcggcgtcctccaagctccgggcgg

SEQ ID NO: 2920322 - DNA, 25 bp, Homo sapien
cgtcctccaagctccgggcggccgt

SEQ ID NO: 2920323 - DNA, 25 bp, Homo sapien
gcggccgttcctggccccggcagct

SEQ ID NO: 2920324 - DNA, 25 bp, Homo sapien
cgctcggcgtcctccaagctccggg

SEQ ID NO: 2920325 - DNA, 25 bp, Homo sapien
ttgctgcacaacctcgtgctagctc

SEQ ID NO: 2920326 - DNA, 25 bp, Homo sapien
aacctcgtgctagctccgggccggg

SEQ ID NO: 2920327 - DNA, 25 bp, Homo sapien
tgcacaacctcgtgctagctccggg

SEQ ID NO: 2920328 - DNA, 25 bp, Homo sapien
ctgttgctgcacaacctcgtgctag

SEQ ID NO: 2920329 - DNA, 25 bp, Homo sapien
ttccaaaggcggctgccgatttcag

SEQ ID NO: 2920330 - DNA, 25 bp, Homo sapien
gtgtgggcgcctcggcgctctcgga

SEQ ID NO: 2920331 - DNA, 25 bp, Homo sapien
cgctctcggagacggagcctgtgaa

SEQ ID NO: 2920332 - DNA, 25 bp, Homo sapien
gccgatttcagtggcgtgtgggcgc

SEQ ID NO: 2920333 - DNA, 25 bp, Homo sapien
atgtgtcgctcacagtaaagccctg

SEQ ID NO: 2920334 - DNA, 25 bp, Homo sapien
ctctcctccacgctagccggtggca

SEQ ID NO: 2920335 - DNA, 25 bp, Homo sapien
tcctccacgctagccggtggcaggg

SEQ ID NO: 2920336 - DNA, 25 bp, Homo sapien
gggcaggtgtacccatgtgtcgctc

SEQ ID NO: 2920337 - DNA, 25 bp, Homo sapien
acctggccgctctgactgggcaggt

SEQ ID NO: 2920338 - DNA, 25 bp, Homo sapien
ccggggtgatggcagggccgagcct

SEQ ID NO: 2920339 - DNA, 25 bp, Homo sapien
cacacagcagaatagggatcaagga

SEQ ID NO: 2920340 - DNA, 25 bp, Homo sapien
agcagaatagggatcaaggaggcca

SEQ ID NO: 2920341 - DNA, 25 bp, Homo sapien
acagactcgggcctgcgttcttcct

SEQ ID NO: 2920342 - DNA, 25 bp, Homo sapien
gttcttcctcaaacgatgaatccat

SEQ ID NO: 2920343 - DNA, 25 bp, Homo sapien
tgcgttcttcctcaaacgatgaatc

SEQ ID NO: 2920344 - DNA, 25 bp, Homo sapien
atgcacacagactcgggcctgcgtt

SEQ ID NO: 2920345 - DNA, 25 bp, Homo sapien
gacacaaggtaaggacacaagaagc

SEQ ID NO: 2920346 - DNA, 25 bp, Homo sapien
gagagcaaggacacaaggtaaggac

SEQ ID NO: 2920347 - DNA, 25 bp, Homo sapien
ctgagcagccagcatgtgcacagga

SEQ ID NO: 2920348 - DNA, 25 bp, Homo sapien
cctggcttctgattttcatacagct

SEQ ID NO: 2920349 - DNA, 25 bp, Homo sapien
gaactctgagcagcgaaggtcggat

SEQ ID NO: 2920350 - DNA, 25 bp, Homo sapien
aggagggacaattctcccctctgga

SEQ ID NO: 2920351 - DNA, 25 bp, Homo sapien
gagaggttctgtcacaagccaacat

SEQ ID NO: 2920352 - DNA, 25 bp, Homo sapien
aaggtcggatattgccacagggcca

SEQ ID NO: 2920353 - DNA, 25 bp, Homo sapien
tgggtacacatacatcctacatggt

SEQ ID NO: 2920354 - DNA, 25 bp, Homo sapien
gcaggtgggcacatggctaactacg

SEQ ID NO: 2920355 - DNA, 25 bp, Homo sapien
gcacacatcagtaatttgccagaga

SEQ ID NO: 2920356 - DNA, 25 bp, Homo sapien
gctaactacgtggatgggcacacat

SEQ ID NO: 2920357 - DNA, 25 bp, Homo sapien
ggcaccaactggaaaggatccagtc

SEQ ID NO: 2920358 - DNA, 25 bp, Homo sapien
tgtcttcaaggctgaattagtagtg

SEQ ID NO: 2920359 - DNA, 25 bp, Homo sapien
gagtgggcacggtactgtcttcaag

SEQ ID NO: 2920360 - DNA, 25 bp, Homo sapien
ttagtagtggctgccatttcccagg

SEQ ID NO: 2920361 - DNA, 25 bp, Homo sapien
tcagacgccggcgtgaggccaccag

SEQ ID NO: 2920362 - DNA, 25 bp, Homo sapien
ccttgagggacttccagcgggtcat

SEQ ID NO: 2920363 - DNA, 25 bp, Homo sapien
ttcctggaccctccagaaagaggca

SEQ ID NO: 2920364 - DNA, 25 bp, Homo sapien
gccggaatggtggacactgcttctg

SEQ ID NO: 2920365 - DNA, 25 bp, Homo sapien
ttgtcccagtcccataggcaggagg

SEQ ID NO: 2920366 - DNA, 25 bp, Homo sapien
gcagccacattactcagttacgaag

SEQ ID NO: 2920367 - DNA, 25 bp, Homo sapien
tgctttacaaacaaggacctggagg

SEQ ID NO: 2920368 - DNA, 25 bp, Homo sapien
tctctaaggaagattgcaaggctgc

SEQ ID NO: 2920369 - DNA, 25 bp, Homo sapien
tgggctggtggctccgggctcctct

SEQ ID NO: 2920370 - DNA, 25 bp, Homo sapien
tggctccgggctcctctacccccat

SEQ ID NO: 2920371 - DNA, 25 bp, Homo sapien
agacgacagcatgtctggctgggct

SEQ ID NO: 2920372 - DNA, 25 bp, Homo sapien
ctgcaacagagacgacagcatgtct

SEQ ID NO: 2920373 - DNA, 25 bp, Homo sapien
tggctcgcccccaggctagctccag

SEQ ID NO: 2920374 - DNA, 25 bp, Homo sapien
cctggctcgcccccaggctagctcc

SEQ ID NO: 2920375 - DNA, 25 bp, Homo sapien
ccctggctcgcccccaggctagctc

SEQ ID NO: 2920376 - DNA, 25 bp, Homo sapien
ctggctcgcccccaggctagctcca

SEQ ID NO: 2920377 - DNA, 25 bp, Homo sapien
caggtagcgctgtgacttctcgtcc

SEQ ID NO: 2920378 - DNA, 25 bp, Homo sapien
ttggcgcccgacatggtgaccaggt

SEQ ID NO: 2920379 - DNA, 25 bp, Homo sapien
cacacaggtggtgaacatgtcagcc

SEQ ID NO: 2920380 - DNA, 25 bp, Homo sapien
gaagatgatgccgaacagcagccag

SEQ ID NO: 2920381 - DNA, 25 bp, Homo sapien
catcgatgtcgatctggtccagcgg

SEQ ID NO: 2920382 - DNA, 25 bp, Homo sapien
tgacccgcggcttgatgagctgcgc

SEQ ID NO: 2920383 - DNA, 25 bp, Homo sapien
gtctgtcaaagtcatgcctggcctg

SEQ ID NO: 2920384 - DNA, 25 bp, Homo sapien
tctgactcccgtctgtagggccgct

SEQ ID NO: 2920385 - DNA, 25 bp, Homo sapien
gtaaacagtctcacccaagctaagg

SEQ ID NO: 2920386 - DNA, 25 bp, Homo sapien
tctgaggccgttgcaaagaaacata

SEQ ID NO: 2920387 - DNA, 25 bp, Homo sapien
tggatgctgcatgtcggccaaggtt

SEQ ID NO: 2920388 - DNA, 25 bp, Homo sapien
gttaaaaaccagcaaggagcaccgc

SEQ ID NO: 2920389 - DNA, 25 bp, Homo sapien
catcagggaggcgaagtgtcaagct

SEQ ID NO: 2920390 - DNA, 25 bp, Homo sapien
aagtacacggtttcacatgggcaca

SEQ ID NO: 2920391 - DNA, 25 bp, Homo sapien
gaatcaagcatctgccgcctttggg

SEQ ID NO: 2920392 - DNA, 25 bp, Homo sapien
taagagcacagacctccaagagggc

SEQ ID NO: 2920393 - DNA, 25 bp, Homo sapien
gctcacgtaacaaaaatacttctgt

SEQ ID NO: 2920394 - DNA, 25 bp, Homo sapien
gatatatcagtctattccaacttaa

SEQ ID NO: 2920395 - DNA, 25 bp, Homo sapien
catgctgccatcgtgggtacctagc

SEQ ID NO: 2920396 - DNA, 25 bp, Homo sapien
gctttattgcctcttagctcacgta

SEQ ID NO: 2920397 - DNA, 25 bp, Homo sapien
gccccgctgccccgtgagggctcca

SEQ ID NO: 2920398 - DNA, 25 bp, Homo sapien
ccccgctgccccgtgagggctccat

SEQ ID NO: 2920399 - DNA, 25 bp, Homo sapien
tgaccttgccacttgaatcctccag

SEQ ID NO: 2920400 - DNA, 25 bp, Homo sapien
tgtgtcctcacctccaacgtgaaga

SEQ ID NO: 2920401 - DNA, 25 bp, Homo sapien
gaagatcaggctgggccattattgc

SEQ ID NO: 2920402 - DNA, 25 bp, Homo sapien
ggttacagatccagagcctagggca

SEQ ID NO: 2920403 - DNA, 25 bp, Homo sapien
ccccgcagtcaaggctctccaactc

SEQ ID NO: 2920404 - DNA, 25 bp, Homo sapien
caactccacaccaccggggtgaggg

SEQ ID NO: 2920405 - DNA, 25 bp, Homo sapien
cccctcaactaagctccatggccca

SEQ ID NO: 2920406 - DNA, 25 bp, Homo sapien
aactaagctccatggcccatccctg

SEQ ID NO: 2920407 - DNA, 25 bp, Homo sapien
tccccacccaaggtcagtgaagctc

SEQ ID NO: 2920408 - DNA, 25 bp, Homo sapien
ccctcaggaggcatccccacccaag

SEQ ID NO: 2920409 - DNA, 25 bp, Homo sapien
cagggtgtggggtcatagggtgacc

SEQ ID NO: 2920410 - DNA, 25 bp, Homo sapien
cccaaggtcagtgaagctcagtgca

SEQ ID NO: 2920411 - DNA, 25 bp, Homo sapien
atttggacatggataaccagtgtca

SEQ ID NO: 2920412 - DNA, 25 bp, Homo sapien
tttggacatggataaccagtgtcac

SEQ ID NO: 2920413 - DNA, 25 bp, Homo sapien
gaagagatttggacatggataacca

SEQ ID NO: 2920414 - DNA, 25 bp, Homo sapien
gggaagaagagatttggacatggat

SEQ ID NO: 2920415 - DNA, 25 bp, Homo sapien
aactccctgactagggtttcagaca

SEQ ID NO: 2920416 - DNA, 25 bp, Homo sapien
gcaacatttttcttcgtgatgtcaa

SEQ ID NO: 2920417 - DNA, 25 bp, Homo sapien
atgggctgttctaatccaccaaaca

SEQ ID NO: 2920418 - DNA, 25 bp, Homo sapien
ctgttctaatccaccaaacaccaaa

SEQ ID NO: 2920419 - DNA, 25 bp, Homo sapien
gatgtcaaagacacgggatacagtg

SEQ ID NO: 2920420 - DNA, 25 bp, Homo sapien
ccagctgccatagggatgtcaaaga

SEQ ID NO: 2920421 - DNA, 25 bp, Homo sapien
ccatagggatgtcaaagacacggga

SEQ ID NO: 2920422 - DNA, 25 bp, Homo sapien
gctgccatagggatgtcaaagacac

SEQ ID NO: 2920423 - DNA, 25 bp, Homo sapien
tcctgctaaacggacaactgttaag

SEQ ID NO: 2920424 - DNA, 25 bp, Homo sapien
ggcgggtacgcgctcggagaagtgg

SEQ ID NO: 2920425 - DNA, 25 bp, Homo sapien
ggcgcgcatccggttctgtttccca

SEQ ID NO: 2920426 - DNA, 25 bp, Homo sapien
aggctcggcgttcctcagtctggca

SEQ ID NO: 2920427 - DNA, 25 bp, Homo sapien
cttttagctgcctggagcggggtga

SEQ ID NO: 2920428 - DNA, 25 bp, Homo sapien
ggcccctggggcgagtgcggaacga

SEQ ID NO: 2920429 - DNA, 25 bp, Homo sapien
ggcgagtgcggaacgaccctctctc

SEQ ID NO: 2920430 - DNA, 25 bp, Homo sapien
aagcggctggaatccccagccgccc

SEQ ID NO: 2920431 - DNA, 25 bp, Homo sapien
tcccaacttgcatgtcctcttgcca

SEQ ID NO: 2920432 - DNA, 25 bp, Homo sapien
aattcccaacttgcatgtcctcttg

SEQ ID NO: 2920433 - DNA, 25 bp, Homo sapien
cccaacttgcatgtcctcttgccac

SEQ ID NO: 2920434 - DNA, 25 bp, Homo sapien
attcccaacttgcatgtcctcttgc

SEQ ID NO: 2920435 - DNA, 25 bp, Homo sapien
ttccacagggcaagttaggaagagg

SEQ ID NO: 2920436 - DNA, 25 bp, Homo sapien
gaagttcagtccagtaccatcttgt

SEQ ID NO: 2920437 - DNA, 25 bp, Homo sapien
tcatgtctggcaaatgctgcataga

SEQ ID NO: 2920438 - DNA, 25 bp, Homo sapien
ctctctctcatgtctggcaaatgct

SEQ ID NO: 2920439 - DNA, 25 bp, Homo sapien
gtcttctgtgatggcaatgtggtat

SEQ ID NO: 2920440 - DNA, 25 bp, Homo sapien
ctgtcttctgtgatggcaatgtggt

SEQ ID NO: 2920441 - DNA, 25 bp, Homo sapien
tcttctgtgatggcaatgtggtatt

SEQ ID NO: 2920442 - DNA, 25 bp, Homo sapien
tgtcttctgtgatggcaatgtggta

SEQ ID NO: 2920443 - DNA, 25 bp, Homo sapien
tcaggcagctgcaggcccaggcgca

SEQ ID NO: 2920444 - DNA, 25 bp, Homo sapien
ctcaggcagctgcaggcccaggcgc

SEQ ID NO: 2920445 - DNA, 25 bp, Homo sapien
caggcagctgcaggcccaggcgcat

SEQ ID NO: 2920446 - DNA, 25 bp, Homo sapien
gagtagctttccggctggaaatctg

SEQ ID NO: 2920447 - DNA, 25 bp, Homo sapien
cagagtagctttccggctggaaatc

SEQ ID NO: 2920448 - DNA, 25 bp, Homo sapien
gtagctttccggctggaaatctggg

SEQ ID NO: 2920449 - DNA, 25 bp, Homo sapien
ccagagtagctttccggctggaaat

SEQ ID NO: 2920450 - DNA, 25 bp, Homo sapien
aagagggacaggactcccagtaagg

SEQ ID NO: 2920451 - DNA, 25 bp, Homo sapien
caggactcccagtaagggggtagca

SEQ ID NO: 2920452 - DNA, 25 bp, Homo sapien
cagagagatggcggcaagtggacag

SEQ ID NO: 2920453 - DNA, 25 bp, Homo sapien
catcaagtaagagggacaggactcc

SEQ ID NO: 2920454 - DNA, 25 bp, Homo sapien
ttccctttgtgttcgtcactttggc

SEQ ID NO: 2920455 - DNA, 25 bp, Homo sapien
ccctttgtgttcgtcactttggcga

SEQ ID NO: 2920456 - DNA, 25 bp, Homo sapien
cctttgtgttcgtcactttggcgaa

SEQ ID NO: 2920457 - DNA, 25 bp, Homo sapien
ctttccctttgtgttcgtcactttg

SEQ ID NO: 2920458 - DNA, 25 bp, Homo sapien
tagagaacatatatcgggtgcctct

SEQ ID NO: 2920459 - DNA, 25 bp, Homo sapien
gagaacatatatcgggtgcctctcc

SEQ ID NO: 2920460 - DNA, 25 bp, Homo sapien
agaacatatatcgggtgcctctcct

SEQ ID NO: 2920461 - DNA, 25 bp, Homo sapien
ctagagaacatatatcgggtgcctc

SEQ ID NO: 2920462 - DNA, 25 bp, Homo sapien
tatcacctttcttatagattcgcat

SEQ ID NO: 2920463 - DNA, 25 bp, Homo sapien
caatatcacctttcttatagattcg

SEQ ID NO: 2920464 - DNA, 25 bp, Homo sapien
acaatatcacctttcttatagattc

SEQ ID NO: 2920465 - DNA, 25 bp, Homo sapien
aatatcacctttcttatagattcgc

SEQ ID NO: 2920466 - DNA, 25 bp, Homo sapien
ctatctcggctctcagagtgcttaa

SEQ ID NO: 2920467 - DNA, 25 bp, Homo sapien
atctcggctctcagagtgcttaatg

SEQ ID NO: 2920468 - DNA, 25 bp, Homo sapien
tccttcacatgtttcaggaagctat

SEQ ID NO: 2920469 - DNA, 25 bp, Homo sapien
agctatctcggctctcagagtgctt

SEQ ID NO: 2920470 - DNA, 25 bp, Homo sapien
cttcccattggttctacattggttc

SEQ ID NO: 2920471 - DNA, 25 bp, Homo sapien
ctacattggttctcccattggttct

SEQ ID NO: 2920472 - DNA, 25 bp, Homo sapien
tctacattggttctcccattggttc

SEQ ID NO: 2920473 - DNA, 25 bp, Homo sapien
agagcgctgacctggagttctgcct

SEQ ID NO: 2920474 - DNA, 25 bp, Homo sapien
ggcagcccggtctggtgtggtgcca

SEQ ID NO: 2920475 - DNA, 25 bp, Homo sapien
acccaggtggtcggcagcccggtct

SEQ ID NO: 2920476 - DNA, 25 bp, Homo sapien
gggaagagcgctgacctggagttct

SEQ ID NO: 2920477 - DNA, 25 bp, Homo sapien
tcagagacccaggtttgcacatgca

SEQ ID NO: 2920478 - DNA, 25 bp, Homo sapien
gagacccaggtttgcacatgcaaca

SEQ ID NO: 2920479 - DNA, 25 bp, Homo sapien
agagacccaggtttgcacatgcaac

SEQ ID NO: 2920480 - DNA, 25 bp, Homo sapien
acccaggtttgcacatgcaacacgc

SEQ ID NO: 2920481 - DNA, 25 bp, Homo sapien
gctcctcgcggattagaaagttttg

SEQ ID NO: 2920482 - DNA, 25 bp, Homo sapien
gagagacagtgaagttgaaaccgtg

SEQ ID NO: 2920483 - DNA, 25 bp, Homo sapien
gaacatgggtgaatcgcttttattc

SEQ ID NO: 2920484 - DNA, 25 bp, Homo sapien
ccatcaaggaaatgattgatcggct

SEQ ID NO: 2920485 - DNA, 25 bp, Homo sapien
tgaaggagctcccagttggcaccgc

SEQ ID NO: 2920486 - DNA, 25 bp, Homo sapien
tcccagttggcaccgcctggaatgg

SEQ ID NO: 2920487 - DNA, 25 bp, Homo sapien
ttggcaccgcctggaatggcgcgac

SEQ ID NO: 2920488 - DNA, 25 bp, Homo sapien
gagctcccagttggcaccgcctgga

SEQ ID NO: 2920489 - DNA, 25 bp, Homo sapien
caggtagcagttatgcaatggcatg

SEQ ID NO: 2920490 - DNA, 25 bp, Homo sapien
tccatgagtgcttgatggaaaacca

SEQ ID NO: 2920491 - DNA, 25 bp, Homo sapien
ggatccatcatgaaccgccctagaa

SEQ ID NO: 2920492 - DNA, 25 bp, Homo sapien
tatttagttgatcttggaggatcca

SEQ ID NO: 2920493 - DNA, 25 bp, Homo sapien
gagacgttcttccaccgatgacagc

SEQ ID NO: 2920494 - DNA, 25 bp, Homo sapien
aagtaacttgcagagattgctgtgc

SEQ ID NO: 2920495 - DNA, 25 bp, Homo sapien
gagtcctgagggtccaagtaacttg

SEQ ID NO: 2920496 - DNA, 25 bp, Homo sapien
tggtcctccattgcacttgaacaag

SEQ ID NO: 2920497 - DNA, 25 bp, Homo sapien
tgtaaactcgccttgggtcctgaag

SEQ ID NO: 2920498 - DNA, 25 bp, Homo sapien
gatgagcctcggtgatgagacagac

SEQ ID NO: 2920499 - DNA, 25 bp, Homo sapien
gagagggcaccctaggaaaagcgtc

SEQ ID NO: 2920500 - DNA, 25 bp, Homo sapien
gaaaagcgtcttcaggcaatcgtgg

SEQ ID NO: 2920501 - DNA, 25 bp, Homo sapien
tcattgattagtaattgaagaaaca

SEQ ID NO: 2920502 - DNA, 25 bp, Homo sapien
cattgattagtaattgaagaaacaa

SEQ ID NO: 2920503 - DNA, 25 bp, Homo sapien
ttgattagtaattgaagaaacaaag

SEQ ID NO: 2920504 - DNA, 25 bp, Homo sapien
agggaggggtttccctgctacagct

SEQ ID NO: 2920505 - DNA, 25 bp, Homo sapien
cagggaggggtttccctgctacagc

SEQ ID NO: 2920506 - DNA, 25 bp, Homo sapien
tcctgtccttccctaagggtctcag

SEQ ID NO: 2920507 - DNA, 25 bp, Homo sapien
agctgcagaaggagatactaacgct

SEQ ID NO: 2920508 - DNA, 25 bp, Homo sapien
agaaggagatactaacgctggccat

SEQ ID NO: 2920509 - DNA, 25 bp, Homo sapien
ttccctaagggtctcaggttctgag

SEQ ID NO: 2920510 - DNA, 25 bp, Homo sapien
caggcatctgttgagaactggccca

SEQ ID NO: 2920511 - DNA, 25 bp, Homo sapien
ggcatctgttgagaactggcccaat

SEQ ID NO: 2920512 - DNA, 25 bp, Homo sapien
catctgttgagaactggcccaatgt

SEQ ID NO: 2920513 - DNA, 25 bp, Homo sapien
ctgttgagaactggcccaatgttgg

SEQ ID NO: 2920514 - DNA, 25 bp, Homo sapien
gagaaatcagggacaagtgggcacc

SEQ ID NO: 2920515 - DNA, 25 bp, Homo sapien
ggatacctacgaccctagtgacctc

SEQ ID NO: 2920516 - DNA, 25 bp, Homo sapien
tcaggccccagttggacagtaggcc

SEQ ID NO: 2920517 - DNA, 25 bp, Homo sapien
ccaggcctcagagggatacctacga

SEQ ID NO: 2920518 - DNA, 25 bp, Homo sapien
gagtatccacagctggcttgcccat

SEQ ID NO: 2920519 - DNA, 25 bp, Homo sapien
gccgagtatccacagctggcttgcc

SEQ ID NO: 2920520 - DNA, 25 bp, Homo sapien
cagccgagtatccacagctggcttg

SEQ ID NO: 2920521 - DNA, 25 bp, Homo sapien
catccagccgagtatccacagctgg

SEQ ID NO: 2920522 - DNA, 25 bp, Homo sapien
gcaggtgtgcactggagcgtggcct

SEQ ID NO: 2920523 - DNA, 25 bp, Homo sapien
gtgtgcactggagcgtggcctggct

SEQ ID NO: 2920524 - DNA, 25 bp, Homo sapien
tgcactggagcgtggcctggctctc

SEQ ID NO: 2920525 - DNA, 25 bp, Homo sapien
aggtgtgcactggagcgtggcctgg

SEQ ID NO: 2920526 - DNA, 25 bp, Homo sapien
tcacagccagagacactaacaccag

SEQ ID NO: 2920527 - DNA, 25 bp, Homo sapien
cacagccagagacactaacaccaga

SEQ ID NO: 2920528 - DNA, 25 bp, Homo sapien
tccttggttgggagggtaacatgaa

SEQ ID NO: 2920529 - DNA, 25 bp, Homo sapien
ggcaggtgctgggaaacgtatactt

SEQ ID NO: 2920530 - DNA, 25 bp, Homo sapien
cgtatactttacagagtgaggagga

SEQ ID NO: 2920531 - DNA, 25 bp, Homo sapien
agtgaggaggataatgactttgttc

SEQ ID NO: 2920532 - DNA, 25 bp, Homo sapien
gagataactggacagttgcttcaaa

SEQ ID NO: 2920533 - DNA, 25 bp, Homo sapien
aagctccagtatcctttgcatctgg

SEQ ID NO: 2920534 - DNA, 25 bp, Homo sapien
tacttagactatgagaaacctacaa

SEQ ID NO: 2920535 - DNA, 25 bp, Homo sapien
gcatacagtcaatctttggcagctt

SEQ ID NO: 2920536 - DNA, 25 bp, Homo sapien
ggtgaagcattttgatcatctccac

SEQ ID NO: 2920537 - DNA, 25 bp, Homo sapien
gaatattataagcaaagacttttac

SEQ ID NO: 2920538 - DNA, 25 bp, Homo sapien
cttagaatattataagcaaagactt

SEQ ID NO: 2920539 - DNA, 25 bp, Homo sapien
tagaatattataagcaaagactttt

SEQ ID NO: 2920540 - DNA, 25 bp, Homo sapien
ttagaatattataagcaaagacttt

SEQ ID NO: 2920541 - DNA, 25 bp, Homo sapien
gtcaacttggaagctgatatccacc

SEQ ID NO: 2920542 - DNA, 25 bp, Homo sapien
gcaagcggctgtgagtgatgcctcc

SEQ ID NO: 2920543 - DNA, 25 bp, Homo sapien
tgtcgcaagcggctgtgagtgatgc

SEQ ID NO: 2920544 - DNA, 25 bp, Homo sapien
cccggtgtcgcaagcggctgtgagt

SEQ ID NO: 2920545 - DNA, 25 bp, Homo sapien
tcgcaagcggctgtgagtgatgcct

SEQ ID NO: 2920546 - DNA, 25 bp, Homo sapien
tcagcttgttttgtatacttactcc

SEQ ID NO: 2920547 - DNA, 25 bp, Homo sapien
ttcagcttgttttgtatacttactc

SEQ ID NO: 2920548 - DNA, 25 bp, Homo sapien
tcttccacagctcctctaagcaaaa

SEQ ID NO: 2920549 - DNA, 25 bp, Homo sapien
gcatcttccacagctcctctaagca

SEQ ID NO: 2920550 - DNA, 25 bp, Homo sapien
acagctcctctaagcaaaagcacca

SEQ ID NO: 2920551 - DNA, 25 bp, Homo sapien
tcctctaagcaaaagcaccacattg

SEQ ID NO: 2920552 - DNA, 25 bp, Homo sapien
cttacatagacaccgtctccgtgcg

SEQ ID NO: 2920553 - DNA, 25 bp, Homo sapien
ggtgtgttgcgttatcacttcttac

SEQ ID NO: 2920554 - DNA, 25 bp, Homo sapien
ctggtttggcagagcgcaaatttgt

SEQ ID NO: 2920555 - DNA, 25 bp, Homo sapien
caaatttgtgcaaggtgtgttgcgt

SEQ ID NO: 2920556 - DNA, 25 bp, Homo sapien
ggatgctgcgaatcacgtccagcca

SEQ ID NO: 2920557 - DNA, 25 bp, Homo sapien
acccaacaaagccagtcgtgcctga

SEQ ID NO: 2920558 - DNA, 25 bp, Homo sapien
ttagcggatacgaggatgctgcgaa

SEQ ID NO: 2920559 - DNA, 25 bp, Homo sapien
acaaagccagtcgtgcctgaatgct

SEQ ID NO: 2920560 - DNA, 25 bp, Homo sapien
ccgcaggtctttacggctgtgggcc

SEQ ID NO: 2920561 - DNA, 25 bp, Homo sapien
ccccgcaggtctttacggctgtggg

SEQ ID NO: 2920562 - DNA, 25 bp, Homo sapien
cgcaggtctttacggctgtgggcca

SEQ ID NO: 2920563 - DNA, 25 bp, Homo sapien
gcccccgcaggtctttacggctgtg

SEQ ID NO: 2920564 - DNA, 25 bp, Homo sapien
ggctttgacattttcgatagtggca

SEQ ID NO: 2920565 - DNA, 25 bp, Homo sapien
tttgacattttcgatagtggcactg

SEQ ID NO: 2920566 - DNA, 25 bp, Homo sapien
gagcctctgctggtcacagggattg

SEQ ID NO: 2920567 - DNA, 25 bp, Homo sapien
ggtcacagggattgccttctttatc

SEQ ID NO: 2920568 - DNA, 25 bp, Homo sapien
gcttgcctgcaaagatgagcctctg

SEQ ID NO: 2920569 - DNA, 25 bp, Homo sapien
ggccttcacattttcgatggtgtca

SEQ ID NO: 2920570 - DNA, 25 bp, Homo sapien
tctttatcttggatcttggccttca

SEQ ID NO: 2920571 - DNA, 25 bp, Homo sapien
ctgctggtcgggggggatgccttct

SEQ ID NO: 2920572 - DNA, 25 bp, Homo sapien
cgcaggaccagatgcagggtcgact

SEQ ID NO: 2920573 - DNA, 25 bp, Homo sapien
ctctcagacgcaggaccagatgcag

SEQ ID NO: 2920574 - DNA, 25 bp, Homo sapien
acctctcagacgcaggaccagatgc

SEQ ID NO: 2920575 - DNA, 25 bp, Homo sapien
ccacctctcagacgcaggaccagat

SEQ ID NO: 2920576 - DNA, 25 bp, Homo sapien
ggtcttgccggtcagggtcttcacg

SEQ ID NO: 2920577 - DNA, 25 bp, Homo sapien
gtcttgccggtcagggtcttcacga

SEQ ID NO: 2920578 - DNA, 25 bp, Homo sapien
ggtcagggtcttcacgaagatctgc

SEQ ID NO: 2920579 - DNA, 25 bp, Homo sapien
gccggtcagggtcttcacgaagatc

SEQ ID NO: 2920580 - DNA, 25 bp, Homo sapien
attttcgatggtgtcactgggctcc

SEQ ID NO: 2920581 - DNA, 25 bp, Homo sapien
tttcgatggtgtcactgggctccac

SEQ ID NO: 2920582 - DNA, 25 bp, Homo sapien
ttttcgatggtgtcactgggctcca

SEQ ID NO: 2920583 - DNA, 25 bp, Homo sapien
ctttatcttggatcttggccttcac

SEQ ID NO: 2920584 - DNA, 25 bp, Homo sapien
ttctttatcttggatcttggccttc

SEQ ID NO: 2920585 - DNA, 25 bp, Homo sapien
gatcggggggatgccttctttatct

SEQ ID NO: 2920586 - DNA, 25 bp, Homo sapien
ctgatcggggggatgccttctttat

SEQ ID NO: 2920587 - DNA, 25 bp, Homo sapien
tgcttgcctgcaaagatgagcctct

SEQ ID NO: 2920588 - DNA, 25 bp, Homo sapien
cagctgcttgcctgcaaagatgagc

SEQ ID NO: 2920589 - DNA, 25 bp, Homo sapien
gcttgcctgcaaagatgagcctctg

SEQ ID NO: 2920590 - DNA, 25 bp, Homo sapien
gctgcttgcctgcaaagatgagcct

SEQ ID NO: 2920591 - DNA, 25 bp, Homo sapien
agatcttcataccacctctcagacg

SEQ ID NO: 2920592 - DNA, 25 bp, Homo sapien
ctccagggtgatggtctttccagtc

SEQ ID NO: 2920593 - DNA, 25 bp, Homo sapien
acgaagatcttcataccacctctca

SEQ ID NO: 2920594 - DNA, 25 bp, Homo sapien
cagggtcttcacgaagatcttcata

SEQ ID NO: 2920595 - DNA, 25 bp, Homo sapien
ctttcacattttcgatggtgtcact

SEQ ID NO: 2920596 - DNA, 25 bp, Homo sapien
cttggctttcacattttcgatggtg

SEQ ID NO: 2920597 - DNA, 25 bp, Homo sapien
ggctttcacattttcgatggtgtca

SEQ ID NO: 2920598 - DNA, 25 bp, Homo sapien
atcttggctttcacattttcgatgg

SEQ ID NO: 2920599 - DNA, 25 bp, Homo sapien
gatgagcctctgctgatcggggggg

SEQ ID NO: 2920600 - DNA, 25 bp, Homo sapien
gcagggtcgactctttctggatgct

SEQ ID NO: 2920601 - DNA, 25 bp, Homo sapien
tctggatgctgtagtcagaaagagt

SEQ ID NO: 2920602 - DNA, 25 bp, Homo sapien
aaagagtgcggccatcttccaactt

SEQ ID NO: 2920603 - DNA, 25 bp, Homo sapien
attttgaacaggttcagctattact

SEQ ID NO: 2920604 - DNA, 25 bp, Homo sapien
tttgaacaggttcagctattactga

SEQ ID NO: 2920605 - DNA, 25 bp, Homo sapien
ttttgaacaggttcagctattactg

SEQ ID NO: 2920606 - DNA, 25 bp, Homo sapien
cattttgaacaggttcagctattac

SEQ ID NO: 2920607 - DNA, 25 bp, Homo sapien
ttatcttagcaagaggaatgcagta

SEQ ID NO: 2920608 - DNA, 25 bp, Homo sapien
tcattatcttagcaagaggaatgca

SEQ ID NO: 2920609 - DNA, 25 bp, Homo sapien
aaaaaaaatgtgagcaaaagaatct

SEQ ID NO: 2920610 - DNA, 25 bp, Homo sapien
aaaaaatgtgagcaaaagaatctat

SEQ ID NO: 2920611 - DNA, 25 bp, Homo sapien
tctcctaggatcctcggactatcct

SEQ ID NO: 2920612 - DNA, 25 bp, Homo sapien
tcctcggactatcctgtggatccca

SEQ ID NO: 2920613 - DNA, 25 bp, Homo sapien
ctagggatttcgcggtttactcctg

SEQ ID NO: 2920614 - DNA, 25 bp, Homo sapien
tacaacgactagacaggcctgaggc

SEQ ID NO: 2920615 - DNA, 25 bp, Homo sapien
tactatggcctttatctaacttgac

SEQ ID NO: 2920616 - DNA, 25 bp, Homo sapien
caggcaggcccggtgtttcctccat

SEQ ID NO: 2920617 - DNA, 25 bp, Homo sapien
tggtggccacattggataagtgtac

SEQ ID NO: 2920618 - DNA, 25 bp, Homo sapien
ctctccccttctgcctgttgtctac

SEQ ID NO: 2920619 - DNA, 25 bp, Homo sapien
cagggtggtcaaccctgaaggccac

SEQ ID NO: 2920620 - DNA, 25 bp, Homo sapien
gcttgtattcttcttgccgagtcga

SEQ ID NO: 2920621 - DNA, 25 bp, Homo sapien
aaggccacctggctgaaactgaacc

SEQ ID NO: 2920622 - DNA, 25 bp, Homo sapien
ggccacctggctgaaactgaacctg

SEQ ID NO: 2920623 - DNA, 25 bp, Homo sapien
gcagccatggaacaggagacatccc

SEQ ID NO: 2920624 - DNA, 25 bp, Homo sapien
ggcagccatggaacaggagacatcc

SEQ ID NO: 2920625 - DNA, 25 bp, Homo sapien
gaggggaagagttgtccctgcttac

SEQ ID NO: 2920626 - DNA, 25 bp, Homo sapien
acaggcttttgtctggcttccctgg

SEQ ID NO: 2920627 - DNA, 25 bp, Homo sapien
gcttccctgggattcctgagtggcc

SEQ ID NO: 2920628 - DNA, 25 bp, Homo sapien
ctcagaggcccctttattccacagg

SEQ ID NO: 2920629 - DNA, 25 bp, Homo sapien
ttattccacaggcttttgtctggct

SEQ ID NO: 2920630 - DNA, 25 bp, Homo sapien
gaatgatgactgcaccctgaaatcc

SEQ ID NO: 2920631 - DNA, 25 bp, Homo sapien
ggaatgatgactgcaccctgaaatc

SEQ ID NO: 2920632 - DNA, 25 bp, Homo sapien
catccatctaggctggcattccata

SEQ ID NO: 2920633 - DNA, 25 bp, Homo sapien
tgaccatccatctaggctggcattc

SEQ ID NO: 2920634 - DNA, 25 bp, Homo sapien
tctaggctggcattccatactaatg

SEQ ID NO: 2920635 - DNA, 25 bp, Homo sapien
ggctggcattccatactaatgccca

SEQ ID NO: 2920636 - DNA, 25 bp, Homo sapien
gaggccttctaagggctgtctgact

SEQ ID NO: 2920637 - DNA, 25 bp, Homo sapien
ccagttatgcacaaccacatcaggg

SEQ ID NO: 2920638 - DNA, 25 bp, Homo sapien
taccagcaggcggttatccacatgg

SEQ ID NO: 2920639 - DNA, 25 bp, Homo sapien
tactgggatgtcaactgggatacca

SEQ ID NO: 2920640 - DNA, 25 bp, Homo sapien
aaggtgtgtcctcaaatctcccagc

SEQ ID NO: 2920641 - DNA, 25 bp, Homo sapien
tcacagaagtcaaggtgtgtcctca

SEQ ID NO: 2920642 - DNA, 25 bp, Homo sapien
agttctgcatccaactcaccaaagg

SEQ ID NO: 2920643 - DNA, 25 bp, Homo sapien
gttcaaggaacccatgcaatcctgc

SEQ ID NO: 2920644 - DNA, 25 bp, Homo sapien
gcttggaccccgctgtgcgagctgc

SEQ ID NO: 2920645 - DNA, 25 bp, Homo sapien
gccccaagacttctgcggcttggac

SEQ ID NO: 2920646 - DNA, 25 bp, Homo sapien
tgcggtgcctcatttaacggggtgc

SEQ ID NO: 2920647 - DNA, 25 bp, Homo sapien
cccgctgtgcgagctgctcagtgag

SEQ ID NO: 2920648 - DNA, 25 bp, Homo sapien
gaatagtaacataccaggacttctg

SEQ ID NO: 2920649 - DNA, 25 bp, Homo sapien
ccaagcgctactggcatgatggcaa

SEQ ID NO: 2920650 - DNA, 25 bp, Homo sapien
gatggcaactgccactccagatggc

SEQ ID NO: 2920651 - DNA, 25 bp, Homo sapien
tacccttagtagatccacagtgcct

SEQ ID NO: 2920652 - DNA, 25 bp, Homo sapien
gtcacaatatagtgtgctcgacctc

SEQ ID NO: 2920653 - DNA, 25 bp, Homo sapien
acctcaactttgctcgaagattgga

SEQ ID NO: 2920654 - DNA, 25 bp, Homo sapien
tattggtcacaatatagtgtgctcg

SEQ ID NO: 2920655 - DNA, 25 bp, Homo sapien
ctttgctcgaagattggagcaggtg

SEQ ID NO: 2920656 - DNA, 25 bp, Homo sapien
tggaaaacatatgcctcaacacaaa

SEQ ID NO: 2920657 - DNA, 25 bp, Homo sapien
acaaaagcctctaaacaatttagtg

SEQ ID NO: 2920658 - DNA, 25 bp, Homo sapien
caaaagcctctaaacaatttagtgt

SEQ ID NO: 2920659 - DNA, 25 bp, Homo sapien
aacatatgcctcaacacaaaagggc

SEQ ID NO: 2920660 - DNA, 25 bp, Homo sapien
ggaacacgatcgaacttcatttgga

SEQ ID NO: 2920661 - DNA, 25 bp, Homo sapien
tggtgaggacacctcgagagtgaac

SEQ ID NO: 2920662 - DNA, 25 bp, Homo sapien
atttgggataggacagaatgtgccc

SEQ ID NO: 2920663 - DNA, 25 bp, Homo sapien
cctgtgtcaaaagtcccggaacacg

SEQ ID NO: 2920664 - DNA, 25 bp, Homo sapien
cacttaaaccacctgcagatgagag

SEQ ID NO: 2920665 - DNA, 25 bp, Homo sapien
tccataacccatatctcctctgagg

SEQ ID NO: 2920666 - DNA, 25 bp, Homo sapien
gctgaaaatttgtcatggctccata

SEQ ID NO: 2920667 - DNA, 25 bp, Homo sapien
cactcagtggaggtgaaataaaatc

SEQ ID NO: 2920668 - DNA, 25 bp, Homo sapien
gaagccctgctacggagggctcctg

SEQ ID NO: 2920669 - DNA, 25 bp, Homo sapien
cgtcatcctagtcggcccatttcag

SEQ ID NO: 2920670 - DNA, 25 bp, Homo sapien
cccatttcaggtcctggcgtccgga

SEQ ID NO: 2920671 - DNA, 25 bp, Homo sapien
ctgaagatgggatgccgcgctgctt

SEQ ID NO: 2920672 - DNA, 25 bp, Homo sapien
aggccaccatgacagggcttgttgc

SEQ ID NO: 2920673 - DNA, 25 bp, Homo sapien
gccaccatgacagggcttgttgcca

SEQ ID NO: 2920674 - DNA, 25 bp, Homo sapien
caccatgacagggcttgttgccatc

SEQ ID NO: 2920675 - DNA, 25 bp, Homo sapien
ggccaccatgacagggcttgttgcc

SEQ ID NO: 2920676 - DNA, 25 bp, Homo sapien
tttgaagacattcagccagacctag

SEQ ID NO: 2920677 - DNA, 25 bp, Homo sapien
gccagacctagaagcatctaggccc

SEQ ID NO: 2920678 - DNA, 25 bp, Homo sapien
ttttgaagacattcagccagaccta

SEQ ID NO: 2920679 - DNA, 25 bp, Homo sapien
agacctagaagcatctaggcccctc

SEQ ID NO: 2920680 - DNA, 25 bp, Homo sapien
tcccagggacaaggattgctgccat

SEQ ID NO: 2920681 - DNA, 25 bp, Homo sapien
cagcatcccagggacaaggattgct

SEQ ID NO: 2920682 - DNA, 25 bp, Homo sapien
cccagggacaaggattgctgccatc

SEQ ID NO: 2920683 - DNA, 25 bp, Homo sapien
catcccagggacaaggattgctgcc

SEQ ID NO: 2920684 - DNA, 25 bp, Homo sapien
aatgcttgccgcatcccgttgctgg

SEQ ID NO: 2920685 - DNA, 25 bp, Homo sapien
caggcaggatatggcacaatgccac

SEQ ID NO: 2920686 - DNA, 25 bp, Homo sapien
catctgggaaaaagtgccaaacggg

SEQ ID NO: 2920687 - DNA, 25 bp, Homo sapien
taggattccaagaaactgggcagac

SEQ ID NO: 2920688 - DNA, 25 bp, Homo sapien
gagtttgggatctcgcactgcctcc

SEQ ID NO: 2920689 - DNA, 25 bp, Homo sapien
aataaatgacggcagagcggcggct

SEQ ID NO: 2920690 - DNA, 25 bp, Homo sapien
ctcattgaccctccgcaaatcctgg

SEQ ID NO: 2920691 - DNA, 25 bp, Homo sapien
cctccgcaaatcctggcctgagttt

SEQ ID NO: 2920692 - DNA, 25 bp, Homo sapien
agacagatcctggaacatgcccaac

SEQ ID NO: 2920693 - DNA, 25 bp, Homo sapien
tctctgtataagtccttctgagcag

SEQ ID NO: 2920694 - DNA, 25 bp, Homo sapien
agagaagtctatagacagatcctgg

SEQ ID NO: 2920695 - DNA, 25 bp, Homo sapien
catgcccaacccctgaaatgacaaa

SEQ ID NO: 2920696 - DNA, 25 bp, Homo sapien
ttcatgagttatttggggatagaca

SEQ ID NO: 2920697 - DNA, 25 bp, Homo sapien
gttatttggggatagacatacttac

SEQ ID NO: 2920698 - DNA, 25 bp, Homo sapien
gagttatttggggatagacatactt

SEQ ID NO: 2920699 - DNA, 25 bp, Homo sapien
catgagttatttggggatagacata

SEQ ID NO: 2920700 - DNA, 25 bp, Homo sapien
ctggtacgtcccttgaaaccatcca

SEQ ID NO: 2920701 - DNA, 25 bp, Homo sapien
accatcctcctggtacgtcccttga

SEQ ID NO: 2920702 - DNA, 25 bp, Homo sapien
gggcaccatcctcctggtacgtccc

SEQ ID NO: 2920703 - DNA, 25 bp, Homo sapien
tgaaaccatccagagctctttccat

SEQ ID NO: 2920704 - DNA, 25 bp, Homo sapien
tgattgatttggaaacttccctcca

SEQ ID NO: 2920705 - DNA, 25 bp, Homo sapien
cctgttttccacagtttgtaatgtg

SEQ ID NO: 2920706 - DNA, 25 bp, Homo sapien
caaagaatggcaagatttttgggct

SEQ ID NO: 2920707 - DNA, 25 bp, Homo sapien
aacctattcaggctaaaatcctgtt

SEQ ID NO: 2920708 - DNA, 25 bp, Homo sapien
gtcacactctgaccccatagaattt

SEQ ID NO: 2920709 - DNA, 25 bp, Homo sapien
acactctgaccccatagaatttcca

SEQ ID NO: 2920710 - DNA, 25 bp, Homo sapien
agagaggaccagcatgtggcaaatg

SEQ ID NO: 2920711 - DNA, 25 bp, Homo sapien
gagaggaccagcatgtggcaaatgc

SEQ ID NO: 2920712 - DNA, 25 bp, Homo sapien
tcaggaaagagaggaccagcatgtg

SEQ ID NO: 2920713 - DNA, 25 bp, Homo sapien
ctgtcaggaaagagaggaccagcat

SEQ ID NO: 2920714 - DNA, 25 bp, Homo sapien
agcatgctgccctgcatcagccccc

SEQ ID NO: 2920715 - DNA, 25 bp, Homo sapien
ctcagcatgctgccctgcatcagcc

SEQ ID NO: 2920716 - DNA, 25 bp, Homo sapien
cacagaagctggagagacgtcccgc

SEQ ID NO: 2920717 - DNA, 25 bp, Homo sapien
ctgctcctccaactgcccggtactc

SEQ ID NO: 2920718 - DNA, 25 bp, Homo sapien
tatgaaagtatgcacaacagaatta

SEQ ID NO: 2920719 - DNA, 25 bp, Homo sapien
aattatgaaagtatgcacaacagaa

SEQ ID NO: 2920720 - DNA, 25 bp, Homo sapien
ttatgaaagtatgcacaacagaatt

SEQ ID NO: 2920721 - DNA, 25 bp, Homo sapien
gaaagtatgcacaacagaattaaaa

SEQ ID NO: 2920722 - DNA, 25 bp, Homo sapien
ttctctttgaagttgaccctgaaat

SEQ ID NO: 2920723 - DNA, 25 bp, Homo sapien
ctttgggtggtccattcacgtccat

SEQ ID NO: 2920724 - DNA, 25 bp, Homo sapien
cctctcgcaattccgtctggtatct

SEQ ID NO: 2920725 - DNA, 25 bp, Homo sapien
tggtatctgtgatttgtatacgccc

SEQ ID NO: 2920726 - DNA, 25 bp, Homo sapien
ctgatacagatgaatcatttttctg

SEQ ID NO: 2920727 - DNA, 25 bp, Homo sapien
gtgatttgtatacgccctcctgctg

SEQ ID NO: 2920728 - DNA, 25 bp, Homo sapien
gctggctcagtgctgactgaacgtg

SEQ ID NO: 2920729 - DNA, 25 bp, Homo sapien
ggttgatctcaggatatgatctgtg

SEQ ID NO: 2920730 - DNA, 25 bp, Homo sapien
taggagagcaccaggaacaacacat

SEQ ID NO: 2920731 - DNA, 25 bp, Homo sapien
actgaacgtggggtaggagagcacc

SEQ ID NO: 2920732 - DNA, 25 bp, Homo sapien
tatttcatccttgtctgtgcctggg

SEQ ID NO: 2920733 - DNA, 25 bp, Homo sapien
tttcatccttgtctgtgcctgggcc

SEQ ID NO: 2920734 - DNA, 25 bp, Homo sapien
tggctcctatttcatccttgtctgt

SEQ ID NO: 2920735 - DNA, 25 bp, Homo sapien
cttggctcctatttcatccttgtct

SEQ ID NO: 2920736 - DNA, 25 bp, Homo sapien
cgtagaagatattcagccagaccga

SEQ ID NO: 2920737 - DNA, 25 bp, Homo sapien
atattcagccagaccgagaggcatc

SEQ ID NO: 2920738 - DNA, 25 bp, Homo sapien
cggggaagtgatcttcgtagaagat

SEQ ID NO: 2920739 - DNA, 25 bp, Homo sapien
gagaggcatctaggccgctcagaaa

SEQ ID NO: 2920740 - DNA, 25 bp, Homo sapien
ttcctcatcctgctcggccccttgc

SEQ ID NO: 2920741 - DNA, 25 bp, Homo sapien
aggctgggatgccacgctgcttccc

SEQ ID NO: 2920742 - DNA, 25 bp, Homo sapien
gcagccggagacgttcctgtggacc

SEQ ID NO: 2920743 - DNA, 25 bp, Homo sapien
cctgctcggccccttgcgactcctg

SEQ ID NO: 2920744 - DNA, 25 bp, Homo sapien
caccaaagaccggtccacataaaag

SEQ ID NO: 2920745 - DNA, 25 bp, Homo sapien
tcaccaaagaccggtccacataaaa

SEQ ID NO: 2920746 - DNA, 25 bp, Homo sapien
ctcaccaaagaccggtccacataaa

SEQ ID NO: 2920747 - DNA, 25 bp, Homo sapien
aggcctgcacagacccaaagtggaa

SEQ ID NO: 2920748 - DNA, 25 bp, Homo sapien
cgaggcctgcacagacccaaagtgg

SEQ ID NO: 2920749 - DNA, 25 bp, Homo sapien
gcctgcacagacccaaagtggaacc

SEQ ID NO: 2920750 - DNA, 25 bp, Homo sapien
ggcctgcacagacccaaagtggaac

SEQ ID NO: 2920751 - DNA, 25 bp, Homo sapien
gacaatgtgctaccgtggggctttt

SEQ ID NO: 2920752 - DNA, 25 bp, Homo sapien
ccggacaatgtgctaccgtggggct

SEQ ID NO: 2920753 - DNA, 25 bp, Homo sapien
atgtgctaccgtggggcttttgtcc

SEQ ID NO: 2920754 - DNA, 25 bp, Homo sapien
caatgtgctaccgtggggcttttgt

SEQ ID NO: 2920755 - DNA, 25 bp, Homo sapien
gaaagaagcacacagagggtgagag

SEQ ID NO: 2920756 - DNA, 25 bp, Homo sapien
aggcaacccctgcggctgccgggtt

SEQ ID NO: 2920757 - DNA, 25 bp, Homo sapien
gcggtggccgagaaatacacgcccc

SEQ ID NO: 2920758 - DNA, 25 bp, Homo sapien
cccacacacagtcctaccgcggtgg

SEQ ID NO: 2920759 - DNA, 25 bp, Homo sapien
ctttttgacgcacagggcacattcg

SEQ ID NO: 2920760 - DNA, 25 bp, Homo sapien
gggcacattcgtccaaagacacaca

SEQ ID NO: 2920761 - DNA, 25 bp, Homo sapien
gcacagggcacattcgtccaaagac

SEQ ID NO: 2920762 - DNA, 25 bp, Homo sapien
ttttgacgcacagggcacattcgtc

SEQ ID NO: 2920763 - DNA, 25 bp, Homo sapien
ctcaccaaagaccggtccacataaa

SEQ ID NO: 2920764 - DNA, 25 bp, Homo sapien
caccaaagaccggtccacataaaag

SEQ ID NO: 2920765 - DNA, 25 bp, Homo sapien
tcaccaaagaccggtccacataaaa

SEQ ID NO: 2920766 - DNA, 25 bp, Homo sapien
gaggcctgcacagacccaaagtgca

SEQ ID NO: 2920767 - DNA, 25 bp, Homo sapien
cgaggcctgcacagacccaaagtgc

SEQ ID NO: 2920768 - DNA, 25 bp, Homo sapien
tgtggtcctctcgatcctagaaaag

SEQ ID NO: 2920769 - DNA, 25 bp, Homo sapien
gatgagacttccattgctccgggcc

SEQ ID NO: 2920770 - DNA, 25 bp, Homo sapien
ggagtgtggtcctctcgatcctaga

SEQ ID NO: 2920771 - DNA, 25 bp, Homo sapien
ttccattgctccgggcccgatgcat

SEQ ID NO: 2920772 - DNA, 25 bp, Homo sapien
gtgatcgaggatttcgcaaacccaa

SEQ ID NO: 2920773 - DNA, 25 bp, Homo sapien
tggaaccgccgtgaaaacgatggac

SEQ ID NO: 2920774 - DNA, 25 bp, Homo sapien
gaaccgccgtgaaaacgatggacag

SEQ ID NO: 2920775 - DNA, 25 bp, Homo sapien
agtggaaccgccgtgaaaacgatgg

SEQ ID NO: 2920776 - DNA, 25 bp, Homo sapien
gccggacaatgtgctaccgtggggc

SEQ ID NO: 2920777 - DNA, 25 bp, Homo sapien
tcatttcgcagagaagaggcgtgga

SEQ ID NO: 2920778 - DNA, 25 bp, Homo sapien
ggcgtggaaaggtacaaccatcttc

SEQ ID NO: 2920779 - DNA, 25 bp, Homo sapien
gaggcgtggaaaggtacaaccatct

SEQ ID NO: 2920780 - DNA, 25 bp, Homo sapien
gaagaggcgtggaaaggtacaacca

SEQ ID NO: 2920781 - DNA, 25 bp, Homo sapien
ttcaagattgtgtcgttctgtggct

SEQ ID NO: 2920782 - DNA, 25 bp, Homo sapien
cttcaagattgtgtcgttctgtggc

SEQ ID NO: 2920783 - DNA, 25 bp, Homo sapien
caggaggggtgcgaagtgcgtggct

SEQ ID NO: 2920784 - DNA, 25 bp, Homo sapien
tgaaacatggagaccgaggaagctt

SEQ ID NO: 2920785 - DNA, 25 bp, Homo sapien
gtcatgacaccgatttccaggaaga

SEQ ID NO: 2920786 - DNA, 25 bp, Homo sapien
tgcgacccctttaaacaatagcggc

SEQ ID NO: 2920787 - DNA, 25 bp, Homo sapien
gaaattccgaggtggagccaatgag

SEQ ID NO: 2920788 - DNA, 25 bp, Homo sapien
tctttggcgcacaaggcacattcgt

SEQ ID NO: 2920789 - DNA, 25 bp, Homo sapien
taggcatgcaagcagaccggtcctt

SEQ ID NO: 2920790 - DNA, 25 bp, Homo sapien
ggctcaacaaagaccagacgacatg

SEQ ID NO: 2920791 - DNA, 25 bp, Homo sapien
tgagatttcaattgccccgggactg

SEQ ID NO: 2920792 - DNA, 25 bp, Homo sapien
tgaagcgatgttacccagagtgcca

SEQ ID NO: 2920793 - DNA, 25 bp, Homo sapien
tatcaaaagtatttgggtccccagc

SEQ ID NO: 2920794 - DNA, 25 bp, Homo sapien
tatttgtctcaacattgccccaggc

SEQ ID NO: 2920795 - DNA, 25 bp, Homo sapien
aaatgcgacatgtccctgccctaga

SEQ ID NO: 2920796 - DNA, 25 bp, Homo sapien
ttctttaataagagcagtggctttc

SEQ ID NO: 2920797 - DNA, 25 bp, Homo sapien
taggcaccgcctattaagcactgta

SEQ ID NO: 2920798 - DNA, 25 bp, Homo sapien
cttggaactgctatccacaagccaa

SEQ ID NO: 2920799 - DNA, 25 bp, Homo sapien
aacagctcctgttagataggcaccg

SEQ ID NO: 2920800 - DNA, 25 bp, Homo sapien
taaaagccaagtcagagcgggctgc

SEQ ID NO: 2920801 - DNA, 25 bp, Homo sapien
aagaaacagcgttgatcggcactgg

SEQ ID NO: 2920802 - DNA, 25 bp, Homo sapien
taaatgttaccttcagggcaagcca

SEQ ID NO: 2920803 - DNA, 25 bp, Homo sapien
tctcctgtcagggtcagataagtcc

SEQ ID NO: 2920804 - DNA, 25 bp, Homo sapien
tcctctgtgaagtgatcgactctgg

SEQ ID NO: 2920805 - DNA, 25 bp, Homo sapien
gctcctctgtgaagtgatcgactct

SEQ ID NO: 2920806 - DNA, 25 bp, Homo sapien
gtgaagtgatcgactctggtgctga

SEQ ID NO: 2920807 - DNA, 25 bp, Homo sapien
tctgtgaagtgatcgactctggtgc

SEQ ID NO: 2920808 - DNA, 25 bp, Homo sapien
ggacattcccgccctagtccgtgag

SEQ ID NO: 2920809 - DNA, 25 bp, Homo sapien
cattcccgccctagtccgtgaggcc

SEQ ID NO: 2920810 - DNA, 25 bp, Homo sapien
gacattcccgccctagtccgtgagg

SEQ ID NO: 2920811 - DNA, 25 bp, Homo sapien
acattcccgccctagtccgtgaggc

SEQ ID NO: 2920812 - DNA, 25 bp, Homo sapien
gggagggacctcttgcttagcagct

SEQ ID NO: 2920813 - DNA, 25 bp, Homo sapien
cacaaagcttgtggatgagcagtca

SEQ ID NO: 2920814 - DNA, 25 bp, Homo sapien
ggaatgataaccacgcaccttagag

SEQ ID NO: 2920815 - DNA, 25 bp, Homo sapien
tactagtttcttaccgcaggaggct

SEQ ID NO: 2920816 - DNA, 25 bp, Homo sapien
actgaggatatagaagagtctgttt

SEQ ID NO: 2920817 - DNA, 25 bp, Homo sapien
tggactgaggatatagaagagtctg

SEQ ID NO: 2920818 - DNA, 25 bp, Homo sapien
agagtctgtttgtattgccatgggg

SEQ ID NO: 2920819 - DNA, 25 bp, Homo sapien
gtctgtttgtattgccatgggggtc

SEQ ID NO: 2920820 - DNA, 25 bp, Homo sapien
tatttcactgaacgcaatgtcctga

SEQ ID NO: 2920821 - DNA, 25 bp, Homo sapien
gaagagtgcctctatcaggatgcat

SEQ ID NO: 2920822 - DNA, 25 bp, Homo sapien
tgtgcaggataatgccatagctccc

SEQ ID NO: 2920823 - DNA, 25 bp, Homo sapien
taagagttaccccaggtgtgcctga

SEQ ID NO: 2920824 - DNA, 25 bp, Homo sapien
gtaagggtcctcacatgtgcaggcc

SEQ ID NO: 2920825 - DNA, 25 bp, Homo sapien
gggcgtaagggtcctcacatgtgca

SEQ ID NO: 2920826 - DNA, 25 bp, Homo sapien
gcgtaagggtcctcacatgtgcagg

SEQ ID NO: 2920827 - DNA, 25 bp, Homo sapien
acatgtgcaggccgagcttcccgtc

SEQ ID NO: 2920828 - DNA, 25 bp, Homo sapien
cctgagcacggctggtgggaggccc

SEQ ID NO: 2920829 - DNA, 25 bp, Homo sapien
gggctcgggcctgtgttcttgtggc

SEQ ID NO: 2920830 - DNA, 25 bp, Homo sapien
gtacggggactttatcagaatggaa

SEQ ID NO: 2920831 - DNA, 25 bp, Homo sapien
ggtgcagaagtgcagcctgagcacg

SEQ ID NO: 2920832 - DNA, 25 bp, Homo sapien
gaatcctctgacttattactggcat

SEQ ID NO: 2920833 - DNA, 25 bp, Homo sapien
caggagggaatcctctgacttatta

SEQ ID NO: 2920834 - DNA, 25 bp, Homo sapien
ctgagcattccccatcatggctgtt

SEQ ID NO: 2920835 - DNA, 25 bp, Homo sapien
ctgacttattactggcatctgagca

SEQ ID NO: 2920836 - DNA, 25 bp, Homo sapien
ccatggatttgtggtcacacctgga

SEQ ID NO: 2920837 - DNA, 25 bp, Homo sapien
catggatttgtggtcacacctggaa

SEQ ID NO: 2920838 - DNA, 25 bp, Homo sapien
atggatttgtggtcacacctggaac

SEQ ID NO: 2920839 - DNA, 25 bp, Homo sapien
tggatttgtggtcacacctggaacc

SEQ ID NO: 2920840 - DNA, 25 bp, Homo sapien
gggcaggttgatcttgaaagccctc

SEQ ID NO: 2920841 - DNA, 25 bp, Homo sapien
gcaggttgatcttgaaagccctcac

SEQ ID NO: 2920842 - DNA, 25 bp, Homo sapien
gagggcaggttgatcttgaaagccc

SEQ ID NO: 2920843 - DNA, 25 bp, Homo sapien
ctgagggcaggttgatcttgaaagc

SEQ ID NO: 2920844 - DNA, 25 bp, Homo sapien
tccttttttccactgtagctgctag

SEQ ID NO: 2920845 - DNA, 25 bp, Homo sapien
atgacatattctgagaggacattcc

SEQ ID NO: 2920846 - DNA, 25 bp, Homo sapien
gaggacttctgagatccagagtctt

SEQ ID NO: 2920847 - DNA, 25 bp, Homo sapien
tccagagtctttgcatggggcagat

SEQ ID NO: 2920848 - DNA, 25 bp, Homo sapien
aagttgtctggctccgagtccttac

SEQ ID NO: 2920849 - DNA, 25 bp, Homo sapien
caggaaatgaagttgtctggctccg

SEQ ID NO: 2920850 - DNA, 25 bp, Homo sapien
gaaatgaagttgtctggctccgagt

SEQ ID NO: 2920851 - DNA, 25 bp, Homo sapien
gcccaggtgacaggaaatgaagttg

SEQ ID NO: 2920852 - DNA, 25 bp, Homo sapien
tcctgtgcttcaccaatttccatag

SEQ ID NO: 2920853 - DNA, 25 bp, Homo sapien
ttccaatacgttcctgtgcttcacc

SEQ ID NO: 2920854 - DNA, 25 bp, Homo sapien
tacgttcctgtgcttcaccaatttc

SEQ ID NO: 2920855 - DNA, 25 bp, Homo sapien
gcacatcattgccatttccaatacg

SEQ ID NO: 2920856 - DNA, 25 bp, Homo sapien
tccagccataagctccagggcaatg

SEQ ID NO: 2920857 - DNA, 25 bp, Homo sapien
gcaatgctgtctgcgatgagggtct

SEQ ID NO: 2920858 - DNA, 25 bp, Homo sapien
atgctgtctgcgatgagggtctggg

SEQ ID NO: 2920859 - DNA, 25 bp, Homo sapien
ttctgaggcctaatagggaggccag

SEQ ID NO: 2920860 - DNA, 25 bp, Homo sapien
aaacgtgtggtcattgtacttagca

SEQ ID NO: 2920861 - DNA, 25 bp, Homo sapien
gcctgtctcatctgtcaagagtgta

SEQ ID NO: 2920862 - DNA, 25 bp, Homo sapien
tgtgatggtgtattcaaaatagacg

SEQ ID NO: 2920863 - DNA, 25 bp, Homo sapien
tcagggctggtccaactgtgtgacg

SEQ ID NO: 2920864 - DNA, 25 bp, Homo sapien
tggcctgagcgggtcgactagtaca

SEQ ID NO: 2920865 - DNA, 25 bp, Homo sapien
gggtcgactagtacacgcaggaatc

SEQ ID NO: 2920866 - DNA, 25 bp, Homo sapien
cgcaggaatcgacgggccttccgag

SEQ ID NO: 2920867 - DNA, 25 bp, Homo sapien
gactagtacacgcaggaatcgacgg

SEQ ID NO: 2920868 - DNA, 25 bp, Homo sapien
acatttcatcatcaacatttatctc

SEQ ID NO: 2920869 - DNA, 25 bp, Homo sapien
attcatttaacatttcatcatcaac

SEQ ID NO: 2920870 - DNA, 25 bp, Homo sapien
atttcatcatcaacatttatctcat

SEQ ID NO: 2920871 - DNA, 25 bp, Homo sapien
ttattcatttaacatttcatcatca

SEQ ID NO: 2920872 - DNA, 25 bp, Homo sapien
gcaccttgccgggagatccctgtgt

SEQ ID NO: 2920873 - DNA, 25 bp, Homo sapien
gcactgggacccatgcatggcttag

SEQ ID NO: 2920874 - DNA, 25 bp, Homo sapien
tgcagacagcgtggcctcatgcact

SEQ ID NO: 2920875 - DNA, 25 bp, Homo sapien
ggtgacaaagctcctaaagcctacc

SEQ ID NO: 2920876 - DNA, 25 bp, Homo sapien
cactaggcccaggggaccattgttc

SEQ ID NO: 2920877 - DNA, 25 bp, Homo sapien
ccactaggcccaggggaccattgtt

SEQ ID NO: 2920878 - DNA, 25 bp, Homo sapien
actaggcccaggggaccattgttct

SEQ ID NO: 2920879 - DNA, 25 bp, Homo sapien
tcctgcctcggatctccaggcagtg

SEQ ID NO: 2920880 - DNA, 25 bp, Homo sapien
cctgcctcggatctccaggcagtgg

SEQ ID NO: 2920881 - DNA, 25 bp, Homo sapien
agtcctgcctcggatctccaggcag

SEQ ID NO: 2920882 - DNA, 25 bp, Homo sapien
ggagtcctgcctcggatctccaggc

SEQ ID NO: 2920883 - DNA, 25 bp, Homo sapien
aagcatgggcctcaggttcagggca

SEQ ID NO: 2920884 - DNA, 25 bp, Homo sapien
ccaagcatgggcctcaggttcaggg

SEQ ID NO: 2920885 - DNA, 25 bp, Homo sapien
ccagaaccaagcatgggcctcaggt

SEQ ID NO: 2920886 - DNA, 25 bp, Homo sapien
ctatgccagaaccaagcatgggcct

SEQ ID NO: 2920887 - DNA, 25 bp, Homo sapien
ctcctgctctgcagtgaagctgcag

SEQ ID NO: 2920888 - DNA, 25 bp, Homo sapien
ctgtccttgctccacctgggaaatt

SEQ ID NO: 2920889 - DNA, 25 bp, Homo sapien
cctgtccttgctccacctgggaaat

SEQ ID NO: 2920890 - DNA, 25 bp, Homo sapien
tacaccagcgagtggaaacacgact

SEQ ID NO: 2920891 - DNA, 25 bp, Homo sapien
gaacctgacaatccgtacaccagcg

SEQ ID NO: 2920892 - DNA, 25 bp, Homo sapien
aggctgcaacgggaaactccgacgc

SEQ ID NO: 2920893 - DNA, 25 bp, Homo sapien
cacgacttaggaaacggacagacaa

SEQ ID NO: 2920894 - DNA, 25 bp, Homo sapien
gcaggaaggagccggagaggcccac

SEQ ID NO: 2920895 - DNA, 25 bp, Homo sapien
gagcaggaaggagccggagaggccc

SEQ ID NO: 2920896 - DNA, 25 bp, Homo sapien
ggagcaggaaggagccggagaggcc

SEQ ID NO: 2920897 - DNA, 25 bp, Homo sapien
aggagcaggaaggagccggagaggc

SEQ ID NO: 2920898 - DNA, 25 bp, Homo sapien
tttgatgaccctctgttccatgttg

SEQ ID NO: 2920899 - DNA, 25 bp, Homo sapien
cttcactgcccttgggtggggatgc

SEQ ID NO: 2920900 - DNA, 25 bp, Homo sapien
ggttatccatgtccaaatcacttct

SEQ ID NO: 2920901 - DNA, 25 bp, Homo sapien
ctgttgttcttgcatctctccagcc

SEQ ID NO: 2920902 - DNA, 25 bp, Homo sapien
ggagagccttgactgcgggggctgg

SEQ ID NO: 2920903 - DNA, 25 bp, Homo sapien
gggcagtcggggagccacttgctca

SEQ ID NO: 2920904 - DNA, 25 bp, Homo sapien
gcagtcggggagccacttgctcagc

SEQ ID NO: 2920905 - DNA, 25 bp, Homo sapien
cccggtgatgtggagagccttgact

SEQ ID NO: 2920906 - DNA, 25 bp, Homo sapien
gccatggagcttagcttggagggag

SEQ ID NO: 2920907 - DNA, 25 bp, Homo sapien
caaggtgggcaaaaggtccctgtgg

SEQ ID NO: 2920908 - DNA, 25 bp, Homo sapien
agcttagcttggagggaggatctgg

SEQ ID NO: 2920909 - DNA, 25 bp, Homo sapien
ctggcaaggtgggcaaaaggtccct

SEQ ID NO: 2920910 - DNA, 25 bp, Homo sapien
gactgccccaagctctggatctgta

SEQ ID NO: 2920911 - DNA, 25 bp, Homo sapien
gccccaagctctggatctgtaactc

SEQ ID NO: 2920912 - DNA, 25 bp, Homo sapien
tgcctgaccacagcttcgaggcctc

SEQ ID NO: 2920913 - DNA, 25 bp, Homo sapien
gatctgtaactcctggcttgctccc

SEQ ID NO: 2920914 - DNA, 25 bp, Homo sapien
cagcctgatcttcacgttggaggtg

SEQ ID NO: 2920915 - DNA, 25 bp, Homo sapien
ctgtaataaagcgtgacatgcacct

SEQ ID NO: 2920916 - DNA, 25 bp, Homo sapien
ctttgcaataatggcccagcctgat

SEQ ID NO: 2920917 - DNA, 25 bp, Homo sapien
gcacctttgtcaacactcagcacag

SEQ ID NO: 2920918 - DNA, 25 bp, Homo sapien
cagagagaccgaagactgtggccca

SEQ ID NO: 2920919 - DNA, 25 bp, Homo sapien
gggacgggagcaggtataactgagg

SEQ ID NO: 2920920 - DNA, 25 bp, Homo sapien
gagtcacttcgggagtgtgaggaga

SEQ ID NO: 2920921 - DNA, 25 bp, Homo sapien
tgaagggcagacacaacttagaggt

SEQ ID NO: 2920922 - DNA, 25 bp, Homo sapien
ctgggagtgacaccacaggtctgag

SEQ ID NO: 2920923 - DNA, 25 bp, Homo sapien
ggcttctgggagtgacaccacaggt

SEQ ID NO: 2920924 - DNA, 25 bp, Homo sapien
gtctgagagaacttggattggagaa

SEQ ID NO: 2920925 - DNA, 25 bp, Homo sapien
ctgagagaacttggattggagaaag

SEQ ID NO: 2920926 - DNA, 25 bp, Homo sapien
ctagggatgcggccgcgggaggggg

SEQ ID NO: 2920927 - DNA, 25 bp, Homo sapien
tctccagggcggcatctggcaagga

SEQ ID NO: 2920928 - DNA, 25 bp, Homo sapien
aggagggcggcccaacactgcaagc

SEQ ID NO: 2920929 - DNA, 25 bp, Homo sapien
cactgcaagcctgatcccggggact

SEQ ID NO: 2920930 - DNA, 25 bp, Homo sapien
aactctggacggtctcagggactga

SEQ ID NO: 2920931 - DNA, 25 bp, Homo sapien
tctcgtttccttattcctggaatgt

SEQ ID NO: 2920932 - DNA, 25 bp, Homo sapien
gtttccttattcctggaatgtgctc

SEQ ID NO: 2920933 - DNA, 25 bp, Homo sapien
tcgtttccttattcctggaatgtgc

SEQ ID NO: 2920934 - DNA, 25 bp, Homo sapien
cctctcgtttccttattcctggaat

SEQ ID NO: 2920935 - DNA, 25 bp, Homo sapien
tacatctcgagtgatgtggacgact

SEQ ID NO: 2920936 - DNA, 25 bp, Homo sapien
tagtttacatctcgagtgatgtgga

SEQ ID NO: 2920937 - DNA, 25 bp, Homo sapien
tgatgtggacgactgaggagaaggc

SEQ ID NO: 2920938 - DNA, 25 bp, Homo sapien
catctcgagtgatgtggacgactga

SEQ ID NO: 2920939 - DNA, 25 bp, Homo sapien
aatagtaggtgtaagactactaggg

SEQ ID NO: 2920940 - DNA, 25 bp, Homo sapien
gagaaatagtaggtgtaagactact

SEQ ID NO: 2920941 - DNA, 25 bp, Homo sapien
tcctgaggggttatttgatgctgtc

SEQ ID NO: 2920942 - DNA, 25 bp, Homo sapien
cctgaggggttatttgatgctgtct

SEQ ID NO: 2920943 - DNA, 25 bp, Homo sapien
ggtggagtattcaggcggttggcta

SEQ ID NO: 2920944 - DNA, 25 bp, Homo sapien
ggctagggtgtagttatctggatca

SEQ ID NO: 2920945 - DNA, 25 bp, Homo sapien
aggtcgggtgaaaacagtactagtg

SEQ ID NO: 2920946 - DNA, 25 bp, Homo sapien
cagtactagtgttattagggtgaga

SEQ ID NO: 2920947 - DNA, 25 bp, Homo sapien
tggtttacaagaccaatatattggt

SEQ ID NO: 2920948 - DNA, 25 bp, Homo sapien
tgtccttgggagagagtctccattt

SEQ ID NO: 2920949 - DNA, 25 bp, Homo sapien
atatattggtttatactacaagggc

SEQ ID NO: 2920950 - DNA, 25 bp, Homo sapien
tgggagagagtctccatttctggtt

SEQ ID NO: 2920951 - DNA, 25 bp, Homo sapien
tgattaatagggtaatagacccgtg

SEQ ID NO: 2920952 - DNA, 25 bp, Homo sapien
gagagctcccgtgactgattaatag

SEQ ID NO: 2920953 - DNA, 25 bp, Homo sapien
tgtaggtgtgatcaataatgggatg

SEQ ID NO: 2920954 - DNA, 25 bp, Homo sapien
gggccagcgtttcacaatgctatcg

SEQ ID NO: 2920955 - DNA, 25 bp, Homo sapien
tggggcagtgtaggcccatctagat

SEQ ID NO: 2920956 - DNA, 25 bp, Homo sapien
gcagtgtaggcccatctagatattt

SEQ ID NO: 2920957 - DNA, 25 bp, Homo sapien
gggcagtgtaggcccatctagatat

SEQ ID NO: 2920958 - DNA, 25 bp, Homo sapien
ggcagtgtaggcccatctagatatt

SEQ ID NO: 2920959 - DNA, 25 bp, Homo sapien
caggtgtaagcagggtgctttatgt

SEQ ID NO: 2920960 - DNA, 25 bp, Homo sapien
cagggtggtcaaattaaattgaaat

SEQ ID NO: 2920961 - DNA, 25 bp, Homo sapien
tcagggtggtcaaattaaattgaaa

SEQ ID NO: 2920962 - DNA, 25 bp, Homo sapien
tcccaggtgtaagcagggtgcttta

SEQ ID NO: 2920963 - DNA, 25 bp, Homo sapien
gttaatgctactgtcgatgtggacc

SEQ ID NO: 2920964 - DNA, 25 bp, Homo sapien
catcgaggtcgttaatgctactgtc

SEQ ID NO: 2920965 - DNA, 25 bp, Homo sapien
ggtcgttaatgctactgtcgatgtg

SEQ ID NO: 2920966 - DNA, 25 bp, Homo sapien
caacatcgaggtcgttaatgctact

SEQ ID NO: 2920967 - DNA, 25 bp, Homo sapien
tcagatcacataggactctaatcgt

SEQ ID NO: 2920968 - DNA, 25 bp, Homo sapien
cacataggactctaatcgttgaaca

SEQ ID NO: 2920969 - DNA, 25 bp, Homo sapien
taggactctaatcgttgaacaaacg

SEQ ID NO: 2920970 - DNA, 25 bp, Homo sapien
gatcacataggactctaatcgttga

SEQ ID NO: 2920971 - DNA, 25 bp, Homo sapien
agaagaggggttgaacctctggttg

SEQ ID NO: 2920972 - DNA, 25 bp, Homo sapien
tttaaattttatgcaattgctgggg

SEQ ID NO: 2920973 - DNA, 25 bp, Homo sapien
attttatgcaattgctggggtctgc

SEQ ID NO: 2920974 - DNA, 25 bp, Homo sapien
aaattttatgcaattgctggggtct

SEQ ID NO: 2920975 - DNA, 25 bp, Homo sapien
tcaaaagcagctcgattggtttctg

SEQ ID NO: 2920976 - DNA, 25 bp, Homo sapien
ctaggaagattatggcagttagggc

SEQ ID NO: 2920977 - DNA, 25 bp, Homo sapien
agattatggcagttagggcatttat

SEQ ID NO: 2920978 - DNA, 25 bp, Homo sapien
taatgatatttatgtattcggctat

SEQ ID NO: 2920979 - DNA, 25 bp, Homo sapien
aagaggattcaaacctctattattt

SEQ ID NO: 2920980 - DNA, 25 bp, Homo sapien
ggattcaaacctctattatttactc

SEQ ID NO: 2920981 - DNA, 25 bp, Homo sapien
agaaataagaggattcaaacctcta

SEQ ID NO: 2920982 - DNA, 25 bp, Homo sapien
ataagaggattcaaacctctattat

SEQ ID NO: 2920983 - DNA, 25 bp, Homo sapien
cattttctgggtatgggcctgatag

SEQ ID NO: 2920984 - DNA, 25 bp, Homo sapien
gatataaccaacattttctgggtat

SEQ ID NO: 2920985 - DNA, 25 bp, Homo sapien
accaacattttctgggtatgggcct

SEQ ID NO: 2920986 - DNA, 25 bp, Homo sapien
ggatataaccaacattttctgggta

SEQ ID NO: 2920987 - DNA, 25 bp, Homo sapien
ttgaaggctcttagtctgcgtttaa

SEQ ID NO: 2920988 - DNA, 25 bp, Homo sapien
agtctgcgtttaacataaatttata

SEQ ID NO: 2920989 - DNA, 25 bp, Homo sapien
ggctcttagtctgcgtttaacataa

SEQ ID NO: 2920990 - DNA, 25 bp, Homo sapien
gaaggctcttagtctgcgtttaaca

SEQ ID NO: 2920991 - DNA, 25 bp, Homo sapien
tgaagggagaaaatggttaggtcta

SEQ ID NO: 2920992 - DNA, 25 bp, Homo sapien
gaaaatggttaggtctacagaggcc

SEQ ID NO: 2920993 - DNA, 25 bp, Homo sapien
gggagaaaatggttaggtctacaga

SEQ ID NO: 2920994 - DNA, 25 bp, Homo sapien
aaatggttaggtctacagaggcctc

SEQ ID NO: 2920995 - DNA, 25 bp, Homo sapien
atggtacgatgtgagaaattattcc

SEQ ID NO: 2920996 - DNA, 25 bp, Homo sapien
ggtacgatgtgagaaattattccaa

SEQ ID NO: 2920997 - DNA, 25 bp, Homo sapien
ccggaataatatggtacgatgtgag

SEQ ID NO: 2920998 - DNA, 25 bp, Homo sapien
tctttctttccggaataatatggta

SEQ ID NO: 2920999 - DNA, 25 bp, Homo sapien
gatagaacgtagtgaaagtgggcca

SEQ ID NO: 2921000 - DNA, 25 bp, Homo sapien
tgatagaacgtagtgaaagtgggcc

SEQ ID NO: 2921001 - DNA, 25 bp, Homo sapien
agtacaatgtccgttaggccaccca

SEQ ID NO: 2921002 - DNA, 25 bp, Homo sapien
ctagtacaatgtccgttaggccacc

SEQ ID NO: 2921003 - DNA, 25 bp, Homo sapien
ctttgacgaagttatgaaatagttt

SEQ ID NO: 2921004 - DNA, 25 bp, Homo sapien
taacttaactttgacgaagttatga

SEQ ID NO: 2921005 - DNA, 25 bp, Homo sapien
tgacgaagttatgaaatagttttcc

SEQ ID NO: 2921006 - DNA, 25 bp, Homo sapien
taactttgacgaagttatgaaatag

SEQ ID NO: 2921007 - DNA, 25 bp, Homo sapien
taatgctgggtcagctctacagtga

SEQ ID NO: 2921008 - DNA, 25 bp, Homo sapien
gagatagcgattctcttagtcttta

SEQ ID NO: 2921009 - DNA, 25 bp, Homo sapien
agcgattctcttagtctttaactta

SEQ ID NO: 2921010 - DNA, 25 bp, Homo sapien
tgtaaagagatagcgattctcttag

SEQ ID NO: 2921011 - DNA, 25 bp, Homo sapien
tcggttgttgataaggtgtttggaa

SEQ ID NO: 2921012 - DNA, 25 bp, Homo sapien
gctggaaggcctagaattgtggggg

SEQ ID NO: 2921013 - DNA, 25 bp, Homo sapien
agaaatagaacgattggcactgcag

SEQ ID NO: 2921014 - DNA, 25 bp, Homo sapien
aatagaacgattggcactgcagctg

SEQ ID NO: 2921015 - DNA, 25 bp, Homo sapien
cttggtatgtaccttctcgtacaac

SEQ ID NO: 2921016 - DNA, 25 bp, Homo sapien
ctttttggacgggtactgtgtggtg

SEQ ID NO: 2921017 - DNA, 25 bp, Homo sapien
tggtatgtaccttctcgtacaacat

SEQ ID NO: 2921018 - DNA, 25 bp, Homo sapien
ttggtatgtaccttctcgtacaaca

SEQ ID NO: 2921019 - DNA, 25 bp, Homo sapien
agtagtgcttgaattgcttgattac

SEQ ID NO: 2921020 - DNA, 25 bp, Homo sapien
ttgattacaattgttctctattagg

SEQ ID NO: 2921021 - DNA, 25 bp, Homo sapien
gtagtgcttgaattgcttgattaca

SEQ ID NO: 2921022 - DNA, 25 bp, Homo sapien
tgcttgattacaattgttctctatt

SEQ ID NO: 2921023 - DNA, 25 bp, Homo sapien
tcaagcagcggcttcgaagccgaag

SEQ ID NO: 2921024 - DNA, 25 bp, Homo sapien
ccgtagctacaaaacatgttgaacc

SEQ ID NO: 2921025 - DNA, 25 bp, Homo sapien
tgttgaaccatacataccatcggcg

SEQ ID NO: 2921026 - DNA, 25 bp, Homo sapien
taatagttggcggataaggcaaaca

SEQ ID NO: 2921027 - DNA, 25 bp, Homo sapien
ctttttcgagtgttatcgaaactag

SEQ ID NO: 2921028 - DNA, 25 bp, Homo sapien
tttcgagtgttatcgaaactagtta

SEQ ID NO: 2921029 - DNA, 25 bp, Homo sapien
agtgttatcgaaactagttaattgg

SEQ ID NO: 2921030 - DNA, 25 bp, Homo sapien
tactctttttcgagtgttatcgaaa

SEQ ID NO: 2921031 - DNA, 25 bp, Homo sapien
tatgactatcataatctaacaagtc

SEQ ID NO: 2921032 - DNA, 25 bp, Homo sapien
aagtatgactatcataatctaacaa

SEQ ID NO: 2921033 - DNA, 25 bp, Homo sapien
gtatgactatcataatctaacaagt

SEQ ID NO: 2921034 - DNA, 25 bp, Homo sapien
gactatcataatctaacaagtcaaa

SEQ ID NO: 2921035 - DNA, 25 bp, Homo sapien
aatttcacccatctcgttagttata

SEQ ID NO: 2921036 - DNA, 25 bp, Homo sapien
ttcacccatctcgttagttatatgc

SEQ ID NO: 2921037 - DNA, 25 bp, Homo sapien
caatttcacccatctcgttagttat

SEQ ID NO: 2921038 - DNA, 25 bp, Homo sapien
acccatctcgttagttatatgcacc

SEQ ID NO: 2921039 - DNA, 25 bp, Homo sapien
acaatggaggagtgcttcctgatga

SEQ ID NO: 2921040 - DNA, 25 bp, Homo sapien
taaaattccgagacaatggaggagt

SEQ ID NO: 2921041 - DNA, 25 bp, Homo sapien
aatggaggagtgcttcctgatgacc

SEQ ID NO: 2921042 - DNA, 25 bp, Homo sapien
cccagaataaaattccgagacaatg

SEQ ID NO: 2921043 - DNA, 25 bp, Homo sapien
cagacaggactgctagggtcccact

SEQ ID NO: 2921044 - DNA, 25 bp, Homo sapien
ttgaattggattcaaggggcctgca

SEQ ID NO: 2921045 - DNA, 25 bp, Homo sapien
aagatgttggaggagtgctcccttc

SEQ ID NO: 2921046 - DNA, 25 bp, Homo sapien
gctcagctgcaaactgaatttgaat

SEQ ID NO: 2921047 - DNA, 25 bp, Homo sapien
gatgtttctttaggcttgcttcccc

SEQ ID NO: 2921048 - DNA, 25 bp, Homo sapien
ttcactagatgtttctttaggcttg

SEQ ID NO: 2921049 - DNA, 25 bp, Homo sapien
agcttcactagatgtttctttaggc

SEQ ID NO: 2921050 - DNA, 25 bp, Homo sapien
cactagatgtttctttaggcttgct

SEQ ID NO: 2921051 - DNA, 25 bp, Homo sapien
caattgcaagcctgaaaagggtgtc

SEQ ID NO: 2921052 - DNA, 25 bp, Homo sapien
aagacaaaggcaactccaaggtgga

SEQ ID NO: 2921053 - DNA, 25 bp, Homo sapien
ggcctctcacgggttcagataaggt

SEQ ID NO: 2921054 - DNA, 25 bp, Homo sapien
aaagggtgtccacaagttctgttca

SEQ ID NO: 2921055 - DNA, 25 bp, Homo sapien
tgcaaatgaagctttacgggaggat

SEQ ID NO: 2921056 - DNA, 25 bp, Homo sapien
tgaattcacaaaggccaggttacct

SEQ ID NO: 2921057 - DNA, 25 bp, Homo sapien
gcacaagtgctttcccgagagttta

SEQ ID NO: 2921058 - DNA, 25 bp, Homo sapien
tcttcccagaaatggagactagtgc

SEQ ID NO: 2921059 - DNA, 25 bp, Homo sapien
ctctctccccatacttggtctctgc

SEQ ID NO: 2921060 - DNA, 25 bp, Homo sapien
ggctgctcatcacctggtctgagtc

SEQ ID NO: 2921061 - DNA, 25 bp, Homo sapien
tctccccatacttggtctctgcttc

SEQ ID NO: 2921062 - DNA, 25 bp, Homo sapien
ggtctgagtccccatcccctctctc

SEQ ID NO: 2921063 - DNA, 25 bp, Homo sapien
ctcacacccacatcctgtgggcccc

SEQ ID NO: 2921064 - DNA, 25 bp, Homo sapien
tgggccccacatttgagaaacaaga

SEQ ID NO: 2921065 - DNA, 25 bp, Homo sapien
gtgggccccacatttgagaaacaag

SEQ ID NO: 2921066 - DNA, 25 bp, Homo sapien
cacccacatcctgtgggccccacat

SEQ ID NO: 2921067 - DNA, 25 bp, Homo sapien
ggcctggtgccctccgcataggacc

SEQ ID NO: 2921068 - DNA, 25 bp, Homo sapien
taggaccctcagacgtggggaggag

SEQ ID NO: 2921069 - DNA, 25 bp, Homo sapien
cactgcccgcggttttcaggatcct

SEQ ID NO: 2921070 - DNA, 25 bp, Homo sapien
gagggcgcactgcccgcggttttca

SEQ ID NO: 2921071 - DNA, 25 bp, Homo sapien
agggtctggtcaagattctcccaaa

SEQ ID NO: 2921072 - DNA, 25 bp, Homo sapien
aaagccctcgggtggcagggtctgg

SEQ ID NO: 2921073 - DNA, 25 bp, Homo sapien
gtggcagggtctggtcaagattctc

SEQ ID NO: 2921074 - DNA, 25 bp, Homo sapien
ggaatcaaagccctcgggtggcagg

SEQ ID NO: 2921075 - DNA, 25 bp, Homo sapien
tcagccagtctggtgctagagcctg

SEQ ID NO: 2921076 - DNA, 25 bp, Homo sapien
tctggccgcggtcagaatctgtcac

SEQ ID NO: 2921077 - DNA, 25 bp, Homo sapien
aatgcagctctgtgttgcggccagc

SEQ ID NO: 2921078 - DNA, 25 bp, Homo sapien
cctgaagtacaaggttccgctcact

SEQ ID NO: 2921079 - DNA, 25 bp, Homo sapien
catcacaagaatcacccccatgacc

SEQ ID NO: 2921080 - DNA, 25 bp, Homo sapien
agttctctcagcaggccacgtttca

SEQ ID NO: 2921081 - DNA, 25 bp, Homo sapien
tcatcacaagaatcacccccatgac

SEQ ID NO: 2921082 - DNA, 25 bp, Homo sapien
ttctctcagcaggccacgtttcatc

SEQ ID NO: 2921083 - DNA, 25 bp, Homo sapien
aaacctccagagcaattatctgcag

SEQ ID NO: 2921084 - DNA, 25 bp, Homo sapien
acctccagagcaattatctgcagct

SEQ ID NO: 2921085 - DNA, 25 bp, Homo sapien
cctccagagcaattatctgcagctc

SEQ ID NO: 2921086 - DNA, 25 bp, Homo sapien
aacctccagagcaattatctgcagc

SEQ ID NO: 2921087 - DNA, 25 bp, Homo sapien
gagactcgagaagtaaaaacagtac

SEQ ID NO: 2921088 - DNA, 25 bp, Homo sapien
tctggtattgagactcgagaagtaa

SEQ ID NO: 2921089 - DNA, 25 bp, Homo sapien
tagagatgcttgttacaagtccaag

SEQ ID NO: 2921090 - DNA, 25 bp, Homo sapien
ctatcaccctcttcaaactgtggac

SEQ ID NO: 2921091 - DNA, 25 bp, Homo sapien
caggaacacatctctttgggtagat

SEQ ID NO: 2921092 - DNA, 25 bp, Homo sapien
gtatcagggtaacctggcctgtgtg

SEQ ID NO: 2921093 - DNA, 25 bp, Homo sapien
ttgggaaagcccttgtggtatcagg

SEQ ID NO: 2921094 - DNA, 25 bp, Homo sapien
tgtgtgaattcatgcactggtctct

SEQ ID NO: 2921095 - DNA, 25 bp, Homo sapien
cttttatcaactctgtaaacttttg

SEQ ID NO: 2921096 - DNA, 25 bp, Homo sapien
aacctagctcccttttgtcacagtt

SEQ ID NO: 2921097 - DNA, 25 bp, Homo sapien
acctagctcccttttgtcacagttt

SEQ ID NO: 2921098 - DNA, 25 bp, Homo sapien
ggtgtaatatccaacagtgactgcc

SEQ ID NO: 2921099 - DNA, 25 bp, Homo sapien
tacaatacaagagcaagctataagc

SEQ ID NO: 2921100 - DNA, 25 bp, Homo sapien
accacagtggctagccctggacagg

SEQ ID NO: 2921101 - DNA, 25 bp, Homo sapien
cagaggaaagactggtaaggccaga

SEQ ID NO: 2921102 - DNA, 25 bp, Homo sapien
agcatgctccagtggaccagtgaac

SEQ ID NO: 2921103 - DNA, 25 bp, Homo sapien
gcatgctccagtggaccagtgaacc

SEQ ID NO: 2921104 - DNA, 25 bp, Homo sapien
cccactcagctatgcaaggttcggg

SEQ ID NO: 2921105 - DNA, 25 bp, Homo sapien
ccacatgtaactgcccatacataca

SEQ ID NO: 2921106 - DNA, 25 bp, Homo sapien
agacctctgtgtgtatcccctagag

SEQ ID NO: 2921107 - DNA, 25 bp, Homo sapien
gctacaaatgccaatcttgagaatg

SEQ ID NO: 2921108 - DNA, 25 bp, Homo sapien
catcatgcagcaaattgtctctctc

SEQ ID NO: 2921109 - DNA, 25 bp, Homo sapien
gcaaattgtctctctcactagacct

SEQ ID NO: 2921110 - DNA, 25 bp, Homo sapien
gtgaatcctacttcttccccatcat

SEQ ID NO: 2921111 - DNA, 25 bp, Homo sapien
tgcagcaaattgtctctctcactag

SEQ ID NO: 2921112 - DNA, 25 bp, Homo sapien
tgtcagccactgagtccaatcagat

SEQ ID NO: 2921113 - DNA, 25 bp, Homo sapien
ccatctaggtctccctgtcactctt

SEQ ID NO: 2921114 - DNA, 25 bp, Homo sapien
gacatctctccatctaggtctccct

SEQ ID NO: 2921115 - DNA, 25 bp, Homo sapien
tcttgtgcacaccaggactgttctt

SEQ ID NO: 2921116 - DNA, 25 bp, Homo sapien
gcccacactgaggaaggtaaaacca

SEQ ID NO: 2921117 - DNA, 25 bp, Homo sapien
ctgaggaaggtaaaaccacaggcac

SEQ ID NO: 2921118 - DNA, 25 bp, Homo sapien
ggcccagtcctcaacagcccacact

SEQ ID NO: 2921119 - DNA, 25 bp, Homo sapien
ccctaagatggatcagcctggccca

SEQ ID NO: 2921120 - DNA, 25 bp, Homo sapien
ccagggagagttcatcaagatctac

SEQ ID NO: 2921121 - DNA, 25 bp, Homo sapien
agctccagtgaaccagggagagttc

SEQ ID NO: 2921122 - DNA, 25 bp, Homo sapien
gaatgactatgatgaaatgctagga

SEQ ID NO: 2921123 - DNA, 25 bp, Homo sapien
accacatgctgaaatccaaccctaa

SEQ ID NO: 2921124 - DNA, 25 bp, Homo sapien
cactatccataggagggttcaaagc

SEQ ID NO: 2921125 - DNA, 25 bp, Homo sapien
gaaaagcaacgtgaaactctgtgag

SEQ ID NO: 2921126 - DNA, 25 bp, Homo sapien
aagagtaccacatatccacttgcag

SEQ ID NO: 2921127 - DNA, 25 bp, Homo sapien
cacttgcagaccctacgaaaagcgt

SEQ ID NO: 2921128 - DNA, 25 bp, Homo sapien
cttgcagattctacacaacgagagt

SEQ ID NO: 2921129 - DNA, 25 bp, Homo sapien
ggcctcaaagcggtccatatctcca

SEQ ID NO: 2921130 - DNA, 25 bp, Homo sapien
gcatctatctagttcttacgggaag

SEQ ID NO: 2921131 - DNA, 25 bp, Homo sapien
gagttaaactcagtcgtcacaaaga

SEQ ID NO: 2921132 - DNA, 25 bp, Homo sapien
aaagaggtctgcatgtccccttgca

SEQ ID NO: 2921133 - DNA, 25 bp, Homo sapien
tagatgttacgtgaagatatacccg

SEQ ID NO: 2921134 - DNA, 25 bp, Homo sapien
gtttcgatcgaagtccacagagtgg

SEQ ID NO: 2921135 - DNA, 25 bp, Homo sapien
gtttgcaacgaattcctcagacagg

SEQ ID NO: 2921136 - DNA, 25 bp, Homo sapien
cagcagttgtagattttatataagc

SEQ ID NO: 2921137 - DNA, 25 bp, Homo sapien
caaaatatcagcagttgtagatttt

SEQ ID NO: 2921138 - DNA, 25 bp, Homo sapien
tataagcaatgactttaagttcaac

SEQ ID NO: 2921139 - DNA, 25 bp, Homo sapien
tggaatgcaaaggatacaaaatatc

SEQ ID NO: 2921140 - DNA, 25 bp, Homo sapien
taactctgcaagtggctcatattcg

SEQ ID NO: 2921141 - DNA, 25 bp, Homo sapien
tcgcgacgtctggagatattattca

SEQ ID NO: 2921142 - DNA, 25 bp, Homo sapien
gctcatattcgcgacgtctggagat

SEQ ID NO: 2921143 - DNA, 25 bp, Homo sapien
ggagatattattcatgtagtgtgag

SEQ ID NO: 2921144 - DNA, 25 bp, Homo sapien
tgatgggcgacaccagaaagatgcg

SEQ ID NO: 2921145 - DNA, 25 bp, Homo sapien
cgacaccagaaagatgcggtccagg

SEQ ID NO: 2921146 - DNA, 25 bp, Homo sapien
tgggcgacaccagaaagatgcggtc

SEQ ID NO: 2921147 - DNA, 25 bp, Homo sapien
ctcgtgcaggatggtgatgggcgac

SEQ ID NO: 2921148 - DNA, 25 bp, Homo sapien
aggtcttgtggaagtgcgagtagtc

SEQ ID NO: 2921149 - DNA, 25 bp, Homo sapien
gatctcaaagtcgtccgtctccagg

SEQ ID NO: 2921150 - DNA, 25 bp, Homo sapien
aagagcacgggctcaaagcggtgac

SEQ ID NO: 2921151 - DNA, 25 bp, Homo sapien
ctgatgccgaagagcgggctggcct

SEQ ID NO: 2921152 - DNA, 25 bp, Homo sapien
agcaggcacttgttctccaccagat

SEQ ID NO: 2921153 - DNA, 25 bp, Homo sapien
ccagctcgttctcgtagcagaagga

SEQ ID NO: 2921154 - DNA, 25 bp, Homo sapien
cttgttctccaccagatccttcgcg

SEQ ID NO: 2921155 - DNA, 25 bp, Homo sapien
tctcgtagcagaaggagttgcgctg

SEQ ID NO: 2921156 - DNA, 25 bp, Homo sapien
ctaatcctcctcgtcacggctcagg

SEQ ID NO: 2921157 - DNA, 25 bp, Homo sapien
taatcctcctcgtcacggctcagga

SEQ ID NO: 2921158 - DNA, 25 bp, Homo sapien
aatcctcctcgtcacggctcaggaa

SEQ ID NO: 2921159 - DNA, 25 bp, Homo sapien
tcctcctcgtcacggctcaggaagg

SEQ ID NO: 2921160 - DNA, 25 bp, Homo sapien
tttgggtgattttcccaacctatga

SEQ ID NO: 2921161 - DNA, 25 bp, Homo sapien
ttggctaaaggaaacaggagaaagc

SEQ ID NO: 2921162 - DNA, 25 bp, Homo sapien
cttggctaaaggaaacaggagaaag

SEQ ID NO: 2921163 - DNA, 25 bp, Homo sapien
tgattttcccaacctatgaagtggg

SEQ ID NO: 2921164 - DNA, 25 bp, Homo sapien
gttctctaagctgagcaaagagccg

SEQ ID NO: 2921165 - DNA, 25 bp, Homo sapien
ctctaagctgagcaaagagccgctc

SEQ ID NO: 2921166 - DNA, 25 bp, Homo sapien
cagttctctaagctgagcaaagagc

SEQ ID NO: 2921167 - DNA, 25 bp, Homo sapien
cagcaggcagaaggttgcggcctct

SEQ ID NO: 2921168 - DNA, 25 bp, Homo sapien
cctgacacctccacccacagtgccc

SEQ ID NO: 2921169 - DNA, 25 bp, Homo sapien
ggctggttcccattcctgacacctc

SEQ ID NO: 2921170 - DNA, 25 bp, Homo sapien
cacagtgccctgtccccaacttccc

SEQ ID NO: 2921171 - DNA, 25 bp, Homo sapien
gggctggttcccattcctgacacct

SEQ ID NO: 2921172 - DNA, 25 bp, Homo sapien
agagccttagagtttgagagacctg

SEQ ID NO: 2921173 - DNA, 25 bp, Homo sapien
gataacgcaaagcaaaacagaggag

SEQ ID NO: 2921174 - DNA, 25 bp, Homo sapien
gacctgtctgcctgaagttcttgag

SEQ ID NO: 2921175 - DNA, 25 bp, Homo sapien
agttcttgaggttccatgaggacaa

SEQ ID NO: 2921176 - DNA, 25 bp, Homo sapien
tactcttacaatcaaacgccacctg

SEQ ID NO: 2921177 - DNA, 25 bp, Homo sapien
ggaacttactcttacaatcaaacgc

SEQ ID NO: 2921178 - DNA, 25 bp, Homo sapien
acttactcttacaatcaaacgccac

SEQ ID NO: 2921179 - DNA, 25 bp, Homo sapien
tcttacaatcaaacgccacctgttc

SEQ ID NO: 2921180 - DNA, 25 bp, Homo sapien
ttgctgttcccgcggatgtggctgc

SEQ ID NO: 2921181 - DNA, 25 bp, Homo sapien
tgctgttcccgcggatgtggctgca

SEQ ID NO: 2921182 - DNA, 25 bp, Homo sapien
ctgttcccgcggatgtggctgcaca

SEQ ID NO: 2921183 - DNA, 25 bp, Homo sapien
gctgttcccgcggatgtggctgcac

SEQ ID NO: 2921184 - DNA, 25 bp, Homo sapien
attttcatctcctccagttttgacc

SEQ ID NO: 2921185 - DNA, 25 bp, Homo sapien
aatgctgattttcatctcctccagt

SEQ ID NO: 2921186 - DNA, 25 bp, Homo sapien
taaatgctgattttcatctcctcca

SEQ ID NO: 2921187 - DNA, 25 bp, Homo sapien
tgattttcatctcctccagttttga

SEQ ID NO: 2921188 - DNA, 25 bp, Homo sapien
tgagtaactccctcttcataatgca

SEQ ID NO: 2921189 - DNA, 25 bp, Homo sapien
ctgttatggtaatggcaggtgcttt

SEQ ID NO: 2921190 - DNA, 25 bp, Homo sapien
caggtgctttttacttgagtaactc

SEQ ID NO: 2921191 - DNA, 25 bp, Homo sapien
gagtaactccctcttcataatgcat

SEQ ID NO: 2921192 - DNA, 25 bp, Homo sapien
agcatcgtgggtcggcctagatcat

SEQ ID NO: 2921193 - DNA, 25 bp, Homo sapien
aagcatcgtgggtcggcctagatca

SEQ ID NO: 2921194 - DNA, 25 bp, Homo sapien
ccaagcatcgtgggtcggcctagat

SEQ ID NO: 2921195 - DNA, 25 bp, Homo sapien
catcgtgggtcggcctagatcatac

SEQ ID NO: 2921196 - DNA, 25 bp, Homo sapien
ggctgagacctgtcggggtccaaat

SEQ ID NO: 2921197 - DNA, 25 bp, Homo sapien
tggctgagacctgtcggggtccaaa

SEQ ID NO: 2921198 - DNA, 25 bp, Homo sapien
agacctgtcggggtccaaatcacct

SEQ ID NO: 2921199 - DNA, 25 bp, Homo sapien
ctgtcggggtccaaatcacctccac

SEQ ID NO: 2921200 - DNA, 25 bp, Homo sapien
ttgctgagacccgacagggtccaaa

SEQ ID NO: 2921201 - DNA, 25 bp, Homo sapien
ggcttgctgagacccgacagggtcc

SEQ ID NO: 2921202 - DNA, 25 bp, Homo sapien
tgagacccgacagggtccaaatcac

SEQ ID NO: 2921203 - DNA, 25 bp, Homo sapien
gggcttgctgagacccgacagggtc

SEQ ID NO: 2921204 - DNA, 25 bp, Homo sapien
cagattccgtaaagagagtgtttcc

SEQ ID NO: 2921205 - DNA, 25 bp, Homo sapien
gtgtaggcctcaataggctctgaaa

SEQ ID NO: 2921206 - DNA, 25 bp, Homo sapien
agtgtaggcctcaataggctctgaa

SEQ ID NO: 2921207 - DNA, 25 bp, Homo sapien
gcagattccgtaaagagagtgtttc

SEQ ID NO: 2921208 - DNA, 25 bp, Homo sapien
tatgaaatgtctccttgtagattct

SEQ ID NO: 2921209 - DNA, 25 bp, Homo sapien
ctcaatgggctatgaaatgtctcct

SEQ ID NO: 2921210 - DNA, 25 bp, Homo sapien
tctagtctttatcaagggatattcg

SEQ ID NO: 2921211 - DNA, 25 bp, Homo sapien
tagtctttatcaagggatattcgat

SEQ ID NO: 2921212 - DNA, 25 bp, Homo sapien
ttttcaccacatgcctcaatgggct

SEQ ID NO: 2921213 - DNA, 25 bp, Homo sapien
gattctaccaattaagtgtctccaa

SEQ ID NO: 2921214 - DNA, 25 bp, Homo sapien
gtctccaactgggtgaatcaaaata

SEQ ID NO: 2921215 - DNA, 25 bp, Homo sapien
tcaatattggtctcaatgggctccg

SEQ ID NO: 2921216 - DNA, 25 bp, Homo sapien
ggatctgaggctgaggatggatatg

SEQ ID NO: 2921217 - DNA, 25 bp, Homo sapien
gaggctgaggatggatatgggccat

SEQ ID NO: 2921218 - DNA, 25 bp, Homo sapien
ctgaggctgaggatggatatgggcc

SEQ ID NO: 2921219 - DNA, 25 bp, Homo sapien
tctgaggctgaggatggatatgggc

SEQ ID NO: 2921220 - DNA, 25 bp, Homo sapien
tctcgatgtaaccttctagtaagtc

SEQ ID NO: 2921221 - DNA, 25 bp, Homo sapien
gaagctagaacttgctttcctgaca

SEQ ID NO: 2921222 - DNA, 25 bp, Homo sapien
gtatttgccttgtatctcaaatgcc

SEQ ID NO: 2921223 - DNA, 25 bp, Homo sapien
ggacagcaagataaccaggtatgta

SEQ ID NO: 2921224 - DNA, 25 bp, Homo sapien
cagcatgcacatcggcattttcaga

SEQ ID NO: 2921225 - DNA, 25 bp, Homo sapien
aagcctcagaatggaactaatgaac

SEQ ID NO: 2921226 - DNA, 25 bp, Homo sapien
gaatagcggtagaagaggccctgat

SEQ ID NO: 2921227 - DNA, 25 bp, Homo sapien
tggaactaatgaacttgaaaccgcc

SEQ ID NO: 2921228 - DNA, 25 bp, Homo sapien
ctacaatgtatgtcaaacgctggac

SEQ ID NO: 2921229 - DNA, 25 bp, Homo sapien
acgctggaccattctgagtgcctgt

SEQ ID NO: 2921230 - DNA, 25 bp, Homo sapien
tacaatgtatgtcaaacgctggacc

SEQ ID NO: 2921231 - DNA, 25 bp, Homo sapien
cattctgagtgcctgtagacagcat

SEQ ID NO: 2921232 - DNA, 25 bp, Homo sapien
ggtcttacagcaggaaccacttgaa

SEQ ID NO: 2921233 - DNA, 25 bp, Homo sapien
cttacagcaggaaccacttgaagtc

SEQ ID NO: 2921234 - DNA, 25 bp, Homo sapien
taggtcttacagcaggaaccacttg

SEQ ID NO: 2921235 - DNA, 25 bp, Homo sapien
ttaggtcttacagcaggaaccactt

SEQ ID NO: 2921236 - DNA, 25 bp, Homo sapien
taagtcttttcatttttattactca

SEQ ID NO: 2921237 - DNA, 25 bp, Homo sapien
gctatgggcgtagatgagagatcct

SEQ ID NO: 2921238 - DNA, 25 bp, Homo sapien
gatgagagatcctcaccatgcagca

SEQ ID NO: 2921239 - DNA, 25 bp, Homo sapien
gagatcctcaccatgcagcattgct

SEQ ID NO: 2921240 - DNA, 25 bp, Homo sapien
cgtagatgagagatcctcaccatgc

SEQ ID NO: 2921241 - DNA, 25 bp, Homo sapien
tgtaatgcagtgtgcatgactccat

SEQ ID NO: 2921242 - DNA, 25 bp, Homo sapien
tccagcagcttgtaatgcagtgtgc

SEQ ID NO: 2921243 - DNA, 25 bp, Homo sapien
agtgtgcatgactccatcatctcca

SEQ ID NO: 2921244 - DNA, 25 bp, Homo sapien
gttcacttccatgaggccactgcca

SEQ ID NO: 2921245 - DNA, 25 bp, Homo sapien
agatagcatgaatctgggccacctg

SEQ ID NO: 2921246 - DNA, 25 bp, Homo sapien
ctgacagatagcatgaatctgggcc

SEQ ID NO: 2921247 - DNA, 25 bp, Homo sapien
atagcatgaatctgggccacctgac

SEQ ID NO: 2921248 - DNA, 25 bp, Homo sapien
acagatagcatgaatctgggccacc

SEQ ID NO: 2921249 - DNA, 25 bp, Homo sapien
acacgtatttctggtaacaggccac

SEQ ID NO: 2921250 - DNA, 25 bp, Homo sapien
gggcctccaaactttctggatttgc

SEQ ID NO: 2921251 - DNA, 25 bp, Homo sapien
aactttctggatttgcagcgatgag

SEQ ID NO: 2921252 - DNA, 25 bp, Homo sapien
cattggatgaggacgtctttgacct

SEQ ID NO: 2921253 - DNA, 25 bp, Homo sapien
cacattggatgaggacgtctttgac

SEQ ID NO: 2921254 - DNA, 25 bp, Homo sapien
tgatgggctttagggtaggattcct

SEQ ID NO: 2921255 - DNA, 25 bp, Homo sapien
gataactcgtgatgggctttagggt

SEQ ID NO: 2921256 - DNA, 25 bp, Homo sapien
ttactgataactcgtgatgggcttt

SEQ ID NO: 2921257 - DNA, 25 bp, Homo sapien
gggtaggattcctagtaacaagcac

SEQ ID NO: 2921258 - DNA, 25 bp, Homo sapien
gaggcacctagttgtccacacatca

SEQ ID NO: 2921259 - DNA, 25 bp, Homo sapien
tgtcagtatctgctagatgccagct

SEQ ID NO: 2921260 - DNA, 25 bp, Homo sapien
tcagactgataaatgtgtcagtatc

SEQ ID NO: 2921261 - DNA, 25 bp, Homo sapien
ggttcccggtcacagatgacgtatt

SEQ ID NO: 2921262 - DNA, 25 bp, Homo sapien
tgcggacccaacaacagagaagaga

SEQ ID NO: 2921263 - DNA, 25 bp, Homo sapien
tctgctaactgcctcgggaaagctc

SEQ ID NO: 2921264 - DNA, 25 bp, Homo sapien
gaaggcctcagaccaaagtacggag

SEQ ID NO: 2921265 - DNA, 25 bp, Homo sapien
tcgcgcctgcggaggaagacagttc

SEQ ID NO: 2921266 - DNA, 25 bp, Homo sapien
tgaccctcgggggaaagctggccat

SEQ ID NO: 2921267 - DNA, 25 bp, Homo sapien
ctcgttgaccctcgggggaaagctg

SEQ ID NO: 2921268 - DNA, 25 bp, Homo sapien
atctctttctcgttgaccctcgggg

SEQ ID NO: 2921269 - DNA, 25 bp, Homo sapien
ttgaccctcgggggaaagctggcca

SEQ ID NO: 2921270 - DNA, 25 bp, Homo sapien
aaccgctgcgtttcttaaggccaca

SEQ ID NO: 2921271 - DNA, 25 bp, Homo sapien
gagtggttggtacacacgaggaccc

SEQ ID NO: 2921272 - DNA, 25 bp, Homo sapien
tcagcggccgcagctaattattact

SEQ ID NO: 2921273 - DNA, 25 bp, Homo sapien
cactaagtaggtgtggacgcacaac

SEQ ID NO: 2921274 - DNA, 25 bp, Homo sapien
gctgccatgggaaatcagccgtaag

SEQ ID NO: 2921275 - DNA, 25 bp, Homo sapien
tccgtatgtccttgagaaactaaac

SEQ ID NO: 2921276 - DNA, 25 bp, Homo sapien
ccttgtgaaaaagggcagtagctca

SEQ ID NO: 2921277 - DNA, 25 bp, Homo sapien
tagctcaaggcagtagtatcacaga

SEQ ID NO: 2921278 - DNA, 25 bp, Homo sapien
ttactaataattgccttgtgtttct

SEQ ID NO: 2921279 - DNA, 25 bp, Homo sapien
aactcaagaaatagagccattataa

SEQ ID NO: 2921280 - DNA, 25 bp, Homo sapien
atcaaattgcctttggcactttaat

SEQ ID NO: 2921281 - DNA, 25 bp, Homo sapien
ttgtgtttctttgctggataacagg

SEQ ID NO: 2921282 - DNA, 25 bp, Homo sapien
tgcccagcctagactgtattttaag

SEQ ID NO: 2921283 - DNA, 25 bp, Homo sapien
aggtatgcaccatcatgatgcccac

SEQ ID NO: 2921284 - DNA, 25 bp, Homo sapien
cccagcctagactgtattttaaggt

SEQ ID NO: 2921285 - DNA, 25 bp, Homo sapien
gtatgcaccatcatgatgcccacca

SEQ ID NO: 2921286 - DNA, 25 bp, Homo sapien
aagctctcccttagcaagcataagc

SEQ ID NO: 2921287 - DNA, 25 bp, Homo sapien
caaagcggtgagattaaggcatgac

SEQ ID NO: 2921288 - DNA, 25 bp, Homo sapien
tgtaacttgtatacgaggaacagcc

SEQ ID NO: 2921289 - DNA, 25 bp, Homo sapien
ggaacagcccttgcattcaatttca

SEQ ID NO: 2921290 - DNA, 25 bp, Homo sapien
tagtactggccctcataaaagtggc

SEQ ID NO: 2921291 - DNA, 25 bp, Homo sapien
gtttaatcaaagcagcagagtcccc

SEQ ID NO: 2921292 - DNA, 25 bp, Homo sapien
tgacctaagagaataagcctgctgc

SEQ ID NO: 2921293 - DNA, 25 bp, Homo sapien
cactattttggtgcaactgagaccg

SEQ ID NO: 2921294 - DNA, 25 bp, Homo sapien
gaacaagctttactgtgcgatgtcc

SEQ ID NO: 2921295 - DNA, 25 bp, Homo sapien
ccatctggagcaaaagcaacagtcc

SEQ ID NO: 2921296 - DNA, 25 bp, Homo sapien
gctgcaggagctaaaagttcaccta

SEQ ID NO: 2921297 - DNA, 25 bp, Homo sapien
cttgtgaccaagcaaagtatgaacc

SEQ ID NO: 2921298 - DNA, 25 bp, Homo sapien
gcccatgattaaaactcacgacatc

SEQ ID NO: 2921299 - DNA, 25 bp, Homo sapien
gattaaaactcacgacatcatctat

SEQ ID NO: 2921300 - DNA, 25 bp, Homo sapien
tatattcagcccatgattaaaactc

SEQ ID NO: 2921301 - DNA, 25 bp, Homo sapien
tcacgacatcatctataaagtaaaa

SEQ ID NO: 2921302 - DNA, 25 bp, Homo sapien
taaccatgaaggtctgctagacaca

SEQ ID NO: 2921303 - DNA, 25 bp, Homo sapien
gggaaagatccaatatagcacatga

SEQ ID NO: 2921304 - DNA, 25 bp, Homo sapien
tgcaccagggttatccaacaaaatg

SEQ ID NO: 2921305 - DNA, 25 bp, Homo sapien
gatcagtttcccataggttccagac

SEQ ID NO: 2921306 - DNA, 25 bp, Homo sapien
cacgaggcttatttttctgaccacc

SEQ ID NO: 2921307 - DNA, 25 bp, Homo sapien
tcaaccctgtagcaagaagtagctg

SEQ ID NO: 2921308 - DNA, 25 bp, Homo sapien
tccaaatctgaagcgatgccattct

SEQ ID NO: 2921309 - DNA, 25 bp, Homo sapien
tgatacgcccattgttcaaccctgt

SEQ ID NO: 2921310 - DNA, 25 bp, Homo sapien
ttccctggcctaggaatgttaagct

SEQ ID NO: 2921311 - DNA, 25 bp, Homo sapien
caactttagttttcaaacatgatcc

SEQ ID NO: 2921312 - DNA, 25 bp, Homo sapien
gatacaagttatcccacaactttag

SEQ ID NO: 2921313 - DNA, 25 bp, Homo sapien
ttctaagacaatctatgtgttcatc

SEQ ID NO: 2921314 - DNA, 25 bp, Homo sapien
tatgatctaccaagttaaggaggag

SEQ ID NO: 2921315 - DNA, 25 bp, Homo sapien
ctcttgaagctgacaccaggatcaa

SEQ ID NO: 2921316 - DNA, 25 bp, Homo sapien
ggtcccatactctgagagttttgtc

SEQ ID NO: 2921317 - DNA, 25 bp, Homo sapien
aaagttaaatctctgaccacttcag

SEQ ID NO: 2921318 - DNA, 25 bp, Homo sapien
gcaatttatctataacaagggttac

SEQ ID NO: 2921319 - DNA, 25 bp, Homo sapien
agggttaccgatatacaccagctgc

SEQ ID NO: 2921320 - DNA, 25 bp, Homo sapien
tgtgtttatgttgtgctctacagca

SEQ ID NO: 2921321 - DNA, 25 bp, Homo sapien
ttactggaacacaatcctgtccatg

SEQ ID NO: 2921322 - DNA, 25 bp, Homo sapien
tggctccgactgaacacagcataga

SEQ ID NO: 2921323 - DNA, 25 bp, Homo sapien
tgcacagctgtacacccaattctga

SEQ ID NO: 2921324 - DNA, 25 bp, Homo sapien
agctgtacacccaattctgatgccc

SEQ ID NO: 2921325 - DNA, 25 bp, Homo sapien
gaatgcacagctgtacacccaattc

SEQ ID NO: 2921326 - DNA, 25 bp, Homo sapien
taaaatgcatttcaactagcctccc

SEQ ID NO: 2921327 - DNA, 25 bp, Homo sapien
cagagctggtaaacaactacaagag

SEQ ID NO: 2921328 - DNA, 25 bp, Homo sapien
aatattcatgacaccgagcacagac

SEQ ID NO: 2921329 - DNA, 25 bp, Homo sapien
gttaaatgtacaggaccagctggga

SEQ ID NO: 2921330 - DNA, 25 bp, Homo sapien
tgtgtgcgagtggtgccagcataac

SEQ ID NO: 2921331 - DNA, 25 bp, Homo sapien
ctaacaccattgtgcgcctgtgtgc

SEQ ID NO: 2921332 - DNA, 25 bp, Homo sapien
ctttctgcccagctaacaccattgt

SEQ ID NO: 2921333 - DNA, 25 bp, Homo sapien
tctgcccagctaacaccattgtgcg

SEQ ID NO: 2921334 - DNA, 25 bp, Homo sapien
agtacaccttgcagccgaatgcaag

SEQ ID NO: 2921335 - DNA, 25 bp, Homo sapien
cccagcccggtagccagagatgcca

SEQ ID NO: 2921336 - DNA, 25 bp, Homo sapien
ttcatcctatggtaaaggtcgcccc

SEQ ID NO: 2921337 - DNA, 25 bp, Homo sapien
aatgcaaggttacttcatcctatgg

SEQ ID NO: 2921338 - DNA, 25 bp, Homo sapien
aattggtttcacttgtcagactccc

SEQ ID NO: 2921339 - DNA, 25 bp, Homo sapien
gaaaagcagaaagtggacatcgacc

SEQ ID NO: 2921340 - DNA, 25 bp, Homo sapien
gagcttggaggtttatcctaagaca

SEQ ID NO: 2921341 - DNA, 25 bp, Homo sapien
tgtgcagaatagctctaaacaggat

SEQ ID NO: 2921342 - DNA, 25 bp, Homo sapien
ataggcttgggtcaccaacttgagc

SEQ ID NO: 2921343 - DNA, 25 bp, Homo sapien
caataggcttgggtcaccaacttga

SEQ ID NO: 2921344 - DNA, 25 bp, Homo sapien
gtttacaataggcttgggtcaccaa

SEQ ID NO: 2921345 - DNA, 25 bp, Homo sapien
tacaataggcttgggtcaccaactt

SEQ ID NO: 2921346 - DNA, 25 bp, Homo sapien
cattggcatctccctttgagataat

SEQ ID NO: 2921347 - DNA, 25 bp, Homo sapien
attggcatctccctttgagataatc

SEQ ID NO: 2921348 - DNA, 25 bp, Homo sapien
ttggcatctccctttgagataatca

SEQ ID NO: 2921349 - DNA, 25 bp, Homo sapien
aggcaatgcaatttaaccacaaagc

SEQ ID NO: 2921350 - DNA, 25 bp, Homo sapien
tatacagacagaaaacgtaaggtta

SEQ ID NO: 2921351 - DNA, 25 bp, Homo sapien
ttaaagaatatgctcagtgtcatag

SEQ ID NO: 2921352 - DNA, 25 bp, Homo sapien
ttaattaaggcagacatgcaaattc

SEQ ID NO: 2921353 - DNA, 25 bp, Homo sapien
cttcattcagacatacagaggacaa

SEQ ID NO: 2921354 - DNA, 25 bp, Homo sapien
ggcacatcttatactaaaactgcta

SEQ ID NO: 2921355 - DNA, 25 bp, Homo sapien
tcagacatacagaggacaaaatggc

SEQ ID NO: 2921356 - DNA, 25 bp, Homo sapien
aaggcaaatgttatagcttcattca

SEQ ID NO: 2921357 - DNA, 25 bp, Homo sapien
ggtgatgtccttctagtttccgtat

SEQ ID NO: 2921358 - DNA, 25 bp, Homo sapien
agtcacaagctaccacatcatggtg

SEQ ID NO: 2921359 - DNA, 25 bp, Homo sapien
tcgagtatcataagatgcagtagcc

SEQ ID NO: 2921360 - DNA, 25 bp, Homo sapien
tgtggatcccagatatatactcgag

SEQ ID NO: 2921361 - DNA, 25 bp, Homo sapien
agactcagtagagatgatacatcca

SEQ ID NO: 2921362 - DNA, 25 bp, Homo sapien
taatcttttatggtcgggcgcagtg

SEQ ID NO: 2921363 - DNA, 25 bp, Homo sapien
gaagactcagtagagatgatacatc

SEQ ID NO: 2921364 - DNA, 25 bp, Homo sapien
aaagtagccttaattaatataactg

SEQ ID NO: 2921365 - DNA, 25 bp, Homo sapien
agatcgtacccaccggtcatttgct

SEQ ID NO: 2921366 - DNA, 25 bp, Homo sapien
tccagcaaatattggagtaggtggg

SEQ ID NO: 2921367 - DNA, 25 bp, Homo sapien
tcctccagcaaatattggagtaggt

SEQ ID NO: 2921368 - DNA, 25 bp, Homo sapien
ggctaaaagatacagatcgtaccca

SEQ ID NO: 2921369 - DNA, 25 bp, Homo sapien
catcagcaaggcttgcaacatgcag

SEQ ID NO: 2921370 - DNA, 25 bp, Homo sapien
gcaaggcttgcaacatgcagtccat

SEQ ID NO: 2921371 - DNA, 25 bp, Homo sapien
tcagcaaggcttgcaacatgcagtc

SEQ ID NO: 2921372 - DNA, 25 bp, Homo sapien
ttatcatcagcaaggcttgcaacat

SEQ ID NO: 2921373 - DNA, 25 bp, Homo sapien
tagtaagtcagtcaagctataatgc

SEQ ID NO: 2921374 - DNA, 25 bp, Homo sapien
gtcagtcaagctataatgcacatac

SEQ ID NO: 2921375 - DNA, 25 bp, Homo sapien
tgcagaaaggctttaaggcttaaga

SEQ ID NO: 2921376 - DNA, 25 bp, Homo sapien
gcagaaaggctttaaggcttaagaa

SEQ ID NO: 2921377 - DNA, 25 bp, Homo sapien
tacacagataattgttcaggccgat

SEQ ID NO: 2921378 - DNA, 25 bp, Homo sapien
gataattgttcaggccgatattctt

SEQ ID NO: 2921379 - DNA, 25 bp, Homo sapien
gttcaggccgatattctttaagaca

SEQ ID NO: 2921380 - DNA, 25 bp, Homo sapien
tgttcaggccgatattctttaagac

SEQ ID NO: 2921381 - DNA, 25 bp, Homo sapien
cagtgttcaaacctagaatgttcac

SEQ ID NO: 2921382 - DNA, 25 bp, Homo sapien
tacaatacaatcaacttctagtctg

SEQ ID NO: 2921383 - DNA, 25 bp, Homo sapien
gaaatgccattgagttatgagtcac

SEQ ID NO: 2921384 - DNA, 25 bp, Homo sapien
tatacccctgtggtgtgagatactc

SEQ ID NO: 2921385 - DNA, 25 bp, Homo sapien
gataatcctcatcaattctccagaa

SEQ ID NO: 2921386 - DNA, 25 bp, Homo sapien
tgccatcagtagagaaggcacagca

SEQ ID NO: 2921387 - DNA, 25 bp, Homo sapien
ttgctcaaaggtgcaacttgcactg

SEQ ID NO: 2921388 - DNA, 25 bp, Homo sapien
aaaacactgccatcagtagagaagg

SEQ ID NO: 2921389 - DNA, 25 bp, Homo sapien
aaagcacatgcttagtcacccaagt

SEQ ID NO: 2921390 - DNA, 25 bp, Homo sapien
caaagcacatgcttagtcacccaag

SEQ ID NO: 2921391 - DNA, 25 bp, Homo sapien
gacataaatgttgcaggctagggac

SEQ ID NO: 2921392 - DNA, 25 bp, Homo sapien
cctgccgtggagtggcccaaaaata

SEQ ID NO: 2921393 - DNA, 25 bp, Homo sapien
ggtgggcatcactcttcggattgac

SEQ ID NO: 2921394 - DNA, 25 bp, Homo sapien
ctaaatacgatacgagagaaactcc

SEQ ID NO: 2921395 - DNA, 25 bp, Homo sapien
ggtccattcaacatatagcagctta

SEQ ID NO: 2921396 - DNA, 25 bp, Homo sapien
caaatacatttcgtatgaggcaaca

SEQ ID NO: 2921397 - DNA, 25 bp, Homo sapien
gacagagagaaagtactccacctaa

SEQ ID NO: 2921398 - DNA, 25 bp, Homo sapien
tacatattgtggctctactgaagca

SEQ ID NO: 2921399 - DNA, 25 bp, Homo sapien
cattatcgcaaaaggatagcttggc

SEQ ID NO: 2921400 - DNA, 25 bp, Homo sapien
gacccaagagcagtgtaaaccagtt

SEQ ID NO: 2921401 - DNA, 25 bp, Homo sapien
tgtctcaatggtttcaggctcgtga

SEQ ID NO: 2921402 - DNA, 25 bp, Homo sapien
ggcactcactatggttttcacgaga

SEQ ID NO: 2921403 - DNA, 25 bp, Homo sapien
ccttccaagcatcttaccataaaca

SEQ ID NO: 2921404 - DNA, 25 bp, Homo sapien
cttccaagcatcttaccataaacat

SEQ ID NO: 2921405 - DNA, 25 bp, Homo sapien
caaagggcaggttgagattgcctac

SEQ ID NO: 2921406 - DNA, 25 bp, Homo sapien
aagaatgctttatggatcaaagggc

SEQ ID NO: 2921407 - DNA, 25 bp, Homo sapien
gaccagatttttgctggtggctaaa

SEQ ID NO: 2921408 - DNA, 25 bp, Homo sapien
taaaacaggtcactttatacctggc

SEQ ID NO: 2921409 - DNA, 25 bp, Homo sapien
cggtgacaggcaacactgtattata

SEQ ID NO: 2921410 - DNA, 25 bp, Homo sapien
gcaacactgtattataggttttcct

SEQ ID NO: 2921411 - DNA, 25 bp, Homo sapien
caaactcactataatgacggtgaca

SEQ ID NO: 2921412 - DNA, 25 bp, Homo sapien
gccattgatgcttcagccttattta

SEQ ID NO: 2921413 - DNA, 25 bp, Homo sapien
gcctccagagtaacggaggagacca

SEQ ID NO: 2921414 - DNA, 25 bp, Homo sapien
tccgttccaattactggtgcatgca

SEQ ID NO: 2921415 - DNA, 25 bp, Homo sapien
cctccagagtaacggaggagaccac

SEQ ID NO: 2921416 - DNA, 25 bp, Homo sapien
ctgttccgttccaattactggtgca

SEQ ID NO: 2921417 - DNA, 25 bp, Homo sapien
ccctgggccatactgtgattatgag

SEQ ID NO: 2921418 - DNA, 25 bp, Homo sapien
gggcttgatcttatttaatccatac

SEQ ID NO: 2921419 - DNA, 25 bp, Homo sapien
tattaataacaactgcctccctcac

SEQ ID NO: 2921420 - DNA, 25 bp, Homo sapien
tcaccaagactaggccctatgttaa

SEQ ID NO: 2921421 - DNA, 25 bp, Homo sapien
tgacacacctgagcattgccactca

SEQ ID NO: 2921422 - DNA, 25 bp, Homo sapien
cacacctagagcctttcttccttga

SEQ ID NO: 2921423 - DNA, 25 bp, Homo sapien
atcacacctagagcctttcttcctt

SEQ ID NO: 2921424 - DNA, 25 bp, Homo sapien
ctttcttccttgacacacctgagca

SEQ ID NO: 2921425 - DNA, 25 bp, Homo sapien
tgcttgtggtttaaatggactctgc

SEQ ID NO: 2921426 - DNA, 25 bp, Homo sapien
actcgcagatacacacgggtgcttg

SEQ ID NO: 2921427 - DNA, 25 bp, Homo sapien
tttggcaagataatgcccagtgctg

SEQ ID NO: 2921428 - DNA, 25 bp, Homo sapien
gaggttctggcgagattgccactcg

SEQ ID NO: 2921429 - DNA, 25 bp, Homo sapien
tctgtgcactgggctttgatccagg

SEQ ID NO: 2921430 - DNA, 25 bp, Homo sapien
ttttgtggagcccctctgtgcactg

SEQ ID NO: 2921431 - DNA, 25 bp, Homo sapien
actggtgtggttttgtggagcccct

SEQ ID NO: 2921432 - DNA, 25 bp, Homo sapien
tggtgccaggtgactggtgtggttt

SEQ ID NO: 2921433 - DNA, 25 bp, Homo sapien
ataagaaggacacttttgacacccg

SEQ ID NO: 2921434 - DNA, 25 bp, Homo sapien
tccaaaggtgtaagctcctgggcct

SEQ ID NO: 2921435 - DNA, 25 bp, Homo sapien
cagaagcagcctgtataggcctggt

SEQ ID NO: 2921436 - DNA, 25 bp, Homo sapien
aggatgtctgaggatgtcatttgtt

SEQ ID NO: 2921437 - DNA, 25 bp, Homo sapien
gcttccaatggcacagcagctcgtg

SEQ ID NO: 2921438 - DNA, 25 bp, Homo sapien
gctgggcgctcacaaaggccccttt

SEQ ID NO: 2921439 - DNA, 25 bp, Homo sapien
ccccgacttggctggactccgaggg

SEQ ID NO: 2921440 - DNA, 25 bp, Homo sapien
tcctccaccgaagatgagtcatagc

SEQ ID NO: 2921441 - DNA, 25 bp, Homo sapien
ttaaaatgcagcagacacgtggtct

SEQ ID NO: 2921442 - DNA, 25 bp, Homo sapien
gagaaagtcagatgttcacaactat

SEQ ID NO: 2921443 - DNA, 25 bp, Homo sapien
tcttggagacgcaacaagcagggcc

SEQ ID NO: 2921444 - DNA, 25 bp, Homo sapien
cagggccgcggaccaggcgttaggt

SEQ ID NO: 2921445 - DNA, 25 bp, Homo sapien
ctcgcttgaacctgagaagccgagg

SEQ ID NO: 2921446 - DNA, 25 bp, Homo sapien
tgggaaggctgagccaggagactcg

SEQ ID NO: 2921447 - DNA, 25 bp, Homo sapien
agactcgcttgaacctgagaagccg

SEQ ID NO: 2921448 - DNA, 25 bp, Homo sapien
aagccgaggttgcagtgagcagaga

SEQ ID NO: 2921449 - DNA, 25 bp, Homo sapien
acacagcaagaggctgtctctaatt

SEQ ID NO: 2921450 - DNA, 25 bp, Homo sapien
acacagcaagacaccatctctacaa

SEQ ID NO: 2921451 - DNA, 25 bp, Homo sapien
cagcaagaggctgtctctaattttt

SEQ ID NO: 2921452 - DNA, 25 bp, Homo sapien
aaagaatttgagactaacctgggca

SEQ ID NO: 2921453 - DNA, 25 bp, Homo sapien
gaataaggttcagccatcaggaggc

SEQ ID NO: 2921454 - DNA, 25 bp, Homo sapien
gctgtaacttgggtgtggccgaccc

SEQ ID NO: 2921455 - DNA, 25 bp, Homo sapien
tggcagtgactgcagccctagggct

SEQ ID NO: 2921456 - DNA, 25 bp, Homo sapien
gagccagccctaagcattgaatcac

SEQ ID NO: 2921457 - DNA, 25 bp, Homo sapien
cagtcataccccacttattctgagg

SEQ ID NO: 2921458 - DNA, 25 bp, Homo sapien
ccccacttattctgaggttacattt

SEQ ID NO: 2921459 - DNA, 25 bp, Homo sapien
aggagagggcagtcataccccactt

SEQ ID NO: 2921460 - DNA, 25 bp, Homo sapien
gagggcagtcataccccacttattc

SEQ ID NO: 2921461 - DNA, 25 bp, Homo sapien
tccggagtctatctttgggtacgat

SEQ ID NO: 2921462 - DNA, 25 bp, Homo sapien
ttcaagttcatggttgtatttgctt

SEQ ID NO: 2921463 - DNA, 25 bp, Homo sapien
aatatatccggagtctatctttggg

SEQ ID NO: 2921464 - DNA, 25 bp, Homo sapien
ttcaaggtagtcaaattcatcaaca

SEQ ID NO: 2921465 - DNA, 25 bp, Homo sapien
gacacaaacaagttgtactgaattg

SEQ ID NO: 2921466 - DNA, 25 bp, Homo sapien
ctggacacaaacaagttgtactgaa

SEQ ID NO: 2921467 - DNA, 25 bp, Homo sapien
caaacaagttgtactgaattgccaa

SEQ ID NO: 2921468 - DNA, 25 bp, Homo sapien
aacaagttgtactgaattgccaata

SEQ ID NO: 2921469 - DNA, 25 bp, Homo sapien
catttgtttatgacaattccggttt

SEQ ID NO: 2921470 - DNA, 25 bp, Homo sapien
tcataattactagggaagttgagca

SEQ ID NO: 2921471 - DNA, 25 bp, Homo sapien
tttcatttgtttatgacaattccgg

SEQ ID NO: 2921472 - DNA, 25 bp, Homo sapien
tgaattctcataattactagggaag

SEQ ID NO: 2921473 - DNA, 25 bp, Homo sapien
tgatgtggccgacagaggatgccct

SEQ ID NO: 2921474 - DNA, 25 bp, Homo sapien
ctggagtggtgatgtggccgacaga

SEQ ID NO: 2921475 - DNA, 25 bp, Homo sapien
gtgagtgacagtggcccacaccctg

SEQ ID NO: 2921476 - DNA, 25 bp, Homo sapien
ggatgccctcagtgggtgagtgaca

SEQ ID NO: 2921477 - DNA, 25 bp, Homo sapien
ttggtgggtagttcttcagggtcca

SEQ ID NO: 2921478 - DNA, 25 bp, Homo sapien
tcagggtccactggagaaccttgtc

SEQ ID NO: 2921479 - DNA, 25 bp, Homo sapien
agttggcctggtttacatctttgtt

SEQ ID NO: 2921480 - DNA, 25 bp, Homo sapien
tatggcactcttgacaaaaaaaccc

SEQ ID NO: 2921481 - DNA, 25 bp, Homo sapien
ccatgtgcgggatgtgagtgcttct

SEQ ID NO: 2921482 - DNA, 25 bp, Homo sapien
cagcagccatgtgcgggatgtgagt

SEQ ID NO: 2921483 - DNA, 25 bp, Homo sapien
gagacagcagccatgtgcgggatgt

SEQ ID NO: 2921484 - DNA, 25 bp, Homo sapien
atgtgagtgcttctagccagatggg

SEQ ID NO: 2921485 - DNA, 25 bp, Homo sapien
gcagagagcggacgggtgctaagca

SEQ ID NO: 2921486 - DNA, 25 bp, Homo sapien
agggcagagagcggacgggtgctaa

SEQ ID NO: 2921487 - DNA, 25 bp, Homo sapien
ggcagagagcggacgggtgctaagc

SEQ ID NO: 2921488 - DNA, 25 bp, Homo sapien
ggcagggcagagagcggacgggtgc

SEQ ID NO: 2921489 - DNA, 25 bp, Homo sapien
tcacagataccactgtctgtgtgta

SEQ ID NO: 2921490 - DNA, 25 bp, Homo sapien
agataccactgtctgtgtgtagctg

SEQ ID NO: 2921491 - DNA, 25 bp, Homo sapien
agagctgctcacagataccactgtc

SEQ ID NO: 2921492 - DNA, 25 bp, Homo sapien
cctgggttacgcctctcagggagaa

SEQ ID NO: 2921493 - DNA, 25 bp, Homo sapien
ctgtcaaatgggtacatgcgggagc

SEQ ID NO: 2921494 - DNA, 25 bp, Homo sapien
tgaaagagacaactgtccacacggg

SEQ ID NO: 2921495 - DNA, 25 bp, Homo sapien
tgcgggagccaccatgaggatgaaa

SEQ ID NO: 2921496 - DNA, 25 bp, Homo sapien
acacgggcagcgtagaacgggcacc

SEQ ID NO: 2921497 - DNA, 25 bp, Homo sapien
cattttccacgactgcccaaaggca

SEQ ID NO: 2921498 - DNA, 25 bp, Homo sapien
ttttccacgactgcccaaaggcaga

SEQ ID NO: 2921499 - DNA, 25 bp, Homo sapien
attttccacgactgcccaaaggcag

SEQ ID NO: 2921500 - DNA, 25 bp, Homo sapien
tgccccagcatgttgaatggtgtcc

SEQ ID NO: 2921501 - DNA, 25 bp, Homo sapien
tgctcagggaccacagagatgccca

SEQ ID NO: 2921502 - DNA, 25 bp, Homo sapien
ctgccccagcatgttgaatggtgtc

SEQ ID NO: 2921503 - DNA, 25 bp, Homo sapien
ctgggatgctcagggaccacagaga

SEQ ID NO: 2921504 - DNA, 25 bp, Homo sapien
gtatccacatcctctaccatgtcca

SEQ ID NO: 2921505 - DNA, 25 bp, Homo sapien
ctcactcctgcaaagtatccacatc

SEQ ID NO: 2921506 - DNA, 25 bp, Homo sapien
taatgatgtcctctcactcctgcaa

SEQ ID NO: 2921507 - DNA, 25 bp, Homo sapien
tctcactcctgcaaagtatccacat

SEQ ID NO: 2921508 - DNA, 25 bp, Homo sapien
cgggtgcaagggtctgggggtagtg

SEQ ID NO: 2921509 - DNA, 25 bp, Homo sapien
taatccagagggagccttgatgagg

SEQ ID NO: 2921510 - DNA, 25 bp, Homo sapien
gtgcaagggtctgggggtagtggcc

SEQ ID NO: 2921511 - DNA, 25 bp, Homo sapien
ctgtaatccagagggagccttgatg

SEQ ID NO: 2921512 - DNA, 25 bp, Homo sapien
caacaggctttaggccccgtgtctg

SEQ ID NO: 2921513 - DNA, 25 bp, Homo sapien
tcccaaagcgatcagtgctgctgta

SEQ ID NO: 2921514 - DNA, 25 bp, Homo sapien
agcgatcagtgctgctgtagattcc

SEQ ID NO: 2921515 - DNA, 25 bp, Homo sapien
tagattccaacaggctttaggcccc

SEQ ID NO: 2921516 - DNA, 25 bp, Homo sapien
agacccagggtcattagctgcaagc

SEQ ID NO: 2921517 - DNA, 25 bp, Homo sapien
ccattcccctaaggccacagcccct

SEQ ID NO: 2921518 - DNA, 25 bp, Homo sapien
cagggtcattagctgcaagctctgc

SEQ ID NO: 2921519 - DNA, 25 bp, Homo sapien
cccagggtcattagctgcaagctct

SEQ ID NO: 2921520 - DNA, 25 bp, Homo sapien
gctctgaccgggcagttccttctca

SEQ ID NO: 2921521 - DNA, 25 bp, Homo sapien
gcagagctgaggacttgcacaaggt

SEQ ID NO: 2921522 - DNA, 25 bp, Homo sapien
aaggtttggagccatctcggtctgg

SEQ ID NO: 2921523 - DNA, 25 bp, Homo sapien
gaccgggcagttccttctcactgta

SEQ ID NO: 2921524 - DNA, 25 bp, Homo sapien
gagcccgaggatcctggaaatcttt

SEQ ID NO: 2921525 - DNA, 25 bp, Homo sapien
tgcatgaacgggcagtaaagctggc

SEQ ID NO: 2921526 - DNA, 25 bp, Homo sapien
ccttcgcaggattgaaagagtgtgt

SEQ ID NO: 2921527 - DNA, 25 bp, Homo sapien
cactcaatcaattagctgtgggcag

SEQ ID NO: 2921528 - DNA, 25 bp, Homo sapien
agaagatgtggttccctagtgtcca

SEQ ID NO: 2921529 - DNA, 25 bp, Homo sapien
aagatgtggttccctagtgtccagc

SEQ ID NO: 2921530 - DNA, 25 bp, Homo sapien
gaagatgtggttccctagtgtccag

SEQ ID NO: 2921531 - DNA, 25 bp, Homo sapien
tgaccctggctaggggaggagccgc

SEQ ID NO: 2921532 - DNA, 25 bp, Homo sapien
gcggctcctcccctagccagggtca

SEQ ID NO: 2921533 - DNA, 25 bp, Homo sapien
atatgccaggaggatgtagaatagt

SEQ ID NO: 2921534 - DNA, 25 bp, Homo sapien
tgccaggaggatgtagaatagttcc

SEQ ID NO: 2921535 - DNA, 25 bp, Homo sapien
tgggttatactctgaatatgccagg

SEQ ID NO: 2921536 - DNA, 25 bp, Homo sapien
ccaggaggatgtagaatagttcccg

SEQ ID NO: 2921537 - DNA, 25 bp, Homo sapien
aacaaggcagtgacatggctcaggt

SEQ ID NO: 2921538 - DNA, 25 bp, Homo sapien
acaaggcagtgacatggctcaggtc

SEQ ID NO: 2921539 - DNA, 25 bp, Homo sapien
gaacaaggcagtgacatggctcagg

SEQ ID NO: 2921540 - DNA, 25 bp, Homo sapien
tggtcttgggttgttacatgggtac

SEQ ID NO: 2921541 - DNA, 25 bp, Homo sapien
catgggtaccacatgctcctgatgg

SEQ ID NO: 2921542 - DNA, 25 bp, Homo sapien
gggttgttacatgggtaccacatgc

SEQ ID NO: 2921543 - DNA, 25 bp, Homo sapien
gttacatgggtaccacatgctcctg

SEQ ID NO: 2921544 - DNA, 25 bp, Homo sapien
agctgaatgaggaaccctgtgtgca

SEQ ID NO: 2921545 - DNA, 25 bp, Homo sapien
aatgaggaaccctgtgtgcattgac

SEQ ID NO: 2921546 - DNA, 25 bp, Homo sapien
aaccctgtgtgcattgaccttcctt

SEQ ID NO: 2921547 - DNA, 25 bp, Homo sapien
catcattcagcacccagagaagcca

SEQ ID NO: 2921548 - DNA, 25 bp, Homo sapien
aaaggcagtgcttgttatcagcatc

SEQ ID NO: 2921549 - DNA, 25 bp, Homo sapien
tctgaaccttaaaggcagtgcttgt

SEQ ID NO: 2921550 - DNA, 25 bp, Homo sapien
gttccccttccagcaaatatatgtc

SEQ ID NO: 2921551 - DNA, 25 bp, Homo sapien
ttaaaggcagtgcttgttatcagca

SEQ ID NO: 2921552 - DNA, 25 bp, Homo sapien
tcccgccatgtgatgccagcacaga

SEQ ID NO: 2921553 - DNA, 25 bp, Homo sapien
gggtcttcccgccatgtgatgccag

SEQ ID NO: 2921554 - DNA, 25 bp, Homo sapien
ggtggagaagcggaccaaatgggcc

SEQ ID NO: 2921555 - DNA, 25 bp, Homo sapien
gagaagcggaccaaatgggccgctg

SEQ ID NO: 2921556 - DNA, 25 bp, Homo sapien
ccagcagctctgtttgaaatcgtca

SEQ ID NO: 2921557 - DNA, 25 bp, Homo sapien
tcgggagctggagcatagagttcca

SEQ ID NO: 2921558 - DNA, 25 bp, Homo sapien
ctctctgtctctcgtggccttggtg

SEQ ID NO: 2921559 - DNA, 25 bp, Homo sapien
gcttcggtgaccagatgcaggtgcc

SEQ ID NO: 2921560 - DNA, 25 bp, Homo sapien
gggatctcgggtgcttatctagcca

SEQ ID NO: 2921561 - DNA, 25 bp, Homo sapien
caaatgtggtgtcagcctggtgagc

SEQ ID NO: 2921562 - DNA, 25 bp, Homo sapien
tgtcctgctcggaggcaatgctgtg

SEQ ID NO: 2921563 - DNA, 25 bp, Homo sapien
aatctcagccccttcgcagtgtggt

SEQ ID NO: 2921564 - DNA, 25 bp, Homo sapien
cagtgaaggcatcttcctgttcagt

SEQ ID NO: 2921565 - DNA, 25 bp, Homo sapien
cttcgcattgggcagtgaaggcatc

SEQ ID NO: 2921566 - DNA, 25 bp, Homo sapien
tccccatggccttcgcattgggcag

SEQ ID NO: 2921567 - DNA, 25 bp, Homo sapien
gcattgggcagtgaaggcatcttcc

SEQ ID NO: 2921568 - DNA, 25 bp, Homo sapien
gcttatctgctacccaaggctgttt

SEQ ID NO: 2921569 - DNA, 25 bp, Homo sapien
cccggtttgaagaatcgatgaaaat

SEQ ID NO: 2921570 - DNA, 25 bp, Homo sapien
tgttttgagtgaatgtcccggtttg

SEQ ID NO: 2921571 - DNA, 25 bp, Homo sapien
tgatgtctccaagcttatctgctac

SEQ ID NO: 2921572 - DNA, 25 bp, Homo sapien
cgctgcccgagccgggacgccggta

SEQ ID NO: 2921573 - DNA, 25 bp, Homo sapien
gcctcggcaaggaacccccgagcca

SEQ ID NO: 2921574 - DNA, 25 bp, Homo sapien
ccctcggcgctgcccgagccgggac

SEQ ID NO: 2921575 - DNA, 25 bp, Homo sapien
gggcgcgggcgcctcggcaaggaac

SEQ ID NO: 2921576 - DNA, 25 bp, Homo sapien
ccgcgcgcagcgctgctctatccat

SEQ ID NO: 2921577 - DNA, 25 bp, Homo sapien
cgatggagatgtcgatgagcttctg

SEQ ID NO: 2921578 - DNA, 25 bp, Homo sapien
gccgatggagatgtcgatgagcttc

SEQ ID NO: 2921579 - DNA, 25 bp, Homo sapien
gccgccgcgcgcagcgctgctctat

SEQ ID NO: 2921580 - DNA, 25 bp, Homo sapien
gcataatccttcctaagcctaaatc

SEQ ID NO: 2921581 - DNA, 25 bp, Homo sapien
ccagcataatccttcctaagcctaa

SEQ ID NO: 2921582 - DNA, 25 bp, Homo sapien
taatccttcctaagcctaaatccaa

SEQ ID NO: 2921583 - DNA, 25 bp, Homo sapien
aggcttgcttcccagcataatcctt

SEQ ID NO: 2921584 - DNA, 25 bp, Homo sapien
tgagctggcaacctcaagtctgagg

SEQ ID NO: 2921585 - DNA, 25 bp, Homo sapien
gctggcaacctcaagtctgaggacc

SEQ ID NO: 2921586 - DNA, 25 bp, Homo sapien
gcaacctcaagtctgaggacccctt

SEQ ID NO: 2921587 - DNA, 25 bp, Homo sapien
ctagtatcagcagccccacatctga

SEQ ID NO: 2921588 - DNA, 25 bp, Homo sapien
taagaatagtcaaaagccccctctg

SEQ ID NO: 2921589 - DNA, 25 bp, Homo sapien
aagaatagtcaaaagccccctctgg

SEQ ID NO: 2921590 - DNA, 25 bp, Homo sapien
agaatagtcaaaagccccctctggt

SEQ ID NO: 2921591 - DNA, 25 bp, Homo sapien
ctaagaatagtcaaaagccccctct

SEQ ID NO: 2921592 - DNA, 25 bp, Homo sapien
tggaaagcaagcacctccctaaatg

SEQ ID NO: 2921593 - DNA, 25 bp, Homo sapien
gaatagtgcccagtccctaatgggt

SEQ ID NO: 2921594 - DNA, 25 bp, Homo sapien
tgtgctcagagacccgtgagtgcag

SEQ ID NO: 2921595 - DNA, 25 bp, Homo sapien
cactgaagcgtaagttccacaaggt

SEQ ID NO: 2921596 - DNA, 25 bp, Homo sapien
cttttcaaatggtcccctcaaggag

SEQ ID NO: 2921597 - DNA, 25 bp, Homo sapien
agaggatgtacccttcagcagaagg

SEQ ID NO: 2921598 - DNA, 25 bp, Homo sapien
tgacttcacgggagggactcagcta

SEQ ID NO: 2921599 - DNA, 25 bp, Homo sapien
tcagctatgagctgtcagcagccaa

SEQ ID NO: 2921600 - DNA, 25 bp, Homo sapien
ttttccagaaaggactgcagtaccg

SEQ ID NO: 2921601 - DNA, 25 bp, Homo sapien
cctagaggccattcaaggactgaaa

SEQ ID NO: 2921602 - DNA, 25 bp, Homo sapien
tgcagtaccgacaagtgaaagtcac

SEQ ID NO: 2921603 - DNA, 25 bp, Homo sapien
tagaaagggaggtcacattcagact

SEQ ID NO: 2921604 - DNA, 25 bp, Homo sapien
cagcctcaagaggcatttttaaggg

SEQ ID NO: 2921605 - DNA, 25 bp, Homo sapien
gcctcaagaggcatttttaagggta

SEQ ID NO: 2921606 - DNA, 25 bp, Homo sapien
agcctcaagaggcatttttaagggt

SEQ ID NO: 2921607 - DNA, 25 bp, Homo sapien
ctaacatgatggtagcaggatcctt

SEQ ID NO: 2921608 - DNA, 25 bp, Homo sapien
tgaggacagaccaccctgcaaaaag

SEQ ID NO: 2921609 - DNA, 25 bp, Homo sapien
tagtaccctgaactagctacagcag

SEQ ID NO: 2921610 - DNA, 25 bp, Homo sapien
aaaaagcaacctagctgggcagcca

SEQ ID NO: 2921611 - DNA, 25 bp, Homo sapien
tttctgagaatgtaaggaggcctct

SEQ ID NO: 2921612 - DNA, 25 bp, Homo sapien
gtgatgcagctgacagttccacgca

SEQ ID NO: 2921613 - DNA, 25 bp, Homo sapien
tgccatggccaacttgttgcaaaat

SEQ ID NO: 2921614 - DNA, 25 bp, Homo sapien
ccagctaagcagtctagcctggctg

SEQ ID NO: 2921615 - DNA, 25 bp, Homo sapien
tgacccattctgtccatgcctcggg

SEQ ID NO: 2921616 - DNA, 25 bp, Homo sapien
tcctccactattgacccattctgtc

SEQ ID NO: 2921617 - DNA, 25 bp, Homo sapien
tattgacccattctgtccatgcctc

SEQ ID NO: 2921618 - DNA, 25 bp, Homo sapien
ccactattgacccattctgtccatg

SEQ ID NO: 2921619 - DNA, 25 bp, Homo sapien
cccagtaggctttcagggatccaca

SEQ ID NO: 2921620 - DNA, 25 bp, Homo sapien
tggccagggtcctggactcggattc

SEQ ID NO: 2921621 - DNA, 25 bp, Homo sapien
tcggattcccagtaggctttcaggg

SEQ ID NO: 2921622 - DNA, 25 bp, Homo sapien
gggtcctggactcggattcccagta

SEQ ID NO: 2921623 - DNA, 25 bp, Homo sapien
aaagcctgtgttcatctgcagccca

SEQ ID NO: 2921624 - DNA, 25 bp, Homo sapien
aagcctgtgttcatctgcagcccaa

SEQ ID NO: 2921625 - DNA, 25 bp, Homo sapien
ctgtgttcatctgcagcccaaccat

SEQ ID NO: 2921626 - DNA, 25 bp, Homo sapien
gcctgtgttcatctgcagcccaacc

SEQ ID NO: 2921627 - DNA, 25 bp, Homo sapien
ttacaaatgtaacggaccagcttcg

SEQ ID NO: 2921628 - DNA, 25 bp, Homo sapien
ctccggcctcacgttgaaagtgtac

SEQ ID NO: 2921629 - DNA, 25 bp, Homo sapien
gcctctgcttacaaatgtaacggac

SEQ ID NO: 2921630 - DNA, 25 bp, Homo sapien
aagtgtacagccagtcgctgaagcg

SEQ ID NO: 2921631 - DNA, 25 bp, Homo sapien
tgctggtgaggacacccttggtacc

SEQ ID NO: 2921632 - DNA, 25 bp, Homo sapien
cctgctggtgaggacacccttggta

SEQ ID NO: 2921633 - DNA, 25 bp, Homo sapien
ctggtgaggacacccttggtaccaa

SEQ ID NO: 2921634 - DNA, 25 bp, Homo sapien
gccctgctggtgaggacacccttgg

SEQ ID NO: 2921635 - DNA, 25 bp, Homo sapien
tgggtatcgagtcagagtccgaaga

SEQ ID NO: 2921636 - DNA, 25 bp, Homo sapien
cagtgggtatcgagtcagagtccga

SEQ ID NO: 2921637 - DNA, 25 bp, Homo sapien
tatcgagtcagagtccgaagaactg

SEQ ID NO: 2921638 - DNA, 25 bp, Homo sapien
cagcagtgggtatcgagtcagagtc

SEQ ID NO: 2921639 - DNA, 25 bp, Homo sapien
ccgctcctctgggcgcacctgtgac

SEQ ID NO: 2921640 - DNA, 25 bp, Homo sapien
gtcacaggtgcgcccagaggagcgg

SEQ ID NO: 2921641 - DNA, 25 bp, Homo sapien
gccaagctgtcctgttggcccttta

SEQ ID NO: 2921642 - DNA, 25 bp, Homo sapien
aagctgtcctgttggccctttaggg

SEQ ID NO: 2921643 - DNA, 25 bp, Homo sapien
tgagccaagctgtcctgttggccct

SEQ ID NO: 2921644 - DNA, 25 bp, Homo sapien
catgtgagccaagctgtcctgttgg

SEQ ID NO: 2921645 - DNA, 25 bp, Homo sapien
tctcccagctagaactgctcaggca

SEQ ID NO: 2921646 - DNA, 25 bp, Homo sapien
agtaagagcttattcaggggaacct

SEQ ID NO: 2921647 - DNA, 25 bp, Homo sapien
ctcccagctagaactgctcaggcag

SEQ ID NO: 2921648 - DNA, 25 bp, Homo sapien
cctctcccagctagaactgctcagg

SEQ ID NO: 2921649 - DNA, 25 bp, Homo sapien
atctgttctagagcaatcttgcctt

SEQ ID NO: 2921650 - DNA, 25 bp, Homo sapien
agatctgttctagagcaatcttgcc

SEQ ID NO: 2921651 - DNA, 25 bp, Homo sapien
gatctgttctagagcaatcttgcct

SEQ ID NO: 2921652 - DNA, 25 bp, Homo sapien
tcagatctgttctagagcaatcttg

SEQ ID NO: 2921653 - DNA, 25 bp, Homo sapien
ctgtgtgaaaatggccggatgtgtc

SEQ ID NO: 2921654 - DNA, 25 bp, Homo sapien
gcagctggcagaggctggcgtcaca

SEQ ID NO: 2921655 - DNA, 25 bp, Homo sapien
agctggcagaggctggcgtcacagg

SEQ ID NO: 2921656 - DNA, 25 bp, Homo sapien
ggcagaggctggcgtcacaggccat

SEQ ID NO: 2921657 - DNA, 25 bp, Homo sapien
ctggcagaggctggcgtcacaggcc

SEQ ID NO: 2921658 - DNA, 25 bp, Homo sapien
tgccttccaaggttaatctgatcag

SEQ ID NO: 2921659 - DNA, 25 bp, Homo sapien
ggcttccaggcctaagcgcggagac

SEQ ID NO: 2921660 - DNA, 25 bp, Homo sapien
ccccatgggaagaatctgatgcctt

SEQ ID NO: 2921661 - DNA, 25 bp, Homo sapien
gatgcaggcccagtagcaagtactc

SEQ ID NO: 2921662 - DNA, 25 bp, Homo sapien
tgagcagaattgaaacccacgtgcg

SEQ ID NO: 2921663 - DNA, 25 bp, Homo sapien
tggcaaagccttgggatacagcagc

SEQ ID NO: 2921664 - DNA, 25 bp, Homo sapien
tccgcaagtagatggagttaagtcc

SEQ ID NO: 2921665 - DNA, 25 bp, Homo sapien
gacttcacagcttaacaagtggctg

SEQ ID NO: 2921666 - DNA, 25 bp, Homo sapien
ccagcgtgaggtctcgggggatctc

SEQ ID NO: 2921667 - DNA, 25 bp, Homo sapien
gggcatactgcagacggccacactc

SEQ ID NO: 2921668 - DNA, 25 bp, Homo sapien
agacggccacactcatccccgctgg

SEQ ID NO: 2921669 - DNA, 25 bp, Homo sapien
agggcatccagcgtgaggtctcggg

SEQ ID NO: 2921670 - DNA, 25 bp, Homo sapien
taatgggatcactggtacccagcgg

SEQ ID NO: 2921671 - DNA, 25 bp, Homo sapien
catcagggcccaaggttcaaattct

SEQ ID NO: 2921672 - DNA, 25 bp, Homo sapien
gaaattaagcccgatcctctctggg

SEQ ID NO: 2921673 - DNA, 25 bp, Homo sapien
cacaggttctaagtggccgagcaga

SEQ ID NO: 2921674 - DNA, 25 bp, Homo sapien
ggaccaagacgtggagtcacagatg

SEQ ID NO: 2921675 - DNA, 25 bp, Homo sapien
ctgtggaccaagacgtggagtcaca

SEQ ID NO: 2921676 - DNA, 25 bp, Homo sapien
ccaagacgtggagtcacagatggtc

SEQ ID NO: 2921677 - DNA, 25 bp, Homo sapien
caagacgtggagtcacagatggtca

SEQ ID NO: 2921678 - DNA, 25 bp, Homo sapien
gccctgggcgctgttgcctgctctg

SEQ ID NO: 2921679 - DNA, 25 bp, Homo sapien
caggtgtctgagaggccctcactga

SEQ ID NO: 2921680 - DNA, 25 bp, Homo sapien
tgacacggagatggagcgtgggccc

SEQ ID NO: 2921681 - DNA, 25 bp, Homo sapien
gagggtgtccgtggaaggccctgag

SEQ ID NO: 2921682 - DNA, 25 bp, Homo sapien
gactcatgggacttgctccgggtga

SEQ ID NO: 2921683 - DNA, 25 bp, Homo sapien
tcatcgaggagacgtcatcaatgcg

SEQ ID NO: 2921684 - DNA, 25 bp, Homo sapien
gcttcagcttggtgtgccgtcgcag

SEQ ID NO: 2921685 - DNA, 25 bp, Homo sapien
gggcgtccgtggtggcttcagcttg

SEQ ID NO: 2921686 - DNA, 25 bp, Homo sapien
tcatcactgcattctacagcccctt

SEQ ID NO: 2921687 - DNA, 25 bp, Homo sapien
agcaggacagcccgagtgggagcag

SEQ ID NO: 2921688 - DNA, 25 bp, Homo sapien
gggagcagcagggtcggtgacacct

SEQ ID NO: 2921689 - DNA, 25 bp, Homo sapien
ggtcggtgacacctggatctctcct

SEQ ID NO: 2921690 - DNA, 25 bp, Homo sapien
gccactgcccctgagaacacatgga

SEQ ID NO: 2921691 - DNA, 25 bp, Homo sapien
agccactgcccctgagaacacatgg

SEQ ID NO: 2921692 - DNA, 25 bp, Homo sapien
gcagccactgcccctgagaacacat

SEQ ID NO: 2921693 - DNA, 25 bp, Homo sapien
gggcagccactgcccctgagaacac

SEQ ID NO: 2921694 - DNA, 25 bp, Homo sapien
ctaagaggtgggtcaaagaggtcca

SEQ ID NO: 2921695 - DNA, 25 bp, Homo sapien
actatggagaggctgaacgggctaa

SEQ ID NO: 2921696 - DNA, 25 bp, Homo sapien
tagggctatttcctgaggtggtcac

SEQ ID NO: 2921697 - DNA, 25 bp, Homo sapien
cagtcactttaaggccacctgtctt

SEQ ID NO: 2921698 - DNA, 25 bp, Homo sapien
gagatgtgctcaaggtctctgattc

SEQ ID NO: 2921699 - DNA, 25 bp, Homo sapien
ctgtgggctgagatgtgctcaaggt

SEQ ID NO: 2921700 - DNA, 25 bp, Homo sapien
gctgagatgtgctcaaggtctctga

SEQ ID NO: 2921701 - DNA, 25 bp, Homo sapien
tgggctgagatgtgctcaaggtctc

SEQ ID NO: 2921702 - DNA, 25 bp, Homo sapien
tagccagctcgggatagtacaaaaa

SEQ ID NO: 2921703 - DNA, 25 bp, Homo sapien
cgtgttaccacagcaattggaggat

SEQ ID NO: 2921704 - DNA, 25 bp, Homo sapien
tgatctgcatggagacactggccct

SEQ ID NO: 2921705 - DNA, 25 bp, Homo sapien
ggtgccagctaccagcctaggagaa

SEQ ID NO: 2921706 - DNA, 25 bp, Homo sapien
taggaacaatctatctcacccgcag

SEQ ID NO: 2921707 - DNA, 25 bp, Homo sapien
aaacacatgggcatgactgggcgca

SEQ ID NO: 2921708 - DNA, 25 bp, Homo sapien
tctgccatgaggttgacttgtccca

SEQ ID NO: 2921709 - DNA, 25 bp, Homo sapien
gaacacagtgctcgagtgtggccat

SEQ ID NO: 2921710 - DNA, 25 bp, Homo sapien
gagataagggccatacgctttggga

SEQ ID NO: 2921711 - DNA, 25 bp, Homo sapien
taccacattctcgagtgggccagcc

SEQ ID NO: 2921712 - DNA, 25 bp, Homo sapien
gaacaggcatccctagtgcagtaga

SEQ ID NO: 2921713 - DNA, 25 bp, Homo sapien
ctgggattccccgtaagaacaggca

SEQ ID NO: 2921714 - DNA, 25 bp, Homo sapien
gcttggtcctctagcttgctcctgg

SEQ ID NO: 2921715 - DNA, 25 bp, Homo sapien
agtggcatggtgtggttcccctcgc

SEQ ID NO: 2921716 - DNA, 25 bp, Homo sapien
tcctaattcagagaccacaggctag

SEQ ID NO: 2921717 - DNA, 25 bp, Homo sapien
tgtccatcaacacaggagcaggcca

SEQ ID NO: 2921718 - DNA, 25 bp, Homo sapien
tgtgcgtcaccgacagcccgatatc

SEQ ID NO: 2921719 - DNA, 25 bp, Homo sapien
gatatccctccgtaccatctgtggg

SEQ ID NO: 2921720 - DNA, 25 bp, Homo sapien
agcccgatatccctccgtaccatct

SEQ ID NO: 2921721 - DNA, 25 bp, Homo sapien
ctgtgcgtcaccgacagcccgatat

SEQ ID NO: 2921722 - DNA, 25 bp, Homo sapien
agggcggacacaggcacatgtttgc

SEQ ID NO: 2921723 - DNA, 25 bp, Homo sapien
agagggcggacacaggcacatgttt

SEQ ID NO: 2921724 - DNA, 25 bp, Homo sapien
ctgcagagggcggacacaggcacat

SEQ ID NO: 2921725 - DNA, 25 bp, Homo sapien
gcagagggcggacacaggcacatgt

SEQ ID NO: 2921726 - DNA, 25 bp, Homo sapien
tcttctggcacacgtggcagacctg

SEQ ID NO: 2921727 - DNA, 25 bp, Homo sapien
acgtggcagacctgcgacagccagg

SEQ ID NO: 2921728 - DNA, 25 bp, Homo sapien
ggcagacctgcgacagccaggactt

SEQ ID NO: 2921729 - DNA, 25 bp, Homo sapien
tccaaatatcatgctcttctggcac

SEQ ID NO: 2921730 - DNA, 25 bp, Homo sapien
aaggatattctacaggcaggggctt

SEQ ID NO: 2921731 - DNA, 25 bp, Homo sapien
ggatattctacaggcaggggcttct

SEQ ID NO: 2921732 - DNA, 25 bp, Homo sapien
gaaggatattctacaggcaggggct

SEQ ID NO: 2921733 - DNA, 25 bp, Homo sapien
aggatattctacaggcaggggcttc

SEQ ID NO: 2921734 - DNA, 25 bp, Homo sapien
acccatcaccagggaacaggtcaag

SEQ ID NO: 2921735 - DNA, 25 bp, Homo sapien
tgaaaagagggaaaacccatcacca

SEQ ID NO: 2921736 - DNA, 25 bp, Homo sapien
tgtccaccgggttgttgatgtccga

SEQ ID NO: 2921737 - DNA, 25 bp, Homo sapien
caaaatggggttcggctgctctgtc

SEQ ID NO: 2921738 - DNA, 25 bp, Homo sapien
gatgtccgaggggacagattctgtc

SEQ ID NO: 2921739 - DNA, 25 bp, Homo sapien
cagattctgtcctccgaagccgagt

SEQ ID NO: 2921740 - DNA, 25 bp, Homo sapien
tgatcccggcttcaggatgcctgtg

SEQ ID NO: 2921741 - DNA, 25 bp, Homo sapien
aagccaagggctttgcccacggtca

SEQ ID NO: 2921742 - DNA, 25 bp, Homo sapien
gcatctcacagctccgagcaagagc

SEQ ID NO: 2921743 - DNA, 25 bp, Homo sapien
agacccctgagaacggcaccagcat

SEQ ID NO: 2921744 - DNA, 25 bp, Homo sapien
tgtcgggaagggcgccggtgaggag

SEQ ID NO: 2921745 - DNA, 25 bp, Homo sapien
caggtgattcatggccggagggtgc

SEQ ID NO: 2921746 - DNA, 25 bp, Homo sapien
ggtggcgctggatgggttggatgat

SEQ ID NO: 2921747 - DNA, 25 bp, Homo sapien
tccaggtgattcatggccggagggt

SEQ ID NO: 2921748 - DNA, 25 bp, Homo sapien
gaaggggatctgactgtatccctta

SEQ ID NO: 2921749 - DNA, 25 bp, Homo sapien
ttgaatctgccgaacttgggtctgc

SEQ ID NO: 2921750 - DNA, 25 bp, Homo sapien
gatctgactgtatcccttagaaccc

SEQ ID NO: 2921751 - DNA, 25 bp, Homo sapien
cttgaatctgccgaacttgggtctg

SEQ ID NO: 2921752 - DNA, 25 bp, Homo sapien
ctgtggtgacgctggcgggaaataa

SEQ ID NO: 2921753 - DNA, 25 bp, Homo sapien
gcgggaaataatccacggaactaca

SEQ ID NO: 2921754 - DNA, 25 bp, Homo sapien
agggcagcaccatgcattcctcacg

SEQ ID NO: 2921755 - DNA, 25 bp, Homo sapien
ctagtgatgtggtagctgtggtaac

SEQ ID NO: 2921756 - DNA, 25 bp, Homo sapien
aacagaagaggaggtgagtcacaca

SEQ ID NO: 2921757 - DNA, 25 bp, Homo sapien
gaggtgagtcacacacacagaacgg

SEQ ID NO: 2921758 - DNA, 25 bp, Homo sapien
aagaggaggtgagtcacacacacag

SEQ ID NO: 2921759 - DNA, 25 bp, Homo sapien
ctttaaacagaagaggaggtgagtc

SEQ ID NO: 2921760 - DNA, 25 bp, Homo sapien
tgtctatgatgaatgaagtaggcag

SEQ ID NO: 2921761 - DNA, 25 bp, Homo sapien
tgctgtctatgatgaatgaagtagg

SEQ ID NO: 2921762 - DNA, 25 bp, Homo sapien
gaaagataaactgctgtctatgatg

SEQ ID NO: 2921763 - DNA, 25 bp, Homo sapien
ggaaagataaactgctgtctatgat

SEQ ID NO: 2921764 - DNA, 25 bp, Homo sapien
actttctgcaataaggaggcatttc

SEQ ID NO: 2921765 - DNA, 25 bp, Homo sapien
cctttaaactttctgcaataaggag

SEQ ID NO: 2921766 - DNA, 25 bp, Homo sapien
taaactttctgcaataaggaggcat

SEQ ID NO: 2921767 - DNA, 25 bp, Homo sapien
ttctgcaataaggaggcatttccag

SEQ ID NO: 2921768 - DNA, 25 bp, Homo sapien
cgggtaccgtcggcagcttcaggga

SEQ ID NO: 2921769 - DNA, 25 bp, Homo sapien
ctccgcttcgtgagcttccaacaca

SEQ ID NO: 2921770 - DNA, 25 bp, Homo sapien
cacatctgctttcggctggtcatcg

SEQ ID NO: 2921771 - DNA, 25 bp, Homo sapien
atctgctttcggctggtcatcgagc

SEQ ID NO: 2921772 - DNA, 25 bp, Homo sapien
tccaacacatctgctttcggctggt

SEQ ID NO: 2921773 - DNA, 25 bp, Homo sapien
ttgaccctggctacaatcacctggg

SEQ ID NO: 2921774 - DNA, 25 bp, Homo sapien
aaagagcaagagcatccctggcata

SEQ ID NO: 2921775 - DNA, 25 bp, Homo sapien
cccctgggcaggagtaaatcagtct

SEQ ID NO: 2921776 - DNA, 25 bp, Homo sapien
tgtgagcaacatctaattgtccagg

SEQ ID NO: 2921777 - DNA, 25 bp, Homo sapien
ttcttgaagagcttcaggtggtcct

SEQ ID NO: 2921778 - DNA, 25 bp, Homo sapien
ttctcatgccgcgtctgccggtagt

SEQ ID NO: 2921779 - DNA, 25 bp, Homo sapien
cgagagctcggcaagtcgtccacct

SEQ ID NO: 2921780 - DNA, 25 bp, Homo sapien
tggtcctggttgtggccgtccatct

SEQ ID NO: 2921781 - DNA, 25 bp, Homo sapien
gggtccctcacaaacgagtgcaacg

SEQ ID NO: 2921782 - DNA, 25 bp, Homo sapien
gagcgatttgcctcgtcttgttgat

SEQ ID NO: 2921783 - DNA, 25 bp, Homo sapien
ttgttgatgtccagagacgtcttgg

SEQ ID NO: 2921784 - DNA, 25 bp, Homo sapien
aaacgagtgcaacgtccgccccttg

SEQ ID NO: 2921785 - DNA, 25 bp, Homo sapien
tgagatcccaaacagcccgaagtct

SEQ ID NO: 2921786 - DNA, 25 bp, Homo sapien
tctttgtgtacgatgcccttggcat

SEQ ID NO: 2921787 - DNA, 25 bp, Homo sapien
cccgaagtctgtgatgaccaccttg

SEQ ID NO: 2921788 - DNA, 25 bp, Homo sapien
gtccctctcggaccacgcctgagat

SEQ ID NO: 2921789 - DNA, 25 bp, Homo sapien
ccagggccggcagaacacccacaca

SEQ ID NO: 2921790 - DNA, 25 bp, Homo sapien
agaccaggaagccgggacaaggaca

SEQ ID NO: 2921791 - DNA, 25 bp, Homo sapien
ccaggaagccgggacaaggacacag

SEQ ID NO: 2921792 - DNA, 25 bp, Homo sapien
ggagaccaggaagccgggacaagga

SEQ ID NO: 2921793 - DNA, 25 bp, Homo sapien
ggtcatctcgcgtacaatctcaggg

SEQ ID NO: 2921794 - DNA, 25 bp, Homo sapien
tcccgggggtcatctcgcgtacaat

SEQ ID NO: 2921795 - DNA, 25 bp, Homo sapien
gaatggcagctgatcctcgtccttc

SEQ ID NO: 2921796 - DNA, 25 bp, Homo sapien
tagcacagccagtcgtgggacagct

SEQ ID NO: 2921797 - DNA, 25 bp, Homo sapien
cacttggcttcaggggatgctacag

SEQ ID NO: 2921798 - DNA, 25 bp, Homo sapien
gcttcaggggatgctacagtgggct

SEQ ID NO: 2921799 - DNA, 25 bp, Homo sapien
ccacttggcttcaggggatgctaca

SEQ ID NO: 2921800 - DNA, 25 bp, Homo sapien
tcaggggatgctacagtgggctcct

SEQ ID NO: 2921801 - DNA, 25 bp, Homo sapien
caagggccagtctcttgcttgcagc

SEQ ID NO: 2921802 - DNA, 25 bp, Homo sapien
tgcttgcagctcataccaaacagtc

SEQ ID NO: 2921803 - DNA, 25 bp, Homo sapien
caatctgccagatggatgcctctgc

SEQ ID NO: 2921804 - DNA, 25 bp, Homo sapien
gtcaggacacgcttcattccttccc

SEQ ID NO: 2921805 - DNA, 25 bp, Homo sapien
ctgcctcagcacataaagcagtgcc

SEQ ID NO: 2921806 - DNA, 25 bp, Homo sapien
tggctgcctcagcacataaagcagt

SEQ ID NO: 2921807 - DNA, 25 bp, Homo sapien
aagcagtgcctggtggtgaactata

SEQ ID NO: 2921808 - DNA, 25 bp, Homo sapien
cctggtggtgaactatacagcagtg

SEQ ID NO: 2921809 - DNA, 25 bp, Homo sapien
tggacacttagtagacagcagggca

SEQ ID NO: 2921810 - DNA, 25 bp, Homo sapien
tgagaatcagaccaacaccagactt

SEQ ID NO: 2921811 - DNA, 25 bp, Homo sapien
taagataggcatccacaaatggttg

SEQ ID NO: 2921812 - DNA, 25 bp, Homo sapien
acttctcaacaaggcactggacact

SEQ ID NO: 2921813 - DNA, 25 bp, Homo sapien
ggagagccgccggttcagcttggga

SEQ ID NO: 2921814 - DNA, 25 bp, Homo sapien
gtgggagagccgccggttcagcttg

SEQ ID NO: 2921815 - DNA, 25 bp, Homo sapien
agagccgccggttcagcttgggaag

SEQ ID NO: 2921816 - DNA, 25 bp, Homo sapien
agccgccggttcagcttgggaagtt

SEQ ID NO: 2921817 - DNA, 25 bp, Homo sapien
ccgggtgtggtagcgtgcgcctata

SEQ ID NO: 2921818 - DNA, 25 bp, Homo sapien
agccgggtgtggtagcgtgcgccta

SEQ ID NO: 2921819 - DNA, 25 bp, Homo sapien
cagaacaagactctgcctttaaaaa

SEQ ID NO: 2921820 - DNA, 25 bp, Homo sapien
aataaaagacaaggcctggaggctg

SEQ ID NO: 2921821 - DNA, 25 bp, Homo sapien
cttttccatagtagcggctcctcca

SEQ ID NO: 2921822 - DNA, 25 bp, Homo sapien
tattcctccagaatcggacaggagc

SEQ ID NO: 2921823 - DNA, 25 bp, Homo sapien
caggagctcttaaagtcagggtggc

SEQ ID NO: 2921824 - DNA, 25 bp, Homo sapien
ggccgtagcgtccttttccatagta

SEQ ID NO: 2921825 - DNA, 25 bp, Homo sapien
gaaggtagttagaagctgcccagac

SEQ ID NO: 2921826 - DNA, 25 bp, Homo sapien
gaagaacacgggagcaatcagtcat

SEQ ID NO: 2921827 - DNA, 25 bp, Homo sapien
tgttgattaggaggaagaaagcccc

SEQ ID NO: 2921828 - DNA, 25 bp, Homo sapien
tagcctcgagagagacgactggagc

SEQ ID NO: 2921829 - DNA, 25 bp, Homo sapien
agggtgccactgaagacacaaccct

SEQ ID NO: 2921830 - DNA, 25 bp, Homo sapien
ttgctttaagacaatttttctgagg

SEQ ID NO: 2921831 - DNA, 25 bp, Homo sapien
tgctttaagacaatttttctgaggg

SEQ ID NO: 2921832 - DNA, 25 bp, Homo sapien
ctggggtctggtctatggtacactg

SEQ ID NO: 2921833 - DNA, 25 bp, Homo sapien
ttcatcagaaaaattgtctggagcc

SEQ ID NO: 2921834 - DNA, 25 bp, Homo sapien
tctggtctatggtacactgggcagc

SEQ ID NO: 2921835 - DNA, 25 bp, Homo sapien
cagaaaaattgtctggagccaggta

SEQ ID NO: 2921836 - DNA, 25 bp, Homo sapien
catgctcagtactgctgtgggttcc

SEQ ID NO: 2921837 - DNA, 25 bp, Homo sapien
taccaggagtgacagggcatgttcc

SEQ ID NO: 2921838 - DNA, 25 bp, Homo sapien
taggaaatgagttcagcagaggacc

SEQ ID NO: 2921839 - DNA, 25 bp, Homo sapien
tagtcctacttggagcagcaacggt

SEQ ID NO: 2921840 - DNA, 25 bp, Homo sapien
catctttggattactggactccagg

SEQ ID NO: 2921841 - DNA, 25 bp, Homo sapien
ctacatctttggattactggactcc

SEQ ID NO: 2921842 - DNA, 25 bp, Homo sapien
tacatctttggattactggactcca

SEQ ID NO: 2921843 - DNA, 25 bp, Homo sapien
tctttggattactggactccaggac

SEQ ID NO: 2921844 - DNA, 25 bp, Homo sapien
tgaatctaggacgtgtgctcctggt

SEQ ID NO: 2921845 - DNA, 25 bp, Homo sapien
gatcagcagcgaaaaaccatatggc

SEQ ID NO: 2921846 - DNA, 25 bp, Homo sapien
tcaggttcactcaggagaaatatac

SEQ ID NO: 2921847 - DNA, 25 bp, Homo sapien
taagaaatagcaggtgcagctccat

SEQ ID NO: 2921848 - DNA, 25 bp, Homo sapien
atgggtccctcaccgcctacaaggt

SEQ ID NO: 2921849 - DNA, 25 bp, Homo sapien
ctcagaggggatggccatttccgcc

SEQ ID NO: 2921850 - DNA, 25 bp, Homo sapien
gcccagcatgggtccctcaccgcct

SEQ ID NO: 2921851 - DNA, 25 bp, Homo sapien
acaaggtcctcagaggggatggcca

SEQ ID NO: 2921852 - DNA, 25 bp, Homo sapien
tcatccttcgtgtggagagagcaca

SEQ ID NO: 2921853 - DNA, 25 bp, Homo sapien
ggctgagctgacatccaactgtggg

SEQ ID NO: 2921854 - DNA, 25 bp, Homo sapien
ggtgaacccaagctctccaggaatt

SEQ ID NO: 2921855 - DNA, 25 bp, Homo sapien
tctaacgaagacaagcgtggtgctc

SEQ ID NO: 2921856 - DNA, 25 bp, Homo sapien
ctcattgtattggtacagccgtact

SEQ ID NO: 2921857 - DNA, 25 bp, Homo sapien
ggtacagccgtactgaaccacatta

SEQ ID NO: 2921858 - DNA, 25 bp, Homo sapien
agtgatgcccgcagacacctgagtc

SEQ ID NO: 2921859 - DNA, 25 bp, Homo sapien
cctgggtcgtcttgtccagttccct

SEQ ID NO: 2921860 - DNA, 25 bp, Homo sapien
tcaagaaggaatccttccatctgca

SEQ ID NO: 2921861 - DNA, 25 bp, Homo sapien
gaaggaatccttccatctgcagtga

SEQ ID NO: 2921862 - DNA, 25 bp, Homo sapien
agaaggaatccttccatctgcagtg

SEQ ID NO: 2921863 - DNA, 25 bp, Homo sapien
ggaatccttccatctgcagtgacac

SEQ ID NO: 2921864 - DNA, 25 bp, Homo sapien
cctaagcatgcttggccacggagtc

SEQ ID NO: 2921865 - DNA, 25 bp, Homo sapien
cactcacagagggaagtaggcactc

SEQ ID NO: 2921866 - DNA, 25 bp, Homo sapien
ggacaccagggacaatttcatcacg

SEQ ID NO: 2921867 - DNA, 25 bp, Homo sapien
tgcgatacgcaacaactggaactct

SEQ ID NO: 2921868 - DNA, 25 bp, Homo sapien
tgtggccaccgctgcctttcacacc

SEQ ID NO: 2921869 - DNA, 25 bp, Homo sapien
tcacacccactaggaagtcctttgt

SEQ ID NO: 2921870 - DNA, 25 bp, Homo sapien
cactaggaagtcctttgtagaggga

SEQ ID NO: 2921871 - DNA, 25 bp, Homo sapien
cacccactaggaagtcctttgtaga

SEQ ID NO: 2921872 - DNA, 25 bp, Homo sapien
gagcctgggaaccgctgaaggccat

SEQ ID NO: 2921873 - DNA, 25 bp, Homo sapien
ggtagggagcctgggaaccgctgaa

SEQ ID NO: 2921874 - DNA, 25 bp, Homo sapien
tagggagcctgggaaccgctgaagg

SEQ ID NO: 2921875 - DNA, 25 bp, Homo sapien
tggactcaggtagggagcctgggaa

SEQ ID NO: 2921876 - DNA, 25 bp, Homo sapien
gacagtgatctgaagtccgtcctgg

SEQ ID NO: 2921877 - DNA, 25 bp, Homo sapien
aagtccgtcctggagacctccttga

SEQ ID NO: 2921878 - DNA, 25 bp, Homo sapien
actggagctgagaacggtcccattg

SEQ ID NO: 2921879 - DNA, 25 bp, Homo sapien
acctccttgaatagtcccagaaaag

SEQ ID NO: 2921880 - DNA, 25 bp, Homo sapien
taggcccagggaaagcaaatagtct

SEQ ID NO: 2921881 - DNA, 25 bp, Homo sapien
aggcccagggaaagcaaatagtctt

SEQ ID NO: 2921882 - DNA, 25 bp, Homo sapien
tccactgaagccagtctgaaagttc

SEQ ID NO: 2921883 - DNA, 25 bp, Homo sapien
aggcaatgtcatttccactgaagcc

SEQ ID NO: 2921884 - DNA, 25 bp, Homo sapien
gttgaagtggaaggcaatgtcattt

SEQ ID NO: 2921885 - DNA, 25 bp, Homo sapien
tgaagccagtctgaaagttcacagc

SEQ ID NO: 2921886 - DNA, 25 bp, Homo sapien
tctggaaaggcatgtgtgtcttcct

SEQ ID NO: 2921887 - DNA, 25 bp, Homo sapien
gttctgcctcgtgttgcacaccacg

SEQ ID NO: 2921888 - DNA, 25 bp, Homo sapien
cttctggaaaggcatgtgtgtcttc

SEQ ID NO: 2921889 - DNA, 25 bp, Homo sapien
cctcgggcccccagcttccgttctg

SEQ ID NO: 2921890 - DNA, 25 bp, Homo sapien
agagtaaaagaagcagcaggtgcac

SEQ ID NO: 2921891 - DNA, 25 bp, Homo sapien
ttcttattttcagagtaaaagaagc

SEQ ID NO: 2921892 - DNA, 25 bp, Homo sapien
tagttcttattttcagagtaaaaga

SEQ ID NO: 2921893 - DNA, 25 bp, Homo sapien
attttcagagtaaaagaagcagcag

SEQ ID NO: 2921894 - DNA, 25 bp, Homo sapien
agccattgacggagatggtgtccac

SEQ ID NO: 2921895 - DNA, 25 bp, Homo sapien
cacagagccattgacggagatggtg

SEQ ID NO: 2921896 - DNA, 25 bp, Homo sapien
cacacggtggaagggcacgcggtgg

SEQ ID NO: 2921897 - DNA, 25 bp, Homo sapien
cacgcggtggaagtactgcacgaag

SEQ ID NO: 2921898 - DNA, 25 bp, Homo sapien
gctgggagaacggcaccgtggagaa

SEQ ID NO: 2921899 - DNA, 25 bp, Homo sapien
ctgggagaacggcaccgtggagaag

SEQ ID NO: 2921900 - DNA, 25 bp, Homo sapien
aggctgggagaacggcaccgtggag

SEQ ID NO: 2921901 - DNA, 25 bp, Homo sapien
ggctgggagaacggcaccgtggaga

SEQ ID NO: 2921902 - DNA, 25 bp, Homo sapien
ttatcgcgggcaccacagaatggga

SEQ ID NO: 2921903 - DNA, 25 bp, Homo sapien
aattaggcatgtgctcgaggcaggc

SEQ ID NO: 2921904 - DNA, 25 bp, Homo sapien
gccctgtctgtacggtgatgagcca

SEQ ID NO: 2921905 - DNA, 25 bp, Homo sapien
tgtccctagtgaggcaacgaggctc

SEQ ID NO: 2921906 - DNA, 25 bp, Homo sapien
gagccgggttggcaggccacacgcc

SEQ ID NO: 2921907 - DNA, 25 bp, Homo sapien
gccgggttggcaggccacacgccgg

SEQ ID NO: 2921908 - DNA, 25 bp, Homo sapien
agccgggttggcaggccacacgccg

SEQ ID NO: 2921909 - DNA, 25 bp, Homo sapien
gggaaacgtctctcagcctagcctc

SEQ ID NO: 2921910 - DNA, 25 bp, Homo sapien
ggctctcacgtgtgaaaaccaccag

SEQ ID NO: 2921911 - DNA, 25 bp, Homo sapien
tcccaatgggagaggcccaatgcct

SEQ ID NO: 2921912 - DNA, 25 bp, Homo sapien
ggcaactcaggttgtttcatccaac

SEQ ID NO: 2921913 - DNA, 25 bp, Homo sapien
atctgtccaggggcgctctgcactg

SEQ ID NO: 2921914 - DNA, 25 bp, Homo sapien
ctgcactgtgtggatgactgtctgg

SEQ ID NO: 2921915 - DNA, 25 bp, Homo sapien
ctctgcactgtgtggatgactgtct

SEQ ID NO: 2921916 - DNA, 25 bp, Homo sapien
agagaacatctgtccaggggcgctc

SEQ ID NO: 2921917 - DNA, 25 bp, Homo sapien
gcggggtgggggtacatcataggtg

SEQ ID NO: 2921918 - DNA, 25 bp, Homo sapien
tacatcataggtgggatggcgggag

SEQ ID NO: 2921919 - DNA, 25 bp, Homo sapien
gggggtacatcataggtgggatggc

SEQ ID NO: 2921920 - DNA, 25 bp, Homo sapien
gggtgggggtacatcataggtggga

SEQ ID NO: 2921921 - DNA, 25 bp, Homo sapien
tggacttggatgggtacagccctcc

SEQ ID NO: 2921922 - DNA, 25 bp, Homo sapien
ggacttggatgggtacagccctccc

SEQ ID NO: 2921923 - DNA, 25 bp, Homo sapien
gatggacttggatgggtacagccct

SEQ ID NO: 2921924 - DNA, 25 bp, Homo sapien
atggacttggatgggtacagccctc

SEQ ID NO: 2921925 - DNA, 25 bp, Homo sapien
cctttatccaccgaattctgagtcc

SEQ ID NO: 2921926 - DNA, 25 bp, Homo sapien
cacctgaacctttatccaccgaatt

SEQ ID NO: 2921927 - DNA, 25 bp, Homo sapien
tatccaccgaattctgagtcccatt

SEQ ID NO: 2921928 - DNA, 25 bp, Homo sapien
caccgaattctgagtcccatttcct

SEQ ID NO: 2921929 - DNA, 25 bp, Homo sapien
ttcggggcagacttcgctcctcaga

SEQ ID NO: 2921930 - DNA, 25 bp, Homo sapien
gcattctcatcaaaacgggggttca

SEQ ID NO: 2921931 - DNA, 25 bp, Homo sapien
cgaagggcatttttcggggcagact

SEQ ID NO: 2921932 - DNA, 25 bp, Homo sapien
cccagagcacaggttgatgtggaac

SEQ ID NO: 2921933 - DNA, 25 bp, Homo sapien
gcctctccaagctccagactgcggt

SEQ ID NO: 2921934 - DNA, 25 bp, Homo sapien
cccctgtgcacccatgggagcctct

SEQ ID NO: 2921935 - DNA, 25 bp, Homo sapien
ctccaagctccagactgcggtgcct

SEQ ID NO: 2921936 - DNA, 25 bp, Homo sapien
gtgcacccatgggagcctctccaag

SEQ ID NO: 2921937 - DNA, 25 bp, Homo sapien
tgaggcagtgagcttcacacaagat

SEQ ID NO: 2921938 - DNA, 25 bp, Homo sapien
ggcagtgagcttcacacaagatcca

SEQ ID NO: 2921939 - DNA, 25 bp, Homo sapien
gaggcagtgagcttcacacaagatc

SEQ ID NO: 2921940 - DNA, 25 bp, Homo sapien
ttgaggcagtgagcttcacacaaga

SEQ ID NO: 2921941 - DNA, 25 bp, Homo sapien
ctcaggcgatggtagtattcaaaca

SEQ ID NO: 2921942 - DNA, 25 bp, Homo sapien
tcctcaggcgatggtagtattcaaa

SEQ ID NO: 2921943 - DNA, 25 bp, Homo sapien
ggttcctcaggcgatggtagtattc

SEQ ID NO: 2921944 - DNA, 25 bp, Homo sapien
gcaggttcctcaggcgatggtagta

SEQ ID NO: 2921945 - DNA, 25 bp, Homo sapien
ggcctctgcattaaagcccagatcc

SEQ ID NO: 2921946 - DNA, 25 bp, Homo sapien
ggaagtggggatgatgagaggaccc

SEQ ID NO: 2921947 - DNA, 25 bp, Homo sapien
caaaagctgttcagtatcaatcacc

SEQ ID NO: 2921948 - DNA, 25 bp, Homo sapien
ttgccaaaagctgttcagtatcaat

SEQ ID NO: 2921949 - DNA, 25 bp, Homo sapien
gccaaaagctgttcagtatcaatca

SEQ ID NO: 2921950 - DNA, 25 bp, Homo sapien
aaagctgttcagtatcaatcaccat

SEQ ID NO: 2921951 - DNA, 25 bp, Homo sapien
ttcaaaaatagctcagttcttctgt

SEQ ID NO: 2921952 - DNA, 25 bp, Homo sapien
caatcagaccgtttacatcaagcat

SEQ ID NO: 2921953 - DNA, 25 bp, Homo sapien
aaaatctgggatctgattcagatag

SEQ ID NO: 2921954 - DNA, 25 bp, Homo sapien
gggatctgattcagatagactctgc

SEQ ID NO: 2921955 - DNA, 25 bp, Homo sapien
gattcagatagactctgctccccat

SEQ ID NO: 2921956 - DNA, 25 bp, Homo sapien
tctgattcagatagactctgctccc

SEQ ID NO: 2921957 - DNA, 25 bp, Homo sapien
actggagctgagaacggtcccattg

SEQ ID NO: 2921958 - DNA, 25 bp, Homo sapien
gacagtgatctgaagtccgtcctgg

SEQ ID NO: 2921959 - DNA, 25 bp, Homo sapien
aagtccgtcctggagacctccttga

SEQ ID NO: 2921960 - DNA, 25 bp, Homo sapien
acctccttgaatagtcccagaaaag

SEQ ID NO: 2921961 - DNA, 25 bp, Homo sapien
cctcttcaaacagaaggttgaagtg

SEQ ID NO: 2921962 - DNA, 25 bp, Homo sapien
caatgccatttccactgaagccggt

SEQ ID NO: 2921963 - DNA, 25 bp, Homo sapien
ggcaatgccatttccactgaagccg

SEQ ID NO: 2921964 - DNA, 25 bp, Homo sapien
catgtaccctccctcttcaaacaga

SEQ ID NO: 2921965 - DNA, 25 bp, Homo sapien
cttcctttctgcctcgtgttgtaca

SEQ ID NO: 2921966 - DNA, 25 bp, Homo sapien
ccatcttcctttctgcctcgtgttg

SEQ ID NO: 2921967 - DNA, 25 bp, Homo sapien
ttcctttctgcctcgtgttgtacac

SEQ ID NO: 2921968 - DNA, 25 bp, Homo sapien
atcttcctttctgcctcgtgttgta

SEQ ID NO: 2921969 - DNA, 25 bp, Homo sapien
tgtagcaggaagcagaggtcaaagg

SEQ ID NO: 2921970 - DNA, 25 bp, Homo sapien
tagcaggaagcagaggtcaaagggc

SEQ ID NO: 2921971 - DNA, 25 bp, Homo sapien
ctgtagcaggaagcagaggtcaaag

SEQ ID NO: 2921972 - DNA, 25 bp, Homo sapien
gcaggaagcagaggtcaaagggcat

SEQ ID NO: 2921973 - DNA, 25 bp, Homo sapien
agccattgacggagatggtgtccac

SEQ ID NO: 2921974 - DNA, 25 bp, Homo sapien
cacagagccattgacggagatggtg

SEQ ID NO: 2921975 - DNA, 25 bp, Homo sapien
cacacggtggaagggcacgcggtgg

SEQ ID NO: 2921976 - DNA, 25 bp, Homo sapien
cacgcggtggaagtactgcacgaag

SEQ ID NO: 2921977 - DNA, 25 bp, Homo sapien
gagccgggttggcaggccacacgcc

SEQ ID NO: 2921978 - DNA, 25 bp, Homo sapien
agccgggttggcaggccacacgccg

SEQ ID NO: 2921979 - DNA, 25 bp, Homo sapien
gccgggttggcaggccacacgccgg

SEQ ID NO: 2921980 - DNA, 25 bp, Homo sapien
atctgtccaggggcgctctgcactg

SEQ ID NO: 2921981 - DNA, 25 bp, Homo sapien
ctgcactgtgtggatgactgtctgg

SEQ ID NO: 2921982 - DNA, 25 bp, Homo sapien
ctctgcactgtgtggatgactgtct

SEQ ID NO: 2921983 - DNA, 25 bp, Homo sapien
agagaacatctgtccaggggcgctc

SEQ ID NO: 2921984 - DNA, 25 bp, Homo sapien
taaacttccggcctgatttgcacca

SEQ ID NO: 2921985 - DNA, 25 bp, Homo sapien
taagcctatgatcggtagtgacatc

SEQ ID NO: 2921986 - DNA, 25 bp, Homo sapien
ctggaacttcctgccgtgttcccgg

SEQ ID NO: 2921987 - DNA, 25 bp, Homo sapien
aggcagccccactaacgctaaactt

SEQ ID NO: 2921988 - DNA, 25 bp, Homo sapien
atgagcctttggcccttggactccc

SEQ ID NO: 2921989 - DNA, 25 bp, Homo sapien
ttggcccttggactcccccatccac

SEQ ID NO: 2921990 - DNA, 25 bp, Homo sapien
ctcatgagcctttggcccttggact

SEQ ID NO: 2921991 - DNA, 25 bp, Homo sapien
tttggcccttggactcccccatcca

SEQ ID NO: 2921992 - DNA, 25 bp, Homo sapien
gtgggggtacatcataggtgggttg

SEQ ID NO: 2921993 - DNA, 25 bp, Homo sapien
tacatcataggtgggttggcgggag

SEQ ID NO: 2921994 - DNA, 25 bp, Homo sapien
gggtacatcataggtgggttggcgg

SEQ ID NO: 2921995 - DNA, 25 bp, Homo sapien
gggggtacatcataggtgggttggc

SEQ ID NO: 2921996 - DNA, 25 bp, Homo sapien
ttggatgggtacagccctcccggaa

SEQ ID NO: 2921997 - DNA, 25 bp, Homo sapien
gacttggatgggtacagccctcccg

SEQ ID NO: 2921998 - DNA, 25 bp, Homo sapien
acttggatgggtacagccctcccgg

SEQ ID NO: 2921999 - DNA, 25 bp, Homo sapien
tggatgggtacagccctcccggaat

SEQ ID NO: 2922000 - DNA, 25 bp, Homo sapien
cgatgtggttcccagagtgcgggtt

SEQ ID NO: 2922001 - DNA, 25 bp, Homo sapien
gatgtggttcccagagtgcgggttg

SEQ ID NO: 2922002 - DNA, 25 bp, Homo sapien
tgtggttcccagagtgcgggttgat

SEQ ID NO: 2922003 - DNA, 25 bp, Homo sapien
gcgatgtggttcccagagtgcgggt

SEQ ID NO: 2922004 - DNA, 25 bp, Homo sapien
ctgaagagaacactctggtcagttg

SEQ ID NO: 2922005 - DNA, 25 bp, Homo sapien
gaagagaacactctggtcagttggt

SEQ ID NO: 2922006 - DNA, 25 bp, Homo sapien
gagaacactctggtcagttggtgga

SEQ ID NO: 2922007 - DNA, 25 bp, Homo sapien
aagagaacactctggtcagttggtg

SEQ ID NO: 2922008 - DNA, 25 bp, Homo sapien
gatgcctcatcccaagctcagggtg

SEQ ID NO: 2922009 - DNA, 25 bp, Homo sapien
cctagcttgtggaaccagccaggaa

SEQ ID NO: 2922010 - DNA, 25 bp, Homo sapien
tccaaggtatcctggagcgagtggt

SEQ ID NO: 2922011 - DNA, 25 bp, Homo sapien
gatggccaaggcctgaactacctgc

SEQ ID NO: 2922012 - DNA, 25 bp, Homo sapien
gccagcaggtcccgctaaggaggct

SEQ ID NO: 2922013 - DNA, 25 bp, Homo sapien
cagcaggtcccgctaaggaggctca

SEQ ID NO: 2922014 - DNA, 25 bp, Homo sapien
agcaggtcccgctaaggaggctcat

SEQ ID NO: 2922015 - DNA, 25 bp, Homo sapien
cctgtggccagtgatgaagcctggc

SEQ ID NO: 2922016 - DNA, 25 bp, Homo sapien
atttctggggaagcggctgttttga

SEQ ID NO: 2922017 - DNA, 25 bp, Homo sapien
tttgagaaggctcagaaaattgtgg

SEQ ID NO: 2922018 - DNA, 25 bp, Homo sapien
tgagaaggctcagaaaattgtggga

SEQ ID NO: 2922019 - DNA, 25 bp, Homo sapien
tcatttctggggaagcggctgtttt

SEQ ID NO: 2922020 - DNA, 25 bp, Homo sapien
ccagcagaattcacctgctgcatcc

SEQ ID NO: 2922021 - DNA, 25 bp, Homo sapien
ggcgtgggcagccgccctctctgtg

SEQ ID NO: 2922022 - DNA, 25 bp, Homo sapien
gtgggcagccgccctctctgtgcct

SEQ ID NO: 2922023 - DNA, 25 bp, Homo sapien
tgcagaacagccaggggcgtgggca

SEQ ID NO: 2922024 - DNA, 25 bp, Homo sapien
ctgcagaacagccaggggcgtgggc

SEQ ID NO: 2922025 - DNA, 25 bp, Homo sapien
gacgatgctcagaaaaccggtgtaa

SEQ ID NO: 2922026 - DNA, 25 bp, Homo sapien
cgatgctcagaaaaccggtgtaact

SEQ ID NO: 2922027 - DNA, 25 bp, Homo sapien
gatgctcagaaaaccggtgtaactc

SEQ ID NO: 2922028 - DNA, 25 bp, Homo sapien
ggacgatgctcagaaaaccggtgta

SEQ ID NO: 2922029 - DNA, 25 bp, Homo sapien
ccagggcccagcttggaaaactcac

SEQ ID NO: 2922030 - DNA, 25 bp, Homo sapien
gatccccagggcccagcttggaaaa

SEQ ID NO: 2922031 - DNA, 25 bp, Homo sapien
cccagggcccagcttggaaaactca

SEQ ID NO: 2922032 - DNA, 25 bp, Homo sapien
cactggatccccagggcccagcttg

SEQ ID NO: 2922033 - DNA, 25 bp, Homo sapien
caccgaggacgaaggcagattggac

SEQ ID NO: 2922034 - DNA, 25 bp, Homo sapien
tgagtaataaaacttgtgtcaccca

SEQ ID NO: 2922035 - DNA, 25 bp, Homo sapien
tccaggtcacctgtgtgcttaagag

SEQ ID NO: 2922036 - DNA, 25 bp, Homo sapien
tgtgtgcttaagagccaccgaggac

SEQ ID NO: 2922037 - DNA, 25 bp, Homo sapien
caaccttttgatcgggcacctgcag

SEQ ID NO: 2922038 - DNA, 25 bp, Homo sapien
tgtggtgcaatccacatttctgtcc

SEQ ID NO: 2922039 - DNA, 25 bp, Homo sapien
gctgccaaccttttgatcgggcacc

SEQ ID NO: 2922040 - DNA, 25 bp, Homo sapien
cacaaatgtggtgcaatccacattt

SEQ ID NO: 2922041 - DNA, 25 bp, Homo sapien
acctcgcttgggcacacatcaagct

SEQ ID NO: 2922042 - DNA, 25 bp, Homo sapien
caacctgccaaacacctcgcttggg

SEQ ID NO: 2922043 - DNA, 25 bp, Homo sapien
gcttgggcacacatcaagctgtgct

SEQ ID NO: 2922044 - DNA, 25 bp, Homo sapien
aaacacctcgcttgggcacacatca

SEQ ID NO: 2922045 - DNA, 25 bp, Homo sapien
ccagcttccgtggactgttcaggga

SEQ ID NO: 2922046 - DNA, 25 bp, Homo sapien
ggactgttcagggatcccctctctt

SEQ ID NO: 2922047 - DNA, 25 bp, Homo sapien
tccgtggactgttcagggatcccct

SEQ ID NO: 2922048 - DNA, 25 bp, Homo sapien
gcttccgtggactgttcagggatcc

SEQ ID NO: 2922049 - DNA, 25 bp, Homo sapien
tcattgattaggaagaaccaactca

SEQ ID NO: 2922050 - DNA, 25 bp, Homo sapien
atctccatcacaattgagaaaagaa

SEQ ID NO: 2922051 - DNA, 25 bp, Homo sapien
ctaaaatctccatcacaattgagaa

SEQ ID NO: 2922052 - DNA, 25 bp, Homo sapien
cattgattaggaagaaccaactcat

SEQ ID NO: 2922053 - DNA, 25 bp, Homo sapien
ggtttagttcaccactctcgtcctg

SEQ ID NO: 2922054 - DNA, 25 bp, Homo sapien
aaggaagaatcagtccatagacagt

SEQ ID NO: 2922055 - DNA, 25 bp, Homo sapien
tagcgtctactgcatccctggactg

SEQ ID NO: 2922056 - DNA, 25 bp, Homo sapien
gacagtgagctccacaggaaggact

SEQ ID NO: 2922057 - DNA, 25 bp, Homo sapien
tgcccaccacatgaaccaaggagag

SEQ ID NO: 2922058 - DNA, 25 bp, Homo sapien
tccttgaagtggtgaagtgcccacc

SEQ ID NO: 2922059 - DNA, 25 bp, Homo sapien
gggatctgagtattccccaagggca

SEQ ID NO: 2922060 - DNA, 25 bp, Homo sapien
tccatgcctagggaagtcaaagccc

SEQ ID NO: 2922061 - DNA, 25 bp, Homo sapien
ccttcaaggaagccgtcctgccccg

SEQ ID NO: 2922062 - DNA, 25 bp, Homo sapien
tcccttcaaggaagccgtcctgccc

SEQ ID NO: 2922063 - DNA, 25 bp, Homo sapien
ctgtacagaagaaagcacgtgggtt

SEQ ID NO: 2922064 - DNA, 25 bp, Homo sapien
ttgaatcccagatgcaataagatga

SEQ ID NO: 2922065 - DNA, 25 bp, Homo sapien
caataagatgaaggtgaagtgcctc

SEQ ID NO: 2922066 - DNA, 25 bp, Homo sapien
cacgtgggttttagaaccagacaga

SEQ ID NO: 2922067 - DNA, 25 bp, Homo sapien
attcatttattctggagatctcttt

SEQ ID NO: 2922068 - DNA, 25 bp, Homo sapien
tcatttattctggagatctctttat

SEQ ID NO: 2922069 - DNA, 25 bp, Homo sapien
ttcatttattctggagatctcttta

SEQ ID NO: 2922070 - DNA, 25 bp, Homo sapien
catttattctggagatctctttatc

SEQ ID NO: 2922071 - DNA, 25 bp, Homo sapien
ggaaagctatagtgccagagccggc

SEQ ID NO: 2922072 - DNA, 25 bp, Homo sapien
cactgggccgagagaagtcctactt

SEQ ID NO: 2922073 - DNA, 25 bp, Homo sapien
gcccaacagtgctgatcgagctgag

SEQ ID NO: 2922074 - DNA, 25 bp, Homo sapien
gactctactgcctgatagcctttgg

SEQ ID NO: 2922075 - DNA, 25 bp, Homo sapien
tatgtgtgcattaatcacatgtaaa

SEQ ID NO: 2922076 - DNA, 25 bp, Homo sapien
tgtgaccggttttcttatgtgtgca

SEQ ID NO: 2922077 - DNA, 25 bp, Homo sapien
tcagacctctctgtgaccggttttc

SEQ ID NO: 2922078 - DNA, 25 bp, Homo sapien
gacaaacaagtgctcattgtgattc

SEQ ID NO: 2922079 - DNA, 25 bp, Homo sapien
gggaacgagagcgaaatgccgtctc

SEQ ID NO: 2922080 - DNA, 25 bp, Homo sapien
cactgcctgtggagttggtcagagc

SEQ ID NO: 2922081 - DNA, 25 bp, Homo sapien
ccatgggacagcaggtttaagagtg

SEQ ID NO: 2922082 - DNA, 25 bp, Homo sapien
agcagtctgagctgcattccttgaa

SEQ ID NO: 2922083 - DNA, 25 bp, Homo sapien
gctggtaaatagcagctttgcatat

SEQ ID NO: 2922084 - DNA, 25 bp, Homo sapien
gatttgagacatgcaaattgcaagc

SEQ ID NO: 2922085 - DNA, 25 bp, Homo sapien
gagacatgcaaattgcaagctggta

SEQ ID NO: 2922086 - DNA, 25 bp, Homo sapien
tctggcaggatttgagacatgcaaa

SEQ ID NO: 2922087 - DNA, 25 bp, Homo sapien
ttgtaatgagccgatgcattcttca

SEQ ID NO: 2922088 - DNA, 25 bp, Homo sapien
tgagccgatgcattcttcaaggagt

SEQ ID NO: 2922089 - DNA, 25 bp, Homo sapien
aattttgtaatgagccgatgcattc

SEQ ID NO: 2922090 - DNA, 25 bp, Homo sapien
taatgagccgatgcattcttcaagg

SEQ ID NO: 2922091 - DNA, 25 bp, Homo sapien
gaactggctgggttctttccactcc

SEQ ID NO: 2922092 - DNA, 25 bp, Homo sapien
tccaggccgggcatttgcccgagca

SEQ ID NO: 2922093 - DNA, 25 bp, Homo sapien
gcccgagcaacacgagtttcttgta

SEQ ID NO: 2922094 - DNA, 25 bp, Homo sapien
gttgcagatcccgttggaactggct

SEQ ID NO: 2922095 - DNA, 25 bp, Homo sapien
ggtctctagcttccaggaataccat

SEQ ID NO: 2922096 - DNA, 25 bp, Homo sapien
tctggtctctagcttccaggaatac

SEQ ID NO: 2922097 - DNA, 25 bp, Homo sapien
actttctggtctctagcttccagga

SEQ ID NO: 2922098 - DNA, 25 bp, Homo sapien
tttcagcgttgcttactttctggtc

SEQ ID NO: 2922099 - DNA, 25 bp, Homo sapien
ataatgaccaatgcagcacagtcca

SEQ ID NO: 2922100 - DNA, 25 bp, Homo sapien
cagcacagtccaaagagctgtgagg

SEQ ID NO: 2922101 - DNA, 25 bp, Homo sapien
aatgaccaatgcagcacagtccaaa

SEQ ID NO: 2922102 - DNA, 25 bp, Homo sapien
agcacagtccaaagagctgtgaggt

SEQ ID NO: 2922103 - DNA, 25 bp, Homo sapien
caggtcgtggtggtgagggtccctg

SEQ ID NO: 2922104 - DNA, 25 bp, Homo sapien
gctttgcagaagtgcaggcctggca

SEQ ID NO: 2922105 - DNA, 25 bp, Homo sapien
gtggggctagccttggctttgcaga

SEQ ID NO: 2922106 - DNA, 25 bp, Homo sapien
caggcctggcaggtcgtggtggtga

SEQ ID NO: 2922107 - DNA, 25 bp, Homo sapien
agagctaggctcaagatgctgaccc

SEQ ID NO: 2922108 - DNA, 25 bp, Homo sapien
tttcatcaggctccagagagctagg

SEQ ID NO: 2922109 - DNA, 25 bp, Homo sapien
gctattgagtagcaacggagagaag

SEQ ID NO: 2922110 - DNA, 25 bp, Homo sapien
tattgagtagcaacggagagaagat

SEQ ID NO: 2922111 - DNA, 25 bp, Homo sapien
aagtaattgctaatgttttggatga

SEQ ID NO: 2922112 - DNA, 25 bp, Homo sapien
tctgtgcgtcaccaggaataataaa

SEQ ID NO: 2922113 - DNA, 25 bp, Homo sapien
ttggatgatatttctgtgcgtcacc

SEQ ID NO: 2922114 - DNA, 25 bp, Homo sapien
tatttctgtgcgtcaccaggaataa

SEQ ID NO: 2922115 - DNA, 25 bp, Homo sapien
actctggcattgattctgccccagg

SEQ ID NO: 2922116 - DNA, 25 bp, Homo sapien
tcactctggcattgattctgcccca

SEQ ID NO: 2922117 - DNA, 25 bp, Homo sapien
tttctgtggtggcaatcactctggc

SEQ ID NO: 2922118 - DNA, 25 bp, Homo sapien
attctgccccaggaactgacaccag

SEQ ID NO: 2922119 - DNA, 25 bp, Homo sapien
ccccataggctccaggggcaagagg

SEQ ID NO: 2922120 - DNA, 25 bp, Homo sapien
gatggccccataggctccaggggca

SEQ ID NO: 2922121 - DNA, 25 bp, Homo sapien
cctgtgatggccccataggctccag

SEQ ID NO: 2922122 - DNA, 25 bp, Homo sapien
tgtgatggccccataggctccaggg

SEQ ID NO: 2922123 - DNA, 25 bp, Homo sapien
tacattagtgcgtccaggatagctg

SEQ ID NO: 2922124 - DNA, 25 bp, Homo sapien
aactttgctttcaacagtcggtgtc

SEQ ID NO: 2922125 - DNA, 25 bp, Homo sapien
ttctgcaacttgcaccaacctggct

SEQ ID NO: 2922126 - DNA, 25 bp, Homo sapien
gagagaggcgtagcgtagaatcctt

SEQ ID NO: 2922127 - DNA, 25 bp, Homo sapien
tctgtcattttgttgtacctgcccc

SEQ ID NO: 2922128 - DNA, 25 bp, Homo sapien
tttgttgtacctgccccctgaggcg

SEQ ID NO: 2922129 - DNA, 25 bp, Homo sapien
gctgttgctggtagagcattttaat

SEQ ID NO: 2922130 - DNA, 25 bp, Homo sapien
aaagcctcaggatttggctgttgct

SEQ ID NO: 2922131 - DNA, 25 bp, Homo sapien
ccaggcattgtgttaggcatgagga

SEQ ID NO: 2922132 - DNA, 25 bp, Homo sapien
gctgtctactgagggacacaacagt

SEQ ID NO: 2922133 - DNA, 25 bp, Homo sapien
ggctgtaccttccaaagttatcctg

SEQ ID NO: 2922134 - DNA, 25 bp, Homo sapien
gacagatttggttcttaccctcatg

SEQ ID NO: 2922135 - DNA, 25 bp, Homo sapien
tccgaccttttagcacacacattcc

SEQ ID NO: 2922136 - DNA, 25 bp, Homo sapien
acacattcctctgggtcacactacg

SEQ ID NO: 2922137 - DNA, 25 bp, Homo sapien
attcctctgggtcacactacgtcca

SEQ ID NO: 2922138 - DNA, 25 bp, Homo sapien
tcctctgggtcacactacgtccatt

SEQ ID NO: 2922139 - DNA, 25 bp, Homo sapien
ccaaaactgttagcagaaggcaaga

SEQ ID NO: 2922140 - DNA, 25 bp, Homo sapien
aaaactgttagcagaaggcaagagg

SEQ ID NO: 2922141 - DNA, 25 bp, Homo sapien
ctgttagcagaaggcaagaggatca

SEQ ID NO: 2922142 - DNA, 25 bp, Homo sapien
aactgttagcagaaggcaagaggat

SEQ ID NO: 2922143 - DNA, 25 bp, Homo sapien
gagctgagcatgaagaacgagaagt

SEQ ID NO: 2922144 - DNA, 25 bp, Homo sapien
acgagaagtcggaagtgagtcagca

SEQ ID NO: 2922145 - DNA, 25 bp, Homo sapien
cagacagtacaatttccggcctttt

SEQ ID NO: 2922146 - DNA, 25 bp, Homo sapien
cggaagtgagtcagcaggatagcac

SEQ ID NO: 2922147 - DNA, 25 bp, Homo sapien
tccacgtggagtggctggcccctta

SEQ ID NO: 2922148 - DNA, 25 bp, Homo sapien
atccacgtggagtggctggcccctt

SEQ ID NO: 2922149 - DNA, 25 bp, Homo sapien
ttccatccacgtggagtggctggcc

SEQ ID NO: 2922150 - DNA, 25 bp, Homo sapien
cacgtggagtggctggccccttaaa

SEQ ID NO: 2922151 - DNA, 25 bp, Homo sapien
aaaatacaaatctgagaccaggggc

SEQ ID NO: 2922152 - DNA, 25 bp, Homo sapien
ggtgaggccaaggtacgtggatccc

SEQ ID NO: 2922153 - DNA, 25 bp, Homo sapien
atcatcaagtcttaaacaattttaa

SEQ ID NO: 2922154 - DNA, 25 bp, Homo sapien
atccccctcacttctgctacttccc

SEQ ID NO: 2922155 - DNA, 25 bp, Homo sapien
tccaaactttcctgggcagaataag

SEQ ID NO: 2922156 - DNA, 25 bp, Homo sapien
cacgaaaaggatcaggtaacacacc

SEQ ID NO: 2922157 - DNA, 25 bp, Homo sapien
tgccacaagtgggtactaaaactcc

SEQ ID NO: 2922158 - DNA, 25 bp, Homo sapien
aactgggtcaagctgtcatttggcc

SEQ ID NO: 2922159 - DNA, 25 bp, Homo sapien
catttttgcgttggctcttgcgcca

SEQ ID NO: 2922160 - DNA, 25 bp, Homo sapien
gcgttggctcttgcgccacaaagag

SEQ ID NO: 2922161 - DNA, 25 bp, Homo sapien
ttttgcgttggctcttgcgccacaa

SEQ ID NO: 2922162 - DNA, 25 bp, Homo sapien
tggctcttgcgccacaaagagacat

SEQ ID NO: 2922163 - DNA, 25 bp, Homo sapien
gctgcagatgtaccgccattgtaag

SEQ ID NO: 2922164 - DNA, 25 bp, Homo sapien
gatgtaccgccattgtaagccgcca

SEQ ID NO: 2922165 - DNA, 25 bp, Homo sapien
cagatgtaccgccattgtaagccgc

SEQ ID NO: 2922166 - DNA, 25 bp, Homo sapien
tgctgctgcagatgtaccgccattg

SEQ ID NO: 2922167 - DNA, 25 bp, Homo sapien
tgccgaagaggtgtgctgctgtaca

SEQ ID NO: 2922168 - DNA, 25 bp, Homo sapien
ctgccgaagaggtgtgctgctgtac

SEQ ID NO: 2922169 - DNA, 25 bp, Homo sapien
cgaccccggatgaagatggtgttga

SEQ ID NO: 2922170 - DNA, 25 bp, Homo sapien
gtgtacagcggcagccgaccccgga

SEQ ID NO: 2922171 - DNA, 25 bp, Homo sapien
ctgttgttgcccagggtttaacatg

SEQ ID NO: 2922172 - DNA, 25 bp, Homo sapien
gttgcccagggtttaacatggctgc

SEQ ID NO: 2922173 - DNA, 25 bp, Homo sapien
tgcccagggtttaacatggctgcag

SEQ ID NO: 2922174 - DNA, 25 bp, Homo sapien
ttgttgcccagggtttaacatggct

SEQ ID NO: 2922175 - DNA, 25 bp, Homo sapien
gccccggtgccggtgatgggaaata

SEQ ID NO: 2922176 - DNA, 25 bp, Homo sapien
ccggtgccggtgatgggaaatatgg

SEQ ID NO: 2922177 - DNA, 25 bp, Homo sapien
ccccggtgccggtgatgggaaatat

SEQ ID NO: 2922178 - DNA, 25 bp, Homo sapien
cccggtgccggtgatgggaaatatg

SEQ ID NO: 2922179 - DNA, 25 bp, Homo sapien
cgagtgctgatgatggtgcgcctta

SEQ ID NO: 2922180 - DNA, 25 bp, Homo sapien
tatccggctcaatatccagctgctg

SEQ ID NO: 2922181 - DNA, 25 bp, Homo sapien
ccttaactgtagcagctgcggcagc

SEQ ID NO: 2922182 - DNA, 25 bp, Homo sapien
tgctgctgtggatgatgcgagtgct

SEQ ID NO: 2922183 - DNA, 25 bp, Homo sapien
tcaagagttaggcaaggataagttc

SEQ ID NO: 2922184 - DNA, 25 bp, Homo sapien
aaggataagttcacagttaaatctc

SEQ ID NO: 2922185 - DNA, 25 bp, Homo sapien
taggcaaggataagttcacagttaa

SEQ ID NO: 2922186 - DNA, 25 bp, Homo sapien
gagttaggcaaggataagttcacag

SEQ ID NO: 2922187 - DNA, 25 bp, Homo sapien
ctctttgtcccaaagttgttacatc

SEQ ID NO: 2922188 - DNA, 25 bp, Homo sapien
ctttgtcccaaagttgttacatctt

SEQ ID NO: 2922189 - DNA, 25 bp, Homo sapien
tctttgtcccaaagttgttacatct

SEQ ID NO: 2922190 - DNA, 25 bp, Homo sapien
ctcaaaattatgagcccctgaaact

SEQ ID NO: 2922191 - DNA, 25 bp, Homo sapien
gaaacattccagtactccattagag

SEQ ID NO: 2922192 - DNA, 25 bp, Homo sapien
tcggctgatagtggagaaacttctc

SEQ ID NO: 2922193 - DNA, 25 bp, Homo sapien
tataggctatggagtttcaaccacc

SEQ ID NO: 2922194 - DNA, 25 bp, Homo sapien
tcttttatgacacatgcccagtggt

SEQ ID NO: 2922195 - DNA, 25 bp, Homo sapien
gaacattccctaagactcagacaga

SEQ ID NO: 2922196 - DNA, 25 bp, Homo sapien
tcattgcccgcctacggagcctttt

SEQ ID NO: 2922197 - DNA, 25 bp, Homo sapien
tagtgcctcaagcatgacattccaa

SEQ ID NO: 2922198 - DNA, 25 bp, Homo sapien
gagctctagcttacacttcctacca

SEQ ID NO: 2922199 - DNA, 25 bp, Homo sapien
aatatacaacttagttacattggat

SEQ ID NO: 2922200 - DNA, 25 bp, Homo sapien
tacaacttagttacattggatatat

SEQ ID NO: 2922201 - DNA, 25 bp, Homo sapien
ggtaggggaatgatatgctcaaaat

SEQ ID NO: 2922202 - DNA, 25 bp, Homo sapien
taaatatacaacttagttacattgg

SEQ ID NO: 2922203 - DNA, 25 bp, Homo sapien
catgggaccaggctaggctctgaag

SEQ ID NO: 2922204 - DNA, 25 bp, Homo sapien
taaagtttgcccacctacagagaca

SEQ ID NO: 2922205 - DNA, 25 bp, Homo sapien
gaagcaactaagacatgacccgaat

SEQ ID NO: 2922206 - DNA, 25 bp, Homo sapien
gatcggtgggtagagaacatgtcac

SEQ ID NO: 2922207 - DNA, 25 bp, Homo sapien
taaaggaaagctacgttgacataac

SEQ ID NO: 2922208 - DNA, 25 bp, Homo sapien
cataacttcgtctgtgggtgtaaca

SEQ ID NO: 2922209 - DNA, 25 bp, Homo sapien
gataatagtggagtaaagcctctgg

SEQ ID NO: 2922210 - DNA, 25 bp, Homo sapien
cactggatttggtacttaactgcta

SEQ ID NO: 2922211 - DNA, 25 bp, Homo sapien
gaaggtctacctacagtttggatca

SEQ ID NO: 2922212 - DNA, 25 bp, Homo sapien
tcagtgttgaaatcccaaaagagca

SEQ ID NO: 2922213 - DNA, 25 bp, Homo sapien
taccgagacacaattttgaacgcca

SEQ ID NO: 2922214 - DNA, 25 bp, Homo sapien
gatcccaaaagtcaccatcacagga

SEQ ID NO: 2922215 - DNA, 25 bp, Homo sapien
gaagatcagtaagcacaattgatgg

SEQ ID NO: 2922216 - DNA, 25 bp, Homo sapien
agtgagccgtaaccgcacatctgca

SEQ ID NO: 2922217 - DNA, 25 bp, Homo sapien
gttaaaacatctaccaaaacacaga

SEQ ID NO: 2922218 - DNA, 25 bp, Homo sapien
ccacttccagttagaacacagaaat

SEQ ID NO: 2922219 - DNA, 25 bp, Homo sapien
atgacttttatcctccagggctggt

SEQ ID NO: 2922220 - DNA, 25 bp, Homo sapien
tctcaagcacgtctttatcagcaat

SEQ ID NO: 2922221 - DNA, 25 bp, Homo sapien
tgatagtatcagatgcctaatagcc

SEQ ID NO: 2922222 - DNA, 25 bp, Homo sapien
gcctaatagccttagaaattgttta

SEQ ID NO: 2922223 - DNA, 25 bp, Homo sapien
catcattggtgagtatacatcagct

SEQ ID NO: 2922224 - DNA, 25 bp, Homo sapien
gtgaaggaaatgcaacctcatgaga

SEQ ID NO: 2922225 - DNA, 25 bp, Homo sapien
gcatgttctctcacgcttcctcaga

SEQ ID NO: 2922226 - DNA, 25 bp, Homo sapien
cacttatactgacttatgctggagt

SEQ ID NO: 2922227 - DNA, 25 bp, Homo sapien
cataagctttgaactcggtcagcaa

SEQ ID NO: 2922228 - DNA, 25 bp, Homo sapien
tctggtacataagctttgaactcgg

SEQ ID NO: 2922229 - DNA, 25 bp, Homo sapien
tcctctctggtacataagctttgaa

SEQ ID NO: 2922230 - DNA, 25 bp, Homo sapien
gaactcggtcagcaaaaggcaagtg

SEQ ID NO: 2922231 - DNA, 25 bp, Homo sapien
cagcaaagttccagggtatgaggtc

SEQ ID NO: 2922232 - DNA, 25 bp, Homo sapien
tgtacactgggtccctagccaatag

SEQ ID NO: 2922233 - DNA, 25 bp, Homo sapien
gacaatttatcagggaaacatagca

SEQ ID NO: 2922234 - DNA, 25 bp, Homo sapien
gaaaaactcaaaacgtcctgactga

SEQ ID NO: 2922235 - DNA, 25 bp, Homo sapien
ctgtcagcagatcacttaaaaagat

SEQ ID NO: 2922236 - DNA, 25 bp, Homo sapien
tactgtcagcagatcacttaaaaag

SEQ ID NO: 2922237 - DNA, 25 bp, Homo sapien
caattactgtcagcagatcacttaa

SEQ ID NO: 2922238 - DNA, 25 bp, Homo sapien
aaagcaattactgtcagcagatcac

SEQ ID NO: 2922239 - DNA, 25 bp, Homo sapien
tgaagtaaacttctgtcccatggga

SEQ ID NO: 2922240 - DNA, 25 bp, Homo sapien
catatacctttactgggcatctaac

SEQ ID NO: 2922241 - DNA, 25 bp, Homo sapien
cagagttgctccacatgaatgcttt

SEQ ID NO: 2922242 - DNA, 25 bp, Homo sapien
ggcatctaactagccatcactaggt

SEQ ID NO: 2922243 - DNA, 25 bp, Homo sapien
ggaggctaaggaaggagaattcgct

SEQ ID NO: 2922244 - DNA, 25 bp, Homo sapien
ggctaaggaaggagaattcgcttga

SEQ ID NO: 2922245 - DNA, 25 bp, Homo sapien
gcactttaggtggccaaggtggaca

SEQ ID NO: 2922246 - DNA, 25 bp, Homo sapien
gatcacgaggtcaggagttcgagac

SEQ ID NO: 2922247 - DNA, 25 bp, Homo sapien
ttcaaggtagtaatcagagacagtc

SEQ ID NO: 2922248 - DNA, 25 bp, Homo sapien
gctgtgacagaaacctcgaaccaag

SEQ ID NO: 2922249 - DNA, 25 bp, Homo sapien
cattagccatgttagagaagtcacc

SEQ ID NO: 2922250 - DNA, 25 bp, Homo sapien
tataccatagctagaatttcaggtg

SEQ ID NO: 2922251 - DNA, 25 bp, Homo sapien
gtgctcaggcctactacttccattt

SEQ ID NO: 2922252 - DNA, 25 bp, Homo sapien
tatcttattacattactgagggcaa

SEQ ID NO: 2922253 - DNA, 25 bp, Homo sapien
tcattgcaccataatctgaggatgc

SEQ ID NO: 2922254 - DNA, 25 bp, Homo sapien
ggtatacagctcttgcatttattgg

SEQ ID NO: 2922255 - DNA, 25 bp, Homo sapien
cagcagctctactagagccacccat

SEQ ID NO: 2922256 - DNA, 25 bp, Homo sapien
ctggttgcactcctgaaagcaagat

SEQ ID NO: 2922257 - DNA, 25 bp, Homo sapien
ggttgcactcctgaaagcaagatgg

SEQ ID NO: 2922258 - DNA, 25 bp, Homo sapien
agcaagatgggtcaccagcagctct

SEQ ID NO: 2922259 - DNA, 25 bp, Homo sapien
tgtgaaatatacagaccaggccagt

SEQ ID NO: 2922260 - DNA, 25 bp, Homo sapien
tctgactactacttactggttaccc

SEQ ID NO: 2922261 - DNA, 25 bp, Homo sapien
gccagttactttgaagactagccct

SEQ ID NO: 2922262 - DNA, 25 bp, Homo sapien
cacttgaatgaggtgtctgccaggc

SEQ ID NO: 2922263 - DNA, 25 bp, Homo sapien
tgtaactcaagtaggccaggagacc

SEQ ID NO: 2922264 - DNA, 25 bp, Homo sapien
agaccctgtctgtattttacacaca

SEQ ID NO: 2922265 - DNA, 25 bp, Homo sapien
ttttttaacaacacgatgacttcac

SEQ ID NO: 2922266 - DNA, 25 bp, Homo sapien
caattaaagatcactgcagcttgga

SEQ ID NO: 2922267 - DNA, 25 bp, Homo sapien
ctacctatcatactaagattggttg

SEQ ID NO: 2922268 - DNA, 25 bp, Homo sapien
gctattatcgttcagcccctgttct

SEQ ID NO: 2922269 - DNA, 25 bp, Homo sapien
tgcctaacattctcagctattatcg

SEQ ID NO: 2922270 - DNA, 25 bp, Homo sapien
ttcctgtccaatttatttagctaga

SEQ ID NO: 2922271 - DNA, 25 bp, Homo sapien
tgaggtaggagaggtattagtggta

SEQ ID NO: 2922272 - DNA, 25 bp, Homo sapien
gaggtaggagaggtattagtggtaa

SEQ ID NO: 2922273 - DNA, 25 bp, Homo sapien
ctgaggtaggagaggtattagtggt

SEQ ID NO: 2922274 - DNA, 25 bp, Homo sapien
ctttcagagaggtcactttatacat

SEQ ID NO: 2922275 - DNA, 25 bp, Homo sapien
ctttttgagcgctactctctttcca

SEQ ID NO: 2922276 - DNA, 25 bp, Homo sapien
tcaattcccggaagacccttttgca

SEQ ID NO: 2922277 - DNA, 25 bp, Homo sapien
ccttttgcaagagaccagattctgg

SEQ ID NO: 2922278 - DNA, 25 bp, Homo sapien
acccttttgcaagagaccagattct

SEQ ID NO: 2922279 - DNA, 25 bp, Homo sapien
aaaacacaacatcttcaattcccgg

SEQ ID NO: 2922280 - DNA, 25 bp, Homo sapien
tttagtaggtgcaaggtaagaccca

SEQ ID NO: 2922281 - DNA, 25 bp, Homo sapien
gaatatgggctctacagcaagacag

SEQ ID NO: 2922282 - DNA, 25 bp, Homo sapien
taatattatggtacttgcctgtcac

SEQ ID NO: 2922283 - DNA, 25 bp, Homo sapien
tttgaaggtaaagacaacaggagct

SEQ ID NO: 2922284 - DNA, 25 bp, Homo sapien
tacatcatcctttgctttttccaac

SEQ ID NO: 2922285 - DNA, 25 bp, Homo sapien
catcatcctttgctttttccaactc

SEQ ID NO: 2922286 - DNA, 25 bp, Homo sapien
ctctacatcatcctttgctttttcc

SEQ ID NO: 2922287 - DNA, 25 bp, Homo sapien
tctacatcatcctttgctttttcca

SEQ ID NO: 2922288 - DNA, 25 bp, Homo sapien
gacatctttcggactctcaactctg

SEQ ID NO: 2922289 - DNA, 25 bp, Homo sapien
gaatgcccatgtaatcaatacctgg

SEQ ID NO: 2922290 - DNA, 25 bp, Homo sapien
caatttatgtgtagaagaaacccgg

SEQ ID NO: 2922291 - DNA, 25 bp, Homo sapien
gagcaacacacatcctgtctaaggg

SEQ ID NO: 2922292 - DNA, 25 bp, Homo sapien
ttgctaagctaatgagaaataccaa

SEQ ID NO: 2922293 - DNA, 25 bp, Homo sapien
atgagaaataccaagctcaaaggac

SEQ ID NO: 2922294 - DNA, 25 bp, Homo sapien
taagctaatgagaaataccaagctc

SEQ ID NO: 2922295 - DNA, 25 bp, Homo sapien
gctaatgagaaataccaagctcaaa

SEQ ID NO: 2922296 - DNA, 25 bp, Homo sapien
ggagtatgtcaagggcagagagtac

SEQ ID NO: 2922297 - DNA, 25 bp, Homo sapien
tggagtatgtcaagggcagagagta

SEQ ID NO: 2922298 - DNA, 25 bp, Homo sapien
aaaacatcccagcagtgttgatcag

SEQ ID NO: 2922299 - DNA, 25 bp, Homo sapien
tccattctgagtcataggcctaaag

SEQ ID NO: 2922300 - DNA, 25 bp, Homo sapien
tcacatctatggagggctgactagc

SEQ ID NO: 2922301 - DNA, 25 bp, Homo sapien
ccaggaatgtcagggaggttaactt

SEQ ID NO: 2922302 - DNA, 25 bp, Homo sapien
gacctcccgggctcagctgatcctt

SEQ ID NO: 2922303 - DNA, 25 bp, Homo sapien
tcagcctcttgagtggctgggacta

SEQ ID NO: 2922304 - DNA, 25 bp, Homo sapien
cccgggctcagctgatccttctgcc

SEQ ID NO: 2922305 - DNA, 25 bp, Homo sapien
caggcatgtgccactacacccagct

SEQ ID NO: 2922306 - DNA, 25 bp, Homo sapien
ttctagcgaatcactgagcctgagg

SEQ ID NO: 2922307 - DNA, 25 bp, Homo sapien
ctggagactcggcagctaaggtcac

SEQ ID NO: 2922308 - DNA, 25 bp, Homo sapien
gacttctaggaaataacctctgggc

SEQ ID NO: 2922309 - DNA, 25 bp, Homo sapien
gaaacattctaactgatgaaacggg

SEQ ID NO: 2922310 - DNA, 25 bp, Homo sapien
tatcaaaaacacaggacacatggcc

SEQ ID NO: 2922311 - DNA, 25 bp, Homo sapien
ggaggccaacaaagcggcagatcac

SEQ ID NO: 2922312 - DNA, 25 bp, Homo sapien
gacactaaaagaatcagcagtgaag

SEQ ID NO: 2922313 - DNA, 25 bp, Homo sapien
ttgtatcaaaaacacaggacacatg

SEQ ID NO: 2922314 - DNA, 25 bp, Homo sapien
gattaactgcatgatactatacacc

SEQ ID NO: 2922315 - DNA, 25 bp, Homo sapien
tatttttgactcgatgtactgaccc

SEQ ID NO: 2922316 - DNA, 25 bp, Homo sapien
tatttcggagacactacagagggag

SEQ ID NO: 2922317 - DNA, 25 bp, Homo sapien
actaaatttttggtgagcactggca

SEQ ID NO: 2922318 - DNA, 25 bp, Homo sapien
gagctagcgtgaataagttgttcca

SEQ ID NO: 2922319 - DNA, 25 bp, Homo sapien
tctttatgcagacaggaaggccttt

SEQ ID NO: 2922320 - DNA, 25 bp, Homo sapien
ttcaggcctgccaacatagtctatg

SEQ ID NO: 2922321 - DNA, 25 bp, Homo sapien
tatgtcgtatgtagatggcggtcaa

SEQ ID NO: 2922322 - DNA, 25 bp, Homo sapien
catcaacatcgttatatgagggagg

SEQ ID NO: 2922323 - DNA, 25 bp, Homo sapien
gaaaacgatttaggtggtagctgct

SEQ ID NO: 2922324 - DNA, 25 bp, Homo sapien
caatacatgctaggtggtatgccaa

SEQ ID NO: 2922325 - DNA, 25 bp, Homo sapien
ttagaatcacatataaatgcctggc

SEQ ID NO: 2922326 - DNA, 25 bp, Homo sapien
tggacagtgcccaaatataacaagc

SEQ ID NO: 2922327 - DNA, 25 bp, Homo sapien
ttagaataatgcaaccagtgtcagc

SEQ ID NO: 2922328 - DNA, 25 bp, Homo sapien
tggaagcttctcaccattaatgggt

SEQ ID NO: 2922329 - DNA, 25 bp, Homo sapien
tctctgacgcaaaaaagattatggg

SEQ ID NO: 2922330 - DNA, 25 bp, Homo sapien
cactccaggtctgttgcacattaaa

SEQ ID NO: 2922331 - DNA, 25 bp, Homo sapien
gggactcagaggtgccattaacttg

SEQ ID NO: 2922332 - DNA, 25 bp, Homo sapien
taaagctctcttgacagggactcag

SEQ ID NO: 2922333 - DNA, 25 bp, Homo sapien
aatgagggcctgaaaagacacctgc

SEQ ID NO: 2922334 - DNA, 25 bp, Homo sapien
ttatctttcaaatgaggcctacctc

SEQ ID NO: 2922335 - DNA, 25 bp, Homo sapien
tgatggaccacatgtataaaggtgg

SEQ ID NO: 2922336 - DNA, 25 bp, Homo sapien
gactaaacctgtgtaggcttaggct

SEQ ID NO: 2922337 - DNA, 25 bp, Homo sapien
aatgatgtttcgttgatgatggacc

SEQ ID NO: 2922338 - DNA, 25 bp, Homo sapien
taatctttccttaagtgcagactgg

SEQ ID NO: 2922339 - DNA, 25 bp, Homo sapien
gatactcggatccagtgccatgcct

SEQ ID NO: 2922340 - DNA, 25 bp, Homo sapien
cactgttactactctggcccaagac

SEQ ID NO: 2922341 - DNA, 25 bp, Homo sapien
tgcaccacaaaccacatcaaggagt

SEQ ID NO: 2922342 - DNA, 25 bp, Homo sapien
cagaagtaaacgaccaaatgatttc

SEQ ID NO: 2922343 - DNA, 25 bp, Homo sapien
tgtttaaaagtcagcagaagtaaac

SEQ ID NO: 2922344 - DNA, 25 bp, Homo sapien
gtcagcagaagtaaacgaccaaatg

SEQ ID NO: 2922345 - DNA, 25 bp, Homo sapien
taaaagtcagcagaagtaaacgacc

SEQ ID NO: 2922346 - DNA, 25 bp, Homo sapien
gaaaaactttgacatgatctgagct

SEQ ID NO: 2922347 - DNA, 25 bp, Homo sapien
tcgcaaaatctgataaagaaaaact

SEQ ID NO: 2922348 - DNA, 25 bp, Homo sapien
agtggttgaggagagacgataattt

SEQ ID NO: 2922349 - DNA, 25 bp, Homo sapien
cactctgcatcaattctgtgacaac

SEQ ID NO: 2922350 - DNA, 25 bp, Homo sapien
tagaacacagttgctgttcacaagg

SEQ ID NO: 2922351 - DNA, 25 bp, Homo sapien
gttcacaaggagattccctggctta

SEQ ID NO: 2922352 - DNA, 25 bp, Homo sapien
gattccctggcttaatgtctcgatg

SEQ ID NO: 2922353 - DNA, 25 bp, Homo sapien
taatgtctcgatgtaaaatgccagc

SEQ ID NO: 2922354 - DNA, 25 bp, Homo sapien
tttctggagcccgataatactgagt

SEQ ID NO: 2922355 - DNA, 25 bp, Homo sapien
ttgctgtaatgacggctgcccatca

SEQ ID NO: 2922356 - DNA, 25 bp, Homo sapien
catatgacgggattcatctaattct

SEQ ID NO: 2922357 - DNA, 25 bp, Homo sapien
ctgagtaacaacttcctgagtcata

SEQ ID NO: 2922358 - DNA, 25 bp, Homo sapien
tattcttcgtcctagtagttctgca

SEQ ID NO: 2922359 - DNA, 25 bp, Homo sapien
gaaacaatattcttcgtcctagtag

SEQ ID NO: 2922360 - DNA, 25 bp, Homo sapien
agtagttctgcaaagatacatccca

SEQ ID NO: 2922361 - DNA, 25 bp, Homo sapien
tcgtcctagtagttctgcaaagata

SEQ ID NO: 2922362 - DNA, 25 bp, Homo sapien
tggtcaagtgcattaattatttaca

SEQ ID NO: 2922363 - DNA, 25 bp, Homo sapien
aagacagttaaaacgtatagcatag

SEQ ID NO: 2922364 - DNA, 25 bp, Homo sapien
tgaatattgtcaaaagtacccaaca

SEQ ID NO: 2922365 - DNA, 25 bp, Homo sapien
taattctgtctggtcaagtgcatta

SEQ ID NO: 2922366 - DNA, 25 bp, Homo sapien
gacagcttatgtccagatatgatag

SEQ ID NO: 2922367 - DNA, 25 bp, Homo sapien
gcagtggctatgtcagactgccaaa

SEQ ID NO: 2922368 - DNA, 25 bp, Homo sapien
ctctagcaaagggatatctgaactc

SEQ ID NO: 2922369 - DNA, 25 bp, Homo sapien
gcaaggtagtagtcacatccatttt

SEQ ID NO: 2922370 - DNA, 25 bp, Homo sapien
ccaacagatccgtgatcaaatccaa

SEQ ID NO: 2922371 - DNA, 25 bp, Homo sapien
tgccttagcgccttcacaagctgtc

SEQ ID NO: 2922372 - DNA, 25 bp, Homo sapien
ggacccctgagtatatgtgccttag

SEQ ID NO: 2922373 - DNA, 25 bp, Homo sapien
ccagtgatggtgtgcccaacagatc

SEQ ID NO: 2922374 - DNA, 25 bp, Homo sapien
caaagggattactgttaagaggcca

SEQ ID NO: 2922375 - DNA, 25 bp, Homo sapien
gaccatgaacatctgcctaaggaga

SEQ ID NO: 2922376 - DNA, 25 bp, Homo sapien
caaagtgcatctagccattaagcgg

SEQ ID NO: 2922377 - DNA, 25 bp, Homo sapien
ttcaagcagtggataaaagccgttt

SEQ ID NO: 2922378 - DNA, 25 bp, Homo sapien
tcttctgtggtcatcctcccgagta

SEQ ID NO: 2922379 - DNA, 25 bp, Homo sapien
cagggtatagagtacaggaagagat

SEQ ID NO: 2922380 - DNA, 25 bp, Homo sapien
cctggctagacagggtatagagtac

SEQ ID NO: 2922381 - DNA, 25 bp, Homo sapien
agcctggctagacagggtatagagt

SEQ ID NO: 2922382 - DNA, 25 bp, Homo sapien
gctagacagggtatagagtacagga

SEQ ID NO: 2922383 - DNA, 25 bp, Homo sapien
tggatcaaagaccaacatcctgcaa

SEQ ID NO: 2922384 - DNA, 25 bp, Homo sapien
tcaaagaccaacatcctgcaaagga

SEQ ID NO: 2922385 - DNA, 25 bp, Homo sapien
caaagaccaacatcctgcaaaggag

SEQ ID NO: 2922386 - DNA, 25 bp, Homo sapien
gatcaaagaccaacatcctgcaaag

SEQ ID NO: 2922387 - DNA, 25 bp, Homo sapien
ccaaattagggatgttcagcgtgtg

SEQ ID NO: 2922388 - DNA, 25 bp, Homo sapien
cagacatgtgatggcagtagactgc

SEQ ID NO: 2922389 - DNA, 25 bp, Homo sapien
ccagctttgtcaacacggtgaaatc

SEQ ID NO: 2922390 - DNA, 25 bp, Homo sapien
gaggtcaggtcatttgtggtgtcat

SEQ ID NO: 2922391 - DNA, 25 bp, Homo sapien
tcaaattagagaccagcacatcaac

SEQ ID NO: 2922392 - DNA, 25 bp, Homo sapien
ctgaaatcaaattagagaccagcac

SEQ ID NO: 2922393 - DNA, 25 bp, Homo sapien
accagcacatcaacactacagataa

SEQ ID NO: 2922394 - DNA, 25 bp, Homo sapien
cagcacatcaacactacagataaaa

SEQ ID NO: 2922395 - DNA, 25 bp, Homo sapien
cgtagtcgcccttcatctaggtagg

SEQ ID NO: 2922396 - DNA, 25 bp, Homo sapien
catccttagcggatattcttttgga

SEQ ID NO: 2922397 - DNA, 25 bp, Homo sapien
gggctaaggcatccttagcggatat

SEQ ID NO: 2922398 - DNA, 25 bp, Homo sapien
acatgtgtgatatcgtagtcgccct

SEQ ID NO: 2922399 - DNA, 25 bp, Homo sapien
gaggtggaaaagcaacatttacaca

SEQ ID NO: 2922400 - DNA, 25 bp, Homo sapien
gtggaggtggaaaagcaacatttac

SEQ ID NO: 2922401 - DNA, 25 bp, Homo sapien
cttccagtggaggtggaaaagcaac

SEQ ID NO: 2922402 - DNA, 25 bp, Homo sapien
tccagtggaggtggaaaagcaacat

SEQ ID NO: 2922403 - DNA, 25 bp, Homo sapien
cagaactgaggttcttctcgaaagt

SEQ ID NO: 2922404 - DNA, 25 bp, Homo sapien
atttgggattggtgacaggctcaaa

SEQ ID NO: 2922405 - DNA, 25 bp, Homo sapien
tgggattggtgacaggctcaaagtc

SEQ ID NO: 2922406 - DNA, 25 bp, Homo sapien
tgaggttcttctcgaaagtgtcatc

SEQ ID NO: 2922407 - DNA, 25 bp, Homo sapien
aagcagcagactgagggttgatgca

SEQ ID NO: 2922408 - DNA, 25 bp, Homo sapien
agcagactgagggttgatgcagaga

SEQ ID NO: 2922409 - DNA, 25 bp, Homo sapien
ctcttaaaagcagcagactgagggt

SEQ ID NO: 2922410 - DNA, 25 bp, Homo sapien
aaaagcagcagactgagggttgatg

SEQ ID NO: 2922411 - DNA, 25 bp, Homo sapien
ggggcatctcagatggctgagcaac

SEQ ID NO: 2922412 - DNA, 25 bp, Homo sapien
atgggggcatctcagatggctgagc

SEQ ID NO: 2922413 - DNA, 25 bp, Homo sapien
ggcatctcagatggctgagcaacag

SEQ ID NO: 2922414 - DNA, 25 bp, Homo sapien
tgggggcatctcagatggctgagca

SEQ ID NO: 2922415 - DNA, 25 bp, Homo sapien
tccagaattgcaaatcccagactcc

SEQ ID NO: 2922416 - DNA, 25 bp, Homo sapien
aaatcccagactccagtggaaagct

SEQ ID NO: 2922417 - DNA, 25 bp, Homo sapien
ggaaagctacattacatcttcagta

SEQ ID NO: 2922418 - DNA, 25 bp, Homo sapien
tacatcttcagtagtacattatctt

SEQ ID NO: 2922419 - DNA, 25 bp, Homo sapien
tcaccatcacggctctaatgagaag

SEQ ID NO: 2922420 - DNA, 25 bp, Homo sapien
catgattggtcgcaggcaaggttcc

SEQ ID NO: 2922421 - DNA, 25 bp, Homo sapien
gcttgatcattaggtggcatgcccc

SEQ ID NO: 2922422 - DNA, 25 bp, Homo sapien
gttctgaggtgagccataacagctg

SEQ ID NO: 2922423 - DNA, 25 bp, Homo sapien
tcagcatgtggaggtaaacaagcca

SEQ ID NO: 2922424 - DNA, 25 bp, Homo sapien
taattgtccataacacacaccaagg

SEQ ID NO: 2922425 - DNA, 25 bp, Homo sapien
caagactcccacagctttgcctaag

SEQ ID NO: 2922426 - DNA, 25 bp, Homo sapien
gccaagttgtataactccaggaggt

SEQ ID NO: 2922427 - DNA, 25 bp, Homo sapien
gaaagtgtgccacggtaattgacca

SEQ ID NO: 2922428 - DNA, 25 bp, Homo sapien
gcttcagttgggttgattctcagga

SEQ ID NO: 2922429 - DNA, 25 bp, Homo sapien
gagattgtacctttcacaccagtgt

SEQ ID NO: 2922430 - DNA, 25 bp, Homo sapien
tgggctcttttgatactaaacacgt

SEQ ID NO: 2922431 - DNA, 25 bp, Homo sapien
cttcaaatctacattgtacaaagtg

SEQ ID NO: 2922432 - DNA, 25 bp, Homo sapien
caaatgtcacatttaatgttttcac

SEQ ID NO: 2922433 - DNA, 25 bp, Homo sapien
catttaatgttttcaccactgtact

SEQ ID NO: 2922434 - DNA, 25 bp, Homo sapien
accactgtacttcaaatctacattg

SEQ ID NO: 2922435 - DNA, 25 bp, Homo sapien
taaagggctgaactttactggatga

SEQ ID NO: 2922436 - DNA, 25 bp, Homo sapien
ctgaactttactggatgagtttccc

SEQ ID NO: 2922437 - DNA, 25 bp, Homo sapien
aagggctgaactttactggatgagt

SEQ ID NO: 2922438 - DNA, 25 bp, Homo sapien
ggctgaactttactggatgagtttc

SEQ ID NO: 2922439 - DNA, 25 bp, Homo sapien
tagggatggccacatgactatgttc

SEQ ID NO: 2922440 - DNA, 25 bp, Homo sapien
gagatcaagtgccttctagctaggg

SEQ ID NO: 2922441 - DNA, 25 bp, Homo sapien
agaaatgcacatgggagataaaacc

SEQ ID NO: 2922442 - DNA, 25 bp, Homo sapien
catcaagcttgtggtaagggacagg

SEQ ID NO: 2922443 - DNA, 25 bp, Homo sapien
cttgtgtctttgtggctcctggtat

SEQ ID NO: 2922444 - DNA, 25 bp, Homo sapien
tggtatctgatgtggtgctggcaca

SEQ ID NO: 2922445 - DNA, 25 bp, Homo sapien
caggcccctgtggacttgtgtcttt

SEQ ID NO: 2922446 - DNA, 25 bp, Homo sapien
tgtggctcctggtatctgatgtggt

SEQ ID NO: 2922447 - DNA, 25 bp, Homo sapien
tcaaaacaaagtgaccaggacctac

SEQ ID NO: 2922448 - DNA, 25 bp, Homo sapien
ctgtttttaacgattgcccacttga

SEQ ID NO: 2922449 - DNA, 25 bp, Homo sapien
gacctacttatatcaaaacaagggc

SEQ ID NO: 2922450 - DNA, 25 bp, Homo sapien
aagaaaaactagtgcctgagtgtga

SEQ ID NO: 2922451 - DNA, 25 bp, Homo sapien
gtgctccagacagtctctgttgaca

SEQ ID NO: 2922452 - DNA, 25 bp, Homo sapien
tgctccagacagtctctgttgacac

SEQ ID NO: 2922453 - DNA, 25 bp, Homo sapien
ctgtggcatagtgagcacccaaggc

SEQ ID NO: 2922454 - DNA, 25 bp, Homo sapien
tggcatagtgagcacccaaggctca

SEQ ID NO: 2922455 - DNA, 25 bp, Homo sapien
ctgaagcttctgcaaaccacagtaa

SEQ ID NO: 2922456 - DNA, 25 bp, Homo sapien
cttctgcaaaccacagtaacagata

SEQ ID NO: 2922457 - DNA, 25 bp, Homo sapien
ttctgcaaaccacagtaacagatac

SEQ ID NO: 2922458 - DNA, 25 bp, Homo sapien
aagcttctgcaaaccacagtaacag

SEQ ID NO: 2922459 - DNA, 25 bp, Homo sapien
cccaggaaggaagtgacgaagcaaa

SEQ ID NO: 2922460 - DNA, 25 bp, Homo sapien
ggattttcacttttcgtggtaggca

SEQ ID NO: 2922461 - DNA, 25 bp, Homo sapien
agtgctctggtagaccaagttggga

SEQ ID NO: 2922462 - DNA, 25 bp, Homo sapien
taggcattctcctagaagctctccc

SEQ ID NO: 2922463 - DNA, 25 bp, Homo sapien
gatcatcgtgcactgtgcagcactg

SEQ ID NO: 2922464 - DNA, 25 bp, Homo sapien
tctctttgatcatcgtgcactgtgc

SEQ ID NO: 2922465 - DNA, 25 bp, Homo sapien
cacacataagccctctctttgatca

SEQ ID NO: 2922466 - DNA, 25 bp, Homo sapien
tgcaggcatttcctcatgcccaggg

SEQ ID NO: 2922467 - DNA, 25 bp, Homo sapien
cactgtgtgacgtctccacctcata

SEQ ID NO: 2922468 - DNA, 25 bp, Homo sapien
ttgagcttacgctcagccactgtgt

SEQ ID NO: 2922469 - DNA, 25 bp, Homo sapien
ccagatccttgagcttacgctcagc

SEQ ID NO: 2922470 - DNA, 25 bp, Homo sapien
actgtgtgacgtctccacctcatag

SEQ ID NO: 2922471 - DNA, 25 bp, Homo sapien
gaaagtttcaagggcgcactgggac

SEQ ID NO: 2922472 - DNA, 25 bp, Homo sapien
aggcgaggaaagtttcaagggcgca

SEQ ID NO: 2922473 - DNA, 25 bp, Homo sapien
aagtttcaagggcgcactgggacag

SEQ ID NO: 2922474 - DNA, 25 bp, Homo sapien
cgaggaaagtttcaagggcgcactg

SEQ ID NO: 2922475 - DNA, 25 bp, Homo sapien
agaccatgcttgagctccagccact

SEQ ID NO: 2922476 - DNA, 25 bp, Homo sapien
accatgcttgagctccagccactca

SEQ ID NO: 2922477 - DNA, 25 bp, Homo sapien
cagaccatgcttgagctccagccac

SEQ ID NO: 2922478 - DNA, 25 bp, Homo sapien
ccatgcttgagctccagccactcac

SEQ ID NO: 2922479 - DNA, 25 bp, Homo sapien
ttccccacaaaacagcctggatttc

SEQ ID NO: 2922480 - DNA, 25 bp, Homo sapien
ctcagtttccccacaaaacagcctg

SEQ ID NO: 2922481 - DNA, 25 bp, Homo sapien
agtttccccacaaaacagcctggat

SEQ ID NO: 2922482 - DNA, 25 bp, Homo sapien
cagcttccaccatcccagcctcagt

SEQ ID NO: 2922483 - DNA, 25 bp, Homo sapien
agaggccacgacctgcgaaccgaca

SEQ ID NO: 2922484 - DNA, 25 bp, Homo sapien
aggccacgacctgcgaaccgacacc

SEQ ID NO: 2922485 - DNA, 25 bp, Homo sapien
gccacgacctgcgaaccgacaccac

SEQ ID NO: 2922486 - DNA, 25 bp, Homo sapien
gagaggccacgacctgcgaaccgac

SEQ ID NO: 2922487 - DNA, 25 bp, Homo sapien
cgagcagggccaaaagcaccgtggc

SEQ ID NO: 2922488 - DNA, 25 bp, Homo sapien
cccccaggtagacgagcagggccaa

SEQ ID NO: 2922489 - DNA, 25 bp, Homo sapien
ccccaggtagacgagcagggccaaa

SEQ ID NO: 2922490 - DNA, 25 bp, Homo sapien
gcagggccaaaagcaccgtggccat

SEQ ID NO: 2922491 - DNA, 25 bp, Homo sapien
ggcggcctagtttcccatacctgag

SEQ ID NO: 2922492 - DNA, 25 bp, Homo sapien
gatcgaagggaaaggaatccgatcc

SEQ ID NO: 2922493 - DNA, 25 bp, Homo sapien
tctcggaggcaggatgttatgtgac

SEQ ID NO: 2922494 - DNA, 25 bp, Homo sapien
gaagggcgcggtcagatctagccac

SEQ ID NO: 2922495 - DNA, 25 bp, Homo sapien
tccagggtcgggagtgaacatgtaa

SEQ ID NO: 2922496 - DNA, 25 bp, Homo sapien
cgccgctgtccggaggcgaaatccg

SEQ ID NO: 2922497 - DNA, 25 bp, Homo sapien
ccagacgccgctgtccggaggcgaa

SEQ ID NO: 2922498 - DNA, 25 bp, Homo sapien
acatgtaaatgaggtgggcgtggtc

SEQ ID NO: 2922499 - DNA, 25 bp, Homo sapien
gcatccagacgcgggactgcagtac

SEQ ID NO: 2922500 - DNA, 25 bp, Homo sapien
gggcatccagacgcgggactgcagt

SEQ ID NO: 2922501 - DNA, 25 bp, Homo sapien
gggggcatccagacgcgggactgca

SEQ ID NO: 2922502 - DNA, 25 bp, Homo sapien
ggcgggggcatccagacgcgggact

SEQ ID NO: 2922503 - DNA, 25 bp, Homo sapien
gcttcaccctttcagctctacctcc

SEQ ID NO: 2922504 - DNA, 25 bp, Homo sapien
accctttcagctctacctccaggga

SEQ ID NO: 2922505 - DNA, 25 bp, Homo sapien
tcaccctttcagctctacctccagg

SEQ ID NO: 2922506 - DNA, 25 bp, Homo sapien
ccctttcagctctacctccagggag

SEQ ID NO: 2922507 - DNA, 25 bp, Homo sapien
gttgacaatctaggaggaagtggta

SEQ ID NO: 2922508 - DNA, 25 bp, Homo sapien
tgacaatctaggaggaagtggtagt

SEQ ID NO: 2922509 - DNA, 25 bp, Homo sapien
tgggtcctctcagagatgtgttgac

SEQ ID NO: 2922510 - DNA, 25 bp, Homo sapien
ctcagagatgtgttgacaatctagg

SEQ ID NO: 2922511 - DNA, 25 bp, Homo sapien
aatgacacggtgacacccaagtagg

SEQ ID NO: 2922512 - DNA, 25 bp, Homo sapien
cagatcaggacaccaagaagttggt

SEQ ID NO: 2922513 - DNA, 25 bp, Homo sapien
gacttctcagtgctgacgttctgct

SEQ ID NO: 2922514 - DNA, 25 bp, Homo sapien
caggccaaggagtggtaactgtgtc

SEQ ID NO: 2922515 - DNA, 25 bp, Homo sapien
ctacagcaacagagccacacaggtg

SEQ ID NO: 2922516 - DNA, 25 bp, Homo sapien
ggagggagaggcagcggcatgcggc

SEQ ID NO: 2922517 - DNA, 25 bp, Homo sapien
cagcaacagagccacacaggtggac

SEQ ID NO: 2922518 - DNA, 25 bp, Homo sapien
gagggagaggcagcggcatgcggca

SEQ ID NO: 2922519 - DNA, 25 bp, Homo sapien
catggcacatgcctaggcttggtca

SEQ ID NO: 2922520 - DNA, 25 bp, Homo sapien
gtctctttctccatacctggaagca

SEQ ID NO: 2922521 - DNA, 25 bp, Homo sapien
gatgtatctacggagctcagctgtg

SEQ ID NO: 2922522 - DNA, 25 bp, Homo sapien
caccggtttcatatccgcctgtagg

SEQ ID NO: 2922523 - DNA, 25 bp, Homo sapien
ggtagtgttacaagtccagcgggct

SEQ ID NO: 2922524 - DNA, 25 bp, Homo sapien
gtagtgttacaagtccagcgggctg

SEQ ID NO: 2922525 - DNA, 25 bp, Homo sapien
ttcggccagagccaacagtgtggag

SEQ ID NO: 2922526 - DNA, 25 bp, Homo sapien
gtgagcttcggccagagccaacagt

SEQ ID NO: 2922527 - DNA, 25 bp, Homo sapien
ccctgcgggacgctgcacacctggg

SEQ ID NO: 2922528 - DNA, 25 bp, Homo sapien
agaccctgcgggacgctgcacacct

SEQ ID NO: 2922529 - DNA, 25 bp, Homo sapien
tgagaccctgcgggacgctgcacac

SEQ ID NO: 2922530 - DNA, 25 bp, Homo sapien
gaccctgcgggacgctgcacacctg

SEQ ID NO: 2922531 - DNA, 25 bp, Homo sapien
agggcctggttctggtcctagtctt

SEQ ID NO: 2922532 - DNA, 25 bp, Homo sapien
cattggaaccacttctaggaacgtt

SEQ ID NO: 2922533 - DNA, 25 bp, Homo sapien
tctggtcctagtcttgcattggaac

SEQ ID NO: 2922534 - DNA, 25 bp, Homo sapien
tttgaggtgaaaagctaagctaggg

SEQ ID NO: 2922535 - DNA, 25 bp, Homo sapien
tgtgatctcattgcttctcatttgt

SEQ ID NO: 2922536 - DNA, 25 bp, Homo sapien
gtttgacaggataaatgtgatctca

SEQ ID NO: 2922537 - DNA, 25 bp, Homo sapien
tttataatcccaccagctgggtatg

SEQ ID NO: 2922538 - DNA, 25 bp, Homo sapien
tatgagagtttcagtttccctatgt

SEQ ID NO: 2922539 - DNA, 25 bp, Homo sapien
ctatagaagggctaaatatggcaaa

SEQ ID NO: 2922540 - DNA, 25 bp, Homo sapien
aagcctgggagtgcattttacaaac

SEQ ID NO: 2922541 - DNA, 25 bp, Homo sapien
agcgtggctttttccatctatagaa

SEQ ID NO: 2922542 - DNA, 25 bp, Homo sapien
ggctttttccatctatagaagggct

SEQ ID NO: 2922543 - DNA, 25 bp, Homo sapien
ggctagaccaaaagactgaagtctt

SEQ ID NO: 2922544 - DNA, 25 bp, Homo sapien
tattccggttatcgtatcattccac

SEQ ID NO: 2922545 - DNA, 25 bp, Homo sapien
tatcgtatcattccacacactgaat

SEQ ID NO: 2922546 - DNA, 25 bp, Homo sapien
gttaatattccggttatcgtatcat

SEQ ID NO: 2922547 - DNA, 25 bp, Homo sapien
tcagcaatttcagtgcttttcctgt

SEQ ID NO: 2922548 - DNA, 25 bp, Homo sapien
tttgccttgaaaatttcatccagga

SEQ ID NO: 2922549 - DNA, 25 bp, Homo sapien
gaattcacaaaggaatactcgatga

SEQ ID NO: 2922550 - DNA, 25 bp, Homo sapien
aaaggaatactcgatgaagccacat

SEQ ID NO: 2922551 - DNA, 25 bp, Homo sapien
cccggtgcagtgcggccgtcacgga

SEQ ID NO: 2922552 - DNA, 25 bp, Homo sapien
tgcagtgcggccgtcacggagcagg

SEQ ID NO: 2922553 - DNA, 25 bp, Homo sapien
gagcgccgcggtgcaggttcccggc

SEQ ID NO: 2922554 - DNA, 25 bp, Homo sapien
gagcaggggtcgcagagcggggcac

SEQ ID NO: 2922555 - DNA, 25 bp, Homo sapien
ccgtataagtatagcgcgtggagaa

SEQ ID NO: 2922556 - DNA, 25 bp, Homo sapien
tggccgcgtggtatcctggtgtccc

SEQ ID NO: 2922557 - DNA, 25 bp, Homo sapien
tcggcgcgcggctactcagtgtaga

SEQ ID NO: 2922558 - DNA, 25 bp, Homo sapien
cctagcgtttcggtgctggccgcgt

SEQ ID NO: 2922559 - DNA, 25 bp, Homo sapien
aggaggctcgtggacagggggcggc

SEQ ID NO: 2922560 - DNA, 25 bp, Homo sapien
ctggttgccggagcccccatagtct

SEQ ID NO: 2922561 - DNA, 25 bp, Homo sapien
agggctaggcagaccgcttccattg

SEQ ID NO: 2922562 - DNA, 25 bp, Homo sapien
aagaggggccaaatccgcgcgcctt

SEQ ID NO: 2922563 - DNA, 25 bp, Homo sapien
tagtctgtcggttgggcctggaccc

SEQ ID NO: 2922564 - DNA, 25 bp, Homo sapien
gactgggtagagctcgcgcggcagc

SEQ ID NO: 2922565 - DNA, 25 bp, Homo sapien
cgactgggtagagctcgcgcggcag

SEQ ID NO: 2922566 - DNA, 25 bp, Homo sapien
tcgactgggtagagctcgcgcggca

SEQ ID NO: 2922567 - DNA, 25 bp, Homo sapien
ctcgactgggtagagctcgcgcggc

SEQ ID NO: 2922568 - DNA, 25 bp, Homo sapien
cagaggtggaatcgcgggaaacctt

SEQ ID NO: 2922569 - DNA, 25 bp, Homo sapien
agacactgacaaccggccagaggtg

SEQ ID NO: 2922570 - DNA, 25 bp, Homo sapien
acttcatccagactacttccctcag

SEQ ID NO: 2922571 - DNA, 25 bp, Homo sapien
tgtgactttggacaccacttcatcc

SEQ ID NO: 2922572 - DNA, 25 bp, Homo sapien
cagaggtcttccagttgtgtttggt

SEQ ID NO: 2922573 - DNA, 25 bp, Homo sapien
tcagaggtcttccagttgtgtttgg

SEQ ID NO: 2922574 - DNA, 25 bp, Homo sapien
agaggtcttccagttgtgtttggtt

SEQ ID NO: 2922575 - DNA, 25 bp, Homo sapien
taaaaaggatgcggatccatgctga

SEQ ID NO: 2922576 - DNA, 25 bp, Homo sapien
aaaaaggatgcggatccatgctgac

SEQ ID NO: 2922577 - DNA, 25 bp, Homo sapien
aataaaaaggatgcggatccatgct

SEQ ID NO: 2922578 - DNA, 25 bp, Homo sapien
aaataaaaaggatgcggatccatgc

SEQ ID NO: 2922579 - DNA, 25 bp, Homo sapien
gtagcagtgggtctttgaactcctt

SEQ ID NO: 2922580 - DNA, 25 bp, Homo sapien
agcagtgggtctttgaactccttag

SEQ ID NO: 2922581 - DNA, 25 bp, Homo sapien
tccttagcataccacttcagcaggt

SEQ ID NO: 2922582 - DNA, 25 bp, Homo sapien
ctccttagcataccacttcagcagg

SEQ ID NO: 2922583 - DNA, 25 bp, Homo sapien
tcagaacataactcggaaaagctct

SEQ ID NO: 2922584 - DNA, 25 bp, Homo sapien
ctcggaaaagctctagggcaataaa

SEQ ID NO: 2922585 - DNA, 25 bp, Homo sapien
taactcggaaaagctctagggcaat

SEQ ID NO: 2922586 - DNA, 25 bp, Homo sapien
agggcaataaaactgccattaccgg

SEQ ID NO: 2922587 - DNA, 25 bp, Homo sapien
gtagatgattgcaggagttcgaatc

SEQ ID NO: 2922588 - DNA, 25 bp, Homo sapien
agtagatgattgcaggagttcgaat

SEQ ID NO: 2922589 - DNA, 25 bp, Homo sapien
tagatgattgcaggagttcgaatcc

SEQ ID NO: 2922590 - DNA, 25 bp, Homo sapien
taggggctccgcaacatgaaaatta

SEQ ID NO: 2922591 - DNA, 25 bp, Homo sapien
tgtggagagtatcggaattaaggtt

SEQ ID NO: 2922592 - DNA, 25 bp, Homo sapien
ggagagtatcggaattaaggttgtc

SEQ ID NO: 2922593 - DNA, 25 bp, Homo sapien
ttgtagtaggggctccgcaacatga

SEQ ID NO: 2922594 - DNA, 25 bp, Homo sapien
gatgctagacttcagatacagggac

SEQ ID NO: 2922595 - DNA, 25 bp, Homo sapien
taatcttgcggtggaactcaggcac

SEQ ID NO: 2922596 - DNA, 25 bp, Homo sapien
tgccaagcatcaacgtgaagagacc

SEQ ID NO: 2922597 - DNA, 25 bp, Homo sapien
gaagagaccctctatgcacacagtg

SEQ ID NO: 2922598 - DNA, 25 bp, Homo sapien
cagcagctacctttatttggatcac

SEQ ID NO: 2922599 - DNA, 25 bp, Homo sapien
ttggatcacacacgtgagtcagaca

SEQ ID NO: 2922600 - DNA, 25 bp, Homo sapien
tttatttggatcacacacgtgagtc

SEQ ID NO: 2922601 - DNA, 25 bp, Homo sapien
tatttggatcacacacgtgagtcag

SEQ ID NO: 2922602 - DNA, 25 bp, Homo sapien
tcctcatgagagaaccctggattct

SEQ ID NO: 2922603 - DNA, 25 bp, Homo sapien
gaaatatgtttaactcctcatgaga

SEQ ID NO: 2922604 - DNA, 25 bp, Homo sapien
gaaccctggattctctatcccctag

SEQ ID NO: 2922605 - DNA, 25 bp, Homo sapien
tctatcccctagtccacaaaacaaa

SEQ ID NO: 2922606 - DNA, 25 bp, Homo sapien
cctatgtcacaagaggtggcgtgta

SEQ ID NO: 2922607 - DNA, 25 bp, Homo sapien
tctgtagcattccagcggcttgacc

SEQ ID NO: 2922608 - DNA, 25 bp, Homo sapien
cacctcttatgcttagttggaacta

SEQ ID NO: 2922609 - DNA, 25 bp, Homo sapien
ggtggccctgcagtgtacgttctca

SEQ ID NO: 2922610 - DNA, 25 bp, Homo sapien
caggtatcgggttgaatatgaagct

SEQ ID NO: 2922611 - DNA, 25 bp, Homo sapien
catgaaagggtccacgaagttggct

SEQ ID NO: 2922612 - DNA, 25 bp, Homo sapien
ccacctctagtagtttgagcatgaa

SEQ ID NO: 2922613 - DNA, 25 bp, Homo sapien
aagaagactttcctagggctggaga

SEQ ID NO: 2922614 - DNA, 25 bp, Homo sapien
aatactgtaggccatcggtgctcgg

SEQ ID NO: 2922615 - DNA, 25 bp, Homo sapien
gaatactcctagacctgcctcaaag

SEQ ID NO: 2922616 - DNA, 25 bp, Homo sapien
acatagtatgattggtgaaaggcac

SEQ ID NO: 2922617 - DNA, 25 bp, Homo sapien
ggctgaatggcaccaccaaatgtgc

SEQ ID NO: 2922618 - DNA, 25 bp, Homo sapien
taattgagcttgttgatcaacttgc

SEQ ID NO: 2922619 - DNA, 25 bp, Homo sapien
cttaacctactgaacttttgccaat

SEQ ID NO: 2922620 - DNA, 25 bp, Homo sapien
gggaccctagttcactaccctctca

SEQ ID NO: 2922621 - DNA, 25 bp, Homo sapien
aacttctggtccacttaacctactg

SEQ ID NO: 2922622 - DNA, 25 bp, Homo sapien
tgagctcacatcctgcgctcgtcga

SEQ ID NO: 2922623 - DNA, 25 bp, Homo sapien
ggcgctaaggcttctgggtcttgta

SEQ ID NO: 2922624 - DNA, 25 bp, Homo sapien
catgcatagcgctctatccgggaaa

SEQ ID NO: 2922625 - DNA, 25 bp, Homo sapien
gagcctgagactacaagtccctgca

SEQ ID NO: 2922626 - DNA, 25 bp, Homo sapien
gtaagtgcaacccagaagcagggca

SEQ ID NO: 2922627 - DNA, 25 bp, Homo sapien
gcaacgaagctaatgggaacccaag

SEQ ID NO: 2922628 - DNA, 25 bp, Homo sapien
tagagtggcggatctagcagaaacc

SEQ ID NO: 2922629 - DNA, 25 bp, Homo sapien
caggtgacgccccagaaagtaattc

SEQ ID NO: 2922630 - DNA, 25 bp, Homo sapien
taaaaagagagaaagctagcattta

SEQ ID NO: 2922631 - DNA, 25 bp, Homo sapien
tttattgtacccctacgtgccaggc

SEQ ID NO: 2922632 - DNA, 25 bp, Homo sapien
tatagaaagtcatgtccacatggag

SEQ ID NO: 2922633 - DNA, 25 bp, Homo sapien
cattgggtactcagaagagaacaca

SEQ ID NO: 2922634 - DNA, 25 bp, Homo sapien
cctcttccctcccaataagaatggg

SEQ ID NO: 2922635 - DNA, 25 bp, Homo sapien
tgtactcctggctactcagtaggcc

SEQ ID NO: 2922636 - DNA, 25 bp, Homo sapien
ttcagggaagaacagctataggatg

SEQ ID NO: 2922637 - DNA, 25 bp, Homo sapien
aaaaacaatgaggtgagatgtgtgc

SEQ ID NO: 2922638 - DNA, 25 bp, Homo sapien
cctttcttggcaccagccttgtccc

SEQ ID NO: 2922639 - DNA, 25 bp, Homo sapien
tttcttggcaccagccttgtcccaa

SEQ ID NO: 2922640 - DNA, 25 bp, Homo sapien
ctttcttggcaccagccttgtccca

SEQ ID NO: 2922641 - DNA, 25 bp, Homo sapien
cccctttcttggcaccagccttgtc

SEQ ID NO: 2922642 - DNA, 25 bp, Homo sapien
tgggcttcggctggggcttcctgac

SEQ ID NO: 2922643 - DNA, 25 bp, Homo sapien
ctgggcttcggctggggcttcctga

SEQ ID NO: 2922644 - DNA, 25 bp, Homo sapien
aagtatgaatcaccgcgtctggcct

SEQ ID NO: 2922645 - DNA, 25 bp, Homo sapien
cagccagtctaggagtttcccagga

SEQ ID NO: 2922646 - DNA, 25 bp, Homo sapien
tttttactatagcaggaaccagggc

SEQ ID NO: 2922647 - DNA, 25 bp, Homo sapien
tgtttattttgagcaccaccgagag

SEQ ID NO: 2922648 - DNA, 25 bp, Homo sapien
aggtagatcaccacacggcaggagg

SEQ ID NO: 2922649 - DNA, 25 bp, Homo sapien
gcttggaaggctccgccgtggtgga

SEQ ID NO: 2922650 - DNA, 25 bp, Homo sapien
gctccgccgtggtggaaagggtcac

SEQ ID NO: 2922651 - DNA, 25 bp, Homo sapien
aaagggtcacgagtgagtggccagt

SEQ ID NO: 2922652 - DNA, 25 bp, Homo sapien
tggacatacttgttgcccaaccctc

SEQ ID NO: 2922653 - DNA, 25 bp, Homo sapien
cttgagcatggtgtcgtggcgggtc

SEQ ID NO: 2922654 - DNA, 25 bp, Homo sapien
gagccgcccacgttgagctggacat

SEQ ID NO: 2922655 - DNA, 25 bp, Homo sapien
gtggtgtagtacagagagccgccca

SEQ ID NO: 2922656 - DNA, 25 bp, Homo sapien
tccacaacggtctatgaggatccag

SEQ ID NO: 2922657 - DNA, 25 bp, Homo sapien
gcagggcactctggcacatattcac

SEQ ID NO: 2922658 - DNA, 25 bp, Homo sapien
gcccctggatgaggtaatactttgc

SEQ ID NO: 2922659 - DNA, 25 bp, Homo sapien
tccttgatttcttgccggttctgag

SEQ ID NO: 2922660 - DNA, 25 bp, Homo sapien
gttgcacacaggctggtaggagtcc

SEQ ID NO: 2922661 - DNA, 25 bp, Homo sapien
aggattcgatgagccgctcctcctc

SEQ ID NO: 2922662 - DNA, 25 bp, Homo sapien
ggatgttgcacacaggctggtagga

SEQ ID NO: 2922663 - DNA, 25 bp, Homo sapien
cttggtggaggattcgatgagccgc

SEQ ID NO: 2922664 - DNA, 25 bp, Homo sapien
gtgtaggaatacttgttgttgcttc

SEQ ID NO: 2922665 - DNA, 25 bp, Homo sapien
ctggtgtaggaatacttgttgttgc

SEQ ID NO: 2922666 - DNA, 25 bp, Homo sapien
taggaatacttgttgttgcttctgt

SEQ ID NO: 2922667 - DNA, 25 bp, Homo sapien
cttctgttgtacagcagcttcacca

SEQ ID NO: 2922668 - DNA, 25 bp, Homo sapien
tgcttcttctccgtggcatacacga

SEQ ID NO: 2922669 - DNA, 25 bp, Homo sapien
catacacgatggaggtacagcacac

SEQ ID NO: 2922670 - DNA, 25 bp, Homo sapien
tgacatccttgatgaagagcacgcg

SEQ ID NO: 2922671 - DNA, 25 bp, Homo sapien
gcttacggccctggccataaaagga

SEQ ID NO: 2922672 - DNA, 25 bp, Homo sapien
catagagtaggacgttgagtgtctc

SEQ ID NO: 2922673 - DNA, 25 bp, Homo sapien
cacggtcccgcagttcaaaggtctc

SEQ ID NO: 2922674 - DNA, 25 bp, Homo sapien
gagtgtctcctcatagattcgggcc

SEQ ID NO: 2922675 - DNA, 25 bp, Homo sapien
catcgtaagtgctgtagcgcttgac

SEQ ID NO: 2922676 - DNA, 25 bp, Homo sapien
gaaacagatcccacaggcatggaga

SEQ ID NO: 2922677 - DNA, 25 bp, Homo sapien
gaagccaagggtactcaagagaatc

SEQ ID NO: 2922678 - DNA, 25 bp, Homo sapien
gaactagtagctgatcaccaaggta

SEQ ID NO: 2922679 - DNA, 25 bp, Homo sapien
gaggtgggtcagtccatatgcccca

SEQ ID NO: 2922680 - DNA, 25 bp, Homo sapien
gcagctttaggtatggattgatgac

SEQ ID NO: 2922681 - DNA, 25 bp, Homo sapien
tgcatcttgccccaattcttaggat

SEQ ID NO: 2922682 - DNA, 25 bp, Homo sapien
aagccagtcgggtttcctggagcaa

SEQ ID NO: 2922683 - DNA, 25 bp, Homo sapien
tggagcaatgggtgtgccagccctc

SEQ ID NO: 2922684 - DNA, 25 bp, Homo sapien
gagcttgccattaactctgggccaa

SEQ ID NO: 2922685 - DNA, 25 bp, Homo sapien
tgcccagtgccttcggacattcagt

SEQ ID NO: 2922686 - DNA, 25 bp, Homo sapien
caagttacattcttagagggagcct

SEQ ID NO: 2922687 - DNA, 25 bp, Homo sapien
tgtatcatgctatgggagtgcctgc

SEQ ID NO: 2922688 - DNA, 25 bp, Homo sapien
tgagacggaaagaaaccaagcgttg

SEQ ID NO: 2922689 - DNA, 25 bp, Homo sapien
actggagctatcaccgcccttgtgc

SEQ ID NO: 2922690 - DNA, 25 bp, Homo sapien
aaagcacgcaccaatcgctcgcccg

SEQ ID NO: 2922691 - DNA, 25 bp, Homo sapien
cagctttcggggtagccgctctggc

SEQ ID NO: 2922692 - DNA, 25 bp, Homo sapien
tccggattcctacaagctcactatg

SEQ ID NO: 2922693 - DNA, 25 bp, Homo sapien
gagggaatcgatctggacacaagga

SEQ ID NO: 2922694 - DNA, 25 bp, Homo sapien
ctttctcaagggtgaattgggccta

SEQ ID NO: 2922695 - DNA, 25 bp, Homo sapien
caagcaaatttgtcatccacgagaa

SEQ ID NO: 2922696 - DNA, 25 bp, Homo sapien
taattgagcagtctaccctttgcac

SEQ ID NO: 2922697 - DNA, 25 bp, Homo sapien
tggaactcacatgctactctcaggc

SEQ ID NO: 2922698 - DNA, 25 bp, Homo sapien
gctggtctatgttacttctggcaaa

SEQ ID NO: 2922699 - DNA, 25 bp, Homo sapien
ggcccagcgaggagaaatgactcct

SEQ ID NO: 2922700 - DNA, 25 bp, Homo sapien
ggtgactttagctgtcagctctcaa

SEQ ID NO: 2922701 - DNA, 25 bp, Homo sapien
tatcctgccagtgttataactaaca

SEQ ID NO: 2922702 - DNA, 25 bp, Homo sapien
acaaacacaatgatccacgagctga

SEQ ID NO: 2922703 - DNA, 25 bp, Homo sapien
catgtaggtatctcccagtgctgcg

SEQ ID NO: 2922704 - DNA, 25 bp, Homo sapien
aacctctgggagatagatttcactg

SEQ ID NO: 2922705 - DNA, 25 bp, Homo sapien
tctgggagatagatttcactgcctt

SEQ ID NO: 2922706 - DNA, 25 bp, Homo sapien
ggagatagatttcactgccttctag

SEQ ID NO: 2922707 - DNA, 25 bp, Homo sapien
agatagatttcactgccttctagga

SEQ ID NO: 2922708 - DNA, 25 bp, Homo sapien
taagttcagtgtatcatggataagc

SEQ ID NO: 2922709 - DNA, 25 bp, Homo sapien
gataagcccaactcagtcaataacc

SEQ ID NO: 2922710 - DNA, 25 bp, Homo sapien
ctctcacaaacatatcccttacata

SEQ ID NO: 2922711 - DNA, 25 bp, Homo sapien
gatggggaggacaatatctggctcc

SEQ ID NO: 2922712 - DNA, 25 bp, Homo sapien
tgagaagaatgatattcccagcttg

SEQ ID NO: 2922713 - DNA, 25 bp, Homo sapien
gttccaggggtaaagcactgctaaa

SEQ ID NO: 2922714 - DNA, 25 bp, Homo sapien
cactgctaaaggtatcaggagaccc

SEQ ID NO: 2922715 - DNA, 25 bp, Homo sapien
agcacatcacaatcattggttccag

SEQ ID NO: 2922716 - DNA, 25 bp, Homo sapien
ccagccgggcaactagttctgggtt

SEQ ID NO: 2922717 - DNA, 25 bp, Homo sapien
tctccagccgggcaactagttctgg

SEQ ID NO: 2922718 - DNA, 25 bp, Homo sapien
gcgggtgatccgtttatattcctca

SEQ ID NO: 2922719 - DNA, 25 bp, Homo sapien
gtgacgttgcgggtgatccgtttat

SEQ ID NO: 2922720 - DNA, 25 bp, Homo sapien
catgccatagagtagtagggagccc

SEQ ID NO: 2922721 - DNA, 25 bp, Homo sapien
tagggagccctgtcagaagaaatgc

SEQ ID NO: 2922722 - DNA, 25 bp, Homo sapien
agagagcatccattgacagtctggc

SEQ ID NO: 2922723 - DNA, 25 bp, Homo sapien
gcatttcggagagaggacataggct

SEQ ID NO: 2922724 - DNA, 25 bp, Homo sapien
ggtcgctgagagtcccaccatgtct

SEQ ID NO: 2922725 - DNA, 25 bp, Homo sapien
tttcccaggtcgctgagagtcccac

SEQ ID NO: 2922726 - DNA, 25 bp, Homo sapien
caggtcgctgagagtcccaccatgt

SEQ ID NO: 2922727 - DNA, 25 bp, Homo sapien
cttgctttcccaggtcgctgagagt

SEQ ID NO: 2922728 - DNA, 25 bp, Homo sapien
taggaggtgctcttatctcatggct

SEQ ID NO: 2922729 - DNA, 25 bp, Homo sapien
caacaagcctgagtgtcatgaccca

SEQ ID NO: 2922730 - DNA, 25 bp, Homo sapien
tagttcaacattctctaggaggtgc

SEQ ID NO: 2922731 - DNA, 25 bp, Homo sapien
tttagaagcctgatctcctagtacc

SEQ ID NO: 2922732 - DNA, 25 bp, Homo sapien
tccaaggtaagtgcagacgaaggca

SEQ ID NO: 2922733 - DNA, 25 bp, Homo sapien
cgaaggcagcaaccaccgtgacaat

SEQ ID NO: 2922734 - DNA, 25 bp, Homo sapien
ccaccgtgacaatgaaattgaagat

SEQ ID NO: 2922735 - DNA, 25 bp, Homo sapien
gaagatatattggcttccaaggtaa

SEQ ID NO: 2922736 - DNA, 25 bp, Homo sapien
ttcaatacctaacctgtgcaaggca

SEQ ID NO: 2922737 - DNA, 25 bp, Homo sapien
taacctcccgtgactgctggaaagc

SEQ ID NO: 2922738 - DNA, 25 bp, Homo sapien
gaaagctctaatgctccccttatta

SEQ ID NO: 2922739 - DNA, 25 bp, Homo sapien
ggcataaatatctgttcaataccta

SEQ ID NO: 2922740 - DNA, 25 bp, Homo sapien
agacccaccacagaggcgacgatca

SEQ ID NO: 2922741 - DNA, 25 bp, Homo sapien
cgacgatcaatgcagctagcacccg

SEQ ID NO: 2922742 - DNA, 25 bp, Homo sapien
accacagaggcgacgatcaatgcag

SEQ ID NO: 2922743 - DNA, 25 bp, Homo sapien
attgcccgcaccatgacatacagct

SEQ ID NO: 2922744 - DNA, 25 bp, Homo sapien
gagtcggtgactgccaattggagcc

SEQ ID NO: 2922745 - DNA, 25 bp, Homo sapien
tcagaacaacataggcgtctttggc

SEQ ID NO: 2922746 - DNA, 25 bp, Homo sapien
gaagaggtactgatagaccaagacc

SEQ ID NO: 2922747 - DNA, 25 bp, Homo sapien
cagtatggtctacttctgggaaggc

SEQ ID NO: 2922748 - DNA, 25 bp, Homo sapien
aaaccatggtgtttgcggtctgcac

SEQ ID NO: 2922749 - DNA, 25 bp, Homo sapien
gcgatgtaactgtggcaactctgga

SEQ ID NO: 2922750 - DNA, 25 bp, Homo sapien
tggctagcagatgagagagctccct

SEQ ID NO: 2922751 - DNA, 25 bp, Homo sapien
gaagggtttaggactctgactgaca

SEQ ID NO: 2922752 - DNA, 25 bp, Homo sapien
tccaaagggaatcctgagcagacac

SEQ ID NO: 2922753 - DNA, 25 bp, Homo sapien
cactatgccggaggatgagtacacg

SEQ ID NO: 2922754 - DNA, 25 bp, Homo sapien
gctgctgcacagactatacggctga

SEQ ID NO: 2922755 - DNA, 25 bp, Homo sapien
tacacggtctatgacgatggcgagg

SEQ ID NO: 2922756 - DNA, 25 bp, Homo sapien
cagaaattaaatccagtccagtggg

SEQ ID NO: 2922757 - DNA, 25 bp, Homo sapien
gctgactccactgaagcccatgagg

SEQ ID NO: 2922758 - DNA, 25 bp, Homo sapien
gcccatgaggaagaaattggcccaa

SEQ ID NO: 2922759 - DNA, 25 bp, Homo sapien
aatcaggtgtttcatgccagtgggc

SEQ ID NO: 2922760 - DNA, 25 bp, Homo sapien
taccaggcaagggtgccggtcagaa

SEQ ID NO: 2922761 - DNA, 25 bp, Homo sapien
gctccggacgccgtagggtagagga

SEQ ID NO: 2922762 - DNA, 25 bp, Homo sapien
gagcgagcaggcgagggatggctcc

SEQ ID NO: 2922763 - DNA, 25 bp, Homo sapien
agtgggcgaaaggagagagcgagca

SEQ ID NO: 2922764 - DNA, 25 bp, Homo sapien
cgacacagcttgtaggcggagagaa

SEQ ID NO: 2922765 - DNA, 25 bp, Homo sapien
gccgtgggcccgacatggcgaagaa

SEQ ID NO: 2922766 - DNA, 25 bp, Homo sapien
cggagagaagcagcgtcaggaccat

SEQ ID NO: 2922767 - DNA, 25 bp, Homo sapien
catggcgaagaagcgacacagcttg

SEQ ID NO: 2922768 - DNA, 25 bp, Homo sapien
cgccgcccgcctgcttcagcgcgga

SEQ ID NO: 2922769 - DNA, 25 bp, Homo sapien
cccgcctgcttcagcgcggacaagg

SEQ ID NO: 2922770 - DNA, 25 bp, Homo sapien
gcccgcctgcttcagcgcggacaag

SEQ ID NO: 2922771 - DNA, 25 bp, Homo sapien
ccgcccgcctgcttcagcgcggaca

SEQ ID NO: 2922772 - DNA, 25 bp, Homo sapien
caggcctcctccaccagttggaaga

SEQ ID NO: 2922773 - DNA, 25 bp, Homo sapien
aggcctcctccaccagttggaagac

SEQ ID NO: 2922774 - DNA, 25 bp, Homo sapien
ccaggcctcctccaccagttggaag

SEQ ID NO: 2922775 - DNA, 25 bp, Homo sapien
caggcgcgcggcctgcacacgcgtc

SEQ ID NO: 2922776 - DNA, 25 bp, Homo sapien
aggcggatggcgtcgcacagaccct

SEQ ID NO: 2922777 - DNA, 25 bp, Homo sapien
ccatcgaggcggatggcgtcgcaca

SEQ ID NO: 2922778 - DNA, 25 bp, Homo sapien
acagcaggtcgaggccgccatcgag

SEQ ID NO: 2922779 - DNA, 25 bp, Homo sapien
tctccatccatagagccagggacgg

SEQ ID NO: 2922780 - DNA, 25 bp, Homo sapien
gaacgcaggcgcttaactgtccaca

SEQ ID NO: 2922781 - DNA, 25 bp, Homo sapien
caggctgacccctaacagagatgta

SEQ ID NO: 2922782 - DNA, 25 bp, Homo sapien
tcatgtctggcctgttgcaagaacc

SEQ ID NO: 2922783 - DNA, 25 bp, Homo sapien
tattgtgatagcaaccacgcacgtt

SEQ ID NO: 2922784 - DNA, 25 bp, Homo sapien
gactccacatagcaagcctgcaggg

SEQ ID NO: 2922785 - DNA, 25 bp, Homo sapien
cgtgcgtttcttgagaccagggaca

SEQ ID NO: 2922786 - DNA, 25 bp, Homo sapien
tctcggtaactctgaaccaggtgag

SEQ ID NO: 2922787 - DNA, 25 bp, Homo sapien
aggcagtgggggcttggttggtgaa

SEQ ID NO: 2922788 - DNA, 25 bp, Homo sapien
tgcttgcccagaagagccttctttg

SEQ ID NO: 2922789 - DNA, 25 bp, Homo sapien
aagagccttctttgagatgaggcag

SEQ ID NO: 2922790 - DNA, 25 bp, Homo sapien
gcagtgggggcttggttggtgaagg

SEQ ID NO: 2922791 - DNA, 25 bp, Homo sapien
gaaaactgtgacctaggctccttga

SEQ ID NO: 2922792 - DNA, 25 bp, Homo sapien
ccttgacaatgggtgcaatagcatc

SEQ ID NO: 2922793 - DNA, 25 bp, Homo sapien
catattctgttggacttctggtagt

SEQ ID NO: 2922794 - DNA, 25 bp, Homo sapien
gggccagatttgaagagccatattc

SEQ ID NO: 2922795 - DNA, 25 bp, Homo sapien
cacacgtcatcaagcccggctaatt

SEQ ID NO: 2922796 - DNA, 25 bp, Homo sapien
gacctcaggcaatctcccgcctggg

SEQ ID NO: 2922797 - DNA, 25 bp, Homo sapien
aggcacacgtcatcaagcccggcta

SEQ ID NO: 2922798 - DNA, 25 bp, Homo sapien
ttacaggcacacgtcatcaagcccg

SEQ ID NO: 2922799 - DNA, 25 bp, Homo sapien
aggcgtgcagcgaaagcagctcgtc

SEQ ID NO: 2922800 - DNA, 25 bp, Homo sapien
ccgaatgcttgaacatgtgctccaa

SEQ ID NO: 2922801 - DNA, 25 bp, Homo sapien
ttgttagtcgccaacaccgctactg

SEQ ID NO: 2922802 - DNA, 25 bp, Homo sapien
ggttcgcgttccttcgccaggttca

SEQ ID NO: 2922803 - DNA, 25 bp, Homo sapien
aagcggctccacgagcgccagcgtg

SEQ ID NO: 2922804 - DNA, 25 bp, Homo sapien
gccctggcttgtgtcgctggcgtcc

SEQ ID NO: 2922805 - DNA, 25 bp, Homo sapien
gggcgaagcggccagggtccagcga

SEQ ID NO: 2922806 - DNA, 25 bp, Homo sapien
tggcgtccaccagacagcgggcgaa

SEQ ID NO: 2922807 - DNA, 25 bp, Homo sapien
agcggttagagtcgagcaacggcac

SEQ ID NO: 2922808 - DNA, 25 bp, Homo sapien
cagcctcggcgcagaggtagaaagc

SEQ ID NO: 2922809 - DNA, 25 bp, Homo sapien
tagaaagccccgatgcactgcgcct

SEQ ID NO: 2922810 - DNA, 25 bp, Homo sapien
cactgcgcctccaagcggttagagt

SEQ ID NO: 2922811 - DNA, 25 bp, Homo sapien
cagcgccgacttagtgccattggta

SEQ ID NO: 2922812 - DNA, 25 bp, Homo sapien
tacttggagaaaccgatctgctgca

SEQ ID NO: 2922813 - DNA, 25 bp, Homo sapien
gaaaccaggcgtttcaggctctgga

SEQ ID NO: 2922814 - DNA, 25 bp, Homo sapien
tggatggcgccgatgtcgctgaaca

SEQ ID NO: 2922815 - DNA, 25 bp, Homo sapien
cggatgggacctagatcagagccga

SEQ ID NO: 2922816 - DNA, 25 bp, Homo sapien
cctaacggtggctgcgtacaggctc

SEQ ID NO: 2922817 - DNA, 25 bp, Homo sapien
gcacaagatgcaagggaaggaactg

SEQ ID NO: 2922818 - DNA, 25 bp, Homo sapien
tcagagccgagtgaccctaacggtg

SEQ ID NO: 2922819 - DNA, 25 bp, Homo sapien
ctcttgcgggtgatgcccgatttca

SEQ ID NO: 2922820 - DNA, 25 bp, Homo sapien
gatttcatgcccaggtcggtctgga

SEQ ID NO: 2922821 - DNA, 25 bp, Homo sapien
gaagcaggtcgccatccacctgctg

SEQ ID NO: 2922822 - DNA, 25 bp, Homo sapien
ctccgtgagccgcagaagcaggtcg

SEQ ID NO: 2922823 - DNA, 25 bp, Homo sapien
tgaggtccagactcggacgggctgt

SEQ ID NO: 2922824 - DNA, 25 bp, Homo sapien
ccacggaggagaagacgctgaggtc

SEQ ID NO: 2922825 - DNA, 25 bp, Homo sapien
tatttagacctagctggggtccggc

SEQ ID NO: 2922826 - DNA, 25 bp, Homo sapien
actcggacgggctgtgggcggaggg

SEQ ID NO: 2922827 - DNA, 25 bp, Homo sapien
tgctgcggtcgcacgtagaatagtt

SEQ ID NO: 2922828 - DNA, 25 bp, Homo sapien
tgctgctcagacacgcggtgcagca

SEQ ID NO: 2922829 - DNA, 25 bp, Homo sapien
ggtggatgccgcagtcttccagcag

SEQ ID NO: 2922830 - DNA, 25 bp, Homo sapien
ctgaccaggccgtaggtgtactggc

SEQ ID NO: 2922831 - DNA, 25 bp, Homo sapien
gcactgtgttctagggacattgata

SEQ ID NO: 2922832 - DNA, 25 bp, Homo sapien
gacattgatatgcatgcacttccag

SEQ ID NO: 2922833 - DNA, 25 bp, Homo sapien
aactccagacctgaacagccagctg

SEQ ID NO: 2922834 - DNA, 25 bp, Homo sapien
tctagggacattgatatgcatgcac

SEQ ID NO: 2922835 - DNA, 25 bp, Homo sapien
ggtatatcatcccttgtggacttag

SEQ ID NO: 2922836 - DNA, 25 bp, Homo sapien
tcccttgtggacttagtccccagtc

SEQ ID NO: 2922837 - DNA, 25 bp, Homo sapien
tatcatcccttgtggacttagtccc

SEQ ID NO: 2922838 - DNA, 25 bp, Homo sapien
tgtggacttagtccccagtccacca

SEQ ID NO: 2922839 - DNA, 25 bp, Homo sapien
gaaggtggcccctccgcatcactca

SEQ ID NO: 2922840 - DNA, 25 bp, Homo sapien
gtgggcaataggcagcatggtgaag

SEQ ID NO: 2922841 - DNA, 25 bp, Homo sapien
ctgaagtgggcaataggcagcatgg

SEQ ID NO: 2922842 - DNA, 25 bp, Homo sapien
catggtgaaggtggcccctccgcat

SEQ ID NO: 2922843 - DNA, 25 bp, Homo sapien
cccactgggtttgccaccagtacag

SEQ ID NO: 2922844 - DNA, 25 bp, Homo sapien
tttgccaccagtacagggcagcggg

SEQ ID NO: 2922845 - DNA, 25 bp, Homo sapien
gctgatgaagacatctggagtgtcc

SEQ ID NO: 2922846 - DNA, 25 bp, Homo sapien
gaacctgagttccggcggtagctga

SEQ ID NO: 2922847 - DNA, 25 bp, Homo sapien
tccagtgctccaggtgatagcacca

SEQ ID NO: 2922848 - DNA, 25 bp, Homo sapien
gatagcaccaacacaaagttgcggg

SEQ ID NO: 2922849 - DNA, 25 bp, Homo sapien
tgagtttgtcctcgaacttgcctgc

SEQ ID NO: 2922850 - DNA, 25 bp, Homo sapien
tggtcttgcatgcacttgtccagtg

SEQ ID NO: 2922851 - DNA, 25 bp, Homo sapien
caccaacttgtatgcgatctagtca

SEQ ID NO: 2922852 - DNA, 25 bp, Homo sapien
tcacaggccatggtcgctcatagag

SEQ ID NO: 2922853 - DNA, 25 bp, Homo sapien
tcttttcgttgacaccttgatgctc

SEQ ID NO: 2922854 - DNA, 25 bp, Homo sapien
acccctgtggcaagcaagatgtttg

SEQ ID NO: 2922855 - DNA, 25 bp, Homo sapien
tccagtgctttaagcacaggtcttc

SEQ ID NO: 2922856 - DNA, 25 bp, Homo sapien
gggcttgactccacactccatgtgg

SEQ ID NO: 2922857 - DNA, 25 bp, Homo sapien
tgcctgccacgtgctctgggttatc

SEQ ID NO: 2922858 - DNA, 25 bp, Homo sapien
aaaccaggcctagtactcagcccct

SEQ ID NO: 2922859 - DNA, 25 bp, Homo sapien
ccaagcattcttgggaagtggagcc

SEQ ID NO: 2922860 - DNA, 25 bp, Homo sapien
gccatctgctgggacgacaaggggt

SEQ ID NO: 2922861 - DNA, 25 bp, Homo sapien
ctgggacgacaaggggtgccaagca

SEQ ID NO: 2922862 - DNA, 25 bp, Homo sapien
gtgccaagcattcttgggaagtgga

SEQ ID NO: 2922863 - DNA, 25 bp, Homo sapien
gccatcaatgatgggcacaatgttc

SEQ ID NO: 2922864 - DNA, 25 bp, Homo sapien
gggctcaggccactcgaagccatca

SEQ ID NO: 2922865 - DNA, 25 bp, Homo sapien
gcacaatgttcttgccgcagcttaa

SEQ ID NO: 2922866 - DNA, 25 bp, Homo sapien
gataccgttgaaagtaagcacagcc

SEQ ID NO: 2922867 - DNA, 25 bp, Homo sapien
tgcccacactctgcctgtcatggtg

SEQ ID NO: 2922868 - DNA, 25 bp, Homo sapien
ccacactctgcctgtcatggtgatt

SEQ ID NO: 2922869 - DNA, 25 bp, Homo sapien
cccacactctgcctgtcatggtgat

SEQ ID NO: 2922870 - DNA, 25 bp, Homo sapien
gcccacactctgcctgtcatggtga

SEQ ID NO: 2922871 - DNA, 25 bp, Homo sapien
agcaccctccaaactggtgtcagag

SEQ ID NO: 2922872 - DNA, 25 bp, Homo sapien
ctgcagatgagtcccgggaggagcg

SEQ ID NO: 2922873 - DNA, 25 bp, Homo sapien
ggtgcagcaccctccaaactggtgt

SEQ ID NO: 2922874 - DNA, 25 bp, Homo sapien
gcagcaccctccaaactggtgtcag

SEQ ID NO: 2922875 - DNA, 25 bp, Homo sapien
ggagaagctgccctaagtgacaacc

SEQ ID NO: 2922876 - DNA, 25 bp, Homo sapien
actgagtgattacagggcaaggcca

SEQ ID NO: 2922877 - DNA, 25 bp, Homo sapien
cctttgctcagaatacagtgcccag

SEQ ID NO: 2922878 - DNA, 25 bp, Homo sapien
tttcctaagaagagcccaggttgtc

SEQ ID NO: 2922879 - DNA, 25 bp, Homo sapien
ggtgctttcttaccctctgaaccca

SEQ ID NO: 2922880 - DNA, 25 bp, Homo sapien
tggagcctgggtttattggagggtg

SEQ ID NO: 2922881 - DNA, 25 bp, Homo sapien
ctgggtttattggagggtgctttct

SEQ ID NO: 2922882 - DNA, 25 bp, Homo sapien
cttgcggggaaagagccttcagcag

SEQ ID NO: 2922883 - DNA, 25 bp, Homo sapien
caagaactaggagtcacctggccag

SEQ ID NO: 2922884 - DNA, 25 bp, Homo sapien
cagaactgtgttaaagggaaggcca

SEQ ID NO: 2922885 - DNA, 25 bp, Homo sapien
tggcactggccaagacagactctgg

SEQ ID NO: 2922886 - DNA, 25 bp, Homo sapien
aatatggccctttcggactccagag

SEQ ID NO: 2922887 - DNA, 25 bp, Homo sapien
tcattcatgagagctagcaggtggc

SEQ ID NO: 2922888 - DNA, 25 bp, Homo sapien
tgtcatccgggctaaactctccaag

SEQ ID NO: 2922889 - DNA, 25 bp, Homo sapien
tcaggatcagagagggtaagtaccc

SEQ ID NO: 2922890 - DNA, 25 bp, Homo sapien
taccaccgggctgaatggaagcagt

SEQ ID NO: 2922891 - DNA, 25 bp, Homo sapien
tggctgctagctttgcgtccgtggc

SEQ ID NO: 2922892 - DNA, 25 bp, Homo sapien
gacttcggtggccttctggctgcta

SEQ ID NO: 2922893 - DNA, 25 bp, Homo sapien
tccacgtcggctacttcgtgctggg

SEQ ID NO: 2922894 - DNA, 25 bp, Homo sapien
cgtgctgggtcgcatcctttgtgcc

SEQ ID NO: 2922895 - DNA, 25 bp, Homo sapien
gagcttggagcgacagtgtgggccg

SEQ ID NO: 2922896 - DNA, 25 bp, Homo sapien
tctacatgaacgtgggcggcttcct

SEQ ID NO: 2922897 - DNA, 25 bp, Homo sapien
tcttctcgtccaccctgctgggagc

SEQ ID NO: 2922898 - DNA, 25 bp, Homo sapien
cactggaccctctacatgaacgtgg

SEQ ID NO: 2922899 - DNA, 25 bp, Homo sapien
cagctctgccttgagtacccgatga

SEQ ID NO: 2922900 - DNA, 25 bp, Homo sapien
tagagttatcgggagaccaacgcac

SEQ ID NO: 2922901 - DNA, 25 bp, Homo sapien
gtttcctcagcggtagatagcgatg

SEQ ID NO: 2922902 - DNA, 25 bp, Homo sapien
tgttacagcgcagaacatcagcagc

SEQ ID NO: 2922903 - DNA, 25 bp, Homo sapien
ttttcacaccagacattggaaggga

SEQ ID NO: 2922904 - DNA, 25 bp, Homo sapien
gaagggaagtttgcaatcagaggtt

SEQ ID NO: 2922905 - DNA, 25 bp, Homo sapien
tctgagcatgtctacgttcccggag

SEQ ID NO: 2922906 - DNA, 25 bp, Homo sapien
gcaagcctgtaaggatagggtttct

SEQ ID NO: 2922907 - DNA, 25 bp, Homo sapien
gcatgggttgcacacaactcggtgt

SEQ ID NO: 2922908 - DNA, 25 bp, Homo sapien
ggcatgggttgcacacaactcggtg

SEQ ID NO: 2922909 - DNA, 25 bp, Homo sapien
ttggcatgggttgcacacaactcgg

SEQ ID NO: 2922910 - DNA, 25 bp, Homo sapien
tggcatgggttgcacacaactcggt

SEQ ID NO: 2922911 - DNA, 25 bp, Homo sapien
tgtcgtcaagatgcttccctccttg

SEQ ID NO: 2922912 - DNA, 25 bp, Homo sapien
tgcagccttgcaggaactgtcgtca

SEQ ID NO: 2922913 - DNA, 25 bp, Homo sapien
gggcaggcatgcaacgcaggccggc

SEQ ID NO: 2922914 - DNA, 25 bp, Homo sapien
ctttcgatagcagcatctcgctctg

SEQ ID NO: 2922915 - DNA, 25 bp, Homo sapien
gtatacagctgggtccctatctgcc

SEQ ID NO: 2922916 - DNA, 25 bp, Homo sapien
cagctgggtccctatctgccggttg

SEQ ID NO: 2922917 - DNA, 25 bp, Homo sapien
agatgtatacagctgggtccctatc

SEQ ID NO: 2922918 - DNA, 25 bp, Homo sapien
agctgggtccctatctgccggttgg

SEQ ID NO: 2922919 - DNA, 25 bp, Homo sapien
taaggcactagtcctatcctgatgc

SEQ ID NO: 2922920 - DNA, 25 bp, Homo sapien
ccccagggcatgattgaaaccacag

SEQ ID NO: 2922921 - DNA, 25 bp, Homo sapien
tactcttgcactttgtggacccatt

SEQ ID NO: 2922922 - DNA, 25 bp, Homo sapien
acatttttcttgtacctacgagagc

SEQ ID NO: 2922923 - DNA, 25 bp, Homo sapien
gcatctagctccaagactaggatct

SEQ ID NO: 2922924 - DNA, 25 bp, Homo sapien
gatctctgggtaatgtcccattttc

SEQ ID NO: 2922925 - DNA, 25 bp, Homo sapien
tagctccaagactaggatctctggg

SEQ ID NO: 2922926 - DNA, 25 bp, Homo sapien
gactaggatctctgggtaatgtccc

SEQ ID NO: 2922927 - DNA, 25 bp, Homo sapien
agacctatttggagttggaggcaca

SEQ ID NO: 2922928 - DNA, 25 bp, Homo sapien
agaggcagaagttctctatttctcc

SEQ ID NO: 2922929 - DNA, 25 bp, Homo sapien
aagacctatttggagttggaggcac

SEQ ID NO: 2922930 - DNA, 25 bp, Homo sapien
agagaggcagaagttctctatttct

SEQ ID NO: 2922931 - DNA, 25 bp, Homo sapien
gacagatcgaccacacatgactgac

SEQ ID NO: 2922932 - DNA, 25 bp, Homo sapien
tgacagatggatcccctggtcccct

SEQ ID NO: 2922933 - DNA, 25 bp, Homo sapien
gatcgaccacacatgactgacagat

SEQ ID NO: 2922934 - DNA, 25 bp, Homo sapien
tcgaccacacatgactgacagatgg

SEQ ID NO: 2922935 - DNA, 25 bp, Homo sapien
gtgtgcagcactccatgtgcccagt

SEQ ID NO: 2922936 - DNA, 25 bp, Homo sapien
gctcaatgcggaccgccacgtgtgc

SEQ ID NO: 2922937 - DNA, 25 bp, Homo sapien
cgccacgtgtgcagcactccatgtg

SEQ ID NO: 2922938 - DNA, 25 bp, Homo sapien
cttgggtgggtagctcaatgcggac

SEQ ID NO: 2922939 - DNA, 25 bp, Homo sapien
ttggtggtaaggatttgtccttggc

SEQ ID NO: 2922940 - DNA, 25 bp, Homo sapien
tggtaaggatttgtccttggcatgc

SEQ ID NO: 2922941 - DNA, 25 bp, Homo sapien
ggatttgtccttggcatgcccccag

SEQ ID NO: 2922942 - DNA, 25 bp, Homo sapien
ttgtccttggcatgcccccagcggg

SEQ ID NO: 2922943 - DNA, 25 bp, Homo sapien
catcttgatgacactgttcccaagc

SEQ ID NO: 2922944 - DNA, 25 bp, Homo sapien
gctctggtttttggcacagaccata

SEQ ID NO: 2922945 - DNA, 25 bp, Homo sapien
ctgctctggtttttggcacagacca

SEQ ID NO: 2922946 - DNA, 25 bp, Homo sapien
tgccacccttgcctgatattgtggc

SEQ ID NO: 2922947 - DNA, 25 bp, Homo sapien
tctcctgggagaacttgccgagcgc

SEQ ID NO: 2922948 - DNA, 25 bp, Homo sapien
ctttctcctgggagaacttgccgag

SEQ ID NO: 2922949 - DNA, 25 bp, Homo sapien
cctgggagaacttgccgagcgccgg

SEQ ID NO: 2922950 - DNA, 25 bp, Homo sapien
gctttctcctgggagaacttgccga

SEQ ID NO: 2922951 - DNA, 25 bp, Homo sapien
gagatgccggactcgaactcgtccg

SEQ ID NO: 2922952 - DNA, 25 bp, Homo sapien
gcgataaagacgacatgcttcccac

SEQ ID NO: 2922953 - DNA, 25 bp, Homo sapien
cttctcgccattgggcttcacaatc

SEQ ID NO: 2922954 - DNA, 25 bp, Homo sapien
tgacgcggattctcttgaccacaat

SEQ ID NO: 2922955 - DNA, 25 bp, Homo sapien
aattgaaactctgggaattcaaaat

SEQ ID NO: 2922956 - DNA, 25 bp, Homo sapien
actctgggaattcaaaattaacatc

SEQ ID NO: 2922957 - DNA, 25 bp, Homo sapien
aactctgggaattcaaaattaacat

SEQ ID NO: 2922958 - DNA, 25 bp, Homo sapien
tgaaactctgggaattcaaaattaa

SEQ ID NO: 2922959 - DNA, 25 bp, Homo sapien
agctgggtaacagaaggaccaaaga

SEQ ID NO: 2922960 - DNA, 25 bp, Homo sapien
gcaagggctgctacagccactgcct

SEQ ID NO: 2922961 - DNA, 25 bp, Homo sapien
gagcagcaagggctgctacagccac

SEQ ID NO: 2922962 - DNA, 25 bp, Homo sapien
aggagctgggtaacagaaggaccaa

SEQ ID NO: 2922963 - DNA, 25 bp, Homo sapien
gagcgataggcccacagggcctgcc

SEQ ID NO: 2922964 - DNA, 25 bp, Homo sapien
cagcaggagaatgggcacgaagaac

SEQ ID NO: 2922965 - DNA, 25 bp, Homo sapien
tcaggtaggagcgataggcccacag

SEQ ID NO: 2922966 - DNA, 25 bp, Homo sapien
gaagaacacgatcaggtaggagcga

SEQ ID NO: 2922967 - DNA, 25 bp, Homo sapien
acacagtaggtagatcagctccatc

SEQ ID NO: 2922968 - DNA, 25 bp, Homo sapien
cagcccatctcagccgccatggagc

SEQ ID NO: 2922969 - DNA, 25 bp, Homo sapien
ccagtccagggctaggtgggcacac

SEQ ID NO: 2922970 - DNA, 25 bp, Homo sapien
ccttgcatcttgttgatggaactgg

SEQ ID NO: 2922971 - DNA, 25 bp, Homo sapien
taaagatgcagaccgcctgcagcca

SEQ ID NO: 2922972 - DNA, 25 bp, Homo sapien
tcctccacagacttagcccttgaat

SEQ ID NO: 2922973 - DNA, 25 bp, Homo sapien
tgctcttaaagatgcagaccgcctg

SEQ ID NO: 2922974 - DNA, 25 bp, Homo sapien
gacttagcccttgaatccacaggtg

SEQ ID NO: 2922975 - DNA, 25 bp, Homo sapien
cttcattgatttgcacaccttgatg

SEQ ID NO: 2922976 - DNA, 25 bp, Homo sapien
ttgttctcattcaagtgtccttcat

SEQ ID NO: 2922977 - DNA, 25 bp, Homo sapien
gttctcattcaagtgtccttcattg

SEQ ID NO: 2922978 - DNA, 25 bp, Homo sapien
gatttgcacaccttgatgtgaatga

SEQ ID NO: 2922979 - DNA, 25 bp, Homo sapien
ttgctctcagaggtaataactattg

SEQ ID NO: 2922980 - DNA, 25 bp, Homo sapien
aataactattgttcacatttcacag

SEQ ID NO: 2922981 - DNA, 25 bp, Homo sapien
gaggatgactttgtgccaggcgtca

SEQ ID NO: 2922982 - DNA, 25 bp, Homo sapien
tgccaggcgtcatattctatgtgct

SEQ ID NO: 2922983 - DNA, 25 bp, Homo sapien
ccagaagagcgccatgaggatgatg

SEQ ID NO: 2922984 - DNA, 25 bp, Homo sapien
gatgatggcatacgcgcagtaggcc

SEQ ID NO: 2922985 - DNA, 25 bp, Homo sapien
tgaggatgatggcatacgcgcagta

SEQ ID NO: 2922986 - DNA, 25 bp, Homo sapien
ggcagggcctcagtgcaccagaaga

SEQ ID NO: 2922987 - DNA, 25 bp, Homo sapien
cccatcatagggaacaggattaagg

SEQ ID NO: 2922988 - DNA, 25 bp, Homo sapien
tccacgatgcccatcatagggaaca

SEQ ID NO: 2922989 - DNA, 25 bp, Homo sapien
tcatagggaacaggattaaggggaa

SEQ ID NO: 2922990 - DNA, 25 bp, Homo sapien
tcagaggcatccacgatgcccatca

SEQ ID NO: 2922991 - DNA, 25 bp, Homo sapien
ctggatggaaatggtctctgaatga

SEQ ID NO: 2922992 - DNA, 25 bp, Homo sapien
attcccctgggctctcgaaactgga

SEQ ID NO: 2922993 - DNA, 25 bp, Homo sapien
attcccacagactggcattcccctg

SEQ ID NO: 2922994 - DNA, 25 bp, Homo sapien
ctctcgaaactggatggaaatggtc

SEQ ID NO: 2922995 - DNA, 25 bp, Homo sapien
ccccgaggttatgggatgcagtcac

SEQ ID NO: 2922996 - DNA, 25 bp, Homo sapien
cacggtgcccccgaggttatgggat

SEQ ID NO: 2922997 - DNA, 25 bp, Homo sapien
gaggttatgggatgcagtcactgac

SEQ ID NO: 2922998 - DNA, 25 bp, Homo sapien
ctgagcggcgggaagaccctggagt

SEQ ID NO: 2922999 - DNA, 25 bp, Homo sapien
ggttccagtgttccaccgcgatggc

SEQ ID NO: 2923000 - DNA, 25 bp, Homo sapien
gggcaggccgcaccccaacgatgag

SEQ ID NO: 2923001 - DNA, 25 bp, Homo sapien
agcagccccccgaagaacaggaggt

SEQ ID NO: 2923002 - DNA, 25 bp, Homo sapien
acacggagggcgatgcgtttatgca

SEQ ID NO: 2923003 - DNA, 25 bp, Homo sapien
gacttggttcctggagctcgaaggt

SEQ ID NO: 2923004 - DNA, 25 bp, Homo sapien
tccaggacggcatgtgcgatgggca

SEQ ID NO: 2923005 - DNA, 25 bp, Homo sapien
acggcatgtgcgatgggcaccatca

SEQ ID NO: 2923006 - DNA, 25 bp, Homo sapien
acatggacaggaaggccgtgaccag

SEQ ID NO: 2923007 - DNA, 25 bp, Homo sapien
ctcttcttgctatggtgaccaagca

SEQ ID NO: 2923008 - DNA, 25 bp, Homo sapien
cttgagagagggaaacgaggattac

SEQ ID NO: 2923009 - DNA, 25 bp, Homo sapien
tgggagcacccttggacactctatg

SEQ ID NO: 2923010 - DNA, 25 bp, Homo sapien
gaccttggactgttcacctagactc

SEQ ID NO: 2923011 - DNA, 25 bp, Homo sapien
ttgtctgtgaacagcccagaccggg

SEQ ID NO: 2923012 - DNA, 25 bp, Homo sapien
cttgtctgtgaacagcccagaccgg

SEQ ID NO: 2923013 - DNA, 25 bp, Homo sapien
tgtctgtgaacagcccagaccgggg

SEQ ID NO: 2923014 - DNA, 25 bp, Homo sapien
gcttctggctgagatgtgccctccc

SEQ ID NO: 2923015 - DNA, 25 bp, Homo sapien
tgcttctggctgagatgtgccctcc

SEQ ID NO: 2923016 - DNA, 25 bp, Homo sapien
cctccgaagaggcagacgtgacagg

SEQ ID NO: 2923017 - DNA, 25 bp, Homo sapien
gtgccctcccctccgaagaggcaga

SEQ ID NO: 2923018 - DNA, 25 bp, Homo sapien
ctggcggagtagcacacgcacaggc

SEQ ID NO: 2923019 - DNA, 25 bp, Homo sapien
gttgggtgcggtgccagtcagcgtg

SEQ ID NO: 2923020 - DNA, 25 bp, Homo sapien
cggagtagcacacgcacaggctcat

SEQ ID NO: 2923021 - DNA, 25 bp, Homo sapien
cggtgccagtcagcgtggcgatgcc

SEQ ID NO: 2923022 - DNA, 25 bp, Homo sapien
agaggatctgcagccacaaccaggc

SEQ ID NO: 2923023 - DNA, 25 bp, Homo sapien
gggaaggcgaagctgaaccaggagg

SEQ ID NO: 2923024 - DNA, 25 bp, Homo sapien
aggatctgcagccacaaccaggcca

SEQ ID NO: 2923025 - DNA, 25 bp, Homo sapien
cgaagttcaccacgttgccgttttg

SEQ ID NO: 2923026 - DNA, 25 bp, Homo sapien
cccttggcattgggaaaagccaaat

SEQ ID NO: 2923027 - DNA, 25 bp, Homo sapien
aaaagccaaattgccccagccaaga

SEQ ID NO: 2923028 - DNA, 25 bp, Homo sapien
gcctgtgctcggtctggatgacgca

SEQ ID NO: 2923029 - DNA, 25 bp, Homo sapien
gatgacgaataggatgctgatggcc

SEQ ID NO: 2923030 - DNA, 25 bp, Homo sapien
tggccactgtcccatcggacaccat

SEQ ID NO: 2923031 - DNA, 25 bp, Homo sapien
cataattatgccgatgaagatggcc

SEQ ID NO: 2923032 - DNA, 25 bp, Homo sapien
gatgaacataattatgccgatgaag

SEQ ID NO: 2923033 - DNA, 25 bp, Homo sapien
gagggtatgatgaacataattatgc

SEQ ID NO: 2923034 - DNA, 25 bp, Homo sapien
gcatcttctggttcaccgtcttcca

SEQ ID NO: 2923035 - DNA, 25 bp, Homo sapien
cacccagcaataacacgatattcca

SEQ ID NO: 2923036 - DNA, 25 bp, Homo sapien
accgtcttccagtcgaggaggccaa

SEQ ID NO: 2923037 - DNA, 25 bp, Homo sapien
taacacgatattccacggcatcttc

SEQ ID NO: 2923038 - DNA, 25 bp, Homo sapien
tggggtcagcttgtttcccagccac

SEQ ID NO: 2923039 - DNA, 25 bp, Homo sapien
gcaggaagatcgtagtggtggccac

SEQ ID NO: 2923040 - DNA, 25 bp, Homo sapien
cacgttgctagtgcactcggtgaag

SEQ ID NO: 2923041 - DNA, 25 bp, Homo sapien
gaggatgatggcaatggctggagct

SEQ ID NO: 2923042 - DNA, 25 bp, Homo sapien
tgaggtccccgaaagagaagacgat

SEQ ID NO: 2923043 - DNA, 25 bp, Homo sapien
catatccaacactttgaggtccccg

SEQ ID NO: 2923044 - DNA, 25 bp, Homo sapien
catgacgtagagagggtggaggcag

SEQ ID NO: 2923045 - DNA, 25 bp, Homo sapien
cccgaaagagaagacgatggcattg

SEQ ID NO: 2923046 - DNA, 25 bp, Homo sapien
ctgtggtgttggactgtgcccagga

SEQ ID NO: 2923047 - DNA, 25 bp, Homo sapien
gctgttgatggccagtgcgatgatc

SEQ ID NO: 2923048 - DNA, 25 bp, Homo sapien
gatcaggactccaatgatgttgagg

SEQ ID NO: 2923049 - DNA, 25 bp, Homo sapien
tgatgttgaggaggaatcctgcccg

SEQ ID NO: 2923050 - DNA, 25 bp, Homo sapien
cttggtgtggtggtgttggccaggc

SEQ ID NO: 2923051 - DNA, 25 bp, Homo sapien
ctaggggcttggtgtggtggtgttg

SEQ ID NO: 2923052 - DNA, 25 bp, Homo sapien
gggcttggtgtggtggtgttggcca

SEQ ID NO: 2923053 - DNA, 25 bp, Homo sapien
aggggcttggtgtggtggtgttggc

SEQ ID NO: 2923054 - DNA, 25 bp, Homo sapien
gcaagtaagtctggtcactaagctg

SEQ ID NO: 2923055 - DNA, 25 bp, Homo sapien
catacctaggatcatgtgcatgcac

SEQ ID NO: 2923056 - DNA, 25 bp, Homo sapien
cagacacgcaagagattatgtacac

SEQ ID NO: 2923057 - DNA, 25 bp, Homo sapien
tatgtacacacgtgcctttcagcct

SEQ ID NO: 2923058 - DNA, 25 bp, Homo sapien
tgcttctggcgggtgagatgaactt

SEQ ID NO: 2923059 - DNA, 25 bp, Homo sapien
atgcaaattaattcaggggccaagg

SEQ ID NO: 2923060 - DNA, 25 bp, Homo sapien
tgcaaattaattcaggggccaaggg

SEQ ID NO: 2923061 - DNA, 25 bp, Homo sapien
agtgaagcaggtcggcgtgggggcc

SEQ ID NO: 2923062 - DNA, 25 bp, Homo sapien
tcagtgaagcaggtcggcgtggggg

SEQ ID NO: 2923063 - DNA, 25 bp, Homo sapien
gctcagtgaagcaggtcggcgtggg

SEQ ID NO: 2923064 - DNA, 25 bp, Homo sapien
ctgctcagtgaagcaggtcggcgtg

SEQ ID NO: 2923065 - DNA, 25 bp, Homo sapien
cttaatggtttctgttgctggctgc

SEQ ID NO: 2923066 - DNA, 25 bp, Homo sapien
ggtttctgttgctggctgcggcagc

SEQ ID NO: 2923067 - DNA, 25 bp, Homo sapien
aatggtttctgttgctggctgcggc

SEQ ID NO: 2923068 - DNA, 25 bp, Homo sapien
tttctgttgctggctgcggcagcat

SEQ ID NO: 2923069 - DNA, 25 bp, Homo sapien
tgtggagatgtgtatcctctggaga

SEQ ID NO: 2923070 - DNA, 25 bp, Homo sapien
atgtgtatcctctggagatgtgtac

SEQ ID NO: 2923071 - DNA, 25 bp, Homo sapien
gagatgtgtatcctctggagatgtg

SEQ ID NO: 2923072 - DNA, 25 bp, Homo sapien
ttctgtggagatgtgtatcctctgg

SEQ ID NO: 2923073 - DNA, 25 bp, Homo sapien
tgtgtaccctatggaggtatggatc

SEQ ID NO: 2923074 - DNA, 25 bp, Homo sapien
taccccgtgatggtatggatcctgt

SEQ ID NO: 2923075 - DNA, 25 bp, Homo sapien
gtaccccgtgatggtatggatcctg

SEQ ID NO: 2923076 - DNA, 25 bp, Homo sapien
cctgtggaagtgtgtaccctgtgga

SEQ ID NO: 2923077 - DNA, 25 bp, Homo sapien
gatgtgtacccttttgaggtatgga

SEQ ID NO: 2923078 - DNA, 25 bp, Homo sapien
gaggtgtgtaccctgtggaagtgtg

SEQ ID NO: 2923079 - DNA, 25 bp, Homo sapien
tatggatcctgcggaggtgtgtacc

SEQ ID NO: 2923080 - DNA, 25 bp, Homo sapien
cctgtggaagtgtgtaccctgtgga

SEQ ID NO: 2923081 - DNA, 25 bp, Homo sapien
tgtgtacccagtggaggcatgtacc

SEQ ID NO: 2923082 - DNA, 25 bp, Homo sapien
gatcctgtggaggtgtgtatcctgt

SEQ ID NO: 2923083 - DNA, 25 bp, Homo sapien
taccctgtggaggtgtgtaccctat

SEQ ID NO: 2923084 - DNA, 25 bp, Homo sapien
taccctgtggaggtgtgtaccctgt

SEQ ID NO: 2923085 - DNA, 25 bp, Homo sapien
tggccgtaacgggacaccacagcgg

SEQ ID NO: 2923086 - DNA, 25 bp, Homo sapien
cgggacaccacagcggagcaggcat

SEQ ID NO: 2923087 - DNA, 25 bp, Homo sapien
gccgagctggccgtaacgggacacc

SEQ ID NO: 2923088 - DNA, 25 bp, Homo sapien
agggaagcgccgagctggccgtaac

SEQ ID NO: 2923089 - DNA, 25 bp, Homo sapien
cactcggcaatgctaaatgtggcgt

SEQ ID NO: 2923090 - DNA, 25 bp, Homo sapien
tgctcactcggcaatgctaaatgtg

SEQ ID NO: 2923091 - DNA, 25 bp, Homo sapien
tcggcaatgctaaatgtggcgtgac

SEQ ID NO: 2923092 - DNA, 25 bp, Homo sapien
tcactcggcaatgctaaatgtggcg

SEQ ID NO: 2923093 - DNA, 25 bp, Homo sapien
tccccttggcgctcgccctccagtc

SEQ ID NO: 2923094 - DNA, 25 bp, Homo sapien
tgaggtccccttggcgctcgccctc

SEQ ID NO: 2923095 - DNA, 25 bp, Homo sapien
aggtccccttggcgctcgccctcca

SEQ ID NO: 2923096 - DNA, 25 bp, Homo sapien
gtccccttggcgctcgccctccagt

SEQ ID NO: 2923097 - DNA, 25 bp, Homo sapien
aaatgacgagcagctgaagccggca

SEQ ID NO: 2923098 - DNA, 25 bp, Homo sapien
tcctcatggaaaggccgcttgtacg

SEQ ID NO: 2923099 - DNA, 25 bp, Homo sapien
ctggagggccgtcggacacaaatga

SEQ ID NO: 2923100 - DNA, 25 bp, Homo sapien
caaagccaaagccaggatacttgtc

SEQ ID NO: 2923101 - DNA, 25 bp, Homo sapien
ctgggaggagcagtacatatgctgc

SEQ ID NO: 2923102 - DNA, 25 bp, Homo sapien
actgggggcttgactttgacctctg

SEQ ID NO: 2923103 - DNA, 25 bp, Homo sapien
aggctggtagcagaacatcccagca

SEQ ID NO: 2923104 - DNA, 25 bp, Homo sapien
cagaactgggggcttgactttgacc

SEQ ID NO: 2923105 - DNA, 25 bp, Homo sapien
agcaggcccacttgccccagaccca

SEQ ID NO: 2923106 - DNA, 25 bp, Homo sapien
tgggggaagcaggcccacttgcccc

SEQ ID NO: 2923107 - DNA, 25 bp, Homo sapien
ggaagcaggcccacttgccccagac

SEQ ID NO: 2923108 - DNA, 25 bp, Homo sapien
ctgggggaagcaggcccacttgccc

SEQ ID NO: 2923109 - DNA, 25 bp, Homo sapien
tgctcccagtgcctgtgcatctccc

SEQ ID NO: 2923110 - DNA, 25 bp, Homo sapien
cagctgggccggaagcaggatgtcc

SEQ ID NO: 2923111 - DNA, 25 bp, Homo sapien
tgggcgtttgctgggcactgccacc

SEQ ID NO: 2923112 - DNA, 25 bp, Homo sapien
cggaagcaggatgtccagcctgggc

SEQ ID NO: 2923113 - DNA, 25 bp, Homo sapien
ttcaggatctcagaggccttaaaac

SEQ ID NO: 2923114 - DNA, 25 bp, Homo sapien
tcaggatctcagaggccttaaaacc

SEQ ID NO: 2923115 - DNA, 25 bp, Homo sapien
gcctggggtgccattcgctggtact

SEQ ID NO: 2923116 - DNA, 25 bp, Homo sapien
tggtactgatagtgtgaggagccca

SEQ ID NO: 2923117 - DNA, 25 bp, Homo sapien
ctgtaggaatagatgggttttggga

SEQ ID NO: 2923118 - DNA, 25 bp, Homo sapien
cattcgctggtactgatagtgtgag

SEQ ID NO: 2923119 - DNA, 25 bp, Homo sapien
taaaattgtagatctcgctgacggg

SEQ ID NO: 2923120 - DNA, 25 bp, Homo sapien
gaaagtgctccgtcataaaattgta

SEQ ID NO: 2923121 - DNA, 25 bp, Homo sapien
tactgttcttaagggccatgaagat

SEQ ID NO: 2923122 - DNA, 25 bp, Homo sapien
cgctgacgggaaggctcccagtttt

SEQ ID NO: 2923123 - DNA, 25 bp, Homo sapien
caccgtggctgactagcttctccag

SEQ ID NO: 2923124 - DNA, 25 bp, Homo sapien
cagtcaccgtggctgactagcttct

SEQ ID NO: 2923125 - DNA, 25 bp, Homo sapien
cggtcggggtagcaatagtgtctta

SEQ ID NO: 2923126 - DNA, 25 bp, Homo sapien
catcccagcggtcggggtagcaata

SEQ ID NO: 2923127 - DNA, 25 bp, Homo sapien
gagcaagacaagcattcaggccagg

SEQ ID NO: 2923128 - DNA, 25 bp, Homo sapien
ttccacaggataggatctgagagac

SEQ ID NO: 2923129 - DNA, 25 bp, Homo sapien
aggcacctgtgggttaccctcacag

SEQ ID NO: 2923130 - DNA, 25 bp, Homo sapien
atttaaggagtaagtgtaaggtcaa

SEQ ID NO: 2923131 - DNA, 25 bp, Homo sapien
atctaaccgtcaaagtgcacaggca

SEQ ID NO: 2923132 - DNA, 25 bp, Homo sapien
aaaagcccagcctcattcattacag

SEQ ID NO: 2923133 - DNA, 25 bp, Homo sapien
aggcaatgacaacacgtctagtgct

SEQ ID NO: 2923134 - DNA, 25 bp, Homo sapien
ccctacatggtggcatctaaccgtc

SEQ ID NO: 2923135 - DNA, 25 bp, Homo sapien
aaggtcaaccactcgcgataatccc

SEQ ID NO: 2923136 - DNA, 25 bp, Homo sapien
tctgagagactaagctgaccagtat

SEQ ID NO: 2923137 - DNA, 25 bp, Homo sapien
aatagaatgagttatatagagaaaa

SEQ ID NO: 2923138 - DNA, 25 bp, Homo sapien
aacacgtctagtgctcgctatggcc

SEQ ID NO: 2923139 - DNA, 25 bp, Homo sapien
tcttggccggattgagggcccacag

SEQ ID NO: 2923140 - DNA, 25 bp, Homo sapien
tgcttttgcgcacagcaatgggatc

SEQ ID NO: 2923141 - DNA, 25 bp, Homo sapien
gcccttgcgggaggaacttcctgat

SEQ ID NO: 2923142 - DNA, 25 bp, Homo sapien
cctcttgcatcttgtcgatcttggc

SEQ ID NO: 2923143 - DNA, 25 bp, Homo sapien
ctcttgtctccaatgaggctgtcca

SEQ ID NO: 2923144 - DNA, 25 bp, Homo sapien
ctctcttgtctccaatgaggctgtc

SEQ ID NO: 2923145 - DNA, 25 bp, Homo sapien
gatggggcctgagccggacagccca

SEQ ID NO: 2923146 - DNA, 25 bp, Homo sapien
ccagggggcggacagcccaggagtg

SEQ ID NO: 2923147 - DNA, 25 bp, Homo sapien
tgagaggtgcaagtatgtctgccca

SEQ ID NO: 2923148 - DNA, 25 bp, Homo sapien
ggtgtgtgccccataagtaggtcct

SEQ ID NO: 2923149 - DNA, 25 bp, Homo sapien
caggtcagtgccaaggtctccatct

SEQ ID NO: 2923150 - DNA, 25 bp, Homo sapien
tgcccgtccggctgtgggaacaatg

SEQ ID NO: 2923151 - DNA, 25 bp, Homo sapien
atgaggtcaccagtaccagggggtc

SEQ ID NO: 2923152 - DNA, 25 bp, Homo sapien
gccaagctatcatccttcaactgtt

SEQ ID NO: 2923153 - DNA, 25 bp, Homo sapien
ggtcgagggccaagctatcatcctt

SEQ ID NO: 2923154 - DNA, 25 bp, Homo sapien
tggtggcatcgaagatgatgtcggg

SEQ ID NO: 2923155 - DNA, 25 bp, Homo sapien
ggaataaatacagggcgcttctggg

SEQ ID NO: 2923156 - DNA, 25 bp, Homo sapien
tcagttgccccagaaacgaagtcgg

SEQ ID NO: 2923157 - DNA, 25 bp, Homo sapien
tgacctttaaggtgagcccgatgtg

SEQ ID NO: 2923158 - DNA, 25 bp, Homo sapien
tttggtaagcaaagcgctcagctct

SEQ ID NO: 2923159 - DNA, 25 bp, Homo sapien
tcgtgagtgggaaacatcgtaagtc

SEQ ID NO: 2923160 - DNA, 25 bp, Homo sapien
tacatccggagaaacccatcgtgag

SEQ ID NO: 2923161 - DNA, 25 bp, Homo sapien
gacataaccgcatcctaagtcgagg

SEQ ID NO: 2923162 - DNA, 25 bp, Homo sapien
ccaggttgcctgagacagttggaag

SEQ ID NO: 2923163 - DNA, 25 bp, Homo sapien
ggctttgtctgtcaggtgcagtctg

SEQ ID NO: 2923164 - DNA, 25 bp, Homo sapien
gatgtctcccttacaagatggttgt

SEQ ID NO: 2923165 - DNA, 25 bp, Homo sapien
gcattatgggaaagtccctgccttc

SEQ ID NO: 2923166 - DNA, 25 bp, Homo sapien
gaaagttccagatttggaatcaaac

SEQ ID NO: 2923167 - DNA, 25 bp, Homo sapien
cacctatcatatccaaaagcattta

SEQ ID NO: 2923168 - DNA, 25 bp, Homo sapien
tcatgatgctctgttgatatctcca

SEQ ID NO: 2923169 - DNA, 25 bp, Homo sapien
agccactatgcctgagccctaggtt

SEQ ID NO: 2923170 - DNA, 25 bp, Homo sapien
gcatttattaaacgtgattcctagc

SEQ ID NO: 2923171 - DNA, 25 bp, Homo sapien
gaatctcaagagaggtgcaaacctg

SEQ ID NO: 2923172 - DNA, 25 bp, Homo sapien
gcagattcggaacagtaggagccag

SEQ ID NO: 2923173 - DNA, 25 bp, Homo sapien
gacatgatgagctacattgggccca

SEQ ID NO: 2923174 - DNA, 25 bp, Homo sapien
taatgcaccgggaggcctttaacat

SEQ ID NO: 2923175 - DNA, 25 bp, Homo sapien
gggtcccttcgcacggagatcccaa

SEQ ID NO: 2923176 - DNA, 25 bp, Homo sapien
tctcttcagacgagattcccttcag

SEQ ID NO: 2923177 - DNA, 25 bp, Homo sapien
ttgtggtgtgcgagaggtcccgcgg

SEQ ID NO: 2923178 - DNA, 25 bp, Homo sapien
gctagctgatggcaagggaggaata

SEQ ID NO: 2923179 - DNA, 25 bp, Homo sapien
tcccacctcaatccagctgagtagc

SEQ ID NO: 2923180 - DNA, 25 bp, Homo sapien
tggtctgagacgtgataggcctgcc

SEQ ID NO: 2923181 - DNA, 25 bp, Homo sapien
catggcgtcctcgacttggtctgag

SEQ ID NO: 2923182 - DNA, 25 bp, Homo sapien
ggccgtgtctactgtcctggaaagt

SEQ ID NO: 2923183 - DNA, 25 bp, Homo sapien
cccagacggtaagcgggagatctct

SEQ ID NO: 2923184 - DNA, 25 bp, Homo sapien
tcaatacatgtaggcggttagccca

SEQ ID NO: 2923185 - DNA, 25 bp, Homo sapien
tgagtaagtcccaggaaaagcccag

SEQ ID NO: 2923186 - DNA, 25 bp, Homo sapien
attacagcccaggtcgagaaccacg

SEQ ID NO: 2923187 - DNA, 25 bp, Homo sapien
tactacacggcattcggcatagcgc

SEQ ID NO: 2923188 - DNA, 25 bp, Homo sapien
cataggagatccaagacagcagaag

SEQ ID NO: 2923189 - DNA, 25 bp, Homo sapien
gtttactatctgtgtgacgctgagc

SEQ ID NO: 2923190 - DNA, 25 bp, Homo sapien
ggaagagcggctctgccgtttacta

SEQ ID NO: 2923191 - DNA, 25 bp, Homo sapien
ttcaacaggtttcccgtgcatagga

SEQ ID NO: 2923192 - DNA, 25 bp, Homo sapien
ttagagaccataatcacgtgaatgt

SEQ ID NO: 2923193 - DNA, 25 bp, Homo sapien
taattgatattcaggtcacccaaca

SEQ ID NO: 2923194 - DNA, 25 bp, Homo sapien
taacataatgtcactagggtctctc

SEQ ID NO: 2923195 - DNA, 25 bp, Homo sapien
cacagtgggcgaaggtccttaagaa

SEQ ID NO: 2923196 - DNA, 25 bp, Homo sapien
ttcttaattgtggggtatgggttca

SEQ ID NO: 2923197 - DNA, 25 bp, Homo sapien
tttcctggtgtataaaatgagggta

SEQ ID NO: 2923198 - DNA, 25 bp, Homo sapien
attgtggggtatgggttcagatttc

SEQ ID NO: 2923199 - DNA, 25 bp, Homo sapien
tctctggatcttagtttcctggtgt

SEQ ID NO: 2923200 - DNA, 25 bp, Homo sapien
catctggaccttaaatttgtataca

SEQ ID NO: 2923201 - DNA, 25 bp, Homo sapien
taattttgtctctagattgagccag

SEQ ID NO: 2923202 - DNA, 25 bp, Homo sapien
catttttgtcctgagacttgaaggg

SEQ ID NO: 2923203 - DNA, 25 bp, Homo sapien
gacagtctggagagtactctttagt

SEQ ID NO: 2923204 - DNA, 25 bp, Homo sapien
actgaaacatgggtgggttaaatgt

SEQ ID NO: 2923205 - DNA, 25 bp, Homo sapien
ggtctataattgcaacagttatcca

SEQ ID NO: 2923206 - DNA, 25 bp, Homo sapien
gaggccagtctgcaataaatctaat

SEQ ID NO: 2923207 - DNA, 25 bp, Homo sapien
aaaaatatagtctgggagcttgagg

SEQ ID NO: 2923208 - DNA, 25 bp, Homo sapien
ccatgacttgggcatcatgcatcga

SEQ ID NO: 2923209 - DNA, 25 bp, Homo sapien
aagaagtgccaacaagtccaagaag

SEQ ID NO: 2923210 - DNA, 25 bp, Homo sapien
tccaagaagttagggagctgagaac

SEQ ID NO: 2923211 - DNA, 25 bp, Homo sapien
tgttatccacaggttatctccatga

SEQ ID NO: 2923212 - DNA, 25 bp, Homo sapien
aactggaaaggacagaaaagctgca

SEQ ID NO: 2923213 - DNA, 25 bp, Homo sapien
aaaggacagaaaagctgcagcatac

SEQ ID NO: 2923214 - DNA, 25 bp, Homo sapien
ggaaaggacagaaaagctgcagcat

SEQ ID NO: 2923215 - DNA, 25 bp, Homo sapien
gaaactggaaaggacagaaaagctg

SEQ ID NO: 2923216 - DNA, 25 bp, Homo sapien
acagcaggtggtatcagtttgggca

SEQ ID NO: 2923217 - DNA, 25 bp, Homo sapien
cagatctgtactccctttggtcggc

SEQ ID NO: 2923218 - DNA, 25 bp, Homo sapien
cactggctttgcagtgtgtagctac

SEQ ID NO: 2923219 - DNA, 25 bp, Homo sapien
tgggcaggaggcctacaatgccttg

SEQ ID NO: 2923220 - DNA, 25 bp, Homo sapien
tcatgtttgaaagaggtattggtgt

SEQ ID NO: 2923221 - DNA, 25 bp, Homo sapien
tccccgtaggatataccctggagaa

SEQ ID NO: 2923222 - DNA, 25 bp, Homo sapien
gagggggctgatcctctgatcctca

SEQ ID NO: 2923223 - DNA, 25 bp, Homo sapien
agtctctgtgctaagttcacttggg

SEQ ID NO: 2923224 - DNA, 25 bp, Homo sapien
gcaagaagtccatctttggcaggcg

SEQ ID NO: 2923225 - DNA, 25 bp, Homo sapien
gctagaaactaaatcggacctgaac

SEQ ID NO: 2923226 - DNA, 25 bp, Homo sapien
taagtgtgggcgacaagaaccctgg

SEQ ID NO: 2923227 - DNA, 25 bp, Homo sapien
tctgcaacaggctctgaggtccggg

SEQ ID NO: 2923228 - DNA, 25 bp, Homo sapien
tagcaccctgtggatgacattgaca

SEQ ID NO: 2923229 - DNA, 25 bp, Homo sapien
aaatggcagctgatgtattccccac

SEQ ID NO: 2923230 - DNA, 25 bp, Homo sapien
gacaagatgaaagagcgagctgcca

SEQ ID NO: 2923231 - DNA, 25 bp, Homo sapien
cagagattctatacagggagacagc

SEQ ID NO: 2923232 - DNA, 25 bp, Homo sapien
gagaacttttatggtggagccccag

SEQ ID NO: 2923233 - DNA, 25 bp, Homo sapien
caaactggtgactactggtgagaac

SEQ ID NO: 2923234 - DNA, 25 bp, Homo sapien
ggtagcaaccccaaagacagctgag

SEQ ID NO: 2923235 - DNA, 25 bp, Homo sapien
catttcgcaaatcgccagaggtacc

SEQ ID NO: 2923236 - DNA, 25 bp, Homo sapien
caatagtgcccatgagacacactgg

SEQ ID NO: 2923237 - DNA, 25 bp, Homo sapien
tctcaaggttgggattaggcatatg

SEQ ID NO: 2923238 - DNA, 25 bp, Homo sapien
tattactttctcctaccagaggcgt

SEQ ID NO: 2923239 - DNA, 25 bp, Homo sapien
tttctgccattgacgtaaagaaggc

SEQ ID NO: 2923240 - DNA, 25 bp, Homo sapien
taggatccatacaacacaactgaaa

SEQ ID NO: 2923241 - DNA, 25 bp, Homo sapien
aatatgcactgggagtggagccacc

SEQ ID NO: 2923242 - DNA, 25 bp, Homo sapien
tgagaacagcctctaagtgagtgga

SEQ ID NO: 2923243 - DNA, 25 bp, Homo sapien
caagggtgacttggatatcaacgtg

SEQ ID NO: 2923244 - DNA, 25 bp, Homo sapien
tcgacttgtgggcaccgagcagagt

SEQ ID NO: 2923245 - DNA, 25 bp, Homo sapien
ccgtcggcgtcagatcttgcacttg

SEQ ID NO: 2923246 - DNA, 25 bp, Homo sapien
tcaaattctaccatgactttcactg

SEQ ID NO: 2923247 - DNA, 25 bp, Homo sapien
tgactggcggctaatgggtcgactt

SEQ ID NO: 2923248 - DNA, 25 bp, Homo sapien
tgagctggaagagatgatcctccac

SEQ ID NO: 2923249 - DNA, 25 bp, Homo sapien
gacaagttcattaccctggctgcag

SEQ ID NO: 2923250 - DNA, 25 bp, Homo sapien
cagagagtgtgtcactgagccggca

SEQ ID NO: 2923251 - DNA, 25 bp, Homo sapien
gctcagtctcggtggagtttcctta

SEQ ID NO: 2923252 - DNA, 25 bp, Homo sapien
tgccgagacctactaagagccactg

SEQ ID NO: 2923253 - DNA, 25 bp, Homo sapien
gagactgtaccatcccttgcactag

SEQ ID NO: 2923254 - DNA, 25 bp, Homo sapien
tacttctgagctagaaggccgtgcc

SEQ ID NO: 2923255 - DNA, 25 bp, Homo sapien
tccctaaaggttcagtgtggtgcag

SEQ ID NO: 2923256 - DNA, 25 bp, Homo sapien
tacaaaggcttagccatgtctctgg

SEQ ID NO: 2923257 - DNA, 25 bp, Homo sapien
gaaattctttgctgtagcccttcac

SEQ ID NO: 2923258 - DNA, 25 bp, Homo sapien
gcacaaagggccacccctagcttga

SEQ ID NO: 2923259 - DNA, 25 bp, Homo sapien
aggttccacctgctaggccatcatg

SEQ ID NO: 2923260 - DNA, 25 bp, Homo sapien
gctctcggaagctttcgtctcgtgg

SEQ ID NO: 2923261 - DNA, 25 bp, Homo sapien
gctgctgcgtcaacgtgctacgtca

SEQ ID NO: 2923262 - DNA, 25 bp, Homo sapien
cccaccgaggaaaatggagtcgtcg

SEQ ID NO: 2923263 - DNA, 25 bp, Homo sapien
tcgtcgaaccgagactgggaaaaga

SEQ ID NO: 2923264 - DNA, 25 bp, Homo sapien
tcatgataggcctctggcaaacgtt

SEQ ID NO: 2923265 - DNA, 25 bp, Homo sapien
tgaatctatagagaatggacgggct

SEQ ID NO: 2923266 - DNA, 25 bp, Homo sapien
tgttgattcaacgtgccacccgatt

SEQ ID NO: 2923267 - DNA, 25 bp, Homo sapien
gattcacgggttccgggtgtcactg

SEQ ID NO: 2923268 - DNA, 25 bp, Homo sapien
tacaggcaggactgatggtagtgcc

SEQ ID NO: 2923269 - DNA, 25 bp, Homo sapien
caagaatatagaatcagggcaaacg

SEQ ID NO: 2923270 - DNA, 25 bp, Homo sapien
aaatttgactaagcctctccagacg

SEQ ID NO: 2923271 - DNA, 25 bp, Homo sapien
cactaggtaggctttcagaggaaga

SEQ ID NO: 2923272 - DNA, 25 bp, Homo sapien
tatgctcaagcagggcgtaaaggcc

SEQ ID NO: 2923273 - DNA, 25 bp, Homo sapien
cctaggatgcccgtattctggtgca

SEQ ID NO: 2923274 - DNA, 25 bp, Homo sapien
tgccaggcacgtacaagactaggtc

SEQ ID NO: 2923275 - DNA, 25 bp, Homo sapien
cctgaggctgatggcactagagcat

SEQ ID NO: 2923276 - DNA, 25 bp, Homo sapien
gatcagattgccacaagggaggccc

SEQ ID NO: 2923277 - DNA, 25 bp, Homo sapien
tgtagtaggcaattaagaggagacc

SEQ ID NO: 2923278 - DNA, 25 bp, Homo sapien
aaacatttaggcgtggtgctctgga

SEQ ID NO: 2923279 - DNA, 25 bp, Homo sapien
tggtggttaccatgacattcgctgg

SEQ ID NO: 2923280 - DNA, 25 bp, Homo sapien
ggtctgtctgactcttcatggttga

SEQ ID NO: 2923281 - DNA, 25 bp, Homo sapien
acagctgtattctgttagagcagac

SEQ ID NO: 2923282 - DNA, 25 bp, Homo sapien
tgtcctatgagttacagcacacttc

SEQ ID NO: 2923283 - DNA, 25 bp, Homo sapien
tatcaatagttttcagggcgtggtc

SEQ ID NO: 2923284 - DNA, 25 bp, Homo sapien
gcgtggtagctcactcctataaccc

SEQ ID NO: 2923285 - DNA, 25 bp, Homo sapien
caggcgtggtagctcactcctataa

SEQ ID NO: 2923286 - DNA, 25 bp, Homo sapien
aaaaaaagccattaggccaggcgtg

SEQ ID NO: 2923287 - DNA, 25 bp, Homo sapien
aaaaaagccattaggccaggcgtgg

SEQ ID NO: 2923288 - DNA, 25 bp, Homo sapien
agaaggcaaaagccaggctactcag

SEQ ID NO: 2923289 - DNA, 25 bp, Homo sapien
gtggaggttgcagattgcgccactg

SEQ ID NO: 2923290 - DNA, 25 bp, Homo sapien
aaggcaaaagccaggctactcagga

SEQ ID NO: 2923291 - DNA, 25 bp, Homo sapien
aaaagaaggcaaaagccaggctact

SEQ ID NO: 2923292 - DNA, 25 bp, Homo sapien
tttgtactcttagaagagatgtggt

SEQ ID NO: 2923293 - DNA, 25 bp, Homo sapien
ttttgtactcttagaagagatgtgg

SEQ ID NO: 2923294 - DNA, 25 bp, Homo sapien
gctgcagcttctcactctgcctgaa

SEQ ID NO: 2923295 - DNA, 25 bp, Homo sapien
tgcagcttctcactctgcctgaaga

SEQ ID NO: 2923296 - DNA, 25 bp, Homo sapien
tgctgcagcttctcactctgcctga

SEQ ID NO: 2923297 - DNA, 25 bp, Homo sapien
ctgcagcttctcactctgcctgaag

SEQ ID NO: 2923298 - DNA, 25 bp, Homo sapien
tcagcctcgctttccacaaaatcag

SEQ ID NO: 2923299 - DNA, 25 bp, Homo sapien
cctcgctttccacaaaatcagacat

SEQ ID NO: 2923300 - DNA, 25 bp, Homo sapien
tcatcattgtattcttcctctgact

SEQ ID NO: 2923301 - DNA, 25 bp, Homo sapien
tggtgactcggggtaccacctcgcc

SEQ ID NO: 2923302 - DNA, 25 bp, Homo sapien
tcagcaagaatccaactatccaaag

SEQ ID NO: 2923303 - DNA, 25 bp, Homo sapien
gaatccaactatccaaagcttagca

SEQ ID NO: 2923304 - DNA, 25 bp, Homo sapien
ctatccaaagcttagcaatagtggg

SEQ ID NO: 2923305 - DNA, 25 bp, Homo sapien
ttcatcagcaagaatccaactatcc

SEQ ID NO: 2923306 - DNA, 25 bp, Homo sapien
tttcaagttgccttgctcatcctga

SEQ ID NO: 2923307 - DNA, 25 bp, Homo sapien
tcatcgtcattgataaagcctttca

SEQ ID NO: 2923308 - DNA, 25 bp, Homo sapien
tcctgatcatctaggttctcctcct

SEQ ID NO: 2923309 - DNA, 25 bp, Homo sapien
cttctgaatcaccagagtcactgcc

SEQ ID NO: 2923310 - DNA, 25 bp, Homo sapien
aaatcatcatcctccaggcggtcat

SEQ ID NO: 2923311 - DNA, 25 bp, Homo sapien
gactttgacacccaaattctcctca

SEQ ID NO: 2923312 - DNA, 25 bp, Homo sapien
ctttgacacccaaattctcctcaat

SEQ ID NO: 2923313 - DNA, 25 bp, Homo sapien
tgactttgacacccaaattctcctc

SEQ ID NO: 2923314 - DNA, 25 bp, Homo sapien
ggtgggaaaacctgccttatcagga

SEQ ID NO: 2923315 - DNA, 25 bp, Homo sapien
gagtgatgctcttgtagcctcaaag

SEQ ID NO: 2923316 - DNA, 25 bp, Homo sapien
tctgaggagtctggcatacggatac

SEQ ID NO: 2923317 - DNA, 25 bp, Homo sapien
tgggaaagaacatgccgagtgatgc

SEQ ID NO: 2923318 - DNA, 25 bp, Homo sapien
gatttcttccgcaatagcttctttt

SEQ ID NO: 2923319 - DNA, 25 bp, Homo sapien
tcctggaagatttcttccgcaatag

SEQ ID NO: 2923320 - DNA, 25 bp, Homo sapien
ggaagatttcttccgcaatagcttc

SEQ ID NO: 2923321 - DNA, 25 bp, Homo sapien
ccatcctggaagatttcttccgcaa

SEQ ID NO: 2923322 - DNA, 25 bp, Homo sapien
tatccaggaagctttttccgccact

SEQ ID NO: 2923323 - DNA, 25 bp, Homo sapien
caggaagctttttccgccacttagg

SEQ ID NO: 2923324 - DNA, 25 bp, Homo sapien
tccaggaagctttttccgccactta

SEQ ID NO: 2923325 - DNA, 25 bp, Homo sapien
gtgtatccaggaagctttttccgcc

SEQ ID NO: 2923326 - DNA, 25 bp, Homo sapien
tttcaaagatgctcctacggctcac

SEQ ID NO: 2923327 - DNA, 25 bp, Homo sapien
aaagtccacaccgaagatttcctgg

SEQ ID NO: 2923328 - DNA, 25 bp, Homo sapien
tcactgggctcatacatttcaaaga

SEQ ID NO: 2923329 - DNA, 25 bp, Homo sapien
gcaggtcagtggctcggatttcatt

SEQ ID NO: 2923330 - DNA, 25 bp, Homo sapien
cagcccccttgactgggatggagcg

SEQ ID NO: 2923331 - DNA, 25 bp, Homo sapien
gagaaatggttggtgtggcaaaagc

SEQ ID NO: 2923332 - DNA, 25 bp, Homo sapien
gagagaaatggttggtgtggcaaaa

SEQ ID NO: 2923333 - DNA, 25 bp, Homo sapien
tggcaaaagcattcctgtagatcca

SEQ ID NO: 2923334 - DNA, 25 bp, Homo sapien
tggctggctgccctcggtctaggta

SEQ ID NO: 2923335 - DNA, 25 bp, Homo sapien
gctgccctcggtctaggtaatcaca

SEQ ID NO: 2923336 - DNA, 25 bp, Homo sapien
gctgatttcgcatgaagcccagggc

SEQ ID NO: 2923337 - DNA, 25 bp, Homo sapien
tgggccctttccgactgaagctgct

SEQ ID NO: 2923338 - DNA, 25 bp, Homo sapien
gatgtgcaactcaggctccacatac

SEQ ID NO: 2923339 - DNA, 25 bp, Homo sapien
gtcattgatgtgcaactcaggctcc

SEQ ID NO: 2923340 - DNA, 25 bp, Homo sapien
tccacatactcctttcgatagaagg

SEQ ID NO: 2923341 - DNA, 25 bp, Homo sapien
gccagactctccataggtcattgat

SEQ ID NO: 2923342 - DNA, 25 bp, Homo sapien
gatctgttcatactgataagcctgc

SEQ ID NO: 2923343 - DNA, 25 bp, Homo sapien
tccatgtcagtggtgtccagagccc

SEQ ID NO: 2923344 - DNA, 25 bp, Homo sapien
catcagcaagaggtttgtcagggtc

SEQ ID NO: 2923345 - DNA, 25 bp, Homo sapien
taggttctctttacggatccgcagc

SEQ ID NO: 2923346 - DNA, 25 bp, Homo sapien
cttcttgcggctagctttggcggcg

SEQ ID NO: 2923347 - DNA, 25 bp, Homo sapien
tttggcggcgttctgcatcttaggg

SEQ ID NO: 2923348 - DNA, 25 bp, Homo sapien
catcttagggatgtctcggccataa

SEQ ID NO: 2923349 - DNA, 25 bp, Homo sapien
tagacatctttcagctcatccattg

SEQ ID NO: 2923350 - DNA, 25 bp, Homo sapien
tgcaacaactgcctctaggttcagg

SEQ ID NO: 2923351 - DNA, 25 bp, Homo sapien
ctgcctctaggttcaggcatgcctc

SEQ ID NO: 2923352 - DNA, 25 bp, Homo sapien
aactgcctctaggttcaggcatgcc

SEQ ID NO: 2923353 - DNA, 25 bp, Homo sapien
caacaactgcctctaggttcaggca

SEQ ID NO: 2923354 - DNA, 25 bp, Homo sapien
ccagcactctggcagatggtgtaca

SEQ ID NO: 2923355 - DNA, 25 bp, Homo sapien
tgcttgagctcaggccccctctgct

SEQ ID NO: 2923356 - DNA, 25 bp, Homo sapien
gtgtacatgtctcggcgagaggctt

SEQ ID NO: 2923357 - DNA, 25 bp, Homo sapien
gatggtgtacatgtctcggcgagag

SEQ ID NO: 2923358 - DNA, 25 bp, Homo sapien
gctggtagctatcccgcaggttctc

SEQ ID NO: 2923359 - DNA, 25 bp, Homo sapien
tccgcgggaaactgctctgtctcgt

SEQ ID NO: 2923360 - DNA, 25 bp, Homo sapien
caaactgctcgggagtaagcccaaa

SEQ ID NO: 2923361 - DNA, 25 bp, Homo sapien
agctccaagggctccgcgggaaact

SEQ ID NO: 2923362 - DNA, 25 bp, Homo sapien
gggcgccttctagcacagcttctgg

SEQ ID NO: 2923363 - DNA, 25 bp, Homo sapien
ggctaccatgtagcgggcgccttct

SEQ ID NO: 2923364 - DNA, 25 bp, Homo sapien
cttggaaggtttgcctcagcacctg

SEQ ID NO: 2923365 - DNA, 25 bp, Homo sapien
ggctcacgggcaatctgcagggcta

SEQ ID NO: 2923366 - DNA, 25 bp, Homo sapien
cttgaaggaataggcatagtgggcc

SEQ ID NO: 2923367 - DNA, 25 bp, Homo sapien
tgaggagcccttcgtcttcagccag

SEQ ID NO: 2923368 - DNA, 25 bp, Homo sapien
cttcagccaggcatatcttgagaaa

SEQ ID NO: 2923369 - DNA, 25 bp, Homo sapien
cccttcaaatctatgctgatgtcag

SEQ ID NO: 2923370 - DNA, 25 bp, Homo sapien
taaagcccgttcgatggccatggtg

SEQ ID NO: 2923371 - DNA, 25 bp, Homo sapien
caaaatatgtctggtcgttgccata

SEQ ID NO: 2923372 - DNA, 25 bp, Homo sapien
ggctgaactcatctcggtagtaaaa

SEQ ID NO: 2923373 - DNA, 25 bp, Homo sapien
catagaggaactgctgtaaagcccg

SEQ ID NO: 2923374 - DNA, 25 bp, Homo sapien
tccacctgctgatctggtcggtagg

SEQ ID NO: 2923375 - DNA, 25 bp, Homo sapien
gggtgccactctcaaccaattgtag

SEQ ID NO: 2923376 - DNA, 25 bp, Homo sapien
gaggactcgaatgcccttcccttgg

SEQ ID NO: 2923377 - DNA, 25 bp, Homo sapien
ttggttctcgtccataaagtcgtca

SEQ ID NO: 2923378 - DNA, 25 bp, Homo sapien
gggcagtcgaaggaagtctgtcact

SEQ ID NO: 2923379 - DNA, 25 bp, Homo sapien
taaaatggggcagtcgaaggaagtc

SEQ ID NO: 2923380 - DNA, 25 bp, Homo sapien
tccttcaccattgaccagggcgcag

SEQ ID NO: 2923381 - DNA, 25 bp, Homo sapien
cagggcgcagaacacagggtgatct

SEQ ID NO: 2923382 - DNA, 25 bp, Homo sapien
gaaagaaaattgaagctgaatggct

SEQ ID NO: 2923383 - DNA, 25 bp, Homo sapien
ttgaaagaaaattgaagctgaatgg

SEQ ID NO: 2923384 - DNA, 25 bp, Homo sapien
ctggattgaaagaaaattgaagctg

SEQ ID NO: 2923385 - DNA, 25 bp, Homo sapien
gattgaaagaaaattgaagctgaat

SEQ ID NO: 2923386 - DNA, 25 bp, Homo sapien
gcaactgtcactacatgaggcttct

SEQ ID NO: 2923387 - DNA, 25 bp, Homo sapien
ctgttctctcctgcaactgtcacta

SEQ ID NO: 2923388 - DNA, 25 bp, Homo sapien
tgttctctcctgcaactgtcactac

SEQ ID NO: 2923389 - DNA, 25 bp, Homo sapien
caactgtcactacatgaggcttctt

SEQ ID NO: 2923390 - DNA, 25 bp, Homo sapien
agtctcatgactgccttgggggtga

SEQ ID NO: 2923391 - DNA, 25 bp, Homo sapien
ctggtgggatgagtgttggtcaatg

SEQ ID NO: 2923392 - DNA, 25 bp, Homo sapien
gttttcttagggatggacagtctca

SEQ ID NO: 2923393 - DNA, 25 bp, Homo sapien
agtgttggtcaatgaatatgttttc

SEQ ID NO: 2923394 - DNA, 25 bp, Homo sapien
atcttcaatcaacatctgggcgtcc

SEQ ID NO: 2923395 - DNA, 25 bp, Homo sapien
tctaccccaatagatgacagctgct

SEQ ID NO: 2923396 - DNA, 25 bp, Homo sapien
gaatggccaactcgttgtcaaccag

SEQ ID NO: 2923397 - DNA, 25 bp, Homo sapien
ggccctggtccagctcatgtacaat

SEQ ID NO: 2923398 - DNA, 25 bp, Homo sapien
taaaatccccttagctacaacatca

SEQ ID NO: 2923399 - DNA, 25 bp, Homo sapien
cttaaaatccccttagctacaacat

SEQ ID NO: 2923400 - DNA, 25 bp, Homo sapien
ccccttagctacaacatcaagagga

SEQ ID NO: 2923401 - DNA, 25 bp, Homo sapien
aaatccccttagctacaacatcaag

SEQ ID NO: 2923402 - DNA, 25 bp, Homo sapien
tcaatcagagggtcctggatgcgcc

SEQ ID NO: 2923403 - DNA, 25 bp, Homo sapien
ctcagcactggaggataatcccgga

SEQ ID NO: 2923404 - DNA, 25 bp, Homo sapien
gtcttcatcggaactgcacacctgg

SEQ ID NO: 2923405 - DNA, 25 bp, Homo sapien
ggtgaaacttgagacacaggatgtc

SEQ ID NO: 2923406 - DNA, 25 bp, Homo sapien
caaacatactggatcaaggcctggc

SEQ ID NO: 2923407 - DNA, 25 bp, Homo sapien
ggttgacatcgaccccgacctcatt

SEQ ID NO: 2923408 - DNA, 25 bp, Homo sapien
tgggcaatggcacggttgacatcga

SEQ ID NO: 2923409 - DNA, 25 bp, Homo sapien
cgacctcattgactcggttgataaa

SEQ ID NO: 2923410 - DNA, 25 bp, Homo sapien
ccagggaggccgtgtcgatcttgag

SEQ ID NO: 2923411 - DNA, 25 bp, Homo sapien
gtgaccagctgggtccggctctcga

SEQ ID NO: 2923412 - DNA, 25 bp, Homo sapien
gccgggtgttgttctgcttcaggat

SEQ ID NO: 2923413 - DNA, 25 bp, Homo sapien
ctttgggacccatgtggcacatggt

SEQ ID NO: 2923414 - DNA, 25 bp, Homo sapien
cctccaaagactgagttgataactt

SEQ ID NO: 2923415 - DNA, 25 bp, Homo sapien
tgaggagctatgtgcccgtggaaaa

SEQ ID NO: 2923416 - DNA, 25 bp, Homo sapien
cactgatttccattactgaatgagg

SEQ ID NO: 2923417 - DNA, 25 bp, Homo sapien
tcctccaaagactgagttgataact

SEQ ID NO: 2923418 - DNA, 25 bp, Homo sapien
ggtcttgcccgtgcactcacatgga

SEQ ID NO: 2923419 - DNA, 25 bp, Homo sapien
cacatggacctatgttattcgtgga

SEQ ID NO: 2923420 - DNA, 25 bp, Homo sapien
aaattagggcacctccatacaatgg

SEQ ID NO: 2923421 - DNA, 25 bp, Homo sapien
tattcgtggagtgttacagcaaagc

SEQ ID NO: 2923422 - DNA, 25 bp, Homo sapien
aaggcatcaaggtccaggtctttca

SEQ ID NO: 2923423 - DNA, 25 bp, Homo sapien
tggacacgggaaccatcaaggactt

SEQ ID NO: 2923424 - DNA, 25 bp, Homo sapien
ggattggcatcctcggctgattcat

SEQ ID NO: 2923425 - DNA, 25 bp, Homo sapien
tcataagtctcagggtggacacggg

SEQ ID NO: 2923426 - DNA, 25 bp, Homo sapien
ttgggagagcggtaggctgtccgga

SEQ ID NO: 2923427 - DNA, 25 bp, Homo sapien
gcccggatgtcatagagtgtgatgt

SEQ ID NO: 2923428 - DNA, 25 bp, Homo sapien
agctctgcccggatgtcatagagtg

SEQ ID NO: 2923429 - DNA, 25 bp, Homo sapien
tccttatatcgacagctcagctctg

SEQ ID NO: 2923430 - DNA, 25 bp, Homo sapien
cttggtttgaatgtacacagtaaac

SEQ ID NO: 2923431 - DNA, 25 bp, Homo sapien
tgcttggtttgaatgtacacagtaa

SEQ ID NO: 2923432 - DNA, 25 bp, Homo sapien
ctgcctcaatctgttggaactgctg

SEQ ID NO: 2923433 - DNA, 25 bp, Homo sapien
gcttggtttgaatgtacacagtaaa

SEQ ID NO: 2923434 - DNA, 25 bp, Homo sapien
tcaccctggggacgcctgtgggcaa

SEQ ID NO: 2923435 - DNA, 25 bp, Homo sapien
aattgtcctgctgacagaaggggca

SEQ ID NO: 2923436 - DNA, 25 bp, Homo sapien
cctgctgacagaaggggcactgcca

SEQ ID NO: 2923437 - DNA, 25 bp, Homo sapien
ctcgcttagttcagggaaattgtcc

SEQ ID NO: 2923438 - DNA, 25 bp, Homo sapien
gaagggacttcatgctaaacctgtg

SEQ ID NO: 2923439 - DNA, 25 bp, Homo sapien
caaccaaggaaatccactgagcagg

SEQ ID NO: 2923440 - DNA, 25 bp, Homo sapien
gagcaggataatgctgcagcacaca

SEQ ID NO: 2923441 - DNA, 25 bp, Homo sapien
tctgattcccttctaggcaccgaga

SEQ ID NO: 2923442 - DNA, 25 bp, Homo sapien
tgttttgacaccgatggcctggcct

SEQ ID NO: 2923443 - DNA, 25 bp, Homo sapien
caccattgtctagccgtgttttgac

SEQ ID NO: 2923444 - DNA, 25 bp, Homo sapien
aaccgctgtcaaagtggttccacac

SEQ ID NO: 2923445 - DNA, 25 bp, Homo sapien
ggccgctttaccactttgtcactga

SEQ ID NO: 2923446 - DNA, 25 bp, Homo sapien
tgaggtctgaggtgcggcaggtcag

SEQ ID NO: 2923447 - DNA, 25 bp, Homo sapien
ggtctgcactgaacttctcaatgtc

SEQ ID NO: 2923448 - DNA, 25 bp, Homo sapien
cagcatcaaagtcatagtaggtgtc

SEQ ID NO: 2923449 - DNA, 25 bp, Homo sapien
tcagcatcaaagtcatagtaggtgt

SEQ ID NO: 2923450 - DNA, 25 bp, Homo sapien
cttctctgggcttggattagctgat

SEQ ID NO: 2923451 - DNA, 25 bp, Homo sapien
tatgggattctgagactctttcacc

SEQ ID NO: 2923452 - DNA, 25 bp, Homo sapien
aagtgcagggctacagccgtgagcc

SEQ ID NO: 2923453 - DNA, 25 bp, Homo sapien
cccacgttgtactgtagtggtgcaa

SEQ ID NO: 2923454 - DNA, 25 bp, Homo sapien
gaaggatgggtgtgcgatcactctc

SEQ ID NO: 2923455 - DNA, 25 bp, Homo sapien
gataatcacatcaccctggtccatg

SEQ ID NO: 2923456 - DNA, 25 bp, Homo sapien
cacatgctggtagatgccatcactg

SEQ ID NO: 2923457 - DNA, 25 bp, Homo sapien
cccttgctgcttggtcggataatca

SEQ ID NO: 2923458 - DNA, 25 bp, Homo sapien
ccaggctgaaggcattttccttgcc

SEQ ID NO: 2923459 - DNA, 25 bp, Homo sapien
caggctgaaggcattttccttgccc

SEQ ID NO: 2923460 - DNA, 25 bp, Homo sapien
ccaccgctgcagtcctgataatact

SEQ ID NO: 2923461 - DNA, 25 bp, Homo sapien
gcgagcaacaatctcatccaaatct

SEQ ID NO: 2923462 - DNA, 25 bp, Homo sapien
ataatacttgtgattcagaaggtcc

SEQ ID NO: 2923463 - DNA, 25 bp, Homo sapien
gccatgggctggacatagcgagcaa

SEQ ID NO: 2923464 - DNA, 25 bp, Homo sapien
tggtatcccagtaggaacttgccgg

SEQ ID NO: 2923465 - DNA, 25 bp, Homo sapien
gggctggtatcccagtaggaacttg

SEQ ID NO: 2923466 - DNA, 25 bp, Homo sapien
gaacttgccgggcagttccttgcag

SEQ ID NO: 2923467 - DNA, 25 bp, Homo sapien
tcccagtaggaacttgccgggcagt

SEQ ID NO: 2923468 - DNA, 25 bp, Homo sapien
gatccttaaaccatctaaacagtcc

SEQ ID NO: 2923469 - DNA, 25 bp, Homo sapien
cggtaccggaatccctctggagtca

SEQ ID NO: 2923470 - DNA, 25 bp, Homo sapien
taaacagtccattcacggttgggaa

SEQ ID NO: 2923471 - DNA, 25 bp, Homo sapien
tggagtcaccgttacatattctatc

SEQ ID NO: 2923472 - DNA, 25 bp, Homo sapien
ttgatagaggcaggtgtccgggtcc

SEQ ID NO: 2923473 - DNA, 25 bp, Homo sapien
attgatagaggcaggtgtccgggtc

SEQ ID NO: 2923474 - DNA, 25 bp, Homo sapien
ctccagtcccaggctcaagctcctc

SEQ ID NO: 2923475 - DNA, 25 bp, Homo sapien
tccagtcccaggctcaagctcctca

SEQ ID NO: 2923476 - DNA, 25 bp, Homo sapien
ccagtcccaggctcaagctcctcac

SEQ ID NO: 2923477 - DNA, 25 bp, Homo sapien
catagccgtactggctggaggccca

SEQ ID NO: 2923478 - DNA, 25 bp, Homo sapien
cagggcattcacagcccgtgtcaga

SEQ ID NO: 2923479 - DNA, 25 bp, Homo sapien
catctgtgaagtcatgttctgaggc

SEQ ID NO: 2923480 - DNA, 25 bp, Homo sapien
tgtcaccgcagcaatggcactgaac

SEQ ID NO: 2923481 - DNA, 25 bp, Homo sapien
aagaaatatctgttggagacagtta

SEQ ID NO: 2923482 - DNA, 25 bp, Homo sapien
gacaagaaatatctgttggagacag

SEQ ID NO: 2923483 - DNA, 25 bp, Homo sapien
acaagaaatatctgttggagacagt

SEQ ID NO: 2923484 - DNA, 25 bp, Homo sapien
caagaaatatctgttggagacagtt

SEQ ID NO: 2923485 - DNA, 25 bp, Homo sapien
tgtcaactttctggtggcttgcggg

SEQ ID NO: 2923486 - DNA, 25 bp, Homo sapien
ccactgagtatgtgcttctgaccag

SEQ ID NO: 2923487 - DNA, 25 bp, Homo sapien
ggcttgcgggttccaaagatcccaa

SEQ ID NO: 2923488 - DNA, 25 bp, Homo sapien
cccgtggaaaggttatgccctctct

SEQ ID NO: 2923489 - DNA, 25 bp, Homo sapien
ggctgctgggctggcgttgggaata

SEQ ID NO: 2923490 - DNA, 25 bp, Homo sapien
gctgctgggctggcgttgggaatac

SEQ ID NO: 2923491 - DNA, 25 bp, Homo sapien
ctggtggtactgaggggtggtgatg

SEQ ID NO: 2923492 - DNA, 25 bp, Homo sapien
tgctgccgttgccgggagctggaag

SEQ ID NO: 2923493 - DNA, 25 bp, Homo sapien
gtcgtgtaggagtagctaggggtca

SEQ ID NO: 2923494 - DNA, 25 bp, Homo sapien
gctggcttggggtcgtgtaggagta

SEQ ID NO: 2923495 - DNA, 25 bp, Homo sapien
gactttgctagaaggaagtcttccc

SEQ ID NO: 2923496 - DNA, 25 bp, Homo sapien
gaaaggaacctcatacctatgggca

SEQ ID NO: 2923497 - DNA, 25 bp, Homo sapien
tctactgggataaggcagatacagc

SEQ ID NO: 2923498 - DNA, 25 bp, Homo sapien
tggcatatcatgtggtcagggccct

SEQ ID NO: 2923499 - DNA, 25 bp, Homo sapien
ccatttttccccagtcgatggctgc

SEQ ID NO: 2923500 - DNA, 25 bp, Homo sapien
gctgcttctgtttccgccgttctgc

SEQ ID NO: 2923501 - DNA, 25 bp, Homo sapien
gggagggccgaggtgtcagccgctg

SEQ ID NO: 2923502 - DNA, 25 bp, Homo sapien
tttccccagtcgatggctgcatggc

SEQ ID NO: 2923503 - DNA, 25 bp, Homo sapien
tgttgcctagcatacactgagctca

SEQ ID NO: 2923504 - DNA, 25 bp, Homo sapien
tcagaggtaaccagagtccgaggag

SEQ ID NO: 2923505 - DNA, 25 bp, Homo sapien
catccgggttgaccaccaaagagaa

SEQ ID NO: 2923506 - DNA, 25 bp, Homo sapien
ccggctgttggcatcagggtcagaa

SEQ ID NO: 2923507 - DNA, 25 bp, Homo sapien
catttgcgacgtaccaggcgttggg

SEQ ID NO: 2923508 - DNA, 25 bp, Homo sapien
ggcaggtatcactatctccatgtta

SEQ ID NO: 2923509 - DNA, 25 bp, Homo sapien
gtagaagctgcctctagtctatgaa

SEQ ID NO: 2923510 - DNA, 25 bp, Homo sapien
cacccctcaaagagctggagagttg

SEQ ID NO: 2923511 - DNA, 25 bp, Homo sapien
ctcccgcctcttgcctctctgagag

SEQ ID NO: 2923512 - DNA, 25 bp, Homo sapien
cgcctcttgcctctctgagagctgg

SEQ ID NO: 2923513 - DNA, 25 bp, Homo sapien
atcctcccgcctcttgcctctctga

SEQ ID NO: 2923514 - DNA, 25 bp, Homo sapien
cccgcctcttgcctctctgagagct

SEQ ID NO: 2923515 - DNA, 25 bp, Homo sapien
tggctcctgaaacagcaaggcagag

SEQ ID NO: 2923516 - DNA, 25 bp, Homo sapien
catgactttagggtccagggtggat

SEQ ID NO: 2923517 - DNA, 25 bp, Homo sapien
tgtgtctctttcatggtggctcctg

SEQ ID NO: 2923518 - DNA, 25 bp, Homo sapien
tccagattgagtaaaaccagagggt

SEQ ID NO: 2923519 - DNA, 25 bp, Homo sapien
tgggagttctgtgttccgtgtgcat

SEQ ID NO: 2923520 - DNA, 25 bp, Homo sapien
gaatgtcgtcgatatggccataact

SEQ ID NO: 2923521 - DNA, 25 bp, Homo sapien
cacactctcctgtgattgttttttc

SEQ ID NO: 2923522 - DNA, 25 bp, Homo sapien
gatcaggcagagcaatagtagcagc

SEQ ID NO: 2923523 - DNA, 25 bp, Homo sapien
agagcttgacccctggacatttgca

SEQ ID NO: 2923524 - DNA, 25 bp, Homo sapien
gcctgctgggccctttgtgtttgag

SEQ ID NO: 2923525 - DNA, 25 bp, Homo sapien
tgactttatccagaccaaagagctg

SEQ ID NO: 2923526 - DNA, 25 bp, Homo sapien
gaagaagcccacatgttgcccatga

SEQ ID NO: 2923527 - DNA, 25 bp, Homo sapien
ccccgcgtaatcgtagggtctgcgc

SEQ ID NO: 2923528 - DNA, 25 bp, Homo sapien
cgctctgtaatggtagggcagcctc

SEQ ID NO: 2923529 - DNA, 25 bp, Homo sapien
cgcgtaatcgtaggaactatccggc

SEQ ID NO: 2923530 - DNA, 25 bp, Homo sapien
aattggcggccgaagagtctcctcg

SEQ ID NO: 2923531 - DNA, 25 bp, Homo sapien
tgtgaaaagggtctccaatgctcgt

SEQ ID NO: 2923532 - DNA, 25 bp, Homo sapien
gaagacacgcgtttatttgctcagg

SEQ ID NO: 2923533 - DNA, 25 bp, Homo sapien
tttcgtgcgtgaacaaacatgcgcc

SEQ ID NO: 2923534 - DNA, 25 bp, Homo sapien
tgggtaatttgcagagcggcgccct

SEQ ID NO: 2923535 - DNA, 25 bp, Homo sapien
cttccttcttcgctttcggcgccat

SEQ ID NO: 2923536 - DNA, 25 bp, Homo sapien
tactgcagcgtgtccgaaacgcagg

SEQ ID NO: 2923537 - DNA, 25 bp, Homo sapien
ggcaatccccggtaaaccagctgcg

SEQ ID NO: 2923538 - DNA, 25 bp, Homo sapien
ttcgttcgctctgcggcgcggcaat

SEQ ID NO: 2923539 - DNA, 25 bp, Homo sapien
ccagcagccgtgttcccaattcgtt

SEQ ID NO: 2923540 - DNA, 25 bp, Homo sapien
tgagggcactaattccttacaggcc

SEQ ID NO: 2923541 - DNA, 25 bp, Homo sapien
gatgcatgtagcttcccagaaccga

SEQ ID NO: 2923542 - DNA, 25 bp, Homo sapien
catcgcaaaaccacgctgcggagag

SEQ ID NO: 2923543 - DNA, 25 bp, Homo sapien
tagcccggttgaacatgaaccagaa

SEQ ID NO: 2923544 - DNA, 25 bp, Homo sapien
ttccggccccaagaactgcagtggg

SEQ ID NO: 2923545 - DNA, 25 bp, Homo sapien
tcatatgcacgataccagaggcgaa

SEQ ID NO: 2923546 - DNA, 25 bp, Homo sapien
ggcgaaagcgaccaactctaagtaa

SEQ ID NO: 2923547 - DNA, 25 bp, Homo sapien
taactccagggatacgactatgaaa

SEQ ID NO: 2923548 - DNA, 25 bp, Homo sapien
ggtgggtgacgtgcggatcttcttc

SEQ ID NO: 2923549 - DNA, 25 bp, Homo sapien
ggtgacgtgcggatcttcttctttt

SEQ ID NO: 2923550 - DNA, 25 bp, Homo sapien
gggtgacgtgcggatcttcttcttt

SEQ ID NO: 2923551 - DNA, 25 bp, Homo sapien
tgacgtgcggatcttcttctttttg

SEQ ID NO: 2923552 - DNA, 25 bp, Homo sapien
tcatgggtacagggggcagtactga

SEQ ID NO: 2923553 - DNA, 25 bp, Homo sapien
tttcatgggtacagggggcagtact

SEQ ID NO: 2923554 - DNA, 25 bp, Homo sapien
ttcatgggtacagggggcagtactg

SEQ ID NO: 2923555 - DNA, 25 bp, Homo sapien
catgggtacagggggcagtactgac

SEQ ID NO: 2923556 - DNA, 25 bp, Homo sapien
gattgttcccgatagcagtaggagc

SEQ ID NO: 2923557 - DNA, 25 bp, Homo sapien
ctcagtagtgggactagcggcgcct

SEQ ID NO: 2923558 - DNA, 25 bp, Homo sapien
gaagcttctatacaccgcagcaggc

SEQ ID NO: 2923559 - DNA, 25 bp, Homo sapien
tttgagaaaccatcacgcagagtga

SEQ ID NO: 2923560 - DNA, 25 bp, Homo sapien
tctcttgaagggctcttacaacctc

SEQ ID NO: 2923561 - DNA, 25 bp, Homo sapien
caggggcagaacgttgtgcattttc

SEQ ID NO: 2923562 - DNA, 25 bp, Homo sapien
tacaacctcaagtgattaaagaatc

SEQ ID NO: 2923563 - DNA, 25 bp, Homo sapien
aaatctaagggcctgaagccccaat

SEQ ID NO: 2923564 - DNA, 25 bp, Homo sapien
gaggtaccaatcactttgttcagac

SEQ ID NO: 2923565 - DNA, 25 bp, Homo sapien
ctttggtcgctttacagtgtcatca

SEQ ID NO: 2923566 - DNA, 25 bp, Homo sapien
tgttcagactttggtcgctttacag

SEQ ID NO: 2923567 - DNA, 25 bp, Homo sapien
ggtgcatcagacaacgaggtaccaa

SEQ ID NO: 2923568 - DNA, 25 bp, Homo sapien
ctgggagaggcaaaatggggtcacc

SEQ ID NO: 2923569 - DNA, 25 bp, Homo sapien
gggcccattcttttggagcccagag

SEQ ID NO: 2923570 - DNA, 25 bp, Homo sapien
ggagaggcaaaatggggtcacctgg

SEQ ID NO: 2923571 - DNA, 25 bp, Homo sapien
ctgggcccattcttttggagcccag

SEQ ID NO: 2923572 - DNA, 25 bp, Homo sapien
tcagcggaaacttgatgatagcata

SEQ ID NO: 2923573 - DNA, 25 bp, Homo sapien
ggtcagcggaaacttgatgatagca

SEQ ID NO: 2923574 - DNA, 25 bp, Homo sapien
gtggtcagcggaaacttgatgatag

SEQ ID NO: 2923575 - DNA, 25 bp, Homo sapien
ggcagactcagtggtcagcggaaac

SEQ ID NO: 2923576 - DNA, 25 bp, Homo sapien
cttggccacatcaatgtcatacagc

SEQ ID NO: 2923577 - DNA, 25 bp, Homo sapien
gaccttggccacatcaatgtcatac

SEQ ID NO: 2923578 - DNA, 25 bp, Homo sapien
cacaatgaacacaagtgtgttgttg

SEQ ID NO: 2923579 - DNA, 25 bp, Homo sapien
gccacatcaatgtcatacagcttct

SEQ ID NO: 2923580 - DNA, 25 bp, Homo sapien
gactacctaaacatcaaaaagcttc

SEQ ID NO: 2923581 - DNA, 25 bp, Homo sapien
tgcatagctcggactacacgtgtag

SEQ ID NO: 2923582 - DNA, 25 bp, Homo sapien
agtacaatggggcaatcatgggtga

SEQ ID NO: 2923583 - DNA, 25 bp, Homo sapien
tacacgtgtagtcctgcattaccag

SEQ ID NO: 2923584 - DNA, 25 bp, Homo sapien
taagacttaaaccaaggtaatctgc

SEQ ID NO: 2923585 - DNA, 25 bp, Homo sapien
cacgtgtcgcactctagttgccttt

SEQ ID NO: 2923586 - DNA, 25 bp, Homo sapien
aaggtaatctgccacgtgtcgcact

SEQ ID NO: 2923587 - DNA, 25 bp, Homo sapien
cacaggccacattaagacttaaacc

SEQ ID NO: 2923588 - DNA, 25 bp, Homo sapien
ttcagtggttcctttgttcatgtca

SEQ ID NO: 2923589 - DNA, 25 bp, Homo sapien
catgtcattcttttccaataatgat

SEQ ID NO: 2923590 - DNA, 25 bp, Homo sapien
ataatgatttttccatcattagccc

SEQ ID NO: 2923591 - DNA, 25 bp, Homo sapien
cacttcagtggttcctttgttcatg

SEQ ID NO: 2923592 - DNA, 25 bp, Homo sapien
gtagagaaggaagccttagtccctg

SEQ ID NO: 2923593 - DNA, 25 bp, Homo sapien
gagaaggaagccttagtccctgcca

SEQ ID NO: 2923594 - DNA, 25 bp, Homo sapien
aagccttagtccctgccaccctcac

SEQ ID NO: 2923595 - DNA, 25 bp, Homo sapien
tagggtagagaaggaagccttagtc

SEQ ID NO: 2923596 - DNA, 25 bp, Homo sapien
ttgttggcaacatccaaagcatcgt

SEQ ID NO: 2923597 - DNA, 25 bp, Homo sapien
gttggcaacatccaaagcatcgtaa

SEQ ID NO: 2923598 - DNA, 25 bp, Homo sapien
tggcaacatccaaagcatcgtaatc

SEQ ID NO: 2923599 - DNA, 25 bp, Homo sapien
ggcaacatccaaagcatcgtaatca

SEQ ID NO: 2923600 - DNA, 25 bp, Homo sapien
ggtgagcattaaggggtttgtagga

SEQ ID NO: 2923601 - DNA, 25 bp, Homo sapien
gggtgcagtcagttaattatgacta

SEQ ID NO: 2923602 - DNA, 25 bp, Homo sapien
gctttggtcgctaacatatgcatca

SEQ ID NO: 2923603 - DNA, 25 bp, Homo sapien
aaagatcaggctttggtcgctaaca

SEQ ID NO: 2923604 - DNA, 25 bp, Homo sapien
atgactaatcagcaaagatcaggct

SEQ ID NO: 2923605 - DNA, 25 bp, Homo sapien
tatgaagattaagctggaatgttat

SEQ ID NO: 2923606 - DNA, 25 bp, Homo sapien
aatatgaagattaagctggaatgtt

SEQ ID NO: 2923607 - DNA, 25 bp, Homo sapien
tgaggataaggtttgtcaaggatag

SEQ ID NO: 2923608 - DNA, 25 bp, Homo sapien
gtgaggataaggtttgtcaaggata

SEQ ID NO: 2923609 - DNA, 25 bp, Homo sapien
tcccagcccaaccagaaattgacag

SEQ ID NO: 2923610 - DNA, 25 bp, Homo sapien
aggataagtagaacaggagtcttgc

SEQ ID NO: 2923611 - DNA, 25 bp, Homo sapien
taagtagaacaggagtcttgcccaa

SEQ ID NO: 2923612 - DNA, 25 bp, Homo sapien
ttttcctaggacactaactctagtc

SEQ ID NO: 2923613 - DNA, 25 bp, Homo sapien
cacactcccctgaaatggatgctaa

SEQ ID NO: 2923614 - DNA, 25 bp, Homo sapien
gggaagcagacagaccggttggaca

SEQ ID NO: 2923615 - DNA, 25 bp, Homo sapien
accctgggcattggtttcatacaca

SEQ ID NO: 2923616 - DNA, 25 bp, Homo sapien
gcattggtttcatacacagcctctt

SEQ ID NO: 2923617 - DNA, 25 bp, Homo sapien
gaaggttagcgtccctgtatcagag

SEQ ID NO: 2923618 - DNA, 25 bp, Homo sapien
tctcacctagaaaccgactgggctt

SEQ ID NO: 2923619 - DNA, 25 bp, Homo sapien
cactcaaacggcttggtccctgggt

SEQ ID NO: 2923620 - DNA, 25 bp, Homo sapien
ttcccagaacagacctaggaggcgg

SEQ ID NO: 2923621 - DNA, 25 bp, Homo sapien
ggctcctgctctgcgggagctctag

SEQ ID NO: 2923622 - DNA, 25 bp, Homo sapien
gaaatgagctcaaggcaaaagccta

SEQ ID NO: 2923623 - DNA, 25 bp, Homo sapien
aagaccgcggtttcgccgaaatgag

SEQ ID NO: 2923624 - DNA, 25 bp, Homo sapien
gctaggctctttaccggaagtgagg

SEQ ID NO: 2923625 - DNA, 25 bp, Homo sapien
agtgctcatcttcccatgggggaag

SEQ ID NO: 2923626 - DNA, 25 bp, Homo sapien
gtgctcatcttcccatgggggaaga

SEQ ID NO: 2923627 - DNA, 25 bp, Homo sapien
catttcttagagtttcacttccgtc

SEQ ID NO: 2923628 - DNA, 25 bp, Homo sapien
ttccgtcccccacgcggcgcgtgcg

SEQ ID NO: 2923629 - DNA, 25 bp, Homo sapien
cacttccgtcccccacgcggcgcgt

SEQ ID NO: 2923630 - DNA, 25 bp, Homo sapien
ctcatttcttagagtttcacttccg

SEQ ID NO: 2923631 - DNA, 25 bp, Homo sapien
caccactcggatccgctcgtacttc

SEQ ID NO: 2923632 - DNA, 25 bp, Homo sapien
actcggatccgctcgtacttctcca

SEQ ID NO: 2923633 - DNA, 25 bp, Homo sapien
ccactcggatccgctcgtacttctc

SEQ ID NO: 2923634 - DNA, 25 bp, Homo sapien
cccaccactcggatccgctcgtact

SEQ ID NO: 2923635 - DNA, 25 bp, Homo sapien
tgcttgatgatcaccagcttctggt

SEQ ID NO: 2923636 - DNA, 25 bp, Homo sapien
aggacctggcactcattctgggctg

SEQ ID NO: 2923637 - DNA, 25 bp, Homo sapien
ccatggcgatcataagggctttgtc

SEQ ID NO: 2923638 - DNA, 25 bp, Homo sapien
tccaggaagttctcgtagtactcaa

SEQ ID NO: 2923639 - DNA, 25 bp, Homo sapien
cagccaggccactgtaaggaggctg

SEQ ID NO: 2923640 - DNA, 25 bp, Homo sapien
ccggggtcagataattgggaccaga

SEQ ID NO: 2923641 - DNA, 25 bp, Homo sapien
gaccagaactctaacccttggccat

SEQ ID NO: 2923642 - DNA, 25 bp, Homo sapien
ccagaggtaagaggccctccagcca

SEQ ID NO: 2923643 - DNA, 25 bp, Homo sapien
gaaatcaccgatcttgacgaccatg

SEQ ID NO: 2923644 - DNA, 25 bp, Homo sapien
acgaccatgcggtgtttgtcaagca

SEQ ID NO: 2923645 - DNA, 25 bp, Homo sapien
tacagcgcttttggatgaactcagc

SEQ ID NO: 2923646 - DNA, 25 bp, Homo sapien
gatcttggagatgccgaaatcaccg

SEQ ID NO: 2923647 - DNA, 25 bp, Homo sapien
ctgcaggatagaagctgggatcaca

SEQ ID NO: 2923648 - DNA, 25 bp, Homo sapien
caggatagaagctgggatcacagcc

SEQ ID NO: 2923649 - DNA, 25 bp, Homo sapien
tgcaggatagaagctgggatcacag

SEQ ID NO: 2923650 - DNA, 25 bp, Homo sapien
gcaggatagaagctgggatcacagc

SEQ ID NO: 2923651 - DNA, 25 bp, Homo sapien
gtagggcttgccctcacacagctca

SEQ ID NO: 2923652 - DNA, 25 bp, Homo sapien
cttctggttgtagggcttgccctca

SEQ ID NO: 2923653 - DNA, 25 bp, Homo sapien
gctggccagctcgtagaggacacag

SEQ ID NO: 2923654 - DNA, 25 bp, Homo sapien
cgcagcctcgaaagccctcttgagg

SEQ ID NO: 2923655 - DNA, 25 bp, Homo sapien
tctaatgggaggcaagacctactct

SEQ ID NO: 2923656 - DNA, 25 bp, Homo sapien
tctgataagggagagacatgactca

SEQ ID NO: 2923657 - DNA, 25 bp, Homo sapien
tgctgggaaaactcaagtcttgctc

SEQ ID NO: 2923658 - DNA, 25 bp, Homo sapien
gtcccctggagggtgcatacactca

SEQ ID NO: 2923659 - DNA, 25 bp, Homo sapien
aagctcagggctgtaccggtcagag

SEQ ID NO: 2923660 - DNA, 25 bp, Homo sapien
taggtgcaaaggtgccactcatgat

SEQ ID NO: 2923661 - DNA, 25 bp, Homo sapien
cactgcccacgtcggtgtggaggtt

SEQ ID NO: 2923662 - DNA, 25 bp, Homo sapien
tcaggaccagctggcgaagctcagg

SEQ ID NO: 2923663 - DNA, 25 bp, Homo sapien
cctgccgcccaggaccgctcgctgt

SEQ ID NO: 2923664 - DNA, 25 bp, Homo sapien
gcccaggaccgctcgctgtccctgc

SEQ ID NO: 2923665 - DNA, 25 bp, Homo sapien
tgccgcccaggaccgctcgctgtcc

SEQ ID NO: 2923666 - DNA, 25 bp, Homo sapien
ccgcccaggaccgctcgctgtccct

SEQ ID NO: 2923667 - DNA, 25 bp, Homo sapien
ctcctgtgctcccactgggtgccca

SEQ ID NO: 2923668 - DNA, 25 bp, Homo sapien
atgcaggaagggaggacttgcccca

SEQ ID NO: 2923669 - DNA, 25 bp, Homo sapien
tgcaggaagggaggacttgccccag

SEQ ID NO: 2923670 - DNA, 25 bp, Homo sapien
tgcaggacagatgggggcctaagga

SEQ ID NO: 2923671 - DNA, 25 bp, Homo sapien
gcctaaggacaaagaccctcctgac

SEQ ID NO: 2923672 - DNA, 25 bp, Homo sapien
tgctgggggccacggacttctctgc

SEQ ID NO: 2923673 - DNA, 25 bp, Homo sapien
gcagcggacactggtggtcctgctc

SEQ ID NO: 2923674 - DNA, 25 bp, Homo sapien
tgttgctgggggccacggacttctc

SEQ ID NO: 2923675 - DNA, 25 bp, Homo sapien
tgcagcggacactggtggtcctgct

SEQ ID NO: 2923676 - DNA, 25 bp, Homo sapien
gcatggggactattaaactgatggg

SEQ ID NO: 2923677 - DNA, 25 bp, Homo sapien
gggactggcggcctcttcccactta

SEQ ID NO: 2923678 - DNA, 25 bp, Homo sapien
aggtacagtgcatggggactattaa

SEQ ID NO: 2923679 - DNA, 25 bp, Homo sapien
atccatggggactggcggcctcttc

SEQ ID NO: 2923680 - DNA, 25 bp, Homo sapien
ggtggtgggatggctggcctcacag

SEQ ID NO: 2923681 - DNA, 25 bp, Homo sapien
tggtggtgggatggctggcctcaca

SEQ ID NO: 2923682 - DNA, 25 bp, Homo sapien
cagagcgcgtgacgccggctttctg

SEQ ID NO: 2923683 - DNA, 25 bp, Homo sapien
atgagacgcccagagcgcgtgacgc

SEQ ID NO: 2923684 - DNA, 25 bp, Homo sapien
ctcccacaggatgagacgcccagag

SEQ ID NO: 2923685 - DNA, 25 bp, Homo sapien
cggctttctgcgtgcgcccagctgc

SEQ ID NO: 2923686 - DNA, 25 bp, Homo sapien
ctggccctccaggaaacgcgagatg

SEQ ID NO: 2923687 - DNA, 25 bp, Homo sapien
ccacgtgcttgatggtcacacccga

SEQ ID NO: 2923688 - DNA, 25 bp, Homo sapien
gccctccaggaaacgcgagatgaac

SEQ ID NO: 2923689 - DNA, 25 bp, Homo sapien
ttgatggtcacacccgactggccct

SEQ ID NO: 2923690 - DNA, 25 bp, Homo sapien
tgatgtcagtgaggctgccatggcc

SEQ ID NO: 2923691 - DNA, 25 bp, Homo sapien
gctgccgctgccgaatgtcatgatg

SEQ ID NO: 2923692 - DNA, 25 bp, Homo sapien
ctgccatggcctaggcacccattgc

SEQ ID NO: 2923693 - DNA, 25 bp, Homo sapien
ctgccgaatgtcatgatgatgcctc

SEQ ID NO: 2923694 - DNA, 25 bp, Homo sapien
ccagcaaagcctccacaatggtggg

SEQ ID NO: 2923695 - DNA, 25 bp, Homo sapien
gccagcacgtgagaggccccacagg

SEQ ID NO: 2923696 - DNA, 25 bp, Homo sapien
ccccaggcaaatagttctcgctcag

SEQ ID NO: 2923697 - DNA, 25 bp, Homo sapien
tctccacggccccaggcaaatagtt

SEQ ID NO: 2923698 - DNA, 25 bp, Homo sapien
ggaggaatcgataccacatacaact

SEQ ID NO: 2923699 - DNA, 25 bp, Homo sapien
tgttgctcccacaggctagggcttg

SEQ ID NO: 2923700 - DNA, 25 bp, Homo sapien
tacaactcgctgagcttcctgtcct

SEQ ID NO: 2923701 - DNA, 25 bp, Homo sapien
acagtgaggatcatggaggaatcga

SEQ ID NO: 2923702 - DNA, 25 bp, Homo sapien
ggtgcagagcctagtagtgtgaagc

SEQ ID NO: 2923703 - DNA, 25 bp, Homo sapien
agtgcccaggtctatactcagcaga

SEQ ID NO: 2923704 - DNA, 25 bp, Homo sapien
gcagtgcccaggtctatactcagca

SEQ ID NO: 2923705 - DNA, 25 bp, Homo sapien
gcccaggtctatactcagcagaggc

SEQ ID NO: 2923706 - DNA, 25 bp, Homo sapien
aaggcatccccacaggctaccattg

SEQ ID NO: 2923707 - DNA, 25 bp, Homo sapien
tgcctcggcgagtattggtgcccaa

SEQ ID NO: 2923708 - DNA, 25 bp, Homo sapien
gccttggaccttacagggtgcccga

SEQ ID NO: 2923709 - DNA, 25 bp, Homo sapien
cccaatagctacagtgaaggcatcc

SEQ ID NO: 2923710 - DNA, 25 bp, Homo sapien
caacaggacacggaagtcaccgtgt

SEQ ID NO: 2923711 - DNA, 25 bp, Homo sapien
ccgtgtaagggtgtgtctcatccaa

SEQ ID NO: 2923712 - DNA, 25 bp, Homo sapien
gagggagtccggcatcctcatccct

SEQ ID NO: 2923713 - DNA, 25 bp, Homo sapien
gtctcatccaactgcactggccgag

SEQ ID NO: 2923714 - DNA, 25 bp, Homo sapien
agagaaacccttgcagcttctgagg

SEQ ID NO: 2923715 - DNA, 25 bp, Homo sapien
gagaaacccttgcagcttctgaggg

SEQ ID NO: 2923716 - DNA, 25 bp, Homo sapien
aacccttgcagcttctgagggcagt

SEQ ID NO: 2923717 - DNA, 25 bp, Homo sapien
gaaacccttgcagcttctgagggca

SEQ ID NO: 2923718 - DNA, 25 bp, Homo sapien
cagggggggaccggctcatctgtga

SEQ ID NO: 2923719 - DNA, 25 bp, Homo sapien
agggtggtccagaggtgaatccggg

SEQ ID NO: 2923720 - DNA, 25 bp, Homo sapien
tcagggtggtccagaggtgaatccg

SEQ ID NO: 2923721 - DNA, 25 bp, Homo sapien
ggtggtccagaggtgaatccgggtg

SEQ ID NO: 2923722 - DNA, 25 bp, Homo sapien
tggtccagaggtgaatccgggtgcc

SEQ ID NO: 2923723 - DNA, 25 bp, Homo sapien
tgaggtttccatatccaaggccaaa

SEQ ID NO: 2923724 - DNA, 25 bp, Homo sapien
tctgtgtggagctacagctgccttc

SEQ ID NO: 2923725 - DNA, 25 bp, Homo sapien
gagacagctgcaagtcatgccttgg

SEQ ID NO: 2923726 - DNA, 25 bp, Homo sapien
ctggccacaagggatcaagggatcc

SEQ ID NO: 2923727 - DNA, 25 bp, Homo sapien
tgtcctctgggaaaccggtctggtc

SEQ ID NO: 2923728 - DNA, 25 bp, Homo sapien
gcaagccgacgtctagcaaatcctg

SEQ ID NO: 2923729 - DNA, 25 bp, Homo sapien
ccccgggctatgcagaagctaggca

SEQ ID NO: 2923730 - DNA, 25 bp, Homo sapien
tggagatagagtcccggtaagcacc

SEQ ID NO: 2923731 - DNA, 25 bp, Homo sapien
gggcgagcggccggcacgggcgagc

SEQ ID NO: 2923732 - DNA, 25 bp, Homo sapien
cggcacgggcgagcggggccaggca

SEQ ID NO: 2923733 - DNA, 25 bp, Homo sapien
cgagcggccggcacgggcgagcggg

SEQ ID NO: 2923734 - DNA, 25 bp, Homo sapien
ctcgctggagcggcgctcccggctc

SEQ ID NO: 2923735 - DNA, 25 bp, Homo sapien
cacagcagccgtcgcttgggcttct

SEQ ID NO: 2923736 - DNA, 25 bp, Homo sapien
ggaacttgtagtcgaagccaggcat

SEQ ID NO: 2923737 - DNA, 25 bp, Homo sapien
atgggcttcccgcacagtgggcaca

SEQ ID NO: 2923738 - DNA, 25 bp, Homo sapien
tgcaggcaggtatcgcagaaacggt

SEQ ID NO: 2923739 - DNA, 25 bp, Homo sapien
cggttcccaaccagcctagatgaga

SEQ ID NO: 2923740 - DNA, 25 bp, Homo sapien
tcaggacttggccaacaggtggcag

SEQ ID NO: 2923741 - DNA, 25 bp, Homo sapien
gggaaaggaacacgctgcacagtca

SEQ ID NO: 2923742 - DNA, 25 bp, Homo sapien
ctgagattaagtgcgaaggctgccc

SEQ ID NO: 2923743 - DNA, 25 bp, Homo sapien
tctcattaggggaaagggaggcctg

SEQ ID NO: 2923744 - DNA, 25 bp, Homo sapien
cccctccactgaggcagcctccctt

SEQ ID NO: 2923745 - DNA, 25 bp, Homo sapien
tcattaggggaaagggaggcctggc

SEQ ID NO: 2923746 - DNA, 25 bp, Homo sapien
cactgaggcagcctcccttcctcac

SEQ ID NO: 2923747 - DNA, 25 bp, Homo sapien
aggaagctggtcctcagggcacttg

SEQ ID NO: 2923748 - DNA, 25 bp, Homo sapien
ccagaggaagctggtcctcagggca

SEQ ID NO: 2923749 - DNA, 25 bp, Homo sapien
cttggcatagtccagaggaagctgg

SEQ ID NO: 2923750 - DNA, 25 bp, Homo sapien
catagtccagaggaagctggtcctc

SEQ ID NO: 2923751 - DNA, 25 bp, Homo sapien
tcccaaggcttttggttgacactgg

SEQ ID NO: 2923752 - DNA, 25 bp, Homo sapien
caacagactgtgcttgggcttcttc

SEQ ID NO: 2923753 - DNA, 25 bp, Homo sapien
aagggcaacagactgtgcttgggct

SEQ ID NO: 2923754 - DNA, 25 bp, Homo sapien
ggcttttggttgacactggccctga

SEQ ID NO: 2923755 - DNA, 25 bp, Homo sapien
tctgatgctgggtcctaacatgcct

SEQ ID NO: 2923756 - DNA, 25 bp, Homo sapien
gagggaacacttcttgcgggcacag

SEQ ID NO: 2923757 - DNA, 25 bp, Homo sapien
ttcccctggtggagggatactggcc

SEQ ID NO: 2923758 - DNA, 25 bp, Homo sapien
taacatgcctgcacaggacgcttcc

SEQ ID NO: 2923759 - DNA, 25 bp, Homo sapien
tagatgacgtagtggcccactccag

SEQ ID NO: 2923760 - DNA, 25 bp, Homo sapien
ctgtagatgacgtagtggcccactc

SEQ ID NO: 2923761 - DNA, 25 bp, Homo sapien
taggcaggcccaatacttgtacttc

SEQ ID NO: 2923762 - DNA, 25 bp, Homo sapien
gatgcagcggataggcaggcccaat

SEQ ID NO: 2923763 - DNA, 25 bp, Homo sapien
ggtgccagccctcacatcagagcct

SEQ ID NO: 2923764 - DNA, 25 bp, Homo sapien
tgccagccctcacatcagagcctca

SEQ ID NO: 2923765 - DNA, 25 bp, Homo sapien
caattagtgcctgccaagggagagg

SEQ ID NO: 2923766 - DNA, 25 bp, Homo sapien
tggtgccagccctcacatcagagcc

SEQ ID NO: 2923767 - DNA, 25 bp, Homo sapien
tgcaagtgtgcaggtagatcacggc

SEQ ID NO: 2923768 - DNA, 25 bp, Homo sapien
ccgcttggggcagtcatgctgcaag

SEQ ID NO: 2923769 - DNA, 25 bp, Homo sapien
cagggaatgacattgaagctgcagg

SEQ ID NO: 2923770 - DNA, 25 bp, Homo sapien
agatcacggcggctcagcttcatgg

SEQ ID NO: 2923771 - DNA, 25 bp, Homo sapien
actgaagtcacagccacaaaactcg

SEQ ID NO: 2923772 - DNA, 25 bp, Homo sapien
ctgaagtcacagccacaaaactcgc

SEQ ID NO: 2923773 - DNA, 25 bp, Homo sapien
cactgaagtcacagccacaaaactc

SEQ ID NO: 2923774 - DNA, 25 bp, Homo sapien
aaagacgaactccttagtgcagtag

SEQ ID NO: 2923775 - DNA, 25 bp, Homo sapien
tccttagtgcagtaggtgcagggct

SEQ ID NO: 2923776 - DNA, 25 bp, Homo sapien
gcatcatgcgggcaccacacttatt

SEQ ID NO: 2923777 - DNA, 25 bp, Homo sapien
catgcgggcaccacacttattctca

SEQ ID NO: 2923778 - DNA, 25 bp, Homo sapien
tgactacctgtcacctaccctgcaa

SEQ ID NO: 2923779 - DNA, 25 bp, Homo sapien
ccctgcaacccacagttcagggaag

SEQ ID NO: 2923780 - DNA, 25 bp, Homo sapien
accctgcaacccacagttcagggaa

SEQ ID NO: 2923781 - DNA, 25 bp, Homo sapien
atatcctgactacctgtcacctacc

SEQ ID NO: 2923782 - DNA, 25 bp, Homo sapien
ggcagagcaccagggcggtgttaca

SEQ ID NO: 2923783 - DNA, 25 bp, Homo sapien
ccacagtgcccacaccacattggtt

SEQ ID NO: 2923784 - DNA, 25 bp, Homo sapien
cggagtctttgaatgggcagagcac

SEQ ID NO: 2923785 - DNA, 25 bp, Homo sapien
cagccggagtctttgaatgggcaga

SEQ ID NO: 2923786 - DNA, 25 bp, Homo sapien
taagtacatcagaagctgagcctct

SEQ ID NO: 2923787 - DNA, 25 bp, Homo sapien
cagctctacgtgaggaagacagagg

SEQ ID NO: 2923788 - DNA, 25 bp, Homo sapien
tgtctagggcttcaagggcaaaagg

SEQ ID NO: 2923789 - DNA, 25 bp, Homo sapien
ggtacagggtagcaggcacccagct

SEQ ID NO: 2923790 - DNA, 25 bp, Homo sapien
gcaccaggcagcacacgaatgtaca

SEQ ID NO: 2923791 - DNA, 25 bp, Homo sapien
cctgtagccgccgtccatagctgcc

SEQ ID NO: 2923792 - DNA, 25 bp, Homo sapien
ttggcctcctgtagccgccgtccat

SEQ ID NO: 2923793 - DNA, 25 bp, Homo sapien
agctcctgccgttgccggctcacca

SEQ ID NO: 2923794 - DNA, 25 bp, Homo sapien
ctcatccagggagccccgccacgtg

SEQ ID NO: 2923795 - DNA, 25 bp, Homo sapien
tcatccagggagccccgccacgtgc

SEQ ID NO: 2923796 - DNA, 25 bp, Homo sapien
gatcttccggggcagttcaacagca

SEQ ID NO: 2923797 - DNA, 25 bp, Homo sapien
catcatcccgcacatagtttcgctt

SEQ ID NO: 2923798 - DNA, 25 bp, Homo sapien
gcagcacggatgaagactgcatcat

SEQ ID NO: 2923799 - DNA, 25 bp, Homo sapien
aacttgggataaccaaagcccagag

SEQ ID NO: 2923800 - DNA, 25 bp, Homo sapien
gaagcaccaattggaggcacctgag

SEQ ID NO: 2923801 - DNA, 25 bp, Homo sapien
catgtctgccctacccaagaaggga

SEQ ID NO: 2923802 - DNA, 25 bp, Homo sapien
gagcaggcacctcagtccgtgtaga

SEQ ID NO: 2923803 - DNA, 25 bp, Homo sapien
ccgtgtagagtgtgaccggcaccaa

SEQ ID NO: 2923804 - DNA, 25 bp, Homo sapien
cgaacccgcggaagaatcactgata

SEQ ID NO: 2923805 - DNA, 25 bp, Homo sapien
tacaacaaatctgggaggtgagccg

SEQ ID NO: 2923806 - DNA, 25 bp, Homo sapien
ttttcccggcgtccatcagagggcg

SEQ ID NO: 2923807 - DNA, 25 bp, Homo sapien
acaaagcccgatgcagttttcccgg

SEQ ID NO: 2923808 - DNA, 25 bp, Homo sapien
aaagattgggccgatgatgacctcc

SEQ ID NO: 2923809 - DNA, 25 bp, Homo sapien
gacggtttatctggtgaagaagccc

SEQ ID NO: 2923810 - DNA, 25 bp, Homo sapien
ggagggccccatttctccctagata

SEQ ID NO: 2923811 - DNA, 25 bp, Homo sapien
cactgtgctcggtcaggtgtgtagc

SEQ ID NO: 2923812 - DNA, 25 bp, Homo sapien
tcgcctttggtgtgagatgttcctt

SEQ ID NO: 2923813 - DNA, 25 bp, Homo sapien
ccttctttcggagttcagcctgagt

SEQ ID NO: 2923814 - DNA, 25 bp, Homo sapien
gcatggaaaatgtactgtgatcccc

SEQ ID NO: 2923815 - DNA, 25 bp, Homo sapien
gagtcagatttaaagagcaccactg

SEQ ID NO: 2923816 - DNA, 25 bp, Homo sapien
tctgaagcaatgtgactgaagacca

SEQ ID NO: 2923817 - DNA, 25 bp, Homo sapien
tcatcccaagcgacaattagttggc

SEQ ID NO: 2923818 - DNA, 25 bp, Homo sapien
tgagcatggttctaacacctggagc

SEQ ID NO: 2923819 - DNA, 25 bp, Homo sapien
tatccactactgttcgttagccaga

SEQ ID NO: 2923820 - DNA, 25 bp, Homo sapien
agcaggccctgcagcatgcacagac

SEQ ID NO: 2923821 - DNA, 25 bp, Homo sapien
caggccctgcagcatgcacagaccc

SEQ ID NO: 2923822 - DNA, 25 bp, Homo sapien
ccctgcagcatgcacagaccctggc

SEQ ID NO: 2923823 - DNA, 25 bp, Homo sapien
aggctctggcccgccagcaggccct

SEQ ID NO: 2923824 - DNA, 25 bp, Homo sapien
tcttaaaaagactgacgctgtgcca

SEQ ID NO: 2923825 - DNA, 25 bp, Homo sapien
gaagcaggagccctctgatactcat

SEQ ID NO: 2923826 - DNA, 25 bp, Homo sapien
gacacagtttgagcagcctctttta

SEQ ID NO: 2923827 - DNA, 25 bp, Homo sapien
tctgcagttgctatcttagacacag

SEQ ID NO: 2923828 - DNA, 25 bp, Homo sapien
tggagcagtgtcttttgagttctat

SEQ ID NO: 2923829 - DNA, 25 bp, Homo sapien
ggagcagtgtcttttgagttctatt

SEQ ID NO: 2923830 - DNA, 25 bp, Homo sapien
agtcgttgggactataagtttatgc

SEQ ID NO: 2923831 - DNA, 25 bp, Homo sapien
aagagttggaattttactgcgttgc

SEQ ID NO: 2923832 - DNA, 25 bp, Homo sapien
aattttactgcgttgcccatgctgg

SEQ ID NO: 2923833 - DNA, 25 bp, Homo sapien
cgttgggactataagtttatgccac

SEQ ID NO: 2923834 - DNA, 25 bp, Homo sapien
tcttaccaccctttgcgggagccat

SEQ ID NO: 2923835 - DNA, 25 bp, Homo sapien
cctggttgatggcagaacagccttt

SEQ ID NO: 2923836 - DNA, 25 bp, Homo sapien
cagcctttcttcttaccaccctttg

SEQ ID NO: 2923837 - DNA, 25 bp, Homo sapien
cacctggttgatggcagaacagcct

SEQ ID NO: 2923838 - DNA, 25 bp, Homo sapien
aatgcacttgtgaatctcaatagtg

SEQ ID NO: 2923839 - DNA, 25 bp, Homo sapien
tccatgaatgcacttgtgaatctca

SEQ ID NO: 2923840 - DNA, 25 bp, Homo sapien
tgtgaatctcaatagtgtattcttg

SEQ ID NO: 2923841 - DNA, 25 bp, Homo sapien
acttgtgaatctcaatagtgtattc

SEQ ID NO: 2923842 - DNA, 25 bp, Homo sapien
tcctccttgggactgccttgatcag

SEQ ID NO: 2923843 - DNA, 25 bp, Homo sapien
tccatgcgtgtccattaaggttgtc

SEQ ID NO: 2923844 - DNA, 25 bp, Homo sapien
tgcgtgtccattaaggttgtcttca

SEQ ID NO: 2923845 - DNA, 25 bp, Homo sapien
gtgtccattaaggttgtcttcacca

SEQ ID NO: 2923846 - DNA, 25 bp, Homo sapien
taggagtggatatttggaactgtac

SEQ ID NO: 2923847 - DNA, 25 bp, Homo sapien
ctaggagtggatatttggaactgta

SEQ ID NO: 2923848 - DNA, 25 bp, Homo sapien
gccattttatctacaggagaagcca

SEQ ID NO: 2923849 - DNA, 25 bp, Homo sapien
cttctgacagattataggattgtgg

SEQ ID NO: 2923850 - DNA, 25 bp, Homo sapien
tccagggctttttcaggaaccgtgc

SEQ ID NO: 2923851 - DNA, 25 bp, Homo sapien
gctttttctggcttgcacagccttc

SEQ ID NO: 2923852 - DNA, 25 bp, Homo sapien
gcttgtttgcaaggtaggacatcct

SEQ ID NO: 2923853 - DNA, 25 bp, Homo sapien
ttttctccttcatacccagagttta

SEQ ID NO: 2923854 - DNA, 25 bp, Homo sapien
gctgttattcaaagcaattggtcat

SEQ ID NO: 2923855 - DNA, 25 bp, Homo sapien
caaaacagacttatgtatttctctg

SEQ ID NO: 2923856 - DNA, 25 bp, Homo sapien
aattagagaccaacacataaatagt

SEQ ID NO: 2923857 - DNA, 25 bp, Homo sapien
ttaattagagaccaacacataaata

SEQ ID NO: 2923858 - DNA, 25 bp, Homo sapien
cattttaattagagaccaacacata

SEQ ID NO: 2923859 - DNA, 25 bp, Homo sapien
ttttaattagagaccaacacataaa

SEQ ID NO: 2923860 - DNA, 25 bp, Homo sapien
tttgtaacttcttatatcaattact

SEQ ID NO: 2923861 - DNA, 25 bp, Homo sapien
gaaatttgtaacttcttatatcaat

SEQ ID NO: 2923862 - DNA, 25 bp, Homo sapien
aatttgtaacttcttatatcaatta

SEQ ID NO: 2923863 - DNA, 25 bp, Homo sapien
tgtaacttcttatatcaattacttg

SEQ ID NO: 2923864 - DNA, 25 bp, Homo sapien
cagggtgagattccatctcagggaa

SEQ ID NO: 2923865 - DNA, 25 bp, Homo sapien
gcgatagagcgtgactccatcacac

SEQ ID NO: 2923866 - DNA, 25 bp, Homo sapien
atcgtttcaacctgggaggcatagg

SEQ ID NO: 2923867 - DNA, 25 bp, Homo sapien
tgggcgatagagcgtgactccatca

SEQ ID NO: 2923868 - DNA, 25 bp, Homo sapien
gggccgggcagtggagaagtggtgg

SEQ ID NO: 2923869 - DNA, 25 bp, Homo sapien
agtggagaagtggtggcggcgggcg

SEQ ID NO: 2923870 - DNA, 25 bp, Homo sapien
ggggccgggcagtggagaagtggtg

SEQ ID NO: 2923871 - DNA, 25 bp, Homo sapien
ccgggcagtggagaagtggtggcgg

SEQ ID NO: 2923872 - DNA, 25 bp, Homo sapien
gcgcaggagcggctccgggtagtcc

SEQ ID NO: 2923873 - DNA, 25 bp, Homo sapien
cgcaggcgcaggagcggctccgggt

SEQ ID NO: 2923874 - DNA, 25 bp, Homo sapien
caggagcggctccgggtagtcccca

SEQ ID NO: 2923875 - DNA, 25 bp, Homo sapien
gcaggcgcaggagcggctccgggta

SEQ ID NO: 2923876 - DNA, 25 bp, Homo sapien
catgtccactagagacccaggggtc

SEQ ID NO: 2923877 - DNA, 25 bp, Homo sapien
ggggtccagaccatcaggcactgag

SEQ ID NO: 2923878 - DNA, 25 bp, Homo sapien
actgaggaagacgcccccggcaggg

SEQ ID NO: 2923879 - DNA, 25 bp, Homo sapien
caggcgcgtgcggcccgaaagggcc

SEQ ID NO: 2923880 - DNA, 25 bp, Homo sapien
gtcttgaactctgcctactccatct

SEQ ID NO: 2923881 - DNA, 25 bp, Homo sapien
tgccagactcttaacaccgattgaa

SEQ ID NO: 2923882 - DNA, 25 bp, Homo sapien
cacccgctccctcgcgacatgaggg

SEQ ID NO: 2923883 - DNA, 25 bp, Homo sapien
gacatgagggcccacctgccagact

SEQ ID NO: 2923884 - DNA, 25 bp, Homo sapien
taacaccgattgaacaagcctagcc

SEQ ID NO: 2923885 - DNA, 25 bp, Homo sapien
agagaaagcggaccccgcgacgcag

SEQ ID NO: 2923886 - DNA, 25 bp, Homo sapien
agccgaggccaagcggggaccagag

SEQ ID NO: 2923887 - DNA, 25 bp, Homo sapien
ccagagaaagcggaccccgcgacgc

SEQ ID NO: 2923888 - DNA, 25 bp, Homo sapien
agaagccgaggccaagcggggacca

SEQ ID NO: 2923889 - DNA, 25 bp, Homo sapien
ctgagagaatccgaggaagtggtcc

SEQ ID NO: 2923890 - DNA, 25 bp, Homo sapien
cgaactgtcgggctgagagaatccg

SEQ ID NO: 2923891 - DNA, 25 bp, Homo sapien
aactgtcgggctgagagaatccgag

SEQ ID NO: 2923892 - DNA, 25 bp, Homo sapien
gaatccgaggaagtggtccagggca

SEQ ID NO: 2923893 - DNA, 25 bp, Homo sapien
ctctgttcatggacaccgcggggac

SEQ ID NO: 2923894 - DNA, 25 bp, Homo sapien
ctgttcatggacaccgcggggacgc

SEQ ID NO: 2923895 - DNA, 25 bp, Homo sapien
tctgttcatggacaccgcggggacg

SEQ ID NO: 2923896 - DNA, 25 bp, Homo sapien
atctggatttcctgtcaagtgcttg

SEQ ID NO: 2923897 - DNA, 25 bp, Homo sapien
ctggatttcctgtcaagtgcttgtt

SEQ ID NO: 2923898 - DNA, 25 bp, Homo sapien
tctggatttcctgtcaagtgcttgt

SEQ ID NO: 2923899 - DNA, 25 bp, Homo sapien
tggatttcctgtcaagtgcttgttc

SEQ ID NO: 2923900 - DNA, 25 bp, Homo sapien
cgtaggacccgggaattctcaggca

SEQ ID NO: 2923901 - DNA, 25 bp, Homo sapien
gatggaccaagaggacatcctgctc

SEQ ID NO: 2923902 - DNA, 25 bp, Homo sapien
ggttggagagtgttgacttccctgc

SEQ ID NO: 2923903 - DNA, 25 bp, Homo sapien
tttcggcccagtagctggttggaga

SEQ ID NO: 2923904 - DNA, 25 bp, Homo sapien
gagcttggcagcgagtagtatgcac

SEQ ID NO: 2923905 - DNA, 25 bp, Homo sapien
gcgagtagtatgcaccttcctggaa

SEQ ID NO: 2923906 - DNA, 25 bp, Homo sapien
tggcagcgagtagtatgcaccttcc

SEQ ID NO: 2923907 - DNA, 25 bp, Homo sapien
agtatgcaccttcctggaaacaggg

SEQ ID NO: 2923908 - DNA, 25 bp, Homo sapien
cctgtttcaaggactccctttgtag

SEQ ID NO: 2923909 - DNA, 25 bp, Homo sapien
gagacagaactgtaccatgcctaaa

SEQ ID NO: 2923910 - DNA, 25 bp, Homo sapien
tttcctcacataaatgaatgtgacc

SEQ ID NO: 2923911 - DNA, 25 bp, Homo sapien
taagggagaccctcttagcttcacc

SEQ ID NO: 2923912 - DNA, 25 bp, Homo sapien
ctaaaatcaggaaagtgagataccc

SEQ ID NO: 2923913 - DNA, 25 bp, Homo sapien
aaaagattatgactgggaagtcaga

SEQ ID NO: 2923914 - DNA, 25 bp, Homo sapien
cctcccttctcagtcaaactattat

SEQ ID NO: 2923915 - DNA, 25 bp, Homo sapien
aaaatcaggaaagtgagatacccag

SEQ ID NO: 2923916 - DNA, 25 bp, Homo sapien
gactgataatgccaggtgtgtcaag

SEQ ID NO: 2923917 - DNA, 25 bp, Homo sapien
ggactgataatgccaggtgtgtcaa

SEQ ID NO: 2923918 - DNA, 25 bp, Homo sapien
actgataatgccaggtgtgtcaagt

SEQ ID NO: 2923919 - DNA, 25 bp, Homo sapien
aggactgataatgccaggtgtgtca

SEQ ID NO: 2923920 - DNA, 25 bp, Homo sapien
caggaaaggtcttatgactaaggca

SEQ ID NO: 2923921 - DNA, 25 bp, Homo sapien
tataatggaatctccccaccctctt

SEQ ID NO: 2923922 - DNA, 25 bp, Homo sapien
gagggacagacatacatcagtcagg

SEQ ID NO: 2923923 - DNA, 25 bp, Homo sapien
ctgatgagggatgtggtatggtaaa

SEQ ID NO: 2923924 - DNA, 25 bp, Homo sapien
gattccatgctcttccatggatctt

SEQ ID NO: 2923925 - DNA, 25 bp, Homo sapien
cagcagattccatgctcttccatgg

SEQ ID NO: 2923926 - DNA, 25 bp, Homo sapien
ccatgctcttccatggatcttccaa

SEQ ID NO: 2923927 - DNA, 25 bp, Homo sapien
caagatcagcagattccatgctctt

SEQ ID NO: 2923928 - DNA, 25 bp, Homo sapien
tgggcttaaggttcccatcctgaac

SEQ ID NO: 2923929 - DNA, 25 bp, Homo sapien
actgggcttaaggttcccatcctga

SEQ ID NO: 2923930 - DNA, 25 bp, Homo sapien
gcttaaggttcccatcctgaaccta

SEQ ID NO: 2923931 - DNA, 25 bp, Homo sapien
aactgggcttaaggttcccatcctg

SEQ ID NO: 2923932 - DNA, 25 bp, Homo sapien
tgtctgagacatccacaagaaccac

SEQ ID NO: 2923933 - DNA, 25 bp, Homo sapien
gacactagggatctgggagtacttg

SEQ ID NO: 2923934 - DNA, 25 bp, Homo sapien
gagtacttggtcaagcacctgagca

SEQ ID NO: 2923935 - DNA, 25 bp, Homo sapien
cttgttcatgaccaggacactaggg

SEQ ID NO: 2923936 - DNA, 25 bp, Homo sapien
ccaggagaactgacttctgcttcaa

SEQ ID NO: 2923937 - DNA, 25 bp, Homo sapien
ggctgccgtgagctccaggagaact

SEQ ID NO: 2923938 - DNA, 25 bp, Homo sapien
cttcagtgagggctgccgtgagctc

SEQ ID NO: 2923939 - DNA, 25 bp, Homo sapien
aggagaactgacttctgcttcaaac

SEQ ID NO: 2923940 - DNA, 25 bp, Homo sapien
gcttagggctgacaacatgaagatc

SEQ ID NO: 2923941 - DNA, 25 bp, Homo sapien
tttgggtccttaactgctgggctgg

SEQ ID NO: 2923942 - DNA, 25 bp, Homo sapien
gtgtgagtggaaggcctgcctcatc

SEQ ID NO: 2923943 - DNA, 25 bp, Homo sapien
cttgagctttttgccattgaccaca

SEQ ID NO: 2923944 - DNA, 25 bp, Homo sapien
tcggataatgttggcacagatctct

SEQ ID NO: 2923945 - DNA, 25 bp, Homo sapien
tgtacattgtaaggcacctcctggg

SEQ ID NO: 2923946 - DNA, 25 bp, Homo sapien
tgtctggctagtgaggactgcactg

SEQ ID NO: 2923947 - DNA, 25 bp, Homo sapien
ctaggagcttctctcggataatgtt

SEQ ID NO: 2923948 - DNA, 25 bp, Homo sapien
cacataagattctttgggcaccaga

SEQ ID NO: 2923949 - DNA, 25 bp, Homo sapien
ctttgggcaccagaagcttctgttg

SEQ ID NO: 2923950 - DNA, 25 bp, Homo sapien
gaagcttctgttggataaccagctc

SEQ ID NO: 2923951 - DNA, 25 bp, Homo sapien
gattctttgggcaccagaagcttct

SEQ ID NO: 2923952 - DNA, 25 bp, Homo sapien
tgagggtatgtgaaagagaaggaag

SEQ ID NO: 2923953 - DNA, 25 bp, Homo sapien
ctgagggtatgtgaaagagaaggaa

SEQ ID NO: 2923954 - DNA, 25 bp, Homo sapien
aagagaaggaagccaggaatgatgg

SEQ ID NO: 2923955 - DNA, 25 bp, Homo sapien
agaaggaagccaggaatgatggcac

SEQ ID NO: 2923956 - DNA, 25 bp, Homo sapien
cacagagaggcggatgtcaacatcg

SEQ ID NO: 2923957 - DNA, 25 bp, Homo sapien
tgtgctatctgggagatcacgtggc

SEQ ID NO: 2923958 - DNA, 25 bp, Homo sapien
aacatcgcagaggaagatgtccatg

SEQ ID NO: 2923959 - DNA, 25 bp, Homo sapien
tgtccatgaggtcatggcctgcctc

SEQ ID NO: 2923960 - DNA, 25 bp, Homo sapien
gagaaatctccctgctagcaacagc

SEQ ID NO: 2923961 - DNA, 25 bp, Homo sapien
ccaatgggccatcttcttagctaca

SEQ ID NO: 2923962 - DNA, 25 bp, Homo sapien
tagcaacagcgactcagggagaaac

SEQ ID NO: 2923963 - DNA, 25 bp, Homo sapien
aactctgggcccatagctagctgga

SEQ ID NO: 2923964 - DNA, 25 bp, Homo sapien
tagatcagctaaaggtcacctttgg

SEQ ID NO: 2923965 - DNA, 25 bp, Homo sapien
gcaaagctaatctatgacattagat

SEQ ID NO: 2923966 - DNA, 25 bp, Homo sapien
aaataataatagacgggtatggtgg

SEQ ID NO: 2923967 - DNA, 25 bp, Homo sapien
gattgtatcattccatataaagtcc

SEQ ID NO: 2923968 - DNA, 25 bp, Homo sapien
tcacaaacgatgacaaagcctgtgc

SEQ ID NO: 2923969 - DNA, 25 bp, Homo sapien
tctgagggcactgtactgtaaggaa

SEQ ID NO: 2923970 - DNA, 25 bp, Homo sapien
gagaaagagatagacacctgcagct

SEQ ID NO: 2923971 - DNA, 25 bp, Homo sapien
ttagccaccatgtaagcagtatgac

SEQ ID NO: 2923972 - DNA, 25 bp, Homo sapien
cctcattaagaaggtagccctgaag

SEQ ID NO: 2923973 - DNA, 25 bp, Homo sapien
aattataggaagtgtgggagtccgc

SEQ ID NO: 2923974 - DNA, 25 bp, Homo sapien
tgtcttagatgccagagcaatgagt

SEQ ID NO: 2923975 - DNA, 25 bp, Homo sapien
agcaagggagtaagtcagggtatca

SEQ ID NO: 2923976 - DNA, 25 bp, Homo sapien
catgtagattaagctgaagatgttt

SEQ ID NO: 2923977 - DNA, 25 bp, Homo sapien
ttacaatcactctctgtggggggtg

SEQ ID NO: 2923978 - DNA, 25 bp, Homo sapien
attacaatcactctctgtggggggt

SEQ ID NO: 2923979 - DNA, 25 bp, Homo sapien
atcatgtagattaagctgaagatgt

SEQ ID NO: 2923980 - DNA, 25 bp, Homo sapien
aggccagggccgactgccgtaagat

SEQ ID NO: 2923981 - DNA, 25 bp, Homo sapien
ggtcatctgtatctgaagcccctcg

SEQ ID NO: 2923982 - DNA, 25 bp, Homo sapien
tcgaggtgccccatgggagtaaggg

SEQ ID NO: 2923983 - DNA, 25 bp, Homo sapien
ggcagctggtatcgaggtgccccat

SEQ ID NO: 2923984 - DNA, 25 bp, Homo sapien
ctaaagttgagcctgagatccagct

SEQ ID NO: 2923985 - DNA, 25 bp, Homo sapien
tgccctggacactgacgggtttgtg

SEQ ID NO: 2923986 - DNA, 25 bp, Homo sapien
gatttgtctaagatgacgcaccgaa

SEQ ID NO: 2923987 - DNA, 25 bp, Homo sapien
aaaacctcggatgtgtgcgaggcca

SEQ ID NO: 2923988 - DNA, 25 bp, Homo sapien
gaggatgctgaacccgatgaagacc

SEQ ID NO: 2923989 - DNA, 25 bp, Homo sapien
gatgaagacccccagtctgaggact

SEQ ID NO: 2923990 - DNA, 25 bp, Homo sapien
gcccatcggctatgggaggccagca

SEQ ID NO: 2923991 - DNA, 25 bp, Homo sapien
gagacgaccgggcagcccatcggct

SEQ ID NO: 2923992 - DNA, 25 bp, Homo sapien
tccatatcactaatgtccaaaatag

SEQ ID NO: 2923993 - DNA, 25 bp, Homo sapien
gatgatcacaattagcctttattaa

SEQ ID NO: 2923994 - DNA, 25 bp, Homo sapien
gtctttattacactccatatcacta

SEQ ID NO: 2923995 - DNA, 25 bp, Homo sapien
aaatagtggctggtatactgcaagt

SEQ ID NO: 2923996 - DNA, 25 bp, Homo sapien
tttcatgggaaagcggcagacctga

SEQ ID NO: 2923997 - DNA, 25 bp, Homo sapien
ttaatataaagatcgctacccacct

SEQ ID NO: 2923998 - DNA, 25 bp, Homo sapien
tactgtgtattatggacaaatgaga

SEQ ID NO: 2923999 - DNA, 25 bp, Homo sapien
gcagcggttgcactacaggtagcta

SEQ ID NO: 2924000 - DNA, 25 bp, Homo sapien
taagtggccttatccatggctgaaa

SEQ ID NO: 2924001 - DNA, 25 bp, Homo sapien
aaaggaagtaggtgtgcttgcaccc

SEQ ID NO: 2924002 - DNA, 25 bp, Homo sapien
ggattttgaacgcatttgtacccca

SEQ ID NO: 2924003 - DNA, 25 bp, Homo sapien
gacttggcatactgacggagaggat

SEQ ID NO: 2924004 - DNA, 25 bp, Homo sapien
catgtcctctctcatagcatgacag

SEQ ID NO: 2924005 - DNA, 25 bp, Homo sapien
ccatgtcctctctcatagcatgaca

SEQ ID NO: 2924006 - DNA, 25 bp, Homo sapien
tccatgtcctctctcatagcatgac

SEQ ID NO: 2924007 - DNA, 25 bp, Homo sapien
gcagtcatttggaggcttcactgaa

SEQ ID NO: 2924008 - DNA, 25 bp, Homo sapien
catttggaggcttcactgaactggt

SEQ ID NO: 2924009 - DNA, 25 bp, Homo sapien
cagtagttgctgctgcgtgttggct

SEQ ID NO: 2924010 - DNA, 25 bp, Homo sapien
caagatgactcactcacatagcagt

SEQ ID NO: 2924011 - DNA, 25 bp, Homo sapien
tagcagagtctgtaggcctttgaaa

SEQ ID NO: 2924012 - DNA, 25 bp, Homo sapien
tacattggctagaatgagcggagac

SEQ ID NO: 2924013 - DNA, 25 bp, Homo sapien
gattcctggtaagcatcctcctgag

SEQ ID NO: 2924014 - DNA, 25 bp, Homo sapien
gataggacagctactgaagcatagc

SEQ ID NO: 2924015 - DNA, 25 bp, Homo sapien
ctgagatcgcaccactgcattccag

SEQ ID NO: 2924016 - DNA, 25 bp, Homo sapien
gaggcacaacaatctcttgaacccg

SEQ ID NO: 2924017 - DNA, 25 bp, Homo sapien
ctgcattccagcctgggcgacagag

SEQ ID NO: 2924018 - DNA, 25 bp, Homo sapien
cccgggagacagaggctacaatgag

SEQ ID NO: 2924019 - DNA, 25 bp, Homo sapien
tagaatctaggtatgtcgtattgtc

SEQ ID NO: 2924020 - DNA, 25 bp, Homo sapien
ctaggtatgtcgtattgtctttgtt

SEQ ID NO: 2924021 - DNA, 25 bp, Homo sapien
attctcctgccttacgtgtcatgtt

SEQ ID NO: 2924022 - DNA, 25 bp, Homo sapien
cgtgtcatgttgtcttactggtcca

SEQ ID NO: 2924023 - DNA, 25 bp, Homo sapien
tctcagccctcgaggatctagcggg

SEQ ID NO: 2924024 - DNA, 25 bp, Homo sapien
gcacaaccagagttgaataacacag

SEQ ID NO: 2924025 - DNA, 25 bp, Homo sapien
gaggatgctacaataggagtaaagg

SEQ ID NO: 2924026 - DNA, 25 bp, Homo sapien
gctacaataggagtaaaggcagagt

SEQ ID NO: 2924027 - DNA, 25 bp, Homo sapien
gaggtaactttggtcctggtgcaca

SEQ ID NO: 2924028 - DNA, 25 bp, Homo sapien
cagcagacaaaagtaaccacagggc

SEQ ID NO: 2924029 - DNA, 25 bp, Homo sapien
tggtgcacaaaacaagccccttcat

SEQ ID NO: 2924030 - DNA, 25 bp, Homo sapien
agggcaaaggtcacaaagtcaggga

SEQ ID NO: 2924031 - DNA, 25 bp, Homo sapien
ttggaaggccagcaccttgagtcct

SEQ ID NO: 2924032 - DNA, 25 bp, Homo sapien
aacttcaacccctgaaccttcagca

SEQ ID NO: 2924033 - DNA, 25 bp, Homo sapien
tgagtcctttatggaggaccccacg

SEQ ID NO: 2924034 - DNA, 25 bp, Homo sapien
gaatccaatgagactggtgcagcct

SEQ ID NO: 2924035 - DNA, 25 bp, Homo sapien
ccccccagttgcagaaggctatgct

SEQ ID NO: 2924036 - DNA, 25 bp, Homo sapien
ccccagttgcagaaggctatgctta

SEQ ID NO: 2924037 - DNA, 25 bp, Homo sapien
ccagttgcagaaggctatgcttaga

SEQ ID NO: 2924038 - DNA, 25 bp, Homo sapien
ttgcagaaggctatgcttagaataa

SEQ ID NO: 2924039 - DNA, 25 bp, Homo sapien
cccgaatgtggacctactgcagatg

SEQ ID NO: 2924040 - DNA, 25 bp, Homo sapien
aatgtggacctactgcagatgggct

SEQ ID NO: 2924041 - DNA, 25 bp, Homo sapien
cgaatgtggacctactgcagatggg

SEQ ID NO: 2924042 - DNA, 25 bp, Homo sapien
gaatgtggacctactgcagatgggc

SEQ ID NO: 2924043 - DNA, 25 bp, Homo sapien
tggaagagaatttccattctttgag

SEQ ID NO: 2924044 - DNA, 25 bp, Homo sapien
ccattctttgagttgcactgggcct

SEQ ID NO: 2924045 - DNA, 25 bp, Homo sapien
cattctttgagttgcactgggcctg

SEQ ID NO: 2924046 - DNA, 25 bp, Homo sapien
attctttgagttgcactgggcctgg

SEQ ID NO: 2924047 - DNA, 25 bp, Homo sapien
caaaactacaaaactggcaggctct

SEQ ID NO: 2924048 - DNA, 25 bp, Homo sapien
ttctcagccttggtacggagcgagc

SEQ ID NO: 2924049 - DNA, 25 bp, Homo sapien
tatatgcccgaacctgaagaaaaac

SEQ ID NO: 2924050 - DNA, 25 bp, Homo sapien
gctgctcctggccaaatagcaagaa

SEQ ID NO: 2924051 - DNA, 25 bp, Homo sapien
gctgagagaagtttgcaagggcaat

SEQ ID NO: 2924052 - DNA, 25 bp, Homo sapien
gcgagtagactctcctaagctgaga

SEQ ID NO: 2924053 - DNA, 25 bp, Homo sapien
tcatgtcaacaatgtgcaaagagcg

SEQ ID NO: 2924054 - DNA, 25 bp, Homo sapien
gctggcctctatgaggtttggtgtt

SEQ ID NO: 2924055 - DNA, 25 bp, Homo sapien
caaacacagtttgtgagatgcttca

SEQ ID NO: 2924056 - DNA, 25 bp, Homo sapien
taacggttgaagctttaggcggatc

SEQ ID NO: 2924057 - DNA, 25 bp, Homo sapien
gctttaggcggatcaaacacagttt

SEQ ID NO: 2924058 - DNA, 25 bp, Homo sapien
gagatgcttcaaatgtattattcat

SEQ ID NO: 2924059 - DNA, 25 bp, Homo sapien
cttggataggatccttagcactaag

SEQ ID NO: 2924060 - DNA, 25 bp, Homo sapien
tccttagcactaaggtcggcctgca

SEQ ID NO: 2924061 - DNA, 25 bp, Homo sapien
gagacacgaagagtgactggaagca

SEQ ID NO: 2924062 - DNA, 25 bp, Homo sapien
agagacacgaagagtgactggaagc

SEQ ID NO: 2924063 - DNA, 25 bp, Homo sapien
tagtttcaccgcttgctttggcaga

SEQ ID NO: 2924064 - DNA, 25 bp, Homo sapien
ttggctgctgcgcataagtcccagt

SEQ ID NO: 2924065 - DNA, 25 bp, Homo sapien
tccaaacttgggaattctgaggtgt

SEQ ID NO: 2924066 - DNA, 25 bp, Homo sapien
ccaaaatctagtttcaccgcttgct

SEQ ID NO: 2924067 - DNA, 25 bp, Homo sapien
gaagtggtcctgtttctctgtggag

SEQ ID NO: 2924068 - DNA, 25 bp, Homo sapien
gtttctctgtggaggtgagggtgtg

SEQ ID NO: 2924069 - DNA, 25 bp, Homo sapien
tttctctgtggaggtgagggtgtgt

SEQ ID NO: 2924070 - DNA, 25 bp, Homo sapien
tcagaagtggtcctgtttctctgtg

SEQ ID NO: 2924071 - DNA, 25 bp, Homo sapien
gaatcgacttctgaaggcttcccct

SEQ ID NO: 2924072 - DNA, 25 bp, Homo sapien
tcggaagactattaaagggagagcc

SEQ ID NO: 2924073 - DNA, 25 bp, Homo sapien
tgtgtgtcagcaatcgcttctcgtg

SEQ ID NO: 2924074 - DNA, 25 bp, Homo sapien
ggcagagagacgctatccactcaaa

SEQ ID NO: 2924075 - DNA, 25 bp, Homo sapien
ttcaaacagctcctccgaaagcaga

SEQ ID NO: 2924076 - DNA, 25 bp, Homo sapien
tcctccgaaagcagacactggccat

SEQ ID NO: 2924077 - DNA, 25 bp, Homo sapien
cagctcctccgaaagcagacactgg

SEQ ID NO: 2924078 - DNA, 25 bp, Homo sapien
tccgaaagcagacactggccatggc

SEQ ID NO: 2924079 - DNA, 25 bp, Homo sapien
ctgggcaatggagcaagattccagc

SEQ ID NO: 2924080 - DNA, 25 bp, Homo sapien
tgggcaatggagcaagattccagct

SEQ ID NO: 2924081 - DNA, 25 bp, Homo sapien
cctgggcaatggagcaagattccag

SEQ ID NO: 2924082 - DNA, 25 bp, Homo sapien
tttcattttgaagaaagaagaaatg

SEQ ID NO: 2924083 - DNA, 25 bp, Homo sapien
ttcattttgaagaaagaagaaatga

SEQ ID NO: 2924084 - DNA, 25 bp, Homo sapien
tcattttgaagaaagaagaaatgat

SEQ ID NO: 2924085 - DNA, 25 bp, Homo sapien
cattttgaagaaagaagaaatgatc

SEQ ID NO: 2924086 - DNA, 25 bp, Homo sapien
gctcaattattgtcatgcaaatggg

SEQ ID NO: 2924087 - DNA, 25 bp, Homo sapien
tttgtgaggtttagcccagctcagc

SEQ ID NO: 2924088 - DNA, 25 bp, Homo sapien
caggctcccggctaaaggacgagga

SEQ ID NO: 2924089 - DNA, 25 bp, Homo sapien
cagagctgggtagtctgatttgtga

SEQ ID NO: 2924090 - DNA, 25 bp, Homo sapien
atgccactcagccccacagccacag

SEQ ID NO: 2924091 - DNA, 25 bp, Homo sapien
ccactcagccccacagccacagagc

SEQ ID NO: 2924092 - DNA, 25 bp, Homo sapien
tgccactcagccccacagccacaga

SEQ ID NO: 2924093 - DNA, 25 bp, Homo sapien
gccactcagccccacagccacagag

SEQ ID NO: 2924094 - DNA, 25 bp, Homo sapien
tcacaatggcgtcccagagatcttt

SEQ ID NO: 2924095 - DNA, 25 bp, Homo sapien
gatccccgccccaatcacaatggcg

SEQ ID NO: 2924096 - DNA, 25 bp, Homo sapien
tggtatgcagtgaagcagccctgga

SEQ ID NO: 2924097 - DNA, 25 bp, Homo sapien
tatgcagtgaagcagccctggatcc

SEQ ID NO: 2924098 - DNA, 25 bp, Homo sapien
gctaacgttgttcacatccagaagt

SEQ ID NO: 2924099 - DNA, 25 bp, Homo sapien
tttgttagctagtcttcaaccatcc

SEQ ID NO: 2924100 - DNA, 25 bp, Homo sapien
ttgctaacgttgttcacatccagaa

SEQ ID NO: 2924101 - DNA, 25 bp, Homo sapien
tagtcttcaaccatcctgctgcaat

SEQ ID NO: 2924102 - DNA, 25 bp, Homo sapien
cggattatccggctttgtccatggg

SEQ ID NO: 2924103 - DNA, 25 bp, Homo sapien
tcatccgggtgtaaaagtcttccag

SEQ ID NO: 2924104 - DNA, 25 bp, Homo sapien
agtcttccaggtacgcctttcggat

SEQ ID NO: 2924105 - DNA, 25 bp, Homo sapien
gatagcactcatgcatcatccgggt

SEQ ID NO: 2924106 - DNA, 25 bp, Homo sapien
atttttgcaacagaacactaacctc

SEQ ID NO: 2924107 - DNA, 25 bp, Homo sapien
tcctggccattaaaataaccaccac

SEQ ID NO: 2924108 - DNA, 25 bp, Homo sapien
tttttgcaacagaacactaacctct

SEQ ID NO: 2924109 - DNA, 25 bp, Homo sapien
cagaggttcaacagctcgttccaaa

SEQ ID NO: 2924110 - DNA, 25 bp, Homo sapien
cacagctgagcgtgtcagagctgag

SEQ ID NO: 2924111 - DNA, 25 bp, Homo sapien
tctgagagtctcctacccaaggatc

SEQ ID NO: 2924112 - DNA, 25 bp, Homo sapien
gctgagatttagagccaggtccagt

SEQ ID NO: 2924113 - DNA, 25 bp, Homo sapien
tcttgattctctttcattcccagca

SEQ ID NO: 2924114 - DNA, 25 bp, Homo sapien
tcccagcagcagtaatccagtctgc

SEQ ID NO: 2924115 - DNA, 25 bp, Homo sapien
ttcattcccagcagcagtaatccag

SEQ ID NO: 2924116 - DNA, 25 bp, Homo sapien
attcttgattctctttcattcccag

SEQ ID NO: 2924117 - DNA, 25 bp, Homo sapien
tctcccctgggcaaccgaatatttg

SEQ ID NO: 2924118 - DNA, 25 bp, Homo sapien
tatatgcatagataactcctccgga

SEQ ID NO: 2924119 - DNA, 25 bp, Homo sapien
aagacactggtgttctaccctctgc

SEQ ID NO: 2924120 - DNA, 25 bp, Homo sapien
tctgcctcgacagattggcctggat

SEQ ID NO: 2924121 - DNA, 25 bp, Homo sapien
tcgccccagtgctatacgacattac

SEQ ID NO: 2924122 - DNA, 25 bp, Homo sapien
catcgccccagtgctatacgacatt

SEQ ID NO: 2924123 - DNA, 25 bp, Homo sapien
gcatcgccccagtgctatacgacat

SEQ ID NO: 2924124 - DNA, 25 bp, Homo sapien
atcgccccagtgctatacgacatta

SEQ ID NO: 2924125 - DNA, 25 bp, Homo sapien
ctccgtcacgcactatgcctcctag

SEQ ID NO: 2924126 - DNA, 25 bp, Homo sapien
gttttcaccgtgaccagtagccctg

SEQ ID NO: 2924127 - DNA, 25 bp, Homo sapien
tggagaggcatctcaatgcccaggg

SEQ ID NO: 2924128 - DNA, 25 bp, Homo sapien
cggaggagctggttggtccaaggac

SEQ ID NO: 2924129 - DNA, 25 bp, Homo sapien
ctgggacacaccatagctcccagga

SEQ ID NO: 2924130 - DNA, 25 bp, Homo sapien
tcctgtgggcagtccgtagatgtgg

SEQ ID NO: 2924131 - DNA, 25 bp, Homo sapien
ccacaggaagcacggaaaggcctgg

SEQ ID NO: 2924132 - DNA, 25 bp, Homo sapien
caggaaccatctctcgccagtaaca

SEQ ID NO: 2924133 - DNA, 25 bp, Homo sapien
tgccttatctcggtctttccgctca

SEQ ID NO: 2924134 - DNA, 25 bp, Homo sapien
gccttatctcggtctttccgctcac

SEQ ID NO: 2924135 - DNA, 25 bp, Homo sapien
tcctcagggtctgcgtggttgccgt

SEQ ID NO: 2924136 - DNA, 25 bp, Homo sapien
gctctcaatgacagcaggctcgggc

SEQ ID NO: 2924137 - DNA, 25 bp, Homo sapien
caaagctgctcaggatctggacgtc

SEQ ID NO: 2924138 - DNA, 25 bp, Homo sapien
tctccgatgtctgtgcgtgctgtgg

SEQ ID NO: 2924139 - DNA, 25 bp, Homo sapien
caccaatgacaatgttgtcatactt

SEQ ID NO: 2924140 - DNA, 25 bp, Homo sapien
atcgagaatgaactgctcatcaggg

SEQ ID NO: 2924141 - DNA, 25 bp, Homo sapien
caatgttgtcatactttgggtggcg

SEQ ID NO: 2924142 - DNA, 25 bp, Homo sapien
catactttgggtggcgatcgagaat

SEQ ID NO: 2924143 - DNA, 25 bp, Homo sapien
gccaagtcataagatggtgttaatt

SEQ ID NO: 2924144 - DNA, 25 bp, Homo sapien
ggaaacggctgattcgaaaaggtgc

SEQ ID NO: 2924145 - DNA, 25 bp, Homo sapien
accacaggggccagcttgaacccgt

SEQ ID NO: 2924146 - DNA, 25 bp, Homo sapien
gctgattcgaaaaggtgccaagtca

SEQ ID NO: 2924147 - DNA, 25 bp, Homo sapien
ggatgatatctcagggacactccct

SEQ ID NO: 2924148 - DNA, 25 bp, Homo sapien
tatctgatcaaccttctgggagcga

SEQ ID NO: 2924149 - DNA, 25 bp, Homo sapien
tattgttcatcaaagacgagccaga

SEQ ID NO: 2924150 - DNA, 25 bp, Homo sapien
gatatacccatctcaaacgtccttg

SEQ ID NO: 2924151 - DNA, 25 bp, Homo sapien
ctgccttcgtggtctgcacattgcc

SEQ ID NO: 2924152 - DNA, 25 bp, Homo sapien
tcgtggtctgcacattgccagtctc

SEQ ID NO: 2924153 - DNA, 25 bp, Homo sapien
tgtctcctttcttcgctggcccgat

SEQ ID NO: 2924154 - DNA, 25 bp, Homo sapien
gccttcgtggtctgcacattgccag

SEQ ID NO: 2924155 - DNA, 25 bp, Homo sapien
ggtccaaactggtactgaggatagt

SEQ ID NO: 2924156 - DNA, 25 bp, Homo sapien
tgaggatagtatacacctcctcctc

SEQ ID NO: 2924157 - DNA, 25 bp, Homo sapien
actggtaccccacgatcgcctgggt

SEQ ID NO: 2924158 - DNA, 25 bp, Homo sapien
ttgccagtctttcccgatttcccca

SEQ ID NO: 2924159 - DNA, 25 bp, Homo sapien
tctagatagttgaccctccttcctg

SEQ ID NO: 2924160 - DNA, 25 bp, Homo sapien
tccagaccgactcggccatgttttc

SEQ ID NO: 2924161 - DNA, 25 bp, Homo sapien
tcctttgacctttctagatagttga

SEQ ID NO: 2924162 - DNA, 25 bp, Homo sapien
tgtctccagaccgactcggccatgt

SEQ ID NO: 2924163 - DNA, 25 bp, Homo sapien
ttttggagagtgatgcccacgtcct

SEQ ID NO: 2924164 - DNA, 25 bp, Homo sapien
tgactgctccaacgcctcagtgctg

SEQ ID NO: 2924165 - DNA, 25 bp, Homo sapien
gattcgagtgggacttgaacccggc

SEQ ID NO: 2924166 - DNA, 25 bp, Homo sapien
cttggcagcagttgtaagggagccc

SEQ ID NO: 2924167 - DNA, 25 bp, Homo sapien
tccctctgtcgatgggtgtctgggt

SEQ ID NO: 2924168 - DNA, 25 bp, Homo sapien
agatttgcgttcagccttccccgat

SEQ ID NO: 2924169 - DNA, 25 bp, Homo sapien
tccccgatccccgaagaagtcagct

SEQ ID NO: 2924170 - DNA, 25 bp, Homo sapien
tcagctgggctaacgttccctggca

SEQ ID NO: 2924171 - DNA, 25 bp, Homo sapien
gttctcgggctggaataatcagctc

SEQ ID NO: 2924172 - DNA, 25 bp, Homo sapien
tggccttggctgacgaataaaccac

SEQ ID NO: 2924173 - DNA, 25 bp, Homo sapien
tcagctcgagacaaacatcagcgct

SEQ ID NO: 2924174 - DNA, 25 bp, Homo sapien
aggctgctccacctgttctcgggct

SEQ ID NO: 2924175 - DNA, 25 bp, Homo sapien
ttctctcggcatggctgagagggaa

SEQ ID NO: 2924176 - DNA, 25 bp, Homo sapien
cctgagaactccaccagacttggga

SEQ ID NO: 2924177 - DNA, 25 bp, Homo sapien
tgagcccgtgtcattcttccaacct

SEQ ID NO: 2924178 - DNA, 25 bp, Homo sapien
gacacaacaccatgtggtctggagg

SEQ ID NO: 2924179 - DNA, 25 bp, Homo sapien
tgtgctctcccctgtttacccgatg

SEQ ID NO: 2924180 - DNA, 25 bp, Homo sapien
ggctcccaagaacgactcgggaatg

SEQ ID NO: 2924181 - DNA, 25 bp, Homo sapien
atttaaatacccaacctctccatca

SEQ ID NO: 2924182 - DNA, 25 bp, Homo sapien
tgagcaagcctacgcagacaagtgt

SEQ ID NO: 2924183 - DNA, 25 bp, Homo sapien
ctcgggaatgtcatctccatcttca

SEQ ID NO: 2924184 - DNA, 25 bp, Homo sapien
tcatctctttggactggcttcctcg

SEQ ID NO: 2924185 - DNA, 25 bp, Homo sapien
gaagtcgtccaaagtctttgaggtc

SEQ ID NO: 2924186 - DNA, 25 bp, Homo sapien
tcaggtcaaccaatcgagtggcggg

SEQ ID NO: 2924187 - DNA, 25 bp, Homo sapien
tttgaggtctaagagtcccagattc

SEQ ID NO: 2924188 - DNA, 25 bp, Homo sapien
ctaaaggactccatcgggggcaccg

SEQ ID NO: 2924189 - DNA, 25 bp, Homo sapien
ctatcggaagcggctcaccctaaag

SEQ ID NO: 2924190 - DNA, 25 bp, Homo sapien
accggggacgcggattcgctcttca

SEQ ID NO: 2924191 - DNA, 25 bp, Homo sapien
gggacgcggattcgctcttcacctc

SEQ ID NO: 2924192 - DNA, 25 bp, Homo sapien
aaggctgcgtacctactgggctgca

SEQ ID NO: 2924193 - DNA, 25 bp, Homo sapien
gcccagaaggctgcgtacctactgg

SEQ ID NO: 2924194 - DNA, 25 bp, Homo sapien
gctgcgtacctactgggctgcagcc

SEQ ID NO: 2924195 - DNA, 25 bp, Homo sapien
cagaaggctgcgtacctactgggct

SEQ ID NO: 2924196 - DNA, 25 bp, Homo sapien
aaagccagcctgtgatttgaaaggg

SEQ ID NO: 2924197 - DNA, 25 bp, Homo sapien
tggtcagtttgattagccaggcact

SEQ ID NO: 2924198 - DNA, 25 bp, Homo sapien
tctgaatagccaagtccaaagatgt

SEQ ID NO: 2924199 - DNA, 25 bp, Homo sapien
tgtggcttccacctgatctgcaaac

SEQ ID NO: 2924200 - DNA, 25 bp, Homo sapien
tctccacccagacccgcttgtgccc

SEQ ID NO: 2924201 - DNA, 25 bp, Homo sapien
ctccacccagacccgcttgtgccca

SEQ ID NO: 2924202 - DNA, 25 bp, Homo sapien
gttgcttggaaggactagttttggc

SEQ ID NO: 2924203 - DNA, 25 bp, Homo sapien
gctgcaggaactgctttcagctcat

SEQ ID NO: 2924204 - DNA, 25 bp, Homo sapien
gactagttttggctgcaggaactgc

SEQ ID NO: 2924205 - DNA, 25 bp, Homo sapien
aacatgaagttgcttggaaggacta

SEQ ID NO: 2924206 - DNA, 25 bp, Homo sapien
cagaagagggctgcatgtgtggtgg

SEQ ID NO: 2924207 - DNA, 25 bp, Homo sapien
cttgttgcaatcagggtgggacgtc

SEQ ID NO: 2924208 - DNA, 25 bp, Homo sapien
aggccagatgtggatgtccccagag

SEQ ID NO: 2924209 - DNA, 25 bp, Homo sapien
acacagggcggcaggttcttcccat

SEQ ID NO: 2924210 - DNA, 25 bp, Homo sapien
ttcggagtccacagcggacggaggc

SEQ ID NO: 2924211 - DNA, 25 bp, Homo sapien
gtgcccagtgcagacagaaactcca

SEQ ID NO: 2924212 - DNA, 25 bp, Homo sapien
gcaggccgggcgtttatccccacag

SEQ ID NO: 2924213 - DNA, 25 bp, Homo sapien
gacccttttcggacagcctccagtg

SEQ ID NO: 2924214 - DNA, 25 bp, Homo sapien
tcccaaggattcagctcgttaccat

SEQ ID NO: 2924215 - DNA, 25 bp, Homo sapien
actaagcatcaaacactacaaggag

SEQ ID NO: 2924216 - DNA, 25 bp, Homo sapien
taacagacagctcaactatgtgcag

SEQ ID NO: 2924217 - DNA, 25 bp, Homo sapien
aatcaatgaggtacagactgacgtg

SEQ ID NO: 2924218 - DNA, 25 bp, Homo sapien
ccagtgtcattctgctaaggacaca

SEQ ID NO: 2924219 - DNA, 25 bp, Homo sapien
tcattctgctaaggacacatctgtg

SEQ ID NO: 2924220 - DNA, 25 bp, Homo sapien
ggtctaagtcgctacaaccccattc

SEQ ID NO: 2924221 - DNA, 25 bp, Homo sapien
tccaggtctaagtcgctacaacccc

SEQ ID NO: 2924222 - DNA, 25 bp, Homo sapien
ctgttccttctacagctcctaggta

SEQ ID NO: 2924223 - DNA, 25 bp, Homo sapien
tgttccttctacagctcctaggtac

SEQ ID NO: 2924224 - DNA, 25 bp, Homo sapien
ctgcaggatcttgtttttttgccct

SEQ ID NO: 2924225 - DNA, 25 bp, Homo sapien
tgtgcctttctacctcttcaaacag

SEQ ID NO: 2924226 - DNA, 25 bp, Homo sapien
tttctacctcttcaaacaggcaggg

SEQ ID NO: 2924227 - DNA, 25 bp, Homo sapien
tttgccctgtgcctttctacctctt

SEQ ID NO: 2924228 - DNA, 25 bp, Homo sapien
gacaccagggctacacgccaagcag

SEQ ID NO: 2924229 - DNA, 25 bp, Homo sapien
tacacgccaagcagcatagatgctc

SEQ ID NO: 2924230 - DNA, 25 bp, Homo sapien
agggctacacgccaagcagcataga

SEQ ID NO: 2924231 - DNA, 25 bp, Homo sapien
gcagcatagatgctcagtggaattt

SEQ ID NO: 2924232 - DNA, 25 bp, Homo sapien
aagaggaccatgacagctccccata

SEQ ID NO: 2924233 - DNA, 25 bp, Homo sapien
agctccccatatgtaaccagggcat

SEQ ID NO: 2924234 - DNA, 25 bp, Homo sapien
ttaagaggaccatgacagctcccca

SEQ ID NO: 2924235 - DNA, 25 bp, Homo sapien
gacagctccccatatgtaaccaggg

SEQ ID NO: 2924236 - DNA, 25 bp, Homo sapien
tctagatgtaaagggttcacctgct

SEQ ID NO: 2924237 - DNA, 25 bp, Homo sapien
catctagatgtaaagggttcacctg

SEQ ID NO: 2924238 - DNA, 25 bp, Homo sapien
agatgtaaagggttcacctgctcca

SEQ ID NO: 2924239 - DNA, 25 bp, Homo sapien
cagattcccgggggccttcctgtga

SEQ ID NO: 2924240 - DNA, 25 bp, Homo sapien
gaaggcaaccttctgaatacctcct

SEQ ID NO: 2924241 - DNA, 25 bp, Homo sapien
agctcctgctgctcagcctgggtct

SEQ ID NO: 2924242 - DNA, 25 bp, Homo sapien
ccagctcctgctgctcagcctgggt

SEQ ID NO: 2924243 - DNA, 25 bp, Homo sapien
cctgctgctcagcctgggtctccat

SEQ ID NO: 2924244 - DNA, 25 bp, Homo sapien
ctcctgctgctcagcctgggtctcc

SEQ ID NO: 2924245 - DNA, 25 bp, Homo sapien
tggttggatgtcctggtgagcacct

SEQ ID NO: 2924246 - DNA, 25 bp, Homo sapien
tttatagcactcatcacagtaccaa

SEQ ID NO: 2924247 - DNA, 25 bp, Homo sapien
tcatcacagtaccaatctgtgttct

SEQ ID NO: 2924248 - DNA, 25 bp, Homo sapien
gcacctcaatggcaaggcctcggtc

SEQ ID NO: 2924249 - DNA, 25 bp, Homo sapien
ccggcgtagggttggtctgagccat

SEQ ID NO: 2924250 - DNA, 25 bp, Homo sapien
cccggcgtagggttggtctgagcca

SEQ ID NO: 2924251 - DNA, 25 bp, Homo sapien
aaatgagattgaatggcgcaagaga

SEQ ID NO: 2924252 - DNA, 25 bp, Homo sapien
gaaatgagattgaatggcgcaagag

SEQ ID NO: 2924253 - DNA, 25 bp, Homo sapien
tgaaatgagattgaatggcgcaaga

SEQ ID NO: 2924254 - DNA, 25 bp, Homo sapien
ctgaaatgagattgaatggcgcaag

SEQ ID NO: 2924255 - DNA, 25 bp, Homo sapien
gacattatcaaaactgcgctcagag

SEQ ID NO: 2924256 - DNA, 25 bp, Homo sapien
agctggtgaactccatcctcttgcc

SEQ ID NO: 2924257 - DNA, 25 bp, Homo sapien
tccaccttcagggaccggacattat

SEQ ID NO: 2924258 - DNA, 25 bp, Homo sapien
cagagacatttggacaggagctggt

SEQ ID NO: 2924259 - DNA, 25 bp, Homo sapien
catgtagtgtttgttcatggtgttc

SEQ ID NO: 2924260 - DNA, 25 bp, Homo sapien
gtttgttcatggtgttcaaagccta

SEQ ID NO: 2924261 - DNA, 25 bp, Homo sapien
aaagacatgtagtgtttgttcatgg

SEQ ID NO: 2924262 - DNA, 25 bp, Homo sapien
tgttcaaagcctatatggccttggg

SEQ ID NO: 2924263 - DNA, 25 bp, Homo sapien
gctcaatgtggtaggcattactccc

SEQ ID NO: 2924264 - DNA, 25 bp, Homo sapien
ggcatcccagcgagggtattctcct

SEQ ID NO: 2924265 - DNA, 25 bp, Homo sapien
gcggaaggacatgagacgctcaatg

SEQ ID NO: 2924266 - DNA, 25 bp, Homo sapien
tctccaggataaactgttgcccaca

SEQ ID NO: 2924267 - DNA, 25 bp, Homo sapien
aaaggttacttcagcattttcctgt

SEQ ID NO: 2924268 - DNA, 25 bp, Homo sapien
gaaaggttacttcagcattttcctg

SEQ ID NO: 2924269 - DNA, 25 bp, Homo sapien
tgaaaggttacttcagcattttcct

SEQ ID NO: 2924270 - DNA, 25 bp, Homo sapien
aggttacttcagcattttcctgttt

SEQ ID NO: 2924271 - DNA, 25 bp, Homo sapien
tttagtactagtgctatggctatca

SEQ ID NO: 2924272 - DNA, 25 bp, Homo sapien
agtactagtgctatggctatcattc

SEQ ID NO: 2924273 - DNA, 25 bp, Homo sapien
taaaatgtttagtactagtgctatg

SEQ ID NO: 2924274 - DNA, 25 bp, Homo sapien
agtgctatggctatcattcttcatg

SEQ ID NO: 2924275 - DNA, 25 bp, Homo sapien
gagatctcccactggcgtccaataa

SEQ ID NO: 2924276 - DNA, 25 bp, Homo sapien
cgttgttgaaccagcccatggcttg

SEQ ID NO: 2924277 - DNA, 25 bp, Homo sapien
ttgtatcttcatggagccgacttcg

SEQ ID NO: 2924278 - DNA, 25 bp, Homo sapien
gatggtcatcttagactccttatga

SEQ ID NO: 2924279 - DNA, 25 bp, Homo sapien
cccacgatatccaggatattggtag

SEQ ID NO: 2924280 - DNA, 25 bp, Homo sapien
atgatggtcacattccaagatatac

SEQ ID NO: 2924281 - DNA, 25 bp, Homo sapien
tccaagatatactgatacccacgat

SEQ ID NO: 2924282 - DNA, 25 bp, Homo sapien
tatactgatacccacgatatccagg

SEQ ID NO: 2924283 - DNA, 25 bp, Homo sapien
ttggatctgcgaagtctgggcatga

SEQ ID NO: 2924284 - DNA, 25 bp, Homo sapien
ctactgttggattcggcgaatcgat

SEQ ID NO: 2924285 - DNA, 25 bp, Homo sapien
cgaatcgattggatctgcgaagtct

SEQ ID NO: 2924286 - DNA, 25 bp, Homo sapien
gattcggcgaatcgattggatctgc

SEQ ID NO: 2924287 - DNA, 25 bp, Homo sapien
aacataaaacttattctagagtgct

SEQ ID NO: 2924288 - DNA, 25 bp, Homo sapien
taaatgacgtttattgtggatttca

SEQ ID NO: 2924289 - DNA, 25 bp, Homo sapien
tagcaaggtctcatgcttgaggaat

SEQ ID NO: 2924290 - DNA, 25 bp, Homo sapien
cttgaggaattatcgtacttggagc

SEQ ID NO: 2924291 - DNA, 25 bp, Homo sapien
caagtatattgttgcctttgaggac

SEQ ID NO: 2924292 - DNA, 25 bp, Homo sapien
tcaggacctttgtaggagaggctaa

SEQ ID NO: 2924293 - DNA, 25 bp, Homo sapien
tagatggctatggttcctcttccgc

SEQ ID NO: 2924294 - DNA, 25 bp, Homo sapien
ggcactaaggagctgagttacctct

SEQ ID NO: 2924295 - DNA, 25 bp, Homo sapien
tcctgccagtgtaaatgtgaaagct

SEQ ID NO: 2924296 - DNA, 25 bp, Homo sapien
ccgaagctccgtgaaaaggttagat

SEQ ID NO: 2924297 - DNA, 25 bp, Homo sapien
taatgcctgagatagtcgatggttc

SEQ ID NO: 2924298 - DNA, 25 bp, Homo sapien
tgcacactcgaattttgccgaagct

SEQ ID NO: 2924299 - DNA, 25 bp, Homo sapien
tgattgaacccaaaataatgggtgg

SEQ ID NO: 2924300 - DNA, 25 bp, Homo sapien
tgagaaagatgtgtgggccaaagct

SEQ ID NO: 2924301 - DNA, 25 bp, Homo sapien
gctgccctgaaccaatcagatttag

SEQ ID NO: 2924302 - DNA, 25 bp, Homo sapien
aaactttagtgaatgctacttgaca

SEQ ID NO: 2924303 - DNA, 25 bp, Homo sapien
caggtgctaatcaaaggctctgaaa

SEQ ID NO: 2924304 - DNA, 25 bp, Homo sapien
taatcctgctgctatgagaaactga

SEQ ID NO: 2924305 - DNA, 25 bp, Homo sapien
caaagttgttgtactcttcagacca

SEQ ID NO: 2924306 - DNA, 25 bp, Homo sapien
tgtagcacagccactaacaagagtg

SEQ ID NO: 2924307 - DNA, 25 bp, Homo sapien
tgaactgaagttaattacatagcct

SEQ ID NO: 2924308 - DNA, 25 bp, Homo sapien
cttgtaggtgtcctcaataatcccc

SEQ ID NO: 2924309 - DNA, 25 bp, Homo sapien
ttacagcgtctgtggtagccagccc

SEQ ID NO: 2924310 - DNA, 25 bp, Homo sapien
tgtgtcacataccactcttgtaggt

SEQ ID NO: 2924311 - DNA, 25 bp, Homo sapien
tgtgtaaccacttgtcgccttaggg

SEQ ID NO: 2924312 - DNA, 25 bp, Homo sapien
aaacttgtggtaggccagttccaga

SEQ ID NO: 2924313 - DNA, 25 bp, Homo sapien
gataaaagtagactggatcccctgg

SEQ ID NO: 2924314 - DNA, 25 bp, Homo sapien
tagccagtgagaagataataaaccc

SEQ ID NO: 2924315 - DNA, 25 bp, Homo sapien
gagtagctaggactaccggtgcccg

SEQ ID NO: 2924316 - DNA, 25 bp, Homo sapien
ctaccggtgcccgcccccacacttg

SEQ ID NO: 2924317 - DNA, 25 bp, Homo sapien
tagctaggactaccggtgcccgccc

SEQ ID NO: 2924318 - DNA, 25 bp, Homo sapien
gtgcccgcccccacacttggctaac

SEQ ID NO: 2924319 - DNA, 25 bp, Homo sapien
atcacacaaacgaggggccaggtgc

SEQ ID NO: 2924320 - DNA, 25 bp, Homo sapien
cagtactgacatgatgttcaaaaag

SEQ ID NO: 2924321 - DNA, 25 bp, Homo sapien
ttgcttctcagggatagtcaaaaca

SEQ ID NO: 2924322 - DNA, 25 bp, Homo sapien
aatcacacaaacgaggggccaggtg

SEQ ID NO: 2924323 - DNA, 25 bp, Homo sapien
attagctggtatggtgacgtgcacc

SEQ ID NO: 2924324 - DNA, 25 bp, Homo sapien
agatcgcaccactgctgctcttcag

SEQ ID NO: 2924325 - DNA, 25 bp, Homo sapien
aaattagctggtatggtgacgtgca

SEQ ID NO: 2924326 - DNA, 25 bp, Homo sapien
atatatatatattagctgggcctgg

SEQ ID NO: 2924327 - DNA, 25 bp, Homo sapien
tagattaagcaattacttggaacct

SEQ ID NO: 2924328 - DNA, 25 bp, Homo sapien
tttgactcaaggttttggcggctgg

SEQ ID NO: 2924329 - DNA, 25 bp, Homo sapien
cttggaaccttaagcgtactatgga

SEQ ID NO: 2924330 - DNA, 25 bp, Homo sapien
caattgagggtatgaagtaaagata

SEQ ID NO: 2924331 - DNA, 25 bp, Homo sapien
ggaacctcgtctcctgccaggttcg

SEQ ID NO: 2924332 - DNA, 25 bp, Homo sapien
cctctgaggctttcacttgggcctt

SEQ ID NO: 2924333 - DNA, 25 bp, Homo sapien
ttcatttcgggtagaggcggtgcct

SEQ ID NO: 2924334 - DNA, 25 bp, Homo sapien
cagctccccggtcacgagtttctct

SEQ ID NO: 2924335 - DNA, 25 bp, Homo sapien
tgagaagcagtctcagatcctgacg

SEQ ID NO: 2924336 - DNA, 25 bp, Homo sapien
gtctcagatcctgacggtgcagcag

SEQ ID NO: 2924337 - DNA, 25 bp, Homo sapien
gtcccagccgctttcaatggaggag

SEQ ID NO: 2924338 - DNA, 25 bp, Homo sapien
cagggagtcccagccgctttcaatg

SEQ ID NO: 2924339 - DNA, 25 bp, Homo sapien
cagcgtggctcctgattgttggagt

SEQ ID NO: 2924340 - DNA, 25 bp, Homo sapien
tgccaatctcgcagaatcgctcggt

SEQ ID NO: 2924341 - DNA, 25 bp, Homo sapien
tgattgttggagtgcggctgccaat

SEQ ID NO: 2924342 - DNA, 25 bp, Homo sapien
ttaaccagtgcgctggcgagacgcg

SEQ ID NO: 2924343 - DNA, 25 bp, Homo sapien
acacgagcctgcttgccggcgagga

SEQ ID NO: 2924344 - DNA, 25 bp, Homo sapien
gccggcgaggagtgtagaaagtgct

SEQ ID NO: 2924345 - DNA, 25 bp, Homo sapien
tgcttgccggcgaggagtgtagaaa

SEQ ID NO: 2924346 - DNA, 25 bp, Homo sapien
ctaccctcgacacgagcctgcttgc

SEQ ID NO: 2924347 - DNA, 25 bp, Homo sapien
cagctttagctaatagattctcatg

SEQ ID NO: 2924348 - DNA, 25 bp, Homo sapien
ctaatgagctttcgtttatgtggaa

SEQ ID NO: 2924349 - DNA, 25 bp, Homo sapien
cccaggaggttcagtttatagtcag

SEQ ID NO: 2924350 - DNA, 25 bp, Homo sapien
ctttgatagtacatggaaatgcaac

SEQ ID NO: 2924351 - DNA, 25 bp, Homo sapien
tgcttctgagagctgagtggccgtt

SEQ ID NO: 2924352 - DNA, 25 bp, Homo sapien
ttctgagagctgagtggccgttgcc

SEQ ID NO: 2924353 - DNA, 25 bp, Homo sapien
ctgagagctgagtggccgttgccat

SEQ ID NO: 2924354 - DNA, 25 bp, Homo sapien
cagtgcttctgagagctgagtggcc

SEQ ID NO: 2924355 - DNA, 25 bp, Homo sapien
caataatcacacctcggataaatct

SEQ ID NO: 2924356 - DNA, 25 bp, Homo sapien
ataatcacacctcggataaatctca

SEQ ID NO: 2924357 - DNA, 25 bp, Homo sapien
tcaatgagcaataatcacacctcgg

SEQ ID NO: 2924358 - DNA, 25 bp, Homo sapien
atcacacctcggataaatctcattg

SEQ ID NO: 2924359 - DNA, 25 bp, Homo sapien
gggccgggaggcctcagatgttcgc

SEQ ID NO: 2924360 - DNA, 25 bp, Homo sapien
gcggcggcaccgactcagtctcttt

SEQ ID NO: 2924361 - DNA, 25 bp, Homo sapien
tcagatgttcgcgagtgcctagtgc

SEQ ID NO: 2924362 - DNA, 25 bp, Homo sapien
tgcctagtgctttcggcccgcgaag

SEQ ID NO: 2924363 - DNA, 25 bp, Homo sapien
ccctcagcgcttgggctcagttaag

SEQ ID NO: 2924364 - DNA, 25 bp, Homo sapien
cgcttgggctcagttaagatggcgc

SEQ ID NO: 2924365 - DNA, 25 bp, Homo sapien
caacaccacccctggtaaggaggcg

SEQ ID NO: 2924366 - DNA, 25 bp, Homo sapien
gcctctagtcctcacacagccgagg

SEQ ID NO: 2924367 - DNA, 25 bp, Homo sapien
cctttcgccgacaggtctggggcgg

SEQ ID NO: 2924368 - DNA, 25 bp, Homo sapien
gccgacaggtctggggcggagcagg

SEQ ID NO: 2924369 - DNA, 25 bp, Homo sapien
ccctgcagcgctccggtagccgcta

SEQ ID NO: 2924370 - DNA, 25 bp, Homo sapien
cccctgcagcgctccggtagccgct

SEQ ID NO: 2924371 - DNA, 25 bp, Homo sapien
tataacagtgtaactgggtacccag

SEQ ID NO: 2924372 - DNA, 25 bp, Homo sapien
gaaccgtgagcacattaaacctatt

SEQ ID NO: 2924373 - DNA, 25 bp, Homo sapien
tgctgagcacaatagcttacacctg

SEQ ID NO: 2924374 - DNA, 25 bp, Homo sapien
gatgcagatgcctgtatagcccaca

SEQ ID NO: 2924375 - DNA, 25 bp, Homo sapien
aggactgcttcggtgtaagaggtca

SEQ ID NO: 2924376 - DNA, 25 bp, Homo sapien
aggctgacgtatgaggactgcttcg

SEQ ID NO: 2924377 - DNA, 25 bp, Homo sapien
tatgaggactgcttcggtgtaagag

SEQ ID NO: 2924378 - DNA, 25 bp, Homo sapien
gacgtatgaggactgcttcggtgta

SEQ ID NO: 2924379 - DNA, 25 bp, Homo sapien
caagcctggtataagttttaaagtg

SEQ ID NO: 2924380 - DNA, 25 bp, Homo sapien
tatgcaatgtatggcctttgactga

SEQ ID NO: 2924381 - DNA, 25 bp, Homo sapien
tctgtaaaacaactagcctggactc

SEQ ID NO: 2924382 - DNA, 25 bp, Homo sapien
cacaggtaactgttctggaggagac

SEQ ID NO: 2924383 - DNA, 25 bp, Homo sapien
gcctggactcttcaaaacatcatta

SEQ ID NO: 2924384 - DNA, 25 bp, Homo sapien
aatgaagtcacgttggcataaacta

SEQ ID NO: 2924385 - DNA, 25 bp, Homo sapien
tgaatgaagtcacgttggcataaac

SEQ ID NO: 2924386 - DNA, 25 bp, Homo sapien
tatgaatgaagtcacgttggcataa

SEQ ID NO: 2924387 - DNA, 25 bp, Homo sapien
ctgtatgaatgaagtcacgttggca

SEQ ID NO: 2924388 - DNA, 25 bp, Homo sapien
actgctatcccgatccttggttcat

SEQ ID NO: 2924389 - DNA, 25 bp, Homo sapien
tatactgctatcccgatccttggtt

SEQ ID NO: 2924390 - DNA, 25 bp, Homo sapien
ttatactgctatcccgatccttggt

SEQ ID NO: 2924391 - DNA, 25 bp, Homo sapien
tactgctatcccgatccttggttca

SEQ ID NO: 2924392 - DNA, 25 bp, Homo sapien
ctttgaagaagagctctgcaatttc

SEQ ID NO: 2924393 - DNA, 25 bp, Homo sapien
aggctgcctgctctgttagttgatg

SEQ ID NO: 2924394 - DNA, 25 bp, Homo sapien
tgcctgctctgttagttgatggcat

SEQ ID NO: 2924395 - DNA, 25 bp, Homo sapien
ttctttgaagaagagctctgcaatt

SEQ ID NO: 2924396 - DNA, 25 bp, Homo sapien
ctagaacatacaaactcagcagagt

SEQ ID NO: 2924397 - DNA, 25 bp, Homo sapien
gctcactttcaccacggctgttcaa

SEQ ID NO: 2924398 - DNA, 25 bp, Homo sapien
caagacaggaaaaacgaaagccatt

SEQ ID NO: 2924399 - DNA, 25 bp, Homo sapien
tgatccagcttgatgcagaaaaggc

SEQ ID NO: 2924400 - DNA, 25 bp, Homo sapien
tgttggagacgataaagagcaaacc

SEQ ID NO: 2924401 - DNA, 25 bp, Homo sapien
taagcttgcctgatgactcaataac

SEQ ID NO: 2924402 - DNA, 25 bp, Homo sapien
catccttgatatttactgaaatcaa

SEQ ID NO: 2924403 - DNA, 25 bp, Homo sapien
tgctgatgggactgtaaaatttctc

SEQ ID NO: 2924404 - DNA, 25 bp, Homo sapien
ctcagtagactgctttccactataa

SEQ ID NO: 2924405 - DNA, 25 bp, Homo sapien
tagactgctttccactataagacat

SEQ ID NO: 2924406 - DNA, 25 bp, Homo sapien
acttcattggtacgcacatctcgtg

SEQ ID NO: 2924407 - DNA, 25 bp, Homo sapien
caccacttcattggtacgcacatct

SEQ ID NO: 2924408 - DNA, 25 bp, Homo sapien
tctgtcacttcaattcaaaacttac

SEQ ID NO: 2924409 - DNA, 25 bp, Homo sapien
tagcatgggctcacttgatgtcttt

SEQ ID NO: 2924410 - DNA, 25 bp, Homo sapien
gaacggaatactcacacatctgtca

SEQ ID NO: 2924411 - DNA, 25 bp, Homo sapien
caggctttgaagctaggccttttgc

SEQ ID NO: 2924412 - DNA, 25 bp, Homo sapien
tctttgtagaaacttgacttcctta

SEQ ID NO: 2924413 - DNA, 25 bp, Homo sapien
gcctttgtattctatactgttggga

SEQ ID NO: 2924414 - DNA, 25 bp, Homo sapien
tgttcacgtaaataacagcctttgt

SEQ ID NO: 2924415 - DNA, 25 bp, Homo sapien
tgctgtgtgttcacgtaaataacag

SEQ ID NO: 2924416 - DNA, 25 bp, Homo sapien
aaactgcaacaaggggagaacaaat

SEQ ID NO: 2924417 - DNA, 25 bp, Homo sapien
aagcagatcctaaacaatattccat

SEQ ID NO: 2924418 - DNA, 25 bp, Homo sapien
tccgaagcagatcctaaacaatatt

SEQ ID NO: 2924419 - DNA, 25 bp, Homo sapien
taaatccgaagcagatcctaaacaa

SEQ ID NO: 2924420 - DNA, 25 bp, Homo sapien
agtaaatccgaagcagatcctaaac

SEQ ID NO: 2924421 - DNA, 25 bp, Homo sapien
catgtgtaattgctgctatttccac

SEQ ID NO: 2924422 - DNA, 25 bp, Homo sapien
ctatgaatcatagtatgagaatgta

SEQ ID NO: 2924423 - DNA, 25 bp, Homo sapien
tgaagagcaccatgtgtaattgctg

SEQ ID NO: 2924424 - DNA, 25 bp, Homo sapien
tgtaagtaggctaatccctgaagag

SEQ ID NO: 2924425 - DNA, 25 bp, Homo sapien
taccacaaatctagaaagtatacat

SEQ ID NO: 2924426 - DNA, 25 bp, Homo sapien
tctaatgcccattccagtttgcaaa

SEQ ID NO: 2924427 - DNA, 25 bp, Homo sapien
taaagttggtatatgcaacaagcca

SEQ ID NO: 2924428 - DNA, 25 bp, Homo sapien
aaaactgtatgattctctaatgccc

SEQ ID NO: 2924429 - DNA, 25 bp, Homo sapien
taagcagcttttattcgtccatgtc

SEQ ID NO: 2924430 - DNA, 25 bp, Homo sapien
tatcagttaccaagaagacaaaaga

SEQ ID NO: 2924431 - DNA, 25 bp, Homo sapien
cagtggtacagtgtacagtgtgtac

SEQ ID NO: 2924432 - DNA, 25 bp, Homo sapien
cgtccatgtcatagaatcaatggaa

SEQ ID NO: 2924433 - DNA, 25 bp, Homo sapien
gggtaatctcacaattgggataagg

SEQ ID NO: 2924434 - DNA, 25 bp, Homo sapien
taactttccctcaatagattatgtt

SEQ ID NO: 2924435 - DNA, 25 bp, Homo sapien
gttcattggagcatagtttatattt

SEQ ID NO: 2924436 - DNA, 25 bp, Homo sapien
ttgggataaggagaattaatattca

SEQ ID NO: 2924437 - DNA, 25 bp, Homo sapien
ggcctggttctgtcagaaggatatt

SEQ ID NO: 2924438 - DNA, 25 bp, Homo sapien
cacaaaggaattggcaggtgatgcc

SEQ ID NO: 2924439 - DNA, 25 bp, Homo sapien
caatacggcgttcccacaaaggaat

SEQ ID NO: 2924440 - DNA, 25 bp, Homo sapien
caggtgatgccatggaagcagagcc

SEQ ID NO: 2924441 - DNA, 25 bp, Homo sapien
tgagccattgcacctggccgagttt

SEQ ID NO: 2924442 - DNA, 25 bp, Homo sapien
ggctcccaaggcagaattatatttt

SEQ ID NO: 2924443 - DNA, 25 bp, Homo sapien
tcatgtaacagccaccccaaaagaa

SEQ ID NO: 2924444 - DNA, 25 bp, Homo sapien
tctcaggatcccattacaaaagtct

SEQ ID NO: 2924445 - DNA, 25 bp, Homo sapien
tgctcaagtttgcagattataatat

SEQ ID NO: 2924446 - DNA, 25 bp, Homo sapien
aagagaccacacatctactttgcca

SEQ ID NO: 2924447 - DNA, 25 bp, Homo sapien
ctactttgccatcatattgtccttc

SEQ ID NO: 2924448 - DNA, 25 bp, Homo sapien
atctactttgccatcatattgtcct

SEQ ID NO: 2924449 - DNA, 25 bp, Homo sapien
tccaagagaccacacatctactttg

SEQ ID NO: 2924450 - DNA, 25 bp, Homo sapien
aagactattgggctggtagacctcc

SEQ ID NO: 2924451 - DNA, 25 bp, Homo sapien
aatggtttagatgagcgcagtggct

SEQ ID NO: 2924452 - DNA, 25 bp, Homo sapien
ctccattgggaaatccagagcaaga

SEQ ID NO: 2924453 - DNA, 25 bp, Homo sapien
cagagcaagaagacggccagcatct

SEQ ID NO: 2924454 - DNA, 25 bp, Homo sapien
cctttgtgacactaaagcaagagtc

SEQ ID NO: 2924455 - DNA, 25 bp, Homo sapien
aaacatgtaagcaaacccactcatg

SEQ ID NO: 2924456 - DNA, 25 bp, Homo sapien
actgtatccagctgagagtagaact

SEQ ID NO: 2924457 - DNA, 25 bp, Homo sapien
gcaagagtcatatctattcacaact

SEQ ID NO: 2924458 - DNA, 25 bp, Homo sapien
aggggattcattttgggctatgtga

SEQ ID NO: 2924459 - DNA, 25 bp, Homo sapien
atctacaaagttgcgaaaataatca

SEQ ID NO: 2924460 - DNA, 25 bp, Homo sapien
gggattttctggaggcaagaatcta

SEQ ID NO: 2924461 - DNA, 25 bp, Homo sapien
taaaagttcctctgatgtaggtcga

SEQ ID NO: 2924462 - DNA, 25 bp, Homo sapien
tcctctgatgtaggtcgatcttgag

SEQ ID NO: 2924463 - DNA, 25 bp, Homo sapien
ttttctttagtttgatgtgtaccac

SEQ ID NO: 2924464 - DNA, 25 bp, Homo sapien
gtgcccagcctactatttaccatat

SEQ ID NO: 2924465 - DNA, 25 bp, Homo sapien
tcctggggttcaagctttttgtgcc

SEQ ID NO: 2924466 - DNA, 25 bp, Homo sapien
gtatttgggactacacgagtccacc

SEQ ID NO: 2924467 - DNA, 25 bp, Homo sapien
catctttcgatactgcagattgtcc

SEQ ID NO: 2924468 - DNA, 25 bp, Homo sapien
tctgaatgagatctattaacacggt

SEQ ID NO: 2924469 - DNA, 25 bp, Homo sapien
cagggcgctcccgaagaacaaatat

SEQ ID NO: 2924470 - DNA, 25 bp, Homo sapien
tactgctggtccattatgtgcctcc

SEQ ID NO: 2924471 - DNA, 25 bp, Homo sapien
tgtccggccaacaccatgatcttgt

SEQ ID NO: 2924472 - DNA, 25 bp, Homo sapien
actattaactgttcctgtccggcca

SEQ ID NO: 2924473 - DNA, 25 bp, Homo sapien
tctggaagactgttaacactactgc

SEQ ID NO: 2924474 - DNA, 25 bp, Homo sapien
gaactgttagacatcactgtgtggt

SEQ ID NO: 2924475 - DNA, 25 bp, Homo sapien
caaagtgttctcgattacgatagtg

SEQ ID NO: 2924476 - DNA, 25 bp, Homo sapien
ggagattgtggatctgatgctcttg

SEQ ID NO: 2924477 - DNA, 25 bp, Homo sapien
tacgatagtgtgatttgtgacgaga

SEQ ID NO: 2924478 - DNA, 25 bp, Homo sapien
cagtgatgctgtccgtatagtagca

SEQ ID NO: 2924479 - DNA, 25 bp, Homo sapien
gttggccaggttggtctcgcaacct

SEQ ID NO: 2924480 - DNA, 25 bp, Homo sapien
ttggccaggttggtctcgcaacctg

SEQ ID NO: 2924481 - DNA, 25 bp, Homo sapien
tggccaggttggtctcgcaacctga

SEQ ID NO: 2924482 - DNA, 25 bp, Homo sapien
gccaggttggtctcgcaacctgacc

SEQ ID NO: 2924483 - DNA, 25 bp, Homo sapien
caggtgtatagaattgtaaaaactc

SEQ ID NO: 2924484 - DNA, 25 bp, Homo sapien
tataaggcacttgggttatcggtgg

SEQ ID NO: 2924485 - DNA, 25 bp, Homo sapien
taccttgtttcagacggttaaggca

SEQ ID NO: 2924486 - DNA, 25 bp, Homo sapien
tccaaggcaggagacggtagactaa

SEQ ID NO: 2924487 - DNA, 25 bp, Homo sapien
caagatctttgtctaatctgaggcg

SEQ ID NO: 2924488 - DNA, 25 bp, Homo sapien
gcaaaattgttacgctgagtttcaa

SEQ ID NO: 2924489 - DNA, 25 bp, Homo sapien
ttcgcttatagccagacatttgttc

SEQ ID NO: 2924490 - DNA, 25 bp, Homo sapien
gatgttgtcgcctcattcgcttata

SEQ ID NO: 2924491 - DNA, 25 bp, Homo sapien
ttcgaagtttatactctcttttctg

SEQ ID NO: 2924492 - DNA, 25 bp, Homo sapien
tctcttcattggacatcactttagc

SEQ ID NO: 2924493 - DNA, 25 bp, Homo sapien
aagctgctcttttcgaagtttatac

SEQ ID NO: 2924494 - DNA, 25 bp, Homo sapien
gggactcgagaaaactattcagttc

SEQ ID NO: 2924495 - DNA, 25 bp, Homo sapien
tctttaagaagttgtcgggccaggc

SEQ ID NO: 2924496 - DNA, 25 bp, Homo sapien
aatttcaatcatcctataagacggg

SEQ ID NO: 2924497 - DNA, 25 bp, Homo sapien
tgtatgcacgctatgggaagagaaa

SEQ ID NO: 2924498 - DNA, 25 bp, Homo sapien
tcagtgaagctcacgtggcaaggta

SEQ ID NO: 2924499 - DNA, 25 bp, Homo sapien
tatgacgcccaagtaacattcttct

SEQ ID NO: 2924500 - DNA, 25 bp, Homo sapien
ctttgacgtcgaagaaggttagctt

SEQ ID NO: 2924501 - DNA, 25 bp, Homo sapien
tgaagcgacggcattccagctctag

SEQ ID NO: 2924502 - DNA, 25 bp, Homo sapien
caaggtcctgctctaagttatgacg

SEQ ID NO: 2924503 - DNA, 25 bp, Homo sapien
cagggagcaaacaatccatgtgaat

SEQ ID NO: 2924504 - DNA, 25 bp, Homo sapien
caaagtccctgagactagaatggaa

SEQ ID NO: 2924505 - DNA, 25 bp, Homo sapien
cagaggcaagtataagtgcaaagtc

SEQ ID NO: 2924506 - DNA, 25 bp, Homo sapien
gggaagaatgattcagacagaggca

SEQ ID NO: 2924507 - DNA, 25 bp, Homo sapien
catgctctaagtccttctgagtctg

SEQ ID NO: 2924508 - DNA, 25 bp, Homo sapien
gtagcatggcatgctctaagtcctt

SEQ ID NO: 2924509 - DNA, 25 bp, Homo sapien
ctgtcggagtagcatggcatgctct

SEQ ID NO: 2924510 - DNA, 25 bp, Homo sapien
agtccttctgagtctgtcttttgtt

SEQ ID NO: 2924511 - DNA, 25 bp, Homo sapien
gcgcatcttctgaattgtgttgagg

SEQ ID NO: 2924512 - DNA, 25 bp, Homo sapien
tgtaatctgatcaactcacagcgca

SEQ ID NO: 2924513 - DNA, 25 bp, Homo sapien
taggctgttgtcgaacttccatgac

SEQ ID NO: 2924514 - DNA, 25 bp, Homo sapien
aggtggcggaactccagttcttgca

SEQ ID NO: 2924515 - DNA, 25 bp, Homo sapien
tgactagacatcatcttaagacttt

SEQ ID NO: 2924516 - DNA, 25 bp, Homo sapien
gaatcttgattcttatctactggca

SEQ ID NO: 2924517 - DNA, 25 bp, Homo sapien
aagactgtagcaacaggcatttaac

SEQ ID NO: 2924518 - DNA, 25 bp, Homo sapien
ctggcacttcccatggttaaaagtt

SEQ ID NO: 2924519 - DNA, 25 bp, Homo sapien
ccagttgatcctacaagtgagaaca

SEQ ID NO: 2924520 - DNA, 25 bp, Homo sapien
tgcactgaggcagaacctattgttg

SEQ ID NO: 2924521 - DNA, 25 bp, Homo sapien
caggtattggctggttgattcatca

SEQ ID NO: 2924522 - DNA, 25 bp, Homo sapien
tgtatttttcaccatctgaggcact

SEQ ID NO: 2924523 - DNA, 25 bp, Homo sapien
cattaatgctgtgatcatactgctc

SEQ ID NO: 2924524 - DNA, 25 bp, Homo sapien
tccttgagccgtttcagaacagctt

SEQ ID NO: 2924525 - DNA, 25 bp, Homo sapien
tcagccaagatagctaatttccggg

SEQ ID NO: 2924526 - DNA, 25 bp, Homo sapien
ttttgcaggtatcctgaaactgctt

SEQ ID NO: 2924527 - DNA, 25 bp, Homo sapien
tgatttcgttcaggtggtggaagaa

SEQ ID NO: 2924528 - DNA, 25 bp, Homo sapien
tttccaactagtactttaattgctg

SEQ ID NO: 2924529 - DNA, 25 bp, Homo sapien
taattgctgtgatttcgttcaggtg

SEQ ID NO: 2924530 - DNA, 25 bp, Homo sapien
tagtactttaattgctgtgatttcg

SEQ ID NO: 2924531 - DNA, 25 bp, Homo sapien
ttttgttctaagagtgccctccgga

SEQ ID NO: 2924532 - DNA, 25 bp, Homo sapien
tacgcattcaacagctccagttcct

SEQ ID NO: 2924533 - DNA, 25 bp, Homo sapien
cgatcatgttgtgcctcagcttgca

SEQ ID NO: 2924534 - DNA, 25 bp, Homo sapien
gagaccctctgttcaagctcgcgaa

SEQ ID NO: 2924535 - DNA, 25 bp, Homo sapien
ttctccaacctccttaggtagagca

SEQ ID NO: 2924536 - DNA, 25 bp, Homo sapien
ccttctccaacctccttaggtagag

SEQ ID NO: 2924537 - DNA, 25 bp, Homo sapien
ctccaacctccttaggtagagcaag

SEQ ID NO: 2924538 - DNA, 25 bp, Homo sapien
tccttctccaacctccttaggtaga

SEQ ID NO: 2924539 - DNA, 25 bp, Homo sapien
gttgtgtgaccaaccagaagctccc

SEQ ID NO: 2924540 - DNA, 25 bp, Homo sapien
tctgtgcgctcattctgcaaagcca

SEQ ID NO: 2924541 - DNA, 25 bp, Homo sapien
tacctcgaggtaccccttgcattgg

SEQ ID NO: 2924542 - DNA, 25 bp, Homo sapien
ggactcccatactgctacctcgagg

SEQ ID NO: 2924543 - DNA, 25 bp, Homo sapien
ccattggatatttgtgaagtgacac

SEQ ID NO: 2924544 - DNA, 25 bp, Homo sapien
ttatgtataagacatgtgtgaccca

SEQ ID NO: 2924545 - DNA, 25 bp, Homo sapien
tgtataagacatgtgtgacccattg

SEQ ID NO: 2924546 - DNA, 25 bp, Homo sapien
taagacatgtgtgacccattggata

SEQ ID NO: 2924547 - DNA, 25 bp, Homo sapien
ttggcagacagctccagcggaattg

SEQ ID NO: 2924548 - DNA, 25 bp, Homo sapien
aacccggcagccaagtactatgaca

SEQ ID NO: 2924549 - DNA, 25 bp, Homo sapien
taaatacactggtgaggcaatgcag

SEQ ID NO: 2924550 - DNA, 25 bp, Homo sapien
gaaacttcttaggatacagacaccc

SEQ ID NO: 2924551 - DNA, 25 bp, Homo sapien
gcaactcgactgacatacctgggaa

SEQ ID NO: 2924552 - DNA, 25 bp, Homo sapien
caaatatggcatcaaacacctccgg

SEQ ID NO: 2924553 - DNA, 25 bp, Homo sapien
tgaatcccagaaactcctacaggtg

SEQ ID NO: 2924554 - DNA, 25 bp, Homo sapien
catccagtagtacagagcagccaga

SEQ ID NO: 2924555 - DNA, 25 bp, Homo sapien
catacaaatgataatagctatacca

SEQ ID NO: 2924556 - DNA, 25 bp, Homo sapien
acatacaaatgataatagctatacc

SEQ ID NO: 2924557 - DNA, 25 bp, Homo sapien
ctcagaagtggtggaaggtgcacaa

SEQ ID NO: 2924558 - DNA, 25 bp, Homo sapien
caagaggcaagtccgctaagtgtac

SEQ ID NO: 2924559 - DNA, 25 bp, Homo sapien
aaggcaatgctacaacctggttggg

SEQ ID NO: 2924560 - DNA, 25 bp, Homo sapien
tcagtagtccttgcatacaagaggc

SEQ ID NO: 2924561 - DNA, 25 bp, Homo sapien
cccacaacaggcagataaggtgcat

SEQ ID NO: 2924562 - DNA, 25 bp, Homo sapien
ggtgacatagtaaatggctccccag

SEQ ID NO: 2924563 - DNA, 25 bp, Homo sapien
gaagtgcaagtttaagaaacccaca

SEQ ID NO: 2924564 - DNA, 25 bp, Homo sapien
taccgttaagctaaatggagtctct

SEQ ID NO: 2924565 - DNA, 25 bp, Homo sapien
tacaggtgtgcattcatcgctcaat

SEQ ID NO: 2924566 - DNA, 25 bp, Homo sapien
cagattagtatatccagtgggcatc

SEQ ID NO: 2924567 - DNA, 25 bp, Homo sapien
cactgtgagcgtctgtttggtccaa

SEQ ID NO: 2924568 - DNA, 25 bp, Homo sapien
tgtccactatgaaaaccctacgggc

SEQ ID NO: 2924569 - DNA, 25 bp, Homo sapien
gacagcactcgataatctaagggac

SEQ ID NO: 2924570 - DNA, 25 bp, Homo sapien
aatgtagacagcactcgataatcta

SEQ ID NO: 2924571 - DNA, 25 bp, Homo sapien
tcttgttgtgaaaaattatctccct

SEQ ID NO: 2924572 - DNA, 25 bp, Homo sapien
gcactcgataatctaagggacatta

SEQ ID NO: 2924573 - DNA, 25 bp, Homo sapien
ccagccttatctggttttaaatgat

SEQ ID NO: 2924574 - DNA, 25 bp, Homo sapien
ccacaaccagccttatctggtttta

SEQ ID NO: 2924575 - DNA, 25 bp, Homo sapien
tctggttttaaatgatggccatgaa

SEQ ID NO: 2924576 - DNA, 25 bp, Homo sapien
aatgatggccatgaaattaaacgtt

SEQ ID NO: 2924577 - DNA, 25 bp, Homo sapien
tcaaggaggcggtcacatacatccg

SEQ ID NO: 2924578 - DNA, 25 bp, Homo sapien
tgctcctgtcctacctgggcgagtg

SEQ ID NO: 2924579 - DNA, 25 bp, Homo sapien
gaagatcgccctcagcaggtgggta

SEQ ID NO: 2924580 - DNA, 25 bp, Homo sapien
ggcctgagctggctaagaatcagaa

SEQ ID NO: 2924581 - DNA, 25 bp, Homo sapien
atgacagtcgggtccccaagcctcg

SEQ ID NO: 2924582 - DNA, 25 bp, Homo sapien
tgttgcaattgctgtacaaagggcc

SEQ ID NO: 2924583 - DNA, 25 bp, Homo sapien
cttttcatcggcctctgagggcgca

SEQ ID NO: 2924584 - DNA, 25 bp, Homo sapien
tggcggaagaccctgatgacagtcg

SEQ ID NO: 2924585 - DNA, 25 bp, Homo sapien
ggagccggcgcccggagctgcgact

SEQ ID NO: 2924586 - DNA, 25 bp, Homo sapien
agccggcgcccggagctgcgactta

SEQ ID NO: 2924587 - DNA, 25 bp, Homo sapien
gccggcgcccggagctgcgacttac

SEQ ID NO: 2924588 - DNA, 25 bp, Homo sapien
gagccggcgcccggagctgcgactt

SEQ ID NO: 2924589 - DNA, 25 bp, Homo sapien
agagcgagggtcgagatgcctatcc

SEQ ID NO: 2924590 - DNA, 25 bp, Homo sapien
cggggcgctggttctggttccctct

SEQ ID NO: 2924591 - DNA, 25 bp, Homo sapien
gagggtcgagatgcctatcccaaag

SEQ ID NO: 2924592 - DNA, 25 bp, Homo sapien
gaaacgtgggtagagagcgagggtc

SEQ ID NO: 2924593 - DNA, 25 bp, Homo sapien
tccgccgtcgcccagcggtggcagg

SEQ ID NO: 2924594 - DNA, 25 bp, Homo sapien
ccgccgtcgcccagcggtggcaggc

SEQ ID NO: 2924595 - DNA, 25 bp, Homo sapien
ctccgccgtcgcccagcggtggcag

SEQ ID NO: 2924596 - DNA, 25 bp, Homo sapien
aatagggtccaacgcggaggagcct

SEQ ID NO: 2924597 - DNA, 25 bp, Homo sapien
gagctagccgagaggctgctgtctt

SEQ ID NO: 2924598 - DNA, 25 bp, Homo sapien
gaagaggggcagaatcatgaagtca

SEQ ID NO: 2924599 - DNA, 25 bp, Homo sapien
gagcctcgggaggtgtctccgctcc

SEQ ID NO: 2924600 - DNA, 25 bp, Homo sapien
aaatggaatccctgtggaccgggtg

SEQ ID NO: 2924601 - DNA, 25 bp, Homo sapien
agctgcagcgcctggatgagatcgt

SEQ ID NO: 2924602 - DNA, 25 bp, Homo sapien
gggagacgggtacactcccctggca

SEQ ID NO: 2924603 - DNA, 25 bp, Homo sapien
tcgtccggggattcgtctcagcagg

SEQ ID NO: 2924604 - DNA, 25 bp, Homo sapien
cgcccgcgcgtccgttggccctggg

SEQ ID NO: 2924605 - DNA, 25 bp, Homo sapien
ccacagcagcggagtgtgcgcgcac

SEQ ID NO: 2924606 - DNA, 25 bp, Homo sapien
gccgcccgcgcgtccgttggccctg

SEQ ID NO: 2924607 - DNA, 25 bp, Homo sapien
cagacagtgggcccccggtatcgcc

SEQ ID NO: 2924608 - DNA, 25 bp, Homo sapien
gagaagcagttggggcgaaggcgga

SEQ ID NO: 2924609 - DNA, 25 bp, Homo sapien
cagttggggcgaaggcggaggaggc

SEQ ID NO: 2924610 - DNA, 25 bp, Homo sapien
caggagaagcagttggggcgaaggc

SEQ ID NO: 2924611 - DNA, 25 bp, Homo sapien
tgccaggagaagcagttggggcgaa

SEQ ID NO: 2924612 - DNA, 25 bp, Homo sapien
gctgggacccaggagcctcgcgagg

SEQ ID NO: 2924613 - DNA, 25 bp, Homo sapien
ctgggacccaggagcctcgcgaggg

SEQ ID NO: 2924614 - DNA, 25 bp, Homo sapien
ctcgctgggacccaggagcctcgcg

SEQ ID NO: 2924615 - DNA, 25 bp, Homo sapien
tcgctgggacccaggagcctcgcga

SEQ ID NO: 2924616 - DNA, 25 bp, Homo sapien
tccaggacgaacttttggcaaagcg

SEQ ID NO: 2924617 - DNA, 25 bp, Homo sapien
tgtgggtccaaagcgaagagttggg

SEQ ID NO: 2924618 - DNA, 25 bp, Homo sapien
aaagcgctttgagctcgcgggccga

SEQ ID NO: 2924619 - DNA, 25 bp, Homo sapien
gcccgccagcggaagaactccgcgt

SEQ ID NO: 2924620 - DNA, 25 bp, Homo sapien
gaggccacaggctctcgggacaatg

SEQ ID NO: 2924621 - DNA, 25 bp, Homo sapien
cactcgtgtgtaggtcactcttggt

SEQ ID NO: 2924622 - DNA, 25 bp, Homo sapien
actcgtgtgtaggtcactcttggtg

SEQ ID NO: 2924623 - DNA, 25 bp, Homo sapien
cgtgtgtaggtcactcttggtgaca

SEQ ID NO: 2924624 - DNA, 25 bp, Homo sapien
ctcgtgtgtaggtcactcttggtga

SEQ ID NO: 2924625 - DNA, 25 bp, Homo sapien
ggtggtgggcccctgcttgtactca

SEQ ID NO: 2924626 - DNA, 25 bp, Homo sapien
aacaggcagcgaagcctgctaggag

SEQ ID NO: 2924627 - DNA, 25 bp, Homo sapien
gagcgcctgtctccaggcgtggaca

SEQ ID NO: 2924628 - DNA, 25 bp, Homo sapien
ctccaggcgtggacaccaagggtgg

SEQ ID NO: 2924629 - DNA, 25 bp, Homo sapien
gatggagatgctaccacgcaagctg

SEQ ID NO: 2924630 - DNA, 25 bp, Homo sapien
cattgcagatgacaggcctatggct

SEQ ID NO: 2924631 - DNA, 25 bp, Homo sapien
aagctgagcccgcagtgtggagcct

SEQ ID NO: 2924632 - DNA, 25 bp, Homo sapien
tctgtactgtacacggtgctggcac

SEQ ID NO: 2924633 - DNA, 25 bp, Homo sapien
gcaacaactcttggcctggagctat

SEQ ID NO: 2924634 - DNA, 25 bp, Homo sapien
aatctgataggtggcgtgaggcaac

SEQ ID NO: 2924635 - DNA, 25 bp, Homo sapien
gaataaaggctgatgccatcgggca

SEQ ID NO: 2924636 - DNA, 25 bp, Homo sapien
cactctccgagtcaggataggccag

SEQ ID NO: 2924637 - DNA, 25 bp, Homo sapien
tgagggaagggttagccatacaagc

SEQ ID NO: 2924638 - DNA, 25 bp, Homo sapien
ccatacaagcataggccaggagggc

SEQ ID NO: 2924639 - DNA, 25 bp, Homo sapien
gatcctgcgtgaggctgaagtcagg

SEQ ID NO: 2924640 - DNA, 25 bp, Homo sapien
ggttagccatacaagcataggccag

SEQ ID NO: 2924641 - DNA, 25 bp, Homo sapien
ctacgagaggaggtaactgttagag

SEQ ID NO: 2924642 - DNA, 25 bp, Homo sapien
tccgcctcctcatcagccagtgggc

SEQ ID NO: 2924643 - DNA, 25 bp, Homo sapien
agcgccagcccccatgcagtcagca

SEQ ID NO: 2924644 - DNA, 25 bp, Homo sapien
aggctggctctacccaggccatctc

SEQ ID NO: 2924645 - DNA, 25 bp, Homo sapien
cccaggctggctctacccaggccat

SEQ ID NO: 2924646 - DNA, 25 bp, Homo sapien
gagcaggccctgaaaggctttcaca

SEQ ID NO: 2924647 - DNA, 25 bp, Homo sapien
ccctctaccgggagttggctcggag

SEQ ID NO: 2924648 - DNA, 25 bp, Homo sapien
gcacagcctccctctaccgggagtt

SEQ ID NO: 2924649 - DNA, 25 bp, Homo sapien
gcacacaccctcttcggcacagcct

SEQ ID NO: 2924650 - DNA, 25 bp, Homo sapien
ggccgccagctccgcagagcaaagg

SEQ ID NO: 2924651 - DNA, 25 bp, Homo sapien
gccgccagctccgcagagcaaaggc

SEQ ID NO: 2924652 - DNA, 25 bp, Homo sapien
tccgcctcttggcaccactagaaga

SEQ ID NO: 2924653 - DNA, 25 bp, Homo sapien
catggactgcttggccttcaagctc

SEQ ID NO: 2924654 - DNA, 25 bp, Homo sapien
aagcagagggaaacctcagggctga

SEQ ID NO: 2924655 - DNA, 25 bp, Homo sapien
agggattcccgccatggactgcttg

SEQ ID NO: 2924656 - DNA, 25 bp, Homo sapien
gcacagatggggcattactctccct

SEQ ID NO: 2924657 - DNA, 25 bp, Homo sapien
acagatggggcattactctccctac

SEQ ID NO: 2924658 - DNA, 25 bp, Homo sapien
ccccggcagcagggagacagtgggc

SEQ ID NO: 2924659 - DNA, 25 bp, Homo sapien
gctggcattgcctccaggcgccccc

SEQ ID NO: 2924660 - DNA, 25 bp, Homo sapien
gggaagcctgacttgaacagacaca

SEQ ID NO: 2924661 - DNA, 25 bp, Homo sapien
ccttgcccgttgggcacctgagcct

SEQ ID NO: 2924662 - DNA, 25 bp, Homo sapien
gaagcctgacttgaacagacacagc

SEQ ID NO: 2924663 - DNA, 25 bp, Homo sapien
agcctgacttgaacagacacagccc

SEQ ID NO: 2924664 - DNA, 25 bp, Homo sapien
tgctctccccgcgtcggaagtttct

SEQ ID NO: 2924665 - DNA, 25 bp, Homo sapien
tgtgcagccgtgtgcagagcgtggc

SEQ ID NO: 2924666 - DNA, 25 bp, Homo sapien
gcgtcggaagtttctgtgcagccgt

SEQ ID NO: 2924667 - DNA, 25 bp, Homo sapien
agtagatgctctccccgcgtcggaa

SEQ ID NO: 2924668 - DNA, 25 bp, Homo sapien
cagccactgtgtcctggctgtccgc

SEQ ID NO: 2924669 - DNA, 25 bp, Homo sapien
actgtgtcctggctgtccgctgtgg

SEQ ID NO: 2924670 - DNA, 25 bp, Homo sapien
gccactgtgtcctggctgtccgctg

SEQ ID NO: 2924671 - DNA, 25 bp, Homo sapien
ccactgtgtcctggctgtccgctgt

SEQ ID NO: 2924672 - DNA, 25 bp, Homo sapien
cggcgggcgacgcgaggtggggcgg

SEQ ID NO: 2924673 - DNA, 25 bp, Homo sapien
ccgggcgccgagcagtcaagggcgg

SEQ ID NO: 2924674 - DNA, 25 bp, Homo sapien
gcggcgggcgacgcgaggtggggcg

SEQ ID NO: 2924675 - DNA, 25 bp, Homo sapien
gccgggcgccgagcagtcaagggcg

SEQ ID NO: 2924676 - DNA, 25 bp, Homo sapien
gctgtccggcgtgggcgggaggagg

SEQ ID NO: 2924677 - DNA, 25 bp, Homo sapien
ttgacccggcgcgagggctgcagca

SEQ ID NO: 2924678 - DNA, 25 bp, Homo sapien
gtctccggcgcgagcgcttgacccg

SEQ ID NO: 2924679 - DNA, 25 bp, Homo sapien
cttccgggccgctgtccggcgtggg

SEQ ID NO: 2924680 - DNA, 25 bp, Homo sapien
ggaggagccgcacgccacagtggca

SEQ ID NO: 2924681 - DNA, 25 bp, Homo sapien
aggcagaagcggctccttttctccc

SEQ ID NO: 2924682 - DNA, 25 bp, Homo sapien
acaaggaggaaagcccccgcagtgc

SEQ ID NO: 2924683 - DNA, 25 bp, Homo sapien
cggagttttggcaagggaggcagaa

SEQ ID NO: 2924684 - DNA, 25 bp, Homo sapien
agtgctcggccagtgccgcgccatc

SEQ ID NO: 2924685 - DNA, 25 bp, Homo sapien
ccccgcgtgcctgcgtgttgagtgt

SEQ ID NO: 2924686 - DNA, 25 bp, Homo sapien
ggtccccgactcagctggtggctgt

SEQ ID NO: 2924687 - DNA, 25 bp, Homo sapien
ggcacaggccccaacctgtgtgctg

SEQ ID NO: 2924688 - DNA, 25 bp, Homo sapien
aggcctggtccatctggagttttga

SEQ ID NO: 2924689 - DNA, 25 bp, Homo sapien
aggcatggagggtagaaatgctgca

SEQ ID NO: 2924690 - DNA, 25 bp, Homo sapien
caggcaacctggagacatgtctgcg

SEQ ID NO: 2924691 - DNA, 25 bp, Homo sapien
tagcaactacactcgagcgtgcgga

SEQ ID NO: 2924692 - DNA, 25 bp, Homo sapien
cattgactatgccaggtgagggtcg

SEQ ID NO: 2924693 - DNA, 25 bp, Homo sapien
tccttggagctgctaggtgtcccag

SEQ ID NO: 2924694 - DNA, 25 bp, Homo sapien
gatggtgactgacggcagcgtttat

SEQ ID NO: 2924695 - DNA, 25 bp, Homo sapien
tagcgggaagcctctgtcctcccga

SEQ ID NO: 2924696 - DNA, 25 bp, Homo sapien
tcccgacatagtctggtttgggcag

SEQ ID NO: 2924697 - DNA, 25 bp, Homo sapien
taattggcattaacccctagcggga

SEQ ID NO: 2924698 - DNA, 25 bp, Homo sapien
agggccgcaggccacgctgcccgcc

SEQ ID NO: 2924699 - DNA, 25 bp, Homo sapien
gacacacagatgtggacacctacgg

SEQ ID NO: 2924700 - DNA, 25 bp, Homo sapien
agagatagacgggtaccccaaggca

SEQ ID NO: 2924701 - DNA, 25 bp, Homo sapien
ccctttgacctggagcgggacttgg

SEQ ID NO: 2924702 - DNA, 25 bp, Homo sapien
cagtgggcgtattcagcaagagtgt

SEQ ID NO: 2924703 - DNA, 25 bp, Homo sapien
gcctttgcctgcctcgtcgtgtgaa

SEQ ID NO: 2924704 - DNA, 25 bp, Homo sapien
aaacggcccctctatgttatatgca

SEQ ID NO: 2924705 - DNA, 25 bp, Homo sapien
tatatgcaccctttctggacacaca

SEQ ID NO: 2924706 - DNA, 25 bp, Homo sapien
gcacagtggtcactcctcgggaggt

SEQ ID NO: 2924707 - DNA, 25 bp, Homo sapien
acaaagacgccgctcggcggaggga

SEQ ID NO: 2924708 - DNA, 25 bp, Homo sapien
cacccgccctgggagggagcgggca

SEQ ID NO: 2924709 - DNA, 25 bp, Homo sapien
tgcggctcgggcatgtgcgagcggc

SEQ ID NO: 2924710 - DNA, 25 bp, Homo sapien
ggcgacgggcgtcctcgcgaggcgg

SEQ ID NO: 2924711 - DNA, 25 bp, Homo sapien
ggggccggcgctgcctgctcgcggg

SEQ ID NO: 2924712 - DNA, 25 bp, Homo sapien
gcggggggccggcgctgcctgctcg

SEQ ID NO: 2924713 - DNA, 25 bp, Homo sapien
cgcccgctcctcatgccggggccgc

SEQ ID NO: 2924714 - DNA, 25 bp, Homo sapien
ccgctcctcatgccggggccgcggc

SEQ ID NO: 2924715 - DNA, 25 bp, Homo sapien
cggttgtgccacacgaggtagtgca

SEQ ID NO: 2924716 - DNA, 25 bp, Homo sapien
tccagctcgcggtggcggttgtgcc

SEQ ID NO: 2924717 - DNA, 25 bp, Homo sapien
ccttcctggcggaggcgttggcggg

SEQ ID NO: 2924718 - DNA, 25 bp, Homo sapien
tagtgcagcggatacttgccctcgg

SEQ ID NO: 2924719 - DNA, 25 bp, Homo sapien
cgcggcgccccgaaggcgctcctac

SEQ ID NO: 2924720 - DNA, 25 bp, Homo sapien
accccaaccttaccccagcaagatg

SEQ ID NO: 2924721 - DNA, 25 bp, Homo sapien
aaccttaccccagcaagatggccac

SEQ ID NO: 2924722 - DNA, 25 bp, Homo sapien
ccacttcaggattatcagcagagag

SEQ ID NO: 2924723 - DNA, 25 bp, Homo sapien
gcaagatggccacccacttcaggat

SEQ ID NO: 2924724 - DNA, 25 bp, Homo sapien
gcaggggtaggggtgaatctgggac

SEQ ID NO: 2924725 - DNA, 25 bp, Homo sapien
ggcaggggtaggggtgaatctggga

SEQ ID NO: 2924726 - DNA, 25 bp, Homo sapien
tggggcaggggtaggggtgaatctg

SEQ ID NO: 2924727 - DNA, 25 bp, Homo sapien
gtgccctatattccccctggcctgg

SEQ ID NO: 2924728 - DNA, 25 bp, Homo sapien
gcagtgtccatttcaaggagacatt

SEQ ID NO: 2924729 - DNA, 25 bp, Homo sapien
acaggcagtgtccatttcaaggaga

SEQ ID NO: 2924730 - DNA, 25 bp, Homo sapien
ggttaacctccaccagtgccctata

SEQ ID NO: 2924731 - DNA, 25 bp, Homo sapien
ctggcagccccctactgcctctttg

SEQ ID NO: 2924732 - DNA, 25 bp, Homo sapien
cgattctccctgcccacgtctgcgc

SEQ ID NO: 2924733 - DNA, 25 bp, Homo sapien
acgtctgcgccgtgcgccaggagca

SEQ ID NO: 2924734 - DNA, 25 bp, Homo sapien
agcacacgggcacactcaaggtgcc

SEQ ID NO: 2924735 - DNA, 25 bp, Homo sapien
ccgcggggatccagctgctcgatgt

SEQ ID NO: 2924736 - DNA, 25 bp, Homo sapien
agggcaggacccttcagccaaccat

SEQ ID NO: 2924737 - DNA, 25 bp, Homo sapien
ccaaccataggtctatgatgctggg

SEQ ID NO: 2924738 - DNA, 25 bp, Homo sapien
caggacccttcagccaaccataggt

SEQ ID NO: 2924739 - DNA, 25 bp, Homo sapien
agccaaccataggtctatgatgctg

SEQ ID NO: 2924740 - DNA, 25 bp, Homo sapien
gtagtcccggtaccgaagcaccagc

SEQ ID NO: 2924741 - DNA, 25 bp, Homo sapien
agtcccggtaccgaagcaccagctg

SEQ ID NO: 2924742 - DNA, 25 bp, Homo sapien
cgctggtagtcccggtaccgaagca

SEQ ID NO: 2924743 - DNA, 25 bp, Homo sapien
tggtagtcccggtaccgaagcacca

SEQ ID NO: 2924744 - DNA, 25 bp, Homo sapien
cccatttcatctccacgtagaagtc

SEQ ID NO: 2924745 - DNA, 25 bp, Homo sapien
ctcccatttcatctccacgtagaag

SEQ ID NO: 2924746 - DNA, 25 bp, Homo sapien
gaactcccatttcatctccacgtag

SEQ ID NO: 2924747 - DNA, 25 bp, Homo sapien
agtgaactcccatttcatctccacg

SEQ ID NO: 2924748 - DNA, 25 bp, Homo sapien
ttgggatccgtgtggccaggaacag

SEQ ID NO: 2924749 - DNA, 25 bp, Homo sapien
gtggctttgactggtctggcctaca

SEQ ID NO: 2924750 - DNA, 25 bp, Homo sapien
gtctggcctacacggcctggaccag

SEQ ID NO: 2924751 - DNA, 25 bp, Homo sapien
cctggccagtgtagaccatactcac

SEQ ID NO: 2924752 - DNA, 25 bp, Homo sapien
tgaagacaaagctgcggttccctcg

SEQ ID NO: 2924753 - DNA, 25 bp, Homo sapien
tggccgctcttccacactttgtagg

SEQ ID NO: 2924754 - DNA, 25 bp, Homo sapien
ctagggcagatcttggacaccaggg

SEQ ID NO: 2924755 - DNA, 25 bp, Homo sapien
caggagtgtggtgtctaccctcagg

SEQ ID NO: 2924756 - DNA, 25 bp, Homo sapien
ccggcggtcgtggtcaatctccatg

SEQ ID NO: 2924757 - DNA, 25 bp, Homo sapien
accacccggcggtcgtggtcaatct

SEQ ID NO: 2924758 - DNA, 25 bp, Homo sapien
tctgtgtacaccacccggcggtcgt

SEQ ID NO: 2924759 - DNA, 25 bp, Homo sapien
ctgtgtacaccacccggcggtcgtg

SEQ ID NO: 2924760 - DNA, 25 bp, Homo sapien
tgtcaagctgagtggtgacgacggg

SEQ ID NO: 2924761 - DNA, 25 bp, Homo sapien
ctctcaaaggagatattcttggtgt

SEQ ID NO: 2924762 - DNA, 25 bp, Homo sapien
tctcaaaggagatattcttggtgtc

SEQ ID NO: 2924763 - DNA, 25 bp, Homo sapien
tattcttggtgtcaagctgagtggt

SEQ ID NO: 2924764 - DNA, 25 bp, Homo sapien
ggctcaagggtgaccaaggccatgt

SEQ ID NO: 2924765 - DNA, 25 bp, Homo sapien
cgggctggctcaagggtgaccaagg

SEQ ID NO: 2924766 - DNA, 25 bp, Homo sapien
tcaagggtgaccaaggccatgtcca

SEQ ID NO: 2924767 - DNA, 25 bp, Homo sapien
gggctggctcaagggtgaccaaggc

SEQ ID NO: 2924768 - DNA, 25 bp, Homo sapien
gtcttttcactgcgccagcccagga

SEQ ID NO: 2924769 - DNA, 25 bp, Homo sapien
tccgtcttttcactgcgccagccca

SEQ ID NO: 2924770 - DNA, 25 bp, Homo sapien
tcaccatctccgtcttttcactgcg

SEQ ID NO: 2924771 - DNA, 25 bp, Homo sapien
catctccgtcttttcactgcgccag

SEQ ID NO: 2924772 - DNA, 25 bp, Homo sapien
ggcagtcatttttagggataaaggc

SEQ ID NO: 2924773 - DNA, 25 bp, Homo sapien
ctgtggcgggatcgctgcacactgc

SEQ ID NO: 2924774 - DNA, 25 bp, Homo sapien
tgctgtggcgggatcgctgcacact

SEQ ID NO: 2924775 - DNA, 25 bp, Homo sapien
tcatttttagggataaaggcctggc

SEQ ID NO: 2924776 - DNA, 25 bp, Homo sapien
cgggtgatgagctccacgttagatg

SEQ ID NO: 2924777 - DNA, 25 bp, Homo sapien
tctgaaagatgttctgtccgtgtgc

SEQ ID NO: 2924778 - DNA, 25 bp, Homo sapien
aaagatgttctgtccgtgtgcgggt

SEQ ID NO: 2924779 - DNA, 25 bp, Homo sapien
agctccacgttagatgccccataca

SEQ ID NO: 2924780 - DNA, 25 bp, Homo sapien
ccccgtgctgctcagcgattcccag

SEQ ID NO: 2924781 - DNA, 25 bp, Homo sapien
gtgctgctcagcgattcccaggaag

SEQ ID NO: 2924782 - DNA, 25 bp, Homo sapien
tgctcagcgattcccaggaaggact

SEQ ID NO: 2924783 - DNA, 25 bp, Homo sapien
aaggactgcaaaggtgtcttacagc

SEQ ID NO: 2924784 - DNA, 25 bp, Homo sapien
ggcagtggggttggcttggctcaga

SEQ ID NO: 2924785 - DNA, 25 bp, Homo sapien
ttggctcagagtctgagtgatcagg

SEQ ID NO: 2924786 - DNA, 25 bp, Homo sapien
ggctcagagtctgagtgatcagggt

SEQ ID NO: 2924787 - DNA, 25 bp, Homo sapien
tggggttggcttggctcagagtctg

SEQ ID NO: 2924788 - DNA, 25 bp, Homo sapien
tggtcagttccatggggcggcccat

SEQ ID NO: 2924789 - DNA, 25 bp, Homo sapien
atggggcggcccatatcacggttgc

SEQ ID NO: 2924790 - DNA, 25 bp, Homo sapien
ggcggcccatatcacggttgcccag

SEQ ID NO: 2924791 - DNA, 25 bp, Homo sapien
catatcacggttgcccagctcaaag

SEQ ID NO: 2924792 - DNA, 25 bp, Homo sapien
tgcaggaagccatggcctcccagca

SEQ ID NO: 2924793 - DNA, 25 bp, Homo sapien
tcccagcatctcctggagccccggc

SEQ ID NO: 2924794 - DNA, 25 bp, Homo sapien
accttcccagcaccggcaggggcct

SEQ ID NO: 2924795 - DNA, 25 bp, Homo sapien
ttcccagcaccggcaggggcctcac

SEQ ID NO: 2924796 - DNA, 25 bp, Homo sapien
ctgcccccaccagatcccaaggggt

SEQ ID NO: 2924797 - DNA, 25 bp, Homo sapien
tgcccccaccagatcccaaggggta

SEQ ID NO: 2924798 - DNA, 25 bp, Homo sapien
cagacgcagggtgatgaagtcccgg

SEQ ID NO: 2924799 - DNA, 25 bp, Homo sapien
aaaaagcgcattgctgacggccatg

SEQ ID NO: 2924800 - DNA, 25 bp, Homo sapien
cccggagcttggcaaaaagcgcatt

SEQ ID NO: 2924801 - DNA, 25 bp, Homo sapien
acagggacaggggatgctcctcaca

SEQ ID NO: 2924802 - DNA, 25 bp, Homo sapien
tgatgcgggcgttgaggatgtggaa

SEQ ID NO: 2924803 - DNA, 25 bp, Homo sapien
tcgcaccgatggcaccggttcgtcg

SEQ ID NO: 2924804 - DNA, 25 bp, Homo sapien
gagctgctgacgctggaggagtcgc

SEQ ID NO: 2924805 - DNA, 25 bp, Homo sapien
cagccgttgaggttcccgaaggtga

SEQ ID NO: 2924806 - DNA, 25 bp, Homo sapien
gagagccgaggggcaggcgttctcg

SEQ ID NO: 2924807 - DNA, 25 bp, Homo sapien
cgaggggcaggcgttctcgcggggg

SEQ ID NO: 2924808 - DNA, 25 bp, Homo sapien
ggcaggcgttctcgcggggggcctc

SEQ ID NO: 2924809 - DNA, 25 bp, Homo sapien
agccgaggggcaggcgttctcgcgg

SEQ ID NO: 2924810 - DNA, 25 bp, Homo sapien
ggcgcgggggctgggtcaggcacgg

SEQ ID NO: 2924811 - DNA, 25 bp, Homo sapien
ggggctgggtcaggcacggccgggc

SEQ ID NO: 2924812 - DNA, 25 bp, Homo sapien
cgcgggggctgggtcaggcacggcc

SEQ ID NO: 2924813 - DNA, 25 bp, Homo sapien
ctgggtcaggcacggccgggcgcgc

SEQ ID NO: 2924814 - DNA, 25 bp, Homo sapien
ccgctggccgcccatcatgctgtag

SEQ ID NO: 2924815 - DNA, 25 bp, Homo sapien
gcgcggggcctcgaacaacgctggg

SEQ ID NO: 2924816 - DNA, 25 bp, Homo sapien
gatggcgaattgcagcaggtcgtcg

SEQ ID NO: 2924817 - DNA, 25 bp, Homo sapien
ccgcccatcatgctgtagccgcgcg

SEQ ID NO: 2924818 - DNA, 25 bp, Homo sapien
tgtcggcgaccctcgtaggacatgg

SEQ ID NO: 2924819 - DNA, 25 bp, Homo sapien
cctgtcggcgaccctcgtaggacat

SEQ ID NO: 2924820 - DNA, 25 bp, Homo sapien
cgaccctcgtaggacatggggtggg

SEQ ID NO: 2924821 - DNA, 25 bp, Homo sapien
tgctgttggttagcgcctcccagat

SEQ ID NO: 2924822 - DNA, 25 bp, Homo sapien
ggttctccggctgtgtcctggctta

SEQ ID NO: 2924823 - DNA, 25 bp, Homo sapien
tgaactccgcggtgaagcctggatc

SEQ ID NO: 2924824 - DNA, 25 bp, Homo sapien
caagttctccccgtcaatgcctggg

SEQ ID NO: 2924825 - DNA, 25 bp, Homo sapien
gaagccatcccgataccaggagggt

SEQ ID NO: 2924826 - DNA, 25 bp, Homo sapien
tgctcctgcgccgacagttccatcg

SEQ ID NO: 2924827 - DNA, 25 bp, Homo sapien
tgagagcctcaggatgcgctccagc

SEQ ID NO: 2924828 - DNA, 25 bp, Homo sapien
gctccggaacacgtggccgccggaa

SEQ ID NO: 2924829 - DNA, 25 bp, Homo sapien
gcagctgctcgtcgtagctccggaa

SEQ ID NO: 2924830 - DNA, 25 bp, Homo sapien
tggcgctggcgagggtcccggcagg

SEQ ID NO: 2924831 - DNA, 25 bp, Homo sapien
ggcgtggcgcgcgtggcgctggcga

SEQ ID NO: 2924832 - DNA, 25 bp, Homo sapien
cgccgctctgcaggcgcgcaggccg

SEQ ID NO: 2924833 - DNA, 25 bp, Homo sapien
acccgcgaggcggtggctccagtct

SEQ ID NO: 2924834 - DNA, 25 bp, Homo sapien
gaacaaagcagtgacacagcacgcg

SEQ ID NO: 2924835 - DNA, 25 bp, Homo sapien
cgggtaccccgctaagtgcacttga

SEQ ID NO: 2924836 - DNA, 25 bp, Homo sapien
ttagtgaacagaaatgcggaccggc

SEQ ID NO: 2924837 - DNA, 25 bp, Homo sapien
tagggacagcgctcctctaaggatt

SEQ ID NO: 2924838 - DNA, 25 bp, Homo sapien
gggcgagccctttgtgtccagtcta

SEQ ID NO: 2924839 - DNA, 25 bp, Homo sapien
gggatgtacaaccacagaggctagc

SEQ ID NO: 2924840 - DNA, 25 bp, Homo sapien
tcagaatcagtctggtgcccctggc

SEQ ID NO: 2924841 - DNA, 25 bp, Homo sapien
tagtgcttaccccagcccaatatgc

SEQ ID NO: 2924842 - DNA, 25 bp, Homo sapien
tcaggcagcctcttaccctagagct

SEQ ID NO: 2924843 - DNA, 25 bp, Homo sapien
cctgggagacctggcgatgcactcc

SEQ ID NO: 2924844 - DNA, 25 bp, Homo sapien
agacctggcgatgcactcctgggct

SEQ ID NO: 2924845 - DNA, 25 bp, Homo sapien
cctgggctcagggtccatcaggcag

SEQ ID NO: 2924846 - DNA, 25 bp, Homo sapien
tcaaggcatgtattagacacaagca

SEQ ID NO: 2924847 - DNA, 25 bp, Homo sapien
gacacccatattaggaaaaggcctg

SEQ ID NO: 2924848 - DNA, 25 bp, Homo sapien
tcctgctatgagaagataaccagcc

SEQ ID NO: 2924849 - DNA, 25 bp, Homo sapien
ggtcccttgacgtcatgaagagcta

SEQ ID NO: 2924850 - DNA, 25 bp, Homo sapien
gcagtgaactgtcaaggactttcca

SEQ ID NO: 2924851 - DNA, 25 bp, Homo sapien
ggagtttgtgccagccttttcagac

SEQ ID NO: 2924852 - DNA, 25 bp, Homo sapien
tgtcattcaaccatgccaaggagtt

SEQ ID NO: 2924853 - DNA, 25 bp, Homo sapien
tatttacatagctgagcagtgtcca

SEQ ID NO: 2924854 - DNA, 25 bp, Homo sapien
tattgtgcagagcaagccagtggag

SEQ ID NO: 2924855 - DNA, 25 bp, Homo sapien
tcctcagaacagactcaggcatgca

SEQ ID NO: 2924856 - DNA, 25 bp, Homo sapien
tgcacgcgatggaggaccaagagtc

SEQ ID NO: 2924857 - DNA, 25 bp, Homo sapien
gagaggccccttgtgcagtatgcca

SEQ ID NO: 2924858 - DNA, 25 bp, Homo sapien
tgagatgcgtgatatgttgtctcct

SEQ ID NO: 2924859 - DNA, 25 bp, Homo sapien
atgttgtctcctcctaggggtggct

SEQ ID NO: 2924860 - DNA, 25 bp, Homo sapien
ttgagatgcgtgatatgttgtctcc

SEQ ID NO: 2924861 - DNA, 25 bp, Homo sapien
ctgagtgagaagtgacacgtggagt

SEQ ID NO: 2924862 - DNA, 25 bp, Homo sapien
atggaggttacccttgagtagggag

SEQ ID NO: 2924863 - DNA, 25 bp, Homo sapien
caggatggaggttacccttgagtag

SEQ ID NO: 2924864 - DNA, 25 bp, Homo sapien
cgtggagtagcagtgtttcacaggc

SEQ ID NO: 2924865 - DNA, 25 bp, Homo sapien
gaaaggatactacgtgtcctgccaa

SEQ ID NO: 2924866 - DNA, 25 bp, Homo sapien
cagcttcctaggcttgattcatgga

SEQ ID NO: 2924867 - DNA, 25 bp, Homo sapien
cacgtgacccactgagagaaaggat

SEQ ID NO: 2924868 - DNA, 25 bp, Homo sapien
tagtatttattctggaatcccaggc

SEQ ID NO: 2924869 - DNA, 25 bp, Homo sapien
tcatcaactaacaaagagccactct

SEQ ID NO: 2924870 - DNA, 25 bp, Homo sapien
caatccctagaaatcactaatgttc

SEQ ID NO: 2924871 - DNA, 25 bp, Homo sapien
gaaatcactaatgttcatcaactaa

SEQ ID NO: 2924872 - DNA, 25 bp, Homo sapien
tcttcggctgttttgaataatgctg

SEQ ID NO: 2924873 - DNA, 25 bp, Homo sapien
gcttaatcttatctccaacagagga

SEQ ID NO: 2924874 - DNA, 25 bp, Homo sapien
tggctgcggcacatagatttttaat

SEQ ID NO: 2924875 - DNA, 25 bp, Homo sapien
gacttcagtagtgtccttttcaagg

SEQ ID NO: 2924876 - DNA, 25 bp, Homo sapien
ccaggatgggcgttagacttttcct

SEQ ID NO: 2924877 - DNA, 25 bp, Homo sapien
cttgtctagttgtacttccttatgc

SEQ ID NO: 2924878 - DNA, 25 bp, Homo sapien
tgtctagttgtacttccttatgcat

SEQ ID NO: 2924879 - DNA, 25 bp, Homo sapien
ttgtctagttgtacttccttatgca

SEQ ID NO: 2924880 - DNA, 25 bp, Homo sapien
taatcaggagtttctggagtccagg

SEQ ID NO: 2924881 - DNA, 25 bp, Homo sapien
tgagtttgactcctggcctttcttt

SEQ ID NO: 2924882 - DNA, 25 bp, Homo sapien
tttgaactaaccaacagcccttgtc

SEQ ID NO: 2924883 - DNA, 25 bp, Homo sapien
gctttaaagcaagaatgtacttaca

SEQ ID NO: 2924884 - DNA, 25 bp, Homo sapien
gatatttgctgctttgctttaggca

SEQ ID NO: 2924885 - DNA, 25 bp, Homo sapien
gaaagatatttgctgctttgcttta

SEQ ID NO: 2924886 - DNA, 25 bp, Homo sapien
ctgaaagatatttgctgctttgctt

SEQ ID NO: 2924887 - DNA, 25 bp, Homo sapien
aagatatttgctgctttgctttagg

SEQ ID NO: 2924888 - DNA, 25 bp, Homo sapien
gaaaaagttcgagaggcaataggag

SEQ ID NO: 2924889 - DNA, 25 bp, Homo sapien
gatttctgcagcctaccacgcatag

SEQ ID NO: 2924890 - DNA, 25 bp, Homo sapien
cacttagaaattaggccagatgcgg

SEQ ID NO: 2924891 - DNA, 25 bp, Homo sapien
gatgaagaccactgccctaggcttg

SEQ ID NO: 2924892 - DNA, 25 bp, Homo sapien
ttccatcttttaggctatatgagta

SEQ ID NO: 2924893 - DNA, 25 bp, Homo sapien
tcaccagcagatctaaacagtatcc

SEQ ID NO: 2924894 - DNA, 25 bp, Homo sapien
aacagtatccataggcacctatggc

SEQ ID NO: 2924895 - DNA, 25 bp, Homo sapien
tcacaaaggtgaggagattaacttt

SEQ ID NO: 2924896 - DNA, 25 bp, Homo sapien
catatatgttattgcccttgaagac

SEQ ID NO: 2924897 - DNA, 25 bp, Homo sapien
gctccatatatgttattgcccttga

SEQ ID NO: 2924898 - DNA, 25 bp, Homo sapien
gaagaccttccagtgtggcaagata

SEQ ID NO: 2924899 - DNA, 25 bp, Homo sapien
accttccagtgtggcaagatatgga

SEQ ID NO: 2924900 - DNA, 25 bp, Homo sapien
cagaacgccatcaaccagctgtgag

SEQ ID NO: 2924901 - DNA, 25 bp, Homo sapien
atgattccttacttctccgccaacg

SEQ ID NO: 2924902 - DNA, 25 bp, Homo sapien
cgcctccgcgaacgctcagaaagtt

SEQ ID NO: 2924903 - DNA, 25 bp, Homo sapien
tcggtggccccgacatgattcctta

SEQ ID NO: 2924904 - DNA, 25 bp, Homo sapien
gatgatgaactccaagatccagacc

SEQ ID NO: 2924905 - DNA, 25 bp, Homo sapien
tgaactccaagatccagaccttccg

SEQ ID NO: 2924906 - DNA, 25 bp, Homo sapien
atgaagatgatgaactccaagatcc

SEQ ID NO: 2924907 - DNA, 25 bp, Homo sapien
gatccagaccttccgttaactcttc

SEQ ID NO: 2924908 - DNA, 25 bp, Homo sapien
ggtccattagggcaactcatacaag

SEQ ID NO: 2924909 - DNA, 25 bp, Homo sapien
caaggtccattagggcaactcatac

SEQ ID NO: 2924910 - DNA, 25 bp, Homo sapien
ctccaaggtccattagggcaactca

SEQ ID NO: 2924911 - DNA, 25 bp, Homo sapien
cattagggcaactcatacaagcaac

SEQ ID NO: 2924912 - DNA, 25 bp, Homo sapien
gcaacctccatctccaacattcaag

SEQ ID NO: 2924913 - DNA, 25 bp, Homo sapien
ttttgggagacggaggctcactctg

SEQ ID NO: 2924914 - DNA, 25 bp, Homo sapien
ctccatctccaacattcaagcaatt

SEQ ID NO: 2924915 - DNA, 25 bp, Homo sapien
ttgggagacggaggctcactctgtc

SEQ ID NO: 2924916 - DNA, 25 bp, Homo sapien
gttactcgataggctaaggcaggag

SEQ ID NO: 2924917 - DNA, 25 bp, Homo sapien
cccagttactcgataggctaaggca

SEQ ID NO: 2924918 - DNA, 25 bp, Homo sapien
tagtcccagttactcgataggctaa

SEQ ID NO: 2924919 - DNA, 25 bp, Homo sapien
aatcgcttgaacctaggaggtggag

SEQ ID NO: 2924920 - DNA, 25 bp, Homo sapien
tgcccgggaacccacaaaattcatg

SEQ ID NO: 2924921 - DNA, 25 bp, Homo sapien
tcactttcgagggtagggcttcaac

SEQ ID NO: 2924922 - DNA, 25 bp, Homo sapien
catgtgagggtgttcttccgggctt

SEQ ID NO: 2924923 - DNA, 25 bp, Homo sapien
taagtccataatattttgcccggga

SEQ ID NO: 2924924 - DNA, 25 bp, Homo sapien
taataactttgttcgtgataggcaa

SEQ ID NO: 2924925 - DNA, 25 bp, Homo sapien
caacaacgtgggatgaatctcgaaa

SEQ ID NO: 2924926 - DNA, 25 bp, Homo sapien
tgccacattttgactgggaatggct

SEQ ID NO: 2924927 - DNA, 25 bp, Homo sapien
aaccagaacagggttgcctcaggag

SEQ ID NO: 2924928 - DNA, 25 bp, Homo sapien
tctgaagttagtaatctgatgcctg

SEQ ID NO: 2924929 - DNA, 25 bp, Homo sapien
ccctgccaaggaaacaatcaaactg

SEQ ID NO: 2924930 - DNA, 25 bp, Homo sapien
aaagctatactgagggatatgccaa

SEQ ID NO: 2924931 - DNA, 25 bp, Homo sapien
taagaagcctggtaatcatgttgcc

SEQ ID NO: 2924932 - DNA, 25 bp, Homo sapien
cagctcttcaacagagtcaaggcag

SEQ ID NO: 2924933 - DNA, 25 bp, Homo sapien
gtcaatagtctgattgccaagaatg

SEQ ID NO: 2924934 - DNA, 25 bp, Homo sapien
tagtctgattgccaagaatggtctt

SEQ ID NO: 2924935 - DNA, 25 bp, Homo sapien
tgtgcatcctttcagagtgatgtct

SEQ ID NO: 2924936 - DNA, 25 bp, Homo sapien
tgcatcctttcagagtgatgtctgc

SEQ ID NO: 2924937 - DNA, 25 bp, Homo sapien
aaaggagtatgcacagacctcatct

SEQ ID NO: 2924938 - DNA, 25 bp, Homo sapien
catgctcctggataactaagttgat

SEQ ID NO: 2924939 - DNA, 25 bp, Homo sapien
ggattttatcaagagacccatgctc

SEQ ID NO: 2924940 - DNA, 25 bp, Homo sapien
ggaaaggagtatgcacagacctcat

SEQ ID NO: 2924941 - DNA, 25 bp, Homo sapien
caatgaaggcatggtagttcagtag

SEQ ID NO: 2924942 - DNA, 25 bp, Homo sapien
gggtgtgcagacttcaattgtatca

SEQ ID NO: 2924943 - DNA, 25 bp, Homo sapien
gcttactgctaaaaggctaaagacg

SEQ ID NO: 2924944 - DNA, 25 bp, Homo sapien
tcagtattccagatctccaaacaag

SEQ ID NO: 2924945 - DNA, 25 bp, Homo sapien
gggatatataggaaatctgtctacc

SEQ ID NO: 2924946 - DNA, 25 bp, Homo sapien
ccactttggtcggagatgttgataa

SEQ ID NO: 2924947 - DNA, 25 bp, Homo sapien
tctgtctaccttctgttcaattttg

SEQ ID NO: 2924948 - DNA, 25 bp, Homo sapien
tagtaggtattcagttcatattgga

SEQ ID NO: 2924949 - DNA, 25 bp, Homo sapien
tgctgatattgtaacaaggtttaag

SEQ ID NO: 2924950 - DNA, 25 bp, Homo sapien
ccagtcaccatgcttatgaatcaca

SEQ ID NO: 2924951 - DNA, 25 bp, Homo sapien
acaaaagcatgaaaacccagtcacc

SEQ ID NO: 2924952 - DNA, 25 bp, Homo sapien
agacaggtaatgtgctgatattgta

SEQ ID NO: 2924953 - DNA, 25 bp, Homo sapien
catccacctcagcctcccaaagtgc

SEQ ID NO: 2924954 - DNA, 25 bp, Homo sapien
atccacctcagcctcccaaagtgct

SEQ ID NO: 2924955 - DNA, 25 bp, Homo sapien
ggtgcacgctaccatgcctgactaa

SEQ ID NO: 2924956 - DNA, 25 bp, Homo sapien
acaggtgcacgctaccatgcctgac

SEQ ID NO: 2924957 - DNA, 25 bp, Homo sapien
gttacttatgcaacttcttcagcag

SEQ ID NO: 2924958 - DNA, 25 bp, Homo sapien
cttatgcaacttcttcagcaggctt

SEQ ID NO: 2924959 - DNA, 25 bp, Homo sapien
tgcaacttcttcagcaggcttgaat

SEQ ID NO: 2924960 - DNA, 25 bp, Homo sapien
ttgttacttatgcaacttcttcagc

SEQ ID NO: 2924961 - DNA, 25 bp, Homo sapien
ggctgttgacattccctactgtcat

SEQ ID NO: 2924962 - DNA, 25 bp, Homo sapien
tggctgttgacattccctactgtca

SEQ ID NO: 2924963 - DNA, 25 bp, Homo sapien
gtggctgttgacattccctactgtc

SEQ ID NO: 2924964 - DNA, 25 bp, Homo sapien
taattgagtgtcttgtacttcagcc

SEQ ID NO: 2924965 - DNA, 25 bp, Homo sapien
aattgagtgtcttgtacttcagccc

SEQ ID NO: 2924966 - DNA, 25 bp, Homo sapien
ttaattgagtgtcttgtacttcagc

SEQ ID NO: 2924967 - DNA, 25 bp, Homo sapien
gcttgctgattggagcagtgattct

SEQ ID NO: 2924968 - DNA, 25 bp, Homo sapien
tctcaggcaagtattaggataaacc

SEQ ID NO: 2924969 - DNA, 25 bp, Homo sapien
ccacgtgttagcatcttgtagtaca

SEQ ID NO: 2924970 - DNA, 25 bp, Homo sapien
tattgttccatcagacacaaataga

SEQ ID NO: 2924971 - DNA, 25 bp, Homo sapien
tacctttgccttcaaatttacaaga

SEQ ID NO: 2924972 - DNA, 25 bp, Homo sapien
tgaaggcagttcagcagaagtttgt

SEQ ID NO: 2924973 - DNA, 25 bp, Homo sapien
cactgagggatgatataaggcatta

SEQ ID NO: 2924974 - DNA, 25 bp, Homo sapien
ttagtacttgatatgaaggcagttc

SEQ ID NO: 2924975 - DNA, 25 bp, Homo sapien
tcaatccagtcttgtgtgtgggttt

SEQ ID NO: 2924976 - DNA, 25 bp, Homo sapien
ttcttagttcacttttccgtcaata

SEQ ID NO: 2924977 - DNA, 25 bp, Homo sapien
atcaatccagtcttgtgtgtgggtt

SEQ ID NO: 2924978 - DNA, 25 bp, Homo sapien
tagttcacttttccgtcaataagga

SEQ ID NO: 2924979 - DNA, 25 bp, Homo sapien
attcgtttacactccattctcttag

SEQ ID NO: 2924980 - DNA, 25 bp, Homo sapien
ccattcgtttacactccattctctt

SEQ ID NO: 2924981 - DNA, 25 bp, Homo sapien
ccccattcgtttacactccattctc

SEQ ID NO: 2924982 - DNA, 25 bp, Homo sapien
ttcgtttacactccattctcttagg

SEQ ID NO: 2924983 - DNA, 25 bp, Homo sapien
ggtcccgccgaacgccactgcgcac

SEQ ID NO: 2924984 - DNA, 25 bp, Homo sapien
tgcggctccgctttgcctcagcggg

SEQ ID NO: 2924985 - DNA, 25 bp, Homo sapien
tccgctttgcctcagcgggtcccgc

SEQ ID NO: 2924986 - DNA, 25 bp, Homo sapien
ttgcctcagcgggtcccgccgaacg

SEQ ID NO: 2924987 - DNA, 25 bp, Homo sapien
tggctttggtcacggtccagcggtc

SEQ ID NO: 2924988 - DNA, 25 bp, Homo sapien
ttggtcacggtccagcggtcaccta

SEQ ID NO: 2924989 - DNA, 25 bp, Homo sapien
ctagatggctttggtcacggtccag

SEQ ID NO: 2924990 - DNA, 25 bp, Homo sapien
cctgcgcctcggtgagtccttcctg

SEQ ID NO: 2924991 - DNA, 25 bp, Homo sapien
tgggagcgctcattgtgccccgcag

SEQ ID NO: 2924992 - DNA, 25 bp, Homo sapien
tcaagggttacgaccaggcggcggc

SEQ ID NO: 2924993 - DNA, 25 bp, Homo sapien
gaggcggtagctgacaggtggcgcc

SEQ ID NO: 2924994 - DNA, 25 bp, Homo sapien
ggcgcgcgccgaggggagaggcggt

SEQ ID NO: 2924995 - DNA, 25 bp, Homo sapien
gccgaggggagaggcggtagctgac

SEQ ID NO: 2924996 - DNA, 25 bp, Homo sapien
ccagttctgtctgcgcccagtgaga

SEQ ID NO: 2924997 - DNA, 25 bp, Homo sapien
gaagggagtaaactggtctagccca

SEQ ID NO: 2924998 - DNA, 25 bp, Homo sapien
ggaagcatgagggtaccacaaacct

SEQ ID NO: 2924999 - DNA, 25 bp, Homo sapien
ttagacaggcaatagaggaagcatg

SEQ ID NO: 2925000 - DNA, 25 bp, Homo sapien
tgtcatgatgtggaaaaaaaaggta

SEQ ID NO: 2925001 - DNA, 25 bp, Homo sapien
caagccccatgtaattagctgcctc

SEQ ID NO: 2925002 - DNA, 25 bp, Homo sapien
catgtaattagctgcctccaaatcc

SEQ ID NO: 2925003 - DNA, 25 bp, Homo sapien
ttagctgcctccaaatcccctttaa

SEQ ID NO: 2925004 - DNA, 25 bp, Homo sapien
caaggagtattctaccaccaggtca

SEQ ID NO: 2925005 - DNA, 25 bp, Homo sapien
caaaatcagggtgtgaatacccacc

SEQ ID NO: 2925006 - DNA, 25 bp, Homo sapien
aagttcttgccaagcaaagccaagg

SEQ ID NO: 2925007 - DNA, 25 bp, Homo sapien
catggtcccactggtggacagcaca

SEQ ID NO: 2925008 - DNA, 25 bp, Homo sapien
taaacatcacaaagtactccagaag

SEQ ID NO: 2925009 - DNA, 25 bp, Homo sapien
tatagaagaatattactagaccagt

SEQ ID NO: 2925010 - DNA, 25 bp, Homo sapien
tctgagttcctcttgagatgctgac

SEQ ID NO: 2925011 - DNA, 25 bp, Homo sapien
aagttatcaccaaatggtatagaag

SEQ ID NO: 2925012 - DNA, 25 bp, Homo sapien
catgaagctctttcacttcagttaa

SEQ ID NO: 2925013 - DNA, 25 bp, Homo sapien
tttcacttcagttaagttccatttc

SEQ ID NO: 2925014 - DNA, 25 bp, Homo sapien
tgaagctctttcacttcagttaagt

SEQ ID NO: 2925015 - DNA, 25 bp, Homo sapien
gctctttcacttcagttaagttcca

SEQ ID NO: 2925016 - DNA, 25 bp, Homo sapien
gaacgtctggcacactctgtaaggt

SEQ ID NO: 2925017 - DNA, 25 bp, Homo sapien
aggaacgtctggcacactctgtaag

SEQ ID NO: 2925018 - DNA, 25 bp, Homo sapien
ctcttttacaggaacgtctggcaca

SEQ ID NO: 2925019 - DNA, 25 bp, Homo sapien
tttacaggaacgtctggcacactct

SEQ ID NO: 2925020 - DNA, 25 bp, Homo sapien
taatttataaacctggcccaagcga

SEQ ID NO: 2925021 - DNA, 25 bp, Homo sapien
tgaagctgtgaaaacagtactaagt

SEQ ID NO: 2925022 - DNA, 25 bp, Homo sapien
gtttggcataaggaagtaaaatcag

SEQ ID NO: 2925023 - DNA, 25 bp, Homo sapien
ccaagcgattaaggtaaaggcaaag

SEQ ID NO: 2925024 - DNA, 25 bp, Homo sapien
gagtcctttattgaaccaggtgaaa

SEQ ID NO: 2925025 - DNA, 25 bp, Homo sapien
tgcttgggctcttgcctccattctt

SEQ ID NO: 2925026 - DNA, 25 bp, Homo sapien
attgcaatattacctgaggcttcag

SEQ ID NO: 2925027 - DNA, 25 bp, Homo sapien
cacttttgcagattttctaattgca

SEQ ID NO: 2925028 - DNA, 25 bp, Homo sapien
tctactccaggaactaaggtgggta

SEQ ID NO: 2925029 - DNA, 25 bp, Homo sapien
ttaattgggtcaaacttgcttggag

SEQ ID NO: 2925030 - DNA, 25 bp, Homo sapien
cctgggtctttgatataattaggat

SEQ ID NO: 2925031 - DNA, 25 bp, Homo sapien
gcttggagtatcagcttctgtcaaa

SEQ ID NO: 2925032 - DNA, 25 bp, Homo sapien
ctgttgcagatagtgtcaggaacat

SEQ ID NO: 2925033 - DNA, 25 bp, Homo sapien
aggaacatatatcttcaggtcttct

SEQ ID NO: 2925034 - DNA, 25 bp, Homo sapien
gttgcagatagtgtcaggaacatat

SEQ ID NO: 2925035 - DNA, 25 bp, Homo sapien
tgtgacttctttcatcaacctctgg

SEQ ID NO: 2925036 - DNA, 25 bp, Homo sapien
tagggcagaatgtacacagggaagt

SEQ ID NO: 2925037 - DNA, 25 bp, Homo sapien
cagaaaggcacataaagtttgtggc

SEQ ID NO: 2925038 - DNA, 25 bp, Homo sapien
aagtttgtggctcaaagtcctccag

SEQ ID NO: 2925039 - DNA, 25 bp, Homo sapien
gagacttgtaggagtgtgggcttgg

SEQ ID NO: 2925040 - DNA, 25 bp, Homo sapien
caccccaaaggttgtctggcagttt

SEQ ID NO: 2925041 - DNA, 25 bp, Homo sapien
ccccaaaggttgtctggcagtttgg

SEQ ID NO: 2925042 - DNA, 25 bp, Homo sapien
accccaaaggttgtctggcagtttg

SEQ ID NO: 2925043 - DNA, 25 bp, Homo sapien
cccaaaggttgtctggcagtttggt

SEQ ID NO: 2925044 - DNA, 25 bp, Homo sapien
gaatccattcatcgaattgctcctg

SEQ ID NO: 2925045 - DNA, 25 bp, Homo sapien
ggaatcattcctttagggtctagaa

SEQ ID NO: 2925046 - DNA, 25 bp, Homo sapien
cagagcctgtttccgtgtgttggcc

SEQ ID NO: 2925047 - DNA, 25 bp, Homo sapien
tgtgttggccaccttgactatgatt

SEQ ID NO: 2925048 - DNA, 25 bp, Homo sapien
ctttcacatatacccccaattttct

SEQ ID NO: 2925049 - DNA, 25 bp, Homo sapien
ttcacatatacccccaattttctta

SEQ ID NO: 2925050 - DNA, 25 bp, Homo sapien
tcacatatacccccaattttcttac

SEQ ID NO: 2925051 - DNA, 25 bp, Homo sapien
gcttgaaatctggattttgaaagaa

SEQ ID NO: 2925052 - DNA, 25 bp, Homo sapien
caagcttgaaatctggattttgaaa

SEQ ID NO: 2925053 - DNA, 25 bp, Homo sapien
gaaatctggattttgaaagaattct

SEQ ID NO: 2925054 - DNA, 25 bp, Homo sapien
gaaagaattcttgaagaacattctg

SEQ ID NO: 2925055 - DNA, 25 bp, Homo sapien
cttggttctgttgagtcagtaatat

SEQ ID NO: 2925056 - DNA, 25 bp, Homo sapien
gagtcagtaatatccagttgtttgc

SEQ ID NO: 2925057 - DNA, 25 bp, Homo sapien
ggttctgttgagtcagtaatatcca

SEQ ID NO: 2925058 - DNA, 25 bp, Homo sapien
ttttgttcaatcttggttctgttga

SEQ ID NO: 2925059 - DNA, 25 bp, Homo sapien
gaacatcagtcccttgcaaagaaat

SEQ ID NO: 2925060 - DNA, 25 bp, Homo sapien
gatgacatggagaggctaatgccac

SEQ ID NO: 2925061 - DNA, 25 bp, Homo sapien
cttccgagtgaagaaagcatgccac

SEQ ID NO: 2925062 - DNA, 25 bp, Homo sapien
taggcaagtaccactgaacatcagt

SEQ ID NO: 2925063 - DNA, 25 bp, Homo sapien
agaatgtattgggtgttttcacttg

SEQ ID NO: 2925064 - DNA, 25 bp, Homo sapien
atgtattgggtgttttcacttgccc

SEQ ID NO: 2925065 - DNA, 25 bp, Homo sapien
catagtaaagaagaatgtattgggt

SEQ ID NO: 2925066 - DNA, 25 bp, Homo sapien
tagtaaagaagaatgtattgggtgt

SEQ ID NO: 2925067 - DNA, 25 bp, Homo sapien
ggcaaaggtgcttaagaagttcctc

SEQ ID NO: 2925068 - DNA, 25 bp, Homo sapien
actcttcaagtctttaatatgtgaa

SEQ ID NO: 2925069 - DNA, 25 bp, Homo sapien
tgtaggaagagttcagcgaacatct

SEQ ID NO: 2925070 - DNA, 25 bp, Homo sapien
gacctcccgaaattcatctgcagag

SEQ ID NO: 2925071 - DNA, 25 bp, Homo sapien
gaactatggtcatagaacaattcca

SEQ ID NO: 2925072 - DNA, 25 bp, Homo sapien
gtaaactcctaagcatttgtgaact

SEQ ID NO: 2925073 - DNA, 25 bp, Homo sapien
ggtcatagaacaattccagcagggc

SEQ ID NO: 2925074 - DNA, 25 bp, Homo sapien
tatggtcatagaacaattccagcag

SEQ ID NO: 2925075 - DNA, 25 bp, Homo sapien
gactctctgagtgatccctgttctg

SEQ ID NO: 2925076 - DNA, 25 bp, Homo sapien
gggacttcaatgtactcagaggtta

SEQ ID NO: 2925077 - DNA, 25 bp, Homo sapien
tctgcttaaggttggaacttcctct

SEQ ID NO: 2925078 - DNA, 25 bp, Homo sapien
gcaatagactctctgcgtgaccctt

SEQ ID NO: 2925079 - DNA, 25 bp, Homo sapien
ggacttgggttcacagggcttgtct

SEQ ID NO: 2925080 - DNA, 25 bp, Homo sapien
ttgggacttgggttcacagggcttg

SEQ ID NO: 2925081 - DNA, 25 bp, Homo sapien
ctgaccatgactttccttctatttt

SEQ ID NO: 2925082 - DNA, 25 bp, Homo sapien
gacttgggttcacagggcttgtctt

SEQ ID NO: 2925083 - DNA, 25 bp, Homo sapien
tagattaagtttgcctgttcctcat

SEQ ID NO: 2925084 - DNA, 25 bp, Homo sapien
atagattaagtttgcctgttcctca

SEQ ID NO: 2925085 - DNA, 25 bp, Homo sapien
catagattaagtttgcctgttcctc

SEQ ID NO: 2925086 - DNA, 25 bp, Homo sapien
gattaagtttgcctgttcctcatct

SEQ ID NO: 2925087 - DNA, 25 bp, Homo sapien
tctgtttcaacatagccctccttaa

SEQ ID NO: 2925088 - DNA, 25 bp, Homo sapien
aagggagcgtcttcaccaacaaatg

SEQ ID NO: 2925089 - DNA, 25 bp, Homo sapien
caaatgtctccaggagttgcacaaa

SEQ ID NO: 2925090 - DNA, 25 bp, Homo sapien
gaatgaaactccattgaaggcagtt

SEQ ID NO: 2925091 - DNA, 25 bp, Homo sapien
tgcagctggccctaagggatatgtt

SEQ ID NO: 2925092 - DNA, 25 bp, Homo sapien
tcaggaatgtgataaatacacagac

SEQ ID NO: 2925093 - DNA, 25 bp, Homo sapien
gaatctttgaccattcttttccact

SEQ ID NO: 2925094 - DNA, 25 bp, Homo sapien
taagattgactatatttgacattaa

SEQ ID NO: 2925095 - DNA, 25 bp, Homo sapien
tatatgttcattgtgctagctagca

SEQ ID NO: 2925096 - DNA, 25 bp, Homo sapien
aacaggtttactttgaggctaagca

SEQ ID NO: 2925097 - DNA, 25 bp, Homo sapien
gtgcatccctgtaaagccagccact

SEQ ID NO: 2925098 - DNA, 25 bp, Homo sapien
agtccagcgtcttctattaaaacag

SEQ ID NO: 2925099 - DNA, 25 bp, Homo sapien
cctccttgtatgtgtacaagagttc

SEQ ID NO: 2925100 - DNA, 25 bp, Homo sapien
agccatcactgtcccacttctgaaa

SEQ ID NO: 2925101 - DNA, 25 bp, Homo sapien
tccctccttgtatgtgtacaagagt

SEQ ID NO: 2925102 - DNA, 25 bp, Homo sapien
cttgtatgtgtacaagagttcatca

SEQ ID NO: 2925103 - DNA, 25 bp, Homo sapien
ttgaagccaagttaattaccacagt

SEQ ID NO: 2925104 - DNA, 25 bp, Homo sapien
aaagattatagccagagttgggcac

SEQ ID NO: 2925105 - DNA, 25 bp, Homo sapien
tgcacaaggcttctaatattttcac

SEQ ID NO: 2925106 - DNA, 25 bp, Homo sapien
tattccacttctgactgtgttgaca

SEQ ID NO: 2925107 - DNA, 25 bp, Homo sapien
gaatagcagcgtgatgtccaccgcc

SEQ ID NO: 2925108 - DNA, 25 bp, Homo sapien
gcccggaatagcagcgtgatgtcca

SEQ ID NO: 2925109 - DNA, 25 bp, Homo sapien
ctggcccggaatagcagcgtgatgt

SEQ ID NO: 2925110 - DNA, 25 bp, Homo sapien
cggaatagcagcgtgatgtccaccg

SEQ ID NO: 2925111 - DNA, 25 bp, Homo sapien
gaagttgcccttgggccagggactc

SEQ ID NO: 2925112 - DNA, 25 bp, Homo sapien
ccggctgccatcgactctgccaccc

SEQ ID NO: 2925113 - DNA, 25 bp, Homo sapien
agaagttgcccttgggccagggact

SEQ ID NO: 2925114 - DNA, 25 bp, Homo sapien
aatcttcaatgaaatccagaacagc

SEQ ID NO: 2925115 - DNA, 25 bp, Homo sapien
cagaacagcagtcctgtgctccttc

SEQ ID NO: 2925116 - DNA, 25 bp, Homo sapien
gaacagcagtcctgtgctccttcac

SEQ ID NO: 2925117 - DNA, 25 bp, Homo sapien
atccagaacagcagtcctgtgctcc

SEQ ID NO: 2925118 - DNA, 25 bp, Homo sapien
tcttttaactcggatggctctttgt

SEQ ID NO: 2925119 - DNA, 25 bp, Homo sapien
cactcttttaactcggatggctctt

SEQ ID NO: 2925120 - DNA, 25 bp, Homo sapien
cttttaactcggatggctctttgtt

SEQ ID NO: 2925121 - DNA, 25 bp, Homo sapien
actcttttaactcggatggctcttt

SEQ ID NO: 2925122 - DNA, 25 bp, Homo sapien
gacactgtgaaactttctcagaaga

SEQ ID NO: 2925123 - DNA, 25 bp, Homo sapien
ctcttgtctttgcatttggttctgg

SEQ ID NO: 2925124 - DNA, 25 bp, Homo sapien
actttctcagaagatgtggattctc

SEQ ID NO: 2925125 - DNA, 25 bp, Homo sapien
ggttctggttccagcttagatattc

SEQ ID NO: 2925126 - DNA, 25 bp, Homo sapien
atgttcttcagtggcagggttttct

SEQ ID NO: 2925127 - DNA, 25 bp, Homo sapien
gatgttcttcagtggcagggttttc

SEQ ID NO: 2925128 - DNA, 25 bp, Homo sapien
ctggatgttcttcagtggcagggtt

SEQ ID NO: 2925129 - DNA, 25 bp, Homo sapien
cttcagtggcagggttttcttcagt

SEQ ID NO: 2925130 - DNA, 25 bp, Homo sapien
tgcaaaaccttttccgtgaatatct

SEQ ID NO: 2925131 - DNA, 25 bp, Homo sapien
caattagtcgctgattttcctgttc

SEQ ID NO: 2925132 - DNA, 25 bp, Homo sapien
gcggaagccagcgttgtttttaatg

SEQ ID NO: 2925133 - DNA, 25 bp, Homo sapien
agtctggaaatctcaaccactctcc

SEQ ID NO: 2925134 - DNA, 25 bp, Homo sapien
aggagaaggagcacatcacgaggaa

SEQ ID NO: 2925135 - DNA, 25 bp, Homo sapien
aaggagaaggagcacatcacgagga

SEQ ID NO: 2925136 - DNA, 25 bp, Homo sapien
tgtgagcgcccatgcagactctcgt

SEQ ID NO: 2925137 - DNA, 25 bp, Homo sapien
gtacatgagagtacacagcctgtga

SEQ ID NO: 2925138 - DNA, 25 bp, Homo sapien
agcgcccatgcagactctcgtgctg

SEQ ID NO: 2925139 - DNA, 25 bp, Homo sapien
agtacacagcctgtgagcgcccatg

SEQ ID NO: 2925140 - DNA, 25 bp, Homo sapien
tacataggccacttcccattggtgt

SEQ ID NO: 2925141 - DNA, 25 bp, Homo sapien
tcagctgcgaaatgggctgaacact

SEQ ID NO: 2925142 - DNA, 25 bp, Homo sapien
gctgaacactatcggcctgggtatc

SEQ ID NO: 2925143 - DNA, 25 bp, Homo sapien
gaatatgtccgtctgtctgaacccc

SEQ ID NO: 2925144 - DNA, 25 bp, Homo sapien
caggagtctgtgatgggatgatcgc

SEQ ID NO: 2925145 - DNA, 25 bp, Homo sapien
ttgctcaggagtctgtgatgggatg

SEQ ID NO: 2925146 - DNA, 25 bp, Homo sapien
ccagttgctcaggagtctgtgatgg

SEQ ID NO: 2925147 - DNA, 25 bp, Homo sapien
ctcaggagtctgtgatgggatgatc

SEQ ID NO: 2925148 - DNA, 25 bp, Homo sapien
gaagcaaattgctgatacatgtagc

SEQ ID NO: 2925149 - DNA, 25 bp, Homo sapien
ccatacataggaaaacggataaaca

SEQ ID NO: 2925150 - DNA, 25 bp, Homo sapien
aaattatgctgagtcaaccaggccc

SEQ ID NO: 2925151 - DNA, 25 bp, Homo sapien
gtagcaacatattaagactctcaag

SEQ ID NO: 2925152 - DNA, 25 bp, Homo sapien
catccaaatcgagggatggcctggc

SEQ ID NO: 2925153 - DNA, 25 bp, Homo sapien
caagcagtacaaacagggtatccgt

SEQ ID NO: 2925154 - DNA, 25 bp, Homo sapien
gggtatccgtatgagatggatgccc

SEQ ID NO: 2925155 - DNA, 25 bp, Homo sapien
ggtttaacttgggtgtcagattcca

SEQ ID NO: 2925156 - DNA, 25 bp, Homo sapien
tttccgcctggcagaattcctcaga

SEQ ID NO: 2925157 - DNA, 25 bp, Homo sapien
gaacttggtcttcattgcccctgag

SEQ ID NO: 2925158 - DNA, 25 bp, Homo sapien
taaaggtctcactatacaccggctc

SEQ ID NO: 2925159 - DNA, 25 bp, Homo sapien
gacaatctcacttcgtgaccagggt

SEQ ID NO: 2925160 - DNA, 25 bp, Homo sapien
gtgagcactgatctttttatttcca

SEQ ID NO: 2925161 - DNA, 25 bp, Homo sapien
aatgtgagcactgatctttttattt

SEQ ID NO: 2925162 - DNA, 25 bp, Homo sapien
ctttttatttccatgggcttcagca

SEQ ID NO: 2925163 - DNA, 25 bp, Homo sapien
agggaaatgtgagcactgatctttt

SEQ ID NO: 2925164 - DNA, 25 bp, Homo sapien
gtccctgtagagcactctgttcagt

SEQ ID NO: 2925165 - DNA, 25 bp, Homo sapien
ggtacaagccacattcctcaataga

SEQ ID NO: 2925166 - DNA, 25 bp, Homo sapien
tttctcaggcagtagtaggttttct

SEQ ID NO: 2925167 - DNA, 25 bp, Homo sapien
cagtacaaattgagcatcatctaag

SEQ ID NO: 2925168 - DNA, 25 bp, Homo sapien
ggaacatggattggcttcccttcat

SEQ ID NO: 2925169 - DNA, 25 bp, Homo sapien
tcatgcttattacgggactggttcc

SEQ ID NO: 2925170 - DNA, 25 bp, Homo sapien
ggatctctaagggtatcaacagcca

SEQ ID NO: 2925171 - DNA, 25 bp, Homo sapien
gatgttcccatggtactgaacttgg

SEQ ID NO: 2925172 - DNA, 25 bp, Homo sapien
gatagtcatccagtgaaatttgtgg

SEQ ID NO: 2925173 - DNA, 25 bp, Homo sapien
atgcttttgatagtcatccagtgaa

SEQ ID NO: 2925174 - DNA, 25 bp, Homo sapien
tttgatagtcatccagtgaaatttg

SEQ ID NO: 2925175 - DNA, 25 bp, Homo sapien
gcttttgatagtcatccagtgaaat

SEQ ID NO: 2925176 - DNA, 25 bp, Homo sapien
tgacgtcataaagccagcctatgcc

SEQ ID NO: 2925177 - DNA, 25 bp, Homo sapien
ctatgccagtgatcacaatatgcag

SEQ ID NO: 2925178 - DNA, 25 bp, Homo sapien
tacaaagtacgtagtgatggaggtg

SEQ ID NO: 2925179 - DNA, 25 bp, Homo sapien
caatatgcagaatgtgctcccggct

SEQ ID NO: 2925180 - DNA, 25 bp, Homo sapien
ggatttctgttagacccagctgccc

SEQ ID NO: 2925181 - DNA, 25 bp, Homo sapien
ccagctgccctgtaaccatcatgtt

SEQ ID NO: 2925182 - DNA, 25 bp, Homo sapien
aaccatcatgttgcgtaaaacatag

SEQ ID NO: 2925183 - DNA, 25 bp, Homo sapien
ctgaagatgcatgacttcctgtgga

SEQ ID NO: 2925184 - DNA, 25 bp, Homo sapien
actactatatgcgtttctccacagg

SEQ ID NO: 2925185 - DNA, 25 bp, Homo sapien
agtatttcatagcaggccacttgga

SEQ ID NO: 2925186 - DNA, 25 bp, Homo sapien
tgttaaaatcgaggactcccagagc

SEQ ID NO: 2925187 - DNA, 25 bp, Homo sapien
tcctgttctctcacgaagtggaact

SEQ ID NO: 2925188 - DNA, 25 bp, Homo sapien
ctggacttccctgacattttcaatc

SEQ ID NO: 2925189 - DNA, 25 bp, Homo sapien
tggacttccctgacattttcaatct

SEQ ID NO: 2925190 - DNA, 25 bp, Homo sapien
gctttcctgtagctcgagcagcatg

SEQ ID NO: 2925191 - DNA, 25 bp, Homo sapien
ctcgagcagcatgattcggaagaag

SEQ ID NO: 2925192 - DNA, 25 bp, Homo sapien
tggatgctttcctgtagctcgagca

SEQ ID NO: 2925193 - DNA, 25 bp, Homo sapien
ttcggaagaagagaattcctgcccg

SEQ ID NO: 2925194 - DNA, 25 bp, Homo sapien
gctgtcttgaggagaatttggctct

SEQ ID NO: 2925195 - DNA, 25 bp, Homo sapien
tatggtcatagagcaacagtgacac

SEQ ID NO: 2925196 - DNA, 25 bp, Homo sapien
gaatttggctctgttacaagagtat

SEQ ID NO: 2925197 - DNA, 25 bp, Homo sapien
ccaactccatagatttgctgtcttg

SEQ ID NO: 2925198 - DNA, 25 bp, Homo sapien
taaccgccttcaggatgtcacgcac

SEQ ID NO: 2925199 - DNA, 25 bp, Homo sapien
caagataaccgccttcaggatgtca

SEQ ID NO: 2925200 - DNA, 25 bp, Homo sapien
aagaacaagataaccgccttcagga

SEQ ID NO: 2925201 - DNA, 25 bp, Homo sapien
ttcaggatgtcacgcactagtttca

SEQ ID NO: 2925202 - DNA, 25 bp, Homo sapien
gattccataaatgctctatttcttg

SEQ ID NO: 2925203 - DNA, 25 bp, Homo sapien
catttgtacccttatgatttatgca

SEQ ID NO: 2925204 - DNA, 25 bp, Homo sapien
tgatctaggtctggttacgtgaacg

SEQ ID NO: 2925205 - DNA, 25 bp, Homo sapien
aaggagagcttttgggattccataa

SEQ ID NO: 2925206 - DNA, 25 bp, Homo sapien
aaaccaatcaatggtgttagaagtg

SEQ ID NO: 2925207 - DNA, 25 bp, Homo sapien
gcagaaatacagtgcccagttcaac

SEQ ID NO: 2925208 - DNA, 25 bp, Homo sapien
atttatgggatcaccaggaagcaga

SEQ ID NO: 2925209 - DNA, 25 bp, Homo sapien
aagagaaaatttatgggatcaccag

SEQ ID NO: 2925210 - DNA, 25 bp, Homo sapien
taagctgtacattaacttccacatg

SEQ ID NO: 2925211 - DNA, 25 bp, Homo sapien
aagctgtacattaacttccacatgc

SEQ ID NO: 2925212 - DNA, 25 bp, Homo sapien
tcaataagctgtacattaacttcca

SEQ ID NO: 2925213 - DNA, 25 bp, Homo sapien
aataagctgtacattaacttccaca

SEQ ID NO: 2925214 - DNA, 25 bp, Homo sapien
gttttattgctgttggcatagattt

SEQ ID NO: 2925215 - DNA, 25 bp, Homo sapien
gctgttggcatagatttaggctgta

SEQ ID NO: 2925216 - DNA, 25 bp, Homo sapien
taggctgtaattaagtggaaattta

SEQ ID NO: 2925217 - DNA, 25 bp, Homo sapien
aaaatcacaactgtgttttattgct

SEQ ID NO: 2925218 - DNA, 25 bp, Homo sapien
gaaatactcttttcctgaactagga

SEQ ID NO: 2925219 - DNA, 25 bp, Homo sapien
gaagccctaagaaagtatggacaca

SEQ ID NO: 2925220 - DNA, 25 bp, Homo sapien
tgagagttggcagcggaagccctaa

SEQ ID NO: 2925221 - DNA, 25 bp, Homo sapien
ggttaggagctatgctatatagtcc

SEQ ID NO: 2925222 - DNA, 25 bp, Homo sapien
catttttgtaatggagttgcaggga

SEQ ID NO: 2925223 - DNA, 25 bp, Homo sapien
tcattctaccaaggttcctgtcagg

SEQ ID NO: 2925224 - DNA, 25 bp, Homo sapien
gcacctatgagagccaccatgatgg

SEQ ID NO: 2925225 - DNA, 25 bp, Homo sapien
gagttaaggaatgagtcatgttcca

SEQ ID NO: 2925226 - DNA, 25 bp, Homo sapien
ccagtggtatagatgttcaatgaca

SEQ ID NO: 2925227 - DNA, 25 bp, Homo sapien
catataattgtcagtcttggagggc

SEQ ID NO: 2925228 - DNA, 25 bp, Homo sapien
caaatttccatacttcagttcggga

SEQ ID NO: 2925229 - DNA, 25 bp, Homo sapien
ggcaacggaggtgtaataccactat

SEQ ID NO: 2925230 - DNA, 25 bp, Homo sapien
ttggctatggctaccttagctgggt

SEQ ID NO: 2925231 - DNA, 25 bp, Homo sapien
gataaatattagcagcagaagacat

SEQ ID NO: 2925232 - DNA, 25 bp, Homo sapien
agttccacagcagatacaaagctca

SEQ ID NO: 2925233 - DNA, 25 bp, Homo sapien
ataactacccaatcaaccataacag

SEQ ID NO: 2925234 - DNA, 25 bp, Homo sapien
tctacctatagtttctgctaacttg

SEQ ID NO: 2925235 - DNA, 25 bp, Homo sapien
cttttctctacctatagtttctgct

SEQ ID NO: 2925236 - DNA, 25 bp, Homo sapien
taacttgtagcatcttgaaggcagt

SEQ ID NO: 2925237 - DNA, 25 bp, Homo sapien
cagtatgcaccaacttccttcaagg

SEQ ID NO: 2925238 - DNA, 25 bp, Homo sapien
tgtcgtcacgtaaactctcgcgcgg

SEQ ID NO: 2925239 - DNA, 25 bp, Homo sapien
ttttgtttcggagcccaccggctgc

SEQ ID NO: 2925240 - DNA, 25 bp, Homo sapien
tgggaatcggatccagtgacctctg

SEQ ID NO: 2925241 - DNA, 25 bp, Homo sapien
ttgctcccgtgtccgctgaacgtgg

SEQ ID NO: 2925242 - DNA, 25 bp, Homo sapien
gaaaatagaaaagtctcgctctctg

SEQ ID NO: 2925243 - DNA, 25 bp, Homo sapien
tcaaacttcgggcttccatccggga

SEQ ID NO: 2925244 - DNA, 25 bp, Homo sapien
gagaacaaggccctctaaggaagcc

SEQ ID NO: 2925245 - DNA, 25 bp, Homo sapien
tcaagcgcgggttaggaagcaagac

SEQ ID NO: 2925246 - DNA, 25 bp, Homo sapien
ctttttctgtggcttctcagaacaa

SEQ ID NO: 2925247 - DNA, 25 bp, Homo sapien
tttctgtggcttctcagaacaatat

SEQ ID NO: 2925248 - DNA, 25 bp, Homo sapien
ttttctgtggcttctcagaacaata

SEQ ID NO: 2925249 - DNA, 25 bp, Homo sapien
tctgtggcttctcagaacaatattc

SEQ ID NO: 2925250 - DNA, 25 bp, Homo sapien
gctttgcctcggagcatctgagaga

SEQ ID NO: 2925251 - DNA, 25 bp, Homo sapien
cacgttttggcctttaagatgcgga

SEQ ID NO: 2925252 - DNA, 25 bp, Homo sapien
cgggaggccgcatcaaaagtaagga

SEQ ID NO: 2925253 - DNA, 25 bp, Homo sapien
tgcggcaacgtataccccaatttcc

SEQ ID NO: 2925254 - DNA, 25 bp, Homo sapien
gacacgggccaaactcgaataccat

SEQ ID NO: 2925255 - DNA, 25 bp, Homo sapien
tttaagatggcgaagtgacagtaac

SEQ ID NO: 2925256 - DNA, 25 bp, Homo sapien
taagctttatgaacacgtaacagac

SEQ ID NO: 2925257 - DNA, 25 bp, Homo sapien
aagtgatcatttgtggacacgggcc

SEQ ID NO: 2925258 - DNA, 25 bp, Homo sapien
cactgatggtttttgcaaaacaggg

SEQ ID NO: 2925259 - DNA, 25 bp, Homo sapien
cagggtgcaactgctgtgttttctt

SEQ ID NO: 2925260 - DNA, 25 bp, Homo sapien
tcattcccaaacactgatggttttt

SEQ ID NO: 2925261 - DNA, 25 bp, Homo sapien
caaaacagggtgcaactgctgtgtt

SEQ ID NO: 2925262 - DNA, 25 bp, Homo sapien
gataagcatgtccaatccttctgtt

SEQ ID NO: 2925263 - DNA, 25 bp, Homo sapien
cacagtataccagggtgctttaatg

SEQ ID NO: 2925264 - DNA, 25 bp, Homo sapien
taggtaggacactaaagcaccagca

SEQ ID NO: 2925265 - DNA, 25 bp, Homo sapien
aaacaacttttgtgcttcgaaggat

SEQ ID NO: 2925266 - DNA, 25 bp, Homo sapien
gacaagctggaattaaccagactga

SEQ ID NO: 2925267 - DNA, 25 bp, Homo sapien
cccttgtccattggctttgaccgga

SEQ ID NO: 2925268 - DNA, 25 bp, Homo sapien
gaaggtaggagaacctttctctcta

SEQ ID NO: 2925269 - DNA, 25 bp, Homo sapien
tccgttcactaagaaataagctgca

SEQ ID NO: 2925270 - DNA, 25 bp, Homo sapien
aacaattcatgtgctagggctccct

SEQ ID NO: 2925271 - DNA, 25 bp, Homo sapien
tgctggaccactagagaaaaaatct

SEQ ID NO: 2925272 - DNA, 25 bp, Homo sapien
gataaattggcttcatagcagctcc

SEQ ID NO: 2925273 - DNA, 25 bp, Homo sapien
taaactaaccctggatgcaagcaca

SEQ ID NO: 2925274 - DNA, 25 bp, Homo sapien
tatactatggcttctgagtaatttt

SEQ ID NO: 2925275 - DNA, 25 bp, Homo sapien
tgagaggcgtgcttcggcctgggag

SEQ ID NO: 2925276 - DNA, 25 bp, Homo sapien
tataaatgcttaacctataaaagga

SEQ ID NO: 2925277 - DNA, 25 bp, Homo sapien
gctgccatgagttgtgactgcacaa

SEQ ID NO: 2925278 - DNA, 25 bp, Homo sapien
tttataacaaaaattcgagtgcaat

SEQ ID NO: 2925279 - DNA, 25 bp, Homo sapien
tatttggctaatatgatggcaaaaa

SEQ ID NO: 2925280 - DNA, 25 bp, Homo sapien
aatggtagctcactattgtcctaag

SEQ ID NO: 2925281 - DNA, 25 bp, Homo sapien
tcgagtgcaatttcacaaagatctt

SEQ ID NO: 2925282 - DNA, 25 bp, Homo sapien
tatctgtgcacctatagcattgtac

SEQ ID NO: 2925283 - DNA, 25 bp, Homo sapien
agcattgtacaaccctaagtattca

SEQ ID NO: 2925284 - DNA, 25 bp, Homo sapien
aaactcacactaccatgctaaaaag

SEQ ID NO: 2925285 - DNA, 25 bp, Homo sapien
tggaaactaaatacactatgggaaa

SEQ ID NO: 2925286 - DNA, 25 bp, Homo sapien
catttgaagccaggggctccagaac

SEQ ID NO: 2925287 - DNA, 25 bp, Homo sapien
atcatttgaagccaggggctccaga

SEQ ID NO: 2925288 - DNA, 25 bp, Homo sapien
aagccaggggctccagaacagcctg

SEQ ID NO: 2925289 - DNA, 25 bp, Homo sapien
tgaagccaggggctccagaacagcc

SEQ ID NO: 2925290 - DNA, 25 bp, Homo sapien
ccacatattggtcaggcgcgatggc

SEQ ID NO: 2925291 - DNA, 25 bp, Homo sapien
aaaaccaccacatattggtcaggcg

SEQ ID NO: 2925292 - DNA, 25 bp, Homo sapien
ccaccacatattggtcaggcgcgat

SEQ ID NO: 2925293 - DNA, 25 bp, Homo sapien
aaccaccacatattggtcaggcgcg

SEQ ID NO: 2925294 - DNA, 25 bp, Homo sapien
aatgaaatgtgtacatttcaaacta

SEQ ID NO: 2925295 - DNA, 25 bp, Homo sapien
gaaatgtgtacatttcaaactagga

SEQ ID NO: 2925296 - DNA, 25 bp, Homo sapien
aatgtgtacatttcaaactaggaaa

SEQ ID NO: 2925297 - DNA, 25 bp, Homo sapien
gtgtacatttcaaactaggaaaaga

SEQ ID NO: 2925298 - DNA, 25 bp, Homo sapien
gtccaatatgttagccaccagtcac

SEQ ID NO: 2925299 - DNA, 25 bp, Homo sapien
ggctaatgtgactaaggaactaatt

SEQ ID NO: 2925300 - DNA, 25 bp, Homo sapien
agtcacacgtggctatagaacacat

SEQ ID NO: 2925301 - DNA, 25 bp, Homo sapien
cttttacctgtgttgtccaatatgt

SEQ ID NO: 2925302 - DNA, 25 bp, Homo sapien
tacgggtatgtaccactacacacag

SEQ ID NO: 2925303 - DNA, 25 bp, Homo sapien
ctacgggtatgtaccactacacaca

SEQ ID NO: 2925304 - DNA, 25 bp, Homo sapien
actacgggtatgtaccactacacac

SEQ ID NO: 2925305 - DNA, 25 bp, Homo sapien
gactacgggtatgtaccactacaca

SEQ ID NO: 2925306 - DNA, 25 bp, Homo sapien
tcagcgtggccaacctgatgaagcc

SEQ ID NO: 2925307 - DNA, 25 bp, Homo sapien
atcagcgtggccaacctgatgaagc

SEQ ID NO: 2925308 - DNA, 25 bp, Homo sapien
gattaaggctgaatgtgaccaaacc

SEQ ID NO: 2925309 - DNA, 25 bp, Homo sapien
aaacaaataggttcaaatgcaaaca

SEQ ID NO: 2925310 - DNA, 25 bp, Homo sapien
gaggaccagtttgcagtgtaacaca

SEQ ID NO: 2925311 - DNA, 25 bp, Homo sapien
taaggcactttatctcgaaggaaaa

SEQ ID NO: 2925312 - DNA, 25 bp, Homo sapien
tatgaccgttgaaaaaacaagctgt

SEQ ID NO: 2925313 - DNA, 25 bp, Homo sapien
tgacgattaaatgccaaaaacctgt

SEQ ID NO: 2925314 - DNA, 25 bp, Homo sapien
tatccctagaattcaacagcatcag

SEQ ID NO: 2925315 - DNA, 25 bp, Homo sapien
ggataactctgaacctaacctgaaa

SEQ ID NO: 2925316 - DNA, 25 bp, Homo sapien
gctaggtgctatgctaagtatacta

SEQ ID NO: 2925317 - DNA, 25 bp, Homo sapien
taatctgtcagagtttacctgctgc

SEQ ID NO: 2925318 - DNA, 25 bp, Homo sapien
aatgatgtcttcaggactgactgag

SEQ ID NO: 2925319 - DNA, 25 bp, Homo sapien
caaactggatgcttcaatctaaact

SEQ ID NO: 2925320 - DNA, 25 bp, Homo sapien
gcttcttagcagcttccctctgaag

SEQ ID NO: 2925321 - DNA, 25 bp, Homo sapien
tctgaaggctttcactcacagaggt

SEQ ID NO: 2925322 - DNA, 25 bp, Homo sapien
tgcttcttagcagcttccctctgaa

SEQ ID NO: 2925323 - DNA, 25 bp, Homo sapien
ccctctgaaggctttcactcacaga

SEQ ID NO: 2925324 - DNA, 25 bp, Homo sapien
tattagctcattgtataaggctcgc

SEQ ID NO: 2925325 - DNA, 25 bp, Homo sapien
tacagaagtacttagagggaaacat

SEQ ID NO: 2925326 - DNA, 25 bp, Homo sapien
cagaaaacagagctatgcagcaatc

SEQ ID NO: 2925327 - DNA, 25 bp, Homo sapien
ggaaaccatcctattctgcccagtc

SEQ ID NO: 2925328 - DNA, 25 bp, Homo sapien
aaatccataatcacagtgggagatt

SEQ ID NO: 2925329 - DNA, 25 bp, Homo sapien
acatatgcctctcagtaacagaaca

SEQ ID NO: 2925330 - DNA, 25 bp, Homo sapien
ctttgtatatgttgggaggagagct

SEQ ID NO: 2925331 - DNA, 25 bp, Homo sapien
cacagtgggagatttaacatatgcc

SEQ ID NO: 2925332 - DNA, 25 bp, Homo sapien
ggtacagagtctacacactttgatt

SEQ ID NO: 2925333 - DNA, 25 bp, Homo sapien
tcctgaggtacagagtctacacact

SEQ ID NO: 2925334 - DNA, 25 bp, Homo sapien
ccggttgtaaattcctgaggtacag

SEQ ID NO: 2925335 - DNA, 25 bp, Homo sapien
ccaggcatgggcgtttttacttcct

SEQ ID NO: 2925336 - DNA, 25 bp, Homo sapien
tgcctgggtatgaatgctggctcta

SEQ ID NO: 2925337 - DNA, 25 bp, Homo sapien
ctccgggcaagtttgtttgtaatct

SEQ ID NO: 2925338 - DNA, 25 bp, Homo sapien
tacacttactaattactccgggcaa

SEQ ID NO: 2925339 - DNA, 25 bp, Homo sapien
tatgagccagccaatagatacaaca

SEQ ID NO: 2925340 - DNA, 25 bp, Homo sapien
agcaatttgggattattttcctcct

SEQ ID NO: 2925341 - DNA, 25 bp, Homo sapien
catacacagtagcatcttctgcaag

SEQ ID NO: 2925342 - DNA, 25 bp, Homo sapien
tctgtctttccccaaaagcaatttg

SEQ ID NO: 2925343 - DNA, 25 bp, Homo sapien
cataaatactgtcatattcatacac

SEQ ID NO: 2925344 - DNA, 25 bp, Homo sapien
aataaaatcatgataggtgcaggca

SEQ ID NO: 2925345 - DNA, 25 bp, Homo sapien
tagataattcacctggcctattagg

SEQ ID NO: 2925346 - DNA, 25 bp, Homo sapien
tcagcctgtgcttgtgaaagaacaa

SEQ ID NO: 2925347 - DNA, 25 bp, Homo sapien
gatgattcagttaccagctaggaag

SEQ ID NO: 2925348 - DNA, 25 bp, Homo sapien
tctcaactgcttttagcaagttgtg

SEQ ID NO: 2925349 - DNA, 25 bp, Homo sapien
ctgcttgatttaataggtgcctata

SEQ ID NO: 2925350 - DNA, 25 bp, Homo sapien
caactgcttgatttaataggtgcct

SEQ ID NO: 2925351 - DNA, 25 bp, Homo sapien
taataggtgcctataaaatccactg

SEQ ID NO: 2925352 - DNA, 25 bp, Homo sapien
gatttaataggtgcctataaaatcc

SEQ ID NO: 2925353 - DNA, 25 bp, Homo sapien
ttgaacttacttcattggagaagcc

SEQ ID NO: 2925354 - DNA, 25 bp, Homo sapien
gaacttacttcattggagaagcccc

SEQ ID NO: 2925355 - DNA, 25 bp, Homo sapien
cttacttcattggagaagccccttg

SEQ ID NO: 2925356 - DNA, 25 bp, Homo sapien
ttacttcattggagaagccccttga

SEQ ID NO: 2925357 - DNA, 25 bp, Homo sapien
tactttcacatcagtttgaagaatg

SEQ ID NO: 2925358 - DNA, 25 bp, Homo sapien
tctactttcacatcagtttgaagaa

SEQ ID NO: 2925359 - DNA, 25 bp, Homo sapien
ttcctctactttcacatcagtttga

SEQ ID NO: 2925360 - DNA, 25 bp, Homo sapien
cctctactttcacatcagtttgaag

SEQ ID NO: 2925361 - DNA, 25 bp, Homo sapien
tctgcagttcactctagtttcttct

SEQ ID NO: 2925362 - DNA, 25 bp, Homo sapien
gttcactctagtttcttctatttca

SEQ ID NO: 2925363 - DNA, 25 bp, Homo sapien
ttttcccttctgcagttcactctag

SEQ ID NO: 2925364 - DNA, 25 bp, Homo sapien
gcagttcactctagtttcttctatt

SEQ ID NO: 2925365 - DNA, 25 bp, Homo sapien
cctgttcatgcctcttccaatggga

SEQ ID NO: 2925366 - DNA, 25 bp, Homo sapien
caatgggaatctctatgactggcct

SEQ ID NO: 2925367 - DNA, 25 bp, Homo sapien
gatcctttcgtgtggtgcctggtac

SEQ ID NO: 2925368 - DNA, 25 bp, Homo sapien
tcttcactaggtgaccgagagtggt

SEQ ID NO: 2925369 - DNA, 25 bp, Homo sapien
cctttctcactgggtcggttctgat

SEQ ID NO: 2925370 - DNA, 25 bp, Homo sapien
tcctttctcactgggtcggttctga

SEQ ID NO: 2925371 - DNA, 25 bp, Homo sapien
ttactttcatatgctcttcctttgc

SEQ ID NO: 2925372 - DNA, 25 bp, Homo sapien
ctcctttctcactgggtcggttctg

SEQ ID NO: 2925373 - DNA, 25 bp, Homo sapien
gatttctttctgaagactgaacacc

SEQ ID NO: 2925374 - DNA, 25 bp, Homo sapien
tttctttctgaagactgaacaccta

SEQ ID NO: 2925375 - DNA, 25 bp, Homo sapien
atttgggctgctttcctttctgtct

SEQ ID NO: 2925376 - DNA, 25 bp, Homo sapien
ctttctgaagactgaacacctacct

SEQ ID NO: 2925377 - DNA, 25 bp, Homo sapien
gtgatgattcagaattagagggttt

SEQ ID NO: 2925378 - DNA, 25 bp, Homo sapien
cagtgatgattcagaattagagggt

SEQ ID NO: 2925379 - DNA, 25 bp, Homo sapien
tgatgattcagaattagagggtttc

SEQ ID NO: 2925380 - DNA, 25 bp, Homo sapien
gatgattcagaattagagggtttct

SEQ ID NO: 2925381 - DNA, 25 bp, Homo sapien
gtctttgcattaacccgcgccatct

SEQ ID NO: 2925382 - DNA, 25 bp, Homo sapien
taggtctttgcattaacccgcgcca

SEQ ID NO: 2925383 - DNA, 25 bp, Homo sapien
ctttctcaatataggtctttgcatt

SEQ ID NO: 2925384 - DNA, 25 bp, Homo sapien
atataggtctttgcattaacccgcg

SEQ ID NO: 2925385 - DNA, 25 bp, Homo sapien
tatggttttacgcagcaggttccag

SEQ ID NO: 2925386 - DNA, 25 bp, Homo sapien
tccacatccaaacatccaagctgta

SEQ ID NO: 2925387 - DNA, 25 bp, Homo sapien
aagaatgtggtattgatgagtacac

SEQ ID NO: 2925388 - DNA, 25 bp, Homo sapien
tactggtaacacactcctttatggt

SEQ ID NO: 2925389 - DNA, 25 bp, Homo sapien
taatggttgtagtggagcaaatttt

SEQ ID NO: 2925390 - DNA, 25 bp, Homo sapien
ttttcctcattatgtacctacaggg

SEQ ID NO: 2925391 - DNA, 25 bp, Homo sapien
gtacctacagggaattagcacactc

SEQ ID NO: 2925392 - DNA, 25 bp, Homo sapien
ttttttaatggttgtagtggagcaa

SEQ ID NO: 2925393 - DNA, 25 bp, Homo sapien
tttcatttaagccaactatgctgta

SEQ ID NO: 2925394 - DNA, 25 bp, Homo sapien
gcatggactaccatgctaggctttt

SEQ ID NO: 2925395 - DNA, 25 bp, Homo sapien
ggactaccatgctaggctttttgtt

SEQ ID NO: 2925396 - DNA, 25 bp, Homo sapien
taagctatttagacaagatgattca

SEQ ID NO: 2925397 - DNA, 25 bp, Homo sapien
atccaagcggctttgtaaaagtctc

SEQ ID NO: 2925398 - DNA, 25 bp, Homo sapien
ctaaggatccaagcggctttgtaaa

SEQ ID NO: 2925399 - DNA, 25 bp, Homo sapien
ctatctaaggatccaagcggctttg

SEQ ID NO: 2925400 - DNA, 25 bp, Homo sapien
ggatccaagcggctttgtaaaagtc

SEQ ID NO: 2925401 - DNA, 25 bp, Homo sapien
aaataaatgctaatgttgtcagtgc

SEQ ID NO: 2925402 - DNA, 25 bp, Homo sapien
cagttttggaacatatcactaagta

SEQ ID NO: 2925403 - DNA, 25 bp, Homo sapien
cattagagataactgttgcatccag

SEQ ID NO: 2925404 - DNA, 25 bp, Homo sapien
ggtatgccacaaatctgatcctagg

SEQ ID NO: 2925405 - DNA, 25 bp, Homo sapien
ctcaaagaggctgattgatttgccc

SEQ ID NO: 2925406 - DNA, 25 bp, Homo sapien
catctccctaaacatcactgcatag

SEQ ID NO: 2925407 - DNA, 25 bp, Homo sapien
gctgggatgaagagcctgaagctca

SEQ ID NO: 2925408 - DNA, 25 bp, Homo sapien
gatcaccagaagtctaggtgacagc

SEQ ID NO: 2925409 - DNA, 25 bp, Homo sapien
aaaggactcgttatagtgatctctg

SEQ ID NO: 2925410 - DNA, 25 bp, Homo sapien
gacaagttgctttccgtgactcggc

SEQ ID NO: 2925411 - DNA, 25 bp, Homo sapien
tactaaggtcatgaggagcacaaaa

SEQ ID NO: 2925412 - DNA, 25 bp, Homo sapien
gcatttcattaactgtaggactgga

SEQ ID NO: 2925413 - DNA, 25 bp, Homo sapien
tccttccataattcctttcatgatg

SEQ ID NO: 2925414 - DNA, 25 bp, Homo sapien
ttccataattcctttcatgatgagg

SEQ ID NO: 2925415 - DNA, 25 bp, Homo sapien
cttccataattcctttcatgatgag

SEQ ID NO: 2925416 - DNA, 25 bp, Homo sapien
agatggatgtgtgtttagcaatttc

SEQ ID NO: 2925417 - DNA, 25 bp, Homo sapien
gaagatggatgtgtgtttagcaatt

SEQ ID NO: 2925418 - DNA, 25 bp, Homo sapien
atggatgtgtgtttagcaatttccc

SEQ ID NO: 2925419 - DNA, 25 bp, Homo sapien
gatgtgtgtttagcaatttcccatt

SEQ ID NO: 2925420 - DNA, 25 bp, Homo sapien
atctttaagccgtgaccccgatggc

SEQ ID NO: 2925421 - DNA, 25 bp, Homo sapien
tcatgatttaggacagaaaggcaaa

SEQ ID NO: 2925422 - DNA, 25 bp, Homo sapien
tgaagtaaatactctaaggcagatt

SEQ ID NO: 2925423 - DNA, 25 bp, Homo sapien
tctaaggcagattttgcaaatgtgc

SEQ ID NO: 2925424 - DNA, 25 bp, Homo sapien
tcttctcttccctccgtaatgatgg

SEQ ID NO: 2925425 - DNA, 25 bp, Homo sapien
cttctcttccctccgtaatgatggg

SEQ ID NO: 2925426 - DNA, 25 bp, Homo sapien
ctcttccctccgtaatgatgggcat

SEQ ID NO: 2925427 - DNA, 25 bp, Homo sapien
tctcttccctccgtaatgatgggca

SEQ ID NO: 2925428 - DNA, 25 bp, Homo sapien
aaccccatccagcgggagcgcggag

SEQ ID NO: 2925429 - DNA, 25 bp, Homo sapien
agcgcaaccccatccagcgggagcg

SEQ ID NO: 2925430 - DNA, 25 bp, Homo sapien
ccctggcgagcgcaaccccatccag

SEQ ID NO: 2925431 - DNA, 25 bp, Homo sapien
cggcccctccctggcgagcgcaacc

SEQ ID NO: 2925432 - DNA, 25 bp, Homo sapien
tcccagccggtcagtcagataaacg

SEQ ID NO: 2925433 - DNA, 25 bp, Homo sapien
tgtccgaggtcaagagaaagcggca

SEQ ID NO: 2925434 - DNA, 25 bp, Homo sapien
taaacgcatgggtatcgagtactgc

SEQ ID NO: 2925435 - DNA, 25 bp, Homo sapien
cgagtactgctaggtcccaggaaga

SEQ ID NO: 2925436 - DNA, 25 bp, Homo sapien
gcagcccacgcaggtcacagccatt

SEQ ID NO: 2925437 - DNA, 25 bp, Homo sapien
gtcacagccattagatccttcccct

SEQ ID NO: 2925438 - DNA, 25 bp, Homo sapien
agcccacgcaggtcacagccattag

SEQ ID NO: 2925439 - DNA, 25 bp, Homo sapien
cagcccacgcaggtcacagccatta

SEQ ID NO: 2925440 - DNA, 25 bp, Homo sapien
tgagcgtggtcatatttaggacaac

SEQ ID NO: 2925441 - DNA, 25 bp, Homo sapien
tccagatgagcgtggtcatatttag

SEQ ID NO: 2925442 - DNA, 25 bp, Homo sapien
gttgagaactgttgttgatactcat

SEQ ID NO: 2925443 - DNA, 25 bp, Homo sapien
ctcatgaagccaatggcttccttct

SEQ ID NO: 2925444 - DNA, 25 bp, Homo sapien
tgtgcctctaatagcccaagaatgg

SEQ ID NO: 2925445 - DNA, 25 bp, Homo sapien
gagaaaacagacctaatgctccttg

SEQ ID NO: 2925446 - DNA, 25 bp, Homo sapien
ttttaataagacgagaggacgagcg

SEQ ID NO: 2925447 - DNA, 25 bp, Homo sapien
tgtgcacatctctgcttgagtcagg

SEQ ID NO: 2925448 - DNA, 25 bp, Homo sapien
caactattactaggatgggtacccg

SEQ ID NO: 2925449 - DNA, 25 bp, Homo sapien
tgggtacccgatgacaccacacttt

SEQ ID NO: 2925450 - DNA, 25 bp, Homo sapien
tgtatagtcctaacccactggagag

SEQ ID NO: 2925451 - DNA, 25 bp, Homo sapien
gcaggttaatcctccttatggaagg

SEQ ID NO: 2925452 - DNA, 25 bp, Homo sapien
ctccatcgaagttgctacaaaatac

SEQ ID NO: 2925453 - DNA, 25 bp, Homo sapien
tccatcgaagttgctacaaaataca

SEQ ID NO: 2925454 - DNA, 25 bp, Homo sapien
gctccatcgaagttgctacaaaata

SEQ ID NO: 2925455 - DNA, 25 bp, Homo sapien
ccatcgaagttgctacaaaatacat

SEQ ID NO: 2925456 - DNA, 25 bp, Homo sapien
ccctagggccctttcagggagtgtg

SEQ ID NO: 2925457 - DNA, 25 bp, Homo sapien
caaagtgtgatctttggttccctag

SEQ ID NO: 2925458 - DNA, 25 bp, Homo sapien
tcttgcctcaagagcagcagttctc

SEQ ID NO: 2925459 - DNA, 25 bp, Homo sapien
tcatctgcttcaagcagaacaacat

SEQ ID NO: 2925460 - DNA, 25 bp, Homo sapien
gcagatgattaaggctgtgcacgaa

SEQ ID NO: 2925461 - DNA, 25 bp, Homo sapien
tctaggcagttgttacacagtgtta

SEQ ID NO: 2925462 - DNA, 25 bp, Homo sapien
cattgcttaagacagggatcttttc

SEQ ID NO: 2925463 - DNA, 25 bp, Homo sapien
gatggtatagcccatcgcccctaag

SEQ ID NO: 2925464 - DNA, 25 bp, Homo sapien
tgtcttcctgggtaggtcatttggg

SEQ ID NO: 2925465 - DNA, 25 bp, Homo sapien
ccttgaactcaaggcaggaatcctc

SEQ ID NO: 2925466 - DNA, 25 bp, Homo sapien
ctggctggaataagaaggatagaac

SEQ ID NO: 2925467 - DNA, 25 bp, Homo sapien
cacgaggtgtcaccgggctgtacaa

SEQ ID NO: 2925468 - DNA, 25 bp, Homo sapien
tccaaataggttggtaatcatttac

SEQ ID NO: 2925469 - DNA, 25 bp, Homo sapien
taggagatacttgggtctcacaaat

SEQ ID NO: 2925470 - DNA, 25 bp, Homo sapien
aaaataccagttatgccaggtgtgg

SEQ ID NO: 2925471 - DNA, 25 bp, Homo sapien
ttttaagttgcccaggaagcatata

SEQ ID NO: 2925472 - DNA, 25 bp, Homo sapien
ggataaagaccctcacagtgaaaca

SEQ ID NO: 2925473 - DNA, 25 bp, Homo sapien
acagctctgtaagtactctaggccg

SEQ ID NO: 2925474 - DNA, 25 bp, Homo sapien
ctgtaagtactctaggccgggacca

SEQ ID NO: 2925475 - DNA, 25 bp, Homo sapien
gaaggataaagaccctcacagtgaa

SEQ ID NO: 2925476 - DNA, 25 bp, Homo sapien
gcagaggagccttctacacctgtcc

SEQ ID NO: 2925477 - DNA, 25 bp, Homo sapien
gctgaacacagtgcataacacacat

SEQ ID NO: 2925478 - DNA, 25 bp, Homo sapien
tcttaaggtatatagggattgggct

SEQ ID NO: 2925479 - DNA, 25 bp, Homo sapien
tcacttgctaactcatgaccctgtt

SEQ ID NO: 2925480 - DNA, 25 bp, Homo sapien
aggggccatgataatttctgcatca

SEQ ID NO: 2925481 - DNA, 25 bp, Homo sapien
catgataatttctgcatcattccaa

SEQ ID NO: 2925482 - DNA, 25 bp, Homo sapien
agaaacacagaagccttcacgaatt

SEQ ID NO: 2925483 - DNA, 25 bp, Homo sapien
aacacagaagccttcacgaatttgc

SEQ ID NO: 2925484 - DNA, 25 bp, Homo sapien
ccccggctccgctcccgcggctcag

SEQ ID NO: 2925485 - DNA, 25 bp, Homo sapien
accccggctccgctcccgcggctca

SEQ ID NO: 2925486 - DNA, 25 bp, Homo sapien
cccggctccgctcccgcggctcagc

SEQ ID NO: 2925487 - DNA, 25 bp, Homo sapien
cggctccgctcccgcggctcagcgc

SEQ ID NO: 2925488 - DNA, 25 bp, Homo sapien
cgcccgcgctcgtagttgtggtagt

SEQ ID NO: 2925489 - DNA, 25 bp, Homo sapien
agtcgcctccgccttcttgatgtga

SEQ ID NO: 2925490 - DNA, 25 bp, Homo sapien
gccttcttgatgtgagccgcccggg

SEQ ID NO: 2925491 - DNA, 25 bp, Homo sapien
tcctcttcgtggtagtagcggtcga

SEQ ID NO: 2925492 - DNA, 25 bp, Homo sapien
ggccgccgcctccctcagcgccgac

SEQ ID NO: 2925493 - DNA, 25 bp, Homo sapien
gcggccgccgcctccctcagcgccg

SEQ ID NO: 2925494 - DNA, 25 bp, Homo sapien
cggccgccgcctccctcagcgccga

SEQ ID NO: 2925495 - DNA, 25 bp, Homo sapien
gccggccttccaccgagcggccgat

SEQ ID NO: 2925496 - DNA, 25 bp, Homo sapien
ccggccttccaccgagcggccgatg

SEQ ID NO: 2925497 - DNA, 25 bp, Homo sapien
tcagggattagcgaccccaggccgg

SEQ ID NO: 2925498 - DNA, 25 bp, Homo sapien
ccgcgtcgccctcagggattagcga

SEQ ID NO: 2925499 - DNA, 25 bp, Homo sapien
gcccggcagcgtcaggccccgcgtc

SEQ ID NO: 2925500 - DNA, 25 bp, Homo sapien
gccggcggtgaggcgaagcacccac

SEQ ID NO: 2925501 - DNA, 25 bp, Homo sapien
tgttcctgcggatccactcgatgag

SEQ ID NO: 2925502 - DNA, 25 bp, Homo sapien
gacacggtctcgtcgccatgcatgt

SEQ ID NO: 2925503 - DNA, 25 bp, Homo sapien
tgctaaactggtcgggaaagcttcg

SEQ ID NO: 2925504 - DNA, 25 bp, Homo sapien
agctcgcgggccaagtagatcaaca

SEQ ID NO: 2925505 - DNA, 25 bp, Homo sapien
cctcagaaatcttcttttaatccag

SEQ ID NO: 2925506 - DNA, 25 bp, Homo sapien
aaagctgatgctagaaaaggggaag

SEQ ID NO: 2925507 - DNA, 25 bp, Homo sapien
ctttatcttagcagtccctcagaaa

SEQ ID NO: 2925508 - DNA, 25 bp, Homo sapien
tccagatggaatgatcagttattgc

SEQ ID NO: 2925509 - DNA, 25 bp, Homo sapien
ggttttgctatagattccagtggcc

SEQ ID NO: 2925510 - DNA, 25 bp, Homo sapien
cagtggccttatgttctggagaatc

SEQ ID NO: 2925511 - DNA, 25 bp, Homo sapien
gaagcataagcttttgccaagtatt

SEQ ID NO: 2925512 - DNA, 25 bp, Homo sapien
ggatagcttgctaccactgagccac

SEQ ID NO: 2925513 - DNA, 25 bp, Homo sapien
ttccacatcataccaatgtgcgccg

SEQ ID NO: 2925514 - DNA, 25 bp, Homo sapien
ccaatgtgcgccgtttgtgattcca

SEQ ID NO: 2925515 - DNA, 25 bp, Homo sapien
ttgaaagtctcgtcttcatctcctg

SEQ ID NO: 2925516 - DNA, 25 bp, Homo sapien
cgccgtttgtgattccatctttgaa

SEQ ID NO: 2925517 - DNA, 25 bp, Homo sapien
gtagcaaactcaatgctttgcatac

SEQ ID NO: 2925518 - DNA, 25 bp, Homo sapien
agggggaaaatgtagcaaactcaat

SEQ ID NO: 2925519 - DNA, 25 bp, Homo sapien
gggaaaatgtagcaaactcaatgct

SEQ ID NO: 2925520 - DNA, 25 bp, Homo sapien
tgtagcaaactcaatgctttgcata

SEQ ID NO: 2925521 - DNA, 25 bp, Homo sapien
taggtctcacaataacgaggctttg

SEQ ID NO: 2925522 - DNA, 25 bp, Homo sapien
tatgtggcacggcaggaactcagta

SEQ ID NO: 2925523 - DNA, 25 bp, Homo sapien
catgttgaatgaagcaaggctcacc

SEQ ID NO: 2925524 - DNA, 25 bp, Homo sapien
catgaacaagtccagagtaggtctc

SEQ ID NO: 2925525 - DNA, 25 bp, Homo sapien
tcaaactgcattacacaagaaccct

SEQ ID NO: 2925526 - DNA, 25 bp, Homo sapien
gaacctggtctttgtattctgagca

SEQ ID NO: 2925527 - DNA, 25 bp, Homo sapien
caaatcttaactaactgaacctggt

SEQ ID NO: 2925528 - DNA, 25 bp, Homo sapien
taggtggaaaatctgggccaaatca

SEQ ID NO: 2925529 - DNA, 25 bp, Homo sapien
ggtgatgctcttatggtactgttta

SEQ ID NO: 2925530 - DNA, 25 bp, Homo sapien
tcctccacagaatgctatttgaatg

SEQ ID NO: 2925531 - DNA, 25 bp, Homo sapien
tcttgaagtcctcagctcaactaat

SEQ ID NO: 2925532 - DNA, 25 bp, Homo sapien
tttccaatgactgtaatgctctaag

SEQ ID NO: 2925533 - DNA, 25 bp, Homo sapien
tcagaaggcaattaatgagttgtga

SEQ ID NO: 2925534 - DNA, 25 bp, Homo sapien
agttgtgatgtctacctttatcttc

SEQ ID NO: 2925535 - DNA, 25 bp, Homo sapien
taatgagttgtgatgtctaccttta

SEQ ID NO: 2925536 - DNA, 25 bp, Homo sapien
cagaaggcaattaatgagttgtgat

SEQ ID NO: 2925537 - DNA, 25 bp, Homo sapien
taaacaagacccagatctcatagca

SEQ ID NO: 2925538 - DNA, 25 bp, Homo sapien
tagcataagattcaaaatgtccagg

SEQ ID NO: 2925539 - DNA, 25 bp, Homo sapien
tcaaaatgtccaggatataatccaa

SEQ ID NO: 2925540 - DNA, 25 bp, Homo sapien
gacccagatctcatagcataagatt

SEQ ID NO: 2925541 - DNA, 25 bp, Homo sapien
gaatgtcgatgcgaaaatccttaat

SEQ ID NO: 2925542 - DNA, 25 bp, Homo sapien
gatgaatgtcgatgcgaaaatcctt

SEQ ID NO: 2925543 - DNA, 25 bp, Homo sapien
atgaatgtcgatgcgaaaatcctta

SEQ ID NO: 2925544 - DNA, 25 bp, Homo sapien
atgtcgatgcgaaaatccttaataa

SEQ ID NO: 2925545 - DNA, 25 bp, Homo sapien
ccaatgagatcaaatacacaacata

SEQ ID NO: 2925546 - DNA, 25 bp, Homo sapien
caatgagatcaaatacacaacatac

SEQ ID NO: 2925547 - DNA, 25 bp, Homo sapien
atgagatcaaatacacaacatacca

SEQ ID NO: 2925548 - DNA, 25 bp, Homo sapien
aaccaatgagatcaaatacacaaca

SEQ ID NO: 2925549 - DNA, 25 bp, Homo sapien
ccagagtttagagtcttggtgagga

SEQ ID NO: 2925550 - DNA, 25 bp, Homo sapien
gatcgacaagattgacacagaagag

SEQ ID NO: 2925551 - DNA, 25 bp, Homo sapien
tacattggtcacaatacaatggtcg

SEQ ID NO: 2925552 - DNA, 25 bp, Homo sapien
caacagatatacttccatccagagt

SEQ ID NO: 2925553 - DNA, 25 bp, Homo sapien
ctgtaagtcagccaaaaggagcggg

SEQ ID NO: 2925554 - DNA, 25 bp, Homo sapien
tgtatgtgaccaccagctatgaggc

SEQ ID NO: 2925555 - DNA, 25 bp, Homo sapien
agaagacagtatggtctggaaaggc

SEQ ID NO: 2925556 - DNA, 25 bp, Homo sapien
gagatattatgggtctatgccacta

SEQ ID NO: 2925557 - DNA, 25 bp, Homo sapien
gtacaaatgtggattttaagggtca

SEQ ID NO: 2925558 - DNA, 25 bp, Homo sapien
tacaaatgtggattttaagggtcat

SEQ ID NO: 2925559 - DNA, 25 bp, Homo sapien
ctcttggaaagtacaaatgtggatt

SEQ ID NO: 2925560 - DNA, 25 bp, Homo sapien
tggaaagtacaaatgtggattttaa

SEQ ID NO: 2925561 - DNA, 25 bp, Homo sapien
cttaaaagggactaagcatccatgg

SEQ ID NO: 2925562 - DNA, 25 bp, Homo sapien
tgtgtttactatacaccagacctgt

SEQ ID NO: 2925563 - DNA, 25 bp, Homo sapien
gggtggcacagctacacaaatcagg

SEQ ID NO: 2925564 - DNA, 25 bp, Homo sapien
catctgaactatagtggaggctaag

SEQ ID NO: 2925565 - DNA, 25 bp, Homo sapien
gatcaaagactcacgattgttctcc

SEQ ID NO: 2925566 - DNA, 25 bp, Homo sapien
ctcccattcctgtcgaagctgtgaa

SEQ ID NO: 2925567 - DNA, 25 bp, Homo sapien
gacagttctaatgtgatctcaaaac

SEQ ID NO: 2925568 - DNA, 25 bp, Homo sapien
tgtgaagcaggtgggtacttgcaac

SEQ ID NO: 2925569 - DNA, 25 bp, Homo sapien
cagagacggtgaatttggaaggcaa

SEQ ID NO: 2925570 - DNA, 25 bp, Homo sapien
gacaagaatccaagctcagagacgg

SEQ ID NO: 2925571 - DNA, 25 bp, Homo sapien
tctgaactcgacactagtaaggtgc

SEQ ID NO: 2925572 - DNA, 25 bp, Homo sapien
taactgctggtgtattcaattgctg

SEQ ID NO: 2925573 - DNA, 25 bp, Homo sapien
tgagatggttgcattctctaaccca

SEQ ID NO: 2925574 - DNA, 25 bp, Homo sapien
agttccaggaacaagtaatcggtag

SEQ ID NO: 2925575 - DNA, 25 bp, Homo sapien
tatgattaataccagccactgagat

SEQ ID NO: 2925576 - DNA, 25 bp, Homo sapien
caagtaatcggtagaaatcaccaaa

SEQ ID NO: 2925577 - DNA, 25 bp, Homo sapien
gctacaactatgcttcacatcccat

SEQ ID NO: 2925578 - DNA, 25 bp, Homo sapien
ggcaatgctttacacagctgaatat

SEQ ID NO: 2925579 - DNA, 25 bp, Homo sapien
tagactatgtgacaaaaaactccac

SEQ ID NO: 2925580 - DNA, 25 bp, Homo sapien
tattcggttagctttaaggcaatgc

SEQ ID NO: 2925581 - DNA, 25 bp, Homo sapien
tgactctactgattttcccaaggaa

SEQ ID NO: 2925582 - DNA, 25 bp, Homo sapien
ggttcatggacacccggattatcag

SEQ ID NO: 2925583 - DNA, 25 bp, Homo sapien
gatacagcctctgtcgtgtcaggga

SEQ ID NO: 2925584 - DNA, 25 bp, Homo sapien
gaatattaggtatagcaactgtgct

SEQ ID NO: 2925585 - DNA, 25 bp, Homo sapien
ggacttttcatacccatcaggattc

SEQ ID NO: 2925586 - DNA, 25 bp, Homo sapien
ggtgaattctagtgttatgaaccaa

SEQ ID NO: 2925587 - DNA, 25 bp, Homo sapien
tctatgaggttcaacagcagttctc

SEQ ID NO: 2925588 - DNA, 25 bp, Homo sapien
ccaatgtacttaaattctggttcac

SEQ ID NO: 2925589 - DNA, 25 bp, Homo sapien
gatctgaacaaactggtctgggaaa

SEQ ID NO: 2925590 - DNA, 25 bp, Homo sapien
aaatggataggacttcatccagctc

SEQ ID NO: 2925591 - DNA, 25 bp, Homo sapien
tcattacagcaatagtttctggttg

SEQ ID NO: 2925592 - DNA, 25 bp, Homo sapien
tgtttctgccaattacacttattga

SEQ ID NO: 2925593 - DNA, 25 bp, Homo sapien
ctccatgcaggtttgctgaaagtac

SEQ ID NO: 2925594 - DNA, 25 bp, Homo sapien
catgcactatgtggtctattatgac

SEQ ID NO: 2925595 - DNA, 25 bp, Homo sapien
cactaccactatccagttatagaac

SEQ ID NO: 2925596 - DNA, 25 bp, Homo sapien
tcacagggttgtacaaccactacca

SEQ ID NO: 2925597 - DNA, 25 bp, Homo sapien
tagtgtaaggtttcaaggatctatg

SEQ ID NO: 2925598 - DNA, 25 bp, Homo sapien
gcatcatctggtgatttactatatg

SEQ ID NO: 2925599 - DNA, 25 bp, Homo sapien
catcatcatcaaaagggtagttaac

SEQ ID NO: 2925600 - DNA, 25 bp, Homo sapien
tgatttactatatgtggcaagtcct

SEQ ID NO: 2925601 - DNA, 25 bp, Homo sapien
tcatcaaaagggtagttaaccacca

SEQ ID NO: 2925602 - DNA, 25 bp, Homo sapien
tattttttgctaatggtagggtctc

SEQ ID NO: 2925603 - DNA, 25 bp, Homo sapien
ttctgtcggtctagcaaaatccagg

SEQ ID NO: 2925604 - DNA, 25 bp, Homo sapien
aatctgtttagaatgccaactgaac

SEQ ID NO: 2925605 - DNA, 25 bp, Homo sapien
gggtctccttagtgtctatatgtga

SEQ ID NO: 2925606 - DNA, 25 bp, Homo sapien
aaattggatgtatgagttccctaac

SEQ ID NO: 2925607 - DNA, 25 bp, Homo sapien
attggatgtatgagttccctaactt

SEQ ID NO: 2925608 - DNA, 25 bp, Homo sapien
aattggatgtatgagttccctaact

SEQ ID NO: 2925609 - DNA, 25 bp, Homo sapien
tctaccttgaaacatctgggaattt

SEQ ID NO: 2925610 - DNA, 25 bp, Homo sapien
ggcacattataccaactagctccat

SEQ ID NO: 2925611 - DNA, 25 bp, Homo sapien
ttcttgcaaggtctaccttgaaaca

SEQ ID NO: 2925612 - DNA, 25 bp, Homo sapien
tattcattaggatacatattcttgc

SEQ ID NO: 2925613 - DNA, 25 bp, Homo sapien
ttgtttgtaaatagttccagtcctg

SEQ ID NO: 2925614 - DNA, 25 bp, Homo sapien
cataaactggattagtgatcttcga

SEQ ID NO: 2925615 - DNA, 25 bp, Homo sapien
gatcttcgattctgttcccaaaagt

SEQ ID NO: 2925616 - DNA, 25 bp, Homo sapien
tcacacaacctagttcaatagtcac

SEQ ID NO: 2925617 - DNA, 25 bp, Homo sapien
aatggaacaaacaggaatttaggag

SEQ ID NO: 2925618 - DNA, 25 bp, Homo sapien
ggattaagtacaaggacaccagatt

SEQ ID NO: 2925619 - DNA, 25 bp, Homo sapien
caggaatttaggagttcagagtaaa

SEQ ID NO: 2925620 - DNA, 25 bp, Homo sapien
catctaattatcttgggaggtcata

SEQ ID NO: 2925621 - DNA, 25 bp, Homo sapien
catctgtggcatctagaacaaatcc

SEQ ID NO: 2925622 - DNA, 25 bp, Homo sapien
gaacaaatcctctgacgccctgatg

SEQ ID NO: 2925623 - DNA, 25 bp, Homo sapien
tagtcactgggtgattaatctcagc

SEQ ID NO: 2925624 - DNA, 25 bp, Homo sapien
taagttcctggaaccaagagacgcc

SEQ ID NO: 2925625 - DNA, 25 bp, Homo sapien
gaacgttctagtaataatcctccag

SEQ ID NO: 2925626 - DNA, 25 bp, Homo sapien
gagccatgtttgtcctccgagcact

SEQ ID NO: 2925627 - DNA, 25 bp, Homo sapien
tataaccagccctaaacttcgcagc

SEQ ID NO: 2925628 - DNA, 25 bp, Homo sapien
tctatctgccactaaaggagagtca

SEQ ID NO: 2925629 - DNA, 25 bp, Homo sapien
gaggagcgtaacatgaggctttcca

SEQ ID NO: 2925630 - DNA, 25 bp, Homo sapien
ctttagtagttggatcactggcatc

SEQ ID NO: 2925631 - DNA, 25 bp, Homo sapien
gaatggtatcgataaagagccagag

SEQ ID NO: 2925632 - DNA, 25 bp, Homo sapien
tatgtggatagttcattacaagtcc

SEQ ID NO: 2925633 - DNA, 25 bp, Homo sapien
aattacaactattcaacatggctaa

SEQ ID NO: 2925634 - DNA, 25 bp, Homo sapien
tgcaaaataagtaaactccaactct

SEQ ID NO: 2925635 - DNA, 25 bp, Homo sapien
tattcaacatggctaatgctgattt

SEQ ID NO: 2925636 - DNA, 25 bp, Homo sapien
aaaataagtaaactccaactctctg

SEQ ID NO: 2925637 - DNA, 25 bp, Homo sapien
gatttcaagggaccaaatgtgacga

SEQ ID NO: 2925638 - DNA, 25 bp, Homo sapien
ttcttcaggctcagatacattgggc

SEQ ID NO: 2925639 - DNA, 25 bp, Homo sapien
tgccagagccaaaagcagttcagtt

SEQ ID NO: 2925640 - DNA, 25 bp, Homo sapien
ggcgcatttccatggataccagcaa

SEQ ID NO: 2925641 - DNA, 25 bp, Homo sapien
tgtgaagtctgtatccaaatctttg

SEQ ID NO: 2925642 - DNA, 25 bp, Homo sapien
tctctctcgcccatctggatttaga

SEQ ID NO: 2925643 - DNA, 25 bp, Homo sapien
gacaatcacaatcctagtcctgtca

SEQ ID NO: 2925644 - DNA, 25 bp, Homo sapien
gccacgagcatttgtttgtcctatt

SEQ ID NO: 2925645 - DNA, 25 bp, Homo sapien
agacagcctgtaccctgtaaagcca

SEQ ID NO: 2925646 - DNA, 25 bp, Homo sapien
cagctcgggctgttgcttcaatggg

SEQ ID NO: 2925647 - DNA, 25 bp, Homo sapien
gcatgacctagatgcaagacatgga

SEQ ID NO: 2925648 - DNA, 25 bp, Homo sapien
tgagcccgcgggtgcaaaaaagtca

SEQ ID NO: 2925649 - DNA, 25 bp, Homo sapien
tccataagccactatctcaagcaag

SEQ ID NO: 2925650 - DNA, 25 bp, Homo sapien
ggaaagcatagaacttcctagagac

SEQ ID NO: 2925651 - DNA, 25 bp, Homo sapien
ccaatagagccaggtgttgctgaaa

SEQ ID NO: 2925652 - DNA, 25 bp, Homo sapien
catcctccgctatgattgtgaaacc

SEQ ID NO: 2925653 - DNA, 25 bp, Homo sapien
ccagcatggaaccaccatctaaggc

SEQ ID NO: 2925654 - DNA, 25 bp, Homo sapien
gactaaagtcctgtttttgaatcaa

SEQ ID NO: 2925655 - DNA, 25 bp, Homo sapien
tgtctgtactggcttgtcataagga

SEQ ID NO: 2925656 - DNA, 25 bp, Homo sapien
tcataaggatatgtgaccagcatgg

SEQ ID NO: 2925657 - DNA, 25 bp, Homo sapien
taaagctgggctaccattagatctg

SEQ ID NO: 2925658 - DNA, 25 bp, Homo sapien
tcatagagtgtgctcaaatgctcac

SEQ ID NO: 2925659 - DNA, 25 bp, Homo sapien
tacataggagtttcatgaggcagaa

SEQ ID NO: 2925660 - DNA, 25 bp, Homo sapien
tgtaagatgcactgaaaaccaccca

SEQ ID NO: 2925661 - DNA, 25 bp, Homo sapien
tttgggcaactgggctgacccatgt

SEQ ID NO: 2925662 - DNA, 25 bp, Homo sapien
tatttgcataaagagatgccaaatg

SEQ ID NO: 2925663 - DNA, 25 bp, Homo sapien
ctgggctgacccatgtgcatggatg

SEQ ID NO: 2925664 - DNA, 25 bp, Homo sapien
cccatgtgcatggatggatgattat

SEQ ID NO: 2925665 - DNA, 25 bp, Homo sapien
gctccacgcattactcctcctggaa

SEQ ID NO: 2925666 - DNA, 25 bp, Homo sapien
cattctgctccacgcattactcctc

SEQ ID NO: 2925667 - DNA, 25 bp, Homo sapien
tctgctccacgcattactcctcctg

SEQ ID NO: 2925668 - DNA, 25 bp, Homo sapien
ccattctgctccacgcattactcct

SEQ ID NO: 2925669 - DNA, 25 bp, Homo sapien
ccattctaaccatgttctagaaagc

SEQ ID NO: 2925670 - DNA, 25 bp, Homo sapien
agcactgggtttacacatacggcat

SEQ ID NO: 2925671 - DNA, 25 bp, Homo sapien
ttacacatacggcattgtgcctggc

SEQ ID NO: 2925672 - DNA, 25 bp, Homo sapien
attgtgcctggccataactccattc

SEQ ID NO: 2925673 - DNA, 25 bp, Homo sapien
gcaagatctcggctcttcgcaatct

SEQ ID NO: 2925674 - DNA, 25 bp, Homo sapien
actcctacttcataccataaaaaat

SEQ ID NO: 2925675 - DNA, 25 bp, Homo sapien
tcctacttcataccataaaaaataa

SEQ ID NO: 2925676 - DNA, 25 bp, Homo sapien
agatctcggctcttcgcaatcttcc

SEQ ID NO: 2925677 - DNA, 25 bp, Homo sapien
aagggagtcgtgcagcactaggaaa

SEQ ID NO: 2925678 - DNA, 25 bp, Homo sapien
gcagcttgtgtatactgtgatttcc

SEQ ID NO: 2925679 - DNA, 25 bp, Homo sapien
caatggccataggtgacactataat

SEQ ID NO: 2925680 - DNA, 25 bp, Homo sapien
cagcactaggaaagtaacagcagct

SEQ ID NO: 2925681 - DNA, 25 bp, Homo sapien
ctccactaacatactaagaagagat

SEQ ID NO: 2925682 - DNA, 25 bp, Homo sapien
catactaagaagagatctcttattg

SEQ ID NO: 2925683 - DNA, 25 bp, Homo sapien
ctaacatactaagaagagatctctt

SEQ ID NO: 2925684 - DNA, 25 bp, Homo sapien
cactaacatactaagaagagatctc

SEQ ID NO: 2925685 - DNA, 25 bp, Homo sapien
tttaacaaatccatgaactcccttg

SEQ ID NO: 2925686 - DNA, 25 bp, Homo sapien
cccatcagcgatggcaataatgtta

SEQ ID NO: 2925687 - DNA, 25 bp, Homo sapien
cacctggcgctaagagtacatggaa

SEQ ID NO: 2925688 - DNA, 25 bp, Homo sapien
gaatgttgttgctggtacccatcag

SEQ ID NO: 2925689 - DNA, 25 bp, Homo sapien
gctcccttggcaaaccaaatatccg

SEQ ID NO: 2925690 - DNA, 25 bp, Homo sapien
tatccggttatctgtgtcaaagact

SEQ ID NO: 2925691 - DNA, 25 bp, Homo sapien
tagctgcatcatgatgcacaaagac

SEQ ID NO: 2925692 - DNA, 25 bp, Homo sapien
tgtcaaagactatcaccacagaact

SEQ ID NO: 2925693 - DNA, 25 bp, Homo sapien
catcgttctaggcttggaggataca

SEQ ID NO: 2925694 - DNA, 25 bp, Homo sapien
gatggccatgacatccacactagaa

SEQ ID NO: 2925695 - DNA, 25 bp, Homo sapien
gaaagcctctccgtggaggtgacgt

SEQ ID NO: 2925696 - DNA, 25 bp, Homo sapien
tgacgtttgagtatagacctgaaga

SEQ ID NO: 2925697 - DNA, 25 bp, Homo sapien
aggatcaatgccgacatagtagcac

SEQ ID NO: 2925698 - DNA, 25 bp, Homo sapien
ttaggatcaatgccgacatagtagc

SEQ ID NO: 2925699 - DNA, 25 bp, Homo sapien
tgttaggatcaatgccgacatagta

SEQ ID NO: 2925700 - DNA, 25 bp, Homo sapien
ctgttaggatcaatgccgacatagt

SEQ ID NO: 2925701 - DNA, 25 bp, Homo sapien
gtgtctattagacttgattgagcag

SEQ ID NO: 2925702 - DNA, 25 bp, Homo sapien
agtgtctgtttcatcctggaactca

SEQ ID NO: 2925703 - DNA, 25 bp, Homo sapien
tcatggcttaggagggacttcttgg

SEQ ID NO: 2925704 - DNA, 25 bp, Homo sapien
tcttggagccggtagacatcatgcg

SEQ ID NO: 2925705 - DNA, 25 bp, Homo sapien
gtaattttgcttggtacttatgctg

SEQ ID NO: 2925706 - DNA, 25 bp, Homo sapien
gcagtgttctcccaagaggaactgt

SEQ ID NO: 2925707 - DNA, 25 bp, Homo sapien
gctgggagatatgcaaaatgtgttt

SEQ ID NO: 2925708 - DNA, 25 bp, Homo sapien
gcttggtacttatgctgggagatat

SEQ ID NO: 2925709 - DNA, 25 bp, Homo sapien
tctaccagttccgatctagccttgg

SEQ ID NO: 2925710 - DNA, 25 bp, Homo sapien
tatgtgaacaagaccggtcaagcga

SEQ ID NO: 2925711 - DNA, 25 bp, Homo sapien
tagccttggaacaggtagaaagcca

SEQ ID NO: 2925712 - DNA, 25 bp, Homo sapien
ggtagtgaaatcctgcttacagcgt

SEQ ID NO: 2925713 - DNA, 25 bp, Homo sapien
cctggttgaacgacctaggaaggtg

SEQ ID NO: 2925714 - DNA, 25 bp, Homo sapien
taggtaatacaagctgggaaagtct

SEQ ID NO: 2925715 - DNA, 25 bp, Homo sapien
gaatggcttaaccttgaaccacgga

SEQ ID NO: 2925716 - DNA, 25 bp, Homo sapien
acttgctgtaatgtcccaagcaggg

SEQ ID NO: 2925717 - DNA, 25 bp, Homo sapien
ggcttacaaactgatcaccaggaca

SEQ ID NO: 2925718 - DNA, 25 bp, Homo sapien
gcccatgccttgtgagtaaagaaag

SEQ ID NO: 2925719 - DNA, 25 bp, Homo sapien
aaggaagaaggcttacaaactgatc

SEQ ID NO: 2925720 - DNA, 25 bp, Homo sapien
aagaaaggcacaactcagatttagg

SEQ ID NO: 2925721 - DNA, 25 bp, Homo sapien
gacttgggcacatcttactgaacta

SEQ ID NO: 2925722 - DNA, 25 bp, Homo sapien
caagtacatgtacacaggcagacac

SEQ ID NO: 2925723 - DNA, 25 bp, Homo sapien
cctttctggaagatgacaaagtccc

SEQ ID NO: 2925724 - DNA, 25 bp, Homo sapien
tgcaagcattcctcaactggatagg

SEQ ID NO: 2925725 - DNA, 25 bp, Homo sapien
tccttgctgtgcctaaaagtgccgg

SEQ ID NO: 2925726 - DNA, 25 bp, Homo sapien
attattctaactgggcctcacctgg

SEQ ID NO: 2925727 - DNA, 25 bp, Homo sapien
gaagcttttcatacagcagggacaa

SEQ ID NO: 2925728 - DNA, 25 bp, Homo sapien
gaaacattccataggtgataccctg

SEQ ID NO: 2925729 - DNA, 25 bp, Homo sapien
tagcagaacgaagaatcagtcacag

SEQ ID NO: 2925730 - DNA, 25 bp, Homo sapien
tcaaggattattcaaccagtagaga

SEQ ID NO: 2925731 - DNA, 25 bp, Homo sapien
gtcacagattggtccaactccaaag

SEQ ID NO: 2925732 - DNA, 25 bp, Homo sapien
cacattggaagcaagtagcagaacg

SEQ ID NO: 2925733 - DNA, 25 bp, Homo sapien
gcatcttggcataattaaaacttta

SEQ ID NO: 2925734 - DNA, 25 bp, Homo sapien
acaaatatgaagcatcttggcataa

SEQ ID NO: 2925735 - DNA, 25 bp, Homo sapien
taaaactttactgccatgctttaga

SEQ ID NO: 2925736 - DNA, 25 bp, Homo sapien
tagacaatctattgaaccacataat

SEQ ID NO: 2925737 - DNA, 25 bp, Homo sapien
taactagattactgtttatgaaaca

SEQ ID NO: 2925738 - DNA, 25 bp, Homo sapien
aaagctgaacataataactagatta

SEQ ID NO: 2925739 - DNA, 25 bp, Homo sapien
ccaaaagggttcttgattcaggtat

SEQ ID NO: 2925740 - DNA, 25 bp, Homo sapien
tgctgagaacaatcagctattataa

SEQ ID NO: 2925741 - DNA, 25 bp, Homo sapien
ggctttcaccatattacctgggctg

SEQ ID NO: 2925742 - DNA, 25 bp, Homo sapien
gctttcaccatattacctgggctgg

SEQ ID NO: 2925743 - DNA, 25 bp, Homo sapien
gatgggctttcaccatattacctgg

SEQ ID NO: 2925744 - DNA, 25 bp, Homo sapien
tgggctttcaccatattacctgggc

SEQ ID NO: 2925745 - DNA, 25 bp, Homo sapien
ggatgcgagcctccgcggacactgc

SEQ ID NO: 2925746 - DNA, 25 bp, Homo sapien
tggtgcgtgtttccgccttgagagc

SEQ ID NO: 2925747 - DNA, 25 bp, Homo sapien
cgatgcaggccggaaagtcaccatg

SEQ ID NO: 2925748 - DNA, 25 bp, Homo sapien
agtcaccatggtgcgtgtttccgcc

SEQ ID NO: 2925749 - DNA, 25 bp, Homo sapien
ccagtaactgctggtccctgccgcc

SEQ ID NO: 2925750 - DNA, 25 bp, Homo sapien
ttcccagtaactgctggtccctgcc

SEQ ID NO: 2925751 - DNA, 25 bp, Homo sapien
cccagtaactgctggtccctgccgc

SEQ ID NO: 2925752 - DNA, 25 bp, Homo sapien
tcccagtaactgctggtccctgccg

SEQ ID NO: 2925753 - DNA, 25 bp, Homo sapien
aatagtgacctcagctccaatgcgc

SEQ ID NO: 2925754 - DNA, 25 bp, Homo sapien
tggagacccaataagagacattctg

SEQ ID NO: 2925755 - DNA, 25 bp, Homo sapien
ttctacccaggcgattgagagccct

SEQ ID NO: 2925756 - DNA, 25 bp, Homo sapien
tccgacggaccggaatgcaagttcc

SEQ ID NO: 2925757 - DNA, 25 bp, Homo sapien
gaccaaatgccagttcgaatctcgg

SEQ ID NO: 2925758 - DNA, 25 bp, Homo sapien
taatcatatgcttacagcagctggc

SEQ ID NO: 2925759 - DNA, 25 bp, Homo sapien
tagtggagcatatttgcccagagac

SEQ ID NO: 2925760 - DNA, 25 bp, Homo sapien
gaatctcggcacagccacttactga

SEQ ID NO: 2925761 - DNA, 25 bp, Homo sapien
tgtcgcgtcttccatctcgggtact

SEQ ID NO: 2925762 - DNA, 25 bp, Homo sapien
ggaaactagtttcaggtcaagttca

SEQ ID NO: 2925763 - DNA, 25 bp, Homo sapien
gttcattttccagctgtcgagcctg

SEQ ID NO: 2925764 - DNA, 25 bp, Homo sapien
tactgctatgactgtaacttgtaca

SEQ ID NO: 2925765 - DNA, 25 bp, Homo sapien
aaaaacacagttaaggcataggaga

SEQ ID NO: 2925766 - DNA, 25 bp, Homo sapien
taaaaacacagttaaggcataggag

SEQ ID NO: 2925767 - DNA, 25 bp, Homo sapien
aaacacagttaaggcataggagaca

SEQ ID NO: 2925768 - DNA, 25 bp, Homo sapien
aaaacacagttaaggcataggagac

SEQ ID NO: 2925769 - DNA, 25 bp, Homo sapien
caaaacaccaaaaattcaccaatag

SEQ ID NO: 2925770 - DNA, 25 bp, Homo sapien
acaccaaaaattcaccaatagacca

SEQ ID NO: 2925771 - DNA, 25 bp, Homo sapien
caccaaaaattcaccaatagaccaa

SEQ ID NO: 2925772 - DNA, 25 bp, Homo sapien
taaatgaatgaacacgagagcaatc

SEQ ID NO: 2925773 - DNA, 25 bp, Homo sapien
tatattcatcaggacagtgtaagag

SEQ ID NO: 2925774 - DNA, 25 bp, Homo sapien
aatgcccaggcaatgactatagtct

SEQ ID NO: 2925775 - DNA, 25 bp, Homo sapien
gatgagcagctcaatacagatcaga

SEQ ID NO: 2925776 - DNA, 25 bp, Homo sapien
aagaggatccattactcaaatcagt

SEQ ID NO: 2925777 - DNA, 25 bp, Homo sapien
aagaagttcagttaaagaggatcca

SEQ ID NO: 2925778 - DNA, 25 bp, Homo sapien
cagttaaagaggatccattactcaa

SEQ ID NO: 2925779 - DNA, 25 bp, Homo sapien
gaagttcagttaaagaggatccatt

SEQ ID NO: 2925780 - DNA, 25 bp, Homo sapien
tggcttgatccatttaaaaggggtg

SEQ ID NO: 2925781 - DNA, 25 bp, Homo sapien
aacattctgtcttggcttgatccat

SEQ ID NO: 2925782 - DNA, 25 bp, Homo sapien
tgatccatttaaaaggggtgttgta

SEQ ID NO: 2925783 - DNA, 25 bp, Homo sapien
tctgtcttggcttgatccatttaaa

SEQ ID NO: 2925784 - DNA, 25 bp, Homo sapien
tgccaaaagttgttcaatctcaatc

SEQ ID NO: 2925785 - DNA, 25 bp, Homo sapien
ccttgccaaaagttgttcaatctca

SEQ ID NO: 2925786 - DNA, 25 bp, Homo sapien
caaaagttgttcaatctcaatcgcc

SEQ ID NO: 2925787 - DNA, 25 bp, Homo sapien
aaagttgttcaatctcaatcgccat

SEQ ID NO: 2925788 - DNA, 25 bp, Homo sapien
ctgcaatatgtctctatgccgctgt

SEQ ID NO: 2925789 - DNA, 25 bp, Homo sapien
gggacacctgcactgttggtatatt

SEQ ID NO: 2925790 - DNA, 25 bp, Homo sapien
ccattttatcatttacccctgtaag

SEQ ID NO: 2925791 - DNA, 25 bp, Homo sapien
tatgccgctgtaatgtatgcatcag

SEQ ID NO: 2925792 - DNA, 25 bp, Homo sapien
tcaaagctagctgaaagtacacgct

SEQ ID NO: 2925793 - DNA, 25 bp, Homo sapien
taatgaaaacatctcgagcccaata

SEQ ID NO: 2925794 - DNA, 25 bp, Homo sapien
taaaacaagtccctttagcatggca

SEQ ID NO: 2925795 - DNA, 25 bp, Homo sapien
gctagctaggtctcccatagtggaa

SEQ ID NO: 2925796 - DNA, 25 bp, Homo sapien
gaattctgcacatacaagtcctaca

SEQ ID NO: 2925797 - DNA, 25 bp, Homo sapien
gctgtttccactgggatgtcatgca

SEQ ID NO: 2925798 - DNA, 25 bp, Homo sapien
taagatctggtagaactaggaaccc

SEQ ID NO: 2925799 - DNA, 25 bp, Homo sapien
taaacaaacaacgatacaaccctgc

SEQ ID NO: 2925800 - DNA, 25 bp, Homo sapien
tagccattcgttatggtttccagta

SEQ ID NO: 2925801 - DNA, 25 bp, Homo sapien
gtgtagtaagcaaattagccattcg

SEQ ID NO: 2925802 - DNA, 25 bp, Homo sapien
ggtttccagtatcaagtcttattta

SEQ ID NO: 2925803 - DNA, 25 bp, Homo sapien
taagcaattttatatcctttgtcca

SEQ ID NO: 2925804 - DNA, 25 bp, Homo sapien
aatcaacatccagtctcaacagaag

SEQ ID NO: 2925805 - DNA, 25 bp, Homo sapien
taataaatcaacatccagtctcaac

SEQ ID NO: 2925806 - DNA, 25 bp, Homo sapien
ataaatcaacatccagtctcaacag

SEQ ID NO: 2925807 - DNA, 25 bp, Homo sapien
taaatcaacatccagtctcaacaga

SEQ ID NO: 2925808 - DNA, 25 bp, Homo sapien
tcccgtattgccataaagtttgctt

SEQ ID NO: 2925809 - DNA, 25 bp, Homo sapien
tcaatatcttttcgtactgatccca

SEQ ID NO: 2925810 - DNA, 25 bp, Homo sapien
tttggttttatggaattcatgtgta

SEQ ID NO: 2925811 - DNA, 25 bp, Homo sapien
taagattctccctttcccgtattgc

SEQ ID NO: 2925812 - DNA, 25 bp, Homo sapien
ttcaaaaatagctcagttcttctgt

SEQ ID NO: 2925813 - DNA, 25 bp, Homo sapien
tcctaggccacatctggagggactc

SEQ ID NO: 2925814 - DNA, 25 bp, Homo sapien
tacttctatgaaaacagtcacagcc

SEQ ID NO: 2925815 - DNA, 25 bp, Homo sapien
gcctgttaagtatggataaaactcc

SEQ ID NO: 2925816 - DNA, 25 bp, Homo sapien
aattgcatcttgtgaactaactcca

SEQ ID NO: 2925817 - DNA, 25 bp, Homo sapien
ggtgacattcatctatctagtccta

SEQ ID NO: 2925818 - DNA, 25 bp, Homo sapien
catgctggcatggagtaacgcgatc

SEQ ID NO: 2925819 - DNA, 25 bp, Homo sapien
gttttaatagacaatcagggtcagg

SEQ ID NO: 2925820 - DNA, 25 bp, Homo sapien
tacatgccattctggcattgacggg

SEQ ID NO: 2925821 - DNA, 25 bp, Homo sapien
gatgaaagtggaaaccagctgtaac

SEQ ID NO: 2925822 - DNA, 25 bp, Homo sapien
taatcacagcaagttaccgggagac

SEQ ID NO: 2925823 - DNA, 25 bp, Homo sapien
gaggttgtcactaaccaatcagacc

SEQ ID NO: 2925824 - DNA, 25 bp, Homo sapien
cagttaaccagagagatccttaaga

SEQ ID NO: 2925825 - DNA, 25 bp, Homo sapien
taaagtgaccaatgtaccaaacgac

SEQ ID NO: 2925826 - DNA, 25 bp, Homo sapien
ccaatttagattggctacaaagcta

SEQ ID NO: 2925827 - DNA, 25 bp, Homo sapien
agataatcagtctgtggaaatacac

SEQ ID NO: 2925828 - DNA, 25 bp, Homo sapien
tacaaagctacataccttaagtggt

SEQ ID NO: 2925829 - DNA, 25 bp, Homo sapien
tagcacattaaagagcataaacata

SEQ ID NO: 2925830 - DNA, 25 bp, Homo sapien
catcagggccacttagcacattaaa

SEQ ID NO: 2925831 - DNA, 25 bp, Homo sapien
ttggctgactgtcttcatcagggcc

SEQ ID NO: 2925832 - DNA, 25 bp, Homo sapien
tccttcttcaatataatggtttggc

SEQ ID NO: 2925833 - DNA, 25 bp, Homo sapien
gctggcctggacttcgaaataaatt

SEQ ID NO: 2925834 - DNA, 25 bp, Homo sapien
tatatataatttccatcttacgacc

SEQ ID NO: 2925835 - DNA, 25 bp, Homo sapien
taaatttaatttcattcgcatacaa

SEQ ID NO: 2925836 - DNA, 25 bp, Homo sapien
tttccatcttacgaccaggcacggt

SEQ ID NO: 2925837 - DNA, 25 bp, Homo sapien
tatgtatacagaatgtctagctttt

SEQ ID NO: 2925838 - DNA, 25 bp, Homo sapien
ctggagaaaattctggactctaatt

SEQ ID NO: 2925839 - DNA, 25 bp, Homo sapien
gtcatttatgtatacagaatgtcta

SEQ ID NO: 2925840 - DNA, 25 bp, Homo sapien
gaatttactaaatgcacatgtaaaa

SEQ ID NO: 2925841 - DNA, 25 bp, Homo sapien
ttgtctcttctatcagacgatctga

SEQ ID NO: 2925842 - DNA, 25 bp, Homo sapien
tattgtctcttctatcagacgatct

SEQ ID NO: 2925843 - DNA, 25 bp, Homo sapien
ttattgtctcttctatcagacgatc

SEQ ID NO: 2925844 - DNA, 25 bp, Homo sapien
tgtctcttctatcagacgatctgag

SEQ ID NO: 2925845 - DNA, 25 bp, Homo sapien
tggctgactcgagtttctggcctca

SEQ ID NO: 2925846 - DNA, 25 bp, Homo sapien
ctggctgactcgagtttctggcctc

SEQ ID NO: 2925847 - DNA, 25 bp, Homo sapien
gcttcctgaggaacccagacagtgg

SEQ ID NO: 2925848 - DNA, 25 bp, Homo sapien
aagactatggatctgcatacacagg

SEQ ID NO: 2925849 - DNA, 25 bp, Homo sapien
agatttttcttcaagcttgaggcaa

SEQ ID NO: 2925850 - DNA, 25 bp, Homo sapien
gaggcaaagacctagggcttccttg

SEQ ID NO: 2925851 - DNA, 25 bp, Homo sapien
agggtccatctgaggccccaagttc

SEQ ID NO: 2925852 - DNA, 25 bp, Homo sapien
aggccccaagttcccttgagatctc

SEQ ID NO: 2925853 - DNA, 25 bp, Homo sapien
tccatttcctccatggagtagcaca

SEQ ID NO: 2925854 - DNA, 25 bp, Homo sapien
tggagtagcacaagaataaaagcag

SEQ ID NO: 2925855 - DNA, 25 bp, Homo sapien
gtgagagtataaattcctgacttga

SEQ ID NO: 2925856 - DNA, 25 bp, Homo sapien
agatgatggtgagagtataaattcc

SEQ ID NO: 2925857 - DNA, 25 bp, Homo sapien
gatggtgagagtataaattcctgac

SEQ ID NO: 2925858 - DNA, 25 bp, Homo sapien
gatgatggtgagagtataaattcct

SEQ ID NO: 2925859 - DNA, 25 bp, Homo sapien
gaaccatcatgcctttaaaagtgaa

SEQ ID NO: 2925860 - DNA, 25 bp, Homo sapien
agaaaactacagtgagcaacatcat

SEQ ID NO: 2925861 - DNA, 25 bp, Homo sapien
caccatttaagattatcctgcctgg

SEQ ID NO: 2925862 - DNA, 25 bp, Homo sapien
actgcgctttttccaaatgactcca

SEQ ID NO: 2925863 - DNA, 25 bp, Homo sapien
cattcctctctgtgaagtcatattt

SEQ ID NO: 2925864 - DNA, 25 bp, Homo sapien
tcctctctgtgaagtcatattttct

SEQ ID NO: 2925865 - DNA, 25 bp, Homo sapien
caacattcctctctgtgaagtcata

SEQ ID NO: 2925866 - DNA, 25 bp, Homo sapien
ttcaacattcctctctgtgaagtca

SEQ ID NO: 2925867 - DNA, 25 bp, Homo sapien
ggccaaagtgttcattttgctgtga

SEQ ID NO: 2925868 - DNA, 25 bp, Homo sapien
agtgttcattttgctgtgaattgac

SEQ ID NO: 2925869 - DNA, 25 bp, Homo sapien
caaagtgttcattttgctgtgaatt

SEQ ID NO: 2925870 - DNA, 25 bp, Homo sapien
tggccaaagtgttcattttgctgtg

SEQ ID NO: 2925871 - DNA, 25 bp, Homo sapien
gcctctctggcgaaaagtcgtagga

SEQ ID NO: 2925872 - DNA, 25 bp, Homo sapien
gaatctttagcagatgcagttgccc

SEQ ID NO: 2925873 - DNA, 25 bp, Homo sapien
cagttcccaagcactgagggcttac

SEQ ID NO: 2925874 - DNA, 25 bp, Homo sapien
gggcttactgccaggcttcaggtca

SEQ ID NO: 2925875 - DNA, 25 bp, Homo sapien
tcaatggaacgcatacagcagcaac

SEQ ID NO: 2925876 - DNA, 25 bp, Homo sapien
ctaggatgagcgagtcccgccgctt

SEQ ID NO: 2925877 - DNA, 25 bp, Homo sapien
caataacaccccctaggatgagcga

SEQ ID NO: 2925878 - DNA, 25 bp, Homo sapien
caacaggatggtacagatcccaata

SEQ ID NO: 2925879 - DNA, 25 bp, Homo sapien
gaccatgtcacagagtccatcactg

SEQ ID NO: 2925880 - DNA, 25 bp, Homo sapien
gacctggcttgtcattaggcttcaa

SEQ ID NO: 2925881 - DNA, 25 bp, Homo sapien
tggctgtcaagagtccctgaagatg

SEQ ID NO: 2925882 - DNA, 25 bp, Homo sapien
cctcctagggagacaaaagcaactg

SEQ ID NO: 2925883 - DNA, 25 bp, Homo sapien
gagcaagttcgcctgaataacagca

SEQ ID NO: 2925884 - DNA, 25 bp, Homo sapien
cacattagaaattgagcagtcccct

SEQ ID NO: 2925885 - DNA, 25 bp, Homo sapien
tattgcctgtggctcggactgaagc

SEQ ID NO: 2925886 - DNA, 25 bp, Homo sapien
gtctctgtaccaaaccaggtgttag

SEQ ID NO: 2925887 - DNA, 25 bp, Homo sapien
catcaacagggtttgcttggctgca

SEQ ID NO: 2925888 - DNA, 25 bp, Homo sapien
caccttagtataggctgcagcacgg

SEQ ID NO: 2925889 - DNA, 25 bp, Homo sapien
tagctgtctacatgtggccctgggt

SEQ ID NO: 2925890 - DNA, 25 bp, Homo sapien
gaaagagctcaaatcccttcatggg

SEQ ID NO: 2925891 - DNA, 25 bp, Homo sapien
tgttcgagaatgtccagagcagcac

SEQ ID NO: 2925892 - DNA, 25 bp, Homo sapien
cacacattactggtaggcacgggca

SEQ ID NO: 2925893 - DNA, 25 bp, Homo sapien
tacttatagagcgtggttctccacc

SEQ ID NO: 2925894 - DNA, 25 bp, Homo sapien
gtgtgtcccaaaacccatgttcgag

SEQ ID NO: 2925895 - DNA, 25 bp, Homo sapien
tttggatcacattggctggaattcc

SEQ ID NO: 2925896 - DNA, 25 bp, Homo sapien
ccatcttcagcatgacgagggctgc

SEQ ID NO: 2925897 - DNA, 25 bp, Homo sapien
tgcagcctggtactgcttccctctt

SEQ ID NO: 2925898 - DNA, 25 bp, Homo sapien
tcagcatgacgagggctgcagcctg

SEQ ID NO: 2925899 - DNA, 25 bp, Homo sapien
gacttcagctacgagatgagtgttc

SEQ ID NO: 2925900 - DNA, 25 bp, Homo sapien
cttcagctacgagatgagtgttcag

SEQ ID NO: 2925901 - DNA, 25 bp, Homo sapien
gcaatgacttcagctacgagatgag

SEQ ID NO: 2925902 - DNA, 25 bp, Homo sapien
aatgacttcagctacgagatgagtg

SEQ ID NO: 2925903 - DNA, 25 bp, Homo sapien
ggttgttgctttgggacacggagag

SEQ ID NO: 2925904 - DNA, 25 bp, Homo sapien
ggacacggagagtggtggagcttgt

SEQ ID NO: 2925905 - DNA, 25 bp, Homo sapien
ctgttgggttgttgctttgggacac

SEQ ID NO: 2925906 - DNA, 25 bp, Homo sapien
taggcagctgttgggttgttgcttt

SEQ ID NO: 2925907 - DNA, 25 bp, Homo sapien
gaacctggaaaactccatggaaaga

SEQ ID NO: 2925908 - DNA, 25 bp, Homo sapien
ggtagatacccaggataagcaacta

SEQ ID NO: 2925909 - DNA, 25 bp, Homo sapien
ataacaacaacatggagtgagttgg

SEQ ID NO: 2925910 - DNA, 25 bp, Homo sapien
aaagatggtgaatgtcatagaaaac

SEQ ID NO: 2925911 - DNA, 25 bp, Homo sapien
ttgattttttatatacctcctccat

SEQ ID NO: 2925912 - DNA, 25 bp, Homo sapien
tttgattttttatatacctcctcca

SEQ ID NO: 2925913 - DNA, 25 bp, Homo sapien
taagaatcagccccttaacgtttga

SEQ ID NO: 2925914 - DNA, 25 bp, Homo sapien
agaatcagccccttaacgtttgatt

SEQ ID NO: 2925915 - DNA, 25 bp, Homo sapien
agagatgacaggtcttgagggatgg

SEQ ID NO: 2925916 - DNA, 25 bp, Homo sapien
gagagatgacaggtcttgagggatg

SEQ ID NO: 2925917 - DNA, 25 bp, Homo sapien
gagatgacaggtcttgagggatggg

SEQ ID NO: 2925918 - DNA, 25 bp, Homo sapien
agagagatgacaggtcttgagggat

SEQ ID NO: 2925919 - DNA, 25 bp, Homo sapien
ggtccaccctcaccgtgtcatccct

SEQ ID NO: 2925920 - DNA, 25 bp, Homo sapien
gcagctcagggtccaccctcaccgt

SEQ ID NO: 2925921 - DNA, 25 bp, Homo sapien
tcagggtccaccctcaccgtgtcat

SEQ ID NO: 2925922 - DNA, 25 bp, Homo sapien
agctcagggtccaccctcaccgtgt

SEQ ID NO: 2925923 - DNA, 25 bp, Homo sapien
cggtcctgggcctggcacagcccca

SEQ ID NO: 2925924 - DNA, 25 bp, Homo sapien
ctcggtcctgggcctggcacagccc

SEQ ID NO: 2925925 - DNA, 25 bp, Homo sapien
ggtcctgggcctggcacagccccac

SEQ ID NO: 2925926 - DNA, 25 bp, Homo sapien
tcggtcctgggcctggcacagcccc

SEQ ID NO: 2925927 - DNA, 25 bp, Homo sapien
gtcctcaggtctctagaagtgtcct

SEQ ID NO: 2925928 - DNA, 25 bp, Homo sapien
ggacagtcctcaggtctctagaagt

SEQ ID NO: 2925929 - DNA, 25 bp, Homo sapien
ggtagggttgatggccagggtctcc

SEQ ID NO: 2925930 - DNA, 25 bp, Homo sapien
cagtcctcaggtctctagaagtgtc

SEQ ID NO: 2925931 - DNA, 25 bp, Homo sapien
cagtattgagatggcctctagagct

SEQ ID NO: 2925932 - DNA, 25 bp, Homo sapien
cttgcactgctgcgagggtgcagca

SEQ ID NO: 2925933 - DNA, 25 bp, Homo sapien
ccaagcgtcagggcattgagttcag

SEQ ID NO: 2925934 - DNA, 25 bp, Homo sapien
ttggagccaaagcatatacagtatt

SEQ ID NO: 2925935 - DNA, 25 bp, Homo sapien
atggcgaggaaacggcagagctgag

SEQ ID NO: 2925936 - DNA, 25 bp, Homo sapien
ggaaacggcagagctgagctcgaga

SEQ ID NO: 2925937 - DNA, 25 bp, Homo sapien
gaggaaacggcagagctgagctcga

SEQ ID NO: 2925938 - DNA, 25 bp, Homo sapien
gcgaggaaacggcagagctgagctc

SEQ ID NO: 2925939 - DNA, 25 bp, Homo sapien
cataggattgccagacatcagggag

SEQ ID NO: 2925940 - DNA, 25 bp, Homo sapien
tcctcactgagcacgggccattagg

SEQ ID NO: 2925941 - DNA, 25 bp, Homo sapien
cttgtcgcatcttgtttggtggtgg

SEQ ID NO: 2925942 - DNA, 25 bp, Homo sapien
gtgacctcatcactgtgggccttgt

SEQ ID NO: 2925943 - DNA, 25 bp, Homo sapien
gtccacctgccgccagctcagaagc

SEQ ID NO: 2925944 - DNA, 25 bp, Homo sapien
tccacctgccgccagctcagaagcc

SEQ ID NO: 2925945 - DNA, 25 bp, Homo sapien
cacctgccgccagctcagaagccac

SEQ ID NO: 2925946 - DNA, 25 bp, Homo sapien
acgtccacctgccgccagctcagaa

SEQ ID NO: 2925947 - DNA, 25 bp, Homo sapien
gaccagaatatttgatctcagatag

SEQ ID NO: 2925948 - DNA, 25 bp, Homo sapien
tatgttctctatgtagctgggcttc

SEQ ID NO: 2925949 - DNA, 25 bp, Homo sapien
gcttcagatagtcatagggaaggtc

SEQ ID NO: 2925950 - DNA, 25 bp, Homo sapien
tagtttctcatttcgggccacaatt

SEQ ID NO: 2925951 - DNA, 25 bp, Homo sapien
taagacatctgggtaagcagacagt

SEQ ID NO: 2925952 - DNA, 25 bp, Homo sapien
agacagtagagtggcacccaggaag

SEQ ID NO: 2925953 - DNA, 25 bp, Homo sapien
gggctcatccctgttgtctgttcca

SEQ ID NO: 2925954 - DNA, 25 bp, Homo sapien
tgttccatcttggtaaagccaggtt

SEQ ID NO: 2925955 - DNA, 25 bp, Homo sapien
gggtcatccctaggccgcgtcactg

SEQ ID NO: 2925956 - DNA, 25 bp, Homo sapien
cttctaaatggagagcattttgcca

SEQ ID NO: 2925957 - DNA, 25 bp, Homo sapien
ctaaatggagagcattttgccaaac

SEQ ID NO: 2925958 - DNA, 25 bp, Homo sapien
aagcctggggtcatccctaggccgc

SEQ ID NO: 2925959 - DNA, 25 bp, Homo sapien
gagccactcacagataccactgtct

SEQ ID NO: 2925960 - DNA, 25 bp, Homo sapien
agataccactgtctgtgtgtagctg

SEQ ID NO: 2925961 - DNA, 25 bp, Homo sapien
tctgaagaatcagctggcctgggtc

SEQ ID NO: 2925962 - DNA, 25 bp, Homo sapien
acctttgagtccacagagccactca

SEQ ID NO: 2925963 - DNA, 25 bp, Homo sapien
cccgtagccactgtccccaagtcag

SEQ ID NO: 2925964 - DNA, 25 bp, Homo sapien
ccgtagccactgtccccaagtcagc

SEQ ID NO: 2925965 - DNA, 25 bp, Homo sapien
tctctgggatgctcgggaccacaga

SEQ ID NO: 2925966 - DNA, 25 bp, Homo sapien
agaggtctctgggatgctcgggacc

SEQ ID NO: 2925967 - DNA, 25 bp, Homo sapien
gaccagaggtctctgggatgctcgg

SEQ ID NO: 2925968 - DNA, 25 bp, Homo sapien
ggtctctgggatgctcgggaccaca

SEQ ID NO: 2925969 - DNA, 25 bp, Homo sapien
catacacctgccccggcagtttcaa

SEQ ID NO: 2925970 - DNA, 25 bp, Homo sapien
acctgccccggcagtttcaatggtg

SEQ ID NO: 2925971 - DNA, 25 bp, Homo sapien
tacacctgccccggcagtttcaatg

SEQ ID NO: 2925972 - DNA, 25 bp, Homo sapien
cacctgccccggcagtttcaatggt

SEQ ID NO: 2925973 - DNA, 25 bp, Homo sapien
caatgtttccgtagattccaacagg

SEQ ID NO: 2925974 - DNA, 25 bp, Homo sapien
tcccaaagcgatcaatgtttccgta

SEQ ID NO: 2925975 - DNA, 25 bp, Homo sapien
cgatcaatgtttccgtagattccaa

SEQ ID NO: 2925976 - DNA, 25 bp, Homo sapien
caaagcgatcaatgtttccgtagat

SEQ ID NO: 2925977 - DNA, 25 bp, Homo sapien
ggtcagggagtcgacctccagaaag

SEQ ID NO: 2925978 - DNA, 25 bp, Homo sapien
agggagtcgacctccagaaaggact

SEQ ID NO: 2925979 - DNA, 25 bp, Homo sapien
ggagccatccgggtcagggagtcga

SEQ ID NO: 2925980 - DNA, 25 bp, Homo sapien
tcagggagtcgacctccagaaagga

SEQ ID NO: 2925981 - DNA, 25 bp, Homo sapien
gggagctgacagggggcagcctctt

SEQ ID NO: 2925982 - DNA, 25 bp, Homo sapien
gagctgacagggggcagcctcttct

SEQ ID NO: 2925983 - DNA, 25 bp, Homo sapien
ctctgcctcccgggagctgacaggg

SEQ ID NO: 2925984 - DNA, 25 bp, Homo sapien
gctgacagggggcagcctcttctca

SEQ ID NO: 2925985 - DNA, 25 bp, Homo sapien
agctaccaggcttcccggagccgtc

SEQ ID NO: 2925986 - DNA, 25 bp, Homo sapien
gagctaccaggcttcccggagccgt

SEQ ID NO: 2925987 - DNA, 25 bp, Homo sapien
gctaccaggcttcccggagccgtcc

SEQ ID NO: 2925988 - DNA, 25 bp, Homo sapien
ttgctcttgcgtctcatctcctgct

SEQ ID NO: 2925989 - DNA, 25 bp, Homo sapien
tgctgttctgatatgtctcccattt

SEQ ID NO: 2925990 - DNA, 25 bp, Homo sapien
attttcccagcattgccatccactt

SEQ ID NO: 2925991 - DNA, 25 bp, Homo sapien
cattgccatccacttgctcttgcgt

SEQ ID NO: 2925992 - DNA, 25 bp, Homo sapien
ctgaccacacctcggcccggacgtt

SEQ ID NO: 2925993 - DNA, 25 bp, Homo sapien
cggcccggacgttcatgggaatgcc

SEQ ID NO: 2925994 - DNA, 25 bp, Homo sapien
tgcccttatacactcgcttcatcag

SEQ ID NO: 2925995 - DNA, 25 bp, Homo sapien
cacctcggcccggacgttcatggga

SEQ ID NO: 2925996 - DNA, 25 bp, Homo sapien
gccgctgacacggcctggcctgttt

SEQ ID NO: 2925997 - DNA, 25 bp, Homo sapien
ccgctgacacggcctggcctgtttg

SEQ ID NO: 2925998 - DNA, 25 bp, Homo sapien
cgctgacacggcctggcctgtttgt

SEQ ID NO: 2925999 - DNA, 25 bp, Homo sapien
ggggcttgacgttccctccagctgg

SEQ ID NO: 2926000 - DNA, 25 bp, Homo sapien
gggcttgacgttccctccagctgga

SEQ ID NO: 2926001 - DNA, 25 bp, Homo sapien
aagcggggcttgacgttccctccag

SEQ ID NO: 2926002 - DNA, 25 bp, Homo sapien
gcggggcttgacgttccctccagct

SEQ ID NO: 2926003 - DNA, 25 bp, Homo sapien
ccctgaagaacatgtggttccttag

SEQ ID NO: 2926004 - DNA, 25 bp, Homo sapien
gaacatgtggttccttagtgtctgg

SEQ ID NO: 2926005 - DNA, 25 bp, Homo sapien
acagccaggtcgatctggtggatgt

SEQ ID NO: 2926006 - DNA, 25 bp, Homo sapien
cttagtgtctggctcacagccaggt

SEQ ID NO: 2926007 - DNA, 25 bp, Homo sapien
caccagataagcagtgagctcttca

SEQ ID NO: 2926008 - DNA, 25 bp, Homo sapien
tcatcctccaagtctccagggtggc

SEQ ID NO: 2926009 - DNA, 25 bp, Homo sapien
tcagtttgcacacacgccaattcag

SEQ ID NO: 2926010 - DNA, 25 bp, Homo sapien
caaatagcccagttgtacagtgact

SEQ ID NO: 2926011 - DNA, 25 bp, Homo sapien
tatgccaggaggatgtagaatagtt

SEQ ID NO: 2926012 - DNA, 25 bp, Homo sapien
tgggttatacttcgaatatgccagg

SEQ ID NO: 2926013 - DNA, 25 bp, Homo sapien
aggaggatgtagaatagttcctgct

SEQ ID NO: 2926014 - DNA, 25 bp, Homo sapien
gccaggaggatgtagaatagttcct

SEQ ID NO: 2926015 - DNA, 25 bp, Homo sapien
tccgataagtggtggtcaggcccag

SEQ ID NO: 2926016 - DNA, 25 bp, Homo sapien
cctggtgggtcacaaatactaactt

SEQ ID NO: 2926017 - DNA, 25 bp, Homo sapien
catgacaagagccatatccatcggg

SEQ ID NO: 2926018 - DNA, 25 bp, Homo sapien
gaatatggaaatacggcctgggaac

SEQ ID NO: 2926019 - DNA, 25 bp, Homo sapien
tcaggtccctgcagtagcccaccac

SEQ ID NO: 2926020 - DNA, 25 bp, Homo sapien
cagataaaggaggaacaaggcagcg

SEQ ID NO: 2926021 - DNA, 25 bp, Homo sapien
gtgtcctcctcaggcagataaagga

SEQ ID NO: 2926022 - DNA, 25 bp, Homo sapien
tgcccagaatgtgtcctcctcaggc

SEQ ID NO: 2926023 - DNA, 25 bp, Homo sapien
gcagataaaggaggaacaaggcagc

SEQ ID NO: 2926024 - DNA, 25 bp, Homo sapien
gcctctcactggccagcagctgcac

SEQ ID NO: 2926025 - DNA, 25 bp, Homo sapien
caggagtgcctctcactggccagca

SEQ ID NO: 2926026 - DNA, 25 bp, Homo sapien
aggagtgcctctcactggccagcag

SEQ ID NO: 2926027 - DNA, 25 bp, Homo sapien
agtgcctctcactggccagcagctg

SEQ ID NO: 2926028 - DNA, 25 bp, Homo sapien
gccatccccgggtctggctgcgtga

SEQ ID NO: 2926029 - DNA, 25 bp, Homo sapien
ccgggtctggctgcgtgaagcccca

SEQ ID NO: 2926030 - DNA, 25 bp, Homo sapien
tggccatccccgggtctggctgcgt

SEQ ID NO: 2926031 - DNA, 25 bp, Homo sapien
atccccgggtctggctgcgtgaagc

SEQ ID NO: 2926032 - DNA, 25 bp, Homo sapien
ctggcgacacaaggaaggtgccttg

SEQ ID NO: 2926033 - DNA, 25 bp, Homo sapien
tggcgacacaaggaaggtgccttgg

SEQ ID NO: 2926034 - DNA, 25 bp, Homo sapien
agacgtcctaaaggctcccaacaag

SEQ ID NO: 2926035 - DNA, 25 bp, Homo sapien
gaccgtcagcagagacgtcctaaag

SEQ ID NO: 2926036 - DNA, 25 bp, Homo sapien
tcagcagagacgtcctaaaggctcc

SEQ ID NO: 2926037 - DNA, 25 bp, Homo sapien
tgggaccgtcagcagagacgtccta

SEQ ID NO: 2926038 - DNA, 25 bp, Homo sapien
aggatgagatgccttctgctgatgg

SEQ ID NO: 2926039 - DNA, 25 bp, Homo sapien
ctgatggggatgaaaggcgtctgac

SEQ ID NO: 2926040 - DNA, 25 bp, Homo sapien
gagcctgagcaactgaagggcagga

SEQ ID NO: 2926041 - DNA, 25 bp, Homo sapien
ctgcacagaatcagagccggagggc

SEQ ID NO: 2926042 - DNA, 25 bp, Homo sapien
gtgggtgctgggctttgtggtcgtc

SEQ ID NO: 2926043 - DNA, 25 bp, Homo sapien
tgactttgaggccacgacagggggc

SEQ ID NO: 2926044 - DNA, 25 bp, Homo sapien
agagccttcccccaagatgtggagc

SEQ ID NO: 2926045 - DNA, 25 bp, Homo sapien
gctttgtggtcgtctcctggaagtg

SEQ ID NO: 2926046 - DNA, 25 bp, Homo sapien
tcttgggttgtgatgtgggtaccac

SEQ ID NO: 2926047 - DNA, 25 bp, Homo sapien
tgtgggtaccacatgctcctgatgg

SEQ ID NO: 2926048 - DNA, 25 bp, Homo sapien
tgatgtgggtaccacatgctcctga

SEQ ID NO: 2926049 - DNA, 25 bp, Homo sapien
cttgggttgtgatgtgggtaccaca

SEQ ID NO: 2926050 - DNA, 25 bp, Homo sapien
tcagcctgtcaccagccccatgagg

SEQ ID NO: 2926051 - DNA, 25 bp, Homo sapien
gtcaccagccccatgaggggctgca

SEQ ID NO: 2926052 - DNA, 25 bp, Homo sapien
ctgcagcccccgctgttcctccagc

SEQ ID NO: 2926053 - DNA, 25 bp, Homo sapien
tccagccccccaggatgcagggcct

SEQ ID NO: 2926054 - DNA, 25 bp, Homo sapien
aaccctgtgtgcatagaccttcctt

SEQ ID NO: 2926055 - DNA, 25 bp, Homo sapien
catcattcagcacccggagaagcca

SEQ ID NO: 2926056 - DNA, 25 bp, Homo sapien
ctgaatgaggaaccctgtgtgcata

SEQ ID NO: 2926057 - DNA, 25 bp, Homo sapien
cccggagaagccagctgaatgagga

SEQ ID NO: 2926058 - DNA, 25 bp, Homo sapien
aaaggcaatgcttgttatcagcatc

SEQ ID NO: 2926059 - DNA, 25 bp, Homo sapien
gcaaatacatatcccacaggcacgg

SEQ ID NO: 2926060 - DNA, 25 bp, Homo sapien
agcaaatacatatcccacaggcacg

SEQ ID NO: 2926061 - DNA, 25 bp, Homo sapien
tcctttgaaccttaaaggcaatgct

SEQ ID NO: 2926062 - DNA, 25 bp, Homo sapien
actggttttgaaaacgtgcccacag

SEQ ID NO: 2926063 - DNA, 25 bp, Homo sapien
tggttttgaaaacgtgcccacaggc

SEQ ID NO: 2926064 - DNA, 25 bp, Homo sapien
ctggttttgaaaacgtgcccacagg

SEQ ID NO: 2926065 - DNA, 25 bp, Homo sapien
agatgattaagaacagtgtcatcca

SEQ ID NO: 2926066 - DNA, 25 bp, Homo sapien
aagatgattaagaacagtgtcatcc

SEQ ID NO: 2926067 - DNA, 25 bp, Homo sapien
tgaagatgattaagaacagtgtcat

SEQ ID NO: 2926068 - DNA, 25 bp, Homo sapien
gaagatgattaagaacagtgtcatc

SEQ ID NO: 2926069 - DNA, 25 bp, Homo sapien
gtggcaggtccccatgtttccttgt

SEQ ID NO: 2926070 - DNA, 25 bp, Homo sapien
ggcaggtccccatgtttccttgtta

SEQ ID NO: 2926071 - DNA, 25 bp, Homo sapien
ggtggcaggtccccatgtttccttg

SEQ ID NO: 2926072 - DNA, 25 bp, Homo sapien
caggtccccatgtttccttgttagt

SEQ ID NO: 2926073 - DNA, 25 bp, Homo sapien
ggaatggtgggcctcctgtactttc

SEQ ID NO: 2926074 - DNA, 25 bp, Homo sapien
cctgccctgaggaatggtgggcctc

SEQ ID NO: 2926075 - DNA, 25 bp, Homo sapien
acgtccagtacacacgcactgagcg

SEQ ID NO: 2926076 - DNA, 25 bp, Homo sapien
tgcatgcacagcacgtccagtacac

SEQ ID NO: 2926077 - DNA, 25 bp, Homo sapien
gagtggaggctctcacaaatgggtc

SEQ ID NO: 2926078 - DNA, 25 bp, Homo sapien
gaggagtggaggctctcacaaatgg

SEQ ID NO: 2926079 - DNA, 25 bp, Homo sapien
agtggaggctctcacaaatgggtct

SEQ ID NO: 2926080 - DNA, 25 bp, Homo sapien
ggagtggaggctctcacaaatgggt

SEQ ID NO: 2926081 - DNA, 25 bp, Homo sapien
ggcacccttggaggagtctgcagga

SEQ ID NO: 2926082 - DNA, 25 bp, Homo sapien
taatgagacactgattcccttgtct

SEQ ID NO: 2926083 - DNA, 25 bp, Homo sapien
gagataatgagacactgattccctt

SEQ ID NO: 2926084 - DNA, 25 bp, Homo sapien
gtagagataatgagacactgattcc

SEQ ID NO: 2926085 - DNA, 25 bp, Homo sapien
tgttttcctgctgaccctcacccca

SEQ ID NO: 2926086 - DNA, 25 bp, Homo sapien
gacacagagacatttgttcatgttt

SEQ ID NO: 2926087 - DNA, 25 bp, Homo sapien
ccttaaccttgtttatgacacagag

SEQ ID NO: 2926088 - DNA, 25 bp, Homo sapien
ttcatgttttcctgctgaccctcac

SEQ ID NO: 2926089 - DNA, 25 bp, Homo sapien
ccctctccggttggggtattgatag

SEQ ID NO: 2926090 - DNA, 25 bp, Homo sapien
gccctctccggttggggtattgata

SEQ ID NO: 2926091 - DNA, 25 bp, Homo sapien
atgctactgccatgccccgagtgtc

SEQ ID NO: 2926092 - DNA, 25 bp, Homo sapien
gctccagctgccagcatgctactgc

SEQ ID NO: 2926093 - DNA, 25 bp, Homo sapien
agctgccagcatgctactgccatgc

SEQ ID NO: 2926094 - DNA, 25 bp, Homo sapien
ctcaagggccatggcacagccatca

SEQ ID NO: 2926095 - DNA, 25 bp, Homo sapien
agctcagaagagcacgcgaacccag

SEQ ID NO: 2926096 - DNA, 25 bp, Homo sapien
cctgaaggaagcttcgcctgcacct

SEQ ID NO: 2926097 - DNA, 25 bp, Homo sapien
catgacgaccacagctcagaagagc

SEQ ID NO: 2926098 - DNA, 25 bp, Homo sapien
acgcttccggtccatgacgaccaca

SEQ ID NO: 2926099 - DNA, 25 bp, Homo sapien
tacacaagggcagacgtgggcttca

SEQ ID NO: 2926100 - DNA, 25 bp, Homo sapien
ttcaggcacaaggatggagacacac

SEQ ID NO: 2926101 - DNA, 25 bp, Homo sapien
gagtggaaacatgctaggcctggcc

SEQ ID NO: 2926102 - DNA, 25 bp, Homo sapien
caaaaagggagctcgctggctacag

SEQ ID NO: 2926103 - DNA, 25 bp, Homo sapien
ctgttccgggtggtatggcccaaga

SEQ ID NO: 2926104 - DNA, 25 bp, Homo sapien
tgttccgggtggtatggcccaagaa

SEQ ID NO: 2926105 - DNA, 25 bp, Homo sapien
cctgttccgggtggtatggcccaag

SEQ ID NO: 2926106 - DNA, 25 bp, Homo sapien
caggtgcagccaaggatagggagat

SEQ ID NO: 2926107 - DNA, 25 bp, Homo sapien
gccaaggatagggagatgataacat

SEQ ID NO: 2926108 - DNA, 25 bp, Homo sapien
gatcgggttacctgccggctcctgc

SEQ ID NO: 2926109 - DNA, 25 bp, Homo sapien
aggcgatcgggttacctgccggctc

SEQ ID NO: 2926110 - DNA, 25 bp, Homo sapien
cggaacgcgcgcagggagcaaagtg

SEQ ID NO: 2926111 - DNA, 25 bp, Homo sapien
gcggaacgcgcgcagggagcaaagt

SEQ ID NO: 2926112 - DNA, 25 bp, Homo sapien
gcaaagtggcagcgggggcgacaac

SEQ ID NO: 2926113 - DNA, 25 bp, Homo sapien
gagcaaagtggcagcgggggcgaca

SEQ ID NO: 2926114 - DNA, 25 bp, Homo sapien
ctggcaccggccgtcagggagtggg

SEQ ID NO: 2926115 - DNA, 25 bp, Homo sapien
ccgggctggcaccggccgtcaggga

SEQ ID NO: 2926116 - DNA, 25 bp, Homo sapien
caccggccgtcagggagtgggtgag

SEQ ID NO: 2926117 - DNA, 25 bp, Homo sapien
ggtgaggtgccgccgagggtctcac

SEQ ID NO: 2926118 - DNA, 25 bp, Homo sapien
agctgccggcgctgcgaccgccacg

SEQ ID NO: 2926119 - DNA, 25 bp, Homo sapien
cccggatgtggcgagcgtcgtcgtc

SEQ ID NO: 2926120 - DNA, 25 bp, Homo sapien
gtcgtcgtcctgagccgctgagctc

SEQ ID NO: 2926121 - DNA, 25 bp, Homo sapien
cgctggcgccccagccgtctcctcg

SEQ ID NO: 2926122 - DNA, 25 bp, Homo sapien
tcgggcgcagtctgactggcccgtt

SEQ ID NO: 2926123 - DNA, 25 bp, Homo sapien
agtcaacaggtaccccgcgccagct

SEQ ID NO: 2926124 - DNA, 25 bp, Homo sapien
cattgatcgcgatcctggcccttcc

SEQ ID NO: 2926125 - DNA, 25 bp, Homo sapien
gccgctccccatcacctgtcgggcg

SEQ ID NO: 2926126 - DNA, 25 bp, Homo sapien
cttgaccaagacttttcagcccgaa

SEQ ID NO: 2926127 - DNA, 25 bp, Homo sapien
tttcagcccgaaatccgctgcgatg

SEQ ID NO: 2926128 - DNA, 25 bp, Homo sapien
aatccgctgcgatgcgaacgggtgt

SEQ ID NO: 2926129 - DNA, 25 bp, Homo sapien
gctgcgatgcgaacgggtgtatcct

SEQ ID NO: 2926130 - DNA, 25 bp, Homo sapien
tgcgcctggaatcataaacactttg

SEQ ID NO: 2926131 - DNA, 25 bp, Homo sapien
tctagcaacccctccggacattatt

SEQ ID NO: 2926132 - DNA, 25 bp, Homo sapien
taagtgtagtcttctatctagcaac

SEQ ID NO: 2926133 - DNA, 25 bp, Homo sapien
cagtttattcgtacacgtgcacgca

SEQ ID NO: 2926134 - DNA, 25 bp, Homo sapien
ctttcgatgatcactgattccagat

SEQ ID NO: 2926135 - DNA, 25 bp, Homo sapien
cgcatgttctttcgatgatcactga

SEQ ID NO: 2926136 - DNA, 25 bp, Homo sapien
ctgggatcgcatgttctttcgatga

SEQ ID NO: 2926137 - DNA, 25 bp, Homo sapien
gttctttcgatgatcactgattcca

SEQ ID NO: 2926138 - DNA, 25 bp, Homo sapien
acagaagactccactataaccaaag

SEQ ID NO: 2926139 - DNA, 25 bp, Homo sapien
tcaagatggactgagaagttgggca

SEQ ID NO: 2926140 - DNA, 25 bp, Homo sapien
caagatggactgagaagttgggcac

SEQ ID NO: 2926141 - DNA, 25 bp, Homo sapien
gcaagtacgtaaaggctctatcaca

SEQ ID NO: 2926142 - DNA, 25 bp, Homo sapien
tctatcacagccaattagtaacatg

SEQ ID NO: 2926143 - DNA, 25 bp, Homo sapien
ggcatcaactcatgcaaaaagataa

SEQ ID NO: 2926144 - DNA, 25 bp, Homo sapien
aatgatgtcagtagaatcctagctc

SEQ ID NO: 2926145 - DNA, 25 bp, Homo sapien
ctgcagacaagcagtgcagggagaa

SEQ ID NO: 2926146 - DNA, 25 bp, Homo sapien
tgcagggagaagcattactgtactt

SEQ ID NO: 2926147 - DNA, 25 bp, Homo sapien
ttactgtacttgtctgtggatatac

SEQ ID NO: 2926148 - DNA, 25 bp, Homo sapien
tgcagacaagcagtgcagggagaag

SEQ ID NO: 2926149 - DNA, 25 bp, Homo sapien
ggccttgaacgagcaggactcttgc

SEQ ID NO: 2926150 - DNA, 25 bp, Homo sapien
ctgtttctaacgcttttcccctgct

SEQ ID NO: 2926151 - DNA, 25 bp, Homo sapien
gtagaacaaaagctgtttctaacgc

SEQ ID NO: 2926152 - DNA, 25 bp, Homo sapien
gcttctttcctgtatgcaggccttg

SEQ ID NO: 2926153 - DNA, 25 bp, Homo sapien
tagtgtcaaggctgacagaccaaaa

SEQ ID NO: 2926154 - DNA, 25 bp, Homo sapien
ggctgacagaccaaaaatttgacct

SEQ ID NO: 2926155 - DNA, 25 bp, Homo sapien
tactttcaagggatagtgtcaaggc

SEQ ID NO: 2926156 - DNA, 25 bp, Homo sapien
tcaatgacatgacctactttcaagg

SEQ ID NO: 2926157 - DNA, 25 bp, Homo sapien
tatggatcttcttgtgattccatac

SEQ ID NO: 2926158 - DNA, 25 bp, Homo sapien
ttatggatcttcttgtgattccata

SEQ ID NO: 2926159 - DNA, 25 bp, Homo sapien
cttatggatcttcttgtgattccat

SEQ ID NO: 2926160 - DNA, 25 bp, Homo sapien
ttgatggcactggaaaaagacgaac

SEQ ID NO: 2926161 - DNA, 25 bp, Homo sapien
aaccagtgtctttgaggtggttgat

SEQ ID NO: 2926162 - DNA, 25 bp, Homo sapien
cagtgtctttgaggtggttgatggc

SEQ ID NO: 2926163 - DNA, 25 bp, Homo sapien
tgtctttgaggtggttgatggcact

SEQ ID NO: 2926164 - DNA, 25 bp, Homo sapien
cctttggcccaagtttgcataaatc

SEQ ID NO: 2926165 - DNA, 25 bp, Homo sapien
taactgtcctttggcccaagtttgc

SEQ ID NO: 2926166 - DNA, 25 bp, Homo sapien
tgtcttctaactgtcctttggccca

SEQ ID NO: 2926167 - DNA, 25 bp, Homo sapien
ggcccaagtttgcataaatccaacc

SEQ ID NO: 2926168 - DNA, 25 bp, Homo sapien
aaatctctatcgattcttaggaaag

SEQ ID NO: 2926169 - DNA, 25 bp, Homo sapien
tttccctccaggtcaattcaagaca

SEQ ID NO: 2926170 - DNA, 25 bp, Homo sapien
ttccctccaggtcaattcaagacac

SEQ ID NO: 2926171 - DNA, 25 bp, Homo sapien
tgatcaaatctctatcgattcttag

SEQ ID NO: 2926172 - DNA, 25 bp, Homo sapien
tctaaaaaataaagcgaagtgtaca

SEQ ID NO: 2926173 - DNA, 25 bp, Homo sapien
cgatgccaatacagtagatttcccg

SEQ ID NO: 2926174 - DNA, 25 bp, Homo sapien
aaaactttgtactccttgaatcaat

SEQ ID NO: 2926175 - DNA, 25 bp, Homo sapien
cttgaatcaattatctcaacttggg

SEQ ID NO: 2926176 - DNA, 25 bp, Homo sapien
gaagaggcataacatattaagagta

SEQ ID NO: 2926177 - DNA, 25 bp, Homo sapien
tcatgttcatggaagaagcctaatt

SEQ ID NO: 2926178 - DNA, 25 bp, Homo sapien
gtcactactgtacttaagaagaggc

SEQ ID NO: 2926179 - DNA, 25 bp, Homo sapien
taacagggcatagcagagtcactac

SEQ ID NO: 2926180 - DNA, 25 bp, Homo sapien
tgccgatttggtccctggactgaag

SEQ ID NO: 2926181 - DNA, 25 bp, Homo sapien
accgcccttcactgcattcagctgc

SEQ ID NO: 2926182 - DNA, 25 bp, Homo sapien
gcccttcactgcattcagctgcgat

SEQ ID NO: 2926183 - DNA, 25 bp, Homo sapien
cttcactgcattcagctgcgatggt

SEQ ID NO: 2926184 - DNA, 25 bp, Homo sapien
ccttcactgcattcagctgcgatgg

SEQ ID NO: 2926185 - DNA, 25 bp, Homo sapien
tgggtgggtggagcacatgccagat

SEQ ID NO: 2926186 - DNA, 25 bp, Homo sapien
gtggacacagtgttttttcccatgt

SEQ ID NO: 2926187 - DNA, 25 bp, Homo sapien
taagaaaagaactaaggtggacaca

SEQ ID NO: 2926188 - DNA, 25 bp, Homo sapien
ttcccatgtcgcatcttctgtgatg

SEQ ID NO: 2926189 - DNA, 25 bp, Homo sapien
ctgctaccataccatagattcattg

SEQ ID NO: 2926190 - DNA, 25 bp, Homo sapien
aactgctaccataccatagattcat

SEQ ID NO: 2926191 - DNA, 25 bp, Homo sapien
tccagaaactgctaccataccatag

SEQ ID NO: 2926192 - DNA, 25 bp, Homo sapien
gctaccataccatagattcattgta

SEQ ID NO: 2926193 - DNA, 25 bp, Homo sapien
ctttacttcttccgctgaccttcag

SEQ ID NO: 2926194 - DNA, 25 bp, Homo sapien
aaacaagatcagaggtgctaagtgc

SEQ ID NO: 2926195 - DNA, 25 bp, Homo sapien
aacaagatcagaggtgctaagtgct

SEQ ID NO: 2926196 - DNA, 25 bp, Homo sapien
taaccagaaattgctacctggctct

SEQ ID NO: 2926197 - DNA, 25 bp, Homo sapien
ttccattcttagtccatccaactct

SEQ ID NO: 2926198 - DNA, 25 bp, Homo sapien
tggctcttctattggaatggagggc

SEQ ID NO: 2926199 - DNA, 25 bp, Homo sapien
ggagggcttttccattcttagtcca

SEQ ID NO: 2926200 - DNA, 25 bp, Homo sapien
ctcagtcagatttcaactccctcaa

SEQ ID NO: 2926201 - DNA, 25 bp, Homo sapien
cagatttcaactccctcaacttctg

SEQ ID NO: 2926202 - DNA, 25 bp, Homo sapien
aataatggaaccgttccatatgcat

SEQ ID NO: 2926203 - DNA, 25 bp, Homo sapien
aatggaaccgttccatatgcataaa

SEQ ID NO: 2926204 - DNA, 25 bp, Homo sapien
gggcacctgtgtcctccttcccatt

SEQ ID NO: 2926205 - DNA, 25 bp, Homo sapien
ttcagttgggcacctgtgtcctcct

SEQ ID NO: 2926206 - DNA, 25 bp, Homo sapien
ccttcagttgggcacctgtgtcctc

SEQ ID NO: 2926207 - DNA, 25 bp, Homo sapien
gttgggcacctgtgtcctccttccc

SEQ ID NO: 2926208 - DNA, 25 bp, Homo sapien
tctgcaccctcgtggtcggcagtac

SEQ ID NO: 2926209 - DNA, 25 bp, Homo sapien
cctcgtggtcggcagtacatgaagg

SEQ ID NO: 2926210 - DNA, 25 bp, Homo sapien
cggcagtacatgaagggcacagaca

SEQ ID NO: 2926211 - DNA, 25 bp, Homo sapien
ctgaggcccagcgaagcctccggac

SEQ ID NO: 2926212 - DNA, 25 bp, Homo sapien
caatccaaaatcgacgaaatggagg

SEQ ID NO: 2926213 - DNA, 25 bp, Homo sapien
aatcgacgaaatggagggtcctctg

SEQ ID NO: 2926214 - DNA, 25 bp, Homo sapien
tctgtcgcccaatccaaaatcgacg

SEQ ID NO: 2926215 - DNA, 25 bp, Homo sapien
tgtcgcccaatccaaaatcgacgaa

SEQ ID NO: 2926216 - DNA, 25 bp, Homo sapien
tccacggccttaacaggcttggatc

SEQ ID NO: 2926217 - DNA, 25 bp, Homo sapien
gttccacggccttaacaggcttgga

SEQ ID NO: 2926218 - DNA, 25 bp, Homo sapien
gagttccacggccttaacaggcttg

SEQ ID NO: 2926219 - DNA, 25 bp, Homo sapien
cctcgagttccacggccttaacagg

SEQ ID NO: 2926220 - DNA, 25 bp, Homo sapien
ccagctccttctggtggcggatcag

SEQ ID NO: 2926221 - DNA, 25 bp, Homo sapien
ggatcaggcactcgctcaggagccc

SEQ ID NO: 2926222 - DNA, 25 bp, Homo sapien
gccggcatccagcagtgcatcactg

SEQ ID NO: 2926223 - DNA, 25 bp, Homo sapien
atcactgaagttggactcgttgccc

SEQ ID NO: 2926224 - DNA, 25 bp, Homo sapien
gccagggcccggagttgactcatct

SEQ ID NO: 2926225 - DNA, 25 bp, Homo sapien
catctgctcaatgtcggtctccagg

SEQ ID NO: 2926226 - DNA, 25 bp, Homo sapien
tacagatggacttgttggaagattg

SEQ ID NO: 2926227 - DNA, 25 bp, Homo sapien
tgccagtggtcgttcagctgcgcct

SEQ ID NO: 2926228 - DNA, 25 bp, Homo sapien
agtcatacagcaccttgcagcttgg

SEQ ID NO: 2926229 - DNA, 25 bp, Homo sapien
gggcagaggcatgagcacgtccatg

SEQ ID NO: 2926230 - DNA, 25 bp, Homo sapien
tgagcacgtccatgtagctgagcag

SEQ ID NO: 2926231 - DNA, 25 bp, Homo sapien
gggggtgccacccagtgtggatgga

SEQ ID NO: 2926232 - DNA, 25 bp, Homo sapien
cagggggtgccacccagtgtggatg

SEQ ID NO: 2926233 - DNA, 25 bp, Homo sapien
ctggcagggggtgccacccagtgtg

SEQ ID NO: 2926234 - DNA, 25 bp, Homo sapien
ggcagggggtgccacccagtgtgga

SEQ ID NO: 2926235 - DNA, 25 bp, Homo sapien
ggcgccagaaggcttggacaccgcc

SEQ ID NO: 2926236 - DNA, 25 bp, Homo sapien
cagcaggagcccatggaaggcagga

SEQ ID NO: 2926237 - DNA, 25 bp, Homo sapien
agaaggcttggacaccgccctggca

SEQ ID NO: 2926238 - DNA, 25 bp, Homo sapien
gggtggcgccagaaggcttggacac

SEQ ID NO: 2926239 - DNA, 25 bp, Homo sapien
cttggcccttagcagcacagctggg

SEQ ID NO: 2926240 - DNA, 25 bp, Homo sapien
cccgtgcgaggtgtgctgggggggt

SEQ ID NO: 2926241 - DNA, 25 bp, Homo sapien
cagagtgacacaggcttccgtgggc

SEQ ID NO: 2926242 - DNA, 25 bp, Homo sapien
ttgtgcttggcccttagcagcacag

SEQ ID NO: 2926243 - DNA, 25 bp, Homo sapien
tgatcatgaaatatctttgatcatc

SEQ ID NO: 2926244 - DNA, 25 bp, Homo sapien
ttgatcatgaaatatctttgatcat

SEQ ID NO: 2926245 - DNA, 25 bp, Homo sapien
ctgagggcgcctccgactcaatagt

SEQ ID NO: 2926246 - DNA, 25 bp, Homo sapien
agggcgcctccgactcaatagtcag

SEQ ID NO: 2926247 - DNA, 25 bp, Homo sapien
gagggcgcctccgactcaatagtca

SEQ ID NO: 2926248 - DNA, 25 bp, Homo sapien
ggcgcctccgactcaatagtcagct

SEQ ID NO: 2926249 - DNA, 25 bp, Homo sapien
ctcgtcattggtgtctagctgctca

SEQ ID NO: 2926250 - DNA, 25 bp, Homo sapien
actctcgtcattggtgtctagctgc

SEQ ID NO: 2926251 - DNA, 25 bp, Homo sapien
atcactctcgtcattggtgtctagc

SEQ ID NO: 2926252 - DNA, 25 bp, Homo sapien
tctcgtcattggtgtctagctgctc

SEQ ID NO: 2926253 - DNA, 25 bp, Homo sapien
tttctcagtgagagataaggcaaga

SEQ ID NO: 2926254 - DNA, 25 bp, Homo sapien
agatgtaacttagtgcgctgctaac

SEQ ID NO: 2926255 - DNA, 25 bp, Homo sapien
tcagtgagagataaggcaagatgta

SEQ ID NO: 2926256 - DNA, 25 bp, Homo sapien
tagatttctcagtgagagataaggc

SEQ ID NO: 2926257 - DNA, 25 bp, Homo sapien
gctgttcagtgaacggtaacaatat

SEQ ID NO: 2926258 - DNA, 25 bp, Homo sapien
tcagtgaacggtaacaatattgatt

SEQ ID NO: 2926259 - DNA, 25 bp, Homo sapien
ttgaaaatagctgttcagtgaacgg

SEQ ID NO: 2926260 - DNA, 25 bp, Homo sapien
tgtgaggggctctttctattgtttt

SEQ ID NO: 2926261 - DNA, 25 bp, Homo sapien
caggcggttttcctgtggttgcgca

SEQ ID NO: 2926262 - DNA, 25 bp, Homo sapien
gccaggcggttttcctgtggttgcg

SEQ ID NO: 2926263 - DNA, 25 bp, Homo sapien
ggcggttttcctgtggttgcgcagt

SEQ ID NO: 2926264 - DNA, 25 bp, Homo sapien
cggttttcctgtggttgcgcagttt

SEQ ID NO: 2926265 - DNA, 25 bp, Homo sapien
ggcatcctgttctttcctagtgctg

SEQ ID NO: 2926266 - DNA, 25 bp, Homo sapien
ctgggcatcctgttctttcctagtg

SEQ ID NO: 2926267 - DNA, 25 bp, Homo sapien
tgggcatcctgttctttcctagtgc

SEQ ID NO: 2926268 - DNA, 25 bp, Homo sapien
ctttcctagtgctgtgctttcccac

SEQ ID NO: 2926269 - DNA, 25 bp, Homo sapien
ggagcaactacttccagaagagggt

SEQ ID NO: 2926270 - DNA, 25 bp, Homo sapien
gagcatcggtctgttgagataactg

SEQ ID NO: 2926271 - DNA, 25 bp, Homo sapien
ctctttgcgagcatcggtctgttga

SEQ ID NO: 2926272 - DNA, 25 bp, Homo sapien
cactctagccattgccatttctaaa

SEQ ID NO: 2926273 - DNA, 25 bp, Homo sapien
gtgttttcagagatgtgtctttgaa

SEQ ID NO: 2926274 - DNA, 25 bp, Homo sapien
gtctttgaacacatctcttttgtgt

SEQ ID NO: 2926275 - DNA, 25 bp, Homo sapien
tgtgtctttgaacacatctcttttg

SEQ ID NO: 2926276 - DNA, 25 bp, Homo sapien
gttttcagagatgtgtctttgaaca

SEQ ID NO: 2926277 - DNA, 25 bp, Homo sapien
aacagttggttctaagttgaatgca

SEQ ID NO: 2926278 - DNA, 25 bp, Homo sapien
tgaatgcagtcccagcggaaactgc

SEQ ID NO: 2926279 - DNA, 25 bp, Homo sapien
ttggttctaagttgaatgcagtccc

SEQ ID NO: 2926280 - DNA, 25 bp, Homo sapien
agttgaatgcagtcccagcggaaac

SEQ ID NO: 2926281 - DNA, 25 bp, Homo sapien
gctcaggggacaagtcaatgcccac

SEQ ID NO: 2926282 - DNA, 25 bp, Homo sapien
gggacaagtcaatgcccacattgtt

SEQ ID NO: 2926283 - DNA, 25 bp, Homo sapien
agtcaatgcccacattgttgtattc

SEQ ID NO: 2926284 - DNA, 25 bp, Homo sapien
caagtcaatgcccacattgttgtat

SEQ ID NO: 2926285 - DNA, 25 bp, Homo sapien
cggttagctgaatttcaagctgatc

SEQ ID NO: 2926286 - DNA, 25 bp, Homo sapien
tgctcggttagctgaatttcaagct

SEQ ID NO: 2926287 - DNA, 25 bp, Homo sapien
ctcggttagctgaatttcaagctga

SEQ ID NO: 2926288 - DNA, 25 bp, Homo sapien
ctgctcggttagctgaatttcaagc

SEQ ID NO: 2926289 - DNA, 25 bp, Homo sapien
cacatcctcgttggggatgagggac

SEQ ID NO: 2926290 - DNA, 25 bp, Homo sapien
tttctcacatcctcgttggggatga

SEQ ID NO: 2926291 - DNA, 25 bp, Homo sapien
gaactttctcacatcctcgttgggg

SEQ ID NO: 2926292 - DNA, 25 bp, Homo sapien
actttctcacatcctcgttggggat

SEQ ID NO: 2926293 - DNA, 25 bp, Homo sapien
catcaggaggcctgttcgcgacatg

SEQ ID NO: 2926294 - DNA, 25 bp, Homo sapien
cacagctcccttgcacatgtgtttc

SEQ ID NO: 2926295 - DNA, 25 bp, Homo sapien
cgacatgagcttggcacagctccct

SEQ ID NO: 2926296 - DNA, 25 bp, Homo sapien
ccattctacattcaatgcctttgct

SEQ ID NO: 2926297 - DNA, 25 bp, Homo sapien
tccatgttctcattaatataatttg

SEQ ID NO: 2926298 - DNA, 25 bp, Homo sapien
tttctgttcattctgttccatgttc

SEQ ID NO: 2926299 - DNA, 25 bp, Homo sapien
ctgttcattctgttccatgttctca

SEQ ID NO: 2926300 - DNA, 25 bp, Homo sapien
tctgttccatgttctcattaatata

SEQ ID NO: 2926301 - DNA, 25 bp, Homo sapien
tggcatatgctaaatgatgggaaat

SEQ ID NO: 2926302 - DNA, 25 bp, Homo sapien
ctaaatgatgggaaatctgggtctc

SEQ ID NO: 2926303 - DNA, 25 bp, Homo sapien
gatgggaaatctgggtctcatgttt

SEQ ID NO: 2926304 - DNA, 25 bp, Homo sapien
cactttcctggcatatgctaaatga

SEQ ID NO: 2926305 - DNA, 25 bp, Homo sapien
taattattgtctttacctctataaa

SEQ ID NO: 2926306 - DNA, 25 bp, Homo sapien
ttaacaatcctggaatatacattgc

SEQ ID NO: 2926307 - DNA, 25 bp, Homo sapien
caatcctggaatatacattgcagta

SEQ ID NO: 2926308 - DNA, 25 bp, Homo sapien
ttattgtctttacctctataaaaca

SEQ ID NO: 2926309 - DNA, 25 bp, Homo sapien
acagagacctcctggaagcgaggat

SEQ ID NO: 2926310 - DNA, 25 bp, Homo sapien
gagacctcctggaagcgaggatcct

SEQ ID NO: 2926311 - DNA, 25 bp, Homo sapien
tatttcacagagacctcctggaagc

SEQ ID NO: 2926312 - DNA, 25 bp, Homo sapien
ttcacagagacctcctggaagcgag

SEQ ID NO: 2926313 - DNA, 25 bp, Homo sapien
gctaccctgtagttctttaactgga

SEQ ID NO: 2926314 - DNA, 25 bp, Homo sapien
gtaagtctacaagacaatacttctc

SEQ ID NO: 2926315 - DNA, 25 bp, Homo sapien
tatgtctctcatcatttaagcaaca

SEQ ID NO: 2926316 - DNA, 25 bp, Homo sapien
gaaggatgatactatgtgaatctag

SEQ ID NO: 2926317 - DNA, 25 bp, Homo sapien
ggagggctggagtatgagacattcc

SEQ ID NO: 2926318 - DNA, 25 bp, Homo sapien
aggagggctggagtatgagacattc

SEQ ID NO: 2926319 - DNA, 25 bp, Homo sapien
cattgtagatggacaaaggcacaga

SEQ ID NO: 2926320 - DNA, 25 bp, Homo sapien
cagtacggtggctagaaacaaaatc

SEQ ID NO: 2926321 - DNA, 25 bp, Homo sapien
ttaggagcatagcatcaagggtgcc

SEQ ID NO: 2926322 - DNA, 25 bp, Homo sapien
caaaaagaggcgagctccaggaata

SEQ ID NO: 2926323 - DNA, 25 bp, Homo sapien
ggccatccacatgctttaactcatg

SEQ ID NO: 2926324 - DNA, 25 bp, Homo sapien
ttctgatgcccttttatgtgaattc

SEQ ID NO: 2926325 - DNA, 25 bp, Homo sapien
tcaggctcctgatattgatgggttg

SEQ ID NO: 2926326 - DNA, 25 bp, Homo sapien
cacaattaaggttatctatcacaac

SEQ ID NO: 2926327 - DNA, 25 bp, Homo sapien
cattttgaggaacacaaccacaaag

SEQ ID NO: 2926328 - DNA, 25 bp, Homo sapien
gaggaacacaaccacaaagtaaaga

SEQ ID NO: 2926329 - DNA, 25 bp, Homo sapien
tctcattttgaggaacacaaccaca

SEQ ID NO: 2926330 - DNA, 25 bp, Homo sapien
cacaaagtaaagaaagttttcattg

SEQ ID NO: 2926331 - DNA, 25 bp, Homo sapien
acccaggttggggtataacagctca

SEQ ID NO: 2926332 - DNA, 25 bp, Homo sapien
caggttggggtataacagctcaacc

SEQ ID NO: 2926333 - DNA, 25 bp, Homo sapien
gggtataacagctcaacctcagctt

SEQ ID NO: 2926334 - DNA, 25 bp, Homo sapien
gttggggtataacagctcaacctca

SEQ ID NO: 2926335 - DNA, 25 bp, Homo sapien
aattaagcaactggttgggcgtggt

SEQ ID NO: 2926336 - DNA, 25 bp, Homo sapien
taagattggggctaacaatggaacc

SEQ ID NO: 2926337 - DNA, 25 bp, Homo sapien
aagaattaagcaactggttgggcgt

SEQ ID NO: 2926338 - DNA, 25 bp, Homo sapien
gaacctacctccgagggctgttgta

SEQ ID NO: 2926339 - DNA, 25 bp, Homo sapien
tatgcgccggctatgagtcaagcct

SEQ ID NO: 2926340 - DNA, 25 bp, Homo sapien
tgacatcagtggcaggcacggttga

SEQ ID NO: 2926341 - DNA, 25 bp, Homo sapien
cggaccgtctggcttaactgctgag

SEQ ID NO: 2926342 - DNA, 25 bp, Homo sapien
aaagtgctagaaagccgtcccacga

SEQ ID NO: 2926343 - DNA, 25 bp, Homo sapien
agctgtcagtgaaatccctttcccc

SEQ ID NO: 2926344 - DNA, 25 bp, Homo sapien
cagggtgggctggtacggttgggca

SEQ ID NO: 2926345 - DNA, 25 bp, Homo sapien
catttggcccgagggctaaggctcc

SEQ ID NO: 2926346 - DNA, 25 bp, Homo sapien
tccactctttagtccctcaatcagg

SEQ ID NO: 2926347 - DNA, 25 bp, Homo sapien
agtgcttgtggggtttgtctgttca

SEQ ID NO: 2926348 - DNA, 25 bp, Homo sapien
tgcttgtggggtttgtctgttcatc

SEQ ID NO: 2926349 - DNA, 25 bp, Homo sapien
tatgcagtgcttgtggggtttgtct

SEQ ID NO: 2926350 - DNA, 25 bp, Homo sapien
cttgtggggtttgtctgttcatccc

SEQ ID NO: 2926351 - DNA, 25 bp, Homo sapien
aagagggttgcagctacttcagggc

SEQ ID NO: 2926352 - DNA, 25 bp, Homo sapien
gttgcagctacttcagggccagtgt

SEQ ID NO: 2926353 - DNA, 25 bp, Homo sapien
tgtgtattaagagggttgcagctac

SEQ ID NO: 2926354 - DNA, 25 bp, Homo sapien
cttcctgtgtattaagagggttgca

SEQ ID NO: 2926355 - DNA, 25 bp, Homo sapien
ttcccaggtctcacagaacacgagg

SEQ ID NO: 2926356 - DNA, 25 bp, Homo sapien
tggagggaggagaactcctgctccc

SEQ ID NO: 2926357 - DNA, 25 bp, Homo sapien
acacgaggaacacggtctttctcca

SEQ ID NO: 2926358 - DNA, 25 bp, Homo sapien
tctcacagaacacgaggaacacggt

SEQ ID NO: 2926359 - DNA, 25 bp, Homo sapien
gagaggagggtctggatgggaccca

SEQ ID NO: 2926360 - DNA, 25 bp, Homo sapien
cggtttggagaggagggtctggatg

SEQ ID NO: 2926361 - DNA, 25 bp, Homo sapien
ttggagaggagggtctggatgggac

SEQ ID NO: 2926362 - DNA, 25 bp, Homo sapien
ccggtttggagaggagggtctggat

SEQ ID NO: 2926363 - DNA, 25 bp, Homo sapien
tgactcccctatcagaggctgcgag

SEQ ID NO: 2926364 - DNA, 25 bp, Homo sapien
gagcaaagagaatgtcccctagagc

SEQ ID NO: 2926365 - DNA, 25 bp, Homo sapien
tagagccatgtgtgatccatacgct

SEQ ID NO: 2926366 - DNA, 25 bp, Homo sapien
catacgctttgtgaatcgtgacacc

SEQ ID NO: 2926367 - DNA, 25 bp, Homo sapien
gaaccatccctgctgcagatatggg

SEQ ID NO: 2926368 - DNA, 25 bp, Homo sapien
gcttcctgacgcgtttgagggtccg

SEQ ID NO: 2926369 - DNA, 25 bp, Homo sapien
gggccccgatcatctccttgactgg

SEQ ID NO: 2926370 - DNA, 25 bp, Homo sapien
tcaatttgcggcttgccactttgct

SEQ ID NO: 2926371 - DNA, 25 bp, Homo sapien
cctctctggaaactctgtctggttt

SEQ ID NO: 2926372 - DNA, 25 bp, Homo sapien
taggacggatgcaggtgtgcccaaa

SEQ ID NO: 2926373 - DNA, 25 bp, Homo sapien
tgtctggtttctggaaccgtcccca

SEQ ID NO: 2926374 - DNA, 25 bp, Homo sapien
tctttcgggtcaactctggaggcct

SEQ ID NO: 2926375 - DNA, 25 bp, Homo sapien
atcgggaggctgaaggtcgagaatg

SEQ ID NO: 2926376 - DNA, 25 bp, Homo sapien
ctgcactccaacctcccctccaggc

SEQ ID NO: 2926377 - DNA, 25 bp, Homo sapien
actgcactccaacctcccctccagg

SEQ ID NO: 2926378 - DNA, 25 bp, Homo sapien
aatggcttgaactccagatgtggaa

SEQ ID NO: 2926379 - DNA, 25 bp, Homo sapien
acttttgcttgacaaaactgtggtt

SEQ ID NO: 2926380 - DNA, 25 bp, Homo sapien
cttttgcttgacaaaactgtggttg

SEQ ID NO: 2926381 - DNA, 25 bp, Homo sapien
gcagtcaggcaaagagtcacaggta

SEQ ID NO: 2926382 - DNA, 25 bp, Homo sapien
cacaggtacgggtggtatgaagcca

SEQ ID NO: 2926383 - DNA, 25 bp, Homo sapien
gctgcctgcatgcactagagcaaag

SEQ ID NO: 2926384 - DNA, 25 bp, Homo sapien
tatgaagccactggattgacgtgca

SEQ ID NO: 2926385 - DNA, 25 bp, Homo sapien
cggttgccgtgttgttttaataatg

SEQ ID NO: 2926386 - DNA, 25 bp, Homo sapien
tgccgtgttgttttaataatggttc

SEQ ID NO: 2926387 - DNA, 25 bp, Homo sapien
caacggaggcggcacgtgtgtgccc

SEQ ID NO: 2926388 - DNA, 25 bp, Homo sapien
cagctccgcggccccaacggaggcg

SEQ ID NO: 2926389 - DNA, 25 bp, Homo sapien
ctccgcggccccaacggaggcggca

SEQ ID NO: 2926390 - DNA, 25 bp, Homo sapien
ggccccaacggaggcggcacgtgtg

SEQ ID NO: 2926391 - DNA, 25 bp, Homo sapien
gactgggggcgatcgggtctgcgcc

SEQ ID NO: 2926392 - DNA, 25 bp, Homo sapien
aaaagaggcggattacacggatcca

SEQ ID NO: 2926393 - DNA, 25 bp, Homo sapien
gaggcggattacacggatccaaagg

SEQ ID NO: 2926394 - DNA, 25 bp, Homo sapien
ggattacacggatccaaaggcggcc

SEQ ID NO: 2926395 - DNA, 25 bp, Homo sapien
ggggtcggcccagcgtgtctctcct

SEQ ID NO: 2926396 - DNA, 25 bp, Homo sapien
agcgtgtctctcctgcggctcggcg

SEQ ID NO: 2926397 - DNA, 25 bp, Homo sapien
ctggggtcggcccagcgtgtctctc

SEQ ID NO: 2926398 - DNA, 25 bp, Homo sapien
cgtgtctctcctgcggctcggcgaa

SEQ ID NO: 2926399 - DNA, 25 bp, Homo sapien
ggatgacaactgaaccctcgtagct

SEQ ID NO: 2926400 - DNA, 25 bp, Homo sapien
aactgaaccctcgtagctcaatcca

SEQ ID NO: 2926401 - DNA, 25 bp, Homo sapien
atgacaactgaaccctcgtagctca

SEQ ID NO: 2926402 - DNA, 25 bp, Homo sapien
gacaactgaaccctcgtagctcaat

SEQ ID NO: 2926403 - DNA, 25 bp, Homo sapien
gaaaccaatggtctgtccccaaaca

SEQ ID NO: 2926404 - DNA, 25 bp, Homo sapien
caggttaggcacatggcagcccttg

SEQ ID NO: 2926405 - DNA, 25 bp, Homo sapien
ccaaacagcatggaggtcaacggcc

SEQ ID NO: 2926406 - DNA, 25 bp, Homo sapien
gccgggaatatacattcaccctcag

SEQ ID NO: 2926407 - DNA, 25 bp, Homo sapien
agttctgaacggcatggcaggcaaa

SEQ ID NO: 2926408 - DNA, 25 bp, Homo sapien
catgtatgtggctccgtgcacgggt

SEQ ID NO: 2926409 - DNA, 25 bp, Homo sapien
ggtgcgatcgctgccagccatggaa

SEQ ID NO: 2926410 - DNA, 25 bp, Homo sapien
catgtgagcgcacacgtatgtcgca

SEQ ID NO: 2926411 - DNA, 25 bp, Homo sapien
gatgactgctgacacctgggattcc

SEQ ID NO: 2926412 - DNA, 25 bp, Homo sapien
gaagggtcctagatggcagaacagc

SEQ ID NO: 2926413 - DNA, 25 bp, Homo sapien
gatcacacttagcacactggaggag

SEQ ID NO: 2926414 - DNA, 25 bp, Homo sapien
agacttcttgaacgcacactgtggg

SEQ ID NO: 2926415 - DNA, 25 bp, Homo sapien
tggcctctgagcatcctatagtaca

SEQ ID NO: 2926416 - DNA, 25 bp, Homo sapien
cactgacatccatcgggaagaggct

SEQ ID NO: 2926417 - DNA, 25 bp, Homo sapien
aaatcctgtctgagaaagccagccc

SEQ ID NO: 2926418 - DNA, 25 bp, Homo sapien
gagacgttccgaggtgttacaactg

SEQ ID NO: 2926419 - DNA, 25 bp, Homo sapien
ttgcaggatttaccatcgggctttc

SEQ ID NO: 2926420 - DNA, 25 bp, Homo sapien
gtcagccaacctctactctatttta

SEQ ID NO: 2926421 - DNA, 25 bp, Homo sapien
ggctttctacaggaaagtcagccaa

SEQ ID NO: 2926422 - DNA, 25 bp, Homo sapien
attctgtaaagaagggggtctcgct

SEQ ID NO: 2926423 - DNA, 25 bp, Homo sapien
agcagagggcacagaggcgggatcc

SEQ ID NO: 2926424 - DNA, 25 bp, Homo sapien
aagctttgcactccgagctcagcag

SEQ ID NO: 2926425 - DNA, 25 bp, Homo sapien
ctagggcccgagcagagggcacaga

SEQ ID NO: 2926426 - DNA, 25 bp, Homo sapien
ccagccccaagctttgcactccgag

SEQ ID NO: 2926427 - DNA, 25 bp, Homo sapien
ctgtgttttgctcccctaactggac

SEQ ID NO: 2926428 - DNA, 25 bp, Homo sapien
gacggcattcgtatctctcatatcc

SEQ ID NO: 2926429 - DNA, 25 bp, Homo sapien
ctctcacagaacacagggcctctgt

SEQ ID NO: 2926430 - DNA, 25 bp, Homo sapien
gacttggactcagctgtttaatgtc

SEQ ID NO: 2926431 - DNA, 25 bp, Homo sapien
accagagggcgcttgtgagcatcta

SEQ ID NO: 2926432 - DNA, 25 bp, Homo sapien
agcatctaagtcagctgcttccctc

SEQ ID NO: 2926433 - DNA, 25 bp, Homo sapien
gctcccacctcactcgaccaaaagc

SEQ ID NO: 2926434 - DNA, 25 bp, Homo sapien
catccaatctctaccccgaggtgag

SEQ ID NO: 2926435 - DNA, 25 bp, Homo sapien
gtgggccactaaggcctagactctg

SEQ ID NO: 2926436 - DNA, 25 bp, Homo sapien
ggcagggtgggccactaaggcctag

SEQ ID NO: 2926437 - DNA, 25 bp, Homo sapien
cagggtgggccactaaggcctagac

SEQ ID NO: 2926438 - DNA, 25 bp, Homo sapien
ggccactaaggcctagactctgtcc

SEQ ID NO: 2926439 - DNA, 25 bp, Homo sapien
tagagacgacgttttgctctactaa

SEQ ID NO: 2926440 - DNA, 25 bp, Homo sapien
cgttttgctctactaacaatgttgg

SEQ ID NO: 2926441 - DNA, 25 bp, Homo sapien
attcaagaacctcgagtgattctcc

SEQ ID NO: 2926442 - DNA, 25 bp, Homo sapien
cgacgttttgctctactaacaatgt

SEQ ID NO: 2926443 - DNA, 25 bp, Homo sapien
caaggtctgtctctcttgctcaggc

SEQ ID NO: 2926444 - DNA, 25 bp, Homo sapien
tctgagacaaggtctgtctctcttg

SEQ ID NO: 2926445 - DNA, 25 bp, Homo sapien
ttctctgagacaaggtctgtctctc

SEQ ID NO: 2926446 - DNA, 25 bp, Homo sapien
ggctacaggtgcgtgctcctgtgcc

SEQ ID NO: 2926447 - DNA, 25 bp, Homo sapien
cacctacgttatagcctggatccgg

SEQ ID NO: 2926448 - DNA, 25 bp, Homo sapien
tagctttactgaggcatcactgaca

SEQ ID NO: 2926449 - DNA, 25 bp, Homo sapien
gctgttgcacagaagggtccttttt

SEQ ID NO: 2926450 - DNA, 25 bp, Homo sapien
tattccactgcatgggtggaccatg

SEQ ID NO: 2926451 - DNA, 25 bp, Homo sapien
tgtcacctgtatgttgtcctggcct

SEQ ID NO: 2926452 - DNA, 25 bp, Homo sapien
tgcctctcaagtatctcgcgacctg

SEQ ID NO: 2926453 - DNA, 25 bp, Homo sapien
cctggcacgcggcactgaattattt

SEQ ID NO: 2926454 - DNA, 25 bp, Homo sapien
atgccgccatcctatgtcacctgta

SEQ ID NO: 2926455 - DNA, 25 bp, Homo sapien
acacattctctgaggcgggccctcc

SEQ ID NO: 2926456 - DNA, 25 bp, Homo sapien
acattctctgaggcgggccctccag

SEQ ID NO: 2926457 - DNA, 25 bp, Homo sapien
cacattctctgaggcgggccctcca

SEQ ID NO: 2926458 - DNA, 25 bp, Homo sapien
cacacattctctgaggcgggccctc

SEQ ID NO: 2926459 - DNA, 25 bp, Homo sapien
tggcgcgatttcgtctccctacaac

SEQ ID NO: 2926460 - DNA, 25 bp, Homo sapien
tttcgtctccctacaacctgcgcct

SEQ ID NO: 2926461 - DNA, 25 bp, Homo sapien
agtggcgcgatttcgtctccctaca

SEQ ID NO: 2926462 - DNA, 25 bp, Homo sapien
gatttcgtctccctacaacctgcgc

SEQ ID NO: 2926463 - DNA, 25 bp, Homo sapien
cttccccggccagctactcgccggg

SEQ ID NO: 2926464 - DNA, 25 bp, Homo sapien
cccgctccgcttcggaggccgctca

SEQ ID NO: 2926465 - DNA, 25 bp, Homo sapien
cggccccggagagtaagcgcctgca

SEQ ID NO: 2926466 - DNA, 25 bp, Homo sapien
gtaagcgcctgcaataccaaccgct

SEQ ID NO: 2926467 - DNA, 25 bp, Homo sapien
tcttcaccggtaacgccgcggagga

SEQ ID NO: 2926468 - DNA, 25 bp, Homo sapien
cttcaccggtaacgccgcggaggag

SEQ ID NO: 2926469 - DNA, 25 bp, Homo sapien
agagtgtcccatccccggtgttggc

SEQ ID NO: 2926470 - DNA, 25 bp, Homo sapien
gagtgggtcttcctgccctcaaagc

SEQ ID NO: 2926471 - DNA, 25 bp, Homo sapien
agcagagtgtcccatccccggtgtt

SEQ ID NO: 2926472 - DNA, 25 bp, Homo sapien
ggcagagtgggtcttcctgccctca

SEQ ID NO: 2926473 - DNA, 25 bp, Homo sapien
tccggatcccctggagacgtaatct

SEQ ID NO: 2926474 - DNA, 25 bp, Homo sapien
ctggactccggatcccctggagacg

SEQ ID NO: 2926475 - DNA, 25 bp, Homo sapien
cctggagacgtaatctccgaaaggg

SEQ ID NO: 2926476 - DNA, 25 bp, Homo sapien
gatcccctggagacgtaatctccga

SEQ ID NO: 2926477 - DNA, 25 bp, Homo sapien
ggacactttcttcggttccactgca

SEQ ID NO: 2926478 - DNA, 25 bp, Homo sapien
agcaccaagttagcgcgaaggcatt

SEQ ID NO: 2926479 - DNA, 25 bp, Homo sapien
ctgcagcaccaagttagcgcgaagg

SEQ ID NO: 2926480 - DNA, 25 bp, Homo sapien
aaggcatttcagactaaggacactt

SEQ ID NO: 2926481 - DNA, 25 bp, Homo sapien
cacctaccagacagaccttagaaac

SEQ ID NO: 2926482 - DNA, 25 bp, Homo sapien
gtaagccgagtagaaaaagcagaat

SEQ ID NO: 2926483 - DNA, 25 bp, Homo sapien
aagaaaatgtcctgtaagccgagta

SEQ ID NO: 2926484 - DNA, 25 bp, Homo sapien
ttcacctaccagacagaccttagaa

SEQ ID NO: 2926485 - DNA, 25 bp, Homo sapien
agtatcacgttgtcattatacagca

SEQ ID NO: 2926486 - DNA, 25 bp, Homo sapien
ggtcgactcatcagaacgcaaatag

SEQ ID NO: 2926487 - DNA, 25 bp, Homo sapien
taatgacacttgacttccctgaggt

SEQ ID NO: 2926488 - DNA, 25 bp, Homo sapien
agattcacaaaaccgtctaacgctt

SEQ ID NO: 2926489 - DNA, 25 bp, Homo sapien
aaaaatttgtagtcagccggccagg

SEQ ID NO: 2926490 - DNA, 25 bp, Homo sapien
tctgctatggaaatcacgcactaaa

SEQ ID NO: 2926491 - DNA, 25 bp, Homo sapien
tattgttaccgagcagaactcaaga

SEQ ID NO: 2926492 - DNA, 25 bp, Homo sapien
tgcacagtaagatcaaaaggtattc

SEQ ID NO: 2926493 - DNA, 25 bp, Homo sapien
gattccgagttcaaagaaatctata

SEQ ID NO: 2926494 - DNA, 25 bp, Homo sapien
agaaatctatagatctgtgttggct

SEQ ID NO: 2926495 - DNA, 25 bp, Homo sapien
tgctatgagattccgagttcaaaga

SEQ ID NO: 2926496 - DNA, 25 bp, Homo sapien
tatgagattccgagttcaaagaaat

SEQ ID NO: 2926497 - DNA, 25 bp, Homo sapien
atacagatgcagttataagagagaa

SEQ ID NO: 2926498 - DNA, 25 bp, Homo sapien
tacagatgcagttataagagagaaa

SEQ ID NO: 2926499 - DNA, 25 bp, Homo sapien
aatacagatgcagttataagagaga

SEQ ID NO: 2926500 - DNA, 25 bp, Homo sapien
acagatgcagttataagagagaaat

SEQ ID NO: 2926501 - DNA, 25 bp, Homo sapien
ttttgatgtttgttctggagtttcg

SEQ ID NO: 2926502 - DNA, 25 bp, Homo sapien
agtttcgatgagacatgtaagtaag

SEQ ID NO: 2926503 - DNA, 25 bp, Homo sapien
tgagacatgtaagtaagagttctgt

SEQ ID NO: 2926504 - DNA, 25 bp, Homo sapien
ttgatgtttgttctggagtttcgat

SEQ ID NO: 2926505 - DNA, 25 bp, Homo sapien
actaacatggtttgatcagcttgaa

SEQ ID NO: 2926506 - DNA, 25 bp, Homo sapien
tgtgcaaccaattcaaccagtcact

SEQ ID NO: 2926507 - DNA, 25 bp, Homo sapien
ccagtcactctctcacttcagtttt

SEQ ID NO: 2926508 - DNA, 25 bp, Homo sapien
aaaaagctaataacaacctgagact

SEQ ID NO: 2926509 - DNA, 25 bp, Homo sapien
aatcactttattcacttaactacta

SEQ ID NO: 2926510 - DNA, 25 bp, Homo sapien
aaatataatcagtaaaatcacttta

SEQ ID NO: 2926511 - DNA, 25 bp, Homo sapien
aaagagaaataacccatggcacaga

SEQ ID NO: 2926512 - DNA, 25 bp, Homo sapien
tgacacagacactgcggagggccac

SEQ ID NO: 2926513 - DNA, 25 bp, Homo sapien
acgcgcctatagtccaagctactcg

SEQ ID NO: 2926514 - DNA, 25 bp, Homo sapien
attagccgagcatggtggcacgcgc

SEQ ID NO: 2926515 - DNA, 25 bp, Homo sapien
gccgagcatggtggcacgcgcctat

SEQ ID NO: 2926516 - DNA, 25 bp, Homo sapien
agccgagcatggtggcacgcgccta

SEQ ID NO: 2926517 - DNA, 25 bp, Homo sapien
ggtggcgggagcctacaattccagc

SEQ ID NO: 2926518 - DNA, 25 bp, Homo sapien
gtggtggcgggagcctacaattcca

SEQ ID NO: 2926519 - DNA, 25 bp, Homo sapien
tgtggtggcgggagcctacaattcc

SEQ ID NO: 2926520 - DNA, 25 bp, Homo sapien
ggtgtggtggcgggagcctacaatt

SEQ ID NO: 2926521 - DNA, 25 bp, Homo sapien
catgcacgctctctattcagaaaga

SEQ ID NO: 2926522 - DNA, 25 bp, Homo sapien
tgcatcctaggcagcaactcaactg

SEQ ID NO: 2926523 - DNA, 25 bp, Homo sapien
cagtccaccaaagagcttagtttca

SEQ ID NO: 2926524 - DNA, 25 bp, Homo sapien
tgtaaattaagatcaggttgcatcc

SEQ ID NO: 2926525 - DNA, 25 bp, Homo sapien
tgttgccagtgctgacctgtaactt

SEQ ID NO: 2926526 - DNA, 25 bp, Homo sapien
catttctgtaggaactaaactaggt

SEQ ID NO: 2926527 - DNA, 25 bp, Homo sapien
gctgacctgtaacttttgcctttaa

SEQ ID NO: 2926528 - DNA, 25 bp, Homo sapien
catgcctagcctattcctacccatt

SEQ ID NO: 2926529 - DNA, 25 bp, Homo sapien
catccaagagtatagtaagaagtgc

SEQ ID NO: 2926530 - DNA, 25 bp, Homo sapien
gaaacagctcacacgaaatctagca

SEQ ID NO: 2926531 - DNA, 25 bp, Homo sapien
tgagaagagcctccatagcgaagct

SEQ ID NO: 2926532 - DNA, 25 bp, Homo sapien
tatcaaaaggtcatcgaaaaggagc

SEQ ID NO: 2926533 - DNA, 25 bp, Homo sapien
tcttaaggtggtctatgacatgttc

SEQ ID NO: 2926534 - DNA, 25 bp, Homo sapien
tcctctttaggacttgaaaagccaa

SEQ ID NO: 2926535 - DNA, 25 bp, Homo sapien
ctttataatgcttgaatgcagacac

SEQ ID NO: 2926536 - DNA, 25 bp, Homo sapien
gaaaagccaaatgtattccacatca

SEQ ID NO: 2926537 - DNA, 25 bp, Homo sapien
gcagtaattgctcttcttcaaggaa

SEQ ID NO: 2926538 - DNA, 25 bp, Homo sapien
ttcttcaaggaaagctatgcagtgc

SEQ ID NO: 2926539 - DNA, 25 bp, Homo sapien
tgaagggcagtaattgctcttcttc

SEQ ID NO: 2926540 - DNA, 25 bp, Homo sapien
gctatgcagtgctggcatagtgcct

SEQ ID NO: 2926541 - DNA, 25 bp, Homo sapien
cttacccatggtacttggtttatat

SEQ ID NO: 2926542 - DNA, 25 bp, Homo sapien
atgagattcttgctctcctttcatt

SEQ ID NO: 2926543 - DNA, 25 bp, Homo sapien
tttctctacttttgataacatatca

SEQ ID NO: 2926544 - DNA, 25 bp, Homo sapien
tgataacatatcatcaactttaaat

SEQ ID NO: 2926545 - DNA, 25 bp, Homo sapien
gagattcttgctctcctttcatttt

SEQ ID NO: 2926546 - DNA, 25 bp, Homo sapien
gaagagagacactctgtatcaaaaa

SEQ ID NO: 2926547 - DNA, 25 bp, Homo sapien
attatccggggatggtggtgcatat

SEQ ID NO: 2926548 - DNA, 25 bp, Homo sapien
aaaaacatagccaggtagtcccagc

SEQ ID NO: 2926549 - DNA, 25 bp, Homo sapien
gagagaggatctcttcatcccagga

SEQ ID NO: 2926550 - DNA, 25 bp, Homo sapien
gatggtgacaatctaggcattttta

SEQ ID NO: 2926551 - DNA, 25 bp, Homo sapien
taaatgatggtgacaatctaggcat

SEQ ID NO: 2926552 - DNA, 25 bp, Homo sapien
caatctaggcatttttatagtcaga

SEQ ID NO: 2926553 - DNA, 25 bp, Homo sapien
ttttatagtcagatgggaacagtta

SEQ ID NO: 2926554 - DNA, 25 bp, Homo sapien
tgtggaagaaaccaaaaatgtaagc

SEQ ID NO: 2926555 - DNA, 25 bp, Homo sapien
ccaaaaatgtaagctgcaaatgagc

SEQ ID NO: 2926556 - DNA, 25 bp, Homo sapien
gaagaaaccaaaaatgtaagctgca

SEQ ID NO: 2926557 - DNA, 25 bp, Homo sapien
gaaaccaaaaatgtaagctgcaaat

SEQ ID NO: 2926558 - DNA, 25 bp, Homo sapien
gctatttttagacgctttccccaga

SEQ ID NO: 2926559 - DNA, 25 bp, Homo sapien
tcttgatctgaccaagacttgtggc

SEQ ID NO: 2926560 - DNA, 25 bp, Homo sapien
tatgaatgcatagagacaactaaac

SEQ ID NO: 2926561 - DNA, 25 bp, Homo sapien
cattataaaacgtagagacagagct

SEQ ID NO: 2926562 - DNA, 25 bp, Homo sapien
tgtggcaaactttcacaagcaggac

SEQ ID NO: 2926563 - DNA, 25 bp, Homo sapien
gtggcaaactttcacaagcaggact

SEQ ID NO: 2926564 - DNA, 25 bp, Homo sapien
tggcaaactttcacaagcaggactt

SEQ ID NO: 2926565 - DNA, 25 bp, Homo sapien
ggcaaactttcacaagcaggacttc

SEQ ID NO: 2926566 - DNA, 25 bp, Homo sapien
gcacctggcaaggagtgatatttcc

SEQ ID NO: 2926567 - DNA, 25 bp, Homo sapien
ccaggaaaatgattaccccgataca

SEQ ID NO: 2926568 - DNA, 25 bp, Homo sapien
taggagtaagaagcgataaaggctg

SEQ ID NO: 2926569 - DNA, 25 bp, Homo sapien
ggtcttacgctccagagatgactaa

SEQ ID NO: 2926570 - DNA, 25 bp, Homo sapien
gaacttgccttattggacaacatac

SEQ ID NO: 2926571 - DNA, 25 bp, Homo sapien
cttgccttattggacaacatacatc

SEQ ID NO: 2926572 - DNA, 25 bp, Homo sapien
ctgtgggaacttgccttattggaca

SEQ ID NO: 2926573 - DNA, 25 bp, Homo sapien
gggaacttgccttattggacaacat

SEQ ID NO: 2926574 - DNA, 25 bp, Homo sapien
aattcattactggaaactgcaaggg

SEQ ID NO: 2926575 - DNA, 25 bp, Homo sapien
aatagcaacgagtaagacttcacca

SEQ ID NO: 2926576 - DNA, 25 bp, Homo sapien
gtcaggattcaaaggcacctgcttt

SEQ ID NO: 2926577 - DNA, 25 bp, Homo sapien
actaggttcaaattcattactggaa

SEQ ID NO: 2926578 - DNA, 25 bp, Homo sapien
ctctcttcttcttggacgagtcact

SEQ ID NO: 2926579 - DNA, 25 bp, Homo sapien
aactctcttcttcttggacgagtca

SEQ ID NO: 2926580 - DNA, 25 bp, Homo sapien
attttcatggtttctccattaatca

SEQ ID NO: 2926581 - DNA, 25 bp, Homo sapien
cattaatcattccattaaactctct

SEQ ID NO: 2926582 - DNA, 25 bp, Homo sapien
gactatcatgaaggaacactggtac

SEQ ID NO: 2926583 - DNA, 25 bp, Homo sapien
aaatgtgttacgatatatggtccct

SEQ ID NO: 2926584 - DNA, 25 bp, Homo sapien
tacagaccacgtttccaattttgca

SEQ ID NO: 2926585 - DNA, 25 bp, Homo sapien
cactaggttgtgagactttggagga

SEQ ID NO: 2926586 - DNA, 25 bp, Homo sapien
cttctggctggaagctcttcactga

SEQ ID NO: 2926587 - DNA, 25 bp, Homo sapien
tactgtcatttgtgcaacaaatgtc

SEQ ID NO: 2926588 - DNA, 25 bp, Homo sapien
ctggctggaagctcttcactgacat

SEQ ID NO: 2926589 - DNA, 25 bp, Homo sapien
ttccccatcctcacgatttcatttt

SEQ ID NO: 2926590 - DNA, 25 bp, Homo sapien
ggatatcgctctaaaacagtaacca

SEQ ID NO: 2926591 - DNA, 25 bp, Homo sapien
gttgccttaatgtccagaacagtgt

SEQ ID NO: 2926592 - DNA, 25 bp, Homo sapien
aagatttacgtacggcccagtccat

SEQ ID NO: 2926593 - DNA, 25 bp, Homo sapien
cactaaaagttaagctccatggtga

SEQ ID NO: 2926594 - DNA, 25 bp, Homo sapien
ttaacaacagatacaatctagatga

SEQ ID NO: 2926595 - DNA, 25 bp, Homo sapien
taaatgactttagtattctttcaac

SEQ ID NO: 2926596 - DNA, 25 bp, Homo sapien
catgcccggatgagtattttcaaaa

SEQ ID NO: 2926597 - DNA, 25 bp, Homo sapien
tgaggaataaagcaaactttcaaat

SEQ ID NO: 2926598 - DNA, 25 bp, Homo sapien
tgcaaaactacaggcctatactggg

SEQ ID NO: 2926599 - DNA, 25 bp, Homo sapien
gggctcaaagtcttcgcaccttgga

SEQ ID NO: 2926600 - DNA, 25 bp, Homo sapien
catctagctatggaatcagggtggg

SEQ ID NO: 2926601 - DNA, 25 bp, Homo sapien
tgtgaacagcatcttaacggagtga

SEQ ID NO: 2926602 - DNA, 25 bp, Homo sapien
agcagaggtaagagaaggttggccc

SEQ ID NO: 2926603 - DNA, 25 bp, Homo sapien
gaaatcacaacttcagagcagaggt

SEQ ID NO: 2926604 - DNA, 25 bp, Homo sapien
cacatctaacatgcagattttggct

SEQ ID NO: 2926605 - DNA, 25 bp, Homo sapien
tataaggaatcaggactccttgaag

SEQ ID NO: 2926606 - DNA, 25 bp, Homo sapien
gtaatgtatgtggagacctttcccc

SEQ ID NO: 2926607 - DNA, 25 bp, Homo sapien
tgtactattactccactgccagaag

SEQ ID NO: 2926608 - DNA, 25 bp, Homo sapien
gaatccaggtgtctgtctctaaagt

SEQ ID NO: 2926609 - DNA, 25 bp, Homo sapien
ccagatctagcaaatgaatccaggt

SEQ ID NO: 2926610 - DNA, 25 bp, Homo sapien
gacaaacacatatactttaaagtaa

SEQ ID NO: 2926611 - DNA, 25 bp, Homo sapien
gttagacaaacacatatactttaaa

SEQ ID NO: 2926612 - DNA, 25 bp, Homo sapien
ctgttagacaaacacatatacttta

SEQ ID NO: 2926613 - DNA, 25 bp, Homo sapien
tagacaaacacatatactttaaagt

SEQ ID NO: 2926614 - DNA, 25 bp, Homo sapien
tttgcatcggatggtacactgacct

SEQ ID NO: 2926615 - DNA, 25 bp, Homo sapien
ggcagtctggctctcaaagtatgat

SEQ ID NO: 2926616 - DNA, 25 bp, Homo sapien
tgccaaatgccacatagctaggagc

SEQ ID NO: 2926617 - DNA, 25 bp, Homo sapien
agtatgatgccttccgtgtggccgg

SEQ ID NO: 2926618 - DNA, 25 bp, Homo sapien
tatagaatctgcctgttcacaggag

SEQ ID NO: 2926619 - DNA, 25 bp, Homo sapien
cagtagtatgcacagcagtgttagc

SEQ ID NO: 2926620 - DNA, 25 bp, Homo sapien
acgtgtgtatccaatctgcctgtga

SEQ ID NO: 2926621 - DNA, 25 bp, Homo sapien
tgtagataccttgtccagccatagg

SEQ ID NO: 2926622 - DNA, 25 bp, Homo sapien
tctgctggaagagtacaaccctgga

SEQ ID NO: 2926623 - DNA, 25 bp, Homo sapien
tgatgacactgatatgggaaactca

SEQ ID NO: 2926624 - DNA, 25 bp, Homo sapien
ctctaaaatctatgtccagttggca

SEQ ID NO: 2926625 - DNA, 25 bp, Homo sapien
tggtgagtcaagaattcggtagaac

SEQ ID NO: 2926626 - DNA, 25 bp, Homo sapien
agaactgcttaaacctgggaggtgg

SEQ ID NO: 2926627 - DNA, 25 bp, Homo sapien
ctgtaatccgagaggctcaggcagg

SEQ ID NO: 2926628 - DNA, 25 bp, Homo sapien
ccagcctgggcaacaagagtgaaac

SEQ ID NO: 2926629 - DNA, 25 bp, Homo sapien
aggttgcagtgagtccagatcatgc

SEQ ID NO: 2926630 - DNA, 25 bp, Homo sapien
gaactcaatcatggttgctgtacta

SEQ ID NO: 2926631 - DNA, 25 bp, Homo sapien
cagacagaagagatagcataggagt

SEQ ID NO: 2926632 - DNA, 25 bp, Homo sapien
ggatcaagctgtgtgcattagtaca

SEQ ID NO: 2926633 - DNA, 25 bp, Homo sapien
aaaaacaggatggatatgactctct

SEQ ID NO: 2926634 - DNA, 25 bp, Homo sapien
tatatggaagatttaggcgctggca

SEQ ID NO: 2926635 - DNA, 25 bp, Homo sapien
aaaatagcacctaccggctggacgc

SEQ ID NO: 2926636 - DNA, 25 bp, Homo sapien
tcatcagccaggtagtcgggatcag

SEQ ID NO: 2926637 - DNA, 25 bp, Homo sapien
taaaatagaagtgtgccatcatggc

SEQ ID NO: 2926638 - DNA, 25 bp, Homo sapien
ttcctatttcaagagcacacaaagt

SEQ ID NO: 2926639 - DNA, 25 bp, Homo sapien
cacaatcaatgacattttgaggcca

SEQ ID NO: 2926640 - DNA, 25 bp, Homo sapien
gatcctgcatgtttgctatttcaca

SEQ ID NO: 2926641 - DNA, 25 bp, Homo sapien
ctggcaatagggatctgtacatttc

SEQ ID NO: 2926642 - DNA, 25 bp, Homo sapien
tttagactgctcagatatgaaataa

SEQ ID NO: 2926643 - DNA, 25 bp, Homo sapien
ctttagactgctcagatatgaaata

SEQ ID NO: 2926644 - DNA, 25 bp, Homo sapien
tcacctcagcctcctgagtagctgg

SEQ ID NO: 2926645 - DNA, 25 bp, Homo sapien
ctttgtgatccgcccacctcggcct

SEQ ID NO: 2926646 - DNA, 25 bp, Homo sapien
tcaggttcaagcgaccctctcacct

SEQ ID NO: 2926647 - DNA, 25 bp, Homo sapien
ctcaggttcaagcgaccctctcacc

SEQ ID NO: 2926648 - DNA, 25 bp, Homo sapien
tttgttatttatcccagtcagtccc

SEQ ID NO: 2926649 - DNA, 25 bp, Homo sapien
agtctctagacccactctcattaga

SEQ ID NO: 2926650 - DNA, 25 bp, Homo sapien
cactctcattagatgcccaggtctg

SEQ ID NO: 2926651 - DNA, 25 bp, Homo sapien
gagaaacctgtgatactggctggat

SEQ ID NO: 2926652 - DNA, 25 bp, Homo sapien
aaatccaggcagttcgactccagac

SEQ ID NO: 2926653 - DNA, 25 bp, Homo sapien
tctcctaaagatgcatcaccaggcc

SEQ ID NO: 2926654 - DNA, 25 bp, Homo sapien
gagaagttatttacccagtgtcaca

SEQ ID NO: 2926655 - DNA, 25 bp, Homo sapien
tctgctgaccgtgatgtgaaagaca

SEQ ID NO: 2926656 - DNA, 25 bp, Homo sapien
cctgggagacagtgcaagattccgt

SEQ ID NO: 2926657 - DNA, 25 bp, Homo sapien
tgggtgtggtgaggtgcgcctgtag

SEQ ID NO: 2926658 - DNA, 25 bp, Homo sapien
agctgggtgtggtgaggtgcgcctg

SEQ ID NO: 2926659 - DNA, 25 bp, Homo sapien
gagaatcactggaagcctggaggcg

SEQ ID NO: 2926660 - DNA, 25 bp, Homo sapien
ttaggacaggcgcaatggctcccgc

SEQ ID NO: 2926661 - DNA, 25 bp, Homo sapien
attaggacaggcgcaatggctcccg

SEQ ID NO: 2926662 - DNA, 25 bp, Homo sapien
taggacaggcgcaatggctcccgcc

SEQ ID NO: 2926663 - DNA, 25 bp, Homo sapien
tattaggacaggcgcaatggctccc

SEQ ID NO: 2926664 - DNA, 25 bp, Homo sapien
gaatcatcgggtgttctctactcca

SEQ ID NO: 2926665 - DNA, 25 bp, Homo sapien
gggcagacattaacattcaggcaag

SEQ ID NO: 2926666 - DNA, 25 bp, Homo sapien
gagctccgacttatttctgtgggca

SEQ ID NO: 2926667 - DNA, 25 bp, Homo sapien
ggtacagtctgagcagtcgaagaaa

SEQ ID NO: 2926668 - DNA, 25 bp, Homo sapien
tatgcttgtacaatgattttattag

SEQ ID NO: 2926669 - DNA, 25 bp, Homo sapien
aaatcttttgtaatttgtgggactg

SEQ ID NO: 2926670 - DNA, 25 bp, Homo sapien
tgggactgatcatgataccctgtta

SEQ ID NO: 2926671 - DNA, 25 bp, Homo sapien
tattatgtcaaaattatgcaggaat

SEQ ID NO: 2926672 - DNA, 25 bp, Homo sapien
cctaggtggatgatgactttacagc

SEQ ID NO: 2926673 - DNA, 25 bp, Homo sapien
gcttggtccaaaatggctccgttca

SEQ ID NO: 2926674 - DNA, 25 bp, Homo sapien
cagataggtcattccacattggtgc

SEQ ID NO: 2926675 - DNA, 25 bp, Homo sapien
acctgtattctgtgctaagggcagc

SEQ ID NO: 2926676 - DNA, 25 bp, Homo sapien
ggttttagatcgtatttgccatatt

SEQ ID NO: 2926677 - DNA, 25 bp, Homo sapien
tctcctgtagaacgcttatttatgt

SEQ ID NO: 2926678 - DNA, 25 bp, Homo sapien
tatgcaggacccctaaaaattaatg

SEQ ID NO: 2926679 - DNA, 25 bp, Homo sapien
tattgggtggctaattaacatacag

SEQ ID NO: 2926680 - DNA, 25 bp, Homo sapien
gataggtaataacaaactttccaca

SEQ ID NO: 2926681 - DNA, 25 bp, Homo sapien
tattggatccatacgctgataggta

SEQ ID NO: 2926682 - DNA, 25 bp, Homo sapien
gaggtcttcttagagtattggatcc

SEQ ID NO: 2926683 - DNA, 25 bp, Homo sapien
gccttccaaggagtatatgagtttc

SEQ ID NO: 2926684 - DNA, 25 bp, Homo sapien
agtgcagcgatgcaacctccgacct

SEQ ID NO: 2926685 - DNA, 25 bp, Homo sapien
gcgatgcaacctccgacctcaggtg

SEQ ID NO: 2926686 - DNA, 25 bp, Homo sapien
ttaaatgaagccttgctgtgtcgcc

SEQ ID NO: 2926687 - DNA, 25 bp, Homo sapien
tttttaaatgaagccttgctgtgtc

SEQ ID NO: 2926688 - DNA, 25 bp, Homo sapien
cgtagttaggcatttggcttgggca

SEQ ID NO: 2926689 - DNA, 25 bp, Homo sapien
gatgattcacatggctgtcactcca

SEQ ID NO: 2926690 - DNA, 25 bp, Homo sapien
gacaccgtgtaatgtgagaagagca

SEQ ID NO: 2926691 - DNA, 25 bp, Homo sapien
ttagaacgctaagggtcaccaacat

SEQ ID NO: 2926692 - DNA, 25 bp, Homo sapien
tcctggatgagcgattggtgaccct

SEQ ID NO: 2926693 - DNA, 25 bp, Homo sapien
taaaccactagatgactgccagaag

SEQ ID NO: 2926694 - DNA, 25 bp, Homo sapien
taccgttaggtatcgcatggcaagt

SEQ ID NO: 2926695 - DNA, 25 bp, Homo sapien
gccagaagctcatagaacacggagt

SEQ ID NO: 2926696 - DNA, 25 bp, Homo sapien
cacgatctcagctcagcgtaacctc

SEQ ID NO: 2926697 - DNA, 25 bp, Homo sapien
acgatctcagctcagcgtaacctct

SEQ ID NO: 2926698 - DNA, 25 bp, Homo sapien
ctcccaccaccacgctcggctaatt

SEQ ID NO: 2926699 - DNA, 25 bp, Homo sapien
tcccaccaccacgctcggctaattt

SEQ ID NO: 2926700 - DNA, 25 bp, Homo sapien
agctgccaggccgatttctaactcc

SEQ ID NO: 2926701 - DNA, 25 bp, Homo sapien
gctgccaggccgatttctaactcct

SEQ ID NO: 2926702 - DNA, 25 bp, Homo sapien
ctgccaggccgatttctaactcctg

SEQ ID NO: 2926703 - DNA, 25 bp, Homo sapien
tcttgctgggaataatggcgatttc

SEQ ID NO: 2926704 - DNA, 25 bp, Homo sapien
gatttcctcgcacacgcgcttgttc

SEQ ID NO: 2926705 - DNA, 25 bp, Homo sapien
cgcttgttcgtgtggaagtctttgc

SEQ ID NO: 2926706 - DNA, 25 bp, Homo sapien
gctgggaataatggcgatttcctcg

SEQ ID NO: 2926707 - DNA, 25 bp, Homo sapien
tggccccctctgaatccgctttatc

SEQ ID NO: 2926708 - DNA, 25 bp, Homo sapien
gccccctctgaatccgctttatcag

SEQ ID NO: 2926709 - DNA, 25 bp, Homo sapien
ggccccctctgaatccgctttatca

SEQ ID NO: 2926710 - DNA, 25 bp, Homo sapien
ccccctctgaatccgctttatcaga

SEQ ID NO: 2926711 - DNA, 25 bp, Homo sapien
gagcttagacctcgggaacacaatt

SEQ ID NO: 2926712 - DNA, 25 bp, Homo sapien
gcttcatggagatacctctctctta

SEQ ID NO: 2926713 - DNA, 25 bp, Homo sapien
aagactcaaacagctccccgaggcg

SEQ ID NO: 2926714 - DNA, 25 bp, Homo sapien
cccaggtttatcgaaaatattacag

SEQ ID NO: 2926715 - DNA, 25 bp, Homo sapien
gaaagcgcgggcaatgagatccctg

SEQ ID NO: 2926716 - DNA, 25 bp, Homo sapien
tcgaacacggaaagaggcaatgaga

SEQ ID NO: 2926717 - DNA, 25 bp, Homo sapien
cggccagtgtatgcagggtgccctc

SEQ ID NO: 2926718 - DNA, 25 bp, Homo sapien
tcggaccacagagcttcggagggaa

SEQ ID NO: 2926719 - DNA, 25 bp, Homo sapien
ctcgcagtccttcacgggaggcgga

SEQ ID NO: 2926720 - DNA, 25 bp, Homo sapien
atctcgcagtccttcacgggaggcg

SEQ ID NO: 2926721 - DNA, 25 bp, Homo sapien
ctcaatctcgcagtccttcacggga

SEQ ID NO: 2926722 - DNA, 25 bp, Homo sapien
caatctcgcagtccttcacgggagg

SEQ ID NO: 2926723 - DNA, 25 bp, Homo sapien
tatttcgtcgacagtttcagaagga

SEQ ID NO: 2926724 - DNA, 25 bp, Homo sapien
gaatagggtgaacctgtgcaagaac

SEQ ID NO: 2926725 - DNA, 25 bp, Homo sapien
ctgtcttaaagcgtacctgctggga

SEQ ID NO: 2926726 - DNA, 25 bp, Homo sapien
tgacttgggcgtggaaacatttagc

SEQ ID NO: 2926727 - DNA, 25 bp, Homo sapien
ttttgggagtactaattctggtgaa

SEQ ID NO: 2926728 - DNA, 25 bp, Homo sapien
tttttgggagtactaattctggtga

SEQ ID NO: 2926729 - DNA, 25 bp, Homo sapien
ggagtactaattctggtgaatttca

SEQ ID NO: 2926730 - DNA, 25 bp, Homo sapien
ttgggagtactaattctggtgaatt

SEQ ID NO: 2926731 - DNA, 25 bp, Homo sapien
gaaacattaatttacatcacaagaa

SEQ ID NO: 2926732 - DNA, 25 bp, Homo sapien
aacattaatttacatcacaagaaaa

SEQ ID NO: 2926733 - DNA, 25 bp, Homo sapien
aaattgaaacattaatttacatcac

SEQ ID NO: 2926734 - DNA, 25 bp, Homo sapien
ttgaaacattaatttacatcacaag

SEQ ID NO: 2926735 - DNA, 25 bp, Homo sapien
tagaggagcgccttaagggtatcgc

SEQ ID NO: 2926736 - DNA, 25 bp, Homo sapien
caggaagtgtctgatgtctagagga

SEQ ID NO: 2926737 - DNA, 25 bp, Homo sapien
agggtatcgctatttcttcagtcac

SEQ ID NO: 2926738 - DNA, 25 bp, Homo sapien
ttcagtcacctttgacctactgatg

SEQ ID NO: 2926739 - DNA, 25 bp, Homo sapien
cacatgctatatgataccattgata

SEQ ID NO: 2926740 - DNA, 25 bp, Homo sapien
aaaaaaccacatgctatatgatacc

SEQ ID NO: 2926741 - DNA, 25 bp, Homo sapien
aaatactgaggctgtaacataaatc

SEQ ID NO: 2926742 - DNA, 25 bp, Homo sapien
ctgaggctgtaacataaatcttgaa

SEQ ID NO: 2926743 - DNA, 25 bp, Homo sapien
ttttttcctagcacatcattcaaac

SEQ ID NO: 2926744 - DNA, 25 bp, Homo sapien
tttttcctagcacatcattcaaaca

SEQ ID NO: 2926745 - DNA, 25 bp, Homo sapien
ctttaaagcagtaggacttgaatct

SEQ ID NO: 2926746 - DNA, 25 bp, Homo sapien
ggacttgaatctattattataacag

SEQ ID NO: 2926747 - DNA, 25 bp, Homo sapien
gacaagaaataaaggagcgactttc

SEQ ID NO: 2926748 - DNA, 25 bp, Homo sapien
caagaaataaaggagcgactttcat

SEQ ID NO: 2926749 - DNA, 25 bp, Homo sapien
ctgacaagaaataaaggagcgactt

SEQ ID NO: 2926750 - DNA, 25 bp, Homo sapien
tgacaagaaataaaggagcgacttt

SEQ ID NO: 2926751 - DNA, 25 bp, Homo sapien
tcatcaaaactagggacaggatcag

SEQ ID NO: 2926752 - DNA, 25 bp, Homo sapien
aggatcagctgctttttgtgctttt

SEQ ID NO: 2926753 - DNA, 25 bp, Homo sapien
tgctttcatcaaaactagggacagg

SEQ ID NO: 2926754 - DNA, 25 bp, Homo sapien
caaaactagggacaggatcagctgc

SEQ ID NO: 2926755 - DNA, 25 bp, Homo sapien
aaactggtactcactgcattgtaca

SEQ ID NO: 2926756 - DNA, 25 bp, Homo sapien
aatttgccgtttcaacaaatctggc

SEQ ID NO: 2926757 - DNA, 25 bp, Homo sapien
tctggcaaaccactcattaggaagt

SEQ ID NO: 2926758 - DNA, 25 bp, Homo sapien
cacatgtacgactctctggaaactg

SEQ ID NO: 2926759 - DNA, 25 bp, Homo sapien
aatttagttaagagaggacaagagg

SEQ ID NO: 2926760 - DNA, 25 bp, Homo sapien
gatctattactttagtgttcagttc

SEQ ID NO: 2926761 - DNA, 25 bp, Homo sapien
gacaagagggtggtttcaaatgcca

SEQ ID NO: 2926762 - DNA, 25 bp, Homo sapien
cacagcagcagagttaccgcttttc

SEQ ID NO: 2926763 - DNA, 25 bp, Homo sapien
gtttactatgacactcggaagaaag

SEQ ID NO: 2926764 - DNA, 25 bp, Homo sapien
gatttgaccacctaatttcctcaag

SEQ ID NO: 2926765 - DNA, 25 bp, Homo sapien
caggatttgaccacctaatttcctc

SEQ ID NO: 2926766 - DNA, 25 bp, Homo sapien
ctcggaagaaagtacttggtgctca

SEQ ID NO: 2926767 - DNA, 25 bp, Homo sapien
ggaattaaagaagtgcatgtgctta

SEQ ID NO: 2926768 - DNA, 25 bp, Homo sapien
ctttgggaattaaagaagtgcatgt

SEQ ID NO: 2926769 - DNA, 25 bp, Homo sapien
ttgggaattaaagaagtgcatgtgc

SEQ ID NO: 2926770 - DNA, 25 bp, Homo sapien
tgggaattaaagaagtgcatgtgct

SEQ ID NO: 2926771 - DNA, 25 bp, Homo sapien
tttggaagaatctagctttatccca

SEQ ID NO: 2926772 - DNA, 25 bp, Homo sapien
tggtttctttatggctgacatcagc

SEQ ID NO: 2926773 - DNA, 25 bp, Homo sapien
agaatctagctttatcccagaagag

SEQ ID NO: 2926774 - DNA, 25 bp, Homo sapien
tgacttcctattggtcttctccaga

SEQ ID NO: 2926775 - DNA, 25 bp, Homo sapien
ttagtatatgtgctgccaaagcgag

SEQ ID NO: 2926776 - DNA, 25 bp, Homo sapien
taattttctctgtatcattccaatt

SEQ ID NO: 2926777 - DNA, 25 bp, Homo sapien
tatatgtgctgccaaagcgagcaca

SEQ ID NO: 2926778 - DNA, 25 bp, Homo sapien
tgtcatctttgcacaaggggccatg

SEQ ID NO: 2926779 - DNA, 25 bp, Homo sapien
tagggatattcatcctgtataaagc

SEQ ID NO: 2926780 - DNA, 25 bp, Homo sapien
ctatatatactgaatggggctgggc

SEQ ID NO: 2926781 - DNA, 25 bp, Homo sapien
ccacttagggcaccatgtcagcact

SEQ ID NO: 2926782 - DNA, 25 bp, Homo sapien
ggaattttccacttagggcaccatg

SEQ ID NO: 2926783 - DNA, 25 bp, Homo sapien
acagctccctgcattcctgaacttc

SEQ ID NO: 2926784 - DNA, 25 bp, Homo sapien
ccctgcattcctgaacttccagact

SEQ ID NO: 2926785 - DNA, 25 bp, Homo sapien
ttcacaagcacaaacacagctccct

SEQ ID NO: 2926786 - DNA, 25 bp, Homo sapien
ctattcacaagcacaaacacagctc

SEQ ID NO: 2926787 - DNA, 25 bp, Homo sapien
atatttagaacagcaaagagactga

SEQ ID NO: 2926788 - DNA, 25 bp, Homo sapien
gaacagcaaagagactgaacctggg

SEQ ID NO: 2926789 - DNA, 25 bp, Homo sapien
catgtactcacatgtttatatttag

SEQ ID NO: 2926790 - DNA, 25 bp, Homo sapien
gcaaagagactgaacctgggagacg

SEQ ID NO: 2926791 - DNA, 25 bp, Homo sapien
tcctataagttcactggcagtctga

SEQ ID NO: 2926792 - DNA, 25 bp, Homo sapien
cttttttatagctaactcatttcct

SEQ ID NO: 2926793 - DNA, 25 bp, Homo sapien
gtccaaagcatgtcttcagttccag

SEQ ID NO: 2926794 - DNA, 25 bp, Homo sapien
gaggttgatacttttctgtccaaag

SEQ ID NO: 2926795 - DNA, 25 bp, Homo sapien
tctctttttcccttcagattctgcc

SEQ ID NO: 2926796 - DNA, 25 bp, Homo sapien
cctttcttccaattcagctcttctt

SEQ ID NO: 2926797 - DNA, 25 bp, Homo sapien
ttcccttcagattctgcctttcttc

SEQ ID NO: 2926798 - DNA, 25 bp, Homo sapien
tcttcttttccagtctttcaaccaa

SEQ ID NO: 2926799 - DNA, 25 bp, Homo sapien
gatcaaatcccacaaacttcttgca

SEQ ID NO: 2926800 - DNA, 25 bp, Homo sapien
taaaatgacaattgctgaggaagca

SEQ ID NO: 2926801 - DNA, 25 bp, Homo sapien
aattactttatacaggccggacgca

SEQ ID NO: 2926802 - DNA, 25 bp, Homo sapien
aattctaccttatgaaacccagtga

SEQ ID NO: 2926803 - DNA, 25 bp, Homo sapien
cccactcctgttggccctgttataa

SEQ ID NO: 2926804 - DNA, 25 bp, Homo sapien
gcacaagcatacactgcagcagttt

SEQ ID NO: 2926805 - DNA, 25 bp, Homo sapien
ctttaaagtctatgccacccgagaa

SEQ ID NO: 2926806 - DNA, 25 bp, Homo sapien
gacagtattgcaaagacgactctct

SEQ ID NO: 2926807 - DNA, 25 bp, Homo sapien
cttgtttgtctacttgatgggactg

SEQ ID NO: 2926808 - DNA, 25 bp, Homo sapien
tcaactgagatagaatttgtctacc

SEQ ID NO: 2926809 - DNA, 25 bp, Homo sapien
ctacttgatgggactgagtagcttc

SEQ ID NO: 2926810 - DNA, 25 bp, Homo sapien
tttgtctaccactgcgctgggaaga

SEQ ID NO: 2926811 - DNA, 25 bp, Homo sapien
ggtgacttgcctatgtagtagctat

SEQ ID NO: 2926812 - DNA, 25 bp, Homo sapien
gacttgcctatgtagtagctattaa

SEQ ID NO: 2926813 - DNA, 25 bp, Homo sapien
ttggtgacttgcctatgtagtagct

SEQ ID NO: 2926814 - DNA, 25 bp, Homo sapien
gtgacttgcctatgtagtagctatt

SEQ ID NO: 2926815 - DNA, 25 bp, Homo sapien
gcaggaaacgtgtacgtgtagaaga

SEQ ID NO: 2926816 - DNA, 25 bp, Homo sapien
taggctggttgttaactctgttggg

SEQ ID NO: 2926817 - DNA, 25 bp, Homo sapien
ttgaagaaggtatgggtgaaatgat

SEQ ID NO: 2926818 - DNA, 25 bp, Homo sapien
ctgttgggtctgattacgatattat

SEQ ID NO: 2926819 - DNA, 25 bp, Homo sapien
tgtatgaataccagtccaaagactg

SEQ ID NO: 2926820 - DNA, 25 bp, Homo sapien
ggactgcttgatcatgtatgaatac

SEQ ID NO: 2926821 - DNA, 25 bp, Homo sapien
aaatacatgcttagccaagtgcagt

SEQ ID NO: 2926822 - DNA, 25 bp, Homo sapien
tattttgatatagaccaaggactgc

SEQ ID NO: 2926823 - DNA, 25 bp, Homo sapien
tggtgatgtaacaactttcttaggg

SEQ ID NO: 2926824 - DNA, 25 bp, Homo sapien
cactactttttggtgatggtggagg

SEQ ID NO: 2926825 - DNA, 25 bp, Homo sapien
ggaggaagtgctcgctttggtccac

SEQ ID NO: 2926826 - DNA, 25 bp, Homo sapien
gaggaacttttcttggtgatgtaac

SEQ ID NO: 2926827 - DNA, 25 bp, Homo sapien
atttgaattagttgcatttgtagat

SEQ ID NO: 2926828 - DNA, 25 bp, Homo sapien
gatttagtctgagtaatttgtttct

SEQ ID NO: 2926829 - DNA, 25 bp, Homo sapien
ttcttcagctccaacgtctttgaca

SEQ ID NO: 2926830 - DNA, 25 bp, Homo sapien
agctccaacgtctttgacatttgaa

SEQ ID NO: 2926831 - DNA, 25 bp, Homo sapien
tacaggtcgtttagttgttgccatg

SEQ ID NO: 2926832 - DNA, 25 bp, Homo sapien
aggattacaggtcgtttagttgttg

SEQ ID NO: 2926833 - DNA, 25 bp, Homo sapien
tcgtttagttgttgccatgaatgtt

SEQ ID NO: 2926834 - DNA, 25 bp, Homo sapien
ttagttgttgccatgaatgttttga

SEQ ID NO: 2926835 - DNA, 25 bp, Homo sapien
cttgatttcttcaaagcagccatca

SEQ ID NO: 2926836 - DNA, 25 bp, Homo sapien
tgaacttgatttcttcaaagcagcc

SEQ ID NO: 2926837 - DNA, 25 bp, Homo sapien
gggaaggagtactgaacttgatttc

SEQ ID NO: 2926838 - DNA, 25 bp, Homo sapien
aaggagtactgaacttgatttcttc

SEQ ID NO: 2926839 - DNA, 25 bp, Homo sapien
cagtaaaattgacctgaccacaatt

SEQ ID NO: 2926840 - DNA, 25 bp, Homo sapien
tgggcaacaggacaattgtgccact

SEQ ID NO: 2926841 - DNA, 25 bp, Homo sapien
gcaacaggacaattgtgccactaca

SEQ ID NO: 2926842 - DNA, 25 bp, Homo sapien
ttgacctgaccacaattatctcact

SEQ ID NO: 2926843 - DNA, 25 bp, Homo sapien
tttgtagagacaggatttcgccaat

SEQ ID NO: 2926844 - DNA, 25 bp, Homo sapien
gcacatgccactgcacccagttaat

SEQ ID NO: 2926845 - DNA, 25 bp, Homo sapien
aggcacatgccactgcacccagtta

SEQ ID NO: 2926846 - DNA, 25 bp, Homo sapien
tttttgtagagacaggatttcgcca

SEQ ID NO: 2926847 - DNA, 25 bp, Homo sapien
aaaaatctggtgtttatattacact

SEQ ID NO: 2926848 - DNA, 25 bp, Homo sapien
gcctaggagatagagtgagaccgta

SEQ ID NO: 2926849 - DNA, 25 bp, Homo sapien
taggagatagagtgagaccgtatct

SEQ ID NO: 2926850 - DNA, 25 bp, Homo sapien
aaaatctggtgtttatattacactt

SEQ ID NO: 2926851 - DNA, 25 bp, Homo sapien
atactacgacttagatgaaccttga

SEQ ID NO: 2926852 - DNA, 25 bp, Homo sapien
tactacgacttagatgaaccttgag

SEQ ID NO: 2926853 - DNA, 25 bp, Homo sapien
atatacatactacgacttagatgaa

SEQ ID NO: 2926854 - DNA, 25 bp, Homo sapien
tacatactacgacttagatgaacct

SEQ ID NO: 2926855 - DNA, 25 bp, Homo sapien
catctagaatctacagcagtactgt

SEQ ID NO: 2926856 - DNA, 25 bp, Homo sapien
tgggggatcacctgaagctaggagt

SEQ ID NO: 2926857 - DNA, 25 bp, Homo sapien
aagaacatctagaatctacagcagt

SEQ ID NO: 2926858 - DNA, 25 bp, Homo sapien
taagagaatttagcaacgacaaagg

SEQ ID NO: 2926859 - DNA, 25 bp, Homo sapien
caaggttacaaagtcttttacatca

SEQ ID NO: 2926860 - DNA, 25 bp, Homo sapien
tttgtaggtagctggcaacatttag

SEQ ID NO: 2926861 - DNA, 25 bp, Homo sapien
aagtaaaggatactttttctgatat

SEQ ID NO: 2926862 - DNA, 25 bp, Homo sapien
tctaatccagaattgtaagtaaagg

SEQ ID NO: 2926863 - DNA, 25 bp, Homo sapien
cactgtcacattttggaaggtctac

SEQ ID NO: 2926864 - DNA, 25 bp, Homo sapien
tgttatcaaggccatgttcagagca

SEQ ID NO: 2926865 - DNA, 25 bp, Homo sapien
cattttggaaggtctacacgtttct

SEQ ID NO: 2926866 - DNA, 25 bp, Homo sapien
catgttcagagcaaactagttgtac

SEQ ID NO: 2926867 - DNA, 25 bp, Homo sapien
aaaaatctacattccgcatttggaa

SEQ ID NO: 2926868 - DNA, 25 bp, Homo sapien
tccgcatttggaattctgtaagaag

SEQ ID NO: 2926869 - DNA, 25 bp, Homo sapien
aatggtagaataaactcaagattac

SEQ ID NO: 2926870 - DNA, 25 bp, Homo sapien
gaagctggatgaatttatgccattc

SEQ ID NO: 2926871 - DNA, 25 bp, Homo sapien
tttttgttgctgcactggcatccac

SEQ ID NO: 2926872 - DNA, 25 bp, Homo sapien
gaagatgatacagaggacaggctaa

SEQ ID NO: 2926873 - DNA, 25 bp, Homo sapien
cacagttactgatgggccacaaaag

SEQ ID NO: 2926874 - DNA, 25 bp, Homo sapien
tcagagtgtttcctagcaagacaat

SEQ ID NO: 2926875 - DNA, 25 bp, Homo sapien
gagctttgagaagtccatccatcat

SEQ ID NO: 2926876 - DNA, 25 bp, Homo sapien
tacattattgcgcttttgtgaaaca

SEQ ID NO: 2926877 - DNA, 25 bp, Homo sapien
taaaagtgcatctaagaaggacatg

SEQ ID NO: 2926878 - DNA, 25 bp, Homo sapien
gatcgttggttggatctcttcctaa

SEQ ID NO: 2926879 - DNA, 25 bp, Homo sapien
ttttagcttctcagtcttacagatg

SEQ ID NO: 2926880 - DNA, 25 bp, Homo sapien
catagagaagagatcgactcgaaaa

SEQ ID NO: 2926881 - DNA, 25 bp, Homo sapien
tatactagcttgtctattacccaca

SEQ ID NO: 2926882 - DNA, 25 bp, Homo sapien
cttacagatgtttcgaagggttggc

SEQ ID NO: 2926883 - DNA, 25 bp, Homo sapien
aattccttcaaaatagtgcaggaat

SEQ ID NO: 2926884 - DNA, 25 bp, Homo sapien
tgccaaagtattcacagtctctttt

SEQ ID NO: 2926885 - DNA, 25 bp, Homo sapien
gaattccttcaaaatagtgcaggaa

SEQ ID NO: 2926886 - DNA, 25 bp, Homo sapien
tcttaaggaccacatgataatctat

SEQ ID NO: 2926887 - DNA, 25 bp, Homo sapien
taaaatgtacatcgagaaatatact

SEQ ID NO: 2926888 - DNA, 25 bp, Homo sapien
tataaacacttgaaatagggagttc

SEQ ID NO: 2926889 - DNA, 25 bp, Homo sapien
aatgaactctaccttccagaaacag

SEQ ID NO: 2926890 - DNA, 25 bp, Homo sapien
ttagcagtgggagattgtataccaa

SEQ ID NO: 2926891 - DNA, 25 bp, Homo sapien
ataccaactttagtgacactaatgt

SEQ ID NO: 2926892 - DNA, 25 bp, Homo sapien
ccaactttagtgacactaatgttag

SEQ ID NO: 2926893 - DNA, 25 bp, Homo sapien
aaatttagcagtgggagattgtata

SEQ ID NO: 2926894 - DNA, 25 bp, Homo sapien
actgtacaatatgaggatccttaac

SEQ ID NO: 2926895 - DNA, 25 bp, Homo sapien
cacatttgtaaacaggtatgcatct

SEQ ID NO: 2926896 - DNA, 25 bp, Homo sapien
aaagttgcactgagccgataccagg

SEQ ID NO: 2926897 - DNA, 25 bp, Homo sapien
tatgcatctatactgttcaaaactg

SEQ ID NO: 2926898 - DNA, 25 bp, Homo sapien
gcaacaagagtgagatcaagagtga

SEQ ID NO: 2926899 - DNA, 25 bp, Homo sapien
aatgtgtccatattagggaggaaaa

SEQ ID NO: 2926900 - DNA, 25 bp, Homo sapien
tgagatcaagagtgagacctcttaa

SEQ ID NO: 2926901 - DNA, 25 bp, Homo sapien
gtgtccatattagggaggaaaatac

SEQ ID NO: 2926902 - DNA, 25 bp, Homo sapien
aatgtagcaagtccccatgtcttaa

SEQ ID NO: 2926903 - DNA, 25 bp, Homo sapien
tacactctagacctgttgccacaca

SEQ ID NO: 2926904 - DNA, 25 bp, Homo sapien
taacttgacagaccatcgtttgatg

SEQ ID NO: 2926905 - DNA, 25 bp, Homo sapien
actgtctacattagttgaggtcctc

SEQ ID NO: 2926906 - DNA, 25 bp, Homo sapien
gattctatactgaaggcggatcctc

SEQ ID NO: 2926907 - DNA, 25 bp, Homo sapien
tgatgattggtgactcccggactag

SEQ ID NO: 2926908 - DNA, 25 bp, Homo sapien
aattagcagtgtttgactctcagcc

SEQ ID NO: 2926909 - DNA, 25 bp, Homo sapien
ttagctctaacgtaacaccaactgt

SEQ ID NO: 2926910 - DNA, 25 bp, Homo sapien
agcttgcaactaaccccaaaggaag

SEQ ID NO: 2926911 - DNA, 25 bp, Homo sapien
caaaggatctagtcaagcttgcaac

SEQ ID NO: 2926912 - DNA, 25 bp, Homo sapien
gaggtcatccctgtactgggcctta

SEQ ID NO: 2926913 - DNA, 25 bp, Homo sapien
gagatgctttctgaccccgtcgagg

SEQ ID NO: 2926914 - DNA, 25 bp, Homo sapien
gagggatgcaattcaatcataacat

SEQ ID NO: 2926915 - DNA, 25 bp, Homo sapien
aatcataacatctcagtaaactgaa

SEQ ID NO: 2926916 - DNA, 25 bp, Homo sapien
tcttgttagattcctaagttcccca

SEQ ID NO: 2926917 - DNA, 25 bp, Homo sapien
gaataagccctacagttgaggaaat

SEQ ID NO: 2926918 - DNA, 25 bp, Homo sapien
cagagacacctgcatctgggtgaca

SEQ ID NO: 2926919 - DNA, 25 bp, Homo sapien
gggtgattcccctataggtcattca

SEQ ID NO: 2926920 - DNA, 25 bp, Homo sapien
ggctctggtcaaagcatatttctga

SEQ ID NO: 2926921 - DNA, 25 bp, Homo sapien
gataacaggctagacataatgatgg

SEQ ID NO: 2926922 - DNA, 25 bp, Homo sapien
cagtttccgcgtctatgaaagagga

SEQ ID NO: 2926923 - DNA, 25 bp, Homo sapien
tgagatcaaatcgtggcctgtcact

SEQ ID NO: 2926924 - DNA, 25 bp, Homo sapien
caaattggagtttaacacactggcc

SEQ ID NO: 2926925 - DNA, 25 bp, Homo sapien
tagctacgagactgtggacaaccta

SEQ ID NO: 2926926 - DNA, 25 bp, Homo sapien
cgttgcctgtgtccggcgcccgcag

SEQ ID NO: 2926927 - DNA, 25 bp, Homo sapien
agccgcttcttgttgcgctcgcgat

SEQ ID NO: 2926928 - DNA, 25 bp, Homo sapien
gcagtcggcgcagtgcgcgttgcct

SEQ ID NO: 2926929 - DNA, 25 bp, Homo sapien
ctgccgccccgcagtcggcgcagtg

SEQ ID NO: 2926930 - DNA, 25 bp, Homo sapien
tccacaatactgtcgtcccagaagt

SEQ ID NO: 2926931 - DNA, 25 bp, Homo sapien
cagaagtcaagtcgcacagatttaa

SEQ ID NO: 2926932 - DNA, 25 bp, Homo sapien
cgccgcagcagttgagacagatgaa

SEQ ID NO: 2926933 - DNA, 25 bp, Homo sapien
acagatttaactctgctgatgtcag

SEQ ID NO: 2926934 - DNA, 25 bp, Homo sapien
tccagtcccgcagttccatggctct

SEQ ID NO: 2926935 - DNA, 25 bp, Homo sapien
agtcccgcagttccatggctctcca

SEQ ID NO: 2926936 - DNA, 25 bp, Homo sapien
ccgcagttccatggctctccacggg

SEQ ID NO: 2926937 - DNA, 25 bp, Homo sapien
cagttccatggctctccacgggcat

SEQ ID NO: 2926938 - DNA, 25 bp, Homo sapien
ctgggactctggcttcgaacttggc

SEQ ID NO: 2926939 - DNA, 25 bp, Homo sapien
actctggcttcgaacttggccttca

SEQ ID NO: 2926940 - DNA, 25 bp, Homo sapien
gggactctggcttcgaacttggcct

SEQ ID NO: 2926941 - DNA, 25 bp, Homo sapien
ctggcttcgaacttggccttcacac

SEQ ID NO: 2926942 - DNA, 25 bp, Homo sapien
gaaggtggccattagtactcagaca

SEQ ID NO: 2926943 - DNA, 25 bp, Homo sapien
aagcctagcacagcgcacgtgttca

SEQ ID NO: 2926944 - DNA, 25 bp, Homo sapien
cacgtgttcactgagcacttggagc

SEQ ID NO: 2926945 - DNA, 25 bp, Homo sapien
tttagtgccggcaggaagcctagca

SEQ ID NO: 2926946 - DNA, 25 bp, Homo sapien
catacttagctcgaatccattgttc

SEQ ID NO: 2926947 - DNA, 25 bp, Homo sapien
tctcatacttagctcgaatccattg

SEQ ID NO: 2926948 - DNA, 25 bp, Homo sapien
ttccccatcagccataaattcccgt

SEQ ID NO: 2926949 - DNA, 25 bp, Homo sapien
taaattcccgtctctcatacttagc

SEQ ID NO: 2926950 - DNA, 25 bp, Homo sapien
gaagtacaaacttccttctcagaaa

SEQ ID NO: 2926951 - DNA, 25 bp, Homo sapien
gaggccttctcttgccagaagtaca

SEQ ID NO: 2926952 - DNA, 25 bp, Homo sapien
gtgagttgtcccttcctcgcttcca

SEQ ID NO: 2926953 - DNA, 25 bp, Homo sapien
ctgttcctttgtgaagtacttcagg

SEQ ID NO: 2926954 - DNA, 25 bp, Homo sapien
ccagagtatttttgttaagcatagt

SEQ ID NO: 2926955 - DNA, 25 bp, Homo sapien
tgaaggctaaagtgctcagagctta

SEQ ID NO: 2926956 - DNA, 25 bp, Homo sapien
ccccactctggtatcaaatattgaa

SEQ ID NO: 2926957 - DNA, 25 bp, Homo sapien
gacagaccttttagcattgctctgg

SEQ ID NO: 2926958 - DNA, 25 bp, Homo sapien
tgaactggcgtaggactgaaaaaca

SEQ ID NO: 2926959 - DNA, 25 bp, Homo sapien
gactgtggccacattggacagacct

SEQ ID NO: 2926960 - DNA, 25 bp, Homo sapien
aatgatgaggccctgtccgagagac

SEQ ID NO: 2926961 - DNA, 25 bp, Homo sapien
tggactattctagactgaactggcg

SEQ ID NO: 2926962 - DNA, 25 bp, Homo sapien
tacacaaacaggttcctggtgtggc

SEQ ID NO: 2926963 - DNA, 25 bp, Homo sapien
catgatacacaaacaggttcctggt

SEQ ID NO: 2926964 - DNA, 25 bp, Homo sapien
ttcaagtccttaatgctgatgacag

SEQ ID NO: 2926965 - DNA, 25 bp, Homo sapien
cccactttcatgatacacaaacagg

SEQ ID NO: 2926966 - DNA, 25 bp, Homo sapien
ggcggaggtggcaactccaggcatc

SEQ ID NO: 2926967 - DNA, 25 bp, Homo sapien
aggcggaggtggcaactccaggcat

SEQ ID NO: 2926968 - DNA, 25 bp, Homo sapien
tagatttttggtgcttgctcagccc

SEQ ID NO: 2926969 - DNA, 25 bp, Homo sapien
tgcttaaccacagcaactggaccag

SEQ ID NO: 2926970 - DNA, 25 bp, Homo sapien
gcttctgtgagaactaccccgccta

SEQ ID NO: 2926971 - DNA, 25 bp, Homo sapien
caaaacattccacttatcccgcagg

SEQ ID NO: 2926972 - DNA, 25 bp, Homo sapien
gagcctcgtgggctaacccgggcaa

SEQ ID NO: 2926973 - DNA, 25 bp, Homo sapien
aagcctctgacagggataaccccag

SEQ ID NO: 2926974 - DNA, 25 bp, Homo sapien
ggctaacccgggcaagcaggaagcc

SEQ ID NO: 2926975 - DNA, 25 bp, Homo sapien
tccagggaggattgtgtcagagcct

SEQ ID NO: 2926976 - DNA, 25 bp, Homo sapien
tttttaggtactgcagacgggctgc

SEQ ID NO: 2926977 - DNA, 25 bp, Homo sapien
ctgcacggagggcattgaaccagtc

SEQ ID NO: 2926978 - DNA, 25 bp, Homo sapien
aaggccatttttaggtactgcagac

SEQ ID NO: 2926979 - DNA, 25 bp, Homo sapien
tgcacggagggcattgaaccagtcc

SEQ ID NO: 2926980 - DNA, 25 bp, Homo sapien
catcaacctggaaagtctagagctt

SEQ ID NO: 2926981 - DNA, 25 bp, Homo sapien
aagtctagagcttcaaatgacagtc

SEQ ID NO: 2926982 - DNA, 25 bp, Homo sapien
cctatgctcctaggcatcaacctgg

SEQ ID NO: 2926983 - DNA, 25 bp, Homo sapien
ttgatgatggcctcctatgctccta

SEQ ID NO: 2926984 - DNA, 25 bp, Homo sapien
catgaagccttgtttgaggtagttc

SEQ ID NO: 2926985 - DNA, 25 bp, Homo sapien
tgaagccttgtttgaggtagttcct

SEQ ID NO: 2926986 - DNA, 25 bp, Homo sapien
aagccttgtttgaggtagttcctgg

SEQ ID NO: 2926987 - DNA, 25 bp, Homo sapien
ccatgaagccttgtttgaggtagtt

SEQ ID NO: 2926988 - DNA, 25 bp, Homo sapien
ataccctttgccagcttcaccctgc

SEQ ID NO: 2926989 - DNA, 25 bp, Homo sapien
ccctttgccagcttcaccctgctgc

SEQ ID NO: 2926990 - DNA, 25 bp, Homo sapien
cataccctttgccagcttcaccctg

SEQ ID NO: 2926991 - DNA, 25 bp, Homo sapien
taccctttgccagcttcaccctgct

SEQ ID NO: 2926992 - DNA, 25 bp, Homo sapien
ggagctggccagtcccactggttct

SEQ ID NO: 2926993 - DNA, 25 bp, Homo sapien
gcctcctcagtcagacatcctagtg

SEQ ID NO: 2926994 - DNA, 25 bp, Homo sapien
aggagccctcaggctctgaaggttc

SEQ ID NO: 2926995 - DNA, 25 bp, Homo sapien
cctggggcctggataggagccctca

SEQ ID NO: 2926996 - DNA, 25 bp, Homo sapien
ttaccacagatgaccaggtcagttt

SEQ ID NO: 2926997 - DNA, 25 bp, Homo sapien
cttaccacagatgaccaggtcagtt

SEQ ID NO: 2926998 - DNA, 25 bp, Homo sapien
ttcttgtaatagagcagcctccgct

SEQ ID NO: 2926999 - DNA, 25 bp, Homo sapien
gggttcttgtaatagagcagcctcc

SEQ ID NO: 2927000 - DNA, 25 bp, Homo sapien
catggcaatccagggcgaaccacct

SEQ ID NO: 2927001 - DNA, 25 bp, Homo sapien
ctcatggcaatccagggcgaaccac

SEQ ID NO: 2927002 - DNA, 25 bp, Homo sapien
gacaatggtgagtccggctttccag

SEQ ID NO: 2927003 - DNA, 25 bp, Homo sapien
aaaacctggccctgctcgaaggcat

SEQ ID NO: 2927004 - DNA, 25 bp, Homo sapien
agtgaggacaaatctccgctctggg

SEQ ID NO: 2927005 - DNA, 25 bp, Homo sapien
gggcaggtcttcgtaggcttcatat

SEQ ID NO: 2927006 - DNA, 25 bp, Homo sapien
gggctggacaggacaccccgcaaac

SEQ ID NO: 2927007 - DNA, 25 bp, Homo sapien
ctggacaggacaccccgcaaacttt

SEQ ID NO: 2927008 - DNA, 25 bp, Homo sapien
cgtcaaggggctggacaggacaccc

SEQ ID NO: 2927009 - DNA, 25 bp, Homo sapien
caggacaccccgcaaactttccagc

SEQ ID NO: 2927010 - DNA, 25 bp, Homo sapien
gtcctctgcccttgtccaaaagaac

SEQ ID NO: 2927011 - DNA, 25 bp, Homo sapien
ccttgtccaaaagaacacccctcag

SEQ ID NO: 2927012 - DNA, 25 bp, Homo sapien
tctgcccttgtccaaaagaacaccc

SEQ ID NO: 2927013 - DNA, 25 bp, Homo sapien
tgtccaaaagaacacccctcagttc

SEQ ID NO: 2927014 - DNA, 25 bp, Homo sapien
tcaggaatcttttgtggtatcaaag

SEQ ID NO: 2927015 - DNA, 25 bp, Homo sapien
gaatcttttgtggtatcaaagctga

SEQ ID NO: 2927016 - DNA, 25 bp, Homo sapien
caggaatcttttgtggtatcaaagc

SEQ ID NO: 2927017 - DNA, 25 bp, Homo sapien
atcttttgtggtatcaaagctgaac

SEQ ID NO: 2927018 - DNA, 25 bp, Homo sapien
cagaggagaccttttggcaataatg

SEQ ID NO: 2927019 - DNA, 25 bp, Homo sapien
tttggcaataatggcatgtctgtgc

SEQ ID NO: 2927020 - DNA, 25 bp, Homo sapien
gagaccttttggcaataatggcatg

SEQ ID NO: 2927021 - DNA, 25 bp, Homo sapien
gtggacagaggagaccttttggcaa

SEQ ID NO: 2927022 - DNA, 25 bp, Homo sapien
gctcagtctgtacttttccaaacac

SEQ ID NO: 2927023 - DNA, 25 bp, Homo sapien
ctgctcagtctgtacttttccaaac

SEQ ID NO: 2927024 - DNA, 25 bp, Homo sapien
gccagcagtttcctgccggagctcg

SEQ ID NO: 2927025 - DNA, 25 bp, Homo sapien
cagcagtttcctgccggagctcggc

SEQ ID NO: 2927026 - DNA, 25 bp, Homo sapien
ctgcaagggaaatgaagagggctga

SEQ ID NO: 2927027 - DNA, 25 bp, Homo sapien
tgagggaggtggccatgccaatgct

SEQ ID NO: 2927028 - DNA, 25 bp, Homo sapien
gggaggtggccatgccaatgctgtc

SEQ ID NO: 2927029 - DNA, 25 bp, Homo sapien
aaatgaagagggctgagggaggtgg

SEQ ID NO: 2927030 - DNA, 25 bp, Homo sapien
tgctgctgcggccactctctgttga

SEQ ID NO: 2927031 - DNA, 25 bp, Homo sapien
gctgctgcggccactctctgttgat

SEQ ID NO: 2927032 - DNA, 25 bp, Homo sapien
ctgctgctgcggccactctctgttg

SEQ ID NO: 2927033 - DNA, 25 bp, Homo sapien
ggtcagatgtttagcagaatgcccc

SEQ ID NO: 2927034 - DNA, 25 bp, Homo sapien
cagggccgaggtgcaaacttcttcc

SEQ ID NO: 2927035 - DNA, 25 bp, Homo sapien
gaaaggaacaacgagtcacagagca

SEQ ID NO: 2927036 - DNA, 25 bp, Homo sapien
tatctgggcagtcgagaagcttcag

SEQ ID NO: 2927037 - DNA, 25 bp, Homo sapien
agcctttacacatgcttctttctct

SEQ ID NO: 2927038 - DNA, 25 bp, Homo sapien
gagcctttacacatgcttctttctc

SEQ ID NO: 2927039 - DNA, 25 bp, Homo sapien
gaccagcacggaagtgcttcatttc

SEQ ID NO: 2927040 - DNA, 25 bp, Homo sapien
aattagcattgtgcactaaagccca

SEQ ID NO: 2927041 - DNA, 25 bp, Homo sapien
ccctctactgaccagcacggaagtg

SEQ ID NO: 2927042 - DNA, 25 bp, Homo sapien
cacccaattagcattgtgcactaaa

SEQ ID NO: 2927043 - DNA, 25 bp, Homo sapien
caaaaactggcactaaggagactcc

SEQ ID NO: 2927044 - DNA, 25 bp, Homo sapien
ggattcagggtaggctgctcattta

SEQ ID NO: 2927045 - DNA, 25 bp, Homo sapien
agaatgggcagcacactcagagaga

SEQ ID NO: 2927046 - DNA, 25 bp, Homo sapien
aaaaaagtgcagcatagagttattt

SEQ ID NO: 2927047 - DNA, 25 bp, Homo sapien
ggagtgtgcagtggtgcgatctcgg

SEQ ID NO: 2927048 - DNA, 25 bp, Homo sapien
tagctgggactacaaccacacccgg

SEQ ID NO: 2927049 - DNA, 25 bp, Homo sapien
gagtgtgcagtggtgcgatctcggc

SEQ ID NO: 2927050 - DNA, 25 bp, Homo sapien
gtagctgggactacaaccacacccg

SEQ ID NO: 2927051 - DNA, 25 bp, Homo sapien
ctcttgggtttaggcggttctcatg

SEQ ID NO: 2927052 - DNA, 25 bp, Homo sapien
acgctcggcctaacatgtcctatca

SEQ ID NO: 2927053 - DNA, 25 bp, Homo sapien
gataagaaatgatgaggtgcttgag

SEQ ID NO: 2927054 - DNA, 25 bp, Homo sapien
tgaaataaggcacactgccattaac

SEQ ID NO: 2927055 - DNA, 25 bp, Homo sapien
catgtgttaacacccatccctgtga

SEQ ID NO: 2927056 - DNA, 25 bp, Homo sapien
gacactaggttctaatgctaaatta

SEQ ID NO: 2927057 - DNA, 25 bp, Homo sapien
ttcaagtacatgtgttaacacccat

SEQ ID NO: 2927058 - DNA, 25 bp, Homo sapien
tccctgtgacactaggttctaatgc

SEQ ID NO: 2927059 - DNA, 25 bp, Homo sapien
gccaaggtttagcaaatgactatca

SEQ ID NO: 2927060 - DNA, 25 bp, Homo sapien
acccgttgggtgattacagtatgcc

SEQ ID NO: 2927061 - DNA, 25 bp, Homo sapien
tagagacagcttgtttactgatata

SEQ ID NO: 2927062 - DNA, 25 bp, Homo sapien
aattacactttaacttagagacagc

SEQ ID NO: 2927063 - DNA, 25 bp, Homo sapien
cgtcggggttgagccgggcgagtct

SEQ ID NO: 2927064 - DNA, 25 bp, Homo sapien
cttccttggcgccaccccgtctcct

SEQ ID NO: 2927065 - DNA, 25 bp, Homo sapien
ctccttccttggcgccaccccgtct

SEQ ID NO: 2927066 - DNA, 25 bp, Homo sapien
ccttcctccgatcctgctgaaaaca

SEQ ID NO: 2927067 - DNA, 25 bp, Homo sapien
tcctcggccagccacacgggaacgg

SEQ ID NO: 2927068 - DNA, 25 bp, Homo sapien
agccacacgggaacggcggagccca

SEQ ID NO: 2927069 - DNA, 25 bp, Homo sapien
gcagatgatgcagccgaggtcgtcc

SEQ ID NO: 2927070 - DNA, 25 bp, Homo sapien
gcagggcagcgtggcgggccagtcc

SEQ ID NO: 2927071 - DNA, 25 bp, Homo sapien
gcgccctggcggcaagtggggcagg

SEQ ID NO: 2927072 - DNA, 25 bp, Homo sapien
cctgcagtagcgtgttcttccgcag

SEQ ID NO: 2927073 - DNA, 25 bp, Homo sapien
tgcagtagcgtgttcttccgcaggt

SEQ ID NO: 2927074 - DNA, 25 bp, Homo sapien
ctgcagtagcgtgttcttccgcagg

SEQ ID NO: 2927075 - DNA, 25 bp, Homo sapien
ggagagggaactggagcccgggcag

SEQ ID NO: 2927076 - DNA, 25 bp, Homo sapien
gcagggtcggagcccgcctgtatct

SEQ ID NO: 2927077 - DNA, 25 bp, Homo sapien
gtcggagcccgcctgtatctcgcgt

SEQ ID NO: 2927078 - DNA, 25 bp, Homo sapien
gagcccgcctgtatctcgcgtgcgg

SEQ ID NO: 2927079 - DNA, 25 bp, Homo sapien
gagaaagagaccgaagatcgattgg

SEQ ID NO: 2927080 - DNA, 25 bp, Homo sapien
aagtgcctccgaagagcggaactcg

SEQ ID NO: 2927081 - DNA, 25 bp, Homo sapien
gcggaactcgacttttagactgaga

SEQ ID NO: 2927082 - DNA, 25 bp, Homo sapien
aagttgacaagctttcggaagatgg

SEQ ID NO: 2927083 - DNA, 25 bp, Homo sapien
tgacaacgcttagaatgggagaata

SEQ ID NO: 2927084 - DNA, 25 bp, Homo sapien
ggaaatccagatcaaaatcacagtg

SEQ ID NO: 2927085 - DNA, 25 bp, Homo sapien
tatctgtgagtcatatctaatttga

SEQ ID NO: 2927086 - DNA, 25 bp, Homo sapien
tctataaatgaccaacaagcacaag

SEQ ID NO: 2927087 - DNA, 25 bp, Homo sapien
taatcaatggagaatagactcttca

SEQ ID NO: 2927088 - DNA, 25 bp, Homo sapien
tgaccaattacctaaacgtaagcta

SEQ ID NO: 2927089 - DNA, 25 bp, Homo sapien
gacaaggatgccaagtctaatcaat

SEQ ID NO: 2927090 - DNA, 25 bp, Homo sapien
tggtaccaagacaattggatttcca

SEQ ID NO: 2927091 - DNA, 25 bp, Homo sapien
cagcataagtacagacatatagacc

SEQ ID NO: 2927092 - DNA, 25 bp, Homo sapien
gtggtaccagcataagtacagacat

SEQ ID NO: 2927093 - DNA, 25 bp, Homo sapien
taccagcataagtacagacatatag

SEQ ID NO: 2927094 - DNA, 25 bp, Homo sapien
ggtaccagcataagtacagacatat

SEQ ID NO: 2927095 - DNA, 25 bp, Homo sapien
tggaaagagggtacccgatgaccca

SEQ ID NO: 2927096 - DNA, 25 bp, Homo sapien
gagtcagaattgaagcttggagccc

SEQ ID NO: 2927097 - DNA, 25 bp, Homo sapien
catatacgttaggagcttggcagca

SEQ ID NO: 2927098 - DNA, 25 bp, Homo sapien
tgactccaccctccggtattggcgg

SEQ ID NO: 2927099 - DNA, 25 bp, Homo sapien
ctgggttctataaaactggacccag

SEQ ID NO: 2927100 - DNA, 25 bp, Homo sapien
tctataaaactggacccaggaacca

SEQ ID NO: 2927101 - DNA, 25 bp, Homo sapien
ttgtctggtccagattctgataggg

SEQ ID NO: 2927102 - DNA, 25 bp, Homo sapien
caatgtctacaagatgttccaccag

SEQ ID NO: 2927103 - DNA, 25 bp, Homo sapien
tgtcagctcctgagcaacttctgtg

SEQ ID NO: 2927104 - DNA, 25 bp, Homo sapien
cttgcccaggatgctcagttcgttg

SEQ ID NO: 2927105 - DNA, 25 bp, Homo sapien
catggaaagatccaccccagaagaa

SEQ ID NO: 2927106 - DNA, 25 bp, Homo sapien
ccatggaaagatccaccccagaaga

SEQ ID NO: 2927107 - DNA, 25 bp, Homo sapien
gccatggaaagatccaccccagaag

SEQ ID NO: 2927108 - DNA, 25 bp, Homo sapien
agccatggaaagatccaccccagaa

SEQ ID NO: 2927109 - DNA, 25 bp, Homo sapien
tcttctaggtcatggagaatatctc

SEQ ID NO: 2927110 - DNA, 25 bp, Homo sapien
tgtgcttcaggagcctctttccagg

SEQ ID NO: 2927111 - DNA, 25 bp, Homo sapien
ctttccaggtgacgctttcttgtaa

SEQ ID NO: 2927112 - DNA, 25 bp, Homo sapien
tccaggtgacgctttcttgtaattt

SEQ ID NO: 2927113 - DNA, 25 bp, Homo sapien
agcaaaccgagaagctctcctgagt

SEQ ID NO: 2927114 - DNA, 25 bp, Homo sapien
tgagcaaaccgagaagctctcctga

SEQ ID NO: 2927115 - DNA, 25 bp, Homo sapien
gagcaaaccgagaagctctcctgag

SEQ ID NO: 2927116 - DNA, 25 bp, Homo sapien
actgagcaaaccgagaagctctcct

SEQ ID NO: 2927117 - DNA, 25 bp, Homo sapien
gaggcagttggctatagttggtggc

SEQ ID NO: 2927118 - DNA, 25 bp, Homo sapien
agttggctatagttggtggccacag

SEQ ID NO: 2927119 - DNA, 25 bp, Homo sapien
ttgggaacaggcagttggctgtagt

SEQ ID NO: 2927120 - DNA, 25 bp, Homo sapien
gggaacaggcagttggctgtagttg

SEQ ID NO: 2927121 - DNA, 25 bp, Homo sapien
tcaagttaaaggttggatggatggc

SEQ ID NO: 2927122 - DNA, 25 bp, Homo sapien
caagttaaaggttggatggatggcc

SEQ ID NO: 2927123 - DNA, 25 bp, Homo sapien
gggaacataagacctggctggtaga

SEQ ID NO: 2927124 - DNA, 25 bp, Homo sapien
tgcccagtggctgcaattcctagtg

SEQ ID NO: 2927125 - DNA, 25 bp, Homo sapien
cacagctccagcgatagggttgtgg

SEQ ID NO: 2927126 - DNA, 25 bp, Homo sapien
ctgtacgggaatccttggacacctc

SEQ ID NO: 2927127 - DNA, 25 bp, Homo sapien
gagagctggctagtccccttccatt

SEQ ID NO: 2927128 - DNA, 25 bp, Homo sapien
cacacaacaagagtccatagtcctt

SEQ ID NO: 2927129 - DNA, 25 bp, Homo sapien
caagagtccatagtccttcccagga

SEQ ID NO: 2927130 - DNA, 25 bp, Homo sapien
acctggtcgcggctcatctcccagg

SEQ ID NO: 2927131 - DNA, 25 bp, Homo sapien
ggcagagatggtacactcatacaga

SEQ ID NO: 2927132 - DNA, 25 bp, Homo sapien
tccaggatgtaagccatacagccag

SEQ ID NO: 2927133 - DNA, 25 bp, Homo sapien
gaagcttctcctgattgtccactga

SEQ ID NO: 2927134 - DNA, 25 bp, Homo sapien
cctttacttgctttattatcaggta

SEQ ID NO: 2927135 - DNA, 25 bp, Homo sapien
gaaaggcacataaggtaaggtccaa

SEQ ID NO: 2927136 - DNA, 25 bp, Homo sapien
cagagtagctcacccatgcctaggt

SEQ ID NO: 2927137 - DNA, 25 bp, Homo sapien
ccagggcttttactagggattgatc

SEQ ID NO: 2927138 - DNA, 25 bp, Homo sapien
tgcacagagtattaccaaccagagt

SEQ ID NO: 2927139 - DNA, 25 bp, Homo sapien
catagttgttggcattcgaggtcac

SEQ ID NO: 2927140 - DNA, 25 bp, Homo sapien
cacggcagaggcgaataactttttc

SEQ ID NO: 2927141 - DNA, 25 bp, Homo sapien
aagttgtaaagcttggccgggtgca

SEQ ID NO: 2927142 - DNA, 25 bp, Homo sapien
ggctatagaatattccacggcagag

SEQ ID NO: 2927143 - DNA, 25 bp, Homo sapien
gacgtgccgagcgtagtcgtcctga

SEQ ID NO: 2927144 - DNA, 25 bp, Homo sapien
aggcccgagcttttggcgctgcaac

SEQ ID NO: 2927145 - DNA, 25 bp, Homo sapien
cagctgaagaaagaaacctcctatc

SEQ ID NO: 2927146 - DNA, 25 bp, Homo sapien
gctaggcccagtagtcgacggcgct

SEQ ID NO: 2927147 - DNA, 25 bp, Homo sapien
aggtgcagcttgacgggcccgttcc

SEQ ID NO: 2927148 - DNA, 25 bp, Homo sapien
ggtgcagcttgacgggcccgttcct

SEQ ID NO: 2927149 - DNA, 25 bp, Homo sapien
tcaggtgcagcttgacgggcccgtt

SEQ ID NO: 2927150 - DNA, 25 bp, Homo sapien
ctgtcaggtgcagcttgacgggccc

SEQ ID NO: 2927151 - DNA, 25 bp, Homo sapien
accaccaccttagcaaatggatcag

SEQ ID NO: 2927152 - DNA, 25 bp, Homo sapien
ccaccttagcaaatggatcaggaag

SEQ ID NO: 2927153 - DNA, 25 bp, Homo sapien
tagaatggcattgcccagatccatc

SEQ ID NO: 2927154 - DNA, 25 bp, Homo sapien
catcaaccaccaccttagcaaatgg

SEQ ID NO: 2927155 - DNA, 25 bp, Homo sapien
tatggatcttcttgtgattccatac

SEQ ID NO: 2927156 - DNA, 25 bp, Homo sapien
ttatggatcttcttgtgattccata

SEQ ID NO: 2927157 - DNA, 25 bp, Homo sapien
cttatggatcttcttgtgattccat

SEQ ID NO: 2927158 - DNA, 25 bp, Homo sapien
aaccagtgtctttgaggtggttgat

SEQ ID NO: 2927159 - DNA, 25 bp, Homo sapien
accagtgtctttgaggtggttgatg

SEQ ID NO: 2927160 - DNA, 25 bp, Homo sapien
tgtctttgaggtggttgatggcact

SEQ ID NO: 2927161 - DNA, 25 bp, Homo sapien
cagtgtctttgaggtggttgatggc

SEQ ID NO: 2927162 - DNA, 25 bp, Homo sapien
attaactggaaatgaagcatcagct

SEQ ID NO: 2927163 - DNA, 25 bp, Homo sapien
tacacaagaagttatgtttgaaccc

SEQ ID NO: 2927164 - DNA, 25 bp, Homo sapien
gtttgaacccctaccaacatactca

SEQ ID NO: 2927165 - DNA, 25 bp, Homo sapien
gcatcagctctcatttagctgtaag

SEQ ID NO: 2927166 - DNA, 25 bp, Homo sapien
tgctctttaactgccaccttaaaga

SEQ ID NO: 2927167 - DNA, 25 bp, Homo sapien
cgtaattgctctttaactgccacct

SEQ ID NO: 2927168 - DNA, 25 bp, Homo sapien
tattataccattcttatcccttcgt

SEQ ID NO: 2927169 - DNA, 25 bp, Homo sapien
tatcccttcgtaattgctctttaac

SEQ ID NO: 2927170 - DNA, 25 bp, Homo sapien
tacagttaagtagttcatagagccg

SEQ ID NO: 2927171 - DNA, 25 bp, Homo sapien
ctaatcttctaaacgcccaggttga

SEQ ID NO: 2927172 - DNA, 25 bp, Homo sapien
tctaatcttctaaacgcccaggttg

SEQ ID NO: 2927173 - DNA, 25 bp, Homo sapien
actggcctgaccctgaaagttacag

SEQ ID NO: 2927174 - DNA, 25 bp, Homo sapien
taaggaacaatgtcacccaaagcat

SEQ ID NO: 2927175 - DNA, 25 bp, Homo sapien
taaggaatttatccgtgagccttgg

SEQ ID NO: 2927176 - DNA, 25 bp, Homo sapien
gcaaaactcacagcatagtgcctgg

SEQ ID NO: 2927177 - DNA, 25 bp, Homo sapien
tcttcctgtaccaatttggtctctg

SEQ ID NO: 2927178 - DNA, 25 bp, Homo sapien
tcctgtaccaatttggtctctggac

SEQ ID NO: 2927179 - DNA, 25 bp, Homo sapien
gtaccaatttggtctctggactgaa

SEQ ID NO: 2927180 - DNA, 25 bp, Homo sapien
tgtcttcctgtaccaatttggtctc

SEQ ID NO: 2927181 - DNA, 25 bp, Homo sapien
gaatcgcttaaaccagggagacgga

SEQ ID NO: 2927182 - DNA, 25 bp, Homo sapien
agaatcgcttaaaccagggagacgg

SEQ ID NO: 2927183 - DNA, 25 bp, Homo sapien
atcgcttaaaccagggagacggagg

SEQ ID NO: 2927184 - DNA, 25 bp, Homo sapien
ttgcagtgagccaagatcacgccac

SEQ ID NO: 2927185 - DNA, 25 bp, Homo sapien
tcgtgtacttgtatttttgatttaa

SEQ ID NO: 2927186 - DNA, 25 bp, Homo sapien
aagttgtccaaaagttcatcttcgg

SEQ ID NO: 2927187 - DNA, 25 bp, Homo sapien
tcttcggcaattatgtctagatgat

SEQ ID NO: 2927188 - DNA, 25 bp, Homo sapien
tcagaagttgtccaaaagttcatct

SEQ ID NO: 2927189 - DNA, 25 bp, Homo sapien
gtctagatgatcaactacacatctt

SEQ ID NO: 2927190 - DNA, 25 bp, Homo sapien
ggtggaggttgccatgagttggaat

SEQ ID NO: 2927191 - DNA, 25 bp, Homo sapien
tggaggttgccatgagttggaatcg

SEQ ID NO: 2927192 - DNA, 25 bp, Homo sapien
aggttgccatgagttggaatcgtgc

SEQ ID NO: 2927193 - DNA, 25 bp, Homo sapien
gaggttgccatgagttggaatcgtg

SEQ ID NO: 2927194 - DNA, 25 bp, Homo sapien
aattggttcctgaagatttgactaa

SEQ ID NO: 2927195 - DNA, 25 bp, Homo sapien
tctaagcagagtccaaatttttgta

SEQ ID NO: 2927196 - DNA, 25 bp, Homo sapien
taagccaatctaagcagagtccaaa

SEQ ID NO: 2927197 - DNA, 25 bp, Homo sapien
gaaaactaagccaatctaagcagag

SEQ ID NO: 2927198 - DNA, 25 bp, Homo sapien
tgtaacaaccatataataaatcacc

SEQ ID NO: 2927199 - DNA, 25 bp, Homo sapien
ccgagtgtaacaaccatataataaa

SEQ ID NO: 2927200 - DNA, 25 bp, Homo sapien
tggccgagtgtaacaaccatataat

SEQ ID NO: 2927201 - DNA, 25 bp, Homo sapien
gagtgtaacaaccatataataaatc

SEQ ID NO: 2927202 - DNA, 25 bp, Homo sapien
tcgccctctgatcgccgatcacctc

SEQ ID NO: 2927203 - DNA, 25 bp, Homo sapien
catcgccctctgatcgccgatcacc

SEQ ID NO: 2927204 - DNA, 25 bp, Homo sapien
cctctgatcgccgatcacctctgag

SEQ ID NO: 2927205 - DNA, 25 bp, Homo sapien
cttcatcgccctctgatcgccgatc

SEQ ID NO: 2927206 - DNA, 25 bp, Homo sapien
gatgaggtagaggtccaagtaaacc

SEQ ID NO: 2927207 - DNA, 25 bp, Homo sapien
ggaggaagaagcgaatgcgcaggct

SEQ ID NO: 2927208 - DNA, 25 bp, Homo sapien
tagaggtccaagtaaaccgctagct

SEQ ID NO: 2927209 - DNA, 25 bp, Homo sapien
agcgaatgcgcaggctgaagcgcaa

SEQ ID NO: 2927210 - DNA, 25 bp, Homo sapien
ctcggccttagcgccattttcttgg

SEQ ID NO: 2927211 - DNA, 25 bp, Homo sapien
cggccttagcgccattttcttggaa

SEQ ID NO: 2927212 - DNA, 25 bp, Homo sapien
gccttagcgccattttcttggaaac

SEQ ID NO: 2927213 - DNA, 25 bp, Homo sapien
ttaactctcggccttagcgccattt

SEQ ID NO: 2927214 - DNA, 25 bp, Homo sapien
aacagcatataatgcctgtcttcaa

SEQ ID NO: 2927215 - DNA, 25 bp, Homo sapien
tacacattggagatagtggttgttg

SEQ ID NO: 2927216 - DNA, 25 bp, Homo sapien
gggcgatatcctagaaccagtcctc

SEQ ID NO: 2927217 - DNA, 25 bp, Homo sapien
gacccatcagtatcaggagcctgag

SEQ ID NO: 2927218 - DNA, 25 bp, Homo sapien
tcagccctcttcatcagcaggtcca

SEQ ID NO: 2927219 - DNA, 25 bp, Homo sapien
agccctcttcatcagcaggtccaca

SEQ ID NO: 2927220 - DNA, 25 bp, Homo sapien
cagccctcttcatcagcaggtccac

SEQ ID NO: 2927221 - DNA, 25 bp, Homo sapien
gcagtttctgcagatgctcctctct

SEQ ID NO: 2927222 - DNA, 25 bp, Homo sapien
aatacggtatattgaaagacaaaca

SEQ ID NO: 2927223 - DNA, 25 bp, Homo sapien
tagtcaacactgataacttatcaag

SEQ ID NO: 2927224 - DNA, 25 bp, Homo sapien
aaagttcaactacaggtccaaatgt

SEQ ID NO: 2927225 - DNA, 25 bp, Homo sapien
ccaaatgtttagagtcgagatgaaa

SEQ ID NO: 2927226 - DNA, 25 bp, Homo sapien
gccagcggccctgcattatttcttg

SEQ ID NO: 2927227 - DNA, 25 bp, Homo sapien
tcatttgtgccagcggccctgcatt

SEQ ID NO: 2927228 - DNA, 25 bp, Homo sapien
ttgtgccagcggccctgcattattt

SEQ ID NO: 2927229 - DNA, 25 bp, Homo sapien
catcatttgtgccagcggccctgca

SEQ ID NO: 2927230 - DNA, 25 bp, Homo sapien
agtcttccagaagtggtaaacccag

SEQ ID NO: 2927231 - DNA, 25 bp, Homo sapien
cagagtcccactgtgggtaaaaagt

SEQ ID NO: 2927232 - DNA, 25 bp, Homo sapien
ttccagttacacaaatatcagagtc

SEQ ID NO: 2927233 - DNA, 25 bp, Homo sapien
cagattagatagtcaagctgctcct

SEQ ID NO: 2927234 - DNA, 25 bp, Homo sapien
ccagtgcctgagacaccatgggaag

SEQ ID NO: 2927235 - DNA, 25 bp, Homo sapien
cccagtgcctgagacaccatgggaa

SEQ ID NO: 2927236 - DNA, 25 bp, Homo sapien
cagtgcctgagacaccatgggaagc

SEQ ID NO: 2927237 - DNA, 25 bp, Homo sapien
tcctccttccaagactaaattatga

SEQ ID NO: 2927238 - DNA, 25 bp, Homo sapien
ttccaagactaaattatgaacaaag

SEQ ID NO: 2927239 - DNA, 25 bp, Homo sapien
tccttccaagactaaattatgaaca

SEQ ID NO: 2927240 - DNA, 25 bp, Homo sapien
tatcctccttccaagactaaattat

SEQ ID NO: 2927241 - DNA, 25 bp, Homo sapien
cctagattgtgctgctgcaatccag

SEQ ID NO: 2927242 - DNA, 25 bp, Homo sapien
gcctagattgtgctgctgcaatcca

SEQ ID NO: 2927243 - DNA, 25 bp, Homo sapien
gtgagcctagattgtgctgctgcaa

SEQ ID NO: 2927244 - DNA, 25 bp, Homo sapien
gagcctagattgtgctgctgcaatc

SEQ ID NO: 2927245 - DNA, 25 bp, Homo sapien
gaacagacagacagtttggacatgt

SEQ ID NO: 2927246 - DNA, 25 bp, Homo sapien
ccaatctctaggttggtggttgtcc

SEQ ID NO: 2927247 - DNA, 25 bp, Homo sapien
gccagtagcccacatacagagagat

SEQ ID NO: 2927248 - DNA, 25 bp, Homo sapien
tcttctttaaggatgcaatgcagat

SEQ ID NO: 2927249 - DNA, 25 bp, Homo sapien
agcgagctagagattgagagcgcgg

SEQ ID NO: 2927250 - DNA, 25 bp, Homo sapien
acagccatcacagtccgagacgccg

SEQ ID NO: 2927251 - DNA, 25 bp, Homo sapien
gagagggagcgcgagcgagctagag

SEQ ID NO: 2927252 - DNA, 25 bp, Homo sapien
caccggaagtgggatcctttccacg

SEQ ID NO: 2927253 - DNA, 25 bp, Homo sapien
gagagggtctgtggagtgcaggctc

SEQ ID NO: 2927254 - DNA, 25 bp, Homo sapien
aaagggggcgttggcaaggaggctg

SEQ ID NO: 2927255 - DNA, 25 bp, Homo sapien
ggtcagcgccgagcgggagggggag

SEQ ID NO: 2927256 - DNA, 25 bp, Homo sapien
gatggggggtcagcgccgagcggga

SEQ ID NO: 2927257 - DNA, 25 bp, Homo sapien
ctgctcgtcgaagcggctgaccacg

SEQ ID NO: 2927258 - DNA, 25 bp, Homo sapien
tggacccattccaccggcctgtgcg

SEQ ID NO: 2927259 - DNA, 25 bp, Homo sapien
attccaccggcctgtgcgcggccat

SEQ ID NO: 2927260 - DNA, 25 bp, Homo sapien
gaagcggctgaccacggcctggacc

SEQ ID NO: 2927261 - DNA, 25 bp, Homo sapien
gggacgacgttgtagggcatcacaa

SEQ ID NO: 2927262 - DNA, 25 bp, Homo sapien
aagacaggccttagggttcgctcgt

SEQ ID NO: 2927263 - DNA, 25 bp, Homo sapien
gatatttcagaaccacggtttccac

SEQ ID NO: 2927264 - DNA, 25 bp, Homo sapien
tgagtgtgcacttgaagctctcggg

SEQ ID NO: 2927265 - DNA, 25 bp, Homo sapien
actcgagaatgcatcacatcctcag

SEQ ID NO: 2927266 - DNA, 25 bp, Homo sapien
cattctcactcgagaatgcatcaca

SEQ ID NO: 2927267 - DNA, 25 bp, Homo sapien
tccccaacattctcactcgagaatg

SEQ ID NO: 2927268 - DNA, 25 bp, Homo sapien
tttactccccaacattctcactcga

SEQ ID NO: 2927269 - DNA, 25 bp, Homo sapien
ctctgttgtcggtggctctgaagca

SEQ ID NO: 2927270 - DNA, 25 bp, Homo sapien
cgctccaggaccacatcccagctgg

SEQ ID NO: 2927271 - DNA, 25 bp, Homo sapien
ctagcagaatgatccgctccaggac

SEQ ID NO: 2927272 - DNA, 25 bp, Homo sapien
ctttgctctgttgtcggtggctctg

SEQ ID NO: 2927273 - DNA, 25 bp, Homo sapien
tgaaagttctcttgtcaaccaggag

SEQ ID NO: 2927274 - DNA, 25 bp, Homo sapien
cccaggatttattgtgtgaaactca

SEQ ID NO: 2927275 - DNA, 25 bp, Homo sapien
aagtcacctcctcaagctacaaaac

SEQ ID NO: 2927276 - DNA, 25 bp, Homo sapien
gaaactcaggcgataaaaagtcacc

SEQ ID NO: 2927277 - DNA, 25 bp, Homo sapien
tcttatacaactatctctcagtaca

SEQ ID NO: 2927278 - DNA, 25 bp, Homo sapien
ataaaaatgtaagcgatggctcacg

SEQ ID NO: 2927279 - DNA, 25 bp, Homo sapien
tatctctcagtacatgcagggcttt

SEQ ID NO: 2927280 - DNA, 25 bp, Homo sapien
ccggccaactcttaagattcttata

SEQ ID NO: 2927281 - DNA, 25 bp, Homo sapien
cacagaaggttctaatttgcttaga

SEQ ID NO: 2927282 - DNA, 25 bp, Homo sapien
tagaaactgggttaatgaaccacaa

SEQ ID NO: 2927283 - DNA, 25 bp, Homo sapien
catacagaactaggggagatacaca

SEQ ID NO: 2927284 - DNA, 25 bp, Homo sapien
aaataaagctctacaggaaccagtg

SEQ ID NO: 2927285 - DNA, 25 bp, Homo sapien
ttagagccttccgatacctcctgtc

SEQ ID NO: 2927286 - DNA, 25 bp, Homo sapien
agccttccgatacctcctgtccctt

SEQ ID NO: 2927287 - DNA, 25 bp, Homo sapien
gccttccgatacctcctgtcccttg

SEQ ID NO: 2927288 - DNA, 25 bp, Homo sapien
tcctttagagccttccgatacctcc

SEQ ID NO: 2927289 - DNA, 25 bp, Homo sapien
gctagatataccactctgctggtgg

SEQ ID NO: 2927290 - DNA, 25 bp, Homo sapien
caaactactatgagaactacccaag

SEQ ID NO: 2927291 - DNA, 25 bp, Homo sapien
tgtcaccacttgagatcattaagag

SEQ ID NO: 2927292 - DNA, 25 bp, Homo sapien
tacccaagagaaaccgtgtcaacag

SEQ ID NO: 2927293 - DNA, 25 bp, Homo sapien
gcatgcactatactaagccctggga

SEQ ID NO: 2927294 - DNA, 25 bp, Homo sapien
taggccctgctctcgtggaacttaa

SEQ ID NO: 2927295 - DNA, 25 bp, Homo sapien
tatagtctgctactgaaccggtaca

SEQ ID NO: 2927296 - DNA, 25 bp, Homo sapien
gccctgggagtacaacaacgaacaa

SEQ ID NO: 2927297 - DNA, 25 bp, Homo sapien
aagtctttccatgtggattagagac

SEQ ID NO: 2927298 - DNA, 25 bp, Homo sapien
gaattatcttaatgataggacacaa

SEQ ID NO: 2927299 - DNA, 25 bp, Homo sapien
gaattagatctaggctaggcactgt

SEQ ID NO: 2927300 - DNA, 25 bp, Homo sapien
aattgctatgaatcaatcaggaaaa

SEQ ID NO: 2927301 - DNA, 25 bp, Homo sapien
gagagagccgaactgagagtctaga

SEQ ID NO: 2927302 - DNA, 25 bp, Homo sapien
gagtctagaaactgagcctgtgcat

SEQ ID NO: 2927303 - DNA, 25 bp, Homo sapien
gattactggcactagaggagagagc

SEQ ID NO: 2927304 - DNA, 25 bp, Homo sapien
gacacttaatattcacccaagcaag

SEQ ID NO: 2927305 - DNA, 25 bp, Homo sapien
ccttgtgcactactgatgggaaagt

SEQ ID NO: 2927306 - DNA, 25 bp, Homo sapien
attacactaacggaaacaagccagt

SEQ ID NO: 2927307 - DNA, 25 bp, Homo sapien
ttgaggtatccagggtagtcaaatt

SEQ ID NO: 2927308 - DNA, 25 bp, Homo sapien
ctgtatgacgccacttatttgaggt

SEQ ID NO: 2927309 - DNA, 25 bp, Homo sapien
gatgatttgcatcccaagtaagacg

SEQ ID NO: 2927310 - DNA, 25 bp, Homo sapien
taacaggcaggtaccatacacagtg

SEQ ID NO: 2927311 - DNA, 25 bp, Homo sapien
gaacacaggatgatagctgcacacc

SEQ ID NO: 2927312 - DNA, 25 bp, Homo sapien
tgcacacctggtatagcaagcagcc

SEQ ID NO: 2927313 - DNA, 25 bp, Homo sapien
ttcacctgtgttttacaaacttgaa

SEQ ID NO: 2927314 - DNA, 25 bp, Homo sapien
cttcacctgtgttttacaaacttga

SEQ ID NO: 2927315 - DNA, 25 bp, Homo sapien
aaacacattatacacctcattgaat

SEQ ID NO: 2927316 - DNA, 25 bp, Homo sapien
aacacattatacacctcattgaatc

SEQ ID NO: 2927317 - DNA, 25 bp, Homo sapien
gcacaagtaccaggcactaaacaca

SEQ ID NO: 2927318 - DNA, 25 bp, Homo sapien
gagcacaagtaccaggcactaaaca

SEQ ID NO: 2927319 - DNA, 25 bp, Homo sapien
ttccaaggttgaagcgattcccctg

SEQ ID NO: 2927320 - DNA, 25 bp, Homo sapien
ctgcttccaaggttgaagcgattcc

SEQ ID NO: 2927321 - DNA, 25 bp, Homo sapien
gcttccaaggttgaagcgattcccc

SEQ ID NO: 2927322 - DNA, 25 bp, Homo sapien
cataacctctgcttccaaggttgaa

SEQ ID NO: 2927323 - DNA, 25 bp, Homo sapien
gacattccttgttgtgctcagtact

SEQ ID NO: 2927324 - DNA, 25 bp, Homo sapien
tgaggccgcttataaccaaagaaaa

SEQ ID NO: 2927325 - DNA, 25 bp, Homo sapien
gaaatattgattagacattccttgt

SEQ ID NO: 2927326 - DNA, 25 bp, Homo sapien
ctttggtatgtgtgttctgctgtcc

SEQ ID NO: 2927327 - DNA, 25 bp, Homo sapien
tttccagtgtatccaatataatcaa

SEQ ID NO: 2927328 - DNA, 25 bp, Homo sapien
cgacaggtgtgaagaaaatggcaga

SEQ ID NO: 2927329 - DNA, 25 bp, Homo sapien
cccagaggcagaattccgaagttca

SEQ ID NO: 2927330 - DNA, 25 bp, Homo sapien
tgctggtttccttcacgacaggtgt

SEQ ID NO: 2927331 - DNA, 25 bp, Homo sapien
tggtagaaatgcgactaaagactgc

SEQ ID NO: 2927332 - DNA, 25 bp, Homo sapien
gagaaagcagttactccgctacata

SEQ ID NO: 2927333 - DNA, 25 bp, Homo sapien
taacgaacagatttgtatggaacca

SEQ ID NO: 2927334 - DNA, 25 bp, Homo sapien
gccacagaaaatggtatactcccag

SEQ ID NO: 2927335 - DNA, 25 bp, Homo sapien
tcttaagatttatagccagccaggc

SEQ ID NO: 2927336 - DNA, 25 bp, Homo sapien
caggagtcgttttaattttgcacaa

SEQ ID NO: 2927337 - DNA, 25 bp, Homo sapien
tatactgtaacaattctatatcatg

SEQ ID NO: 2927338 - DNA, 25 bp, Homo sapien
tatcatgaacatcaacattgtcttc

SEQ ID NO: 2927339 - DNA, 25 bp, Homo sapien
atccacattgatatactgtaacaat

SEQ ID NO: 2927340 - DNA, 25 bp, Homo sapien
taatactagtattgcgtcacagggt

SEQ ID NO: 2927341 - DNA, 25 bp, Homo sapien
cagtgcagcagtcaagtatctaggt

SEQ ID NO: 2927342 - DNA, 25 bp, Homo sapien
catgcaaactgcatagcgcaaggcc

SEQ ID NO: 2927343 - DNA, 25 bp, Homo sapien
caaggcccggtgcagactgaaaata

SEQ ID NO: 2927344 - DNA, 25 bp, Homo sapien
tatttcattgagttgatcttcaatc

SEQ ID NO: 2927345 - DNA, 25 bp, Homo sapien
ctaagatggttattctagtcagcaa

SEQ ID NO: 2927346 - DNA, 25 bp, Homo sapien
tctctaagatggttattctagtcag

SEQ ID NO: 2927347 - DNA, 25 bp, Homo sapien
ttatttcattgagttgatcttcaat

SEQ ID NO: 2927348 - DNA, 25 bp, Homo sapien
ttattcagagtctttggcatgaagg

SEQ ID NO: 2927349 - DNA, 25 bp, Homo sapien
tgtttgatcaatccctagtttattc

SEQ ID NO: 2927350 - DNA, 25 bp, Homo sapien
tataactgctaactgcgcaaccttc

SEQ ID NO: 2927351 - DNA, 25 bp, Homo sapien
tgcgcaaccttctttagggctttaa

SEQ ID NO: 2927352 - DNA, 25 bp, Homo sapien
tatttataactgctaactgcgcaac

SEQ ID NO: 2927353 - DNA, 25 bp, Homo sapien
tgctaactgcgcaaccttctttagg

SEQ ID NO: 2927354 - DNA, 25 bp, Homo sapien
cagtctgtgggatctggtacagttt

SEQ ID NO: 2927355 - DNA, 25 bp, Homo sapien
tctgtgggatctggtacagttttgt

SEQ ID NO: 2927356 - DNA, 25 bp, Homo sapien
gccatatcagtctgtgggatctggt

SEQ ID NO: 2927357 - DNA, 25 bp, Homo sapien
catatcagtctgtgggatctggtac

SEQ ID NO: 2927358 - DNA, 25 bp, Homo sapien
ggagaatgatttgtagtggccaaac

SEQ ID NO: 2927359 - DNA, 25 bp, Homo sapien
aaactgctgctttacgtttggtgct

SEQ ID NO: 2927360 - DNA, 25 bp, Homo sapien
tcctggattatttctggacacaaga

SEQ ID NO: 2927361 - DNA, 25 bp, Homo sapien
caaccacgtctttggatatatcctg

SEQ ID NO: 2927362 - DNA, 25 bp, Homo sapien
tatgcgagagccttaccttcctggc

SEQ ID NO: 2927363 - DNA, 25 bp, Homo sapien
gaattaccagttgtcatggtgccaa

SEQ ID NO: 2927364 - DNA, 25 bp, Homo sapien
tttaagagcctcctagaattaccag

SEQ ID NO: 2927365 - DNA, 25 bp, Homo sapien
gttcagccagctaagagtatttctc

SEQ ID NO: 2927366 - DNA, 25 bp, Homo sapien
ttggtgagcccatgcatggtaatct

SEQ ID NO: 2927367 - DNA, 25 bp, Homo sapien
aggcctttggtgagcccatgcatgg

SEQ ID NO: 2927368 - DNA, 25 bp, Homo sapien
cctttggtgagcccatgcatggtaa

SEQ ID NO: 2927369 - DNA, 25 bp, Homo sapien
ggcctttggtgagcccatgcatggt

SEQ ID NO: 2927370 - DNA, 25 bp, Homo sapien
gagagatctgaccaaaaaagctagg

SEQ ID NO: 2927371 - DNA, 25 bp, Homo sapien
caaggctgaggtgactacatgcaaa

SEQ ID NO: 2927372 - DNA, 25 bp, Homo sapien
tgttctgcacagaaacaatggtgat

SEQ ID NO: 2927373 - DNA, 25 bp, Homo sapien
gaggaacagggagtgattactaacg

SEQ ID NO: 2927374 - DNA, 25 bp, Homo sapien
ctgaccatatcttctttttgatatt

SEQ ID NO: 2927375 - DNA, 25 bp, Homo sapien
tgaccatatcttctttttgatattt

SEQ ID NO: 2927376 - DNA, 25 bp, Homo sapien
gctgaccatatcttctttttgatat

SEQ ID NO: 2927377 - DNA, 25 bp, Homo sapien
acacaggcaattgcagcactttctg

SEQ ID NO: 2927378 - DNA, 25 bp, Homo sapien
tgacacaggcaattgcagcactttc

SEQ ID NO: 2927379 - DNA, 25 bp, Homo sapien
cttatacgaaagcaagaaacaaggc

SEQ ID NO: 2927380 - DNA, 25 bp, Homo sapien
caggctgactgcctcttgagaatgg

SEQ ID NO: 2927381 - DNA, 25 bp, Homo sapien
gaaacaaggcagtcaatcattagat

SEQ ID NO: 2927382 - DNA, 25 bp, Homo sapien
tggttgttgtgagggcttatacgaa

SEQ ID NO: 2927383 - DNA, 25 bp, Homo sapien
taccagcacatagtgaaatgtagaa

SEQ ID NO: 2927384 - DNA, 25 bp, Homo sapien
gtgaatttaccagcacatagtgaaa

SEQ ID NO: 2927385 - DNA, 25 bp, Homo sapien
ggagtgaatttaccagcacatagtg

SEQ ID NO: 2927386 - DNA, 25 bp, Homo sapien
gaatttaccagcacatagtgaaatg

SEQ ID NO: 2927387 - DNA, 25 bp, Homo sapien
aatacacagcatcaatcttaggcca

SEQ ID NO: 2927388 - DNA, 25 bp, Homo sapien
gttcaaccgagtgacaatacacagc

SEQ ID NO: 2927389 - DNA, 25 bp, Homo sapien
tcttaggccaccaatccaatgcgga

SEQ ID NO: 2927390 - DNA, 25 bp, Homo sapien
gctgggtgtgctccacaaccttgca

SEQ ID NO: 2927391 - DNA, 25 bp, Homo sapien
tctgcatgaattagtttcaccatgg

SEQ ID NO: 2927392 - DNA, 25 bp, Homo sapien
gaattagtttcaccatggacaagag

SEQ ID NO: 2927393 - DNA, 25 bp, Homo sapien
attagtttcaccatggacaagagaa

SEQ ID NO: 2927394 - DNA, 25 bp, Homo sapien
catgaattagtttcaccatggacaa

SEQ ID NO: 2927395 - DNA, 25 bp, Homo sapien
ttcctgagcaatctctggcatgtgt

SEQ ID NO: 2927396 - DNA, 25 bp, Homo sapien
catgtgtgactgagggaccagttgg

SEQ ID NO: 2927397 - DNA, 25 bp, Homo sapien
gctgtactgccttgggtttcgggcc

SEQ ID NO: 2927398 - DNA, 25 bp, Homo sapien
ggacgagccctgtaattaattctgc

SEQ ID NO: 2927399 - DNA, 25 bp, Homo sapien
ccacacaccaaaggaacatcatgaa

SEQ ID NO: 2927400 - DNA, 25 bp, Homo sapien
tgtgatacaaagcaagtaaacccct

SEQ ID NO: 2927401 - DNA, 25 bp, Homo sapien
tcagaatttgtacaatgttattgct

SEQ ID NO: 2927402 - DNA, 25 bp, Homo sapien
aatgacatctacctgttactcacag

SEQ ID NO: 2927403 - DNA, 25 bp, Homo sapien
aaattgcaattaattgttgagaatc

SEQ ID NO: 2927404 - DNA, 25 bp, Homo sapien
tactattgtacaaaaacgtggtaca

SEQ ID NO: 2927405 - DNA, 25 bp, Homo sapien
tgcaattaattgttgagaatcttaa

SEQ ID NO: 2927406 - DNA, 25 bp, Homo sapien
ttcaattttgctactattgtacaaa

SEQ ID NO: 2927407 - DNA, 25 bp, Homo sapien
ggattccacaaatcaatgctatcta

SEQ ID NO: 2927408 - DNA, 25 bp, Homo sapien
tccacaaatcaatgctatctaactg

SEQ ID NO: 2927409 - DNA, 25 bp, Homo sapien
catcaggattccacaaatcaatgct

SEQ ID NO: 2927410 - DNA, 25 bp, Homo sapien
caggagcatcaggattccacaaatc

SEQ ID NO: 2927411 - DNA, 25 bp, Homo sapien
cattttcctccgtgtggtgacttca

SEQ ID NO: 2927412 - DNA, 25 bp, Homo sapien
cattcatcgaaagcattggtattac

SEQ ID NO: 2927413 - DNA, 25 bp, Homo sapien
gtaaggtttaattcagctgccaagt

SEQ ID NO: 2927414 - DNA, 25 bp, Homo sapien
agtggacagcactactctagagtaa

SEQ ID NO: 2927415 - DNA, 25 bp, Homo sapien
taacctaatgcagatataaccagac

SEQ ID NO: 2927416 - DNA, 25 bp, Homo sapien
ggcattctcccataatgaatacaag

SEQ ID NO: 2927417 - DNA, 25 bp, Homo sapien
gagaaacagttatcaaagtgtcaat

SEQ ID NO: 2927418 - DNA, 25 bp, Homo sapien
aatcaaaggaaataagtctacaggt

SEQ ID NO: 2927419 - DNA, 25 bp, Homo sapien
actagttaatttcttgcagatgtaa

SEQ ID NO: 2927420 - DNA, 25 bp, Homo sapien
gactagttaatttcttgcagatgta

SEQ ID NO: 2927421 - DNA, 25 bp, Homo sapien
cattaccattccaaatattcttcca

SEQ ID NO: 2927422 - DNA, 25 bp, Homo sapien
tctctcaccattaccattccaaata

SEQ ID NO: 2927423 - DNA, 25 bp, Homo sapien
ccattaccattccaaatattcttcc

SEQ ID NO: 2927424 - DNA, 25 bp, Homo sapien
tcaccattaccattccaaatattct

SEQ ID NO: 2927425 - DNA, 25 bp, Homo sapien
agtaattcttcatgatccatggaca

SEQ ID NO: 2927426 - DNA, 25 bp, Homo sapien
cgtagtaattcttcatgatccatgg

SEQ ID NO: 2927427 - DNA, 25 bp, Homo sapien
ggctccaggagtacgtagtaattct

SEQ ID NO: 2927428 - DNA, 25 bp, Homo sapien
agagaggctccaggagtacgtagta

SEQ ID NO: 2927429 - DNA, 25 bp, Homo sapien
ctagtttggtctgggcttgtcggca

SEQ ID NO: 2927430 - DNA, 25 bp, Homo sapien
tagtttggtctgggcttgtcggcaa

SEQ ID NO: 2927431 - DNA, 25 bp, Homo sapien
tttggtctgggcttgtcggcaaatc

SEQ ID NO: 2927432 - DNA, 25 bp, Homo sapien
gtttggtctgggcttgtcggcaaat

SEQ ID NO: 2927433 - DNA, 25 bp, Homo sapien
actcttttctgaagtgctgctcttc

SEQ ID NO: 2927434 - DNA, 25 bp, Homo sapien
catcactcttttctgaagtgctgct

SEQ ID NO: 2927435 - DNA, 25 bp, Homo sapien
tcactcttttctgaagtgctgctct

SEQ ID NO: 2927436 - DNA, 25 bp, Homo sapien
gtgccatcactcttttctgaagtgc

SEQ ID NO: 2927437 - DNA, 25 bp, Homo sapien
gatagttaaggattagctttgttgc

SEQ ID NO: 2927438 - DNA, 25 bp, Homo sapien
attttgcatgtgtatcttcccaagc

SEQ ID NO: 2927439 - DNA, 25 bp, Homo sapien
gttcccattttgcatgtgtatcttc

SEQ ID NO: 2927440 - DNA, 25 bp, Homo sapien
ttggcttttggatagttaaggatta

SEQ ID NO: 2927441 - DNA, 25 bp, Homo sapien
agaacccttacgttcactgactgga

SEQ ID NO: 2927442 - DNA, 25 bp, Homo sapien
tagaacccttacgttcactgactgg

SEQ ID NO: 2927443 - DNA, 25 bp, Homo sapien
tgttaaatagcattggatacagagc

SEQ ID NO: 2927444 - DNA, 25 bp, Homo sapien
catagaacccttacgttcactgact

SEQ ID NO: 2927445 - DNA, 25 bp, Homo sapien
gtatgattatctagcaagttcttca

SEQ ID NO: 2927446 - DNA, 25 bp, Homo sapien
ttgccatcattacttcaactaattg

SEQ ID NO: 2927447 - DNA, 25 bp, Homo sapien
gccatcattacttcaactaattgac

SEQ ID NO: 2927448 - DNA, 25 bp, Homo sapien
catcattacttcaactaattgacac

SEQ ID NO: 2927449 - DNA, 25 bp, Homo sapien
cattacttcaactaattgacacagt

SEQ ID NO: 2927450 - DNA, 25 bp, Homo sapien
gatgttcccataacccagtctgtca

SEQ ID NO: 2927451 - DNA, 25 bp, Homo sapien
cagtctgtcaggtattctaccatct

SEQ ID NO: 2927452 - DNA, 25 bp, Homo sapien
acatcatcatctgctgcttggtttg

SEQ ID NO: 2927453 - DNA, 25 bp, Homo sapien
tgtcaggtattctaccatcttattc

SEQ ID NO: 2927454 - DNA, 25 bp, Homo sapien
actactgcttccatgcttgcctggt

SEQ ID NO: 2927455 - DNA, 25 bp, Homo sapien
tactgcttccatgcttgcctggtcc

SEQ ID NO: 2927456 - DNA, 25 bp, Homo sapien
ttccatgcttgcctggtccaaatct

SEQ ID NO: 2927457 - DNA, 25 bp, Homo sapien
gaaactactgcttccatgcttgcct

SEQ ID NO: 2927458 - DNA, 25 bp, Homo sapien
gaaataactgtgatttggcttccat

SEQ ID NO: 2927459 - DNA, 25 bp, Homo sapien
ttaagaaataactgtgatttggctt

SEQ ID NO: 2927460 - DNA, 25 bp, Homo sapien
agaaataactgtgatttggcttcca

SEQ ID NO: 2927461 - DNA, 25 bp, Homo sapien
aagaaataactgtgatttggcttcc

SEQ ID NO: 2927462 - DNA, 25 bp, Homo sapien
attgcaaggaccgtacagtgcctca

SEQ ID NO: 2927463 - DNA, 25 bp, Homo sapien
cactgtctacgttggcattgagtaa

SEQ ID NO: 2927464 - DNA, 25 bp, Homo sapien
caaggaccgtacagtgcctcagtga

SEQ ID NO: 2927465 - DNA, 25 bp, Homo sapien
agtgcatgagaccactgtctacgtt

SEQ ID NO: 2927466 - DNA, 25 bp, Homo sapien
tgaaggatttttgtcagaacttcca

SEQ ID NO: 2927467 - DNA, 25 bp, Homo sapien
caatctctcaaaccgatcagccaat

SEQ ID NO: 2927468 - DNA, 25 bp, Homo sapien
gttccaccaatctctcaaaccgatc

SEQ ID NO: 2927469 - DNA, 25 bp, Homo sapien
tcacccatcattgtgaccagttcca

SEQ ID NO: 2927470 - DNA, 25 bp, Homo sapien
taaatgccgagaatcaaacagagta

SEQ ID NO: 2927471 - DNA, 25 bp, Homo sapien
ggccaagctgttgcctcggaagaga

SEQ ID NO: 2927472 - DNA, 25 bp, Homo sapien
ctcggaagagagtctgcatggagtc

SEQ ID NO: 2927473 - DNA, 25 bp, Homo sapien
agagtaaatgccgagaatcaaacag

SEQ ID NO: 2927474 - DNA, 25 bp, Homo sapien
cacatacacacaaaatgaatgatac

SEQ ID NO: 2927475 - DNA, 25 bp, Homo sapien
acacatacacacaaaatgaatgata

SEQ ID NO: 2927476 - DNA, 25 bp, Homo sapien
tacacacaaaatgaatgatacaaac

SEQ ID NO: 2927477 - DNA, 25 bp, Homo sapien
catacacacaaaatgaatgatacaa

SEQ ID NO: 2927478 - DNA, 25 bp, Homo sapien
caaagctaacatgttgccaatcaga

SEQ ID NO: 2927479 - DNA, 25 bp, Homo sapien
tggtaggatccacttcaaagctaac

SEQ ID NO: 2927480 - DNA, 25 bp, Homo sapien
tcacaattcgtaataaaggatccag

SEQ ID NO: 2927481 - DNA, 25 bp, Homo sapien
gccaatcagaggatgtgatcacaat

SEQ ID NO: 2927482 - DNA, 25 bp, Homo sapien
aagcccactaaaggaattctccctg

SEQ ID NO: 2927483 - DNA, 25 bp, Homo sapien
tacatttaacactgctaagcaactg

SEQ ID NO: 2927484 - DNA, 25 bp, Homo sapien
gaagtttctcttgatataactacaa

SEQ ID NO: 2927485 - DNA, 25 bp, Homo sapien
cagtggtgcccagactactgataag

SEQ ID NO: 2927486 - DNA, 25 bp, Homo sapien
aaaggcagtctaggcccacaaggac

SEQ ID NO: 2927487 - DNA, 25 bp, Homo sapien
acttgaaaggcagtctaggcccaca

SEQ ID NO: 2927488 - DNA, 25 bp, Homo sapien
cttggggtggacctagtgagacagc

SEQ ID NO: 2927489 - DNA, 25 bp, Homo sapien
caccaagagctaaagtgccctgagg

SEQ ID NO: 2927490 - DNA, 25 bp, Homo sapien
tcaatcattatgagttggtcacaat

SEQ ID NO: 2927491 - DNA, 25 bp, Homo sapien
tgcccggcccagtgttgctaactct

SEQ ID NO: 2927492 - DNA, 25 bp, Homo sapien
ttatcagtaccacctctaaactctg

SEQ ID NO: 2927493 - DNA, 25 bp, Homo sapien
ccgcaggcagacttactaggtttaa

SEQ ID NO: 2927494 - DNA, 25 bp, Homo sapien
aggaggaactgatgatggcatggaa

SEQ ID NO: 2927495 - DNA, 25 bp, Homo sapien
catctgaaggaggttccgctggttt

SEQ ID NO: 2927496 - DNA, 25 bp, Homo sapien
cagtggcacacacttcgaagttgag

SEQ ID NO: 2927497 - DNA, 25 bp, Homo sapien
ccgctggttttcctcaaggctctct

SEQ ID NO: 2927498 - DNA, 25 bp, Homo sapien
gactcttgattggactagcctaggc

SEQ ID NO: 2927499 - DNA, 25 bp, Homo sapien
tcaacatttccccagtaggtcccaa

SEQ ID NO: 2927500 - DNA, 25 bp, Homo sapien
taacgtctctaagcaactgaagccg

SEQ ID NO: 2927501 - DNA, 25 bp, Homo sapien
catgtaatcatgtagtcagtcccca

SEQ ID NO: 2927502 - DNA, 25 bp, Homo sapien
tagctttattcagtagggagtggca

SEQ ID NO: 2927503 - DNA, 25 bp, Homo sapien
tgtagctttattcagtagggagtgg

SEQ ID NO: 2927504 - DNA, 25 bp, Homo sapien
tattcagtagggagtggcaagttgc

SEQ ID NO: 2927505 - DNA, 25 bp, Homo sapien
ctttattcagtagggagtggcaagt

SEQ ID NO: 2927506 - DNA, 25 bp, Homo sapien
ggctcagcctgataagtcactgtga

SEQ ID NO: 2927507 - DNA, 25 bp, Homo sapien
aagacagtcagcgtttcctaaggcc

SEQ ID NO: 2927508 - DNA, 25 bp, Homo sapien
tatgcctgagactgcctagataaaa

SEQ ID NO: 2927509 - DNA, 25 bp, Homo sapien
ggatatccaatgcaacaaatgccca

SEQ ID NO: 2927510 - DNA, 25 bp, Homo sapien
acaaggaaatttgtaatggttatca

SEQ ID NO: 2927511 - DNA, 25 bp, Homo sapien
attatttaaaccatggagggatggg

SEQ ID NO: 2927512 - DNA, 25 bp, Homo sapien
ccatggagggatgggaattcttggg

SEQ ID NO: 2927513 - DNA, 25 bp, Homo sapien
ctattatttaaaccatggagggatg

SEQ ID NO: 2927514 - DNA, 25 bp, Homo sapien
tggagggatgggaattcttggggac

SEQ ID NO: 2927515 - DNA, 25 bp, Homo sapien
cctactgcaccgatgctgttctgag

SEQ ID NO: 2927516 - DNA, 25 bp, Homo sapien
tacggtgagacaatggcaggattga

SEQ ID NO: 2927517 - DNA, 25 bp, Homo sapien
actgcaccgatgctgttctgaggga

SEQ ID NO: 2927518 - DNA, 25 bp, Homo sapien
tcatacggtgagacaatggcaggat

SEQ ID NO: 2927519 - DNA, 25 bp, Homo sapien
tgcgtgctgcatcaaagttgctttt

SEQ ID NO: 2927520 - DNA, 25 bp, Homo sapien
ctgcgtgctgcatcaaagttgcttt

SEQ ID NO: 2927521 - DNA, 25 bp, Homo sapien
ttatgaaggaaagactatgatttac

SEQ ID NO: 2927522 - DNA, 25 bp, Homo sapien
ccagagtagacgatgtaaagcaagc

SEQ ID NO: 2927523 - DNA, 25 bp, Homo sapien
gttccagagtagacgatgtaaagca

SEQ ID NO: 2927524 - DNA, 25 bp, Homo sapien
tccagagtagacgatgtaaagcaag

SEQ ID NO: 2927525 - DNA, 25 bp, Homo sapien
ggatctataacaatctgcaagccat

SEQ ID NO: 2927526 - DNA, 25 bp, Homo sapien
ttcttcagagtcaaatgccaacgct

SEQ ID NO: 2927527 - DNA, 25 bp, Homo sapien
ttcctacgaattggctgttcttcag

SEQ ID NO: 2927528 - DNA, 25 bp, Homo sapien
caacgctaatctgaacttctttgga

SEQ ID NO: 2927529 - DNA, 25 bp, Homo sapien
tgttacacaagagactaataagagc

SEQ ID NO: 2927530 - DNA, 25 bp, Homo sapien
ttatataactagatgggacagcaag

SEQ ID NO: 2927531 - DNA, 25 bp, Homo sapien
gcaccaaaaagacctcaggaccatg

SEQ ID NO: 2927532 - DNA, 25 bp, Homo sapien
cataggaatttggtccctttacaag

SEQ ID NO: 2927533 - DNA, 25 bp, Homo sapien
catcttatcaaaaggtcgtcttcca

SEQ ID NO: 2927534 - DNA, 25 bp, Homo sapien
ttgccatcttatcaaaaggtcgtct

SEQ ID NO: 2927535 - DNA, 25 bp, Homo sapien
gccatcttatcaaaaggtcgtcttc

SEQ ID NO: 2927536 - DNA, 25 bp, Homo sapien
tgccatcttatcaaaaggtcgtctt

SEQ ID NO: 2927537 - DNA, 25 bp, Homo sapien
ctagtcataaattcctcaaactttg

SEQ ID NO: 2927538 - DNA, 25 bp, Homo sapien
tagtcataaattcctcaaactttga

SEQ ID NO: 2927539 - DNA, 25 bp, Homo sapien
tcagaattttaaaaatattaatgga

SEQ ID NO: 2927540 - DNA, 25 bp, Homo sapien
tgctggtaccaggtcagaattttaa

SEQ ID NO: 2927541 - DNA, 25 bp, Homo sapien
gctggtaccaggtcagaattttaaa

SEQ ID NO: 2927542 - DNA, 25 bp, Homo sapien
cttatgtcttgggaagagattgcat

SEQ ID NO: 2927543 - DNA, 25 bp, Homo sapien
agagattgcattagctcagcccatc

SEQ ID NO: 2927544 - DNA, 25 bp, Homo sapien
ttcttttacacctagtatttctatg

SEQ ID NO: 2927545 - DNA, 25 bp, Homo sapien
tcttgggaagagattgcattagctc

SEQ ID NO: 2927546 - DNA, 25 bp, Homo sapien
aaataggattcccagctttggaagt

SEQ ID NO: 2927547 - DNA, 25 bp, Homo sapien
tcccagcttggtagaaaatacttaa

SEQ ID NO: 2927548 - DNA, 25 bp, Homo sapien
ccagctttggaagtcccagcttggt

SEQ ID NO: 2927549 - DNA, 25 bp, Homo sapien
ctccgtgcaacataataaaaaatag

SEQ ID NO: 2927550 - DNA, 25 bp, Homo sapien
tgagggcagcatgaacaagcaccgt

SEQ ID NO: 2927551 - DNA, 25 bp, Homo sapien
gcagaactaggtctaaacatggtcc

SEQ ID NO: 2927552 - DNA, 25 bp, Homo sapien
gaaagcaaggcaagcatcataccta

SEQ ID NO: 2927553 - DNA, 25 bp, Homo sapien
gccagcaagctgactaacaatgtaa

SEQ ID NO: 2927554 - DNA, 25 bp, Homo sapien
ggtgtgggataaggagtggtatggg

SEQ ID NO: 2927555 - DNA, 25 bp, Homo sapien
caagcaaaataccatgtttgccttt

SEQ ID NO: 2927556 - DNA, 25 bp, Homo sapien
agagcgagtgagcaacagtgacaga

SEQ ID NO: 2927557 - DNA, 25 bp, Homo sapien
tatgaaagaagtatgcactacctta

SEQ ID NO: 2927558 - DNA, 25 bp, Homo sapien
ctcaaaatgacctcgagtcccaaga

SEQ ID NO: 2927559 - DNA, 25 bp, Homo sapien
aatcccagaatgaaccccaatcctg

SEQ ID NO: 2927560 - DNA, 25 bp, Homo sapien
ctgaatcccgggaccagacctaatc

SEQ ID NO: 2927561 - DNA, 25 bp, Homo sapien
tcctgggataagcccagatctcaaa

SEQ ID NO: 2927562 - DNA, 25 bp, Homo sapien
cattccggggacaaacttcaacatc

SEQ ID NO: 2927563 - DNA, 25 bp, Homo sapien
catcaacaacctcaaattctatggc

SEQ ID NO: 2927564 - DNA, 25 bp, Homo sapien
tcttcatgtttgttaacattccggg

SEQ ID NO: 2927565 - DNA, 25 bp, Homo sapien
ggcagtatccaatcctgcgtcaagc

SEQ ID NO: 2927566 - DNA, 25 bp, Homo sapien
agaaaataggtcttgtgtcagcaga

SEQ ID NO: 2927567 - DNA, 25 bp, Homo sapien
tgtttttgccttcagttggtagccc

SEQ ID NO: 2927568 - DNA, 25 bp, Homo sapien
ttggtagccctcaatagaaaatagg

SEQ ID NO: 2927569 - DNA, 25 bp, Homo sapien
cacaattaaggatatatgcttgcct

SEQ ID NO: 2927570 - DNA, 25 bp, Homo sapien
cagcagccaggaaagtagagatgaa

SEQ ID NO: 2927571 - DNA, 25 bp, Homo sapien
tatcaaaaggcttccgatcaacagt

SEQ ID NO: 2927572 - DNA, 25 bp, Homo sapien
ccattgcgtggagattcagtgcccc

SEQ ID NO: 2927573 - DNA, 25 bp, Homo sapien
tggtaccacctaactatcagaatgc

SEQ ID NO: 2927574 - DNA, 25 bp, Homo sapien
ctgtctacgctaaaaagccactttt

SEQ ID NO: 2927575 - DNA, 25 bp, Homo sapien
agtggctaagactatacaggtgtgt

SEQ ID NO: 2927576 - DNA, 25 bp, Homo sapien
gagccactgaagctgacctcatttc

SEQ ID NO: 2927577 - DNA, 25 bp, Homo sapien
taggttacaaacctagtagcataaa

SEQ ID NO: 2927578 - DNA, 25 bp, Homo sapien
gcatccttctacagacattacccaa

SEQ ID NO: 2927579 - DNA, 25 bp, Homo sapien
caagtagagtttaaagcatccttct

SEQ ID NO: 2927580 - DNA, 25 bp, Homo sapien
taatgtcccatgataaaggaagggc

SEQ ID NO: 2927581 - DNA, 25 bp, Homo sapien
tcagcatagctgaagcaccaagtag

SEQ ID NO: 2927582 - DNA, 25 bp, Homo sapien
ctggactcaagtgactctcccaacc

SEQ ID NO: 2927583 - DNA, 25 bp, Homo sapien
aagtgactctcccaacctcagtctc

SEQ ID NO: 2927584 - DNA, 25 bp, Homo sapien
gcttgatctcagcttgctgcagcat

SEQ ID NO: 2927585 - DNA, 25 bp, Homo sapien
tctcagcttgctgcagcatcaacct

SEQ ID NO: 2927586 - DNA, 25 bp, Homo sapien
aaaaactgaatgcatacgtccacac

SEQ ID NO: 2927587 - DNA, 25 bp, Homo sapien
taaacactgaggtaccatatgactc

SEQ ID NO: 2927588 - DNA, 25 bp, Homo sapien
tccactcctagatatgtatctaaaa

SEQ ID NO: 2927589 - DNA, 25 bp, Homo sapien
cacaaacgcttatatattgtatgaa

SEQ ID NO: 2927590 - DNA, 25 bp, Homo sapien
caaaggtgactcttctgagatgaac

SEQ ID NO: 2927591 - DNA, 25 bp, Homo sapien
gaactaagtgcatcacctccaaagg

SEQ ID NO: 2927592 - DNA, 25 bp, Homo sapien
tgaacaacgttcatttggatgcatt

SEQ ID NO: 2927593 - DNA, 25 bp, Homo sapien
cctaaaatgttgtgctcaaaggcag

SEQ ID NO: 2927594 - DNA, 25 bp, Homo sapien
gctctcatcaccacactctactaat

SEQ ID NO: 2927595 - DNA, 25 bp, Homo sapien
tctcatcaccacactctactaattt

SEQ ID NO: 2927596 - DNA, 25 bp, Homo sapien
ctctcatcaccacactctactaatt

SEQ ID NO: 2927597 - DNA, 25 bp, Homo sapien
tggccaaccacgtaattgagaaatg

SEQ ID NO: 2927598 - DNA, 25 bp, Homo sapien
tattggcacaattctttgggaaagc

SEQ ID NO: 2927599 - DNA, 25 bp, Homo sapien
taatatatgggaatatggccaacca

SEQ ID NO: 2927600 - DNA, 25 bp, Homo sapien
cattatgctgaaacaaccagcctga

SEQ ID NO: 2927601 - DNA, 25 bp, Homo sapien
tataaataggttccacaaggaagca

SEQ ID NO: 2927602 - DNA, 25 bp, Homo sapien
gaatggcatgggcacacttatacat

SEQ ID NO: 2927603 - DNA, 25 bp, Homo sapien
aaacccttcacagtgtcttggccca

SEQ ID NO: 2927604 - DNA, 25 bp, Homo sapien
cacagggccgattttgggatttgaa

SEQ ID NO: 2927605 - DNA, 25 bp, Homo sapien
gaaacaacgtttggtgccactctaa

SEQ ID NO: 2927606 - DNA, 25 bp, Homo sapien
taagtatcactagtggcatgccaaa

SEQ ID NO: 2927607 - DNA, 25 bp, Homo sapien
gatagggactccatgttctacccaa

SEQ ID NO: 2927608 - DNA, 25 bp, Homo sapien
tgtggtaactcaacccaaagtgacc

SEQ ID NO: 2927609 - DNA, 25 bp, Homo sapien
cccctgaaaagctgtgtataaaatt

SEQ ID NO: 2927610 - DNA, 25 bp, Homo sapien
tctgaaatctgctcagagcctatgt

SEQ ID NO: 2927611 - DNA, 25 bp, Homo sapien
ttccatttcaaagaccagggtggag

SEQ ID NO: 2927612 - DNA, 25 bp, Homo sapien
tataaaatggcaactgatagtcaat

SEQ ID NO: 2927613 - DNA, 25 bp, Homo sapien
tcaaaattgggcaggtagatctcca

SEQ ID NO: 2927614 - DNA, 25 bp, Homo sapien
gctgccatactaattggtgtacttc

SEQ ID NO: 2927615 - DNA, 25 bp, Homo sapien
gaagcacatacttctgctggacaac

SEQ ID NO: 2927616 - DNA, 25 bp, Homo sapien
ctgatggagaaacccctgacatttg

SEQ ID NO: 2927617 - DNA, 25 bp, Homo sapien
gtataccaatatctaacaccctaag

SEQ ID NO: 2927618 - DNA, 25 bp, Homo sapien
caactagttctcatggttagacagg

SEQ ID NO: 2927619 - DNA, 25 bp, Homo sapien
gttgcaaattgtctcagtagaactc

SEQ ID NO: 2927620 - DNA, 25 bp, Homo sapien
caattgagaacaggaaaggttaagc

SEQ ID NO: 2927621 - DNA, 25 bp, Homo sapien
cggttctggcacaagattagcatga

SEQ ID NO: 2927622 - DNA, 25 bp, Homo sapien
tgtgatactgccaagttacccaaca

SEQ ID NO: 2927623 - DNA, 25 bp, Homo sapien
tattagtgccactacttagagctgt

SEQ ID NO: 2927624 - DNA, 25 bp, Homo sapien
tgtgatagaaagaaacggttctggc

SEQ ID NO: 2927625 - DNA, 25 bp, Homo sapien
tcaccagagagcttctaccacaagg

SEQ ID NO: 2927626 - DNA, 25 bp, Homo sapien
tgagattgtgcaccagtacatccag

SEQ ID NO: 2927627 - DNA, 25 bp, Homo sapien
tacatccaggagtaacacaaagcac

SEQ ID NO: 2927628 - DNA, 25 bp, Homo sapien
aataagccagccagcgagcatagta

SEQ ID NO: 2927629 - DNA, 25 bp, Homo sapien
aaagcaaactatacccgtctgtggg

SEQ ID NO: 2927630 - DNA, 25 bp, Homo sapien
caatggcgattttctggcaagcggt

SEQ ID NO: 2927631 - DNA, 25 bp, Homo sapien
caaaaaggatgtctgtgcggaaaac

SEQ ID NO: 2927632 - DNA, 25 bp, Homo sapien
tatggcccgctgaatcagacacttg

SEQ ID NO: 2927633 - DNA, 25 bp, Homo sapien
caaccaccacagtaaaattgcgttc

SEQ ID NO: 2927634 - DNA, 25 bp, Homo sapien
ctttgccttcagaaagacacagtca

SEQ ID NO: 2927635 - DNA, 25 bp, Homo sapien
aattgcgttcacaaatacacttaca

SEQ ID NO: 2927636 - DNA, 25 bp, Homo sapien
cctttgccttcagaaagacacagtc

SEQ ID NO: 2927637 - DNA, 25 bp, Homo sapien
gttataatcagattttgaccaagca

SEQ ID NO: 2927638 - DNA, 25 bp, Homo sapien
agacaagaaaagaagtggtttatca

SEQ ID NO: 2927639 - DNA, 25 bp, Homo sapien
aagtctattctgctttaaaaagaag

SEQ ID NO: 2927640 - DNA, 25 bp, Homo sapien
gtctattctgctttaaaaagaagac

SEQ ID NO: 2927641 - DNA, 25 bp, Homo sapien
gaaaagaagtggtttatcaaaatca

SEQ ID NO: 2927642 - DNA, 25 bp, Homo sapien
caagatctcatgatctctgcagcct

SEQ ID NO: 2927643 - DNA, 25 bp, Homo sapien
ggtgatgacaggatgtttgacagtt

SEQ ID NO: 2927644 - DNA, 25 bp, Homo sapien
gtgttcagcccatacctagttctta

SEQ ID NO: 2927645 - DNA, 25 bp, Homo sapien
tcagtcatgttaaacttgaggtgat

SEQ ID NO: 2927646 - DNA, 25 bp, Homo sapien
aactccttaggcgaatagtctggta

SEQ ID NO: 2927647 - DNA, 25 bp, Homo sapien
tctggtaggaatgacccatctggag

SEQ ID NO: 2927648 - DNA, 25 bp, Homo sapien
gaaatagacaaactggaaccctggc

SEQ ID NO: 2927649 - DNA, 25 bp, Homo sapien
cacagtgaggaccatgaaaaagccc

SEQ ID NO: 2927650 - DNA, 25 bp, Homo sapien
agtcagtaagacatggtatatcagc

SEQ ID NO: 2927651 - DNA, 25 bp, Homo sapien
cagtaagacatggtatatcagcaaa

SEQ ID NO: 2927652 - DNA, 25 bp, Homo sapien
ggtatatcagcaaatcaccattgat

SEQ ID NO: 2927653 - DNA, 25 bp, Homo sapien
taaagtcagtaagacatggtatatc

SEQ ID NO: 2927654 - DNA, 25 bp, Homo sapien
tatagactgcggagacgttgtcgta

SEQ ID NO: 2927655 - DNA, 25 bp, Homo sapien
taaagcgattgctaggcccggtatg

SEQ ID NO: 2927656 - DNA, 25 bp, Homo sapien
tcagcagccgctcatgatacttggt

SEQ ID NO: 2927657 - DNA, 25 bp, Homo sapien
gatacttggtgtactccctgaccca

SEQ ID NO: 2927658 - DNA, 25 bp, Homo sapien
gggacatcttttggccgaatcttgg

SEQ ID NO: 2927659 - DNA, 25 bp, Homo sapien
tagaaagactgattgccctaggact

SEQ ID NO: 2927660 - DNA, 25 bp, Homo sapien
ccagcgggtccggatatgaatgata

SEQ ID NO: 2927661 - DNA, 25 bp, Homo sapien
cgtaaactcgggtcagaactgccta

SEQ ID NO: 2927662 - DNA, 25 bp, Homo sapien
taaaggtacaagttaaggcacacag

SEQ ID NO: 2927663 - DNA, 25 bp, Homo sapien
gttgttggcagggatacataaacct

SEQ ID NO: 2927664 - DNA, 25 bp, Homo sapien
gatgtctctagtaactggccctcga

SEQ ID NO: 2927665 - DNA, 25 bp, Homo sapien
tccaaaaattctaacgtgaggtgtg

SEQ ID NO: 2927666 - DNA, 25 bp, Homo sapien
tggtggatttctcaatgtggcctac

SEQ ID NO: 2927667 - DNA, 25 bp, Homo sapien
gactctgggccctgtattatgtgcc

SEQ ID NO: 2927668 - DNA, 25 bp, Homo sapien
tgtgtaaagtaccaaactcttgccg

SEQ ID NO: 2927669 - DNA, 25 bp, Homo sapien
tgtggcctaccaaaaagttccttca

SEQ ID NO: 2927670 - DNA, 25 bp, Homo sapien
catacttggtatcttatggtgtacg

SEQ ID NO: 2927671 - DNA, 25 bp, Homo sapien
gatggctgattcttgcacatgtatg

SEQ ID NO: 2927672 - DNA, 25 bp, Homo sapien
taaatgatttaatctctccctcatc

SEQ ID NO: 2927673 - DNA, 25 bp, Homo sapien
gaagacgaagacctaatttaagtca

SEQ ID NO: 2927674 - DNA, 25 bp, Homo sapien
tcagcacccttcatgattaaggatt

SEQ ID NO: 2927675 - DNA, 25 bp, Homo sapien
cccttcatgattaaggattttattc

SEQ ID NO: 2927676 - DNA, 25 bp, Homo sapien
aatccactttttattaatcggtcag

SEQ ID NO: 2927677 - DNA, 25 bp, Homo sapien
tttattaatcggtcagcacccttca

SEQ ID NO: 2927678 - DNA, 25 bp, Homo sapien
cgaactagatttgacagccatggag

SEQ ID NO: 2927679 - DNA, 25 bp, Homo sapien
ttttgcttgaatagatgggtacatc

SEQ ID NO: 2927680 - DNA, 25 bp, Homo sapien
ccatggagtcatgtattccaaacaa

SEQ ID NO: 2927681 - DNA, 25 bp, Homo sapien
aactctttgtcgtttggcatcatca

SEQ ID NO: 2927682 - DNA, 25 bp, Homo sapien
aactgtctagtacaacatcaagcag

SEQ ID NO: 2927683 - DNA, 25 bp, Homo sapien
cccaagccacctgttgcactggttt

SEQ ID NO: 2927684 - DNA, 25 bp, Homo sapien
tattgatcccaagccacctgttgca

SEQ ID NO: 2927685 - DNA, 25 bp, Homo sapien
ttgatgaaactgtctagtacaacat

SEQ ID NO: 2927686 - DNA, 25 bp, Homo sapien
tagcaatatcatcccacataagatg

SEQ ID NO: 2927687 - DNA, 25 bp, Homo sapien
cataagatgttgttctaaagtagga

SEQ ID NO: 2927688 - DNA, 25 bp, Homo sapien
gccacatcaagggaattgttgaagg

SEQ ID NO: 2927689 - DNA, 25 bp, Homo sapien
acagcatcagcatgtagcgtgctaa

SEQ ID NO: 2927690 - DNA, 25 bp, Homo sapien
ttaatgaccagtccatgtgtggaag

SEQ ID NO: 2927691 - DNA, 25 bp, Homo sapien
tgatattaatgaccagtccatgtgt

SEQ ID NO: 2927692 - DNA, 25 bp, Homo sapien
aaatgaagctgtgaacaagtacaca

SEQ ID NO: 2927693 - DNA, 25 bp, Homo sapien
tgtgaacaagtacacagagagtgaa

SEQ ID NO: 2927694 - DNA, 25 bp, Homo sapien
gacagcagctgacttgactttgcta

SEQ ID NO: 2927695 - DNA, 25 bp, Homo sapien
gagaatgacctgtcccggtaactgg

SEQ ID NO: 2927696 - DNA, 25 bp, Homo sapien
aatgagaactctgtcagactgagtc

SEQ ID NO: 2927697 - DNA, 25 bp, Homo sapien
gactgagtctcaaaacttgcttggt

SEQ ID NO: 2927698 - DNA, 25 bp, Homo sapien
ccagccacttgcacgttggaatatc

SEQ ID NO: 2927699 - DNA, 25 bp, Homo sapien
tgcacgttggaatatctctcatgca

SEQ ID NO: 2927700 - DNA, 25 bp, Homo sapien
cacttgcacgttggaatatctctca

SEQ ID NO: 2927701 - DNA, 25 bp, Homo sapien
gccacttgcacgttggaatatctct

SEQ ID NO: 2927702 - DNA, 25 bp, Homo sapien
ttataacattgatcatacagtaata

SEQ ID NO: 2927703 - DNA, 25 bp, Homo sapien
gctgtattttcaacaatatgcatat

SEQ ID NO: 2927704 - DNA, 25 bp, Homo sapien
agctcttggttgcagggatggatta

SEQ ID NO: 2927705 - DNA, 25 bp, Homo sapien
tttatctgcccatgagacactcgtt

SEQ ID NO: 2927706 - DNA, 25 bp, Homo sapien
cttgctaagaatacggattatctgc

SEQ ID NO: 2927707 - DNA, 25 bp, Homo sapien
taatacacccaaagacaacaagagc

SEQ ID NO: 2927708 - DNA, 25 bp, Homo sapien
gcaaggctatagtcttaccatataa

SEQ ID NO: 2927709 - DNA, 25 bp, Homo sapien
gaaagatatgctttacaacttgaga

SEQ ID NO: 2927710 - DNA, 25 bp, Homo sapien
tataagatatttcattgacctcaaa

SEQ ID NO: 2927711 - DNA, 25 bp, Homo sapien
gaaccataaatatttgggagaagtg

SEQ ID NO: 2927712 - DNA, 25 bp, Homo sapien
gtggctgtaatttggttagtgctat

SEQ ID NO: 2927713 - DNA, 25 bp, Homo sapien
cttattaagaagtggctgtaatttg

SEQ ID NO: 2927714 - DNA, 25 bp, Homo sapien
tctatcagaacttgactgttgtaag

SEQ ID NO: 2927715 - DNA, 25 bp, Homo sapien
tgtaagtgtcaggtccttttaagca

SEQ ID NO: 2927716 - DNA, 25 bp, Homo sapien
gaatcatgacatagtctctttcaaa

SEQ ID NO: 2927717 - DNA, 25 bp, Homo sapien
gcagcttatcttcctaaattaccca

SEQ ID NO: 2927718 - DNA, 25 bp, Homo sapien
gaagatatgtttgaggctagtaaga

SEQ ID NO: 2927719 - DNA, 25 bp, Homo sapien
aaataaagcagcttatcttcctaaa

SEQ ID NO: 2927720 - DNA, 25 bp, Homo sapien
tacggagactatctaaagtatgcag

SEQ ID NO: 2927721 - DNA, 25 bp, Homo sapien
acagccacagctacccaaaagaggg

SEQ ID NO: 2927722 - DNA, 25 bp, Homo sapien
tgttcaagaagtgcggtacctgctg

SEQ ID NO: 2927723 - DNA, 25 bp, Homo sapien
caagttgacctcatcaagctgcagc

SEQ ID NO: 2927724 - DNA, 25 bp, Homo sapien
taaatttgagtaatctaggaacctc

SEQ ID NO: 2927725 - DNA, 25 bp, Homo sapien
tttacatagttctttatgagctggt

SEQ ID NO: 2927726 - DNA, 25 bp, Homo sapien
tacaaattcctacttaagttatgga

SEQ ID NO: 2927727 - DNA, 25 bp, Homo sapien
aagatggaagagtactaaatttgag

SEQ ID NO: 2927728 - DNA, 25 bp, Homo sapien
gagttgaaattgagtccaacaaaat

SEQ ID NO: 2927729 - DNA, 25 bp, Homo sapien
cagaggattccggattgccataaat

SEQ ID NO: 2927730 - DNA, 25 bp, Homo sapien
ggattccggattgccataaatactt

SEQ ID NO: 2927731 - DNA, 25 bp, Homo sapien
ccaatgcaaagttaaagttagagtt

SEQ ID NO: 2927732 - DNA, 25 bp, Homo sapien
tcataaaaatattctaaataaggct

SEQ ID NO: 2927733 - DNA, 25 bp, Homo sapien
cataaaaatattctaaataaggctt

SEQ ID NO: 2927734 - DNA, 25 bp, Homo sapien
caagctgtgaagtcagcaacgggga

SEQ ID NO: 2927735 - DNA, 25 bp, Homo sapien
aaccaggttaggaagtgaatgagcg

SEQ ID NO: 2927736 - DNA, 25 bp, Homo sapien
aatgagcgggctctgaggaatagct

SEQ ID NO: 2927737 - DNA, 25 bp, Homo sapien
ctgtgaagtcagcaacggggagtaa

SEQ ID NO: 2927738 - DNA, 25 bp, Homo sapien
agacaacccctcccctcagcccagc

SEQ ID NO: 2927739 - DNA, 25 bp, Homo sapien
taagacaacccctcccctcagccca

SEQ ID NO: 2927740 - DNA, 25 bp, Homo sapien
caacccctcccctcagcccagcgcc

SEQ ID NO: 2927741 - DNA, 25 bp, Homo sapien
acaacccctcccctcagcccagcgc

SEQ ID NO: 2927742 - DNA, 25 bp, Homo sapien
accctccgctctcactgggactcgc

SEQ ID NO: 2927743 - DNA, 25 bp, Homo sapien
ggaggggggcggtcaaacgcgcagc

SEQ ID NO: 2927744 - DNA, 25 bp, Homo sapien
tttctcggccccctacctctggcac

SEQ ID NO: 2927745 - DNA, 25 bp, Homo sapien
ggggcggtcaaacgcgcagccccga

SEQ ID NO: 2927746 - DNA, 25 bp, Homo sapien
ccgggcggcccgaggatgaccgcgc

SEQ ID NO: 2927747 - DNA, 25 bp, Homo sapien
cgggcggcccgaggatgaccgcgcg

SEQ ID NO: 2927748 - DNA, 25 bp, Homo sapien
tctcaccaacttcggtgctggcctt

SEQ ID NO: 2927749 - DNA, 25 bp, Homo sapien
tcccgcaagaagtggccgctggaga

SEQ ID NO: 2927750 - DNA, 25 bp, Homo sapien
atgttctcccgcaagaagtggccgc

SEQ ID NO: 2927751 - DNA, 25 bp, Homo sapien
ccaactcggacatcattaggcgtgt

SEQ ID NO: 2927752 - DNA, 25 bp, Homo sapien
caaactgatcactagatccacttca

SEQ ID NO: 2927753 - DNA, 25 bp, Homo sapien
ttcaaactgatcactagatccactt

SEQ ID NO: 2927754 - DNA, 25 bp, Homo sapien
tcaaactgatcactagatccacttc

SEQ ID NO: 2927755 - DNA, 25 bp, Homo sapien
ctggactaatggttcaccagtgacg

SEQ ID NO: 2927756 - DNA, 25 bp, Homo sapien
cagtgacgtcatcaataccatgtac

SEQ ID NO: 2927757 - DNA, 25 bp, Homo sapien
ggttcaccagtgacgtcatcaatac

SEQ ID NO: 2927758 - DNA, 25 bp, Homo sapien
taatggttcaccagtgacgtcatca

SEQ ID NO: 2927759 - DNA, 25 bp, Homo sapien
gaaaattggtggagcactcctcggc

SEQ ID NO: 2927760 - DNA, 25 bp, Homo sapien
aaagtgtgtaaacgtagggccagat

SEQ ID NO: 2927761 - DNA, 25 bp, Homo sapien
cagattttgttcgtctccgttccgg

SEQ ID NO: 2927762 - DNA, 25 bp, Homo sapien
tatgcttctttggactgaataggtg

SEQ ID NO: 2927763 - DNA, 25 bp, Homo sapien
ttcctggttcttccattgggcaggg

SEQ ID NO: 2927764 - DNA, 25 bp, Homo sapien
actattcaattagtccagtaattcc

SEQ ID NO: 2927765 - DNA, 25 bp, Homo sapien
gatcttacaacatttatgtagctaa

SEQ ID NO: 2927766 - DNA, 25 bp, Homo sapien
cgaatagaaaccttaactattcaat

SEQ ID NO: 2927767 - DNA, 25 bp, Homo sapien
caaatggtcttattacttctataca

SEQ ID NO: 2927768 - DNA, 25 bp, Homo sapien
tccaggcacagctagtacaacattc

SEQ ID NO: 2927769 - DNA, 25 bp, Homo sapien
ggccaccccataggatgaatctttg

SEQ ID NO: 2927770 - DNA, 25 bp, Homo sapien
aatatgtttgggtcactcataggag

SEQ ID NO: 2927771 - DNA, 25 bp, Homo sapien
cactcataggagtgaaacactgtca

SEQ ID NO: 2927772 - DNA, 25 bp, Homo sapien
atgggtgaagaagggatacatattt

SEQ ID NO: 2927773 - DNA, 25 bp, Homo sapien
tctcgccagtatgaaaagttagaca

SEQ ID NO: 2927774 - DNA, 25 bp, Homo sapien
tatatttccactaaggtagccaaga

SEQ ID NO: 2927775 - DNA, 25 bp, Homo sapien
taatgcactgacgattcagacctga

SEQ ID NO: 2927776 - DNA, 25 bp, Homo sapien
tacatatggcagtgaattgacagag

SEQ ID NO: 2927777 - DNA, 25 bp, Homo sapien
ctttttggtctcaactagcgaggga

SEQ ID NO: 2927778 - DNA, 25 bp, Homo sapien
tcagcaaacacacccactgttgaga

SEQ ID NO: 2927779 - DNA, 25 bp, Homo sapien
taaagccattgaccacgaaataagc

SEQ ID NO: 2927780 - DNA, 25 bp, Homo sapien
gagggtcagctaaacacaaagggaa

SEQ ID NO: 2927781 - DNA, 25 bp, Homo sapien
aatagcaggtgaaggatgcctgtac

SEQ ID NO: 2927782 - DNA, 25 bp, Homo sapien
gcaacaatagcaggtgaaggatgcc

SEQ ID NO: 2927783 - DNA, 25 bp, Homo sapien
atagcaggtgaaggatgcctgtacc

SEQ ID NO: 2927784 - DNA, 25 bp, Homo sapien
cttgcaacaatagcaggtgaaggat

SEQ ID NO: 2927785 - DNA, 25 bp, Homo sapien
tttgttaaccagagttagtagtgta

SEQ ID NO: 2927786 - DNA, 25 bp, Homo sapien
tagtgtatgtaaaattctgactgtt

SEQ ID NO: 2927787 - DNA, 25 bp, Homo sapien
aagtaggccacgctctgtgtattca

SEQ ID NO: 2927788 - DNA, 25 bp, Homo sapien
ggccacgctctgtgtattcacttca

SEQ ID NO: 2927789 - DNA, 25 bp, Homo sapien
gaaatatcagtaagaagaagtgact

SEQ ID NO: 2927790 - DNA, 25 bp, Homo sapien
tgttttaggctgcagcgacttcgaa

SEQ ID NO: 2927791 - DNA, 25 bp, Homo sapien
gacttcgaacttcttcagacactgt

SEQ ID NO: 2927792 - DNA, 25 bp, Homo sapien
ctataggaagggtcaccatgatgaa

SEQ ID NO: 2927793 - DNA, 25 bp, Homo sapien
actggtctggccgacagttggatag

SEQ ID NO: 2927794 - DNA, 25 bp, Homo sapien
gaccatggctgagtctcctttagtg

SEQ ID NO: 2927795 - DNA, 25 bp, Homo sapien
tagtgttggcctgagaaggttgccc

SEQ ID NO: 2927796 - DNA, 25 bp, Homo sapien
gataggtggctgcaaggtatccttc

SEQ ID NO: 2927797 - DNA, 25 bp, Homo sapien
catgtactgtgaacgtattagtcct

SEQ ID NO: 2927798 - DNA, 25 bp, Homo sapien
tcatgtccattgtacttcagaaacc

SEQ ID NO: 2927799 - DNA, 25 bp, Homo sapien
taaaagcttctgacatccttcacag

SEQ ID NO: 2927800 - DNA, 25 bp, Homo sapien
tgcaacaattggtcactaagtcatg

SEQ ID NO: 2927801 - DNA, 25 bp, Homo sapien
tggaggtaaaccaaactacactgga

SEQ ID NO: 2927802 - DNA, 25 bp, Homo sapien
tctgtttcaggataggttgcacctt

SEQ ID NO: 2927803 - DNA, 25 bp, Homo sapien
gctggtgccaagaactactcattaa

SEQ ID NO: 2927804 - DNA, 25 bp, Homo sapien
aagaaagctctaatacatccctgga

SEQ ID NO: 2927805 - DNA, 25 bp, Homo sapien
ggggtgttgtgatccctgattccat

SEQ ID NO: 2927806 - DNA, 25 bp, Homo sapien
tttggggggtgttgtgatccctgat

SEQ ID NO: 2927807 - DNA, 25 bp, Homo sapien
tgttgtgatccctgattccatttct

SEQ ID NO: 2927808 - DNA, 25 bp, Homo sapien
tggggggtgttgtgatccctgattc

SEQ ID NO: 2927809 - DNA, 25 bp, Homo sapien
tacacaagcttcaagataactgtct

SEQ ID NO: 2927810 - DNA, 25 bp, Homo sapien
ctgcagcaagatagggaattaacgt

SEQ ID NO: 2927811 - DNA, 25 bp, Homo sapien
gaattaacgtgatcaaacacctgga

SEQ ID NO: 2927812 - DNA, 25 bp, Homo sapien
tagagaattactattcgcctacaca

SEQ ID NO: 2927813 - DNA, 25 bp, Homo sapien
tgattcagacactgaaactttacgt

SEQ ID NO: 2927814 - DNA, 25 bp, Homo sapien
agcgcctggatcttcggatcagtaa

SEQ ID NO: 2927815 - DNA, 25 bp, Homo sapien
tcggatcagtaagtacttcttcatc

SEQ ID NO: 2927816 - DNA, 25 bp, Homo sapien
acgtaaatgtgggtgctgttgtgat

SEQ ID NO: 2927817 - DNA, 25 bp, Homo sapien
tactttgtggctgaattgttatctg

SEQ ID NO: 2927818 - DNA, 25 bp, Homo sapien
ggcctcctaaaagtagactggaata

SEQ ID NO: 2927819 - DNA, 25 bp, Homo sapien
ggtgagaagtagaagactgtatcct

SEQ ID NO: 2927820 - DNA, 25 bp, Homo sapien
tgttatctgtttgggtgagaagtag

SEQ ID NO: 2927821 - DNA, 25 bp, Homo sapien
ctggcctctgctaagtattcataaa

SEQ ID NO: 2927822 - DNA, 25 bp, Homo sapien
ctgtggtatattttaccagtgtagc

SEQ ID NO: 2927823 - DNA, 25 bp, Homo sapien
ctcatctgtggtatattttaccagt

SEQ ID NO: 2927824 - DNA, 25 bp, Homo sapien
agaattcgttgatcaaactcatctg

SEQ ID NO: 2927825 - DNA, 25 bp, Homo sapien
tttgcaaccagtgcacattactggg

SEQ ID NO: 2927826 - DNA, 25 bp, Homo sapien
caggcacgaaggtgaattaaaatca

SEQ ID NO: 2927827 - DNA, 25 bp, Homo sapien
taatgacatgatatagaaggcctag

SEQ ID NO: 2927828 - DNA, 25 bp, Homo sapien
tgtatactgacatgcgcttaggaag

SEQ ID NO: 2927829 - DNA, 25 bp, Homo sapien
acaaatttggatcttggcacaatga

SEQ ID NO: 2927830 - DNA, 25 bp, Homo sapien
taacagggtgttgatcttagagtcc

SEQ ID NO: 2927831 - DNA, 25 bp, Homo sapien
tcatggtacaccacactctgcacaa

SEQ ID NO: 2927832 - DNA, 25 bp, Homo sapien
tggtacaccacactctgcacaattc

SEQ ID NO: 2927833 - DNA, 25 bp, Homo sapien
cagttacattggacatacagttgag

SEQ ID NO: 2927834 - DNA, 25 bp, Homo sapien
agtcagtgcattctacaacagcgcg

SEQ ID NO: 2927835 - DNA, 25 bp, Homo sapien
taaaagtatgaacaagtctatccct

SEQ ID NO: 2927836 - DNA, 25 bp, Homo sapien
caacagcgcgcatgttagcaagttc

SEQ ID NO: 2927837 - DNA, 25 bp, Homo sapien
ctgcaaaccgccacaagccattaaa

SEQ ID NO: 2927838 - DNA, 25 bp, Homo sapien
gctcagagggttactggcaatccaa

SEQ ID NO: 2927839 - DNA, 25 bp, Homo sapien
tcaatttggagagagcccacataca

SEQ ID NO: 2927840 - DNA, 25 bp, Homo sapien
taagtaaatccccatctgaagccaa

SEQ ID NO: 2927841 - DNA, 25 bp, Homo sapien
ccataggacttacaacagggagttc

SEQ ID NO: 2927842 - DNA, 25 bp, Homo sapien
tcaggagggattcttcactggtttc

SEQ ID NO: 2927843 - DNA, 25 bp, Homo sapien
caggcaggtacgtgtcaatcaaggc

SEQ ID NO: 2927844 - DNA, 25 bp, Homo sapien
tgatactaagctggctctgcagtgc

SEQ ID NO: 2927845 - DNA, 25 bp, Homo sapien
taagctcagcatagtctggaatttg

SEQ ID NO: 2927846 - DNA, 25 bp, Homo sapien
tcaaccttggaatatcatgtggaca

SEQ ID NO: 2927847 - DNA, 25 bp, Homo sapien
caagggaattcctaatgttggtgtc

SEQ ID NO: 2927848 - DNA, 25 bp, Homo sapien
agtccagagttctgtaggtttgcca

SEQ ID NO: 2927849 - DNA, 25 bp, Homo sapien
tcactatgacactgaataagtccag

SEQ ID NO: 2927850 - DNA, 25 bp, Homo sapien
actgctgatttagagcaaggcagag

SEQ ID NO: 2927851 - DNA, 25 bp, Homo sapien
aaactgctgatttagagcaaggcag

SEQ ID NO: 2927852 - DNA, 25 bp, Homo sapien
tgctgatttagagcaaggcagagaa

SEQ ID NO: 2927853 - DNA, 25 bp, Homo sapien
aaaactgctgatttagagcaaggca

SEQ ID NO: 2927854 - DNA, 25 bp, Homo sapien
tctgcacttggcttgcggatccgtg

SEQ ID NO: 2927855 - DNA, 25 bp, Homo sapien
taatgctattacgtttgaaactgcc

SEQ ID NO: 2927856 - DNA, 25 bp, Homo sapien
ttgaaactgccagcgcttctttgct

SEQ ID NO: 2927857 - DNA, 25 bp, Homo sapien
ggcgagttcgtccactgttacagtg

SEQ ID NO: 2927858 - DNA, 25 bp, Homo sapien
ggtcactagtgaagagcccatgtta

SEQ ID NO: 2927859 - DNA, 25 bp, Homo sapien
caacatggcaaaccggatgggttca

SEQ ID NO: 2927860 - DNA, 25 bp, Homo sapien
tgaaacagcactacaggaaactccc

SEQ ID NO: 2927861 - DNA, 25 bp, Homo sapien
tcatactaatgcaggctgaccagtc

SEQ ID NO: 2927862 - DNA, 25 bp, Homo sapien
ccttggcactgggttactgatctat

SEQ ID NO: 2927863 - DNA, 25 bp, Homo sapien
gaagagcaaaatagcataacaccca

SEQ ID NO: 2927864 - DNA, 25 bp, Homo sapien
aaggcttacactgcctgctattcca

SEQ ID NO: 2927865 - DNA, 25 bp, Homo sapien
taacacccactatcatatgcaccaa

SEQ ID NO: 2927866 - DNA, 25 bp, Homo sapien
tccatctgggcaactaagggcatgc

SEQ ID NO: 2927867 - DNA, 25 bp, Homo sapien
tgtcaattacgcagaaatgggcaac

SEQ ID NO: 2927868 - DNA, 25 bp, Homo sapien
catttctcaagggacacatagtggt

SEQ ID NO: 2927869 - DNA, 25 bp, Homo sapien
ttaggcccggatggaaaggacagta

SEQ ID NO: 2927870 - DNA, 25 bp, Homo sapien
tgagtgctccgtaaaatcgcttaag

SEQ ID NO: 2927871 - DNA, 25 bp, Homo sapien
gggaccagtgtattagcaagctctc

SEQ ID NO: 2927872 - DNA, 25 bp, Homo sapien
tctccaggtgaggtacccctgcttt

SEQ ID NO: 2927873 - DNA, 25 bp, Homo sapien
tgcccataaacagacaagtacttgc

SEQ ID NO: 2927874 - DNA, 25 bp, Homo sapien
agacaggtttggcagattacttggg

SEQ ID NO: 2927875 - DNA, 25 bp, Homo sapien
taatgaaggtaaattcccaagatgc

SEQ ID NO: 2927876 - DNA, 25 bp, Homo sapien
tactgagatgctaccacttggttgt

SEQ ID NO: 2927877 - DNA, 25 bp, Homo sapien
cagtgagcaggttaagaagtgctac

SEQ ID NO: 2927878 - DNA, 25 bp, Homo sapien
agctcactgaaacctccacctcccg

SEQ ID NO: 2927879 - DNA, 25 bp, Homo sapien
ggttcaagtgattctcttgcttcag

SEQ ID NO: 2927880 - DNA, 25 bp, Homo sapien
caccatgtttcccaaactcccgact

SEQ ID NO: 2927881 - DNA, 25 bp, Homo sapien
tgtagtgcagaagtgcaatctcagc

SEQ ID NO: 2927882 - DNA, 25 bp, Homo sapien
ctattttcaactgctcactggacac

SEQ ID NO: 2927883 - DNA, 25 bp, Homo sapien
cctattttcaactgctcactggaca

SEQ ID NO: 2927884 - DNA, 25 bp, Homo sapien
aaagcatgttccctacactgggagg

SEQ ID NO: 2927885 - DNA, 25 bp, Homo sapien
gaggctcataatcctaaccagggac

SEQ ID NO: 2927886 - DNA, 25 bp, Homo sapien
cacaggtcacctctattttgttagg

SEQ ID NO: 2927887 - DNA, 25 bp, Homo sapien
tctattgagcacctttgaacaaagc

SEQ ID NO: 2927888 - DNA, 25 bp, Homo sapien
tcctcacatgcctgcgtgctgagca

SEQ ID NO: 2927889 - DNA, 25 bp, Homo sapien
gatctggcattcaacgatattcagc

SEQ ID NO: 2927890 - DNA, 25 bp, Homo sapien
gatcagaattgtattaagccagttc

SEQ ID NO: 2927891 - DNA, 25 bp, Homo sapien
ttgctggagtctcctttaagcccag

SEQ ID NO: 2927892 - DNA, 25 bp, Homo sapien
tgcaggaagaactcattgcaccaca

SEQ ID NO: 2927893 - DNA, 25 bp, Homo sapien
cagatatggaactggtaatacagaa

SEQ ID NO: 2927894 - DNA, 25 bp, Homo sapien
agtgcagatatggaactggtaatac

SEQ ID NO: 2927895 - DNA, 25 bp, Homo sapien
tcattgcaccacattctggactggc

SEQ ID NO: 2927896 - DNA, 25 bp, Homo sapien
cacgcccgagaacgtattgtatttt

SEQ ID NO: 2927897 - DNA, 25 bp, Homo sapien
gaagctgtgtgtcaagttctggcaa

SEQ ID NO: 2927898 - DNA, 25 bp, Homo sapien
gatagtgatttttgacccttgtgac

SEQ ID NO: 2927899 - DNA, 25 bp, Homo sapien
tctggcaatgactgtgaaaagtgac

SEQ ID NO: 2927900 - DNA, 25 bp, Homo sapien
cggaagcctttcatgaccaccccac

SEQ ID NO: 2927901 - DNA, 25 bp, Homo sapien
aagcctttcatgaccaccccactcc

SEQ ID NO: 2927902 - DNA, 25 bp, Homo sapien
tcatgaccaccccactccttgccca

SEQ ID NO: 2927903 - DNA, 25 bp, Homo sapien
cctttcatgaccaccccactccttg

SEQ ID NO: 2927904 - DNA, 25 bp, Homo sapien
tctggggttgtcacgtttttgttga

SEQ ID NO: 2927905 - DNA, 25 bp, Homo sapien
tgagcacctacgttgtgttgggtat

SEQ ID NO: 2927906 - DNA, 25 bp, Homo sapien
gagcacctacgttgtgttgggtatg

SEQ ID NO: 2927907 - DNA, 25 bp, Homo sapien
gtcgcgcccctttccgctatccgtg

SEQ ID NO: 2927908 - DNA, 25 bp, Homo sapien
ggcctcctgcattggcgcgttccgt

SEQ ID NO: 2927909 - DNA, 25 bp, Homo sapien
tggcgcgttccgtgactgcattcat

SEQ ID NO: 2927910 - DNA, 25 bp, Homo sapien
tctcccgagcgctcaggatgtcctg

SEQ ID NO: 2927911 - DNA, 25 bp, Homo sapien
tggacacccggagccacccaaaggc

SEQ ID NO: 2927912 - DNA, 25 bp, Homo sapien
cacccggagccacccaaaggccctg

SEQ ID NO: 2927913 - DNA, 25 bp, Homo sapien
tcctctggacacccggagccaccca

SEQ ID NO: 2927914 - DNA, 25 bp, Homo sapien
cccttcctctggacacccggagcca

SEQ ID NO: 2927915 - DNA, 25 bp, Homo sapien
cggcaggcgcagcgagctgccaacg

SEQ ID NO: 2927916 - DNA, 25 bp, Homo sapien
ccggcaggcgcagcgagctgccaac

SEQ ID NO: 2927917 - DNA, 25 bp, Homo sapien
cggccgcggccgatccgtgtcagca

SEQ ID NO: 2927918 - DNA, 25 bp, Homo sapien
ccgatccgtgtcagcagcggcgccg

SEQ ID NO: 2927919 - DNA, 25 bp, Homo sapien
cgcggccgatccgtgtcagcagcgg

SEQ ID NO: 2927920 - DNA, 25 bp, Homo sapien
ccagccgctccggaggggaagggag

SEQ ID NO: 2927921 - DNA, 25 bp, Homo sapien
gcgggggcgcccgaccagcccgcgc

SEQ ID NO: 2927922 - DNA, 25 bp, Homo sapien
cacggagcgcagcagagccgcgggg

SEQ ID NO: 2927923 - DNA, 25 bp, Homo sapien
ggagcgcagcagagccgcgggggcg

SEQ ID NO: 2927924 - DNA, 25 bp, Homo sapien
acggagcgcagcagagccgcggggg

SEQ ID NO: 2927925 - DNA, 25 bp, Homo sapien
tcctcgccctggccgaagcgcagtc

SEQ ID NO: 2927926 - DNA, 25 bp, Homo sapien
tcgccctggccgaagcgcagtccga

SEQ ID NO: 2927927 - DNA, 25 bp, Homo sapien
gagcgccgcgacgcgctccacgcgc

SEQ ID NO: 2927928 - DNA, 25 bp, Homo sapien
ctggccgaagcgcagtccgagcgcc

SEQ ID NO: 2927929 - DNA, 25 bp, Homo sapien
tggatgtgcagaccgctcagaagga

SEQ ID NO: 2927930 - DNA, 25 bp, Homo sapien
caagggtggatgtgcagaccgctca

SEQ ID NO: 2927931 - DNA, 25 bp, Homo sapien
ccagacaagggtggatgtgcagacc

SEQ ID NO: 2927932 - DNA, 25 bp, Homo sapien
ccccagacaagggtggatgtgcaga

SEQ ID NO: 2927933 - DNA, 25 bp, Homo sapien
gacccttgcatcttggtctccgcag

SEQ ID NO: 2927934 - DNA, 25 bp, Homo sapien
ccagcaggacgtacacagacccttg

SEQ ID NO: 2927935 - DNA, 25 bp, Homo sapien
cgtacacagacccttgcatcttggt

SEQ ID NO: 2927936 - DNA, 25 bp, Homo sapien
caggacgtacacagacccttgcatc

SEQ ID NO: 2927937 - DNA, 25 bp, Homo sapien
tggcctgctgcaaccaacacagcca

SEQ ID NO: 2927938 - DNA, 25 bp, Homo sapien
gcctgaatgagaggtcacccgacac

SEQ ID NO: 2927939 - DNA, 25 bp, Homo sapien
acctccttccgtgtctgggcagggt

SEQ ID NO: 2927940 - DNA, 25 bp, Homo sapien
gtcacccgacactggcccgggagta

SEQ ID NO: 2927941 - DNA, 25 bp, Homo sapien
aggaaggagcgcgactatccccatg

SEQ ID NO: 2927942 - DNA, 25 bp, Homo sapien
gaaggagcgcgactatccccatgcc

SEQ ID NO: 2927943 - DNA, 25 bp, Homo sapien
ctggaaaaacggaagggcttggctg

SEQ ID NO: 2927944 - DNA, 25 bp, Homo sapien
gaggaaggagcgcgactatccccat

SEQ ID NO: 2927945 - DNA, 25 bp, Homo sapien
tgacatataagcatggaaacagctc

SEQ ID NO: 2927946 - DNA, 25 bp, Homo sapien
gaaaagtcatgatcatttaccggca

SEQ ID NO: 2927947 - DNA, 25 bp, Homo sapien
gcaatgcatatccaccgcttctgta

SEQ ID NO: 2927948 - DNA, 25 bp, Homo sapien
gaagtgtcattgaggcgctgcctga

SEQ ID NO: 2927949 - DNA, 25 bp, Homo sapien
gcctgatctgaggtgcagtagaaaa

SEQ ID NO: 2927950 - DNA, 25 bp, Homo sapien
cctggcctgatctgaggtgcagtag

SEQ ID NO: 2927951 - DNA, 25 bp, Homo sapien
tctgcagtgcaggccgaggaggatg

SEQ ID NO: 2927952 - DNA, 25 bp, Homo sapien
tggcctgatctgaggtgcagtagaa

SEQ ID NO: 2927953 - DNA, 25 bp, Homo sapien
gctgaattaatgtgaaatccctggg

SEQ ID NO: 2927954 - DNA, 25 bp, Homo sapien
gttatgacaactagggaaatctgat

SEQ ID NO: 2927955 - DNA, 25 bp, Homo sapien
tgggacagtctataggacaactggc

SEQ ID NO: 2927956 - DNA, 25 bp, Homo sapien
taagaggtagggtgaaagccagcca

SEQ ID NO: 2927957 - DNA, 25 bp, Homo sapien
tgacctaaacctaagtactgacaag

SEQ ID NO: 2927958 - DNA, 25 bp, Homo sapien
aggcctggccaagtggagactcatc

SEQ ID NO: 2927959 - DNA, 25 bp, Homo sapien
tctctgtgatttgggtggactgccg

SEQ ID NO: 2927960 - DNA, 25 bp, Homo sapien
ctaacaaaaggagaacggagcggag

SEQ ID NO: 2927961 - DNA, 25 bp, Homo sapien
gccacaggggaggtcttgagtctac

SEQ ID NO: 2927962 - DNA, 25 bp, Homo sapien
ggaggtcttgagtctactcattttg

SEQ ID NO: 2927963 - DNA, 25 bp, Homo sapien
ttttgtagacgctctttgcagaggc

SEQ ID NO: 2927964 - DNA, 25 bp, Homo sapien
ctcagggcccgtatggcagggccaa

SEQ ID NO: 2927965 - DNA, 25 bp, Homo sapien
ttctcctcggaaggacgccctgcag

SEQ ID NO: 2927966 - DNA, 25 bp, Homo sapien
cggaaggacgccctgcagtctgagt

SEQ ID NO: 2927967 - DNA, 25 bp, Homo sapien
cgccctgcagtctgagtagctgtcc

SEQ ID NO: 2927968 - DNA, 25 bp, Homo sapien
ggacgccctgcagtctgagtagctg

SEQ ID NO: 2927969 - DNA, 25 bp, Homo sapien
tccacattgcttgaccaactgctgg

SEQ ID NO: 2927970 - DNA, 25 bp, Homo sapien
ccttgcacaggacattaaatgggcc

SEQ ID NO: 2927971 - DNA, 25 bp, Homo sapien
tctggggatctagagcttttctccc

SEQ ID NO: 2927972 - DNA, 25 bp, Homo sapien
caactgctggatcagaatacccttt

SEQ ID NO: 2927973 - DNA, 25 bp, Homo sapien
ctggggacaagaggagctcccaggc

SEQ ID NO: 2927974 - DNA, 25 bp, Homo sapien
tggggacaagaggagctcccaggct

SEQ ID NO: 2927975 - DNA, 25 bp, Homo sapien
ggtgttcacgtacatttcctgggcc

SEQ ID NO: 2927976 - DNA, 25 bp, Homo sapien
gtgttcacgtacatttcctgggcca

SEQ ID NO: 2927977 - DNA, 25 bp, Homo sapien
tgttcacgtacatttcctgggccag

SEQ ID NO: 2927978 - DNA, 25 bp, Homo sapien
ctgaaacctatctgcgcctggtgtc

SEQ ID NO: 2927979 - DNA, 25 bp, Homo sapien
gacatcttcctttatgggaccgcca

SEQ ID NO: 2927980 - DNA, 25 bp, Homo sapien
gtggtctctgaagtggactggcctc

SEQ ID NO: 2927981 - DNA, 25 bp, Homo sapien
taggagcgaaagtgacagaagcctg

SEQ ID NO: 2927982 - DNA, 25 bp, Homo sapien
gagtctgggctgacagaatccctcc

SEQ ID NO: 2927983 - DNA, 25 bp, Homo sapien
gccggtgggacaaagggcacaggcc

SEQ ID NO: 2927984 - DNA, 25 bp, Homo sapien
tctccattaattctgaggccaggat

SEQ ID NO: 2927985 - DNA, 25 bp, Homo sapien
cacaataggaccctgtattctggag

SEQ ID NO: 2927986 - DNA, 25 bp, Homo sapien
gggagccaggcaagaacttcagcaa

SEQ ID NO: 2927987 - DNA, 25 bp, Homo sapien
taccggaggcatcgtaaatcccagg

SEQ ID NO: 2927988 - DNA, 25 bp, Homo sapien
ggtaccggaggcatcgtaaatccca

SEQ ID NO: 2927989 - DNA, 25 bp, Homo sapien
ctggggtaccggaggcatcgtaaat

SEQ ID NO: 2927990 - DNA, 25 bp, Homo sapien
ggaggcatcgtaaatcccaggacca

SEQ ID NO: 2927991 - DNA, 25 bp, Homo sapien
ttggattctgtaatccctgtgtcca

SEQ ID NO: 2927992 - DNA, 25 bp, Homo sapien
cagggatttggattctgtaatccct

SEQ ID NO: 2927993 - DNA, 25 bp, Homo sapien
tcaagtccacctaggaggcaggagt

SEQ ID NO: 2927994 - DNA, 25 bp, Homo sapien
actggtggggcgagctgtccattcc

SEQ ID NO: 2927995 - DNA, 25 bp, Homo sapien
tcttctccttgcctggaacctggcg

SEQ ID NO: 2927996 - DNA, 25 bp, Homo sapien
tacctagtgggctctcaggaaagac

SEQ ID NO: 2927997 - DNA, 25 bp, Homo sapien
tttctgtgaacctccctgaacctgg

SEQ ID NO: 2927998 - DNA, 25 bp, Homo sapien
gattccagctgaccctgcttttcca

SEQ ID NO: 2927999 - DNA, 25 bp, Homo sapien
tcaccctggggtcagtatcagccat

SEQ ID NO: 2928000 - DNA, 25 bp, Homo sapien
cctcaccctggggtcagtatcagcc

SEQ ID NO: 2928001 - DNA, 25 bp, Homo sapien
ctcaccctggggtcagtatcagcca

SEQ ID NO: 2928002 - DNA, 25 bp, Homo sapien
ccccaggtcgttgggatccaaatat

SEQ ID NO: 2928003 - DNA, 25 bp, Homo sapien
gattctccccaggtcgttgggatcc

SEQ ID NO: 2928004 - DNA, 25 bp, Homo sapien
cccggcaaaagtccttgaagttgat

SEQ ID NO: 2928005 - DNA, 25 bp, Homo sapien
cttgaagttgattctccccaggtcg

SEQ ID NO: 2928006 - DNA, 25 bp, Homo sapien
ctgactctgtacacggctggcctcg

SEQ ID NO: 2928007 - DNA, 25 bp, Homo sapien
tgagatcccaaccaaacgccccaag

SEQ ID NO: 2928008 - DNA, 25 bp, Homo sapien
acacggctggcctcgctcctgagat

SEQ ID NO: 2928009 - DNA, 25 bp, Homo sapien
ccattcctccgaggctgggcgcccc

SEQ ID NO: 2928010 - DNA, 25 bp, Homo sapien
gcagggactccaaacgactgtgcca

SEQ ID NO: 2928011 - DNA, 25 bp, Homo sapien
tgcagggactccaaacgactgtgcc

SEQ ID NO: 2928012 - DNA, 25 bp, Homo sapien
agggactccaaacgactgtgccagc

SEQ ID NO: 2928013 - DNA, 25 bp, Homo sapien
ggactccaaacgactgtgccagcct

SEQ ID NO: 2928014 - DNA, 25 bp, Homo sapien
ctctccaccgacagcacatccttca

SEQ ID NO: 2928015 - DNA, 25 bp, Homo sapien
cccgcgctctccaccgacagcacat

SEQ ID NO: 2928016 - DNA, 25 bp, Homo sapien
gcgcacggcagcgtccccgcgctct

SEQ ID NO: 2928017 - DNA, 25 bp, Homo sapien
cagtctgggatctctggcgcgcacg

SEQ ID NO: 2928018 - DNA, 25 bp, Homo sapien
cagaagcaaatttccctgggtcagg

SEQ ID NO: 2928019 - DNA, 25 bp, Homo sapien
caactgcccgggatagacttgcact

SEQ ID NO: 2928020 - DNA, 25 bp, Homo sapien
tgggtcaggaaactctctcaacagc

SEQ ID NO: 2928021 - DNA, 25 bp, Homo sapien
tgcttgatgcccaacgctagaggct

SEQ ID NO: 2928022 - DNA, 25 bp, Homo sapien
gaggacgcccggtcagtgggtggca

SEQ ID NO: 2928023 - DNA, 25 bp, Homo sapien
ggacaggaggacgcccggtcagtgg

SEQ ID NO: 2928024 - DNA, 25 bp, Homo sapien
acaggaggacgcccggtcagtgggt

SEQ ID NO: 2928025 - DNA, 25 bp, Homo sapien
aggaggacgcccggtcagtgggtgg

SEQ ID NO: 2928026 - DNA, 25 bp, Homo sapien
catggataacgatgcttgctgtggg

SEQ ID NO: 2928027 - DNA, 25 bp, Homo sapien
ggagcatggataacgatgcttgctg

SEQ ID NO: 2928028 - DNA, 25 bp, Homo sapien
ccaaggagcatggataacgatgctt

SEQ ID NO: 2928029 - DNA, 25 bp, Homo sapien
gcatggataacgatgcttgctgtgg

SEQ ID NO: 2928030 - DNA, 25 bp, Homo sapien
ttagatgttcaggctgtaggcctcc

SEQ ID NO: 2928031 - DNA, 25 bp, Homo sapien
tcctgggcaacatagctagacccgg

SEQ ID NO: 2928032 - DNA, 25 bp, Homo sapien
atcctgggcaacatagctagacccg

SEQ ID NO: 2928033 - DNA, 25 bp, Homo sapien
ccatcctgggcaacatagctagacc

SEQ ID NO: 2928034 - DNA, 25 bp, Homo sapien
gaccatcctgggcaacatagctaga

SEQ ID NO: 2928035 - DNA, 25 bp, Homo sapien
tagctaggagactatcgagtgttcc

SEQ ID NO: 2928036 - DNA, 25 bp, Homo sapien
ccggagatggtggatatgctaatta

SEQ ID NO: 2928037 - DNA, 25 bp, Homo sapien
tgtgactagagaactgatgcttgga

SEQ ID NO: 2928038 - DNA, 25 bp, Homo sapien
gagttacagttctagaggagggata

SEQ ID NO: 2928039 - DNA, 25 bp, Homo sapien
cagtggccactggtaggcgcgatcc

SEQ ID NO: 2928040 - DNA, 25 bp, Homo sapien
aacatagagcatcacagcccagagc

SEQ ID NO: 2928041 - DNA, 25 bp, Homo sapien
gtggccactggtaggcgcgatccca

SEQ ID NO: 2928042 - DNA, 25 bp, Homo sapien
aaactcagtgtagatacccgatcaa

SEQ ID NO: 2928043 - DNA, 25 bp, Homo sapien
gagaggatcttggactgtggaaaca

SEQ ID NO: 2928044 - DNA, 25 bp, Homo sapien
tgactgtccactggccgggatgatt

SEQ ID NO: 2928045 - DNA, 25 bp, Homo sapien
tcccttggcaaacactccggtgttg

SEQ ID NO: 2928046 - DNA, 25 bp, Homo sapien
gaatgactcttggatccaaaagccc

SEQ ID NO: 2928047 - DNA, 25 bp, Homo sapien
ccgaagggctctttgtatcaagctg

SEQ ID NO: 2928048 - DNA, 25 bp, Homo sapien
cggcctgtccgctcgcacttctggg

SEQ ID NO: 2928049 - DNA, 25 bp, Homo sapien
agccccgaagcgcaggaacaatcgc

SEQ ID NO: 2928050 - DNA, 25 bp, Homo sapien
tatcaagctgcggtgacatcacgag

SEQ ID NO: 2928051 - DNA, 25 bp, Homo sapien
tgttgggaaagaacccacttgtctg

SEQ ID NO: 2928052 - DNA, 25 bp, Homo sapien
tcatacgacccttgtaggctgcacg

SEQ ID NO: 2928053 - DNA, 25 bp, Homo sapien
tgctggcatgactagcactggcctg

SEQ ID NO: 2928054 - DNA, 25 bp, Homo sapien
tccaggtcatgcgaaaaagtgaaga

SEQ ID NO: 2928055 - DNA, 25 bp, Homo sapien
ggcccctgtgtccaagttcacgtag

SEQ ID NO: 2928056 - DNA, 25 bp, Homo sapien
cttggcccctgtgtccaagttcacg

SEQ ID NO: 2928057 - DNA, 25 bp, Homo sapien
tggcccctgtgtccaagttcacgta

SEQ ID NO: 2928058 - DNA, 25 bp, Homo sapien
acgtagcacccactcccagaagcct

SEQ ID NO: 2928059 - DNA, 25 bp, Homo sapien
tgcgctccacttccatcctaaggtg

SEQ ID NO: 2928060 - DNA, 25 bp, Homo sapien
tcaagaccacccctcagcagggccc

SEQ ID NO: 2928061 - DNA, 25 bp, Homo sapien
agacacctggttgctgcgctccact

SEQ ID NO: 2928062 - DNA, 25 bp, Homo sapien
taggagtggatcttgtgtagacacc

SEQ ID NO: 2928063 - DNA, 25 bp, Homo sapien
gtggccgcagagactggtacgcaat

SEQ ID NO: 2928064 - DNA, 25 bp, Homo sapien
catcatgaaaaggtggtggccgcag

SEQ ID NO: 2928065 - DNA, 25 bp, Homo sapien
aatcttggctgtaacggactcctgc

SEQ ID NO: 2928066 - DNA, 25 bp, Homo sapien
ctctcatcatgaaaaggtggtggcc

SEQ ID NO: 2928067 - DNA, 25 bp, Homo sapien
ctctccagtcttgagagccgtgttc

SEQ ID NO: 2928068 - DNA, 25 bp, Homo sapien
ccagtcttgagagccgtgttcgcct

SEQ ID NO: 2928069 - DNA, 25 bp, Homo sapien
gagagccgtgttcgcctgccagcag

SEQ ID NO: 2928070 - DNA, 25 bp, Homo sapien
ctagaggcacacagcctgccgtggg

SEQ ID NO: 2928071 - DNA, 25 bp, Homo sapien
ggagagagctggagaacaggatcca

SEQ ID NO: 2928072 - DNA, 25 bp, Homo sapien
gccagccactctggcagggcaggtc

SEQ ID NO: 2928073 - DNA, 25 bp, Homo sapien
gagaacaggatccagccagccactc

SEQ ID NO: 2928074 - DNA, 25 bp, Homo sapien
tgcacccctacctcgctgtcccact

SEQ ID NO: 2928075 - DNA, 25 bp, Homo sapien
tcacgaggggctacaggcaacagag

SEQ ID NO: 2928076 - DNA, 25 bp, Homo sapien
tacagccatgggtccccggctggtc

SEQ ID NO: 2928077 - DNA, 25 bp, Homo sapien
gtccccggctggtcagccagcaatg

SEQ ID NO: 2928078 - DNA, 25 bp, Homo sapien
aacagagggtgagctattcctacag

SEQ ID NO: 2928079 - DNA, 25 bp, Homo sapien
cctgccagcggaccccggggtgaag

SEQ ID NO: 2928080 - DNA, 25 bp, Homo sapien
agagcggatgcagcagcgtgttcct

SEQ ID NO: 2928081 - DNA, 25 bp, Homo sapien
gagagagcggatgcagcagcgtgtt

SEQ ID NO: 2928082 - DNA, 25 bp, Homo sapien
gcggatgcagcagcgtgttcctcca

SEQ ID NO: 2928083 - DNA, 25 bp, Homo sapien
cacagaggcgcccacccaagcctgg

SEQ ID NO: 2928084 - DNA, 25 bp, Homo sapien
acatcctcaccacagaggcgcccac

SEQ ID NO: 2928085 - DNA, 25 bp, Homo sapien
gcactatgctcgtcaggatgcccag

SEQ ID NO: 2928086 - DNA, 25 bp, Homo sapien
tcaccccagctgcacggtctacatc

SEQ ID NO: 2928087 - DNA, 25 bp, Homo sapien
cagagatctgggattcatcagctcc

SEQ ID NO: 2928088 - DNA, 25 bp, Homo sapien
ccatccctcacaacagccccgtgcg

SEQ ID NO: 2928089 - DNA, 25 bp, Homo sapien
ctcacaacagccccgtgcgagctgc

SEQ ID NO: 2928090 - DNA, 25 bp, Homo sapien
agagatctgggattcatcagctccg

SEQ ID NO: 2928091 - DNA, 25 bp, Homo sapien
ggccacacgggtagcgagagttccc

SEQ ID NO: 2928092 - DNA, 25 bp, Homo sapien
cctttctgtaggtgaagggtcttgc

SEQ ID NO: 2928093 - DNA, 25 bp, Homo sapien
cttgctgggaatgcccgccctgtgg

SEQ ID NO: 2928094 - DNA, 25 bp, Homo sapien
gatgagctgagcctcttttcccctt

SEQ ID NO: 2928095 - DNA, 25 bp, Homo sapien
caccctattaaaggaccctgcagtc

SEQ ID NO: 2928096 - DNA, 25 bp, Homo sapien
tggagatgtcaacctgttcccaagg

SEQ ID NO: 2928097 - DNA, 25 bp, Homo sapien
gatgtcaacctgttcccaaggttct

SEQ ID NO: 2928098 - DNA, 25 bp, Homo sapien
gggctggcagggcaccctattaaag

SEQ ID NO: 2928099 - DNA, 25 bp, Homo sapien
ccatcagcaaaggtggggcctgtga

SEQ ID NO: 2928100 - DNA, 25 bp, Homo sapien
ggatgagctcgccatcagcaaaggt

SEQ ID NO: 2928101 - DNA, 25 bp, Homo sapien
gggctgtctgtgtacaactcctggg

SEQ ID NO: 2928102 - DNA, 25 bp, Homo sapien
ggtggcgccagcgtcatagcctcct

SEQ ID NO: 2928103 - DNA, 25 bp, Homo sapien
tcccccgtccttctcggcaggactc

SEQ ID NO: 2928104 - DNA, 25 bp, Homo sapien
ccaagtcccccgtccttctcggcag

SEQ ID NO: 2928105 - DNA, 25 bp, Homo sapien
cccgtccttctcggcaggactcccg

SEQ ID NO: 2928106 - DNA, 25 bp, Homo sapien
caagtcccccgtccttctcggcagg

SEQ ID NO: 2928107 - DNA, 25 bp, Homo sapien
gtggtgacccattcccgggaggtca

SEQ ID NO: 2928108 - DNA, 25 bp, Homo sapien
tggtgacccattcccgggaggtcac

SEQ ID NO: 2928109 - DNA, 25 bp, Homo sapien
tcctactactgatcaacactcgagt

SEQ ID NO: 2928110 - DNA, 25 bp, Homo sapien
tactactgatcaacactcgagtttt

SEQ ID NO: 2928111 - DNA, 25 bp, Homo sapien
ccgattaagtttgtagctcttgacc

SEQ ID NO: 2928112 - DNA, 25 bp, Homo sapien
tactccacagtagcaaaacactgct

SEQ ID NO: 2928113 - DNA, 25 bp, Homo sapien
ggcatttccctttaattggcactac

SEQ ID NO: 2928114 - DNA, 25 bp, Homo sapien
ctgagggtccgagagcacccaagtc

SEQ ID NO: 2928115 - DNA, 25 bp, Homo sapien
cgagtagacgttggtcctggtctca

SEQ ID NO: 2928116 - DNA, 25 bp, Homo sapien
tagaaaggtctgaggtcgtcatgga

SEQ ID NO: 2928117 - DNA, 25 bp, Homo sapien
tcctcattgctgatgagcgaggtgg

SEQ ID NO: 2928118 - DNA, 25 bp, Homo sapien
ctggaagacaccgaagaccccaggt

SEQ ID NO: 2928119 - DNA, 25 bp, Homo sapien
ttccaagtcattgagcaggttgatt

SEQ ID NO: 2928120 - DNA, 25 bp, Homo sapien
tacacgtgccgcattttcctaggcg

SEQ ID NO: 2928121 - DNA, 25 bp, Homo sapien
gagcagtaaacatctagcaattcgc

SEQ ID NO: 2928122 - DNA, 25 bp, Homo sapien
caggtttttcagtcgggcttccaag

SEQ ID NO: 2928123 - DNA, 25 bp, Homo sapien
cgtccaaaggccgtgctggagatct

SEQ ID NO: 2928124 - DNA, 25 bp, Homo sapien
ccaaaggccgtgctggagatctttc

SEQ ID NO: 2928125 - DNA, 25 bp, Homo sapien
gtccaaaggccgtgctggagatctt

SEQ ID NO: 2928126 - DNA, 25 bp, Homo sapien
tccaaaggccgtgctggagatcttt

SEQ ID NO: 2928127 - DNA, 25 bp, Homo sapien
tgcctgcctgaagtcaaggtgacct

SEQ ID NO: 2928128 - DNA, 25 bp, Homo sapien
tctttttcagaagtgacgctgccct

SEQ ID NO: 2928129 - DNA, 25 bp, Homo sapien
tctttattgagtatggctgccagct

SEQ ID NO: 2928130 - DNA, 25 bp, Homo sapien
acatgcgggcaccagctgagtccgg

SEQ ID NO: 2928131 - DNA, 25 bp, Homo sapien
aatggcgcacactcatgcccagatc

SEQ ID NO: 2928132 - DNA, 25 bp, Homo sapien
ggacttaatcggagcaaagtgacca

SEQ ID NO: 2928133 - DNA, 25 bp, Homo sapien
actgccgcaggacttaatcggagca

SEQ ID NO: 2928134 - DNA, 25 bp, Homo sapien
aagtgaccagccccaatggcgcaca

SEQ ID NO: 2928135 - DNA, 25 bp, Homo sapien
cttccagctccctgataggcagcag

SEQ ID NO: 2928136 - DNA, 25 bp, Homo sapien
cgtgcctgaggcaaaatccagctgc

SEQ ID NO: 2928137 - DNA, 25 bp, Homo sapien
actgggcctgctgagctaacccgtg

SEQ ID NO: 2928138 - DNA, 25 bp, Homo sapien
agtgacctcagctggcacgtgagcc

SEQ ID NO: 2928139 - DNA, 25 bp, Homo sapien
gacaggggcctactcacactactgg

SEQ ID NO: 2928140 - DNA, 25 bp, Homo sapien
acactactggctaggcgagcatcca

SEQ ID NO: 2928141 - DNA, 25 bp, Homo sapien
taggcgagcatccagtaccccaggg

SEQ ID NO: 2928142 - DNA, 25 bp, Homo sapien
tactcacactactggctaggcgagc

SEQ ID NO: 2928143 - DNA, 25 bp, Homo sapien
caagagtcaatgctgtcccggaaca

SEQ ID NO: 2928144 - DNA, 25 bp, Homo sapien
cattgtcgcaagagtcaatgctgtc

SEQ ID NO: 2928145 - DNA, 25 bp, Homo sapien
agtcaatgctgtcccggaacaggtc

SEQ ID NO: 2928146 - DNA, 25 bp, Homo sapien
tgtgatgtcattgtcgcaagagtca

SEQ ID NO: 2928147 - DNA, 25 bp, Homo sapien
ggagcaggcatgcattcagtccctt

SEQ ID NO: 2928148 - DNA, 25 bp, Homo sapien
tgcccccaattcctaggcaggtaca

SEQ ID NO: 2928149 - DNA, 25 bp, Homo sapien
agtagcctgagtgcaccccatctcc

SEQ ID NO: 2928150 - DNA, 25 bp, Homo sapien
ccccaattcctaggcaggtacaggg

SEQ ID NO: 2928151 - DNA, 25 bp, Homo sapien
ctctgaggccacagaaccgagaacc

SEQ ID NO: 2928152 - DNA, 25 bp, Homo sapien
gttcatgagcaggacctccaaacca

SEQ ID NO: 2928153 - DNA, 25 bp, Homo sapien
gcaggacctccaaaccactgtgtat

SEQ ID NO: 2928154 - DNA, 25 bp, Homo sapien
cctcgacgccatgaggttcatgagc

SEQ ID NO: 2928155 - DNA, 25 bp, Homo sapien
agcttgctcttcaggtccccattgg

SEQ ID NO: 2928156 - DNA, 25 bp, Homo sapien
ccattggtcaggctgtcattctcca

SEQ ID NO: 2928157 - DNA, 25 bp, Homo sapien
ctgtgcaccagctgtgtgttctctt

SEQ ID NO: 2928158 - DNA, 25 bp, Homo sapien
tgtcaccttcttttccaggaagctt

SEQ ID NO: 2928159 - DNA, 25 bp, Homo sapien
ctgtgacaagttggaggaccggacc

SEQ ID NO: 2928160 - DNA, 25 bp, Homo sapien
gtagaatccattgggcctagagcca

SEQ ID NO: 2928161 - DNA, 25 bp, Homo sapien
tatgagtgagacacagtggatcccc

SEQ ID NO: 2928162 - DNA, 25 bp, Homo sapien
tgatgcgtcacagaccctcagagct

SEQ ID NO: 2928163 - DNA, 25 bp, Homo sapien
tgggatacgtctcactggcaacagc

SEQ ID NO: 2928164 - DNA, 25 bp, Homo sapien
gggcacgtagatgtgagcaccccag

SEQ ID NO: 2928165 - DNA, 25 bp, Homo sapien
cttgactcccaaaataggcacatcc

SEQ ID NO: 2928166 - DNA, 25 bp, Homo sapien
gacagcctggttggtatttcggtct

SEQ ID NO: 2928167 - DNA, 25 bp, Homo sapien
ccggccacccctctgattaataatt

SEQ ID NO: 2928168 - DNA, 25 bp, Homo sapien
gcagcacagggagggaccgccccca

SEQ ID NO: 2928169 - DNA, 25 bp, Homo sapien
tggccggaaccacctcaggcctcac

SEQ ID NO: 2928170 - DNA, 25 bp, Homo sapien
gccacccctctgattaataattcag

SEQ ID NO: 2928171 - DNA, 25 bp, Homo sapien
catgtccactgagggcgtgtgggcc

SEQ ID NO: 2928172 - DNA, 25 bp, Homo sapien
cgtgtgggccagtagctttcagaga

SEQ ID NO: 2928173 - DNA, 25 bp, Homo sapien
tgtcggtcacacatgccatggaggg

SEQ ID NO: 2928174 - DNA, 25 bp, Homo sapien
caccgcacatatagagggggtgtcg

SEQ ID NO: 2928175 - DNA, 25 bp, Homo sapien
caacccaggctgtggcacgggggac

SEQ ID NO: 2928176 - DNA, 25 bp, Homo sapien
ccaacccaggctgtggcacggggga

SEQ ID NO: 2928177 - DNA, 25 bp, Homo sapien
cccaacccaggctgtggcacggggg

SEQ ID NO: 2928178 - DNA, 25 bp, Homo sapien
ctgaggacagcgcaatgggcaagct

SEQ ID NO: 2928179 - DNA, 25 bp, Homo sapien
tgaggacagcgcaatgggcaagctc

SEQ ID NO: 2928180 - DNA, 25 bp, Homo sapien
gctcggccgtggtctcctgatcctt

SEQ ID NO: 2928181 - DNA, 25 bp, Homo sapien
agctccacctcggtagccttctccc

SEQ ID NO: 2928182 - DNA, 25 bp, Homo sapien
tccacctcggtagccttctccctct

SEQ ID NO: 2928183 - DNA, 25 bp, Homo sapien
tccagcttgccgtaggcctcgcggt

SEQ ID NO: 2928184 - DNA, 25 bp, Homo sapien
caaggcacaggagccgggttttcca

SEQ ID NO: 2928185 - DNA, 25 bp, Homo sapien
tactactggaaagtctcaagaggct

SEQ ID NO: 2928186 - DNA, 25 bp, Homo sapien
tagcgaacttcctgaagagcatgcc

SEQ ID NO: 2928187 - DNA, 25 bp, Homo sapien
cgttccaatgacgaagccacaggta

SEQ ID NO: 2928188 - DNA, 25 bp, Homo sapien
tggagctaatgggagaccaactcag

SEQ ID NO: 2928189 - DNA, 25 bp, Homo sapien
agggaggtgacccagtacgtccaag

SEQ ID NO: 2928190 - DNA, 25 bp, Homo sapien
tgggagaccaactcagatccctggc

SEQ ID NO: 2928191 - DNA, 25 bp, Homo sapien
cagtacgtccaaggccatggagcta

SEQ ID NO: 2928192 - DNA, 25 bp, Homo sapien
tgagcgagagcagtcacccttaact

SEQ ID NO: 2928193 - DNA, 25 bp, Homo sapien
ccctggtgggtaacttagcaaagca

SEQ ID NO: 2928194 - DNA, 25 bp, Homo sapien
tgggaagtctcctcaccaaactgca

SEQ ID NO: 2928195 - DNA, 25 bp, Homo sapien
tgagagcccaactcccagtcatttg

SEQ ID NO: 2928196 - DNA, 25 bp, Homo sapien
tgtggcccaggttcacactgtcttt

SEQ ID NO: 2928197 - DNA, 25 bp, Homo sapien
cactgtcttttaccacctcccgtgt

SEQ ID NO: 2928198 - DNA, 25 bp, Homo sapien
cgttaggagacagttcccgagggct

SEQ ID NO: 2928199 - DNA, 25 bp, Homo sapien
tgtgacgggcacacgttaggagaca

SEQ ID NO: 2928200 - DNA, 25 bp, Homo sapien
ggaagtggtagggaaccaagcatac

SEQ ID NO: 2928201 - DNA, 25 bp, Homo sapien
caagcatacggcaggactctgggaa

SEQ ID NO: 2928202 - DNA, 25 bp, Homo sapien
gagaggaattcagccccaccaccag

SEQ ID NO: 2928203 - DNA, 25 bp, Homo sapien
ggatattttacacgaatggcgcccc

SEQ ID NO: 2928204 - DNA, 25 bp, Homo sapien
gactgggccctcctgttagactctg

SEQ ID NO: 2928205 - DNA, 25 bp, Homo sapien
cattagagagtaggaacgcagattc

SEQ ID NO: 2928206 - DNA, 25 bp, Homo sapien
tgttagcgttcacacaggaattcca

SEQ ID NO: 2928207 - DNA, 25 bp, Homo sapien
ccggcctcaggtcagttttaaatgg

SEQ ID NO: 2928208 - DNA, 25 bp, Homo sapien
aaaggagaaagacaaatctcagaaa

SEQ ID NO: 2928209 - DNA, 25 bp, Homo sapien
ctggcgaaaggagaaagacaaatct

SEQ ID NO: 2928210 - DNA, 25 bp, Homo sapien
gcgaaaggagaaagacaaatctcag

SEQ ID NO: 2928211 - DNA, 25 bp, Homo sapien
aaggagaaagacaaatctcagaaac

SEQ ID NO: 2928212 - DNA, 25 bp, Homo sapien
agtttctctgtttgagacttgagcc

SEQ ID NO: 2928213 - DNA, 25 bp, Homo sapien
gagccgagtcactgttgttctaagc

SEQ ID NO: 2928214 - DNA, 25 bp, Homo sapien
cactgttgttctaagctctgtattt

SEQ ID NO: 2928215 - DNA, 25 bp, Homo sapien
ctgtttgagacttgagccgagtcac

SEQ ID NO: 2928216 - DNA, 25 bp, Homo sapien
aagtccttcaacgatgctagatgca

SEQ ID NO: 2928217 - DNA, 25 bp, Homo sapien
gccagagccccgatgattctagaaa

SEQ ID NO: 2928218 - DNA, 25 bp, Homo sapien
tgagtcttggcttacagaaacggcc

SEQ ID NO: 2928219 - DNA, 25 bp, Homo sapien
gatgcacagtgaaaccagctccctt

SEQ ID NO: 2928220 - DNA, 25 bp, Homo sapien
aaggcggttctgtcgcagcttgtcc

SEQ ID NO: 2928221 - DNA, 25 bp, Homo sapien
tccttctggaactcaaggcggttct

SEQ ID NO: 2928222 - DNA, 25 bp, Homo sapien
tggtgtcctccagacggtcagacat

SEQ ID NO: 2928223 - DNA, 25 bp, Homo sapien
catgcgcttgtacaggtccatctca

SEQ ID NO: 2928224 - DNA, 25 bp, Homo sapien
gctccttccgcaagtcctcgatgag

SEQ ID NO: 2928225 - DNA, 25 bp, Homo sapien
tccagctccttccgcaagtcctcga

SEQ ID NO: 2928226 - DNA, 25 bp, Homo sapien
gctccagctccttccgcaagtcctc

SEQ ID NO: 2928227 - DNA, 25 bp, Homo sapien
cagctccttccgcaagtcctcgatg

SEQ ID NO: 2928228 - DNA, 25 bp, Homo sapien
cattgaactcgcctaggccagagga

SEQ ID NO: 2928229 - DNA, 25 bp, Homo sapien
tgcttgagccgcttgacctcgtgct

SEQ ID NO: 2928230 - DNA, 25 bp, Homo sapien
gagccgcttgacctcgtgctcgagc

SEQ ID NO: 2928231 - DNA, 25 bp, Homo sapien
acctcgcgggccctggcattgaact

SEQ ID NO: 2928232 - DNA, 25 bp, Homo sapien
cggtgtctatctccgcagccagaga

SEQ ID NO: 2928233 - DNA, 25 bp, Homo sapien
tctgcccattcaagtcgtcgttctg

SEQ ID NO: 2928234 - DNA, 25 bp, Homo sapien
ggttttttgcttcgtagaggctgag

SEQ ID NO: 2928235 - DNA, 25 bp, Homo sapien
cgtcgttctgatcccgcagcttata

SEQ ID NO: 2928236 - DNA, 25 bp, Homo sapien
ccggggcattttggaggcctgatct

SEQ ID NO: 2928237 - DNA, 25 bp, Homo sapien
gaggcctgatctttcataagcatac

SEQ ID NO: 2928238 - DNA, 25 bp, Homo sapien
tgaggctcagtgacagagtgtcttg

SEQ ID NO: 2928239 - DNA, 25 bp, Homo sapien
gaggtcagctcttcaccccgtgtcc

SEQ ID NO: 2928240 - DNA, 25 bp, Homo sapien
gtactgcctcagccggaagttgatc

SEQ ID NO: 2928241 - DNA, 25 bp, Homo sapien
tggagggattgtggtccaggatggc

SEQ ID NO: 2928242 - DNA, 25 bp, Homo sapien
ttagtgtttgatctcgaggatggag

SEQ ID NO: 2928243 - DNA, 25 bp, Homo sapien
caggatggcgaggataatcttgtcc

SEQ ID NO: 2928244 - DNA, 25 bp, Homo sapien
gaatgtgaatccttatccccagagg

SEQ ID NO: 2928245 - DNA, 25 bp, Homo sapien
ttctaaacgctggaacgaagcagtc

SEQ ID NO: 2928246 - DNA, 25 bp, Homo sapien
tacacgtaacgcatggtggccagag

SEQ ID NO: 2928247 - DNA, 25 bp, Homo sapien
tgaaagagcccatcgtactagagcg

SEQ ID NO: 2928248 - DNA, 25 bp, Homo sapien
ggcttccaactgaacgcaagggcag

SEQ ID NO: 2928249 - DNA, 25 bp, Homo sapien
taaattggaattacctgagcagctc

SEQ ID NO: 2928250 - DNA, 25 bp, Homo sapien
taatgtacacgaagctcactcctgg

SEQ ID NO: 2928251 - DNA, 25 bp, Homo sapien
taaagcctctcaacgcacagggact

SEQ ID NO: 2928252 - DNA, 25 bp, Homo sapien
tagttcattccacgtaggcctcaga

SEQ ID NO: 2928253 - DNA, 25 bp, Homo sapien
ggtccctaggatcagcgctcaaagt

SEQ ID NO: 2928254 - DNA, 25 bp, Homo sapien
tacacatttacagggctcgggaaag

SEQ ID NO: 2928255 - DNA, 25 bp, Homo sapien
tatgggaaacctcgcctggtgagca

SEQ ID NO: 2928256 - DNA, 25 bp, Homo sapien
tcctgtaatagaggaaggagcagac

SEQ ID NO: 2928257 - DNA, 25 bp, Homo sapien
ccttggtacttgatggtgtggcaga

SEQ ID NO: 2928258 - DNA, 25 bp, Homo sapien
gtgtggcagagacaagcactggcag

SEQ ID NO: 2928259 - DNA, 25 bp, Homo sapien
cctgaatggaggcattgggccgtca

SEQ ID NO: 2928260 - DNA, 25 bp, Homo sapien
ttccgccctggggagtagcttgatc

SEQ ID NO: 2928261 - DNA, 25 bp, Homo sapien
atgaggggctttccgccctggggag

SEQ ID NO: 2928262 - DNA, 25 bp, Homo sapien
gctttccgccctggggagtagcttg

SEQ ID NO: 2928263 - DNA, 25 bp, Homo sapien
ccctggggagtagcttgatcatttt

SEQ ID NO: 2928264 - DNA, 25 bp, Homo sapien
gagagtccacaagctcccgtgggct

SEQ ID NO: 2928265 - DNA, 25 bp, Homo sapien
tatttggagcagatactctcccacg

SEQ ID NO: 2928266 - DNA, 25 bp, Homo sapien
ccagctgggctagaaagcaagggcc

SEQ ID NO: 2928267 - DNA, 25 bp, Homo sapien
caaccctgaaaccatggccaagtgg

SEQ ID NO: 2928268 - DNA, 25 bp, Homo sapien
tatctaataaggaattgctatccaa

SEQ ID NO: 2928269 - DNA, 25 bp, Homo sapien
gtctgggcgatattgtgagacctca

SEQ ID NO: 2928270 - DNA, 25 bp, Homo sapien
acaagtgcacaactcttgttcaggg

SEQ ID NO: 2928271 - DNA, 25 bp, Homo sapien
aagtaaactaaaacaaggcaggcat

SEQ ID NO: 2928272 - DNA, 25 bp, Homo sapien
gagccgaggtgggcacgctaggaga

SEQ ID NO: 2928273 - DNA, 25 bp, Homo sapien
gaggtgggcacgctaggagaggccc

SEQ ID NO: 2928274 - DNA, 25 bp, Homo sapien
ccgaggtgggcacgctaggagaggc

SEQ ID NO: 2928275 - DNA, 25 bp, Homo sapien
agccgaggtgggcacgctaggagag

SEQ ID NO: 2928276 - DNA, 25 bp, Homo sapien
accctgagcatctgtgtagcctgga

SEQ ID NO: 2928277 - DNA, 25 bp, Homo sapien
gggttcagctcgctccccttgcagc

SEQ ID NO: 2928278 - DNA, 25 bp, Homo sapien
tggcaaggaggaccctgagcatctg

SEQ ID NO: 2928279 - DNA, 25 bp, Homo sapien
gaagcacgaccttcctcgggttcag

SEQ ID NO: 2928280 - DNA, 25 bp, Homo sapien
gccttaccacttggccaccgcgcct

SEQ ID NO: 2928281 - DNA, 25 bp, Homo sapien
tacgagaccgacgccttaccacttg

SEQ ID NO: 2928282 - DNA, 25 bp, Homo sapien
gatcttcggtttacgagaccgacgc

SEQ ID NO: 2928283 - DNA, 25 bp, Homo sapien
agaccgacgccttaccacttggcca

SEQ ID NO: 2928284 - DNA, 25 bp, Homo sapien
aagacgactccggctctgcgaaatg

SEQ ID NO: 2928285 - DNA, 25 bp, Homo sapien
tggcgaagcagtgaagacgactccg

SEQ ID NO: 2928286 - DNA, 25 bp, Homo sapien
ggaccttagtgtccccattggcgaa

SEQ ID NO: 2928287 - DNA, 25 bp, Homo sapien
taacactcgcaaatcgggcgggacc

SEQ ID NO: 2928288 - DNA, 25 bp, Homo sapien
gaaaggaatccattgtctccaggtg

SEQ ID NO: 2928289 - DNA, 25 bp, Homo sapien
ccattgtctccaggtgttgtcatat

SEQ ID NO: 2928290 - DNA, 25 bp, Homo sapien
aattccccagaaaggaatccattgt

SEQ ID NO: 2928291 - DNA, 25 bp, Homo sapien
gaatccattgtctccaggtgttgtc

SEQ ID NO: 2928292 - DNA, 25 bp, Homo sapien
cgcaccctcccgcaaggccgagccc

SEQ ID NO: 2928293 - DNA, 25 bp, Homo sapien
ctctcgcagcaggccgcaccctccc

SEQ ID NO: 2928294 - DNA, 25 bp, Homo sapien
caaggccgagcccgcaccgctgcct

SEQ ID NO: 2928295 - DNA, 25 bp, Homo sapien
tctcgcagcaggccgcaccctcccg

SEQ ID NO: 2928296 - DNA, 25 bp, Homo sapien
cgcccgcaaagacccagccctcagc

SEQ ID NO: 2928297 - DNA, 25 bp, Homo sapien
cccgcaaagacccagccctcagctc

SEQ ID NO: 2928298 - DNA, 25 bp, Homo sapien
ctcgcccgcaaagacccagccctca

SEQ ID NO: 2928299 - DNA, 25 bp, Homo sapien
acccagccctcagctcccatcctcg

SEQ ID NO: 2928300 - DNA, 25 bp, Homo sapien
gccgagaactgggactttgtaggcc

SEQ ID NO: 2928301 - DNA, 25 bp, Homo sapien
ttgtaggccagttgatccgacaccc

SEQ ID NO: 2928302 - DNA, 25 bp, Homo sapien
tgggactttgtaggccagttgatcc

SEQ ID NO: 2928303 - DNA, 25 bp, Homo sapien
aggccagttgatccgacaccctcat

SEQ ID NO: 2928304 - DNA, 25 bp, Homo sapien
ggcgaggaccggggagaagacgctg

SEQ ID NO: 2928305 - DNA, 25 bp, Homo sapien
gcgaggaccggggagaagacgctgg

SEQ ID NO: 2928306 - DNA, 25 bp, Homo sapien
gaggaccggggagaagacgctggtc

SEQ ID NO: 2928307 - DNA, 25 bp, Homo sapien
cgaggaccggggagaagacgctggt

SEQ ID NO: 2928308 - DNA, 25 bp, Homo sapien
gagaggcagcctggccggagcgcac

SEQ ID NO: 2928309 - DNA, 25 bp, Homo sapien
tcaccactccttctccagcgtggac

SEQ ID NO: 2928310 - DNA, 25 bp, Homo sapien
ttctccagcgtggacctgagaggca

SEQ ID NO: 2928311 - DNA, 25 bp, Homo sapien
cagcctggccggagcgcacgccagc

SEQ ID NO: 2928312 - DNA, 25 bp, Homo sapien
aagctcaaggttgccgccctggaaa

SEQ ID NO: 2928313 - DNA, 25 bp, Homo sapien
agtgaccgactcacacttccgagag

SEQ ID NO: 2928314 - DNA, 25 bp, Homo sapien
tccacgtctgcccaaagggtacgga

SEQ ID NO: 2928315 - DNA, 25 bp, Homo sapien
cgagagcgtcgctatttctccagcg

SEQ ID NO: 2928316 - DNA, 25 bp, Homo sapien
ggcttcctgcgccaccgggccaaac

SEQ ID NO: 2928317 - DNA, 25 bp, Homo sapien
tgcgccaccgggccaaacctccgct

SEQ ID NO: 2928318 - DNA, 25 bp, Homo sapien
cttcctgcgccaccgggccaaacct

SEQ ID NO: 2928319 - DNA, 25 bp, Homo sapien
gggagaggaacaggggcttcctgcg

SEQ ID NO: 2928320 - DNA, 25 bp, Homo sapien
gatgtttttccacggccaagagcca

SEQ ID NO: 2928321 - DNA, 25 bp, Homo sapien
actgcatgtccccagatgtttttcc

SEQ ID NO: 2928322 - DNA, 25 bp, Homo sapien
ttttcggggagtagaagcaaacgca

SEQ ID NO: 2928323 - DNA, 25 bp, Homo sapien
acaccaggcaaacccgaggtttcag

SEQ ID NO: 2928324 - DNA, 25 bp, Homo sapien
tccccagatactaagccagcaagca

SEQ ID NO: 2928325 - DNA, 25 bp, Homo sapien
ctccccagatactaagccagcaagc

SEQ ID NO: 2928326 - DNA, 25 bp, Homo sapien
tctccccagatactaagccagcaag

SEQ ID NO: 2928327 - DNA, 25 bp, Homo sapien
gaaggcccattgtcgaaatgtggta

SEQ ID NO: 2928328 - DNA, 25 bp, Homo sapien
taacctcatctctatagagaaggcc

SEQ ID NO: 2928329 - DNA, 25 bp, Homo sapien
tttggccgaggttagcgtgcaccca

SEQ ID NO: 2928330 - DNA, 25 bp, Homo sapien
tggtattttggcagatgtttgaaca

SEQ ID NO: 2928331 - DNA, 25 bp, Homo sapien
ggagtgcggcggcacaaactcagct

SEQ ID NO: 2928332 - DNA, 25 bp, Homo sapien
gctggagtgcggcggcacaaactca

SEQ ID NO: 2928333 - DNA, 25 bp, Homo sapien
gcacccgccatcatgtccagctact

SEQ ID NO: 2928334 - DNA, 25 bp, Homo sapien
ggcacccgccatcatgtccagctac

SEQ ID NO: 2928335 - DNA, 25 bp, Homo sapien
aggcccaagtgagtagccgtcagca

SEQ ID NO: 2928336 - DNA, 25 bp, Homo sapien
aggctgccagccaacatatcttggg

SEQ ID NO: 2928337 - DNA, 25 bp, Homo sapien
tggacctgggcccaactgcagttgt

SEQ ID NO: 2928338 - DNA, 25 bp, Homo sapien
caaaaacacactcctgctaccgagg

SEQ ID NO: 2928339 - DNA, 25 bp, Homo sapien
tgagtgcccccttctgtgggctgat

SEQ ID NO: 2928340 - DNA, 25 bp, Homo sapien
ggaggctccactctgaacagagtcc

SEQ ID NO: 2928341 - DNA, 25 bp, Homo sapien
tgatgggccaccagggcttaccagc

SEQ ID NO: 2928342 - DNA, 25 bp, Homo sapien
ggcttaccagcgagctgtagagtaa

SEQ ID NO: 2928343 - DNA, 25 bp, Homo sapien
gcttggctttgacagcagagctaac

SEQ ID NO: 2928344 - DNA, 25 bp, Homo sapien
gctttgacagcagagctaacctatc

SEQ ID NO: 2928345 - DNA, 25 bp, Homo sapien
agagctaacctatcaccaaacacac

SEQ ID NO: 2928346 - DNA, 25 bp, Homo sapien
ccagtccagttccatgcgccttccc

SEQ ID NO: 2928347 - DNA, 25 bp, Homo sapien
ctctccagcccatcttaaagaacgg

SEQ ID NO: 2928348 - DNA, 25 bp, Homo sapien
tccaacaggaatgggcacgggaact

SEQ ID NO: 2928349 - DNA, 25 bp, Homo sapien
ttctctccagcagtcgcggccttgg

SEQ ID NO: 2928350 - DNA, 25 bp, Homo sapien
agcagtcgcggccttggttactctg

SEQ ID NO: 2928351 - DNA, 25 bp, Homo sapien
tattttggacgtacattccaatctg

SEQ ID NO: 2928352 - DNA, 25 bp, Homo sapien
cattcactcttattttggacgtaca

SEQ ID NO: 2928353 - DNA, 25 bp, Homo sapien
tccccattcactcttattttggacg

SEQ ID NO: 2928354 - DNA, 25 bp, Homo sapien
cactcttattttggacgtacattcc

SEQ ID NO: 2928355 - DNA, 25 bp, Homo sapien
tcctgggctccaacctgcacaggaa

SEQ ID NO: 2928356 - DNA, 25 bp, Homo sapien
actgcacacaaaccagggagttcct

SEQ ID NO: 2928357 - DNA, 25 bp, Homo sapien
acacaaaccagggagttcctgcacc

SEQ ID NO: 2928358 - DNA, 25 bp, Homo sapien
acaggaatatcttgatgtccagccc

SEQ ID NO: 2928359 - DNA, 25 bp, Homo sapien
aactctgttgcctctaacatcactg

SEQ ID NO: 2928360 - DNA, 25 bp, Homo sapien
ccaactctgttgcctctaacatcac

SEQ ID NO: 2928361 - DNA, 25 bp, Homo sapien
ctctgttgcctctaacatcactgac

SEQ ID NO: 2928362 - DNA, 25 bp, Homo sapien
cctcaacttctcaggaaaggttggg

SEQ ID NO: 2928363 - DNA, 25 bp, Homo sapien
tggcattgttggggaaggcaggcat

SEQ ID NO: 2928364 - DNA, 25 bp, Homo sapien
ctggcattgttggggaaggcaggca

SEQ ID NO: 2928365 - DNA, 25 bp, Homo sapien
ttttgagctgcacctagagaccctg

SEQ ID NO: 2928366 - DNA, 25 bp, Homo sapien
tccttgccctgtgcagaaaaaagcc

SEQ ID NO: 2928367 - DNA, 25 bp, Homo sapien
gcagtaagacatagagtggacccac

SEQ ID NO: 2928368 - DNA, 25 bp, Homo sapien
aggtagtcacagtagcaccggccag

SEQ ID NO: 2928369 - DNA, 25 bp, Homo sapien
taaatgccatcatgtttaaacttta

SEQ ID NO: 2928370 - DNA, 25 bp, Homo sapien
gaaaggataaatgccatcatgttta

SEQ ID NO: 2928371 - DNA, 25 bp, Homo sapien
aaatgccatcatgtttaaactttac

SEQ ID NO: 2928372 - DNA, 25 bp, Homo sapien
caagaaaggataaatgccatcatgt

SEQ ID NO: 2928373 - DNA, 25 bp, Homo sapien
tggccagactatcagggacagacct

SEQ ID NO: 2928374 - DNA, 25 bp, Homo sapien
cattggccagactatcagggacaga

SEQ ID NO: 2928375 - DNA, 25 bp, Homo sapien
cacattggccagactatcagggaca

SEQ ID NO: 2928376 - DNA, 25 bp, Homo sapien
ctccagacaattccacattggccag

SEQ ID NO: 2928377 - DNA, 25 bp, Homo sapien
tggcctggcgtaggcgatgatgtgc

SEQ ID NO: 2928378 - DNA, 25 bp, Homo sapien
gctaccagcgccaaggatgtcatga

SEQ ID NO: 2928379 - DNA, 25 bp, Homo sapien
tctgggaatgcccctacagctctca

SEQ ID NO: 2928380 - DNA, 25 bp, Homo sapien
aggccagatggcctggcgtaggcga

SEQ ID NO: 2928381 - DNA, 25 bp, Homo sapien
atgcctccctcatcgtagctcctga

SEQ ID NO: 2928382 - DNA, 25 bp, Homo sapien
tcctcgtggcccagtgaatggcact

SEQ ID NO: 2928383 - DNA, 25 bp, Homo sapien
gcagagggagcagcgccatgcctcc

SEQ ID NO: 2928384 - DNA, 25 bp, Homo sapien
tgcctataaatagaagagtgagatt

SEQ ID NO: 2928385 - DNA, 25 bp, Homo sapien
ctgcaagaggccacgtctgaggatg

SEQ ID NO: 2928386 - DNA, 25 bp, Homo sapien
tgcaagaggccacgtctgaggatgg

SEQ ID NO: 2928387 - DNA, 25 bp, Homo sapien
agaggccacgtctgaggatggggag

SEQ ID NO: 2928388 - DNA, 25 bp, Homo sapien
caagaggccacgtctgaggatgggg

SEQ ID NO: 2928389 - DNA, 25 bp, Homo sapien
tcacctgacatgaggactgaaggcc

SEQ ID NO: 2928390 - DNA, 25 bp, Homo sapien
ctgaactggccccagcggactcagt

SEQ ID NO: 2928391 - DNA, 25 bp, Homo sapien
tctttgagtacctgccccttgtgca

SEQ ID NO: 2928392 - DNA, 25 bp, Homo sapien
cagcctctcgggaagaagtgtcccc

SEQ ID NO: 2928393 - DNA, 25 bp, Homo sapien
gtgttaagtacacaaaaatgatgtc

SEQ ID NO: 2928394 - DNA, 25 bp, Homo sapien
acagcggacggggtctctctgggcc

SEQ ID NO: 2928395 - DNA, 25 bp, Homo sapien
cttgtgttaagtacacaaaaatgat

SEQ ID NO: 2928396 - DNA, 25 bp, Homo sapien
ggtcaccccaatcctcaccagtatg

SEQ ID NO: 2928397 - DNA, 25 bp, Homo sapien
gagtgtcattagtgcaggaacttgc

SEQ ID NO: 2928398 - DNA, 25 bp, Homo sapien
ttcttgccttgctggggcctccatc

SEQ ID NO: 2928399 - DNA, 25 bp, Homo sapien
gctttgcaagtgaaggccccagagc

SEQ ID NO: 2928400 - DNA, 25 bp, Homo sapien
aggaacttgctgtgcctctgggctc

SEQ ID NO: 2928401 - DNA, 25 bp, Homo sapien
ggggcttgcttacaccactggtgaa

SEQ ID NO: 2928402 - DNA, 25 bp, Homo sapien
gaagggggcttgcttacaccactgg

SEQ ID NO: 2928403 - DNA, 25 bp, Homo sapien
aagggggcttgcttacaccactggt

SEQ ID NO: 2928404 - DNA, 25 bp, Homo sapien
gggggcttgcttacaccactggtga

SEQ ID NO: 2928405 - DNA, 25 bp, Homo sapien
caccttcgggtctgcccctcaggga

SEQ ID NO: 2928406 - DNA, 25 bp, Homo sapien
agctctgtatttcccaccttcgggt

SEQ ID NO: 2928407 - DNA, 25 bp, Homo sapien
tgtatttcccaccttcgggtctgcc

SEQ ID NO: 2928408 - DNA, 25 bp, Homo sapien
tctgtatttcccaccttcgggtctg

SEQ ID NO: 2928409 - DNA, 25 bp, Homo sapien
ccttgctatgcttgggatctgatac

SEQ ID NO: 2928410 - DNA, 25 bp, Homo sapien
gcttgggatctgataccatatgctg

SEQ ID NO: 2928411 - DNA, 25 bp, Homo sapien
atctgataccatatgctggactgcc

SEQ ID NO: 2928412 - DNA, 25 bp, Homo sapien
gaaatgccccttgctatgcttggga

SEQ ID NO: 2928413 - DNA, 25 bp, Homo sapien
cactgagctcccatgctgggcttct

SEQ ID NO: 2928414 - DNA, 25 bp, Homo sapien
agacactgagctcccatgctgggct

SEQ ID NO: 2928415 - DNA, 25 bp, Homo sapien
acactgagctcccatgctgggcttc

SEQ ID NO: 2928416 - DNA, 25 bp, Homo sapien
actgagctcccatgctgggcttctc

SEQ ID NO: 2928417 - DNA, 25 bp, Homo sapien
tcccactgcctagcatgctcctcac

SEQ ID NO: 2928418 - DNA, 25 bp, Homo sapien
ctcccactgcctagcatgctcctca

SEQ ID NO: 2928419 - DNA, 25 bp, Homo sapien
acgaggtactcatggagcccttgca

SEQ ID NO: 2928420 - DNA, 25 bp, Homo sapien
ggcacgaggtactcatggagccctt

SEQ ID NO: 2928421 - DNA, 25 bp, Homo sapien
gaggtactcatggagcccttgcagc

SEQ ID NO: 2928422 - DNA, 25 bp, Homo sapien
ggtactcatggagcccttgcagcct

SEQ ID NO: 2928423 - DNA, 25 bp, Homo sapien
gaacaagcctgagagagccactccc

SEQ ID NO: 2928424 - DNA, 25 bp, Homo sapien
tcttcctcggtcttcgaggctgctc

SEQ ID NO: 2928425 - DNA, 25 bp, Homo sapien
tcctcggtcttcgaggctgctcttc

SEQ ID NO: 2928426 - DNA, 25 bp, Homo sapien
ttcctcggtcttcgaggctgctctt

SEQ ID NO: 2928427 - DNA, 25 bp, Homo sapien
ctcggtcttcgaggctgctcttcca

SEQ ID NO: 2928428 - DNA, 25 bp, Homo sapien
acttataaggtggtacagtctgtca

SEQ ID NO: 2928429 - DNA, 25 bp, Homo sapien
gtggttcaccctgggttctgacaca

SEQ ID NO: 2928430 - DNA, 25 bp, Homo sapien
gctccgggacttataaggtggtaca

SEQ ID NO: 2928431 - DNA, 25 bp, Homo sapien
tgcgctgagctccgggacttataag

SEQ ID NO: 2928432 - DNA, 25 bp, Homo sapien
agagggacctgtattctgctggcat

SEQ ID NO: 2928433 - DNA, 25 bp, Homo sapien
ttctgccccttgatcatcattttta

SEQ ID NO: 2928434 - DNA, 25 bp, Homo sapien
tgccacgatgcccagagggacctgt

SEQ ID NO: 2928435 - DNA, 25 bp, Homo sapien
tccctgcattttttcgaatgccacg

SEQ ID NO: 2928436 - DNA, 25 bp, Homo sapien
tggcatgtgaaggactcttcttggc

SEQ ID NO: 2928437 - DNA, 25 bp, Homo sapien
tgtttctggcatgtgaaggactctt

SEQ ID NO: 2928438 - DNA, 25 bp, Homo sapien
ttctggcatgtgaaggactcttctt

SEQ ID NO: 2928439 - DNA, 25 bp, Homo sapien
gtttctggcatgtgaaggactcttc

SEQ ID NO: 2928440 - DNA, 25 bp, Homo sapien
gagagctgttgctttcgtgagtcca

SEQ ID NO: 2928441 - DNA, 25 bp, Homo sapien
gctggtcccgaaggtccttctctaa

SEQ ID NO: 2928442 - DNA, 25 bp, Homo sapien
ctaacctggtcctgcatgctctgta

SEQ ID NO: 2928443 - DNA, 25 bp, Homo sapien
tgctctgtacttcgcataaagtcct

SEQ ID NO: 2928444 - DNA, 25 bp, Homo sapien
tctcttgagtgcatgttgagcttta

SEQ ID NO: 2928445 - DNA, 25 bp, Homo sapien
cttgagtgcatgttgagctttagaa

SEQ ID NO: 2928446 - DNA, 25 bp, Homo sapien
tgatgggattgctaacgaggttggg

SEQ ID NO: 2928447 - DNA, 25 bp, Homo sapien
gttgggaaacggttctcttgagtgc

SEQ ID NO: 2928448 - DNA, 25 bp, Homo sapien
gagttggccagagcttatgttcaca

SEQ ID NO: 2928449 - DNA, 25 bp, Homo sapien
gaggtgcctcgcaactctgtgattg

SEQ ID NO: 2928450 - DNA, 25 bp, Homo sapien
cttggcagaccaaggcagagttggc

SEQ ID NO: 2928451 - DNA, 25 bp, Homo sapien
actcagcgacgctgctggagatgct

SEQ ID NO: 2928452 - DNA, 25 bp, Homo sapien
gaggactgtcccgaacttcagtgct

SEQ ID NO: 2928453 - DNA, 25 bp, Homo sapien
tctccacgggctgaagagcttaaga

SEQ ID NO: 2928454 - DNA, 25 bp, Homo sapien
tcttcgtaaagagattcacggctga

SEQ ID NO: 2928455 - DNA, 25 bp, Homo sapien
gatcttgtcatttccaaaagaggcc

SEQ ID NO: 2928456 - DNA, 25 bp, Homo sapien
ggaccatgataatctactctgtgtc

SEQ ID NO: 2928457 - DNA, 25 bp, Homo sapien
accatgataatctactctgtgtcat

SEQ ID NO: 2928458 - DNA, 25 bp, Homo sapien
gaccatgataatctactctgtgtca

SEQ ID NO: 2928459 - DNA, 25 bp, Homo sapien
cagcattgaccttgggaccgagact

SEQ ID NO: 2928460 - DNA, 25 bp, Homo sapien
tcatgttgattgcttggagtgagct

SEQ ID NO: 2928461 - DNA, 25 bp, Homo sapien
tgttgattgcttggagtgagctcag

SEQ ID NO: 2928462 - DNA, 25 bp, Homo sapien
cttgggaccgagacttccttgctct

SEQ ID NO: 2928463 - DNA, 25 bp, Homo sapien
tccatgatgcgatgagagtcctccc

SEQ ID NO: 2928464 - DNA, 25 bp, Homo sapien
ccatagcttcgtggtccctttcggg

SEQ ID NO: 2928465 - DNA, 25 bp, Homo sapien
cagaggtgccgggttcttagtgcct

SEQ ID NO: 2928466 - DNA, 25 bp, Homo sapien
ggctttgggccttctcttagttctg

SEQ ID NO: 2928467 - DNA, 25 bp, Homo sapien
aggacagtaggtactccacagtggg

SEQ ID NO: 2928468 - DNA, 25 bp, Homo sapien
tgaggacagtaggtactccacagtg

SEQ ID NO: 2928469 - DNA, 25 bp, Homo sapien
gacagtaggtactccacagtggggg

SEQ ID NO: 2928470 - DNA, 25 bp, Homo sapien
acagtaggtactccacagtggggga

SEQ ID NO: 2928471 - DNA, 25 bp, Homo sapien
tgcttcggtgacagctcagaaggct

SEQ ID NO: 2928472 - DNA, 25 bp, Homo sapien
cagaaggctggtggagaccatgcaa

SEQ ID NO: 2928473 - DNA, 25 bp, Homo sapien
atgcaagccaaagcccccgggccca

SEQ ID NO: 2928474 - DNA, 25 bp, Homo sapien
ctgcttcggtgacagctcagaaggc

SEQ ID NO: 2928475 - DNA, 25 bp, Homo sapien
cacatttttggagcgactgtgctgc

SEQ ID NO: 2928476 - DNA, 25 bp, Homo sapien
tgctgcgcctcttttctggagaatg

SEQ ID NO: 2928477 - DNA, 25 bp, Homo sapien
tgtggctcgataggcttccttctca

SEQ ID NO: 2928478 - DNA, 25 bp, Homo sapien
cattcctcggaagcacctgttgata

SEQ ID NO: 2928479 - DNA, 25 bp, Homo sapien
gcccagaggcaaggttggagtctcc

SEQ ID NO: 2928480 - DNA, 25 bp, Homo sapien
tattgtgtcagctcgtgtctgccca

SEQ ID NO: 2928481 - DNA, 25 bp, Homo sapien
ctattgtgtcagctcgtgtctgccc

SEQ ID NO: 2928482 - DNA, 25 bp, Homo sapien
tgtctgcccagaggcaaggttggag

SEQ ID NO: 2928483 - DNA, 25 bp, Homo sapien
agtttgcatccagtacttttttggg

SEQ ID NO: 2928484 - DNA, 25 bp, Homo sapien
tgtaatgcactacattcctgaactg

SEQ ID NO: 2928485 - DNA, 25 bp, Homo sapien
tattaatacagccaagtatcaaccg

SEQ ID NO: 2928486 - DNA, 25 bp, Homo sapien
aaccttcttggaattagtgtgtgaa

SEQ ID NO: 2928487 - DNA, 25 bp, Homo sapien
ctgacttcaaagttgctcatgtgca

SEQ ID NO: 2928488 - DNA, 25 bp, Homo sapien
tttgtgtctagtgcagagctctcct

SEQ ID NO: 2928489 - DNA, 25 bp, Homo sapien
ctttgtgtctagtgcagagctctcc

SEQ ID NO: 2928490 - DNA, 25 bp, Homo sapien
ctgcccaggaacaagggactggaac

SEQ ID NO: 2928491 - DNA, 25 bp, Homo sapien
gggacacagcttgggagtcacagct

SEQ ID NO: 2928492 - DNA, 25 bp, Homo sapien
ccagaggagggtcgtgctgtgttcc

SEQ ID NO: 2928493 - DNA, 25 bp, Homo sapien
tcactggcatcattaaccaccttgc

SEQ ID NO: 2928494 - DNA, 25 bp, Homo sapien
ttcttgctggccatacctgttctca

SEQ ID NO: 2928495 - DNA, 25 bp, Homo sapien
gcagtcccaggacaataacaggcac

SEQ ID NO: 2928496 - DNA, 25 bp, Homo sapien
cacagcagtcccaggacaataacag

SEQ ID NO: 2928497 - DNA, 25 bp, Homo sapien
cagcagtcccaggacaataacaggc

SEQ ID NO: 2928498 - DNA, 25 bp, Homo sapien
cactgagcttttcctggcctggcac

SEQ ID NO: 2928499 - DNA, 25 bp, Homo sapien
gccttgggccaatttgataacaacg

SEQ ID NO: 2928500 - DNA, 25 bp, Homo sapien
ttcttcgtcttggaagccttgggcc

SEQ ID NO: 2928501 - DNA, 25 bp, Homo sapien
gataacaacgggctttgtattttca

SEQ ID NO: 2928502 - DNA, 25 bp, Homo sapien
gcagccccaggattaaatgcttctt

SEQ ID NO: 2928503 - DNA, 25 bp, Homo sapien
taacgagttacagcactggtcccat

SEQ ID NO: 2928504 - DNA, 25 bp, Homo sapien
tcaggaaccagccttgacagcttgg

SEQ ID NO: 2928505 - DNA, 25 bp, Homo sapien
ctcgcactgagttgggttcaagcac

SEQ ID NO: 2928506 - DNA, 25 bp, Homo sapien
tctgcacagtgaacccgttaaagga

SEQ ID NO: 2928507 - DNA, 25 bp, Homo sapien
tggtttagagggaacatcagtctcc

SEQ ID NO: 2928508 - DNA, 25 bp, Homo sapien
gtcacttactgcatgctgatgtcca

SEQ ID NO: 2928509 - DNA, 25 bp, Homo sapien
ccttccagctggtttagagggaaca

SEQ ID NO: 2928510 - DNA, 25 bp, Homo sapien
ctccttctgcgggactgtcacttac

SEQ ID NO: 2928511 - DNA, 25 bp, Homo sapien
ggctgttcttcctctgagtgcagca

SEQ ID NO: 2928512 - DNA, 25 bp, Homo sapien
cttgtgtctggctgttcttcctctg

SEQ ID NO: 2928513 - DNA, 25 bp, Homo sapien
gctgttcttcctctgagtgcagcat

SEQ ID NO: 2928514 - DNA, 25 bp, Homo sapien
tctggctgttcttcctctgagtgca

SEQ ID NO: 2928515 - DNA, 25 bp, Homo sapien
gaacaagtacttgccagcattatta

SEQ ID NO: 2928516 - DNA, 25 bp, Homo sapien
acgaaccacagtcccagacttcggg

SEQ ID NO: 2928517 - DNA, 25 bp, Homo sapien
cattattataaatgggccagcagct

SEQ ID NO: 2928518 - DNA, 25 bp, Homo sapien
cagggttgcaaagataaacgaacca

SEQ ID NO: 2928519 - DNA, 25 bp, Homo sapien
ctgttgagaggcacattggaggatg

SEQ ID NO: 2928520 - DNA, 25 bp, Homo sapien
tcttttctgttaaagctttctgctg

SEQ ID NO: 2928521 - DNA, 25 bp, Homo sapien
tttctgctggcttttcaatattgtt

SEQ ID NO: 2928522 - DNA, 25 bp, Homo sapien
tgagccactcgcttttcttttctgt

SEQ ID NO: 2928523 - DNA, 25 bp, Homo sapien
catgagccactcgcttttcttttct

SEQ ID NO: 2928524 - DNA, 25 bp, Homo sapien
cacatctacaagagtgttggaggct

SEQ ID NO: 2928525 - DNA, 25 bp, Homo sapien
agccatgggaggtaatagagcctca

SEQ ID NO: 2928526 - DNA, 25 bp, Homo sapien
tgtgcatgggtgcaccaatgtcccc

SEQ ID NO: 2928527 - DNA, 25 bp, Homo sapien
caatgtccccacaccaggatagagg

SEQ ID NO: 2928528 - DNA, 25 bp, Homo sapien
ttgaggccttttggttggtgaacac

SEQ ID NO: 2928529 - DNA, 25 bp, Homo sapien
caggaatccttaagagggctttcat

SEQ ID NO: 2928530 - DNA, 25 bp, Homo sapien
agaaccaggaatccttaagagggct

SEQ ID NO: 2928531 - DNA, 25 bp, Homo sapien
ccaggaatccttaagagggctttca

SEQ ID NO: 2928532 - DNA, 25 bp, Homo sapien
gaagttagacccaagcaaggtggca

SEQ ID NO: 2928533 - DNA, 25 bp, Homo sapien
tctccagagtggtcaaggaagttag

SEQ ID NO: 2928534 - DNA, 25 bp, Homo sapien
gagtggtcaaggaagttagacccaa

SEQ ID NO: 2928535 - DNA, 25 bp, Homo sapien
ggaagttagacccaagcaaggtggc

SEQ ID NO: 2928536 - DNA, 25 bp, Homo sapien
tagcttagtcacttggacttccggc

SEQ ID NO: 2928537 - DNA, 25 bp, Homo sapien
ctctggcctgagtatctctagctta

SEQ ID NO: 2928538 - DNA, 25 bp, Homo sapien
cctgagtatctctagcttagtcact

SEQ ID NO: 2928539 - DNA, 25 bp, Homo sapien
tcacttggacttccggcttccctga

SEQ ID NO: 2928540 - DNA, 25 bp, Homo sapien
gagggctgggagatagggtgacctc

SEQ ID NO: 2928541 - DNA, 25 bp, Homo sapien
agggctgggagatagggtgacctca

SEQ ID NO: 2928542 - DNA, 25 bp, Homo sapien
tgtttttacggtggcacaccaggcc

SEQ ID NO: 2928543 - DNA, 25 bp, Homo sapien
aaccgggtcttctgctacttatgtg

SEQ ID NO: 2928544 - DNA, 25 bp, Homo sapien
tggaatgctcaaccacagatagtct

SEQ ID NO: 2928545 - DNA, 25 bp, Homo sapien
tccatatttccgaggaggagtccat

SEQ ID NO: 2928546 - DNA, 25 bp, Homo sapien
tgcaattagagttctccagccagga

SEQ ID NO: 2928547 - DNA, 25 bp, Homo sapien
gggcaagctctgcaattagagttct

SEQ ID NO: 2928548 - DNA, 25 bp, Homo sapien
ctgagcagggagtgtaactaaatcc

SEQ ID NO: 2928549 - DNA, 25 bp, Homo sapien
gagcagggagtgtaactaaatcctt

SEQ ID NO: 2928550 - DNA, 25 bp, Homo sapien
aaaagggccagacaatggagtgatg

SEQ ID NO: 2928551 - DNA, 25 bp, Homo sapien
aaagggccagacaatggagtgatga

SEQ ID NO: 2928552 - DNA, 25 bp, Homo sapien
aagggccagacaatggagtgatgaa

SEQ ID NO: 2928553 - DNA, 25 bp, Homo sapien
agggccagacaatggagtgatgaag

SEQ ID NO: 2928554 - DNA, 25 bp, Homo sapien
gtccctgcaaaaggctcttcaaaat

SEQ ID NO: 2928555 - DNA, 25 bp, Homo sapien
tggttgggctctattgtggacactc

SEQ ID NO: 2928556 - DNA, 25 bp, Homo sapien
tccgtgtgaccgtgggaaaaccaca

SEQ ID NO: 2928557 - DNA, 25 bp, Homo sapien
tcttcaaaatggaagccactgtggt

SEQ ID NO: 2928558 - DNA, 25 bp, Homo sapien
agcgttaccttcctgttagctggct

SEQ ID NO: 2928559 - DNA, 25 bp, Homo sapien
aggctgagtctggttcagcgttacc

SEQ ID NO: 2928560 - DNA, 25 bp, Homo sapien
ctggctggcaaacccacctgcgaat

SEQ ID NO: 2928561 - DNA, 25 bp, Homo sapien
cgaatcctcaggatttactccggat

SEQ ID NO: 2928562 - DNA, 25 bp, Homo sapien
actgactccgctgtctccgtaggac

SEQ ID NO: 2928563 - DNA, 25 bp, Homo sapien
ggcaggcgcctgaatttctctgggc

SEQ ID NO: 2928564 - DNA, 25 bp, Homo sapien
caagttagagccgtgcatttggcag

SEQ ID NO: 2928565 - DNA, 25 bp, Homo sapien
gtaggacccaccgactctgctgtct

SEQ ID NO: 2928566 - DNA, 25 bp, Homo sapien
tctttgccttctcacaagcagactg

SEQ ID NO: 2928567 - DNA, 25 bp, Homo sapien
ggattcagcaaagccctgctgcctt

SEQ ID NO: 2928568 - DNA, 25 bp, Homo sapien
tctgtgtccagaagcaacctgctgg

SEQ ID NO: 2928569 - DNA, 25 bp, Homo sapien
taagacgggcctttccagagaggct

SEQ ID NO: 2928570 - DNA, 25 bp, Homo sapien
acagaccagtgttccttattgacag

SEQ ID NO: 2928571 - DNA, 25 bp, Homo sapien
aatgtttgcagtgacccctagtctg

SEQ ID NO: 2928572 - DNA, 25 bp, Homo sapien
cagtgttcaataaggccccgtcatt

SEQ ID NO: 2928573 - DNA, 25 bp, Homo sapien
gagtgtggagctttctgccttgtag

SEQ ID NO: 2928574 - DNA, 25 bp, Homo sapien
gtcacgtggcccacggcgtccaggg

SEQ ID NO: 2928575 - DNA, 25 bp, Homo sapien
tgcggcggatcctcgggcgggcagc

SEQ ID NO: 2928576 - DNA, 25 bp, Homo sapien
cttctgcggcggatcctcgggcggg

SEQ ID NO: 2928577 - DNA, 25 bp, Homo sapien
cccaggctgattggcgcttctgcgg

SEQ ID NO: 2928578 - DNA, 25 bp, Homo sapien
gaaatagtattgcaagcaagccccg

SEQ ID NO: 2928579 - DNA, 25 bp, Homo sapien
catttgtagctaaacatgctatgca

SEQ ID NO: 2928580 - DNA, 25 bp, Homo sapien
tatgcatcagactggccatttatga

SEQ ID NO: 2928581 - DNA, 25 bp, Homo sapien
agccccgtgggcaaatttgtattga

SEQ ID NO: 2928582 - DNA, 25 bp, Homo sapien
gcaagctgacaaggctgcgtgccag

SEQ ID NO: 2928583 - DNA, 25 bp, Homo sapien
ccagtgcggtttgcaaagtaaaaga

SEQ ID NO: 2928584 - DNA, 25 bp, Homo sapien
gctccagttgaaatttggcaagctg

SEQ ID NO: 2928585 - DNA, 25 bp, Homo sapien
gaagtaatttactatccagtgcggt

SEQ ID NO: 2928586 - DNA, 25 bp, Homo sapien
ggtggcggtcgtcctctccgcggca

SEQ ID NO: 2928587 - DNA, 25 bp, Homo sapien
gcggtcgtcctctccgcggcagctg

SEQ ID NO: 2928588 - DNA, 25 bp, Homo sapien
tgccgccctgccgagccgcccgcgg

SEQ ID NO: 2928589 - DNA, 25 bp, Homo sapien
gtggcggtcgtcctctccgcggcag

SEQ ID NO: 2928590 - DNA, 25 bp, Homo sapien
cggtaacgcgcgagctgggaaacct

SEQ ID NO: 2928591 - DNA, 25 bp, Homo sapien
aaagccagaggccggctgcgacctg

SEQ ID NO: 2928592 - DNA, 25 bp, Homo sapien
tgggaaacctgaagccttggtgccc

SEQ ID NO: 2928593 - DNA, 25 bp, Homo sapien
ggcttttgaacggtaacgcgcgagc

SEQ ID NO: 2928594 - DNA, 25 bp, Homo sapien
cccagcgagcggtttagcgagtcta

SEQ ID NO: 2928595 - DNA, 25 bp, Homo sapien
gtcagtcacgcggaggcgcttctcg

SEQ ID NO: 2928596 - DNA, 25 bp, Homo sapien
ggcgctctgattggccggcgggagc

SEQ ID NO: 2928597 - DNA, 25 bp, Homo sapien
cctctttgaactgaattcgcgggaa

SEQ ID NO: 2928598 - DNA, 25 bp, Homo sapien
aagcgcctgcaataccaaccgctcg

SEQ ID NO: 2928599 - DNA, 25 bp, Homo sapien
ctgcaataccaaccgctcgccccag

SEQ ID NO: 2928600 - DNA, 25 bp, Homo sapien
aataccaaccgctcgccccagcagg

SEQ ID NO: 2928601 - DNA, 25 bp, Homo sapien
gcgcctgcaataccaaccgctcgcc

SEQ ID NO: 2928602 - DNA, 25 bp, Homo sapien
gaccccgcgctgggccccgagccgc

SEQ ID NO: 2928603 - DNA, 25 bp, Homo sapien
cgcgctgggccccgagccgccccct

SEQ ID NO: 2928604 - DNA, 25 bp, Homo sapien
gcgctgggccccgagccgccccctc

SEQ ID NO: 2928605 - DNA, 25 bp, Homo sapien
aggaggaggccgagtaactgccacc

SEQ ID NO: 2928606 - DNA, 25 bp, Homo sapien
gaggaggaggccgagtaactgccac

SEQ ID NO: 2928607 - DNA, 25 bp, Homo sapien
gcctggaggaaaagctcgtggtcag

SEQ ID NO: 2928608 - DNA, 25 bp, Homo sapien
cctggaggaaaagctcgtggtcagc

SEQ ID NO: 2928609 - DNA, 25 bp, Homo sapien
gtcacgttaggtcattatacagcag

SEQ ID NO: 2928610 - DNA, 25 bp, Homo sapien
tagtgtcacgttaggtcattataca

SEQ ID NO: 2928611 - DNA, 25 bp, Homo sapien
taatgacctattagtgtcacgttag

SEQ ID NO: 2928612 - DNA, 25 bp, Homo sapien
gacctattagtgtcacgttaggtca

SEQ ID NO: 2928613 - DNA, 25 bp, Homo sapien
caaaatccaaacatgatctaaactt

SEQ ID NO: 2928614 - DNA, 25 bp, Homo sapien
gaaacaaaatccaaacatgatctaa

SEQ ID NO: 2928615 - DNA, 25 bp, Homo sapien
aaaatccaaacatgatctaaactta

SEQ ID NO: 2928616 - DNA, 25 bp, Homo sapien
aacaaaatccaaacatgatctaaac

SEQ ID NO: 2928617 - DNA, 25 bp, Homo sapien
gttcgaagaaatctatagatctgtg

SEQ ID NO: 2928618 - DNA, 25 bp, Homo sapien
gattccgagttcgaagaaatctata

SEQ ID NO: 2928619 - DNA, 25 bp, Homo sapien
tatgagattccgagttcgaagaaat

SEQ ID NO: 2928620 - DNA, 25 bp, Homo sapien
tgctatgagattccgagttcgaaga

SEQ ID NO: 2928621 - DNA, 25 bp, Homo sapien
ttttgatgtttgttctggagtttcg

SEQ ID NO: 2928622 - DNA, 25 bp, Homo sapien
agtttcgatgagacatgtaagtaag

SEQ ID NO: 2928623 - DNA, 25 bp, Homo sapien
tgagacatgtaagtaagagttctgt

SEQ ID NO: 2928624 - DNA, 25 bp, Homo sapien
ttgatgtttgttctggagtttcgat

SEQ ID NO: 2928625 - DNA, 25 bp, Homo sapien
aattaataaacatgacgggaaaatg

SEQ ID NO: 2928626 - DNA, 25 bp, Homo sapien
ctgcaatgggacaaattaataaaca

SEQ ID NO: 2928627 - DNA, 25 bp, Homo sapien
catgacgggaaaatggaacttagat

SEQ ID NO: 2928628 - DNA, 25 bp, Homo sapien
tgtgtactttttagcaggacgtggt

SEQ ID NO: 2928629 - DNA, 25 bp, Homo sapien
tttaaaattatctctacccatgcgg

SEQ ID NO: 2928630 - DNA, 25 bp, Homo sapien
ctacccatgcggacaacagaaacat

SEQ ID NO: 2928631 - DNA, 25 bp, Homo sapien
aaattatctctacccatgcggacaa

SEQ ID NO: 2928632 - DNA, 25 bp, Homo sapien
atctctacccatgcggacaacagaa

SEQ ID NO: 2928633 - DNA, 25 bp, Homo sapien
gacctataactctcgcctttaaatg

SEQ ID NO: 2928634 - DNA, 25 bp, Homo sapien
tgccagggctgacctataactctcg

SEQ ID NO: 2928635 - DNA, 25 bp, Homo sapien
gctgacctataactctcgcctttaa

SEQ ID NO: 2928636 - DNA, 25 bp, Homo sapien
cagggctgacctataactctcgcct

SEQ ID NO: 2928637 - DNA, 25 bp, Homo sapien
ggcagtaattgctcttcttcaagga

SEQ ID NO: 2928638 - DNA, 25 bp, Homo sapien
ggtatcctcaaagattatcagcaaa

SEQ ID NO: 2928639 - DNA, 25 bp, Homo sapien
caaggaaagctatgcagtgctggca

SEQ ID NO: 2928640 - DNA, 25 bp, Homo sapien
tatcagcaaagcctaaagctcaatg

SEQ ID NO: 2928641 - DNA, 25 bp, Homo sapien
tttctctacttttgataacatatca

SEQ ID NO: 2928642 - DNA, 25 bp, Homo sapien
atgagattcttgctctcctttcatt

SEQ ID NO: 2928643 - DNA, 25 bp, Homo sapien
tgataacatatcatcaactttaaat

SEQ ID NO: 2928644 - DNA, 25 bp, Homo sapien
gagattcttgctctcctttcatttt

SEQ ID NO: 2928645 - DNA, 25 bp, Homo sapien
tagcacctagcagtgtcttacagaa

SEQ ID NO: 2928646 - DNA, 25 bp, Homo sapien
gtgtgagggtaagctccaactctga

SEQ ID NO: 2928647 - DNA, 25 bp, Homo sapien
aaaggtcaggaatgatggcccatta

SEQ ID NO: 2928648 - DNA, 25 bp, Homo sapien
tcttacagaaagtgacccaacaaat

SEQ ID NO: 2928649 - DNA, 25 bp, Homo sapien
gacatgtacagacaccagattatgg

SEQ ID NO: 2928650 - DNA, 25 bp, Homo sapien
tcagactaccaagttggaggccagg

SEQ ID NO: 2928651 - DNA, 25 bp, Homo sapien
caatacagttgttgatcaggagaca

SEQ ID NO: 2928652 - DNA, 25 bp, Homo sapien
taaaatgacagcaggtatgccttcc

SEQ ID NO: 2928653 - DNA, 25 bp, Homo sapien
accagtaaacgtaagctgcaaatga

SEQ ID NO: 2928654 - DNA, 25 bp, Homo sapien
ggataagctgataagtgattttccc

SEQ ID NO: 2928655 - DNA, 25 bp, Homo sapien
aacgataccaagacaaccaacctgg

SEQ ID NO: 2928656 - DNA, 25 bp, Homo sapien
cctgaactcctgaacatcctgaact

SEQ ID NO: 2928657 - DNA, 25 bp, Homo sapien
tacacagacttatgatggataagct

SEQ ID NO: 2928658 - DNA, 25 bp, Homo sapien
tgtggcaaactttcacaagcaggac

SEQ ID NO: 2928659 - DNA, 25 bp, Homo sapien
tggcaaactttcacaagcaggactt

SEQ ID NO: 2928660 - DNA, 25 bp, Homo sapien
gtggcaaactttcacaagcaggact

SEQ ID NO: 2928661 - DNA, 25 bp, Homo sapien
ggcaaactttcacaagcaggacttc

SEQ ID NO: 2928662 - DNA, 25 bp, Homo sapien
tcggttgaccaggaaacatcttaac

SEQ ID NO: 2928663 - DNA, 25 bp, Homo sapien
taagtgaatggctaataacgctgac

SEQ ID NO: 2928664 - DNA, 25 bp, Homo sapien
actacacagatatgcgagttggcaa

SEQ ID NO: 2928665 - DNA, 25 bp, Homo sapien
catatgttggctttgatcggttgac

SEQ ID NO: 2928666 - DNA, 25 bp, Homo sapien
tatggtcttggaagaatatcagcac

SEQ ID NO: 2928667 - DNA, 25 bp, Homo sapien
ttgaggcccttatggcctatggtct

SEQ ID NO: 2928668 - DNA, 25 bp, Homo sapien
tagtctactccctcccagtgattga

SEQ ID NO: 2928669 - DNA, 25 bp, Homo sapien
tccatggtgccttagtctactccct

SEQ ID NO: 2928670 - DNA, 25 bp, Homo sapien
aattcattactggaaactgcaaggg

SEQ ID NO: 2928671 - DNA, 25 bp, Homo sapien
aatagcaacgagtaagacttcacca

SEQ ID NO: 2928672 - DNA, 25 bp, Homo sapien
gtcaggattcaaaggcacctgcttt

SEQ ID NO: 2928673 - DNA, 25 bp, Homo sapien
ggacgagtcactctaaatagcaacg

SEQ ID NO: 2928674 - DNA, 25 bp, Homo sapien
tcctcacgatttcgttttcttctgg

SEQ ID NO: 2928675 - DNA, 25 bp, Homo sapien
cgatttcgttttcttctggctggaa

SEQ ID NO: 2928676 - DNA, 25 bp, Homo sapien
ctggctggaagctcttcattgacat

SEQ ID NO: 2928677 - DNA, 25 bp, Homo sapien
tcacgatttcgttttcttctggctg

SEQ ID NO: 2928678 - DNA, 25 bp, Homo sapien
catttccagaacattgtgggagcct

SEQ ID NO: 2928679 - DNA, 25 bp, Homo sapien
atttccagaacattgtgggagcctc

SEQ ID NO: 2928680 - DNA, 25 bp, Homo sapien
acatttccagaacattgtgggagcc

SEQ ID NO: 2928681 - DNA, 25 bp, Homo sapien
cagcggcgcgatctcaactcactgt

SEQ ID NO: 2928682 - DNA, 25 bp, Homo sapien
ggagacacagtctcgctgtcaccag

SEQ ID NO: 2928683 - DNA, 25 bp, Homo sapien
cacgcaccaccaggcccagctaatt

SEQ ID NO: 2928684 - DNA, 25 bp, Homo sapien
actcactgtaacctccgcctcctgg

SEQ ID NO: 2928685 - DNA, 25 bp, Homo sapien
ctaggaattcattactgtagctact

SEQ ID NO: 2928686 - DNA, 25 bp, Homo sapien
taaagtataatatgcctgaggtctc

SEQ ID NO: 2928687 - DNA, 25 bp, Homo sapien
tgtagctactcagatataactctaa

SEQ ID NO: 2928688 - DNA, 25 bp, Homo sapien
tcaaaacctggtacgttgtcaacat

SEQ ID NO: 2928689 - DNA, 25 bp, Homo sapien
catttcctgcatggctacttcatat

SEQ ID NO: 2928690 - DNA, 25 bp, Homo sapien
cttcccatcaagaatagtctcccat

SEQ ID NO: 2928691 - DNA, 25 bp, Homo sapien
ttccccatctaaaagctgtaagcgc

SEQ ID NO: 2928692 - DNA, 25 bp, Homo sapien
tcccatcaagaatagtctcccatgt

SEQ ID NO: 2928693 - DNA, 25 bp, Homo sapien
gaaaacactcgtccaacacagacag

SEQ ID NO: 2928694 - DNA, 25 bp, Homo sapien
gactgagacggctaggcaaacaaag

SEQ ID NO: 2928695 - DNA, 25 bp, Homo sapien
tggaccagacactgtagaacttgaa

SEQ ID NO: 2928696 - DNA, 25 bp, Homo sapien
taaaagaggcgaccactgatcagca

SEQ ID NO: 2928697 - DNA, 25 bp, Homo sapien
gaaaatgtttcgaatggaggcagcc

SEQ ID NO: 2928698 - DNA, 25 bp, Homo sapien
tcctgtccaacgaagagtgaactgc

SEQ ID NO: 2928699 - DNA, 25 bp, Homo sapien
gcaataggagccgtagatttatcat

SEQ ID NO: 2928700 - DNA, 25 bp, Homo sapien
tgaactgcaacgtaggtccctgaga

SEQ ID NO: 2928701 - DNA, 25 bp, Homo sapien
tattttgattgcaatgttttcttac

SEQ ID NO: 2928702 - DNA, 25 bp, Homo sapien
tgtagatctgtagtcaatgattctt

SEQ ID NO: 2928703 - DNA, 25 bp, Homo sapien
gtagatctgtagtcaatgattcttt

SEQ ID NO: 2928704 - DNA, 25 bp, Homo sapien
tttgtagatctgtagtcaatgattc

SEQ ID NO: 2928705 - DNA, 25 bp, Homo sapien
gatctgtagtcaatgattctttaac

SEQ ID NO: 2928706 - DNA, 25 bp, Homo sapien
tgcttcagtttgttgccttgtattg

SEQ ID NO: 2928707 - DNA, 25 bp, Homo sapien
aagtttgcggcagttcagagtacac

SEQ ID NO: 2928708 - DNA, 25 bp, Homo sapien
gaagataaatctgctatggcagagt

SEQ ID NO: 2928709 - DNA, 25 bp, Homo sapien
ggcagagtttaagatgcttgagtaa

SEQ ID NO: 2928710 - DNA, 25 bp, Homo sapien
tccaggttggcgatgaatatcctga

SEQ ID NO: 2928711 - DNA, 25 bp, Homo sapien
ccgttgcgactaaaagcaaatccag

SEQ ID NO: 2928712 - DNA, 25 bp, Homo sapien
ctgcataggagccatcataacactc

SEQ ID NO: 2928713 - DNA, 25 bp, Homo sapien
tatgtgtgataggtgttctcttaac

SEQ ID NO: 2928714 - DNA, 25 bp, Homo sapien
ctaggagttgagatctgtgataatc

SEQ ID NO: 2928715 - DNA, 25 bp, Homo sapien
tgcaacatcacccttttataaaact

SEQ ID NO: 2928716 - DNA, 25 bp, Homo sapien
aacaatagtattagaggcacacccc

SEQ ID NO: 2928717 - DNA, 25 bp, Homo sapien
tataccatctaacctcacgactagg

SEQ ID NO: 2928718 - DNA, 25 bp, Homo sapien
aatacagacgattgtggccactact

SEQ ID NO: 2928719 - DNA, 25 bp, Homo sapien
ttttctcttagccattcaggatcct

SEQ ID NO: 2928720 - DNA, 25 bp, Homo sapien
gaggtaagcaggtatcactatggaa

SEQ ID NO: 2928721 - DNA, 25 bp, Homo sapien
ccatttcttgtggacggagaggtaa

SEQ ID NO: 2928722 - DNA, 25 bp, Homo sapien
tattccaagataattgccaataaag

SEQ ID NO: 2928723 - DNA, 25 bp, Homo sapien
tccaagataattgccaataaagata

SEQ ID NO: 2928724 - DNA, 25 bp, Homo sapien
tagttcatagtaagcaattttcaaa

SEQ ID NO: 2928725 - DNA, 25 bp, Homo sapien
aagtctagttcatagtaagcaattt

SEQ ID NO: 2928726 - DNA, 25 bp, Homo sapien
catggagattccagagtttcatcac

SEQ ID NO: 2928727 - DNA, 25 bp, Homo sapien
ccatgcttcatgacatggagattcc

SEQ ID NO: 2928728 - DNA, 25 bp, Homo sapien
tctctccttcattaacatcagaaaa

SEQ ID NO: 2928729 - DNA, 25 bp, Homo sapien
ttcattaacatcagaaaactcttca

SEQ ID NO: 2928730 - DNA, 25 bp, Homo sapien
ctgcaatttccatttcccgggttct

SEQ ID NO: 2928731 - DNA, 25 bp, Homo sapien
aggtgtgtgacactgcacccggcta

SEQ ID NO: 2928732 - DNA, 25 bp, Homo sapien
catttcccgggttcttcaagtgatt

SEQ ID NO: 2928733 - DNA, 25 bp, Homo sapien
agttttgtacgtttagtggagacag

SEQ ID NO: 2928734 - DNA, 25 bp, Homo sapien
gactagatgaagcatgaagtttcga

SEQ ID NO: 2928735 - DNA, 25 bp, Homo sapien
taaagtcatgcatgctgactagatg

SEQ ID NO: 2928736 - DNA, 25 bp, Homo sapien
caaacagcatacaggcatgattcat

SEQ ID NO: 2928737 - DNA, 25 bp, Homo sapien
tgcatttcacggagcttggtaacag

SEQ ID NO: 2928738 - DNA, 25 bp, Homo sapien
gatgttactcaaccacagtgctcgg

SEQ ID NO: 2928739 - DNA, 25 bp, Homo sapien
aacataccgggtgagcaatgcacta

SEQ ID NO: 2928740 - DNA, 25 bp, Homo sapien
tgcataatgaagtgaagtagaaccc

SEQ ID NO: 2928741 - DNA, 25 bp, Homo sapien
ttaaagcccgagataaacgctcgag

SEQ ID NO: 2928742 - DNA, 25 bp, Homo sapien
ttatattattgaactttatgtacaa

SEQ ID NO: 2928743 - DNA, 25 bp, Homo sapien
cagaatacagcttttatattattga

SEQ ID NO: 2928744 - DNA, 25 bp, Homo sapien
tatattattgaactttatgtacaaa

SEQ ID NO: 2928745 - DNA, 25 bp, Homo sapien
tacagcttttatattattgaacttt

SEQ ID NO: 2928746 - DNA, 25 bp, Homo sapien
tttccgtggagtaactggcgtcctc

SEQ ID NO: 2928747 - DNA, 25 bp, Homo sapien
cgtggagtaactggcgtcctcgtcg

SEQ ID NO: 2928748 - DNA, 25 bp, Homo sapien
gctttccgtggagtaactggcgtcc

SEQ ID NO: 2928749 - DNA, 25 bp, Homo sapien
gctgaagctgctttccgtggagtaa

SEQ ID NO: 2928750 - DNA, 25 bp, Homo sapien
gaaaatggcccacatgctctacaga

SEQ ID NO: 2928751 - DNA, 25 bp, Homo sapien
ctttgcataagagggagaggtaaac

SEQ ID NO: 2928752 - DNA, 25 bp, Homo sapien
gctataatgcttttggtctatgaag

SEQ ID NO: 2928753 - DNA, 25 bp, Homo sapien
tcccctaagatccagatgagtacac

SEQ ID NO: 2928754 - DNA, 25 bp, Homo sapien
attaaactgtgtagttcttcccatc

SEQ ID NO: 2928755 - DNA, 25 bp, Homo sapien
ttgaattaaactgtgtagttcttcc

SEQ ID NO: 2928756 - DNA, 25 bp, Homo sapien
gaattaaactgtgtagttcttccca

SEQ ID NO: 2928757 - DNA, 25 bp, Homo sapien
tacaatctcttcactgggtctgcac

SEQ ID NO: 2928758 - DNA, 25 bp, Homo sapien
agccctgagatgctcatgcccctta

SEQ ID NO: 2928759 - DNA, 25 bp, Homo sapien
tgctcatgccccttataagcgtgtg

SEQ ID NO: 2928760 - DNA, 25 bp, Homo sapien
tgagatgctcatgccccttataagc

SEQ ID NO: 2928761 - DNA, 25 bp, Homo sapien
ctcatgccccttataagcgtgtgcc

SEQ ID NO: 2928762 - DNA, 25 bp, Homo sapien
gacacacgctggtgctatgcactca

SEQ ID NO: 2928763 - DNA, 25 bp, Homo sapien
tgtagaagaaggttccgcctcctcg

SEQ ID NO: 2928764 - DNA, 25 bp, Homo sapien
tagtttgaacccacttgaggcgagg

SEQ ID NO: 2928765 - DNA, 25 bp, Homo sapien
gttgagaagcggaaccacctctggg

SEQ ID NO: 2928766 - DNA, 25 bp, Homo sapien
tcaggaaggctccaacgttcagcta

SEQ ID NO: 2928767 - DNA, 25 bp, Homo sapien
tctcggtccaactgtatgctttcca

SEQ ID NO: 2928768 - DNA, 25 bp, Homo sapien
ccatcaaggtatgaaatatagtttc

SEQ ID NO: 2928769 - DNA, 25 bp, Homo sapien
tacatttccatcaaggtatgaaata

SEQ ID NO: 2928770 - DNA, 25 bp, Homo sapien
tgctttccatacatttccatcaagg

SEQ ID NO: 2928771 - DNA, 25 bp, Homo sapien
tctgctgacaatatagtcagttggc

SEQ ID NO: 2928772 - DNA, 25 bp, Homo sapien
cataagctcaacattcatcaatggg

SEQ ID NO: 2928773 - DNA, 25 bp, Homo sapien
aattcccaacagtgaaaaggtgtgg

SEQ ID NO: 2928774 - DNA, 25 bp, Homo sapien
tatgctacaggaatacttgcccact

SEQ ID NO: 2928775 - DNA, 25 bp, Homo sapien
gaatccatctctgggtggcaccaag

SEQ ID NO: 2928776 - DNA, 25 bp, Homo sapien
ctctcttctcccaaaccttattaca

SEQ ID NO: 2928777 - DNA, 25 bp, Homo sapien
tctcttctcccaaaccttattacaa

SEQ ID NO: 2928778 - DNA, 25 bp, Homo sapien
ccaagatctgcagaacctccatttc

SEQ ID NO: 2928779 - DNA, 25 bp, Homo sapien
tcaaatgaatccttaggtaattcag

SEQ ID NO: 2928780 - DNA, 25 bp, Homo sapien
tggaggtatagcaggccttcaaatg

SEQ ID NO: 2928781 - DNA, 25 bp, Homo sapien
aaatactggaggtatagcaggcctt

SEQ ID NO: 2928782 - DNA, 25 bp, Homo sapien
tccttaggtaattcagtcaaataat

SEQ ID NO: 2928783 - DNA, 25 bp, Homo sapien
gcactttggcatccacttgagggtc

SEQ ID NO: 2928784 - DNA, 25 bp, Homo sapien
ccactttccttaagcctttcacatt

SEQ ID NO: 2928785 - DNA, 25 bp, Homo sapien
cacttgagggtctttacacccactt

SEQ ID NO: 2928786 - DNA, 25 bp, Homo sapien
gcatccacttgagggtctttacacc

SEQ ID NO: 2928787 - DNA, 25 bp, Homo sapien
agcactgctgtgataacatggttcc

SEQ ID NO: 2928788 - DNA, 25 bp, Homo sapien
cactgctgtgataacatggttcccc

SEQ ID NO: 2928789 - DNA, 25 bp, Homo sapien
ctgctgtgataacatggttccccat

SEQ ID NO: 2928790 - DNA, 25 bp, Homo sapien
gcactgctgtgataacatggttccc

SEQ ID NO: 2928791 - DNA, 25 bp, Homo sapien
tctttcaatatatcgtattttattg

SEQ ID NO: 2928792 - DNA, 25 bp, Homo sapien
tcaatatatcgtattttattgcagg

SEQ ID NO: 2928793 - DNA, 25 bp, Homo sapien
gtctttcaatatatcgtattttatt

SEQ ID NO: 2928794 - DNA, 25 bp, Homo sapien
ttcaatatatcgtattttattgcag

SEQ ID NO: 2928795 - DNA, 25 bp, Homo sapien
tgtaattaaattgcagcccagattt

SEQ ID NO: 2928796 - DNA, 25 bp, Homo sapien
tgccggcagttcaaagagatatgga

SEQ ID NO: 2928797 - DNA, 25 bp, Homo sapien
ttttaatgccggcagttcaaagaga

SEQ ID NO: 2928798 - DNA, 25 bp, Homo sapien
gatattttaatgccggcagttcaaa

SEQ ID NO: 2928799 - DNA, 25 bp, Homo sapien
taatgccggcagttcaaagagatat

SEQ ID NO: 2928800 - DNA, 25 bp, Homo sapien
ctgaagaagaaagccgaaacattca

SEQ ID NO: 2928801 - DNA, 25 bp, Homo sapien
tgaagaagaaagccgaaacattcat

SEQ ID NO: 2928802 - DNA, 25 bp, Homo sapien
ttgtaagtgtgatgtgtgttgttcc

SEQ ID NO: 2928803 - DNA, 25 bp, Homo sapien
caacagtcatcgtgagaatgttctt

SEQ ID NO: 2928804 - DNA, 25 bp, Homo sapien
tgttgtaagtgtgatgtgtgttgtt

SEQ ID NO: 2928805 - DNA, 25 bp, Homo sapien
taagtgttgtaagtgtgatgtgtgt

SEQ ID NO: 2928806 - DNA, 25 bp, Homo sapien
caagaggctacatgctacatgattt

SEQ ID NO: 2928807 - DNA, 25 bp, Homo sapien
aaacacaagaggctacatgctacat

SEQ ID NO: 2928808 - DNA, 25 bp, Homo sapien
aaatgaggggcctttctgaggtgac

SEQ ID NO: 2928809 - DNA, 25 bp, Homo sapien
gaaatgaggggcctttctgaggtga

SEQ ID NO: 2928810 - DNA, 25 bp, Homo sapien
agggccagctgtactgataggggca

SEQ ID NO: 2928811 - DNA, 25 bp, Homo sapien
ccagctgtactgataggggcaacaa

SEQ ID NO: 2928812 - DNA, 25 bp, Homo sapien
gctgtactgataggggcaacaacat

SEQ ID NO: 2928813 - DNA, 25 bp, Homo sapien
ggccagctgtactgataggggcaac

SEQ ID NO: 2928814 - DNA, 25 bp, Homo sapien
tcctatccactaatggtcaagaaga

SEQ ID NO: 2928815 - DNA, 25 bp, Homo sapien
tttcagccctgcaaccgacaggctg

SEQ ID NO: 2928816 - DNA, 25 bp, Homo sapien
agcagacagatcctcactatcttag

SEQ ID NO: 2928817 - DNA, 25 bp, Homo sapien
ggccttggtgacaaatggttacaga

SEQ ID NO: 2928818 - DNA, 25 bp, Homo sapien
cgccttgctgatgacatctccatct

SEQ ID NO: 2928819 - DNA, 25 bp, Homo sapien
ttccgtcaccgccttgctgatgaca

SEQ ID NO: 2928820 - DNA, 25 bp, Homo sapien
tccgtcaccgccttgctgatgacat

SEQ ID NO: 2928821 - DNA, 25 bp, Homo sapien
caccgccttgctgatgacatctcca

SEQ ID NO: 2928822 - DNA, 25 bp, Homo sapien
tggatcttgcacactgtgttgagca

SEQ ID NO: 2928823 - DNA, 25 bp, Homo sapien
gccctggatcttgcacactgtgttg

SEQ ID NO: 2928824 - DNA, 25 bp, Homo sapien
ctggccctggatcttgcacactgtg

SEQ ID NO: 2928825 - DNA, 25 bp, Homo sapien
cctggatcttgcacactgtgttgag

SEQ ID NO: 2928826 - DNA, 25 bp, Homo sapien
agtcaaagtccaggcggcggccctc

SEQ ID NO: 2928827 - DNA, 25 bp, Homo sapien
tagtcaaagtccaggcggcggccct

SEQ ID NO: 2928828 - DNA, 25 bp, Homo sapien
tgagcacgtccatgtagctgagcag

SEQ ID NO: 2928829 - DNA, 25 bp, Homo sapien
gggcgggggcaccagtgagtcactg

SEQ ID NO: 2928830 - DNA, 25 bp, Homo sapien
tccgccagggcccggagttgactca

SEQ ID NO: 2928831 - DNA, 25 bp, Homo sapien
agtcatacagcaccttgcagcttgg

SEQ ID NO: 2928832 - DNA, 25 bp, Homo sapien
ctcccacccaagtgtggctccctgc

SEQ ID NO: 2928833 - DNA, 25 bp, Homo sapien
cccacccaagtgtggctccctgctg

SEQ ID NO: 2928834 - DNA, 25 bp, Homo sapien
ataagcctcccacccaagtgtggct

SEQ ID NO: 2928835 - DNA, 25 bp, Homo sapien
gcctcccacccaagtgtggctccct

SEQ ID NO: 2928836 - DNA, 25 bp, Homo sapien
ttggtgtgtgagggtaaggcttggg

SEQ ID NO: 2928837 - DNA, 25 bp, Homo sapien
taccaggggcttgaacatttgctca

SEQ ID NO: 2928838 - DNA, 25 bp, Homo sapien
cgtcgattttggattgggcgacaga

SEQ ID NO: 2928839 - DNA, 25 bp, Homo sapien
gacatgctggcctggacaggggtct

SEQ ID NO: 2928840 - DNA, 25 bp, Homo sapien
cttggcaaggggaggcctggctacc

SEQ ID NO: 2928841 - DNA, 25 bp, Homo sapien
ggggaagggaatgtgaatgtggccc

SEQ ID NO: 2928842 - DNA, 25 bp, Homo sapien
agggggaagggaatgtgaatgtggc

SEQ ID NO: 2928843 - DNA, 25 bp, Homo sapien
gggaagggaatgtgaatgtggccca

SEQ ID NO: 2928844 - DNA, 25 bp, Homo sapien
tcagggggaagggaatgtgaatgtg

SEQ ID NO: 2928845 - DNA, 25 bp, Homo sapien
ccttcatgtactgccgaccacgagg

SEQ ID NO: 2928846 - DNA, 25 bp, Homo sapien
tctgtgcccttcatgtactgccgac

SEQ ID NO: 2928847 - DNA, 25 bp, Homo sapien
tactgccgaccacgagggtgcagag

SEQ ID NO: 2928848 - DNA, 25 bp, Homo sapien
atgtactgccgaccacgagggtgca

SEQ ID NO: 2928849 - DNA, 25 bp, Homo sapien
gattgaatgtacccagaaccataac

SEQ ID NO: 2928850 - DNA, 25 bp, Homo sapien
agaaccataacctagcattttactt

SEQ ID NO: 2928851 - DNA, 25 bp, Homo sapien
gaaccataacctagcattttactta

SEQ ID NO: 2928852 - DNA, 25 bp, Homo sapien
tgatcttcatatagattgaatgtac

SEQ ID NO: 2928853 - DNA, 25 bp, Homo sapien
atcaaacttagcattatgagccacc

SEQ ID NO: 2928854 - DNA, 25 bp, Homo sapien
gatcaaacttagcattatgagccac

SEQ ID NO: 2928855 - DNA, 25 bp, Homo sapien
tcaaacttagcattatgagccacct

SEQ ID NO: 2928856 - DNA, 25 bp, Homo sapien
caaacttagcattatgagccacctg

SEQ ID NO: 2928857 - DNA, 25 bp, Homo sapien
ctgggcaaagaggtgttactgagac

SEQ ID NO: 2928858 - DNA, 25 bp, Homo sapien
caaagaggtgttactgagacccgtg

SEQ ID NO: 2928859 - DNA, 25 bp, Homo sapien
tactgagacccgtggactggacact

SEQ ID NO: 2928860 - DNA, 25 bp, Homo sapien
gtgttactgagacccgtggactgga

SEQ ID NO: 2928861 - DNA, 25 bp, Homo sapien
tgtatgctgttagtcagacatgcag

SEQ ID NO: 2928862 - DNA, 25 bp, Homo sapien
gtatgctgttagtcagacatgcagt

SEQ ID NO: 2928863 - DNA, 25 bp, Homo sapien
atgctaaaggagcagggcgggatgc

SEQ ID NO: 2928864 - DNA, 25 bp, Homo sapien
tggcaacaacgaaaggaggaaaaga

SEQ ID NO: 2928865 - DNA, 25 bp, Homo sapien
atggcaacaacgaaaggaggaaaag

SEQ ID NO: 2928866 - DNA, 25 bp, Homo sapien
tgatcatgaaatatctttgatcatc

SEQ ID NO: 2928867 - DNA, 25 bp, Homo sapien
ttgatcatgaaatatctttgatcat

SEQ ID NO: 2928868 - DNA, 25 bp, Homo sapien
agggcgcctccgactcaatagtcag

SEQ ID NO: 2928869 - DNA, 25 bp, Homo sapien
ggcgcctccgactcaatagtcagct

SEQ ID NO: 2928870 - DNA, 25 bp, Homo sapien
gagggcgcctccgactcaatagtca

SEQ ID NO: 2928871 - DNA, 25 bp, Homo sapien
ctgagggcgcctccgactcaatagt

SEQ ID NO: 2928872 - DNA, 25 bp, Homo sapien
ccagtgagagataaggcaagatgta

SEQ ID NO: 2928873 - DNA, 25 bp, Homo sapien
ttcccagtgagagataaggcaagat

SEQ ID NO: 2928874 - DNA, 25 bp, Homo sapien
atttcccagtgagagataaggcaag

SEQ ID NO: 2928875 - DNA, 25 bp, Homo sapien
ctagatttcccagtgagagataagg

SEQ ID NO: 2928876 - DNA, 25 bp, Homo sapien
gctgttcagtgaacggtaacaatat

SEQ ID NO: 2928877 - DNA, 25 bp, Homo sapien
tgtgaggggctctttctattgtttt

SEQ ID NO: 2928878 - DNA, 25 bp, Homo sapien
tcagtgaacggtaacaatattgatt

SEQ ID NO: 2928879 - DNA, 25 bp, Homo sapien
ttgaaaatagctgttcagtgaacgg

SEQ ID NO: 2928880 - DNA, 25 bp, Homo sapien
aaggagcaactacttccagaagagg

SEQ ID NO: 2928881 - DNA, 25 bp, Homo sapien
tgggcatcctgttctttcctagtgc

SEQ ID NO: 2928882 - DNA, 25 bp, Homo sapien
cactctagccattgccatttctaaa

SEQ ID NO: 2928883 - DNA, 25 bp, Homo sapien
gagcatcggtctgttgagataactg

SEQ ID NO: 2928884 - DNA, 25 bp, Homo sapien
gctcaggggacaagtcaatgcccac

SEQ ID NO: 2928885 - DNA, 25 bp, Homo sapien
gggacaagtcaatgcccacattgtt

SEQ ID NO: 2928886 - DNA, 25 bp, Homo sapien
ctttgaacacatctcttttgtgtct

SEQ ID NO: 2928887 - DNA, 25 bp, Homo sapien
agtcaatgcccacattgttgtattc

SEQ ID NO: 2928888 - DNA, 25 bp, Homo sapien
tgaactttctcacatcctcgttggg

SEQ ID NO: 2928889 - DNA, 25 bp, Homo sapien
tgttcgcaacatgagcttggcacag

SEQ ID NO: 2928890 - DNA, 25 bp, Homo sapien
ccggataacatgagacatgaacttt

SEQ ID NO: 2928891 - DNA, 25 bp, Homo sapien
cttggcacagctcccttgcacatgt

SEQ ID NO: 2928892 - DNA, 25 bp, Homo sapien
atgtgggcactctcctggcatacgc

SEQ ID NO: 2928893 - DNA, 25 bp, Homo sapien
tgatgggaaatctgggtctcatgtt

SEQ ID NO: 2928894 - DNA, 25 bp, Homo sapien
ctatgtgggcactctcctggcatac

SEQ ID NO: 2928895 - DNA, 25 bp, Homo sapien
tggcatacgctaaatgatgggaaat

SEQ ID NO: 2928896 - DNA, 25 bp, Homo sapien
acagtcacagatattgcgaagatga

SEQ ID NO: 2928897 - DNA, 25 bp, Homo sapien
cagtcacagatattgcgaagatgag

SEQ ID NO: 2928898 - DNA, 25 bp, Homo sapien
cgaagatgagtttgttcttatagtc

SEQ ID NO: 2928899 - DNA, 25 bp, Homo sapien
gatattgcgaagatgagtttgttct

SEQ ID NO: 2928900 - DNA, 25 bp, Homo sapien
tctcaaaaagggactaggctcagga

SEQ ID NO: 2928901 - DNA, 25 bp, Homo sapien
gatggaaaccctaaaactcttctga

SEQ ID NO: 2928902 - DNA, 25 bp, Homo sapien
caaatcccaagatagtttttggtgg

SEQ ID NO: 2928903 - DNA, 25 bp, Homo sapien
tgaaataccatgttctagaatgtcg

SEQ ID NO: 2928904 - DNA, 25 bp, Homo sapien
ggaattgtatgctgtttaacagtgc

SEQ ID NO: 2928905 - DNA, 25 bp, Homo sapien
tatctatcacaacaaccactatctc

SEQ ID NO: 2928906 - DNA, 25 bp, Homo sapien
ctccaatgtgtattcattcctttta

SEQ ID NO: 2928907 - DNA, 25 bp, Homo sapien
aaacacaattaaggttatctatcac

SEQ ID NO: 2928908 - DNA, 25 bp, Homo sapien
ggctcctgatattgatgggttgtct

SEQ ID NO: 2928909 - DNA, 25 bp, Homo sapien
ttctgatgcccttttatgtgaattc

SEQ ID NO: 2928910 - DNA, 25 bp, Homo sapien
cctgatattgatgggttgtctttgt

SEQ ID NO: 2928911 - DNA, 25 bp, Homo sapien
tcaggctcctgatattgatgggttg

SEQ ID NO: 2928912 - DNA, 25 bp, Homo sapien
gccatccacatgctttaactcatgc

SEQ ID NO: 2928913 - DNA, 25 bp, Homo sapien
ggccatccacatgctttaactcatg

SEQ ID NO: 2928914 - DNA, 25 bp, Homo sapien
tctcattttgaggaacacaaccaca

SEQ ID NO: 2928915 - DNA, 25 bp, Homo sapien
cattttgaggaacacaaccacaaag

SEQ ID NO: 2928916 - DNA, 25 bp, Homo sapien
ttaaaaatgatctaacaagctttat

SEQ ID NO: 2928917 - DNA, 25 bp, Homo sapien
cacaaagtaaagaaagttttcattg

SEQ ID NO: 2928918 - DNA, 25 bp, Homo sapien
tcatgtccagcctaggacgctaaag

SEQ ID NO: 2928919 - DNA, 25 bp, Homo sapien
cctactactactgctcccaatggga

SEQ ID NO: 2928920 - DNA, 25 bp, Homo sapien
gacgctaaagttgacccagggctca

SEQ ID NO: 2928921 - DNA, 25 bp, Homo sapien
cagagagatacgtctccttccaggc

SEQ ID NO: 2928922 - DNA, 25 bp, Homo sapien
gtgttccgccttgttggccgggctg

SEQ ID NO: 2928923 - DNA, 25 bp, Homo sapien
tgttccgccttgttggccgggctgg

SEQ ID NO: 2928924 - DNA, 25 bp, Homo sapien
ctttccttgatatatctctgattgc

SEQ ID NO: 2928925 - DNA, 25 bp, Homo sapien
cagccccccatgttttctttccttg

SEQ ID NO: 2928926 - DNA, 25 bp, Homo sapien
tgggctggtacggttgggcaggttg

SEQ ID NO: 2928927 - DNA, 25 bp, Homo sapien
gctggtacggttgggcaggttggac

SEQ ID NO: 2928928 - DNA, 25 bp, Homo sapien
cagggtgggctggtacggttgggca

SEQ ID NO: 2928929 - DNA, 25 bp, Homo sapien
tcagggtgggctggtacggttgggc

SEQ ID NO: 2928930 - DNA, 25 bp, Homo sapien
aagagggttgcagctacttcagggc

SEQ ID NO: 2928931 - DNA, 25 bp, Homo sapien
gttgcagctacttcagggccagtgt

SEQ ID NO: 2928932 - DNA, 25 bp, Homo sapien
cttcctgtgtattaagagggttgca

SEQ ID NO: 2928933 - DNA, 25 bp, Homo sapien
tgtgtattaagagggttgcagctac

SEQ ID NO: 2928934 - DNA, 25 bp, Homo sapien
ttcccaggtctcacagaacacgagg

SEQ ID NO: 2928935 - DNA, 25 bp, Homo sapien
tggagggaggagaactcctgctccc

SEQ ID NO: 2928936 - DNA, 25 bp, Homo sapien
acacgaggaacacggtctttctcca

SEQ ID NO: 2928937 - DNA, 25 bp, Homo sapien
tctcacagaacacgaggaacacggt

SEQ ID NO: 2928938 - DNA, 25 bp, Homo sapien
gagaggagggtctggatgggaccca

SEQ ID NO: 2928939 - DNA, 25 bp, Homo sapien
cggtttggagaggagggtctggatg

SEQ ID NO: 2928940 - DNA, 25 bp, Homo sapien
ttggagaggagggtctggatgggac

SEQ ID NO: 2928941 - DNA, 25 bp, Homo sapien
ccggtttggagaggagggtctggat

SEQ ID NO: 2928942 - DNA, 25 bp, Homo sapien
gtgcgcagctcggtgtgagggccag

SEQ ID NO: 2928943 - DNA, 25 bp, Homo sapien
tgcgcagctcggtgtgagggccagt

SEQ ID NO: 2928944 - DNA, 25 bp, Homo sapien
gtgtgcgcagctcggtgtgagggcc

SEQ ID NO: 2928945 - DNA, 25 bp, Homo sapien
tgtgcgcagctcggtgtgagggcca

SEQ ID NO: 2928946 - DNA, 25 bp, Homo sapien
ttcctgacgcgtttgagggtccgtg

SEQ ID NO: 2928947 - DNA, 25 bp, Homo sapien
gaaccatccctgctgcagatatggg

SEQ ID NO: 2928948 - DNA, 25 bp, Homo sapien
gggccccgatcatctccttgactgg

SEQ ID NO: 2928949 - DNA, 25 bp, Homo sapien
tcaatttgcggcttgccactttgct

SEQ ID NO: 2928950 - DNA, 25 bp, Homo sapien
tcattgttccggctagatccgcggt

SEQ ID NO: 2928951 - DNA, 25 bp, Homo sapien
taatagaccaaaggactctggcggc

SEQ ID NO: 2928952 - DNA, 25 bp, Homo sapien
gactctggcggcttagctctttttc

SEQ ID NO: 2928953 - DNA, 25 bp, Homo sapien
gcggtcagggcttcaaatgcaaaac

SEQ ID NO: 2928954 - DNA, 25 bp, Homo sapien
gggagggcggcaagaggcgcttcat

SEQ ID NO: 2928955 - DNA, 25 bp, Homo sapien
gagggcggcaagaggcgcttcatta

SEQ ID NO: 2928956 - DNA, 25 bp, Homo sapien
aagaggcgcttcattagcgcctctg

SEQ ID NO: 2928957 - DNA, 25 bp, Homo sapien
cggcaagaggcgcttcattagcgcc

SEQ ID NO: 2928958 - DNA, 25 bp, Homo sapien
agagtaggaaattggagccagatct

SEQ ID NO: 2928959 - DNA, 25 bp, Homo sapien
ggagagtaggaaattggagccagat

SEQ ID NO: 2928960 - DNA, 25 bp, Homo sapien
ctgtagattacaaggagggagagta

SEQ ID NO: 2928961 - DNA, 25 bp, Homo sapien
cagatcttctagggctttgaatgcc

SEQ ID NO: 2928962 - DNA, 25 bp, Homo sapien
ctgaacctttgcactgtagtaccaa

SEQ ID NO: 2928963 - DNA, 25 bp, Homo sapien
gctgaacctttgcactgtagtacca

SEQ ID NO: 2928964 - DNA, 25 bp, Homo sapien
agctgaacctttgcactgtagtacc

SEQ ID NO: 2928965 - DNA, 25 bp, Homo sapien
ccctcttgccattagctgttgccag

SEQ ID NO: 2928966 - DNA, 25 bp, Homo sapien
ttgccattagctgttgccagaaagg

SEQ ID NO: 2928967 - DNA, 25 bp, Homo sapien
gaaaatgcccctcttgccattagct

SEQ ID NO: 2928968 - DNA, 25 bp, Homo sapien
tgcccctcttgccattagctgttgc

SEQ ID NO: 2928969 - DNA, 25 bp, Homo sapien
agaggaagcaagactacagggagca

SEQ ID NO: 2928970 - DNA, 25 bp, Homo sapien
cttcacaagaggaagcaagactaca

SEQ ID NO: 2928971 - DNA, 25 bp, Homo sapien
agggctagggtcagcacccgtccca

SEQ ID NO: 2928972 - DNA, 25 bp, Homo sapien
acccgtcccagcctccctgactggc

SEQ ID NO: 2928973 - DNA, 25 bp, Homo sapien
ggcacttcgatgctctgatggctaa

SEQ ID NO: 2928974 - DNA, 25 bp, Homo sapien
tcgatgctctgatggctaagacgtg

SEQ ID NO: 2928975 - DNA, 25 bp, Homo sapien
agacgtgatcccctattcttttcct

SEQ ID NO: 2928976 - DNA, 25 bp, Homo sapien
tctgatggctaagacgtgatcccct

SEQ ID NO: 2928977 - DNA, 25 bp, Homo sapien
tcctagggctcgaggactggaaagc

SEQ ID NO: 2928978 - DNA, 25 bp, Homo sapien
gcagaatggaggtgcaaagcctcct

SEQ ID NO: 2928979 - DNA, 25 bp, Homo sapien
gctcgaggactggaaagcggattcc

SEQ ID NO: 2928980 - DNA, 25 bp, Homo sapien
gcaaagcctcctagggctcgaggac

SEQ ID NO: 2928981 - DNA, 25 bp, Homo sapien
ggacaatgccttctcccttaaactg

SEQ ID NO: 2928982 - DNA, 25 bp, Homo sapien
gaggacaatgccttctcccttaaac

SEQ ID NO: 2928983 - DNA, 25 bp, Homo sapien
acaatgccttctcccttaaactggg

SEQ ID NO: 2928984 - DNA, 25 bp, Homo sapien
tgaggacaatgccttctcccttaaa

SEQ ID NO: 2928985 - DNA, 25 bp, Homo sapien
agtcatgcaggcctctcgatcgaga

SEQ ID NO: 2928986 - DNA, 25 bp, Homo sapien
ttcctggaagatgagaaactctggt

SEQ ID NO: 2928987 - DNA, 25 bp, Homo sapien
tgagaaactctggtgcaaataaaga

SEQ ID NO: 2928988 - DNA, 25 bp, Homo sapien
cgagagtgatgtcctaggtttattc

SEQ ID NO: 2928989 - DNA, 25 bp, Homo sapien
actctcacggccctgggactttcag

SEQ ID NO: 2928990 - DNA, 25 bp, Homo sapien
tgagtttagaagcacagaggatgca

SEQ ID NO: 2928991 - DNA, 25 bp, Homo sapien
aaaacagtccctggatcatcctgca

SEQ ID NO: 2928992 - DNA, 25 bp, Homo sapien
taagctgaaacctacacagtgctga

SEQ ID NO: 2928993 - DNA, 25 bp, Homo sapien
tcagttgcttccccgcaagagagcc

SEQ ID NO: 2928994 - DNA, 25 bp, Homo sapien
ctcagttgcttccccgcaagagagc

SEQ ID NO: 2928995 - DNA, 25 bp, Homo sapien
cctccgcccgcacgcacggagtgga

SEQ ID NO: 2928996 - DNA, 25 bp, Homo sapien
ccgcccgcacgcacggagtggactc

SEQ ID NO: 2928997 - DNA, 25 bp, Homo sapien
cggcctccgcccgcacgcacggagt

SEQ ID NO: 2928998 - DNA, 25 bp, Homo sapien
gggccggcctccgcccgcacgcacg

SEQ ID NO: 2928999 - DNA, 25 bp, Homo sapien
caccagcaggatccgcacgtctttc

SEQ ID NO: 2929000 - DNA, 25 bp, Homo sapien
gttctcccaccagcaggatccgcac

SEQ ID NO: 2929001 - DNA, 25 bp, Homo sapien
cagcaggatccgcacgtctttcttc

SEQ ID NO: 2929002 - DNA, 25 bp, Homo sapien
gcaggatccgcacgtctttcttcat

SEQ ID NO: 2929003 - DNA, 25 bp, Homo sapien
cttgctagagacccaagtgggtgtc

SEQ ID NO: 2929004 - DNA, 25 bp, Homo sapien
ttacttgctagagacccaagtgggt

SEQ ID NO: 2929005 - DNA, 25 bp, Homo sapien
tttacttgctagagacccaagtggg

SEQ ID NO: 2929006 - DNA, 25 bp, Homo sapien
tacttgctagagacccaagtgggtg

SEQ ID NO: 2929007 - DNA, 25 bp, Homo sapien
ggaataacaggtcgctactgaggca

SEQ ID NO: 2929008 - DNA, 25 bp, Homo sapien
tggcacagagcatcagaatcccttg

SEQ ID NO: 2929009 - DNA, 25 bp, Homo sapien
tcttaacagcaaccggagaactggg

SEQ ID NO: 2929010 - DNA, 25 bp, Homo sapien
gaaaagggcctctagcacatcaacc

SEQ ID NO: 2929011 - DNA, 25 bp, Homo sapien
taccgctggtagagggatagatcag

SEQ ID NO: 2929012 - DNA, 25 bp, Homo sapien
tgaatctagaggaaaacagtccaca

SEQ ID NO: 2929013 - DNA, 25 bp, Homo sapien
ggctatgaacaaccgagtaccgctg

SEQ ID NO: 2929014 - DNA, 25 bp, Homo sapien
gaacacaagtccagtctctgggaaa

SEQ ID NO: 2929015 - DNA, 25 bp, Homo sapien
tcttcactgaccagagacataatca

SEQ ID NO: 2929016 - DNA, 25 bp, Homo sapien
tactctgcaaatgaggaggtattta

SEQ ID NO: 2929017 - DNA, 25 bp, Homo sapien
gaggaggtatttaaatccacaacaa

SEQ ID NO: 2929018 - DNA, 25 bp, Homo sapien
ctgaagatactctgcaaatgaggag

SEQ ID NO: 2929019 - DNA, 25 bp, Homo sapien
cttggattaatttggtgtttcggtg

SEQ ID NO: 2929020 - DNA, 25 bp, Homo sapien
atttctaagcccagaatctgaaatc

SEQ ID NO: 2929021 - DNA, 25 bp, Homo sapien
tttctaagcccagaatctgaaatct

SEQ ID NO: 2929022 - DNA, 25 bp, Homo sapien
ctgagtaatctacaatgtgtgttgg

SEQ ID NO: 2929023 - DNA, 25 bp, Homo sapien
cagctggaatggtgatttcttctgc

SEQ ID NO: 2929024 - DNA, 25 bp, Homo sapien
ggtgacatcagctggaatggtgatt

SEQ ID NO: 2929025 - DNA, 25 bp, Homo sapien
caatgtgtgttggaactctctctgg

SEQ ID NO: 2929026 - DNA, 25 bp, Homo sapien
gatgaagttgttcatcactctgttc

SEQ ID NO: 2929027 - DNA, 25 bp, Homo sapien
ctgagatatttcttgatgaagttgt

SEQ ID NO: 2929028 - DNA, 25 bp, Homo sapien
agttgttcatcactctgttctgctt

SEQ ID NO: 2929029 - DNA, 25 bp, Homo sapien
gaagttgttcatcactctgttctgc

SEQ ID NO: 2929030 - DNA, 25 bp, Homo sapien
aacggcatacactatacagatgaca

SEQ ID NO: 2929031 - DNA, 25 bp, Homo sapien
aatgcttgttgttaacggcatacac

SEQ ID NO: 2929032 - DNA, 25 bp, Homo sapien
taacggcatacactatacagatgac

SEQ ID NO: 2929033 - DNA, 25 bp, Homo sapien
ggcatacactatacagatgacatta

SEQ ID NO: 2929034 - DNA, 25 bp, Homo sapien
tttcatttatgagaggaatccatcg

SEQ ID NO: 2929035 - DNA, 25 bp, Homo sapien
tttatgagaggaatccatcgacttg

SEQ ID NO: 2929036 - DNA, 25 bp, Homo sapien
tcatttatgagaggaatccatcgac

SEQ ID NO: 2929037 - DNA, 25 bp, Homo sapien
tatgagaggaatccatcgacttgtt

SEQ ID NO: 2929038 - DNA, 25 bp, Homo sapien
tggttttcctacacagtgtttgtgt

SEQ ID NO: 2929039 - DNA, 25 bp, Homo sapien
ccgggcagaggtgcttcccatttcc

SEQ ID NO: 2929040 - DNA, 25 bp, Homo sapien
ggcagccaagtagaggcgctcccca

SEQ ID NO: 2929041 - DNA, 25 bp, Homo sapien
cgcttcccatttcccagacggggca

SEQ ID NO: 2929042 - DNA, 25 bp, Homo sapien
agcttggagggaaagcaaatcatcc

SEQ ID NO: 2929043 - DNA, 25 bp, Homo sapien
cttgggaagctgtcatggtaaagcc

SEQ ID NO: 2929044 - DNA, 25 bp, Homo sapien
tgatagatcttagcaaaactgccct

SEQ ID NO: 2929045 - DNA, 25 bp, Homo sapien
gatattaaggaggaccaacctagtg

SEQ ID NO: 2929046 - DNA, 25 bp, Homo sapien
tgcctgggcagatctataaacctga

SEQ ID NO: 2929047 - DNA, 25 bp, Homo sapien
gaaaactccctatgtaaaggtgaca

SEQ ID NO: 2929048 - DNA, 25 bp, Homo sapien
caagctgcagtaaggagtgtaggtt

SEQ ID NO: 2929049 - DNA, 25 bp, Homo sapien
tgccagaatggctacagagtactga

SEQ ID NO: 2929050 - DNA, 25 bp, Homo sapien
gatcagatttgttcccaaccaatat

SEQ ID NO: 2929051 - DNA, 25 bp, Homo sapien
ccagatcagatttgttcccaaccaa

SEQ ID NO: 2929052 - DNA, 25 bp, Homo sapien
gatggtctccatactactatattcc

SEQ ID NO: 2929053 - DNA, 25 bp, Homo sapien
tactggttcataataggaaggatgg

SEQ ID NO: 2929054 - DNA, 25 bp, Homo sapien
tcctctgggcagtacaggggccctg

SEQ ID NO: 2929055 - DNA, 25 bp, Homo sapien
ggccctgtaggatgaagaacagctt

SEQ ID NO: 2929056 - DNA, 25 bp, Homo sapien
ataaaagagctctgatatgttcttc

SEQ ID NO: 2929057 - DNA, 25 bp, Homo sapien
aacagctttctgtgcgtaataaaag

SEQ ID NO: 2929058 - DNA, 25 bp, Homo sapien
caggcccgagaacaaagtaacaatt

SEQ ID NO: 2929059 - DNA, 25 bp, Homo sapien
tatactgctaggctaaggcctcaga

SEQ ID NO: 2929060 - DNA, 25 bp, Homo sapien
tagcagaactaataacaggcccgag

SEQ ID NO: 2929061 - DNA, 25 bp, Homo sapien
taagagttcccacagtattaagact

SEQ ID NO: 2929062 - DNA, 25 bp, Homo sapien
gaagttgagttcagcatcattgaga

SEQ ID NO: 2929063 - DNA, 25 bp, Homo sapien
catcattgagagtaccatcattatc

SEQ ID NO: 2929064 - DNA, 25 bp, Homo sapien
cattatcttgatcagatattttaaa

SEQ ID NO: 2929065 - DNA, 25 bp, Homo sapien
agggcttttatacaagctggtttca

SEQ ID NO: 2929066 - DNA, 25 bp, Homo sapien
ctaatggagtgttgaaacaaatcct

SEQ ID NO: 2929067 - DNA, 25 bp, Homo sapien
tgactacattcttgacatcctccag

SEQ ID NO: 2929068 - DNA, 25 bp, Homo sapien
ctggataaaaagtgtgtgtaaaaag

SEQ ID NO: 2929069 - DNA, 25 bp, Homo sapien
tggataaaaagtgtgtgtaaaaaga

SEQ ID NO: 2929070 - DNA, 25 bp, Homo sapien
gataaaaagtgtgtgtaaaaagaga

SEQ ID NO: 2929071 - DNA, 25 bp, Homo sapien
caaatcgtcgaagcacagtccaagt

SEQ ID NO: 2929072 - DNA, 25 bp, Homo sapien
tcatcatcataaccaaatcgtcgaa

SEQ ID NO: 2929073 - DNA, 25 bp, Homo sapien
gaacaaatattcaggtgtcaaatcc

SEQ ID NO: 2929074 - DNA, 25 bp, Homo sapien
gaagcacagtccaagtagtttcgtg

SEQ ID NO: 2929075 - DNA, 25 bp, Homo sapien
tgatttaattcagtagtgcaatcag

SEQ ID NO: 2929076 - DNA, 25 bp, Homo sapien
agtagtgcaatcaggaggtattttc

SEQ ID NO: 2929077 - DNA, 25 bp, Homo sapien
tgcatgatgatttaattcagtagtg

SEQ ID NO: 2929078 - DNA, 25 bp, Homo sapien
agtgcaatcaggaggtattttcagc

SEQ ID NO: 2929079 - DNA, 25 bp, Homo sapien
catctggcccccaaggtatgtaagg

SEQ ID NO: 2929080 - DNA, 25 bp, Homo sapien
aaggaatccctggtaggttatccag

SEQ ID NO: 2929081 - DNA, 25 bp, Homo sapien
gcctctttcattggtacaaactgtg

SEQ ID NO: 2929082 - DNA, 25 bp, Homo sapien
caaactgtgttattcacatctggcc

SEQ ID NO: 2929083 - DNA, 25 bp, Homo sapien
aatgcaagatggtgggtaattcctc

SEQ ID NO: 2929084 - DNA, 25 bp, Homo sapien
caaacataagcggtgagtggctggt

SEQ ID NO: 2929085 - DNA, 25 bp, Homo sapien
tgtccagaaacactaagcttacaaa

SEQ ID NO: 2929086 - DNA, 25 bp, Homo sapien
tattttatgcgatctaccttccaag

SEQ ID NO: 2929087 - DNA, 25 bp, Homo sapien
gaatagcctagatagcccaaatatt

SEQ ID NO: 2929088 - DNA, 25 bp, Homo sapien
tcttgctcagtcaatattgaatagc

SEQ ID NO: 2929089 - DNA, 25 bp, Homo sapien
ctgtacatctaaataagtcgtgagc

SEQ ID NO: 2929090 - DNA, 25 bp, Homo sapien
ccaaatattccaggcaccgctgtac

SEQ ID NO: 2929091 - DNA, 25 bp, Homo sapien
tgttttttctgcaggtctatctttt

SEQ ID NO: 2929092 - DNA, 25 bp, Homo sapien
tttttctgcaggtctatctttttat

SEQ ID NO: 2929093 - DNA, 25 bp, Homo sapien
ctccaattacattacatctgaacac

SEQ ID NO: 2929094 - DNA, 25 bp, Homo sapien
ccaattacattacatctgaacacat

SEQ ID NO: 2929095 - DNA, 25 bp, Homo sapien
tcttccaagaagagcctgaagaact

SEQ ID NO: 2929096 - DNA, 25 bp, Homo sapien
tgaagaactccacttttcccacagt

SEQ ID NO: 2929097 - DNA, 25 bp, Homo sapien
taagtttcttccaagaagagcctga

SEQ ID NO: 2929098 - DNA, 25 bp, Homo sapien
cattaagtttcttccaagaagagcc

SEQ ID NO: 2929099 - DNA, 25 bp, Homo sapien
gaaagtatattctagagccacctgc

SEQ ID NO: 2929100 - DNA, 25 bp, Homo sapien
cacctgctggcaatcttcattatac

SEQ ID NO: 2929101 - DNA, 25 bp, Homo sapien
tatttgttctgcataaagtacaagc

SEQ ID NO: 2929102 - DNA, 25 bp, Homo sapien
ggaaggaaactatccgtattactga

SEQ ID NO: 2929103 - DNA, 25 bp, Homo sapien
ggatttatgatcttcacgaattttc

SEQ ID NO: 2929104 - DNA, 25 bp, Homo sapien
aaacagtgttaatcgcatagtagga

SEQ ID NO: 2929105 - DNA, 25 bp, Homo sapien
catagtaggatttatgatcttcacg

SEQ ID NO: 2929106 - DNA, 25 bp, Homo sapien
ttctcttgtccatatacataaacag

SEQ ID NO: 2929107 - DNA, 25 bp, Homo sapien
ttgttgcccaggcaggcattatctt

SEQ ID NO: 2929108 - DNA, 25 bp, Homo sapien
caccacaacctccacctcctgggtt

SEQ ID NO: 2929109 - DNA, 25 bp, Homo sapien
tgcccaggcaggcattatcttggct

SEQ ID NO: 2929110 - DNA, 25 bp, Homo sapien
acaacctccacctcctgggttcaag

SEQ ID NO: 2929111 - DNA, 25 bp, Homo sapien
aattccgattctgagatatcatgca

SEQ ID NO: 2929112 - DNA, 25 bp, Homo sapien
taaaaatcctggcacagtattcaaa

SEQ ID NO: 2929113 - DNA, 25 bp, Homo sapien
gctgacatcatataccaggcataca

SEQ ID NO: 2929114 - DNA, 25 bp, Homo sapien
gcttcagttagaaattccgattctg

SEQ ID NO: 2929115 - DNA, 25 bp, Homo sapien
tagaacaaaaccagaaccttcagga

SEQ ID NO: 2929116 - DNA, 25 bp, Homo sapien
gaatgcacctcacaatcacatgtcg

SEQ ID NO: 2929117 - DNA, 25 bp, Homo sapien
gataatccctaagtgactgatagac

SEQ ID NO: 2929118 - DNA, 25 bp, Homo sapien
gtaacttttaacagctgggaagagc

SEQ ID NO: 2929119 - DNA, 25 bp, Homo sapien
taaatcatcgtccattgttagccat

SEQ ID NO: 2929120 - DNA, 25 bp, Homo sapien
aatcatcgtccattgttagccatct

SEQ ID NO: 2929121 - DNA, 25 bp, Homo sapien
ttcagtaaatcatcgtccattgtta

SEQ ID NO: 2929122 - DNA, 25 bp, Homo sapien
cagtaaatcatcgtccattgttagc

SEQ ID NO: 2929123 - DNA, 25 bp, Homo sapien
aacagacctatactgattccttaga

SEQ ID NO: 2929124 - DNA, 25 bp, Homo sapien
agtgaaccaaaaggcaaagattggc

SEQ ID NO: 2929125 - DNA, 25 bp, Homo sapien
ggcagtggtctaggtaaatctcata

SEQ ID NO: 2929126 - DNA, 25 bp, Homo sapien
caaagcaacagtagtttcaaagcga

SEQ ID NO: 2929127 - DNA, 25 bp, Homo sapien
tggccattgttgtcaatttaacaaa

SEQ ID NO: 2929128 - DNA, 25 bp, Homo sapien
tggtggaggcattttgtgtttcctg

SEQ ID NO: 2929129 - DNA, 25 bp, Homo sapien
gcagctacgattaagcaaggtattc

SEQ ID NO: 2929130 - DNA, 25 bp, Homo sapien
ttcatgcaggtctgactttgcagct

SEQ ID NO: 2929131 - DNA, 25 bp, Homo sapien
gaaatttgtggctcgtaacacttaa

SEQ ID NO: 2929132 - DNA, 25 bp, Homo sapien
ggcgaatgccattaagaaccatgca

SEQ ID NO: 2929133 - DNA, 25 bp, Homo sapien
tgtgacaaagatattcccttcatgg

SEQ ID NO: 2929134 - DNA, 25 bp, Homo sapien
tatacagatattgtcagaagcactg

SEQ ID NO: 2929135 - DNA, 25 bp, Homo sapien
cccatgtctcgggagagtctgtctc

SEQ ID NO: 2929136 - DNA, 25 bp, Homo sapien
caagcagtgcgtttctacataatta

SEQ ID NO: 2929137 - DNA, 25 bp, Homo sapien
caacgtaatatatagctaggcagga

SEQ ID NO: 2929138 - DNA, 25 bp, Homo sapien
taggcaggaagcctgaccaagcagt

SEQ ID NO: 2929139 - DNA, 25 bp, Homo sapien
cacttgcagttactgtaatcacaag

SEQ ID NO: 2929140 - DNA, 25 bp, Homo sapien
tctttacagattgcagcaagtctga

SEQ ID NO: 2929141 - DNA, 25 bp, Homo sapien
caagtctgagttgaggaagttctga

SEQ ID NO: 2929142 - DNA, 25 bp, Homo sapien
tgttgcaggtgcacatacagcgtaa

SEQ ID NO: 2929143 - DNA, 25 bp, Homo sapien
cagatgcaaaatgtacacctgttgc

SEQ ID NO: 2929144 - DNA, 25 bp, Homo sapien
tgtattttaacagaatgcctggtac

SEQ ID NO: 2929145 - DNA, 25 bp, Homo sapien
ttagtggaagttagttgggcatcag

SEQ ID NO: 2929146 - DNA, 25 bp, Homo sapien
taaacattgtcatcacagtgagaat

SEQ ID NO: 2929147 - DNA, 25 bp, Homo sapien
cagtgagaattttagtggaagttag

SEQ ID NO: 2929148 - DNA, 25 bp, Homo sapien
gcttcaccaagcattagaagaatct

SEQ ID NO: 2929149 - DNA, 25 bp, Homo sapien
aagatcagataaggcaaacttcacc

SEQ ID NO: 2929150 - DNA, 25 bp, Homo sapien
tgttaactagtgatacttaaagatc

SEQ ID NO: 2929151 - DNA, 25 bp, Homo sapien
caggtgtgcactaatgtcaagaaat

SEQ ID NO: 2929152 - DNA, 25 bp, Homo sapien
aaaagtcttctgaggacgggcatgg

SEQ ID NO: 2929153 - DNA, 25 bp, Homo sapien
aaaaagtcttctgaggacgggcatg

SEQ ID NO: 2929154 - DNA, 25 bp, Homo sapien
aaaaaagtcttctgaggacgggcat

SEQ ID NO: 2929155 - DNA, 25 bp, Homo sapien
tatattctattctcctattgctggc

SEQ ID NO: 2929156 - DNA, 25 bp, Homo sapien
ctgctttagccacataagtagctgg

SEQ ID NO: 2929157 - DNA, 25 bp, Homo sapien
tcacacgtgttataaggtatggact

SEQ ID NO: 2929158 - DNA, 25 bp, Homo sapien
tgttacaaggtcaaaaatgtgtacg

SEQ ID NO: 2929159 - DNA, 25 bp, Homo sapien
tataaaaaagctaatatacactcat

SEQ ID NO: 2929160 - DNA, 25 bp, Homo sapien
atcatttatgttacccaaggcaaca

SEQ ID NO: 2929161 - DNA, 25 bp, Homo sapien
tatgttacccaaggcaacaaattaa

SEQ ID NO: 2929162 - DNA, 25 bp, Homo sapien
atttatgttacccaaggcaacaaat

SEQ ID NO: 2929163 - DNA, 25 bp, Homo sapien
caccccactcagctatccgggctct

SEQ ID NO: 2929164 - DNA, 25 bp, Homo sapien
ggcaccccactcagctatccgggct

SEQ ID NO: 2929165 - DNA, 25 bp, Homo sapien
gcaccccactcagctatccgggctc

SEQ ID NO: 2929166 - DNA, 25 bp, Homo sapien
tactgccctcatcgtctgctaacag

SEQ ID NO: 2929167 - DNA, 25 bp, Homo sapien
aaaaagtggaccatgagatgactcc

SEQ ID NO: 2929168 - DNA, 25 bp, Homo sapien
atgcacctggtgagtaatactgccc

SEQ ID NO: 2929169 - DNA, 25 bp, Homo sapien
gaagatggaatcttctacagagctg

SEQ ID NO: 2929170 - DNA, 25 bp, Homo sapien
caatccctggtgttagacaggcagt

SEQ ID NO: 2929171 - DNA, 25 bp, Homo sapien
caggttcattccagcttgcaagtta

SEQ ID NO: 2929172 - DNA, 25 bp, Homo sapien
gccagagtgctccatgcttaacaca

SEQ ID NO: 2929173 - DNA, 25 bp, Homo sapien
aaagtctacaacacaagccagagtg

SEQ ID NO: 2929174 - DNA, 25 bp, Homo sapien
tgcagtcagaaaatataattattat

SEQ ID NO: 2929175 - DNA, 25 bp, Homo sapien
ctgcagtcagaaaatataattatta

SEQ ID NO: 2929176 - DNA, 25 bp, Homo sapien
cagtcagaaaatataattattattt

SEQ ID NO: 2929177 - DNA, 25 bp, Homo sapien
gcagtcagaaaatataattattatt

SEQ ID NO: 2929178 - DNA, 25 bp, Homo sapien
cttgaggtcagcttgtgtcacgtgc

SEQ ID NO: 2929179 - DNA, 25 bp, Homo sapien
tcttgaggtcagcttgtgtcacgtg

SEQ ID NO: 2929180 - DNA, 25 bp, Homo sapien
tcatcgctgtttcaataatgctttg

SEQ ID NO: 2929181 - DNA, 25 bp, Homo sapien
tgtacatagcaaagcccaaaactgc

SEQ ID NO: 2929182 - DNA, 25 bp, Homo sapien
ccaaaactgcaaaaacagtagcacc

SEQ ID NO: 2929183 - DNA, 25 bp, Homo sapien
aacttgctcgaagccaaaacgtgga

SEQ ID NO: 2929184 - DNA, 25 bp, Homo sapien
cctagaagagtgagccaagtgagca

SEQ ID NO: 2929185 - DNA, 25 bp, Homo sapien
taatcacatagataacgcctctgct

SEQ ID NO: 2929186 - DNA, 25 bp, Homo sapien
tctagactgtgcgatggcttcaagg

SEQ ID NO: 2929187 - DNA, 25 bp, Homo sapien
gcttgggagaccatatcttgcctga

SEQ ID NO: 2929188 - DNA, 25 bp, Homo sapien
tactgtaatatactataacagacac

SEQ ID NO: 2929189 - DNA, 25 bp, Homo sapien
aacagacacagccattatagaatga

SEQ ID NO: 2929190 - DNA, 25 bp, Homo sapien
gcctctaggttatcctagcctgata

SEQ ID NO: 2929191 - DNA, 25 bp, Homo sapien
gatatagaacacttggtgacacatg

SEQ ID NO: 2929192 - DNA, 25 bp, Homo sapien
acttgaaaaggctgatgatggaaaa

SEQ ID NO: 2929193 - DNA, 25 bp, Homo sapien
atttaaatacttgaaaaggctgatg

SEQ ID NO: 2929194 - DNA, 25 bp, Homo sapien
aaggctgatgatggaaaaaataggt

SEQ ID NO: 2929195 - DNA, 25 bp, Homo sapien
taaatacttgaaaaggctgatgatg

SEQ ID NO: 2929196 - DNA, 25 bp, Homo sapien
ctttagatgacaaaagaactcaaga

SEQ ID NO: 2929197 - DNA, 25 bp, Homo sapien
cagaaatatttactttagatgacaa

SEQ ID NO: 2929198 - DNA, 25 bp, Homo sapien
tgtacagaaatatttactttagatg

SEQ ID NO: 2929199 - DNA, 25 bp, Homo sapien
tactttagatgacaaaagaactcaa

SEQ ID NO: 2929200 - DNA, 25 bp, Homo sapien
aaatgtccctcagaatggcaaagag

SEQ ID NO: 2929201 - DNA, 25 bp, Homo sapien
tactagttgctcaagaagtgtgatc

SEQ ID NO: 2929202 - DNA, 25 bp, Homo sapien
ttttgccagctagtaagctatactg

SEQ ID NO: 2929203 - DNA, 25 bp, Homo sapien
caattggccttttaccagaatagat

SEQ ID NO: 2929204 - DNA, 25 bp, Homo sapien
ccctggcagatgatgtgcatatatg

SEQ ID NO: 2929205 - DNA, 25 bp, Homo sapien
aggccatttcagaatggtcatgtgc

SEQ ID NO: 2929206 - DNA, 25 bp, Homo sapien
cagtgccaacaatgcgagaaattgc

SEQ ID NO: 2929207 - DNA, 25 bp, Homo sapien
agagcccactcctaccgtagcatta

SEQ ID NO: 2929208 - DNA, 25 bp, Homo sapien
aacgatactggcaattcctccttgt

SEQ ID NO: 2929209 - DNA, 25 bp, Homo sapien
ttcaatgtatgaaaacgatactggc

SEQ ID NO: 2929210 - DNA, 25 bp, Homo sapien
tgtgtgtacacagctgacattcagc

SEQ ID NO: 2929211 - DNA, 25 bp, Homo sapien
actgttcttgcggaatttggaattt

SEQ ID NO: 2929212 - DNA, 25 bp, Homo sapien
taaacctaaccacgtgtctgcactc

SEQ ID NO: 2929213 - DNA, 25 bp, Homo sapien
tagagatgtcaaaactgtttagcgg

SEQ ID NO: 2929214 - DNA, 25 bp, Homo sapien
caattacctagtgacagctagcaga

SEQ ID NO: 2929215 - DNA, 25 bp, Homo sapien
cagttatctgtacctgaaataaacc

SEQ ID NO: 2929216 - DNA, 25 bp, Homo sapien
ttctgggcaagatcaacaattgtca

SEQ ID NO: 2929217 - DNA, 25 bp, Homo sapien
aaccacagcgacaccatttcacatt

SEQ ID NO: 2929218 - DNA, 25 bp, Homo sapien
tacagggggaataactgaagtagaa

SEQ ID NO: 2929219 - DNA, 25 bp, Homo sapien
gaactagaaccctcacatattgctg

SEQ ID NO: 2929220 - DNA, 25 bp, Homo sapien
ggataatttcttaaccaggaaggca

SEQ ID NO: 2929221 - DNA, 25 bp, Homo sapien
gactgtcctctacaagggctcaggg

SEQ ID NO: 2929222 - DNA, 25 bp, Homo sapien
catccactgtttgaagcactgtagg

SEQ ID NO: 2929223 - DNA, 25 bp, Homo sapien
ccctgaaagtagaagcatgctggca

SEQ ID NO: 2929224 - DNA, 25 bp, Homo sapien
gggaacaatgaaacagattgaccat

SEQ ID NO: 2929225 - DNA, 25 bp, Homo sapien
agatgaaataatgggctatctgggc

SEQ ID NO: 2929226 - DNA, 25 bp, Homo sapien
ttctctttgagagcccataggtaac

SEQ ID NO: 2929227 - DNA, 25 bp, Homo sapien
gattgaccatgttagtaagtgttga

SEQ ID NO: 2929228 - DNA, 25 bp, Homo sapien
taaagtgacctggattagtctcagt

SEQ ID NO: 2929229 - DNA, 25 bp, Homo sapien
gaaagcacccagttggtacctaata

SEQ ID NO: 2929230 - DNA, 25 bp, Homo sapien
tccttagaggtgctggagtagcaag

SEQ ID NO: 2929231 - DNA, 25 bp, Homo sapien
tagtgggaaaatgaggccatagcac

SEQ ID NO: 2929232 - DNA, 25 bp, Homo sapien
cgggctaactttgcgccgcggcggc

SEQ ID NO: 2929233 - DNA, 25 bp, Homo sapien
gggcgccgggctaactttgcgccgc

SEQ ID NO: 2929234 - DNA, 25 bp, Homo sapien
tccgccgccaaacttcactgcgcta

SEQ ID NO: 2929235 - DNA, 25 bp, Homo sapien
ttcactgcgctagctgccccgccgg

SEQ ID NO: 2929236 - DNA, 25 bp, Homo sapien
agctcctcgatgcgctccgcctcgg

SEQ ID NO: 2929237 - DNA, 25 bp, Homo sapien
ccgagcagcagacggcggggaagcc

SEQ ID NO: 2929238 - DNA, 25 bp, Homo sapien
gacccgagcagcagacggcggggaa

SEQ ID NO: 2929239 - DNA, 25 bp, Homo sapien
agacccgagcagcagacggcgggga

SEQ ID NO: 2929240 - DNA, 25 bp, Homo sapien
ttcccagggcttcgcagggccggcc

SEQ ID NO: 2929241 - DNA, 25 bp, Homo sapien
caggagtcatgaccaggctcaggga

SEQ ID NO: 2929242 - DNA, 25 bp, Homo sapien
gtgatagatttaaccgcagacgcca

SEQ ID NO: 2929243 - DNA, 25 bp, Homo sapien
taaaggcgtccaaatatgtccaagc

SEQ ID NO: 2929244 - DNA, 25 bp, Homo sapien
tgaatgccgaatgcggtgaagccca

SEQ ID NO: 2929245 - DNA, 25 bp, Homo sapien
gatgctctacccgtcaggacaggag

SEQ ID NO: 2929246 - DNA, 25 bp, Homo sapien
tagaaacggagagggattgtcagcc

SEQ ID NO: 2929247 - DNA, 25 bp, Homo sapien
caaagttagatatgtggttcccctc

SEQ ID NO: 2929248 - DNA, 25 bp, Homo sapien
gagcagtgtcgttcagccctagaga

SEQ ID NO: 2929249 - DNA, 25 bp, Homo sapien
cagcttaagccacacacggactggt

SEQ ID NO: 2929250 - DNA, 25 bp, Homo sapien
ttaagccacacacggactggtttct

SEQ ID NO: 2929251 - DNA, 25 bp, Homo sapien
gggctacctctagttgttcacagct

SEQ ID NO: 2929252 - DNA, 25 bp, Homo sapien
tgttcacagcttaagccacacacgg

SEQ ID NO: 2929253 - DNA, 25 bp, Homo sapien
catatatacacatgcgactgccgca

SEQ ID NO: 2929254 - DNA, 25 bp, Homo sapien
gtttcctcttttgaggtgcagcacc

SEQ ID NO: 2929255 - DNA, 25 bp, Homo sapien
tgccgcaaaaggtcctcactgctgt

SEQ ID NO: 2929256 - DNA, 25 bp, Homo sapien
tcaggagctacccagaagccttgtg

SEQ ID NO: 2929257 - DNA, 25 bp, Homo sapien
gagacctcaagcctctgtgggaagg

SEQ ID NO: 2929258 - DNA, 25 bp, Homo sapien
caaagtcgaacagccgaatcctagg

SEQ ID NO: 2929259 - DNA, 25 bp, Homo sapien
cctagagtaagtctggttcgtccca

SEQ ID NO: 2929260 - DNA, 25 bp, Homo sapien
gacaatcggcatgcttccagaaaac

SEQ ID NO: 2929261 - DNA, 25 bp, Homo sapien
gtatttcaggaaactcacctacttg

SEQ ID NO: 2929262 - DNA, 25 bp, Homo sapien
ttggttcacaacaccaagtatttca

SEQ ID NO: 2929263 - DNA, 25 bp, Homo sapien
ggttcacaacaccaagtatttcagg

SEQ ID NO: 2929264 - DNA, 25 bp, Homo sapien
tcacctacttgttgctcagtaaaga

SEQ ID NO: 2929265 - DNA, 25 bp, Homo sapien
gaacttgcctgtgctaatgtagcct

SEQ ID NO: 2929266 - DNA, 25 bp, Homo sapien
tccgcgtggctgtcggcaagagcca

SEQ ID NO: 2929267 - DNA, 25 bp, Homo sapien
tctccagaagactccggaacttgcc

SEQ ID NO: 2929268 - DNA, 25 bp, Homo sapien
taggctgacaaaatcctggtagccg

SEQ ID NO: 2929269 - DNA, 25 bp, Homo sapien
tgcctggcttgagcagataaaggct

SEQ ID NO: 2929270 - DNA, 25 bp, Homo sapien
taaaggctcacaaaggatgcagagg

SEQ ID NO: 2929271 - DNA, 25 bp, Homo sapien
ctgcctggcttgagcagataaaggc

SEQ ID NO: 2929272 - DNA, 25 bp, Homo sapien
tgagcagataaaggctcacaaagga

SEQ ID NO: 2929273 - DNA, 25 bp, Homo sapien
tgtcatagtaccacttgcggtcaat

SEQ ID NO: 2929274 - DNA, 25 bp, Homo sapien
ataagtcgctgcgagaggctcagcc

SEQ ID NO: 2929275 - DNA, 25 bp, Homo sapien
tgctgcttagcctgcggttgccctg

SEQ ID NO: 2929276 - DNA, 25 bp, Homo sapien
ggcagggtctcataggccacatggc

SEQ ID NO: 2929277 - DNA, 25 bp, Homo sapien
ttcaggcgggaaaaaggagcaaatg

SEQ ID NO: 2929278 - DNA, 25 bp, Homo sapien
tggtccacattacccacctagggag

SEQ ID NO: 2929279 - DNA, 25 bp, Homo sapien
ggaatatctctttgcagtccacggt

SEQ ID NO: 2929280 - DNA, 25 bp, Homo sapien
tggtatgcaccgcaacagagtctga

SEQ ID NO: 2929281 - DNA, 25 bp, Homo sapien
caccccattgtagaggaaaaaggca

SEQ ID NO: 2929282 - DNA, 25 bp, Homo sapien
tacaaattgacctagtgacacccca

SEQ ID NO: 2929283 - DNA, 25 bp, Homo sapien
ctagtgacaccccattgtagaggaa

SEQ ID NO: 2929284 - DNA, 25 bp, Homo sapien
ctgcagtacaaattgacctagtgac

SEQ ID NO: 2929285 - DNA, 25 bp, Homo sapien
accagggagttcttcaagtaacgtg

SEQ ID NO: 2929286 - DNA, 25 bp, Homo sapien
caaacctgtgctcgcagctgtgggt

SEQ ID NO: 2929287 - DNA, 25 bp, Homo sapien
gcatgcatgaagatgtatgtcaggt

SEQ ID NO: 2929288 - DNA, 25 bp, Homo sapien
tcaggtagcgccaaacctgtgctcg

SEQ ID NO: 2929289 - DNA, 25 bp, Homo sapien
cacaacaccggccacgtagacaagc

SEQ ID NO: 2929290 - DNA, 25 bp, Homo sapien
ccacgtagacaagcccaattcgggt

SEQ ID NO: 2929291 - DNA, 25 bp, Homo sapien
gacaagcccaattcgggtggctcca

SEQ ID NO: 2929292 - DNA, 25 bp, Homo sapien
gcccaattcgggtggctccatgcac

SEQ ID NO: 2929293 - DNA, 25 bp, Homo sapien
tccagaagagcccacgactggagcg

SEQ ID NO: 2929294 - DNA, 25 bp, Homo sapien
tgggcagagacgagagcatacaccc

SEQ ID NO: 2929295 - DNA, 25 bp, Homo sapien
cgactggagcggtcatgtcagccac

SEQ ID NO: 2929296 - DNA, 25 bp, Homo sapien
acgagagcatacacccctccagaag

SEQ ID NO: 2929297 - DNA, 25 bp, Homo sapien
aaagacacattgagaacgggaggtg

SEQ ID NO: 2929298 - DNA, 25 bp, Homo sapien
aagacacattgagaacgggaggtgc

SEQ ID NO: 2929299 - DNA, 25 bp, Homo sapien
tcccaacacccgcagcctctctctg

SEQ ID NO: 2929300 - DNA, 25 bp, Homo sapien
ttccacgtttcccaacacccgcagc

SEQ ID NO: 2929301 - DNA, 25 bp, Homo sapien
ccaacacccgcagcctctctctgag

SEQ ID NO: 2929302 - DNA, 25 bp, Homo sapien
acgtttcccaacacccgcagcctct

SEQ ID NO: 2929303 - DNA, 25 bp, Homo sapien
gaaagcctgtcttcgcttgccgaca

SEQ ID NO: 2929304 - DNA, 25 bp, Homo sapien
ctgcggtcccgctttaggtggaaag

SEQ ID NO: 2929305 - DNA, 25 bp, Homo sapien
tcacagaaagtgaagtgtgggccac

SEQ ID NO: 2929306 - DNA, 25 bp, Homo sapien
tgaagtgtgggccacctgcggtccc

SEQ ID NO: 2929307 - DNA, 25 bp, Homo sapien
tccgcagcagcttgaactggcactt

SEQ ID NO: 2929308 - DNA, 25 bp, Homo sapien
gccatccgcagcagcttgaactggc

SEQ ID NO: 2929309 - DNA, 25 bp, Homo sapien
gcagcagcttgaactggcacttcat

SEQ ID NO: 2929310 - DNA, 25 bp, Homo sapien
catccgcagcagcttgaactggcac

SEQ ID NO: 2929311 - DNA, 25 bp, Homo sapien
ctagcttggctaacatgtgggacat

SEQ ID NO: 2929312 - DNA, 25 bp, Homo sapien
gaattgaagcggagccttcccaggc

SEQ ID NO: 2929313 - DNA, 25 bp, Homo sapien
gcaggtagctgacccagagaaagcc

SEQ ID NO: 2929314 - DNA, 25 bp, Homo sapien
gcctgaccctccgtgaattgaagtg

SEQ ID NO: 2929315 - DNA, 25 bp, Homo sapien
ggtgtacatggccacaaaaatccac

SEQ ID NO: 2929316 - DNA, 25 bp, Homo sapien
ttccagaagacagcgaacagcacga

SEQ ID NO: 2929317 - DNA, 25 bp, Homo sapien
caagtgcgccacaaagcttgggtga

SEQ ID NO: 2929318 - DNA, 25 bp, Homo sapien
gagcctctgctcgtagttcctcagg

SEQ ID NO: 2929319 - DNA, 25 bp, Homo sapien
tgtcaaggagacaccacatggcctg

SEQ ID NO: 2929320 - DNA, 25 bp, Homo sapien
cacaaagtagtgtcagggcagcaaa

SEQ ID NO: 2929321 - DNA, 25 bp, Homo sapien
tcagagcagccgagaaaaacgacag

SEQ ID NO: 2929322 - DNA, 25 bp, Homo sapien
taacatggtgggagacacgattccg

SEQ ID NO: 2929323 - DNA, 25 bp, Homo sapien
atttgtgtatattacttgtgtgctg

SEQ ID NO: 2929324 - DNA, 25 bp, Homo sapien
tatgtttgtcatgtatgaagaatgg

SEQ ID NO: 2929325 - DNA, 25 bp, Homo sapien
tattacttgtgtgctgtacacacag

SEQ ID NO: 2929326 - DNA, 25 bp, Homo sapien
ttgtcatgtatgaagaatggcttca

SEQ ID NO: 2929327 - DNA, 25 bp, Homo sapien
ggtgtgaataccctagtccactggt

SEQ ID NO: 2929328 - DNA, 25 bp, Homo sapien
gatactaatctaccatccgaagtgg

SEQ ID NO: 2929329 - DNA, 25 bp, Homo sapien
catttgtcaagcctctccttggcag

SEQ ID NO: 2929330 - DNA, 25 bp, Homo sapien
cagtccttaaaagagcccctggcgt

SEQ ID NO: 2929331 - DNA, 25 bp, Homo sapien
ggtgggactaagaggcgcgaagagg

SEQ ID NO: 2929332 - DNA, 25 bp, Homo sapien
gagtgggtgggactaagaggcgcga

SEQ ID NO: 2929333 - DNA, 25 bp, Homo sapien
actaagaggcgcgaagaggtggcag

SEQ ID NO: 2929334 - DNA, 25 bp, Homo sapien
ctaagaggcgcgaagaggtggcagc

SEQ ID NO: 2929335 - DNA, 25 bp, Homo sapien
gcaggagaaacgaggccaaaaatcc

SEQ ID NO: 2929336 - DNA, 25 bp, Homo sapien
ccaccacgtcccacaggaagcagac

SEQ ID NO: 2929337 - DNA, 25 bp, Homo sapien
ggaagcagacacaaaatggccgacg

SEQ ID NO: 2929338 - DNA, 25 bp, Homo sapien
cacaaaatggccgacggcctcgttc

SEQ ID NO: 2929339 - DNA, 25 bp, Homo sapien
cagcaccacggcttcagctgcttct

SEQ ID NO: 2929340 - DNA, 25 bp, Homo sapien
ttcagctgcttcttcttcttgcgac

SEQ ID NO: 2929341 - DNA, 25 bp, Homo sapien
gctgcttcttcttcttgcgacccat

SEQ ID NO: 2929342 - DNA, 25 bp, Homo sapien
tcagctgcttcttcttcttgcgacc

SEQ ID NO: 2929343 - DNA, 25 bp, Homo sapien
cattttcctagaagccttcccaagt

SEQ ID NO: 2929344 - DNA, 25 bp, Homo sapien
cacgccgtaagccaaatccaggcct

SEQ ID NO: 2929345 - DNA, 25 bp, Homo sapien
ccacgcagacgcctaaatacaaacg

SEQ ID NO: 2929346 - DNA, 25 bp, Homo sapien
aactgcaaaagcctgtcgacctcgg

SEQ ID NO: 2929347 - DNA, 25 bp, Homo sapien
ggcacaaagacagcctaatgatgac

SEQ ID NO: 2929348 - DNA, 25 bp, Homo sapien
gttaaggcacaaagacagcctaatg

SEQ ID NO: 2929349 - DNA, 25 bp, Homo sapien
cacaaagacagcctaatgatgacac

SEQ ID NO: 2929350 - DNA, 25 bp, Homo sapien
aaagacagcctaatgatgacactgc

SEQ ID NO: 2929351 - DNA, 25 bp, Homo sapien
tacaatttcttgtgacatatatggc

SEQ ID NO: 2929352 - DNA, 25 bp, Homo sapien
tttggtgctgaataaggatcttctc

SEQ ID NO: 2929353 - DNA, 25 bp, Homo sapien
ggtgctgaataaggatcttctcatc

SEQ ID NO: 2929354 - DNA, 25 bp, Homo sapien
ctgtatacaatttcttgtgacatat

SEQ ID NO: 2929355 - DNA, 25 bp, Homo sapien
agtcgtcgtctttcatccatgtctt

SEQ ID NO: 2929356 - DNA, 25 bp, Homo sapien
ttttctgttcaagaagtcgtcgtct

SEQ ID NO: 2929357 - DNA, 25 bp, Homo sapien
tttccaactctatgtctgttcttcc

SEQ ID NO: 2929358 - DNA, 25 bp, Homo sapien
tcaagaagtcgtcgtctttcatcca

SEQ ID NO: 2929359 - DNA, 25 bp, Homo sapien
aggctgcagagtcgtcatcatcata

SEQ ID NO: 2929360 - DNA, 25 bp, Homo sapien
ttggaggaatataaccttgctgagg

SEQ ID NO: 2929361 - DNA, 25 bp, Homo sapien
ctgtggctgaaatgaagttgaggct

SEQ ID NO: 2929362 - DNA, 25 bp, Homo sapien
aggttgaacaggctgtggctgaaat

SEQ ID NO: 2929363 - DNA, 25 bp, Homo sapien
ctggaggcattcctggtgctcctgg

SEQ ID NO: 2929364 - DNA, 25 bp, Homo sapien
cattcctggtgctcctggtactggt

SEQ ID NO: 2929365 - DNA, 25 bp, Homo sapien
cctggtgctcctggtactggtggca

SEQ ID NO: 2929366 - DNA, 25 bp, Homo sapien
gaggcattcctggtgctcctggtac

SEQ ID NO: 2929367 - DNA, 25 bp, Homo sapien
tcctggcatcagaggaggaacacct

SEQ ID NO: 2929368 - DNA, 25 bp, Homo sapien
gcataactggtggcattcctggcat

SEQ ID NO: 2929369 - DNA, 25 bp, Homo sapien
attcctggcatcagaggaggaacac

SEQ ID NO: 2929370 - DNA, 25 bp, Homo sapien
cataactggtggcattcctggcatc

SEQ ID NO: 2929371 - DNA, 25 bp, Homo sapien
tggttgcttacatataccctaaaac

SEQ ID NO: 2929372 - DNA, 25 bp, Homo sapien
tcttgtcacaactacaaagtgtcac

SEQ ID NO: 2929373 - DNA, 25 bp, Homo sapien
tcattactaggcacaagcctacagg

SEQ ID NO: 2929374 - DNA, 25 bp, Homo sapien
tattagacaagatatatagagccca

SEQ ID NO: 2929375 - DNA, 25 bp, Homo sapien
atgttttcaccgcaaaatgactggg

SEQ ID NO: 2929376 - DNA, 25 bp, Homo sapien
caccgcaaaatgactgggtgtattt

SEQ ID NO: 2929377 - DNA, 25 bp, Homo sapien
caaaatgactgggtgtattttctct

SEQ ID NO: 2929378 - DNA, 25 bp, Homo sapien
ttttcaccgcaaaatgactgggtgt

SEQ ID NO: 2929379 - DNA, 25 bp, Homo sapien
tgaattacattatgaatgagatgct

SEQ ID NO: 2929380 - DNA, 25 bp, Homo sapien
cctcctgaattacattatgaatgag

SEQ ID NO: 2929381 - DNA, 25 bp, Homo sapien
acctcctgaattacattatgaatga

SEQ ID NO: 2929382 - DNA, 25 bp, Homo sapien
attacattatgaatgagatgcttac

SEQ ID NO: 2929383 - DNA, 25 bp, Homo sapien
aagagctcaccttcaaatatcagtg

SEQ ID NO: 2929384 - DNA, 25 bp, Homo sapien
aaccagatggcctatttacaataac

SEQ ID NO: 2929385 - DNA, 25 bp, Homo sapien
ttattaacaggtcccattactttca

SEQ ID NO: 2929386 - DNA, 25 bp, Homo sapien
taactacctaccactaaaccatgac

SEQ ID NO: 2929387 - DNA, 25 bp, Homo sapien
gaaacagtaagttaatgaacagcat

SEQ ID NO: 2929388 - DNA, 25 bp, Homo sapien
gatagaagacttgaatctgacctct

SEQ ID NO: 2929389 - DNA, 25 bp, Homo sapien
gaacacacaacacactgtaacaatc

SEQ ID NO: 2929390 - DNA, 25 bp, Homo sapien
ggctaaagcctgaaacaacactaga

SEQ ID NO: 2929391 - DNA, 25 bp, Homo sapien
tcagaggtggtattcctggtccagg

SEQ ID NO: 2929392 - DNA, 25 bp, Homo sapien
catcagaggtggtattcctggtcca

SEQ ID NO: 2929393 - DNA, 25 bp, Homo sapien
ggcatcagaggtggtattcctggtc

SEQ ID NO: 2929394 - DNA, 25 bp, Homo sapien
cagaggtggtattcctggtccaggt

SEQ ID NO: 2929395 - DNA, 25 bp, Homo sapien
aacagcctgtgcttgagtcattgga

SEQ ID NO: 2929396 - DNA, 25 bp, Homo sapien
ctgaaacagcctgtgcttgagtcat

SEQ ID NO: 2929397 - DNA, 25 bp, Homo sapien
ttgagtcattggaggaattccagga

SEQ ID NO: 2929398 - DNA, 25 bp, Homo sapien
gcctgtgcttgagtcattggaggaa

SEQ ID NO: 2929399 - DNA, 25 bp, Homo sapien
tgttccgtactagaggcagagcctg

SEQ ID NO: 2929400 - DNA, 25 bp, Homo sapien
caaatgatttgctaccgtcttaaga

SEQ ID NO: 2929401 - DNA, 25 bp, Homo sapien
ggaaaacttctaaacgctccagata

SEQ ID NO: 2929402 - DNA, 25 bp, Homo sapien
caagtgcggcattgtagctcatcac

SEQ ID NO: 2929403 - DNA, 25 bp, Homo sapien
gcaaaggtgttaaccatcatgtgta

SEQ ID NO: 2929404 - DNA, 25 bp, Homo sapien
agcaaaggtgttaaccatcatgtgt

SEQ ID NO: 2929405 - DNA, 25 bp, Homo sapien
caaaggtgttaaccatcatgtgtat

SEQ ID NO: 2929406 - DNA, 25 bp, Homo sapien
ggcagttaatgcatttacaataaac

SEQ ID NO: 2929407 - DNA, 25 bp, Homo sapien
ataagccatgtggtagactttttag

SEQ ID NO: 2929408 - DNA, 25 bp, Homo sapien
ttaatgcaatcaaatgtcacttatt

SEQ ID NO: 2929409 - DNA, 25 bp, Homo sapien
ggcaggcagttaatgcatttacaat

SEQ ID NO: 2929410 - DNA, 25 bp, Homo sapien
acttgagcttgtgacaggtgtcccc

SEQ ID NO: 2929411 - DNA, 25 bp, Homo sapien
gaagctgtacttgagcttgtgacag

SEQ ID NO: 2929412 - DNA, 25 bp, Homo sapien
tgtgctaggaaacagagctttagaa

SEQ ID NO: 2929413 - DNA, 25 bp, Homo sapien
ggatgaagctgtacttgagcttgtg

SEQ ID NO: 2929414 - DNA, 25 bp, Homo sapien
attttaaactgcaacttcctgcgta

SEQ ID NO: 2929415 - DNA, 25 bp, Homo sapien
ttttaaactgcaacttcctgcgtac

SEQ ID NO: 2929416 - DNA, 25 bp, Homo sapien
cagtttaacttaaaacaaggcatca

SEQ ID NO: 2929417 - DNA, 25 bp, Homo sapien
taactatatctacaacagtttaact

SEQ ID NO: 2929418 - DNA, 25 bp, Homo sapien
tcaaaagatgctaggttaaagtcac

SEQ ID NO: 2929419 - DNA, 25 bp, Homo sapien
aatacaatacttcatcaacgaaact

SEQ ID NO: 2929420 - DNA, 25 bp, Homo sapien
tctgtaccaacaggtccttggacag

SEQ ID NO: 2929421 - DNA, 25 bp, Homo sapien
aatctgtaccaacaggtccttggac

SEQ ID NO: 2929422 - DNA, 25 bp, Homo sapien
atctgtaccaacaggtccttggaca

SEQ ID NO: 2929423 - DNA, 25 bp, Homo sapien
tagttgttgtaagtgtagcaggctt

SEQ ID NO: 2929424 - DNA, 25 bp, Homo sapien
atatatcctcatctggatggatcaa

SEQ ID NO: 2929425 - DNA, 25 bp, Homo sapien
tcctcatctggatggatcaacttac

SEQ ID NO: 2929426 - DNA, 25 bp, Homo sapien
agggatatatcctcatctggatgga

SEQ ID NO: 2929427 - DNA, 25 bp, Homo sapien
cagggatatatcctcatctggatgg

SEQ ID NO: 2929428 - DNA, 25 bp, Homo sapien
taagcgcagggctaaatactcgaat

SEQ ID NO: 2929429 - DNA, 25 bp, Homo sapien
gaagcatggctaacaactttccggg

SEQ ID NO: 2929430 - DNA, 25 bp, Homo sapien
taaagggacgaactgctataatggc

SEQ ID NO: 2929431 - DNA, 25 bp, Homo sapien
tactcgaatgcagaggctcaccaag

SEQ ID NO: 2929432 - DNA, 25 bp, Homo sapien
tacgttgatacttaggtaactgtgc

SEQ ID NO: 2929433 - DNA, 25 bp, Homo sapien
ggccgaggaagattacgttgatact

SEQ ID NO: 2929434 - DNA, 25 bp, Homo sapien
ggcctgtcctggccgaggaagatta

SEQ ID NO: 2929435 - DNA, 25 bp, Homo sapien
tacttaggtaactgtgcccttctct

SEQ ID NO: 2929436 - DNA, 25 bp, Homo sapien
ttccttgttgctgtgggatgcctgg

SEQ ID NO: 2929437 - DNA, 25 bp, Homo sapien
cattccttgttgctgtgggatgcct

SEQ ID NO: 2929438 - DNA, 25 bp, Homo sapien
ggcattgggggtctcattccttgtt

SEQ ID NO: 2929439 - DNA, 25 bp, Homo sapien
ctcattccttgttgctgtgggatgc

SEQ ID NO: 2929440 - DNA, 25 bp, Homo sapien
catacgggggcatagcaccaggaag

SEQ ID NO: 2929441 - DNA, 25 bp, Homo sapien
cattggcggtccctgcccatacggg

SEQ ID NO: 2929442 - DNA, 25 bp, Homo sapien
ggtatcctggcatgccttgatgatg

SEQ ID NO: 2929443 - DNA, 25 bp, Homo sapien
gccttgatgatgaccaccatactga

SEQ ID NO: 2929444 - DNA, 25 bp, Homo sapien
cattcccatcggaggtcgaggaggc

SEQ ID NO: 2929445 - DNA, 25 bp, Homo sapien
ttcccatcggaggtcgaggaggccc

SEQ ID NO: 2929446 - DNA, 25 bp, Homo sapien
cccatcggaggtcgaggaggcccac

SEQ ID NO: 2929447 - DNA, 25 bp, Homo sapien
tcattcccatcggaggtcgaggagg

SEQ ID NO: 2929448 - DNA, 25 bp, Homo sapien
cggccaccttgcgacattacaggag

SEQ ID NO: 2929449 - DNA, 25 bp, Homo sapien
tcagtaacggccaccttgcgacatt

SEQ ID NO: 2929450 - DNA, 25 bp, Homo sapien
gtaacggccaccttgcgacattaca

SEQ ID NO: 2929451 - DNA, 25 bp, Homo sapien
aacggccaccttgcgacattacagg

SEQ ID NO: 2929452 - DNA, 25 bp, Homo sapien
ttgacggaagcttggctatataaac

SEQ ID NO: 2929453 - DNA, 25 bp, Homo sapien
taaacagcacaagttgagaaaaggt

SEQ ID NO: 2929454 - DNA, 25 bp, Homo sapien
gtttgttaaagtcacaatgaagcct

SEQ ID NO: 2929455 - DNA, 25 bp, Homo sapien
tgtgggaagataatgtttgttaaag

SEQ ID NO: 2929456 - DNA, 25 bp, Homo sapien
ttcaggaaaagttcctgctttatta

SEQ ID NO: 2929457 - DNA, 25 bp, Homo sapien
tttcccatgtaaaataaatgtccaa

SEQ ID NO: 2929458 - DNA, 25 bp, Homo sapien
gaaaagttcctgctttattattcca

SEQ ID NO: 2929459 - DNA, 25 bp, Homo sapien
aagttcctgctttattattccaaat

SEQ ID NO: 2929460 - DNA, 25 bp, Homo sapien
tatacttcacttctaaaaacctaga

SEQ ID NO: 2929461 - DNA, 25 bp, Homo sapien
gaaaaagaagccatacagtataaat

SEQ ID NO: 2929462 - DNA, 25 bp, Homo sapien
ctaaaaacctagatgaaacatgaaa

SEQ ID NO: 2929463 - DNA, 25 bp, Homo sapien
cacttctaaaaacctagatgaaaca

SEQ ID NO: 2929464 - DNA, 25 bp, Homo sapien
caaatagcaatgtaagcttacagaa

SEQ ID NO: 2929465 - DNA, 25 bp, Homo sapien
cctttactagggtggtatgttcatg

SEQ ID NO: 2929466 - DNA, 25 bp, Homo sapien
tactagggtggtatgttcatgtaat

SEQ ID NO: 2929467 - DNA, 25 bp, Homo sapien
cagaacttgcctttactagggtggt

SEQ ID NO: 2929468 - DNA, 25 bp, Homo sapien
ggtccacagctgggttatgaataaa

SEQ ID NO: 2929469 - DNA, 25 bp, Homo sapien
tggcatgcatctgtacaaacctttc

SEQ ID NO: 2929470 - DNA, 25 bp, Homo sapien
tatgtggacatctactgtggcatgc

SEQ ID NO: 2929471 - DNA, 25 bp, Homo sapien
tacaaacctttcaggcagtggtcca

SEQ ID NO: 2929472 - DNA, 25 bp, Homo sapien
tgcatgcacctaagcttctagaagt

SEQ ID NO: 2929473 - DNA, 25 bp, Homo sapien
tgcacctgaaaagcttctgaggtcc

SEQ ID NO: 2929474 - DNA, 25 bp, Homo sapien
tctgaggtccatgcagtactgagtc

SEQ ID NO: 2929475 - DNA, 25 bp, Homo sapien
gcacagtaaggctacctaggcttaa

SEQ ID NO: 2929476 - DNA, 25 bp, Homo sapien
ccatttaggtaagcagaggttcaga

SEQ ID NO: 2929477 - DNA, 25 bp, Homo sapien
acaagcacaggagccaaaatcattg

SEQ ID NO: 2929478 - DNA, 25 bp, Homo sapien
tggtttgggacttggctgctggcag

SEQ ID NO: 2929479 - DNA, 25 bp, Homo sapien
tgtaccactatggtaccacaagcac

SEQ ID NO: 2929480 - DNA, 25 bp, Homo sapien
ttaaatgggtacaccacctctgagc

SEQ ID NO: 2929481 - DNA, 25 bp, Homo sapien
ccatcagacctatacagagagcaaa

SEQ ID NO: 2929482 - DNA, 25 bp, Homo sapien
gcttaattacgtttggatgcatgca

SEQ ID NO: 2929483 - DNA, 25 bp, Homo sapien
tcaaccacactatggaccccagaag

SEQ ID NO: 2929484 - DNA, 25 bp, Homo sapien
gcagttggcatccactttgactcaa

SEQ ID NO: 2929485 - DNA, 25 bp, Homo sapien
tccttaattatgacaatcacaatgc

SEQ ID NO: 2929486 - DNA, 25 bp, Homo sapien
caatgcctgcctgaattatcaagtc

SEQ ID NO: 2929487 - DNA, 25 bp, Homo sapien
cttctgtgagggcagttggcatcca

SEQ ID NO: 2929488 - DNA, 25 bp, Homo sapien
tcccaatgatcaagcaagcaaaagg

SEQ ID NO: 2929489 - DNA, 25 bp, Homo sapien
gatgtaaggtagagccaaagttgcc

SEQ ID NO: 2929490 - DNA, 25 bp, Homo sapien
cctaatggcaaatgtgtgagacact

SEQ ID NO: 2929491 - DNA, 25 bp, Homo sapien
tacaacagaaactagtgccagacaa

SEQ ID NO: 2929492 - DNA, 25 bp, Homo sapien
ctcagactgaacagggcaacactga

SEQ ID NO: 2929493 - DNA, 25 bp, Homo sapien
gactgaacagggcaacactgagact

SEQ ID NO: 2929494 - DNA, 25 bp, Homo sapien
agcctcagcctgtcctatggcaggg

SEQ ID NO: 2929495 - DNA, 25 bp, Homo sapien
gaacagggcaacactgagactcagc

SEQ ID NO: 2929496 - DNA, 25 bp, Homo sapien
caatataggaacacaagctttactg

SEQ ID NO: 2929497 - DNA, 25 bp, Homo sapien
gggccttcaccaaacttgctgcaag

SEQ ID NO: 2929498 - DNA, 25 bp, Homo sapien
taaatatccaacagccataaagctg

SEQ ID NO: 2929499 - DNA, 25 bp, Homo sapien
tctgccaaaagagtataaaaatcct

SEQ ID NO: 2929500 - DNA, 25 bp, Homo sapien
aaacttgaatgaaacatttcttgcc

SEQ ID NO: 2929501 - DNA, 25 bp, Homo sapien
aaccagtaagattttcctagaagtg

SEQ ID NO: 2929502 - DNA, 25 bp, Homo sapien
cttgaatgaaacatttcttgcctcc

SEQ ID NO: 2929503 - DNA, 25 bp, Homo sapien
cagtaagattttcctagaagtgaaa

SEQ ID NO: 2929504 - DNA, 25 bp, Homo sapien
gctatctggatagaatcgtggctca

SEQ ID NO: 2929505 - DNA, 25 bp, Homo sapien
cacatgtgcgtaaaacactgttcag

SEQ ID NO: 2929506 - DNA, 25 bp, Homo sapien
tagtaatccatccatgctgaaaggt

SEQ ID NO: 2929507 - DNA, 25 bp, Homo sapien
tacagggctctacattaacatttgc

SEQ ID NO: 2929508 - DNA, 25 bp, Homo sapien
tccacttgggtacttaagcagcctc

SEQ ID NO: 2929509 - DNA, 25 bp, Homo sapien
taaagactcggatatgatggtgcaa

SEQ ID NO: 2929510 - DNA, 25 bp, Homo sapien
tattgggaagcgcaaactgaagtcc

SEQ ID NO: 2929511 - DNA, 25 bp, Homo sapien
tagtttcagcgaagacctaccttgt

SEQ ID NO: 2929512 - DNA, 25 bp, Homo sapien
gagaaccaccatgaaatagcttaag

SEQ ID NO: 2929513 - DNA, 25 bp, Homo sapien
tgaactcactggtacaccaacggga

SEQ ID NO: 2929514 - DNA, 25 bp, Homo sapien
aaacctagatctactttggcccaag

SEQ ID NO: 2929515 - DNA, 25 bp, Homo sapien
gattaggatggttcaggcttgcgaa

SEQ ID NO: 2929516 - DNA, 25 bp, Homo sapien
gatgtagaaattcagagtgctcacc

SEQ ID NO: 2929517 - DNA, 25 bp, Homo sapien
tcatgcagggttagagtggcttaaa

SEQ ID NO: 2929518 - DNA, 25 bp, Homo sapien
gaaaccctgtaagcaactagtctgc

SEQ ID NO: 2929519 - DNA, 25 bp, Homo sapien
taaaacagtactcaccagaaaggca

SEQ ID NO: 2929520 - DNA, 25 bp, Homo sapien
tacatgaagtcgcaaaagagatgca

SEQ ID NO: 2929521 - DNA, 25 bp, Homo sapien
acggaaatttggctacttactctca

SEQ ID NO: 2929522 - DNA, 25 bp, Homo sapien
gcttatctagaagaatgcattgcca

SEQ ID NO: 2929523 - DNA, 25 bp, Homo sapien
gcattgccacatcacatactcaggt

SEQ ID NO: 2929524 - DNA, 25 bp, Homo sapien
aagcttccagctatttaaccaggtg

SEQ ID NO: 2929525 - DNA, 25 bp, Homo sapien
gaggctcttaataacgcagaagcaa

SEQ ID NO: 2929526 - DNA, 25 bp, Homo sapien
tatcatgctttgttcaggacctcct

SEQ ID NO: 2929527 - DNA, 25 bp, Homo sapien
gaccgaagattgacctgacagacag

SEQ ID NO: 2929528 - DNA, 25 bp, Homo sapien
gataatatcaaagcacactgtgggc

SEQ ID NO: 2929529 - DNA, 25 bp, Homo sapien
cattgcctgtggtctaacaaggtta

SEQ ID NO: 2929530 - DNA, 25 bp, Homo sapien
ttccaaagtctctactcagatgcac

SEQ ID NO: 2929531 - DNA, 25 bp, Homo sapien
caatgagactttgtgcaaaggctgg

SEQ ID NO: 2929532 - DNA, 25 bp, Homo sapien
caagtaccaagggagaacggcaaga

SEQ ID NO: 2929533 - DNA, 25 bp, Homo sapien
gtgttgagagtttaagccaagtacc

SEQ ID NO: 2929534 - DNA, 25 bp, Homo sapien
ggcagagagggtgttgagagtttaa

SEQ ID NO: 2929535 - DNA, 25 bp, Homo sapien
agccaagtaccaagggagaacggca

SEQ ID NO: 2929536 - DNA, 25 bp, Homo sapien
ggaagtggaagttacacaagtcaaa

SEQ ID NO: 2929537 - DNA, 25 bp, Homo sapien
gcgtccgaggttgcagtccagtata

SEQ ID NO: 2929538 - DNA, 25 bp, Homo sapien
tttaacccagcaattactaagcgcc

SEQ ID NO: 2929539 - DNA, 25 bp, Homo sapien
tgcaatgaaagcacatacgaaggtc

SEQ ID NO: 2929540 - DNA, 25 bp, Homo sapien
tctttttaagtgtcgtgcaacgtgc

SEQ ID NO: 2929541 - DNA, 25 bp, Homo sapien
taaagtatgctttgccaacaccctg

SEQ ID NO: 2929542 - DNA, 25 bp, Homo sapien
cacttactgcctactaggtgccaag

SEQ ID NO: 2929543 - DNA, 25 bp, Homo sapien
ggtgccaagcactatgaatcatagg

SEQ ID NO: 2929544 - DNA, 25 bp, Homo sapien
ccactatttactgagaaactgagga

SEQ ID NO: 2929545 - DNA, 25 bp, Homo sapien
gacaaatctagttcttcctggggac

SEQ ID NO: 2929546 - DNA, 25 bp, Homo sapien
attttagtatcaaagggaagtcctg

SEQ ID NO: 2929547 - DNA, 25 bp, Homo sapien
taggtaatatccacatactatgtca

SEQ ID NO: 2929548 - DNA, 25 bp, Homo sapien
tttctttcgtttaatccacattaga

SEQ ID NO: 2929549 - DNA, 25 bp, Homo sapien
ctgcagtctgaaaacagatgagtac

SEQ ID NO: 2929550 - DNA, 25 bp, Homo sapien
gaaaacagatgagtacagtatcata

SEQ ID NO: 2929551 - DNA, 25 bp, Homo sapien
tctgaaaacagatgagtacagtatc

SEQ ID NO: 2929552 - DNA, 25 bp, Homo sapien
gatgagtacagtatcatattttcag

SEQ ID NO: 2929553 - DNA, 25 bp, Homo sapien
tactagggtagcaaacagggatgtt

SEQ ID NO: 2929554 - DNA, 25 bp, Homo sapien
aaattcaactcttaggcccaggtgt

SEQ ID NO: 2929555 - DNA, 25 bp, Homo sapien
acatatatgagccaatgtggccagg

SEQ ID NO: 2929556 - DNA, 25 bp, Homo sapien
ggccagggttacatgttctactttg

SEQ ID NO: 2929557 - DNA, 25 bp, Homo sapien
aacatgcatcaaaaagagagtggat

SEQ ID NO: 2929558 - DNA, 25 bp, Homo sapien
ggaaatgaatgcactgcagccacaa

SEQ ID NO: 2929559 - DNA, 25 bp, Homo sapien
gaaatgaatgcactgcagccacaaa

SEQ ID NO: 2929560 - DNA, 25 bp, Homo sapien
ggataaattctggtacatcagacaa

SEQ ID NO: 2929561 - DNA, 25 bp, Homo sapien
ggagaagatatggatcaatgagaac

SEQ ID NO: 2929562 - DNA, 25 bp, Homo sapien
tataacttgattaactactttggaa

SEQ ID NO: 2929563 - DNA, 25 bp, Homo sapien
tacactgctggtggagtataacttg

SEQ ID NO: 2929564 - DNA, 25 bp, Homo sapien
gattaaaccataagatacattttat

SEQ ID NO: 2929565 - DNA, 25 bp, Homo sapien
ataatagtaattgtggctacaaagc

SEQ ID NO: 2929566 - DNA, 25 bp, Homo sapien
cagttaatatttagacttgtaaaga

SEQ ID NO: 2929567 - DNA, 25 bp, Homo sapien
acagttaatatttagacttgtaaag

SEQ ID NO: 2929568 - DNA, 25 bp, Homo sapien
aatagtaattgtggctacaaagcag

SEQ ID NO: 2929569 - DNA, 25 bp, Homo sapien
ccaggctctggtgcagtggcacaat

SEQ ID NO: 2929570 - DNA, 25 bp, Homo sapien
ggattacaggtatatgccactacac

SEQ ID NO: 2929571 - DNA, 25 bp, Homo sapien
agctaatttttagtagagacaaggt

SEQ ID NO: 2929572 - DNA, 25 bp, Homo sapien
ggcacaatcgcggctcactgcaacc

SEQ ID NO: 2929573 - DNA, 25 bp, Homo sapien
caccgtcccggtctgaaatctagat

SEQ ID NO: 2929574 - DNA, 25 bp, Homo sapien
agatgttcagtgattatcttctcaa

SEQ ID NO: 2929575 - DNA, 25 bp, Homo sapien
tctcaaatgtgatctgtcattcctt

SEQ ID NO: 2929576 - DNA, 25 bp, Homo sapien
gcttcaaccaccaggcttatgtgat

SEQ ID NO: 2929577 - DNA, 25 bp, Homo sapien
gctacttttctcagggagcaccatt

SEQ ID NO: 2929578 - DNA, 25 bp, Homo sapien
tacagatgtgggtatgtggcagaca

SEQ ID NO: 2929579 - DNA, 25 bp, Homo sapien
gtttcacttaagattgccccagatg

SEQ ID NO: 2929580 - DNA, 25 bp, Homo sapien
agattcttagcacaccattggacag

SEQ ID NO: 2929581 - DNA, 25 bp, Homo sapien
ggactttaggtgtacaccagcacat

SEQ ID NO: 2929582 - DNA, 25 bp, Homo sapien
cttcttttgcccattgtttcattaa

SEQ ID NO: 2929583 - DNA, 25 bp, Homo sapien
tttaggtgtacaccagcacatctgg

SEQ ID NO: 2929584 - DNA, 25 bp, Homo sapien
tatgtgttgcccaggtcctcctacc

SEQ ID NO: 2929585 - DNA, 25 bp, Homo sapien
ggcagaactctgtatttttgccata

SEQ ID NO: 2929586 - DNA, 25 bp, Homo sapien
tcaaagaattaaattcttggactgg

SEQ ID NO: 2929587 - DNA, 25 bp, Homo sapien
gcaaaggccctcagggcagaactct

SEQ ID NO: 2929588 - DNA, 25 bp, Homo sapien
aaaaagaaagtccatgctaggctga

SEQ ID NO: 2929589 - DNA, 25 bp, Homo sapien
gagagtggctaacacaaaaatccct

SEQ ID NO: 2929590 - DNA, 25 bp, Homo sapien
cagcactttatcttgtgccagccaa

SEQ ID NO: 2929591 - DNA, 25 bp, Homo sapien
tctgagagggctattgataagaagc

SEQ ID NO: 2929592 - DNA, 25 bp, Homo sapien
ggtaagctgtcacacctacagtttg

SEQ ID NO: 2929593 - DNA, 25 bp, Homo sapien
tataaatcattggatcattaatgcc

SEQ ID NO: 2929594 - DNA, 25 bp, Homo sapien
catctcaccattggctgtcctttgt

SEQ ID NO: 2929595 - DNA, 25 bp, Homo sapien
cacatatggccaaattttactctaa

SEQ ID NO: 2929596 - DNA, 25 bp, Homo sapien
caccattggctgtcctttgtaaatt

SEQ ID NO: 2929597 - DNA, 25 bp, Homo sapien
gcaagcttttctgagtacataagag

SEQ ID NO: 2929598 - DNA, 25 bp, Homo sapien
ctaaagcaatggtttccttatttct

SEQ ID NO: 2929599 - DNA, 25 bp, Homo sapien
tcattgaggcttaacttacaaaagc

SEQ ID NO: 2929600 - DNA, 25 bp, Homo sapien
taataccacttaattatgtcattga

SEQ ID NO: 2929601 - DNA, 25 bp, Homo sapien
caaaagaatctgcagtaaatgtgga

SEQ ID NO: 2929602 - DNA, 25 bp, Homo sapien
aagaatctgcagtaaatgtggatat

SEQ ID NO: 2929603 - DNA, 25 bp, Homo sapien
ggtatacagaattgtatccatgtaa

SEQ ID NO: 2929604 - DNA, 25 bp, Homo sapien
gcctaaagtaagaaattctacacag

SEQ ID NO: 2929605 - DNA, 25 bp, Homo sapien
tctgctagagacagcacaaatcact

SEQ ID NO: 2929606 - DNA, 25 bp, Homo sapien
ccaggagcagtggtatgctcctata

SEQ ID NO: 2929607 - DNA, 25 bp, Homo sapien
gttactcgctcagtgttattctgct

SEQ ID NO: 2929608 - DNA, 25 bp, Homo sapien
gagaggtcaagttactcgctcagtg

SEQ ID NO: 2929609 - DNA, 25 bp, Homo sapien
gaaaattgaactgctctctctacct

SEQ ID NO: 2929610 - DNA, 25 bp, Homo sapien
aattgaactgctctctctacctact

SEQ ID NO: 2929611 - DNA, 25 bp, Homo sapien
aagaaaattgaactgctctctctac

SEQ ID NO: 2929612 - DNA, 25 bp, Homo sapien
aactgctctctctacctacttcagc

SEQ ID NO: 2929613 - DNA, 25 bp, Homo sapien
tttcattcaagcttgacagcagcac

SEQ ID NO: 2929614 - DNA, 25 bp, Homo sapien
ctttcattcaagcttgacagcagca

SEQ ID NO: 2929615 - DNA, 25 bp, Homo sapien
gagccacgcgcccacccatgagata

SEQ ID NO: 2929616 - DNA, 25 bp, Homo sapien
agccacgcgcccacccatgagatac

SEQ ID NO: 2929617 - DNA, 25 bp, Homo sapien
cctttggtgatcaaatgttaacaca

SEQ ID NO: 2929618 - DNA, 25 bp, Homo sapien
taatgtttctatcgaaatgtgtctg

SEQ ID NO: 2929619 - DNA, 25 bp, Homo sapien
aattttaataccttatgcagtaatg

SEQ ID NO: 2929620 - DNA, 25 bp, Homo sapien
ctaaaagatagaatgcaataatgct

SEQ ID NO: 2929621 - DNA, 25 bp, Homo sapien
tacacagtcttgatagtgctgcatg

SEQ ID NO: 2929622 - DNA, 25 bp, Homo sapien
caggtgcctgttctcggataacatc

SEQ ID NO: 2929623 - DNA, 25 bp, Homo sapien
aagcagtctgcatcaagtcaggcaa

SEQ ID NO: 2929624 - DNA, 25 bp, Homo sapien
taacacagcctatgtaacaggtgcc

SEQ ID NO: 2929625 - DNA, 25 bp, Homo sapien
tagataggtgaagtctggccaggat

SEQ ID NO: 2929626 - DNA, 25 bp, Homo sapien
taatacctggattcatctcaagagt

SEQ ID NO: 2929627 - DNA, 25 bp, Homo sapien
agttactagcatattgttagatagg

SEQ ID NO: 2929628 - DNA, 25 bp, Homo sapien
tgcaagctagtaaatttcagggacc

SEQ ID NO: 2929629 - DNA, 25 bp, Homo sapien
tgcagtgagtgaagtgaagtgcagt

SEQ ID NO: 2929630 - DNA, 25 bp, Homo sapien
aagtgcagtgcagtgagtgaagtga

SEQ ID NO: 2929631 - DNA, 25 bp, Homo sapien
agtgaagtgaagtgcagtgagcaat

SEQ ID NO: 2929632 - DNA, 25 bp, Homo sapien
gtgaagtgaagtgcagtgagcaatc

SEQ ID NO: 2929633 - DNA, 25 bp, Homo sapien
gttgagttcccacatatacactgga

SEQ ID NO: 2929634 - DNA, 25 bp, Homo sapien
gagaatgggtctgcactgtaccagc

SEQ ID NO: 2929635 - DNA, 25 bp, Homo sapien
ccggcaatgtgagaatagagctccc

SEQ ID NO: 2929636 - DNA, 25 bp, Homo sapien
tatgatacaagaaaagacgcctcca

SEQ ID NO: 2929637 - DNA, 25 bp, Homo sapien
gaaggactcatttctatatgggaac

SEQ ID NO: 2929638 - DNA, 25 bp, Homo sapien
ggtgcgacatgccaacggaacaaag

SEQ ID NO: 2929639 - DNA, 25 bp, Homo sapien
taagacatactgcaaggccataatg

SEQ ID NO: 2929640 - DNA, 25 bp, Homo sapien
ccataatgataaggcatcggtgcga

SEQ ID NO: 2929641 - DNA, 25 bp, Homo sapien
ctgcctggtatcagccaatctttct

SEQ ID NO: 2929642 - DNA, 25 bp, Homo sapien
tcctgcctggtatcagccaatcttt

SEQ ID NO: 2929643 - DNA, 25 bp, Homo sapien
cctgcctggtatcagccaatctttc

SEQ ID NO: 2929644 - DNA, 25 bp, Homo sapien
aataggatgcagtcgaatttgcctt

SEQ ID NO: 2929645 - DNA, 25 bp, Homo sapien
gaataggatgcagtcgaatttgcct

SEQ ID NO: 2929646 - DNA, 25 bp, Homo sapien
ggatgcagtcgaatttgccttagtg

SEQ ID NO: 2929647 - DNA, 25 bp, Homo sapien
taggatgcagtcgaatttgccttag

SEQ ID NO: 2929648 - DNA, 25 bp, Homo sapien
tgtgatatttactgtgcagtttgtc

SEQ ID NO: 2929649 - DNA, 25 bp, Homo sapien
ctgtgatatttactgtgcagtttgt

SEQ ID NO: 2929650 - DNA, 25 bp, Homo sapien
tgatatttactgtgcagtttgtcat

SEQ ID NO: 2929651 - DNA, 25 bp, Homo sapien
gtgatatttactgtgcagtttgtca

SEQ ID NO: 2929652 - DNA, 25 bp, Homo sapien
aacatcttatgaccatgggtcatgc

SEQ ID NO: 2929653 - DNA, 25 bp, Homo sapien
atagaatagagtgtccttggaaagc

SEQ ID NO: 2929654 - DNA, 25 bp, Homo sapien
cctacatgcggatgggcagacagca

SEQ ID NO: 2929655 - DNA, 25 bp, Homo sapien
tatccttgacattctactgtgtgag

SEQ ID NO: 2929656 - DNA, 25 bp, Homo sapien
cagtcatgtaagagaagagaccttg

SEQ ID NO: 2929657 - DNA, 25 bp, Homo sapien
cctctgacgtcatcagtcatgtaag

SEQ ID NO: 2929658 - DNA, 25 bp, Homo sapien
gggtctctgcctctgacgtcatcag

SEQ ID NO: 2929659 - DNA, 25 bp, Homo sapien
tcagtcatgtaagagaagagacctt

SEQ ID NO: 2929660 - DNA, 25 bp, Homo sapien
attgcacaccctcctctgtaagtgg

SEQ ID NO: 2929661 - DNA, 25 bp, Homo sapien
tctaggtgatgacgatccaaaaatg

SEQ ID NO: 2929662 - DNA, 25 bp, Homo sapien
taagagctgccggttagggaatgcc

SEQ ID NO: 2929663 - DNA, 25 bp, Homo sapien
tccaaaaatggaatgtgctgtccca

SEQ ID NO: 2929664 - DNA, 25 bp, Homo sapien
cattcattcgggacgataagtgacc

SEQ ID NO: 2929665 - DNA, 25 bp, Homo sapien
taaagtgctcgctatgtggcaaaga

SEQ ID NO: 2929666 - DNA, 25 bp, Homo sapien
aatgcgttccagtgtctgacgcctg

SEQ ID NO: 2929667 - DNA, 25 bp, Homo sapien
gaatagcaccattcgaatgcgttcc

SEQ ID NO: 2929668 - DNA, 25 bp, Homo sapien
ggtattgagtcaaagctgcgtggct

SEQ ID NO: 2929669 - DNA, 25 bp, Homo sapien
cgcagtgggagctctagatcggtcc

SEQ ID NO: 2929670 - DNA, 25 bp, Homo sapien
ttctttgcggcttccacgatttaac

SEQ ID NO: 2929671 - DNA, 25 bp, Homo sapien
caaaagaggcttcttgattccggcc

SEQ ID NO: 2929672 - DNA, 25 bp, Homo sapien
cacacacccggaaagcccgccctcg

SEQ ID NO: 2929673 - DNA, 25 bp, Homo sapien
cggccgccgacgccggaaacacaca

SEQ ID NO: 2929674 - DNA, 25 bp, Homo sapien
cgcggccgccgacgccggaaacaca

SEQ ID NO: 2929675 - DNA, 25 bp, Homo sapien
cgccgacgccggaaacacacacccg

SEQ ID NO: 2929676 - DNA, 25 bp, Homo sapien
gaggatgtcgatggaggcctcccgg

SEQ ID NO: 2929677 - DNA, 25 bp, Homo sapien
cgatggaggcctcccggtcggtgct

SEQ ID NO: 2929678 - DNA, 25 bp, Homo sapien
ctctctggaactccaccaccgccgc

SEQ ID NO: 2929679 - DNA, 25 bp, Homo sapien
tggagtggaggatgtcgatggaggc

SEQ ID NO: 2929680 - DNA, 25 bp, Homo sapien
gccgccgaccgacataagccgagct

SEQ ID NO: 2929681 - DNA, 25 bp, Homo sapien
tcagagccggctagccgggcccctc

SEQ ID NO: 2929682 - DNA, 25 bp, Homo sapien
cgccgaccgacataagccgagctgg

SEQ ID NO: 2929683 - DNA, 25 bp, Homo sapien
ctgccgccgaccgacataagccgag

SEQ ID NO: 2929684 - DNA, 25 bp, Homo sapien
tagtgggccaacaggaaatactcta

SEQ ID NO: 2929685 - DNA, 25 bp, Homo sapien
catgtaacggtgattgagatgactc

SEQ ID NO: 2929686 - DNA, 25 bp, Homo sapien
gagatgactctggttccgtagaagt

SEQ ID NO: 2929687 - DNA, 25 bp, Homo sapien
tccgtgcaggtctggaataccaaaa

SEQ ID NO: 2929688 - DNA, 25 bp, Homo sapien
gagtccagaaaaagtaaggccgtca

SEQ ID NO: 2929689 - DNA, 25 bp, Homo sapien
atcatgacttgacaaaaaccatgat

SEQ ID NO: 2929690 - DNA, 25 bp, Homo sapien
catcatgacttgacaaaaaccatga

SEQ ID NO: 2929691 - DNA, 25 bp, Homo sapien
tcgttttcctgaatgtcacgcttca

SEQ ID NO: 2929692 - DNA, 25 bp, Homo sapien
tcatcgttttcctgaatgtcacgct

SEQ ID NO: 2929693 - DNA, 25 bp, Homo sapien
ctcttcatcgttttcctgaatgtca

SEQ ID NO: 2929694 - DNA, 25 bp, Homo sapien
gatcccagttccaggatgctctgct

SEQ ID NO: 2929695 - DNA, 25 bp, Homo sapien
gtttaaaggccacttaattgcctgc

SEQ ID NO: 2929696 - DNA, 25 bp, Homo sapien
ctaaactaccaggaaagaagtgagt

SEQ ID NO: 2929697 - DNA, 25 bp, Homo sapien
aaaactgaagctcaacaagttgcca

SEQ ID NO: 2929698 - DNA, 25 bp, Homo sapien
gaattcagtttgtggatcagtccca

SEQ ID NO: 2929699 - DNA, 25 bp, Homo sapien
catttttcagactcagttcatcatc

SEQ ID NO: 2929700 - DNA, 25 bp, Homo sapien
caaactggtccacataactcctggc

SEQ ID NO: 2929701 - DNA, 25 bp, Homo sapien
actgacttcctcctattcttactgg

SEQ ID NO: 2929702 - DNA, 25 bp, Homo sapien
cttgtcagaacctcacagaacttgg

SEQ ID NO: 2929703 - DNA, 25 bp, Homo sapien
taattcagggcaagcaaacctcacc

SEQ ID NO: 2929704 - DNA, 25 bp, Homo sapien
tctgcctgaatagtcagagaatgca

SEQ ID NO: 2929705 - DNA, 25 bp, Homo sapien
gttcaactcaacaactaaggaggta

SEQ ID NO: 2929706 - DNA, 25 bp, Homo sapien
tcaccctccagagaatgctaattca

SEQ ID NO: 2929707 - DNA, 25 bp, Homo sapien
tgatggaattcaagaagggtcgtac

SEQ ID NO: 2929708 - DNA, 25 bp, Homo sapien
gctgctttagccttgctgatggaat

SEQ ID NO: 2929709 - DNA, 25 bp, Homo sapien
caagaagggtcgtacatacttcagg

SEQ ID NO: 2929710 - DNA, 25 bp, Homo sapien
cagatcaagaagagatcggaccagg

SEQ ID NO: 2929711 - DNA, 25 bp, Homo sapien
tccaaagcttggcgtaagaaagttc

SEQ ID NO: 2929712 - DNA, 25 bp, Homo sapien
tgacttggcccattcgatgcactct

SEQ ID NO: 2929713 - DNA, 25 bp, Homo sapien
gcccattcgatgcactctaaacaca

SEQ ID NO: 2929714 - DNA, 25 bp, Homo sapien
cttggcccattcgatgcactctaaa

SEQ ID NO: 2929715 - DNA, 25 bp, Homo sapien
tatcaaagtacaaagacaccagtct

SEQ ID NO: 2929716 - DNA, 25 bp, Homo sapien
caaatgcaatgcttcctggtacctc

SEQ ID NO: 2929717 - DNA, 25 bp, Homo sapien
cttggtatcaaagtacaaagacacc

SEQ ID NO: 2929718 - DNA, 25 bp, Homo sapien
aatgcttcctggtacctcttggtat

SEQ ID NO: 2929719 - DNA, 25 bp, Homo sapien
ttaaggcagctcgggctttcggcag

SEQ ID NO: 2929720 - DNA, 25 bp, Homo sapien
ctttcggcaggttgctcagggcatg

SEQ ID NO: 2929721 - DNA, 25 bp, Homo sapien
tgtggttcgagcagaagttaaggca

SEQ ID NO: 2929722 - DNA, 25 bp, Homo sapien
gagctttgtcgtccatctttttcaa

SEQ ID NO: 2929723 - DNA, 25 bp, Homo sapien
agtatgagtacgcagttttccagtc

SEQ ID NO: 2929724 - DNA, 25 bp, Homo sapien
gcacagcaacatgtacttcagagat

SEQ ID NO: 2929725 - DNA, 25 bp, Homo sapien
aatgcctcatagaagtatgagtacg

SEQ ID NO: 2929726 - DNA, 25 bp, Homo sapien
tgtcgatggagtcataaccctcaaa

SEQ ID NO: 2929727 - DNA, 25 bp, Homo sapien
ttagccagccctagaggccgcagct

SEQ ID NO: 2929728 - DNA, 25 bp, Homo sapien
cttagccagccctagaggccgcagc

SEQ ID NO: 2929729 - DNA, 25 bp, Homo sapien
agccagccctagaggccgcagctgc

SEQ ID NO: 2929730 - DNA, 25 bp, Homo sapien
tagccagccctagaggccgcagctg

SEQ ID NO: 2929731 - DNA, 25 bp, Homo sapien
aagcttcccgctcaccaaagcctgg

SEQ ID NO: 2929732 - DNA, 25 bp, Homo sapien
aagtgcaagcttcccgctcaccaaa

SEQ ID NO: 2929733 - DNA, 25 bp, Homo sapien
ttcccgctcaccaaagcctggacat

SEQ ID NO: 2929734 - DNA, 25 bp, Homo sapien
cgaagtgcaagcttcccgctcacca

SEQ ID NO: 2929735 - DNA, 25 bp, Homo sapien
tagagccaatgaccctaattcaaag

SEQ ID NO: 2929736 - DNA, 25 bp, Homo sapien
cagaaaaaagtgtcaaaatgagaaa

SEQ ID NO: 2929737 - DNA, 25 bp, Homo sapien
tctcctcaactctagttatagtgag

SEQ ID NO: 2929738 - DNA, 25 bp, Homo sapien
ttcaaagtctagctccaccattgat

SEQ ID NO: 2929739 - DNA, 25 bp, Homo sapien
cataagcagtatgctgtgtccacac

SEQ ID NO: 2929740 - DNA, 25 bp, Homo sapien
caaatgttaagaccccacagagtga

SEQ ID NO: 2929741 - DNA, 25 bp, Homo sapien
tcgttcttcttcagacgcccgggaa

SEQ ID NO: 2929742 - DNA, 25 bp, Homo sapien
cccgggaagaagagccgcaagtact

SEQ ID NO: 2929743 - DNA, 25 bp, Homo sapien
tcaaaatctgccagtgatctgttct

SEQ ID NO: 2929744 - DNA, 25 bp, Homo sapien
tctgttcttgctagcctgagccacg

SEQ ID NO: 2929745 - DNA, 25 bp, Homo sapien
atctgttcttgctagcctgagccac

SEQ ID NO: 2929746 - DNA, 25 bp, Homo sapien
taaagaaagcctagatcatcaccct

SEQ ID NO: 2929747 - DNA, 25 bp, Homo sapien
tgtcatgtggaacaagcactaggcc

SEQ ID NO: 2929748 - DNA, 25 bp, Homo sapien
caaactctgaccctatgctgtgtga

SEQ ID NO: 2929749 - DNA, 25 bp, Homo sapien
tctttgggtccaagtacgcacatca

SEQ ID NO: 2929750 - DNA, 25 bp, Homo sapien
ctgccaaaggaaccagttgcagaga

SEQ ID NO: 2929751 - DNA, 25 bp, Homo sapien
ggcccttataaaactacatggttga

SEQ ID NO: 2929752 - DNA, 25 bp, Homo sapien
tcctgcttcctagatagtctgctgg

SEQ ID NO: 2929753 - DNA, 25 bp, Homo sapien
ctttaaagtcatgctactcctgctt

SEQ ID NO: 2929754 - DNA, 25 bp, Homo sapien
gctgatgattgggtcatcccggagc

SEQ ID NO: 2929755 - DNA, 25 bp, Homo sapien
tagtaagttatcatacaacttggcc

SEQ ID NO: 2929756 - DNA, 25 bp, Homo sapien
cggatcagattctgttctagtaagt

SEQ ID NO: 2929757 - DNA, 25 bp, Homo sapien
aaaggctcaatgactcggatcagat

SEQ ID NO: 2929758 - DNA, 25 bp, Homo sapien
gaaactgctcagaacacatgcaggg

SEQ ID NO: 2929759 - DNA, 25 bp, Homo sapien
tgactaaaagcgaggaggaaactgc

SEQ ID NO: 2929760 - DNA, 25 bp, Homo sapien
cattttatcaacagaggcccaagct

SEQ ID NO: 2929761 - DNA, 25 bp, Homo sapien
taatgtaagaccctccttggccgtg

SEQ ID NO: 2929762 - DNA, 25 bp, Homo sapien
cttggagagtttgatgagactagat

SEQ ID NO: 2929763 - DNA, 25 bp, Homo sapien
ttggagagtttgatgagactagata

SEQ ID NO: 2929764 - DNA, 25 bp, Homo sapien
gggaccagtatccactagtcagaga

SEQ ID NO: 2929765 - DNA, 25 bp, Homo sapien
aatgaggccaatcaggtgcatgtgc

SEQ ID NO: 2929766 - DNA, 25 bp, Homo sapien
cagagatcaccctgacacagtagct

SEQ ID NO: 2929767 - DNA, 25 bp, Homo sapien
caaagcacatgattaaagggaccag

SEQ ID NO: 2929768 - DNA, 25 bp, Homo sapien
atttcttgtcaagaatcatctgtga

SEQ ID NO: 2929769 - DNA, 25 bp, Homo sapien
catgaaatttcttgtcaagaatcat

SEQ ID NO: 2929770 - DNA, 25 bp, Homo sapien
gtgataatttcctttccacgtcggc

SEQ ID NO: 2929771 - DNA, 25 bp, Homo sapien
gtcaagaatcatctgtgataatttc

SEQ ID NO: 2929772 - DNA, 25 bp, Homo sapien
tccctagttgactcactgtgtccag

SEQ ID NO: 2929773 - DNA, 25 bp, Homo sapien
cccaggtaaaagatgaggttagaca

SEQ ID NO: 2929774 - DNA, 25 bp, Homo sapien
ttattacacattctcatcacaggga

SEQ ID NO: 2929775 - DNA, 25 bp, Homo sapien
ctcactgtgtccagaaaagaaggga

SEQ ID NO: 2929776 - DNA, 25 bp, Homo sapien
tccactactttgctcatgttctgaa

SEQ ID NO: 2929777 - DNA, 25 bp, Homo sapien
tccagagcagcttcgtaagttttat

SEQ ID NO: 2929778 - DNA, 25 bp, Homo sapien
tactgggggttcatcgaaaataatc

SEQ ID NO: 2929779 - DNA, 25 bp, Homo sapien
ttgttgtagagggaatccactactt

SEQ ID NO: 2929780 - DNA, 25 bp, Homo sapien
gtctcgacacgcagaagacagagct

SEQ ID NO: 2929781 - DNA, 25 bp, Homo sapien
accaggaggaggttttcagtctcga

SEQ ID NO: 2929782 - DNA, 25 bp, Homo sapien
gagcagtgtcaatcaggaagccatg

SEQ ID NO: 2929783 - DNA, 25 bp, Homo sapien
ggttttcagtctcgacacgcagaag

SEQ ID NO: 2929784 - DNA, 25 bp, Homo sapien
tggaatacagatgcaccaaatgagg

SEQ ID NO: 2929785 - DNA, 25 bp, Homo sapien
catgaaaactggcacacctattggc

SEQ ID NO: 2929786 - DNA, 25 bp, Homo sapien
cactcccaagttgggccagtaaaga

SEQ ID NO: 2929787 - DNA, 25 bp, Homo sapien
ccaaaggaccgctacagatccaact

SEQ ID NO: 2929788 - DNA, 25 bp, Homo sapien
taaagcctcgctgtgtaatcgtgtc

SEQ ID NO: 2929789 - DNA, 25 bp, Homo sapien
caaacacccaattctgaggaggagg

SEQ ID NO: 2929790 - DNA, 25 bp, Homo sapien
gaagctcacctacccaaatggcatt

SEQ ID NO: 2929791 - DNA, 25 bp, Homo sapien
tggccgtggtagacactagctcctg

SEQ ID NO: 2929792 - DNA, 25 bp, Homo sapien
tgatactgatggtgccaaaaccaaa

SEQ ID NO: 2929793 - DNA, 25 bp, Homo sapien
tacctggtgttggttagcaagaacc

SEQ ID NO: 2929794 - DNA, 25 bp, Homo sapien
caaaacagtgactagacatgatggg

SEQ ID NO: 2929795 - DNA, 25 bp, Homo sapien
tattggaactcatctgaacatcaga

SEQ ID NO: 2929796 - DNA, 25 bp, Homo sapien
ctttggccagatgagagctagacta

SEQ ID NO: 2929797 - DNA, 25 bp, Homo sapien
gctgtctggacttgcttggaagccc

SEQ ID NO: 2929798 - DNA, 25 bp, Homo sapien
tctagagggcatcatctgaccaaga

SEQ ID NO: 2929799 - DNA, 25 bp, Homo sapien
gctacatattggacagcacgggtct

SEQ ID NO: 2929800 - DNA, 25 bp, Homo sapien
accttcaaacagagctctcggcaga

SEQ ID NO: 2929801 - DNA, 25 bp, Homo sapien
tcaaacagagctctcggcagaacac

SEQ ID NO: 2929802 - DNA, 25 bp, Homo sapien
agagctctcggcagaacaccagcct

SEQ ID NO: 2929803 - DNA, 25 bp, Homo sapien
acttgctgctgcgactaagggaggg

SEQ ID NO: 2929804 - DNA, 25 bp, Homo sapien
cagctagggagcttctgtccaaggt

SEQ ID NO: 2929805 - DNA, 25 bp, Homo sapien
gctagggagcttctgtccaaggttc

SEQ ID NO: 2929806 - DNA, 25 bp, Homo sapien
agctagggagcttctgtccaaggtt

SEQ ID NO: 2929807 - DNA, 25 bp, Homo sapien
cctccgcaatgcgcgccgcggcccc

SEQ ID NO: 2929808 - DNA, 25 bp, Homo sapien
gccctccgcaatgcgcgccgcggcc

SEQ ID NO: 2929809 - DNA, 25 bp, Homo sapien
ccgcgccctccgcaatgcgcgccgc

SEQ ID NO: 2929810 - DNA, 25 bp, Homo sapien
cgcgccctccgcaatgcgcgccgcg

SEQ ID NO: 2929811 - DNA, 25 bp, Homo sapien
cagggccaaggacggccgcccagcg

SEQ ID NO: 2929812 - DNA, 25 bp, Homo sapien
gcacgggcgcgaccccggtctccgc

SEQ ID NO: 2929813 - DNA, 25 bp, Homo sapien
ccccgcgacgcagcctcgccgcctc

SEQ ID NO: 2929814 - DNA, 25 bp, Homo sapien
cggtcgccgacggaggcggccgagg

SEQ ID NO: 2929815 - DNA, 25 bp, Homo sapien
ctggaaaacaagatggttcttagcg

SEQ ID NO: 2929816 - DNA, 25 bp, Homo sapien
atggttcttagcgccaggctgggct

SEQ ID NO: 2929817 - DNA, 25 bp, Homo sapien
tggaaaacaagatggttcttagcgc

SEQ ID NO: 2929818 - DNA, 25 bp, Homo sapien
cggagggataaaaccgctcaccgag

SEQ ID NO: 2929819 - DNA, 25 bp, Homo sapien
ataaaaccgctcaccgagcctgcgg

SEQ ID NO: 2929820 - DNA, 25 bp, Homo sapien
gggcgctcccgggaagcgtgctgcc

SEQ ID NO: 2929821 - DNA, 25 bp, Homo sapien
cagcctgccggccggagggataaaa

SEQ ID NO: 2929822 - DNA, 25 bp, Homo sapien
aacagcgtggccttccggtagctgg

SEQ ID NO: 2929823 - DNA, 25 bp, Homo sapien
tagtggcccacggtggccgcgccat

SEQ ID NO: 2929824 - DNA, 25 bp, Homo sapien
tcctcaaacagcgtggccttccggt

SEQ ID NO: 2929825 - DNA, 25 bp, Homo sapien
cttgctgttctgtacggccgtatag

SEQ ID NO: 2929826 - DNA, 25 bp, Homo sapien
gctcactggtggacgcctggacgat

SEQ ID NO: 2929827 - DNA, 25 bp, Homo sapien
gacacggccacgattctcttccaag

SEQ ID NO: 2929828 - DNA, 25 bp, Homo sapien
cctggacgatgacccgtttgggcgt

SEQ ID NO: 2929829 - DNA, 25 bp, Homo sapien
aatgtggacaggttggcgcacgaca

SEQ ID NO: 2929830 - DNA, 25 bp, Homo sapien
gtgcttcaggcggtagcaccggcgg

SEQ ID NO: 2929831 - DNA, 25 bp, Homo sapien
tagcaccggcggcagagaaactcac

SEQ ID NO: 2929832 - DNA, 25 bp, Homo sapien
gccggcgtgatgaagccctggtcct

SEQ ID NO: 2929833 - DNA, 25 bp, Homo sapien
agcatgtagaggaagaccacgttgg

SEQ ID NO: 2929834 - DNA, 25 bp, Homo sapien
tgggtcggcatttatctgcagcatc

SEQ ID NO: 2929835 - DNA, 25 bp, Homo sapien
cgctctcgttcttcaggtcggagaa

SEQ ID NO: 2929836 - DNA, 25 bp, Homo sapien
tgatccgagcccacctcggaggaga

SEQ ID NO: 2929837 - DNA, 25 bp, Homo sapien
tcggagaagacctgtgtgaagtagt

SEQ ID NO: 2929838 - DNA, 25 bp, Homo sapien
tgcattgaatccttgagccatgacg

SEQ ID NO: 2929839 - DNA, 25 bp, Homo sapien
cttgagccatgacgcaggctacagt

SEQ ID NO: 2929840 - DNA, 25 bp, Homo sapien
aaaaatgcattgaatccttgagcca

SEQ ID NO: 2929841 - DNA, 25 bp, Homo sapien
gaatccttgagccatgacgcaggct

SEQ ID NO: 2929842 - DNA, 25 bp, Homo sapien
ctcgcctagattgaagatgtccccg

SEQ ID NO: 2929843 - DNA, 25 bp, Homo sapien
tgtaattgtctccaagatccggctg

SEQ ID NO: 2929844 - DNA, 25 bp, Homo sapien
gctcgtgagttcaaaagtgcccaga

SEQ ID NO: 2929845 - DNA, 25 bp, Homo sapien
aaggcaggcgttgctaatgggcacc

SEQ ID NO: 2929846 - DNA, 25 bp, Homo sapien
tgccaattaccagtagacactagtg

SEQ ID NO: 2929847 - DNA, 25 bp, Homo sapien
tatgatctcggtcacgtgtcccggg

SEQ ID NO: 2929848 - DNA, 25 bp, Homo sapien
aggaagcgggcatgattgtagacaa

SEQ ID NO: 2929849 - DNA, 25 bp, Homo sapien
tgccaaatgagttgcctgtcaaagg

SEQ ID NO: 2929850 - DNA, 25 bp, Homo sapien
cagcaaaagcacgtatgcttcaggg

SEQ ID NO: 2929851 - DNA, 25 bp, Homo sapien
agtggtcccaacaacccggtctcat

SEQ ID NO: 2929852 - DNA, 25 bp, Homo sapien
ctacgcctcaggcatgtggtgagag

SEQ ID NO: 2929853 - DNA, 25 bp, Homo sapien
agagggatgtactgaagcttcttcc

SEQ ID NO: 2929854 - DNA, 25 bp, Homo sapien
gagcagctccgtaagtccagcagag

SEQ ID NO: 2929855 - DNA, 25 bp, Homo sapien
tagaaagtgcctcacgtgctcatgg

SEQ ID NO: 2929856 - DNA, 25 bp, Homo sapien
ggtgccagcctatcgcgacaagtgt

SEQ ID NO: 2929857 - DNA, 25 bp, Homo sapien
catcccgagagcagtgaaaaattcc

SEQ ID NO: 2929858 - DNA, 25 bp, Homo sapien
caatatccgtggtccaggagaggga

SEQ ID NO: 2929859 - DNA, 25 bp, Homo sapien
tcctccgcccaaagagaagagctag

SEQ ID NO: 2929860 - DNA, 25 bp, Homo sapien
gactcgtgcatgatcggcttggacc

SEQ ID NO: 2929861 - DNA, 25 bp, Homo sapien
tctcacgtgggcttagaaaacagtc

SEQ ID NO: 2929862 - DNA, 25 bp, Homo sapien
ctccttagaccgtaaattccacgag

SEQ ID NO: 2929863 - DNA, 25 bp, Homo sapien
gtgcatcactccttagaccgtaaat

SEQ ID NO: 2929864 - DNA, 25 bp, Homo sapien
caggctctcaggaagaacccctgtc

SEQ ID NO: 2929865 - DNA, 25 bp, Homo sapien
tctcaggaagaacccctgtctggct

SEQ ID NO: 2929866 - DNA, 25 bp, Homo sapien
ggaaattccttctgcgaagcgagaa

SEQ ID NO: 2929867 - DNA, 25 bp, Homo sapien
accaccatgcttgacacttgtagga

SEQ ID NO: 2929868 - DNA, 25 bp, Homo sapien
ggaggttcttgacacttaactgaga

SEQ ID NO: 2929869 - DNA, 25 bp, Homo sapien
ccggcctgcttgtaggatttaaaca

SEQ ID NO: 2929870 - DNA, 25 bp, Homo sapien
agtggcctgtcccactttgtgcagg

SEQ ID NO: 2929871 - DNA, 25 bp, Homo sapien
gagtggcctgtcccactttgtgcag

SEQ ID NO: 2929872 - DNA, 25 bp, Homo sapien
cctgtgtggtttgacatcagcaggg

SEQ ID NO: 2929873 - DNA, 25 bp, Homo sapien
gactgtggtaaaagtgtccattcga

SEQ ID NO: 2929874 - DNA, 25 bp, Homo sapien
agtgtccattcgaccctgacataaa

SEQ ID NO: 2929875 - DNA, 25 bp, Homo sapien
ttccctgtgtggtttgacatcagca

SEQ ID NO: 2929876 - DNA, 25 bp, Homo sapien
agctggggttggcgccgatggtgga

SEQ ID NO: 2929877 - DNA, 25 bp, Homo sapien
gggttggcgccgatggtggagggtc

SEQ ID NO: 2929878 - DNA, 25 bp, Homo sapien
ggttggcgccgatggtggagggtcc

SEQ ID NO: 2929879 - DNA, 25 bp, Homo sapien
tggggttggcgccgatggtggaggg

SEQ ID NO: 2929880 - DNA, 25 bp, Homo sapien
cttaacaaccctgctgtgaagatgg

SEQ ID NO: 2929881 - DNA, 25 bp, Homo sapien
ctcacttcttaacaaccctgctgtg

SEQ ID NO: 2929882 - DNA, 25 bp, Homo sapien
ttgcctcacttcttaacaaccctgc

SEQ ID NO: 2929883 - DNA, 25 bp, Homo sapien
cacttcttaacaaccctgctgtgaa

SEQ ID NO: 2929884 - DNA, 25 bp, Homo sapien
cagccctggtacaccaggctgtctc

SEQ ID NO: 2929885 - DNA, 25 bp, Homo sapien
tcagccctggtacaccaggctgtct

SEQ ID NO: 2929886 - DNA, 25 bp, Homo sapien
tctcccttggcaccctgttcagtgg

SEQ ID NO: 2929887 - DNA, 25 bp, Homo sapien
agcatggtgagtggtttctgtgatg

SEQ ID NO: 2929888 - DNA, 25 bp, Homo sapien
gcagcatggtgagtggtttctgtga

SEQ ID NO: 2929889 - DNA, 25 bp, Homo sapien
cagcatggtgagtggtttctgtgat

SEQ ID NO: 2929890 - DNA, 25 bp, Homo sapien
ctgtgagcaaaatgtgctgctgtta

SEQ ID NO: 2929891 - DNA, 25 bp, Homo sapien
tgtgctgctgttagcattcacggtc

SEQ ID NO: 2929892 - DNA, 25 bp, Homo sapien
aatgtgctgctgttagcattcacgg

SEQ ID NO: 2929893 - DNA, 25 bp, Homo sapien
tgctgctgttagcattcacggtcac

SEQ ID NO: 2929894 - DNA, 25 bp, Homo sapien
agttctgcagctcgatggcattgcg

SEQ ID NO: 2929895 - DNA, 25 bp, Homo sapien
cagagaacctgtcggccgccgagtt

SEQ ID NO: 2929896 - DNA, 25 bp, Homo sapien
cctctgagagttgaagtcgttattc

SEQ ID NO: 2929897 - DNA, 25 bp, Homo sapien
cgaggccgaaagcagaatttccagg

SEQ ID NO: 2929898 - DNA, 25 bp, Homo sapien
gaaaaggaggtgagactcgacgtcc

SEQ ID NO: 2929899 - DNA, 25 bp, Homo sapien
ttccgtttgagagggagcggtgtca

SEQ ID NO: 2929900 - DNA, 25 bp, Homo sapien
tggcctggcttgctcggccttccct

SEQ ID NO: 2929901 - DNA, 25 bp, Homo sapien
gactcgacgtccagtgccctcttgg

SEQ ID NO: 2929902 - DNA, 25 bp, Homo sapien
tctagccggcctgtaccgcgcatag

SEQ ID NO: 2929903 - DNA, 25 bp, Homo sapien
agccggcctgtaccgcgcatagcag

SEQ ID NO: 2929904 - DNA, 25 bp, Homo sapien
taccgcgcatagcagagctaggaga

SEQ ID NO: 2929905 - DNA, 25 bp, Homo sapien
gcctgtaccgcgcatagcagagcta

SEQ ID NO: 2929906 - DNA, 25 bp, Homo sapien
gcaaacaggtgtatgagggtgaact

SEQ ID NO: 2929907 - DNA, 25 bp, Homo sapien
ggcaaaaccatcgtggcaaacaggt

SEQ ID NO: 2929908 - DNA, 25 bp, Homo sapien
gctgaatgacctagcgagaagggca

SEQ ID NO: 2929909 - DNA, 25 bp, Homo sapien
gaaaggctcctaaaagtgatgccaa

SEQ ID NO: 2929910 - DNA, 25 bp, Homo sapien
tttaagcactagaaccaaggacgtg

SEQ ID NO: 2929911 - DNA, 25 bp, Homo sapien
gaactcagagagttgcaggaccctg

SEQ ID NO: 2929912 - DNA, 25 bp, Homo sapien
tccgacagtaggcttctacacaggg

SEQ ID NO: 2929913 - DNA, 25 bp, Homo sapien
caaggacgtgatcaccatcaagatc

SEQ ID NO: 2929914 - DNA, 25 bp, Homo sapien
gatactagtgttgagacatgaaatt

SEQ ID NO: 2929915 - DNA, 25 bp, Homo sapien
tcctgatactagtgttgagacatga

SEQ ID NO: 2929916 - DNA, 25 bp, Homo sapien
gagtgccattgtatgattcctgata

SEQ ID NO: 2929917 - DNA, 25 bp, Homo sapien
gccattaagagtgagtgccattgta

SEQ ID NO: 2929918 - DNA, 25 bp, Homo sapien
gcaggaccttgagaatgtccttatc

SEQ ID NO: 2929919 - DNA, 25 bp, Homo sapien
gtgcaggaccttgagaatgtcctta

SEQ ID NO: 2929920 - DNA, 25 bp, Homo sapien
gccacattggagccagggatggcac

SEQ ID NO: 2929921 - DNA, 25 bp, Homo sapien
cagggatggcacagtgcaggacctt

SEQ ID NO: 2929922 - DNA, 25 bp, Homo sapien
ggtcagcaacagaacttttaccacc

SEQ ID NO: 2929923 - DNA, 25 bp, Homo sapien
cttttaccaccccaatcctactcat

SEQ ID NO: 2929924 - DNA, 25 bp, Homo sapien
cttcataagacgtggtcagcaacag

SEQ ID NO: 2929925 - DNA, 25 bp, Homo sapien
cagcaacagaacttttaccacccca

SEQ ID NO: 2929926 - DNA, 25 bp, Homo sapien
caacaagttggtgatttaatgagtt

SEQ ID NO: 2929927 - DNA, 25 bp, Homo sapien
caagttggtgatttaatgagttcat

SEQ ID NO: 2929928 - DNA, 25 bp, Homo sapien
ctgtcacaacaagttggtgatttaa

SEQ ID NO: 2929929 - DNA, 25 bp, Homo sapien
cacaacaagttggtgatttaatgag

SEQ ID NO: 2929930 - DNA, 25 bp, Homo sapien
gctcctcgcagagggatggtttcca

SEQ ID NO: 2929931 - DNA, 25 bp, Homo sapien
gagtgctcctcgacaaagacagaca

SEQ ID NO: 2929932 - DNA, 25 bp, Homo sapien
ggtttccatggcaatagcatcagca

SEQ ID NO: 2929933 - DNA, 25 bp, Homo sapien
ggagctggagtgctcctcgacaaag

SEQ ID NO: 2929934 - DNA, 25 bp, Homo sapien
atcagctgaagtttctatgacacca

SEQ ID NO: 2929935 - DNA, 25 bp, Homo sapien
ctgcacaagaatttcacacagtgtc

SEQ ID NO: 2929936 - DNA, 25 bp, Homo sapien
ctattgcagaattggtcatgcaggt

SEQ ID NO: 2929937 - DNA, 25 bp, Homo sapien
ggcagatactattgcagaattggtc

SEQ ID NO: 2929938 - DNA, 25 bp, Homo sapien
cttttctgtggcagatactattgca

SEQ ID NO: 2929939 - DNA, 25 bp, Homo sapien
catgggattcgctgcataaagtgga

SEQ ID NO: 2929940 - DNA, 25 bp, Homo sapien
gagaactcactatgcatctgatagg

SEQ ID NO: 2929941 - DNA, 25 bp, Homo sapien
taaggtgggtatccataagtcaccc

SEQ ID NO: 2929942 - DNA, 25 bp, Homo sapien
ggcagagtagcaagctggcaagttc

SEQ ID NO: 2929943 - DNA, 25 bp, Homo sapien
tttgaggatttctacaaagttctaa

SEQ ID NO: 2929944 - DNA, 25 bp, Homo sapien
taatagcctttgaggatttctacaa

SEQ ID NO: 2929945 - DNA, 25 bp, Homo sapien
gatggcaattaatagcctttgagga

SEQ ID NO: 2929946 - DNA, 25 bp, Homo sapien
tcagctaggtgagatggcaattaat

SEQ ID NO: 2929947 - DNA, 25 bp, Homo sapien
tcttatttgctttgtgacgtgttca

SEQ ID NO: 2929948 - DNA, 25 bp, Homo sapien
tgaaagagtgaatccaaaaatactg

SEQ ID NO: 2929949 - DNA, 25 bp, Homo sapien
tcttttatgttgaaagagtgaatcc

SEQ ID NO: 2929950 - DNA, 25 bp, Homo sapien
ccttgatgacgggagattttctggg

SEQ ID NO: 2929951 - DNA, 25 bp, Homo sapien
tctgtggatgcaagccagaaatcaa

SEQ ID NO: 2929952 - DNA, 25 bp, Homo sapien
ttaaaggagcactgttactggattt

SEQ ID NO: 2929953 - DNA, 25 bp, Homo sapien
tgaacattcgaccagcttctcagtt

SEQ ID NO: 2929954 - DNA, 25 bp, Homo sapien
taccgataagcaggccagcagttgc

SEQ ID NO: 2929955 - DNA, 25 bp, Homo sapien
gaacagggatcacattctcagcatc

SEQ ID NO: 2929956 - DNA, 25 bp, Homo sapien
tgtccctaccacaggccgtgtggca

SEQ ID NO: 2929957 - DNA, 25 bp, Homo sapien
cttcctctgatccaactggattgtg

SEQ ID NO: 2929958 - DNA, 25 bp, Homo sapien
ctggattgtgaatcccccaagaaca

SEQ ID NO: 2929959 - DNA, 25 bp, Homo sapien
gggcgtacacatgaagaattcccat

SEQ ID NO: 2929960 - DNA, 25 bp, Homo sapien
ggcctgggcgtacacatgaagaatt

SEQ ID NO: 2929961 - DNA, 25 bp, Homo sapien
cctgggcgtacacatgaagaattcc

SEQ ID NO: 2929962 - DNA, 25 bp, Homo sapien
ctaggcctgggcgtacacatgaaga

SEQ ID NO: 2929963 - DNA, 25 bp, Homo sapien
agctagaattcttcttacccttctt

SEQ ID NO: 2929964 - DNA, 25 bp, Homo sapien
ctcagctagaattcttcttaccctt

SEQ ID NO: 2929965 - DNA, 25 bp, Homo sapien
cagctagaattcttcttacccttct

SEQ ID NO: 2929966 - DNA, 25 bp, Homo sapien
tcagctagaattcttcttacccttc

SEQ ID NO: 2929967 - DNA, 25 bp, Homo sapien
cgctccaaaaggtttgggccatgcc

SEQ ID NO: 2929968 - DNA, 25 bp, Homo sapien
ggcagccgccactccgctccaaaag

SEQ ID NO: 2929969 - DNA, 25 bp, Homo sapien
gcagccgccactccgctccaaaagg

SEQ ID NO: 2929970 - DNA, 25 bp, Homo sapien
ctccgctccaaaaggtttgggccat

SEQ ID NO: 2929971 - DNA, 25 bp, Homo sapien
ttctgttgtcatattttccactgcc

SEQ ID NO: 2929972 - DNA, 25 bp, Homo sapien
agctgccagcatcccatggcttgtg

SEQ ID NO: 2929973 - DNA, 25 bp, Homo sapien
cacatttcttccaaaggttacaggg

SEQ ID NO: 2929974 - DNA, 25 bp, Homo sapien
gaatgtcaacaggaccacatttctt

SEQ ID NO: 2929975 - DNA, 25 bp, Homo sapien
gtagcatccatgatacagtgaactg

SEQ ID NO: 2929976 - DNA, 25 bp, Homo sapien
gcagtcttccattgtagttgtgtga

SEQ ID NO: 2929977 - DNA, 25 bp, Homo sapien
caggcctaattgtggctcgcagctt

SEQ ID NO: 2929978 - DNA, 25 bp, Homo sapien
ccatgttccatgctatgagttttcc

SEQ ID NO: 2929979 - DNA, 25 bp, Homo sapien
gaaaaagggcgcatctatacgttca

SEQ ID NO: 2929980 - DNA, 25 bp, Homo sapien
cttacaaggctatgaagaggcgatc

SEQ ID NO: 2929981 - DNA, 25 bp, Homo sapien
gataggcacgagatagggtacacac

SEQ ID NO: 2929982 - DNA, 25 bp, Homo sapien
caaggacccttatgtagtgaaatgg

SEQ ID NO: 2929983 - DNA, 25 bp, Homo sapien
ggtagatggacacctctcctgagaa

SEQ ID NO: 2929984 - DNA, 25 bp, Homo sapien
tgaagagaacgtggctcaaagaagc

SEQ ID NO: 2929985 - DNA, 25 bp, Homo sapien
tagactcaaccctagagaactggaa

SEQ ID NO: 2929986 - DNA, 25 bp, Homo sapien
gatgagcatagaaaaccaaccagtg

SEQ ID NO: 2929987 - DNA, 25 bp, Homo sapien
gagggtccccatgaactgctagaag

SEQ ID NO: 2929988 - DNA, 25 bp, Homo sapien
taaacatgaagccaagctggatcac

SEQ ID NO: 2929989 - DNA, 25 bp, Homo sapien
gaaacatagcactgatgccgcatgc

SEQ ID NO: 2929990 - DNA, 25 bp, Homo sapien
tgctagcagaagtaaccctcactgt

SEQ ID NO: 2929991 - DNA, 25 bp, Homo sapien
tttggtgaagccgttgctacaattg

SEQ ID NO: 2929992 - DNA, 25 bp, Homo sapien
gctacaattgctgtctgtctgccaa

SEQ ID NO: 2929993 - DNA, 25 bp, Homo sapien
tcagtgtaatgccataaggcaaata

SEQ ID NO: 2929994 - DNA, 25 bp, Homo sapien
tgccataaggcaaataacctaaacc

SEQ ID NO: 2929995 - DNA, 25 bp, Homo sapien
cacttctgtgtagccctcaatatcc

SEQ ID NO: 2929996 - DNA, 25 bp, Homo sapien
ttctgtgtagccctcaatatccctt

SEQ ID NO: 2929997 - DNA, 25 bp, Homo sapien
gtagccctcaatatcccttctgtac

SEQ ID NO: 2929998 - DNA, 25 bp, Homo sapien
ttcagccacttctgtgtagccctca

SEQ ID NO: 2929999 - DNA, 25 bp, Homo sapien
taggtttctatcaagcatcccatgg

SEQ ID NO: 2930000 - DNA, 25 bp, Homo sapien
ttcttaacatgacttggaaggccct

SEQ ID NO: 2930001 - DNA, 25 bp, Homo sapien
ttaagacttccatgctgtagccaga

SEQ ID NO: 2930002 - DNA, 25 bp, Homo sapien
ttttgagtgtgactaccaccatgct

SEQ ID NO: 2930003 - DNA, 25 bp, Homo sapien
gctacatccaggaatttttcataat

SEQ ID NO: 2930004 - DNA, 25 bp, Homo sapien
tgctacatccaggaatttttcataa

SEQ ID NO: 2930005 - DNA, 25 bp, Homo sapien
tatgctacatccaggaatttttcat

SEQ ID NO: 2930006 - DNA, 25 bp, Homo sapien
ttatgctacatccaggaatttttca

SEQ ID NO: 2930007 - DNA, 25 bp, Homo sapien
ctgaagcatctgatgaaagtatgga

SEQ ID NO: 2930008 - DNA, 25 bp, Homo sapien
tgaagcatctgatgaaagtatggac

SEQ ID NO: 2930009 - DNA, 25 bp, Homo sapien
gcaccatccttgtcttgacaggtaa

SEQ ID NO: 2930010 - DNA, 25 bp, Homo sapien
gcaaacatctgttgggcgcctacaa

SEQ ID NO: 2930011 - DNA, 25 bp, Homo sapien
caggtattattacatttcggagaag

SEQ ID NO: 2930012 - DNA, 25 bp, Homo sapien
agaattgaaggaaggtgaaccacgc

SEQ ID NO: 2930013 - DNA, 25 bp, Homo sapien
caagttctgagggttgaagagtaga

SEQ ID NO: 2930014 - DNA, 25 bp, Homo sapien
catcataagttagggatcatctgca

SEQ ID NO: 2930015 - DNA, 25 bp, Homo sapien
ttagttctttacaagcagtgattcc

SEQ ID NO: 2930016 - DNA, 25 bp, Homo sapien
tggtcactgttgatttgtccaagga

SEQ ID NO: 2930017 - DNA, 25 bp, Homo sapien
gtgttcttggttatctcccagaatg

SEQ ID NO: 2930018 - DNA, 25 bp, Homo sapien
catcccctgtgttcttggttatctc

SEQ ID NO: 2930019 - DNA, 25 bp, Homo sapien
tcccctgtgttcttggttatctccc

SEQ ID NO: 2930020 - DNA, 25 bp, Homo sapien
ctgtgttcttggttatctcccagaa

SEQ ID NO: 2930021 - DNA, 25 bp, Homo sapien
caccttgagtgaaagttcgagtgcc

SEQ ID NO: 2930022 - DNA, 25 bp, Homo sapien
tgagcgcatagaatgtggaagcaca

SEQ ID NO: 2930023 - DNA, 25 bp, Homo sapien
tcgagtgccagcaacatcttggaaa

SEQ ID NO: 2930024 - DNA, 25 bp, Homo sapien
aatggcacacagctttgtctggttg

SEQ ID NO: 2930025 - DNA, 25 bp, Homo sapien
tgcctttccttccattcggtttcag

SEQ ID NO: 2930026 - DNA, 25 bp, Homo sapien
gtctgtaggatcttgatgaaatcca

SEQ ID NO: 2930027 - DNA, 25 bp, Homo sapien
accttgtctgtaggatcttgatgaa

SEQ ID NO: 2930028 - DNA, 25 bp, Homo sapien
tttccttccattcggtttcagctgg

SEQ ID NO: 2930029 - DNA, 25 bp, Homo sapien
tttttgtcttgtgtgacgaagccca

SEQ ID NO: 2930030 - DNA, 25 bp, Homo sapien
ttgtgtgacgaagcccaaattgcat

SEQ ID NO: 2930031 - DNA, 25 bp, Homo sapien
aaattgcattgcaggcctgttcctg

SEQ ID NO: 2930032 - DNA, 25 bp, Homo sapien
caaattgcattgcaggcctgttcct

SEQ ID NO: 2930033 - DNA, 25 bp, Homo sapien
tcatcaggtgcagtgttaggtggtt

SEQ ID NO: 2930034 - DNA, 25 bp, Homo sapien
gcagctactaggcatcatcaggtgc

SEQ ID NO: 2930035 - DNA, 25 bp, Homo sapien
gaaggaaactaattattggggcagc

SEQ ID NO: 2930036 - DNA, 25 bp, Homo sapien
aaggattagctctgccttaaattca

SEQ ID NO: 2930037 - DNA, 25 bp, Homo sapien
atgcccgagttcatggccaacctca

SEQ ID NO: 2930038 - DNA, 25 bp, Homo sapien
caggagagcctggaattcggcaagg

SEQ ID NO: 2930039 - DNA, 25 bp, Homo sapien
ggacaccgtctccatgcccgagttc

SEQ ID NO: 2930040 - DNA, 25 bp, Homo sapien
tcggcaaggcagacttcgtgctgat

SEQ ID NO: 2930041 - DNA, 25 bp, Homo sapien
ttcattccactgaaccagtatggat

SEQ ID NO: 2930042 - DNA, 25 bp, Homo sapien
tacaatagttatttggtggatgcaa

SEQ ID NO: 2930043 - DNA, 25 bp, Homo sapien
gatgcaaaaagaatggtcccatgct

SEQ ID NO: 2930044 - DNA, 25 bp, Homo sapien
tatatgcaaagtagtacaatagtta

SEQ ID NO: 2930045 - DNA, 25 bp, Homo sapien
tcagatgcaacccagctctgctggt

SEQ ID NO: 2930046 - DNA, 25 bp, Homo sapien
gggcaaggtccttcagtctggttta

SEQ ID NO: 2930047 - DNA, 25 bp, Homo sapien
ggacactgatatcgagacaggtgga

SEQ ID NO: 2930048 - DNA, 25 bp, Homo sapien
gaaggacagctgctaacggtagtca

SEQ ID NO: 2930049 - DNA, 25 bp, Homo sapien
cccctccgcgctttgagttgtcccg

SEQ ID NO: 2930050 - DNA, 25 bp, Homo sapien
cgagttgtcccctttccagatggaa

SEQ ID NO: 2930051 - DNA, 25 bp, Homo sapien
tgtcccctttccagatggaaccaat

SEQ ID NO: 2930052 - DNA, 25 bp, Homo sapien
agttgtcccgccttcacctcgagtt

SEQ ID NO: 2930053 - DNA, 25 bp, Homo sapien
agatctctgcttaactgcgccaagg

SEQ ID NO: 2930054 - DNA, 25 bp, Homo sapien
caggaacgcccgctgaaatcagggt

SEQ ID NO: 2930055 - DNA, 25 bp, Homo sapien
ctagtgcatacaagacccaggaacg

SEQ ID NO: 2930056 - DNA, 25 bp, Homo sapien
tgccaagcattgagggcacctagtg

SEQ ID NO: 2930057 - DNA, 25 bp, Homo sapien
gacccagagactaggtgtgtagcaa

SEQ ID NO: 2930058 - DNA, 25 bp, Homo sapien
tatgttcacgaagtaagctggaggc

SEQ ID NO: 2930059 - DNA, 25 bp, Homo sapien
taacaaggccattctgaacaacttc

SEQ ID NO: 2930060 - DNA, 25 bp, Homo sapien
tgtgtagcaatgaaactcctcatgc

SEQ ID NO: 2930061 - DNA, 25 bp, Homo sapien
tcctctcaccctctggtcctaccat

SEQ ID NO: 2930062 - DNA, 25 bp, Homo sapien
gccattctcactcctctcaccctct

SEQ ID NO: 2930063 - DNA, 25 bp, Homo sapien
gggtgtcaccactgcttctaaagca

SEQ ID NO: 2930064 - DNA, 25 bp, Homo sapien
ggagcctctgtttacaggcctgaca

SEQ ID NO: 2930065 - DNA, 25 bp, Homo sapien
caaagagtggtcactgggtgtcacc

SEQ ID NO: 2930066 - DNA, 25 bp, Homo sapien
gatctgctgacaacctaaaaccaag

SEQ ID NO: 2930067 - DNA, 25 bp, Homo sapien
tagctgtatctgtgtcatgcgtagc

SEQ ID NO: 2930068 - DNA, 25 bp, Homo sapien
tctggtccagatgtaactcaagtac

SEQ ID NO: 2930069 - DNA, 25 bp, Homo sapien
tactgtacttttttggctagtctca

SEQ ID NO: 2930070 - DNA, 25 bp, Homo sapien
ggatgaatctctttgcagcacctag

SEQ ID NO: 2930071 - DNA, 25 bp, Homo sapien
ccgtccgggcggcagacggagaggg

SEQ ID NO: 2930072 - DNA, 25 bp, Homo sapien
ggaggcgggccctggcgacccaaca

SEQ ID NO: 2930073 - DNA, 25 bp, Homo sapien
gcggccctaggaatccagcctcgcg

SEQ ID NO: 2930074 - DNA, 25 bp, Homo sapien
tgccccgccgatggcaaagtccggg

SEQ ID NO: 2930075 - DNA, 25 bp, Homo sapien
tacacgcgtgagacaccgagcccgg

SEQ ID NO: 2930076 - DNA, 25 bp, Homo sapien
ttacacgcgtgagacaccgagcccg

SEQ ID NO: 2930077 - DNA, 25 bp, Homo sapien
acacgcgtgagacaccgagcccggc

SEQ ID NO: 2930078 - DNA, 25 bp, Homo sapien
acgcgtgagacaccgagcccggcct

SEQ ID NO: 2930079 - DNA, 25 bp, Homo sapien
gtgctaggttcctccacgacacctg

SEQ ID NO: 2930080 - DNA, 25 bp, Homo sapien
taggttcctccacgacacctgcaga

SEQ ID NO: 2930081 - DNA, 25 bp, Homo sapien
gcaggtgctaggttcctccacgaca

SEQ ID NO: 2930082 - DNA, 25 bp, Homo sapien
ggatggcaggtgctaggttcctcca

SEQ ID NO: 2930083 - DNA, 25 bp, Homo sapien
aagaagccacgaaagagagtgggac

SEQ ID NO: 2930084 - DNA, 25 bp, Homo sapien
ggtcaagaagccacgaaagagagtg

SEQ ID NO: 2930085 - DNA, 25 bp, Homo sapien
tcaagaagccacgaaagagagtggg

SEQ ID NO: 2930086 - DNA, 25 bp, Homo sapien
tggtcaagaagccacgaaagagagt

SEQ ID NO: 2930087 - DNA, 25 bp, Homo sapien
ctgactcagtcccggtcacatcctc

SEQ ID NO: 2930088 - DNA, 25 bp, Homo sapien
actcagtcccggtcacatcctcctc

SEQ ID NO: 2930089 - DNA, 25 bp, Homo sapien
gtcccggtcacatcctcctcatggg

SEQ ID NO: 2930090 - DNA, 25 bp, Homo sapien
gcttccagagggctcctgactcagt

SEQ ID NO: 2930091 - DNA, 25 bp, Homo sapien
tgcaaacgaagccagaaagatggtg

SEQ ID NO: 2930092 - DNA, 25 bp, Homo sapien
agatggtggccagcacacctatggc

SEQ ID NO: 2930093 - DNA, 25 bp, Homo sapien
ggtggccagcacacctatggcaaca

SEQ ID NO: 2930094 - DNA, 25 bp, Homo sapien
tatggcaacaatcaccacagtctcc

SEQ ID NO: 2930095 - DNA, 25 bp, Homo sapien
agtagcgctgcctgcaaaccagcac

SEQ ID NO: 2930096 - DNA, 25 bp, Homo sapien
ggtgataacgacatcgtccagttct

SEQ ID NO: 2930097 - DNA, 25 bp, Homo sapien
gggttggtgataacgacatcgtcca

SEQ ID NO: 2930098 - DNA, 25 bp, Homo sapien
gataacgacatcgtccagttctaac

SEQ ID NO: 2930099 - DNA, 25 bp, Homo sapien
acgacatcgtccagttctaactcag

SEQ ID NO: 2930100 - DNA, 25 bp, Homo sapien
tcaagatggcaatgcagtgggacat

SEQ ID NO: 2930101 - DNA, 25 bp, Homo sapien
tggcaatgcagtgggacatgagacc

SEQ ID NO: 2930102 - DNA, 25 bp, Homo sapien
gatggcaatgcagtgggacatgaga

SEQ ID NO: 2930103 - DNA, 25 bp, Homo sapien
cttcaagatggcaatgcagtgggac

SEQ ID NO: 2930104 - DNA, 25 bp, Homo sapien
aagtcttcatcttggccccagagcc

SEQ ID NO: 2930105 - DNA, 25 bp, Homo sapien
gcttctctgtcagagtgtgacaaat

SEQ ID NO: 2930106 - DNA, 25 bp, Homo sapien
gtccaacggagggtacatcgacttc

SEQ ID NO: 2930107 - DNA, 25 bp, Homo sapien
tggggtccaacggagggtacatcga

SEQ ID NO: 2930108 - DNA, 25 bp, Homo sapien
tagactttttgactagtattcccca

SEQ ID NO: 2930109 - DNA, 25 bp, Homo sapien
tgagggactttgcacaaaagcccaa

SEQ ID NO: 2930110 - DNA, 25 bp, Homo sapien
gtattccccaaactgcacacccttc

SEQ ID NO: 2930111 - DNA, 25 bp, Homo sapien
ccttccctaggatgttggtaggtat

SEQ ID NO: 2930112 - DNA, 25 bp, Homo sapien
cagccgacagagactggtcaatcca

SEQ ID NO: 2930113 - DNA, 25 bp, Homo sapien
gacagagactggtcaatccagtcca

SEQ ID NO: 2930114 - DNA, 25 bp, Homo sapien
cagagactggtcaatccagtccagg

SEQ ID NO: 2930115 - DNA, 25 bp, Homo sapien
cctcagcagccgacagagactggtc

SEQ ID NO: 2930116 - DNA, 25 bp, Homo sapien
cctcttgcagagagtgaatggcatc

SEQ ID NO: 2930117 - DNA, 25 bp, Homo sapien
ggcataaactgacggggatctcctg

SEQ ID NO: 2930118 - DNA, 25 bp, Homo sapien
gctaagctgagccatccagggatgg

SEQ ID NO: 2930119 - DNA, 25 bp, Homo sapien
aaacactaggtgagctaaataaagc

SEQ ID NO: 2930120 - DNA, 25 bp, Homo sapien
ttgattgtcctcttctgaaaatgca

SEQ ID NO: 2930121 - DNA, 25 bp, Homo sapien
gagagacccagacgcctcagggacc

SEQ ID NO: 2930122 - DNA, 25 bp, Homo sapien
cctacttagtttcaattgattgtcc

SEQ ID NO: 2930123 - DNA, 25 bp, Homo sapien
aaatgcagatcagaattgccacaca

SEQ ID NO: 2930124 - DNA, 25 bp, Homo sapien
caagtcattgctattgttaatgtgg

SEQ ID NO: 2930125 - DNA, 25 bp, Homo sapien
gggaacacatcgttcaagtcattgc

SEQ ID NO: 2930126 - DNA, 25 bp, Homo sapien
caaaatgaacagatattaatatcag

SEQ ID NO: 2930127 - DNA, 25 bp, Homo sapien
cttcatagtgctatcttcacttctg

SEQ ID NO: 2930128 - DNA, 25 bp, Homo sapien
gaatgtgtctgttgcctgggaaacc

SEQ ID NO: 2930129 - DNA, 25 bp, Homo sapien
ggaaggaaggctctactaccatgta

SEQ ID NO: 2930130 - DNA, 25 bp, Homo sapien
aaagggcagcatctaagggatccag

SEQ ID NO: 2930131 - DNA, 25 bp, Homo sapien
taatgctcctattccaggccagagg

SEQ ID NO: 2930132 - DNA, 25 bp, Homo sapien
tcagcggcatcagagaatgggaagc

SEQ ID NO: 2930133 - DNA, 25 bp, Homo sapien
tgtgagttgcacaatcgaccctttg

SEQ ID NO: 2930134 - DNA, 25 bp, Homo sapien
tgaacactgattagaggcgacggct

SEQ ID NO: 2930135 - DNA, 25 bp, Homo sapien
caagccatggtaactgaggtgacgc

SEQ ID NO: 2930136 - DNA, 25 bp, Homo sapien
tacgtgttccctcttggagatctca

SEQ ID NO: 2930137 - DNA, 25 bp, Homo sapien
gccataaagcaatgcagggcctttg

SEQ ID NO: 2930138 - DNA, 25 bp, Homo sapien
aaaagtctgctcgtgtgggcacaca

SEQ ID NO: 2930139 - DNA, 25 bp, Homo sapien
agttggatgccaggaatacgtgttc

SEQ ID NO: 2930140 - DNA, 25 bp, Homo sapien
gaagatcctgctctgattcatatta

SEQ ID NO: 2930141 - DNA, 25 bp, Homo sapien
atattaattgtgagactccaggagg

SEQ ID NO: 2930142 - DNA, 25 bp, Homo sapien
tattaattgtgagactccaggaggg

SEQ ID NO: 2930143 - DNA, 25 bp, Homo sapien
ggagttgaagatcctgctctgattc

SEQ ID NO: 2930144 - DNA, 25 bp, Homo sapien
tgacacatgtacaccatggaatacc

SEQ ID NO: 2930145 - DNA, 25 bp, Homo sapien
atcacacaccggggcctgtcgtggg

SEQ ID NO: 2930146 - DNA, 25 bp, Homo sapien
catgtcctttgtagggacatggatg

SEQ ID NO: 2930147 - DNA, 25 bp, Homo sapien
atgcagccataaaaaagggtgagtt

SEQ ID NO: 2930148 - DNA, 25 bp, Homo sapien
agagcgagctgtgggagaaccatca

SEQ ID NO: 2930149 - DNA, 25 bp, Homo sapien
ttcagaccagacaatgagccaggga

SEQ ID NO: 2930150 - DNA, 25 bp, Homo sapien
cagggaccaatgttggcaggaacac

SEQ ID NO: 2930151 - DNA, 25 bp, Homo sapien
ggaccactcagccaccataagggaa

SEQ ID NO: 2930152 - DNA, 25 bp, Homo sapien
tggttgcacaacactagcaaagacg

SEQ ID NO: 2930153 - DNA, 25 bp, Homo sapien
tacactcgagttcttgccttttccc

SEQ ID NO: 2930154 - DNA, 25 bp, Homo sapien
gcaaagacgtgaaaagtgtttgtgt

SEQ ID NO: 2930155 - DNA, 25 bp, Homo sapien
ttgcctcagctacaagtccaaggag

SEQ ID NO: 2930156 - DNA, 25 bp, Homo sapien
gatctgctcctggttgtgttgctgc

SEQ ID NO: 2930157 - DNA, 25 bp, Homo sapien
tcaaccctcagagaggatctgctcc

SEQ ID NO: 2930158 - DNA, 25 bp, Homo sapien
tgcagcggggagagtgttgacgttg

SEQ ID NO: 2930159 - DNA, 25 bp, Homo sapien
gcagatccctggatcttgcagcggg

SEQ ID NO: 2930160 - DNA, 25 bp, Homo sapien
gagtctccataagctaaaatgggtg

SEQ ID NO: 2930161 - DNA, 25 bp, Homo sapien
gcaccattcctatattggcatgagg

SEQ ID NO: 2930162 - DNA, 25 bp, Homo sapien
tggtttgttacgtttgcagcctggc

SEQ ID NO: 2930163 - DNA, 25 bp, Homo sapien
tcccttctaaggttatgccctggtc

SEQ ID NO: 2930164 - DNA, 25 bp, Homo sapien
tgtctgctctggctctgcggctcct

SEQ ID NO: 2930165 - DNA, 25 bp, Homo sapien
actgtccacctttttctcggctgtc

SEQ ID NO: 2930166 - DNA, 25 bp, Homo sapien
actggttctttcacactgtccacct

SEQ ID NO: 2930167 - DNA, 25 bp, Homo sapien
cctttttctcggctgtctgctctgg

SEQ ID NO: 2930168 - DNA, 25 bp, Homo sapien
gaggatttctcaagtccaggagtct

SEQ ID NO: 2930169 - DNA, 25 bp, Homo sapien
gctatgatcacgccagtacactcta

SEQ ID NO: 2930170 - DNA, 25 bp, Homo sapien
gcaggaggatttctcaagtccagga

SEQ ID NO: 2930171 - DNA, 25 bp, Homo sapien
tggagtcccagatatgcaggaggct

SEQ ID NO: 2930172 - DNA, 25 bp, Homo sapien
agcagtggctcaaaaccctgcttca

SEQ ID NO: 2930173 - DNA, 25 bp, Homo sapien
atgtcccccacaaccttgccagggc

SEQ ID NO: 2930174 - DNA, 25 bp, Homo sapien
tgatcaggggtgctccccgcagagc

SEQ ID NO: 2930175 - DNA, 25 bp, Homo sapien
gtcttcttgtatcatgtctcaacca

SEQ ID NO: 2930176 - DNA, 25 bp, Homo sapien
tgttaaatgaaaagcccagccctgt

SEQ ID NO: 2930177 - DNA, 25 bp, Homo sapien
ctgtgacaccttggatggctcccac

SEQ ID NO: 2930178 - DNA, 25 bp, Homo sapien
aagctattctatacacatccatcag

SEQ ID NO: 2930179 - DNA, 25 bp, Homo sapien
gactctgtctcatgggagctctcag

SEQ ID NO: 2930180 - DNA, 25 bp, Homo sapien
aaactgctctgcgggtccaaggagg

SEQ ID NO: 2930181 - DNA, 25 bp, Homo sapien
aaggaggcccccttcgactctgtct

SEQ ID NO: 2930182 - DNA, 25 bp, Homo sapien
ctcatgggagctctcagctgtactc

SEQ ID NO: 2930183 - DNA, 25 bp, Homo sapien
gaagaaacagggcttgagtgcaccc

SEQ ID NO: 2930184 - DNA, 25 bp, Homo sapien
cagaaggagaagaaacagggcttga

SEQ ID NO: 2930185 - DNA, 25 bp, Homo sapien
aggagaagaaacagggcttgagtgc

SEQ ID NO: 2930186 - DNA, 25 bp, Homo sapien
ctcacagaaggagaagaaacagggc

SEQ ID NO: 2930187 - DNA, 25 bp, Homo sapien
cttctatgccggcggcagaggtgga

SEQ ID NO: 2930188 - DNA, 25 bp, Homo sapien
tgctcctggcttctatgccggcggc

SEQ ID NO: 2930189 - DNA, 25 bp, Homo sapien
cctggcttctatgccggcggcagag

SEQ ID NO: 2930190 - DNA, 25 bp, Homo sapien
tcctggcttctatgccggcggcaga

SEQ ID NO: 2930191 - DNA, 25 bp, Homo sapien
agcagacagaccagggccaacaaca

SEQ ID NO: 2930192 - DNA, 25 bp, Homo sapien
gcagacagaccagggccaacaacat

SEQ ID NO: 2930193 - DNA, 25 bp, Homo sapien
tccagcccgaagtcatgtagcactc

SEQ ID NO: 2930194 - DNA, 25 bp, Homo sapien
ggctgtatccccggtatccgtccag

SEQ ID NO: 2930195 - DNA, 25 bp, Homo sapien
ttcacaacgaccgtagagcttggcc

SEQ ID NO: 2930196 - DNA, 25 bp, Homo sapien
catgtagcactctggccagttcaca

SEQ ID NO: 2930197 - DNA, 25 bp, Homo sapien
ggaagatcccgttgttggtgctccc

SEQ ID NO: 2930198 - DNA, 25 bp, Homo sapien
cctcgtagtccaaagcagctgcgtt

SEQ ID NO: 2930199 - DNA, 25 bp, Homo sapien
cagtacatccggcacacgttgggga

SEQ ID NO: 2930200 - DNA, 25 bp, Homo sapien
cgttgaaaccgcttgtgaaataagc

SEQ ID NO: 2930201 - DNA, 25 bp, Homo sapien
cacagataacggtatccttgagatt

SEQ ID NO: 2930202 - DNA, 25 bp, Homo sapien
gataacggtatccttgagattagga

SEQ ID NO: 2930203 - DNA, 25 bp, Homo sapien
ggctcttgggttatcttcatggcac

SEQ ID NO: 2930204 - DNA, 25 bp, Homo sapien
aggctcttgggttatcttcatggca

SEQ ID NO: 2930205 - DNA, 25 bp, Homo sapien
agccatccacccattcagtgaggtc

SEQ ID NO: 2930206 - DNA, 25 bp, Homo sapien
tggcttgtcttcccaagcctaggtc

SEQ ID NO: 2930207 - DNA, 25 bp, Homo sapien
cagcctgctgtgcatggttccgtcc

SEQ ID NO: 2930208 - DNA, 25 bp, Homo sapien
agcctaggtcaggaaccaaaccaca

SEQ ID NO: 2930209 - DNA, 25 bp, Homo sapien
atcctttattcgctggcttgtcttc

SEQ ID NO: 2930210 - DNA, 25 bp, Homo sapien
cctggctttgatcagggccctcttc

SEQ ID NO: 2930211 - DNA, 25 bp, Homo sapien
ggcctgcacactctgtagccctcat

SEQ ID NO: 2930212 - DNA, 25 bp, Homo sapien
cttgtccaggcctgatcccagtcca

SEQ ID NO: 2930213 - DNA, 25 bp, Homo sapien
tctgtagccctcataacaagggagg

SEQ ID NO: 2930214 - DNA, 25 bp, Homo sapien
tttgatgacactgggcctactgcat

SEQ ID NO: 2930215 - DNA, 25 bp, Homo sapien
aagaacccttttgatgacactgggc

SEQ ID NO: 2930216 - DNA, 25 bp, Homo sapien
cccttttgatgacactgggcctact

SEQ ID NO: 2930217 - DNA, 25 bp, Homo sapien
gaacccttttgatgacactgggcct

SEQ ID NO: 2930218 - DNA, 25 bp, Homo sapien
tgcacaatcaagagggaacccatgg

SEQ ID NO: 2930219 - DNA, 25 bp, Homo sapien
cgccgtgcgtccctcttaggagaga

SEQ ID NO: 2930220 - DNA, 25 bp, Homo sapien
tggaactgtccaagaacgaacctgc

SEQ ID NO: 2930221 - DNA, 25 bp, Homo sapien
catgctcagacttcttgtggcgcca

SEQ ID NO: 2930222 - DNA, 25 bp, Homo sapien
ttcctagctgtaggttgatcttgag

SEQ ID NO: 2930223 - DNA, 25 bp, Homo sapien
taggttgatcttgagagatacgttc

SEQ ID NO: 2930224 - DNA, 25 bp, Homo sapien
ttgagagatacgttcaagtgtgagc

SEQ ID NO: 2930225 - DNA, 25 bp, Homo sapien
aaattcttcctagctgtaggttgat

SEQ ID NO: 2930226 - DNA, 25 bp, Homo sapien
tgccataattccaaaatggtgaggg

SEQ ID NO: 2930227 - DNA, 25 bp, Homo sapien
cttgccataattccaaaatggtgag

SEQ ID NO: 2930228 - DNA, 25 bp, Homo sapien
ataattccaaaatggtgaggggcat

SEQ ID NO: 2930229 - DNA, 25 bp, Homo sapien
ccataattccaaaatggtgaggggc

SEQ ID NO: 2930230 - DNA, 25 bp, Homo sapien
tctgctcatctatgatgttacagac

SEQ ID NO: 2930231 - DNA, 25 bp, Homo sapien
tcatggtctaacagtttgcatctgc

SEQ ID NO: 2930232 - DNA, 25 bp, Homo sapien
caatattgcttacgatttcttccag

SEQ ID NO: 2930233 - DNA, 25 bp, Homo sapien
gggatgtttcacttcaaagaccact

SEQ ID NO: 2930234 - DNA, 25 bp, Homo sapien
ccctgccgttgcactctctgggttg

SEQ ID NO: 2930235 - DNA, 25 bp, Homo sapien
aggttttcccctgccgttgcactct

SEQ ID NO: 2930236 - DNA, 25 bp, Homo sapien
tctctgggttgtctgagtgggcaag

SEQ ID NO: 2930237 - DNA, 25 bp, Homo sapien
tctgggttgtctgagtgggcaagca

SEQ ID NO: 2930238 - DNA, 25 bp, Homo sapien
cctcaacattgtttcccataaacat

SEQ ID NO: 2930239 - DNA, 25 bp, Homo sapien
aacattgtttcccataaacatcttc

SEQ ID NO: 2930240 - DNA, 25 bp, Homo sapien
ttgtccctcaacattgtttcccata

SEQ ID NO: 2930241 - DNA, 25 bp, Homo sapien
gtccctcaacattgtttcccataaa

SEQ ID NO: 2930242 - DNA, 25 bp, Homo sapien
ccacagcccatagcggctgggcccc

SEQ ID NO: 2930243 - DNA, 25 bp, Homo sapien
gcttccgatgatcatctctagccca

SEQ ID NO: 2930244 - DNA, 25 bp, Homo sapien
gtaaagcagcttccgatgatcatct

SEQ ID NO: 2930245 - DNA, 25 bp, Homo sapien
ctgggtaaagcagcttccgatgatc

SEQ ID NO: 2930246 - DNA, 25 bp, Homo sapien
agtttaaagaatcaccaacacgtct

SEQ ID NO: 2930247 - DNA, 25 bp, Homo sapien
gaggacacttccatgcataggccaa

SEQ ID NO: 2930248 - DNA, 25 bp, Homo sapien
ctgaatatgaacagtcttgctgact

SEQ ID NO: 2930249 - DNA, 25 bp, Homo sapien
gaaatatcaactataatgaatgact

SEQ ID NO: 2930250 - DNA, 25 bp, Homo sapien
ccaaggaaatgtatcaggactgtta

SEQ ID NO: 2930251 - DNA, 25 bp, Homo sapien
gactgttagtctggtgcctgttcct

SEQ ID NO: 2930252 - DNA, 25 bp, Homo sapien
ttaatacctgagagctgtcacagct

SEQ ID NO: 2930253 - DNA, 25 bp, Homo sapien
gctgagattactatgtgaaagacac

SEQ ID NO: 2930254 - DNA, 25 bp, Homo sapien
gcattcacgaccttgcagcatgagg

SEQ ID NO: 2930255 - DNA, 25 bp, Homo sapien
tctttgtagaagtgtgggctcctca

SEQ ID NO: 2930256 - DNA, 25 bp, Homo sapien
cagcatgaggcatctttgtgaaggc

SEQ ID NO: 2930257 - DNA, 25 bp, Homo sapien
tctgaaacactagagcacttggcat

SEQ ID NO: 2930258 - DNA, 25 bp, Homo sapien
tgggctcctcgatgcgttacaggct

SEQ ID NO: 2930259 - DNA, 25 bp, Homo sapien
gaagcttaaaactaggcctgcatgg

SEQ ID NO: 2930260 - DNA, 25 bp, Homo sapien
cagtgtccctcagcgcaattagaaa

SEQ ID NO: 2930261 - DNA, 25 bp, Homo sapien
gctgcttggagaaaagacgctgccg

SEQ ID NO: 2930262 - DNA, 25 bp, Homo sapien
cattgaagatgatagaaatagcaag

SEQ ID NO: 2930263 - DNA, 25 bp, Homo sapien
gaaatagcaagaagaaccaagatgt

SEQ ID NO: 2930264 - DNA, 25 bp, Homo sapien
agcaagaagaaccaagatgtacacg

SEQ ID NO: 2930265 - DNA, 25 bp, Homo sapien
atacattgaagatgatagaaatagc

SEQ ID NO: 2930266 - DNA, 25 bp, Homo sapien
cctttatctgatggcaagccctcct

SEQ ID NO: 2930267 - DNA, 25 bp, Homo sapien
aagccctcctctctaagaccatttt

SEQ ID NO: 2930268 - DNA, 25 bp, Homo sapien
tgtgacttgtgtttggtgtcccctt

SEQ ID NO: 2930269 - DNA, 25 bp, Homo sapien
tgccttcctttgtccaaggccaagt

SEQ ID NO: 2930270 - DNA, 25 bp, Homo sapien
ggctgtcagctgatgggtgtcagct

SEQ ID NO: 2930271 - DNA, 25 bp, Homo sapien
ctgtcagctgatgggtgtcagctgc

SEQ ID NO: 2930272 - DNA, 25 bp, Homo sapien
tcagctgatgggtgtcagctgcatc

SEQ ID NO: 2930273 - DNA, 25 bp, Homo sapien
cgggctgtcagctgatgggtgtcag

SEQ ID NO: 2930274 - DNA, 25 bp, Homo sapien
tgcgtaaaggcaccaaatttgtgcc

SEQ ID NO: 2930275 - DNA, 25 bp, Homo sapien
tggctgtgcgtaaaggcaccaaatt

SEQ ID NO: 2930276 - DNA, 25 bp, Homo sapien
gagaaccttcagtatccgagccacc

SEQ ID NO: 2930277 - DNA, 25 bp, Homo sapien
catttctcatgcacttggaattctg

SEQ ID NO: 2930278 - DNA, 25 bp, Homo sapien
gttctctgaattgccgaaggagatg

SEQ ID NO: 2930279 - DNA, 25 bp, Homo sapien
aactccccaaaggttctctgaattg

SEQ ID NO: 2930280 - DNA, 25 bp, Homo sapien
tgaagcagagcacagccgcgtggcc

SEQ ID NO: 2930281 - DNA, 25 bp, Homo sapien
gaagcagagcacagccgcgtggccc

SEQ ID NO: 2930282 - DNA, 25 bp, Homo sapien
atggtgggctcatagagcatgtgtc

SEQ ID NO: 2930283 - DNA, 25 bp, Homo sapien
tgtgcatggtgggctcatagagcat

SEQ ID NO: 2930284 - DNA, 25 bp, Homo sapien
tgtgtgcatggtgggctcatagagc

SEQ ID NO: 2930285 - DNA, 25 bp, Homo sapien
tgcatggtgggctcatagagcatgt

SEQ ID NO: 2930286 - DNA, 25 bp, Homo sapien
tcattcctctgcattctcgcctgag

SEQ ID NO: 2930287 - DNA, 25 bp, Homo sapien
cctctgcattctcgcctgagcagag

SEQ ID NO: 2930288 - DNA, 25 bp, Homo sapien
ctgcattctcgcctgagcagagatg

SEQ ID NO: 2930289 - DNA, 25 bp, Homo sapien
attcctctgcattctcgcctgagca

SEQ ID NO: 2930290 - DNA, 25 bp, Homo sapien
tgttctgtgctacatgaaaaattag

SEQ ID NO: 2930291 - DNA, 25 bp, Homo sapien
caacattttgacaaggtaatggccc

SEQ ID NO: 2930292 - DNA, 25 bp, Homo sapien
tagttggtgtactggaaataaagtc

SEQ ID NO: 2930293 - DNA, 25 bp, Homo sapien
taaagtcacagggagccaacatttt

SEQ ID NO: 2930294 - DNA, 25 bp, Homo sapien
cctgtgcagctttccaagcccacgc

SEQ ID NO: 2930295 - DNA, 25 bp, Homo sapien
tgtgcagctttccaagcccacgctc

SEQ ID NO: 2930296 - DNA, 25 bp, Homo sapien
ctcctgcaagatgcctgtgcagctt

SEQ ID NO: 2930297 - DNA, 25 bp, Homo sapien
tgcagctttccaagcccacgctcat

SEQ ID NO: 2930298 - DNA, 25 bp, Homo sapien
gagcaatgtctcctacgctcttagg

SEQ ID NO: 2930299 - DNA, 25 bp, Homo sapien
gtctcctacgctcttaggtgggcta

SEQ ID NO: 2930300 - DNA, 25 bp, Homo sapien
ctacgctcttaggtgggctatgatg

SEQ ID NO: 2930301 - DNA, 25 bp, Homo sapien
gatgagtgtttcgggctttcatctt

SEQ ID NO: 2930302 - DNA, 25 bp, Homo sapien
gaggtttgattctgcttctcagcac

SEQ ID NO: 2930303 - DNA, 25 bp, Homo sapien
tttgaaatggcacgggcatccactg

SEQ ID NO: 2930304 - DNA, 25 bp, Homo sapien
aaaatatgtattctggccatcccca

SEQ ID NO: 2930305 - DNA, 25 bp, Homo sapien
taagtctactgctcaggaaagcaga

SEQ ID NO: 2930306 - DNA, 25 bp, Homo sapien
cgcacgcttccctggcgcgggctgc

SEQ ID NO: 2930307 - DNA, 25 bp, Homo sapien
ctgcggactcccatggcggctccgc

SEQ ID NO: 2930308 - DNA, 25 bp, Homo sapien
ccgcgccaccggagctcctttcggg

SEQ ID NO: 2930309 - DNA, 25 bp, Homo sapien
tcctttcgggcgcacgcttccctgg

SEQ ID NO: 2930310 - DNA, 25 bp, Homo sapien
gggcgcgtcagcaccgcgtctccag

SEQ ID NO: 2930311 - DNA, 25 bp, Homo sapien
tctccaggagcgcacggcgctcacg

SEQ ID NO: 2930312 - DNA, 25 bp, Homo sapien
aggaattaaaatgcagcgaggagga

SEQ ID NO: 2930313 - DNA, 25 bp, Homo sapien
agcaagaggcttcccgctcggtgtg

SEQ ID NO: 2930314 - DNA, 25 bp, Homo sapien
gaataatagccatagcgggcaggcc

SEQ ID NO: 2930315 - DNA, 25 bp, Homo sapien
cagaataatagccatagcgggcagg

SEQ ID NO: 2930316 - DNA, 25 bp, Homo sapien
aatctcagaataatagccatagcgg

SEQ ID NO: 2930317 - DNA, 25 bp, Homo sapien
tctcagaataatagccatagcgggc

SEQ ID NO: 2930318 - DNA, 25 bp, Homo sapien
gccaactcaatggctccatcagcac

SEQ ID NO: 2930319 - DNA, 25 bp, Homo sapien
ttgccaactcaatggctccatcagc

SEQ ID NO: 2930320 - DNA, 25 bp, Homo sapien
tttgccaactcaatggctccatcag

SEQ ID NO: 2930321 - DNA, 25 bp, Homo sapien
tgccaactcaatggctccatcagca

SEQ ID NO: 2930322 - DNA, 25 bp, Homo sapien
gaaagcatcattagtcttgcgcttg

SEQ ID NO: 2930323 - DNA, 25 bp, Homo sapien
gttttcaaagcgatgagtcaatcct

SEQ ID NO: 2930324 - DNA, 25 bp, Homo sapien
taactggcaggttcatcagccccaa

SEQ ID NO: 2930325 - DNA, 25 bp, Homo sapien
gcagcttgccttagttattcctcca

SEQ ID NO: 2930326 - DNA, 25 bp, Homo sapien
acctcagaaggaacacttccaccct

SEQ ID NO: 2930327 - DNA, 25 bp, Homo sapien
cctcagaaggaacacttccaccctc

SEQ ID NO: 2930328 - DNA, 25 bp, Homo sapien
cacctcagaaggaacacttccaccc

SEQ ID NO: 2930329 - DNA, 25 bp, Homo sapien
tcatggggattaaccaccaaggcaa

SEQ ID NO: 2930330 - DNA, 25 bp, Homo sapien
gaaggggatgatggaacagcatcat

SEQ ID NO: 2930331 - DNA, 25 bp, Homo sapien
tggaacagcatcatggggattaacc

SEQ ID NO: 2930332 - DNA, 25 bp, Homo sapien
cagcatcatggggattaaccaccaa

SEQ ID NO: 2930333 - DNA, 25 bp, Homo sapien
cctcagttggttctcaatgctctcc

SEQ ID NO: 2930334 - DNA, 25 bp, Homo sapien
ggcatcctttataccatttctcttt

SEQ ID NO: 2930335 - DNA, 25 bp, Homo sapien
ggtccacattgcagaagccacttct

SEQ ID NO: 2930336 - DNA, 25 bp, Homo sapien
acttctcgtcactctgcctcagttg

SEQ ID NO: 2930337 - DNA, 25 bp, Homo sapien
tcttgccttgtggaacaatatggcc

SEQ ID NO: 2930338 - DNA, 25 bp, Homo sapien
gcttgaggcttgcaagaaacttggt

SEQ ID NO: 2930339 - DNA, 25 bp, Homo sapien
cttggtccaggaggagtcaaacatc

SEQ ID NO: 2930340 - DNA, 25 bp, Homo sapien
caatcttctgggtcattcgtgtcat

SEQ ID NO: 2930341 - DNA, 25 bp, Homo sapien
tctcattatgagcattcacgtctct

SEQ ID NO: 2930342 - DNA, 25 bp, Homo sapien
tatgagcattcacgtctcttaaaat

SEQ ID NO: 2930343 - DNA, 25 bp, Homo sapien
acgtctcttaaaatggtcgtatgag

SEQ ID NO: 2930344 - DNA, 25 bp, Homo sapien
cttaaaatggtcgtatgagttccca

SEQ ID NO: 2930345 - DNA, 25 bp, Homo sapien
gaagtgggcatccggcacacctgca

SEQ ID NO: 2930346 - DNA, 25 bp, Homo sapien
aggaaggtagagggctgtccgtcag

SEQ ID NO: 2930347 - DNA, 25 bp, Homo sapien
gaggaaggtagagggctgtccgtca

SEQ ID NO: 2930348 - DNA, 25 bp, Homo sapien
ggagaagtgggcatccggcacacct

SEQ ID NO: 2930349 - DNA, 25 bp, Homo sapien
tttagacgttgccacagacccacga

SEQ ID NO: 2930350 - DNA, 25 bp, Homo sapien
tctcatcagtatgtggactctggat

SEQ ID NO: 2930351 - DNA, 25 bp, Homo sapien
ccacgaatggagtgggcagacccct

SEQ ID NO: 2930352 - DNA, 25 bp, Homo sapien
catttatagggtctggactgtttca

SEQ ID NO: 2930353 - DNA, 25 bp, Homo sapien
ctccacgtgggagaagatgatgctt

SEQ ID NO: 2930354 - DNA, 25 bp, Homo sapien
gattgaaacctatcgcactgagaag

SEQ ID NO: 2930355 - DNA, 25 bp, Homo sapien
ctgtaggaacctatagcctctatag

SEQ ID NO: 2930356 - DNA, 25 bp, Homo sapien
tatagtcaataacaggatgggtagg

SEQ ID NO: 2930357 - DNA, 25 bp, Homo sapien
tgtaacagcgctgactactgagatg

SEQ ID NO: 2930358 - DNA, 25 bp, Homo sapien
atgtagtgagaaggcaactgcaatg

SEQ ID NO: 2930359 - DNA, 25 bp, Homo sapien
gatagttggttttgtgtcacgggaa

SEQ ID NO: 2930360 - DNA, 25 bp, Homo sapien
caacttccggtgtctggcaaaagca

SEQ ID NO: 2930361 - DNA, 25 bp, Homo sapien
ccctggatacactgcttattaatat

SEQ ID NO: 2930362 - DNA, 25 bp, Homo sapien
catccctggatacactgcttattaa

SEQ ID NO: 2930363 - DNA, 25 bp, Homo sapien
ctggatacactgcttattaatatct

SEQ ID NO: 2930364 - DNA, 25 bp, Homo sapien
tcatccctggatacactgcttatta

SEQ ID NO: 2930365 - DNA, 25 bp, Homo sapien
ccactgcttaggcccttctgggttg

SEQ ID NO: 2930366 - DNA, 25 bp, Homo sapien
tctgggttggcaatgccagaaagca

SEQ ID NO: 2930367 - DNA, 25 bp, Homo sapien
ggcccttctgggttggcaatgccag

SEQ ID NO: 2930368 - DNA, 25 bp, Homo sapien
cactgcttaggcccttctgggttgg

SEQ ID NO: 2930369 - DNA, 25 bp, Homo sapien
ccaggtgcttgtgtgctgtggaacc

SEQ ID NO: 2930370 - DNA, 25 bp, Homo sapien
aacctgcagggccttaggcccagct

SEQ ID NO: 2930371 - DNA, 25 bp, Homo sapien
tgcagggccttaggcccagctgcac

SEQ ID NO: 2930372 - DNA, 25 bp, Homo sapien
tccaggtgcttgtgtgctgtggaac

SEQ ID NO: 2930373 - DNA, 25 bp, Homo sapien
tttaggagtaactggaagctagagg

SEQ ID NO: 2930374 - DNA, 25 bp, Homo sapien
cagctttaggagtaactggaagcta

SEQ ID NO: 2930375 - DNA, 25 bp, Homo sapien
agggtgggcctaacaagaatcccat

SEQ ID NO: 2930376 - DNA, 25 bp, Homo sapien
tcctgcagctttaggagtaactgga

SEQ ID NO: 2930377 - DNA, 25 bp, Homo sapien
cttgtctgaggatagagcccacttg

SEQ ID NO: 2930378 - DNA, 25 bp, Homo sapien
ccttcaggttgatggcattccagct

SEQ ID NO: 2930379 - DNA, 25 bp, Homo sapien
cacttgctaagaccaccttcaggtt

SEQ ID NO: 2930380 - DNA, 25 bp, Homo sapien
cagtccagatgtgtggctgtatcgg

SEQ ID NO: 2930381 - DNA, 25 bp, Homo sapien
aggggcaaagatgatgagagacgtt

SEQ ID NO: 2930382 - DNA, 25 bp, Homo sapien
gtcaaggtgaggggcaaagatgatg

SEQ ID NO: 2930383 - DNA, 25 bp, Homo sapien
tgaggggcaaagatgatgagagacg

SEQ ID NO: 2930384 - DNA, 25 bp, Homo sapien
aaggtgaggggcaaagatgatgaga

SEQ ID NO: 2930385 - DNA, 25 bp, Homo sapien
agggattgaagcaggaacggccact

SEQ ID NO: 2930386 - DNA, 25 bp, Homo sapien
cccaactcaataggaaacaggcacg

SEQ ID NO: 2930387 - DNA, 25 bp, Homo sapien
tcccagagagccatactgccagatg

SEQ ID NO: 2930388 - DNA, 25 bp, Homo sapien
aacaggcacgcaagatcaatctgag

SEQ ID NO: 2930389 - DNA, 25 bp, Homo sapien
ggacccagcctaggaaatgctccct

SEQ ID NO: 2930390 - DNA, 25 bp, Homo sapien
gctcttggatccctaaggctggtgg

SEQ ID NO: 2930391 - DNA, 25 bp, Homo sapien
gatgtgtacttagtggtgtctcccc

SEQ ID NO: 2930392 - DNA, 25 bp, Homo sapien
cattaggtgccattaggacccagcc

SEQ ID NO: 2930393 - DNA, 25 bp, Homo sapien
ttccagcagcaatagccccaggaca

SEQ ID NO: 2930394 - DNA, 25 bp, Homo sapien
tccttgattccttcttgcaaggggg

SEQ ID NO: 2930395 - DNA, 25 bp, Homo sapien
ggtgggacagtagtattgctttgat

SEQ ID NO: 2930396 - DNA, 25 bp, Homo sapien
ttgattccttcttgcaaggggggtg

SEQ ID NO: 2930397 - DNA, 25 bp, Homo sapien
gatgatttatcggtgtgcttgccga

SEQ ID NO: 2930398 - DNA, 25 bp, Homo sapien
tatctcagcatagagtctgtgggcc

SEQ ID NO: 2930399 - DNA, 25 bp, Homo sapien
taaggccaagctgcggctgtctctg

SEQ ID NO: 2930400 - DNA, 25 bp, Homo sapien
cccaggatgaaaccacagagcgatg

SEQ ID NO: 2930401 - DNA, 25 bp, Homo sapien
tagttcctagcagcacggtcataaa

SEQ ID NO: 2930402 - DNA, 25 bp, Homo sapien
gcacggtcataaaagtccttaaatg

SEQ ID NO: 2930403 - DNA, 25 bp, Homo sapien
tctattgtaatggtatgggatccca

SEQ ID NO: 2930404 - DNA, 25 bp, Homo sapien
gaaaaagatccgtaattcttggtca

SEQ ID NO: 2930405 - DNA, 25 bp, Homo sapien
ccttcgcccgcacttccattggctt

SEQ ID NO: 2930406 - DNA, 25 bp, Homo sapien
tccttcgcccgcacttccattggct

SEQ ID NO: 2930407 - DNA, 25 bp, Homo sapien
agtctctccttcgcccgcacttcca

SEQ ID NO: 2930408 - DNA, 25 bp, Homo sapien
ctccttcgcccgcacttccattggc

SEQ ID NO: 2930409 - DNA, 25 bp, Homo sapien
gctcaaaatgcagcagtttttccat

SEQ ID NO: 2930410 - DNA, 25 bp, Homo sapien
ctgctcaaaatgcagcagtttttcc

SEQ ID NO: 2930411 - DNA, 25 bp, Homo sapien
tgctcaaaatgcagcagtttttcca

SEQ ID NO: 2930412 - DNA, 25 bp, Homo sapien
tctcttcgaagtttttgcttttcca

SEQ ID NO: 2930413 - DNA, 25 bp, Homo sapien
tttgcttttccaaagtagtccaaca

SEQ ID NO: 2930414 - DNA, 25 bp, Homo sapien
ttgcttttccaaagtagtccaacat

SEQ ID NO: 2930415 - DNA, 25 bp, Homo sapien
agctatcccataggccaggcagcgg

SEQ ID NO: 2930416 - DNA, 25 bp, Homo sapien
cccctagccctggctgaaccacact

SEQ ID NO: 2930417 - DNA, 25 bp, Homo sapien
cagagggccccctagccctggctga

SEQ ID NO: 2930418 - DNA, 25 bp, Homo sapien
ctggctttgctcagctatcccatag

SEQ ID NO: 2930419 - DNA, 25 bp, Homo sapien
ctagggtggcttgatcagagtgagg

SEQ ID NO: 2930420 - DNA, 25 bp, Homo sapien
gaatgacgtccccagcacctgactg

SEQ ID NO: 2930421 - DNA, 25 bp, Homo sapien
tagtaagaattaaccccatcaggat

SEQ ID NO: 2930422 - DNA, 25 bp, Homo sapien
cagagtgagggagacatgactagta

SEQ ID NO: 2930423 - DNA, 25 bp, Homo sapien
taagatgagacacatcaccacacgg

SEQ ID NO: 2930424 - DNA, 25 bp, Homo sapien
tctcatcggcaagaagttgaagctg

SEQ ID NO: 2930425 - DNA, 25 bp, Homo sapien
gattctgcatgctcaaggttgtctg

SEQ ID NO: 2930426 - DNA, 25 bp, Homo sapien
gggtcccgagcaatcagaaatgatt

SEQ ID NO: 2930427 - DNA, 25 bp, Homo sapien
ctaaaaacgctttgaaggctgcata

SEQ ID NO: 2930428 - DNA, 25 bp, Homo sapien
cttgccaggatctaaaaacgctttg

SEQ ID NO: 2930429 - DNA, 25 bp, Homo sapien
ccaggatctaaaaacgctttgaagg

SEQ ID NO: 2930430 - DNA, 25 bp, Homo sapien
tttccttgccaggatctaaaaacgc

SEQ ID NO: 2930431 - DNA, 25 bp, Homo sapien
gcagaggccttgcaaaccctacgca

SEQ ID NO: 2930432 - DNA, 25 bp, Homo sapien
catcatatgcagaggccttgcaaac

SEQ ID NO: 2930433 - DNA, 25 bp, Homo sapien
gatgaagagcaacatcatatgcaga

SEQ ID NO: 2930434 - DNA, 25 bp, Homo sapien
tgggaggatgaagagcaacatcata

SEQ ID NO: 2930435 - DNA, 25 bp, Homo sapien
cacatgtccacagatttatcagcca

SEQ ID NO: 2930436 - DNA, 25 bp, Homo sapien
cgttcgccccagtggtaaaatgagt

SEQ ID NO: 2930437 - DNA, 25 bp, Homo sapien
tagatgtttgttggctcccctgcag

SEQ ID NO: 2930438 - DNA, 25 bp, Homo sapien
caatggcctgagtttccgttgagcc

SEQ ID NO: 2930439 - DNA, 25 bp, Homo sapien
tttagtgagaaccagtcacctggcc

SEQ ID NO: 2930440 - DNA, 25 bp, Homo sapien
cctgtgccagctacacgtatataat

SEQ ID NO: 2930441 - DNA, 25 bp, Homo sapien
gagctgggagtgaggtcctgtgcta

SEQ ID NO: 2930442 - DNA, 25 bp, Homo sapien
tgaggtcctgtgctagcaaggtcct

SEQ ID NO: 2930443 - DNA, 25 bp, Homo sapien
tccagtgggttggaggtcactctag

SEQ ID NO: 2930444 - DNA, 25 bp, Homo sapien
ccataggtccaatggcagagagcag

SEQ ID NO: 2930445 - DNA, 25 bp, Homo sapien
gagattaggactgtcagtctctgag

SEQ ID NO: 2930446 - DNA, 25 bp, Homo sapien
tcactctaggcttctgcaggatggg

SEQ ID NO: 2930447 - DNA, 25 bp, Homo sapien
tccctaggtttagccgccccatgag

SEQ ID NO: 2930448 - DNA, 25 bp, Homo sapien
gggaggtgataaagcccattgtcac

SEQ ID NO: 2930449 - DNA, 25 bp, Homo sapien
aatttccactgtgctcggataagga

SEQ ID NO: 2930450 - DNA, 25 bp, Homo sapien
gctcaaggctgtctcagcgtcccta

SEQ ID NO: 2930451 - DNA, 25 bp, Homo sapien
ctgggaaaccagtgtccacattgct

SEQ ID NO: 2930452 - DNA, 25 bp, Homo sapien
tgctgtgggatcacattgcaggaat

SEQ ID NO: 2930453 - DNA, 25 bp, Homo sapien
gggaaaccagtgtccacattgctgt

SEQ ID NO: 2930454 - DNA, 25 bp, Homo sapien
cattgcaggaatgggcggctgtcat

SEQ ID NO: 2930455 - DNA, 25 bp, Homo sapien
gagtgggcctaacattctcatttct

SEQ ID NO: 2930456 - DNA, 25 bp, Homo sapien
cttttcgtcataacgatgctccctt

SEQ ID NO: 2930457 - DNA, 25 bp, Homo sapien
taatgagtgggcctaacattctcat

SEQ ID NO: 2930458 - DNA, 25 bp, Homo sapien
atgagaatctcccttttcgtcataa

SEQ ID NO: 2930459 - DNA, 25 bp, Homo sapien
tgatgcagcaatgacatccatcggt

SEQ ID NO: 2930460 - DNA, 25 bp, Homo sapien
gacatccatcggtcctagacagtga

SEQ ID NO: 2930461 - DNA, 25 bp, Homo sapien
cctccaggacaggtagcatgtcacg

SEQ ID NO: 2930462 - DNA, 25 bp, Homo sapien
tgtcacgtcctacactgatgcagca

SEQ ID NO: 2930463 - DNA, 25 bp, Homo sapien
tagtgaaaaatgctccagtggtggg

SEQ ID NO: 2930464 - DNA, 25 bp, Homo sapien
tgaggaagcgtggatttaattcccg

SEQ ID NO: 2930465 - DNA, 25 bp, Homo sapien
tcccggtttatcctgtgagcagtca

SEQ ID NO: 2930466 - DNA, 25 bp, Homo sapien
aggaggtagagctatacatttttac

SEQ ID NO: 2930467 - DNA, 25 bp, Homo sapien
gcctggatctctgaaccagttctgg

SEQ ID NO: 2930468 - DNA, 25 bp, Homo sapien
gtaaggcagatgaagtgtccacttt

SEQ ID NO: 2930469 - DNA, 25 bp, Homo sapien
tgtccactttacctctaaggactgt

SEQ ID NO: 2930470 - DNA, 25 bp, Homo sapien
gatgaggacgtgcatgggcactggt

SEQ ID NO: 2930471 - DNA, 25 bp, Homo sapien
ggtttcaccttcaagctgttaccta

SEQ ID NO: 2930472 - DNA, 25 bp, Homo sapien
gaaacctcagtgctggtttcacctt

SEQ ID NO: 2930473 - DNA, 25 bp, Homo sapien
gtctgcgctccacccaggaatcagg

SEQ ID NO: 2930474 - DNA, 25 bp, Homo sapien
gtgctacacacaggacagcgtccag

SEQ ID NO: 2930475 - DNA, 25 bp, Homo sapien
tgatcccagccaggaagggtgctcc

SEQ ID NO: 2930476 - DNA, 25 bp, Homo sapien
ctgatcccagccaggaagggtgctc

SEQ ID NO: 2930477 - DNA, 25 bp, Homo sapien
ctgcaggctgatcccagccaggaag

SEQ ID NO: 2930478 - DNA, 25 bp, Homo sapien
tcccagccaggaagggtgctcccag

SEQ ID NO: 2930479 - DNA, 25 bp, Homo sapien
cttattatcacggcattgaccacag

SEQ ID NO: 2930480 - DNA, 25 bp, Homo sapien
caactcttccagtgaagcacagata

SEQ ID NO: 2930481 - DNA, 25 bp, Homo sapien
gaagcacagatatacttgagctgca

SEQ ID NO: 2930482 - DNA, 25 bp, Homo sapien
tgaagcacagatatacttgagctgc

SEQ ID NO: 2930483 - DNA, 25 bp, Homo sapien
ctttcaactcttccagtgaagcaca

SEQ ID NO: 2930484 - DNA, 25 bp, Homo sapien
tcaatagaggtcacaagtggcctcc

SEQ ID NO: 2930485 - DNA, 25 bp, Homo sapien
ggttccatatcaactcctgagtgag

SEQ ID NO: 2930486 - DNA, 25 bp, Homo sapien
gggcaaagtcgaaacaccagatctt

SEQ ID NO: 2930487 - DNA, 25 bp, Homo sapien
tctgggcactgagccaataggagtg

SEQ ID NO: 2930488 - DNA, 25 bp, Homo sapien
ctgggcctggtgtcataagatttga

SEQ ID NO: 2930489 - DNA, 25 bp, Homo sapien
ctcagccttgattcaggtaagcggc

SEQ ID NO: 2930490 - DNA, 25 bp, Homo sapien
tgggcctggtgtcataagatttgat

SEQ ID NO: 2930491 - DNA, 25 bp, Homo sapien
aaaatatgataggcagatggttgtg

SEQ ID NO: 2930492 - DNA, 25 bp, Homo sapien
tagtcaactccaaaatatgataggc

SEQ ID NO: 2930493 - DNA, 25 bp, Homo sapien
atagtcaactccaaaatatgatagg

SEQ ID NO: 2930494 - DNA, 25 bp, Homo sapien
catagtcaactccaaaatatgatag

SEQ ID NO: 2930495 - DNA, 25 bp, Homo sapien
gccactggaaaggttctcttctctc

SEQ ID NO: 2930496 - DNA, 25 bp, Homo sapien
tcacacctcaagcaccaggaacaca

SEQ ID NO: 2930497 - DNA, 25 bp, Homo sapien
ctgccactggaaaggttctcttctc

SEQ ID NO: 2930498 - DNA, 25 bp, Homo sapien
agcaccaggaacacaccactggctg

SEQ ID NO: 2930499 - DNA, 25 bp, Homo sapien
tggtcaacttactaccctgtgggta

SEQ ID NO: 2930500 - DNA, 25 bp, Homo sapien
tgccacctgtatttgtgatgctggg

SEQ ID NO: 2930501 - DNA, 25 bp, Homo sapien
tgtgggtaccaaccctggagttcag

SEQ ID NO: 2930502 - DNA, 25 bp, Homo sapien
gtctgagttctccatgccagtttgg

SEQ ID NO: 2930503 - DNA, 25 bp, Homo sapien
tccttccagtaacagccttgggtgg

SEQ ID NO: 2930504 - DNA, 25 bp, Homo sapien
cacttccggatcactcagggtgttg

SEQ ID NO: 2930505 - DNA, 25 bp, Homo sapien
gcacttaggtcgttttcaacttcca

SEQ ID NO: 2930506 - DNA, 25 bp, Homo sapien
tcatagtgctgaagtcaatctgtca

SEQ ID NO: 2930507 - DNA, 25 bp, Homo sapien
cctggccaatatggtgaaaccccgt

SEQ ID NO: 2930508 - DNA, 25 bp, Homo sapien
atcacgaggtcaagatttcaggacc

SEQ ID NO: 2930509 - DNA, 25 bp, Homo sapien
tggccaatatggtgaaaccccgtct

SEQ ID NO: 2930510 - DNA, 25 bp, Homo sapien
cacgaggtcaagatttcaggaccat

SEQ ID NO: 2930511 - DNA, 25 bp, Homo sapien
tgcaggtaccacttccctgcaggtc

SEQ ID NO: 2930512 - DNA, 25 bp, Homo sapien
taccacttccctgcaggtcaggcag

SEQ ID NO: 2930513 - DNA, 25 bp, Homo sapien
ggtaccacttccctgcaggtcaggc

SEQ ID NO: 2930514 - DNA, 25 bp, Homo sapien
cacttccctgcaggtcaggcagctg

SEQ ID NO: 2930515 - DNA, 25 bp, Homo sapien
tgtagaccaggttctagcctagagc

SEQ ID NO: 2930516 - DNA, 25 bp, Homo sapien
tcaggagatgtaggcagcattttgc

SEQ ID NO: 2930517 - DNA, 25 bp, Homo sapien
agcctagagccttttatggaagatc

SEQ ID NO: 2930518 - DNA, 25 bp, Homo sapien
tgcttttggacatgccagggtgtat

SEQ ID NO: 2930519 - DNA, 25 bp, Homo sapien
actgttgcctatccatgctcccagg

SEQ ID NO: 2930520 - DNA, 25 bp, Homo sapien
ggggctctgtaatgaatccaaactg

SEQ ID NO: 2930521 - DNA, 25 bp, Homo sapien
ttgggggctctgtaatgaatccaaa

SEQ ID NO: 2930522 - DNA, 25 bp, Homo sapien
ccaaactgttgcctatccatgctcc

SEQ ID NO: 2930523 - DNA, 25 bp, Homo sapien
aagttttgcagccacaaattcagag

SEQ ID NO: 2930524 - DNA, 25 bp, Homo sapien
gaagttttgcagccacaaattcaga

SEQ ID NO: 2930525 - DNA, 25 bp, Homo sapien
agagaaaagggacatttcagcaggt

SEQ ID NO: 2930526 - DNA, 25 bp, Homo sapien
aagggacatttcagcaggttgaaca

SEQ ID NO: 2930527 - DNA, 25 bp, Homo sapien
acatcacagaccaacacgggttgga

SEQ ID NO: 2930528 - DNA, 25 bp, Homo sapien
catcacagaccaacacgggttggaa

SEQ ID NO: 2930529 - DNA, 25 bp, Homo sapien
ctgtaggcagtcatccctggaggtc

SEQ ID NO: 2930530 - DNA, 25 bp, Homo sapien
tggaggtcaagtggttcagtgaaac

SEQ ID NO: 2930531 - DNA, 25 bp, Homo sapien
cattcccattgcctgcacagaaggc

SEQ ID NO: 2930532 - DNA, 25 bp, Homo sapien
gcagctgctccaaactgagactgta

SEQ ID NO: 2930533 - DNA, 25 bp, Homo sapien
aaaggtgagagtcttgagagatgca

SEQ ID NO: 2930534 - DNA, 25 bp, Homo sapien
gaaaggtgagagtcttgagagatgc

SEQ ID NO: 2930535 - DNA, 25 bp, Homo sapien
aaggtgagagtcttgagagatgcag

SEQ ID NO: 2930536 - DNA, 25 bp, Homo sapien
cttgaggtgcagaattggcaatggg

SEQ ID NO: 2930537 - DNA, 25 bp, Homo sapien
agggacttgaggtgcagaattggca

SEQ ID NO: 2930538 - DNA, 25 bp, Homo sapien
ggacttgaggtgcagaattggcaat

SEQ ID NO: 2930539 - DNA, 25 bp, Homo sapien
gacttgaggtgcagaattggcaatg

SEQ ID NO: 2930540 - DNA, 25 bp, Homo sapien
cagaagaaagtcgcagatgtgggcc

SEQ ID NO: 2930541 - DNA, 25 bp, Homo sapien
tcagaagaaagtcgcagatgtgggc

SEQ ID NO: 2930542 - DNA, 25 bp, Homo sapien
agaagaaagtcgcagatgtgggcca

SEQ ID NO: 2930543 - DNA, 25 bp, Homo sapien
cttcttttggtgtctccagtagccc

SEQ ID NO: 2930544 - DNA, 25 bp, Homo sapien
ggtctctgtgtggcggctcttcttt

SEQ ID NO: 2930545 - DNA, 25 bp, Homo sapien
tctctgtgtggcggctcttcttttg

SEQ ID NO: 2930546 - DNA, 25 bp, Homo sapien
tgggtctctgtgtggcggctcttct

SEQ ID NO: 2930547 - DNA, 25 bp, Homo sapien
agctaggggtcccataagttgtgct

SEQ ID NO: 2930548 - DNA, 25 bp, Homo sapien
taggggtcccataagttgtgcttta

SEQ ID NO: 2930549 - DNA, 25 bp, Homo sapien
taagagagagctaggggtcccataa

SEQ ID NO: 2930550 - DNA, 25 bp, Homo sapien
ctggtaagagagagctaggggtccc

SEQ ID NO: 2930551 - DNA, 25 bp, Homo sapien
ggagaggagagtgttgtagaaacaa

SEQ ID NO: 2930552 - DNA, 25 bp, Homo sapien
aggagagtgttgtagaaacaagata

SEQ ID NO: 2930553 - DNA, 25 bp, Homo sapien
ccatccacagaagagtaggatcaat

SEQ ID NO: 2930554 - DNA, 25 bp, Homo sapien
accatccacagaagagtaggatcaa

SEQ ID NO: 2930555 - DNA, 25 bp, Homo sapien
tccatggggcatccgagcatccatt

SEQ ID NO: 2930556 - DNA, 25 bp, Homo sapien
agcccacttccatggggcatccgag

SEQ ID NO: 2930557 - DNA, 25 bp, Homo sapien
ccacttccatggggcatccgagcat

SEQ ID NO: 2930558 - DNA, 25 bp, Homo sapien
cttccatggggcatccgagcatcca

SEQ ID NO: 2930559 - DNA, 25 bp, Homo sapien
gggaatcagcatcagtaccaaatgt

SEQ ID NO: 2930560 - DNA, 25 bp, Homo sapien
caacaggaactggaaaaatacgtag

SEQ ID NO: 2930561 - DNA, 25 bp, Homo sapien
aatacgtagaatctcattttcatca

SEQ ID NO: 2930562 - DNA, 25 bp, Homo sapien
accaaatgtttatctcggccaggcc

SEQ ID NO: 2930563 - DNA, 25 bp, Homo sapien
caacccggttctctcctaggtggtg

SEQ ID NO: 2930564 - DNA, 25 bp, Homo sapien
tcctaggtggtgctgcttcaccttc

SEQ ID NO: 2930565 - DNA, 25 bp, Homo sapien
tcctgccagagctccagaggaagct

SEQ ID NO: 2930566 - DNA, 25 bp, Homo sapien
aggaagctgtgctcttgcaccccaa

SEQ ID NO: 2930567 - DNA, 25 bp, Homo sapien
gcccatctgcaacctttttctctcc

SEQ ID NO: 2930568 - DNA, 25 bp, Homo sapien
ctctgcccatctgcaacctttttct

SEQ ID NO: 2930569 - DNA, 25 bp, Homo sapien
tctctcctcacatattcatccccaa

SEQ ID NO: 2930570 - DNA, 25 bp, Homo sapien
tcctcacatattcatccccaaccat

SEQ ID NO: 2930571 - DNA, 25 bp, Homo sapien
tcaagttccactgtcaccatcacag

SEQ ID NO: 2930572 - DNA, 25 bp, Homo sapien
catcacagttagttttgactgctgc

SEQ ID NO: 2930573 - DNA, 25 bp, Homo sapien
ttatgctccatcaagttccactgtc

SEQ ID NO: 2930574 - DNA, 25 bp, Homo sapien
actgtcaccatcacagttagttttg

SEQ ID NO: 2930575 - DNA, 25 bp, Homo sapien
gcagacatcggcttggtggtaatgg

SEQ ID NO: 2930576 - DNA, 25 bp, Homo sapien
agaggcagacatcggcttggtggta

SEQ ID NO: 2930577 - DNA, 25 bp, Homo sapien
agacatcggcttggtggtaatggga

SEQ ID NO: 2930578 - DNA, 25 bp, Homo sapien
aggcagacatcggcttggtggtaat

SEQ ID NO: 2930579 - DNA, 25 bp, Homo sapien
ggcagacattggcttggtgccagct

SEQ ID NO: 2930580 - DNA, 25 bp, Homo sapien
cagacattggcttggtgccagctta

SEQ ID NO: 2930581 - DNA, 25 bp, Homo sapien
gcagacattggcttggtgccagctt

SEQ ID NO: 2930582 - DNA, 25 bp, Homo sapien
agacattggcttggtgccagcttac

SEQ ID NO: 2930583 - DNA, 25 bp, Homo sapien
tctcaaagcctggtaagcaagcaag

SEQ ID NO: 2930584 - DNA, 25 bp, Homo sapien
gcggaaggcccacgagtaaggtcat

SEQ ID NO: 2930585 - DNA, 25 bp, Homo sapien
tgagtgcatcccctcacaaggtagc

SEQ ID NO: 2930586 - DNA, 25 bp, Homo sapien
tgagaagggccacattgacacacag

SEQ ID NO: 2930587 - DNA, 25 bp, Homo sapien
ccaaatgcattactgttactacaac

SEQ ID NO: 2930588 - DNA, 25 bp, Homo sapien
ggagcagtattcaagggccaccttc

SEQ ID NO: 2930589 - DNA, 25 bp, Homo sapien
gtctcacagctgacttcagatgctt

SEQ ID NO: 2930590 - DNA, 25 bp, Homo sapien
cagatgctttaattctatgtggagc

SEQ ID NO: 2930591 - DNA, 25 bp, Homo sapien
cccaagatatctacgaattcagaac

SEQ ID NO: 2930592 - DNA, 25 bp, Homo sapien
aaggcacccaagatatctacgaatt

SEQ ID NO: 2930593 - DNA, 25 bp, Homo sapien
gcacccaagatatctacgaattcag

SEQ ID NO: 2930594 - DNA, 25 bp, Homo sapien
agatatctacgaattcagaacacca

SEQ ID NO: 2930595 - DNA, 25 bp, Homo sapien
gctcctgggctgtagtttaatctga

SEQ ID NO: 2930596 - DNA, 25 bp, Homo sapien
gagaatgtacttctggagtttccaa

SEQ ID NO: 2930597 - DNA, 25 bp, Homo sapien
aagcctttatcttccttaccgctgg

SEQ ID NO: 2930598 - DNA, 25 bp, Homo sapien
ttaccgctggtgaattggagaacac

SEQ ID NO: 2930599 - DNA, 25 bp, Homo sapien
aagtcaaaatcacagtccagaaaca

SEQ ID NO: 2930600 - DNA, 25 bp, Homo sapien
ctaccatctgcagaggttcctgggc

SEQ ID NO: 2930601 - DNA, 25 bp, Homo sapien
tgcagaggttcctgggcaaagtcaa

SEQ ID NO: 2930602 - DNA, 25 bp, Homo sapien
gaggttcctgggcaaagtcaaaatc

SEQ ID NO: 2930603 - DNA, 25 bp, Homo sapien
cttcctcaagagcaattggcaaagg

SEQ ID NO: 2930604 - DNA, 25 bp, Homo sapien
ggcattgctgacatagcagcccttc

SEQ ID NO: 2930605 - DNA, 25 bp, Homo sapien
attggcaaaggatgccgtcaccctg

SEQ ID NO: 2930606 - DNA, 25 bp, Homo sapien
acatagcagcccttcctcaagagca

SEQ ID NO: 2930607 - DNA, 25 bp, Homo sapien
gctgcaggaatttaggcttacactt

SEQ ID NO: 2930608 - DNA, 25 bp, Homo sapien
tcagtcatgccgggaagtagcctgt

SEQ ID NO: 2930609 - DNA, 25 bp, Homo sapien
cttacacttccagctgaatgtcctt

SEQ ID NO: 2930610 - DNA, 25 bp, Homo sapien
cccatggaggaagcttgatatgtga

SEQ ID NO: 2930611 - DNA, 25 bp, Homo sapien
gctaataaagcccataggttcccat

SEQ ID NO: 2930612 - DNA, 25 bp, Homo sapien
cagacaggctaataaagcccatagg

SEQ ID NO: 2930613 - DNA, 25 bp, Homo sapien
tcccaacagacaggctaataaagcc

SEQ ID NO: 2930614 - DNA, 25 bp, Homo sapien
acgcaaatcccaacagacaggctaa

SEQ ID NO: 2930615 - DNA, 25 bp, Homo sapien
ttcacctccgcattttggaacatta

SEQ ID NO: 2930616 - DNA, 25 bp, Homo sapien
ttcatcttcacctccgcattttgga

SEQ ID NO: 2930617 - DNA, 25 bp, Homo sapien
tcttcacctccgcattttggaacat

SEQ ID NO: 2930618 - DNA, 25 bp, Homo sapien
tcatcttcacctccgcattttggaa

SEQ ID NO: 2930619 - DNA, 25 bp, Homo sapien
agttcatctccgcattcacatccca

SEQ ID NO: 2930620 - DNA, 25 bp, Homo sapien
attcacatcccattccaagagccat

SEQ ID NO: 2930621 - DNA, 25 bp, Homo sapien
tccagtttacgtgctctcacatcat

SEQ ID NO: 2930622 - DNA, 25 bp, Homo sapien
tcatcttcacatttcactccaagtt

SEQ ID NO: 2930623 - DNA, 25 bp, Homo sapien
catgcacttgcaaggaataatgata

SEQ ID NO: 2930624 - DNA, 25 bp, Homo sapien
aaactcctgacagtgtgccatgcac

SEQ ID NO: 2930625 - DNA, 25 bp, Homo sapien
ctcttcaagattgtttctgggcctt

SEQ ID NO: 2930626 - DNA, 25 bp, Homo sapien
gacagtgtgccatgcacttgcaagg

SEQ ID NO: 2930627 - DNA, 25 bp, Homo sapien
caaaatagcattggcattcattgta

SEQ ID NO: 2930628 - DNA, 25 bp, Homo sapien
caattataaccaaatgtgtaactca

SEQ ID NO: 2930629 - DNA, 25 bp, Homo sapien
ccaaatgtgtaactcatcagagtca

SEQ ID NO: 2930630 - DNA, 25 bp, Homo sapien
tgataatgtcacacatcaaaatagc

SEQ ID NO: 2930631 - DNA, 25 bp, Homo sapien
caacagtcgattttatgataaagcc

SEQ ID NO: 2930632 - DNA, 25 bp, Homo sapien
tatgataaagcccataattagggcc

SEQ ID NO: 2930633 - DNA, 25 bp, Homo sapien
tgataaagcccataattagggccat

SEQ ID NO: 2930634 - DNA, 25 bp, Homo sapien
ttggatgccggcaacagtcgatttt

SEQ ID NO: 2930635 - DNA, 25 bp, Homo sapien
caagctaagattattcagtccaagt

SEQ ID NO: 2930636 - DNA, 25 bp, Homo sapien
tggtccctttcatccgatcccttgt

SEQ ID NO: 2930637 - DNA, 25 bp, Homo sapien
gagtacagcctgaacggaatggtcc

SEQ ID NO: 2930638 - DNA, 25 bp, Homo sapien
gtgaagcagcgcaggcctgagtcac

SEQ ID NO: 2930639 - DNA, 25 bp, Homo sapien
ttgatgatggatagatgctgggccc

SEQ ID NO: 2930640 - DNA, 25 bp, Homo sapien
tgatgatggatagatgctgggcccc

SEQ ID NO: 2930641 - DNA, 25 bp, Homo sapien
gatgatggatagatgctgggcccca

SEQ ID NO: 2930642 - DNA, 25 bp, Homo sapien
gcagtgcttgtgttggtactgcatt

SEQ ID NO: 2930643 - DNA, 25 bp, Homo sapien
tgtgtgggtgagactgtacatgact

SEQ ID NO: 2930644 - DNA, 25 bp, Homo sapien
tagctttttaactgtctatgacggg

SEQ ID NO: 2930645 - DNA, 25 bp, Homo sapien
ttagggtgaactcctctatcaggga

SEQ ID NO: 2930646 - DNA, 25 bp, Homo sapien
tgttgaggttgactggctgaattgg

SEQ ID NO: 2930647 - DNA, 25 bp, Homo sapien
gagcggaaaggggtctaggtgttga

SEQ ID NO: 2930648 - DNA, 25 bp, Homo sapien
tgagcctagacttctcacttccttt

SEQ ID NO: 2930649 - DNA, 25 bp, Homo sapien
gagcctagacttctcacttcctttt

SEQ ID NO: 2930650 - DNA, 25 bp, Homo sapien
taggtgacctaaggacgaggcagaa

SEQ ID NO: 2930651 - DNA, 25 bp, Homo sapien
tgacctaaggacgaggcagaaacag

SEQ ID NO: 2930652 - DNA, 25 bp, Homo sapien
tctgggtaggtgacctaaggacgag

SEQ ID NO: 2930653 - DNA, 25 bp, Homo sapien
acctaaggacgaggcagaaacaggg

SEQ ID NO: 2930654 - DNA, 25 bp, Homo sapien
tcccatgatccagtcctctgggaaa

SEQ ID NO: 2930655 - DNA, 25 bp, Homo sapien
tgacagctggccctggcagcagcat

SEQ ID NO: 2930656 - DNA, 25 bp, Homo sapien
ctcggtgctgacagctggccctggc

SEQ ID NO: 2930657 - DNA, 25 bp, Homo sapien
tcggtgctgacagctggccctggca

SEQ ID NO: 2930658 - DNA, 25 bp, Homo sapien
gtgctgacagctggccctggcagca

SEQ ID NO: 2930659 - DNA, 25 bp, Homo sapien
gtccaccccacggttcagcttcact

SEQ ID NO: 2930660 - DNA, 25 bp, Homo sapien
gggtccaccccacggttcagcttca

SEQ ID NO: 2930661 - DNA, 25 bp, Homo sapien
caccccacggttcagcttcactacc

SEQ ID NO: 2930662 - DNA, 25 bp, Homo sapien
cacggttcagcttcactacccccat

SEQ ID NO: 2930663 - DNA, 25 bp, Homo sapien
gacaaagatgtgtcatcgctgtcca

SEQ ID NO: 2930664 - DNA, 25 bp, Homo sapien
aggacaaagatgtgtcatcgctgtc

SEQ ID NO: 2930665 - DNA, 25 bp, Homo sapien
ctgtccaccacagtgctgaagtgga

SEQ ID NO: 2930666 - DNA, 25 bp, Homo sapien
aaggacaaagatgtgtcatcgctgt

SEQ ID NO: 2930667 - DNA, 25 bp, Homo sapien
tctctaagaatacagcgggcacaga

SEQ ID NO: 2930668 - DNA, 25 bp, Homo sapien
atacagcgggcacagaatttctcaa

SEQ ID NO: 2930669 - DNA, 25 bp, Homo sapien
tactgcccactcaacgtgaccatgg

SEQ ID NO: 2930670 - DNA, 25 bp, Homo sapien
accatggggtccgtgtctctaagaa

SEQ ID NO: 2930671 - DNA, 25 bp, Homo sapien
gccaggtcatcaggactgaatgcac

SEQ ID NO: 2930672 - DNA, 25 bp, Homo sapien
aggtcatcaggactgaatgcactgt

SEQ ID NO: 2930673 - DNA, 25 bp, Homo sapien
tgccaggtcatcaggactgaatgca

SEQ ID NO: 2930674 - DNA, 25 bp, Homo sapien
ccaggtcatcaggactgaatgcact

SEQ ID NO: 2930675 - DNA, 25 bp, Homo sapien
tttgttctgtacaccagaagcaggg

SEQ ID NO: 2930676 - DNA, 25 bp, Homo sapien
agtgatttctgggttaccattggcc

SEQ ID NO: 2930677 - DNA, 25 bp, Homo sapien
ggactcaatggtcatttgaatgcta

SEQ ID NO: 2930678 - DNA, 25 bp, Homo sapien
gaatgctatggtccagtgatttctg

SEQ ID NO: 2930679 - DNA, 25 bp, Homo sapien
tgtaccagaagcctacttctggcag

SEQ ID NO: 2930680 - DNA, 25 bp, Homo sapien
ctgctttgtaccagaagcctacttc

SEQ ID NO: 2930681 - DNA, 25 bp, Homo sapien
tctgctttgtaccagaagcctactt

SEQ ID NO: 2930682 - DNA, 25 bp, Homo sapien
ccagaagcctacttctggcagtttg

SEQ ID NO: 2930683 - DNA, 25 bp, Homo sapien
tcagttggtgtttggcaggcccaca

SEQ ID NO: 2930684 - DNA, 25 bp, Homo sapien
cacagaactggacttgttcatgggc

SEQ ID NO: 2930685 - DNA, 25 bp, Homo sapien
ggcccacagaactggacttgttcat

SEQ ID NO: 2930686 - DNA, 25 bp, Homo sapien
ctggacttgttcatgggcttgcatt

SEQ ID NO: 2930687 - DNA, 25 bp, Homo sapien
ccactgtgtgccctttgagtggtgt

SEQ ID NO: 2930688 - DNA, 25 bp, Homo sapien
atttctgctggaggactgcgtgcca

SEQ ID NO: 2930689 - DNA, 25 bp, Homo sapien
gagtggtgtgcgcattgcacacgca

SEQ ID NO: 2930690 - DNA, 25 bp, Homo sapien
tcatttctgctggaggactgcgtgc

SEQ ID NO: 2930691 - DNA, 25 bp, Homo sapien
gataatgatgccctcctcctggagt

SEQ ID NO: 2930692 - DNA, 25 bp, Homo sapien
tggctgcagattggatgagctcaca

SEQ ID NO: 2930693 - DNA, 25 bp, Homo sapien
ccttgggccacctgatggagtgaga

SEQ ID NO: 2930694 - DNA, 25 bp, Homo sapien
gagctcacatgcgtacttcaccggg

SEQ ID NO: 2930695 - DNA, 25 bp, Homo sapien
tccagtctgctcacagggtgcagga

SEQ ID NO: 2930696 - DNA, 25 bp, Homo sapien
gcccatgagtcatagacagcactga

SEQ ID NO: 2930697 - DNA, 25 bp, Homo sapien
tgtaacagggcaggccttctctgtc

SEQ ID NO: 2930698 - DNA, 25 bp, Homo sapien
tttcagggccaacaagaccgctggc

SEQ ID NO: 2930699 - DNA, 25 bp, Homo sapien
catggatcaatcattggatgtgaac

SEQ ID NO: 2930700 - DNA, 25 bp, Homo sapien
tcagagttgttccagactggggaaa

SEQ ID NO: 2930701 - DNA, 25 bp, Homo sapien
tggatcaatcattggatgtgaacca

SEQ ID NO: 2930702 - DNA, 25 bp, Homo sapien
gatcaatcattggatgtgaaccacc

SEQ ID NO: 2930703 - DNA, 25 bp, Homo sapien
ctatattcagactgcctatagcagt

SEQ ID NO: 2930704 - DNA, 25 bp, Homo sapien
ttcagactgcctatagcagtcccca

SEQ ID NO: 2930705 - DNA, 25 bp, Homo sapien
tatattcagactgcctatagcagtc

SEQ ID NO: 2930706 - DNA, 25 bp, Homo sapien
tattcagactgcctatagcagtccc

SEQ ID NO: 2930707 - DNA, 25 bp, Homo sapien
gcatgtaggtgagccccactggcag

SEQ ID NO: 2930708 - DNA, 25 bp, Homo sapien
aacgtatcgagaaaccaatgatctg

SEQ ID NO: 2930709 - DNA, 25 bp, Homo sapien
gaagataatagaaacgtatcgagaa

SEQ ID NO: 2930710 - DNA, 25 bp, Homo sapien
ccagcatgtaggtgagccccactgg

SEQ ID NO: 2930711 - DNA, 25 bp, Homo sapien
gcgctcaataacctagtgtggctgg

SEQ ID NO: 2930712 - DNA, 25 bp, Homo sapien
tgctgctagacacaaggaatatggt

SEQ ID NO: 2930713 - DNA, 25 bp, Homo sapien
gagtgagggcgatagtctctgttca

SEQ ID NO: 2930714 - DNA, 25 bp, Homo sapien
tcacattggatgatgcagccttggg

SEQ ID NO: 2930715 - DNA, 25 bp, Homo sapien
tggaagaattgcatagcctggaccc

SEQ ID NO: 2930716 - DNA, 25 bp, Homo sapien
gtagagactcccaagaaaaagcaga

SEQ ID NO: 2930717 - DNA, 25 bp, Homo sapien
cctggacccacgacggcagaaatta

SEQ ID NO: 2930718 - DNA, 25 bp, Homo sapien
gcagaatgaccagcgaaatcggaaa

SEQ ID NO: 2930719 - DNA, 25 bp, Homo sapien
gaatgtctttgcaggccatgtgaaa

SEQ ID NO: 2930720 - DNA, 25 bp, Homo sapien
tcagtgatgacctcgtccacagtta

SEQ ID NO: 2930721 - DNA, 25 bp, Homo sapien
atacaatgagcggagaggtcccagc

SEQ ID NO: 2930722 - DNA, 25 bp, Homo sapien
gagttggcactccactcagtgatga

SEQ ID NO: 2930723 - DNA, 25 bp, Homo sapien
actttgaaggcaaaacttgttcgtg

SEQ ID NO: 2930724 - DNA, 25 bp, Homo sapien
caccagggggtactgctttattggt

SEQ ID NO: 2930725 - DNA, 25 bp, Homo sapien
gcttgagtacccattaggcctgaat

SEQ ID NO: 2930726 - DNA, 25 bp, Homo sapien
gggctgtaagaccacatcaccaggg

SEQ ID NO: 2930727 - DNA, 25 bp, Homo sapien
ttattgcaggaactgtgatcacaag

SEQ ID NO: 2930728 - DNA, 25 bp, Homo sapien
aactgtgatcacaaggaccatgagc

SEQ ID NO: 2930729 - DNA, 25 bp, Homo sapien
ctcccggggctcgatcacaggagag

SEQ ID NO: 2930730 - DNA, 25 bp, Homo sapien
gatcacaaggaccatgagcgcagct

SEQ ID NO: 2930731 - DNA, 25 bp, Homo sapien
aacacagaaagtgctgggggctgct

SEQ ID NO: 2930732 - DNA, 25 bp, Homo sapien
tgggggctgcttctgtttcccccaa

SEQ ID NO: 2930733 - DNA, 25 bp, Homo sapien
gggtgagaaacacagaaagtgctgg

SEQ ID NO: 2930734 - DNA, 25 bp, Homo sapien
gctgcttctgtttcccccaagtgcc

SEQ ID NO: 2930735 - DNA, 25 bp, Homo sapien
tgcatcataggctgaacctgctccc

SEQ ID NO: 2930736 - DNA, 25 bp, Homo sapien
ccccacttctcaggataacacttaa

SEQ ID NO: 2930737 - DNA, 25 bp, Homo sapien
tgtgcctccaccctttgcatcatag

SEQ ID NO: 2930738 - DNA, 25 bp, Homo sapien
tctggggaataatgctggctgtgtc

SEQ ID NO: 2930739 - DNA, 25 bp, Homo sapien
tgagctcgtacctggatcctcagtt

SEQ ID NO: 2930740 - DNA, 25 bp, Homo sapien
tggagctcaggatttggtatctgag

SEQ ID NO: 2930741 - DNA, 25 bp, Homo sapien
gctgtggtattgtggagacatctag

SEQ ID NO: 2930742 - DNA, 25 bp, Homo sapien
gcaaaccatgtcttagcggctgtgg

SEQ ID NO: 2930743 - DNA, 25 bp, Homo sapien
tggcatcggactcctccctggagct

SEQ ID NO: 2930744 - DNA, 25 bp, Homo sapien
tcctccctggagctgttgcatccgt

SEQ ID NO: 2930745 - DNA, 25 bp, Homo sapien
caggtggcatcggactcctccctgg

SEQ ID NO: 2930746 - DNA, 25 bp, Homo sapien
gctgttgcatccgtcctgcagcagg

SEQ ID NO: 2930747 - DNA, 25 bp, Homo sapien
tgttggatgacagtacttcctgctc

SEQ ID NO: 2930748 - DNA, 25 bp, Homo sapien
cagctccttgctggttcaggtgcat

SEQ ID NO: 2930749 - DNA, 25 bp, Homo sapien
gttggatgacagtacttcctgctcc

SEQ ID NO: 2930750 - DNA, 25 bp, Homo sapien
catgaggaggaaagcagtagttgaa

SEQ ID NO: 2930751 - DNA, 25 bp, Homo sapien
cagtagttgaatctgatttcagcac

SEQ ID NO: 2930752 - DNA, 25 bp, Homo sapien
tgcatctcctcgtaagccatgagga

SEQ ID NO: 2930753 - DNA, 25 bp, Homo sapien
tcataactgttgcatctcctcgtaa

SEQ ID NO: 2930754 - DNA, 25 bp, Homo sapien
acttgttctctgtccattgaataaa

SEQ ID NO: 2930755 - DNA, 25 bp, Homo sapien
ttgttctctgtccattgaataaatg

SEQ ID NO: 2930756 - DNA, 25 bp, Homo sapien
tctctgtccattgaataaatgcctt

SEQ ID NO: 2930757 - DNA, 25 bp, Homo sapien
gttctctgtccattgaataaatgcc

SEQ ID NO: 2930758 - DNA, 25 bp, Homo sapien
gccaagccattctatagcacttgct

SEQ ID NO: 2930759 - DNA, 25 bp, Homo sapien
ggagtgccaagccattctatagcac

SEQ ID NO: 2930760 - DNA, 25 bp, Homo sapien
gtgccaagccattctatagcacttg

SEQ ID NO: 2930761 - DNA, 25 bp, Homo sapien
gtggagtgccaagccattctatagc

SEQ ID NO: 2930762 - DNA, 25 bp, Homo sapien
tcaaagtttgcagcacagtagtcca

SEQ ID NO: 2930763 - DNA, 25 bp, Homo sapien
ggagtgatacactctgggtcttcca

SEQ ID NO: 2930764 - DNA, 25 bp, Homo sapien
agaaacacctagatgcactgagagg

SEQ ID NO: 2930765 - DNA, 25 bp, Homo sapien
ccatgcgtgaattagcaagtgtatc

SEQ ID NO: 2930766 - DNA, 25 bp, Homo sapien
tcttggcttccacatcgaatcccat

SEQ ID NO: 2930767 - DNA, 25 bp, Homo sapien
catcttggcttccacatcgaatccc

SEQ ID NO: 2930768 - DNA, 25 bp, Homo sapien
atcttggcttccacatcgaatccca

SEQ ID NO: 2930769 - DNA, 25 bp, Homo sapien
ccatcttggcttccacatcgaatcc

SEQ ID NO: 2930770 - DNA, 25 bp, Homo sapien
tcctgggtgggttcctagagctgcc

SEQ ID NO: 2930771 - DNA, 25 bp, Homo sapien
tcaggtctggtcctgggtgggttcc

SEQ ID NO: 2930772 - DNA, 25 bp, Homo sapien
ataaccccgtcaaggaagagagcct

SEQ ID NO: 2930773 - DNA, 25 bp, Homo sapien
gatgcataggaggaactcctcatca

SEQ ID NO: 2930774 - DNA, 25 bp, Homo sapien
tgcctcaggaatcaggctcagggca

SEQ ID NO: 2930775 - DNA, 25 bp, Homo sapien
ctgcctcaggaatcaggctcagggc

SEQ ID NO: 2930776 - DNA, 25 bp, Homo sapien
gacagggttgagaggtaggaggtgc

SEQ ID NO: 2930777 - DNA, 25 bp, Homo sapien
agggttgagaggtaggaggtgcctc

SEQ ID NO: 2930778 - DNA, 25 bp, Homo sapien
cagggttgagaggtaggaggtgcct

SEQ ID NO: 2930779 - DNA, 25 bp, Homo sapien
acagggttgagaggtaggaggtgcc

SEQ ID NO: 2930780 - DNA, 25 bp, Homo sapien
ggtcaatagcaccttaagtcaggag

SEQ ID NO: 2930781 - DNA, 25 bp, Homo sapien
gggtagctaaacagtattcagttca

SEQ ID NO: 2930782 - DNA, 25 bp, Homo sapien
taggcgatggagctaaggagtactt

SEQ ID NO: 2930783 - DNA, 25 bp, Homo sapien
cacctgcacctgtggttttgtaggc

SEQ ID NO: 2930784 - DNA, 25 bp, Homo sapien
tgggaagtgccaaggtaagcagtcc

SEQ ID NO: 2930785 - DNA, 25 bp, Homo sapien
gaagtactgggttaaaggctcctca

SEQ ID NO: 2930786 - DNA, 25 bp, Homo sapien
gattttacactgaagggcgaggact

SEQ ID NO: 2930787 - DNA, 25 bp, Homo sapien
cagaagccccgctttagaccagtgg

SEQ ID NO: 2930788 - DNA, 25 bp, Homo sapien
gaatgggcacacaaatgaagtcact

SEQ ID NO: 2930789 - DNA, 25 bp, Homo sapien
taaccacacgcatagaacacaaggg

SEQ ID NO: 2930790 - DNA, 25 bp, Homo sapien
tgtagagtgtagctatggccaaggc

SEQ ID NO: 2930791 - DNA, 25 bp, Homo sapien
cgctggtcaccaaagatcagaggca

SEQ ID NO: 2930792 - DNA, 25 bp, Homo sapien
tcccatgttaccgatgagcaaacgg

SEQ ID NO: 2930793 - DNA, 25 bp, Homo sapien
cacttgacggccttacagggtacct

SEQ ID NO: 2930794 - DNA, 25 bp, Homo sapien
tcccatcagtcttatgaggtaggca

SEQ ID NO: 2930795 - DNA, 25 bp, Homo sapien
ggaagtttaggcacgttcaatagca

SEQ ID NO: 2930796 - DNA, 25 bp, Homo sapien
tgtggttttaacagggcgagcccca

SEQ ID NO: 2930797 - DNA, 25 bp, Homo sapien
caaaagcagatgcaggaatgtaagg

SEQ ID NO: 2930798 - DNA, 25 bp, Homo sapien
tttaacagggcgagccccaaaagca

SEQ ID NO: 2930799 - DNA, 25 bp, Homo sapien
tgcaggaatgtaaggatcattattc

SEQ ID NO: 2930800 - DNA, 25 bp, Homo sapien
gaaatccttgactctggatgcgaag

SEQ ID NO: 2930801 - DNA, 25 bp, Homo sapien
actgctgggcaaaaggaggcaacca

SEQ ID NO: 2930802 - DNA, 25 bp, Homo sapien
ggctgcatgggtgtcattgaacaat

SEQ ID NO: 2930803 - DNA, 25 bp, Homo sapien
ccgagttgctgtgcatagtagtgct

SEQ ID NO: 2930804 - DNA, 25 bp, Homo sapien
gaagatgagagggtcaagctcctct

SEQ ID NO: 2930805 - DNA, 25 bp, Homo sapien
tgccctgcccatggatgcaccaatg

SEQ ID NO: 2930806 - DNA, 25 bp, Homo sapien
cccatggatgcaccaatgtaagttt

SEQ ID NO: 2930807 - DNA, 25 bp, Homo sapien
gatgagagggtcaagctcctctgtg

SEQ ID NO: 2930808 - DNA, 25 bp, Homo sapien
taggtagaaaaaggatgtgtctgtg

SEQ ID NO: 2930809 - DNA, 25 bp, Homo sapien
tagaaaaaggatgtgtctgtgtggc

SEQ ID NO: 2930810 - DNA, 25 bp, Homo sapien
tctcatgaaggcaggagcaagcagg

SEQ ID NO: 2930811 - DNA, 25 bp, Homo sapien
tctgtgtggctaaatagagccatct

SEQ ID NO: 2930812 - DNA, 25 bp, Homo sapien
tggctgtctcccatctagtcccaaa

SEQ ID NO: 2930813 - DNA, 25 bp, Homo sapien
accagcgccccgaccttggctgtct

SEQ ID NO: 2930814 - DNA, 25 bp, Homo sapien
attttcaacacttctgctgtcttgg

SEQ ID NO: 2930815 - DNA, 25 bp, Homo sapien
ttctgctgtcttggtgcccaacttc

SEQ ID NO: 2930816 - DNA, 25 bp, Homo sapien
tcaattgtgtgatcctaggcgagtc

SEQ ID NO: 2930817 - DNA, 25 bp, Homo sapien
aggatacccatcttagcgtgctcgg

SEQ ID NO: 2930818 - DNA, 25 bp, Homo sapien
gctgcttgacaacacaggagtgggc

SEQ ID NO: 2930819 - DNA, 25 bp, Homo sapien
gcgtgctcggtatcaaaggctttgg

SEQ ID NO: 2930820 - DNA, 25 bp, Homo sapien
cccttccagataccggaggcagtaa

SEQ ID NO: 2930821 - DNA, 25 bp, Homo sapien
tccgttgtcaaagatcagcaggcta

SEQ ID NO: 2930822 - DNA, 25 bp, Homo sapien
gaggcagtaaatgcggtctcccacc

SEQ ID NO: 2930823 - DNA, 25 bp, Homo sapien
cggaatgaaacgcttctgaacccct

SEQ ID NO: 2930824 - DNA, 25 bp, Homo sapien
gtacaggatttgtaggttcttttga

SEQ ID NO: 2930825 - DNA, 25 bp, Homo sapien
ggttcttttgagtcttatccatctg

SEQ ID NO: 2930826 - DNA, 25 bp, Homo sapien
ttgccacgtgatttcattgtacagg

SEQ ID NO: 2930827 - DNA, 25 bp, Homo sapien
tatgccagcatgtaccattgattgg

SEQ ID NO: 2930828 - DNA, 25 bp, Homo sapien
taaatgggctcctgtacaccttgta

SEQ ID NO: 2930829 - DNA, 25 bp, Homo sapien
aaatgggctcctgtacaccttgtag

SEQ ID NO: 2930830 - DNA, 25 bp, Homo sapien
cacgactcggagagaaaataaggag

SEQ ID NO: 2930831 - DNA, 25 bp, Homo sapien
cacatgagcaggcatagagtccacg

SEQ ID NO: 2930832 - DNA, 25 bp, Homo sapien
tgaagttggaagttgagctacgtct

SEQ ID NO: 2930833 - DNA, 25 bp, Homo sapien
gagctacgtcttgacacatgagcag

SEQ ID NO: 2930834 - DNA, 25 bp, Homo sapien
caaatgcccactagtatcctggtgt

SEQ ID NO: 2930835 - DNA, 25 bp, Homo sapien
gaaatgcctatcacactgcctacca

SEQ ID NO: 2930836 - DNA, 25 bp, Homo sapien
gaggacttggctcatacatttccag

SEQ ID NO: 2930837 - DNA, 25 bp, Homo sapien
tacaatatttgcaggtgattccacc

SEQ ID NO: 2930838 - DNA, 25 bp, Homo sapien
ctggatatacataacttctacgtga

SEQ ID NO: 2930839 - DNA, 25 bp, Homo sapien
gatactggatatacataacttctac

SEQ ID NO: 2930840 - DNA, 25 bp, Homo sapien
gggcagatactggatatacataact

SEQ ID NO: 2930841 - DNA, 25 bp, Homo sapien
tacataacttctacgtgaacagaca

SEQ ID NO: 2930842 - DNA, 25 bp, Homo sapien
caagctggcagtttcgattacatca

SEQ ID NO: 2930843 - DNA, 25 bp, Homo sapien
ttacatcagatatcccattttgagg

SEQ ID NO: 2930844 - DNA, 25 bp, Homo sapien
ttttcatccccttggaatttgtcat

SEQ ID NO: 2930845 - DNA, 25 bp, Homo sapien
atccccttggaatttgtcatcagcc

SEQ ID NO: 2930846 - DNA, 25 bp, Homo sapien
ggggtgatggtggtgaggagtagtg

SEQ ID NO: 2930847 - DNA, 25 bp, Homo sapien
tgatggtggtgaggagtagtgatgc

SEQ ID NO: 2930848 - DNA, 25 bp, Homo sapien
tgagttggtgggtgggggtgatggt

SEQ ID NO: 2930849 - DNA, 25 bp, Homo sapien
ggtgatggtggtgaggagtagtgat

SEQ ID NO: 2930850 - DNA, 25 bp, Homo sapien
catatgagaacagaaagagtagtgg

SEQ ID NO: 2930851 - DNA, 25 bp, Homo sapien
agcatatgagaacagaaagagtagt

SEQ ID NO: 2930852 - DNA, 25 bp, Homo sapien
gcatatgagaacagaaagagtagtg

SEQ ID NO: 2930853 - DNA, 25 bp, Homo sapien
atatgagaacagaaagagtagtggc

SEQ ID NO: 2930854 - DNA, 25 bp, Homo sapien
gcttccagcatctaagatttcttgc

SEQ ID NO: 2930855 - DNA, 25 bp, Homo sapien
attgcatgcagtagccaagaatact

SEQ ID NO: 2930856 - DNA, 25 bp, Homo sapien
ctaattgcatgcagtagccaagaat

SEQ ID NO: 2930857 - DNA, 25 bp, Homo sapien
agcttccagcatctaagatttcttg

SEQ ID NO: 2930858 - DNA, 25 bp, Homo sapien
atgtttctgggttagtctcagcctc

SEQ ID NO: 2930859 - DNA, 25 bp, Homo sapien
gctggaggcgagagtgcgagcttca

SEQ ID NO: 2930860 - DNA, 25 bp, Homo sapien
cagtttgagaattggatgtttctgg

SEQ ID NO: 2930861 - DNA, 25 bp, Homo sapien
gagagtgcgagcttcagtttgagaa

SEQ ID NO: 2930862 - DNA, 25 bp, Homo sapien
gctgagcgagcccttggggaatgaa

SEQ ID NO: 2930863 - DNA, 25 bp, Homo sapien
acagaagggcggcagagactttcat

SEQ ID NO: 2930864 - DNA, 25 bp, Homo sapien
aggcacagaagggcggcagagactt

SEQ ID NO: 2930865 - DNA, 25 bp, Homo sapien
gggaatgaaggtggctgctatgagc

SEQ ID NO: 2930866 - DNA, 25 bp, Homo sapien
gagtcaccgtctctggaagctaagg

SEQ ID NO: 2930867 - DNA, 25 bp, Homo sapien
tagactctgaataggctatgcctgg

SEQ ID NO: 2930868 - DNA, 25 bp, Homo sapien
gaattctagttcaggctctgccgag

SEQ ID NO: 2930869 - DNA, 25 bp, Homo sapien
taactgcgctgagtgtgttcccaga

SEQ ID NO: 2930870 - DNA, 25 bp, Homo sapien
aacattgataatggacagagagaag

SEQ ID NO: 2930871 - DNA, 25 bp, Homo sapien
tataacattgataatggacagagag

SEQ ID NO: 2930872 - DNA, 25 bp, Homo sapien
aaggaggagctgttaaagctagata

SEQ ID NO: 2930873 - DNA, 25 bp, Homo sapien
gaaggaggagctgttaaagctagat

SEQ ID NO: 2930874 - DNA, 25 bp, Homo sapien
atcacagcttctttgggacacttgc

SEQ ID NO: 2930875 - DNA, 25 bp, Homo sapien
tgattcttctatagctcgcgagcct

SEQ ID NO: 2930876 - DNA, 25 bp, Homo sapien
gatcttcctattggtgaagttataa

SEQ ID NO: 2930877 - DNA, 25 bp, Homo sapien
tctgcactgagatcttcctattggt

SEQ ID NO: 2930878 - DNA, 25 bp, Homo sapien
tatgaggcttgtcccttgctccaca

SEQ ID NO: 2930879 - DNA, 25 bp, Homo sapien
gttctgaataggcacccaggtggag

SEQ ID NO: 2930880 - DNA, 25 bp, Homo sapien
cattctgcaccaaagggctgccatg

SEQ ID NO: 2930881 - DNA, 25 bp, Homo sapien
gcaaactgctcctataggtgtccag

SEQ ID NO: 2930882 - DNA, 25 bp, Homo sapien
agtcttcggagtttgggtttgcttg

SEQ ID NO: 2930883 - DNA, 25 bp, Homo sapien
tcaagtcttcggagtttgggtttgc

SEQ ID NO: 2930884 - DNA, 25 bp, Homo sapien
tccaggtggtccatggaatcctgaa

SEQ ID NO: 2930885 - DNA, 25 bp, Homo sapien
gtccaggtggtccatggaatcctga

SEQ ID NO: 2930886 - DNA, 25 bp, Homo sapien
aacactagtaccatgaaagataaac

SEQ ID NO: 2930887 - DNA, 25 bp, Homo sapien
gcaaagaccctcaaaacatcccagg

SEQ ID NO: 2930888 - DNA, 25 bp, Homo sapien
gaaaagcaatttccccaagtctctg

SEQ ID NO: 2930889 - DNA, 25 bp, Homo sapien
gaactgtggttcaagaggaaaagca

SEQ ID NO: 2930890 - DNA, 25 bp, Homo sapien
ttggaggtttctggtttggtctcag

SEQ ID NO: 2930891 - DNA, 25 bp, Homo sapien
agcagacacagaagtgctgcagagg

SEQ ID NO: 2930892 - DNA, 25 bp, Homo sapien
gcagacacagaagtgctgcagaggc

SEQ ID NO: 2930893 - DNA, 25 bp, Homo sapien
acagaagtgctgcagaggctttcat

SEQ ID NO: 2930894 - DNA, 25 bp, Homo sapien
gacacagaagtgctgcagaggcttt

SEQ ID NO: 2930895 - DNA, 25 bp, Homo sapien
aagaaaagtccattgagggtgtgtc

SEQ ID NO: 2930896 - DNA, 25 bp, Homo sapien
aaagtccattgagggtgtgtcctgg

SEQ ID NO: 2930897 - DNA, 25 bp, Homo sapien
gaaaagtccattgagggtgtgtcct

SEQ ID NO: 2930898 - DNA, 25 bp, Homo sapien
agaagaaaagtccattgagggtgtg

SEQ ID NO: 2930899 - DNA, 25 bp, Homo sapien
ctactggtggtccttctgtagctct

SEQ ID NO: 2930900 - DNA, 25 bp, Homo sapien
ttcttattgataaatctgtagcagc

SEQ ID NO: 2930901 - DNA, 25 bp, Homo sapien
tattgataaatctgtagcagcaggt

SEQ ID NO: 2930902 - DNA, 25 bp, Homo sapien
cttcccggggacagtggctactggt

SEQ ID NO: 2930903 - DNA, 25 bp, Homo sapien
gatactagtcctattccctgcccag

SEQ ID NO: 2930904 - DNA, 25 bp, Homo sapien
tctgggataaggttagagatgctgt

SEQ ID NO: 2930905 - DNA, 25 bp, Homo sapien
gatgaaggaacgaactgagatgtaa

SEQ ID NO: 2930906 - DNA, 25 bp, Homo sapien
taaaatgatagctggaaagggagct

SEQ ID NO: 2930907 - DNA, 25 bp, Homo sapien
tccaggtgcttcataaagtcctgga

SEQ ID NO: 2930908 - DNA, 25 bp, Homo sapien
catccaaggctttatgttcaaaacc

SEQ ID NO: 2930909 - DNA, 25 bp, Homo sapien
acaatatgcttccatagggacatca

SEQ ID NO: 2930910 - DNA, 25 bp, Homo sapien
cagtttttacagcactgagatgaca

SEQ ID NO: 2930911 - DNA, 25 bp, Homo sapien
gggacatcatatcttaacaattaaa

SEQ ID NO: 2930912 - DNA, 25 bp, Homo sapien
gaaggtgtgagctttggcgtgagag

SEQ ID NO: 2930913 - DNA, 25 bp, Homo sapien
gctgaaggtgtgagctttggcgtga

SEQ ID NO: 2930914 - DNA, 25 bp, Homo sapien
ggaggctgaaggtgtgagctttggc

SEQ ID NO: 2930915 - DNA, 25 bp, Homo sapien
ggtgtgagctttggcgtgagaggtg

SEQ ID NO: 2930916 - DNA, 25 bp, Homo sapien
tgaaggcagctgctatgagcagcag

SEQ ID NO: 2930917 - DNA, 25 bp, Homo sapien
cagctgctatgagcagcagccacag

SEQ ID NO: 2930918 - DNA, 25 bp, Homo sapien
gctgaaggcagctgctatgagcagc

SEQ ID NO: 2930919 - DNA, 25 bp, Homo sapien
ctggcccagcgagcccctgggggct

SEQ ID NO: 2930920 - DNA, 25 bp, Homo sapien
ctctctagtcgctgaaggggtatct

SEQ ID NO: 2930921 - DNA, 25 bp, Homo sapien
cctgtagctctctagtcgctgaagg

SEQ ID NO: 2930922 - DNA, 25 bp, Homo sapien
ctagtcgctgaaggggtatcttcct

SEQ ID NO: 2930923 - DNA, 25 bp, Homo sapien
ctgtagctctctagtcgctgaaggg

SEQ ID NO: 2930924 - DNA, 25 bp, Homo sapien
tggctttggagttggagatttttgg

SEQ ID NO: 2930925 - DNA, 25 bp, Homo sapien
ttcttggggtcggcacagatatcct

SEQ ID NO: 2930926 - DNA, 25 bp, Homo sapien
gctttggagttggagatttttggtc

SEQ ID NO: 2930927 - DNA, 25 bp, Homo sapien
tcttggggtcggcacagatatcctt

SEQ ID NO: 2930928 - DNA, 25 bp, Homo sapien
taatgagtcacactttgggttcaca

SEQ ID NO: 2930929 - DNA, 25 bp, Homo sapien
gaaaacaaattaggcaacactcagg

SEQ ID NO: 2930930 - DNA, 25 bp, Homo sapien
ggaacattgcccacacgtgacaggg

SEQ ID NO: 2930931 - DNA, 25 bp, Homo sapien
catgccctttggactgataatgagg

SEQ ID NO: 2930932 - DNA, 25 bp, Homo sapien
gttcagcaaacacctgggaactcat

SEQ ID NO: 2930933 - DNA, 25 bp, Homo sapien
ggttcagcaaacacctgggaactca

SEQ ID NO: 2930934 - DNA, 25 bp, Homo sapien
tggttcagcaaacacctgggaactc

SEQ ID NO: 2930935 - DNA, 25 bp, Homo sapien
ctggttcagcaaacacctgggaact

SEQ ID NO: 2930936 - DNA, 25 bp, Homo sapien
cagattgtcctgaaggttaactttc

SEQ ID NO: 2930937 - DNA, 25 bp, Homo sapien
tcagattgtcctgaaggttaacttt

SEQ ID NO: 2930938 - DNA, 25 bp, Homo sapien
taagaccttccttgaatatgctgag

SEQ ID NO: 2930939 - DNA, 25 bp, Homo sapien
gctggtgctctccatcacactagag

SEQ ID NO: 2930940 - DNA, 25 bp, Homo sapien
tgctgagtaagcaccagatcctggg

SEQ ID NO: 2930941 - DNA, 25 bp, Homo sapien
ctgggcatggtcacaatcaaggaag

SEQ ID NO: 2930942 - DNA, 25 bp, Homo sapien
agcaagtccctgagggctgaaagtg

SEQ ID NO: 2930943 - DNA, 25 bp, Homo sapien
gagcaagtccctgagggctgaaagt

SEQ ID NO: 2930944 - DNA, 25 bp, Homo sapien
aagtccctgagggctgaaagtggct

SEQ ID NO: 2930945 - DNA, 25 bp, Homo sapien
caagtccctgagggctgaaagtggc

SEQ ID NO: 2930946 - DNA, 25 bp, Homo sapien
tcaggaaagatcaagggaaccagcc

SEQ ID NO: 2930947 - DNA, 25 bp, Homo sapien
ttgctgtagcggctccactgtctcc

SEQ ID NO: 2930948 - DNA, 25 bp, Homo sapien
agtgacctgagcctttagttctggt

SEQ ID NO: 2930949 - DNA, 25 bp, Homo sapien
gaaatgtcctttacacccacagtga

SEQ ID NO: 2930950 - DNA, 25 bp, Homo sapien
tccagcctctggataggaattttcc

SEQ ID NO: 2930951 - DNA, 25 bp, Homo sapien
cttgggacattggatgttggtgatt

SEQ ID NO: 2930952 - DNA, 25 bp, Homo sapien
ctattgatcacgttaaagcagcagg

SEQ ID NO: 2930953 - DNA, 25 bp, Homo sapien
gatgttggtgattcttgtgtagctc

SEQ ID NO: 2930954 - DNA, 25 bp, Homo sapien
gaaatatttggtccagatgcttcat

SEQ ID NO: 2930955 - DNA, 25 bp, Homo sapien
aaatatttggtccagatgcttcatg

SEQ ID NO: 2930956 - DNA, 25 bp, Homo sapien
gacattttgccgtgaacttagttga

SEQ ID NO: 2930957 - DNA, 25 bp, Homo sapien
cacatttgacttacaggagcactga

SEQ ID NO: 2930958 - DNA, 25 bp, Homo sapien
tgactctcagtccatgtatgaaggc

SEQ ID NO: 2930959 - DNA, 25 bp, Homo sapien
ccttgatgatccatgggaggacccc

SEQ ID NO: 2930960 - DNA, 25 bp, Homo sapien
taagaagccataagggctctcctct

SEQ ID NO: 2930961 - DNA, 25 bp, Homo sapien
tactttatcttgcaagccagacagg

SEQ ID NO: 2930962 - DNA, 25 bp, Homo sapien
aaccagggttgtcccagacaaattg

SEQ ID NO: 2930963 - DNA, 25 bp, Homo sapien
gtgtaccatcttcctctccagtggg

SEQ ID NO: 2930964 - DNA, 25 bp, Homo sapien
ctccagggctgaatctctccagaaa

SEQ ID NO: 2930965 - DNA, 25 bp, Homo sapien
tccagggctgaatctctccagaaag

SEQ ID NO: 2930966 - DNA, 25 bp, Homo sapien
cctctggctgttccgccggcctttt

SEQ ID NO: 2930967 - DNA, 25 bp, Homo sapien
ttgaaggttaagagttggagatttc

SEQ ID NO: 2930968 - DNA, 25 bp, Homo sapien
agagttggagatttcacaatgtttc

SEQ ID NO: 2930969 - DNA, 25 bp, Homo sapien
gttaagagttggagatttcacaatg

SEQ ID NO: 2930970 - DNA, 25 bp, Homo sapien
acagaagcactgcagagactttcat

SEQ ID NO: 2930971 - DNA, 25 bp, Homo sapien
caagtagatgggacgttgagtgcat

SEQ ID NO: 2930972 - DNA, 25 bp, Homo sapien
agcagcaagtagatgggacgttgag

SEQ ID NO: 2930973 - DNA, 25 bp, Homo sapien
gctggtggtgatcacatagctcttc

SEQ ID NO: 2930974 - DNA, 25 bp, Homo sapien
tctgcaaggagatcttcttactgct

SEQ ID NO: 2930975 - DNA, 25 bp, Homo sapien
tgtgagctttccggcccaggtgttt

SEQ ID NO: 2930976 - DNA, 25 bp, Homo sapien
gtgagctttccggcccaggtgtttc

SEQ ID NO: 2930977 - DNA, 25 bp, Homo sapien
tgagctttccggcccaggtgtttca

SEQ ID NO: 2930978 - DNA, 25 bp, Homo sapien
gacagcaacctacttgctcaaggcc

SEQ ID NO: 2930979 - DNA, 25 bp, Homo sapien
gagctctccttcctacattgcagca

SEQ ID NO: 2930980 - DNA, 25 bp, Homo sapien
aaaagtcatttcacgtactccagct

SEQ ID NO: 2930981 - DNA, 25 bp, Homo sapien
ggaaccgaatacaaacccactgcca

SEQ ID NO: 2930982 - DNA, 25 bp, Homo sapien
tacaccaaattgaaaccaggagagg

SEQ ID NO: 2930983 - DNA, 25 bp, Homo sapien
ggaaattcaattcataagctcctgg

SEQ ID NO: 2930984 - DNA, 25 bp, Homo sapien
cccaccctgatacaccaaattgaaa

SEQ ID NO: 2930985 - DNA, 25 bp, Homo sapien
gttccccagcgtgcaaaccacacat

SEQ ID NO: 2930986 - DNA, 25 bp, Homo sapien
ttgcatcttctctctctcctgacac

SEQ ID NO: 2930987 - DNA, 25 bp, Homo sapien
tgcatcttctctctctcctgacacg

SEQ ID NO: 2930988 - DNA, 25 bp, Homo sapien
ggttctgtgggctcaggcgtcccac

SEQ ID NO: 2930989 - DNA, 25 bp, Homo sapien
ttctgtgggctcaggcgtcccactc

SEQ ID NO: 2930990 - DNA, 25 bp, Homo sapien
caggttctgtgggctcaggcgtccc

SEQ ID NO: 2930991 - DNA, 25 bp, Homo sapien
tctgtgggctcaggcgtcccactcc

SEQ ID NO: 2930992 - DNA, 25 bp, Homo sapien
tcactggccaccagtggatcagtcc

SEQ ID NO: 2930993 - DNA, 25 bp, Homo sapien
cccctctccctgtcactggccacca

SEQ ID NO: 2930994 - DNA, 25 bp, Homo sapien
cctgtcactggccaccagtggatca

SEQ ID NO: 2930995 - DNA, 25 bp, Homo sapien
tgtcactggccaccagtggatcagt

SEQ ID NO: 2930996 - DNA, 25 bp, Homo sapien
ttgactttgcggtagaggtttggat

SEQ ID NO: 2930997 - DNA, 25 bp, Homo sapien
tgactttgcggtagaggtttggatc

SEQ ID NO: 2930998 - DNA, 25 bp, Homo sapien
cttgactttgcggtagaggtttgga

SEQ ID NO: 2930999 - DNA, 25 bp, Homo sapien
tatcaggctcactccccggggctgg

SEQ ID NO: 2931000 - DNA, 25 bp, Homo sapien
ctttgctccatgcatatcaggctca

SEQ ID NO: 2931001 - DNA, 25 bp, Homo sapien
tgctccatgcatatcaggctcactc

SEQ ID NO: 2931002 - DNA, 25 bp, Homo sapien
atgcatatcaggctcactccccggg

SEQ ID NO: 2931003 - DNA, 25 bp, Homo sapien
caggagcttggcgagaatcactgtc

SEQ ID NO: 2931004 - DNA, 25 bp, Homo sapien
acacaggagcttggcgagaatcact

SEQ ID NO: 2931005 - DNA, 25 bp, Homo sapien
ggagcttggcgagaatcactgtctc

SEQ ID NO: 2931006 - DNA, 25 bp, Homo sapien
gcccacacaggagcttggcgagaat

SEQ ID NO: 2931007 - DNA, 25 bp, Homo sapien
acagttggtgcgggatattgggtat

SEQ ID NO: 2931008 - DNA, 25 bp, Homo sapien
atattgggtatccttctctctcttg

SEQ ID NO: 2931009 - DNA, 25 bp, Homo sapien
tcaacagttggtgcgggatattggg

SEQ ID NO: 2931010 - DNA, 25 bp, Homo sapien
gttggtgcgggatattgggtatcct

SEQ ID NO: 2931011 - DNA, 25 bp, Homo sapien
ttaaggatttcaccccatcactcca

SEQ ID NO: 2931012 - DNA, 25 bp, Homo sapien
cctgcaaaggtctgccattaatggg

SEQ ID NO: 2931013 - DNA, 25 bp, Homo sapien
gacttctcaactcgttgccttaagg

SEQ ID NO: 2931014 - DNA, 25 bp, Homo sapien
tctctgactacatacttactttcgt

SEQ ID NO: 2931015 - DNA, 25 bp, Homo sapien
tatttgaacccatctatcagagccc

SEQ ID NO: 2931016 - DNA, 25 bp, Homo sapien
tgtccccgcgatgcttattaaatac

SEQ ID NO: 2931017 - DNA, 25 bp, Homo sapien
ggtttgtcacagattagcagtacga

SEQ ID NO: 2931018 - DNA, 25 bp, Homo sapien
aatttatctccttatcagcagcagg

SEQ ID NO: 2931019 - DNA, 25 bp, Homo sapien
cagatcatagcccaggtagcacagg

SEQ ID NO: 2931020 - DNA, 25 bp, Homo sapien
ttgtagttcctacagcattttgtgt

SEQ ID NO: 2931021 - DNA, 25 bp, Homo sapien
ttttgtgtgacaccatgtttttctt

SEQ ID NO: 2931022 - DNA, 25 bp, Homo sapien
gacagcgtgcagctcatatgggcct

SEQ ID NO: 2931023 - DNA, 25 bp, Homo sapien
ggtggtcttattttcactgtgaggg

SEQ ID NO: 2931024 - DNA, 25 bp, Homo sapien
taatgacatagacagagggtggtct

SEQ ID NO: 2931025 - DNA, 25 bp, Homo sapien
cttttttgccttgaagccttgggag

SEQ ID NO: 2931026 - DNA, 25 bp, Homo sapien
ccttgggagtctaatgacatagaca

SEQ ID NO: 2931027 - DNA, 25 bp, Homo sapien
tctgagtcagtccagcagaactgcc

SEQ ID NO: 2931028 - DNA, 25 bp, Homo sapien
tgagtcagtccagcagaactgcctt

SEQ ID NO: 2931029 - DNA, 25 bp, Homo sapien
agtcagtccagcagaactgccttca

SEQ ID NO: 2931030 - DNA, 25 bp, Homo sapien
cttctgagtcagtccagcagaactg

SEQ ID NO: 2931031 - DNA, 25 bp, Homo sapien
agaatctgtgagctcgggcaggaag

SEQ ID NO: 2931032 - DNA, 25 bp, Homo sapien
caccgaccacatgctgattgatgac

SEQ ID NO: 2931033 - DNA, 25 bp, Homo sapien
gggccaccgaccacatgctgattga

SEQ ID NO: 2931034 - DNA, 25 bp, Homo sapien
atgggggccaccgaccacatgctga

SEQ ID NO: 2931035 - DNA, 25 bp, Homo sapien
gatagggcctaaagtcctggatggt

SEQ ID NO: 2931036 - DNA, 25 bp, Homo sapien
atgtctgagggcgatagggcctaaa

SEQ ID NO: 2931037 - DNA, 25 bp, Homo sapien
ccaggtagacaatgtctgagggcga

SEQ ID NO: 2931038 - DNA, 25 bp, Homo sapien
aacctctgtagcccactcatgagca

SEQ ID NO: 2931039 - DNA, 25 bp, Homo sapien
agcaatcagatcctttgtaaaggga

SEQ ID NO: 2931040 - DNA, 25 bp, Homo sapien
cgtggaggagcgagatgtgttgtac

SEQ ID NO: 2931041 - DNA, 25 bp, Homo sapien
ttgtaaagggaaggcttgtcgtgga

SEQ ID NO: 2931042 - DNA, 25 bp, Homo sapien
gaaggcttgtcgtggaggagcgaga

SEQ ID NO: 2931043 - DNA, 25 bp, Homo sapien
ttcaatttcaatgtcaataacttcc

SEQ ID NO: 2931044 - DNA, 25 bp, Homo sapien
tttcaatttcaatgtcaataacttc

SEQ ID NO: 2931045 - DNA, 25 bp, Homo sapien
accagggatgacgtctgagcaggcc

SEQ ID NO: 2931046 - DNA, 25 bp, Homo sapien
gagctgggcaaatagacaggtgttc

SEQ ID NO: 2931047 - DNA, 25 bp, Homo sapien
tggtacatcaattcttgtgacggtc

SEQ ID NO: 2931048 - DNA, 25 bp, Homo sapien
tgtgacggtctcatgaggatgatgc

SEQ ID NO: 2931049 - DNA, 25 bp, Homo sapien
gctgctggaatacaatattgcctct

SEQ ID NO: 2931050 - DNA, 25 bp, Homo sapien
gctggaatacaatattgcctcttga

SEQ ID NO: 2931051 - DNA, 25 bp, Homo sapien
ggaatacaatattgcctcttgatgt

SEQ ID NO: 2931052 - DNA, 25 bp, Homo sapien
gatgctgctggaatacaatattgcc

SEQ ID NO: 2931053 - DNA, 25 bp, Homo sapien
tacccctactttcttggaacacagc

SEQ ID NO: 2931054 - DNA, 25 bp, Homo sapien
taggtgatgtgccaagcctgtttca

SEQ ID NO: 2931055 - DNA, 25 bp, Homo sapien
ctggttgcccagatacctgtaggtg

SEQ ID NO: 2931056 - DNA, 25 bp, Homo sapien
agcatgaggtgaggggtggtagccc

SEQ ID NO: 2931057 - DNA, 25 bp, Homo sapien
gatgtgccaagcctgtttcagtcca

SEQ ID NO: 2931058 - DNA, 25 bp, Homo sapien
ttaactagaagtcaaagctgcattt

SEQ ID NO: 2931059 - DNA, 25 bp, Homo sapien
taactagaagtcaaagctgcatttt

SEQ ID NO: 2931060 - DNA, 25 bp, Homo sapien
gggactcaggaggtttcaccagtat

SEQ ID NO: 2931061 - DNA, 25 bp, Homo sapien
gcagtttgtagtgcaagatctcaca

SEQ ID NO: 2931062 - DNA, 25 bp, Homo sapien
cagtatgaggatcaagtcttgccca

SEQ ID NO: 2931063 - DNA, 25 bp, Homo sapien
gtcttgcccattcgggatccccttg

SEQ ID NO: 2931064 - DNA, 25 bp, Homo sapien
tctcttaccatactaggagagtgct

SEQ ID NO: 2931065 - DNA, 25 bp, Homo sapien
tgggttctgcgtggccacttctgac

SEQ ID NO: 2931066 - DNA, 25 bp, Homo sapien
gggacttcagtttattctcttacca

SEQ ID NO: 2931067 - DNA, 25 bp, Homo sapien
ccaggctgaatgttgggttctgcgt

SEQ ID NO: 2931068 - DNA, 25 bp, Homo sapien
aagaggctaagtcctaggacttgag

SEQ ID NO: 2931069 - DNA, 25 bp, Homo sapien
aggctgatgataaagaggctaagtc

SEQ ID NO: 2931070 - DNA, 25 bp, Homo sapien
atggaaacaaggctgatgataaaga

SEQ ID NO: 2931071 - DNA, 25 bp, Homo sapien
ggtggtggtagtggatgatgatgac

SEQ ID NO: 2931072 - DNA, 25 bp, Homo sapien
gcagcacaagattttccgcagccat

SEQ ID NO: 2931073 - DNA, 25 bp, Homo sapien
gaggctgtgaggtgtttctcttgcc

SEQ ID NO: 2931074 - DNA, 25 bp, Homo sapien
cctgggaacccttgtggagtccatt

SEQ ID NO: 2931075 - DNA, 25 bp, Homo sapien
ctgtgaggtgtttctcttgccgcca

SEQ ID NO: 2931076 - DNA, 25 bp, Homo sapien
ctgcagaggcatgagtccctatcat

SEQ ID NO: 2931077 - DNA, 25 bp, Homo sapien
ccaggaatcttcaggcctgtctgca

SEQ ID NO: 2931078 - DNA, 25 bp, Homo sapien
tgcttgctgcccgattgcagccatc

SEQ ID NO: 2931079 - DNA, 25 bp, Homo sapien
ctggactgcaagtctctgactcaga

SEQ ID NO: 2931080 - DNA, 25 bp, Homo sapien
tggactgcaagtctctgactcagag

SEQ ID NO: 2931081 - DNA, 25 bp, Homo sapien
agagggctctgcatctatctcggta

SEQ ID NO: 2931082 - DNA, 25 bp, Homo sapien
agtgaagtgcaattctgttggtgtc

SEQ ID NO: 2931083 - DNA, 25 bp, Homo sapien
tctatctcggtagagtgcattcttc

SEQ ID NO: 2931084 - DNA, 25 bp, Homo sapien
gaagtgcaattctgttggtgtcagc

SEQ ID NO: 2931085 - DNA, 25 bp, Homo sapien
tgcaaagaaattggcttgggtgcag

SEQ ID NO: 2931086 - DNA, 25 bp, Homo sapien
ccttgcaaagaaattggcttgggtg

SEQ ID NO: 2931087 - DNA, 25 bp, Homo sapien
gcaaagaaattggcttgggtgcagg

SEQ ID NO: 2931088 - DNA, 25 bp, Homo sapien
cttgcaaagaaattggcttgggtgc

SEQ ID NO: 2931089 - DNA, 25 bp, Homo sapien
cctggtgttggctgatgttgtcaag

SEQ ID NO: 2931090 - DNA, 25 bp, Homo sapien
ggaaaggatgccctggtgttggctg

SEQ ID NO: 2931091 - DNA, 25 bp, Homo sapien
ttggctgatgttgtcaaggaagtac

SEQ ID NO: 2931092 - DNA, 25 bp, Homo sapien
atgccctggtgttggctgatgttgt

SEQ ID NO: 2931093 - DNA, 25 bp, Homo sapien
cctctggtaggtaatggagagctat

SEQ ID NO: 2931094 - DNA, 25 bp, Homo sapien
ctctggtaggtaatggagagctatt

SEQ ID NO: 2931095 - DNA, 25 bp, Homo sapien
tcctctggtaggtaatggagagcta

SEQ ID NO: 2931096 - DNA, 25 bp, Homo sapien
tctcctctggtaggtaatggagagc

SEQ ID NO: 2931097 - DNA, 25 bp, Homo sapien
tcttctggcctaagcgggcaggaat

SEQ ID NO: 2931098 - DNA, 25 bp, Homo sapien
ggcaggaatgtcttggcggcctccc

SEQ ID NO: 2931099 - DNA, 25 bp, Homo sapien
ggaccacactgttcaacatctgctg

SEQ ID NO: 2931100 - DNA, 25 bp, Homo sapien
cagccctgggagacttatggaaaga

SEQ ID NO: 2931101 - DNA, 25 bp, Homo sapien
ggaagggtcggctgagctggtgaac

SEQ ID NO: 2931102 - DNA, 25 bp, Homo sapien
tgaacacaggcgagcagctgcagaa

SEQ ID NO: 2931103 - DNA, 25 bp, Homo sapien
ccctccctcttgtgtggtgccagag

SEQ ID NO: 2931104 - DNA, 25 bp, Homo sapien
tgtggtgccagagtactcctttctc

SEQ ID NO: 2931105 - DNA, 25 bp, Homo sapien
cacggatacgtggaaatatttcaga

SEQ ID NO: 2931106 - DNA, 25 bp, Homo sapien
tcaacatgtcagtgcacggatacgt

SEQ ID NO: 2931107 - DNA, 25 bp, Homo sapien
tcttcgaagtggtctattgttgcaa

SEQ ID NO: 2931108 - DNA, 25 bp, Homo sapien
agggagggtccacagcgctaacaga

SEQ ID NO: 2931109 - DNA, 25 bp, Homo sapien
tggcggctagcatgcagatgccagc

SEQ ID NO: 2931110 - DNA, 25 bp, Homo sapien
ctgtgctggcggctagcatgcagat

SEQ ID NO: 2931111 - DNA, 25 bp, Homo sapien
tgctggcggctagcatgcagatgcc

SEQ ID NO: 2931112 - DNA, 25 bp, Homo sapien
gcggctagcatgcagatgccagctg

SEQ ID NO: 2931113 - DNA, 25 bp, Homo sapien
caaagttcaggcaggaagtcgatgc

SEQ ID NO: 2931114 - DNA, 25 bp, Homo sapien
agcaggggaagcaccaacatcttca

SEQ ID NO: 2931115 - DNA, 25 bp, Homo sapien
gcaggaagtcgatgctggctgcagc

SEQ ID NO: 2931116 - DNA, 25 bp, Homo sapien
aggggaagcaccaacatcttcagca

SEQ ID NO: 2931117 - DNA, 25 bp, Homo sapien
gtcttagtcatctccacatgcacca

SEQ ID NO: 2931118 - DNA, 25 bp, Homo sapien
ccccagcttctgtatggattcactc

SEQ ID NO: 2931119 - DNA, 25 bp, Homo sapien
agcccccagcttctgtatggattca

SEQ ID NO: 2931120 - DNA, 25 bp, Homo sapien
gttcccacgggcagcccttgtctta

SEQ ID NO: 2931121 - DNA, 25 bp, Homo sapien
tgcaaggcatgacaggactgcagac

SEQ ID NO: 2931122 - DNA, 25 bp, Homo sapien
caaggcatgacaggactgcagacac

SEQ ID NO: 2931123 - DNA, 25 bp, Homo sapien
gcaaggcatgacaggactgcagaca

SEQ ID NO: 2931124 - DNA, 25 bp, Homo sapien
ctgcaaggcatgacaggactgcaga

SEQ ID NO: 2931125 - DNA, 25 bp, Homo sapien
tcctttcatgcgtaaaggatgtgcc

SEQ ID NO: 2931126 - DNA, 25 bp, Homo sapien
tttcatgcgtaaaggatgtgccagt

SEQ ID NO: 2931127 - DNA, 25 bp, Homo sapien
catgcgtaaaggatgtgccagtgtc

SEQ ID NO: 2931128 - DNA, 25 bp, Homo sapien
tctctcctttcatgcgtaaaggatg

SEQ ID NO: 2931129 - DNA, 25 bp, Homo sapien
ttcttcatcaagtccctacgtttgg

SEQ ID NO: 2931130 - DNA, 25 bp, Homo sapien
tcttcatcaagtccctacgtttggg

SEQ ID NO: 2931131 - DNA, 25 bp, Homo sapien
cttcatcaagtccctacgtttgggg

SEQ ID NO: 2931132 - DNA, 25 bp, Homo sapien
tgtactccatcaggcaagggcactc

SEQ ID NO: 2931133 - DNA, 25 bp, Homo sapien
ttttcccagcgatcaccacctggga

SEQ ID NO: 2931134 - DNA, 25 bp, Homo sapien
gttcccaaccgaatgctgacagccg

SEQ ID NO: 2931135 - DNA, 25 bp, Homo sapien
gggaagggctggatgtactccatca

SEQ ID NO: 2931136 - DNA, 25 bp, Homo sapien
tgcctcagggaagtgaagggcagcc

SEQ ID NO: 2931137 - DNA, 25 bp, Homo sapien
atggatctacccttcctggattgaa

SEQ ID NO: 2931138 - DNA, 25 bp, Homo sapien
catgggcctgatgatcctctgactc

SEQ ID NO: 2931139 - DNA, 25 bp, Homo sapien
gaagtgaagggcagccgatagccca

SEQ ID NO: 2931140 - DNA, 25 bp, Homo sapien
tgggcgagcggatcgccgcgccagt

SEQ ID NO: 2931141 - DNA, 25 bp, Homo sapien
gttcgcccgctgtctcgatgctgcc

SEQ ID NO: 2931142 - DNA, 25 bp, Homo sapien
acctgcgcagcttgcggccagggaa

SEQ ID NO: 2931143 - DNA, 25 bp, Homo sapien
ccctccgagtcagtttgggcgagcg

SEQ ID NO: 2931144 - DNA, 25 bp, Homo sapien
ggttcagagtctccgacgcctcctc

SEQ ID NO: 2931145 - DNA, 25 bp, Homo sapien
gaacttttctggggttcagagtctc

SEQ ID NO: 2931146 - DNA, 25 bp, Homo sapien
gctccagcgcgctttctccagtctg

SEQ ID NO: 2931147 - DNA, 25 bp, Homo sapien
tccgctccagcgcgctttctccagt

SEQ ID NO: 2931148 - DNA, 25 bp, Homo sapien
tcccctcgcaaggctcgctcctccg

SEQ ID NO: 2931149 - DNA, 25 bp, Homo sapien
gtcccctcgcaaggctcgctcctcc

SEQ ID NO: 2931150 - DNA, 25 bp, Homo sapien
ccgcacatggatagcgccgctttct

SEQ ID NO: 2931151 - DNA, 25 bp, Homo sapien
caacgcaatccccagtttcctcggt

SEQ ID NO: 2931152 - DNA, 25 bp, Homo sapien
tcgagggtgccgacttccaacgcaa

SEQ ID NO: 2931153 - DNA, 25 bp, Homo sapien
tcggtttcggtagtaaccgcacatg

SEQ ID NO: 2931154 - DNA, 25 bp, Homo sapien
cttggtcacatccaactcagggctg

SEQ ID NO: 2931155 - DNA, 25 bp, Homo sapien
gctccgggaccagagagtgcaattc

SEQ ID NO: 2931156 - DNA, 25 bp, Homo sapien
ggtccgagagagcaacagtcgacga

SEQ ID NO: 2931157 - DNA, 25 bp, Homo sapien
tgccccctgcaggatctgcgaggcg

SEQ ID NO: 2931158 - DNA, 25 bp, Homo sapien
cgcggcccgacatccccggggccat

SEQ ID NO: 2931159 - DNA, 25 bp, Homo sapien
gagaggcagagcagggcggcgccgc

SEQ ID NO: 2931160 - DNA, 25 bp, Homo sapien
cggcgccgccgcggcccgacatccc

SEQ ID NO: 2931161 - DNA, 25 bp, Homo sapien
cgtgggcgagtagcgctgagaggca

SEQ ID NO: 2931162 - DNA, 25 bp, Homo sapien
ctactggggcacagagagggcactg

SEQ ID NO: 2931163 - DNA, 25 bp, Homo sapien
actggggcacagagagggcactggt

SEQ ID NO: 2931164 - DNA, 25 bp, Homo sapien
tggggcacagagagggcactggtgc

SEQ ID NO: 2931165 - DNA, 25 bp, Homo sapien
tactggggcacagagagggcactgg

SEQ ID NO: 2931166 - DNA, 25 bp, Homo sapien
tcagggcttgggtgatcgggggatg

SEQ ID NO: 2931167 - DNA, 25 bp, Homo sapien
ggtaggggtgtggacacaacccgca

SEQ ID NO: 2931168 - DNA, 25 bp, Homo sapien
cagggcttgggtgatcgggggatgg

SEQ ID NO: 2931169 - DNA, 25 bp, Homo sapien
gtgtggacacaacccgcaggagaaa

SEQ ID NO: 2931170 - DNA, 25 bp, Homo sapien
tataagggcccgcatggctggctgc

SEQ ID NO: 2931171 - DNA, 25 bp, Homo sapien
taagggcccgcatggctggctgcct

SEQ ID NO: 2931172 - DNA, 25 bp, Homo sapien
tcaggtataagggcccgcatggctg

SEQ ID NO: 2931173 - DNA, 25 bp, Homo sapien
ggtataagggcccgcatggctggct

SEQ ID NO: 2931174 - DNA, 25 bp, Homo sapien
taggagggtgggctgcagccgtcat

SEQ ID NO: 2931175 - DNA, 25 bp, Homo sapien
ggctaggagggtgggctgcagccgt

SEQ ID NO: 2931176 - DNA, 25 bp, Homo sapien
ctccttggctaggagggtgggctgc

SEQ ID NO: 2931177 - DNA, 25 bp, Homo sapien
tggctaggagggtgggctgcagccg

SEQ ID NO: 2931178 - DNA, 25 bp, Homo sapien
tgagagttcgctggccagtgaccat

SEQ ID NO: 2931179 - DNA, 25 bp, Homo sapien
ctgagagttcgctggccagtgacca

SEQ ID NO: 2931180 - DNA, 25 bp, Homo sapien
gctgctggacgcaggaatgcctcct

SEQ ID NO: 2931181 - DNA, 25 bp, Homo sapien
gaagcagtgggcttgccagctgggt

SEQ ID NO: 2931182 - DNA, 25 bp, Homo sapien
gggccggctgctggacgcaggaatg

SEQ ID NO: 2931183 - DNA, 25 bp, Homo sapien
gccagctgggtgcaactttggcatt

SEQ ID NO: 2931184 - DNA, 25 bp, Homo sapien
gattaagtgagatacgtggctgctg

SEQ ID NO: 2931185 - DNA, 25 bp, Homo sapien
gaacagtggtggaaagagcaacacc

SEQ ID NO: 2931186 - DNA, 25 bp, Homo sapien
tctattggacagtgccgatgctgct

SEQ ID NO: 2931187 - DNA, 25 bp, Homo sapien
gcttgcagttggctgagagaacagt

SEQ ID NO: 2931188 - DNA, 25 bp, Homo sapien
gtctctgcgaaaaagaggtcttatg

SEQ ID NO: 2931189 - DNA, 25 bp, Homo sapien
ttatgtggtttgaatggtccacggc

SEQ ID NO: 2931190 - DNA, 25 bp, Homo sapien
tcccctgtctctgcgaaaaagaggt

SEQ ID NO: 2931191 - DNA, 25 bp, Homo sapien
tccacggctgcgtcttgctgccaag

SEQ ID NO: 2931192 - DNA, 25 bp, Homo sapien
gaaagggctgcgtgggggtctcagg

SEQ ID NO: 2931193 - DNA, 25 bp, Homo sapien
tgaggtcccttttgtgatggaaagg

SEQ ID NO: 2931194 - DNA, 25 bp, Homo sapien
gatgtgaggtcccttttgtgatgga

SEQ ID NO: 2931195 - DNA, 25 bp, Homo sapien
tctcagggatgtaggaataggggtc

SEQ ID NO: 2931196 - DNA, 25 bp, Homo sapien
cctgcaagttgtaagcctgtgtctg

SEQ ID NO: 2931197 - DNA, 25 bp, Homo sapien
gatcaggaccagagacatcaacagg

SEQ ID NO: 2931198 - DNA, 25 bp, Homo sapien
cccagttgttgcatggagagtccag

SEQ ID NO: 2931199 - DNA, 25 bp, Homo sapien
aatcaagcatcgcttacccctggga

SEQ ID NO: 2931200 - DNA, 25 bp, Homo sapien
atattggtgtacactggggctggac

SEQ ID NO: 2931201 - DNA, 25 bp, Homo sapien
gctggaccagctttgcgtagtacaa

SEQ ID NO: 2931202 - DNA, 25 bp, Homo sapien
cagctttgcgtagtacaaggtcagc

SEQ ID NO: 2931203 - DNA, 25 bp, Homo sapien
ctttgcgtagtacaaggtcagctgg

SEQ ID NO: 2931204 - DNA, 25 bp, Homo sapien
gccaacttctggcaattccacctca

SEQ ID NO: 2931205 - DNA, 25 bp, Homo sapien
ccaacttctggcaattccacctcag

SEQ ID NO: 2931206 - DNA, 25 bp, Homo sapien
ctgccaacttctggcaattccacct

SEQ ID NO: 2931207 - DNA, 25 bp, Homo sapien
caacttctggcaattccacctcagg

SEQ ID NO: 2931208 - DNA, 25 bp, Homo sapien
gttgaggaccggcagctccttggtc

SEQ ID NO: 2931209 - DNA, 25 bp, Homo sapien
atcccggaaggcatgcaggcggaca

SEQ ID NO: 2931210 - DNA, 25 bp, Homo sapien
ttggtctggaacaccacgaagggct

SEQ ID NO: 2931211 - DNA, 25 bp, Homo sapien
acaggcggtagctgactggcagcac

SEQ ID NO: 2931212 - DNA, 25 bp, Homo sapien
ggcccccgctgaggcggcaggagct

SEQ ID NO: 2931213 - DNA, 25 bp, Homo sapien
cgctgaggcggcaggagctcttgac

SEQ ID NO: 2931214 - DNA, 25 bp, Homo sapien
gccaggcccccgctgaggcggcagg

SEQ ID NO: 2931215 - DNA, 25 bp, Homo sapien
ccccgctgaggcggcaggagctctt

SEQ ID NO: 2931216 - DNA, 25 bp, Homo sapien
ggcgggccgtgggtggcgcagcggg

SEQ ID NO: 2931217 - DNA, 25 bp, Homo sapien
ttgcggcgggccgtgggtggcgcag

SEQ ID NO: 2931218 - DNA, 25 bp, Homo sapien
tggagcgtgtagtagagctcggcct

SEQ ID NO: 2931219 - DNA, 25 bp, Homo sapien
gctccagcccgtccggggacttgcg

SEQ ID NO: 2931220 - DNA, 25 bp, Homo sapien
tgctcccgatgcgcagcagggggtg

SEQ ID NO: 2931221 - DNA, 25 bp, Homo sapien
ctgatgctcccgatgcgcagcaggg

SEQ ID NO: 2931222 - DNA, 25 bp, Homo sapien
caggctgatgctcccgatgcgcagc

SEQ ID NO: 2931223 - DNA, 25 bp, Homo sapien
gctgatgctcccgatgcgcagcagg

SEQ ID NO: 2931224 - DNA, 25 bp, Homo sapien
ctgagcacttccccgggcttgaggg

SEQ ID NO: 2931225 - DNA, 25 bp, Homo sapien
gcttgaggggccggtctggcaggcg

SEQ ID NO: 2931226 - DNA, 25 bp, Homo sapien
gagttgggggccagatagaggagga

SEQ ID NO: 2931227 - DNA, 25 bp, Homo sapien
tgagtgtgaagtgctccacgctggg

SEQ ID NO: 2931228 - DNA, 25 bp, Homo sapien
agagggtcaggctacagcccaaagc

SEQ ID NO: 2931229 - DNA, 25 bp, Homo sapien
gcctggccaccatcactagactgta

SEQ ID NO: 2931230 - DNA, 25 bp, Homo sapien
ggtcaggctacagcccaaagctgcc

SEQ ID NO: 2931231 - DNA, 25 bp, Homo sapien
aagagggagagggtcaggctacagc

SEQ ID NO: 2931232 - DNA, 25 bp, Homo sapien
cactccgtgacttggtacctaaaag

SEQ ID NO: 2931233 - DNA, 25 bp, Homo sapien
gccactccgtgacttggtacctaaa

SEQ ID NO: 2931234 - DNA, 25 bp, Homo sapien
tgacttggtacctaaaagggtcaca

SEQ ID NO: 2931235 - DNA, 25 bp, Homo sapien
atccacggtggctgttgagtgcttt

SEQ ID NO: 2931236 - DNA, 25 bp, Homo sapien
agctgcaagatctccaaggggccct

SEQ ID NO: 2931237 - DNA, 25 bp, Homo sapien
gcacatcccgctgaatgaccgtcag

SEQ ID NO: 2931238 - DNA, 25 bp, Homo sapien
ggccacggtagtcaatgtgccacat

SEQ ID NO: 2931239 - DNA, 25 bp, Homo sapien
gatcctccgcttgactgactggctg

SEQ ID NO: 2931240 - DNA, 25 bp, Homo sapien
tccactagggcggagatgtccagga

SEQ ID NO: 2931241 - DNA, 25 bp, Homo sapien
gaatggccgtgttgatgatctctgt

SEQ ID NO: 2931242 - DNA, 25 bp, Homo sapien
atgtccaggacgaggccattcacct

SEQ ID NO: 2931243 - DNA, 25 bp, Homo sapien
ttgtcagactcgcattccactaggg

SEQ ID NO: 2931244 - DNA, 25 bp, Homo sapien
tcacttggctgaggcgggcatctga

SEQ ID NO: 2931245 - DNA, 25 bp, Homo sapien
gaaggtgaccctggcgttcatggac

SEQ ID NO: 2931246 - DNA, 25 bp, Homo sapien
gggacccagactgtcatttccaggg

SEQ ID NO: 2931247 - DNA, 25 bp, Homo sapien
caaacacgtagtcacagctgctgga

SEQ ID NO: 2931248 - DNA, 25 bp, Homo sapien
tcactgactaggtcggtgacctcca

SEQ ID NO: 2931249 - DNA, 25 bp, Homo sapien
cctcggatgatgtcgtgtggaactg

SEQ ID NO: 2931250 - DNA, 25 bp, Homo sapien
cagtccgggcctaacatggtgacca

SEQ ID NO: 2931251 - DNA, 25 bp, Homo sapien
tccagtcctgccagcgtgctgctgt

SEQ ID NO: 2931252 - DNA, 25 bp, Homo sapien
cagctgtggtggctaggatggtgtg

SEQ ID NO: 2931253 - DNA, 25 bp, Homo sapien
gaagctcaaggtctgttgggcagct

SEQ ID NO: 2931254 - DNA, 25 bp, Homo sapien
agcacagcctccgtcagcggagaca

SEQ ID NO: 2931255 - DNA, 25 bp, Homo sapien
tgaccttctcctcagtcaccgtcag

SEQ ID NO: 2931256 - DNA, 25 bp, Homo sapien
tcagcgatggttagctctgcgcgaa

SEQ ID NO: 2931257 - DNA, 25 bp, Homo sapien
gcgtacatgccgatctccaggtctg

SEQ ID NO: 2931258 - DNA, 25 bp, Homo sapien
gaacttgacccgcttgcgcttggag

SEQ ID NO: 2931259 - DNA, 25 bp, Homo sapien
ggtagcgcagcacaaaaacgatgca

SEQ ID NO: 2931260 - DNA, 25 bp, Homo sapien
tatttcgtccacagcaagatccttg

SEQ ID NO: 2931261 - DNA, 25 bp, Homo sapien
tacaaaatcaattcagccgcccaga

SEQ ID NO: 2931262 - DNA, 25 bp, Homo sapien
taagaaaaatccgacacagtggtgg

SEQ ID NO: 2931263 - DNA, 25 bp, Homo sapien
tctgtagagtcagctcccaggtcct

SEQ ID NO: 2931264 - DNA, 25 bp, Homo sapien
atgacttgtccatcttccttacggg

SEQ ID NO: 2931265 - DNA, 25 bp, Homo sapien
caacccagggtaaaggtctgtcatc

SEQ ID NO: 2931266 - DNA, 25 bp, Homo sapien
ccagatgacagtgggcagatgactt

SEQ ID NO: 2931267 - DNA, 25 bp, Homo sapien
ggctccttgaggacggatccacagt

SEQ ID NO: 2931268 - DNA, 25 bp, Homo sapien
ttgatggttgtctgctgtgatagtc

SEQ ID NO: 2931269 - DNA, 25 bp, Homo sapien
gttctctgctttcaggagttgatgg

SEQ ID NO: 2931270 - DNA, 25 bp, Homo sapien
ctgctttcaggagttgatggttgtc

SEQ ID NO: 2931271 - DNA, 25 bp, Homo sapien
tcaggagttgatggttgtctgctgt

SEQ ID NO: 2931272 - DNA, 25 bp, Homo sapien
cagatctgtggcaagggtataataa

SEQ ID NO: 2931273 - DNA, 25 bp, Homo sapien
gccgatgtggcaaggatgagggcca

SEQ ID NO: 2931274 - DNA, 25 bp, Homo sapien
attcactgagccgatgtggcaagga

SEQ ID NO: 2931275 - DNA, 25 bp, Homo sapien
cactgagccgatgtggcaaggatga

SEQ ID NO: 2931276 - DNA, 25 bp, Homo sapien
tttctcttctttcgcctgagcactc

SEQ ID NO: 2931277 - DNA, 25 bp, Homo sapien
tttttctcttctttcgcctgagcac

SEQ ID NO: 2931278 - DNA, 25 bp, Homo sapien
ctgctgtaggacagatcctttttct

SEQ ID NO: 2931279 - DNA, 25 bp, Homo sapien
tgtaggacagatcctttttctcttc

SEQ ID NO: 2931280 - DNA, 25 bp, Homo sapien
acccccaagaccagggactgcagcc

SEQ ID NO: 2931281 - DNA, 25 bp, Homo sapien
aagaccagggactgcagccctccca

SEQ ID NO: 2931282 - DNA, 25 bp, Homo sapien
ccaagaccagggactgcagccctcc

SEQ ID NO: 2931283 - DNA, 25 bp, Homo sapien
ccccaagaccagggactgcagccct

SEQ ID NO: 2931284 - DNA, 25 bp, Homo sapien
tcttcaggatgtgagtttccacaac

SEQ ID NO: 2931285 - DNA, 25 bp, Homo sapien
aaatcttcaggatgtgagtttccac

SEQ ID NO: 2931286 - DNA, 25 bp, Homo sapien
aatcttcaggatgtgagtttccaca

SEQ ID NO: 2931287 - DNA, 25 bp, Homo sapien
cttcaggatgtgagtttccacaaca

SEQ ID NO: 2931288 - DNA, 25 bp, Homo sapien
agagtggtgacagggcgaacattta

SEQ ID NO: 2931289 - DNA, 25 bp, Homo sapien
tggtgacagggcgaacatttagcat

SEQ ID NO: 2931290 - DNA, 25 bp, Homo sapien
gagagagtggtgacagggcgaacat

SEQ ID NO: 2931291 - DNA, 25 bp, Homo sapien
caggggagagagtggtgacagggcg

SEQ ID NO: 2931292 - DNA, 25 bp, Homo sapien
ggttccacatccatcgtggaccggg

SEQ ID NO: 2931293 - DNA, 25 bp, Homo sapien
cacatccatcgtggaccggggctgc

SEQ ID NO: 2931294 - DNA, 25 bp, Homo sapien
atccatcgtggaccggggctgctga

SEQ ID NO: 2931295 - DNA, 25 bp, Homo sapien
aggttccacatccatcgtggaccgg

SEQ ID NO: 2931296 - DNA, 25 bp, Homo sapien
gacacgaaggccacatttttctccc

SEQ ID NO: 2931297 - DNA, 25 bp, Homo sapien
cacttcgctgcggagcagatggatg

SEQ ID NO: 2931298 - DNA, 25 bp, Homo sapien
cggagcagatggatgacacgaaggc

SEQ ID NO: 2931299 - DNA, 25 bp, Homo sapien
gatggatgacacgaaggccacattt

SEQ ID NO: 2931300 - DNA, 25 bp, Homo sapien
gggacgtggatacagtgctttgtcc

SEQ ID NO: 2931301 - DNA, 25 bp, Homo sapien
cagccctgtaggaagactgcgagct

SEQ ID NO: 2931302 - DNA, 25 bp, Homo sapien
agccctgtaggaagactgcgagctg

SEQ ID NO: 2931303 - DNA, 25 bp, Homo sapien
cgtgggcccagggacgtggatacag

SEQ ID NO: 2931304 - DNA, 25 bp, Homo sapien
cagctagtgggtcctccccaagaag

SEQ ID NO: 2931305 - DNA, 25 bp, Homo sapien
acttttggttcttggaggtgcatgt

SEQ ID NO: 2931306 - DNA, 25 bp, Homo sapien
aacttttggttcttggaggtgcatg

SEQ ID NO: 2931307 - DNA, 25 bp, Homo sapien
ctcccagctagtgggtcctccccaa

SEQ ID NO: 2931308 - DNA, 25 bp, Homo sapien
catctctgcactcccctaaaggaca

SEQ ID NO: 2931309 - DNA, 25 bp, Homo sapien
atctctgcactcccctaaaggacac

SEQ ID NO: 2931310 - DNA, 25 bp, Homo sapien
ctggggtggcataaatgtcatctct

SEQ ID NO: 2931311 - DNA, 25 bp, Homo sapien
tgagagagatgagctgtcctcgctg

SEQ ID NO: 2931312 - DNA, 25 bp, Homo sapien
cgctggaggacaaatctctggagga

SEQ ID NO: 2931313 - DNA, 25 bp, Homo sapien
tcctcgctggaggacaaatctctgg

SEQ ID NO: 2931314 - DNA, 25 bp, Homo sapien
ccagccacgcctgctgagagctggg

SEQ ID NO: 2931315 - DNA, 25 bp, Homo sapien
gccagccctttgggcctacacgatg

SEQ ID NO: 2931316 - DNA, 25 bp, Homo sapien
ttgtgctgatggtcagagcggcatt

SEQ ID NO: 2931317 - DNA, 25 bp, Homo sapien
gtcagagcggcattttgttggtttc

SEQ ID NO: 2931318 - DNA, 25 bp, Homo sapien
ctgtcacctccactagatgcattgt

SEQ ID NO: 2931319 - DNA, 25 bp, Homo sapien
ggggaagtaggcgtcatgtgagaag

SEQ ID NO: 2931320 - DNA, 25 bp, Homo sapien
cctggggaagtaggcgtcatgtgag

SEQ ID NO: 2931321 - DNA, 25 bp, Homo sapien
ggaagtaggcgtcatgtgagaaggc

SEQ ID NO: 2931322 - DNA, 25 bp, Homo sapien
cctccctggggaagtaggcgtcatg

SEQ ID NO: 2931323 - DNA, 25 bp, Homo sapien
ctcctttggaacccttcgccctgat

SEQ ID NO: 2931324 - DNA, 25 bp, Homo sapien
ttggaacccttcgccctgatccctg

SEQ ID NO: 2931325 - DNA, 25 bp, Homo sapien
tcctttggaacccttcgccctgatc

SEQ ID NO: 2931326 - DNA, 25 bp, Homo sapien
ggaacccttcgccctgatccctgcc

SEQ ID NO: 2931327 - DNA, 25 bp, Homo sapien
ggtctggaagatgaggggctgtcca

SEQ ID NO: 2931328 - DNA, 25 bp, Homo sapien
gaagatgaggggctgtccagggaaa

SEQ ID NO: 2931329 - DNA, 25 bp, Homo sapien
agatgaggggctgtccagggaaaag

SEQ ID NO: 2931330 - DNA, 25 bp, Homo sapien
tgaggtctggaagatgaggggctgt

SEQ ID NO: 2931331 - DNA, 25 bp, Homo sapien
gagccactgtatcctcgccagtaca

SEQ ID NO: 2931332 - DNA, 25 bp, Homo sapien
gacatgggctctaattccagcttgg

SEQ ID NO: 2931333 - DNA, 25 bp, Homo sapien
gagctcactgtgtctagcctggagg

SEQ ID NO: 2931334 - DNA, 25 bp, Homo sapien
taatacatataagagtttgtgggct

SEQ ID NO: 2931335 - DNA, 25 bp, Homo sapien
cgatcaaagtcgctgcctgcataat

SEQ ID NO: 2931336 - DNA, 25 bp, Homo sapien
ccctgcaataaatatcgactgattc

SEQ ID NO: 2931337 - DNA, 25 bp, Homo sapien
ttgccagattcgatcaaagtcgctg

SEQ ID NO: 2931338 - DNA, 25 bp, Homo sapien
cgactgattcataaatctggttgcc

SEQ ID NO: 2931339 - DNA, 25 bp, Homo sapien
catttagcatcaaggcccctgggtg

SEQ ID NO: 2931340 - DNA, 25 bp, Homo sapien
cctctccaacatttagcatcaaggc

SEQ ID NO: 2931341 - DNA, 25 bp, Homo sapien
tgttgccccctccctcagatgtgtt

SEQ ID NO: 2931342 - DNA, 25 bp, Homo sapien
tccaacatttagcatcaaggcccct

SEQ ID NO: 2931343 - DNA, 25 bp, Homo sapien
gaagacttgtactgtcacatctcca

SEQ ID NO: 2931344 - DNA, 25 bp, Homo sapien
tgaagacttgtactgtcacatctcc

SEQ ID NO: 2931345 - DNA, 25 bp, Homo sapien
ctgaagacttgtactgtcacatctc

SEQ ID NO: 2931346 - DNA, 25 bp, Homo sapien
cattagttaccaacttctgctctgc

SEQ ID NO: 2931347 - DNA, 25 bp, Homo sapien
cctctcttccttaaaagtgtggagc

SEQ ID NO: 2931348 - DNA, 25 bp, Homo sapien
gctaggtcctttgggttgcactgcc

SEQ ID NO: 2931349 - DNA, 25 bp, Homo sapien
tccctttcgatctctgctgtctcta

SEQ ID NO: 2931350 - DNA, 25 bp, Homo sapien
ttttctgtgacaggttgcctagagc

SEQ ID NO: 2931351 - DNA, 25 bp, Homo sapien
ggttgatttggctctagcgaagatt

SEQ ID NO: 2931352 - DNA, 25 bp, Homo sapien
cctagagccattgggcagaagccct

SEQ ID NO: 2931353 - DNA, 25 bp, Homo sapien
ctctgacatggagggcatctgggct

SEQ ID NO: 2931354 - DNA, 25 bp, Homo sapien
gtgatatttactccctggttgcact

SEQ ID NO: 2931355 - DNA, 25 bp, Homo sapien
aaatttcctgtgtctatggcagagg

SEQ ID NO: 2931356 - DNA, 25 bp, Homo sapien
aatttcctgtgtctatggcagaggg

SEQ ID NO: 2931357 - DNA, 25 bp, Homo sapien
ctggttgcactgatcaggactgcca

SEQ ID NO: 2931358 - DNA, 25 bp, Homo sapien
aggctcatgccgggggagagcaggg

SEQ ID NO: 2931359 - DNA, 25 bp, Homo sapien
caggctcatgccgggggagagcagg

SEQ ID NO: 2931360 - DNA, 25 bp, Homo sapien
ggctcatgccgggggagagcagggt

SEQ ID NO: 2931361 - DNA, 25 bp, Homo sapien
ctgaatgggagcggaaacttgaagc

SEQ ID NO: 2931362 - DNA, 25 bp, Homo sapien
tgaatgggagcggaaacttgaagca

SEQ ID NO: 2931363 - DNA, 25 bp, Homo sapien
atgggagcggaaacttgaagcaggc

SEQ ID NO: 2931364 - DNA, 25 bp, Homo sapien
gaatgggagcggaaacttgaagcag

SEQ ID NO: 2931365 - DNA, 25 bp, Homo sapien
tcatcctggaaaacgcacggttccc

SEQ ID NO: 2931366 - DNA, 25 bp, Homo sapien
tcagccttcggcttaagaatagaca

SEQ ID NO: 2931367 - DNA, 25 bp, Homo sapien
gtcattatccagtaaatcaccatca

SEQ ID NO: 2931368 - DNA, 25 bp, Homo sapien
gacatagagtcattatccagtaaat

SEQ ID NO: 2931369 - DNA, 25 bp, Homo sapien
caggaatgaacagctgtagaccttg

SEQ ID NO: 2931370 - DNA, 25 bp, Homo sapien
tcacaggaatgaacagctgtagacc

SEQ ID NO: 2931371 - DNA, 25 bp, Homo sapien
gaatgaacagctgtagaccttggtc

SEQ ID NO: 2931372 - DNA, 25 bp, Homo sapien
ggaatgaacagctgtagaccttggt

SEQ ID NO: 2931373 - DNA, 25 bp, Homo sapien
gggcatagctctggtgtttattggc

SEQ ID NO: 2931374 - DNA, 25 bp, Homo sapien
gctggggcatagctctggtgtttat

SEQ ID NO: 2931375 - DNA, 25 bp, Homo sapien
tttgtgccatgacgggccttcctgg

SEQ ID NO: 2931376 - DNA, 25 bp, Homo sapien
tggcttttgtgccatgacgggcctt

SEQ ID NO: 2931377 - DNA, 25 bp, Homo sapien
cccaggtgtgcaccctgcccaggac

SEQ ID NO: 2931378 - DNA, 25 bp, Homo sapien
cagcttgcccaggtgtgcaccctgc

SEQ ID NO: 2931379 - DNA, 25 bp, Homo sapien
gcccaggtgtgcaccctgcccagga

SEQ ID NO: 2931380 - DNA, 25 bp, Homo sapien
cttgcccaggtgtgcaccctgccca

SEQ ID NO: 2931381 - DNA, 25 bp, Homo sapien
caagatgacaattttgatgtatttg

SEQ ID NO: 2931382 - DNA, 25 bp, Homo sapien
acaagatgacaattttgatgtattt

SEQ ID NO: 2931383 - DNA, 25 bp, Homo sapien
tacaagatgacaattttgatgtatt

SEQ ID NO: 2931384 - DNA, 25 bp, Homo sapien
ttacaagatgacaattttgatgtat

SEQ ID NO: 2931385 - DNA, 25 bp, Homo sapien
ggtgtccactgggtctgtcttctag

SEQ ID NO: 2931386 - DNA, 25 bp, Homo sapien
accacggtgtccactgggtctgtct

SEQ ID NO: 2931387 - DNA, 25 bp, Homo sapien
acggtgtccactgggtctgtcttct

SEQ ID NO: 2931388 - DNA, 25 bp, Homo sapien
tcaccacggtgtccactgggtctgt

SEQ ID NO: 2931389 - DNA, 25 bp, Homo sapien
agtagttgaaggataggccaggatg

SEQ ID NO: 2931390 - DNA, 25 bp, Homo sapien
gcaggtccacctcccatgcatcaga

SEQ ID NO: 2931391 - DNA, 25 bp, Homo sapien
gataggccaggatgtcaaagatcat

SEQ ID NO: 2931392 - DNA, 25 bp, Homo sapien
ggcatgcaggtccacctcccatgca

SEQ ID NO: 2931393 - DNA, 25 bp, Homo sapien
cagccaaagggagggttggctcatt

SEQ ID NO: 2931394 - DNA, 25 bp, Homo sapien
tgaggagtgacccaagaacccatgg

SEQ ID NO: 2931395 - DNA, 25 bp, Homo sapien
catttatcacgtctgcagccaaagg

SEQ ID NO: 2931396 - DNA, 25 bp, Homo sapien
tcattggcacagaggctggtgacca

SEQ ID NO: 2931397 - DNA, 25 bp, Homo sapien
ggattgaggggcgtgcccccagaaa

SEQ ID NO: 2931398 - DNA, 25 bp, Homo sapien
gaggattgaggggcgtgcccccaga

SEQ ID NO: 2931399 - DNA, 25 bp, Homo sapien
attgaggggcgtgcccccagaaaca

SEQ ID NO: 2931400 - DNA, 25 bp, Homo sapien
gggaggattgaggggcgtgccccca

SEQ ID NO: 2931401 - DNA, 25 bp, Homo sapien
tcagggcacagttattggggttctg

SEQ ID NO: 2931402 - DNA, 25 bp, Homo sapien
agggtcgcctccaggttctgctttg

SEQ ID NO: 2931403 - DNA, 25 bp, Homo sapien
acagttattggggttctggtggcca

SEQ ID NO: 2931404 - DNA, 25 bp, Homo sapien
ggcacagttattggggttctggtgg

SEQ ID NO: 2931405 - DNA, 25 bp, Homo sapien
ccagagatactcctctcccagaaag

SEQ ID NO: 2931406 - DNA, 25 bp, Homo sapien
agagatactcctctcccagaaaggc

SEQ ID NO: 2931407 - DNA, 25 bp, Homo sapien
ttagtcttccaccgcccagagatac

SEQ ID NO: 2931408 - DNA, 25 bp, Homo sapien
tcttccaccgcccagagatactcct

SEQ ID NO: 2931409 - DNA, 25 bp, Homo sapien
caccacatctggacgttaggcctca

SEQ ID NO: 2931410 - DNA, 25 bp, Homo sapien
gaagctaaatcagcagaagctgtcc

SEQ ID NO: 2931411 - DNA, 25 bp, Homo sapien
tttccccaactggacaacccagatg

SEQ ID NO: 2931412 - DNA, 25 bp, Homo sapien
ccagataagggatcatcagggctcc

SEQ ID NO: 2931413 - DNA, 25 bp, Homo sapien
aaggcccgcctcacagataacgtgt

SEQ ID NO: 2931414 - DNA, 25 bp, Homo sapien
caattcttgagccatagcctccagc

SEQ ID NO: 2931415 - DNA, 25 bp, Homo sapien
cctggcttgggtgcttggaccttta

SEQ ID NO: 2931416 - DNA, 25 bp, Homo sapien
ctggcaaagagtatgtcaaggcccg

SEQ ID NO: 2931417 - DNA, 25 bp, Homo sapien
cggccgcccgtatatcagggccagt

SEQ ID NO: 2931418 - DNA, 25 bp, Homo sapien
cagggccagtgttgtcttgttgctc

SEQ ID NO: 2931419 - DNA, 25 bp, Homo sapien
gggacggcagctctcagatgtgtcc

SEQ ID NO: 2931420 - DNA, 25 bp, Homo sapien
gatgtgtcctcatccagcacaggga

SEQ ID NO: 2931421 - DNA, 25 bp, Homo sapien
gtgcagggatagatgaagacacaga

SEQ ID NO: 2931422 - DNA, 25 bp, Homo sapien
aggaggtgcagggatagatgaagac

SEQ ID NO: 2931423 - DNA, 25 bp, Homo sapien
aggtgcagggatagatgaagacaca

SEQ ID NO: 2931424 - DNA, 25 bp, Homo sapien
gaggtgcagggatagatgaagacac

SEQ ID NO: 2931425 - DNA, 25 bp, Homo sapien
tcatctcatctatgggtattttgtc

SEQ ID NO: 2931426 - DNA, 25 bp, Homo sapien
tctgaccacggaatacattactctg

SEQ ID NO: 2931427 - DNA, 25 bp, Homo sapien
cagggagcagaagacgttctgacca

SEQ ID NO: 2931428 - DNA, 25 bp, Homo sapien
gcagaagacgttctgaccacggaat

SEQ ID NO: 2931429 - DNA, 25 bp, Homo sapien
gacatgatgccgcaatacccgaata

SEQ ID NO: 2931430 - DNA, 25 bp, Homo sapien
agtgttgccaccctccgacatgatg

SEQ ID NO: 2931431 - DNA, 25 bp, Homo sapien
cacggatgacaattgtaagtgttgc

SEQ ID NO: 2931432 - DNA, 25 bp, Homo sapien
aatacccgaatacgccaatgccagc

SEQ ID NO: 2931433 - DNA, 25 bp, Homo sapien
tgaaggataagtctctttctctata

SEQ ID NO: 2931434 - DNA, 25 bp, Homo sapien
gacctgcacagcccctgaaagttca

SEQ ID NO: 2931435 - DNA, 25 bp, Homo sapien
gaaagttcaactccagaagaatcat

SEQ ID NO: 2931436 - DNA, 25 bp, Homo sapien
tctctataaagcagcccccgggaga

SEQ ID NO: 2931437 - DNA, 25 bp, Homo sapien
cagctgatggtgtttacaaaggtcc

SEQ ID NO: 2931438 - DNA, 25 bp, Homo sapien
ctgatggtgtttacaaaggtccagc

SEQ ID NO: 2931439 - DNA, 25 bp, Homo sapien
ctctcagctgatggtgtttacaaag

SEQ ID NO: 2931440 - DNA, 25 bp, Homo sapien
tctcagctgatggtgtttacaaagg

SEQ ID NO: 2931441 - DNA, 25 bp, Homo sapien
gagacaggcatgtaccctacgctgc

SEQ ID NO: 2931442 - DNA, 25 bp, Homo sapien
tccatcctgaggagcacactttctc

SEQ ID NO: 2931443 - DNA, 25 bp, Homo sapien
atgtaccctacgctgcacagagagc

SEQ ID NO: 2931444 - DNA, 25 bp, Homo sapien
gacagagacaggcatgtaccctacg

SEQ ID NO: 2931445 - DNA, 25 bp, Homo sapien
tagaaactggaggatattcagcatc

SEQ ID NO: 2931446 - DNA, 25 bp, Homo sapien
ttttgaaatgttccgcggcttcctg

SEQ ID NO: 2931447 - DNA, 25 bp, Homo sapien
gtccctaggctgtactgtttcatca

SEQ ID NO: 2931448 - DNA, 25 bp, Homo sapien
ccagctccagattggatggtagaaa

SEQ ID NO: 2931449 - DNA, 25 bp, Homo sapien
ctttctgtatagtgaaaggcttgta

SEQ ID NO: 2931450 - DNA, 25 bp, Homo sapien
cagctgttggttgcccagcatctcg

SEQ ID NO: 2931451 - DNA, 25 bp, Homo sapien
tcaggcttgtctcggtttttacagg

SEQ ID NO: 2931452 - DNA, 25 bp, Homo sapien
caggggacagactgaatctaagcag

SEQ ID NO: 2931453 - DNA, 25 bp, Homo sapien
aagcagtctggatttgactgccagc

SEQ ID NO: 2931454 - DNA, 25 bp, Homo sapien
catttggggtgaggctccatttggg

SEQ ID NO: 2931455 - DNA, 25 bp, Homo sapien
tgggcctggtagaacatcttcaggg

SEQ ID NO: 2931456 - DNA, 25 bp, Homo sapien
agggtggctacctgtcctgcaccag

SEQ ID NO: 2931457 - DNA, 25 bp, Homo sapien
caaataccagaaggcatttggggtg

SEQ ID NO: 2931458 - DNA, 25 bp, Homo sapien
agcttgcttgcaatcccactgtggg

SEQ ID NO: 2931459 - DNA, 25 bp, Homo sapien
tgtgctgctgtagactccataatca

SEQ ID NO: 2931460 - DNA, 25 bp, Homo sapien
gaagaagccaatatagccccgctgg

SEQ ID NO: 2931461 - DNA, 25 bp, Homo sapien
tctgtgacttaggactgaaagactc

SEQ ID NO: 2931462 - DNA, 25 bp, Homo sapien
tgtgcgtagagtgtttggtttggcc

SEQ ID NO: 2931463 - DNA, 25 bp, Homo sapien
ggcttccagggctgtgcgtagagtg

SEQ ID NO: 2931464 - DNA, 25 bp, Homo sapien
ttccagggctgtgcgtagagtgttt

SEQ ID NO: 2931465 - DNA, 25 bp, Homo sapien
ctgtgcgtagagtgtttggtttggc

SEQ ID NO: 2931466 - DNA, 25 bp, Homo sapien
tctgcccaagcaggtggtcatacag

SEQ ID NO: 2931467 - DNA, 25 bp, Homo sapien
tgcccaagcaggtggtcatacaggg

SEQ ID NO: 2931468 - DNA, 25 bp, Homo sapien
caagcaggtggtcatacagggcaaa

SEQ ID NO: 2931469 - DNA, 25 bp, Homo sapien
cttctgcccaagcaggtggtcatac

SEQ ID NO: 2931470 - DNA, 25 bp, Homo sapien
tatgaacgacgatgatactgatgtt

SEQ ID NO: 2931471 - DNA, 25 bp, Homo sapien
gatgtttgccctgattccgcatgct

SEQ ID NO: 2931472 - DNA, 25 bp, Homo sapien
gccctgattccgcatgctgctggat

SEQ ID NO: 2931473 - DNA, 25 bp, Homo sapien
ctatgaacgacgatgatactgatgt

SEQ ID NO: 2931474 - DNA, 25 bp, Homo sapien
gggacagggtagcaccatttgattg

SEQ ID NO: 2931475 - DNA, 25 bp, Homo sapien
gtagcaccatttgattgctgtggcc

SEQ ID NO: 2931476 - DNA, 25 bp, Homo sapien
gcggtggttaaagtactgcctctgg

SEQ ID NO: 2931477 - DNA, 25 bp, Homo sapien
ctttctgagcggtggttaaagtact

SEQ ID NO: 2931478 - DNA, 25 bp, Homo sapien
aaacactaaatgatgctttggaggc

SEQ ID NO: 2931479 - DNA, 25 bp, Homo sapien
cacttgctgctgcttcggaatgtac

SEQ ID NO: 2931480 - DNA, 25 bp, Homo sapien
tcggaatgtactcaggaaagctttc

SEQ ID NO: 2931481 - DNA, 25 bp, Homo sapien
ccaggcaattaggatgcccaagatc

SEQ ID NO: 2931482 - DNA, 25 bp, Homo sapien
ggaaggaccagattaaggtggccat

SEQ ID NO: 2931483 - DNA, 25 bp, Homo sapien
gctggaaggaccagattaaggtggc

SEQ ID NO: 2931484 - DNA, 25 bp, Homo sapien
ctggaaggaccagattaaggtggcc

SEQ ID NO: 2931485 - DNA, 25 bp, Homo sapien
tggaaggaccagattaaggtggcca

SEQ ID NO: 2931486 - DNA, 25 bp, Homo sapien
cggtgaggcttatctccttagtgga

SEQ ID NO: 2931487 - DNA, 25 bp, Homo sapien
gacttccatctgactaacggtgagg

SEQ ID NO: 2931488 - DNA, 25 bp, Homo sapien
tgtccactggtagtttgaatcctgg

SEQ ID NO: 2931489 - DNA, 25 bp, Homo sapien
tctctgattagcatttgcaggtggt

SEQ ID NO: 2931490 - DNA, 25 bp, Homo sapien
agagcccagggctactgagaagcag

SEQ ID NO: 2931491 - DNA, 25 bp, Homo sapien
gctactgagaagcagaggcaagatc

SEQ ID NO: 2931492 - DNA, 25 bp, Homo sapien
ccagggctactgagaagcagaggca

SEQ ID NO: 2931493 - DNA, 25 bp, Homo sapien
ccagagcccagggctactgagaagc

SEQ ID NO: 2931494 - DNA, 25 bp, Homo sapien
tctcttccagggtaagagagctagg

SEQ ID NO: 2931495 - DNA, 25 bp, Homo sapien
aaaggaggaatggtccaatctcctt

SEQ ID NO: 2931496 - DNA, 25 bp, Homo sapien
gataggcgccgtcaagatttgcttc

SEQ ID NO: 2931497 - DNA, 25 bp, Homo sapien
caatctccttagccaaaatgctctc

SEQ ID NO: 2931498 - DNA, 25 bp, Homo sapien
ctagagtgcataggtaaggtgtaag

SEQ ID NO: 2931499 - DNA, 25 bp, Homo sapien
aggtaaggtgtaagacagtctgctc

SEQ ID NO: 2931500 - DNA, 25 bp, Homo sapien
ggtaaggtgtaagacagtctgctct

SEQ ID NO: 2931501 - DNA, 25 bp, Homo sapien
gtaaggtgtaagacagtctgctctg

SEQ ID NO: 2931502 - DNA, 25 bp, Homo sapien
ctaggtattaaggccttgtaacaat

SEQ ID NO: 2931503 - DNA, 25 bp, Homo sapien
taggtattaaggccttgtaacaatc

SEQ ID NO: 2931504 - DNA, 25 bp, Homo sapien
ggtattaaggccttgtaacaatcca

SEQ ID NO: 2931505 - DNA, 25 bp, Homo sapien
tattaaggccttgtaacaatccatt

SEQ ID NO: 2931506 - DNA, 25 bp, Homo sapien
attctggtttccgtcgggcgaggca

SEQ ID NO: 2931507 - DNA, 25 bp, Homo sapien
cgattctggtttccgtcgggcgagg

SEQ ID NO: 2931508 - DNA, 25 bp, Homo sapien
ttctggtttccgtcgggcgaggcat

SEQ ID NO: 2931509 - DNA, 25 bp, Homo sapien
acgattctggtttccgtcgggcgag

SEQ ID NO: 2931510 - DNA, 25 bp, Homo sapien
ttcctgatttatcactcgcttccct

SEQ ID NO: 2931511 - DNA, 25 bp, Homo sapien
tcttcctgatttatcactcgcttcc

SEQ ID NO: 2931512 - DNA, 25 bp, Homo sapien
taaccgccgcaattcttcctgattt

SEQ ID NO: 2931513 - DNA, 25 bp, Homo sapien
tcctgatttatcactcgcttccctg

SEQ ID NO: 2931514 - DNA, 25 bp, Homo sapien
tatccgtttccgactggtgctcaga

SEQ ID NO: 2931515 - DNA, 25 bp, Homo sapien
taaccggagtgttacacagggcaca

SEQ ID NO: 2931516 - DNA, 25 bp, Homo sapien
caaacggttgtacttcgcgaatgga

SEQ ID NO: 2931517 - DNA, 25 bp, Homo sapien
tcttgacggaatgaggcgctgaact

SEQ ID NO: 2931518 - DNA, 25 bp, Homo sapien
catcttcataatcggggagtaaact

SEQ ID NO: 2931519 - DNA, 25 bp, Homo sapien
tcggggagtaaactgagtcctgaag

SEQ ID NO: 2931520 - DNA, 25 bp, Homo sapien
tcataatcggggagtaaactgagtc

SEQ ID NO: 2931521 - DNA, 25 bp, Homo sapien
ctcatcttcataatcggggagtaaa

SEQ ID NO: 2931522 - DNA, 25 bp, Homo sapien
gaggaaactgagtgctccttgccct

SEQ ID NO: 2931523 - DNA, 25 bp, Homo sapien
tacttgttacctcccgtgaagagga

SEQ ID NO: 2931524 - DNA, 25 bp, Homo sapien
tccttgccctgtgcgtcggagagcg

SEQ ID NO: 2931525 - DNA, 25 bp, Homo sapien
ctaaagaaatcgtttggcagcacac

SEQ ID NO: 2931526 - DNA, 25 bp, Homo sapien
gcatctacctcagggtcgtcaaaaa

SEQ ID NO: 2931527 - DNA, 25 bp, Homo sapien
tcctcttcggcaactatggcttcgg

SEQ ID NO: 2931528 - DNA, 25 bp, Homo sapien
catggctttttggaattcgtcccac

SEQ ID NO: 2931529 - DNA, 25 bp, Homo sapien
catcctggcgattccgtagcttttc

SEQ ID NO: 2931530 - DNA, 25 bp, Homo sapien
cagtttagcaatccaggtacccaaa

SEQ ID NO: 2931531 - DNA, 25 bp, Homo sapien
caaatcttgaggcatgaagtaaccg

SEQ ID NO: 2931532 - DNA, 25 bp, Homo sapien
gaagtaaccgctatactactgagag

SEQ ID NO: 2931533 - DNA, 25 bp, Homo sapien
aaattttccaaagtgctgtagctca

SEQ ID NO: 2931534 - DNA, 25 bp, Homo sapien
cagattttacaacgaaattatacag

SEQ ID NO: 2931535 - DNA, 25 bp, Homo sapien
cagaatacagatttaactatgtaca

SEQ ID NO: 2931536 - DNA, 25 bp, Homo sapien
attatacagttaagtctgtcgtgga

SEQ ID NO: 2931537 - DNA, 25 bp, Homo sapien
aagtctgtcgtggaaatgttggcat

SEQ ID NO: 2931538 - DNA, 25 bp, Homo sapien
caatagataggacctgcaaacaagg

SEQ ID NO: 2931539 - DNA, 25 bp, Homo sapien
tagggttcagaagatacatacattc

SEQ ID NO: 2931540 - DNA, 25 bp, Homo sapien
gagtacctcaatctctaaaggaagg

SEQ ID NO: 2931541 - DNA, 25 bp, Homo sapien
tcatctgaaagtttgccggttggtc

SEQ ID NO: 2931542 - DNA, 25 bp, Homo sapien
tgctagcaaaatggaggtgcagcca

SEQ ID NO: 2931543 - DNA, 25 bp, Homo sapien
gtgtataccaaaccctagcatagtg

SEQ ID NO: 2931544 - DNA, 25 bp, Homo sapien
tattattaataacccgatcagctgg

SEQ ID NO: 2931545 - DNA, 25 bp, Homo sapien
tggtatcaaggctgcccaagagctc

SEQ ID NO: 2931546 - DNA, 25 bp, Homo sapien
tccctcttatttcgaggagtataga

SEQ ID NO: 2931547 - DNA, 25 bp, Homo sapien
ttttcttgagtgaatcttgtgttct

SEQ ID NO: 2931548 - DNA, 25 bp, Homo sapien
tatttcgaggagtatagaagctgtg

SEQ ID NO: 2931549 - DNA, 25 bp, Homo sapien
cttgagtgaatcttgtgttctaaaa

SEQ ID NO: 2931550 - DNA, 25 bp, Homo sapien
ccattcctgtatattgggagagcct

SEQ ID NO: 2931551 - DNA, 25 bp, Homo sapien
cattcctgtatattgggagagcctc

SEQ ID NO: 2931552 - DNA, 25 bp, Homo sapien
cttctctagatgtgccactttagcc

SEQ ID NO: 2931553 - DNA, 25 bp, Homo sapien
cactttagccctcttgaagcattcc

SEQ ID NO: 2931554 - DNA, 25 bp, Homo sapien
tctgccacgtgggtcgtagttgcat

SEQ ID NO: 2931555 - DNA, 25 bp, Homo sapien
gtcgtagttgcattctgcctgccct

SEQ ID NO: 2931556 - DNA, 25 bp, Homo sapien
agcgcgcaggcgcaagagccaaggc

SEQ ID NO: 2931557 - DNA, 25 bp, Homo sapien
cgtgggtcgtagttgcattctgcct

SEQ ID NO: 2931558 - DNA, 25 bp, Homo sapien
acgacggttggagcgcctgtctctt

SEQ ID NO: 2931559 - DNA, 25 bp, Homo sapien
cgcgggcagcccacgacggttggag

SEQ ID NO: 2931560 - DNA, 25 bp, Homo sapien
ttgctcattacaggccgcgggcagc

SEQ ID NO: 2931561 - DNA, 25 bp, Homo sapien
cgtaggcctcggaacttgctcatta

SEQ ID NO: 2931562 - DNA, 25 bp, Homo sapien
ctgcctctccggctccggcgctcac

SEQ ID NO: 2931563 - DNA, 25 bp, Homo sapien
gaggcagaaaggagcgctcctccac

SEQ ID NO: 2931564 - DNA, 25 bp, Homo sapien
cgctcccggttcagcgcaggaggac

SEQ ID NO: 2931565 - DNA, 25 bp, Homo sapien
ggaagtgatcaaggctccctgagtc

SEQ ID NO: 2931566 - DNA, 25 bp, Homo sapien
cccgagaaggaaatcgctgaggcct

SEQ ID NO: 2931567 - DNA, 25 bp, Homo sapien
ttacaaggaatccatgaatgcgctg

SEQ ID NO: 2931568 - DNA, 25 bp, Homo sapien
tacaaggaatccatgaatgcgctgg

SEQ ID NO: 2931569 - DNA, 25 bp, Homo sapien
attacaaggaatccatgaatgcgct

SEQ ID NO: 2931570 - DNA, 25 bp, Homo sapien
acaaggaatccatgaatgcgctggt

SEQ ID NO: 2931571 - DNA, 25 bp, Homo sapien
cgtgatcttagatggcttccctgga

SEQ ID NO: 2931572 - DNA, 25 bp, Homo sapien
tacatcacgccagtgatgttttcgg

SEQ ID NO: 2931573 - DNA, 25 bp, Homo sapien
aacaaggtaggtggcacgtgatctt

SEQ ID NO: 2931574 - DNA, 25 bp, Homo sapien
cggaataggcacagttcttttcggc

SEQ ID NO: 2931575 - DNA, 25 bp, Homo sapien
gctgtgccacgcttggcatagtcca

SEQ ID NO: 2931576 - DNA, 25 bp, Homo sapien
tagtccacacagaaccgttgctcag

SEQ ID NO: 2931577 - DNA, 25 bp, Homo sapien
tgggcaccactttgccaattcggca

SEQ ID NO: 2931578 - DNA, 25 bp, Homo sapien
tcggcatacgcccttcacaatcttt

SEQ ID NO: 2931579 - DNA, 25 bp, Homo sapien
tggagaagtcacctggccagtggtt

SEQ ID NO: 2931580 - DNA, 25 bp, Homo sapien
agtggttgtcaacttagcctggaca

SEQ ID NO: 2931581 - DNA, 25 bp, Homo sapien
ctttggtgtacctgctgccttagaa

SEQ ID NO: 2931582 - DNA, 25 bp, Homo sapien
aatgaggcgcctttcactggagaag

SEQ ID NO: 2931583 - DNA, 25 bp, Homo sapien
acagagatgaattcattctgccttt

SEQ ID NO: 2931584 - DNA, 25 bp, Homo sapien
ctgttggagaaacaacagagatgaa

SEQ ID NO: 2931585 - DNA, 25 bp, Homo sapien
ggagaaacaacagagatgaattcat

SEQ ID NO: 2931586 - DNA, 25 bp, Homo sapien
acaacagagatgaattcattctgcc

SEQ ID NO: 2931587 - DNA, 25 bp, Homo sapien
gtagcagacagtccttatgcctggg

SEQ ID NO: 2931588 - DNA, 25 bp, Homo sapien
gttgtagctaggattatcggccacc

SEQ ID NO: 2931589 - DNA, 25 bp, Homo sapien
gatctgggtcttcgtgttgtagcta

SEQ ID NO: 2931590 - DNA, 25 bp, Homo sapien
gccaccatggcgcataactttcgaa

SEQ ID NO: 2931591 - DNA, 25 bp, Homo sapien
caaataggatgggttcttctggcct

SEQ ID NO: 2931592 - DNA, 25 bp, Homo sapien
gaggaagacagatgccaaagtgctc

SEQ ID NO: 2931593 - DNA, 25 bp, Homo sapien
tgggatcccgggcaactatacagct

SEQ ID NO: 2931594 - DNA, 25 bp, Homo sapien
tatacagctcacatgcccaggaagg

SEQ ID NO: 2931595 - DNA, 25 bp, Homo sapien
taggtcccgtgccatatcatctggg

SEQ ID NO: 2931596 - DNA, 25 bp, Homo sapien
gtcttaatgactcctggcagcagca

SEQ ID NO: 2931597 - DNA, 25 bp, Homo sapien
ttaggtacacatcaccgtggaaacc

SEQ ID NO: 2931598 - DNA, 25 bp, Homo sapien
cagcagcagcttcactgttaggtac

SEQ ID NO: 2931599 - DNA, 25 bp, Homo sapien
ctggaatgtagcctaccctccctcc

SEQ ID NO: 2931600 - DNA, 25 bp, Homo sapien
tggaatgtagcctaccctccctccc

SEQ ID NO: 2931601 - DNA, 25 bp, Homo sapien
tgtctccaaaaaccaaaatgccact

SEQ ID NO: 2931602 - DNA, 25 bp, Homo sapien
gtctccaaaaaccaaaatgccactg

SEQ ID NO: 2931603 - DNA, 25 bp, Homo sapien
ctgtctccaaaaaccaaaatgccac

SEQ ID NO: 2931604 - DNA, 25 bp, Homo sapien
gggaaagacttgctctgctcaaaga

SEQ ID NO: 2931605 - DNA, 25 bp, Homo sapien
ctctgattgtctctgacacgtcacc

SEQ ID NO: 2931606 - DNA, 25 bp, Homo sapien
gaaagacttgctctgctcaaagaag

SEQ ID NO: 2931607 - DNA, 25 bp, Homo sapien
ctgctcaaagaagactctgattgtc

SEQ ID NO: 2931608 - DNA, 25 bp, Homo sapien
tagggcctgttgctgctcatcctcc

SEQ ID NO: 2931609 - DNA, 25 bp, Homo sapien
ctgtagggcctgttgctgctcatcc

SEQ ID NO: 2931610 - DNA, 25 bp, Homo sapien
agccgcagaaggaactcatccactt

SEQ ID NO: 2931611 - DNA, 25 bp, Homo sapien
tgagcttggacagccgcagaaggaa

SEQ ID NO: 2931612 - DNA, 25 bp, Homo sapien
cagatcatgtttgatcaacctgatg

SEQ ID NO: 2931613 - DNA, 25 bp, Homo sapien
acatgttttgcacctgagttcatct

SEQ ID NO: 2931614 - DNA, 25 bp, Homo sapien
gagttcatcttcagatcatgtttga

SEQ ID NO: 2931615 - DNA, 25 bp, Homo sapien
gatgatgcatttaaggtcattggct

SEQ ID NO: 2931616 - DNA, 25 bp, Homo sapien
tcctgcgcgttgtgaaggacccgct

SEQ ID NO: 2931617 - DNA, 25 bp, Homo sapien
gcacaggtgtcatcagcgaggcctg

SEQ ID NO: 2931618 - DNA, 25 bp, Homo sapien
ctttgaaggcttcataggcattggg

SEQ ID NO: 2931619 - DNA, 25 bp, Homo sapien
catcctgcaggttgcgcgaggcttt

SEQ ID NO: 2931620 - DNA, 25 bp, Homo sapien
aaagcctggagactttcaatgaggg

SEQ ID NO: 2931621 - DNA, 25 bp, Homo sapien
gcaaagcctggagactttcaatgag

SEQ ID NO: 2931622 - DNA, 25 bp, Homo sapien
aaagcaaagcctggagactttcaat

SEQ ID NO: 2931623 - DNA, 25 bp, Homo sapien
aagcaaagcctggagactttcaatg

SEQ ID NO: 2931624 - DNA, 25 bp, Homo sapien
gggacatttcttcattgcatactca

SEQ ID NO: 2931625 - DNA, 25 bp, Homo sapien
tggactcgctctccatcgtacttga

SEQ ID NO: 2931626 - DNA, 25 bp, Homo sapien
cgtacttgatctcagagaacatgcc

SEQ ID NO: 2931627 - DNA, 25 bp, Homo sapien
gaagtggtctccattcttatgcacc

SEQ ID NO: 2931628 - DNA, 25 bp, Homo sapien
gcagtggtttgcctgtcttgttgtc

SEQ ID NO: 2931629 - DNA, 25 bp, Homo sapien
cctggggaatgtagtccttaaagtg

SEQ ID NO: 2931630 - DNA, 25 bp, Homo sapien
cccaaagggcagtggtttgcctgtc

SEQ ID NO: 2931631 - DNA, 25 bp, Homo sapien
tggtttgcctgtcttgttgtcaatc

SEQ ID NO: 2931632 - DNA, 25 bp, Homo sapien
agaccgcagcgtgcacccacatgta

SEQ ID NO: 2931633 - DNA, 25 bp, Homo sapien
caggtcagaagcgaagaataagggc

SEQ ID NO: 2931634 - DNA, 25 bp, Homo sapien
aatccaaaccagaaacaggtcagaa

SEQ ID NO: 2931635 - DNA, 25 bp, Homo sapien
taagggccacactaagggatatttc

SEQ ID NO: 2931636 - DNA, 25 bp, Homo sapien
aaaacaaacaggcagacattagcat

SEQ ID NO: 2931637 - DNA, 25 bp, Homo sapien
gctgacatcattaaagtagatacaa

SEQ ID NO: 2931638 - DNA, 25 bp, Homo sapien
caaacaggcagacattagcatcctg

SEQ ID NO: 2931639 - DNA, 25 bp, Homo sapien
aacaaacaggcagacattagcatcc

SEQ ID NO: 2931640 - DNA, 25 bp, Homo sapien
ggtttctcaggcacaagcatatgga

SEQ ID NO: 2931641 - DNA, 25 bp, Homo sapien
caagggctccatcgtgaccgaagat

SEQ ID NO: 2931642 - DNA, 25 bp, Homo sapien
tgctgtcaagggctacaagggctcc

SEQ ID NO: 2931643 - DNA, 25 bp, Homo sapien
tctacttcatcaagcgagccaaggg

SEQ ID NO: 2931644 - DNA, 25 bp, Homo sapien
tcatgaagaaacttccgccgctcac

SEQ ID NO: 2931645 - DNA, 25 bp, Homo sapien
ttctgagaacatgatccggtttgga

SEQ ID NO: 2931646 - DNA, 25 bp, Homo sapien
aaacttccgccgctcacacagaggt

SEQ ID NO: 2931647 - DNA, 25 bp, Homo sapien
gaatttcaaccatgttgtcatgaag

SEQ ID NO: 2931648 - DNA, 25 bp, Homo sapien
ccttctgggtgaagactagcaggca

SEQ ID NO: 2931649 - DNA, 25 bp, Homo sapien
tccagtcgcagttgacccaaggagt

SEQ ID NO: 2931650 - DNA, 25 bp, Homo sapien
gcttctcatcccaaacagagggctg

SEQ ID NO: 2931651 - DNA, 25 bp, Homo sapien
tcaaaggccaacattatcaggaggc

SEQ ID NO: 2931652 - DNA, 25 bp, Homo sapien
cacccgggttatcatgtcagccaag

SEQ ID NO: 2931653 - DNA, 25 bp, Homo sapien
ggatcacccgggttatcatgtcagc

SEQ ID NO: 2931654 - DNA, 25 bp, Homo sapien
ccgggttatcatgtcagccaagtcc

SEQ ID NO: 2931655 - DNA, 25 bp, Homo sapien
tcacccgggttatcatgtcagccaa

SEQ ID NO: 2931656 - DNA, 25 bp, Homo sapien
tcttcactttcagccagtgccgctt

SEQ ID NO: 2931657 - DNA, 25 bp, Homo sapien
ttgctcccttgcccatagaaggctc

SEQ ID NO: 2931658 - DNA, 25 bp, Homo sapien
ctttcttcactttcagccagtgccg

SEQ ID NO: 2931659 - DNA, 25 bp, Homo sapien
ctttcagccagtgccgcttcccagg

SEQ ID NO: 2931660 - DNA, 25 bp, Homo sapien
cgaaataattggtggtaagcgtcct

SEQ ID NO: 2931661 - DNA, 25 bp, Homo sapien
taagcgtccttctgctaggctagca

SEQ ID NO: 2931662 - DNA, 25 bp, Homo sapien
gggataatcacacccaacctgttgg

SEQ ID NO: 2931663 - DNA, 25 bp, Homo sapien
gacttcggaagtcataactggccat

SEQ ID NO: 2931664 - DNA, 25 bp, Homo sapien
cagggtcgtagcagcccatgaggaa

SEQ ID NO: 2931665 - DNA, 25 bp, Homo sapien
catgaggaagattgacatcatgccg

SEQ ID NO: 2931666 - DNA, 25 bp, Homo sapien
tagttcattctgcaggcgggcaagc

SEQ ID NO: 2931667 - DNA, 25 bp, Homo sapien
ggcctcctgcacacttggtgactgt

SEQ ID NO: 2931668 - DNA, 25 bp, Homo sapien
ggatagtagatcttgttgaccttca

SEQ ID NO: 2931669 - DNA, 25 bp, Homo sapien
cttcaaccagctgggtattttgctg

SEQ ID NO: 2931670 - DNA, 25 bp, Homo sapien
agtcaggatagtagatcttgttgac

SEQ ID NO: 2931671 - DNA, 25 bp, Homo sapien
gatcttgttgaccttcaaccagctg

SEQ ID NO: 2931672 - DNA, 25 bp, Homo sapien
cagtccttatcatctcggattcggg

SEQ ID NO: 2931673 - DNA, 25 bp, Homo sapien
agggaatcggatggagatcccgtca

SEQ ID NO: 2931674 - DNA, 25 bp, Homo sapien
tatcatctcggattcgggtgcagcg

SEQ ID NO: 2931675 - DNA, 25 bp, Homo sapien
agctgtatgagcctccgatttggag

SEQ ID NO: 2931676 - DNA, 25 bp, Homo sapien
tcttattccccagactaaaggctgc

SEQ ID NO: 2931677 - DNA, 25 bp, Homo sapien
tgaatggtctagatgcccaaggctc

SEQ ID NO: 2931678 - DNA, 25 bp, Homo sapien
gcaaatgcaaggttctctactcaga

SEQ ID NO: 2931679 - DNA, 25 bp, Homo sapien
agaaggaggtctagtgctgtgcccc

SEQ ID NO: 2931680 - DNA, 25 bp, Homo sapien
tctccagccactacagtgaagtctg

SEQ ID NO: 2931681 - DNA, 25 bp, Homo sapien
tctccttggacaactggtacagttc

SEQ ID NO: 2931682 - DNA, 25 bp, Homo sapien
gagggacccttattctcttcactgc

SEQ ID NO: 2931683 - DNA, 25 bp, Homo sapien
tcttcactgctaccccctgtagtgg

SEQ ID NO: 2931684 - DNA, 25 bp, Homo sapien
tgctgttggagttactcagcttccc

SEQ ID NO: 2931685 - DNA, 25 bp, Homo sapien
catctttgctgttggagttactcag

SEQ ID NO: 2931686 - DNA, 25 bp, Homo sapien
tgttggagttactcagcttcccttc

SEQ ID NO: 2931687 - DNA, 25 bp, Homo sapien
tctttgctgttggagttactcagct

SEQ ID NO: 2931688 - DNA, 25 bp, Homo sapien
gaaggctttgcagtctgcatgttgc

SEQ ID NO: 2931689 - DNA, 25 bp, Homo sapien
gcggaaggctttgcagtctgcatgt

SEQ ID NO: 2931690 - DNA, 25 bp, Homo sapien
cggaaggctttgcagtctgcatgtt

SEQ ID NO: 2931691 - DNA, 25 bp, Homo sapien
agcggaaggctttgcagtctgcatg

SEQ ID NO: 2931692 - DNA, 25 bp, Homo sapien
agaagactttgtggccagcttctcc

SEQ ID NO: 2931693 - DNA, 25 bp, Homo sapien
cccctactttcactggagaagactt

SEQ ID NO: 2931694 - DNA, 25 bp, Homo sapien
cctactttcactggagaagactttg

SEQ ID NO: 2931695 - DNA, 25 bp, Homo sapien
actttcactggagaagactttgtgg

SEQ ID NO: 2931696 - DNA, 25 bp, Homo sapien
cagggaagaggtttagccgatgttc

SEQ ID NO: 2931697 - DNA, 25 bp, Homo sapien
tgggaacacaacctgggctaaactg

SEQ ID NO: 2931698 - DNA, 25 bp, Homo sapien
taaactggcccacgtggtgtgttgc

SEQ ID NO: 2931699 - DNA, 25 bp, Homo sapien
caacaagaggacatagggtgagcag

SEQ ID NO: 2931700 - DNA, 25 bp, Homo sapien
tgcctgctggcacagttcttcctct

SEQ ID NO: 2931701 - DNA, 25 bp, Homo sapien
tctcctgcctgctggcacagttctt

SEQ ID NO: 2931702 - DNA, 25 bp, Homo sapien
ttcctctctgctcactggctggccg

SEQ ID NO: 2931703 - DNA, 25 bp, Homo sapien
ctctctgctcactggctggccgcct

SEQ ID NO: 2931704 - DNA, 25 bp, Homo sapien
tctctcctggctaggccgggctgtt

SEQ ID NO: 2931705 - DNA, 25 bp, Homo sapien
gtctctcctggctaggccgggctgt

SEQ ID NO: 2931706 - DNA, 25 bp, Homo sapien
gcagtctctcctggctaggccgggc

SEQ ID NO: 2931707 - DNA, 25 bp, Homo sapien
tgctcaggagatgttgccaaaccca

SEQ ID NO: 2931708 - DNA, 25 bp, Homo sapien
gggtcttcacccaaatgagcacggg

SEQ ID NO: 2931709 - DNA, 25 bp, Homo sapien
tgtataagagccacccagtcatggt

SEQ ID NO: 2931710 - DNA, 25 bp, Homo sapien
aaattatacaggactgacacgcccc

SEQ ID NO: 2931711 - DNA, 25 bp, Homo sapien
ggctgaagtcatatcaaattcctgt

SEQ ID NO: 2931712 - DNA, 25 bp, Homo sapien
tgccacaaagtagcgtctgagacgg

SEQ ID NO: 2931713 - DNA, 25 bp, Homo sapien
aaagccgcaccccagtgaagatgtc

SEQ ID NO: 2931714 - DNA, 25 bp, Homo sapien
ggatacatgcccaaatccactctgg

SEQ ID NO: 2931715 - DNA, 25 bp, Homo sapien
taaaccagcaagacaaactgacttc

SEQ ID NO: 2931716 - DNA, 25 bp, Homo sapien
tagtatggtaaaggagagtatggcc

SEQ ID NO: 2931717 - DNA, 25 bp, Homo sapien
ggcacccacagcaactaattcctgg

SEQ ID NO: 2931718 - DNA, 25 bp, Homo sapien
ttccccctatactgtgtctatctgc

SEQ ID NO: 2931719 - DNA, 25 bp, Homo sapien
tcaggctgaatacaagttccgctaa

SEQ ID NO: 2931720 - DNA, 25 bp, Homo sapien
aacagaagcatttccgagggcagtc

SEQ ID NO: 2931721 - DNA, 25 bp, Homo sapien
tcctggcaaagcgtgtcaggctgaa

SEQ ID NO: 2931722 - DNA, 25 bp, Homo sapien
tggaagtacaaaggaacaggcaagg

SEQ ID NO: 2931723 - DNA, 25 bp, Homo sapien
catcagccaatacttgggggttcaa

SEQ ID NO: 2931724 - DNA, 25 bp, Homo sapien
caatatcatataattattcctccag

SEQ ID NO: 2931725 - DNA, 25 bp, Homo sapien
acttcaggttggaacactcgagcac

SEQ ID NO: 2931726 - DNA, 25 bp, Homo sapien
ttggtgcattcgactggtccagcat

SEQ ID NO: 2931727 - DNA, 25 bp, Homo sapien
tcccgggtagggtctggacatgcac

SEQ ID NO: 2931728 - DNA, 25 bp, Homo sapien
catatggtgtcctgatgagcctgca

SEQ ID NO: 2931729 - DNA, 25 bp, Homo sapien
ggaacatgcacacctgcaactgagg

SEQ ID NO: 2931730 - DNA, 25 bp, Homo sapien
gagaactgaccctcaagagctggaa

SEQ ID NO: 2931731 - DNA, 25 bp, Homo sapien
tcctgaggagacagccttgttctgc

SEQ ID NO: 2931732 - DNA, 25 bp, Homo sapien
gacagtgcctttggcaggatcctga

SEQ ID NO: 2931733 - DNA, 25 bp, Homo sapien
tctgctgccctgtccggttgtttgt

SEQ ID NO: 2931734 - DNA, 25 bp, Homo sapien
cactctgggtgtaagcaaccaataa

SEQ ID NO: 2931735 - DNA, 25 bp, Homo sapien
tgtgtgcgcaggcttgtacaaacct

SEQ ID NO: 2931736 - DNA, 25 bp, Homo sapien
taacacacactaaggcagagaaggg

SEQ ID NO: 2931737 - DNA, 25 bp, Homo sapien
agactactgagaatgcagcccctgg

SEQ ID NO: 2931738 - DNA, 25 bp, Homo sapien
gccagcagcatgtagaggttcagaa

SEQ ID NO: 2931739 - DNA, 25 bp, Homo sapien
taccaatggatgaactatgcaaacc

SEQ ID NO: 2931740 - DNA, 25 bp, Homo sapien
tatgcaaaccctaaacgccttggca

SEQ ID NO: 2931741 - DNA, 25 bp, Homo sapien
taggctctttaggaaggaccatgca

SEQ ID NO: 2931742 - DNA, 25 bp, Homo sapien
taaactagtcaactgaacactgggc

SEQ ID NO: 2931743 - DNA, 25 bp, Homo sapien
tgttaagacagagcacttaagagct

SEQ ID NO: 2931744 - DNA, 25 bp, Homo sapien
gatagtgcgtgcataatccctgctg

SEQ ID NO: 2931745 - DNA, 25 bp, Homo sapien
gaaatagatttaggcaaagagcctg

SEQ ID NO: 2931746 - DNA, 25 bp, Homo sapien
gatttgcaccatccttagtttatgc

SEQ ID NO: 2931747 - DNA, 25 bp, Homo sapien
tcttccggtcctgagagcttgcatc

SEQ ID NO: 2931748 - DNA, 25 bp, Homo sapien
tggcaagcgcatgaatgaatgtccc

SEQ ID NO: 2931749 - DNA, 25 bp, Homo sapien
gggtgtacctcttggctggcaaagc

SEQ ID NO: 2931750 - DNA, 25 bp, Homo sapien
taacctgtaccaagtgtggcaagcg

SEQ ID NO: 2931751 - DNA, 25 bp, Homo sapien
tattgaggaaatgtttcctcggagg

SEQ ID NO: 2931752 - DNA, 25 bp, Homo sapien
tgtttcctcggaggagctctatttg

SEQ ID NO: 2931753 - DNA, 25 bp, Homo sapien
caagtaaccagagttggttattgag

SEQ ID NO: 2931754 - DNA, 25 bp, Homo sapien
agggaagcatgtgcactgagacttt

SEQ ID NO: 2931755 - DNA, 25 bp, Homo sapien
gaaggccattctagagcaggagctg

SEQ ID NO: 2931756 - DNA, 25 bp, Homo sapien
tattgagaaccctgtgcactcagca

SEQ ID NO: 2931757 - DNA, 25 bp, Homo sapien
gaatcctggctcctcgacttagcag

SEQ ID NO: 2931758 - DNA, 25 bp, Homo sapien
aaagctttcaggaccctgcctggca

SEQ ID NO: 2931759 - DNA, 25 bp, Homo sapien
ggtaacactacctgagagaccagtg

SEQ ID NO: 2931760 - DNA, 25 bp, Homo sapien
gctacttaggaacaggttaggctct

SEQ ID NO: 2931761 - DNA, 25 bp, Homo sapien
gaccagtgaggatctacagtaagct

SEQ ID NO: 2931762 - DNA, 25 bp, Homo sapien
tgaaggattccagggtaattccaag

SEQ ID NO: 2931763 - DNA, 25 bp, Homo sapien
aacgcaggctttataattgtgtcaa

SEQ ID NO: 2931764 - DNA, 25 bp, Homo sapien
gatgccagcttatttcagagttccc

SEQ ID NO: 2931765 - DNA, 25 bp, Homo sapien
tctggctgattgagcaacgcaggct

SEQ ID NO: 2931766 - DNA, 25 bp, Homo sapien
tccctgtgagccagcgggtgcatag

SEQ ID NO: 2931767 - DNA, 25 bp, Homo sapien
gatgcaggcctattccaaccctggg

SEQ ID NO: 2931768 - DNA, 25 bp, Homo sapien
aaattcagttatcagcgttgctacc

SEQ ID NO: 2931769 - DNA, 25 bp, Homo sapien
ttggaaccaagctgcaagtcctgtg

SEQ ID NO: 2931770 - DNA, 25 bp, Homo sapien
tgccactgcagcctatggaccatgg

SEQ ID NO: 2931771 - DNA, 25 bp, Homo sapien
cgtagatactgggtagatcacatcc

SEQ ID NO: 2931772 - DNA, 25 bp, Homo sapien
catttctgctgcttggcgtagatac

SEQ ID NO: 2931773 - DNA, 25 bp, Homo sapien
cttggcgtagatactgggtagatca

SEQ ID NO: 2931774 - DNA, 25 bp, Homo sapien
ctgctgcttggcgtagatactgggt

SEQ ID NO: 2931775 - DNA, 25 bp, Homo sapien
cacgaaagggctgtttaactgtctc

SEQ ID NO: 2931776 - DNA, 25 bp, Homo sapien
ccagttggtagcaggttggatttga

SEQ ID NO: 2931777 - DNA, 25 bp, Homo sapien
tgctgaaaagtagactttgtccagt

SEQ ID NO: 2931778 - DNA, 25 bp, Homo sapien
aattgaaggcttttgcaatgctgaa

SEQ ID NO: 2931779 - DNA, 25 bp, Homo sapien
aatgtcaattctagcctgtcagggc

SEQ ID NO: 2931780 - DNA, 25 bp, Homo sapien
catgccatgtgagacctaccttaaa

SEQ ID NO: 2931781 - DNA, 25 bp, Homo sapien
ctaagaaatagctgatggccttggg

SEQ ID NO: 2931782 - DNA, 25 bp, Homo sapien
taaaggatgaacgaagctgggtgca

SEQ ID NO: 2931783 - DNA, 25 bp, Homo sapien
catcgggtcctcaggctgggtcctg

SEQ ID NO: 2931784 - DNA, 25 bp, Homo sapien
tcctccatcgggtcctcaggctggg

SEQ ID NO: 2931785 - DNA, 25 bp, Homo sapien
atcgggtcctcaggctgggtcctga

SEQ ID NO: 2931786 - DNA, 25 bp, Homo sapien
ctccatcgggtcctcaggctgggtc

SEQ ID NO: 2931787 - DNA, 25 bp, Homo sapien
agctgcccaagatagcagtttggtc

SEQ ID NO: 2931788 - DNA, 25 bp, Homo sapien
ctgcccaagatagcagtttggtcat

SEQ ID NO: 2931789 - DNA, 25 bp, Homo sapien
gctgcccaagatagcagtttggtca

SEQ ID NO: 2931790 - DNA, 25 bp, Homo sapien
taagaaatagccttatatagaaaat

SEQ ID NO: 2931791 - DNA, 25 bp, Homo sapien
ctaagaaatagccttatatagaaaa

SEQ ID NO: 2931792 - DNA, 25 bp, Homo sapien
aatagccttatatagaaaattatac

SEQ ID NO: 2931793 - DNA, 25 bp, Homo sapien
gaaatagccttatatagaaaattat

SEQ ID NO: 2931794 - DNA, 25 bp, Homo sapien
acaacttatttgtctaattgctgtg

SEQ ID NO: 2931795 - DNA, 25 bp, Homo sapien
cacaacttatttgtctaattgctgt

SEQ ID NO: 2931796 - DNA, 25 bp, Homo sapien
ggtacgtcctgtcacgtcttattgt

SEQ ID NO: 2931797 - DNA, 25 bp, Homo sapien
ctgaaggtggtacgtcctgtcacgt

SEQ ID NO: 2931798 - DNA, 25 bp, Homo sapien
ggtggtacgtcctgtcacgtcttat

SEQ ID NO: 2931799 - DNA, 25 bp, Homo sapien
cgtcctgtcacgtcttattgtgatg

SEQ ID NO: 2931800 - DNA, 25 bp, Homo sapien
ccagtggtagtttgtcttttagcct

SEQ ID NO: 2931801 - DNA, 25 bp, Homo sapien
tgcgcttggcagcatagccacattt

SEQ ID NO: 2931802 - DNA, 25 bp, Homo sapien
cagttccagtggtagtttgtctttt

SEQ ID NO: 2931803 - DNA, 25 bp, Homo sapien
ttgcgcttggcagcatagccacatt

SEQ ID NO: 2931804 - DNA, 25 bp, Homo sapien
aatccatgcccgaatttgctgtata

SEQ ID NO: 2931805 - DNA, 25 bp, Homo sapien
acagaatccatgcccgaatttgctg

SEQ ID NO: 2931806 - DNA, 25 bp, Homo sapien
tccatgcccgaatttgctgtataca

SEQ ID NO: 2931807 - DNA, 25 bp, Homo sapien
gaatccatgcccgaatttgctgtat

SEQ ID NO: 2931808 - DNA, 25 bp, Homo sapien
catgctaatcatctttgtattgttc

SEQ ID NO: 2931809 - DNA, 25 bp, Homo sapien
gggccatgctaatcatctttgtatt

SEQ ID NO: 2931810 - DNA, 25 bp, Homo sapien
tgtatgtgctgctgaagcaagcact

SEQ ID NO: 2931811 - DNA, 25 bp, Homo sapien
caattttagtgtatgtgctgctgaa

SEQ ID NO: 2931812 - DNA, 25 bp, Homo sapien
aaatctcattggtgcagaattgctt

SEQ ID NO: 2931813 - DNA, 25 bp, Homo sapien
cccatgtgtaatacagtaactggca

SEQ ID NO: 2931814 - DNA, 25 bp, Homo sapien
caaccaaagctgactcacctcaaat

SEQ ID NO: 2931815 - DNA, 25 bp, Homo sapien
gtgattgactcaaaccaactaggaa

SEQ ID NO: 2931816 - DNA, 25 bp, Homo sapien
tgttcacgtgtctgcctacaggctc

SEQ ID NO: 2931817 - DNA, 25 bp, Homo sapien
tagatgcttacagtaacttccctgt

SEQ ID NO: 2931818 - DNA, 25 bp, Homo sapien
tatacattatggaagctcagtaatg

SEQ ID NO: 2931819 - DNA, 25 bp, Homo sapien
tacaggctcccactttttgtcactt

SEQ ID NO: 2931820 - DNA, 25 bp, Homo sapien
atcaccattgtgtcctgtgctccct

SEQ ID NO: 2931821 - DNA, 25 bp, Homo sapien
catctctgatgaggcatgctggcga

SEQ ID NO: 2931822 - DNA, 25 bp, Homo sapien
tggataatcctgtgcatcaccattg

SEQ ID NO: 2931823 - DNA, 25 bp, Homo sapien
tggccaagccgggaaagcctctaac

SEQ ID NO: 2931824 - DNA, 25 bp, Homo sapien
tatagcccaaacctctcaattccag

SEQ ID NO: 2931825 - DNA, 25 bp, Homo sapien
aatctgagactaggagcggtggctc

SEQ ID NO: 2931826 - DNA, 25 bp, Homo sapien
tgaccaaatatttagggcaagaact

SEQ ID NO: 2931827 - DNA, 25 bp, Homo sapien
tttttactgtaggaccattagatga

SEQ ID NO: 2931828 - DNA, 25 bp, Homo sapien
tgatttgttcgggatgacacccgtc

SEQ ID NO: 2931829 - DNA, 25 bp, Homo sapien
tttgttcgggatgacacccgtcacc

SEQ ID NO: 2931830 - DNA, 25 bp, Homo sapien
ttcgggatgacacccgtcaccatgc

SEQ ID NO: 2931831 - DNA, 25 bp, Homo sapien
ccgtcaccatgcaggacaacccagc

SEQ ID NO: 2931832 - DNA, 25 bp, Homo sapien
tcccacttgatggagtgcctctgat

SEQ ID NO: 2931833 - DNA, 25 bp, Homo sapien
ccatctcccacttgatggagtgcct

SEQ ID NO: 2931834 - DNA, 25 bp, Homo sapien
tctcccacttgatggagtgcctctg

SEQ ID NO: 2931835 - DNA, 25 bp, Homo sapien
cccacttgatggagtgcctctgatg

SEQ ID NO: 2931836 - DNA, 25 bp, Homo sapien
tcatcctccaagaagttgaccaaat

SEQ ID NO: 2931837 - DNA, 25 bp, Homo sapien
tgacggtccggttcatagacttggg

SEQ ID NO: 2931838 - DNA, 25 bp, Homo sapien
tgccctttgaggctagtgggagtcc

SEQ ID NO: 2931839 - DNA, 25 bp, Homo sapien
agtaggttgatggtatcatcctcca

SEQ ID NO: 2931840 - DNA, 25 bp, Homo sapien
tgtctccagctcagggttgtcaagg

SEQ ID NO: 2931841 - DNA, 25 bp, Homo sapien
ccatctgggacttcgatgggcatgg

SEQ ID NO: 2931842 - DNA, 25 bp, Homo sapien
gtctgaatcctctactggcagcggc

SEQ ID NO: 2931843 - DNA, 25 bp, Homo sapien
tgttgacggtgtgctcaaagatgaa

SEQ ID NO: 2931844 - DNA, 25 bp, Homo sapien
gaacgcatgagcaagggaaacgcac

SEQ ID NO: 2931845 - DNA, 25 bp, Homo sapien
ttctcactacccatggagctcagct

SEQ ID NO: 2931846 - DNA, 25 bp, Homo sapien
agtgcctggcacaataagcctctgc

SEQ ID NO: 2931847 - DNA, 25 bp, Homo sapien
tcactacccatggagctcagctcag

SEQ ID NO: 2931848 - DNA, 25 bp, Homo sapien
taacaggagctggtagaaactgacc

SEQ ID NO: 2931849 - DNA, 25 bp, Homo sapien
catggacgattctttgcctcgggca

SEQ ID NO: 2931850 - DNA, 25 bp, Homo sapien
taacacgtgttaggctttagctcca

SEQ ID NO: 2931851 - DNA, 25 bp, Homo sapien
catcagcttgacagtagtgcccaaa

SEQ ID NO: 2931852 - DNA, 25 bp, Homo sapien
tttgtagggcttgcaccacttcccc

SEQ ID NO: 2931853 - DNA, 25 bp, Homo sapien
tgtagggcttgcaccacttccccac

SEQ ID NO: 2931854 - DNA, 25 bp, Homo sapien
ttgtagggcttgcaccacttcccca

SEQ ID NO: 2931855 - DNA, 25 bp, Homo sapien
tctggatggggtagttctcaggaaa

SEQ ID NO: 2931856 - DNA, 25 bp, Homo sapien
tccttgcgccgcacggtgatctgga

SEQ ID NO: 2931857 - DNA, 25 bp, Homo sapien
ccgatggacacgatcttttgccggg

SEQ ID NO: 2931858 - DNA, 25 bp, Homo sapien
aaataggtattccagatcctccagc

SEQ ID NO: 2931859 - DNA, 25 bp, Homo sapien
tagacccagcccagatttggaggag

SEQ ID NO: 2931860 - DNA, 25 bp, Homo sapien
gaatggggcccctatgtagccttgg

SEQ ID NO: 2931861 - DNA, 25 bp, Homo sapien
gtggggtgcccataccactctgcca

SEQ ID NO: 2931862 - DNA, 25 bp, Homo sapien
gcagttctttaatgagggacctaga

SEQ ID NO: 2931863 - DNA, 25 bp, Homo sapien
taagcagggtcatggtctgaactac

SEQ ID NO: 2931864 - DNA, 25 bp, Homo sapien
agtgggcccctagtgtcagctctgt

SEQ ID NO: 2931865 - DNA, 25 bp, Homo sapien
tgtattgttgtccactgcagtaggc

SEQ ID NO: 2931866 - DNA, 25 bp, Homo sapien
gagatcttgccctgaatgtaccctg

SEQ ID NO: 2931867 - DNA, 25 bp, Homo sapien
agcaaggacgatgctttcgatctgc

SEQ ID NO: 2931868 - DNA, 25 bp, Homo sapien
tgagcactcctgtgtcaacctccag

SEQ ID NO: 2931869 - DNA, 25 bp, Homo sapien
ggacgatgctttcgatctgccctct

SEQ ID NO: 2931870 - DNA, 25 bp, Homo sapien
gatgctttcgatctgccctcttgtg

SEQ ID NO: 2931871 - DNA, 25 bp, Homo sapien
tcttagaagtttgccgtctccctcc

SEQ ID NO: 2931872 - DNA, 25 bp, Homo sapien
gtgccaaaggcctgaactctcattg

SEQ ID NO: 2931873 - DNA, 25 bp, Homo sapien
gaagctgcttagtttgtgccaaagg

SEQ ID NO: 2931874 - DNA, 25 bp, Homo sapien
gaactctcattgcaggtcttagaag

SEQ ID NO: 2931875 - DNA, 25 bp, Homo sapien
tcctggagctggaaatgccggtttc

SEQ ID NO: 2931876 - DNA, 25 bp, Homo sapien
acaggctgcccggttccgataaagc

SEQ ID NO: 2931877 - DNA, 25 bp, Homo sapien
cggttccgataaagcgtggccagca

SEQ ID NO: 2931878 - DNA, 25 bp, Homo sapien
ctgtagctatttgtggcggccttgt

SEQ ID NO: 2931879 - DNA, 25 bp, Homo sapien
ctggaggcatctgaagctgcctgga

SEQ ID NO: 2931880 - DNA, 25 bp, Homo sapien
gcatctgaagctgcctggacgtagc

SEQ ID NO: 2931881 - DNA, 25 bp, Homo sapien
ctgaagctgcctggacgtagctctc

SEQ ID NO: 2931882 - DNA, 25 bp, Homo sapien
atctgaagctgcctggacgtagctc

SEQ ID NO: 2931883 - DNA, 25 bp, Homo sapien
cgctgcacgtctttgaaggcctggt

SEQ ID NO: 2931884 - DNA, 25 bp, Homo sapien
tccagtgcctggcatcgccgataca

SEQ ID NO: 2931885 - DNA, 25 bp, Homo sapien
tggaagttctggttccgtggctcga

SEQ ID NO: 2931886 - DNA, 25 bp, Homo sapien
cgatacagagccttgatgtccgagg

SEQ ID NO: 2931887 - DNA, 25 bp, Homo sapien
ttttcccgcttatcagcctcactgt

SEQ ID NO: 2931888 - DNA, 25 bp, Homo sapien
aacatcttctgtaccctcgagtctg

SEQ ID NO: 2931889 - DNA, 25 bp, Homo sapien
taccctcgagtctgtggagaactgc

SEQ ID NO: 2931890 - DNA, 25 bp, Homo sapien
tcttctgtaccctcgagtctgtgga

SEQ ID NO: 2931891 - DNA, 25 bp, Homo sapien
tagcaaggctactccattgttctgg

SEQ ID NO: 2931892 - DNA, 25 bp, Homo sapien
gtccagaagctgcagtagcaaggct

SEQ ID NO: 2931893 - DNA, 25 bp, Homo sapien
cagctcaggcttcttagtgtccaga

SEQ ID NO: 2931894 - DNA, 25 bp, Homo sapien
tcacggcctaggacaatgagattgt

SEQ ID NO: 2931895 - DNA, 25 bp, Homo sapien
tacagattcggtctatccgcactgc

SEQ ID NO: 2931896 - DNA, 25 bp, Homo sapien
tccgcactgcatgcagaatcactgt

SEQ ID NO: 2931897 - DNA, 25 bp, Homo sapien
caatgatggcttggagcaggttgca

SEQ ID NO: 2931898 - DNA, 25 bp, Homo sapien
tccacggccatgaggctacagattc

SEQ ID NO: 2931899 - DNA, 25 bp, Homo sapien
ccatccccttgaatcaaaactgaag

SEQ ID NO: 2931900 - DNA, 25 bp, Homo sapien
catccccttgaatcaaaactgaaga

SEQ ID NO: 2931901 - DNA, 25 bp, Homo sapien
atccccttgaatcaaaactgaagaa

SEQ ID NO: 2931902 - DNA, 25 bp, Homo sapien
tgcagctatgcctgttacttttata

SEQ ID NO: 2931903 - DNA, 25 bp, Homo sapien
cagctatgcctgttacttttataat

SEQ ID NO: 2931904 - DNA, 25 bp, Homo sapien
gcagctatgcctgttacttttataa

SEQ ID NO: 2931905 - DNA, 25 bp, Homo sapien
gacaccttcttgctgactagcatgt

SEQ ID NO: 2931906 - DNA, 25 bp, Homo sapien
ggtacgtgagttgtcatgaatggca

SEQ ID NO: 2931907 - DNA, 25 bp, Homo sapien
tatccaccacatagatggtacgtga

SEQ ID NO: 2931908 - DNA, 25 bp, Homo sapien
tcttattgagcaggttcagcgcctg

SEQ ID NO: 2931909 - DNA, 25 bp, Homo sapien
ttcacaggcccactggtggatcctg

SEQ ID NO: 2931910 - DNA, 25 bp, Homo sapien
tgatgggccaatgccttttctcatc

SEQ ID NO: 2931911 - DNA, 25 bp, Homo sapien
cctggtgcccacttaaaaggcttga

SEQ ID NO: 2931912 - DNA, 25 bp, Homo sapien
tcagttagaactgaagaccccttca

SEQ ID NO: 2931913 - DNA, 25 bp, Homo sapien
gatatattcctcacagatcttgcgg

SEQ ID NO: 2931914 - DNA, 25 bp, Homo sapien
gatcttgcggaagtgatcgcgctcc

SEQ ID NO: 2931915 - DNA, 25 bp, Homo sapien
cgggtcacagcgcaggtcatcatag

SEQ ID NO: 2931916 - DNA, 25 bp, Homo sapien
ccagcatgcgggtgttgtcagtcag

SEQ ID NO: 2931917 - DNA, 25 bp, Homo sapien
agctggtccgtctcgcgctctgagc

SEQ ID NO: 2931918 - DNA, 25 bp, Homo sapien
gcaggatccctgacactgtctggat

SEQ ID NO: 2931919 - DNA, 25 bp, Homo sapien
ttgagcagtgacactccattggtga

SEQ ID NO: 2931920 - DNA, 25 bp, Homo sapien
tttggtggtcttgtagatctgtttg

SEQ ID NO: 2931921 - DNA, 25 bp, Homo sapien
acctgcagagccgagcttacagagt

SEQ ID NO: 2931922 - DNA, 25 bp, Homo sapien
cagtttttctgtcgacccttccgca

SEQ ID NO: 2931923 - DNA, 25 bp, Homo sapien
caaactgcctgagaccgtagtctgt

SEQ ID NO: 2931924 - DNA, 25 bp, Homo sapien
cttccgcaaactgcctgagaccgta

SEQ ID NO: 2931925 - DNA, 25 bp, Homo sapien
tcagcgtccagcgtgaggtaggcca

SEQ ID NO: 2931926 - DNA, 25 bp, Homo sapien
cgggtccgagtgtctatggacatat

SEQ ID NO: 2931927 - DNA, 25 bp, Homo sapien
gtctatggacatattgcacagccac

SEQ ID NO: 2931928 - DNA, 25 bp, Homo sapien
cccagcgtcgggtccgagtgtctat

SEQ ID NO: 2931929 - DNA, 25 bp, Homo sapien
gacgtcctggacaaagtcgtccttc

SEQ ID NO: 2931930 - DNA, 25 bp, Homo sapien
cagggacgtcctggacaaagtcgtc

SEQ ID NO: 2931931 - DNA, 25 bp, Homo sapien
cgtcctggacaaagtcgtccttcac

SEQ ID NO: 2931932 - DNA, 25 bp, Homo sapien
ggcagggacgtcctggacaaagtcg

SEQ ID NO: 2931933 - DNA, 25 bp, Homo sapien
cctgaggtttgtggtcgggccagac

SEQ ID NO: 2931934 - DNA, 25 bp, Homo sapien
tcctgaggtttgtggtcgggccaga

SEQ ID NO: 2931935 - DNA, 25 bp, Homo sapien
tttcctgaggtttgtggtcgggcca

SEQ ID NO: 2931936 - DNA, 25 bp, Homo sapien
ttcctgaggtttgtggtcgggccag

SEQ ID NO: 2931937 - DNA, 25 bp, Homo sapien
ctctgacagtatgaataggagctgt

SEQ ID NO: 2931938 - DNA, 25 bp, Homo sapien
aaagatcctcgctttgcgcctcttc

SEQ ID NO: 2931939 - DNA, 25 bp, Homo sapien
ggtgaaaatctctcccatgcttcct

SEQ ID NO: 2931940 - DNA, 25 bp, Homo sapien
gtgggagctggacattttccggtcc

SEQ ID NO: 2931941 - DNA, 25 bp, Homo sapien
gagaacttggcgagctggacaagct

SEQ ID NO: 2931942 - DNA, 25 bp, Homo sapien
cttgacatcgtagctgttggtgcag

SEQ ID NO: 2931943 - DNA, 25 bp, Homo sapien
atgctgcttggagaacttggcgagc

SEQ ID NO: 2931944 - DNA, 25 bp, Homo sapien
gtggccaccgagtacaggatggtct

SEQ ID NO: 2931945 - DNA, 25 bp, Homo sapien
ttcacccgcatgtctataaagtcct

SEQ ID NO: 2931946 - DNA, 25 bp, Homo sapien
ttcaccatgcaagccagggcagaga

SEQ ID NO: 2931947 - DNA, 25 bp, Homo sapien
gatggcactatctgctttcaccatg

SEQ ID NO: 2931948 - DNA, 25 bp, Homo sapien
gcagagatgacacccgccttcagaa

SEQ ID NO: 2931949 - DNA, 25 bp, Homo sapien
ggtgcctcggtcctttgggttgtca

SEQ ID NO: 2931950 - DNA, 25 bp, Homo sapien
ttgccaccaccttgagccacaatgg

SEQ ID NO: 2931951 - DNA, 25 bp, Homo sapien
cggtcctttgggttgtcacacagtg

SEQ ID NO: 2931952 - DNA, 25 bp, Homo sapien
tgagccacaatggtgcctcggtcct

SEQ ID NO: 2931953 - DNA, 25 bp, Homo sapien
cagcgatctttgctagagcgtgggc

SEQ ID NO: 2931954 - DNA, 25 bp, Homo sapien
tagagcgtgggctgccttcaccttg

SEQ ID NO: 2931955 - DNA, 25 bp, Homo sapien
ggagacagcagcgatctttgctaga

SEQ ID NO: 2931956 - DNA, 25 bp, Homo sapien
tttgctagagcgtgggctgccttca

SEQ ID NO: 2931957 - DNA, 25 bp, Homo sapien
cgctccccaggaaaagcaatgtccg

SEQ ID NO: 2931958 - DNA, 25 bp, Homo sapien
ccgctccccaggaaaagcaatgtcc

SEQ ID NO: 2931959 - DNA, 25 bp, Homo sapien
gctccccaggaaaagcaatgtccgg

SEQ ID NO: 2931960 - DNA, 25 bp, Homo sapien
tccccaggaaaagcaatgtccggat

SEQ ID NO: 2931961 - DNA, 25 bp, Homo sapien
gagcctcatagttctgaagcccatc

SEQ ID NO: 2931962 - DNA, 25 bp, Homo sapien
gcctaggagagcctcatagttctga

SEQ ID NO: 2931963 - DNA, 25 bp, Homo sapien
tcactccgcccagacaggttggtga

SEQ ID NO: 2931964 - DNA, 25 bp, Homo sapien
tccaagagtcttacaaggggccgca

SEQ ID NO: 2931965 - DNA, 25 bp, Homo sapien
tagttctcgatgtctggcaaggccc

SEQ ID NO: 2931966 - DNA, 25 bp, Homo sapien
gcaaggccctctccttaaagatctt

SEQ ID NO: 2931967 - DNA, 25 bp, Homo sapien
gccgcagctgatcatgattctcaaa

SEQ ID NO: 2931968 - DNA, 25 bp, Homo sapien
tccttgtggagcaccatgttgcaca

SEQ ID NO: 2931969 - DNA, 25 bp, Homo sapien
catcttgaggcacagtttcttgtgt

SEQ ID NO: 2931970 - DNA, 25 bp, Homo sapien
ttatcatcatcctccccgcagagca

SEQ ID NO: 2931971 - DNA, 25 bp, Homo sapien
ggtcattcccgtcagccaagaacct

SEQ ID NO: 2931972 - DNA, 25 bp, Homo sapien
gccgcattctgcaccttatcatcat

SEQ ID NO: 2931973 - DNA, 25 bp, Homo sapien
ggaggatctccaaccactgggttgt

SEQ ID NO: 2931974 - DNA, 25 bp, Homo sapien
gctggaggatctccaaccactgggt

SEQ ID NO: 2931975 - DNA, 25 bp, Homo sapien
tggaggatctccaaccactgggttg

SEQ ID NO: 2931976 - DNA, 25 bp, Homo sapien
cgctggaggatctccaaccactggg

SEQ ID NO: 2931977 - DNA, 25 bp, Homo sapien
ctgtttgcccaccacagtcaggatc

SEQ ID NO: 2931978 - DNA, 25 bp, Homo sapien
tcagcatcggctgccagtaggttgt

SEQ ID NO: 2931979 - DNA, 25 bp, Homo sapien
aggccccggtgttggacagacagct

SEQ ID NO: 2931980 - DNA, 25 bp, Homo sapien
tctcgggctgtctgaaccacttctg

SEQ ID NO: 2931981 - DNA, 25 bp, Homo sapien
tggtttaatgaaaccataatccatg

SEQ ID NO: 2931982 - DNA, 25 bp, Homo sapien
tttaatgaaaccataatccatgcac

SEQ ID NO: 2931983 - DNA, 25 bp, Homo sapien
agacactggtttaatgaaaccataa

SEQ ID NO: 2931984 - DNA, 25 bp, Homo sapien
cactggtttaatgaaaccataatcc

SEQ ID NO: 2931985 - DNA, 25 bp, Homo sapien
gtgaaacatccaaactctgtcagga

SEQ ID NO: 2931986 - DNA, 25 bp, Homo sapien
ggaagactttcccaagcaaattgca

SEQ ID NO: 2931987 - DNA, 25 bp, Homo sapien
aacccaggactctgcacagtacagg

SEQ ID NO: 2931988 - DNA, 25 bp, Homo sapien
cctggccttcagaatgggtacagaa

SEQ ID NO: 2931989 - DNA, 25 bp, Homo sapien
tttcctatcacagggagagagcctg

SEQ ID NO: 2931990 - DNA, 25 bp, Homo sapien
tgaaacaagcccatgcaagagttag

SEQ ID NO: 2931991 - DNA, 25 bp, Homo sapien
ggatttggcccataccgcaacagtg

SEQ ID NO: 2931992 - DNA, 25 bp, Homo sapien
tatgttctttgatctgcccagggta

SEQ ID NO: 2931993 - DNA, 25 bp, Homo sapien
gaactttatctaactggccctgaac

SEQ ID NO: 2931994 - DNA, 25 bp, Homo sapien
gaagggccctcttacaagcaacaat

SEQ ID NO: 2931995 - DNA, 25 bp, Homo sapien
catgaagacttagccagacaatggg

SEQ ID NO: 2931996 - DNA, 25 bp, Homo sapien
tcaaaacgagtaagagtgtggccct

SEQ ID NO: 2931997 - DNA, 25 bp, Homo sapien
aatagtgggttgtaccagctggttt

SEQ ID NO: 2931998 - DNA, 25 bp, Homo sapien
tgttctgcagagactgatgaatgtt

SEQ ID NO: 2931999 - DNA, 25 bp, Homo sapien
gttttcagttatgttctgcagagac

SEQ ID NO: 2932000 - DNA, 25 bp, Homo sapien
tccttcaaaatagaagtccgcagca

SEQ ID NO: 2932001 - DNA, 25 bp, Homo sapien
gggattcgtgaaggtattcaaacag

SEQ ID NO: 2932002 - DNA, 25 bp, Homo sapien
cagggattcgtgaaggtattcaaac

SEQ ID NO: 2932003 - DNA, 25 bp, Homo sapien
gattcgtgaaggtattcaaacagtc

SEQ ID NO: 2932004 - DNA, 25 bp, Homo sapien
acagggattcgtgaaggtattcaaa

SEQ ID NO: 2932005 - DNA, 25 bp, Homo sapien
catggtcttccaacggccttttctt

SEQ ID NO: 2932006 - DNA, 25 bp, Homo sapien
agtcatggtcttccaacggcctttt

SEQ ID NO: 2932007 - DNA, 25 bp, Homo sapien
aagtcatggtcttccaacggccttt

SEQ ID NO: 2932008 - DNA, 25 bp, Homo sapien
actgcttccttgtcttggagctgac

SEQ ID NO: 2932009 - DNA, 25 bp, Homo sapien
ctggacactgcttccttgtcttgga

SEQ ID NO: 2932010 - DNA, 25 bp, Homo sapien
tgcttccttgtcttggagctgacca

SEQ ID NO: 2932011 - DNA, 25 bp, Homo sapien
ggacactgcttccttgtcttggagc

SEQ ID NO: 2932012 - DNA, 25 bp, Homo sapien
actttgttacaaatcaccacagttg

SEQ ID NO: 2932013 - DNA, 25 bp, Homo sapien
gctgagcggttgtctaccacgtaat

SEQ ID NO: 2932014 - DNA, 25 bp, Homo sapien
tgatggctaggtagcctttgaggct

SEQ ID NO: 2932015 - DNA, 25 bp, Homo sapien
taaatgtactttgttacaaatcacc

SEQ ID NO: 2932016 - DNA, 25 bp, Homo sapien
gctgagttccgtgacacctcccggg

SEQ ID NO: 2932017 - DNA, 25 bp, Homo sapien
gagacagacagaggtacagcccaat

SEQ ID NO: 2932018 - DNA, 25 bp, Homo sapien
cgggacatcgcgcaggagacagaca

SEQ ID NO: 2932019 - DNA, 25 bp, Homo sapien
gggatcccgggcttatatcagctga

SEQ ID NO: 2932020 - DNA, 25 bp, Homo sapien
ggagcaggcaacggagcctcccaag

SEQ ID NO: 2932021 - DNA, 25 bp, Homo sapien
aacggagcctcccaagtccagagca

SEQ ID NO: 2932022 - DNA, 25 bp, Homo sapien
cgctgggttctcctcggcagcgcgt

SEQ ID NO: 2932023 - DNA, 25 bp, Homo sapien
ctgggttctcctcggcagcgcgtct

SEQ ID NO: 2932024 - DNA, 25 bp, Homo sapien
ggcaaagaagcgcgggggattcatt

SEQ ID NO: 2932025 - DNA, 25 bp, Homo sapien
tgggcaaagaagcgcgggggattca

SEQ ID NO: 2932026 - DNA, 25 bp, Homo sapien
caaagaagcgcgggggattcattac

SEQ ID NO: 2932027 - DNA, 25 bp, Homo sapien
ctgggcaaagaagcgcgggggattc

SEQ ID NO: 2932028 - DNA, 25 bp, Homo sapien
gtcttcaccacagcccaataggaga

SEQ ID NO: 2932029 - DNA, 25 bp, Homo sapien
acagcccaataggagaacccgcgca

SEQ ID NO: 2932030 - DNA, 25 bp, Homo sapien
ccaataggagaacccgcgcagaccg

SEQ ID NO: 2932031 - DNA, 25 bp, Homo sapien
agcccaataggagaacccgcgcaga

SEQ ID NO: 2932032 - DNA, 25 bp, Homo sapien
tttgctaagatgtaggctgcgctgg

SEQ ID NO: 2932033 - DNA, 25 bp, Homo sapien
gggtcctctgccactagctgtcgtt

SEQ ID NO: 2932034 - DNA, 25 bp, Homo sapien
caacaaactaaatctccccagcggg

SEQ ID NO: 2932035 - DNA, 25 bp, Homo sapien
cgggaaagactctctcccggcagcg

SEQ ID NO: 2932036 - DNA, 25 bp, Homo sapien
ccatttaacttcatcctcgggagcc

SEQ ID NO: 2932037 - DNA, 25 bp, Homo sapien
tgaagactgacgttccaagccaggg

SEQ ID NO: 2932038 - DNA, 25 bp, Homo sapien
gcttataggcaagcctctggaacaa

SEQ ID NO: 2932039 - DNA, 25 bp, Homo sapien
tagactggacattggccctatttgt

SEQ ID NO: 2932040 - DNA, 25 bp, Homo sapien
tgcggatatgaccaactagggctct

SEQ ID NO: 2932041 - DNA, 25 bp, Homo sapien
catgcaagagggaaacggaatcaca

SEQ ID NO: 2932042 - DNA, 25 bp, Homo sapien
tctgtctccaagcatctgtgtgtca

SEQ ID NO: 2932043 - DNA, 25 bp, Homo sapien
gaatttgggcttcgacaactcgggc

SEQ ID NO: 2932044 - DNA, 25 bp, Homo sapien
catataatagaagactactcaaccg

SEQ ID NO: 2932045 - DNA, 25 bp, Homo sapien
cacagtcagctctagtccaaaaata

SEQ ID NO: 2932046 - DNA, 25 bp, Homo sapien
gaaagaactattggtacccacaatg

SEQ ID NO: 2932047 - DNA, 25 bp, Homo sapien
tccatgctttagttaccacagtcag

SEQ ID NO: 2932048 - DNA, 25 bp, Homo sapien
cttggcctattcctatcctgaaatg

SEQ ID NO: 2932049 - DNA, 25 bp, Homo sapien
gcacttggcctattcctatcctgaa

SEQ ID NO: 2932050 - DNA, 25 bp, Homo sapien
tcagcacttggcctattcctatcct

SEQ ID NO: 2932051 - DNA, 25 bp, Homo sapien
cttctcagcacttggcctattccta

SEQ ID NO: 2932052 - DNA, 25 bp, Homo sapien
ctgtttctcccgcaggcgagggtcc

SEQ ID NO: 2932053 - DNA, 25 bp, Homo sapien
cctgcatctacaacacactcaggaa

SEQ ID NO: 2932054 - DNA, 25 bp, Homo sapien
tctgctgagtcccaagggtgacttt

SEQ ID NO: 2932055 - DNA, 25 bp, Homo sapien
tcaggaaagtttgtatccacatcaa

SEQ ID NO: 2932056 - DNA, 25 bp, Homo sapien
ttcagcagagcacatactgctcgca

SEQ ID NO: 2932057 - DNA, 25 bp, Homo sapien
gcagagcacatactgctcgcaggat

SEQ ID NO: 2932058 - DNA, 25 bp, Homo sapien
cagcagagcacatactgctcgcagg

SEQ ID NO: 2932059 - DNA, 25 bp, Homo sapien
agcagagcacatactgctcgcagga

SEQ ID NO: 2932060 - DNA, 25 bp, Homo sapien
tccatgacgttcataattgtagcct

SEQ ID NO: 2932061 - DNA, 25 bp, Homo sapien
catgacgttcataattgtagccttt

SEQ ID NO: 2932062 - DNA, 25 bp, Homo sapien
acgttcataattgtagcctttgttc

SEQ ID NO: 2932063 - DNA, 25 bp, Homo sapien
tgacgttcataattgtagcctttgt

SEQ ID NO: 2932064 - DNA, 25 bp, Homo sapien
tggagcataaggtagcaagtggcac

SEQ ID NO: 2932065 - DNA, 25 bp, Homo sapien
tattcgttggagtctgagtcctgca

SEQ ID NO: 2932066 - DNA, 25 bp, Homo sapien
catattgtacactaccctgagctgc

SEQ ID NO: 2932067 - DNA, 25 bp, Homo sapien
cctgagctgcctgtggacctaatga

SEQ ID NO: 2932068 - DNA, 25 bp, Homo sapien
tattttatctcaggcctctgtgtgc

SEQ ID NO: 2932069 - DNA, 25 bp, Homo sapien
tgcagaaacacacttcggaagtctg

SEQ ID NO: 2932070 - DNA, 25 bp, Homo sapien
cacagtgtgacacgtctgtcgagaa

SEQ ID NO: 2932071 - DNA, 25 bp, Homo sapien
tagaagccctcaagctcgtaaggtc

SEQ ID NO: 2932072 - DNA, 25 bp, Homo sapien
tggcaaacaccgcacagcagaattt

SEQ ID NO: 2932073 - DNA, 25 bp, Homo sapien
acatatccacggagggcccccttat

SEQ ID NO: 2932074 - DNA, 25 bp, Homo sapien
ctccaccttgattgcacagacatat

SEQ ID NO: 2932075 - DNA, 25 bp, Homo sapien
ggcactttggcaaacaccgcacagc

SEQ ID NO: 2932076 - DNA, 25 bp, Homo sapien
catcatccaagcagtccattctctt

SEQ ID NO: 2932077 - DNA, 25 bp, Homo sapien
gcaattgtctcacacggttgtcctt

SEQ ID NO: 2932078 - DNA, 25 bp, Homo sapien
gtctcacacggttgtccttcacctg

SEQ ID NO: 2932079 - DNA, 25 bp, Homo sapien
ccaagcagtccattctcttgtgggc

SEQ ID NO: 2932080 - DNA, 25 bp, Homo sapien
ttacaaccattgtggatattgctcc

SEQ ID NO: 2932081 - DNA, 25 bp, Homo sapien
gattccaaggaataccatatccctc

SEQ ID NO: 2932082 - DNA, 25 bp, Homo sapien
aaggaataccatatccctctttcct

SEQ ID NO: 2932083 - DNA, 25 bp, Homo sapien
tgccagcaaacattacaaccattgt

SEQ ID NO: 2932084 - DNA, 25 bp, Homo sapien
cgaattcttatgaatgcacacaggc

SEQ ID NO: 2932085 - DNA, 25 bp, Homo sapien
ggcgtggcagatgacaaactcaact

SEQ ID NO: 2932086 - DNA, 25 bp, Homo sapien
ctttcagacattccgaattcttatg

SEQ ID NO: 2932087 - DNA, 25 bp, Homo sapien
tggaaagtagcgtttctgctgctct

SEQ ID NO: 2932088 - DNA, 25 bp, Homo sapien
gctctgtcgcaccagtggtgcgatc

SEQ ID NO: 2932089 - DNA, 25 bp, Homo sapien
ttgctctgtcgcaccagtggtgcga

SEQ ID NO: 2932090 - DNA, 25 bp, Homo sapien
gtcttgctctgtcgcaccagtggtg

SEQ ID NO: 2932091 - DNA, 25 bp, Homo sapien
cttgctctgtcgcaccagtggtgcg

SEQ ID NO: 2932092 - DNA, 25 bp, Homo sapien
gagtatataccactctgtctgaaaa

SEQ ID NO: 2932093 - DNA, 25 bp, Homo sapien
ggagtatataccactctgtctgaaa

SEQ ID NO: 2932094 - DNA, 25 bp, Homo sapien
ctggagtatataccactctgtctga

SEQ ID NO: 2932095 - DNA, 25 bp, Homo sapien
gtatataccactctgtctgaaaata

SEQ ID NO: 2932096 - DNA, 25 bp, Homo sapien
gagaaagggcgcatttctgtattta

SEQ ID NO: 2932097 - DNA, 25 bp, Homo sapien
tgtgagaagagttccttgtagaggc

SEQ ID NO: 2932098 - DNA, 25 bp, Homo sapien
ctctgagtcctttatgttgtgagaa

SEQ ID NO: 2932099 - DNA, 25 bp, Homo sapien
tctgtatttattaagtctctgagtc

SEQ ID NO: 2932100 - DNA, 25 bp, Homo sapien
cagtgtagccgcctttgttcaccag

SEQ ID NO: 2932101 - DNA, 25 bp, Homo sapien
tatcatagaatagcccttgcacccc

SEQ ID NO: 2932102 - DNA, 25 bp, Homo sapien
ttctcttgcagacctaaatccacag

SEQ ID NO: 2932103 - DNA, 25 bp, Homo sapien
gggtgatgcataacctcccagtgta

SEQ ID NO: 2932104 - DNA, 25 bp, Homo sapien
cccagctcttcacttaagaaggatt

SEQ ID NO: 2932105 - DNA, 25 bp, Homo sapien
gaacccaagcaagactatcacgagg

SEQ ID NO: 2932106 - DNA, 25 bp, Homo sapien
tatcacgagggactgtaacagggct

SEQ ID NO: 2932107 - DNA, 25 bp, Homo sapien
tacgaactgtaaacgctctgtgctt

SEQ ID NO: 2932108 - DNA, 25 bp, Homo sapien
ggtcttgcgaaggttctttgaaagc

SEQ ID NO: 2932109 - DNA, 25 bp, Homo sapien
caggggctggttttcacagatgtag

SEQ ID NO: 2932110 - DNA, 25 bp, Homo sapien
aatgttagccggttcacagtgaaac

SEQ ID NO: 2932111 - DNA, 25 bp, Homo sapien
aagccatgaacaaacaactctctgg

SEQ ID NO: 2932112 - DNA, 25 bp, Homo sapien
ctggcagatgtttttcttgctgaaa

SEQ ID NO: 2932113 - DNA, 25 bp, Homo sapien
gataatgtgctggatgtgttcaaag

SEQ ID NO: 2932114 - DNA, 25 bp, Homo sapien
tcatgaaggttttccgggtcactgg

SEQ ID NO: 2932115 - DNA, 25 bp, Homo sapien
ttcatgaaggttttccgggtcactg

SEQ ID NO: 2932116 - DNA, 25 bp, Homo sapien
gaaattctgagcgtcatcaatgata

SEQ ID NO: 2932117 - DNA, 25 bp, Homo sapien
aacagagcagaagattgtaggcccc

SEQ ID NO: 2932118 - DNA, 25 bp, Homo sapien
agctattggacctgcattgcggacc

SEQ ID NO: 2932119 - DNA, 25 bp, Homo sapien
aaaatatccgagtctgcctggcacg

SEQ ID NO: 2932120 - DNA, 25 bp, Homo sapien
taaccattccgcaagagaaaacggc

SEQ ID NO: 2932121 - DNA, 25 bp, Homo sapien
tgcttctggtcaagatagaggaaca

SEQ ID NO: 2932122 - DNA, 25 bp, Homo sapien
gaactgtacacatgttgcttcactg

SEQ ID NO: 2932123 - DNA, 25 bp, Homo sapien
ggaacctgccctatgctagctaaga

SEQ ID NO: 2932124 - DNA, 25 bp, Homo sapien
tagctaagagttgagtacggtatgc

SEQ ID NO: 2932125 - DNA, 25 bp, Homo sapien
gttaaatcgaaggatatgatacata

SEQ ID NO: 2932126 - DNA, 25 bp, Homo sapien
attatgttaaatcgaaggatatgat

SEQ ID NO: 2932127 - DNA, 25 bp, Homo sapien
taagaacagctagatagaattatgt

SEQ ID NO: 2932128 - DNA, 25 bp, Homo sapien
aaaatataagaacagctagatagaa

SEQ ID NO: 2932129 - DNA, 25 bp, Homo sapien
cacaattttgttaactactgccgga

SEQ ID NO: 2932130 - DNA, 25 bp, Homo sapien
ttcttatccaaaaacgtggtctgct

SEQ ID NO: 2932131 - DNA, 25 bp, Homo sapien
tgcttacgtctacccttgctagtga

SEQ ID NO: 2932132 - DNA, 25 bp, Homo sapien
gattgagggccatacttagaccttc

SEQ ID NO: 2932133 - DNA, 25 bp, Homo sapien
gtatatatagacactttttgtattt

SEQ ID NO: 2932134 - DNA, 25 bp, Homo sapien
tgtatatatagacactttttgtatt

SEQ ID NO: 2932135 - DNA, 25 bp, Homo sapien
ttgtatatatagacactttttgtat

SEQ ID NO: 2932136 - DNA, 25 bp, Homo sapien
tgcatctatagaggatgagggactt

SEQ ID NO: 2932137 - DNA, 25 bp, Homo sapien
ggtgctcagtcatatctgccctgca

SEQ ID NO: 2932138 - DNA, 25 bp, Homo sapien
gtccttggcttggtgctcagtcata

SEQ ID NO: 2932139 - DNA, 25 bp, Homo sapien
catccgttacaattaggtccttggc

SEQ ID NO: 2932140 - DNA, 25 bp, Homo sapien
tgaaagagatgtgatgtggttgcag

SEQ ID NO: 2932141 - DNA, 25 bp, Homo sapien
gaaagagatgtgatgtggttgcaga

SEQ ID NO: 2932142 - DNA, 25 bp, Homo sapien
tagtcagccattcgtctgatttttt

SEQ ID NO: 2932143 - DNA, 25 bp, Homo sapien
ttctagtcagccattcgtctgattt

SEQ ID NO: 2932144 - DNA, 25 bp, Homo sapien
acttctttgccatgggtttgaactt

SEQ ID NO: 2932145 - DNA, 25 bp, Homo sapien
tttaacttctttgccatgggtttga

SEQ ID NO: 2932146 - DNA, 25 bp, Homo sapien
agggcaggcacttctcagtcttgat

SEQ ID NO: 2932147 - DNA, 25 bp, Homo sapien
gggcaggcacttctcagtcttgata

SEQ ID NO: 2932148 - DNA, 25 bp, Homo sapien
tcagtcttgatatcccccaccgtga

SEQ ID NO: 2932149 - DNA, 25 bp, Homo sapien
tctcagtcttgatatcccccaccgt

SEQ ID NO: 2932150 - DNA, 25 bp, Homo sapien
ccagagtgaagaccataatcaagac

SEQ ID NO: 2932151 - DNA, 25 bp, Homo sapien
ttactagcgtgcgtgggatggcccc

SEQ ID NO: 2932152 - DNA, 25 bp, Homo sapien
attccatactctggacccaggtcca

SEQ ID NO: 2932153 - DNA, 25 bp, Homo sapien
taatcaagacacatacacttccatg

SEQ ID NO: 2932154 - DNA, 25 bp, Homo sapien
caaatgtaggtttggtcttttcaca

SEQ ID NO: 2932155 - DNA, 25 bp, Homo sapien
cattcaggtacacaaatcaaatgta

SEQ ID NO: 2932156 - DNA, 25 bp, Homo sapien
gtcacattcaggtacacaaatcaaa

SEQ ID NO: 2932157 - DNA, 25 bp, Homo sapien
cacattcaggtacacaaatcaaatg

SEQ ID NO: 2932158 - DNA, 25 bp, Homo sapien
gcccattccggactcatatacactg

SEQ ID NO: 2932159 - DNA, 25 bp, Homo sapien
gtcaggtggacccaatcagcggaca

SEQ ID NO: 2932160 - DNA, 25 bp, Homo sapien
gtctgggctagcctgaccctggtcc

SEQ ID NO: 2932161 - DNA, 25 bp, Homo sapien
gctgccacccgataacttccaccgg

SEQ ID NO: 2932162 - DNA, 25 bp, Homo sapien
cactcctcgtcatcacagcccgtac

SEQ ID NO: 2932163 - DNA, 25 bp, Homo sapien
gtgaccgacccgggagactagccca

SEQ ID NO: 2932164 - DNA, 25 bp, Homo sapien
gggagactagcccactcctcgtcat

SEQ ID NO: 2932165 - DNA, 25 bp, Homo sapien
agttcagcggtgaccgacccgggag

SEQ ID NO: 2932166 - DNA, 25 bp, Homo sapien
catgatcatcgaaagcttgattgtc

SEQ ID NO: 2932167 - DNA, 25 bp, Homo sapien
aactgactggaaacctcatcacatg

SEQ ID NO: 2932168 - DNA, 25 bp, Homo sapien
tattgaggattatagaactctcatc

SEQ ID NO: 2932169 - DNA, 25 bp, Homo sapien
gaggattatagaactctcatcctgc

SEQ ID NO: 2932170 - DNA, 25 bp, Homo sapien
gcagtgggtccaagcaaatggaatt

SEQ ID NO: 2932171 - DNA, 25 bp, Homo sapien
ggaatttgcttctgtcagtgctgag

SEQ ID NO: 2932172 - DNA, 25 bp, Homo sapien
cagtgggtccaagcaaatggaattt

SEQ ID NO: 2932173 - DNA, 25 bp, Homo sapien
gctggttcctgcacttgttcaattg

SEQ ID NO: 2932174 - DNA, 25 bp, Homo sapien
tttggacacattctacatccccact

SEQ ID NO: 2932175 - DNA, 25 bp, Homo sapien
ttggacacattctacatccccactg

SEQ ID NO: 2932176 - DNA, 25 bp, Homo sapien
cagaaattggtgcttagagtgggat

SEQ ID NO: 2932177 - DNA, 25 bp, Homo sapien
aatgtcaacccctgttttgtagcag

SEQ ID NO: 2932178 - DNA, 25 bp, Homo sapien
tgatcgctactaggtagggtaatac

SEQ ID NO: 2932179 - DNA, 25 bp, Homo sapien
taagtagctattaaacctatggtgg

SEQ ID NO: 2932180 - DNA, 25 bp, Homo sapien
ctttggattctggagatgcgagaaa

SEQ ID NO: 2932181 - DNA, 25 bp, Homo sapien
gatgcgagaaactaggacggagacc

SEQ ID NO: 2932182 - DNA, 25 bp, Homo sapien
tctggagatgcgagaaactaggacg

SEQ ID NO: 2932183 - DNA, 25 bp, Homo sapien
cgagaaactaggacggagaccacag

SEQ ID NO: 2932184 - DNA, 25 bp, Homo sapien
atgcctgcagcaggagtctcgggtc

SEQ ID NO: 2932185 - DNA, 25 bp, Homo sapien
gtctcgggtcctgcgccgacagcat

SEQ ID NO: 2932186 - DNA, 25 bp, Homo sapien
gagtctcgggtcctgcgccgacagc

SEQ ID NO: 2932187 - DNA, 25 bp, Homo sapien
agatgcctgcagcaggagtctcggg

SEQ ID NO: 2932188 - DNA, 25 bp, Homo sapien
gagaaggctgaaggcggtctcactt

SEQ ID NO: 2932189 - DNA, 25 bp, Homo sapien
gaaggctgaaggcggtctcactttc

SEQ ID NO: 2932190 - DNA, 25 bp, Homo sapien
agaaggctgaaggcggtctcacttt

SEQ ID NO: 2932191 - DNA, 25 bp, Homo sapien
tgtaccatcagggtaacattttcag

SEQ ID NO: 2932192 - DNA, 25 bp, Homo sapien
cagggcagggccataagaatcactg

SEQ ID NO: 2932193 - DNA, 25 bp, Homo sapien
ccagggcagggccataagaatcact

SEQ ID NO: 2932194 - DNA, 25 bp, Homo sapien
acattttcagccgtcctatttctct

SEQ ID NO: 2932195 - DNA, 25 bp, Homo sapien
ttcatggaattccagttatctgggc

SEQ ID NO: 2932196 - DNA, 25 bp, Homo sapien
tgcaggctctcctaacttaagcaaa

SEQ ID NO: 2932197 - DNA, 25 bp, Homo sapien
gctctgatctgctaaggttggtgtc

SEQ ID NO: 2932198 - DNA, 25 bp, Homo sapien
gaacacagctgtacgattatttgtc

SEQ ID NO: 2932199 - DNA, 25 bp, Homo sapien
tgttctcagaatggcccagaccaag

SEQ ID NO: 2932200 - DNA, 25 bp, Homo sapien
tgtggtctccagagcttgttctcag

SEQ ID NO: 2932201 - DNA, 25 bp, Homo sapien
catggtctgttaggagcttactggc

SEQ ID NO: 2932202 - DNA, 25 bp, Homo sapien
catttagggcttgggagagtccgaa

SEQ ID NO: 2932203 - DNA, 25 bp, Homo sapien
gtggcagacacgtgcaggcgcttct

SEQ ID NO: 2932204 - DNA, 25 bp, Homo sapien
cttacgaattaagaaatacttgact

SEQ ID NO: 2932205 - DNA, 25 bp, Homo sapien
tggagcaaataatgacctgtgtggc

SEQ ID NO: 2932206 - DNA, 25 bp, Homo sapien
cacgtgcaggcgcttctttgatagg

SEQ ID NO: 2932207 - DNA, 25 bp, Homo sapien
gcaatgcagatccaatagccaagta

SEQ ID NO: 2932208 - DNA, 25 bp, Homo sapien
catcactcggagagcaaagggtggc

SEQ ID NO: 2932209 - DNA, 25 bp, Homo sapien
ccacttggattgcagtggcctccct

SEQ ID NO: 2932210 - DNA, 25 bp, Homo sapien
tcaccagaatagttcgcaatgcaga

SEQ ID NO: 2932211 - DNA, 25 bp, Homo sapien
gccgccgttaaatcccactctggct

SEQ ID NO: 2932212 - DNA, 25 bp, Homo sapien
cccactctggctcggggtctgcgga

SEQ ID NO: 2932213 - DNA, 25 bp, Homo sapien
agccaggaaccaagcgcggcccaat

SEQ ID NO: 2932214 - DNA, 25 bp, Homo sapien
agccgcaggctccataaacccagcc

SEQ ID NO: 2932215 - DNA, 25 bp, Homo sapien
tgagaagtgggcctccgacagagcc

SEQ ID NO: 2932216 - DNA, 25 bp, Homo sapien
gggccactccgcatcagtgagaagt

SEQ ID NO: 2932217 - DNA, 25 bp, Homo sapien
taatcagtgcggcattaaccgctgc

SEQ ID NO: 2932218 - DNA, 25 bp, Homo sapien
ttactttcgctttcactggagcctg

SEQ ID NO: 2932219 - DNA, 25 bp, Homo sapien
tcatcctggtaccaccatgtcgaag

SEQ ID NO: 2932220 - DNA, 25 bp, Homo sapien
agatcatgctgacatcggacacgca

SEQ ID NO: 2932221 - DNA, 25 bp, Homo sapien
caaagtactcagtgtactttgtact

SEQ ID NO: 2932222 - DNA, 25 bp, Homo sapien
catgtcgaaggtttcctttaagatc

SEQ ID NO: 2932223 - DNA, 25 bp, Homo sapien
acttcccttctcacttcatttcatc

SEQ ID NO: 2932224 - DNA, 25 bp, Homo sapien
tcccaacttggtttcattctccctg

SEQ ID NO: 2932225 - DNA, 25 bp, Homo sapien
cttcccttctcacttcatttcatct

SEQ ID NO: 2932226 - DNA, 25 bp, Homo sapien
ttcccttctcacttcatttcatctt

SEQ ID NO: 2932227 - DNA, 25 bp, Homo sapien
ggtctgcggattaccaccttgagct

SEQ ID NO: 2932228 - DNA, 25 bp, Homo sapien
aagtgtctcacgagctatgtgtgct

SEQ ID NO: 2932229 - DNA, 25 bp, Homo sapien
agtcatggagcttgaacacctctgg

SEQ ID NO: 2932230 - DNA, 25 bp, Homo sapien
cactgctgcactggagttcctcaaa

SEQ ID NO: 2932231 - DNA, 25 bp, Homo sapien
ggtggttcaagtcaggaattcaacg

SEQ ID NO: 2932232 - DNA, 25 bp, Homo sapien
gaattcaacgttgattttggcgtta

SEQ ID NO: 2932233 - DNA, 25 bp, Homo sapien
aagtgataatacaccacgaccaagg

SEQ ID NO: 2932234 - DNA, 25 bp, Homo sapien
aggaggaaagatccttcaggccaga

SEQ ID NO: 2932235 - DNA, 25 bp, Homo sapien
tatggagtgctgtaccaaggtctct

SEQ ID NO: 2932236 - DNA, 25 bp, Homo sapien
tgatgggtacctgcctatctctgta

SEQ ID NO: 2932237 - DNA, 25 bp, Homo sapien
gaattccaggaatgctcacagatct

SEQ ID NO: 2932238 - DNA, 25 bp, Homo sapien
tctgaatctcaagcatggaaagcgg

SEQ ID NO: 2932239 - DNA, 25 bp, Homo sapien
taaggttacacgaagtcacagtgga

SEQ ID NO: 2932240 - DNA, 25 bp, Homo sapien
tgctggcacctatgtcttcgacttc

SEQ ID NO: 2932241 - DNA, 25 bp, Homo sapien
gttacattgtaacatctcagcgtag

SEQ ID NO: 2932242 - DNA, 25 bp, Homo sapien
ctcagcgtagctgtatgcattactc

SEQ ID NO: 2932243 - DNA, 25 bp, Homo sapien
ttgagactaagcaacacggaaggtg

SEQ ID NO: 2932244 - DNA, 25 bp, Homo sapien
aaagatggttctttcaattcccgca

SEQ ID NO: 2932245 - DNA, 25 bp, Homo sapien
tactgtagatctggcacctctgtgc

SEQ ID NO: 2932246 - DNA, 25 bp, Homo sapien
aaatggccaacagggatgagcgtcc

SEQ ID NO: 2932247 - DNA, 25 bp, Homo sapien
aagcaagggcaagaattatctctaa

SEQ ID NO: 2932248 - DNA, 25 bp, Homo sapien
agggcaagaattatctctaattatt

SEQ ID NO: 2932249 - DNA, 25 bp, Homo sapien
gcaagggcaagaattatctctaatt

SEQ ID NO: 2932250 - DNA, 25 bp, Homo sapien
caagggcaagaattatctctaatta

SEQ ID NO: 2932251 - DNA, 25 bp, Homo sapien
cttggctcaagcgatgaacccgctt

SEQ ID NO: 2932252 - DNA, 25 bp, Homo sapien
tcaagcgatgaacccgcttaggcct

SEQ ID NO: 2932253 - DNA, 25 bp, Homo sapien
tgttgttgtacagacgggggtccca

SEQ ID NO: 2932254 - DNA, 25 bp, Homo sapien
tcccgggcatctgagactacatttg

SEQ ID NO: 2932255 - DNA, 25 bp, Homo sapien
tccaaggcgttgactgagcacagag

SEQ ID NO: 2932256 - DNA, 25 bp, Homo sapien
cagtccgcgtcagtgagaacttggc

SEQ ID NO: 2932257 - DNA, 25 bp, Homo sapien
tatgggtttcgtagtcctcctctcc

SEQ ID NO: 2932258 - DNA, 25 bp, Homo sapien
agaacttggccgatgcgcggtgctt

SEQ ID NO: 2932259 - DNA, 25 bp, Homo sapien
tctacctggattgtttgaagaagca

SEQ ID NO: 2932260 - DNA, 25 bp, Homo sapien
taatgctggccatacagttgttgtg

SEQ ID NO: 2932261 - DNA, 25 bp, Homo sapien
gatggtgtccaggaacaacagagac

SEQ ID NO: 2932262 - DNA, 25 bp, Homo sapien
tcttccaaagctgctcggagtggac

SEQ ID NO: 2932263 - DNA, 25 bp, Homo sapien
taacttcaaaattcagccactgaga

SEQ ID NO: 2932264 - DNA, 25 bp, Homo sapien
tatctgacctaggaatctaaccaca

SEQ ID NO: 2932265 - DNA, 25 bp, Homo sapien
aatgcaggatcagttctaagtagac

SEQ ID NO: 2932266 - DNA, 25 bp, Homo sapien
gccactgagatatcaccttccaggt

SEQ ID NO: 2932267 - DNA, 25 bp, Homo sapien
gtctgggaaaatccctgcactacca

SEQ ID NO: 2932268 - DNA, 25 bp, Homo sapien
ttcttggatgccttcttggtggtct

SEQ ID NO: 2932269 - DNA, 25 bp, Homo sapien
gccttcttggtggtctgggaaaatc

SEQ ID NO: 2932270 - DNA, 25 bp, Homo sapien
atgccttcttggtggtctgggaaaa

SEQ ID NO: 2932271 - DNA, 25 bp, Homo sapien
ggctacggcgccgctttggagggag

SEQ ID NO: 2932272 - DNA, 25 bp, Homo sapien
gtggtggaagtgttcgtggtgagga

SEQ ID NO: 2932273 - DNA, 25 bp, Homo sapien
tggtggaagtgttcgtggtgaggat

SEQ ID NO: 2932274 - DNA, 25 bp, Homo sapien
aggtactgatgaccgctttctccta

SEQ ID NO: 2932275 - DNA, 25 bp, Homo sapien
tactgatgaccgctttctcctagct

SEQ ID NO: 2932276 - DNA, 25 bp, Homo sapien
actgatgaccgctttctcctagctc

SEQ ID NO: 2932277 - DNA, 25 bp, Homo sapien
gagaggtactgatgaccgctttctc

SEQ ID NO: 2932278 - DNA, 25 bp, Homo sapien
gcaacccatccactggacgttattt

SEQ ID NO: 2932279 - DNA, 25 bp, Homo sapien
caacccatccactggacgttatttt

SEQ ID NO: 2932280 - DNA, 25 bp, Homo sapien
tctcttcctgagtgagcttggtcat

SEQ ID NO: 2932281 - DNA, 25 bp, Homo sapien
cctgagtgagcttggtcatttcttt

SEQ ID NO: 2932282 - DNA, 25 bp, Homo sapien
aggtccagcgtgcagcttgggatca

SEQ ID NO: 2932283 - DNA, 25 bp, Homo sapien
gacgatctgaatcctcggttaatag

SEQ ID NO: 2932284 - DNA, 25 bp, Homo sapien
ggcactcaagtcttatttctggagg

SEQ ID NO: 2932285 - DNA, 25 bp, Homo sapien
gtcaggcactcaagtcttatttctg

SEQ ID NO: 2932286 - DNA, 25 bp, Homo sapien
caggcactcaagtcttatttctgga

SEQ ID NO: 2932287 - DNA, 25 bp, Homo sapien
gcactcaagtcttatttctggaggg

SEQ ID NO: 2932288 - DNA, 25 bp, Homo sapien
aaatcataggcatcaaagagatcgc

SEQ ID NO: 2932289 - DNA, 25 bp, Homo sapien
atcataggcatcaaagagatcgctg

SEQ ID NO: 2932290 - DNA, 25 bp, Homo sapien
ccaaatcataggcatcaaagagatc

SEQ ID NO: 2932291 - DNA, 25 bp, Homo sapien
cataggcatcaaagagatcgctgat

SEQ ID NO: 2932292 - DNA, 25 bp, Homo sapien
aactggtcacgtccttagttcccag

SEQ ID NO: 2932293 - DNA, 25 bp, Homo sapien
caggatgtttccctggtaactggtc

SEQ ID NO: 2932294 - DNA, 25 bp, Homo sapien
cctgcttgctgtgacagccgttccg

SEQ ID NO: 2932295 - DNA, 25 bp, Homo sapien
tgcttgctgtgacagccgttccggg

SEQ ID NO: 2932296 - DNA, 25 bp, Homo sapien
tccttactaagacttttcacgaaga

SEQ ID NO: 2932297 - DNA, 25 bp, Homo sapien
cttttcacgaagattgagagggttt

SEQ ID NO: 2932298 - DNA, 25 bp, Homo sapien
taagacttttcacgaagattgagag

SEQ ID NO: 2932299 - DNA, 25 bp, Homo sapien
cacgaagattgagagggttttagta

SEQ ID NO: 2932300 - DNA, 25 bp, Homo sapien
tctctgtgtaccgtgagattggccg

SEQ ID NO: 2932301 - DNA, 25 bp, Homo sapien
gtaccgtgagattggccgccaactc

SEQ ID NO: 2932302 - DNA, 25 bp, Homo sapien
caatgagattctctgtgtaccgtga

SEQ ID NO: 2932303 - DNA, 25 bp, Homo sapien
acactatgtcggcacaatgagattc

SEQ ID NO: 2932304 - DNA, 25 bp, Homo sapien
tggactgttctggaccaggctgaga

SEQ ID NO: 2932305 - DNA, 25 bp, Homo sapien
tccactgtactttttggactgttct

SEQ ID NO: 2932306 - DNA, 25 bp, Homo sapien
aatgacgcccttctggctagctttc

SEQ ID NO: 2932307 - DNA, 25 bp, Homo sapien
caatgacgcccttctggctagcttt

SEQ ID NO: 2932308 - DNA, 25 bp, Homo sapien
atcaagatgaataagtaagataaac

SEQ ID NO: 2932309 - DNA, 25 bp, Homo sapien
aacattttgcacagggcagtatagc

SEQ ID NO: 2932310 - DNA, 25 bp, Homo sapien
ttgcacagggcagtatagctgtcac

SEQ ID NO: 2932311 - DNA, 25 bp, Homo sapien
aagataaacattttgcacagggcag

SEQ ID NO: 2932312 - DNA, 25 bp, Homo sapien
agtctgttgtcttggcaggctgcac

SEQ ID NO: 2932313 - DNA, 25 bp, Homo sapien
tagtctgttgtcttggcaggctgca

SEQ ID NO: 2932314 - DNA, 25 bp, Homo sapien
ttagtctgttgtcttggcaggctgc

SEQ ID NO: 2932315 - DNA, 25 bp, Homo sapien
tatcaggggcctccaagtaattgtt

SEQ ID NO: 2932316 - DNA, 25 bp, Homo sapien
gggcctccaagtaattgttctcact

SEQ ID NO: 2932317 - DNA, 25 bp, Homo sapien
ctccaagtaattgttctcactgcgg

SEQ ID NO: 2932318 - DNA, 25 bp, Homo sapien
aatagggctgggcatatcaggggcc

SEQ ID NO: 2932319 - DNA, 25 bp, Homo sapien
tacttgacaggactctgattttaac

SEQ ID NO: 2932320 - DNA, 25 bp, Homo sapien
catgtctacttgacaggactctgat

SEQ ID NO: 2932321 - DNA, 25 bp, Homo sapien
tgtctacttgacaggactctgattt

SEQ ID NO: 2932322 - DNA, 25 bp, Homo sapien
ggacatgtctacttgacaggactct

SEQ ID NO: 2932323 - DNA, 25 bp, Homo sapien
gaaaaaacggtattcacacatcctc

SEQ ID NO: 2932324 - DNA, 25 bp, Homo sapien
atttcagatagtataaatactacca

SEQ ID NO: 2932325 - DNA, 25 bp, Homo sapien
cattaataatgttaagttacgttgc

SEQ ID NO: 2932326 - DNA, 25 bp, Homo sapien
taattaggcttagggttgttatcca

SEQ ID NO: 2932327 - DNA, 25 bp, Homo sapien
agaaagagatgtagagggttctcat

SEQ ID NO: 2932328 - DNA, 25 bp, Homo sapien
ggccagggatgtaggactcaagccc

SEQ ID NO: 2932329 - DNA, 25 bp, Homo sapien
agagaaagagatgtagagggttctc

SEQ ID NO: 2932330 - DNA, 25 bp, Homo sapien
gatgtaggactcaagcccagaggaa

SEQ ID NO: 2932331 - DNA, 25 bp, Homo sapien
tgtgatattttctagaagctgggct

SEQ ID NO: 2932332 - DNA, 25 bp, Homo sapien
tcagatcataaagaactggagggtt

SEQ ID NO: 2932333 - DNA, 25 bp, Homo sapien
ggtttaatgaagaccctgatacatc

SEQ ID NO: 2932334 - DNA, 25 bp, Homo sapien
tgatagcagttaacagccccgtggt

SEQ ID NO: 2932335 - DNA, 25 bp, Homo sapien
ccggatatcccataaaagtccacaa

SEQ ID NO: 2932336 - DNA, 25 bp, Homo sapien
tgtctagctcctcccagtttggtca

SEQ ID NO: 2932337 - DNA, 25 bp, Homo sapien
tcatctgcacgaaaaagtcccggat

SEQ ID NO: 2932338 - DNA, 25 bp, Homo sapien
ggtcacagactacaactcttgcctg

SEQ ID NO: 2932339 - DNA, 25 bp, Homo sapien
aggaattgcttaatcctaaacgtct

SEQ ID NO: 2932340 - DNA, 25 bp, Homo sapien
ggccaggaattgcttaatcctaaac

SEQ ID NO: 2932341 - DNA, 25 bp, Homo sapien
ttgcttaatcctaaacgtcttgtga

SEQ ID NO: 2932342 - DNA, 25 bp, Homo sapien
gaattgcttaatcctaaacgtcttg

SEQ ID NO: 2932343 - DNA, 25 bp, Homo sapien
taatctaaggtccaaatcccacgaa

SEQ ID NO: 2932344 - DNA, 25 bp, Homo sapien
gcagcccgcttttctaagtcgtaaa

SEQ ID NO: 2932345 - DNA, 25 bp, Homo sapien
gaactcccgggaagactgagagtga

SEQ ID NO: 2932346 - DNA, 25 bp, Homo sapien
caacatttcacgtaggtaaagacca

SEQ ID NO: 2932347 - DNA, 25 bp, Homo sapien
tactagtctttgtagccactgcact

SEQ ID NO: 2932348 - DNA, 25 bp, Homo sapien
gagttcctaaagaaccaggactatg

SEQ ID NO: 2932349 - DNA, 25 bp, Homo sapien
cactcggaatggtgcctagtacata

SEQ ID NO: 2932350 - DNA, 25 bp, Homo sapien
tgagcgactcttcctactaaaccct

SEQ ID NO: 2932351 - DNA, 25 bp, Homo sapien
tctagattgttatatagctcaggct

SEQ ID NO: 2932352 - DNA, 25 bp, Homo sapien
tttcatggagggataaatacccacc

SEQ ID NO: 2932353 - DNA, 25 bp, Homo sapien
gaagtgggtaagattacagccagag

SEQ ID NO: 2932354 - DNA, 25 bp, Homo sapien
tggctgagtaaaaggcgctttcatg

SEQ ID NO: 2932355 - DNA, 25 bp, Homo sapien
tcagtagcaactaaataaaaggttc

SEQ ID NO: 2932356 - DNA, 25 bp, Homo sapien
gaagataaagcagggcaaagcatgg

SEQ ID NO: 2932357 - DNA, 25 bp, Homo sapien
tgaggtatgattaccagatttatat

SEQ ID NO: 2932358 - DNA, 25 bp, Homo sapien
agagaacttgaggtatgattaccag

SEQ ID NO: 2932359 - DNA, 25 bp, Homo sapien
accaccacgcccagagtcttgccat

SEQ ID NO: 2932360 - DNA, 25 bp, Homo sapien
agctactgtacctggcctagaaaat

SEQ ID NO: 2932361 - DNA, 25 bp, Homo sapien
gctgacatctcaggtgagcaccacc

SEQ ID NO: 2932362 - DNA, 25 bp, Homo sapien
gagtagctgacatctcaggtgagca

SEQ ID NO: 2932363 - DNA, 25 bp, Homo sapien
caaccatgggtttctaattaatatt

SEQ ID NO: 2932364 - DNA, 25 bp, Homo sapien
aaataaagccttctattcaggtaag

SEQ ID NO: 2932365 - DNA, 25 bp, Homo sapien
catctccttgtattacctaagagca

SEQ ID NO: 2932366 - DNA, 25 bp, Homo sapien
cagtgccctagtttcacatccaaga

SEQ ID NO: 2932367 - DNA, 25 bp, Homo sapien
taagagatcataccctggtcaaagc

SEQ ID NO: 2932368 - DNA, 25 bp, Homo sapien
ggctctacttcactcatcatcgcat

SEQ ID NO: 2932369 - DNA, 25 bp, Homo sapien
gtgaagcaatggcaataccaggtca

SEQ ID NO: 2932370 - DNA, 25 bp, Homo sapien
gagagaagattaagagatcataccc

SEQ ID NO: 2932371 - DNA, 25 bp, Homo sapien
taagtgaataatagaattgagccag

SEQ ID NO: 2932372 - DNA, 25 bp, Homo sapien
tcaggattgaaatgatgtagtcctc

SEQ ID NO: 2932373 - DNA, 25 bp, Homo sapien
tagaattgagccagattcaggattg

SEQ ID NO: 2932374 - DNA, 25 bp, Homo sapien
agtcctccatgaagaattcaaagca

SEQ ID NO: 2932375 - DNA, 25 bp, Homo sapien
gacaacaagaattcagcctcatgca

SEQ ID NO: 2932376 - DNA, 25 bp, Homo sapien
taagagcctctgctgacataagtgt

SEQ ID NO: 2932377 - DNA, 25 bp, Homo sapien
cacttaagttgcctatgtaggagca

SEQ ID NO: 2932378 - DNA, 25 bp, Homo sapien
aaaaatcctctgctccgacaacaag

SEQ ID NO: 2932379 - DNA, 25 bp, Homo sapien
tgtcaaaaagacctcgcagagagag

SEQ ID NO: 2932380 - DNA, 25 bp, Homo sapien
gcggtgccccaaacagcttgtcaaa

SEQ ID NO: 2932381 - DNA, 25 bp, Homo sapien
catgcagacccagctacgaaaagta

SEQ ID NO: 2932382 - DNA, 25 bp, Homo sapien
cagagctgtagctttccagcgaggc

SEQ ID NO: 2932383 - DNA, 25 bp, Homo sapien
ggtgtaatggtttcctgcccgtcac

SEQ ID NO: 2932384 - DNA, 25 bp, Homo sapien
ccaggtggtggtgtaatggtttcct

SEQ ID NO: 2932385 - DNA, 25 bp, Homo sapien
taagccactgcgcaaaacccacttt

SEQ ID NO: 2932386 - DNA, 25 bp, Homo sapien
tgcccgtcacgattcttttctaggt

SEQ ID NO: 2932387 - DNA, 25 bp, Homo sapien
agcctggtgttacccttctctccgt

SEQ ID NO: 2932388 - DNA, 25 bp, Homo sapien
ggtcacgctcttaggatttcctcgc

SEQ ID NO: 2932389 - DNA, 25 bp, Homo sapien
cggtctccgacccagcctggtgtta

SEQ ID NO: 2932390 - DNA, 25 bp, Homo sapien
gacggttccctgcatcatcaacggt

SEQ ID NO: 2932391 - DNA, 25 bp, Homo sapien
gcagtggttcaatttgggctcactc

SEQ ID NO: 2932392 - DNA, 25 bp, Homo sapien
tccagtgcagtggttcaatttgggc

SEQ ID NO: 2932393 - DNA, 25 bp, Homo sapien
ccagtgcagtggttcaatttgggct

SEQ ID NO: 2932394 - DNA, 25 bp, Homo sapien
gtggttcaatttgggctcactccaa

SEQ ID NO: 2932395 - DNA, 25 bp, Homo sapien
attggttgtgaaatacttggagtca

SEQ ID NO: 2932396 - DNA, 25 bp, Homo sapien
ttgtgaaatacttggagtcagtcat

SEQ ID NO: 2932397 - DNA, 25 bp, Homo sapien
ttttattggttgtgaaatacttgga

SEQ ID NO: 2932398 - DNA, 25 bp, Homo sapien
gttgtgaaatacttggagtcagtca

SEQ ID NO: 2932399 - DNA, 25 bp, Homo sapien
gatgtgttgccaagactgaaagcta

SEQ ID NO: 2932400 - DNA, 25 bp, Homo sapien
cccagaccatatccaggacaactga

SEQ ID NO: 2932401 - DNA, 25 bp, Homo sapien
gctgagcaattctgatgtgttgcca

SEQ ID NO: 2932402 - DNA, 25 bp, Homo sapien
ctgaggttgagacccaggcatcagt

SEQ ID NO: 2932403 - DNA, 25 bp, Homo sapien
catggatcacgaagcagcatatggc

SEQ ID NO: 2932404 - DNA, 25 bp, Homo sapien
cgtgggcttctacaccgggcagctg

SEQ ID NO: 2932405 - DNA, 25 bp, Homo sapien
ccttcatgcagagtgacatggatca

SEQ ID NO: 2932406 - DNA, 25 bp, Homo sapien
gaggactgggacattaaaacctgac

SEQ ID NO: 2932407 - DNA, 25 bp, Homo sapien
ctctccgaaaggcgcacgagacagc

SEQ ID NO: 2932408 - DNA, 25 bp, Homo sapien
aaaggcgcacgagacagctttcttc

SEQ ID NO: 2932409 - DNA, 25 bp, Homo sapien
cgaaaggcgcacgagacagctttct

SEQ ID NO: 2932410 - DNA, 25 bp, Homo sapien
tccgaaaggcgcacgagacagcttt

SEQ ID NO: 2932411 - DNA, 25 bp, Homo sapien
gctggaccgtgcaggcgccaggctc

SEQ ID NO: 2932412 - DNA, 25 bp, Homo sapien
tcagtggccccggagcgggggcgcc

SEQ ID NO: 2932413 - DNA, 25 bp, Homo sapien
tccgcttccggaggtcgctactgct

SEQ ID NO: 2932414 - DNA, 25 bp, Homo sapien
agtctccgcttccggaggtcgctac

SEQ ID NO: 2932415 - DNA, 25 bp, Homo sapien
gaaacagtggggacagtctccgctt

SEQ ID NO: 2932416 - DNA, 25 bp, Homo sapien
gcttccggaggtcgctactgctgcc

SEQ ID NO: 2932417 - DNA, 25 bp, Homo sapien
ccaccttcaagactgttcctgtcgt

SEQ ID NO: 2932418 - DNA, 25 bp, Homo sapien
cctgtcgttcctttcaaccagatct

SEQ ID NO: 2932419 - DNA, 25 bp, Homo sapien
tacatcctccagctcatctaccata

SEQ ID NO: 2932420 - DNA, 25 bp, Homo sapien
agaggttgactactcccatctcaac

SEQ ID NO: 2932421 - DNA, 25 bp, Homo sapien
acaaagttgggcttagcactgtgtc

SEQ ID NO: 2932422 - DNA, 25 bp, Homo sapien
ccacgctcggctttacagattaaga

SEQ ID NO: 2932423 - DNA, 25 bp, Homo sapien
acagagtcagtgacaaagttgggct

SEQ ID NO: 2932424 - DNA, 25 bp, Homo sapien
ggctcaaagttcacagagtcagtga

SEQ ID NO: 2932425 - DNA, 25 bp, Homo sapien
tctggaggagaacataaacgtaggt

SEQ ID NO: 2932426 - DNA, 25 bp, Homo sapien
gatcttcaagaaccacaagagtggg

SEQ ID NO: 2932427 - DNA, 25 bp, Homo sapien
taataaccaataccaggatagcagg

SEQ ID NO: 2932428 - DNA, 25 bp, Homo sapien
gaatattacctgactcactgacaag

SEQ ID NO: 2932429 - DNA, 25 bp, Homo sapien
gagttcagcttttagttcaaatatt

SEQ ID NO: 2932430 - DNA, 25 bp, Homo sapien
cattgttgagttcagcttttagttc

SEQ ID NO: 2932431 - DNA, 25 bp, Homo sapien
ttttcattgttgagttcagctttta

SEQ ID NO: 2932432 - DNA, 25 bp, Homo sapien
gcagcaatcactttcttcacagcct

SEQ ID NO: 2932433 - DNA, 25 bp, Homo sapien
ttagatagatggtcacaggacagca

SEQ ID NO: 2932434 - DNA, 25 bp, Homo sapien
ctccttagatagatggtcacaggac

SEQ ID NO: 2932435 - DNA, 25 bp, Homo sapien
ccaactccttagatagatggtcaca

SEQ ID NO: 2932436 - DNA, 25 bp, Homo sapien
gatagatggtcacaggacagcaatt

SEQ ID NO: 2932437 - DNA, 25 bp, Homo sapien
aaaggaacaataattcttcatatcc

SEQ ID NO: 2932438 - DNA, 25 bp, Homo sapien
aggaacaataattcttcatatccat

SEQ ID NO: 2932439 - DNA, 25 bp, Homo sapien
aaggaacaataattcttcatatcca

SEQ ID NO: 2932440 - DNA, 25 bp, Homo sapien
tcaggagtgcgacagggcaaaagga

SEQ ID NO: 2932441 - DNA, 25 bp, Homo sapien
cattgggtgggtgccttagataatc

SEQ ID NO: 2932442 - DNA, 25 bp, Homo sapien
cactggtggcatgtaacgaggctca

SEQ ID NO: 2932443 - DNA, 25 bp, Homo sapien
tatccttcacgtatgatggaaacac

SEQ ID NO: 2932444 - DNA, 25 bp, Homo sapien
caatttccagatcagactgtgccca

SEQ ID NO: 2932445 - DNA, 25 bp, Homo sapien
tgactcttggcgtagttcatcaagt

SEQ ID NO: 2932446 - DNA, 25 bp, Homo sapien
aagcttctttagttccagattgtca

SEQ ID NO: 2932447 - DNA, 25 bp, Homo sapien
ttcatcaagtagagatacacaagct

SEQ ID NO: 2932448 - DNA, 25 bp, Homo sapien
tggctgactcttggcgtagttcatc

SEQ ID NO: 2932449 - DNA, 25 bp, Homo sapien
tcaaactctgttattgaggccttgg

SEQ ID NO: 2932450 - DNA, 25 bp, Homo sapien
tttaagagtttaggtgaagaagtca

SEQ ID NO: 2932451 - DNA, 25 bp, Homo sapien
cagaggtttagggagttcgtaccat

SEQ ID NO: 2932452 - DNA, 25 bp, Homo sapien
gattcactctagtgccaggcagagg

SEQ ID NO: 2932453 - DNA, 25 bp, Homo sapien
gatacattctacatgagctccaatc

SEQ ID NO: 2932454 - DNA, 25 bp, Homo sapien
tgagatcccgtagagaatccagaaa

SEQ ID NO: 2932455 - DNA, 25 bp, Homo sapien
cggagcggctcacagagatattctg

SEQ ID NO: 2932456 - DNA, 25 bp, Homo sapien
ccttcaagcacttgcggagcggctc

SEQ ID NO: 2932457 - DNA, 25 bp, Homo sapien
ctatgagatcccgtagagaatccag

SEQ ID NO: 2932458 - DNA, 25 bp, Homo sapien
taaccagcaatggagtctgggactc

SEQ ID NO: 2932459 - DNA, 25 bp, Homo sapien
catccatgaaggtagtaaccagcaa

SEQ ID NO: 2932460 - DNA, 25 bp, Homo sapien
taaaagcatctaccactgtgcatgg

SEQ ID NO: 2932461 - DNA, 25 bp, Homo sapien
tctgggactcagaactaggttggga

SEQ ID NO: 2932462 - DNA, 25 bp, Homo sapien
gggtatgaccttgattcaccaagaa

SEQ ID NO: 2932463 - DNA, 25 bp, Homo sapien
tatgaccttgattcaccaagaacag

SEQ ID NO: 2932464 - DNA, 25 bp, Homo sapien
gaagggggtatgaccttgattcacc

SEQ ID NO: 2932465 - DNA, 25 bp, Homo sapien
tgaccttgattcaccaagaacagca

SEQ ID NO: 2932466 - DNA, 25 bp, Homo sapien
agtgcattcattcagggctgtcagc

SEQ ID NO: 2932467 - DNA, 25 bp, Homo sapien
tgttctgtgggttcagatcaagtaa

SEQ ID NO: 2932468 - DNA, 25 bp, Homo sapien
atgttctgtgggttcagatcaagta

SEQ ID NO: 2932469 - DNA, 25 bp, Homo sapien
cagtgcattcattcagggctgtcag

SEQ ID NO: 2932470 - DNA, 25 bp, Homo sapien
tcagggcgacatactgcacttctgg

SEQ ID NO: 2932471 - DNA, 25 bp, Homo sapien
ggcgacatactgcacttctggctcc

SEQ ID NO: 2932472 - DNA, 25 bp, Homo sapien
cgacatactgcacttctggctcccc

SEQ ID NO: 2932473 - DNA, 25 bp, Homo sapien
agggcgacatactgcacttctggct

SEQ ID NO: 2932474 - DNA, 25 bp, Homo sapien
ttgagatgccaaacgaatcatgatg

SEQ ID NO: 2932475 - DNA, 25 bp, Homo sapien
ttggcttgagatgccaaacgaatca

SEQ ID NO: 2932476 - DNA, 25 bp, Homo sapien
gcttgagatgccaaacgaatcatga

SEQ ID NO: 2932477 - DNA, 25 bp, Homo sapien
agatgccaaacgaatcatgatgtcc

SEQ ID NO: 2932478 - DNA, 25 bp, Homo sapien
aacatccacctctgtagcatattct

SEQ ID NO: 2932479 - DNA, 25 bp, Homo sapien
ccacctctgtagcatattctttcag

SEQ ID NO: 2932480 - DNA, 25 bp, Homo sapien
catccacctctgtagcatattcttt

SEQ ID NO: 2932481 - DNA, 25 bp, Homo sapien
tccacctctgtagcatattctttca

SEQ ID NO: 2932482 - DNA, 25 bp, Homo sapien
ttcttggaccacataattcactttg

SEQ ID NO: 2932483 - DNA, 25 bp, Homo sapien
cggaagatgtccctgatgacaacaa

SEQ ID NO: 2932484 - DNA, 25 bp, Homo sapien
ggaagatgtccctgatgacaacaat

SEQ ID NO: 2932485 - DNA, 25 bp, Homo sapien
atccatctccttggctaatgtagtt

SEQ ID NO: 2932486 - DNA, 25 bp, Homo sapien
catctccttggctaatgtagtttta

SEQ ID NO: 2932487 - DNA, 25 bp, Homo sapien
taatgtagttttaacgattagaatg

SEQ ID NO: 2932488 - DNA, 25 bp, Homo sapien
ccttggctaatgtagttttaacgat

SEQ ID NO: 2932489 - DNA, 25 bp, Homo sapien
ctgggtgctttcatcgtgaaaaccc

SEQ ID NO: 2932490 - DNA, 25 bp, Homo sapien
tcatcgtgaaaaccctccaggaagc

SEQ ID NO: 2932491 - DNA, 25 bp, Homo sapien
atcgtgaaaaccctccaggaagctt

SEQ ID NO: 2932492 - DNA, 25 bp, Homo sapien
gctttcatcgtgaaaaccctccagg

SEQ ID NO: 2932493 - DNA, 25 bp, Homo sapien
ctgtgttgccaaactcaagacctgc

SEQ ID NO: 2932494 - DNA, 25 bp, Homo sapien
gtgttgccaaactcaagacctgctg

SEQ ID NO: 2932495 - DNA, 25 bp, Homo sapien
tcaagacctgctggactagctcctg

SEQ ID NO: 2932496 - DNA, 25 bp, Homo sapien
agacctgctggactagctcctgtgt

SEQ ID NO: 2932497 - DNA, 25 bp, Homo sapien
ctgtaacagggtcagttgagagaag

SEQ ID NO: 2932498 - DNA, 25 bp, Homo sapien
ggtcagttgagagaaggcgccaata

SEQ ID NO: 2932499 - DNA, 25 bp, Homo sapien
gccaataaatatagccccggtctcg

SEQ ID NO: 2932500 - DNA, 25 bp, Homo sapien
gagaaggcgccaataaatatagccc

SEQ ID NO: 2932501 - DNA, 25 bp, Homo sapien
ttagctcatccagcagagttggctc

SEQ ID NO: 2932502 - DNA, 25 bp, Homo sapien
cagagttggctcaataaggtccgtc

SEQ ID NO: 2932503 - DNA, 25 bp, Homo sapien
cacaaaagcattgggaggcttatga

SEQ ID NO: 2932504 - DNA, 25 bp, Homo sapien
tccagcagagttggctcaataaggt

SEQ ID NO: 2932505 - DNA, 25 bp, Homo sapien
tgacatatgttcaacggccgtggta

SEQ ID NO: 2932506 - DNA, 25 bp, Homo sapien
acatatgttcaacggccgtggtatc

SEQ ID NO: 2932507 - DNA, 25 bp, Homo sapien
cagtgacatatgttcaacggccgtg

SEQ ID NO: 2932508 - DNA, 25 bp, Homo sapien
ccagtgacatatgttcaacggccgt

SEQ ID NO: 2932509 - DNA, 25 bp, Homo sapien
gtgccaacagggctgtcacctgcat

SEQ ID NO: 2932510 - DNA, 25 bp, Homo sapien
tgaggctgttccaggttcgttgcag

SEQ ID NO: 2932511 - DNA, 25 bp, Homo sapien
tcgttgcagtggtagtgccaacagg

SEQ ID NO: 2932512 - DNA, 25 bp, Homo sapien
caggttcgttgcagtggtagtgcca

SEQ ID NO: 2932513 - DNA, 25 bp, Homo sapien
ggacacctgtggcacattgactggg

SEQ ID NO: 2932514 - DNA, 25 bp, Homo sapien
cagactatctagtcctcctcctagg

SEQ ID NO: 2932515 - DNA, 25 bp, Homo sapien
actatctagtcctcctcctaggaga

SEQ ID NO: 2932516 - DNA, 25 bp, Homo sapien
gaggacacctgtggcacattgactg

SEQ ID NO: 2932517 - DNA, 25 bp, Homo sapien
gcaaatgttcgcaggtattctggac

SEQ ID NO: 2932518 - DNA, 25 bp, Homo sapien
tatccagagttaagagctaggaaca

SEQ ID NO: 2932519 - DNA, 25 bp, Homo sapien
ggtcactttaatgccgttcaggtca

SEQ ID NO: 2932520 - DNA, 25 bp, Homo sapien
gagaatttatgtgggctatccagag

SEQ ID NO: 2932521 - DNA, 25 bp, Homo sapien
taaaagtccactgccgccttagaaa

SEQ ID NO: 2932522 - DNA, 25 bp, Homo sapien
gatgttctcgaaaaaggaaccttga

SEQ ID NO: 2932523 - DNA, 25 bp, Homo sapien
taaccacatacggatccaaagcaaa

SEQ ID NO: 2932524 - DNA, 25 bp, Homo sapien
cagaataagctgaagaaaactgcac

SEQ ID NO: 2932525 - DNA, 25 bp, Homo sapien
tgccggacttcctccaatgcccccg

SEQ ID NO: 2932526 - DNA, 25 bp, Homo sapien
ggacttcctccaatgcccccgccaa

SEQ ID NO: 2932527 - DNA, 25 bp, Homo sapien
gccggacttcctccaatgcccccgc

SEQ ID NO: 2932528 - DNA, 25 bp, Homo sapien
acttcctccaatgcccccgccaagg

SEQ ID NO: 2932529 - DNA, 25 bp, Homo sapien
gagccacatatccaccaggtgccat

SEQ ID NO: 2932530 - DNA, 25 bp, Homo sapien
gccttaggagccacatatccaccag

SEQ ID NO: 2932531 - DNA, 25 bp, Homo sapien
taggagccacatatccaccaggtgc

SEQ ID NO: 2932532 - DNA, 25 bp, Homo sapien
cttaggagccacatatccaccaggt

SEQ ID NO: 2932533 - DNA, 25 bp, Homo sapien
tcatttccatatagatgtgcccttg

SEQ ID NO: 2932534 - DNA, 25 bp, Homo sapien
ttttgttaaactggattgcaaaatc

SEQ ID NO: 2932535 - DNA, 25 bp, Homo sapien
tatttttgttaaactggattgcaaa

SEQ ID NO: 2932536 - DNA, 25 bp, Homo sapien
ccatcttcatgactgggcccaaggt

SEQ ID NO: 2932537 - DNA, 25 bp, Homo sapien
aggttccatcttcatgactgggccc

SEQ ID NO: 2932538 - DNA, 25 bp, Homo sapien
tggcatcagtggtgtatggatggcc

SEQ ID NO: 2932539 - DNA, 25 bp, Homo sapien
tggtgtatggatggccagaggagtg

SEQ ID NO: 2932540 - DNA, 25 bp, Homo sapien
taccacctgagtgaagtaaatctct

SEQ ID NO: 2932541 - DNA, 25 bp, Homo sapien
accacctgagtgaagtaaatctctg

SEQ ID NO: 2932542 - DNA, 25 bp, Homo sapien
ttgtaccacctgagtgaagtaaatc

SEQ ID NO: 2932543 - DNA, 25 bp, Homo sapien
ttaacttgtaccacctgagtgaagt

SEQ ID NO: 2932544 - DNA, 25 bp, Homo sapien
aggatcctgtgctggaaaagcccct

SEQ ID NO: 2932545 - DNA, 25 bp, Homo sapien
ttagtgaactggcaaacaggcctgc

SEQ ID NO: 2932546 - DNA, 25 bp, Homo sapien
cattcttgcgtgcatgctgactgtc

SEQ ID NO: 2932547 - DNA, 25 bp, Homo sapien
aaaaggcagtcaactactgtggcaa

SEQ ID NO: 2932548 - DNA, 25 bp, Homo sapien
gacatgtacaggaatatctaaaaca

SEQ ID NO: 2932549 - DNA, 25 bp, Homo sapien
ctaaaacagaaaaatccagctgggt

SEQ ID NO: 2932550 - DNA, 25 bp, Homo sapien
aaacagaaaaatccagctgggtgtg

SEQ ID NO: 2932551 - DNA, 25 bp, Homo sapien
catgtacaggaatatctaaaacaga

SEQ ID NO: 2932552 - DNA, 25 bp, Homo sapien
cgtggtcccacaaatgcaatcagag

SEQ ID NO: 2932553 - DNA, 25 bp, Homo sapien
cactgactggtttggcttgcacaac

SEQ ID NO: 2932554 - DNA, 25 bp, Homo sapien
tctattcaaggagcatcgtggtccc

SEQ ID NO: 2932555 - DNA, 25 bp, Homo sapien
caactgtctgacgtgggaatcgcta

SEQ ID NO: 2932556 - DNA, 25 bp, Homo sapien
tacatatacatattactgtcaggag

SEQ ID NO: 2932557 - DNA, 25 bp, Homo sapien
cacagtgggagctatggaatcgaga

SEQ ID NO: 2932558 - DNA, 25 bp, Homo sapien
tcaggagcacagtgggagctatgga

SEQ ID NO: 2932559 - DNA, 25 bp, Homo sapien
ggggaagaaggtcatatacatatac

SEQ ID NO: 2932560 - DNA, 25 bp, Homo sapien
ggacaaaaggaggacacgtgactgt

SEQ ID NO: 2932561 - DNA, 25 bp, Homo sapien
caggccactgaacacagatgctgtc

SEQ ID NO: 2932562 - DNA, 25 bp, Homo sapien
ggacacgtgactgtcaagatgactg

SEQ ID NO: 2932563 - DNA, 25 bp, Homo sapien
gcaggccactgaacacagatgctgt

SEQ ID NO: 2932564 - DNA, 25 bp, Homo sapien
tattgaatcaaaaaatcgtgaaggc

SEQ ID NO: 2932565 - DNA, 25 bp, Homo sapien
catcctcagattagttagctgcaag

SEQ ID NO: 2932566 - DNA, 25 bp, Homo sapien
taataggcagtaattggtgtcaatg

SEQ ID NO: 2932567 - DNA, 25 bp, Homo sapien
cactgttatgcctatgttctgcctg

SEQ ID NO: 2932568 - DNA, 25 bp, Homo sapien
tgtcaaatgggagtccaaagcacag

SEQ ID NO: 2932569 - DNA, 25 bp, Homo sapien
ttagaatgacgaaccttcagggctg

SEQ ID NO: 2932570 - DNA, 25 bp, Homo sapien
taaagccttgattcgaaaggaagcc

SEQ ID NO: 2932571 - DNA, 25 bp, Homo sapien
aaaaggcaatgagctcctaagagcc

SEQ ID NO: 2932572 - DNA, 25 bp, Homo sapien
gacactagtctacatactggaatag

SEQ ID NO: 2932573 - DNA, 25 bp, Homo sapien
agaagcggccgtttctgctaggtgc

SEQ ID NO: 2932574 - DNA, 25 bp, Homo sapien
caagctaggaccaggcagtgacgtc

SEQ ID NO: 2932575 - DNA, 25 bp, Homo sapien
gaatgattatatgcaggctggtcca

SEQ ID NO: 2932576 - DNA, 25 bp, Homo sapien
gcagatcacagatggtaccaagaag

SEQ ID NO: 2932577 - DNA, 25 bp, Homo sapien
tgaagttccatgctaaatcccataa

SEQ ID NO: 2932578 - DNA, 25 bp, Homo sapien
caagtatccctagcttggtgggtca

SEQ ID NO: 2932579 - DNA, 25 bp, Homo sapien
tgggtcatgaccaaccggtagttct

SEQ ID NO: 2932580 - DNA, 25 bp, Homo sapien
ctttaggatgtactagagcatgggt

SEQ ID NO: 2932581 - DNA, 25 bp, Homo sapien
tttaggatgtactagagcatgggtg

SEQ ID NO: 2932582 - DNA, 25 bp, Homo sapien
tctttaggatgtactagagcatggg

SEQ ID NO: 2932583 - DNA, 25 bp, Homo sapien
taggatgtactagagcatgggtggg

SEQ ID NO: 2932584 - DNA, 25 bp, Homo sapien
tttgcgttctctctcccagaagtgt

SEQ ID NO: 2932585 - DNA, 25 bp, Homo sapien
tccttactttaaatggtgcctgtat

SEQ ID NO: 2932586 - DNA, 25 bp, Homo sapien
cagaagtgtccatccaattattctc

SEQ ID NO: 2932587 - DNA, 25 bp, Homo sapien
gaagtgtccatccaattattctcct

SEQ ID NO: 2932588 - DNA, 25 bp, Homo sapien
tatggttggaaaaagcttgtttggc

SEQ ID NO: 2932589 - DNA, 25 bp, Homo sapien
ttatttcccaggtcttatggttgga

SEQ ID NO: 2932590 - DNA, 25 bp, Homo sapien
cactggtaaacctgatgactataag

SEQ ID NO: 2932591 - DNA, 25 bp, Homo sapien
tatgattctaccatagcctgcttaa

SEQ ID NO: 2932592 - DNA, 25 bp, Homo sapien
tcaaatgaggacatcgcagggagcc

SEQ ID NO: 2932593 - DNA, 25 bp, Homo sapien
taggaggaaaagaacagcgctgtgt

SEQ ID NO: 2932594 - DNA, 25 bp, Homo sapien
tcatagaactgtgacaacctgcaac

SEQ ID NO: 2932595 - DNA, 25 bp, Homo sapien
caaactggcccatatactgcaaagc

SEQ ID NO: 2932596 - DNA, 25 bp, Homo sapien
cattttgccatcttctacaaaaagc

SEQ ID NO: 2932597 - DNA, 25 bp, Homo sapien
aaagcacattgagtgggatgaggca

SEQ ID NO: 2932598 - DNA, 25 bp, Homo sapien
tgaagtagaagacatcgatattgtt

SEQ ID NO: 2932599 - DNA, 25 bp, Homo sapien
aagacatcgatattgtttttcacag

SEQ ID NO: 2932600 - DNA, 25 bp, Homo sapien
gctatgctctgcctgacatgcacag

SEQ ID NO: 2932601 - DNA, 25 bp, Homo sapien
actcaaaacttctggggctatgctc

SEQ ID NO: 2932602 - DNA, 25 bp, Homo sapien
acatgcacaggaagggcaaaggtat

SEQ ID NO: 2932603 - DNA, 25 bp, Homo sapien
caaaggtatattcagcaggacaggc

SEQ ID NO: 2932604 - DNA, 25 bp, Homo sapien
aagttcattttcattgggaatatcc

SEQ ID NO: 2932605 - DNA, 25 bp, Homo sapien
catgttgcaaggaagacctggcgct

SEQ ID NO: 2932606 - DNA, 25 bp, Homo sapien
tccttccatgttgcaaggaagacct

SEQ ID NO: 2932607 - DNA, 25 bp, Homo sapien
cattccttaatctgaaactgaagtt

SEQ ID NO: 2932608 - DNA, 25 bp, Homo sapien
taactatgaaagagtacggagctct

SEQ ID NO: 2932609 - DNA, 25 bp, Homo sapien
tatgagaaccaccaatgtatgcagg

SEQ ID NO: 2932610 - DNA, 25 bp, Homo sapien
cacagggcagtgtagtaaaaggtta

SEQ ID NO: 2932611 - DNA, 25 bp, Homo sapien
gaaagaggaggtaccgaccaagcac

SEQ ID NO: 2932612 - DNA, 25 bp, Homo sapien
cacctacagcatggagcgattggcg

SEQ ID NO: 2932613 - DNA, 25 bp, Homo sapien
tctgagaaacgacatcaaagggcac

SEQ ID NO: 2932614 - DNA, 25 bp, Homo sapien
gcgtgaggccatgacagaattgatc

SEQ ID NO: 2932615 - DNA, 25 bp, Homo sapien
catgccgaggtgcaataagagttca

SEQ ID NO: 2932616 - DNA, 25 bp, Homo sapien
tgggaaacaggacggaatcttatag

SEQ ID NO: 2932617 - DNA, 25 bp, Homo sapien
gacactgagatttatcccaaagcat

SEQ ID NO: 2932618 - DNA, 25 bp, Homo sapien
tctttctactttagctaaggtcaca

SEQ ID NO: 2932619 - DNA, 25 bp, Homo sapien
gatggtcaaatatagttacccttcg

SEQ ID NO: 2932620 - DNA, 25 bp, Homo sapien
caaatgccattagtgagcttcaggg

SEQ ID NO: 2932621 - DNA, 25 bp, Homo sapien
tgccattagtgagcttcagggattg

SEQ ID NO: 2932622 - DNA, 25 bp, Homo sapien
ttagtgagcttcagggattggtaca

SEQ ID NO: 2932623 - DNA, 25 bp, Homo sapien
atccaaatgccattagtgagcttca

SEQ ID NO: 2932624 - DNA, 25 bp, Homo sapien
ccatctcacccattctgagaaaggc

SEQ ID NO: 2932625 - DNA, 25 bp, Homo sapien
tccatctcacccattctgagaaagg

SEQ ID NO: 2932626 - DNA, 25 bp, Homo sapien
atccatctcacccattctgagaaag

SEQ ID NO: 2932627 - DNA, 25 bp, Homo sapien
taatccatctcacccattctgagaa

SEQ ID NO: 2932628 - DNA, 25 bp, Homo sapien
tgggcacttccacgggtgttcttaa

SEQ ID NO: 2932629 - DNA, 25 bp, Homo sapien
ttgaatctcttgctttgtatgattt

SEQ ID NO: 2932630 - DNA, 25 bp, Homo sapien
ctttgatggcctgggcacttccacg

SEQ ID NO: 2932631 - DNA, 25 bp, Homo sapien
cacgggtgttcttaaagtaaacatg

SEQ ID NO: 2932632 - DNA, 25 bp, Homo sapien
ccttagggtcggcattactctttgc

SEQ ID NO: 2932633 - DNA, 25 bp, Homo sapien
gcatctaaacccttagggtcggcat

SEQ ID NO: 2932634 - DNA, 25 bp, Homo sapien
tagggtcggcattactctttgcctt

SEQ ID NO: 2932635 - DNA, 25 bp, Homo sapien
catctaaacccttagggtcggcatt

SEQ ID NO: 2932636 - DNA, 25 bp, Homo sapien
gatagatgtattgagagacttcagg

SEQ ID NO: 2932637 - DNA, 25 bp, Homo sapien
tgatagatgtattgagagacttcag

SEQ ID NO: 2932638 - DNA, 25 bp, Homo sapien
tgttcagattctacgcagcaataca

SEQ ID NO: 2932639 - DNA, 25 bp, Homo sapien
gtgttcagattctacgcagcaatac

SEQ ID NO: 2932640 - DNA, 25 bp, Homo sapien
agaaagtgctttgtgggaccgctcc

SEQ ID NO: 2932641 - DNA, 25 bp, Homo sapien
ggagcctgaagtgcccctgatttaa

SEQ ID NO: 2932642 - DNA, 25 bp, Homo sapien
tagggtaggtaactgcatctctgcc

SEQ ID NO: 2932643 - DNA, 25 bp, Homo sapien
agtgcccgcagatcaaacagtgtaa

SEQ ID NO: 2932644 - DNA, 25 bp, Homo sapien
ccggccggtcggcggggctgagctc

SEQ ID NO: 2932645 - DNA, 25 bp, Homo sapien
gggccgtcctagctgccccctgccc

SEQ ID NO: 2932646 - DNA, 25 bp, Homo sapien
gcctgcccagtcggggcgggctcag

SEQ ID NO: 2932647 - DNA, 25 bp, Homo sapien
gcgggggcagatgcgggccgccgag

SEQ ID NO: 2932648 - DNA, 25 bp, Homo sapien
cagccaccgtcaggaccaaccattg

SEQ ID NO: 2932649 - DNA, 25 bp, Homo sapien
tcgtccttgccgctgtctggggctc

SEQ ID NO: 2932650 - DNA, 25 bp, Homo sapien
accgtcaggaccaaccattgctgcc

SEQ ID NO: 2932651 - DNA, 25 bp, Homo sapien
ctcccccgggctgcatattccaggg

SEQ ID NO: 2932652 - DNA, 25 bp, Homo sapien
aactggcgcacgatggcactcttgc

SEQ ID NO: 2932653 - DNA, 25 bp, Homo sapien
aactcgttgtacaagaactggcgca

SEQ ID NO: 2932654 - DNA, 25 bp, Homo sapien
tcatgacgacagcaggcaggtaaag

SEQ ID NO: 2932655 - DNA, 25 bp, Homo sapien
aggtcgtgcacgtggccgttcatga

SEQ ID NO: 2932656 - DNA, 25 bp, Homo sapien
tggcggatggtcttgacgtactcaa

SEQ ID NO: 2932657 - DNA, 25 bp, Homo sapien
tccaggatctgctggcggatggtct

SEQ ID NO: 2932658 - DNA, 25 bp, Homo sapien
gtggacactccggagtcccctgcag

SEQ ID NO: 2932659 - DNA, 25 bp, Homo sapien
tagaccaggatgtaggcgtggacac

SEQ ID NO: 2932660 - DNA, 25 bp, Homo sapien
accgtaggttctgctccaggcgcag

SEQ ID NO: 2932661 - DNA, 25 bp, Homo sapien
caccgtaggttctgctccaggcgca

SEQ ID NO: 2932662 - DNA, 25 bp, Homo sapien
accaccgtaggttctgctccaggcg

SEQ ID NO: 2932663 - DNA, 25 bp, Homo sapien
ccaccaccgtaggttctgctccagg

SEQ ID NO: 2932664 - DNA, 25 bp, Homo sapien
aggcagctcagaactctgtcagccc

SEQ ID NO: 2932665 - DNA, 25 bp, Homo sapien
ggcaggcagctcagaactctgtcag

SEQ ID NO: 2932666 - DNA, 25 bp, Homo sapien
ctgtcagccccacaaccgctgtact

SEQ ID NO: 2932667 - DNA, 25 bp, Homo sapien
tgtcagccccacaaccgctgtactc

SEQ ID NO: 2932668 - DNA, 25 bp, Homo sapien
tgatgatgggcgtctctgaggttcc

SEQ ID NO: 2932669 - DNA, 25 bp, Homo sapien
caggtcttgcgtaccaggtgcgaca

SEQ ID NO: 2932670 - DNA, 25 bp, Homo sapien
tacttggccgagcattccacgtagc

SEQ ID NO: 2932671 - DNA, 25 bp, Homo sapien
tcttgagcagctcgctgaagagcag

SEQ ID NO: 2932672 - DNA, 25 bp, Homo sapien
ctcaggccgggaccgtcacagttcc

SEQ ID NO: 2932673 - DNA, 25 bp, Homo sapien
gtcacagttccatttcccgcccgct

SEQ ID NO: 2932674 - DNA, 25 bp, Homo sapien
gccgggaccgtcacagttccatttc

SEQ ID NO: 2932675 - DNA, 25 bp, Homo sapien
gccctccgctcggccagtgccggtg

SEQ ID NO: 2932676 - DNA, 25 bp, Homo sapien
agggctgggcagttacggagggctc

SEQ ID NO: 2932677 - DNA, 25 bp, Homo sapien
aaatacagcactgaaggcggctgtc

SEQ ID NO: 2932678 - DNA, 25 bp, Homo sapien
gggatggacgaaatgagagccctgt

SEQ ID NO: 2932679 - DNA, 25 bp, Homo sapien
gtaagtaccaacagacgctggggtg

SEQ ID NO: 2932680 - DNA, 25 bp, Homo sapien
cagggacggaccatcgagttaaggc

SEQ ID NO: 2932681 - DNA, 25 bp, Homo sapien
ccagaccctgtggtgggaaaccctg

SEQ ID NO: 2932682 - DNA, 25 bp, Homo sapien
ttcgggtaacagctcaatgggcgtc

SEQ ID NO: 2932683 - DNA, 25 bp, Homo sapien
taggttggccaaagcggagttgtcc

SEQ ID NO: 2932684 - DNA, 25 bp, Homo sapien
tccggcccagtctttttaaacatgc

SEQ ID NO: 2932685 - DNA, 25 bp, Homo sapien
tgcccagtggagaacatcttaatag

SEQ ID NO: 2932686 - DNA, 25 bp, Homo sapien
tcctcttaggaaatagaaaagccac

SEQ ID NO: 2932687 - DNA, 25 bp, Homo sapien
ggagaacaactcagacaggccctat

SEQ ID NO: 2932688 - DNA, 25 bp, Homo sapien
tgtgccctgctttccctgatcagag

SEQ ID NO: 2932689 - DNA, 25 bp, Homo sapien
ggctgtgccctgctttccctgatca

SEQ ID NO: 2932690 - DNA, 25 bp, Homo sapien
gtgccctgctttccctgatcagaga

SEQ ID NO: 2932691 - DNA, 25 bp, Homo sapien
caaggctgtgccctgctttccctga

SEQ ID NO: 2932692 - DNA, 25 bp, Homo sapien
gaggttgtggtttaccgagatcacg

SEQ ID NO: 2932693 - DNA, 25 bp, Homo sapien
catgattggtgttctagccttctgg

SEQ ID NO: 2932694 - DNA, 25 bp, Homo sapien
gatcccagtccatcctatttaaaga

SEQ ID NO: 2932695 - DNA, 25 bp, Homo sapien
tttaaagagcaaaggtactgctcat

SEQ ID NO: 2932696 - DNA, 25 bp, Homo sapien
gggccgggaggaggtcagggcagtc

SEQ ID NO: 2932697 - DNA, 25 bp, Homo sapien
ccgggaggaggtcagggcagtcctg

SEQ ID NO: 2932698 - DNA, 25 bp, Homo sapien
tgcgggccgggaggaggtcagggca

SEQ ID NO: 2932699 - DNA, 25 bp, Homo sapien
ctgcgggccgggaggaggtcagggc

SEQ ID NO: 2932700 - DNA, 25 bp, Homo sapien
cttcctcttgctccgcgtcctcggc

SEQ ID NO: 2932701 - DNA, 25 bp, Homo sapien
ccttcctcttgctccgcgtcctcgg

SEQ ID NO: 2932702 - DNA, 25 bp, Homo sapien
tggttgtcctcgtcctcgtcctccg

SEQ ID NO: 2932703 - DNA, 25 bp, Homo sapien
ctggttgtcctcgtcctcgtcctcc

SEQ ID NO: 2932704 - DNA, 25 bp, Homo sapien
gttgtcctcgtcctcgtcctccgac

SEQ ID NO: 2932705 - DNA, 25 bp, Homo sapien
ggttgtcctcgtcctcgtcctccga

SEQ ID NO: 2932706 - DNA, 25 bp, Homo sapien
gcagcgggcagtaggacactgagcg

SEQ ID NO: 2932707 - DNA, 25 bp, Homo sapien
gccagccccagaagccgctgtccgc

SEQ ID NO: 2932708 - DNA, 25 bp, Homo sapien
gtcggtgggagctgttaggccgccc

SEQ ID NO: 2932709 - DNA, 25 bp, Homo sapien
ccagcagcgctaaggggccgagcca

SEQ ID NO: 2932710 - DNA, 25 bp, Homo sapien
tccgggtgatccagaacgcagtgcg

SEQ ID NO: 2932711 - DNA, 25 bp, Homo sapien
tccagaacgcagtgcgccacatagg

SEQ ID NO: 2932712 - DNA, 25 bp, Homo sapien
ggcggtcgtcgccggatctccagca

SEQ ID NO: 2932713 - DNA, 25 bp, Homo sapien
gcagaagaggagctcgcagcaagca

SEQ ID NO: 2932714 - DNA, 25 bp, Homo sapien
gcgctcaggagttcccagcggcccc

SEQ ID NO: 2932715 - DNA, 25 bp, Homo sapien
ggagcgggggcgctcaggagttccc

SEQ ID NO: 2932716 - DNA, 25 bp, Homo sapien
gggcgctcaggagttcccagcggcc

SEQ ID NO: 2932717 - DNA, 25 bp, Homo sapien
agcgggggcgctcaggagttcccag

SEQ ID NO: 2932718 - DNA, 25 bp, Homo sapien
ctggggccaggaaatgatggagggc

SEQ ID NO: 2932719 - DNA, 25 bp, Homo sapien
gccaggaaatgatggagggcacaaa

SEQ ID NO: 2932720 - DNA, 25 bp, Homo sapien
gggccaggaaatgatggagggcaca

SEQ ID NO: 2932721 - DNA, 25 bp, Homo sapien
ccaggaaatgatggagggcacaaag

SEQ ID NO: 2932722 - DNA, 25 bp, Homo sapien
gcgctaggtgacagatgggaaccaa

SEQ ID NO: 2932723 - DNA, 25 bp, Homo sapien
ccaagcaccaacagtgggccttctt

SEQ ID NO: 2932724 - DNA, 25 bp, Homo sapien
aatgcgtcgaagagggctccgcgct

SEQ ID NO: 2932725 - DNA, 25 bp, Homo sapien
cgcgctccaagagagaaggtcggta

SEQ ID NO: 2932726 - DNA, 25 bp, Homo sapien
gagcggatctgaaatacccaagagg

SEQ ID NO: 2932727 - DNA, 25 bp, Homo sapien
tcaggtgtgcggtggcgctggtgct

SEQ ID NO: 2932728 - DNA, 25 bp, Homo sapien
gtttgtcagagggatgagggaaccc

SEQ ID NO: 2932729 - DNA, 25 bp, Homo sapien
ttttctctaggcgatgcctctgccc

SEQ ID NO: 2932730 - DNA, 25 bp, Homo sapien
cccacgtgccagagagaggacattt

SEQ ID NO: 2932731 - DNA, 25 bp, Homo sapien
tatgcctgtgaatgggacccagact

SEQ ID NO: 2932732 - DNA, 25 bp, Homo sapien
cacacgggatagcagaaaaggcagg

SEQ ID NO: 2932733 - DNA, 25 bp, Homo sapien
tagcttgttccgcattgcacacggg

SEQ ID NO: 2932734 - DNA, 25 bp, Homo sapien
tacagctagtaaacggccaaggtgg

SEQ ID NO: 2932735 - DNA, 25 bp, Homo sapien
cctaggtgttgtgcagaagttgacc

SEQ ID NO: 2932736 - DNA, 25 bp, Homo sapien
gagagccagcaaagacgttttccgg

SEQ ID NO: 2932737 - DNA, 25 bp, Homo sapien
tccgggaaggcatggtatctgagcc

SEQ ID NO: 2932738 - DNA, 25 bp, Homo sapien
acaacgaatacgaaagccaggcggc

SEQ ID NO: 2932739 - DNA, 25 bp, Homo sapien
ccgccgagaacaacgaatacgaaag

SEQ ID NO: 2932740 - DNA, 25 bp, Homo sapien
gagaacaacgaatacgaaagccagg

SEQ ID NO: 2932741 - DNA, 25 bp, Homo sapien
gccgagaacaacgaatacgaaagcc

SEQ ID NO: 2932742 - DNA, 25 bp, Homo sapien
gcgtgcgtgcctccagttcaacatg

SEQ ID NO: 2932743 - DNA, 25 bp, Homo sapien
gccgctgctcgctgaagaagtcacc

SEQ ID NO: 2932744 - DNA, 25 bp, Homo sapien
agcgtgcgtgcctccagttcaacat

SEQ ID NO: 2932745 - DNA, 25 bp, Homo sapien
cgctgccgctgctcgctgaagaagt

SEQ ID NO: 2932746 - DNA, 25 bp, Homo sapien
gaggcgctcccgccgtgatttgcag

SEQ ID NO: 2932747 - DNA, 25 bp, Homo sapien
agtctcctcgggttccaaggacagg

SEQ ID NO: 2932748 - DNA, 25 bp, Homo sapien
gaacggcaagtctcctcgggttcca

SEQ ID NO: 2932749 - DNA, 25 bp, Homo sapien
agggtcaaaagacaagaggcccgag

SEQ ID NO: 2932750 - DNA, 25 bp, Homo sapien
tagcaagtggatagacacctgggtc

SEQ ID NO: 2932751 - DNA, 25 bp, Homo sapien
tgtctaaaaaaggtgtatgccctcc

SEQ ID NO: 2932752 - DNA, 25 bp, Homo sapien
taaaccacgggtagatgatacactc

SEQ ID NO: 2932753 - DNA, 25 bp, Homo sapien
taaatgccacatacacctacaggag

SEQ ID NO: 2932754 - DNA, 25 bp, Homo sapien
gcagtaaagctctccaattagaccg

SEQ ID NO: 2932755 - DNA, 25 bp, Homo sapien
tttatgaaacgcttttgcaactgca

SEQ ID NO: 2932756 - DNA, 25 bp, Homo sapien
tgcaactgcaaaaaatggctctaag

SEQ ID NO: 2932757 - DNA, 25 bp, Homo sapien
tattgccaccaaatataagtgggtg

SEQ ID NO: 2932758 - DNA, 25 bp, Homo sapien
ccagactgaccgtaacttccagaat

SEQ ID NO: 2932759 - DNA, 25 bp, Homo sapien
ccccagactgaccgtaacttccaga

SEQ ID NO: 2932760 - DNA, 25 bp, Homo sapien
cccccagactgaccgtaacttccag

SEQ ID NO: 2932761 - DNA, 25 bp, Homo sapien
cccagactgaccgtaacttccagaa

SEQ ID NO: 2932762 - DNA, 25 bp, Homo sapien
tctgtaggaggtatattcattgatg

SEQ ID NO: 2932763 - DNA, 25 bp, Homo sapien
tttaatctgtaggaggtatattcat

SEQ ID NO: 2932764 - DNA, 25 bp, Homo sapien
agagtcatgagccatagcgtctgac

SEQ ID NO: 2932765 - DNA, 25 bp, Homo sapien
ccatagcgtctgacattaaatttct

SEQ ID NO: 2932766 - DNA, 25 bp, Homo sapien
tgcctggatttccataggtagaata

SEQ ID NO: 2932767 - DNA, 25 bp, Homo sapien
ttgtgatgcttgtccatagccttgg

SEQ ID NO: 2932768 - DNA, 25 bp, Homo sapien
gtgatgcttgtccatagccttggct

SEQ ID NO: 2932769 - DNA, 25 bp, Homo sapien
gcctggatttccataggtagaataa

SEQ ID NO: 2932770 - DNA, 25 bp, Homo sapien
taagataaaaataactacttatgaa

SEQ ID NO: 2932771 - DNA, 25 bp, Homo sapien
aaaataactacttatgaagaataca

SEQ ID NO: 2932772 - DNA, 25 bp, Homo sapien
gataaaaataactacttatgaagaa

SEQ ID NO: 2932773 - DNA, 25 bp, Homo sapien
gaagaatacaatttatatttcaacc

SEQ ID NO: 2932774 - DNA, 25 bp, Homo sapien
ctgaaatttaggtaaatactcaagt

SEQ ID NO: 2932775 - DNA, 25 bp, Homo sapien
atttaggtaaatactcaagtttcat

SEQ ID NO: 2932776 - DNA, 25 bp, Homo sapien
taagaggaatcagtcgtttgcccat

SEQ ID NO: 2932777 - DNA, 25 bp, Homo sapien
gaatcagtcgtttgcccatagccag

SEQ ID NO: 2932778 - DNA, 25 bp, Homo sapien
gagtaaccgctgtagttctgtccat

SEQ ID NO: 2932779 - DNA, 25 bp, Homo sapien
ttctgtccataagaggaatcagtcg

SEQ ID NO: 2932780 - DNA, 25 bp, Homo sapien
tgagtatatcatttagtgaaggctc

SEQ ID NO: 2932781 - DNA, 25 bp, Homo sapien
tttagtgaaggctctgatttttcaa

SEQ ID NO: 2932782 - DNA, 25 bp, Homo sapien
gtgaaggctctgatttttcaatctc

SEQ ID NO: 2932783 - DNA, 25 bp, Homo sapien
ctaaagattagatgagtatatcatt

SEQ ID NO: 2932784 - DNA, 25 bp, Homo sapien
tatatgagctctgcttttgattctc

SEQ ID NO: 2932785 - DNA, 25 bp, Homo sapien
ggttattatatggttgctggctata

SEQ ID NO: 2932786 - DNA, 25 bp, Homo sapien
tatatggttgctggctatatgagct

SEQ ID NO: 2932787 - DNA, 25 bp, Homo sapien
tggctatatgagctctgcttttgat

SEQ ID NO: 2932788 - DNA, 25 bp, Homo sapien
agtggtatctgaagatcaatcacat

SEQ ID NO: 2932789 - DNA, 25 bp, Homo sapien
gaagatcaatcacattagagaatgc

SEQ ID NO: 2932790 - DNA, 25 bp, Homo sapien
atagcataaaattaagtaccagctc

SEQ ID NO: 2932791 - DNA, 25 bp, Homo sapien
tcacagaatgtaaagcacaattttt

SEQ ID NO: 2932792 - DNA, 25 bp, Homo sapien
aacttaagagacttcataggaagat

SEQ ID NO: 2932793 - DNA, 25 bp, Homo sapien
acttaagagacttcataggaagatt

SEQ ID NO: 2932794 - DNA, 25 bp, Homo sapien
gaacttaagagacttcataggaaga

SEQ ID NO: 2932795 - DNA, 25 bp, Homo sapien
atcttgttgaccatagtctggctgg

SEQ ID NO: 2932796 - DNA, 25 bp, Homo sapien
tgtgtgtggtggctgtagttttccc

SEQ ID NO: 2932797 - DNA, 25 bp, Homo sapien
ccctttgtgaatgataggactgctg

SEQ ID NO: 2932798 - DNA, 25 bp, Homo sapien
ggctggtcataggaaggtgctcttc

SEQ ID NO: 2932799 - DNA, 25 bp, Homo sapien
aataatagaggtcagtaaatcttac

SEQ ID NO: 2932800 - DNA, 25 bp, Homo sapien
gaacatatcttcaaggttaccctaa

SEQ ID NO: 2932801 - DNA, 25 bp, Homo sapien
ctagttttgattaccatgagaggga

SEQ ID NO: 2932802 - DNA, 25 bp, Homo sapien
catgagagggaacatatcttcaagg

SEQ ID NO: 2932803 - DNA, 25 bp, Homo sapien
tatgaaccaaaccatgtactaggcc

SEQ ID NO: 2932804 - DNA, 25 bp, Homo sapien
cagtattgtcaaggatcagagttca

SEQ ID NO: 2932805 - DNA, 25 bp, Homo sapien
ggaaattcacgtaatcagccatcaa

SEQ ID NO: 2932806 - DNA, 25 bp, Homo sapien
tgtaaattgagcatggacaaggaat

SEQ ID NO: 2932807 - DNA, 25 bp, Homo sapien
ctgtgacccgccatatcctctatta

SEQ ID NO: 2932808 - DNA, 25 bp, Homo sapien
tgtcataggacctcttccatccttg

SEQ ID NO: 2932809 - DNA, 25 bp, Homo sapien
cttgatcctgtcataggacctcttc

SEQ ID NO: 2932810 - DNA, 25 bp, Homo sapien
gacccgccatatcctctattatctt

SEQ ID NO: 2932811 - DNA, 25 bp, Homo sapien
tagttcggactacgactacaggcgc

SEQ ID NO: 2932812 - DNA, 25 bp, Homo sapien
tggtccctaaggtgcaaaagaatga

SEQ ID NO: 2932813 - DNA, 25 bp, Homo sapien
gataagtttctgtaacgggccactg

SEQ ID NO: 2932814 - DNA, 25 bp, Homo sapien
ggttgtttctcaggtcacctcaggg

SEQ ID NO: 2932815 - DNA, 25 bp, Homo sapien
gaagctttactggaacacaactctg

SEQ ID NO: 2932816 - DNA, 25 bp, Homo sapien
tataaagagtaatcggcatccatac

SEQ ID NO: 2932817 - DNA, 25 bp, Homo sapien
gaaaccatatggttcaccaaaccca

SEQ ID NO: 2932818 - DNA, 25 bp, Homo sapien
tacatattaattacggctgctctgg

SEQ ID NO: 2932819 - DNA, 25 bp, Homo sapien
tgtaagtccaagaatgtcccatcct

SEQ ID NO: 2932820 - DNA, 25 bp, Homo sapien
ttgactgagaacacaaacgggagtg

SEQ ID NO: 2932821 - DNA, 25 bp, Homo sapien
ggcaatgctgtgctagactcaccag

SEQ ID NO: 2932822 - DNA, 25 bp, Homo sapien
tagttttagtggaaatgcctcggcc

SEQ ID NO: 2932823 - DNA, 25 bp, Homo sapien
gaaaggacttggctaaaaatggaga

SEQ ID NO: 2932824 - DNA, 25 bp, Homo sapien
gcttaaaaacccatgctgtgcttgg

SEQ ID NO: 2932825 - DNA, 25 bp, Homo sapien
tctgagtgtgaggaaaagaccaaca

SEQ ID NO: 2932826 - DNA, 25 bp, Homo sapien
cctcctatgtcttacatgcatggta

SEQ ID NO: 2932827 - DNA, 25 bp, Homo sapien
cccctgcataagaaaactagctggt

SEQ ID NO: 2932828 - DNA, 25 bp, Homo sapien
tatttcgaagagacaacagattcca

SEQ ID NO: 2932829 - DNA, 25 bp, Homo sapien
cacacgaaggcatactctgagggtt

SEQ ID NO: 2932830 - DNA, 25 bp, Homo sapien
gacacaaaggtacttgaacatctga

SEQ ID NO: 2932831 - DNA, 25 bp, Homo sapien
aatctggacatgtcagtggttctcc

SEQ ID NO: 2932832 - DNA, 25 bp, Homo sapien
cgcccggccttgaacgtcatcttta

SEQ ID NO: 2932833 - DNA, 25 bp, Homo sapien
agcgtaagcatagcctggaaggttc

SEQ ID NO: 2932834 - DNA, 25 bp, Homo sapien
tcttcaagaaactcagggtacagtc

SEQ ID NO: 2932835 - DNA, 25 bp, Homo sapien
ctttaagaaagggaagccaacagag

SEQ ID NO: 2932836 - DNA, 25 bp, Homo sapien
tatgccagtaggttaaagttccgag

SEQ ID NO: 2932837 - DNA, 25 bp, Homo sapien
ggaataccaaacctggccacaatgg

SEQ ID NO: 2932838 - DNA, 25 bp, Homo sapien
cactgggttcacgaataagtgctag

SEQ ID NO: 2932839 - DNA, 25 bp, Homo sapien
gccacactgagataaaacactctga

SEQ ID NO: 2932840 - DNA, 25 bp, Homo sapien
catgttggctaagttgatctccagc

SEQ ID NO: 2932841 - DNA, 25 bp, Homo sapien
tatttccacttacagctgccttagg

SEQ ID NO: 2932842 - DNA, 25 bp, Homo sapien
tatagacaatatgaaactcaggccc

SEQ ID NO: 2932843 - DNA, 25 bp, Homo sapien
tgtttccatctaagtgttttcccaa

SEQ ID NO: 2932844 - DNA, 25 bp, Homo sapien
caaccccaagccaaagggatactat

SEQ ID NO: 2932845 - DNA, 25 bp, Homo sapien
gagccctgggctcaatctacactta

SEQ ID NO: 2932846 - DNA, 25 bp, Homo sapien
tagagtgcttaggaaaacagtagca

SEQ ID NO: 2932847 - DNA, 25 bp, Homo sapien
atttttgaagccaccgcggtcacca

SEQ ID NO: 2932848 - DNA, 25 bp, Homo sapien
tttttgaagccaccgcggtcaccac

SEQ ID NO: 2932849 - DNA, 25 bp, Homo sapien
tttgaagccaccgcggtcaccacca

SEQ ID NO: 2932850 - DNA, 25 bp, Homo sapien
caccaaaatttttgaagccaccgcg

SEQ ID NO: 2932851 - DNA, 25 bp, Homo sapien
cagcatctgttctgggtccataatc

SEQ ID NO: 2932852 - DNA, 25 bp, Homo sapien
tgttctgggtccataatccctgtga

SEQ ID NO: 2932853 - DNA, 25 bp, Homo sapien
gttctgggtccataatccctgtgac

SEQ ID NO: 2932854 - DNA, 25 bp, Homo sapien
atctgttctgggtccataatccctg

SEQ ID NO: 2932855 - DNA, 25 bp, Homo sapien
tcagtccatgaagggataattcaga

SEQ ID NO: 2932856 - DNA, 25 bp, Homo sapien
taagaattcagtccatgaagggata

SEQ ID NO: 2932857 - DNA, 25 bp, Homo sapien
ctgacatgcacacttttggattagt

SEQ ID NO: 2932858 - DNA, 25 bp, Homo sapien
agatgtataagaattcagtccatga

SEQ ID NO: 2932859 - DNA, 25 bp, Homo sapien
aagtccttgcacaaagattgtgttg

SEQ ID NO: 2932860 - DNA, 25 bp, Homo sapien
taaagaactccccaacttgatctgt

SEQ ID NO: 2932861 - DNA, 25 bp, Homo sapien
caacttgatctgtagacacaccctc

SEQ ID NO: 2932862 - DNA, 25 bp, Homo sapien
ccaagtccttgcacaaagattgtgt

SEQ ID NO: 2932863 - DNA, 25 bp, Homo sapien
tatcattggttttccggtcttctta

SEQ ID NO: 2932864 - DNA, 25 bp, Homo sapien
atcattggttttccggtcttcttat

SEQ ID NO: 2932865 - DNA, 25 bp, Homo sapien
tcaaatgacactgttgcctccccct

SEQ ID NO: 2932866 - DNA, 25 bp, Homo sapien
ttatccaacttcatgctgaaaacta

SEQ ID NO: 2932867 - DNA, 25 bp, Homo sapien
tatccaacttcatgctgaaaactat

SEQ ID NO: 2932868 - DNA, 25 bp, Homo sapien
tccaacttcatgctgaaaactatac

SEQ ID NO: 2932869 - DNA, 25 bp, Homo sapien
atccaacttcatgctgaaaactata

SEQ ID NO: 2932870 - DNA, 25 bp, Homo sapien
aaaattctgacctgtattcttaata

SEQ ID NO: 2932871 - DNA, 25 bp, Homo sapien
tcatctcatttctaaaggtacataa

SEQ ID NO: 2932872 - DNA, 25 bp, Homo sapien
ggtacataaaaattctgacctgtat

SEQ ID NO: 2932873 - DNA, 25 bp, Homo sapien
tctcatttctaaaggtacataaaaa

SEQ ID NO: 2932874 - DNA, 25 bp, Homo sapien
tatcagggtagcctcatgcacaagg

SEQ ID NO: 2932875 - DNA, 25 bp, Homo sapien
tgcacaaggcatgatataacgaaat

SEQ ID NO: 2932876 - DNA, 25 bp, Homo sapien
tatgctagaccaacaacgatagagc

SEQ ID NO: 2932877 - DNA, 25 bp, Homo sapien
taacatactgtcaaccaggccaact

SEQ ID NO: 2932878 - DNA, 25 bp, Homo sapien
tttaatgatgttgccatggaattct

SEQ ID NO: 2932879 - DNA, 25 bp, Homo sapien
taatgatgttgccatggaattcttt

SEQ ID NO: 2932880 - DNA, 25 bp, Homo sapien
aatgatgttgccatggaattctttt

SEQ ID NO: 2932881 - DNA, 25 bp, Homo sapien
atgatgttgccatggaattcttttc

SEQ ID NO: 2932882 - DNA, 25 bp, Homo sapien
atgaattcaggtcttctagtggcaa

SEQ ID NO: 2932883 - DNA, 25 bp, Homo sapien
tgaattcaggtcttctagtggcaaa

SEQ ID NO: 2932884 - DNA, 25 bp, Homo sapien
gaattcaggtcttctagtggcaaag

SEQ ID NO: 2932885 - DNA, 25 bp, Homo sapien
tccacctctcccttgaaagcctcca

SEQ ID NO: 2932886 - DNA, 25 bp, Homo sapien
cctccacgacctctatatcctccac

SEQ ID NO: 2932887 - DNA, 25 bp, Homo sapien
agcctccacgacctctatatcctcc

SEQ ID NO: 2932888 - DNA, 25 bp, Homo sapien
gcctccacgacctctatatcctcca

SEQ ID NO: 2932889 - DNA, 25 bp, Homo sapien
tgagggacgagagtcctctggtcta

SEQ ID NO: 2932890 - DNA, 25 bp, Homo sapien
gattgcaggaattccttcgagcaaa

SEQ ID NO: 2932891 - DNA, 25 bp, Homo sapien
actgattgcaggaattccttcgagc

SEQ ID NO: 2932892 - DNA, 25 bp, Homo sapien
ctcctcctgagggacgagagtcctc

SEQ ID NO: 2932893 - DNA, 25 bp, Homo sapien
cccacgacctctgtagcccctctct

SEQ ID NO: 2932894 - DNA, 25 bp, Homo sapien
ccccacgacctctgtagcccctctc

SEQ ID NO: 2932895 - DNA, 25 bp, Homo sapien
ctgcccccacgacctctgtagcccc

SEQ ID NO: 2932896 - DNA, 25 bp, Homo sapien
cccccacgacctctgtagcccctct

SEQ ID NO: 2932897 - DNA, 25 bp, Homo sapien
cccacttctatctccgctgtagcca

SEQ ID NO: 2932898 - DNA, 25 bp, Homo sapien
tctatctccgctgtagccaccaccg

SEQ ID NO: 2932899 - DNA, 25 bp, Homo sapien
acttctatctccgctgtagccacca

SEQ ID NO: 2932900 - DNA, 25 bp, Homo sapien
ttctatctccgctgtagccaccacc

SEQ ID NO: 2932901 - DNA, 25 bp, Homo sapien
tcctccatagccgcctcctctgtcc

SEQ ID NO: 2932902 - DNA, 25 bp, Homo sapien
gtccccaccatagccgccgcctctg

SEQ ID NO: 2932903 - DNA, 25 bp, Homo sapien
tctgtccccaccatagccgccgcct

SEQ ID NO: 2932904 - DNA, 25 bp, Homo sapien
tccatagccacctcctcggtctcct

SEQ ID NO: 2932905 - DNA, 25 bp, Homo sapien
gtctcctccatagcctcctcgatct

SEQ ID NO: 2932906 - DNA, 25 bp, Homo sapien
tcctcgatctcctccataacctcct

SEQ ID NO: 2932907 - DNA, 25 bp, Homo sapien
cgatctcctccgtaacctcctcgat

SEQ ID NO: 2932908 - DNA, 25 bp, Homo sapien
atctcctccatagcctcctcggtct

SEQ ID NO: 2932909 - DNA, 25 bp, Homo sapien
tccacttcggtctccaccgtagcca

SEQ ID NO: 2932910 - DNA, 25 bp, Homo sapien
gcctccacttcggtctccaccgtag

SEQ ID NO: 2932911 - DNA, 25 bp, Homo sapien
cacttcggtctccaccgtagccact

SEQ ID NO: 2932912 - DNA, 25 bp, Homo sapien
atagcctccacttcggtctccaccg

SEQ ID NO: 2932913 - DNA, 25 bp, Homo sapien
cttcctcccattttgcctccatagc

SEQ ID NO: 2932914 - DNA, 25 bp, Homo sapien
ttttgcctccatagccacctcggtc

SEQ ID NO: 2932915 - DNA, 25 bp, Homo sapien
tcctcccattttgcctccatagcca

SEQ ID NO: 2932916 - DNA, 25 bp, Homo sapien
ttgcctccatagccacctcggtctc

SEQ ID NO: 2932917 - DNA, 25 bp, Homo sapien
ataaagagccggactaaattctaat

SEQ ID NO: 2932918 - DNA, 25 bp, Homo sapien
tcagtatggtcggttgcgctgatca

SEQ ID NO: 2932919 - DNA, 25 bp, Homo sapien
gtcggttgcgctgatcatttctgta

SEQ ID NO: 2932920 - DNA, 25 bp, Homo sapien
gtatggtcggttgcgctgatcattt

SEQ ID NO: 2932921 - DNA, 25 bp, Homo sapien
tggtcggttgcgctgatcatttctg

SEQ ID NO: 2932922 - DNA, 25 bp, Homo sapien
tttcactatggatcatgtcagagac

SEQ ID NO: 2932923 - DNA, 25 bp, Homo sapien
aatttcactatggatcatgtcagag

SEQ ID NO: 2932924 - DNA, 25 bp, Homo sapien
gcaatttcactatggatcatgtcag

SEQ ID NO: 2932925 - DNA, 25 bp, Homo sapien
caatttcactatggatcatgtcaga

SEQ ID NO: 2932926 - DNA, 25 bp, Homo sapien
ctagaagaaaaactgtcccagccct

SEQ ID NO: 2932927 - DNA, 25 bp, Homo sapien
tccaaatgtcacttaatttcactac

SEQ ID NO: 2932928 - DNA, 25 bp, Homo sapien
tagaagaaaaactgtcccagccctc

SEQ ID NO: 2932929 - DNA, 25 bp, Homo sapien
aaaatccaaatgtcacttaatttca

SEQ ID NO: 2932930 - DNA, 25 bp, Homo sapien
tattttacaacgcatttagctccaa

SEQ ID NO: 2932931 - DNA, 25 bp, Homo sapien
aacgcatttagctccaagggttggg

SEQ ID NO: 2932932 - DNA, 25 bp, Homo sapien
tttacaacgcatttagctccaaggg

SEQ ID NO: 2932933 - DNA, 25 bp, Homo sapien
tacaacgcatttagctccaagggtt

SEQ ID NO: 2932934 - DNA, 25 bp, Homo sapien
acaagcagcctttattgcagtatta

SEQ ID NO: 2932935 - DNA, 25 bp, Homo sapien
cagcctttattgcagtattacaaaa

SEQ ID NO: 2932936 - DNA, 25 bp, Homo sapien
aaaacaagcagcctttattgcagta

SEQ ID NO: 2932937 - DNA, 25 bp, Homo sapien
gcagcctttattgcagtattacaaa

SEQ ID NO: 2932938 - DNA, 25 bp, Homo sapien
aattctttaggattagagtctaatg

SEQ ID NO: 2932939 - DNA, 25 bp, Homo sapien
gattagagtctaatgtaactgagtc

SEQ ID NO: 2932940 - DNA, 25 bp, Homo sapien
taggattagagtctaatgtaactga

SEQ ID NO: 2932941 - DNA, 25 bp, Homo sapien
ctttaggattagagtctaatgtaac

SEQ ID NO: 2932942 - DNA, 25 bp, Homo sapien
gacttactagatgcagaaaaccacc

SEQ ID NO: 2932943 - DNA, 25 bp, Homo sapien
tgtaagtaaggcgttcctgcccact

SEQ ID NO: 2932944 - DNA, 25 bp, Homo sapien
cattaaagtcccatgcagtggttcc

SEQ ID NO: 2932945 - DNA, 25 bp, Homo sapien
ggatccgcagtccacaagtgttcca

SEQ ID NO: 2932946 - DNA, 25 bp, Homo sapien
agaccattgggctggaacagatcca

SEQ ID NO: 2932947 - DNA, 25 bp, Homo sapien
aggaccgctttgaagccacccaaat

SEQ ID NO: 2932948 - DNA, 25 bp, Homo sapien
tcaggaccgctttgaagccacccaa

SEQ ID NO: 2932949 - DNA, 25 bp, Homo sapien
tgggctggaacagatccaggcacag

SEQ ID NO: 2932950 - DNA, 25 bp, Homo sapien
gcgggtcagatccagtaaggacaca

SEQ ID NO: 2932951 - DNA, 25 bp, Homo sapien
caagtttgtcatggaggcactacag

SEQ ID NO: 2932952 - DNA, 25 bp, Homo sapien
tgtatccagagaatggtaactcctg

SEQ ID NO: 2932953 - DNA, 25 bp, Homo sapien
gatgagcagttctatgcagcacagg

SEQ ID NO: 2932954 - DNA, 25 bp, Homo sapien
cagtgacagcggtagtttcacaatt

SEQ ID NO: 2932955 - DNA, 25 bp, Homo sapien
gaaaggcttaagaagagacagggat

SEQ ID NO: 2932956 - DNA, 25 bp, Homo sapien
ttcacaattgtttaagtgatagatt

SEQ ID NO: 2932957 - DNA, 25 bp, Homo sapien
gaaagcccctgatccactcaaaatc

SEQ ID NO: 2932958 - DNA, 25 bp, Homo sapien
tgagcttgacagttcaccagatggt

SEQ ID NO: 2932959 - DNA, 25 bp, Homo sapien
tactcgtccagtgagcaaactgaag

SEQ ID NO: 2932960 - DNA, 25 bp, Homo sapien
ttaagccagacaggaatgactttcc

SEQ ID NO: 2932961 - DNA, 25 bp, Homo sapien
accacaggccctctagttaagccag

SEQ ID NO: 2932962 - DNA, 25 bp, Homo sapien
gcttctgaggcgctgctttgtcaaa

SEQ ID NO: 2932963 - DNA, 25 bp, Homo sapien
ttctgaggcgctgctttgtcaaaag

SEQ ID NO: 2932964 - DNA, 25 bp, Homo sapien
gaagagcttctgaggcgctgctttg

SEQ ID NO: 2932965 - DNA, 25 bp, Homo sapien
agtcagcatgcctctagaggcaagg

SEQ ID NO: 2932966 - DNA, 25 bp, Homo sapien
gcagcagttacaaaaaccttcccca

SEQ ID NO: 2932967 - DNA, 25 bp, Homo sapien
gggcccagattctaccacacagcag

SEQ ID NO: 2932968 - DNA, 25 bp, Homo sapien
cagcagttacaaaaaccttccccag

SEQ ID NO: 2932969 - DNA, 25 bp, Homo sapien
acccgctccttgaagggcccagatt

SEQ ID NO: 2932970 - DNA, 25 bp, Homo sapien
ggaaaggttcgctgggactcaaaga

SEQ ID NO: 2932971 - DNA, 25 bp, Homo sapien
tcgctgttgtctgcgggtttcctca

SEQ ID NO: 2932972 - DNA, 25 bp, Homo sapien
caaagatgaggagcatgtcgctgtt

SEQ ID NO: 2932973 - DNA, 25 bp, Homo sapien
tcagcatatctagtatccaggaaaa

SEQ ID NO: 2932974 - DNA, 25 bp, Homo sapien
caggtgatcagttaactgcattcca

SEQ ID NO: 2932975 - DNA, 25 bp, Homo sapien
cctgcaggtgatcagttaactgcat

SEQ ID NO: 2932976 - DNA, 25 bp, Homo sapien
agttcaagcctgcaggtgatcagtt

SEQ ID NO: 2932977 - DNA, 25 bp, Homo sapien
caagcctgcaggtgatcagttaact

SEQ ID NO: 2932978 - DNA, 25 bp, Homo sapien
cttacgtctcctaagcacatccatg

SEQ ID NO: 2932979 - DNA, 25 bp, Homo sapien
gcacatccatgatcattatttccct

SEQ ID NO: 2932980 - DNA, 25 bp, Homo sapien
agtgggtcagacaggaagcagttcc

SEQ ID NO: 2932981 - DNA, 25 bp, Homo sapien
gaagcagttcctggttttcaggaac

SEQ ID NO: 2932982 - DNA, 25 bp, Homo sapien
aaggaatgactgagtggtatggacc

SEQ ID NO: 2932983 - DNA, 25 bp, Homo sapien
tgactgagtggtatggaccatgcac

SEQ ID NO: 2932984 - DNA, 25 bp, Homo sapien
tggtatggaccatgcacactgaagg

SEQ ID NO: 2932985 - DNA, 25 bp, Homo sapien
gagtggtatggaccatgcacactga

SEQ ID NO: 2932986 - DNA, 25 bp, Homo sapien
aggtctttgcctgtcttactagcca

SEQ ID NO: 2932987 - DNA, 25 bp, Homo sapien
gcctgtcttactagccatggtgtct

SEQ ID NO: 2932988 - DNA, 25 bp, Homo sapien
ccagctcacagcaattcttagtaaa

SEQ ID NO: 2932989 - DNA, 25 bp, Homo sapien
tgtctgcagagcgtagaagggtgcc

SEQ ID NO: 2932990 - DNA, 25 bp, Homo sapien
tcagccaaattgagacagactggga

SEQ ID NO: 2932991 - DNA, 25 bp, Homo sapien
cgcacatggaacggtaaagagagaa

SEQ ID NO: 2932992 - DNA, 25 bp, Homo sapien
cacatggaacggtaaagagagaagg

SEQ ID NO: 2932993 - DNA, 25 bp, Homo sapien
catggaacggtaaagagagaagggg

SEQ ID NO: 2932994 - DNA, 25 bp, Homo sapien
cacactgccgcatgcaacacctcat

SEQ ID NO: 2932995 - DNA, 25 bp, Homo sapien
cactgccgcatgcaacacctcattt

SEQ ID NO: 2932996 - DNA, 25 bp, Homo sapien
aagaaaggcacactgccgcatgcaa

SEQ ID NO: 2932997 - DNA, 25 bp, Homo sapien
gaaaggcacactgccgcatgcaaca

SEQ ID NO: 2932998 - DNA, 25 bp, Homo sapien
tcaaccccaagtttgtcctgcttta

SEQ ID NO: 2932999 - DNA, 25 bp, Homo sapien
caatgatcagctactgcattcccac

SEQ ID NO: 2933000 - DNA, 25 bp, Homo sapien
aagtatgcgctatctgatttcaacc

SEQ ID NO: 2933001 - DNA, 25 bp, Homo sapien
aaaacgacatacagaaagtatgcgc

SEQ ID NO: 2933002 - DNA, 25 bp, Homo sapien
ggatgcagggcgtcatgcagagggt

SEQ ID NO: 2933003 - DNA, 25 bp, Homo sapien
atgcagggcgtcatgcagagggtgg

SEQ ID NO: 2933004 - DNA, 25 bp, Homo sapien
gatgcagggcgtcatgcagagggtg

SEQ ID NO: 2933005 - DNA, 25 bp, Homo sapien
tgcagggcgtcatgcagagggtggg

SEQ ID NO: 2933006 - DNA, 25 bp, Homo sapien
cctgcagggaaattaagccttctta

SEQ ID NO: 2933007 - DNA, 25 bp, Homo sapien
tgcagggaaattaagccttcttaag

SEQ ID NO: 2933008 - DNA, 25 bp, Homo sapien
gtccctgcagggaaattaagccttc

SEQ ID NO: 2933009 - DNA, 25 bp, Homo sapien
gctggtccctgcagggaaattaagc

SEQ ID NO: 2933010 - DNA, 25 bp, Homo sapien
tcagataccagagcaccctgaggag

SEQ ID NO: 2933011 - DNA, 25 bp, Homo sapien
tgagtagaacgacccacagctcagc

SEQ ID NO: 2933012 - DNA, 25 bp, Homo sapien
cagagtcttctatggagagtgcagc

SEQ ID NO: 2933013 - DNA, 25 bp, Homo sapien
tctaggcaaaggcatggttacaggt

SEQ ID NO: 2933014 - DNA, 25 bp, Homo sapien
gacaaatctgacctaactgattcca

SEQ ID NO: 2933015 - DNA, 25 bp, Homo sapien
caagagacttgtcctgtagggtctc

SEQ ID NO: 2933016 - DNA, 25 bp, Homo sapien
tatcacagcatgagtctgaggatca

SEQ ID NO: 2933017 - DNA, 25 bp, Homo sapien
tatcaacattatagggaggtcatac

SEQ ID NO: 2933018 - DNA, 25 bp, Homo sapien
gaatattacatatcccctggaaagg

SEQ ID NO: 2933019 - DNA, 25 bp, Homo sapien
gatgtggagttgcttcctatggaag

SEQ ID NO: 2933020 - DNA, 25 bp, Homo sapien
tcgacctgggacaatggaacttggt

SEQ ID NO: 2933021 - DNA, 25 bp, Homo sapien
cacggagcccaactagatgagaacc

SEQ ID NO: 2933022 - DNA, 25 bp, Homo sapien
gccccactgaattcagaaatgccag

SEQ ID NO: 2933023 - DNA, 25 bp, Homo sapien
agccccactgaattcagaaatgcca

SEQ ID NO: 2933024 - DNA, 25 bp, Homo sapien
cagccccactgaattcagaaatgcc

SEQ ID NO: 2933025 - DNA, 25 bp, Homo sapien
ctcgcctttccaacaggcacttcat

SEQ ID NO: 2933026 - DNA, 25 bp, Homo sapien
cagcctcgcctttccaacaggcact

SEQ ID NO: 2933027 - DNA, 25 bp, Homo sapien
ccacagcctcgcctttccaacaggc

SEQ ID NO: 2933028 - DNA, 25 bp, Homo sapien
gcctcgcctttccaacaggcacttc

SEQ ID NO: 2933029 - DNA, 25 bp, Homo sapien
tggtaaagagccgccgttgtaagct

SEQ ID NO: 2933030 - DNA, 25 bp, Homo sapien
aaagagccgccgttgtaagctctct

SEQ ID NO: 2933031 - DNA, 25 bp, Homo sapien
taaagagccgccgttgtaagctctc

SEQ ID NO: 2933032 - DNA, 25 bp, Homo sapien
tggttggtaaagagccgccgttgta

SEQ ID NO: 2933033 - DNA, 25 bp, Homo sapien
tgccttgtagaatacaggtggctgg

SEQ ID NO: 2933034 - DNA, 25 bp, Homo sapien
ttgccttgtagaatacaggtggctg

SEQ ID NO: 2933035 - DNA, 25 bp, Homo sapien
aagaagtttcaaagtccttagccag

SEQ ID NO: 2933036 - DNA, 25 bp, Homo sapien
gatgcggcaagaagtttcaaagtcc

SEQ ID NO: 2933037 - DNA, 25 bp, Homo sapien
tttcaaagtccttagccagcaccag

SEQ ID NO: 2933038 - DNA, 25 bp, Homo sapien
tcaaagtccttagccagcaccaggg

SEQ ID NO: 2933039 - DNA, 25 bp, Homo sapien
gccccttatgccgttctttggatcg

SEQ ID NO: 2933040 - DNA, 25 bp, Homo sapien
tataggagctctgactgggtctcag

SEQ ID NO: 2933041 - DNA, 25 bp, Homo sapien
ccgttctttggatcgtgaggatgct

SEQ ID NO: 2933042 - DNA, 25 bp, Homo sapien
tctccgatgtcatttgtcagctcag

SEQ ID NO: 2933043 - DNA, 25 bp, Homo sapien
taataataggacgagcgcagtggct

SEQ ID NO: 2933044 - DNA, 25 bp, Homo sapien
caagaacagcatggtgagggcacta

SEQ ID NO: 2933045 - DNA, 25 bp, Homo sapien
gaaactgcacgttggtcacagcgta

SEQ ID NO: 2933046 - DNA, 25 bp, Homo sapien
tacactaggttctgcgtgaatgggc

SEQ ID NO: 2933047 - DNA, 25 bp, Homo sapien
aagccattcagcctacaggaggtga

SEQ ID NO: 2933048 - DNA, 25 bp, Homo sapien
caggaggtgaatttcccacacctct

SEQ ID NO: 2933049 - DNA, 25 bp, Homo sapien
ttttaacctgtgagccttcgatgag

SEQ ID NO: 2933050 - DNA, 25 bp, Homo sapien
ttcgatgagattgatctgagtaata

SEQ ID NO: 2933051 - DNA, 25 bp, Homo sapien
tcaacctgaaggctggaattgagtt

SEQ ID NO: 2933052 - DNA, 25 bp, Homo sapien
caacctgaaggctggaattgagttt

SEQ ID NO: 2933053 - DNA, 25 bp, Homo sapien
ggtggtgaagacagctgatcgccca

SEQ ID NO: 2933054 - DNA, 25 bp, Homo sapien
tggaatcgggacacagagacccatg

SEQ ID NO: 2933055 - DNA, 25 bp, Homo sapien
tcctgggtgctacgtatgatacaaa

SEQ ID NO: 2933056 - DNA, 25 bp, Homo sapien
tcccgagatggcaaaccggtctgga

SEQ ID NO: 2933057 - DNA, 25 bp, Homo sapien
ttatctgctttccaaccgtcctcag

SEQ ID NO: 2933058 - DNA, 25 bp, Homo sapien
ggagttcagccatccccggcttatc

SEQ ID NO: 2933059 - DNA, 25 bp, Homo sapien
ggtcacatcaacctgaaggatagtg

SEQ ID NO: 2933060 - DNA, 25 bp, Homo sapien
gattttactgagtgatggagttggc

SEQ ID NO: 2933061 - DNA, 25 bp, Homo sapien
tgcacgttcaaatcccctgtgggag

SEQ ID NO: 2933062 - DNA, 25 bp, Homo sapien
cacttgggctaacagaggagagttc

SEQ ID NO: 2933063 - DNA, 25 bp, Homo sapien
cctgatcagggtgtacaaaatggca

SEQ ID NO: 2933064 - DNA, 25 bp, Homo sapien
caaaatgcttttcatggcctgagcc

SEQ ID NO: 2933065 - DNA, 25 bp, Homo sapien
gatggtacttatccctgatgaggcc

SEQ ID NO: 2933066 - DNA, 25 bp, Homo sapien
cttaaagggatactgtgccaccata

SEQ ID NO: 2933067 - DNA, 25 bp, Homo sapien
tgaacggccgtgaaaactgcatagt

SEQ ID NO: 2933068 - DNA, 25 bp, Homo sapien
tccacagagacacgacacagatagt

SEQ ID NO: 2933069 - DNA, 25 bp, Homo sapien
tggcgctagatgaattttggaatgc

SEQ ID NO: 2933070 - DNA, 25 bp, Homo sapien
gagacagtcaattgtggaaataaac

SEQ ID NO: 2933071 - DNA, 25 bp, Homo sapien
gcttagtttcatttgcctaacaagc

SEQ ID NO: 2933072 - DNA, 25 bp, Homo sapien
aagcataaggcagctccacaatccc

SEQ ID NO: 2933073 - DNA, 25 bp, Homo sapien
gtcagagtgagctggggcttggaaa

SEQ ID NO: 2933074 - DNA, 25 bp, Homo sapien
ggcttggaaactcacaactcctggc

SEQ ID NO: 2933075 - DNA, 25 bp, Homo sapien
ggcagagaagtggtcagagtgagct

SEQ ID NO: 2933076 - DNA, 25 bp, Homo sapien
gagctggggcttggaaactcacaac

SEQ ID NO: 2933077 - DNA, 25 bp, Homo sapien
ttgtgcacaggagcagagggccatg

SEQ ID NO: 2933078 - DNA, 25 bp, Homo sapien
ggccatggtgcagacgaggacaagg

SEQ ID NO: 2933079 - DNA, 25 bp, Homo sapien
cagccccaacaagtgagcagttgag

SEQ ID NO: 2933080 - DNA, 25 bp, Homo sapien
cattcagccccaacaagtgagcagt

SEQ ID NO: 2933081 - DNA, 25 bp, Homo sapien
tctgcacattcagccccaacaagtg

SEQ ID NO: 2933082 - DNA, 25 bp, Homo sapien
cacattcagccccaacaagtgagca

SEQ ID NO: 2933083 - DNA, 25 bp, Homo sapien
tgtctcatccacaagcatacgaggg

SEQ ID NO: 2933084 - DNA, 25 bp, Homo sapien
aaaatggccgctgctttctcagtca

SEQ ID NO: 2933085 - DNA, 25 bp, Homo sapien
gagcttgtcacctcgtggtcccaaa

SEQ ID NO: 2933086 - DNA, 25 bp, Homo sapien
tacgagggagtctcataggagtaca

SEQ ID NO: 2933087 - DNA, 25 bp, Homo sapien
aaagatcccaagtcattgttcacaa

SEQ ID NO: 2933088 - DNA, 25 bp, Homo sapien
gatcccaagtcattgttcacaaggc

SEQ ID NO: 2933089 - DNA, 25 bp, Homo sapien
aagtcattgttcacaaggcaagcca

SEQ ID NO: 2933090 - DNA, 25 bp, Homo sapien
cccaagtcattgttcacaaggcaag

SEQ ID NO: 2933091 - DNA, 25 bp, Homo sapien
tggaatctgccaggaggtatagacg

SEQ ID NO: 2933092 - DNA, 25 bp, Homo sapien
tgtggaatctgccaggaggtataga

SEQ ID NO: 2933093 - DNA, 25 bp, Homo sapien
cagaatagtcaactatgaacttttg

SEQ ID NO: 2933094 - DNA, 25 bp, Homo sapien
tggtttcagaatagtcaactatgaa

SEQ ID NO: 2933095 - DNA, 25 bp, Homo sapien
cttcaggtcgctgatgtatttctgg

SEQ ID NO: 2933096 - DNA, 25 bp, Homo sapien
gcttcaggtcgctgatgtatttctg

SEQ ID NO: 2933097 - DNA, 25 bp, Homo sapien
tcaggtcgctgatgtatttctggac

SEQ ID NO: 2933098 - DNA, 25 bp, Homo sapien
ttcaggtcgctgatgtatttctgga

SEQ ID NO: 2933099 - DNA, 25 bp, Homo sapien
ggtggtgctgagcaaaaccattcaa

SEQ ID NO: 2933100 - DNA, 25 bp, Homo sapien
gatccatgcattgaatgtacgaaga

SEQ ID NO: 2933101 - DNA, 25 bp, Homo sapien
gactcttagaagaggtggcctccag

SEQ ID NO: 2933102 - DNA, 25 bp, Homo sapien
gctgagaaagctaatcacactgatt

SEQ ID NO: 2933103 - DNA, 25 bp, Homo sapien
taaggagtccttgctagactatggg

SEQ ID NO: 2933104 - DNA, 25 bp, Homo sapien
gctttcagcaacttccaggtaagga

SEQ ID NO: 2933105 - DNA, 25 bp, Homo sapien
cagcacttggtaagacctcaacaga

SEQ ID NO: 2933106 - DNA, 25 bp, Homo sapien
tacttagcccaaaacccagcacttg

SEQ ID NO: 2933107 - DNA, 25 bp, Homo sapien
tctttagtcttctgatgctaatctc

SEQ ID NO: 2933108 - DNA, 25 bp, Homo sapien
catgattcttcggaaaagcaacccc

SEQ ID NO: 2933109 - DNA, 25 bp, Homo sapien
cttgttatagacattgatcagctga

SEQ ID NO: 2933110 - DNA, 25 bp, Homo sapien
cctctggtagtctgtgtggttttca

SEQ ID NO: 2933111 - DNA, 25 bp, Homo sapien
tagatactagttgggttccaaggtc

SEQ ID NO: 2933112 - DNA, 25 bp, Homo sapien
ggccagggccagaggaacacttgag

SEQ ID NO: 2933113 - DNA, 25 bp, Homo sapien
gaggccagggccagaggaacacttg

SEQ ID NO: 2933114 - DNA, 25 bp, Homo sapien
cagggccagaggaacacttgaggcc

SEQ ID NO: 2933115 - DNA, 25 bp, Homo sapien
gggaggccagggccagaggaacact

SEQ ID NO: 2933116 - DNA, 25 bp, Homo sapien
tctaacaatgtctccaagggctaag

SEQ ID NO: 2933117 - DNA, 25 bp, Homo sapien
tggctcagagggttaaaacaacttg

SEQ ID NO: 2933118 - DNA, 25 bp, Homo sapien
gaaatgacggtaatgcctctcccca

SEQ ID NO: 2933119 - DNA, 25 bp, Homo sapien
tctcatgggtcaagctctcttaaaa

SEQ ID NO: 2933120 - DNA, 25 bp, Homo sapien
gctggtgcttctgcccatctctgga

SEQ ID NO: 2933121 - DNA, 25 bp, Homo sapien
tgctggtgccaggcgagggctggtg

SEQ ID NO: 2933122 - DNA, 25 bp, Homo sapien
ctggtgccaggcgagggctggtgct

SEQ ID NO: 2933123 - DNA, 25 bp, Homo sapien
ggtgccaggcgagggctggtgcttc

SEQ ID NO: 2933124 - DNA, 25 bp, Homo sapien
cccaagacaagtgagcacttgaact

SEQ ID NO: 2933125 - DNA, 25 bp, Homo sapien
aacagccccaagacaagtgagcact

SEQ ID NO: 2933126 - DNA, 25 bp, Homo sapien
cagccccaagacaagtgagcacttg

SEQ ID NO: 2933127 - DNA, 25 bp, Homo sapien
gccccaagacaagtgagcacttgaa

SEQ ID NO: 2933128 - DNA, 25 bp, Homo sapien
gactgacaaatgtgtatcggatgct

SEQ ID NO: 2933129 - DNA, 25 bp, Homo sapien
gtctggtgacaaccgagtggctgtc

SEQ ID NO: 2933130 - DNA, 25 bp, Homo sapien
tgtaggcagtcatggcaccaaagcc

SEQ ID NO: 2933131 - DNA, 25 bp, Homo sapien
tttgttcagggctgtgatcggcctg

SEQ ID NO: 2933132 - DNA, 25 bp, Homo sapien
aacgaatcagttagcaagaggcaga

SEQ ID NO: 2933133 - DNA, 25 bp, Homo sapien
tcttatgagagatgtccaaggcttc

SEQ ID NO: 2933134 - DNA, 25 bp, Homo sapien
gggtatgacttcttgaaccagacaa

SEQ ID NO: 2933135 - DNA, 25 bp, Homo sapien
tcactctaggtctcccaggagctct

SEQ ID NO: 2933136 - DNA, 25 bp, Homo sapien
gagttataaacgatgctgggtcagg

SEQ ID NO: 2933137 - DNA, 25 bp, Homo sapien
tttccatgcttagggttggcaagga

SEQ ID NO: 2933138 - DNA, 25 bp, Homo sapien
taaatttgtgggctgaccaagaagg

SEQ ID NO: 2933139 - DNA, 25 bp, Homo sapien
cattttggccaaaaccattgaacag

SEQ ID NO: 2933140 - DNA, 25 bp, Homo sapien
taggtcacgaggctcatcatgttaa

SEQ ID NO: 2933141 - DNA, 25 bp, Homo sapien
cactggagatacactggtagctaac

SEQ ID NO: 2933142 - DNA, 25 bp, Homo sapien
catgggtacgtcatttcaactggga

SEQ ID NO: 2933143 - DNA, 25 bp, Homo sapien
aacacatggcaaagggatagttcct

SEQ ID NO: 2933144 - DNA, 25 bp, Homo sapien
gatgacgtcatgctcctgaagctag

SEQ ID NO: 2933145 - DNA, 25 bp, Homo sapien
atgagggaggtgcaggcgagaagaa

SEQ ID NO: 2933146 - DNA, 25 bp, Homo sapien
ccatggtagagatgacgtcatgctc

SEQ ID NO: 2933147 - DNA, 25 bp, Homo sapien
ccagggcgatgtcatcatagaggaa

SEQ ID NO: 2933148 - DNA, 25 bp, Homo sapien
gacaggacagtcacgcagagcttca

SEQ ID NO: 2933149 - DNA, 25 bp, Homo sapien
acaggacagtcacgcagagcttcat

SEQ ID NO: 2933150 - DNA, 25 bp, Homo sapien
agacaggacagtcacgcagagcttc

SEQ ID NO: 2933151 - DNA, 25 bp, Homo sapien
gagacaggacagtcacgcagagctt

SEQ ID NO: 2933152 - DNA, 25 bp, Homo sapien
ccttgactcgaaatagcagctgcaa

SEQ ID NO: 2933153 - DNA, 25 bp, Homo sapien
atccccagatcccactgtttgccag

SEQ ID NO: 2933154 - DNA, 25 bp, Homo sapien
tagaaaaaaggactctgcctacacc

SEQ ID NO: 2933155 - DNA, 25 bp, Homo sapien
ctgcctacaccttgactcgaaatag

SEQ ID NO: 2933156 - DNA, 25 bp, Homo sapien
catcgttttcctctgctggttgcta

SEQ ID NO: 2933157 - DNA, 25 bp, Homo sapien
aaaggcagagccaattcaacagtct

SEQ ID NO: 2933158 - DNA, 25 bp, Homo sapien
cattcccacctaacatgagcaggag

SEQ ID NO: 2933159 - DNA, 25 bp, Homo sapien
tacatttagcagcagactacatggc

SEQ ID NO: 2933160 - DNA, 25 bp, Homo sapien
atctaccacaaagttgcgaggaagc

SEQ ID NO: 2933161 - DNA, 25 bp, Homo sapien
taccacaaagttgcgaggaagcttc

SEQ ID NO: 2933162 - DNA, 25 bp, Homo sapien
ggtctcatagtaatctaccacaaag

SEQ ID NO: 2933163 - DNA, 25 bp, Homo sapien
cacaaagttgcgaggaagcttcctc

SEQ ID NO: 2933164 - DNA, 25 bp, Homo sapien
cacggtttaaggaatcggtccatat

SEQ ID NO: 2933165 - DNA, 25 bp, Homo sapien
cacatgtctttctagcacggtttaa

SEQ ID NO: 2933166 - DNA, 25 bp, Homo sapien
caggagttgcccagattaggaacca

SEQ ID NO: 2933167 - DNA, 25 bp, Homo sapien
aaagtgagttcatgacctgtgtcct

SEQ ID NO: 2933168 - DNA, 25 bp, Homo sapien
ggattcactgggatcagcacagact

SEQ ID NO: 2933169 - DNA, 25 bp, Homo sapien
atcagcacagacttgcttgcttctt

SEQ ID NO: 2933170 - DNA, 25 bp, Homo sapien
gatcagcacagacttgcttgcttct

SEQ ID NO: 2933171 - DNA, 25 bp, Homo sapien
gacccaggattcactgggatcagca

SEQ ID NO: 2933172 - DNA, 25 bp, Homo sapien
caataacacggcacataaaaaagat

SEQ ID NO: 2933173 - DNA, 25 bp, Homo sapien
taacacggcacataaaaaagattaa

SEQ ID NO: 2933174 - DNA, 25 bp, Homo sapien
aatacaataacacggcacataaaaa

SEQ ID NO: 2933175 - DNA, 25 bp, Homo sapien
atgaaaacacacagaatcaaatgtg

SEQ ID NO: 2933176 - DNA, 25 bp, Homo sapien
tagggtcccgagatttagaagctgc

SEQ ID NO: 2933177 - DNA, 25 bp, Homo sapien
agagccatctcttgatatccacagg

SEQ ID NO: 2933178 - DNA, 25 bp, Homo sapien
tcatagcagtatagcacctggcgct

SEQ ID NO: 2933179 - DNA, 25 bp, Homo sapien
caagtccctagctgaaggaagagag

SEQ ID NO: 2933180 - DNA, 25 bp, Homo sapien
gctaccaggagatcacaatgttaat

SEQ ID NO: 2933181 - DNA, 25 bp, Homo sapien
aatgttaatgccgagcttagtgtgg

SEQ ID NO: 2933182 - DNA, 25 bp, Homo sapien
tcccaggtggaaatgcggtggctat

SEQ ID NO: 2933183 - DNA, 25 bp, Homo sapien
gccggatcacccctcttaaggcaac

SEQ ID NO: 2933184 - DNA, 25 bp, Homo sapien
agcaagaagggccagtccaagtccc

SEQ ID NO: 2933185 - DNA, 25 bp, Homo sapien
agaagggccagtccaagtccccaga

SEQ ID NO: 2933186 - DNA, 25 bp, Homo sapien
tgaggagcaagaagggccagtccaa

SEQ ID NO: 2933187 - DNA, 25 bp, Homo sapien
ggccagtccaagtccccagactgaa

SEQ ID NO: 2933188 - DNA, 25 bp, Homo sapien
gaattcaatttgtcccagagcacag

SEQ ID NO: 2933189 - DNA, 25 bp, Homo sapien
taaatctaggcctctaggaggagag

SEQ ID NO: 2933190 - DNA, 25 bp, Homo sapien
taaaggctagaagcctaaggccctg

SEQ ID NO: 2933191 - DNA, 25 bp, Homo sapien
gatgtttccagcaaccccttgttta

SEQ ID NO: 2933192 - DNA, 25 bp, Homo sapien
caggccccaccgatgatttcttaaa

SEQ ID NO: 2933193 - DNA, 25 bp, Homo sapien
agtgggacaacaataaagtttgcca

SEQ ID NO: 2933194 - DNA, 25 bp, Homo sapien
cattccaataatgtcgcagcgtctg

SEQ ID NO: 2933195 - DNA, 25 bp, Homo sapien
tagcatacactgctgcttgatagca

SEQ ID NO: 2933196 - DNA, 25 bp, Homo sapien
gtcctcataggaatgccgccctgtg

SEQ ID NO: 2933197 - DNA, 25 bp, Homo sapien
tgtcctcataggaatgccgccctgt

SEQ ID NO: 2933198 - DNA, 25 bp, Homo sapien
agtgtcctcataggaatgccgccct

SEQ ID NO: 2933199 - DNA, 25 bp, Homo sapien
cctcataggaatgccgccctgtgca

SEQ ID NO: 2933200 - DNA, 25 bp, Homo sapien
gggaacaaagatgtgccagcagccc

SEQ ID NO: 2933201 - DNA, 25 bp, Homo sapien
gtagtccccgtcttttctgcattgg

SEQ ID NO: 2933202 - DNA, 25 bp, Homo sapien
cttgtagtccccgtcttttctgcat

SEQ ID NO: 2933203 - DNA, 25 bp, Homo sapien
gaacaaagatgtgccagcagccctt

SEQ ID NO: 2933204 - DNA, 25 bp, Homo sapien
gctcctgcttagaaggcgagagagt

SEQ ID NO: 2933205 - DNA, 25 bp, Homo sapien
ttctccagttcggacttggcagaga

SEQ ID NO: 2933206 - DNA, 25 bp, Homo sapien
tgttttctccagttcggacttggca

SEQ ID NO: 2933207 - DNA, 25 bp, Homo sapien
gatgggaaaccccactgggacagaa

SEQ ID NO: 2933208 - DNA, 25 bp, Homo sapien
gccaaatctctgtagagccagcagc

SEQ ID NO: 2933209 - DNA, 25 bp, Homo sapien
aaatctctgtagagccagcagccat

SEQ ID NO: 2933210 - DNA, 25 bp, Homo sapien
ctgccaaatctctgtagagccagca

SEQ ID NO: 2933211 - DNA, 25 bp, Homo sapien
caaatctctgtagagccagcagcca

SEQ ID NO: 2933212 - DNA, 25 bp, Homo sapien
ccacagtccccgtcttctcttcact

SEQ ID NO: 2933213 - DNA, 25 bp, Homo sapien
ccttccacagtccccgtcttctctt

SEQ ID NO: 2933214 - DNA, 25 bp, Homo sapien
agtccccgtcttctcttcactgatg

SEQ ID NO: 2933215 - DNA, 25 bp, Homo sapien
gtcttctcttcactgatgcacacag

SEQ ID NO: 2933216 - DNA, 25 bp, Homo sapien
gcctgaagtggtgcaggtgcctggt

SEQ ID NO: 2933217 - DNA, 25 bp, Homo sapien
tgcctggtcacactggaggtgtaga

SEQ ID NO: 2933218 - DNA, 25 bp, Homo sapien
caggtgcctggtcacactggaggtg

SEQ ID NO: 2933219 - DNA, 25 bp, Homo sapien
ctgaagtggtgcaggtgcctggtca

SEQ ID NO: 2933220 - DNA, 25 bp, Homo sapien
agtgcagctcgagagagattcagag

SEQ ID NO: 2933221 - DNA, 25 bp, Homo sapien
gattcagagatggaacacaccagac

SEQ ID NO: 2933222 - DNA, 25 bp, Homo sapien
ccccagccccacgaccatcgttctg

SEQ ID NO: 2933223 - DNA, 25 bp, Homo sapien
cagccccacgaccatcgttctgaat

SEQ ID NO: 2933224 - DNA, 25 bp, Homo sapien
gcccgttctacactgcccgtgtaga

SEQ ID NO: 2933225 - DNA, 25 bp, Homo sapien
tagacgattggctctttcgtctcca

SEQ ID NO: 2933226 - DNA, 25 bp, Homo sapien
tccccattcgacagatgagacgtct

SEQ ID NO: 2933227 - DNA, 25 bp, Homo sapien
cccaaatgtccccattcgacagatg

SEQ ID NO: 2933228 - DNA, 25 bp, Homo sapien
catacacgtgtgcacgcacgtgcac

SEQ ID NO: 2933229 - DNA, 25 bp, Homo sapien
ccacatacacgtgtgcacgcacgtg

SEQ ID NO: 2933230 - DNA, 25 bp, Homo sapien
cgcacgtgcacaaacacgttgcagg

SEQ ID NO: 2933231 - DNA, 25 bp, Homo sapien
gcacgcacgtgcacaaacacgttgc

SEQ ID NO: 2933232 - DNA, 25 bp, Homo sapien
cctggaatttggcatcccctaggcc

SEQ ID NO: 2933233 - DNA, 25 bp, Homo sapien
ccctggaatttggcatcccctaggc

SEQ ID NO: 2933234 - DNA, 25 bp, Homo sapien
ggaggacgtggccagggctccaaaa

SEQ ID NO: 2933235 - DNA, 25 bp, Homo sapien
cggggaggacgtggccagggctcca

SEQ ID NO: 2933236 - DNA, 25 bp, Homo sapien
gacgtggccagggctccaaaaggcc

SEQ ID NO: 2933237 - DNA, 25 bp, Homo sapien
aggacgtggccagggctccaaaagg

SEQ ID NO: 2933238 - DNA, 25 bp, Homo sapien
acagctggctcgagtggtgcccacg

SEQ ID NO: 2933239 - DNA, 25 bp, Homo sapien
tcccagcatcctcaaaatgaggggt

SEQ ID NO: 2933240 - DNA, 25 bp, Homo sapien
tgccgtgctctcctgagtgggcgcc

SEQ ID NO: 2933241 - DNA, 25 bp, Homo sapien
gcaggtcacagctggctcgagtggt

SEQ ID NO: 2933242 - DNA, 25 bp, Homo sapien
cacatgtgcagacacgtagtggaag

SEQ ID NO: 2933243 - DNA, 25 bp, Homo sapien
ctgggctccgctctcacgggacaca

SEQ ID NO: 2933244 - DNA, 25 bp, Homo sapien
cacgtagtggaagcatccactcgct

SEQ ID NO: 2933245 - DNA, 25 bp, Homo sapien
ggtgtgcaaggacaatgcaagtgca

SEQ ID NO: 2933246 - DNA, 25 bp, Homo sapien
tcaggctccgaagatatggtcccca

SEQ ID NO: 2933247 - DNA, 25 bp, Homo sapien
atggtccccatcctcgtcgtcgtga

SEQ ID NO: 2933248 - DNA, 25 bp, Homo sapien
cgaagatatggtccccatcctcgtc

SEQ ID NO: 2933249 - DNA, 25 bp, Homo sapien
gatcctcaggctccgaagatatggt

SEQ ID NO: 2933250 - DNA, 25 bp, Homo sapien
tcctctggcggcttggcgggcggct

SEQ ID NO: 2933251 - DNA, 25 bp, Homo sapien
ccgggatcatcaagccggagccagt

SEQ ID NO: 2933252 - DNA, 25 bp, Homo sapien
cgcgaagtcggcgagttggaaacta

SEQ ID NO: 2933253 - DNA, 25 bp, Homo sapien
ccgaagccgggatcatcaagccgga

SEQ ID NO: 2933254 - DNA, 25 bp, Homo sapien
gttggaaactaactgcaatcgtcca

SEQ ID NO: 2933255 - DNA, 25 bp, Homo sapien
cagggcgcggagagctcatggagct

SEQ ID NO: 2933256 - DNA, 25 bp, Homo sapien
gctcatggagctcttagggtctgcg

SEQ ID NO: 2933257 - DNA, 25 bp, Homo sapien
agctcttagggtctgcggccccgcg

SEQ ID NO: 2933258 - DNA, 25 bp, Homo sapien
aagggagaaagcgacgacgcgatgg

SEQ ID NO: 2933259 - DNA, 25 bp, Homo sapien
ttgctggactgcgacctcttccggc

SEQ ID NO: 2933260 - DNA, 25 bp, Homo sapien
ctgcgacctcttccggcctcggttt

SEQ ID NO: 2933261 - DNA, 25 bp, Homo sapien
actgcgacctcttccggcctcggtt

SEQ ID NO: 2933262 - DNA, 25 bp, Homo sapien
attccttgctggactgcgacctctt

SEQ ID NO: 2933263 - DNA, 25 bp, Homo sapien
gtggctacgttcagctttttctaga

SEQ ID NO: 2933264 - DNA, 25 bp, Homo sapien
aaggtgggtggctacgttcagcttt

SEQ ID NO: 2933265 - DNA, 25 bp, Homo sapien
tcacacagcggctgacacatattca

SEQ ID NO: 2933266 - DNA, 25 bp, Homo sapien
acagcggctgacacatattcaggca

SEQ ID NO: 2933267 - DNA, 25 bp, Homo sapien
gcaagggcaccagtcggtttgaggg

SEQ ID NO: 2933268 - DNA, 25 bp, Homo sapien
tgcaagggcaccagtcggtttgagg

SEQ ID NO: 2933269 - DNA, 25 bp, Homo sapien
agggcaccagtcggtttgagggcca

SEQ ID NO: 2933270 - DNA, 25 bp, Homo sapien
ggcaccagtcggtttgagggccatc

SEQ ID NO: 2933271 - DNA, 25 bp, Homo sapien
taaaggcaggatacggtcttgtcct

SEQ ID NO: 2933272 - DNA, 25 bp, Homo sapien
aatgccctgggctatctgttcagga

SEQ ID NO: 2933273 - DNA, 25 bp, Homo sapien
tcaccaaagtccaaggacaaaggta

SEQ ID NO: 2933274 - DNA, 25 bp, Homo sapien
tctataaaccttaaaggcaggatac

SEQ ID NO: 2933275 - DNA, 25 bp, Homo sapien
tcctttcttaatggactagggccca

SEQ ID NO: 2933276 - DNA, 25 bp, Homo sapien
ggcaaaaggtagtgtccagacagga

SEQ ID NO: 2933277 - DNA, 25 bp, Homo sapien
taagacagaccatagttcaaccagc

SEQ ID NO: 2933278 - DNA, 25 bp, Homo sapien
gctgcagcgttggtatttggcacag

SEQ ID NO: 2933279 - DNA, 25 bp, Homo sapien
tctcagctcaccacagcccccacct

SEQ ID NO: 2933280 - DNA, 25 bp, Homo sapien
atgatctcagctcaccacagccccc

SEQ ID NO: 2933281 - DNA, 25 bp, Homo sapien
gatctcagctcaccacagcccccac

SEQ ID NO: 2933282 - DNA, 25 bp, Homo sapien
agctcaccacagcccccacctcctg

SEQ ID NO: 2933283 - DNA, 25 bp, Homo sapien
ggaaagcaatgctccgcactggaga

SEQ ID NO: 2933284 - DNA, 25 bp, Homo sapien
ccaaagctgggccaaacaggatgtc

SEQ ID NO: 2933285 - DNA, 25 bp, Homo sapien
gaccacgcagaccacatatgagaaa

SEQ ID NO: 2933286 - DNA, 25 bp, Homo sapien
taacaaggactcaggacgggaaaca

SEQ ID NO: 2933287 - DNA, 25 bp, Homo sapien
ctttatagggactctgaggcctagg

SEQ ID NO: 2933288 - DNA, 25 bp, Homo sapien
ctctgaggcctaggacaaatgtggg

SEQ ID NO: 2933289 - DNA, 25 bp, Homo sapien
tagggactctgaggcctaggacaaa

SEQ ID NO: 2933290 - DNA, 25 bp, Homo sapien
tctctttatagggactctgaggcct

SEQ ID NO: 2933291 - DNA, 25 bp, Homo sapien
gacaggacagtcacgcagagcttca

SEQ ID NO: 2933292 - DNA, 25 bp, Homo sapien
acaggacagtcacgcagagcttcat

SEQ ID NO: 2933293 - DNA, 25 bp, Homo sapien
gagacaggacagtcacgcagagctt

SEQ ID NO: 2933294 - DNA, 25 bp, Homo sapien
agacaggacagtcacgcagagcttc

SEQ ID NO: 2933295 - DNA, 25 bp, Homo sapien
tacatttagcagcagactacatggc

SEQ ID NO: 2933296 - DNA, 25 bp, Homo sapien
tagaaaaaaggactctgcctacacc

SEQ ID NO: 2933297 - DNA, 25 bp, Homo sapien
tacaccttgactcgaaatagcagct

SEQ ID NO: 2933298 - DNA, 25 bp, Homo sapien
cattcccacctaacatgagcaggag

SEQ ID NO: 2933299 - DNA, 25 bp, Homo sapien
taccacaaagttgcgaggaagcttc

SEQ ID NO: 2933300 - DNA, 25 bp, Homo sapien
atctaccacaaagttgcgaggaagc

SEQ ID NO: 2933301 - DNA, 25 bp, Homo sapien
ggtctcatagtaatctaccacaaag

SEQ ID NO: 2933302 - DNA, 25 bp, Homo sapien
cacaaagttgcgaggaagcttcctc

SEQ ID NO: 2933303 - DNA, 25 bp, Homo sapien
tggaagcagactccctgtaacttcc

SEQ ID NO: 2933304 - DNA, 25 bp, Homo sapien
tgtaacttccactcactggatttag

SEQ ID NO: 2933305 - DNA, 25 bp, Homo sapien
ctggaagcagactccctgtaacttc

SEQ ID NO: 2933306 - DNA, 25 bp, Homo sapien
ccctgtaacttccactcactggatt

SEQ ID NO: 2933307 - DNA, 25 bp, Homo sapien
tctgcctgaccatggtccatgtggg

SEQ ID NO: 2933308 - DNA, 25 bp, Homo sapien
ttcctctgcctgaccatggtccatg

SEQ ID NO: 2933309 - DNA, 25 bp, Homo sapien
cagttccaggtcatacacgtactcc

SEQ ID NO: 2933310 - DNA, 25 bp, Homo sapien
tcagttccaggtcatacacgtactc

SEQ ID NO: 2933311 - DNA, 25 bp, Homo sapien
ggaactgcggagaggagtcctgagt

SEQ ID NO: 2933312 - DNA, 25 bp, Homo sapien
ttatccatgtatttgcaacagcaga

SEQ ID NO: 2933313 - DNA, 25 bp, Homo sapien
tgaccttccctgaagacttcctgtc

SEQ ID NO: 2933314 - DNA, 25 bp, Homo sapien
ggacacttatcctttggctaaacta

SEQ ID NO: 2933315 - DNA, 25 bp, Homo sapien
gaatctgaagtaagtttccactggg

SEQ ID NO: 2933316 - DNA, 25 bp, Homo sapien
tgccagttgtagctgctggaatgag

SEQ ID NO: 2933317 - DNA, 25 bp, Homo sapien
cttggacttgccagttgtagctgct

SEQ ID NO: 2933318 - DNA, 25 bp, Homo sapien
cagtacatccagaacgtcgccacag

SEQ ID NO: 2933319 - DNA, 25 bp, Homo sapien
tacatccagaacgtcgccacagatt

SEQ ID NO: 2933320 - DNA, 25 bp, Homo sapien
ccacagtccccgtcttctcttcact

SEQ ID NO: 2933321 - DNA, 25 bp, Homo sapien
ccttccacagtccccgtcttctctt

SEQ ID NO: 2933322 - DNA, 25 bp, Homo sapien
acagtccccgtcttctcttcactga

SEQ ID NO: 2933323 - DNA, 25 bp, Homo sapien
agtccccgtcttctcttcactgatg

SEQ ID NO: 2933324 - DNA, 25 bp, Homo sapien
ctgatagggtgacagcaaagactcg

SEQ ID NO: 2933325 - DNA, 25 bp, Homo sapien
tagggtgacagcaaagactcgaaga

SEQ ID NO: 2933326 - DNA, 25 bp, Homo sapien
ggtgacagcaaagactcgaagaggt

SEQ ID NO: 2933327 - DNA, 25 bp, Homo sapien
acagcaaagactcgaagaggtgcct

SEQ ID NO: 2933328 - DNA, 25 bp, Homo sapien
tgcctggtcacactggaggtgtaga

SEQ ID NO: 2933329 - DNA, 25 bp, Homo sapien
gcctgaagtggtgcaggtgcctggt

SEQ ID NO: 2933330 - DNA, 25 bp, Homo sapien
ctgaagtggtgcaggtgcctggtca

SEQ ID NO: 2933331 - DNA, 25 bp, Homo sapien
caggtgcctggtcacactggaggtg

SEQ ID NO: 2933332 - DNA, 25 bp, Homo sapien
ccatcgttctgaattctgacgacac

SEQ ID NO: 2933333 - DNA, 25 bp, Homo sapien
catcgttctgaattctgacgacacc

SEQ ID NO: 2933334 - DNA, 25 bp, Homo sapien
tcgttctgaattctgacgacaccgt

SEQ ID NO: 2933335 - DNA, 25 bp, Homo sapien
atcgttctgaattctgacgacaccg

SEQ ID NO: 2933336 - DNA, 25 bp, Homo sapien
catacacgtgtgcacgcacgtgcac

SEQ ID NO: 2933337 - DNA, 25 bp, Homo sapien
ccacatacacgtgtgcacgcacgtg

SEQ ID NO: 2933338 - DNA, 25 bp, Homo sapien
cgcacgtgcacaaacacgttgcagg

SEQ ID NO: 2933339 - DNA, 25 bp, Homo sapien
gcacgcacgtgcacaaacacgttgc

SEQ ID NO: 2933340 - DNA, 25 bp, Homo sapien
ggaggacgtggccagggctccaaaa

SEQ ID NO: 2933341 - DNA, 25 bp, Homo sapien
cggggaggacgtggccagggctcca

SEQ ID NO: 2933342 - DNA, 25 bp, Homo sapien
gacgtggccagggctccaaaaggcc

SEQ ID NO: 2933343 - DNA, 25 bp, Homo sapien
aggacgtggccagggctccaaaagg

SEQ ID NO: 2933344 - DNA, 25 bp, Homo sapien
acagctggctcgagtggtgcccacg

SEQ ID NO: 2933345 - DNA, 25 bp, Homo sapien
tcccagcatcctcaaaatgaggggt

SEQ ID NO: 2933346 - DNA, 25 bp, Homo sapien
tgccgtgctctcctgagtgggcgcc

SEQ ID NO: 2933347 - DNA, 25 bp, Homo sapien
gcaggtcacagctggctcgagtggt

SEQ ID NO: 2933348 - DNA, 25 bp, Homo sapien
gacacgagcaaactccggcgagaaa

SEQ ID NO: 2933349 - DNA, 25 bp, Homo sapien
tccggcgagaaagggcaacggtcaa

SEQ ID NO: 2933350 - DNA, 25 bp, Homo sapien
gcaaactccggcgagaaagggcaac

SEQ ID NO: 2933351 - DNA, 25 bp, Homo sapien
cgagaaagggcaacggtcaaagatt

SEQ ID NO: 2933352 - DNA, 25 bp, Homo sapien
ctgggctccgctctcacgggacaca

SEQ ID NO: 2933353 - DNA, 25 bp, Homo sapien
cacatgtgcagacacgtagtggaag

SEQ ID NO: 2933354 - DNA, 25 bp, Homo sapien
cacgtagtggaagcatccactcgct

SEQ ID NO: 2933355 - DNA, 25 bp, Homo sapien
ggtgtgcaaggacaatgcaagtgca

SEQ ID NO: 2933356 - DNA, 25 bp, Homo sapien
tcaggctccgaagatatggtcccca

SEQ ID NO: 2933357 - DNA, 25 bp, Homo sapien
atggtccccatcctcgtcgtcgtga

SEQ ID NO: 2933358 - DNA, 25 bp, Homo sapien
cgaagatatggtccccatcctcgtc

SEQ ID NO: 2933359 - DNA, 25 bp, Homo sapien
gatcctcaggctccgaagatatggt

SEQ ID NO: 2933360 - DNA, 25 bp, Homo sapien
tcctctggcggcttggcgggcggct

SEQ ID NO: 2933361 - DNA, 25 bp, Homo sapien
cgcgaagtcggcgagttggaaacta

SEQ ID NO: 2933362 - DNA, 25 bp, Homo sapien
gttggaaactaactgcaatcgtcca

SEQ ID NO: 2933363 - DNA, 25 bp, Homo sapien
ccgggatcatcaagccggagccagt

SEQ ID NO: 2933364 - DNA, 25 bp, Homo sapien
ccgaagccgggatcatcaagccgga

SEQ ID NO: 2933365 - DNA, 25 bp, Homo sapien
cagggcgcggagagctcatggagct

SEQ ID NO: 2933366 - DNA, 25 bp, Homo sapien
agctcttagggtctgcggccccgcg

SEQ ID NO: 2933367 - DNA, 25 bp, Homo sapien
aagggagaaagcgacgacgcgatgg

SEQ ID NO: 2933368 - DNA, 25 bp, Homo sapien
gctcatggagctcttagggtctgcg

SEQ ID NO: 2933369 - DNA, 25 bp, Homo sapien
gtcctcctagttcttcggcccgcgc

SEQ ID NO: 2933370 - DNA, 25 bp, Homo sapien
ctccaggacagctggcgcgaccggt

SEQ ID NO: 2933371 - DNA, 25 bp, Homo sapien
tccacggacaccagaggaggaaccg

SEQ ID NO: 2933372 - DNA, 25 bp, Homo sapien
actccggcgcttgcctgctccatgg

SEQ ID NO: 2933373 - DNA, 25 bp, Homo sapien
acagcggctgacacatattcaggca

SEQ ID NO: 2933374 - DNA, 25 bp, Homo sapien
gtggctacgttcagctttttctaga

SEQ ID NO: 2933375 - DNA, 25 bp, Homo sapien
aaggtgggtggctacgttcagcttt

SEQ ID NO: 2933376 - DNA, 25 bp, Homo sapien
tcacacagcggctgacacatattca

SEQ ID NO: 2933377 - DNA, 25 bp, Homo sapien
tcctttcttaatggactagggccca

SEQ ID NO: 2933378 - DNA, 25 bp, Homo sapien
ggcaaaaggtagtgtccagacagga

SEQ ID NO: 2933379 - DNA, 25 bp, Homo sapien
taagacagaccatagttcaaccagc

SEQ ID NO: 2933380 - DNA, 25 bp, Homo sapien
gctgcagcgttggtatttggcacag

SEQ ID NO: 2933381 - DNA, 25 bp, Homo sapien
tcctctggcggcttggcgggcggct

SEQ ID NO: 2933382 - DNA, 25 bp, Homo sapien
gcaagggcaccagtcggtttgaggg

SEQ ID NO: 2933383 - DNA, 25 bp, Homo sapien
tgcaagggcaccagtcggtttgagg

SEQ ID NO: 2933384 - DNA, 25 bp, Homo sapien
agggcaccagtcggtttgagggcca

SEQ ID NO: 2933385 - DNA, 25 bp, Homo sapien
ggcaccagtcggtttgagggccatc

SEQ ID NO: 2933386 - DNA, 25 bp, Homo sapien
tgagtaggtttcaacaagcggcaga

SEQ ID NO: 2933387 - DNA, 25 bp, Homo sapien
ctacaatcccggtggccagctgagt

SEQ ID NO: 2933388 - DNA, 25 bp, Homo sapien
ttgtcctacttagggaaggagaaca

SEQ ID NO: 2933389 - DNA, 25 bp, Homo sapien
gcctcacaggtgatttgcagagatg

SEQ ID NO: 2933390 - DNA, 25 bp, Homo sapien
cataggcatttaaattgggtccaat

SEQ ID NO: 2933391 - DNA, 25 bp, Homo sapien
ttccatatcataggcatttaaattg

SEQ ID NO: 2933392 - DNA, 25 bp, Homo sapien
tgctggggaccaaatacacttatgc

SEQ ID NO: 2933393 - DNA, 25 bp, Homo sapien
gccaattaagggaagagcccataat

SEQ ID NO: 2933394 - DNA, 25 bp, Homo sapien
tactttgagacgagcagccagtgct

SEQ ID NO: 2933395 - DNA, 25 bp, Homo sapien
caagcccagtgtcatgtaagtgcca

SEQ ID NO: 2933396 - DNA, 25 bp, Homo sapien
gagccttgggaacatgcgtgtgacc

SEQ ID NO: 2933397 - DNA, 25 bp, Homo sapien
gagtgggtccagaaatacgtcagtg

SEQ ID NO: 2933398 - DNA, 25 bp, Homo sapien
gaatccctgctctgctagtcatcag

SEQ ID NO: 2933399 - DNA, 25 bp, Homo sapien
catggtctggagttggtttacaatc

SEQ ID NO: 2933400 - DNA, 25 bp, Homo sapien
tagtcatcagctttacggccttcgg

SEQ ID NO: 2933401 - DNA, 25 bp, Homo sapien
ggaaatcagcacatggtgatcactc

SEQ ID NO: 2933402 - DNA, 25 bp, Homo sapien
catgattccccgcactgtggactgg

SEQ ID NO: 2933403 - DNA, 25 bp, Homo sapien
ccagaacgctgggacacaaatcaaa

SEQ ID NO: 2933404 - DNA, 25 bp, Homo sapien
gcctcgcagaggctgaaatgagcca

SEQ ID NO: 2933405 - DNA, 25 bp, Homo sapien
catgctgaagggtccacggtgttga

SEQ ID NO: 2933406 - DNA, 25 bp, Homo sapien
ggaaagcaatgctccgcactggaga

SEQ ID NO: 2933407 - DNA, 25 bp, Homo sapien
ccaaagctgggccaaacaggatgtc

SEQ ID NO: 2933408 - DNA, 25 bp, Homo sapien
gaccacgcagaccacatatgagaaa

SEQ ID NO: 2933409 - DNA, 25 bp, Homo sapien
taacaaggactcaggacgggaaaca

SEQ ID NO: 2933410 - DNA, 25 bp, Homo sapien
ttgtgaagcatcttccttcaaattg

SEQ ID NO: 2933411 - DNA, 25 bp, Homo sapien
tccttgtgaagcatcttccttcaaa

SEQ ID NO: 2933412 - DNA, 25 bp, Homo sapien
gtgaagcatcttccttcaaattgtt

SEQ ID NO: 2933413 - DNA, 25 bp, Homo sapien
attccttgtgaagcatcttccttca

SEQ ID NO: 2933414 - DNA, 25 bp, Homo sapien
tctctttatagggactctgaggcct

SEQ ID NO: 2933415 - DNA, 25 bp, Homo sapien
ctttatagggactctgaggcctagg

SEQ ID NO: 2933416 - DNA, 25 bp, Homo sapien
ctctgaggcctaggacaaatgtggg

SEQ ID NO: 2933417 - DNA, 25 bp, Homo sapien
tagggactctgaggcctaggacaaa

SEQ ID NO: 2933418 - DNA, 25 bp, Homo sapien
acaggacagtcacgcagagcttcat

SEQ ID NO: 2933419 - DNA, 25 bp, Homo sapien
agacaggacagtcacgcagagcttc

SEQ ID NO: 2933420 - DNA, 25 bp, Homo sapien
gacaggacagtcacgcagagcttca

SEQ ID NO: 2933421 - DNA, 25 bp, Homo sapien
gagacaggacagtcacgcagagctt

SEQ ID NO: 2933422 - DNA, 25 bp, Homo sapien
tacatttagcagcagactacatggc

SEQ ID NO: 2933423 - DNA, 25 bp, Homo sapien
tagaaaaaaggactctgcctacacc

SEQ ID NO: 2933424 - DNA, 25 bp, Homo sapien
tacaccttgactcgaaatagcagct

SEQ ID NO: 2933425 - DNA, 25 bp, Homo sapien
cattcccacctaacatgagcaggag

SEQ ID NO: 2933426 - DNA, 25 bp, Homo sapien
taccacaaagttgcgaggaagcttc

SEQ ID NO: 2933427 - DNA, 25 bp, Homo sapien
atctaccacaaagttgcgaggaagc

SEQ ID NO: 2933428 - DNA, 25 bp, Homo sapien
ggtctcatagtaatctaccacaaag

SEQ ID NO: 2933429 - DNA, 25 bp, Homo sapien
cacaaagttgcgaggaagcttcctc

SEQ ID NO: 2933430 - DNA, 25 bp, Homo sapien
gagcagacagattagaatcccatgg

SEQ ID NO: 2933431 - DNA, 25 bp, Homo sapien
gcagacagattagaatcccatggga

SEQ ID NO: 2933432 - DNA, 25 bp, Homo sapien
agacagattagaatcccatgggacc

SEQ ID NO: 2933433 - DNA, 25 bp, Homo sapien
cagacagattagaatcccatgggac

SEQ ID NO: 2933434 - DNA, 25 bp, Homo sapien
cagttccaggtcatacacgtactcc

SEQ ID NO: 2933435 - DNA, 25 bp, Homo sapien
tcagttccaggtcatacacgtactc

SEQ ID NO: 2933436 - DNA, 25 bp, Homo sapien
ggacacttatcctttggctaaacta

SEQ ID NO: 2933437 - DNA, 25 bp, Homo sapien
ttatccatgtatttgcaacagcaga

SEQ ID NO: 2933438 - DNA, 25 bp, Homo sapien
ggaactgcggagaggagtcctgagt

SEQ ID NO: 2933439 - DNA, 25 bp, Homo sapien
tgaccttccctgaagacttcctgtc

SEQ ID NO: 2933440 - DNA, 25 bp, Homo sapien
cttggacttgccagttgtagctgct

SEQ ID NO: 2933441 - DNA, 25 bp, Homo sapien
ttgtagctgctggaatgaggtcttt

SEQ ID NO: 2933442 - DNA, 25 bp, Homo sapien
ctttgtccagtacatccagaacgtc

SEQ ID NO: 2933443 - DNA, 25 bp, Homo sapien
gaggtctttgtccagtacatccaga

SEQ ID NO: 2933444 - DNA, 25 bp, Homo sapien
ccacagtccccgtcttctcttcact

SEQ ID NO: 2933445 - DNA, 25 bp, Homo sapien
agtccccgtcttctcttcactgatg

SEQ ID NO: 2933446 - DNA, 25 bp, Homo sapien
ccttccacagtccccgtcttctctt

SEQ ID NO: 2933447 - DNA, 25 bp, Homo sapien
acagtccccgtcttctcttcactga

SEQ ID NO: 2933448 - DNA, 25 bp, Homo sapien
tagggtgacagcaaagactcgaaga

SEQ ID NO: 2933449 - DNA, 25 bp, Homo sapien
ggtgacagcaaagactcgaagaggt

SEQ ID NO: 2933450 - DNA, 25 bp, Homo sapien
acagcaaagactcgaagaggtgcct

SEQ ID NO: 2933451 - DNA, 25 bp, Homo sapien
ctgatagggtgacagcaaagactcg

SEQ ID NO: 2933452 - DNA, 25 bp, Homo sapien
tgcctggtcacactggaggtgtaga

SEQ ID NO: 2933453 - DNA, 25 bp, Homo sapien
gcctgaagtggtgcaggtgcctggt

SEQ ID NO: 2933454 - DNA, 25 bp, Homo sapien
ctgaagtggtgcaggtgcctggtca

SEQ ID NO: 2933455 - DNA, 25 bp, Homo sapien
caggtgcctggtcacactggaggtg

SEQ ID NO: 2933456 - DNA, 25 bp, Homo sapien
gcaaggcgagggcacatttccctgg

SEQ ID NO: 2933457 - DNA, 25 bp, Homo sapien
ggcctggatagaacagcaaggcgag

SEQ ID NO: 2933458 - DNA, 25 bp, Homo sapien
ggcgagggcacatttccctggccat

SEQ ID NO: 2933459 - DNA, 25 bp, Homo sapien
cctggatagaacagcaaggcgaggg

SEQ ID NO: 2933460 - DNA, 25 bp, Homo sapien
caggagagtggtggcaggtccccca

SEQ ID NO: 2933461 - DNA, 25 bp, Homo sapien
aggagtccggaactgccaggagagt

SEQ ID NO: 2933462 - DNA, 25 bp, Homo sapien
cccaggagtccggaactgccaggag

SEQ ID NO: 2933463 - DNA, 25 bp, Homo sapien
ggttcccaggagtccggaactgcca

SEQ ID NO: 2933464 - DNA, 25 bp, Homo sapien
gcctccacttggaaagttctcagtt

SEQ ID NO: 2933465 - DNA, 25 bp, Homo sapien
caggcttctagaagcatctgggcca

SEQ ID NO: 2933466 - DNA, 25 bp, Homo sapien
ctctgcggcctccacttggaaagtt

SEQ ID NO: 2933467 - DNA, 25 bp, Homo sapien
tccaggcttctagaagcatctgggc

SEQ ID NO: 2933468 - DNA, 25 bp, Homo sapien
gagatcggctttcgctgcacccagc

SEQ ID NO: 2933469 - DNA, 25 bp, Homo sapien
gtgagatcggctttcgctgcaccca

SEQ ID NO: 2933470 - DNA, 25 bp, Homo sapien
tgagatcggctttcgctgcacccag

SEQ ID NO: 2933471 - DNA, 25 bp, Homo sapien
agggcccttggttccgccattatga

SEQ ID NO: 2933472 - DNA, 25 bp, Homo sapien
gatttcagacagagctgctgggtcc

SEQ ID NO: 2933473 - DNA, 25 bp, Homo sapien
tagagggcccttggttccgccatta

SEQ ID NO: 2933474 - DNA, 25 bp, Homo sapien
cgtagagggcccttggttccgccat

SEQ ID NO: 2933475 - DNA, 25 bp, Homo sapien
gcacctcgttcttccacaccctgtc

SEQ ID NO: 2933476 - DNA, 25 bp, Homo sapien
cgttcttccacaccctgtcctggtg

SEQ ID NO: 2933477 - DNA, 25 bp, Homo sapien
agcttccccgccacgggcacctcgt

SEQ ID NO: 2933478 - DNA, 25 bp, Homo sapien
ctcgttcttccacaccctgtcctgg

SEQ ID NO: 2933479 - DNA, 25 bp, Homo sapien
aaacccgagcaagggtcgtcggcat

SEQ ID NO: 2933480 - DNA, 25 bp, Homo sapien
caaacccgagcaagggtcgtcggca

SEQ ID NO: 2933481 - DNA, 25 bp, Homo sapien
ccgagcaagggtcgtcggcatccag

SEQ ID NO: 2933482 - DNA, 25 bp, Homo sapien
acccgagcaagggtcgtcggcatcc

SEQ ID NO: 2933483 - DNA, 25 bp, Homo sapien
gttctgactgggggccgtatcccag

SEQ ID NO: 2933484 - DNA, 25 bp, Homo sapien
gactgggggccgtatcccaggccca

SEQ ID NO: 2933485 - DNA, 25 bp, Homo sapien
tgactgggggccgtatcccaggccc

SEQ ID NO: 2933486 - DNA, 25 bp, Homo sapien
tctgactgggggccgtatcccaggc

SEQ ID NO: 2933487 - DNA, 25 bp, Homo sapien
tcctcttcaccttttcttcctcctc

SEQ ID NO: 2933488 - DNA, 25 bp, Homo sapien
tcttcaccttttcttcctcctcttc

SEQ ID NO: 2933489 - DNA, 25 bp, Homo sapien
ctgggccttcctcttcaccttttct

SEQ ID NO: 2933490 - DNA, 25 bp, Homo sapien
tcaccttttcttcctcctcttcctc

SEQ ID NO: 2933491 - DNA, 25 bp, Homo sapien
gagtgtggtgagcacttccctgtcc

SEQ ID NO: 2933492 - DNA, 25 bp, Homo sapien
cacatgacccagatgaaagtcgaga

SEQ ID NO: 2933493 - DNA, 25 bp, Homo sapien
gctgtgaccattcccaggtaactcc

SEQ ID NO: 2933494 - DNA, 25 bp, Homo sapien
acgaagacgtccaggtgtggcccgt

SEQ ID NO: 2933495 - DNA, 25 bp, Homo sapien
caggcgaccctcatggggaaggtca

SEQ ID NO: 2933496 - DNA, 25 bp, Homo sapien
aagccccagtgtgcgcagctcgagc

SEQ ID NO: 2933497 - DNA, 25 bp, Homo sapien
agactgaagccccagtgtgcgcagc

SEQ ID NO: 2933498 - DNA, 25 bp, Homo sapien
actgaagccccagtgtgcgcagctc

SEQ ID NO: 2933499 - DNA, 25 bp, Homo sapien
gtgcacaaacacattgcaggcaggc

SEQ ID NO: 2933500 - DNA, 25 bp, Homo sapien
tgcacaaacacattgcaggcaggca

SEQ ID NO: 2933501 - DNA, 25 bp, Homo sapien
gcacaaacacattgcaggcaggcat

SEQ ID NO: 2933502 - DNA, 25 bp, Homo sapien
cctcaggacttgagactccagttgg

SEQ ID NO: 2933503 - DNA, 25 bp, Homo sapien
ccaagtgtgctttgagagtagggtg

SEQ ID NO: 2933504 - DNA, 25 bp, Homo sapien
caagtgtgctttgagagtagggtgg

SEQ ID NO: 2933505 - DNA, 25 bp, Homo sapien
ctgcctcaggacttgagactccagt

SEQ ID NO: 2933506 - DNA, 25 bp, Homo sapien
accctcctcttgaggaagcagccac

SEQ ID NO: 2933507 - DNA, 25 bp, Homo sapien
gcagatccaccctcctcttgaggaa

SEQ ID NO: 2933508 - DNA, 25 bp, Homo sapien
aggagagcagatccaccctcctctt

SEQ ID NO: 2933509 - DNA, 25 bp, Homo sapien
gggcaggagagcagatccaccctcc

SEQ ID NO: 2933510 - DNA, 25 bp, Homo sapien
gaggacgtggccagggctccaaaag

SEQ ID NO: 2933511 - DNA, 25 bp, Homo sapien
ctggggaggacgtggccagggctcc

SEQ ID NO: 2933512 - DNA, 25 bp, Homo sapien
gacgtggccagggctccaaaaggcc

SEQ ID NO: 2933513 - DNA, 25 bp, Homo sapien
tggggaggacgtggccagggctcca

SEQ ID NO: 2933514 - DNA, 25 bp, Homo sapien
tcccagcatcctcaaaatgaggggt

SEQ ID NO: 2933515 - DNA, 25 bp, Homo sapien
acagctggctcgagtggtgcccacg

SEQ ID NO: 2933516 - DNA, 25 bp, Homo sapien
tgccgtgctctcctgagtgggcgcc

SEQ ID NO: 2933517 - DNA, 25 bp, Homo sapien
gcaggtcacagctggctcgagtggt

SEQ ID NO: 2933518 - DNA, 25 bp, Homo sapien
gacacgagcaaactccggcgagaaa

SEQ ID NO: 2933519 - DNA, 25 bp, Homo sapien
tccggcgagaaagggcaacggtcaa

SEQ ID NO: 2933520 - DNA, 25 bp, Homo sapien
gcaaactccggcgagaaagggcaac

SEQ ID NO: 2933521 - DNA, 25 bp, Homo sapien
cgagaaagggcaacggtcaaagatt

SEQ ID NO: 2933522 - DNA, 25 bp, Homo sapien
gcaaatggggatagagacacgtgtc

SEQ ID NO: 2933523 - DNA, 25 bp, Homo sapien
ggccttctcaggacaaatattccat

SEQ ID NO: 2933524 - DNA, 25 bp, Homo sapien
ccgatggatgtattggccttctcag

SEQ ID NO: 2933525 - DNA, 25 bp, Homo sapien
ggatagagacacgtgtccgatggat

SEQ ID NO: 2933526 - DNA, 25 bp, Homo sapien
tagggtgacagcaaagactcgaaga

SEQ ID NO: 2933527 - DNA, 25 bp, Homo sapien
ctgatagggtgacagcaaagactcg

SEQ ID NO: 2933528 - DNA, 25 bp, Homo sapien
ggtgacagcaaagactcgaagaggt

SEQ ID NO: 2933529 - DNA, 25 bp, Homo sapien
acagcaaagactcgaagaggtgcct

SEQ ID NO: 2933530 - DNA, 25 bp, Homo sapien
tgcctggtcacactggaggtgtaga

SEQ ID NO: 2933531 - DNA, 25 bp, Homo sapien
gcctgaagtggtgcaggtgcctggt

SEQ ID NO: 2933532 - DNA, 25 bp, Homo sapien
ctgaagtggtgcaggtgcctggtca

SEQ ID NO: 2933533 - DNA, 25 bp, Homo sapien
caggtgcctggtcacactggaggtg

SEQ ID NO: 2933534 - DNA, 25 bp, Homo sapien
gacagggggatgacctgaggtctgg

SEQ ID NO: 2933535 - DNA, 25 bp, Homo sapien
agacagggggatgacctgaggtctg

SEQ ID NO: 2933536 - DNA, 25 bp, Homo sapien
acagggggatgacctgaggtctgga

SEQ ID NO: 2933537 - DNA, 25 bp, Homo sapien
cagacagggggatgacctgaggtct

SEQ ID NO: 2933538 - DNA, 25 bp, Homo sapien
tgtagaagtataggctgagcttcct

SEQ ID NO: 2933539 - DNA, 25 bp, Homo sapien
ccagcacattcaggaacggagacta

SEQ ID NO: 2933540 - DNA, 25 bp, Homo sapien
ggttctctgcatgtagaagtatagg

SEQ ID NO: 2933541 - DNA, 25 bp, Homo sapien
tgggtgccgtccaggttctctgcat

SEQ ID NO: 2933542 - DNA, 25 bp, Homo sapien
caggagagtggtggcaggtccccca

SEQ ID NO: 2933543 - DNA, 25 bp, Homo sapien
aggagtccggaactgccaggagagt

SEQ ID NO: 2933544 - DNA, 25 bp, Homo sapien
cccaggagtccggaactgccaggag

SEQ ID NO: 2933545 - DNA, 25 bp, Homo sapien
ggttcccaggagtccggaactgcca

SEQ ID NO: 2933546 - DNA, 25 bp, Homo sapien
tccaggcttctagaagcatctgggc

SEQ ID NO: 2933547 - DNA, 25 bp, Homo sapien
gcctccacttggaaagttctcagtt

SEQ ID NO: 2933548 - DNA, 25 bp, Homo sapien
caggcttctagaagcatctgggcca

SEQ ID NO: 2933549 - DNA, 25 bp, Homo sapien
ctctgcggcctccacttggaaagtt

SEQ ID NO: 2933550 - DNA, 25 bp, Homo sapien
gagatcggctttcgctgcacccagc

SEQ ID NO: 2933551 - DNA, 25 bp, Homo sapien
tgagatcggctttcgctgcacccag

SEQ ID NO: 2933552 - DNA, 25 bp, Homo sapien
gtgagatcggctttcgctgcaccca

SEQ ID NO: 2933553 - DNA, 25 bp, Homo sapien
ctcgttcttccacaccctgtcctgg

SEQ ID NO: 2933554 - DNA, 25 bp, Homo sapien
cgttcttccacaccctgtcctggtg

SEQ ID NO: 2933555 - DNA, 25 bp, Homo sapien
gcacctcgttcttccacaccctgtc

SEQ ID NO: 2933556 - DNA, 25 bp, Homo sapien
agcttccccgccacgggcacctcgt

SEQ ID NO: 2933557 - DNA, 25 bp, Homo sapien
acccgagcaagggtcgtcggcatcc

SEQ ID NO: 2933558 - DNA, 25 bp, Homo sapien
ccgagcaagggtcgtcggcatccag

SEQ ID NO: 2933559 - DNA, 25 bp, Homo sapien
caaacccgagcaagggtcgtcggca

SEQ ID NO: 2933560 - DNA, 25 bp, Homo sapien
aaacccgagcaagggtcgtcggcat

SEQ ID NO: 2933561 - DNA, 25 bp, Homo sapien
ggaccccgaggactccgagatgcag

SEQ ID NO: 2933562 - DNA, 25 bp, Homo sapien
accccgaggactccgagatgcaggc

SEQ ID NO: 2933563 - DNA, 25 bp, Homo sapien
gaccccgaggactccgagatgcagg

SEQ ID NO: 2933564 - DNA, 25 bp, Homo sapien
gactgggggccgtatcccaggccca

SEQ ID NO: 2933565 - DNA, 25 bp, Homo sapien
gttctgactgggggccgtatcccag

SEQ ID NO: 2933566 - DNA, 25 bp, Homo sapien
tgactgggggccgtatcccaggccc

SEQ ID NO: 2933567 - DNA, 25 bp, Homo sapien
tctgactgggggccgtatcccaggc

SEQ ID NO: 2933568 - DNA, 25 bp, Homo sapien
tcctcttcaccttttcttcctcctc

SEQ ID NO: 2933569 - DNA, 25 bp, Homo sapien
ctgggccttcctcttcaccttttct

SEQ ID NO: 2933570 - DNA, 25 bp, Homo sapien
tcttcaccttttcttcctcctcttc

SEQ ID NO: 2933571 - DNA, 25 bp, Homo sapien
tcaccttttcttcctcctcttcctc

SEQ ID NO: 2933572 - DNA, 25 bp, Homo sapien
gagtgtggtgagcacttccctgtcc

SEQ ID NO: 2933573 - DNA, 25 bp, Homo sapien
gctgtgaccattcccaggtaactcc

SEQ ID NO: 2933574 - DNA, 25 bp, Homo sapien
cacatgacccagatgaaagtcgaga

SEQ ID NO: 2933575 - DNA, 25 bp, Homo sapien
acgaagacgtccaggtgtggcccgt

SEQ ID NO: 2933576 - DNA, 25 bp, Homo sapien
caggcgaccctcatggggaaggtca

SEQ ID NO: 2933577 - DNA, 25 bp, Homo sapien
aagccccagtgtgcgcagctcgagc

SEQ ID NO: 2933578 - DNA, 25 bp, Homo sapien
agactgaagccccagtgtgcgcagc

SEQ ID NO: 2933579 - DNA, 25 bp, Homo sapien
actgaagccccagtgtgcgcagctc

SEQ ID NO: 2933580 - DNA, 25 bp, Homo sapien
gcccgttctacactgcccgtgtaga

SEQ ID NO: 2933581 - DNA, 25 bp, Homo sapien
tagacgattggctctttcgtctcca

SEQ ID NO: 2933582 - DNA, 25 bp, Homo sapien
tccccattcgacagatgagacgtct

SEQ ID NO: 2933583 - DNA, 25 bp, Homo sapien
cccaaatgtccccattcgacagatg

SEQ ID NO: 2933584 - DNA, 25 bp, Homo sapien
cgcacgtgcacaaacacgttgcaag

SEQ ID NO: 2933585 - DNA, 25 bp, Homo sapien
catacacgtgtgcacgcacgtgcac

SEQ ID NO: 2933586 - DNA, 25 bp, Homo sapien
ccacatacacgtgtgcacgcacgtg

SEQ ID NO: 2933587 - DNA, 25 bp, Homo sapien
gcacgcacgtgcacaaacacgttgc

SEQ ID NO: 2933588 - DNA, 25 bp, Homo sapien
cctggaatttggcatcccctaggcc

SEQ ID NO: 2933589 - DNA, 25 bp, Homo sapien
ccctggaatttggcatcccctaggc

SEQ ID NO: 2933590 - DNA, 25 bp, Homo sapien
accctcctcttgaggaagcagccac

SEQ ID NO: 2933591 - DNA, 25 bp, Homo sapien
gcagatccaccctcctcttgaggaa

SEQ ID NO: 2933592 - DNA, 25 bp, Homo sapien
aggagagcagatccaccctcctctt

SEQ ID NO: 2933593 - DNA, 25 bp, Homo sapien
gggcaggagagcagatccaccctcc

SEQ ID NO: 2933594 - DNA, 25 bp, Homo sapien
gaggacgtggccagggctccaaaag

SEQ ID NO: 2933595 - DNA, 25 bp, Homo sapien
ctggggaggacgtggccagggctcc

SEQ ID NO: 2933596 - DNA, 25 bp, Homo sapien
tggggaggacgtggccagggctcca

SEQ ID NO: 2933597 - DNA, 25 bp, Homo sapien
gacgtggccagggctccaaaaggcc

SEQ ID NO: 2933598 - DNA, 25 bp, Homo sapien
gcaggtcacagctggctcgagtggt

SEQ ID NO: 2933599 - DNA, 25 bp, Homo sapien
acagctggctcgagtggtgcccacg

SEQ ID NO: 2933600 - DNA, 25 bp, Homo sapien
tcccagcatcctcaaaatgaggggt

SEQ ID NO: 2933601 - DNA, 25 bp, Homo sapien
tgccgtgctctcctgagtgggcgcc

SEQ ID NO: 2933602 - DNA, 25 bp, Homo sapien
ggatagagacacgtgtccgatggat

SEQ ID NO: 2933603 - DNA, 25 bp, Homo sapien
ggccttctcaggacaaatattccat

SEQ ID NO: 2933604 - DNA, 25 bp, Homo sapien
ccgatggatgtattggccttctcag

SEQ ID NO: 2933605 - DNA, 25 bp, Homo sapien
gcaaatggggatagagacacgtgtc

SEQ ID NO: 2933606 - DNA, 25 bp, Homo sapien
gggaagaatgtgaatccaaacgcat

SEQ ID NO: 2933607 - DNA, 25 bp, Homo sapien
cagttgttggggaagaatgtgaatc

SEQ ID NO: 2933608 - DNA, 25 bp, Homo sapien
tgtgaatccaaacgcattcagcaag

SEQ ID NO: 2933609 - DNA, 25 bp, Homo sapien
gaatgtgaatccaaacgcattcagc

SEQ ID NO: 2933610 - DNA, 25 bp, Homo sapien
cttctcattgcggtagccaatccag

SEQ ID NO: 2933611 - DNA, 25 bp, Homo sapien
ttctcattgcggtagccaatccaga

SEQ ID NO: 2933612 - DNA, 25 bp, Homo sapien
tctcattgcggtagccaatccagag

SEQ ID NO: 2933613 - DNA, 25 bp, Homo sapien
gccctcaggtcgtgagacacaaagt

SEQ ID NO: 2933614 - DNA, 25 bp, Homo sapien
ctgctgggccctcaggtcgtgagac

SEQ ID NO: 2933615 - DNA, 25 bp, Homo sapien
tgggccctcaggtcgtgagacacaa

SEQ ID NO: 2933616 - DNA, 25 bp, Homo sapien
caggtcgtgagacacaaagtgttgc

SEQ ID NO: 2933617 - DNA, 25 bp, Homo sapien
gaggaagtgcagatgtcgggatttg

SEQ ID NO: 2933618 - DNA, 25 bp, Homo sapien
gaagtgcagatgtcgggatttggct

SEQ ID NO: 2933619 - DNA, 25 bp, Homo sapien
atgtcgggatttggctgccggccac

SEQ ID NO: 2933620 - DNA, 25 bp, Homo sapien
tgcagatgtcgggatttggctgccg

SEQ ID NO: 2933621 - DNA, 25 bp, Homo sapien
aaggacatgaacagcatccactgag

SEQ ID NO: 2933622 - DNA, 25 bp, Homo sapien
caaggacatgaacagcatccactga

SEQ ID NO: 2933623 - DNA, 25 bp, Homo sapien
tctccaactgctaggccgttccatt

SEQ ID NO: 2933624 - DNA, 25 bp, Homo sapien
catttcgagctgtggagagcattct

SEQ ID NO: 2933625 - DNA, 25 bp, Homo sapien
attctggctagaccccgtgagcagg

SEQ ID NO: 2933626 - DNA, 25 bp, Homo sapien
taggccgttccatttcgagctgtgg

SEQ ID NO: 2933627 - DNA, 25 bp, Homo sapien
cctcatcaggcttaaactagaatcg

SEQ ID NO: 2933628 - DNA, 25 bp, Homo sapien
cggatgcacgtctgcctcatcaggc

SEQ ID NO: 2933629 - DNA, 25 bp, Homo sapien
taatcatccgcccggatgcacgtct

SEQ ID NO: 2933630 - DNA, 25 bp, Homo sapien
ctagaatcgcctcggaggttggaga

SEQ ID NO: 2933631 - DNA, 25 bp, Homo sapien
ggagttgtttcaccaggtcaacagg

SEQ ID NO: 2933632 - DNA, 25 bp, Homo sapien
ggtaccagggctggagttgtttcac

SEQ ID NO: 2933633 - DNA, 25 bp, Homo sapien
gctgctgccctagttagagaatgtc

SEQ ID NO: 2933634 - DNA, 25 bp, Homo sapien
gggctggagttgtttcaccaggtca

SEQ ID NO: 2933635 - DNA, 25 bp, Homo sapien
tgatgtaggcaacgctcagtggaga

SEQ ID NO: 2933636 - DNA, 25 bp, Homo sapien
gcaacgctcagtggagacatcccat

SEQ ID NO: 2933637 - DNA, 25 bp, Homo sapien
ccataatggaagtggacagaagtcc

SEQ ID NO: 2933638 - DNA, 25 bp, Homo sapien
tcagtggagacatcccataatggaa

SEQ ID NO: 2933639 - DNA, 25 bp, Homo sapien
ggagtgcccgctgacagctggccgg

SEQ ID NO: 2933640 - DNA, 25 bp, Homo sapien
ggtgaaagttgaaccacacttccag

SEQ ID NO: 2933641 - DNA, 25 bp, Homo sapien
ccgcagtagcctggtgaaagttgaa

SEQ ID NO: 2933642 - DNA, 25 bp, Homo sapien
ccgcccgcagtagcctggtgaaagt

SEQ ID NO: 2933643 - DNA, 25 bp, Homo sapien
aggtctccgcgtgccactggctgtc

SEQ ID NO: 2933644 - DNA, 25 bp, Homo sapien
gcagggcctgcgctctccgaggtct

SEQ ID NO: 2933645 - DNA, 25 bp, Homo sapien
cacgagtgttcctacgggaaagcag

SEQ ID NO: 2933646 - DNA, 25 bp, Homo sapien
gggcgacccgatgcccacgagtgtt

SEQ ID NO: 2933647 - DNA, 25 bp, Homo sapien
ggagactgtttactgcgccgccgcg

SEQ ID NO: 2933648 - DNA, 25 bp, Homo sapien
gccgccgcgcgcctctcacgcagcc

SEQ ID NO: 2933649 - DNA, 25 bp, Homo sapien
aggagactgtttactgcgccgccgc

SEQ ID NO: 2933650 - DNA, 25 bp, Homo sapien
agactgtttactgcgccgccgcgcg

SEQ ID NO: 2933651 - DNA, 25 bp, Homo sapien
aagcagatcacgcagacgacggtgc

SEQ ID NO: 2933652 - DNA, 25 bp, Homo sapien
gcaggctggacagcggtatttgggc

SEQ ID NO: 2933653 - DNA, 25 bp, Homo sapien
cggtgctacatttgagcgacgccat

SEQ ID NO: 2933654 - DNA, 25 bp, Homo sapien
gggcttctccaagcagatcacgcag

SEQ ID NO: 2933655 - DNA, 25 bp, Homo sapien
tgtgcttccggaagcagactaccga

SEQ ID NO: 2933656 - DNA, 25 bp, Homo sapien
cttccggaagcagactaccgagcag

SEQ ID NO: 2933657 - DNA, 25 bp, Homo sapien
tgcttccggaagcagactaccgagc

SEQ ID NO: 2933658 - DNA, 25 bp, Homo sapien
tttgtgcttccggaagcagactacc

SEQ ID NO: 2933659 - DNA, 25 bp, Homo sapien
aagtttgtctccgttactcaggagg

SEQ ID NO: 2933660 - DNA, 25 bp, Homo sapien
gataaagtttgtctccgttactcag

SEQ ID NO: 2933661 - DNA, 25 bp, Homo sapien
taaagtttgtctccgttactcagga

SEQ ID NO: 2933662 - DNA, 25 bp, Homo sapien
atagataaagtttgtctccgttact

SEQ ID NO: 2933663 - DNA, 25 bp, Homo sapien
gattaaggaaaaccgccagcaggct

SEQ ID NO: 2933664 - DNA, 25 bp, Homo sapien
ttctcaccacaattaactgaggtgt

SEQ ID NO: 2933665 - DNA, 25 bp, Homo sapien
cattacctccatttcagcgacaagg

SEQ ID NO: 2933666 - DNA, 25 bp, Homo sapien
agcatctaggtaggaagcaagtgtc

SEQ ID NO: 2933667 - DNA, 25 bp, Homo sapien
tggtaggaagagctgatcttatttt

SEQ ID NO: 2933668 - DNA, 25 bp, Homo sapien
tctcaacaggacgagtttcagggtt

SEQ ID NO: 2933669 - DNA, 25 bp, Homo sapien
caacaggacgagtttcagggttgca

SEQ ID NO: 2933670 - DNA, 25 bp, Homo sapien
tttttctcaacaggacgagtttcag

SEQ ID NO: 2933671 - DNA, 25 bp, Homo sapien
aacaaatgcactctagtgttcacag

SEQ ID NO: 2933672 - DNA, 25 bp, Homo sapien
tgcacgcacatgtgatagtgatagg

SEQ ID NO: 2933673 - DNA, 25 bp, Homo sapien
aaaatcctcttctccggagtctgtg

SEQ ID NO: 2933674 - DNA, 25 bp, Homo sapien
gggtattcaagcaggtacagacaaa

SEQ ID NO: 2933675 - DNA, 25 bp, Homo sapien
gagaaaatcagctatagagtcatca

SEQ ID NO: 2933676 - DNA, 25 bp, Homo sapien
tattgagaaaatcagctatagagtc

SEQ ID NO: 2933677 - DNA, 25 bp, Homo sapien
aaatcagctatagagtcatcatcat

SEQ ID NO: 2933678 - DNA, 25 bp, Homo sapien
aaaatcagctatagagtcatcatca

SEQ ID NO: 2933679 - DNA, 25 bp, Homo sapien
cttcgtgccacttcagctaagaaaa

SEQ ID NO: 2933680 - DNA, 25 bp, Homo sapien
aaagttgccagtggtgaagacggct

SEQ ID NO: 2933681 - DNA, 25 bp, Homo sapien
tgcagtaacagataccagttcttgg

SEQ ID NO: 2933682 - DNA, 25 bp, Homo sapien
gaagacggctatacgaaataatctg

SEQ ID NO: 2933683 - DNA, 25 bp, Homo sapien
tcttctccctgatcgaggttgacca

SEQ ID NO: 2933684 - DNA, 25 bp, Homo sapien
gaggttgaccatcaactgcctgagg

SEQ ID NO: 2933685 - DNA, 25 bp, Homo sapien
tcttgcatgtaagctctcatgagct

SEQ ID NO: 2933686 - DNA, 25 bp, Homo sapien
cctgaggtgtggattgagcaataag

SEQ ID NO: 2933687 - DNA, 25 bp, Homo sapien
aggttccaggagtcaagcacacgct

SEQ ID NO: 2933688 - DNA, 25 bp, Homo sapien
gaaacatgagccacatcaatgccgg

SEQ ID NO: 2933689 - DNA, 25 bp, Homo sapien
taaaggcctgcatgacctaatctgc

SEQ ID NO: 2933690 - DNA, 25 bp, Homo sapien
ccttaaggaccccaagtctgcctga

SEQ ID NO: 2933691 - DNA, 25 bp, Homo sapien
ctgaccaagtttaactccatatgaa

SEQ ID NO: 2933692 - DNA, 25 bp, Homo sapien
accaagtttaactccatatgaagtg

SEQ ID NO: 2933693 - DNA, 25 bp, Homo sapien
tgaccaagtttaactccatatgaag

SEQ ID NO: 2933694 - DNA, 25 bp, Homo sapien
gaccaagtttaactccatatgaagt

SEQ ID NO: 2933695 - DNA, 25 bp, Homo sapien
gatttatttaatgtaatttcaaaca

SEQ ID NO: 2933696 - DNA, 25 bp, Homo sapien
tgtaatttcaaacaattaaattatg

SEQ ID NO: 2933697 - DNA, 25 bp, Homo sapien
tagttgatttatttaatgtaatttc

SEQ ID NO: 2933698 - DNA, 25 bp, Homo sapien
caaacaattaaattatgaataatgc

SEQ ID NO: 2933699 - DNA, 25 bp, Homo sapien
acagccaaagttggcctaaaattgg

SEQ ID NO: 2933700 - DNA, 25 bp, Homo sapien
aagttggcctaaaattggcgctgga

SEQ ID NO: 2933701 - DNA, 25 bp, Homo sapien
taaaattggcgctggaatttgggct

SEQ ID NO: 2933702 - DNA, 25 bp, Homo sapien
tggcctaaaattggcgctggaattt

SEQ ID NO: 2933703 - DNA, 25 bp, Homo sapien
ttcactaccttcacagatcaaactc

SEQ ID NO: 2933704 - DNA, 25 bp, Homo sapien
tcagggctggtagttaccaaatcag

SEQ ID NO: 2933705 - DNA, 25 bp, Homo sapien
aacatcagggccacatttcactacc

SEQ ID NO: 2933706 - DNA, 25 bp, Homo sapien
gctggtagttaccaaatcagggtta

SEQ ID NO: 2933707 - DNA, 25 bp, Homo sapien
taattagtcccacatcacaacttgg

SEQ ID NO: 2933708 - DNA, 25 bp, Homo sapien
gtttgttacctcaaatggcactgga

SEQ ID NO: 2933709 - DNA, 25 bp, Homo sapien
tttctggctgacgaaatgacaagca

SEQ ID NO: 2933710 - DNA, 25 bp, Homo sapien
agggaaaagtcagccagcacactca

SEQ ID NO: 2933711 - DNA, 25 bp, Homo sapien
tcacagcgggaatgagactgaggct

SEQ ID NO: 2933712 - DNA, 25 bp, Homo sapien
aagatccatccctaaccctactggg

SEQ ID NO: 2933713 - DNA, 25 bp, Homo sapien
gagcgctgcctcaggtacgttgtgt

SEQ ID NO: 2933714 - DNA, 25 bp, Homo sapien
tgtccagacagcacaagaccaggct

SEQ ID NO: 2933715 - DNA, 25 bp, Homo sapien
gggcagccagctgtttgcaaccagg

SEQ ID NO: 2933716 - DNA, 25 bp, Homo sapien
tccattttctgctaagagggctaga

SEQ ID NO: 2933717 - DNA, 25 bp, Homo sapien
gtatagacttgtggcatatggaacc

SEQ ID NO: 2933718 - DNA, 25 bp, Homo sapien
tctaaagctataaagggatatttgc

SEQ ID NO: 2933719 - DNA, 25 bp, Homo sapien
cagtcatcaagcgtgcatggcagaa

SEQ ID NO: 2933720 - DNA, 25 bp, Homo sapien
ccagatggacccgagtgggaatgct

SEQ ID NO: 2933721 - DNA, 25 bp, Homo sapien
gcagaagtggagagtaagtaagacc

SEQ ID NO: 2933722 - DNA, 25 bp, Homo sapien
tttgaaactttgacagcaactgtgg

SEQ ID NO: 2933723 - DNA, 25 bp, Homo sapien
aaactacatattaagggcgatgccc

SEQ ID NO: 2933724 - DNA, 25 bp, Homo sapien
aaaattgtataaggaagctgggcac

SEQ ID NO: 2933725 - DNA, 25 bp, Homo sapien
ggaccatccctatgatgcagctaag

SEQ ID NO: 2933726 - DNA, 25 bp, Homo sapien
gaacccaaatatctaacagtggtga

SEQ ID NO: 2933727 - DNA, 25 bp, Homo sapien
accagtctattcctagagagcaggg

SEQ ID NO: 2933728 - DNA, 25 bp, Homo sapien
tcggacacagaccaaggtcacagtg

SEQ ID NO: 2933729 - DNA, 25 bp, Homo sapien
gctctcagaagcctgacagtgggaa

SEQ ID NO: 2933730 - DNA, 25 bp, Homo sapien
ggagcttctgtctatagccccaggg

SEQ ID NO: 2933731 - DNA, 25 bp, Homo sapien
taagagatagagtcaggattcagag

SEQ ID NO: 2933732 - DNA, 25 bp, Homo sapien
aggtacttgatcactatactcagat

SEQ ID NO: 2933733 - DNA, 25 bp, Homo sapien
taggcccaagtggttcttctaccta

SEQ ID NO: 2933734 - DNA, 25 bp, Homo sapien
ttcagagccagacaactaactttca

SEQ ID NO: 2933735 - DNA, 25 bp, Homo sapien
gccacttgccttgattcggtgttcc

SEQ ID NO: 2933736 - DNA, 25 bp, Homo sapien
actggtgatcaggttgccacttgcc

SEQ ID NO: 2933737 - DNA, 25 bp, Homo sapien
caggttgccacttgccttgattcgg

SEQ ID NO: 2933738 - DNA, 25 bp, Homo sapien
agggactggtgatcaggttgccact

SEQ ID NO: 2933739 - DNA, 25 bp, Homo sapien
cagcgcttctcagcgtctgccctcc

SEQ ID NO: 2933740 - DNA, 25 bp, Homo sapien
gcgcttctcagcgtctgccctccca

SEQ ID NO: 2933741 - DNA, 25 bp, Homo sapien
gcttctcagcgtctgccctcccact

SEQ ID NO: 2933742 - DNA, 25 bp, Homo sapien
ccagcgcttctcagcgtctgccctc

SEQ ID NO: 2933743 - DNA, 25 bp, Homo sapien
ctgggtttgcggcacgacgcccgga

SEQ ID NO: 2933744 - DNA, 25 bp, Homo sapien
aggtgcttccggaacggcatcccag

SEQ ID NO: 2933745 - DNA, 25 bp, Homo sapien
tgtcagggcagctgcgcccttggct

SEQ ID NO: 2933746 - DNA, 25 bp, Homo sapien
tttgcggcacgacgcccggaccttg

SEQ ID NO: 2933747 - DNA, 25 bp, Homo sapien
gagagggtccttgctccactcttcg

SEQ ID NO: 2933748 - DNA, 25 bp, Homo sapien
ggagagggtccttgctccactcttc

SEQ ID NO: 2933749 - DNA, 25 bp, Homo sapien
gctcttgcttgaaacaagtctttct

SEQ ID NO: 2933750 - DNA, 25 bp, Homo sapien
ttccttttgaccctcttgtgtctca

SEQ ID NO: 2933751 - DNA, 25 bp, Homo sapien
ttgtgtctcacgagggggtagccca

SEQ ID NO: 2933752 - DNA, 25 bp, Homo sapien
ggctcttgcttgaaacaagtctttc

SEQ ID NO: 2933753 - DNA, 25 bp, Homo sapien
tcaacccgaacctatatctgaagcc

SEQ ID NO: 2933754 - DNA, 25 bp, Homo sapien
gagtgtcaacccgaacctatatctg

SEQ ID NO: 2933755 - DNA, 25 bp, Homo sapien
gggcctgaagcacggcggctcgggc

SEQ ID NO: 2933756 - DNA, 25 bp, Homo sapien
ccggtgagtgtcaacccgaacctat

SEQ ID NO: 2933757 - DNA, 25 bp, Homo sapien
cgtagttgaagccagcaagccggac

SEQ ID NO: 2933758 - DNA, 25 bp, Homo sapien
aagggcagccggactgccgctgcac

SEQ ID NO: 2933759 - DNA, 25 bp, Homo sapien
cccagcagacggtctacgtgggaag

SEQ ID NO: 2933760 - DNA, 25 bp, Homo sapien
gtgggctacccactcctgtcatgtc

SEQ ID NO: 2933761 - DNA, 25 bp, Homo sapien
cccatcatggcgctcgtgccagtgt

SEQ ID NO: 2933762 - DNA, 25 bp, Homo sapien
tctgcacaggatacagaatgcagga

SEQ ID NO: 2933763 - DNA, 25 bp, Homo sapien
tccagcacggtggttccattgaggt

SEQ ID NO: 2933764 - DNA, 25 bp, Homo sapien
atttccagcacggtggttccattga

SEQ ID NO: 2933765 - DNA, 25 bp, Homo sapien
tgaggttactgacaaaagcttcctt

SEQ ID NO: 2933766 - DNA, 25 bp, Homo sapien
ttacacggaaacaggagatggctgg

SEQ ID NO: 2933767 - DNA, 25 bp, Homo sapien
taattacaccgagaagctcaaggag

SEQ ID NO: 2933768 - DNA, 25 bp, Homo sapien
aaggcagtctggcatagcaggtcct

SEQ ID NO: 2933769 - DNA, 25 bp, Homo sapien
tcaaagtggctaccatgggaactat

SEQ ID NO: 2933770 - DNA, 25 bp, Homo sapien
gtgggaagtccacagccaaaatagc

SEQ ID NO: 2933771 - DNA, 25 bp, Homo sapien
tctagacaaaccattgcagacccaa

SEQ ID NO: 2933772 - DNA, 25 bp, Homo sapien
cctgtcccatagagctcagttttgg

SEQ ID NO: 2933773 - DNA, 25 bp, Homo sapien
cagttttggcaaatcttctgggaaa

SEQ ID NO: 2933774 - DNA, 25 bp, Homo sapien
taggaagactaatggccaaacagag

SEQ ID NO: 2933775 - DNA, 25 bp, Homo sapien
agagattattccttcgcggttggca

SEQ ID NO: 2933776 - DNA, 25 bp, Homo sapien
taatgccgagggcaataatccagga

SEQ ID NO: 2933777 - DNA, 25 bp, Homo sapien
ggcatttaatagaccaacccgtgtg

SEQ ID NO: 2933778 - DNA, 25 bp, Homo sapien
taagaaggatcaggctagaagcaac

SEQ ID NO: 2933779 - DNA, 25 bp, Homo sapien
cattctttcggcttcagggactaga

SEQ ID NO: 2933780 - DNA, 25 bp, Homo sapien
tccaagaacatggtactagagctcc

SEQ ID NO: 2933781 - DNA, 25 bp, Homo sapien
catcaggttgatcaggccagttgtt

SEQ ID NO: 2933782 - DNA, 25 bp, Homo sapien
taaggcccacaaggtactgctgtgt

SEQ ID NO: 2933783 - DNA, 25 bp, Homo sapien
taaacagttggaaaacatatagaga

SEQ ID NO: 2933784 - DNA, 25 bp, Homo sapien
tgaccacaaataaggcccacaaggt

SEQ ID NO: 2933785 - DNA, 25 bp, Homo sapien
catatagagattgaccacaaataag

SEQ ID NO: 2933786 - DNA, 25 bp, Homo sapien
tacttatatatcctactcctgctga

SEQ ID NO: 2933787 - DNA, 25 bp, Homo sapien
tatggttaacactgttgccaaaagc

SEQ ID NO: 2933788 - DNA, 25 bp, Homo sapien
taagcatcactgctgtttagatgac

SEQ ID NO: 2933789 - DNA, 25 bp, Homo sapien
cattctaacaagtcaaaaggctttg

SEQ ID NO: 2933790 - DNA, 25 bp, Homo sapien
tagtgaagtgctgatagcttgtggt

SEQ ID NO: 2933791 - DNA, 25 bp, Homo sapien
aagtgctgatagcttgtggttgtcg

SEQ ID NO: 2933792 - DNA, 25 bp, Homo sapien
gcccgctgcgtagctgcatcccgat

SEQ ID NO: 2933793 - DNA, 25 bp, Homo sapien
agcaaatagtgaagtgctgatagct

SEQ ID NO: 2933794 - DNA, 25 bp, Homo sapien
cgcttcccacggtgggaagaggaga

SEQ ID NO: 2933795 - DNA, 25 bp, Homo sapien
ttgacgccactgaattcgcttccca

SEQ ID NO: 2933796 - DNA, 25 bp, Homo sapien
ccttgacgccactgaattcgcttcc

SEQ ID NO: 2933797 - DNA, 25 bp, Homo sapien
cgccactgaattcgcttcccacggt

SEQ ID NO: 2933798 - DNA, 25 bp, Homo sapien
cttctcggaggaggctgtcggttcc

SEQ ID NO: 2933799 - DNA, 25 bp, Homo sapien
caccgttttcgtggtcgcctcgcta

SEQ ID NO: 2933800 - DNA, 25 bp, Homo sapien
tgtcgtttcctctacgggcagtcag

SEQ ID NO: 2933801 - DNA, 25 bp, Homo sapien
tgctccctgttactggctgacgagg

SEQ ID NO: 2933802 - DNA, 25 bp, Homo sapien
ctgcaacagccaaaccccgcgagcg

SEQ ID NO: 2933803 - DNA, 25 bp, Homo sapien
gcaacagccaaaccccgcgagcgta

SEQ ID NO: 2933804 - DNA, 25 bp, Homo sapien
aacagccaaaccccgcgagcgtaag

SEQ ID NO: 2933805 - DNA, 25 bp, Homo sapien
gccaaaccccgcgagcgtaagcacc

SEQ ID NO: 2933806 - DNA, 25 bp, Homo sapien
cgtccccgacgctgccgttgccacc

SEQ ID NO: 2933807 - DNA, 25 bp, Homo sapien
cccgacgctgccgttgccaccgtca

SEQ ID NO: 2933808 - DNA, 25 bp, Homo sapien
gccgttgccaccgtcaccacctcct

SEQ ID NO: 2933809 - DNA, 25 bp, Homo sapien
gacgctgccgttgccaccgtcacca

SEQ ID NO: 2933810 - DNA, 25 bp, Homo sapien
ctcctctcgaaggggaactcctcct

SEQ ID NO: 2933811 - DNA, 25 bp, Homo sapien
tcctctcgaaggggaactcctcctc

SEQ ID NO: 2933812 - DNA, 25 bp, Homo sapien
gtcagggtgtcgtctatgtagaggg

SEQ ID NO: 2933813 - DNA, 25 bp, Homo sapien
cgtcagggtgtcgtctatgtagagg

SEQ ID NO: 2933814 - DNA, 25 bp, Homo sapien
agctgccaggggagcggcgggccca

SEQ ID NO: 2933815 - DNA, 25 bp, Homo sapien
aaggcctcgcctaggagttgcaaca

SEQ ID NO: 2933816 - DNA, 25 bp, Homo sapien
gcctgctgaagagaaggcctcgcct

SEQ ID NO: 2933817 - DNA, 25 bp, Homo sapien
tctttctccagtgcgcagcgctcgg

SEQ ID NO: 2933818 - DNA, 25 bp, Homo sapien
gaagagaaggcctcgcctaggagtt

SEQ ID NO: 2933819 - DNA, 25 bp, Homo sapien
ctaaataatgcgaagaaagcccgtt

SEQ ID NO: 2933820 - DNA, 25 bp, Homo sapien
cagagggtcgataatgctacactac

SEQ ID NO: 2933821 - DNA, 25 bp, Homo sapien
gcaaaagcagcgtctcctaaaggga

SEQ ID NO: 2933822 - DNA, 25 bp, Homo sapien
gaaagggcctagcaatacaatcatt

SEQ ID NO: 2933823 - DNA, 25 bp, Homo sapien
tagaaatgctgtcacttaaaaactt

SEQ ID NO: 2933824 - DNA, 25 bp, Homo sapien
taaagtactgcagctcaatcaagtc

SEQ ID NO: 2933825 - DNA, 25 bp, Homo sapien
tgatcacagtgctagtttcaactat

SEQ ID NO: 2933826 - DNA, 25 bp, Homo sapien
caagtcttaattgagactggcaagc

SEQ ID NO: 2933827 - DNA, 25 bp, Homo sapien
aaattcaaccgccagatacagtgca

SEQ ID NO: 2933828 - DNA, 25 bp, Homo sapien
tatttgccttagtcacaagtccaca

SEQ ID NO: 2933829 - DNA, 25 bp, Homo sapien
ttccatactaaaccacattgcaagg

SEQ ID NO: 2933830 - DNA, 25 bp, Homo sapien
taactccacagccattgtgggacaa

SEQ ID NO: 2933831 - DNA, 25 bp, Homo sapien
tctcccaacaggtgttttgctctgc

SEQ ID NO: 2933832 - DNA, 25 bp, Homo sapien
catccactgccatctatcaaaggaa

SEQ ID NO: 2933833 - DNA, 25 bp, Homo sapien
tacctacagaccctagggacaaaga

SEQ ID NO: 2933834 - DNA, 25 bp, Homo sapien
tgcagaagtcccagcacaaataaat

SEQ ID NO: 2933835 - DNA, 25 bp, Homo sapien
gatgtccatcgagatttaacacatt

SEQ ID NO: 2933836 - DNA, 25 bp, Homo sapien
ctgctttagctgtgcaccattattc

SEQ ID NO: 2933837 - DNA, 25 bp, Homo sapien
gcaccattattctgatgtccatcga

SEQ ID NO: 2933838 - DNA, 25 bp, Homo sapien
tctgatgtccatcgagatttaacac

SEQ ID NO: 2933839 - DNA, 25 bp, Homo sapien
ggaaaagagacgctccacactgcga

SEQ ID NO: 2933840 - DNA, 25 bp, Homo sapien
tctagttacagacaggactcccttg

SEQ ID NO: 2933841 - DNA, 25 bp, Homo sapien
tcaggacttcgcgtgatgtcaccac

SEQ ID NO: 2933842 - DNA, 25 bp, Homo sapien
tgcgacgacaaccaacacatgggac

SEQ ID NO: 2933843 - DNA, 25 bp, Homo sapien
gcgcccggccttattactctgctga

SEQ ID NO: 2933844 - DNA, 25 bp, Homo sapien
aacttatcatccctgacaaattgaa

SEQ ID NO: 2933845 - DNA, 25 bp, Homo sapien
cgtggagagttgaaactttacatcc

SEQ ID NO: 2933846 - DNA, 25 bp, Homo sapien
tcagaacctttacactagctgtccc

SEQ ID NO: 2933847 - DNA, 25 bp, Homo sapien
tgagcaaccacgcaaggcctgttgt

SEQ ID NO: 2933848 - DNA, 25 bp, Homo sapien
cagaggtcaaagtaagccagatttc

SEQ ID NO: 2933849 - DNA, 25 bp, Homo sapien
aaaaagtcaagcgtggtagtgggca

SEQ ID NO: 2933850 - DNA, 25 bp, Homo sapien
ccaaagccgtcattcattctcaata

SEQ ID NO: 2933851 - DNA, 25 bp, Homo sapien
tcaacactgactgctacctgactct

SEQ ID NO: 2933852 - DNA, 25 bp, Homo sapien
tgactgctacctgactctcagccat

SEQ ID NO: 2933853 - DNA, 25 bp, Homo sapien
tatttcaacactgactgctacctga

SEQ ID NO: 2933854 - DNA, 25 bp, Homo sapien
aacactgactgctacctgactctca

SEQ ID NO: 2933855 - DNA, 25 bp, Homo sapien
tttttggaatagcatctatcatgtc

SEQ ID NO: 2933856 - DNA, 25 bp, Homo sapien
atctatcatgtcatttagtttggac

SEQ ID NO: 2933857 - DNA, 25 bp, Homo sapien
ggttttggcttgtgcgtatctaagg

SEQ ID NO: 2933858 - DNA, 25 bp, Homo sapien
ggagtgcaactgacatctcttattc

SEQ ID NO: 2933859 - DNA, 25 bp, Homo sapien
tcgcccaggcgacacgatctcagct

SEQ ID NO: 2933860 - DNA, 25 bp, Homo sapien
cactgcaacctccacctcttgggtt

SEQ ID NO: 2933861 - DNA, 25 bp, Homo sapien
tgtcgcccaggcgacacgatctcag

SEQ ID NO: 2933862 - DNA, 25 bp, Homo sapien
tctgtcgcccaggcgacacgatctc

SEQ ID NO: 2933863 - DNA, 25 bp, Homo sapien
tggacgccagagacggaaaaacctc

SEQ ID NO: 2933864 - DNA, 25 bp, Homo sapien
tgcaggtctcagtacagtccaagga

SEQ ID NO: 2933865 - DNA, 25 bp, Homo sapien
ggaattcattacaccttggacgcca

SEQ ID NO: 2933866 - DNA, 25 bp, Homo sapien
cacaagggctcaggccaaggtttag

SEQ ID NO: 2933867 - DNA, 25 bp, Homo sapien
tggctgttccctggaaacgtccata

SEQ ID NO: 2933868 - DNA, 25 bp, Homo sapien
tggaaaatgatcctatacttgccgt

SEQ ID NO: 2933869 - DNA, 25 bp, Homo sapien
tatacttgccgtccttcctgtggcc

SEQ ID NO: 2933870 - DNA, 25 bp, Homo sapien
aaacgtccataatggaaaatgatcc

SEQ ID NO: 2933871 - DNA, 25 bp, Homo sapien
aatattagtgaaaagggagaataca

SEQ ID NO: 2933872 - DNA, 25 bp, Homo sapien
ttagtgaaaagggagaatacagaag

SEQ ID NO: 2933873 - DNA, 25 bp, Homo sapien
tattagtgaaaagggagaatacaga

SEQ ID NO: 2933874 - DNA, 25 bp, Homo sapien
tagtgaaaagggagaatacagaagg

SEQ ID NO: 2933875 - DNA, 25 bp, Homo sapien
cattagttcccatacatccatccaa

SEQ ID NO: 2933876 - DNA, 25 bp, Homo sapien
tgtgttttcgcagatatgtttctag

SEQ ID NO: 2933877 - DNA, 25 bp, Homo sapien
tgtttctaaaagacaactcgagtca

SEQ ID NO: 2933878 - DNA, 25 bp, Homo sapien
ttaaaactacttcatccctgcattc

SEQ ID NO: 2933879 - DNA, 25 bp, Homo sapien
taaacagtagaactgccccaagaac

SEQ ID NO: 2933880 - DNA, 25 bp, Homo sapien
gcgaagtcattagcttactgccaca

SEQ ID NO: 2933881 - DNA, 25 bp, Homo sapien
tagatgctgttaccttaccagttgc

SEQ ID NO: 2933882 - DNA, 25 bp, Homo sapien
caataaacttggtatgcgggcgaag

SEQ ID NO: 2933883 - DNA, 25 bp, Homo sapien
tccatctaaaaatgttaaaacacta

SEQ ID NO: 2933884 - DNA, 25 bp, Homo sapien
atccatctaaaaatgttaaaacact

SEQ ID NO: 2933885 - DNA, 25 bp, Homo sapien
caaaagctatttgcgcaggtcagaa

SEQ ID NO: 2933886 - DNA, 25 bp, Homo sapien
aaaatagatggtctcttcagcaagg

SEQ ID NO: 2933887 - DNA, 25 bp, Homo sapien
taaattcactgtccaagggtaatgc

SEQ ID NO: 2933888 - DNA, 25 bp, Homo sapien
gggccagacccatatcgaaaagtga

SEQ ID NO: 2933889 - DNA, 25 bp, Homo sapien
caatgaagtctgtttcacagcaaac

SEQ ID NO: 2933890 - DNA, 25 bp, Homo sapien
ggctcagcacgacccaaaagatgtg

SEQ ID NO: 2933891 - DNA, 25 bp, Homo sapien
tctttgctgcagtcaagttcaccaa

SEQ ID NO: 2933892 - DNA, 25 bp, Homo sapien
caccgcaagccttcataaagtgcag

SEQ ID NO: 2933893 - DNA, 25 bp, Homo sapien
cacatgcaagtagaatttagtcctc

SEQ ID NO: 2933894 - DNA, 25 bp, Homo sapien
tgaaagccaaaaaagcctgcctccc

SEQ ID NO: 2933895 - DNA, 25 bp, Homo sapien
gggttttagggcacaaagcaatcac

SEQ ID NO: 2933896 - DNA, 25 bp, Homo sapien
tagcagaggactgaaccaaacacca

SEQ ID NO: 2933897 - DNA, 25 bp, Homo sapien
aatcacacactaatacctttaactg

SEQ ID NO: 2933898 - DNA, 25 bp, Homo sapien
aaagatggataacacagctgcaagt

SEQ ID NO: 2933899 - DNA, 25 bp, Homo sapien
taaaagggaataatcacacactaat

SEQ ID NO: 2933900 - DNA, 25 bp, Homo sapien
gaaacagtaaaagatggataacaca

SEQ ID NO: 2933901 - DNA, 25 bp, Homo sapien
caaaactcttgcgtaaagcatcaac

SEQ ID NO: 2933902 - DNA, 25 bp, Homo sapien
gccagattcgatgcagtctttcata

SEQ ID NO: 2933903 - DNA, 25 bp, Homo sapien
gtctgctcttctgcccgtagcttct

SEQ ID NO: 2933904 - DNA, 25 bp, Homo sapien
gcatcaacaccaagatagaaaagca

SEQ ID NO: 2933905 - DNA, 25 bp, Homo sapien
gtaagggagtaggaatatcacacac

SEQ ID NO: 2933906 - DNA, 25 bp, Homo sapien
tgttccaatctgctaataccctgta

SEQ ID NO: 2933907 - DNA, 25 bp, Homo sapien
gcttgagttctcttactcgttcctc

SEQ ID NO: 2933908 - DNA, 25 bp, Homo sapien
tcctcacaaagttgttccaatctgc

SEQ ID NO: 2933909 - DNA, 25 bp, Homo sapien
tacaggaagtcctggaatcaaaccc

SEQ ID NO: 2933910 - DNA, 25 bp, Homo sapien
catacacacttaagagttgatatta

SEQ ID NO: 2933911 - DNA, 25 bp, Homo sapien
gctcaagtgatacctccaccctggg

SEQ ID NO: 2933912 - DNA, 25 bp, Homo sapien
tggcctgtacttctatctacaagca

SEQ ID NO: 2933913 - DNA, 25 bp, Homo sapien
ctgctaggacaggtacatgatgtat

SEQ ID NO: 2933914 - DNA, 25 bp, Homo sapien
catgatgtattttcattggtaacaa

SEQ ID NO: 2933915 - DNA, 25 bp, Homo sapien
gctttgcagctgctattttctatga

SEQ ID NO: 2933916 - DNA, 25 bp, Homo sapien
ggtaacaattacttctacacaagta

SEQ ID NO: 2933917 - DNA, 25 bp, Homo sapien
gctcacagaatctctaaaagctctt

SEQ ID NO: 2933918 - DNA, 25 bp, Homo sapien
aaagtagaacatttccaatgaagga

SEQ ID NO: 2933919 - DNA, 25 bp, Homo sapien
tgagaataaatcaagtgagagttac

SEQ ID NO: 2933920 - DNA, 25 bp, Homo sapien
tgatattcttggaactataaagcag

SEQ ID NO: 2933921 - DNA, 25 bp, Homo sapien
cactcccttccatgctagatgaata

SEQ ID NO: 2933922 - DNA, 25 bp, Homo sapien
ctaccattacagtgtggagataagc

SEQ ID NO: 2933923 - DNA, 25 bp, Homo sapien
tagatgaatatccacaatcactacc

SEQ ID NO: 2933924 - DNA, 25 bp, Homo sapien
aggcaacatccgaaccctcccgaga

SEQ ID NO: 2933925 - DNA, 25 bp, Homo sapien
actgggaaacttaatgtgagcctac

SEQ ID NO: 2933926 - DNA, 25 bp, Homo sapien
catgtagtagaaataactgggaaac

SEQ ID NO: 2933927 - DNA, 25 bp, Homo sapien
ctgcagaaatcaataatccttctta

SEQ ID NO: 2933928 - DNA, 25 bp, Homo sapien
tcagccatgtagtagaaataactgg

SEQ ID NO: 2933929 - DNA, 25 bp, Homo sapien
gtcgttctcttcagaatttgcccaa

SEQ ID NO: 2933930 - DNA, 25 bp, Homo sapien
tttccttttgtgtcgttctcttcag

SEQ ID NO: 2933931 - DNA, 25 bp, Homo sapien
ttgtgtcgttctcttcagaatttgc

SEQ ID NO: 2933932 - DNA, 25 bp, Homo sapien
tccttttgtgtcgttctcttcagaa

SEQ ID NO: 2933933 - DNA, 25 bp, Homo sapien
aacacgtgttctgtcctcaacagca

SEQ ID NO: 2933934 - DNA, 25 bp, Homo sapien
tctcacacgatgagcacccaatgga

SEQ ID NO: 2933935 - DNA, 25 bp, Homo sapien
tctgactcacaaggactgttgcaca

SEQ ID NO: 2933936 - DNA, 25 bp, Homo sapien
gcagctaagctgcacatatgccact

SEQ ID NO: 2933937 - DNA, 25 bp, Homo sapien
tgataccacagcaaaggatttcaca

SEQ ID NO: 2933938 - DNA, 25 bp, Homo sapien
taccacagcaaaggatttcacaggt

SEQ ID NO: 2933939 - DNA, 25 bp, Homo sapien
ccacagcaaaggatttcacaggtaa

SEQ ID NO: 2933940 - DNA, 25 bp, Homo sapien
gataccacagcaaaggatttcacag

SEQ ID NO: 2933941 - DNA, 25 bp, Homo sapien
tctttggtcttgtcacggtgaaaca

SEQ ID NO: 2933942 - DNA, 25 bp, Homo sapien
ccaaacaacgtttctgtaggttctg

SEQ ID NO: 2933943 - DNA, 25 bp, Homo sapien
cagctttcaggatgtgtatctttgg

SEQ ID NO: 2933944 - DNA, 25 bp, Homo sapien
ggagttcaactaagctcttggcacc

SEQ ID NO: 2933945 - DNA, 25 bp, Homo sapien
tgtcttctactgagacagaggcggc

SEQ ID NO: 2933946 - DNA, 25 bp, Homo sapien
caaacagttatgtacagtaagacca

SEQ ID NO: 2933947 - DNA, 25 bp, Homo sapien
cagaggcggccatggaaacgtgttc

SEQ ID NO: 2933948 - DNA, 25 bp, Homo sapien
tagttgcataaaccacgagtggaag

SEQ ID NO: 2933949 - DNA, 25 bp, Homo sapien
caatggtcaatggttctactcaggt

SEQ ID NO: 2933950 - DNA, 25 bp, Homo sapien
cctacttcaaggaggcagactactg

SEQ ID NO: 2933951 - DNA, 25 bp, Homo sapien
gggccacctatactacgcactgggt

SEQ ID NO: 2933952 - DNA, 25 bp, Homo sapien
tcaggactctaatgaaaaggacacc

SEQ ID NO: 2933953 - DNA, 25 bp, Homo sapien
tagaagcctatgagcctagcaaact

SEQ ID NO: 2933954 - DNA, 25 bp, Homo sapien
taagtagccagacgtatctccagtt

SEQ ID NO: 2933955 - DNA, 25 bp, Homo sapien
cagttagtcctatcttgaaacagtc

SEQ ID NO: 2933956 - DNA, 25 bp, Homo sapien
cattctgcctaagaaagtagtgaga

SEQ ID NO: 2933957 - DNA, 25 bp, Homo sapien
ttgtcaaccagccactacaaatggg

SEQ ID NO: 2933958 - DNA, 25 bp, Homo sapien
ccttcagatgctgtcggtattgttc

SEQ ID NO: 2933959 - DNA, 25 bp, Homo sapien
cctcttgtgatcatttaaccggcag

SEQ ID NO: 2933960 - DNA, 25 bp, Homo sapien
taatttgctccagccgttgtcaacc

SEQ ID NO: 2933961 - DNA, 25 bp, Homo sapien
tttcattgaaagacagagctatttt

SEQ ID NO: 2933962 - DNA, 25 bp, Homo sapien
tcattgaaagacagagctattttat

SEQ ID NO: 2933963 - DNA, 25 bp, Homo sapien
cattgaaagacagagctattttatt

SEQ ID NO: 2933964 - DNA, 25 bp, Homo sapien
tgaaagacagagctattttatttat

SEQ ID NO: 2933965 - DNA, 25 bp, Homo sapien
gaactaatgaggatacctccaccgt

SEQ ID NO: 2933966 - DNA, 25 bp, Homo sapien
tttcgaaagagaaggcgcagtagtc

SEQ ID NO: 2933967 - DNA, 25 bp, Homo sapien
taaatcatatggcaggcctgcgcag

SEQ ID NO: 2933968 - DNA, 25 bp, Homo sapien
gcagccacgcaactaaagacacaag

SEQ ID NO: 2933969 - DNA, 25 bp, Homo sapien
cgccgccgacctgcttgggtccgat

SEQ ID NO: 2933970 - DNA, 25 bp, Homo sapien
cagagtcccggcctgcctccggccg

SEQ ID NO: 2933971 - DNA, 25 bp, Homo sapien
gcttgggtccgatccgcgcctagac

SEQ ID NO: 2933972 - DNA, 25 bp, Homo sapien
gcgatccgccgtatccagtcggagg

SEQ ID NO: 2933973 - DNA, 25 bp, Homo sapien
caccttcagtccctgctggaccagg

SEQ ID NO: 2933974 - DNA, 25 bp, Homo sapien
gtcgcgccaccgctccatgccgggc

SEQ ID NO: 2933975 - DNA, 25 bp, Homo sapien
gcccccgtcaccagcgccagccggt

SEQ ID NO: 2933976 - DNA, 25 bp, Homo sapien
acggccgcgccgatgccccccgagg

SEQ ID NO: 2933977 - DNA, 25 bp, Homo sapien
caaagtctaagggatgacagtgctc

SEQ ID NO: 2933978 - DNA, 25 bp, Homo sapien
gactttcagccacgaagatgttgga

SEQ ID NO: 2933979 - DNA, 25 bp, Homo sapien
gctgttatcaatggagaaacctcac

SEQ ID NO: 2933980 - DNA, 25 bp, Homo sapien
cagtgctccccgagtgatgaaggga

SEQ ID NO: 2933981 - DNA, 25 bp, Homo sapien
catttgataggtcacatctgtaggg

SEQ ID NO: 2933982 - DNA, 25 bp, Homo sapien
tcatttgataggtcacatctgtagg

SEQ ID NO: 2933983 - DNA, 25 bp, Homo sapien
ctgcactcttacattcagcagccag

SEQ ID NO: 2933984 - DNA, 25 bp, Homo sapien
aaagtcccggggtagcctgcactct

SEQ ID NO: 2933985 - DNA, 25 bp, Homo sapien
agagcagggtgtcaggccgggccaa

SEQ ID NO: 2933986 - DNA, 25 bp, Homo sapien
gctgagaacggatagctgagaacat

SEQ ID NO: 2933987 - DNA, 25 bp, Homo sapien
tccaaccactggtgctgcctgagag

SEQ ID NO: 2933988 - DNA, 25 bp, Homo sapien
tgtctacaccgctgtgctgagaacg

SEQ ID NO: 2933989 - DNA, 25 bp, Homo sapien
gaagatggaggcttggagctcttac

SEQ ID NO: 2933990 - DNA, 25 bp, Homo sapien
tggaagatggaggcttggagctctt

SEQ ID NO: 2933991 - DNA, 25 bp, Homo sapien
ggaagatggaggcttggagctctta

SEQ ID NO: 2933992 - DNA, 25 bp, Homo sapien
ctggaagatggaggcttggagctct

SEQ ID NO: 2933993 - DNA, 25 bp, Homo sapien
cagtggctgtgtgcttcctcacaca

SEQ ID NO: 2933994 - DNA, 25 bp, Homo sapien
tagagcaactatgcaggatttgagc

SEQ ID NO: 2933995 - DNA, 25 bp, Homo sapien
tcctaacctccctcactcctttatg

SEQ ID NO: 2933996 - DNA, 25 bp, Homo sapien
gagcagtggctgtgtgcttcctcac

SEQ ID NO: 2933997 - DNA, 25 bp, Homo sapien
aatctcccaggtctagggtatcagg

SEQ ID NO: 2933998 - DNA, 25 bp, Homo sapien
cacctttggtgtgaacctgtcttgg

SEQ ID NO: 2933999 - DNA, 25 bp, Homo sapien
ggaccatggctctgatctccaagaa

SEQ ID NO: 2934000 - DNA, 25 bp, Homo sapien
caggtttagagacccatgtgctgtg

SEQ ID NO: 2934001 - DNA, 25 bp, Homo sapien
cggaggacaagcagagataaagctt

SEQ ID NO: 2934002 - DNA, 25 bp, Homo sapien
taaagctttcagcaggtcctcaggc

SEQ ID NO: 2934003 - DNA, 25 bp, Homo sapien
ccggaggacaagcagagataaagct

SEQ ID NO: 2934004 - DNA, 25 bp, Homo sapien
cagagataaagctttcagcaggtcc

SEQ ID NO: 2934005 - DNA, 25 bp, Homo sapien
ctccggcccaactgagcaagtgatg

SEQ ID NO: 2934006 - DNA, 25 bp, Homo sapien
tccactccggcccaactgagcaagt

SEQ ID NO: 2934007 - DNA, 25 bp, Homo sapien
cactccggcccaactgagcaagtga

SEQ ID NO: 2934008 - DNA, 25 bp, Homo sapien
actccggcccaactgagcaagtgat

SEQ ID NO: 2934009 - DNA, 25 bp, Homo sapien
tggactggtaggcttcccgtgtgca

SEQ ID NO: 2934010 - DNA, 25 bp, Homo sapien
tccgctccttcatggactggtaggc

SEQ ID NO: 2934011 - DNA, 25 bp, Homo sapien
tgttaatgatgtgcccatcgtccac

SEQ ID NO: 2934012 - DNA, 25 bp, Homo sapien
tgatgttaatgatgtgcccatcgtc

SEQ ID NO: 2934013 - DNA, 25 bp, Homo sapien
ctcagtccctctgtcagcgcagtga

SEQ ID NO: 2934014 - DNA, 25 bp, Homo sapien
acaggggtaacactcggtggccaga

SEQ ID NO: 2934015 - DNA, 25 bp, Homo sapien
gacggcatacttggtggcactatag

SEQ ID NO: 2934016 - DNA, 25 bp, Homo sapien
ggtggcactatagaagtgggtcaca

SEQ ID NO: 2934017 - DNA, 25 bp, Homo sapien
tcatgcggccttcaagagaagagcc

SEQ ID NO: 2934018 - DNA, 25 bp, Homo sapien
tttcacaagtgagaaggccgaggct

SEQ ID NO: 2934019 - DNA, 25 bp, Homo sapien
ctaagtctggtcgttggctcctgga

SEQ ID NO: 2934020 - DNA, 25 bp, Homo sapien
tctgaacatgggcttcctgaacggt

SEQ ID NO: 2934021 - DNA, 25 bp, Homo sapien
tgggccaacagagagggccttctca

SEQ ID NO: 2934022 - DNA, 25 bp, Homo sapien
accccagcttcacagtgatggctgc

SEQ ID NO: 2934023 - DNA, 25 bp, Homo sapien
gctgcctgatatccggcagcggcct

SEQ ID NO: 2934024 - DNA, 25 bp, Homo sapien
gggctgagctttgccaggtcttggg

SEQ ID NO: 2934025 - DNA, 25 bp, Homo sapien
tcatttgctcataggtggcagctgc

SEQ ID NO: 2934026 - DNA, 25 bp, Homo sapien
tccttgtcgtggagtttgaaggcga

SEQ ID NO: 2934027 - DNA, 25 bp, Homo sapien
gaaggcgaattgtgtctccaccaca

SEQ ID NO: 2934028 - DNA, 25 bp, Homo sapien
ttcatttgctcataggtggcagctg

SEQ ID NO: 2934029 - DNA, 25 bp, Homo sapien
gtggagtctgaaggccgagcttccc

SEQ ID NO: 2934030 - DNA, 25 bp, Homo sapien
agtctgaaggccgagcttccctctg

SEQ ID NO: 2934031 - DNA, 25 bp, Homo sapien
caaggacagaatggactcaaattcc

SEQ ID NO: 2934032 - DNA, 25 bp, Homo sapien
gaatgggttgagacaaggacagaat

SEQ ID NO: 2934033 - DNA, 25 bp, Homo sapien
acgtagataacagcctcggccacat

SEQ ID NO: 2934034 - DNA, 25 bp, Homo sapien
aggacgtagataacagcctcggcca

SEQ ID NO: 2934035 - DNA, 25 bp, Homo sapien
tgaggacgtagataacagcctcggc

SEQ ID NO: 2934036 - DNA, 25 bp, Homo sapien
ggtgctgaggacgtagataacagcc

SEQ ID NO: 2934037 - DNA, 25 bp, Homo sapien
ctgctccgtgggcctcatctggatg

SEQ ID NO: 2934038 - DNA, 25 bp, Homo sapien
ccgtgggcctcatctggatgtctcc

SEQ ID NO: 2934039 - DNA, 25 bp, Homo sapien
tgctccgtgggcctcatctggatgt

SEQ ID NO: 2934040 - DNA, 25 bp, Homo sapien
tgggcctcatctggatgtctccaat

SEQ ID NO: 2934041 - DNA, 25 bp, Homo sapien
cctgagccacagacgttgaggtgca

SEQ ID NO: 2934042 - DNA, 25 bp, Homo sapien
caggaagtggtatcccgtgatccag

SEQ ID NO: 2934043 - DNA, 25 bp, Homo sapien
gattttggccacaactcctttccca

SEQ ID NO: 2934044 - DNA, 25 bp, Homo sapien
tggataacaacacagatataaggtg

SEQ ID NO: 2934045 - DNA, 25 bp, Homo sapien
gcgatttttcttttttaatgatcac

SEQ ID NO: 2934046 - DNA, 25 bp, Homo sapien
gatttttcttttttaatgatcacca

SEQ ID NO: 2934047 - DNA, 25 bp, Homo sapien
gccccgattacccacaactggacta

SEQ ID NO: 2934048 - DNA, 25 bp, Homo sapien
acaactggactaccgagctacgacc

SEQ ID NO: 2934049 - DNA, 25 bp, Homo sapien
ctcggacaggaacaaacagccccga

SEQ ID NO: 2934050 - DNA, 25 bp, Homo sapien
ggacaggaacaaacagccccgatta

SEQ ID NO: 2934051 - DNA, 25 bp, Homo sapien
gagcggtaacccgcgccgcagttcg

SEQ ID NO: 2934052 - DNA, 25 bp, Homo sapien
caggctcccaacaccgaggtgaagg

SEQ ID NO: 2934053 - DNA, 25 bp, Homo sapien
cagggactcgatgccccttgctgcg

SEQ ID NO: 2934054 - DNA, 25 bp, Homo sapien
ttgctgcgtccccgggagcggtaac

SEQ ID NO: 2934055 - DNA, 25 bp, Homo sapien
acctggtagcggcacattgtgtcca

SEQ ID NO: 2934056 - DNA, 25 bp, Homo sapien
ggccgcagaactggaatgtcccgcg

SEQ ID NO: 2934057 - DNA, 25 bp, Homo sapien
ggtcatccagcagcaagcggcttag

SEQ ID NO: 2934058 - DNA, 25 bp, Homo sapien
cagacaccctggtggacctggtagc

SEQ ID NO: 2934059 - DNA, 25 bp, Homo sapien
cttatccactccgaggaagtgtgcg

SEQ ID NO: 2934060 - DNA, 25 bp, Homo sapien
gaagtgtgcggaacgcagcacagcc

SEQ ID NO: 2934061 - DNA, 25 bp, Homo sapien
gggatcctggatcccatcgaggacg

SEQ ID NO: 2934062 - DNA, 25 bp, Homo sapien
catcgaggacgagccacaactgctg

SEQ ID NO: 2934063 - DNA, 25 bp, Homo sapien
atagcccccgcgctggacttgctga

SEQ ID NO: 2934064 - DNA, 25 bp, Homo sapien
acctccatagcccccgcgctggact

SEQ ID NO: 2934065 - DNA, 25 bp, Homo sapien
catagcccccgcgctggacttgctg

SEQ ID NO: 2934066 - DNA, 25 bp, Homo sapien
ctccatagcccccgcgctggacttg

SEQ ID NO: 2934067 - DNA, 25 bp, Homo sapien
tgtaaaaatccggtgaggtcatcag

SEQ ID NO: 2934068 - DNA, 25 bp, Homo sapien
ctgtaaaaatccggtgaggtcatca

SEQ ID NO: 2934069 - DNA, 25 bp, Homo sapien
gtaaaaatccggtgaggtcatcagt

SEQ ID NO: 2934070 - DNA, 25 bp, Homo sapien
taaaaatccggtgaggtcatcagtg

SEQ ID NO: 2934071 - DNA, 25 bp, Homo sapien
gttcccagaggaactccaagcaact

SEQ ID NO: 2934072 - DNA, 25 bp, Homo sapien
cagcacaaggagagtaggccgttcc

SEQ ID NO: 2934073 - DNA, 25 bp, Homo sapien
tctgtgcttgggcagcccaccgtgc

SEQ ID NO: 2934074 - DNA, 25 bp, Homo sapien
ctcatgatggggatctcggaggact

SEQ ID NO: 2934075 - DNA, 25 bp, Homo sapien
agccacagagacgttcaaggactca

SEQ ID NO: 2934076 - DNA, 25 bp, Homo sapien
ggactcaagtccaggaggcagctgg

SEQ ID NO: 2934077 - DNA, 25 bp, Homo sapien
acctcctgggatagacctgagccct

SEQ ID NO: 2934078 - DNA, 25 bp, Homo sapien
ctcctgggatagacctgagccctca

SEQ ID NO: 2934079 - DNA, 25 bp, Homo sapien
tcctctggctgcaaatggagtgaag

SEQ ID NO: 2934080 - DNA, 25 bp, Homo sapien
cctctggctgcaaatggagtgaaga

SEQ ID NO: 2934081 - DNA, 25 bp, Homo sapien
cttcctctggctgcaaatggagtga

SEQ ID NO: 2934082 - DNA, 25 bp, Homo sapien
ctctggctgcaaatggagtgaagaa

SEQ ID NO: 2934083 - DNA, 25 bp, Homo sapien
ggaacagattccctccatgctaggc

SEQ ID NO: 2934084 - DNA, 25 bp, Homo sapien
caatgactggttcaagaggaacggg

SEQ ID NO: 2934085 - DNA, 25 bp, Homo sapien
tacaggtccaacatcacaacaggaa

SEQ ID NO: 2934086 - DNA, 25 bp, Homo sapien
aagatgaggcctgcgctcaaggccc

SEQ ID NO: 2934087 - DNA, 25 bp, Homo sapien
tctcccaacaatccaggaaggtagg

SEQ ID NO: 2934088 - DNA, 25 bp, Homo sapien
gaatttgagtccacctgccctagtg

SEQ ID NO: 2934089 - DNA, 25 bp, Homo sapien
ccaatggtggcgctttcgaaagccg

SEQ ID NO: 2934090 - DNA, 25 bp, Homo sapien
tagcagtcaggattgcaagttcggg

SEQ ID NO: 2934091 - DNA, 25 bp, Homo sapien
gggtggcgggtgtgctgtctaattc

SEQ ID NO: 2934092 - DNA, 25 bp, Homo sapien
tgcaggagtcggtggtggtagtggt

SEQ ID NO: 2934093 - DNA, 25 bp, Homo sapien
gcgggtgtgctgtctaattcaggac

SEQ ID NO: 2934094 - DNA, 25 bp, Homo sapien
tgtgctgtctaattcaggaccccaa

SEQ ID NO: 2934095 - DNA, 25 bp, Homo sapien
ctggcaggcgatggaggcacatctt

SEQ ID NO: 2934096 - DNA, 25 bp, Homo sapien
gatggaggcacatcttagtctctct

SEQ ID NO: 2934097 - DNA, 25 bp, Homo sapien
gaggcacatcttagtctctcttcct

SEQ ID NO: 2934098 - DNA, 25 bp, Homo sapien
aggcgatggaggcacatcttagtct

SEQ ID NO: 2934099 - DNA, 25 bp, Homo sapien
aatttggaagaaaatcgatggcctt

SEQ ID NO: 2934100 - DNA, 25 bp, Homo sapien
gaagaaaatcgatggcctttaatga

SEQ ID NO: 2934101 - DNA, 25 bp, Homo sapien
tttggaagaaaatcgatggccttta

SEQ ID NO: 2934102 - DNA, 25 bp, Homo sapien
tggaagaaaatcgatggcctttaat

SEQ ID NO: 2934103 - DNA, 25 bp, Homo sapien
tcttgccacattgaagggccaaggg

SEQ ID NO: 2934104 - DNA, 25 bp, Homo sapien
tccatgccacctgccaaccctgaca

SEQ ID NO: 2934105 - DNA, 25 bp, Homo sapien
tgccaaccctgacacccctgtttcc

SEQ ID NO: 2934106 - DNA, 25 bp, Homo sapien
ctgtttccccggcgtagctgcaggg

SEQ ID NO: 2934107 - DNA, 25 bp, Homo sapien
gcagcgcaaggtgttcacatcatcc

SEQ ID NO: 2934108 - DNA, 25 bp, Homo sapien
gggcagcgcaaggtgttcacatcat

SEQ ID NO: 2934109 - DNA, 25 bp, Homo sapien
gcgcaaggtgttcacatcatcccta

SEQ ID NO: 2934110 - DNA, 25 bp, Homo sapien
caggggcagcgcaaggtgttcacat

SEQ ID NO: 2934111 - DNA, 25 bp, Homo sapien
ctcccccgtcagctggtcataccag

SEQ ID NO: 2934112 - DNA, 25 bp, Homo sapien
tcagctggtcataccaggtaggccc

SEQ ID NO: 2934113 - DNA, 25 bp, Homo sapien
tcccccgtcagctggtcataccagg

SEQ ID NO: 2934114 - DNA, 25 bp, Homo sapien
ctctcccccgtcagctggtcatacc

SEQ ID NO: 2934115 - DNA, 25 bp, Homo sapien
gggtgatgagatttgagctgggcct

SEQ ID NO: 2934116 - DNA, 25 bp, Homo sapien
gctgtgcaaccagagggaattcagg

SEQ ID NO: 2934117 - DNA, 25 bp, Homo sapien
aactaggagcatcaggggaggcttt

SEQ ID NO: 2934118 - DNA, 25 bp, Homo sapien
ctgacacagacgcaaggaacagctg

SEQ ID NO: 2934119 - DNA, 25 bp, Homo sapien
ctcacccggcagtcagaaaggcctg

SEQ ID NO: 2934120 - DNA, 25 bp, Homo sapien
tctaagccttagtctgtccagagca

SEQ ID NO: 2934121 - DNA, 25 bp, Homo sapien
gccatgatcaaggtgtgcttcccca

SEQ ID NO: 2934122 - DNA, 25 bp, Homo sapien
ggccacgtcaccctcagcaaatttg

SEQ ID NO: 2934123 - DNA, 25 bp, Homo sapien
gacctgcaggtgtttgcattccccg

SEQ ID NO: 2934124 - DNA, 25 bp, Homo sapien
catcctaagtgaggtcaacggcggc

SEQ ID NO: 2934125 - DNA, 25 bp, Homo sapien
tctctgcgggcatcatctcattctg

SEQ ID NO: 2934126 - DNA, 25 bp, Homo sapien
aatgtcccagcccaggttcgcaggg

SEQ ID NO: 2934127 - DNA, 25 bp, Homo sapien
cccggagagtcacctggaattcatc

SEQ ID NO: 2934128 - DNA, 25 bp, Homo sapien
acagcggaatcagccagggaaacag

SEQ ID NO: 2934129 - DNA, 25 bp, Homo sapien
tccttcagagaccatgagagagaca

SEQ ID NO: 2934130 - DNA, 25 bp, Homo sapien
gaaacaggcctaaattatctcctcc

SEQ ID NO: 2934131 - DNA, 25 bp, Homo sapien
ccccgaaaatgaccgtgtgagtcga

SEQ ID NO: 2934132 - DNA, 25 bp, Homo sapien
cagcaggtcgcagatgtgaaagcca

SEQ ID NO: 2934133 - DNA, 25 bp, Homo sapien
gtggccattaaaacgacaagacagg

SEQ ID NO: 2934134 - DNA, 25 bp, Homo sapien
ccaacgatgagggagtgaccaaaca

SEQ ID NO: 2934135 - DNA, 25 bp, Homo sapien
taagaatgccgacaaagtgacagct

SEQ ID NO: 2934136 - DNA, 25 bp, Homo sapien
cagacccagcttggcctatcagaga

SEQ ID NO: 2934137 - DNA, 25 bp, Homo sapien
caggtgtcctgaacgtctgtagcca

SEQ ID NO: 2934138 - DNA, 25 bp, Homo sapien
ttagtaggaggcagtcagagtcttc

SEQ ID NO: 2934139 - DNA, 25 bp, Homo sapien
actgacccctgggatcttattggga

SEQ ID NO: 2934140 - DNA, 25 bp, Homo sapien
agaagccagacccaaaagatcatcc

SEQ ID NO: 2934141 - DNA, 25 bp, Homo sapien
tggccagggaaccacacttggagaa

SEQ ID NO: 2934142 - DNA, 25 bp, Homo sapien
tctagaaccgggttgtggcaacagt

SEQ ID NO: 2934143 - DNA, 25 bp, Homo sapien
ctgcctgcctggaatgagagcacca

SEQ ID NO: 2934144 - DNA, 25 bp, Homo sapien
ctgcctggaatgagagcaccagcca

SEQ ID NO: 2934145 - DNA, 25 bp, Homo sapien
cctggaatgagagcaccagccaggg

SEQ ID NO: 2934146 - DNA, 25 bp, Homo sapien
gcctgcctggaatgagagcaccagc

SEQ ID NO: 2934147 - DNA, 25 bp, Homo sapien
gctggcttctcacccgacggagaga

SEQ ID NO: 2934148 - DNA, 25 bp, Homo sapien
cgagggcgccgatggaggcacaggg

SEQ ID NO: 2934149 - DNA, 25 bp, Homo sapien
catcttcgggcaccgggtctgggct

SEQ ID NO: 2934150 - DNA, 25 bp, Homo sapien
gaagcggcactctcatcttcgggca

SEQ ID NO: 2934151 - DNA, 25 bp, Homo sapien
agagacgtcctcacatgctggcagg

SEQ ID NO: 2934152 - DNA, 25 bp, Homo sapien
tacagcatgcgtacaaggaggaagt

SEQ ID NO: 2934153 - DNA, 25 bp, Homo sapien
aaaacaatgtgggtgatgtatgccc

SEQ ID NO: 2934154 - DNA, 25 bp, Homo sapien
gaaacccaggtatccgtgtctgtgg

SEQ ID NO: 2934155 - DNA, 25 bp, Homo sapien
ctttatggttccagtttggctggga

SEQ ID NO: 2934156 - DNA, 25 bp, Homo sapien
tatggttccagtttggctgggatga

SEQ ID NO: 2934157 - DNA, 25 bp, Homo sapien
tgggatgagccatctttgccattgc

SEQ ID NO: 2934158 - DNA, 25 bp, Homo sapien
catctttgccattgcctatggagat

SEQ ID NO: 2934159 - DNA, 25 bp, Homo sapien
ggcatgtcactgttgcagctaagtc

SEQ ID NO: 2934160 - DNA, 25 bp, Homo sapien
tgccggtgtatgtctatcactgtac

SEQ ID NO: 2934161 - DNA, 25 bp, Homo sapien
gttttggtgagcgacacgtttgtca

SEQ ID NO: 2934162 - DNA, 25 bp, Homo sapien
gaatgtgtccctgcgcctgtatcag

SEQ ID NO: 2934163 - DNA, 25 bp, Homo sapien
gatttcggtggatccataccccgag

SEQ ID NO: 2934164 - DNA, 25 bp, Homo sapien
tcggagatttcggtggatccatacc

SEQ ID NO: 2934165 - DNA, 25 bp, Homo sapien
ggtggatccataccccgagcagtgt

SEQ ID NO: 2934166 - DNA, 25 bp, Homo sapien
tgatttcggagatttcggtggatcc

SEQ ID NO: 2934167 - DNA, 25 bp, Homo sapien
gcgagtcgagctcctggtataccct

SEQ ID NO: 2934168 - DNA, 25 bp, Homo sapien
tgttcggaggttccagcaggcgagt

SEQ ID NO: 2934169 - DNA, 25 bp, Homo sapien
cagcaggcgagtcgagctcctggta

SEQ ID NO: 2934170 - DNA, 25 bp, Homo sapien
gttccagcaggcgagtcgagctcct

SEQ ID NO: 2934171 - DNA, 25 bp, Homo sapien
gctctgagaaagctaaatgggaaag

SEQ ID NO: 2934172 - DNA, 25 bp, Homo sapien
ctcagcacgctgtgtaatttttata

SEQ ID NO: 2934173 - DNA, 25 bp, Homo sapien
cgattttgatgtacagtttgaagca

SEQ ID NO: 2934174 - DNA, 25 bp, Homo sapien
tgccccagccctcttcgattttgat

SEQ ID NO: 2934175 - DNA, 25 bp, Homo sapien
gtataataatactcagcacgctgtg

SEQ ID NO: 2934176 - DNA, 25 bp, Homo sapien
cagcaaatggaataggaacaggagg

SEQ ID NO: 2934177 - DNA, 25 bp, Homo sapien
cgataagactcctttcagcaaatgg

SEQ ID NO: 2934178 - DNA, 25 bp, Homo sapien
ttcagcaaatggaataggaacagga

SEQ ID NO: 2934179 - DNA, 25 bp, Homo sapien
tggacttggcgataagactcctttc

SEQ ID NO: 2934180 - DNA, 25 bp, Homo sapien
gaaccagggtgagtgtttccaggcc

SEQ ID NO: 2934181 - DNA, 25 bp, Homo sapien
aaacagagacgcttcgagccagagg

SEQ ID NO: 2934182 - DNA, 25 bp, Homo sapien
gagggccgaagctttgcccactgaa

SEQ ID NO: 2934183 - DNA, 25 bp, Homo sapien
tgtcgagtggaagtacaagaccccg

SEQ ID NO: 2934184 - DNA, 25 bp, Homo sapien
tgtgtgaaggatcccatctgccgct

SEQ ID NO: 2934185 - DNA, 25 bp, Homo sapien
cacagccattcgtggattatacggc

SEQ ID NO: 2934186 - DNA, 25 bp, Homo sapien
tatgacgtggccctgcccttgatca

SEQ ID NO: 2934187 - DNA, 25 bp, Homo sapien
tgggaacaaccgcaaatatgacgtg

SEQ ID NO: 2934188 - DNA, 25 bp, Homo sapien
tgacacaggtgcaaacaggctctct

SEQ ID NO: 2934189 - DNA, 25 bp, Homo sapien
ctgtggtcacacaattaggtctgta

SEQ ID NO: 2934190 - DNA, 25 bp, Homo sapien
ggtttcctgagctcgccttgacaca

SEQ ID NO: 2934191 - DNA, 25 bp, Homo sapien
gggcttattatcaccacctatgaat

SEQ ID NO: 2934192 - DNA, 25 bp, Homo sapien
ggcacaaatggcaggagacacaatt

SEQ ID NO: 2934193 - DNA, 25 bp, Homo sapien
aacgccccggttctgtaaatgacat

SEQ ID NO: 2934194 - DNA, 25 bp, Homo sapien
taaatgacattctgtactgttagca

SEQ ID NO: 2934195 - DNA, 25 bp, Homo sapien
tagaagacatggctcagggtggaac

SEQ ID NO: 2934196 - DNA, 25 bp, Homo sapien
tgaaatccacagggcttggtgcttg

SEQ ID NO: 2934197 - DNA, 25 bp, Homo sapien
ttctgaaatccacagggcttggtgc

SEQ ID NO: 2934198 - DNA, 25 bp, Homo sapien
cttctgaaatccacagggcttggtg

SEQ ID NO: 2934199 - DNA, 25 bp, Homo sapien
aatccacagggcttggtgcttgttc

SEQ ID NO: 2934200 - DNA, 25 bp, Homo sapien
ctgctgtggaccatgggcctgatgt

SEQ ID NO: 2934201 - DNA, 25 bp, Homo sapien
tgctttctcggagccttagtctcct

SEQ ID NO: 2934202 - DNA, 25 bp, Homo sapien
tctgctgtggaccatgggcctgatg

SEQ ID NO: 2934203 - DNA, 25 bp, Homo sapien
gccaggtgctttctcggagccttag

SEQ ID NO: 2934204 - DNA, 25 bp, Homo sapien
ggttggctgtacggtctggaacaca

SEQ ID NO: 2934205 - DNA, 25 bp, Homo sapien
ggaacacaggtgtggctgcgtaacc

SEQ ID NO: 2934206 - DNA, 25 bp, Homo sapien
tggctgcgtaaccacatgtgtttcc

SEQ ID NO: 2934207 - DNA, 25 bp, Homo sapien
tcgggaccatcaagacagccatttt

SEQ ID NO: 2934208 - DNA, 25 bp, Homo sapien
gctggtggttttcacataaacttgc

SEQ ID NO: 2934209 - DNA, 25 bp, Homo sapien
tagaatccacctcaggagagctggt

SEQ ID NO: 2934210 - DNA, 25 bp, Homo sapien
ccaggtagaatccacctcaggagag

SEQ ID NO: 2934211 - DNA, 25 bp, Homo sapien
ttcacataaacttgcccctgctcgg

SEQ ID NO: 2934212 - DNA, 25 bp, Homo sapien
gctggatgacgatgagccggaggag

SEQ ID NO: 2934213 - DNA, 25 bp, Homo sapien
agctggatgacgatgagccggagga

SEQ ID NO: 2934214 - DNA, 25 bp, Homo sapien
ctggatgacgatgagccggaggagc

SEQ ID NO: 2934215 - DNA, 25 bp, Homo sapien
ctggccacgggcagattaatatttg

SEQ ID NO: 2934216 - DNA, 25 bp, Homo sapien
gagaaacgcatgctgttcatgttta

SEQ ID NO: 2934217 - DNA, 25 bp, Homo sapien
ggaagagaaacgcatgctgttcatg

SEQ ID NO: 2934218 - DNA, 25 bp, Homo sapien
cagattaatatttgatgcaaggaag

SEQ ID NO: 2934219 - DNA, 25 bp, Homo sapien
cccgaatctgaaaaactatgtgatg

SEQ ID NO: 2934220 - DNA, 25 bp, Homo sapien
actatgtgatggaggatttacagta

SEQ ID NO: 2934221 - DNA, 25 bp, Homo sapien
cagtggcaggtgtaattaggagaaa

SEQ ID NO: 2934222 - DNA, 25 bp, Homo sapien
acaggaagagaacctaatcccgaat

SEQ ID NO: 2934223 - DNA, 25 bp, Homo sapien
gtgaagctccatgggatcacaaagg

SEQ ID NO: 2934224 - DNA, 25 bp, Homo sapien
gtagatgtgaagctccatgggatca

SEQ ID NO: 2934225 - DNA, 25 bp, Homo sapien
gatgtgaagctccatgggatcacaa

SEQ ID NO: 2934226 - DNA, 25 bp, Homo sapien
tagatgtgaagctccatgggatcac

SEQ ID NO: 2934227 - DNA, 25 bp, Homo sapien
gagatttagaaacagcaggacgctc

SEQ ID NO: 2934228 - DNA, 25 bp, Homo sapien
gacttggtcatgagatttagaaaca

SEQ ID NO: 2934229 - DNA, 25 bp, Homo sapien
gagcaggcagttgacttggtcatga

SEQ ID NO: 2934230 - DNA, 25 bp, Homo sapien
agatttagaaacagcaggacgctcc

SEQ ID NO: 2934231 - DNA, 25 bp, Homo sapien
cctggatttaaagtcacagtgacga

SEQ ID NO: 2934232 - DNA, 25 bp, Homo sapien
atcacccaatgacatggagggcagg

SEQ ID NO: 2934233 - DNA, 25 bp, Homo sapien
tcacagtgacgattaatcacccaat

SEQ ID NO: 2934234 - DNA, 25 bp, Homo sapien
tccgcccctggatttaaagtcacag

SEQ ID NO: 2934235 - DNA, 25 bp, Homo sapien
tgatggatgtatttgtggtctggct

SEQ ID NO: 2934236 - DNA, 25 bp, Homo sapien
ttgatggatgtatttgtggtctggc

SEQ ID NO: 2934237 - DNA, 25 bp, Homo sapien
gagccactaaagacaacagagccgg

SEQ ID NO: 2934238 - DNA, 25 bp, Homo sapien
tgtagcagccgccacactgttgctg

SEQ ID NO: 2934239 - DNA, 25 bp, Homo sapien
gaatgtccgtgcacctctgtcatag

SEQ ID NO: 2934240 - DNA, 25 bp, Homo sapien
aggaaagtaagcaccttgcccaggg

SEQ ID NO: 2934241 - DNA, 25 bp, Homo sapien
gcattgaaagatcccggagattcct

SEQ ID NO: 2934242 - DNA, 25 bp, Homo sapien
ctgcattgaaagatcccggagattc

SEQ ID NO: 2934243 - DNA, 25 bp, Homo sapien
gcctgctttaagtcccagacacgtt

SEQ ID NO: 2934244 - DNA, 25 bp, Homo sapien
tctgagcctgctttaagtcccagac

SEQ ID NO: 2934245 - DNA, 25 bp, Homo sapien
ctaacagctcccatgcaaggcccac

SEQ ID NO: 2934246 - DNA, 25 bp, Homo sapien
gggaactggagggtataggctattg

SEQ ID NO: 2934247 - DNA, 25 bp, Homo sapien
gctcccatgcaaggcccacactgta

SEQ ID NO: 2934248 - DNA, 25 bp, Homo sapien
gtataggctattggagacagcagtc

SEQ ID NO: 2934249 - DNA, 25 bp, Homo sapien
tctataacatttacaatcccaaaac

SEQ ID NO: 2934250 - DNA, 25 bp, Homo sapien
caaaagaccccgagagccgaggaca

SEQ ID NO: 2934251 - DNA, 25 bp, Homo sapien
cccgagagccgaggacagaattcat

SEQ ID NO: 2934252 - DNA, 25 bp, Homo sapien
cttccatcatgggagatctataaca

SEQ ID NO: 2934253 - DNA, 25 bp, Homo sapien
ctgggtgataaaatgaccgaggttg

SEQ ID NO: 2934254 - DNA, 25 bp, Homo sapien
caggtaggcatcaaggttactccct

SEQ ID NO: 2934255 - DNA, 25 bp, Homo sapien
acaggactgggtgataaaatgaccg

SEQ ID NO: 2934256 - DNA, 25 bp, Homo sapien
caaggttactccctagatcagggtc

SEQ ID NO: 2934257 - DNA, 25 bp, Homo sapien
tccagtttattccattaaagtccat

SEQ ID NO: 2934258 - DNA, 25 bp, Homo sapien
gggaggatgtgtttccagtttattc

SEQ ID NO: 2934259 - DNA, 25 bp, Homo sapien
ttccagtttattccattaaagtcca

SEQ ID NO: 2934260 - DNA, 25 bp, Homo sapien
aggatgtgtttccagtttattccat

SEQ ID NO: 2934261 - DNA, 25 bp, Homo sapien
ccagagccgtatgaagatgtcacca

SEQ ID NO: 2934262 - DNA, 25 bp, Homo sapien
gagatcaggaaactcgatggtccca

SEQ ID NO: 2934263 - DNA, 25 bp, Homo sapien
gatgtcaccatgagaggccggaatg

SEQ ID NO: 2934264 - DNA, 25 bp, Homo sapien
ccctgagactgggttggaagagacc

SEQ ID NO: 2934265 - DNA, 25 bp, Homo sapien
agtagcatctttcctgagcccttgc

SEQ ID NO: 2934266 - DNA, 25 bp, Homo sapien
tgagcccttgccctggaaacctggg

SEQ ID NO: 2934267 - DNA, 25 bp, Homo sapien
ctctgttgctccagtagcatctttc

SEQ ID NO: 2934268 - DNA, 25 bp, Homo sapien
cctgagcccttgccctggaaacctg

SEQ ID NO: 2934269 - DNA, 25 bp, Homo sapien
gaatgggatcctctaactgcagcac

SEQ ID NO: 2934270 - DNA, 25 bp, Homo sapien
caagggaacttggaaatggtcaaca

SEQ ID NO: 2934271 - DNA, 25 bp, Homo sapien
gaggcctcaggatcacaagggcaga

SEQ ID NO: 2934272 - DNA, 25 bp, Homo sapien
ggtctgttgatcagtggaggcacca

SEQ ID NO: 2934273 - DNA, 25 bp, Homo sapien
gcttctctgaagataagtgacacca

SEQ ID NO: 2934274 - DNA, 25 bp, Homo sapien
tacagaggcagtttgcgaggcagtt

SEQ ID NO: 2934275 - DNA, 25 bp, Homo sapien
aatggtctggttgagcactgatagg

SEQ ID NO: 2934276 - DNA, 25 bp, Homo sapien
ctggatgaagttaggtacagaggca

SEQ ID NO: 2934277 - DNA, 25 bp, Homo sapien
tgatcagaacgattctgttcacttc

SEQ ID NO: 2934278 - DNA, 25 bp, Homo sapien
tcctgcctagattgagggctctgaa

SEQ ID NO: 2934279 - DNA, 25 bp, Homo sapien
agcccttgatcagaacgattctgtt

SEQ ID NO: 2934280 - DNA, 25 bp, Homo sapien
gtctcctgcctagattgagggctct

SEQ ID NO: 2934281 - DNA, 25 bp, Homo sapien
gataggaaccgcgaatgatgtcaag

SEQ ID NO: 2934282 - DNA, 25 bp, Homo sapien
cggacggagctgatcgataggaacc

SEQ ID NO: 2934283 - DNA, 25 bp, Homo sapien
ttatgaatgacaaaaacgctcctcg

SEQ ID NO: 2934284 - DNA, 25 bp, Homo sapien
tctatttgtcctctggtgccgcgga

SEQ ID NO: 2934285 - DNA, 25 bp, Homo sapien
ttcacagctccactactgcctttat

SEQ ID NO: 2934286 - DNA, 25 bp, Homo sapien
tttacagccacaggtcttagttctg

SEQ ID NO: 2934287 - DNA, 25 bp, Homo sapien
tcaaagactccaatcttcacagctc

SEQ ID NO: 2934288 - DNA, 25 bp, Homo sapien
tttatcctacatgcatcattgaagt

SEQ ID NO: 2934289 - DNA, 25 bp, Homo sapien
ggtgcttcaagccaaagctgggcca

SEQ ID NO: 2934290 - DNA, 25 bp, Homo sapien
tcaccgaggtgcttcaagccaaagc

SEQ ID NO: 2934291 - DNA, 25 bp, Homo sapien
tgtaaattgccagagggtaagcacc

SEQ ID NO: 2934292 - DNA, 25 bp, Homo sapien
tgggtctcccatacgctgctggcag

SEQ ID NO: 2934293 - DNA, 25 bp, Homo sapien
ccagtctaggctttcaatggttcct

SEQ ID NO: 2934294 - DNA, 25 bp, Homo sapien
cagtctaggctttcaatggttcctt

SEQ ID NO: 2934295 - DNA, 25 bp, Homo sapien
gccagtctaggctttcaatggttcc

SEQ ID NO: 2934296 - DNA, 25 bp, Homo sapien
cgccagtctaggctttcaatggttc

SEQ ID NO: 2934297 - DNA, 25 bp, Homo sapien
gcctacttccagagcaccttgtcga

SEQ ID NO: 2934298 - DNA, 25 bp, Homo sapien
gcaccttgtcgaaagtcgctgtaag

SEQ ID NO: 2934299 - DNA, 25 bp, Homo sapien
aagtcgctgtaagggttgtggccaa

SEQ ID NO: 2934300 - DNA, 25 bp, Homo sapien
ttgtggccaactttgcgatttatgc

SEQ ID NO: 2934301 - DNA, 25 bp, Homo sapien
ccccaggggtcagccgcgccagcat

SEQ ID NO: 2934302 - DNA, 25 bp, Homo sapien
caccccaggggtcagccgcgccagc

SEQ ID NO: 2934303 - DNA, 25 bp, Homo sapien
accccaggggtcagccgcgccagca

SEQ ID NO: 2934304 - DNA, 25 bp, Homo sapien
ttgagacaggggtattcctgttctg

SEQ ID NO: 2934305 - DNA, 25 bp, Homo sapien
tgttctgtgggttctccagtccttg

SEQ ID NO: 2934306 - DNA, 25 bp, Homo sapien
gttctgtgggttctccagtccttgc

SEQ ID NO: 2934307 - DNA, 25 bp, Homo sapien
agacaggggtattcctgttctgtgg

SEQ ID NO: 2934308 - DNA, 25 bp, Homo sapien
ttgtctggagcgaggtaagcggcca

SEQ ID NO: 2934309 - DNA, 25 bp, Homo sapien
ggagcgaggtaagcggccaggagat

SEQ ID NO: 2934310 - DNA, 25 bp, Homo sapien
gcctttgatcaggttgtctggagcg

SEQ ID NO: 2934311 - DNA, 25 bp, Homo sapien
tcaggttgtctggagcgaggtaagc

SEQ ID NO: 2934312 - DNA, 25 bp, Homo sapien
taattgggggatgtagcaaaaagtg

SEQ ID NO: 2934313 - DNA, 25 bp, Homo sapien
atgcccgtgaaaggcttaattaatt

SEQ ID NO: 2934314 - DNA, 25 bp, Homo sapien
ggatgtagcaaaaagtggagcctgt

SEQ ID NO: 2934315 - DNA, 25 bp, Homo sapien
tagcaaaaagtggagcctgtgtttg

SEQ ID NO: 2934316 - DNA, 25 bp, Homo sapien
cagttggccgtgatgagcaaaggta

SEQ ID NO: 2934317 - DNA, 25 bp, Homo sapien
tggccgtgatgagcaaaggtacttt

SEQ ID NO: 2934318 - DNA, 25 bp, Homo sapien
gagcaaaggtactttggcttggaga

SEQ ID NO: 2934319 - DNA, 25 bp, Homo sapien
ccgtgatgagcaaaggtactttggc

SEQ ID NO: 2934320 - DNA, 25 bp, Homo sapien
taactgctcttgacagatgaagatg

SEQ ID NO: 2934321 - DNA, 25 bp, Homo sapien
aattcggaagctcccactcttgtcc

SEQ ID NO: 2934322 - DNA, 25 bp, Homo sapien
gtcctcacgtgcaaagtggatctga

SEQ ID NO: 2934323 - DNA, 25 bp, Homo sapien
ggccccgagagtgaattcggaagct

SEQ ID NO: 2934324 - DNA, 25 bp, Homo sapien
atgctgagggatcccctggccagcc

SEQ ID NO: 2934325 - DNA, 25 bp, Homo sapien
aggatgctgagggatcccctggcca

SEQ ID NO: 2934326 - DNA, 25 bp, Homo sapien
ctggagtaggatgctgagggatccc

SEQ ID NO: 2934327 - DNA, 25 bp, Homo sapien
tggagtaggatgctgagggatcccc

SEQ ID NO: 2934328 - DNA, 25 bp, Homo sapien
tcataagcacagtgagttatgaggc

SEQ ID NO: 2934329 - DNA, 25 bp, Homo sapien
tatgaggcggtgttgtgcgctgcac

SEQ ID NO: 2934330 - DNA, 25 bp, Homo sapien
tgttgtgcgctgcacacgagcagcg

SEQ ID NO: 2934331 - DNA, 25 bp, Homo sapien
caaacaaccgctccgcttcatcata

SEQ ID NO: 2934332 - DNA, 25 bp, Homo sapien
tctgataactgtgttccgcgcctcc

SEQ ID NO: 2934333 - DNA, 25 bp, Homo sapien
tcatcctggcggactggaggacatc

SEQ ID NO: 2934334 - DNA, 25 bp, Homo sapien
tactactggcactaaaggttctgga

SEQ ID NO: 2934335 - DNA, 25 bp, Homo sapien
cagtaaaggatgatgtggccgaacc

SEQ ID NO: 2934336 - DNA, 25 bp, Homo sapien
gaggttacgggcaagacaaatagca

SEQ ID NO: 2934337 - DNA, 25 bp, Homo sapien
tcctcctcagcaagggctgtgagtc

SEQ ID NO: 2934338 - DNA, 25 bp, Homo sapien
taggctgtggccttcgttatccagg

SEQ ID NO: 2934339 - DNA, 25 bp, Homo sapien
cactgtcaccgcaattaataggctg

SEQ ID NO: 2934340 - DNA, 25 bp, Homo sapien
gggctacagccgagactccaggtga

SEQ ID NO: 2934341 - DNA, 25 bp, Homo sapien
ttagacgccacacatatcccttctg

SEQ ID NO: 2934342 - DNA, 25 bp, Homo sapien
gactccaggtgaccctccagtacat

SEQ ID NO: 2934343 - DNA, 25 bp, Homo sapien
agcgccctgccgctgacttagacgc

SEQ ID NO: 2934344 - DNA, 25 bp, Homo sapien
gcaggccctctgcttgtcggaggag

SEQ ID NO: 2934345 - DNA, 25 bp, Homo sapien
caggccctctgcttgtcggaggaga

SEQ ID NO: 2934346 - DNA, 25 bp, Homo sapien
ccagtccaggctagcccatcgctgg

SEQ ID NO: 2934347 - DNA, 25 bp, Homo sapien
gctagcccatcgctggggtccggca

SEQ ID NO: 2934348 - DNA, 25 bp, Homo sapien
tacatattttggccgcgtgctgggc

SEQ ID NO: 2934349 - DNA, 25 bp, Homo sapien
tgaatctgtatggtaatgcaggcca

SEQ ID NO: 2934350 - DNA, 25 bp, Homo sapien
attttcatttccgacaacactggcg

SEQ ID NO: 2934351 - DNA, 25 bp, Homo sapien
ggcttacgacgtaggcacacatgct

SEQ ID NO: 2934352 - DNA, 25 bp, Homo sapien
ttcctgtccaactctggattgggac

SEQ ID NO: 2934353 - DNA, 25 bp, Homo sapien
gatccccatatgagatgctgatggc

SEQ ID NO: 2934354 - DNA, 25 bp, Homo sapien
ccctttcctgtccaactctggattg

SEQ ID NO: 2934355 - DNA, 25 bp, Homo sapien
actctccattgggacattgatcccc

SEQ ID NO: 2934356 - DNA, 25 bp, Homo sapien
tctcctgtgcctacaatccctgatg

SEQ ID NO: 2934357 - DNA, 25 bp, Homo sapien
tcatgccaatccattatgaaggtcc

SEQ ID NO: 2934358 - DNA, 25 bp, Homo sapien
ttatgaaggtccactcaaccagcaa

SEQ ID NO: 2934359 - DNA, 25 bp, Homo sapien
gcctacaatccctgatgccaaaggg

SEQ ID NO: 2934360 - DNA, 25 bp, Homo sapien
ccaccagaaggaataagggctggct

SEQ ID NO: 2934361 - DNA, 25 bp, Homo sapien
acaccaccagaaggaataagggctg

SEQ ID NO: 2934362 - DNA, 25 bp, Homo sapien
caccagaaggaataagggctggctg

SEQ ID NO: 2934363 - DNA, 25 bp, Homo sapien
ctgggacacaccaccagaaggaata

SEQ ID NO: 2934364 - DNA, 25 bp, Homo sapien
gtcctggtgctggcctagaggccca

SEQ ID NO: 2934365 - DNA, 25 bp, Homo sapien
tcctggtgctggcctagaggcccag

SEQ ID NO: 2934366 - DNA, 25 bp, Homo sapien
ctggtgctggcctagaggcccaggc

SEQ ID NO: 2934367 - DNA, 25 bp, Homo sapien
gtgctggcctagaggcccaggcaaa

SEQ ID NO: 2934368 - DNA, 25 bp, Homo sapien
tacacgcgatgtgtttgctcccggc

SEQ ID NO: 2934369 - DNA, 25 bp, Homo sapien
tcacatgttggtggactccgcagca

SEQ ID NO: 2934370 - DNA, 25 bp, Homo sapien
cagcagtcgtgcatgtgtgtccgtg

SEQ ID NO: 2934371 - DNA, 25 bp, Homo sapien
gcgaatggacccgtgtgcatgtaca

SEQ ID NO: 2934372 - DNA, 25 bp, Homo sapien
cacattttccactcaagcctttcag

SEQ ID NO: 2934373 - DNA, 25 bp, Homo sapien
tccactcaagcctttcagatctgct

SEQ ID NO: 2934374 - DNA, 25 bp, Homo sapien
ttttccactcaagcctttcagatct

SEQ ID NO: 2934375 - DNA, 25 bp, Homo sapien
actcaagcctttcagatctgctttg

SEQ ID NO: 2934376 - DNA, 25 bp, Homo sapien
tacatgaaaccagcaattagccagg

SEQ ID NO: 2934377 - DNA, 25 bp, Homo sapien
tattgccactctcaggtaattatca

SEQ ID NO: 2934378 - DNA, 25 bp, Homo sapien
catgcaatgccatatgtattgccac

SEQ ID NO: 2934379 - DNA, 25 bp, Homo sapien
tcagggagagctcgtttatagagtc

SEQ ID NO: 2934380 - DNA, 25 bp, Homo sapien
ctggactctgtcagttcacctgtca

SEQ ID NO: 2934381 - DNA, 25 bp, Homo sapien
ttggaaagtacaactctgtgtcctc

SEQ ID NO: 2934382 - DNA, 25 bp, Homo sapien
gtcctcctcccttgattgtctgaag

SEQ ID NO: 2934383 - DNA, 25 bp, Homo sapien
tgtcctcctcccttgattgtctgaa

SEQ ID NO: 2934384 - DNA, 25 bp, Homo sapien
tctggataatgcgtcttgagcaccc

SEQ ID NO: 2934385 - DNA, 25 bp, Homo sapien
cagttgttgcagaggaatttcttca

SEQ ID NO: 2934386 - DNA, 25 bp, Homo sapien
ggcctccagtattcatgagccagtt

SEQ ID NO: 2934387 - DNA, 25 bp, Homo sapien
acagcccacggcctctggataatgc

SEQ ID NO: 2934388 - DNA, 25 bp, Homo sapien
accccatcacgagctgcagcattga

SEQ ID NO: 2934389 - DNA, 25 bp, Homo sapien
catcacgagctgcagcattgagtcc

SEQ ID NO: 2934390 - DNA, 25 bp, Homo sapien
aagcccttattaagatcccatggca

SEQ ID NO: 2934391 - DNA, 25 bp, Homo sapien
ccttattaagatcccatggcactcg

SEQ ID NO: 2934392 - DNA, 25 bp, Homo sapien
cctggacgaaggtccctcggtgcaa

SEQ ID NO: 2934393 - DNA, 25 bp, Homo sapien
acgaaggtccctcggtgcaatgccg

SEQ ID NO: 2934394 - DNA, 25 bp, Homo sapien
gcaatgccgcagactgtgtccacgg

SEQ ID NO: 2934395 - DNA, 25 bp, Homo sapien
ccctcggtgcaatgccgcagactgt

SEQ ID NO: 2934396 - DNA, 25 bp, Homo sapien
tgctccgtgaccatacctgccagag

SEQ ID NO: 2934397 - DNA, 25 bp, Homo sapien
cagtagcgtgcagaaggcaaaactg

SEQ ID NO: 2934398 - DNA, 25 bp, Homo sapien
ctgctccgtgaccatacctgccaga

SEQ ID NO: 2934399 - DNA, 25 bp, Homo sapien
tctcatccacagtagcgtgcagaag

SEQ ID NO: 2934400 - DNA, 25 bp, Homo sapien
gctcttccggtctcacttcaagatt

SEQ ID NO: 2934401 - DNA, 25 bp, Homo sapien
gcagctcttccggtctcacttcaag

SEQ ID NO: 2934402 - DNA, 25 bp, Homo sapien
gcagcagctcttccggtctcacttc

SEQ ID NO: 2934403 - DNA, 25 bp, Homo sapien
cttccggtctcacttcaagatttga

SEQ ID NO: 2934404 - DNA, 25 bp, Homo sapien
agcacctggggtgcccgagtctgtc

SEQ ID NO: 2934405 - DNA, 25 bp, Homo sapien
ccaagggttccagtgtggtggtaag

SEQ ID NO: 2934406 - DNA, 25 bp, Homo sapien
gggtgcccgagtctgtctctttctc

SEQ ID NO: 2934407 - DNA, 25 bp, Homo sapien
agtgtggtggtaagttgtccagccc

SEQ ID NO: 2934408 - DNA, 25 bp, Homo sapien
caagaggaagccgtgttggcatgct

SEQ ID NO: 2934409 - DNA, 25 bp, Homo sapien
caatggatggctaatgcataggcaa

SEQ ID NO: 2934410 - DNA, 25 bp, Homo sapien
gacactctgggggatttctgctaaa

SEQ ID NO: 2934411 - DNA, 25 bp, Homo sapien
atttagggctgatgggacactctgg

SEQ ID NO: 2934412 - DNA, 25 bp, Homo sapien
aaaaaatgtcctggcgcagcggcta

SEQ ID NO: 2934413 - DNA, 25 bp, Homo sapien
cagcggctacagtaggccggcggct

SEQ ID NO: 2934414 - DNA, 25 bp, Homo sapien
ttttcttttgcagcgggaggagtcg

SEQ ID NO: 2934415 - DNA, 25 bp, Homo sapien
gtctaaccccacagtcgctcgactt

SEQ ID NO: 2934416 - DNA, 25 bp, Homo sapien
atcgtggctccagtcacaactcgcg

SEQ ID NO: 2934417 - DNA, 25 bp, Homo sapien
tggccgtgcatcgtggctccagtca

SEQ ID NO: 2934418 - DNA, 25 bp, Homo sapien
gcctggccgtgcatcgtggctccag

SEQ ID NO: 2934419 - DNA, 25 bp, Homo sapien
gtgcatcgtggctccagtcacaact

SEQ ID NO: 2934420 - DNA, 25 bp, Homo sapien
ttgtgtcaatcgaaaacagagaggg

SEQ ID NO: 2934421 - DNA, 25 bp, Homo sapien
gagaatgcgacccttctgctcagag

SEQ ID NO: 2934422 - DNA, 25 bp, Homo sapien
gagaagaagaagacgacgactcgcc

SEQ ID NO: 2934423 - DNA, 25 bp, Homo sapien
tttggatcctaaactgccggcatcg

SEQ ID NO: 2934424 - DNA, 25 bp, Homo sapien
agagagaggggcaaagtagagccca

SEQ ID NO: 2934425 - DNA, 25 bp, Homo sapien
gagagagaggggcaaagtagagccc

SEQ ID NO: 2934426 - DNA, 25 bp, Homo sapien
gagagaggggcaaagtagagcccag

SEQ ID NO: 2934427 - DNA, 25 bp, Homo sapien
agagaggggcaaagtagagcccagg

SEQ ID NO: 2934428 - DNA, 25 bp, Homo sapien
ttttgcagccggcacagtgaaccat

SEQ ID NO: 2934429 - DNA, 25 bp, Homo sapien
tcacagcactggacgcacttgacgt

SEQ ID NO: 2934430 - DNA, 25 bp, Homo sapien
gagaagcacttctcggtcaggttgc

SEQ ID NO: 2934431 - DNA, 25 bp, Homo sapien
cgttcaagagaaagcggtccaggat

SEQ ID NO: 2934432 - DNA, 25 bp, Homo sapien
aggtagtggccgggagggagcctgg

SEQ ID NO: 2934433 - DNA, 25 bp, Homo sapien
aaggtagtggccgggagggagcctg

SEQ ID NO: 2934434 - DNA, 25 bp, Homo sapien
gggagatgccctgagcgcagcctgc

SEQ ID NO: 2934435 - DNA, 25 bp, Homo sapien
tgccctgagcgcagcctgcgcattt

SEQ ID NO: 2934436 - DNA, 25 bp, Homo sapien
tgagcgcagcctgcgcatttggtac

SEQ ID NO: 2934437 - DNA, 25 bp, Homo sapien
gcctgcgcatttggtaccgaaacac

SEQ ID NO: 2934438 - DNA, 25 bp, Homo sapien
ggcaacactgctgttacttaggtaa

SEQ ID NO: 2934439 - DNA, 25 bp, Homo sapien
ggtgaaacactttgctccgcgctct

SEQ ID NO: 2934440 - DNA, 25 bp, Homo sapien
tgtagagttcctcgccagtggagag

SEQ ID NO: 2934441 - DNA, 25 bp, Homo sapien
taggtaatcctctttgcagacgaac

SEQ ID NO: 2934442 - DNA, 25 bp, Homo sapien
tgtagcagcgaaggcggccttcagc

SEQ ID NO: 2934443 - DNA, 25 bp, Homo sapien
tccttgtccgacacgttggcgctct

SEQ ID NO: 2934444 - DNA, 25 bp, Homo sapien
tcctgcgacgggtcttgggaatccg

SEQ ID NO: 2934445 - DNA, 25 bp, Homo sapien
gagtccttggcgtcgtcctgcgacg

SEQ ID NO: 2934446 - DNA, 25 bp, Homo sapien
ctgggtgcccaaagtggcagtgtgg

SEQ ID NO: 2934447 - DNA, 25 bp, Homo sapien
ctctgtgggatggagaggcgcgccg

SEQ ID NO: 2934448 - DNA, 25 bp, Homo sapien
gcctctgtgggatggagaggcgcgc

SEQ ID NO: 2934449 - DNA, 25 bp, Homo sapien
ccaaagtggcagtgtgggcctctgt

SEQ ID NO: 2934450 - DNA, 25 bp, Homo sapien
taggaccactcagggcggaccctga

SEQ ID NO: 2934451 - DNA, 25 bp, Homo sapien
gagactacgcctctccaaaataatg

SEQ ID NO: 2934452 - DNA, 25 bp, Homo sapien
tgacggtgcgatctctgactaggac

SEQ ID NO: 2934453 - DNA, 25 bp, Homo sapien
ccaatggtgagcaggaatcccacag

SEQ ID NO: 2934454 - DNA, 25 bp, Homo sapien
tccggcgcggactgcggaagaaggc

SEQ ID NO: 2934455 - DNA, 25 bp, Homo sapien
ccgctccttggagcgccggttctgg

SEQ ID NO: 2934456 - DNA, 25 bp, Homo sapien
gaagggaccattggggatgagctcg

SEQ ID NO: 2934457 - DNA, 25 bp, Homo sapien
ggctccaggcggtccaccagcggcc

SEQ ID NO: 2934458 - DNA, 25 bp, Homo sapien
tgcgccaggatgtcggtaaaccgct

SEQ ID NO: 2934459 - DNA, 25 bp, Homo sapien
tgacggcacgaagggtaggtccact

SEQ ID NO: 2934460 - DNA, 25 bp, Homo sapien
gggcccgtagtactcgctctggtaa

SEQ ID NO: 2934461 - DNA, 25 bp, Homo sapien
accgttgaccgacagcgacgagaag

SEQ ID NO: 2934462 - DNA, 25 bp, Homo sapien
ctgtacaaccacgaactccgcagac

SEQ ID NO: 2934463 - DNA, 25 bp, Homo sapien
taaaggttcatttctgtacaaccac

SEQ ID NO: 2934464 - DNA, 25 bp, Homo sapien
gtacaaccacgaactccgcagaccg

SEQ ID NO: 2934465 - DNA, 25 bp, Homo sapien
actccgcagaccgtgcgagaccccg

SEQ ID NO: 2934466 - DNA, 25 bp, Homo sapien
gaactctgagacaacactaataagg

SEQ ID NO: 2934467 - DNA, 25 bp, Homo sapien
gctggagaccatcttaccgagtgtg

SEQ ID NO: 2934468 - DNA, 25 bp, Homo sapien
tgcacggcaggtcggcgtttctgaa

SEQ ID NO: 2934469 - DNA, 25 bp, Homo sapien
ggtctgtctacggatccgggtccag

SEQ ID NO: 2934470 - DNA, 25 bp, Homo sapien
tactagcacagtgagccgaaagccc

SEQ ID NO: 2934471 - DNA, 25 bp, Homo sapien
gctgttgactgcatatttgaccata

SEQ ID NO: 2934472 - DNA, 25 bp, Homo sapien
cctgtgtgggtctatataagtcata

SEQ ID NO: 2934473 - DNA, 25 bp, Homo sapien
ggtctaatatgcactggaggtcaca

SEQ ID NO: 2934474 - DNA, 25 bp, Homo sapien
ctccgcttcgcgcacgtaaatgtgc

SEQ ID NO: 2934475 - DNA, 25 bp, Homo sapien
ttgctagcatgaaggcggaagcgcg

SEQ ID NO: 2934476 - DNA, 25 bp, Homo sapien
cctgcgcgtcactgcgggcgttgct

SEQ ID NO: 2934477 - DNA, 25 bp, Homo sapien
tctcgccttgatccgattccccgac

SEQ ID NO: 2934478 - DNA, 25 bp, Homo sapien
gtccgcctcgcttggtcgcgggttc

SEQ ID NO: 2934479 - DNA, 25 bp, Homo sapien
gcctcgcttggtcgcgggttcaaca

SEQ ID NO: 2934480 - DNA, 25 bp, Homo sapien
tggtcgcgggttcaacaactgttcc

SEQ ID NO: 2934481 - DNA, 25 bp, Homo sapien
gcttggtcgcgggttcaacaactgt

SEQ ID NO: 2934482 - DNA, 25 bp, Homo sapien
ccccttcatcaaacctgtcaatcac

SEQ ID NO: 2934483 - DNA, 25 bp, Homo sapien
ctgtcaatcaccctggcagcagtgg

SEQ ID NO: 2934484 - DNA, 25 bp, Homo sapien
aacctgtcaatcaccctggcagcag

SEQ ID NO: 2934485 - DNA, 25 bp, Homo sapien
ttcatcaaacctgtcaatcaccctg

SEQ ID NO: 2934486 - DNA, 25 bp, Homo sapien
aatgctacccactactaggaaatca

SEQ ID NO: 2934487 - DNA, 25 bp, Homo sapien
taatgctacccactactaggaaatc

SEQ ID NO: 2934488 - DNA, 25 bp, Homo sapien
atgctacccactactaggaaatcac

SEQ ID NO: 2934489 - DNA, 25 bp, Homo sapien
ctaatgctacccactactaggaaat

SEQ ID NO: 2934490 - DNA, 25 bp, Homo sapien
tttgtccgtgtccaagagggaggct

SEQ ID NO: 2934491 - DNA, 25 bp, Homo sapien
tttgccgcaataccttttgtccgtg

SEQ ID NO: 2934492 - DNA, 25 bp, Homo sapien
tcattccatgcttttctagaggtgg

SEQ ID NO: 2934493 - DNA, 25 bp, Homo sapien
tctagaggtggttttgccgcaatac

SEQ ID NO: 2934494 - DNA, 25 bp, Homo sapien
tccagacccttcctcatcagatatt

SEQ ID NO: 2934495 - DNA, 25 bp, Homo sapien
tcaaagtcactgatactctggacac

SEQ ID NO: 2934496 - DNA, 25 bp, Homo sapien
aaggtcatccattcccttggtaaat

SEQ ID NO: 2934497 - DNA, 25 bp, Homo sapien
tgaagcccggtgtttttgcagagtg

SEQ ID NO: 2934498 - DNA, 25 bp, Homo sapien
tcactgtttctatctccagccctgt

SEQ ID NO: 2934499 - DNA, 25 bp, Homo sapien
catcatcctcactgtttctatctcc

SEQ ID NO: 2934500 - DNA, 25 bp, Homo sapien
actgtttctatctccagccctgtct

SEQ ID NO: 2934501 - DNA, 25 bp, Homo sapien
tcctcactgtttctatctccagccc

SEQ ID NO: 2934502 - DNA, 25 bp, Homo sapien
tccacttcctcagaaactttgacac

SEQ ID NO: 2934503 - DNA, 25 bp, Homo sapien
tttgacactagagaaggtcatcacc

SEQ ID NO: 2934504 - DNA, 25 bp, Homo sapien
acttcctcagaaactttgacactag

SEQ ID NO: 2934505 - DNA, 25 bp, Homo sapien
gacactagagaaggtcatcaccaca

SEQ ID NO: 2934506 - DNA, 25 bp, Homo sapien
cttccttccaagagctggtcccaca

SEQ ID NO: 2934507 - DNA, 25 bp, Homo sapien
tccttccaagagctggtcccacagt

SEQ ID NO: 2934508 - DNA, 25 bp, Homo sapien
ccttccaagagctggtcccacagtg

SEQ ID NO: 2934509 - DNA, 25 bp, Homo sapien
ttccttccaagagctggtcccacag

SEQ ID NO: 2934510 - DNA, 25 bp, Homo sapien
tggtggtcaacagagctttttgtag

SEQ ID NO: 2934511 - DNA, 25 bp, Homo sapien
tggtcaacagagctttttgtagttt

SEQ ID NO: 2934512 - DNA, 25 bp, Homo sapien
gtggtcaacagagctttttgtagtt

SEQ ID NO: 2934513 - DNA, 25 bp, Homo sapien
ggtggtcaacagagctttttgtagt

SEQ ID NO: 2934514 - DNA, 25 bp, Homo sapien
tcagggcactggaaaattctgggcc

SEQ ID NO: 2934515 - DNA, 25 bp, Homo sapien
tatttttcagggcactggaaaattc

SEQ ID NO: 2934516 - DNA, 25 bp, Homo sapien
tttcagggcactggaaaattctggg

SEQ ID NO: 2934517 - DNA, 25 bp, Homo sapien
agggcactggaaaattctgggccac

SEQ ID NO: 2934518 - DNA, 25 bp, Homo sapien
tctagagcagtctaggtctcattcc

SEQ ID NO: 2934519 - DNA, 25 bp, Homo sapien
gaaaacaggccttatcgtgaaacat

SEQ ID NO: 2934520 - DNA, 25 bp, Homo sapien
caaaggcataccaggaattagggta

SEQ ID NO: 2934521 - DNA, 25 bp, Homo sapien
catttaatctagagcagtctaggtc

SEQ ID NO: 2934522 - DNA, 25 bp, Homo sapien
gaatatgtgataccaaacttccttt

SEQ ID NO: 2934523 - DNA, 25 bp, Homo sapien
gtgataccaaacttcctttcttctc

SEQ ID NO: 2934524 - DNA, 25 bp, Homo sapien
ttagaatatgtgataccaaacttcc

SEQ ID NO: 2934525 - DNA, 25 bp, Homo sapien
tatgtgataccaaacttcctttctt

SEQ ID NO: 2934526 - DNA, 25 bp, Homo sapien
taaagacagtaagttccagtggttg

SEQ ID NO: 2934527 - DNA, 25 bp, Homo sapien
cagtaataaattggtcatccagagt

SEQ ID NO: 2934528 - DNA, 25 bp, Homo sapien
catccagagtaatgtgctcaagaat

SEQ ID NO: 2934529 - DNA, 25 bp, Homo sapien
gggttggtacaaattcagcctatgt

SEQ ID NO: 2934530 - DNA, 25 bp, Homo sapien
ttaaaggtctttaatgatattgcat

SEQ ID NO: 2934531 - DNA, 25 bp, Homo sapien
taaaggtctttaatgatattgcatt

SEQ ID NO: 2934532 - DNA, 25 bp, Homo sapien
aaaggtctttaatgatattgcattt

SEQ ID NO: 2934533 - DNA, 25 bp, Homo sapien
ttttccgatctttgaaataagcatg

SEQ ID NO: 2934534 - DNA, 25 bp, Homo sapien
tgtgtgcacgcgaaaaggtctggaa

SEQ ID NO: 2934535 - DNA, 25 bp, Homo sapien
ttatgcttctatgtattttccgatc

SEQ ID NO: 2934536 - DNA, 25 bp, Homo sapien
aactatggttatctctgggcagtag

SEQ ID NO: 2934537 - DNA, 25 bp, Homo sapien
tctggccaccagctttaggaataat

SEQ ID NO: 2934538 - DNA, 25 bp, Homo sapien
gagattaagaaggacatatgcctca

SEQ ID NO: 2934539 - DNA, 25 bp, Homo sapien
aagattcaaccttagcatctggcca

SEQ ID NO: 2934540 - DNA, 25 bp, Homo sapien
gcctcatcatattaccaagattcaa

SEQ ID NO: 2934541 - DNA, 25 bp, Homo sapien
gaagacctaccaatgacctcaacaa

SEQ ID NO: 2934542 - DNA, 25 bp, Homo sapien
tagatatctagtgtctgggtactgg

SEQ ID NO: 2934543 - DNA, 25 bp, Homo sapien
aaaagcaactcttcctgaagaccta

SEQ ID NO: 2934544 - DNA, 25 bp, Homo sapien
gacctcaacaatgctttaagtgcct

SEQ ID NO: 2934545 - DNA, 25 bp, Homo sapien
tatctgcctgaagagaacttagctt

SEQ ID NO: 2934546 - DNA, 25 bp, Homo sapien
tctaagaccgcaaagcacatcaggt

SEQ ID NO: 2934547 - DNA, 25 bp, Homo sapien
gaaggcaagcctttgtctaagaccg

SEQ ID NO: 2934548 - DNA, 25 bp, Homo sapien
tatgtgccatcctgaccatcaggta

SEQ ID NO: 2934549 - DNA, 25 bp, Homo sapien
aaagcgctttgccatgaagctggga

SEQ ID NO: 2934550 - DNA, 25 bp, Homo sapien
catttctgaagtgtgcggttcctgt

SEQ ID NO: 2934551 - DNA, 25 bp, Homo sapien
gaagctgggatagtcctccatctcc

SEQ ID NO: 2934552 - DNA, 25 bp, Homo sapien
tagactgtaaagtcggcaaagcgct

SEQ ID NO: 2934553 - DNA, 25 bp, Homo sapien
cagaagccagtttggtcttatcgtg

SEQ ID NO: 2934554 - DNA, 25 bp, Homo sapien
tcaagattgagcgttcaaaggcacc

SEQ ID NO: 2934555 - DNA, 25 bp, Homo sapien
cagaatatggtcgatctgagtcaag

SEQ ID NO: 2934556 - DNA, 25 bp, Homo sapien
gtttgccaagaactcgatagacaga

SEQ ID NO: 2934557 - DNA, 25 bp, Homo sapien
gagcgcttggtctgtgtccttcgaa

SEQ ID NO: 2934558 - DNA, 25 bp, Homo sapien
tcaaagatttcttcatccaagtcct

SEQ ID NO: 2934559 - DNA, 25 bp, Homo sapien
catccaagtccttcagatgagcatt

SEQ ID NO: 2934560 - DNA, 25 bp, Homo sapien
aagtccttcagatgagcattagcag

SEQ ID NO: 2934561 - DNA, 25 bp, Homo sapien
tcatcaaagatttcttcatccaagt

SEQ ID NO: 2934562 - DNA, 25 bp, Homo sapien
ggtgttttagctgccttgctgacct

SEQ ID NO: 2934563 - DNA, 25 bp, Homo sapien
acagccaagataaagttgtgcctgg

SEQ ID NO: 2934564 - DNA, 25 bp, Homo sapien
actcaggtgttttagctgccttgct

SEQ ID NO: 2934565 - DNA, 25 bp, Homo sapien
agccccatttgtttcactcaggtgt

SEQ ID NO: 2934566 - DNA, 25 bp, Homo sapien
ctactgactgtgcatggatggcagc

SEQ ID NO: 2934567 - DNA, 25 bp, Homo sapien
tgcagggtttcaagacttgcaccca

SEQ ID NO: 2934568 - DNA, 25 bp, Homo sapien
cagttggtgtagcagcaaagcaatc

SEQ ID NO: 2934569 - DNA, 25 bp, Homo sapien
gtcgtagcccgctgccaaagagtgg

SEQ ID NO: 2934570 - DNA, 25 bp, Homo sapien
tatgtcaaatagtgcctcgtaaggc

SEQ ID NO: 2934571 - DNA, 25 bp, Homo sapien
tctaccctgaaataagtaacagtgg

SEQ ID NO: 2934572 - DNA, 25 bp, Homo sapien
tgagaaccctagagaaccacatgta

SEQ ID NO: 2934573 - DNA, 25 bp, Homo sapien
ggataccagcaactccatacggctt

SEQ ID NO: 2934574 - DNA, 25 bp, Homo sapien
cctggcctcaagctgatctgaccca

SEQ ID NO: 2934575 - DNA, 25 bp, Homo sapien
tttgtcagttgtttttgaacatatc

SEQ ID NO: 2934576 - DNA, 25 bp, Homo sapien
ttgaacatatctttgtcattgccat

SEQ ID NO: 2934577 - DNA, 25 bp, Homo sapien
gtttttgaacatatctttgtcattg

SEQ ID NO: 2934578 - DNA, 25 bp, Homo sapien
tgtcagttgtttttgaacatatctt

SEQ ID NO: 2934579 - DNA, 25 bp, Homo sapien
tgaaaagactacttaccccactgag

SEQ ID NO: 2934580 - DNA, 25 bp, Homo sapien
cttacttagcctagctgagtcaggg

SEQ ID NO: 2934581 - DNA, 25 bp, Homo sapien
tcttgagagtgtcatttgaggcagg

SEQ ID NO: 2934582 - DNA, 25 bp, Homo sapien
tgactgacagccatactagcaggta

SEQ ID NO: 2934583 - DNA, 25 bp, Homo sapien
cctgtttatctgattgattcccaac

SEQ ID NO: 2934584 - DNA, 25 bp, Homo sapien
tgtttatctgattgattcccaacat

SEQ ID NO: 2934585 - DNA, 25 bp, Homo sapien
ctgtttatctgattgattcccaaca

SEQ ID NO: 2934586 - DNA, 25 bp, Homo sapien
cttcccatggccacctgatcgttgg

SEQ ID NO: 2934587 - DNA, 25 bp, Homo sapien
agctggtcttccgttctatgagttc

SEQ ID NO: 2934588 - DNA, 25 bp, Homo sapien
tcgttgggatccaaggagctggtct

SEQ ID NO: 2934589 - DNA, 25 bp, Homo sapien
tccgttctatgagttctcgaaggag

SEQ ID NO: 2934590 - DNA, 25 bp, Homo sapien
ttcacaagcaatgttatgcatcatc

SEQ ID NO: 2934591 - DNA, 25 bp, Homo sapien
caatgttatgcatcatcactaacag

SEQ ID NO: 2934592 - DNA, 25 bp, Homo sapien
tctaacaaccctgcagaaagaaatc

SEQ ID NO: 2934593 - DNA, 25 bp, Homo sapien
attggaattattctaacaaccctgc

SEQ ID NO: 2934594 - DNA, 25 bp, Homo sapien
tgcttcgtaacttctggattgcaag

SEQ ID NO: 2934595 - DNA, 25 bp, Homo sapien
tttgtggattttgcttcgtaacttc

SEQ ID NO: 2934596 - DNA, 25 bp, Homo sapien
tggattttgcttcgtaacttctgga

SEQ ID NO: 2934597 - DNA, 25 bp, Homo sapien
taacttctggattgcaagccactgc

SEQ ID NO: 2934598 - DNA, 25 bp, Homo sapien
agaaaaactgagttgcaataaacct

SEQ ID NO: 2934599 - DNA, 25 bp, Homo sapien
acagtagcacaaaagtcaatgaaac

SEQ ID NO: 2934600 - DNA, 25 bp, Homo sapien
cagaatgtaagagacgagatacata

SEQ ID NO: 2934601 - DNA, 25 bp, Homo sapien
cacccatctattacaacagtagcac

SEQ ID NO: 2934602 - DNA, 25 bp, Homo sapien
gaacatctgggtacaaagtgggata

SEQ ID NO: 2934603 - DNA, 25 bp, Homo sapien
catcccatggtatctgtggaggaat

SEQ ID NO: 2934604 - DNA, 25 bp, Homo sapien
tagtaactattaacctaggagagga

SEQ ID NO: 2934605 - DNA, 25 bp, Homo sapien
cataggcacttaccactgtcattgg

SEQ ID NO: 2934606 - DNA, 25 bp, Homo sapien
tcatcattcattgtagtatggtcaa

SEQ ID NO: 2934607 - DNA, 25 bp, Homo sapien
aataggtgccatgaaactcagtagc

SEQ ID NO: 2934608 - DNA, 25 bp, Homo sapien
cattgtagtatggtcaataggtgcc

SEQ ID NO: 2934609 - DNA, 25 bp, Homo sapien
tatggtcaataggtgccatgaaact

SEQ ID NO: 2934610 - DNA, 25 bp, Homo sapien
tgtactcagaaccatccataggctg

SEQ ID NO: 2934611 - DNA, 25 bp, Homo sapien
aaatgtactcagaaccatccatagg

SEQ ID NO: 2934612 - DNA, 25 bp, Homo sapien
gcaaagcacaggatagcagatgtgg

SEQ ID NO: 2934613 - DNA, 25 bp, Homo sapien
atagcagatgtggtcacaaagccag

SEQ ID NO: 2934614 - DNA, 25 bp, Homo sapien
gatatgctgtgtccattattgttat

SEQ ID NO: 2934615 - DNA, 25 bp, Homo sapien
cattattgttattgggatattctta

SEQ ID NO: 2934616 - DNA, 25 bp, Homo sapien
cttcttgttgatatgctgtgtccat

SEQ ID NO: 2934617 - DNA, 25 bp, Homo sapien
tagtagaaaaatatgtcatctgctg

SEQ ID NO: 2934618 - DNA, 25 bp, Homo sapien
tgcctaccggcttgcaagtaacttg

SEQ ID NO: 2934619 - DNA, 25 bp, Homo sapien
tgaaaaacttagctattgcctaccg

SEQ ID NO: 2934620 - DNA, 25 bp, Homo sapien
taaatcagagcgaaggataactgca

SEQ ID NO: 2934621 - DNA, 25 bp, Homo sapien
tggtatctcagcaatcgactgttgg

SEQ ID NO: 2934622 - DNA, 25 bp, Homo sapien
caaagagtagcatgtgatattggag

SEQ ID NO: 2934623 - DNA, 25 bp, Homo sapien
tacagactattggttaatatgccgt

SEQ ID NO: 2934624 - DNA, 25 bp, Homo sapien
atgaaacagaactgatgagaataca

SEQ ID NO: 2934625 - DNA, 25 bp, Homo sapien
agagtctgggttttatgctagaggc

SEQ ID NO: 2934626 - DNA, 25 bp, Homo sapien
tttaccacgtaagtggaggtgccca

SEQ ID NO: 2934627 - DNA, 25 bp, Homo sapien
gctactgagactccaaacaccctgg

SEQ ID NO: 2934628 - DNA, 25 bp, Homo sapien
tggttatggctcattcaggacctca

SEQ ID NO: 2934629 - DNA, 25 bp, Homo sapien
gaacaattgctcgtctttgcagcat

SEQ ID NO: 2934630 - DNA, 25 bp, Homo sapien
cgcattaatattccatattcccggg

SEQ ID NO: 2934631 - DNA, 25 bp, Homo sapien
ttcccgggatgatgtccactttcac

SEQ ID NO: 2934632 - DNA, 25 bp, Homo sapien
cttagcggacttgcaaaaaagcaga

SEQ ID NO: 2934633 - DNA, 25 bp, Homo sapien
ctcttcagacaaaaggggcgccgct

SEQ ID NO: 2934634 - DNA, 25 bp, Homo sapien
tgctccccgaaaaagcctgtgcagc

SEQ ID NO: 2934635 - DNA, 25 bp, Homo sapien
ccattccactgctccccgaaaaagc

SEQ ID NO: 2934636 - DNA, 25 bp, Homo sapien
cactgctccccgaaaaagcctgtgc

SEQ ID NO: 2934637 - DNA, 25 bp, Homo sapien
cattccactgctccccgaaaaagcc

SEQ ID NO: 2934638 - DNA, 25 bp, Homo sapien
gcatcggcacatcagactttaaaag

SEQ ID NO: 2934639 - DNA, 25 bp, Homo sapien
cctgctcggatattctcaagatgga

SEQ ID NO: 2934640 - DNA, 25 bp, Homo sapien
catcatctgagggtcagcatcggca

SEQ ID NO: 2934641 - DNA, 25 bp, Homo sapien
ccagcctgccgtcttgttttaaaag

SEQ ID NO: 2934642 - DNA, 25 bp, Homo sapien
ccatgaggttccaagcaggcaagac

SEQ ID NO: 2934643 - DNA, 25 bp, Homo sapien
ttccaagcaggcaagacccgtgtga

SEQ ID NO: 2934644 - DNA, 25 bp, Homo sapien
aagacccgtgtgaggacgtccctgt

SEQ ID NO: 2934645 - DNA, 25 bp, Homo sapien
tgggcgtgtagcacgtggccgcaga

SEQ ID NO: 2934646 - DNA, 25 bp, Homo sapien
taaaacaataacatgccagggtctt

SEQ ID NO: 2934647 - DNA, 25 bp, Homo sapien
gggcagggatctttcctatcgttga

SEQ ID NO: 2934648 - DNA, 25 bp, Homo sapien
ctatcgttgagacagaagctccaga

SEQ ID NO: 2934649 - DNA, 25 bp, Homo sapien
tgtggatacagagcagatcctccct

SEQ ID NO: 2934650 - DNA, 25 bp, Homo sapien
tttaataggatgtaggagaccgcca

SEQ ID NO: 2934651 - DNA, 25 bp, Homo sapien
tggacacccgtctccagggaatgag

SEQ ID NO: 2934652 - DNA, 25 bp, Homo sapien
ttgcagacaggctcttcaagtaaga

SEQ ID NO: 2934653 - DNA, 25 bp, Homo sapien
ccgccatccgatgaggaggattcaa

SEQ ID NO: 2934654 - DNA, 25 bp, Homo sapien
cgtggccttcgtcgggagggtggag

SEQ ID NO: 2934655 - DNA, 25 bp, Homo sapien
tggccaaaaagagagcggtacagtt

SEQ ID NO: 2934656 - DNA, 25 bp, Homo sapien
aaaaagagagcggtacagttctgtc

SEQ ID NO: 2934657 - DNA, 25 bp, Homo sapien
tcaatccccgtggccttcgtcggga

SEQ ID NO: 2934658 - DNA, 25 bp, Homo sapien
cccactgggtgtcggaggtgggcga

SEQ ID NO: 2934659 - DNA, 25 bp, Homo sapien
ggcgcccactgggtgtcggaggtgg

SEQ ID NO: 2934660 - DNA, 25 bp, Homo sapien
cgcccactgggtgtcggaggtgggc

SEQ ID NO: 2934661 - DNA, 25 bp, Homo sapien
cactgggtgtcggaggtgggcgatg

SEQ ID NO: 2934662 - DNA, 25 bp, Homo sapien
cctccatctggaccagcagccgcac

SEQ ID NO: 2934663 - DNA, 25 bp, Homo sapien
ttcctccatctggaccagcagccgc

SEQ ID NO: 2934664 - DNA, 25 bp, Homo sapien
gtttcctccatctggaccagcagcc

SEQ ID NO: 2934665 - DNA, 25 bp, Homo sapien
tcactggtttcctccatctggacca

SEQ ID NO: 2934666 - DNA, 25 bp, Homo sapien
gcttccctactagctcagccccata

SEQ ID NO: 2934667 - DNA, 25 bp, Homo sapien
tattaggcacaggttcggaacgcag

SEQ ID NO: 2934668 - DNA, 25 bp, Homo sapien
taggcacaggttcggaacgcagcat

SEQ ID NO: 2934669 - DNA, 25 bp, Homo sapien
acaggttcggaacgcagcatctttc

SEQ ID NO: 2934670 - DNA, 25 bp, Homo sapien
gttgggcgggacagcgcccttgcgt

SEQ ID NO: 2934671 - DNA, 25 bp, Homo sapien
gggttgggcgggacagcgcccttgc

SEQ ID NO: 2934672 - DNA, 25 bp, Homo sapien
ggttgggcgggacagcgcccttgcg

SEQ ID NO: 2934673 - DNA, 25 bp, Homo sapien
ttgggcgggacagcgcccttgcgtg

SEQ ID NO: 2934674 - DNA, 25 bp, Homo sapien
ttgccgtactggtgagatctttaag

SEQ ID NO: 2934675 - DNA, 25 bp, Homo sapien
gccgtactggtgagatctttaaggt

SEQ ID NO: 2934676 - DNA, 25 bp, Homo sapien
cgccttgccgtactggtgagatctt

SEQ ID NO: 2934677 - DNA, 25 bp, Homo sapien
ccttgccgtactggtgagatcttta

SEQ ID NO: 2934678 - DNA, 25 bp, Homo sapien
gggagacgtggatcttggcattaac

SEQ ID NO: 2934679 - DNA, 25 bp, Homo sapien
tcatttgtgcgtctggatccgggga

SEQ ID NO: 2934680 - DNA, 25 bp, Homo sapien
gacgtggatcttggcattaacacat

SEQ ID NO: 2934681 - DNA, 25 bp, Homo sapien
ggatcttggcattaacacattccat

SEQ ID NO: 2934682 - DNA, 25 bp, Homo sapien
cccaggatgtaaggggccttgagca

SEQ ID NO: 2934683 - DNA, 25 bp, Homo sapien
cgggctatcaccctcccttgaggct

SEQ ID NO: 2934684 - DNA, 25 bp, Homo sapien
gcatactaatgcatctgcgttcccg

SEQ ID NO: 2934685 - DNA, 25 bp, Homo sapien
tgcgttcccgcaggcggtctctcag

SEQ ID NO: 2934686 - DNA, 25 bp, Homo sapien
gaccagtcactgtgggctgccgttt

SEQ ID NO: 2934687 - DNA, 25 bp, Homo sapien
tctgatggcacttgcgaccagtcac

SEQ ID NO: 2934688 - DNA, 25 bp, Homo sapien
gtaatggacgactttggaagaacca

SEQ ID NO: 2934689 - DNA, 25 bp, Homo sapien
cgtaagcggcgcacatttctgatgg

SEQ ID NO: 2934690 - DNA, 25 bp, Homo sapien
tgaagttgtttgtcttaaagttgaa

SEQ ID NO: 2934691 - DNA, 25 bp, Homo sapien
ctaattagagacacacttgtaaatg

SEQ ID NO: 2934692 - DNA, 25 bp, Homo sapien
atgaagttgtttgtcttaaagttga

SEQ ID NO: 2934693 - DNA, 25 bp, Homo sapien
agcagctgcggccatcagctgtcct

SEQ ID NO: 2934694 - DNA, 25 bp, Homo sapien
ggtgagctctcatgtaagagtaatg

SEQ ID NO: 2934695 - DNA, 25 bp, Homo sapien
cagttggtcccggtgagctctcatg

SEQ ID NO: 2934696 - DNA, 25 bp, Homo sapien
agagtaatgaagtttaaacttctct

SEQ ID NO: 2934697 - DNA, 25 bp, Homo sapien
gctgggagttattgttgttgaatga

SEQ ID NO: 2934698 - DNA, 25 bp, Homo sapien
agctgggagttattgttgttgaatg

SEQ ID NO: 2934699 - DNA, 25 bp, Homo sapien
ctgggagttattgttgttgaatgag

SEQ ID NO: 2934700 - DNA, 25 bp, Homo sapien
tgggagttattgttgttgaatgagt

SEQ ID NO: 2934701 - DNA, 25 bp, Homo sapien
ctcaaacatgcaaggctactaaggc

SEQ ID NO: 2934702 - DNA, 25 bp, Homo sapien
gacggagaccgccatattatctgtt

SEQ ID NO: 2934703 - DNA, 25 bp, Homo sapien
tactgtaggtcttaccctggacaag

SEQ ID NO: 2934704 - DNA, 25 bp, Homo sapien
tgatggatattgaccaagacctgct

SEQ ID NO: 2934705 - DNA, 25 bp, Homo sapien
aagttgttcctatgaagcctggagc

SEQ ID NO: 2934706 - DNA, 25 bp, Homo sapien
cagcagttccacaggtggtgaagcc

SEQ ID NO: 2934707 - DNA, 25 bp, Homo sapien
tatttatgccatgtggagagccagt

SEQ ID NO: 2934708 - DNA, 25 bp, Homo sapien
aagagaactgccctttctgcactgg

SEQ ID NO: 2934709 - DNA, 25 bp, Homo sapien
cttggaataagaataacgaactacg

SEQ ID NO: 2934710 - DNA, 25 bp, Homo sapien
gagactcccaagtgatagccgttta

SEQ ID NO: 2934711 - DNA, 25 bp, Homo sapien
gcctagctaatatgaggagcagatg

SEQ ID NO: 2934712 - DNA, 25 bp, Homo sapien
tatcaatttcctatccgcattggag

SEQ ID NO: 2934713 - DNA, 25 bp, Homo sapien
caattgttgccgctgtgtttaccac

SEQ ID NO: 2934714 - DNA, 25 bp, Homo sapien
taattccatacaaaggcagcaatgc

SEQ ID NO: 2934715 - DNA, 25 bp, Homo sapien
cgcagggccgcagttcatgctgact

SEQ ID NO: 2934716 - DNA, 25 bp, Homo sapien
caaagtcggtcttcttctggatcac

SEQ ID NO: 2934717 - DNA, 25 bp, Homo sapien
gtctttagcagaatgaagaggtggt

SEQ ID NO: 2934718 - DNA, 25 bp, Homo sapien
tgagctaccattcccagtctacaaa

SEQ ID NO: 2934719 - DNA, 25 bp, Homo sapien
cattcccagtctacaaagtgtagtc

SEQ ID NO: 2934720 - DNA, 25 bp, Homo sapien
agtctttagcagaatgaagaggtgg

SEQ ID NO: 2934721 - DNA, 25 bp, Homo sapien
cctgtgtgtgatgccaggtgcccat

SEQ ID NO: 2934722 - DNA, 25 bp, Homo sapien
gtgggcctgtgtgtgatgccaggtg

SEQ ID NO: 2934723 - DNA, 25 bp, Homo sapien
gatctgggtggagtgggcctgtgtg

SEQ ID NO: 2934724 - DNA, 25 bp, Homo sapien
gggcctgtgtgtgatgccaggtgcc

SEQ ID NO: 2934725 - DNA, 25 bp, Homo sapien
cttgatctcggagtcatggaactgt

SEQ ID NO: 2934726 - DNA, 25 bp, Homo sapien
tggaactgtttgaccgccagctggc

SEQ ID NO: 2934727 - DNA, 25 bp, Homo sapien
gagtcatggaactgtttgaccgcca

SEQ ID NO: 2934728 - DNA, 25 bp, Homo sapien
gtgggaacttgatctcggagtcatg

SEQ ID NO: 2934729 - DNA, 25 bp, Homo sapien
gttgagtctgggtgatgcatgtggc

SEQ ID NO: 2934730 - DNA, 25 bp, Homo sapien
tctgttaatggcccttcttgatggc

SEQ ID NO: 2934731 - DNA, 25 bp, Homo sapien
gtctgggtgatgcatgtggctttcc

SEQ ID NO: 2934732 - DNA, 25 bp, Homo sapien
ccagggatgccgctatttacatctg

SEQ ID NO: 2934733 - DNA, 25 bp, Homo sapien
tatttgctgggttgtgccaagagca

SEQ ID NO: 2934734 - DNA, 25 bp, Homo sapien
caagagcggcttatctttgccatac

SEQ ID NO: 2934735 - DNA, 25 bp, Homo sapien
tcccctgggagagggtagatactaa

SEQ ID NO: 2934736 - DNA, 25 bp, Homo sapien
gactgagcactctatactgtctgag

SEQ ID NO: 2934737 - DNA, 25 bp, Homo sapien
gatgtgtaggcagctagtcccggtc

SEQ ID NO: 2934738 - DNA, 25 bp, Homo sapien
cccctagaggttgttgagagcatca

SEQ ID NO: 2934739 - DNA, 25 bp, Homo sapien
tctgagcatatacttgagccaaggc

SEQ ID NO: 2934740 - DNA, 25 bp, Homo sapien
gaagaagatgcctaatgaaacctcc

SEQ ID NO: 2934741 - DNA, 25 bp, Homo sapien
gctttttgacccatactgtgtagat

SEQ ID NO: 2934742 - DNA, 25 bp, Homo sapien
tacatgattgatttgggaccattcc

SEQ ID NO: 2934743 - DNA, 25 bp, Homo sapien
ttctacctaagtggataagctggct

SEQ ID NO: 2934744 - DNA, 25 bp, Homo sapien
tcacagtagtgtgcgatatgccaca

SEQ ID NO: 2934745 - DNA, 25 bp, Homo sapien
ctaacttttatatttgtgtgcgtgt

SEQ ID NO: 2934746 - DNA, 25 bp, Homo sapien
gattttggagatgttgcctgggctg

SEQ ID NO: 2934747 - DNA, 25 bp, Homo sapien
tgtgtgtgtaaagatggattttgga

SEQ ID NO: 2934748 - DNA, 25 bp, Homo sapien
aagatggattttggagatgttgcct

SEQ ID NO: 2934749 - DNA, 25 bp, Homo sapien
cattacttatggaatcaaatagtgg

SEQ ID NO: 2934750 - DNA, 25 bp, Homo sapien
cataggtagatcagtgactcagaga

SEQ ID NO: 2934751 - DNA, 25 bp, Homo sapien
tccttaagtttcaatactagttggc

SEQ ID NO: 2934752 - DNA, 25 bp, Homo sapien
agttggctgaataaactaatcctcc

SEQ ID NO: 2934753 - DNA, 25 bp, Homo sapien
tttccataaattcgaccaagtggta

SEQ ID NO: 2934754 - DNA, 25 bp, Homo sapien
gtagaataggtaagtaaatcatggt

SEQ ID NO: 2934755 - DNA, 25 bp, Homo sapien
acaacccaaatgtccgtgaatagta

SEQ ID NO: 2934756 - DNA, 25 bp, Homo sapien
aattcgaccaagtggtaagcataga

SEQ ID NO: 2934757 - DNA, 25 bp, Homo sapien
tttctccatgttaggctagactcga

SEQ ID NO: 2934758 - DNA, 25 bp, Homo sapien
cagctagtactggaggtgtgtgcca

SEQ ID NO: 2934759 - DNA, 25 bp, Homo sapien
gagcctgtaatctgtgcctgtcagc

SEQ ID NO: 2934760 - DNA, 25 bp, Homo sapien
gtcagcctatgcctgaccctggcca

SEQ ID NO: 2934761 - DNA, 25 bp, Homo sapien
ggcatcgcctcacatcgctccgccc

SEQ ID NO: 2934762 - DNA, 25 bp, Homo sapien
tcggcatcgcctcacatcgctccgc

SEQ ID NO: 2934763 - DNA, 25 bp, Homo sapien
catcggcatcgcctcacatcgctcc

SEQ ID NO: 2934764 - DNA, 25 bp, Homo sapien
gccctcccattggctgccgctgagc

SEQ ID NO: 2934765 - DNA, 25 bp, Homo sapien
tgctcatctgtcacagcccttgata

SEQ ID NO: 2934766 - DNA, 25 bp, Homo sapien
cagcccttgatagctctgcctctag

SEQ ID NO: 2934767 - DNA, 25 bp, Homo sapien
ttgcagacagaccactgctcatctg

SEQ ID NO: 2934768 - DNA, 25 bp, Homo sapien
tctgcctctagttgctttcaccaca

SEQ ID NO: 2934769 - DNA, 25 bp, Homo sapien
tcttgttggcatcataggatgcaat

SEQ ID NO: 2934770 - DNA, 25 bp, Homo sapien
gcatcataggatgcaatgattaggc

SEQ ID NO: 2934771 - DNA, 25 bp, Homo sapien
tgattaggctgaagaccaagatggt

SEQ ID NO: 2934772 - DNA, 25 bp, Homo sapien
gatgcaatgattaggctgaagacca

SEQ ID NO: 2934773 - DNA, 25 bp, Homo sapien
cagtcggcaactgctatctctgagg

SEQ ID NO: 2934774 - DNA, 25 bp, Homo sapien
tctgatgcttctcacgtcttttggg

SEQ ID NO: 2934775 - DNA, 25 bp, Homo sapien
cttgcatttgcaattctctgatgct

SEQ ID NO: 2934776 - DNA, 25 bp, Homo sapien
cttttgggaagatcccaggcagctg

SEQ ID NO: 2934777 - DNA, 25 bp, Homo sapien
gccttttagaagagatccagtctga

SEQ ID NO: 2934778 - DNA, 25 bp, Homo sapien
ggagcagcaatgattctcaggttct

SEQ ID NO: 2934779 - DNA, 25 bp, Homo sapien
gcactgcagggtagctatagtccgg

SEQ ID NO: 2934780 - DNA, 25 bp, Homo sapien
gctgtcagagccaaggcactgcagg

SEQ ID NO: 2934781 - DNA, 25 bp, Homo sapien
gaaaagtctctgatgaagcccccag

SEQ ID NO: 2934782 - DNA, 25 bp, Homo sapien
ctttattcccaggagttatagaagg

SEQ ID NO: 2934783 - DNA, 25 bp, Homo sapien
tacattgtgagatccctggtaaaaa

SEQ ID NO: 2934784 - DNA, 25 bp, Homo sapien
aagcccccaggactttacattgtga

SEQ ID NO: 2934785 - DNA, 25 bp, Homo sapien
tgtctcttctctaggttctcatctg

SEQ ID NO: 2934786 - DNA, 25 bp, Homo sapien
ctgtctcttctctaggttctcatct

SEQ ID NO: 2934787 - DNA, 25 bp, Homo sapien
tctcttctctaggttctcatctgtg

SEQ ID NO: 2934788 - DNA, 25 bp, Homo sapien
ctcttctctaggttctcatctgtgt

SEQ ID NO: 2934789 - DNA, 25 bp, Homo sapien
gaattttgaccacaatactccattt

SEQ ID NO: 2934790 - DNA, 25 bp, Homo sapien
gcaatcagaattttgaccacaatac

SEQ ID NO: 2934791 - DNA, 25 bp, Homo sapien
tacaaatactataatggcaactcca

SEQ ID NO: 2934792 - DNA, 25 bp, Homo sapien
ggacatgggacttcaaaaattacaa

SEQ ID NO: 2934793 - DNA, 25 bp, Homo sapien
tcttttgccatctccacaaccactg

SEQ ID NO: 2934794 - DNA, 25 bp, Homo sapien
ggcttggattcagctgtcccaggtg

SEQ ID NO: 2934795 - DNA, 25 bp, Homo sapien
gcttcctggctcctaggcattgata

SEQ ID NO: 2934796 - DNA, 25 bp, Homo sapien
gagagtcaggcttggattcagctgt

SEQ ID NO: 2934797 - DNA, 25 bp, Homo sapien
tatgtctggtggataacagtgatct

SEQ ID NO: 2934798 - DNA, 25 bp, Homo sapien
agaagtatgtctggtggataacagt

SEQ ID NO: 2934799 - DNA, 25 bp, Homo sapien
tctggtggataacagtgatctctgc

SEQ ID NO: 2934800 - DNA, 25 bp, Homo sapien
ggataacagtgatctctgcagcttt

SEQ ID NO: 2934801 - DNA, 25 bp, Homo sapien
tcaagttcccttcagcagtgtgtgg

SEQ ID NO: 2934802 - DNA, 25 bp, Homo sapien
gatataatatcagagccaccttagg

SEQ ID NO: 2934803 - DNA, 25 bp, Homo sapien
cttataaacgtcaaccagggagatc

SEQ ID NO: 2934804 - DNA, 25 bp, Homo sapien
tctgtcaaagagagtagtaaggtcc

SEQ ID NO: 2934805 - DNA, 25 bp, Homo sapien
cattgaaagcatggaaatgcgaatc

SEQ ID NO: 2934806 - DNA, 25 bp, Homo sapien
gaatgagttcattggagtgaaagga

SEQ ID NO: 2934807 - DNA, 25 bp, Homo sapien
ttcattgaaagcatggaaatgcgaa

SEQ ID NO: 2934808 - DNA, 25 bp, Homo sapien
aggaagaatgagttcattggagtga

SEQ ID NO: 2934809 - DNA, 25 bp, Homo sapien
ttcgtgaatccaggccttcgttacc

SEQ ID NO: 2934810 - DNA, 25 bp, Homo sapien
cattaaacagttttcgtgaatccag

SEQ ID NO: 2934811 - DNA, 25 bp, Homo sapien
cagttttcgtgaatccaggccttcg

SEQ ID NO: 2934812 - DNA, 25 bp, Homo sapien
catggccattaaacagttttcgtga

SEQ ID NO: 2934813 - DNA, 25 bp, Homo sapien
ttgaggctgcattgacccagtatca

SEQ ID NO: 2934814 - DNA, 25 bp, Homo sapien
gttgatgttaggctctacttagacc

SEQ ID NO: 2934815 - DNA, 25 bp, Homo sapien
gcattgacccagtatcacaccactg

SEQ ID NO: 2934816 - DNA, 25 bp, Homo sapien
agagggcaggacacggtgcctcaca

SEQ ID NO: 2934817 - DNA, 25 bp, Homo sapien
gccaaagagccgccggtcgcgcgcg

SEQ ID NO: 2934818 - DNA, 25 bp, Homo sapien
ttcaaatgggcaacgctggtcaggg

SEQ ID NO: 2934819 - DNA, 25 bp, Homo sapien
tgggccagtcattttacctgcgcct

SEQ ID NO: 2934820 - DNA, 25 bp, Homo sapien
tcttggtagagctacgcgctccagg

SEQ ID NO: 2934821 - DNA, 25 bp, Homo sapien
cccgagttgtggagccaacgttcaa

SEQ ID NO: 2934822 - DNA, 25 bp, Homo sapien
acatacaccaaagcttgatgactcc

SEQ ID NO: 2934823 - DNA, 25 bp, Homo sapien
acacatacaccaaagcttgatgact

SEQ ID NO: 2934824 - DNA, 25 bp, Homo sapien
ttggcaacgagtgctgctttggtct

SEQ ID NO: 2934825 - DNA, 25 bp, Homo sapien
tccctaattggcaacgagtgctgct

SEQ ID NO: 2934826 - DNA, 25 bp, Homo sapien
gttattggtctaaacagaaatccca

SEQ ID NO: 2934827 - DNA, 25 bp, Homo sapien
acatttcttatcaaggtgcctgaaa

SEQ ID NO: 2934828 - DNA, 25 bp, Homo sapien
ttattggtctaaacagaaatcccat

SEQ ID NO: 2934829 - DNA, 25 bp, Homo sapien
gggacagacttgcaccactgcgcct

SEQ ID NO: 2934830 - DNA, 25 bp, Homo sapien
gaattgaaacccaggaagcttcctc

SEQ ID NO: 2934831 - DNA, 25 bp, Homo sapien
tcactgtggcttcaatctccccagg

SEQ ID NO: 2934832 - DNA, 25 bp, Homo sapien
tggtaagtacataacacagcagatc

SEQ ID NO: 2934833 - DNA, 25 bp, Homo sapien
aaaggaggtggcccacattcagcac

SEQ ID NO: 2934834 - DNA, 25 bp, Homo sapien
aaggaggtggcccacattcagcaca

SEQ ID NO: 2934835 - DNA, 25 bp, Homo sapien
caggcagccggcacaacactcagct

SEQ ID NO: 2934836 - DNA, 25 bp, Homo sapien
tgatcttgtgattcacctttcttgg

SEQ ID NO: 2934837 - DNA, 25 bp, Homo sapien
gattacaggcagccggcacaacact

SEQ ID NO: 2934838 - DNA, 25 bp, Homo sapien
ttacaggcagccggcacaacactca

SEQ ID NO: 2934839 - DNA, 25 bp, Homo sapien
tttcataagtatgatcgctttgatg

SEQ ID NO: 2934840 - DNA, 25 bp, Homo sapien
ttcataagtatgatcgctttgatgt

SEQ ID NO: 2934841 - DNA, 25 bp, Homo sapien
agctgggatcaaggacaggaaaatc

SEQ ID NO: 2934842 - DNA, 25 bp, Homo sapien
ttcttcttgagcagtccagctggga

SEQ ID NO: 2934843 - DNA, 25 bp, Homo sapien
ctgggatcaaggacaggaaaatctg

SEQ ID NO: 2934844 - DNA, 25 bp, Homo sapien
cttcttgagcagtccagctgggatc

SEQ ID NO: 2934845 - DNA, 25 bp, Homo sapien
aagccacagtccatcacagcttcta

SEQ ID NO: 2934846 - DNA, 25 bp, Homo sapien
aatttccaaagccacagtccatcac

SEQ ID NO: 2934847 - DNA, 25 bp, Homo sapien
tttccaaagccacagtccatcacag

SEQ ID NO: 2934848 - DNA, 25 bp, Homo sapien
caaagccacagtccatcacagcttc

SEQ ID NO: 2934849 - DNA, 25 bp, Homo sapien
taggaaagcaacacatactttctct

SEQ ID NO: 2934850 - DNA, 25 bp, Homo sapien
ctctaaatcatgggttgataggaaa

SEQ ID NO: 2934851 - DNA, 25 bp, Homo sapien
aggaaagcaacacatactttctctt

SEQ ID NO: 2934852 - DNA, 25 bp, Homo sapien
aaacagagggttattgatgaaatgc

SEQ ID NO: 2934853 - DNA, 25 bp, Homo sapien
tccttggtcttggtgcacatttgat

SEQ ID NO: 2934854 - DNA, 25 bp, Homo sapien
ggtagatgcaaacagagggttattg

SEQ ID NO: 2934855 - DNA, 25 bp, Homo sapien
tgcttgtttcaggttcagcagggta

SEQ ID NO: 2934856 - DNA, 25 bp, Homo sapien
tctgctactgaaacagggcccaagg

SEQ ID NO: 2934857 - DNA, 25 bp, Homo sapien
catgctgggtcgatcctgactctca

SEQ ID NO: 2934858 - DNA, 25 bp, Homo sapien
tagctgccatactaactcctcctat

SEQ ID NO: 2934859 - DNA, 25 bp, Homo sapien
tagctgtccaagtcatcaaatcact

SEQ ID NO: 2934860 - DNA, 25 bp, Homo sapien
ccatgtcccgagaaagcaaggagtc

SEQ ID NO: 2934861 - DNA, 25 bp, Homo sapien
agcaaggagtcaaaggtaggtcggg

SEQ ID NO: 2934862 - DNA, 25 bp, Homo sapien
ctcgagctggcatgtacccggccat

SEQ ID NO: 2934863 - DNA, 25 bp, Homo sapien
tcaatgaaatctgctcgagctggca

SEQ ID NO: 2934864 - DNA, 25 bp, Homo sapien
tcaagagacttgtggctacattcac

SEQ ID NO: 2934865 - DNA, 25 bp, Homo sapien
tgtaagctaccgcatttggccaaac

SEQ ID NO: 2934866 - DNA, 25 bp, Homo sapien
gttgttgaagaaacagcgttttgcc

SEQ ID NO: 2934867 - DNA, 25 bp, Homo sapien
cttttaattccatagctgagcaagg

SEQ ID NO: 2934868 - DNA, 25 bp, Homo sapien
aagtcccattctgcataattgtcaa

SEQ ID NO: 2934869 - DNA, 25 bp, Homo sapien
aaaatgtccgagtcatcttcaacaa

SEQ ID NO: 2934870 - DNA, 25 bp, Homo sapien
tcaatgtctctcaagtcccattctg

SEQ ID NO: 2934871 - DNA, 25 bp, Homo sapien
catgtaaaatgtccgagtcatcttc

SEQ ID NO: 2934872 - DNA, 25 bp, Homo sapien
gaatcacttgctcacagtctactta

SEQ ID NO: 2934873 - DNA, 25 bp, Homo sapien
ggcagaatctacaagaatgagaatc

SEQ ID NO: 2934874 - DNA, 25 bp, Homo sapien
tgagaaggcagaatctacaagaatg

SEQ ID NO: 2934875 - DNA, 25 bp, Homo sapien
tgagaatcacttgctcacagtctac

SEQ ID NO: 2934876 - DNA, 25 bp, Homo sapien
gcaaatgggaggagaactggaattc

SEQ ID NO: 2934877 - DNA, 25 bp, Homo sapien
gaattctcccagataaaaattcata

SEQ ID NO: 2934878 - DNA, 25 bp, Homo sapien
tggaattctcccagataaaaattca

SEQ ID NO: 2934879 - DNA, 25 bp, Homo sapien
ggagcaaatgggaggagaactggaa

SEQ ID NO: 2934880 - DNA, 25 bp, Homo sapien
ataaatactgctgataattggtact

SEQ ID NO: 2934881 - DNA, 25 bp, Homo sapien
gaataaatactgctgataattggta

SEQ ID NO: 2934882 - DNA, 25 bp, Homo sapien
aataaatactgctgataattggtac

SEQ ID NO: 2934883 - DNA, 25 bp, Homo sapien
tctgaaggatattcttagactggaa

SEQ ID NO: 2934884 - DNA, 25 bp, Homo sapien
gatgtccaggagtactttatccagg

SEQ ID NO: 2934885 - DNA, 25 bp, Homo sapien
tatctggataatctgaagaagggag

SEQ ID NO: 2934886 - DNA, 25 bp, Homo sapien
catgctgggctatgagcagatgtcc

SEQ ID NO: 2934887 - DNA, 25 bp, Homo sapien
cctcttgtgtctggggtagatcttg

SEQ ID NO: 2934888 - DNA, 25 bp, Homo sapien
ctggcatagcgcctcttgtgtctgg

SEQ ID NO: 2934889 - DNA, 25 bp, Homo sapien
tcttgtacctgctgaaactgcatag

SEQ ID NO: 2934890 - DNA, 25 bp, Homo sapien
catcggtcctggcatagcgcctctt

SEQ ID NO: 2934891 - DNA, 25 bp, Homo sapien
gaccagtttatttgctaaggattcc

SEQ ID NO: 2934892 - DNA, 25 bp, Homo sapien
tgccctcgcattttgcactaaggaa

SEQ ID NO: 2934893 - DNA, 25 bp, Homo sapien
acaggcttcaccatcttttgtgtag

SEQ ID NO: 2934894 - DNA, 25 bp, Homo sapien
ggtcttttcagatgctagcttagcc

SEQ ID NO: 2934895 - DNA, 25 bp, Homo sapien
gaatgatagatatctaccacagcca

SEQ ID NO: 2934896 - DNA, 25 bp, Homo sapien
tcctttaacctggaatgatagatat

SEQ ID NO: 2934897 - DNA, 25 bp, Homo sapien
cctggaatgatagatatctaccaca

SEQ ID NO: 2934898 - DNA, 25 bp, Homo sapien
taacctggaatgatagatatctacc

SEQ ID NO: 2934899 - DNA, 25 bp, Homo sapien
ttctaaggttgattaatccatggtc

SEQ ID NO: 2934900 - DNA, 25 bp, Homo sapien
ctttctaaggttgattaatccatgg

SEQ ID NO: 2934901 - DNA, 25 bp, Homo sapien
ctaaggttgattaatccatggtctc

SEQ ID NO: 2934902 - DNA, 25 bp, Homo sapien
aactttctaaggttgattaatccat

SEQ ID NO: 2934903 - DNA, 25 bp, Homo sapien
tcattaatattcacactgtaattac

SEQ ID NO: 2934904 - DNA, 25 bp, Homo sapien
tgcagcaagataccatcacaccact

SEQ ID NO: 2934905 - DNA, 25 bp, Homo sapien
gcaaaacatgactctatccagaaaa

SEQ ID NO: 2934906 - DNA, 25 bp, Homo sapien
tgtatttttatcaccgtcatataat

SEQ ID NO: 2934907 - DNA, 25 bp, Homo sapien
gctttcaatgaatttgtcatgttcc

SEQ ID NO: 2934908 - DNA, 25 bp, Homo sapien
gtcatgttccactggccccacaatt

SEQ ID NO: 2934909 - DNA, 25 bp, Homo sapien
acaattcttgcaaatcgcctcattg

SEQ ID NO: 2934910 - DNA, 25 bp, Homo sapien
cattgtttcatacaggtcctggacc

SEQ ID NO: 2934911 - DNA, 25 bp, Homo sapien
tgctcaaggctcaaaaaccacctac

SEQ ID NO: 2934912 - DNA, 25 bp, Homo sapien
cattatctctcctatttatataaat

SEQ ID NO: 2934913 - DNA, 25 bp, Homo sapien
aacttcacataaaacacaccattat

SEQ ID NO: 2934914 - DNA, 25 bp, Homo sapien
cacacaaatactgctcaaggctcaa

SEQ ID NO: 2934915 - DNA, 25 bp, Homo sapien
cttgatttcccttcggagttcaaat

SEQ ID NO: 2934916 - DNA, 25 bp, Homo sapien
tcttgatttcccttcggagttcaaa

SEQ ID NO: 2934917 - DNA, 25 bp, Homo sapien
ttcctcccgtgtcttcttgaggtga

SEQ ID NO: 2934918 - DNA, 25 bp, Homo sapien
gcaagcactactgtcctggatatac

SEQ ID NO: 2934919 - DNA, 25 bp, Homo sapien
tcttgaggtgatcgtaggttctggc

SEQ ID NO: 2934920 - DNA, 25 bp, Homo sapien
gaacttctgagagcatagtgcgttt

SEQ ID NO: 2934921 - DNA, 25 bp, Homo sapien
cgaagccattggaatggaaggactc

SEQ ID NO: 2934922 - DNA, 25 bp, Homo sapien
ttcgaagccattggaatggaaggac

SEQ ID NO: 2934923 - DNA, 25 bp, Homo sapien
tgaattcgaagccattggaatggaa

SEQ ID NO: 2934924 - DNA, 25 bp, Homo sapien
gccattggaatggaaggactcaggc

SEQ ID NO: 2934925 - DNA, 25 bp, Homo sapien
tgaggttcaagggtggtgcactccg

SEQ ID NO: 2934926 - DNA, 25 bp, Homo sapien
ccagtgaggttcaagggtggtgcac

SEQ ID NO: 2934927 - DNA, 25 bp, Homo sapien
aggccagtgaggttcaagggtggtg

SEQ ID NO: 2934928 - DNA, 25 bp, Homo sapien
ttcaagggtggtgcactccgtctac

SEQ ID NO: 2934929 - DNA, 25 bp, Homo sapien
tgtattctaaataggctccagggac

SEQ ID NO: 2934930 - DNA, 25 bp, Homo sapien
tatcttgatgagtgctcttgcctgc

SEQ ID NO: 2934931 - DNA, 25 bp, Homo sapien
tcttgcctgcgccagtcttaagcct

SEQ ID NO: 2934932 - DNA, 25 bp, Homo sapien
tgttacattcgttcaatagagcaga

SEQ ID NO: 2934933 - DNA, 25 bp, Homo sapien
cttctgatcccaagctcttggagcc

SEQ ID NO: 2934934 - DNA, 25 bp, Homo sapien
cacaactctgcagcataataccaac

SEQ ID NO: 2934935 - DNA, 25 bp, Homo sapien
ccaacaacaggagtgttttaaagca

SEQ ID NO: 2934936 - DNA, 25 bp, Homo sapien
agaaagtagacaatacaacttaagg

SEQ ID NO: 2934937 - DNA, 25 bp, Homo sapien
atggttcttttagttacaagaggtg

SEQ ID NO: 2934938 - DNA, 25 bp, Homo sapien
gatgtgaggtactatggttctttta

SEQ ID NO: 2934939 - DNA, 25 bp, Homo sapien
tgtgaggtactatggttcttttagt

SEQ ID NO: 2934940 - DNA, 25 bp, Homo sapien
tgtgatgtgaggtactatggttctt

SEQ ID NO: 2934941 - DNA, 25 bp, Homo sapien
tacctcgcaatataaggatctgagc

SEQ ID NO: 2934942 - DNA, 25 bp, Homo sapien
ggcaagacagataatcagcaaactt

SEQ ID NO: 2934943 - DNA, 25 bp, Homo sapien
tgaaggcaagacagataatcagcaa

SEQ ID NO: 2934944 - DNA, 25 bp, Homo sapien
tcagcaaacttacctcgcaatataa

SEQ ID NO: 2934945 - DNA, 25 bp, Homo sapien
tcacactccagcctggaggacaaga

SEQ ID NO: 2934946 - DNA, 25 bp, Homo sapien
ctccagcctggaggacaagagcaaa

SEQ ID NO: 2934947 - DNA, 25 bp, Homo sapien
tagtgagctgagatcttgccatcac

SEQ ID NO: 2934948 - DNA, 25 bp, Homo sapien
gctgagatcttgccatcacactcca

SEQ ID NO: 2934949 - DNA, 25 bp, Homo sapien
aaaagttgtcagcttaggccgggcg

SEQ ID NO: 2934950 - DNA, 25 bp, Homo sapien
tgggataagaccatcataaggatat

SEQ ID NO: 2934951 - DNA, 25 bp, Homo sapien
gaccatcataaggatattttcttcc

SEQ ID NO: 2934952 - DNA, 25 bp, Homo sapien
ccgaagttaaagatgcagtttggga

SEQ ID NO: 2934953 - DNA, 25 bp, Homo sapien
tactgcagattagacaggcagactg

SEQ ID NO: 2934954 - DNA, 25 bp, Homo sapien
taattctaaaaataacagagacatg

SEQ ID NO: 2934955 - DNA, 25 bp, Homo sapien
cctcctcaaaagactactgcagatt

SEQ ID NO: 2934956 - DNA, 25 bp, Homo sapien
gacatgttatatccggtgccacctc

SEQ ID NO: 2934957 - DNA, 25 bp, Homo sapien
tggccaaccctgtctagaagcaaag

SEQ ID NO: 2934958 - DNA, 25 bp, Homo sapien
gcaatcacttcacaaccaactaggg

SEQ ID NO: 2934959 - DNA, 25 bp, Homo sapien
tctgcagaaacgtttgaggaccaag

SEQ ID NO: 2934960 - DNA, 25 bp, Homo sapien
caggctagcctttcaccattgagaa

SEQ ID NO: 2934961 - DNA, 25 bp, Homo sapien
cagtcaaaacgagtaggcatgggtt

SEQ ID NO: 2934962 - DNA, 25 bp, Homo sapien
tgctcctcgccgttgcaaatggttg

SEQ ID NO: 2934963 - DNA, 25 bp, Homo sapien
aaggcccagactagagagatttatt

SEQ ID NO: 2934964 - DNA, 25 bp, Homo sapien
ccggtgcgtgctggactatctaaaa

SEQ ID NO: 2934965 - DNA, 25 bp, Homo sapien
cggcgcggcgcgggttgcggttagg

SEQ ID NO: 2934966 - DNA, 25 bp, Homo sapien
cgtcctcctgcgcggccaccggctt

SEQ ID NO: 2934967 - DNA, 25 bp, Homo sapien
ttgcggttagggctccgtcctcctg

SEQ ID NO: 2934968 - DNA, 25 bp, Homo sapien
ggccaccggcttctgcgggctgggc

SEQ ID NO: 2934969 - DNA, 25 bp, Homo sapien
gcagtcaaccgatatgaaagctttc

SEQ ID NO: 2934970 - DNA, 25 bp, Homo sapien
ggacacacacgttcaacagtgacat

SEQ ID NO: 2934971 - DNA, 25 bp, Homo sapien
tggaaagccaaaaataccaagcaac

SEQ ID NO: 2934972 - DNA, 25 bp, Homo sapien
cattaaaacgacttggaatgaagga

SEQ ID NO: 2934973 - DNA, 25 bp, Homo sapien
ttccgagcagggtgaggtaaacagc

SEQ ID NO: 2934974 - DNA, 25 bp, Homo sapien
gaggcaactggcgaaggccatgccc

SEQ ID NO: 2934975 - DNA, 25 bp, Homo sapien
tcttctgcttcagcgggatggaggc

SEQ ID NO: 2934976 - DNA, 25 bp, Homo sapien
ccatgctgagagcagtccgactgca

SEQ ID NO: 2934977 - DNA, 25 bp, Homo sapien
tggcagcacgttcgggcatctgtcc

SEQ ID NO: 2934978 - DNA, 25 bp, Homo sapien
ctgtggcagcacgttcgggcatctg

SEQ ID NO: 2934979 - DNA, 25 bp, Homo sapien
ccacataagccacgtaagcactgct

SEQ ID NO: 2934980 - DNA, 25 bp, Homo sapien
gcatctgtcccacataagccacgta

SEQ ID NO: 2934981 - DNA, 25 bp, Homo sapien
cccagagtaggcactacaagaagcc

SEQ ID NO: 2934982 - DNA, 25 bp, Homo sapien
agaaaggctaagcccagatgggccg

SEQ ID NO: 2934983 - DNA, 25 bp, Homo sapien
tgccagaacagggaactactgccac

SEQ ID NO: 2934984 - DNA, 25 bp, Homo sapien
gaaaggctaagcccagatgggccga

SEQ ID NO: 2934985 - DNA, 25 bp, Homo sapien
cagaacagggaactactgccacatc

SEQ ID NO: 2934986 - DNA, 25 bp, Homo sapien
gagaccacaacctatccgcgaaatg

SEQ ID NO: 2934987 - DNA, 25 bp, Homo sapien
tgttactgacacataacccgcggcg

SEQ ID NO: 2934988 - DNA, 25 bp, Homo sapien
cccgcggcgtgacaaataagagttt

SEQ ID NO: 2934989 - DNA, 25 bp, Homo sapien
gactttcactacgacctcaggtttg

SEQ ID NO: 2934990 - DNA, 25 bp, Homo sapien
tgggtccggatccagaaagtcctaa

SEQ ID NO: 2934991 - DNA, 25 bp, Homo sapien
tgcctgggtccggatccagaaagtc

SEQ ID NO: 2934992 - DNA, 25 bp, Homo sapien
tgcgctgcctgggtccggatccaga

SEQ ID NO: 2934993 - DNA, 25 bp, Homo sapien
cgctgcctgggtccggatccagaaa

SEQ ID NO: 2934994 - DNA, 25 bp, Homo sapien
ccaaggaatccaaaattagagtctc

SEQ ID NO: 2934995 - DNA, 25 bp, Homo sapien
aaggaatccaaaattagagtctcct

SEQ ID NO: 2934996 - DNA, 25 bp, Homo sapien
caaggaatccaaaattagagtctcc

SEQ ID NO: 2934997 - DNA, 25 bp, Homo sapien
ggaatccaaaattagagtctccttc

SEQ ID NO: 2934998 - DNA, 25 bp, Homo sapien
ggcaagaccagagtgttttattttc

SEQ ID NO: 2934999 - DNA, 25 bp, Homo sapien
cttgcatcgttggcggcaagaccag

SEQ ID NO: 2935000 - DNA, 25 bp, Homo sapien
catcgttggcggcaagaccagagtg

SEQ ID NO: 2935001 - DNA, 25 bp, Homo sapien
gttggcggcaagaccagagtgtttt

SEQ ID NO: 2935002 - DNA, 25 bp, Homo sapien
gaaatcatccgaggggccatgagag

SEQ ID NO: 2935003 - DNA, 25 bp, Homo sapien
aatagagaggaggtgatttgagcaa

SEQ ID NO: 2935004 - DNA, 25 bp, Homo sapien
agaggaggtgatttgagcaatgcct

SEQ ID NO: 2935005 - DNA, 25 bp, Homo sapien
tcctatgtctccctcggaaatcatc

SEQ ID NO: 2935006 - DNA, 25 bp, Homo sapien
gaagcctacgttgggcctgatgaca

SEQ ID NO: 2935007 - DNA, 25 bp, Homo sapien
tagacgtcgggaactatgccataag

SEQ ID NO: 2935008 - DNA, 25 bp, Homo sapien
tggatcttgtcagccacggtgtcaa

SEQ ID NO: 2935009 - DNA, 25 bp, Homo sapien
taaggcatcaggtgtcgggactcct

SEQ ID NO: 2935010 - DNA, 25 bp, Homo sapien
caatgtatgcattccctttatgtcc

SEQ ID NO: 2935011 - DNA, 25 bp, Homo sapien
taaagatttccataaacactattcc

SEQ ID NO: 2935012 - DNA, 25 bp, Homo sapien
ggagaaccagaagtcagccatttga

SEQ ID NO: 2935013 - DNA, 25 bp, Homo sapien
aaacacttgagggagaaccagaagt

SEQ ID NO: 2935014 - DNA, 25 bp, Homo sapien
gctaatataatcctgggcacatgga

SEQ ID NO: 2935015 - DNA, 25 bp, Homo sapien
tagagactgaagctggttatcaacc

SEQ ID NO: 2935016 - DNA, 25 bp, Homo sapien
tacagagtcactaaataatggaggg

SEQ ID NO: 2935017 - DNA, 25 bp, Homo sapien
taagcatctgtctggtccgcagcct

SEQ ID NO: 2935018 - DNA, 25 bp, Homo sapien
ccttgccaggccgaggaaataaagc

SEQ ID NO: 2935019 - DNA, 25 bp, Homo sapien
ctgtggcccttagcgaaatgcgttg

SEQ ID NO: 2935020 - DNA, 25 bp, Homo sapien
gctttattaaccagtgaatgctgtg

SEQ ID NO: 2935021 - DNA, 25 bp, Homo sapien
cgtgatgtggaattcgcgcctgtat

SEQ ID NO: 2935022 - DNA, 25 bp, Homo sapien
ccctgggcatgatggtaaagacccc

SEQ ID NO: 2935023 - DNA, 25 bp, Homo sapien
tttgaggctgcacgtgacagcgtag

SEQ ID NO: 2935024 - DNA, 25 bp, Homo sapien
gcatctgtggacattcgtggtccca

SEQ ID NO: 2935025 - DNA, 25 bp, Homo sapien
catgacagcagaatctacctttgca

SEQ ID NO: 2935026 - DNA, 25 bp, Homo sapien
ttaccgttgcgggactagaatgggc

SEQ ID NO: 2935027 - DNA, 25 bp, Homo sapien
gatatgaagaacaccgcaagggacg

SEQ ID NO: 2935028 - DNA, 25 bp, Homo sapien
tagaatgcgagcactgcacagttcg

SEQ ID NO: 2935029 - DNA, 25 bp, Homo sapien
gattttctgaaatacggaccacggc

SEQ ID NO: 2935030 - DNA, 25 bp, Homo sapien
tgccggccttaggaggagggcttcc

SEQ ID NO: 2935031 - DNA, 25 bp, Homo sapien
gagtgtaaaggattgcatgctgtag

SEQ ID NO: 2935032 - DNA, 25 bp, Homo sapien
tgctgtagtcagatgccggccttag

SEQ ID NO: 2935033 - DNA, 25 bp, Homo sapien
ggctacttcagttccccttatcatg

SEQ ID NO: 2935034 - DNA, 25 bp, Homo sapien
aggtggatacccagctaccccaact

SEQ ID NO: 2935035 - DNA, 25 bp, Homo sapien
ggaactctgcgacccatctgaatgg

SEQ ID NO: 2935036 - DNA, 25 bp, Homo sapien
cctttgtgtataaacggattggact

SEQ ID NO: 2935037 - DNA, 25 bp, Homo sapien
taccccaactacatgtcttcagcag

SEQ ID NO: 2935038 - DNA, 25 bp, Homo sapien
ctgttcctctaaccagcaacgtggg

SEQ ID NO: 2935039 - DNA, 25 bp, Homo sapien
taaactcggacaaatccctgggaga

SEQ ID NO: 2935040 - DNA, 25 bp, Homo sapien
gggaatattctggtctagcacctgt

SEQ ID NO: 2935041 - DNA, 25 bp, Homo sapien
ggtggacaaaactcgactgctgcgt

SEQ ID NO: 2935042 - DNA, 25 bp, Homo sapien
gaagctaccgagttccagagaaaga

SEQ ID NO: 2935043 - DNA, 25 bp, Homo sapien
gataggtgccaacatgaagctaccg

SEQ ID NO: 2935044 - DNA, 25 bp, Homo sapien
aaagggcccttcaggacctatctgt

SEQ ID NO: 2935045 - DNA, 25 bp, Homo sapien
tgctgcgagactatcaaagggccct

SEQ ID NO: 2935046 - DNA, 25 bp, Homo sapien
ggccgacatcctgagttgaatcctg

SEQ ID NO: 2935047 - DNA, 25 bp, Homo sapien
gctaaagcatcacaagagggcatct

SEQ ID NO: 2935048 - DNA, 25 bp, Homo sapien
taaaatgcgtgtacagttcctgacc

SEQ ID NO: 2935049 - DNA, 25 bp, Homo sapien
gactttagagtcaaactggcctgga

SEQ ID NO: 2935050 - DNA, 25 bp, Homo sapien
taattttatgatcccagcatgaatg

SEQ ID NO: 2935051 - DNA, 25 bp, Homo sapien
tcaactacaagtacatgggactggt

SEQ ID NO: 2935052 - DNA, 25 bp, Homo sapien
tgacatttctgtggtttgaatccag

SEQ ID NO: 2935053 - DNA, 25 bp, Homo sapien
cagtcacctgtaccaaacatttgaa

SEQ ID NO: 2935054 - DNA, 25 bp, Homo sapien
tgtactctagggctgtttatatttt

SEQ ID NO: 2935055 - DNA, 25 bp, Homo sapien
tctataatattaagtttcctagtca

SEQ ID NO: 2935056 - DNA, 25 bp, Homo sapien
aacacttgagttatacaatgatgaa

SEQ ID NO: 2935057 - DNA, 25 bp, Homo sapien
gtactgtactctagggctgtttata

SEQ ID NO: 2935058 - DNA, 25 bp, Homo sapien
tttacatttgttgcgctgctctcct

SEQ ID NO: 2935059 - DNA, 25 bp, Homo sapien
gctttgttgagccactagtagttcc

SEQ ID NO: 2935060 - DNA, 25 bp, Homo sapien
tgctgcagcatccacttccagcttt

SEQ ID NO: 2935061 - DNA, 25 bp, Homo sapien
ttgttaaggctatgccagctttgtc

SEQ ID NO: 2935062 - DNA, 25 bp, Homo sapien
gacattcgggcatacttgacaccta

SEQ ID NO: 2935063 - DNA, 25 bp, Homo sapien
tggagtgccaccgtgaggtcagcat

SEQ ID NO: 2935064 - DNA, 25 bp, Homo sapien
gagagccctttattcgaagactgga

SEQ ID NO: 2935065 - DNA, 25 bp, Homo sapien
tattgatccagccttacgtcagagc

SEQ ID NO: 2935066 - DNA, 25 bp, Homo sapien
ttctcttgccgtcatgctcccagtg

SEQ ID NO: 2935067 - DNA, 25 bp, Homo sapien
tcccagtgtctgtgtaggctttact

SEQ ID NO: 2935068 - DNA, 25 bp, Homo sapien
cactgggatcctgtagtgtgtcatc

SEQ ID NO: 2935069 - DNA, 25 bp, Homo sapien
gaattttctgtatactccactggga

SEQ ID NO: 2935070 - DNA, 25 bp, Homo sapien
aagaggtgccgagtcattgttccag

SEQ ID NO: 2935071 - DNA, 25 bp, Homo sapien
catcagaagtttaccgagtggctat

SEQ ID NO: 2935072 - DNA, 25 bp, Homo sapien
gataaaaatttcctgccctcgtggc

SEQ ID NO: 2935073 - DNA, 25 bp, Homo sapien
tcggttttacagcaagtctccccag

SEQ ID NO: 2935074 - DNA, 25 bp, Homo sapien
cctggaactagaaacagaggtggct

SEQ ID NO: 2935075 - DNA, 25 bp, Homo sapien
cacagccaaggtagggtcactaacc

SEQ ID NO: 2935076 - DNA, 25 bp, Homo sapien
tcccgagtcatgcactcaggcagac

SEQ ID NO: 2935077 - DNA, 25 bp, Homo sapien
ttctgtctgtagagccgcatggcac

SEQ ID NO: 2935078 - DNA, 25 bp, Homo sapien
agttatgtatctgggttctaaccag

SEQ ID NO: 2935079 - DNA, 25 bp, Homo sapien
taaccagtaaggttataactgtggc

SEQ ID NO: 2935080 - DNA, 25 bp, Homo sapien
gaaataggaccttccacacagggtg

SEQ ID NO: 2935081 - DNA, 25 bp, Homo sapien
tctgggctcctcaacatggtccttg

SEQ ID NO: 2935082 - DNA, 25 bp, Homo sapien
taagcgcttatattgcacaaagtgg

SEQ ID NO: 2935083 - DNA, 25 bp, Homo sapien
tacaaggtaggactaggaaggagca

SEQ ID NO: 2935084 - DNA, 25 bp, Homo sapien
tccatatgaagggactggtgaatct

SEQ ID NO: 2935085 - DNA, 25 bp, Homo sapien
catacctggacactcataggaagtt

SEQ ID NO: 2935086 - DNA, 25 bp, Homo sapien
ttgccaatctgtggaatgaccagca

SEQ ID NO: 2935087 - DNA, 25 bp, Homo sapien
tattttataccagggattgcacgtc

SEQ ID NO: 2935088 - DNA, 25 bp, Homo sapien
caaaccttgggatatgaactgcaaa

SEQ ID NO: 2935089 - DNA, 25 bp, Homo sapien
aaaacatgctgggactataagagcc

SEQ ID NO: 2935090 - DNA, 25 bp, Homo sapien
gatgcctgcccctcatagggtttgc

SEQ ID NO: 2935091 - DNA, 25 bp, Homo sapien
tttttcgtggctagtcaaggcttca

SEQ ID NO: 2935092 - DNA, 25 bp, Homo sapien
cactactacacagaggtctggcctg

SEQ ID NO: 2935093 - DNA, 25 bp, Homo sapien
catctgcccgaaggcctgcaagtag

SEQ ID NO: 2935094 - DNA, 25 bp, Homo sapien
tctggaggaccgaacatcaactgta

SEQ ID NO: 2935095 - DNA, 25 bp, Homo sapien
gatctgtggacttctagtggcctaa

SEQ ID NO: 2935096 - DNA, 25 bp, Homo sapien
ggttgacaaactgacacgtgggcca

SEQ ID NO: 2935097 - DNA, 25 bp, Homo sapien
taagtgctttatccacgggttgaca

SEQ ID NO: 2935098 - DNA, 25 bp, Homo sapien
ccgtcgcctcattacctgctttcat

SEQ ID NO: 2935099 - DNA, 25 bp, Homo sapien
tccagtgtcatcgttagcaagattc

SEQ ID NO: 2935100 - DNA, 25 bp, Homo sapien
caagattcctccgtggtccaggcag

SEQ ID NO: 2935101 - DNA, 25 bp, Homo sapien
tcgttagcaagattcctccgtggtc

SEQ ID NO: 2935102 - DNA, 25 bp, Homo sapien
tgggaaactgtgcattcctctgctc

SEQ ID NO: 2935103 - DNA, 25 bp, Homo sapien
tacaggcgagaactcctggatcagg

SEQ ID NO: 2935104 - DNA, 25 bp, Homo sapien
gctcttctactccataatggtcatc

SEQ ID NO: 2935105 - DNA, 25 bp, Homo sapien
gattatctcccatgctctacaggcg

SEQ ID NO: 2935106 - DNA, 25 bp, Homo sapien
tgtgaacttggagttaatgattaaa

SEQ ID NO: 2935107 - DNA, 25 bp, Homo sapien
tgattaaaccacgtggtagtgccat

SEQ ID NO: 2935108 - DNA, 25 bp, Homo sapien
ccagcttcagccctgtgaacttgga

SEQ ID NO: 2935109 - DNA, 25 bp, Homo sapien
cctggagacccggtctgctccccag

SEQ ID NO: 2935110 - DNA, 25 bp, Homo sapien
tcactggagcgtaggagcctgagac

SEQ ID NO: 2935111 - DNA, 25 bp, Homo sapien
gtacttcagtccctgagatgggtga

SEQ ID NO: 2935112 - DNA, 25 bp, Homo sapien
tttaggctgggtgcgctgcctgaca

SEQ ID NO: 2935113 - DNA, 25 bp, Homo sapien
tatgctttcctatggacccttgtgc

SEQ ID NO: 2935114 - DNA, 25 bp, Homo sapien
atgtcatcactgtgcagggagcatg

SEQ ID NO: 2935115 - DNA, 25 bp, Homo sapien
tcactgtgcagggagcatgctaatc

SEQ ID NO: 2935116 - DNA, 25 bp, Homo sapien
catcactgtgcagggagcatgctaa

SEQ ID NO: 2935117 - DNA, 25 bp, Homo sapien
tgcatgtcatcactgtgcagggagc

SEQ ID NO: 2935118 - DNA, 25 bp, Homo sapien
ccgtgttgaaataggtggtaacgca

SEQ ID NO: 2935119 - DNA, 25 bp, Homo sapien
taacgcaaattaatattaccctgaa

SEQ ID NO: 2935120 - DNA, 25 bp, Homo sapien
gatggtacaattgtctgccgtgttg

SEQ ID NO: 2935121 - DNA, 25 bp, Homo sapien
gctccatttgtctcagatggtacaa

SEQ ID NO: 2935122 - DNA, 25 bp, Homo sapien
tctgatgaatcagctggcctgggtc

SEQ ID NO: 2935123 - DNA, 25 bp, Homo sapien
acagataccactgcctgtgtgtaac

SEQ ID NO: 2935124 - DNA, 25 bp, Homo sapien
agagctgctcacagataccactgcc

SEQ ID NO: 2935125 - DNA, 25 bp, Homo sapien
gaaaacctttgagtccacagagctg

SEQ ID NO: 2935126 - DNA, 25 bp, Homo sapien
tttccacctgccaagggtgaagggc

SEQ ID NO: 2935127 - DNA, 25 bp, Homo sapien
ggccccagcaggttgaatggtttcc

SEQ ID NO: 2935128 - DNA, 25 bp, Homo sapien
aatggtttccacctgccaagggtga

SEQ ID NO: 2935129 - DNA, 25 bp, Homo sapien
cggccccagcaggttgaatggtttc

SEQ ID NO: 2935130 - DNA, 25 bp, Homo sapien
cctctcgctcttgtgcccaccaact

SEQ ID NO: 2935131 - DNA, 25 bp, Homo sapien
taatgatgtcctctcgctcttgtgc

SEQ ID NO: 2935132 - DNA, 25 bp, Homo sapien
atgatgtcctctcgctcttgtgccc

SEQ ID NO: 2935133 - DNA, 25 bp, Homo sapien
tcctctcgctcttgtgcccaccaac

SEQ ID NO: 2935134 - DNA, 25 bp, Homo sapien
caaatgatcgacgttgttgttgtag

SEQ ID NO: 2935135 - DNA, 25 bp, Homo sapien
ccccaaatgatcgacgttgttgttg

SEQ ID NO: 2935136 - DNA, 25 bp, Homo sapien
aatccccaaatgatcgacgttgttg

SEQ ID NO: 2935137 - DNA, 25 bp, Homo sapien
tgtacaatccccaaatgatcgacgt

SEQ ID NO: 2935138 - DNA, 25 bp, Homo sapien
tcttgtgctcacttgccgacagaac

SEQ ID NO: 2935139 - DNA, 25 bp, Homo sapien
tgccccgctcctcttgtgctcactt

SEQ ID NO: 2935140 - DNA, 25 bp, Homo sapien
ttgtgctcacttgccgacagaactg

SEQ ID NO: 2935141 - DNA, 25 bp, Homo sapien
tcctcttgtgctcacttgccgacag

SEQ ID NO: 2935142 - DNA, 25 bp, Homo sapien
ggctctgtccctttccagctcaggg

SEQ ID NO: 2935143 - DNA, 25 bp, Homo sapien
gtgccgacccccagaaaggactggc

SEQ ID NO: 2935144 - DNA, 25 bp, Homo sapien
gaggaactgcacggggcctggagcg

SEQ ID NO: 2935145 - DNA, 25 bp, Homo sapien
agcctgggtgccgacccccagaaag

SEQ ID NO: 2935146 - DNA, 25 bp, Homo sapien
gcagtcagaggaggcagctccgtct

SEQ ID NO: 2935147 - DNA, 25 bp, Homo sapien
tcgcctcccgcgcagtcagaggagg

SEQ ID NO: 2935148 - DNA, 25 bp, Homo sapien
cttcgcctcccgcgcagtcagagga

SEQ ID NO: 2935149 - DNA, 25 bp, Homo sapien
agtcagaggaggcagctccgtctca

SEQ ID NO: 2935150 - DNA, 25 bp, Homo sapien
gagcctttgagcaaatgagcaccag

SEQ ID NO: 2935151 - DNA, 25 bp, Homo sapien
gcctttgagcaaatgagcaccagtg

SEQ ID NO: 2935152 - DNA, 25 bp, Homo sapien
cctttgagcaaatgagcaccagtgg

SEQ ID NO: 2935153 - DNA, 25 bp, Homo sapien
tgagcaaatgagcaccagtgggctg

SEQ ID NO: 2935154 - DNA, 25 bp, Homo sapien
gctctttcggctgatctcccgccga

SEQ ID NO: 2935155 - DNA, 25 bp, Homo sapien
tgctctttcggctgatctcccgccg

SEQ ID NO: 2935156 - DNA, 25 bp, Homo sapien
tctttcggctgatctcccgccgaat

SEQ ID NO: 2935157 - DNA, 25 bp, Homo sapien
ctttcggctgatctcccgccgaatt

SEQ ID NO: 2935158 - DNA, 25 bp, Homo sapien
aataggcaggaaatctggcgaccag

SEQ ID NO: 2935159 - DNA, 25 bp, Homo sapien
ggcgaggacagtgtgccgcccaccc

SEQ ID NO: 2935160 - DNA, 25 bp, Homo sapien
gaaatctggcgaccaggcctgcagt

SEQ ID NO: 2935161 - DNA, 25 bp, Homo sapien
cctgcagtcctctgggcgaggacag

SEQ ID NO: 2935162 - DNA, 25 bp, Homo sapien
ttcccttgtacgctcgatctatgag

SEQ ID NO: 2935163 - DNA, 25 bp, Homo sapien
gactgaccacatcgggccccggatg

SEQ ID NO: 2935164 - DNA, 25 bp, Homo sapien
catgggcattcccttgtacgctcga

SEQ ID NO: 2935165 - DNA, 25 bp, Homo sapien
ggcattcccttgtacgctcgatcta

SEQ ID NO: 2935166 - DNA, 25 bp, Homo sapien
cccggtcgatgcgctggatgtgctc

SEQ ID NO: 2935167 - DNA, 25 bp, Homo sapien
ccggtcgatgcgctggatgtgctca

SEQ ID NO: 2935168 - DNA, 25 bp, Homo sapien
gtcccggtcgatgcgctggatgtgc

SEQ ID NO: 2935169 - DNA, 25 bp, Homo sapien
tcccggtcgatgcgctggatgtgct

SEQ ID NO: 2935170 - DNA, 25 bp, Homo sapien
ggttgtactcctcatatgccaggag

SEQ ID NO: 2935171 - DNA, 25 bp, Homo sapien
cgggttgtactcctcatatgccagg

SEQ ID NO: 2935172 - DNA, 25 bp, Homo sapien
caggaggatgtggagtagttcccgc

SEQ ID NO: 2935173 - DNA, 25 bp, Homo sapien
gaggatgtggagtagttcccgctgc

SEQ ID NO: 2935174 - DNA, 25 bp, Homo sapien
agaggcttcctctgaaggagaggct

SEQ ID NO: 2935175 - DNA, 25 bp, Homo sapien
ctggagaggcttcctctgaaggaga

SEQ ID NO: 2935176 - DNA, 25 bp, Homo sapien
tgactggagaggcttcctctgaagg

SEQ ID NO: 2935177 - DNA, 25 bp, Homo sapien
gcagaggtgactggagaggcttcct

SEQ ID NO: 2935178 - DNA, 25 bp, Homo sapien
tgcatcctcctcaggaagatagagg

SEQ ID NO: 2935179 - DNA, 25 bp, Homo sapien
gaatgcatcctcctcaggaagatag

SEQ ID NO: 2935180 - DNA, 25 bp, Homo sapien
tagaggaggaacaaggcggcgatgt

SEQ ID NO: 2935181 - DNA, 25 bp, Homo sapien
catcctcctcaggaagatagaggag

SEQ ID NO: 2935182 - DNA, 25 bp, Homo sapien
cattcgtgggcaccgatggcagcag

SEQ ID NO: 2935183 - DNA, 25 bp, Homo sapien
tcggcccattcgtgggcaccgatgg

SEQ ID NO: 2935184 - DNA, 25 bp, Homo sapien
ttggtcggcccattcgtgggcaccg

SEQ ID NO: 2935185 - DNA, 25 bp, Homo sapien
gggcaccgatggcagcaggagcccg

SEQ ID NO: 2935186 - DNA, 25 bp, Homo sapien
ccacgacagggtggccggaactggg

SEQ ID NO: 2935187 - DNA, 25 bp, Homo sapien
tcaggccacgacagggtggccggaa

SEQ ID NO: 2935188 - DNA, 25 bp, Homo sapien
caggccacgacagggtggccggaac

SEQ ID NO: 2935189 - DNA, 25 bp, Homo sapien
ggccacgacagggtggccggaactg

SEQ ID NO: 2935190 - DNA, 25 bp, Homo sapien
tcttgggttgtgacgtggctaccac

SEQ ID NO: 2935191 - DNA, 25 bp, Homo sapien
gacggtcccgccatttgggctgtga

SEQ ID NO: 2935192 - DNA, 25 bp, Homo sapien
tgatgccccatggtcttgggttgtg

SEQ ID NO: 2935193 - DNA, 25 bp, Homo sapien
acgtggctaccacatgctcctgttg

SEQ ID NO: 2935194 - DNA, 25 bp, Homo sapien
gcctaacggggaacactgcccacat

SEQ ID NO: 2935195 - DNA, 25 bp, Homo sapien
agcctaacggggaacactgcccaca

SEQ ID NO: 2935196 - DNA, 25 bp, Homo sapien
ttccctgagccctctcaagtcgggt

SEQ ID NO: 2935197 - DNA, 25 bp, Homo sapien
cagtctgcccatgaggctgggcctg

SEQ ID NO: 2935198 - DNA, 25 bp, Homo sapien
ccaggacgctgggtcagacaaggtc

SEQ ID NO: 2935199 - DNA, 25 bp, Homo sapien
gcactgcagggcaaggaaggtccct

SEQ ID NO: 2935200 - DNA, 25 bp, Homo sapien
gcgattcttgttatcggcatcaacg

SEQ ID NO: 2935201 - DNA, 25 bp, Homo sapien
ggcgattcttgttatcggcatcaac

SEQ ID NO: 2935202 - DNA, 25 bp, Homo sapien
cgattcttgttatcggcatcaacgc

SEQ ID NO: 2935203 - DNA, 25 bp, Homo sapien
gattcttgttatcggcatcaacgcc

SEQ ID NO: 2935204 - DNA, 25 bp, Homo sapien
gggatgggctcggtgtcacagtgtc

SEQ ID NO: 2935205 - DNA, 25 bp, Homo sapien
tagaggccctaagatgcttgagcac

SEQ ID NO: 2935206 - DNA, 25 bp, Homo sapien
tggaagaacgaggtgcccgtggcgg

SEQ ID NO: 2935207 - DNA, 25 bp, Homo sapien
tgtggaagaacgaggtgcccgtggc

SEQ ID NO: 2935208 - DNA, 25 bp, Homo sapien
ggcacaggcctggatgccgacgacc

SEQ ID NO: 2935209 - DNA, 25 bp, Homo sapien
ggtgtggaagaacgaggtgcccgtg

SEQ ID NO: 2935210 - DNA, 25 bp, Homo sapien
tgctgggtgcagcgaaagccgatct

SEQ ID NO: 2935211 - DNA, 25 bp, Homo sapien
ctgggtgcagcgaaagccgatctca

SEQ ID NO: 2935212 - DNA, 25 bp, Homo sapien
tgggtgcagcgaaagccgatctcac

SEQ ID NO: 2935213 - DNA, 25 bp, Homo sapien
agtgctgggtgcagcgaaagccgat

SEQ ID NO: 2935214 - DNA, 25 bp, Homo sapien
tgcttgggttgttaagcctagggaa

SEQ ID NO: 2935215 - DNA, 25 bp, Homo sapien
cagaattcagaacgatggtcgtggg

SEQ ID NO: 2935216 - DNA, 25 bp, Homo sapien
gggaaattatccagccatgagccct

SEQ ID NO: 2935217 - DNA, 25 bp, Homo sapien
cgaagcttgcttgggttgttaagcc

SEQ ID NO: 2935218 - DNA, 25 bp, Homo sapien
agggtcacatccgtctcccagaagc

SEQ ID NO: 2935219 - DNA, 25 bp, Homo sapien
tccatcctggcattacactggcctg

SEQ ID NO: 2935220 - DNA, 25 bp, Homo sapien
ttcctcctccgtgcattaacaatgg

SEQ ID NO: 2935221 - DNA, 25 bp, Homo sapien
ccaggtctaacagtcaggttcctcc

SEQ ID NO: 2935222 - DNA, 25 bp, Homo sapien
tagaactggaaaccgaacacaggtg

SEQ ID NO: 2935223 - DNA, 25 bp, Homo sapien
actgggtggtccatccccctcccag

SEQ ID NO: 2935224 - DNA, 25 bp, Homo sapien
aggtagaactggaaaccgaacacag

SEQ ID NO: 2935225 - DNA, 25 bp, Homo sapien
taggaagtgacaaggctagttgcac

SEQ ID NO: 2935226 - DNA, 25 bp, Homo sapien
gagatgtatattaggattatcccca

SEQ ID NO: 2935227 - DNA, 25 bp, Homo sapien
taatttgtaatataaccctgagatg

SEQ ID NO: 2935228 - DNA, 25 bp, Homo sapien
tcttttgaggcattactgctggaac

SEQ ID NO: 2935229 - DNA, 25 bp, Homo sapien
atttaatgagtaaacacttttatag

SEQ ID NO: 2935230 - DNA, 25 bp, Homo sapien
tatttaatgagtaaacacttttata

SEQ ID NO: 2935231 - DNA, 25 bp, Homo sapien
gctgtcgacaggtgtctgacgtgta

SEQ ID NO: 2935232 - DNA, 25 bp, Homo sapien
gtctgacgtgtaaacttggaatcaa

SEQ ID NO: 2935233 - DNA, 25 bp, Homo sapien
caggtgtctgacgtgtaaacttgga

SEQ ID NO: 2935234 - DNA, 25 bp, Homo sapien
catctgggctgtcgacaggtgtctg

SEQ ID NO: 2935235 - DNA, 25 bp, Homo sapien
gagctgcaaagcaagcaaactgaat

SEQ ID NO: 2935236 - DNA, 25 bp, Homo sapien
ttttcttatcgaagagcccatcctc

SEQ ID NO: 2935237 - DNA, 25 bp, Homo sapien
tcttatcgaagagcccatcctcata

SEQ ID NO: 2935238 - DNA, 25 bp, Homo sapien
ctacatgagctgcaaagcaagcaaa

SEQ ID NO: 2935239 - DNA, 25 bp, Homo sapien
cataacctctttggtggaccttgat

SEQ ID NO: 2935240 - DNA, 25 bp, Homo sapien
taactcgtgtagaatcataacctct

SEQ ID NO: 2935241 - DNA, 25 bp, Homo sapien
ctagagaataactcgtgtagaatca

SEQ ID NO: 2935242 - DNA, 25 bp, Homo sapien
tctttggtggaccttgatttttcca

SEQ ID NO: 2935243 - DNA, 25 bp, Homo sapien
cattgttcccgttctcgcagtggca

SEQ ID NO: 2935244 - DNA, 25 bp, Homo sapien
tccattgttcccgttctcgcagtgg

SEQ ID NO: 2935245 - DNA, 25 bp, Homo sapien
cctgttccattgttcccgttctcgc

SEQ ID NO: 2935246 - DNA, 25 bp, Homo sapien
tgttccattgttcccgttctcgcag

SEQ ID NO: 2935247 - DNA, 25 bp, Homo sapien
tcatttcaacaatggccatcgtctg

SEQ ID NO: 2935248 - DNA, 25 bp, Homo sapien
tagaacccgaaactgaacacaggtg

SEQ ID NO: 2935249 - DNA, 25 bp, Homo sapien
gtctgcatacgagctgaagtacagg

SEQ ID NO: 2935250 - DNA, 25 bp, Homo sapien
aaagttcaggttccagcttcctttg

SEQ ID NO: 2935251 - DNA, 25 bp, Homo sapien
gacagggggatgacctgaggtctgg

SEQ ID NO: 2935252 - DNA, 25 bp, Homo sapien
acagggggatgacctgaggtctgga

SEQ ID NO: 2935253 - DNA, 25 bp, Homo sapien
aacggagactactctgtcaacagac

SEQ ID NO: 2935254 - DNA, 25 bp, Homo sapien
cagacagggggatgacctgaggtct

SEQ ID NO: 2935255 - DNA, 25 bp, Homo sapien
caggagagtggtggcaggtccccca

SEQ ID NO: 2935256 - DNA, 25 bp, Homo sapien
aggagtccggaactgccaggagagt

SEQ ID NO: 2935257 - DNA, 25 bp, Homo sapien
cccaggagtccggaactgccaggag

SEQ ID NO: 2935258 - DNA, 25 bp, Homo sapien
ggttcccaggagtccggaactgcca

SEQ ID NO: 2935259 - DNA, 25 bp, Homo sapien
cagctcacgtctcttcagcttcctc

SEQ ID NO: 2935260 - DNA, 25 bp, Homo sapien
tagagggcccttggttccgccatta

SEQ ID NO: 2935261 - DNA, 25 bp, Homo sapien
agggcccttggttccgccattatga

SEQ ID NO: 2935262 - DNA, 25 bp, Homo sapien
gatttcagacagagctgctgggtcc

SEQ ID NO: 2935263 - DNA, 25 bp, Homo sapien
cgtagagggcccttggttccgccat

SEQ ID NO: 2935264 - DNA, 25 bp, Homo sapien
agcttccccgccacgggcacctcgt

SEQ ID NO: 2935265 - DNA, 25 bp, Homo sapien
cgttcttccacaccctgtcctggtg

SEQ ID NO: 2935266 - DNA, 25 bp, Homo sapien
ctcgttcttccacaccctgtcctgg

SEQ ID NO: 2935267 - DNA, 25 bp, Homo sapien
gcacctcgttcttccacaccctgtc

SEQ ID NO: 2935268 - DNA, 25 bp, Homo sapien
ccgagcaagggtcgtcggcatccag

SEQ ID NO: 2935269 - DNA, 25 bp, Homo sapien
tggagatgctgaccgcgtctgtttt

SEQ ID NO: 2935270 - DNA, 25 bp, Homo sapien
gatgctgaccgcgtctgttttcctt

SEQ ID NO: 2935271 - DNA, 25 bp, Homo sapien
caaacccgagcaagggtcgtcggca

SEQ ID NO: 2935272 - DNA, 25 bp, Homo sapien
gactgggggccgtatcccaggccca

SEQ ID NO: 2935273 - DNA, 25 bp, Homo sapien
gttctgactgggggccgtatcccag

SEQ ID NO: 2935274 - DNA, 25 bp, Homo sapien
tgactgggggccgtatcccaggccc

SEQ ID NO: 2935275 - DNA, 25 bp, Homo sapien
tctgactgggggccgtatcccaggc

SEQ ID NO: 2935276 - DNA, 25 bp, Homo sapien
tcctcttcaccttttcttcctcctc

SEQ ID NO: 2935277 - DNA, 25 bp, Homo sapien
ctgggccttcctcttcaccttttct

SEQ ID NO: 2935278 - DNA, 25 bp, Homo sapien
tcttcaccttttcttcctcctcttc

SEQ ID NO: 2935279 - DNA, 25 bp, Homo sapien
tcaccttttcttcctcctcttcctc

SEQ ID NO: 2935280 - DNA, 25 bp, Homo sapien
cacatgacccagatgaaagtcgaga

SEQ ID NO: 2935281 - DNA, 25 bp, Homo sapien
gagtgtggtgagcacttccctgtcc

SEQ ID NO: 2935282 - DNA, 25 bp, Homo sapien
gctgtgaccattcccaggtaactcc

SEQ ID NO: 2935283 - DNA, 25 bp, Homo sapien
acgaagacgtccaggtgtggcccgt

SEQ ID NO: 2935284 - DNA, 25 bp, Homo sapien
tacatccagaacgtcgccacagatt

SEQ ID NO: 2935285 - DNA, 25 bp, Homo sapien
tgccagttgtagctgctggaatgag

SEQ ID NO: 2935286 - DNA, 25 bp, Homo sapien
cagtacatccagaacgtcgccacag

SEQ ID NO: 2935287 - DNA, 25 bp, Homo sapien
ccttggacttgccagttgtagctgc

SEQ ID NO: 2935288 - DNA, 25 bp, Homo sapien
ccacagtccccgtcttctcttcact

SEQ ID NO: 2935289 - DNA, 25 bp, Homo sapien
agtccccgtcttctcttcactgatg

SEQ ID NO: 2935290 - DNA, 25 bp, Homo sapien
ccttccacagtccccgtcttctctt

SEQ ID NO: 2935291 - DNA, 25 bp, Homo sapien
acagtccccgtcttctcttcactga

SEQ ID NO: 2935292 - DNA, 25 bp, Homo sapien
ctgaagtggtgcaggtgcctggtca

SEQ ID NO: 2935293 - DNA, 25 bp, Homo sapien
caggtgcctggtcacactggaggtg

SEQ ID NO: 2935294 - DNA, 25 bp, Homo sapien
tgcctggtcacactggaggtgtaga

SEQ ID NO: 2935295 - DNA, 25 bp, Homo sapien
gcctgaagtggtgcaggtgcctggt

SEQ ID NO: 2935296 - DNA, 25 bp, Homo sapien
caggttctctgcgtgtagaagtata

SEQ ID NO: 2935297 - DNA, 25 bp, Homo sapien
gtgtagaagtataggctgagcttcc

SEQ ID NO: 2935298 - DNA, 25 bp, Homo sapien
ctgggtgccgtccaggttctctgcg

SEQ ID NO: 2935299 - DNA, 25 bp, Homo sapien
ccagcacattcaggaacggagacta

SEQ ID NO: 2935300 - DNA, 25 bp, Homo sapien
caggagagtggtggcaggtccccca

SEQ ID NO: 2935301 - DNA, 25 bp, Homo sapien
aggagtccggaactgccaggagagt

SEQ ID NO: 2935302 - DNA, 25 bp, Homo sapien
cccaggagtccggaactgccaggag

SEQ ID NO: 2935303 - DNA, 25 bp, Homo sapien
ggttcccaggagtccggaactgcca

SEQ ID NO: 2935304 - DNA, 25 bp, Homo sapien
ctcgttcttccacaccctgtcctgg

SEQ ID NO: 2935305 - DNA, 25 bp, Homo sapien
cgttcttccacaccctgtcctggtg

SEQ ID NO: 2935306 - DNA, 25 bp, Homo sapien
gcacctcgttcttccacaccctgtc

SEQ ID NO: 2935307 - DNA, 25 bp, Homo sapien
agcttccccgccacgggcacctcgt

SEQ ID NO: 2935308 - DNA, 25 bp, Homo sapien
ccgagcaagggtcgtcggcatccag

SEQ ID NO: 2935309 - DNA, 25 bp, Homo sapien
tggagatgctgaccgcgtctgtttt

SEQ ID NO: 2935310 - DNA, 25 bp, Homo sapien
gatgctgaccgcgtctgttttcctt

SEQ ID NO: 2935311 - DNA, 25 bp, Homo sapien
caaacccgagcaagggtcgtcggca

SEQ ID NO: 2935312 - DNA, 25 bp, Homo sapien
gttctgactgggggccgtatcccag

SEQ ID NO: 2935313 - DNA, 25 bp, Homo sapien
gactgggggccgtatcccaggccca

SEQ ID NO: 2935314 - DNA, 25 bp, Homo sapien
tgactgggggccgtatcccaggccc

SEQ ID NO: 2935315 - DNA, 25 bp, Homo sapien
tctgactgggggccgtatcccaggc

SEQ ID NO: 2935316 - DNA, 25 bp, Homo sapien
tcctcttcaccttttcttcctcctc

SEQ ID NO: 2935317 - DNA, 25 bp, Homo sapien
ctgggccttcctcttcaccttttct

SEQ ID NO: 2935318 - DNA, 25 bp, Homo sapien
tcaccttttcttcctcctcttcctc

SEQ ID NO: 2935319 - DNA, 25 bp, Homo sapien
tcttcaccttttcttcctcctcttc

SEQ ID NO: 2935320 - DNA, 25 bp, Homo sapien
gagtgtggtgagcacttccctgtcc

SEQ ID NO: 2935321 - DNA, 25 bp, Homo sapien
cacatgacccagatgaaagtcgaga

SEQ ID NO: 2935322 - DNA, 25 bp, Homo sapien
gctgtgaccattcccaggtaactcc

SEQ ID NO: 2935323 - DNA, 25 bp, Homo sapien
acgaagacgtccaggtgtggcccgt

SEQ ID NO: 2935324 - DNA, 25 bp, Homo sapien
aagccccagtgtgcgcagctcgagc

SEQ ID NO: 2935325 - DNA, 25 bp, Homo sapien
agactgaagccccagtgtgcgcagc

SEQ ID NO: 2935326 - DNA, 25 bp, Homo sapien
actgaagccccagtgtgcgcagctc

SEQ ID NO: 2935327 - DNA, 25 bp, Homo sapien
caggcgaccctcatggggaaggtca

SEQ ID NO: 2935328 - DNA, 25 bp, Homo sapien
gtgcacaaacacattgcaggcaggc

SEQ ID NO: 2935329 - DNA, 25 bp, Homo sapien
tgcacaaacacattgcaggcaggca

SEQ ID NO: 2935330 - DNA, 25 bp, Homo sapien
gcacaaacacattgcaggcaggcat

SEQ ID NO: 2935331 - DNA, 25 bp, Homo sapien
cctcaggacttgagactccagttgg

SEQ ID NO: 2935332 - DNA, 25 bp, Homo sapien
ccaagtgtgctttgagagtagggtg

SEQ ID NO: 2935333 - DNA, 25 bp, Homo sapien
caagtgtgctttgagagtagggtgg

SEQ ID NO: 2935334 - DNA, 25 bp, Homo sapien
ctgcctcaggacttgagactccagt

SEQ ID NO: 2935335 - DNA, 25 bp, Homo sapien
accctcctcttgaggaagcagccac

SEQ ID NO: 2935336 - DNA, 25 bp, Homo sapien
gcagatccaccctcctcttgaggaa

SEQ ID NO: 2935337 - DNA, 25 bp, Homo sapien
aggagagcagatccaccctcctctt

SEQ ID NO: 2935338 - DNA, 25 bp, Homo sapien
gggcaggagagcagatccaccctcc

SEQ ID NO: 2935339 - DNA, 25 bp, Homo sapien
gaggacgtggccagggctccaaaag

SEQ ID NO: 2935340 - DNA, 25 bp, Homo sapien
ctggggaggacgtggccagggctcc

SEQ ID NO: 2935341 - DNA, 25 bp, Homo sapien
gacgtggccagggctccaaaaggcc

SEQ ID NO: 2935342 - DNA, 25 bp, Homo sapien
tggggaggacgtggccagggctcca

SEQ ID NO: 2935343 - DNA, 25 bp, Homo sapien
acagctggctcgagtggtgcccacg

SEQ ID NO: 2935344 - DNA, 25 bp, Homo sapien
tcccagcatcctcaaaatgaggggt

SEQ ID NO: 2935345 - DNA, 25 bp, Homo sapien
tgccgtgctctcctgagtgggcgcc

SEQ ID NO: 2935346 - DNA, 25 bp, Homo sapien
gcaggtcacagctggctcgagtggt

SEQ ID NO: 2935347 - DNA, 25 bp, Homo sapien
gacacgagcaaactccggcgagaaa

SEQ ID NO: 2935348 - DNA, 25 bp, Homo sapien
tccggcgagaaagggcaacggtcaa

SEQ ID NO: 2935349 - DNA, 25 bp, Homo sapien
gcaaactccggcgagaaagggcaac

SEQ ID NO: 2935350 - DNA, 25 bp, Homo sapien
cgagaaagggcaacggtcaaagatt

SEQ ID NO: 2935351 - DNA, 25 bp, Homo sapien
gcaaatggggatagagacacgtgtc

SEQ ID NO: 2935352 - DNA, 25 bp, Homo sapien
ggatagagacacgtgtccgatggat

SEQ ID NO: 2935353 - DNA, 25 bp, Homo sapien
ccgatggatgtattggccttctcag

SEQ ID NO: 2935354 - DNA, 25 bp, Homo sapien
ggccttctcaggacaaatattccat

SEQ ID NO: 2935355 - DNA, 25 bp, Homo sapien
gggtgccagcaaagactcgaagagg

SEQ ID NO: 2935356 - DNA, 25 bp, Homo sapien
ggtgccagcaaagactcgaagaggt

SEQ ID NO: 2935357 - DNA, 25 bp, Homo sapien
ccagcaaagactcgaagaggtgcct

SEQ ID NO: 2935358 - DNA, 25 bp, Homo sapien
tgccagcaaagactcgaagaggtgc

SEQ ID NO: 2935359 - DNA, 25 bp, Homo sapien
gcctgaagtggtgcaggtgcctggt

SEQ ID NO: 2935360 - DNA, 25 bp, Homo sapien
ctgaagtggtgcaggtgcctggtca

SEQ ID NO: 2935361 - DNA, 25 bp, Homo sapien
tgcctggtcacactggaggtgtaga

SEQ ID NO: 2935362 - DNA, 25 bp, Homo sapien
caggtgcctggtcacactggaggtg

SEQ ID NO: 2935363 - DNA, 25 bp, Homo sapien
acagggggatgacctgaggtctgga

SEQ ID NO: 2935364 - DNA, 25 bp, Homo sapien
gacagggggatgacctgaggtctgg

SEQ ID NO: 2935365 - DNA, 25 bp, Homo sapien
agacagggggatgacctgaggtctg

SEQ ID NO: 2935366 - DNA, 25 bp, Homo sapien
cagacagggggatgacctgaggtct

SEQ ID NO: 2935367 - DNA, 25 bp, Homo sapien
tctctgcatgtagaagtataggctg

SEQ ID NO: 2935368 - DNA, 25 bp, Homo sapien
agaagtataggctgagcttcccgga

SEQ ID NO: 2935369 - DNA, 25 bp, Homo sapien
ccagcacattcaggaacggagacta

SEQ ID NO: 2935370 - DNA, 25 bp, Homo sapien
tgggtgccgtccaggttctctgcat

SEQ ID NO: 2935371 - DNA, 25 bp, Homo sapien
caggagagtggtggcaggtccccca

SEQ ID NO: 2935372 - DNA, 25 bp, Homo sapien
aggagtccggaactgccaggagagt

SEQ ID NO: 2935373 - DNA, 25 bp, Homo sapien
cccaggagtccggaactgccaggag

SEQ ID NO: 2935374 - DNA, 25 bp, Homo sapien
ggttcccaggagtccggaactgcca

SEQ ID NO: 2935375 - DNA, 25 bp, Homo sapien
ctcgttcttccacaccctgtcctgg

SEQ ID NO: 2935376 - DNA, 25 bp, Homo sapien
cgttcttccacaccctgtcctggtg

SEQ ID NO: 2935377 - DNA, 25 bp, Homo sapien
gcacctcgttcttccacaccctgtc

SEQ ID NO: 2935378 - DNA, 25 bp, Homo sapien
agcttccccgccacgggcacctcgt

SEQ ID NO: 2935379 - DNA, 25 bp, Homo sapien
tggagatgctgaccgcgtctgtttt

SEQ ID NO: 2935380 - DNA, 25 bp, Homo sapien
ccgagcaagggtcgtcggcatccag

SEQ ID NO: 2935381 - DNA, 25 bp, Homo sapien
gatgctgaccgcgtctgttttcctt

SEQ ID NO: 2935382 - DNA, 25 bp, Homo sapien
caaacccgagcaagggtcgtcggca

SEQ ID NO: 2935383 - DNA, 25 bp, Homo sapien
gttctgactgggggccgtatcccag

SEQ ID NO: 2935384 - DNA, 25 bp, Homo sapien
gactgggggccgtatcccaggccca

SEQ ID NO: 2935385 - DNA, 25 bp, Homo sapien
tgactgggggccgtatcccaggccc

SEQ ID NO: 2935386 - DNA, 25 bp, Homo sapien
tctgactgggggccgtatcccaggc

SEQ ID NO: 2935387 - DNA, 25 bp, Homo sapien
tcctcttcaccttttcttcctcctc

SEQ ID NO: 2935388 - DNA, 25 bp, Homo sapien
ctgggccttcctcttcaccttttct

SEQ ID NO: 2935389 - DNA, 25 bp, Homo sapien
tcttcaccttttcttcctcctcttc

SEQ ID NO: 2935390 - DNA, 25 bp, Homo sapien
tcaccttttcttcctcctcttcctc

SEQ ID NO: 2935391 - DNA, 25 bp, Homo sapien
gagtgtggtgagcacttccctgtcc

SEQ ID NO: 2935392 - DNA, 25 bp, Homo sapien
gctgtgaccattcccaggtaactcc

SEQ ID NO: 2935393 - DNA, 25 bp, Homo sapien
cacatgacccagatgaaagtcgaga

SEQ ID NO: 2935394 - DNA, 25 bp, Homo sapien
acgaagacgtccaggtgtggcccgt

SEQ ID NO: 2935395 - DNA, 25 bp, Homo sapien
caggcgaccctcatggggaaggtca

SEQ ID NO: 2935396 - DNA, 25 bp, Homo sapien
aagccccagtgtgcgcagctcgagc

SEQ ID NO: 2935397 - DNA, 25 bp, Homo sapien
agactgaagccccagtgtgcgcagc

SEQ ID NO: 2935398 - DNA, 25 bp, Homo sapien
actgaagccccagtgtgcgcagctc

SEQ ID NO: 2935399 - DNA, 25 bp, Homo sapien
cctcaggacttgagactccagttgg

SEQ ID NO: 2935400 - DNA, 25 bp, Homo sapien
ccaagtgtgctttgagagtagggtg

SEQ ID NO: 2935401 - DNA, 25 bp, Homo sapien
ctgcctcaggacttgagactccagt

SEQ ID NO: 2935402 - DNA, 25 bp, Homo sapien
caagtgtgctttgagagtagggtgg

SEQ ID NO: 2935403 - DNA, 25 bp, Homo sapien
gcacagtaatcgctaatcccttaga

SEQ ID NO: 2935404 - DNA, 25 bp, Homo sapien
tttaaacatagggagactgcattgc

SEQ ID NO: 2935405 - DNA, 25 bp, Homo sapien
ctaagtgttgaacggccggctcagt

SEQ ID NO: 2935406 - DNA, 25 bp, Homo sapien
tcatcccgccagtgggttgctctgg

SEQ ID NO: 2935407 - DNA, 25 bp, Homo sapien
ggtactgcttgaactgtaactatgc

SEQ ID NO: 2935408 - DNA, 25 bp, Homo sapien
cttttatgccctacggtgagaagga

SEQ ID NO: 2935409 - DNA, 25 bp, Homo sapien
tatgggacctgtcagtataggtact

SEQ ID NO: 2935410 - DNA, 25 bp, Homo sapien
tgtaggccttctttgaactgtgaac

SEQ ID NO: 2935411 - DNA, 25 bp, Homo sapien
gtctgggcttcagatgttcagaagt

SEQ ID NO: 2935412 - DNA, 25 bp, Homo sapien
cttgccaaatttttcaggattggga

SEQ ID NO: 2935413 - DNA, 25 bp, Homo sapien
gggtcatttactcaagcttcttgtc

SEQ ID NO: 2935414 - DNA, 25 bp, Homo sapien
tcatctttcctggtaggatatcact

SEQ ID NO: 2935415 - DNA, 25 bp, Homo sapien
taaaaaatcaattgctgtgtgagag

SEQ ID NO: 2935416 - DNA, 25 bp, Homo sapien
tattgtacggactttgtatcaccta

SEQ ID NO: 2935417 - DNA, 25 bp, Homo sapien
tcctggttctagatacaactgatac

SEQ ID NO: 2935418 - DNA, 25 bp, Homo sapien
tgaagaagccttagtagccagataa

SEQ ID NO: 2935419 - DNA, 25 bp, Homo sapien
cagaagtagttgtgaaaagggaagc

SEQ ID NO: 2935420 - DNA, 25 bp, Homo sapien
cagtttgaagatcatcaacaaaggg

SEQ ID NO: 2935421 - DNA, 25 bp, Homo sapien
tgtagttgtcactcccttgggattg

SEQ ID NO: 2935422 - DNA, 25 bp, Homo sapien
ggttaggtttgctcttgtagttgtc

SEQ ID NO: 2935423 - DNA, 25 bp, Homo sapien
ccctagggtatttgtgctatgcctc

SEQ ID NO: 2935424 - DNA, 25 bp, Homo sapien
ttcaaggcactagatcccaaaggct

SEQ ID NO: 2935425 - DNA, 25 bp, Homo sapien
ggcttcccagggctaaagagtatga

SEQ ID NO: 2935426 - DNA, 25 bp, Homo sapien
ggatcttagatgcttaccttatggt

SEQ ID NO: 2935427 - DNA, 25 bp, Homo sapien
cttgacaccaactatcatgtgccct

SEQ ID NO: 2935428 - DNA, 25 bp, Homo sapien
gacaccaactatcatgtgccctttt

SEQ ID NO: 2935429 - DNA, 25 bp, Homo sapien
ttgacaccaactatcatgtgccctt

SEQ ID NO: 2935430 - DNA, 25 bp, Homo sapien
accaactatcatgtgccctttttgc

SEQ ID NO: 2935431 - DNA, 25 bp, Homo sapien
tgggcattgctgtatgcttggcaca

SEQ ID NO: 2935432 - DNA, 25 bp, Homo sapien
gcctgcgcccgaggctttctgaagg

SEQ ID NO: 2935433 - DNA, 25 bp, Homo sapien
gcgccctccgccgaaatgtgagcag

SEQ ID NO: 2935434 - DNA, 25 bp, Homo sapien
aaaagccgcatagggtggagctagc

SEQ ID NO: 2935435 - DNA, 25 bp, Homo sapien
gataaacaagagaacccttgaggta

SEQ ID NO: 2935436 - DNA, 25 bp, Homo sapien
ctgccgagaccaccagcccaaaacc

SEQ ID NO: 2935437 - DNA, 25 bp, Homo sapien
cagcccaaaaccctcgataaacaag

SEQ ID NO: 2935438 - DNA, 25 bp, Homo sapien
ccctcgataaacaagagaacccttg

SEQ ID NO: 2935439 - DNA, 25 bp, Homo sapien
cagacagacccaaaccaatccggaa

SEQ ID NO: 2935440 - DNA, 25 bp, Homo sapien
ttaatatctcctcgccagacagacc

SEQ ID NO: 2935441 - DNA, 25 bp, Homo sapien
ctttaatatctcctcgccagacaga

SEQ ID NO: 2935442 - DNA, 25 bp, Homo sapien
tcctttaatatctcctcgccagaca

SEQ ID NO: 2935443 - DNA, 25 bp, Homo sapien
aatttaggttgataaataggaggtg

SEQ ID NO: 2935444 - DNA, 25 bp, Homo sapien
ttaggttgataaataggaggtgtga

SEQ ID NO: 2935445 - DNA, 25 bp, Homo sapien
tgataaataggaggtgtgaaacgtt

SEQ ID NO: 2935446 - DNA, 25 bp, Homo sapien
ggttgataaataggaggtgtgaaac

SEQ ID NO: 2935447 - DNA, 25 bp, Homo sapien
atggaacggtccgatttttctggag

SEQ ID NO: 2935448 - DNA, 25 bp, Homo sapien
caatcctgctttccgggcatgttgc

SEQ ID NO: 2935449 - DNA, 25 bp, Homo sapien
ctgtacaggccagatgtatggaacg

SEQ ID NO: 2935450 - DNA, 25 bp, Homo sapien
ccaatcctgctttccgggcatgttg

SEQ ID NO: 2935451 - DNA, 25 bp, Homo sapien
tctctctatcagtccctcctttgaa

SEQ ID NO: 2935452 - DNA, 25 bp, Homo sapien
taaagttggcatcatagtcttttat

SEQ ID NO: 2935453 - DNA, 25 bp, Homo sapien
tagacaaaggtgagcttcaataaag

SEQ ID NO: 2935454 - DNA, 25 bp, Homo sapien
agttggcatcatagtcttttatcct

SEQ ID NO: 2935455 - DNA, 25 bp, Homo sapien
tatttagacaaaggtgagcttcaat

SEQ ID NO: 2935456 - DNA, 25 bp, Homo sapien
ccaaggtatgaagtcggtcatggtc

SEQ ID NO: 2935457 - DNA, 25 bp, Homo sapien
ggtatgaagtcggtcatggtctgag

SEQ ID NO: 2935458 - DNA, 25 bp, Homo sapien
taccaaggtatgaagtcggtcatgg

SEQ ID NO: 2935459 - DNA, 25 bp, Homo sapien
aaggtatgaagtcggtcatggtctg

SEQ ID NO: 2935460 - DNA, 25 bp, Homo sapien
aacaggcagcacgtttcccaccaca

SEQ ID NO: 2935461 - DNA, 25 bp, Homo sapien
cctgcaagactacagccaacaggca

SEQ ID NO: 2935462 - DNA, 25 bp, Homo sapien
gcaagactacagccaacaggcagca

SEQ ID NO: 2935463 - DNA, 25 bp, Homo sapien
acaggcagcacgtttcccaccacat

SEQ ID NO: 2935464 - DNA, 25 bp, Homo sapien
tgtgcatgcgtacggtgatctggcc

SEQ ID NO: 2935465 - DNA, 25 bp, Homo sapien
cagcgaacttgaacaacatgagagg

SEQ ID NO: 2935466 - DNA, 25 bp, Homo sapien
cacaaagctccagcggacggtctta

SEQ ID NO: 2935467 - DNA, 25 bp, Homo sapien
ggccgtacacgttgccctggttcat

SEQ ID NO: 2935468 - DNA, 25 bp, Homo sapien
cttaaggatgggctgcttagggggt

SEQ ID NO: 2935469 - DNA, 25 bp, Homo sapien
tgtcaactgcttttcgaatacaaca

SEQ ID NO: 2935470 - DNA, 25 bp, Homo sapien
taaggatgggctgcttagggggtgc

SEQ ID NO: 2935471 - DNA, 25 bp, Homo sapien
tcaactgcttttcgaatacaacata

SEQ ID NO: 2935472 - DNA, 25 bp, Homo sapien
gtttcagctgagggccagggatcat

SEQ ID NO: 2935473 - DNA, 25 bp, Homo sapien
agctgagggccagggatcatcaccg

SEQ ID NO: 2935474 - DNA, 25 bp, Homo sapien
tcaggctagctgaggcttctgggcc

SEQ ID NO: 2935475 - DNA, 25 bp, Homo sapien
tctccttgtgcctcttcatattctt

SEQ ID NO: 2935476 - DNA, 25 bp, Homo sapien
ttcaaactctgatccctgccctgtg

SEQ ID NO: 2935477 - DNA, 25 bp, Homo sapien
tgctagaaatcagggaaccaagtac

SEQ ID NO: 2935478 - DNA, 25 bp, Homo sapien
aaagtcacatcgctcacaagtaggc

SEQ ID NO: 2935479 - DNA, 25 bp, Homo sapien
ccatctgaaggctggtccatgccca

SEQ ID NO: 2935480 - DNA, 25 bp, Homo sapien
cactcagatggcctaggacacatgg

SEQ ID NO: 2935481 - DNA, 25 bp, Homo sapien
cacccttttaacagcccatctggag

SEQ ID NO: 2935482 - DNA, 25 bp, Homo sapien
tgggcatgtgaggtcccacaccctt

SEQ ID NO: 2935483 - DNA, 25 bp, Homo sapien
aacaaagtgatttctcttgtcacac

SEQ ID NO: 2935484 - DNA, 25 bp, Homo sapien
tgctctgctagtgcccaggtcagtg

SEQ ID NO: 2935485 - DNA, 25 bp, Homo sapien
cagtaacagaagatagataaggaaa

SEQ ID NO: 2935486 - DNA, 25 bp, Homo sapien
caaagctcaaggtgcactgcagtct

SEQ ID NO: 2935487 - DNA, 25 bp, Homo sapien
tcttgggactttgggttatctggct

SEQ ID NO: 2935488 - DNA, 25 bp, Homo sapien
cgcgggccgggccgcgcgaggaagg

SEQ ID NO: 2935489 - DNA, 25 bp, Homo sapien
gccgggccgcgcgaggaagggtggc

SEQ ID NO: 2935490 - DNA, 25 bp, Homo sapien
ccgcgcgaggaagggtggcggcggg

SEQ ID NO: 2935491 - DNA, 25 bp, Homo sapien
cgggccgcgcgaggaagggtggcgg

SEQ ID NO: 2935492 - DNA, 25 bp, Homo sapien
ctgcgcctctagtccagccgccggg

SEQ ID NO: 2935493 - DNA, 25 bp, Homo sapien
gacacagcagttccgagggtcccgg

SEQ ID NO: 2935494 - DNA, 25 bp, Homo sapien
agagccgccaactgcgcctctagtc

SEQ ID NO: 2935495 - DNA, 25 bp, Homo sapien
aggtccgctcgagcgccaagcccgg

SEQ ID NO: 2935496 - DNA, 25 bp, Homo sapien
agcaacccccaccgactgtcttgac

SEQ ID NO: 2935497 - DNA, 25 bp, Homo sapien
gcagcaacccccaccgactgtcttg

SEQ ID NO: 2935498 - DNA, 25 bp, Homo sapien
cagcaacccccaccgactgtcttga

SEQ ID NO: 2935499 - DNA, 25 bp, Homo sapien
ggcagcaacccccaccgactgtctt

SEQ ID NO: 2935500 - DNA, 25 bp, Homo sapien
gcggggcggcagcaggcggctgggg

SEQ ID NO: 2935501 - DNA, 25 bp, Homo sapien
ctgcggggcggcagcaggcggctgg

SEQ ID NO: 2935502 - DNA, 25 bp, Homo sapien
tgcggggcggcagcaggcggctggg

SEQ ID NO: 2935503 - DNA, 25 bp, Homo sapien
agcagcgcgtcgctcgtttccgtgg

SEQ ID NO: 2935504 - DNA, 25 bp, Homo sapien
agctcctcttccgagcagctgttag

SEQ ID NO: 2935505 - DNA, 25 bp, Homo sapien
ctctcggcctccgattccaagccct

SEQ ID NO: 2935506 - DNA, 25 bp, Homo sapien
cagctgttagtctccaggctctcgg

SEQ ID NO: 2935507 - DNA, 25 bp, Homo sapien
cccctctactcaggcgccccagagg

SEQ ID NO: 2935508 - DNA, 25 bp, Homo sapien
cttccgagaaggacccgcgagtggc

SEQ ID NO: 2935509 - DNA, 25 bp, Homo sapien
gctgctcccctctactcaggcgccc

SEQ ID NO: 2935510 - DNA, 25 bp, Homo sapien
ttccgagaaggacccgcgagtggcc

SEQ ID NO: 2935511 - DNA, 25 bp, Homo sapien
gagccaccgttgcagctcttggtgc

SEQ ID NO: 2935512 - DNA, 25 bp, Homo sapien
ctcttggtgcgaaagaggcgactga

SEQ ID NO: 2935513 - DNA, 25 bp, Homo sapien
gtctgtcaggctcgcagctgaagca

SEQ ID NO: 2935514 - DNA, 25 bp, Homo sapien
cgactgaggcggattttgaaggagc

SEQ ID NO: 2935515 - DNA, 25 bp, Homo sapien
aagaatccatcacgtaaaccacaac

SEQ ID NO: 2935516 - DNA, 25 bp, Homo sapien
tttcactgacaccaaagttgacagc

SEQ ID NO: 2935517 - DNA, 25 bp, Homo sapien
ggctgccagtatgtctcaagaatcc

SEQ ID NO: 2935518 - DNA, 25 bp, Homo sapien
tactacaaggtaactaatttcactg

SEQ ID NO: 2935519 - DNA, 25 bp, Homo sapien
ctcagccatttggccgtttgcctct

SEQ ID NO: 2935520 - DNA, 25 bp, Homo sapien
aggaagctgcattactctgccatct

SEQ ID NO: 2935521 - DNA, 25 bp, Homo sapien
gccatttggccgtttgcctcttttc

SEQ ID NO: 2935522 - DNA, 25 bp, Homo sapien
caaaggaagctgcattactctgcca

SEQ ID NO: 2935523 - DNA, 25 bp, Homo sapien
ttgagttcttgtcaacttgggtttc

SEQ ID NO: 2935524 - DNA, 25 bp, Homo sapien
acatccacaagcgacacagtttcac

SEQ ID NO: 2935525 - DNA, 25 bp, Homo sapien
gtcaggccccgctgagaaatgtcca

SEQ ID NO: 2935526 - DNA, 25 bp, Homo sapien
gagaggtcaggccccgctgagaaat

SEQ ID NO: 2935527 - DNA, 25 bp, Homo sapien
tccacatccacaagcgacacagttt

SEQ ID NO: 2935528 - DNA, 25 bp, Homo sapien
aaggaagaccccatcggagccacaa

SEQ ID NO: 2935529 - DNA, 25 bp, Homo sapien
gagccacaaggacagatgtaggcag

SEQ ID NO: 2935530 - DNA, 25 bp, Homo sapien
caaggacagatgtaggcagcgtccc

SEQ ID NO: 2935531 - DNA, 25 bp, Homo sapien
tgtaggcagcgtcccactgatatca

SEQ ID NO: 2935532 - DNA, 25 bp, Homo sapien
gctcggatgggagcaatccggggaa

SEQ ID NO: 2935533 - DNA, 25 bp, Homo sapien
gttggctgtgcagggattcagctgc

SEQ ID NO: 2935534 - DNA, 25 bp, Homo sapien
tgcaaagctgctcgagtcaggccgg

SEQ ID NO: 2935535 - DNA, 25 bp, Homo sapien
aagctgctcgagtcaggccggtaga

SEQ ID NO: 2935536 - DNA, 25 bp, Homo sapien
cattctagtgtggtgggtgataccc

SEQ ID NO: 2935537 - DNA, 25 bp, Homo sapien
tgataccctgtgatcggaaactgag

SEQ ID NO: 2935538 - DNA, 25 bp, Homo sapien
tgaggctcaggatgtaacgaggatc

SEQ ID NO: 2935539 - DNA, 25 bp, Homo sapien
gaggatcagaactgtctcgtaccag

SEQ ID NO: 2935540 - DNA, 25 bp, Homo sapien
ggctctgtcacagatcctatgaagt

SEQ ID NO: 2935541 - DNA, 25 bp, Homo sapien
aggtacgcatgacagtgcccagcta

SEQ ID NO: 2935542 - DNA, 25 bp, Homo sapien
ctctgtcacagatcctatgaagtca

SEQ ID NO: 2935543 - DNA, 25 bp, Homo sapien
actacaggtacgcatgacagtgccc

SEQ ID NO: 2935544 - DNA, 25 bp, Homo sapien
ccattcttggagtgcataatggctc

SEQ ID NO: 2935545 - DNA, 25 bp, Homo sapien
tcaaacttgggatgacaccacaggc

SEQ ID NO: 2935546 - DNA, 25 bp, Homo sapien
caacagattgacagcggtcctcaaa

SEQ ID NO: 2935547 - DNA, 25 bp, Homo sapien
gcataatggctctcttaataaactc

SEQ ID NO: 2935548 - DNA, 25 bp, Homo sapien
gagctgactaccctactcttgctgg

SEQ ID NO: 2935549 - DNA, 25 bp, Homo sapien
taaataaagagcctggccaagtacc

SEQ ID NO: 2935550 - DNA, 25 bp, Homo sapien
gcagagtcaactcctataaggaagg

SEQ ID NO: 2935551 - DNA, 25 bp, Homo sapien
tcttctttgagatttcccgggcttg

SEQ ID NO: 2935552 - DNA, 25 bp, Homo sapien
cacttagggtcgaggggcaatagct

SEQ ID NO: 2935553 - DNA, 25 bp, Homo sapien
cttctttggccctatccttcaaaga

SEQ ID NO: 2935554 - DNA, 25 bp, Homo sapien
cccagtaaacatggttctaccttct

SEQ ID NO: 2935555 - DNA, 25 bp, Homo sapien
ttcaaagagaggtcacttagggtcg

SEQ ID NO: 2935556 - DNA, 25 bp, Homo sapien
agccttgacctacccggcctaagag

SEQ ID NO: 2935557 - DNA, 25 bp, Homo sapien
ttatccaggctagttagaactcttg

SEQ ID NO: 2935558 - DNA, 25 bp, Homo sapien
aggtctctctacattatccaggcta

SEQ ID NO: 2935559 - DNA, 25 bp, Homo sapien
ctacccggcctaagagatcctccta

SEQ ID NO: 2935560 - DNA, 25 bp, Homo sapien
gatcactgacaacatactttccggg

SEQ ID NO: 2935561 - DNA, 25 bp, Homo sapien
caaggcctttccatgatcactgaca

SEQ ID NO: 2935562 - DNA, 25 bp, Homo sapien
tgaaagcatgtacaccgcatcccaa

SEQ ID NO: 2935563 - DNA, 25 bp, Homo sapien
tactgaacaagttaagctcatctta

SEQ ID NO: 2935564 - DNA, 25 bp, Homo sapien
aatcgggacactggatagagcagct

SEQ ID NO: 2935565 - DNA, 25 bp, Homo sapien
ctggagggatttgacattgctgaat

SEQ ID NO: 2935566 - DNA, 25 bp, Homo sapien
gagctgtcgtatccggaatctgcaa

SEQ ID NO: 2935567 - DNA, 25 bp, Homo sapien
tgtgatctatcctgacgagctgtcg

SEQ ID NO: 2935568 - DNA, 25 bp, Homo sapien
ccacaacccccttactcattcctgt

SEQ ID NO: 2935569 - DNA, 25 bp, Homo sapien
cacaacccccttactcattcctgtc

SEQ ID NO: 2935570 - DNA, 25 bp, Homo sapien
cccacaacccccttactcattcctg

SEQ ID NO: 2935571 - DNA, 25 bp, Homo sapien
ctttcggatataagagatcagaggt

SEQ ID NO: 2935572 - DNA, 25 bp, Homo sapien
ctgtttggaaatgagctgcgcttcc

SEQ ID NO: 2935573 - DNA, 25 bp, Homo sapien
tcctttagagacaggtatacctctt

SEQ ID NO: 2935574 - DNA, 25 bp, Homo sapien
aatgagctgcgcttcctttagagac

SEQ ID NO: 2935575 - DNA, 25 bp, Homo sapien
tcttcctgaggatcatagtagtaga

SEQ ID NO: 2935576 - DNA, 25 bp, Homo sapien
tggtggtgaccagcagggagcccct

SEQ ID NO: 2935577 - DNA, 25 bp, Homo sapien
gtggtgaccagcagggagcccctcg

SEQ ID NO: 2935578 - DNA, 25 bp, Homo sapien
ccttggtggtgaccagcagggagcc

SEQ ID NO: 2935579 - DNA, 25 bp, Homo sapien
cttggtggtgaccagcagggagccc

SEQ ID NO: 2935580 - DNA, 25 bp, Homo sapien
gccagagagctctgtatttctgcag

SEQ ID NO: 2935581 - DNA, 25 bp, Homo sapien
gtatttctgcagcttctgtcaactg

SEQ ID NO: 2935582 - DNA, 25 bp, Homo sapien
tcacacctggccagagagctctgta

SEQ ID NO: 2935583 - DNA, 25 bp, Homo sapien
cctggccagagagctctgtatttct

SEQ ID NO: 2935584 - DNA, 25 bp, Homo sapien
agtacggtcatgtgcttcttccaag

SEQ ID NO: 2935585 - DNA, 25 bp, Homo sapien
tcaaagctggagcttggcaaccaaa

SEQ ID NO: 2935586 - DNA, 25 bp, Homo sapien
tcatggtagcttaatttggttcttc

SEQ ID NO: 2935587 - DNA, 25 bp, Homo sapien
tgcacagagaatcccaaccttcctg

SEQ ID NO: 2935588 - DNA, 25 bp, Homo sapien
cctaagtcatgagtacagtttgcca

SEQ ID NO: 2935589 - DNA, 25 bp, Homo sapien
gggaaacacgattgccatgacagct

SEQ ID NO: 2935590 - DNA, 25 bp, Homo sapien
caactagtacagcttccatgagagg

SEQ ID NO: 2935591 - DNA, 25 bp, Homo sapien
catgaagaacctggaaacatgctcc

SEQ ID NO: 2935592 - DNA, 25 bp, Homo sapien
ggaagactggtcactccacgtggga

SEQ ID NO: 2935593 - DNA, 25 bp, Homo sapien
gatgtaacattcacttggcctaggc

SEQ ID NO: 2935594 - DNA, 25 bp, Homo sapien
cagtgggtccctagatgtaagcctt

SEQ ID NO: 2935595 - DNA, 25 bp, Homo sapien
caatatctagcgcaaagccaggcac

SEQ ID NO: 2935596 - DNA, 25 bp, Homo sapien
cattttgtgctgagtgtgaaggctc

SEQ ID NO: 2935597 - DNA, 25 bp, Homo sapien
aagcagggtctaccacagggacgtg

SEQ ID NO: 2935598 - DNA, 25 bp, Homo sapien
aggaagaaactgagcgacacctgcc

SEQ ID NO: 2935599 - DNA, 25 bp, Homo sapien
gacaggtccttttctggcagattag

SEQ ID NO: 2935600 - DNA, 25 bp, Homo sapien
ctcttcatcgagtttcttaaaaaca

SEQ ID NO: 2935601 - DNA, 25 bp, Homo sapien
tacaaacacaagagtcaaatgtctc

SEQ ID NO: 2935602 - DNA, 25 bp, Homo sapien
cccattctggaactaatctacaggg

SEQ ID NO: 2935603 - DNA, 25 bp, Homo sapien
tccctttacgagagtcaaacatgcc

SEQ ID NO: 2935604 - DNA, 25 bp, Homo sapien
cccatttaagattggcctgcaagtc

SEQ ID NO: 2935605 - DNA, 25 bp, Homo sapien
gtttctccgtgtgggtgatctcttt

SEQ ID NO: 2935606 - DNA, 25 bp, Homo sapien
atgggggtttctccgtgtgggtgat

SEQ ID NO: 2935607 - DNA, 25 bp, Homo sapien
gatgggggtttctccgtgtgggtga

SEQ ID NO: 2935608 - DNA, 25 bp, Homo sapien
ggggtttctccgtgtgggtgatctc

SEQ ID NO: 2935609 - DNA, 25 bp, Homo sapien
ccgaccaggcagaaggcgactccat

SEQ ID NO: 2935610 - DNA, 25 bp, Homo sapien
gaccaggcagaaggcgactccattc

SEQ ID NO: 2935611 - DNA, 25 bp, Homo sapien
ggcggggcgggatcccgaccaggca

SEQ ID NO: 2935612 - DNA, 25 bp, Homo sapien
gatcccgaccaggcagaaggcgact

SEQ ID NO: 2935613 - DNA, 25 bp, Homo sapien
tcacaagaaacaggggggcctggat

SEQ ID NO: 2935614 - DNA, 25 bp, Homo sapien
tctgaaggcgggttgtttgaagcgg

SEQ ID NO: 2935615 - DNA, 25 bp, Homo sapien
tgacaaactggcacaatttcacaag

SEQ ID NO: 2935616 - DNA, 25 bp, Homo sapien
cagattggtactgccctgctgacaa

SEQ ID NO: 2935617 - DNA, 25 bp, Homo sapien
tgaagacattggcttgtgtaggctg

SEQ ID NO: 2935618 - DNA, 25 bp, Homo sapien
acgattaccatggtgaagacattgg

SEQ ID NO: 2935619 - DNA, 25 bp, Homo sapien
ttggcttgtgtaggctgcaggtcca

SEQ ID NO: 2935620 - DNA, 25 bp, Homo sapien
tttccaacgattaccatggtgaaga

SEQ ID NO: 2935621 - DNA, 25 bp, Homo sapien
cttggaggttccttctggtcacccg

SEQ ID NO: 2935622 - DNA, 25 bp, Homo sapien
tggccaaaatcccactgacgctgtg

SEQ ID NO: 2935623 - DNA, 25 bp, Homo sapien
tctaaaggtcgtggtaaggctctgc

SEQ ID NO: 2935624 - DNA, 25 bp, Homo sapien
gcctctaaaggtcgtggtaaggctc

SEQ ID NO: 2935625 - DNA, 25 bp, Homo sapien
ggccctcaaacccaccaagcacaca

SEQ ID NO: 2935626 - DNA, 25 bp, Homo sapien
cacacacatgcccattccaacgcgc

SEQ ID NO: 2935627 - DNA, 25 bp, Homo sapien
ctggcacgcatcaggtccttggcgt

SEQ ID NO: 2935628 - DNA, 25 bp, Homo sapien
tgccatccccagtcatgcacaaact

SEQ ID NO: 2935629 - DNA, 25 bp, Homo sapien
aaattggccaaacgtgatggcacac

SEQ ID NO: 2935630 - DNA, 25 bp, Homo sapien
gcaaaattggccaaacgtgatggca

SEQ ID NO: 2935631 - DNA, 25 bp, Homo sapien
ttggccaaacgtgatggcacacact

SEQ ID NO: 2935632 - DNA, 25 bp, Homo sapien
caaaattggccaaacgtgatggcac

SEQ ID NO: 2935633 - DNA, 25 bp, Homo sapien
agccacaaagtaaacaccagggcca

SEQ ID NO: 2935634 - DNA, 25 bp, Homo sapien
cagccacaaagtaaacaccagggcc

SEQ ID NO: 2935635 - DNA, 25 bp, Homo sapien
ggtgcgtctagccagccacaaagta

SEQ ID NO: 2935636 - DNA, 25 bp, Homo sapien
agaaaagggtgcgtctagccagcca

SEQ ID NO: 2935637 - DNA, 25 bp, Homo sapien
gggccgctgctaggcgcccggcaga

SEQ ID NO: 2935638 - DNA, 25 bp, Homo sapien
gcagtccacgccgacggcgcgctcc

SEQ ID NO: 2935639 - DNA, 25 bp, Homo sapien
gcgcggcggtcgctgtggctgaggc

SEQ ID NO: 2935640 - DNA, 25 bp, Homo sapien
cgctccacgcgccacacggcgctgc

SEQ ID NO: 2935641 - DNA, 25 bp, Homo sapien
agctttagcccagtctctcccacgg

SEQ ID NO: 2935642 - DNA, 25 bp, Homo sapien
tgtagctttagcccagtctctccca

SEQ ID NO: 2935643 - DNA, 25 bp, Homo sapien
ccagtctctcccacggtgccctgca

SEQ ID NO: 2935644 - DNA, 25 bp, Homo sapien
cagtctctcccacggtgccctgcac

SEQ ID NO: 2935645 - DNA, 25 bp, Homo sapien
ttgtcttagctcatgcacaatctca

SEQ ID NO: 2935646 - DNA, 25 bp, Homo sapien
ccaggaagtgcctgtcgttgtctta

SEQ ID NO: 2935647 - DNA, 25 bp, Homo sapien
acctactatgtgcaggaccctggat

SEQ ID NO: 2935648 - DNA, 25 bp, Homo sapien
ctatgtgcaggaccctggatacagc

SEQ ID NO: 2935649 - DNA, 25 bp, Homo sapien
gggcgcctaggagagcacccatctc

SEQ ID NO: 2935650 - DNA, 25 bp, Homo sapien
gcgcctaggagagcacccatctctt

SEQ ID NO: 2935651 - DNA, 25 bp, Homo sapien
gcctaggagagcacccatctcttgg

SEQ ID NO: 2935652 - DNA, 25 bp, Homo sapien
aaggggcgcctaggagagcacccat

SEQ ID NO: 2935653 - DNA, 25 bp, Homo sapien
tacacgatgaagtggcgcagagtga

SEQ ID NO: 2935654 - DNA, 25 bp, Homo sapien
tcgggtgggtacacgatgaagtggc

SEQ ID NO: 2935655 - DNA, 25 bp, Homo sapien
cggccgactcgggtgggtacacgat

SEQ ID NO: 2935656 - DNA, 25 bp, Homo sapien
tgggtacacgatgaagtggcgcaga

SEQ ID NO: 2935657 - DNA, 25 bp, Homo sapien
cctccacggcctccattctcttcct

SEQ ID NO: 2935658 - DNA, 25 bp, Homo sapien
ctcctccacggcctccattctcttc

SEQ ID NO: 2935659 - DNA, 25 bp, Homo sapien
ctccacggcctccattctcttcctc

SEQ ID NO: 2935660 - DNA, 25 bp, Homo sapien
tcctccacggcctccattctcttcc

SEQ ID NO: 2935661 - DNA, 25 bp, Homo sapien
gggcagggccgtcttccttcacatt

SEQ ID NO: 2935662 - DNA, 25 bp, Homo sapien
tgtccatgggctccaggcggtaccg

SEQ ID NO: 2935663 - DNA, 25 bp, Homo sapien
gccctatgggcagggccgtcttcct

SEQ ID NO: 2935664 - DNA, 25 bp, Homo sapien
tgtgcgaagccccgccctatgggca

SEQ ID NO: 2935665 - DNA, 25 bp, Homo sapien
tatgacctgagagtaggtcttccca

SEQ ID NO: 2935666 - DNA, 25 bp, Homo sapien
taggtcttcccaatgacgctttccc

SEQ ID NO: 2935667 - DNA, 25 bp, Homo sapien
tgacgctttccccattcacctttac

SEQ ID NO: 2935668 - DNA, 25 bp, Homo sapien
ggatcagagctatgacctgagagta

SEQ ID NO: 2935669 - DNA, 25 bp, Homo sapien
cttgggcatgatagacagctccaga

SEQ ID NO: 2935670 - DNA, 25 bp, Homo sapien
ccttgggcatgatagacagctccag

SEQ ID NO: 2935671 - DNA, 25 bp, Homo sapien
gtggcacacggagccccgggtcact

SEQ ID NO: 2935672 - DNA, 25 bp, Homo sapien
tcaggcaccatagtggccctggtgg

SEQ ID NO: 2935673 - DNA, 25 bp, Homo sapien
atgctgcgggcctctccagaatacg

SEQ ID NO: 2935674 - DNA, 25 bp, Homo sapien
atacggctcgttccctttcaggtag

SEQ ID NO: 2935675 - DNA, 25 bp, Homo sapien
tccaaccggtcctgggaggcgctgc

SEQ ID NO: 2935676 - DNA, 25 bp, Homo sapien
caaccggtcctgggaggcgctgcgg

SEQ ID NO: 2935677 - DNA, 25 bp, Homo sapien
ccaaccggtcctgggaggcgctgcg

SEQ ID NO: 2935678 - DNA, 25 bp, Homo sapien
aaccggtcctgggaggcgctgcggg

SEQ ID NO: 2935679 - DNA, 25 bp, Homo sapien
cgggtggcccggctcaagtagtcat

SEQ ID NO: 2935680 - DNA, 25 bp, Homo sapien
gccccagtgcctcggcagaacgggt

SEQ ID NO: 2935681 - DNA, 25 bp, Homo sapien
tgcgggcagacgaacgctgggaagc

SEQ ID NO: 2935682 - DNA, 25 bp, Homo sapien
gtagtcatctgagcgagctcggtgc

SEQ ID NO: 2935683 - DNA, 25 bp, Homo sapien
ggtcagctgaaccttgcggcccgtc

SEQ ID NO: 2935684 - DNA, 25 bp, Homo sapien
gctgtagctccggtagccgatgtac

SEQ ID NO: 2935685 - DNA, 25 bp, Homo sapien
ggactcgtcaccaaatccaaggttc

SEQ ID NO: 2935686 - DNA, 25 bp, Homo sapien
gccgtacaaccctgggtggctcgga

SEQ ID NO: 2935687 - DNA, 25 bp, Homo sapien
tgcagtcctgcgagtaatggcgtcc

SEQ ID NO: 2935688 - DNA, 25 bp, Homo sapien
gcagaggcagggacgtgcttggctt

SEQ ID NO: 2935689 - DNA, 25 bp, Homo sapien
tggcgtccgagggtgaaagtgaagg

SEQ ID NO: 2935690 - DNA, 25 bp, Homo sapien
cgtgcttggcttggaggtcaatgct

SEQ ID NO: 2935691 - DNA, 25 bp, Homo sapien
ggtgttgagtccatcatcgcaggac

SEQ ID NO: 2935692 - DNA, 25 bp, Homo sapien
ttgagtccatcatcgcaggacttgg

SEQ ID NO: 2935693 - DNA, 25 bp, Homo sapien
gaaggtgttgagtccatcatcgcag

SEQ ID NO: 2935694 - DNA, 25 bp, Homo sapien
cggaaggtgttgagtccatcatcgc

SEQ ID NO: 2935695 - DNA, 25 bp, Homo sapien
caggctgggtatgcggtttggcagg

SEQ ID NO: 2935696 - DNA, 25 bp, Homo sapien
gcaggctgggtatgcggtttggcag

SEQ ID NO: 2935697 - DNA, 25 bp, Homo sapien
gctgaaggtcgcatctgagaggtca

SEQ ID NO: 2935698 - DNA, 25 bp, Homo sapien
tcagaggttgagtgtcgcttagaag

SEQ ID NO: 2935699 - DNA, 25 bp, Homo sapien
agtgtcgcttagaaggagcgtcagc

SEQ ID NO: 2935700 - DNA, 25 bp, Homo sapien
tgaaggtcgcatctgagaggtcaga

SEQ ID NO: 2935701 - DNA, 25 bp, Homo sapien
cgcccccgcaccccggcatcacggc

SEQ ID NO: 2935702 - DNA, 25 bp, Homo sapien
catcgtgtggatcctgagctgtgag

SEQ ID NO: 2935703 - DNA, 25 bp, Homo sapien
aaccagacaaagagaccccgtggct

SEQ ID NO: 2935704 - DNA, 25 bp, Homo sapien
atctggcctcccatcgtgtggatcc

SEQ ID NO: 2935705 - DNA, 25 bp, Homo sapien
tcagctctccgaacaaaccagacaa

SEQ ID NO: 2935706 - DNA, 25 bp, Homo sapien
acccgcttccactggcgcaggccgc

SEQ ID NO: 2935707 - DNA, 25 bp, Homo sapien
actggcgcaggccgctgcccgcttt

SEQ ID NO: 2935708 - DNA, 25 bp, Homo sapien
cttccactggcgcaggccgctgccc

SEQ ID NO: 2935709 - DNA, 25 bp, Homo sapien
cccgcttccactggcgcaggccgct

SEQ ID NO: 2935710 - DNA, 25 bp, Homo sapien
cttgctcagcgagagcgagcgcgcc

SEQ ID NO: 2935711 - DNA, 25 bp, Homo sapien
ccttgctcagcgagagcgagcgcgc

SEQ ID NO: 2935712 - DNA, 25 bp, Homo sapien
ctccttgctcagcgagagcgagcgc

SEQ ID NO: 2935713 - DNA, 25 bp, Homo sapien
tccttgctcagcgagagcgagcgcg

SEQ ID NO: 2935714 - DNA, 25 bp, Homo sapien
ccgatgcagacgggcgccgcctcgt

SEQ ID NO: 2935715 - DNA, 25 bp, Homo sapien
ctgtaggagatgtccacgaggcagg

SEQ ID NO: 2935716 - DNA, 25 bp, Homo sapien
aggagccgatgcagacgggcgccgc

SEQ ID NO: 2935717 - DNA, 25 bp, Homo sapien
agatgtccacgaggcaggagccgat

SEQ ID NO: 2935718 - DNA, 25 bp, Homo sapien
aagtcagcggtggtcagccggaaca

SEQ ID NO: 2935719 - DNA, 25 bp, Homo sapien
cggaacacgtgcctcctcttggtct

SEQ ID NO: 2935720 - DNA, 25 bp, Homo sapien
gatattcacagaagtcagcggtggt

SEQ ID NO: 2935721 - DNA, 25 bp, Homo sapien
ggtggtcagccggaacacgtgcctc

SEQ ID NO: 2935722 - DNA, 25 bp, Homo sapien
cggatcgctctgatccagcccagca

SEQ ID NO: 2935723 - DNA, 25 bp, Homo sapien
agcccagcatgtcatcccggtcctc

SEQ ID NO: 2935724 - DNA, 25 bp, Homo sapien
tgttctcccggatcgctctgatcca

SEQ ID NO: 2935725 - DNA, 25 bp, Homo sapien
gccctgctgttctcccggatcgctc

SEQ ID NO: 2935726 - DNA, 25 bp, Homo sapien
ctcactttgcgataatcgttaagct

SEQ ID NO: 2935727 - DNA, 25 bp, Homo sapien
gcgataatcgttaagcttcttgctg

SEQ ID NO: 2935728 - DNA, 25 bp, Homo sapien
tttgcgataatcgttaagcttcttg

SEQ ID NO: 2935729 - DNA, 25 bp, Homo sapien
gatcagagcttggttggcacagccg

SEQ ID NO: 2935730 - DNA, 25 bp, Homo sapien
ttgaggaactcagacttgaggcccc

SEQ ID NO: 2935731 - DNA, 25 bp, Homo sapien
cctgaggccacgtgccgcactctgc

SEQ ID NO: 2935732 - DNA, 25 bp, Homo sapien
gaggccacgtgccgcactctgcttg

SEQ ID NO: 2935733 - DNA, 25 bp, Homo sapien
ccccaggccgcgagagcctttgggg

SEQ ID NO: 2935734 - DNA, 25 bp, Homo sapien
tgaccccaaacgccctcggagcggc

SEQ ID NO: 2935735 - DNA, 25 bp, Homo sapien
cagcctgaccccaaacgccctcgga

SEQ ID NO: 2935736 - DNA, 25 bp, Homo sapien
agcctgaccccaaacgccctcggag

SEQ ID NO: 2935737 - DNA, 25 bp, Homo sapien
cctgaccccaaacgccctcggagcg

SEQ ID NO: 2935738 - DNA, 25 bp, Homo sapien
ttgagctgctcctgtaggctggaca

SEQ ID NO: 2935739 - DNA, 25 bp, Homo sapien
gctgctgatcacattgaggtcttgc

SEQ ID NO: 2935740 - DNA, 25 bp, Homo sapien
agcaggctgctgatcacattgaggt

SEQ ID NO: 2935741 - DNA, 25 bp, Homo sapien
ggcagctttcggaagaaggacttga

SEQ ID NO: 2935742 - DNA, 25 bp, Homo sapien
tgaaaagaggctcgggcagctttcg

SEQ ID NO: 2935743 - DNA, 25 bp, Homo sapien
tacactcgggtgtgcacctgacctg

SEQ ID NO: 2935744 - DNA, 25 bp, Homo sapien
ggacatggacaccaaggttcagcag

SEQ ID NO: 2935745 - DNA, 25 bp, Homo sapien
atttgggaggcaataccatctgagc

SEQ ID NO: 2935746 - DNA, 25 bp, Homo sapien
acaccaaggttcagcaggtcagaag

SEQ ID NO: 2935747 - DNA, 25 bp, Homo sapien
gctcccgtgcgtcctcaatgcggtt

SEQ ID NO: 2935748 - DNA, 25 bp, Homo sapien
cattcgctcccgtgcgtcctcaatg

SEQ ID NO: 2935749 - DNA, 25 bp, Homo sapien
agcgtcctcattcgctcccgtgcgt

SEQ ID NO: 2935750 - DNA, 25 bp, Homo sapien
aatgcggttggcctcgatgaagtcg

SEQ ID NO: 2935751 - DNA, 25 bp, Homo sapien
tgagcgtttcatagtagtgtcctgg

SEQ ID NO: 2935752 - DNA, 25 bp, Homo sapien
gagatggcccacaaggaatttgagc

SEQ ID NO: 2935753 - DNA, 25 bp, Homo sapien
tctcagagtggtcagcgatggtctt

SEQ ID NO: 2935754 - DNA, 25 bp, Homo sapien
tagtagtgtcctgggagatcccgga

SEQ ID NO: 2935755 - DNA, 25 bp, Homo sapien
cagtgtctccacgatcttgtagcgg

SEQ ID NO: 2935756 - DNA, 25 bp, Homo sapien
tctgtcatgttgtcctcagacgtcc

SEQ ID NO: 2935757 - DNA, 25 bp, Homo sapien
gtcctcaccagtgtcggcccaaaga

SEQ ID NO: 2935758 - DNA, 25 bp, Homo sapien
cacgatcttgtagcggtcaggcatg

SEQ ID NO: 2935759 - DNA, 25 bp, Homo sapien
gttaacatggctcagctgctcacca

SEQ ID NO: 2935760 - DNA, 25 bp, Homo sapien
tggtgttcccagtgtccggatgcag

SEQ ID NO: 2935761 - DNA, 25 bp, Homo sapien
caggctttggttagtcagatctggc

SEQ ID NO: 2935762 - DNA, 25 bp, Homo sapien
gagtctggcctttgggttgatagca

SEQ ID NO: 2935763 - DNA, 25 bp, Homo sapien
gaaaaatgcaagctctggccgggca

SEQ ID NO: 2935764 - DNA, 25 bp, Homo sapien
aaaaatgcaagctctggccgggcac

SEQ ID NO: 2935765 - DNA, 25 bp, Homo sapien
cttcgtcactgaagaaccagtctga

SEQ ID NO: 2935766 - DNA, 25 bp, Homo sapien
ctcccttgtcctcttcgtcactgaa

SEQ ID NO: 2935767 - DNA, 25 bp, Homo sapien
cttgtcctcttcgtcactgaagaac

SEQ ID NO: 2935768 - DNA, 25 bp, Homo sapien
cctcttcgtcactgaagaaccagtc

SEQ ID NO: 2935769 - DNA, 25 bp, Homo sapien
tgttgggcaggaggtactcaatgtt

SEQ ID NO: 2935770 - DNA, 25 bp, Homo sapien
tgccaatgttgggcaggaggtactc

SEQ ID NO: 2935771 - DNA, 25 bp, Homo sapien
ccaatgttgggcaggaggtactcaa

SEQ ID NO: 2935772 - DNA, 25 bp, Homo sapien
aatgttgggcaggaggtactcaatg

SEQ ID NO: 2935773 - DNA, 25 bp, Homo sapien
aaggctgaggaaagaaaccagtgag

SEQ ID NO: 2935774 - DNA, 25 bp, Homo sapien
gagggcgaacaaagctccgaccctg

SEQ ID NO: 2935775 - DNA, 25 bp, Homo sapien
gaacatgcccagaaggacacagcca

SEQ ID NO: 2935776 - DNA, 25 bp, Homo sapien
cccatctccatggtggccggcaggg

SEQ ID NO: 2935777 - DNA, 25 bp, Homo sapien
gccctaggagtatgatggacatctg

SEQ ID NO: 2935778 - DNA, 25 bp, Homo sapien
gaaaccagggaattctgaaacatga

SEQ ID NO: 2935779 - DNA, 25 bp, Homo sapien
agaaagctgagtcttatgcacacaa

SEQ ID NO: 2935780 - DNA, 25 bp, Homo sapien
tgatgtccatctatgggagagggat

SEQ ID NO: 2935781 - DNA, 25 bp, Homo sapien
gacttggctgaactacaggtggtag

SEQ ID NO: 2935782 - DNA, 25 bp, Homo sapien
tggacttggctgaactacaggtggt

SEQ ID NO: 2935783 - DNA, 25 bp, Homo sapien
cttggctgaactacaggtggtagaa

SEQ ID NO: 2935784 - DNA, 25 bp, Homo sapien
cttggacttggctgaactacaggtg

SEQ ID NO: 2935785 - DNA, 25 bp, Homo sapien
caaaaaccaaagtgggctgccttgt

SEQ ID NO: 2935786 - DNA, 25 bp, Homo sapien
acaaaaaccaaagtgggctgccttg

SEQ ID NO: 2935787 - DNA, 25 bp, Homo sapien
ctgccttgtacagggatcaagcctt

SEQ ID NO: 2935788 - DNA, 25 bp, Homo sapien
gtgggctgccttgtacagggatcaa

SEQ ID NO: 2935789 - DNA, 25 bp, Homo sapien
ttgggcactcggtacctcctgcctt

SEQ ID NO: 2935790 - DNA, 25 bp, Homo sapien
ccccatggtccaactgccattccct

SEQ ID NO: 2935791 - DNA, 25 bp, Homo sapien
agggaccatcaactttccccatggt

SEQ ID NO: 2935792 - DNA, 25 bp, Homo sapien
atcaactttccccatggtccaactg

SEQ ID NO: 2935793 - DNA, 25 bp, Homo sapien
aggccaggtccttctactacagcag

SEQ ID NO: 2935794 - DNA, 25 bp, Homo sapien
ttatagcaccccacagatttactga

SEQ ID NO: 2935795 - DNA, 25 bp, Homo sapien
ccaaactactaaatggtggagccag

SEQ ID NO: 2935796 - DNA, 25 bp, Homo sapien
cactgccaaggtaagcaatttctca

SEQ ID NO: 2935797 - DNA, 25 bp, Homo sapien
tcactctattgccaaggctgggaat

SEQ ID NO: 2935798 - DNA, 25 bp, Homo sapien
cactctattgccaaggctgggaatg

SEQ ID NO: 2935799 - DNA, 25 bp, Homo sapien
tattgccaaggctgggaatgcaatg

SEQ ID NO: 2935800 - DNA, 25 bp, Homo sapien
ctctattgccaaggctgggaatgca

SEQ ID NO: 2935801 - DNA, 25 bp, Homo sapien
ttcttgcgcttgcggttgacggccg

SEQ ID NO: 2935802 - DNA, 25 bp, Homo sapien
acagggtggagtagcccgacacaat

SEQ ID NO: 2935803 - DNA, 25 bp, Homo sapien
cgacacaatggagcgcgtgtccgcg

SEQ ID NO: 2935804 - DNA, 25 bp, Homo sapien
tggctcagctcgctacgctcgtcgt

SEQ ID NO: 2935805 - DNA, 25 bp, Homo sapien
gcgcgccagagtgtcgcagggcatg

SEQ ID NO: 2935806 - DNA, 25 bp, Homo sapien
gctgaaggacggccggcgtgtcagg

SEQ ID NO: 2935807 - DNA, 25 bp, Homo sapien
gggcatgaggtggtgcgagctgaag

SEQ ID NO: 2935808 - DNA, 25 bp, Homo sapien
cgcgccctcgccgtctgggcggccc

SEQ ID NO: 2935809 - DNA, 25 bp, Homo sapien
ctccatgcgcgagggccgggaggcc

SEQ ID NO: 2935810 - DNA, 25 bp, Homo sapien
gcgagggccgggaggccagcgccgc

SEQ ID NO: 2935811 - DNA, 25 bp, Homo sapien
catgcgcgagggccgggaggccagc

SEQ ID NO: 2935812 - DNA, 25 bp, Homo sapien
tgcgcgagggccgggaggccagcgc

SEQ ID NO: 2935813 - DNA, 25 bp, Homo sapien
caggcgcacggcgagcatgtcgtcc

SEQ ID NO: 2935814 - DNA, 25 bp, Homo sapien
ccaggctgctgagtccggagtcctt

SEQ ID NO: 2935815 - DNA, 25 bp, Homo sapien
agtccttgttgtcactgtgcgcccg

SEQ ID NO: 2935816 - DNA, 25 bp, Homo sapien
ccactcgttgaagttgaggtcagtc

SEQ ID NO: 2935817 - DNA, 25 bp, Homo sapien
tcagaaggacctatcgggcgcatgt

SEQ ID NO: 2935818 - DNA, 25 bp, Homo sapien
gctcagaccccataaatcagtgtgt

SEQ ID NO: 2935819 - DNA, 25 bp, Homo sapien
tcgctactggaaacaccttgggaca

SEQ ID NO: 2935820 - DNA, 25 bp, Homo sapien
aacaagaggactgatagacgtggca

SEQ ID NO: 2935821 - DNA, 25 bp, Homo sapien
ccaagcgtggtgacatggccccgta

SEQ ID NO: 2935822 - DNA, 25 bp, Homo sapien
accagcctggttaagatagcatgac

SEQ ID NO: 2935823 - DNA, 25 bp, Homo sapien
agcgtggtgacatggccccgtagtc

SEQ ID NO: 2935824 - DNA, 25 bp, Homo sapien
tggttaagatagcatgacctcatct

SEQ ID NO: 2935825 - DNA, 25 bp, Homo sapien
catgttggtgtagcagtgatggctt

SEQ ID NO: 2935826 - DNA, 25 bp, Homo sapien
tgtggatattctgtgacctctgtcg

SEQ ID NO: 2935827 - DNA, 25 bp, Homo sapien
tcagtttttctagccaagtgtttgg

SEQ ID NO: 2935828 - DNA, 25 bp, Homo sapien
catccaccctgtagggcccatgttg

SEQ ID NO: 2935829 - DNA, 25 bp, Homo sapien
gcacgtcggcctggcttctgtggtc

SEQ ID NO: 2935830 - DNA, 25 bp, Homo sapien
tctccctggccactgttttggcggg

SEQ ID NO: 2935831 - DNA, 25 bp, Homo sapien
cttttaattgcaggcaactctttac

SEQ ID NO: 2935832 - DNA, 25 bp, Homo sapien
catttttgtaccaaggcgagcaagc

SEQ ID NO: 2935833 - DNA, 25 bp, Homo sapien
cgtttctcgataccttcctggagga

SEQ ID NO: 2935834 - DNA, 25 bp, Homo sapien
gggacatcggaccaacccatacatc

SEQ ID NO: 2935835 - DNA, 25 bp, Homo sapien
tgaaccacggagacttggagcagtg

SEQ ID NO: 2935836 - DNA, 25 bp, Homo sapien
cccatacatcaagccagagagcggg

SEQ ID NO: 2935837 - DNA, 25 bp, Homo sapien
tagcagcttgaggatatcaggaccc

SEQ ID NO: 2935838 - DNA, 25 bp, Homo sapien
caggaaccctgattcaaaatggata

SEQ ID NO: 2935839 - DNA, 25 bp, Homo sapien
tagatcaataaagcaacactgggcc

SEQ ID NO: 2935840 - DNA, 25 bp, Homo sapien
tatcctgtaaccaagaaggctggaa

SEQ ID NO: 2935841 - DNA, 25 bp, Homo sapien
tggaggactccctgtacaaggcggc

SEQ ID NO: 2935842 - DNA, 25 bp, Homo sapien
ccgcgctgcagtccgatctggagga

SEQ ID NO: 2935843 - DNA, 25 bp, Homo sapien
cttcgtcaccgcagaagctggccga

SEQ ID NO: 2935844 - DNA, 25 bp, Homo sapien
ggctcctcgtccgtctttgccgaga

SEQ ID NO: 2935845 - DNA, 25 bp, Homo sapien
aagtggctgccgtcactcagaggct

SEQ ID NO: 2935846 - DNA, 25 bp, Homo sapien
acaaccagatttcttgcccagggac

SEQ ID NO: 2935847 - DNA, 25 bp, Homo sapien
taaagtacggttgaaatcatcctga

SEQ ID NO: 2935848 - DNA, 25 bp, Homo sapien
tgggcaggtcgtctcaaatccgggt

SEQ ID NO: 2935849 - DNA, 25 bp, Homo sapien
caggtgtattcctcatccggcagga

SEQ ID NO: 2935850 - DNA, 25 bp, Homo sapien
tcagagtcccctgtgtacgtcccca

SEQ ID NO: 2935851 - DNA, 25 bp, Homo sapien
tccaccccggtaggctgtgtgcgaa

SEQ ID NO: 2935852 - DNA, 25 bp, Homo sapien
gaggtagcaggtgtattcctcatcc

SEQ ID NO: 2935853 - DNA, 25 bp, Homo sapien
gaggctggcagtgatagtaatacat

SEQ ID NO: 2935854 - DNA, 25 bp, Homo sapien
agaggctggcagtgatagtaataca

SEQ ID NO: 2935855 - DNA, 25 bp, Homo sapien
cgacaggatgcttgcgtcggattca

SEQ ID NO: 2935856 - DNA, 25 bp, Homo sapien
gacaggatgcttgcgtcggattcag

SEQ ID NO: 2935857 - DNA, 25 bp, Homo sapien
ggatgcttgcgtcggattcagggct

SEQ ID NO: 2935858 - DNA, 25 bp, Homo sapien
caggatgcttgcgtcggattcaggg

SEQ ID NO: 2935859 - DNA, 25 bp, Homo sapien
ggtgtcccctgaacaccagccctta

SEQ ID NO: 2935860 - DNA, 25 bp, Homo sapien
caaaggtgtcccctgaacaccagcc

SEQ ID NO: 2935861 - DNA, 25 bp, Homo sapien
ggcctcaaaggtgtcccctgaacac

SEQ ID NO: 2935862 - DNA, 25 bp, Homo sapien
tcagggcctcaaaggtgtcccctga

SEQ ID NO: 2935863 - DNA, 25 bp, Homo sapien
gaggagctccttgattttggccaga

SEQ ID NO: 2935864 - DNA, 25 bp, Homo sapien
ttatgttcctagagctagaccttga

SEQ ID NO: 2935865 - DNA, 25 bp, Homo sapien
tcctagagctagaccttgatttcct

SEQ ID NO: 2935866 - DNA, 25 bp, Homo sapien
tgttcctagagctagaccttgattt

SEQ ID NO: 2935867 - DNA, 25 bp, Homo sapien
cagttggtgggagattgaagaacgg

SEQ ID NO: 2935868 - DNA, 25 bp, Homo sapien
tgaagaacggttgtatgacgaatag

SEQ ID NO: 2935869 - DNA, 25 bp, Homo sapien
tatgagcacatacagatggtaacag

SEQ ID NO: 2935870 - DNA, 25 bp, Homo sapien
tgacgaatagttgaatagagggagt

SEQ ID NO: 2935871 - DNA, 25 bp, Homo sapien
aagaatctccgggatctggatggaa

SEQ ID NO: 2935872 - DNA, 25 bp, Homo sapien
gggcaacgttgattggtcctcaaga

SEQ ID NO: 2935873 - DNA, 25 bp, Homo sapien
ggatggaattatagcgcatgctgtg

SEQ ID NO: 2935874 - DNA, 25 bp, Homo sapien
aattatagcgcatgctgtggttgcg

SEQ ID NO: 2935875 - DNA, 25 bp, Homo sapien
caccagtgacaaggagttaggaagc

SEQ ID NO: 2935876 - DNA, 25 bp, Homo sapien
catccaccagtgacaaggagttagg

SEQ ID NO: 2935877 - DNA, 25 bp, Homo sapien
gcctccaaaccgccgacaccaccaa

SEQ ID NO: 2935878 - DNA, 25 bp, Homo sapien
tccaccagtgacaaggagttaggaa

SEQ ID NO: 2935879 - DNA, 25 bp, Homo sapien
gatggtgacgccagttcctggctgc

SEQ ID NO: 2935880 - DNA, 25 bp, Homo sapien
tgcttgtctgggcttcagcattggg

SEQ ID NO: 2935881 - DNA, 25 bp, Homo sapien
tggcggtgggatgagcgtctgcggg

SEQ ID NO: 2935882 - DNA, 25 bp, Homo sapien
tgggatgagcgtctgcgggactggg

SEQ ID NO: 2935883 - DNA, 25 bp, Homo sapien
tctgtgttgggtgcctggttggtcc

SEQ ID NO: 2935884 - DNA, 25 bp, Homo sapien
tggttggtccagttggtccaagtcc

SEQ ID NO: 2935885 - DNA, 25 bp, Homo sapien
tctatgtcaccctgagcaaatgtgg

SEQ ID NO: 2935886 - DNA, 25 bp, Homo sapien
tccaagtcctgatgagctctatgtc

SEQ ID NO: 2935887 - DNA, 25 bp, Homo sapien
ttccatcccgcactagtgaatagcg

SEQ ID NO: 2935888 - DNA, 25 bp, Homo sapien
ccgaaaacgaggtgcgagaggaaca

SEQ ID NO: 2935889 - DNA, 25 bp, Homo sapien
gcttttggagctgccgaacaactga

SEQ ID NO: 2935890 - DNA, 25 bp, Homo sapien
tgagggacccagtgcgccttccatc

SEQ ID NO: 2935891 - DNA, 25 bp, Homo sapien
agttgggaccatggccaaaccgcgg

SEQ ID NO: 2935892 - DNA, 25 bp, Homo sapien
tgaccgtgggacttctgccaaaggg

SEQ ID NO: 2935893 - DNA, 25 bp, Homo sapien
ggagccgccaagaaacgccggctgc

SEQ ID NO: 2935894 - DNA, 25 bp, Homo sapien
ggaagacggagacctaaagccggca

SEQ ID NO: 2935895 - DNA, 25 bp, Homo sapien
agtgggcacccctcaggctgctcca

SEQ ID NO: 2935896 - DNA, 25 bp, Homo sapien
gcagtgccggcgtccccgcgagggt

SEQ ID NO: 2935897 - DNA, 25 bp, Homo sapien
cgctgggacctggacccgctcagtg

SEQ ID NO: 2935898 - DNA, 25 bp, Homo sapien
ccgtgggctcttcgggcagccaggg

SEQ ID NO: 2935899 - DNA, 25 bp, Homo sapien
agcgaagagggagcccgagctctgc

SEQ ID NO: 2935900 - DNA, 25 bp, Homo sapien
cgactcgagagggtctcccgccggg

SEQ ID NO: 2935901 - DNA, 25 bp, Homo sapien
agcagagacctccccgtcgacgggg

SEQ ID NO: 2935902 - DNA, 25 bp, Homo sapien
ggagggccgcgtgaggagagcgaag

SEQ ID NO: 2935903 - DNA, 25 bp, Homo sapien
ccgggcaagtttccgcgaagcctgg

SEQ ID NO: 2935904 - DNA, 25 bp, Homo sapien
gaggtttcgtttctgccagccgacc

SEQ ID NO: 2935905 - DNA, 25 bp, Homo sapien
aatctagtcagcgaaaggcttcagc

SEQ ID NO: 2935906 - DNA, 25 bp, Homo sapien
ggccattagacagacccaggctcgg

SEQ ID NO: 2935907 - DNA, 25 bp, Homo sapien
gaaatccggcttgtccctctgtaaa

SEQ ID NO: 2935908 - DNA, 25 bp, Homo sapien
tacctagggtcgagctgtcaagttc

SEQ ID NO: 2935909 - DNA, 25 bp, Homo sapien
gagcaactgaggtttcgacgggaaa

SEQ ID NO: 2935910 - DNA, 25 bp, Homo sapien
caaatgttccctgcgaggtctggag

SEQ ID NO: 2935911 - DNA, 25 bp, Homo sapien
cccagggatggacgacttggagaca

SEQ ID NO: 2935912 - DNA, 25 bp, Homo sapien
gccggacagggctcactaaaacgtg

SEQ ID NO: 2935913 - DNA, 25 bp, Homo sapien
tttatgggatggacgggagacaaca

SEQ ID NO: 2935914 - DNA, 25 bp, Homo sapien
tgtcagtcctaaatcatgcacgagt

SEQ ID NO: 2935915 - DNA, 25 bp, Homo sapien
tacatctacacagggcggtgtaggg

SEQ ID NO: 2935916 - DNA, 25 bp, Homo sapien
tccttgacctggtctttggcgtcag

SEQ ID NO: 2935917 - DNA, 25 bp, Homo sapien
ctgccgggacgaagaggctacatct

SEQ ID NO: 2935918 - DNA, 25 bp, Homo sapien
acacagggaatctcggagggctgcc

SEQ ID NO: 2935919 - DNA, 25 bp, Homo sapien
gttacacttgacctctaggcacgca

SEQ ID NO: 2935920 - DNA, 25 bp, Homo sapien
ggagcttcctgtcgggttcacagac

SEQ ID NO: 2935921 - DNA, 25 bp, Homo sapien
tattaaacgctcgttgccagtcgct

SEQ ID NO: 2935922 - DNA, 25 bp, Homo sapien
tagagacccacgagagttagagacc

SEQ ID NO: 2935923 - DNA, 25 bp, Homo sapien
ctcccatgagctccctccggggctg

SEQ ID NO: 2935924 - DNA, 25 bp, Homo sapien
cgcgcgcctcctcgccccctcctcc

SEQ ID NO: 2935925 - DNA, 25 bp, Homo sapien
gccgccgccgcttcttttctttgcc

SEQ ID NO: 2935926 - DNA, 25 bp, Homo sapien
gagggagcggggggccgcgcgcctc

SEQ ID NO: 2935927 - DNA, 25 bp, Homo sapien
tccgaacatacgcagcagcctccta

SEQ ID NO: 2935928 - DNA, 25 bp, Homo sapien
tgcacgcgtgcccatcgcagtagac

SEQ ID NO: 2935929 - DNA, 25 bp, Homo sapien
tggtggacgaccacgctgcacgcgt

SEQ ID NO: 2935930 - DNA, 25 bp, Homo sapien
gcccagcccctctcgtccgaacata

SEQ ID NO: 2935931 - DNA, 25 bp, Homo sapien
agattcacatttccggcagaaccag

SEQ ID NO: 2935932 - DNA, 25 bp, Homo sapien
ccgttggcacctgaacgatgccata

SEQ ID NO: 2935933 - DNA, 25 bp, Homo sapien
agaaccagggtcccgttggcacctg

SEQ ID NO: 2935934 - DNA, 25 bp, Homo sapien
ggcacctgaacgatgccatagcaag

SEQ ID NO: 2935935 - DNA, 25 bp, Homo sapien
ttgggggatctgctgagctggaccc

SEQ ID NO: 2935936 - DNA, 25 bp, Homo sapien
ggttgggggatctgctgagctggac

SEQ ID NO: 2935937 - DNA, 25 bp, Homo sapien
gttgggggatctgctgagctggacc

SEQ ID NO: 2935938 - DNA, 25 bp, Homo sapien
gggttgggggatctgctgagctgga

SEQ ID NO: 2935939 - DNA, 25 bp, Homo sapien
ccccgtctttgtgtgggcacagctc

SEQ ID NO: 2935940 - DNA, 25 bp, Homo sapien
agtcctcttcaatgccccgtctttg

SEQ ID NO: 2935941 - DNA, 25 bp, Homo sapien
cttcaatgccccgtctttgtgtggg

SEQ ID NO: 2935942 - DNA, 25 bp, Homo sapien
tccattatcagtcctcttcaatgcc

SEQ ID NO: 2935943 - DNA, 25 bp, Homo sapien
cgatcatgaggcacgtactgcagca

SEQ ID NO: 2935944 - DNA, 25 bp, Homo sapien
gtgagcacgttggcaaattgcacct

SEQ ID NO: 2935945 - DNA, 25 bp, Homo sapien
cttgttgaagcgatcatgaggcacg

SEQ ID NO: 2935946 - DNA, 25 bp, Homo sapien
aggcacgtactgcagcacgatgggc

SEQ ID NO: 2935947 - DNA, 25 bp, Homo sapien
acccatagatgggagggaactggta

SEQ ID NO: 2935948 - DNA, 25 bp, Homo sapien
aggaacccatagatgggagggaact

SEQ ID NO: 2935949 - DNA, 25 bp, Homo sapien
tgaagagagcgttggaggaacccat

SEQ ID NO: 2935950 - DNA, 25 bp, Homo sapien
caaattacaccggatgaagagagcg

SEQ ID NO: 2935951 - DNA, 25 bp, Homo sapien
tctgtcaacagaagggtggttcact

SEQ ID NO: 2935952 - DNA, 25 bp, Homo sapien
gaacttgcgttccattgagcgggca

SEQ ID NO: 2935953 - DNA, 25 bp, Homo sapien
gggagcctactatttcacctgagtg

SEQ ID NO: 2935954 - DNA, 25 bp, Homo sapien
taactgcgaaggtctaccctctggc

SEQ ID NO: 2935955 - DNA, 25 bp, Homo sapien
ggacacagcgcaatcgtcccctcct

SEQ ID NO: 2935956 - DNA, 25 bp, Homo sapien
caggacacagcgcaatcgtcccctc

SEQ ID NO: 2935957 - DNA, 25 bp, Homo sapien
tgttctactgatggtccttaggcca

SEQ ID NO: 2935958 - DNA, 25 bp, Homo sapien
tctactgatggtccttaggccaccc

SEQ ID NO: 2935959 - DNA, 25 bp, Homo sapien
ttacaggtcatgcaggctcccgagg

SEQ ID NO: 2935960 - DNA, 25 bp, Homo sapien
ggccgccttgctctcccggccctgc

SEQ ID NO: 2935961 - DNA, 25 bp, Homo sapien
aggtcatgcaggctcccgaggccgc

SEQ ID NO: 2935962 - DNA, 25 bp, Homo sapien
ggcggttacaggtcatgcaggctcc

SEQ ID NO: 2935963 - DNA, 25 bp, Homo sapien
agtggccatccaggacaaacccggg

SEQ ID NO: 2935964 - DNA, 25 bp, Homo sapien
atcagtggccatccaggacaaaccc

SEQ ID NO: 2935965 - DNA, 25 bp, Homo sapien
ctgatcagtggccatccaggacaaa

SEQ ID NO: 2935966 - DNA, 25 bp, Homo sapien
catccaggacaaacccggggggcag

SEQ ID NO: 2935967 - DNA, 25 bp, Homo sapien
catccaaagcattgccaccaccatc

SEQ ID NO: 2935968 - DNA, 25 bp, Homo sapien
gccaccaccatcaaagggacagcag

SEQ ID NO: 2935969 - DNA, 25 bp, Homo sapien
gaggcgaagccaagaccatccaaag

SEQ ID NO: 2935970 - DNA, 25 bp, Homo sapien
tggccccctgctgaggcgaagccaa

SEQ ID NO: 2935971 - DNA, 25 bp, Homo sapien
gaagtggtatttgcagtagccgcag

SEQ ID NO: 2935972 - DNA, 25 bp, Homo sapien
catcttgctgaagtggtatttgcag

SEQ ID NO: 2935973 - DNA, 25 bp, Homo sapien
gtatttgcagtagccgcagtacttg

SEQ ID NO: 2935974 - DNA, 25 bp, Homo sapien
tgctgaagtggtatttgcagtagcc

SEQ ID NO: 2935975 - DNA, 25 bp, Homo sapien
tcccccgctgctgtgccgggatgtc

SEQ ID NO: 2935976 - DNA, 25 bp, Homo sapien
ttctcctgctgcgtggatggtgagg

SEQ ID NO: 2935977 - DNA, 25 bp, Homo sapien
cttcttctggcccctctcgtggtgg

SEQ ID NO: 2935978 - DNA, 25 bp, Homo sapien
tctcctgctgcgtggatggtgaggc

SEQ ID NO: 2935979 - DNA, 25 bp, Homo sapien
cttctggcccctctcgtggtgggtg

SEQ ID NO: 2935980 - DNA, 25 bp, Homo sapien
cttgtgcttctgcttaaggcgttct

SEQ ID NO: 2935981 - DNA, 25 bp, Homo sapien
gactcaggccgcttcttgtgcttct

SEQ ID NO: 2935982 - DNA, 25 bp, Homo sapien
gcttctgcttaaggcgttctttgtc

SEQ ID NO: 2935983 - DNA, 25 bp, Homo sapien
gggcgactcaggccgcttcttgtgc

SEQ ID NO: 2935984 - DNA, 25 bp, Homo sapien
tccctcctgaaggtgggcagcagta

SEQ ID NO: 2935985 - DNA, 25 bp, Homo sapien
catccctcctgaaggtgggcagcag

SEQ ID NO: 2935986 - DNA, 25 bp, Homo sapien
ccctcctgaaggtgggcagcagtac

SEQ ID NO: 2935987 - DNA, 25 bp, Homo sapien
atccctcctgaaggtgggcagcagt

SEQ ID NO: 2935988 - DNA, 25 bp, Homo sapien
gagagcaggcctgagtgccgtcccc

SEQ ID NO: 2935989 - DNA, 25 bp, Homo sapien
aactcccaatcccatggttggtcgg

SEQ ID NO: 2935990 - DNA, 25 bp, Homo sapien
aatcccatggttggtcggtgattgg

SEQ ID NO: 2935991 - DNA, 25 bp, Homo sapien
tggttggtcggtgattggtggcccc

SEQ ID NO: 2935992 - DNA, 25 bp, Homo sapien
catatgtggtgagttggaagcagca

SEQ ID NO: 2935993 - DNA, 25 bp, Homo sapien
gggatgtcctctaccgatctctggg

SEQ ID NO: 2935994 - DNA, 25 bp, Homo sapien
taaatgatgagacgtccagtggcag

SEQ ID NO: 2935995 - DNA, 25 bp, Homo sapien
tgctaaggtgcccagaactctgcca

SEQ ID NO: 2935996 - DNA, 25 bp, Homo sapien
tccctttatgactcaggctatggct

SEQ ID NO: 2935997 - DNA, 25 bp, Homo sapien
tctcagaggtctcctgcgtgctggc

SEQ ID NO: 2935998 - DNA, 25 bp, Homo sapien
ccctttatgactcaggctatggctg

SEQ ID NO: 2935999 - DNA, 25 bp, Homo sapien
cagaggtctcctgcgtgctggcctc

SEQ ID NO: 2936000 - DNA, 25 bp, Homo sapien
aagaggaggcggaggtaaaactgct

SEQ ID NO: 2936001 - DNA, 25 bp, Homo sapien
gaggaggcggaggtaaaactgctca

SEQ ID NO: 2936002 - DNA, 25 bp, Homo sapien
ggaggcggaggtaaaactgctcaca

SEQ ID NO: 2936003 - DNA, 25 bp, Homo sapien
gaggcggaggtaaaactgctcacac

SEQ ID NO: 2936004 - DNA, 25 bp, Homo sapien
ctttatcctgaaccaatggagaagt

SEQ ID NO: 2936005 - DNA, 25 bp, Homo sapien
ggagaagtaaatgagatgcaaaacc

SEQ ID NO: 2936006 - DNA, 25 bp, Homo sapien
tatcctgaaccaatggagaagtaaa

SEQ ID NO: 2936007 - DNA, 25 bp, Homo sapien
tggagaagtaaatgagatgcaaaac

SEQ ID NO: 2936008 - DNA, 25 bp, Homo sapien
tcccactcccgcgtgtactggcggg

SEQ ID NO: 2936009 - DNA, 25 bp, Homo sapien
tactggcgggagagagctctggtcc

SEQ ID NO: 2936010 - DNA, 25 bp, Homo sapien
agttacagctggaccccagatcccc

SEQ ID NO: 2936011 - DNA, 25 bp, Homo sapien
gcgggagagagctctggtccacgaa

SEQ ID NO: 2936012 - DNA, 25 bp, Homo sapien
gcatgatgggcccaaagccagagaa

SEQ ID NO: 2936013 - DNA, 25 bp, Homo sapien
tgacgtggggagacttatagtcccc

SEQ ID NO: 2936014 - DNA, 25 bp, Homo sapien
tgggtgcctgccgaggccccagacc

SEQ ID NO: 2936015 - DNA, 25 bp, Homo sapien
gtggcactcagtgcgggcatccgtt

SEQ ID NO: 2936016 - DNA, 25 bp, Homo sapien
gcagcagtggcggtaaagccagcca

SEQ ID NO: 2936017 - DNA, 25 bp, Homo sapien
tgaccagggaacctccagagaaggg

SEQ ID NO: 2936018 - DNA, 25 bp, Homo sapien
ctgaccagggaacctccagagaagg

SEQ ID NO: 2936019 - DNA, 25 bp, Homo sapien
ctcccaggccggagctgaccaggga

SEQ ID NO: 2936020 - DNA, 25 bp, Homo sapien
ctgcccctagtaagggggactccag

SEQ ID NO: 2936021 - DNA, 25 bp, Homo sapien
ggcaagctcccagaaggcccaaagg

SEQ ID NO: 2936022 - DNA, 25 bp, Homo sapien
ggggtccttattactggtgtagatg

SEQ ID NO: 2936023 - DNA, 25 bp, Homo sapien
gggtccttattactggtgtagatgc

SEQ ID NO: 2936024 - DNA, 25 bp, Homo sapien
ctgtgggagatggggtccttattac

SEQ ID NO: 2936025 - DNA, 25 bp, Homo sapien
ggtgctggtgaacggggagcggctg

SEQ ID NO: 2936026 - DNA, 25 bp, Homo sapien
ggagggtgctggtgaacggggagcg

SEQ ID NO: 2936027 - DNA, 25 bp, Homo sapien
gtgctggtgaacggggagcggctga

SEQ ID NO: 2936028 - DNA, 25 bp, Homo sapien
agggtgctggtgaacggggagcggc

SEQ ID NO: 2936029 - DNA, 25 bp, Homo sapien
agggaggctaaaggtagagccagcc

SEQ ID NO: 2936030 - DNA, 25 bp, Homo sapien
gagaggaggggattaacggcaccca

SEQ ID NO: 2936031 - DNA, 25 bp, Homo sapien
agaggaggggattaacggcacccat

SEQ ID NO: 2936032 - DNA, 25 bp, Homo sapien
gaagaaaggggagaggggatcagat

SEQ ID NO: 2936033 - DNA, 25 bp, Homo sapien
aaaggggagaggggatcagatattc

SEQ ID NO: 2936034 - DNA, 25 bp, Homo sapien
aaggggagaggggatcagatattca

SEQ ID NO: 2936035 - DNA, 25 bp, Homo sapien
gggagaggggatcagatattcacat

SEQ ID NO: 2936036 - DNA, 25 bp, Homo sapien
cgggagccactacgctgggattttg

SEQ ID NO: 2936037 - DNA, 25 bp, Homo sapien
ggagccactacgctgggattttgtt

SEQ ID NO: 2936038 - DNA, 25 bp, Homo sapien
gggagccactacgctgggattttgt

SEQ ID NO: 2936039 - DNA, 25 bp, Homo sapien
gcgggagccactacgctgggatttt

SEQ ID NO: 2936040 - DNA, 25 bp, Homo sapien
catcagatcccttatcaggaggcaa

SEQ ID NO: 2936041 - DNA, 25 bp, Homo sapien
tttaaggcttacctgagtcggcagc

SEQ ID NO: 2936042 - DNA, 25 bp, Homo sapien
ggatatgggattgggacctcaccgc

SEQ ID NO: 2936043 - DNA, 25 bp, Homo sapien
gctacaccggtgaaagcactgggct

SEQ ID NO: 2936044 - DNA, 25 bp, Homo sapien
gacaccggaagctgcagtcctccag

SEQ ID NO: 2936045 - DNA, 25 bp, Homo sapien
gaggtcccccgacaccggaagctgc

SEQ ID NO: 2936046 - DNA, 25 bp, Homo sapien
ggtcccccgacaccggaagctgcag

SEQ ID NO: 2936047 - DNA, 25 bp, Homo sapien
ccccgacaccggaagctgcagtcct

SEQ ID NO: 2936048 - DNA, 25 bp, Homo sapien
tccagaagctgctccatgttagtcg

SEQ ID NO: 2936049 - DNA, 25 bp, Homo sapien
cagaagctgctccatgttagtcgtc

SEQ ID NO: 2936050 - DNA, 25 bp, Homo sapien
ctgctccatgttagtcgtccctggg

SEQ ID NO: 2936051 - DNA, 25 bp, Homo sapien
gaagctgctccatgttagtcgtccc

SEQ ID NO: 2936052 - DNA, 25 bp, Homo sapien
gcagcgcgtgcagcgccttcagcat

SEQ ID NO: 2936053 - DNA, 25 bp, Homo sapien
tgcagcgcgtgcagcgccttcagca

SEQ ID NO: 2936054 - DNA, 25 bp, Homo sapien
tgcagccgctcctttttggccgtca

SEQ ID NO: 2936055 - DNA, 25 bp, Homo sapien
gccgctcctttttggccgtcaggct

SEQ ID NO: 2936056 - DNA, 25 bp, Homo sapien
gggcagggaagggcacagagagctg

SEQ ID NO: 2936057 - DNA, 25 bp, Homo sapien
gggaggcaggccatagggcccaggg

SEQ ID NO: 2936058 - DNA, 25 bp, Homo sapien
agggccgttggcggcaggcagggca

SEQ ID NO: 2936059 - DNA, 25 bp, Homo sapien
cagggacagggccgttggcggcagg

SEQ ID NO: 2936060 - DNA, 25 bp, Homo sapien
tgtgggagggatgtcacaggctgca

SEQ ID NO: 2936061 - DNA, 25 bp, Homo sapien
ctgtgggagggatgtcacaggctgc

SEQ ID NO: 2936062 - DNA, 25 bp, Homo sapien
aggctgcagtcagggccagtccgga

SEQ ID NO: 2936063 - DNA, 25 bp, Homo sapien
cacaggctgcagtcagggccagtcc

SEQ ID NO: 2936064 - DNA, 25 bp, Homo sapien
ctcagaagaagtggacagcgagttg

SEQ ID NO: 2936065 - DNA, 25 bp, Homo sapien
aagtggacagcgagttgtccaggcc

SEQ ID NO: 2936066 - DNA, 25 bp, Homo sapien
acagcgagttgtccaggccgaggct

SEQ ID NO: 2936067 - DNA, 25 bp, Homo sapien
tgctctttcccggagggctcttgct

SEQ ID NO: 2936068 - DNA, 25 bp, Homo sapien
gaccaggagagccttgagtctcccc

SEQ ID NO: 2936069 - DNA, 25 bp, Homo sapien
tgggaccaggagagccttgagtctc

SEQ ID NO: 2936070 - DNA, 25 bp, Homo sapien
gggaccaggagagccttgagtctcc

SEQ ID NO: 2936071 - DNA, 25 bp, Homo sapien
gatgggaccaggagagccttgagtc

SEQ ID NO: 2936072 - DNA, 25 bp, Homo sapien
cactgattgcttagccaatggctgg

SEQ ID NO: 2936073 - DNA, 25 bp, Homo sapien
taagggaggactgaatggatcaatc

SEQ ID NO: 2936074 - DNA, 25 bp, Homo sapien
caatggctggcactaagtgggcacc

SEQ ID NO: 2936075 - DNA, 25 bp, Homo sapien
tatcttaagaagcagcgctgtgccg

SEQ ID NO: 2936076 - DNA, 25 bp, Homo sapien
tggaaggacagcgacgagctgctgc

SEQ ID NO: 2936077 - DNA, 25 bp, Homo sapien
tgctgtggaaggacagcgacgagct

SEQ ID NO: 2936078 - DNA, 25 bp, Homo sapien
acagcgacgagctgctgcggctcgg

SEQ ID NO: 2936079 - DNA, 25 bp, Homo sapien
aggacagcgacgagctgctgcggct

SEQ ID NO: 2936080 - DNA, 25 bp, Homo sapien
ccagccccgctgccccgggtgcccg

SEQ ID NO: 2936081 - DNA, 25 bp, Homo sapien
cagccccgctgccccgggtgcccgg

SEQ ID NO: 2936082 - DNA, 25 bp, Homo sapien
gcctggctcaagcttgcggggttgg

SEQ ID NO: 2936083 - DNA, 25 bp, Homo sapien
agcccccccaacagcccctcagcca

SEQ ID NO: 2936084 - DNA, 25 bp, Homo sapien
cagcggccccattcaaccccccaag

SEQ ID NO: 2936085 - DNA, 25 bp, Homo sapien
ccaacagcccctcagccatgggcat

SEQ ID NO: 2936086 - DNA, 25 bp, Homo sapien
tgctgctgaaggagatgtctctgct

SEQ ID NO: 2936087 - DNA, 25 bp, Homo sapien
ctcttgctgctgaaggagatgtctc

SEQ ID NO: 2936088 - DNA, 25 bp, Homo sapien
gagatgtctctgctgctctgtaagg

SEQ ID NO: 2936089 - DNA, 25 bp, Homo sapien
aaggagatgtctctgctgctctgta

SEQ ID NO: 2936090 - DNA, 25 bp, Homo sapien
gctttgaataggcaaagcattctta

SEQ ID NO: 2936091 - DNA, 25 bp, Homo sapien
ttgctcccatctggtccctacaggc

SEQ ID NO: 2936092 - DNA, 25 bp, Homo sapien
cagccagctgaattggtttcctgtc

SEQ ID NO: 2936093 - DNA, 25 bp, Homo sapien
ctcccatctggtccctacaggcagc

SEQ ID NO: 2936094 - DNA, 25 bp, Homo sapien
tgcacgccattggtatttgccagct

SEQ ID NO: 2936095 - DNA, 25 bp, Homo sapien
tctccccatctagacaagaaaatgg

SEQ ID NO: 2936096 - DNA, 25 bp, Homo sapien
gccagaccgcttgttggccaacagt

SEQ ID NO: 2936097 - DNA, 25 bp, Homo sapien
tactgtctcgcatttcccacttagc

SEQ ID NO: 2936098 - DNA, 25 bp, Homo sapien
tctggtagacaacagtctggtgttc

SEQ ID NO: 2936099 - DNA, 25 bp, Homo sapien
tggatcatctggtagacaacagtct

SEQ ID NO: 2936100 - DNA, 25 bp, Homo sapien
ccccagccatctgcaggcgctgcag

SEQ ID NO: 2936101 - DNA, 25 bp, Homo sapien
gacagcagcggggtggagcttcctg

SEQ ID NO: 2936102 - DNA, 25 bp, Homo sapien
tagggctccagcgggcagcaggggt

SEQ ID NO: 2936103 - DNA, 25 bp, Homo sapien
gggtggagcagacgctgtgggcagc

SEQ ID NO: 2936104 - DNA, 25 bp, Homo sapien
ggcagcaggggtggagcagacgctg

SEQ ID NO: 2936105 - DNA, 25 bp, Homo sapien
gcaggggtggagcagacgctgtggg

SEQ ID NO: 2936106 - DNA, 25 bp, Homo sapien
tgtgttgttgccaagcgagggagcc

SEQ ID NO: 2936107 - DNA, 25 bp, Homo sapien
ttgtgttgttgccaagcgagggagc

SEQ ID NO: 2936108 - DNA, 25 bp, Homo sapien
tgttgttgccaagcgagggagccac

SEQ ID NO: 2936109 - DNA, 25 bp, Homo sapien
gtgttgttgccaagcgagggagcca

SEQ ID NO: 2936110 - DNA, 25 bp, Homo sapien
tggaggtccgcctgctgctgctact

SEQ ID NO: 2936111 - DNA, 25 bp, Homo sapien
gctgcagctgctgcggccatgagac

SEQ ID NO: 2936112 - DNA, 25 bp, Homo sapien
ctggaggtccgcctgctgctgctac

SEQ ID NO: 2936113 - DNA, 25 bp, Homo sapien
tgctactgctgcagctgcagctgct

SEQ ID NO: 2936114 - DNA, 25 bp, Homo sapien
gaaggggttggtctgggcagtgagg

SEQ ID NO: 2936115 - DNA, 25 bp, Homo sapien
aaggggttggtctgggcagtgagga

SEQ ID NO: 2936116 - DNA, 25 bp, Homo sapien
ccctcctttggggccaccgccactg

SEQ ID NO: 2936117 - DNA, 25 bp, Homo sapien
tcctttggggccaccgccactgccc

SEQ ID NO: 2936118 - DNA, 25 bp, Homo sapien
gccactgccctctgctcccgacagg

SEQ ID NO: 2936119 - DNA, 25 bp, Homo sapien
cgccactgccctctgctcccgacag

SEQ ID NO: 2936120 - DNA, 25 bp, Homo sapien
taagaacagcttcctaggccaagaa

SEQ ID NO: 2936121 - DNA, 25 bp, Homo sapien
gagcccatgctcagatcggatcttt

SEQ ID NO: 2936122 - DNA, 25 bp, Homo sapien
tcggatctttcttggccgtgcagga

SEQ ID NO: 2936123 - DNA, 25 bp, Homo sapien
tgacattggcctacccagagggtca

SEQ ID NO: 2936124 - DNA, 25 bp, Homo sapien
tggctgaggctcctttgtcagcggt

SEQ ID NO: 2936125 - DNA, 25 bp, Homo sapien
ttggctgaggctcctttgtcagcgg

SEQ ID NO: 2936126 - DNA, 25 bp, Homo sapien
cctggttggctgaggctcctttgtc

SEQ ID NO: 2936127 - DNA, 25 bp, Homo sapien
ggttggctgaggctcctttgtcagc

SEQ ID NO: 2936128 - DNA, 25 bp, Homo sapien
tcaggccaggatctgttccctccac

SEQ ID NO: 2936129 - DNA, 25 bp, Homo sapien
gccaggatctgttccctccacttgg

SEQ ID NO: 2936130 - DNA, 25 bp, Homo sapien
caggatctgttccctccacttgggg

SEQ ID NO: 2936131 - DNA, 25 bp, Homo sapien
aggccaggatctgttccctccactt

SEQ ID NO: 2936132 - DNA, 25 bp, Homo sapien
cccattcaagtgctgatccatttca

SEQ ID NO: 2936133 - DNA, 25 bp, Homo sapien
atggacctcctaggcgggcttgcag

SEQ ID NO: 2936134 - DNA, 25 bp, Homo sapien
ctcagtcctcgacaccaggagctct

SEQ ID NO: 2936135 - DNA, 25 bp, Homo sapien
ttcatgtgacaggtccaaccaaccc

SEQ ID NO: 2936136 - DNA, 25 bp, Homo sapien
ccccagagagggaccaaagttggtg

SEQ ID NO: 2936137 - DNA, 25 bp, Homo sapien
aaagagactgacaaggccggagcct

SEQ ID NO: 2936138 - DNA, 25 bp, Homo sapien
tgaaggtgagaattgcccactctac

SEQ ID NO: 2936139 - DNA, 25 bp, Homo sapien
agcttagtggctcccctggttggtg

SEQ ID NO: 2936140 - DNA, 25 bp, Homo sapien
taaccgccacagtagtccagtctgg

SEQ ID NO: 2936141 - DNA, 25 bp, Homo sapien
gacggtgagatcgttacagccatcc

SEQ ID NO: 2936142 - DNA, 25 bp, Homo sapien
gtgggaacacacgaagctctgctct

SEQ ID NO: 2936143 - DNA, 25 bp, Homo sapien
gaagctttcgagacctttcccattg

SEQ ID NO: 2936144 - DNA, 25 bp, Homo sapien
ccaactccacatgctcacccactca

SEQ ID NO: 2936145 - DNA, 25 bp, Homo sapien
ctgagggtgggaacacccaactcca

SEQ ID NO: 2936146 - DNA, 25 bp, Homo sapien
actccacatgctcacccactcacac

SEQ ID NO: 2936147 - DNA, 25 bp, Homo sapien
aactccacatgctcacccactcaca

SEQ ID NO: 2936148 - DNA, 25 bp, Homo sapien
tggcgctggcatgcaccagttgtga

SEQ ID NO: 2936149 - DNA, 25 bp, Homo sapien
gcaggcactgcctctatatgcaccc

SEQ ID NO: 2936150 - DNA, 25 bp, Homo sapien
cctaaagacaggtccctttggcgct

SEQ ID NO: 2936151 - DNA, 25 bp, Homo sapien
tgcaccagttgtgaccccacagcag

SEQ ID NO: 2936152 - DNA, 25 bp, Homo sapien
cagccctgcactcacaccgtgtgtc

SEQ ID NO: 2936153 - DNA, 25 bp, Homo sapien
gccctgcactcacaccgtgtgtcac

SEQ ID NO: 2936154 - DNA, 25 bp, Homo sapien
acagccctgcactcacaccgtgtgt

SEQ ID NO: 2936155 - DNA, 25 bp, Homo sapien
agccctgcactcacaccgtgtgtca

SEQ ID NO: 2936156 - DNA, 25 bp, Homo sapien
gggagcctgtgcctttgaaaacctg

SEQ ID NO: 2936157 - DNA, 25 bp, Homo sapien
taaaggagaactgggtgcaagctgc

SEQ ID NO: 2936158 - DNA, 25 bp, Homo sapien
caaagtggtcgggagctagacacac

SEQ ID NO: 2936159 - DNA, 25 bp, Homo sapien
caagatccgggttatgcacaattcc

SEQ ID NO: 2936160 - DNA, 25 bp, Homo sapien
ttccataaagcgagactacgcaggg

SEQ ID NO: 2936161 - DNA, 25 bp, Homo sapien
ctaggccgcgcttctgggagcaagc

SEQ ID NO: 2936162 - DNA, 25 bp, Homo sapien
cacggactgatgcaccctgcgtggt

SEQ ID NO: 2936163 - DNA, 25 bp, Homo sapien
tgtgcgctctctgccgctgagtgcg

SEQ ID NO: 2936164 - DNA, 25 bp, Homo sapien
ccgccggccgcaggatcgcccccgc

SEQ ID NO: 2936165 - DNA, 25 bp, Homo sapien
gccgcaggatcgcccccgcgccgcg

SEQ ID NO: 2936166 - DNA, 25 bp, Homo sapien
accacgcgccgccggccgcaggatc

SEQ ID NO: 2936167 - DNA, 25 bp, Homo sapien
ccacgcgccgccggccgcaggatcg

SEQ ID NO: 2936168 - DNA, 25 bp, Homo sapien
tgcaaggtacgcaagcatggcaggc

SEQ ID NO: 2936169 - DNA, 25 bp, Homo sapien
aagcctgtgagctgaggcaagccag

SEQ ID NO: 2936170 - DNA, 25 bp, Homo sapien
caggcatcacaagacggtggtttgg

SEQ ID NO: 2936171 - DNA, 25 bp, Homo sapien
actggcgctcgggaaaagcctgtga

SEQ ID NO: 2936172 - DNA, 25 bp, Homo sapien
gagatgtcccgccgcgggttcaggt

SEQ ID NO: 2936173 - DNA, 25 bp, Homo sapien
agatgtcccgccgcgggttcaggtc

SEQ ID NO: 2936174 - DNA, 25 bp, Homo sapien
ccccaggacaccataggaccgtgag

SEQ ID NO: 2936175 - DNA, 25 bp, Homo sapien
aagccctggaagcaccgtccggcct

SEQ ID NO: 2936176 - DNA, 25 bp, Homo sapien
tgcgacccttcctagtttcccactg

SEQ ID NO: 2936177 - DNA, 25 bp, Homo sapien
gaggctgatctgatgccacccaaca

SEQ ID NO: 2936178 - DNA, 25 bp, Homo sapien
cagggccaccacggacctggctggg

SEQ ID NO: 2936179 - DNA, 25 bp, Homo sapien
ttcttgctgcggccacacacacacc

SEQ ID NO: 2936180 - DNA, 25 bp, Homo sapien
cacacacaccacctgtaggttttcc

SEQ ID NO: 2936181 - DNA, 25 bp, Homo sapien
acacacacaccacctgtaggttttc

SEQ ID NO: 2936182 - DNA, 25 bp, Homo sapien
cagtgcgttggaagaagtgggagcc

SEQ ID NO: 2936183 - DNA, 25 bp, Homo sapien
tggccttgcaggtacagagtgccac

SEQ ID NO: 2936184 - DNA, 25 bp, Homo sapien
ccttgaacttgagtggagataggcc

SEQ ID NO: 2936185 - DNA, 25 bp, Homo sapien
gagtgccaccatgcgggtctcttgg

SEQ ID NO: 2936186 - DNA, 25 bp, Homo sapien
ctgccttctgcacgcgctcactcct

SEQ ID NO: 2936187 - DNA, 25 bp, Homo sapien
tctgccttctgcacgcgctcactcc

SEQ ID NO: 2936188 - DNA, 25 bp, Homo sapien
cttctgccttctgcacgcgctcact

SEQ ID NO: 2936189 - DNA, 25 bp, Homo sapien
ttctgccttctgcacgcgctcactc

SEQ ID NO: 2936190 - DNA, 25 bp, Homo sapien
cctggtcaggacagagcaactgcat

SEQ ID NO: 2936191 - DNA, 25 bp, Homo sapien
gaaccctcactagcaggactggtgg

SEQ ID NO: 2936192 - DNA, 25 bp, Homo sapien
ttagcattgtgaagcgctgcacccc

SEQ ID NO: 2936193 - DNA, 25 bp, Homo sapien
tcagcaaacattgaaccagggccca

SEQ ID NO: 2936194 - DNA, 25 bp, Homo sapien
ctggggtctctatagaaactgctga

SEQ ID NO: 2936195 - DNA, 25 bp, Homo sapien
gggtctctatagaaactgctgatcc

SEQ ID NO: 2936196 - DNA, 25 bp, Homo sapien
tctctatagaaactgctgatcccgg

SEQ ID NO: 2936197 - DNA, 25 bp, Homo sapien
tatagaaactgctgatcccggctgt

SEQ ID NO: 2936198 - DNA, 25 bp, Homo sapien
tctgtctgccctgtaacctggtgtc

SEQ ID NO: 2936199 - DNA, 25 bp, Homo sapien
gatggatattacacacgctcagaga

SEQ ID NO: 2936200 - DNA, 25 bp, Homo sapien
cagatggcacgtacacaggatggat

SEQ ID NO: 2936201 - DNA, 25 bp, Homo sapien
tatggaaacgaccaaacagtggagt

SEQ ID NO: 2936202 - DNA, 25 bp, Homo sapien
aaaaatgcgggaatcagcgccaggc

SEQ ID NO: 2936203 - DNA, 25 bp, Homo sapien
tttcctagtccagtgtggccgctcg

SEQ ID NO: 2936204 - DNA, 25 bp, Homo sapien
gggaatcgaccatcctcatgaggcc

SEQ ID NO: 2936205 - DNA, 25 bp, Homo sapien
gcagtatcgattcgcttccccggcg

SEQ ID NO: 2936206 - DNA, 25 bp, Homo sapien
taattgcctagatttcccgcgttcc

SEQ ID NO: 2936207 - DNA, 25 bp, Homo sapien
gaggaccgcgtgagatgcaaacaca

SEQ ID NO: 2936208 - DNA, 25 bp, Homo sapien
tgcacttgtcagctagaggaccgcg

SEQ ID NO: 2936209 - DNA, 25 bp, Homo sapien
aagacgttccggaaagctctagagg

SEQ ID NO: 2936210 - DNA, 25 bp, Homo sapien
aaatactacatttggaagggaagag

SEQ ID NO: 2936211 - DNA, 25 bp, Homo sapien
agaagggacgtgacagaactaggca

SEQ ID NO: 2936212 - DNA, 25 bp, Homo sapien
gcctcaatcgatattacagtctcca

SEQ ID NO: 2936213 - DNA, 25 bp, Homo sapien
gacagttttctattgtctgcctcaa

SEQ ID NO: 2936214 - DNA, 25 bp, Homo sapien
gcaattccagtaaaccgggtctagc

SEQ ID NO: 2936215 - DNA, 25 bp, Homo sapien
gattgcggtgtactaggatccctcg

SEQ ID NO: 2936216 - DNA, 25 bp, Homo sapien
ggatccctcgatcgccagagcaatt

SEQ ID NO: 2936217 - DNA, 25 bp, Homo sapien
gtctagccttcactgcgcaaccgct

SEQ ID NO: 2936218 - DNA, 25 bp, Homo sapien
cagaccgatgtacagccggtcaccc

SEQ ID NO: 2936219 - DNA, 25 bp, Homo sapien
ccagaccgatgtacagccggtcacc

SEQ ID NO: 2936220 - DNA, 25 bp, Homo sapien
ttcaactcatacaggttcagccgga

SEQ ID NO: 2936221 - DNA, 25 bp, Homo sapien
cgtttctcatacaagaggttggcca

SEQ ID NO: 2936222 - DNA, 25 bp, Homo sapien
tataaggtttgatctgccgaccttc

SEQ ID NO: 2936223 - DNA, 25 bp, Homo sapien
ccatgctcatgagggtataaggttt

SEQ ID NO: 2936224 - DNA, 25 bp, Homo sapien
aggaagatcacctttccctgaggcc

SEQ ID NO: 2936225 - DNA, 25 bp, Homo sapien
gaaaccagaactcaagaacgctcgc

SEQ ID NO: 2936226 - DNA, 25 bp, Homo sapien
gctgggttactctcattgtcaaaag

SEQ ID NO: 2936227 - DNA, 25 bp, Homo sapien
taagcctattcagacaaggccccgg

SEQ ID NO: 2936228 - DNA, 25 bp, Homo sapien
tcttcgggtccaacccggcaatgac

SEQ ID NO: 2936229 - DNA, 25 bp, Homo sapien
gtcttcgggtccaacccggcaatga

SEQ ID NO: 2936230 - DNA, 25 bp, Homo sapien
cttcgggtccaacccggcaatgact

SEQ ID NO: 2936231 - DNA, 25 bp, Homo sapien
agagggactcacacattccgtacat

SEQ ID NO: 2936232 - DNA, 25 bp, Homo sapien
ccacaaagtcatcagtcaccatggg

SEQ ID NO: 2936233 - DNA, 25 bp, Homo sapien
tgaccacaaagtcatcagtcaccat

SEQ ID NO: 2936234 - DNA, 25 bp, Homo sapien
gagggactcacacattccgtacatt

SEQ ID NO: 2936235 - DNA, 25 bp, Homo sapien
gtgtcttgcttcactggactgcagt

SEQ ID NO: 2936236 - DNA, 25 bp, Homo sapien
caaggccctttgaggtctcatctca

SEQ ID NO: 2936237 - DNA, 25 bp, Homo sapien
gcacttaataacgacagccgaccct

SEQ ID NO: 2936238 - DNA, 25 bp, Homo sapien
tgctttccccagtggccggaagagc

SEQ ID NO: 2936239 - DNA, 25 bp, Homo sapien
gaagaatccctatttagctccagtg

SEQ ID NO: 2936240 - DNA, 25 bp, Homo sapien
ttcccaggatgtgggaagcccctct

SEQ ID NO: 2936241 - DNA, 25 bp, Homo sapien
gctctgatttggtctggtcccttaa

SEQ ID NO: 2936242 - DNA, 25 bp, Homo sapien
gaaagtgaaagagacttcaagccct

SEQ ID NO: 2936243 - DNA, 25 bp, Homo sapien
gcttgggagatggtttcaaacaggt

SEQ ID NO: 2936244 - DNA, 25 bp, Homo sapien
gagatggtttcaaacaggtgatccg

SEQ ID NO: 2936245 - DNA, 25 bp, Homo sapien
tggtttcaaacaggtgatccggatc

SEQ ID NO: 2936246 - DNA, 25 bp, Homo sapien
gatggtttcaaacaggtgatccgga

SEQ ID NO: 2936247 - DNA, 25 bp, Homo sapien
gatgtggacaatgactcccatgcct

SEQ ID NO: 2936248 - DNA, 25 bp, Homo sapien
tcccatgcctgacactgcatcccgg

SEQ ID NO: 2936249 - DNA, 25 bp, Homo sapien
actgcatcccggtccacagcattca

SEQ ID NO: 2936250 - DNA, 25 bp, Homo sapien
atgatgtggacaatgactcccatgc

SEQ ID NO: 2936251 - DNA, 25 bp, Homo sapien
ttcgggccttcagtgtcctggtggt

SEQ ID NO: 2936252 - DNA, 25 bp, Homo sapien
ccattcgggccttcagtgtcctggt

SEQ ID NO: 2936253 - DNA, 25 bp, Homo sapien
cctggtggtgattttgtccttctcg

SEQ ID NO: 2936254 - DNA, 25 bp, Homo sapien
agtgtcctggtggtgattttgtcct

SEQ ID NO: 2936255 - DNA, 25 bp, Homo sapien
tgcaggaaagcatcaaagacaaaag

SEQ ID NO: 2936256 - DNA, 25 bp, Homo sapien
gatctgcaggaaagcatcaaagaca

SEQ ID NO: 2936257 - DNA, 25 bp, Homo sapien
tctgcaggaaagcatcaaagacaaa

SEQ ID NO: 2936258 - DNA, 25 bp, Homo sapien
gcagagatctgcaggaaagcatcaa

SEQ ID NO: 2936259 - DNA, 25 bp, Homo sapien
ccagcatcaggtcagatcattgaaa

SEQ ID NO: 2936260 - DNA, 25 bp, Homo sapien
gccacttatgaagagtgccccatgg

SEQ ID NO: 2936261 - DNA, 25 bp, Homo sapien
ttgtgccagtatcccagggcagaag

SEQ ID NO: 2936262 - DNA, 25 bp, Homo sapien
aaaggagactcagctgtcccttggc

SEQ ID NO: 2936263 - DNA, 25 bp, Homo sapien
gctaaacagtctcatggcatctcag

SEQ ID NO: 2936264 - DNA, 25 bp, Homo sapien
agtccgcagccgagacactgtagtc

SEQ ID NO: 2936265 - DNA, 25 bp, Homo sapien
gatgagtgccctggagactccactg

SEQ ID NO: 2936266 - DNA, 25 bp, Homo sapien
taacgacatggctgattaggcgagg

SEQ ID NO: 2936267 - DNA, 25 bp, Homo sapien
tcaattaaagagatacccggtagac

SEQ ID NO: 2936268 - DNA, 25 bp, Homo sapien
gatgtatcaaatgaggccctgtgcc

SEQ ID NO: 2936269 - DNA, 25 bp, Homo sapien
ggtccttccagaaccaagtgctatg

SEQ ID NO: 2936270 - DNA, 25 bp, Homo sapien
aaagcggctgggctcttggacacct

SEQ ID NO: 2936271 - DNA, 25 bp, Homo sapien
agttgactactctaggaacttcaca

SEQ ID NO: 2936272 - DNA, 25 bp, Homo sapien
tactctaggaacttcacataagagg

SEQ ID NO: 2936273 - DNA, 25 bp, Homo sapien
aattttctgcccctatgaagttgac

SEQ ID NO: 2936274 - DNA, 25 bp, Homo sapien
taacccctggcaatcagtgttcaat

SEQ ID NO: 2936275 - DNA, 25 bp, Homo sapien
aatgagctgagcaatgttcctgttc

SEQ ID NO: 2936276 - DNA, 25 bp, Homo sapien
tcctgttcctgtcatgctaatgcca

SEQ ID NO: 2936277 - DNA, 25 bp, Homo sapien
atgagctgagcaatgttcctgttcc

SEQ ID NO: 2936278 - DNA, 25 bp, Homo sapien
catgctaatgccagatgacttcaaa

SEQ ID NO: 2936279 - DNA, 25 bp, Homo sapien
tgtggtgccccaaagattagtagga

SEQ ID NO: 2936280 - DNA, 25 bp, Homo sapien
tatgctagtaatggtgccaagcact

SEQ ID NO: 2936281 - DNA, 25 bp, Homo sapien
gtaggatgctctttgcttagaaata

SEQ ID NO: 2936282 - DNA, 25 bp, Homo sapien
atatatgctagtaatggtgccaagc

SEQ ID NO: 2936283 - DNA, 25 bp, Homo sapien
gccgctggcttgtgcgctgtctccg

SEQ ID NO: 2936284 - DNA, 25 bp, Homo sapien
gggcatgtcgtccaactgcaccagc

SEQ ID NO: 2936285 - DNA, 25 bp, Homo sapien
aagtgaagctattccgggccagcga

SEQ ID NO: 2936286 - DNA, 25 bp, Homo sapien
aagaagaagcatttcgtgtgccaga

SEQ ID NO: 2936287 - DNA, 25 bp, Homo sapien
catcttggcattcgggttgcgggaa

SEQ ID NO: 2936288 - DNA, 25 bp, Homo sapien
gcgttccttggctttctaggctgga

SEQ ID NO: 2936289 - DNA, 25 bp, Homo sapien
cttcccttccggagcggtggcatcg

SEQ ID NO: 2936290 - DNA, 25 bp, Homo sapien
tcaaagattttacgaaatgagccag

SEQ ID NO: 2936291 - DNA, 25 bp, Homo sapien
caagtcagctttagtgtgacaagcc

SEQ ID NO: 2936292 - DNA, 25 bp, Homo sapien
agtaacaccactgaagctcactgta

SEQ ID NO: 2936293 - DNA, 25 bp, Homo sapien
tatattaaccactaatcgctgctgt

SEQ ID NO: 2936294 - DNA, 25 bp, Homo sapien
tgaggtcgcacgattgtgctccagc

SEQ ID NO: 2936295 - DNA, 25 bp, Homo sapien
taaggaccccatgctagtatcagtg

SEQ ID NO: 2936296 - DNA, 25 bp, Homo sapien
tactttccgtgagaatcgggtggca

SEQ ID NO: 2936297 - DNA, 25 bp, Homo sapien
tgtagtctggataccgcgagatcgc

SEQ ID NO: 2936298 - DNA, 25 bp, Homo sapien
tatactgatggaacggcctgatggc

SEQ ID NO: 2936299 - DNA, 25 bp, Homo sapien
agtgactcgaattcgtgaattgcca

SEQ ID NO: 2936300 - DNA, 25 bp, Homo sapien
agagtgactcgaattcgtgaattgc

SEQ ID NO: 2936301 - DNA, 25 bp, Homo sapien
gagtgactcgaattcgtgaattgcc

SEQ ID NO: 2936302 - DNA, 25 bp, Homo sapien
ttagagtgactcgaattcgtgaatt

SEQ ID NO: 2936303 - DNA, 25 bp, Homo sapien
atctgcagtcaaatgctctaccact

SEQ ID NO: 2936304 - DNA, 25 bp, Homo sapien
tgaaccggggacctcttgatctgca

SEQ ID NO: 2936305 - DNA, 25 bp, Homo sapien
gatttgaaccggggacctcttgatc

SEQ ID NO: 2936306 - DNA, 25 bp, Homo sapien
tgatctgcagtcaaatgctctacca

SEQ ID NO: 2936307 - DNA, 25 bp, Homo sapien
gttcgcgagtatatgaaaacctctg

SEQ ID NO: 2936308 - DNA, 25 bp, Homo sapien
tctgaatttggattacttctcctag

SEQ ID NO: 2936309 - DNA, 25 bp, Homo sapien
aaacctctgaatttggattacttct

SEQ ID NO: 2936310 - DNA, 25 bp, Homo sapien
atctgtgtgccctgtcctgttcgag

SEQ ID NO: 2936311 - DNA, 25 bp, Homo sapien
tgggtataaaagctgcgcgaccgca

SEQ ID NO: 2936312 - DNA, 25 bp, Homo sapien
gtgggtataaaagctgcgcgaccgc

SEQ ID NO: 2936313 - DNA, 25 bp, Homo sapien
gggtgggtataaaagctgcgcgacc

SEQ ID NO: 2936314 - DNA, 25 bp, Homo sapien
gggtataaaagctgcgcgaccgcat

SEQ ID NO: 2936315 - DNA, 25 bp, Homo sapien
ctgcaacaatgcttagcacccaagg

SEQ ID NO: 2936316 - DNA, 25 bp, Homo sapien
gcaacaatgcttagcacccaaggag

SEQ ID NO: 2936317 - DNA, 25 bp, Homo sapien
acaatgcttagcacccaaggagccg

SEQ ID NO: 2936318 - DNA, 25 bp, Homo sapien
atgcttagcacccaaggagccgcct

SEQ ID NO: 2936319 - DNA, 25 bp, Homo sapien
ggcaccgtctgcgttcagcttgacc

SEQ ID NO: 2936320 - DNA, 25 bp, Homo sapien
tttctccttctgttacaccactact

SEQ ID NO: 2936321 - DNA, 25 bp, Homo sapien
atgcgggcaccgtctgcgttcagct

SEQ ID NO: 2936322 - DNA, 25 bp, Homo sapien
cccggatgcgggcaccgtctgcgtt

SEQ ID NO: 2936323 - DNA, 25 bp, Homo sapien
gccgcggctgcaactacacaggcag

SEQ ID NO: 2936324 - DNA, 25 bp, Homo sapien
cgcctgagctcacgcgcgtcctgtt

SEQ ID NO: 2936325 - DNA, 25 bp, Homo sapien
gtcctgttccccgaggcgagctggc

SEQ ID NO: 2936326 - DNA, 25 bp, Homo sapien
cggctgcaactacacaggcagcagc

SEQ ID NO: 2936327 - DNA, 25 bp, Homo sapien
cgtgggatacacgatcttgccgcac

SEQ ID NO: 2936328 - DNA, 25 bp, Homo sapien
gatcttgccgcaccgggcgcagttg

SEQ ID NO: 2936329 - DNA, 25 bp, Homo sapien
caccttctccgtgggatacacgatc

SEQ ID NO: 2936330 - DNA, 25 bp, Homo sapien
atacacgatcttgccgcaccgggcg

SEQ ID NO: 2936331 - DNA, 25 bp, Homo sapien
aaaccccccgcatcagatgccacac

SEQ ID NO: 2936332 - DNA, 25 bp, Homo sapien
ccaaaaccccccgcatcagatgcca

SEQ ID NO: 2936333 - DNA, 25 bp, Homo sapien
aaaaccccccgcatcagatgccaca

SEQ ID NO: 2936334 - DNA, 25 bp, Homo sapien
accccccgcatcagatgccacacac

SEQ ID NO: 2936335 - DNA, 25 bp, Homo sapien
agaagcctgcaaggatacccctcac

SEQ ID NO: 2936336 - DNA, 25 bp, Homo sapien
taaacaggctggtaggggcagaagc

SEQ ID NO: 2936337 - DNA, 25 bp, Homo sapien
caaggatacccctcacttgggacag

SEQ ID NO: 2936338 - DNA, 25 bp, Homo sapien
gctgcctgttagaggcctctcagcc

SEQ ID NO: 2936339 - DNA, 25 bp, Homo sapien
tggcgaggcctcattgcttatgcaa

SEQ ID NO: 2936340 - DNA, 25 bp, Homo sapien
tttcaggtcacaggctttggcactc

SEQ ID NO: 2936341 - DNA, 25 bp, Homo sapien
gaagagcccagttatagcagtggca

SEQ ID NO: 2936342 - DNA, 25 bp, Homo sapien
ccaggtggtgctacagctccgatac

SEQ ID NO: 2936343 - DNA, 25 bp, Homo sapien
tgtcatcttgcaggtctcgcaatgg

SEQ ID NO: 2936344 - DNA, 25 bp, Homo sapien
gttgcagtagggcttcttctcgtag

SEQ ID NO: 2936345 - DNA, 25 bp, Homo sapien
caatggaagcatgctttatgccaga

SEQ ID NO: 2936346 - DNA, 25 bp, Homo sapien
cttcttctcgtagcccttgtagttc

SEQ ID NO: 2936347 - DNA, 25 bp, Homo sapien
tctgttgcttgaggcgaaggttttc

SEQ ID NO: 2936348 - DNA, 25 bp, Homo sapien
tcactctgttgcttgaggcgaaggt

SEQ ID NO: 2936349 - DNA, 25 bp, Homo sapien
gtccgccaccatggtgaaggactgc

SEQ ID NO: 2936350 - DNA, 25 bp, Homo sapien
gtgtccgccaccatggtgaaggact

SEQ ID NO: 2936351 - DNA, 25 bp, Homo sapien
aaaggttgctgtgtgtatttcccag

SEQ ID NO: 2936352 - DNA, 25 bp, Homo sapien
tccacgtcaggaatctttaaatgct

SEQ ID NO: 2936353 - DNA, 25 bp, Homo sapien
cctttccgggagaacagtagtagca

SEQ ID NO: 2936354 - DNA, 25 bp, Homo sapien
tggaagtcatggtcaaaaggttgct

SEQ ID NO: 2936355 - DNA, 25 bp, Homo sapien
ttgattctctggagctcgggcgtgt

SEQ ID NO: 2936356 - DNA, 25 bp, Homo sapien
tgtctgccactacgctgaaaccttt

SEQ ID NO: 2936357 - DNA, 25 bp, Homo sapien
gagctcgggcgtgtctgccactacg

SEQ ID NO: 2936358 - DNA, 25 bp, Homo sapien
tctgccactacgctgaaacctttgc

SEQ ID NO: 2936359 - DNA, 25 bp, Homo sapien
gatctgaacgccctctaagtaggaa

SEQ ID NO: 2936360 - DNA, 25 bp, Homo sapien
taaatgtatgcctgtcagatgggtc

SEQ ID NO: 2936361 - DNA, 25 bp, Homo sapien
tgggtgctgagaccaccggaaagcc

SEQ ID NO: 2936362 - DNA, 25 bp, Homo sapien
ttccagacacgaagacagctgcctg

SEQ ID NO: 2936363 - DNA, 25 bp, Homo sapien
tgcagcaccgcgagaagggtaaaag

SEQ ID NO: 2936364 - DNA, 25 bp, Homo sapien
aagggtaaaagatggttatctcctg

SEQ ID NO: 2936365 - DNA, 25 bp, Homo sapien
gccagggtggtgagttttgtcacta

SEQ ID NO: 2936366 - DNA, 25 bp, Homo sapien
tcctgagatgcggatggcttggcca

SEQ ID NO: 2936367 - DNA, 25 bp, Homo sapien
cctacaggtctctgctaaagctgca

SEQ ID NO: 2936368 - DNA, 25 bp, Homo sapien
tagcaggtcggggtcgatcccttcc

SEQ ID NO: 2936369 - DNA, 25 bp, Homo sapien
caaaagcagctagcaggtcggggtc

SEQ ID NO: 2936370 - DNA, 25 bp, Homo sapien
tctctgctaaagctgcaaaagcagc

SEQ ID NO: 2936371 - DNA, 25 bp, Homo sapien
gatgtgtaatatactggcccctttc

SEQ ID NO: 2936372 - DNA, 25 bp, Homo sapien
tagcatggacccatcaaaaggcaac

SEQ ID NO: 2936373 - DNA, 25 bp, Homo sapien
tatgacccttctccggcaacagtgt

SEQ ID NO: 2936374 - DNA, 25 bp, Homo sapien
cattctcagtactagacaatggcca

SEQ ID NO: 2936375 - DNA, 25 bp, Homo sapien
gggagggtaaatcagtgcagccact

SEQ ID NO: 2936376 - DNA, 25 bp, Homo sapien
caaatgaaactcatctctgctggtg

SEQ ID NO: 2936377 - DNA, 25 bp, Homo sapien
aaaccatcggctatcacactctaca

SEQ ID NO: 2936378 - DNA, 25 bp, Homo sapien
cattatctcgtaaagttgaaggagc

SEQ ID NO: 2936379 - DNA, 25 bp, Homo sapien
tcaagatgtgggcaaacagtgggtt

SEQ ID NO: 2936380 - DNA, 25 bp, Homo sapien
gtgggttaagtcagaatccagttct

SEQ ID NO: 2936381 - DNA, 25 bp, Homo sapien
ttcctcagccagcccgagaatactg

SEQ ID NO: 2936382 - DNA, 25 bp, Homo sapien
ccagcccgagaatactgccatttta

SEQ ID NO: 2936383 - DNA, 25 bp, Homo sapien
tgaacagccaatagttcctgcagcc

SEQ ID NO: 2936384 - DNA, 25 bp, Homo sapien
gctggctgaacagccaatagttcct

SEQ ID NO: 2936385 - DNA, 25 bp, Homo sapien
gctgaacagccaatagttcctgcag

SEQ ID NO: 2936386 - DNA, 25 bp, Homo sapien
cagccaatagttcctgcagcccggg

SEQ ID NO: 2936387 - DNA, 25 bp, Homo sapien
caccagggcactcccagacacgggg

SEQ ID NO: 2936388 - DNA, 25 bp, Homo sapien
ccaaccccactaggaagggcaccag

SEQ ID NO: 2936389 - DNA, 25 bp, Homo sapien
gcaccagggcactcccagacacggg

SEQ ID NO: 2936390 - DNA, 25 bp, Homo sapien
gattgcagaccccatgtaacaggca

SEQ ID NO: 2936391 - DNA, 25 bp, Homo sapien
gagaggcccaaagaagtcatatccc

SEQ ID NO: 2936392 - DNA, 25 bp, Homo sapien
gcaagatgtcgtgggtactacagcc

SEQ ID NO: 2936393 - DNA, 25 bp, Homo sapien
taggatgctccgctgagaatcccag

SEQ ID NO: 2936394 - DNA, 25 bp, Homo sapien
gccggtagctgctgccgtcctgtga

SEQ ID NO: 2936395 - DNA, 25 bp, Homo sapien
ggcactggtcgggatgtggtgaggc

SEQ ID NO: 2936396 - DNA, 25 bp, Homo sapien
tgaatcccgacgctctggctccatg

SEQ ID NO: 2936397 - DNA, 25 bp, Homo sapien
gctagggcccatgcggctcttctca

SEQ ID NO: 2936398 - DNA, 25 bp, Homo sapien
tgtagccaccataggactgggccac

SEQ ID NO: 2936399 - DNA, 25 bp, Homo sapien
taggactgggccaccggctgctgct

SEQ ID NO: 2936400 - DNA, 25 bp, Homo sapien
tcaggagaatccatgagctgtgtcc

SEQ ID NO: 2936401 - DNA, 25 bp, Homo sapien
tgcccactacgccaaccaatttcct

SEQ ID NO: 2936402 - DNA, 25 bp, Homo sapien
acaaggctgagatccttatcatcac

SEQ ID NO: 2936403 - DNA, 25 bp, Homo sapien
gagatccttatcatcacacacaaca

SEQ ID NO: 2936404 - DNA, 25 bp, Homo sapien
tcagagtaggtgaaccagacggacg

SEQ ID NO: 2936405 - DNA, 25 bp, Homo sapien
ggtgaccaacacgaagagctctttt

SEQ ID NO: 2936406 - DNA, 25 bp, Homo sapien
gatgcgctttacacgacatggctgg

SEQ ID NO: 2936407 - DNA, 25 bp, Homo sapien
cagccagcggagtcgagtgatgcaa

SEQ ID NO: 2936408 - DNA, 25 bp, Homo sapien
tgtgtgcccagagcatcagactcca

SEQ ID NO: 2936409 - DNA, 25 bp, Homo sapien
gcaggacttacagagccgggacttc

SEQ ID NO: 2936410 - DNA, 25 bp, Homo sapien
tcctgctgggcttattcacttgctc

SEQ ID NO: 2936411 - DNA, 25 bp, Homo sapien
tatacttcagactaactcttgcgcc

SEQ ID NO: 2936412 - DNA, 25 bp, Homo sapien
ctcagaaatggagcaccaggctctg

SEQ ID NO: 2936413 - DNA, 25 bp, Homo sapien
tgctttctgagagcaatcgatcttt

SEQ ID NO: 2936414 - DNA, 25 bp, Homo sapien
ggctctgctgcaaagattcttaacc

SEQ ID NO: 2936415 - DNA, 25 bp, Homo sapien
aatcgatcttttacaacctttggca

SEQ ID NO: 2936416 - DNA, 25 bp, Homo sapien
ctaactctccacgaccctggagcag

SEQ ID NO: 2936417 - DNA, 25 bp, Homo sapien
ttttctaactctccacgaccctgga

SEQ ID NO: 2936418 - DNA, 25 bp, Homo sapien
aactctccacgaccctggagcagag

SEQ ID NO: 2936419 - DNA, 25 bp, Homo sapien
ctgggtctgagcatttttttctaac

SEQ ID NO: 2936420 - DNA, 25 bp, Homo sapien
agcatccccgtgtcgccggtgcgct

SEQ ID NO: 2936421 - DNA, 25 bp, Homo sapien
gtacatccagccgtcgtcgatctgc

SEQ ID NO: 2936422 - DNA, 25 bp, Homo sapien
tgtagtcatacaccgcgcggtaccg

SEQ ID NO: 2936423 - DNA, 25 bp, Homo sapien
atggtgtccccgtcctggaaggaga

SEQ ID NO: 2936424 - DNA, 25 bp, Homo sapien
taggaatcacaagctgtcgcaggtt

SEQ ID NO: 2936425 - DNA, 25 bp, Homo sapien
cactgaagaatggacgggtcacgcc

SEQ ID NO: 2936426 - DNA, 25 bp, Homo sapien
aaatcacagtgtgcgaaggaacgcg

SEQ ID NO: 2936427 - DNA, 25 bp, Homo sapien
actggtccctacacagcggcagagt

SEQ ID NO: 2936428 - DNA, 25 bp, Homo sapien
gaaggaggaatttcattccaaagaa

SEQ ID NO: 2936429 - DNA, 25 bp, Homo sapien
acatatgcctggagtgacagagcct

SEQ ID NO: 2936430 - DNA, 25 bp, Homo sapien
cagcaggctgcagaccctatggcag

SEQ ID NO: 2936431 - DNA, 25 bp, Homo sapien
gggtgacacttctgccaccctattc

SEQ ID NO: 2936432 - DNA, 25 bp, Homo sapien
ctttcttgcttcaagggagctttat

SEQ ID NO: 2936433 - DNA, 25 bp, Homo sapien
ctctttcttgcttcaagggagcttt

SEQ ID NO: 2936434 - DNA, 25 bp, Homo sapien
tctttcttgcttcaagggagcttta

SEQ ID NO: 2936435 - DNA, 25 bp, Homo sapien
caggaactggatatagcaccgtctt

SEQ ID NO: 2936436 - DNA, 25 bp, Homo sapien
aactggatatagcaccgtctttccc

SEQ ID NO: 2936437 - DNA, 25 bp, Homo sapien
ggaactggatatagcaccgtctttc

SEQ ID NO: 2936438 - DNA, 25 bp, Homo sapien
ctggatatagcaccgtctttccctc

SEQ ID NO: 2936439 - DNA, 25 bp, Homo sapien
catgactggcttgccttatctggga

SEQ ID NO: 2936440 - DNA, 25 bp, Homo sapien
aagcagttgacaaaaacacccatga

SEQ ID NO: 2936441 - DNA, 25 bp, Homo sapien
ccacattgtgctttgagatcaagag

SEQ ID NO: 2936442 - DNA, 25 bp, Homo sapien
tgttgaacaggccaataccttcagg

SEQ ID NO: 2936443 - DNA, 25 bp, Homo sapien
ccagaaaggtttgatcccgagcaca

SEQ ID NO: 2936444 - DNA, 25 bp, Homo sapien
taaaaagatgaactggcggcttcac

SEQ ID NO: 2936445 - DNA, 25 bp, Homo sapien
ttttggtaaagaacagacgcccagc

SEQ ID NO: 2936446 - DNA, 25 bp, Homo sapien
tggacagaggcaaatttcacgtggt

SEQ ID NO: 2936447 - DNA, 25 bp, Homo sapien
gagatgccagatttagacccacaga

SEQ ID NO: 2936448 - DNA, 25 bp, Homo sapien
tgtatctaaatggagcctgcatgct

SEQ ID NO: 2936449 - DNA, 25 bp, Homo sapien
cacacctcgggcagattatctcaga

SEQ ID NO: 2936450 - DNA, 25 bp, Homo sapien
tctggtgaaccgtgagctgtgagca

SEQ ID NO: 2936451 - DNA, 25 bp, Homo sapien
gagcagatagataatgtaggacaga

SEQ ID NO: 2936452 - DNA, 25 bp, Homo sapien
ctagagcagatagataatgtaggac

SEQ ID NO: 2936453 - DNA, 25 bp, Homo sapien
agataatgtaggacagaatgaccag

SEQ ID NO: 2936454 - DNA, 25 bp, Homo sapien
gatagataatgtaggacagaatgac

SEQ ID NO: 2936455 - DNA, 25 bp, Homo sapien
ccttccttctgagctgttctccagc

SEQ ID NO: 2936456 - DNA, 25 bp, Homo sapien
tccagcaggctccggccgcagctcc

SEQ ID NO: 2936457 - DNA, 25 bp, Homo sapien
tccttctgagctgttctccagcagg

SEQ ID NO: 2936458 - DNA, 25 bp, Homo sapien
agcaggctccggccgcagctccagg

SEQ ID NO: 2936459 - DNA, 25 bp, Homo sapien
agcagggcactcggccattcatctc

SEQ ID NO: 2936460 - DNA, 25 bp, Homo sapien
aagcagggcactcggccattcatct

SEQ ID NO: 2936461 - DNA, 25 bp, Homo sapien
agggcactcggccattcatctccat

SEQ ID NO: 2936462 - DNA, 25 bp, Homo sapien
gcaagcagggcactcggccattcat

SEQ ID NO: 2936463 - DNA, 25 bp, Homo sapien
ccgagataacagcagaagcaaaaat

SEQ ID NO: 2936464 - DNA, 25 bp, Homo sapien
catctacagctcaaacatatgcagt

SEQ ID NO: 2936465 - DNA, 25 bp, Homo sapien
aagccccttgcttgccaggggtcag

SEQ ID NO: 2936466 - DNA, 25 bp, Homo sapien
cctcttgttggactggagagaccag

SEQ ID NO: 2936467 - DNA, 25 bp, Homo sapien
cttctgtggatgagaggcctcttgt

SEQ ID NO: 2936468 - DNA, 25 bp, Homo sapien
gtgcaaagagaggactatataacca

SEQ ID NO: 2936469 - DNA, 25 bp, Homo sapien
gatttgcaggccaattctactctga

SEQ ID NO: 2936470 - DNA, 25 bp, Homo sapien
tcagttgtgacatataatgcctcaa

SEQ ID NO: 2936471 - DNA, 25 bp, Homo sapien
ctggcctagccctaaagtttaaatg

SEQ ID NO: 2936472 - DNA, 25 bp, Homo sapien
taaatatatccaggttcacagccat

SEQ ID NO: 2936473 - DNA, 25 bp, Homo sapien
ggcgcatgcctgaattacctaggta

SEQ ID NO: 2936474 - DNA, 25 bp, Homo sapien
tgtcacatcaaggactccactgaag

SEQ ID NO: 2936475 - DNA, 25 bp, Homo sapien
tggacccctccaaaatactggcgca

SEQ ID NO: 2936476 - DNA, 25 bp, Homo sapien
gccactatgtcctttggctgcgtgc

SEQ ID NO: 2936477 - DNA, 25 bp, Homo sapien
cgggccactatgtcctttggctgcg

SEQ ID NO: 2936478 - DNA, 25 bp, Homo sapien
gcagcccattagcttcctcggccat

SEQ ID NO: 2936479 - DNA, 25 bp, Homo sapien
ggccactatgtcctttggctgcgtg

SEQ ID NO: 2936480 - DNA, 25 bp, Homo sapien
ccagcaacttgcccgcggagctgtt

SEQ ID NO: 2936481 - DNA, 25 bp, Homo sapien
aaagggtggggacatacatcctcag

SEQ ID NO: 2936482 - DNA, 25 bp, Homo sapien
ggagctgttccaaatatccacggga

SEQ ID NO: 2936483 - DNA, 25 bp, Homo sapien
catacatcctcagcaagagggagtg

SEQ ID NO: 2936484 - DNA, 25 bp, Homo sapien
ggcctcagctgcagaaatgcctgaa

SEQ ID NO: 2936485 - DNA, 25 bp, Homo sapien
cagctgcagaaatgcctgaatttcc

SEQ ID NO: 2936486 - DNA, 25 bp, Homo sapien
gcagaaatgcctgaatttccattca

SEQ ID NO: 2936487 - DNA, 25 bp, Homo sapien
gatggggctttggggcctcagctgc

SEQ ID NO: 2936488 - DNA, 25 bp, Homo sapien
ccaggtaaagcttgtctgctgtatg

SEQ ID NO: 2936489 - DNA, 25 bp, Homo sapien
caggtaaagcttgtctgctgtatgt

SEQ ID NO: 2936490 - DNA, 25 bp, Homo sapien
aggtaaagcttgtctgctgtatgtg

SEQ ID NO: 2936491 - DNA, 25 bp, Homo sapien
cacctgatgccttaccatttcatct

SEQ ID NO: 2936492 - DNA, 25 bp, Homo sapien
tttgattcccacctgatgccttacc

SEQ ID NO: 2936493 - DNA, 25 bp, Homo sapien
gattcccacctgatgccttaccatt

SEQ ID NO: 2936494 - DNA, 25 bp, Homo sapien
gatgccttaccatttcatcttttgg

SEQ ID NO: 2936495 - DNA, 25 bp, Homo sapien
ctttacatctgacacctacaatctc

SEQ ID NO: 2936496 - DNA, 25 bp, Homo sapien
cttctttacatctgacacctacaat

SEQ ID NO: 2936497 - DNA, 25 bp, Homo sapien
tttacatctgacacctacaatctct

SEQ ID NO: 2936498 - DNA, 25 bp, Homo sapien
tctttacatctgacacctacaatct

SEQ ID NO: 2936499 - DNA, 25 bp, Homo sapien
tagtagccacagtagttgccaacct

SEQ ID NO: 2936500 - DNA, 25 bp, Homo sapien
acccagaggcgcagctgggacatga

SEQ ID NO: 2936501 - DNA, 25 bp, Homo sapien
tgggacatgacaggcgctggcgccg

SEQ ID NO: 2936502 - DNA, 25 bp, Homo sapien
tgccaacctgaggaggtgccgtggg

SEQ ID NO: 2936503 - DNA, 25 bp, Homo sapien
aagcgcaaagggagattcgggtggg

SEQ ID NO: 2936504 - DNA, 25 bp, Homo sapien
ctgggaggaagcagaggaccccagg

SEQ ID NO: 2936505 - DNA, 25 bp, Homo sapien
ggaagcagaggaccccaggtaatca

SEQ ID NO: 2936506 - DNA, 25 bp, Homo sapien
gtaagcgcaaagggagattcgggtg

SEQ ID NO: 2936507 - DNA, 25 bp, Homo sapien
ttgaggcgaggaggccgagcaaagg

SEQ ID NO: 2936508 - DNA, 25 bp, Homo sapien
ggaggccgagcaaaggtctgtttct

SEQ ID NO: 2936509 - DNA, 25 bp, Homo sapien
ggtgtgcagccgctaactgctctgg

SEQ ID NO: 2936510 - DNA, 25 bp, Homo sapien
gatcccagtccagcactgagacccc

SEQ ID NO: 2936511 - DNA, 25 bp, Homo sapien
tctggctctggagttagcgcaagct

SEQ ID NO: 2936512 - DNA, 25 bp, Homo sapien
ggagttagcgcaagctccacatcca

SEQ ID NO: 2936513 - DNA, 25 bp, Homo sapien
ctctggagttagcgcaagctccaca

SEQ ID NO: 2936514 - DNA, 25 bp, Homo sapien
catgatgtatcaatggcagagctac

SEQ ID NO: 2936515 - DNA, 25 bp, Homo sapien
ttctgaaattatggtaatctccaca

SEQ ID NO: 2936516 - DNA, 25 bp, Homo sapien
gttctgaaattatggtaatctccac

SEQ ID NO: 2936517 - DNA, 25 bp, Homo sapien
gggggaaggtgcacactccatagga

SEQ ID NO: 2936518 - DNA, 25 bp, Homo sapien
tgggggaaggtgcacactccatagg

SEQ ID NO: 2936519 - DNA, 25 bp, Homo sapien
gggaaggtgcacactccataggagg

SEQ ID NO: 2936520 - DNA, 25 bp, Homo sapien
gaaggtgcacactccataggaggac

SEQ ID NO: 2936521 - DNA, 25 bp, Homo sapien
ctcctggctcgcagaaggttccact

SEQ ID NO: 2936522 - DNA, 25 bp, Homo sapien
tggctcgcagaaggttccactcctc

SEQ ID NO: 2936523 - DNA, 25 bp, Homo sapien
tttaactgtaacgttggacaagtca

SEQ ID NO: 2936524 - DNA, 25 bp, Homo sapien
gacaagtcaaaaggaacttcatcct

SEQ ID NO: 2936525 - DNA, 25 bp, Homo sapien
aaatagaaggctgagctggctgctc

SEQ ID NO: 2936526 - DNA, 25 bp, Homo sapien
ttcccagaagaaatagaaggctgag

SEQ ID NO: 2936527 - DNA, 25 bp, Homo sapien
aagaaatagaaggctgagctggctg

SEQ ID NO: 2936528 - DNA, 25 bp, Homo sapien
cttcccagaagaaatagaaggctga

SEQ ID NO: 2936529 - DNA, 25 bp, Homo sapien
tgactctggacgcagaggtgcacca

SEQ ID NO: 2936530 - DNA, 25 bp, Homo sapien
atgactctggacgcagaggtgcacc

SEQ ID NO: 2936531 - DNA, 25 bp, Homo sapien
actctggacgcagaggtgcaccacc

SEQ ID NO: 2936532 - DNA, 25 bp, Homo sapien
gactctggacgcagaggtgcaccac

SEQ ID NO: 2936533 - DNA, 25 bp, Homo sapien
ctgggctggagaagactcagcctcc

SEQ ID NO: 2936534 - DNA, 25 bp, Homo sapien
atctggagtctgaggttgggcctct

SEQ ID NO: 2936535 - DNA, 25 bp, Homo sapien
tagggggatctggagtctgaggttg

SEQ ID NO: 2936536 - DNA, 25 bp, Homo sapien
gggctggagaagactcagcctcctc

SEQ ID NO: 2936537 - DNA, 25 bp, Homo sapien
cgagagggttctatgaccacagggg

SEQ ID NO: 2936538 - DNA, 25 bp, Homo sapien
tccgagagggttctatgaccacagg

SEQ ID NO: 2936539 - DNA, 25 bp, Homo sapien
gtccgagagggttctatgaccacag

SEQ ID NO: 2936540 - DNA, 25 bp, Homo sapien
gggtccgagagggttctatgaccac

SEQ ID NO: 2936541 - DNA, 25 bp, Homo sapien
gttaagagatggttccacttcctga

SEQ ID NO: 2936542 - DNA, 25 bp, Homo sapien
gaattgtcatctcatgcactggagg

SEQ ID NO: 2936543 - DNA, 25 bp, Homo sapien
gctattggaattgtcatctcatgca

SEQ ID NO: 2936544 - DNA, 25 bp, Homo sapien
cctggcctgctattggaattgtcat

SEQ ID NO: 2936545 - DNA, 25 bp, Homo sapien
cttggtcctggcctgctattggaat

SEQ ID NO: 2936546 - DNA, 25 bp, Homo sapien
aaaaaaacatggttgcggagttgtg

SEQ ID NO: 2936547 - DNA, 25 bp, Homo sapien
aaaaacatggttgcggagttgtggt

SEQ ID NO: 2936548 - DNA, 25 bp, Homo sapien
actatgacctgttaggtttgtgtgc

SEQ ID NO: 2936549 - DNA, 25 bp, Homo sapien
gttgaactatgacctgttaggtttg

SEQ ID NO: 2936550 - DNA, 25 bp, Homo sapien
caacctctgtaggtgtctctggaag

SEQ ID NO: 2936551 - DNA, 25 bp, Homo sapien
tggtgttggaattgtcacctcataa

SEQ ID NO: 2936552 - DNA, 25 bp, Homo sapien
agctgcaacctctgtaggtgtctct

SEQ ID NO: 2936553 - DNA, 25 bp, Homo sapien
ttgagctgcaacctctgtaggtgtc

SEQ ID NO: 2936554 - DNA, 25 bp, Homo sapien
ctgtgacactggacagtgttgaatg

SEQ ID NO: 2936555 - DNA, 25 bp, Homo sapien
gtgttggaactgttaccccttgata

SEQ ID NO: 2936556 - DNA, 25 bp, Homo sapien
ctggtgttggaactgttaccccttg

SEQ ID NO: 2936557 - DNA, 25 bp, Homo sapien
cctgacctggtgttggaactgttac

SEQ ID NO: 2936558 - DNA, 25 bp, Homo sapien
gttggaactgttaccccttgatatg

SEQ ID NO: 2936559 - DNA, 25 bp, Homo sapien
caaaggttgagctgtaacgctgggt

SEQ ID NO: 2936560 - DNA, 25 bp, Homo sapien
tccaaaggttgagctgtaacgctgg

SEQ ID NO: 2936561 - DNA, 25 bp, Homo sapien
ggtccaaaggttgagctgtaacgct

SEQ ID NO: 2936562 - DNA, 25 bp, Homo sapien
aggtccaaaggttgagctgtaacgc

SEQ ID NO: 2936563 - DNA, 25 bp, Homo sapien
gacttgagtcaggttcgaatggaga

SEQ ID NO: 2936564 - DNA, 25 bp, Homo sapien
gcctcgtgttggcatggacgtctca

SEQ ID NO: 2936565 - DNA, 25 bp, Homo sapien
ggacgtctcataatacacaggaggt

SEQ ID NO: 2936566 - DNA, 25 bp, Homo sapien
cctggtctggacgtggagctatagt

SEQ ID NO: 2936567 - DNA, 25 bp, Homo sapien
aggtgccattgtaggtgttgggctc

SEQ ID NO: 2936568 - DNA, 25 bp, Homo sapien
ggtgaaggtgccattgtaggtgttg

SEQ ID NO: 2936569 - DNA, 25 bp, Homo sapien
gaaggtgccattgtaggtgttgggc

SEQ ID NO: 2936570 - DNA, 25 bp, Homo sapien
aagatggtgaaggtgccattgtagg

SEQ ID NO: 2936571 - DNA, 25 bp, Homo sapien
atatccttgaataggtaggaaaaga

SEQ ID NO: 2936572 - DNA, 25 bp, Homo sapien
aatgaacaggataagtaaaagaatc

SEQ ID NO: 2936573 - DNA, 25 bp, Homo sapien
aagaatgaacaggataagtaaaaga

SEQ ID NO: 2936574 - DNA, 25 bp, Homo sapien
tccttgaataggtaggaaaagaatg

SEQ ID NO: 2936575 - DNA, 25 bp, Homo sapien
tccatacatcttcaccaatgtaaga

SEQ ID NO: 2936576 - DNA, 25 bp, Homo sapien
ccatacatcttcaccaatgtaagaa

SEQ ID NO: 2936577 - DNA, 25 bp, Homo sapien
catacatcttcaccaatgtaagaaa

SEQ ID NO: 2936578 - DNA, 25 bp, Homo sapien
tacatcttcaccaatgtaagaaata

SEQ ID NO: 2936579 - DNA, 25 bp, Homo sapien
tcatatttggagagaatatactcac

SEQ ID NO: 2936580 - DNA, 25 bp, Homo sapien
tgtcatatttggagagaatatactc

SEQ ID NO: 2936581 - DNA, 25 bp, Homo sapien
tttgtcatatttggagagaatatac

SEQ ID NO: 2936582 - DNA, 25 bp, Homo sapien
agttttttgtcatatttggagagaa

SEQ ID NO: 2936583 - DNA, 25 bp, Homo sapien
gatggtgtaacgttgtctggctgat

SEQ ID NO: 2936584 - DNA, 25 bp, Homo sapien
tggtgtaacgttgtctggctgatgt

SEQ ID NO: 2936585 - DNA, 25 bp, Homo sapien
ctggatggtgtaacgttgtctggct

SEQ ID NO: 2936586 - DNA, 25 bp, Homo sapien
ggtgtaacgttgtctggctgatgtc

SEQ ID NO: 2936587 - DNA, 25 bp, Homo sapien
agcttgtcagcttgtccctccctct

SEQ ID NO: 2936588 - DNA, 25 bp, Homo sapien
ttccattgattccagcttgtcagct

SEQ ID NO: 2936589 - DNA, 25 bp, Homo sapien
ttgtcagcttgtccctccctcttta

SEQ ID NO: 2936590 - DNA, 25 bp, Homo sapien
tccattgattccagcttgtcagctt

SEQ ID NO: 2936591 - DNA, 25 bp, Homo sapien
caactgcaaaaatggtagtggttca

SEQ ID NO: 2936592 - DNA, 25 bp, Homo sapien
tgtatgtctttcaataggctgtatt

SEQ ID NO: 2936593 - DNA, 25 bp, Homo sapien
aggctgtattttattgcaggataaa

SEQ ID NO: 2936594 - DNA, 25 bp, Homo sapien
caaatgtatgtctttcaataggctg

SEQ ID NO: 2936595 - DNA, 25 bp, Homo sapien
tgtcagtaaattgcaaccaagattc

SEQ ID NO: 2936596 - DNA, 25 bp, Homo sapien
cagttctgtcagtaaattgcaacca

SEQ ID NO: 2936597 - DNA, 25 bp, Homo sapien
caaagctcagttctgtcagtaaatt

SEQ ID NO: 2936598 - DNA, 25 bp, Homo sapien
gttctgtcagtaaattgcaaccaag

SEQ ID NO: 2936599 - DNA, 25 bp, Homo sapien
caagtgctctcgtgcagtgaacacc

SEQ ID NO: 2936600 - DNA, 25 bp, Homo sapien
tacatcagtcctcttcggagttagt

SEQ ID NO: 2936601 - DNA, 25 bp, Homo sapien
cgcgccgggccaaggtatagccttt

SEQ ID NO: 2936602 - DNA, 25 bp, Homo sapien
cagtgttctctacaaatgcccgggc

SEQ ID NO: 2936603 - DNA, 25 bp, Homo sapien
ccttgttggaagactccttgccgtg

SEQ ID NO: 2936604 - DNA, 25 bp, Homo sapien
gaaagatgtcatccttgttggaaga

SEQ ID NO: 2936605 - DNA, 25 bp, Homo sapien
ggaagactccttgccgtgaggtttc

SEQ ID NO: 2936606 - DNA, 25 bp, Homo sapien
ctccttgccgtgaggtttctgtgcc

SEQ ID NO: 2936607 - DNA, 25 bp, Homo sapien
ggatgactgcgtgtcacccgctgcc

SEQ ID NO: 2936608 - DNA, 25 bp, Homo sapien
acccgctgcccagctagaatgacac

SEQ ID NO: 2936609 - DNA, 25 bp, Homo sapien
acgttactccaccatagactccctg

SEQ ID NO: 2936610 - DNA, 25 bp, Homo sapien
cactgaggggatgactgcgtgtcac

SEQ ID NO: 2936611 - DNA, 25 bp, Homo sapien
gctttggcccagaaggaacggagcc

SEQ ID NO: 2936612 - DNA, 25 bp, Homo sapien
gccgcttcttcagctttggcccaga

SEQ ID NO: 2936613 - DNA, 25 bp, Homo sapien
atccagatgcacttctctggtgcag

SEQ ID NO: 2936614 - DNA, 25 bp, Homo sapien
cttcatccagatgcacttctctggt

SEQ ID NO: 2936615 - DNA, 25 bp, Homo sapien
cggcttcagacttgcccatgtggct

SEQ ID NO: 2936616 - DNA, 25 bp, Homo sapien
gtggaggatactttcttgccccggc

SEQ ID NO: 2936617 - DNA, 25 bp, Homo sapien
agttccaagcccacacctgaagata

SEQ ID NO: 2936618 - DNA, 25 bp, Homo sapien
cctgaagatatcttaggcggttctg

SEQ ID NO: 2936619 - DNA, 25 bp, Homo sapien
gacatgggatttggtggtctgacac

SEQ ID NO: 2936620 - DNA, 25 bp, Homo sapien
catgggatttggtggtctgacacat

SEQ ID NO: 2936621 - DNA, 25 bp, Homo sapien
ttggctctgtataaaccctttcttc

SEQ ID NO: 2936622 - DNA, 25 bp, Homo sapien
cttggtgtttggctctgtataaacc

SEQ ID NO: 2936623 - DNA, 25 bp, Homo sapien
tcccaggcagaaggagaggtttcca

SEQ ID NO: 2936624 - DNA, 25 bp, Homo sapien
gtttccatagcccaggaccacatgc

SEQ ID NO: 2936625 - DNA, 25 bp, Homo sapien
gatgacctgaatgaactcgtctctg

SEQ ID NO: 2936626 - DNA, 25 bp, Homo sapien
tgaatgaactcgtctctggagagtg

SEQ ID NO: 2936627 - DNA, 25 bp, Homo sapien
taaagaaggcgggagtgccgggcca

SEQ ID NO: 2936628 - DNA, 25 bp, Homo sapien
gaaatacactggttttaaccatgca

SEQ ID NO: 2936629 - DNA, 25 bp, Homo sapien
tgtaacatcatccatctcctggaaa

SEQ ID NO: 2936630 - DNA, 25 bp, Homo sapien
tctggaaccctagttctgtaacatc

SEQ ID NO: 2936631 - DNA, 25 bp, Homo sapien
cagtaggagagtggccggcccgaat

SEQ ID NO: 2936632 - DNA, 25 bp, Homo sapien
tttcatctcgggcagcatcctgtca

SEQ ID NO: 2936633 - DNA, 25 bp, Homo sapien
catcctgtcagccagtaggagagtg

SEQ ID NO: 2936634 - DNA, 25 bp, Homo sapien
cggcccgaatagtgcaacctccatt

SEQ ID NO: 2936635 - DNA, 25 bp, Homo sapien
gagtcttggactgactccgtggtgc

SEQ ID NO: 2936636 - DNA, 25 bp, Homo sapien
tcttggactgactccgtggtgcaca

SEQ ID NO: 2936637 - DNA, 25 bp, Homo sapien
cttggactgactccgtggtgcacac

SEQ ID NO: 2936638 - DNA, 25 bp, Homo sapien
agtcttggactgactccgtggtgca

SEQ ID NO: 2936639 - DNA, 25 bp, Homo sapien
ctgagtttagaacttccattcaagt

SEQ ID NO: 2936640 - DNA, 25 bp, Homo sapien
gggccggcctctgagcctgttcctg

SEQ ID NO: 2936641 - DNA, 25 bp, Homo sapien
cgccacgatccctgagtttagaact

SEQ ID NO: 2936642 - DNA, 25 bp, Homo sapien
acaccgccacgatccctgagtttag

SEQ ID NO: 2936643 - DNA, 25 bp, Homo sapien
agcctcccttcgctgagcctgcgcg

SEQ ID NO: 2936644 - DNA, 25 bp, Homo sapien
aaaaggtagcagatccgccagcctc

SEQ ID NO: 2936645 - DNA, 25 bp, Homo sapien
gaaccgcaaaaggtagcagatccgc

SEQ ID NO: 2936646 - DNA, 25 bp, Homo sapien
ttcgctgagcctgcgcggctaaggc

SEQ ID NO: 2936647 - DNA, 25 bp, Homo sapien
cttttgggctccgtggacagccatt

SEQ ID NO: 2936648 - DNA, 25 bp, Homo sapien
tttgggctccgtggacagccattgc

SEQ ID NO: 2936649 - DNA, 25 bp, Homo sapien
gggctccgtggacagccattgctga

SEQ ID NO: 2936650 - DNA, 25 bp, Homo sapien
gccttttgggctccgtggacagcca

SEQ ID NO: 2936651 - DNA, 25 bp, Homo sapien
tcagcggagctaggaattccatatt

SEQ ID NO: 2936652 - DNA, 25 bp, Homo sapien
agcggagctaggaattccatatttg

SEQ ID NO: 2936653 - DNA, 25 bp, Homo sapien
tttcagcggagctaggaattccata

SEQ ID NO: 2936654 - DNA, 25 bp, Homo sapien
tcatttcagcggagctaggaattcc

SEQ ID NO: 2936655 - DNA, 25 bp, Homo sapien
gtaatcctgctctctgggaggccaa

SEQ ID NO: 2936656 - DNA, 25 bp, Homo sapien
caaaaccagcatgagcaacacagcg

SEQ ID NO: 2936657 - DNA, 25 bp, Homo sapien
atcctgctctctgggaggccaagat

SEQ ID NO: 2936658 - DNA, 25 bp, Homo sapien
tcaaaaccagcatgagcaacacagc

SEQ ID NO: 2936659 - DNA, 25 bp, Homo sapien
tgtgggaacagcctccagctatctg

SEQ ID NO: 2936660 - DNA, 25 bp, Homo sapien
cagctatctgctcatcagaggtgct

SEQ ID NO: 2936661 - DNA, 25 bp, Homo sapien
gatggctgctgaactccgacttctt

SEQ ID NO: 2936662 - DNA, 25 bp, Homo sapien
tcgctgagacatgactgtgggaaca

SEQ ID NO: 2936663 - DNA, 25 bp, Homo sapien
catgacagactgttagccaaggaca

SEQ ID NO: 2936664 - DNA, 25 bp, Homo sapien
aagaagttctgcaaacctcccctgg

SEQ ID NO: 2936665 - DNA, 25 bp, Homo sapien
gaggtttggctattgtcacatgaca

SEQ ID NO: 2936666 - DNA, 25 bp, Homo sapien
cagatgtctgcggttgtcagcccct

SEQ ID NO: 2936667 - DNA, 25 bp, Homo sapien
ttgaagatgacaccaagttgaatcc

SEQ ID NO: 2936668 - DNA, 25 bp, Homo sapien
caaaggctgtaatgattccactaat

SEQ ID NO: 2936669 - DNA, 25 bp, Homo sapien
ctggactcagagtgacaaaggctgt

SEQ ID NO: 2936670 - DNA, 25 bp, Homo sapien
ggctgaactttcatcccatctggac

SEQ ID NO: 2936671 - DNA, 25 bp, Homo sapien
tcggggctgtagtgaactgtgattg

SEQ ID NO: 2936672 - DNA, 25 bp, Homo sapien
attagccagacgcagctactcggga

SEQ ID NO: 2936673 - DNA, 25 bp, Homo sapien
tttaattagccagacgcagctactc

SEQ ID NO: 2936674 - DNA, 25 bp, Homo sapien
gagttcaggaggtcggggctgtagt

SEQ ID NO: 2936675 - DNA, 25 bp, Homo sapien
taatgaattggcctgcatctcgctg

SEQ ID NO: 2936676 - DNA, 25 bp, Homo sapien
caggatgtgcgaggacttccaggat

SEQ ID NO: 2936677 - DNA, 25 bp, Homo sapien
tcctgggctctaaccactgtactgg

SEQ ID NO: 2936678 - DNA, 25 bp, Homo sapien
catctcgctgctagaaggtgacggg

SEQ ID NO: 2936679 - DNA, 25 bp, Homo sapien
caactgagagctgaacctaggtccc

SEQ ID NO: 2936680 - DNA, 25 bp, Homo sapien
tctaagcaatggagagatggcctca

SEQ ID NO: 2936681 - DNA, 25 bp, Homo sapien
taaacaatttcgtctctcacggcag

SEQ ID NO: 2936682 - DNA, 25 bp, Homo sapien
tatgagttaaatgagggttgagccc

SEQ ID NO: 2936683 - DNA, 25 bp, Homo sapien
tatagacagtgagatggttaccatg

SEQ ID NO: 2936684 - DNA, 25 bp, Homo sapien
tgatttgccgtcatagacctcgtga

SEQ ID NO: 2936685 - DNA, 25 bp, Homo sapien
ctttgactgtgggatacacacctga

SEQ ID NO: 2936686 - DNA, 25 bp, Homo sapien
acttacagcaccttgtgatttgccg

SEQ ID NO: 2936687 - DNA, 25 bp, Homo sapien
gggcgcagtcctgggttaagtagga

SEQ ID NO: 2936688 - DNA, 25 bp, Homo sapien
gaatgacattccaaggtcttgaatg

SEQ ID NO: 2936689 - DNA, 25 bp, Homo sapien
tttcaggggctgaagtgtcctgcag

SEQ ID NO: 2936690 - DNA, 25 bp, Homo sapien
gagagcatgctttggtgccagaccc

SEQ ID NO: 2936691 - DNA, 25 bp, Homo sapien
cctttccgaggcagacttgagtcca

SEQ ID NO: 2936692 - DNA, 25 bp, Homo sapien
cattgccaacatcgaaactgacagg

SEQ ID NO: 2936693 - DNA, 25 bp, Homo sapien
cttggacggccccaacatgctggtc

SEQ ID NO: 2936694 - DNA, 25 bp, Homo sapien
tgagtccagatatatgtcagggcct

SEQ ID NO: 2936695 - DNA, 25 bp, Homo sapien
cttgagccccgtctgaatccaggag

SEQ ID NO: 2936696 - DNA, 25 bp, Homo sapien
gctactcagtatgtggcgcccctga

SEQ ID NO: 2936697 - DNA, 25 bp, Homo sapien
ggcaaaaatgcctgctacccagaag

SEQ ID NO: 2936698 - DNA, 25 bp, Homo sapien
tggaagccgcgctgctttagtgagc

SEQ ID NO: 2936699 - DNA, 25 bp, Homo sapien
tttcccgagggaggctaagagctct

SEQ ID NO: 2936700 - DNA, 25 bp, Homo sapien
ctgggaggcggccatcggactcttc

SEQ ID NO: 2936701 - DNA, 25 bp, Homo sapien
ctcttcctttgtgcagatctctctg

SEQ ID NO: 2936702 - DNA, 25 bp, Homo sapien
gaagcattagttctcctggaggatg

SEQ ID NO: 2936703 - DNA, 25 bp, Homo sapien
tccttgtcttgtcctagcttctgga

SEQ ID NO: 2936704 - DNA, 25 bp, Homo sapien
gtttacataaagacaccggtcattg

SEQ ID NO: 2936705 - DNA, 25 bp, Homo sapien
gccttcattgtgacagggatcctcc

SEQ ID NO: 2936706 - DNA, 25 bp, Homo sapien
tgtaaacagcgtcactctaatctct

SEQ ID NO: 2936707 - DNA, 25 bp, Homo sapien
tggtaaataccaatctcacagagtt

SEQ ID NO: 2936708 - DNA, 25 bp, Homo sapien
agtcctggccctcgatcttggtcct

SEQ ID NO: 2936709 - DNA, 25 bp, Homo sapien
taagagcagaatatgaggcccatga

SEQ ID NO: 2936710 - DNA, 25 bp, Homo sapien
cagatgtcgtctccagtgctgtgga

SEQ ID NO: 2936711 - DNA, 25 bp, Homo sapien
catgcgaggcgagctctggctcctg

SEQ ID NO: 2936712 - DNA, 25 bp, Homo sapien
agtgacggtggagacaccgatgccc

SEQ ID NO: 2936713 - DNA, 25 bp, Homo sapien
gacagcgggagagtcatcaggaccc

SEQ ID NO: 2936714 - DNA, 25 bp, Homo sapien
tcccaaacacatagggtgtgtgagt

SEQ ID NO: 2936715 - DNA, 25 bp, Homo sapien
cactaaccccaggaaacagatggta

SEQ ID NO: 2936716 - DNA, 25 bp, Homo sapien
cagatgggctctggcagtcaactct

SEQ ID NO: 2936717 - DNA, 25 bp, Homo sapien
tgaaatgcaatcagcccagatgggc

SEQ ID NO: 2936718 - DNA, 25 bp, Homo sapien
ccagagtatgctcagagagatgccc

SEQ ID NO: 2936719 - DNA, 25 bp, Homo sapien
cctgcgagcatctggcggagtactt

SEQ ID NO: 2936720 - DNA, 25 bp, Homo sapien
tcgctcaggagaaacctcggcttct

SEQ ID NO: 2936721 - DNA, 25 bp, Homo sapien
caggaacatgccatgtagtgggcgc

SEQ ID NO: 2936722 - DNA, 25 bp, Homo sapien
tacttggaagcctattggaaggcca

SEQ ID NO: 2936723 - DNA, 25 bp, Homo sapien
ccaaatagcggcctcggaaaagctg

SEQ ID NO: 2936724 - DNA, 25 bp, Homo sapien
tcaatgtccaaatagcggcctcgga

SEQ ID NO: 2936725 - DNA, 25 bp, Homo sapien
atagcggcctcggaaaagctggcac

SEQ ID NO: 2936726 - DNA, 25 bp, Homo sapien
aatgtccaaatagcggcctcggaaa

SEQ ID NO: 2936727 - DNA, 25 bp, Homo sapien
gcttcctcagcctttcttgaatttt

SEQ ID NO: 2936728 - DNA, 25 bp, Homo sapien
cacccagccagtatagttttcttta

SEQ ID NO: 2936729 - DNA, 25 bp, Homo sapien
cgcacccagccagtatagttttctt

SEQ ID NO: 2936730 - DNA, 25 bp, Homo sapien
ctggaaggcttcctcagcctttctt

SEQ ID NO: 2936731 - DNA, 25 bp, Homo sapien
acccagcctactctctgatttatga

SEQ ID NO: 2936732 - DNA, 25 bp, Homo sapien
tgagggcagccaatagtggtaacca

SEQ ID NO: 2936733 - DNA, 25 bp, Homo sapien
gcctactctctgatttatgagggca

SEQ ID NO: 2936734 - DNA, 25 bp, Homo sapien
gtggtaaccattatcatcccatgag

SEQ ID NO: 2936735 - DNA, 25 bp, Homo sapien
cacttgctattagagttgggtgagg

SEQ ID NO: 2936736 - DNA, 25 bp, Homo sapien
ctccgccttccccaaggtgttgtga

SEQ ID NO: 2936737 - DNA, 25 bp, Homo sapien
gatcagaggaatgacagactgacca

SEQ ID NO: 2936738 - DNA, 25 bp, Homo sapien
gacagactgaccattcacttgctat

SEQ ID NO: 2936739 - DNA, 25 bp, Homo sapien
tgaaagaaccggacaggaatacgga

SEQ ID NO: 2936740 - DNA, 25 bp, Homo sapien
ccggacaggaatacggacgaaattg

SEQ ID NO: 2936741 - DNA, 25 bp, Homo sapien
aggaatacggacgaaattggagcag

SEQ ID NO: 2936742 - DNA, 25 bp, Homo sapien
caggaatacggacgaaattggagca

SEQ ID NO: 2936743 - DNA, 25 bp, Homo sapien
gacaggaatacggacgaaattggag

SEQ ID NO: 2936744 - DNA, 25 bp, Homo sapien
cggacaggaatacggacgaaattgg

SEQ ID NO: 2936745 - DNA, 25 bp, Homo sapien
tgctccaatttcgtccgtattcctg

SEQ ID NO: 2936746 - DNA, 25 bp, Homo sapien
tccgtattcctgtccggttctttca

SEQ ID NO: 2936747 - DNA, 25 bp, Homo sapien
ctgctccaatttcgtccgtattcct

SEQ ID NO: 2936748 - DNA, 25 bp, Homo sapien
ccaatttcgtccgtattcctgtccg

SEQ ID NO: 2936749 - DNA, 25 bp, Homo sapien
gctccaatttcgtccgtattcctgt

SEQ ID NO: 2936750 - DNA, 25 bp, Homo sapien
caatttcgtccgtattcctgtccgg

SEQ ID NO: 2936751 - DNA, 25 bp, Homo sapien
ggcccgagcgagctctttcctttcg

SEQ ID NO: 2936752 - DNA, 25 bp, Homo sapien
gcccgagcgagctctttcctttcgc

SEQ ID NO: 2936753 - DNA, 25 bp, Homo sapien
gggcccgagcgagctctttcctttc

SEQ ID NO: 2936754 - DNA, 25 bp, Homo sapien
gccgggcccgagcgagctctttcct

SEQ ID NO: 2936755 - DNA, 25 bp, Homo sapien
ccgggcccgagcgagctctttcctt

SEQ ID NO: 2936756 - DNA, 25 bp, Homo sapien
cgggcccgagcgagctctttccttt

SEQ ID NO: 2936757 - DNA, 25 bp, Homo sapien
aaaggaaagagctcgctcgggcccg

SEQ ID NO: 2936758 - DNA, 25 bp, Homo sapien
gaaaggaaagagctcgctcgggccc

SEQ ID NO: 2936759 - DNA, 25 bp, Homo sapien
cgaaaggaaagagctcgctcgggcc

SEQ ID NO: 2936760 - DNA, 25 bp, Homo sapien
aggaaagagctcgctcgggcccggc

SEQ ID NO: 2936761 - DNA, 25 bp, Homo sapien
aaggaaagagctcgctcgggcccgg

SEQ ID NO: 2936762 - DNA, 25 bp, Homo sapien
gcgaaaggaaagagctcgctcgggc

SEQ ID NO: 2936763 - DNA, 25 bp, Homo sapien
tttcctttcgctgctgcggccgcag

SEQ ID NO: 2936764 - DNA, 25 bp, Homo sapien
gagctctttcctttcgctgctgcgg

SEQ ID NO: 2936765 - DNA, 25 bp, Homo sapien
ataatgggaggagccgggcccgagc

SEQ ID NO: 2936766 - DNA, 25 bp, Homo sapien
ggcccgagcgagctctttcctttcg

SEQ ID NO: 2936767 - DNA, 25 bp, Homo sapien
cgggcccgagcgagctctttccttt

SEQ ID NO: 2936768 - DNA, 25 bp, Homo sapien
cgagcgagctctttcctttcgctgc

SEQ ID NO: 2936769 - DNA, 25 bp, Homo sapien
gcagcgaaaggaaagagctcgctcg

SEQ ID NO: 2936770 - DNA, 25 bp, Homo sapien
aaaggaaagagctcgctcgggcccg

SEQ ID NO: 2936771 - DNA, 25 bp, Homo sapien
gccgcagcagcgaaaggaaagagct

SEQ ID NO: 2936772 - DNA, 25 bp, Homo sapien
gaaaggaaagagctcgctcgggccc

SEQ ID NO: 2936773 - DNA, 25 bp, Homo sapien
ctgcggccgcagcagcgaaaggaaa

SEQ ID NO: 2936774 - DNA, 25 bp, Homo sapien
cgaaaggaaagagctcgctcgggcc

SEQ ID NO: 2936775 - DNA, 25 bp, Homo sapien
tgagaccaggaaaagtctgccccgg

SEQ ID NO: 2936776 - DNA, 25 bp, Homo sapien
tttcacgtgatgtagggcaagccta

SEQ ID NO: 2936777 - DNA, 25 bp, Homo sapien
cgctgacgcgtgtcgacaagggact

SEQ ID NO: 2936778 - DNA, 25 bp, Homo sapien
agagcaaacggagcgaacaagacca

SEQ ID NO: 2936779 - DNA, 25 bp, Homo sapien
gagccgatctctgctttcacgtgat

SEQ ID NO: 2936780 - DNA, 25 bp, Homo sapien
agcgtcgcagcaactgagaccagga

SEQ ID NO: 2936781 - DNA, 25 bp, Homo sapien
tcacgtgaaagcagagatcggctcc

SEQ ID NO: 2936782 - DNA, 25 bp, Homo sapien
cgtttgctctgctcgcgtgggtcga

SEQ ID NO: 2936783 - DNA, 25 bp, Homo sapien
ttgtcgacacgcgtcagcgcctgat

SEQ ID NO: 2936784 - DNA, 25 bp, Homo sapien
tcctggtctcagttgctgcgacgct

SEQ ID NO: 2936785 - DNA, 25 bp, Homo sapien
taggcttgccctacatcacgtgaaa

SEQ ID NO: 2936786 - DNA, 25 bp, Homo sapien
caagaaagggcccacggcttggtct

SEQ ID NO: 2936787 - DNA, 25 bp, Homo sapien
attggctttcagagtctaatcatgt

SEQ ID NO: 2936788 - DNA, 25 bp, Homo sapien
tggctttcagagtctaatcatgttt

SEQ ID NO: 2936789 - DNA, 25 bp, Homo sapien
ttggctttcagagtctaatcatgtt

SEQ ID NO: 2936790 - DNA, 25 bp, Homo sapien
agtctaatcatgttttctgtgtgtc

SEQ ID NO: 2936791 - DNA, 25 bp, Homo sapien
gattggctttcagagtctaatcatg

SEQ ID NO: 2936792 - DNA, 25 bp, Homo sapien
gctttcagagtctaatcatgttttc

SEQ ID NO: 2936793 - DNA, 25 bp, Homo sapien
aacatgattagactctgaaagccaa

SEQ ID NO: 2936794 - DNA, 25 bp, Homo sapien
aaacatgattagactctgaaagcca

SEQ ID NO: 2936795 - DNA, 25 bp, Homo sapien
acatgattagactctgaaagccaat

SEQ ID NO: 2936796 - DNA, 25 bp, Homo sapien
catgattagactctgaaagccaatc

SEQ ID NO: 2936797 - DNA, 25 bp, Homo sapien
gacacacagaaaacatgattagact

SEQ ID NO: 2936798 - DNA, 25 bp, Homo sapien
gaaaacatgattagactctgaaagc

SEQ ID NO: 2936799 - DNA, 25 bp, Homo sapien
gttagaccccaatgagaccaatgaa

SEQ ID NO: 2936800 - DNA, 25 bp, Homo sapien
ctggttagaccccaatgagaccaat

SEQ ID NO: 2936801 - DNA, 25 bp, Homo sapien
tcgcctctagtgtcctccgctgtgg

SEQ ID NO: 2936802 - DNA, 25 bp, Homo sapien
tagtgtcctccgctgtggcaagaag

SEQ ID NO: 2936803 - DNA, 25 bp, Homo sapien
agaggctcgcctctagtgtcctccg

SEQ ID NO: 2936804 - DNA, 25 bp, Homo sapien
gaaggtctggttagaccccaatgag

SEQ ID NO: 2936805 - DNA, 25 bp, Homo sapien
ccacagcggaggacactagaggcga

SEQ ID NO: 2936806 - DNA, 25 bp, Homo sapien
cggaggacactagaggcgagcctct

SEQ ID NO: 2936807 - DNA, 25 bp, Homo sapien
gggagttggcattggcgatttcatt

SEQ ID NO: 2936808 - DNA, 25 bp, Homo sapien
tggcgatttcattggtctcattggg

SEQ ID NO: 2936809 - DNA, 25 bp, Homo sapien
attggtctcattggggtctaaccag

SEQ ID NO: 2936810 - DNA, 25 bp, Homo sapien
cttcttgccacagcggaggacacta

SEQ ID NO: 2936811 - DNA, 25 bp, Homo sapien
tggcctatttggactctgtgatgtg

SEQ ID NO: 2936812 - DNA, 25 bp, Homo sapien
ccccagttgactgaccaggtgcatt

SEQ ID NO: 2936813 - DNA, 25 bp, Homo sapien
tctggcctggcctatttggactctg

SEQ ID NO: 2936814 - DNA, 25 bp, Homo sapien
agtgtctctggcctggcctatttgg

SEQ ID NO: 2936815 - DNA, 25 bp, Homo sapien
catcctttttgagaccgtggggcca

SEQ ID NO: 2936816 - DNA, 25 bp, Homo sapien
gaccaggtgcattatgctttcccag

SEQ ID NO: 2936817 - DNA, 25 bp, Homo sapien
tggccccacggtctcaaaaaggatg

SEQ ID NO: 2936818 - DNA, 25 bp, Homo sapien
taatgcacctggtcagtcaactggg

SEQ ID NO: 2936819 - DNA, 25 bp, Homo sapien
ccaaataggccaggccagagacact

SEQ ID NO: 2936820 - DNA, 25 bp, Homo sapien
cacatcacagagtccaaataggcca

SEQ ID NO: 2936821 - DNA, 25 bp, Homo sapien
ctgggaaagcataatgcacctggtc

SEQ ID NO: 2936822 - DNA, 25 bp, Homo sapien
cacagagtccaaataggccaggcca

SEQ ID NO: 2936823 - DNA, 25 bp, Homo sapien
gtgacggtccattcccgggctcgat

SEQ ID NO: 2936824 - DNA, 25 bp, Homo sapien
cgggctcgatgccggaaaaacacct

SEQ ID NO: 2936825 - DNA, 25 bp, Homo sapien
ctgtgacggtccattcccgggctcg

SEQ ID NO: 2936826 - DNA, 25 bp, Homo sapien
tgggctgatcatccgcaagcctgtg

SEQ ID NO: 2936827 - DNA, 25 bp, Homo sapien
tcccgggctcgatgccggaaaaaca

SEQ ID NO: 2936828 - DNA, 25 bp, Homo sapien
tcgatgccggaaaaacaccttggcc

SEQ ID NO: 2936829 - DNA, 25 bp, Homo sapien
ttgatgagcttccggatctgctgac

SEQ ID NO: 2936830 - DNA, 25 bp, Homo sapien
aggtgtttttccggcatcgagcccg

SEQ ID NO: 2936831 - DNA, 25 bp, Homo sapien
atcgagcccgggaatggaccgtcac

SEQ ID NO: 2936832 - DNA, 25 bp, Homo sapien
cgagcccgggaatggaccgtcacag

SEQ ID NO: 2936833 - DNA, 25 bp, Homo sapien
tgtttttccggcatcgagcccggga

SEQ ID NO: 2936834 - DNA, 25 bp, Homo sapien
cacaggcttgcggatgatcagccca

SEQ ID NO: 2936835 - DNA, 25 bp, Homo sapien
ttcagaatgatcgaaggaagctcct

SEQ ID NO: 2936836 - DNA, 25 bp, Homo sapien
tgttacacccacattctgcatgaag

SEQ ID NO: 2936837 - DNA, 25 bp, Homo sapien
ggtagtggcccgttcctaactcatc

SEQ ID NO: 2936838 - DNA, 25 bp, Homo sapien
agagtatccctggtaggaggtcaca

SEQ ID NO: 2936839 - DNA, 25 bp, Homo sapien
aacttacgtagttgggatcatcatc

SEQ ID NO: 2936840 - DNA, 25 bp, Homo sapien
ggaagctccttacaacgtgctgtgt

SEQ ID NO: 2936841 - DNA, 25 bp, Homo sapien
tgtgacctcctaccagggatactct

SEQ ID NO: 2936842 - DNA, 25 bp, Homo sapien
gatgagttaggaacgggccactacc

SEQ ID NO: 2936843 - DNA, 25 bp, Homo sapien
tatatttcagcatagatgccagcac

SEQ ID NO: 2936844 - DNA, 25 bp, Homo sapien
cacagcacgttgtaaggagcttcct

SEQ ID NO: 2936845 - DNA, 25 bp, Homo sapien
catgcagaatgtgggtgtaacaggc

SEQ ID NO: 2936846 - DNA, 25 bp, Homo sapien
tatcaaggagtaagaaacaggctca

SEQ ID NO: 2936847 - DNA, 25 bp, Homo sapien
aatgaggattttgcgccggctgctc

SEQ ID NO: 2936848 - DNA, 25 bp, Homo sapien
gaatgaggattttgcgccggctgct

SEQ ID NO: 2936849 - DNA, 25 bp, Homo sapien
cggaagggtacagccaatgcccgaa

SEQ ID NO: 2936850 - DNA, 25 bp, Homo sapien
aggattttgcgccggctgctcagaa

SEQ ID NO: 2936851 - DNA, 25 bp, Homo sapien
aatctaagaagatcgatcgccacat

SEQ ID NO: 2936852 - DNA, 25 bp, Homo sapien
acatggatgaggagaatgaggattt

SEQ ID NO: 2936853 - DNA, 25 bp, Homo sapien
gagcagccggcgcaaaatcctcatt

SEQ ID NO: 2936854 - DNA, 25 bp, Homo sapien
agcagccggcgcaaaatcctcattc

SEQ ID NO: 2936855 - DNA, 25 bp, Homo sapien
atgtggcgatcgatcttcttagatt

SEQ ID NO: 2936856 - DNA, 25 bp, Homo sapien
ttcgggcattggctgtacccttccg

SEQ ID NO: 2936857 - DNA, 25 bp, Homo sapien
aaatcctcattctcctcatccatgt

SEQ ID NO: 2936858 - DNA, 25 bp, Homo sapien
ttctgagcagccggcgcaaaatcct

SEQ ID NO: 2936859 - DNA, 25 bp, Homo sapien
cctgtatgtcatcaggatagcccaa

SEQ ID NO: 2936860 - DNA, 25 bp, Homo sapien
ggtttaggaagtaattcatgcagca

SEQ ID NO: 2936861 - DNA, 25 bp, Homo sapien
tgcaatctgctttcgaggttcaagc

SEQ ID NO: 2936862 - DNA, 25 bp, Homo sapien
aaccagcatctcttcactccgtgta

SEQ ID NO: 2936863 - DNA, 25 bp, Homo sapien
ccaacagtttatttgccaggcaagt

SEQ ID NO: 2936864 - DNA, 25 bp, Homo sapien
cagccatgggtagggagcctttcta

SEQ ID NO: 2936865 - DNA, 25 bp, Homo sapien
cagttcctagatagaacttgcctgg

SEQ ID NO: 2936866 - DNA, 25 bp, Homo sapien
tacacggagtgaagagatgctggtt

SEQ ID NO: 2936867 - DNA, 25 bp, Homo sapien
tcttagaaaggctccctacccatgg

SEQ ID NO: 2936868 - DNA, 25 bp, Homo sapien
acttgcctggcaaataaactgttgg

SEQ ID NO: 2936869 - DNA, 25 bp, Homo sapien
tgaacctcgaaagcagattgcagtg

SEQ ID NO: 2936870 - DNA, 25 bp, Homo sapien
tgggctatcctgatgacatacaggg

SEQ ID NO: 2936871 - DNA, 25 bp, Homo sapien
gggaatgtgttcaaaaacaagcgga

SEQ ID NO: 2936872 - DNA, 25 bp, Homo sapien
cggattctcatggaacacatccaca

SEQ ID NO: 2936873 - DNA, 25 bp, Homo sapien
agcggattctcatggaacacatcca

SEQ ID NO: 2936874 - DNA, 25 bp, Homo sapien
gacaaggcccgcaagaagctcctgg

SEQ ID NO: 2936875 - DNA, 25 bp, Homo sapien
acaagctgaaggcagacaaggcccg

SEQ ID NO: 2936876 - DNA, 25 bp, Homo sapien
atgtgttcaaaaacaagcggattct

SEQ ID NO: 2936877 - DNA, 25 bp, Homo sapien
ttgcgggccttgtctgccttcagct

SEQ ID NO: 2936878 - DNA, 25 bp, Homo sapien
agaatccgcttgtttttgaacacat

SEQ ID NO: 2936879 - DNA, 25 bp, Homo sapien
cgcttgtttttgaacacattcccct

SEQ ID NO: 2936880 - DNA, 25 bp, Homo sapien
tgtggatgtgttccatgagaatccg

SEQ ID NO: 2936881 - DNA, 25 bp, Homo sapien
tggatgtgttccatgagaatccgct

SEQ ID NO: 2936882 - DNA, 25 bp, Homo sapien
gccaggagcttcttgcgggccttgt

SEQ ID NO: 2936883 - DNA, 25 bp, Homo sapien
gtgccaatgcctaagtcttgacttg

SEQ ID NO: 2936884 - DNA, 25 bp, Homo sapien
tttggtgggcccagcaactcattcc

SEQ ID NO: 2936885 - DNA, 25 bp, Homo sapien
tccagaagctgactaggctcaaagg

SEQ ID NO: 2936886 - DNA, 25 bp, Homo sapien
gaatacagctgttcccttagaggca

SEQ ID NO: 2936887 - DNA, 25 bp, Homo sapien
gacttgcacgtagtctgtcttagga

SEQ ID NO: 2936888 - DNA, 25 bp, Homo sapien
tcctgtctcgtagggactagaggtt

SEQ ID NO: 2936889 - DNA, 25 bp, Homo sapien
taagacagactacgtgcaagtcaag

SEQ ID NO: 2936890 - DNA, 25 bp, Homo sapien
tgcctctaagggaacagctgtattc

SEQ ID NO: 2936891 - DNA, 25 bp, Homo sapien
aacctctagtccctacgagacagga

SEQ ID NO: 2936892 - DNA, 25 bp, Homo sapien
cctttgagcctagtcagcttctgga

SEQ ID NO: 2936893 - DNA, 25 bp, Homo sapien
caagtcaagacttaggcattggcac

SEQ ID NO: 2936894 - DNA, 25 bp, Homo sapien
tggaatgagttgctgggcccaccaa

SEQ ID NO: 2936895 - DNA, 25 bp, Homo sapien
caaggaagcacgcaagcgccgtgaa

SEQ ID NO: 2936896 - DNA, 25 bp, Homo sapien
ggcccgcaggtctaagaccaaggaa

SEQ ID NO: 2936897 - DNA, 25 bp, Homo sapien
tgaggcccgcaggtctaagaccaag

SEQ ID NO: 2936898 - DNA, 25 bp, Homo sapien
ccgcaggtctaagaccaaggaagca

SEQ ID NO: 2936899 - DNA, 25 bp, Homo sapien
gctgaggcccgcaggtctaagacca

SEQ ID NO: 2936900 - DNA, 25 bp, Homo sapien
aaggaagcacgcaagcgccgtgaag

SEQ ID NO: 2936901 - DNA, 25 bp, Homo sapien
ttggtcttagacctgcgggcctcag

SEQ ID NO: 2936902 - DNA, 25 bp, Homo sapien
ttcacggcgcttgcgtgcttccttg

SEQ ID NO: 2936903 - DNA, 25 bp, Homo sapien
acggcgcttgcgtgcttccttggtc

SEQ ID NO: 2936904 - DNA, 25 bp, Homo sapien
tcacggcgcttgcgtgcttccttgg

SEQ ID NO: 2936905 - DNA, 25 bp, Homo sapien
cacggcgcttgcgtgcttccttggt

SEQ ID NO: 2936906 - DNA, 25 bp, Homo sapien
cttcacggcgcttgcgtgcttcctt

SEQ ID NO: 2936907 - DNA, 25 bp, Homo sapien
gcctccaggccaagaaggaggagat

SEQ ID NO: 2936908 - DNA, 25 bp, Homo sapien
agcgcctccaggccaagaaggagga

SEQ ID NO: 2936909 - DNA, 25 bp, Homo sapien
cgcctccaggccaagaaggaggaga

SEQ ID NO: 2936910 - DNA, 25 bp, Homo sapien
cctccaggccaagaaggaggagatc

SEQ ID NO: 2936911 - DNA, 25 bp, Homo sapien
gcgcctccaggccaagaaggaggag

SEQ ID NO: 2936912 - DNA, 25 bp, Homo sapien
gatctcctccttcttggcctggagg

SEQ ID NO: 2936913 - DNA, 25 bp, Homo sapien
tcctccttcttggcctggaggcgct

SEQ ID NO: 2936914 - DNA, 25 bp, Homo sapien
ctcctccttcttggcctggaggcgc

SEQ ID NO: 2936915 - DNA, 25 bp, Homo sapien
atctcctccttcttggcctggaggc

SEQ ID NO: 2936916 - DNA, 25 bp, Homo sapien
tctcctccttcttggcctggaggcg

SEQ ID NO: 2936917 - DNA, 25 bp, Homo sapien
tcaagactttatccaaggaggaaga

SEQ ID NO: 2936918 - DNA, 25 bp, Homo sapien
aagactttatccaaggaggaagaga

SEQ ID NO: 2936919 - DNA, 25 bp, Homo sapien
atcaagactttatccaaggaggaag

SEQ ID NO: 2936920 - DNA, 25 bp, Homo sapien
caagactttatccaaggaggaagag

SEQ ID NO: 2936921 - DNA, 25 bp, Homo sapien
agactttatccaaggaggaagagac

SEQ ID NO: 2936922 - DNA, 25 bp, Homo sapien
gtctcttcctccttggataaagtct

SEQ ID NO: 2936923 - DNA, 25 bp, Homo sapien
tcttcctccttggataaagtcttga

SEQ ID NO: 2936924 - DNA, 25 bp, Homo sapien
cttcctccttggataaagtcttgat

SEQ ID NO: 2936925 - DNA, 25 bp, Homo sapien
ctcttcctccttggataaagtcttg

SEQ ID NO: 2936926 - DNA, 25 bp, Homo sapien
tctcttcctccttggataaagtctt

SEQ ID NO: 2936927 - DNA, 25 bp, Homo sapien
ttacatagatcagccattaaaataa

SEQ ID NO: 2936928 - DNA, 25 bp, Homo sapien
gattacatagatcagccattaaaat

SEQ ID NO: 2936929 - DNA, 25 bp, Homo sapien
tgtgattacatagatcagccattaa

SEQ ID NO: 2936930 - DNA, 25 bp, Homo sapien
ctgtgattacatagatcagccatta

SEQ ID NO: 2936931 - DNA, 25 bp, Homo sapien
tctgtgattacatagatcagccatt

SEQ ID NO: 2936932 - DNA, 25 bp, Homo sapien
gcctctgtgattacatagatcagcc

SEQ ID NO: 2936933 - DNA, 25 bp, Homo sapien
ttattttaatggctgatctatgtaa

SEQ ID NO: 2936934 - DNA, 25 bp, Homo sapien
ttaatggctgatctatgtaatcaca

SEQ ID NO: 2936935 - DNA, 25 bp, Homo sapien
taatggctgatctatgtaatcacag

SEQ ID NO: 2936936 - DNA, 25 bp, Homo sapien
ggctgatctatgtaatcacagaggc

SEQ ID NO: 2936937 - DNA, 25 bp, Homo sapien
ttttaatggctgatctatgtaatca

SEQ ID NO: 2936938 - DNA, 25 bp, Homo sapien
aatggctgatctatgtaatcacaga

SEQ ID NO: 2936939 - DNA, 25 bp, Homo sapien
gctgcaggagcccctttgctggctt

SEQ ID NO: 2936940 - DNA, 25 bp, Homo sapien
gaagtcatcgtaattaatgaatgtc

SEQ ID NO: 2936941 - DNA, 25 bp, Homo sapien
cgctcctagccctgttgggctcggg

SEQ ID NO: 2936942 - DNA, 25 bp, Homo sapien
ttatctccgcgtctcagggcgtctc

SEQ ID NO: 2936943 - DNA, 25 bp, Homo sapien
cctcgctcgtgtctctgaatttgtc

SEQ ID NO: 2936944 - DNA, 25 bp, Homo sapien
ccagatgccacagccgggaagtatg

SEQ ID NO: 2936945 - DNA, 25 bp, Homo sapien
ccagggcgagttagggacagtgcca

SEQ ID NO: 2936946 - DNA, 25 bp, Homo sapien
taaaatcataattaccgctgcctgc

SEQ ID NO: 2936947 - DNA, 25 bp, Homo sapien
tatgtcaggcacttgcgtaagagcc

SEQ ID NO: 2936948 - DNA, 25 bp, Homo sapien
cagccaagggctaggacgccccacc

SEQ ID NO: 2936949 - DNA, 25 bp, Homo sapien
gcagccaagggctaggacgccccac

SEQ ID NO: 2936950 - DNA, 25 bp, Homo sapien
cctgctgctagggccaaagaagcag

SEQ ID NO: 2936951 - DNA, 25 bp, Homo sapien
ctggcacttggtcccacgggctttc

SEQ ID NO: 2936952 - DNA, 25 bp, Homo sapien
tggcacttggtcccacgggctttct

SEQ ID NO: 2936953 - DNA, 25 bp, Homo sapien
ccagggtataggtccccaggactgg

SEQ ID NO: 2936954 - DNA, 25 bp, Homo sapien
cccagggtataggtccccaggactg

SEQ ID NO: 2936955 - DNA, 25 bp, Homo sapien
ccatagatgctccggctggttgtgc

SEQ ID NO: 2936956 - DNA, 25 bp, Homo sapien
ggccatagatgctccggctggttgt

SEQ ID NO: 2936957 - DNA, 25 bp, Homo sapien
gctcctcctgcttcaagtagggcaa

SEQ ID NO: 2936958 - DNA, 25 bp, Homo sapien
tcctgcttcaagtagggcaagggca

SEQ ID NO: 2936959 - DNA, 25 bp, Homo sapien
tcctcctgcttcaagtagggcaagg

SEQ ID NO: 2936960 - DNA, 25 bp, Homo sapien
agctcctcctgcttcaagtagggca

SEQ ID NO: 2936961 - DNA, 25 bp, Homo sapien
ctcctgctgcttcacggctggcgag

SEQ ID NO: 2936962 - DNA, 25 bp, Homo sapien
aggtaggtgagggtctcctcctgct

SEQ ID NO: 2936963 - DNA, 25 bp, Homo sapien
cctggttcaggtaggtgagggtctc

SEQ ID NO: 2936964 - DNA, 25 bp, Homo sapien
cctgctgcttcacggctggcgaggt

SEQ ID NO: 2936965 - DNA, 25 bp, Homo sapien
gcttcccgagctcactgcccactag

SEQ ID NO: 2936966 - DNA, 25 bp, Homo sapien
ttcccgagctcactgcccactagct

SEQ ID NO: 2936967 - DNA, 25 bp, Homo sapien
ccgagctcactgcccactagctcct

SEQ ID NO: 2936968 - DNA, 25 bp, Homo sapien
tcccgagctcactgcccactagctc

SEQ ID NO: 2936969 - DNA, 25 bp, Homo sapien
tgcagagcatccggacctcatagga

SEQ ID NO: 2936970 - DNA, 25 bp, Homo sapien
ctgcagagcatccggacctcatagg

SEQ ID NO: 2936971 - DNA, 25 bp, Homo sapien
cactgggtggcatcacacggcttgg

SEQ ID NO: 2936972 - DNA, 25 bp, Homo sapien
actgggtggcatcacacggcttgga

SEQ ID NO: 2936973 - DNA, 25 bp, Homo sapien
ctgggtggcatcacacggcttggag

SEQ ID NO: 2936974 - DNA, 25 bp, Homo sapien
gcaggtgcgggtcgtggaacatcac

SEQ ID NO: 2936975 - DNA, 25 bp, Homo sapien
actgcaggtgcgggtcgtggaacat

SEQ ID NO: 2936976 - DNA, 25 bp, Homo sapien
gtgtactgcaggtgcgggtcgtgga

SEQ ID NO: 2936977 - DNA, 25 bp, Homo sapien
tgtactgcaggtgcgggtcgtggaa

SEQ ID NO: 2936978 - DNA, 25 bp, Homo sapien
tcgatgtccaggatgcggtccctgg

SEQ ID NO: 2936979 - DNA, 25 bp, Homo sapien
gatgcggtccctgggcccggctcca

SEQ ID NO: 2936980 - DNA, 25 bp, Homo sapien
caggatgcggtccctgggcccggct

SEQ ID NO: 2936981 - DNA, 25 bp, Homo sapien
tcatcgatgtccaggatgcggtccc

SEQ ID NO: 2936982 - DNA, 25 bp, Homo sapien
atcactcccacggacagtggcacat

SEQ ID NO: 2936983 - DNA, 25 bp, Homo sapien
gagcagcacttggggttctatcact

SEQ ID NO: 2936984 - DNA, 25 bp, Homo sapien
ttctatcactcccacggacagtggc

SEQ ID NO: 2936985 - DNA, 25 bp, Homo sapien
gcagcacttggggttctatcactcc

SEQ ID NO: 2936986 - DNA, 25 bp, Homo sapien
ttcccaggcccagcttcaggctcac

SEQ ID NO: 2936987 - DNA, 25 bp, Homo sapien
ttttcccaggcccagcttcaggctc

SEQ ID NO: 2936988 - DNA, 25 bp, Homo sapien
gccttttcccaggcccagcttcagg

SEQ ID NO: 2936989 - DNA, 25 bp, Homo sapien
cttttcccaggcccagcttcaggct

SEQ ID NO: 2936990 - DNA, 25 bp, Homo sapien
tccttttccacctacacggttgcca

SEQ ID NO: 2936991 - DNA, 25 bp, Homo sapien
ctacacggttgccacccccttctga

SEQ ID NO: 2936992 - DNA, 25 bp, Homo sapien
cctacacggttgccacccccttctg

SEQ ID NO: 2936993 - DNA, 25 bp, Homo sapien
tacacggttgccacccccttctgac

SEQ ID NO: 2936994 - DNA, 25 bp, Homo sapien
tagcggcagccccttgtcactgggc

SEQ ID NO: 2936995 - DNA, 25 bp, Homo sapien
taaacaccttgatgaggcagccagc

SEQ ID NO: 2936996 - DNA, 25 bp, Homo sapien
ctccacctttcttccgaggtgtgaa

SEQ ID NO: 2936997 - DNA, 25 bp, Homo sapien
cactgggcctgaaggtgtcgatctg

SEQ ID NO: 2936998 - DNA, 25 bp, Homo sapien
cagccggcgaggccaggtgacagcc

SEQ ID NO: 2936999 - DNA, 25 bp, Homo sapien
acagccggcgaggccaggtgacagc

SEQ ID NO: 2937000 - DNA, 25 bp, Homo sapien
catcttctcacggtccattttcagt

SEQ ID NO: 2937001 - DNA, 25 bp, Homo sapien
tctgatacttgtccctctcatgcag

SEQ ID NO: 2937002 - DNA, 25 bp, Homo sapien
cagtgctctcgcaggcggtctgata

SEQ ID NO: 2937003 - DNA, 25 bp, Homo sapien
tccaagaagacagtgctctcgcagg

SEQ ID NO: 2937004 - DNA, 25 bp, Homo sapien
cccatctgtaccgtgaggatctttt

SEQ ID NO: 2937005 - DNA, 25 bp, Homo sapien
ccatctgtaccgtgaggatcttttc

SEQ ID NO: 2937006 - DNA, 25 bp, Homo sapien
tcccctcctgctctcgccccaacac

SEQ ID NO: 2937007 - DNA, 25 bp, Homo sapien
catctgtaccgtgaggatcttttct

SEQ ID NO: 2937008 - DNA, 25 bp, Homo sapien
caagtggactgggtttccacaggaa

SEQ ID NO: 2937009 - DNA, 25 bp, Homo sapien
ggcctgacaagtggactgggtttcc

SEQ ID NO: 2937010 - DNA, 25 bp, Homo sapien
tggactgggtttccacaggaaggaa

SEQ ID NO: 2937011 - DNA, 25 bp, Homo sapien
ctgacaagtggactgggtttccaca

SEQ ID NO: 2937012 - DNA, 25 bp, Homo sapien
ccttgcaggggactccggccatggc

SEQ ID NO: 2937013 - DNA, 25 bp, Homo sapien
caggggactccggccatggcgaaca

SEQ ID NO: 2937014 - DNA, 25 bp, Homo sapien
ttgcaggggactccggccatggcga

SEQ ID NO: 2937015 - DNA, 25 bp, Homo sapien
gccttgcaggggactccggccatgg

SEQ ID NO: 2937016 - DNA, 25 bp, Homo sapien
caaggtatccagagcgaatggtggt

SEQ ID NO: 2937017 - DNA, 25 bp, Homo sapien
tgggctacaccccaaggtatccaga

SEQ ID NO: 2937018 - DNA, 25 bp, Homo sapien
caactgggctacaccccaaggtatc

SEQ ID NO: 2937019 - DNA, 25 bp, Homo sapien
ctcaactgggctacaccccaaggta

SEQ ID NO: 2937020 - DNA, 25 bp, Homo sapien
taaaatggatggtccaggtaatacc

SEQ ID NO: 2937021 - DNA, 25 bp, Homo sapien
tggtccaggtaataccaggacccag

SEQ ID NO: 2937022 - DNA, 25 bp, Homo sapien
ctgaggtataaaatggatggtccag

SEQ ID NO: 2937023 - DNA, 25 bp, Homo sapien
aggtaataccaggacccagggacag

SEQ ID NO: 2937024 - DNA, 25 bp, Homo sapien
tccggcagtagctggagaaccagtg

SEQ ID NO: 2937025 - DNA, 25 bp, Homo sapien
agttggccagcatccggcagtagct

SEQ ID NO: 2937026 - DNA, 25 bp, Homo sapien
agatgggggctttttggttcagatc

SEQ ID NO: 2937027 - DNA, 25 bp, Homo sapien
gccagcatccggcagtagctggaga

SEQ ID NO: 2937028 - DNA, 25 bp, Homo sapien
ggctcctgccagacactagcctcac

SEQ ID NO: 2937029 - DNA, 25 bp, Homo sapien
tcagcagccccgcagatttggataa

SEQ ID NO: 2937030 - DNA, 25 bp, Homo sapien
tggataaggtcctggcatgtaagct

SEQ ID NO: 2937031 - DNA, 25 bp, Homo sapien
catgtaagcttcagcagatccagac

SEQ ID NO: 2937032 - DNA, 25 bp, Homo sapien
taagagtattgaaaaggcggatccc

SEQ ID NO: 2937033 - DNA, 25 bp, Homo sapien
gctagctaagttagtaagggccact

SEQ ID NO: 2937034 - DNA, 25 bp, Homo sapien
tgctagctaagttagtaagggccac

SEQ ID NO: 2937035 - DNA, 25 bp, Homo sapien
tagctaagttagtaagggccactac

SEQ ID NO: 2937036 - DNA, 25 bp, Homo sapien
ctgctagctaagttagtaagggcca

SEQ ID NO: 2937037 - DNA, 25 bp, Homo sapien
gccagctttgggttgtgacctcaga

SEQ ID NO: 2937038 - DNA, 25 bp, Homo sapien
acaggagcctagcttttcaccccag

SEQ ID NO: 2937039 - DNA, 25 bp, Homo sapien
agctttgggttgtgacctcagactg

SEQ ID NO: 2937040 - DNA, 25 bp, Homo sapien
aggaggtcacaggagcctagctttt

SEQ ID NO: 2937041 - DNA, 25 bp, Homo sapien
tgtatcagtcttatacctgaactaa

SEQ ID NO: 2937042 - DNA, 25 bp, Homo sapien
tatacctgaactaacagctcccact

SEQ ID NO: 2937043 - DNA, 25 bp, Homo sapien
tctatgtatcagtcttatacctgaa

SEQ ID NO: 2937044 - DNA, 25 bp, Homo sapien
gtcttatacctgaactaacagctcc

SEQ ID NO: 2937045 - DNA, 25 bp, Homo sapien
gccacatacaaagtcagttggtgac

SEQ ID NO: 2937046 - DNA, 25 bp, Homo sapien
ttcccttgcctagaggtctcctgag

SEQ ID NO: 2937047 - DNA, 25 bp, Homo sapien
aggaacctcgttcccttgcctagag

SEQ ID NO: 2937048 - DNA, 25 bp, Homo sapien
tgagtcagggttcttaggaacctcg

SEQ ID NO: 2937049 - DNA, 25 bp, Homo sapien
gggtatcaccattcctcttctaggg

SEQ ID NO: 2937050 - DNA, 25 bp, Homo sapien
cacatattagtgactgggacccaag

SEQ ID NO: 2937051 - DNA, 25 bp, Homo sapien
tatgctaatgcagtgacgatcaggt

SEQ ID NO: 2937052 - DNA, 25 bp, Homo sapien
agggagaggtttcatgcagctacac

SEQ ID NO: 2937053 - DNA, 25 bp, Homo sapien
ggtggaaaaggtgatggatctgatt

SEQ ID NO: 2937054 - DNA, 25 bp, Homo sapien
aaaaggtgatggatctgattggctg

SEQ ID NO: 2937055 - DNA, 25 bp, Homo sapien
gaaaaggtgatggatctgattggct

SEQ ID NO: 2937056 - DNA, 25 bp, Homo sapien
tggaaaaggtgatggatctgattgg

SEQ ID NO: 2937057 - DNA, 25 bp, Homo sapien
tgtttttcctaagcaataaatatct

SEQ ID NO: 2937058 - DNA, 25 bp, Homo sapien
cctctccccttgacacaaagctggc

SEQ ID NO: 2937059 - DNA, 25 bp, Homo sapien
ttgagacgtttgagacagactcgct

SEQ ID NO: 2937060 - DNA, 25 bp, Homo sapien
ttgctagttaattgggacacatccc

SEQ ID NO: 2937061 - DNA, 25 bp, Homo sapien
tctggattctgcaccgaaagcagta

SEQ ID NO: 2937062 - DNA, 25 bp, Homo sapien
ccctggcctaggtcagaaccaagta

SEQ ID NO: 2937063 - DNA, 25 bp, Homo sapien
cagtctcttgagcagtggagttccc

SEQ ID NO: 2937064 - DNA, 25 bp, Homo sapien
tgcaagatactttggctcacctgga

SEQ ID NO: 2937065 - DNA, 25 bp, Homo sapien
gattcctacctgcaagatacacaaa

SEQ ID NO: 2937066 - DNA, 25 bp, Homo sapien
tctgggcctggtgcggtaactgaga

SEQ ID NO: 2937067 - DNA, 25 bp, Homo sapien
ttactgacctaaacgtgaaaagcaa

SEQ ID NO: 2937068 - DNA, 25 bp, Homo sapien
tctgtatggaaaaagaggactagat

SEQ ID NO: 2937069 - DNA, 25 bp, Homo sapien
ggcctctagggcttaaagatacaca

SEQ ID NO: 2937070 - DNA, 25 bp, Homo sapien
aatacctagtcttgtgctagaggcc

SEQ ID NO: 2937071 - DNA, 25 bp, Homo sapien
gacctggtctagataagtcccaaca

SEQ ID NO: 2937072 - DNA, 25 bp, Homo sapien
cataaatgcaacagggtccctattg

SEQ ID NO: 2937073 - DNA, 25 bp, Homo sapien
tacacaagatccacgagaccatgct

SEQ ID NO: 2937074 - DNA, 25 bp, Homo sapien
tctctggagccgacacagttgccta

SEQ ID NO: 2937075 - DNA, 25 bp, Homo sapien
gaactgtgaggactacccatgcctg

SEQ ID NO: 2937076 - DNA, 25 bp, Homo sapien
tgactgtaagaggagagcggccttc

SEQ ID NO: 2937077 - DNA, 25 bp, Homo sapien
tactttgcctcaggtacagcatctg

SEQ ID NO: 2937078 - DNA, 25 bp, Homo sapien
ttttactggcaaagagggctcctac

SEQ ID NO: 2937079 - DNA, 25 bp, Homo sapien
catctgggcatggttttggtactag

SEQ ID NO: 2937080 - DNA, 25 bp, Homo sapien
tggcaccaccgaaagaaccacaagt

SEQ ID NO: 2937081 - DNA, 25 bp, Homo sapien
taaaattgggttgtatccgagtgcc

SEQ ID NO: 2937082 - DNA, 25 bp, Homo sapien
caagtgagtttcttgcatgatgggc

SEQ ID NO: 2937083 - DNA, 25 bp, Homo sapien
aaccttgccttctcacttgggataa

SEQ ID NO: 2937084 - DNA, 25 bp, Homo sapien
ctgaaagtaccataagaggcaagtg

SEQ ID NO: 2937085 - DNA, 25 bp, Homo sapien
ccgtggagtctctccagtggaagca

SEQ ID NO: 2937086 - DNA, 25 bp, Homo sapien
tcctatgacaatggaggtggtcaac

SEQ ID NO: 2937087 - DNA, 25 bp, Homo sapien
caaccttggcgaactgagtatttaa

SEQ ID NO: 2937088 - DNA, 25 bp, Homo sapien
tttaatgacacttctagagctaccg

SEQ ID NO: 2937089 - DNA, 25 bp, Homo sapien
tttggacctatccaccataatagag

SEQ ID NO: 2937090 - DNA, 25 bp, Homo sapien
agagacccaggtatagccaaataac

SEQ ID NO: 2937091 - DNA, 25 bp, Homo sapien
ttacctttgcttttggacctatcca

SEQ ID NO: 2937092 - DNA, 25 bp, Homo sapien
tatccaccataatagagagacccag

SEQ ID NO: 2937093 - DNA, 25 bp, Homo sapien
tcaccacgtggatctagtgccagct

SEQ ID NO: 2937094 - DNA, 25 bp, Homo sapien
tcatagccttgagcggatagaactc

SEQ ID NO: 2937095 - DNA, 25 bp, Homo sapien
tgattgagctggacaactgcccact

SEQ ID NO: 2937096 - DNA, 25 bp, Homo sapien
taatcacagatgcatccctggagca

SEQ ID NO: 2937097 - DNA, 25 bp, Homo sapien
gctaccatgcctggccaattttttt

SEQ ID NO: 2937098 - DNA, 25 bp, Homo sapien
ctccagagtaggcaggattacaggc

SEQ ID NO: 2937099 - DNA, 25 bp, Homo sapien
ttggtagagattgggttttactgtg

SEQ ID NO: 2937100 - DNA, 25 bp, Homo sapien
ggtgatctgccctcccaaagttctg

SEQ ID NO: 2937101 - DNA, 25 bp, Homo sapien
ttagtaagattcacagttaatgcag

SEQ ID NO: 2937102 - DNA, 25 bp, Homo sapien
cagacatcttccagcaccaacagaa

SEQ ID NO: 2937103 - DNA, 25 bp, Homo sapien
taattctagttagtaagattcacag

SEQ ID NO: 2937104 - DNA, 25 bp, Homo sapien
ttaatgcagaatcggagcttgcagt

SEQ ID NO: 2937105 - DNA, 25 bp, Homo sapien
gagtaaagaccggaattagattgta

SEQ ID NO: 2937106 - DNA, 25 bp, Homo sapien
taataagctgcctagtgtctactgt

SEQ ID NO: 2937107 - DNA, 25 bp, Homo sapien
ctggaaagctgtgaattaatgaggt

SEQ ID NO: 2937108 - DNA, 25 bp, Homo sapien
caatagcacctatattttcaggtca

SEQ ID NO: 2937109 - DNA, 25 bp, Homo sapien
tggttcctttctaagctaatcaggg

SEQ ID NO: 2937110 - DNA, 25 bp, Homo sapien
taattcggcctgtactcttcagtct

SEQ ID NO: 2937111 - DNA, 25 bp, Homo sapien
ttttctcaagttgggacactggagg

SEQ ID NO: 2937112 - DNA, 25 bp, Homo sapien
gaacatatgtaaacagtcctgtagg

SEQ ID NO: 2937113 - DNA, 25 bp, Homo sapien
gctccttaaggatagagatcgtgtc

SEQ ID NO: 2937114 - DNA, 25 bp, Homo sapien
ttgtggcaaaaatggtggctctcgt

SEQ ID NO: 2937115 - DNA, 25 bp, Homo sapien
caatacttaatagcagcgacggaac

SEQ ID NO: 2937116 - DNA, 25 bp, Homo sapien
tctcagcttcggtcacatgtgtatg

SEQ ID NO: 2937117 - DNA, 25 bp, Homo sapien
tgacaaagtgactgaataaagacct

SEQ ID NO: 2937118 - DNA, 25 bp, Homo sapien
gaaaatacatagcaaaggcctgggc

SEQ ID NO: 2937119 - DNA, 25 bp, Homo sapien
taacctggtaatgagtgttgcctct

SEQ ID NO: 2937120 - DNA, 25 bp, Homo sapien
caatgggattgagtactggtgaaac

SEQ ID NO: 2937121 - DNA, 25 bp, Homo sapien
ttctcccgatgggctcgtctgcctc

SEQ ID NO: 2937122 - DNA, 25 bp, Homo sapien
tctcccgatgggctcgtctgcctcg

SEQ ID NO: 2937123 - DNA, 25 bp, Homo sapien
ctcccgatgggctcgtctgcctcgg

SEQ ID NO: 2937124 - DNA, 25 bp, Homo sapien
aggcgcagggggtcgtgccgccgcc

SEQ ID NO: 2937125 - DNA, 25 bp, Homo sapien
tggtccgcgagcacgcgcgcactcg

SEQ ID NO: 2937126 - DNA, 25 bp, Homo sapien
cccgcgcagagtgcggtactgctct

SEQ ID NO: 2937127 - DNA, 25 bp, Homo sapien
tctccctcgctggtccgcgagcacg

SEQ ID NO: 2937128 - DNA, 25 bp, Homo sapien
cagagtgcggtactgctctactctc

SEQ ID NO: 2937129 - DNA, 25 bp, Homo sapien
tgcactttgggttcaaggcgacagt

SEQ ID NO: 2937130 - DNA, 25 bp, Homo sapien
gcaccccgtaatgtaatgcactggg

SEQ ID NO: 2937131 - DNA, 25 bp, Homo sapien
caaaggaagggttgcccggctccag

SEQ ID NO: 2937132 - DNA, 25 bp, Homo sapien
caaacagcgccctgattggcggaca

SEQ ID NO: 2937133 - DNA, 25 bp, Homo sapien
gaccttgaaggccagagttgttaaa

SEQ ID NO: 2937134 - DNA, 25 bp, Homo sapien
gcccgggagtctgatgaagtgtttc

SEQ ID NO: 2937135 - DNA, 25 bp, Homo sapien
gatcagcttctatacaaggagcccg

SEQ ID NO: 2937136 - DNA, 25 bp, Homo sapien
gccaaagtgacgtcaggccgaagct

SEQ ID NO: 2937137 - DNA, 25 bp, Homo sapien
taacatctcagaagctagattggga

SEQ ID NO: 2937138 - DNA, 25 bp, Homo sapien
catacatttctatccttgagttagt

SEQ ID NO: 2937139 - DNA, 25 bp, Homo sapien
gaaacatgctcagctataagaactg

SEQ ID NO: 2937140 - DNA, 25 bp, Homo sapien
gatgaaatctgttgtgggatttttt

SEQ ID NO: 2937141 - DNA, 25 bp, Homo sapien
ggtcataacctgctctgatgtacat

SEQ ID NO: 2937142 - DNA, 25 bp, Homo sapien
caggttcaatatcaatgtgtcttaa

SEQ ID NO: 2937143 - DNA, 25 bp, Homo sapien
cctgtctaggtgtactcattcttct

SEQ ID NO: 2937144 - DNA, 25 bp, Homo sapien
gctgctggtgtcttatgtattctca

SEQ ID NO: 2937145 - DNA, 25 bp, Homo sapien
tcatcccagatcaaagaatcccgag

SEQ ID NO: 2937146 - DNA, 25 bp, Homo sapien
catgcagggccaacaaataccaaaa

SEQ ID NO: 2937147 - DNA, 25 bp, Homo sapien
tactgaatagtatcatgggctcagc

SEQ ID NO: 2937148 - DNA, 25 bp, Homo sapien
gatctggatgaaggataagcccctg

SEQ ID NO: 2937149 - DNA, 25 bp, Homo sapien
gaactgatgccattcctaagagctg

SEQ ID NO: 2937150 - DNA, 25 bp, Homo sapien
cagtaaggtttagtgtaggacagcc

SEQ ID NO: 2937151 - DNA, 25 bp, Homo sapien
tccaggagactgtttcgagtgcaac

SEQ ID NO: 2937152 - DNA, 25 bp, Homo sapien
tactatgtagcaacccaattggacc

SEQ ID NO: 2937153 - DNA, 25 bp, Homo sapien
tcccataaccaagcatggactgagc

SEQ ID NO: 2937154 - DNA, 25 bp, Homo sapien
cagcaccaagatgaaacctcaagga

SEQ ID NO: 2937155 - DNA, 25 bp, Homo sapien
tcaggcagcaaaagccaccatagcc

SEQ ID NO: 2937156 - DNA, 25 bp, Homo sapien
gtagcagtatgtattctagccaggg

SEQ ID NO: 2937157 - DNA, 25 bp, Homo sapien
tcgccttcaggatgaaagctcaggg

SEQ ID NO: 2937158 - DNA, 25 bp, Homo sapien
tagagcttcgactttagggcgatgg

SEQ ID NO: 2937159 - DNA, 25 bp, Homo sapien
gattgtcactataccctccttggtg

SEQ ID NO: 2937160 - DNA, 25 bp, Homo sapien
tcagattgatccttcccgggaagag

SEQ ID NO: 2937161 - DNA, 25 bp, Homo sapien
gcctcgagcacccttctcttcttgc

SEQ ID NO: 2937162 - DNA, 25 bp, Homo sapien
ggcctcgagcacccttctcttcttg

SEQ ID NO: 2937163 - DNA, 25 bp, Homo sapien
tctggcattggtacttagggcataa

SEQ ID NO: 2937164 - DNA, 25 bp, Homo sapien
taagattagcctatcaagcgctagg

SEQ ID NO: 2937165 - DNA, 25 bp, Homo sapien
tcctagcaacacttagtacagactt

SEQ ID NO: 2937166 - DNA, 25 bp, Homo sapien
gagcccctatgattatagtgaccaa

SEQ ID NO: 2937167 - DNA, 25 bp, Homo sapien
agggcagggacggtagcccaggctc

SEQ ID NO: 2937168 - DNA, 25 bp, Homo sapien
aaatgagagttcctcggcagtggag

SEQ ID NO: 2937169 - DNA, 25 bp, Homo sapien
gacgcctcagcacccttctacatga

SEQ ID NO: 2937170 - DNA, 25 bp, Homo sapien
cgagacaacggggagctgctcaagt

SEQ ID NO: 2937171 - DNA, 25 bp, Homo sapien
ccttcgaccatagggactgggcgat

SEQ ID NO: 2937172 - DNA, 25 bp, Homo sapien
tcagagaccgcttgctcaggaaagg

SEQ ID NO: 2937173 - DNA, 25 bp, Homo sapien
ggacgaccgtctcctgctataggga

SEQ ID NO: 2937174 - DNA, 25 bp, Homo sapien
tcccgatgacggctgcaaagttcca

SEQ ID NO: 2937175 - DNA, 25 bp, Homo sapien
gatgaatgtcttgaatatgcaggac

SEQ ID NO: 2937176 - DNA, 25 bp, Homo sapien
tatgcaggacttctacttctggact

SEQ ID NO: 2937177 - DNA, 25 bp, Homo sapien
gactgcgtgaactggatctcttctt

SEQ ID NO: 2937178 - DNA, 25 bp, Homo sapien
tactggaatgacgactgcgtgaact

SEQ ID NO: 2937179 - DNA, 25 bp, Homo sapien
tttcctactgagttcagctcccaga

SEQ ID NO: 2937180 - DNA, 25 bp, Homo sapien
aatacaggtgaacccttggactcct

SEQ ID NO: 2937181 - DNA, 25 bp, Homo sapien
tttctaggcaaaaatacaggtgaac

SEQ ID NO: 2937182 - DNA, 25 bp, Homo sapien
aaacctgaatccttagcctctactg

SEQ ID NO: 2937183 - DNA, 25 bp, Homo sapien
tcaccagttcagtatctggggcaga

SEQ ID NO: 2937184 - DNA, 25 bp, Homo sapien
caaagttgaagtactggaagcagga

SEQ ID NO: 2937185 - DNA, 25 bp, Homo sapien
gaacctgactaaatgctggctgaga

SEQ ID NO: 2937186 - DNA, 25 bp, Homo sapien
tcagtgctatgggtttagagtctct

SEQ ID NO: 2937187 - DNA, 25 bp, Homo sapien
tagagtctcttgttccctgtgcttt

SEQ ID NO: 2937188 - DNA, 25 bp, Homo sapien
gaggcaacgttgaagttttcaggtg

SEQ ID NO: 2937189 - DNA, 25 bp, Homo sapien
aggcaacgttgaagttttcaggtgt

SEQ ID NO: 2937190 - DNA, 25 bp, Homo sapien
ggcaacgttgaagttttcaggtgtg

SEQ ID NO: 2937191 - DNA, 25 bp, Homo sapien
atgggccaccaaaccctgcttattt

SEQ ID NO: 2937192 - DNA, 25 bp, Homo sapien
aggcatgggccaccaaaccctgctt

SEQ ID NO: 2937193 - DNA, 25 bp, Homo sapien
gcatgggccaccaaaccctgcttat

SEQ ID NO: 2937194 - DNA, 25 bp, Homo sapien
caccaaaccctgcttattttgtact

SEQ ID NO: 2937195 - DNA, 25 bp, Homo sapien
gggagacagatctccaccagggagc

SEQ ID NO: 2937196 - DNA, 25 bp, Homo sapien
ctgtgagtaagtgacgtgtcctctg

SEQ ID NO: 2937197 - DNA, 25 bp, Homo sapien
aagtgacgtgtcctctgttccttct

SEQ ID NO: 2937198 - DNA, 25 bp, Homo sapien
tctgggggagacagatctccaccag

SEQ ID NO: 2937199 - DNA, 25 bp, Homo sapien
ttctttctccataacgaggacaaca

SEQ ID NO: 2937200 - DNA, 25 bp, Homo sapien
agcgtttcccccagtcgctttctgt

SEQ ID NO: 2937201 - DNA, 25 bp, Homo sapien
cacagcgtttcccccagtcgctttc

SEQ ID NO: 2937202 - DNA, 25 bp, Homo sapien
gttccttctccaataatcccaataa

SEQ ID NO: 2937203 - DNA, 25 bp, Homo sapien
gtgtctttgtccttggctttatata

SEQ ID NO: 2937204 - DNA, 25 bp, Homo sapien
tgtgtctttgtccttggctttatat

SEQ ID NO: 2937205 - DNA, 25 bp, Homo sapien
tgtctttgtccttggctttatatac

SEQ ID NO: 2937206 - DNA, 25 bp, Homo sapien
ctgtgtctttgtccttggctttata

SEQ ID NO: 2937207 - DNA, 25 bp, Homo sapien
acacttcggtggattaactgacgaa

SEQ ID NO: 2937208 - DNA, 25 bp, Homo sapien
ggattttgatttcacgaatggctgt

SEQ ID NO: 2937209 - DNA, 25 bp, Homo sapien
tgaaatccagtgcatcttgtttatc

SEQ ID NO: 2937210 - DNA, 25 bp, Homo sapien
gaatggctgtgattgggaagccctc

SEQ ID NO: 2937211 - DNA, 25 bp, Homo sapien
tagcagtcccattaagtcatggtcc

SEQ ID NO: 2937212 - DNA, 25 bp, Homo sapien
gaacacttaatatcccgatgcagga

SEQ ID NO: 2937213 - DNA, 25 bp, Homo sapien
tggtccatatactcaaatacaaggt

SEQ ID NO: 2937214 - DNA, 25 bp, Homo sapien
tcatgaacgacttgatatggtcctc

SEQ ID NO: 2937215 - DNA, 25 bp, Homo sapien
tctctgaccatctctcttgggttac

SEQ ID NO: 2937216 - DNA, 25 bp, Homo sapien
cagattctcttataatttgcctgca

SEQ ID NO: 2937217 - DNA, 25 bp, Homo sapien
cattaactgtgctactcaacccctt

SEQ ID NO: 2937218 - DNA, 25 bp, Homo sapien
ttggaattcccaaatgaccatatgc

SEQ ID NO: 2937219 - DNA, 25 bp, Homo sapien
gatatagattgtgcatccaaatcca

SEQ ID NO: 2937220 - DNA, 25 bp, Homo sapien
tataggaagctggtgtaggtgtcta

SEQ ID NO: 2937221 - DNA, 25 bp, Homo sapien
gccagctcactgtcttataggaagc

SEQ ID NO: 2937222 - DNA, 25 bp, Homo sapien
gccttgctacttcttgggacatgaa

SEQ ID NO: 2937223 - DNA, 25 bp, Homo sapien
gactacttcaattataatgccttac

SEQ ID NO: 2937224 - DNA, 25 bp, Homo sapien
acccagttcatgattacttctactc

SEQ ID NO: 2937225 - DNA, 25 bp, Homo sapien
taagagggccaacagtctgggcatg

SEQ ID NO: 2937226 - DNA, 25 bp, Homo sapien
caacagtacctagaacgtgctagat

SEQ ID NO: 2937227 - DNA, 25 bp, Homo sapien
attttcataagccatagcagtggcc

SEQ ID NO: 2937228 - DNA, 25 bp, Homo sapien
cataagccatagcagtggcctccaa

SEQ ID NO: 2937229 - DNA, 25 bp, Homo sapien
tcataagccatagcagtggcctcca

SEQ ID NO: 2937230 - DNA, 25 bp, Homo sapien
tttcataagccatagcagtggcctc

SEQ ID NO: 2937231 - DNA, 25 bp, Homo sapien
agttatagagccgagcaagtccaaa

SEQ ID NO: 2937232 - DNA, 25 bp, Homo sapien
tctcttcagagttatagagccgagc

SEQ ID NO: 2937233 - DNA, 25 bp, Homo sapien
cagagttatagagccgagcaagtcc

SEQ ID NO: 2937234 - DNA, 25 bp, Homo sapien
tcttcagagttatagagccgagcaa

SEQ ID NO: 2937235 - DNA, 25 bp, Homo sapien
cgttcctctcctagcagtagttctg

SEQ ID NO: 2937236 - DNA, 25 bp, Homo sapien
gttcctctcctagcagtagttctgg

SEQ ID NO: 2937237 - DNA, 25 bp, Homo sapien
aagtaatgactttgtttgtgtaagg

SEQ ID NO: 2937238 - DNA, 25 bp, Homo sapien
taacgttcctctcctagcagtagtt

SEQ ID NO: 2937239 - DNA, 25 bp, Homo sapien
tgagccagttccagattggcttgaa

SEQ ID NO: 2937240 - DNA, 25 bp, Homo sapien
gagccagttccagattggcttgaaa

SEQ ID NO: 2937241 - DNA, 25 bp, Homo sapien
tggacaagggctaccacaaagtcgg

SEQ ID NO: 2937242 - DNA, 25 bp, Homo sapien
aaagagaattcttctcgtagacgcc

SEQ ID NO: 2937243 - DNA, 25 bp, Homo sapien
gacgccttcgatattgcttcttcgg

SEQ ID NO: 2937244 - DNA, 25 bp, Homo sapien
tttgataacatcaggccacacagct

SEQ ID NO: 2937245 - DNA, 25 bp, Homo sapien
ttttgctgagttcgacatctttaag

SEQ ID NO: 2937246 - DNA, 25 bp, Homo sapien
taggatctagtgtcagcatgtggtc

SEQ ID NO: 2937247 - DNA, 25 bp, Homo sapien
gctgtgcaccgcttactaggatcta

SEQ ID NO: 2937248 - DNA, 25 bp, Homo sapien
tctttaaggaagtcgctctgtaggg

SEQ ID NO: 2937249 - DNA, 25 bp, Homo sapien
tgcccacagaatttctatgactgga

SEQ ID NO: 2937250 - DNA, 25 bp, Homo sapien
tacgtataacttagtccagaatctc

SEQ ID NO: 2937251 - DNA, 25 bp, Homo sapien
tgtggagttcagcactacgtataac

SEQ ID NO: 2937252 - DNA, 25 bp, Homo sapien
gactggatatcaacttgctcatctg

SEQ ID NO: 2937253 - DNA, 25 bp, Homo sapien
tccctgaggtagtttcttttcgaga

SEQ ID NO: 2937254 - DNA, 25 bp, Homo sapien
tacaacaccactttgtcgctgacgt

SEQ ID NO: 2937255 - DNA, 25 bp, Homo sapien
caggctcagtacttgtccctgaggt

SEQ ID NO: 2937256 - DNA, 25 bp, Homo sapien
aactcatggcaatcctgccagtggg

SEQ ID NO: 2937257 - DNA, 25 bp, Homo sapien
agtgaagccaatataagacgatgag

SEQ ID NO: 2937258 - DNA, 25 bp, Homo sapien
tataagacgatgagataggccaagg

SEQ ID NO: 2937259 - DNA, 25 bp, Homo sapien
ccaatataagacgatgagataggcc

SEQ ID NO: 2937260 - DNA, 25 bp, Homo sapien
gatgagataggccaagggccctttg

SEQ ID NO: 2937261 - DNA, 25 bp, Homo sapien
gaagtagcttccgtcagggcactga

SEQ ID NO: 2937262 - DNA, 25 bp, Homo sapien
ctcaggtcggtttggctctgcagca

SEQ ID NO: 2937263 - DNA, 25 bp, Homo sapien
gagtggatgttaagcagctgtgcca

SEQ ID NO: 2937264 - DNA, 25 bp, Homo sapien
aagcttcaagggtcgtctgttctgc

SEQ ID NO: 2937265 - DNA, 25 bp, Homo sapien
caagtgctaggactagttggccacc

SEQ ID NO: 2937266 - DNA, 25 bp, Homo sapien
gattagtatatctcttcagccctcg

SEQ ID NO: 2937267 - DNA, 25 bp, Homo sapien
aagagggtatcaacagcacctgagc

SEQ ID NO: 2937268 - DNA, 25 bp, Homo sapien
taatacacgcacttcctgatctggg

SEQ ID NO: 2937269 - DNA, 25 bp, Homo sapien
aaagtatggacttttggctgggtgt

SEQ ID NO: 2937270 - DNA, 25 bp, Homo sapien
caggattgacaacaataaggatgta

SEQ ID NO: 2937271 - DNA, 25 bp, Homo sapien
tctaaagtatcaatgttgtcaatcc

SEQ ID NO: 2937272 - DNA, 25 bp, Homo sapien
aaagtacggactttcaggattgaca

SEQ ID NO: 2937273 - DNA, 25 bp, Homo sapien
ctggtggaagaatgtgaggaggaca

SEQ ID NO: 2937274 - DNA, 25 bp, Homo sapien
tggtggaagaatgtgaggaggacat

SEQ ID NO: 2937275 - DNA, 25 bp, Homo sapien
ggtggaagaatgtgaggaggacatg

SEQ ID NO: 2937276 - DNA, 25 bp, Homo sapien
ccagagtttcgttcatcagtgtcaa

SEQ ID NO: 2937277 - DNA, 25 bp, Homo sapien
taaaagttgcagcaaggcggctgtc

SEQ ID NO: 2937278 - DNA, 25 bp, Homo sapien
ggaaagatcgccttcaaccagaggg

SEQ ID NO: 2937279 - DNA, 25 bp, Homo sapien
caaggattctgtcaaggctggacca

SEQ ID NO: 2937280 - DNA, 25 bp, Homo sapien
cattatttcgtaagtcgcctgctag

SEQ ID NO: 2937281 - DNA, 25 bp, Homo sapien
tctcttccgatcagtaagtgcaggc

SEQ ID NO: 2937282 - DNA, 25 bp, Homo sapien
tttattcaaatcagccaggccactc

SEQ ID NO: 2937283 - DNA, 25 bp, Homo sapien
caagtgagcaaggaatacaacggac

SEQ ID NO: 2937284 - DNA, 25 bp, Homo sapien
tgaaagtatcccaggctcacgttct

SEQ ID NO: 2937285 - DNA, 25 bp, Homo sapien
atagaagccagaatgagaagcctcc

SEQ ID NO: 2937286 - DNA, 25 bp, Homo sapien
ggcaaggccagatcaaaaaccagag

SEQ ID NO: 2937287 - DNA, 25 bp, Homo sapien
cctaaaagaactggcagggtacaca

SEQ ID NO: 2937288 - DNA, 25 bp, Homo sapien
tgccaaacctttacttccatcatgt

SEQ ID NO: 2937289 - DNA, 25 bp, Homo sapien
ttcttcctccatacagattccagga

SEQ ID NO: 2937290 - DNA, 25 bp, Homo sapien
ccttccctagtagggatgagggaat

SEQ ID NO: 2937291 - DNA, 25 bp, Homo sapien
cattattgatgactgctgataacca

SEQ ID NO: 2937292 - DNA, 25 bp, Homo sapien
cctaaatcagggagaatgaggtggc

SEQ ID NO: 2937293 - DNA, 25 bp, Homo sapien
tacatagacaagatacacccaatgg

SEQ ID NO: 2937294 - DNA, 25 bp, Homo sapien
gctggtaaccattttagcacggtaa

SEQ ID NO: 2937295 - DNA, 25 bp, Homo sapien
tgcaaatttgtgctaactgccctgc

SEQ ID NO: 2937296 - DNA, 25 bp, Homo sapien
aatcctgataaccttttgctgggag

SEQ ID NO: 2937297 - DNA, 25 bp, Homo sapien
tcttcaaatcctgataaccttttgc

SEQ ID NO: 2937298 - DNA, 25 bp, Homo sapien
tatacatgattagatatgctcaggg

SEQ ID NO: 2937299 - DNA, 25 bp, Homo sapien
tagtctagcgttttcaagcacctct

SEQ ID NO: 2937300 - DNA, 25 bp, Homo sapien
tctcaggacaaccagaagactcagc

SEQ ID NO: 2937301 - DNA, 25 bp, Homo sapien
cctctcaggacaaccagaagactca

SEQ ID NO: 2937302 - DNA, 25 bp, Homo sapien
ctctcaggacaaccagaagactcag

SEQ ID NO: 2937303 - DNA, 25 bp, Homo sapien
ctagcaacagactccctcttgcctg

SEQ ID NO: 2937304 - DNA, 25 bp, Homo sapien
cctagcaacagactccctcttgcct

SEQ ID NO: 2937305 - DNA, 25 bp, Homo sapien
gacatgagacaagggactagacacc

SEQ ID NO: 2937306 - DNA, 25 bp, Homo sapien
tgcacccaggaagcatccattggta

SEQ ID NO: 2937307 - DNA, 25 bp, Homo sapien
ttgtctccagggacctagctcccag

SEQ ID NO: 2937308 - DNA, 25 bp, Homo sapien
ccattggtaggtaacagtgacggtg

SEQ ID NO: 2937309 - DNA, 25 bp, Homo sapien
gaggtgactgatggacatcactgca

SEQ ID NO: 2937310 - DNA, 25 bp, Homo sapien
tctgtgaaagagactgaatttgcca

SEQ ID NO: 2937311 - DNA, 25 bp, Homo sapien
cttggctttaggttctgtgaaagag

SEQ ID NO: 2937312 - DNA, 25 bp, Homo sapien
ctcagagggcattcccaccgttgct

SEQ ID NO: 2937313 - DNA, 25 bp, Homo sapien
tgttggagacatttaataacagaga

SEQ ID NO: 2937314 - DNA, 25 bp, Homo sapien
ggcttgcaggcctctaattctggtg

SEQ ID NO: 2937315 - DNA, 25 bp, Homo sapien
gaggctggtgacctgtcccatctgg

SEQ ID NO: 2937316 - DNA, 25 bp, Homo sapien
atactccgagagagaaacataaccc

SEQ ID NO: 2937317 - DNA, 25 bp, Homo sapien
catgtgctgtctggattgcagggat

SEQ ID NO: 2937318 - DNA, 25 bp, Homo sapien
tgtctggattgcagggatgagagag

SEQ ID NO: 2937319 - DNA, 25 bp, Homo sapien
tgctgtctggattgcagggatgaga

SEQ ID NO: 2937320 - DNA, 25 bp, Homo sapien
gcatgtgctgtctggattgcaggga

SEQ ID NO: 2937321 - DNA, 25 bp, Homo sapien
agcgccctcgtgtggcagaaaccat

SEQ ID NO: 2937322 - DNA, 25 bp, Homo sapien
agctgcccaactggcaggcctgttc

SEQ ID NO: 2937323 - DNA, 25 bp, Homo sapien
ccctcgtgtggcagaaaccatgact

SEQ ID NO: 2937324 - DNA, 25 bp, Homo sapien
gcccaactggcaggcctgttctgtg

SEQ ID NO: 2937325 - DNA, 25 bp, Homo sapien
cagctgggtacccatttccatttcc

SEQ ID NO: 2937326 - DNA, 25 bp, Homo sapien
tcagtcagctgggtacccatttcca

SEQ ID NO: 2937327 - DNA, 25 bp, Homo sapien
gtcagctgggtacccatttccattt

SEQ ID NO: 2937328 - DNA, 25 bp, Homo sapien
cagtcagctgggtacccatttccat

SEQ ID NO: 2937329 - DNA, 25 bp, Homo sapien
gtcaaccagtatagttccaatccgt

SEQ ID NO: 2937330 - DNA, 25 bp, Homo sapien
caaagtggccagtgattgatgggcc

SEQ ID NO: 2937331 - DNA, 25 bp, Homo sapien
tctacgattcataccccaaaaggca

SEQ ID NO: 2937332 - DNA, 25 bp, Homo sapien
ttctccatgccagaacgcaaagtgg

SEQ ID NO: 2937333 - DNA, 25 bp, Homo sapien
cagaaattctccaaatccaggaaca

SEQ ID NO: 2937334 - DNA, 25 bp, Homo sapien
cccagaaattctccaaatccaggaa

SEQ ID NO: 2937335 - DNA, 25 bp, Homo sapien
tcccagaaattctccaaatccagga

SEQ ID NO: 2937336 - DNA, 25 bp, Homo sapien
ccagaaattctccaaatccaggaac

SEQ ID NO: 2937337 - DNA, 25 bp, Homo sapien
gctttgccatgggacaagacgtata

SEQ ID NO: 2937338 - DNA, 25 bp, Homo sapien
tagtgctccatagaagctgaacctg

SEQ ID NO: 2937339 - DNA, 25 bp, Homo sapien
tctaagagctctaaggccatggcac

SEQ ID NO: 2937340 - DNA, 25 bp, Homo sapien
caagctgtatagaggaaatgtcccc

SEQ ID NO: 2937341 - DNA, 25 bp, Homo sapien
gcttctgatactgcccgggagagct

SEQ ID NO: 2937342 - DNA, 25 bp, Homo sapien
ggttcagccagcataggagtcccta

SEQ ID NO: 2937343 - DNA, 25 bp, Homo sapien
tacatttgcttacacctggcctgga

SEQ ID NO: 2937344 - DNA, 25 bp, Homo sapien
atactacttctatacccagggccag

SEQ ID NO: 2937345 - DNA, 25 bp, Homo sapien
atgaggtagccaggaatggaattgg

SEQ ID NO: 2937346 - DNA, 25 bp, Homo sapien
gatgaggtagccaggaatggaattg

SEQ ID NO: 2937347 - DNA, 25 bp, Homo sapien
ggatgaggtagccaggaatggaatt

SEQ ID NO: 2937348 - DNA, 25 bp, Homo sapien
ggctggaatcttgggttcagatcct

SEQ ID NO: 2937349 - DNA, 25 bp, Homo sapien
agggtggtgaccgaggctggaatct

SEQ ID NO: 2937350 - DNA, 25 bp, Homo sapien
tcagtatacttgtggggaaggatga

SEQ ID NO: 2937351 - DNA, 25 bp, Homo sapien
gtggggaaggatgaagactgacaag

SEQ ID NO: 2937352 - DNA, 25 bp, Homo sapien
tgaggagatgctaggatcccaaggc

SEQ ID NO: 2937353 - DNA, 25 bp, Homo sapien
ttgtgaggagatgctaggatcccaa

SEQ ID NO: 2937354 - DNA, 25 bp, Homo sapien
aggtgcaggcaacccaattggtggc

SEQ ID NO: 2937355 - DNA, 25 bp, Homo sapien
ttgctcaggtgcaggcaacccaatt

SEQ ID NO: 2937356 - DNA, 25 bp, Homo sapien
cagcggccggcttcatgtctaacat

SEQ ID NO: 2937357 - DNA, 25 bp, Homo sapien
tcaggatcttagtgctgcgctcagg

SEQ ID NO: 2937358 - DNA, 25 bp, Homo sapien
agggatctgagggttctgccactct

SEQ ID NO: 2937359 - DNA, 25 bp, Homo sapien
tacccagctgtagaagtccagccag

SEQ ID NO: 2937360 - DNA, 25 bp, Homo sapien
ttgttgaggccatgactaggatgcc

SEQ ID NO: 2937361 - DNA, 25 bp, Homo sapien
agagatggcactggaacccagggct

SEQ ID NO: 2937362 - DNA, 25 bp, Homo sapien
tgtgcttcatccaatgcctcttagg

SEQ ID NO: 2937363 - DNA, 25 bp, Homo sapien
gaaccaagaagcagtgcactgtatg

SEQ ID NO: 2937364 - DNA, 25 bp, Homo sapien
aaaagttatgtactacattattcca

SEQ ID NO: 2937365 - DNA, 25 bp, Homo sapien
ttggcttaccacaatctctgccgct

SEQ ID NO: 2937366 - DNA, 25 bp, Homo sapien
gattgagacactgtactccattctg

SEQ ID NO: 2937367 - DNA, 25 bp, Homo sapien
gattagtggtgtcaagggttaagga

SEQ ID NO: 2937368 - DNA, 25 bp, Homo sapien
cagaaacactgcttgcggctaggag

SEQ ID NO: 2937369 - DNA, 25 bp, Homo sapien
gatgtccttctacaggtaactggcc

SEQ ID NO: 2937370 - DNA, 25 bp, Homo sapien
cataaaaactcagatctcagggaat

SEQ ID NO: 2937371 - DNA, 25 bp, Homo sapien
gccagaaactggaattagtccagat

SEQ ID NO: 2937372 - DNA, 25 bp, Homo sapien
gcaaatgagtttagcactaattacc

SEQ ID NO: 2937373 - DNA, 25 bp, Homo sapien
taagagaaggtagctgtcttcccag

SEQ ID NO: 2937374 - DNA, 25 bp, Homo sapien
gtaatcacataaaaaacttgctgag

SEQ ID NO: 2937375 - DNA, 25 bp, Homo sapien
aattaccatgcagtgcctgtaatca

SEQ ID NO: 2937376 - DNA, 25 bp, Homo sapien
cagttgtaaccttctttcttcaggc

SEQ ID NO: 2937377 - DNA, 25 bp, Homo sapien
tgcggataatccctctaagagctct

SEQ ID NO: 2937378 - DNA, 25 bp, Homo sapien
ctctaagagctctctaaggcaggtg

SEQ ID NO: 2937379 - DNA, 25 bp, Homo sapien
tcccttgatgctctacgtactgcag

SEQ ID NO: 2937380 - DNA, 25 bp, Homo sapien
tggctcacgcctgtaatcccagcac

SEQ ID NO: 2937381 - DNA, 25 bp, Homo sapien
tttgggaggctgaggtgggcggatc

SEQ ID NO: 2937382 - DNA, 25 bp, Homo sapien
acaaggtcaggagatcgagaccatc

SEQ ID NO: 2937383 - DNA, 25 bp, Homo sapien
caaacaaacaaacaggctgggtgcg

SEQ ID NO: 2937384 - DNA, 25 bp, Homo sapien
tatggcgggtgaaactgtacagtct

SEQ ID NO: 2937385 - DNA, 25 bp, Homo sapien
tgtacagtctgtgagttagcacgat

SEQ ID NO: 2937386 - DNA, 25 bp, Homo sapien
aagacggcgtagagcccagagcttt

SEQ ID NO: 2937387 - DNA, 25 bp, Homo sapien
tttttccatcgcagacaccccatct

SEQ ID NO: 2937388 - DNA, 25 bp, Homo sapien
gctatgagacacctatttgccttga

SEQ ID NO: 2937389 - DNA, 25 bp, Homo sapien
cacccgctagttgtgagtacaggta

SEQ ID NO: 2937390 - DNA, 25 bp, Homo sapien
tcagagcaataggaggagaactggc

SEQ ID NO: 2937391 - DNA, 25 bp, Homo sapien
gaacaaagtagctgcccgggcttag

SEQ ID NO: 2937392 - DNA, 25 bp, Homo sapien
tagcccagtggccatctgaatgagg

SEQ ID NO: 2937393 - DNA, 25 bp, Homo sapien
tcaagtttccgtacctaggcctagc

SEQ ID NO: 2937394 - DNA, 25 bp, Homo sapien
tgagggctgctgtcaatccagaaaa

SEQ ID NO: 2937395 - DNA, 25 bp, Homo sapien
tgagagaggcagattctttcaggcc

SEQ ID NO: 2937396 - DNA, 25 bp, Homo sapien
tattttggtagtctgatagcttcta

SEQ ID NO: 2937397 - DNA, 25 bp, Homo sapien
ttggtagtctgatagcttctaaaga

SEQ ID NO: 2937398 - DNA, 25 bp, Homo sapien
aatgggttcatctttgaggatgtga

SEQ ID NO: 2937399 - DNA, 25 bp, Homo sapien
tctgatagcttctaaagatatgtcc

SEQ ID NO: 2937400 - DNA, 25 bp, Homo sapien
tgtctgcccctgtcctcgtgagcag

SEQ ID NO: 2937401 - DNA, 25 bp, Homo sapien
aagggagatgggcacttcatccttc

SEQ ID NO: 2937402 - DNA, 25 bp, Homo sapien
gactgggtcagtcctatgaccatag

SEQ ID NO: 2937403 - DNA, 25 bp, Homo sapien
cagaggactagatgaggtgacttcc

SEQ ID NO: 2937404 - DNA, 25 bp, Homo sapien
gcgcgctaaagcaggacgcagctcc

SEQ ID NO: 2937405 - DNA, 25 bp, Homo sapien
gcggaaacccgaaggccgcgcgcta

SEQ ID NO: 2937406 - DNA, 25 bp, Homo sapien
caagtccgccagacggttcggagga

SEQ ID NO: 2937407 - DNA, 25 bp, Homo sapien
gccggtgccaagtccgccagacggt

SEQ ID NO: 2937408 - DNA, 25 bp, Homo sapien
gggtgggagccaggcaaagcagtgc

SEQ ID NO: 2937409 - DNA, 25 bp, Homo sapien
gtgggagccaggcaaagcagtgctg

SEQ ID NO: 2937410 - DNA, 25 bp, Homo sapien
gggagccaggcaaagcagtgctggc

SEQ ID NO: 2937411 - DNA, 25 bp, Homo sapien
agggtgggagccaggcaaagcagtg

SEQ ID NO: 2937412 - DNA, 25 bp, Homo sapien
caagcattcggagatgtagaaatgc

SEQ ID NO: 2937413 - DNA, 25 bp, Homo sapien
tagaaatgcagaatggaggcactgg

SEQ ID NO: 2937414 - DNA, 25 bp, Homo sapien
tgtttttcccaagcattcggagatg

SEQ ID NO: 2937415 - DNA, 25 bp, Homo sapien
gtagaaatgcagaatggaggcactg

SEQ ID NO: 2937416 - DNA, 25 bp, Homo sapien
tccacatttccaaccttcaattgac

SEQ ID NO: 2937417 - DNA, 25 bp, Homo sapien
cagagtccacatttccaaccttcaa

SEQ ID NO: 2937418 - DNA, 25 bp, Homo sapien
ctatagtcagagtccacatttccaa

SEQ ID NO: 2937419 - DNA, 25 bp, Homo sapien
gagtccacatttccaaccttcaatt

SEQ ID NO: 2937420 - DNA, 25 bp, Homo sapien
tggatccgtgcaagtggtgaccact

SEQ ID NO: 2937421 - DNA, 25 bp, Homo sapien
tacttcctgttagtgcttccatagg

SEQ ID NO: 2937422 - DNA, 25 bp, Homo sapien
ccatagggaggacgttcaaacattc

SEQ ID NO: 2937423 - DNA, 25 bp, Homo sapien
cctaaatgtcctaggcgggtcaggt

SEQ ID NO: 2937424 - DNA, 25 bp, Homo sapien
tcacatcggtagtcctggcccacag

SEQ ID NO: 2937425 - DNA, 25 bp, Homo sapien
tgctcctcacatcggtagtcctggc

SEQ ID NO: 2937426 - DNA, 25 bp, Homo sapien
gctgctcctcacatcggtagtcctg

SEQ ID NO: 2937427 - DNA, 25 bp, Homo sapien
cagctgctcctcacatcggtagtcc

SEQ ID NO: 2937428 - DNA, 25 bp, Homo sapien
tctgtgccactcagccggtgcccgg

SEQ ID NO: 2937429 - DNA, 25 bp, Homo sapien
ctgtgccactcagccggtgcccggt

SEQ ID NO: 2937430 - DNA, 25 bp, Homo sapien
tgcccggtgccaggcgcggggggaa

SEQ ID NO: 2937431 - DNA, 25 bp, Homo sapien
aaaaagaggtatctccgagtccagg

SEQ ID NO: 2937432 - DNA, 25 bp, Homo sapien
tgaacccgacggctggatccaagtt

SEQ ID NO: 2937433 - DNA, 25 bp, Homo sapien
gacagagaaaaagaggtatctccga

SEQ ID NO: 2937434 - DNA, 25 bp, Homo sapien
tccaagttcaatcaggaggacatct

SEQ ID NO: 2937435 - DNA, 25 bp, Homo sapien
catgtgatagctgctgcccgtgacg

SEQ ID NO: 2937436 - DNA, 25 bp, Homo sapien
cctggtagagatgccacactcgctc

SEQ ID NO: 2937437 - DNA, 25 bp, Homo sapien
cgcggttcgcatggcgctctgaaga

SEQ ID NO: 2937438 - DNA, 25 bp, Homo sapien
catatggcctggcatagaggctggt

SEQ ID NO: 2937439 - DNA, 25 bp, Homo sapien
cccagtgcagacgcatgccaatcac

SEQ ID NO: 2937440 - DNA, 25 bp, Homo sapien
ccccagtgcagacgcatgccaatca

SEQ ID NO: 2937441 - DNA, 25 bp, Homo sapien
tctcccccagtgcagacgcatgcca

SEQ ID NO: 2937442 - DNA, 25 bp, Homo sapien
tcccccagtgcagacgcatgccaat

SEQ ID NO: 2937443 - DNA, 25 bp, Homo sapien
tgtatgtgaacacacgtgttgtgcc

SEQ ID NO: 2937444 - DNA, 25 bp, Homo sapien
gcgcgcgtatgtccctgcgtgttca

SEQ ID NO: 2937445 - DNA, 25 bp, Homo sapien
tgtgtcgagtgagaaaaacttgttc

SEQ ID NO: 2937446 - DNA, 25 bp, Homo sapien
tgtgcctctttcaagcccatgtctg

SEQ ID NO: 2937447 - DNA, 25 bp, Homo sapien
tcccggcaacgtcgccgcattctca

SEQ ID NO: 2937448 - DNA, 25 bp, Homo sapien
acgccatctggcgtgcccgccgctc

SEQ ID NO: 2937449 - DNA, 25 bp, Homo sapien
gccgcattctcagccacgccatctg

SEQ ID NO: 2937450 - DNA, 25 bp, Homo sapien
gccacgccatctggcgtgcccgccg

SEQ ID NO: 2937451 - DNA, 25 bp, Homo sapien
cacaaggcacgcagccgcatatcac

SEQ ID NO: 2937452 - DNA, 25 bp, Homo sapien
gcatatcacccgtgccagccctcac

SEQ ID NO: 2937453 - DNA, 25 bp, Homo sapien
ggcacgcagccgcatatcacccgtg

SEQ ID NO: 2937454 - DNA, 25 bp, Homo sapien
gcagccgcatatcacccgtgccagc

SEQ ID NO: 2937455 - DNA, 25 bp, Homo sapien
aagtggcctggaaaagagttagtgg

SEQ ID NO: 2937456 - DNA, 25 bp, Homo sapien
gggccccgattgtcagatgtgaggg

SEQ ID NO: 2937457 - DNA, 25 bp, Homo sapien
cctggaaaagagttagtgggaatga

SEQ ID NO: 2937458 - DNA, 25 bp, Homo sapien
gaatgaggggccccgattgtcagat

SEQ ID NO: 2937459 - DNA, 25 bp, Homo sapien
tgcaaggtttggatgggatactgcc

SEQ ID NO: 2937460 - DNA, 25 bp, Homo sapien
gcaaggtttggatgggatactgccc

SEQ ID NO: 2937461 - DNA, 25 bp, Homo sapien
gtttggatgggatactgcccatgaa

SEQ ID NO: 2937462 - DNA, 25 bp, Homo sapien
ttgttgcaaggtttggatgggatac

SEQ ID NO: 2937463 - DNA, 25 bp, Homo sapien
ccaatcccggtccagtcggctgctt

SEQ ID NO: 2937464 - DNA, 25 bp, Homo sapien
actccaatcccggtccagtcggctg

SEQ ID NO: 2937465 - DNA, 25 bp, Homo sapien
tccaatcccggtccagtcggctgct

SEQ ID NO: 2937466 - DNA, 25 bp, Homo sapien
acactccaatcccggtccagtcggc

SEQ ID NO: 2937467 - DNA, 25 bp, Homo sapien
cgaagaatgccagctgccggagccc

SEQ ID NO: 2937468 - DNA, 25 bp, Homo sapien
ctgaggctgcccccgaagaatgcca

SEQ ID NO: 2937469 - DNA, 25 bp, Homo sapien
tgaggctgcccccgaagaatgccag

SEQ ID NO: 2937470 - DNA, 25 bp, Homo sapien
gctgaggctgcccccgaagaatgcc

SEQ ID NO: 2937471 - DNA, 25 bp, Homo sapien
tgacaacggtgacacatatggagcc

SEQ ID NO: 2937472 - DNA, 25 bp, Homo sapien
gaagatcgcttgcacgcactgcagt

SEQ ID NO: 2937473 - DNA, 25 bp, Homo sapien
tggtggcacaaacgagtacagcagt

SEQ ID NO: 2937474 - DNA, 25 bp, Homo sapien
tacagcagtatatgtgccctctggc

SEQ ID NO: 2937475 - DNA, 25 bp, Homo sapien
gagcgagtgtgaccgagttgtgtgt

SEQ ID NO: 2937476 - DNA, 25 bp, Homo sapien
aaagggagcgagtgtgaccgagttg

SEQ ID NO: 2937477 - DNA, 25 bp, Homo sapien
tgtgtgggaggacacgtgtcagtca

SEQ ID NO: 2937478 - DNA, 25 bp, Homo sapien
cagcctgtcacgctgtgaatggggg

SEQ ID NO: 2937479 - DNA, 25 bp, Homo sapien
tctccgcgtgtgtctctgcctctgc

SEQ ID NO: 2937480 - DNA, 25 bp, Homo sapien
cctctcctcctctccgcgtgtgtct

SEQ ID NO: 2937481 - DNA, 25 bp, Homo sapien
cctctccgcgtgtgtctctgcctct

SEQ ID NO: 2937482 - DNA, 25 bp, Homo sapien
cctcctctccgcgtgtgtctctgcc

SEQ ID NO: 2937483 - DNA, 25 bp, Homo sapien
ccaggtctgtgcctcgctccctcgc

SEQ ID NO: 2937484 - DNA, 25 bp, Homo sapien
gctctcgggactcggggctcgcccc

SEQ ID NO: 2937485 - DNA, 25 bp, Homo sapien
cgcccccaggctctcgggactcggg

SEQ ID NO: 2937486 - DNA, 25 bp, Homo sapien
cccaggctctcgggactcggggctc

SEQ ID NO: 2937487 - DNA, 25 bp, Homo sapien
aggctctcgggactcggggctcgcc

SEQ ID NO: 2937488 - DNA, 25 bp, Homo sapien
gcacggataaaaataccgtgcccgc

SEQ ID NO: 2937489 - DNA, 25 bp, Homo sapien
aggagggctgttcgcgcacggataa

SEQ ID NO: 2937490 - DNA, 25 bp, Homo sapien
tgttcgcgcacggataaaaataccg

SEQ ID NO: 2937491 - DNA, 25 bp, Homo sapien
ggaggaggagggctgttcgcgcacg

SEQ ID NO: 2937492 - DNA, 25 bp, Homo sapien
gggctggggtgcgcgactcggggtc

SEQ ID NO: 2937493 - DNA, 25 bp, Homo sapien
gtgcgcgactcggggtcccggcggc

SEQ ID NO: 2937494 - DNA, 25 bp, Homo sapien
gggtcccggcggcggtctgtgctgg

SEQ ID NO: 2937495 - DNA, 25 bp, Homo sapien
gtcccggcggcggtctgtgctgggc

SEQ ID NO: 2937496 - DNA, 25 bp, Homo sapien
actggatcttcttgcggtccttggg

SEQ ID NO: 2937497 - DNA, 25 bp, Homo sapien
cgggcaccgagaactggatcttctt

SEQ ID NO: 2937498 - DNA, 25 bp, Homo sapien
gtcgagctggctagggggcgcgggc

SEQ ID NO: 2937499 - DNA, 25 bp, Homo sapien
gcgcgggcaccgagaactggatctt

SEQ ID NO: 2937500 - DNA, 25 bp, Homo sapien
gtaaggctgcagaactcttcaccca

SEQ ID NO: 2937501 - DNA, 25 bp, Homo sapien
tctgtaaggctgcagaactcttcac

SEQ ID NO: 2937502 - DNA, 25 bp, Homo sapien
tgtaaggctgcagaactcttcaccc

SEQ ID NO: 2937503 - DNA, 25 bp, Homo sapien
taaggctgcagaactcttcacccag

SEQ ID NO: 2937504 - DNA, 25 bp, Homo sapien
taagatcagctcaagggcttcaaac

SEQ ID NO: 2937505 - DNA, 25 bp, Homo sapien
gggcttcaaacaagctggatccagc

SEQ ID NO: 2937506 - DNA, 25 bp, Homo sapien
tttcagaaggagactgagccagcgc

SEQ ID NO: 2937507 - DNA, 25 bp, Homo sapien
gactgagccagcgcactgcaggcac

SEQ ID NO: 2937508 - DNA, 25 bp, Homo sapien
gcaggcgttggtctcctgcgccgga

SEQ ID NO: 2937509 - DNA, 25 bp, Homo sapien
caggcgttggtctcctgcgccggat

SEQ ID NO: 2937510 - DNA, 25 bp, Homo sapien
agtgctctgagagccggaacagcat

SEQ ID NO: 2937511 - DNA, 25 bp, Homo sapien
gaggagtgctctgagagccggaaca

SEQ ID NO: 2937512 - DNA, 25 bp, Homo sapien
tggtgaggagtgctctgagagccgg

SEQ ID NO: 2937513 - DNA, 25 bp, Homo sapien
ctggtgaggagtgctctgagagccg

SEQ ID NO: 2937514 - DNA, 25 bp, Homo sapien
aaccgaaccagaaccaagcgaggag

SEQ ID NO: 2937515 - DNA, 25 bp, Homo sapien
agccaaccgaaccagaaccaagcga

SEQ ID NO: 2937516 - DNA, 25 bp, Homo sapien
caaagccaaccgaaccagaaccaag

SEQ ID NO: 2937517 - DNA, 25 bp, Homo sapien
gaaccagaaccaagcgaggaggaaa

SEQ ID NO: 2937518 - DNA, 25 bp, Homo sapien
tgggtctcttcgacttgagatggtg

SEQ ID NO: 2937519 - DNA, 25 bp, Homo sapien
tctcttcgacttgagatggtgcccc

SEQ ID NO: 2937520 - DNA, 25 bp, Homo sapien
tcttcgacttgagatggtgcccctc

SEQ ID NO: 2937521 - DNA, 25 bp, Homo sapien
cacaggggttgggtctcttcgactt

SEQ ID NO: 2937522 - DNA, 25 bp, Homo sapien
gatgttaaggcccatagctgcccat

SEQ ID NO: 2937523 - DNA, 25 bp, Homo sapien
tcaagcccacaacccgatgttaagg

SEQ ID NO: 2937524 - DNA, 25 bp, Homo sapien
cagcgggctatgtgtggcgaaacaa

SEQ ID NO: 2937525 - DNA, 25 bp, Homo sapien
tacgttgggttgttgcgccacgctg

SEQ ID NO: 2937526 - DNA, 25 bp, Homo sapien
tacccagtacgggagacagtgtctc

SEQ ID NO: 2937527 - DNA, 25 bp, Homo sapien
tatgcgacacaaagttcacaggcca

SEQ ID NO: 2937528 - DNA, 25 bp, Homo sapien
gacataatagtctgcagccagtgca

SEQ ID NO: 2937529 - DNA, 25 bp, Homo sapien
taagctgtcctaagatgctagcccc

SEQ ID NO: 2937530 - DNA, 25 bp, Homo sapien
aggtgagactcagcaatgcgctgca

SEQ ID NO: 2937531 - DNA, 25 bp, Homo sapien
cctggttctcattcaaattgctgat

SEQ ID NO: 2937532 - DNA, 25 bp, Homo sapien
ctggttctcattcaaattgctgata

SEQ ID NO: 2937533 - DNA, 25 bp, Homo sapien
tggttctcattcaaattgctgatag

SEQ ID NO: 2937534 - DNA, 25 bp, Homo sapien
tcagcctggctgtcctcttcttctt

SEQ ID NO: 2937535 - DNA, 25 bp, Homo sapien
tgatgaccttcaggacttcagcctg

SEQ ID NO: 2937536 - DNA, 25 bp, Homo sapien
actgcctgatgaccttcaggacttc

SEQ ID NO: 2937537 - DNA, 25 bp, Homo sapien
cagactgcctgatgaccttcaggac

SEQ ID NO: 2937538 - DNA, 25 bp, Homo sapien
tctctcggactcatccagagggggt

SEQ ID NO: 2937539 - DNA, 25 bp, Homo sapien
cttccacttggtcctcagagcctcc

SEQ ID NO: 2937540 - DNA, 25 bp, Homo sapien
acttagtgctgggtcttccacttgg

SEQ ID NO: 2937541 - DNA, 25 bp, Homo sapien
cctccatctctctcggactcatcca

SEQ ID NO: 2937542 - DNA, 25 bp, Homo sapien
gctcagagggggaagggcgctgagg

SEQ ID NO: 2937543 - DNA, 25 bp, Homo sapien
aagggcgctgaggttcctccccagg

SEQ ID NO: 2937544 - DNA, 25 bp, Homo sapien
ctatgtgccaggctcagagggggaa

SEQ ID NO: 2937545 - DNA, 25 bp, Homo sapien
ggaagggcgctgaggttcctcccca

SEQ ID NO: 2937546 - DNA, 25 bp, Homo sapien
tctctgggtatcagccaaaggtggg

SEQ ID NO: 2937547 - DNA, 25 bp, Homo sapien
ggacataaactaggcggcattcctg

SEQ ID NO: 2937548 - DNA, 25 bp, Homo sapien
taagggtacctcaaggttctcagga

SEQ ID NO: 2937549 - DNA, 25 bp, Homo sapien
gaagtggtgacttggaatcctccat

SEQ ID NO: 2937550 - DNA, 25 bp, Homo sapien
tagcgcctcagagcggaagaagatc

SEQ ID NO: 2937551 - DNA, 25 bp, Homo sapien
cggctccgcggcctcagtagcgcct

SEQ ID NO: 2937552 - DNA, 25 bp, Homo sapien
gcggcctcagtagcgcctcagagcg

SEQ ID NO: 2937553 - DNA, 25 bp, Homo sapien
ggcagcgccacttccgccgctgagt

SEQ ID NO: 2937554 - DNA, 25 bp, Homo sapien
tagtctgtggatccgtaatgtccac

SEQ ID NO: 2937555 - DNA, 25 bp, Homo sapien
cacggtacatgtctagtaagttagc

SEQ ID NO: 2937556 - DNA, 25 bp, Homo sapien
tagtaagttagctagtctgtggatc

SEQ ID NO: 2937557 - DNA, 25 bp, Homo sapien
gcctggccacggtacatgtctagta

SEQ ID NO: 2937558 - DNA, 25 bp, Homo sapien
taactatagcgtgcctaggacagtg

SEQ ID NO: 2937559 - DNA, 25 bp, Homo sapien
gcttattccatagagctgtgccctg

SEQ ID NO: 2937560 - DNA, 25 bp, Homo sapien
tactcattgtgcaagcctccactgc

SEQ ID NO: 2937561 - DNA, 25 bp, Homo sapien
gagattctgacacagagtggtggct

SEQ ID NO: 2937562 - DNA, 25 bp, Homo sapien
cattgcagcctcaaacattccctgg

SEQ ID NO: 2937563 - DNA, 25 bp, Homo sapien
ttttttttgtagagacagggtctca

SEQ ID NO: 2937564 - DNA, 25 bp, Homo sapien
tggctcaagtgatcttcctgcctca

SEQ ID NO: 2937565 - DNA, 25 bp, Homo sapien
ggagtgcagtggtgtgattacagct

SEQ ID NO: 2937566 - DNA, 25 bp, Homo sapien
gaccacctgccagtctaagtgatga

SEQ ID NO: 2937567 - DNA, 25 bp, Homo sapien
gaaaggcctttgagctccatcagac

SEQ ID NO: 2937568 - DNA, 25 bp, Homo sapien
tcaccctgagtgaggcctcgttggc

SEQ ID NO: 2937569 - DNA, 25 bp, Homo sapien
taagtgatgaaaacccaccgtggcg

SEQ ID NO: 2937570 - DNA, 25 bp, Homo sapien
ctgggacttgaccaagaggctccct

SEQ ID NO: 2937571 - DNA, 25 bp, Homo sapien
atcccagcaccagggagtagtttgg

SEQ ID NO: 2937572 - DNA, 25 bp, Homo sapien
gagcttctgggacttgaccaagagg

SEQ ID NO: 2937573 - DNA, 25 bp, Homo sapien
catcccagcaccagggagtagtttg

SEQ ID NO: 2937574 - DNA, 25 bp, Homo sapien
agcactctgggaggcgggaggtggg

SEQ ID NO: 2937575 - DNA, 25 bp, Homo sapien
accattctggctaacacagtgaaac

SEQ ID NO: 2937576 - DNA, 25 bp, Homo sapien
gctaacacagtgaaacccgtctcta

SEQ ID NO: 2937577 - DNA, 25 bp, Homo sapien
tggatcacaaggtcaggagatcgag

SEQ ID NO: 2937578 - DNA, 25 bp, Homo sapien
cagcctctggtcctgtcaacagcct

SEQ ID NO: 2937579 - DNA, 25 bp, Homo sapien
agcctctggtcctgtcaacagcctc

SEQ ID NO: 2937580 - DNA, 25 bp, Homo sapien
cctggtgggcccccacctcagggcg

SEQ ID NO: 2937581 - DNA, 25 bp, Homo sapien
gcggggagggcgcggcctcagcagc

SEQ ID NO: 2937582 - DNA, 25 bp, Homo sapien
ggggagggcgcggcctcagcagcag

SEQ ID NO: 2937583 - DNA, 25 bp, Homo sapien
ggagggcgcggcctcagcagcaggg

SEQ ID NO: 2937584 - DNA, 25 bp, Homo sapien
gcaggctgcgctccaagtctcgggt

SEQ ID NO: 2937585 - DNA, 25 bp, Homo sapien
acggcaggcaggctgcgctccaagt

SEQ ID NO: 2937586 - DNA, 25 bp, Homo sapien
tgcgctccaagtctcgggtcagctc

SEQ ID NO: 2937587 - DNA, 25 bp, Homo sapien
tccaagtctcgggtcagctccctgg

SEQ ID NO: 2937588 - DNA, 25 bp, Homo sapien
tgcggcggacatcagagatggccct

SEQ ID NO: 2937589 - DNA, 25 bp, Homo sapien
cttcgcttctcaggcggcggaagga

SEQ ID NO: 2937590 - DNA, 25 bp, Homo sapien
gtgacgaagagacagaaggtgcggc

SEQ ID NO: 2937591 - DNA, 25 bp, Homo sapien
ttcagttcgatgatccagagcaggg

SEQ ID NO: 2937592 - DNA, 25 bp, Homo sapien
ctcacctcccggaaggggcaagagg

SEQ ID NO: 2937593 - DNA, 25 bp, Homo sapien
cctcacctcccggaaggggcaagag

SEQ ID NO: 2937594 - DNA, 25 bp, Homo sapien
ggagacaggaagagctctgcaggta

SEQ ID NO: 2937595 - DNA, 25 bp, Homo sapien
ctgcaggtagaagcaagggcctggg

SEQ ID NO: 2937596 - DNA, 25 bp, Homo sapien
cctgctccaagttcttacggatgcc

SEQ ID NO: 2937597 - DNA, 25 bp, Homo sapien
agttcttacggatgcctgtgttggt

SEQ ID NO: 2937598 - DNA, 25 bp, Homo sapien
agttttaaagttgtactggatgatc

SEQ ID NO: 2937599 - DNA, 25 bp, Homo sapien
taaagttgtactggatgatctcctg

SEQ ID NO: 2937600 - DNA, 25 bp, Homo sapien
tccagagaagcggaagaaggccagg

SEQ ID NO: 2937601 - DNA, 25 bp, Homo sapien
cagagaagcggaagaaggccaggac

SEQ ID NO: 2937602 - DNA, 25 bp, Homo sapien
gccgcagcacggcatagcctaggag

SEQ ID NO: 2937603 - DNA, 25 bp, Homo sapien
cggagccgcagcacggcatagccta

SEQ ID NO: 2937604 - DNA, 25 bp, Homo sapien
agctgccaggaaagtggcatcttac

SEQ ID NO: 2937605 - DNA, 25 bp, Homo sapien
cccagaagctgccaggaaagtggca

SEQ ID NO: 2937606 - DNA, 25 bp, Homo sapien
cagaagctgccaggaaagtggcatc

SEQ ID NO: 2937607 - DNA, 25 bp, Homo sapien
tgggaagtgagtcctcctccatccc

SEQ ID NO: 2937608 - DNA, 25 bp, Homo sapien
gaggaatgcactggacaccagcgtc

SEQ ID NO: 2937609 - DNA, 25 bp, Homo sapien
gaccttgacaatgaggaatgcactg

SEQ ID NO: 2937610 - DNA, 25 bp, Homo sapien
ggaatgcactggacaccagcgtcgt

SEQ ID NO: 2937611 - DNA, 25 bp, Homo sapien
aatgcactggacaccagcgtcgtga

SEQ ID NO: 2937612 - DNA, 25 bp, Homo sapien
actggccagaccctgagccactgac

SEQ ID NO: 2937613 - DNA, 25 bp, Homo sapien
agactggccagaccctgagccactg

SEQ ID NO: 2937614 - DNA, 25 bp, Homo sapien
gactggccagaccctgagccactga

SEQ ID NO: 2937615 - DNA, 25 bp, Homo sapien
cagactggccagaccctgagccact

SEQ ID NO: 2937616 - DNA, 25 bp, Homo sapien
gataccaaaggacaggattccctct

SEQ ID NO: 2937617 - DNA, 25 bp, Homo sapien
gaaatgctcctctctagaagcatac

SEQ ID NO: 2937618 - DNA, 25 bp, Homo sapien
gcataccactcaggtctgatgccca

SEQ ID NO: 2937619 - DNA, 25 bp, Homo sapien
aagcgggtgaaggatgattccttat

SEQ ID NO: 2937620 - DNA, 25 bp, Homo sapien
taggctggagaaagaaccttctgat

SEQ ID NO: 2937621 - DNA, 25 bp, Homo sapien
gttaggctggagaaagaaccttctg

SEQ ID NO: 2937622 - DNA, 25 bp, Homo sapien
gataaactggggttaggctggagaa

SEQ ID NO: 2937623 - DNA, 25 bp, Homo sapien
cagcaggataaactggggttaggct

SEQ ID NO: 2937624 - DNA, 25 bp, Homo sapien
gcagctgcttgggaaccctctcaag

SEQ ID NO: 2937625 - DNA, 25 bp, Homo sapien
tctagccagccaaactggcatacac

SEQ ID NO: 2937626 - DNA, 25 bp, Homo sapien
tgtggctaccaactctagccagcca

SEQ ID NO: 2937627 - DNA, 25 bp, Homo sapien
ccccttctgtggctaccaactctag

SEQ ID NO: 2937628 - DNA, 25 bp, Homo sapien
ccaggtctccaaccaggcgaggaca

SEQ ID NO: 2937629 - DNA, 25 bp, Homo sapien
tcctggggtaggactttgaagtcaa

SEQ ID NO: 2937630 - DNA, 25 bp, Homo sapien
ggagcaggtagccaaatgccccttt

SEQ ID NO: 2937631 - DNA, 25 bp, Homo sapien
ccaggcgaggacaaaagagacgatg

SEQ ID NO: 2937632 - DNA, 25 bp, Homo sapien
cggaccgaggacagttacaccctag

SEQ ID NO: 2937633 - DNA, 25 bp, Homo sapien
tcagaggtggcgagatgcttcagac

SEQ ID NO: 2937634 - DNA, 25 bp, Homo sapien
gggctgtgggtaaccctcgctgcac

SEQ ID NO: 2937635 - DNA, 25 bp, Homo sapien
ccctcaggctactggaggctgctca

SEQ ID NO: 2937636 - DNA, 25 bp, Homo sapien
gggtccacgggcaacagcaacctgg

SEQ ID NO: 2937637 - DNA, 25 bp, Homo sapien
tagaactgtccctcggacagagcac

SEQ ID NO: 2937638 - DNA, 25 bp, Homo sapien
ttctgggggtgaatagaactgtccc

SEQ ID NO: 2937639 - DNA, 25 bp, Homo sapien
caacagcaacctgggcggcaagata

SEQ ID NO: 2937640 - DNA, 25 bp, Homo sapien
caggcacagatgacaatggcaaggg

SEQ ID NO: 2937641 - DNA, 25 bp, Homo sapien
aaacaggcacagatgacaatggcaa

SEQ ID NO: 2937642 - DNA, 25 bp, Homo sapien
cagaaaacaggcacagatgacaatg

SEQ ID NO: 2937643 - DNA, 25 bp, Homo sapien
ctgcagaaaacaggcacagatgaca

SEQ ID NO: 2937644 - DNA, 25 bp, Homo sapien
cagagaaacttttcttcccagcaac

SEQ ID NO: 2937645 - DNA, 25 bp, Homo sapien
ttcccagcaacttcttcatctgatt

SEQ ID NO: 2937646 - DNA, 25 bp, Homo sapien
acttttcttcccagcaacttcttca

SEQ ID NO: 2937647 - DNA, 25 bp, Homo sapien
tgagcagagaaacttttcttcccag

SEQ ID NO: 2937648 - DNA, 25 bp, Homo sapien
aagatctggtccaccactgccgtgg

SEQ ID NO: 2937649 - DNA, 25 bp, Homo sapien
gggccaagatctggtccaccactgc

SEQ ID NO: 2937650 - DNA, 25 bp, Homo sapien
ttcccctggcggatgtactcccgct

SEQ ID NO: 2937651 - DNA, 25 bp, Homo sapien
ctcttcctgggccaagatctggtcc

SEQ ID NO: 2937652 - DNA, 25 bp, Homo sapien
gggcaggaatatggctccaacccat

SEQ ID NO: 2937653 - DNA, 25 bp, Homo sapien
taacaaacctatggcactggcagga

SEQ ID NO: 2937654 - DNA, 25 bp, Homo sapien
gaaactcctaacacgcatgggaagg

SEQ ID NO: 2937655 - DNA, 25 bp, Homo sapien
tcatgaaacgaaacaacggatgcag

SEQ ID NO: 2937656 - DNA, 25 bp, Homo sapien
cgtcttgccgtgaaagggaacttca

SEQ ID NO: 2937657 - DNA, 25 bp, Homo sapien
cttcaggataaacgtcttgccgtga

SEQ ID NO: 2937658 - DNA, 25 bp, Homo sapien
tggtgtacacggtgtccccatattc

SEQ ID NO: 2937659 - DNA, 25 bp, Homo sapien
aaagggaacttcaatggtgtacacg

SEQ ID NO: 2937660 - DNA, 25 bp, Homo sapien
tgccagatgggctcgggcagaccaa

SEQ ID NO: 2937661 - DNA, 25 bp, Homo sapien
ccaggacacccgctcccctcactca

SEQ ID NO: 2937662 - DNA, 25 bp, Homo sapien
atgggctcgggcagaccaacccttc

SEQ ID NO: 2937663 - DNA, 25 bp, Homo sapien
gctgggtggtgccagatgggctcgg

SEQ ID NO: 2937664 - DNA, 25 bp, Homo sapien
acctcctggtacacgagctccgcag

SEQ ID NO: 2937665 - DNA, 25 bp, Homo sapien
agggtgttgtcttccactcgctgca

SEQ ID NO: 2937666 - DNA, 25 bp, Homo sapien
gcccctgcagacacgtcataggaga

SEQ ID NO: 2937667 - DNA, 25 bp, Homo sapien
tgcagacacgtcataggagatgagg

SEQ ID NO: 2937668 - DNA, 25 bp, Homo sapien
taggagatgagggtgttgtcttcca

SEQ ID NO: 2937669 - DNA, 25 bp, Homo sapien
gatgacaagtatcggtccctgcgcc

SEQ ID NO: 2937670 - DNA, 25 bp, Homo sapien
caatgcgccggacattcacgaagtc

SEQ ID NO: 2937671 - DNA, 25 bp, Homo sapien
ggtggcgatccctgatgacaagtat

SEQ ID NO: 2937672 - DNA, 25 bp, Homo sapien
ctcaatgcgccggacattcacgaag

SEQ ID NO: 2937673 - DNA, 25 bp, Homo sapien
ttactggccgacttgagcacgatga

SEQ ID NO: 2937674 - DNA, 25 bp, Homo sapien
ggccgacttgagcacgatgaagccc

SEQ ID NO: 2937675 - DNA, 25 bp, Homo sapien
tctgtattaagaatccagacaaagg

SEQ ID NO: 2937676 - DNA, 25 bp, Homo sapien
tgtattaagaatccagacaaaggtg

SEQ ID NO: 2937677 - DNA, 25 bp, Homo sapien
catctggaccctgacccaaattttc

SEQ ID NO: 2937678 - DNA, 25 bp, Homo sapien
gggcctcaggactcagaggtaagaa

SEQ ID NO: 2937679 - DNA, 25 bp, Homo sapien
gcaacacaaacagaccagggtgggg

SEQ ID NO: 2937680 - DNA, 25 bp, Homo sapien
gcaacccagggctaagagaccatct

SEQ ID NO: 2937681 - DNA, 25 bp, Homo sapien
ggtgaaaggcaaattcaaacatggt

SEQ ID NO: 2937682 - DNA, 25 bp, Homo sapien
cgctgtcgcaggtgaaaggcaaatt

SEQ ID NO: 2937683 - DNA, 25 bp, Homo sapien
ttcaaacatggtggccgcgaggctc

SEQ ID NO: 2937684 - DNA, 25 bp, Homo sapien
cagctcgctgatgcgctgtcgcagg

SEQ ID NO: 2937685 - DNA, 25 bp, Homo sapien
tgggcagtgcgagcccaactggcac

SEQ ID NO: 2937686 - DNA, 25 bp, Homo sapien
tgtaaacatcaacaggccagacccc

SEQ ID NO: 2937687 - DNA, 25 bp, Homo sapien
aaaaccgacgagagcgcaggcagat

SEQ ID NO: 2937688 - DNA, 25 bp, Homo sapien
atcttcacacgggtgacaggctgcc

SEQ ID NO: 2937689 - DNA, 25 bp, Homo sapien
taggcaggaccgaaacaggatccac

SEQ ID NO: 2937690 - DNA, 25 bp, Homo sapien
tggctctgaagaagctggctctgct

SEQ ID NO: 2937691 - DNA, 25 bp, Homo sapien
gagactttaaacttgccccgctgaa

SEQ ID NO: 2937692 - DNA, 25 bp, Homo sapien
tcatctgctcagttgaactggtcag

SEQ ID NO: 2937693 - DNA, 25 bp, Homo sapien
gacagtcaacttcatgcctgggaac

SEQ ID NO: 2937694 - DNA, 25 bp, Homo sapien
tattgattactgagcactgtccccg

SEQ ID NO: 2937695 - DNA, 25 bp, Homo sapien
caactcatggtgcaagaggctggca

SEQ ID NO: 2937696 - DNA, 25 bp, Homo sapien
cactgcaagaggaccagaagagctc

SEQ ID NO: 2937697 - DNA, 25 bp, Homo sapien
ctcacagttctcctccgacacctcg

SEQ ID NO: 2937698 - DNA, 25 bp, Homo sapien
tctcctccgacacctcgcagctcag

SEQ ID NO: 2937699 - DNA, 25 bp, Homo sapien
ccggcgctcacagttctcctccgac

SEQ ID NO: 2937700 - DNA, 25 bp, Homo sapien
agaaggcctcccggcgctcacagtt

SEQ ID NO: 2937701 - DNA, 25 bp, Homo sapien
gtaggtctcatgtctctgggtgtcc

SEQ ID NO: 2937702 - DNA, 25 bp, Homo sapien
aagtgcaccgggcttgctgacaggc

SEQ ID NO: 2937703 - DNA, 25 bp, Homo sapien
gaggatgcccatccgcatcatcagc

SEQ ID NO: 2937704 - DNA, 25 bp, Homo sapien
tgcttcctgggacatggagcgggac

SEQ ID NO: 2937705 - DNA, 25 bp, Homo sapien
gggcacagcggagcccaagtcacag

SEQ ID NO: 2937706 - DNA, 25 bp, Homo sapien
ttattgcggcactaacagagggtgc

SEQ ID NO: 2937707 - DNA, 25 bp, Homo sapien
tgggcaaactacaaagcagccatgg

SEQ ID NO: 2937708 - DNA, 25 bp, Homo sapien
gcttcttctgcctagagcgttccag

SEQ ID NO: 2937709 - DNA, 25 bp, Homo sapien
gggtgtacccattagctctgccata

SEQ ID NO: 2937710 - DNA, 25 bp, Homo sapien
agctcagatgcggagcctggtccca

SEQ ID NO: 2937711 - DNA, 25 bp, Homo sapien
cctggatgcggatgccagctggctt

SEQ ID NO: 2937712 - DNA, 25 bp, Homo sapien
cagcggtcagggtacgggaaggaga

SEQ ID NO: 2937713 - DNA, 25 bp, Homo sapien
ttctctttcctgattcgaggtggag

SEQ ID NO: 2937714 - DNA, 25 bp, Homo sapien
tctttcctgattcgaggtggagact

SEQ ID NO: 2937715 - DNA, 25 bp, Homo sapien
tttcctgattcgaggtggagactgg

SEQ ID NO: 2937716 - DNA, 25 bp, Homo sapien
ctctttcctgattcgaggtggagac

SEQ ID NO: 2937717 - DNA, 25 bp, Homo sapien
catctcccttagtgtccgggctgca

SEQ ID NO: 2937718 - DNA, 25 bp, Homo sapien
tgggggcggcagctgaccgccgagc

SEQ ID NO: 2937719 - DNA, 25 bp, Homo sapien
cccggctccgtacttgctcccgcag

SEQ ID NO: 2937720 - DNA, 25 bp, Homo sapien
tgcagacacaccggaggtgagtggg

SEQ ID NO: 2937721 - DNA, 25 bp, Homo sapien
tcgaagcgctggtaggccgaagcca

SEQ ID NO: 2937722 - DNA, 25 bp, Homo sapien
attggggctacggtctgcgccgctc

SEQ ID NO: 2937723 - DNA, 25 bp, Homo sapien
gaaggtctgcgccaagcagcgcagc

SEQ ID NO: 2937724 - DNA, 25 bp, Homo sapien
gcccgacgccgttcgggttgcacag

SEQ ID NO: 2937725 - DNA, 25 bp, Homo sapien
accaatgtcgatgagggtgcgtccg

SEQ ID NO: 2937726 - DNA, 25 bp, Homo sapien
tgtacatgctccagttgaaggcccc

SEQ ID NO: 2937727 - DNA, 25 bp, Homo sapien
ggaaatctgtcatggtgatgtcctc

SEQ ID NO: 2937728 - DNA, 25 bp, Homo sapien
tgccctcaatgaggcaggcatgttg

SEQ ID NO: 2937729 - DNA, 25 bp, Homo sapien
aaccagccactctatgggaagcctc

SEQ ID NO: 2937730 - DNA, 25 bp, Homo sapien
gctcaaggctgttctacgctcaggc

SEQ ID NO: 2937731 - DNA, 25 bp, Homo sapien
tgttctacgctcaggcctctgttgc

SEQ ID NO: 2937732 - DNA, 25 bp, Homo sapien
ggctgttctacgctcaggcctctgt

SEQ ID NO: 2937733 - DNA, 25 bp, Homo sapien
catcatctacgcctgtctgaaggtg

SEQ ID NO: 2937734 - DNA, 25 bp, Homo sapien
ggaccttgtagccactacgcaccag

SEQ ID NO: 2937735 - DNA, 25 bp, Homo sapien
gaaagctggcaagatctgggctcac

SEQ ID NO: 2937736 - DNA, 25 bp, Homo sapien
acgtcgatgggcaggacccgtttca

SEQ ID NO: 2937737 - DNA, 25 bp, Homo sapien
ctttattaggtgccacttcaaagaa

SEQ ID NO: 2937738 - DNA, 25 bp, Homo sapien
cctgccccacaggaatagaatggag

SEQ ID NO: 2937739 - DNA, 25 bp, Homo sapien
ccagagggtcttactgttccagggt

SEQ ID NO: 2937740 - DNA, 25 bp, Homo sapien
gcccctttgccatagcctgattttg

SEQ ID NO: 2937741 - DNA, 25 bp, Homo sapien
tatgcctgcgccctggtaaaggtga

SEQ ID NO: 2937742 - DNA, 25 bp, Homo sapien
tctgtgcagcgtggtcatgtcctgg

SEQ ID NO: 2937743 - DNA, 25 bp, Homo sapien
aggacgtgaccccatggctgtcaga

SEQ ID NO: 2937744 - DNA, 25 bp, Homo sapien
gttggtgcccttgatcctcagtgag

SEQ ID NO: 2937745 - DNA, 25 bp, Homo sapien
gggtcatgccaactccctctgagga

SEQ ID NO: 2937746 - DNA, 25 bp, Homo sapien
tggtgctgtcaacacctgccggttg

SEQ ID NO: 2937747 - DNA, 25 bp, Homo sapien
tggcaggaagtccaccccagggacc

SEQ ID NO: 2937748 - DNA, 25 bp, Homo sapien
ggagcttggctataccggaactggt

SEQ ID NO: 2937749 - DNA, 25 bp, Homo sapien
tgtcttagcaattgagtaactaggg

SEQ ID NO: 2937750 - DNA, 25 bp, Homo sapien
gctcattaacccatcaggcgtccgc

SEQ ID NO: 2937751 - DNA, 25 bp, Homo sapien
aaaagatcatggaaaacacttcagt

SEQ ID NO: 2937752 - DNA, 25 bp, Homo sapien
gcaggcgcccacaaaaatccgggaa

SEQ ID NO: 2937753 - DNA, 25 bp, Homo sapien
tatcgcctcgatatatggacacagc

SEQ ID NO: 2937754 - DNA, 25 bp, Homo sapien
gcaaaggttctaccccgcatgggga

SEQ ID NO: 2937755 - DNA, 25 bp, Homo sapien
ctcgggaggtggtacttcaattgcg

SEQ ID NO: 2937756 - DNA, 25 bp, Homo sapien
gggaagcaatcaccctcgggaggtg

SEQ ID NO: 2937757 - DNA, 25 bp, Homo sapien
tcaccctcgggaggtggtacttcaa

SEQ ID NO: 2937758 - DNA, 25 bp, Homo sapien
ggttttcatcctcatcatcttcaca

SEQ ID NO: 2937759 - DNA, 25 bp, Homo sapien
tttcatcctcatcatcttcacattg

SEQ ID NO: 2937760 - DNA, 25 bp, Homo sapien
ttttcatcctcatcatcttcacatt

SEQ ID NO: 2937761 - DNA, 25 bp, Homo sapien
gttttcatcctcatcatcttcacat

SEQ ID NO: 2937762 - DNA, 25 bp, Homo sapien
acttgctcactcgacttgctgctgg

SEQ ID NO: 2937763 - DNA, 25 bp, Homo sapien
ggtatagggacagtgaccccttcaa

SEQ ID NO: 2937764 - DNA, 25 bp, Homo sapien
ggcctttcaggacatcacttgctca

SEQ ID NO: 2937765 - DNA, 25 bp, Homo sapien
tgctgctggaggtatagaccactgg

SEQ ID NO: 2937766 - DNA, 25 bp, Homo sapien
tatctgtgactctttgctcagggag

SEQ ID NO: 2937767 - DNA, 25 bp, Homo sapien
cagggagtagctttgcatgtggtct

SEQ ID NO: 2937768 - DNA, 25 bp, Homo sapien
tgctgcactgcgtttgtcctggcca

SEQ ID NO: 2937769 - DNA, 25 bp, Homo sapien
gtcttgaatatagctttgctttgcc

SEQ ID NO: 2937770 - DNA, 25 bp, Homo sapien
tgtccacaacagtacatgtcactct

SEQ ID NO: 2937771 - DNA, 25 bp, Homo sapien
tccacaacagtacatgtcactctca

SEQ ID NO: 2937772 - DNA, 25 bp, Homo sapien
gcatgtccacaacagtacatgtcac

SEQ ID NO: 2937773 - DNA, 25 bp, Homo sapien
cacaacagtacatgtcactctcatc

SEQ ID NO: 2937774 - DNA, 25 bp, Homo sapien
tcaccagccagcttggggtcagagg

SEQ ID NO: 2937775 - DNA, 25 bp, Homo sapien
ttcaccagccagcttggggtcagag

SEQ ID NO: 2937776 - DNA, 25 bp, Homo sapien
caccagccagcttggggtcagagga

SEQ ID NO: 2937777 - DNA, 25 bp, Homo sapien
tgtggcttccaggacccccggggca

SEQ ID NO: 2937778 - DNA, 25 bp, Homo sapien
cgcggcgcagtaaagggccccgtgg

SEQ ID NO: 2937779 - DNA, 25 bp, Homo sapien
aatctcagcttcacaacttcattct

SEQ ID NO: 2937780 - DNA, 25 bp, Homo sapien
cctggtttctccggtcccaatggag

SEQ ID NO: 2937781 - DNA, 25 bp, Homo sapien
ggtcccaatggaggggaatctcagc

SEQ ID NO: 2937782 - DNA, 25 bp, Homo sapien
cggctccggccccatggctccggct

SEQ ID NO: 2937783 - DNA, 25 bp, Homo sapien
ggctccggccccatggctccggctg

SEQ ID NO: 2937784 - DNA, 25 bp, Homo sapien
cccagcggcacaaggccgccagctc

SEQ ID NO: 2937785 - DNA, 25 bp, Homo sapien
gaggagcccccagcggcacaaggcc

SEQ ID NO: 2937786 - DNA, 25 bp, Homo sapien
agcccccagcggcacaaggccgcca

SEQ ID NO: 2937787 - DNA, 25 bp, Homo sapien
cgaggaggagcccccagcggcacaa

SEQ ID NO: 2937788 - DNA, 25 bp, Homo sapien
gaagcaggagcaaccaaaccaaaat

SEQ ID NO: 2937789 - DNA, 25 bp, Homo sapien
ccagaagcaggagcaaccaaaccaa

SEQ ID NO: 2937790 - DNA, 25 bp, Homo sapien
cagaagcaggagcaaccaaaccaaa

SEQ ID NO: 2937791 - DNA, 25 bp, Homo sapien
gcaggagcaaccaaaccaaaatcgt

SEQ ID NO: 2937792 - DNA, 25 bp, Homo sapien
ctggcccagcaccttaagggagttc

SEQ ID NO: 2937793 - DNA, 25 bp, Homo sapien
aggctacctccctctgtttatggca

SEQ ID NO: 2937794 - DNA, 25 bp, Homo sapien
ttcctcagcaagaaggcgtggccat

SEQ ID NO: 2937795 - DNA, 25 bp, Homo sapien
aaacagggagggcaaggatgtactc

SEQ ID NO: 2937796 - DNA, 25 bp, Homo sapien
ttctcatcagaagatgagaggtgaa

SEQ ID NO: 2937797 - DNA, 25 bp, Homo sapien
cagaagatgagaggtgaagatgctt

SEQ ID NO: 2937798 - DNA, 25 bp, Homo sapien
ccttctcatcagaagatgagaggtg

SEQ ID NO: 2937799 - DNA, 25 bp, Homo sapien
gaagatgagaggtgaagatgcttgt

SEQ ID NO: 2937800 - DNA, 25 bp, Homo sapien
agcttcatgtctgtgccggtgcaca

SEQ ID NO: 2937801 - DNA, 25 bp, Homo sapien
acaggctggcattggtgggcaggta

SEQ ID NO: 2937802 - DNA, 25 bp, Homo sapien
gtgggtctcgggactggcagggagc

SEQ ID NO: 2937803 - DNA, 25 bp, Homo sapien
aggtttccctgcaccacctggcagc

SEQ ID NO: 2937804 - DNA, 25 bp, Homo sapien
agcccagctggaggcagggcctggc

SEQ ID NO: 2937805 - DNA, 25 bp, Homo sapien
agggcctggctgggttgcccacggg

SEQ ID NO: 2937806 - DNA, 25 bp, Homo sapien
gtaaacagagggctcagcccagctg

SEQ ID NO: 2937807 - DNA, 25 bp, Homo sapien
ctgtaaacagagggctcagcccagc

SEQ ID NO: 2937808 - DNA, 25 bp, Homo sapien
acgatccagcaggttggtttccact

SEQ ID NO: 2937809 - DNA, 25 bp, Homo sapien
gacaaaccaagcatgtggccccatt

SEQ ID NO: 2937810 - DNA, 25 bp, Homo sapien
ttctgagcttcacaactgctcccaa

SEQ ID NO: 2937811 - DNA, 25 bp, Homo sapien
acccggccggcgtctgcaatttgac

SEQ ID NO: 2937812 - DNA, 25 bp, Homo sapien
gtcctcaaagagctgggtgcctcgc

SEQ ID NO: 2937813 - DNA, 25 bp, Homo sapien
tgggacctgcctcacttggttgtga

SEQ ID NO: 2937814 - DNA, 25 bp, Homo sapien
tgttcagcgggtctccattgtctag

SEQ ID NO: 2937815 - DNA, 25 bp, Homo sapien
tgtgagcgatgagcacgtagccctg

SEQ ID NO: 2937816 - DNA, 25 bp, Homo sapien
tgagcaatgatcagaggaccctttc

SEQ ID NO: 2937817 - DNA, 25 bp, Homo sapien
caatgatcagaggaccctttcccct

SEQ ID NO: 2937818 - DNA, 25 bp, Homo sapien
gagcaatgatcagaggaccctttcc

SEQ ID NO: 2937819 - DNA, 25 bp, Homo sapien
gggtgagcaatgatcagaggaccct

SEQ ID NO: 2937820 - DNA, 25 bp, Homo sapien
agatgtccttccacaaaatcgtgtc

SEQ ID NO: 2937821 - DNA, 25 bp, Homo sapien
ggcccgagagcggttggtgtctatc

SEQ ID NO: 2937822 - DNA, 25 bp, Homo sapien
cagtgtgagagccagctggttgttc

SEQ ID NO: 2937823 - DNA, 25 bp, Homo sapien
ctgggggttccgctggatcaagacc

SEQ ID NO: 2937824 - DNA, 25 bp, Homo sapien
gctctgacaatcctcagaactctct

SEQ ID NO: 2937825 - DNA, 25 bp, Homo sapien
ggctctgacaatcctcagaactctc

SEQ ID NO: 2937826 - DNA, 25 bp, Homo sapien
gcgggagcccttacacatcggagaa

SEQ ID NO: 2937827 - DNA, 25 bp, Homo sapien
gggagcccttacacatcggagaaca

SEQ ID NO: 2937828 - DNA, 25 bp, Homo sapien
tgagggctgagtggcgccctgggca

SEQ ID NO: 2937829 - DNA, 25 bp, Homo sapien
gagggctgagtggcgccctgggcac

SEQ ID NO: 2937830 - DNA, 25 bp, Homo sapien
tcatggcagcagtcagtgggcagtg

SEQ ID NO: 2937831 - DNA, 25 bp, Homo sapien
atggcagcagtcagtgggcagtggc

SEQ ID NO: 2937832 - DNA, 25 bp, Homo sapien
gcccgtgcagccggcagcacactgc

SEQ ID NO: 2937833 - DNA, 25 bp, Homo sapien
cccgtgcagccggcagcacactgct

SEQ ID NO: 2937834 - DNA, 25 bp, Homo sapien
tgccaggggcaatagggcagtacca

SEQ ID NO: 2937835 - DNA, 25 bp, Homo sapien
aatagggcagtaccaggcagggtgc

SEQ ID NO: 2937836 - DNA, 25 bp, Homo sapien
gggcaatagggcagtaccaggcagg

SEQ ID NO: 2937837 - DNA, 25 bp, Homo sapien
tagggcagtaccaggcagggtgccc

SEQ ID NO: 2937838 - DNA, 25 bp, Homo sapien
acagctggcgccgaatgtataccgg

SEQ ID NO: 2937839 - DNA, 25 bp, Homo sapien
ttgggcatggactcaaacgtgtctg

SEQ ID NO: 2937840 - DNA, 25 bp, Homo sapien
aacgtgtctgtgttgtaggtgacca

SEQ ID NO: 2937841 - DNA, 25 bp, Homo sapien
tgtataccggccctcgggattgggc

SEQ ID NO: 2937842 - DNA, 25 bp, Homo sapien
caggatcccacgtccgtagaaaggt

SEQ ID NO: 2937843 - DNA, 25 bp, Homo sapien
acagggcttgctgcacttctcacac

SEQ ID NO: 2937844 - DNA, 25 bp, Homo sapien
ttctcacaccgctgtgttccatcct

SEQ ID NO: 2937845 - DNA, 25 bp, Homo sapien
cagacgagggtgcaggatcccacgt

SEQ ID NO: 2937846 - DNA, 25 bp, Homo sapien
gaaggataggacagggtgggctggg

SEQ ID NO: 2937847 - DNA, 25 bp, Homo sapien
aaggataggacagggtgggctgggc

SEQ ID NO: 2937848 - DNA, 25 bp, Homo sapien
aggctgcatgcgcagagggacagga

SEQ ID NO: 2937849 - DNA, 25 bp, Homo sapien
catgcgcagagggacaggaactgca

SEQ ID NO: 2937850 - DNA, 25 bp, Homo sapien
gacaggggatatagggacacttgta

SEQ ID NO: 2937851 - DNA, 25 bp, Homo sapien
gccacatgagcatcagggtccgggc

SEQ ID NO: 2937852 - DNA, 25 bp, Homo sapien
cactgacaggggatatagggacact

SEQ ID NO: 2937853 - DNA, 25 bp, Homo sapien
atgagcatcagggtccgggcccctc

SEQ ID NO: 2937854 - DNA, 25 bp, Homo sapien
aaactcctggatattggcactggta

SEQ ID NO: 2937855 - DNA, 25 bp, Homo sapien
tcccaaagatcttcttgcagccagc

SEQ ID NO: 2937856 - DNA, 25 bp, Homo sapien
tcacctctcgcaagtgctccatgcc

SEQ ID NO: 2937857 - DNA, 25 bp, Homo sapien
ttggcactggtaactgccctcacct

SEQ ID NO: 2937858 - DNA, 25 bp, Homo sapien
ccagagtctcaaacacttggagctg

SEQ ID NO: 2937859 - DNA, 25 bp, Homo sapien
tctcaaacacttggagctgctctgg

SEQ ID NO: 2937860 - DNA, 25 bp, Homo sapien
gctctggctggagcggggcagtgtt

SEQ ID NO: 2937861 - DNA, 25 bp, Homo sapien
gatctcttccagagtctcaaacact

SEQ ID NO: 2937862 - DNA, 25 bp, Homo sapien
aattcgtccccggattacttgcagg

SEQ ID NO: 2937863 - DNA, 25 bp, Homo sapien
ttgtgcagaattcgtccccggatta

SEQ ID NO: 2937864 - DNA, 25 bp, Homo sapien
caggctgtccggccatgctgagatg

SEQ ID NO: 2937865 - DNA, 25 bp, Homo sapien
gcaggctgtccggccatgctgagat

SEQ ID NO: 2937866 - DNA, 25 bp, Homo sapien
ccgtgtgcacgaagcagaggtgggt

SEQ ID NO: 2937867 - DNA, 25 bp, Homo sapien
tgcccagttccctcagtgagcgcag

SEQ ID NO: 2937868 - DNA, 25 bp, Homo sapien
tgcgggttccgaaagagctggtccc

SEQ ID NO: 2937869 - DNA, 25 bp, Homo sapien
cttgcagggtcagcgagtaggcgcc

SEQ ID NO: 2937870 - DNA, 25 bp, Homo sapien
cacagagacgggcagtctgcacaag

SEQ ID NO: 2937871 - DNA, 25 bp, Homo sapien
ggtaggacccagctagagaagccat

SEQ ID NO: 2937872 - DNA, 25 bp, Homo sapien
tctgcacaagtccaagaacgctgct

SEQ ID NO: 2937873 - DNA, 25 bp, Homo sapien
caggtccaagtgaaccagggaactg

SEQ ID NO: 2937874 - DNA, 25 bp, Homo sapien
tgccctcgggcgcacagctggtggc

SEQ ID NO: 2937875 - DNA, 25 bp, Homo sapien
cccgaaggaactggctgcagttgac

SEQ ID NO: 2937876 - DNA, 25 bp, Homo sapien
tcggcattcctccacgcactcctgg

SEQ ID NO: 2937877 - DNA, 25 bp, Homo sapien
cctggccccgaaggaactggctgca

SEQ ID NO: 2937878 - DNA, 25 bp, Homo sapien
acagtggtgagggggtctgagagga

SEQ ID NO: 2937879 - DNA, 25 bp, Homo sapien
gaggagccccatgcacccctccagc

SEQ ID NO: 2937880 - DNA, 25 bp, Homo sapien
gagaggagccccatgcacccctcca

SEQ ID NO: 2937881 - DNA, 25 bp, Homo sapien
ggagccccatgcacccctccagcca

SEQ ID NO: 2937882 - DNA, 25 bp, Homo sapien
agtgcctggcattcacatactccct

SEQ ID NO: 2937883 - DNA, 25 bp, Homo sapien
ggcattcacatactccctggggagc

SEQ ID NO: 2937884 - DNA, 25 bp, Homo sapien
gcctggcattcacatactccctggg

SEQ ID NO: 2937885 - DNA, 25 bp, Homo sapien
tggcattcacatactccctggggag

SEQ ID NO: 2937886 - DNA, 25 bp, Homo sapien
tcctccaagcttgatcctgggcagg

SEQ ID NO: 2937887 - DNA, 25 bp, Homo sapien
cattacctaaggtgtaacagcgagt

SEQ ID NO: 2937888 - DNA, 25 bp, Homo sapien
caattttcgccatgctcctgggaca

SEQ ID NO: 2937889 - DNA, 25 bp, Homo sapien
ggcagtaggatcaggcccttagttg

SEQ ID NO: 2937890 - DNA, 25 bp, Homo sapien
gcatgtaggagaggtcaggtttcac

SEQ ID NO: 2937891 - DNA, 25 bp, Homo sapien
tggcatgcgccctcctcatctggaa

SEQ ID NO: 2937892 - DNA, 25 bp, Homo sapien
ggtccttatagtgggcacaggccac

SEQ ID NO: 2937893 - DNA, 25 bp, Homo sapien
agaggtcaggtttcacaccgctggg

SEQ ID NO: 2937894 - DNA, 25 bp, Homo sapien
ctgcagaaaagaccgttggactcac

SEQ ID NO: 2937895 - DNA, 25 bp, Homo sapien
tttatagtaagagccccagaaagac

SEQ ID NO: 2937896 - DNA, 25 bp, Homo sapien
tatagtaagagccccagaaagaccc

SEQ ID NO: 2937897 - DNA, 25 bp, Homo sapien
cttttatagtaagagccccagaaag

SEQ ID NO: 2937898 - DNA, 25 bp, Homo sapien
ggctctctgctcggcggggcagccc

SEQ ID NO: 2937899 - DNA, 25 bp, Homo sapien
aatgacaggaggttccacagtggaa

SEQ ID NO: 2937900 - DNA, 25 bp, Homo sapien
catcaagttactctagggtgtggag

SEQ ID NO: 2937901 - DNA, 25 bp, Homo sapien
gagggactgggtttcctagccatct

SEQ ID NO: 2937902 - DNA, 25 bp, Homo sapien
gaattgaactttgcctgtgtccctc

SEQ ID NO: 2937903 - DNA, 25 bp, Homo sapien
tcttctgctgccgtcgcttgatgag

SEQ ID NO: 2937904 - DNA, 25 bp, Homo sapien
cctgcagcagtctccgcatcgtgta

SEQ ID NO: 2937905 - DNA, 25 bp, Homo sapien
gcatcgtgtacttccggatcttctg

SEQ ID NO: 2937906 - DNA, 25 bp, Homo sapien
gcttgatgaggatcccaaagaccac

SEQ ID NO: 2937907 - DNA, 25 bp, Homo sapien
ctgggaggacttcaccccgcctcac

SEQ ID NO: 2937908 - DNA, 25 bp, Homo sapien
gctgggaggacttcaccccgcctca

SEQ ID NO: 2937909 - DNA, 25 bp, Homo sapien
ttcctcagctccgtctctttcagga

SEQ ID NO: 2937910 - DNA, 25 bp, Homo sapien
catctgcgcctggttgggcatcgct

SEQ ID NO: 2937911 - DNA, 25 bp, Homo sapien
tccgtctctttcaggatccgcatct

SEQ ID NO: 2937912 - DNA, 25 bp, Homo sapien
aaagcgccagatccaagcaccttca

SEQ ID NO: 2937913 - DNA, 25 bp, Homo sapien
ttgatggccactggaattttcacat

SEQ ID NO: 2937914 - DNA, 25 bp, Homo sapien
ctaagatttctttgttggctttggg

SEQ ID NO: 2937915 - DNA, 25 bp, Homo sapien
ttctccccatcagggatccagatgc

SEQ ID NO: 2937916 - DNA, 25 bp, Homo sapien
ttttccctcaacactttgatggcca

SEQ ID NO: 2937917 - DNA, 25 bp, Homo sapien
tgaaggctcaaagtaccagcctgga

SEQ ID NO: 2937918 - DNA, 25 bp, Homo sapien
gggacaagggtacgctgagagggta

SEQ ID NO: 2937919 - DNA, 25 bp, Homo sapien
cccaaccatcacaaaccacagccat

SEQ ID NO: 2937920 - DNA, 25 bp, Homo sapien
agagggtatgggagaccacacaccc

SEQ ID NO: 2937921 - DNA, 25 bp, Homo sapien
catagggcataagctgtgtcaccag

SEQ ID NO: 2937922 - DNA, 25 bp, Homo sapien
ggtctaagaggcagccatagggcat

SEQ ID NO: 2937923 - DNA, 25 bp, Homo sapien
tggcaatctgcatacaccagttcag

SEQ ID NO: 2937924 - DNA, 25 bp, Homo sapien
accgtggatgtcaggcagatgccca

SEQ ID NO: 2937925 - DNA, 25 bp, Homo sapien
ccttgtggacataggggtttgctcc

SEQ ID NO: 2937926 - DNA, 25 bp, Homo sapien
ttgctccggagagacctgcaaagag

SEQ ID NO: 2937927 - DNA, 25 bp, Homo sapien
acataggggtttgctccggagagac

SEQ ID NO: 2937928 - DNA, 25 bp, Homo sapien
agtccccatcctagccccttgtgga

SEQ ID NO: 2937929 - DNA, 25 bp, Homo sapien
ggaatgggaagcacccatgtagacc

SEQ ID NO: 2937930 - DNA, 25 bp, Homo sapien
gaatgggaagcacccatgtagacct

SEQ ID NO: 2937931 - DNA, 25 bp, Homo sapien
gggaagcacccatgtagaccttctg

SEQ ID NO: 2937932 - DNA, 25 bp, Homo sapien
atgggaagcacccatgtagaccttc

SEQ ID NO: 2937933 - DNA, 25 bp, Homo sapien
tactctgtctcgtcaatgtccagca

SEQ ID NO: 2937934 - DNA, 25 bp, Homo sapien
tctgtaattttgacatggttgggac

SEQ ID NO: 2937935 - DNA, 25 bp, Homo sapien
ggttgggactcttgaccagcacgtt

SEQ ID NO: 2937936 - DNA, 25 bp, Homo sapien
aagtccctgtgtacgagccgcacat

SEQ ID NO: 2937937 - DNA, 25 bp, Homo sapien
gagttctcccatgggctagacacca

SEQ ID NO: 2937938 - DNA, 25 bp, Homo sapien
cagagttctcccatgggctagacac

SEQ ID NO: 2937939 - DNA, 25 bp, Homo sapien
atgggctagacaccactccacccag

SEQ ID NO: 2937940 - DNA, 25 bp, Homo sapien
ccatgggctagacaccactccaccc

SEQ ID NO: 2937941 - DNA, 25 bp, Homo sapien
tcactctggtgggtgaaccgccggc

SEQ ID NO: 2937942 - DNA, 25 bp, Homo sapien
accgccggcggagaatggactccag

SEQ ID NO: 2937943 - DNA, 25 bp, Homo sapien
gtgaaccgccggcggagaatggact

SEQ ID NO: 2937944 - DNA, 25 bp, Homo sapien
gaaccgccggcggagaatggactcc

SEQ ID NO: 2937945 - DNA, 25 bp, Homo sapien
gatcccatcgtaaggtttggcccca

SEQ ID NO: 2937946 - DNA, 25 bp, Homo sapien
caaaagtcatcagctcccacacagt

SEQ ID NO: 2937947 - DNA, 25 bp, Homo sapien
cagcaggtcagggatctcccgggct

SEQ ID NO: 2937948 - DNA, 25 bp, Homo sapien
ggctgggatcccatcgtaaggtttg

SEQ ID NO: 2937949 - DNA, 25 bp, Homo sapien
cagccagcacagctcagccacgcac

SEQ ID NO: 2937950 - DNA, 25 bp, Homo sapien
tccaggcagccagcacagctcagcc

SEQ ID NO: 2937951 - DNA, 25 bp, Homo sapien
ggcagccagcacagctcagccacgc

SEQ ID NO: 2937952 - DNA, 25 bp, Homo sapien
aggcagccagcacagctcagccacg

SEQ ID NO: 2937953 - DNA, 25 bp, Homo sapien
cccggaatcttggccgacattcaga

SEQ ID NO: 2937954 - DNA, 25 bp, Homo sapien
tcttggccgacattcagagtcaatc

SEQ ID NO: 2937955 - DNA, 25 bp, Homo sapien
ggaatcttggccgacattcagagtc

SEQ ID NO: 2937956 - DNA, 25 bp, Homo sapien
cgacattcagagtcaatcatccaac

SEQ ID NO: 2937957 - DNA, 25 bp, Homo sapien
catgcgggagaattcagacaccaac

SEQ ID NO: 2937958 - DNA, 25 bp, Homo sapien
ggtccctggccatgcgggagaattc

SEQ ID NO: 2937959 - DNA, 25 bp, Homo sapien
accacaaagcgctgggggtccctgg

SEQ ID NO: 2937960 - DNA, 25 bp, Homo sapien
ctggccatgcgggagaattcagaca

SEQ ID NO: 2937961 - DNA, 25 bp, Homo sapien
tctgcaggagggtgctcttagccac

SEQ ID NO: 2937962 - DNA, 25 bp, Homo sapien
gggatggggcacagaggcccagtac

SEQ ID NO: 2937963 - DNA, 25 bp, Homo sapien
cctctgcaggagggtgctcttagcc

SEQ ID NO: 2937964 - DNA, 25 bp, Homo sapien
tagccacaggcagggatggggcaca

SEQ ID NO: 2937965 - DNA, 25 bp, Homo sapien
accaggtcccccatgtcatcgtcct

SEQ ID NO: 2937966 - DNA, 25 bp, Homo sapien
tcatcgtcctccagcagtgagcggt

SEQ ID NO: 2937967 - DNA, 25 bp, Homo sapien
tcgtcctccagcagtgagcggtaga

SEQ ID NO: 2937968 - DNA, 25 bp, Homo sapien
caccaggtcccccatgtcatcgtcc

SEQ ID NO: 2937969 - DNA, 25 bp, Homo sapien
ctggtagatgagctgcggtgcctgt

SEQ ID NO: 2937970 - DNA, 25 bp, Homo sapien
gggtctggacagaagaagccctgct

SEQ ID NO: 2937971 - DNA, 25 bp, Homo sapien
ggtctggacagaagaagccctgctg

SEQ ID NO: 2937972 - DNA, 25 bp, Homo sapien
cctggtagatgagctgcggtgcctg

SEQ ID NO: 2937973 - DNA, 25 bp, Homo sapien
ggtcaccatcaaatacatcggagcc

SEQ ID NO: 2937974 - DNA, 25 bp, Homo sapien
tcaggggggcaacgtagccatcagt

SEQ ID NO: 2937975 - DNA, 25 bp, Homo sapien
ctcactgtaccgctgtagagggctg

SEQ ID NO: 2937976 - DNA, 25 bp, Homo sapien
tccagccctagtgtcaggtccccac

SEQ ID NO: 2937977 - DNA, 25 bp, Homo sapien
ggccgaacatctggctggttcacat

SEQ ID NO: 2937978 - DNA, 25 bp, Homo sapien
gggccgaacatctggctggttcaca

SEQ ID NO: 2937979 - DNA, 25 bp, Homo sapien
ctggggccgaacatctggctggttc

SEQ ID NO: 2937980 - DNA, 25 bp, Homo sapien
gggctggggccgaacatctggctgg

SEQ ID NO: 2937981 - DNA, 25 bp, Homo sapien
ccgtaggtgtccctttgaaggtgct

SEQ ID NO: 2937982 - DNA, 25 bp, Homo sapien
ccagtaatagaggttgtcgaaggct

SEQ ID NO: 2937983 - DNA, 25 bp, Homo sapien
acactggcacgtccagacccaggta

SEQ ID NO: 2937984 - DNA, 25 bp, Homo sapien
tctgggttctctgccgtaggtgtcc

SEQ ID NO: 2937985 - DNA, 25 bp, Homo sapien
agggcttctgcggacttggccttct

SEQ ID NO: 2937986 - DNA, 25 bp, Homo sapien
tggcaggttcccctggaagtggtcg

SEQ ID NO: 2937987 - DNA, 25 bp, Homo sapien
acaggttcctggcatggcaggttcc

SEQ ID NO: 2937988 - DNA, 25 bp, Homo sapien
ttcctggcatggcaggttcccctgg

SEQ ID NO: 2937989 - DNA, 25 bp, Homo sapien
tggcatggcaggttcccctggaagt

SEQ ID NO: 2937990 - DNA, 25 bp, Homo sapien
gttcctcttccaacgaggctggacc

SEQ ID NO: 2937991 - DNA, 25 bp, Homo sapien
tagagtctcattgggcagggcctca

SEQ ID NO: 2937992 - DNA, 25 bp, Homo sapien
gccatctgggaactcaagcaggaag

SEQ ID NO: 2937993 - DNA, 25 bp, Homo sapien
ccagccatctgggaactcaagcagg

SEQ ID NO: 2937994 - DNA, 25 bp, Homo sapien
ttagacactcccttagggccgcttc

SEQ ID NO: 2937995 - DNA, 25 bp, Homo sapien
gggcagtactaggtttcagggacag

SEQ ID NO: 2937996 - DNA, 25 bp, Homo sapien
cagcttccctaaggctttcagtacc

SEQ ID NO: 2937997 - DNA, 25 bp, Homo sapien
acagtctctgaatgggtcgcttttg

SEQ ID NO: 2937998 - DNA, 25 bp, Homo sapien
gaaaagcactctgtacaaagcctgg

SEQ ID NO: 2937999 - DNA, 25 bp, Homo sapien
gcactctgtacaaagcctggatact

SEQ ID NO: 2938000 - DNA, 25 bp, Homo sapien
agaaaagcactctgtacaaagcctg

SEQ ID NO: 2938001 - DNA, 25 bp, Homo sapien
aaagcactctgtacaaagcctggat

SEQ ID NO: 2938002 - DNA, 25 bp, Homo sapien
aggccggtgcctagctgttttccaa

SEQ ID NO: 2938003 - DNA, 25 bp, Homo sapien
aataaccccattctggtgagtggcc

SEQ ID NO: 2938004 - DNA, 25 bp, Homo sapien
gaaaatgagtcccacagtagaccct

SEQ ID NO: 2938005 - DNA, 25 bp, Homo sapien
gaatgatctggtcgtcaaagggctc

SEQ ID NO: 2938006 - DNA, 25 bp, Homo sapien
agaagtccggtcagcccagcctttg

SEQ ID NO: 2938007 - DNA, 25 bp, Homo sapien
tgtgtgtttttatacgtccagtctg

SEQ ID NO: 2938008 - DNA, 25 bp, Homo sapien
tatacgtccagtctgggaatgtggg

SEQ ID NO: 2938009 - DNA, 25 bp, Homo sapien
ggcacagaagtccggtcagcccagc

SEQ ID NO: 2938010 - DNA, 25 bp, Homo sapien
tgaggctcgcagaacacctgctggg

SEQ ID NO: 2938011 - DNA, 25 bp, Homo sapien
gctttatgtaaagtgcccgcagtgc

SEQ ID NO: 2938012 - DNA, 25 bp, Homo sapien
ggagctgccctacgaggtcaaaacg

SEQ ID NO: 2938013 - DNA, 25 bp, Homo sapien
tcaaaacgtagcagtggcggagacc

SEQ ID NO: 2938014 - DNA, 25 bp, Homo sapien
gcaaagagcaccctgccgagaggga

SEQ ID NO: 2938015 - DNA, 25 bp, Homo sapien
agcaccctgccgagagggacgccag

SEQ ID NO: 2938016 - DNA, 25 bp, Homo sapien
ccatggggcaaagagcaccctgccg

SEQ ID NO: 2938017 - DNA, 25 bp, Homo sapien
tggggcaaagagcaccctgccgaga

SEQ ID NO: 2938018 - DNA, 25 bp, Homo sapien
gggaagacagccgaacagacagtac

SEQ ID NO: 2938019 - DNA, 25 bp, Homo sapien
tgtgtgtccagattccaggcccaag

SEQ ID NO: 2938020 - DNA, 25 bp, Homo sapien
cgaagtctggctccgtctaggaacc

SEQ ID NO: 2938021 - DNA, 25 bp, Homo sapien
taccacgagcgaagatcaagagtcc

SEQ ID NO: 2938022 - DNA, 25 bp, Homo sapien
ccggctgggaccacgtcttcaggga

SEQ ID NO: 2938023 - DNA, 25 bp, Homo sapien
ggctgggaccacgtcttcagggagg

SEQ ID NO: 2938024 - DNA, 25 bp, Homo sapien
gacacccggctgggaccacgtcttc

SEQ ID NO: 2938025 - DNA, 25 bp, Homo sapien
cacccggctgggaccacgtcttcag

SEQ ID NO: 2938026 - DNA, 25 bp, Homo sapien
gcctcgacaatttagaggatccctc

SEQ ID NO: 2938027 - DNA, 25 bp, Homo sapien
tcgacaatttagaggatccctctcc

SEQ ID NO: 2938028 - DNA, 25 bp, Homo sapien
ggcatacaatctggagagatgaagc

SEQ ID NO: 2938029 - DNA, 25 bp, Homo sapien
gagaagggcatacaatctggagaga

SEQ ID NO: 2938030 - DNA, 25 bp, Homo sapien
gtcctatccacccatttgtctgagg

SEQ ID NO: 2938031 - DNA, 25 bp, Homo sapien
tttgtctgagggcacctggtacccc

SEQ ID NO: 2938032 - DNA, 25 bp, Homo sapien
cacccatttgtctgagggcacctgg

SEQ ID NO: 2938033 - DNA, 25 bp, Homo sapien
tatccacccatttgtctgagggcac

SEQ ID NO: 2938034 - DNA, 25 bp, Homo sapien
tctcgtgccttaacctcccgagtaa

SEQ ID NO: 2938035 - DNA, 25 bp, Homo sapien
actgggattacaggtgcccaccacc

SEQ ID NO: 2938036 - DNA, 25 bp, Homo sapien
ccacgcccggctccagtgctctttc

SEQ ID NO: 2938037 - DNA, 25 bp, Homo sapien
cgtgccttaacctcccgagtaactg

SEQ ID NO: 2938038 - DNA, 25 bp, Homo sapien
caagagaggggcttaacggaaccag

SEQ ID NO: 2938039 - DNA, 25 bp, Homo sapien
caggcagaggggtatcagggggccg

SEQ ID NO: 2938040 - DNA, 25 bp, Homo sapien
aggtcttccggagagctgctaagat

SEQ ID NO: 2938041 - DNA, 25 bp, Homo sapien
tgggcaaaggtcttccggagagctg

SEQ ID NO: 2938042 - DNA, 25 bp, Homo sapien
aaaggtcttccggagagctgctaag

SEQ ID NO: 2938043 - DNA, 25 bp, Homo sapien
tgaggagaggctgggacctctttac

SEQ ID NO: 2938044 - DNA, 25 bp, Homo sapien
atgaggagaggctgggacctcttta

SEQ ID NO: 2938045 - DNA, 25 bp, Homo sapien
gcaagcctctgtgtattatccagca

SEQ ID NO: 2938046 - DNA, 25 bp, Homo sapien
agcctctgtgtattatccagcactg

SEQ ID NO: 2938047 - DNA, 25 bp, Homo sapien
ggcctgcaagcctctgtgtattatc

SEQ ID NO: 2938048 - DNA, 25 bp, Homo sapien
agtggcctgcaagcctctgtgtatt

SEQ ID NO: 2938049 - DNA, 25 bp, Homo sapien
acgcctctcctcctctcgaagtttc

SEQ ID NO: 2938050 - DNA, 25 bp, Homo sapien
ggagggaggtggcacgcctctcctc

SEQ ID NO: 2938051 - DNA, 25 bp, Homo sapien
agggaggtggcacgcctctcctcct

SEQ ID NO: 2938052 - DNA, 25 bp, Homo sapien
gagggaggtggcacgcctctcctcc

SEQ ID NO: 2938053 - DNA, 25 bp, Homo sapien
ccttgcactggaggggcccccgaga

SEQ ID NO: 2938054 - DNA, 25 bp, Homo sapien
tgggggcggctggcatcgcggggga

SEQ ID NO: 2938055 - DNA, 25 bp, Homo sapien
ggcggctggcatcgcgggggagcag

SEQ ID NO: 2938056 - DNA, 25 bp, Homo sapien
ggagcagcccccttgcactggaggg

SEQ ID NO: 2938057 - DNA, 25 bp, Homo sapien
catggaagcggctgtgtatctccca

SEQ ID NO: 2938058 - DNA, 25 bp, Homo sapien
agggactcctaaccaagatcccctg

SEQ ID NO: 2938059 - DNA, 25 bp, Homo sapien
gtgattcattccctttccgcacctg

SEQ ID NO: 2938060 - DNA, 25 bp, Homo sapien
tgctagaccctcagggactcctaac

SEQ ID NO: 2938061 - DNA, 25 bp, Homo sapien
tgcaccagcatttcacacacgtggc

SEQ ID NO: 2938062 - DNA, 25 bp, Homo sapien
ggcgtgagctcgctgcaccagcatt

SEQ ID NO: 2938063 - DNA, 25 bp, Homo sapien
tttcacacacgtggcgagctgtggc

SEQ ID NO: 2938064 - DNA, 25 bp, Homo sapien
caggtctcgtcgctcaaggcgtgag

SEQ ID NO: 2938065 - DNA, 25 bp, Homo sapien
atctcccagcccggatagttccatg

SEQ ID NO: 2938066 - DNA, 25 bp, Homo sapien
gcccaagatgcaaggcatcatctcc

SEQ ID NO: 2938067 - DNA, 25 bp, Homo sapien
ggatagttccatgcacctgacttac

SEQ ID NO: 2938068 - DNA, 25 bp, Homo sapien
gccacatgcctagcccaagatgcaa

SEQ ID NO: 2938069 - DNA, 25 bp, Homo sapien
ttttccggaagacgaagcggctatc

SEQ ID NO: 2938070 - DNA, 25 bp, Homo sapien
gggagctcttgaacagttcgtactt

SEQ ID NO: 2938071 - DNA, 25 bp, Homo sapien
tgcacttccaccacggactcgtggt

SEQ ID NO: 2938072 - DNA, 25 bp, Homo sapien
tgaacagttcgtacttggcgaagtt

SEQ ID NO: 2938073 - DNA, 25 bp, Homo sapien
ggatcagggcatcccagcgcccaga

SEQ ID NO: 2938074 - DNA, 25 bp, Homo sapien
ctgtgggtagacaagtgtcagggat

SEQ ID NO: 2938075 - DNA, 25 bp, Homo sapien
gctccagcatccaggttgaggatca

SEQ ID NO: 2938076 - DNA, 25 bp, Homo sapien
catccaggttgaggatcagggcatc

SEQ ID NO: 2938077 - DNA, 25 bp, Homo sapien
tcttcatgggatataccagtgtgtg

SEQ ID NO: 2938078 - DNA, 25 bp, Homo sapien
ggtcttcatgggatataccagtgtg

SEQ ID NO: 2938079 - DNA, 25 bp, Homo sapien
tataccagtgtgtgcatcgagacag

SEQ ID NO: 2938080 - DNA, 25 bp, Homo sapien
cagtgtgtgcatcgagacagctgga

SEQ ID NO: 2938081 - DNA, 25 bp, Homo sapien
gagtcgtgaatctgcagtgaaatgg

SEQ ID NO: 2938082 - DNA, 25 bp, Homo sapien
cacacaggactgtgatttggctctt

SEQ ID NO: 2938083 - DNA, 25 bp, Homo sapien
ctcaggcagggaaagtgactgtccc

SEQ ID NO: 2938084 - DNA, 25 bp, Homo sapien
acttaagggtggagaagcactggcc

SEQ ID NO: 2938085 - DNA, 25 bp, Homo sapien
gtaatagaggccagatcggcgcaag

SEQ ID NO: 2938086 - DNA, 25 bp, Homo sapien
agcgtttccaaagcttccgtcctga

SEQ ID NO: 2938087 - DNA, 25 bp, Homo sapien
ccagatcggcgcaagaagcagaaaa

SEQ ID NO: 2938088 - DNA, 25 bp, Homo sapien
tagaggtgcccttggtggagtaata

SEQ ID NO: 2938089 - DNA, 25 bp, Homo sapien
ctgggcaggtgagctaggcaaggat

SEQ ID NO: 2938090 - DNA, 25 bp, Homo sapien
caacttctaaaaggaccagggactg

SEQ ID NO: 2938091 - DNA, 25 bp, Homo sapien
agggctcagaggttccagcagagaa

SEQ ID NO: 2938092 - DNA, 25 bp, Homo sapien
gtagggagagatggtaaactggagg

SEQ ID NO: 2938093 - DNA, 25 bp, Homo sapien
gccacgtactgcaggtgcctcggat

SEQ ID NO: 2938094 - DNA, 25 bp, Homo sapien
tacacgttggactcgttcacatctg

SEQ ID NO: 2938095 - DNA, 25 bp, Homo sapien
tgggcatcccgtagagcttgcggcc

SEQ ID NO: 2938096 - DNA, 25 bp, Homo sapien
gacacagaaaccgaagtcagtgggc

SEQ ID NO: 2938097 - DNA, 25 bp, Homo sapien
attgactggtcccatatctgccttt

SEQ ID NO: 2938098 - DNA, 25 bp, Homo sapien
tatctgcctttaggaccacatgtct

SEQ ID NO: 2938099 - DNA, 25 bp, Homo sapien
aaattgactggtcccatatctgcct

SEQ ID NO: 2938100 - DNA, 25 bp, Homo sapien
gaaattgactggtcccatatctgcc

SEQ ID NO: 2938101 - DNA, 25 bp, Homo sapien
cttgtggccatttcgaagcttgttg

SEQ ID NO: 2938102 - DNA, 25 bp, Homo sapien
cagccagcaggtgcggctctgctca

SEQ ID NO: 2938103 - DNA, 25 bp, Homo sapien
agaagatccgaagccccttgtggcc

SEQ ID NO: 2938104 - DNA, 25 bp, Homo sapien
tcatcttcactgcagaagatccgaa

SEQ ID NO: 2938105 - DNA, 25 bp, Homo sapien
ccccatgccactcccagggtctcac

SEQ ID NO: 2938106 - DNA, 25 bp, Homo sapien
ccccccatgccactcccagggtctc

SEQ ID NO: 2938107 - DNA, 25 bp, Homo sapien
cccccatgccactcccagggtctca

SEQ ID NO: 2938108 - DNA, 25 bp, Homo sapien
gggcgtggctgtgacgcccccctca

SEQ ID NO: 2938109 - DNA, 25 bp, Homo sapien
gagcttgaggtcgagaggtcctggg

SEQ ID NO: 2938110 - DNA, 25 bp, Homo sapien
tgtttctgccttcgatgggcacttc

SEQ ID NO: 2938111 - DNA, 25 bp, Homo sapien
gaaagagagcttgaggtcgagaggt

SEQ ID NO: 2938112 - DNA, 25 bp, Homo sapien
aattcttgtacagctgcaccccgta

SEQ ID NO: 2938113 - DNA, 25 bp, Homo sapien
gtaattcttgtacagctgcaccccg

SEQ ID NO: 2938114 - DNA, 25 bp, Homo sapien
ggtggggagcccaaacaagatggat

SEQ ID NO: 2938115 - DNA, 25 bp, Homo sapien
ctggtaattcttgtacagctgcacc

SEQ ID NO: 2938116 - DNA, 25 bp, Homo sapien
gggttctcaatgacacgcccagcat

SEQ ID NO: 2938117 - DNA, 25 bp, Homo sapien
agagcctcccgggggttctcaatga

SEQ ID NO: 2938118 - DNA, 25 bp, Homo sapien
ttctcaatgacacgcccagcatggc

SEQ ID NO: 2938119 - DNA, 25 bp, Homo sapien
ccagggtattatctgaggcacttct

SEQ ID NO: 2938120 - DNA, 25 bp, Homo sapien
gcactgaggctcgtgccggaggctg

SEQ ID NO: 2938121 - DNA, 25 bp, Homo sapien
actgaggctcgtgccggaggctggc

SEQ ID NO: 2938122 - DNA, 25 bp, Homo sapien
tgcactgaggctcgtgccggaggct

SEQ ID NO: 2938123 - DNA, 25 bp, Homo sapien
ctgcactgaggctcgtgccggaggc

SEQ ID NO: 2938124 - DNA, 25 bp, Homo sapien
catctactccccactgggaatacaa

SEQ ID NO: 2938125 - DNA, 25 bp, Homo sapien
tggggaaggacatgggcggtcactt

SEQ ID NO: 2938126 - DNA, 25 bp, Homo sapien
gaggggacccctataccatctactc

SEQ ID NO: 2938127 - DNA, 25 bp, Homo sapien
gaaggacatgggcggtcactttggg

SEQ ID NO: 2938128 - DNA, 25 bp, Homo sapien
aaccagagttgggtgcggtggatgg

SEQ ID NO: 2938129 - DNA, 25 bp, Homo sapien
gaaatgcgcccgtggaaccagagtt

SEQ ID NO: 2938130 - DNA, 25 bp, Homo sapien
agccctgctgtccaataagccgctg

SEQ ID NO: 2938131 - DNA, 25 bp, Homo sapien
tggctctcctcacgggaaatgcgcc

SEQ ID NO: 2938132 - DNA, 25 bp, Homo sapien
ggagatggggcagcattactaccca

SEQ ID NO: 2938133 - DNA, 25 bp, Homo sapien
agcattactacccaaggaccatggc

SEQ ID NO: 2938134 - DNA, 25 bp, Homo sapien
cattactacccaaggaccatggctg

SEQ ID NO: 2938135 - DNA, 25 bp, Homo sapien
gggcagcattactacccaaggacca

SEQ ID NO: 2938136 - DNA, 25 bp, Homo sapien
ctgggggttccgctgactctcccgg

SEQ ID NO: 2938137 - DNA, 25 bp, Homo sapien
tttctgcaggtggcacaaagagagg

SEQ ID NO: 2938138 - DNA, 25 bp, Homo sapien
cactttctgcaggtggcacaaagag

SEQ ID NO: 2938139 - DNA, 25 bp, Homo sapien
gctgactctcccggaccaggaacag

SEQ ID NO: 2938140 - DNA, 25 bp, Homo sapien
tctcccaccttggccgtcctaagtg

SEQ ID NO: 2938141 - DNA, 25 bp, Homo sapien
ctgcagccttgaccctctgggctca

SEQ ID NO: 2938142 - DNA, 25 bp, Homo sapien
agtgtggtggtgccaccatggctca

SEQ ID NO: 2938143 - DNA, 25 bp, Homo sapien
agcaatgctcccacctcagcctcct

SEQ ID NO: 2938144 - DNA, 25 bp, Homo sapien
tcagggaggggcccgaggcttggga

SEQ ID NO: 2938145 - DNA, 25 bp, Homo sapien
agttcagggaggggcccgaggcttg

SEQ ID NO: 2938146 - DNA, 25 bp, Homo sapien
gaggggcccgaggcttgggaagctc

SEQ ID NO: 2938147 - DNA, 25 bp, Homo sapien
ccgaggcttgggaagctccctcctg

SEQ ID NO: 2938148 - DNA, 25 bp, Homo sapien
atgctgaagtacaggcggccctcct

SEQ ID NO: 2938149 - DNA, 25 bp, Homo sapien
caagcacggcaggatgccgcggttc

SEQ ID NO: 2938150 - DNA, 25 bp, Homo sapien
ccgcgtgcagcaatggcgcagcaag

SEQ ID NO: 2938151 - DNA, 25 bp, Homo sapien
tcagtgaagcgggtctggccatcat

SEQ ID NO: 2938152 - DNA, 25 bp, Homo sapien
taaaacagagcagatcaactggcct

SEQ ID NO: 2938153 - DNA, 25 bp, Homo sapien
cctctcggtctgtacaaagtgtggg

SEQ ID NO: 2938154 - DNA, 25 bp, Homo sapien
actggagtggcggaaccctcccgct

SEQ ID NO: 2938155 - DNA, 25 bp, Homo sapien
cgcgccccagagtccactggatggg

SEQ ID NO: 2938156 - DNA, 25 bp, Homo sapien
tgcagtctctgaggtagagcagcat

SEQ ID NO: 2938157 - DNA, 25 bp, Homo sapien
gctgcagtctctgaggtagagcagc

SEQ ID NO: 2938158 - DNA, 25 bp, Homo sapien
ctgcagtctctgaggtagagcagca

SEQ ID NO: 2938159 - DNA, 25 bp, Homo sapien
cagcccagattttctcagaaccaca

SEQ ID NO: 2938160 - DNA, 25 bp, Homo sapien
agcccagattttctcagaaccacaa

SEQ ID NO: 2938161 - DNA, 25 bp, Homo sapien
cgatctagcactgcagccgtccttg

SEQ ID NO: 2938162 - DNA, 25 bp, Homo sapien
acaagcctccccgatctagcactgc

SEQ ID NO: 2938163 - DNA, 25 bp, Homo sapien
tggtcccgggaagctggaacgtgtg

SEQ ID NO: 2938164 - DNA, 25 bp, Homo sapien
gtcccgggaagctggaacgtgtgat

SEQ ID NO: 2938165 - DNA, 25 bp, Homo sapien
cccgggaagctggaacgtgtgatgc

SEQ ID NO: 2938166 - DNA, 25 bp, Homo sapien
cgggaagctggaacgtgtgatgcat

SEQ ID NO: 2938167 - DNA, 25 bp, Homo sapien
gcaggggaagtgcccccgcgggcat

SEQ ID NO: 2938168 - DNA, 25 bp, Homo sapien
ggcaggggaagtgcccccgcgggca

SEQ ID NO: 2938169 - DNA, 25 bp, Homo sapien
gccccgcccttccgggcactgccgc

SEQ ID NO: 2938170 - DNA, 25 bp, Homo sapien
cccgcccttccgggcactgccgctg

SEQ ID NO: 2938171 - DNA, 25 bp, Homo sapien
ccccgcccttccgggcactgccgct

SEQ ID NO: 2938172 - DNA, 25 bp, Homo sapien
cgccccgcccttccgggcactgccg

SEQ ID NO: 2938173 - DNA, 25 bp, Homo sapien
tcacagcccagcgccgctgctgcac

SEQ ID NO: 2938174 - DNA, 25 bp, Homo sapien
ccgcgctgtcctatcacagcccgag

SEQ ID NO: 2938175 - DNA, 25 bp, Homo sapien
tcccgagcgccggatctcggcgtgc

SEQ ID NO: 2938176 - DNA, 25 bp, Homo sapien
ctatcacagcccgagcaggatccag

SEQ ID NO: 2938177 - DNA, 25 bp, Homo sapien
tgtcctatcacagcccgagcaggat

SEQ ID NO: 2938178 - DNA, 25 bp, Homo sapien
cctatggagttctacctggagccca

SEQ ID NO: 2938179 - DNA, 25 bp, Homo sapien
tgtaacaatgctaacccttgctgga

SEQ ID NO: 2938180 - DNA, 25 bp, Homo sapien
gatggtttaaagaaagtcagcttct

SEQ ID NO: 2938181 - DNA, 25 bp, Homo sapien
ccatgtgtggaactgtgaagtttac

SEQ ID NO: 2938182 - DNA, 25 bp, Homo sapien
ccacacgtgtggtctgtggatgacc

SEQ ID NO: 2938183 - DNA, 25 bp, Homo sapien
cacacgtgtggtctgtggatgacca

SEQ ID NO: 2938184 - DNA, 25 bp, Homo sapien
caccacacgtgtggtctgtggatga

SEQ ID NO: 2938185 - DNA, 25 bp, Homo sapien
agccaccacacgtgtggtctgtgga

SEQ ID NO: 2938186 - DNA, 25 bp, Homo sapien
tctgtatcactattattctcctatt

SEQ ID NO: 2938187 - DNA, 25 bp, Homo sapien
tccccaagccctactgaatgtgagg

SEQ ID NO: 2938188 - DNA, 25 bp, Homo sapien
ttgtttcgtgaggaacagacagaac

SEQ ID NO: 2938189 - DNA, 25 bp, Homo sapien
tcttttcggctttgtttcgtgagga

SEQ ID NO: 2938190 - DNA, 25 bp, Homo sapien
ttgcatcggtacttcctacggaaag

SEQ ID NO: 2938191 - DNA, 25 bp, Homo sapien
tgtatattttagaggaccagggtct

SEQ ID NO: 2938192 - DNA, 25 bp, Homo sapien
aatagaagtgtctctcccgtgagcc

SEQ ID NO: 2938193 - DNA, 25 bp, Homo sapien
tcactacctgaagtgttgcatcggt

SEQ ID NO: 2938194 - DNA, 25 bp, Homo sapien
gattgtgaaaccaaggcccattcca

SEQ ID NO: 2938195 - DNA, 25 bp, Homo sapien
gtgaccactcacaaaggcactttct

SEQ ID NO: 2938196 - DNA, 25 bp, Homo sapien
ttcctgtgactaatgaatttgctgc

SEQ ID NO: 2938197 - DNA, 25 bp, Homo sapien
tctgaggttagttttctgagtaagg

SEQ ID NO: 2938198 - DNA, 25 bp, Homo sapien
tacacacaaattggcacatgcagct

SEQ ID NO: 2938199 - DNA, 25 bp, Homo sapien
gaaaggtattttgatcttgccacaa

SEQ ID NO: 2938200 - DNA, 25 bp, Homo sapien
tcctttaaccactgagttgtgaatg

SEQ ID NO: 2938201 - DNA, 25 bp, Homo sapien
gattatgcagtaaccacaaggtatt

SEQ ID NO: 2938202 - DNA, 25 bp, Homo sapien
taatcattggtgaatgggtagctaa

SEQ ID NO: 2938203 - DNA, 25 bp, Homo sapien
gcttcttgtaatcattggtgaatgg

SEQ ID NO: 2938204 - DNA, 25 bp, Homo sapien
gtgaatgggtagctaaacattccca

SEQ ID NO: 2938205 - DNA, 25 bp, Homo sapien
gatgcttcttgtaatcattggtgaa

SEQ ID NO: 2938206 - DNA, 25 bp, Homo sapien
tttagctgcctggttgaaatctgct

SEQ ID NO: 2938207 - DNA, 25 bp, Homo sapien
ccagatgttttctcgtttagctgcc

SEQ ID NO: 2938208 - DNA, 25 bp, Homo sapien
tgactggtaggtccagatgttttct

SEQ ID NO: 2938209 - DNA, 25 bp, Homo sapien
tcattttgactggtaggtccagatg

SEQ ID NO: 2938210 - DNA, 25 bp, Homo sapien
ttcccattccgcagtggatttagat

SEQ ID NO: 2938211 - DNA, 25 bp, Homo sapien
gaaaatcttcccattccgcagtgga

SEQ ID NO: 2938212 - DNA, 25 bp, Homo sapien
aaggaaaatcttcccattccgcagt

SEQ ID NO: 2938213 - DNA, 25 bp, Homo sapien
aaagaaccaagctgagtctgtaagg

SEQ ID NO: 2938214 - DNA, 25 bp, Homo sapien
gcaggactgcccctaaaatgtagat

SEQ ID NO: 2938215 - DNA, 25 bp, Homo sapien
cctaaaatgtagatgccctcttcac

SEQ ID NO: 2938216 - DNA, 25 bp, Homo sapien
tactttgcactggactactcctggc

SEQ ID NO: 2938217 - DNA, 25 bp, Homo sapien
tgataatcccgtactgtggcctcca

SEQ ID NO: 2938218 - DNA, 25 bp, Homo sapien
tatgtgaacttccatgaaatctcaa

SEQ ID NO: 2938219 - DNA, 25 bp, Homo sapien
aatctcaattaactagactcctgcc

SEQ ID NO: 2938220 - DNA, 25 bp, Homo sapien
tgggaaaacagaccatggagtagaa

SEQ ID NO: 2938221 - DNA, 25 bp, Homo sapien
taggtaaagcattcatatgtgaact

SEQ ID NO: 2938222 - DNA, 25 bp, Homo sapien
gtgcctgacagctggcaaactcaat

SEQ ID NO: 2938223 - DNA, 25 bp, Homo sapien
tgacagctggcaaactcaatacagg

SEQ ID NO: 2938224 - DNA, 25 bp, Homo sapien
gacagctggcaaactcaatacagga

SEQ ID NO: 2938225 - DNA, 25 bp, Homo sapien
cctgacagctggcaaactcaataca

SEQ ID NO: 2938226 - DNA, 25 bp, Homo sapien
ataaaggactccatttactattata

SEQ ID NO: 2938227 - DNA, 25 bp, Homo sapien
taaaggactccatttactattataa

SEQ ID NO: 2938228 - DNA, 25 bp, Homo sapien
tataaaggactccatttactattat

SEQ ID NO: 2938229 - DNA, 25 bp, Homo sapien
tggctgagattaacagagataaagc

SEQ ID NO: 2938230 - DNA, 25 bp, Homo sapien
ccatgttctggatggctgagattaa

SEQ ID NO: 2938231 - DNA, 25 bp, Homo sapien
taaagcctgtagatgatggaatctg

SEQ ID NO: 2938232 - DNA, 25 bp, Homo sapien
gagataaagcctgtagatgatggaa

SEQ ID NO: 2938233 - DNA, 25 bp, Homo sapien
ctccagcccgcttcttttctccggg

SEQ ID NO: 2938234 - DNA, 25 bp, Homo sapien
gcctccagcccgcttcttttctccg

SEQ ID NO: 2938235 - DNA, 25 bp, Homo sapien
ggtgagcctccagcccgcttctttt

SEQ ID NO: 2938236 - DNA, 25 bp, Homo sapien
ggaaggtgagcctccagcccgcttc

SEQ ID NO: 2938237 - DNA, 25 bp, Homo sapien
ctgagtccaggcgacggcaggagca

SEQ ID NO: 2938238 - DNA, 25 bp, Homo sapien
cgtggagaggccgagtagccacagc

SEQ ID NO: 2938239 - DNA, 25 bp, Homo sapien
ggagaggccgagtagccacagcggc

SEQ ID NO: 2938240 - DNA, 25 bp, Homo sapien
gagtccaggcgacggcaggagcacg

SEQ ID NO: 2938241 - DNA, 25 bp, Homo sapien
gcggctgccggatcccggggactcc

SEQ ID NO: 2938242 - DNA, 25 bp, Homo sapien
cggcaggtcgccggctcctgccctt

SEQ ID NO: 2938243 - DNA, 25 bp, Homo sapien
ggcaggtcgccggctcctgcccttt

SEQ ID NO: 2938244 - DNA, 25 bp, Homo sapien
ccgcggccagcgtcctttaaagccg

SEQ ID NO: 2938245 - DNA, 25 bp, Homo sapien
ctggaggcgcggaacccgcggcact

SEQ ID NO: 2938246 - DNA, 25 bp, Homo sapien
cagccagcgccgctgtaaccccgcg

SEQ ID NO: 2938247 - DNA, 25 bp, Homo sapien
tagtgatgcgacatttccatcctgt

SEQ ID NO: 2938248 - DNA, 25 bp, Homo sapien
tgcgtgcttcgattctcgcgcgcgg

SEQ ID NO: 2938249 - DNA, 25 bp, Homo sapien
gctgcaggcgatcgccagatcctct

SEQ ID NO: 2938250 - DNA, 25 bp, Homo sapien
caggagaacgcgtgcgtgcttcgat

SEQ ID NO: 2938251 - DNA, 25 bp, Homo sapien
cagcaggcatgcgaacttttcgcgc

SEQ ID NO: 2938252 - DNA, 25 bp, Homo sapien
cctcctccacagtgcggagcagaac

SEQ ID NO: 2938253 - DNA, 25 bp, Homo sapien
tcgcaggaggcgtcgagggacagac

SEQ ID NO: 2938254 - DNA, 25 bp, Homo sapien
ctggcgtcgcaggaggcgtcgaggg

SEQ ID NO: 2938255 - DNA, 25 bp, Homo sapien
tccacagtgcggagcagaacgccgg

SEQ ID NO: 2938256 - DNA, 25 bp, Homo sapien
tcctgtgaggcaccagagcaccgcg

SEQ ID NO: 2938257 - DNA, 25 bp, Homo sapien
aggcaccagagcaccgcggagagta

SEQ ID NO: 2938258 - DNA, 25 bp, Homo sapien
caccgcggagagtaggacgcacgtt

SEQ ID NO: 2938259 - DNA, 25 bp, Homo sapien
cggagagtaggacgcacgttcgcat

SEQ ID NO: 2938260 - DNA, 25 bp, Homo sapien
ggagcagggttcagagtcgggcagg

SEQ ID NO: 2938261 - DNA, 25 bp, Homo sapien
gcaggaccgggaagctcgggcagag

SEQ ID NO: 2938262 - DNA, 25 bp, Homo sapien
ggcaggaccgggaagctcgggcaga

SEQ ID NO: 2938263 - DNA, 25 bp, Homo sapien
tggctgtcctgtcttgccataaatg

SEQ ID NO: 2938264 - DNA, 25 bp, Homo sapien
tcttgccataaatgaagcccttctt

SEQ ID NO: 2938265 - DNA, 25 bp, Homo sapien
tgaataaggtaaaacgcgggcattg

SEQ ID NO: 2938266 - DNA, 25 bp, Homo sapien
tattgaataaggtaaaacgcgggca

SEQ ID NO: 2938267 - DNA, 25 bp, Homo sapien
tcaataaacgctggctcgttcccct

SEQ ID NO: 2938268 - DNA, 25 bp, Homo sapien
gaccgtcgtgaactgccaagcagat

SEQ ID NO: 2938269 - DNA, 25 bp, Homo sapien
taaggatgaaaaaatgcgaccgtcg

SEQ ID NO: 2938270 - DNA, 25 bp, Homo sapien
ttccgggaagagcttcgcagttccg

SEQ ID NO: 2938271 - DNA, 25 bp, Homo sapien
tttcccgcgttgcaaagcagcagag

SEQ ID NO: 2938272 - DNA, 25 bp, Homo sapien
gaatgccaggctcataaagacaacg

SEQ ID NO: 2938273 - DNA, 25 bp, Homo sapien
tttggtggacagaacgatggtatgc

SEQ ID NO: 2938274 - DNA, 25 bp, Homo sapien
gaaggccttggaaatcactcctttg

SEQ ID NO: 2938275 - DNA, 25 bp, Homo sapien
agacttcagcataactattctaaag

SEQ ID NO: 2938276 - DNA, 25 bp, Homo sapien
gacttcagcataactattctaaaga

SEQ ID NO: 2938277 - DNA, 25 bp, Homo sapien
cttcagcataactattctaaagatg

SEQ ID NO: 2938278 - DNA, 25 bp, Homo sapien
aaaagacttcagcataactattcta

SEQ ID NO: 2938279 - DNA, 25 bp, Homo sapien
tataacatttagaacgctcgtctga

SEQ ID NO: 2938280 - DNA, 25 bp, Homo sapien
gacacgaattagttcttgttggatt

SEQ ID NO: 2938281 - DNA, 25 bp, Homo sapien
aaaactctacactgttagtcacgag

SEQ ID NO: 2938282 - DNA, 25 bp, Homo sapien
ttgtgctgaagacacgaattagttc

SEQ ID NO: 2938283 - DNA, 25 bp, Homo sapien
tttcattaggcccaatccataagta

SEQ ID NO: 2938284 - DNA, 25 bp, Homo sapien
tggactattttgatgtaactctaca

SEQ ID NO: 2938285 - DNA, 25 bp, Homo sapien
aatccatacagataaggactggact

SEQ ID NO: 2938286 - DNA, 25 bp, Homo sapien
ttaggcccaatccataagtaggtgg

SEQ ID NO: 2938287 - DNA, 25 bp, Homo sapien
taagaaagagtacatgtgtaaagtc

SEQ ID NO: 2938288 - DNA, 25 bp, Homo sapien
atgtgtaaagtccagacaaaggctc

SEQ ID NO: 2938289 - DNA, 25 bp, Homo sapien
taaagtccagacaaaggctccaaaa

SEQ ID NO: 2938290 - DNA, 25 bp, Homo sapien
aagaaagagtacatgtgtaaagtcc

SEQ ID NO: 2938291 - DNA, 25 bp, Homo sapien
taaagtcatatctctttttgactgt

SEQ ID NO: 2938292 - DNA, 25 bp, Homo sapien
ccataaagtcatatctctttttgac

SEQ ID NO: 2938293 - DNA, 25 bp, Homo sapien
caaagaccataaagtcatatctctt

SEQ ID NO: 2938294 - DNA, 25 bp, Homo sapien
gaccataaagtcatatctctttttg

SEQ ID NO: 2938295 - DNA, 25 bp, Homo sapien
tatctccctatacaagaccttgtgg

SEQ ID NO: 2938296 - DNA, 25 bp, Homo sapien
gaaattagactatccaagattttct

SEQ ID NO: 2938297 - DNA, 25 bp, Homo sapien
gtatgaggccatgttctggaatttc

SEQ ID NO: 2938298 - DNA, 25 bp, Homo sapien
tatatgatggctctatgacatggca

SEQ ID NO: 2938299 - DNA, 25 bp, Homo sapien
gattagtggtatcttcacagtcaac

SEQ ID NO: 2938300 - DNA, 25 bp, Homo sapien
agatccattgcaagcacctttccac

SEQ ID NO: 2938301 - DNA, 25 bp, Homo sapien
ctggaggatattatgattagtggta

SEQ ID NO: 2938302 - DNA, 25 bp, Homo sapien
gatattatgattagtggtatcttca

SEQ ID NO: 2938303 - DNA, 25 bp, Homo sapien
tggtcgacagctatccagacgtact

SEQ ID NO: 2938304 - DNA, 25 bp, Homo sapien
aactgtggtccacaaaatgcattgc

SEQ ID NO: 2938305 - DNA, 25 bp, Homo sapien
tagcgcaattactgtgtagacgttc

SEQ ID NO: 2938306 - DNA, 25 bp, Homo sapien
gcttggctccgaaaaaagtcttcta

SEQ ID NO: 2938307 - DNA, 25 bp, Homo sapien
ttccaggtaggaccattctgttttc

SEQ ID NO: 2938308 - DNA, 25 bp, Homo sapien
ctttccaggtaggaccattctgttt

SEQ ID NO: 2938309 - DNA, 25 bp, Homo sapien
tgctttccaggtaggaccattctgt

SEQ ID NO: 2938310 - DNA, 25 bp, Homo sapien
ccaggtaggaccattctgttttcct

SEQ ID NO: 2938311 - DNA, 25 bp, Homo sapien
aagtttgtgggcaagatttagctcc

SEQ ID NO: 2938312 - DNA, 25 bp, Homo sapien
tccataggtaaggacggaaacgcag

SEQ ID NO: 2938313 - DNA, 25 bp, Homo sapien
gacggaaacgcaggtctgacaagtt

SEQ ID NO: 2938314 - DNA, 25 bp, Homo sapien
catcaggactaaaagtcgcaggact

SEQ ID NO: 2938315 - DNA, 25 bp, Homo sapien
tgaaaatcatcttatgtccccgact

SEQ ID NO: 2938316 - DNA, 25 bp, Homo sapien
taggtacacagcaacataccgtttg

SEQ ID NO: 2938317 - DNA, 25 bp, Homo sapien
ggaactatctatgatgctctgggat

SEQ ID NO: 2938318 - DNA, 25 bp, Homo sapien
cactagagatactggattaaatgcc

SEQ ID NO: 2938319 - DNA, 25 bp, Homo sapien
gaatcttaatgtgaactatgggcta

SEQ ID NO: 2938320 - DNA, 25 bp, Homo sapien
tgcagtgggtgtatggaactctata

SEQ ID NO: 2938321 - DNA, 25 bp, Homo sapien
gactgcaatggtgcacacatgccat

SEQ ID NO: 2938322 - DNA, 25 bp, Homo sapien
tacacgcctttatatcacacaagag

SEQ ID NO: 2938323 - DNA, 25 bp, Homo sapien
tgtacagaagatctagcaaatgcag

SEQ ID NO: 2938324 - DNA, 25 bp, Homo sapien
tataaaatcttactgaagccaggtg

SEQ ID NO: 2938325 - DNA, 25 bp, Homo sapien
caatatatggaccagttgtaatcct

SEQ ID NO: 2938326 - DNA, 25 bp, Homo sapien
ttgaactgaaggtccgaaagagctg

SEQ ID NO: 2938327 - DNA, 25 bp, Homo sapien
caaatttgcggagcgactgagtgta

SEQ ID NO: 2938328 - DNA, 25 bp, Homo sapien
tcccattgacacacgctggtgagga

SEQ ID NO: 2938329 - DNA, 25 bp, Homo sapien
gatcccagcagggttgtactgccta

SEQ ID NO: 2938330 - DNA, 25 bp, Homo sapien
tagagaagtctgacccaaatttgcg

SEQ ID NO: 2938331 - DNA, 25 bp, Homo sapien
tacagagtgataactggtctctcca

SEQ ID NO: 2938332 - DNA, 25 bp, Homo sapien
gctgggcttcccgttcgtcatttca

SEQ ID NO: 2938333 - DNA, 25 bp, Homo sapien
aattacagagtggttaggtccgagg

SEQ ID NO: 2938334 - DNA, 25 bp, Homo sapien
tggtaagacgcacccacaggtggga

SEQ ID NO: 2938335 - DNA, 25 bp, Homo sapien
ggctcaccggggtggttatctctga

SEQ ID NO: 2938336 - DNA, 25 bp, Homo sapien
caccggggtggttatctctgagaga

SEQ ID NO: 2938337 - DNA, 25 bp, Homo sapien
cctggcctgtcatcccttcaaatgt

SEQ ID NO: 2938338 - DNA, 25 bp, Homo sapien
ctggcctgtcatcccttcaaatgtt

SEQ ID NO: 2938339 - DNA, 25 bp, Homo sapien
cagccttggcttgagtgtctggcat

SEQ ID NO: 2938340 - DNA, 25 bp, Homo sapien
ctcagccttggcttgagtgtctggc

SEQ ID NO: 2938341 - DNA, 25 bp, Homo sapien
tgctcagccttggcttgagtgtctg

SEQ ID NO: 2938342 - DNA, 25 bp, Homo sapien
tggctgccctggtggtgctcagcct

SEQ ID NO: 2938343 - DNA, 25 bp, Homo sapien
caggaggtttgctgttgtgagggct

SEQ ID NO: 2938344 - DNA, 25 bp, Homo sapien
ggaggtttgctgttgtgagggctgc

SEQ ID NO: 2938345 - DNA, 25 bp, Homo sapien
ggtttgctgttgtgagggctgctct

SEQ ID NO: 2938346 - DNA, 25 bp, Homo sapien
aggtttgctgttgtgagggctgctc

SEQ ID NO: 2938347 - DNA, 25 bp, Homo sapien
agaaggtgggggctgctggggaggc

SEQ ID NO: 2938348 - DNA, 25 bp, Homo sapien
gggagagaaggtgggggctgctggg

SEQ ID NO: 2938349 - DNA, 25 bp, Homo sapien
aaggtgggggctgctggggaggcgc

SEQ ID NO: 2938350 - DNA, 25 bp, Homo sapien
tgggggctgctggggaggcgccccg

SEQ ID NO: 2938351 - DNA, 25 bp, Homo sapien
agcgctgattcggccggagctgcca

SEQ ID NO: 2938352 - DNA, 25 bp, Homo sapien
tgagcccggaaggaaccaagaggcc

SEQ ID NO: 2938353 - DNA, 25 bp, Homo sapien
tgcagccgcgggttgttacagctgc

SEQ ID NO: 2938354 - DNA, 25 bp, Homo sapien
cgggccgttgatcttcggccccaca

SEQ ID NO: 2938355 - DNA, 25 bp, Homo sapien
agtccgagtctcctcatctgcaaaa

SEQ ID NO: 2938356 - DNA, 25 bp, Homo sapien
aagtccgagtctcctcatctgcaaa

SEQ ID NO: 2938357 - DNA, 25 bp, Homo sapien
cctcatctgcaaaactggggcacgg

SEQ ID NO: 2938358 - DNA, 25 bp, Homo sapien
tctcctcatctgcaaaactggggca

SEQ ID NO: 2938359 - DNA, 25 bp, Homo sapien
ggaaactgaccaagatccagaggga

SEQ ID NO: 2938360 - DNA, 25 bp, Homo sapien
tccagagggatcgatcaacttgatg

SEQ ID NO: 2938361 - DNA, 25 bp, Homo sapien
cagaaccttatttgagacgtggact

SEQ ID NO: 2938362 - DNA, 25 bp, Homo sapien
gagtcaagcaggcacacttcggaaa

SEQ ID NO: 2938363 - DNA, 25 bp, Homo sapien
ggcttcatactattccatccagtgg

SEQ ID NO: 2938364 - DNA, 25 bp, Homo sapien
aacattccccatactgccacagggt

SEQ ID NO: 2938365 - DNA, 25 bp, Homo sapien
taattatggctctgaggcaagaaga

SEQ ID NO: 2938366 - DNA, 25 bp, Homo sapien
tcacaatctgtcctaaatggcttca

SEQ ID NO: 2938367 - DNA, 25 bp, Homo sapien
ccataacctagtaaagtagatgctc

SEQ ID NO: 2938368 - DNA, 25 bp, Homo sapien
tattttttccgaacaccagtgtcac

SEQ ID NO: 2938369 - DNA, 25 bp, Homo sapien
tagcaacgaggtaactgaagcacag

SEQ ID NO: 2938370 - DNA, 25 bp, Homo sapien
tttaatatccacaacatgaggaggg

SEQ ID NO: 2938371 - DNA, 25 bp, Homo sapien
tacgtgaagtttgaaactagagaat

SEQ ID NO: 2938372 - DNA, 25 bp, Homo sapien
ttacgtgaagtttgaaactagagaa

SEQ ID NO: 2938373 - DNA, 25 bp, Homo sapien
cctgaattctttcttgcgtgagatc

SEQ ID NO: 2938374 - DNA, 25 bp, Homo sapien
tctttcttgcgtgagatccaagaac

SEQ ID NO: 2938375 - DNA, 25 bp, Homo sapien
attctttcttgcgtgagatccaaga

SEQ ID NO: 2938376 - DNA, 25 bp, Homo sapien
tgaattctttcttgcgtgagatcca

SEQ ID NO: 2938377 - DNA, 25 bp, Homo sapien
gcagtttcgcggagagggcaacaaa

SEQ ID NO: 2938378 - DNA, 25 bp, Homo sapien
tgccaggttactgggcagtttcgcg

SEQ ID NO: 2938379 - DNA, 25 bp, Homo sapien
cttctttatcaggtcagccagggac

SEQ ID NO: 2938380 - DNA, 25 bp, Homo sapien
gccagggacccgtctaatgccaggt

SEQ ID NO: 2938381 - DNA, 25 bp, Homo sapien
ggcatcacagctcacggtaacttca

SEQ ID NO: 2938382 - DNA, 25 bp, Homo sapien
tttggtcatattgagcaggctggtt

SEQ ID NO: 2938383 - DNA, 25 bp, Homo sapien
gattacaaccagaggtgcatgccac

SEQ ID NO: 2938384 - DNA, 25 bp, Homo sapien
tcccaagggattacaaccagaggtg

SEQ ID NO: 2938385 - DNA, 25 bp, Homo sapien
aacatggcagaatcatcccttccct

SEQ ID NO: 2938386 - DNA, 25 bp, Homo sapien
ccttgatgattcaacctgattgatc

SEQ ID NO: 2938387 - DNA, 25 bp, Homo sapien
tggcaatgcactcagtccttgatga

SEQ ID NO: 2938388 - DNA, 25 bp, Homo sapien
ccagattaacacacatggctttggg

SEQ ID NO: 2938389 - DNA, 25 bp, Homo sapien
tctatggcagggttctcaaaacacc

SEQ ID NO: 2938390 - DNA, 25 bp, Homo sapien
tctaggcactggtttctttcgaaag

SEQ ID NO: 2938391 - DNA, 25 bp, Homo sapien
acaatgctttgatgtgctgcctgca

SEQ ID NO: 2938392 - DNA, 25 bp, Homo sapien
ggtatgtctaacgagcagcctgagt

SEQ ID NO: 2938393 - DNA, 25 bp, Homo sapien
tttgctcgtagctgctggaagttgg

SEQ ID NO: 2938394 - DNA, 25 bp, Homo sapien
tgtccctggacgtaggctccctgct

SEQ ID NO: 2938395 - DNA, 25 bp, Homo sapien
ctccagaagccctgtttgctcgtag

SEQ ID NO: 2938396 - DNA, 25 bp, Homo sapien
gaagccctgtttgctcgtagctgct

SEQ ID NO: 2938397 - DNA, 25 bp, Homo sapien
agcatggccataaattggcatagtc

SEQ ID NO: 2938398 - DNA, 25 bp, Homo sapien
gagcatggccataaattggcatagt

SEQ ID NO: 2938399 - DNA, 25 bp, Homo sapien
ctatcaccagcaggaggggcaggag

SEQ ID NO: 2938400 - DNA, 25 bp, Homo sapien
cagcaggaggggcaggaggtgacct

SEQ ID NO: 2938401 - DNA, 25 bp, Homo sapien
caccagcaggaggggcaggaggtga

SEQ ID NO: 2938402 - DNA, 25 bp, Homo sapien
agcaggaggggcaggaggtgacctg

SEQ ID NO: 2938403 - DNA, 25 bp, Homo sapien
ataacagccccggggaggcacctgg

SEQ ID NO: 2938404 - DNA, 25 bp, Homo sapien
gggctgggcacagtaccccctgtgc

SEQ ID NO: 2938405 - DNA, 25 bp, Homo sapien
acataacagccccggggaggcacct

SEQ ID NO: 2938406 - DNA, 25 bp, Homo sapien
ctttgccacataacagccccgggga

SEQ ID NO: 2938407 - DNA, 25 bp, Homo sapien
tatgggacagatccaactcctccag

SEQ ID NO: 2938408 - DNA, 25 bp, Homo sapien
gataagccaccatgagtgtcagcca

SEQ ID NO: 2938409 - DNA, 25 bp, Homo sapien
ggttctgccacacataatgcaccag

SEQ ID NO: 2938410 - DNA, 25 bp, Homo sapien
tcacagtgccatgggtttgcggata

SEQ ID NO: 2938411 - DNA, 25 bp, Homo sapien
tccttgccttgtccacacctttcat

SEQ ID NO: 2938412 - DNA, 25 bp, Homo sapien
gcacatcttccttgccttgtccaca

SEQ ID NO: 2938413 - DNA, 25 bp, Homo sapien
gacattctgagttgttgcacatctt

SEQ ID NO: 2938414 - DNA, 25 bp, Homo sapien
cagccccagggtgagtcttgctgct

SEQ ID NO: 2938415 - DNA, 25 bp, Homo sapien
tctctgaccttctgagggcattttc

SEQ ID NO: 2938416 - DNA, 25 bp, Homo sapien
ggatggggagaagagccctctgctt

SEQ ID NO: 2938417 - DNA, 25 bp, Homo sapien
tctgagggcattttcagcttcttgt

SEQ ID NO: 2938418 - DNA, 25 bp, Homo sapien
ctgaccttctgagggcattttcagc

SEQ ID NO: 2938419 - DNA, 25 bp, Homo sapien
tcagctgctgacttgacagatttct

SEQ ID NO: 2938420 - DNA, 25 bp, Homo sapien
ggcttcagctgctgacttgacagat

SEQ ID NO: 2938421 - DNA, 25 bp, Homo sapien
gctgacttgacagatttctttcctt

SEQ ID NO: 2938422 - DNA, 25 bp, Homo sapien
tctttcccttgcgaaggggctctgg

SEQ ID NO: 2938423 - DNA, 25 bp, Homo sapien
gaaaagatggtcacagcagggtctt

SEQ ID NO: 2938424 - DNA, 25 bp, Homo sapien
aacgttttccgatgggcattgagga

SEQ ID NO: 2938425 - DNA, 25 bp, Homo sapien
caccaggaaaagatggtcacagcag

SEQ ID NO: 2938426 - DNA, 25 bp, Homo sapien
gcgttgggggctcaacgccttacaa

SEQ ID NO: 2938427 - DNA, 25 bp, Homo sapien
cgcccgaaaccccctgtgctcctgt

SEQ ID NO: 2938428 - DNA, 25 bp, Homo sapien
gcagcgcccgaaaccccctgtgctc

SEQ ID NO: 2938429 - DNA, 25 bp, Homo sapien
cctgcagcgcccgaaaccccctgtg

SEQ ID NO: 2938430 - DNA, 25 bp, Homo sapien
acctccacctgcagcgcccgaaacc

SEQ ID NO: 2938431 - DNA, 25 bp, Homo sapien
tctccctggacatggccagcagctg

SEQ ID NO: 2938432 - DNA, 25 bp, Homo sapien
gaaaggatccccttctccctggaca

SEQ ID NO: 2938433 - DNA, 25 bp, Homo sapien
agctgctgttgcacctcactcagct

SEQ ID NO: 2938434 - DNA, 25 bp, Homo sapien
gcagctgctgttgcacctcactcag

SEQ ID NO: 2938435 - DNA, 25 bp, Homo sapien
ctgggtcctatccagcagctgggtc

SEQ ID NO: 2938436 - DNA, 25 bp, Homo sapien
ctgtaggttgagaggatgaccatcc

SEQ ID NO: 2938437 - DNA, 25 bp, Homo sapien
catcccttgccaggacaggctgctt

SEQ ID NO: 2938438 - DNA, 25 bp, Homo sapien
cctagggctcactgggtctgtaggt

SEQ ID NO: 2938439 - DNA, 25 bp, Homo sapien
aggagcccgggatataggctgggcc

SEQ ID NO: 2938440 - DNA, 25 bp, Homo sapien
tgccaaggagcccgggatataggct

SEQ ID NO: 2938441 - DNA, 25 bp, Homo sapien
caaggagcccgggatataggctggg

SEQ ID NO: 2938442 - DNA, 25 bp, Homo sapien
ccaaggagcccgggatataggctgg

SEQ ID NO: 2938443 - DNA, 25 bp, Homo sapien
gcgcttgaagtcgatgaggctgtca

SEQ ID NO: 2938444 - DNA, 25 bp, Homo sapien
ccagcagcgtgtagtcggtgcggac

SEQ ID NO: 2938445 - DNA, 25 bp, Homo sapien
cctcgagggtttagctgtctggcca

SEQ ID NO: 2938446 - DNA, 25 bp, Homo sapien
gccagggcccgggtgacattttcaa

SEQ ID NO: 2938447 - DNA, 25 bp, Homo sapien
tggacctccagagtgctgttctgcg

SEQ ID NO: 2938448 - DNA, 25 bp, Homo sapien
tccactcgggtgtccagcatattct

SEQ ID NO: 2938449 - DNA, 25 bp, Homo sapien
gctgttctgcgagagccctgccgtt

SEQ ID NO: 2938450 - DNA, 25 bp, Homo sapien
ttcaccgtctttggtacatccacat

SEQ ID NO: 2938451 - DNA, 25 bp, Homo sapien
tgccttgccggctcgctccagtgtg

SEQ ID NO: 2938452 - DNA, 25 bp, Homo sapien
caggttctccccttgatcttgcatc

SEQ ID NO: 2938453 - DNA, 25 bp, Homo sapien
ttgccggctcgctccagtgtgacct

SEQ ID NO: 2938454 - DNA, 25 bp, Homo sapien
tccttcaggaatgggtggtctgctg

SEQ ID NO: 2938455 - DNA, 25 bp, Homo sapien
catcagctgtctcactcgaaaggcc

SEQ ID NO: 2938456 - DNA, 25 bp, Homo sapien
cagcccttggggatggttacagcct

SEQ ID NO: 2938457 - DNA, 25 bp, Homo sapien
cagcctccttgtgatttatggatcc

SEQ ID NO: 2938458 - DNA, 25 bp, Homo sapien
tcgaaaggccaggacgcagcccttg

SEQ ID NO: 2938459 - DNA, 25 bp, Homo sapien
gttatcattgcagatatgtggaata

SEQ ID NO: 2938460 - DNA, 25 bp, Homo sapien
ttatcattgcagatatgtggaatat

SEQ ID NO: 2938461 - DNA, 25 bp, Homo sapien
gaaggtttgcatgttatcattgcag

SEQ ID NO: 2938462 - DNA, 25 bp, Homo sapien
ggaaggtttgcatgttatcattgca

SEQ ID NO: 2938463 - DNA, 25 bp, Homo sapien
ggatgaccttctcctctcctgactt

SEQ ID NO: 2938464 - DNA, 25 bp, Homo sapien
atgaccttctcctctcctgactttt

SEQ ID NO: 2938465 - DNA, 25 bp, Homo sapien
gatgaccttctcctctcctgacttt

SEQ ID NO: 2938466 - DNA, 25 bp, Homo sapien
cacacagccctccatcgggcacctt

SEQ ID NO: 2938467 - DNA, 25 bp, Homo sapien
agccctccatcgggcaccttcctct

SEQ ID NO: 2938468 - DNA, 25 bp, Homo sapien
gccctccatcgggcaccttcctctc

SEQ ID NO: 2938469 - DNA, 25 bp, Homo sapien
ttcttccctagaagtttgctgaggg

SEQ ID NO: 2938470 - DNA, 25 bp, Homo sapien
ggagctttgccctactcggctcagc

SEQ ID NO: 2938471 - DNA, 25 bp, Homo sapien
cctagaagtttgctgagggagctga

SEQ ID NO: 2938472 - DNA, 25 bp, Homo sapien
tgtcctgaagccttcgtgtacgtcc

SEQ ID NO: 2938473 - DNA, 25 bp, Homo sapien
caacgaaatagaggatggcgcccac

SEQ ID NO: 2938474 - DNA, 25 bp, Homo sapien
tcttttgggagtgcctccagggtca

SEQ ID NO: 2938475 - DNA, 25 bp, Homo sapien
gcccacggcctcctttgatagcagg

SEQ ID NO: 2938476 - DNA, 25 bp, Homo sapien
cacttcatgtcccttgtctagagcc

SEQ ID NO: 2938477 - DNA, 25 bp, Homo sapien
cagctttagctgcacgggtaggatc

SEQ ID NO: 2938478 - DNA, 25 bp, Homo sapien
ttagctgcacgggtaggatcttttt

SEQ ID NO: 2938479 - DNA, 25 bp, Homo sapien
tctccatggatttcaccagcagctt

SEQ ID NO: 2938480 - DNA, 25 bp, Homo sapien
gctgcacgggtaggatctttttctc

SEQ ID NO: 2938481 - DNA, 25 bp, Homo sapien
aggccactcagcccgactagagcct

SEQ ID NO: 2938482 - DNA, 25 bp, Homo sapien
actcagcccgactagagcctccgtg

SEQ ID NO: 2938483 - DNA, 25 bp, Homo sapien
ccactcagcccgactagagcctccg

SEQ ID NO: 2938484 - DNA, 25 bp, Homo sapien
tcagcccgactagagcctccgtgag

SEQ ID NO: 2938485 - DNA, 25 bp, Homo sapien
gagagaggcctgcataaagagcaca

SEQ ID NO: 2938486 - DNA, 25 bp, Homo sapien
cccacatatattgggggcccgatct

SEQ ID NO: 2938487 - DNA, 25 bp, Homo sapien
gtgtctgggtcccacatatattggg

SEQ ID NO: 2938488 - DNA, 25 bp, Homo sapien
taggaggccttggtaagctgctgaa

SEQ ID NO: 2938489 - DNA, 25 bp, Homo sapien
caccacgaggttgggaaggcattag

SEQ ID NO: 2938490 - DNA, 25 bp, Homo sapien
tgcccttaggtggtaaggacacagc

SEQ ID NO: 2938491 - DNA, 25 bp, Homo sapien
gatttcagatgtcttcagctgatgg

SEQ ID NO: 2938492 - DNA, 25 bp, Homo sapien
catgggtgaccagctgagatttcag

SEQ ID NO: 2938493 - DNA, 25 bp, Homo sapien
ttctcagttttgctgaaacggctca

SEQ ID NO: 2938494 - DNA, 25 bp, Homo sapien
tagaatatttaagcacaggccgggc

SEQ ID NO: 2938495 - DNA, 25 bp, Homo sapien
aagtataagtaggagggattaggat

SEQ ID NO: 2938496 - DNA, 25 bp, Homo sapien
aaaatttaagcatcagcagatgggc

SEQ ID NO: 2938497 - DNA, 25 bp, Homo sapien
cctacaagacaatctagccctgttg

SEQ ID NO: 2938498 - DNA, 25 bp, Homo sapien
gacaatctagccctgttgtaaggac

SEQ ID NO: 2938499 - DNA, 25 bp, Homo sapien
tcctgagttttagacctttcacgga

SEQ ID NO: 2938500 - DNA, 25 bp, Homo sapien
gacctttcacggaccctacaagaca

SEQ ID NO: 2938501 - DNA, 25 bp, Homo sapien
gcacgatgacggagcagctgcaaac

SEQ ID NO: 2938502 - DNA, 25 bp, Homo sapien
aggccgatggccgagtcaacaaagg

SEQ ID NO: 2938503 - DNA, 25 bp, Homo sapien
agatagcgtcgggccgcacgatgac

SEQ ID NO: 2938504 - DNA, 25 bp, Homo sapien
gcctgcacacgagcgcgagatagcg

SEQ ID NO: 2938505 - DNA, 25 bp, Homo sapien
cggcgccgcgccgagccctcctgct

SEQ ID NO: 2938506 - DNA, 25 bp, Homo sapien
ccgtcgacccgccacccgtcgctgc

SEQ ID NO: 2938507 - DNA, 25 bp, Homo sapien
cccgtcgacccgccacccgtcgctg

SEQ ID NO: 2938508 - DNA, 25 bp, Homo sapien
gtctgcctcccccgtcgacccgcca

SEQ ID NO: 2938509 - DNA, 25 bp, Homo sapien
tctgcctcccccgtcgacccgccac

SEQ ID NO: 2938510 - DNA, 25 bp, Homo sapien
aggtgactgtgtccagctctcgctg

SEQ ID NO: 2938511 - DNA, 25 bp, Homo sapien
aaggtgactgtgtccagctctcgct

SEQ ID NO: 2938512 - DNA, 25 bp, Homo sapien
ggtgactgtgtccagctctcgctgg

SEQ ID NO: 2938513 - DNA, 25 bp, Homo sapien
tcagtcgggtgggatataaacggaa

SEQ ID NO: 2938514 - DNA, 25 bp, Homo sapien
gcccactgggacctagatatagatg

SEQ ID NO: 2938515 - DNA, 25 bp, Homo sapien
tattggaggcgctaaaatcagtcgg

SEQ ID NO: 2938516 - DNA, 25 bp, Homo sapien
tttccagcgggaacaatcagtcata

SEQ ID NO: 2938517 - DNA, 25 bp, Homo sapien
ggaacaagaggactacagacactcg

SEQ ID NO: 2938518 - DNA, 25 bp, Homo sapien
taggagacaccggtatataggagtt

SEQ ID NO: 2938519 - DNA, 25 bp, Homo sapien
caagatactaggtcgaaatggttca

SEQ ID NO: 2938520 - DNA, 25 bp, Homo sapien
gacactcgaaacaggaacctcggag

SEQ ID NO: 2938521 - DNA, 25 bp, Homo sapien
aacacacccagtaggcaatgctgag

SEQ ID NO: 2938522 - DNA, 25 bp, Homo sapien
cataacttgctctcaattataggag

SEQ ID NO: 2938523 - DNA, 25 bp, Homo sapien
tgacattgctgccactactttaggt

SEQ ID NO: 2938524 - DNA, 25 bp, Homo sapien
gagggaactaattccagaacttgta

SEQ ID NO: 2938525 - DNA, 25 bp, Homo sapien
gaaaactacatttctcctggtataa

SEQ ID NO: 2938526 - DNA, 25 bp, Homo sapien
ggagacgaactaacatacaaagagg

SEQ ID NO: 2938527 - DNA, 25 bp, Homo sapien
taaactcaggcatataggttttggt

SEQ ID NO: 2938528 - DNA, 25 bp, Homo sapien
cattaagggtagcagttggagacca

SEQ ID NO: 2938529 - DNA, 25 bp, Homo sapien
accgtgccggccaggcaaggagttc

SEQ ID NO: 2938530 - DNA, 25 bp, Homo sapien
ttttctgccctaatggggtccataa

SEQ ID NO: 2938531 - DNA, 25 bp, Homo sapien
ggcaaaatgcgaccactcacctttt

SEQ ID NO: 2938532 - DNA, 25 bp, Homo sapien
agaggggcaaaatgcgaccactcac

SEQ ID NO: 2938533 - DNA, 25 bp, Homo sapien
tatttgaagtgaagaagccctgcac

SEQ ID NO: 2938534 - DNA, 25 bp, Homo sapien
cgtgatgtggaaggcagcatccgca

SEQ ID NO: 2938535 - DNA, 25 bp, Homo sapien
gagcaaaaagtctcgagtggcatta

SEQ ID NO: 2938536 - DNA, 25 bp, Homo sapien
tacagaacatagtggttgaggcggc

SEQ ID NO: 2938537 - DNA, 25 bp, Homo sapien
tggagataggcttccacttcaggca

SEQ ID NO: 2938538 - DNA, 25 bp, Homo sapien
gaggggtgtcgacgcagcttttccc

SEQ ID NO: 2938539 - DNA, 25 bp, Homo sapien
ccacgaggagttggagataggcttc

SEQ ID NO: 2938540 - DNA, 25 bp, Homo sapien
tctttgtagcgcttgctgttcatca

SEQ ID NO: 2938541 - DNA, 25 bp, Homo sapien
cctgagtgtgctcctgtgacagtgg

SEQ ID NO: 2938542 - DNA, 25 bp, Homo sapien
ttcctgagtgtgctcctgtgacagt

SEQ ID NO: 2938543 - DNA, 25 bp, Homo sapien
tcctgagtgtgctcctgtgacagtg

SEQ ID NO: 2938544 - DNA, 25 bp, Homo sapien
ccggcggttctgagtactgatcttc

SEQ ID NO: 2938545 - DNA, 25 bp, Homo sapien
ttgtccaggaactcatagacccggg

SEQ ID NO: 2938546 - DNA, 25 bp, Homo sapien
tagacccgggcgtgataatagtaac

SEQ ID NO: 2938547 - DNA, 25 bp, Homo sapien
ttgcggctacaaggtctagggcccg

SEQ ID NO: 2938548 - DNA, 25 bp, Homo sapien
gtagctgtccggagccgagcatgca

SEQ ID NO: 2938549 - DNA, 25 bp, Homo sapien
tcatgccgaagcgtagctgtccgga

SEQ ID NO: 2938550 - DNA, 25 bp, Homo sapien
tgtccggagccgagcatgcaagaag

SEQ ID NO: 2938551 - DNA, 25 bp, Homo sapien
tgcccgtctgcgtcatgccgaagcg

SEQ ID NO: 2938552 - DNA, 25 bp, Homo sapien
tgggaacacagacttggacaccagc

SEQ ID NO: 2938553 - DNA, 25 bp, Homo sapien
gtgtagtagaggtacctggcccact

SEQ ID NO: 2938554 - DNA, 25 bp, Homo sapien
taggtaattccgcagcaggaggttc

SEQ ID NO: 2938555 - DNA, 25 bp, Homo sapien
gcctggtcgtacaagctgtagtgta

SEQ ID NO: 2938556 - DNA, 25 bp, Homo sapien
gttggtcaacagagtagggtcatcc

SEQ ID NO: 2938557 - DNA, 25 bp, Homo sapien
tctgatttatgggttgggcccctct

SEQ ID NO: 2938558 - DNA, 25 bp, Homo sapien
acaagccagggtgccaaatgggcct

SEQ ID NO: 2938559 - DNA, 25 bp, Homo sapien
tggaaaatttgcaccaggcaggcct

SEQ ID NO: 2938560 - DNA, 25 bp, Homo sapien
cgaagggcgttggtcatcgttctcc

SEQ ID NO: 2938561 - DNA, 25 bp, Homo sapien
gggccttgcgaagggcgttggtcat

SEQ ID NO: 2938562 - DNA, 25 bp, Homo sapien
cttgcgaagggcgttggtcatcgtt

SEQ ID NO: 2938563 - DNA, 25 bp, Homo sapien
aagggcgttggtcatcgttctccgg

SEQ ID NO: 2938564 - DNA, 25 bp, Homo sapien
aacacaatctaggtccaagcctgga

SEQ ID NO: 2938565 - DNA, 25 bp, Homo sapien
tgaatatccactgccagaggtgcag

SEQ ID NO: 2938566 - DNA, 25 bp, Homo sapien
gggttccttggccacagacaataca

SEQ ID NO: 2938567 - DNA, 25 bp, Homo sapien
gactgacagctcttaagtggccaag

SEQ ID NO: 2938568 - DNA, 25 bp, Homo sapien
accccaaagacaggggttgcagtga

SEQ ID NO: 2938569 - DNA, 25 bp, Homo sapien
ttgaaccccaaagacaggggttgca

SEQ ID NO: 2938570 - DNA, 25 bp, Homo sapien
agcctgggagacagagcaagactcc

SEQ ID NO: 2938571 - DNA, 25 bp, Homo sapien
agccaagatggcacctctgtctcca

SEQ ID NO: 2938572 - DNA, 25 bp, Homo sapien
taataataagaaatacctggcctgg

SEQ ID NO: 2938573 - DNA, 25 bp, Homo sapien
taagaaatacctggcctggagcggt

SEQ ID NO: 2938574 - DNA, 25 bp, Homo sapien
ctaataataagaaatacctggcctg

SEQ ID NO: 2938575 - DNA, 25 bp, Homo sapien
taataagaaatacctggcctggagc

SEQ ID NO: 2938576 - DNA, 25 bp, Homo sapien
gaagactgggtctacatcctggcta

SEQ ID NO: 2938577 - DNA, 25 bp, Homo sapien
tttgcagaggcggtgtctccatatg

SEQ ID NO: 2938578 - DNA, 25 bp, Homo sapien
gttccctgtcaagacaccatggagg

SEQ ID NO: 2938579 - DNA, 25 bp, Homo sapien
tgagccctgtacctagccaactttt

SEQ ID NO: 2938580 - DNA, 25 bp, Homo sapien
gtcacatttggtcgcagagccgtca

SEQ ID NO: 2938581 - DNA, 25 bp, Homo sapien
tcagcatcgcggaagaactacagtg

SEQ ID NO: 2938582 - DNA, 25 bp, Homo sapien
ctaggaaacactgagcaactgggtc

SEQ ID NO: 2938583 - DNA, 25 bp, Homo sapien
gaacggaacgtgtgtcagccagaga

SEQ ID NO: 2938584 - DNA, 25 bp, Homo sapien
aaatagggcatgagtgagcgcttga

SEQ ID NO: 2938585 - DNA, 25 bp, Homo sapien
ggaactgcagccggtcagggatctc

SEQ ID NO: 2938586 - DNA, 25 bp, Homo sapien
cttgagtcagaaggaaatagggcat

SEQ ID NO: 2938587 - DNA, 25 bp, Homo sapien
gctccaccacgatgagaagcttgtg

SEQ ID NO: 2938588 - DNA, 25 bp, Homo sapien
ctgtcttaatcacgttgtgccgcag

SEQ ID NO: 2938589 - DNA, 25 bp, Homo sapien
caggacctggttgaacttggctagg

SEQ ID NO: 2938590 - DNA, 25 bp, Homo sapien
cacgttgtgccgcagccggataatt

SEQ ID NO: 2938591 - DNA, 25 bp, Homo sapien
cggataattagggtgtaggtcccat

SEQ ID NO: 2938592 - DNA, 25 bp, Homo sapien
aaggatacccactaggtttgccctg

SEQ ID NO: 2938593 - DNA, 25 bp, Homo sapien
ctccaacagcccctcagatcctgat

SEQ ID NO: 2938594 - DNA, 25 bp, Homo sapien
acccactaggtttgccctggcctgg

SEQ ID NO: 2938595 - DNA, 25 bp, Homo sapien
ctaggtttgccctggcctggcttct

SEQ ID NO: 2938596 - DNA, 25 bp, Homo sapien
ccaaggagattcgggaataggagag

SEQ ID NO: 2938597 - DNA, 25 bp, Homo sapien
agattcgggaataggagaggctgat

SEQ ID NO: 2938598 - DNA, 25 bp, Homo sapien
ttcgggaataggagaggctgatcat

SEQ ID NO: 2938599 - DNA, 25 bp, Homo sapien
aaggagattcgggaataggagaggc

SEQ ID NO: 2938600 - DNA, 25 bp, Homo sapien
caatgaactctgcatcttcggggct

SEQ ID NO: 2938601 - DNA, 25 bp, Homo sapien
aactctgcatcttcggggctatcca

SEQ ID NO: 2938602 - DNA, 25 bp, Homo sapien
tgaactctgcatcttcggggctatc

SEQ ID NO: 2938603 - DNA, 25 bp, Homo sapien
gcatcttcggggctatccaactgca

SEQ ID NO: 2938604 - DNA, 25 bp, Homo sapien
tgcctcctgagattggcaggaaagt

SEQ ID NO: 2938605 - DNA, 25 bp, Homo sapien
gcacgcccatcttctaagtcagaga

SEQ ID NO: 2938606 - DNA, 25 bp, Homo sapien
gacgggcacgccctgaaatgactat

SEQ ID NO: 2938607 - DNA, 25 bp, Homo sapien
tgcacatccatgctctctctggcaa

SEQ ID NO: 2938608 - DNA, 25 bp, Homo sapien
ggctctcgggtggaatagatgtcaa

SEQ ID NO: 2938609 - DNA, 25 bp, Homo sapien
gacagacatgttgtggatatctagg

SEQ ID NO: 2938610 - DNA, 25 bp, Homo sapien
tcatctccttggattggacatagcc

SEQ ID NO: 2938611 - DNA, 25 bp, Homo sapien
cccttctcgtggttgatgctggcct

SEQ ID NO: 2938612 - DNA, 25 bp, Homo sapien
gggcaactggctatggaactatggc

SEQ ID NO: 2938613 - DNA, 25 bp, Homo sapien
tgtgctgctgccaggcgtgactctg

SEQ ID NO: 2938614 - DNA, 25 bp, Homo sapien
ggacgtgggccacaaattaagccag

SEQ ID NO: 2938615 - DNA, 25 bp, Homo sapien
taaacgcaataggagagggcaactg

SEQ ID NO: 2938616 - DNA, 25 bp, Homo sapien
tcaatacagggacttcttttaatct

SEQ ID NO: 2938617 - DNA, 25 bp, Homo sapien
ccttttgtggagctagataccagcg

SEQ ID NO: 2938618 - DNA, 25 bp, Homo sapien
tacaatttagacttcgctaagtgcc

SEQ ID NO: 2938619 - DNA, 25 bp, Homo sapien
acttcgctaagtgcctcaatacagg

SEQ ID NO: 2938620 - DNA, 25 bp, Homo sapien
caaagggccttgcatgtcacgtgga

SEQ ID NO: 2938621 - DNA, 25 bp, Homo sapien
gcaatatcctagtttcctcggagga

SEQ ID NO: 2938622 - DNA, 25 bp, Homo sapien
catggcaagcaaatagtaacagcgc

SEQ ID NO: 2938623 - DNA, 25 bp, Homo sapien
gaccaactctcttgactgggcaggg

SEQ ID NO: 2938624 - DNA, 25 bp, Homo sapien
gagaggagatgagcgagggaaggaa

SEQ ID NO: 2938625 - DNA, 25 bp, Homo sapien
gcactccctgcgtcccctctgtgag

SEQ ID NO: 2938626 - DNA, 25 bp, Homo sapien
caggtgaggcactcacgcaacctgc

SEQ ID NO: 2938627 - DNA, 25 bp, Homo sapien
aagcaggtgaggcactcacgcaacc

SEQ ID NO: 2938628 - DNA, 25 bp, Homo sapien
tacgatttgggaggaaacctcatgg

SEQ ID NO: 2938629 - DNA, 25 bp, Homo sapien
ccaagtccttgttgtacgatttggg

SEQ ID NO: 2938630 - DNA, 25 bp, Homo sapien
tccttgttgtacgatttgggaggaa

SEQ ID NO: 2938631 - DNA, 25 bp, Homo sapien
tgtacgatttgggaggaaacctcat

SEQ ID NO: 2938632 - DNA, 25 bp, Homo sapien
gcccgactccccttctgtgtggaag

SEQ ID NO: 2938633 - DNA, 25 bp, Homo sapien
tgacctttcggtctcacccagaaag

SEQ ID NO: 2938634 - DNA, 25 bp, Homo sapien
ctgtgtggaagtttgacctttcggt

SEQ ID NO: 2938635 - DNA, 25 bp, Homo sapien
tggaagtttgacctttcggtctcac

SEQ ID NO: 2938636 - DNA, 25 bp, Homo sapien
ttggcaaactccaagtcctgctgtt

SEQ ID NO: 2938637 - DNA, 25 bp, Homo sapien
tggcaaactccaagtcctgctgttc

SEQ ID NO: 2938638 - DNA, 25 bp, Homo sapien
cctgctgttctcgctcacgccgttc

SEQ ID NO: 2938639 - DNA, 25 bp, Homo sapien
ggcaaactccaagtcctgctgttct

SEQ ID NO: 2938640 - DNA, 25 bp, Homo sapien
gctgtacagtaagtcaccggctggg

SEQ ID NO: 2938641 - DNA, 25 bp, Homo sapien
cccctgcacgaatgcagcatatgag

SEQ ID NO: 2938642 - DNA, 25 bp, Homo sapien
tgcctgctgtacagtaagtcaccgg

SEQ ID NO: 2938643 - DNA, 25 bp, Homo sapien
gcatatgagctgtgtgtgggaaaat

SEQ ID NO: 2938644 - DNA, 25 bp, Homo sapien
gagtacacagaactatccttcccct

SEQ ID NO: 2938645 - DNA, 25 bp, Homo sapien
aatcataatcgaagcttcaaaaaac

SEQ ID NO: 2938646 - DNA, 25 bp, Homo sapien
taaaaatcataatcgaagcttcaaa

SEQ ID NO: 2938647 - DNA, 25 bp, Homo sapien
ctccctaaaggagtacacagaacta

SEQ ID NO: 2938648 - DNA, 25 bp, Homo sapien
gggcctttatacataaccccatgga

SEQ ID NO: 2938649 - DNA, 25 bp, Homo sapien
ccagctctaggggggcctttataca

SEQ ID NO: 2938650 - DNA, 25 bp, Homo sapien
cataaccccatggaggcctgggagg

SEQ ID NO: 2938651 - DNA, 25 bp, Homo sapien
tatacataaccccatggaggcctgg

SEQ ID NO: 2938652 - DNA, 25 bp, Homo sapien
ggggctctgggtggcaggtccagcc

SEQ ID NO: 2938653 - DNA, 25 bp, Homo sapien
gggctctgggtggcaggtccagcca

SEQ ID NO: 2938654 - DNA, 25 bp, Homo sapien
ggctctgggtggcaggtccagccat

SEQ ID NO: 2938655 - DNA, 25 bp, Homo sapien
tgttccctaccacctgaggccctct

SEQ ID NO: 2938656 - DNA, 25 bp, Homo sapien
ctgttccctaccacctgaggccctc

SEQ ID NO: 2938657 - DNA, 25 bp, Homo sapien
gctgttccctaccacctgaggccct

SEQ ID NO: 2938658 - DNA, 25 bp, Homo sapien
gggacagagcgggctcaggagacat

SEQ ID NO: 2938659 - DNA, 25 bp, Homo sapien
ctggggacagagcgggctcaggaga

SEQ ID NO: 2938660 - DNA, 25 bp, Homo sapien
ggggacagagcgggctcaggagaca

SEQ ID NO: 2938661 - DNA, 25 bp, Homo sapien
tggggacagagcgggctcaggagac

SEQ ID NO: 2938662 - DNA, 25 bp, Homo sapien
ctcctggagcgctgcgccatcgccc

SEQ ID NO: 2938663 - DNA, 25 bp, Homo sapien
gcgccatcgccctggatcttcctca

SEQ ID NO: 2938664 - DNA, 25 bp, Homo sapien
ggagcgctgcgccatcgccctggat

SEQ ID NO: 2938665 - DNA, 25 bp, Homo sapien
tgcgccatcgccctggatcttcctc

SEQ ID NO: 2938666 - DNA, 25 bp, Homo sapien
actcccatcccagccagccctcccg

SEQ ID NO: 2938667 - DNA, 25 bp, Homo sapien
ctcccatcccagccagccctcccga

SEQ ID NO: 2938668 - DNA, 25 bp, Homo sapien
tgagtgagactcgccatggccgggt

SEQ ID NO: 2938669 - DNA, 25 bp, Homo sapien
ctgagtgagactcgccatggccggg

SEQ ID NO: 2938670 - DNA, 25 bp, Homo sapien
agtgagactcgccatggccgggtcg

SEQ ID NO: 2938671 - DNA, 25 bp, Homo sapien
tgagactcgccatggccgggtcgcc

SEQ ID NO: 2938672 - DNA, 25 bp, Homo sapien
ggatgcccagagagtgtccgagcag

SEQ ID NO: 2938673 - DNA, 25 bp, Homo sapien
agagtgtccgagcagcaccagctcc

SEQ ID NO: 2938674 - DNA, 25 bp, Homo sapien
agagagtgtccgagcagcaccagct

SEQ ID NO: 2938675 - DNA, 25 bp, Homo sapien
gatgcccagagagtgtccgagcagc

SEQ ID NO: 2938676 - DNA, 25 bp, Homo sapien
ctgagatacgtcaggcccccagctt

SEQ ID NO: 2938677 - DNA, 25 bp, Homo sapien
ttagccttatcctttcctgacactc

SEQ ID NO: 2938678 - DNA, 25 bp, Homo sapien
acagagcggaagagttagggggtgc

SEQ ID NO: 2938679 - DNA, 25 bp, Homo sapien
gggagcccatgggtgttcctcctct

SEQ ID NO: 2938680 - DNA, 25 bp, Homo sapien
gaaaaggccgctatggagttggctc

SEQ ID NO: 2938681 - DNA, 25 bp, Homo sapien
ctatggagttggctcaagcagcctg

SEQ ID NO: 2938682 - DNA, 25 bp, Homo sapien
ggtagaggaaaaggccgctatggag

SEQ ID NO: 2938683 - DNA, 25 bp, Homo sapien
ggccgctatggagttggctcaagca

SEQ ID NO: 2938684 - DNA, 25 bp, Homo sapien
ggtggtggcaaagtcggcgacgtcc

SEQ ID NO: 2938685 - DNA, 25 bp, Homo sapien
tggtggcaaagtcggcgacgtccag

SEQ ID NO: 2938686 - DNA, 25 bp, Homo sapien
ccaactcgggggagatcccttccag

SEQ ID NO: 2938687 - DNA, 25 bp, Homo sapien
agctgcagtgtgtccaaggtgggac

SEQ ID NO: 2938688 - DNA, 25 bp, Homo sapien
agcagaggcgaaggccggcatggca

SEQ ID NO: 2938689 - DNA, 25 bp, Homo sapien
ctggaaagcagaggcgaaggccggc

SEQ ID NO: 2938690 - DNA, 25 bp, Homo sapien
ggcgaaggccggcatggcaccctgg

SEQ ID NO: 2938691 - DNA, 25 bp, Homo sapien
cctcctgcccggcgctggaaagcag

SEQ ID NO: 2938692 - DNA, 25 bp, Homo sapien
gcgtagaacgcggtacgacacctcc

SEQ ID NO: 2938693 - DNA, 25 bp, Homo sapien
caaggtggcgtagaacgcggtacga

SEQ ID NO: 2938694 - DNA, 25 bp, Homo sapien
aacgcggtacgacacctccaggaag

SEQ ID NO: 2938695 - DNA, 25 bp, Homo sapien
gggcaaggtggcgtagaacgcggta

SEQ ID NO: 2938696 - DNA, 25 bp, Homo sapien
cagcaaattcgtgggaccccagggc

SEQ ID NO: 2938697 - DNA, 25 bp, Homo sapien
gatgttcgggagtcaaaccatgtcc

SEQ ID NO: 2938698 - DNA, 25 bp, Homo sapien
agtccccgtccagcaaggcaaatgt

SEQ ID NO: 2938699 - DNA, 25 bp, Homo sapien
cagaaaaacaggagacgcgtcggtg

SEQ ID NO: 2938700 - DNA, 25 bp, Homo sapien
ctaaacagggtctgcccgcagagac

SEQ ID NO: 2938701 - DNA, 25 bp, Homo sapien
tgactgtctaggagctaggaacctg

SEQ ID NO: 2938702 - DNA, 25 bp, Homo sapien
tgaccttcgcaaacacgctacttga

SEQ ID NO: 2938703 - DNA, 25 bp, Homo sapien
gaagcgtttatatgccagcacctgc

SEQ ID NO: 2938704 - DNA, 25 bp, Homo sapien
tccttagccctcttagttgtgacag

SEQ ID NO: 2938705 - DNA, 25 bp, Homo sapien
tcccttgtatccaagctgtatggag

SEQ ID NO: 2938706 - DNA, 25 bp, Homo sapien
ggcctggagattctgataggactgt

SEQ ID NO: 2938707 - DNA, 25 bp, Homo sapien
cgcattcagaaaaccacattacatt

SEQ ID NO: 2938708 - DNA, 25 bp, Homo sapien
ataaaaccaacccagtgacgccaga

SEQ ID NO: 2938709 - DNA, 25 bp, Homo sapien
cagagcacctttcatctcaggatct

SEQ ID NO: 2938710 - DNA, 25 bp, Homo sapien
caggatctcctagcgccaggccgag

SEQ ID NO: 2938711 - DNA, 25 bp, Homo sapien
ttcatggacataaaaccaacccagt

SEQ ID NO: 2938712 - DNA, 25 bp, Homo sapien
cgcaggagtgggtacttggtgacat

SEQ ID NO: 2938713 - DNA, 25 bp, Homo sapien
tagcctttgcttgccgggagaattg

SEQ ID NO: 2938714 - DNA, 25 bp, Homo sapien
gcggctcccgcaggagtgggtactt

SEQ ID NO: 2938715 - DNA, 25 bp, Homo sapien
aaaaatagcctttgcttgccgggag

SEQ ID NO: 2938716 - DNA, 25 bp, Homo sapien
gtggcgcgccggaccgggctgggca

SEQ ID NO: 2938717 - DNA, 25 bp, Homo sapien
cagctccagccaggcatcaaggtgg

SEQ ID NO: 2938718 - DNA, 25 bp, Homo sapien
agctccagccaggcatcaaggtggg

SEQ ID NO: 2938719 - DNA, 25 bp, Homo sapien
acagggacacggggccaatgcggca

SEQ ID NO: 2938720 - DNA, 25 bp, Homo sapien
ttctgccatggggggacagggacac

SEQ ID NO: 2938721 - DNA, 25 bp, Homo sapien
gggacagggacacggggccaatgcg

SEQ ID NO: 2938722 - DNA, 25 bp, Homo sapien
cagggacacggggccaatgcggcat

SEQ ID NO: 2938723 - DNA, 25 bp, Homo sapien
tgctgggaggcagtgtaggcaaagt

SEQ ID NO: 2938724 - DNA, 25 bp, Homo sapien
tgggaggcagtgtaggcaaagtgcc

SEQ ID NO: 2938725 - DNA, 25 bp, Homo sapien
ccttgtgagataagagctgctggga

SEQ ID NO: 2938726 - DNA, 25 bp, Homo sapien
tccttgtgagataagagctgctggg

SEQ ID NO: 2938727 - DNA, 25 bp, Homo sapien
ggagtagcttcggagtcttgtcctg

SEQ ID NO: 2938728 - DNA, 25 bp, Homo sapien
cccgcctcagcacttggcctttcac

SEQ ID NO: 2938729 - DNA, 25 bp, Homo sapien
gcctttcacaccatgccctgcgccc

SEQ ID NO: 2938730 - DNA, 25 bp, Homo sapien
ccctccagcacgccaagagactggg

SEQ ID NO: 2938731 - DNA, 25 bp, Homo sapien
tgacccacactccaccttgcttggc

SEQ ID NO: 2938732 - DNA, 25 bp, Homo sapien
tcctctgggtctgacccacactcca

SEQ ID NO: 2938733 - DNA, 25 bp, Homo sapien
tgggtctgacccacactccaccttg

SEQ ID NO: 2938734 - DNA, 25 bp, Homo sapien
gtctgacccacactccaccttgctt

SEQ ID NO: 2938735 - DNA, 25 bp, Homo sapien
gtgaaccgcagcttgtggacaacac

SEQ ID NO: 2938736 - DNA, 25 bp, Homo sapien
tgaaccgcagcttgtggacaacaca

SEQ ID NO: 2938737 - DNA, 25 bp, Homo sapien
gaaccgcagcttgtggacaacacac

SEQ ID NO: 2938738 - DNA, 25 bp, Homo sapien
ctggttttcagggaacattggccgt

SEQ ID NO: 2938739 - DNA, 25 bp, Homo sapien
tcgctttccatctggtgacctggca

SEQ ID NO: 2938740 - DNA, 25 bp, Homo sapien
ctttttcgctttccatctggtgacc

SEQ ID NO: 2938741 - DNA, 25 bp, Homo sapien
tcagggaacattggccgttctttct

SEQ ID NO: 2938742 - DNA, 25 bp, Homo sapien
acagcggtagtgataaccagttgcc

SEQ ID NO: 2938743 - DNA, 25 bp, Homo sapien
tagtgataaccagttgccttgtccc

SEQ ID NO: 2938744 - DNA, 25 bp, Homo sapien
acacgacacactgctcgtctttgtc

SEQ ID NO: 2938745 - DNA, 25 bp, Homo sapien
ttgtccaggtaactagggatatacc

SEQ ID NO: 2938746 - DNA, 25 bp, Homo sapien
gcagctgtcatatttgcaggaatag

SEQ ID NO: 2938747 - DNA, 25 bp, Homo sapien
tgcccacggcgatgcacttcttgaa

SEQ ID NO: 2938748 - DNA, 25 bp, Homo sapien
tcttctggattgtgcggcgaaagaa

SEQ ID NO: 2938749 - DNA, 25 bp, Homo sapien
cactgattgcgggtgatcttgtcaa

SEQ ID NO: 2938750 - DNA, 25 bp, Homo sapien
acgcatggcaccctccatccccttt

SEQ ID NO: 2938751 - DNA, 25 bp, Homo sapien
taatgctcccggaaactactcttcc

SEQ ID NO: 2938752 - DNA, 25 bp, Homo sapien
tcctagagtacaggttggagaaacc

SEQ ID NO: 2938753 - DNA, 25 bp, Homo sapien
ctactcttcctagagtacaggttgg

SEQ ID NO: 2938754 - DNA, 25 bp, Homo sapien
tcgctgctgcagtgatcggatcatc

SEQ ID NO: 2938755 - DNA, 25 bp, Homo sapien
tggatcagatcccactcttcaggag

SEQ ID NO: 2938756 - DNA, 25 bp, Homo sapien
cattggtgctgcgatgggcctctgt

SEQ ID NO: 2938757 - DNA, 25 bp, Homo sapien
ttacgcttggccacccgcttcgagt

SEQ ID NO: 2938758 - DNA, 25 bp, Homo sapien
gggtgatgatcttggtaaactcgct

SEQ ID NO: 2938759 - DNA, 25 bp, Homo sapien
tccggcatggagacaatgggtgact

SEQ ID NO: 2938760 - DNA, 25 bp, Homo sapien
tcttggtaaactcgctgaaggcttc

SEQ ID NO: 2938761 - DNA, 25 bp, Homo sapien
tttggcaaagtccaccacacgggtg

SEQ ID NO: 2938762 - DNA, 25 bp, Homo sapien
gtatgttatctgtgtatgttgacct

SEQ ID NO: 2938763 - DNA, 25 bp, Homo sapien
tatgttgacctacaggaattgctcc

SEQ ID NO: 2938764 - DNA, 25 bp, Homo sapien
cagatgagcctgtactgggtgaccg

SEQ ID NO: 2938765 - DNA, 25 bp, Homo sapien
ccagagaacctcagatgagcctgta

SEQ ID NO: 2938766 - DNA, 25 bp, Homo sapien
gtgtgtgtttgtgtactaggtgtgt

SEQ ID NO: 2938767 - DNA, 25 bp, Homo sapien
tgtgtgtgtttgtgtactaggtgtg

SEQ ID NO: 2938768 - DNA, 25 bp, Homo sapien
gtgtgtgtgtctgtgtgctgggtgt

SEQ ID NO: 2938769 - DNA, 25 bp, Homo sapien
tgtgtgtctgtgtgctgggtgtatg

SEQ ID NO: 2938770 - DNA, 25 bp, Homo sapien
tgacttgcccagttcaaagatggcg

SEQ ID NO: 2938771 - DNA, 25 bp, Homo sapien
tcgctctcagggtcgtagcggacag

SEQ ID NO: 2938772 - DNA, 25 bp, Homo sapien
gccacttccgtgtcatccaggttaa

SEQ ID NO: 2938773 - DNA, 25 bp, Homo sapien
cagcaccccttcaggaggatgatct

SEQ ID NO: 2938774 - DNA, 25 bp, Homo sapien
tcctgactcttctcgatcttgtcca

SEQ ID NO: 2938775 - DNA, 25 bp, Homo sapien
cctgactcttctcgatcttgtccac

SEQ ID NO: 2938776 - DNA, 25 bp, Homo sapien
ctcctgactcttctcgatcttgtcc

SEQ ID NO: 2938777 - DNA, 25 bp, Homo sapien
ctgactcttctcgatcttgtccaca

SEQ ID NO: 2938778 - DNA, 25 bp, Homo sapien
cgtagtgctcgaacgccagcaggta

SEQ ID NO: 2938779 - DNA, 25 bp, Homo sapien
agcagcttgggccagaagtgcggaa

SEQ ID NO: 2938780 - DNA, 25 bp, Homo sapien
gtggttgacgtagtgctcgaacgcc

SEQ ID NO: 2938781 - DNA, 25 bp, Homo sapien
aatgttgtgtttgcggtggttgacg

SEQ ID NO: 2938782 - DNA, 25 bp, Homo sapien
ggccccgatcatgcggaggtcagtc

SEQ ID NO: 2938783 - DNA, 25 bp, Homo sapien
gggcactcgactttcatgtggagga

SEQ ID NO: 2938784 - DNA, 25 bp, Homo sapien
tcctcaaagacctcgaggaagagtg

SEQ ID NO: 2938785 - DNA, 25 bp, Homo sapien
ggctggcgtggcaggccccgatcat

SEQ ID NO: 2938786 - DNA, 25 bp, Homo sapien
gctgaatctatccaaggacgagagg

SEQ ID NO: 2938787 - DNA, 25 bp, Homo sapien
gagccaagccaagccgttctttgca

SEQ ID NO: 2938788 - DNA, 25 bp, Homo sapien
tcccctacggtcaaggtggcttgtc

SEQ ID NO: 2938789 - DNA, 25 bp, Homo sapien
ttcccctaccttctgagaggatggg

SEQ ID NO: 2938790 - DNA, 25 bp, Homo sapien
tcttctccccttgcttggtttccaa

SEQ ID NO: 2938791 - DNA, 25 bp, Homo sapien
taatatcatctctctctatcgctcg

SEQ ID NO: 2938792 - DNA, 25 bp, Homo sapien
ctctggtcagcctcagttaataact

SEQ ID NO: 2938793 - DNA, 25 bp, Homo sapien
taataacttaatatcatctctctct

SEQ ID NO: 2938794 - DNA, 25 bp, Homo sapien
tccggtttctagctaatactgcagg

SEQ ID NO: 2938795 - DNA, 25 bp, Homo sapien
gctctagagcaggtgcgtggcactc

SEQ ID NO: 2938796 - DNA, 25 bp, Homo sapien
gggagtcccaagtgcctataagagg

SEQ ID NO: 2938797 - DNA, 25 bp, Homo sapien
tagatggaactcagcgggcacgagt

SEQ ID NO: 2938798 - DNA, 25 bp, Homo sapien
tctgccagcagatgggaggatatag

SEQ ID NO: 2938799 - DNA, 25 bp, Homo sapien
gatatagggaaacagcacacaagtc

SEQ ID NO: 2938800 - DNA, 25 bp, Homo sapien
aatccaatagttcacagctgagctg

SEQ ID NO: 2938801 - DNA, 25 bp, Homo sapien
ggccctctgatttgttctgttcctg

SEQ ID NO: 2938802 - DNA, 25 bp, Homo sapien
tgtacagaatcgaactctgcacttc

SEQ ID NO: 2938803 - DNA, 25 bp, Homo sapien
gctgcccccttgtacagaatcgaac

SEQ ID NO: 2938804 - DNA, 25 bp, Homo sapien
aacaacatgcattccgagaagctgc

SEQ ID NO: 2938805 - DNA, 25 bp, Homo sapien
gtccttccgggtggacgcccagtga

SEQ ID NO: 2938806 - DNA, 25 bp, Homo sapien
cgctgctgcgggctcttcgggctct

SEQ ID NO: 2938807 - DNA, 25 bp, Homo sapien
ctggtgctgaagaaccggcccttgg

SEQ ID NO: 2938808 - DNA, 25 bp, Homo sapien
agaccgctcgggcatggagaattcc

SEQ ID NO: 2938809 - DNA, 25 bp, Homo sapien
attccgcttcggtggagcagctcca

SEQ ID NO: 2938810 - DNA, 25 bp, Homo sapien
gacctccggttcctcctcagaggag

SEQ ID NO: 2938811 - DNA, 25 bp, Homo sapien
gcagacctccggttcctcctcagag

SEQ ID NO: 2938812 - DNA, 25 bp, Homo sapien
agaggctgcattgcctgccaggtcc

SEQ ID NO: 2938813 - DNA, 25 bp, Homo sapien
ggtcctcgcagacctccggttcctc

SEQ ID NO: 2938814 - DNA, 25 bp, Homo sapien
aaggacaagtaagatgttgccaggc

SEQ ID NO: 2938815 - DNA, 25 bp, Homo sapien
cagtagaagcatgaaccaaggaagc

SEQ ID NO: 2938816 - DNA, 25 bp, Homo sapien
gcctgggagaaggtatggcactcct

SEQ ID NO: 2938817 - DNA, 25 bp, Homo sapien
agcaaaaagcaagggagtctggcca

SEQ ID NO: 2938818 - DNA, 25 bp, Homo sapien
gaaatcgaaggcagcaccgctaaac

SEQ ID NO: 2938819 - DNA, 25 bp, Homo sapien
caccgcggtggtgcttgtctctgca

SEQ ID NO: 2938820 - DNA, 25 bp, Homo sapien
cagacagtgatgttcctaagccgca

SEQ ID NO: 2938821 - DNA, 25 bp, Homo sapien
cgttgttcaacgtgaaggaccagac

SEQ ID NO: 2938822 - DNA, 25 bp, Homo sapien
gaacccagtatctttgtccttatag

SEQ ID NO: 2938823 - DNA, 25 bp, Homo sapien
gaaataatgccttgggtgcactgct

SEQ ID NO: 2938824 - DNA, 25 bp, Homo sapien
ccccattctagacaagagcagatta

SEQ ID NO: 2938825 - DNA, 25 bp, Homo sapien
gagcagattaactttggtgaatgcc

SEQ ID NO: 2938826 - DNA, 25 bp, Homo sapien
tatgaacatgtacccgcatggacgc

SEQ ID NO: 2938827 - DNA, 25 bp, Homo sapien
catcgctgggaaaatcagggctgcc

SEQ ID NO: 2938828 - DNA, 25 bp, Homo sapien
taacgaggccctaaatggtctgcgc

SEQ ID NO: 2938829 - DNA, 25 bp, Homo sapien
caagtcaccctgcttaaggctggca

SEQ ID NO: 2938830 - DNA, 25 bp, Homo sapien
tttacgtgacaccagtcttgccagg

SEQ ID NO: 2938831 - DNA, 25 bp, Homo sapien
gagcaccagcaacatcaccagtgag

SEQ ID NO: 2938832 - DNA, 25 bp, Homo sapien
ccctgggagtctacaagtggccatg

SEQ ID NO: 2938833 - DNA, 25 bp, Homo sapien
tcagggatttctcctagagtggcac

SEQ ID NO: 2938834 - DNA, 25 bp, Homo sapien
atgttttgggcagacaggtggggat

SEQ ID NO: 2938835 - DNA, 25 bp, Homo sapien
tgttttgggcagacaggtggggatg

SEQ ID NO: 2938836 - DNA, 25 bp, Homo sapien
ttttgggcagacaggtggggatgag

SEQ ID NO: 2938837 - DNA, 25 bp, Homo sapien
gttttgggcagacaggtggggatga

SEQ ID NO: 2938838 - DNA, 25 bp, Homo sapien
tcagtgggtgagcaagacatgtgcc

SEQ ID NO: 2938839 - DNA, 25 bp, Homo sapien
cattggcaatgtaaccagagggtca

SEQ ID NO: 2938840 - DNA, 25 bp, Homo sapien
gctgcagtcgatattcccaaggaag

SEQ ID NO: 2938841 - DNA, 25 bp, Homo sapien
cagaccaatctaggtgcttgccgga

SEQ ID NO: 2938842 - DNA, 25 bp, Homo sapien
gaatgaccgctctcagctggtgaag

SEQ ID NO: 2938843 - DNA, 25 bp, Homo sapien
gcggcgatcgcaacctctagtttga

SEQ ID NO: 2938844 - DNA, 25 bp, Homo sapien
tctgggacttttgcaccgggagctc

SEQ ID NO: 2938845 - DNA, 25 bp, Homo sapien
tggtgaagacatgacgaccctggac

SEQ ID NO: 2938846 - DNA, 25 bp, Homo sapien
catattttatcctccagcaccgagg

SEQ ID NO: 2938847 - DNA, 25 bp, Homo sapien
tgttctccctaaggcgagtagaagg

SEQ ID NO: 2938848 - DNA, 25 bp, Homo sapien
gatgatctacatgttcccctctgag

SEQ ID NO: 2938849 - DNA, 25 bp, Homo sapien
caatggacgtctgaccttgggtcgg

SEQ ID NO: 2938850 - DNA, 25 bp, Homo sapien
ccgggctgtttatgagcgagttgtt

SEQ ID NO: 2938851 - DNA, 25 bp, Homo sapien
cagcagccgggctgtttatgagcga

SEQ ID NO: 2938852 - DNA, 25 bp, Homo sapien
tgtggtagaaatggagcaggctgca

SEQ ID NO: 2938853 - DNA, 25 bp, Homo sapien
tttatgagcgagttgttgtggtaga

SEQ ID NO: 2938854 - DNA, 25 bp, Homo sapien
caccgcctccttgggatgaagtatt

SEQ ID NO: 2938855 - DNA, 25 bp, Homo sapien
taaacgactcctagcatcttcggga

SEQ ID NO: 2938856 - DNA, 25 bp, Homo sapien
ggaggaaaatccatgatgtctgctg

SEQ ID NO: 2938857 - DNA, 25 bp, Homo sapien
tgtctctaagggattcaaaccagaa

SEQ ID NO: 2938858 - DNA, 25 bp, Homo sapien
aagaaggaggatacaggcggccaat

SEQ ID NO: 2938859 - DNA, 25 bp, Homo sapien
cccgggaaaaaagcgcgagagaatg

SEQ ID NO: 2938860 - DNA, 25 bp, Homo sapien
gctcctctttgagcccgcgggtgtt

SEQ ID NO: 2938861 - DNA, 25 bp, Homo sapien
tcctggaccagtcaggatccaggct

SEQ ID NO: 2938862 - DNA, 25 bp, Homo sapien
tgcggagacgtggaggccgcggctg

SEQ ID NO: 2938863 - DNA, 25 bp, Homo sapien
agtttggcgggctcgcctcagcagc

SEQ ID NO: 2938864 - DNA, 25 bp, Homo sapien
agctcatccccggagctcgcttcgg

SEQ ID NO: 2938865 - DNA, 25 bp, Homo sapien
gcaggcctccgctagcgcggctcct

SEQ ID NO: 2938866 - DNA, 25 bp, Homo sapien
gaggaagtgggcttcggccgcccca

SEQ ID NO: 2938867 - DNA, 25 bp, Homo sapien
cgctcgtagtccagtcgctgctcag

SEQ ID NO: 2938868 - DNA, 25 bp, Homo sapien
cgctgctcaggattgccgccggcag

SEQ ID NO: 2938869 - DNA, 25 bp, Homo sapien
gccgccttgaacaccgcggatctca

SEQ ID NO: 2938870 - DNA, 25 bp, Homo sapien
acaagccccggcccttgccgccgca

SEQ ID NO: 2938871 - DNA, 25 bp, Homo sapien
caagccccggcccttgccgccgcag

SEQ ID NO: 2938872 - DNA, 25 bp, Homo sapien
caagggcaccgaaccgccccagctc

SEQ ID NO: 2938873 - DNA, 25 bp, Homo sapien
ggcaagggcaccgaaccgccccagc

SEQ ID NO: 2938874 - DNA, 25 bp, Homo sapien
gacagggcaagggcaccgaaccgcc

SEQ ID NO: 2938875 - DNA, 25 bp, Homo sapien
gcaagggcaccgaaccgccccagct

SEQ ID NO: 2938876 - DNA, 25 bp, Homo sapien
gcggcaggctcccccccaatgccgg

SEQ ID NO: 2938877 - DNA, 25 bp, Homo sapien
tgcggcaggctcccccccaatgccg

SEQ ID NO: 2938878 - DNA, 25 bp, Homo sapien
ctgcggcaggctcccccccaatgcc

SEQ ID NO: 2938879 - DNA, 25 bp, Homo sapien
ggcgtaggctctttggccgccgcca

SEQ ID NO: 2938880 - DNA, 25 bp, Homo sapien
cagcaccgcctgatacttgggccgg

SEQ ID NO: 2938881 - DNA, 25 bp, Homo sapien
aggcaggcggcctgactggaggctc

SEQ ID NO: 2938882 - DNA, 25 bp, Homo sapien
ccgccacgagagagcccgtctgaat

SEQ ID NO: 2938883 - DNA, 25 bp, Homo sapien
cgatgaggtccaattgcagcagaag

SEQ ID NO: 2938884 - DNA, 25 bp, Homo sapien
tcgatgaggtccaattgcagcagaa

SEQ ID NO: 2938885 - DNA, 25 bp, Homo sapien
gatgaggtccaattgcagcagaagg

SEQ ID NO: 2938886 - DNA, 25 bp, Homo sapien
gttcgatgaggtccaattgcagcag

SEQ ID NO: 2938887 - DNA, 25 bp, Homo sapien
gagcatgcgcacaactcgctcctcg

SEQ ID NO: 2938888 - DNA, 25 bp, Homo sapien
tcggcccgaatgcagattaacccct

SEQ ID NO: 2938889 - DNA, 25 bp, Homo sapien
gctcctcggcccgaatgcagattaa

SEQ ID NO: 2938890 - DNA, 25 bp, Homo sapien
gaatgcagattaacccctcccgtac

SEQ ID NO: 2938891 - DNA, 25 bp, Homo sapien
agctgcatccgcctttccatacgtt

SEQ ID NO: 2938892 - DNA, 25 bp, Homo sapien
tctcgttatccttctttaccagctg

SEQ ID NO: 2938893 - DNA, 25 bp, Homo sapien
tgggatgtctcggaaagctccggct

SEQ ID NO: 2938894 - DNA, 25 bp, Homo sapien
tccatacgttcaatccgagcaagga

SEQ ID NO: 2938895 - DNA, 25 bp, Homo sapien
caagggtcctcatcaaacaaagtta

SEQ ID NO: 2938896 - DNA, 25 bp, Homo sapien
ggccctccgcatagaagacttctaa

SEQ ID NO: 2938897 - DNA, 25 bp, Homo sapien
tctaccaatgcacgacacaatgaag

SEQ ID NO: 2938898 - DNA, 25 bp, Homo sapien
tctcaatcactggtaacaagggtcc

SEQ ID NO: 2938899 - DNA, 25 bp, Homo sapien
aatattcaaggtccaccaggcgcag

SEQ ID NO: 2938900 - DNA, 25 bp, Homo sapien
gaacaaggaatttccatgcttaaga

SEQ ID NO: 2938901 - DNA, 25 bp, Homo sapien
tattcaaggtccaccaggcgcagtg

SEQ ID NO: 2938902 - DNA, 25 bp, Homo sapien
taagaatattcaaggtccaccaggc

SEQ ID NO: 2938903 - DNA, 25 bp, Homo sapien
tcttggctcctcaattcacgtttac

SEQ ID NO: 2938904 - DNA, 25 bp, Homo sapien
aattcacgtttacaaacagtttcag

SEQ ID NO: 2938905 - DNA, 25 bp, Homo sapien
cctctttaataggagagtgcttagg

SEQ ID NO: 2938906 - DNA, 25 bp, Homo sapien
ttttgaaaattcaggagccagcttt

SEQ ID NO: 2938907 - DNA, 25 bp, Homo sapien
tccttctttggagaggattcccgta

SEQ ID NO: 2938908 - DNA, 25 bp, Homo sapien
aaggtacggcaaatcttctatctca

SEQ ID NO: 2938909 - DNA, 25 bp, Homo sapien
catttctgtggtggaaaggtacggc

SEQ ID NO: 2938910 - DNA, 25 bp, Homo sapien
gattcccgtaatggtaacggtgatg

SEQ ID NO: 2938911 - DNA, 25 bp, Homo sapien
agcttgaccgccaccactagggtat

SEQ ID NO: 2938912 - DNA, 25 bp, Homo sapien
gccaccactagggtataagagcaag

SEQ ID NO: 2938913 - DNA, 25 bp, Homo sapien
gaccgccaccactagggtataagag

SEQ ID NO: 2938914 - DNA, 25 bp, Homo sapien
caccactagggtataagagcaagtg

SEQ ID NO: 2938915 - DNA, 25 bp, Homo sapien
tatatagttaaagagcggaggccca

SEQ ID NO: 2938916 - DNA, 25 bp, Homo sapien
caggaacagtcgtgcatggcaaagt

SEQ ID NO: 2938917 - DNA, 25 bp, Homo sapien
tctttcagagggcatgcaagttgcc

SEQ ID NO: 2938918 - DNA, 25 bp, Homo sapien
tatgaacaaccaatgggctactgca

SEQ ID NO: 2938919 - DNA, 25 bp, Homo sapien
tatgcccacaatctcagaggtgttt

SEQ ID NO: 2938920 - DNA, 25 bp, Homo sapien
tacccaatcccggatgggaagttgc

SEQ ID NO: 2938921 - DNA, 25 bp, Homo sapien
taagttgttacgcagcattgccatg

SEQ ID NO: 2938922 - DNA, 25 bp, Homo sapien
tcacacagaacagctctggaccaag

SEQ ID NO: 2938923 - DNA, 25 bp, Homo sapien
aagactttggctcccctagaacaag

SEQ ID NO: 2938924 - DNA, 25 bp, Homo sapien
ctagaacaagccattgagccttcct

SEQ ID NO: 2938925 - DNA, 25 bp, Homo sapien
cctagaacaagccattgagccttcc

SEQ ID NO: 2938926 - DNA, 25 bp, Homo sapien
actttggctcccctagaacaagcca

SEQ ID NO: 2938927 - DNA, 25 bp, Homo sapien
tacatatgtagtcttcttaaacagc

SEQ ID NO: 2938928 - DNA, 25 bp, Homo sapien
catatgtagtcttcttaaacagctc

SEQ ID NO: 2938929 - DNA, 25 bp, Homo sapien
atatgtagtcttcttaaacagctcc

SEQ ID NO: 2938930 - DNA, 25 bp, Homo sapien
acttacatatgtagtcttcttaaac

SEQ ID NO: 2938931 - DNA, 25 bp, Homo sapien
ctcagaacatggcaggtgagtaaaa

SEQ ID NO: 2938932 - DNA, 25 bp, Homo sapien
catggcaggtgagtaaaagttgacc

SEQ ID NO: 2938933 - DNA, 25 bp, Homo sapien
ttttacactgagacgacttcttttc

SEQ ID NO: 2938934 - DNA, 25 bp, Homo sapien
gccaaggatatcaaaccttaaactc

SEQ ID NO: 2938935 - DNA, 25 bp, Homo sapien
ggaagagggaacaacagacaaaaga

SEQ ID NO: 2938936 - DNA, 25 bp, Homo sapien
gaagagggaacaacagacaaaagaa

SEQ ID NO: 2938937 - DNA, 25 bp, Homo sapien
gaggggaagagggaacaacagacaa

SEQ ID NO: 2938938 - DNA, 25 bp, Homo sapien
ggaggggaagagggaacaacagaca

SEQ ID NO: 2938939 - DNA, 25 bp, Homo sapien
ctgaagttctcactaggaagccatt

SEQ ID NO: 2938940 - DNA, 25 bp, Homo sapien
tgaagttctcactaggaagccattt

SEQ ID NO: 2938941 - DNA, 25 bp, Homo sapien
cactgaagttctcactaggaagcca

SEQ ID NO: 2938942 - DNA, 25 bp, Homo sapien
aagttctcactaggaagccattttg

SEQ ID NO: 2938943 - DNA, 25 bp, Homo sapien
gaaagaagaataatctcagtgtaaa

SEQ ID NO: 2938944 - DNA, 25 bp, Homo sapien
ggaaagaagaataatctcagtgtaa

SEQ ID NO: 2938945 - DNA, 25 bp, Homo sapien
ttctcctgcaacacttgatggcatc

SEQ ID NO: 2938946 - DNA, 25 bp, Homo sapien
gcaacacttgatggcatcagacacc

SEQ ID NO: 2938947 - DNA, 25 bp, Homo sapien
tgcaacacttgatggcatcagacac

SEQ ID NO: 2938948 - DNA, 25 bp, Homo sapien
caaagttaccaagtgataggaatcc

SEQ ID NO: 2938949 - DNA, 25 bp, Homo sapien
gaatccattctatggcctccctgaa

SEQ ID NO: 2938950 - DNA, 25 bp, Homo sapien
tattcactaggataagaggtctctc

SEQ ID NO: 2938951 - DNA, 25 bp, Homo sapien
gaagccatattcagtgtccttgcta

SEQ ID NO: 2938952 - DNA, 25 bp, Homo sapien
gtctgaaggatttgggtcccttaga

SEQ ID NO: 2938953 - DNA, 25 bp, Homo sapien
ggatttgggtcccttagaggctcta

SEQ ID NO: 2938954 - DNA, 25 bp, Homo sapien
gggtcccttagaggctctactgagt

SEQ ID NO: 2938955 - DNA, 25 bp, Homo sapien
tagaggctctactgagtggtccctc

SEQ ID NO: 2938956 - DNA, 25 bp, Homo sapien
tatgggaacctcctggtaacagaat

SEQ ID NO: 2938957 - DNA, 25 bp, Homo sapien
gcttccaggaacgtaaaatctttca

SEQ ID NO: 2938958 - DNA, 25 bp, Homo sapien
tccggttctacctgagtctgtgggt

SEQ ID NO: 2938959 - DNA, 25 bp, Homo sapien
aactttaagagtcaaatgagcttgg

SEQ ID NO: 2938960 - DNA, 25 bp, Homo sapien
gccgcttcgaaaacacactgtcatc

SEQ ID NO: 2938961 - DNA, 25 bp, Homo sapien
tccagttttgcatgccgcttcgaaa

SEQ ID NO: 2938962 - DNA, 25 bp, Homo sapien
gcatgccgcttcgaaaacacactgt

SEQ ID NO: 2938963 - DNA, 25 bp, Homo sapien
ttttgcatgccgcttcgaaaacaca

SEQ ID NO: 2938964 - DNA, 25 bp, Homo sapien
tagggctcagttgtttccaggatgg

SEQ ID NO: 2938965 - DNA, 25 bp, Homo sapien
taagcactccaagattctccacagc

SEQ ID NO: 2938966 - DNA, 25 bp, Homo sapien
tgatactctgtcctaggtcctaggg

SEQ ID NO: 2938967 - DNA, 25 bp, Homo sapien
tccacagcatgaaaaagggaggtca

SEQ ID NO: 2938968 - DNA, 25 bp, Homo sapien
taaaattctttgttccctgatcctc

SEQ ID NO: 2938969 - DNA, 25 bp, Homo sapien
tgaggtaacctcaggctcagattcc

SEQ ID NO: 2938970 - DNA, 25 bp, Homo sapien
atgaggtaacctcaggctcagattc

SEQ ID NO: 2938971 - DNA, 25 bp, Homo sapien
gctgcagtcgctgtaaaattctttg

SEQ ID NO: 2938972 - DNA, 25 bp, Homo sapien
gcaagaagggggtaatcatcaaact

SEQ ID NO: 2938973 - DNA, 25 bp, Homo sapien
caagaagggggtaatcatcaaactt

SEQ ID NO: 2938974 - DNA, 25 bp, Homo sapien
gaagggggtaatcatcaaactttca

SEQ ID NO: 2938975 - DNA, 25 bp, Homo sapien
aggcaagaagggggtaatcatcaaa

SEQ ID NO: 2938976 - DNA, 25 bp, Homo sapien
aattttggtaatggtcgtccaaatg

SEQ ID NO: 2938977 - DNA, 25 bp, Homo sapien
ctggttccacctcatatctaggctt

SEQ ID NO: 2938978 - DNA, 25 bp, Homo sapien
ctcatatctaggcttccatgaagtc

SEQ ID NO: 2938979 - DNA, 25 bp, Homo sapien
aagtctgaaaaggatgtgcaggtta

SEQ ID NO: 2938980 - DNA, 25 bp, Homo sapien
taggcttccatgaagtctgaaaagg

SEQ ID NO: 2938981 - DNA, 25 bp, Homo sapien
acgtccggtgaggtgtttgcttctt

SEQ ID NO: 2938982 - DNA, 25 bp, Homo sapien
ggctacgctcatccaaccagggtag

SEQ ID NO: 2938983 - DNA, 25 bp, Homo sapien
aatctgcatcggctacgctcatcca

SEQ ID NO: 2938984 - DNA, 25 bp, Homo sapien
ctggatctccaatctgcatcggcta

SEQ ID NO: 2938985 - DNA, 25 bp, Homo sapien
ctgaagacagggttcttgccagcac

SEQ ID NO: 2938986 - DNA, 25 bp, Homo sapien
aatctggccagatagcacctcgtgg

SEQ ID NO: 2938987 - DNA, 25 bp, Homo sapien
aaactttagcagtgggaggcccctg

SEQ ID NO: 2938988 - DNA, 25 bp, Homo sapien
gcaggttcccttatagagagcccac

SEQ ID NO: 2938989 - DNA, 25 bp, Homo sapien
ccttaaggtgtgagatgagagcccc

SEQ ID NO: 2938990 - DNA, 25 bp, Homo sapien
agttatgaattacaacacagacaac

SEQ ID NO: 2938991 - DNA, 25 bp, Homo sapien
tttacaagacaaccaattttacaca

SEQ ID NO: 2938992 - DNA, 25 bp, Homo sapien
tacaagacaaccaattttacacatc

SEQ ID NO: 2938993 - DNA, 25 bp, Homo sapien
acatcagaaatggtatcaaaagtta

SEQ ID NO: 2938994 - DNA, 25 bp, Homo sapien
ttccaatgtttcaaatatacaagca

SEQ ID NO: 2938995 - DNA, 25 bp, Homo sapien
ctttttccaatgtttcaaatataca

SEQ ID NO: 2938996 - DNA, 25 bp, Homo sapien
aatataataaattgaagcagaagtt

SEQ ID NO: 2938997 - DNA, 25 bp, Homo sapien
acaagcagaattgtttgtttgccaa

SEQ ID NO: 2938998 - DNA, 25 bp, Homo sapien
tgcttggtaaaatcacgaatcaagg

SEQ ID NO: 2938999 - DNA, 25 bp, Homo sapien
gaatcaaggtaaatcttaaaagctg

SEQ ID NO: 2939000 - DNA, 25 bp, Homo sapien
tgctgcgtcagatttgctgcaccag

SEQ ID NO: 2939001 - DNA, 25 bp, Homo sapien
ttaaaagctgtagtgctgcgtcaga

SEQ ID NO: 2939002 - DNA, 25 bp, Homo sapien
gacccggattacgtctatcggtgat

SEQ ID NO: 2939003 - DNA, 25 bp, Homo sapien
ctaggcctgcggcacgtttgcggcc

SEQ ID NO: 2939004 - DNA, 25 bp, Homo sapien
gggcctaggcctgcggcacgtttgc

SEQ ID NO: 2939005 - DNA, 25 bp, Homo sapien
gcacgtttgcggccgacccggatta

SEQ ID NO: 2939006 - DNA, 25 bp, Homo sapien
tgggaggctggatagctagtcccgg

SEQ ID NO: 2939007 - DNA, 25 bp, Homo sapien
cgcgcccgtcgcagaggctgctggg

SEQ ID NO: 2939008 - DNA, 25 bp, Homo sapien
aggctggatagctagtcccggcgtg

SEQ ID NO: 2939009 - DNA, 25 bp, Homo sapien
tgctgggaggctggatagctagtcc

SEQ ID NO: 2939010 - DNA, 25 bp, Homo sapien
tacggagaacggccaccaccggcga

SEQ ID NO: 2939011 - DNA, 25 bp, Homo sapien
acggagaacggccaccaccggcgag

SEQ ID NO: 2939012 - DNA, 25 bp, Homo sapien
gagaacggccaccaccggcgaggta

SEQ ID NO: 2939013 - DNA, 25 bp, Homo sapien
cggagaacggccaccaccggcgagg

SEQ ID NO: 2939014 - DNA, 25 bp, Homo sapien
cctcggtgtcttgcgaagcgcgctg

SEQ ID NO: 2939015 - DNA, 25 bp, Homo sapien
gtcctcggtgtcttgcgaagcgcgc

SEQ ID NO: 2939016 - DNA, 25 bp, Homo sapien
cggtgtcttgcgaagcgcgctgccg

SEQ ID NO: 2939017 - DNA, 25 bp, Homo sapien
tcggtgtcttgcgaagcgcgctgcc

SEQ ID NO: 2939018 - DNA, 25 bp, Homo sapien
cgccgcctccggcgctaccgctgca

SEQ ID NO: 2939019 - DNA, 25 bp, Homo sapien
gcctccggcgctaccgctgcagctc

SEQ ID NO: 2939020 - DNA, 25 bp, Homo sapien
aacggggagccgccgctgtcggagc

SEQ ID NO: 2939021 - DNA, 25 bp, Homo sapien
ctccccgcaacggggagccgccgct

SEQ ID NO: 2939022 - DNA, 25 bp, Homo sapien
cagatgaagggccccggttcggcct

SEQ ID NO: 2939023 - DNA, 25 bp, Homo sapien
ctccacccgccgcagatgaagggcc

SEQ ID NO: 2939024 - DNA, 25 bp, Homo sapien
cgccgcagatgaagggccccggttc

SEQ ID NO: 2939025 - DNA, 25 bp, Homo sapien
acccgccgcagatgaagggccccgg

SEQ ID NO: 2939026 - DNA, 25 bp, Homo sapien
tgaagattcagcacaaaatggttgg

SEQ ID NO: 2939027 - DNA, 25 bp, Homo sapien
atctttatcaagtagtagccaaggc

SEQ ID NO: 2939028 - DNA, 25 bp, Homo sapien
ctccagccccgacttctgaataaaa

SEQ ID NO: 2939029 - DNA, 25 bp, Homo sapien
ggagacagagataggtaaatcttta

SEQ ID NO: 2939030 - DNA, 25 bp, Homo sapien
catcaccttcaatgccatcttcact

SEQ ID NO: 2939031 - DNA, 25 bp, Homo sapien
ttccgagtcttctgcactttcataa

SEQ ID NO: 2939032 - DNA, 25 bp, Homo sapien
gcctggcaacggaatgagactccgt

SEQ ID NO: 2939033 - DNA, 25 bp, Homo sapien
ctctatcttctctatctgggctttt

SEQ ID NO: 2939034 - DNA, 25 bp, Homo sapien
tatcttctctatctgggctttttct

SEQ ID NO: 2939035 - DNA, 25 bp, Homo sapien
tctctatcttctctatctgggcttt

SEQ ID NO: 2939036 - DNA, 25 bp, Homo sapien
gctcaccaatttgtctttatttcta

SEQ ID NO: 2939037 - DNA, 25 bp, Homo sapien
tcaccaattagtggcccctgctcac

SEQ ID NO: 2939038 - DNA, 25 bp, Homo sapien
tatttctaatacctatcctgtccca

SEQ ID NO: 2939039 - DNA, 25 bp, Homo sapien
aatgctccagtcacacctaattact

SEQ ID NO: 2939040 - DNA, 25 bp, Homo sapien
aggtacctggcctcctttgactcct

SEQ ID NO: 2939041 - DNA, 25 bp, Homo sapien
gacctgtatagtactggtgtccacg

SEQ ID NO: 2939042 - DNA, 25 bp, Homo sapien
tggtgtccacgcaggagaaagcaga

SEQ ID NO: 2939043 - DNA, 25 bp, Homo sapien
cagctgtaggacctgtatagtactg

SEQ ID NO: 2939044 - DNA, 25 bp, Homo sapien
tatagtactggtgtccacgcaggag

SEQ ID NO: 2939045 - DNA, 25 bp, Homo sapien
gagataaggtcttacgggccaggcg

SEQ ID NO: 2939046 - DNA, 25 bp, Homo sapien
agataaggtcttacgggccaggcgt

SEQ ID NO: 2939047 - DNA, 25 bp, Homo sapien
ataaggtcttacgggccaggcgtgg

SEQ ID NO: 2939048 - DNA, 25 bp, Homo sapien
tatccgggaggctgacgaacgagaa

SEQ ID NO: 2939049 - DNA, 25 bp, Homo sapien
caacaaactgttatacattcaataa

SEQ ID NO: 2939050 - DNA, 25 bp, Homo sapien
caactgactatagccttgacttcct

SEQ ID NO: 2939051 - DNA, 25 bp, Homo sapien
ggtgtgatctcaactgactatagcc

SEQ ID NO: 2939052 - DNA, 25 bp, Homo sapien
agaactgaatgagtagacatgcaac

SEQ ID NO: 2939053 - DNA, 25 bp, Homo sapien
cttcactgtattcaccttcttcacc

SEQ ID NO: 2939054 - DNA, 25 bp, Homo sapien
ctctccagtcacagtgcttttggtg

SEQ ID NO: 2939055 - DNA, 25 bp, Homo sapien
cttttggtgtcaggcttttcttctc

SEQ ID NO: 2939056 - DNA, 25 bp, Homo sapien
tgcttttggtgtcaggcttttcttc

SEQ ID NO: 2939057 - DNA, 25 bp, Homo sapien
gaagagccctttccgaggtatgtat

SEQ ID NO: 2939058 - DNA, 25 bp, Homo sapien
agtttgccctcgaagatcatgctca

SEQ ID NO: 2939059 - DNA, 25 bp, Homo sapien
atcatccaaatgcttagggcccttt

SEQ ID NO: 2939060 - DNA, 25 bp, Homo sapien
tgctggattcttccgatcttcatca

SEQ ID NO: 2939061 - DNA, 25 bp, Homo sapien
ccggattcttcgaggtttgatgtca

SEQ ID NO: 2939062 - DNA, 25 bp, Homo sapien
caatgagctcctgtcgggactttgg

SEQ ID NO: 2939063 - DNA, 25 bp, Homo sapien
caggattatgagctgagcgaatgtc

SEQ ID NO: 2939064 - DNA, 25 bp, Homo sapien
cggaacttgtcatgctcccagcgac

SEQ ID NO: 2939065 - DNA, 25 bp, Homo sapien
ccccaagaccctggtggcgatgaga

SEQ ID NO: 2939066 - DNA, 25 bp, Homo sapien
taaatgtccttggtggtagggtgcc

SEQ ID NO: 2939067 - DNA, 25 bp, Homo sapien
tagccgctcaccgttccagtttgga

SEQ ID NO: 2939068 - DNA, 25 bp, Homo sapien
tgagacttgtttagccgctcaccgt

SEQ ID NO: 2939069 - DNA, 25 bp, Homo sapien
tcgagaataattcctgggtgcagac

SEQ ID NO: 2939070 - DNA, 25 bp, Homo sapien
aaaaccagcacgaccttccttgaag

SEQ ID NO: 2939071 - DNA, 25 bp, Homo sapien
gccgtgaccggtaactaatctcatg

SEQ ID NO: 2939072 - DNA, 25 bp, Homo sapien
agaagtctgctctaggcgccgtgac

SEQ ID NO: 2939073 - DNA, 25 bp, Homo sapien
acttgtactagaatccaccggagct

SEQ ID NO: 2939074 - DNA, 25 bp, Homo sapien
tcccaggtcccagtcttagtaggtg

SEQ ID NO: 2939075 - DNA, 25 bp, Homo sapien
tcttgcccgggaataggatttcttc

SEQ ID NO: 2939076 - DNA, 25 bp, Homo sapien
gttgtgccacatcttgctcaagtcc

SEQ ID NO: 2939077 - DNA, 25 bp, Homo sapien
atttcttccatccggttaaactgag

SEQ ID NO: 2939078 - DNA, 25 bp, Homo sapien
tcttccatccggttaaactgaggtg

SEQ ID NO: 2939079 - DNA, 25 bp, Homo sapien
tccatccggttaaactgaggtggag

SEQ ID NO: 2939080 - DNA, 25 bp, Homo sapien
catttcttccatccggttaaactga

SEQ ID NO: 2939081 - DNA, 25 bp, Homo sapien
aaactgactttatcttggccgggcg

SEQ ID NO: 2939082 - DNA, 25 bp, Homo sapien
agaggcctaaacaataagaattcta

SEQ ID NO: 2939083 - DNA, 25 bp, Homo sapien
tctagagggctctcatatcaagtcc

SEQ ID NO: 2939084 - DNA, 25 bp, Homo sapien
taggagatccaaattaaaagaaaca

SEQ ID NO: 2939085 - DNA, 25 bp, Homo sapien
catgatactgatatgcactggaggg

SEQ ID NO: 2939086 - DNA, 25 bp, Homo sapien
gcacaggtctttgccgctgggatga

SEQ ID NO: 2939087 - DNA, 25 bp, Homo sapien
tgaatagcgtttggctcgaccaccc

SEQ ID NO: 2939088 - DNA, 25 bp, Homo sapien
ggatcatagtaatgtccctccatga

SEQ ID NO: 2939089 - DNA, 25 bp, Homo sapien
accatgggtatagattggtccctgg

SEQ ID NO: 2939090 - DNA, 25 bp, Homo sapien
gctgcacaagcatgccctgtggagg

SEQ ID NO: 2939091 - DNA, 25 bp, Homo sapien
gtatagattggtccctggaactgca

SEQ ID NO: 2939092 - DNA, 25 bp, Homo sapien
ggggaaggttcattcctggctgcac

SEQ ID NO: 2939093 - DNA, 25 bp, Homo sapien
ccaggctagcagcacaaagctcagg

SEQ ID NO: 2939094 - DNA, 25 bp, Homo sapien
ttttgtggcactcccaacatatatc

SEQ ID NO: 2939095 - DNA, 25 bp, Homo sapien
catatatcctcaggtactggaagca

SEQ ID NO: 2939096 - DNA, 25 bp, Homo sapien
tactggaagcatataagcagagaca

SEQ ID NO: 2939097 - DNA, 25 bp, Homo sapien
agtaggagcaagcaactgctgaggt

SEQ ID NO: 2939098 - DNA, 25 bp, Homo sapien
gttcatgacgcctggagcagaaaag

SEQ ID NO: 2939099 - DNA, 25 bp, Homo sapien
tgggattaccaaagttcatgacgcc

SEQ ID NO: 2939100 - DNA, 25 bp, Homo sapien
agtgcccctggagcataagggtaac

SEQ ID NO: 2939101 - DNA, 25 bp, Homo sapien
cagctcctgaccactaagaggcgtc

SEQ ID NO: 2939102 - DNA, 25 bp, Homo sapien
gatgatgggcattacataagctgca

SEQ ID NO: 2939103 - DNA, 25 bp, Homo sapien
taaagaaactgaacgctgggtgcgg

SEQ ID NO: 2939104 - DNA, 25 bp, Homo sapien
aagaggcgtcttggtgtcacataca

SEQ ID NO: 2939105 - DNA, 25 bp, Homo sapien
gcggggttatagtaggtcactcctc

SEQ ID NO: 2939106 - DNA, 25 bp, Homo sapien
ctgctgggcggggttatagtaggtc

SEQ ID NO: 2939107 - DNA, 25 bp, Homo sapien
tatagtaggtcactcctccatatac

SEQ ID NO: 2939108 - DNA, 25 bp, Homo sapien
gggttatagtaggtcactcctccat

SEQ ID NO: 2939109 - DNA, 25 bp, Homo sapien
tgttaagatttaaaatattcagaaa

SEQ ID NO: 2939110 - DNA, 25 bp, Homo sapien
tatgatgttaagatttaaaatattc

SEQ ID NO: 2939111 - DNA, 25 bp, Homo sapien
aagatttaaaatattcagaaacttg

SEQ ID NO: 2939112 - DNA, 25 bp, Homo sapien
agatttaaaatattcagaaacttgt

SEQ ID NO: 2939113 - DNA, 25 bp, Homo sapien
aacaatcgtttctacttcaaccctg

SEQ ID NO: 2939114 - DNA, 25 bp, Homo sapien
tgtagcttcccaattgaaaactgtc

SEQ ID NO: 2939115 - DNA, 25 bp, Homo sapien
caaagtgttagtgggccttctgggc

SEQ ID NO: 2939116 - DNA, 25 bp, Homo sapien
ttaagcctcctgagatatcccatga

SEQ ID NO: 2939117 - DNA, 25 bp, Homo sapien
gataggagcccttgcccagaaggtg

SEQ ID NO: 2939118 - DNA, 25 bp, Homo sapien
caattgcaaaggacagggtagactg

SEQ ID NO: 2939119 - DNA, 25 bp, Homo sapien
acaatgggaccctctgtgcagacag

SEQ ID NO: 2939120 - DNA, 25 bp, Homo sapien
ggaaggctggctgatacattctcca

SEQ ID NO: 2939121 - DNA, 25 bp, Homo sapien
gcttctgtagtaaacttccatccca

SEQ ID NO: 2939122 - DNA, 25 bp, Homo sapien
gagatagcttctgtagtaaacttcc

SEQ ID NO: 2939123 - DNA, 25 bp, Homo sapien
cagagatagcttctgtagtaaactt

SEQ ID NO: 2939124 - DNA, 25 bp, Homo sapien
tagcttctgtagtaaacttccatcc

SEQ ID NO: 2939125 - DNA, 25 bp, Homo sapien
caaggtagcaggtctgtgcgctgac

SEQ ID NO: 2939126 - DNA, 25 bp, Homo sapien
gtctttggtgctccgagttgcctac

SEQ ID NO: 2939127 - DNA, 25 bp, Homo sapien
gaattccaagtctttggtgctccga

SEQ ID NO: 2939128 - DNA, 25 bp, Homo sapien
tacaaggtagcaggtctgtgcgctg

SEQ ID NO: 2939129 - DNA, 25 bp, Homo sapien
tcgatgggttgaggctctctggaca

SEQ ID NO: 2939130 - DNA, 25 bp, Homo sapien
caggttctcgatgggttgaggctct

SEQ ID NO: 2939131 - DNA, 25 bp, Homo sapien
ggttctcgatgggttgaggctctct

SEQ ID NO: 2939132 - DNA, 25 bp, Homo sapien
ttctcgatgggttgaggctctctgg

SEQ ID NO: 2939133 - DNA, 25 bp, Homo sapien
tctctggtagggcacaataggtggt

SEQ ID NO: 2939134 - DNA, 25 bp, Homo sapien
tgtcctctctggtagggcacaatag

SEQ ID NO: 2939135 - DNA, 25 bp, Homo sapien
aaggcctcttgggtgaattagcatt

SEQ ID NO: 2939136 - DNA, 25 bp, Homo sapien
gcctcttgggtgaattagcattgcc

SEQ ID NO: 2939137 - DNA, 25 bp, Homo sapien
cgaagacacgatgctcagagctgga

SEQ ID NO: 2939138 - DNA, 25 bp, Homo sapien
ggcacgcggcccgaagagtgggcag

SEQ ID NO: 2939139 - DNA, 25 bp, Homo sapien
cagagtagagggccgtgccaggcgc

SEQ ID NO: 2939140 - DNA, 25 bp, Homo sapien
gaaaggagtgctcgctctcagcaac

SEQ ID NO: 2939141 - DNA, 25 bp, Homo sapien
cgccagctgcgacgtctgcttcttc

SEQ ID NO: 2939142 - DNA, 25 bp, Homo sapien
cgttcggcccgccagctgcgacgtc

SEQ ID NO: 2939143 - DNA, 25 bp, Homo sapien
ggcccgccagctgcgacgtctgctt

SEQ ID NO: 2939144 - DNA, 25 bp, Homo sapien
cttcagaaatttctccagcggcttc

SEQ ID NO: 2939145 - DNA, 25 bp, Homo sapien
gcagctccccagacccccgccggga

SEQ ID NO: 2939146 - DNA, 25 bp, Homo sapien
cgcagctccccagacccccgccggg

SEQ ID NO: 2939147 - DNA, 25 bp, Homo sapien
acgccgctgcaacgaccgctgtccc

SEQ ID NO: 2939148 - DNA, 25 bp, Homo sapien
tgacgccgctgcaacgaccgctgtc

SEQ ID NO: 2939149 - DNA, 25 bp, Homo sapien
ctctgacgccgctgcaacgaccgct

SEQ ID NO: 2939150 - DNA, 25 bp, Homo sapien
ctgacgccgctgcaacgaccgctgt

SEQ ID NO: 2939151 - DNA, 25 bp, Homo sapien
ggctcccggaggaaagcggggagca

SEQ ID NO: 2939152 - DNA, 25 bp, Homo sapien
ctggggacagctcgtcagatgagta

SEQ ID NO: 2939153 - DNA, 25 bp, Homo sapien
ctgaggcggcgctgtccctggtagc

SEQ ID NO: 2939154 - DNA, 25 bp, Homo sapien
ttcagaagatgctcgggccgctcgg

SEQ ID NO: 2939155 - DNA, 25 bp, Homo sapien
ctggtagcccctccagcaagccgct

SEQ ID NO: 2939156 - DNA, 25 bp, Homo sapien
aagccgctccagaacccggttcaga

SEQ ID NO: 2939157 - DNA, 25 bp, Homo sapien
caatgtacagcctccctagggaatg

SEQ ID NO: 2939158 - DNA, 25 bp, Homo sapien
aactacagcctgctccaaaggagag

SEQ ID NO: 2939159 - DNA, 25 bp, Homo sapien
ttagagtaatgcctagagctagacc

SEQ ID NO: 2939160 - DNA, 25 bp, Homo sapien
tcagaccctcctgggcttagagtaa

SEQ ID NO: 2939161 - DNA, 25 bp, Homo sapien
agccactgcgagggtgggttcggca

SEQ ID NO: 2939162 - DNA, 25 bp, Homo sapien
gcagccactgcgagggtgggttcgg

SEQ ID NO: 2939163 - DNA, 25 bp, Homo sapien
cagccactgcgagggtgggttcggc

SEQ ID NO: 2939164 - DNA, 25 bp, Homo sapien
gccactgcgagggtgggttcggcag

SEQ ID NO: 2939165 - DNA, 25 bp, Homo sapien
aatttctccgtcgggaggaagagag

SEQ ID NO: 2939166 - DNA, 25 bp, Homo sapien
tttctccgtcgggaggaagagagaa

SEQ ID NO: 2939167 - DNA, 25 bp, Homo sapien
tgcagaaatttctccgtcgggagga

SEQ ID NO: 2939168 - DNA, 25 bp, Homo sapien
cagaaatttctccgtcgggaggaag

SEQ ID NO: 2939169 - DNA, 25 bp, Homo sapien
tagacaggcttgcttccggcccagc

SEQ ID NO: 2939170 - DNA, 25 bp, Homo sapien
ttgatgatgtggccggccccctctt

SEQ ID NO: 2939171 - DNA, 25 bp, Homo sapien
tggagaagcatggctagacaggctt

SEQ ID NO: 2939172 - DNA, 25 bp, Homo sapien
catggctagacaggcttgcttccgg

SEQ ID NO: 2939173 - DNA, 25 bp, Homo sapien
ctcagagtgtcctctcggaggccct

SEQ ID NO: 2939174 - DNA, 25 bp, Homo sapien
cctggtaaagggactcgtccttcat

SEQ ID NO: 2939175 - DNA, 25 bp, Homo sapien
ccttcataattagcaggtatagatc

SEQ ID NO: 2939176 - DNA, 25 bp, Homo sapien
agcctcagagtgtcctctcggaggc

SEQ ID NO: 2939177 - DNA, 25 bp, Homo sapien
ccatggtgacagagtttacactgta

SEQ ID NO: 2939178 - DNA, 25 bp, Homo sapien
tcctgcagcactggttgttaaatat

SEQ ID NO: 2939179 - DNA, 25 bp, Homo sapien
ggtggagatactacataacagcctg

SEQ ID NO: 2939180 - DNA, 25 bp, Homo sapien
tacaaatcagggctctttctcctgc

SEQ ID NO: 2939181 - DNA, 25 bp, Homo sapien
catggtaggtagtaggtcagcagct

SEQ ID NO: 2939182 - DNA, 25 bp, Homo sapien
tcagaattgggtcaaggatgcacca

SEQ ID NO: 2939183 - DNA, 25 bp, Homo sapien
caaaggtaccaggagagttatgctg

SEQ ID NO: 2939184 - DNA, 25 bp, Homo sapien
gaaggagatagacaggcatacagct

SEQ ID NO: 2939185 - DNA, 25 bp, Homo sapien
gtctgcagacaggagtctatccggc

SEQ ID NO: 2939186 - DNA, 25 bp, Homo sapien
cagacaggagtctatccggcggaag

SEQ ID NO: 2939187 - DNA, 25 bp, Homo sapien
tatccggcggaagtggcggaagagt

SEQ ID NO: 2939188 - DNA, 25 bp, Homo sapien
atcagagccccggaaggccacccgg

SEQ ID NO: 2939189 - DNA, 25 bp, Homo sapien
tggtcaggcatgtatacacggcaga

SEQ ID NO: 2939190 - DNA, 25 bp, Homo sapien
gagcccagaatgtcctgcacagatg

SEQ ID NO: 2939191 - DNA, 25 bp, Homo sapien
tatggtcacataagagtggtcaggc

SEQ ID NO: 2939192 - DNA, 25 bp, Homo sapien
tgaagtttctccgtcacagagccca

SEQ ID NO: 2939193 - DNA, 25 bp, Homo sapien
agagcctcatagctgtcccgagtac

SEQ ID NO: 2939194 - DNA, 25 bp, Homo sapien
caaacaggtggctgttgatgcccag

SEQ ID NO: 2939195 - DNA, 25 bp, Homo sapien
tgcccagtgcggtgaaaacacagtc

SEQ ID NO: 2939196 - DNA, 25 bp, Homo sapien
tgtcccgagtacaggcaaacaggtg

SEQ ID NO: 2939197 - DNA, 25 bp, Homo sapien
cagggtgagggattgctcacagccc

SEQ ID NO: 2939198 - DNA, 25 bp, Homo sapien
tccagtcaaggccttgggaagttct

SEQ ID NO: 2939199 - DNA, 25 bp, Homo sapien
cagtcaaggccttgggaagttctta

SEQ ID NO: 2939200 - DNA, 25 bp, Homo sapien
ggtgagggattgctcacagccctcc

SEQ ID NO: 2939201 - DNA, 25 bp, Homo sapien
tggcaggcaggggcataggggctgg

SEQ ID NO: 2939202 - DNA, 25 bp, Homo sapien
ctggtggcaggcaggggcatagggg

SEQ ID NO: 2939203 - DNA, 25 bp, Homo sapien
caggcaggggcataggggctgggct

SEQ ID NO: 2939204 - DNA, 25 bp, Homo sapien
tggtggcaggcaggggcataggggc

SEQ ID NO: 2939205 - DNA, 25 bp, Homo sapien
tccactcggtggatctctgtgtctc

SEQ ID NO: 2939206 - DNA, 25 bp, Homo sapien
tggttggcaacgtcctcaggctcca

SEQ ID NO: 2939207 - DNA, 25 bp, Homo sapien
gcagttaggtggttggcaacgtcct

SEQ ID NO: 2939208 - DNA, 25 bp, Homo sapien
cacatcggaacagctcccagtggaa

SEQ ID NO: 2939209 - DNA, 25 bp, Homo sapien
gaaccaggacgttgtgctgcgaaca

SEQ ID NO: 2939210 - DNA, 25 bp, Homo sapien
gaacaaaggttacggccatgcgttg

SEQ ID NO: 2939211 - DNA, 25 bp, Homo sapien
tgcaagtgagccttggaaccaggac

SEQ ID NO: 2939212 - DNA, 25 bp, Homo sapien
tgtgtaaacagcacttgggccctga

SEQ ID NO: 2939213 - DNA, 25 bp, Homo sapien
ttaataatatttcaccagctactga

SEQ ID NO: 2939214 - DNA, 25 bp, Homo sapien
aaatagaaaggacaggaggcggcaa

SEQ ID NO: 2939215 - DNA, 25 bp, Homo sapien
tcacggctgacatcctcaagacaac

SEQ ID NO: 2939216 - DNA, 25 bp, Homo sapien
gtgccaggcattcgctcacggctga

SEQ ID NO: 2939217 - DNA, 25 bp, Homo sapien
ggtggccacccagtgcgtgacctcg

SEQ ID NO: 2939218 - DNA, 25 bp, Homo sapien
ggaacacgtagtccacgaactccag

SEQ ID NO: 2939219 - DNA, 25 bp, Homo sapien
tcgcagagcagcacttcggtggcca

SEQ ID NO: 2939220 - DNA, 25 bp, Homo sapien
tgacctcgctgcagcgctgcagcag

SEQ ID NO: 2939221 - DNA, 25 bp, Homo sapien
agccccatgaccacggcgtagaaag

SEQ ID NO: 2939222 - DNA, 25 bp, Homo sapien
ctcccaggtgagtcgaaggcggctg

SEQ ID NO: 2939223 - DNA, 25 bp, Homo sapien
tgaccacggcgtagaaagacagcag

SEQ ID NO: 2939224 - DNA, 25 bp, Homo sapien
tgacagcggcgttgtccagccccat

SEQ ID NO: 2939225 - DNA, 25 bp, Homo sapien
aggttctcaaatttgcgaaacaagt

SEQ ID NO: 2939226 - DNA, 25 bp, Homo sapien
gttctcaaatttgcgaaacaagttc

SEQ ID NO: 2939227 - DNA, 25 bp, Homo sapien
ctcaaatttgcgaaacaagttcttg

SEQ ID NO: 2939228 - DNA, 25 bp, Homo sapien
caaatttgcgaaacaagttcttgaa

SEQ ID NO: 2939229 - DNA, 25 bp, Homo sapien
tcagaggcacgaagggaatcacagg

SEQ ID NO: 2939230 - DNA, 25 bp, Homo sapien
ctttgaggatcagaggcacgaaggg

SEQ ID NO: 2939231 - DNA, 25 bp, Homo sapien
tctcggtagcttttgtggttcctgc

SEQ ID NO: 2939232 - DNA, 25 bp, Homo sapien
tggagatcacttctcggtagctttt

SEQ ID NO: 2939233 - DNA, 25 bp, Homo sapien
gaagcggcacagcttgggagtaact

SEQ ID NO: 2939234 - DNA, 25 bp, Homo sapien
ccagaacccactccgtctgtggtgg

SEQ ID NO: 2939235 - DNA, 25 bp, Homo sapien
tctccaggtgggtactcagggctga

SEQ ID NO: 2939236 - DNA, 25 bp, Homo sapien
gaatccaatgtgaggaaaggataag

SEQ ID NO: 2939237 - DNA, 25 bp, Homo sapien
ccatctacaagggtcttactccctt

SEQ ID NO: 2939238 - DNA, 25 bp, Homo sapien
tactcccttcgtgcaggaaagtcag

SEQ ID NO: 2939239 - DNA, 25 bp, Homo sapien
ggtcttactcccttcgtgcaggaaa

SEQ ID NO: 2939240 - DNA, 25 bp, Homo sapien
ctcccttcgtgcaggaaagtcaggt

SEQ ID NO: 2939241 - DNA, 25 bp, Homo sapien
gccggctccggtatttgcggattgt

SEQ ID NO: 2939242 - DNA, 25 bp, Homo sapien
tgcggattgtcctcactttttcggc

SEQ ID NO: 2939243 - DNA, 25 bp, Homo sapien
tcctcactttttcggccactgaatg

SEQ ID NO: 2939244 - DNA, 25 bp, Homo sapien
gattgtcctcactttttcggccact

SEQ ID NO: 2939245 - DNA, 25 bp, Homo sapien
caggctgtggactgagacagatgtt

SEQ ID NO: 2939246 - DNA, 25 bp, Homo sapien
gatcaggctgtggactgagacagat

SEQ ID NO: 2939247 - DNA, 25 bp, Homo sapien
aagatcaggctgtggactgagacag

SEQ ID NO: 2939248 - DNA, 25 bp, Homo sapien
agaagatcaggctgtggactgagac

SEQ ID NO: 2939249 - DNA, 25 bp, Homo sapien
tgattgggggatgcctccatgtcca

SEQ ID NO: 2939250 - DNA, 25 bp, Homo sapien
cataggccttggtctgcaggtgatt

SEQ ID NO: 2939251 - DNA, 25 bp, Homo sapien
tggttgtcgatgacctgaaactggc

SEQ ID NO: 2939252 - DNA, 25 bp, Homo sapien
tgaaactggcgcacataggccttgg

SEQ ID NO: 2939253 - DNA, 25 bp, Homo sapien
tgctccacgggaaagatgtcagatg

SEQ ID NO: 2939254 - DNA, 25 bp, Homo sapien
gacctctttcccgtggagcaggaag

SEQ ID NO: 2939255 - DNA, 25 bp, Homo sapien
cagaacagatctcgatgggaggaca

SEQ ID NO: 2939256 - DNA, 25 bp, Homo sapien
ggaagttggaagctccatccccaga

SEQ ID NO: 2939257 - DNA, 25 bp, Homo sapien
tgcctgccccaggtatagggatcca

SEQ ID NO: 2939258 - DNA, 25 bp, Homo sapien
gacttgcaagggctgatgggtaacc

SEQ ID NO: 2939259 - DNA, 25 bp, Homo sapien
tatacaccctcatagcaggagcagc

SEQ ID NO: 2939260 - DNA, 25 bp, Homo sapien
gcagagtagacaagggtagcaccaa

SEQ ID NO: 2939261 - DNA, 25 bp, Homo sapien
ctcactgcaaggtccccctcccggt

SEQ ID NO: 2939262 - DNA, 25 bp, Homo sapien
gtggtgccatcccagctcaccacaa

SEQ ID NO: 2939263 - DNA, 25 bp, Homo sapien
gcgcccaccaccacgccgggctact

SEQ ID NO: 2939264 - DNA, 25 bp, Homo sapien
caccatacccagttaattttgtgtt

SEQ ID NO: 2939265 - DNA, 25 bp, Homo sapien
tacactccggcttcgtcctgtcctg

SEQ ID NO: 2939266 - DNA, 25 bp, Homo sapien
ggcaagctctttctcgccgtcgccg

SEQ ID NO: 2939267 - DNA, 25 bp, Homo sapien
gggagcgaatcctctgccgcctaca

SEQ ID NO: 2939268 - DNA, 25 bp, Homo sapien
agctgctctgggagcgaatcctctg

SEQ ID NO: 2939269 - DNA, 25 bp, Homo sapien
tataccaggttactctcccaatcag

SEQ ID NO: 2939270 - DNA, 25 bp, Homo sapien
ggtacactgtaggttgcaatagcat

SEQ ID NO: 2939271 - DNA, 25 bp, Homo sapien
ggctgtaccaaaagtccgcccagga

SEQ ID NO: 2939272 - DNA, 25 bp, Homo sapien
gctgaagctgcctgaaccaagagcc

SEQ ID NO: 2939273 - DNA, 25 bp, Homo sapien
caagggcccagtttgtgtctctaca

SEQ ID NO: 2939274 - DNA, 25 bp, Homo sapien
cccacgaagctaggcaaaggcaatg

SEQ ID NO: 2939275 - DNA, 25 bp, Homo sapien
ggcatatccctcaagacacagtcag

SEQ ID NO: 2939276 - DNA, 25 bp, Homo sapien
gacagaggccattatctgacccagg

SEQ ID NO: 2939277 - DNA, 25 bp, Homo sapien
ccgctaatttttatattcttaatag

SEQ ID NO: 2939278 - DNA, 25 bp, Homo sapien
cttaatagagacagggtttcaccat

SEQ ID NO: 2939279 - DNA, 25 bp, Homo sapien
agccacactgatggcaagcgcctat

SEQ ID NO: 2939280 - DNA, 25 bp, Homo sapien
aattagccacactgatggcaagcgc

SEQ ID NO: 2939281 - DNA, 25 bp, Homo sapien
tagccacactgatggcaagcgccta

SEQ ID NO: 2939282 - DNA, 25 bp, Homo sapien
ttagccacactgatggcaagcgcct

SEQ ID NO: 2939283 - DNA, 25 bp, Homo sapien
ttataaagacataaaccaaacaaca

SEQ ID NO: 2939284 - DNA, 25 bp, Homo sapien
agagagagagatgtcaacaaagttt

SEQ ID NO: 2939285 - DNA, 25 bp, Homo sapien
gacataaaccaaacaacaagcaaaa

SEQ ID NO: 2939286 - DNA, 25 bp, Homo sapien
gagatgtcaacaaagttttggaagg

SEQ ID NO: 2939287 - DNA, 25 bp, Homo sapien
taacccactaccatcagaccagccc

SEQ ID NO: 2939288 - DNA, 25 bp, Homo sapien
tggggggtttgtataccaactgcag

SEQ ID NO: 2939289 - DNA, 25 bp, Homo sapien
acactaatgttaataagctctgata

SEQ ID NO: 2939290 - DNA, 25 bp, Homo sapien
gggggtttgtataccaactgcagtg

SEQ ID NO: 2939291 - DNA, 25 bp, Homo sapien
catctgtgctcttcagagaccttga

SEQ ID NO: 2939292 - DNA, 25 bp, Homo sapien
gctcttcagagaccttgactttcag

SEQ ID NO: 2939293 - DNA, 25 bp, Homo sapien
gtgctcttcagagaccttgactttc

SEQ ID NO: 2939294 - DNA, 25 bp, Homo sapien
cttcagagaccttgactttcagaaa

SEQ ID NO: 2939295 - DNA, 25 bp, Homo sapien
atgggtgaccaaaacctctctgtca

SEQ ID NO: 2939296 - DNA, 25 bp, Homo sapien
cttctctcaatgctctgggaatgat

SEQ ID NO: 2939297 - DNA, 25 bp, Homo sapien
gtaatttaatacttctctcaatgct

SEQ ID NO: 2939298 - DNA, 25 bp, Homo sapien
ctctgtcaataatgcagtaatttaa

SEQ ID NO: 2939299 - DNA, 25 bp, Homo sapien
tcttgccctgctcccagttggcact

SEQ ID NO: 2939300 - DNA, 25 bp, Homo sapien
gtggcgggggaggaggaattggcat

SEQ ID NO: 2939301 - DNA, 25 bp, Homo sapien
tggaggaggaccaggtgggggtggc

SEQ ID NO: 2939302 - DNA, 25 bp, Homo sapien
ctgatgaaatgtgggaggtggagga

SEQ ID NO: 2939303 - DNA, 25 bp, Homo sapien
ggtggcgggggaggaggaattggca

SEQ ID NO: 2939304 - DNA, 25 bp, Homo sapien
tctactcatggcttaagactcagct

SEQ ID NO: 2939305 - DNA, 25 bp, Homo sapien
tatatgcagtgtcatgcacatgtag

SEQ ID NO: 2939306 - DNA, 25 bp, Homo sapien
caacatcaccatacaagctctgctt

SEQ ID NO: 2939307 - DNA, 25 bp, Homo sapien
aaagtgctgggtgcaatctctgcct

SEQ ID NO: 2939308 - DNA, 25 bp, Homo sapien
tcagcttggtccctttgcaaatgtc

SEQ ID NO: 2939309 - DNA, 25 bp, Homo sapien
ggagcactccgatcattaatgttgg

SEQ ID NO: 2939310 - DNA, 25 bp, Homo sapien
caaatgtcctgtaagagggcgcctc

SEQ ID NO: 2939311 - DNA, 25 bp, Homo sapien
gctcatctctactcagcttgggctg

SEQ ID NO: 2939312 - DNA, 25 bp, Homo sapien
tcctccttggaagagacctcccttg

SEQ ID NO: 2939313 - DNA, 25 bp, Homo sapien
tccttggctcccacaggtcgaagct

SEQ ID NO: 2939314 - DNA, 25 bp, Homo sapien
ttggaagagacctcccttgggctgc

SEQ ID NO: 2939315 - DNA, 25 bp, Homo sapien
cacaggtcgaagcttcagcactcct

SEQ ID NO: 2939316 - DNA, 25 bp, Homo sapien
tcctcaacctgagatggcccacttg

SEQ ID NO: 2939317 - DNA, 25 bp, Homo sapien
ggcccacttgggacatcagaaatta

SEQ ID NO: 2939318 - DNA, 25 bp, Homo sapien
gggacatcagaaattaacacaccag

SEQ ID NO: 2939319 - DNA, 25 bp, Homo sapien
gagatggcccacttgggacatcaga

SEQ ID NO: 2939320 - DNA, 25 bp, Homo sapien
tacttctacgagtgagttcaactgt

SEQ ID NO: 2939321 - DNA, 25 bp, Homo sapien
tccaagttcatccatattatcagaa

SEQ ID NO: 2939322 - DNA, 25 bp, Homo sapien
tctagtaaccaacatttcactctct

SEQ ID NO: 2939323 - DNA, 25 bp, Homo sapien
ctggggactgctgcaatagatcact

SEQ ID NO: 2939324 - DNA, 25 bp, Homo sapien
atgacataactccttaatcaatgtt

SEQ ID NO: 2939325 - DNA, 25 bp, Homo sapien
tgttctatacctgtagaaactgact

SEQ ID NO: 2939326 - DNA, 25 bp, Homo sapien
ccatgacataactccttaatcaatg

SEQ ID NO: 2939327 - DNA, 25 bp, Homo sapien
actccatgacataactccttaatca

SEQ ID NO: 2939328 - DNA, 25 bp, Homo sapien
catgcctgtaatcccagctactcgg

SEQ ID NO: 2939329 - DNA, 25 bp, Homo sapien
caaaaattagccagatgtggtggtg

SEQ ID NO: 2939330 - DNA, 25 bp, Homo sapien
gagaaacccagtctctattaaaata

SEQ ID NO: 2939331 - DNA, 25 bp, Homo sapien
tactcggaaggctgaggcaggagaa

SEQ ID NO: 2939332 - DNA, 25 bp, Homo sapien
cataaagtctcaaactgtggctggg

SEQ ID NO: 2939333 - DNA, 25 bp, Homo sapien
tagcctgttctctactgcaaaagcc

SEQ ID NO: 2939334 - DNA, 25 bp, Homo sapien
caacctccctaaaaacttgatccag

SEQ ID NO: 2939335 - DNA, 25 bp, Homo sapien
tccacaattctaattcaggtcttcc

SEQ ID NO: 2939336 - DNA, 25 bp, Homo sapien
tgagctaaaagagtaacacacccca

SEQ ID NO: 2939337 - DNA, 25 bp, Homo sapien
gaatgacttgaaacacatgagctaa

SEQ ID NO: 2939338 - DNA, 25 bp, Homo sapien
taggtttggatgtggagacggcaag

SEQ ID NO: 2939339 - DNA, 25 bp, Homo sapien
aatccaaagtagttaggtttggatg

SEQ ID NO: 2939340 - DNA, 25 bp, Homo sapien
aagaaagaccggacagtggtgatag

SEQ ID NO: 2939341 - DNA, 25 bp, Homo sapien
caccatttcggatcacaggtggtgg

SEQ ID NO: 2939342 - DNA, 25 bp, Homo sapien
gggttctgacccatgcattcggtat

SEQ ID NO: 2939343 - DNA, 25 bp, Homo sapien
cagtggtgatagaatctctgtggcc

SEQ ID NO: 2939344 - DNA, 25 bp, Homo sapien
ctggagtgggtgaagtcaccgcagg

SEQ ID NO: 2939345 - DNA, 25 bp, Homo sapien
tgaagtcaccgcaggaaccatgaga

SEQ ID NO: 2939346 - DNA, 25 bp, Homo sapien
tgggtgaagtcaccgcaggaaccat

SEQ ID NO: 2939347 - DNA, 25 bp, Homo sapien
tgagactacagatagctagctactc

SEQ ID NO: 2939348 - DNA, 25 bp, Homo sapien
taaagaagatacagagtctctgacc

SEQ ID NO: 2939349 - DNA, 25 bp, Homo sapien
gatgtgatcaatggtttgctgcagc

SEQ ID NO: 2939350 - DNA, 25 bp, Homo sapien
ggagtggatttagagttagcacaac

SEQ ID NO: 2939351 - DNA, 25 bp, Homo sapien
tgaagagctagaaaggaacactcct

SEQ ID NO: 2939352 - DNA, 25 bp, Homo sapien
cagtgggtaggtaaggacagcaacc

SEQ ID NO: 2939353 - DNA, 25 bp, Homo sapien
tgtcaccacgggaaaacaactgatc

SEQ ID NO: 2939354 - DNA, 25 bp, Homo sapien
tgtaagtgcggcttgatcacatccc

SEQ ID NO: 2939355 - DNA, 25 bp, Homo sapien
catagttgggacagccatctcatgg

SEQ ID NO: 2939356 - DNA, 25 bp, Homo sapien
gtcttctactggatggaaggaatac

SEQ ID NO: 2939357 - DNA, 25 bp, Homo sapien
tactggatggaaggaatactttgac

SEQ ID NO: 2939358 - DNA, 25 bp, Homo sapien
tctactggatggaaggaatactttg

SEQ ID NO: 2939359 - DNA, 25 bp, Homo sapien
aaagtcttctactggatggaaggaa

SEQ ID NO: 2939360 - DNA, 25 bp, Homo sapien
agaatgggtggcagaggtggggctc

SEQ ID NO: 2939361 - DNA, 25 bp, Homo sapien
ggcagaggtggggctccacgggcag

SEQ ID NO: 2939362 - DNA, 25 bp, Homo sapien
ggtggcagaggtggggctccacggg

SEQ ID NO: 2939363 - DNA, 25 bp, Homo sapien
gggtggcagaggtggggctccacgg

SEQ ID NO: 2939364 - DNA, 25 bp, Homo sapien
gaaacttgttcctcatgtggctagc

SEQ ID NO: 2939365 - DNA, 25 bp, Homo sapien
gccagcctcctaaatgatgaaatat

SEQ ID NO: 2939366 - DNA, 25 bp, Homo sapien
gaggaaggcagaagacacggaaact

SEQ ID NO: 2939367 - DNA, 25 bp, Homo sapien
tttcctgaggaacgggaccaagcca

SEQ ID NO: 2939368 - DNA, 25 bp, Homo sapien
caagattgaggttaaggcccaggcc

SEQ ID NO: 2939369 - DNA, 25 bp, Homo sapien
cctatctcccaccagaggtttttgg

SEQ ID NO: 2939370 - DNA, 25 bp, Homo sapien
cccagagggttcaaatggctcctgt

SEQ ID NO: 2939371 - DNA, 25 bp, Homo sapien
gaaagagccactgacaacttcaggg

SEQ ID NO: 2939372 - DNA, 25 bp, Homo sapien
tcagtacaggcaggacttaaaagtc

SEQ ID NO: 2939373 - DNA, 25 bp, Homo sapien
cagtacaggcaggacttaaaagtcc

SEQ ID NO: 2939374 - DNA, 25 bp, Homo sapien
aggggcttcaacctgcccttctttg

SEQ ID NO: 2939375 - DNA, 25 bp, Homo sapien
ggtttcacctggcaccatgcacaga

SEQ ID NO: 2939376 - DNA, 25 bp, Homo sapien
aaagaaacaacctatggctggctgc

SEQ ID NO: 2939377 - DNA, 25 bp, Homo sapien
tgtgttaaaccgtgcagtcctggga

SEQ ID NO: 2939378 - DNA, 25 bp, Homo sapien
ggctgccaaggaagatctactgaac

SEQ ID NO: 2939379 - DNA, 25 bp, Homo sapien
cacaaaatggaaggaccctggagtc

SEQ ID NO: 2939380 - DNA, 25 bp, Homo sapien
gaggaagatatcagccccagtgaaa

SEQ ID NO: 2939381 - DNA, 25 bp, Homo sapien
tgactagatctagacccaggccttt

SEQ ID NO: 2939382 - DNA, 25 bp, Homo sapien
tgcaatggccgatgacgagtatcct

SEQ ID NO: 2939383 - DNA, 25 bp, Homo sapien
gaatctcccaggaagggtaactaga

SEQ ID NO: 2939384 - DNA, 25 bp, Homo sapien
cctaggttccctgaaatcgtgggca

SEQ ID NO: 2939385 - DNA, 25 bp, Homo sapien
tctgtgccaccacctgaggcggtat

SEQ ID NO: 2939386 - DNA, 25 bp, Homo sapien
tgagaatctgccatgcaacacaggt

SEQ ID NO: 2939387 - DNA, 25 bp, Homo sapien
tatagggttaggaagtcgaaggtca

SEQ ID NO: 2939388 - DNA, 25 bp, Homo sapien
cgaaggtcatttaggcaagctccat

SEQ ID NO: 2939389 - DNA, 25 bp, Homo sapien
tggagaaggaatcaaatcacactgg

SEQ ID NO: 2939390 - DNA, 25 bp, Homo sapien
caggctatttcaagtcaggaggaac

SEQ ID NO: 2939391 - DNA, 25 bp, Homo sapien
cctaagcctaggaatggagaatgaa

SEQ ID NO: 2939392 - DNA, 25 bp, Homo sapien
tacagtcttttaagtctcacacccc

SEQ ID NO: 2939393 - DNA, 25 bp, Homo sapien
cttgtggctggagagcatacagtct

SEQ ID NO: 2939394 - DNA, 25 bp, Homo sapien
ggcagtcagaatcctgaggctgaca

SEQ ID NO: 2939395 - DNA, 25 bp, Homo sapien
caatccagtggaagagttacagcca

SEQ ID NO: 2939396 - DNA, 25 bp, Homo sapien
tgtagtcacagagcctttcgccttg

SEQ ID NO: 2939397 - DNA, 25 bp, Homo sapien
aaagcccggcctcgattctgattgg

SEQ ID NO: 2939398 - DNA, 25 bp, Homo sapien
aagtcttagagtcgctgtgaggcca

SEQ ID NO: 2939399 - DNA, 25 bp, Homo sapien
catgaattgatttatatagaacttc

SEQ ID NO: 2939400 - DNA, 25 bp, Homo sapien
cacatttagtctcttctatcccaag

SEQ ID NO: 2939401 - DNA, 25 bp, Homo sapien
ctttatcaccagttcagcccagcac

SEQ ID NO: 2939402 - DNA, 25 bp, Homo sapien
caggcacgcggggtgtctttatcac

SEQ ID NO: 2939403 - DNA, 25 bp, Homo sapien
aattgagcgatgcaataacaagtta

SEQ ID NO: 2939404 - DNA, 25 bp, Homo sapien
gcgatgcaataacaagttacctgaa

SEQ ID NO: 2939405 - DNA, 25 bp, Homo sapien
ttgagcgatgcaataacaagttacc

SEQ ID NO: 2939406 - DNA, 25 bp, Homo sapien
gagcgatgcaataacaagttacctg

SEQ ID NO: 2939407 - DNA, 25 bp, Homo sapien
caggttacggtttggacatttgttg

SEQ ID NO: 2939408 - DNA, 25 bp, Homo sapien
catttgttggttctagtttggcatc

SEQ ID NO: 2939409 - DNA, 25 bp, Homo sapien
tagctttgttcaatgcccgagacag

SEQ ID NO: 2939410 - DNA, 25 bp, Homo sapien
gcagggcttttacacgaggagaaca

SEQ ID NO: 2939411 - DNA, 25 bp, Homo sapien
ggagtgttgcataggttgtcatcgc

SEQ ID NO: 2939412 - DNA, 25 bp, Homo sapien
gcttgaatagtctcacacatgcaga

SEQ ID NO: 2939413 - DNA, 25 bp, Homo sapien
gctaggagacttaattgtcagctga

SEQ ID NO: 2939414 - DNA, 25 bp, Homo sapien
tcttgccttgctttggtggagaaca

SEQ ID NO: 2939415 - DNA, 25 bp, Homo sapien
tcccacagatgtgttccctcaagaa

SEQ ID NO: 2939416 - DNA, 25 bp, Homo sapien
ggaccagctttgcttgctggtagca

SEQ ID NO: 2939417 - DNA, 25 bp, Homo sapien
cgatctgggacagctgtgttcagga

SEQ ID NO: 2939418 - DNA, 25 bp, Homo sapien
tccggcttaagcaggcagtttttcc

SEQ ID NO: 2939419 - DNA, 25 bp, Homo sapien
tcaaggacatgcaattcagcatgat

SEQ ID NO: 2939420 - DNA, 25 bp, Homo sapien
tgcaattcagcatgatagttttaaa

SEQ ID NO: 2939421 - DNA, 25 bp, Homo sapien
ctgacaaatctcctgagcaatagct

SEQ ID NO: 2939422 - DNA, 25 bp, Homo sapien
gctggcctggatacctcttcctgac

SEQ ID NO: 2939423 - DNA, 25 bp, Homo sapien
acaatacatcctggcctttgctgtc

SEQ ID NO: 2939424 - DNA, 25 bp, Homo sapien
gagaattgcttagccatggccattc

SEQ ID NO: 2939425 - DNA, 25 bp, Homo sapien
aaatagcgtgtacaatacatcctgg

SEQ ID NO: 2939426 - DNA, 25 bp, Homo sapien
catggccattcaaatagcgtgtaca

SEQ ID NO: 2939427 - DNA, 25 bp, Homo sapien
gtgagatccagggtattagcaatac

SEQ ID NO: 2939428 - DNA, 25 bp, Homo sapien
taagtcgatcttgcaaaatagtgac

SEQ ID NO: 2939429 - DNA, 25 bp, Homo sapien
ggtagaattctatctgtgagatcca

SEQ ID NO: 2939430 - DNA, 25 bp, Homo sapien
tctggtataaggtgggaagttcaac

SEQ ID NO: 2939431 - DNA, 25 bp, Homo sapien
tgtccagaacctgatctctagatac

SEQ ID NO: 2939432 - DNA, 25 bp, Homo sapien
agcagagactttgcgggcacagaat

SEQ ID NO: 2939433 - DNA, 25 bp, Homo sapien
gaactgcagcattgtccagaacctg

SEQ ID NO: 2939434 - DNA, 25 bp, Homo sapien
tgcgggcacagaattgaactgcagc

SEQ ID NO: 2939435 - DNA, 25 bp, Homo sapien
caaacatccagtgctttgcgaacat

SEQ ID NO: 2939436 - DNA, 25 bp, Homo sapien
acatccagtgctttgcgaacatctc

SEQ ID NO: 2939437 - DNA, 25 bp, Homo sapien
aaacatccagtgctttgcgaacatc

SEQ ID NO: 2939438 - DNA, 25 bp, Homo sapien
tgcaaacatccagtgctttgcgaac

SEQ ID NO: 2939439 - DNA, 25 bp, Homo sapien
aagaatgcaacagagccgtaactca

SEQ ID NO: 2939440 - DNA, 25 bp, Homo sapien
agaatgcaacagagccgtaactcac

SEQ ID NO: 2939441 - DNA, 25 bp, Homo sapien
ctgggtcttctgcatagcaataggg

SEQ ID NO: 2939442 - DNA, 25 bp, Homo sapien
tctctccaaagtacttgcccacagg

SEQ ID NO: 2939443 - DNA, 25 bp, Homo sapien
caggaagccataagccagacctggg

SEQ ID NO: 2939444 - DNA, 25 bp, Homo sapien
tccaaagtacttgcccacaggaagc

SEQ ID NO: 2939445 - DNA, 25 bp, Homo sapien
ttgagaatagtctggcttttgacat

SEQ ID NO: 2939446 - DNA, 25 bp, Homo sapien
tgagaatagtctggcttttgacatc

SEQ ID NO: 2939447 - DNA, 25 bp, Homo sapien
gagaatagtctggcttttgacatct

SEQ ID NO: 2939448 - DNA, 25 bp, Homo sapien
tactggcaggcaagattgaaataaa

SEQ ID NO: 2939449 - DNA, 25 bp, Homo sapien
tctgtcccagccatttacgcaatca

SEQ ID NO: 2939450 - DNA, 25 bp, Homo sapien
ggaactcatttccagtaatgcacga

SEQ ID NO: 2939451 - DNA, 25 bp, Homo sapien
agccatttacgcaatcaataccctg

SEQ ID NO: 2939452 - DNA, 25 bp, Homo sapien
agtgacaagcctaaatgttactgat

SEQ ID NO: 2939453 - DNA, 25 bp, Homo sapien
agcctaaatgttactgatggggaaa

SEQ ID NO: 2939454 - DNA, 25 bp, Homo sapien
aagcctaaatgttactgatggggaa

SEQ ID NO: 2939455 - DNA, 25 bp, Homo sapien
gacaagcctaaatgttactgatggg

SEQ ID NO: 2939456 - DNA, 25 bp, Homo sapien
gggaatcagaggctcagaaggtgat

SEQ ID NO: 2939457 - DNA, 25 bp, Homo sapien
cttgggaatcagaggctcagaaggt

SEQ ID NO: 2939458 - DNA, 25 bp, Homo sapien
atcagaggctcagaaggtgatttac

SEQ ID NO: 2939459 - DNA, 25 bp, Homo sapien
gaatcagaggctcagaaggtgattt

SEQ ID NO: 2939460 - DNA, 25 bp, Homo sapien
tcaacttctgagatgacttgggata

SEQ ID NO: 2939461 - DNA, 25 bp, Homo sapien
cagagtgacctctttgattttcaac

SEQ ID NO: 2939462 - DNA, 25 bp, Homo sapien
gagcaaaccaagatcttctgctgaa

SEQ ID NO: 2939463 - DNA, 25 bp, Homo sapien
tttcaactgcctgatcaagagcatc

SEQ ID NO: 2939464 - DNA, 25 bp, Homo sapien
aaacttatctgaataccctatttct

SEQ ID NO: 2939465 - DNA, 25 bp, Homo sapien
agggagaacaaacgctgcttaaaag

SEQ ID NO: 2939466 - DNA, 25 bp, Homo sapien
gaaacctgagtctgggtttgcaaaa

SEQ ID NO: 2939467 - DNA, 25 bp, Homo sapien
tcacattgcttatagcctttaatca

SEQ ID NO: 2939468 - DNA, 25 bp, Homo sapien
gctgtttgcgacagactttactgta

SEQ ID NO: 2939469 - DNA, 25 bp, Homo sapien
tctttaatcctaaaatgcccctggc

SEQ ID NO: 2939470 - DNA, 25 bp, Homo sapien
cctgaaagtgacaaacactctgact

SEQ ID NO: 2939471 - DNA, 25 bp, Homo sapien
gacaaacactctgactggtccacag

SEQ ID NO: 2939472 - DNA, 25 bp, Homo sapien
tatctttcagagcatgttctatttc

SEQ ID NO: 2939473 - DNA, 25 bp, Homo sapien
taaatgccagctgaatactttcggg

SEQ ID NO: 2939474 - DNA, 25 bp, Homo sapien
ttcaggcccgaatgtgtaaagcact

SEQ ID NO: 2939475 - DNA, 25 bp, Homo sapien
caagtggcttcatctaagggcagca

SEQ ID NO: 2939476 - DNA, 25 bp, Homo sapien
ttcaacctgggaagcgggtgctgta

SEQ ID NO: 2939477 - DNA, 25 bp, Homo sapien
catgttcaaactaccttcagaggga

SEQ ID NO: 2939478 - DNA, 25 bp, Homo sapien
gcagacttggtcactggctctcaga

SEQ ID NO: 2939479 - DNA, 25 bp, Homo sapien
tacagttaagaggaaggcgccaagc

SEQ ID NO: 2939480 - DNA, 25 bp, Homo sapien
gcagagttagctagccacaggcaag

SEQ ID NO: 2939481 - DNA, 25 bp, Homo sapien
gccctctcagctcgattcaggattc

SEQ ID NO: 2939482 - DNA, 25 bp, Homo sapien
ctctcagctcgattcaggattcccc

SEQ ID NO: 2939483 - DNA, 25 bp, Homo sapien
gaagccctctcagctcgattcagga

SEQ ID NO: 2939484 - DNA, 25 bp, Homo sapien
aagccctctcagctcgattcaggat

SEQ ID NO: 2939485 - DNA, 25 bp, Homo sapien
tcagtgccaaccacattgtgggcac

SEQ ID NO: 2939486 - DNA, 25 bp, Homo sapien
caaccacattgtgggcacccaaagg

SEQ ID NO: 2939487 - DNA, 25 bp, Homo sapien
actgactggtcttttgagggcagaa

SEQ ID NO: 2939488 - DNA, 25 bp, Homo sapien
ctggtcttttgagggcagaaggaat

SEQ ID NO: 2939489 - DNA, 25 bp, Homo sapien
gatggcagcggccatagcgagtcac

SEQ ID NO: 2939490 - DNA, 25 bp, Homo sapien
tgcggaggctgaaactttacccgga

SEQ ID NO: 2939491 - DNA, 25 bp, Homo sapien
ccctggtgctgctcggcatcagggt

SEQ ID NO: 2939492 - DNA, 25 bp, Homo sapien
aacccgttcggggtgccagcgagca

SEQ ID NO: 2939493 - DNA, 25 bp, Homo sapien
gagtggcctggaagaaaaggtccca

SEQ ID NO: 2939494 - DNA, 25 bp, Homo sapien
caaaactaccgacacaagatgggtg

SEQ ID NO: 2939495 - DNA, 25 bp, Homo sapien
gattaccccgcttatttgtcgcagg

SEQ ID NO: 2939496 - DNA, 25 bp, Homo sapien
tcacatcacacggttctgaggacca

SEQ ID NO: 2939497 - DNA, 25 bp, Homo sapien
cagccttgctagagctaggactggt

SEQ ID NO: 2939498 - DNA, 25 bp, Homo sapien
gaggcttccctaggagggctggaga

SEQ ID NO: 2939499 - DNA, 25 bp, Homo sapien
ctgagggtggctgggatagctggag

SEQ ID NO: 2939500 - DNA, 25 bp, Homo sapien
gctgggatagctggagggtgcctct

SEQ ID NO: 2939501 - DNA, 25 bp, Homo sapien
agcatccctagctgcccacgcgtta

SEQ ID NO: 2939502 - DNA, 25 bp, Homo sapien
tgcccacgcgttacaccccagagtc

SEQ ID NO: 2939503 - DNA, 25 bp, Homo sapien
gcatcagcatccctagctgcccacg

SEQ ID NO: 2939504 - DNA, 25 bp, Homo sapien
tccctagctgcccacgcgttacacc

SEQ ID NO: 2939505 - DNA, 25 bp, Homo sapien
ctagcctcaaatctggagtccaggg

SEQ ID NO: 2939506 - DNA, 25 bp, Homo sapien
gcacatggccagcatttggttgaag

SEQ ID NO: 2939507 - DNA, 25 bp, Homo sapien
ccagactctagcctcaaatctggag

SEQ ID NO: 2939508 - DNA, 25 bp, Homo sapien
aagcacatggccagcatttggttga

SEQ ID NO: 2939509 - DNA, 25 bp, Homo sapien
cctttggtcaagcagttctgtgagc

SEQ ID NO: 2939510 - DNA, 25 bp, Homo sapien
gggatgtctcaagagccggtccttt

SEQ ID NO: 2939511 - DNA, 25 bp, Homo sapien
ccaaagagggcaggctaatctcagt

SEQ ID NO: 2939512 - DNA, 25 bp, Homo sapien
aaaaagatgccactcctagatgggc

SEQ ID NO: 2939513 - DNA, 25 bp, Homo sapien
gggatggtgtgctatatccactaac

SEQ ID NO: 2939514 - DNA, 25 bp, Homo sapien
caccgggtacccattgaggtgcccg

SEQ ID NO: 2939515 - DNA, 25 bp, Homo sapien
agagtccacccagcataggggggaa

SEQ ID NO: 2939516 - DNA, 25 bp, Homo sapien
gaagaagaaggcgtagggaggcacc

SEQ ID NO: 2939517 - DNA, 25 bp, Homo sapien
gatggtgtgaacagattgtatccac

SEQ ID NO: 2939518 - DNA, 25 bp, Homo sapien
gagggtgcccgctgagttctgcaaa

SEQ ID NO: 2939519 - DNA, 25 bp, Homo sapien
cccgtgggctacagcgggcagattt

SEQ ID NO: 2939520 - DNA, 25 bp, Homo sapien
taggcacacgaagcaaacatgcagc

SEQ ID NO: 2939521 - DNA, 25 bp, Homo sapien
aactgtcctttaagactcctgccca

SEQ ID NO: 2939522 - DNA, 25 bp, Homo sapien
agaactgtcctttaagactcctgcc

SEQ ID NO: 2939523 - DNA, 25 bp, Homo sapien
tgtcctttaagactcctgcccatgg

SEQ ID NO: 2939524 - DNA, 25 bp, Homo sapien
ctttaagactcctgcccatggaagg

SEQ ID NO: 2939525 - DNA, 25 bp, Homo sapien
tgtcggaatgagacaccggcttgtg

SEQ ID NO: 2939526 - DNA, 25 bp, Homo sapien
gtgtgacattgtgcagctcggacgc

SEQ ID NO: 2939527 - DNA, 25 bp, Homo sapien
gctctgcgtgcttccggcgagcaaa

SEQ ID NO: 2939528 - DNA, 25 bp, Homo sapien
tgtgacatcatgtgtgactccggcc

SEQ ID NO: 2939529 - DNA, 25 bp, Homo sapien
gcaggaggcgtagggccgggtcgcg

SEQ ID NO: 2939530 - DNA, 25 bp, Homo sapien
tcgcgcggggccaagtgtttggcac

SEQ ID NO: 2939531 - DNA, 25 bp, Homo sapien
cgctgcccgtgacatcacccgctcg

SEQ ID NO: 2939532 - DNA, 25 bp, Homo sapien
acctcccccggagacgcggagagcg

SEQ ID NO: 2939533 - DNA, 25 bp, Homo sapien
gccagtcccggtgaaaagcagggaa

SEQ ID NO: 2939534 - DNA, 25 bp, Homo sapien
tccagggattctccgtggcgaggat

SEQ ID NO: 2939535 - DNA, 25 bp, Homo sapien
ccctcgaaggcaagaggtccgagct

SEQ ID NO: 2939536 - DNA, 25 bp, Homo sapien
actcgctcggtctctggtggtacgc

SEQ ID NO: 2939537 - DNA, 25 bp, Homo sapien
cccccacttctacactctcgtacat

SEQ ID NO: 2939538 - DNA, 25 bp, Homo sapien
gaccccccacttctacactctcgta

SEQ ID NO: 2939539 - DNA, 25 bp, Homo sapien
ccccccacttctacactctcgtaca

SEQ ID NO: 2939540 - DNA, 25 bp, Homo sapien
tgggaccccccacttctacactctc

SEQ ID NO: 2939541 - DNA, 25 bp, Homo sapien
ttgagccattccaaagcggagtccg

SEQ ID NO: 2939542 - DNA, 25 bp, Homo sapien
cattccaaagcggagtccggagcgg

SEQ ID NO: 2939543 - DNA, 25 bp, Homo sapien
agccattccaaagcggagtccggag

SEQ ID NO: 2939544 - DNA, 25 bp, Homo sapien
ctgggagcaaacaggcccggttctg

SEQ ID NO: 2939545 - DNA, 25 bp, Homo sapien
cggaggtgtgagtggcggagattgg

SEQ ID NO: 2939546 - DNA, 25 bp, Homo sapien
cacattcttggacgtctgggagcgg

SEQ ID NO: 2939547 - DNA, 25 bp, Homo sapien
gatggggagccacatcctgtgcacc

SEQ ID NO: 2939548 - DNA, 25 bp, Homo sapien
tggcggagattggtgggagacagat

SEQ ID NO: 2939549 - DNA, 25 bp, Homo sapien
gtagctctgggtgtaccgcggcagc

SEQ ID NO: 2939550 - DNA, 25 bp, Homo sapien
tagctctgggtgtaccgcggcagcg

SEQ ID NO: 2939551 - DNA, 25 bp, Homo sapien
ctcccaatccagctggcgcccgctc

SEQ ID NO: 2939552 - DNA, 25 bp, Homo sapien
ccccgagccgttcgcaggctcgcac

SEQ ID NO: 2939553 - DNA, 25 bp, Homo sapien
ctcctccgcagctcccctcgcagcc

SEQ ID NO: 2939554 - DNA, 25 bp, Homo sapien
caggctcgcacaaggggccggtttc

SEQ ID NO: 2939555 - DNA, 25 bp, Homo sapien
aagcagccctttgttgtgctaactt

SEQ ID NO: 2939556 - DNA, 25 bp, Homo sapien
aaagcagtaacaatagacaatccag

SEQ ID NO: 2939557 - DNA, 25 bp, Homo sapien
ttcactccaacaccaactgccctgg

SEQ ID NO: 2939558 - DNA, 25 bp, Homo sapien
aatcagacaggctgagaggcctgag

SEQ ID NO: 2939559 - DNA, 25 bp, Homo sapien
gggacagttgatgcccacaccatcc

SEQ ID NO: 2939560 - DNA, 25 bp, Homo sapien
gggaactaggccaacaaccttggca

SEQ ID NO: 2939561 - DNA, 25 bp, Homo sapien
ttcctggctcttagtagtgcctggg

SEQ ID NO: 2939562 - DNA, 25 bp, Homo sapien
cttagtagtgcctgggcaccacttc

SEQ ID NO: 2939563 - DNA, 25 bp, Homo sapien
acagacatgagtcacatagccccaa

SEQ ID NO: 2939564 - DNA, 25 bp, Homo sapien
gctggcatttaaaggtgcccacagc

SEQ ID NO: 2939565 - DNA, 25 bp, Homo sapien
gacatgagtcacatagccccaaatc

SEQ ID NO: 2939566 - DNA, 25 bp, Homo sapien
ctccggcacatgagactggctggca

SEQ ID NO: 2939567 - DNA, 25 bp, Homo sapien
tggccaaatcctccccagtgtctgg

SEQ ID NO: 2939568 - DNA, 25 bp, Homo sapien
ctccccagtgtctggctccatgccc

SEQ ID NO: 2939569 - DNA, 25 bp, Homo sapien
ccagtgtctggctccatgcccatca

SEQ ID NO: 2939570 - DNA, 25 bp, Homo sapien
tccccagtgtctggctccatgccca

SEQ ID NO: 2939571 - DNA, 25 bp, Homo sapien
gagggctgggcactatctcttcaga

SEQ ID NO: 2939572 - DNA, 25 bp, Homo sapien
gcctgaggacttgtcctgacagaca

SEQ ID NO: 2939573 - DNA, 25 bp, Homo sapien
gaggacttgtcctgacagacaaagc

SEQ ID NO: 2939574 - DNA, 25 bp, Homo sapien
cactatctcttcagaactgctgctc

SEQ ID NO: 2939575 - DNA, 25 bp, Homo sapien
ggtgacacgtgtacaccatgttctt

SEQ ID NO: 2939576 - DNA, 25 bp, Homo sapien
gtgacacgtgtacaccatgttcttc

SEQ ID NO: 2939577 - DNA, 25 bp, Homo sapien
cggtgacacgtgtacaccatgttct

SEQ ID NO: 2939578 - DNA, 25 bp, Homo sapien
ccagcctgagagtgggggacctggc

SEQ ID NO: 2939579 - DNA, 25 bp, Homo sapien
caagtggggagtagggctccccagc

SEQ ID NO: 2939580 - DNA, 25 bp, Homo sapien
gctgcagtctccctgggggtccctt

SEQ ID NO: 2939581 - DNA, 25 bp, Homo sapien
gtcccttgggactggctctgagcag

SEQ ID NO: 2939582 - DNA, 25 bp, Homo sapien
cagggaaggtttcctggtgcgcttt

SEQ ID NO: 2939583 - DNA, 25 bp, Homo sapien
tagctctcagagcactcgggcttgg

SEQ ID NO: 2939584 - DNA, 25 bp, Homo sapien
ttcttgtttcggtcgtttctcacag

SEQ ID NO: 2939585 - DNA, 25 bp, Homo sapien
gtgcgctttgcgcaccttctcaatg

SEQ ID NO: 2939586 - DNA, 25 bp, Homo sapien
atgtccagagagacacgttgttctg

SEQ ID NO: 2939587 - DNA, 25 bp, Homo sapien
cttgtcccagaggtcaatgtccaga

SEQ ID NO: 2939588 - DNA, 25 bp, Homo sapien
gtccagagagacacgttgttctgag

SEQ ID NO: 2939589 - DNA, 25 bp, Homo sapien
ctgaacttgtcccagaggtcaatgt

SEQ ID NO: 2939590 - DNA, 25 bp, Homo sapien
tgcttggcgaactccacagtcttaa

SEQ ID NO: 2939591 - DNA, 25 bp, Homo sapien
cagctgcttggcgaactccacagtc

SEQ ID NO: 2939592 - DNA, 25 bp, Homo sapien
gaactccacagtcttaatgatgcac

SEQ ID NO: 2939593 - DNA, 25 bp, Homo sapien
agggtgatctggtcggcgatggtga

SEQ ID NO: 2939594 - DNA, 25 bp, Homo sapien
tggtgtcctgctcgggcgtgtaccg

SEQ ID NO: 2939595 - DNA, 25 bp, Homo sapien
gggccgaagccagcgttgtgcatct

SEQ ID NO: 2939596 - DNA, 25 bp, Homo sapien
agctggttggcgaaggcaaagacca

SEQ ID NO: 2939597 - DNA, 25 bp, Homo sapien
cgtgtaccgcgtgcagatccgcagg

SEQ ID NO: 2939598 - DNA, 25 bp, Homo sapien
gcagcatgtccacccggtccggctg

SEQ ID NO: 2939599 - DNA, 25 bp, Homo sapien
tccgcttccgcacgtagacctttag

SEQ ID NO: 2939600 - DNA, 25 bp, Homo sapien
acgtagacctttagcgcctccagca

SEQ ID NO: 2939601 - DNA, 25 bp, Homo sapien
tgatgcttcgcaggtcagtaatctt

SEQ ID NO: 2939602 - DNA, 25 bp, Homo sapien
atcttcagcgtgatcacccgctcag

SEQ ID NO: 2939603 - DNA, 25 bp, Homo sapien
gcggcatggagcccgggatctccat

SEQ ID NO: 2939604 - DNA, 25 bp, Homo sapien
acatttcctggatgagaggcggcat

SEQ ID NO: 2939605 - DNA, 25 bp, Homo sapien
ccggctgtccgctcagagtgtccag

SEQ ID NO: 2939606 - DNA, 25 bp, Homo sapien
gctgcctggcgggggggccaggcca

SEQ ID NO: 2939607 - DNA, 25 bp, Homo sapien
ctgcctggcgggggggccaggccac

SEQ ID NO: 2939608 - DNA, 25 bp, Homo sapien
agctgcctggcgggggggccaggcc

SEQ ID NO: 2939609 - DNA, 25 bp, Homo sapien
ggccgggctgcttctgttggagctg

SEQ ID NO: 2939610 - DNA, 25 bp, Homo sapien
ggtggccgggctgcttctgttggag

SEQ ID NO: 2939611 - DNA, 25 bp, Homo sapien
cacggggagtgggtggccgggctgc

SEQ ID NO: 2939612 - DNA, 25 bp, Homo sapien
cggggagtgggtggccgggctgctt

SEQ ID NO: 2939613 - DNA, 25 bp, Homo sapien
ggtgtcttgatgaacacgaggcccc

SEQ ID NO: 2939614 - DNA, 25 bp, Homo sapien
cacatggtcggtagaaaggcagaga

SEQ ID NO: 2939615 - DNA, 25 bp, Homo sapien
tctgtccaaggagtcgctgcctcct

SEQ ID NO: 2939616 - DNA, 25 bp, Homo sapien
gtccccagtactgcccgggagggca

SEQ ID NO: 2939617 - DNA, 25 bp, Homo sapien
agcaatggcttgtgagttctgagga

SEQ ID NO: 2939618 - DNA, 25 bp, Homo sapien
cttcagtataaatgtgcttaaaatg

SEQ ID NO: 2939619 - DNA, 25 bp, Homo sapien
ctctgtcaccaaccgaggcaggggg

SEQ ID NO: 2939620 - DNA, 25 bp, Homo sapien
aaaccagcgagaattaatacctggg

SEQ ID NO: 2939621 - DNA, 25 bp, Homo sapien
tgaggaggaaaaggctgaggaggag

SEQ ID NO: 2939622 - DNA, 25 bp, Homo sapien
aggaggaaaaggctgaggaggagaa

SEQ ID NO: 2939623 - DNA, 25 bp, Homo sapien
ctgaggaggaaaaggctgaggagga

SEQ ID NO: 2939624 - DNA, 25 bp, Homo sapien
gaggaggaaaaggctgaggaggaga

SEQ ID NO: 2939625 - DNA, 25 bp, Homo sapien
tagtacttcacagttttaaagagaa

SEQ ID NO: 2939626 - DNA, 25 bp, Homo sapien
ttagtacttcacagttttaaagaga

SEQ ID NO: 2939627 - DNA, 25 bp, Homo sapien
tgtcggcccatctactgtccagtgt

SEQ ID NO: 2939628 - DNA, 25 bp, Homo sapien
gagcctagatgatgtgggccctgac

SEQ ID NO: 2939629 - DNA, 25 bp, Homo sapien
aactcgggccaagtgtgtgtcggcc

SEQ ID NO: 2939630 - DNA, 25 bp, Homo sapien
ggccaagtgtgtgtcggcccatcta

SEQ ID NO: 2939631 - DNA, 25 bp, Homo sapien
gtggaaagcccaacagtaacaggtg

SEQ ID NO: 2939632 - DNA, 25 bp, Homo sapien
cagtagatctcagtggaaagcccaa

SEQ ID NO: 2939633 - DNA, 25 bp, Homo sapien
ttctttatccagtagatctcagtgg

SEQ ID NO: 2939634 - DNA, 25 bp, Homo sapien
acagtaacaggtgcacccacgggct

SEQ ID NO: 2939635 - DNA, 25 bp, Homo sapien
tctgcgagtgtgcatacacggacac

SEQ ID NO: 2939636 - DNA, 25 bp, Homo sapien
cggagaatgaactcaggcaggtcct

SEQ ID NO: 2939637 - DNA, 25 bp, Homo sapien
aactgtgatgccagcattctcaggc

SEQ ID NO: 2939638 - DNA, 25 bp, Homo sapien
cacggacacataagcactgtgagct

SEQ ID NO: 2939639 - DNA, 25 bp, Homo sapien
ccaagaaaggagtggtctcgctgcc

SEQ ID NO: 2939640 - DNA, 25 bp, Homo sapien
gaaggtaacccatagctgagcgtcg

SEQ ID NO: 2939641 - DNA, 25 bp, Homo sapien
ggctatgtagagagaccccgttcca

SEQ ID NO: 2939642 - DNA, 25 bp, Homo sapien
accaaattgggtctagcgtctcggg

SEQ ID NO: 2939643 - DNA, 25 bp, Homo sapien
ccaagggctcactgccagcggcgat

SEQ ID NO: 2939644 - DNA, 25 bp, Homo sapien
gaaggcgacacagcccaagggctca

SEQ ID NO: 2939645 - DNA, 25 bp, Homo sapien
ggctcactgccagcggcgatgttga

SEQ ID NO: 2939646 - DNA, 25 bp, Homo sapien
agggctcactgccagcggcgatgtt

SEQ ID NO: 2939647 - DNA, 25 bp, Homo sapien
tctcatcatcagatttctccctgca

SEQ ID NO: 2939648 - DNA, 25 bp, Homo sapien
atcatcagatttctccctgcagatg

SEQ ID NO: 2939649 - DNA, 25 bp, Homo sapien
gtgccattatggcgtgtgaagccac

SEQ ID NO: 2939650 - DNA, 25 bp, Homo sapien
tcatcatcagatttctccctgcaga

SEQ ID NO: 2939651 - DNA, 25 bp, Homo sapien
ggaacggtttgtgttgggtccagca

SEQ ID NO: 2939652 - DNA, 25 bp, Homo sapien
ggtttgtgttgggtccagcatttgc

SEQ ID NO: 2939653 - DNA, 25 bp, Homo sapien
gaacggtttgtgttgggtccagcat

SEQ ID NO: 2939654 - DNA, 25 bp, Homo sapien
ttgtgttgggtccagcatttgccat

SEQ ID NO: 2939655 - DNA, 25 bp, Homo sapien
aaagcgctccctggcctctgcaata

SEQ ID NO: 2939656 - DNA, 25 bp, Homo sapien
gacccaaagcgctccctggcctctg

SEQ ID NO: 2939657 - DNA, 25 bp, Homo sapien
gctccctggcctctgcaatattcat

SEQ ID NO: 2939658 - DNA, 25 bp, Homo sapien
ccctggcctctgcaatattcatgcc

SEQ ID NO: 2939659 - DNA, 25 bp, Homo sapien
tttggaattgttgttccatccaaac

SEQ ID NO: 2939660 - DNA, 25 bp, Homo sapien
ttggaattgttgttccatccaaacc

SEQ ID NO: 2939661 - DNA, 25 bp, Homo sapien
gtttggaattgttgttccatccaaa

SEQ ID NO: 2939662 - DNA, 25 bp, Homo sapien
gatctcggagtactctccatcccag

SEQ ID NO: 2939663 - DNA, 25 bp, Homo sapien
agggatctcggagtactctccatcc

SEQ ID NO: 2939664 - DNA, 25 bp, Homo sapien
gcagggatctcggagtactctccat

SEQ ID NO: 2939665 - DNA, 25 bp, Homo sapien
ggatctcggagtactctccatccca

SEQ ID NO: 2939666 - DNA, 25 bp, Homo sapien
tgagtctgaatctcccaaagagaga

SEQ ID NO: 2939667 - DNA, 25 bp, Homo sapien
tcatcagaggccgaagaaaaacact

SEQ ID NO: 2939668 - DNA, 25 bp, Homo sapien
tacactcagcctcttatgtgccaag

SEQ ID NO: 2939669 - DNA, 25 bp, Homo sapien
caatttctaagaggactggattgca

SEQ ID NO: 2939670 - DNA, 25 bp, Homo sapien
ctggaagagtcagatgaagatgatc

SEQ ID NO: 2939671 - DNA, 25 bp, Homo sapien
ggagagtgatgacttccatatggac

SEQ ID NO: 2939672 - DNA, 25 bp, Homo sapien
atatggactttgactcagctgtggc

SEQ ID NO: 2939673 - DNA, 25 bp, Homo sapien
tcctcgggcaaaatctgtacgggca

SEQ ID NO: 2939674 - DNA, 25 bp, Homo sapien
tccacctccactaccggtgccaaaa

SEQ ID NO: 2939675 - DNA, 25 bp, Homo sapien
aaattgtttcgaaagcagtcacaag

SEQ ID NO: 2939676 - DNA, 25 bp, Homo sapien
caagaatcgccgcaaaaggaagcca

SEQ ID NO: 2939677 - DNA, 25 bp, Homo sapien
caaaaccaagaatcgccgcaaaagg

SEQ ID NO: 2939678 - DNA, 25 bp, Homo sapien
tgaagctgatgatgttaagggcagt

SEQ ID NO: 2939679 - DNA, 25 bp, Homo sapien
gctgatgatgttaagggcagtgtac

SEQ ID NO: 2939680 - DNA, 25 bp, Homo sapien
tgttaagggcagtgtaccactgtct

SEQ ID NO: 2939681 - DNA, 25 bp, Homo sapien
cccagttcctaaaaagaatgtgaca

SEQ ID NO: 2939682 - DNA, 25 bp, Homo sapien
gaaaccacagaaaagtgtcgtgtca

SEQ ID NO: 2939683 - DNA, 25 bp, Homo sapien
aaaccacagaaaagtgtcgtgtcag

SEQ ID NO: 2939684 - DNA, 25 bp, Homo sapien
caaaattcacaatggatttggattc

SEQ ID NO: 2939685 - DNA, 25 bp, Homo sapien
aattcacaatggatttggattcaga

SEQ ID NO: 2939686 - DNA, 25 bp, Homo sapien
gatgaagattttgtcccatcagatg

SEQ ID NO: 2939687 - DNA, 25 bp, Homo sapien
gatgctagtccacctaagaccaaaa

SEQ ID NO: 2939688 - DNA, 25 bp, Homo sapien
cagataggagcagtgacgaaagtaa

SEQ ID NO: 2939689 - DNA, 25 bp, Homo sapien
aacaaactacattggcatttaagcc

SEQ ID NO: 2939690 - DNA, 25 bp, Homo sapien
agagaaatccctggtctgattcaga

SEQ ID NO: 2939691 - DNA, 25 bp, Homo sapien
aaagtaattttgatgtccctccacg

SEQ ID NO: 2939692 - DNA, 25 bp, Homo sapien
tgaaaatactgaaggaagccctcaa

SEQ ID NO: 2939693 - DNA, 25 bp, Homo sapien
tgtggaactagaaggcctaaaacaa

SEQ ID NO: 2939694 - DNA, 25 bp, Homo sapien
tgaaggaagccctcaagaagatggt

SEQ ID NO: 2939695 - DNA, 25 bp, Homo sapien
aagaagatggtgtggaactagaagg

SEQ ID NO: 2939696 - DNA, 25 bp, Homo sapien
cattccacgaataaccatagaaatg

SEQ ID NO: 2939697 - DNA, 25 bp, Homo sapien
tggtcaaagagtcattccacgaata

SEQ ID NO: 2939698 - DNA, 25 bp, Homo sapien
tgaacaagtcggacttcctgggaaa

SEQ ID NO: 2939699 - DNA, 25 bp, Homo sapien
gaagttttgccttctccgcgtggtc

SEQ ID NO: 2939700 - DNA, 25 bp, Homo sapien
aaagaagacttggctacatttattg

SEQ ID NO: 2939701 - DNA, 25 bp, Homo sapien
ccgaaatcgtgccatcacattccac

SEQ ID NO: 2939702 - DNA, 25 bp, Homo sapien
gaggttgtgggagccgaaatcgtgc

SEQ ID NO: 2939703 - DNA, 25 bp, Homo sapien
tggatttgaacagaccttttttgat

SEQ ID NO: 2939704 - DNA, 25 bp, Homo sapien
caaatacaggttaagtgagtctgga

SEQ ID NO: 2939705 - DNA, 25 bp, Homo sapien
cgcccagcctaacagttcttttgaa

SEQ ID NO: 2939706 - DNA, 25 bp, Homo sapien
aattgccagtaggtcagtcataata

SEQ ID NO: 2939707 - DNA, 25 bp, Homo sapien
tcttctatgttgtgtcttaaacttg

SEQ ID NO: 2939708 - DNA, 25 bp, Homo sapien
tggcctcacttgatccaccatcctc

SEQ ID NO: 2939709 - DNA, 25 bp, Homo sapien
cacccagctatgtctgtcttctatg

SEQ ID NO: 2939710 - DNA, 25 bp, Homo sapien
gcctcacttgatccaccatcctcgg

SEQ ID NO: 2939711 - DNA, 25 bp, Homo sapien
catattctccattcccggttccggg

SEQ ID NO: 2939712 - DNA, 25 bp, Homo sapien
tccagggtgtcgtgcgttgttgccc

SEQ ID NO: 2939713 - DNA, 25 bp, Homo sapien
agtagtgaagtatgacccggcttcc

SEQ ID NO: 2939714 - DNA, 25 bp, Homo sapien
gaagccccttctggtgctagtagtg

SEQ ID NO: 2939715 - DNA, 25 bp, Homo sapien
gggttcagccccgatgggcttgagc

SEQ ID NO: 2939716 - DNA, 25 bp, Homo sapien
agggttcagccccgatgggcttgag

SEQ ID NO: 2939717 - DNA, 25 bp, Homo sapien
gttcagccccgatgggcttgagctc

SEQ ID NO: 2939718 - DNA, 25 bp, Homo sapien
ggttcagccccgatgggcttgagct

SEQ ID NO: 2939719 - DNA, 25 bp, Homo sapien
tgcagaagttcctcggtgatgacct

SEQ ID NO: 2939720 - DNA, 25 bp, Homo sapien
taaactggccctgattgccttggag

SEQ ID NO: 2939721 - DNA, 25 bp, Homo sapien
gataacgtcggagggaagacgctcc

SEQ ID NO: 2939722 - DNA, 25 bp, Homo sapien
tgtcagatgggagggctactttacc

SEQ ID NO: 2939723 - DNA, 25 bp, Homo sapien
cataagcagaggcttgtgtggacat

SEQ ID NO: 2939724 - DNA, 25 bp, Homo sapien
ctgctggtacagtcatccctggctt

SEQ ID NO: 2939725 - DNA, 25 bp, Homo sapien
aagaggatgcagcaaactgctggta

SEQ ID NO: 2939726 - DNA, 25 bp, Homo sapien
tccctggcttccataggggcataag

SEQ ID NO: 2939727 - DNA, 25 bp, Homo sapien
acacccctacttctgtggttcacat

SEQ ID NO: 2939728 - DNA, 25 bp, Homo sapien
ggcatatgttggactggctcctgat

SEQ ID NO: 2939729 - DNA, 25 bp, Homo sapien
tgccaacaaaattgggatcgtctaa

SEQ ID NO: 2939730 - DNA, 25 bp, Homo sapien
ctaaactgagtccagctgtccaatt

SEQ ID NO: 2939731 - DNA, 25 bp, Homo sapien
agaagaaggcatatgttggactggc

SEQ ID NO: 2939732 - DNA, 25 bp, Homo sapien
gctatcactaagtttccactgacca

SEQ ID NO: 2939733 - DNA, 25 bp, Homo sapien
atcactaagtttccactgaccactg

SEQ ID NO: 2939734 - DNA, 25 bp, Homo sapien
tatgctatcactaagtttccactga

SEQ ID NO: 2939735 - DNA, 25 bp, Homo sapien
ctatgctatcactaagtttccactg

SEQ ID NO: 2939736 - DNA, 25 bp, Homo sapien
atgattgcagggagattgggactgg

SEQ ID NO: 2939737 - DNA, 25 bp, Homo sapien
gatgattgcagggagattgggactg

SEQ ID NO: 2939738 - DNA, 25 bp, Homo sapien
gattgcagggagattgggactggca

SEQ ID NO: 2939739 - DNA, 25 bp, Homo sapien
tgattgcagggagattgggactggc

SEQ ID NO: 2939740 - DNA, 25 bp, Homo sapien
gcgctgcgccgcatcctcggcccgg

SEQ ID NO: 2939741 - DNA, 25 bp, Homo sapien
gcggagggcacacggcggcagcgcc

SEQ ID NO: 2939742 - DNA, 25 bp, Homo sapien
gacgtagcgggggaagttagcaggc

SEQ ID NO: 2939743 - DNA, 25 bp, Homo sapien
cgtgccggaggggagcaagcctggc

SEQ ID NO: 2939744 - DNA, 25 bp, Homo sapien
gagcagggcgggcagtggatggctt

SEQ ID NO: 2939745 - DNA, 25 bp, Homo sapien
aagcccagggcgcaagtggcgcaac

SEQ ID NO: 2939746 - DNA, 25 bp, Homo sapien
gggcgggtagcagcgcaggcccgag

SEQ ID NO: 2939747 - DNA, 25 bp, Homo sapien
tggatggcttcgtcgcccaggctcg

SEQ ID NO: 2939748 - DNA, 25 bp, Homo sapien
cttctcttcaactcataggggattt

SEQ ID NO: 2939749 - DNA, 25 bp, Homo sapien
tctcttcaactcataggggattttt

SEQ ID NO: 2939750 - DNA, 25 bp, Homo sapien
tcttcaactcataggggatttttaa

SEQ ID NO: 2939751 - DNA, 25 bp, Homo sapien
gccttctcttcaactcataggggat

SEQ ID NO: 2939752 - DNA, 25 bp, Homo sapien
catccggactgcaacaatggaagct

SEQ ID NO: 2939753 - DNA, 25 bp, Homo sapien
aacgtgactctgttgtaccccgcga

SEQ ID NO: 2939754 - DNA, 25 bp, Homo sapien
gaggtattcctacccagccctttga

SEQ ID NO: 2939755 - DNA, 25 bp, Homo sapien
tggagtattcctacccaaccagagg

SEQ ID NO: 2939756 - DNA, 25 bp, Homo sapien
gtgtcatccaaaggggacctaaagc

SEQ ID NO: 2939757 - DNA, 25 bp, Homo sapien
tgtcatccaaaggggacctaaagcc

SEQ ID NO: 2939758 - DNA, 25 bp, Homo sapien
gtcatccaaaggggacctaaagcca

SEQ ID NO: 2939759 - DNA, 25 bp, Homo sapien
tcatccaaaggggacctaaagccac

SEQ ID NO: 2939760 - DNA, 25 bp, Homo sapien
ccaggtcacagcaagggattacttc

SEQ ID NO: 2939761 - DNA, 25 bp, Homo sapien
cagaaaaaatagacaggtaccctcg

SEQ ID NO: 2939762 - DNA, 25 bp, Homo sapien
tcgaccaagctattcgcgggccagt

SEQ ID NO: 2939763 - DNA, 25 bp, Homo sapien
ttgggacctaaagcagacagtggcc

SEQ ID NO: 2939764 - DNA, 25 bp, Homo sapien
gaaaggggagatctgcccctggggc

SEQ ID NO: 2939765 - DNA, 25 bp, Homo sapien
ggtggctggagacggaaaggggaga

SEQ ID NO: 2939766 - DNA, 25 bp, Homo sapien
ggctggagacggaaaggggagatct

SEQ ID NO: 2939767 - DNA, 25 bp, Homo sapien
ggagatctgcccctggggcaaacag

SEQ ID NO: 2939768 - DNA, 25 bp, Homo sapien
gtggacttttgatgcacacgccccg

SEQ ID NO: 2939769 - DNA, 25 bp, Homo sapien
tattgagctcttacccgatgccaga

SEQ ID NO: 2939770 - DNA, 25 bp, Homo sapien
taaaaatgggaagcggccatgctcc

SEQ ID NO: 2939771 - DNA, 25 bp, Homo sapien
gaaagactcctgatacccgaggcac

SEQ ID NO: 2939772 - DNA, 25 bp, Homo sapien
taggctatgaactgagtgggcccag

SEQ ID NO: 2939773 - DNA, 25 bp, Homo sapien
ggccctcgagagacacctaggctat

SEQ ID NO: 2939774 - DNA, 25 bp, Homo sapien
tggagaagccaagaccgctggtgct

SEQ ID NO: 2939775 - DNA, 25 bp, Homo sapien
ccagaagtttcagctgtgatccaga

SEQ ID NO: 2939776 - DNA, 25 bp, Homo sapien
gagtggagtcagacctattcccctg

SEQ ID NO: 2939777 - DNA, 25 bp, Homo sapien
tacagcgcccagcttggagctaagc

SEQ ID NO: 2939778 - DNA, 25 bp, Homo sapien
taactggcagactgaagagccaccc

SEQ ID NO: 2939779 - DNA, 25 bp, Homo sapien
ggaaacctcggtctttgctccagca

SEQ ID NO: 2939780 - DNA, 25 bp, Homo sapien
ccacatgcacttgggcactctgacc

SEQ ID NO: 2939781 - DNA, 25 bp, Homo sapien
cacatgcacttgggcactctgaccc

SEQ ID NO: 2939782 - DNA, 25 bp, Homo sapien
tatggccccatgtcacatcagaggg

SEQ ID NO: 2939783 - DNA, 25 bp, Homo sapien
cggagtagcacccaccagataggga

SEQ ID NO: 2939784 - DNA, 25 bp, Homo sapien
gttacctacgaaaagctaagccagc

SEQ ID NO: 2939785 - DNA, 25 bp, Homo sapien
tatgctcttgggttggtatggcccc

SEQ ID NO: 2939786 - DNA, 25 bp, Homo sapien
tggaatagaagcatgaccacaacta

SEQ ID NO: 2939787 - DNA, 25 bp, Homo sapien
aagtgtggagaattagggtggtagc

SEQ ID NO: 2939788 - DNA, 25 bp, Homo sapien
tctcaagagatatggaatagaagca

SEQ ID NO: 2939789 - DNA, 25 bp, Homo sapien
catgaccacaactatgctttccatg

SEQ ID NO: 2939790 - DNA, 25 bp, Homo sapien
ttgcacaaagccataaggcttgagg

SEQ ID NO: 2939791 - DNA, 25 bp, Homo sapien
gccataaggcttgaggatggagtca

SEQ ID NO: 2939792 - DNA, 25 bp, Homo sapien
tgaggatggagtcaccgtgtttcag

SEQ ID NO: 2939793 - DNA, 25 bp, Homo sapien
taaggcttgaggatggagtcaccgt

SEQ ID NO: 2939794 - DNA, 25 bp, Homo sapien
ccagatggcaggagggtcccctggg

SEQ ID NO: 2939795 - DNA, 25 bp, Homo sapien
gcccagatggcaggagggtcccctg

SEQ ID NO: 2939796 - DNA, 25 bp, Homo sapien
ctgcccagatggcaggagggtcccc

SEQ ID NO: 2939797 - DNA, 25 bp, Homo sapien
cagatggcaggagggtcccctgggc

SEQ ID NO: 2939798 - DNA, 25 bp, Homo sapien
gatctctcaggagaatattcctctt

SEQ ID NO: 2939799 - DNA, 25 bp, Homo sapien
tgaagtccttgacttgtccctcacc

SEQ ID NO: 2939800 - DNA, 25 bp, Homo sapien
caggccagcgctcagatgagtcacc

SEQ ID NO: 2939801 - DNA, 25 bp, Homo sapien
ctcaggccagcgctcagatgagtca

SEQ ID NO: 2939802 - DNA, 25 bp, Homo sapien
tcctggggattcttcggcttggcgc

SEQ ID NO: 2939803 - DNA, 25 bp, Homo sapien
gggattcttcggcttggcgctggag

SEQ ID NO: 2939804 - DNA, 25 bp, Homo sapien
ggattcttcggcttggcgctggaga

SEQ ID NO: 2939805 - DNA, 25 bp, Homo sapien
tggggattcttcggcttggcgctgg

SEQ ID NO: 2939806 - DNA, 25 bp, Homo sapien
cgaagtgcttctgcaggcacctgcg

SEQ ID NO: 2939807 - DNA, 25 bp, Homo sapien
tcgaattttggcgaagtgcttctgc

SEQ ID NO: 2939808 - DNA, 25 bp, Homo sapien
gcacctgcggtcatgggcgctacag

SEQ ID NO: 2939809 - DNA, 25 bp, Homo sapien
cccactggtgctccggtctcgaatt

SEQ ID NO: 2939810 - DNA, 25 bp, Homo sapien
tgtgtgctgaatgaacacgccccag

SEQ ID NO: 2939811 - DNA, 25 bp, Homo sapien
cacatttgtgcatcggaggtcctta

SEQ ID NO: 2939812 - DNA, 25 bp, Homo sapien
ggtcctgatgactcacactagttgc

SEQ ID NO: 2939813 - DNA, 25 bp, Homo sapien
cagtagtcaccctagaatgtgtgct

SEQ ID NO: 2939814 - DNA, 25 bp, Homo sapien
tagaggtcctcgtgggtgcggctct

SEQ ID NO: 2939815 - DNA, 25 bp, Homo sapien
ggatgatgtagaggtcctcgtgggt

SEQ ID NO: 2939816 - DNA, 25 bp, Homo sapien
cggctctgtgaagcggccagccgct

SEQ ID NO: 2939817 - DNA, 25 bp, Homo sapien
tggaagttgccgttgcggtcgcagt

SEQ ID NO: 2939818 - DNA, 25 bp, Homo sapien
tacattgaaaccctgtactcttgct

SEQ ID NO: 2939819 - DNA, 25 bp, Homo sapien
gggtggatgacagtacattgaaacc

SEQ ID NO: 2939820 - DNA, 25 bp, Homo sapien
gcctgggagactgagatcctgcctt

SEQ ID NO: 2939821 - DNA, 25 bp, Homo sapien
gcctgacatagttgtgtgcctgtgg

SEQ ID NO: 2939822 - DNA, 25 bp, Homo sapien
acaccagcacttgccacgctgccca

SEQ ID NO: 2939823 - DNA, 25 bp, Homo sapien
cacttgccacgctgcccatccagag

SEQ ID NO: 2939824 - DNA, 25 bp, Homo sapien
ggctccaggccccccggaagcttca

SEQ ID NO: 2939825 - DNA, 25 bp, Homo sapien
tctcgaaagctgtcagccagctggt

SEQ ID NO: 2939826 - DNA, 25 bp, Homo sapien
cacacgtgcacacgcgcatttgagg

SEQ ID NO: 2939827 - DNA, 25 bp, Homo sapien
catttgagggaaacttctgggccgc

SEQ ID NO: 2939828 - DNA, 25 bp, Homo sapien
caaggctgaaaactagagctggcac

SEQ ID NO: 2939829 - DNA, 25 bp, Homo sapien
aatgagatttttctactcccacagg

SEQ ID NO: 2939830 - DNA, 25 bp, Homo sapien
catcatggccaactggtaggttcct

SEQ ID NO: 2939831 - DNA, 25 bp, Homo sapien
cgtgggtcttctccattaggcacat

SEQ ID NO: 2939832 - DNA, 25 bp, Homo sapien
ggttcatcccggtgacttcatggct

SEQ ID NO: 2939833 - DNA, 25 bp, Homo sapien
tgcaacaaccagacctaaaggaagg

SEQ ID NO: 2939834 - DNA, 25 bp, Homo sapien
tgcccaccaggagtctaagtaaaga

SEQ ID NO: 2939835 - DNA, 25 bp, Homo sapien
agtccgcccgatgccctaggaaatg

SEQ ID NO: 2939836 - DNA, 25 bp, Homo sapien
acatgccagctgatcccagagacag

SEQ ID NO: 2939837 - DNA, 25 bp, Homo sapien
cccctttcaggagccattgtttgcc

SEQ ID NO: 2939838 - DNA, 25 bp, Homo sapien
tgctgacacccctgtggcaactaga

SEQ ID NO: 2939839 - DNA, 25 bp, Homo sapien
cacctaatgagcgagagtccagtca

SEQ ID NO: 2939840 - DNA, 25 bp, Homo sapien
ggagggcctagctgcaaacaagaag

SEQ ID NO: 2939841 - DNA, 25 bp, Homo sapien
caggcgtgctccgtgaatgtctcac

SEQ ID NO: 2939842 - DNA, 25 bp, Homo sapien
cctcgtaacattcctggagcagctt

SEQ ID NO: 2939843 - DNA, 25 bp, Homo sapien
tacagcggggttaggacaaccagcc

SEQ ID NO: 2939844 - DNA, 25 bp, Homo sapien
atcccaaatcctgcatgcctcgtaa

SEQ ID NO: 2939845 - DNA, 25 bp, Homo sapien
aaagaggaccgagcaggcatcccaa

SEQ ID NO: 2939846 - DNA, 25 bp, Homo sapien
gctcactcggtagagcatgtttcta

SEQ ID NO: 2939847 - DNA, 25 bp, Homo sapien
ggacaggtcactctggaagtgagga

SEQ ID NO: 2939848 - DNA, 25 bp, Homo sapien
gaggatctaattagacccttggttg

SEQ ID NO: 2939849 - DNA, 25 bp, Homo sapien
caaccctggagcttcagatacaaga

SEQ ID NO: 2939850 - DNA, 25 bp, Homo sapien
aagccaatcccaccgagttgctgct

SEQ ID NO: 2939851 - DNA, 25 bp, Homo sapien
tttcagcttaatggctctgttttta

SEQ ID NO: 2939852 - DNA, 25 bp, Homo sapien
aatactatagcatggcaaaaatatg

SEQ ID NO: 2939853 - DNA, 25 bp, Homo sapien
tagagactgtgtaagggcctaggaa

SEQ ID NO: 2939854 - DNA, 25 bp, Homo sapien
tttccaatcaggagaacaggttccc

SEQ ID NO: 2939855 - DNA, 25 bp, Homo sapien
catcaggtaaggtagcaaactgccc

SEQ ID NO: 2939856 - DNA, 25 bp, Homo sapien
gaagccgaggcgaaggaaatgacct

SEQ ID NO: 2939857 - DNA, 25 bp, Homo sapien
gaaatgaccttaaggctactccagg

SEQ ID NO: 2939858 - DNA, 25 bp, Homo sapien
gattctgggagctcgagttctgtgc

SEQ ID NO: 2939859 - DNA, 25 bp, Homo sapien
tgggctgtaggaatcacccgcccct

SEQ ID NO: 2939860 - DNA, 25 bp, Homo sapien
ccagagcagacctcggaaggctttt

SEQ ID NO: 2939861 - DNA, 25 bp, Homo sapien
tattgtaacataaacccctgtgggc

SEQ ID NO: 2939862 - DNA, 25 bp, Homo sapien
tggagaaactcggagagagctctac

SEQ ID NO: 2939863 - DNA, 25 bp, Homo sapien
tacacagggtcctaaccagatgcct

SEQ ID NO: 2939864 - DNA, 25 bp, Homo sapien
aggttggcagcatcacactaaaggg

SEQ ID NO: 2939865 - DNA, 25 bp, Homo sapien
gattctttacctaggatggtcaggg

SEQ ID NO: 2939866 - DNA, 25 bp, Homo sapien
tcagcatgcgagtttgacgggacac

SEQ ID NO: 2939867 - DNA, 25 bp, Homo sapien
gattagaatctcacccttgtggcct

SEQ ID NO: 2939868 - DNA, 25 bp, Homo sapien
ggagggcaagcaacacacactcatt

SEQ ID NO: 2939869 - DNA, 25 bp, Homo sapien
ccaggtttggataaggactctcttc

SEQ ID NO: 2939870 - DNA, 25 bp, Homo sapien
gaaacaggatttcaagtccatgccc

SEQ ID NO: 2939871 - DNA, 25 bp, Homo sapien
tatgcagtgcatggtcatacatggc

SEQ ID NO: 2939872 - DNA, 25 bp, Homo sapien
tggagacattcgtgtgtgaagcaca

SEQ ID NO: 2939873 - DNA, 25 bp, Homo sapien
tggtgtggctcaagtacatggtacc

SEQ ID NO: 2939874 - DNA, 25 bp, Homo sapien
gaatccatccgtttggaggcagcct

SEQ ID NO: 2939875 - DNA, 25 bp, Homo sapien
tccaacaatgtctgccaggcaaggc

SEQ ID NO: 2939876 - DNA, 25 bp, Homo sapien
tctgggctccataggccactgtcct

SEQ ID NO: 2939877 - DNA, 25 bp, Homo sapien
tcaggcctcaaatcccaggctctgg

SEQ ID NO: 2939878 - DNA, 25 bp, Homo sapien
tggtgagttctcttacctcgaaatg

SEQ ID NO: 2939879 - DNA, 25 bp, Homo sapien
tattcagagtggaggatcccctgcc

SEQ ID NO: 2939880 - DNA, 25 bp, Homo sapien
gacactctgacattaccgtgctagg

SEQ ID NO: 2939881 - DNA, 25 bp, Homo sapien
tggcctatagcagtgtacaactctg

SEQ ID NO: 2939882 - DNA, 25 bp, Homo sapien
tctaaaccttcggatcccagagtcc

SEQ ID NO: 2939883 - DNA, 25 bp, Homo sapien
ggtcagagtcacaccataaggagct

SEQ ID NO: 2939884 - DNA, 25 bp, Homo sapien
tccataacactctctgggagggtgc

SEQ ID NO: 2939885 - DNA, 25 bp, Homo sapien
ggagcacctcactggttccataaca

SEQ ID NO: 2939886 - DNA, 25 bp, Homo sapien
tctcccacaatcatgagccacagcc

SEQ ID NO: 2939887 - DNA, 25 bp, Homo sapien
cactctcccacaatcatgagccaca

SEQ ID NO: 2939888 - DNA, 25 bp, Homo sapien
ctcccactctcccacaatcatgagc

SEQ ID NO: 2939889 - DNA, 25 bp, Homo sapien
actctcccacaatcatgagccacag

SEQ ID NO: 2939890 - DNA, 25 bp, Homo sapien
ggagacaggtattcttaggaccaca

SEQ ID NO: 2939891 - DNA, 25 bp, Homo sapien
caggtattcttaggaccacaggacc

SEQ ID NO: 2939892 - DNA, 25 bp, Homo sapien
aggttctggccctgagtccagggag

SEQ ID NO: 2939893 - DNA, 25 bp, Homo sapien
ccagggagacaggtattcttaggac

SEQ ID NO: 2939894 - DNA, 25 bp, Homo sapien
ccccgcctatctgtttctgggcaca

SEQ ID NO: 2939895 - DNA, 25 bp, Homo sapien
tcctccaaggacagcgagaggtcca

SEQ ID NO: 2939896 - DNA, 25 bp, Homo sapien
aggtaccgatgcctccaagagcagc

SEQ ID NO: 2939897 - DNA, 25 bp, Homo sapien
ggcaagcccaaggacggcagtgccc

SEQ ID NO: 2939898 - DNA, 25 bp, Homo sapien
gccatgcaggatcgcacacgagctg

SEQ ID NO: 2939899 - DNA, 25 bp, Homo sapien
ctagggccatgcaggatcgcacacg

SEQ ID NO: 2939900 - DNA, 25 bp, Homo sapien
cagcgtctggacagacggtccagca

SEQ ID NO: 2939901 - DNA, 25 bp, Homo sapien
tgcaggatcgcacacgagctggccg

SEQ ID NO: 2939902 - DNA, 25 bp, Homo sapien
gagttcctcagctcggttcctggca

SEQ ID NO: 2939903 - DNA, 25 bp, Homo sapien
ggcggcggcgactgaagtcttggca

SEQ ID NO: 2939904 - DNA, 25 bp, Homo sapien
tcaaatgagattcccgtggtttcct

SEQ ID NO: 2939905 - DNA, 25 bp, Homo sapien
ggtgaccccattgcattcctgtggt

SEQ ID NO: 2939906 - DNA, 25 bp, Homo sapien
gaccccatgcgatgcaggcccaagg

SEQ ID NO: 2939907 - DNA, 25 bp, Homo sapien
atagcagaccccatgcgatgcaggc

SEQ ID NO: 2939908 - DNA, 25 bp, Homo sapien
tcacaaaatagcagaccccatgcga

SEQ ID NO: 2939909 - DNA, 25 bp, Homo sapien
caaaatagcagaccccatgcgatgc

SEQ ID NO: 2939910 - DNA, 25 bp, Homo sapien
aagctaaggtgaccccactggacag

SEQ ID NO: 2939911 - DNA, 25 bp, Homo sapien
gctggatagagccaccaagtacagg

SEQ ID NO: 2939912 - DNA, 25 bp, Homo sapien
tgaaccacgatgacactcattccca

SEQ ID NO: 2939913 - DNA, 25 bp, Homo sapien
gagccaccaagtacaggtgacatgt

SEQ ID NO: 2939914 - DNA, 25 bp, Homo sapien
ctacaggaggttagaacagtagggc

SEQ ID NO: 2939915 - DNA, 25 bp, Homo sapien
ggtcagggacatctttgctgcagag

SEQ ID NO: 2939916 - DNA, 25 bp, Homo sapien
cagtagggccccaactggtctgggc

SEQ ID NO: 2939917 - DNA, 25 bp, Homo sapien
tcagggacatctttgctgcagagag

SEQ ID NO: 2939918 - DNA, 25 bp, Homo sapien
gaagaaaggattccggcatccacct

SEQ ID NO: 2939919 - DNA, 25 bp, Homo sapien
attagtctgcacttactggtaagct

SEQ ID NO: 2939920 - DNA, 25 bp, Homo sapien
tgaagaaaggattccggcatccacc

SEQ ID NO: 2939921 - DNA, 25 bp, Homo sapien
cacttactggtaagcttctgtttga

SEQ ID NO: 2939922 - DNA, 25 bp, Homo sapien
ctttgctgtagttccaatctctctg

SEQ ID NO: 2939923 - DNA, 25 bp, Homo sapien
gacacctgttcatacctttgctgta

SEQ ID NO: 2939924 - DNA, 25 bp, Homo sapien
atgccccacctcgttcatgctattt

SEQ ID NO: 2939925 - DNA, 25 bp, Homo sapien
caaccttccggaagagtaactgctc

SEQ ID NO: 2939926 - DNA, 25 bp, Homo sapien
aagcccatgtgcatttagtcaaccc

SEQ ID NO: 2939927 - DNA, 25 bp, Homo sapien
tagtcaaccctcttggattggaagt

SEQ ID NO: 2939928 - DNA, 25 bp, Homo sapien
gattggaagtcccactgaccttgta

SEQ ID NO: 2939929 - DNA, 25 bp, Homo sapien
ctggaagaggtaaagataagcccat

SEQ ID NO: 2939930 - DNA, 25 bp, Homo sapien
tcagatgccaccttaaaacccagct

SEQ ID NO: 2939931 - DNA, 25 bp, Homo sapien
ggaagctctgtgtacatggataaga

SEQ ID NO: 2939932 - DNA, 25 bp, Homo sapien
aatggcaggctttgtttccacgtaa

SEQ ID NO: 2939933 - DNA, 25 bp, Homo sapien
aaatgtcagcctgcaatgtgctttg

SEQ ID NO: 2939934 - DNA, 25 bp, Homo sapien
tctgagagattaccttgaccttaac

SEQ ID NO: 2939935 - DNA, 25 bp, Homo sapien
cacaaggagtctataggaagtaaac

SEQ ID NO: 2939936 - DNA, 25 bp, Homo sapien
tttctaggagcattaccacaaggag

SEQ ID NO: 2939937 - DNA, 25 bp, Homo sapien
ttataaatcaaacatggacctcctg

SEQ ID NO: 2939938 - DNA, 25 bp, Homo sapien
tattgggtagcagaatgacctccac

SEQ ID NO: 2939939 - DNA, 25 bp, Homo sapien
gcataaccctgatacctaaacccaa

SEQ ID NO: 2939940 - DNA, 25 bp, Homo sapien
acacttttaagattgctcctccacg

SEQ ID NO: 2939941 - DNA, 25 bp, Homo sapien
tccacgtctaggcatcctgtctaca

SEQ ID NO: 2939942 - DNA, 25 bp, Homo sapien
gatgtggctaagacccaaggcccaa

SEQ ID NO: 2939943 - DNA, 25 bp, Homo sapien
ttcccaacgacaccaatccaagagg

SEQ ID NO: 2939944 - DNA, 25 bp, Homo sapien
tcttccaagaggttgtcagttcctg

SEQ ID NO: 2939945 - DNA, 25 bp, Homo sapien
tattgaagtcctcccaagcaagggc

SEQ ID NO: 2939946 - DNA, 25 bp, Homo sapien
ccaaagaaaaggctcctggacatca

SEQ ID NO: 2939947 - DNA, 25 bp, Homo sapien
tcgtctcaggctagcaatggccaaa

SEQ ID NO: 2939948 - DNA, 25 bp, Homo sapien
taaatggatagaaacccaccgtcgc

SEQ ID NO: 2939949 - DNA, 25 bp, Homo sapien
gatgcggtgaatccctccagcataa

SEQ ID NO: 2939950 - DNA, 25 bp, Homo sapien
cttgggccgtaaccatggctgggcc

SEQ ID NO: 2939951 - DNA, 25 bp, Homo sapien
ggccttgggccgtaaccatggctgg

SEQ ID NO: 2939952 - DNA, 25 bp, Homo sapien
tctaaggccttgggccgtaaccatg

SEQ ID NO: 2939953 - DNA, 25 bp, Homo sapien
taaggccttgggccgtaaccatggc

SEQ ID NO: 2939954 - DNA, 25 bp, Homo sapien
gcacttcatagaggccgggagtact

SEQ ID NO: 2939955 - DNA, 25 bp, Homo sapien
ggccgggagtactgccctccaggaa

SEQ ID NO: 2939956 - DNA, 25 bp, Homo sapien
gggctgtattgctggcagtggaggc

SEQ ID NO: 2939957 - DNA, 25 bp, Homo sapien
cagagtgcacttcatagaggccggg

SEQ ID NO: 2939958 - DNA, 25 bp, Homo sapien
tcaggcttggcttcatgcacgtgtg

SEQ ID NO: 2939959 - DNA, 25 bp, Homo sapien
tgtggaccagtaaggaacctcatcc

SEQ ID NO: 2939960 - DNA, 25 bp, Homo sapien
tctgggcctgcacaagataaaaggg

SEQ ID NO: 2939961 - DNA, 25 bp, Homo sapien
tggtctgggctagagaagacttccc

SEQ ID NO: 2939962 - DNA, 25 bp, Homo sapien
ttcctgcatcctcgataaagttgag

SEQ ID NO: 2939963 - DNA, 25 bp, Homo sapien
tcctgcatcctcgataaagttgaga

SEQ ID NO: 2939964 - DNA, 25 bp, Homo sapien
tttcctgcatcctcgataaagttga

SEQ ID NO: 2939965 - DNA, 25 bp, Homo sapien
tgattcaacagcagtgccaggcaag

SEQ ID NO: 2939966 - DNA, 25 bp, Homo sapien
ggattagcttagctgcctccaggca

SEQ ID NO: 2939967 - DNA, 25 bp, Homo sapien
caggcaggctcggaaatgtaatcag

SEQ ID NO: 2939968 - DNA, 25 bp, Homo sapien
gggaatccacccaaatcgtgtcgga

SEQ ID NO: 2939969 - DNA, 25 bp, Homo sapien
gctgacaggtaggagcgcctttccg

SEQ ID NO: 2939970 - DNA, 25 bp, Homo sapien
cacctgaacacagccggagccattt

SEQ ID NO: 2939971 - DNA, 25 bp, Homo sapien
aacacagccggagccatttggcagg

SEQ ID NO: 2939972 - DNA, 25 bp, Homo sapien
gcgcctttccgcaggcacctgaaca

SEQ ID NO: 2939973 - DNA, 25 bp, Homo sapien
aaaaatcagccagatgcggtggcag

SEQ ID NO: 2939974 - DNA, 25 bp, Homo sapien
tactcgggaggctgaggcaggagaa

SEQ ID NO: 2939975 - DNA, 25 bp, Homo sapien
ttgcttgaacctgggcggcagaggg

SEQ ID NO: 2939976 - DNA, 25 bp, Homo sapien
gcctgtaatctcagctactcgggag

SEQ ID NO: 2939977 - DNA, 25 bp, Homo sapien
gaaatagtccccatagttagagtag

SEQ ID NO: 2939978 - DNA, 25 bp, Homo sapien
aacctcaaggctcaggatcccatag

SEQ ID NO: 2939979 - DNA, 25 bp, Homo sapien
gacagaatagatcacaaagctcaag

SEQ ID NO: 2939980 - DNA, 25 bp, Homo sapien
aactgattagcccattccagaagaa

SEQ ID NO: 2939981 - DNA, 25 bp, Homo sapien
gaaccagtgatagtaacactggctc

SEQ ID NO: 2939982 - DNA, 25 bp, Homo sapien
cagatcccataccagaagatgagaa

SEQ ID NO: 2939983 - DNA, 25 bp, Homo sapien
agagcaacagtgcaacagtggagga

SEQ ID NO: 2939984 - DNA, 25 bp, Homo sapien
agtggaggagccaccaacagatccc

SEQ ID NO: 2939985 - DNA, 25 bp, Homo sapien
ggcagagcattataaccactatcta

SEQ ID NO: 2939986 - DNA, 25 bp, Homo sapien
tgtaccgtgttatgcaaattaagca

SEQ ID NO: 2939987 - DNA, 25 bp, Homo sapien
taaagtaatccagtagggcaaagat

SEQ ID NO: 2939988 - DNA, 25 bp, Homo sapien
cacatgaacttttagagacgtagac

SEQ ID NO: 2939989 - DNA, 25 bp, Homo sapien
tatcttgataagcatattgcttagc

SEQ ID NO: 2939990 - DNA, 25 bp, Homo sapien
tgaatgtctatcttgataagcatat

SEQ ID NO: 2939991 - DNA, 25 bp, Homo sapien
tattgcttagcttgataggttttgt

SEQ ID NO: 2939992 - DNA, 25 bp, Homo sapien
gcttgataggttttgtttgtctaaa

SEQ ID NO: 2939993 - DNA, 25 bp, Homo sapien
tcatctcgcctacaacaactacagg

SEQ ID NO: 2939994 - DNA, 25 bp, Homo sapien
cagggtttgtgggatacaatccata

SEQ ID NO: 2939995 - DNA, 25 bp, Homo sapien
tttcctcgtttgagctcatttctca

SEQ ID NO: 2939996 - DNA, 25 bp, Homo sapien
catttctcattcgtgtttttgtctc

SEQ ID NO: 2939997 - DNA, 25 bp, Homo sapien
gggcagatcttgctattgaatctta

SEQ ID NO: 2939998 - DNA, 25 bp, Homo sapien
tgttactgagtgaatgctcattctg

SEQ ID NO: 2939999 - DNA, 25 bp, Homo sapien
aagcttctgaaactactcattgtaa

SEQ ID NO: 2940000 - DNA, 25 bp, Homo sapien
tttcaagctgttcaagtaaagattt

SEQ ID NO: 2940001 - DNA, 25 bp, Homo sapien
tcttcaaaacaggaccattggtagt

SEQ ID NO: 2940002 - DNA, 25 bp, Homo sapien
tgttaatgtaatagccaactctggc

SEQ ID NO: 2940003 - DNA, 25 bp, Homo sapien
ccagctcctgcaacagtaagtttta

SEQ ID NO: 2940004 - DNA, 25 bp, Homo sapien
taagagactaatgccctagcaagtg

SEQ ID NO: 2940005 - DNA, 25 bp, Homo sapien
tacgggaagcccaagaattcagcct

SEQ ID NO: 2940006 - DNA, 25 bp, Homo sapien
taaagcactggagatgacaaacacg

SEQ ID NO: 2940007 - DNA, 25 bp, Homo sapien
cgattacaccctaaaagcgcttgga

SEQ ID NO: 2940008 - DNA, 25 bp, Homo sapien
tactgagcgtctaacaatgaatggg

SEQ ID NO: 2940009 - DNA, 25 bp, Homo sapien
tacatgtctctgatggatatataca

SEQ ID NO: 2940010 - DNA, 25 bp, Homo sapien
ttacatgtctctgatggatatatac

SEQ ID NO: 2940011 - DNA, 25 bp, Homo sapien
ctttacatgtctctgatggatatat

SEQ ID NO: 2940012 - DNA, 25 bp, Homo sapien
acatgtctctgatggatatatacat

SEQ ID NO: 2940013 - DNA, 25 bp, Homo sapien
taaatgtgctgtgtactgttccaga

SEQ ID NO: 2940014 - DNA, 25 bp, Homo sapien
catttatttactccacaagtattga

SEQ ID NO: 2940015 - DNA, 25 bp, Homo sapien
aatgtgctgtgtactgttccagatg

SEQ ID NO: 2940016 - DNA, 25 bp, Homo sapien
atttactccacaagtattgagcatc

SEQ ID NO: 2940017 - DNA, 25 bp, Homo sapien
gtagagaaagaaccaagcgaagaaa

SEQ ID NO: 2940018 - DNA, 25 bp, Homo sapien
tggtagagaaagaaccaagcgaaga

SEQ ID NO: 2940019 - DNA, 25 bp, Homo sapien
ggtagagaaagaaccaagcgaagaa

SEQ ID NO: 2940020 - DNA, 25 bp, Homo sapien
agctctaggcactgtgtttatccct

SEQ ID NO: 2940021 - DNA, 25 bp, Homo sapien
agcacttactcagctctaggcactg

SEQ ID NO: 2940022 - DNA, 25 bp, Homo sapien
cactgtgtttatccctaataatccc

SEQ ID NO: 2940023 - DNA, 25 bp, Homo sapien
tttgcaaagcacttactcagctcta

SEQ ID NO: 2940024 - DNA, 25 bp, Homo sapien
tgattgcaaaaggaaccgcaaaagg

SEQ ID NO: 2940025 - DNA, 25 bp, Homo sapien
tttattgccggcgaacaagacggct

SEQ ID NO: 2940026 - DNA, 25 bp, Homo sapien
ctcgatatctcatcagtaagcgcat

SEQ ID NO: 2940027 - DNA, 25 bp, Homo sapien
cactacttatgcctttaagggaggg

SEQ ID NO: 2940028 - DNA, 25 bp, Homo sapien
gaactgctgatttagcttgcctcga

SEQ ID NO: 2940029 - DNA, 25 bp, Homo sapien
caacggcaagacagaacaaagggtt

SEQ ID NO: 2940030 - DNA, 25 bp, Homo sapien
gaagagctagatcaacgtggtaaag

SEQ ID NO: 2940031 - DNA, 25 bp, Homo sapien
taatttgggaaaggatcctgtacaa

SEQ ID NO: 2940032 - DNA, 25 bp, Homo sapien
gacatctaaaatgaccaacggcaag

SEQ ID NO: 2940033 - DNA, 25 bp, Homo sapien
aggaagccctgggaattcatctaaa

SEQ ID NO: 2940034 - DNA, 25 bp, Homo sapien
ctgaggacagcagggacccaggctg

SEQ ID NO: 2940035 - DNA, 25 bp, Homo sapien
gggacccaggctggagaggaggttc

SEQ ID NO: 2940036 - DNA, 25 bp, Homo sapien
gaggacagcagggacccaggctgga

SEQ ID NO: 2940037 - DNA, 25 bp, Homo sapien
cagggacccaggctggagaggaggt

SEQ ID NO: 2940038 - DNA, 25 bp, Homo sapien
ttccagttccttgaaggcaccatac

SEQ ID NO: 2940039 - DNA, 25 bp, Homo sapien
ccagcaataatggttttcttccagt

SEQ ID NO: 2940040 - DNA, 25 bp, Homo sapien
ttgaaggcaccatacccttctcttc

SEQ ID NO: 2940041 - DNA, 25 bp, Homo sapien
ttccttgaaggcaccatacccttct

SEQ ID NO: 2940042 - DNA, 25 bp, Homo sapien
gattcgctccattaaaagcagcaat

SEQ ID NO: 2940043 - DNA, 25 bp, Homo sapien
tcaatcatgctttcatgattctgtt

SEQ ID NO: 2940044 - DNA, 25 bp, Homo sapien
ggggggattcgctccattaaaagca

SEQ ID NO: 2940045 - DNA, 25 bp, Homo sapien
tttttgttcttcaatcatgctttca

SEQ ID NO: 2940046 - DNA, 25 bp, Homo sapien
ctacggtggtggcagttccggcggc

SEQ ID NO: 2940047 - DNA, 25 bp, Homo sapien
tccggcggcggatacggcggcggca

SEQ ID NO: 2940048 - DNA, 25 bp, Homo sapien
ttccagcggcggctacggtggtggc

SEQ ID NO: 2940049 - DNA, 25 bp, Homo sapien
cggccacggcggcagttccagcggc

SEQ ID NO: 2940050 - DNA, 25 bp, Homo sapien
ccaacgttagagataaccgaatgtg

SEQ ID NO: 2940051 - DNA, 25 bp, Homo sapien
cgttagagataaccgaatgtgacct

SEQ ID NO: 2940052 - DNA, 25 bp, Homo sapien
ttccaacgttagagataaccgaatg

SEQ ID NO: 2940053 - DNA, 25 bp, Homo sapien
tagagataaccgaatgtgacctcac

SEQ ID NO: 2940054 - DNA, 25 bp, Homo sapien
ttaacggcaactggaaagctaccca

SEQ ID NO: 2940055 - DNA, 25 bp, Homo sapien
tgaaattcaaacctaccgcagcctg

SEQ ID NO: 2940056 - DNA, 25 bp, Homo sapien
gattcgagctgaaaccgagtgccag

SEQ ID NO: 2940057 - DNA, 25 bp, Homo sapien
tacagaaaaaggagtacgcaaccgc

SEQ ID NO: 2940058 - DNA, 25 bp, Homo sapien
tatccgctctggaagaacagttgca

SEQ ID NO: 2940059 - DNA, 25 bp, Homo sapien
gctgccccgggtgttgatctgactc

SEQ ID NO: 2940060 - DNA, 25 bp, Homo sapien
gatgcaaattgagagcctgactgaa

SEQ ID NO: 2940061 - DNA, 25 bp, Homo sapien
tatctgaagaagaaccacgaggagg

SEQ ID NO: 2940062 - DNA, 25 bp, Homo sapien
tttcccagccaaaagagagttcatt

SEQ ID NO: 2940063 - DNA, 25 bp, Homo sapien
cccatttggagaagtttacggtgag

SEQ ID NO: 2940064 - DNA, 25 bp, Homo sapien
tgccccatttgcatgtgctaacaag

SEQ ID NO: 2940065 - DNA, 25 bp, Homo sapien
cattagaccaaatccactggagcag

SEQ ID NO: 2940066 - DNA, 25 bp, Homo sapien
gcaatctgctgggtagtaacctcca

SEQ ID NO: 2940067 - DNA, 25 bp, Homo sapien
ttaatccatccacaagaggtccgag

SEQ ID NO: 2940068 - DNA, 25 bp, Homo sapien
tgtttcaagaacatcaaccctgccg

SEQ ID NO: 2940069 - DNA, 25 bp, Homo sapien
gccgcagtgaacagatcttaattga

SEQ ID NO: 2940070 - DNA, 25 bp, Homo sapien
tggtgaaagctcagattagggcagt

SEQ ID NO: 2940071 - DNA, 25 bp, Homo sapien
tttagaataaaactacagatatatt

SEQ ID NO: 2940072 - DNA, 25 bp, Homo sapien
gcaggttactagtatcaagataatc

SEQ ID NO: 2940073 - DNA, 25 bp, Homo sapien
ggttactagtatcaagataatctca

SEQ ID NO: 2940074 - DNA, 25 bp, Homo sapien
tattttagcaggttactagtatcaa

SEQ ID NO: 2940075 - DNA, 25 bp, Homo sapien
tatgtcttttgagatttgtatgtct

SEQ ID NO: 2940076 - DNA, 25 bp, Homo sapien
ttgagatttgtatgtctattcagat

SEQ ID NO: 2940077 - DNA, 25 bp, Homo sapien
atgcctagcctgtatgtcttttgag

SEQ ID NO: 2940078 - DNA, 25 bp, Homo sapien
ccatgcctagcctgtatgtcttttg

SEQ ID NO: 2940079 - DNA, 25 bp, Homo sapien
cctgatgaaaagtggttaatctcca

SEQ ID NO: 2940080 - DNA, 25 bp, Homo sapien
tgtattcctcacgacttaagttaaa

SEQ ID NO: 2940081 - DNA, 25 bp, Homo sapien
caccgttgtattcctcacgacttaa

SEQ ID NO: 2940082 - DNA, 25 bp, Homo sapien
tctccataatgggtgttagctccat

SEQ ID NO: 2940083 - DNA, 25 bp, Homo sapien
cagagactaggatccatctgagaag

SEQ ID NO: 2940084 - DNA, 25 bp, Homo sapien
tgacccagagaactcaacaacagga

SEQ ID NO: 2940085 - DNA, 25 bp, Homo sapien
tctccctgagcagcgagtaatttca

SEQ ID NO: 2940086 - DNA, 25 bp, Homo sapien
aacaacaggatacgtcccatggtga

SEQ ID NO: 2940087 - DNA, 25 bp, Homo sapien
gaagaagtccttctctcaaccgatg

SEQ ID NO: 2940088 - DNA, 25 bp, Homo sapien
caatggcctctggtaagaatgctgc

SEQ ID NO: 2940089 - DNA, 25 bp, Homo sapien
cagttggagcaacagagggcacata

SEQ ID NO: 2940090 - DNA, 25 bp, Homo sapien
gaatgctgcaacgtgagacccttga

SEQ ID NO: 2940091 - DNA, 25 bp, Homo sapien
ccactctaacacctcagagtaaaga

SEQ ID NO: 2940092 - DNA, 25 bp, Homo sapien
tttttattccactctaacacctcag

SEQ ID NO: 2940093 - DNA, 25 bp, Homo sapien
tattccactctaacacctcagagta

SEQ ID NO: 2940094 - DNA, 25 bp, Homo sapien
tatttttattccactctaacacctc

SEQ ID NO: 2940095 - DNA, 25 bp, Homo sapien
taatgtaaggtaagcctatcaccgc

SEQ ID NO: 2940096 - DNA, 25 bp, Homo sapien
aagccacagaaaggctaaggcctgg

SEQ ID NO: 2940097 - DNA, 25 bp, Homo sapien
tagagagtaatatgaggctttgcca

SEQ ID NO: 2940098 - DNA, 25 bp, Homo sapien
ggctgacaatgataaggtaccttat

SEQ ID NO: 2940099 - DNA, 25 bp, Homo sapien
tattgcatggaatatagttatacca

SEQ ID NO: 2940100 - DNA, 25 bp, Homo sapien
tattcctttatattgatcctaaata

SEQ ID NO: 2940101 - DNA, 25 bp, Homo sapien
gaataatataacagatatgtcccaa

SEQ ID NO: 2940102 - DNA, 25 bp, Homo sapien
ctagtaacactattttgttgtctcc

SEQ ID NO: 2940103 - DNA, 25 bp, Homo sapien
tgaagaggcgggaactacacaaaat

SEQ ID NO: 2940104 - DNA, 25 bp, Homo sapien
atacttgtcaagatatggtggtggt

SEQ ID NO: 2940105 - DNA, 25 bp, Homo sapien
taaagtttcagtatgtcaatacttg

SEQ ID NO: 2940106 - DNA, 25 bp, Homo sapien
ggtggtggctatcattataagagac

SEQ ID NO: 2940107 - DNA, 25 bp, Homo sapien
cctgcgaagtgtcttagatgagttg

SEQ ID NO: 2940108 - DNA, 25 bp, Homo sapien
tgttgaggctgatagcaagggcctg

SEQ ID NO: 2940109 - DNA, 25 bp, Homo sapien
tgagttgactttgaacaagactaac

SEQ ID NO: 2940110 - DNA, 25 bp, Homo sapien
gatgagttgactttgaacaagacta

SEQ ID NO: 2940111 - DNA, 25 bp, Homo sapien
caattgggctctgttcagatgccag

SEQ ID NO: 2940112 - DNA, 25 bp, Homo sapien
tgctctctaagctccactatgtggg

SEQ ID NO: 2940113 - DNA, 25 bp, Homo sapien
acagctgaacatggcagaggtgcaa

SEQ ID NO: 2940114 - DNA, 25 bp, Homo sapien
cactggatgaggagacctccatcta

SEQ ID NO: 2940115 - DNA, 25 bp, Homo sapien
cagtctggcttctgtgcccctacat

SEQ ID NO: 2940116 - DNA, 25 bp, Homo sapien
cctaatggcagacagtctggcttct

SEQ ID NO: 2940117 - DNA, 25 bp, Homo sapien
gtctggcttctgtgcccctacattg

SEQ ID NO: 2940118 - DNA, 25 bp, Homo sapien
tttccttccctaatggcagacagtc

SEQ ID NO: 2940119 - DNA, 25 bp, Homo sapien
ctgcacattcgccacaatgatgctt

SEQ ID NO: 2940120 - DNA, 25 bp, Homo sapien
cacattcgccacaatgatgcttcta

SEQ ID NO: 2940121 - DNA, 25 bp, Homo sapien
cattcgccacaatgatgcttctaaa

SEQ ID NO: 2940122 - DNA, 25 bp, Homo sapien
tttcctgcacattcgccacaatgat

SEQ ID NO: 2940123 - DNA, 25 bp, Homo sapien
tataattccttgaagcacgctttgc

SEQ ID NO: 2940124 - DNA, 25 bp, Homo sapien
tactcggtttccaggtatctacaac

SEQ ID NO: 2940125 - DNA, 25 bp, Homo sapien
gagcaaccattacaggcaatatctg

SEQ ID NO: 2940126 - DNA, 25 bp, Homo sapien
accaccctggaattgtactactcgg

SEQ ID NO: 2940127 - DNA, 25 bp, Homo sapien
caagtgcctgcaagtgtatgaccca

SEQ ID NO: 2940128 - DNA, 25 bp, Homo sapien
cagtgttttacaggatggtctggcc

SEQ ID NO: 2940129 - DNA, 25 bp, Homo sapien
tgactcttgatgatttctggcttgc

SEQ ID NO: 2940130 - DNA, 25 bp, Homo sapien
gagagtcttgtgtctacccttggtg

SEQ ID NO: 2940131 - DNA, 25 bp, Homo sapien
acatgatgtagtaacaaaatgagcc

SEQ ID NO: 2940132 - DNA, 25 bp, Homo sapien
tcacatgatgtagtaacaaaatgag

SEQ ID NO: 2940133 - DNA, 25 bp, Homo sapien
cacatgatgtagtaacaaaatgagc

SEQ ID NO: 2940134 - DNA, 25 bp, Homo sapien
tgaagaagatgccattttctcaaat

SEQ ID NO: 2940135 - DNA, 25 bp, Homo sapien
gaagatgccattttctcaaattcta

SEQ ID NO: 2940136 - DNA, 25 bp, Homo sapien
tctgtcctctgaagaagatgccatt

SEQ ID NO: 2940137 - DNA, 25 bp, Homo sapien
cctctgaagaagatgccattttctc

SEQ ID NO: 2940138 - DNA, 25 bp, Homo sapien
taaagctctactttcctactgcagc

SEQ ID NO: 2940139 - DNA, 25 bp, Homo sapien
agtctcaccagacttctcataatgc

SEQ ID NO: 2940140 - DNA, 25 bp, Homo sapien
tttctaatcaaagtgcgagtttatg

SEQ ID NO: 2940141 - DNA, 25 bp, Homo sapien
gagtttatgagggtaaagctctact

SEQ ID NO: 2940142 - DNA, 25 bp, Homo sapien
caagtcccaaacctgtaagtcagcc

SEQ ID NO: 2940143 - DNA, 25 bp, Homo sapien
gatacaaagagatagcagtcccagt

SEQ ID NO: 2940144 - DNA, 25 bp, Homo sapien
caactggtcgacatctgctaagtac

SEQ ID NO: 2940145 - DNA, 25 bp, Homo sapien
tcagagcaaggcaatggacttcaaa

SEQ ID NO: 2940146 - DNA, 25 bp, Homo sapien
tccacgaactgaagcgcacattcca

SEQ ID NO: 2940147 - DNA, 25 bp, Homo sapien
tccatgaggtcccaatgctgacgcc

SEQ ID NO: 2940148 - DNA, 25 bp, Homo sapien
gacgcctttgccttgcttggtccca

SEQ ID NO: 2940149 - DNA, 25 bp, Homo sapien
cagagcagacaaggtgacatccacg

SEQ ID NO: 2940150 - DNA, 25 bp, Homo sapien
gccaagtgacttcaatgtcaatgtg

SEQ ID NO: 2940151 - DNA, 25 bp, Homo sapien
ggagaagcatcatgtgccaagtgac

SEQ ID NO: 2940152 - DNA, 25 bp, Homo sapien
caatgtgaaggtggatacaggtccc

SEQ ID NO: 2940153 - DNA, 25 bp, Homo sapien
gcaatccagccttctgattgtcaaa

SEQ ID NO: 2940154 - DNA, 25 bp, Homo sapien
tgacttcatcgcagctatgtgaaaa

SEQ ID NO: 2940155 - DNA, 25 bp, Homo sapien
gtgaaaagatcttgacaaccaggtt

SEQ ID NO: 2940156 - DNA, 25 bp, Homo sapien
tcttgacaaccaggttttctctact

SEQ ID NO: 2940157 - DNA, 25 bp, Homo sapien
tcctgagcactggcaactctgaatt

SEQ ID NO: 2940158 - DNA, 25 bp, Homo sapien
cagcaccgtctctttgtagtaatga

SEQ ID NO: 2940159 - DNA, 25 bp, Homo sapien
cagaatgtacagtgggactaagatt

SEQ ID NO: 2940160 - DNA, 25 bp, Homo sapien
cagtgggactaagattgcagggacc

SEQ ID NO: 2940161 - DNA, 25 bp, Homo sapien
ggaccgtgtccagcgtcccagttac

SEQ ID NO: 2940162 - DNA, 25 bp, Homo sapien
aatctttgcggccagtaggaagaag

SEQ ID NO: 2940163 - DNA, 25 bp, Homo sapien
ttcacaatctttgcggccagtagga

SEQ ID NO: 2940164 - DNA, 25 bp, Homo sapien
ccttcacaatctttgcggccagtag

SEQ ID NO: 2940165 - DNA, 25 bp, Homo sapien
tgcggccagtaggaagaagatagcc

SEQ ID NO: 2940166 - DNA, 25 bp, Homo sapien
gaactgaaacataccatagaaccaa

SEQ ID NO: 2940167 - DNA, 25 bp, Homo sapien
cctcaatggagatgggcttaacagc

SEQ ID NO: 2940168 - DNA, 25 bp, Homo sapien
tgaagaagatggaaagactccagtg

SEQ ID NO: 2940169 - DNA, 25 bp, Homo sapien
gactccagtggaaatttcagaactg

SEQ ID NO: 2940170 - DNA, 25 bp, Homo sapien
gatggccaatatgcatatgaaggaa

SEQ ID NO: 2940171 - DNA, 25 bp, Homo sapien
caaacacatctggtggaaatagata

SEQ ID NO: 2940172 - DNA, 25 bp, Homo sapien
tctgtcaaaggtatacgaaatggga

SEQ ID NO: 2940173 - DNA, 25 bp, Homo sapien
atttgcccacaattagcagtgaagg

SEQ ID NO: 2940174 - DNA, 25 bp, Homo sapien
taaccagacgcccattgccatggat

SEQ ID NO: 2940175 - DNA, 25 bp, Homo sapien
tgaaagctaaccagacgcccattgc

SEQ ID NO: 2940176 - DNA, 25 bp, Homo sapien
gacgcccattgccatggattgctgt

SEQ ID NO: 2940177 - DNA, 25 bp, Homo sapien
gaaactgaaagctaaccagacgccc

SEQ ID NO: 2940178 - DNA, 25 bp, Homo sapien
ccaagctgctgtgagaccagctgct

SEQ ID NO: 2940179 - DNA, 25 bp, Homo sapien
gccaagctgctgtgagaccagctgc

SEQ ID NO: 2940180 - DNA, 25 bp, Homo sapien
cagccaagctgctgtgagaccagct

SEQ ID NO: 2940181 - DNA, 25 bp, Homo sapien
agccaagctgctgtgagaccagctg

SEQ ID NO: 2940182 - DNA, 25 bp, Homo sapien
ccaccagtgggacctgtggctccag

SEQ ID NO: 2940183 - DNA, 25 bp, Homo sapien
catggccagctgttccaccagtggg

SEQ ID NO: 2940184 - DNA, 25 bp, Homo sapien
ggccagctgttccaccagtgggacc

SEQ ID NO: 2940185 - DNA, 25 bp, Homo sapien
tccaccagtgggacctgtggctcca

SEQ ID NO: 2940186 - DNA, 25 bp, Homo sapien
ccaagctgctgtgagaccagctgct

SEQ ID NO: 2940187 - DNA, 25 bp, Homo sapien
cagccaagctgctgtgagaccagct

SEQ ID NO: 2940188 - DNA, 25 bp, Homo sapien
gccaagctgctgtgagaccagctgc

SEQ ID NO: 2940189 - DNA, 25 bp, Homo sapien
agccaagctgctgtgagaccagctg

SEQ ID NO: 2940190 - DNA, 25 bp, Homo sapien
gccagccgaccccttgcagcaccac

SEQ ID NO: 2940191 - DNA, 25 bp, Homo sapien
tgctgccagcctgtgtctgtgcagt

SEQ ID NO: 2940192 - DNA, 25 bp, Homo sapien
cccctgcggccagccgaccccttgc

SEQ ID NO: 2940193 - DNA, 25 bp, Homo sapien
agcctgtgtctgtgcagtccccctg

SEQ ID NO: 2940194 - DNA, 25 bp, Homo sapien
aatacacgtttccttgagaagccca

SEQ ID NO: 2940195 - DNA, 25 bp, Homo sapien
ctgagcagcccgttatcacgaaggg

SEQ ID NO: 2940196 - DNA, 25 bp, Homo sapien
gcccctcagaagatggccaggtcca

SEQ ID NO: 2940197 - DNA, 25 bp, Homo sapien
gcttcaccgcagagcaatacacgtt

SEQ ID NO: 2940198 - DNA, 25 bp, Homo sapien
tgctgccagcctgtgtctgtgcagt

SEQ ID NO: 2940199 - DNA, 25 bp, Homo sapien
agcctgtgtctgtgcagtccccctg

SEQ ID NO: 2940200 - DNA, 25 bp, Homo sapien
tgcggccagccgaccccttgcagca

SEQ ID NO: 2940201 - DNA, 25 bp, Homo sapien
tcctcctgctgagccaccacctgct

SEQ ID NO: 2940202 - DNA, 25 bp, Homo sapien
tgctgccagcctgtgtctgtgcagt

SEQ ID NO: 2940203 - DNA, 25 bp, Homo sapien
gccagccgaccccttgcagcaccac

SEQ ID NO: 2940204 - DNA, 25 bp, Homo sapien
cccctgcggccagccgaccccttgc

SEQ ID NO: 2940205 - DNA, 25 bp, Homo sapien
agcctgtgtctgtgcagtccccctg

SEQ ID NO: 2940206 - DNA, 25 bp, Homo sapien
tgctgccagcctgtgtctgtgcagt

SEQ ID NO: 2940207 - DNA, 25 bp, Homo sapien
ccgaccccttgcagcaccacctgca

SEQ ID NO: 2940208 - DNA, 25 bp, Homo sapien
agcctgtgtctgtgcagtccccctg

SEQ ID NO: 2940209 - DNA, 25 bp, Homo sapien
cctccctgcggccagccgacccctt

SEQ ID NO: 2940210 - DNA, 25 bp, Homo sapien
aatcagtctagcagctttggtgatg

SEQ ID NO: 2940211 - DNA, 25 bp, Homo sapien
cactgtgtcattaaacactgggcca

SEQ ID NO: 2940212 - DNA, 25 bp, Homo sapien
tagtttgaccttattgttcccagaa

SEQ ID NO: 2940213 - DNA, 25 bp, Homo sapien
gaatcaatacacatctgctcttatg

SEQ ID NO: 2940214 - DNA, 25 bp, Homo sapien
cgtcgtgcacggctgtggtgtgcag

SEQ ID NO: 2940215 - DNA, 25 bp, Homo sapien
acgcgccccatctgcgagccctgcc

SEQ ID NO: 2940216 - DNA, 25 bp, Homo sapien
tgccgccgcccggtgtgctgcgacc

SEQ ID NO: 2940217 - DNA, 25 bp, Homo sapien
cgtgacctgcgtgccccgctgcacg

SEQ ID NO: 2940218 - DNA, 25 bp, Homo sapien
gcggctccaccttgtcctccctgag

SEQ ID NO: 2940219 - DNA, 25 bp, Homo sapien
ctgctgcggctccaccttgtcctcc

SEQ ID NO: 2940220 - DNA, 25 bp, Homo sapien
accatgaccggctcctgctgcggct

SEQ ID NO: 2940221 - DNA, 25 bp, Homo sapien
ccaccatgaccggctcctgctgcgg

SEQ ID NO: 2940222 - DNA, 25 bp, Homo sapien
gagtggcagcagctagaaatgcagc

SEQ ID NO: 2940223 - DNA, 25 bp, Homo sapien
cagatggttctgcagtaggtggtct

SEQ ID NO: 2940224 - DNA, 25 bp, Homo sapien
agctgggatggtagcagatggttct

SEQ ID NO: 2940225 - DNA, 25 bp, Homo sapien
ggccacagctctattcagagcagac

SEQ ID NO: 2940226 - DNA, 25 bp, Homo sapien
tactggggattataacagctgggcc

SEQ ID NO: 2940227 - DNA, 25 bp, Homo sapien
ggtagtactggggattataacagct

SEQ ID NO: 2940228 - DNA, 25 bp, Homo sapien
ctagaagtgcagcagaagggtggca

SEQ ID NO: 2940229 - DNA, 25 bp, Homo sapien
tagtactggggattataacagctgg

SEQ ID NO: 2940230 - DNA, 25 bp, Homo sapien
atgaagttcaacagcaagaggattc

SEQ ID NO: 2940231 - DNA, 25 bp, Homo sapien
gattcataggagactggaccacagc

SEQ ID NO: 2940232 - DNA, 25 bp, Homo sapien
gaggattcataggagactggaccac

SEQ ID NO: 2940233 - DNA, 25 bp, Homo sapien
aggaatgaagttcaacagcaagagg

SEQ ID NO: 2940234 - DNA, 25 bp, Homo sapien
tgccaattttccctcggtacaggcc

SEQ ID NO: 2940235 - DNA, 25 bp, Homo sapien
ccaattttccctcggtacaggccag

SEQ ID NO: 2940236 - DNA, 25 bp, Homo sapien
ctcggtacaggccagggaaaattag

SEQ ID NO: 2940237 - DNA, 25 bp, Homo sapien
ggccagggaaaattagcctgcacat

SEQ ID NO: 2940238 - DNA, 25 bp, Homo sapien
gtgtcagaacggggaggatctgggt

SEQ ID NO: 2940239 - DNA, 25 bp, Homo sapien
tgtcagaacggggaggatctgggtg

SEQ ID NO: 2940240 - DNA, 25 bp, Homo sapien
tggtcagagcacacggagccacaac

SEQ ID NO: 2940241 - DNA, 25 bp, Homo sapien
tcagagcacacggagccacaacagg

SEQ ID NO: 2940242 - DNA, 25 bp, Homo sapien
ggtcagagcacacggagccacaaca

SEQ ID NO: 2940243 - DNA, 25 bp, Homo sapien
agagcacacggagccacaacaggag

SEQ ID NO: 2940244 - DNA, 25 bp, Homo sapien
tctcctgacagaggtcttggctgca

SEQ ID NO: 2940245 - DNA, 25 bp, Homo sapien
gcagcaggtctcctgacagaggtct

SEQ ID NO: 2940246 - DNA, 25 bp, Homo sapien
caggtctcctgacagaggtcttggc

SEQ ID NO: 2940247 - DNA, 25 bp, Homo sapien
ggtctcctgacagaggtcttggctg

SEQ ID NO: 2940248 - DNA, 25 bp, Homo sapien
aacagctggggcggtagcaggtggt

SEQ ID NO: 2940249 - DNA, 25 bp, Homo sapien
acagctggggcggtagcaggtggtc

SEQ ID NO: 2940250 - DNA, 25 bp, Homo sapien
ggtgggttggcagcacacagactgg

SEQ ID NO: 2940251 - DNA, 25 bp, Homo sapien
ggtggggcgacagcaggtgggttgg

SEQ ID NO: 2940252 - DNA, 25 bp, Homo sapien
tgggttggcagcacacagactggca

SEQ ID NO: 2940253 - DNA, 25 bp, Homo sapien
gggcgacagcaggtgggttggcagc

SEQ ID NO: 2940254 - DNA, 25 bp, Homo sapien
ctggagatgcagcacctagggtggc

SEQ ID NO: 2940255 - DNA, 25 bp, Homo sapien
acatacagcagctggggcggcagca

SEQ ID NO: 2940256 - DNA, 25 bp, Homo sapien
agatgcagcacctagggtggcagca

SEQ ID NO: 2940257 - DNA, 25 bp, Homo sapien
agcagctggacatacagcagctggg

SEQ ID NO: 2940258 - DNA, 25 bp, Homo sapien
agactcggccacagactggacgcag

SEQ ID NO: 2940259 - DNA, 25 bp, Homo sapien
gactcggccacagactggacgcagg

SEQ ID NO: 2940260 - DNA, 25 bp, Homo sapien
actcggccacagactggacgcaggc

SEQ ID NO: 2940261 - DNA, 25 bp, Homo sapien
ctcggccacagactggacgcaggca

SEQ ID NO: 2940262 - DNA, 25 bp, Homo sapien
caaactggtgttccctgctgggagt

SEQ ID NO: 2940263 - DNA, 25 bp, Homo sapien
aaaactcaaactggtgttccctgct

SEQ ID NO: 2940264 - DNA, 25 bp, Homo sapien
aactcaaactggtgttccctgctgg

SEQ ID NO: 2940265 - DNA, 25 bp, Homo sapien
ctcaaactggtgttccctgctggga

SEQ ID NO: 2940266 - DNA, 25 bp, Homo sapien
actctgtagtttgtaggtccacctt

SEQ ID NO: 2940267 - DNA, 25 bp, Homo sapien
cagcttgcaagcaaaaaaactgttg

SEQ ID NO: 2940268 - DNA, 25 bp, Homo sapien
ctgtagtttgtaggtccaccttaag

SEQ ID NO: 2940269 - DNA, 25 bp, Homo sapien
tcaccagcttgcaagcaaaaaaact

SEQ ID NO: 2940270 - DNA, 25 bp, Homo sapien
ttaccttagtgatttcagggcccca

SEQ ID NO: 2940271 - DNA, 25 bp, Homo sapien
agaaaaatggttgctttcttcagag

SEQ ID NO: 2940272 - DNA, 25 bp, Homo sapien
gaaaaatggttgctttcttcagagt

SEQ ID NO: 2940273 - DNA, 25 bp, Homo sapien
ccttagtgatttcagggccccaagg

SEQ ID NO: 2940274 - DNA, 25 bp, Homo sapien
acctgctgcaggacgacctgctgcc

SEQ ID NO: 2940275 - DNA, 25 bp, Homo sapien
tgctgccattccgtgtgctgccagc

SEQ ID NO: 2940276 - DNA, 25 bp, Homo sapien
agaccccagtgctgccattccgtgt

SEQ ID NO: 2940277 - DNA, 25 bp, Homo sapien
tgctgtcagaccacctgctgcagga

SEQ ID NO: 2940278 - DNA, 25 bp, Homo sapien
ctgctgcagaaccacctcctgctcc

SEQ ID NO: 2940279 - DNA, 25 bp, Homo sapien
tcccacagctgctctgtgtccagct

SEQ ID NO: 2940280 - DNA, 25 bp, Homo sapien
tcctgctcccacagctgctctgtgt

SEQ ID NO: 2940281 - DNA, 25 bp, Homo sapien
tgctgcagaaccacctcctgctccc

SEQ ID NO: 2940282 - DNA, 25 bp, Homo sapien
ccaactgctgtcaccccagctgttg

SEQ ID NO: 2940283 - DNA, 25 bp, Homo sapien
gctgtcaccccagctgttgtcagac

SEQ ID NO: 2940284 - DNA, 25 bp, Homo sapien
tgtcaccccagctgttgtcagacca

SEQ ID NO: 2940285 - DNA, 25 bp, Homo sapien
ctgctgtcaccccagctgttgtcag

SEQ ID NO: 2940286 - DNA, 25 bp, Homo sapien
ggtcagagcacacggagccacaaca

SEQ ID NO: 2940287 - DNA, 25 bp, Homo sapien
tggtcagagcacacggagccacaac

SEQ ID NO: 2940288 - DNA, 25 bp, Homo sapien
tcagagcacacggagccacaacagg

SEQ ID NO: 2940289 - DNA, 25 bp, Homo sapien
agagcacacggagccacaacaggag

SEQ ID NO: 2940290 - DNA, 25 bp, Homo sapien
ctgcagcaggtggtctcacagcagc

SEQ ID NO: 2940291 - DNA, 25 bp, Homo sapien
gcagcaggtctcctgacagaggtct

SEQ ID NO: 2940292 - DNA, 25 bp, Homo sapien
caggtctcctgacagaggtcttggc

SEQ ID NO: 2940293 - DNA, 25 bp, Homo sapien
cctgacagaggtcttggccgcagcc

SEQ ID NO: 2940294 - DNA, 25 bp, Homo sapien
agcaagtgggttggcagcacgcagg

SEQ ID NO: 2940295 - DNA, 25 bp, Homo sapien
gcaagtgggttggcagcacgcaggc

SEQ ID NO: 2940296 - DNA, 25 bp, Homo sapien
ctggattcacagcaagaggggcggc

SEQ ID NO: 2940297 - DNA, 25 bp, Homo sapien
tggattcacagcaagaggggcggca

SEQ ID NO: 2940298 - DNA, 25 bp, Homo sapien
ttgggcgatagcaagtggtgtggca

SEQ ID NO: 2940299 - DNA, 25 bp, Homo sapien
atagcaagtggtgtggcaggagact

SEQ ID NO: 2940300 - DNA, 25 bp, Homo sapien
caggttgggcgatagcaagtggtgt

SEQ ID NO: 2940301 - DNA, 25 bp, Homo sapien
cacaggttgggcgatagcaagtggt

SEQ ID NO: 2940302 - DNA, 25 bp, Homo sapien
tgtatcctaatggtcagcacagtag

SEQ ID NO: 2940303 - DNA, 25 bp, Homo sapien
cacagaatataactgggcggctgga

SEQ ID NO: 2940304 - DNA, 25 bp, Homo sapien
gataatgtctgcctcactgagaaga

SEQ ID NO: 2940305 - DNA, 25 bp, Homo sapien
ggtgcaacctcagtgacaaaactgg

SEQ ID NO: 2940306 - DNA, 25 bp, Homo sapien
caaatgaaggcacctctcttggaaa

SEQ ID NO: 2940307 - DNA, 25 bp, Homo sapien
aatgaaggcacctctcttggaaatt

SEQ ID NO: 2940308 - DNA, 25 bp, Homo sapien
tattctttcagattcaaatgaaggc

SEQ ID NO: 2940309 - DNA, 25 bp, Homo sapien
cagattcaaatgaaggcacctctct

SEQ ID NO: 2940310 - DNA, 25 bp, Homo sapien
cacaggctgaacagacgttgagagg

SEQ ID NO: 2940311 - DNA, 25 bp, Homo sapien
caaactaaatcttactgcctgtgga

SEQ ID NO: 2940312 - DNA, 25 bp, Homo sapien
cagactgttcatgatatgcttggac

SEQ ID NO: 2940313 - DNA, 25 bp, Homo sapien
tacagttttgtaactccatggcaaa

SEQ ID NO: 2940314 - DNA, 25 bp, Homo sapien
cctcttctgtggtagttcctgagcc

SEQ ID NO: 2940315 - DNA, 25 bp, Homo sapien
gcttaagatttagcagaccttggtg

SEQ ID NO: 2940316 - DNA, 25 bp, Homo sapien
aatgtcacaggtactttcaaagcac

SEQ ID NO: 2940317 - DNA, 25 bp, Homo sapien
cttatatgagctgcaaacgagttga

SEQ ID NO: 2940318 - DNA, 25 bp, Homo sapien
taattattagtgatattgtacacca

SEQ ID NO: 2940319 - DNA, 25 bp, Homo sapien
gataggtcatcataaaataagtcaa

SEQ ID NO: 2940320 - DNA, 25 bp, Homo sapien
tattgtacaccatgtcatatcagaa

SEQ ID NO: 2940321 - DNA, 25 bp, Homo sapien
tgattctggaaactttgccaaatat

SEQ ID NO: 2940322 - DNA, 25 bp, Homo sapien
aggagcaaactctgtgtgggcccca

SEQ ID NO: 2940323 - DNA, 25 bp, Homo sapien
aaacttcactcactgggacctgctg

SEQ ID NO: 2940324 - DNA, 25 bp, Homo sapien
gcagcacggtaggatcaaacttcac

SEQ ID NO: 2940325 - DNA, 25 bp, Homo sapien
caggtgaatcagtgcaggagccaaa

SEQ ID NO: 2940326 - DNA, 25 bp, Homo sapien
gatgaacagtggttccgtccggaaa

SEQ ID NO: 2940327 - DNA, 25 bp, Homo sapien
gccaaggttggggatgtacacctgt

SEQ ID NO: 2940328 - DNA, 25 bp, Homo sapien
tctgaagacatgtgcccaaagtggt

SEQ ID NO: 2940329 - DNA, 25 bp, Homo sapien
aggcgggacaagtctaagcggggag

SEQ ID NO: 2940330 - DNA, 25 bp, Homo sapien
tctgtgctgactattaggacacatg

SEQ ID NO: 2940331 - DNA, 25 bp, Homo sapien
agttgtagaccattcttctgtgctg

SEQ ID NO: 2940332 - DNA, 25 bp, Homo sapien
atgtcattcagcagggtggacttca

SEQ ID NO: 2940333 - DNA, 25 bp, Homo sapien
gactattaggacacatggagtggga

SEQ ID NO: 2940334 - DNA, 25 bp, Homo sapien
ccagcccacttgctgccgccccaga

SEQ ID NO: 2940335 - DNA, 25 bp, Homo sapien
tccagctgctgtcgccccagctgct

SEQ ID NO: 2940336 - DNA, 25 bp, Homo sapien
atgctgcatctccagctgctgtcgc

SEQ ID NO: 2940337 - DNA, 25 bp, Homo sapien
ttgctgccgccccagatgctgcatc

SEQ ID NO: 2940338 - DNA, 25 bp, Homo sapien
cccagctgctgtgtgtccagctgct

SEQ ID NO: 2940339 - DNA, 25 bp, Homo sapien
tccagctgctgtcgccccagctgct

SEQ ID NO: 2940340 - DNA, 25 bp, Homo sapien
agccccagtgctgccagtctatgtg

SEQ ID NO: 2940341 - DNA, 25 bp, Homo sapien
ccagctgctgcaagccccagtgctg

SEQ ID NO: 2940342 - DNA, 25 bp, Homo sapien
tgtcgccccagctgctgtgtgtcca

SEQ ID NO: 2940343 - DNA, 25 bp, Homo sapien
ggccccagtgctgccagtctgtgtg

SEQ ID NO: 2940344 - DNA, 25 bp, Homo sapien
gtcgccccagctgctgtgtgtccag

SEQ ID NO: 2940345 - DNA, 25 bp, Homo sapien
ccagtgctgccagtctgtgtgctgc

SEQ ID NO: 2940346 - DNA, 25 bp, Homo sapien
tgctgtcagaccacctgctgtagga

SEQ ID NO: 2940347 - DNA, 25 bp, Homo sapien
tgtggcctggagaactgctgccgcc

SEQ ID NO: 2940348 - DNA, 25 bp, Homo sapien
tctgacaccatggtcaactcctgtt

SEQ ID NO: 2940349 - DNA, 25 bp, Homo sapien
ccagtgctgccagtctgtgtgctgt

SEQ ID NO: 2940350 - DNA, 25 bp, Homo sapien
tgctgccgccctagctgctgtgtat

SEQ ID NO: 2940351 - DNA, 25 bp, Homo sapien
agaccccagtgctgccagtctgtgt

SEQ ID NO: 2940352 - DNA, 25 bp, Homo sapien
cacttgctgccgtcccagctgcagc

SEQ ID NO: 2940353 - DNA, 25 bp, Homo sapien
agtctgtgtgctgccagcccacttg

SEQ ID NO: 2940354 - DNA, 25 bp, Homo sapien
caccatggtcagctcctgttgtggt

SEQ ID NO: 2940355 - DNA, 25 bp, Homo sapien
cctgttgtggttccgtctgctctga

SEQ ID NO: 2940356 - DNA, 25 bp, Homo sapien
agaccccagtgctgccagtctgtgt

SEQ ID NO: 2940357 - DNA, 25 bp, Homo sapien
tgctgtcagaccacctgctgcagga

SEQ ID NO: 2940358 - DNA, 25 bp, Homo sapien
tctgctggcaaaccacctgctacag

SEQ ID NO: 2940359 - DNA, 25 bp, Homo sapien
ccaggtgctacaggccccattgtgg

SEQ ID NO: 2940360 - DNA, 25 bp, Homo sapien
cccattgtggccagtctctatgctg

SEQ ID NO: 2940361 - DNA, 25 bp, Homo sapien
gccaccccagctattgcatttccag

SEQ ID NO: 2940362 - DNA, 25 bp, Homo sapien
catttctagttgctgcaggccttcc

SEQ ID NO: 2940363 - DNA, 25 bp, Homo sapien
tgcccgaccacctgctgtagaacaa

SEQ ID NO: 2940364 - DNA, 25 bp, Homo sapien
gccgcccggcttgctgcatttctag

SEQ ID NO: 2940365 - DNA, 25 bp, Homo sapien
gcatttctagttgctgtcatcccag

SEQ ID NO: 2940366 - DNA, 25 bp, Homo sapien
ctgtcaaattttctgatgttcttcc

SEQ ID NO: 2940367 - DNA, 25 bp, Homo sapien
gctgccgtcccagctgctgtgtgtc

SEQ ID NO: 2940368 - DNA, 25 bp, Homo sapien
gaccccagtgctgccagtctgtgta

SEQ ID NO: 2940369 - DNA, 25 bp, Homo sapien
ttgctgcaggaccacctgctgccgt

SEQ ID NO: 2940370 - DNA, 25 bp, Homo sapien
gctgtgtgtccagctgcttcagacc

SEQ ID NO: 2940371 - DNA, 25 bp, Homo sapien
gaccgcagtgctgccagtctgtgtg

SEQ ID NO: 2940372 - DNA, 25 bp, Homo sapien
cgcagtgctgccagtctgtgtgctg

SEQ ID NO: 2940373 - DNA, 25 bp, Homo sapien
tgctgcagaccgcagtgctgccagt

SEQ ID NO: 2940374 - DNA, 25 bp, Homo sapien
tgcagaccgcagtgctgccagtctg

SEQ ID NO: 2940375 - DNA, 25 bp, Homo sapien
cagggctgtggcctagagaactgct

SEQ ID NO: 2940376 - DNA, 25 bp, Homo sapien
acctccaccctctgacaccatggtc

SEQ ID NO: 2940377 - DNA, 25 bp, Homo sapien
ttcctggaaatccacccagaacctc

SEQ ID NO: 2940378 - DNA, 25 bp, Homo sapien
tctgacaccatggtcaactcctgtt

SEQ ID NO: 2940379 - DNA, 25 bp, Homo sapien
tgctgccgtgcaacttgctgccgcc

SEQ ID NO: 2940380 - DNA, 25 bp, Homo sapien
ccacctgctgccgtgcaacttgctg

SEQ ID NO: 2940381 - DNA, 25 bp, Homo sapien
agctgctgtggatcctcttgttgaa

SEQ ID NO: 2940382 - DNA, 25 bp, Homo sapien
tctgttgtcagaccacctgccgccc

SEQ ID NO: 2940383 - DNA, 25 bp, Homo sapien
gtgagttcagttgctaccatccagt

SEQ ID NO: 2940384 - DNA, 25 bp, Homo sapien
tgccagaccaccaatctgtggatcc

SEQ ID NO: 2940385 - DNA, 25 bp, Homo sapien
gctgctgccgcagcttctgtgagtt

SEQ ID NO: 2940386 - DNA, 25 bp, Homo sapien
tggttaagacctctgccaagagatc

SEQ ID NO: 2940387 - DNA, 25 bp, Homo sapien
gtatatgaaggaatggatgagatga

SEQ ID NO: 2940388 - DNA, 25 bp, Homo sapien
ggtgggctcctgttcagaggtgagt

SEQ ID NO: 2940389 - DNA, 25 bp, Homo sapien
gtgggctcctgttcagaggtgagtt

SEQ ID NO: 2940390 - DNA, 25 bp, Homo sapien
tgggctcctgttcagaggtgagttt

SEQ ID NO: 2940391 - DNA, 25 bp, Homo sapien
gggctcctgttcagaggtgagtttc

SEQ ID NO: 2940392 - DNA, 25 bp, Homo sapien
acagcaaggggaacagcagtgggtc

SEQ ID NO: 2940393 - DNA, 25 bp, Homo sapien
ctgacagcaaggggaacagcagtgg

SEQ ID NO: 2940394 - DNA, 25 bp, Homo sapien
agcaaggggaacagcagtgggtcat

SEQ ID NO: 2940395 - DNA, 25 bp, Homo sapien
tgacagcaaggggaacagcagtggg

SEQ ID NO: 2940396 - DNA, 25 bp, Homo sapien
ggtgttttgacagcaagttgggtgg

SEQ ID NO: 2940397 - DNA, 25 bp, Homo sapien
gttttgacagcaagttgggtggcag

SEQ ID NO: 2940398 - DNA, 25 bp, Homo sapien
ttttgacagcaagttgggtggcagc

SEQ ID NO: 2940399 - DNA, 25 bp, Homo sapien
tgttttgacagcaagttgggtggca

SEQ ID NO: 2940400 - DNA, 25 bp, Homo sapien
tggcagcaggtggatctacaaatgg

SEQ ID NO: 2940401 - DNA, 25 bp, Homo sapien
tagtttgatagcaagtcgggtgaca

SEQ ID NO: 2940402 - DNA, 25 bp, Homo sapien
caactggacccacaaataggctgac

SEQ ID NO: 2940403 - DNA, 25 bp, Homo sapien
tctggtcacacaggatggttggcag

SEQ ID NO: 2940404 - DNA, 25 bp, Homo sapien
tcaggaaatatgtctctggtgggtg

SEQ ID NO: 2940405 - DNA, 25 bp, Homo sapien
tcttggtggaataggaactttgaca

SEQ ID NO: 2940406 - DNA, 25 bp, Homo sapien
ttctcagaaaagcttagcgaatgtt

SEQ ID NO: 2940407 - DNA, 25 bp, Homo sapien
tgcagcaagtggattagcagcagga

SEQ ID NO: 2940408 - DNA, 25 bp, Homo sapien
gagagttagatatgcagtcttaaga

SEQ ID NO: 2940409 - DNA, 25 bp, Homo sapien
tggagttgactgaccaccatctggt

SEQ ID NO: 2940410 - DNA, 25 bp, Homo sapien
tccatgtcaattaggtggagttgac

SEQ ID NO: 2940411 - DNA, 25 bp, Homo sapien
tgtggctgagtccatgtatccatgt

SEQ ID NO: 2940412 - DNA, 25 bp, Homo sapien
gcagcaggtaggctgacagcaaggg

SEQ ID NO: 2940413 - DNA, 25 bp, Homo sapien
tggtcacagtggtgggcttccagca

SEQ ID NO: 2940414 - DNA, 25 bp, Homo sapien
ttttgacagcaagttgggcggcagc

SEQ ID NO: 2940415 - DNA, 25 bp, Homo sapien
agcaaggggagcaacagtgggtcat

SEQ ID NO: 2940416 - DNA, 25 bp, Homo sapien
cagctggtcacacaggtgggctggc

SEQ ID NO: 2940417 - DNA, 25 bp, Homo sapien
gctggcagcagggtgtgctgcagca

SEQ ID NO: 2940418 - DNA, 25 bp, Homo sapien
gctggcagcagctggtcacacaggt

SEQ ID NO: 2940419 - DNA, 25 bp, Homo sapien
tggcagcagggtgtgctgcagcagg

SEQ ID NO: 2940420 - DNA, 25 bp, Homo sapien
tagcaggttcttctgcagtacacag

SEQ ID NO: 2940421 - DNA, 25 bp, Homo sapien
ttcttctgcagtacacaggtgcaca

SEQ ID NO: 2940422 - DNA, 25 bp, Homo sapien
caggttcttctgcagtacacaggtg

SEQ ID NO: 2940423 - DNA, 25 bp, Homo sapien
ggttcttctgcagtacacaggtgca

SEQ ID NO: 2940424 - DNA, 25 bp, Homo sapien
catataggtaaggatttctgctacc

SEQ ID NO: 2940425 - DNA, 25 bp, Homo sapien
tcaggatgaagtattctgccctccc

SEQ ID NO: 2940426 - DNA, 25 bp, Homo sapien
gctggcacatgatccacaaggtgta

SEQ ID NO: 2940427 - DNA, 25 bp, Homo sapien
tttagagtcaaagctgagaccatga

SEQ ID NO: 2940428 - DNA, 25 bp, Homo sapien
tttagatgcctcatattggtcttac

SEQ ID NO: 2940429 - DNA, 25 bp, Homo sapien
agatgcctcatattggtcttacaaa

SEQ ID NO: 2940430 - DNA, 25 bp, Homo sapien
tagatgcctcatattggtcttacaa

SEQ ID NO: 2940431 - DNA, 25 bp, Homo sapien
ctgcaaacaccgttttcagtttctt

SEQ ID NO: 2940432 - DNA, 25 bp, Homo sapien
tctggtcatgtgacagttcctgttg

SEQ ID NO: 2940433 - DNA, 25 bp, Homo sapien
tcatctggtcatgtgacagttcctg

SEQ ID NO: 2940434 - DNA, 25 bp, Homo sapien
agttcctgttgatccggggggctca

SEQ ID NO: 2940435 - DNA, 25 bp, Homo sapien
catcatctggtcatgtgacagttcc

SEQ ID NO: 2940436 - DNA, 25 bp, Homo sapien
tgtcagggatggagggtgggcttct

SEQ ID NO: 2940437 - DNA, 25 bp, Homo sapien
gtgtcagggatggagggtgggcttc

SEQ ID NO: 2940438 - DNA, 25 bp, Homo sapien
ggtgtcagggatggagggtgggctt

SEQ ID NO: 2940439 - DNA, 25 bp, Homo sapien
tcagggatggagggtgggcttctgt

SEQ ID NO: 2940440 - DNA, 25 bp, Homo sapien
agcaaggggagcaacagtgggtcat

SEQ ID NO: 2940441 - DNA, 25 bp, Homo sapien
ggtgttttgacagcaagttgggtgg

SEQ ID NO: 2940442 - DNA, 25 bp, Homo sapien
gttttgacagcaagttgggtggcag

SEQ ID NO: 2940443 - DNA, 25 bp, Homo sapien
ttttgacagcaagttgggtggcagc

SEQ ID NO: 2940444 - DNA, 25 bp, Homo sapien
tgttttgacagcaagttgggtggca

SEQ ID NO: 2940445 - DNA, 25 bp, Homo sapien
tagcaggttcttctgcagtacacag

SEQ ID NO: 2940446 - DNA, 25 bp, Homo sapien
ttcttctgcagtacacaggtgcaca

SEQ ID NO: 2940447 - DNA, 25 bp, Homo sapien
caggttcttctgcagtacacaggtg

SEQ ID NO: 2940448 - DNA, 25 bp, Homo sapien
ggttcttctgcagtacacaggtgca

SEQ ID NO: 2940449 - DNA, 25 bp, Homo sapien
aagctgagatcatgactccaaatta

SEQ ID NO: 2940450 - DNA, 25 bp, Homo sapien
gagatcatgactccaaattaagaac

SEQ ID NO: 2940451 - DNA, 25 bp, Homo sapien
cataacccaaagttatcgtgaaaag

SEQ ID NO: 2940452 - DNA, 25 bp, Homo sapien
gaatctctgctaccagagacataac

SEQ ID NO: 2940453 - DNA, 25 bp, Homo sapien
tcttacattcttctgatttccgtgg

SEQ ID NO: 2940454 - DNA, 25 bp, Homo sapien
tacattcttctgatttccgtggaaa

SEQ ID NO: 2940455 - DNA, 25 bp, Homo sapien
cttgctcctttcttacattcttctg

SEQ ID NO: 2940456 - DNA, 25 bp, Homo sapien
attcttctgatttccgtggaaaaag

SEQ ID NO: 2940457 - DNA, 25 bp, Homo sapien
gtcttctatgaatgcacaagttcta

SEQ ID NO: 2940458 - DNA, 25 bp, Homo sapien
tcttctatgaatgcacaagttctac

SEQ ID NO: 2940459 - DNA, 25 bp, Homo sapien
tgtcttctatgaatgcacaagttct

SEQ ID NO: 2940460 - DNA, 25 bp, Homo sapien
caaattctgactcaagactaacagg

SEQ ID NO: 2940461 - DNA, 25 bp, Homo sapien
aaattctgactcaagactaacaggc

SEQ ID NO: 2940462 - DNA, 25 bp, Homo sapien
attctgactcaagactaacaggcat

SEQ ID NO: 2940463 - DNA, 25 bp, Homo sapien
aattctgactcaagactaacaggca

SEQ ID NO: 2940464 - DNA, 25 bp, Homo sapien
catggtgtcaggggtagagggtgga

SEQ ID NO: 2940465 - DNA, 25 bp, Homo sapien
acaacagtgggtcatggtgtcaggg

SEQ ID NO: 2940466 - DNA, 25 bp, Homo sapien
gaacaacagtgggtcatggtgtcag

SEQ ID NO: 2940467 - DNA, 25 bp, Homo sapien
cagcaaggggaacaacagtgggtca

SEQ ID NO: 2940468 - DNA, 25 bp, Homo sapien
ctggcagcaggtgttttgacagcaa

SEQ ID NO: 2940469 - DNA, 25 bp, Homo sapien
tgacagcagggtgtgctgcagcagg

SEQ ID NO: 2940470 - DNA, 25 bp, Homo sapien
tggtcacagtggtgggcttccagca

SEQ ID NO: 2940471 - DNA, 25 bp, Homo sapien
tggcagcagctggtcacacagatgg

SEQ ID NO: 2940472 - DNA, 25 bp, Homo sapien
tcaggatgaagtattctgccctccc

SEQ ID NO: 2940473 - DNA, 25 bp, Homo sapien
gctggcacatgatccacaaggtgta

SEQ ID NO: 2940474 - DNA, 25 bp, Homo sapien
tttagagtcaaagctgagaccatga

SEQ ID NO: 2940475 - DNA, 25 bp, Homo sapien
ggttcttctgcagtacacaggtgca

SEQ ID NO: 2940476 - DNA, 25 bp, Homo sapien
attctgactcaagactagcaggcat

SEQ ID NO: 2940477 - DNA, 25 bp, Homo sapien
aaattctgactcaagactagcaggc

SEQ ID NO: 2940478 - DNA, 25 bp, Homo sapien
aattctgactcaagactagcaggca

SEQ ID NO: 2940479 - DNA, 25 bp, Homo sapien
caaattctgactcaagactagcagg

SEQ ID NO: 2940480 - DNA, 25 bp, Homo sapien
agcaaggggagcaacagtgggtcat

SEQ ID NO: 2940481 - DNA, 25 bp, Homo sapien
cttccagcaggtggtcctgcagcag

SEQ ID NO: 2940482 - DNA, 25 bp, Homo sapien
aggtggtcacagtggtgggcttcca

SEQ ID NO: 2940483 - DNA, 25 bp, Homo sapien
tggtcacagtggtgggcttccagca

SEQ ID NO: 2940484 - DNA, 25 bp, Homo sapien
tgcaggtggtcacagtggtgggctt

SEQ ID NO: 2940485 - DNA, 25 bp, Homo sapien
caagttgggcggcagcaaggctggc

SEQ ID NO: 2940486 - DNA, 25 bp, Homo sapien
cagctggaaacacagcaggagggct

SEQ ID NO: 2940487 - DNA, 25 bp, Homo sapien
cagcagctggaaacacagcaggagg

SEQ ID NO: 2940488 - DNA, 25 bp, Homo sapien
agcaagttgggcggcagcaaggctg

SEQ ID NO: 2940489 - DNA, 25 bp, Homo sapien
cagctggtcacacaggtgggctggc

SEQ ID NO: 2940490 - DNA, 25 bp, Homo sapien
gctggcagcagctggtcacacaggt

SEQ ID NO: 2940491 - DNA, 25 bp, Homo sapien
gctggcagcagggtgtgctgcagca

SEQ ID NO: 2940492 - DNA, 25 bp, Homo sapien
tggcagcagggtgtgctgcagcagg

SEQ ID NO: 2940493 - DNA, 25 bp, Homo sapien
agtacacaggtgcacaggagctgct

SEQ ID NO: 2940494 - DNA, 25 bp, Homo sapien
tacacaggtgcacaggagctgctct

SEQ ID NO: 2940495 - DNA, 25 bp, Homo sapien
ctgcagtacacaggtgcacaggagc

SEQ ID NO: 2940496 - DNA, 25 bp, Homo sapien
cacaggtgcacaggagctgctctgg

SEQ ID NO: 2940497 - DNA, 25 bp, Homo sapien
gagccacagctctggtttaggcaac

SEQ ID NO: 2940498 - DNA, 25 bp, Homo sapien
agccacagctctggtttaggcaacc

SEQ ID NO: 2940499 - DNA, 25 bp, Homo sapien
cagcagcaaaaaggctgacagcagc

SEQ ID NO: 2940500 - DNA, 25 bp, Homo sapien
tcagcagcaaaaaggctgacagcag

SEQ ID NO: 2940501 - DNA, 25 bp, Homo sapien
agcaaaaaggctgacagcagctgga

SEQ ID NO: 2940502 - DNA, 25 bp, Homo sapien
gcagcaaaaaggctgacagcagctg

SEQ ID NO: 2940503 - DNA, 25 bp, Homo sapien
gctggcacatgatccacaaagtgta

SEQ ID NO: 2940504 - DNA, 25 bp, Homo sapien
cagaaacataacccaaagttatgaa

SEQ ID NO: 2940505 - DNA, 25 bp, Homo sapien
tcaaaattgagaacacacgaagctg

SEQ ID NO: 2940506 - DNA, 25 bp, Homo sapien
gaaacctaaattccttagaagcaga

SEQ ID NO: 2940507 - DNA, 25 bp, Homo sapien
ccaatgtcatttctactatattgag

SEQ ID NO: 2940508 - DNA, 25 bp, Homo sapien
tcatttctactatattgagagttaa

SEQ ID NO: 2940509 - DNA, 25 bp, Homo sapien
tgtcatttctactatattgagagtt

SEQ ID NO: 2940510 - DNA, 25 bp, Homo sapien
aatgtcatttctactatattgagag

SEQ ID NO: 2940511 - DNA, 25 bp, Homo sapien
caaattctgactcaagactaacagg

SEQ ID NO: 2940512 - DNA, 25 bp, Homo sapien
aaattctgactcaagactaacaggc

SEQ ID NO: 2940513 - DNA, 25 bp, Homo sapien
attctgactcaagactaacaggcat

SEQ ID NO: 2940514 - DNA, 25 bp, Homo sapien
aattctgactcaagactaacaggca

SEQ ID NO: 2940515 - DNA, 25 bp, Homo sapien
cttccagcaggtggtcctgcagcag

SEQ ID NO: 2940516 - DNA, 25 bp, Homo sapien
gctgctgcaggtggtcacagtggtg

SEQ ID NO: 2940517 - DNA, 25 bp, Homo sapien
tggtcacagtggtgggcttccagca

SEQ ID NO: 2940518 - DNA, 25 bp, Homo sapien
ggcagcagggtgtgctgctgcaggt

SEQ ID NO: 2940519 - DNA, 25 bp, Homo sapien
ctgggcggcagcaaggctggcagca

SEQ ID NO: 2940520 - DNA, 25 bp, Homo sapien
tgggcggcagcaaggctggcagcag

SEQ ID NO: 2940521 - DNA, 25 bp, Homo sapien
tggtcctgcagcaggtgttttgaca

SEQ ID NO: 2940522 - DNA, 25 bp, Homo sapien
cctgcagcaggtgttttgacagcaa

SEQ ID NO: 2940523 - DNA, 25 bp, Homo sapien
ctgcagcaggtgttttgacagcaag

SEQ ID NO: 2940524 - DNA, 25 bp, Homo sapien
gtcctgcagcaggtgttttgacagc

SEQ ID NO: 2940525 - DNA, 25 bp, Homo sapien
tgggctggcagcaggttgtgctgca

SEQ ID NO: 2940526 - DNA, 25 bp, Homo sapien
agatgggctggcagcaggttgtgct

SEQ ID NO: 2940527 - DNA, 25 bp, Homo sapien
ggcagcaggttgtgctgcagcagga

SEQ ID NO: 2940528 - DNA, 25 bp, Homo sapien
gcagatgggctggcagcaggttgtg

SEQ ID NO: 2940529 - DNA, 25 bp, Homo sapien
caggttcttctgcagtacacaggtg

SEQ ID NO: 2940530 - DNA, 25 bp, Homo sapien
tagcaggttcttctgcagtacacag

SEQ ID NO: 2940531 - DNA, 25 bp, Homo sapien
ttcttctgcagtacacaggtgcaca

SEQ ID NO: 2940532 - DNA, 25 bp, Homo sapien
ggttcttctgcagtacacaggtgca

SEQ ID NO: 2940533 - DNA, 25 bp, Homo sapien
tatagggagataacccaaagtgatc

SEQ ID NO: 2940534 - DNA, 25 bp, Homo sapien
tcagcagtaaggtaaattagtcctc

SEQ ID NO: 2940535 - DNA, 25 bp, Homo sapien
tataggtaagatccctggttatagg

SEQ ID NO: 2940536 - DNA, 25 bp, Homo sapien
tgagaacatggttgctgtcagcagt

SEQ ID NO: 2940537 - DNA, 25 bp, Homo sapien
cctgataacatttttatcaggaagt

SEQ ID NO: 2940538 - DNA, 25 bp, Homo sapien
tgataacatttttatcaggaagtca

SEQ ID NO: 2940539 - DNA, 25 bp, Homo sapien
taacatttttatcaggaagtcaaat

SEQ ID NO: 2940540 - DNA, 25 bp, Homo sapien
gataacatttttatcaggaagtcaa

SEQ ID NO: 2940541 - DNA, 25 bp, Homo sapien
tggaacttagggtgctcataccaat

SEQ ID NO: 2940542 - DNA, 25 bp, Homo sapien
gaacttagggtgctcataccaattt

SEQ ID NO: 2940543 - DNA, 25 bp, Homo sapien
ttagggtgctcataccaatttccat

SEQ ID NO: 2940544 - DNA, 25 bp, Homo sapien
atcatggaacttagggtgctcatac

SEQ ID NO: 2940545 - DNA, 25 bp, Homo sapien
agtctgattcaagactgataggcat

SEQ ID NO: 2940546 - DNA, 25 bp, Homo sapien
caaagtctgattcaagactgatagg

SEQ ID NO: 2940547 - DNA, 25 bp, Homo sapien
aaagtctgattcaagactgataggc

SEQ ID NO: 2940548 - DNA, 25 bp, Homo sapien
aagtctgattcaagactgataggca

SEQ ID NO: 2940549 - DNA, 25 bp, Homo sapien
gtgttttgacagcaagttgggtggc

SEQ ID NO: 2940550 - DNA, 25 bp, Homo sapien
tgttttgacagcaagttgggtggca

SEQ ID NO: 2940551 - DNA, 25 bp, Homo sapien
ggtgttttgacagcaagttgggtgg

SEQ ID NO: 2940552 - DNA, 25 bp, Homo sapien
agctggtttggccacagcagctgga

SEQ ID NO: 2940553 - DNA, 25 bp, Homo sapien
gctggtttggccacagcagctggac

SEQ ID NO: 2940554 - DNA, 25 bp, Homo sapien
cacagcagctggacccacagcagat

SEQ ID NO: 2940555 - DNA, 25 bp, Homo sapien
agcagctggacccacagcagatggg

SEQ ID NO: 2940556 - DNA, 25 bp, Homo sapien
ggttcttctgcagtacacaggtgca

SEQ ID NO: 2940557 - DNA, 25 bp, Homo sapien
tagcaggttcttctgcagtacacag

SEQ ID NO: 2940558 - DNA, 25 bp, Homo sapien
caggttcttctgcagtacacaggtg

SEQ ID NO: 2940559 - DNA, 25 bp, Homo sapien
ttcttctgcagtacacaggtgcaca

SEQ ID NO: 2940560 - DNA, 25 bp, Homo sapien
agggctggcagcagctggatccaca

SEQ ID NO: 2940561 - DNA, 25 bp, Homo sapien
agcaggctgggcagtagcagggctg

SEQ ID NO: 2940562 - DNA, 25 bp, Homo sapien
ggctggcagcagctggatccacagc

SEQ ID NO: 2940563 - DNA, 25 bp, Homo sapien
gcagggctggcagcagctggatcca

SEQ ID NO: 2940564 - DNA, 25 bp, Homo sapien
tcagttgagcagaaggttgttgtgt

SEQ ID NO: 2940565 - DNA, 25 bp, Homo sapien
aaacagcaggacttttccttgttgc

SEQ ID NO: 2940566 - DNA, 25 bp, Homo sapien
aaagtttccaccaaacagcaggact

SEQ ID NO: 2940567 - DNA, 25 bp, Homo sapien
tccaaagtttccaccaaacagcagg

SEQ ID NO: 2940568 - DNA, 25 bp, Homo sapien
cttttatacacctggcctccaaagt

SEQ ID NO: 2940569 - DNA, 25 bp, Homo sapien
ggtgttttgacagcaagttgggtgg

SEQ ID NO: 2940570 - DNA, 25 bp, Homo sapien
gttttgacagcaagttgggtggcag

SEQ ID NO: 2940571 - DNA, 25 bp, Homo sapien
ttttgacagcaagttgggtggcagc

SEQ ID NO: 2940572 - DNA, 25 bp, Homo sapien
tgttttgacagcaagttgggtggca

SEQ ID NO: 2940573 - DNA, 25 bp, Homo sapien
aaaatctgtttcaagactaacaggc

SEQ ID NO: 2940574 - DNA, 25 bp, Homo sapien
aaatctgtttcaagactaacaggca

SEQ ID NO: 2940575 - DNA, 25 bp, Homo sapien
aatctgtttcaagactaacaggcat

SEQ ID NO: 2940576 - DNA, 25 bp, Homo sapien
caaaatctgtttcaagactaacagg

SEQ ID NO: 2940577 - DNA, 25 bp, Homo sapien
ggtgttttgacagcaagttgggtgg

SEQ ID NO: 2940578 - DNA, 25 bp, Homo sapien
gagccacagctctggtttaggcaac

SEQ ID NO: 2940579 - DNA, 25 bp, Homo sapien
ttttgacagcaagttgggtggcagc

SEQ ID NO: 2940580 - DNA, 25 bp, Homo sapien
tgcagtagatgggtgcacaggagct

SEQ ID NO: 2940581 - DNA, 25 bp, Homo sapien
ctgcgagctgacgggcccggaccat

SEQ ID NO: 2940582 - DNA, 25 bp, Homo sapien
tttttatgagttgaggtactcagga

SEQ ID NO: 2940583 - DNA, 25 bp, Homo sapien
tttttaccctctggataaacagcag

SEQ ID NO: 2940584 - DNA, 25 bp, Homo sapien
gatgacaggtcttttcgaagatgta

SEQ ID NO: 2940585 - DNA, 25 bp, Homo sapien
ggcgtttttatgagttgaggtactc

SEQ ID NO: 2940586 - DNA, 25 bp, Homo sapien
ggctaatgacagctggcagatgctt

SEQ ID NO: 2940587 - DNA, 25 bp, Homo sapien
aatgacagctggcagatgcttggcc

SEQ ID NO: 2940588 - DNA, 25 bp, Homo sapien
ctgggctaatgacagctggcagatg

SEQ ID NO: 2940589 - DNA, 25 bp, Homo sapien
tgacagctggcagatgcttggccat

SEQ ID NO: 2940590 - DNA, 25 bp, Homo sapien
ctgcgaagatgtggaaggcaagccc

SEQ ID NO: 2940591 - DNA, 25 bp, Homo sapien
tgtggaaggcaagcccctcattcca

SEQ ID NO: 2940592 - DNA, 25 bp, Homo sapien
gatgtggaaggcaagcccctcattc

SEQ ID NO: 2940593 - DNA, 25 bp, Homo sapien
gaagatgtggaaggcaagcccctca

SEQ ID NO: 2940594 - DNA, 25 bp, Homo sapien
gagccacgtgaccaggcgttctcag

SEQ ID NO: 2940595 - DNA, 25 bp, Homo sapien
gcctttccaggactagcatccatgg

SEQ ID NO: 2940596 - DNA, 25 bp, Homo sapien
tgaggatgccatttccacctgggag

SEQ ID NO: 2940597 - DNA, 25 bp, Homo sapien
gaacagagcattcggctgttgccgg

SEQ ID NO: 2940598 - DNA, 25 bp, Homo sapien
tccgctggcagcccagctgggcatc

SEQ ID NO: 2940599 - DNA, 25 bp, Homo sapien
gtccgctggcagcccagctgggcat

SEQ ID NO: 2940600 - DNA, 25 bp, Homo sapien
ccgctggcagcccagctgggcatcc

SEQ ID NO: 2940601 - DNA, 25 bp, Homo sapien
tagatgtcagcatagtgaggcccca

SEQ ID NO: 2940602 - DNA, 25 bp, Homo sapien
agtgcctttgtagatgtcagcatag

SEQ ID NO: 2940603 - DNA, 25 bp, Homo sapien
gcgatcagtgcctttgtagatgtca

SEQ ID NO: 2940604 - DNA, 25 bp, Homo sapien
tgcagaatcccaaggcgatcagtgc

SEQ ID NO: 2940605 - DNA, 25 bp, Homo sapien
tggtgaccccaccatgcggccttgg

SEQ ID NO: 2940606 - DNA, 25 bp, Homo sapien
tctggagcctggccggaggtgctcc

SEQ ID NO: 2940607 - DNA, 25 bp, Homo sapien
ggagcctggccggaggtgctcctgg

SEQ ID NO: 2940608 - DNA, 25 bp, Homo sapien
aagagggatgggaacatcctctgga

SEQ ID NO: 2940609 - DNA, 25 bp, Homo sapien
acccccgactcctctggccccatgg

SEQ ID NO: 2940610 - DNA, 25 bp, Homo sapien
ctctggccccatgggatgctgggcc

SEQ ID NO: 2940611 - DNA, 25 bp, Homo sapien
ccagcacccccgactcctctggccc

SEQ ID NO: 2940612 - DNA, 25 bp, Homo sapien
actcctctggccccatgggatgctg

SEQ ID NO: 2940613 - DNA, 25 bp, Homo sapien
gaaccttgaaggcagtgcgtgccat

SEQ ID NO: 2940614 - DNA, 25 bp, Homo sapien
cttgaaggcagtgcgtgccattggc

SEQ ID NO: 2940615 - DNA, 25 bp, Homo sapien
tcctttctaccaaatacaccctcca

SEQ ID NO: 2940616 - DNA, 25 bp, Homo sapien
ttctaccaaatacaccctccacagg

SEQ ID NO: 2940617 - DNA, 25 bp, Homo sapien
gcccttgggccagtcggggtctgac

SEQ ID NO: 2940618 - DNA, 25 bp, Homo sapien
gccccactgggcacacgtggactta

SEQ ID NO: 2940619 - DNA, 25 bp, Homo sapien
ctggagcagagaaacatggggacag

SEQ ID NO: 2940620 - DNA, 25 bp, Homo sapien
acagtgtgaggaagctgcccttggg

SEQ ID NO: 2940621 - DNA, 25 bp, Homo sapien
ctttgcattgggcagtgaaggcgtt

SEQ ID NO: 2940622 - DNA, 25 bp, Homo sapien
atcctccccatagcctttgcattgg

SEQ ID NO: 2940623 - DNA, 25 bp, Homo sapien
ggggatccctggagcctctcatcct

SEQ ID NO: 2940624 - DNA, 25 bp, Homo sapien
cagtgaaggcgttttcctgttgagt

SEQ ID NO: 2940625 - DNA, 25 bp, Homo sapien
gtgacagcacccacagggtccagag

SEQ ID NO: 2940626 - DNA, 25 bp, Homo sapien
tccagagctcacatgtccatgggtc

SEQ ID NO: 2940627 - DNA, 25 bp, Homo sapien
gagctcacatgtccatgggtccagc

SEQ ID NO: 2940628 - DNA, 25 bp, Homo sapien
agtgacagcacccacagggtccaga

SEQ ID NO: 2940629 - DNA, 25 bp, Homo sapien
tcaggctggctgatatgctctctgg

SEQ ID NO: 2940630 - DNA, 25 bp, Homo sapien
tggaggaaactgattgtctctcctc

SEQ ID NO: 2940631 - DNA, 25 bp, Homo sapien
tgattgtctctcctcatactggtag

SEQ ID NO: 2940632 - DNA, 25 bp, Homo sapien
ccctcaggctggctgatatgctctc

SEQ ID NO: 2940633 - DNA, 25 bp, Homo sapien
gtagatcagggtcagcagatctgca

SEQ ID NO: 2940634 - DNA, 25 bp, Homo sapien
ctgcattcagctttagccccagggg

SEQ ID NO: 2940635 - DNA, 25 bp, Homo sapien
gcagagcttccgcaagctgtagatc

SEQ ID NO: 2940636 - DNA, 25 bp, Homo sapien
gggtcagcagatctgcattcagctt

SEQ ID NO: 2940637 - DNA, 25 bp, Homo sapien
ctggcaggagaacagatccactctc

SEQ ID NO: 2940638 - DNA, 25 bp, Homo sapien
tggcaggagaacagatccactctcc

SEQ ID NO: 2940639 - DNA, 25 bp, Homo sapien
cttgagtggcacgcctattggactg

SEQ ID NO: 2940640 - DNA, 25 bp, Homo sapien
tggcacgcctattggactgctggct

SEQ ID NO: 2940641 - DNA, 25 bp, Homo sapien
tgagtggcacgcctattggactgct

SEQ ID NO: 2940642 - DNA, 25 bp, Homo sapien
gcacgcctattggactgctggcttc

SEQ ID NO: 2940643 - DNA, 25 bp, Homo sapien
tgccgggacttggtcccagtacagt

SEQ ID NO: 2940644 - DNA, 25 bp, Homo sapien
gctgccgggacttggtcccagtaca

SEQ ID NO: 2940645 - DNA, 25 bp, Homo sapien
aaggctgccgggacttggtcccagt

SEQ ID NO: 2940646 - DNA, 25 bp, Homo sapien
aggctgccgggacttggtcccagta

SEQ ID NO: 2940647 - DNA, 25 bp, Homo sapien
aagtgccttctctgcagaccatgct

SEQ ID NO: 2940648 - DNA, 25 bp, Homo sapien
caaagccatttagatcaaccacagg

SEQ ID NO: 2940649 - DNA, 25 bp, Homo sapien
tgctagtggcaactcctgtggaccc

SEQ ID NO: 2940650 - DNA, 25 bp, Homo sapien
tgtggcacctctcaaaagggttgct

SEQ ID NO: 2940651 - DNA, 25 bp, Homo sapien
ggtgtttcctgaacgtactactgca

SEQ ID NO: 2940652 - DNA, 25 bp, Homo sapien
gaagctgtagtcctgtgtccataga

SEQ ID NO: 2940653 - DNA, 25 bp, Homo sapien
caagagcttggagaatactgctggc

SEQ ID NO: 2940654 - DNA, 25 bp, Homo sapien
catttacgccttgcaggacactcag

SEQ ID NO: 2940655 - DNA, 25 bp, Homo sapien
tgcattttccaggttagcccctcgg

SEQ ID NO: 2940656 - DNA, 25 bp, Homo sapien
taaatgcccatcttacaccttctaa

SEQ ID NO: 2940657 - DNA, 25 bp, Homo sapien
catacatattgaggacccatcttgg

SEQ ID NO: 2940658 - DNA, 25 bp, Homo sapien
actgcacccagtacccgttttctat

SEQ ID NO: 2940659 - DNA, 25 bp, Homo sapien
catcttggccggaattgttcataaa

SEQ ID NO: 2940660 - DNA, 25 bp, Homo sapien
cacagggctgaagcgatgggccatc

SEQ ID NO: 2940661 - DNA, 25 bp, Homo sapien
gggctgaagcgatgggccatcacca

SEQ ID NO: 2940662 - DNA, 25 bp, Homo sapien
cagggctgaagcgatgggccatcac

SEQ ID NO: 2940663 - DNA, 25 bp, Homo sapien
ccacagggctgaagcgatgggccat

SEQ ID NO: 2940664 - DNA, 25 bp, Homo sapien
taagcaacttgtgaagcaggcgggc

SEQ ID NO: 2940665 - DNA, 25 bp, Homo sapien
tgccagaagccatgtgggtaccgag

SEQ ID NO: 2940666 - DNA, 25 bp, Homo sapien
caattagatggcaaagggcaggcca

SEQ ID NO: 2940667 - DNA, 25 bp, Homo sapien
tgttacaggtacgagagagagcgct

SEQ ID NO: 2940668 - DNA, 25 bp, Homo sapien
gtgtgccgaaactaccagtcctact

SEQ ID NO: 2940669 - DNA, 25 bp, Homo sapien
agaggagcaagtgccacgagtccag

SEQ ID NO: 2940670 - DNA, 25 bp, Homo sapien
gcttactgcctgtcggccaaatccg

SEQ ID NO: 2940671 - DNA, 25 bp, Homo sapien
tgaggtttgcggtgcaccagatcag

SEQ ID NO: 2940672 - DNA, 25 bp, Homo sapien
ttttgttctctatgagagaagctca

SEQ ID NO: 2940673 - DNA, 25 bp, Homo sapien
ggtctctcagtgagctctcttccac

SEQ ID NO: 2940674 - DNA, 25 bp, Homo sapien
catgaagtctttttccggtctctca

SEQ ID NO: 2940675 - DNA, 25 bp, Homo sapien
gagaagctcattccccaacccttta

SEQ ID NO: 2940676 - DNA, 25 bp, Homo sapien
tcttgcacaggcgaaagatccagtg

SEQ ID NO: 2940677 - DNA, 25 bp, Homo sapien
tacaaattgacaacgcgaagctggc

SEQ ID NO: 2940678 - DNA, 25 bp, Homo sapien
catgaagttcctgaatgaccgcctg

SEQ ID NO: 2940679 - DNA, 25 bp, Homo sapien
tctcctatcgatgttgggtgccagc

SEQ ID NO: 2940680 - DNA, 25 bp, Homo sapien
tccctggaaaacacgctgacggaga

SEQ ID NO: 2940681 - DNA, 25 bp, Homo sapien
tgcatgatcaccaacgttgaggccc

SEQ ID NO: 2940682 - DNA, 25 bp, Homo sapien
cctttgccttagagggactccctgg

SEQ ID NO: 2940683 - DNA, 25 bp, Homo sapien
gcttccgtttccaaagtgactggtg

SEQ ID NO: 2940684 - DNA, 25 bp, Homo sapien
gggaccgccttaacatcgaggtgga

SEQ ID NO: 2940685 - DNA, 25 bp, Homo sapien
tgtgccttttcaggaagtcggttcc

SEQ ID NO: 2940686 - DNA, 25 bp, Homo sapien
tcggttcccttcgatgccagcttgg

SEQ ID NO: 2940687 - DNA, 25 bp, Homo sapien
ttaacatcgaggtggacgctgcacc

SEQ ID NO: 2940688 - DNA, 25 bp, Homo sapien
taatgtttcaatctttagcaacttt

SEQ ID NO: 2940689 - DNA, 25 bp, Homo sapien
tgcagtccttaggggccatctaatg

SEQ ID NO: 2940690 - DNA, 25 bp, Homo sapien
tctaatgtttcaatctttagcaact

SEQ ID NO: 2940691 - DNA, 25 bp, Homo sapien
ccttaggggccatctaatgtttcaa

SEQ ID NO: 2940692 - DNA, 25 bp, Homo sapien
tcgggcctttaactagtcaagccag

SEQ ID NO: 2940693 - DNA, 25 bp, Homo sapien
aactgggaacggcaccaagaagcca

SEQ ID NO: 2940694 - DNA, 25 bp, Homo sapien
gatctcacgttgaatggcctgtcca

SEQ ID NO: 2940695 - DNA, 25 bp, Homo sapien
tgaacaagtgcctctgaatcttggc

SEQ ID NO: 2940696 - DNA, 25 bp, Homo sapien
gtcaacatgtagagtgaacagagca

SEQ ID NO: 2940697 - DNA, 25 bp, Homo sapien
gcaataccaggtcaacatgtagagt

SEQ ID NO: 2940698 - DNA, 25 bp, Homo sapien
cgtatcagatattaagacgataaga

SEQ ID NO: 2940699 - DNA, 25 bp, Homo sapien
tattaagacgataagaacagatacc

SEQ ID NO: 2940700 - DNA, 25 bp, Homo sapien
aggctttggtaatgcacagcgggag

SEQ ID NO: 2940701 - DNA, 25 bp, Homo sapien
aagtggttgtcgcccagatgaaggg

SEQ ID NO: 2940702 - DNA, 25 bp, Homo sapien
tccatttagtcccaggctttggtaa

SEQ ID NO: 2940703 - DNA, 25 bp, Homo sapien
gagattctccatttagtcccaggct

SEQ ID NO: 2940704 - DNA, 25 bp, Homo sapien
gaataaccgcagagatgtggaggcc

SEQ ID NO: 2940705 - DNA, 25 bp, Homo sapien
tcagcacagcatggtgagtggcccc

SEQ ID NO: 2940706 - DNA, 25 bp, Homo sapien
tatatacggagaaggagaccaaggc

SEQ ID NO: 2940707 - DNA, 25 bp, Homo sapien
tatgagatgccagtacgaggccctg

SEQ ID NO: 2940708 - DNA, 25 bp, Homo sapien
cagggaaggtttgccatgccactcc

SEQ ID NO: 2940709 - DNA, 25 bp, Homo sapien
gaaaatgtggcatgagccctggacc

SEQ ID NO: 2940710 - DNA, 25 bp, Homo sapien
tgggcctcctgtagcttatgggaag

SEQ ID NO: 2940711 - DNA, 25 bp, Homo sapien
tgctgacgacttccggaccaagtga

SEQ ID NO: 2940712 - DNA, 25 bp, Homo sapien
tccactgggtctatcaagggcctct

SEQ ID NO: 2940713 - DNA, 25 bp, Homo sapien
ggaggcgtctgtctcattccagggc

SEQ ID NO: 2940714 - DNA, 25 bp, Homo sapien
ccaggagtggtacgagtttcagatc

SEQ ID NO: 2940715 - DNA, 25 bp, Homo sapien
gctggttctgcgagggctccttcaa

SEQ ID NO: 2940716 - DNA, 25 bp, Homo sapien
cttttaccatcccagtagcccaggc

SEQ ID NO: 2940717 - DNA, 25 bp, Homo sapien
ttttaccatcccagtagcccaggca

SEQ ID NO: 2940718 - DNA, 25 bp, Homo sapien
ccttttaccatcccagtagcccagg

SEQ ID NO: 2940719 - DNA, 25 bp, Homo sapien
cacttctgatgtccgtaggccttaa

SEQ ID NO: 2940720 - DNA, 25 bp, Homo sapien
tgctcttctcttccggtcggatctc

SEQ ID NO: 2940721 - DNA, 25 bp, Homo sapien
tctaatgcctctggtcgccgcactt

SEQ ID NO: 2940722 - DNA, 25 bp, Homo sapien
tctctcctgatggtgggccctctgt

SEQ ID NO: 2940723 - DNA, 25 bp, Homo sapien
cacctctgttaccacgacttctagt

SEQ ID NO: 2940724 - DNA, 25 bp, Homo sapien
cctctgttaccacgacttctagtgc

SEQ ID NO: 2940725 - DNA, 25 bp, Homo sapien
agcacctctgttaccacgacttcta

SEQ ID NO: 2940726 - DNA, 25 bp, Homo sapien
gcacctctgttaccacgacttctag

SEQ ID NO: 2940727 - DNA, 25 bp, Homo sapien
tctctcccaggatgattggtttccc

SEQ ID NO: 2940728 - DNA, 25 bp, Homo sapien
gggaagacaaacaccctgaatcttg

SEQ ID NO: 2940729 - DNA, 25 bp, Homo sapien
tttgggcgatccagagggaagacaa

SEQ ID NO: 2940730 - DNA, 25 bp, Homo sapien
cttgaaatgataagccgaggcactt

SEQ ID NO: 2940731 - DNA, 25 bp, Homo sapien
agcaggcagggccttagagatccac

SEQ ID NO: 2940732 - DNA, 25 bp, Homo sapien
gggccaggacgccaagtaggtcctc

SEQ ID NO: 2940733 - DNA, 25 bp, Homo sapien
gcctctttcttaggatagtgactgc

SEQ ID NO: 2940734 - DNA, 25 bp, Homo sapien
ctttcttaggatagtgactgcagga

SEQ ID NO: 2940735 - DNA, 25 bp, Homo sapien
tagtgagcggcagaatcaggagtac

SEQ ID NO: 2940736 - DNA, 25 bp, Homo sapien
tcaggagtaccagcggctcatggac

SEQ ID NO: 2940737 - DNA, 25 bp, Homo sapien
catggacatcaagtcgcggctggag

SEQ ID NO: 2940738 - DNA, 25 bp, Homo sapien
tgatcagcggtattgaagcccagct

SEQ ID NO: 2940739 - DNA, 25 bp, Homo sapien
aagaacggatctgcgtcacacgctc

SEQ ID NO: 2940740 - DNA, 25 bp, Homo sapien
tttctctggccggaagggtctagtg

SEQ ID NO: 2940741 - DNA, 25 bp, Homo sapien
tggaacatttacagccgcacacgct

SEQ ID NO: 2940742 - DNA, 25 bp, Homo sapien
tgctgtactcgtggcatagacccag

SEQ ID NO: 2940743 - DNA, 25 bp, Homo sapien
aagtgcagtgcacctgccgcggaaa

SEQ ID NO: 2940744 - DNA, 25 bp, Homo sapien
tccgcgactggtaccagaagcaggg

SEQ ID NO: 2940745 - DNA, 25 bp, Homo sapien
tgctggcgggcaacgagaagctaac

SEQ ID NO: 2940746 - DNA, 25 bp, Homo sapien
ccaacggcgagctagaggtgaagat

SEQ ID NO: 2940747 - DNA, 25 bp, Homo sapien
tgccaggtgtgataaaccttttaca

SEQ ID NO: 2940748 - DNA, 25 bp, Homo sapien
gagtttccgatcttatttgacaggg

SEQ ID NO: 2940749 - DNA, 25 bp, Homo sapien
cctgcagggatctcatagtgctggg

SEQ ID NO: 2940750 - DNA, 25 bp, Homo sapien
tttatcacttgaagcaaccctctga

SEQ ID NO: 2940751 - DNA, 25 bp, Homo sapien
ccgagtgcggctttgggctgctcat

SEQ ID NO: 2940752 - DNA, 25 bp, Homo sapien
ctggctcaaacaatcactgttggct

SEQ ID NO: 2940753 - DNA, 25 bp, Homo sapien
tggctcaaacaatcactgttggctt

SEQ ID NO: 2940754 - DNA, 25 bp, Homo sapien
ctgacacatgccatttaaccttcat

SEQ ID NO: 2940755 - DNA, 25 bp, Homo sapien
ctgctgagtggttgtcccctgcggt

SEQ ID NO: 2940756 - DNA, 25 bp, Homo sapien
tgatgactgacacatgccatttaac

SEQ ID NO: 2940757 - DNA, 25 bp, Homo sapien
gtcccctgcggtgatgactgacaca

SEQ ID NO: 2940758 - DNA, 25 bp, Homo sapien
tctcagggttgaccgagtgtagaaa

SEQ ID NO: 2940759 - DNA, 25 bp, Homo sapien
tgtccacgtagatgatcagccacat

SEQ ID NO: 2940760 - DNA, 25 bp, Homo sapien
ctggctgtccacgtagatgatcagc

SEQ ID NO: 2940761 - DNA, 25 bp, Homo sapien
gggccccacagaatatgacggactc

SEQ ID NO: 2940762 - DNA, 25 bp, Homo sapien
cacacatctaccaggcgtgttgcac

SEQ ID NO: 2940763 - DNA, 25 bp, Homo sapien
tcacacatctaccaggcgtgttgca

SEQ ID NO: 2940764 - DNA, 25 bp, Homo sapien
caaagctgtcggagaacacatgagt

SEQ ID NO: 2940765 - DNA, 25 bp, Homo sapien
tctccccaggaagatcaaagctgtc

SEQ ID NO: 2940766 - DNA, 25 bp, Homo sapien
gaagatcaaagctgtcggagaacac

SEQ ID NO: 2940767 - DNA, 25 bp, Homo sapien
gaacacatgagtatcagaagcagag

SEQ ID NO: 2940768 - DNA, 25 bp, Homo sapien
aggttagcagcagcttgaaattctc

SEQ ID NO: 2940769 - DNA, 25 bp, Homo sapien
gctttgtctttgtaattggcctctt

SEQ ID NO: 2940770 - DNA, 25 bp, Homo sapien
tttgtctttgtaattggcctcttcc

SEQ ID NO: 2940771 - DNA, 25 bp, Homo sapien
ctgctcatacaggttagcagcagct

SEQ ID NO: 2940772 - DNA, 25 bp, Homo sapien
aacatgtctggtagtggcttcctga

SEQ ID NO: 2940773 - DNA, 25 bp, Homo sapien
cagatgcactctgtgagtcatgagt

SEQ ID NO: 2940774 - DNA, 25 bp, Homo sapien
aggtatactgtatggtcctggggcc

SEQ ID NO: 2940775 - DNA, 25 bp, Homo sapien
ttgtggcagaccaagagttcccttg

SEQ ID NO: 2940776 - DNA, 25 bp, Homo sapien
cagagttgaacctgcgcatgagtgt

SEQ ID NO: 2940777 - DNA, 25 bp, Homo sapien
gaacctgcgcatgagtgtggaagcc

SEQ ID NO: 2940778 - DNA, 25 bp, Homo sapien
tgtggaagccgacatcaatggcctg

SEQ ID NO: 2940779 - DNA, 25 bp, Homo sapien
ggtatgagacagagttgaacctgcg

SEQ ID NO: 2940780 - DNA, 25 bp, Homo sapien
gccgcggatgacttccgcaccaagt

SEQ ID NO: 2940781 - DNA, 25 bp, Homo sapien
tgacaatgcccgtctggccgcggat

SEQ ID NO: 2940782 - DNA, 25 bp, Homo sapien
acaatgcccgtctggccgcggatga

SEQ ID NO: 2940783 - DNA, 25 bp, Homo sapien
cgtctggccgcggatgacttccgca

SEQ ID NO: 2940784 - DNA, 25 bp, Homo sapien
aaagactacagtccctacttcaaga

SEQ ID NO: 2940785 - DNA, 25 bp, Homo sapien
tccgtgactggtaccagaggcagcg

SEQ ID NO: 2940786 - DNA, 25 bp, Homo sapien
aggccaacgccgacctggaagtgaa

SEQ ID NO: 2940787 - DNA, 25 bp, Homo sapien
tacgggggcggcctgtctgtctcat

SEQ ID NO: 2940788 - DNA, 25 bp, Homo sapien
cggcatcgggggcggcatcgggggc

SEQ ID NO: 2940789 - DNA, 25 bp, Homo sapien
gaagggctcctgcggcatcgggggc

SEQ ID NO: 2940790 - DNA, 25 bp, Homo sapien
ctgcggcatcgggggcggcatcggg

SEQ ID NO: 2940791 - DNA, 25 bp, Homo sapien
ctcctgcggcatcgggggcggcatc

SEQ ID NO: 2940792 - DNA, 25 bp, Homo sapien
ccgccagttcacctcctccagctcc

SEQ ID NO: 2940793 - DNA, 25 bp, Homo sapien
cctcctctgcaccatgaccacctgc

SEQ ID NO: 2940794 - DNA, 25 bp, Homo sapien
catgaccacctgcagccgccagttc

SEQ ID NO: 2940795 - DNA, 25 bp, Homo sapien
ctccctcctctgcaccatgaccacc

SEQ ID NO: 2940796 - DNA, 25 bp, Homo sapien
tcagatgtctgtctcagcattgtct

SEQ ID NO: 2940797 - DNA, 25 bp, Homo sapien
gagaagtgactcattagcactgagg

SEQ ID NO: 2940798 - DNA, 25 bp, Homo sapien
ggaagataggaacatggtctcatga

SEQ ID NO: 2940799 - DNA, 25 bp, Homo sapien
aacgtaagtatctgcgtggcttcgg

SEQ ID NO: 2940800 - DNA, 25 bp, Homo sapien
taccttggagatcctagtctgatgg

SEQ ID NO: 2940801 - DNA, 25 bp, Homo sapien
cctctggctctgtcaagggcctgtg

SEQ ID NO: 2940802 - DNA, 25 bp, Homo sapien
cacctggcgggggtttctcctggat

SEQ ID NO: 2940803 - DNA, 25 bp, Homo sapien
tgtcaagggcctgtggacacctggc

SEQ ID NO: 2940804 - DNA, 25 bp, Homo sapien
cctggatgtcatctgtcagtgttgg

SEQ ID NO: 2940805 - DNA, 25 bp, Homo sapien
ctggaagagccattggacctctcct

SEQ ID NO: 2940806 - DNA, 25 bp, Homo sapien
agagccattggacctctccttcttt

SEQ ID NO: 2940807 - DNA, 25 bp, Homo sapien
gggctggaagagccattggacctct

SEQ ID NO: 2940808 - DNA, 25 bp, Homo sapien
gagccattggacctctccttcttta

SEQ ID NO: 2940809 - DNA, 25 bp, Homo sapien
tcagggcacccagcaatgttccgaa

SEQ ID NO: 2940810 - DNA, 25 bp, Homo sapien
cagcaatgttccgaatctcccaggg

SEQ ID NO: 2940811 - DNA, 25 bp, Homo sapien
gggcacccagcaatgttccgaatct

SEQ ID NO: 2940812 - DNA, 25 bp, Homo sapien
atgttccgaatctcccagggccctg

SEQ ID NO: 2940813 - DNA, 25 bp, Homo sapien
ttaagggactagagacggtgaagct

SEQ ID NO: 2940814 - DNA, 25 bp, Homo sapien
acggtgaagctgaagatggcgagga

SEQ ID NO: 2940815 - DNA, 25 bp, Homo sapien
aagatggcgaggaggagccaggacc

SEQ ID NO: 2940816 - DNA, 25 bp, Homo sapien
gtgctctggctgttaagggactaga

SEQ ID NO: 2940817 - DNA, 25 bp, Homo sapien
gcagggccagggcaaaggtcttcat

SEQ ID NO: 2940818 - DNA, 25 bp, Homo sapien
tctctgtgcacagcagggccaccag

SEQ ID NO: 2940819 - DNA, 25 bp, Homo sapien
gggtctctctgtgcacagcagggcc

SEQ ID NO: 2940820 - DNA, 25 bp, Homo sapien
gtctctctgtgcacagcagggccac

SEQ ID NO: 2940821 - DNA, 25 bp, Homo sapien
gcatttgacaattctaaccccacct

SEQ ID NO: 2940822 - DNA, 25 bp, Homo sapien
ggtttcgtcctgtgccagcatttga

SEQ ID NO: 2940823 - DNA, 25 bp, Homo sapien
tgccagcatttgacaattctaaccc

SEQ ID NO: 2940824 - DNA, 25 bp, Homo sapien
tattattagggtttcgtcctgtgcc

SEQ ID NO: 2940825 - DNA, 25 bp, Homo sapien
tgagaatccgtgtttcctgcccctg

SEQ ID NO: 2940826 - DNA, 25 bp, Homo sapien
taaggcccagtctcgacacggcttt

SEQ ID NO: 2940827 - DNA, 25 bp, Homo sapien
gacttgggacaagctggattcctga

SEQ ID NO: 2940828 - DNA, 25 bp, Homo sapien
tattttgggcggtatctggcgccga

SEQ ID NO: 2940829 - DNA, 25 bp, Homo sapien
aagacctttgttggccgcgtggcct

SEQ ID NO: 2940830 - DNA, 25 bp, Homo sapien
ttcctaattgctctgaaacctcacc

SEQ ID NO: 2940831 - DNA, 25 bp, Homo sapien
cccgttccccagctatcatgctctt

SEQ ID NO: 2940832 - DNA, 25 bp, Homo sapien
accaccatccgcgtcgctcatgcct

SEQ ID NO: 2940833 - DNA, 25 bp, Homo sapien
tctagttcccagtgatttagctctg

SEQ ID NO: 2940834 - DNA, 25 bp, Homo sapien
ctagttcccagtgatttagctctgc

SEQ ID NO: 2940835 - DNA, 25 bp, Homo sapien
atctctagttcccagtgatttagct

SEQ ID NO: 2940836 - DNA, 25 bp, Homo sapien
tctccctgctcccagtttagaagac

SEQ ID NO: 2940837 - DNA, 25 bp, Homo sapien
gagggcaggtggatgttccagatgg

SEQ ID NO: 2940838 - DNA, 25 bp, Homo sapien
gaaggaggtgttctctagctgaggg

SEQ ID NO: 2940839 - DNA, 25 bp, Homo sapien
tggatgttccagatggagggaagag

SEQ ID NO: 2940840 - DNA, 25 bp, Homo sapien
aggaggtgttctctagctgagggca

SEQ ID NO: 2940841 - DNA, 25 bp, Homo sapien
gcagagcatctgtcttccccatcct

SEQ ID NO: 2940842 - DNA, 25 bp, Homo sapien
cctcctttttcagggagtcctgcag

SEQ ID NO: 2940843 - DNA, 25 bp, Homo sapien
tctttgctggcagagcatctgtctt

SEQ ID NO: 2940844 - DNA, 25 bp, Homo sapien
gggacttggctcagttcctctttgc

SEQ ID NO: 2940845 - DNA, 25 bp, Homo sapien
gacccgggcctgttgcagcttgatc

SEQ ID NO: 2940846 - DNA, 25 bp, Homo sapien
gagacccgggcctgttgcagcttga

SEQ ID NO: 2940847 - DNA, 25 bp, Homo sapien
ccgggcctgttgcagcttgatctgc

SEQ ID NO: 2940848 - DNA, 25 bp, Homo sapien
cccgggcctgttgcagcttgatctg

SEQ ID NO: 2940849 - DNA, 25 bp, Homo sapien
ctgctgaatcctcggcggcggctca

SEQ ID NO: 2940850 - DNA, 25 bp, Homo sapien
cgtcgggaagcgagggggctcaagg

SEQ ID NO: 2940851 - DNA, 25 bp, Homo sapien
gaacgtcgggaagcgagggggctca

SEQ ID NO: 2940852 - DNA, 25 bp, Homo sapien
gaggctgctgaatcctcggcggcgg

SEQ ID NO: 2940853 - DNA, 25 bp, Homo sapien
gatacgattccttttcctcggtgga

SEQ ID NO: 2940854 - DNA, 25 bp, Homo sapien
cgatacgattccttttcctcggtgg

SEQ ID NO: 2940855 - DNA, 25 bp, Homo sapien
acgatacgattccttttcctcggtg

SEQ ID NO: 2940856 - DNA, 25 bp, Homo sapien
aaagagtggaggttctggatagcgg

SEQ ID NO: 2940857 - DNA, 25 bp, Homo sapien
agtggaggttctggatagcggacat

SEQ ID NO: 2940858 - DNA, 25 bp, Homo sapien
agagtggaggttctggatagcggac

SEQ ID NO: 2940859 - DNA, 25 bp, Homo sapien
cgaaagagtggaggttctggatagc

SEQ ID NO: 2940860 - DNA, 25 bp, Homo sapien
tgctccttccggtcgcgctcagggt

SEQ ID NO: 2940861 - DNA, 25 bp, Homo sapien
cgaaggcccggagcgcttggcaact

SEQ ID NO: 2940862 - DNA, 25 bp, Homo sapien
gtcaagtttcccctgcccgagctta

SEQ ID NO: 2940863 - DNA, 25 bp, Homo sapien
tgccctgcgaccctggtcaagtttc

SEQ ID NO: 2940864 - DNA, 25 bp, Homo sapien
cactgaaatcgtcagggcttgggcc

SEQ ID NO: 2940865 - DNA, 25 bp, Homo sapien
tagtaaatgcgccactgagacgccg

SEQ ID NO: 2940866 - DNA, 25 bp, Homo sapien
tccccaggtgttttgcgcgtgcaga

SEQ ID NO: 2940867 - DNA, 25 bp, Homo sapien
taacggacgtgacgcaatggtgacg

SEQ ID NO: 2940868 - DNA, 25 bp, Homo sapien
aagcaggtcatcacccttacttgca

SEQ ID NO: 2940869 - DNA, 25 bp, Homo sapien
agcaggtcatcacccttacttgcat

SEQ ID NO: 2940870 - DNA, 25 bp, Homo sapien
ttccgctaacaatacatacaacaca

SEQ ID NO: 2940871 - DNA, 25 bp, Homo sapien
ggcctagcaagagcatgaacgcatt

SEQ ID NO: 2940872 - DNA, 25 bp, Homo sapien
tttatcaccccttccgctaacaata

SEQ ID NO: 2940873 - DNA, 25 bp, Homo sapien
ccccttgtggacaaatccattatga

SEQ ID NO: 2940874 - DNA, 25 bp, Homo sapien
tatgttcttgcgttggtcaccctgt

SEQ ID NO: 2940875 - DNA, 25 bp, Homo sapien
tcttgcgttggtcaccctgtagctg

SEQ ID NO: 2940876 - DNA, 25 bp, Homo sapien
gctcaattacagtaccattgcaggc

SEQ ID NO: 2940877 - DNA, 25 bp, Homo sapien
tggcatatgttcttgcgttggtcac

SEQ ID NO: 2940878 - DNA, 25 bp, Homo sapien
gaatgagactcatcaggtatctgaa

SEQ ID NO: 2940879 - DNA, 25 bp, Homo sapien
aagccaacttttatgtccccagcag

SEQ ID NO: 2940880 - DNA, 25 bp, Homo sapien
tccccagcagaagctaacagacagg

SEQ ID NO: 2940881 - DNA, 25 bp, Homo sapien
cacaatggttcaacagagggtcctc

SEQ ID NO: 2940882 - DNA, 25 bp, Homo sapien
atgaaccttcagctgatcgtcctta

SEQ ID NO: 2940883 - DNA, 25 bp, Homo sapien
gctgatcgtccttagccagtccaat

SEQ ID NO: 2940884 - DNA, 25 bp, Homo sapien
agctgatcgtccttagccagtccaa

SEQ ID NO: 2940885 - DNA, 25 bp, Homo sapien
acccatgaaccttcagctgatcgtc

SEQ ID NO: 2940886 - DNA, 25 bp, Homo sapien
tggttacattatacaagctgtgagg

SEQ ID NO: 2940887 - DNA, 25 bp, Homo sapien
agcggaccccaaatggttacattat

SEQ ID NO: 2940888 - DNA, 25 bp, Homo sapien
tttaaacctgtgacaagggagagaa

SEQ ID NO: 2940889 - DNA, 25 bp, Homo sapien
gagaagggaaattctactcattgca

SEQ ID NO: 2940890 - DNA, 25 bp, Homo sapien
tcgctagcggtaagagggcctcttt

SEQ ID NO: 2940891 - DNA, 25 bp, Homo sapien
taactctgatagaaggttggcctca

SEQ ID NO: 2940892 - DNA, 25 bp, Homo sapien
ggtttcaggcttgacactgccaggc

SEQ ID NO: 2940893 - DNA, 25 bp, Homo sapien
tacttcacatggcattgggcagctg

SEQ ID NO: 2940894 - DNA, 25 bp, Homo sapien
taagggtttaaatacattacacata

SEQ ID NO: 2940895 - DNA, 25 bp, Homo sapien
ataagggtttaaatacattacacat

SEQ ID NO: 2940896 - DNA, 25 bp, Homo sapien
ggatcttaacccacagcatgaatgc

SEQ ID NO: 2940897 - DNA, 25 bp, Homo sapien
aagctgtgggtgtggacgaatcctc

SEQ ID NO: 2940898 - DNA, 25 bp, Homo sapien
taaaccaaggctgttactactgagg

SEQ ID NO: 2940899 - DNA, 25 bp, Homo sapien
gttgaatgaagcatccttaggcagc

SEQ ID NO: 2940900 - DNA, 25 bp, Homo sapien
tgtccacgagccagagagatgctgc

SEQ ID NO: 2940901 - DNA, 25 bp, Homo sapien
ctgtccacgagccagagagatgctg

SEQ ID NO: 2940902 - DNA, 25 bp, Homo sapien
ccaaatgatccctggcagacggcag

SEQ ID NO: 2940903 - DNA, 25 bp, Homo sapien
aaatgatccctggcagacggcagag

SEQ ID NO: 2940904 - DNA, 25 bp, Homo sapien
gaacacagctgcctaagtcccgctt

SEQ ID NO: 2940905 - DNA, 25 bp, Homo sapien
agctgcctaagtcccgcttccgtcc

SEQ ID NO: 2940906 - DNA, 25 bp, Homo sapien
acagctgcctaagtcccgcttccgt

SEQ ID NO: 2940907 - DNA, 25 bp, Homo sapien
cgtgaacacagctgcctaagtcccg

SEQ ID NO: 2940908 - DNA, 25 bp, Homo sapien
aggtgtttgcatcaatgagggcatc

SEQ ID NO: 2940909 - DNA, 25 bp, Homo sapien
gtgtttgcatcaatgagggcatcca

SEQ ID NO: 2940910 - DNA, 25 bp, Homo sapien
ggtgtttgcatcaatgagggcatcc

SEQ ID NO: 2940911 - DNA, 25 bp, Homo sapien
gaaggtgtttgcatcaatgagggca

SEQ ID NO: 2940912 - DNA, 25 bp, Homo sapien
cggtgtccatggcaactgacggctg

SEQ ID NO: 2940913 - DNA, 25 bp, Homo sapien
aactgacggctgaataaccgttgtg

SEQ ID NO: 2940914 - DNA, 25 bp, Homo sapien
taaccgttgtgaataaccactctca

SEQ ID NO: 2940915 - DNA, 25 bp, Homo sapien
cttgctgagaattaatgggtgatga

SEQ ID NO: 2940916 - DNA, 25 bp, Homo sapien
cttttctgggagagtttgatcccct

SEQ ID NO: 2940917 - DNA, 25 bp, Homo sapien
tccccttgggtattgggtaactgca

SEQ ID NO: 2940918 - DNA, 25 bp, Homo sapien
tattgggtaactgcagtggtaccca

SEQ ID NO: 2940919 - DNA, 25 bp, Homo sapien
tttctgggagagtttgatccccttg

SEQ ID NO: 2940920 - DNA, 25 bp, Homo sapien
actgatgtttggcaagcgtgtgaat

SEQ ID NO: 2940921 - DNA, 25 bp, Homo sapien
gagtgaacccgatgggcttagattc

SEQ ID NO: 2940922 - DNA, 25 bp, Homo sapien
gtgatgtattgattccccgtcccct

SEQ ID NO: 2940923 - DNA, 25 bp, Homo sapien
tgagggagtgaacccgatgggctta

SEQ ID NO: 2940924 - DNA, 25 bp, Homo sapien
tgtggtgccacggctgggcctggtg

SEQ ID NO: 2940925 - DNA, 25 bp, Homo sapien
gtggtgccacggctgggcctggtgc

SEQ ID NO: 2940926 - DNA, 25 bp, Homo sapien
tggtgccacggctgggcctggtgcc

SEQ ID NO: 2940927 - DNA, 25 bp, Homo sapien
gtgtgtggtgccacggctgggcctg

SEQ ID NO: 2940928 - DNA, 25 bp, Homo sapien
agtgcaaagatcagcacatacacac

SEQ ID NO: 2940929 - DNA, 25 bp, Homo sapien
ccttcgatgatgagaggctgggccc

SEQ ID NO: 2940930 - DNA, 25 bp, Homo sapien
ctgttggcccctgtacctaagggtg

SEQ ID NO: 2940931 - DNA, 25 bp, Homo sapien
agggtagctccaggtccctgttggc

SEQ ID NO: 2940932 - DNA, 25 bp, Homo sapien
agcactgcggcggccgaagtccatc

SEQ ID NO: 2940933 - DNA, 25 bp, Homo sapien
ggcggccgaagtccatccatccata

SEQ ID NO: 2940934 - DNA, 25 bp, Homo sapien
cggccgaagtccatccatccatagg

SEQ ID NO: 2940935 - DNA, 25 bp, Homo sapien
ctgcggcggccgaagtccatccatc

SEQ ID NO: 2940936 - DNA, 25 bp, Homo sapien
gtggctaggctctgaagcttggttc

SEQ ID NO: 2940937 - DNA, 25 bp, Homo sapien
tggctaggctctgaagcttggttct

SEQ ID NO: 2940938 - DNA, 25 bp, Homo sapien
ggtggctaggctctgaagcttggtt

SEQ ID NO: 2940939 - DNA, 25 bp, Homo sapien
agtttccaagatcagacaagatcgg

SEQ ID NO: 2940940 - DNA, 25 bp, Homo sapien
caggccccaccgtgcttagtttcca

SEQ ID NO: 2940941 - DNA, 25 bp, Homo sapien
gttcagggtggtatggccgtagaca

SEQ ID NO: 2940942 - DNA, 25 bp, Homo sapien
acaagatcgggcgcgttcagggtgg

SEQ ID NO: 2940943 - DNA, 25 bp, Homo sapien
gcgccgtggacccgcttcgtattcc

SEQ ID NO: 2940944 - DNA, 25 bp, Homo sapien
tggacccgcttcgtattccaagggc

SEQ ID NO: 2940945 - DNA, 25 bp, Homo sapien
cgcttcgtattccaagggccgtttg

SEQ ID NO: 2940946 - DNA, 25 bp, Homo sapien
cgtggacccgcttcgtattccaagg

SEQ ID NO: 2940947 - DNA, 25 bp, Homo sapien
gatatggagtgagtcacctgctcca

SEQ ID NO: 2940948 - DNA, 25 bp, Homo sapien
gcttcagactcaagtacccattctg

SEQ ID NO: 2940949 - DNA, 25 bp, Homo sapien
cagggtgcttagttggctttgccca

SEQ ID NO: 2940950 - DNA, 25 bp, Homo sapien
ggccactaaagcttcagactcaagt

SEQ ID NO: 2940951 - DNA, 25 bp, Homo sapien
tttgctctgcttcgactgcgtccca

SEQ ID NO: 2940952 - DNA, 25 bp, Homo sapien
tcacgctgcagtcaggaatttaccg

SEQ ID NO: 2940953 - DNA, 25 bp, Homo sapien
ggccctattgtttgcgcccagcttg

SEQ ID NO: 2940954 - DNA, 25 bp, Homo sapien
ggagctccgcgaaccagagatctga

SEQ ID NO: 2940955 - DNA, 25 bp, Homo sapien
cgagatagccagtgagctcgcacca

SEQ ID NO: 2940956 - DNA, 25 bp, Homo sapien
tccacgggacagtcaggcgagatag

SEQ ID NO: 2940957 - DNA, 25 bp, Homo sapien
agttagagtccatccctagagccga

SEQ ID NO: 2940958 - DNA, 25 bp, Homo sapien
caatggcaagcggataaacagaggc

SEQ ID NO: 2940959 - DNA, 25 bp, Homo sapien
tggataagatgaccttgcggccttt

SEQ ID NO: 2940960 - DNA, 25 bp, Homo sapien
gctggacattagaacaaggagacag

SEQ ID NO: 2940961 - DNA, 25 bp, Homo sapien
aaactgcaggaataggaattgaggc

SEQ ID NO: 2940962 - DNA, 25 bp, Homo sapien
agaccaaattgcctgtgcagacagc

SEQ ID NO: 2940963 - DNA, 25 bp, Homo sapien
aaaaacttaagatggacacagctga

SEQ ID NO: 2940964 - DNA, 25 bp, Homo sapien
gttccagggccctgaccagtaggtg

SEQ ID NO: 2940965 - DNA, 25 bp, Homo sapien
gactaagagtctagtggttccaggg

SEQ ID NO: 2940966 - DNA, 25 bp, Homo sapien
tcctcacctggacagtctcctggac

SEQ ID NO: 2940967 - DNA, 25 bp, Homo sapien
aacaagacgggccggcacggtggct

SEQ ID NO: 2940968 - DNA, 25 bp, Homo sapien
cagcactgagaggccgatcacttga

SEQ ID NO: 2940969 - DNA, 25 bp, Homo sapien
acaagacgggccggcacggtggctc

SEQ ID NO: 2940970 - DNA, 25 bp, Homo sapien
tcccagcactgagaggccgatcact

SEQ ID NO: 2940971 - DNA, 25 bp, Homo sapien
tggccaacatgatgagacctccgtc

SEQ ID NO: 2940972 - DNA, 25 bp, Homo sapien
attagccgggtgtggtggcaggcgc

SEQ ID NO: 2940973 - DNA, 25 bp, Homo sapien
ctaaaatacataaattagccgggtg

SEQ ID NO: 2940974 - DNA, 25 bp, Homo sapien
caacatgatgagacctccgtctcta

SEQ ID NO: 2940975 - DNA, 25 bp, Homo sapien
ggctgtgaagctctacaacagcggg

SEQ ID NO: 2940976 - DNA, 25 bp, Homo sapien
ctccgggctgtgaagctctacaaca

SEQ ID NO: 2940977 - DNA, 25 bp, Homo sapien
ggatttccgcagcagcacggaggac

SEQ ID NO: 2940978 - DNA, 25 bp, Homo sapien
aacagcggggatttccgcagcagca

SEQ ID NO: 2940979 - DNA, 25 bp, Homo sapien
ggacgtcgccgacgagtccctcacg

SEQ ID NO: 2940980 - DNA, 25 bp, Homo sapien
acgagtccctcacggacctagaggc

SEQ ID NO: 2940981 - DNA, 25 bp, Homo sapien
acgtcgccgacgagtccctcacgga

SEQ ID NO: 2940982 - DNA, 25 bp, Homo sapien
gccgacgagtccctcacggacctag

SEQ ID NO: 2940983 - DNA, 25 bp, Homo sapien
ttatcttcacccaaggcacgaagcc

SEQ ID NO: 2940984 - DNA, 25 bp, Homo sapien
gcactacgcgctgttcaaggtggga

SEQ ID NO: 2940985 - DNA, 25 bp, Homo sapien
ccacagatcggtcgaaggagcgtta

SEQ ID NO: 2940986 - DNA, 25 bp, Homo sapien
tgggcgtcgtggctccccacagatc

SEQ ID NO: 2940987 - DNA, 25 bp, Homo sapien
ccaggctgagtgtgttagagtctga

SEQ ID NO: 2940988 - DNA, 25 bp, Homo sapien
aggcactacaaagaactctaggttc

SEQ ID NO: 2940989 - DNA, 25 bp, Homo sapien
gtctgagggaggcactacaaagaac

SEQ ID NO: 2940990 - DNA, 25 bp, Homo sapien
tccatccctggctgcgagacctggg

SEQ ID NO: 2940991 - DNA, 25 bp, Homo sapien
gcgagcgagggagtcgccaccaacc

SEQ ID NO: 2940992 - DNA, 25 bp, Homo sapien
gagcgagggagtcgccaccaacctc

SEQ ID NO: 2940993 - DNA, 25 bp, Homo sapien
gagggagtcgccaccaacctccttc

SEQ ID NO: 2940994 - DNA, 25 bp, Homo sapien
gggcgagcgagggagtcgccaccaa

SEQ ID NO: 2940995 - DNA, 25 bp, Homo sapien
gcaccaccagtagcagcaactgcag

SEQ ID NO: 2940996 - DNA, 25 bp, Homo sapien
gcaactgcagcagggggagccggag

SEQ ID NO: 2940997 - DNA, 25 bp, Homo sapien
ggatgtggtacctctcgatgaccac

SEQ ID NO: 2940998 - DNA, 25 bp, Homo sapien
ggtacctctcgatgaccacatcttc

SEQ ID NO: 2940999 - DNA, 25 bp, Homo sapien
gccatcttcaaaagtgccgttgtag

SEQ ID NO: 2941000 - DNA, 25 bp, Homo sapien
tagtggtagcgcacaaaatccccca

SEQ ID NO: 2941001 - DNA, 25 bp, Homo sapien
gccgttgtagtggtagcgcacaaaa

SEQ ID NO: 2941002 - DNA, 25 bp, Homo sapien
tcaaaagtgccgttgtagtggtagc

SEQ ID NO: 2941003 - DNA, 25 bp, Homo sapien
gcccaccagccgctgaaaactccca

SEQ ID NO: 2941004 - DNA, 25 bp, Homo sapien
ccaccagccgctgaaaactcccacc

SEQ ID NO: 2941005 - DNA, 25 bp, Homo sapien
cccaccagccgctgaaaactcccac

SEQ ID NO: 2941006 - DNA, 25 bp, Homo sapien
gttccacagcatcaggtcatatggt

SEQ ID NO: 2941007 - DNA, 25 bp, Homo sapien
ggctactaccctatatctgaatttg

SEQ ID NO: 2941008 - DNA, 25 bp, Homo sapien
tcctagcagtcaagggctcagggct

SEQ ID NO: 2941009 - DNA, 25 bp, Homo sapien
cagggctgcacttctggctactacc

SEQ ID NO: 2941010 - DNA, 25 bp, Homo sapien
tgccagtgatgaggcgccccacacc

SEQ ID NO: 2941011 - DNA, 25 bp, Homo sapien
ggaggcacaatgaggcgtcgccgct

SEQ ID NO: 2941012 - DNA, 25 bp, Homo sapien
acacacatgcccatgaggcctcggt

SEQ ID NO: 2941013 - DNA, 25 bp, Homo sapien
gcgtcgccgctcgttgacacacatg

SEQ ID NO: 2941014 - DNA, 25 bp, Homo sapien
gtggcatccggtggaatgagccccg

SEQ ID NO: 2941015 - DNA, 25 bp, Homo sapien
ccgtcctggaccatgcgggggcagt

SEQ ID NO: 2941016 - DNA, 25 bp, Homo sapien
tggggcgggcgcagcaatgtgctca

SEQ ID NO: 2941017 - DNA, 25 bp, Homo sapien
agaaccacatcgaagtagagggtgg

SEQ ID NO: 2941018 - DNA, 25 bp, Homo sapien
ctggtgtcgaaggaggtgccgtcca

SEQ ID NO: 2941019 - DNA, 25 bp, Homo sapien
cattgtagtggtagcggacaaagtc

SEQ ID NO: 2941020 - DNA, 25 bp, Homo sapien
ggtgccattgtagtggtagcggaca

SEQ ID NO: 2941021 - DNA, 25 bp, Homo sapien
cagggtgccattgtagtggtagcgg

SEQ ID NO: 2941022 - DNA, 25 bp, Homo sapien
gaatggagggatgataatcttcctt

SEQ ID NO: 2941023 - DNA, 25 bp, Homo sapien
ccaaccagagccgacgtaggtgtca

SEQ ID NO: 2941024 - DNA, 25 bp, Homo sapien
catagcctttctcgccataggccag

SEQ ID NO: 2941025 - DNA, 25 bp, Homo sapien
tggtccatgcccttgatcagccaac

SEQ ID NO: 2941026 - DNA, 25 bp, Homo sapien
tgccctcgtgcagtatacaacctga

SEQ ID NO: 2941027 - DNA, 25 bp, Homo sapien
tcttgctcctccagtaagacctgag

SEQ ID NO: 2941028 - DNA, 25 bp, Homo sapien
tagcaccaagggtagatttcatccc

SEQ ID NO: 2941029 - DNA, 25 bp, Homo sapien
gagtccttggttggatgccctcgtg

SEQ ID NO: 2941030 - DNA, 25 bp, Homo sapien
tctagctggacagcgtccttcgggt

SEQ ID NO: 2941031 - DNA, 25 bp, Homo sapien
gggagctccagcgtctctagctgga

SEQ ID NO: 2941032 - DNA, 25 bp, Homo sapien
acgtgaaagaccagcgaggcctgtg

SEQ ID NO: 2941033 - DNA, 25 bp, Homo sapien
tgtgcacgtcaatcaggaggacgtg

SEQ ID NO: 2941034 - DNA, 25 bp, Homo sapien
caaggagccattgtagtggtagcgc

SEQ ID NO: 2941035 - DNA, 25 bp, Homo sapien
cattgtagtggtagcgcatgaagtc

SEQ ID NO: 2941036 - DNA, 25 bp, Homo sapien
agggtgccgtccatcaaggagccat

SEQ ID NO: 2941037 - DNA, 25 bp, Homo sapien
ggtgccgtccatcaaggagccattg

SEQ ID NO: 2941038 - DNA, 25 bp, Homo sapien
agtgacccccagcttcgtccacgtt

SEQ ID NO: 2941039 - DNA, 25 bp, Homo sapien
ccagcttcgtccacgtttcacccag

SEQ ID NO: 2941040 - DNA, 25 bp, Homo sapien
cagagtgacccccagcttcgtccac

SEQ ID NO: 2941041 - DNA, 25 bp, Homo sapien
gacccccagcttcgtccacgtttca

SEQ ID NO: 2941042 - DNA, 25 bp, Homo sapien
catcccggggatgatgtaaccctgc

SEQ ID NO: 2941043 - DNA, 25 bp, Homo sapien
gatgatgtaaccctgcccgatatag

SEQ ID NO: 2941044 - DNA, 25 bp, Homo sapien
tattgtaggtgtggttgcgggagta

SEQ ID NO: 2941045 - DNA, 25 bp, Homo sapien
gcccgatataggtattgtaggtgtg

SEQ ID NO: 2941046 - DNA, 25 bp, Homo sapien
tttttgtgatgagaggggccgagcg

SEQ ID NO: 2941047 - DNA, 25 bp, Homo sapien
aggggccgagcggtgcctggaatcc

SEQ ID NO: 2941048 - DNA, 25 bp, Homo sapien
gggtgaccagatgtaagctgcatgc

SEQ ID NO: 2941049 - DNA, 25 bp, Homo sapien
cctagacacaatgggcagttcggag

SEQ ID NO: 2941050 - DNA, 25 bp, Homo sapien
tcctgggggtatgctggttctgttt

SEQ ID NO: 2941051 - DNA, 25 bp, Homo sapien
gcatggcttgcccacttgacaggtg

SEQ ID NO: 2941052 - DNA, 25 bp, Homo sapien
ttctccactgcggaaggggcgaagt

SEQ ID NO: 2941053 - DNA, 25 bp, Homo sapien
cctgcggatcagcatggcttgccca

SEQ ID NO: 2941054 - DNA, 25 bp, Homo sapien
gtcttgcaaactcccagtaacttac

SEQ ID NO: 2941055 - DNA, 25 bp, Homo sapien
cgtcttgcaaactcccagtaactta

SEQ ID NO: 2941056 - DNA, 25 bp, Homo sapien
ttcccgaccctgaggatccaaagga

SEQ ID NO: 2941057 - DNA, 25 bp, Homo sapien
gacgggatgtttgtccagagtcaat

SEQ ID NO: 2941058 - DNA, 25 bp, Homo sapien
gagtgtggtcagctcagagcactag

SEQ ID NO: 2941059 - DNA, 25 bp, Homo sapien
tacttgaggtctctccatggaggtc

SEQ ID NO: 2941060 - DNA, 25 bp, Homo sapien
cgttgaagattagcacggcagagcc

SEQ ID NO: 2941061 - DNA, 25 bp, Homo sapien
gggtgccgtccagcaaagaacagtt

SEQ ID NO: 2941062 - DNA, 25 bp, Homo sapien
gatttccaccacatccgcagggttg

SEQ ID NO: 2941063 - DNA, 25 bp, Homo sapien
tgtaatggtatcgaacaaagtcccc

SEQ ID NO: 2941064 - DNA, 25 bp, Homo sapien
gcccacccacctgcccagtcccggc

SEQ ID NO: 2941065 - DNA, 25 bp, Homo sapien
gcgctcgaggaccaagagggaggag

SEQ ID NO: 2941066 - DNA, 25 bp, Homo sapien
ccttcccctgcgaagcagagaattt

SEQ ID NO: 2941067 - DNA, 25 bp, Homo sapien
aagaggttgaatgctcccctggcgc

SEQ ID NO: 2941068 - DNA, 25 bp, Homo sapien
tctcctcgacatgctccgagatggg

SEQ ID NO: 2941069 - DNA, 25 bp, Homo sapien
ctcgagggctcatggctccctgcgt

SEQ ID NO: 2941070 - DNA, 25 bp, Homo sapien
tgccccctaaagtgtggcctcgagg

SEQ ID NO: 2941071 - DNA, 25 bp, Homo sapien
taaagtgtggcctcgagggctcatg

SEQ ID NO: 2941072 - DNA, 25 bp, Homo sapien
gggctcatggctccctgcgtcagtt

SEQ ID NO: 2941073 - DNA, 25 bp, Homo sapien
tgcagacgtggggttcccttctcat

SEQ ID NO: 2941074 - DNA, 25 bp, Homo sapien
ggagttactcccactggtgacttgg

SEQ ID NO: 2941075 - DNA, 25 bp, Homo sapien
gaacaagccctcagttccggagtta

SEQ ID NO: 2941076 - DNA, 25 bp, Homo sapien
ttgggccacgcagcagagtgcaggg

SEQ ID NO: 2941077 - DNA, 25 bp, Homo sapien
aggcccgtgtccaggccttcgatca

SEQ ID NO: 2941078 - DNA, 25 bp, Homo sapien
ttggccccgagagtcgcctcctggg

SEQ ID NO: 2941079 - DNA, 25 bp, Homo sapien
gggcacgatgagctgccgcctctct

SEQ ID NO: 2941080 - DNA, 25 bp, Homo sapien
ttcgatcaccttgttggccccgaga

SEQ ID NO: 2941081 - DNA, 25 bp, Homo sapien
tcaaacaggttggcaggagggtcct

SEQ ID NO: 2941082 - DNA, 25 bp, Homo sapien
caaacaggttggcaggagggtcctt

SEQ ID NO: 2941083 - DNA, 25 bp, Homo sapien
tccggagggacctcgccatccttgt

SEQ ID NO: 2941084 - DNA, 25 bp, Homo sapien
agggacctcgccatccttgttgagg

SEQ ID NO: 2941085 - DNA, 25 bp, Homo sapien
aggggagagccgggggagcgggcag

SEQ ID NO: 2941086 - DNA, 25 bp, Homo sapien
gggagcgggcagtgagggtcatggc

SEQ ID NO: 2941087 - DNA, 25 bp, Homo sapien
gagagccgggggagcgggcagtgag

SEQ ID NO: 2941088 - DNA, 25 bp, Homo sapien
ggggagcgggcagtgagggtcatgg

SEQ ID NO: 2941089 - DNA, 25 bp, Homo sapien
gacttcagcttgagctcgtcgactg

SEQ ID NO: 2941090 - DNA, 25 bp, Homo sapien
tgtgatcttgccgtcctggttgcgg

SEQ ID NO: 2941091 - DNA, 25 bp, Homo sapien
caggcatgaggcgtcctttgccctc

SEQ ID NO: 2941092 - DNA, 25 bp, Homo sapien
catgtctcctatggttttctcaggg

SEQ ID NO: 2941093 - DNA, 25 bp, Homo sapien
cattgttttagttggctcctggacc

SEQ ID NO: 2941094 - DNA, 25 bp, Homo sapien
ggtgactgtcagcaggtcagtccca

SEQ ID NO: 2941095 - DNA, 25 bp, Homo sapien
tgctgtggattttcatctagggtgg

SEQ ID NO: 2941096 - DNA, 25 bp, Homo sapien
gaaacacggtagaggtctgtgctgt

SEQ ID NO: 2941097 - DNA, 25 bp, Homo sapien
gatggataacaagctcagctgtgtc

SEQ ID NO: 2941098 - DNA, 25 bp, Homo sapien
agccatggccctatccaaccccagg

SEQ ID NO: 2941099 - DNA, 25 bp, Homo sapien
gagatggataacaagctcagctgtg

SEQ ID NO: 2941100 - DNA, 25 bp, Homo sapien
tggggagatggataacaagctcagc

SEQ ID NO: 2941101 - DNA, 25 bp, Homo sapien
cttctttagggatgaaaagctaact

SEQ ID NO: 2941102 - DNA, 25 bp, Homo sapien
tccctaggagccagtcaggattggg

SEQ ID NO: 2941103 - DNA, 25 bp, Homo sapien
gatgaaaagctaactacagcccagt

SEQ ID NO: 2941104 - DNA, 25 bp, Homo sapien
cccttccctaggagccagtcaggat

SEQ ID NO: 2941105 - DNA, 25 bp, Homo sapien
caagatttcatagccctaacaccca

SEQ ID NO: 2941106 - DNA, 25 bp, Homo sapien
caccagtttagcctttgagtgtgca

SEQ ID NO: 2941107 - DNA, 25 bp, Homo sapien
catagccctaacacccacccaagca

SEQ ID NO: 2941108 - DNA, 25 bp, Homo sapien
atttcatagccctaacacccaccca

SEQ ID NO: 2941109 - DNA, 25 bp, Homo sapien
agaggctgctttcctagggtgtcgg

SEQ ID NO: 2941110 - DNA, 25 bp, Homo sapien
ctacatcttttgtatagggtctatc

SEQ ID NO: 2941111 - DNA, 25 bp, Homo sapien
cagctgtcgctccttttccctacta

SEQ ID NO: 2941112 - DNA, 25 bp, Homo sapien
caccctgggacagcggagagaggct

SEQ ID NO: 2941113 - DNA, 25 bp, Homo sapien
ggaactgcagctacagaggatgttc

SEQ ID NO: 2941114 - DNA, 25 bp, Homo sapien
tgaccttgatgaccacgtcgcagag

SEQ ID NO: 2941115 - DNA, 25 bp, Homo sapien
tcttatgggcactgaactcaaagcc

SEQ ID NO: 2941116 - DNA, 25 bp, Homo sapien
taagctcgttgaagatctcacaggc

SEQ ID NO: 2941117 - DNA, 25 bp, Homo sapien
cacggtccgggtgtatgcatactca

SEQ ID NO: 2941118 - DNA, 25 bp, Homo sapien
tagtccgtgaacttacagatgccga

SEQ ID NO: 2941119 - DNA, 25 bp, Homo sapien
gatatccttaagttcagtgaccgag

SEQ ID NO: 2941120 - DNA, 25 bp, Homo sapien
tcatcatgtcgggagaaatgccagg

SEQ ID NO: 2941121 - DNA, 25 bp, Homo sapien
tgcttttaggacaatctctctgtga

SEQ ID NO: 2941122 - DNA, 25 bp, Homo sapien
tgataaatgaatcaagagtgaacac

SEQ ID NO: 2941123 - DNA, 25 bp, Homo sapien
cagccttgggatctgtcatatgtct

SEQ ID NO: 2941124 - DNA, 25 bp, Homo sapien
catgtaaatacagccttgggatctg

SEQ ID NO: 2941125 - DNA, 25 bp, Homo sapien
aaattgccgaggactgtcacactga

SEQ ID NO: 2941126 - DNA, 25 bp, Homo sapien
gtactcagcatgcattagggccagg

SEQ ID NO: 2941127 - DNA, 25 bp, Homo sapien
ggtctctggctcataacgttcagca

SEQ ID NO: 2941128 - DNA, 25 bp, Homo sapien
tgactgggtcaaaacgcttaacact

SEQ ID NO: 2941129 - DNA, 25 bp, Homo sapien
catgttctccataagcaatcacgcc

SEQ ID NO: 2941130 - DNA, 25 bp, Homo sapien
cttctcatgggtgctatgactgtcc

SEQ ID NO: 2941131 - DNA, 25 bp, Homo sapien
tccattaaacccaccacatatgtag

SEQ ID NO: 2941132 - DNA, 25 bp, Homo sapien
gaacaggcactcgtttccattaaac

SEQ ID NO: 2941133 - DNA, 25 bp, Homo sapien
cgatgccaaaattgctacgaggatt

SEQ ID NO: 2941134 - DNA, 25 bp, Homo sapien
tcatcatagcactcaacattaaagg

SEQ ID NO: 2941135 - DNA, 25 bp, Homo sapien
gggctgtaggcttcggcactcctaa

SEQ ID NO: 2941136 - DNA, 25 bp, Homo sapien
ggattgtgcgccaagtgttagccac

SEQ ID NO: 2941137 - DNA, 25 bp, Homo sapien
actgcggtatatactcatgtcatga

SEQ ID NO: 2941138 - DNA, 25 bp, Homo sapien
gagcactgcggtatatactcatgtc

SEQ ID NO: 2941139 - DNA, 25 bp, Homo sapien
gcactgcggtatatactcatgtcat

SEQ ID NO: 2941140 - DNA, 25 bp, Homo sapien
tcagagcactgcggtatatactcat

SEQ ID NO: 2941141 - DNA, 25 bp, Homo sapien
ctgggaagttgtcccgtctagctgc

SEQ ID NO: 2941142 - DNA, 25 bp, Homo sapien
tgtcccgtctagctgcatattcctc

SEQ ID NO: 2941143 - DNA, 25 bp, Homo sapien
catctcgcagtgctaatcctgggaa

SEQ ID NO: 2941144 - DNA, 25 bp, Homo sapien
attttacttcatctcgcagtgctaa

SEQ ID NO: 2941145 - DNA, 25 bp, Homo sapien
gaggagatgtagcatttagaacacc

SEQ ID NO: 2941146 - DNA, 25 bp, Homo sapien
taattagatagcaaaatcactgcgg

SEQ ID NO: 2941147 - DNA, 25 bp, Homo sapien
tagaacaccttgagacatgacattg

SEQ ID NO: 2941148 - DNA, 25 bp, Homo sapien
gcacagactgcagagcacttgttaa

SEQ ID NO: 2941149 - DNA, 25 bp, Homo sapien
aaacagtcacgctttgtcgccctgg

SEQ ID NO: 2941150 - DNA, 25 bp, Homo sapien
ttttaagatgtgaggtctcacctta

SEQ ID NO: 2941151 - DNA, 25 bp, Homo sapien
aaaggattcctaacagtttacaatg

SEQ ID NO: 2941152 - DNA, 25 bp, Homo sapien
aaatttactcttaatgctcagttaa

SEQ ID NO: 2941153 - DNA, 25 bp, Homo sapien
tcctacgtgtatgttgctggatcaa

SEQ ID NO: 2941154 - DNA, 25 bp, Homo sapien
taaatggcacaacttggaatcggca

SEQ ID NO: 2941155 - DNA, 25 bp, Homo sapien
gggaagctctatagcattggaggac

SEQ ID NO: 2941156 - DNA, 25 bp, Homo sapien
tcaatggagccagggtttgctaaaa

SEQ ID NO: 2941157 - DNA, 25 bp, Homo sapien
cgacattaccctgtgcttcggcggg

SEQ ID NO: 2941158 - DNA, 25 bp, Homo sapien
gagatgcgcaagtggagctccgagc

SEQ ID NO: 2941159 - DNA, 25 bp, Homo sapien
tccgggcccagaagccgaggatttc

SEQ ID NO: 2941160 - DNA, 25 bp, Homo sapien
cgaggatttcgagtgcagctctcac

SEQ ID NO: 2941161 - DNA, 25 bp, Homo sapien
gttctgtgttgcagaccagagtctg

SEQ ID NO: 2941162 - DNA, 25 bp, Homo sapien
gcttgtttggtatcccactgaaatg

SEQ ID NO: 2941163 - DNA, 25 bp, Homo sapien
taactgaagtgtgggtccaaggact

SEQ ID NO: 2941164 - DNA, 25 bp, Homo sapien
gggccattgcatccttagccattgt

SEQ ID NO: 2941165 - DNA, 25 bp, Homo sapien
gacatattggtcaccttcggctaga

SEQ ID NO: 2941166 - DNA, 25 bp, Homo sapien
catctgtgccgaaagaacagccgcc

SEQ ID NO: 2941167 - DNA, 25 bp, Homo sapien
cattggccaccgcaagtcaagtggt

SEQ ID NO: 2941168 - DNA, 25 bp, Homo sapien
gcctcacgtcagcaggataacagca

SEQ ID NO: 2941169 - DNA, 25 bp, Homo sapien
cactatgcccacctagagaactgca

SEQ ID NO: 2941170 - DNA, 25 bp, Homo sapien
tagagaactgcacttctaccagctc

SEQ ID NO: 2941171 - DNA, 25 bp, Homo sapien
ctatgccgcggtggctggtttcgaa

SEQ ID NO: 2941172 - DNA, 25 bp, Homo sapien
tagctaggactcaagcacgcaccac

SEQ ID NO: 2941173 - DNA, 25 bp, Homo sapien
tagcaccattaacctgcaggccaga

SEQ ID NO: 2941174 - DNA, 25 bp, Homo sapien
ttctcttgggtagcccgtcagggac

SEQ ID NO: 2941175 - DNA, 25 bp, Homo sapien
gctggagatccaagaggccggttcc

SEQ ID NO: 2941176 - DNA, 25 bp, Homo sapien
tgtgactggcactatttcctctggc

SEQ ID NO: 2941177 - DNA, 25 bp, Homo sapien
caccatccaggctgctttttaacat

SEQ ID NO: 2941178 - DNA, 25 bp, Homo sapien
ttttatagagttagggtcttgaatg

SEQ ID NO: 2941179 - DNA, 25 bp, Homo sapien
tggcatgttcacatctcactacagc

SEQ ID NO: 2941180 - DNA, 25 bp, Homo sapien
tcacactgtcactcaaggctgtagt

SEQ ID NO: 2941181 - DNA, 25 bp, Homo sapien
agtgtttttgtctttcccagaggca

SEQ ID NO: 2941182 - DNA, 25 bp, Homo sapien
aatgagtgtttttgtctttcccaga

SEQ ID NO: 2941183 - DNA, 25 bp, Homo sapien
tgagtgtttttgtctttcccagagg

SEQ ID NO: 2941184 - DNA, 25 bp, Homo sapien
tgtttttgtctttcccagaggcacc

SEQ ID NO: 2941185 - DNA, 25 bp, Homo sapien
tcgcactggaggtatcgtcgagtcc

SEQ ID NO: 2941186 - DNA, 25 bp, Homo sapien
actggaatctcgcagcaaggaccct

SEQ ID NO: 2941187 - DNA, 25 bp, Homo sapien
cagtgccgagttctgccgttatggg

SEQ ID NO: 2941188 - DNA, 25 bp, Homo sapien
gagtccagcccctaagtgacagatg

SEQ ID NO: 2941189 - DNA, 25 bp, Homo sapien
tgtttgctgttgcacgctctggcgg

SEQ ID NO: 2941190 - DNA, 25 bp, Homo sapien
gctcccttgtaagacagccaagaaa

SEQ ID NO: 2941191 - DNA, 25 bp, Homo sapien
aaggatatgtgcacggcgtaccgcc

SEQ ID NO: 2941192 - DNA, 25 bp, Homo sapien
caaagttccgaatagggatgaggca

SEQ ID NO: 2941193 - DNA, 25 bp, Homo sapien
tcttagcaaccatgagatgtacagc

SEQ ID NO: 2941194 - DNA, 25 bp, Homo sapien
gatgtacagcgacttccggttccgc

SEQ ID NO: 2941195 - DNA, 25 bp, Homo sapien
tgtggaagctccgtttcttagcaac

SEQ ID NO: 2941196 - DNA, 25 bp, Homo sapien
gattctgggtacaacctgccggcgt

SEQ ID NO: 2941197 - DNA, 25 bp, Homo sapien
ctaaagcagagacaatcaaagaaaa

SEQ ID NO: 2941198 - DNA, 25 bp, Homo sapien
aagcagagacaatcaaagaaaagct

SEQ ID NO: 2941199 - DNA, 25 bp, Homo sapien
gcagagacaatcaaagaaaagctgg

SEQ ID NO: 2941200 - DNA, 25 bp, Homo sapien
cagagacaatcaaagaaaagctgga

SEQ ID NO: 2941201 - DNA, 25 bp, Homo sapien
aaaattccccgcacaggtagagccg

SEQ ID NO: 2941202 - DNA, 25 bp, Homo sapien
tctgcgcggctttagaaaattcccc

SEQ ID NO: 2941203 - DNA, 25 bp, Homo sapien
ggaaaggtgcttcgcaaggtctcgc

SEQ ID NO: 2941204 - DNA, 25 bp, Homo sapien
tcgccttcggccatataagagggaa

SEQ ID NO: 2941205 - DNA, 25 bp, Homo sapien
aagtgggcaatttggagcagaagaa

SEQ ID NO: 2941206 - DNA, 25 bp, Homo sapien
tatcactccatctagaagaagaagt

SEQ ID NO: 2941207 - DNA, 25 bp, Homo sapien
tctcaaaactacagggttatcctat

SEQ ID NO: 2941208 - DNA, 25 bp, Homo sapien
actgaaagggacaaacgactctggg

SEQ ID NO: 2941209 - DNA, 25 bp, Homo sapien
gggacagggctaccgaactcaattg

SEQ ID NO: 2941210 - DNA, 25 bp, Homo sapien
tgggtacttcaggatgggacatgat

SEQ ID NO: 2941211 - DNA, 25 bp, Homo sapien
gaagaggaagtagctactgtctttc

SEQ ID NO: 2941212 - DNA, 25 bp, Homo sapien
ccaaggctacccttccctcagggtg

SEQ ID NO: 2941213 - DNA, 25 bp, Homo sapien
ctgggtcactctggagcgaagcctc

SEQ ID NO: 2941214 - DNA, 25 bp, Homo sapien
caggaagcactttgagcgagcaacc

SEQ ID NO: 2941215 - DNA, 25 bp, Homo sapien
cttacagaaagctgggtcactctgg

SEQ ID NO: 2941216 - DNA, 25 bp, Homo sapien
gagcaaccaggcagttcttgtctcc

SEQ ID NO: 2941217 - DNA, 25 bp, Homo sapien
atgtggtggaacagaagggtcctgg

SEQ ID NO: 2941218 - DNA, 25 bp, Homo sapien
ttgaaggtcaaggttggaatacagg

SEQ ID NO: 2941219 - DNA, 25 bp, Homo sapien
tgaaggtcaaggttggaatacaggg

SEQ ID NO: 2941220 - DNA, 25 bp, Homo sapien
tagcctcgatgatagaataccaagg

SEQ ID NO: 2941221 - DNA, 25 bp, Homo sapien
ggtgtacagtgtctcagccttttgc

SEQ ID NO: 2941222 - DNA, 25 bp, Homo sapien
gcctcagcttgtagcctcgatgata

SEQ ID NO: 2941223 - DNA, 25 bp, Homo sapien
gatgatagaataccaaggcaaactc

SEQ ID NO: 2941224 - DNA, 25 bp, Homo sapien
ctcagcctgcttgcttaagaaggag

SEQ ID NO: 2941225 - DNA, 25 bp, Homo sapien
tgttctccagcttaatggaagaagg

SEQ ID NO: 2941226 - DNA, 25 bp, Homo sapien
cttgcttaagaaggagaggtcccct

SEQ ID NO: 2941227 - DNA, 25 bp, Homo sapien
aggagaggtcccctttgttctccag

SEQ ID NO: 2941228 - DNA, 25 bp, Homo sapien
aggtgtttcatgggctgaggcttct

SEQ ID NO: 2941229 - DNA, 25 bp, Homo sapien
cttcatccaataggagcttctccaa

SEQ ID NO: 2941230 - DNA, 25 bp, Homo sapien
gggtgtaagaggtgtttcatgggct

SEQ ID NO: 2941231 - DNA, 25 bp, Homo sapien
gaagctggcggacagtcttctcact

SEQ ID NO: 2941232 - DNA, 25 bp, Homo sapien
aggccccgtgccaacaaagtgtccg

SEQ ID NO: 2941233 - DNA, 25 bp, Homo sapien
ggccccgtgccaacaaagtgtccga

SEQ ID NO: 2941234 - DNA, 25 bp, Homo sapien
gccccgtgccaacaaagtgtccgaa

SEQ ID NO: 2941235 - DNA, 25 bp, Homo sapien
tattatatgacaggttctgccttca

SEQ ID NO: 2941236 - DNA, 25 bp, Homo sapien
tatatgacaggttctgccttcagct

SEQ ID NO: 2941237 - DNA, 25 bp, Homo sapien
ttatatgacaggttctgccttcagc

SEQ ID NO: 2941238 - DNA, 25 bp, Homo sapien
tatgacaggttctgccttcagctca

SEQ ID NO: 2941239 - DNA, 25 bp, Homo sapien
caggtagttgatgcccgtcatgatg

SEQ ID NO: 2941240 - DNA, 25 bp, Homo sapien
gaagttgctgtgagtatccaggtag

SEQ ID NO: 2941241 - DNA, 25 bp, Homo sapien
gagggacggcgtttgtggtcccgca

SEQ ID NO: 2941242 - DNA, 25 bp, Homo sapien
ctccctggcgtagatcggcttctgc

SEQ ID NO: 2941243 - DNA, 25 bp, Homo sapien
ttccctatgcagctatacaagtttc

SEQ ID NO: 2941244 - DNA, 25 bp, Homo sapien
aatctgggcattccctatgcagcta

SEQ ID NO: 2941245 - DNA, 25 bp, Homo sapien
gctcaatctgggcattccctatgca

SEQ ID NO: 2941246 - DNA, 25 bp, Homo sapien
tatgcagctatacaagtttccaacc

SEQ ID NO: 2941247 - DNA, 25 bp, Homo sapien
ggcccaggcccacttgtgagcaggg

SEQ ID NO: 2941248 - DNA, 25 bp, Homo sapien
caggggagggagagttcatagcatg

SEQ ID NO: 2941249 - DNA, 25 bp, Homo sapien
gggcccaggcccacttgtgagcagg

SEQ ID NO: 2941250 - DNA, 25 bp, Homo sapien
gagggagagttcatagcatgtgtct

SEQ ID NO: 2941251 - DNA, 25 bp, Homo sapien
tgctggaatttcccaactctggcaa

SEQ ID NO: 2941252 - DNA, 25 bp, Homo sapien
ggctctcgattttgcatcaggaagg

SEQ ID NO: 2941253 - DNA, 25 bp, Homo sapien
aaactctgccaatgttgtcaagggc

SEQ ID NO: 2941254 - DNA, 25 bp, Homo sapien
ccaactctggcaaaaactctgccaa

SEQ ID NO: 2941255 - DNA, 25 bp, Homo sapien
ccaaggtcttcacaaaccactgctt

SEQ ID NO: 2941256 - DNA, 25 bp, Homo sapien
gccaaggtcttcacaaaccactgct

SEQ ID NO: 2941257 - DNA, 25 bp, Homo sapien
caaggtcttcacaaaccactgcttt

SEQ ID NO: 2941258 - DNA, 25 bp, Homo sapien
gcctcattcaaaggcgttggtgaga

SEQ ID NO: 2941259 - DNA, 25 bp, Homo sapien
ccatctttagattgttctggaagac

SEQ ID NO: 2941260 - DNA, 25 bp, Homo sapien
tgtcaccatcgagaaccaggactga

SEQ ID NO: 2941261 - DNA, 25 bp, Homo sapien
ggactgaggaacctgggcctcattc

SEQ ID NO: 2941262 - DNA, 25 bp, Homo sapien
cttgtgtgagctgtagtcggaccca

SEQ ID NO: 2941263 - DNA, 25 bp, Homo sapien
acaacgtgtggtgcatgatggagcc

SEQ ID NO: 2941264 - DNA, 25 bp, Homo sapien
caacacaggtagagtgtgacaacgt

SEQ ID NO: 2941265 - DNA, 25 bp, Homo sapien
tgccagggcccatcagaagcttgtg

SEQ ID NO: 2941266 - DNA, 25 bp, Homo sapien
gcctcgttgttatgcacaagctttg

SEQ ID NO: 2941267 - DNA, 25 bp, Homo sapien
tcacggctgactcgaagtctctcag

SEQ ID NO: 2941268 - DNA, 25 bp, Homo sapien
ccttctcaaaattgttcacggctga

SEQ ID NO: 2941269 - DNA, 25 bp, Homo sapien
ctgcgcctcgttgttatgcacaagc

SEQ ID NO: 2941270 - DNA, 25 bp, Homo sapien
tttgagattctccacgtagttggtt

SEQ ID NO: 2941271 - DNA, 25 bp, Homo sapien
tgatacccttgttggcatcgtccaa

SEQ ID NO: 2941272 - DNA, 25 bp, Homo sapien
tctccacgtagttggttttcctcag

SEQ ID NO: 2941273 - DNA, 25 bp, Homo sapien
tcagttctctgatgatacccttgtt

SEQ ID NO: 2941274 - DNA, 25 bp, Homo sapien
tggggctgtgatgagccaaaatcca

SEQ ID NO: 2941275 - DNA, 25 bp, Homo sapien
ggggctgtgatgagccaaaatccag

SEQ ID NO: 2941276 - DNA, 25 bp, Homo sapien
taagagaaaagcgggaagaaagata

SEQ ID NO: 2941277 - DNA, 25 bp, Homo sapien
ccttctcgggctcatctctcactct

SEQ ID NO: 2941278 - DNA, 25 bp, Homo sapien
tctcctcatgtccttctctcttgtt

SEQ ID NO: 2941279 - DNA, 25 bp, Homo sapien
caccttctcgggctcatctctcact

SEQ ID NO: 2941280 - DNA, 25 bp, Homo sapien
ctcttgttattattctatcttcata

SEQ ID NO: 2941281 - DNA, 25 bp, Homo sapien
ggcaactgctcccaaatcgcttctg

SEQ ID NO: 2941282 - DNA, 25 bp, Homo sapien
tcctgatcttgtgcctaattctcct

SEQ ID NO: 2941283 - DNA, 25 bp, Homo sapien
tttgctctaattctcccgaaggcct

SEQ ID NO: 2941284 - DNA, 25 bp, Homo sapien
tctgccagcttctagtagcttcctg

SEQ ID NO: 2941285 - DNA, 25 bp, Homo sapien
tttctcctatttctccaaattgtgt

SEQ ID NO: 2941286 - DNA, 25 bp, Homo sapien
tccttttccatctcatttcctgttt

SEQ ID NO: 2941287 - DNA, 25 bp, Homo sapien
tcgtttctcctatttctccaaattg

SEQ ID NO: 2941288 - DNA, 25 bp, Homo sapien
tcccagttcttctggctctcttctg

SEQ ID NO: 2941289 - DNA, 25 bp, Homo sapien
ctgatcctcatctctaccgatggct

SEQ ID NO: 2941290 - DNA, 25 bp, Homo sapien
taatggcaaaatagtgatggaaagc

SEQ ID NO: 2941291 - DNA, 25 bp, Homo sapien
taataaaatcccatgatccctctga

SEQ ID NO: 2941292 - DNA, 25 bp, Homo sapien
ttcctataacagacaaatcgcttga

SEQ ID NO: 2941293 - DNA, 25 bp, Homo sapien
cactggagggactcagtcagtcacc

SEQ ID NO: 2941294 - DNA, 25 bp, Homo sapien
ggccgccccaccactgttccatcca

SEQ ID NO: 2941295 - DNA, 25 bp, Homo sapien
gccgccccaccactgttccatccat

SEQ ID NO: 2941296 - DNA, 25 bp, Homo sapien
gggccgccccaccactgttccatcc

SEQ ID NO: 2941297 - DNA, 25 bp, Homo sapien
tggggccgccccaccactgttccat

SEQ ID NO: 2941298 - DNA, 25 bp, Homo sapien
tgaaaccactgagagctccgttgga

SEQ ID NO: 2941299 - DNA, 25 bp, Homo sapien
gagagcctgatttacctgattatgc

SEQ ID NO: 2941300 - DNA, 25 bp, Homo sapien
ggccctgtgccagccgaaagtcagt

SEQ ID NO: 2941301 - DNA, 25 bp, Homo sapien
gctggcattccggtaaactctgcat

SEQ ID NO: 2941302 - DNA, 25 bp, Homo sapien
acacgggagtccagcggtggcacga

SEQ ID NO: 2941303 - DNA, 25 bp, Homo sapien
gggagtccagcggtggcacgacccg

SEQ ID NO: 2941304 - DNA, 25 bp, Homo sapien
gggacacgggagtccagcggtggca

SEQ ID NO: 2941305 - DNA, 25 bp, Homo sapien
agtccagcggtggcacgacccgagc

SEQ ID NO: 2941306 - DNA, 25 bp, Homo sapien
tgccggcaccagcgctccggggccg

SEQ ID NO: 2941307 - DNA, 25 bp, Homo sapien
ccggcaccagcgctccggggccgcc

SEQ ID NO: 2941308 - DNA, 25 bp, Homo sapien
tctgccggcaccagcgctccggggc

SEQ ID NO: 2941309 - DNA, 25 bp, Homo sapien
ctctgccggcaccagcgctccgggg

SEQ ID NO: 2941310 - DNA, 25 bp, Homo sapien
gagccccgggtcctcgtttgcaaga

SEQ ID NO: 2941311 - DNA, 25 bp, Homo sapien
cccgggtcctcgtttgcaagacgct

SEQ ID NO: 2941312 - DNA, 25 bp, Homo sapien
tctcttgtctggcatgcgggtacaa

SEQ ID NO: 2941313 - DNA, 25 bp, Homo sapien
gggtacaatggtcccacagaagggc

SEQ ID NO: 2941314 - DNA, 25 bp, Homo sapien
tggagaagggttaccccaagactgc

SEQ ID NO: 2941315 - DNA, 25 bp, Homo sapien
caatggccgcaacagataatactct

SEQ ID NO: 2941316 - DNA, 25 bp, Homo sapien
ggttctgggactggcctcactctta

SEQ ID NO: 2941317 - DNA, 25 bp, Homo sapien
tctgaagctctcctaagcgtgcgct

SEQ ID NO: 2941318 - DNA, 25 bp, Homo sapien
aaaggtaaacgtgctggaggcatgc

SEQ ID NO: 2941319 - DNA, 25 bp, Homo sapien
tatgcttggcacctactaaggacgt

SEQ ID NO: 2941320 - DNA, 25 bp, Homo sapien
acccctagtccctagactggttgtg

SEQ ID NO: 2941321 - DNA, 25 bp, Homo sapien
gggaagagatgtcagcccaggtcat

SEQ ID NO: 2941322 - DNA, 25 bp, Homo sapien
gatgtcagcccaggtcattcgcggg

SEQ ID NO: 2941323 - DNA, 25 bp, Homo sapien
agtccctagactggttgtgggtgcc

SEQ ID NO: 2941324 - DNA, 25 bp, Homo sapien
aatgtgtggctttttcgggagaagc

SEQ ID NO: 2941325 - DNA, 25 bp, Homo sapien
ggaatgtgtggctttttcgggagaa

SEQ ID NO: 2941326 - DNA, 25 bp, Homo sapien
atcttgggcaggaatgtgtggcttt

SEQ ID NO: 2941327 - DNA, 25 bp, Homo sapien
ttgggcaggaatgtgtggctttttc

SEQ ID NO: 2941328 - DNA, 25 bp, Homo sapien
gatcttgtaagcgtcagccgacacc

SEQ ID NO: 2941329 - DNA, 25 bp, Homo sapien
tactggtcggccatttcaaagagct

SEQ ID NO: 2941330 - DNA, 25 bp, Homo sapien
gaagagcgtcttgcactctagcagc

SEQ ID NO: 2941331 - DNA, 25 bp, Homo sapien
tcccgttcgtggttggtgtcatcaa

SEQ ID NO: 2941332 - DNA, 25 bp, Homo sapien
cgaagtagagcggcaggaagtcctt

SEQ ID NO: 2941333 - DNA, 25 bp, Homo sapien
gaagtagagcggcaggaagtccttc

SEQ ID NO: 2941334 - DNA, 25 bp, Homo sapien
aagtagagcggcaggaagtccttct

SEQ ID NO: 2941335 - DNA, 25 bp, Homo sapien
agtagagcggcaggaagtccttctc

SEQ ID NO: 2941336 - DNA, 25 bp, Homo sapien
gccggctttgcggagggtctcagag

SEQ ID NO: 2941337 - DNA, 25 bp, Homo sapien
gagggtctcagagctcttcttggtc

SEQ ID NO: 2941338 - DNA, 25 bp, Homo sapien
ccggctttgcggagggtctcagagc

SEQ ID NO: 2941339 - DNA, 25 bp, Homo sapien
ttgcggagggtctcagagctcttct

SEQ ID NO: 2941340 - DNA, 25 bp, Homo sapien
tgagtacaatgatggtcctttgccc

SEQ ID NO: 2941341 - DNA, 25 bp, Homo sapien
cagtggtctacattcaggctgggaa

SEQ ID NO: 2941342 - DNA, 25 bp, Homo sapien
gcaaggtgggcttataaggccccaa

SEQ ID NO: 2941343 - DNA, 25 bp, Homo sapien
attctgctgctaaaaatgcgttgga

SEQ ID NO: 2941344 - DNA, 25 bp, Homo sapien
tgagtaaattgagcagtccgaggcc

SEQ ID NO: 2941345 - DNA, 25 bp, Homo sapien
tatcattggagcaaaaagcccatgc

SEQ ID NO: 2941346 - DNA, 25 bp, Homo sapien
agagagaaccctgctagagtggcca

SEQ ID NO: 2941347 - DNA, 25 bp, Homo sapien
aaattggaggcaaccagaaatggcc

SEQ ID NO: 2941348 - DNA, 25 bp, Homo sapien
caggaagggtcttggactataatgg

SEQ ID NO: 2941349 - DNA, 25 bp, Homo sapien
gagtcactcgctttttcctgttatg

SEQ ID NO: 2941350 - DNA, 25 bp, Homo sapien
atgaggatgtctcgccctccacagg

SEQ ID NO: 2941351 - DNA, 25 bp, Homo sapien
gttctgaattgagtccccatgagga

SEQ ID NO: 2941352 - DNA, 25 bp, Homo sapien
tttactagcaccacgtctcaaaggg

SEQ ID NO: 2941353 - DNA, 25 bp, Homo sapien
gaccaccagggaactatcagtagtg

SEQ ID NO: 2941354 - DNA, 25 bp, Homo sapien
cagtagtgccccatttcactcaggg

SEQ ID NO: 2941355 - DNA, 25 bp, Homo sapien
caacatggtacggtggaaacagcca

SEQ ID NO: 2941356 - DNA, 25 bp, Homo sapien
aggcccagcgcaaaacactcggaca

SEQ ID NO: 2941357 - DNA, 25 bp, Homo sapien
aacactcggacactaagcatcacct

SEQ ID NO: 2941358 - DNA, 25 bp, Homo sapien
caaactaatggcaactttagagcaa

SEQ ID NO: 2941359 - DNA, 25 bp, Homo sapien
cattcattggttagttggtcaaact

SEQ ID NO: 2941360 - DNA, 25 bp, Homo sapien
caaaacttggttgtgcaatgcagca

SEQ ID NO: 2941361 - DNA, 25 bp, Homo sapien
tctttccaaagtaggtgaccaagtc

SEQ ID NO: 2941362 - DNA, 25 bp, Homo sapien
tcttgttgagcgtactcctctgccc

SEQ ID NO: 2941363 - DNA, 25 bp, Homo sapien
agccttcccgtagtcacaaaacttg

SEQ ID NO: 2941364 - DNA, 25 bp, Homo sapien
ccccatgtgtccctggggaagactc

SEQ ID NO: 2941365 - DNA, 25 bp, Homo sapien
tcccccatgtgtccctggggaagac

SEQ ID NO: 2941366 - DNA, 25 bp, Homo sapien
ccatgtgtccctggggaagactcac

SEQ ID NO: 2941367 - DNA, 25 bp, Homo sapien
ctcccccatgtgtccctggggaaga

SEQ ID NO: 2941368 - DNA, 25 bp, Homo sapien
cagagatggtcagcgtgaaggcctt

SEQ ID NO: 2941369 - DNA, 25 bp, Homo sapien
gtagtaccccgtgaagatggccctg

SEQ ID NO: 2941370 - DNA, 25 bp, Homo sapien
tctctaagaggtcaaggcccgtctg

SEQ ID NO: 2941371 - DNA, 25 bp, Homo sapien
aggaatagagcttgccccggcttag

SEQ ID NO: 2941372 - DNA, 25 bp, Homo sapien
ccaccttgtgttgggagcgtgagca

SEQ ID NO: 2941373 - DNA, 25 bp, Homo sapien
gtgacaacccgattagcaaggccct

SEQ ID NO: 2941374 - DNA, 25 bp, Homo sapien
tgggacttggcccttaccagccagg

SEQ ID NO: 2941375 - DNA, 25 bp, Homo sapien
tgccttttgcctccggtcagtgggt

SEQ ID NO: 2941376 - DNA, 25 bp, Homo sapien
catgctgtggccttgcaaaagtgca

SEQ ID NO: 2941377 - DNA, 25 bp, Homo sapien
tactaaaagctgtgtgcgtccaaag

SEQ ID NO: 2941378 - DNA, 25 bp, Homo sapien
tttggctaatgaagggcaaccaccc

SEQ ID NO: 2941379 - DNA, 25 bp, Homo sapien
catcagtcacagagaagcgagttca

SEQ ID NO: 2941380 - DNA, 25 bp, Homo sapien
tactggagattagctcgggccaaac

SEQ ID NO: 2941381 - DNA, 25 bp, Homo sapien
tcagctggctgaatatttggcaaca

SEQ ID NO: 2941382 - DNA, 25 bp, Homo sapien
cacagtcttcaattggtaggccagc

SEQ ID NO: 2941383 - DNA, 25 bp, Homo sapien
gaaaatgggcttatgccaggcgcag

SEQ ID NO: 2941384 - DNA, 25 bp, Homo sapien
ttacaggcatgtgctgccacgcatg

SEQ ID NO: 2941385 - DNA, 25 bp, Homo sapien
acaggcatgtgctgccacgcatggc

SEQ ID NO: 2941386 - DNA, 25 bp, Homo sapien
ggcatgtgctgccacgcatggctaa

SEQ ID NO: 2941387 - DNA, 25 bp, Homo sapien
aggcatgtgctgccacgcatggcta

SEQ ID NO: 2941388 - DNA, 25 bp, Homo sapien
ggctgactctacattacttgctttg

SEQ ID NO: 2941389 - DNA, 25 bp, Homo sapien
gtttgctctagaatggaatctactc

SEQ ID NO: 2941390 - DNA, 25 bp, Homo sapien
gaggttaaaaacatggcaacttgtc

SEQ ID NO: 2941391 - DNA, 25 bp, Homo sapien
gggaggcaaagtccagttcactagg

SEQ ID NO: 2941392 - DNA, 25 bp, Homo sapien
ttcctcgactggtctcgcagggtca

SEQ ID NO: 2941393 - DNA, 25 bp, Homo sapien
tggctatcagatgaattgaccctgg

SEQ ID NO: 2941394 - DNA, 25 bp, Homo sapien
gcaggacttgaatggatttgacact

SEQ ID NO: 2941395 - DNA, 25 bp, Homo sapien
cagggtcaggcccactggttaaagc

SEQ ID NO: 2941396 - DNA, 25 bp, Homo sapien
tgcacccggcctaggaagtagcctc

SEQ ID NO: 2941397 - DNA, 25 bp, Homo sapien
ctgcacccggcctaggaagtagcct

SEQ ID NO: 2941398 - DNA, 25 bp, Homo sapien
cacccggcctaggaagtagcctctt

SEQ ID NO: 2941399 - DNA, 25 bp, Homo sapien
gcacccggcctaggaagtagcctct

SEQ ID NO: 2941400 - DNA, 25 bp, Homo sapien
tctccgagggcaatttcagaggtct

SEQ ID NO: 2941401 - DNA, 25 bp, Homo sapien
atctgagatcaaggccggatggacc

SEQ ID NO: 2941402 - DNA, 25 bp, Homo sapien
tctatgctccaaccggaagtgctct

SEQ ID NO: 2941403 - DNA, 25 bp, Homo sapien
gctccgtggctcagggaaactcgtt

SEQ ID NO: 2941404 - DNA, 25 bp, Homo sapien
cgggtaaagtggcgccgcctacgca

SEQ ID NO: 2941405 - DNA, 25 bp, Homo sapien
cacgggtaaagtggcgccgcctacg

SEQ ID NO: 2941406 - DNA, 25 bp, Homo sapien
gggtaaagtggcgccgcctacgcac

SEQ ID NO: 2941407 - DNA, 25 bp, Homo sapien
aagactctctaggattggaagttgc

SEQ ID NO: 2941408 - DNA, 25 bp, Homo sapien
gcaatgaggctcttggaatactgaa

SEQ ID NO: 2941409 - DNA, 25 bp, Homo sapien
cagactccacggagcctttcaggaa

SEQ ID NO: 2941410 - DNA, 25 bp, Homo sapien
gacacactccaaggtcggaaaggta

SEQ ID NO: 2941411 - DNA, 25 bp, Homo sapien
aaaagggtcagcgtcattagggtga

SEQ ID NO: 2941412 - DNA, 25 bp, Homo sapien
actcccaggcggctgacatgaaagg

SEQ ID NO: 2941413 - DNA, 25 bp, Homo sapien
ggaactgagctcaaagtgtctcttg

SEQ ID NO: 2941414 - DNA, 25 bp, Homo sapien
agctttcctaggcttaatgctgaga

SEQ ID NO: 2941415 - DNA, 25 bp, Homo sapien
cattcggcaaggcaagcgtgatgag

SEQ ID NO: 2941416 - DNA, 25 bp, Homo sapien
tagactggactatgagccactggca

SEQ ID NO: 2941417 - DNA, 25 bp, Homo sapien
aaactgtgcccttgtcccctatgaa

SEQ ID NO: 2941418 - DNA, 25 bp, Homo sapien
tgattggctcaacgaatgacccctc

SEQ ID NO: 2941419 - DNA, 25 bp, Homo sapien
gccctccgagctcgcggggaccagg

SEQ ID NO: 2941420 - DNA, 25 bp, Homo sapien
tcctccagagtcggtgtaggctcct

SEQ ID NO: 2941421 - DNA, 25 bp, Homo sapien
tccagagtcggtgtaggctcctcca

SEQ ID NO: 2941422 - DNA, 25 bp, Homo sapien
agcgccgccgcaaaggctccagtct

SEQ ID NO: 2941423 - DNA, 25 bp, Homo sapien
ggaggccgatcctagcgccggacga

SEQ ID NO: 2941424 - DNA, 25 bp, Homo sapien
agcgccggacgagcctcgcctccca

SEQ ID NO: 2941425 - DNA, 25 bp, Homo sapien
aggccgatcctagcgccggacgagc

SEQ ID NO: 2941426 - DNA, 25 bp, Homo sapien
gaggcggaggccgatcctagcgccg

SEQ ID NO: 2941427 - DNA, 25 bp, Homo sapien
taagaggtcccagacagatatctcc

SEQ ID NO: 2941428 - DNA, 25 bp, Homo sapien
tgtatagttccagggtttcagcacc

SEQ ID NO: 2941429 - DNA, 25 bp, Homo sapien
ccaatgctagtcagaggaaacggat

SEQ ID NO: 2941430 - DNA, 25 bp, Homo sapien
ttctgtgcgcaagatgtagaggacc

SEQ ID NO: 2941431 - DNA, 25 bp, Homo sapien
tgctccaggattgaagttttgccca

SEQ ID NO: 2941432 - DNA, 25 bp, Homo sapien
ggttcccatacagaagctgctccag

SEQ ID NO: 2941433 - DNA, 25 bp, Homo sapien
atggttcccatacagaagctgctcc

SEQ ID NO: 2941434 - DNA, 25 bp, Homo sapien
ctggccacacacgaccaccttgcag

SEQ ID NO: 2941435 - DNA, 25 bp, Homo sapien
tgctaattccatgctaagcacaagt

SEQ ID NO: 2941436 - DNA, 25 bp, Homo sapien
tgaggaggccagagaattgacagcc

SEQ ID NO: 2941437 - DNA, 25 bp, Homo sapien
gcacaagtgtgacatgacagcttct

SEQ ID NO: 2941438 - DNA, 25 bp, Homo sapien
tgatgagagcatcttaaggctgacc

SEQ ID NO: 2941439 - DNA, 25 bp, Homo sapien
tcctgcgtctcgatcatctccgaac

SEQ ID NO: 2941440 - DNA, 25 bp, Homo sapien
caatggagcccacgtagatgtcctc

SEQ ID NO: 2941441 - DNA, 25 bp, Homo sapien
tgtctcaatggagcccacgtagatg

SEQ ID NO: 2941442 - DNA, 25 bp, Homo sapien
agcccacgtagatgtcctcctgcgt

SEQ ID NO: 2941443 - DNA, 25 bp, Homo sapien
ccaggacgtagccatcagtgcaaga

SEQ ID NO: 2941444 - DNA, 25 bp, Homo sapien
gggcagttcggccccatctcggagc

SEQ ID NO: 2941445 - DNA, 25 bp, Homo sapien
agcccccgggtgtcatagaaacgca

SEQ ID NO: 2941446 - DNA, 25 bp, Homo sapien
ctatagaccaggacgtagccatcag

SEQ ID NO: 2941447 - DNA, 25 bp, Homo sapien
ttggatttgtcaatctccttcttga

SEQ ID NO: 2941448 - DNA, 25 bp, Homo sapien
ccttggatttgtcaatctccttctt

SEQ ID NO: 2941449 - DNA, 25 bp, Homo sapien
cacacgctgaaaagactctctgcta

SEQ ID NO: 2941450 - DNA, 25 bp, Homo sapien
agctccacacgctgaaaagactctc

SEQ ID NO: 2941451 - DNA, 25 bp, Homo sapien
gcaggaggaccacctaagccttggg

SEQ ID NO: 2941452 - DNA, 25 bp, Homo sapien
gtagtcttagcagggggctgaggca

SEQ ID NO: 2941453 - DNA, 25 bp, Homo sapien
accacctaagccttgggaggttgag

SEQ ID NO: 2941454 - DNA, 25 bp, Homo sapien
aggaggaccacctaagccttgggag

SEQ ID NO: 2941455 - DNA, 25 bp, Homo sapien
cttgttgccaaggaccacgatggtg

SEQ ID NO: 2941456 - DNA, 25 bp, Homo sapien
gtctacacgccgctgctcctgtaag

SEQ ID NO: 2941457 - DNA, 25 bp, Homo sapien
gctgctcctgtaagtcacacttgtt

SEQ ID NO: 2941458 - DNA, 25 bp, Homo sapien
cacacttgttgccaaggaccacgat

SEQ ID NO: 2941459 - DNA, 25 bp, Homo sapien
tgcgtcatcttgctggccaagtaga

SEQ ID NO: 2941460 - DNA, 25 bp, Homo sapien
tctgacttggcccagtgctgagcca

SEQ ID NO: 2941461 - DNA, 25 bp, Homo sapien
agggagcgccggtccgccactgaca

SEQ ID NO: 2941462 - DNA, 25 bp, Homo sapien
ggccaagtagacaaagggctccagg

SEQ ID NO: 2941463 - DNA, 25 bp, Homo sapien
gctgcccttgttcttccggctgagg

SEQ ID NO: 2941464 - DNA, 25 bp, Homo sapien
catccaaggagccgctgcccttgtt

SEQ ID NO: 2941465 - DNA, 25 bp, Homo sapien
tcagccatccaaggagccgctgccc

SEQ ID NO: 2941466 - DNA, 25 bp, Homo sapien
ttcttccggctgagggggaaggcag

SEQ ID NO: 2941467 - DNA, 25 bp, Homo sapien
gggctgggatcgtgaaagaggaacg

SEQ ID NO: 2941468 - DNA, 25 bp, Homo sapien
gatcgtgaaagaggaacggcagctc

SEQ ID NO: 2941469 - DNA, 25 bp, Homo sapien
aaatggggctgggatcgtgaaagag

SEQ ID NO: 2941470 - DNA, 25 bp, Homo sapien
taccagagccccagacactgaaatg

SEQ ID NO: 2941471 - DNA, 25 bp, Homo sapien
tcaaccaagagtatttgcacttccc

SEQ ID NO: 2941472 - DNA, 25 bp, Homo sapien
ccctggctgactgggaaagacagct

SEQ ID NO: 2941473 - DNA, 25 bp, Homo sapien
gaaagacagcttgtcctctactttg

SEQ ID NO: 2941474 - DNA, 25 bp, Homo sapien
acttcccagaggtgagagggagcaa

SEQ ID NO: 2941475 - DNA, 25 bp, Homo sapien
tggagcagatcctctaaaagctggg

SEQ ID NO: 2941476 - DNA, 25 bp, Homo sapien
ccttcaccatgagagcgggcatata

SEQ ID NO: 2941477 - DNA, 25 bp, Homo sapien
tcttgctgggtcacaaagtgggctg

SEQ ID NO: 2941478 - DNA, 25 bp, Homo sapien
taataggaactcagacccaagaagg

SEQ ID NO: 2941479 - DNA, 25 bp, Homo sapien
gtgtgtcctaattccactcacccag

SEQ ID NO: 2941480 - DNA, 25 bp, Homo sapien
gaacttgaagcccaagcctgtgtgt

SEQ ID NO: 2941481 - DNA, 25 bp, Homo sapien
cacctaggctaggtgtgcaccttag

SEQ ID NO: 2941482 - DNA, 25 bp, Homo sapien
gggtaataagcttactctgcaggcc

SEQ ID NO: 2941483 - DNA, 25 bp, Homo sapien
ggagctgcgactcaggaccgccccg

SEQ ID NO: 2941484 - DNA, 25 bp, Homo sapien
cgctgtggctgtcccgggagagcgc

SEQ ID NO: 2941485 - DNA, 25 bp, Homo sapien
cgggctcggagacgctgtggctgtc

SEQ ID NO: 2941486 - DNA, 25 bp, Homo sapien
ggtttgtccggagcgctctccaggt

SEQ ID NO: 2941487 - DNA, 25 bp, Homo sapien
gaagggagacagacctcaggtttga

SEQ ID NO: 2941488 - DNA, 25 bp, Homo sapien
tatgtaatgattaccacatgcctgg

SEQ ID NO: 2941489 - DNA, 25 bp, Homo sapien
acatgcctggttgctaaacactttg

SEQ ID NO: 2941490 - DNA, 25 bp, Homo sapien
tcaggtttgagtgccatctgagggc

SEQ ID NO: 2941491 - DNA, 25 bp, Homo sapien
gacccagacacagggcgcttgtccg

SEQ ID NO: 2941492 - DNA, 25 bp, Homo sapien
ctcgagtcccgtggctggagccgcc

SEQ ID NO: 2941493 - DNA, 25 bp, Homo sapien
ggtgctccgccctctgggtgtgaca

SEQ ID NO: 2941494 - DNA, 25 bp, Homo sapien
gacctggcggtgaaacagacccaga

SEQ ID NO: 2941495 - DNA, 25 bp, Homo sapien
gctggcttactagagggtggctggg

SEQ ID NO: 2941496 - DNA, 25 bp, Homo sapien
ttcattcaccttgggtgacccactg

SEQ ID NO: 2941497 - DNA, 25 bp, Homo sapien
tctcactgtcccttattggtgactt

SEQ ID NO: 2941498 - DNA, 25 bp, Homo sapien
ccagatgccggcagcggttggttaa

SEQ ID NO: 2941499 - DNA, 25 bp, Homo sapien
cagactagcccgtggaagatttgaa

SEQ ID NO: 2941500 - DNA, 25 bp, Homo sapien
tgtgaagaccaggtaaccgatgctg

SEQ ID NO: 2941501 - DNA, 25 bp, Homo sapien
gacccataaggagactgtgaagacc

SEQ ID NO: 2941502 - DNA, 25 bp, Homo sapien
tagatccctctagcagttggtggaa

SEQ ID NO: 2941503 - DNA, 25 bp, Homo sapien
ctctaccgcagctgcaattccgtgt

SEQ ID NO: 2941504 - DNA, 25 bp, Homo sapien
tacatactgaaaagcgcagaaaaag

SEQ ID NO: 2941505 - DNA, 25 bp, Homo sapien
tcaagctctcctcccgcgtgagcca

SEQ ID NO: 2941506 - DNA, 25 bp, Homo sapien
cctttttgttgagtgatactattaa

SEQ ID NO: 2941507 - DNA, 25 bp, Homo sapien
cacgtcagtagccttcttggtgacc

SEQ ID NO: 2941508 - DNA, 25 bp, Homo sapien
ctccacgtcagtagccttcttggtg

SEQ ID NO: 2941509 - DNA, 25 bp, Homo sapien
ccacgtcagtagccttcttggtgac

SEQ ID NO: 2941510 - DNA, 25 bp, Homo sapien
tccacgtcagtagccttcttggtga

SEQ ID NO: 2941511 - DNA, 25 bp, Homo sapien
cacgaggaggtggactggtctctcc

SEQ ID NO: 2941512 - DNA, 25 bp, Homo sapien
tggtctctccggctgcattaattct

SEQ ID NO: 2941513 - DNA, 25 bp, Homo sapien
acgcggacacgcgacacgaggaggt

SEQ ID NO: 2941514 - DNA, 25 bp, Homo sapien
tgcattaattcttcccggggcgtcc

SEQ ID NO: 2941515 - DNA, 25 bp, Homo sapien
aaggaactggatccacgaccaggcc

SEQ ID NO: 2941516 - DNA, 25 bp, Homo sapien
gctgtcttgccttctaaggaccagg

SEQ ID NO: 2941517 - DNA, 25 bp, Homo sapien
cagcagattgatcccccagctggaa

SEQ ID NO: 2941518 - DNA, 25 bp, Homo sapien
gcaccctggcgcagccaacagcaga

SEQ ID NO: 2941519 - DNA, 25 bp, Homo sapien
taggcgcacggacgcccggagagga

SEQ ID NO: 2941520 - DNA, 25 bp, Homo sapien
actgctgtcaaagggcgcgaggctc

SEQ ID NO: 2941521 - DNA, 25 bp, Homo sapien
tcccagcgcagagctaggcgcacgg

SEQ ID NO: 2941522 - DNA, 25 bp, Homo sapien
ctaactgctgtcaaagggcgcgagg

SEQ ID NO: 2941523 - DNA, 25 bp, Homo sapien
tccgttcagcaaggcccacgctggg

SEQ ID NO: 2941524 - DNA, 25 bp, Homo sapien
tgggacaccgggatgccacccggct

SEQ ID NO: 2941525 - DNA, 25 bp, Homo sapien
cggctctcgttggagaaggtgttac

SEQ ID NO: 2941526 - DNA, 25 bp, Homo sapien
ggttccgttcagcaaggcccacgct

SEQ ID NO: 2941527 - DNA, 25 bp, Homo sapien
catggtcattgtcctcctgagccgc

SEQ ID NO: 2941528 - DNA, 25 bp, Homo sapien
ccgtctctggcatggtcattgtcct

SEQ ID NO: 2941529 - DNA, 25 bp, Homo sapien
gaaaccgtctctggcatggtcattg

SEQ ID NO: 2941530 - DNA, 25 bp, Homo sapien
cttcatttggaaaccgtctctggca

SEQ ID NO: 2941531 - DNA, 25 bp, Homo sapien
tgctgtccggtcaccatcagccatt

SEQ ID NO: 2941532 - DNA, 25 bp, Homo sapien
cggtgcaccttctgtgacatgcggt

SEQ ID NO: 2941533 - DNA, 25 bp, Homo sapien
catgcggtaactgaccctttccggg

SEQ ID NO: 2941534 - DNA, 25 bp, Homo sapien
gacgggagcattttccggtgcacct

SEQ ID NO: 2941535 - DNA, 25 bp, Homo sapien
agccttagagccgaggctcccgagt

SEQ ID NO: 2941536 - DNA, 25 bp, Homo sapien
gttggaagccttagagccgaggctc

SEQ ID NO: 2941537 - DNA, 25 bp, Homo sapien
ggaagccttagagccgaggctcccg

SEQ ID NO: 2941538 - DNA, 25 bp, Homo sapien
gccttagagccgaggctcccgagtc

SEQ ID NO: 2941539 - DNA, 25 bp, Homo sapien
tattgtgacagccacgaacccattg

SEQ ID NO: 2941540 - DNA, 25 bp, Homo sapien
tcttgtcaatatagtcagccgatcg

SEQ ID NO: 2941541 - DNA, 25 bp, Homo sapien
ggctctgagccctgttctgaccaaa

SEQ ID NO: 2941542 - DNA, 25 bp, Homo sapien
tctctggcagtttatcagacagtgc

SEQ ID NO: 2941543 - DNA, 25 bp, Homo sapien
gatcacttgtgtgacttggccaagg

SEQ ID NO: 2941544 - DNA, 25 bp, Homo sapien
tgggtctgcaaccagctagaagcct

SEQ ID NO: 2941545 - DNA, 25 bp, Homo sapien
taaacggtggagtggagcttgaacc

SEQ ID NO: 2941546 - DNA, 25 bp, Homo sapien
accttcagcctgatactgtggtgca

SEQ ID NO: 2941547 - DNA, 25 bp, Homo sapien
cagtacggatgatgggaagcaagtc

SEQ ID NO: 2941548 - DNA, 25 bp, Homo sapien
gaccccagaccagtacttagcaagg

SEQ ID NO: 2941549 - DNA, 25 bp, Homo sapien
tgtatgtctgcacaaggctcgttcc

SEQ ID NO: 2941550 - DNA, 25 bp, Homo sapien
tggcaggacagaacgaccgtgcttc

SEQ ID NO: 2941551 - DNA, 25 bp, Homo sapien
cctgtccattctagttgtgggagag

SEQ ID NO: 2941552 - DNA, 25 bp, Homo sapien
ggaaaccgctatgactgtcctctgg

SEQ ID NO: 2941553 - DNA, 25 bp, Homo sapien
tgtcctctggcctgtccattctagt

SEQ ID NO: 2941554 - DNA, 25 bp, Homo sapien
gagccttaaggaaaccgctatgact

SEQ ID NO: 2941555 - DNA, 25 bp, Homo sapien
ccgcactgtcaatcacctgggagta

SEQ ID NO: 2941556 - DNA, 25 bp, Homo sapien
cgctgggtaggtcggccaagagtgc

SEQ ID NO: 2941557 - DNA, 25 bp, Homo sapien
aagagtgcctcccattggtctccgc

SEQ ID NO: 2941558 - DNA, 25 bp, Homo sapien
ggaggtggagatccggatccggagc

SEQ ID NO: 2941559 - DNA, 25 bp, Homo sapien
tcagcgagttcacaggactgaggcc

SEQ ID NO: 2941560 - DNA, 25 bp, Homo sapien
acgcggatggcagggttagccttaa

SEQ ID NO: 2941561 - DNA, 25 bp, Homo sapien
gaggcctcgcgtgcatattcattcg

SEQ ID NO: 2941562 - DNA, 25 bp, Homo sapien
gcaatcgggcggacagtgcagacaa

SEQ ID NO: 2941563 - DNA, 25 bp, Homo sapien
tctttatttacggatggagagggcc

SEQ ID NO: 2941564 - DNA, 25 bp, Homo sapien
aagagctgaccctggctaggagcag

SEQ ID NO: 2941565 - DNA, 25 bp, Homo sapien
tgtattccgcgtcagagagaagagc

SEQ ID NO: 2941566 - DNA, 25 bp, Homo sapien
gccgaggcagaggttgtccagctct

SEQ ID NO: 2941567 - DNA, 25 bp, Homo sapien
gaagaggaggtactggtttgtgttg

SEQ ID NO: 2941568 - DNA, 25 bp, Homo sapien
caggagcgggcccagtccatattga

SEQ ID NO: 2941569 - DNA, 25 bp, Homo sapien
cccagtccatattgagaggagcaga

SEQ ID NO: 2941570 - DNA, 25 bp, Homo sapien
caaatattcctgatccatagagggg

SEQ ID NO: 2941571 - DNA, 25 bp, Homo sapien
tccacacaggttttcagtagtgtcc

SEQ ID NO: 2941572 - DNA, 25 bp, Homo sapien
cgttataggcacaatggccacagct

SEQ ID NO: 2941573 - DNA, 25 bp, Homo sapien
tccaagacaggtaaattctccagct

SEQ ID NO: 2941574 - DNA, 25 bp, Homo sapien
tccggtgagctttgattccacacag

SEQ ID NO: 2941575 - DNA, 25 bp, Homo sapien
gccagaacctgctaggaatcccact

SEQ ID NO: 2941576 - DNA, 25 bp, Homo sapien
gattgtgtgttatgggtgtaagaaa

SEQ ID NO: 2941577 - DNA, 25 bp, Homo sapien
cacttctcatgaacactggcgcgga

SEQ ID NO: 2941578 - DNA, 25 bp, Homo sapien
tatgggtgtaagaaagagagacgcc

SEQ ID NO: 2941579 - DNA, 25 bp, Homo sapien
gaaacttaattagtcactatgggcc

SEQ ID NO: 2941580 - DNA, 25 bp, Homo sapien
acagtatgtgggaaggacagagtcc

SEQ ID NO: 2941581 - DNA, 25 bp, Homo sapien
tggaggagccaacacagcaatcact

SEQ ID NO: 2941582 - DNA, 25 bp, Homo sapien
cagggcccagttgctatctctagga

SEQ ID NO: 2941583 - DNA, 25 bp, Homo sapien
tgggccgccgtgacgctactgctgc

SEQ ID NO: 2941584 - DNA, 25 bp, Homo sapien
cgctgttgtcgtccggggcggctgc

SEQ ID NO: 2941585 - DNA, 25 bp, Homo sapien
tgccgcccgcgctgttgtcgtccgg

SEQ ID NO: 2941586 - DNA, 25 bp, Homo sapien
ctaggtctcctgggccgccgtgacg

SEQ ID NO: 2941587 - DNA, 25 bp, Homo sapien
tatgccaggcagtagagtctctctg

SEQ ID NO: 2941588 - DNA, 25 bp, Homo sapien
caaaagtttcagctccgtgtgtgag

SEQ ID NO: 2941589 - DNA, 25 bp, Homo sapien
aaggtagtggtgtgtctcgacccca

SEQ ID NO: 2941590 - DNA, 25 bp, Homo sapien
gatgaaaggtgtgctcgctctctgc

SEQ ID NO: 2941591 - DNA, 25 bp, Homo sapien
tgccgttaaaaatattcctctatag

SEQ ID NO: 2941592 - DNA, 25 bp, Homo sapien
tatcagtgttttgccgttaaaaata

SEQ ID NO: 2941593 - DNA, 25 bp, Homo sapien
gtaaattatttattggaagatgact

SEQ ID NO: 2941594 - DNA, 25 bp, Homo sapien
tatttattggaagatgactttttta

SEQ ID NO: 2941595 - DNA, 25 bp, Homo sapien
aagtcacaagctttcggatgggcgg

SEQ ID NO: 2941596 - DNA, 25 bp, Homo sapien
tttctctgagccagcggatgcacag

SEQ ID NO: 2941597 - DNA, 25 bp, Homo sapien
gaacctaggccagcttgcttagcgg

SEQ ID NO: 2941598 - DNA, 25 bp, Homo sapien
aaaagagggccacgtaactgagagc

SEQ ID NO: 2941599 - DNA, 25 bp, Homo sapien
ccattctttcattcaaagatgagag

SEQ ID NO: 2941600 - DNA, 25 bp, Homo sapien
tcaaagatgagagaacagacttcat

SEQ ID NO: 2941601 - DNA, 25 bp, Homo sapien
ccttcacaattctccattctttcat

SEQ ID NO: 2941602 - DNA, 25 bp, Homo sapien
attcaaagatgagagaacagacttc

SEQ ID NO: 2941603 - DNA, 25 bp, Homo sapien
gtatgcatagggcaaaatcaaagcc

SEQ ID NO: 2941604 - DNA, 25 bp, Homo sapien
ttttttaagagtttagtatgcatag

SEQ ID NO: 2941605 - DNA, 25 bp, Homo sapien
ttagtatgcatagggcaaaatcaaa

SEQ ID NO: 2941606 - DNA, 25 bp, Homo sapien
ttaagagtttagtatgcatagggca

SEQ ID NO: 2941607 - DNA, 25 bp, Homo sapien
ggaaggaaatcgctgctcttcgctt

SEQ ID NO: 2941608 - DNA, 25 bp, Homo sapien
aaggaaatcgctgctcttcgcttct

SEQ ID NO: 2941609 - DNA, 25 bp, Homo sapien
ggaaatcgctgctcttcgcttcttc

SEQ ID NO: 2941610 - DNA, 25 bp, Homo sapien
tggaaggaaatcgctgctcttcgct

SEQ ID NO: 2941611 - DNA, 25 bp, Homo sapien
cgctattttgccgagtgaagtggca

SEQ ID NO: 2941612 - DNA, 25 bp, Homo sapien
taaacagtgtggctataggccttct

SEQ ID NO: 2941613 - DNA, 25 bp, Homo sapien
tagaggctaccataataaacagtgt

SEQ ID NO: 2941614 - DNA, 25 bp, Homo sapien
aatacaaatagggtcgcttggtgca

SEQ ID NO: 2941615 - DNA, 25 bp, Homo sapien
cctggacaacgtaatgagatcccat

SEQ ID NO: 2941616 - DNA, 25 bp, Homo sapien
agcccaggggttcaaaagtatcctg

SEQ ID NO: 2941617 - DNA, 25 bp, Homo sapien
gggttcaaaagtatcctgggcaaca

SEQ ID NO: 2941618 - DNA, 25 bp, Homo sapien
gacaacgtaatgagatcccatcttt

SEQ ID NO: 2941619 - DNA, 25 bp, Homo sapien
tgccaggaaggtgggactcctatct

SEQ ID NO: 2941620 - DNA, 25 bp, Homo sapien
ggaaagctatgtatagtgagaactg

SEQ ID NO: 2941621 - DNA, 25 bp, Homo sapien
catttctgatagaaagtgagggaaa

SEQ ID NO: 2941622 - DNA, 25 bp, Homo sapien
ggattggtgatctgtttctgatgcc

SEQ ID NO: 2941623 - DNA, 25 bp, Homo sapien
gtgagatcctacaattaaagctgct

SEQ ID NO: 2941624 - DNA, 25 bp, Homo sapien
gaagaacttcaattccctgtgcaga

SEQ ID NO: 2941625 - DNA, 25 bp, Homo sapien
tgggagatcaagtcacagacaagaa

SEQ ID NO: 2941626 - DNA, 25 bp, Homo sapien
tgtcaactgtcacctttgaccaggg

SEQ ID NO: 2941627 - DNA, 25 bp, Homo sapien
cacagcagtgaatatcctgtctaga

SEQ ID NO: 2941628 - DNA, 25 bp, Homo sapien
tcgaaactctctacaggccttgcca

SEQ ID NO: 2941629 - DNA, 25 bp, Homo sapien
gtcctcctaacttcgaaactctcta

SEQ ID NO: 2941630 - DNA, 25 bp, Homo sapien
tccagggagggaccgtcttgagtcc

SEQ ID NO: 2941631 - DNA, 25 bp, Homo sapien
ttgcaggtaagaaatggaagtcctg

SEQ ID NO: 2941632 - DNA, 25 bp, Homo sapien
tttgcaggtaagaaatggaagtcct

SEQ ID NO: 2941633 - DNA, 25 bp, Homo sapien
gaaaagtggaccaattggcgacgcc

SEQ ID NO: 2941634 - DNA, 25 bp, Homo sapien
caaaggtcagctgcctgcgatagac

SEQ ID NO: 2941635 - DNA, 25 bp, Homo sapien
ttactacaggaaggagcggagagca

SEQ ID NO: 2941636 - DNA, 25 bp, Homo sapien
tgcgatagaccatacacagcgcgcg

SEQ ID NO: 2941637 - DNA, 25 bp, Homo sapien
agcacctgcatctggcgcagcgcgt

SEQ ID NO: 2941638 - DNA, 25 bp, Homo sapien
gggccaagtagtgccggacctcgat

SEQ ID NO: 2941639 - DNA, 25 bp, Homo sapien
tggctggctctcaatccactgggcc

SEQ ID NO: 2941640 - DNA, 25 bp, Homo sapien
aagtgctggccgtacagcacctgca

SEQ ID NO: 2941641 - DNA, 25 bp, Homo sapien
ggggattgtccaagtcaatggcatc

SEQ ID NO: 2941642 - DNA, 25 bp, Homo sapien
ctggggattgtccaagtcaatggca

SEQ ID NO: 2941643 - DNA, 25 bp, Homo sapien
tggggattgtccaagtcaatggcat

SEQ ID NO: 2941644 - DNA, 25 bp, Homo sapien
gggattgtccaagtcaatggcatcc

SEQ ID NO: 2941645 - DNA, 25 bp, Homo sapien
tagtgccccagcttgatcttcagta

SEQ ID NO: 2941646 - DNA, 25 bp, Homo sapien
ttgatcttcagtaaaaacccatctt

SEQ ID NO: 2941647 - DNA, 25 bp, Homo sapien
agtgccccagcttgatcttcagtaa

SEQ ID NO: 2941648 - DNA, 25 bp, Homo sapien
gatcttcagtaaaaacccatcttcc

SEQ ID NO: 2941649 - DNA, 25 bp, Homo sapien
gatgatgcttcctccccgtaggtgg

SEQ ID NO: 2941650 - DNA, 25 bp, Homo sapien
tccgacaggtcgaatttagaaagag

SEQ ID NO: 2941651 - DNA, 25 bp, Homo sapien
tcccaataagttcgtggtcacatgg

SEQ ID NO: 2941652 - DNA, 25 bp, Homo sapien
tatgctaaagaaatccgacaggtcg

SEQ ID NO: 2941653 - DNA, 25 bp, Homo sapien
gaaagaatccaacagtagcctccag

SEQ ID NO: 2941654 - DNA, 25 bp, Homo sapien
agaatccaacagtagcctccagcgc

SEQ ID NO: 2941655 - DNA, 25 bp, Homo sapien
atccaacagtagcctccagcgccat

SEQ ID NO: 2941656 - DNA, 25 bp, Homo sapien
ctgaaagaatccaacagtagcctcc

SEQ ID NO: 2941657 - DNA, 25 bp, Homo sapien
attgtacagaatgtgccggatgcag

SEQ ID NO: 2941658 - DNA, 25 bp, Homo sapien
tgtacagaatgtgccggatgcagcg

SEQ ID NO: 2941659 - DNA, 25 bp, Homo sapien
cagaatgtgccggatgcagcggacc

SEQ ID NO: 2941660 - DNA, 25 bp, Homo sapien
ccagggggcagcggtcatatgtttt

SEQ ID NO: 2941661 - DNA, 25 bp, Homo sapien
tcaataccatggactgcagtagatc

SEQ ID NO: 2941662 - DNA, 25 bp, Homo sapien
tatttgctgactcaataccatggac

SEQ ID NO: 2941663 - DNA, 25 bp, Homo sapien
gatgacccctcgctctacatttatt

SEQ ID NO: 2941664 - DNA, 25 bp, Homo sapien
ttcccactaatgatgatgacccctc

SEQ ID NO: 2941665 - DNA, 25 bp, Homo sapien
ctgggacatggcgtcaaccaggatc

SEQ ID NO: 2941666 - DNA, 25 bp, Homo sapien
gacatggcgtcaaccaggatcccag

SEQ ID NO: 2941667 - DNA, 25 bp, Homo sapien
caaccaggatcccagccggagagct

SEQ ID NO: 2941668 - DNA, 25 bp, Homo sapien
atggcgtcaaccaggatcccagccg

SEQ ID NO: 2941669 - DNA, 25 bp, Homo sapien
gtctgtgcctcacgctgcaaccagg

SEQ ID NO: 2941670 - DNA, 25 bp, Homo sapien
tctgctggagggccgtctcccggct

SEQ ID NO: 2941671 - DNA, 25 bp, Homo sapien
gtctcccggctcagacgctcctggg

SEQ ID NO: 2941672 - DNA, 25 bp, Homo sapien
gtgtctgtgcctcacgctgcaacca

SEQ ID NO: 2941673 - DNA, 25 bp, Homo sapien
ccactggatcagctcgtcatccagg

SEQ ID NO: 2941674 - DNA, 25 bp, Homo sapien
tgccgccgcttccactggatcagct

SEQ ID NO: 2941675 - DNA, 25 bp, Homo sapien
caggactgtagcacgtccaggctgc

SEQ ID NO: 2941676 - DNA, 25 bp, Homo sapien
ggatcagctcgtcatccaggatgat

SEQ ID NO: 2941677 - DNA, 25 bp, Homo sapien
tgcggatctgctgccggttctgcca

SEQ ID NO: 2941678 - DNA, 25 bp, Homo sapien
gttctgccagatgatctcggccaac

SEQ ID NO: 2941679 - DNA, 25 bp, Homo sapien
taatgtccgtgatggtggcgttgac

SEQ ID NO: 2941680 - DNA, 25 bp, Homo sapien
tcaccagggctgagataatgtccgt

SEQ ID NO: 2941681 - DNA, 25 bp, Homo sapien
ttcatgtgcacgttcagcttcccgc

SEQ ID NO: 2941682 - DNA, 25 bp, Homo sapien
cagttgttcaggatctcaccactgc

SEQ ID NO: 2941683 - DNA, 25 bp, Homo sapien
catcacgcagcagttgttcaggatc

SEQ ID NO: 2941684 - DNA, 25 bp, Homo sapien
gagggtgcccgtggcttggtggtac

SEQ ID NO: 2941685 - DNA, 25 bp, Homo sapien
ggcttggtggtactccatcacgcag

SEQ ID NO: 2941686 - DNA, 25 bp, Homo sapien
cggctgcttacaaggactcagctct

SEQ ID NO: 2941687 - DNA, 25 bp, Homo sapien
gcggctgcttacaaggactcagctc

SEQ ID NO: 2941688 - DNA, 25 bp, Homo sapien
cagcacgcttgatcctcttcagtga

SEQ ID NO: 2941689 - DNA, 25 bp, Homo sapien
ctctgtcacggactctgcaccccgc

SEQ ID NO: 2941690 - DNA, 25 bp, Homo sapien
ctggaacacaagctcattgctgcca

SEQ ID NO: 2941691 - DNA, 25 bp, Homo sapien
acaagctcattgctgccaacactga

SEQ ID NO: 2941692 - DNA, 25 bp, Homo sapien
tacaaccgacttcttcttagcccat

SEQ ID NO: 2941693 - DNA, 25 bp, Homo sapien
cctcccagcaaaatgtaggcacaag

SEQ ID NO: 2941694 - DNA, 25 bp, Homo sapien
gcctaaattgtctgggttagtccca

SEQ ID NO: 2941695 - DNA, 25 bp, Homo sapien
gacccacagagtcaaagcaggctgt

SEQ ID NO: 2941696 - DNA, 25 bp, Homo sapien
ggcattgtcccacagcacagtagcc

SEQ ID NO: 2941697 - DNA, 25 bp, Homo sapien
agcacagtagccgtggcattgtggt

SEQ ID NO: 2941698 - DNA, 25 bp, Homo sapien
cattgtcccacagcacagtagccgt

SEQ ID NO: 2941699 - DNA, 25 bp, Homo sapien
cacagtagccgtggcattgtggtcc

SEQ ID NO: 2941700 - DNA, 25 bp, Homo sapien
gagggagttggaaatattcacacac

SEQ ID NO: 2941701 - DNA, 25 bp, Homo sapien
gattgagggagttggaaatattcac

SEQ ID NO: 2941702 - DNA, 25 bp, Homo sapien
aatttcatgttgagcgcctcacaca

SEQ ID NO: 2941703 - DNA, 25 bp, Homo sapien
actttgtcaggcacggcaaatggca

SEQ ID NO: 2941704 - DNA, 25 bp, Homo sapien
tttctgcgccaggaacacgaggttc

SEQ ID NO: 2941705 - DNA, 25 bp, Homo sapien
ggttgctctgcacttcggccttgaa

SEQ ID NO: 2941706 - DNA, 25 bp, Homo sapien
ccactgccagaaggtgtagttccag

SEQ ID NO: 2941707 - DNA, 25 bp, Homo sapien
cccgtcaaaccactgccagaaggtg

SEQ ID NO: 2941708 - DNA, 25 bp, Homo sapien
tgccagaaggtgtagttccagcccg

SEQ ID NO: 2941709 - DNA, 25 bp, Homo sapien
ggtgtagttccagcccggcaagttc

SEQ ID NO: 2941710 - DNA, 25 bp, Homo sapien
attgagcgtcaccactgggccacag

SEQ ID NO: 2941711 - DNA, 25 bp, Homo sapien
ctgggtgcacggagcattgagcgtc

SEQ ID NO: 2941712 - DNA, 25 bp, Homo sapien
tgcacggagcattgagcgtcaccac

SEQ ID NO: 2941713 - DNA, 25 bp, Homo sapien
acggagcattgagcgtcaccactgg

SEQ ID NO: 2941714 - DNA, 25 bp, Homo sapien
caggtcgtgggcctgttgcttattc

SEQ ID NO: 2941715 - DNA, 25 bp, Homo sapien
taaagcgcaacaagaaggtcccgtc

SEQ ID NO: 2941716 - DNA, 25 bp, Homo sapien
tcccgtcgggcttgttgatgagcag

SEQ ID NO: 2941717 - DNA, 25 bp, Homo sapien
gagtcaaacttccaggcgatggtga

SEQ ID NO: 2941718 - DNA, 25 bp, Homo sapien
ccagggacctgatggagaaatcccg

SEQ ID NO: 2941719 - DNA, 25 bp, Homo sapien
ggcggtcaggaaacacatagatgag

SEQ ID NO: 2941720 - DNA, 25 bp, Homo sapien
ccagcacaggagtgtagtacttgga

SEQ ID NO: 2941721 - DNA, 25 bp, Homo sapien
catagatgagatagctcaggtcccc

SEQ ID NO: 2941722 - DNA, 25 bp, Homo sapien
ggaccacttgcttgatctgtggttt

SEQ ID NO: 2941723 - DNA, 25 bp, Homo sapien
gggaccacttgcttgatctgtggtt

SEQ ID NO: 2941724 - DNA, 25 bp, Homo sapien
tgatctgtggtttcacatatccatc

SEQ ID NO: 2941725 - DNA, 25 bp, Homo sapien
ctgtggtttcacatatccatcaaca

SEQ ID NO: 2941726 - DNA, 25 bp, Homo sapien
gagccacagccacctggacacttac

SEQ ID NO: 2941727 - DNA, 25 bp, Homo sapien
aggagagccacagccacctggacac

SEQ ID NO: 2941728 - DNA, 25 bp, Homo sapien
gagagccacagccacctggacactt

SEQ ID NO: 2941729 - DNA, 25 bp, Homo sapien
aaggagagccacagccacctggaca

SEQ ID NO: 2941730 - DNA, 25 bp, Homo sapien
gggcctggtccatgtacgtggcgct

SEQ ID NO: 2941731 - DNA, 25 bp, Homo sapien
ggcctggtccatgtacgtggcgctg

SEQ ID NO: 2941732 - DNA, 25 bp, Homo sapien
gcctggtccatgtacgtggcgctgc

SEQ ID NO: 2941733 - DNA, 25 bp, Homo sapien
ccatcctgatcgagtacatggtcag

SEQ ID NO: 2941734 - DNA, 25 bp, Homo sapien
atggtctcatccaggtcgaattctc

SEQ ID NO: 2941735 - DNA, 25 bp, Homo sapien
gaggcgggagtcaagactgtccatt

SEQ ID NO: 2941736 - DNA, 25 bp, Homo sapien
gcgtaagagttcctccacgtgcctg

SEQ ID NO: 2941737 - DNA, 25 bp, Homo sapien
gggagcctctggcagaggtgaaaag

SEQ ID NO: 2941738 - DNA, 25 bp, Homo sapien
gagggagcctctggcagaggtgaaa

SEQ ID NO: 2941739 - DNA, 25 bp, Homo sapien
gagcctctggcagaggtgaaaagac

SEQ ID NO: 2941740 - DNA, 25 bp, Homo sapien
tcatgagagggagcctctggcagag

SEQ ID NO: 2941741 - DNA, 25 bp, Homo sapien
tatcccgggaaacgtgggcaacagc

SEQ ID NO: 2941742 - DNA, 25 bp, Homo sapien
cagacgcgctctcatagggttcaca

SEQ ID NO: 2941743 - DNA, 25 bp, Homo sapien
gaggctcggtctctaccatgacaga

SEQ ID NO: 2941744 - DNA, 25 bp, Homo sapien
tcgacaaggttacaaacagagaggc

SEQ ID NO: 2941745 - DNA, 25 bp, Homo sapien
cgggaaggaacagaacaaccagctc

SEQ ID NO: 2941746 - DNA, 25 bp, Homo sapien
ccaggggtggccagcaccctgaaaa

SEQ ID NO: 2941747 - DNA, 25 bp, Homo sapien
gcaaagcgggcagagttaaaattta

SEQ ID NO: 2941748 - DNA, 25 bp, Homo sapien
atcaggcatgcacgcgggaaggaac

SEQ ID NO: 2941749 - DNA, 25 bp, Homo sapien
cagagggtgcttacaaccttgactc

SEQ ID NO: 2941750 - DNA, 25 bp, Homo sapien
gaggcatgtctccttgcgtgtctaa

SEQ ID NO: 2941751 - DNA, 25 bp, Homo sapien
gccttatcagggctgggatacttct

SEQ ID NO: 2941752 - DNA, 25 bp, Homo sapien
gcgtgtctaaaggtccctcatcctg

SEQ ID NO: 2941753 - DNA, 25 bp, Homo sapien
aaaattgcaccactgcacactgcac

SEQ ID NO: 2941754 - DNA, 25 bp, Homo sapien
attgcaccactgcacactgcactcc

SEQ ID NO: 2941755 - DNA, 25 bp, Homo sapien
aaattgcaccactgcacactgcact

SEQ ID NO: 2941756 - DNA, 25 bp, Homo sapien
ccaaaattgcaccactgcacactgc

SEQ ID NO: 2941757 - DNA, 25 bp, Homo sapien
tggtgcctgcggcatccttctgcct

SEQ ID NO: 2941758 - DNA, 25 bp, Homo sapien
aaaggaaatgtcttgtgttgttttg

SEQ ID NO: 2941759 - DNA, 25 bp, Homo sapien
ttgttcttagacaagtgcctcctgg

SEQ ID NO: 2941760 - DNA, 25 bp, Homo sapien
caaataaggatgtgttctctgagac

SEQ ID NO: 2941761 - DNA, 25 bp, Homo sapien
ccccaattggaacctgggatcaagt

SEQ ID NO: 2941762 - DNA, 25 bp, Homo sapien
acctgggatcaagtggccgaggtcc

SEQ ID NO: 2941763 - DNA, 25 bp, Homo sapien
tcgagcagctgactacactggcaga

SEQ ID NO: 2941764 - DNA, 25 bp, Homo sapien
accaccaagcgaggactgagcatcg

SEQ ID NO: 2941765 - DNA, 25 bp, Homo sapien
gatgccaaatgcctgggcgtccatc

SEQ ID NO: 2941766 - DNA, 25 bp, Homo sapien
gggcgtccatcctgtggtacaacat

SEQ ID NO: 2941767 - DNA, 25 bp, Homo sapien
cagatgccaaatgcctgggcgtcca

SEQ ID NO: 2941768 - DNA, 25 bp, Homo sapien
cctgtggtacaacatgctgaccaac

SEQ ID NO: 2941769 - DNA, 25 bp, Homo sapien
tgcacctgatcacctttgagaccga

SEQ ID NO: 2941770 - DNA, 25 bp, Homo sapien
cgaggtgtatcaccaaggcctcaag

SEQ ID NO: 2941771 - DNA, 25 bp, Homo sapien
ttgagaccgaggtgtatcaccaagg

SEQ ID NO: 2941772 - DNA, 25 bp, Homo sapien
gtatcaccaaggcctcaagattgac

SEQ ID NO: 2941773 - DNA, 25 bp, Homo sapien
gaaggaggtagaatcaaagccaata

SEQ ID NO: 2941774 - DNA, 25 bp, Homo sapien
gcctcagatgcttatatatgtaccg

SEQ ID NO: 2941775 - DNA, 25 bp, Homo sapien
taaatcaggatggtacgtggttgcc

SEQ ID NO: 2941776 - DNA, 25 bp, Homo sapien
cacaagaaagggatggataacgcca

SEQ ID NO: 2941777 - DNA, 25 bp, Homo sapien
tcacaggcttgcgccactatatccg

SEQ ID NO: 2941778 - DNA, 25 bp, Homo sapien
gcttgcgccactatatccggctaat

SEQ ID NO: 2941779 - DNA, 25 bp, Homo sapien
ggatcacaggcttgcgccactatat

SEQ ID NO: 2941780 - DNA, 25 bp, Homo sapien
caggcttgcgccactatatccggct

SEQ ID NO: 2941781 - DNA, 25 bp, Homo sapien
cgcgcccggctcaattaatatattt

SEQ ID NO: 2941782 - DNA, 25 bp, Homo sapien
ccgcgcccggctcaattaatatatt

SEQ ID NO: 2941783 - DNA, 25 bp, Homo sapien
caccgcgcccggctcaattaatata

SEQ ID NO: 2941784 - DNA, 25 bp, Homo sapien
cgcccggctcaattaatatatttta

SEQ ID NO: 2941785 - DNA, 25 bp, Homo sapien
catgagtagtggaatttccttaacc

SEQ ID NO: 2941786 - DNA, 25 bp, Homo sapien
aaccttctcttgtgtgggagctgaa

SEQ ID NO: 2941787 - DNA, 25 bp, Homo sapien
taaactttatgggtcagatttatct

SEQ ID NO: 2941788 - DNA, 25 bp, Homo sapien
tctctgaagagtggttacatcatgc

SEQ ID NO: 2941789 - DNA, 25 bp, Homo sapien
cacagtggtggatacaaactttctc

SEQ ID NO: 2941790 - DNA, 25 bp, Homo sapien
cagactcacagtggtggatacaaac

SEQ ID NO: 2941791 - DNA, 25 bp, Homo sapien
gactcacagtggtggatacaaactt

SEQ ID NO: 2941792 - DNA, 25 bp, Homo sapien
gtcagactcacagtggtggatacaa

SEQ ID NO: 2941793 - DNA, 25 bp, Homo sapien
acgttgctgtgtcctggtgagcagc

SEQ ID NO: 2941794 - DNA, 25 bp, Homo sapien
cttggggaacctctcacgttgctgt

SEQ ID NO: 2941795 - DNA, 25 bp, Homo sapien
attgtgggacaaggtcccttggtgc

SEQ ID NO: 2941796 - DNA, 25 bp, Homo sapien
tgaagacccctctgccgagggaggt

SEQ ID NO: 2941797 - DNA, 25 bp, Homo sapien
gaagtcccctcactagctgcatgag

SEQ ID NO: 2941798 - DNA, 25 bp, Homo sapien
ccttccctaggagcatggtggcacg

SEQ ID NO: 2941799 - DNA, 25 bp, Homo sapien
gacagtgtgagaaggcgatgatcca

SEQ ID NO: 2941800 - DNA, 25 bp, Homo sapien
ggttctcaagacacgaccaggttct

SEQ ID NO: 2941801 - DNA, 25 bp, Homo sapien
catgtgagggatggcacactgatgt

SEQ ID NO: 2941802 - DNA, 25 bp, Homo sapien
cacctgtacacaggagcgcatggcc

SEQ ID NO: 2941803 - DNA, 25 bp, Homo sapien
cagaggaacgctggagccaagagaa

SEQ ID NO: 2941804 - DNA, 25 bp, Homo sapien
cactgatgtgtttatgcacctgtac

SEQ ID NO: 2941805 - DNA, 25 bp, Homo sapien
taaagtcatgatctaccaggtgagc

SEQ ID NO: 2941806 - DNA, 25 bp, Homo sapien
tcagcgtcaacgtgaagaccgtgcg

SEQ ID NO: 2941807 - DNA, 25 bp, Homo sapien
cagaagagctgatcaagtcggacca

SEQ ID NO: 2941808 - DNA, 25 bp, Homo sapien
gagcctcctggacaaaatcatcggg

SEQ ID NO: 2941809 - DNA, 25 bp, Homo sapien
cgcggctccaggagcagcgcttcga

SEQ ID NO: 2941810 - DNA, 25 bp, Homo sapien
ttcgacgtgcttgcgtccgtaaagc

SEQ ID NO: 2941811 - DNA, 25 bp, Homo sapien
ccaggagcagcgcttcgacgtgctt

SEQ ID NO: 2941812 - DNA, 25 bp, Homo sapien
gagcagcgcttcgacgtgcttgcgt

SEQ ID NO: 2941813 - DNA, 25 bp, Homo sapien
ctgaagcaaagagaaaatgacataa

SEQ ID NO: 2941814 - DNA, 25 bp, Homo sapien
tgaagcaaagagaaaatgacataac

SEQ ID NO: 2941815 - DNA, 25 bp, Homo sapien
agagaaaatgacataactttggaaa

SEQ ID NO: 2941816 - DNA, 25 bp, Homo sapien
gaaaatgacataactttggaaatta

SEQ ID NO: 2941817 - DNA, 25 bp, Homo sapien
ctagtgagtacctggatttctctcc

SEQ ID NO: 2941818 - DNA, 25 bp, Homo sapien
gcagaaggtaccagtctagtgagta

SEQ ID NO: 2941819 - DNA, 25 bp, Homo sapien
ccagtctagtgagtacctggatttc

SEQ ID NO: 2941820 - DNA, 25 bp, Homo sapien
ggtaccagtctagtgagtacctgga

SEQ ID NO: 2941821 - DNA, 25 bp, Homo sapien
caagttctcctaattcactgacaca

SEQ ID NO: 2941822 - DNA, 25 bp, Homo sapien
tgacacaacaataagcagcctctga

SEQ ID NO: 2941823 - DNA, 25 bp, Homo sapien
ctgaacctttccaagttctcctaat

SEQ ID NO: 2941824 - DNA, 25 bp, Homo sapien
tgtcatttcttcactccggaaaagc

SEQ ID NO: 2941825 - DNA, 25 bp, Homo sapien
gaagctttcgatccatttcttcaca

SEQ ID NO: 2941826 - DNA, 25 bp, Homo sapien
aatttccgttggaaaacattcacat

SEQ ID NO: 2941827 - DNA, 25 bp, Homo sapien
ggaaaacattcacatctggatttaa

SEQ ID NO: 2941828 - DNA, 25 bp, Homo sapien
ttctaacttcattcacaaatttccg

SEQ ID NO: 2941829 - DNA, 25 bp, Homo sapien
gttttcaccggtgtccataatcgga

SEQ ID NO: 2941830 - DNA, 25 bp, Homo sapien
cggtgtccataatcggaatgttagc

SEQ ID NO: 2941831 - DNA, 25 bp, Homo sapien
tctaagtcaatcatgtcccggggga

SEQ ID NO: 2941832 - DNA, 25 bp, Homo sapien
cctctgggttttcaccggtgtccat

SEQ ID NO: 2941833 - DNA, 25 bp, Homo sapien
tccaggaagtttctcttcagagctt

SEQ ID NO: 2941834 - DNA, 25 bp, Homo sapien
ctgagttttgcgaagtataaatttt

SEQ ID NO: 2941835 - DNA, 25 bp, Homo sapien
attcggtcagttccaggaagtttct

SEQ ID NO: 2941836 - DNA, 25 bp, Homo sapien
attgctgagttttgcgaagtataaa

SEQ ID NO: 2941837 - DNA, 25 bp, Homo sapien
tccctctgaggtaatgcgtctaagt

SEQ ID NO: 2941838 - DNA, 25 bp, Homo sapien
aaaccatggctggttgtgtactgca

SEQ ID NO: 2941839 - DNA, 25 bp, Homo sapien
catttctgtaactaaaacagggtgc

SEQ ID NO: 2941840 - DNA, 25 bp, Homo sapien
gaagtttcaaacaagcatcctacca

SEQ ID NO: 2941841 - DNA, 25 bp, Homo sapien
gcatgcctccggatcacctagtaaa

SEQ ID NO: 2941842 - DNA, 25 bp, Homo sapien
gactcttgaaaggaccaggcaatta

SEQ ID NO: 2941843 - DNA, 25 bp, Homo sapien
gaaaaacccctgctccagtctagag

SEQ ID NO: 2941844 - DNA, 25 bp, Homo sapien
taacgtgatgtcattagggactggc

SEQ ID NO: 2941845 - DNA, 25 bp, Homo sapien
tgagctctgactacaaggccaggtt

SEQ ID NO: 2941846 - DNA, 25 bp, Homo sapien
aatacaataacgtctgggcagtgag

SEQ ID NO: 2941847 - DNA, 25 bp, Homo sapien
catctgtgagcatatgaaagcgtca

SEQ ID NO: 2941848 - DNA, 25 bp, Homo sapien
tacatcagatctgtgggtagcagct

SEQ ID NO: 2941849 - DNA, 25 bp, Homo sapien
cacggtcttgtgctctaagtacttc

SEQ ID NO: 2941850 - DNA, 25 bp, Homo sapien
ctctcatagccacggtcttgtgctc

SEQ ID NO: 2941851 - DNA, 25 bp, Homo sapien
tagccacggtcttgtgctctaagta

SEQ ID NO: 2941852 - DNA, 25 bp, Homo sapien
cttgtgctctaagtacttccagaga

SEQ ID NO: 2941853 - DNA, 25 bp, Homo sapien
actcttccaacaagtctggatccgc

SEQ ID NO: 2941854 - DNA, 25 bp, Homo sapien
tcttccaacaagtctggatccgcca

SEQ ID NO: 2941855 - DNA, 25 bp, Homo sapien
gactcttccaacaagtctggatccg

SEQ ID NO: 2941856 - DNA, 25 bp, Homo sapien
cttccaacaagtctggatccgccat

SEQ ID NO: 2941857 - DNA, 25 bp, Homo sapien
tacccgccaaagcatgcgctcaaaa

SEQ ID NO: 2941858 - DNA, 25 bp, Homo sapien
gggttctcgatttcagcctgtcgca

SEQ ID NO: 2941859 - DNA, 25 bp, Homo sapien
tcagcctgtcgcaggaacacatttc

SEQ ID NO: 2941860 - DNA, 25 bp, Homo sapien
tcaaaagtagggatgcgctcccggt

SEQ ID NO: 2941861 - DNA, 25 bp, Homo sapien
ggtggccccatgctacgttactgct

SEQ ID NO: 2941862 - DNA, 25 bp, Homo sapien
tctgggctccctttacaagacctac

SEQ ID NO: 2941863 - DNA, 25 bp, Homo sapien
cacaggatgcaatctccttgtctta

SEQ ID NO: 2941864 - DNA, 25 bp, Homo sapien
caatcagaataacatctacacgggt

SEQ ID NO: 2941865 - DNA, 25 bp, Homo sapien
aattgggctcaagggtctgaaatcc

SEQ ID NO: 2941866 - DNA, 25 bp, Homo sapien
tctgttacagatatccagggtcccc

SEQ ID NO: 2941867 - DNA, 25 bp, Homo sapien
tacaacgtttccacaacctgatggc

SEQ ID NO: 2941868 - DNA, 25 bp, Homo sapien
tgtgaaactacacccctaggcaggg

SEQ ID NO: 2941869 - DNA, 25 bp, Homo sapien
tcagctgatcgccttggaagaaaat

SEQ ID NO: 2941870 - DNA, 25 bp, Homo sapien
tgtttttcagctgatcgccttggaa

SEQ ID NO: 2941871 - DNA, 25 bp, Homo sapien
ttttcagctgatcgccttggaagaa

SEQ ID NO: 2941872 - DNA, 25 bp, Homo sapien
gtttttcagctgatcgccttggaag

SEQ ID NO: 2941873 - DNA, 25 bp, Homo sapien
ttggagatcatcaatcctggtattc

SEQ ID NO: 2941874 - DNA, 25 bp, Homo sapien
acaaaagtcacaccagagctttttg

SEQ ID NO: 2941875 - DNA, 25 bp, Homo sapien
ggtacaaaagtcacaccagagcttt

SEQ ID NO: 2941876 - DNA, 25 bp, Homo sapien
tgggtacaaaagtcacaccagagct

SEQ ID NO: 2941877 - DNA, 25 bp, Homo sapien
cttcttgggtacaaaagtcacacca

SEQ ID NO: 2941878 - DNA, 25 bp, Homo sapien
ttaacaccagttttagatctcaggg

SEQ ID NO: 2941879 - DNA, 25 bp, Homo sapien
gagaaaaggaacaagcgagggatcc

SEQ ID NO: 2941880 - DNA, 25 bp, Homo sapien
ttttagatctcagggtatgaatggc

SEQ ID NO: 2941881 - DNA, 25 bp, Homo sapien
caagcgagggatccttttaacacca

SEQ ID NO: 2941882 - DNA, 25 bp, Homo sapien
cgcactttgatgaaccagacacgga

SEQ ID NO: 2941883 - DNA, 25 bp, Homo sapien
gacacggatgttcttagcagctgcc

SEQ ID NO: 2941884 - DNA, 25 bp, Homo sapien
ggtgatcctccgtttgattcagaac

SEQ ID NO: 2941885 - DNA, 25 bp, Homo sapien
gacctctgcaatcaagcatttctga

SEQ ID NO: 2941886 - DNA, 25 bp, Homo sapien
actggatggagtcaaggtcggtgac

SEQ ID NO: 2941887 - DNA, 25 bp, Homo sapien
tggagtcaaggtcggtgacagggca

SEQ ID NO: 2941888 - DNA, 25 bp, Homo sapien
gatggagtcaaggtcggtgacaggg

SEQ ID NO: 2941889 - DNA, 25 bp, Homo sapien
tggatggagtcaaggtcggtgacag

SEQ ID NO: 2941890 - DNA, 25 bp, Homo sapien
cctagatactatcagcagattactc

SEQ ID NO: 2941891 - DNA, 25 bp, Homo sapien
tgaacccctacctacagaatctctt

SEQ ID NO: 2941892 - DNA, 25 bp, Homo sapien
tagacctcaatgtgcccggaactga

SEQ ID NO: 2941893 - DNA, 25 bp, Homo sapien
tcctgcaccttgctaggaaccaggt

SEQ ID NO: 2941894 - DNA, 25 bp, Homo sapien
tttatctctcggtaagttccaattc

SEQ ID NO: 2941895 - DNA, 25 bp, Homo sapien
ggttgggggagtctggtttgtctgc

SEQ ID NO: 2941896 - DNA, 25 bp, Homo sapien
ttgggggagtctggtttgtctgcat

SEQ ID NO: 2941897 - DNA, 25 bp, Homo sapien
tatctctcggtaagttccaattcca

SEQ ID NO: 2941898 - DNA, 25 bp, Homo sapien
taaaatgccatgaccgaagtctcca

SEQ ID NO: 2941899 - DNA, 25 bp, Homo sapien
cagcaaatagaaaagggaacgtgat

SEQ ID NO: 2941900 - DNA, 25 bp, Homo sapien
gaaaggatccggctctccctcagta

SEQ ID NO: 2941901 - DNA, 25 bp, Homo sapien
gggaacgtgataatagtatacggag

SEQ ID NO: 2941902 - DNA, 25 bp, Homo sapien
aagacttccagatcataattttcat

SEQ ID NO: 2941903 - DNA, 25 bp, Homo sapien
tcataatgaatgcttgggaaattat

SEQ ID NO: 2941904 - DNA, 25 bp, Homo sapien
ttcataatgaatgcttgggaaatta

SEQ ID NO: 2941905 - DNA, 25 bp, Homo sapien
tccaattataagtaaacatcggccg

SEQ ID NO: 2941906 - DNA, 25 bp, Homo sapien
taatgtatcgaccactgaacacagt

SEQ ID NO: 2941907 - DNA, 25 bp, Homo sapien
acatcggccgtacactccaggatga

SEQ ID NO: 2941908 - DNA, 25 bp, Homo sapien
tccaggatgacccaaagatattaag

SEQ ID NO: 2941909 - DNA, 25 bp, Homo sapien
gttcagctgtagaacagggttcccc

SEQ ID NO: 2941910 - DNA, 25 bp, Homo sapien
tggtccaccaaacactccagggagg

SEQ ID NO: 2941911 - DNA, 25 bp, Homo sapien
ggctgggttcagctgtagaacaggg

SEQ ID NO: 2941912 - DNA, 25 bp, Homo sapien
aatgccaaaagggtatggtccacca

SEQ ID NO: 2941913 - DNA, 25 bp, Homo sapien
cctcagaaataagcagcgcagggaa

SEQ ID NO: 2941914 - DNA, 25 bp, Homo sapien
caaggcacttgggtctcttatggct

SEQ ID NO: 2941915 - DNA, 25 bp, Homo sapien
ggaaaagtatgtggctcctcaaggc

SEQ ID NO: 2941916 - DNA, 25 bp, Homo sapien
tgtattacattcttgccgccactcc

SEQ ID NO: 2941917 - DNA, 25 bp, Homo sapien
cattatgattgtagatatatctctt

SEQ ID NO: 2941918 - DNA, 25 bp, Homo sapien
gagtctctaaactacaggttctcct

SEQ ID NO: 2941919 - DNA, 25 bp, Homo sapien
ccgtgcctggcttatacattatgat

SEQ ID NO: 2941920 - DNA, 25 bp, Homo sapien
gtctggaatttcctgaccgcaagtc

SEQ ID NO: 2941921 - DNA, 25 bp, Homo sapien
tttaaaacatgaccacaatattgtc

SEQ ID NO: 2941922 - DNA, 25 bp, Homo sapien
gaccacaatattgtcatcacacgta

SEQ ID NO: 2941923 - DNA, 25 bp, Homo sapien
tgtcatcacacgtaaatgcattaac

SEQ ID NO: 2941924 - DNA, 25 bp, Homo sapien
tcatcacacgtaaatgcattaacaa

SEQ ID NO: 2941925 - DNA, 25 bp, Homo sapien
catcaccttatagtcatgaaaaaag

SEQ ID NO: 2941926 - DNA, 25 bp, Homo sapien
aaaaaagattactgccactcactca

SEQ ID NO: 2941927 - DNA, 25 bp, Homo sapien
ttcagtgtggatgtctaaaaggaaa

SEQ ID NO: 2941928 - DNA, 25 bp, Homo sapien
tctggcctgaggcttgcctcggcct

SEQ ID NO: 2941929 - DNA, 25 bp, Homo sapien
gtcagtttattggtagcaatgttcc

SEQ ID NO: 2941930 - DNA, 25 bp, Homo sapien
ggagttcaagaacgtcagtttattg

SEQ ID NO: 2941931 - DNA, 25 bp, Homo sapien
aggataacagacatcttcatcttaa

SEQ ID NO: 2941932 - DNA, 25 bp, Homo sapien
catatggatgataccaaggataaca

SEQ ID NO: 2941933 - DNA, 25 bp, Homo sapien
taaccagactctgggtaggaaaaga

SEQ ID NO: 2941934 - DNA, 25 bp, Homo sapien
gatcagaaggcttggtgcattctca

SEQ ID NO: 2941935 - DNA, 25 bp, Homo sapien
gcatcataggccgtccacttgtaaa

SEQ ID NO: 2941936 - DNA, 25 bp, Homo sapien
tagccaaacaaagaggtcatgaaga

SEQ ID NO: 2941937 - DNA, 25 bp, Homo sapien
tagtgcaaccactaccaggaaacac

SEQ ID NO: 2941938 - DNA, 25 bp, Homo sapien
tcctcaaatactgacggcgaaggac

SEQ ID NO: 2941939 - DNA, 25 bp, Homo sapien
caaggtacacacagtagtgcaacca

SEQ ID NO: 2941940 - DNA, 25 bp, Homo sapien
cgaaggaccaatggtttaaacagca

SEQ ID NO: 2941941 - DNA, 25 bp, Homo sapien
cttttagcaatagaaatacacctac

SEQ ID NO: 2941942 - DNA, 25 bp, Homo sapien
ccactggggaattgccttgatcttg

SEQ ID NO: 2941943 - DNA, 25 bp, Homo sapien
tagtaacttttagcaatagaaatac

SEQ ID NO: 2941944 - DNA, 25 bp, Homo sapien
caaaagtctagtaacttttagcaat

SEQ ID NO: 2941945 - DNA, 25 bp, Homo sapien
cgtgctgggacataacacaaatgcg

SEQ ID NO: 2941946 - DNA, 25 bp, Homo sapien
aggcccagtgctcgtgctgggacat

SEQ ID NO: 2941947 - DNA, 25 bp, Homo sapien
tcgtgctgggacataacacaaatgc

SEQ ID NO: 2941948 - DNA, 25 bp, Homo sapien
ggcaggcccagtgctcgtgctggga

SEQ ID NO: 2941949 - DNA, 25 bp, Homo sapien
tacattttcctgagcgcagcgtgag

SEQ ID NO: 2941950 - DNA, 25 bp, Homo sapien
tgctacatctagacaggcataggcc

SEQ ID NO: 2941951 - DNA, 25 bp, Homo sapien
gttgcccaggcaaaccgcatgagtg

SEQ ID NO: 2941952 - DNA, 25 bp, Homo sapien
ggaaaatgtctcaatgtcagtcctg

SEQ ID NO: 2941953 - DNA, 25 bp, Homo sapien
ttggctcgggtttgggctgactggg

SEQ ID NO: 2941954 - DNA, 25 bp, Homo sapien
ctagtccctgttggctcgggtttgg

SEQ ID NO: 2941955 - DNA, 25 bp, Homo sapien
tccctgttggctcgggtttgggctg

SEQ ID NO: 2941956 - DNA, 25 bp, Homo sapien
ctgttggctcgggtttgggctgact

SEQ ID NO: 2941957 - DNA, 25 bp, Homo sapien
tctttaaatgaaatgtgatggtttg

SEQ ID NO: 2941958 - DNA, 25 bp, Homo sapien
ctctttaaatgaaatgtgatggttt

SEQ ID NO: 2941959 - DNA, 25 bp, Homo sapien
tttatcacagaagaagtcgcaagac

SEQ ID NO: 2941960 - DNA, 25 bp, Homo sapien
taagaagaccctatgaatgtgcagg

SEQ ID NO: 2941961 - DNA, 25 bp, Homo sapien
gttaaatgtctcacagggaagtccc

SEQ ID NO: 2941962 - DNA, 25 bp, Homo sapien
tatatcactcacagacaaccaaggg

SEQ ID NO: 2941963 - DNA, 25 bp, Homo sapien
gactcctgcataacctcggctgggt

SEQ ID NO: 2941964 - DNA, 25 bp, Homo sapien
ttcaaggctcccaaagtagaaggcc

SEQ ID NO: 2941965 - DNA, 25 bp, Homo sapien
cctcagaaggtggactgaaaatgca

SEQ ID NO: 2941966 - DNA, 25 bp, Homo sapien
tgtgcagtcagacttgtgggccacc

SEQ ID NO: 2941967 - DNA, 25 bp, Homo sapien
caggagcccaagaattccagcaact

SEQ ID NO: 2941968 - DNA, 25 bp, Homo sapien
ggagcccaagaattccagcaacttc

SEQ ID NO: 2941969 - DNA, 25 bp, Homo sapien
aacaggagcccaagaattccagcaa

SEQ ID NO: 2941970 - DNA, 25 bp, Homo sapien
ttaacaggagcccaagaattccagc

SEQ ID NO: 2941971 - DNA, 25 bp, Homo sapien
ggaagggcgatggttagtaacacaa

SEQ ID NO: 2941972 - DNA, 25 bp, Homo sapien
caaacctcagaaaagcatatgtcta

SEQ ID NO: 2941973 - DNA, 25 bp, Homo sapien
ttgcctgggctttaacatgacattc

SEQ ID NO: 2941974 - DNA, 25 bp, Homo sapien
aacaaaacccactgactgaacggct

SEQ ID NO: 2941975 - DNA, 25 bp, Homo sapien
gttgcccaccctgatcccaccaaag

SEQ ID NO: 2941976 - DNA, 25 bp, Homo sapien
agagctggtcatgctgaataatctc

SEQ ID NO: 2941977 - DNA, 25 bp, Homo sapien
tcagcatcctcctctgtcggtccgt

SEQ ID NO: 2941978 - DNA, 25 bp, Homo sapien
tgtcggtccgttgcccaccctgatc

SEQ ID NO: 2941979 - DNA, 25 bp, Homo sapien
cagtaatggagacctgcgtgcagag

SEQ ID NO: 2941980 - DNA, 25 bp, Homo sapien
gagcactgcgggcaaaatctggaat

SEQ ID NO: 2941981 - DNA, 25 bp, Homo sapien
tgagagagcagtcagtaatggagac

SEQ ID NO: 2941982 - DNA, 25 bp, Homo sapien
aatctggaattcaagataggagcaa

SEQ ID NO: 2941983 - DNA, 25 bp, Homo sapien
tgtgtttacacagaacagcaaaggc

SEQ ID NO: 2941984 - DNA, 25 bp, Homo sapien
ctgtgtttacacagaacagcaaagg

SEQ ID NO: 2941985 - DNA, 25 bp, Homo sapien
tatacatagtgctggacaacacgga

SEQ ID NO: 2941986 - DNA, 25 bp, Homo sapien
ggtcacggcctttgaagatttccca

SEQ ID NO: 2941987 - DNA, 25 bp, Homo sapien
tgggacatggctacaaacgagaacg

SEQ ID NO: 2941988 - DNA, 25 bp, Homo sapien
tactcagggcttcaagggtcgcccc

SEQ ID NO: 2941989 - DNA, 25 bp, Homo sapien
ccccagggcccgcattgagaggaag

SEQ ID NO: 2941990 - DNA, 25 bp, Homo sapien
cgccccagggcccgcattgagagga

SEQ ID NO: 2941991 - DNA, 25 bp, Homo sapien
gccccagggcccgcattgagaggaa

SEQ ID NO: 2941992 - DNA, 25 bp, Homo sapien
cccagggcccgcattgagaggaaga

SEQ ID NO: 2941993 - DNA, 25 bp, Homo sapien
acgtgcaggcattctgagttgtggc

SEQ ID NO: 2941994 - DNA, 25 bp, Homo sapien
agttgacggcactctgttgagaaag

SEQ ID NO: 2941995 - DNA, 25 bp, Homo sapien
ctcaggtggtgatttcggcaatgcc

SEQ ID NO: 2941996 - DNA, 25 bp, Homo sapien
gagttgtggctacttggcgctttga

SEQ ID NO: 2941997 - DNA, 25 bp, Homo sapien
aggaaaccagagagaagatataagg

SEQ ID NO: 2941998 - DNA, 25 bp, Homo sapien
gggaggaaaccagagagaagatata

SEQ ID NO: 2941999 - DNA, 25 bp, Homo sapien
tgtcgtgggaggaaaccagagagaa

SEQ ID NO: 2942000 - DNA, 25 bp, Homo sapien
ctgtcgtgggaggaaaccagagaga

SEQ ID NO: 2942001 - DNA, 25 bp, Homo sapien
gcgcatgagcgaggctgagggccca

SEQ ID NO: 2942002 - DNA, 25 bp, Homo sapien
agtaggaggcagtgttggagatgca

SEQ ID NO: 2942003 - DNA, 25 bp, Homo sapien
ggcccagagccgcaagtaggaggca

SEQ ID NO: 2942004 - DNA, 25 bp, Homo sapien
cccaggcagtactcgatggtgtgga

SEQ ID NO: 2942005 - DNA, 25 bp, Homo sapien
cgctcaggccgatgtggatcaccat

SEQ ID NO: 2942006 - DNA, 25 bp, Homo sapien
taagcgcagtgcgtggagaaaggcc

SEQ ID NO: 2942007 - DNA, 25 bp, Homo sapien
ccatggtccaaagcacctcagacag

SEQ ID NO: 2942008 - DNA, 25 bp, Homo sapien
tccatgatcaggaggatggccacgg

SEQ ID NO: 2942009 - DNA, 25 bp, Homo sapien
gacccctggcacaatgacagaacaa

SEQ ID NO: 2942010 - DNA, 25 bp, Homo sapien
ggaatccctccggtccacaatggag

SEQ ID NO: 2942011 - DNA, 25 bp, Homo sapien
aagaagctgcgtgagtgtaccgacc

SEQ ID NO: 2942012 - DNA, 25 bp, Homo sapien
aaacctgcccatgtgaagaagctgc

SEQ ID NO: 2942013 - DNA, 25 bp, Homo sapien
tacccaatactcctattgccaaaat

SEQ ID NO: 2942014 - DNA, 25 bp, Homo sapien
aacagcacctgagggcattctgatg

SEQ ID NO: 2942015 - DNA, 25 bp, Homo sapien
tacgacatatatggggaggctgttc

SEQ ID NO: 2942016 - DNA, 25 bp, Homo sapien
gggtcttctctcactctagacaggc

SEQ ID NO: 2942017 - DNA, 25 bp, Homo sapien
gctactgagaccacctctgagggaa

SEQ ID NO: 2942018 - DNA, 25 bp, Homo sapien
gaagactgtcccataagcagagcga

SEQ ID NO: 2942019 - DNA, 25 bp, Homo sapien
tttagagacttagagcggccagaac

SEQ ID NO: 2942020 - DNA, 25 bp, Homo sapien
caaacatgaagttccccagggcaag

SEQ ID NO: 2942021 - DNA, 25 bp, Homo sapien
ccctccagagacactgggcaagcac

SEQ ID NO: 2942022 - DNA, 25 bp, Homo sapien
aagcccctccagagacactgggcaa

SEQ ID NO: 2942023 - DNA, 25 bp, Homo sapien
gggaagcccctccagagacactggg

SEQ ID NO: 2942024 - DNA, 25 bp, Homo sapien
ctctaagggaagcccctccagagac

SEQ ID NO: 2942025 - DNA, 25 bp, Homo sapien
tgcagagatcccacttttaaggcct

SEQ ID NO: 2942026 - DNA, 25 bp, Homo sapien
cctgggatcaagagttcgacgcacg

SEQ ID NO: 2942027 - DNA, 25 bp, Homo sapien
taacatcgttaatgaacaagtggcc

SEQ ID NO: 2942028 - DNA, 25 bp, Homo sapien
gaagctagagaaagcccagagtgca

SEQ ID NO: 2942029 - DNA, 25 bp, Homo sapien
acttcccttcccgaatatgctcgaa

SEQ ID NO: 2942030 - DNA, 25 bp, Homo sapien
cgaatatgctcgaaggagaagggta

SEQ ID NO: 2942031 - DNA, 25 bp, Homo sapien
cccgctgtagaatttattctggaac

SEQ ID NO: 2942032 - DNA, 25 bp, Homo sapien
cttgaaaccggtcccgctgtagaat

SEQ ID NO: 2942033 - DNA, 25 bp, Homo sapien
gcccagtgagtatgagtgacagcca

SEQ ID NO: 2942034 - DNA, 25 bp, Homo sapien
tcatgatggcctagttgggtccagc

SEQ ID NO: 2942035 - DNA, 25 bp, Homo sapien
tccaagagtgggacatgttaccagt

SEQ ID NO: 2942036 - DNA, 25 bp, Homo sapien
tagaaactacggtggcagatgcagg

SEQ ID NO: 2942037 - DNA, 25 bp, Homo sapien
gcaaagatcatcacgaaaacccagg

SEQ ID NO: 2942038 - DNA, 25 bp, Homo sapien
agatctcagggtctccatcagggaa

SEQ ID NO: 2942039 - DNA, 25 bp, Homo sapien
tgtctgaacaggaggaccttgggca

SEQ ID NO: 2942040 - DNA, 25 bp, Homo sapien
cacaaggtcgggtcaggtcacagtg

SEQ ID NO: 2942041 - DNA, 25 bp, Homo sapien
tctggggcccaggtcacattcctgg

SEQ ID NO: 2942042 - DNA, 25 bp, Homo sapien
tggggcccaggtcacattcctgggc

SEQ ID NO: 2942043 - DNA, 25 bp, Homo sapien
ggcccaggtcacattcctgggcagc

SEQ ID NO: 2942044 - DNA, 25 bp, Homo sapien
ccaggtcacattcctgggcagcccc

SEQ ID NO: 2942045 - DNA, 25 bp, Homo sapien
gggccgacaccagggacaggtagca

SEQ ID NO: 2942046 - DNA, 25 bp, Homo sapien
agggccgacaccagggacaggtagc

SEQ ID NO: 2942047 - DNA, 25 bp, Homo sapien
tcagggccgacaccagggacaggta

SEQ ID NO: 2942048 - DNA, 25 bp, Homo sapien
cagggccgacaccagggacaggtag

SEQ ID NO: 2942049 - DNA, 25 bp, Homo sapien
cagcatggcatagaatgtacagaaa

SEQ ID NO: 2942050 - DNA, 25 bp, Homo sapien
gaaattttacgttgtgagggcagag

SEQ ID NO: 2942051 - DNA, 25 bp, Homo sapien
catgtatggaccttaaggtgagagc

SEQ ID NO: 2942052 - DNA, 25 bp, Homo sapien
gagagcttagggttgtaaaatgagc

SEQ ID NO: 2942053 - DNA, 25 bp, Homo sapien
gcctggcagaaatctgctctcacat

SEQ ID NO: 2942054 - DNA, 25 bp, Homo sapien
tgctcagcctggcagaaatctgctc

SEQ ID NO: 2942055 - DNA, 25 bp, Homo sapien
gtgctcagcctggcagaaatctgct

SEQ ID NO: 2942056 - DNA, 25 bp, Homo sapien
gcagatggataccttcggactccaa

SEQ ID NO: 2942057 - DNA, 25 bp, Homo sapien
gagacaagttaaaagtgtaggtcac

SEQ ID NO: 2942058 - DNA, 25 bp, Homo sapien
gcttctctcttcaagataagcaaag

SEQ ID NO: 2942059 - DNA, 25 bp, Homo sapien
aagcagcctttactacatttaggca

SEQ ID NO: 2942060 - DNA, 25 bp, Homo sapien
tacggcaaataaaaagtgtgagcgt

SEQ ID NO: 2942061 - DNA, 25 bp, Homo sapien
acggcaaataaaaagtgtgagcgtg

SEQ ID NO: 2942062 - DNA, 25 bp, Homo sapien
cggcaaataaaaagtgtgagcgtgc

SEQ ID NO: 2942063 - DNA, 25 bp, Homo sapien
tctgtgaacttgttgagagtagcat

SEQ ID NO: 2942064 - DNA, 25 bp, Homo sapien
tggagctttatcatatgtagcatca

SEQ ID NO: 2942065 - DNA, 25 bp, Homo sapien
ctgattaggggatggagctccatca

SEQ ID NO: 2942066 - DNA, 25 bp, Homo sapien
tcaaatggccaatctagaacgtgga

SEQ ID NO: 2942067 - DNA, 25 bp, Homo sapien
ggatggagctccatcatcaaatggc

SEQ ID NO: 2942068 - DNA, 25 bp, Homo sapien
cccaattccacaacgcaatgcactg

SEQ ID NO: 2942069 - DNA, 25 bp, Homo sapien
ttccacaacgcaatgcactgcaaca

SEQ ID NO: 2942070 - DNA, 25 bp, Homo sapien
cgtaatcgcatcttaagtaaagcag

SEQ ID NO: 2942071 - DNA, 25 bp, Homo sapien
ccttcccaattccacaacgcaatgc

SEQ ID NO: 2942072 - DNA, 25 bp, Homo sapien
cccaggaggttaggccttcgtcaca

SEQ ID NO: 2942073 - DNA, 25 bp, Homo sapien
gataaaaggtcacaagaccccgctg

SEQ ID NO: 2942074 - DNA, 25 bp, Homo sapien
ggaaggtgacctctgatcgtcctca

SEQ ID NO: 2942075 - DNA, 25 bp, Homo sapien
cgttaaaggctgtccattggcggca

SEQ ID NO: 2942076 - DNA, 25 bp, Homo sapien
cggccacgtggacccgaaggctaag

SEQ ID NO: 2942077 - DNA, 25 bp, Homo sapien
gggtaaaacgcgctttcacacgcaa

SEQ ID NO: 2942078 - DNA, 25 bp, Homo sapien
caggagtcgcggcttccgggtacca

SEQ ID NO: 2942079 - DNA, 25 bp, Homo sapien
tcacagagcgccttcgggtaaaacg

SEQ ID NO: 2942080 - DNA, 25 bp, Homo sapien
ggcccgcgtccaatcagctgccggc

SEQ ID NO: 2942081 - DNA, 25 bp, Homo sapien
tggggcggcccgcgtccaatcagct

SEQ ID NO: 2942082 - DNA, 25 bp, Homo sapien
gcggcccgcgtccaatcagctgccg

SEQ ID NO: 2942083 - DNA, 25 bp, Homo sapien
ctgcgggtcccgcgacggccagggg

SEQ ID NO: 2942084 - DNA, 25 bp, Homo sapien
cgccgcggccaccgccaccgcctcc

SEQ ID NO: 2942085 - DNA, 25 bp, Homo sapien
gccgcggccaccgccaccgcctcca

SEQ ID NO: 2942086 - DNA, 25 bp, Homo sapien
ccgcggccaccgccaccgcctccat

SEQ ID NO: 2942087 - DNA, 25 bp, Homo sapien
cacgcccgtggagccgcgcacccgc

SEQ ID NO: 2942088 - DNA, 25 bp, Homo sapien
gccgccacgcccgtggagccgcgca

SEQ ID NO: 2942089 - DNA, 25 bp, Homo sapien
agccagagcgcgctccaccgacacg

SEQ ID NO: 2942090 - DNA, 25 bp, Homo sapien
caccgacacggagaagtcggccgcg

SEQ ID NO: 2942091 - DNA, 25 bp, Homo sapien
ttgggcgtggcctcggtcagctccc

SEQ ID NO: 2942092 - DNA, 25 bp, Homo sapien
ctgttgggcgtggcctcggtcagct

SEQ ID NO: 2942093 - DNA, 25 bp, Homo sapien
ccccggcacggctggcagtggccgc

SEQ ID NO: 2942094 - DNA, 25 bp, Homo sapien
gtcagctcccccggcacggctggca

SEQ ID NO: 2942095 - DNA, 25 bp, Homo sapien
gctgtgtgaacacatcactccatag

SEQ ID NO: 2942096 - DNA, 25 bp, Homo sapien
gatggaggcgtccttcctcagtccg

SEQ ID NO: 2942097 - DNA, 25 bp, Homo sapien
tcagtccgcaggttcaaagagaagg

SEQ ID NO: 2942098 - DNA, 25 bp, Homo sapien
cactccatagtgtggcaggcgctgg

SEQ ID NO: 2942099 - DNA, 25 bp, Homo sapien
cacggccctggaacaaatcccccat

SEQ ID NO: 2942100 - DNA, 25 bp, Homo sapien
tggagggtccacggccctggaacaa

SEQ ID NO: 2942101 - DNA, 25 bp, Homo sapien
ctggagggtccacggccctggaaca

SEQ ID NO: 2942102 - DNA, 25 bp, Homo sapien
ggcagtgtcatgagcaggggcgcat

SEQ ID NO: 2942103 - DNA, 25 bp, Homo sapien
gtgtcatgagcaggggcgcatccca

SEQ ID NO: 2942104 - DNA, 25 bp, Homo sapien
tgcgggcagtgtcatgagcaggggc

SEQ ID NO: 2942105 - DNA, 25 bp, Homo sapien
cagtgtcatgagcaggggcgcatcc

SEQ ID NO: 2942106 - DNA, 25 bp, Homo sapien
attcagcgccatccagtctatctct

SEQ ID NO: 2942107 - DNA, 25 bp, Homo sapien
ggttgatgccattcagcgccatcca

SEQ ID NO: 2942108 - DNA, 25 bp, Homo sapien
gtcccaccacacgaaagagtagctt

SEQ ID NO: 2942109 - DNA, 25 bp, Homo sapien
gcacacattctggtaatagcggtac

SEQ ID NO: 2942110 - DNA, 25 bp, Homo sapien
cctacggtggctcccgccatagagg

SEQ ID NO: 2942111 - DNA, 25 bp, Homo sapien
cactgtgcacgctgaaagcacttct

SEQ ID NO: 2942112 - DNA, 25 bp, Homo sapien
tgaaaacacctacggtggctcccgc

SEQ ID NO: 2942113 - DNA, 25 bp, Homo sapien
agagagagacactgcgcccatgctg

SEQ ID NO: 2942114 - DNA, 25 bp, Homo sapien
aaagaactcattgatctctgcctgg

SEQ ID NO: 2942115 - DNA, 25 bp, Homo sapien
gaaggcaggaccagtaaagaactca

SEQ ID NO: 2942116 - DNA, 25 bp, Homo sapien
tcattgatctctgcctgggtcaggc

SEQ ID NO: 2942117 - DNA, 25 bp, Homo sapien
gccaggaaggcaggaccagtaaaga

SEQ ID NO: 2942118 - DNA, 25 bp, Homo sapien
agcctcgggaacatgccccgcgaat

SEQ ID NO: 2942119 - DNA, 25 bp, Homo sapien
ctggtgacagcctcgggaacatgcc

SEQ ID NO: 2942120 - DNA, 25 bp, Homo sapien
gcactggggtcatgccgaaggagcg

SEQ ID NO: 2942121 - DNA, 25 bp, Homo sapien
atgccccgcgaatgcaggcagcact

SEQ ID NO: 2942122 - DNA, 25 bp, Homo sapien
taagtcctacgagagtatgggagcc

SEQ ID NO: 2942123 - DNA, 25 bp, Homo sapien
cattagcaggtgcaaaggaggtcat

SEQ ID NO: 2942124 - DNA, 25 bp, Homo sapien
gataattacaaaccctacagcgaag

SEQ ID NO: 2942125 - DNA, 25 bp, Homo sapien
gaggccactggcatgcattaagtcc

SEQ ID NO: 2942126 - DNA, 25 bp, Homo sapien
catcttcgtgacattgacctgaggg

SEQ ID NO: 2942127 - DNA, 25 bp, Homo sapien
tcatggcctcatagacggcagtggt

SEQ ID NO: 2942128 - DNA, 25 bp, Homo sapien
tcattgaaagtgtcggccccataga

SEQ ID NO: 2942129 - DNA, 25 bp, Homo sapien
gccccatagatgtggtctgtgccaa

SEQ ID NO: 2942130 - DNA, 25 bp, Homo sapien
tgagtcataagtcacacggccagga

SEQ ID NO: 2942131 - DNA, 25 bp, Homo sapien
gattcactgagacaacgcatgtgta

SEQ ID NO: 2942132 - DNA, 25 bp, Homo sapien
aaataggagcgcgaggtgtgaccca

SEQ ID NO: 2942133 - DNA, 25 bp, Homo sapien
aagtactgtgtgttatggcgaggca

SEQ ID NO: 2942134 - DNA, 25 bp, Homo sapien
gtctatcccaggtcatggcttccca

SEQ ID NO: 2942135 - DNA, 25 bp, Homo sapien
aaactccaggacagggttcagcagc

SEQ ID NO: 2942136 - DNA, 25 bp, Homo sapien
tggcacatacgcgtccctctgaaaa

SEQ ID NO: 2942137 - DNA, 25 bp, Homo sapien
cagcttgggtgaacatgagagttac

SEQ ID NO: 2942138 - DNA, 25 bp, Homo sapien
tctgctcgtagaaatcggcctcggc

SEQ ID NO: 2942139 - DNA, 25 bp, Homo sapien
tcagccatgagggaatagaccactt

SEQ ID NO: 2942140 - DNA, 25 bp, Homo sapien
gagcagttgtacacactccggagca

SEQ ID NO: 2942141 - DNA, 25 bp, Homo sapien
ggtattcatctgtagggacggccgc

SEQ ID NO: 2942142 - DNA, 25 bp, Homo sapien
aggcctgggttatcctgtgatgtct

SEQ ID NO: 2942143 - DNA, 25 bp, Homo sapien
ctgccctggaattagcggaaaacaa

SEQ ID NO: 2942144 - DNA, 25 bp, Homo sapien
acaaggcccagtggtggcgaatcta

SEQ ID NO: 2942145 - DNA, 25 bp, Homo sapien
aacagtactttaatcccacactttg

SEQ ID NO: 2942146 - DNA, 25 bp, Homo sapien
ggccatgctatagccctgagtcctc

SEQ ID NO: 2942147 - DNA, 25 bp, Homo sapien
aacagaccaaggctccgtcacaaac

SEQ ID NO: 2942148 - DNA, 25 bp, Homo sapien
ctcattttgacagacccaggggact

SEQ ID NO: 2942149 - DNA, 25 bp, Homo sapien
cccagggccatgctatagccctgag

SEQ ID NO: 2942150 - DNA, 25 bp, Homo sapien
tgcaggccaatacctgaggaacagc

SEQ ID NO: 2942151 - DNA, 25 bp, Homo sapien
attgccaagtgcaggccaatacctg

SEQ ID NO: 2942152 - DNA, 25 bp, Homo sapien
tctgggatgggtccaaagccagatg

SEQ ID NO: 2942153 - DNA, 25 bp, Homo sapien
cagatgtattgccaagtgcaggcca

SEQ ID NO: 2942154 - DNA, 25 bp, Homo sapien
gtgttttcaggtccctcaacgtggc

SEQ ID NO: 2942155 - DNA, 25 bp, Homo sapien
agcaggcccaggcctgtgtcacaca

SEQ ID NO: 2942156 - DNA, 25 bp, Homo sapien
agtacagaggccacagcgtcctccc

SEQ ID NO: 2942157 - DNA, 25 bp, Homo sapien
acagaggccacagcgtcctccccca

SEQ ID NO: 2942158 - DNA, 25 bp, Homo sapien
atccagtacagaggccacagcgtcc

SEQ ID NO: 2942159 - DNA, 25 bp, Homo sapien
gtcctgcagcacccgcacagtacct

SEQ ID NO: 2942160 - DNA, 25 bp, Homo sapien
aacccggccgcttcatgtctggcag

SEQ ID NO: 2942161 - DNA, 25 bp, Homo sapien
tcctgcagcacccgcacagtaccta

SEQ ID NO: 2942162 - DNA, 25 bp, Homo sapien
cgaacccggccgcttcatgtctggc

SEQ ID NO: 2942163 - DNA, 25 bp, Homo sapien
gcagaaccgccagactctcgcataa

SEQ ID NO: 2942164 - DNA, 25 bp, Homo sapien
caataaacgtcattgaaaggcagcc

SEQ ID NO: 2942165 - DNA, 25 bp, Homo sapien
cttgctggcgcaataaacgtcattg

SEQ ID NO: 2942166 - DNA, 25 bp, Homo sapien
gcataagccttcgagcgcgaacttg

SEQ ID NO: 2942167 - DNA, 25 bp, Homo sapien
ttgaggagacgggggtgttgactca

SEQ ID NO: 2942168 - DNA, 25 bp, Homo sapien
tgaggagacgggggtgttgactcac

SEQ ID NO: 2942169 - DNA, 25 bp, Homo sapien
gttgaggagacgggggtgttgactc

SEQ ID NO: 2942170 - DNA, 25 bp, Homo sapien
gcgggttattgctcgacagccctcc

SEQ ID NO: 2942171 - DNA, 25 bp, Homo sapien
ttgaatagcgggttattgctcgaca

SEQ ID NO: 2942172 - DNA, 25 bp, Homo sapien
gttattgctcgacagccctcccaaa

SEQ ID NO: 2942173 - DNA, 25 bp, Homo sapien
aatagcgggttattgctcgacagcc

SEQ ID NO: 2942174 - DNA, 25 bp, Homo sapien
cgagagccgcaagtgggcagggacg

SEQ ID NO: 2942175 - DNA, 25 bp, Homo sapien
acggaggcgacccaggcgccaagtc

SEQ ID NO: 2942176 - DNA, 25 bp, Homo sapien
tgggcagggacggaggcgacccagg

SEQ ID NO: 2942177 - DNA, 25 bp, Homo sapien
agagccgcaagtgggcagggacgga

SEQ ID NO: 2942178 - DNA, 25 bp, Homo sapien
gtcgggaccgcccaacaccttctgc

SEQ ID NO: 2942179 - DNA, 25 bp, Homo sapien
accgcccaacaccttctgcatgaag

SEQ ID NO: 2942180 - DNA, 25 bp, Homo sapien
cgggaccgcccaacaccttctgcat

SEQ ID NO: 2942181 - DNA, 25 bp, Homo sapien
ggaccgcccaacaccttctgcatga

SEQ ID NO: 2942182 - DNA, 25 bp, Homo sapien
ggtccgggtgttcgtgcggtccatc

SEQ ID NO: 2942183 - DNA, 25 bp, Homo sapien
attagtgcaagaggcggaaggtccg

SEQ ID NO: 2942184 - DNA, 25 bp, Homo sapien
tccgggtgttcgtgcggtccatcac

SEQ ID NO: 2942185 - DNA, 25 bp, Homo sapien
tgcaagaggcggaaggtccgggtgt

SEQ ID NO: 2942186 - DNA, 25 bp, Homo sapien
gctgcgcctcctcgcggtagatctc

SEQ ID NO: 2942187 - DNA, 25 bp, Homo sapien
tgcgcctcctcgcggtagatctcct

SEQ ID NO: 2942188 - DNA, 25 bp, Homo sapien
gcgcctcctcgcggtagatctcctt

SEQ ID NO: 2942189 - DNA, 25 bp, Homo sapien
cgcctcctcgcggtagatctccttg

SEQ ID NO: 2942190 - DNA, 25 bp, Homo sapien
aaggggtcgtccaggcgcatcagca

SEQ ID NO: 2942191 - DNA, 25 bp, Homo sapien
aagcgcctggttgtgaagtagcgca

SEQ ID NO: 2942192 - DNA, 25 bp, Homo sapien
atggcggcggcgtagtcgaagccaa

SEQ ID NO: 2942193 - DNA, 25 bp, Homo sapien
aggaagcgcctggttgtgaagtagc

SEQ ID NO: 2942194 - DNA, 25 bp, Homo sapien
cattctaataacagtccttgctggg

SEQ ID NO: 2942195 - DNA, 25 bp, Homo sapien
aatcctagctacacttgaacccggg

SEQ ID NO: 2942196 - DNA, 25 bp, Homo sapien
tggtgaactgagaccgcgctattgc

SEQ ID NO: 2942197 - DNA, 25 bp, Homo sapien
catggctaatggagtgcaggtcaca

SEQ ID NO: 2942198 - DNA, 25 bp, Homo sapien
tgtagcaaagtagccagtcctgtag

SEQ ID NO: 2942199 - DNA, 25 bp, Homo sapien
attgtagcaaagtagccagtcctgt

SEQ ID NO: 2942200 - DNA, 25 bp, Homo sapien
gcaaagtagccagtcctgtagcccc

SEQ ID NO: 2942201 - DNA, 25 bp, Homo sapien
tagcaaagtagccagtcctgtagcc

SEQ ID NO: 2942202 - DNA, 25 bp, Homo sapien
cacaggagcgattatagtgaccgca

SEQ ID NO: 2942203 - DNA, 25 bp, Homo sapien
gattcccctgggtatgcctctgtgc

SEQ ID NO: 2942204 - DNA, 25 bp, Homo sapien
ggtgcctcaggcctcaaaaaacagc

SEQ ID NO: 2942205 - DNA, 25 bp, Homo sapien
tcaaggataagccttcctgcgggtc

SEQ ID NO: 2942206 - DNA, 25 bp, Homo sapien
agtgcaggccgatgcccgaggaaca

SEQ ID NO: 2942207 - DNA, 25 bp, Homo sapien
aagccagacgtacggccaagtgcag

SEQ ID NO: 2942208 - DNA, 25 bp, Homo sapien
tgatgagcaccacggtgcgggccat

SEQ ID NO: 2942209 - DNA, 25 bp, Homo sapien
ggatggatctgaagccagacgtacg

SEQ ID NO: 2942210 - DNA, 25 bp, Homo sapien
gaggaggaagatctgacttcccttc

SEQ ID NO: 2942211 - DNA, 25 bp, Homo sapien
cagcggccacggattttgagtccct

SEQ ID NO: 2942212 - DNA, 25 bp, Homo sapien
gggcagcggccacggattttgagtc

SEQ ID NO: 2942213 - DNA, 25 bp, Homo sapien
agtcccttacgtccagctgcaacgt

SEQ ID NO: 2942214 - DNA, 25 bp, Homo sapien
gattttgagtcccttacgtccagct

SEQ ID NO: 2942215 - DNA, 25 bp, Homo sapien
taggagcccatatgcttccaggagg

SEQ ID NO: 2942216 - DNA, 25 bp, Homo sapien
catgttggtttcaacgcagggcgga

SEQ ID NO: 2942217 - DNA, 25 bp, Homo sapien
gcggagaaggctcctaggagcccat

SEQ ID NO: 2942218 - DNA, 25 bp, Homo sapien
ctgcggagacaagaggcccgaccag

SEQ ID NO: 2942219 - DNA, 25 bp, Homo sapien
attcacgtccagcacagaggccacg

SEQ ID NO: 2942220 - DNA, 25 bp, Homo sapien
cccagcgcctccagcggccccagca

SEQ ID NO: 2942221 - DNA, 25 bp, Homo sapien
gcgtcctcccccagcgcctccagcg

SEQ ID NO: 2942222 - DNA, 25 bp, Homo sapien
gcacagaggccacggcgtcctcccc

SEQ ID NO: 2942223 - DNA, 25 bp, Homo sapien
aaccgcgcctcttcatgtctggcag

SEQ ID NO: 2942224 - DNA, 25 bp, Homo sapien
cccgaaccgcgcctcttcatgtctg

SEQ ID NO: 2942225 - DNA, 25 bp, Homo sapien
aacacgcgtcccgaaccgcgcctct

SEQ ID NO: 2942226 - DNA, 25 bp, Homo sapien
ggcctgcagcatccgcacagtccct

SEQ ID NO: 2942227 - DNA, 25 bp, Homo sapien
tggagctgccgaggccactccctac

SEQ ID NO: 2942228 - DNA, 25 bp, Homo sapien
gagacgaggttcctgaggcgcagcg

SEQ ID NO: 2942229 - DNA, 25 bp, Homo sapien
cgcggaacctgccttcaaggctcag

SEQ ID NO: 2942230 - DNA, 25 bp, Homo sapien
cagctccgcacacaaagaatctgga

SEQ ID NO: 2942231 - DNA, 25 bp, Homo sapien
gcagaaccgccagactctcgcataa

SEQ ID NO: 2942232 - DNA, 25 bp, Homo sapien
caataaacgtcattgaaaggcagcc

SEQ ID NO: 2942233 - DNA, 25 bp, Homo sapien
cttgctggcgcaataaacgtcattg

SEQ ID NO: 2942234 - DNA, 25 bp, Homo sapien
gcataagccttcgagcgcgaacttg

SEQ ID NO: 2942235 - DNA, 25 bp, Homo sapien
cacagctaatgtgagccgggcagag

SEQ ID NO: 2942236 - DNA, 25 bp, Homo sapien
caataccaacacttcagcagctagg

SEQ ID NO: 2942237 - DNA, 25 bp, Homo sapien
cagaacatttgaaacgcgggttcct

SEQ ID NO: 2942238 - DNA, 25 bp, Homo sapien
tctgaggctacaagggagccctggt

SEQ ID NO: 2942239 - DNA, 25 bp, Homo sapien
tccatgaaggcggtgtgcactgggc

SEQ ID NO: 2942240 - DNA, 25 bp, Homo sapien
cgaggtattggtagaagcggtggaa

SEQ ID NO: 2942241 - DNA, 25 bp, Homo sapien
tcgcgaaagacttgcttgctgtggg

SEQ ID NO: 2942242 - DNA, 25 bp, Homo sapien
tgtggatgtccgtgcggtccagcac

SEQ ID NO: 2942243 - DNA, 25 bp, Homo sapien
cgccacctcctcagggttctgcgcc

SEQ ID NO: 2942244 - DNA, 25 bp, Homo sapien
ccacctcctcagggttctgcgccgc

SEQ ID NO: 2942245 - DNA, 25 bp, Homo sapien
tccgccacctcctcagggttctgcg

SEQ ID NO: 2942246 - DNA, 25 bp, Homo sapien
ctccgccacctcctcagggttctgc

SEQ ID NO: 2942247 - DNA, 25 bp, Homo sapien
tcctggagtccagcccggcgctcac

SEQ ID NO: 2942248 - DNA, 25 bp, Homo sapien
tgtggccaccgctgcgcgccggagg

SEQ ID NO: 2942249 - DNA, 25 bp, Homo sapien
ggccaccgctgcgcgccggaggacg

SEQ ID NO: 2942250 - DNA, 25 bp, Homo sapien
gtggccaccgctgcgcgccggagga

SEQ ID NO: 2942251 - DNA, 25 bp, Homo sapien
caccgctgcgcgccggaggacgcac

SEQ ID NO: 2942252 - DNA, 25 bp, Homo sapien
gtgaagtagcgcagggtcggcttcg

SEQ ID NO: 2942253 - DNA, 25 bp, Homo sapien
tgaagtagcgcagggtcggcttcgg

SEQ ID NO: 2942254 - DNA, 25 bp, Homo sapien
cggccggaggatcgccgagctcagg

SEQ ID NO: 2942255 - DNA, 25 bp, Homo sapien
gcggccggaggatcgccgagctcag

SEQ ID NO: 2942256 - DNA, 25 bp, Homo sapien
cggggcggccggaggatcgccgagc

SEQ ID NO: 2942257 - DNA, 25 bp, Homo sapien
gggcggccggaggatcgccgagctc

SEQ ID NO: 2942258 - DNA, 25 bp, Homo sapien
aacgcgatctatcttaattagccac

SEQ ID NO: 2942259 - DNA, 25 bp, Homo sapien
tggtaaaactggctaacgcgatcta

SEQ ID NO: 2942260 - DNA, 25 bp, Homo sapien
tctatcttaattagccacccacagc

SEQ ID NO: 2942261 - DNA, 25 bp, Homo sapien
gccatcgcgcctagctgcgctggta

SEQ ID NO: 2942262 - DNA, 25 bp, Homo sapien
gcagagaagaccctcatccgaggta

SEQ ID NO: 2942263 - DNA, 25 bp, Homo sapien
gacacattaagttcattgcatcagg

SEQ ID NO: 2942264 - DNA, 25 bp, Homo sapien
gaaaaatggagttgtcatacagtaa

SEQ ID NO: 2942265 - DNA, 25 bp, Homo sapien
gtttagacacattaagttcattgca

SEQ ID NO: 2942266 - DNA, 25 bp, Homo sapien
agatcctctgatgcgcttgtttgcg

SEQ ID NO: 2942267 - DNA, 25 bp, Homo sapien
ctggctgctgtaggaggctctcgca

SEQ ID NO: 2942268 - DNA, 25 bp, Homo sapien
cacccagatcctctgatgcgcttgt

SEQ ID NO: 2942269 - DNA, 25 bp, Homo sapien
tgctgtaggaggctctcgcaccacc

SEQ ID NO: 2942270 - DNA, 25 bp, Homo sapien
gcttcagcgcgggattctcgcgaga

SEQ ID NO: 2942271 - DNA, 25 bp, Homo sapien
cggaggaaggtcaaacgtctcgact

SEQ ID NO: 2942272 - DNA, 25 bp, Homo sapien
ctctgggagtgggtgaagccttgat

SEQ ID NO: 2942273 - DNA, 25 bp, Homo sapien
tcgcgagatttccagtggcatgggc

SEQ ID NO: 2942274 - DNA, 25 bp, Homo sapien
cttccctggctgcaacccggaagca

SEQ ID NO: 2942275 - DNA, 25 bp, Homo sapien
tccctggctgcaacccggaagcact

SEQ ID NO: 2942276 - DNA, 25 bp, Homo sapien
ctggctgcaacccggaagcactaac

SEQ ID NO: 2942277 - DNA, 25 bp, Homo sapien
cctggctgcaacccggaagcactaa

SEQ ID NO: 2942278 - DNA, 25 bp, Homo sapien
gggacgctaaagctcacgtcggccc

SEQ ID NO: 2942279 - DNA, 25 bp, Homo sapien
cagggtcttcaaggaatcgaagagg

SEQ ID NO: 2942280 - DNA, 25 bp, Homo sapien
gctaaagggggacgctaaagctcac

SEQ ID NO: 2942281 - DNA, 25 bp, Homo sapien
tcaaggaatcgaagagggaggctaa

SEQ ID NO: 2942282 - DNA, 25 bp, Homo sapien
gacaggaacccttgtcacagggctg

SEQ ID NO: 2942283 - DNA, 25 bp, Homo sapien
ctggacaggaacccttgtcacaggg

SEQ ID NO: 2942284 - DNA, 25 bp, Homo sapien
caggaacccttgtcacagggctggg

SEQ ID NO: 2942285 - DNA, 25 bp, Homo sapien
tggacaggaacccttgtcacagggc

SEQ ID NO: 2942286 - DNA, 25 bp, Homo sapien
gggctgtgctctaagccttggtgtc

SEQ ID NO: 2942287 - DNA, 25 bp, Homo sapien
gctgtgctctaagccttggtgtcct

SEQ ID NO: 2942288 - DNA, 25 bp, Homo sapien
tgaactgagtcgaaatcctgggagg

SEQ ID NO: 2942289 - DNA, 25 bp, Homo sapien
tgacttcgctgaactgagtcgaaat

SEQ ID NO: 2942290 - DNA, 25 bp, Homo sapien
gcagggacggggtttcagtgctgac

SEQ ID NO: 2942291 - DNA, 25 bp, Homo sapien
acgaggcgacggtgactgaagggcc

SEQ ID NO: 2942292 - DNA, 25 bp, Homo sapien
actgaagggcctgcggccgaggcag

SEQ ID NO: 2942293 - DNA, 25 bp, Homo sapien
ctgcggacagtcagggagacgaggc

SEQ ID NO: 2942294 - DNA, 25 bp, Homo sapien
ggtcagtaggattctgacgtccaag

SEQ ID NO: 2942295 - DNA, 25 bp, Homo sapien
tcaagaacctcaaacgtggcctgca

SEQ ID NO: 2942296 - DNA, 25 bp, Homo sapien
cgccagcatagaggtgcgtgatgaa

SEQ ID NO: 2942297 - DNA, 25 bp, Homo sapien
tccaagtgcctgtggacgtcggcgc

SEQ ID NO: 2942298 - DNA, 25 bp, Homo sapien
tgggcaggggagggagaaaggtgct

SEQ ID NO: 2942299 - DNA, 25 bp, Homo sapien
aggggagggagaaaggtgctcttgg

SEQ ID NO: 2942300 - DNA, 25 bp, Homo sapien
gcaggggagggagaaaggtgctctt

SEQ ID NO: 2942301 - DNA, 25 bp, Homo sapien
ggcaggggagggagaaaggtgctct

SEQ ID NO: 2942302 - DNA, 25 bp, Homo sapien
tgtaacagctggtggcgtaacgcac

SEQ ID NO: 2942303 - DNA, 25 bp, Homo sapien
tcaacacgacttctggcgggtgggc

SEQ ID NO: 2942304 - DNA, 25 bp, Homo sapien
ccataatcggagtatagcagcaccg

SEQ ID NO: 2942305 - DNA, 25 bp, Homo sapien
gaccgggttgtactggcttccatcc

SEQ ID NO: 2942306 - DNA, 25 bp, Homo sapien
gtgtccctaagtacagtatccccag

SEQ ID NO: 2942307 - DNA, 25 bp, Homo sapien
ggtgactggaccacatgctgagaaa

SEQ ID NO: 2942308 - DNA, 25 bp, Homo sapien
gcatgtgtccagagaataagccacc

SEQ ID NO: 2942309 - DNA, 25 bp, Homo sapien
tccagagaacgagcagtgccagagg

SEQ ID NO: 2942310 - DNA, 25 bp, Homo sapien
gttggagcagctcagggagcaactt

SEQ ID NO: 2942311 - DNA, 25 bp, Homo sapien
ctgtataaggttggagcagctcagg

SEQ ID NO: 2942312 - DNA, 25 bp, Homo sapien
tggagcagctcagggagcaacttgc

SEQ ID NO: 2942313 - DNA, 25 bp, Homo sapien
aggttggagcagctcagggagcaac

SEQ ID NO: 2942314 - DNA, 25 bp, Homo sapien
ccagcgggcccataggggtccagca

SEQ ID NO: 2942315 - DNA, 25 bp, Homo sapien
tccagcagggggatgacatcaaaag

SEQ ID NO: 2942316 - DNA, 25 bp, Homo sapien
tcaaaagtcaaggagggcttgatgt

SEQ ID NO: 2942317 - DNA, 25 bp, Homo sapien
gaattcactcagatgttccacacgt

SEQ ID NO: 2942318 - DNA, 25 bp, Homo sapien
ccccccacgataggtctcctcgctg

SEQ ID NO: 2942319 - DNA, 25 bp, Homo sapien
cccccacgataggtctcctcgctga

SEQ ID NO: 2942320 - DNA, 25 bp, Homo sapien
ccccacgataggtctcctcgctgac

SEQ ID NO: 2942321 - DNA, 25 bp, Homo sapien
attctcaaggcggaagcggttgatg

SEQ ID NO: 2942322 - DNA, 25 bp, Homo sapien
tctcaaggcggaagcggttgatggc

SEQ ID NO: 2942323 - DNA, 25 bp, Homo sapien
tcaaggcggaagcggttgatggcca

SEQ ID NO: 2942324 - DNA, 25 bp, Homo sapien
ctcaaggcggaagcggttgatggcc

SEQ ID NO: 2942325 - DNA, 25 bp, Homo sapien
tcctccgactcagcgggcaaactga

SEQ ID NO: 2942326 - DNA, 25 bp, Homo sapien
ctctggggccatggtacttccaaca

SEQ ID NO: 2942327 - DNA, 25 bp, Homo sapien
gactcagcgggcaaactgagaacca

SEQ ID NO: 2942328 - DNA, 25 bp, Homo sapien
ctcctcctccgactcagcgggcaaa

SEQ ID NO: 2942329 - DNA, 25 bp, Homo sapien
gagtgagaggaagaccctgacatcc

SEQ ID NO: 2942330 - DNA, 25 bp, Homo sapien
gtgagaggaagaccctgacatccaa

SEQ ID NO: 2942331 - DNA, 25 bp, Homo sapien
ggagggagtgagaggaagaccctga

SEQ ID NO: 2942332 - DNA, 25 bp, Homo sapien
gaaggagggagtgagaggaagaccc

SEQ ID NO: 2942333 - DNA, 25 bp, Homo sapien
ctggatctggtacaaagcaagttcc

SEQ ID NO: 2942334 - DNA, 25 bp, Homo sapien
cttcagcagctggatctggtacaaa

SEQ ID NO: 2942335 - DNA, 25 bp, Homo sapien
cagctggatctggtacaaagcaagt

SEQ ID NO: 2942336 - DNA, 25 bp, Homo sapien
cagcagctggatctggtacaaagca

SEQ ID NO: 2942337 - DNA, 25 bp, Homo sapien
atatggaggccgaagcaggttcccc

SEQ ID NO: 2942338 - DNA, 25 bp, Homo sapien
gaggccgaagcaggttccccaacat

SEQ ID NO: 2942339 - DNA, 25 bp, Homo sapien
tatggaggccgaagcaggttcccca

SEQ ID NO: 2942340 - DNA, 25 bp, Homo sapien
tggaggccgaagcaggttccccaac

SEQ ID NO: 2942341 - DNA, 25 bp, Homo sapien
cagcattgccaggacaccaagcagg

SEQ ID NO: 2942342 - DNA, 25 bp, Homo sapien
agcattgccaggacaccaagcagga

SEQ ID NO: 2942343 - DNA, 25 bp, Homo sapien
ccagcattgccaggacaccaagcag

SEQ ID NO: 2942344 - DNA, 25 bp, Homo sapien
gctgagctattgagctcttcccaga

SEQ ID NO: 2942345 - DNA, 25 bp, Homo sapien
gcccaattacatagagacatgtggg

SEQ ID NO: 2942346 - DNA, 25 bp, Homo sapien
agagccactgatgccagtcagccca

SEQ ID NO: 2942347 - DNA, 25 bp, Homo sapien
cacctggggcataggcccgatgacc

SEQ ID NO: 2942348 - DNA, 25 bp, Homo sapien
acaactgagcacagaggcctggcta

SEQ ID NO: 2942349 - DNA, 25 bp, Homo sapien
ggacaacacagacagacaactgagc

SEQ ID NO: 2942350 - DNA, 25 bp, Homo sapien
cctggctagctcctcactccaggcc

SEQ ID NO: 2942351 - DNA, 25 bp, Homo sapien
caggccactttcagccttccccagt

SEQ ID NO: 2942352 - DNA, 25 bp, Homo sapien
tgcctaggaccttcctgttgatgat

SEQ ID NO: 2942353 - DNA, 25 bp, Homo sapien
acacccggctgcctaggaccttcct

SEQ ID NO: 2942354 - DNA, 25 bp, Homo sapien
taggaccttcctgttgatgatgcca

SEQ ID NO: 2942355 - DNA, 25 bp, Homo sapien
ccggctgcctaggaccttcctgttg

SEQ ID NO: 2942356 - DNA, 25 bp, Homo sapien
ctggggaggggaacagagggcagag

SEQ ID NO: 2942357 - DNA, 25 bp, Homo sapien
gaacagagggcagaggttaccttct

SEQ ID NO: 2942358 - DNA, 25 bp, Homo sapien
ggaacagagggcagaggttaccttc

SEQ ID NO: 2942359 - DNA, 25 bp, Homo sapien
gaggggaacagagggcagaggttac

SEQ ID NO: 2942360 - DNA, 25 bp, Homo sapien
tcgggccagctttgcgataattggc

SEQ ID NO: 2942361 - DNA, 25 bp, Homo sapien
cctctcgggccagctttgcgataat

SEQ ID NO: 2942362 - DNA, 25 bp, Homo sapien
gataattggccacataatgtccgtg

SEQ ID NO: 2942363 - DNA, 25 bp, Homo sapien
aatgtccgtgagtatcttcagctgc

SEQ ID NO: 2942364 - DNA, 25 bp, Homo sapien
cttcaagcaacacagcggcatcaat

SEQ ID NO: 2942365 - DNA, 25 bp, Homo sapien
tcaagcaacacagcggcatcaatca

SEQ ID NO: 2942366 - DNA, 25 bp, Homo sapien
gcttcaagcaacacagcggcatcaa

SEQ ID NO: 2942367 - DNA, 25 bp, Homo sapien
ttcaagcaacacagcggcatcaatc

SEQ ID NO: 2942368 - DNA, 25 bp, Homo sapien
cagtctctgggatgacagcagtcca

SEQ ID NO: 2942369 - DNA, 25 bp, Homo sapien
tctctgggatgacagcagtccacac

SEQ ID NO: 2942370 - DNA, 25 bp, Homo sapien
ctcagtctctgggatgacagcagtc

SEQ ID NO: 2942371 - DNA, 25 bp, Homo sapien
gtctctgggatgacagcagtccaca

SEQ ID NO: 2942372 - DNA, 25 bp, Homo sapien
ggatctgcagtagggatggtgtggg

SEQ ID NO: 2942373 - DNA, 25 bp, Homo sapien
acaggataggatctgcagtagggat

SEQ ID NO: 2942374 - DNA, 25 bp, Homo sapien
ctgagcacagacgagacatttgtca

SEQ ID NO: 2942375 - DNA, 25 bp, Homo sapien
agcacagacgagacatttgtcagga

SEQ ID NO: 2942376 - DNA, 25 bp, Homo sapien
tttgagccgcggcttcactgaggcc

SEQ ID NO: 2942377 - DNA, 25 bp, Homo sapien
tctgcagccggctttgagccgcggc

SEQ ID NO: 2942378 - DNA, 25 bp, Homo sapien
gctctgttccacaagctgctgcccg

SEQ ID NO: 2942379 - DNA, 25 bp, Homo sapien
atatgcggctcccacaaggtgctga

SEQ ID NO: 2942380 - DNA, 25 bp, Homo sapien
gcagggtcaggcagtacccactgga

SEQ ID NO: 2942381 - DNA, 25 bp, Homo sapien
tcaggcagtacccactggagactcc

SEQ ID NO: 2942382 - DNA, 25 bp, Homo sapien
ggtcaggcagtacccactggagact

SEQ ID NO: 2942383 - DNA, 25 bp, Homo sapien
ggcagtacccactggagactccttc

SEQ ID NO: 2942384 - DNA, 25 bp, Homo sapien
tgcaagagggcccaggctttctcca

SEQ ID NO: 2942385 - DNA, 25 bp, Homo sapien
ctgcaagagggcccaggctttctcc

SEQ ID NO: 2942386 - DNA, 25 bp, Homo sapien
gcaagagggcccaggctttctccac

SEQ ID NO: 2942387 - DNA, 25 bp, Homo sapien
tcagtcgagggcctgatgagtcttg

SEQ ID NO: 2942388 - DNA, 25 bp, Homo sapien
cagtcgagggcctgatgagtcttgg

SEQ ID NO: 2942389 - DNA, 25 bp, Homo sapien
ctgaaccagggtgagcatcaaggcc

SEQ ID NO: 2942390 - DNA, 25 bp, Homo sapien
tatagcttggacctctgggcctgaa

SEQ ID NO: 2942391 - DNA, 25 bp, Homo sapien
catgtcctgcacagtatagcttgga

SEQ ID NO: 2942392 - DNA, 25 bp, Homo sapien
ccagtctggccccactgagaacttt

SEQ ID NO: 2942393 - DNA, 25 bp, Homo sapien
ggttccagtatttgcgctggcccta

SEQ ID NO: 2942394 - DNA, 25 bp, Homo sapien
taccagcgtgttgggtaggcttcct

SEQ ID NO: 2942395 - DNA, 25 bp, Homo sapien
tgtgggtaagagtcacccatgggca

SEQ ID NO: 2942396 - DNA, 25 bp, Homo sapien
cgctggccctagtcagctgtgggta

SEQ ID NO: 2942397 - DNA, 25 bp, Homo sapien
aacattcacctttaattctgttaca

SEQ ID NO: 2942398 - DNA, 25 bp, Homo sapien
cttgacccaagggtcctcgggagag

SEQ ID NO: 2942399 - DNA, 25 bp, Homo sapien
tgacccaagggtcctcgggagaggc

SEQ ID NO: 2942400 - DNA, 25 bp, Homo sapien
caagggtcctcgggagaggcgcccg

SEQ ID NO: 2942401 - DNA, 25 bp, Homo sapien
ggcccccctacgtgcacgagcccga

SEQ ID NO: 2942402 - DNA, 25 bp, Homo sapien
cccctacgtgcacgagcccgacccg

SEQ ID NO: 2942403 - DNA, 25 bp, Homo sapien
cggcccccctacgtgcacgagcccg

SEQ ID NO: 2942404 - DNA, 25 bp, Homo sapien
ctacgtgcacgagcccgacccgccc

SEQ ID NO: 2942405 - DNA, 25 bp, Homo sapien
cttggcacacgcggggtgagagctg

SEQ ID NO: 2942406 - DNA, 25 bp, Homo sapien
cacacgcggggtgagagctgtcttc

SEQ ID NO: 2942407 - DNA, 25 bp, Homo sapien
tggcacacgcggggtgagagctgtc

SEQ ID NO: 2942408 - DNA, 25 bp, Homo sapien
agccccggggcacggagagcgtggg

SEQ ID NO: 2942409 - DNA, 25 bp, Homo sapien
tgcggcacagagcacgggaagggcc

SEQ ID NO: 2942410 - DNA, 25 bp, Homo sapien
cacagagcacgggaagggcccgtca

SEQ ID NO: 2942411 - DNA, 25 bp, Homo sapien
ctgcggcacagagcacgggaagggc

SEQ ID NO: 2942412 - DNA, 25 bp, Homo sapien
gcacgggaagggcccgtcagacctc

SEQ ID NO: 2942413 - DNA, 25 bp, Homo sapien
tgttgtcgctgtaggcatactccac

SEQ ID NO: 2942414 - DNA, 25 bp, Homo sapien
gtccaggctgttgtcgctgtaggca

SEQ ID NO: 2942415 - DNA, 25 bp, Homo sapien
ggctgttgtcgctgtaggcatactc

SEQ ID NO: 2942416 - DNA, 25 bp, Homo sapien
ccaggctgttgtcgctgtaggcata

SEQ ID NO: 2942417 - DNA, 25 bp, Homo sapien
ctgctgtctcaagccaggaactctg

SEQ ID NO: 2942418 - DNA, 25 bp, Homo sapien
tgctcaggcgtggttggcaacgcca

SEQ ID NO: 2942419 - DNA, 25 bp, Homo sapien
ggtgtcaccctcagttgttttctgc

SEQ ID NO: 2942420 - DNA, 25 bp, Homo sapien
gtgtccctctagagcttaagatggg

SEQ ID NO: 2942421 - DNA, 25 bp, Homo sapien
tgtctacactgctccataggcctgc

SEQ ID NO: 2942422 - DNA, 25 bp, Homo sapien
cctggctcacaaacgggcatgtgga

SEQ ID NO: 2942423 - DNA, 25 bp, Homo sapien
ttcaacccaaagccaaccatactgg

SEQ ID NO: 2942424 - DNA, 25 bp, Homo sapien
atggctttcttaaatgctgacctct

SEQ ID NO: 2942425 - DNA, 25 bp, Homo sapien
tggacactacactccccttgcgggt

SEQ ID NO: 2942426 - DNA, 25 bp, Homo sapien
ctctggacactacactccccttgcg

SEQ ID NO: 2942427 - DNA, 25 bp, Homo sapien
tccccttgcgggtgctttctacaaa

SEQ ID NO: 2942428 - DNA, 25 bp, Homo sapien
ggacactacactccccttgcgggtg

SEQ ID NO: 2942429 - DNA, 25 bp, Homo sapien
ctttggctccagcacccctgtgtgg

SEQ ID NO: 2942430 - DNA, 25 bp, Homo sapien
ttccagatgaggtgaaagatggtga

SEQ ID NO: 2942431 - DNA, 25 bp, Homo sapien
tgagaccttgtgtctgatactttgg

SEQ ID NO: 2942432 - DNA, 25 bp, Homo sapien
ggacagaaccacctaatgttccaga

SEQ ID NO: 2942433 - DNA, 25 bp, Homo sapien
ctacgctcagagatgggggcaggga

SEQ ID NO: 2942434 - DNA, 25 bp, Homo sapien
tacgctcagagatgggggcagggaa

SEQ ID NO: 2942435 - DNA, 25 bp, Homo sapien
ctcagagatgggggcagggaaaggt

SEQ ID NO: 2942436 - DNA, 25 bp, Homo sapien
agagatgggggcagggaaaggtcat

SEQ ID NO: 2942437 - DNA, 25 bp, Homo sapien
taggactccttgtaggcctcctggt

SEQ ID NO: 2942438 - DNA, 25 bp, Homo sapien
gcgccgccgccggtctttgtaggac

SEQ ID NO: 2942439 - DNA, 25 bp, Homo sapien
gccggtctttgtaggactccttgta

SEQ ID NO: 2942440 - DNA, 25 bp, Homo sapien
tctttgtaggactccttgtaggcct

SEQ ID NO: 2942441 - DNA, 25 bp, Homo sapien
tggaaacagcaggggaaatgggttc

SEQ ID NO: 2942442 - DNA, 25 bp, Homo sapien
tgtggaaacagcaggggaaatgggt

SEQ ID NO: 2942443 - DNA, 25 bp, Homo sapien
ctgtggaaacagcaggggaaatggg

SEQ ID NO: 2942444 - DNA, 25 bp, Homo sapien
tgggagccaatggagaagtcctgct

SEQ ID NO: 2942445 - DNA, 25 bp, Homo sapien
ccagaccccaactatcccatggcaa

SEQ ID NO: 2942446 - DNA, 25 bp, Homo sapien
cacaccaaggccgagccatgggtgg

SEQ ID NO: 2942447 - DNA, 25 bp, Homo sapien
atggcaatcaccacaccaaggccga

SEQ ID NO: 2942448 - DNA, 25 bp, Homo sapien
ctcttcacagccccgcttggctcca

SEQ ID NO: 2942449 - DNA, 25 bp, Homo sapien
tcaaccaagaagataaggctgactt

SEQ ID NO: 2942450 - DNA, 25 bp, Homo sapien
agaagataaggctgactttgttccc

SEQ ID NO: 2942451 - DNA, 25 bp, Homo sapien
ccaagaagataaggctgactttgtt

SEQ ID NO: 2942452 - DNA, 25 bp, Homo sapien
aaccaagaagataaggctgactttg

SEQ ID NO: 2942453 - DNA, 25 bp, Homo sapien
gcaagaaaaaaaggacaggtacaga

SEQ ID NO: 2942454 - DNA, 25 bp, Homo sapien
ggcggtgacatccttgcgtaacgtg

SEQ ID NO: 2942455 - DNA, 25 bp, Homo sapien
tccttgcgtaacgtggacacctcct

SEQ ID NO: 2942456 - DNA, 25 bp, Homo sapien
atctttagggcggtgacatccttgc

SEQ ID NO: 2942457 - DNA, 25 bp, Homo sapien
gacatccttgcgtaacgtggacacc

SEQ ID NO: 2942458 - DNA, 25 bp, Homo sapien
tgtacagcagtaactgatgtggcct

SEQ ID NO: 2942459 - DNA, 25 bp, Homo sapien
aatgaagttgcctcagaagttctgg

SEQ ID NO: 2942460 - DNA, 25 bp, Homo sapien
tcagggagatactgcttccaggtca

SEQ ID NO: 2942461 - DNA, 25 bp, Homo sapien
tctgccatgtgtaaggacagttggg

SEQ ID NO: 2942462 - DNA, 25 bp, Homo sapien
ctggaacagggaatccatgatgcct

SEQ ID NO: 2942463 - DNA, 25 bp, Homo sapien
tggaacagggaatccatgatgcctt

SEQ ID NO: 2942464 - DNA, 25 bp, Homo sapien
actggaacagggaatccatgatgcc

SEQ ID NO: 2942465 - DNA, 25 bp, Homo sapien
gcagctgccacgcttttctcaacag

SEQ ID NO: 2942466 - DNA, 25 bp, Homo sapien
ttctcaacagctgatggcttgggcc

SEQ ID NO: 2942467 - DNA, 25 bp, Homo sapien
agaccctgtgcctattgttgcccca

SEQ ID NO: 2942468 - DNA, 25 bp, Homo sapien
gcttgatggtagagaaaaccgcaga

SEQ ID NO: 2942469 - DNA, 25 bp, Homo sapien
acgccaatcacaatctcccgcaggg

SEQ ID NO: 2942470 - DNA, 25 bp, Homo sapien
gtgcaggacgccaatcacaatctcc

SEQ ID NO: 2942471 - DNA, 25 bp, Homo sapien
aggacgccaatcacaatctcccgca

SEQ ID NO: 2942472 - DNA, 25 bp, Homo sapien
caattggtgcaggacgccaatcaca

SEQ ID NO: 2942473 - DNA, 25 bp, Homo sapien
aggtgttgtagtccagtctcccggg

SEQ ID NO: 2942474 - DNA, 25 bp, Homo sapien
tataaaacgagcatttggagggccc

SEQ ID NO: 2942475 - DNA, 25 bp, Homo sapien
ccgcggctccgctgaagataaaatg

SEQ ID NO: 2942476 - DNA, 25 bp, Homo sapien
tcagtggccacgtagagattcaagg

SEQ ID NO: 2942477 - DNA, 25 bp, Homo sapien
gaagattacaacgtcacactcccag

SEQ ID NO: 2942478 - DNA, 25 bp, Homo sapien
gataccccaagagcaagaagcagtt

SEQ ID NO: 2942479 - DNA, 25 bp, Homo sapien
gacaagcataaaccagagcactggg

SEQ ID NO: 2942480 - DNA, 25 bp, Homo sapien
gatgcaatacttgaaggatacccca

SEQ ID NO: 2942481 - DNA, 25 bp, Homo sapien
cacgccacttgtagatggaggagga

SEQ ID NO: 2942482 - DNA, 25 bp, Homo sapien
taaagaaggaatgcgctggctacag

SEQ ID NO: 2942483 - DNA, 25 bp, Homo sapien
ggaattatctagtgccctgaccaca

SEQ ID NO: 2942484 - DNA, 25 bp, Homo sapien
ttaaagcagctaccaatcatgtgac

SEQ ID NO: 2942485 - DNA, 25 bp, Homo sapien
caatgttacttaactgcttcagccc

SEQ ID NO: 2942486 - DNA, 25 bp, Homo sapien
gatttctgtcctaatcagtatcctg

SEQ ID NO: 2942487 - DNA, 25 bp, Homo sapien
tcagcccaggtagtggttttatcac

SEQ ID NO: 2942488 - DNA, 25 bp, Homo sapien
tgatctaggtttccccaccgtggga

SEQ ID NO: 2942489 - DNA, 25 bp, Homo sapien
ccaagacccagcatagtggctcatg

SEQ ID NO: 2942490 - DNA, 25 bp, Homo sapien
ccttatctacatggatcccaagacc

SEQ ID NO: 2942491 - DNA, 25 bp, Homo sapien
ttttctagcaatggcccctcatgag

SEQ ID NO: 2942492 - DNA, 25 bp, Homo sapien
cccagtgcagttcttttctagcaat

SEQ ID NO: 2942493 - DNA, 25 bp, Homo sapien
gaaatcttccttgaatgctccgagc

SEQ ID NO: 2942494 - DNA, 25 bp, Homo sapien
tcaatggctctctagtgctgcaaaa

SEQ ID NO: 2942495 - DNA, 25 bp, Homo sapien
catgtaaaaggcaccggaagacgcc

SEQ ID NO: 2942496 - DNA, 25 bp, Homo sapien
gccatggttgctctagttcacgccc

SEQ ID NO: 2942497 - DNA, 25 bp, Homo sapien
taattcaaggtcaccagtgctcagc

SEQ ID NO: 2942498 - DNA, 25 bp, Homo sapien
taaccttgagctggtcgcttgccca

SEQ ID NO: 2942499 - DNA, 25 bp, Homo sapien
gctggaactgggtctcgaaacttga

SEQ ID NO: 2942500 - DNA, 25 bp, Homo sapien
ggaagtttcttagccgtgggcacgc

SEQ ID NO: 2942501 - DNA, 25 bp, Homo sapien
taatattgtctcctaaacgtgcaga

SEQ ID NO: 2942502 - DNA, 25 bp, Homo sapien
aactacagtaggtgtcgagtgcccc

SEQ ID NO: 2942503 - DNA, 25 bp, Homo sapien
agctttgtggttgaacagtagcccc

SEQ ID NO: 2942504 - DNA, 25 bp, Homo sapien
cccctgggtgcgaagctcggtatta

SEQ ID NO: 2942505 - DNA, 25 bp, Homo sapien
gaagagttaggtgtctcatagtcac

SEQ ID NO: 2942506 - DNA, 25 bp, Homo sapien
ttcttgtacctgagggatcctgccc

SEQ ID NO: 2942507 - DNA, 25 bp, Homo sapien
tcgtgtgtttgcatgagtgtgcgct

SEQ ID NO: 2942508 - DNA, 25 bp, Homo sapien
ggtaatggcatctccccactttagg

SEQ ID NO: 2942509 - DNA, 25 bp, Homo sapien
cttgggtgagggatgttggacagag

SEQ ID NO: 2942510 - DNA, 25 bp, Homo sapien
ttgggtgagggatgttggacagagc

SEQ ID NO: 2942511 - DNA, 25 bp, Homo sapien
taaacctgtgccagtctatagcctc

SEQ ID NO: 2942512 - DNA, 25 bp, Homo sapien
tgaaccccagtggtccaaagtattg

SEQ ID NO: 2942513 - DNA, 25 bp, Homo sapien
tctgcagcccctagtgaaatcatgt

SEQ ID NO: 2942514 - DNA, 25 bp, Homo sapien
cctttggttttgcagaacaggcctg

SEQ ID NO: 2942515 - DNA, 25 bp, Homo sapien
tgaggtctgcacataaagagctgct

SEQ ID NO: 2942516 - DNA, 25 bp, Homo sapien
taacatgctatgtttagaggctcac

SEQ ID NO: 2942517 - DNA, 25 bp, Homo sapien
tctgccgcttgtctgagagaggttt

SEQ ID NO: 2942518 - DNA, 25 bp, Homo sapien
tacagctagctttaatttgctggcc

SEQ ID NO: 2942519 - DNA, 25 bp, Homo sapien
gaacttcctccgctccaatgagaat

SEQ ID NO: 2942520 - DNA, 25 bp, Homo sapien
ttcatgcagattgcgcgtgcgcggc

SEQ ID NO: 2942521 - DNA, 25 bp, Homo sapien
aagcactggccttcgttcatgcaga

SEQ ID NO: 2942522 - DNA, 25 bp, Homo sapien
gaatggcacgtctttaagcactggc

SEQ ID NO: 2942523 - DNA, 25 bp, Homo sapien
tgtagggtgatgatttccctcggca

SEQ ID NO: 2942524 - DNA, 25 bp, Homo sapien
ctgtagggtgatgatttccctcggc

SEQ ID NO: 2942525 - DNA, 25 bp, Homo sapien
gtagggtgatgatttccctcggcat

SEQ ID NO: 2942526 - DNA, 25 bp, Homo sapien
gcggtcagtgccctcggtggcgaac

SEQ ID NO: 2942527 - DNA, 25 bp, Homo sapien
cggtcagtgccctcggtggcgaact

SEQ ID NO: 2942528 - DNA, 25 bp, Homo sapien
tggagtggatcacccggggttccaa

SEQ ID NO: 2942529 - DNA, 25 bp, Homo sapien
gatcacccggggttccaagtccagc

SEQ ID NO: 2942530 - DNA, 25 bp, Homo sapien
gggttccaagtccagcagcacggcc

SEQ ID NO: 2942531 - DNA, 25 bp, Homo sapien
acccggggttccaagtccagcagca

SEQ ID NO: 2942532 - DNA, 25 bp, Homo sapien
tgtgggccctgccagggaataggaa

SEQ ID NO: 2942533 - DNA, 25 bp, Homo sapien
gccctgccagggaataggaaacgac

SEQ ID NO: 2942534 - DNA, 25 bp, Homo sapien
tgggccctgccagggaataggaaac

SEQ ID NO: 2942535 - DNA, 25 bp, Homo sapien
ccagcgagttgtgggccctgccagg

SEQ ID NO: 2942536 - DNA, 25 bp, Homo sapien
ttggatagaaactatagggccgggc

SEQ ID NO: 2942537 - DNA, 25 bp, Homo sapien
taaaaggcatcactaatgacagtaa

SEQ ID NO: 2942538 - DNA, 25 bp, Homo sapien
tgaaggtaataatacaggtccatat

SEQ ID NO: 2942539 - DNA, 25 bp, Homo sapien
taatcagaagcacgttaatcaaata

SEQ ID NO: 2942540 - DNA, 25 bp, Homo sapien
tgcctcccggtctatgatgtcaaaa

SEQ ID NO: 2942541 - DNA, 25 bp, Homo sapien
taccatctgcctcccggtctatgat

SEQ ID NO: 2942542 - DNA, 25 bp, Homo sapien
ctcccggtctatgatgtcaaaaatg

SEQ ID NO: 2942543 - DNA, 25 bp, Homo sapien
atctgcctcccggtctatgatgtca

SEQ ID NO: 2942544 - DNA, 25 bp, Homo sapien
tcagtgtacaggtatctagtggcag

SEQ ID NO: 2942545 - DNA, 25 bp, Homo sapien
ggtatctagtggcaggatgtcaaac

SEQ ID NO: 2942546 - DNA, 25 bp, Homo sapien
tggcaggatgtcaaactagacccat

SEQ ID NO: 2942547 - DNA, 25 bp, Homo sapien
tgtcaaactagacccatctcatagt

SEQ ID NO: 2942548 - DNA, 25 bp, Homo sapien
cccagcaatggagtgacacagcaca

SEQ ID NO: 2942549 - DNA, 25 bp, Homo sapien
tgtcattcagccgttctaagaggta

SEQ ID NO: 2942550 - DNA, 25 bp, Homo sapien
aagaggtaggaacccagtccagagc

SEQ ID NO: 2942551 - DNA, 25 bp, Homo sapien
tcagccgttctaagaggtaggaacc

SEQ ID NO: 2942552 - DNA, 25 bp, Homo sapien
gaagccaagttggagacctttccta

SEQ ID NO: 2942553 - DNA, 25 bp, Homo sapien
tatggagttatatctgctgggtccc

SEQ ID NO: 2942554 - DNA, 25 bp, Homo sapien
tcaaatcagtagagaagggagcctt

SEQ ID NO: 2942555 - DNA, 25 bp, Homo sapien
gataaatcttgatggcgaaactggg

SEQ ID NO: 2942556 - DNA, 25 bp, Homo sapien
tgagtatgtctgcaccagcttctta

SEQ ID NO: 2942557 - DNA, 25 bp, Homo sapien
tgtctgcaccagcttcttaggatac

SEQ ID NO: 2942558 - DNA, 25 bp, Homo sapien
gagtatgtctgcaccagcttcttag

SEQ ID NO: 2942559 - DNA, 25 bp, Homo sapien
gtatgtctgcaccagcttcttagga

SEQ ID NO: 2942560 - DNA, 25 bp, Homo sapien
ctaaactcaaacgatccaacgacct

SEQ ID NO: 2942561 - DNA, 25 bp, Homo sapien
tgaaaatgatttaatagactcgagt

SEQ ID NO: 2942562 - DNA, 25 bp, Homo sapien
aaactcaaacgatccaacgaccttg

SEQ ID NO: 2942563 - DNA, 25 bp, Homo sapien
tttaatagactcgagtgggtatggg

SEQ ID NO: 2942564 - DNA, 25 bp, Homo sapien
caggcggtctgtggcaatccggttc

SEQ ID NO: 2942565 - DNA, 25 bp, Homo sapien
aggtcattgttcatgtagccagggt

SEQ ID NO: 2942566 - DNA, 25 bp, Homo sapien
gaggtcattgttcatgtagccaggg

SEQ ID NO: 2942567 - DNA, 25 bp, Homo sapien
ggtcattgttcatgtagccagggta

SEQ ID NO: 2942568 - DNA, 25 bp, Homo sapien
cagcaagaaagtcgcccactctgtg

SEQ ID NO: 2942569 - DNA, 25 bp, Homo sapien
ggaagagagaaaggctaggacaggg

SEQ ID NO: 2942570 - DNA, 25 bp, Homo sapien
aagtcagcaagaaagtcgcccactc

SEQ ID NO: 2942571 - DNA, 25 bp, Homo sapien
gtcagcaagaaagtcgcccactctg

SEQ ID NO: 2942572 - DNA, 25 bp, Homo sapien
agcagccgcctcatgacatccagga

SEQ ID NO: 2942573 - DNA, 25 bp, Homo sapien
tgacatccaggaccgtggtcttcct

SEQ ID NO: 2942574 - DNA, 25 bp, Homo sapien
gatgttgaggatggcgatgtagcag

SEQ ID NO: 2942575 - DNA, 25 bp, Homo sapien
ctgtggacaccatcacgttcttggg

SEQ ID NO: 2942576 - DNA, 25 bp, Homo sapien
aggtggcctctcctctacccctgca

SEQ ID NO: 2942577 - DNA, 25 bp, Homo sapien
gtgtgggatgaaggggcctccccta

SEQ ID NO: 2942578 - DNA, 25 bp, Homo sapien
ctctacccctgcaggtccagggtgt

SEQ ID NO: 2942579 - DNA, 25 bp, Homo sapien
ggcataggagcagtggaggtggcct

SEQ ID NO: 2942580 - DNA, 25 bp, Homo sapien
ggagacttcctcgacagggccacct

SEQ ID NO: 2942581 - DNA, 25 bp, Homo sapien
gagacttcctcgacagggccacctg

SEQ ID NO: 2942582 - DNA, 25 bp, Homo sapien
gacttcctcgacagggccacctgga

SEQ ID NO: 2942583 - DNA, 25 bp, Homo sapien
agacttcctcgacagggccacctgg

SEQ ID NO: 2942584 - DNA, 25 bp, Homo sapien
gcttacgcagcttgtcatactggcg

SEQ ID NO: 2942585 - DNA, 25 bp, Homo sapien
cgcttacgcagcttgtcatactggc

SEQ ID NO: 2942586 - DNA, 25 bp, Homo sapien
cagggcttgggccaaccagtaaggc

SEQ ID NO: 2942587 - DNA, 25 bp, Homo sapien
tatgagaaagagatgcgtgaggtcc

SEQ ID NO: 2942588 - DNA, 25 bp, Homo sapien
gtgtttgcaggccaacagagagtcc

SEQ ID NO: 2942589 - DNA, 25 bp, Homo sapien
ttaaagataaatagtctcataagag

SEQ ID NO: 2942590 - DNA, 25 bp, Homo sapien
gttcagaatgtcaatttcaaatatt

SEQ ID NO: 2942591 - DNA, 25 bp, Homo sapien
agtagttcagaatgtcaatttcaaa

SEQ ID NO: 2942592 - DNA, 25 bp, Homo sapien
tagttcagaatgtcaatttcaaata

SEQ ID NO: 2942593 - DNA, 25 bp, Homo sapien
gtagttcagaatgtcaatttcaaat

SEQ ID NO: 2942594 - DNA, 25 bp, Homo sapien
attctgcaaaattgatggggacttt

SEQ ID NO: 2942595 - DNA, 25 bp, Homo sapien
tgcaaaattgatggggacttttggg

SEQ ID NO: 2942596 - DNA, 25 bp, Homo sapien
tctgcaaaattgatggggacttttg

SEQ ID NO: 2942597 - DNA, 25 bp, Homo sapien
ttctgcaaaattgatggggactttt

SEQ ID NO: 2942598 - DNA, 25 bp, Homo sapien
caaaaagttagcaccgagtgtagaa

SEQ ID NO: 2942599 - DNA, 25 bp, Homo sapien
tagcaccgagtgtagaatacagaac

SEQ ID NO: 2942600 - DNA, 25 bp, Homo sapien
gtagaatacagaactcctcgtcttc

SEQ ID NO: 2942601 - DNA, 25 bp, Homo sapien
gaatacagaactcctcgtcttcatc

SEQ ID NO: 2942602 - DNA, 25 bp, Homo sapien
tatggttttgtgaaggcaatagaca

SEQ ID NO: 2942603 - DNA, 25 bp, Homo sapien
catatggttttgtgaaggcaataga

SEQ ID NO: 2942604 - DNA, 25 bp, Homo sapien
ggttttgtgaaggcaatagacatac

SEQ ID NO: 2942605 - DNA, 25 bp, Homo sapien
tggttttgtgaaggcaatagacata

SEQ ID NO: 2942606 - DNA, 25 bp, Homo sapien
gagcacaggtatcttgtcaaggtga

SEQ ID NO: 2942607 - DNA, 25 bp, Homo sapien
gacatcccaggtggaataaaacatg

SEQ ID NO: 2942608 - DNA, 25 bp, Homo sapien
gactggaatcttatgaccctgggaa

SEQ ID NO: 2942609 - DNA, 25 bp, Homo sapien
tcctgaatgcctagcctgcagtatg

SEQ ID NO: 2942610 - DNA, 25 bp, Homo sapien
tccctcagcagtcgcagctggaatt

SEQ ID NO: 2942611 - DNA, 25 bp, Homo sapien
cgagagtcacggctgagacgaatgc

SEQ ID NO: 2942612 - DNA, 25 bp, Homo sapien
tctgcgcgtgtgcagcgcaggcctc

SEQ ID NO: 2942613 - DNA, 25 bp, Homo sapien
gctctcttcgcctcttgacgcggat

SEQ ID NO: 2942614 - DNA, 25 bp, Homo sapien
tctggttgccgcactggcccagctg

SEQ ID NO: 2942615 - DNA, 25 bp, Homo sapien
gcagggtgatgatctcccggggcat

SEQ ID NO: 2942616 - DNA, 25 bp, Homo sapien
tggcccagctgcagggtgatgatct

SEQ ID NO: 2942617 - DNA, 25 bp, Homo sapien
cagctgcagggtgatgatctcccgg

SEQ ID NO: 2942618 - DNA, 25 bp, Homo sapien
aagatgcctgggtttggtagctgcc

SEQ ID NO: 2942619 - DNA, 25 bp, Homo sapien
gctgacacgatcagagggtggaccc

SEQ ID NO: 2942620 - DNA, 25 bp, Homo sapien
ctggagccttaaggcctgaggagcc

SEQ ID NO: 2942621 - DNA, 25 bp, Homo sapien
ccagttttagtctcagaggctgaca

SEQ ID NO: 2942622 - DNA, 25 bp, Homo sapien
tcagtgccctcggtggcgaattcct

SEQ ID NO: 2942623 - DNA, 25 bp, Homo sapien
ggtcagtgccctcggtggcgaattc

SEQ ID NO: 2942624 - DNA, 25 bp, Homo sapien
gcggtcagtgccctcggtggcgaat

SEQ ID NO: 2942625 - DNA, 25 bp, Homo sapien
agtgccctcggtggcgaattcctcc

SEQ ID NO: 2942626 - DNA, 25 bp, Homo sapien
tggagtggatcacccggggttccaa

SEQ ID NO: 2942627 - DNA, 25 bp, Homo sapien
gatcacccggggttccaagtccagc

SEQ ID NO: 2942628 - DNA, 25 bp, Homo sapien
acccggggttccaagtccagcagca

SEQ ID NO: 2942629 - DNA, 25 bp, Homo sapien
gggttccaagtccagcagcacggcc

SEQ ID NO: 2942630 - DNA, 25 bp, Homo sapien
tctggatgggaatatcaaaggtctc

SEQ ID NO: 2942631 - DNA, 25 bp, Homo sapien
ctggatgggaatatcaaaggtctct

SEQ ID NO: 2942632 - DNA, 25 bp, Homo sapien
ctctggatgggaatatcaaaggtct

SEQ ID NO: 2942633 - DNA, 25 bp, Homo sapien
ttccatctgcttctcggtctatgat

SEQ ID NO: 2942634 - DNA, 25 bp, Homo sapien
gtcaaagatgtcttcatgaattttc

SEQ ID NO: 2942635 - DNA, 25 bp, Homo sapien
ttctcggtctatgatgtcaaagatg

SEQ ID NO: 2942636 - DNA, 25 bp, Homo sapien
ctccaaactgtcacttccatctgct

SEQ ID NO: 2942637 - DNA, 25 bp, Homo sapien
tcttcggcctccctgcccattcctt

SEQ ID NO: 2942638 - DNA, 25 bp, Homo sapien
cttcggcctccctgcccattccttc

SEQ ID NO: 2942639 - DNA, 25 bp, Homo sapien
caaaacgccaatgtctcaaagcttc

SEQ ID NO: 2942640 - DNA, 25 bp, Homo sapien
agacttcggcttggttcattctcca

SEQ ID NO: 2942641 - DNA, 25 bp, Homo sapien
ctgatgctccataaacgggttttga

SEQ ID NO: 2942642 - DNA, 25 bp, Homo sapien
aattgctcccctcatattacctatc

SEQ ID NO: 2942643 - DNA, 25 bp, Homo sapien
agatggagaggcagtctccaaggat

SEQ ID NO: 2942644 - DNA, 25 bp, Homo sapien
gggagagatggagaggcagtctcca

SEQ ID NO: 2942645 - DNA, 25 bp, Homo sapien
gagagatggagaggcagtctccaag

SEQ ID NO: 2942646 - DNA, 25 bp, Homo sapien
gagatggagaggcagtctccaagga

SEQ ID NO: 2942647 - DNA, 25 bp, Homo sapien
ggcctgtaaattccaaccctcagag

SEQ ID NO: 2942648 - DNA, 25 bp, Homo sapien
cagtggctatctgggactttccaaa

SEQ ID NO: 2942649 - DNA, 25 bp, Homo sapien
tataaatcgaggttctcaggactgc

SEQ ID NO: 2942650 - DNA, 25 bp, Homo sapien
tccggcgcataggagttgctgccct

SEQ ID NO: 2942651 - DNA, 25 bp, Homo sapien
aattctacagtagatgccagctggg

SEQ ID NO: 2942652 - DNA, 25 bp, Homo sapien
taccgcacctgtcctcaaatttgtt

SEQ ID NO: 2942653 - DNA, 25 bp, Homo sapien
cacacacatcaggtaagcagtcaat

SEQ ID NO: 2942654 - DNA, 25 bp, Homo sapien
taacctgatgcatttctacttacgg

SEQ ID NO: 2942655 - DNA, 25 bp, Homo sapien
cagcgatggagtgacacagcacgaa

SEQ ID NO: 2942656 - DNA, 25 bp, Homo sapien
ccccagcgatggagtgacacagcac

SEQ ID NO: 2942657 - DNA, 25 bp, Homo sapien
cgatggagtgacacagcacgaagcc

SEQ ID NO: 2942658 - DNA, 25 bp, Homo sapien
gcgatggagtgacacagcacgaagc

SEQ ID NO: 2942659 - DNA, 25 bp, Homo sapien
ctgtcattcagtcgctccaggaggt

SEQ ID NO: 2942660 - DNA, 25 bp, Homo sapien
tgtcattcagtcgctccaggaggta

SEQ ID NO: 2942661 - DNA, 25 bp, Homo sapien
tccaacatggtccttgggtgggtct

SEQ ID NO: 2942662 - DNA, 25 bp, Homo sapien
gggtagtggcagactttctagctca

SEQ ID NO: 2942663 - DNA, 25 bp, Homo sapien
gggtctgtccctatgactcaaaagg

SEQ ID NO: 2942664 - DNA, 25 bp, Homo sapien
gtggcatagtgaaccggaaggaccc

SEQ ID NO: 2942665 - DNA, 25 bp, Homo sapien
taagtctgcactagcttcttggggt

SEQ ID NO: 2942666 - DNA, 25 bp, Homo sapien
gaataagtctgcactagcttcttgg

SEQ ID NO: 2942667 - DNA, 25 bp, Homo sapien
ataagtctgcactagcttcttgggg

SEQ ID NO: 2942668 - DNA, 25 bp, Homo sapien
aataagtctgcactagcttcttggg

SEQ ID NO: 2942669 - DNA, 25 bp, Homo sapien
tgaattgtagggctgaaccactacg

SEQ ID NO: 2942670 - DNA, 25 bp, Homo sapien
tgaaccactacgtcgctcatctcgt

SEQ ID NO: 2942671 - DNA, 25 bp, Homo sapien
tgtagggctgaaccactacgtcgct

SEQ ID NO: 2942672 - DNA, 25 bp, Homo sapien
agggctgaaccactacgtcgctcat

SEQ ID NO: 2942673 - DNA, 25 bp, Homo sapien
caggcggtctgtggcaatccggttc

SEQ ID NO: 2942674 - DNA, 25 bp, Homo sapien
cgtgccatgtcatggggctcggcct

SEQ ID NO: 2942675 - DNA, 25 bp, Homo sapien
ctggggacaggcgtgccatgtcatg

SEQ ID NO: 2942676 - DNA, 25 bp, Homo sapien
cttccccagatgaccctccagcaag

SEQ ID NO: 2942677 - DNA, 25 bp, Homo sapien
ttccccagatgaccctccagcaagg

SEQ ID NO: 2942678 - DNA, 25 bp, Homo sapien
agggtggtggtgctggccgacatga

SEQ ID NO: 2942679 - DNA, 25 bp, Homo sapien
tcattgttcatgtagccggggtagc

SEQ ID NO: 2942680 - DNA, 25 bp, Homo sapien
atgaggccgatgaggtcattgttca

SEQ ID NO: 2942681 - DNA, 25 bp, Homo sapien
tgagcggggtgtagccggtcatgag

SEQ ID NO: 2942682 - DNA, 25 bp, Homo sapien
agtcagcaagaaagtcgcccgctct

SEQ ID NO: 2942683 - DNA, 25 bp, Homo sapien
aagtcagcaagaaagtcgcccgctc

SEQ ID NO: 2942684 - DNA, 25 bp, Homo sapien
ggacagtgagacagggacccggcca

SEQ ID NO: 2942685 - DNA, 25 bp, Homo sapien
agacagggacccggccagcgctcag

SEQ ID NO: 2942686 - DNA, 25 bp, Homo sapien
acagtgagacagggacccggccagc

SEQ ID NO: 2942687 - DNA, 25 bp, Homo sapien
gtgagacagggacccggccagcgct

SEQ ID NO: 2942688 - DNA, 25 bp, Homo sapien
agcagccgcctcatgacatccagga

SEQ ID NO: 2942689 - DNA, 25 bp, Homo sapien
tgacatccaggaccgtggtcttcct

SEQ ID NO: 2942690 - DNA, 25 bp, Homo sapien
gatgttgaggatggcgatgtagcag

SEQ ID NO: 2942691 - DNA, 25 bp, Homo sapien
ctgtggacaccatcacgttcttggg

SEQ ID NO: 2942692 - DNA, 25 bp, Homo sapien
ggagacttcctcgacagggccacct

SEQ ID NO: 2942693 - DNA, 25 bp, Homo sapien
gagacttcctcgacagggccacctg

SEQ ID NO: 2942694 - DNA, 25 bp, Homo sapien
agacttcctcgacagggccacctgg

SEQ ID NO: 2942695 - DNA, 25 bp, Homo sapien
gacttcctcgacagggccacctgga

SEQ ID NO: 2942696 - DNA, 25 bp, Homo sapien
aaaatgcgagccagggggttaggag

SEQ ID NO: 2942697 - DNA, 25 bp, Homo sapien
taggagtgaacttggggaagatgat

SEQ ID NO: 2942698 - DNA, 25 bp, Homo sapien
ggaacagactcttctaagaagaata

SEQ ID NO: 2942699 - DNA, 25 bp, Homo sapien
aagaagaatagaaacctagactcac

SEQ ID NO: 2942700 - DNA, 25 bp, Homo sapien
ctgctcgaggaaggcatcccgcttc

SEQ ID NO: 2942701 - DNA, 25 bp, Homo sapien
tgagctcctgaacaacctccctaga

SEQ ID NO: 2942702 - DNA, 25 bp, Homo sapien
cgcagcttgtcaaactgctggcagg

SEQ ID NO: 2942703 - DNA, 25 bp, Homo sapien
gaacaacctccctagacctgtccat

SEQ ID NO: 2942704 - DNA, 25 bp, Homo sapien
tattagagctgaacaagcatattaa

SEQ ID NO: 2942705 - DNA, 25 bp, Homo sapien
gatgaaccaagaagggttgtccatg

SEQ ID NO: 2942706 - DNA, 25 bp, Homo sapien
catggtcgaggctgtggttaccatc

SEQ ID NO: 2942707 - DNA, 25 bp, Homo sapien
ttgtccatgaggtgaagctgggtca

SEQ ID NO: 2942708 - DNA, 25 bp, Homo sapien
gccaccctactgtcagatgcctaga

SEQ ID NO: 2942709 - DNA, 25 bp, Homo sapien
cctactgtcagatgcctagaaactg

SEQ ID NO: 2942710 - DNA, 25 bp, Homo sapien
cccgtattcacagatcaagccctgg

SEQ ID NO: 2942711 - DNA, 25 bp, Homo sapien
tgataagacgttggaggaggtgaag

SEQ ID NO: 2942712 - DNA, 25 bp, Homo sapien
cagcgccgaggaatgtggcgaggcc

SEQ ID NO: 2942713 - DNA, 25 bp, Homo sapien
cgcgtggcccgacctggccctgcct

SEQ ID NO: 2942714 - DNA, 25 bp, Homo sapien
gaggcgtcacgcgtggcccgacctg

SEQ ID NO: 2942715 - DNA, 25 bp, Homo sapien
gctgggcccgcgtcccatcccgtct

SEQ ID NO: 2942716 - DNA, 25 bp, Homo sapien
gctacgtggccatcgcgcgagcgct

SEQ ID NO: 2942717 - DNA, 25 bp, Homo sapien
cacttggtctccgtcatcgtgtggc

SEQ ID NO: 2942718 - DNA, 25 bp, Homo sapien
tcttcctggcctgtatcagcgccga

SEQ ID NO: 2942719 - DNA, 25 bp, Homo sapien
gactctgcccttcgcggcagcaggg

SEQ ID NO: 2942720 - DNA, 25 bp, Homo sapien
ccctgtgaacggctccggctagggc

SEQ ID NO: 2942721 - DNA, 25 bp, Homo sapien
gcagggctgacggtcccggcagccg

SEQ ID NO: 2942722 - DNA, 25 bp, Homo sapien
ggtttgcagcagaccgctctctcct

SEQ ID NO: 2942723 - DNA, 25 bp, Homo sapien
cggctccggctagggctcgagttct

SEQ ID NO: 2942724 - DNA, 25 bp, Homo sapien
cccagccctcggctcctgagaccgc

SEQ ID NO: 2942725 - DNA, 25 bp, Homo sapien
tcggctcctgagaccgcggcgagca

SEQ ID NO: 2942726 - DNA, 25 bp, Homo sapien
ctcggctcctgagaccgcggcgagc

SEQ ID NO: 2942727 - DNA, 25 bp, Homo sapien
agccctcggctcctgagaccgcggc

SEQ ID NO: 2942728 - DNA, 25 bp, Homo sapien
gaatctcggcgcagtaaggagactg

SEQ ID NO: 2942729 - DNA, 25 bp, Homo sapien
gagactgtagtaggaggaggcgccc

SEQ ID NO: 2942730 - DNA, 25 bp, Homo sapien
gtgcatacaggggacccaccagctc

SEQ ID NO: 2942731 - DNA, 25 bp, Homo sapien
aggcgcccagggagcgtgcatacag

SEQ ID NO: 2942732 - DNA, 25 bp, Homo sapien
gagttgtgccctcgctggtagaacg

SEQ ID NO: 2942733 - DNA, 25 bp, Homo sapien
tagcatgtaacgtgtgacccagtcc

SEQ ID NO: 2942734 - DNA, 25 bp, Homo sapien
tcggtcgccgtagagtagcatgtaa

SEQ ID NO: 2942735 - DNA, 25 bp, Homo sapien
ggtagaacggtgtccagctgtccac

SEQ ID NO: 2942736 - DNA, 25 bp, Homo sapien
tggaagtgcaggtcatggcgcacca

SEQ ID NO: 2942737 - DNA, 25 bp, Homo sapien
atcttgccgcgtgggttccaggcca

SEQ ID NO: 2942738 - DNA, 25 bp, Homo sapien
gccgactcgttcacgttaccaaaga

SEQ ID NO: 2942739 - DNA, 25 bp, Homo sapien
catagaggccgagcctcaggccgat

SEQ ID NO: 2942740 - DNA, 25 bp, Homo sapien
ctcccaggccccctccgcgctctct

SEQ ID NO: 2942741 - DNA, 25 bp, Homo sapien
ctgcgcaaaggaccgtaggtgggcc

SEQ ID NO: 2942742 - DNA, 25 bp, Homo sapien
tgcgcaaaggaccgtaggtgggccg

SEQ ID NO: 2942743 - DNA, 25 bp, Homo sapien
ggcgtgcagcagaagaccgtccttc

SEQ ID NO: 2942744 - DNA, 25 bp, Homo sapien
tcttgaagctgaaggcgaacacgtc

SEQ ID NO: 2942745 - DNA, 25 bp, Homo sapien
ccgtcgaaatagagtatgtcggcct

SEQ ID NO: 2942746 - DNA, 25 bp, Homo sapien
gagatggcatcgtcgccgtcgaaat

SEQ ID NO: 2942747 - DNA, 25 bp, Homo sapien
ctgcacatagccgtccagggtgaaa

SEQ ID NO: 2942748 - DNA, 25 bp, Homo sapien
cagggtgaaatttacatcgcggcca

SEQ ID NO: 2942749 - DNA, 25 bp, Homo sapien
tccattgagaataaagcgctgcaca

SEQ ID NO: 2942750 - DNA, 25 bp, Homo sapien
ctggtcattgaggactccgcctgcg

SEQ ID NO: 2942751 - DNA, 25 bp, Homo sapien
gatgttgacgcggttgaagattacg

SEQ ID NO: 2942752 - DNA, 25 bp, Homo sapien
gaagattacgttttctatgcagccg

SEQ ID NO: 2942753 - DNA, 25 bp, Homo sapien
aagttatgccgataggccaggttct

SEQ ID NO: 2942754 - DNA, 25 bp, Homo sapien
ccaggtctgcgatgttgacgcggtt

SEQ ID NO: 2942755 - DNA, 25 bp, Homo sapien
aggtgatccgggaatggcgccgcac

SEQ ID NO: 2942756 - DNA, 25 bp, Homo sapien
cgaaggtgatccgggaatggcgccg

SEQ ID NO: 2942757 - DNA, 25 bp, Homo sapien
ctcgaaggtgatccgggaatggcgc

SEQ ID NO: 2942758 - DNA, 25 bp, Homo sapien
aaggtgatccgggaatggcgccgca

SEQ ID NO: 2942759 - DNA, 25 bp, Homo sapien
tccacgacgctttgatatcctgtcc

SEQ ID NO: 2942760 - DNA, 25 bp, Homo sapien
tttccacgacgctttgatatcctgt

SEQ ID NO: 2942761 - DNA, 25 bp, Homo sapien
acgacgctttgatatcctgtcctcc

SEQ ID NO: 2942762 - DNA, 25 bp, Homo sapien
ctttccacgacgctttgatatcctg

SEQ ID NO: 2942763 - DNA, 25 bp, Homo sapien
cttccagtatcgagaggcaattttg

SEQ ID NO: 2942764 - DNA, 25 bp, Homo sapien
gggcatatcagagaagccatcggtt

SEQ ID NO: 2942765 - DNA, 25 bp, Homo sapien
atcggttcaagtccctactcagcca

SEQ ID NO: 2942766 - DNA, 25 bp, Homo sapien
agtatcgagaggcaattttggacca

SEQ ID NO: 2942767 - DNA, 25 bp, Homo sapien
tcggaactctgctcgcttgctctcg

SEQ ID NO: 2942768 - DNA, 25 bp, Homo sapien
tgatctccaccgtctgcgattcgac

SEQ ID NO: 2942769 - DNA, 25 bp, Homo sapien
tcaccgccctccttcggtgttggcg

SEQ ID NO: 2942770 - DNA, 25 bp, Homo sapien
gggtgagatctccaaccatgacgtg

SEQ ID NO: 2942771 - DNA, 25 bp, Homo sapien
gtgaagacgcatcaacacccgtgag

SEQ ID NO: 2942772 - DNA, 25 bp, Homo sapien
caaaagtgaagacgcatcaacaccc

SEQ ID NO: 2942773 - DNA, 25 bp, Homo sapien
gggcaaaagtgaagacgcatcaaca

SEQ ID NO: 2942774 - DNA, 25 bp, Homo sapien
ctaggggcaaaagtgaagacgcatc

SEQ ID NO: 2942775 - DNA, 25 bp, Homo sapien
cccaggtgcggaagcgaaatgagac

SEQ ID NO: 2942776 - DNA, 25 bp, Homo sapien
tctgcgcgatggacacgttgacctg

SEQ ID NO: 2942777 - DNA, 25 bp, Homo sapien
ttgaacgaagttgtgagggcctccg

SEQ ID NO: 2942778 - DNA, 25 bp, Homo sapien
tccgaagttgatagggtgcggtacc

SEQ ID NO: 2942779 - DNA, 25 bp, Homo sapien
aaattcacctcgtgccaaaagccgt

SEQ ID NO: 2942780 - DNA, 25 bp, Homo sapien
aatatgaggtccctgtccggatcag

SEQ ID NO: 2942781 - DNA, 25 bp, Homo sapien
caaaagccgtcattcagtcggtacc

SEQ ID NO: 2942782 - DNA, 25 bp, Homo sapien
ccggatcagcaacgggtatgagacc

SEQ ID NO: 2942783 - DNA, 25 bp, Homo sapien
ctgtgagatcctccccaggggagac

SEQ ID NO: 2942784 - DNA, 25 bp, Homo sapien
gagatcctccccaggggagacccca

SEQ ID NO: 2942785 - DNA, 25 bp, Homo sapien
tgtgagatcctccccaggggagacc

SEQ ID NO: 2942786 - DNA, 25 bp, Homo sapien
ccaaagaccctcccccagggacatg

SEQ ID NO: 2942787 - DNA, 25 bp, Homo sapien
catgcagccatggaatgccgtctgg

SEQ ID NO: 2942788 - DNA, 25 bp, Homo sapien
tcagcatagaatccaagccgccggc

SEQ ID NO: 2942789 - DNA, 25 bp, Homo sapien
gttgaccagttgaccatccaccttg

SEQ ID NO: 2942790 - DNA, 25 bp, Homo sapien
gatgccacatgtatcaaagaggacc

SEQ ID NO: 2942791 - DNA, 25 bp, Homo sapien
gcagcgtccatcatgctcacacatg

SEQ ID NO: 2942792 - DNA, 25 bp, Homo sapien
ccttgtagcccgtcagttcgcagta

SEQ ID NO: 2942793 - DNA, 25 bp, Homo sapien
tcgcagtagcaaatgaagtcatccc

SEQ ID NO: 2942794 - DNA, 25 bp, Homo sapien
tcccaagactggtagcagcgtccat

SEQ ID NO: 2942795 - DNA, 25 bp, Homo sapien
aggccggggtggtgcatcacccgag

SEQ ID NO: 2942796 - DNA, 25 bp, Homo sapien
gataataggttgagacaaaggcagt

SEQ ID NO: 2942797 - DNA, 25 bp, Homo sapien
cagataataggttgagacaaaggca

SEQ ID NO: 2942798 - DNA, 25 bp, Homo sapien
taggttgagacaaaggcagttagag

SEQ ID NO: 2942799 - DNA, 25 bp, Homo sapien
ctggcagataataggttgagacaaa

SEQ ID NO: 2942800 - DNA, 25 bp, Homo sapien
cactgccatcaggatcaatggtgaa

SEQ ID NO: 2942801 - DNA, 25 bp, Homo sapien
ctgagccgataagcctcacaggatt

SEQ ID NO: 2942802 - DNA, 25 bp, Homo sapien
caggatcaatggtgaagtttccaga

SEQ ID NO: 2942803 - DNA, 25 bp, Homo sapien
ttttcccactgagccgataagcctc

SEQ ID NO: 2942804 - DNA, 25 bp, Homo sapien
cccaggatgcattccagtactggat

SEQ ID NO: 2942805 - DNA, 25 bp, Homo sapien
tgtcactcgagttgtccacagcctg

SEQ ID NO: 2942806 - DNA, 25 bp, Homo sapien
tgttcacaatgctgggaagcattgg

SEQ ID NO: 2942807 - DNA, 25 bp, Homo sapien
caggaatggccgctccatgctggaa

SEQ ID NO: 2942808 - DNA, 25 bp, Homo sapien
aggcacagcgctggatcccaggctg

SEQ ID NO: 2942809 - DNA, 25 bp, Homo sapien
gcctccccagtagaagtgctgctcc

SEQ ID NO: 2942810 - DNA, 25 bp, Homo sapien
ggtcagcgtcacagttgcagtacaa

SEQ ID NO: 2942811 - DNA, 25 bp, Homo sapien
tgctcctcatttcggccaatccaaa

SEQ ID NO: 2942812 - DNA, 25 bp, Homo sapien
gtgacaggcagatggtccacaaagg

SEQ ID NO: 2942813 - DNA, 25 bp, Homo sapien
gcctcagaagtggagcggttcgtat

SEQ ID NO: 2942814 - DNA, 25 bp, Homo sapien
gatcgccatagcagcgcagaggcct

SEQ ID NO: 2942815 - DNA, 25 bp, Homo sapien
ggttcgtatcccctatcactacctg

SEQ ID NO: 2942816 - DNA, 25 bp, Homo sapien
taagggccccccatattctctagga

SEQ ID NO: 2942817 - DNA, 25 bp, Homo sapien
taaggtcggcgccactggcagtaag

SEQ ID NO: 2942818 - DNA, 25 bp, Homo sapien
agttccacccgcacataaggtcggc

SEQ ID NO: 2942819 - DNA, 25 bp, Homo sapien
gaagtagaaggagacatccaggctg

SEQ ID NO: 2942820 - DNA, 25 bp, Homo sapien
catccagatgtaggtctgcagtggc

SEQ ID NO: 2942821 - DNA, 25 bp, Homo sapien
caggtgccactcgtcatcattgaac

SEQ ID NO: 2942822 - DNA, 25 bp, Homo sapien
tcacgttgatttcagcccggaccag

SEQ ID NO: 2942823 - DNA, 25 bp, Homo sapien
caaagtcgtctgagtgtactgtgag

SEQ ID NO: 2942824 - DNA, 25 bp, Homo sapien
gagtcactccgttcagacgcatggc

SEQ ID NO: 2942825 - DNA, 25 bp, Homo sapien
gtagctatagcgctccacgcagcgg

SEQ ID NO: 2942826 - DNA, 25 bp, Homo sapien
cgtggttgcagtatggcccatcaaa

SEQ ID NO: 2942827 - DNA, 25 bp, Homo sapien
caaaagccgtgaggtcacagtcaca

SEQ ID NO: 2942828 - DNA, 25 bp, Homo sapien
tctcccgtaacgttgtagacaggcc

SEQ ID NO: 2942829 - DNA, 25 bp, Homo sapien
acatagcccggagtatcatagcccg

SEQ ID NO: 2942830 - DNA, 25 bp, Homo sapien
taggttatagcgcatccaggtgccc

SEQ ID NO: 2942831 - DNA, 25 bp, Homo sapien
tcatagcccgggatgtagccaggct

SEQ ID NO: 2942832 - DNA, 25 bp, Homo sapien
ctggccatcggtcactggtcgagtg

SEQ ID NO: 2942833 - DNA, 25 bp, Homo sapien
actggtgcccagctgatatcgcagc

SEQ ID NO: 2942834 - DNA, 25 bp, Homo sapien
taaacacgggtgatattgatgctat

SEQ ID NO: 2942835 - DNA, 25 bp, Homo sapien
tcgagtggttagctggtacacgtag

SEQ ID NO: 2942836 - DNA, 25 bp, Homo sapien
cacgccctaaatacaaggccttggg

SEQ ID NO: 2942837 - DNA, 25 bp, Homo sapien
gggtgagtccaactggctgtccacc

SEQ ID NO: 2942838 - DNA, 25 bp, Homo sapien
atcacacgccctaaatacaaggcct

SEQ ID NO: 2942839 - DNA, 25 bp, Homo sapien
ctgtccaccaacagcgagaacttct

SEQ ID NO: 2942840 - DNA, 25 bp, Homo sapien
agctagctcagcagtcatgggtcga

SEQ ID NO: 2942841 - DNA, 25 bp, Homo sapien
tgttgaatcgaacaccagacaggca

SEQ ID NO: 2942842 - DNA, 25 bp, Homo sapien
cagggatcaagctcaggtggcacct

SEQ ID NO: 2942843 - DNA, 25 bp, Homo sapien
tgaaacaagacgtggcatagctccg

SEQ ID NO: 2942844 - DNA, 25 bp, Homo sapien
aacccatccttcatcatggtagtag

SEQ ID NO: 2942845 - DNA, 25 bp, Homo sapien
agcctaaaagtatggcaacccatcc

SEQ ID NO: 2942846 - DNA, 25 bp, Homo sapien
ccatccttcatcatggtagtagggg

SEQ ID NO: 2942847 - DNA, 25 bp, Homo sapien
aaaagtatggcaacccatccttcat

SEQ ID NO: 2942848 - DNA, 25 bp, Homo sapien
gccccagcagcagaaaggccaccaa

SEQ ID NO: 2942849 - DNA, 25 bp, Homo sapien
agccccagcagcagaaaggccacca

SEQ ID NO: 2942850 - DNA, 25 bp, Homo sapien
cccagcagcagaaaggccaccaaaa

SEQ ID NO: 2942851 - DNA, 25 bp, Homo sapien
cagccccagcagcagaaaggccacc

SEQ ID NO: 2942852 - DNA, 25 bp, Homo sapien
ggagcccttatagcgatgattttgc

SEQ ID NO: 2942853 - DNA, 25 bp, Homo sapien
cagccttgggctcattggtatggta

SEQ ID NO: 2942854 - DNA, 25 bp, Homo sapien
tgattttgcagatagaagagcacca

SEQ ID NO: 2942855 - DNA, 25 bp, Homo sapien
gccaggatggtactcgtgggcagcc

SEQ ID NO: 2942856 - DNA, 25 bp, Homo sapien
tgaggctggagcttggttgggagct

SEQ ID NO: 2942857 - DNA, 25 bp, Homo sapien
tggagcttggttgggagctgctgta

SEQ ID NO: 2942858 - DNA, 25 bp, Homo sapien
cttggttgggagctgctgtaggggt

SEQ ID NO: 2942859 - DNA, 25 bp, Homo sapien
ctgaggctggagcttggttgggagc

SEQ ID NO: 2942860 - DNA, 25 bp, Homo sapien
tggactcctccaggatctggggtag

SEQ ID NO: 2942861 - DNA, 25 bp, Homo sapien
ctggactcctccaggatctggggta

SEQ ID NO: 2942862 - DNA, 25 bp, Homo sapien
gactcctccaggatctggggtaggt

SEQ ID NO: 2942863 - DNA, 25 bp, Homo sapien
actcctccaggatctggggtaggtt

SEQ ID NO: 2942864 - DNA, 25 bp, Homo sapien
tatgtcaaccccatgaggcttctcc

SEQ ID NO: 2942865 - DNA, 25 bp, Homo sapien
gagatggcagaaaggacctatgtca

SEQ ID NO: 2942866 - DNA, 25 bp, Homo sapien
tgagaagggcattggtttaggcagt

SEQ ID NO: 2942867 - DNA, 25 bp, Homo sapien
gggcagataaacagccaggagcctg

SEQ ID NO: 2942868 - DNA, 25 bp, Homo sapien
actctgttgttaatccctgacagca

SEQ ID NO: 2942869 - DNA, 25 bp, Homo sapien
ctctgttgttaatccctgacagcag

SEQ ID NO: 2942870 - DNA, 25 bp, Homo sapien
ctccagctgagtggaagcaaatgga

SEQ ID NO: 2942871 - DNA, 25 bp, Homo sapien
ggatagggtttagcagcctcctccc

SEQ ID NO: 2942872 - DNA, 25 bp, Homo sapien
gccatcaagccctcttgagcctcca

SEQ ID NO: 2942873 - DNA, 25 bp, Homo sapien
tctgtccctgctgatagtgtctatt

SEQ ID NO: 2942874 - DNA, 25 bp, Homo sapien
ctgcttcagagtggaggccggacca

SEQ ID NO: 2942875 - DNA, 25 bp, Homo sapien
tattggaacggctccgcgtctgaga

SEQ ID NO: 2942876 - DNA, 25 bp, Homo sapien
tgacctcctgggtaaatgaagcagc

SEQ ID NO: 2942877 - DNA, 25 bp, Homo sapien
gaaagagggttcctcatgcactgga

SEQ ID NO: 2942878 - DNA, 25 bp, Homo sapien
tccccaccacgtcatgatggatggg

SEQ ID NO: 2942879 - DNA, 25 bp, Homo sapien
cctggtatacatgcggcttcattgc

SEQ ID NO: 2942880 - DNA, 25 bp, Homo sapien
cagcttcagttcatgaatactcctg

SEQ ID NO: 2942881 - DNA, 25 bp, Homo sapien
gcctttgagagactagactgacccc

SEQ ID NO: 2942882 - DNA, 25 bp, Homo sapien
caaattactcatagaggagaaaacc

SEQ ID NO: 2942883 - DNA, 25 bp, Homo sapien
tgaaatctgcatccgccgtggtttg

SEQ ID NO: 2942884 - DNA, 25 bp, Homo sapien
ttcattgtgcatatcagggataccc

SEQ ID NO: 2942885 - DNA, 25 bp, Homo sapien
gcacccagcaactcctgacagaaag

SEQ ID NO: 2942886 - DNA, 25 bp, Homo sapien
taggccatatacagagtgctcggac

SEQ ID NO: 2942887 - DNA, 25 bp, Homo sapien
gcaattgcctcaatgttccctgaga

SEQ ID NO: 2942888 - DNA, 25 bp, Homo sapien
tatcagataagtccagatagcactg

SEQ ID NO: 2942889 - DNA, 25 bp, Homo sapien
ggaaagctgtcccacttaggccata

SEQ ID NO: 2942890 - DNA, 25 bp, Homo sapien
tacatcctgccaccgtcgctgccac

SEQ ID NO: 2942891 - DNA, 25 bp, Homo sapien
gcgtccagcgcctacatcctgccac

SEQ ID NO: 2942892 - DNA, 25 bp, Homo sapien
catagagaagatccacaaggttgtc

SEQ ID NO: 2942893 - DNA, 25 bp, Homo sapien
atgccactgcatcccgcgtccagcg

SEQ ID NO: 2942894 - DNA, 25 bp, Homo sapien
ggatcgctccccgaattcgagtcgc

SEQ ID NO: 2942895 - DNA, 25 bp, Homo sapien
actctccagggtctcccaggatcgc

SEQ ID NO: 2942896 - DNA, 25 bp, Homo sapien
tggaggggtcggcaagctgctctcc

SEQ ID NO: 2942897 - DNA, 25 bp, Homo sapien
atttcgggggctcggctgcgtggcg

SEQ ID NO: 2942898 - DNA, 25 bp, Homo sapien
gagggggagtcgctgcctcacccgc

SEQ ID NO: 2942899 - DNA, 25 bp, Homo sapien
cgtgcagcaaggaggcgaggagcgg

SEQ ID NO: 2942900 - DNA, 25 bp, Homo sapien
agctgcaggaagccgcgccgcttcc

SEQ ID NO: 2942901 - DNA, 25 bp, Homo sapien
tgtgggggcgcctatatccccagcc

SEQ ID NO: 2942902 - DNA, 25 bp, Homo sapien
cgactcgggtcctagggagacgcgg

SEQ ID NO: 2942903 - DNA, 25 bp, Homo sapien
cggcgcgctccacccggagcgaggc

SEQ ID NO: 2942904 - DNA, 25 bp, Homo sapien
tgccggccgcccgactcgggtccta

SEQ ID NO: 2942905 - DNA, 25 bp, Homo sapien
cgcgctccacccggagcgaggccat

SEQ ID NO: 2942906 - DNA, 25 bp, Homo sapien
agggaccgtccgagggccagtgctg

SEQ ID NO: 2942907 - DNA, 25 bp, Homo sapien
ggactgagaccctccgaaaataggc

SEQ ID NO: 2942908 - DNA, 25 bp, Homo sapien
gccagtgctgctaggtacgtcggtc

SEQ ID NO: 2942909 - DNA, 25 bp, Homo sapien
accccggcagtggagcctgcgaggg

SEQ ID NO: 2942910 - DNA, 25 bp, Homo sapien
tgagccagggcctcgtggggattca

SEQ ID NO: 2942911 - DNA, 25 bp, Homo sapien
gagccagggcctcgtggggattcag

SEQ ID NO: 2942912 - DNA, 25 bp, Homo sapien
ctgagccagggcctcgtggggattc

SEQ ID NO: 2942913 - DNA, 25 bp, Homo sapien
ctcggccacccttccacaccctggg

SEQ ID NO: 2942914 - DNA, 25 bp, Homo sapien
cctcggccacccttccacaccctgg

SEQ ID NO: 2942915 - DNA, 25 bp, Homo sapien
ccttttcgataggatccatttgatc

SEQ ID NO: 2942916 - DNA, 25 bp, Homo sapien
tgtctcatagttcttcaccgtcccc

SEQ ID NO: 2942917 - DNA, 25 bp, Homo sapien
ctaatcatggcccagtcgcaccaat

SEQ ID NO: 2942918 - DNA, 25 bp, Homo sapien
ttgatccttataatgattccagcaa

SEQ ID NO: 2942919 - DNA, 25 bp, Homo sapien
ctctcactcagggtctacctgcaat

SEQ ID NO: 2942920 - DNA, 25 bp, Homo sapien
ggtctacctgcaatgagcaggtcca

SEQ ID NO: 2942921 - DNA, 25 bp, Homo sapien
tcagggtctacctgcaatgagcagg

SEQ ID NO: 2942922 - DNA, 25 bp, Homo sapien
tgcaatgagcaggtccaccccctgg

SEQ ID NO: 2942923 - DNA, 25 bp, Homo sapien
agtgctccaggcaatctcgcagggt

SEQ ID NO: 2942924 - DNA, 25 bp, Homo sapien
ggcaatctcgcagggtgctataagg

SEQ ID NO: 2942925 - DNA, 25 bp, Homo sapien
ctccaggcaatctcgcagggtgcta

SEQ ID NO: 2942926 - DNA, 25 bp, Homo sapien
aagtgctccaggcaatctcgcaggg

SEQ ID NO: 2942927 - DNA, 25 bp, Homo sapien
ctgccaagggattggggaagcccag

SEQ ID NO: 2942928 - DNA, 25 bp, Homo sapien
tggtgagtctcaaagatgatcctct

SEQ ID NO: 2942929 - DNA, 25 bp, Homo sapien
ggctatgatcatggccaggagtaca

SEQ ID NO: 2942930 - DNA, 25 bp, Homo sapien
catactacaagagtgatgaggaagg

SEQ ID NO: 2942931 - DNA, 25 bp, Homo sapien
ttggcaaagtggatctggtgagtct

SEQ ID NO: 2942932 - DNA, 25 bp, Homo sapien
tggttgttgagaagctcgtggcccc

SEQ ID NO: 2942933 - DNA, 25 bp, Homo sapien
tggagtaacatggttgttgagaagc

SEQ ID NO: 2942934 - DNA, 25 bp, Homo sapien
taacatggttgttgagaagctcgtg

SEQ ID NO: 2942935 - DNA, 25 bp, Homo sapien
aagtggagtaacatggttgttgaga

SEQ ID NO: 2942936 - DNA, 25 bp, Homo sapien
cttccattcccagcaatccagggat

SEQ ID NO: 2942937 - DNA, 25 bp, Homo sapien
gcttccattcccagcaatccaggga

SEQ ID NO: 2942938 - DNA, 25 bp, Homo sapien
ctggcttccattcccagcaatccag

SEQ ID NO: 2942939 - DNA, 25 bp, Homo sapien
ggcttccattcccagcaatccaggg

SEQ ID NO: 2942940 - DNA, 25 bp, Homo sapien
agattacagaacttgtgccatgacc

SEQ ID NO: 2942941 - DNA, 25 bp, Homo sapien
aagattacagaacttgtgccatgac

SEQ ID NO: 2942942 - DNA, 25 bp, Homo sapien
gaagattacagaacttgtgccatga

SEQ ID NO: 2942943 - DNA, 25 bp, Homo sapien
tttcctggagccgagtttggatata

SEQ ID NO: 2942944 - DNA, 25 bp, Homo sapien
ccgagtttggatataggcaggaaag

SEQ ID NO: 2942945 - DNA, 25 bp, Homo sapien
ctgctgtccagaccggaagggagtc

SEQ ID NO: 2942946 - DNA, 25 bp, Homo sapien
ttggatataggcaggaaaggcccgc

SEQ ID NO: 2942947 - DNA, 25 bp, Homo sapien
tcagatacgtcttctggttgctggc

SEQ ID NO: 2942948 - DNA, 25 bp, Homo sapien
tccaggacaatgtaggatgagggca

SEQ ID NO: 2942949 - DNA, 25 bp, Homo sapien
ttgctggctttagtggacaccaggg

SEQ ID NO: 2942950 - DNA, 25 bp, Homo sapien
gggcagtgtgttgctaggctgcagg

SEQ ID NO: 2942951 - DNA, 25 bp, Homo sapien
tcacccaaatccttcacgcgcacag

SEQ ID NO: 2942952 - DNA, 25 bp, Homo sapien
ccaaatccttcacgcgcacagttcc

SEQ ID NO: 2942953 - DNA, 25 bp, Homo sapien
acccaaatccttcacgcgcacagtt

SEQ ID NO: 2942954 - DNA, 25 bp, Homo sapien
aatccttcacgcgcacagttcctgt

SEQ ID NO: 2942955 - DNA, 25 bp, Homo sapien
cggctaaggacttccggccttcgct

SEQ ID NO: 2942956 - DNA, 25 bp, Homo sapien
cggccttcgcttccgcacgtccggg

SEQ ID NO: 2942957 - DNA, 25 bp, Homo sapien
atgcagaaaggttccggaagccttt

SEQ ID NO: 2942958 - DNA, 25 bp, Homo sapien
gcttccgcacgtccgggcagaaggc

SEQ ID NO: 2942959 - DNA, 25 bp, Homo sapien
cacggccactcgaaactcatcgcca

SEQ ID NO: 2942960 - DNA, 25 bp, Homo sapien
agaagggtgggaagcgatactgcca

SEQ ID NO: 2942961 - DNA, 25 bp, Homo sapien
acggccactcgaaactcatcgccat

SEQ ID NO: 2942962 - DNA, 25 bp, Homo sapien
gtgggaagcgatactgccacggcca

SEQ ID NO: 2942963 - DNA, 25 bp, Homo sapien
gagggaggcacagcggtgcttcttg

SEQ ID NO: 2942964 - DNA, 25 bp, Homo sapien
tgcccgggacgcatttcaggaagaa

SEQ ID NO: 2942965 - DNA, 25 bp, Homo sapien
cgcagaattagagggcgggaggcag

SEQ ID NO: 2942966 - DNA, 25 bp, Homo sapien
tccccatatgaagcatcagggctga

SEQ ID NO: 2942967 - DNA, 25 bp, Homo sapien
gacgttgttgaagagcgggctctcc

SEQ ID NO: 2942968 - DNA, 25 bp, Homo sapien
tgagcttccatcaccgtcatgctgg

SEQ ID NO: 2942969 - DNA, 25 bp, Homo sapien
tcatgctggactgtttgtgcaggcg

SEQ ID NO: 2942970 - DNA, 25 bp, Homo sapien
gctgcttctgccgagtgtccacatt

SEQ ID NO: 2942971 - DNA, 25 bp, Homo sapien
catgtgtgaaagcgcagaagtgcat

SEQ ID NO: 2942972 - DNA, 25 bp, Homo sapien
aaagcgcagaagtgcatgtgtatgg

SEQ ID NO: 2942973 - DNA, 25 bp, Homo sapien
tatgggctgtggaagagcctgaggg

SEQ ID NO: 2942974 - DNA, 25 bp, Homo sapien
catgtgtatgggctgtggaagagcc

SEQ ID NO: 2942975 - DNA, 25 bp, Homo sapien
aagtccagtttgggtgggaatctgc

SEQ ID NO: 2942976 - DNA, 25 bp, Homo sapien
tccagtttgggtgggaatctgccta

SEQ ID NO: 2942977 - DNA, 25 bp, Homo sapien
gtccagtttgggtgggaatctgcct

SEQ ID NO: 2942978 - DNA, 25 bp, Homo sapien
agtccagtttgggtgggaatctgcc

SEQ ID NO: 2942979 - DNA, 25 bp, Homo sapien
gagggtatggtactgcatttgccag

SEQ ID NO: 2942980 - DNA, 25 bp, Homo sapien
gaccttaatgacatccgagcagtca

SEQ ID NO: 2942981 - DNA, 25 bp, Homo sapien
gggcagaaattctaagaccttaatg

SEQ ID NO: 2942982 - DNA, 25 bp, Homo sapien
gtctgggcctcacacagaaaaggat

SEQ ID NO: 2942983 - DNA, 25 bp, Homo sapien
tctaatacaatctggatcgactcca

SEQ ID NO: 2942984 - DNA, 25 bp, Homo sapien
ttcctctaatacaatctggatcgac

SEQ ID NO: 2942985 - DNA, 25 bp, Homo sapien
tggatcgactccacaggaagctttc

SEQ ID NO: 2942986 - DNA, 25 bp, Homo sapien
tacaatctggatcgactccacagga

SEQ ID NO: 2942987 - DNA, 25 bp, Homo sapien
tactttacagaagactctggccttc

SEQ ID NO: 2942988 - DNA, 25 bp, Homo sapien
ggacttgggaattgggctgcctact

SEQ ID NO: 2942989 - DNA, 25 bp, Homo sapien
tgccctcaggaaaacccaactagga

SEQ ID NO: 2942990 - DNA, 25 bp, Homo sapien
caggtttagggcacagacagagatt

SEQ ID NO: 2942991 - DNA, 25 bp, Homo sapien
acttgctcttatccaaccactcgag

SEQ ID NO: 2942992 - DNA, 25 bp, Homo sapien
tgctcttatccaaccactcgaggtt

SEQ ID NO: 2942993 - DNA, 25 bp, Homo sapien
ctcttatccaaccactcgaggttcc

SEQ ID NO: 2942994 - DNA, 25 bp, Homo sapien
ttgctcttatccaaccactcgaggt

SEQ ID NO: 2942995 - DNA, 25 bp, Homo sapien
gtgtcttccccattagtcagttcat

SEQ ID NO: 2942996 - DNA, 25 bp, Homo sapien
acagggtaaagacggagttgttctg

SEQ ID NO: 2942997 - DNA, 25 bp, Homo sapien
ccattagtcagttcatacagggtaa

SEQ ID NO: 2942998 - DNA, 25 bp, Homo sapien
tcagttcatacagggtaaagacgga

SEQ ID NO: 2942999 - DNA, 25 bp, Homo sapien
tatctaatctatccctagaaaaatg

SEQ ID NO: 2943000 - DNA, 25 bp, Homo sapien
aacttttcatgggtcatagatgccc

SEQ ID NO: 2943001 - DNA, 25 bp, Homo sapien
gaatccttggacatgggttaagaac

SEQ ID NO: 2943002 - DNA, 25 bp, Homo sapien
catgtgaattcaggtggcttatgga

SEQ ID NO: 2943003 - DNA, 25 bp, Homo sapien
ttgttattttttaagatagcatctc

SEQ ID NO: 2943004 - DNA, 25 bp, Homo sapien
tattttttaagatagcatctcgctc

SEQ ID NO: 2943005 - DNA, 25 bp, Homo sapien
gttattttttaagatagcatctcgc

SEQ ID NO: 2943006 - DNA, 25 bp, Homo sapien
attttttaagatagcatctcgctct

SEQ ID NO: 2943007 - DNA, 25 bp, Homo sapien
caagcatgcaccaccatgcccggct

SEQ ID NO: 2943008 - DNA, 25 bp, Homo sapien
caagtagctcagattacaagcatgc

SEQ ID NO: 2943009 - DNA, 25 bp, Homo sapien
cccaagtagctcagattacaagcat

SEQ ID NO: 2943010 - DNA, 25 bp, Homo sapien
ggtgttggcctaatctcttcagctg

SEQ ID NO: 2943011 - DNA, 25 bp, Homo sapien
tatcccagctaagatcgaaacttgt

SEQ ID NO: 2943012 - DNA, 25 bp, Homo sapien
ggagacaccctctgttatcccagct

SEQ ID NO: 2943013 - DNA, 25 bp, Homo sapien
gctaggcaaggctacagtgctgaaa

SEQ ID NO: 2943014 - DNA, 25 bp, Homo sapien
gatcggagccattgtcactagacac

SEQ ID NO: 2943015 - DNA, 25 bp, Homo sapien
tagacactgaccctagaggatctat

SEQ ID NO: 2943016 - DNA, 25 bp, Homo sapien
aaatcaggcctagggagatcggagc

SEQ ID NO: 2943017 - DNA, 25 bp, Homo sapien
cctagcatttgtgtctgatgcacga

SEQ ID NO: 2943018 - DNA, 25 bp, Homo sapien
taagccatctatactgctacagctg

SEQ ID NO: 2943019 - DNA, 25 bp, Homo sapien
ctcccagaggcagggtatgcataag

SEQ ID NO: 2943020 - DNA, 25 bp, Homo sapien
ctggaagccgagacctcccagaggc

SEQ ID NO: 2943021 - DNA, 25 bp, Homo sapien
gaggcagggtatgcataagccatct

SEQ ID NO: 2943022 - DNA, 25 bp, Homo sapien
taggcagagacaatcagctcctgag

SEQ ID NO: 2943023 - DNA, 25 bp, Homo sapien
gataggcagagacaatcagctcctg

SEQ ID NO: 2943024 - DNA, 25 bp, Homo sapien
aggcagagacaatcagctcctgagg

SEQ ID NO: 2943025 - DNA, 25 bp, Homo sapien
gagataggcagagacaatcagctcc

SEQ ID NO: 2943026 - DNA, 25 bp, Homo sapien
agtagagtggcttcatccagcccgt

SEQ ID NO: 2943027 - DNA, 25 bp, Homo sapien
tgacgcctcggccatcgctgacagt

SEQ ID NO: 2943028 - DNA, 25 bp, Homo sapien
gagcccgcagtagagtggcttcatc

SEQ ID NO: 2943029 - DNA, 25 bp, Homo sapien
cagtgatgatctcggccttgtgctc

SEQ ID NO: 2943030 - DNA, 25 bp, Homo sapien
ggtttacagaccctggctcaaggac

SEQ ID NO: 2943031 - DNA, 25 bp, Homo sapien
gctcaaggacagtctaggatgggaa

SEQ ID NO: 2943032 - DNA, 25 bp, Homo sapien
aggtagggcgagaagaagcacatat

SEQ ID NO: 2943033 - DNA, 25 bp, Homo sapien
gtgaacacatataaagtgtcaggtt

SEQ ID NO: 2943034 - DNA, 25 bp, Homo sapien
ccgtgggcctcctatcttcatattg

SEQ ID NO: 2943035 - DNA, 25 bp, Homo sapien
cgtgggcctcctatcttcatattgc

SEQ ID NO: 2943036 - DNA, 25 bp, Homo sapien
gcccgtgggcctcctatcttcatat

SEQ ID NO: 2943037 - DNA, 25 bp, Homo sapien
tcccccatcccctaggaaggatcca

SEQ ID NO: 2943038 - DNA, 25 bp, Homo sapien
tatcataaatcggtgtggggccaca

SEQ ID NO: 2943039 - DNA, 25 bp, Homo sapien
tcataaatcggtgtggggccacacc

SEQ ID NO: 2943040 - DNA, 25 bp, Homo sapien
tttaatatcataaatcggtgtgggg

SEQ ID NO: 2943041 - DNA, 25 bp, Homo sapien
taatatcataaatcggtgtggggcc

SEQ ID NO: 2943042 - DNA, 25 bp, Homo sapien
ctgacagacggactcgctgggtgcg

SEQ ID NO: 2943043 - DNA, 25 bp, Homo sapien
agacggactcgctgggtgcgctgcg

SEQ ID NO: 2943044 - DNA, 25 bp, Homo sapien
gacagacggactcgctgggtgcgct

SEQ ID NO: 2943045 - DNA, 25 bp, Homo sapien
gactcgctgggtgcgctgcgctccg

SEQ ID NO: 2943046 - DNA, 25 bp, Homo sapien
ggtagaaaatcagacggccggagag

SEQ ID NO: 2943047 - DNA, 25 bp, Homo sapien
cgccgaagggtagaaaatcagacgg

SEQ ID NO: 2943048 - DNA, 25 bp, Homo sapien
tagaaaatcagacggccggagagga

SEQ ID NO: 2943049 - DNA, 25 bp, Homo sapien
gagcagggcgccgaagggtagaaaa

SEQ ID NO: 2943050 - DNA, 25 bp, Homo sapien
gaaggagccacgtccaatctcgatg

SEQ ID NO: 2943051 - DNA, 25 bp, Homo sapien
tcaaacttgaggtatcggccatcgg

SEQ ID NO: 2943052 - DNA, 25 bp, Homo sapien
aagtcgactgagctacggcggctga

SEQ ID NO: 2943053 - DNA, 25 bp, Homo sapien
tcgatacaccgtcttgaaggagcca

SEQ ID NO: 2943054 - DNA, 25 bp, Homo sapien
agagccctgagctcaatagtgcctt

SEQ ID NO: 2943055 - DNA, 25 bp, Homo sapien
ttatgcagcccggtcccagagccct

SEQ ID NO: 2943056 - DNA, 25 bp, Homo sapien
ctgagctcaatagtgcctttgtggc

SEQ ID NO: 2943057 - DNA, 25 bp, Homo sapien
gctcaatagtgcctttgtggctgcc

SEQ ID NO: 2943058 - DNA, 25 bp, Homo sapien
gcagccccctagaccccctgctgga

SEQ ID NO: 2943059 - DNA, 25 bp, Homo sapien
ctagaccccctgctggacacaagca

SEQ ID NO: 2943060 - DNA, 25 bp, Homo sapien
tagaccccctgctggacacaagcac

SEQ ID NO: 2943061 - DNA, 25 bp, Homo sapien
ctggggcagccccctagaccccctg

SEQ ID NO: 2943062 - DNA, 25 bp, Homo sapien
aagcgctgccgctcagctctagaca

SEQ ID NO: 2943063 - DNA, 25 bp, Homo sapien
tcatgagttcggtgaccagcacgat

SEQ ID NO: 2943064 - DNA, 25 bp, Homo sapien
ccacgaatcatagaagcggacgatg

SEQ ID NO: 2943065 - DNA, 25 bp, Homo sapien
tgagcgtgcccgaggtcatgagttc

SEQ ID NO: 2943066 - DNA, 25 bp, Homo sapien
taaattgatagatagggcctcggcc

SEQ ID NO: 2943067 - DNA, 25 bp, Homo sapien
agacaggacaccgtgctcaaaggca

SEQ ID NO: 2943068 - DNA, 25 bp, Homo sapien
gatagacatgacgttaccaaacggg

SEQ ID NO: 2943069 - DNA, 25 bp, Homo sapien
gagcttcggagaggaaatacttttg

SEQ ID NO: 2943070 - DNA, 25 bp, Homo sapien
gccgcctccgcatcttctgccagca

SEQ ID NO: 2943071 - DNA, 25 bp, Homo sapien
ggagggcgcatagccagagtcctgg

SEQ ID NO: 2943072 - DNA, 25 bp, Homo sapien
agggcgcatagccagagtcctggtg

SEQ ID NO: 2943073 - DNA, 25 bp, Homo sapien
tgggggagggcgcatagccagagtc

SEQ ID NO: 2943074 - DNA, 25 bp, Homo sapien
gacattgtcgcacttgagatcccgg

SEQ ID NO: 2943075 - DNA, 25 bp, Homo sapien
atttggcggctccagcgctgaagga

SEQ ID NO: 2943076 - DNA, 25 bp, Homo sapien
tccccgattttgacagagccagtag

SEQ ID NO: 2943077 - DNA, 25 bp, Homo sapien
cactcttggcaaaggaggcgcgctt

SEQ ID NO: 2943078 - DNA, 25 bp, Homo sapien
cggcctcatcgtacttttcctcgta

SEQ ID NO: 2943079 - DNA, 25 bp, Homo sapien
tttgcgcggcattctggcactcgga

SEQ ID NO: 2943080 - DNA, 25 bp, Homo sapien
atgcacatgccgaacgcgtacacgt

SEQ ID NO: 2943081 - DNA, 25 bp, Homo sapien
ggcactcggagtacgggtactcaga

SEQ ID NO: 2943082 - DNA, 25 bp, Homo sapien
ccttcacctcgggtatcttcacctt

SEQ ID NO: 2943083 - DNA, 25 bp, Homo sapien
ctctcgttcttatccgtgcggatgc

SEQ ID NO: 2943084 - DNA, 25 bp, Homo sapien
ccgtgcggatgcagccttcaatgat

SEQ ID NO: 2943085 - DNA, 25 bp, Homo sapien
cttatccgtgcggatgcagccttca

SEQ ID NO: 2943086 - DNA, 25 bp, Homo sapien
ccgcgctcctcgcggaagaaggcgt

SEQ ID NO: 2943087 - DNA, 25 bp, Homo sapien
cgcgctcctcgcggaagaaggcgtg

SEQ ID NO: 2943088 - DNA, 25 bp, Homo sapien
agctggaacaggaactcgatggcct

SEQ ID NO: 2943089 - DNA, 25 bp, Homo sapien
ccagagcttgaggcccggcttctcg

SEQ ID NO: 2943090 - DNA, 25 bp, Homo sapien
atggcctggttgtcccgtgggcgcc

SEQ ID NO: 2943091 - DNA, 25 bp, Homo sapien
gtcctccatgcgcagccagagcttg

SEQ ID NO: 2943092 - DNA, 25 bp, Homo sapien
gtggcagcacagtctgtcctccgct

SEQ ID NO: 2943093 - DNA, 25 bp, Homo sapien
cagtggcagcacagtctgtcctccg

SEQ ID NO: 2943094 - DNA, 25 bp, Homo sapien
agtggcagcacagtctgtcctccgc

SEQ ID NO: 2943095 - DNA, 25 bp, Homo sapien
tggcagcacagtctgtcctccgctc

SEQ ID NO: 2943096 - DNA, 25 bp, Homo sapien
ttctcacgctttcgctggatggcag

SEQ ID NO: 2943097 - DNA, 25 bp, Homo sapien
tggatggcagcaacccgttcacgta

SEQ ID NO: 2943098 - DNA, 25 bp, Homo sapien
cactggctggtaatcggcttcacag

SEQ ID NO: 2943099 - DNA, 25 bp, Homo sapien
tctggtgggagtgcctccaattccc

SEQ ID NO: 2943100 - DNA, 25 bp, Homo sapien
ggagctgaggtagccatcagtctcg

SEQ ID NO: 2943101 - DNA, 25 bp, Homo sapien
aggtagccatcagtctcgcaatccg

SEQ ID NO: 2943102 - DNA, 25 bp, Homo sapien
gctgaggtagccatcagtctcgcaa

SEQ ID NO: 2943103 - DNA, 25 bp, Homo sapien
tgaggtagccatcagtctcgcaatc

SEQ ID NO: 2943104 - DNA, 25 bp, Homo sapien
ttccagggccagaacgtggaatgga

SEQ ID NO: 2943105 - DNA, 25 bp, Homo sapien
ccagaacgtggaatggatagggcaa

SEQ ID NO: 2943106 - DNA, 25 bp, Homo sapien
ccagggccagaacgtggaatggata

SEQ ID NO: 2943107 - DNA, 25 bp, Homo sapien
aacgtggaatggatagggcaaaagc

SEQ ID NO: 2943108 - DNA, 25 bp, Homo sapien
ctggcaccccaacttgtaccagaac

SEQ ID NO: 2943109 - DNA, 25 bp, Homo sapien
cctggcaccccaacttgtaccagaa

SEQ ID NO: 2943110 - DNA, 25 bp, Homo sapien
gggtctgcgccggagattcctccct

SEQ ID NO: 2943111 - DNA, 25 bp, Homo sapien
tctgcgccggagattcctccctggg

SEQ ID NO: 2943112 - DNA, 25 bp, Homo sapien
ccttctcccacatcgctaaggcctg

SEQ ID NO: 2943113 - DNA, 25 bp, Homo sapien
ccacatcgctaaggcctgaagctgc

SEQ ID NO: 2943114 - DNA, 25 bp, Homo sapien
ctcttcatcatgctgtgtctccacc

SEQ ID NO: 2943115 - DNA, 25 bp, Homo sapien
tcagcagaggggagaaggtcaagcc

SEQ ID NO: 2943116 - DNA, 25 bp, Homo sapien
cttcagattcaaagtcagcagaggg

SEQ ID NO: 2943117 - DNA, 25 bp, Homo sapien
aaggtcaagccctcttcatcatgct

SEQ ID NO: 2943118 - DNA, 25 bp, Homo sapien
tgtccccatccagatcaaatcggaa

SEQ ID NO: 2943119 - DNA, 25 bp, Homo sapien
catcttgctgttatgggtctgtagc

SEQ ID NO: 2943120 - DNA, 25 bp, Homo sapien
ccatccagatcaaatcggaaggtca

SEQ ID NO: 2943121 - DNA, 25 bp, Homo sapien
ggcactcaaccactctgtcattctg

SEQ ID NO: 2943122 - DNA, 25 bp, Homo sapien
ttcaacagggtctccactcgctgga

SEQ ID NO: 2943123 - DNA, 25 bp, Homo sapien
gaatccgtctgagaaatccatctcg

SEQ ID NO: 2943124 - DNA, 25 bp, Homo sapien
atctcgctccgaaggcagaatgaac

SEQ ID NO: 2943125 - DNA, 25 bp, Homo sapien
ggataatctcccgaatccgtctgag

SEQ ID NO: 2943126 - DNA, 25 bp, Homo sapien
gcagggcaggtaatggtgctggctc

SEQ ID NO: 2943127 - DNA, 25 bp, Homo sapien
agggcaggtaatggtgctggctcct

SEQ ID NO: 2943128 - DNA, 25 bp, Homo sapien
cagggcaggtaatggtgctggctcc

SEQ ID NO: 2943129 - DNA, 25 bp, Homo sapien
ccaggagacaaaggagttccaggag

SEQ ID NO: 2943130 - DNA, 25 bp, Homo sapien
caggagacaaaggagttccaggaga

SEQ ID NO: 2943131 - DNA, 25 bp, Homo sapien
gagaatggaagtggagagctggtgg

SEQ ID NO: 2943132 - DNA, 25 bp, Homo sapien
ggtgtggagagggatttgaggagac

SEQ ID NO: 2943133 - DNA, 25 bp, Homo sapien
gatttgaggagacctgggaagaaat

SEQ ID NO: 2943134 - DNA, 25 bp, Homo sapien
gagagggatttgaggagacctggga

SEQ ID NO: 2943135 - DNA, 25 bp, Homo sapien
gagaacaagtgggagagaacgtagg

SEQ ID NO: 2943136 - DNA, 25 bp, Homo sapien
caagtgggagagaacgtaggtggag

SEQ ID NO: 2943137 - DNA, 25 bp, Homo sapien
agaacgtaggtggagaagtcgtggg

SEQ ID NO: 2943138 - DNA, 25 bp, Homo sapien
ggagagaacgtaggtggagaagtcg

SEQ ID NO: 2943139 - DNA, 25 bp, Homo sapien
gaagaagtggaggggcacggaggaa

SEQ ID NO: 2943140 - DNA, 25 bp, Homo sapien
ggaagaagtggaggggcacggagga

SEQ ID NO: 2943141 - DNA, 25 bp, Homo sapien
aggaagaagtggaggggcacggagg

SEQ ID NO: 2943142 - DNA, 25 bp, Homo sapien
ccagtgagaaggcactagccagaga

SEQ ID NO: 2943143 - DNA, 25 bp, Homo sapien
agccagtgagaaggcactagccaga

SEQ ID NO: 2943144 - DNA, 25 bp, Homo sapien
ggccacagtcatcacagccagtgag

SEQ ID NO: 2943145 - DNA, 25 bp, Homo sapien
acagtcatcacagccagtgagaagg

SEQ ID NO: 2943146 - DNA, 25 bp, Homo sapien
tgggaggggccgagcaggaggtggt

SEQ ID NO: 2943147 - DNA, 25 bp, Homo sapien
aggggccgagcaggaggtggtgagg

SEQ ID NO: 2943148 - DNA, 25 bp, Homo sapien
ctgggaggggccgagcaggaggtgg

SEQ ID NO: 2943149 - DNA, 25 bp, Homo sapien
ggaggggccgagcaggaggtggtga

SEQ ID NO: 2943150 - DNA, 25 bp, Homo sapien
agagatgggcgccagcctggcttcc

SEQ ID NO: 2943151 - DNA, 25 bp, Homo sapien
gagatgggcgccagcctggcttccc

SEQ ID NO: 2943152 - DNA, 25 bp, Homo sapien
cttcagagatgggcgccagcctggc

SEQ ID NO: 2943153 - DNA, 25 bp, Homo sapien
tcagagatgggcgccagcctggctt

SEQ ID NO: 2943154 - DNA, 25 bp, Homo sapien
agggaagaggctcagccggttcctt

SEQ ID NO: 2943155 - DNA, 25 bp, Homo sapien
gaagtcacttggaaacgcccaacaa

SEQ ID NO: 2943156 - DNA, 25 bp, Homo sapien
gaaacgcccaacaagctgcggcttt

SEQ ID NO: 2943157 - DNA, 25 bp, Homo sapien
gccggttccttggatgaagtcactt

SEQ ID NO: 2943158 - DNA, 25 bp, Homo sapien
tttggagaaccagagagagtggggg

SEQ ID NO: 2943159 - DNA, 25 bp, Homo sapien
ttttggagaaccagagagagtgggg

SEQ ID NO: 2943160 - DNA, 25 bp, Homo sapien
ggagtagttcatccacactgggctg

SEQ ID NO: 2943161 - DNA, 25 bp, Homo sapien
caggctgctgtaggagtagttcatc

SEQ ID NO: 2943162 - DNA, 25 bp, Homo sapien
gctgcacggtcgctctcagccagag

SEQ ID NO: 2943163 - DNA, 25 bp, Homo sapien
gcacggtcgctctcagccagagctt

SEQ ID NO: 2943164 - DNA, 25 bp, Homo sapien
tagccacacaccttgctctcccagg

SEQ ID NO: 2943165 - DNA, 25 bp, Homo sapien
ctagccacacaccttgctctcccag

SEQ ID NO: 2943166 - DNA, 25 bp, Homo sapien
tcccaggttctcctctcactcctcc

SEQ ID NO: 2943167 - DNA, 25 bp, Homo sapien
tgctctcccaggttctcctctcact

SEQ ID NO: 2943168 - DNA, 25 bp, Homo sapien
gaggatgcacggagggcatgaaagg

SEQ ID NO: 2943169 - DNA, 25 bp, Homo sapien
aggatgcacggagggcatgaaaggg

SEQ ID NO: 2943170 - DNA, 25 bp, Homo sapien
ctgaggatgcacggagggcatgaaa

SEQ ID NO: 2943171 - DNA, 25 bp, Homo sapien
tgaggatgcacggagggcatgaaag

SEQ ID NO: 2943172 - DNA, 25 bp, Homo sapien
cagctggggccacaatacccggtgg

SEQ ID NO: 2943173 - DNA, 25 bp, Homo sapien
ttccccagccggctgtacaaatctt

SEQ ID NO: 2943174 - DNA, 25 bp, Homo sapien
tgtagtgtctgtagtgtttccacct

SEQ ID NO: 2943175 - DNA, 25 bp, Homo sapien
gctgtaggctgttgcggcgggaggt

SEQ ID NO: 2943176 - DNA, 25 bp, Homo sapien
ctgggagcaggatgggggaaggaga

SEQ ID NO: 2943177 - DNA, 25 bp, Homo sapien
ggagcaggatgggggaaggagagca

SEQ ID NO: 2943178 - DNA, 25 bp, Homo sapien
gggagcaggatgggggaaggagagc

SEQ ID NO: 2943179 - DNA, 25 bp, Homo sapien
tgggagcaggatgggggaaggagag

SEQ ID NO: 2943180 - DNA, 25 bp, Homo sapien
cggcgaatgtcacccccttgcttgc

SEQ ID NO: 2943181 - DNA, 25 bp, Homo sapien
cggtgctgctgccactcagagagtt

SEQ ID NO: 2943182 - DNA, 25 bp, Homo sapien
ctcagagagttccttcgcatgatgc

SEQ ID NO: 2943183 - DNA, 25 bp, Homo sapien
tcctgccaacatccccggcgaatgt

SEQ ID NO: 2943184 - DNA, 25 bp, Homo sapien
aaggcgaagctgcagccaggtacca

SEQ ID NO: 2943185 - DNA, 25 bp, Homo sapien
gatgaagaaacctccaaggtgggag

SEQ ID NO: 2943186 - DNA, 25 bp, Homo sapien
gaagctgcagccaggtaccattccc

SEQ ID NO: 2943187 - DNA, 25 bp, Homo sapien
tgatgaagaaacctccaaggtggga

SEQ ID NO: 2943188 - DNA, 25 bp, Homo sapien
tcagaaagcatcagattctgagaac

SEQ ID NO: 2943189 - DNA, 25 bp, Homo sapien
tgggggagatacatggcttctgttc

SEQ ID NO: 2943190 - DNA, 25 bp, Homo sapien
aacacaagctccatggtgggccctg

SEQ ID NO: 2943191 - DNA, 25 bp, Homo sapien
gagatacatggcttctgttctgaat

SEQ ID NO: 2943192 - DNA, 25 bp, Homo sapien
tggtaggcagcagaactaacacctc

SEQ ID NO: 2943193 - DNA, 25 bp, Homo sapien
tgtggtgtgagcatatcccctacac

SEQ ID NO: 2943194 - DNA, 25 bp, Homo sapien
tctagaagcatccaggcttgggtgg

SEQ ID NO: 2943195 - DNA, 25 bp, Homo sapien
tcagtgttgggatcttccttgctca

SEQ ID NO: 2943196 - DNA, 25 bp, Homo sapien
tactttttccatgagatctttccac

SEQ ID NO: 2943197 - DNA, 25 bp, Homo sapien
tacgaggttagacgtggcagctctg

SEQ ID NO: 2943198 - DNA, 25 bp, Homo sapien
cagctctgtgcagtgtttgagccta

SEQ ID NO: 2943199 - DNA, 25 bp, Homo sapien
tttgagcctacagtgggatacatag

SEQ ID NO: 2943200 - DNA, 25 bp, Homo sapien
cttccagggacgcagttgttacgag

SEQ ID NO: 2943201 - DNA, 25 bp, Homo sapien
acggactcctcagccaatcagaaag

SEQ ID NO: 2943202 - DNA, 25 bp, Homo sapien
cccttccaatgagtgtgtcgtcgcc

SEQ ID NO: 2943203 - DNA, 25 bp, Homo sapien
tcaagtctgaggaaaacccaattac

SEQ ID NO: 2943204 - DNA, 25 bp, Homo sapien
cacctggacgggttcactggatcca

SEQ ID NO: 2943205 - DNA, 25 bp, Homo sapien
ctgaaagtcaacgagggaggccgat

SEQ ID NO: 2943206 - DNA, 25 bp, Homo sapien
cgagggaggccgatcgtggcctcat

SEQ ID NO: 2943207 - DNA, 25 bp, Homo sapien
gtcaacgagggaggccgatcgtggc

SEQ ID NO: 2943208 - DNA, 25 bp, Homo sapien
tgaaagtcaacgagggaggccgatc

SEQ ID NO: 2943209 - DNA, 25 bp, Homo sapien
agccgccccgaagcctccctcactg

SEQ ID NO: 2943210 - DNA, 25 bp, Homo sapien
tgaagcagggcgtcttcaatcgtct

SEQ ID NO: 2943211 - DNA, 25 bp, Homo sapien
catgcactggccaacatggactaca

SEQ ID NO: 2943212 - DNA, 25 bp, Homo sapien
gaatgtctccaaactacctttccag

SEQ ID NO: 2943213 - DNA, 25 bp, Homo sapien
taaggcagggttaccatcgtatccc

SEQ ID NO: 2943214 - DNA, 25 bp, Homo sapien
tggactacactgtacccacatgcac

SEQ ID NO: 2943215 - DNA, 25 bp, Homo sapien
cacagatttctccagacaccattgt

SEQ ID NO: 2943216 - DNA, 25 bp, Homo sapien
tttctacagcctggtagctcacaga

SEQ ID NO: 2943217 - DNA, 25 bp, Homo sapien
gacaccattgttcagacaggagaaa

SEQ ID NO: 2943218 - DNA, 25 bp, Homo sapien
ctttctaggatttctacagcctggt

SEQ ID NO: 2943219 - DNA, 25 bp, Homo sapien
gtggcttgcctgcagatgttctctg

SEQ ID NO: 2943220 - DNA, 25 bp, Homo sapien
gatgttctctgcctgttttaccata

SEQ ID NO: 2943221 - DNA, 25 bp, Homo sapien
gagactctctcttattatctcttgg

SEQ ID NO: 2943222 - DNA, 25 bp, Homo sapien
cttggctggattgtggcttgcctgc

SEQ ID NO: 2943223 - DNA, 25 bp, Homo sapien
gagtaaacttgttgacaagctgctg

SEQ ID NO: 2943224 - DNA, 25 bp, Homo sapien
tttgctggccagctgaacacatgac

SEQ ID NO: 2943225 - DNA, 25 bp, Homo sapien
tttcggaaggaaagtttgctggcca

SEQ ID NO: 2943226 - DNA, 25 bp, Homo sapien
catgacacaagacggagagtaaact

SEQ ID NO: 2943227 - DNA, 25 bp, Homo sapien
aacttcaggctatttaataactgcc

SEQ ID NO: 2943228 - DNA, 25 bp, Homo sapien
gatggcatctgtcccaattatactt

SEQ ID NO: 2943229 - DNA, 25 bp, Homo sapien
ccaattatactttgggaacagaact

SEQ ID NO: 2943230 - DNA, 25 bp, Homo sapien
ggaggaaaggtgaccagtatgaatg

SEQ ID NO: 2943231 - DNA, 25 bp, Homo sapien
gaaattcaagactgtaatgttgctg

SEQ ID NO: 2943232 - DNA, 25 bp, Homo sapien
tggaggaaattcaagactgtaatgt

SEQ ID NO: 2943233 - DNA, 25 bp, Homo sapien
gaggaaattcaagactgtaatgttg

SEQ ID NO: 2943234 - DNA, 25 bp, Homo sapien
ctggaggaaattcaagactgtaatg

SEQ ID NO: 2943235 - DNA, 25 bp, Homo sapien
ctttagtgtgtagatagcctagagc

SEQ ID NO: 2943236 - DNA, 25 bp, Homo sapien
gagtgggcagattaattcggaagtt

SEQ ID NO: 2943237 - DNA, 25 bp, Homo sapien
taattcggaagttcaaggacttcaa

SEQ ID NO: 2943238 - DNA, 25 bp, Homo sapien
taggagcgtctccacatatgccagg

SEQ ID NO: 2943239 - DNA, 25 bp, Homo sapien
agcctcatggctggaaccaaacagc

SEQ ID NO: 2943240 - DNA, 25 bp, Homo sapien
caacaggctctcatatatgggttca

SEQ ID NO: 2943241 - DNA, 25 bp, Homo sapien
ttcatgcagaagatagaccaggtcg

SEQ ID NO: 2943242 - DNA, 25 bp, Homo sapien
ctgggagtggagttctcaattgaag

SEQ ID NO: 2943243 - DNA, 25 bp, Homo sapien
gcacttgctgcaatgattcctactg

SEQ ID NO: 2943244 - DNA, 25 bp, Homo sapien
ctggctccaacactcatggttttgg

SEQ ID NO: 2943245 - DNA, 25 bp, Homo sapien
tggctccaacactcatggttttgga

SEQ ID NO: 2943246 - DNA, 25 bp, Homo sapien
gctgcaatgattcctactgccaaca

SEQ ID NO: 2943247 - DNA, 25 bp, Homo sapien
tgctggtcctgctcagtggtgcata

SEQ ID NO: 2943248 - DNA, 25 bp, Homo sapien
atgctggtcctgctcagtggtgcat

SEQ ID NO: 2943249 - DNA, 25 bp, Homo sapien
gctggtcctgctcagtggtgcatac

SEQ ID NO: 2943250 - DNA, 25 bp, Homo sapien
catgctggtcctgctcagtggtgca

SEQ ID NO: 2943251 - DNA, 25 bp, Homo sapien
gctcccactccgtgagtcaggattg

SEQ ID NO: 2943252 - DNA, 25 bp, Homo sapien
tcaggattgcataagagaactcagc

SEQ ID NO: 2943253 - DNA, 25 bp, Homo sapien
tgtctccccggagtgttggctccca

SEQ ID NO: 2943254 - DNA, 25 bp, Homo sapien
tagaggaagcaacagtcttcagagc

SEQ ID NO: 2943255 - DNA, 25 bp, Homo sapien
gaaattggcatacaaaatacagttc

SEQ ID NO: 2943256 - DNA, 25 bp, Homo sapien
aaataagcatgaaattggcatacaa

SEQ ID NO: 2943257 - DNA, 25 bp, Homo sapien
gtgcagtgacggatggctgtttata

SEQ ID NO: 2943258 - DNA, 25 bp, Homo sapien
ggcatgagtgcagtgacggatggct

SEQ ID NO: 2943259 - DNA, 25 bp, Homo sapien
gagcccctgattaatactgattgca

SEQ ID NO: 2943260 - DNA, 25 bp, Homo sapien
tagtcaaggtcacccagatagtctg

SEQ ID NO: 2943261 - DNA, 25 bp, Homo sapien
tgccatctatagttgccagccctgg

SEQ ID NO: 2943262 - DNA, 25 bp, Homo sapien
gaatgccgactctgctctgtgttag

SEQ ID NO: 2943263 - DNA, 25 bp, Homo sapien
gaatgtgaccacctagtccttggag

SEQ ID NO: 2943264 - DNA, 25 bp, Homo sapien
tgaatggtcccatgatcaagtccct

SEQ ID NO: 2943265 - DNA, 25 bp, Homo sapien
tccttggagtagaagaatgttgcct

SEQ ID NO: 2943266 - DNA, 25 bp, Homo sapien
tctgaggagcagtggacaaaagctc

SEQ ID NO: 2943267 - DNA, 25 bp, Homo sapien
tatacctgatacatgtagtctgagg

SEQ ID NO: 2943268 - DNA, 25 bp, Homo sapien
tatatacctgatacatgtagtctga

SEQ ID NO: 2943269 - DNA, 25 bp, Homo sapien
tatatatacctgatacatgtagtct

SEQ ID NO: 2943270 - DNA, 25 bp, Homo sapien
ttttatatatacctgatacatgtag

SEQ ID NO: 2943271 - DNA, 25 bp, Homo sapien
cgtgtgaacctaggaaagtcacttc

SEQ ID NO: 2943272 - DNA, 25 bp, Homo sapien
ggtggctgtgtagtctgccacaaac

SEQ ID NO: 2943273 - DNA, 25 bp, Homo sapien
ggaactcacaggtcagcgagaccct

SEQ ID NO: 2943274 - DNA, 25 bp, Homo sapien
tcaagatcctggaccgtgtcaccat

SEQ ID NO: 2943275 - DNA, 25 bp, Homo sapien
gatggtagttctggaggcctcgctc

SEQ ID NO: 2943276 - DNA, 25 bp, Homo sapien
tccgggctcccgaggtgaagagcat

SEQ ID NO: 2943277 - DNA, 25 bp, Homo sapien
aagtcgctgaagacagagcgatggt

SEQ ID NO: 2943278 - DNA, 25 bp, Homo sapien
agtgcctccgcggtagaccggactt

SEQ ID NO: 2943279 - DNA, 25 bp, Homo sapien
atttagagaatagcggagcctcccc

SEQ ID NO: 2943280 - DNA, 25 bp, Homo sapien
tagagaatagcggagcctccccatt

SEQ ID NO: 2943281 - DNA, 25 bp, Homo sapien
aatagcggagcctccccattctctg

SEQ ID NO: 2943282 - DNA, 25 bp, Homo sapien
gaatttagagaatagcggagcctcc

SEQ ID NO: 2943283 - DNA, 25 bp, Homo sapien
gtttgtttgttccgcttcactccag

SEQ ID NO: 2943284 - DNA, 25 bp, Homo sapien
tttgtttgttccgcttcactccagc

SEQ ID NO: 2943285 - DNA, 25 bp, Homo sapien
agatgttagggacagccaagcagga

SEQ ID NO: 2943286 - DNA, 25 bp, Homo sapien
caggactaggtgagaattctttggg

SEQ ID NO: 2943287 - DNA, 25 bp, Homo sapien
tagaagcccgttacttctctatgcg

SEQ ID NO: 2943288 - DNA, 25 bp, Homo sapien
gaaacgcaggactatgaagcagcca

SEQ ID NO: 2943289 - DNA, 25 bp, Homo sapien
tgaggcatggctttggacgctccca

SEQ ID NO: 2943290 - DNA, 25 bp, Homo sapien
tcctgcgaggctgtgcacgtgcgct

SEQ ID NO: 2943291 - DNA, 25 bp, Homo sapien
tgagcctccgagagactcggaaacg

SEQ ID NO: 2943292 - DNA, 25 bp, Homo sapien
cggaaactgcgtcacagccaatcgc

SEQ ID NO: 2943293 - DNA, 25 bp, Homo sapien
ctcgccctcccggctttcgccgctc

SEQ ID NO: 2943294 - DNA, 25 bp, Homo sapien
cgccctcccggctttcgccgctcac

SEQ ID NO: 2943295 - DNA, 25 bp, Homo sapien
tcgccctcccggctttcgccgctca

SEQ ID NO: 2943296 - DNA, 25 bp, Homo sapien
gctcgccctcccggctttcgccgct

SEQ ID NO: 2943297 - DNA, 25 bp, Homo sapien
cgaccgcccttgctggcttactcac

SEQ ID NO: 2943298 - DNA, 25 bp, Homo sapien
ctcgggacccgaccgcccttgctgg

SEQ ID NO: 2943299 - DNA, 25 bp, Homo sapien
tctcggctgacctcgggacccgacc

SEQ ID NO: 2943300 - DNA, 25 bp, Homo sapien
gacccgaccgcccttgctggcttac

SEQ ID NO: 2943301 - DNA, 25 bp, Homo sapien
gggccgtgtccgatcctctggacac

SEQ ID NO: 2943302 - DNA, 25 bp, Homo sapien
cgggccgtgtccgatcctctggaca

SEQ ID NO: 2943303 - DNA, 25 bp, Homo sapien
gccgggccgtgtccgatcctctgga

SEQ ID NO: 2943304 - DNA, 25 bp, Homo sapien
cgggccgggccgtgtccgatcctct

SEQ ID NO: 2943305 - DNA, 25 bp, Homo sapien
gcttcacttcctgatccaccttcag

SEQ ID NO: 2943306 - DNA, 25 bp, Homo sapien
gatccaccttcagcaacgaggccat

SEQ ID NO: 2943307 - DNA, 25 bp, Homo sapien
ttcctgatccaccttcagcaacgag

SEQ ID NO: 2943308 - DNA, 25 bp, Homo sapien
tgagcttcacttcctgatccacctt

SEQ ID NO: 2943309 - DNA, 25 bp, Homo sapien
gtaggaagccggtcagactgctggg

SEQ ID NO: 2943310 - DNA, 25 bp, Homo sapien
acaaagacgccatggggagtaggaa

SEQ ID NO: 2943311 - DNA, 25 bp, Homo sapien
tatccccagggagacaaagacgcca

SEQ ID NO: 2943312 - DNA, 25 bp, Homo sapien
gactgctgggggatcaaagcgaggg

SEQ ID NO: 2943313 - DNA, 25 bp, Homo sapien
tccaacacgtgtccgcggaggtgtc

SEQ ID NO: 2943314 - DNA, 25 bp, Homo sapien
aggtgtccccgggactctccatcat

SEQ ID NO: 2943315 - DNA, 25 bp, Homo sapien
tcatcagacgcggtacagaaagcca

SEQ ID NO: 2943316 - DNA, 25 bp, Homo sapien
cagctgtcacgggcctaaagccctg

SEQ ID NO: 2943317 - DNA, 25 bp, Homo sapien
ctcagaagaacgcagggctttgagg

SEQ ID NO: 2943318 - DNA, 25 bp, Homo sapien
cttgtaactgtaataagaagctgag

SEQ ID NO: 2943319 - DNA, 25 bp, Homo sapien
tctcagaagaacgcagggctttgag

SEQ ID NO: 2943320 - DNA, 25 bp, Homo sapien
cacttgtgatccgctccctgaaaga

SEQ ID NO: 2943321 - DNA, 25 bp, Homo sapien
ttgtgatccgctccctgaaagaatc

SEQ ID NO: 2943322 - DNA, 25 bp, Homo sapien
acttgtgatccgctccctgaaagaa

SEQ ID NO: 2943323 - DNA, 25 bp, Homo sapien
ctcacttgtgatccgctccctgaaa

SEQ ID NO: 2943324 - DNA, 25 bp, Homo sapien
cagaaaactatcaagttctaataac

SEQ ID NO: 2943325 - DNA, 25 bp, Homo sapien
aaaaatttgccaccaagtcttctgc

SEQ ID NO: 2943326 - DNA, 25 bp, Homo sapien
aaaaaatttgccaccaagtcttctg

SEQ ID NO: 2943327 - DNA, 25 bp, Homo sapien
cttcagaaaactatcaagttctaat

SEQ ID NO: 2943328 - DNA, 25 bp, Homo sapien
tcatggctattggtgagaagaatgg

SEQ ID NO: 2943329 - DNA, 25 bp, Homo sapien
taggtcatggatgtttaagattggt

SEQ ID NO: 2943330 - DNA, 25 bp, Homo sapien
tcatgtcagagtggatctgagttag

SEQ ID NO: 2943331 - DNA, 25 bp, Homo sapien
ccatcatggctattggtgagaagaa

SEQ ID NO: 2943332 - DNA, 25 bp, Homo sapien
atccaaccttcgcttcttataagtg

SEQ ID NO: 2943333 - DNA, 25 bp, Homo sapien
ccaaccttcgcttcttataagtggg

SEQ ID NO: 2943334 - DNA, 25 bp, Homo sapien
ctcatccaaccttcgcttcttataa

SEQ ID NO: 2943335 - DNA, 25 bp, Homo sapien
gaaggcttcttcacactcatccaac

SEQ ID NO: 2943336 - DNA, 25 bp, Homo sapien
cattgggcatcacaaacaccttggt

SEQ ID NO: 2943337 - DNA, 25 bp, Homo sapien
aacagccggatctcaggtttcactt

SEQ ID NO: 2943338 - DNA, 25 bp, Homo sapien
tacatttctcaatcaacagccggat

SEQ ID NO: 2943339 - DNA, 25 bp, Homo sapien
tcagcatcccattgggcatcacaaa

SEQ ID NO: 2943340 - DNA, 25 bp, Homo sapien
gtacttggggccggcccataggtca

SEQ ID NO: 2943341 - DNA, 25 bp, Homo sapien
cacccgtacatccactgttttttgc

SEQ ID NO: 2943342 - DNA, 25 bp, Homo sapien
tttgcacttcaggtggggtacttgg

SEQ ID NO: 2943343 - DNA, 25 bp, Homo sapien
cataggtcaccagcctgtgcctcac

SEQ ID NO: 2943344 - DNA, 25 bp, Homo sapien
aacatatatgaggacctttgcctga

SEQ ID NO: 2943345 - DNA, 25 bp, Homo sapien
aaacatatatgaggacctttgcctg

SEQ ID NO: 2943346 - DNA, 25 bp, Homo sapien
tgaatggacaccccaaagttgtttc

SEQ ID NO: 2943347 - DNA, 25 bp, Homo sapien
ctgaatggacaccccaaagttgttt

SEQ ID NO: 2943348 - DNA, 25 bp, Homo sapien
tcaggagctgtacccacattttgac

SEQ ID NO: 2943349 - DNA, 25 bp, Homo sapien
gggaatcaggagctgtacccacatt

SEQ ID NO: 2943350 - DNA, 25 bp, Homo sapien
ctcaacagttcttagctctgcaact

SEQ ID NO: 2943351 - DNA, 25 bp, Homo sapien
tcactctcaacagttcttagctctg

SEQ ID NO: 2943352 - DNA, 25 bp, Homo sapien
actctcaacagttcttagctctgca

SEQ ID NO: 2943353 - DNA, 25 bp, Homo sapien
agcttcactctcaacagttcttagc

SEQ ID NO: 2943354 - DNA, 25 bp, Homo sapien
ctagaaatctggtccagataagatg

SEQ ID NO: 2943355 - DNA, 25 bp, Homo sapien
tagaaatctggtccagataagatgc

SEQ ID NO: 2943356 - DNA, 25 bp, Homo sapien
gatatttagctattttagaaaccaa

SEQ ID NO: 2943357 - DNA, 25 bp, Homo sapien
agaaaccaatttggctcttgtaata

SEQ ID NO: 2943358 - DNA, 25 bp, Homo sapien
ccaatttggctcttgtaatataata

SEQ ID NO: 2943359 - DNA, 25 bp, Homo sapien
gctattttagaaaccaatttggctc

SEQ ID NO: 2943360 - DNA, 25 bp, Homo sapien
tctgatatgatgagccgaaggctga

SEQ ID NO: 2943361 - DNA, 25 bp, Homo sapien
catcaatctctgtcacggtgcggcg

SEQ ID NO: 2943362 - DNA, 25 bp, Homo sapien
ctcagctctgatatgatgagccgaa

SEQ ID NO: 2943363 - DNA, 25 bp, Homo sapien
ctctgtcacggtgcggcgatagtcc

SEQ ID NO: 2943364 - DNA, 25 bp, Homo sapien
aagaagaaattgaagtttaagcttg

SEQ ID NO: 2943365 - DNA, 25 bp, Homo sapien
agaagaaattgaagtttaagcttga

SEQ ID NO: 2943366 - DNA, 25 bp, Homo sapien
agaaattgaagtttaagcttgaaca

SEQ ID NO: 2943367 - DNA, 25 bp, Homo sapien
gaaattgaagtttaagcttgaacaa

SEQ ID NO: 2943368 - DNA, 25 bp, Homo sapien
ggccgtttgatcttctcgatatttt

SEQ ID NO: 2943369 - DNA, 25 bp, Homo sapien
ctccggggccgtttgatcttctcga

SEQ ID NO: 2943370 - DNA, 25 bp, Homo sapien
cagtacagagtctctgcattgctgc

SEQ ID NO: 2943371 - DNA, 25 bp, Homo sapien
tcagtacagagtctctgcattgctg

SEQ ID NO: 2943372 - DNA, 25 bp, Homo sapien
gaaatagaagagttcctgaggcctg

SEQ ID NO: 2943373 - DNA, 25 bp, Homo sapien
gttctccagaaattacgacaggttg

SEQ ID NO: 2943374 - DNA, 25 bp, Homo sapien
acataaagcgcaagacacaggaggg

SEQ ID NO: 2943375 - DNA, 25 bp, Homo sapien
tcggaattgactgaaggcctaaggt

SEQ ID NO: 2943376 - DNA, 25 bp, Homo sapien
aggacgggcccaggacgtttgtctg

SEQ ID NO: 2943377 - DNA, 25 bp, Homo sapien
caggacgtttgtctgggtagatgac

SEQ ID NO: 2943378 - DNA, 25 bp, Homo sapien
acagtatcaggagggaggacgggcc

SEQ ID NO: 2943379 - DNA, 25 bp, Homo sapien
ccaagaggctacagtatcaggaggg

SEQ ID NO: 2943380 - DNA, 25 bp, Homo sapien
gacactaagagtcactggcaggctg

SEQ ID NO: 2943381 - DNA, 25 bp, Homo sapien
tgcaggtatcaactctccagccgtg

SEQ ID NO: 2943382 - DNA, 25 bp, Homo sapien
taaaaatgatgcatccccggtggaa

SEQ ID NO: 2943383 - DNA, 25 bp, Homo sapien
tccagccgtggtagaataaaagagc

SEQ ID NO: 2943384 - DNA, 25 bp, Homo sapien
tacacatggaacgatagcagcctct

SEQ ID NO: 2943385 - DNA, 25 bp, Homo sapien
gcagttcatgggtatcactcgggaa

SEQ ID NO: 2943386 - DNA, 25 bp, Homo sapien
gcaccagggtctgcggctttagaaa

SEQ ID NO: 2943387 - DNA, 25 bp, Homo sapien
taggcagccctccaagtaatttgaa

SEQ ID NO: 2943388 - DNA, 25 bp, Homo sapien
gctgagagctgaaatcagaattcta

SEQ ID NO: 2943389 - DNA, 25 bp, Homo sapien
ggatgctgagagctgaaatcagaat

SEQ ID NO: 2943390 - DNA, 25 bp, Homo sapien
gatgctgagagctgaaatcagaatt

SEQ ID NO: 2943391 - DNA, 25 bp, Homo sapien
gagagctgaaatcagaattctaaca

SEQ ID NO: 2943392 - DNA, 25 bp, Homo sapien
caaagatggtaatgagggacagtgc

SEQ ID NO: 2943393 - DNA, 25 bp, Homo sapien
gctggtcagcaaaacataggccagg

SEQ ID NO: 2943394 - DNA, 25 bp, Homo sapien
tcagcaaaacataggccagggcaaa

SEQ ID NO: 2943395 - DNA, 25 bp, Homo sapien
tgggctggtcagcaaaacataggcc

SEQ ID NO: 2943396 - DNA, 25 bp, Homo sapien
gatacagaggggcagtggggaggct

SEQ ID NO: 2943397 - DNA, 25 bp, Homo sapien
tacagaggggcagtggggaggctgg

SEQ ID NO: 2943398 - DNA, 25 bp, Homo sapien
tgggatacagaggggcagtggggag

SEQ ID NO: 2943399 - DNA, 25 bp, Homo sapien
ctatgggatacagaggggcagtggg

SEQ ID NO: 2943400 - DNA, 25 bp, Homo sapien
atgcagttgtccgagggctgagcct

SEQ ID NO: 2943401 - DNA, 25 bp, Homo sapien
gttgtccaccaaagaggacgatggc

SEQ ID NO: 2943402 - DNA, 25 bp, Homo sapien
ctgggtcagaaagcgcatcacagct

SEQ ID NO: 2943403 - DNA, 25 bp, Homo sapien
gaagatgcagttgtccgagggctga

SEQ ID NO: 2943404 - DNA, 25 bp, Homo sapien
ctgttacggccgagtccaaagctgc

SEQ ID NO: 2943405 - DNA, 25 bp, Homo sapien
tgatataacccgtggcatggacccg

SEQ ID NO: 2943406 - DNA, 25 bp, Homo sapien
gatagatacacactcctggacactg

SEQ ID NO: 2943407 - DNA, 25 bp, Homo sapien
cagcatcgtcttgggtgaatcggca

SEQ ID NO: 2943408 - DNA, 25 bp, Homo sapien
gtcaaaatccaagtatgtcaaagag

SEQ ID NO: 2943409 - DNA, 25 bp, Homo sapien
cacgcacgtgccatgtctttagact

SEQ ID NO: 2943410 - DNA, 25 bp, Homo sapien
cagtgtgtgagtctgtaagttcctt

SEQ ID NO: 2943411 - DNA, 25 bp, Homo sapien
tgcgaacacaagtgcaagtgcatgc

SEQ ID NO: 2943412 - DNA, 25 bp, Homo sapien
tgtagccagtgctccgggttccagg

SEQ ID NO: 2943413 - DNA, 25 bp, Homo sapien
tttaaacaccacgtcttcagctacc

SEQ ID NO: 2943414 - DNA, 25 bp, Homo sapien
cacaggtttaaacaccacgtcttca

SEQ ID NO: 2943415 - DNA, 25 bp, Homo sapien
agccacaggtttaaacaccacgtct

SEQ ID NO: 2943416 - DNA, 25 bp, Homo sapien
gaaaaagctgtcaggtcctcctttc

SEQ ID NO: 2943417 - DNA, 25 bp, Homo sapien
ggtgaccccacgcattagtctggtt

SEQ ID NO: 2943418 - DNA, 25 bp, Homo sapien
tagtctggttgctagccaggtagag

SEQ ID NO: 2943419 - DNA, 25 bp, Homo sapien
caaggaaaaagctgtcaggtcctcc

SEQ ID NO: 2943420 - DNA, 25 bp, Homo sapien
gggtatgtgtatgccaagggggctg

SEQ ID NO: 2943421 - DNA, 25 bp, Homo sapien
gtatgtgtatgccaagggggctgtg

SEQ ID NO: 2943422 - DNA, 25 bp, Homo sapien
caggggtatgtgtatgccaaggggg

SEQ ID NO: 2943423 - DNA, 25 bp, Homo sapien
cactctccaggggtatgtgtatgcc

SEQ ID NO: 2943424 - DNA, 25 bp, Homo sapien
tccagatgtcattctggtgatagat

SEQ ID NO: 2943425 - DNA, 25 bp, Homo sapien
tgaagtcagcaaaggtaactgtggg

SEQ ID NO: 2943426 - DNA, 25 bp, Homo sapien
tctctgggtcaccacaagctggtat

SEQ ID NO: 2943427 - DNA, 25 bp, Homo sapien
tgggtgtccagatgtcattctggtg

SEQ ID NO: 2943428 - DNA, 25 bp, Homo sapien
tcaaagtagacactgccaggggaga

SEQ ID NO: 2943429 - DNA, 25 bp, Homo sapien
atgtcctcggcatggggaatgtgca

SEQ ID NO: 2943430 - DNA, 25 bp, Homo sapien
caggccacaggattgatgctgcaga

SEQ ID NO: 2943431 - DNA, 25 bp, Homo sapien
gagcaagaagccaactctgttcccc

SEQ ID NO: 2943432 - DNA, 25 bp, Homo sapien
tgcacatgcataaagagatgtctga

SEQ ID NO: 2943433 - DNA, 25 bp, Homo sapien
gaaaagtacatgtgcctaaccacgc

SEQ ID NO: 2943434 - DNA, 25 bp, Homo sapien
gagcaggtgtgataaaaacacggag

SEQ ID NO: 2943435 - DNA, 25 bp, Homo sapien
tttctgagtagtaggatttgtgata

SEQ ID NO: 2943436 - DNA, 25 bp, Homo sapien
accaaaggagagcaatgtattctca

SEQ ID NO: 2943437 - DNA, 25 bp, Homo sapien
aatgtattctcacgccagcaagacg

SEQ ID NO: 2943438 - DNA, 25 bp, Homo sapien
ggctcccggactctggctgaggttc

SEQ ID NO: 2943439 - DNA, 25 bp, Homo sapien
tcccggtagtcagatgcctgggact

SEQ ID NO: 2943440 - DNA, 25 bp, Homo sapien
ggaatttccaccatagatggccaag

SEQ ID NO: 2943441 - DNA, 25 bp, Homo sapien
tgatgacggccagaatgaggagcac

SEQ ID NO: 2943442 - DNA, 25 bp, Homo sapien
gaatcgtatttctatggccccactg

SEQ ID NO: 2943443 - DNA, 25 bp, Homo sapien
tgagcaaggtggacatagatctgac

SEQ ID NO: 2943444 - DNA, 25 bp, Homo sapien
gaggaatgccgagctgatgtagccc

SEQ ID NO: 2943445 - DNA, 25 bp, Homo sapien
tcccagtagcaccaaagaggaatgc

SEQ ID NO: 2943446 - DNA, 25 bp, Homo sapien
ttggttcccgtacttcccagtagca

SEQ ID NO: 2943447 - DNA, 25 bp, Homo sapien
cccagtagcaccaaagaggaatgcc

SEQ ID NO: 2943448 - DNA, 25 bp, Homo sapien
cgcagacagacaaaccactgactgg

SEQ ID NO: 2943449 - DNA, 25 bp, Homo sapien
gacaaaccactgactggcctgtcct

SEQ ID NO: 2943450 - DNA, 25 bp, Homo sapien
tcctgtgagaggagcatggcctagg

SEQ ID NO: 2943451 - DNA, 25 bp, Homo sapien
gctttccacgcagacagacaaacca

SEQ ID NO: 2943452 - DNA, 25 bp, Homo sapien
agcccagaactgagtgtgcccctcc

SEQ ID NO: 2943453 - DNA, 25 bp, Homo sapien
gggagggcctgtcaggcaactgccc

SEQ ID NO: 2943454 - DNA, 25 bp, Homo sapien
cctccaatcctttagccaaagctgt

SEQ ID NO: 2943455 - DNA, 25 bp, Homo sapien
ccctctccccaggatacctccaatc

SEQ ID NO: 2943456 - DNA, 25 bp, Homo sapien
gaagcctctcgccatggagctgttt

SEQ ID NO: 2943457 - DNA, 25 bp, Homo sapien
cctctcgccatggagctgttttggg

SEQ ID NO: 2943458 - DNA, 25 bp, Homo sapien
tacaggtagcgaggggtggcgcttc

SEQ ID NO: 2943459 - DNA, 25 bp, Homo sapien
ggtggcgcttcccacgaggaaggcg

SEQ ID NO: 2943460 - DNA, 25 bp, Homo sapien
tcattctgattgaaaacgctgctgc

SEQ ID NO: 2943461 - DNA, 25 bp, Homo sapien
attgaaaacgctgctgctactgggc

SEQ ID NO: 2943462 - DNA, 25 bp, Homo sapien
agggtcattctgattgaaaacgctg

SEQ ID NO: 2943463 - DNA, 25 bp, Homo sapien
ttctgattgaaaacgctgctgctac

SEQ ID NO: 2943464 - DNA, 25 bp, Homo sapien
catgtgggatatgcagaaaaccagc

SEQ ID NO: 2943465 - DNA, 25 bp, Homo sapien
atggagtcggcagagtagaaggagg

SEQ ID NO: 2943466 - DNA, 25 bp, Homo sapien
cacagtcactgtgttaggaatgtcc

SEQ ID NO: 2943467 - DNA, 25 bp, Homo sapien
cactgtgttaggaatgtcctctgca

SEQ ID NO: 2943468 - DNA, 25 bp, Homo sapien
cctggggcaggcaagctagggggtt

SEQ ID NO: 2943469 - DNA, 25 bp, Homo sapien
gcctggggcaggcaagctagggggt

SEQ ID NO: 2943470 - DNA, 25 bp, Homo sapien
cagcctggggcaggcaagctagggg

SEQ ID NO: 2943471 - DNA, 25 bp, Homo sapien
tggggcaggcaagctagggggttga

SEQ ID NO: 2943472 - DNA, 25 bp, Homo sapien
gagaaggcagggaggtcgggggcac

SEQ ID NO: 2943473 - DNA, 25 bp, Homo sapien
ctagttgtgagagaagcccccgtgg

SEQ ID NO: 2943474 - DNA, 25 bp, Homo sapien
agaagcccccgtgggagaaggcagg

SEQ ID NO: 2943475 - DNA, 25 bp, Homo sapien
gagagaagcccccgtgggagaaggc

SEQ ID NO: 2943476 - DNA, 25 bp, Homo sapien
cagctcagctatggacttgcaggac

SEQ ID NO: 2943477 - DNA, 25 bp, Homo sapien
gctgttgcagaatacagagccctgg

SEQ ID NO: 2943478 - DNA, 25 bp, Homo sapien
gtacagctggcatcaacaaggttca

SEQ ID NO: 2943479 - DNA, 25 bp, Homo sapien
cctgaatgtgattggacagcccctc

SEQ ID NO: 2943480 - DNA, 25 bp, Homo sapien
ggcaactaaattccagtgaacaaga

SEQ ID NO: 2943481 - DNA, 25 bp, Homo sapien
gatggtgcaagtagccataagaaag

SEQ ID NO: 2943482 - DNA, 25 bp, Homo sapien
cccagcactgatgatggtgcaagta

SEQ ID NO: 2943483 - DNA, 25 bp, Homo sapien
acaaacactttggtctggagatggg

SEQ ID NO: 2943484 - DNA, 25 bp, Homo sapien
tagacaatgataaacagatagagag

SEQ ID NO: 2943485 - DNA, 25 bp, Homo sapien
cagatagagaggacctgggtgcagg

SEQ ID NO: 2943486 - DNA, 25 bp, Homo sapien
aaacagatagagaggacctgggtgc

SEQ ID NO: 2943487 - DNA, 25 bp, Homo sapien
atagacaatgataaacagatagaga

SEQ ID NO: 2943488 - DNA, 25 bp, Homo sapien
ctgggtcgtcttcaggctcttggtt

SEQ ID NO: 2943489 - DNA, 25 bp, Homo sapien
agctcctgggtcgtcttcaggctct

SEQ ID NO: 2943490 - DNA, 25 bp, Homo sapien
tcctgggtcgtcttcaggctcttgg

SEQ ID NO: 2943491 - DNA, 25 bp, Homo sapien
agctaaagctcctgggtcgtcttca

SEQ ID NO: 2943492 - DNA, 25 bp, Homo sapien
ccagaacactaaacagggacaaaat

SEQ ID NO: 2943493 - DNA, 25 bp, Homo sapien
cactaaacagggacaaaataatgaa

SEQ ID NO: 2943494 - DNA, 25 bp, Homo sapien
ctaaacagggacaaaataatgaaga

SEQ ID NO: 2943495 - DNA, 25 bp, Homo sapien
ctgtcaccagaacactaaacaggga

SEQ ID NO: 2943496 - DNA, 25 bp, Homo sapien
tcagcttacattccctctcacctcc

SEQ ID NO: 2943497 - DNA, 25 bp, Homo sapien
tggttcagcttacattccctctcac

SEQ ID NO: 2943498 - DNA, 25 bp, Homo sapien
ctggttcagcttacattccctctca

SEQ ID NO: 2943499 - DNA, 25 bp, Homo sapien
gttcagcttacattccctctcacct

SEQ ID NO: 2943500 - DNA, 25 bp, Homo sapien
aagacacagttgtccgagggctggg

SEQ ID NO: 2943501 - DNA, 25 bp, Homo sapien
acacagttgtccgagggctgggcct

SEQ ID NO: 2943502 - DNA, 25 bp, Homo sapien
agacacagttgtccgagggctgggc

SEQ ID NO: 2943503 - DNA, 25 bp, Homo sapien
gaagacacagttgtccgagggctgg

SEQ ID NO: 2943504 - DNA, 25 bp, Homo sapien
tatgtccaggtactcttggaacaac

SEQ ID NO: 2943505 - DNA, 25 bp, Homo sapien
ctatgtccaggtactcttggaacaa

SEQ ID NO: 2943506 - DNA, 25 bp, Homo sapien
cacggggagccgtggtcattgtcac

SEQ ID NO: 2943507 - DNA, 25 bp, Homo sapien
gtggcccggtcccctgattgcagac

SEQ ID NO: 2943508 - DNA, 25 bp, Homo sapien
gcaggaagaacccagcgcccgagat

SEQ ID NO: 2943509 - DNA, 25 bp, Homo sapien
ctccaagcccacgtggtgcaggaag

SEQ ID NO: 2943510 - DNA, 25 bp, Homo sapien
tccaagcccacgtggtgcaggaaga

SEQ ID NO: 2943511 - DNA, 25 bp, Homo sapien
cccagcgcccgagatgttgtagtag

SEQ ID NO: 2943512 - DNA, 25 bp, Homo sapien
ccttctggatagtccagcgggcagg

SEQ ID NO: 2943513 - DNA, 25 bp, Homo sapien
agcaccacattcaccaggccggcct

SEQ ID NO: 2943514 - DNA, 25 bp, Homo sapien
tagtagcggccttgatagaacacct

SEQ ID NO: 2943515 - DNA, 25 bp, Homo sapien
gatagaacaccttctggatagtcca

SEQ ID NO: 2943516 - DNA, 25 bp, Homo sapien
ggcacaggggacttcagggaccagg

SEQ ID NO: 2943517 - DNA, 25 bp, Homo sapien
gcacaggggacttcagggaccagga

SEQ ID NO: 2943518 - DNA, 25 bp, Homo sapien
cacaggggacttcagggaccaggac

SEQ ID NO: 2943519 - DNA, 25 bp, Homo sapien
ggggcacaggggacttcagggacca

SEQ ID NO: 2943520 - DNA, 25 bp, Homo sapien
tggggatggaactgcagagggggag

SEQ ID NO: 2943521 - DNA, 25 bp, Homo sapien
cttggggatggaactgcagaggggg

SEQ ID NO: 2943522 - DNA, 25 bp, Homo sapien
ttggggatggaactgcagaggggga

SEQ ID NO: 2943523 - DNA, 25 bp, Homo sapien
ccagtccacgtaggtggccaggtag

SEQ ID NO: 2943524 - DNA, 25 bp, Homo sapien
caaatatacaaaaggcatcgcgtat

SEQ ID NO: 2943525 - DNA, 25 bp, Homo sapien
ccggcttcgtagagcagaaggagaa

SEQ ID NO: 2943526 - DNA, 25 bp, Homo sapien
caaagccactatctatgtaccggct

SEQ ID NO: 2943527 - DNA, 25 bp, Homo sapien
tctgatttctatggccccattaggg

SEQ ID NO: 2943528 - DNA, 25 bp, Homo sapien
tgctgagctgatgtagccggtggtg

SEQ ID NO: 2943529 - DNA, 25 bp, Homo sapien
ggtgtggagtctgatttctatggcc

SEQ ID NO: 2943530 - DNA, 25 bp, Homo sapien
tttgtttccatacctctgggcagca

SEQ ID NO: 2943531 - DNA, 25 bp, Homo sapien
ccctccagcacttttgcctctgcca

SEQ ID NO: 2943532 - DNA, 25 bp, Homo sapien
cctccagcacttttgcctctgccag

SEQ ID NO: 2943533 - DNA, 25 bp, Homo sapien
ttttgcctctgccaggatgccttac

SEQ ID NO: 2943534 - DNA, 25 bp, Homo sapien
cacttttgcctctgccaggatgcct

SEQ ID NO: 2943535 - DNA, 25 bp, Homo sapien
aacttttaaagctaggcatggagac

SEQ ID NO: 2943536 - DNA, 25 bp, Homo sapien
tttaaagctaggcatggagacttca

SEQ ID NO: 2943537 - DNA, 25 bp, Homo sapien
caaagtcttgttcagtcacgcagga

SEQ ID NO: 2943538 - DNA, 25 bp, Homo sapien
tctataatcacagaggtaatttttt

SEQ ID NO: 2943539 - DNA, 25 bp, Homo sapien
gggaagatgtagctcaatgaataaa

SEQ ID NO: 2943540 - DNA, 25 bp, Homo sapien
tcaagagatctattggactgggcat

SEQ ID NO: 2943541 - DNA, 25 bp, Homo sapien
gatgtagctcaatgaataaaaaatt

SEQ ID NO: 2943542 - DNA, 25 bp, Homo sapien
agagatctattggactgggcatggt

SEQ ID NO: 2943543 - DNA, 25 bp, Homo sapien
gacaaaggccatatcctcggcccag

SEQ ID NO: 2943544 - DNA, 25 bp, Homo sapien
aggtagcgaggggtggcgcctccca

SEQ ID NO: 2943545 - DNA, 25 bp, Homo sapien
gggaaggtggcttgctcctctgtct

SEQ ID NO: 2943546 - DNA, 25 bp, Homo sapien
tctgcatctggtgctcagggctcca

SEQ ID NO: 2943547 - DNA, 25 bp, Homo sapien
tccccagaaaagctgcgcacctgga

SEQ ID NO: 2943548 - DNA, 25 bp, Homo sapien
ctctctccacggagctgttctgggg

SEQ ID NO: 2943549 - DNA, 25 bp, Homo sapien
ccccagctgaagcctctctccacgg

SEQ ID NO: 2943550 - DNA, 25 bp, Homo sapien
ccccagaaaagctgcgcacctggat

SEQ ID NO: 2943551 - DNA, 25 bp, Homo sapien
ttttattagacctacaagttcgtca

SEQ ID NO: 2943552 - DNA, 25 bp, Homo sapien
gttcgtcaactgtcccactgcctga

SEQ ID NO: 2943553 - DNA, 25 bp, Homo sapien
tagacctacaagttcgtcaactgtc

SEQ ID NO: 2943554 - DNA, 25 bp, Homo sapien
aactgtcccactgcctgaagctgca

SEQ ID NO: 2943555 - DNA, 25 bp, Homo sapien
tccaagggtcattcaaattgtagat

SEQ ID NO: 2943556 - DNA, 25 bp, Homo sapien
cctccttccgctgggttaccaccag

SEQ ID NO: 2943557 - DNA, 25 bp, Homo sapien
gatgctggtgctactaggttcctcc

SEQ ID NO: 2943558 - DNA, 25 bp, Homo sapien
tggtctcattgttgatgaagtcagt

SEQ ID NO: 2943559 - DNA, 25 bp, Homo sapien
tcttcgtcaaagaagttgtagggtc

SEQ ID NO: 2943560 - DNA, 25 bp, Homo sapien
cctggggcaggcaagctagggggtt

SEQ ID NO: 2943561 - DNA, 25 bp, Homo sapien
gcctggggcaggcaagctagggggt

SEQ ID NO: 2943562 - DNA, 25 bp, Homo sapien
cagcctggggcaggcaagctagggg

SEQ ID NO: 2943563 - DNA, 25 bp, Homo sapien
tggggcaggcaagctagggggttga

SEQ ID NO: 2943564 - DNA, 25 bp, Homo sapien
gagagaagcccccgtgggagaaggc

SEQ ID NO: 2943565 - DNA, 25 bp, Homo sapien
ctagttgtgagagaagcccccgtgg

SEQ ID NO: 2943566 - DNA, 25 bp, Homo sapien
gagaaggcagggaggtcgggggcac

SEQ ID NO: 2943567 - DNA, 25 bp, Homo sapien
agaagcccccgtgggagaaggcagg

SEQ ID NO: 2943568 - DNA, 25 bp, Homo sapien
agcacagctggcatcaacaaagctg

SEQ ID NO: 2943569 - DNA, 25 bp, Homo sapien
ctggatgggaactcagcacagctgg

SEQ ID NO: 2943570 - DNA, 25 bp, Homo sapien
ctctggatgggaactcagcacagct

SEQ ID NO: 2943571 - DNA, 25 bp, Homo sapien
tggcatcaacaaagctgactgtccc

SEQ ID NO: 2943572 - DNA, 25 bp, Homo sapien
ttaagaaaaccaggagtggtctgga

SEQ ID NO: 2943573 - DNA, 25 bp, Homo sapien
cacccggctgaaattgtatacttta

SEQ ID NO: 2943574 - DNA, 25 bp, Homo sapien
tgcacccggctgaaattgtatactt

SEQ ID NO: 2943575 - DNA, 25 bp, Homo sapien
ctgttaagaaaaccaggagtggtct

SEQ ID NO: 2943576 - DNA, 25 bp, Homo sapien
ggccactcgcctgggccaaggtggc

SEQ ID NO: 2943577 - DNA, 25 bp, Homo sapien
tgggccactcgcctgggccaaggtg

SEQ ID NO: 2943578 - DNA, 25 bp, Homo sapien
ggtgtgggccactcgcctgggccaa

SEQ ID NO: 2943579 - DNA, 25 bp, Homo sapien
tgggccaaggtggcaaattttatgt

SEQ ID NO: 2943580 - DNA, 25 bp, Homo sapien
gaattggacccaaatctgcacccta

SEQ ID NO: 2943581 - DNA, 25 bp, Homo sapien
tccaggcagttctcaagggaaccac

SEQ ID NO: 2943582 - DNA, 25 bp, Homo sapien
tgtggacgccacatactgggtaagt

SEQ ID NO: 2943583 - DNA, 25 bp, Homo sapien
catttgcatgccaactcctgatggg

SEQ ID NO: 2943584 - DNA, 25 bp, Homo sapien
ccttggtcagcaagtgagccacagc

SEQ ID NO: 2943585 - DNA, 25 bp, Homo sapien
tccccatctccgcatctggagaagc

SEQ ID NO: 2943586 - DNA, 25 bp, Homo sapien
cctccttggtcagcaagtgagccac

SEQ ID NO: 2943587 - DNA, 25 bp, Homo sapien
tggggggccgtatggcatcctcctt

SEQ ID NO: 2943588 - DNA, 25 bp, Homo sapien
cgaacaagtttatttgcagacgaga

SEQ ID NO: 2943589 - DNA, 25 bp, Homo sapien
cccacaactagaaatccagaggctt

SEQ ID NO: 2943590 - DNA, 25 bp, Homo sapien
tcccagggcaaggttgactcattca

SEQ ID NO: 2943591 - DNA, 25 bp, Homo sapien
gccaggaagtacagtctggtctgct

SEQ ID NO: 2943592 - DNA, 25 bp, Homo sapien
aatgattaaaacatcctccaggagg

SEQ ID NO: 2943593 - DNA, 25 bp, Homo sapien
ccaggaggtatgacctggagtctcc

SEQ ID NO: 2943594 - DNA, 25 bp, Homo sapien
actccagttgtccttgactgcatgg

SEQ ID NO: 2943595 - DNA, 25 bp, Homo sapien
gactgcatggtttctgctggtccaa

SEQ ID NO: 2943596 - DNA, 25 bp, Homo sapien
aggcttggtggtgattgctctgcta

SEQ ID NO: 2943597 - DNA, 25 bp, Homo sapien
caggcttggtggtgattgctctgct

SEQ ID NO: 2943598 - DNA, 25 bp, Homo sapien
taaagacgaggttgagccagtctcc

SEQ ID NO: 2943599 - DNA, 25 bp, Homo sapien
gaggtaatgtgttgactggatccca

SEQ ID NO: 2943600 - DNA, 25 bp, Homo sapien
tacccaaaggagtttaatgcccaca

SEQ ID NO: 2943601 - DNA, 25 bp, Homo sapien
ttcctgaggtctgcgatcacggaca

SEQ ID NO: 2943602 - DNA, 25 bp, Homo sapien
ttatcaggggcacggaagtgttgct

SEQ ID NO: 2943603 - DNA, 25 bp, Homo sapien
gttacagggaactgctttatcaggg

SEQ ID NO: 2943604 - DNA, 25 bp, Homo sapien
aaaacccaccagtatggacgctgtc

SEQ ID NO: 2943605 - DNA, 25 bp, Homo sapien
tgtagtagtcagtatccaaaaccca

SEQ ID NO: 2943606 - DNA, 25 bp, Homo sapien
ccataacaggtaaacgaggtccact

SEQ ID NO: 2943607 - DNA, 25 bp, Homo sapien
aaaggaatggctctcctcatgtccc

SEQ ID NO: 2943608 - DNA, 25 bp, Homo sapien
tttgtgccaattgaagagcatgaca

SEQ ID NO: 2943609 - DNA, 25 bp, Homo sapien
aatactactgtgctattcaggaaag

SEQ ID NO: 2943610 - DNA, 25 bp, Homo sapien
tgagagcaaataactaagggacctt

SEQ ID NO: 2943611 - DNA, 25 bp, Homo sapien
taaatgcgtggtctgtgagagcaaa

SEQ ID NO: 2943612 - DNA, 25 bp, Homo sapien
gaacagtgtatagctcccagtaggt

SEQ ID NO: 2943613 - DNA, 25 bp, Homo sapien
tgacagaggtatccctagcacatag

SEQ ID NO: 2943614 - DNA, 25 bp, Homo sapien
tgagccttagctactctacctaagg

SEQ ID NO: 2943615 - DNA, 25 bp, Homo sapien
tttcagggagaaattcatccttgat

SEQ ID NO: 2943616 - DNA, 25 bp, Homo sapien
tacctaaggagcagagataataatt

SEQ ID NO: 2943617 - DNA, 25 bp, Homo sapien
taatttgcttctattaagacagagg

SEQ ID NO: 2943618 - DNA, 25 bp, Homo sapien
caaagaatcagcatactgggcgtac

SEQ ID NO: 2943619 - DNA, 25 bp, Homo sapien
tgggcgtacaattacaaactgatct

SEQ ID NO: 2943620 - DNA, 25 bp, Homo sapien
tgcacactctgttctggctacactg

SEQ ID NO: 2943621 - DNA, 25 bp, Homo sapien
tgaccacgctatttaaccctgcttg

SEQ ID NO: 2943622 - DNA, 25 bp, Homo sapien
tgtaggtcggctttatctttccctg

SEQ ID NO: 2943623 - DNA, 25 bp, Homo sapien
aaagatggaaagagtagatgtgacc

SEQ ID NO: 2943624 - DNA, 25 bp, Homo sapien
atcacgtagtatacacctgctgtgc

SEQ ID NO: 2943625 - DNA, 25 bp, Homo sapien
cgaaatctgtaggtcggctttatct

SEQ ID NO: 2943626 - DNA, 25 bp, Homo sapien
tgagcagcaaggtagattcgtgaca

SEQ ID NO: 2943627 - DNA, 25 bp, Homo sapien
aggaaaatgagcagcaaggtagatt

SEQ ID NO: 2943628 - DNA, 25 bp, Homo sapien
caaggtagattcgtgacagacagac

SEQ ID NO: 2943629 - DNA, 25 bp, Homo sapien
agcccagaatcccaaccacaaaatg

SEQ ID NO: 2943630 - DNA, 25 bp, Homo sapien
tttcctaccaggaggtcctcctatc

SEQ ID NO: 2943631 - DNA, 25 bp, Homo sapien
ggaggtcctcctatctctacttgaa

SEQ ID NO: 2943632 - DNA, 25 bp, Homo sapien
ggtcctcctatctctacttgaaata

SEQ ID NO: 2943633 - DNA, 25 bp, Homo sapien
taccaggaggtcctcctatctctac

SEQ ID NO: 2943634 - DNA, 25 bp, Homo sapien
gacatgccatccgttctgcgactgt

SEQ ID NO: 2943635 - DNA, 25 bp, Homo sapien
tgccatccgttctgcgactgtggaa

SEQ ID NO: 2943636 - DNA, 25 bp, Homo sapien
tgggtgacatgccatccgttctgcg

SEQ ID NO: 2943637 - DNA, 25 bp, Homo sapien
gtgacatgccatccgttctgcgact

SEQ ID NO: 2943638 - DNA, 25 bp, Homo sapien
tcccttgagcagcagataaaatccg

SEQ ID NO: 2943639 - DNA, 25 bp, Homo sapien
gggcactaccgcactcttgcagaag

SEQ ID NO: 2943640 - DNA, 25 bp, Homo sapien
aaatccgatggcgaagctgaacagg

SEQ ID NO: 2943641 - DNA, 25 bp, Homo sapien
tagaagaccagctcgacttgggatg

SEQ ID NO: 2943642 - DNA, 25 bp, Homo sapien
gagtcgccctctagccttctgaaga

SEQ ID NO: 2943643 - DNA, 25 bp, Homo sapien
gagctggccctacctggaagtcttg

SEQ ID NO: 2943644 - DNA, 25 bp, Homo sapien
cacatgggaataagccaggcgaccc

SEQ ID NO: 2943645 - DNA, 25 bp, Homo sapien
gattgtaaaagaggaccacctgagc

SEQ ID NO: 2943646 - DNA, 25 bp, Homo sapien
cattgcatctaaaatatagtaatta

SEQ ID NO: 2943647 - DNA, 25 bp, Homo sapien
gatcacattgcatctaaaatatagt

SEQ ID NO: 2943648 - DNA, 25 bp, Homo sapien
cacattgcatctaaaatatagtaat

SEQ ID NO: 2943649 - DNA, 25 bp, Homo sapien
tcacattgcatctaaaatatagtaa

SEQ ID NO: 2943650 - DNA, 25 bp, Homo sapien
ttaatttgatagtgaccctgcccat

SEQ ID NO: 2943651 - DNA, 25 bp, Homo sapien
tttatgtgctcaactctgcctgtgc

SEQ ID NO: 2943652 - DNA, 25 bp, Homo sapien
taatgggactctcggtcaactcaag

SEQ ID NO: 2943653 - DNA, 25 bp, Homo sapien
gagaaacctgcaatagctcccttga

SEQ ID NO: 2943654 - DNA, 25 bp, Homo sapien
tcttccctgaatatacagactccgg

SEQ ID NO: 2943655 - DNA, 25 bp, Homo sapien
cagactccggagttcaggtgtgaaa

SEQ ID NO: 2943656 - DNA, 25 bp, Homo sapien
tgtgaaatagcggagcttaccctca

SEQ ID NO: 2943657 - DNA, 25 bp, Homo sapien
taagcagtagggttcagttcagaca

SEQ ID NO: 2943658 - DNA, 25 bp, Homo sapien
ggccacatattgtaggagtctattt

SEQ ID NO: 2943659 - DNA, 25 bp, Homo sapien
aggccacatattgtaggagtctatt

SEQ ID NO: 2943660 - DNA, 25 bp, Homo sapien
tcattatttggagacaggcttttgc

SEQ ID NO: 2943661 - DNA, 25 bp, Homo sapien
attcattatttggagacaggctttt

SEQ ID NO: 2943662 - DNA, 25 bp, Homo sapien
tcattcattatttggagacaggctt

SEQ ID NO: 2943663 - DNA, 25 bp, Homo sapien
attcattcattatttggagacaggc

SEQ ID NO: 2943664 - DNA, 25 bp, Homo sapien
tattcacacaaacaggccttacagc

SEQ ID NO: 2943665 - DNA, 25 bp, Homo sapien
tcttggttccctgatggaagtgact

SEQ ID NO: 2943666 - DNA, 25 bp, Homo sapien
catataaccagaaggctatttagcc

SEQ ID NO: 2943667 - DNA, 25 bp, Homo sapien
attagactttgagcttcgaattgcc

SEQ ID NO: 2943668 - DNA, 25 bp, Homo sapien
tttgtataggtagggtcttgccatg

SEQ ID NO: 2943669 - DNA, 25 bp, Homo sapien
cgcctccctcgacctcccaaaagtg

SEQ ID NO: 2943670 - DNA, 25 bp, Homo sapien
cctccgcatctcaagttcaagtgat

SEQ ID NO: 2943671 - DNA, 25 bp, Homo sapien
ctggaattataggcatgagccactg

SEQ ID NO: 2943672 - DNA, 25 bp, Homo sapien
gctggctggaaaactagcttcttgc

SEQ ID NO: 2943673 - DNA, 25 bp, Homo sapien
tgatggagcagaatgagaccattcc

SEQ ID NO: 2943674 - DNA, 25 bp, Homo sapien
ctgagttgaactgttctgagggcaa

SEQ ID NO: 2943675 - DNA, 25 bp, Homo sapien
caataattatggaatgagaagagca

SEQ ID NO: 2943676 - DNA, 25 bp, Homo sapien
catttccagtttgacagttgaaggt

SEQ ID NO: 2943677 - DNA, 25 bp, Homo sapien
catttaattcacatcatgggcatgt

SEQ ID NO: 2943678 - DNA, 25 bp, Homo sapien
ggtgcacataaccatacccgtccaa

SEQ ID NO: 2943679 - DNA, 25 bp, Homo sapien
ggagagcccaggctactcagctcac

SEQ ID NO: 2943680 - DNA, 25 bp, Homo sapien
tcgctctccgttcgctcccaggctt

SEQ ID NO: 2943681 - DNA, 25 bp, Homo sapien
gtcgctctccgttcgctcccaggct

SEQ ID NO: 2943682 - DNA, 25 bp, Homo sapien
gctctccgttcgctcccaggcttct

SEQ ID NO: 2943683 - DNA, 25 bp, Homo sapien
cgctctccgttcgctcccaggcttc

SEQ ID NO: 2943684 - DNA, 25 bp, Homo sapien
cgtgagtcaccgcgctcggcctttt

SEQ ID NO: 2943685 - DNA, 25 bp, Homo sapien
atctctgctcactgcaaccccgcct

SEQ ID NO: 2943686 - DNA, 25 bp, Homo sapien
tctctgctcactgcaaccccgcctc

SEQ ID NO: 2943687 - DNA, 25 bp, Homo sapien
tgagtcaccgcgctcggcctttttt

SEQ ID NO: 2943688 - DNA, 25 bp, Homo sapien
cttagaagctgggatgtaatcccag

SEQ ID NO: 2943689 - DNA, 25 bp, Homo sapien
tccttagaagctgggatgtaatccc

SEQ ID NO: 2943690 - DNA, 25 bp, Homo sapien
gacgtagtctcgctgggttacccag

SEQ ID NO: 2943691 - DNA, 25 bp, Homo sapien
acgtagtctcgctgggttacccagg

SEQ ID NO: 2943692 - DNA, 25 bp, Homo sapien
atagaaatctctactatgtgtgcat

SEQ ID NO: 2943693 - DNA, 25 bp, Homo sapien
tcttgtacttattcctcctggtggc

SEQ ID NO: 2943694 - DNA, 25 bp, Homo sapien
ttctccctctagtaaccaagctggg

SEQ ID NO: 2943695 - DNA, 25 bp, Homo sapien
gattataataaatctctaggaactg

SEQ ID NO: 2943696 - DNA, 25 bp, Homo sapien
tcaagcaattttgtctcatcctcct

SEQ ID NO: 2943697 - DNA, 25 bp, Homo sapien
agcaattttgtctcatcctcctgag

SEQ ID NO: 2943698 - DNA, 25 bp, Homo sapien
catgcctggcctgtgtgtgtggttt

SEQ ID NO: 2943699 - DNA, 25 bp, Homo sapien
tggagtgcagtagctccctgcaacc

SEQ ID NO: 2943700 - DNA, 25 bp, Homo sapien
tgagcgcctattgtgaatcagacac

SEQ ID NO: 2943701 - DNA, 25 bp, Homo sapien
cactgagcagtaagcgtcggagaaa

SEQ ID NO: 2943702 - DNA, 25 bp, Homo sapien
cctgtgtgtagcgtctagggcagcc

SEQ ID NO: 2943703 - DNA, 25 bp, Homo sapien
tctccagagtgcagatcccttggct

SEQ ID NO: 2943704 - DNA, 25 bp, Homo sapien
aagtcttcgagctcccgcagaaggc

SEQ ID NO: 2943705 - DNA, 25 bp, Homo sapien
tgcacctgcgcgaagtgcgaggaca

SEQ ID NO: 2943706 - DNA, 25 bp, Homo sapien
tcgcctcttctaaaaacgcggttgc

SEQ ID NO: 2943707 - DNA, 25 bp, Homo sapien
tcgtaacctaggacgtgagggcagc

SEQ ID NO: 2943708 - DNA, 25 bp, Homo sapien
tcagggtggtaaagtcttgtcaacg

SEQ ID NO: 2943709 - DNA, 25 bp, Homo sapien
taagttttgctgactagtgactcct

SEQ ID NO: 2943710 - DNA, 25 bp, Homo sapien
ggctgcgtcttaaactagaagtcta

SEQ ID NO: 2943711 - DNA, 25 bp, Homo sapien
cggtacttaccaagccctgaagaag

SEQ ID NO: 2943712 - DNA, 25 bp, Homo sapien
cagcgagtcataactgccctcttga

SEQ ID NO: 2943713 - DNA, 25 bp, Homo sapien
gccctcttgataggcaaacgtttcc

SEQ ID NO: 2943714 - DNA, 25 bp, Homo sapien
tgagctgcagtatcagttctttctg

SEQ ID NO: 2943715 - DNA, 25 bp, Homo sapien
tccaacaccacggactgtggcagcg

SEQ ID NO: 2943716 - DNA, 25 bp, Homo sapien
tttctttattaactcatctatgatc

SEQ ID NO: 2943717 - DNA, 25 bp, Homo sapien
ttctttattaactcatctatgatca

SEQ ID NO: 2943718 - DNA, 25 bp, Homo sapien
tctttattaactcatctatgatcac

SEQ ID NO: 2943719 - DNA, 25 bp, Homo sapien
tgcatctacacgctgacgaagctct

SEQ ID NO: 2943720 - DNA, 25 bp, Homo sapien
tgagccactgctgcatctacacgct

SEQ ID NO: 2943721 - DNA, 25 bp, Homo sapien
caaggtctcggatctgagttttcag

SEQ ID NO: 2943722 - DNA, 25 bp, Homo sapien
ggatgaagttgataaacatctcaag

SEQ ID NO: 2943723 - DNA, 25 bp, Homo sapien
ctgtttcctggaggcgttctgctgc

SEQ ID NO: 2943724 - DNA, 25 bp, Homo sapien
gctgtttcctggaggcgttctgctg

SEQ ID NO: 2943725 - DNA, 25 bp, Homo sapien
ttcccaccggccttgcactcacagt

SEQ ID NO: 2943726 - DNA, 25 bp, Homo sapien
actcacagtgtccaccacctgtctg

SEQ ID NO: 2943727 - DNA, 25 bp, Homo sapien
ctaacagcaaagatctggagcacgg

SEQ ID NO: 2943728 - DNA, 25 bp, Homo sapien
gggattccacataagcacggccgtt

SEQ ID NO: 2943729 - DNA, 25 bp, Homo sapien
tgtgccatgtagctccagggctggt

SEQ ID NO: 2943730 - DNA, 25 bp, Homo sapien
cacggccgttcttagcatggtagta

SEQ ID NO: 2943731 - DNA, 25 bp, Homo sapien
catctatccctactgaacaaggagc

SEQ ID NO: 2943732 - DNA, 25 bp, Homo sapien
tcatttggccgactgcctgagcagg

SEQ ID NO: 2943733 - DNA, 25 bp, Homo sapien
tctttccgagagctaagttggtggg

SEQ ID NO: 2943734 - DNA, 25 bp, Homo sapien
gattccttgctcctatgctagaaga

SEQ ID NO: 2943735 - DNA, 25 bp, Homo sapien
cacaagtgcccacacgtatactgtg

SEQ ID NO: 2943736 - DNA, 25 bp, Homo sapien
tggcctgattcctttaatacaggct

SEQ ID NO: 2943737 - DNA, 25 bp, Homo sapien
caagtgcccacacgtatactgtggg

SEQ ID NO: 2943738 - DNA, 25 bp, Homo sapien
ttaatacaggctcaagcacaagtgc

SEQ ID NO: 2943739 - DNA, 25 bp, Homo sapien
tatatactcgacttgggtagccagg

SEQ ID NO: 2943740 - DNA, 25 bp, Homo sapien
gatagcttaactaacaggagcctca

SEQ ID NO: 2943741 - DNA, 25 bp, Homo sapien
tccagcctccaggacaagtggtgct

SEQ ID NO: 2943742 - DNA, 25 bp, Homo sapien
tgagtcacaacctgaggaacagctg

SEQ ID NO: 2943743 - DNA, 25 bp, Homo sapien
tcaagaacttagacatgaaagtcat

SEQ ID NO: 2943744 - DNA, 25 bp, Homo sapien
cacacatttaggtttcaagaactta

SEQ ID NO: 2943745 - DNA, 25 bp, Homo sapien
tggcagttgtgtagaaaataccttc

SEQ ID NO: 2943746 - DNA, 25 bp, Homo sapien
gggttgtctcagttgatacacacat

SEQ ID NO: 2943747 - DNA, 25 bp, Homo sapien
taggcaggcagttgctaagtgatca

SEQ ID NO: 2943748 - DNA, 25 bp, Homo sapien
tgcatatccttggatctgggtggac

SEQ ID NO: 2943749 - DNA, 25 bp, Homo sapien
tgattggagagcaccttagacggct

SEQ ID NO: 2943750 - DNA, 25 bp, Homo sapien
tctttagcatctagtctaggcaggc

SEQ ID NO: 2943751 - DNA, 25 bp, Homo sapien
tctcccaggcaagatgtgagcactt

SEQ ID NO: 2943752 - DNA, 25 bp, Homo sapien
tgagcactttatacaagccggcagc

SEQ ID NO: 2943753 - DNA, 25 bp, Homo sapien
aaactggcttagagagatttgcccg

SEQ ID NO: 2943754 - DNA, 25 bp, Homo sapien
tattatctccattctagagtcgagg

SEQ ID NO: 2943755 - DNA, 25 bp, Homo sapien
agtgtccttctttcctttttgctgg

SEQ ID NO: 2943756 - DNA, 25 bp, Homo sapien
aagtgtccttctttcctttttgctg

SEQ ID NO: 2943757 - DNA, 25 bp, Homo sapien
tgtccttctttcctttttgctggta

SEQ ID NO: 2943758 - DNA, 25 bp, Homo sapien
taccagcaaaaaggaaagaaggaca

SEQ ID NO: 2943759 - DNA, 25 bp, Homo sapien
cagcaaaaaggaaagaaggacactt

SEQ ID NO: 2943760 - DNA, 25 bp, Homo sapien
ccagcaaaaaggaaagaaggacact

SEQ ID NO: 2943761 - DNA, 25 bp, Homo sapien
tatccgatcctgtcctgcgagcagg

SEQ ID NO: 2943762 - DNA, 25 bp, Homo sapien
ggttgaatctttcaatccgctgcca

SEQ ID NO: 2943763 - DNA, 25 bp, Homo sapien
ctctgggcatctttggctttacgga

SEQ ID NO: 2943764 - DNA, 25 bp, Homo sapien
ggtgcattccttccctaggtctctg

SEQ ID NO: 2943765 - DNA, 25 bp, Homo sapien
ggtctctggcggctacgtatccgat

SEQ ID NO: 2943766 - DNA, 25 bp, Homo sapien
tgaccaaggcgacagtgaacacagt

SEQ ID NO: 2943767 - DNA, 25 bp, Homo sapien
ggatcggatacgtagccgccagaga

SEQ ID NO: 2943768 - DNA, 25 bp, Homo sapien
cctgctcgcaggacaggatcggata

SEQ ID NO: 2943769 - DNA, 25 bp, Homo sapien
gagacctagggaaggaatgcacccg

SEQ ID NO: 2943770 - DNA, 25 bp, Homo sapien
tccgtaaagccaaagatgcccagag

SEQ ID NO: 2943771 - DNA, 25 bp, Homo sapien
ggatggcagcggattgaaagattca

SEQ ID NO: 2943772 - DNA, 25 bp, Homo sapien
actgtgttcactgtcgccttggtca

SEQ ID NO: 2943773 - DNA, 25 bp, Homo sapien
acgctactccggacgcaaagctgtc

SEQ ID NO: 2943774 - DNA, 25 bp, Homo sapien
gacgctactccggacgcaaagctgt

SEQ ID NO: 2943775 - DNA, 25 bp, Homo sapien
ttgtcctggctggacgctactccgg

SEQ ID NO: 2943776 - DNA, 25 bp, Homo sapien
aacctgggaaggtggtgcttgtcct

SEQ ID NO: 2943777 - DNA, 25 bp, Homo sapien
agttcatgaaacctgggaaggtggt

SEQ ID NO: 2943778 - DNA, 25 bp, Homo sapien
tgtcctggctggacgctactccgga

SEQ ID NO: 2943779 - DNA, 25 bp, Homo sapien
accaccttcccaggtttcatgaact

SEQ ID NO: 2943780 - DNA, 25 bp, Homo sapien
acagctttgcgtccggagtagcgtc

SEQ ID NO: 2943781 - DNA, 25 bp, Homo sapien
cttcccaggtttcatgaacttgccc

SEQ ID NO: 2943782 - DNA, 25 bp, Homo sapien
gacagctttgcgtccggagtagcgt

SEQ ID NO: 2943783 - DNA, 25 bp, Homo sapien
cggagtagcgtccagccaggacaag

SEQ ID NO: 2943784 - DNA, 25 bp, Homo sapien
aggacaagcaccaccttcccaggtt

SEQ ID NO: 2943785 - DNA, 25 bp, Homo sapien
actctgcgtccttgcatgccgggac

SEQ ID NO: 2943786 - DNA, 25 bp, Homo sapien
tcgcgggactctgcgtccttgcatg

SEQ ID NO: 2943787 - DNA, 25 bp, Homo sapien
agcctcgcgggactctgcgtccttg

SEQ ID NO: 2943788 - DNA, 25 bp, Homo sapien
cttgcatgccgggaccaggctggct

SEQ ID NO: 2943789 - DNA, 25 bp, Homo sapien
gggactctgcgtccttgcatgccgg

SEQ ID NO: 2943790 - DNA, 25 bp, Homo sapien
tgcgtccttgcatgccgggaccagg

SEQ ID NO: 2943791 - DNA, 25 bp, Homo sapien
agccagcctggtcccggcatgcaag

SEQ ID NO: 2943792 - DNA, 25 bp, Homo sapien
ctggtcccggcatgcaaggacgcag

SEQ ID NO: 2943793 - DNA, 25 bp, Homo sapien
gtcccggcatgcaaggacgcagagt

SEQ ID NO: 2943794 - DNA, 25 bp, Homo sapien
caaggacgcagagtcccgcgaggct

SEQ ID NO: 2943795 - DNA, 25 bp, Homo sapien
atgcaaggacgcagagtcccgcgag

SEQ ID NO: 2943796 - DNA, 25 bp, Homo sapien
cggcatgcaaggacgcagagtcccg

SEQ ID NO: 2943797 - DNA, 25 bp, Homo sapien
ttttagaaaggtcacatagcccctc

SEQ ID NO: 2943798 - DNA, 25 bp, Homo sapien
tgtgagctgaattgggctcccaacg

SEQ ID NO: 2943799 - DNA, 25 bp, Homo sapien
tgaatagataccaagtcctgtgagc

SEQ ID NO: 2943800 - DNA, 25 bp, Homo sapien
gagacgggatctctgtccaggctaa

SEQ ID NO: 2943801 - DNA, 25 bp, Homo sapien
tagtggctgacattgcacgcttgct

SEQ ID NO: 2943802 - DNA, 25 bp, Homo sapien
taaccttggctgtacacttcactag

SEQ ID NO: 2943803 - DNA, 25 bp, Homo sapien
aaggctttatgcgttgggagcccaa

SEQ ID NO: 2943804 - DNA, 25 bp, Homo sapien
tagggaactctctcaagaagctaca

SEQ ID NO: 2943805 - DNA, 25 bp, Homo sapien
tagcaagcgtgcaatgtcagccact

SEQ ID NO: 2943806 - DNA, 25 bp, Homo sapien
caaaacgcagtggtgtatgtggcca

SEQ ID NO: 2943807 - DNA, 25 bp, Homo sapien
tacagccaaggttaagacaccacag

SEQ ID NO: 2943808 - DNA, 25 bp, Homo sapien
gcacttagcctggacagagatcccg

SEQ ID NO: 2943809 - DNA, 25 bp, Homo sapien
aattgaccgctacccccgcaaagtg

SEQ ID NO: 2943810 - DNA, 25 bp, Homo sapien
tacagccatgctctggtggctggaa

SEQ ID NO: 2943811 - DNA, 25 bp, Homo sapien
tggctggaattgaccgctacccccg

SEQ ID NO: 2943812 - DNA, 25 bp, Homo sapien
tggaattgaccgctacccccgcaaa

SEQ ID NO: 2943813 - DNA, 25 bp, Homo sapien
attgaccgctacccccgcaaagtga

SEQ ID NO: 2943814 - DNA, 25 bp, Homo sapien
ttgatgatggcacctcagatcgccc

SEQ ID NO: 2943815 - DNA, 25 bp, Homo sapien
gggcgatctgaggtgccatcatcaa

SEQ ID NO: 2943816 - DNA, 25 bp, Homo sapien
tttgcgggggtagcggtcaattcca

SEQ ID NO: 2943817 - DNA, 25 bp, Homo sapien
tcactttgcgggggtagcggtcaat

SEQ ID NO: 2943818 - DNA, 25 bp, Homo sapien
cactttgcgggggtagcggtcaatt

SEQ ID NO: 2943819 - DNA, 25 bp, Homo sapien
cgggggtagcggtcaattccagcca

SEQ ID NO: 2943820 - DNA, 25 bp, Homo sapien
cagccaccagagcatggctgtaggg

SEQ ID NO: 2943821 - DNA, 25 bp, Homo sapien
gaaagtgtataactacaatcaccta

SEQ ID NO: 2943822 - DNA, 25 bp, Homo sapien
gaagatcgccaagagatcaaagata

SEQ ID NO: 2943823 - DNA, 25 bp, Homo sapien
tcgccaagagatcaaagataaaatc

SEQ ID NO: 2943824 - DNA, 25 bp, Homo sapien
tgccatgggcaagaagaagatcgcc

SEQ ID NO: 2943825 - DNA, 25 bp, Homo sapien
gtataactacaatcacctaatgccc

SEQ ID NO: 2943826 - DNA, 25 bp, Homo sapien
gatcaaagataaaatcttttgtgaa

SEQ ID NO: 2943827 - DNA, 25 bp, Homo sapien
tatctttgatctcttggcgatcttc

SEQ ID NO: 2943828 - DNA, 25 bp, Homo sapien
cacaaaagattttatctttgatctc

SEQ ID NO: 2943829 - DNA, 25 bp, Homo sapien
gcgatcttcttcttgcccatggcag

SEQ ID NO: 2943830 - DNA, 25 bp, Homo sapien
cattaggtgattgtagttatacact

SEQ ID NO: 2943831 - DNA, 25 bp, Homo sapien
gattttatctttgatctcttggcga

SEQ ID NO: 2943832 - DNA, 25 bp, Homo sapien
ggtgattgtagttatacactttcac

SEQ ID NO: 2943833 - DNA, 25 bp, Homo sapien
aagtgaattttcaggccggatgcgg

SEQ ID NO: 2943834 - DNA, 25 bp, Homo sapien
gggagggcctcatttgatgattctt

SEQ ID NO: 2943835 - DNA, 25 bp, Homo sapien
taaagtagttgtgggaaattgagaa

SEQ ID NO: 2943836 - DNA, 25 bp, Homo sapien
cctcatttgatgattcttagctaga

SEQ ID NO: 2943837 - DNA, 25 bp, Homo sapien
catttgatgattcttagctagaaaa

SEQ ID NO: 2943838 - DNA, 25 bp, Homo sapien
gagggcctcatttgatgattcttag

SEQ ID NO: 2943839 - DNA, 25 bp, Homo sapien
tctagctaagaatcatcaaatgagg

SEQ ID NO: 2943840 - DNA, 25 bp, Homo sapien
ccgcatccggcctgaaaattcactt

SEQ ID NO: 2943841 - DNA, 25 bp, Homo sapien
agaatcatcaaatgaggccctcccc

SEQ ID NO: 2943842 - DNA, 25 bp, Homo sapien
tctcaatttcccacaactactttat

SEQ ID NO: 2943843 - DNA, 25 bp, Homo sapien
gctaagaatcatcaaatgaggccct

SEQ ID NO: 2943844 - DNA, 25 bp, Homo sapien
ttttctagctaagaatcatcaaatg

SEQ ID NO: 2943845 - DNA, 25 bp, Homo sapien
cccggcagtatgtgggctaatcctg

SEQ ID NO: 2943846 - DNA, 25 bp, Homo sapien
cctgattccctagtgtcccacaagg

SEQ ID NO: 2943847 - DNA, 25 bp, Homo sapien
gttgcttctaaggagtcagaccctg

SEQ ID NO: 2943848 - DNA, 25 bp, Homo sapien
catggcttttgatggttgcttctaa

SEQ ID NO: 2943849 - DNA, 25 bp, Homo sapien
gcctggacgaaagattcagactccg

SEQ ID NO: 2943850 - DNA, 25 bp, Homo sapien
tcagataatgtcatcgggacatggc

SEQ ID NO: 2943851 - DNA, 25 bp, Homo sapien
caggattagcccacatactgccggg

SEQ ID NO: 2943852 - DNA, 25 bp, Homo sapien
ggagtctgaatctttcgtccaggct

SEQ ID NO: 2943853 - DNA, 25 bp, Homo sapien
gccatgtcccgatgacattatctga

SEQ ID NO: 2943854 - DNA, 25 bp, Homo sapien
cagggtctgactccttagaagcaac

SEQ ID NO: 2943855 - DNA, 25 bp, Homo sapien
tagaagcaaccatcaaaagccatgt

SEQ ID NO: 2943856 - DNA, 25 bp, Homo sapien
ccttgtgggacactagggaatcagg

SEQ ID NO: 2943857 - DNA, 25 bp, Homo sapien
acgcaaggcccgacgggaggccaag

SEQ ID NO: 2943858 - DNA, 25 bp, Homo sapien
cgcaaggcccgacgggaggccaagg

SEQ ID NO: 2943859 - DNA, 25 bp, Homo sapien
ccttggcctcccgtcgggccttgcg

SEQ ID NO: 2943860 - DNA, 25 bp, Homo sapien
cttggcctcccgtcgggccttgcgt

SEQ ID NO: 2943861 - DNA, 25 bp, Homo sapien
tccccttggacaaaactgtcgtcaa

SEQ ID NO: 2943862 - DNA, 25 bp, Homo sapien
acgcaaggcccgacgggaggccaag

SEQ ID NO: 2943863 - DNA, 25 bp, Homo sapien
gaggccaaggtcaagtttgaagaga

SEQ ID NO: 2943864 - DNA, 25 bp, Homo sapien
tgctcttaaacgcaaggcccgacgg

SEQ ID NO: 2943865 - DNA, 25 bp, Homo sapien
gacaaaactgtcgtcaataaggatg

SEQ ID NO: 2943866 - DNA, 25 bp, Homo sapien
cgcaaggcccgacgggaggccaagg

SEQ ID NO: 2943867 - DNA, 25 bp, Homo sapien
ccttggcctcccgtcgggccttgcg

SEQ ID NO: 2943868 - DNA, 25 bp, Homo sapien
cttggcctcccgtcgggccttgcgt

SEQ ID NO: 2943869 - DNA, 25 bp, Homo sapien
ccgtcgggccttgcgtttaagagca

SEQ ID NO: 2943870 - DNA, 25 bp, Homo sapien
ccttattgacgacagttttgtccaa

SEQ ID NO: 2943871 - DNA, 25 bp, Homo sapien
tctcttcaaacttgaccttggcctc

SEQ ID NO: 2943872 - DNA, 25 bp, Homo sapien
tgaagacatccttattgacgacagt

SEQ ID NO: 2943873 - DNA, 25 bp, Homo sapien
ctttggtagtgaatggtggagtatg

SEQ ID NO: 2943874 - DNA, 25 bp, Homo sapien
ggctttggtagtgaatggtggagta

SEQ ID NO: 2943875 - DNA, 25 bp, Homo sapien
ttggtagtgaatggtggagtatggt

SEQ ID NO: 2943876 - DNA, 25 bp, Homo sapien
taggctttggtagtgaatggtggag

SEQ ID NO: 2943877 - DNA, 25 bp, Homo sapien
ggtagtgaatggtggagtatggttt

SEQ ID NO: 2943878 - DNA, 25 bp, Homo sapien
gtaggctttggtagtgaatggtgga

SEQ ID NO: 2943879 - DNA, 25 bp, Homo sapien
accatactccaccattcactaccaa

SEQ ID NO: 2943880 - DNA, 25 bp, Homo sapien
tccaccattcactaccaaagcctac

SEQ ID NO: 2943881 - DNA, 25 bp, Homo sapien
catactccaccattcactaccaaag

SEQ ID NO: 2943882 - DNA, 25 bp, Homo sapien
aaaccatactccaccattcactacc

SEQ ID NO: 2943883 - DNA, 25 bp, Homo sapien
tactccaccattcactaccaaagcc

SEQ ID NO: 2943884 - DNA, 25 bp, Homo sapien
atactccaccattcactaccaaagc

SEQ ID NO: 2943885 - DNA, 25 bp, Homo sapien
taagtaggctttggtagtgaatggt

SEQ ID NO: 2943886 - DNA, 25 bp, Homo sapien
cctttcctcattggtgtcctctttt

SEQ ID NO: 2943887 - DNA, 25 bp, Homo sapien
tggtttcactatttccattcctttc

SEQ ID NO: 2943888 - DNA, 25 bp, Homo sapien
ggtggagtatggtttcactatttcc

SEQ ID NO: 2943889 - DNA, 25 bp, Homo sapien
cattcctttcctcattggtgtcctc

SEQ ID NO: 2943890 - DNA, 25 bp, Homo sapien
tagtgaatggtggagtatggtttca

SEQ ID NO: 2943891 - DNA, 25 bp, Homo sapien
accattcactaccaaagcctactta

SEQ ID NO: 2943892 - DNA, 25 bp, Homo sapien
gaaaggaatggaaatagtgaaacca

SEQ ID NO: 2943893 - DNA, 25 bp, Homo sapien
aaaaagaggacaccaatgaggaaag

SEQ ID NO: 2943894 - DNA, 25 bp, Homo sapien
gaggacaccaatgaggaaaggaatg

SEQ ID NO: 2943895 - DNA, 25 bp, Homo sapien
gaaatagtgaaaccatactccacca

SEQ ID NO: 2943896 - DNA, 25 bp, Homo sapien
catactccaccattcactaccaaag

SEQ ID NO: 2943897 - DNA, 25 bp, Homo sapien
atacaagacaggcaagaacaagtgg

SEQ ID NO: 2943898 - DNA, 25 bp, Homo sapien
tacaagacaggcaagaacaagtggt

SEQ ID NO: 2943899 - DNA, 25 bp, Homo sapien
acaagacaggcaagaacaagtggtt

SEQ ID NO: 2943900 - DNA, 25 bp, Homo sapien
ccacttgttcttgcctgtcttgtat

SEQ ID NO: 2943901 - DNA, 25 bp, Homo sapien
accacttgttcttgcctgtcttgta

SEQ ID NO: 2943902 - DNA, 25 bp, Homo sapien
aaccacttgttcttgcctgtcttgt

SEQ ID NO: 2943903 - DNA, 25 bp, Homo sapien
atagtgccacctcgctccggactgg

SEQ ID NO: 2943904 - DNA, 25 bp, Homo sapien
gtgagccgatagtgccacctcgctc

SEQ ID NO: 2943905 - DNA, 25 bp, Homo sapien
tgccacctcgctccggactgggtgg

SEQ ID NO: 2943906 - DNA, 25 bp, Homo sapien
ctgaggtagaacgatcacaaggtca

SEQ ID NO: 2943907 - DNA, 25 bp, Homo sapien
agcaagacccgaaatacacctcagg

SEQ ID NO: 2943908 - DNA, 25 bp, Homo sapien
tttcatttccgtgaaatccctgcct

SEQ ID NO: 2943909 - DNA, 25 bp, Homo sapien
gaattcacagcaactgaactcttgt

SEQ ID NO: 2943910 - DNA, 25 bp, Homo sapien
gaaatacacctcaggaggctctgct

SEQ ID NO: 2943911 - DNA, 25 bp, Homo sapien
gcttcgcctcccagttcacttcatt

SEQ ID NO: 2943912 - DNA, 25 bp, Homo sapien
tcgcctcccagttcacttcattctc

SEQ ID NO: 2943913 - DNA, 25 bp, Homo sapien
agcttcgcctcccagttcacttcat

SEQ ID NO: 2943914 - DNA, 25 bp, Homo sapien
ctcccagttcacttcattctcctgc

SEQ ID NO: 2943915 - DNA, 25 bp, Homo sapien
gagcacattacagaggacaccaaag

SEQ ID NO: 2943916 - DNA, 25 bp, Homo sapien
gaaagataggactctgttctgacca

SEQ ID NO: 2943917 - DNA, 25 bp, Homo sapien
tgacaccagggataccaataaatgc

SEQ ID NO: 2943918 - DNA, 25 bp, Homo sapien
gaatgaatgacggtaaaggagcaca

SEQ ID NO: 2943919 - DNA, 25 bp, Homo sapien
cagagaatcaacaagcccaggggaa

SEQ ID NO: 2943920 - DNA, 25 bp, Homo sapien
gcctattctggacgctccaaaagca

SEQ ID NO: 2943921 - DNA, 25 bp, Homo sapien
gaagtggggcctattctggacgctc

SEQ ID NO: 2943922 - DNA, 25 bp, Homo sapien
ttctacccgcccttccagagaatca

SEQ ID NO: 2943923 - DNA, 25 bp, Homo sapien
cacagcctcatcttgagtctggcct

SEQ ID NO: 2943924 - DNA, 25 bp, Homo sapien
gcctgctcctcctgaagggcgtgga

SEQ ID NO: 2943925 - DNA, 25 bp, Homo sapien
tgtctttgggggagtccccgagctc

SEQ ID NO: 2943926 - DNA, 25 bp, Homo sapien
gcctcatcttgagtctggcctgctc

SEQ ID NO: 2943927 - DNA, 25 bp, Homo sapien
gctgagtgccggagataaatacatt

SEQ ID NO: 2943928 - DNA, 25 bp, Homo sapien
cattccattgatgctgagtgccgga

SEQ ID NO: 2943929 - DNA, 25 bp, Homo sapien
agtaggagtgttcctcactcccacc

SEQ ID NO: 2943930 - DNA, 25 bp, Homo sapien
cacctaggaggaaggcatctccgat

SEQ ID NO: 2943931 - DNA, 25 bp, Homo sapien
gacttaggcacttccgggtcctgct

SEQ ID NO: 2943932 - DNA, 25 bp, Homo sapien
ctgggtgtgtcctcggaataccagg

SEQ ID NO: 2943933 - DNA, 25 bp, Homo sapien
ggatcttgggcactgaaaatgggac

SEQ ID NO: 2943934 - DNA, 25 bp, Homo sapien
tgctgggtgtgtcctcggaatacca

SEQ ID NO: 2943935 - DNA, 25 bp, Homo sapien
gggcagtggatccgcaaattggaaa

SEQ ID NO: 2943936 - DNA, 25 bp, Homo sapien
gagggcagtggatccgcaaattgga

SEQ ID NO: 2943937 - DNA, 25 bp, Homo sapien
ctttggggtcatcaaaggtgatcag

SEQ ID NO: 2943938 - DNA, 25 bp, Homo sapien
agcagagcccgcaagcagagggcag

SEQ ID NO: 2943939 - DNA, 25 bp, Homo sapien
ctccatgttgatcgtgtgctccttt

SEQ ID NO: 2943940 - DNA, 25 bp, Homo sapien
ggcactcctccatgttgatcgtgtg

SEQ ID NO: 2943941 - DNA, 25 bp, Homo sapien
actcctccatgttgatcgtgtgctc

SEQ ID NO: 2943942 - DNA, 25 bp, Homo sapien
ccggcactcctccatgttgatcgtg

SEQ ID NO: 2943943 - DNA, 25 bp, Homo sapien
cccaggtgcatggcatgctttgcat

SEQ ID NO: 2943944 - DNA, 25 bp, Homo sapien
gcccaggtgcatggcatgctttgca

SEQ ID NO: 2943945 - DNA, 25 bp, Homo sapien
agtagctcccgaacgtccacatcgc

SEQ ID NO: 2943946 - DNA, 25 bp, Homo sapien
tccgttcctagtcttgccaaagaag

SEQ ID NO: 2943947 - DNA, 25 bp, Homo sapien
ctagcaaaccccagcatgacactcc

SEQ ID NO: 2943948 - DNA, 25 bp, Homo sapien
atgacactccctggcagtagctccc

SEQ ID NO: 2943949 - DNA, 25 bp, Homo sapien
tctccccgttcacatacggagagac

SEQ ID NO: 2943950 - DNA, 25 bp, Homo sapien
gagactctcagagggacttgctgcc

SEQ ID NO: 2943951 - DNA, 25 bp, Homo sapien
cacccagtggcactgtgaactggcc

SEQ ID NO: 2943952 - DNA, 25 bp, Homo sapien
tgaactggccgatttggcacagacg

SEQ ID NO: 2943953 - DNA, 25 bp, Homo sapien
atgttgagcaccagtaccgagcggg

SEQ ID NO: 2943954 - DNA, 25 bp, Homo sapien
actcagaggtgaagactgctaggcc

SEQ ID NO: 2943955 - DNA, 25 bp, Homo sapien
gctccgggccatccaagatatcagg

SEQ ID NO: 2943956 - DNA, 25 bp, Homo sapien
tggatctccaggacgtcatgcagct

SEQ ID NO: 2943957 - DNA, 25 bp, Homo sapien
ctttttactgttctgggcagtgttt

SEQ ID NO: 2943958 - DNA, 25 bp, Homo sapien
agacctcctatatgggcacccaagc

SEQ ID NO: 2943959 - DNA, 25 bp, Homo sapien
cctccgcactgttggtgaacataca

SEQ ID NO: 2943960 - DNA, 25 bp, Homo sapien
tgaacatacagacctcctatatggg

SEQ ID NO: 2943961 - DNA, 25 bp, Homo sapien
cagagaggcagcttatcaaactcag

SEQ ID NO: 2943962 - DNA, 25 bp, Homo sapien
tctgtttcttgtactgggaccaaag

SEQ ID NO: 2943963 - DNA, 25 bp, Homo sapien
gcaaaaacaggtgccctcatcgtgg

SEQ ID NO: 2943964 - DNA, 25 bp, Homo sapien
agtgccttagcaacgaaaacctgtg

SEQ ID NO: 2943965 - DNA, 25 bp, Homo sapien
gtctcccgtgactgcagtatctcct

SEQ ID NO: 2943966 - DNA, 25 bp, Homo sapien
cgatctttgtcttgggctctgtgtc

SEQ ID NO: 2943967 - DNA, 25 bp, Homo sapien
gggctctgtgtctcccgtgactgca

SEQ ID NO: 2943968 - DNA, 25 bp, Homo sapien
ggcgggattgggtcatccgatcttt

SEQ ID NO: 2943969 - DNA, 25 bp, Homo sapien
ggtgtggcagggcgggagaaactgg

SEQ ID NO: 2943970 - DNA, 25 bp, Homo sapien
gtggcagggcgggagaaactggcgc

SEQ ID NO: 2943971 - DNA, 25 bp, Homo sapien
cagggcgggagaaactggcgcggac

SEQ ID NO: 2943972 - DNA, 25 bp, Homo sapien
gcgggagaaactggcgcggacctgg

SEQ ID NO: 2943973 - DNA, 25 bp, Homo sapien
taggcaggggctgtacgaccgtctc

SEQ ID NO: 2943974 - DNA, 25 bp, Homo sapien
tcgcagacctcatggctaggcaggg

SEQ ID NO: 2943975 - DNA, 25 bp, Homo sapien
ctgcctgtcactccgggcatggagg

SEQ ID NO: 2943976 - DNA, 25 bp, Homo sapien
gggcctgcgggctcaacttcgcaga

SEQ ID NO: 2943977 - DNA, 25 bp, Homo sapien
gctacgcgccggtcccccacgccac

SEQ ID NO: 2943978 - DNA, 25 bp, Homo sapien
ccaccacgatcttgcagcggccgct

SEQ ID NO: 2943979 - DNA, 25 bp, Homo sapien
ttgccgcactctgcgtctcccacca

SEQ ID NO: 2943980 - DNA, 25 bp, Homo sapien
ccaccaccacgatcttgcagcggcc

SEQ ID NO: 2943981 - DNA, 25 bp, Homo sapien
cacgatcttgcagcggccgctctgc

SEQ ID NO: 2943982 - DNA, 25 bp, Homo sapien
cagtgtagttctcaaacacggtggg

SEQ ID NO: 2943983 - DNA, 25 bp, Homo sapien
cgcttgtcgatctcaaagctcgcag

SEQ ID NO: 2943984 - DNA, 25 bp, Homo sapien
gttgagctcaatgcggcgcttgtcg

SEQ ID NO: 2943985 - DNA, 25 bp, Homo sapien
caaagctcgcagtgtagttctcaaa

SEQ ID NO: 2943986 - DNA, 25 bp, Homo sapien
taatgtcgaagcagatgagcacagc

SEQ ID NO: 2943987 - DNA, 25 bp, Homo sapien
gtccagtgtttctggtcggctaatg

SEQ ID NO: 2943988 - DNA, 25 bp, Homo sapien
cggacattatcatagtaagaggaac

SEQ ID NO: 2943989 - DNA, 25 bp, Homo sapien
gccagaggccggacattatcatagt

SEQ ID NO: 2943990 - DNA, 25 bp, Homo sapien
tgtccagtttacagccaaccagcac

SEQ ID NO: 2943991 - DNA, 25 bp, Homo sapien
ccagcacaaccttggcattggggca

SEQ ID NO: 2943992 - DNA, 25 bp, Homo sapien
agtgtggccaggtcagtccgcatgt

SEQ ID NO: 2943993 - DNA, 25 bp, Homo sapien
cagggataagcctctgcttggacag

SEQ ID NO: 2943994 - DNA, 25 bp, Homo sapien
gaggttgcagcttttggctcgatcc

SEQ ID NO: 2943995 - DNA, 25 bp, Homo sapien
cattccccggcgtgagtcagttcgg

SEQ ID NO: 2943996 - DNA, 25 bp, Homo sapien
gaggagcactcaacataggacacag

SEQ ID NO: 2943997 - DNA, 25 bp, Homo sapien
agttcggcgcagctgcctatggcca

SEQ ID NO: 2943998 - DNA, 25 bp, Homo sapien
ggagatgagaaacgatgataccctt

SEQ ID NO: 2943999 - DNA, 25 bp, Homo sapien
tgttagctccctcaacatccactgg

SEQ ID NO: 2944000 - DNA, 25 bp, Homo sapien
taggagactccaccaaggtcaccat

SEQ ID NO: 2944001 - DNA, 25 bp, Homo sapien
gagggagggtactcttcacatagga

SEQ ID NO: 2944002 - DNA, 25 bp, Homo sapien
gaggttctagggctggtggactgat

SEQ ID NO: 2944003 - DNA, 25 bp, Homo sapien
tgttgcctagaggttagatgtgtga

SEQ ID NO: 2944004 - DNA, 25 bp, Homo sapien
gcttttgaatttagtgcatgttgcc

SEQ ID NO: 2944005 - DNA, 25 bp, Homo sapien
ttattaggtgactgttgaggcaagg

SEQ ID NO: 2944006 - DNA, 25 bp, Homo sapien
aaggacacttctgatccaacctatg

SEQ ID NO: 2944007 - DNA, 25 bp, Homo sapien
gactaattatatgtcggtctgctct

SEQ ID NO: 2944008 - DNA, 25 bp, Homo sapien
ttcattaactaggatgaacagtccc

SEQ ID NO: 2944009 - DNA, 25 bp, Homo sapien
gtacagatggtgagcaggacccctc

SEQ ID NO: 2944010 - DNA, 25 bp, Homo sapien
ggcttgaacctgctatacactgaga

SEQ ID NO: 2944011 - DNA, 25 bp, Homo sapien
gagaatgtcaccgaaaagaggccag

SEQ ID NO: 2944012 - DNA, 25 bp, Homo sapien
cactttggtggttgcaggcttgaac

SEQ ID NO: 2944013 - DNA, 25 bp, Homo sapien
gatggagatccacctagctgggcct

SEQ ID NO: 2944014 - DNA, 25 bp, Homo sapien
gcctttaagtcccagcacaaaatac

SEQ ID NO: 2944015 - DNA, 25 bp, Homo sapien
gatttggcagggagggacctcaatc

SEQ ID NO: 2944016 - DNA, 25 bp, Homo sapien
aataaaagttgacatcagctgagca

SEQ ID NO: 2944017 - DNA, 25 bp, Homo sapien
gggaacaagacataaccacctcctg

SEQ ID NO: 2944018 - DNA, 25 bp, Homo sapien
gggtcaagcctgctggcgtctgttt

SEQ ID NO: 2944019 - DNA, 25 bp, Homo sapien
tgcccctcccctttatgggtcaagc

SEQ ID NO: 2944020 - DNA, 25 bp, Homo sapien
ccctcccctttatgggtcaagcctg

SEQ ID NO: 2944021 - DNA, 25 bp, Homo sapien
ctcccctttatgggtcaagcctgct

SEQ ID NO: 2944022 - DNA, 25 bp, Homo sapien
tataaaatgacagatcccaccagga

SEQ ID NO: 2944023 - DNA, 25 bp, Homo sapien
tgctccctgttgctgaaaccataca

SEQ ID NO: 2944024 - DNA, 25 bp, Homo sapien
tggaaggactaggtcttccctagcc

SEQ ID NO: 2944025 - DNA, 25 bp, Homo sapien
tcataaacccattatccaggactgt

SEQ ID NO: 2944026 - DNA, 25 bp, Homo sapien
aaggaaacttgaaacctgggcatgg

SEQ ID NO: 2944027 - DNA, 25 bp, Homo sapien
ggaggaaattctgaggcaggtatta

SEQ ID NO: 2944028 - DNA, 25 bp, Homo sapien
tctgaggcaggtattagaaatgaaa

SEQ ID NO: 2944029 - DNA, 25 bp, Homo sapien
aggaaacttgaaacctgggcatggt

SEQ ID NO: 2944030 - DNA, 25 bp, Homo sapien
tttgtttgttttgagacggagtctc

SEQ ID NO: 2944031 - DNA, 25 bp, Homo sapien
ctcctggattccagcaattctcatg

SEQ ID NO: 2944032 - DNA, 25 bp, Homo sapien
cctggattccagcaattctcatgcc

SEQ ID NO: 2944033 - DNA, 25 bp, Homo sapien
ttgtttgttttgagacggagtctcg

SEQ ID NO: 2944034 - DNA, 25 bp, Homo sapien
tttcttacagattcgcatatacatg

SEQ ID NO: 2944035 - DNA, 25 bp, Homo sapien
caatttcacctttcttacagattcg

SEQ ID NO: 2944036 - DNA, 25 bp, Homo sapien
cttacagattcgcatatacatggcc

SEQ ID NO: 2944037 - DNA, 25 bp, Homo sapien
tacagattcgcatatacatggccaa

SEQ ID NO: 2944038 - DNA, 25 bp, Homo sapien
ctgggtcacgttgtagacttttcca

SEQ ID NO: 2944039 - DNA, 25 bp, Homo sapien
tgggtcacgttgtagacttttccag

SEQ ID NO: 2944040 - DNA, 25 bp, Homo sapien
gctgggtcacgttgtagacttttcc

SEQ ID NO: 2944041 - DNA, 25 bp, Homo sapien
acgcgtttcaggaagctgtcttggc

SEQ ID NO: 2944042 - DNA, 25 bp, Homo sapien
aagctgtcttggctcttagagtgtt

SEQ ID NO: 2944043 - DNA, 25 bp, Homo sapien
ggtgcttcagttgaacccacgtacc

SEQ ID NO: 2944044 - DNA, 25 bp, Homo sapien
ttcacgcgtttcaggaagctgtctt

SEQ ID NO: 2944045 - DNA, 25 bp, Homo sapien
gtgtaaaaacttgcagacttatgta

SEQ ID NO: 2944046 - DNA, 25 bp, Homo sapien
cttgcagacttatgtaaagtagggc

SEQ ID NO: 2944047 - DNA, 25 bp, Homo sapien
gacttatgtaaagtagggctgtatc

SEQ ID NO: 2944048 - DNA, 25 bp, Homo sapien
taaagtagggctgtatcgccgtgcc

SEQ ID NO: 2944049 - DNA, 25 bp, Homo sapien
gggcggaacctgagaggcgtaaggc

SEQ ID NO: 2944050 - DNA, 25 bp, Homo sapien
tactggcgtgggagagtggatttcc

SEQ ID NO: 2944051 - DNA, 25 bp, Homo sapien
gtggatttccgaagctgacagatgg

SEQ ID NO: 2944052 - DNA, 25 bp, Homo sapien
tgagaggcgtaaggcgttgtgaacc

SEQ ID NO: 2944053 - DNA, 25 bp, Homo sapien
gattgggacctcttcttacgactgc

SEQ ID NO: 2944054 - DNA, 25 bp, Homo sapien
tggacaataggtagcgattctgacc

SEQ ID NO: 2944055 - DNA, 25 bp, Homo sapien
gagggcaggcactttatggcaaact

SEQ ID NO: 2944056 - DNA, 25 bp, Homo sapien
tactgtgatgcaataagccgcaact

SEQ ID NO: 2944057 - DNA, 25 bp, Homo sapien
ggaggcggcaatgcaaagaccgtcc

SEQ ID NO: 2944058 - DNA, 25 bp, Homo sapien
gcaatgcaaagaccgtccgctgcca

SEQ ID NO: 2944059 - DNA, 25 bp, Homo sapien
atgcaaagaccgtccgctgccagct

SEQ ID NO: 2944060 - DNA, 25 bp, Homo sapien
ggcggcaatgcaaagaccgtccgct

SEQ ID NO: 2944061 - DNA, 25 bp, Homo sapien
aggtggaaggatcgtgaacctagga

SEQ ID NO: 2944062 - DNA, 25 bp, Homo sapien
tggaaggatcgtgaacctaggagtt

SEQ ID NO: 2944063 - DNA, 25 bp, Homo sapien
gaggtggaaggatcgtgaacctagg

SEQ ID NO: 2944064 - DNA, 25 bp, Homo sapien
aaggatcgtgaacctaggagttgaa

SEQ ID NO: 2944065 - DNA, 25 bp, Homo sapien
catcttcctcatccaggtattttat

SEQ ID NO: 2944066 - DNA, 25 bp, Homo sapien
ttttaatactattcagatcaaatga

SEQ ID NO: 2944067 - DNA, 25 bp, Homo sapien
actattcagatcaaatgaaactttt

SEQ ID NO: 2944068 - DNA, 25 bp, Homo sapien
aatactattcagatcaaatgaaact

SEQ ID NO: 2944069 - DNA, 25 bp, Homo sapien
agagacggggttcaataaaatgaag

SEQ ID NO: 2944070 - DNA, 25 bp, Homo sapien
ctacaggcgcctgctgccacatttg

SEQ ID NO: 2944071 - DNA, 25 bp, Homo sapien
ggcgcctgctgccacatttggctaa

SEQ ID NO: 2944072 - DNA, 25 bp, Homo sapien
tagagacggggttcaataaaatgaa

SEQ ID NO: 2944073 - DNA, 25 bp, Homo sapien
ctcagggcaacccaatgagtatggg

SEQ ID NO: 2944074 - DNA, 25 bp, Homo sapien
gctgcttaggtttggatctcacctc

SEQ ID NO: 2944075 - DNA, 25 bp, Homo sapien
ctttctgatgctagttggagaggca

SEQ ID NO: 2944076 - DNA, 25 bp, Homo sapien
aagacagctgccaccgagtcagcat

SEQ ID NO: 2944077 - DNA, 25 bp, Homo sapien
agaaaaaaagaattagctgggcatg

SEQ ID NO: 2944078 - DNA, 25 bp, Homo sapien
gcgagactccatctcaaaaaaaaaa

SEQ ID NO: 2944079 - DNA, 25 bp, Homo sapien
agagcgagactccatctcaaaaaaa

SEQ ID NO: 2944080 - DNA, 25 bp, Homo sapien
aagaaaaaaagaattagctgggcat

SEQ ID NO: 2944081 - DNA, 25 bp, Homo sapien
gagaccgaggacagcggatcacgat

SEQ ID NO: 2944082 - DNA, 25 bp, Homo sapien
aagaggttaatcgaccaggtgcggt

SEQ ID NO: 2944083 - DNA, 25 bp, Homo sapien
taaaagaggttaatcgaccaggtgc

SEQ ID NO: 2944084 - DNA, 25 bp, Homo sapien
agaccgaggacagcggatcacgatg

SEQ ID NO: 2944085 - DNA, 25 bp, Homo sapien
tgcagaatcctaagcccctaaagag

SEQ ID NO: 2944086 - DNA, 25 bp, Homo sapien
tgtcctctgggactaacctaggaga

SEQ ID NO: 2944087 - DNA, 25 bp, Homo sapien
gggacgggtccaaaatgcagaatcc

SEQ ID NO: 2944088 - DNA, 25 bp, Homo sapien
cagagttattcaaagccagacagga

SEQ ID NO: 2944089 - DNA, 25 bp, Homo sapien
aacccctcggtaatctcttgtctgc

SEQ ID NO: 2944090 - DNA, 25 bp, Homo sapien
gaagctcttaaagcatggatcatga

SEQ ID NO: 2944091 - DNA, 25 bp, Homo sapien
tatagtctatctggtcacaactgcc

SEQ ID NO: 2944092 - DNA, 25 bp, Homo sapien
aactgccacagcatgatccttggtg

SEQ ID NO: 2944093 - DNA, 25 bp, Homo sapien
tgggttaggaactagcaggctctcc

SEQ ID NO: 2944094 - DNA, 25 bp, Homo sapien
caaacggcagttggaagaaagttct

SEQ ID NO: 2944095 - DNA, 25 bp, Homo sapien
cagaaccgcctaaggcgtcttcagg

SEQ ID NO: 2944096 - DNA, 25 bp, Homo sapien
gatccttttggaccgaggctgaagc

SEQ ID NO: 2944097 - DNA, 25 bp, Homo sapien
ttccacgcggatgaaggctacagcc

SEQ ID NO: 2944098 - DNA, 25 bp, Homo sapien
gaaccatgggaaggttccacgcgga

SEQ ID NO: 2944099 - DNA, 25 bp, Homo sapien
gagaccctacactaggcctggactt

SEQ ID NO: 2944100 - DNA, 25 bp, Homo sapien
gaagaccgcgacctgcgaaccatgg

SEQ ID NO: 2944101 - DNA, 25 bp, Homo sapien
gcccttttatgctcactctgcggta

SEQ ID NO: 2944102 - DNA, 25 bp, Homo sapien
tgcgcccggcgaagcctgtattaag

SEQ ID NO: 2944103 - DNA, 25 bp, Homo sapien
gcctgtttcagtctatccaattttt

SEQ ID NO: 2944104 - DNA, 25 bp, Homo sapien
tgtctttgttagagacgggcctcac

SEQ ID NO: 2944105 - DNA, 25 bp, Homo sapien
taggactgcatagtatattatggtg

SEQ ID NO: 2944106 - DNA, 25 bp, Homo sapien
tttaggactgcatagtatattatgg

SEQ ID NO: 2944107 - DNA, 25 bp, Homo sapien
agtcccaccaatggcgtaaaagcgt

SEQ ID NO: 2944108 - DNA, 25 bp, Homo sapien
ttttttaggactgcatagtatatta

SEQ ID NO: 2944109 - DNA, 25 bp, Homo sapien
tagctctcattgaaaaaggctgcca

SEQ ID NO: 2944110 - DNA, 25 bp, Homo sapien
tagtatcggagaaaacatagctctc

SEQ ID NO: 2944111 - DNA, 25 bp, Homo sapien
ggctgccagagaaaatgtgcccgca

SEQ ID NO: 2944112 - DNA, 25 bp, Homo sapien
tgagcggtccgcaggccatatagta

SEQ ID NO: 2944113 - DNA, 25 bp, Homo sapien
cctgctggcaagggagccttgatgt

SEQ ID NO: 2944114 - DNA, 25 bp, Homo sapien
gcaagggagccttgatgtgtgcttc

SEQ ID NO: 2944115 - DNA, 25 bp, Homo sapien
tgctggcaagggagccttgatgtgt

SEQ ID NO: 2944116 - DNA, 25 bp, Homo sapien
tggcaagggagccttgatgtgtgct

SEQ ID NO: 2944117 - DNA, 25 bp, Homo sapien
caaattccacgtgactaccttttat

SEQ ID NO: 2944118 - DNA, 25 bp, Homo sapien
ccacgtgactaccttttattggcag

SEQ ID NO: 2944119 - DNA, 25 bp, Homo sapien
aattccacgtgactaccttttattg

SEQ ID NO: 2944120 - DNA, 25 bp, Homo sapien
ttccacgtgactaccttttattggc

SEQ ID NO: 2944121 - DNA, 25 bp, Homo sapien
cagctgatttccagaggatggaaga

SEQ ID NO: 2944122 - DNA, 25 bp, Homo sapien
acagctgatttccagaggatggaag

SEQ ID NO: 2944123 - DNA, 25 bp, Homo sapien
agctgatttccagaggatggaagaa

SEQ ID NO: 2944124 - DNA, 25 bp, Homo sapien
gctgatttccagaggatggaagaag

SEQ ID NO: 2944125 - DNA, 25 bp, Homo sapien
cgagatcgtgcctctagcctgggca

SEQ ID NO: 2944126 - DNA, 25 bp, Homo sapien
tatcgggtattaggcctagtgcctg

SEQ ID NO: 2944127 - DNA, 25 bp, Homo sapien
ctagcacccccatctttcaggaatt

SEQ ID NO: 2944128 - DNA, 25 bp, Homo sapien
gtttagctatataacaaacgttcac

SEQ ID NO: 2944129 - DNA, 25 bp, Homo sapien
aagatcatctcttttgtaggaacac

SEQ ID NO: 2944130 - DNA, 25 bp, Homo sapien
gtcacgcaggcatgatcgagctcca

SEQ ID NO: 2944131 - DNA, 25 bp, Homo sapien
ctttgtcacgcaggcatgatcgagc

SEQ ID NO: 2944132 - DNA, 25 bp, Homo sapien
gggctgaaagcactaagcttccaac

SEQ ID NO: 2944133 - DNA, 25 bp, Homo sapien
taagcttccaaccatagttaggtat

SEQ ID NO: 2944134 - DNA, 25 bp, Homo sapien
ccatcctcccggcacatggatgtgt

SEQ ID NO: 2944135 - DNA, 25 bp, Homo sapien
ggatgtgttcgccaacccagcagct

SEQ ID NO: 2944136 - DNA, 25 bp, Homo sapien
acatggatgtgttcgccaacccagc

SEQ ID NO: 2944137 - DNA, 25 bp, Homo sapien
agttggggtgcaccatcctcccggc

SEQ ID NO: 2944138 - DNA, 25 bp, Homo sapien
tgatttattacaaaggatattttaa

SEQ ID NO: 2944139 - DNA, 25 bp, Homo sapien
cacatccaaaacgacaagttacggt

SEQ ID NO: 2944140 - DNA, 25 bp, Homo sapien
gccttgtaaccattcctctgtccgg

SEQ ID NO: 2944141 - DNA, 25 bp, Homo sapien
aaggccacacatccaaaacgacaag

SEQ ID NO: 2944142 - DNA, 25 bp, Homo sapien
gctagaaggacgtaggtgacctgcc

SEQ ID NO: 2944143 - DNA, 25 bp, Homo sapien
tgttctttagctgcctgccccaatt

SEQ ID NO: 2944144 - DNA, 25 bp, Homo sapien
gcactgttccataacggcagcagaa

SEQ ID NO: 2944145 - DNA, 25 bp, Homo sapien
ctgcagaaggcgcaaggattcctcc

SEQ ID NO: 2944146 - DNA, 25 bp, Homo sapien
tgagccgcccatcggtttccatgag

SEQ ID NO: 2944147 - DNA, 25 bp, Homo sapien
cctgctggccgcggtgtgcctacag

SEQ ID NO: 2944148 - DNA, 25 bp, Homo sapien
ggtgtgcctacagccttcgcgaagc

SEQ ID NO: 2944149 - DNA, 25 bp, Homo sapien
ccaccggagctgctctcgctatgtt

SEQ ID NO: 2944150 - DNA, 25 bp, Homo sapien
ctcctcccgccaccggagctgctct

SEQ ID NO: 2944151 - DNA, 25 bp, Homo sapien
ccatggcagccccttcggtggagct

SEQ ID NO: 2944152 - DNA, 25 bp, Homo sapien
aggtttagctgacaattgcgctgat

SEQ ID NO: 2944153 - DNA, 25 bp, Homo sapien
tagctgacaattgcgctgatctcct

SEQ ID NO: 2944154 - DNA, 25 bp, Homo sapien
tgacaattgcgctgatctcctcttg

SEQ ID NO: 2944155 - DNA, 25 bp, Homo sapien
taagacatggtctatggtattcatc

SEQ ID NO: 2944156 - DNA, 25 bp, Homo sapien
ttcctctgaattgtaaagaagggag

SEQ ID NO: 2944157 - DNA, 25 bp, Homo sapien
ctatggtattcatcagacttggctt

SEQ ID NO: 2944158 - DNA, 25 bp, Homo sapien
tctgaattgtaaagaagggagacag

SEQ ID NO: 2944159 - DNA, 25 bp, Homo sapien
cgctcttaaccagtggagttctcca

SEQ ID NO: 2944160 - DNA, 25 bp, Homo sapien
aatccagaagtaatccttcccttcg

SEQ ID NO: 2944161 - DNA, 25 bp, Homo sapien
gcacaaaactctacaggtcgagtga

SEQ ID NO: 2944162 - DNA, 25 bp, Homo sapien
ggtcgagtgacctgtccagcagttc

SEQ ID NO: 2944163 - DNA, 25 bp, Homo sapien
gattgaggaggatctttattattta

SEQ ID NO: 2944164 - DNA, 25 bp, Homo sapien
caccagcccaggtggattaacatcc

SEQ ID NO: 2944165 - DNA, 25 bp, Homo sapien
tgggattgaggaggatctttattat

SEQ ID NO: 2944166 - DNA, 25 bp, Homo sapien
ggtgcaccagcccaggtggattaac

SEQ ID NO: 2944167 - DNA, 25 bp, Homo sapien
gtgcgtgccaccatgcctggttaat

SEQ ID NO: 2944168 - DNA, 25 bp, Homo sapien
aggtgcgtgccaccatgcctggtta

SEQ ID NO: 2944169 - DNA, 25 bp, Homo sapien
aatctcatctgactgcaacttccgc

SEQ ID NO: 2944170 - DNA, 25 bp, Homo sapien
gcacaatctcatctgactgcaactt

SEQ ID NO: 2944171 - DNA, 25 bp, Homo sapien
tcctcaatagtgtggcatttggatc

SEQ ID NO: 2944172 - DNA, 25 bp, Homo sapien
cctcaatagtgtggcatttggatcc

SEQ ID NO: 2944173 - DNA, 25 bp, Homo sapien
ctcaatagtgtggcatttggatcca

SEQ ID NO: 2944174 - DNA, 25 bp, Homo sapien
gcaggactatgaggtgacctttacg

SEQ ID NO: 2944175 - DNA, 25 bp, Homo sapien
attctgcaggactatgaggtgacct

SEQ ID NO: 2944176 - DNA, 25 bp, Homo sapien
tatgaggtgacctttacggaggata

SEQ ID NO: 2944177 - DNA, 25 bp, Homo sapien
gactatgaggtgacctttacggagg

SEQ ID NO: 2944178 - DNA, 25 bp, Homo sapien
ggtacagcaattactgtgacgtaat

SEQ ID NO: 2944179 - DNA, 25 bp, Homo sapien
tggtacagcaattactgtgacgtaa

SEQ ID NO: 2944180 - DNA, 25 bp, Homo sapien
tcaggcctcaggtggcgattctgac

SEQ ID NO: 2944181 - DNA, 25 bp, Homo sapien
taatgggacctcttcttaagactgc

SEQ ID NO: 2944182 - DNA, 25 bp, Homo sapien
tcttaagactgctttggacactatc

SEQ ID NO: 2944183 - DNA, 25 bp, Homo sapien
tatcttacgctgatattcaggcctc

SEQ ID NO: 2944184 - DNA, 25 bp, Homo sapien
gatttccgtgagaattgtgcccgct

SEQ ID NO: 2944185 - DNA, 25 bp, Homo sapien
tagaggactacttgcccgagactcg

SEQ ID NO: 2944186 - DNA, 25 bp, Homo sapien
ggccaaggcctttcgttccgcaatg

SEQ ID NO: 2944187 - DNA, 25 bp, Homo sapien
ttgacatgtataagcccgcggaggt

SEQ ID NO: 2944188 - DNA, 25 bp, Homo sapien
cgaccacgccattgattggtggaga

SEQ ID NO: 2944189 - DNA, 25 bp, Homo sapien
cctcaaaacgaccacgccattgatt

SEQ ID NO: 2944190 - DNA, 25 bp, Homo sapien
gattggtggagattgcgtcgatggg

SEQ ID NO: 2944191 - DNA, 25 bp, Homo sapien
cacttgtccctcaaaacgaccacgc

SEQ ID NO: 2944192 - DNA, 25 bp, Homo sapien
cctgccggaggccaatgcaaggacc

SEQ ID NO: 2944193 - DNA, 25 bp, Homo sapien
cggaggccaatgcaaggaccgtccg

SEQ ID NO: 2944194 - DNA, 25 bp, Homo sapien
atgcaaggaccgtccgctaccggct

SEQ ID NO: 2944195 - DNA, 25 bp, Homo sapien
ggccaatgcaaggaccgtccgctac

SEQ ID NO: 2944196 - DNA, 25 bp, Homo sapien
aagattagctgtcccgaaacacgga

SEQ ID NO: 2944197 - DNA, 25 bp, Homo sapien
aaaaagtcgcccctcttctttgcag

SEQ ID NO: 2944198 - DNA, 25 bp, Homo sapien
taggtaaccgcagctgcttccttac

SEQ ID NO: 2944199 - DNA, 25 bp, Homo sapien
caaaccctcttagcgtgacgtgacc

SEQ ID NO: 2944200 - DNA, 25 bp, Homo sapien
caactcggtccctctgaacatgaag

SEQ ID NO: 2944201 - DNA, 25 bp, Homo sapien
cctctgaacatgaagggctctctca

SEQ ID NO: 2944202 - DNA, 25 bp, Homo sapien
cagtagaagccggatgttctgaccc

SEQ ID NO: 2944203 - DNA, 25 bp, Homo sapien
gggagtcgtggccttccatcagtag

SEQ ID NO: 2944204 - DNA, 25 bp, Homo sapien
taaccaaggagatctctttaaggtc

SEQ ID NO: 2944205 - DNA, 25 bp, Homo sapien
agacagtgtcactaccccgagggct

SEQ ID NO: 2944206 - DNA, 25 bp, Homo sapien
agttttcgtttcctagcactccatg

SEQ ID NO: 2944207 - DNA, 25 bp, Homo sapien
gcctgggttggtctttgagaaagca

SEQ ID NO: 2944208 - DNA, 25 bp, Homo sapien
caagccaagttatccaggctttaaa

SEQ ID NO: 2944209 - DNA, 25 bp, Homo sapien
ccaggctttaaaatgtgtgacctga

SEQ ID NO: 2944210 - DNA, 25 bp, Homo sapien
gtctccaccagaggcctttacaagc

SEQ ID NO: 2944211 - DNA, 25 bp, Homo sapien
tgaaacagacctggcaacctgagct

SEQ ID NO: 2944212 - DNA, 25 bp, Homo sapien
tgaaatgtaattattggggtcctta

SEQ ID NO: 2944213 - DNA, 25 bp, Homo sapien
tccttaaaatttgagaatctttgtc

SEQ ID NO: 2944214 - DNA, 25 bp, Homo sapien
tctttgtcaattccccaggacctta

SEQ ID NO: 2944215 - DNA, 25 bp, Homo sapien
tttgagaatctttgtcaattcccca

SEQ ID NO: 2944216 - DNA, 25 bp, Homo sapien
cactagccaagaaactacacagagg

SEQ ID NO: 2944217 - DNA, 25 bp, Homo sapien
tacgaacttacaggccaaaacacta

SEQ ID NO: 2944218 - DNA, 25 bp, Homo sapien
ccttacggtactttatgatgactgg

SEQ ID NO: 2944219 - DNA, 25 bp, Homo sapien
caacatggataagagagataaggtc

SEQ ID NO: 2944220 - DNA, 25 bp, Homo sapien
caaaaattattcttgaagttattag

SEQ ID NO: 2944221 - DNA, 25 bp, Homo sapien
tcacaaaaattattcttgaagttat

SEQ ID NO: 2944222 - DNA, 25 bp, Homo sapien
cacaaaaattattcttgaagttatt

SEQ ID NO: 2944223 - DNA, 25 bp, Homo sapien
cgatatcagcccaagttgtattttc

SEQ ID NO: 2944224 - DNA, 25 bp, Homo sapien
aagtcacatttagagtaacctgtgg

SEQ ID NO: 2944225 - DNA, 25 bp, Homo sapien
catagcttcgatatcagcccaagtt

SEQ ID NO: 2944226 - DNA, 25 bp, Homo sapien
aaagtcacatttagagtaacctgtg

SEQ ID NO: 2944227 - DNA, 25 bp, Homo sapien
acagaagagtacaaagggcaaacca

SEQ ID NO: 2944228 - DNA, 25 bp, Homo sapien
tggaaggcagacaactacctcagat

SEQ ID NO: 2944229 - DNA, 25 bp, Homo sapien
gagatactcaacctctgacctagca

SEQ ID NO: 2944230 - DNA, 25 bp, Homo sapien
cacaagtcatatcctcacacaagag

SEQ ID NO: 2944231 - DNA, 25 bp, Homo sapien
agtattcagatcaaatgaaactttt

SEQ ID NO: 2944232 - DNA, 25 bp, Homo sapien
tttcctcatccaggtattttatttg

SEQ ID NO: 2944233 - DNA, 25 bp, Homo sapien
cctcatccaggtattttatttgaat

SEQ ID NO: 2944234 - DNA, 25 bp, Homo sapien
tgaatagtattcagatcaaatgaaa

SEQ ID NO: 2944235 - DNA, 25 bp, Homo sapien
acatggtgcccttcgtggacttgca

SEQ ID NO: 2944236 - DNA, 25 bp, Homo sapien
agtgaagagtaatgtgcaagtggct

SEQ ID NO: 2944237 - DNA, 25 bp, Homo sapien
gacttgcatctgcagttggtttccc

SEQ ID NO: 2944238 - DNA, 25 bp, Homo sapien
gcagctagtcgttttgctcctacaa

SEQ ID NO: 2944239 - DNA, 25 bp, Homo sapien
ggggtcttcatgtctgatcccaaga

SEQ ID NO: 2944240 - DNA, 25 bp, Homo sapien
tcatgtctgatcccaagactctcac

SEQ ID NO: 2944241 - DNA, 25 bp, Homo sapien
gtcttcatgtctgatcccaagactc

SEQ ID NO: 2944242 - DNA, 25 bp, Homo sapien
ttcatgtctgatcccaagactctca

SEQ ID NO: 2944243 - DNA, 25 bp, Homo sapien
ggtctgtgtcacatggaacaagtgg

SEQ ID NO: 2944244 - DNA, 25 bp, Homo sapien
tgaggctggtctgtgtcacatggaa

SEQ ID NO: 2944245 - DNA, 25 bp, Homo sapien
ggctggtctgtgtcacatggaacaa

SEQ ID NO: 2944246 - DNA, 25 bp, Homo sapien
tgtcacatggaacaagtggaaacga

SEQ ID NO: 2944247 - DNA, 25 bp, Homo sapien
cgtctccaggtagcttgtgaaccag

SEQ ID NO: 2944248 - DNA, 25 bp, Homo sapien
gtagcttgtgaaccagtctgggggc

SEQ ID NO: 2944249 - DNA, 25 bp, Homo sapien
tctccaggtagcttgtgaaccagtc

SEQ ID NO: 2944250 - DNA, 25 bp, Homo sapien
caggtagcttgtgaaccagtctggg

SEQ ID NO: 2944251 - DNA, 25 bp, Homo sapien
tatgccagctgaactggttttctgg

SEQ ID NO: 2944252 - DNA, 25 bp, Homo sapien
gggttctggaggacaagcttttcat

SEQ ID NO: 2944253 - DNA, 25 bp, Homo sapien
ggtagcggacaccaacaatccttct

SEQ ID NO: 2944254 - DNA, 25 bp, Homo sapien
gacttctgagggacaagaacccaag

SEQ ID NO: 2944255 - DNA, 25 bp, Homo sapien
aggcatttggaacaaccgaggaact

SEQ ID NO: 2944256 - DNA, 25 bp, Homo sapien
tgctccagtaccaactagcaggtaa

SEQ ID NO: 2944257 - DNA, 25 bp, Homo sapien
gaagagtagcttgtgcttccaactc

SEQ ID NO: 2944258 - DNA, 25 bp, Homo sapien
gaggccatggagaagaggatcattt

SEQ ID NO: 2944259 - DNA, 25 bp, Homo sapien
gtagagtactttgagtgacagaacg

SEQ ID NO: 2944260 - DNA, 25 bp, Homo sapien
caggacgtggttagtgtcatggcca

SEQ ID NO: 2944261 - DNA, 25 bp, Homo sapien
tgacagaacggttcagaggagccca

SEQ ID NO: 2944262 - DNA, 25 bp, Homo sapien
tcttcacagatattgtaggatgggc

SEQ ID NO: 2944263 - DNA, 25 bp, Homo sapien
tcagctcgcaacctttgcttttctg

SEQ ID NO: 2944264 - DNA, 25 bp, Homo sapien
gtttcttctcagctcgcaacctttg

SEQ ID NO: 2944265 - DNA, 25 bp, Homo sapien
tgctttacgttgtttcttctcagct

SEQ ID NO: 2944266 - DNA, 25 bp, Homo sapien
tctgctttaagaaagttcttatcaa

SEQ ID NO: 2944267 - DNA, 25 bp, Homo sapien
ccacaggtgaattttcctatggagt

SEQ ID NO: 2944268 - DNA, 25 bp, Homo sapien
tttcctatggagtttaagctgcttt

SEQ ID NO: 2944269 - DNA, 25 bp, Homo sapien
tcctatggagtttaagctgcttttt

SEQ ID NO: 2944270 - DNA, 25 bp, Homo sapien
ttttcctatggagtttaagctgctt

SEQ ID NO: 2944271 - DNA, 25 bp, Homo sapien
tgagcattggcataacggaggtaca

SEQ ID NO: 2944272 - DNA, 25 bp, Homo sapien
agcattggcataacggaggtacagg

SEQ ID NO: 2944273 - DNA, 25 bp, Homo sapien
gagcattggcataacggaggtacag

SEQ ID NO: 2944274 - DNA, 25 bp, Homo sapien
ctgagcattggcataacggaggtac

SEQ ID NO: 2944275 - DNA, 25 bp, Homo sapien
tcctggctgaaggtgagtcccatca

SEQ ID NO: 2944276 - DNA, 25 bp, Homo sapien
gaaggtgagtcccatcaggcaaatt

SEQ ID NO: 2944277 - DNA, 25 bp, Homo sapien
ttggttcctggctgaaggtgagtcc

SEQ ID NO: 2944278 - DNA, 25 bp, Homo sapien
gctgaaggtgagtcccatcaggcaa

SEQ ID NO: 2944279 - DNA, 25 bp, Homo sapien
tcaatgttatcagggctctcttcgg

SEQ ID NO: 2944280 - DNA, 25 bp, Homo sapien
gaagtatacgttccctccaaggctg

SEQ ID NO: 2944281 - DNA, 25 bp, Homo sapien
ctatgatactgcaccagacccgagg

SEQ ID NO: 2944282 - DNA, 25 bp, Homo sapien
tgctggcctttgtgagaaagacgcc

SEQ ID NO: 2944283 - DNA, 25 bp, Homo sapien
agatgggatgtagagctccctctca

SEQ ID NO: 2944284 - DNA, 25 bp, Homo sapien
tcacttcaccaagctgtctttcttc

SEQ ID NO: 2944285 - DNA, 25 bp, Homo sapien
ctcagtcacttcaccaagctgtctt

SEQ ID NO: 2944286 - DNA, 25 bp, Homo sapien
atgggatgtagagctccctctcact

SEQ ID NO: 2944287 - DNA, 25 bp, Homo sapien
ccatgtcttgatgggacctgtagac

SEQ ID NO: 2944288 - DNA, 25 bp, Homo sapien
tacaaacttgcttccatgggtgatc

SEQ ID NO: 2944289 - DNA, 25 bp, Homo sapien
tgatttcctgattactgcctatggc

SEQ ID NO: 2944290 - DNA, 25 bp, Homo sapien
tacctgactagatcaaagtgggcat

SEQ ID NO: 2944291 - DNA, 25 bp, Homo sapien
aatgtttatatccaacagctcaaag

SEQ ID NO: 2944292 - DNA, 25 bp, Homo sapien
tctctccaactcttgaacaatgttt

SEQ ID NO: 2944293 - DNA, 25 bp, Homo sapien
tgaacaatgtttatatccaacagct

SEQ ID NO: 2944294 - DNA, 25 bp, Homo sapien
tatccaacagctcaaaggacagcag

SEQ ID NO: 2944295 - DNA, 25 bp, Homo sapien
gcccagcatgttgttacttttgaca

SEQ ID NO: 2944296 - DNA, 25 bp, Homo sapien
gaaaaacggatccatgattgctgct

SEQ ID NO: 2944297 - DNA, 25 bp, Homo sapien
tcctactgtgggagaaatccttgcc

SEQ ID NO: 2944298 - DNA, 25 bp, Homo sapien
gcctattagtaagacgaacaagatg

SEQ ID NO: 2944299 - DNA, 25 bp, Homo sapien
ctcagtcacttcaccaagctgtctt

SEQ ID NO: 2944300 - DNA, 25 bp, Homo sapien
tcacttcaccaagctgtctttcttc

SEQ ID NO: 2944301 - DNA, 25 bp, Homo sapien
agatgggatgtagagctccctctca

SEQ ID NO: 2944302 - DNA, 25 bp, Homo sapien
atgggatgtagagctccctctcact

SEQ ID NO: 2944303 - DNA, 25 bp, Homo sapien
aatgtttatatccaacagctcaaag

SEQ ID NO: 2944304 - DNA, 25 bp, Homo sapien
tctctccaactcttgaacaatgttt

SEQ ID NO: 2944305 - DNA, 25 bp, Homo sapien
tatccaacagctcaaaggacagcag

SEQ ID NO: 2944306 - DNA, 25 bp, Homo sapien
tgaacaatgtttatatccaacagct

SEQ ID NO: 2944307 - DNA, 25 bp, Homo sapien
actgtcatgtggcagaggagacatg

SEQ ID NO: 2944308 - DNA, 25 bp, Homo sapien
ggcttctctattaaaggactgtcat

SEQ ID NO: 2944309 - DNA, 25 bp, Homo sapien
gctttaaatcctgccccttcattct

SEQ ID NO: 2944310 - DNA, 25 bp, Homo sapien
agtgctttaaatcctgccccttcat

SEQ ID NO: 2944311 - DNA, 25 bp, Homo sapien
tgtctcacacacaaactgggtccca

SEQ ID NO: 2944312 - DNA, 25 bp, Homo sapien
gcatccaaggtaagggatcggatta

SEQ ID NO: 2944313 - DNA, 25 bp, Homo sapien
gatcggattactgtctcacacacaa

SEQ ID NO: 2944314 - DNA, 25 bp, Homo sapien
taagggatcggattactgtctcaca

SEQ ID NO: 2944315 - DNA, 25 bp, Homo sapien
ccactgtggaatgcagctgtaattc

SEQ ID NO: 2944316 - DNA, 25 bp, Homo sapien
cactgtggaatgcagctgtaattct

SEQ ID NO: 2944317 - DNA, 25 bp, Homo sapien
actgtggaatgcagctgtaattctg

SEQ ID NO: 2944318 - DNA, 25 bp, Homo sapien
ctgtggaatgcagctgtaattctgc

SEQ ID NO: 2944319 - DNA, 25 bp, Homo sapien
atgtaatccttggcatgtagccacc

SEQ ID NO: 2944320 - DNA, 25 bp, Homo sapien
gcatgtaatccttggcatgtagcca

SEQ ID NO: 2944321 - DNA, 25 bp, Homo sapien
catgtaatccttggcatgtagccac

SEQ ID NO: 2944322 - DNA, 25 bp, Homo sapien
tgtaatccttggcatgtagccacca

SEQ ID NO: 2944323 - DNA, 25 bp, Homo sapien
aaagcaggcctaagtactatcctta

SEQ ID NO: 2944324 - DNA, 25 bp, Homo sapien
gaagctaaaagcaggcctaagtact

SEQ ID NO: 2944325 - DNA, 25 bp, Homo sapien
ctaaaggatgaaagcaaccaatttt

SEQ ID NO: 2944326 - DNA, 25 bp, Homo sapien
aggtggaagctaaaagcaggcctaa

SEQ ID NO: 2944327 - DNA, 25 bp, Homo sapien
cttcctcagcgatatggataatctc

SEQ ID NO: 2944328 - DNA, 25 bp, Homo sapien
ttcctcagcgatatggataatctcc

SEQ ID NO: 2944329 - DNA, 25 bp, Homo sapien
tcatttccaagtggtccttcaggca

SEQ ID NO: 2944330 - DNA, 25 bp, Homo sapien
ttcttcctcagcgatatggataatc

SEQ ID NO: 2944331 - DNA, 25 bp, Homo sapien
cctggctgtgagagcgcagagctgt

SEQ ID NO: 2944332 - DNA, 25 bp, Homo sapien
gcgcagagctgtacatagaatcccc

SEQ ID NO: 2944333 - DNA, 25 bp, Homo sapien
aagcactcaggcaggatgatgatgt

SEQ ID NO: 2944334 - DNA, 25 bp, Homo sapien
actcaggcaggatgatgatgtaatc

SEQ ID NO: 2944335 - DNA, 25 bp, Homo sapien
agctccactacctctgggattaggg

SEQ ID NO: 2944336 - DNA, 25 bp, Homo sapien
gacggtggaagctccactacctctg

SEQ ID NO: 2944337 - DNA, 25 bp, Homo sapien
cgtgaggatgtcacttatgctgtgc

SEQ ID NO: 2944338 - DNA, 25 bp, Homo sapien
tctgtgaggtcgtgaggatgtcact

SEQ ID NO: 2944339 - DNA, 25 bp, Homo sapien
ggttttgagatcaggtcgattcctc

SEQ ID NO: 2944340 - DNA, 25 bp, Homo sapien
caggttttgagatcaggtcgattcc

SEQ ID NO: 2944341 - DNA, 25 bp, Homo sapien
gatcaggtcgattcctctctttatt

SEQ ID NO: 2944342 - DNA, 25 bp, Homo sapien
tttgagatcaggtcgattcctctct

SEQ ID NO: 2944343 - DNA, 25 bp, Homo sapien
caacttttattcatctaaattcaga

SEQ ID NO: 2944344 - DNA, 25 bp, Homo sapien
aacttttattcatctaaattcagac

SEQ ID NO: 2944345 - DNA, 25 bp, Homo sapien
tggtttacattatagtcaaggctcc

SEQ ID NO: 2944346 - DNA, 25 bp, Homo sapien
tagggttccatcataagggctacat

SEQ ID NO: 2944347 - DNA, 25 bp, Homo sapien
ggcttcagtctggtcatgtccccac

SEQ ID NO: 2944348 - DNA, 25 bp, Homo sapien
tcacatgtctggatttagggttcca

SEQ ID NO: 2944349 - DNA, 25 bp, Homo sapien
aagaaacttctggtatggtaactgg

SEQ ID NO: 2944350 - DNA, 25 bp, Homo sapien
tctgatctgatcagggactgaagaa

SEQ ID NO: 2944351 - DNA, 25 bp, Homo sapien
tggtaactggtaaatccactcctgg

SEQ ID NO: 2944352 - DNA, 25 bp, Homo sapien
catgatgatgtacacaaggagagct

SEQ ID NO: 2944353 - DNA, 25 bp, Homo sapien
ccaccaagaatcacgaagagagaga

SEQ ID NO: 2944354 - DNA, 25 bp, Homo sapien
gagaggctatttatacctggtttcc

SEQ ID NO: 2944355 - DNA, 25 bp, Homo sapien
tttatacctggtttccattagacag

SEQ ID NO: 2944356 - DNA, 25 bp, Homo sapien
agagagagaggctatttatacctgg

SEQ ID NO: 2944357 - DNA, 25 bp, Homo sapien
ctacctctatgaggtctaacaatat

SEQ ID NO: 2944358 - DNA, 25 bp, Homo sapien
acctctatgaggtctaacaatatat

SEQ ID NO: 2944359 - DNA, 25 bp, Homo sapien
aattagagtatgcaggaggagcatg

SEQ ID NO: 2944360 - DNA, 25 bp, Homo sapien
aatagaaattagagtatgcaggagg

SEQ ID NO: 2944361 - DNA, 25 bp, Homo sapien
cttgagtggtcatagctcttctgtc

SEQ ID NO: 2944362 - DNA, 25 bp, Homo sapien
ttgagtggtcatagctcttctgtct

SEQ ID NO: 2944363 - DNA, 25 bp, Homo sapien
tgagtggtcatagctcttctgtctg

SEQ ID NO: 2944364 - DNA, 25 bp, Homo sapien
tctgaagatgggtacatactgtgag

SEQ ID NO: 2944365 - DNA, 25 bp, Homo sapien
tgaaaaaagagactgcacaaggttg

SEQ ID NO: 2944366 - DNA, 25 bp, Homo sapien
aaaaaagagactgcacaaggttgtt

SEQ ID NO: 2944367 - DNA, 25 bp, Homo sapien
aagatgggtacatactgtgagaggc

SEQ ID NO: 2944368 - DNA, 25 bp, Homo sapien
gcaaacagggccttgtatgcagagg

SEQ ID NO: 2944369 - DNA, 25 bp, Homo sapien
aacagggccttgtatgcagaggcag

SEQ ID NO: 2944370 - DNA, 25 bp, Homo sapien
gcagaggcagcaacagacaaagccc

SEQ ID NO: 2944371 - DNA, 25 bp, Homo sapien
agggccttgtatgcagaggcagcaa

SEQ ID NO: 2944372 - DNA, 25 bp, Homo sapien
tcttagaccggattcacactccatg

SEQ ID NO: 2944373 - DNA, 25 bp, Homo sapien
catctgtctgatagcactggcatag

SEQ ID NO: 2944374 - DNA, 25 bp, Homo sapien
gatgaacatttactccgtcctttag

SEQ ID NO: 2944375 - DNA, 25 bp, Homo sapien
gcaaataatcgaccagccttggcct

SEQ ID NO: 2944376 - DNA, 25 bp, Homo sapien
tctggatggataccgttggcttgcc

SEQ ID NO: 2944377 - DNA, 25 bp, Homo sapien
tgtaggcaagtgactctcaagcatg

SEQ ID NO: 2944378 - DNA, 25 bp, Homo sapien
tcatctatggatcagtcaccaaagg

SEQ ID NO: 2944379 - DNA, 25 bp, Homo sapien
ggtgcagcggctcaagtttctcatc

SEQ ID NO: 2944380 - DNA, 25 bp, Homo sapien
ccagatgaaggaatgacagcaagcc

SEQ ID NO: 2944381 - DNA, 25 bp, Homo sapien
ttttttggccagatgaaggaatgac

SEQ ID NO: 2944382 - DNA, 25 bp, Homo sapien
tggccagatgaaggaatgacagcaa

SEQ ID NO: 2944383 - DNA, 25 bp, Homo sapien
ttttggccagatgaaggaatgacag

SEQ ID NO: 2944384 - DNA, 25 bp, Homo sapien
caaggctatggcactcctgtgtact

SEQ ID NO: 2944385 - DNA, 25 bp, Homo sapien
tgcaagcatactagtctttccagat

SEQ ID NO: 2944386 - DNA, 25 bp, Homo sapien
tgtgtacttgataccaacggttcgg

SEQ ID NO: 2944387 - DNA, 25 bp, Homo sapien
tagattagttatctgtgtacttgaa

SEQ ID NO: 2944388 - DNA, 25 bp, Homo sapien
caatagcgttggctgtaccagtcgt

SEQ ID NO: 2944389 - DNA, 25 bp, Homo sapien
taccagtcgttgttgtttaactgaa

SEQ ID NO: 2944390 - DNA, 25 bp, Homo sapien
gaagaagttctgtcacaacctgcag

SEQ ID NO: 2944391 - DNA, 25 bp, Homo sapien
gtttcttcagcagccgtaggttcag

SEQ ID NO: 2944392 - DNA, 25 bp, Homo sapien
caggcagttatttaatacaaggtca

SEQ ID NO: 2944393 - DNA, 25 bp, Homo sapien
aggcagttatttaatacaaggtcac

SEQ ID NO: 2944394 - DNA, 25 bp, Homo sapien
gcaggcagttatttaatacaaggtc

SEQ ID NO: 2944395 - DNA, 25 bp, Homo sapien
cattgctcaataggtgctggtaggt

SEQ ID NO: 2944396 - DNA, 25 bp, Homo sapien
tcttggtaactcaacgatgggctct

SEQ ID NO: 2944397 - DNA, 25 bp, Homo sapien
tagggctagatacctgtgaacggac

SEQ ID NO: 2944398 - DNA, 25 bp, Homo sapien
ggatactcttgaatgcaccatggag

SEQ ID NO: 2944399 - DNA, 25 bp, Homo sapien
ctccgatggtcaagacaggtcccac

SEQ ID NO: 2944400 - DNA, 25 bp, Homo sapien
ccattctttaggtggttatgtacaa

SEQ ID NO: 2944401 - DNA, 25 bp, Homo sapien
gccctcctggccctcgattataaaa

SEQ ID NO: 2944402 - DNA, 25 bp, Homo sapien
caagtacatacataaccaggagagc

SEQ ID NO: 2944403 - DNA, 25 bp, Homo sapien
agagtggaatcgaaaatgcgggagc

SEQ ID NO: 2944404 - DNA, 25 bp, Homo sapien
cgacagaaacggaagagagtggaat

SEQ ID NO: 2944405 - DNA, 25 bp, Homo sapien
ggaatcgaaaatgcgggagcgaaca

SEQ ID NO: 2944406 - DNA, 25 bp, Homo sapien
ccgcggacgactgcagcgacagaaa

SEQ ID NO: 2944407 - DNA, 25 bp, Homo sapien
cccgaagggccaagccgattcctgg

SEQ ID NO: 2944408 - DNA, 25 bp, Homo sapien
caagccgattcctgggctacatggg

SEQ ID NO: 2944409 - DNA, 25 bp, Homo sapien
cgaatgtgccgcactggagagtggg

SEQ ID NO: 2944410 - DNA, 25 bp, Homo sapien
ctaggggaacgaatgtgccgcactg

SEQ ID NO: 2944411 - DNA, 25 bp, Homo sapien
gctcctcagccgcacgagggcgaga

SEQ ID NO: 2944412 - DNA, 25 bp, Homo sapien
gagaagggcctctaagggcagagtg

SEQ ID NO: 2944413 - DNA, 25 bp, Homo sapien
aagggcctctaagggcagagtgggc

SEQ ID NO: 2944414 - DNA, 25 bp, Homo sapien
tcagccgcacgagggcgagacttct

SEQ ID NO: 2944415 - DNA, 25 bp, Homo sapien
ctgccaatggctggtttggaggaca

SEQ ID NO: 2944416 - DNA, 25 bp, Homo sapien
caaaaagacttgctgctaccggtgc

SEQ ID NO: 2944417 - DNA, 25 bp, Homo sapien
ccagctgggaaaacgtcttacccat

SEQ ID NO: 2944418 - DNA, 25 bp, Homo sapien
gagtagttgacagccttgctgccaa

SEQ ID NO: 2944419 - DNA, 25 bp, Homo sapien
ctggcaggtgggacaagtcacgaag

SEQ ID NO: 2944420 - DNA, 25 bp, Homo sapien
aagagctgggagcagatctaacccc

SEQ ID NO: 2944421 - DNA, 25 bp, Homo sapien
cagcaaatcagagatgcccagcatc

SEQ ID NO: 2944422 - DNA, 25 bp, Homo sapien
tgaagaatctctgaaagtcaccagc

SEQ ID NO: 2944423 - DNA, 25 bp, Homo sapien
tggactctgctaccaaagttggcag

SEQ ID NO: 2944424 - DNA, 25 bp, Homo sapien
agagagaaggtgagagggagggcca

SEQ ID NO: 2944425 - DNA, 25 bp, Homo sapien
gagagagaaggtgagagggagggcc

SEQ ID NO: 2944426 - DNA, 25 bp, Homo sapien
agagaaggtgagagggagggccaag

SEQ ID NO: 2944427 - DNA, 25 bp, Homo sapien
ctagagagagagaaggtgagaggga

SEQ ID NO: 2944428 - DNA, 25 bp, Homo sapien
tccccatagggaatgagagccacca

SEQ ID NO: 2944429 - DNA, 25 bp, Homo sapien
cctctggtccccatagggaatgaga

SEQ ID NO: 2944430 - DNA, 25 bp, Homo sapien
atgagagccaccaactgcttctcca

SEQ ID NO: 2944431 - DNA, 25 bp, Homo sapien
tgcttgggcttcagcctctggtccc

SEQ ID NO: 2944432 - DNA, 25 bp, Homo sapien
cggtccaggagcttctaaatcagga

SEQ ID NO: 2944433 - DNA, 25 bp, Homo sapien
aaaaatccttggacgtaaggagctg

SEQ ID NO: 2944434 - DNA, 25 bp, Homo sapien
ggctttctatggaagaactaatagg

SEQ ID NO: 2944435 - DNA, 25 bp, Homo sapien
agaaattaagggagatcaaaacagg

SEQ ID NO: 2944436 - DNA, 25 bp, Homo sapien
aggattactggtgtctgccaccacg

SEQ ID NO: 2944437 - DNA, 25 bp, Homo sapien
agtagctaggattactggtgtctgc

SEQ ID NO: 2944438 - DNA, 25 bp, Homo sapien
gctaggattactggtgtctgccacc

SEQ ID NO: 2944439 - DNA, 25 bp, Homo sapien
tagctaggattactggtgtctgcca

SEQ ID NO: 2944440 - DNA, 25 bp, Homo sapien
tgcaggctgcacaatgacggaccgg

SEQ ID NO: 2944441 - DNA, 25 bp, Homo sapien
aggcagatgagcacggccaggaaca

SEQ ID NO: 2944442 - DNA, 25 bp, Homo sapien
cgttatgttgaggtagatatcagcc

SEQ ID NO: 2944443 - DNA, 25 bp, Homo sapien
gaaaaagacgatgaaggaggaggtc

SEQ ID NO: 2944444 - DNA, 25 bp, Homo sapien
ttgttggaaacctgccccaccacga

SEQ ID NO: 2944445 - DNA, 25 bp, Homo sapien
ggtagtagttgccattggagatgtt

SEQ ID NO: 2944446 - DNA, 25 bp, Homo sapien
cccaccacgagggacaggtgcagaa

SEQ ID NO: 2944447 - DNA, 25 bp, Homo sapien
gtgcagaacctcgagggtcagctgt

SEQ ID NO: 2944448 - DNA, 25 bp, Homo sapien
cagggctggccagggagaggggagt

SEQ ID NO: 2944449 - DNA, 25 bp, Homo sapien
gggctggccagggagaggggagtca

SEQ ID NO: 2944450 - DNA, 25 bp, Homo sapien
ggcagggctggccagggagagggga

SEQ ID NO: 2944451 - DNA, 25 bp, Homo sapien
ggctggccagggagaggggagtcac

SEQ ID NO: 2944452 - DNA, 25 bp, Homo sapien
gttttcatcccgtatcttggtagct

SEQ ID NO: 2944453 - DNA, 25 bp, Homo sapien
tgttttcatcccgtatcttggtagc

SEQ ID NO: 2944454 - DNA, 25 bp, Homo sapien
gtgttttcatcccgtatcttggtag

SEQ ID NO: 2944455 - DNA, 25 bp, Homo sapien
ttttcatcccgtatcttggtagcta

SEQ ID NO: 2944456 - DNA, 25 bp, Homo sapien
aagcacatggtggactttgatttcc

SEQ ID NO: 2944457 - DNA, 25 bp, Homo sapien
gatttccagccaggtacagattttg

SEQ ID NO: 2944458 - DNA, 25 bp, Homo sapien
ctttgatttccagccaggtacagat

SEQ ID NO: 2944459 - DNA, 25 bp, Homo sapien
ttgatttccagccaggtacagattt

SEQ ID NO: 2944460 - DNA, 25 bp, Homo sapien
gagaggaagcaggccttgttgccat

SEQ ID NO: 2944461 - DNA, 25 bp, Homo sapien
ggagaggaagcaggccttgttgcca

SEQ ID NO: 2944462 - DNA, 25 bp, Homo sapien
ctggagaggaagcaggccttgttgc

SEQ ID NO: 2944463 - DNA, 25 bp, Homo sapien
gaggaagcaggccttgttgccatgg

SEQ ID NO: 2944464 - DNA, 25 bp, Homo sapien
ccagctgctctgaatggctcaggta

SEQ ID NO: 2944465 - DNA, 25 bp, Homo sapien
ggcacagatgcgtttcctcggcagt

SEQ ID NO: 2944466 - DNA, 25 bp, Homo sapien
gaatggctcaggtatgaacaggtca

SEQ ID NO: 2944467 - DNA, 25 bp, Homo sapien
tattcatagctctgaaagaccagct

SEQ ID NO: 2944468 - DNA, 25 bp, Homo sapien
catttggcagtctatacacagcagc

SEQ ID NO: 2944469 - DNA, 25 bp, Homo sapien
tcaggatgtggacttagaggctctc

SEQ ID NO: 2944470 - DNA, 25 bp, Homo sapien
tgacctcagcttggagacagcagtc

SEQ ID NO: 2944471 - DNA, 25 bp, Homo sapien
ccaggtgctcagtacagaaaggcca

SEQ ID NO: 2944472 - DNA, 25 bp, Homo sapien
catctagcagagacaacccagaggt

SEQ ID NO: 2944473 - DNA, 25 bp, Homo sapien
cagtgcaatggctggcctacagtgg

SEQ ID NO: 2944474 - DNA, 25 bp, Homo sapien
gaaacggaggctatagcctcaggaa

SEQ ID NO: 2944475 - DNA, 25 bp, Homo sapien
ggtcgcatcacatcagagcaggcct

SEQ ID NO: 2944476 - DNA, 25 bp, Homo sapien
agccatcacccattcccccaagccc

SEQ ID NO: 2944477 - DNA, 25 bp, Homo sapien
cccaagcccatgcttactgagatat

SEQ ID NO: 2944478 - DNA, 25 bp, Homo sapien
ctgccctcattcagcagtgataagt

SEQ ID NO: 2944479 - DNA, 25 bp, Homo sapien
aagcccatgcttactgagatatagc

SEQ ID NO: 2944480 - DNA, 25 bp, Homo sapien
tcttgggtcccccccaagtatgcaa

SEQ ID NO: 2944481 - DNA, 25 bp, Homo sapien
ggcaaagccaatgggagaactgggt

SEQ ID NO: 2944482 - DNA, 25 bp, Homo sapien
caagtatgcaactcctactactatc

SEQ ID NO: 2944483 - DNA, 25 bp, Homo sapien
tgcttctctaggcaaagccaatggg

SEQ ID NO: 2944484 - DNA, 25 bp, Homo sapien
aatcggaggaaaaactccagccaca

SEQ ID NO: 2944485 - DNA, 25 bp, Homo sapien
gaggaagaacaacaatcggaggaaa

SEQ ID NO: 2944486 - DNA, 25 bp, Homo sapien
caacaatcggaggaaaaactccagc

SEQ ID NO: 2944487 - DNA, 25 bp, Homo sapien
acaatcggaggaaaaactccagcca

SEQ ID NO: 2944488 - DNA, 25 bp, Homo sapien
tgccacttgcccgggggcttcttgc

SEQ ID NO: 2944489 - DNA, 25 bp, Homo sapien
ttctctggcagatgggtgattgggt

SEQ ID NO: 2944490 - DNA, 25 bp, Homo sapien
cacttgcccgggggcttcttgccag

SEQ ID NO: 2944491 - DNA, 25 bp, Homo sapien
atgccacttgcccgggggcttcttg

SEQ ID NO: 2944492 - DNA, 25 bp, Homo sapien
tggcgttctctcagatagactgtgt

SEQ ID NO: 2944493 - DNA, 25 bp, Homo sapien
tatcagctgactcaatttccctctt

SEQ ID NO: 2944494 - DNA, 25 bp, Homo sapien
ttctctcagatagactgtgtctgtg

SEQ ID NO: 2944495 - DNA, 25 bp, Homo sapien
tgttggggggaccactatcagctga

SEQ ID NO: 2944496 - DNA, 25 bp, Homo sapien
tgcatgggataggctgggttcttca

SEQ ID NO: 2944497 - DNA, 25 bp, Homo sapien
aggtgcatgggataggctgggttct

SEQ ID NO: 2944498 - DNA, 25 bp, Homo sapien
aaagaacaggtgcatgggataggct

SEQ ID NO: 2944499 - DNA, 25 bp, Homo sapien
gaaagaacaggtgcatgggataggc

SEQ ID NO: 2944500 - DNA, 25 bp, Homo sapien
cagatggctttggaccgaaggagat

SEQ ID NO: 2944501 - DNA, 25 bp, Homo sapien
agatggctttggaccgaaggagatg

SEQ ID NO: 2944502 - DNA, 25 bp, Homo sapien
tccatggggcccattgagactcaaa

SEQ ID NO: 2944503 - DNA, 25 bp, Homo sapien
gagaaaagactttactgctgaattg

SEQ ID NO: 2944504 - DNA, 25 bp, Homo sapien
gggcccattgagactcaaagctaag

SEQ ID NO: 2944505 - DNA, 25 bp, Homo sapien
agctaaggtgggaaggtcttctatc

SEQ ID NO: 2944506 - DNA, 25 bp, Homo sapien
tcttcctcccgatgatagatcaggg

SEQ ID NO: 2944507 - DNA, 25 bp, Homo sapien
tctcattccccaggaacctaagtca

SEQ ID NO: 2944508 - DNA, 25 bp, Homo sapien
ttaaggaggtctcgccaagttggcc

SEQ ID NO: 2944509 - DNA, 25 bp, Homo sapien
aggccgcagcccgaacagggtttca

SEQ ID NO: 2944510 - DNA, 25 bp, Homo sapien
taagactgagtcacactctattgct

SEQ ID NO: 2944511 - DNA, 25 bp, Homo sapien
gactgagtcacactctattgctcag

SEQ ID NO: 2944512 - DNA, 25 bp, Homo sapien
tttgtaactttagtagacagcattt

SEQ ID NO: 2944513 - DNA, 25 bp, Homo sapien
ccatgaccggctgattttttcttgt

SEQ ID NO: 2944514 - DNA, 25 bp, Homo sapien
tgactacaataaatagcagcgcctc

SEQ ID NO: 2944515 - DNA, 25 bp, Homo sapien
tgggaggtctgacattagccaggcc

SEQ ID NO: 2944516 - DNA, 25 bp, Homo sapien
tagtaggagtaccacagtcttcgat

SEQ ID NO: 2944517 - DNA, 25 bp, Homo sapien
cgcgtgacctatcgatcattggaga

SEQ ID NO: 2944518 - DNA, 25 bp, Homo sapien
gaaaaacgcattcaacagtctcagg

SEQ ID NO: 2944519 - DNA, 25 bp, Homo sapien
tctcaggtaaccagggcgaatccat

SEQ ID NO: 2944520 - DNA, 25 bp, Homo sapien
tcctgatttatgcaacaaaaggtct

SEQ ID NO: 2944521 - DNA, 25 bp, Homo sapien
gacgcttaccgtttatctagatcaa

SEQ ID NO: 2944522 - DNA, 25 bp, Homo sapien
tggccgctccctaaaaataagctgg

SEQ ID NO: 2944523 - DNA, 25 bp, Homo sapien
gtttgggtaaatcagtggccgctcc

SEQ ID NO: 2944524 - DNA, 25 bp, Homo sapien
gaagtggtcactatcaagcctccaa

SEQ ID NO: 2944525 - DNA, 25 bp, Homo sapien
taaaattgggacacatcgagcaatc

SEQ ID NO: 2944526 - DNA, 25 bp, Homo sapien
tccagcaagatgagcgccttgccag

SEQ ID NO: 2944527 - DNA, 25 bp, Homo sapien
ggagagccacctattgctgttccca

SEQ ID NO: 2944528 - DNA, 25 bp, Homo sapien
cacaggctcagcatcagtagatctc

SEQ ID NO: 2944529 - DNA, 25 bp, Homo sapien
tttttggccccttgccgactggcag

SEQ ID NO: 2944530 - DNA, 25 bp, Homo sapien
gaatctgtgaagcagtatggcacca

SEQ ID NO: 2944531 - DNA, 25 bp, Homo sapien
atctgtgaagcagtatggcaccaac

SEQ ID NO: 2944532 - DNA, 25 bp, Homo sapien
tggcaccaactccccttttgtccat

SEQ ID NO: 2944533 - DNA, 25 bp, Homo sapien
aaagaatctgtgaagcagtatggca

SEQ ID NO: 2944534 - DNA, 25 bp, Homo sapien
ttttatggccagtataagcaggcaa

SEQ ID NO: 2944535 - DNA, 25 bp, Homo sapien
aggaggaccctctaactgaaaccag

SEQ ID NO: 2944536 - DNA, 25 bp, Homo sapien
tactttatacattgaaggcagctcc

SEQ ID NO: 2944537 - DNA, 25 bp, Homo sapien
gccaaagctggcctttatggagcca

SEQ ID NO: 2944538 - DNA, 25 bp, Homo sapien
tgtgtttcactatcgagagtcggac

SEQ ID NO: 2944539 - DNA, 25 bp, Homo sapien
gatcgttgcattcaagtttaccgcc

SEQ ID NO: 2944540 - DNA, 25 bp, Homo sapien
ttttctgcgggtacgtcactatcca

SEQ ID NO: 2944541 - DNA, 25 bp, Homo sapien
gagtcggactgcttttggatttacg

SEQ ID NO: 2944542 - DNA, 25 bp, Homo sapien
cgtatttaagctcatcgcgcgtacc

SEQ ID NO: 2944543 - DNA, 25 bp, Homo sapien
cacatacgatatgcggacggtccta

SEQ ID NO: 2944544 - DNA, 25 bp, Homo sapien
tgcttttaaattggccgtgtgcgct

SEQ ID NO: 2944545 - DNA, 25 bp, Homo sapien
gacggtcctatttaagttgagcgcc

SEQ ID NO: 2944546 - DNA, 25 bp, Homo sapien
ttgaaaacggtgttgatacagtgga

SEQ ID NO: 2944547 - DNA, 25 bp, Homo sapien
gggcgcttagcgtctgttactgtcg

SEQ ID NO: 2944548 - DNA, 25 bp, Homo sapien
tttcgaagcgggagttttgttcgca

SEQ ID NO: 2944549 - DNA, 25 bp, Homo sapien
tgctggcccttgatcgctggaagga

SEQ ID NO: 2944550 - DNA, 25 bp, Homo sapien
tcaacgtgtcctctaataccaggtc

SEQ ID NO: 2944551 - DNA, 25 bp, Homo sapien
caggtcctccatgataagttgctcc

SEQ ID NO: 2944552 - DNA, 25 bp, Homo sapien
tattctatgttgtcaacgtgtcctc

SEQ ID NO: 2944553 - DNA, 25 bp, Homo sapien
ccgatccagaagtattgccccagct

SEQ ID NO: 2944554 - DNA, 25 bp, Homo sapien
cctcctgactttatagttcttcctc

SEQ ID NO: 2944555 - DNA, 25 bp, Homo sapien
tggctttgttgctcctcttggtttc

SEQ ID NO: 2944556 - DNA, 25 bp, Homo sapien
caaattcctctaatatattttggct

SEQ ID NO: 2944557 - DNA, 25 bp, Homo sapien
tttctggcaattttccccctcctga

SEQ ID NO: 2944558 - DNA, 25 bp, Homo sapien
taaaagtggcatctcagactgatga

SEQ ID NO: 2944559 - DNA, 25 bp, Homo sapien
aaaagtggcatctcagactgatgaa

SEQ ID NO: 2944560 - DNA, 25 bp, Homo sapien
gatgctgaggcaactggttagccat

SEQ ID NO: 2944561 - DNA, 25 bp, Homo sapien
ggtgggctgctccatatatgatgct

SEQ ID NO: 2944562 - DNA, 25 bp, Homo sapien
aggattgtcaaacgtgcttgcttcc

SEQ ID NO: 2944563 - DNA, 25 bp, Homo sapien
cacaggattgtcaaacgtgcttgct

SEQ ID NO: 2944564 - DNA, 25 bp, Homo sapien
caggattgtcaaacgtgcttgcttc

SEQ ID NO: 2944565 - DNA, 25 bp, Homo sapien
acaggattgtcaaacgtgcttgctt

SEQ ID NO: 2944566 - DNA, 25 bp, Homo sapien
gctggcattgggaaaggcacagttt

SEQ ID NO: 2944567 - DNA, 25 bp, Homo sapien
taataacgcccatctcttagggctg

SEQ ID NO: 2944568 - DNA, 25 bp, Homo sapien
gaaattcgaacctagaggaatgacc

SEQ ID NO: 2944569 - DNA, 25 bp, Homo sapien
gagataatgcacgtagagccctcgg

SEQ ID NO: 2944570 - DNA, 25 bp, Homo sapien
tcgtgagccgcgctctcctcgagcc

SEQ ID NO: 2944571 - DNA, 25 bp, Homo sapien
tctcctcgagcctttcccggtgaaa

SEQ ID NO: 2944572 - DNA, 25 bp, Homo sapien
agcctttcccggtgaaacaccgcag

SEQ ID NO: 2944573 - DNA, 25 bp, Homo sapien
tgagccgcgctctcctcgagccttt

SEQ ID NO: 2944574 - DNA, 25 bp, Homo sapien
gaggccttgaaattgaaggttccag

SEQ ID NO: 2944575 - DNA, 25 bp, Homo sapien
aggccttgaaattgaaggttccagg

SEQ ID NO: 2944576 - DNA, 25 bp, Homo sapien
ggaggccttgaaattgaaggttcca

SEQ ID NO: 2944577 - DNA, 25 bp, Homo sapien
tctgtccggcgggtataagagcgcc

SEQ ID NO: 2944578 - DNA, 25 bp, Homo sapien
caatgaccacgacatgcagggcttg

SEQ ID NO: 2944579 - DNA, 25 bp, Homo sapien
ctggttgtccgaggcccggctgatt

SEQ ID NO: 2944580 - DNA, 25 bp, Homo sapien
cacacttggaaggtgatgccacgcg

SEQ ID NO: 2944581 - DNA, 25 bp, Homo sapien
tgagagagatatgcaaagacatccc

SEQ ID NO: 2944582 - DNA, 25 bp, Homo sapien
gcagacccctactaggtgggaggaa

SEQ ID NO: 2944583 - DNA, 25 bp, Homo sapien
gggtcgaggtagagtcacagtttac

SEQ ID NO: 2944584 - DNA, 25 bp, Homo sapien
cttcattgaggtggacaggtcctgc

SEQ ID NO: 2944585 - DNA, 25 bp, Homo sapien
gacacacacagcttataaaaagggt

SEQ ID NO: 2944586 - DNA, 25 bp, Homo sapien
gttatcagtctttaataacttacag

SEQ ID NO: 2944587 - DNA, 25 bp, Homo sapien
agggtcatggatctacaaatgtggg

SEQ ID NO: 2944588 - DNA, 25 bp, Homo sapien
tacaggcaaatgctaaaaaatagtt

SEQ ID NO: 2944589 - DNA, 25 bp, Homo sapien
gcgccacaaccccatatagaaatct

SEQ ID NO: 2944590 - DNA, 25 bp, Homo sapien
aattcagcttcaagataaatctccc

SEQ ID NO: 2944591 - DNA, 25 bp, Homo sapien
aatttttataagtgcttgctttgca

SEQ ID NO: 2944592 - DNA, 25 bp, Homo sapien
taattttcacaagccatcccgtaac

SEQ ID NO: 2944593 - DNA, 25 bp, Homo sapien
cacaggtctagagcttgggagtctc

SEQ ID NO: 2944594 - DNA, 25 bp, Homo sapien
gaaatggctcggtcaaagtcacaga

SEQ ID NO: 2944595 - DNA, 25 bp, Homo sapien
caaaaaggtgctccgaagcctacaa

SEQ ID NO: 2944596 - DNA, 25 bp, Homo sapien
tgtctcaggccaggtaattacaggg

SEQ ID NO: 2944597 - DNA, 25 bp, Homo sapien
gcttcatcaatttgcgtatcattct

SEQ ID NO: 2944598 - DNA, 25 bp, Homo sapien
ttcatcaatttgcgtatcattctta

SEQ ID NO: 2944599 - DNA, 25 bp, Homo sapien
cttcatcaatttgcgtatcattctt

SEQ ID NO: 2944600 - DNA, 25 bp, Homo sapien
gccatcagctgcctatttgaggtat

SEQ ID NO: 2944601 - DNA, 25 bp, Homo sapien
gtcttcgtcattgccatcagctgcc

SEQ ID NO: 2944602 - DNA, 25 bp, Homo sapien
tcagacagtcttcgtcattgccatc

SEQ ID NO: 2944603 - DNA, 25 bp, Homo sapien
gcctatttgaggtattctcatcaaa

SEQ ID NO: 2944604 - DNA, 25 bp, Homo sapien
ctttgagcaagggtcatgctaattt

SEQ ID NO: 2944605 - DNA, 25 bp, Homo sapien
caaattacagtgtcatctttgagca

SEQ ID NO: 2944606 - DNA, 25 bp, Homo sapien
cagtgtcatctttgagcaagggtca

SEQ ID NO: 2944607 - DNA, 25 bp, Homo sapien
cttcacaaattacagtgtcatcttt

SEQ ID NO: 2944608 - DNA, 25 bp, Homo sapien
gcaaccatccaacctctcagtcttt

SEQ ID NO: 2944609 - DNA, 25 bp, Homo sapien
acacggcaaccatccaacctctcag

SEQ ID NO: 2944610 - DNA, 25 bp, Homo sapien
acggcaaccatccaacctctcagtc

SEQ ID NO: 2944611 - DNA, 25 bp, Homo sapien
ggcaaccatccaacctctcagtctt

SEQ ID NO: 2944612 - DNA, 25 bp, Homo sapien
ggaacatttcacgaatttgcacatc

SEQ ID NO: 2944613 - DNA, 25 bp, Homo sapien
gacatgctaatcttcctgtatggtt

SEQ ID NO: 2944614 - DNA, 25 bp, Homo sapien
tgctaatcttcctgtatggttccaa

SEQ ID NO: 2944615 - DNA, 25 bp, Homo sapien
atttcacgaatttgcacatcatcct

SEQ ID NO: 2944616 - DNA, 25 bp, Homo sapien
tccccttaagagattcatatcttcg

SEQ ID NO: 2944617 - DNA, 25 bp, Homo sapien
acgagggccttgataacctcagcac

SEQ ID NO: 2944618 - DNA, 25 bp, Homo sapien
tggcaatgcgggcacgagcccgctt

SEQ ID NO: 2944619 - DNA, 25 bp, Homo sapien
tcgggactggttgtttgtgctgtgg

SEQ ID NO: 2944620 - DNA, 25 bp, Homo sapien
ctactctgaagcctttgtaggggcc

SEQ ID NO: 2944621 - DNA, 25 bp, Homo sapien
ctctgaagcctttgtaggggcctgg

SEQ ID NO: 2944622 - DNA, 25 bp, Homo sapien
tgaagcctttgtaggggcctgggca

SEQ ID NO: 2944623 - DNA, 25 bp, Homo sapien
tactctgaagcctttgtaggggcct

SEQ ID NO: 2944624 - DNA, 25 bp, Homo sapien
cgctcagagctactccggccgggtt

SEQ ID NO: 2944625 - DNA, 25 bp, Homo sapien
cagagctactccggccgggttccag

SEQ ID NO: 2944626 - DNA, 25 bp, Homo sapien
agctactccggccgggttccagctt

SEQ ID NO: 2944627 - DNA, 25 bp, Homo sapien
gctcagagctactccggccgggttc

SEQ ID NO: 2944628 - DNA, 25 bp, Homo sapien
gacaccaaagacaggtactcgagtt

SEQ ID NO: 2944629 - DNA, 25 bp, Homo sapien
tcgttgatccccaagtgattgtcca

SEQ ID NO: 2944630 - DNA, 25 bp, Homo sapien
ggcctggctccgacccgattaaggc

SEQ ID NO: 2944631 - DNA, 25 bp, Homo sapien
cgagtttggcaagttcttccgcggg

SEQ ID NO: 2944632 - DNA, 25 bp, Homo sapien
aaatgataatccagtattacagttc

SEQ ID NO: 2944633 - DNA, 25 bp, Homo sapien
tcggaaactctactatctcaactct

SEQ ID NO: 2944634 - DNA, 25 bp, Homo sapien
tgcgcctggtcccattaatcagtat

SEQ ID NO: 2944635 - DNA, 25 bp, Homo sapien
ttccagttttcatcggaaactctac

SEQ ID NO: 2944636 - DNA, 25 bp, Homo sapien
ggttacttcatgatccccaaaacaa

SEQ ID NO: 2944637 - DNA, 25 bp, Homo sapien
caaaacaaccctcataagtaggtgc

SEQ ID NO: 2944638 - DNA, 25 bp, Homo sapien
taagttagtaacgataatgtcaatg

SEQ ID NO: 2944639 - DNA, 25 bp, Homo sapien
ggctacacgaacacatcttatgcat

SEQ ID NO: 2944640 - DNA, 25 bp, Homo sapien
ccactgtgcccggcacacctgccta

SEQ ID NO: 2944641 - DNA, 25 bp, Homo sapien
cactgtgcccggcacacctgcctag

SEQ ID NO: 2944642 - DNA, 25 bp, Homo sapien
actgtgcccggcacacctgcctagt

SEQ ID NO: 2944643 - DNA, 25 bp, Homo sapien
tatcaaaggtggtatttttctcagc

SEQ ID NO: 2944644 - DNA, 25 bp, Homo sapien
gtatcaaaggtggtatttttctcag

SEQ ID NO: 2944645 - DNA, 25 bp, Homo sapien
agtatcaaaggtggtatttttctca

SEQ ID NO: 2944646 - DNA, 25 bp, Homo sapien
ggtttgtatgagacgcagcaagtta

SEQ ID NO: 2944647 - DNA, 25 bp, Homo sapien
tttgctagtggaaggcttcgctgga

SEQ ID NO: 2944648 - DNA, 25 bp, Homo sapien
cttcgctggaggccgcatggtttgt

SEQ ID NO: 2944649 - DNA, 25 bp, Homo sapien
aggccgcatggtttgtatgagacgc

SEQ ID NO: 2944650 - DNA, 25 bp, Homo sapien
gaacagaagggttgtccggttggca

SEQ ID NO: 2944651 - DNA, 25 bp, Homo sapien
cagaagggttgtccggttggcaaag

SEQ ID NO: 2944652 - DNA, 25 bp, Homo sapien
gctgggcattaaagcttccagttct

SEQ ID NO: 2944653 - DNA, 25 bp, Homo sapien
gctgcgctgggcattaaagcttcca

SEQ ID NO: 2944654 - DNA, 25 bp, Homo sapien
atccacagcaactttcacatcatct

SEQ ID NO: 2944655 - DNA, 25 bp, Homo sapien
cctgctgcgctgggcattaaagctt

SEQ ID NO: 2944656 - DNA, 25 bp, Homo sapien
caaaggacaggacactaaggacaaa

SEQ ID NO: 2944657 - DNA, 25 bp, Homo sapien
tccaaaggacaggacactaaggaca

SEQ ID NO: 2944658 - DNA, 25 bp, Homo sapien
ttccaaaggacaggacactaaggac

SEQ ID NO: 2944659 - DNA, 25 bp, Homo sapien
ccaaaggacaggacactaaggacaa

SEQ ID NO: 2944660 - DNA, 25 bp, Homo sapien
gatctcggtttcgatctcggcttcg

SEQ ID NO: 2944661 - DNA, 25 bp, Homo sapien
gatctcggcttcgactccgcttctt

SEQ ID NO: 2944662 - DNA, 25 bp, Homo sapien
ggtttcgttccctatctctgtctcg

SEQ ID NO: 2944663 - DNA, 25 bp, Homo sapien
tgtggtctctatctcggtttcgttc

SEQ ID NO: 2944664 - DNA, 25 bp, Homo sapien
gcttatcccgccatctatccagatt

SEQ ID NO: 2944665 - DNA, 25 bp, Homo sapien
tcctgctcctggaccgatatctaga

SEQ ID NO: 2944666 - DNA, 25 bp, Homo sapien
actgcatgatgctggtaactttgcc

SEQ ID NO: 2944667 - DNA, 25 bp, Homo sapien
aaatgtcaccaatggtgggctcttc

SEQ ID NO: 2944668 - DNA, 25 bp, Homo sapien
agctacattggccacacgaccctcc

SEQ ID NO: 2944669 - DNA, 25 bp, Homo sapien
ctggcctttgctcacgacatcagct

SEQ ID NO: 2944670 - DNA, 25 bp, Homo sapien
ctggtcttggtcccagtgaaggaca

SEQ ID NO: 2944671 - DNA, 25 bp, Homo sapien
cctcccgccggagctcagagatgtg

SEQ ID NO: 2944672 - DNA, 25 bp, Homo sapien
tgagtgggtctatcaggattccgca

SEQ ID NO: 2944673 - DNA, 25 bp, Homo sapien
cgcttgcgttccagtgagtcgtcct

SEQ ID NO: 2944674 - DNA, 25 bp, Homo sapien
tggtctccccgacaagatttcgccg

SEQ ID NO: 2944675 - DNA, 25 bp, Homo sapien
ggattccgcattgaggtctcctcat

SEQ ID NO: 2944676 - DNA, 25 bp, Homo sapien
caccttagggagaatgccagtctct

SEQ ID NO: 2944677 - DNA, 25 bp, Homo sapien
tgccctctcaggaatggaggctctt

SEQ ID NO: 2944678 - DNA, 25 bp, Homo sapien
gacaattttaatggggctcatgtcc

SEQ ID NO: 2944679 - DNA, 25 bp, Homo sapien
ctttgcttagtgtgccctctcagga

SEQ ID NO: 2944680 - DNA, 25 bp, Homo sapien
gaggctcttcctcaaccaattcaat

SEQ ID NO: 2944681 - DNA, 25 bp, Homo sapien
gctgggcctgtttgagttcccgcct

SEQ ID NO: 2944682 - DNA, 25 bp, Homo sapien
tgggaatagaatccatctcagcttc

SEQ ID NO: 2944683 - DNA, 25 bp, Homo sapien
tcaggcagagggtcaacccagtgtt

SEQ ID NO: 2944684 - DNA, 25 bp, Homo sapien
cagtgtttgttgagtcccatgggaa

SEQ ID NO: 2944685 - DNA, 25 bp, Homo sapien
tgctcaaggattgacatctgggtct

SEQ ID NO: 2944686 - DNA, 25 bp, Homo sapien
cactcaggaatatcattgggcatca

SEQ ID NO: 2944687 - DNA, 25 bp, Homo sapien
aaaggcatgcttcttccactcagga

SEQ ID NO: 2944688 - DNA, 25 bp, Homo sapien
ccaatacccctcatgttggcagcaa

SEQ ID NO: 2944689 - DNA, 25 bp, Homo sapien
catacttgtcccgttagtttcagtt

SEQ ID NO: 2944690 - DNA, 25 bp, Homo sapien
cttaactcttttggatgagccactt

SEQ ID NO: 2944691 - DNA, 25 bp, Homo sapien
tatcacccctcttttagacaataac

SEQ ID NO: 2944692 - DNA, 25 bp, Homo sapien
gccacttcaagtaggcacatacttg

SEQ ID NO: 2944693 - DNA, 25 bp, Homo sapien
actcttttggccaccgacatagctg

SEQ ID NO: 2944694 - DNA, 25 bp, Homo sapien
tcttgcccctggaagtgtagcctgc

SEQ ID NO: 2944695 - DNA, 25 bp, Homo sapien
taagcaacaaccaaactcctctgac

SEQ ID NO: 2944696 - DNA, 25 bp, Homo sapien
tgcctccgccaggtactgggtgatc

SEQ ID NO: 2944697 - DNA, 25 bp, Homo sapien
cagtcctcaaatcgaatggtgtagc

SEQ ID NO: 2944698 - DNA, 25 bp, Homo sapien
tgtttcagggctagtgcagtcctca

SEQ ID NO: 2944699 - DNA, 25 bp, Homo sapien
catgatgatcgcgtactgagtgagg

SEQ ID NO: 2944700 - DNA, 25 bp, Homo sapien
ggtcagggtcaatcaagcactctct

SEQ ID NO: 2944701 - DNA, 25 bp, Homo sapien
tctgcataacagtaatcaggctggc

SEQ ID NO: 2944702 - DNA, 25 bp, Homo sapien
gacaatcagcttcatgtcctgccgt

SEQ ID NO: 2944703 - DNA, 25 bp, Homo sapien
gaaaacttcactgcatccaaggtgg

SEQ ID NO: 2944704 - DNA, 25 bp, Homo sapien
cactggatatgttcgacctgggatg

SEQ ID NO: 2944705 - DNA, 25 bp, Homo sapien
gctgggtcaaagattcgggtctgca

SEQ ID NO: 2944706 - DNA, 25 bp, Homo sapien
tacaggatctcacaagcagtatcaa

SEQ ID NO: 2944707 - DNA, 25 bp, Homo sapien
taattaactctggaacatcaggtcc

SEQ ID NO: 2944708 - DNA, 25 bp, Homo sapien
caggtcccagggatttcattctttc

SEQ ID NO: 2944709 - DNA, 25 bp, Homo sapien
tccatctgccttctactcttaggta

SEQ ID NO: 2944710 - DNA, 25 bp, Homo sapien
cttctactcttaggtatatgtccaa

SEQ ID NO: 2944711 - DNA, 25 bp, Homo sapien
tctgccttctactcttaggtatatg

SEQ ID NO: 2944712 - DNA, 25 bp, Homo sapien
gccttctactcttaggtatatgtcc

SEQ ID NO: 2944713 - DNA, 25 bp, Homo sapien
tctctgcgatattggtggcaatcac

SEQ ID NO: 2944714 - DNA, 25 bp, Homo sapien
aactttctgtttcacgaatcctggg

SEQ ID NO: 2944715 - DNA, 25 bp, Homo sapien
tgagaaataggcgtcaccacgagct

SEQ ID NO: 2944716 - DNA, 25 bp, Homo sapien
tagtagataccatcaatagtcagcg

SEQ ID NO: 2944717 - DNA, 25 bp, Homo sapien
tacaacctgtaacacttccctgggc

SEQ ID NO: 2944718 - DNA, 25 bp, Homo sapien
gtaggcacgttctgtgtacaacctg

SEQ ID NO: 2944719 - DNA, 25 bp, Homo sapien
gatttccggcacgttggtggtcagc

SEQ ID NO: 2944720 - DNA, 25 bp, Homo sapien
tcagcatttcatctcggtaggcacg

SEQ ID NO: 2944721 - DNA, 25 bp, Homo sapien
gaaggccaggattggactgttccac

SEQ ID NO: 2944722 - DNA, 25 bp, Homo sapien
tggatctgagcgctaaagtggttga

SEQ ID NO: 2944723 - DNA, 25 bp, Homo sapien
tttgcatttcactcaaagggactgc

SEQ ID NO: 2944724 - DNA, 25 bp, Homo sapien
ccagacctgccgtgagaggctgtta

SEQ ID NO: 2944725 - DNA, 25 bp, Homo sapien
agggctccagggtagcatcagtgtc

SEQ ID NO: 2944726 - DNA, 25 bp, Homo sapien
tcagtgtcgggggaaacgccatcag

SEQ ID NO: 2944727 - DNA, 25 bp, Homo sapien
atcagctgggaaattactcatacag

SEQ ID NO: 2944728 - DNA, 25 bp, Homo sapien
gggaaattactcatacagctcctcc

SEQ ID NO: 2944729 - DNA, 25 bp, Homo sapien
taagagggtcagtctagccagtgtc

SEQ ID NO: 2944730 - DNA, 25 bp, Homo sapien
ggatatggcccctgctttcagagag

SEQ ID NO: 2944731 - DNA, 25 bp, Homo sapien
caattaggaagccaccggtgagact

SEQ ID NO: 2944732 - DNA, 25 bp, Homo sapien
tgagactggcggtaacttccagggc

SEQ ID NO: 2944733 - DNA, 25 bp, Homo sapien
cccaagcgagtgagcaggccctcgt

SEQ ID NO: 2944734 - DNA, 25 bp, Homo sapien
ctgtgatcaaagtttccataggtgg

SEQ ID NO: 2944735 - DNA, 25 bp, Homo sapien
cggcccaagcgagtgagcaggccct

SEQ ID NO: 2944736 - DNA, 25 bp, Homo sapien
tggctgtgatcaaagtttccatagg

SEQ ID NO: 2944737 - DNA, 25 bp, Homo sapien
gacagcatggatacaatggtcagca

SEQ ID NO: 2944738 - DNA, 25 bp, Homo sapien
tagcattggctccagagggaactct

SEQ ID NO: 2944739 - DNA, 25 bp, Homo sapien
tatagaagacgttctgcacagacag

SEQ ID NO: 2944740 - DNA, 25 bp, Homo sapien
ccagatgcacagacatgatgagcat

SEQ ID NO: 2944741 - DNA, 25 bp, Homo sapien
ccatgggttggagaacttgttgttc

SEQ ID NO: 2944742 - DNA, 25 bp, Homo sapien
gagcctggataaagttctcatagca

SEQ ID NO: 2944743 - DNA, 25 bp, Homo sapien
cattatgcctaacatctgcttgcga

SEQ ID NO: 2944744 - DNA, 25 bp, Homo sapien
tcttccaggagttgtacacagctag

SEQ ID NO: 2944745 - DNA, 25 bp, Homo sapien
ggatggatatagaccacctgctggt

SEQ ID NO: 2944746 - DNA, 25 bp, Homo sapien
cctgctggtcgatcagtgtccggta

SEQ ID NO: 2944747 - DNA, 25 bp, Homo sapien
cattacggaagaacccactgcagat

SEQ ID NO: 2944748 - DNA, 25 bp, Homo sapien
gatggccttctgcactcggactgtg

SEQ ID NO: 2944749 - DNA, 25 bp, Homo sapien
tttgatacattgtgcctaattcagg

SEQ ID NO: 2944750 - DNA, 25 bp, Homo sapien
taattctctcatagggtttgataca

SEQ ID NO: 2944751 - DNA, 25 bp, Homo sapien
aaaagcccctagaccctgggacatg

SEQ ID NO: 2944752 - DNA, 25 bp, Homo sapien
caagcagtgttatactaggacatac

SEQ ID NO: 2944753 - DNA, 25 bp, Homo sapien
tgcccacctcagcctcccaaagtgc

SEQ ID NO: 2944754 - DNA, 25 bp, Homo sapien
ttgaactcccgacctcggctgatct

SEQ ID NO: 2944755 - DNA, 25 bp, Homo sapien
tgaactcccgacctcggctgatctg

SEQ ID NO: 2944756 - DNA, 25 bp, Homo sapien
ggttgtacaagggttcaagacgctg

SEQ ID NO: 2944757 - DNA, 25 bp, Homo sapien
tcagcgccgtcggaaagctcgagat

SEQ ID NO: 2944758 - DNA, 25 bp, Homo sapien
cattgggttcctcatagcggttgta

SEQ ID NO: 2944759 - DNA, 25 bp, Homo sapien
ccgagggtcgatggtggtaacttca

SEQ ID NO: 2944760 - DNA, 25 bp, Homo sapien
taagacagtcagtcacgggacagct

SEQ ID NO: 2944761 - DNA, 25 bp, Homo sapien
taaatatttccacgaggtcaagcca

SEQ ID NO: 2944762 - DNA, 25 bp, Homo sapien
gatatgagctcccaactgggcccaa

SEQ ID NO: 2944763 - DNA, 25 bp, Homo sapien
tgtcatcgataagtccaagccctgg

SEQ ID NO: 2944764 - DNA, 25 bp, Homo sapien
tgatgttccgccaggtaaggagcct

SEQ ID NO: 2944765 - DNA, 25 bp, Homo sapien
taagttccgaaacctggcctggcaa

SEQ ID NO: 2944766 - DNA, 25 bp, Homo sapien
tgtacgtcgtttccgagcgcaaaga

SEQ ID NO: 2944767 - DNA, 25 bp, Homo sapien
ggcccggctagtgctgatgctgaaa

SEQ ID NO: 2944768 - DNA, 25 bp, Homo sapien
cgtccaggcgggatgaagtaaacct

SEQ ID NO: 2944769 - DNA, 25 bp, Homo sapien
cagtcaaagccaaatcacgtccagg

SEQ ID NO: 2944770 - DNA, 25 bp, Homo sapien
agtaaacctggaccgaggagcctga

SEQ ID NO: 2944771 - DNA, 25 bp, Homo sapien
ggagctcacacatgccccataggga

SEQ ID NO: 2944772 - DNA, 25 bp, Homo sapien
taaagccaagctatcgtggtgggaa

SEQ ID NO: 2944773 - DNA, 25 bp, Homo sapien
gaaaggtctccacaagctgagatga

SEQ ID NO: 2944774 - DNA, 25 bp, Homo sapien
tacacacacgaagagagagggagtt

SEQ ID NO: 2944775 - DNA, 25 bp, Homo sapien
tcctcaaacttggagaggcactgct

SEQ ID NO: 2944776 - DNA, 25 bp, Homo sapien
attcagaaaaccgtgagtagaggtc

SEQ ID NO: 2944777 - DNA, 25 bp, Homo sapien
ttcagaaaaccgtgagtagaggtcc

SEQ ID NO: 2944778 - DNA, 25 bp, Homo sapien
ccattcagaaaaccgtgagtagagg

SEQ ID NO: 2944779 - DNA, 25 bp, Homo sapien
tccattcagaaaaccgtgagtagag

SEQ ID NO: 2944780 - DNA, 25 bp, Homo sapien
tttgaatggaacttggccccaggcc

SEQ ID NO: 2944781 - DNA, 25 bp, Homo sapien
ccaggcttgtgtaactaggcttgag

SEQ ID NO: 2944782 - DNA, 25 bp, Homo sapien
ttgttttgcagaagccgccaggcca

SEQ ID NO: 2944783 - DNA, 25 bp, Homo sapien
gcagtcctttggcacagagagccca

SEQ ID NO: 2944784 - DNA, 25 bp, Homo sapien
tgtcagggagtacgctgcatgtgtc

SEQ ID NO: 2944785 - DNA, 25 bp, Homo sapien
gtgtccacgaagctgtgtgtccagg

SEQ ID NO: 2944786 - DNA, 25 bp, Homo sapien
ctgtgagcgtcctgcatccaagagt

SEQ ID NO: 2944787 - DNA, 25 bp, Homo sapien
gggactgtgagcgtcctgcatccaa

SEQ ID NO: 2944788 - DNA, 25 bp, Homo sapien
tatccacgtacccatcatccagaag

SEQ ID NO: 2944789 - DNA, 25 bp, Homo sapien
ggtacatatccacgtacccatcatc

SEQ ID NO: 2944790 - DNA, 25 bp, Homo sapien
tcaggggtacatatccacgtaccca

SEQ ID NO: 2944791 - DNA, 25 bp, Homo sapien
catatccacgtacccatcatccaga

SEQ ID NO: 2944792 - DNA, 25 bp, Homo sapien
tttactcagccctcagaagtcacta

SEQ ID NO: 2944793 - DNA, 25 bp, Homo sapien
tcaggctagaaagaacaacgtgcta

SEQ ID NO: 2944794 - DNA, 25 bp, Homo sapien
ctctccctgggtgacataaagcaaa

SEQ ID NO: 2944795 - DNA, 25 bp, Homo sapien
cactatctctggaactccgtggagc

SEQ ID NO: 2944796 - DNA, 25 bp, Homo sapien
tttctcccaatagccactgcagact

SEQ ID NO: 2944797 - DNA, 25 bp, Homo sapien
cagaacccaaatgagtgcagccagc

SEQ ID NO: 2944798 - DNA, 25 bp, Homo sapien
agccagcaccacctcgtaaatcaga

SEQ ID NO: 2944799 - DNA, 25 bp, Homo sapien
gcctctttaagtggaagctccactt

SEQ ID NO: 2944800 - DNA, 25 bp, Homo sapien
caaatggattaggtcattccctcca

SEQ ID NO: 2944801 - DNA, 25 bp, Homo sapien
ttcccaaggaacaagccaactgtct

SEQ ID NO: 2944802 - DNA, 25 bp, Homo sapien
gattactataacctgcacgcgtgtg

SEQ ID NO: 2944803 - DNA, 25 bp, Homo sapien
tcttgggcacaaccttagaccacct

SEQ ID NO: 2944804 - DNA, 25 bp, Homo sapien
acaaagctgaaggagagcgctggtt

SEQ ID NO: 2944805 - DNA, 25 bp, Homo sapien
ttgacaaagctgaaggagagcgctg

SEQ ID NO: 2944806 - DNA, 25 bp, Homo sapien
aaagctgaaggagagcgctggttcc

SEQ ID NO: 2944807 - DNA, 25 bp, Homo sapien
tgacaaagctgaaggagagcgctgg

SEQ ID NO: 2944808 - DNA, 25 bp, Homo sapien
ggacccaactaagcgctttgcttcc

SEQ ID NO: 2944809 - DNA, 25 bp, Homo sapien
ttgcaggacccaactaagcgctttg

SEQ ID NO: 2944810 - DNA, 25 bp, Homo sapien
tcttcttgcaggacccaactaagcg

SEQ ID NO: 2944811 - DNA, 25 bp, Homo sapien
tcttgcaggacccaactaagcgctt

SEQ ID NO: 2944812 - DNA, 25 bp, Homo sapien
gagctctagtctctctagaagccag

SEQ ID NO: 2944813 - DNA, 25 bp, Homo sapien
gaggtgcacttggatgacccataat

SEQ ID NO: 2944814 - DNA, 25 bp, Homo sapien
gactttgtgctgcaagatgtgggcc

SEQ ID NO: 2944815 - DNA, 25 bp, Homo sapien
gacccataatgacatccacatcagg

SEQ ID NO: 2944816 - DNA, 25 bp, Homo sapien
tacccagtgtaggtctgatgccttt

SEQ ID NO: 2944817 - DNA, 25 bp, Homo sapien
agacagaacgtttcctcaaccccag

SEQ ID NO: 2944818 - DNA, 25 bp, Homo sapien
ttattggattagaacatctgcctag

SEQ ID NO: 2944819 - DNA, 25 bp, Homo sapien
tttcacgaagtccattcccagatca

SEQ ID NO: 2944820 - DNA, 25 bp, Homo sapien
caccagaggtctcctgatatctcac

SEQ ID NO: 2944821 - DNA, 25 bp, Homo sapien
cccattgacgtctcagtttattgac

SEQ ID NO: 2944822 - DNA, 25 bp, Homo sapien
cattgacgtctcagtttattgacta

SEQ ID NO: 2944823 - DNA, 25 bp, Homo sapien
ggtctcctgatatctcactctcttt

SEQ ID NO: 2944824 - DNA, 25 bp, Homo sapien
cgtgtcgatcaggaaaatcaggaaa

SEQ ID NO: 2944825 - DNA, 25 bp, Homo sapien
ggcagcagcgtgtcgatcaggaaaa

SEQ ID NO: 2944826 - DNA, 25 bp, Homo sapien
ccgccaagccctgatttatgatgat

SEQ ID NO: 2944827 - DNA, 25 bp, Homo sapien
tcaggaaaatcccaccgctccccgc

SEQ ID NO: 2944828 - DNA, 25 bp, Homo sapien
tgcctccgtcttccaaagtaccaag

SEQ ID NO: 2944829 - DNA, 25 bp, Homo sapien
aacagtacttaaccctgaatggagt

SEQ ID NO: 2944830 - DNA, 25 bp, Homo sapien
gaaggaagaaactcctgaggtgaat

SEQ ID NO: 2944831 - DNA, 25 bp, Homo sapien
gaatggagtgatcaggaaatgcttc

SEQ ID NO: 2944832 - DNA, 25 bp, Homo sapien
tgaagctacctcaccatccatgtga

SEQ ID NO: 2944833 - DNA, 25 bp, Homo sapien
tttctcactggaggaacataagagg

SEQ ID NO: 2944834 - DNA, 25 bp, Homo sapien
tctctttctgccataaacccaggag

SEQ ID NO: 2944835 - DNA, 25 bp, Homo sapien
gaaagggctatcaggaccacaagtg

SEQ ID NO: 2944836 - DNA, 25 bp, Homo sapien
tagcctgaagtttgcggatcaagaa

SEQ ID NO: 2944837 - DNA, 25 bp, Homo sapien
cataaaagtggccatgaaatcggaa

SEQ ID NO: 2944838 - DNA, 25 bp, Homo sapien
gagataagatgatgtgggttggagg

SEQ ID NO: 2944839 - DNA, 25 bp, Homo sapien
tggagggaagtagcctgaagtttgc

SEQ ID NO: 2944840 - DNA, 25 bp, Homo sapien
actgctgagtccattatgaatctgt

SEQ ID NO: 2944841 - DNA, 25 bp, Homo sapien
cacagacacaactggtgtatgtttt

SEQ ID NO: 2944842 - DNA, 25 bp, Homo sapien
gtctgcacttgagacatgtttatac

SEQ ID NO: 2944843 - DNA, 25 bp, Homo sapien
tccccagggacaatttccgagtcca

SEQ ID NO: 2944844 - DNA, 25 bp, Homo sapien
cttttggcactgatctgcaaggcta

SEQ ID NO: 2944845 - DNA, 25 bp, Homo sapien
tgcggaccatttggccaggcgtctc

SEQ ID NO: 2944846 - DNA, 25 bp, Homo sapien
gccattgaaattgcaatgaacagag

SEQ ID NO: 2944847 - DNA, 25 bp, Homo sapien
cattaagcgttcttttccgagttgt

SEQ ID NO: 2944848 - DNA, 25 bp, Homo sapien
tgagctcaaagttgtcctgtcccat

SEQ ID NO: 2944849 - DNA, 25 bp, Homo sapien
ctggacacagatccaggccccaggc

SEQ ID NO: 2944850 - DNA, 25 bp, Homo sapien
tggacacagatccaggccccaggct

SEQ ID NO: 2944851 - DNA, 25 bp, Homo sapien
ccaggctgagctcaaagttgtcctg

SEQ ID NO: 2944852 - DNA, 25 bp, Homo sapien
agaacagagaatccttagagccttg

SEQ ID NO: 2944853 - DNA, 25 bp, Homo sapien
tttattatctgagaacagagaatcc

SEQ ID NO: 2944854 - DNA, 25 bp, Homo sapien
gaagactgagaggtgttgtctctgc

SEQ ID NO: 2944855 - DNA, 25 bp, Homo sapien
ccggaagtctgagcagagagtctct

SEQ ID NO: 2944856 - DNA, 25 bp, Homo sapien
cagctccggaagtctgagcagagag

SEQ ID NO: 2944857 - DNA, 25 bp, Homo sapien
ctgggacaggcggagtggccttgga

SEQ ID NO: 2944858 - DNA, 25 bp, Homo sapien
ggccagcactgaaggtctctatctg

SEQ ID NO: 2944859 - DNA, 25 bp, Homo sapien
acgacgggtccgacctgccagcaga

SEQ ID NO: 2944860 - DNA, 25 bp, Homo sapien
tgtctagactgctcgctggcccatc

SEQ ID NO: 2944861 - DNA, 25 bp, Homo sapien
tctatctgtctagactgctcgctgg

SEQ ID NO: 2944862 - DNA, 25 bp, Homo sapien
cagggctcgcttaccagggaagttc

SEQ ID NO: 2944863 - DNA, 25 bp, Homo sapien
aaggtgccatgggatactgacgtca

SEQ ID NO: 2944864 - DNA, 25 bp, Homo sapien
aatctttgaaaggaccgaggcgtgc

SEQ ID NO: 2944865 - DNA, 25 bp, Homo sapien
tgtcccggcctcgttcagaacaaag

SEQ ID NO: 2944866 - DNA, 25 bp, Homo sapien
tcaccgcggagagacgtgcgatttc

SEQ ID NO: 2944867 - DNA, 25 bp, Homo sapien
tctttcatgcaagggatcacgggaa

SEQ ID NO: 2944868 - DNA, 25 bp, Homo sapien
ggacaaactgaaggcccgatgagag

SEQ ID NO: 2944869 - DNA, 25 bp, Homo sapien
tcctgtgatcgcattgagacggccg

SEQ ID NO: 2944870 - DNA, 25 bp, Homo sapien
cacagcgacttgcaagttgaggcag

SEQ ID NO: 2944871 - DNA, 25 bp, Homo sapien
agcaggtatcagagagggcccttcc

SEQ ID NO: 2944872 - DNA, 25 bp, Homo sapien
gctgcattcatgtgtcggatgatgg

SEQ ID NO: 2944873 - DNA, 25 bp, Homo sapien
gaaaggaggacagtcggctgcagat

SEQ ID NO: 2944874 - DNA, 25 bp, Homo sapien
cttcagtagatgacagtaggtgact

SEQ ID NO: 2944875 - DNA, 25 bp, Homo sapien
gataaaccgtgatacatcaagacga

SEQ ID NO: 2944876 - DNA, 25 bp, Homo sapien
caaaatgtttataccacctctatta

SEQ ID NO: 2944877 - DNA, 25 bp, Homo sapien
tataccacctctattaataattgcc

SEQ ID NO: 2944878 - DNA, 25 bp, Homo sapien
caaggtagcctcacgtgatgactgg

SEQ ID NO: 2944879 - DNA, 25 bp, Homo sapien
cgttctgagctagttataggttcca

SEQ ID NO: 2944880 - DNA, 25 bp, Homo sapien
tagatattgatgaacacctttccag

SEQ ID NO: 2944881 - DNA, 25 bp, Homo sapien
ctagggtgttcatctcaaggtagcc

SEQ ID NO: 2944882 - DNA, 25 bp, Homo sapien
ggctaaccgtgatagtccttgcaag

SEQ ID NO: 2944883 - DNA, 25 bp, Homo sapien
gacagccttctactgcctgggaagt

SEQ ID NO: 2944884 - DNA, 25 bp, Homo sapien
gaagacatgagcttttctcgcagga

SEQ ID NO: 2944885 - DNA, 25 bp, Homo sapien
ttcagcaccgcaaggaaattatggg

SEQ ID NO: 2944886 - DNA, 25 bp, Homo sapien
tacttacgcgaacacagcaggttgg

SEQ ID NO: 2944887 - DNA, 25 bp, Homo sapien
catgggacaggcacagctacttacg

SEQ ID NO: 2944888 - DNA, 25 bp, Homo sapien
tgggatgtagcaccccgaagtagag

SEQ ID NO: 2944889 - DNA, 25 bp, Homo sapien
tgtggctggctaactaggacctctc

SEQ ID NO: 2944890 - DNA, 25 bp, Homo sapien
cattgttctggtgggtgtgtcacgc

SEQ ID NO: 2944891 - DNA, 25 bp, Homo sapien
tcatggtaggatcactcgcaaggcc

SEQ ID NO: 2944892 - DNA, 25 bp, Homo sapien
agggttgtccagctccataaggtgg

SEQ ID NO: 2944893 - DNA, 25 bp, Homo sapien
aggtgtggcgtaaggcctcactccc

SEQ ID NO: 2944894 - DNA, 25 bp, Homo sapien
cattgcaggtggctcttacagctct

SEQ ID NO: 2944895 - DNA, 25 bp, Homo sapien
gaagttggccaattacagcgtgtgt

SEQ ID NO: 2944896 - DNA, 25 bp, Homo sapien
gccagaagacaagcagggaagtgaa

SEQ ID NO: 2944897 - DNA, 25 bp, Homo sapien
cctgaattgtagtgttggcaagccc

SEQ ID NO: 2944898 - DNA, 25 bp, Homo sapien
caccctggggagcacataaagaagc

SEQ ID NO: 2944899 - DNA, 25 bp, Homo sapien
acaagtgtgtcccaacacagtcctg

SEQ ID NO: 2944900 - DNA, 25 bp, Homo sapien
caaggcacttgtctacaagtgtgtc

SEQ ID NO: 2944901 - DNA, 25 bp, Homo sapien
gggcgtccttgctccccagttgtcc

SEQ ID NO: 2944902 - DNA, 25 bp, Homo sapien
ctcacttcagaaatgaggtacccag

SEQ ID NO: 2944903 - DNA, 25 bp, Homo sapien
ctagtctcacttcagaaatgaggta

SEQ ID NO: 2944904 - DNA, 25 bp, Homo sapien
gtctcacttcagaaatgaggtaccc

SEQ ID NO: 2944905 - DNA, 25 bp, Homo sapien
agaaatgaggtacccagactcctct

SEQ ID NO: 2944906 - DNA, 25 bp, Homo sapien
gagatacgtagtggccaaagtccag

SEQ ID NO: 2944907 - DNA, 25 bp, Homo sapien
gaaggttgtgctttgcctgtgatta

SEQ ID NO: 2944908 - DNA, 25 bp, Homo sapien
ggtaggccagataatccagggaatt

SEQ ID NO: 2944909 - DNA, 25 bp, Homo sapien
tagagacgataacagggtaggccag

SEQ ID NO: 2944910 - DNA, 25 bp, Homo sapien
ggtttggtatcaacagtaggcttcg

SEQ ID NO: 2944911 - DNA, 25 bp, Homo sapien
atttgtgtgcgccactggaggtttg

SEQ ID NO: 2944912 - DNA, 25 bp, Homo sapien
aatgtgatttgtgtgcgccactgga

SEQ ID NO: 2944913 - DNA, 25 bp, Homo sapien
cactggaggtttggtatcaacagta

SEQ ID NO: 2944914 - DNA, 25 bp, Homo sapien
catttgcgattttctgacacagttg

SEQ ID NO: 2944915 - DNA, 25 bp, Homo sapien
cgattttctgacacagttgcttgtt

SEQ ID NO: 2944916 - DNA, 25 bp, Homo sapien
tggcagggccgcgatgggcatttgc

SEQ ID NO: 2944917 - DNA, 25 bp, Homo sapien
tgcttgttttcatactcgattttgt

SEQ ID NO: 2944918 - DNA, 25 bp, Homo sapien
tggggtttgcgatcaacaagcctct

SEQ ID NO: 2944919 - DNA, 25 bp, Homo sapien
cactagctcgcggttccttgtttct

SEQ ID NO: 2944920 - DNA, 25 bp, Homo sapien
tctatctcagatgccctgcggtcat

SEQ ID NO: 2944921 - DNA, 25 bp, Homo sapien
tggttttccatggtgattctcacta

SEQ ID NO: 2944922 - DNA, 25 bp, Homo sapien
gagagaagatatctcgtggtatttc

SEQ ID NO: 2944923 - DNA, 25 bp, Homo sapien
tctcgtggtatttctgatatagcgc

SEQ ID NO: 2944924 - DNA, 25 bp, Homo sapien
ttttgggagagaagatatctcgtgg

SEQ ID NO: 2944925 - DNA, 25 bp, Homo sapien
gaagatatctcgtggtatttctgat

SEQ ID NO: 2944926 - DNA, 25 bp, Homo sapien
ttgtatcttttccatggtgagtaac

SEQ ID NO: 2944927 - DNA, 25 bp, Homo sapien
tgtcttgagatcctgagcagccaag

SEQ ID NO: 2944928 - DNA, 25 bp, Homo sapien
gccagtcgggagtgtcttgagatcc

SEQ ID NO: 2944929 - DNA, 25 bp, Homo sapien
cgggagtgtcttgagatcctgagca

SEQ ID NO: 2944930 - DNA, 25 bp, Homo sapien
gctttattgaagcatctgaagatgg

SEQ ID NO: 2944931 - DNA, 25 bp, Homo sapien
tctgcctgccccattttggaatgag

SEQ ID NO: 2944932 - DNA, 25 bp, Homo sapien
gaggcattcttttccgatcgtgtgt

SEQ ID NO: 2944933 - DNA, 25 bp, Homo sapien
ccatggaaacttcaatgaggcattc

SEQ ID NO: 2944934 - DNA, 25 bp, Homo sapien
tacttgtggctggatgatctcaccc

SEQ ID NO: 2944935 - DNA, 25 bp, Homo sapien
cgtatgttttgagacattttcactg

SEQ ID NO: 2944936 - DNA, 25 bp, Homo sapien
tatgttttgagacattttcactgct

SEQ ID NO: 2944937 - DNA, 25 bp, Homo sapien
tgttttgagacattttcactgctgc

SEQ ID NO: 2944938 - DNA, 25 bp, Homo sapien
tttgagacattttcactgctgctgc

SEQ ID NO: 2944939 - DNA, 25 bp, Homo sapien
tgtcctgggacaacaactctaggct

SEQ ID NO: 2944940 - DNA, 25 bp, Homo sapien
tatctgctggaactggaatacactc

SEQ ID NO: 2944941 - DNA, 25 bp, Homo sapien
taccctttcctataggccggacatg

SEQ ID NO: 2944942 - DNA, 25 bp, Homo sapien
gcctttggcctcgaactgagagtta

SEQ ID NO: 2944943 - DNA, 25 bp, Homo sapien
ttgtaaccttccctgctatccactt

SEQ ID NO: 2944944 - DNA, 25 bp, Homo sapien
gatttgtaaccttccctgctatcca

SEQ ID NO: 2944945 - DNA, 25 bp, Homo sapien
tcaatccactgatttgtaaccttcc

SEQ ID NO: 2944946 - DNA, 25 bp, Homo sapien
cactgatttgtaaccttccctgcta

SEQ ID NO: 2944947 - DNA, 25 bp, Homo sapien
ttaactttctctagtcgcgtgaaac

SEQ ID NO: 2944948 - DNA, 25 bp, Homo sapien
agcagacgctgggaactgtgagctc

SEQ ID NO: 2944949 - DNA, 25 bp, Homo sapien
tcctcttcagtcacacgggtcttta

SEQ ID NO: 2944950 - DNA, 25 bp, Homo sapien
agacgctgggaactgtgagctcctc

SEQ ID NO: 2944951 - DNA, 25 bp, Homo sapien
aaccccatagcaggaccagaagccg

SEQ ID NO: 2944952 - DNA, 25 bp, Homo sapien
aggcaaccccatagcaggaccagaa

SEQ ID NO: 2944953 - DNA, 25 bp, Homo sapien
agcaggcaaccccatagcaggacca

SEQ ID NO: 2944954 - DNA, 25 bp, Homo sapien
ctgggagcagcaggcaaccccatag

SEQ ID NO: 2944955 - DNA, 25 bp, Homo sapien
agctcttccctgtaggtgcactgca

SEQ ID NO: 2944956 - DNA, 25 bp, Homo sapien
tcctggcggctgtcacggatggaca

SEQ ID NO: 2944957 - DNA, 25 bp, Homo sapien
catagatggtgccagagcagcgaga

SEQ ID NO: 2944958 - DNA, 25 bp, Homo sapien
aggttccacagggtcacaatgagcg

SEQ ID NO: 2944959 - DNA, 25 bp, Homo sapien
gacaatggccaagactcaggcggct

SEQ ID NO: 2944960 - DNA, 25 bp, Homo sapien
caggaatatctctgacaccaggcga

SEQ ID NO: 2944961 - DNA, 25 bp, Homo sapien
gagaggtgctttatcccctacccag

SEQ ID NO: 2944962 - DNA, 25 bp, Homo sapien
tgtctatcttgtacccagcctatgg

SEQ ID NO: 2944963 - DNA, 25 bp, Homo sapien
agaaggggagggaggacagcagggt

SEQ ID NO: 2944964 - DNA, 25 bp, Homo sapien
ggagaaggggagggaggacagcagg

SEQ ID NO: 2944965 - DNA, 25 bp, Homo sapien
gtgggagaaggggagggaggacagc

SEQ ID NO: 2944966 - DNA, 25 bp, Homo sapien
gaaggggagggaggacagcagggtc

SEQ ID NO: 2944967 - DNA, 25 bp, Homo sapien
gggctgcaggcgtgttgtagccaga

SEQ ID NO: 2944968 - DNA, 25 bp, Homo sapien
tgagcttttgccttgggctgcaggc

SEQ ID NO: 2944969 - DNA, 25 bp, Homo sapien
gctgcaggcgtgttgtagccagagg

SEQ ID NO: 2944970 - DNA, 25 bp, Homo sapien
ttgctgagcttttgccttgggctgc

SEQ ID NO: 2944971 - DNA, 25 bp, Homo sapien
tcgtgcccgtactgggaagtccctg

SEQ ID NO: 2944972 - DNA, 25 bp, Homo sapien
gaggagaggtcgctgggtgaggaga

SEQ ID NO: 2944973 - DNA, 25 bp, Homo sapien
tgctgagagctggactggtgtcctc

SEQ ID NO: 2944974 - DNA, 25 bp, Homo sapien
tggagtccagctgcatgggggggcg

SEQ ID NO: 2944975 - DNA, 25 bp, Homo sapien
gagagctggactggtgtcctctgct

SEQ ID NO: 2944976 - DNA, 25 bp, Homo sapien
ggtggagtccagctgcatggggggg

SEQ ID NO: 2944977 - DNA, 25 bp, Homo sapien
tatgcggaccatcgggatggacacc

SEQ ID NO: 2944978 - DNA, 25 bp, Homo sapien
tggctgcagaaggcgatcaggcctg

SEQ ID NO: 2944979 - DNA, 25 bp, Homo sapien
tcaggcctgcggctgacagaaggct

SEQ ID NO: 2944980 - DNA, 25 bp, Homo sapien
gactggggccagtatgcggaccatc

SEQ ID NO: 2944981 - DNA, 25 bp, Homo sapien
tgctcccagaaaggtggactggccc

SEQ ID NO: 2944982 - DNA, 25 bp, Homo sapien
gaaagagatgtagaaggaggagccc

SEQ ID NO: 2944983 - DNA, 25 bp, Homo sapien
aagccaggagtagccgggagtggcc

SEQ ID NO: 2944984 - DNA, 25 bp, Homo sapien
gtagccgggagtggcctgtagctgc

SEQ ID NO: 2944985 - DNA, 25 bp, Homo sapien
ttctcgttcctctgtgtctccgtgg

SEQ ID NO: 2944986 - DNA, 25 bp, Homo sapien
ggcagaacttctcgttcctctgtgt

SEQ ID NO: 2944987 - DNA, 25 bp, Homo sapien
ctctgtgtctccgtggcctgttgag

SEQ ID NO: 2944988 - DNA, 25 bp, Homo sapien
cgtgagaggcagaacttctcgttcc

SEQ ID NO: 2944989 - DNA, 25 bp, Homo sapien
tcctccaaggtggggagcaagcgct

SEQ ID NO: 2944990 - DNA, 25 bp, Homo sapien
tcacacacattcctccaaggtgggg

SEQ ID NO: 2944991 - DNA, 25 bp, Homo sapien
ttcctccaaggtggggagcaagcgc

SEQ ID NO: 2944992 - DNA, 25 bp, Homo sapien
tccaaggtggggagcaagcgctgcc

SEQ ID NO: 2944993 - DNA, 25 bp, Homo sapien
aagtcaggctagagatctcaaaggc

SEQ ID NO: 2944994 - DNA, 25 bp, Homo sapien
caggctagagatctcaaaggcttca

SEQ ID NO: 2944995 - DNA, 25 bp, Homo sapien
agaaaagtcaggctagagatctcaa

SEQ ID NO: 2944996 - DNA, 25 bp, Homo sapien
ggctagagatctcaaaggcttcatc

SEQ ID NO: 2944997 - DNA, 25 bp, Homo sapien
tagagtttgtagcactgccagagtc

SEQ ID NO: 2944998 - DNA, 25 bp, Homo sapien
taaaagcacactagagtttgtagca

SEQ ID NO: 2944999 - DNA, 25 bp, Homo sapien
tccctgacccctgggcgttctgaaa

SEQ ID NO: 2945000 - DNA, 25 bp, Homo sapien
tttgtaaaagcacactagagtttgt

SEQ ID NO: 2945001 - DNA, 25 bp, Homo sapien
acagcgtcctctgggtcccggccat

SEQ ID NO: 2945002 - DNA, 25 bp, Homo sapien
cctgcaaggttgatcacagcgtcct

SEQ ID NO: 2945003 - DNA, 25 bp, Homo sapien
ggccctgcaaggttgatcacagcgt

SEQ ID NO: 2945004 - DNA, 25 bp, Homo sapien
catgggccctgcaaggttgatcaca

SEQ ID NO: 2945005 - DNA, 25 bp, Homo sapien
cgctgagacaaacttcgagaagccc

SEQ ID NO: 2945006 - DNA, 25 bp, Homo sapien
gggaggcatcgagatcacgtccccc

SEQ ID NO: 2945007 - DNA, 25 bp, Homo sapien
gacaaacttcgagaagcccagctcc

SEQ ID NO: 2945008 - DNA, 25 bp, Homo sapien
ctacgctgagacaaacttcgagaag

SEQ ID NO: 2945009 - DNA, 25 bp, Homo sapien
gtggaaagctttcgggaatcggtgc

SEQ ID NO: 2945010 - DNA, 25 bp, Homo sapien
tcgggaatcggtgctgatccagcca

SEQ ID NO: 2945011 - DNA, 25 bp, Homo sapien
agctttcgggaatcggtgctgatcc

SEQ ID NO: 2945012 - DNA, 25 bp, Homo sapien
gagccctggagtccgggcagctgga

SEQ ID NO: 2945013 - DNA, 25 bp, Homo sapien
tccagggctgacaaacgcttctagg

SEQ ID NO: 2945014 - DNA, 25 bp, Homo sapien
ggctgacaaacgcttctaggtcagg

SEQ ID NO: 2945015 - DNA, 25 bp, Homo sapien
agcctggtactctgcccagggatgt

SEQ ID NO: 2945016 - DNA, 25 bp, Homo sapien
tgcccagggatgtgaacctatcagg

SEQ ID NO: 2945017 - DNA, 25 bp, Homo sapien
aatgtgcacctgacctgaccaaggc

SEQ ID NO: 2945018 - DNA, 25 bp, Homo sapien
tgttagacacctacgtgcactctgg

SEQ ID NO: 2945019 - DNA, 25 bp, Homo sapien
cagctggatcttggtgtcgcagaca

SEQ ID NO: 2945020 - DNA, 25 bp, Homo sapien
caaatgcagactctaagctggaggg

SEQ ID NO: 2945021 - DNA, 25 bp, Homo sapien
ggacaggtgcagaggacttcaagaa

SEQ ID NO: 2945022 - DNA, 25 bp, Homo sapien
cagaaagctgtttagcaagaggcat

SEQ ID NO: 2945023 - DNA, 25 bp, Homo sapien
tggcacttccatgcacgcaaatcct

SEQ ID NO: 2945024 - DNA, 25 bp, Homo sapien
ttaagaaatctcccggccaggtgca

SEQ ID NO: 2945025 - DNA, 25 bp, Homo sapien
ctccctgccattgtggactcttgta

SEQ ID NO: 2945026 - DNA, 25 bp, Homo sapien
gggtacctggccttcatggcacctt

SEQ ID NO: 2945027 - DNA, 25 bp, Homo sapien
gagtgaggaccctaccatccactgt

SEQ ID NO: 2945028 - DNA, 25 bp, Homo sapien
gactcttgtatttgagggacctcaa

SEQ ID NO: 2945029 - DNA, 25 bp, Homo sapien
gcgtcagccaaagctggcccctgaa

SEQ ID NO: 2945030 - DNA, 25 bp, Homo sapien
actagtcttcgctgcagcgtcagcc

SEQ ID NO: 2945031 - DNA, 25 bp, Homo sapien
agcgtcagccaaagctggcccctga

SEQ ID NO: 2945032 - DNA, 25 bp, Homo sapien
ctaactagtcttcgctgcagcgtca

SEQ ID NO: 2945033 - DNA, 25 bp, Homo sapien
gggacttccttagactgagggacta

SEQ ID NO: 2945034 - DNA, 25 bp, Homo sapien
ggtctcggagtaccgcgccagtctt

SEQ ID NO: 2945035 - DNA, 25 bp, Homo sapien
gcttgaggtatttgccccatgccca

SEQ ID NO: 2945036 - DNA, 25 bp, Homo sapien
actattgtaaaggaaacagggcctg

SEQ ID NO: 2945037 - DNA, 25 bp, Homo sapien
tctatctatcccggtgagtgaggag

SEQ ID NO: 2945038 - DNA, 25 bp, Homo sapien
aagcgcacagggaccgcggaaccgc

SEQ ID NO: 2945039 - DNA, 25 bp, Homo sapien
agccacgtgggcaagcccgaaacca

SEQ ID NO: 2945040 - DNA, 25 bp, Homo sapien
cgcccaaggcgtcttccggcgtagg

SEQ ID NO: 2945041 - DNA, 25 bp, Homo sapien
tcttccggcgtaggctcagaactgg

SEQ ID NO: 2945042 - DNA, 25 bp, Homo sapien
caaggttctcgcaggcctgtgcttg

SEQ ID NO: 2945043 - DNA, 25 bp, Homo sapien
gccgtgtggactgttcgggctcacg

SEQ ID NO: 2945044 - DNA, 25 bp, Homo sapien
cgtgtggactgttcgggctcacggg

SEQ ID NO: 2945045 - DNA, 25 bp, Homo sapien
gtgtggactgttcgggctcacgggg

SEQ ID NO: 2945046 - DNA, 25 bp, Homo sapien
ccgccgtgtggactgttcgggctca

SEQ ID NO: 2945047 - DNA, 25 bp, Homo sapien
taaatgaggcgaaccttggaatccc

SEQ ID NO: 2945048 - DNA, 25 bp, Homo sapien
tagatctctgaagggtgacactgta

SEQ ID NO: 2945049 - DNA, 25 bp, Homo sapien
caatagctccatccctaaatgaggc

SEQ ID NO: 2945050 - DNA, 25 bp, Homo sapien
gcctcttctctatgtgtgcacacgg

SEQ ID NO: 2945051 - DNA, 25 bp, Homo sapien
gccgaggtgcatggcgtcccacagg

SEQ ID NO: 2945052 - DNA, 25 bp, Homo sapien
tccaagctgtagttccagcgctcat

SEQ ID NO: 2945053 - DNA, 25 bp, Homo sapien
cgaggtgcatggcgtcccacagggt

SEQ ID NO: 2945054 - DNA, 25 bp, Homo sapien
aggtgcatggcgtcccacagggtct

SEQ ID NO: 2945055 - DNA, 25 bp, Homo sapien
cagagcgaatgcgcagcgcagagca

SEQ ID NO: 2945056 - DNA, 25 bp, Homo sapien
atggccagagcgaatgcgcagcgca

SEQ ID NO: 2945057 - DNA, 25 bp, Homo sapien
gccagagcgaatgcgcagcgcagag

SEQ ID NO: 2945058 - DNA, 25 bp, Homo sapien
ctatggccagagcgaatgcgcagcg

SEQ ID NO: 2945059 - DNA, 25 bp, Homo sapien
gcttccccaagtacttcttgatgga

SEQ ID NO: 2945060 - DNA, 25 bp, Homo sapien
tccccaagtacttcttgatggagcc

SEQ ID NO: 2945061 - DNA, 25 bp, Homo sapien
ggctgcatcagcagcgacacgaggc

SEQ ID NO: 2945062 - DNA, 25 bp, Homo sapien
tgcggcacttgcagctcctcgccga

SEQ ID NO: 2945063 - DNA, 25 bp, Homo sapien
gtccgtggcgttcgcagttttcttg

SEQ ID NO: 2945064 - DNA, 25 bp, Homo sapien
ccgtggcgttcgcagttttcttgtg

SEQ ID NO: 2945065 - DNA, 25 bp, Homo sapien
gggaggtgtccgtggcgttcgcagt

SEQ ID NO: 2945066 - DNA, 25 bp, Homo sapien
ggtgtccgtggcgttcgcagttttc

SEQ ID NO: 2945067 - DNA, 25 bp, Homo sapien
ggaacttcctctcgctagcacccaa

SEQ ID NO: 2945068 - DNA, 25 bp, Homo sapien
gtgctgtgtctccccgcatgcccgc

SEQ ID NO: 2945069 - DNA, 25 bp, Homo sapien
ggggtcgaggcccctctcaatacaa

SEQ ID NO: 2945070 - DNA, 25 bp, Homo sapien
ctggagaaagaagccccccccacag

SEQ ID NO: 2945071 - DNA, 25 bp, Homo sapien
gtgtgcaaatgacctggaagtagaa

SEQ ID NO: 2945072 - DNA, 25 bp, Homo sapien
tgcagctgatctccgtagatacatc

SEQ ID NO: 2945073 - DNA, 25 bp, Homo sapien
gatggcccagtatgcagctgatctc

SEQ ID NO: 2945074 - DNA, 25 bp, Homo sapien
atgcagctgatctccgtagatacat

SEQ ID NO: 2945075 - DNA, 25 bp, Homo sapien
agatggcccagtatgcagctgatct

SEQ ID NO: 2945076 - DNA, 25 bp, Homo sapien
cagcagggattgtggttagacagcc

SEQ ID NO: 2945077 - DNA, 25 bp, Homo sapien
tggccatccaccttgtgccagaggg

SEQ ID NO: 2945078 - DNA, 25 bp, Homo sapien
tttgacctctttgtagaacccttgc

SEQ ID NO: 2945079 - DNA, 25 bp, Homo sapien
tcttcatttagtgggtctgcaggcc

SEQ ID NO: 2945080 - DNA, 25 bp, Homo sapien
gctttgagtctcacatgcggatact

SEQ ID NO: 2945081 - DNA, 25 bp, Homo sapien
ctcatctgtgttccggccagtggca

SEQ ID NO: 2945082 - DNA, 25 bp, Homo sapien
gagaaggctcattcgcatgctagtg

SEQ ID NO: 2945083 - DNA, 25 bp, Homo sapien
aagcaaccattgtacatcactcagg

SEQ ID NO: 2945084 - DNA, 25 bp, Homo sapien
cgacagggcaccgggttcggccagg

SEQ ID NO: 2945085 - DNA, 25 bp, Homo sapien
tgctgtgaatccaggtcaagaggtg

SEQ ID NO: 2945086 - DNA, 25 bp, Homo sapien
aaaggaggccaggaccgacagggca

SEQ ID NO: 2945087 - DNA, 25 bp, Homo sapien
ccctggctgtgtagagggccacaag

SEQ ID NO: 2945088 - DNA, 25 bp, Homo sapien
ggccttccaggctgcgtccctttat

SEQ ID NO: 2945089 - DNA, 25 bp, Homo sapien
tggtgcctgacacccagatgcattg

SEQ ID NO: 2945090 - DNA, 25 bp, Homo sapien
caagccctggtgtagatttagatga

SEQ ID NO: 2945091 - DNA, 25 bp, Homo sapien
cattgggcagggcatagatgtggca

SEQ ID NO: 2945092 - DNA, 25 bp, Homo sapien
ggaaattattttgatgattggcagt

SEQ ID NO: 2945093 - DNA, 25 bp, Homo sapien
ctggaaattattttgatgattggca

SEQ ID NO: 2945094 - DNA, 25 bp, Homo sapien
tgatgattggcagtgggatgagacc

SEQ ID NO: 2945095 - DNA, 25 bp, Homo sapien
tttgatgattggcagtgggatgaga

SEQ ID NO: 2945096 - DNA, 25 bp, Homo sapien
cagcagggcatgaatgtgacaggaa

SEQ ID NO: 2945097 - DNA, 25 bp, Homo sapien
tgacatttgacagtaccacatcaca

SEQ ID NO: 2945098 - DNA, 25 bp, Homo sapien
gggttgacatttgacagtaccacat

SEQ ID NO: 2945099 - DNA, 25 bp, Homo sapien
tgtgacaggaattggccagggtgag

SEQ ID NO: 2945100 - DNA, 25 bp, Homo sapien
tgggccccgagcacagtagccaggt

SEQ ID NO: 2945101 - DNA, 25 bp, Homo sapien
gccccgagcacagtagccaggttta

SEQ ID NO: 2945102 - DNA, 25 bp, Homo sapien
agcacagtagccaggtttaagccca

SEQ ID NO: 2945103 - DNA, 25 bp, Homo sapien
cagtagccaggtttaagcccaaggc

SEQ ID NO: 2945104 - DNA, 25 bp, Homo sapien
gacaaccaactcttgccccccaaga

SEQ ID NO: 2945105 - DNA, 25 bp, Homo sapien
ggcagtctgtctggagcgtctggca

SEQ ID NO: 2945106 - DNA, 25 bp, Homo sapien
gccccccaagagtggcagtctgtct

SEQ ID NO: 2945107 - DNA, 25 bp, Homo sapien
ccaagagtggcagtctgtctggagc

SEQ ID NO: 2945108 - DNA, 25 bp, Homo sapien
agctgcccgcagaaccacagccatc

SEQ ID NO: 2945109 - DNA, 25 bp, Homo sapien
cgcgccacagctcagccttcgggcg

SEQ ID NO: 2945110 - DNA, 25 bp, Homo sapien
tcagcctcggggctacagcagctgc

SEQ ID NO: 2945111 - DNA, 25 bp, Homo sapien
agaaccacagccatcagcgccgtcg

SEQ ID NO: 2945112 - DNA, 25 bp, Homo sapien
cgcgcccgcgtactcctcgggcggg

SEQ ID NO: 2945113 - DNA, 25 bp, Homo sapien
gggagacgtcgtccgcgcccgcgta

SEQ ID NO: 2945114 - DNA, 25 bp, Homo sapien
acgtcgtccgcgcccgcgtactcct

SEQ ID NO: 2945115 - DNA, 25 bp, Homo sapien
ctgggagacgtcgtccgcgcccgcg

SEQ ID NO: 2945116 - DNA, 25 bp, Homo sapien
ctgcaccagcgagcggcccgaagga

SEQ ID NO: 2945117 - DNA, 25 bp, Homo sapien
tgggactcggcacccacgacggctc

SEQ ID NO: 2945118 - DNA, 25 bp, Homo sapien
acgacggctcctcggcgacgggcga

SEQ ID NO: 2945119 - DNA, 25 bp, Homo sapien
tcggcacccacgacggctcctcggc

SEQ ID NO: 2945120 - DNA, 25 bp, Homo sapien
tcgatgacggcgaagggcttgtccg

SEQ ID NO: 2945121 - DNA, 25 bp, Homo sapien
aactgcgtgagccagtggcgcgcct

SEQ ID NO: 2945122 - DNA, 25 bp, Homo sapien
ggctggccccgcactggttcaggaa

SEQ ID NO: 2945123 - DNA, 25 bp, Homo sapien
ccgcggagtgatggcaggtctggaa

SEQ ID NO: 2945124 - DNA, 25 bp, Homo sapien
gtgacacggacctgagccgctggct

SEQ ID NO: 2945125 - DNA, 25 bp, Homo sapien
gtgaccctacccttccagaagctgt

SEQ ID NO: 2945126 - DNA, 25 bp, Homo sapien
agtgggctttcaaggagcgtgacac

SEQ ID NO: 2945127 - DNA, 25 bp, Homo sapien
tgcagggccgtctcggtgaccctac

SEQ ID NO: 2945128 - DNA, 25 bp, Homo sapien
gccaaaaaatggcacagcagcggcg

SEQ ID NO: 2945129 - DNA, 25 bp, Homo sapien
tgtccatgcgctgcaagaaggccag

SEQ ID NO: 2945130 - DNA, 25 bp, Homo sapien
gcaaaggccagactggatacgccct

SEQ ID NO: 2945131 - DNA, 25 bp, Homo sapien
cgttgtgtcgaagcgcgtctaccag

SEQ ID NO: 2945132 - DNA, 25 bp, Homo sapien
ctgggcgggcagggcgggcactcac

SEQ ID NO: 2945133 - DNA, 25 bp, Homo sapien
cgggcagagtagcacgctctgagga

SEQ ID NO: 2945134 - DNA, 25 bp, Homo sapien
gggcgggcagagtagcacgctctga

SEQ ID NO: 2945135 - DNA, 25 bp, Homo sapien
tccaggcctgccggacggggcaggg

SEQ ID NO: 2945136 - DNA, 25 bp, Homo sapien
ccctccaggcctgccggacggggca

SEQ ID NO: 2945137 - DNA, 25 bp, Homo sapien
agcgccttggccagcgacgcggtca

SEQ ID NO: 2945138 - DNA, 25 bp, Homo sapien
ttatgactgctgtcgcgcaggccgc

SEQ ID NO: 2945139 - DNA, 25 bp, Homo sapien
cgcaggccgcctgtgttattgagga

SEQ ID NO: 2945140 - DNA, 25 bp, Homo sapien
caggtctgtctccaccgagacgatg

SEQ ID NO: 2945141 - DNA, 25 bp, Homo sapien
agtcagcgggtgagcctggcccaca

SEQ ID NO: 2945142 - DNA, 25 bp, Homo sapien
tccgcccggagtccttagccaggga

SEQ ID NO: 2945143 - DNA, 25 bp, Homo sapien
gggcgcaagagaaggcccggatcgc

SEQ ID NO: 2945144 - DNA, 25 bp, Homo sapien
tacccacccggcttgctagtgagtc

SEQ ID NO: 2945145 - DNA, 25 bp, Homo sapien
gcacgtccacgatgagccgcatctg

SEQ ID NO: 2945146 - DNA, 25 bp, Homo sapien
ccttgttgctaaagagctcagtgag

SEQ ID NO: 2945147 - DNA, 25 bp, Homo sapien
cgggcaggttcacgttactcaggac

SEQ ID NO: 2945148 - DNA, 25 bp, Homo sapien
gctgccgttcttttgtgctcaccca

SEQ ID NO: 2945149 - DNA, 25 bp, Homo sapien
acaggcgctggtgggacaatttccg

SEQ ID NO: 2945150 - DNA, 25 bp, Homo sapien
tcaaggagatgctttccccaggcag

SEQ ID NO: 2945151 - DNA, 25 bp, Homo sapien
agcaggagccattgctgtgacaccc

SEQ ID NO: 2945152 - DNA, 25 bp, Homo sapien
gttagtcttgcctcgctccttgaag

SEQ ID NO: 2945153 - DNA, 25 bp, Homo sapien
tagacggccctggtccagcttgtcc

SEQ ID NO: 2945154 - DNA, 25 bp, Homo sapien
cgtagcattcgctcggcgttcttga

SEQ ID NO: 2945155 - DNA, 25 bp, Homo sapien
cttcttgccgaagctggcgttgacc

SEQ ID NO: 2945156 - DNA, 25 bp, Homo sapien
ccctcggagacgtagatggagtgca

SEQ ID NO: 2945157 - DNA, 25 bp, Homo sapien
gccgcaggcactcccacagcatctg

SEQ ID NO: 2945158 - DNA, 25 bp, Homo sapien
ccaggacgggctccatggtcagaat

SEQ ID NO: 2945159 - DNA, 25 bp, Homo sapien
acccgggagcgccagaaaagtgtct

SEQ ID NO: 2945160 - DNA, 25 bp, Homo sapien
catggtcagaatggcggcggcgttg

SEQ ID NO: 2945161 - DNA, 25 bp, Homo sapien
ggcaaggccagtgttcattactcac

SEQ ID NO: 2945162 - DNA, 25 bp, Homo sapien
cagtttttagggcaaggccagtgtt

SEQ ID NO: 2945163 - DNA, 25 bp, Homo sapien
tactcactggttctgtctttaaaaa

SEQ ID NO: 2945164 - DNA, 25 bp, Homo sapien
cattgattgaggacctactgcatgc

SEQ ID NO: 2945165 - DNA, 25 bp, Homo sapien
cagtcccttggcgtggttgaccaac

SEQ ID NO: 2945166 - DNA, 25 bp, Homo sapien
tatcagccaggccaaaccagaagaa

SEQ ID NO: 2945167 - DNA, 25 bp, Homo sapien
cttgtgaaaggagtctggcagtccc

SEQ ID NO: 2945168 - DNA, 25 bp, Homo sapien
ttgaccaactcataggagtcccgga

SEQ ID NO: 2945169 - DNA, 25 bp, Homo sapien
gggagcctcaaaacatagcacagag

SEQ ID NO: 2945170 - DNA, 25 bp, Homo sapien
aatggtagaatatcacgcaggcagg

SEQ ID NO: 2945171 - DNA, 25 bp, Homo sapien
cccaggttgaaaatcgaaggccatt

SEQ ID NO: 2945172 - DNA, 25 bp, Homo sapien
ggttagtcctgagtagagccctgga

SEQ ID NO: 2945173 - DNA, 25 bp, Homo sapien
tccccaacagggaactctgccattg

SEQ ID NO: 2945174 - DNA, 25 bp, Homo sapien
tagatctggtcaagccccaccttgg

SEQ ID NO: 2945175 - DNA, 25 bp, Homo sapien
tgtactatatgctttcaatccctca

SEQ ID NO: 2945176 - DNA, 25 bp, Homo sapien
tgggattgatcttgggtttcttgaa

SEQ ID NO: 2945177 - DNA, 25 bp, Homo sapien
aacctggcagatgcagctaggctct

SEQ ID NO: 2945178 - DNA, 25 bp, Homo sapien
cagttaagaggcagctcatttgtcc

SEQ ID NO: 2945179 - DNA, 25 bp, Homo sapien
tctcctgtccctgagaagggagtat

SEQ ID NO: 2945180 - DNA, 25 bp, Homo sapien
atggagattggaagtgagcaaatgt

SEQ ID NO: 2945181 - DNA, 25 bp, Homo sapien
ttcatgtcctttggcgtgaagcggc

SEQ ID NO: 2945182 - DNA, 25 bp, Homo sapien
ggcagccgtgctgtgcgctagtttc

SEQ ID NO: 2945183 - DNA, 25 bp, Homo sapien
gctgtgcgctagtttcatgtccttt

SEQ ID NO: 2945184 - DNA, 25 bp, Homo sapien
atgtcctttggcgtgaagcggcgct

SEQ ID NO: 2945185 - DNA, 25 bp, Homo sapien
caattgtggcttccctgtgtatccg

SEQ ID NO: 2945186 - DNA, 25 bp, Homo sapien
tacagttgagtatcagattgaggcc

SEQ ID NO: 2945187 - DNA, 25 bp, Homo sapien
tttcctagtctggtggtgaatccgc

SEQ ID NO: 2945188 - DNA, 25 bp, Homo sapien
tagggtcctagattgtgccgaagct

SEQ ID NO: 2945189 - DNA, 25 bp, Homo sapien
gctggttatgaatgcgccggactcc

SEQ ID NO: 2945190 - DNA, 25 bp, Homo sapien
gcctggcccgggataacacttgaaa

SEQ ID NO: 2945191 - DNA, 25 bp, Homo sapien
taggtatgcgaatcctacaggtggc

SEQ ID NO: 2945192 - DNA, 25 bp, Homo sapien
tactgcagcccaaggaaaggtttgc

SEQ ID NO: 2945193 - DNA, 25 bp, Homo sapien
caaggtatgtctgtctgatttgacc

SEQ ID NO: 2945194 - DNA, 25 bp, Homo sapien
gtagtcacatacatagaaccatttg

SEQ ID NO: 2945195 - DNA, 25 bp, Homo sapien
tccagaaatataatgcagggtataa

SEQ ID NO: 2945196 - DNA, 25 bp, Homo sapien
tcaggtttgtgcgtccttcagaggc

SEQ ID NO: 2945197 - DNA, 25 bp, Homo sapien
tctttgataagaaacctggagtcca

SEQ ID NO: 2945198 - DNA, 25 bp, Homo sapien
tagccaggccactaacttgacttgg

SEQ ID NO: 2945199 - DNA, 25 bp, Homo sapien
ggaagaactctcttgcatggcacat

SEQ ID NO: 2945200 - DNA, 25 bp, Homo sapien
tgctgcgaactttgtagagccagtg

SEQ ID NO: 2945201 - DNA, 25 bp, Homo sapien
taaaagtaacaagctgactgtgatt

SEQ ID NO: 2945202 - DNA, 25 bp, Homo sapien
aaagtaacaagctgactgtgattct

SEQ ID NO: 2945203 - DNA, 25 bp, Homo sapien
gtaacaagctgactgtgattcttaa

SEQ ID NO: 2945204 - DNA, 25 bp, Homo sapien
aacaagctgactgtgattcttaaat

SEQ ID NO: 2945205 - DNA, 25 bp, Homo sapien
actttgttcaggttaagccgcgcca

SEQ ID NO: 2945206 - DNA, 25 bp, Homo sapien
tacatcagacggacattcaagggca

SEQ ID NO: 2945207 - DNA, 25 bp, Homo sapien
tcttatacatgaagcgaggatccaa

SEQ ID NO: 2945208 - DNA, 25 bp, Homo sapien
tagtagggcttgaaaatgcacgctc

SEQ ID NO: 2945209 - DNA, 25 bp, Homo sapien
aagaccggcctccagccggtactgt

SEQ ID NO: 2945210 - DNA, 25 bp, Homo sapien
ccagagtccaggcaacgaagcagcg

SEQ ID NO: 2945211 - DNA, 25 bp, Homo sapien
tctgatctccaaagcccacccctct

SEQ ID NO: 2945212 - DNA, 25 bp, Homo sapien
gaagcagcgtcgaccctctgatctc

SEQ ID NO: 2945213 - DNA, 25 bp, Homo sapien
gcggcccagctgccgaccaggcccc

SEQ ID NO: 2945214 - DNA, 25 bp, Homo sapien
gcccagctgccgaccaggccccggc

SEQ ID NO: 2945215 - DNA, 25 bp, Homo sapien
ccagctgccgaccaggccccggctt

SEQ ID NO: 2945216 - DNA, 25 bp, Homo sapien
cagctgccgaccaggccccggcttg

SEQ ID NO: 2945217 - DNA, 25 bp, Homo sapien
gtgatccagagccacacgttctcca

SEQ ID NO: 2945218 - DNA, 25 bp, Homo sapien
aggatcttgggatcgcccagaaagg

SEQ ID NO: 2945219 - DNA, 25 bp, Homo sapien
tagctggttctgtagcgcctcggct

SEQ ID NO: 2945220 - DNA, 25 bp, Homo sapien
gtgatgaggctgatccagagcaccg

SEQ ID NO: 2945221 - DNA, 25 bp, Homo sapien
atgccggagggcttctctgtctcac

SEQ ID NO: 2945222 - DNA, 25 bp, Homo sapien
acatgactcagggccctcgggggtg

SEQ ID NO: 2945223 - DNA, 25 bp, Homo sapien
ggtggggaccaggatgccggagggc

SEQ ID NO: 2945224 - DNA, 25 bp, Homo sapien
accaggatgccggagggcttctctg

SEQ ID NO: 2945225 - DNA, 25 bp, Homo sapien
ttagcagctaccgtgatgcccagca

SEQ ID NO: 2945226 - DNA, 25 bp, Homo sapien
tcaagtgctgcctatgccgttgggc

SEQ ID NO: 2945227 - DNA, 25 bp, Homo sapien
cagggaccacaccttaatctgcaag

SEQ ID NO: 2945228 - DNA, 25 bp, Homo sapien
gattcagtagctctggcccggggcc

SEQ ID NO: 2945229 - DNA, 25 bp, Homo sapien
tggctgtagtaaccagactcatgga

SEQ ID NO: 2945230 - DNA, 25 bp, Homo sapien
gactcatggacccaccaaaagggcc

SEQ ID NO: 2945231 - DNA, 25 bp, Homo sapien
gctgtagtaaccagactcatggacc

SEQ ID NO: 2945232 - DNA, 25 bp, Homo sapien
gcctggctgtagtaaccagactcat

SEQ ID NO: 2945233 - DNA, 25 bp, Homo sapien
gctcctgtgatcatgcagtgtccag

SEQ ID NO: 2945234 - DNA, 25 bp, Homo sapien
ggcccgagtggccacctgcgaagac

SEQ ID NO: 2945235 - DNA, 25 bp, Homo sapien
cgtcattatgggccagagggctgct

SEQ ID NO: 2945236 - DNA, 25 bp, Homo sapien
cacctgcgaagacagggccgtcatt

SEQ ID NO: 2945237 - DNA, 25 bp, Homo sapien
taagatgaagattcgcgacaagcca

SEQ ID NO: 2945238 - DNA, 25 bp, Homo sapien
cacctggtgagggaaatgtgctaag

SEQ ID NO: 2945239 - DNA, 25 bp, Homo sapien
caaaaggaaggtgcaataagccagg

SEQ ID NO: 2945240 - DNA, 25 bp, Homo sapien
taagccaggctaggcatcaccctta

SEQ ID NO: 2945241 - DNA, 25 bp, Homo sapien
ggaagatcctagactgatcctccca

SEQ ID NO: 2945242 - DNA, 25 bp, Homo sapien
agagaataaactgagacataacggg

SEQ ID NO: 2945243 - DNA, 25 bp, Homo sapien
gcagtgcagcttggcaagagaataa

SEQ ID NO: 2945244 - DNA, 25 bp, Homo sapien
tctacagaagctgggagcgatggga

SEQ ID NO: 2945245 - DNA, 25 bp, Homo sapien
ctaggagagtggagtgacaacagct

SEQ ID NO: 2945246 - DNA, 25 bp, Homo sapien
taggagagtggagtgacaacagctt

SEQ ID NO: 2945247 - DNA, 25 bp, Homo sapien
aggctggtgcctagcatgagggcca

SEQ ID NO: 2945248 - DNA, 25 bp, Homo sapien
ggcccagtgtaaagagggtccaata

SEQ ID NO: 2945249 - DNA, 25 bp, Homo sapien
gagggccagtgcagtcaacccatag

SEQ ID NO: 2945250 - DNA, 25 bp, Homo sapien
agctcccgctccataggcactcggg

SEQ ID NO: 2945251 - DNA, 25 bp, Homo sapien
gaggcctacgccagcaggctcgtcg

SEQ ID NO: 2945252 - DNA, 25 bp, Homo sapien
cgacgagcctgctggcgtaggcctc

SEQ ID NO: 2945253 - DNA, 25 bp, Homo sapien
tatccacgtgtatccactcaggccg

SEQ ID NO: 2945254 - DNA, 25 bp, Homo sapien
tcaggccgctcacaccacttgaagg

SEQ ID NO: 2945255 - DNA, 25 bp, Homo sapien
gcaaagggccggctatccacgtgta

SEQ ID NO: 2945256 - DNA, 25 bp, Homo sapien
ccacttgaaggctaggctgatggac

SEQ ID NO: 2945257 - DNA, 25 bp, Homo sapien
gccagagggtgtacttgaggaaatt

SEQ ID NO: 2945258 - DNA, 25 bp, Homo sapien
tgaaaatgtagaagaggctgatctg

SEQ ID NO: 2945259 - DNA, 25 bp, Homo sapien
gcacaaggcaggctatcttctggcc

SEQ ID NO: 2945260 - DNA, 25 bp, Homo sapien
gcactgaacatgtgcactgcccagg

SEQ ID NO: 2945261 - DNA, 25 bp, Homo sapien
gagggaggaccaacttatctgggag

SEQ ID NO: 2945262 - DNA, 25 bp, Homo sapien
cacagtgttgcaagaacccgctggt

SEQ ID NO: 2945263 - DNA, 25 bp, Homo sapien
agtgtggtggtcacagagtgttggc

SEQ ID NO: 2945264 - DNA, 25 bp, Homo sapien
tggtgcggaagcagatttagggagg

SEQ ID NO: 2945265 - DNA, 25 bp, Homo sapien
gaaaccaaagatgggaagtggctcc

SEQ ID NO: 2945266 - DNA, 25 bp, Homo sapien
gggccccaccaatctgtttacatat

SEQ ID NO: 2945267 - DNA, 25 bp, Homo sapien
agcccaagggagctaagaccaggag

SEQ ID NO: 2945268 - DNA, 25 bp, Homo sapien
ggatccaggagtcggctctcagctg

SEQ ID NO: 2945269 - DNA, 25 bp, Homo sapien
tccacctcagctctagaagcctgct

SEQ ID NO: 2945270 - DNA, 25 bp, Homo sapien
ggaggatccactactgtctttaaga

SEQ ID NO: 2945271 - DNA, 25 bp, Homo sapien
caaggtgtgccgtgtgggtctctca

SEQ ID NO: 2945272 - DNA, 25 bp, Homo sapien
aaaaagtcacacattcaacaaggtg

SEQ ID NO: 2945273 - DNA, 25 bp, Homo sapien
tctgcatcgctatgacaacgggaac

SEQ ID NO: 2945274 - DNA, 25 bp, Homo sapien
ggcgttctacaatgacccctctgtg

SEQ ID NO: 2945275 - DNA, 25 bp, Homo sapien
tcagctgacaggtggaatttgacca

SEQ ID NO: 2945276 - DNA, 25 bp, Homo sapien
ggacattcaccatggcaatggcacc

SEQ ID NO: 2945277 - DNA, 25 bp, Homo sapien
agggagccctgaccatgccccggga

SEQ ID NO: 2945278 - DNA, 25 bp, Homo sapien
gagccctgaccatgccccgggaggg

SEQ ID NO: 2945279 - DNA, 25 bp, Homo sapien
gggagggagccctgaccatgccccg

SEQ ID NO: 2945280 - DNA, 25 bp, Homo sapien
agccctgaccatgccccgggagggc

SEQ ID NO: 2945281 - DNA, 25 bp, Homo sapien
ctctgaacccaacttgaaagtgcgt

SEQ ID NO: 2945282 - DNA, 25 bp, Homo sapien
caaggatgggactgttattagcacc

SEQ ID NO: 2945283 - DNA, 25 bp, Homo sapien
tggctgagcggagaagcagtcccct

SEQ ID NO: 2945284 - DNA, 25 bp, Homo sapien
gaaagtgcgttcaaggctaaaacag

SEQ ID NO: 2945285 - DNA, 25 bp, Homo sapien
actgcctttgcctgggccctacgac

SEQ ID NO: 2945286 - DNA, 25 bp, Homo sapien
ctgggccctacgacagtcgagacga

SEQ ID NO: 2945287 - DNA, 25 bp, Homo sapien
tgggacgcctccctcctacaaactg

SEQ ID NO: 2945288 - DNA, 25 bp, Homo sapien
ggccctacgacagtcgagacgactt

SEQ ID NO: 2945289 - DNA, 25 bp, Homo sapien
aaggcagaagatactggtagccaga

SEQ ID NO: 2945290 - DNA, 25 bp, Homo sapien
acaggaatgggttggcctgcctctc

SEQ ID NO: 2945291 - DNA, 25 bp, Homo sapien
acctccctgggctgtagcgaggaga

SEQ ID NO: 2945292 - DNA, 25 bp, Homo sapien
cttccgccttcccaggcagtggtat

SEQ ID NO: 2945293 - DNA, 25 bp, Homo sapien
aggacacctgcgttcagatctctgt

SEQ ID NO: 2945294 - DNA, 25 bp, Homo sapien
tgggagccagactgcacacgtgtgt

SEQ ID NO: 2945295 - DNA, 25 bp, Homo sapien
tcccagggctggcttacactgagca

SEQ ID NO: 2945296 - DNA, 25 bp, Homo sapien
gggagtatctgcacggacctcattt

SEQ ID NO: 2945297 - DNA, 25 bp, Homo sapien
ctgggaaggcaatgggtcctactct

SEQ ID NO: 2945298 - DNA, 25 bp, Homo sapien
aaggcaatgggtcctactctgcccc

SEQ ID NO: 2945299 - DNA, 25 bp, Homo sapien
aatcgagggatcgatggtccggtct

SEQ ID NO: 2945300 - DNA, 25 bp, Homo sapien
agaaagggcccatgaggtagacctg

SEQ ID NO: 2945301 - DNA, 25 bp, Homo sapien
tgcaatgggctgtgtgggtttccct

SEQ ID NO: 2945302 - DNA, 25 bp, Homo sapien
gttctgagtgcctgactgcctcgcc

SEQ ID NO: 2945303 - DNA, 25 bp, Homo sapien
ggccagctgacctttactgtctgag

SEQ ID NO: 2945304 - DNA, 25 bp, Homo sapien
tgaactctcccaacgagtcgggtaa

SEQ ID NO: 2945305 - DNA, 25 bp, Homo sapien
cttgtagggtgagatgtagcctgtt

SEQ ID NO: 2945306 - DNA, 25 bp, Homo sapien
gggtgagatgtagcctgtttccttc

SEQ ID NO: 2945307 - DNA, 25 bp, Homo sapien
cagccctgagcttgtagggtgagat

SEQ ID NO: 2945308 - DNA, 25 bp, Homo sapien
tcagccctgagcttgtagggtgaga

SEQ ID NO: 2945309 - DNA, 25 bp, Homo sapien
ccaaatggctcggagaccggccggg

SEQ ID NO: 2945310 - DNA, 25 bp, Homo sapien
tgctgtctctgtccgcgggctccca

SEQ ID NO: 2945311 - DNA, 25 bp, Homo sapien
gacatcggggttgctgcgcgcgccc

SEQ ID NO: 2945312 - DNA, 25 bp, Homo sapien
gaggggcccgccttctcgcgccctg

SEQ ID NO: 2945313 - DNA, 25 bp, Homo sapien
aatccaaaggttgagccccagcatc

SEQ ID NO: 2945314 - DNA, 25 bp, Homo sapien
gacgattgcaccatccacgttttga

SEQ ID NO: 2945315 - DNA, 25 bp, Homo sapien
catgttcatactgtgtaccaagagg

SEQ ID NO: 2945316 - DNA, 25 bp, Homo sapien
gagatgtagcgtggatggcaccaaa

SEQ ID NO: 2945317 - DNA, 25 bp, Homo sapien
tggacacgataatctcagagacctc

SEQ ID NO: 2945318 - DNA, 25 bp, Homo sapien
taacttctgggacattcggccactg

SEQ ID NO: 2945319 - DNA, 25 bp, Homo sapien
ctgagaagacgaaatctgaagactt

SEQ ID NO: 2945320 - DNA, 25 bp, Homo sapien
tatcagggccccatatggtacattt

SEQ ID NO: 2945321 - DNA, 25 bp, Homo sapien
gccaggaaggcaggaggtgggaggc

SEQ ID NO: 2945322 - DNA, 25 bp, Homo sapien
aggccaggaaggcaggaggtgggag

SEQ ID NO: 2945323 - DNA, 25 bp, Homo sapien
ctaggccaggaaggcaggaggtggg

SEQ ID NO: 2945324 - DNA, 25 bp, Homo sapien
ggccaggaaggcaggaggtgggagg

SEQ ID NO: 2945325 - DNA, 25 bp, Homo sapien
tgggacatgatcgaccaccactgcc

SEQ ID NO: 2945326 - DNA, 25 bp, Homo sapien
tgtgggacatgatcgaccaccactg

SEQ ID NO: 2945327 - DNA, 25 bp, Homo sapien
gtgggacatgatcgaccaccactgc

SEQ ID NO: 2945328 - DNA, 25 bp, Homo sapien
atgtgggacatgatcgaccaccact

SEQ ID NO: 2945329 - DNA, 25 bp, Homo sapien
tcagagggatgagtctctgcgatat

SEQ ID NO: 2945330 - DNA, 25 bp, Homo sapien
tatagggaaagtcgccaggagactg

SEQ ID NO: 2945331 - DNA, 25 bp, Homo sapien
cttaggccgcattcgaagacgccgc

SEQ ID NO: 2945332 - DNA, 25 bp, Homo sapien
gcaggcgccttaggccgcattcgaa

SEQ ID NO: 2945333 - DNA, 25 bp, Homo sapien
gccttggacacgacccaggtggaag

SEQ ID NO: 2945334 - DNA, 25 bp, Homo sapien
gacccaggtggaagtctcggactcc

SEQ ID NO: 2945335 - DNA, 25 bp, Homo sapien
gactccgagggacagtgcttccggg

SEQ ID NO: 2945336 - DNA, 25 bp, Homo sapien
tggaagtctcggactccgagggaca

SEQ ID NO: 2945337 - DNA, 25 bp, Homo sapien
ggctggaaccccatgagcagttccg

SEQ ID NO: 2945338 - DNA, 25 bp, Homo sapien
ggggctggaaccccatgagcagttc

SEQ ID NO: 2945339 - DNA, 25 bp, Homo sapien
tgcaacttgcgcgggcgaggggctg

SEQ ID NO: 2945340 - DNA, 25 bp, Homo sapien
ggtcctgcaacttgcgcgggcgagg

SEQ ID NO: 2945341 - DNA, 25 bp, Homo sapien
taggatgccccagtccacggttcct

SEQ ID NO: 2945342 - DNA, 25 bp, Homo sapien
agtaggatgccccagtccacggttc

SEQ ID NO: 2945343 - DNA, 25 bp, Homo sapien
ggtcccaggagagtaggatgcccca

SEQ ID NO: 2945344 - DNA, 25 bp, Homo sapien
aggagagtaggatgccccagtccac

SEQ ID NO: 2945345 - DNA, 25 bp, Homo sapien
cttatgtcaaacataagagaaacta

SEQ ID NO: 2945346 - DNA, 25 bp, Homo sapien
atcttatgtcaaacataagagaaac

SEQ ID NO: 2945347 - DNA, 25 bp, Homo sapien
tcttatgtcaaacataagagaaact

SEQ ID NO: 2945348 - DNA, 25 bp, Homo sapien
ctcttccacagcaaacagcttctgc

SEQ ID NO: 2945349 - DNA, 25 bp, Homo sapien
cagcaaacagcttctgcaaactgca

SEQ ID NO: 2945350 - DNA, 25 bp, Homo sapien
cttccacagcaaacagcttctgcaa

SEQ ID NO: 2945351 - DNA, 25 bp, Homo sapien
gcaaacagcttctgcaaactgcacg

SEQ ID NO: 2945352 - DNA, 25 bp, Homo sapien
cagagatggtaggtcttggcatctg

SEQ ID NO: 2945353 - DNA, 25 bp, Homo sapien
ggaagcagagatggtaggtcttggc

SEQ ID NO: 2945354 - DNA, 25 bp, Homo sapien
aagcagagatggtaggtcttggcat

SEQ ID NO: 2945355 - DNA, 25 bp, Homo sapien
gcagagatggtaggtcttggcatct

SEQ ID NO: 2945356 - DNA, 25 bp, Homo sapien
gctcctatgcatgatggacggctgt

SEQ ID NO: 2945357 - DNA, 25 bp, Homo sapien
agtgagccagtaaaccggttctctg

SEQ ID NO: 2945358 - DNA, 25 bp, Homo sapien
tagaagagacaggtctcaggcgccc

SEQ ID NO: 2945359 - DNA, 25 bp, Homo sapien
cagtggggtgtaacagcagcagcct

SEQ ID NO: 2945360 - DNA, 25 bp, Homo sapien
ggtgtaaggctgaggactgaggtct

SEQ ID NO: 2945361 - DNA, 25 bp, Homo sapien
aggcccctcaaagccaccaacttgc

SEQ ID NO: 2945362 - DNA, 25 bp, Homo sapien
tcttctctgattgccaatccagctg

SEQ ID NO: 2945363 - DNA, 25 bp, Homo sapien
ggtgagtagggggtgtaaggctgag

SEQ ID NO: 2945364 - DNA, 25 bp, Homo sapien
ttagccaatactgaaccctcccgct

SEQ ID NO: 2945365 - DNA, 25 bp, Homo sapien
gcttgccaggactttatcaaattcg

SEQ ID NO: 2945366 - DNA, 25 bp, Homo sapien
gattggtatggcctcactgctgact

SEQ ID NO: 2945367 - DNA, 25 bp, Homo sapien
aactccatgcttgccaggactttat

SEQ ID NO: 2945368 - DNA, 25 bp, Homo sapien
tcctgggcggacatgatacccgctt

SEQ ID NO: 2945369 - DNA, 25 bp, Homo sapien
catgatacccgctttgtggatggca

SEQ ID NO: 2945370 - DNA, 25 bp, Homo sapien
gagactcatcctgggcggacatgat

SEQ ID NO: 2945371 - DNA, 25 bp, Homo sapien
gcggacatgatacccgctttgtgga

SEQ ID NO: 2945372 - DNA, 25 bp, Homo sapien
caggaaggtgacccacagcaccagg

SEQ ID NO: 2945373 - DNA, 25 bp, Homo sapien
aggaaggtgacccacagcaccaggt

SEQ ID NO: 2945374 - DNA, 25 bp, Homo sapien
tagtccttgagggagtagaacagct

SEQ ID NO: 2945375 - DNA, 25 bp, Homo sapien
caagggaaacgattttgagggctgc

SEQ ID NO: 2945376 - DNA, 25 bp, Homo sapien
gactggaatggctgacaagggaaac

SEQ ID NO: 2945377 - DNA, 25 bp, Homo sapien
tgagctttgccacttaaccaggaac

SEQ ID NO: 2945378 - DNA, 25 bp, Homo sapien
acggcgagttttggctcgggtggag

SEQ ID NO: 2945379 - DNA, 25 bp, Homo sapien
gcgagttttggctcgggtggaggga

SEQ ID NO: 2945380 - DNA, 25 bp, Homo sapien
gagttttggctcgggtggagggatg

SEQ ID NO: 2945381 - DNA, 25 bp, Homo sapien
cagggaaacggcgagttttggctcg

SEQ ID NO: 2945382 - DNA, 25 bp, Homo sapien
atttagccagagcaccatgggttgg

SEQ ID NO: 2945383 - DNA, 25 bp, Homo sapien
tggaatttagccagagcaccatggg

SEQ ID NO: 2945384 - DNA, 25 bp, Homo sapien
tttggggcgcggaaaccatgatgtc

SEQ ID NO: 2945385 - DNA, 25 bp, Homo sapien
ctctgtctggaatttagccagagca

SEQ ID NO: 2945386 - DNA, 25 bp, Homo sapien
ggactggcagatctgcggagctaca

SEQ ID NO: 2945387 - DNA, 25 bp, Homo sapien
attaatacatgctttgaatccagag

SEQ ID NO: 2945388 - DNA, 25 bp, Homo sapien
taatacatgctttgaatccagagag

SEQ ID NO: 2945389 - DNA, 25 bp, Homo sapien
agatctgcggagctacagcagagaa

SEQ ID NO: 2945390 - DNA, 25 bp, Homo sapien
ctgtagtacaatggccacagtctct

SEQ ID NO: 2945391 - DNA, 25 bp, Homo sapien
gaataggtctaccttgctacagact

SEQ ID NO: 2945392 - DNA, 25 bp, Homo sapien
gggagcctgtatgaataggtctacc

SEQ ID NO: 2945393 - DNA, 25 bp, Homo sapien
ctcttgattgaaacagggtggaagg

SEQ ID NO: 2945394 - DNA, 25 bp, Homo sapien
gaagcagctagggtctctctcatcc

SEQ ID NO: 2945395 - DNA, 25 bp, Homo sapien
taggtacagaggaagcagctagggt

SEQ ID NO: 2945396 - DNA, 25 bp, Homo sapien
cagatgcctgggaactagcaacaat

SEQ ID NO: 2945397 - DNA, 25 bp, Homo sapien
catccaggcctagcgtggatttcat

SEQ ID NO: 2945398 - DNA, 25 bp, Homo sapien
ccttcctaaggtggagtagggcagt

SEQ ID NO: 2945399 - DNA, 25 bp, Homo sapien
tccatcataacagtcacaggcaggg

SEQ ID NO: 2945400 - DNA, 25 bp, Homo sapien
tatagggtacgagggagcaaacagc

SEQ ID NO: 2945401 - DNA, 25 bp, Homo sapien
cacctgggcccaatcctatggatga

SEQ ID NO: 2945402 - DNA, 25 bp, Homo sapien
ggcgtccattgtgctccgagtcagg

SEQ ID NO: 2945403 - DNA, 25 bp, Homo sapien
cacactggcgtccattgtgctccga

SEQ ID NO: 2945404 - DNA, 25 bp, Homo sapien
ttgatcatcaccgccatgttgggga

SEQ ID NO: 2945405 - DNA, 25 bp, Homo sapien
tgtgctccgagtcagggacttgatc

SEQ ID NO: 2945406 - DNA, 25 bp, Homo sapien
cagacaacctaggacctaattcctt

SEQ ID NO: 2945407 - DNA, 25 bp, Homo sapien
cagcaacctgtgcaccgtcccctgc

SEQ ID NO: 2945408 - DNA, 25 bp, Homo sapien
ggcttcagctcattctggcacgtct

SEQ ID NO: 2945409 - DNA, 25 bp, Homo sapien
gctcattctggcacgtctccagcag

SEQ ID NO: 2945410 - DNA, 25 bp, Homo sapien
ccaggcttcagctcattctggcacg

SEQ ID NO: 2945411 - DNA, 25 bp, Homo sapien
ggtgtcacgttgaggtagtgatttc

SEQ ID NO: 2945412 - DNA, 25 bp, Homo sapien
tggaccaggttgttgggtgtcacgt

SEQ ID NO: 2945413 - DNA, 25 bp, Homo sapien
gaatccgggctgtaaatatggacca

SEQ ID NO: 2945414 - DNA, 25 bp, Homo sapien
tagtgatttcgaagtgaaggagaaa

SEQ ID NO: 2945415 - DNA, 25 bp, Homo sapien
cttcctcaggggacgcctctgcctc

SEQ ID NO: 2945416 - DNA, 25 bp, Homo sapien
ctcaggggacgcctctgcctctagg

SEQ ID NO: 2945417 - DNA, 25 bp, Homo sapien
gcagccacatcatgctggaagctcc

SEQ ID NO: 2945418 - DNA, 25 bp, Homo sapien
gccacatcatgctggaagctccctg

SEQ ID NO: 2945419 - DNA, 25 bp, Homo sapien
tcatggtgggttgtcctgcgttggg

SEQ ID NO: 2945420 - DNA, 25 bp, Homo sapien
ttggatgtgaccagacacatgccca

SEQ ID NO: 2945421 - DNA, 25 bp, Homo sapien
tcccccttggatgtgaccagacaca

SEQ ID NO: 2945422 - DNA, 25 bp, Homo sapien
ccttggatgtgaccagacacatgcc

SEQ ID NO: 2945423 - DNA, 25 bp, Homo sapien
caaagtgagggcagcgcagagatga

SEQ ID NO: 2945424 - DNA, 25 bp, Homo sapien
gcaaccacagaagccccccggctgt

SEQ ID NO: 2945425 - DNA, 25 bp, Homo sapien
cggctgtgtccactctccaatcatg

SEQ ID NO: 2945426 - DNA, 25 bp, Homo sapien
tgtgtccactctccaatcatgctgg

SEQ ID NO: 2945427 - DNA, 25 bp, Homo sapien
ttcagaacaaggtacaataggccac

SEQ ID NO: 2945428 - DNA, 25 bp, Homo sapien
cattgttgtggtgtggctcctttca

SEQ ID NO: 2945429 - DNA, 25 bp, Homo sapien
cctgcacctgggaaccttgggcatg

SEQ ID NO: 2945430 - DNA, 25 bp, Homo sapien
ggattctggtgccaacggcaaagga

SEQ ID NO: 2945431 - DNA, 25 bp, Homo sapien
cctcgacccgactacctcccttgct

SEQ ID NO: 2945432 - DNA, 25 bp, Homo sapien
ctcgacccgactacctcccttgctc

SEQ ID NO: 2945433 - DNA, 25 bp, Homo sapien
tcgacccgactacctcccttgctct

SEQ ID NO: 2945434 - DNA, 25 bp, Homo sapien
ggacttgacgggcacctgcggctcc

SEQ ID NO: 2945435 - DNA, 25 bp, Homo sapien
ctgttcagccgaccaggccagctgg

SEQ ID NO: 2945436 - DNA, 25 bp, Homo sapien
gtctcggcaggaacggtgaggccta

SEQ ID NO: 2945437 - DNA, 25 bp, Homo sapien
acagggcttggacctgctgcaggtt

SEQ ID NO: 2945438 - DNA, 25 bp, Homo sapien
tcctcagtcagcacattagccttgg

SEQ ID NO: 2945439 - DNA, 25 bp, Homo sapien
cagaggtgcaaaggagtcgtgccct

SEQ ID NO: 2945440 - DNA, 25 bp, Homo sapien
ccggatcaggtgtcgagcacagtct

SEQ ID NO: 2945441 - DNA, 25 bp, Homo sapien
acacagtcaaactgggctcgggcac

SEQ ID NO: 2945442 - DNA, 25 bp, Homo sapien
tctgtgtacgttatgaagcatagaa

SEQ ID NO: 2945443 - DNA, 25 bp, Homo sapien
ccacttctgtgtacgttatgaagca

SEQ ID NO: 2945444 - DNA, 25 bp, Homo sapien
aacccacttctgtgtacgttatgaa

SEQ ID NO: 2945445 - DNA, 25 bp, Homo sapien
acacccggccttatctcctaacatt

SEQ ID NO: 2945446 - DNA, 25 bp, Homo sapien
cagcgcacgccgtgttcagcgcagt

SEQ ID NO: 2945447 - DNA, 25 bp, Homo sapien
tggctggtgcgcaggcccacgtcgg

SEQ ID NO: 2945448 - DNA, 25 bp, Homo sapien
gccacatgttgctccaggccgcgcg

SEQ ID NO: 2945449 - DNA, 25 bp, Homo sapien
gcctgctgccaggttcaccgtcgct

SEQ ID NO: 2945450 - DNA, 25 bp, Homo sapien
tgcagcgcacagtccatgggcgtgt

SEQ ID NO: 2945451 - DNA, 25 bp, Homo sapien
cgcagccgttggcacaagcgttgtg

SEQ ID NO: 2945452 - DNA, 25 bp, Homo sapien
cagcagtgcggcgaaaaggacttca

SEQ ID NO: 2945453 - DNA, 25 bp, Homo sapien
gcagcctggtgtcgcctgcagctac

SEQ ID NO: 2945454 - DNA, 25 bp, Homo sapien
ggaagttggcgcagtgtttcagcat

SEQ ID NO: 2945455 - DNA, 25 bp, Homo sapien
ccgagggaagttggcgcagtgtttc

SEQ ID NO: 2945456 - DNA, 25 bp, Homo sapien
agggcccgagggaagttggcgcagt

SEQ ID NO: 2945457 - DNA, 25 bp, Homo sapien
gggaagttggcgcagtgtttcagca

SEQ ID NO: 2945458 - DNA, 25 bp, Homo sapien
acaggatgggacacaaggataggca

SEQ ID NO: 2945459 - DNA, 25 bp, Homo sapien
gcagcggcttcccaaccgagcgcgc

SEQ ID NO: 2945460 - DNA, 25 bp, Homo sapien
cgcacagctagtcgggccaggtgct

SEQ ID NO: 2945461 - DNA, 25 bp, Homo sapien
ctggttcaccatgcacagggccgag

SEQ ID NO: 2945462 - DNA, 25 bp, Homo sapien
ggttcaccatgcacagggccgagct

SEQ ID NO: 2945463 - DNA, 25 bp, Homo sapien
tggtgggccactagaatcactggtt

SEQ ID NO: 2945464 - DNA, 25 bp, Homo sapien
gggccatccacttaaacacaggagg

SEQ ID NO: 2945465 - DNA, 25 bp, Homo sapien
caggaactggtcctccgcagttgga

SEQ ID NO: 2945466 - DNA, 25 bp, Homo sapien
ctcaggtccggctagaggtcagcag

SEQ ID NO: 2945467 - DNA, 25 bp, Homo sapien
ccttgaccaggccaaaaaatgtgga

SEQ ID NO: 2945468 - DNA, 25 bp, Homo sapien
taatttggcagaggctagaggctct

SEQ ID NO: 2945469 - DNA, 25 bp, Homo sapien
tcctgagggccagatcagccttgac

SEQ ID NO: 2945470 - DNA, 25 bp, Homo sapien
tccaagcggtaggaataacacatgc

SEQ ID NO: 2945471 - DNA, 25 bp, Homo sapien
tggcttgctttgaaaagcttcctcc

SEQ ID NO: 2945472 - DNA, 25 bp, Homo sapien
aagctgcgtaagacgggctgacgta

SEQ ID NO: 2945473 - DNA, 25 bp, Homo sapien
ccggaagctgttataccagggacag

SEQ ID NO: 2945474 - DNA, 25 bp, Homo sapien
cttgcactgatgacgcgaagctgcg

SEQ ID NO: 2945475 - DNA, 25 bp, Homo sapien
tctgttcagggtccggtctcttccg

SEQ ID NO: 2945476 - DNA, 25 bp, Homo sapien
tgaaaagaccagactaaatgttttg

SEQ ID NO: 2945477 - DNA, 25 bp, Homo sapien
gaaaagaccagactaaatgttttga

SEQ ID NO: 2945478 - DNA, 25 bp, Homo sapien
ctgaaaagaccagactaaatgtttt

SEQ ID NO: 2945479 - DNA, 25 bp, Homo sapien
gataagaccagttgtcccggccagt

SEQ ID NO: 2945480 - DNA, 25 bp, Homo sapien
tctgaggcgaaggttccgcttttgg

SEQ ID NO: 2945481 - DNA, 25 bp, Homo sapien
gatggtcctattccctcggcgttgg

SEQ ID NO: 2945482 - DNA, 25 bp, Homo sapien
ccagtgaggagtagggtcggctaag

SEQ ID NO: 2945483 - DNA, 25 bp, Homo sapien
cgtgaccgcacggtgaggaggggtc

SEQ ID NO: 2945484 - DNA, 25 bp, Homo sapien
ccgcacggtgaggaggggtcccgca

SEQ ID NO: 2945485 - DNA, 25 bp, Homo sapien
cgcacggtgaggaggggtcccgcac

SEQ ID NO: 2945486 - DNA, 25 bp, Homo sapien
tgaccgcacggtgaggaggggtccc

SEQ ID NO: 2945487 - DNA, 25 bp, Homo sapien
caggtgtccggcctcaggggtcttt

SEQ ID NO: 2945488 - DNA, 25 bp, Homo sapien
gacgaaaacgattggcacagacaca

SEQ ID NO: 2945489 - DNA, 25 bp, Homo sapien
aagaaactgcggcaaagaaagacga

SEQ ID NO: 2945490 - DNA, 25 bp, Homo sapien
ctgatggtaagaaggttaatgttat

SEQ ID NO: 2945491 - DNA, 25 bp, Homo sapien
aattgcaattgcttaataacggtag

SEQ ID NO: 2945492 - DNA, 25 bp, Homo sapien
gcaattgcttaataacggtagtaat

SEQ ID NO: 2945493 - DNA, 25 bp, Homo sapien
ctgcaaattgcaattgcttaataac

SEQ ID NO: 2945494 - DNA, 25 bp, Homo sapien
caaattgcaattgcttaataacggt

SEQ ID NO: 2945495 - DNA, 25 bp, Homo sapien
ttgttttgaagatgacgtgaaatca

SEQ ID NO: 2945496 - DNA, 25 bp, Homo sapien
gttttgaagatgacgtgaaatcatc

SEQ ID NO: 2945497 - DNA, 25 bp, Homo sapien
tgttttgaagatgacgtgaaatcat

SEQ ID NO: 2945498 - DNA, 25 bp, Homo sapien
tatttctcttggtactgaagtgtcc

SEQ ID NO: 2945499 - DNA, 25 bp, Homo sapien
taatgccccagtagttgctcaaaga

SEQ ID NO: 2945500 - DNA, 25 bp, Homo sapien
ctttctattagactcctggtagaca

SEQ ID NO: 2945501 - DNA, 25 bp, Homo sapien
cctggtagacaaggatcgtatgtat

SEQ ID NO: 2945502 - DNA, 25 bp, Homo sapien
ggaccgcgggcagatactatgcagc

SEQ ID NO: 2945503 - DNA, 25 bp, Homo sapien
tatgtgccgcctctgaaacttctgg

SEQ ID NO: 2945504 - DNA, 25 bp, Homo sapien
gaaaaagattccataacagctctca

SEQ ID NO: 2945505 - DNA, 25 bp, Homo sapien
gcagtttcttagaaaggcaggaagg

SEQ ID NO: 2945506 - DNA, 25 bp, Homo sapien
agtcagacaaatctaaaacgataac

SEQ ID NO: 2945507 - DNA, 25 bp, Homo sapien
gtcagacaaatctaaaacgataact

SEQ ID NO: 2945508 - DNA, 25 bp, Homo sapien
ccatcaaaagcagagtcagacaaat

SEQ ID NO: 2945509 - DNA, 25 bp, Homo sapien
ctaccatcaaaagcagagtcagaca

SEQ ID NO: 2945510 - DNA, 25 bp, Homo sapien
tccaaagtggcttcagagagaccca

SEQ ID NO: 2945511 - DNA, 25 bp, Homo sapien
aatatgcctcctaagcagcctccaa

SEQ ID NO: 2945512 - DNA, 25 bp, Homo sapien
tctctaggatttctatcgcttggtc

SEQ ID NO: 2945513 - DNA, 25 bp, Homo sapien
gcttggtcaagcaaatatgcctcct

SEQ ID NO: 2945514 - DNA, 25 bp, Homo sapien
aggagttcagtgttgtgtagaaggg

SEQ ID NO: 2945515 - DNA, 25 bp, Homo sapien
tcagtgttgtgtagaagggggcaca

SEQ ID NO: 2945516 - DNA, 25 bp, Homo sapien
tgttgtgtagaagggggcacaaacc

SEQ ID NO: 2945517 - DNA, 25 bp, Homo sapien
tgtgtagaagggggcacaaaccttc

SEQ ID NO: 2945518 - DNA, 25 bp, Homo sapien
ctgaggggttgcaaccaggtctcta

SEQ ID NO: 2945519 - DNA, 25 bp, Homo sapien
tgtttaggttctaactgacccagcc

SEQ ID NO: 2945520 - DNA, 25 bp, Homo sapien
ggttgcaaccaggtctctagtttgt

SEQ ID NO: 2945521 - DNA, 25 bp, Homo sapien
tctagtttgtttaggttctaactga

SEQ ID NO: 2945522 - DNA, 25 bp, Homo sapien
caaagggggacagcatcagcagagc

SEQ ID NO: 2945523 - DNA, 25 bp, Homo sapien
ggaacaaagggggacagcatcagca

SEQ ID NO: 2945524 - DNA, 25 bp, Homo sapien
tgcaggaacaaagggggacagcatc

SEQ ID NO: 2945525 - DNA, 25 bp, Homo sapien
acaaagggggacagcatcagcagag

SEQ ID NO: 2945526 - DNA, 25 bp, Homo sapien
ggcctggctgctggcagggtccacg

SEQ ID NO: 2945527 - DNA, 25 bp, Homo sapien
ccacaccctcaatgagggtgacatc

SEQ ID NO: 2945528 - DNA, 25 bp, Homo sapien
aatgagggtgacatcagagagctcc

SEQ ID NO: 2945529 - DNA, 25 bp, Homo sapien
atgagggtgacatcagagagctcca

SEQ ID NO: 2945530 - DNA, 25 bp, Homo sapien
caccctcaatgagggtgacatcaga

SEQ ID NO: 2945531 - DNA, 25 bp, Homo sapien
taggaccaaggctagaatcagcacc

SEQ ID NO: 2945532 - DNA, 25 bp, Homo sapien
gctgacacaatagcgcccaggagct

SEQ ID NO: 2945533 - DNA, 25 bp, Homo sapien
ttgctaccgctgtctgctacgtagg

SEQ ID NO: 2945534 - DNA, 25 bp, Homo sapien
gtctgctacgtaggtagagagccaa

SEQ ID NO: 2945535 - DNA, 25 bp, Homo sapien
agttcagttggctcggggttgcctt

SEQ ID NO: 2945536 - DNA, 25 bp, Homo sapien
tggctcggggttgccttggcctgcc

SEQ ID NO: 2945537 - DNA, 25 bp, Homo sapien
ttggctcggggttgccttggcctgc

SEQ ID NO: 2945538 - DNA, 25 bp, Homo sapien
atgggggagttcagttggctcgggg

SEQ ID NO: 2945539 - DNA, 25 bp, Homo sapien
cttggatgtcaaggagatgctcaag

SEQ ID NO: 2945540 - DNA, 25 bp, Homo sapien
ctcaaggctgggctcaacaccaccc

SEQ ID NO: 2945541 - DNA, 25 bp, Homo sapien
ttggatgtcaaggagatgctcaagg

SEQ ID NO: 2945542 - DNA, 25 bp, Homo sapien
aggctgggctcaacaccacccccag

SEQ ID NO: 2945543 - DNA, 25 bp, Homo sapien
gaatttgagccgcacagtgatgagg

SEQ ID NO: 2945544 - DNA, 25 bp, Homo sapien
aggcaggtgctatcctcagatctca

SEQ ID NO: 2945545 - DNA, 25 bp, Homo sapien
ttcagggcacccacggtatcctctg

SEQ ID NO: 2945546 - DNA, 25 bp, Homo sapien
cacagccagctcctcggtatcattg

SEQ ID NO: 2945547 - DNA, 25 bp, Homo sapien
ccggcctgaagggtgtatttctaag

SEQ ID NO: 2945548 - DNA, 25 bp, Homo sapien
tccttagaggcaaccaagggctggg

SEQ ID NO: 2945549 - DNA, 25 bp, Homo sapien
gggatgagcacaagcagcttcccac

SEQ ID NO: 2945550 - DNA, 25 bp, Homo sapien
aagtatctacctgcccttggtaggg

SEQ ID NO: 2945551 - DNA, 25 bp, Homo sapien
gacatggaagaaaagatagagggtg

SEQ ID NO: 2945552 - DNA, 25 bp, Homo sapien
tgtaaggatgaaagacatggaagaa

SEQ ID NO: 2945553 - DNA, 25 bp, Homo sapien
ctgtaaggatgaaagacatggaaga

SEQ ID NO: 2945554 - DNA, 25 bp, Homo sapien
aaagatagagggtgaggaatgagaa

SEQ ID NO: 2945555 - DNA, 25 bp, Homo sapien
gctttcttgtccagggaagtatttg

SEQ ID NO: 2945556 - DNA, 25 bp, Homo sapien
ctggctttcttgtccagggaagtat

SEQ ID NO: 2945557 - DNA, 25 bp, Homo sapien
tggctttcttgtccagggaagtatt

SEQ ID NO: 2945558 - DNA, 25 bp, Homo sapien
aattgattcggaagtaccagaccac

SEQ ID NO: 2945559 - DNA, 25 bp, Homo sapien
aagacggtgactcccaccagggaga

SEQ ID NO: 2945560 - DNA, 25 bp, Homo sapien
ggcagtgaatcacacagttgtcggt

SEQ ID NO: 2945561 - DNA, 25 bp, Homo sapien
taatgttcagagaacgcagtgtgcg

SEQ ID NO: 2945562 - DNA, 25 bp, Homo sapien
cctgtgtcctatggaggagatttcc

SEQ ID NO: 2945563 - DNA, 25 bp, Homo sapien
tgctcgcacgggagggacatctgta

SEQ ID NO: 2945564 - DNA, 25 bp, Homo sapien
gaggccgcatacttgcctcctgtgt

SEQ ID NO: 2945565 - DNA, 25 bp, Homo sapien
gacatctgtactcctgtggatgaga

SEQ ID NO: 2945566 - DNA, 25 bp, Homo sapien
ggaggacaccctattcctgctaagg

SEQ ID NO: 2945567 - DNA, 25 bp, Homo sapien
ttacagcctgaggactacgggagca

SEQ ID NO: 2945568 - DNA, 25 bp, Homo sapien
tgaaggcggctaggtgcccataaga

SEQ ID NO: 2945569 - DNA, 25 bp, Homo sapien
aaatggaaggatactccaggctccc

SEQ ID NO: 2945570 - DNA, 25 bp, Homo sapien
ttgtaaacgctgtgtattccctctg

SEQ ID NO: 2945571 - DNA, 25 bp, Homo sapien
gtagccccggcctacctactctcat

SEQ ID NO: 2945572 - DNA, 25 bp, Homo sapien
cattaccattttcctgggggcagcg

SEQ ID NO: 2945573 - DNA, 25 bp, Homo sapien
taaactgcatctcccgttggtagcc

SEQ ID NO: 2945574 - DNA, 25 bp, Homo sapien
catccaccgcggctgggaaaaggcc

SEQ ID NO: 2945575 - DNA, 25 bp, Homo sapien
caccacacacagagtaaccgagatg

SEQ ID NO: 2945576 - DNA, 25 bp, Homo sapien
taaagagggactgagagcgtgagca

SEQ ID NO: 2945577 - DNA, 25 bp, Homo sapien
gatgaaagcgccaatccagccatcc

SEQ ID NO: 2945578 - DNA, 25 bp, Homo sapien
tatctccccaagtagaagacacctt

SEQ ID NO: 2945579 - DNA, 25 bp, Homo sapien
cacatgtcctctcacagagaagcct

SEQ ID NO: 2945580 - DNA, 25 bp, Homo sapien
gccacactgaccattcatgtctcga

SEQ ID NO: 2945581 - DNA, 25 bp, Homo sapien
gtgaataggtctggcccacaaggcc

SEQ ID NO: 2945582 - DNA, 25 bp, Homo sapien
aagagtttgatgaggccctccacac

SEQ ID NO: 2945583 - DNA, 25 bp, Homo sapien
caactatcagactaagccagcaccg

SEQ ID NO: 2945584 - DNA, 25 bp, Homo sapien
acctggacccctgcattggaactgg

SEQ ID NO: 2945585 - DNA, 25 bp, Homo sapien
tgcggttccggcatggacaatggac

SEQ ID NO: 2945586 - DNA, 25 bp, Homo sapien
ttctcggaggagaaacggcggcagc

SEQ ID NO: 2945587 - DNA, 25 bp, Homo sapien
ccaagcggcccgtgtcggccatgtt

SEQ ID NO: 2945588 - DNA, 25 bp, Homo sapien
agctctccgagagcgagctgacccg

SEQ ID NO: 2945589 - DNA, 25 bp, Homo sapien
gcccgtgtcggccatgttcatcttc

SEQ ID NO: 2945590 - DNA, 25 bp, Homo sapien
gcctttggtgtgtactgactgcctg

SEQ ID NO: 2945591 - DNA, 25 bp, Homo sapien
caaccaggttgaggtcagttagtcc

SEQ ID NO: 2945592 - DNA, 25 bp, Homo sapien
ggcacggttgacagcactggcttaa

SEQ ID NO: 2945593 - DNA, 25 bp, Homo sapien
tggtcttgagccaaacagcctgagc

SEQ ID NO: 2945594 - DNA, 25 bp, Homo sapien
gggcgctcgctgcacgcgggagcta

SEQ ID NO: 2945595 - DNA, 25 bp, Homo sapien
catagaccccttaagtctaataagg

SEQ ID NO: 2945596 - DNA, 25 bp, Homo sapien
taaggtcatggctgagtctctcaga

SEQ ID NO: 2945597 - DNA, 25 bp, Homo sapien
tgcacgcgggagctaggagcaggcc

SEQ ID NO: 2945598 - DNA, 25 bp, Homo sapien
tggaagccctagtctgagctgggag

SEQ ID NO: 2945599 - DNA, 25 bp, Homo sapien
gggagagctccggagcagggctgtg

SEQ ID NO: 2945600 - DNA, 25 bp, Homo sapien
ttaagtttcgtatgtgccgttcggc

SEQ ID NO: 2945601 - DNA, 25 bp, Homo sapien
taggcaccgaagctggacgccgcga

SEQ ID NO: 2945602 - DNA, 25 bp, Homo sapien
tttgtagggccagaaacacgtgcag

SEQ ID NO: 2945603 - DNA, 25 bp, Homo sapien
tgtgacgccggtaacaacaaaggtg

SEQ ID NO: 2945604 - DNA, 25 bp, Homo sapien
catttggccttctgatccctggtga

SEQ ID NO: 2945605 - DNA, 25 bp, Homo sapien
caagaggaattacagcagcagcgag

SEQ ID NO: 2945606 - DNA, 25 bp, Homo sapien
aacattatttgtacctcccaggcta

SEQ ID NO: 2945607 - DNA, 25 bp, Homo sapien
tagctcagtccatgggaggctctcc

SEQ ID NO: 2945608 - DNA, 25 bp, Homo sapien
ccttatcttgactgggatgtccctg

SEQ ID NO: 2945609 - DNA, 25 bp, Homo sapien
gggttccagcccaacatagagtaac

SEQ ID NO: 2945610 - DNA, 25 bp, Homo sapien
aaattagctgggtgtctcgtggcag

SEQ ID NO: 2945611 - DNA, 25 bp, Homo sapien
cccaggaggtggaggttgcagtgag

SEQ ID NO: 2945612 - DNA, 25 bp, Homo sapien
tgaggcaagagaatcacctgaaccc

SEQ ID NO: 2945613 - DNA, 25 bp, Homo sapien
ctgtaatcccagctacttagaaggc

SEQ ID NO: 2945614 - DNA, 25 bp, Homo sapien
cattatcatcctaagaatcttattt

SEQ ID NO: 2945615 - DNA, 25 bp, Homo sapien
gacagagaatccattatcatcctaa

SEQ ID NO: 2945616 - DNA, 25 bp, Homo sapien
tcctaagaatcttatttcctttgag

SEQ ID NO: 2945617 - DNA, 25 bp, Homo sapien
agacagagaatccattatcatccta

SEQ ID NO: 2945618 - DNA, 25 bp, Homo sapien
tgttgagttttttaggagctgcctc

SEQ ID NO: 2945619 - DNA, 25 bp, Homo sapien
gagttttttaggagctgcctctata

SEQ ID NO: 2945620 - DNA, 25 bp, Homo sapien
ttttttaggagctgcctctatatcc

SEQ ID NO: 2945621 - DNA, 25 bp, Homo sapien
tttaggagctgcctctatatcctgg

SEQ ID NO: 2945622 - DNA, 25 bp, Homo sapien
agactgtgcccatgggagagacccc

SEQ ID NO: 2945623 - DNA, 25 bp, Homo sapien
agtggtgtgcacctggattccccag

SEQ ID NO: 2945624 - DNA, 25 bp, Homo sapien
gcgtagtggtgtgcacctggattcc

SEQ ID NO: 2945625 - DNA, 25 bp, Homo sapien
gactgtgcccatgggagagacccca

SEQ ID NO: 2945626 - DNA, 25 bp, Homo sapien
aaggaagacaatgacaaatggcgtt

SEQ ID NO: 2945627 - DNA, 25 bp, Homo sapien
caccaacagccaacttgatgctcaa

SEQ ID NO: 2945628 - DNA, 25 bp, Homo sapien
atgacaaatggcgtttgcagcaaag

SEQ ID NO: 2945629 - DNA, 25 bp, Homo sapien
aagagagaacgctatgcctcttcct

SEQ ID NO: 2945630 - DNA, 25 bp, Homo sapien
tatctttccaattttttagcatatt

SEQ ID NO: 2945631 - DNA, 25 bp, Homo sapien
tgtatctttccaattttttagcata

SEQ ID NO: 2945632 - DNA, 25 bp, Homo sapien
gtatctttccaattttttagcatat

SEQ ID NO: 2945633 - DNA, 25 bp, Homo sapien
ctgtatctttccaattttttagcat

SEQ ID NO: 2945634 - DNA, 25 bp, Homo sapien
ccagtgacgtcagggccctcgggcc

SEQ ID NO: 2945635 - DNA, 25 bp, Homo sapien
ggcggcgatgccagagcaaaacaag

SEQ ID NO: 2945636 - DNA, 25 bp, Homo sapien
accaatccgcagagggtgcagggtc

SEQ ID NO: 2945637 - DNA, 25 bp, Homo sapien
agcaggccgaggaccaatccgcaga

SEQ ID NO: 2945638 - DNA, 25 bp, Homo sapien
caaacccgtcgctggatcacggctg

SEQ ID NO: 2945639 - DNA, 25 bp, Homo sapien
aacccgtcgctggatcacggctggg

SEQ ID NO: 2945640 - DNA, 25 bp, Homo sapien
gtcgctggatcacggctgggccctc

SEQ ID NO: 2945641 - DNA, 25 bp, Homo sapien
cggagccccaaacccgtcgctggat

SEQ ID NO: 2945642 - DNA, 25 bp, Homo sapien
gctccacagccacgttgcgagagga

SEQ ID NO: 2945643 - DNA, 25 bp, Homo sapien
ggtggtctggacaaagctcgcttcc

SEQ ID NO: 2945644 - DNA, 25 bp, Homo sapien
tgatcaggttcttacgctccacagc

SEQ ID NO: 2945645 - DNA, 25 bp, Homo sapien
ggacgctttcttggaggacagcccc

SEQ ID NO: 2945646 - DNA, 25 bp, Homo sapien
caggggtgccgcagaggtggtcatt

SEQ ID NO: 2945647 - DNA, 25 bp, Homo sapien
cagcatggcagccatatggtatctg

SEQ ID NO: 2945648 - DNA, 25 bp, Homo sapien
gtgccgcagaggtggtcattgcccc

SEQ ID NO: 2945649 - DNA, 25 bp, Homo sapien
ggggtgccgcagaggtggtcattgc

SEQ ID NO: 2945650 - DNA, 25 bp, Homo sapien
gatttcccctggtcatctgggtcag

SEQ ID NO: 2945651 - DNA, 25 bp, Homo sapien
cttgatttcccctggtcatctgggt

SEQ ID NO: 2945652 - DNA, 25 bp, Homo sapien
tttcccctggtcatctgggtcagac

SEQ ID NO: 2945653 - DNA, 25 bp, Homo sapien
tcctgccagcttgatttcccctggt

SEQ ID NO: 2945654 - DNA, 25 bp, Homo sapien
caaatgggaacaatcgtacctgcct

SEQ ID NO: 2945655 - DNA, 25 bp, Homo sapien
tcagccctgaaaggtaggtcctctt

SEQ ID NO: 2945656 - DNA, 25 bp, Homo sapien
tcctggcagctgttgtgatgaccaa

SEQ ID NO: 2945657 - DNA, 25 bp, Homo sapien
ggctctcaggccaattgcacagctg

SEQ ID NO: 2945658 - DNA, 25 bp, Homo sapien
aattgacaaactcctccgatgagtc

SEQ ID NO: 2945659 - DNA, 25 bp, Homo sapien
tgaggatctgctctaaaatggctgc

SEQ ID NO: 2945660 - DNA, 25 bp, Homo sapien
gatgggctccgctgtgtacttctcc

SEQ ID NO: 2945661 - DNA, 25 bp, Homo sapien
tccgatgagtcatcgatgggctccg

SEQ ID NO: 2945662 - DNA, 25 bp, Homo sapien
cagcatatcgcttgcccatgatggg

SEQ ID NO: 2945663 - DNA, 25 bp, Homo sapien
acatgcacgtgtgcagtgggcaccc

SEQ ID NO: 2945664 - DNA, 25 bp, Homo sapien
tccatggagtatatcagaaagaggt

SEQ ID NO: 2945665 - DNA, 25 bp, Homo sapien
gagggtccatgtagtgaggcactca

SEQ ID NO: 2945666 - DNA, 25 bp, Homo sapien
ttgttgggcactttgctgcaggcca

SEQ ID NO: 2945667 - DNA, 25 bp, Homo sapien
gatgttctccatgttctcgatgctg

SEQ ID NO: 2945668 - DNA, 25 bp, Homo sapien
cttggcccgggctgtgctgatgttc

SEQ ID NO: 2945669 - DNA, 25 bp, Homo sapien
caggccagccggatatagtcccaaa

SEQ ID NO: 2945670 - DNA, 25 bp, Homo sapien
tgccccagagggactcatgtgtcca

SEQ ID NO: 2945671 - DNA, 25 bp, Homo sapien
ccccagagggactcatgtgtccagc

SEQ ID NO: 2945672 - DNA, 25 bp, Homo sapien
gccccagagggactcatgtgtccag

SEQ ID NO: 2945673 - DNA, 25 bp, Homo sapien
cctttacttgctgccccagagggac

SEQ ID NO: 2945674 - DNA, 25 bp, Homo sapien
tgatgtattctgacatgcgcttctc

SEQ ID NO: 2945675 - DNA, 25 bp, Homo sapien
tccatcagtgccacccggatccatg

SEQ ID NO: 2945676 - DNA, 25 bp, Homo sapien
tcacgcagagccgtggtgatgtatt

SEQ ID NO: 2945677 - DNA, 25 bp, Homo sapien
ctggtggtccgggtgtcacgcagag

SEQ ID NO: 2945678 - DNA, 25 bp, Homo sapien
cctcatcaagtactgggttacccag

SEQ ID NO: 2945679 - DNA, 25 bp, Homo sapien
caacacttgagatggtgcatggctg

SEQ ID NO: 2945680 - DNA, 25 bp, Homo sapien
tatacagtaggtgcgcaaaaaacgt

SEQ ID NO: 2945681 - DNA, 25 bp, Homo sapien
catcctgaaggaaggccaattctcc

SEQ ID NO: 2945682 - DNA, 25 bp, Homo sapien
gatggcgctcagtccgatcagcatt

SEQ ID NO: 2945683 - DNA, 25 bp, Homo sapien
tcagtccgatcagcattccggtgag

SEQ ID NO: 2945684 - DNA, 25 bp, Homo sapien
aagtcgatggcgctcagtccgatca

SEQ ID NO: 2945685 - DNA, 25 bp, Homo sapien
ggcttcatcccgcagcatgatggct

SEQ ID NO: 2945686 - DNA, 25 bp, Homo sapien
ttaggtagggcgtgtaatcgatgac

SEQ ID NO: 2945687 - DNA, 25 bp, Homo sapien
ctctgcgtgaactttaggtagggcg

SEQ ID NO: 2945688 - DNA, 25 bp, Homo sapien
tgaactttaggtagggcgtgtaatc

SEQ ID NO: 2945689 - DNA, 25 bp, Homo sapien
tagggcgtgtaatcgatgaccacgg

SEQ ID NO: 2945690 - DNA, 25 bp, Homo sapien
ctcctcgtccgtcaggtagtcgtag

SEQ ID NO: 2945691 - DNA, 25 bp, Homo sapien
ctgtcctcatcggtgacgagcggga

SEQ ID NO: 2945692 - DNA, 25 bp, Homo sapien
ggcgagttgtcctcgctcgtgctgc

SEQ ID NO: 2945693 - DNA, 25 bp, Homo sapien
tagacgatgcggaacttctgctcca

SEQ ID NO: 2945694 - DNA, 25 bp, Homo sapien
gcgccggctcagcccgggcggctgg

SEQ ID NO: 2945695 - DNA, 25 bp, Homo sapien
cagcccgggcggctgggaggacgtc

SEQ ID NO: 2945696 - DNA, 25 bp, Homo sapien
gcggctgggaggacgtcccggccgc

SEQ ID NO: 2945697 - DNA, 25 bp, Homo sapien
gctgggaggacgtcccggccgcggc

SEQ ID NO: 2945698 - DNA, 25 bp, Homo sapien
aggtccttcagctgcgactcgcgca

SEQ ID NO: 2945699 - DNA, 25 bp, Homo sapien
ttcagctgcgactcgcgcagacgca

SEQ ID NO: 2945700 - DNA, 25 bp, Homo sapien
agctccaggatcacgccttccagct

SEQ ID NO: 2945701 - DNA, 25 bp, Homo sapien
gtttctcgcgctggttctgcgccgc

SEQ ID NO: 2945702 - DNA, 25 bp, Homo sapien
ctgggagggggaggaggagtcaggc

SEQ ID NO: 2945703 - DNA, 25 bp, Homo sapien
tcggccccattaagcgttcccagtg

SEQ ID NO: 2945704 - DNA, 25 bp, Homo sapien
ccattaagcgttcccagtgagggcc

SEQ ID NO: 2945705 - DNA, 25 bp, Homo sapien
tgagggccattgattgaccaggggt

SEQ ID NO: 2945706 - DNA, 25 bp, Homo sapien
ccaggggtgtagtgagctccttgga

SEQ ID NO: 2945707 - DNA, 25 bp, Homo sapien
aggacgacccgctctcaggcccaag

SEQ ID NO: 2945708 - DNA, 25 bp, Homo sapien
gcgagagctggtgcgccggtagagg

SEQ ID NO: 2945709 - DNA, 25 bp, Homo sapien
cttcttccccaggacgacccgctct

SEQ ID NO: 2945710 - DNA, 25 bp, Homo sapien
agcgagagctggtgcgccggtagag

SEQ ID NO: 2945711 - DNA, 25 bp, Homo sapien
ctgacagcggctccgtgctcatgaa

SEQ ID NO: 2945712 - DNA, 25 bp, Homo sapien
ccccagggctcctcgtcccgcgtgc

SEQ ID NO: 2945713 - DNA, 25 bp, Homo sapien
ctgggagtccgagctcagactggct

SEQ ID NO: 2945714 - DNA, 25 bp, Homo sapien
tgccctctcccaggcgctgggagtc

SEQ ID NO: 2945715 - DNA, 25 bp, Homo sapien
gagaccagcctggcgaaactccgtc

SEQ ID NO: 2945716 - DNA, 25 bp, Homo sapien
cgagaccagcctggcgaaactccgt

SEQ ID NO: 2945717 - DNA, 25 bp, Homo sapien
tacagagaacggacaagacacggtc

SEQ ID NO: 2945718 - DNA, 25 bp, Homo sapien
cacaaagtgcatgcgttgaagtcct

SEQ ID NO: 2945719 - DNA, 25 bp, Homo sapien
tctagggtcatccaatacagtgtgg

SEQ ID NO: 2945720 - DNA, 25 bp, Homo sapien
gaagtcctgggcattcgctcgaagg

SEQ ID NO: 2945721 - DNA, 25 bp, Homo sapien
taaactttggttaagcacctgcctg

SEQ ID NO: 2945722 - DNA, 25 bp, Homo sapien
cactgtattgtaatcgtcagttgat

SEQ ID NO: 2945723 - DNA, 25 bp, Homo sapien
gtcagttgatgtctctgtctccccg

SEQ ID NO: 2945724 - DNA, 25 bp, Homo sapien
ccaagcgaccagtctacatgtgtgg

SEQ ID NO: 2945725 - DNA, 25 bp, Homo sapien
tcgccagggacttgcagctgggaat

SEQ ID NO: 2945726 - DNA, 25 bp, Homo sapien
ttgaagctcgccagggacttgcagc

SEQ ID NO: 2945727 - DNA, 25 bp, Homo sapien
cgttggatttgaagctcgccaggga

SEQ ID NO: 2945728 - DNA, 25 bp, Homo sapien
caggcactcgttggatttgaagctc

SEQ ID NO: 2945729 - DNA, 25 bp, Homo sapien
tgctgggctgccctcgggactgtcg

SEQ ID NO: 2945730 - DNA, 25 bp, Homo sapien
ggctgccctcgggactgtcgctcac

SEQ ID NO: 2945731 - DNA, 25 bp, Homo sapien
ctcagtgctgggctgccctcgggac

SEQ ID NO: 2945732 - DNA, 25 bp, Homo sapien
ctgggctgccctcgggactgtcgct

SEQ ID NO: 2945733 - DNA, 25 bp, Homo sapien
cctggattgggggactcttgttgaa

SEQ ID NO: 2945734 - DNA, 25 bp, Homo sapien
agcagacgagatcttccccgagaga

SEQ ID NO: 2945735 - DNA, 25 bp, Homo sapien
cgttctctggaagggtagcctggat

SEQ ID NO: 2945736 - DNA, 25 bp, Homo sapien
ccctggctgggtgggtagcgttctc

SEQ ID NO: 2945737 - DNA, 25 bp, Homo sapien
atgagtgaaggagcgccaaggtcac

SEQ ID NO: 2945738 - DNA, 25 bp, Homo sapien
ctccaggccatacacagacagatgg

SEQ ID NO: 2945739 - DNA, 25 bp, Homo sapien
agcgtgctttcttccgcagcccgtg

SEQ ID NO: 2945740 - DNA, 25 bp, Homo sapien
ggaaggagtgactccaggccataca

SEQ ID NO: 2945741 - DNA, 25 bp, Homo sapien
tttgctgtagctgggcatgtctcca

SEQ ID NO: 2945742 - DNA, 25 bp, Homo sapien
tgtttgctgtagctgggcatgtctc

SEQ ID NO: 2945743 - DNA, 25 bp, Homo sapien
tgtgtttgctgtagctgggcatgtc

SEQ ID NO: 2945744 - DNA, 25 bp, Homo sapien
gctgctccagtcgtggggatcatca

SEQ ID NO: 2945745 - DNA, 25 bp, Homo sapien
gagacgtcctggtcctacgttccta

SEQ ID NO: 2945746 - DNA, 25 bp, Homo sapien
gagtgtcgccgagggtcggggagac

SEQ ID NO: 2945747 - DNA, 25 bp, Homo sapien
tggcggctctccgccgttcggggcc

SEQ ID NO: 2945748 - DNA, 25 bp, Homo sapien
ttcctacttcccgctctcccggctg

SEQ ID NO: 2945749 - DNA, 25 bp, Homo sapien
ttaagcgcgacgtggagaccgcgaa

SEQ ID NO: 2945750 - DNA, 25 bp, Homo sapien
gacagagcgaggctgaaaaagatgc

SEQ ID NO: 2945751 - DNA, 25 bp, Homo sapien
agaccgcgaagttggccggcagctc

SEQ ID NO: 2945752 - DNA, 25 bp, Homo sapien
gatgctggaagtgcgtgctgctgcc

SEQ ID NO: 2945753 - DNA, 25 bp, Homo sapien
aaaatgcgctgttaaggccggcgcg

SEQ ID NO: 2945754 - DNA, 25 bp, Homo sapien
tccagaaggcgctggggtttccagt

SEQ ID NO: 2945755 - DNA, 25 bp, Homo sapien
aggaagagggccagtgcgtcaccct

SEQ ID NO: 2945756 - DNA, 25 bp, Homo sapien
gctggtgaaaatgcgctgttaaggc

SEQ ID NO: 2945757 - DNA, 25 bp, Homo sapien
cgttattgtgtggtctcccggcgat

SEQ ID NO: 2945758 - DNA, 25 bp, Homo sapien
acaaagcgttttgcagttgcaggcc

SEQ ID NO: 2945759 - DNA, 25 bp, Homo sapien
gcaggcctgtcctgtaacctgaaaa

SEQ ID NO: 2945760 - DNA, 25 bp, Homo sapien
tcccggcgatctcgaagaactcatt

SEQ ID NO: 2945761 - DNA, 25 bp, Homo sapien
gaaatcacgatacgagagcaaccaa

SEQ ID NO: 2945762 - DNA, 25 bp, Homo sapien
ggctgcagctcagctaacccagtgg

SEQ ID NO: 2945763 - DNA, 25 bp, Homo sapien
gagcaaccaacaccaaaacgtcgat

SEQ ID NO: 2945764 - DNA, 25 bp, Homo sapien
tcacgcgaaggtgggatctggctcc

SEQ ID NO: 2945765 - DNA, 25 bp, Homo sapien
aaggcagagacgtcaaagtcgaggc

SEQ ID NO: 2945766 - DNA, 25 bp, Homo sapien
agacgtcaaagtcgaggcctaccct

SEQ ID NO: 2945767 - DNA, 25 bp, Homo sapien
cagagacgtcaaagtcgaggcctac

SEQ ID NO: 2945768 - DNA, 25 bp, Homo sapien
cgtcaaagtcgaggcctacccttct

SEQ ID NO: 2945769 - DNA, 25 bp, Homo sapien
cctccagcgccggacgcgaccagtg

SEQ ID NO: 2945770 - DNA, 25 bp, Homo sapien
gcgccggctgactgggctcctccag

SEQ ID NO: 2945771 - DNA, 25 bp, Homo sapien
ggcaggcgccggctgactgggctcc

SEQ ID NO: 2945772 - DNA, 25 bp, Homo sapien
tccagcgccggacgcgaccagtggg

SEQ ID NO: 2945773 - DNA, 25 bp, Homo sapien
tggcccctcggagtccacgtgctaa

SEQ ID NO: 2945774 - DNA, 25 bp, Homo sapien
ggaaagctgatagttggcccctcgg

SEQ ID NO: 2945775 - DNA, 25 bp, Homo sapien
gctcaaaggcattttgtcagggaaa

SEQ ID NO: 2945776 - DNA, 25 bp, Homo sapien
ttacaggtcacagattgcactctcc

SEQ ID NO: 2945777 - DNA, 25 bp, Homo sapien
tggaaaggacgccttctctcgggcc

SEQ ID NO: 2945778 - DNA, 25 bp, Homo sapien
aaattatttcgtgtcatttctgaac

SEQ ID NO: 2945779 - DNA, 25 bp, Homo sapien
tctgaactcagcttgagatgggaag

SEQ ID NO: 2945780 - DNA, 25 bp, Homo sapien
gagcccgaccttgactgatagttga

SEQ ID NO: 2945781 - DNA, 25 bp, Homo sapien
gttgagtcagggctccatagcttct

SEQ ID NO: 2945782 - DNA, 25 bp, Homo sapien
ccaggcttgctcctcgagggtgggc

SEQ ID NO: 2945783 - DNA, 25 bp, Homo sapien
ctccatagcttctggagcatgtcaa

SEQ ID NO: 2945784 - DNA, 25 bp, Homo sapien
gagggtgggcgtgttgagtcagggc

SEQ ID NO: 2945785 - DNA, 25 bp, Homo sapien
ggaatgccgccctttcaaggctgtg

SEQ ID NO: 2945786 - DNA, 25 bp, Homo sapien
taatgatatagagatctgcagccct

SEQ ID NO: 2945787 - DNA, 25 bp, Homo sapien
tttgtcacatggagatagggtcacg

SEQ ID NO: 2945788 - DNA, 25 bp, Homo sapien
tccctttcacgggatgttctgctgt

SEQ ID NO: 2945789 - DNA, 25 bp, Homo sapien
ggctacttatcaatatagaggtggg

SEQ ID NO: 2945790 - DNA, 25 bp, Homo sapien
agcagcaaccgggtagcgctcagac

SEQ ID NO: 2945791 - DNA, 25 bp, Homo sapien
cgactccgcggtccttgggcagcag

SEQ ID NO: 2945792 - DNA, 25 bp, Homo sapien
tcagactacagaccccagcgcgatg

SEQ ID NO: 2945793 - DNA, 25 bp, Homo sapien
gttgtctccggctgagactccaggg

SEQ ID NO: 2945794 - DNA, 25 bp, Homo sapien
gggcgtcactgcaattactgcttcc

SEQ ID NO: 2945795 - DNA, 25 bp, Homo sapien
ccaaggagtttcagtaagcggttct

SEQ ID NO: 2945796 - DNA, 25 bp, Homo sapien
ggtcaagaatggtgtggtccctgct

SEQ ID NO: 2945797 - DNA, 25 bp, Homo sapien
gtctcaggtctcgttcccaggccct

SEQ ID NO: 2945798 - DNA, 25 bp, Homo sapien
aggtctcaggtctcgttcccaggcc

SEQ ID NO: 2945799 - DNA, 25 bp, Homo sapien
tcccagcccagggtcgcgcgcccct

SEQ ID NO: 2945800 - DNA, 25 bp, Homo sapien
caaggtctcaggtctcgttcccagg

SEQ ID NO: 2945801 - DNA, 25 bp, Homo sapien
ttctcagcaggctgtccgctgccat

SEQ ID NO: 2945802 - DNA, 25 bp, Homo sapien
gttctcagcaggctgtccgctgcca

SEQ ID NO: 2945803 - DNA, 25 bp, Homo sapien
gtctggcaactgcttaagcccacgc

SEQ ID NO: 2945804 - DNA, 25 bp, Homo sapien
cacgccacccttgattctagggtca

SEQ ID NO: 2945805 - DNA, 25 bp, Homo sapien
cttgattctagggtcactcagtacc

SEQ ID NO: 2945806 - DNA, 25 bp, Homo sapien
ctgcaaagtaccaaggaacgtctgg

SEQ ID NO: 2945807 - DNA, 25 bp, Homo sapien
acagggcagaactgaccatctgggc

SEQ ID NO: 2945808 - DNA, 25 bp, Homo sapien
tgggcaccgcgttccagccaccagc

SEQ ID NO: 2945809 - DNA, 25 bp, Homo sapien
ccctgctgttaaggccacccagctc

SEQ ID NO: 2945810 - DNA, 25 bp, Homo sapien
gccctgctgttaaggccacccagct

SEQ ID NO: 2945811 - DNA, 25 bp, Homo sapien
agagcagtgggcatcaacctggcag

SEQ ID NO: 2945812 - DNA, 25 bp, Homo sapien
aaagatgcaggagtggccggcagag

SEQ ID NO: 2945813 - DNA, 25 bp, Homo sapien
gccacccagatgcctgctcagtgtt

SEQ ID NO: 2945814 - DNA, 25 bp, Homo sapien
gcctgctcagtgttgtgggccattt

SEQ ID NO: 2945815 - DNA, 25 bp, Homo sapien
gaaacctgcattggcagggcccttt

SEQ ID NO: 2945816 - DNA, 25 bp, Homo sapien
acagagaaacctgcattggcagggc

SEQ ID NO: 2945817 - DNA, 25 bp, Homo sapien
acctgcattggcagggcccttttat

SEQ ID NO: 2945818 - DNA, 25 bp, Homo sapien
gagaaacctgcattggcagggccct

SEQ ID NO: 2945819 - DNA, 25 bp, Homo sapien
tggaagcaggatcgcccgtctgcac

SEQ ID NO: 2945820 - DNA, 25 bp, Homo sapien
tttggaagcaggatcgcccgtctgc

SEQ ID NO: 2945821 - DNA, 25 bp, Homo sapien
agtgatggccatccccgcatgccac

SEQ ID NO: 2945822 - DNA, 25 bp, Homo sapien
caggatcgcccgtctgcactgcagt

SEQ ID NO: 2945823 - DNA, 25 bp, Homo sapien
tggagtcttgcactttctcccgcac

SEQ ID NO: 2945824 - DNA, 25 bp, Homo sapien
taaggctcagtgatctcctaggcag

SEQ ID NO: 2945825 - DNA, 25 bp, Homo sapien
cccactgaccatgggttggtattag

SEQ ID NO: 2945826 - DNA, 25 bp, Homo sapien
gttggtattagaccggcccagctcg

SEQ ID NO: 2945827 - DNA, 25 bp, Homo sapien
caggatactaccagcccactcaggg

SEQ ID NO: 2945828 - DNA, 25 bp, Homo sapien
tcccccatcacacaaggagctggtg

SEQ ID NO: 2945829 - DNA, 25 bp, Homo sapien
cccccatcacacaaggagctggtgg

SEQ ID NO: 2945830 - DNA, 25 bp, Homo sapien
aagatgacccaggatactaccagcc

SEQ ID NO: 2945831 - DNA, 25 bp, Homo sapien
ctggatggcacccacggagttgtta

SEQ ID NO: 2945832 - DNA, 25 bp, Homo sapien
tggatggcacccacggagttgttac

SEQ ID NO: 2945833 - DNA, 25 bp, Homo sapien
tcgaccataacacagcacgtggaga

SEQ ID NO: 2945834 - DNA, 25 bp, Homo sapien
taacacagcacgtggagaagtccgg

SEQ ID NO: 2945835 - DNA, 25 bp, Homo sapien
ccaggagccatcgaccataacacag

SEQ ID NO: 2945836 - DNA, 25 bp, Homo sapien
cacgtggagaagtccgggcattcga

SEQ ID NO: 2945837 - DNA, 25 bp, Homo sapien
agcagtgcaccctgtcttcacagca

SEQ ID NO: 2945838 - DNA, 25 bp, Homo sapien
tgcccgtgggtgtgatgcagcgggt

SEQ ID NO: 2945839 - DNA, 25 bp, Homo sapien
gtgtgaaccaggtcgcagaaggcac

SEQ ID NO: 2945840 - DNA, 25 bp, Homo sapien
accaggtcgcagaaggcaccgtgcg

SEQ ID NO: 2945841 - DNA, 25 bp, Homo sapien
gggtgtgatgcagcgggtgtgaacc

SEQ ID NO: 2945842 - DNA, 25 bp, Homo sapien
cagcaggtagaaccatcagggcacc

SEQ ID NO: 2945843 - DNA, 25 bp, Homo sapien
cgggaccgtgcgtccggacacatga

SEQ ID NO: 2945844 - DNA, 25 bp, Homo sapien
acacatgaccgagctggacaaggcc

SEQ ID NO: 2945845 - DNA, 25 bp, Homo sapien
agctcacagcaggtagaaccatcag

SEQ ID NO: 2945846 - DNA, 25 bp, Homo sapien
caggctcagtagcacacagggagca

SEQ ID NO: 2945847 - DNA, 25 bp, Homo sapien
aggctcagtagcacacagggagcag

SEQ ID NO: 2945848 - DNA, 25 bp, Homo sapien
aggggtgggtctttgtcacttccag

SEQ ID NO: 2945849 - DNA, 25 bp, Homo sapien
gcagtgcaggtgatcggagcagcag

SEQ ID NO: 2945850 - DNA, 25 bp, Homo sapien
cagtgcaggtgatcggagcagcagg

SEQ ID NO: 2945851 - DNA, 25 bp, Homo sapien
cagcagtgcaggtgatcggagcagc

SEQ ID NO: 2945852 - DNA, 25 bp, Homo sapien
ttagtgaggaggtccgtggtagcgt

SEQ ID NO: 2945853 - DNA, 25 bp, Homo sapien
gtgaggaggtccgtggtagcgttct

SEQ ID NO: 2945854 - DNA, 25 bp, Homo sapien
gaggtccgtggtagcgttctccttg

SEQ ID NO: 2945855 - DNA, 25 bp, Homo sapien
aggaggtccgtggtagcgttctcct

SEQ ID NO: 2945856 - DNA, 25 bp, Homo sapien
gggtatcaaccctttgccggctcca

SEQ ID NO: 2945857 - DNA, 25 bp, Homo sapien
taccgcttacaccaccttgcagtga

SEQ ID NO: 2945858 - DNA, 25 bp, Homo sapien
tgaagatggagggtaccgcttacac

SEQ ID NO: 2945859 - DNA, 25 bp, Homo sapien
cttgcagtgatcctaaggccaggcc

SEQ ID NO: 2945860 - DNA, 25 bp, Homo sapien
ctccatgtcacatttcacatccccc

SEQ ID NO: 2945861 - DNA, 25 bp, Homo sapien
tccatgtcacatttcacatccccca

SEQ ID NO: 2945862 - DNA, 25 bp, Homo sapien
cggcagcaggtatagccatctgggc

SEQ ID NO: 2945863 - DNA, 25 bp, Homo sapien
ccccgactgtagacggcagcaggta

SEQ ID NO: 2945864 - DNA, 25 bp, Homo sapien
tagacggcagcaggtatagccatct

SEQ ID NO: 2945865 - DNA, 25 bp, Homo sapien
gactgtagacggcagcaggtatagc

SEQ ID NO: 2945866 - DNA, 25 bp, Homo sapien
aaccccgcgggacagcagtgtatgt

SEQ ID NO: 2945867 - DNA, 25 bp, Homo sapien
ttcaaggcttgtgggtctggcaggc

SEQ ID NO: 2945868 - DNA, 25 bp, Homo sapien
tgttcacaggtacccttctgcgtgt

SEQ ID NO: 2945869 - DNA, 25 bp, Homo sapien
tgcgtgtcacacgtaaaccccgcgg

SEQ ID NO: 2945870 - DNA, 25 bp, Homo sapien
ccccagacgtgagttggcagcaggt

SEQ ID NO: 2945871 - DNA, 25 bp, Homo sapien
ctctgggattggacagcagccccac

SEQ ID NO: 2945872 - DNA, 25 bp, Homo sapien
actccccagacgtgagttggcagca

SEQ ID NO: 2945873 - DNA, 25 bp, Homo sapien
gccccactccccagacgtgagttgg

SEQ ID NO: 2945874 - DNA, 25 bp, Homo sapien
ctatgcggagggcagaaagcaatag

SEQ ID NO: 2945875 - DNA, 25 bp, Homo sapien
aaagcaataggagcttggccaccca

SEQ ID NO: 2945876 - DNA, 25 bp, Homo sapien
ctgggtatcacctatgggctatgcg

SEQ ID NO: 2945877 - DNA, 25 bp, Homo sapien
tcacctatgggctatgcggagggca

SEQ ID NO: 2945878 - DNA, 25 bp, Homo sapien
tactccagcccgcctctcctgctta

SEQ ID NO: 2945879 - DNA, 25 bp, Homo sapien
actccagcccgcctctcctgcttac

SEQ ID NO: 2945880 - DNA, 25 bp, Homo sapien
ctactccagcccgcctctcctgctt

SEQ ID NO: 2945881 - DNA, 25 bp, Homo sapien
gtgctggtcacagccgatgtctctg

SEQ ID NO: 2945882 - DNA, 25 bp, Homo sapien
agcagtgctggtggtccgagcagca

SEQ ID NO: 2945883 - DNA, 25 bp, Homo sapien
cgatctcgcttcctcgctgacactg

SEQ ID NO: 2945884 - DNA, 25 bp, Homo sapien
tcagctacacacgtgtagccctggg

SEQ ID NO: 2945885 - DNA, 25 bp, Homo sapien
ggggcaactggcagcaggcccagct

SEQ ID NO: 2945886 - DNA, 25 bp, Homo sapien
atggggcaactggcagcaggcccag

SEQ ID NO: 2945887 - DNA, 25 bp, Homo sapien
caggctcgggcagcaggtctgcccc

SEQ ID NO: 2945888 - DNA, 25 bp, Homo sapien
agctcccacccaggctcgggcagca

SEQ ID NO: 2945889 - DNA, 25 bp, Homo sapien
ggcagcagtgctggcgatcctcgca

SEQ ID NO: 2945890 - DNA, 25 bp, Homo sapien
ctggttatcatggcagaagtgtcct

SEQ ID NO: 2945891 - DNA, 25 bp, Homo sapien
gtccttcacacccacgtgagggcta

SEQ ID NO: 2945892 - DNA, 25 bp, Homo sapien
ggatcgagccttcacgttgcaggtg

SEQ ID NO: 2945893 - DNA, 25 bp, Homo sapien
ccagccctgtcggttgtctcggcag

SEQ ID NO: 2945894 - DNA, 25 bp, Homo sapien
gccctgtcggttgtctcggcagcag

SEQ ID NO: 2945895 - DNA, 25 bp, Homo sapien
aggcccagccctgtcggttgtctcg

SEQ ID NO: 2945896 - DNA, 25 bp, Homo sapien
gcaggcccagccctgtcggttgtct

SEQ ID NO: 2945897 - DNA, 25 bp, Homo sapien
ctggatggtcagaggggggcgagag

SEQ ID NO: 2945898 - DNA, 25 bp, Homo sapien
agagggttggacgaggtgggacctg

SEQ ID NO: 2945899 - DNA, 25 bp, Homo sapien
ggcgagagggttggacgaggtggga

SEQ ID NO: 2945900 - DNA, 25 bp, Homo sapien
tggatggtcagaggggggcgagagg

SEQ ID NO: 2945901 - DNA, 25 bp, Homo sapien
agcaggacagcagtggcgccgatca

SEQ ID NO: 2945902 - DNA, 25 bp, Homo sapien
tggcgccgatcagcacaacagacgc

SEQ ID NO: 2945903 - DNA, 25 bp, Homo sapien
caggacagcagtggcgccgatcagc

SEQ ID NO: 2945904 - DNA, 25 bp, Homo sapien
agcagtggcgccgatcagcacaaca

SEQ ID NO: 2945905 - DNA, 25 bp, Homo sapien
gcggggcctccctgcgcaaacactt

SEQ ID NO: 2945906 - DNA, 25 bp, Homo sapien
ggcctccctgcgcaaacacttggta

SEQ ID NO: 2945907 - DNA, 25 bp, Homo sapien
cctcaaaggggcgtcccagcgcggg

SEQ ID NO: 2945908 - DNA, 25 bp, Homo sapien
ccagcgcggggcctccctgcgcaaa

SEQ ID NO: 2945909 - DNA, 25 bp, Homo sapien
gggaaggccttagattgaggcccca

SEQ ID NO: 2945910 - DNA, 25 bp, Homo sapien
gaaggccttagattgaggccccacc

SEQ ID NO: 2945911 - DNA, 25 bp, Homo sapien
aggccttagattgaggccccacctc

SEQ ID NO: 2945912 - DNA, 25 bp, Homo sapien
ggtcccgagggctgcagagtcttca

SEQ ID NO: 2945913 - DNA, 25 bp, Homo sapien
tggccacagggtccactgaaacggg

SEQ ID NO: 2945914 - DNA, 25 bp, Homo sapien
acacccctgtggatagggaaaagca

SEQ ID NO: 2945915 - DNA, 25 bp, Homo sapien
ggatagggaaaagcacctggccaca

SEQ ID NO: 2945916 - DNA, 25 bp, Homo sapien
ggatggcagcttgtaatgtggcttt

SEQ ID NO: 2945917 - DNA, 25 bp, Homo sapien
taatgtgatacagccgatgtgggca

SEQ ID NO: 2945918 - DNA, 25 bp, Homo sapien
tcgtgtcttgcaagggaccctgtgt

SEQ ID NO: 2945919 - DNA, 25 bp, Homo sapien
tagacgtggctgtacatagaaagct

SEQ ID NO: 2945920 - DNA, 25 bp, Homo sapien
tctctgggctacgatgtcacagggc

SEQ ID NO: 2945921 - DNA, 25 bp, Homo sapien
actacgtgcgcctcggcggcgaggc

SEQ ID NO: 2945922 - DNA, 25 bp, Homo sapien
tggtgatccccgcgcactacgtgcg

SEQ ID NO: 2945923 - DNA, 25 bp, Homo sapien
ggacaacgtctaccgcaacgtcatg

SEQ ID NO: 2945924 - DNA, 25 bp, Homo sapien
ggcgcgcgcttttccccagcccgac

SEQ ID NO: 2945925 - DNA, 25 bp, Homo sapien
tagcatgtgacagtcccttgagacc

SEQ ID NO: 2945926 - DNA, 25 bp, Homo sapien
ctgaagggctttgagagactcatct

SEQ ID NO: 2945927 - DNA, 25 bp, Homo sapien
gtgctacagcaatacacacactagc

SEQ ID NO: 2945928 - DNA, 25 bp, Homo sapien
tttccagaccttccaagggagctta

SEQ ID NO: 2945929 - DNA, 25 bp, Homo sapien
cacacacgttagaaaatgaaaagtg

SEQ ID NO: 2945930 - DNA, 25 bp, Homo sapien
cacacacacacgttagaaaatgaaa

SEQ ID NO: 2945931 - DNA, 25 bp, Homo sapien
gttagaaaatgaaaagtgaggccag

SEQ ID NO: 2945932 - DNA, 25 bp, Homo sapien
cacgttagaaaatgaaaagtgaggc

SEQ ID NO: 2945933 - DNA, 25 bp, Homo sapien
gacactgacaagaggaattaccacc

SEQ ID NO: 2945934 - DNA, 25 bp, Homo sapien
tgcccagctcagtttagacagtaaa

SEQ ID NO: 2945935 - DNA, 25 bp, Homo sapien
tgcttcatagtttccatgccctctg

SEQ ID NO: 2945936 - DNA, 25 bp, Homo sapien
ggcattttcctaactattcgtgtgg

SEQ ID NO: 2945937 - DNA, 25 bp, Homo sapien
tctggccaagcaagtaaaggccttt

SEQ ID NO: 2945938 - DNA, 25 bp, Homo sapien
tgagcatttccccagttatgcacct

SEQ ID NO: 2945939 - DNA, 25 bp, Homo sapien
gcctatagcaccagaccttgagcat

SEQ ID NO: 2945940 - DNA, 25 bp, Homo sapien
gggatcctagtattgagtcaacaga

SEQ ID NO: 2945941 - DNA, 25 bp, Homo sapien
gaagagtcaaagtctggagaagcta

SEQ ID NO: 2945942 - DNA, 25 bp, Homo sapien
cattctgactgctaccctggggacc

SEQ ID NO: 2945943 - DNA, 25 bp, Homo sapien
gaagctactgctgatcaccctgtgg

SEQ ID NO: 2945944 - DNA, 25 bp, Homo sapien
taggcaccccagcacattctgactg

SEQ ID NO: 2945945 - DNA, 25 bp, Homo sapien
tcgtagtcgaagcaagcggagaagc

SEQ ID NO: 2945946 - DNA, 25 bp, Homo sapien
gcccacagctggcaacggagccgga

SEQ ID NO: 2945947 - DNA, 25 bp, Homo sapien
cagcagcagttgtagtcgtagtcga

SEQ ID NO: 2945948 - DNA, 25 bp, Homo sapien
agccggagctatagccgggaccgca

SEQ ID NO: 2945949 - DNA, 25 bp, Homo sapien
aaggcggagagctcaagatgactcc

SEQ ID NO: 2945950 - DNA, 25 bp, Homo sapien
ggtagcagctcccaagaccatggtg

SEQ ID NO: 2945951 - DNA, 25 bp, Homo sapien
aagatgactcccagcggagatccct

SEQ ID NO: 2945952 - DNA, 25 bp, Homo sapien
tggcagtcccgcaccaccaagaaga

SEQ ID NO: 2945953 - DNA, 25 bp, Homo sapien
agaaagaacgatctgggaagtccca

SEQ ID NO: 2945954 - DNA, 25 bp, Homo sapien
cttcccagcaagaaagaacgatctg

SEQ ID NO: 2945955 - DNA, 25 bp, Homo sapien
gccttcccagcaagaaagaacgatc

SEQ ID NO: 2945956 - DNA, 25 bp, Homo sapien
ttcccagcaagaaagaacgatctgg

SEQ ID NO: 2945957 - DNA, 25 bp, Homo sapien
ggtctgcctgtagcggcctgaacaa

SEQ ID NO: 2945958 - DNA, 25 bp, Homo sapien
gcctgtagcggcctgaacaagcagg

SEQ ID NO: 2945959 - DNA, 25 bp, Homo sapien
tcagggtctgcctgtagcggcctga

SEQ ID NO: 2945960 - DNA, 25 bp, Homo sapien
tgtagcggcctgaacaagcaggagc

SEQ ID NO: 2945961 - DNA, 25 bp, Homo sapien
tttcaaggaacaaagatgccagaac

SEQ ID NO: 2945962 - DNA, 25 bp, Homo sapien
catctccaaggcctagatcctggtg

SEQ ID NO: 2945963 - DNA, 25 bp, Homo sapien
gaaaatagtacgttcctcaggaggc

SEQ ID NO: 2945964 - DNA, 25 bp, Homo sapien
ccaaaggatataggaagctcctcaa

SEQ ID NO: 2945965 - DNA, 25 bp, Homo sapien
cacactgcaaagtaaaacctaattt

SEQ ID NO: 2945966 - DNA, 25 bp, Homo sapien
gcacactgcaaagtaaaacctaatt

SEQ ID NO: 2945967 - DNA, 25 bp, Homo sapien
agcacactgcaaagtaaaacctaat

SEQ ID NO: 2945968 - DNA, 25 bp, Homo sapien
cagcacactgcaaagtaaaacctaa

SEQ ID NO: 2945969 - DNA, 25 bp, Homo sapien
ggtcccttgcctcaacattatccaa

SEQ ID NO: 2945970 - DNA, 25 bp, Homo sapien
ccctcaggatggagggtcccttgcc

SEQ ID NO: 2945971 - DNA, 25 bp, Homo sapien
cagtaatcttgatggtaaaaaagag

SEQ ID NO: 2945972 - DNA, 25 bp, Homo sapien
ctctgatgggagcagtaatcttgat

SEQ ID NO: 2945973 - DNA, 25 bp, Homo sapien
tctgaagatggaacaaaacccgatg

SEQ ID NO: 2945974 - DNA, 25 bp, Homo sapien
aaaaggctcctgtcaaactcgaatc

SEQ ID NO: 2945975 - DNA, 25 bp, Homo sapien
taaatcatcatgtagtgcacctgga

SEQ ID NO: 2945976 - DNA, 25 bp, Homo sapien
gaagagttctgaccaaggactgcag

SEQ ID NO: 2945977 - DNA, 25 bp, Homo sapien
tgctgagtcctgtctcaaggttggg

SEQ ID NO: 2945978 - DNA, 25 bp, Homo sapien
gatactgggagccttcctaagcctt

SEQ ID NO: 2945979 - DNA, 25 bp, Homo sapien
aaaaaagtcgccagaatgtcctcat

SEQ ID NO: 2945980 - DNA, 25 bp, Homo sapien
tcacacatgtgaatagccccagcac

SEQ ID NO: 2945981 - DNA, 25 bp, Homo sapien
caatgtaatgggcactagcacttgc

SEQ ID NO: 2945982 - DNA, 25 bp, Homo sapien
ccttagaaggcaaaagtactaatgc

SEQ ID NO: 2945983 - DNA, 25 bp, Homo sapien
tcctttccttatgcaacttgtctga

SEQ ID NO: 2945984 - DNA, 25 bp, Homo sapien
ccaaaactttcttgattcttgcaaa

SEQ ID NO: 2945985 - DNA, 25 bp, Homo sapien
tttctctgttgtagccttcatcctt

SEQ ID NO: 2945986 - DNA, 25 bp, Homo sapien
tctgttgtagccttcatccttctgc

SEQ ID NO: 2945987 - DNA, 25 bp, Homo sapien
tgttgtagccttcatccttctgctt

SEQ ID NO: 2945988 - DNA, 25 bp, Homo sapien
ctctgttgtagccttcatccttctg

SEQ ID NO: 2945989 - DNA, 25 bp, Homo sapien
cagtgcaccaatatgttaggcttac

SEQ ID NO: 2945990 - DNA, 25 bp, Homo sapien
catcagtgcaccaatatgttaggct

SEQ ID NO: 2945991 - DNA, 25 bp, Homo sapien
ttttgtcatcagtgcaccaatatgt

SEQ ID NO: 2945992 - DNA, 25 bp, Homo sapien
tgtcatcagtgcaccaatatgttag

SEQ ID NO: 2945993 - DNA, 25 bp, Homo sapien
cctgagggattgttctcaatgacag

SEQ ID NO: 2945994 - DNA, 25 bp, Homo sapien
taaaataggcaataggctgatgtgc

SEQ ID NO: 2945995 - DNA, 25 bp, Homo sapien
gcaagacttgcatatataagagagc

SEQ ID NO: 2945996 - DNA, 25 bp, Homo sapien
ttgtagattgatgtaaccttaacca

SEQ ID NO: 2945997 - DNA, 25 bp, Homo sapien
agatcccctgagtttcatgttgcca

SEQ ID NO: 2945998 - DNA, 25 bp, Homo sapien
actgcattccgtcctgcctaggcaa

SEQ ID NO: 2945999 - DNA, 25 bp, Homo sapien
caagaaatactcatgtaggctgggc

SEQ ID NO: 2946000 - DNA, 25 bp, Homo sapien
catgccccattagtgacagaactgt

SEQ ID NO: 2946001 - DNA, 25 bp, Homo sapien
tcaaaagtttaaggcagagggatca

SEQ ID NO: 2946002 - DNA, 25 bp, Homo sapien
tcagtacggagatcatcacatttaa

SEQ ID NO: 2946003 - DNA, 25 bp, Homo sapien
tcctagctactcaaaagtttaaggc

SEQ ID NO: 2946004 - DNA, 25 bp, Homo sapien
gaaaagaagttgcagttccagtggc

SEQ ID NO: 2946005 - DNA, 25 bp, Homo sapien
cagtttttaaagccaggttcgtatg

SEQ ID NO: 2946006 - DNA, 25 bp, Homo sapien
catctgtctgtttatttgagtgcat

SEQ ID NO: 2946007 - DNA, 25 bp, Homo sapien
cacttgcactgcttttggaaatagc

SEQ ID NO: 2946008 - DNA, 25 bp, Homo sapien
tttaactgttcttttgacagcccag

SEQ ID NO: 2946009 - DNA, 25 bp, Homo sapien
gtgccaacttggtgttgtaaatagc

SEQ ID NO: 2946010 - DNA, 25 bp, Homo sapien
caacttggtgttgtaaatagcatcc

SEQ ID NO: 2946011 - DNA, 25 bp, Homo sapien
ctgtttgagccgtaagctacttgtg

SEQ ID NO: 2946012 - DNA, 25 bp, Homo sapien
taagctacttgtgccaacttggtgt

SEQ ID NO: 2946013 - DNA, 25 bp, Homo sapien
ttgcaggtcaaggatgcggtgagct

SEQ ID NO: 2946014 - DNA, 25 bp, Homo sapien
agtttagctacatggtttaaccaga

SEQ ID NO: 2946015 - DNA, 25 bp, Homo sapien
tttccaaccaaagaacaggccgcac

SEQ ID NO: 2946016 - DNA, 25 bp, Homo sapien
gccaactgaggtaatctaggtgaaa

SEQ ID NO: 2946017 - DNA, 25 bp, Homo sapien
tgttgtcaaagatcttcccgcttaa

SEQ ID NO: 2946018 - DNA, 25 bp, Homo sapien
catgtgtattggtggtgctgttacc

SEQ ID NO: 2946019 - DNA, 25 bp, Homo sapien
ggcaggctcccgtcatacatgtgta

SEQ ID NO: 2946020 - DNA, 25 bp, Homo sapien
aaatgatcattgttactatggtggc

SEQ ID NO: 2946021 - DNA, 25 bp, Homo sapien
tttcctgtgttttggcaggctcccg

SEQ ID NO: 2946022 - DNA, 25 bp, Homo sapien
ttatatgagaattgctaaacaactt

SEQ ID NO: 2946023 - DNA, 25 bp, Homo sapien
tgggaaatgagacatgaagatgcaa

SEQ ID NO: 2946024 - DNA, 25 bp, Homo sapien
tatttgcttcaaccaaccagatatc

SEQ ID NO: 2946025 - DNA, 25 bp, Homo sapien
gtattatgcttttagtgaacttccg

SEQ ID NO: 2946026 - DNA, 25 bp, Homo sapien
caatttacaaaactggagggtctgg

SEQ ID NO: 2946027 - DNA, 25 bp, Homo sapien
tttgtaatgaaatctgtaggctaga

SEQ ID NO: 2946028 - DNA, 25 bp, Homo sapien
catttcaatttacaaaactggaggg

SEQ ID NO: 2946029 - DNA, 25 bp, Homo sapien
tctgtaggctagacagtatcttgta

SEQ ID NO: 2946030 - DNA, 25 bp, Homo sapien
tctaaaagagttggtgtcccaaatg

SEQ ID NO: 2946031 - DNA, 25 bp, Homo sapien
aaagttcagattactaggcctagat

SEQ ID NO: 2946032 - DNA, 25 bp, Homo sapien
ggctcacaccacaatgtgtggctaa

SEQ ID NO: 2946033 - DNA, 25 bp, Homo sapien
cagcgtggctctttgtttgtaagac

SEQ ID NO: 2946034 - DNA, 25 bp, Homo sapien
ttcctcctctctccctgaacctgtc

SEQ ID NO: 2946035 - DNA, 25 bp, Homo sapien
ctcctctctccctgaacctgtccat

SEQ ID NO: 2946036 - DNA, 25 bp, Homo sapien
cctcctctctccctgaacctgtcca

SEQ ID NO: 2946037 - DNA, 25 bp, Homo sapien
ctttcctcctctctccctgaacctg

SEQ ID NO: 2946038 - DNA, 25 bp, Homo sapien
gactccgaggcgtaattgccccgta

SEQ ID NO: 2946039 - DNA, 25 bp, Homo sapien
gttctttgtgttcggtggcacctca

SEQ ID NO: 2946040 - DNA, 25 bp, Homo sapien
agagactcttaaagggaccaggact

SEQ ID NO: 2946041 - DNA, 25 bp, Homo sapien
tagccaacacaaaggagcccattat

SEQ ID NO: 2946042 - DNA, 25 bp, Homo sapien
caaaatgtgctctcggccaatcaga

SEQ ID NO: 2946043 - DNA, 25 bp, Homo sapien
ttgcaaactttactcgcggccgcag

SEQ ID NO: 2946044 - DNA, 25 bp, Homo sapien
aatcagatttaaacccgaggaccag

SEQ ID NO: 2946045 - DNA, 25 bp, Homo sapien
cgagggctggattggtcgaccacaa

SEQ ID NO: 2946046 - DNA, 25 bp, Homo sapien
ggggcagggcgctgcggggccgcat

SEQ ID NO: 2946047 - DNA, 25 bp, Homo sapien
ctgggccggcccggcggcgggcagc

SEQ ID NO: 2946048 - DNA, 25 bp, Homo sapien
gggccggcccggcggcgggcagcag

SEQ ID NO: 2946049 - DNA, 25 bp, Homo sapien
gcggggcagggcgctgcggggccgc

SEQ ID NO: 2946050 - DNA, 25 bp, Homo sapien
ttgtaggcgatgtccgtgcacagcg

SEQ ID NO: 2946051 - DNA, 25 bp, Homo sapien
taggcctgcgtcctcctggttcgtg

SEQ ID NO: 2946052 - DNA, 25 bp, Homo sapien
aactggtgcacctctaggcctgcgt

SEQ ID NO: 2946053 - DNA, 25 bp, Homo sapien
tggtccgggatggagatgcccttct

SEQ ID NO: 2946054 - DNA, 25 bp, Homo sapien
gcagttcgggcgagcactgcacctt

SEQ ID NO: 2946055 - DNA, 25 bp, Homo sapien
aagaagcgcagttcgggcgagcact

SEQ ID NO: 2946056 - DNA, 25 bp, Homo sapien
gcgctcgggccactgaaaaccgaac

SEQ ID NO: 2946057 - DNA, 25 bp, Homo sapien
cgctcacagatagagcggcacggcg

SEQ ID NO: 2946058 - DNA, 25 bp, Homo sapien
gggtgctccagcgtggcgtagcgcg

SEQ ID NO: 2946059 - DNA, 25 bp, Homo sapien
ggagctccgtcctcggagtggttct

SEQ ID NO: 2946060 - DNA, 25 bp, Homo sapien
cgtcctcggagtggttctggccgac

SEQ ID NO: 2946061 - DNA, 25 bp, Homo sapien
cggtggtgagtagcgcgggagctcc

SEQ ID NO: 2946062 - DNA, 25 bp, Homo sapien
gaaacgcgtctcctcctgtgagaag

SEQ ID NO: 2946063 - DNA, 25 bp, Homo sapien
tagaacttcctccacgagtgcagcg

SEQ ID NO: 2946064 - DNA, 25 bp, Homo sapien
ggaagcgctgcatgtctaccaagta

SEQ ID NO: 2946065 - DNA, 25 bp, Homo sapien
tcatgtagaccgtgaagtcgggcga

SEQ ID NO: 2946066 - DNA, 25 bp, Homo sapien
cggaggaaagcgccgcgcggttccg

SEQ ID NO: 2946067 - DNA, 25 bp, Homo sapien
gcggaggaaagcgccgcgcggttcc

SEQ ID NO: 2946068 - DNA, 25 bp, Homo sapien
ggcggaggaaagcgccgcgcggttc

SEQ ID NO: 2946069 - DNA, 25 bp, Homo sapien
gttgggcagagagttctcttttaaa

SEQ ID NO: 2946070 - DNA, 25 bp, Homo sapien
ggtgttgggcagagagttctctttt

SEQ ID NO: 2946071 - DNA, 25 bp, Homo sapien
gggtgttgggcagagagttctcttt

SEQ ID NO: 2946072 - DNA, 25 bp, Homo sapien
tgttgggcagagagttctcttttaa

SEQ ID NO: 2946073 - DNA, 25 bp, Homo sapien
gaatggaacaaactcctaacgactc

SEQ ID NO: 2946074 - DNA, 25 bp, Homo sapien
tgaagggaggcaggatcagtactcc

SEQ ID NO: 2946075 - DNA, 25 bp, Homo sapien
cactggaagcacttggtgcagcgaa

SEQ ID NO: 2946076 - DNA, 25 bp, Homo sapien
caagtgctcaaaggcgaatgcttcc

SEQ ID NO: 2946077 - DNA, 25 bp, Homo sapien
ctgaacgccagagatttttggctgc

SEQ ID NO: 2946078 - DNA, 25 bp, Homo sapien
tgaacgccagagatttttggctgcg

SEQ ID NO: 2946079 - DNA, 25 bp, Homo sapien
gccagagatttttggctgcgggagt

SEQ ID NO: 2946080 - DNA, 25 bp, Homo sapien
aacgccagagatttttggctgcggg

SEQ ID NO: 2946081 - DNA, 25 bp, Homo sapien
ggcatacttgtattcaaactaatcc

SEQ ID NO: 2946082 - DNA, 25 bp, Homo sapien
ggaaactggagttctcacaccagca

SEQ ID NO: 2946083 - DNA, 25 bp, Homo sapien
cgaaaactgagttatgtggcatact

SEQ ID NO: 2946084 - DNA, 25 bp, Homo sapien
cttaagagaagtcttgacaggccag

SEQ ID NO: 2946085 - DNA, 25 bp, Homo sapien
cattcatccatattccactctgctg

SEQ ID NO: 2946086 - DNA, 25 bp, Homo sapien
cccctttccatagcagaggtgatta

SEQ ID NO: 2946087 - DNA, 25 bp, Homo sapien
tgatcacttgttacctgatcaaggg

SEQ ID NO: 2946088 - DNA, 25 bp, Homo sapien
tgaataatctggttccggggtactc

SEQ ID NO: 2946089 - DNA, 25 bp, Homo sapien
tccttttctcaacgatttctggcac

SEQ ID NO: 2946090 - DNA, 25 bp, Homo sapien
ccttttctcaacgatttctggcaca

SEQ ID NO: 2946091 - DNA, 25 bp, Homo sapien
cttttctcaacgatttctggcacag

SEQ ID NO: 2946092 - DNA, 25 bp, Homo sapien
cccgatcttgggcttaagaggccca

SEQ ID NO: 2946093 - DNA, 25 bp, Homo sapien
cttctctgtgacactcccaggtaaa

SEQ ID NO: 2946094 - DNA, 25 bp, Homo sapien
ttgggcttaagaggcccaggaacat

SEQ ID NO: 2946095 - DNA, 25 bp, Homo sapien
cactcccaggtaaaggagccattcc

SEQ ID NO: 2946096 - DNA, 25 bp, Homo sapien
tagagtgatgtacacaggttgtgtg

SEQ ID NO: 2946097 - DNA, 25 bp, Homo sapien
gtggcccaaggccagctgcggcttc

SEQ ID NO: 2946098 - DNA, 25 bp, Homo sapien
aggagttagagtgatgtacacaggt

SEQ ID NO: 2946099 - DNA, 25 bp, Homo sapien
tgtgtgggccatgtaagtggctggt

SEQ ID NO: 2946100 - DNA, 25 bp, Homo sapien
tggctcattcacacgtaacacgtta

SEQ ID NO: 2946101 - DNA, 25 bp, Homo sapien
gttattcccaacatccacgtgttcc

SEQ ID NO: 2946102 - DNA, 25 bp, Homo sapien
taacacgttattcccaacatccacg

SEQ ID NO: 2946103 - DNA, 25 bp, Homo sapien
tgcgcttgcaggctcaatgcgaact

SEQ ID NO: 2946104 - DNA, 25 bp, Homo sapien
ccaggaagaattctactggaacttg

SEQ ID NO: 2946105 - DNA, 25 bp, Homo sapien
agactgttagatgcacagggtgatg

SEQ ID NO: 2946106 - DNA, 25 bp, Homo sapien
ctgggggctaagactgttagatgca

SEQ ID NO: 2946107 - DNA, 25 bp, Homo sapien
agaattctactggaacttgggaaag

SEQ ID NO: 2946108 - DNA, 25 bp, Homo sapien
cagcgccgtgtgatagacagctgtg

SEQ ID NO: 2946109 - DNA, 25 bp, Homo sapien
acagagctgaggtccccttgtactt

SEQ ID NO: 2946110 - DNA, 25 bp, Homo sapien
aggcccagcgccgtgtgatagacag

SEQ ID NO: 2946111 - DNA, 25 bp, Homo sapien
gggatgctctggtacatctggtaca

SEQ ID NO: 2946112 - DNA, 25 bp, Homo sapien
ggattcgatccccagccagttgctg

SEQ ID NO: 2946113 - DNA, 25 bp, Homo sapien
aagctgaattgggattcgatcccca

SEQ ID NO: 2946114 - DNA, 25 bp, Homo sapien
cagttgctggagttccggagcagct

SEQ ID NO: 2946115 - DNA, 25 bp, Homo sapien
cccagccagttgctggagttccgga

SEQ ID NO: 2946116 - DNA, 25 bp, Homo sapien
agcccttggtgtccacagcaggcgt

SEQ ID NO: 2946117 - DNA, 25 bp, Homo sapien
tcagcccttggtgtccacagcaggc

SEQ ID NO: 2946118 - DNA, 25 bp, Homo sapien
cccttggtgtccacagcaggcgtaa

SEQ ID NO: 2946119 - DNA, 25 bp, Homo sapien
gcccttggtgtccacagcaggcgta

SEQ ID NO: 2946120 - DNA, 25 bp, Homo sapien
ccctttaagggctgaatcctcagcg

SEQ ID NO: 2946121 - DNA, 25 bp, Homo sapien
cctttaagggctgaatcctcagcgt

SEQ ID NO: 2946122 - DNA, 25 bp, Homo sapien
tcggaaatggctcggatataattaa

SEQ ID NO: 2946123 - DNA, 25 bp, Homo sapien
tgggcttgtgccaatcggaaatggc

SEQ ID NO: 2946124 - DNA, 25 bp, Homo sapien
tgtgccaatcggaaatggctcggat

SEQ ID NO: 2946125 - DNA, 25 bp, Homo sapien
ggatataattaacccaactaatcac

SEQ ID NO: 2946126 - DNA, 25 bp, Homo sapien
accacaatcagcagcacgaccgcgg

SEQ ID NO: 2946127 - DNA, 25 bp, Homo sapien
cacaatcagcagcacgaccgcggcc

SEQ ID NO: 2946128 - DNA, 25 bp, Homo sapien
aacaccacaatcagcagcacgaccg

SEQ ID NO: 2946129 - DNA, 25 bp, Homo sapien
caatcagcagcacgaccgcggccag

SEQ ID NO: 2946130 - DNA, 25 bp, Homo sapien
cggagaggccggtcgtggaaggttg

SEQ ID NO: 2946131 - DNA, 25 bp, Homo sapien
gttgaaagagctaaagagcgcagcc

SEQ ID NO: 2946132 - DNA, 25 bp, Homo sapien
tggaaggttgaaagagctaaagagc

SEQ ID NO: 2946133 - DNA, 25 bp, Homo sapien
gaaggttgaaagagctaaagagcgc

SEQ ID NO: 2946134 - DNA, 25 bp, Homo sapien
gcttctgagcttttcccgctcaaag

SEQ ID NO: 2946135 - DNA, 25 bp, Homo sapien
cttttcccgctcaaagtaaatgtgt

SEQ ID NO: 2946136 - DNA, 25 bp, Homo sapien
aatgtgttcgggattggcccggact

SEQ ID NO: 2946137 - DNA, 25 bp, Homo sapien
gggcggttagcggaccacgctctct

SEQ ID NO: 2946138 - DNA, 25 bp, Homo sapien
ccgccccgctgtgaggcccgcccct

SEQ ID NO: 2946139 - DNA, 25 bp, Homo sapien
gccccgctgtgaggcccgcccctcc

SEQ ID NO: 2946140 - DNA, 25 bp, Homo sapien
cgacacggcacaggcgcgccccgcc

SEQ ID NO: 2946141 - DNA, 25 bp, Homo sapien
tggggctcgcggctcggcacgcgac

SEQ ID NO: 2946142 - DNA, 25 bp, Homo sapien
gaaatatcagaaagtggtcacgagg

SEQ ID NO: 2946143 - DNA, 25 bp, Homo sapien
ccctctcagaggacacgaatgtggg

SEQ ID NO: 2946144 - DNA, 25 bp, Homo sapien
tgcagcacacgggaataggaaatat

SEQ ID NO: 2946145 - DNA, 25 bp, Homo sapien
gttctacctcggctgttcggctcaa

SEQ ID NO: 2946146 - DNA, 25 bp, Homo sapien
tcaacatcacgctgccgaagacgtc

SEQ ID NO: 2946147 - DNA, 25 bp, Homo sapien
aagacgtcggttaacctgctgccgg

SEQ ID NO: 2946148 - DNA, 25 bp, Homo sapien
aggaagcggagccagtcaacatcac

SEQ ID NO: 2946149 - DNA, 25 bp, Homo sapien
cggcgccgaggttccaacagcgatt

SEQ ID NO: 2946150 - DNA, 25 bp, Homo sapien
gttctttatactgatctgagaatta

SEQ ID NO: 2946151 - DNA, 25 bp, Homo sapien
tgaagaaaatggagtataggtctgc

SEQ ID NO: 2946152 - DNA, 25 bp, Homo sapien
tctccataagtagaccatggtgcac

SEQ ID NO: 2946153 - DNA, 25 bp, Homo sapien
gccttaggtctacattgtcttcact

SEQ ID NO: 2946154 - DNA, 25 bp, Homo sapien
gactgaatctacaccatcatttcaa

SEQ ID NO: 2946155 - DNA, 25 bp, Homo sapien
attactctttccagacttatcctac

SEQ ID NO: 2946156 - DNA, 25 bp, Homo sapien
aaatacaatatattgattactcttt

SEQ ID NO: 2946157 - DNA, 25 bp, Homo sapien
tgattactctttccagacttatcct

SEQ ID NO: 2946158 - DNA, 25 bp, Homo sapien
gaaatacaatatattgattactctt

SEQ ID NO: 2946159 - DNA, 25 bp, Homo sapien
ttcagcaaaatatggctgtgactta

SEQ ID NO: 2946160 - DNA, 25 bp, Homo sapien
gcaaaatatggctgtgacttatctt

SEQ ID NO: 2946161 - DNA, 25 bp, Homo sapien
tcttccaaaatgttagacacaagtc

SEQ ID NO: 2946162 - DNA, 25 bp, Homo sapien
ccaaaatgttagacacaagtccata

SEQ ID NO: 2946163 - DNA, 25 bp, Homo sapien
tagcaaaatcattagcgggacaagc

SEQ ID NO: 2946164 - DNA, 25 bp, Homo sapien
tttgctgtagtggtgcttcaagacc

SEQ ID NO: 2946165 - DNA, 25 bp, Homo sapien
gatgttaagccaaaatcagcagtga

SEQ ID NO: 2946166 - DNA, 25 bp, Homo sapien
caaactgactttaaattggaggagc

SEQ ID NO: 2946167 - DNA, 25 bp, Homo sapien
tttcgataaggaataggagtgttat

SEQ ID NO: 2946168 - DNA, 25 bp, Homo sapien
tcgataaggaataggagtgttattt

SEQ ID NO: 2946169 - DNA, 25 bp, Homo sapien
ttttgtttgaacattcatccaagtt

SEQ ID NO: 2946170 - DNA, 25 bp, Homo sapien
tgtttgaacattcatccaagttggt

SEQ ID NO: 2946171 - DNA, 25 bp, Homo sapien
ggttagaaccttttgaagctgcact

SEQ ID NO: 2946172 - DNA, 25 bp, Homo sapien
tcttctccaggctttgttagtcctt

SEQ ID NO: 2946173 - DNA, 25 bp, Homo sapien
tctgcaccactgtaactaaaatcaa

SEQ ID NO: 2946174 - DNA, 25 bp, Homo sapien
tatccgtaaccaatttgaagagatt

SEQ ID NO: 2946175 - DNA, 25 bp, Homo sapien
taaatgctttggaccttcctcagga

SEQ ID NO: 2946176 - DNA, 25 bp, Homo sapien
tcaggatcataatgtccactctggg

SEQ ID NO: 2946177 - DNA, 25 bp, Homo sapien
gattcacacggctattgtctccacc

SEQ ID NO: 2946178 - DNA, 25 bp, Homo sapien
tagaatgaccctgtgactccagtag

SEQ ID NO: 2946179 - DNA, 25 bp, Homo sapien
taagtcataggaatccaacagtgga

SEQ ID NO: 2946180 - DNA, 25 bp, Homo sapien
cataagaaagtaagtcataggaatc

SEQ ID NO: 2946181 - DNA, 25 bp, Homo sapien
gaaagtaagtcataggaatccaaca

SEQ ID NO: 2946182 - DNA, 25 bp, Homo sapien
gtcatcataagaaagtaagtcatag

SEQ ID NO: 2946183 - DNA, 25 bp, Homo sapien
tcttctagacgaatatgaagttcac

SEQ ID NO: 2946184 - DNA, 25 bp, Homo sapien
ttctaatgctctccattgttcacag

SEQ ID NO: 2946185 - DNA, 25 bp, Homo sapien
cagcactcttctagacgaatatgaa

SEQ ID NO: 2946186 - DNA, 25 bp, Homo sapien
aatatgaagttcactggctggtcca

SEQ ID NO: 2946187 - DNA, 25 bp, Homo sapien
ctctagatgggttggaagtcagcct

SEQ ID NO: 2946188 - DNA, 25 bp, Homo sapien
ggctagttctcgaagttcatccaca

SEQ ID NO: 2946189 - DNA, 25 bp, Homo sapien
catccacaattaagcgatcaactct

SEQ ID NO: 2946190 - DNA, 25 bp, Homo sapien
tccaggataattcttggcaagggct

SEQ ID NO: 2946191 - DNA, 25 bp, Homo sapien
taccatcttatgtaagcacagcttg

SEQ ID NO: 2946192 - DNA, 25 bp, Homo sapien
cctgagtagcataagcatgtgacac

SEQ ID NO: 2946193 - DNA, 25 bp, Homo sapien
ggattagctccactgccaatttgag

SEQ ID NO: 2946194 - DNA, 25 bp, Homo sapien
aattagatatgtgtggtagcgtgca

SEQ ID NO: 2946195 - DNA, 25 bp, Homo sapien
gaagacgttccattttgcctagtaa

SEQ ID NO: 2946196 - DNA, 25 bp, Homo sapien
gactccaagtgtctatcaagagcag

SEQ ID NO: 2946197 - DNA, 25 bp, Homo sapien
gaactccttgcctttgccgattgga

SEQ ID NO: 2946198 - DNA, 25 bp, Homo sapien
catcttggcatctaggaactccttg

SEQ ID NO: 2946199 - DNA, 25 bp, Homo sapien
cttatcacaagaatatgcattaata

SEQ ID NO: 2946200 - DNA, 25 bp, Homo sapien
tcacactgacttatcacaagaatat

SEQ ID NO: 2946201 - DNA, 25 bp, Homo sapien
acactgacttatcacaagaatatgc

SEQ ID NO: 2946202 - DNA, 25 bp, Homo sapien
caagaatatgcattaatatttgtac

SEQ ID NO: 2946203 - DNA, 25 bp, Homo sapien
aaggtcatctgcagtgcacaccaca

SEQ ID NO: 2946204 - DNA, 25 bp, Homo sapien
cacaccacagggcagtgcgtgtttt

SEQ ID NO: 2946205 - DNA, 25 bp, Homo sapien
ctgtttttggcaaggtcatctgcag

SEQ ID NO: 2946206 - DNA, 25 bp, Homo sapien
gttttccgagtagccacacacatct

SEQ ID NO: 2946207 - DNA, 25 bp, Homo sapien
ctctctggttcattggattgctact

SEQ ID NO: 2946208 - DNA, 25 bp, Homo sapien
ttcacagtttactgtatcttgtaaa

SEQ ID NO: 2946209 - DNA, 25 bp, Homo sapien
ttactgtatcttgtaaaggctttac

SEQ ID NO: 2946210 - DNA, 25 bp, Homo sapien
ggttcattggattgctactatttat

SEQ ID NO: 2946211 - DNA, 25 bp, Homo sapien
gttagacttcattaaggtactggta

SEQ ID NO: 2946212 - DNA, 25 bp, Homo sapien
gaactctgagtagtcaactgtacct

SEQ ID NO: 2946213 - DNA, 25 bp, Homo sapien
ttatctgactactcagaactctgag

SEQ ID NO: 2946214 - DNA, 25 bp, Homo sapien
aaaactatatcggattcacttcaaa

SEQ ID NO: 2946215 - DNA, 25 bp, Homo sapien
caaaacttgtcttggttactaggct

SEQ ID NO: 2946216 - DNA, 25 bp, Homo sapien
tgtgcatcaagtctaaaagatccag

SEQ ID NO: 2946217 - DNA, 25 bp, Homo sapien
taggctgtagccgtaattgggttac

SEQ ID NO: 2946218 - DNA, 25 bp, Homo sapien
ttcgtgacaccctcataaaaggcag

SEQ ID NO: 2946219 - DNA, 25 bp, Homo sapien
cctgaagggtacttgtttcaatttg

SEQ ID NO: 2946220 - DNA, 25 bp, Homo sapien
ctgggactctgctatgtatgtcaca

SEQ ID NO: 2946221 - DNA, 25 bp, Homo sapien
gagtcaggttatatccacggtcccc

SEQ ID NO: 2946222 - DNA, 25 bp, Homo sapien
ttgttagtagtcagttctttcttct

SEQ ID NO: 2946223 - DNA, 25 bp, Homo sapien
aacactggaaatttctgctaacacc

SEQ ID NO: 2946224 - DNA, 25 bp, Homo sapien
cactattgggtgcaaggatatcatt

SEQ ID NO: 2946225 - DNA, 25 bp, Homo sapien
catgtatcctcttgtgtgctggtag

SEQ ID NO: 2946226 - DNA, 25 bp, Homo sapien
aaagtgagcagaagctctccatttc

SEQ ID NO: 2946227 - DNA, 25 bp, Homo sapien
cttgcggggtgttctagatctgatt

SEQ ID NO: 2946228 - DNA, 25 bp, Homo sapien
attacttgcggggtgttctagatct

SEQ ID NO: 2946229 - DNA, 25 bp, Homo sapien
tggcagcaaaactaggaaaatggga

SEQ ID NO: 2946230 - DNA, 25 bp, Homo sapien
gcagcaaaactaggaaaatgggaag

SEQ ID NO: 2946231 - DNA, 25 bp, Homo sapien
ttctgttccgaaacaccaatgtgga

SEQ ID NO: 2946232 - DNA, 25 bp, Homo sapien
ctcacttcgggatgaatcccaaagg

SEQ ID NO: 2946233 - DNA, 25 bp, Homo sapien
tggaagatgtccttaatgcccgaaa

SEQ ID NO: 2946234 - DNA, 25 bp, Homo sapien
aactggagcgagactcacttcggga

SEQ ID NO: 2946235 - DNA, 25 bp, Homo sapien
gagaagcaggcacaaatcgtagtaa

SEQ ID NO: 2946236 - DNA, 25 bp, Homo sapien
taaagccaaggatggtgtcagaaga

SEQ ID NO: 2946237 - DNA, 25 bp, Homo sapien
caatgtcttcagtacaagtgctgcc

SEQ ID NO: 2946238 - DNA, 25 bp, Homo sapien
aagatggatacaaagcttggcctgc

SEQ ID NO: 2946239 - DNA, 25 bp, Homo sapien
ctgggaagtttctaaacactccatg

SEQ ID NO: 2946240 - DNA, 25 bp, Homo sapien
taaacactccatgaagctgttgaaa

SEQ ID NO: 2946241 - DNA, 25 bp, Homo sapien
aactttgagacttcttggtaccagc

SEQ ID NO: 2946242 - DNA, 25 bp, Homo sapien
tcttgatcagtccatcattatttgg

SEQ ID NO: 2946243 - DNA, 25 bp, Homo sapien
tataacactagtgcagctgtcccag

SEQ ID NO: 2946244 - DNA, 25 bp, Homo sapien
tcttctggcaagattggcttataaa

SEQ ID NO: 2946245 - DNA, 25 bp, Homo sapien
ggaaaactttaacacagcctgtgag

SEQ ID NO: 2946246 - DNA, 25 bp, Homo sapien
ggcagtaacccatttgagttccaga

SEQ ID NO: 2946247 - DNA, 25 bp, Homo sapien
tactcagaagtctgaagtgggagga

SEQ ID NO: 2946248 - DNA, 25 bp, Homo sapien
ttgagcctaggaggctgtggctgca

SEQ ID NO: 2946249 - DNA, 25 bp, Homo sapien
cagctactcagaagtctgaagtggg

SEQ ID NO: 2946250 - DNA, 25 bp, Homo sapien
tcacttgagcctaggaggctgtggc

SEQ ID NO: 2946251 - DNA, 25 bp, Homo sapien
tattacaaggcagttcccagggctg

SEQ ID NO: 2946252 - DNA, 25 bp, Homo sapien
tctccgatgcttgtgagtgagccga

SEQ ID NO: 2946253 - DNA, 25 bp, Homo sapien
tactcctctgatatctgggcggcgg

SEQ ID NO: 2946254 - DNA, 25 bp, Homo sapien
tgtcccatgacagaagcctgcagga

SEQ ID NO: 2946255 - DNA, 25 bp, Homo sapien
catcttgtgagatcacgcgaccgca

SEQ ID NO: 2946256 - DNA, 25 bp, Homo sapien
gaaagcacaaaactctcaagccggc

SEQ ID NO: 2946257 - DNA, 25 bp, Homo sapien
gaccgagccgtttatggagcctaca

SEQ ID NO: 2946258 - DNA, 25 bp, Homo sapien
cagtcctgggtagttattagccgcg

SEQ ID NO: 2946259 - DNA, 25 bp, Homo sapien
tcttggcgttttcggccgcggcttc

SEQ ID NO: 2946260 - DNA, 25 bp, Homo sapien
tctcttggcgttttcggccgcggct

SEQ ID NO: 2946261 - DNA, 25 bp, Homo sapien
cacccctaaaagaacgccgtagctg

SEQ ID NO: 2946262 - DNA, 25 bp, Homo sapien
aagaacgccgtagctgcgagatccg

SEQ ID NO: 2946263 - DNA, 25 bp, Homo sapien
tcctggttatctcagggcagctaca

SEQ ID NO: 2946264 - DNA, 25 bp, Homo sapien
ccacagtcctggttatctcagggca

SEQ ID NO: 2946265 - DNA, 25 bp, Homo sapien
tcctcagaggcctccgtattacatt

SEQ ID NO: 2946266 - DNA, 25 bp, Homo sapien
gagctccatgagctcttcccgattc

SEQ ID NO: 2946267 - DNA, 25 bp, Homo sapien
gactccgcacctcgcctcagctatt

SEQ ID NO: 2946268 - DNA, 25 bp, Homo sapien
ccgctggtcacttcctaagccccct

SEQ ID NO: 2946269 - DNA, 25 bp, Homo sapien
ctcagctattaacgaccccttccgc

SEQ ID NO: 2946270 - DNA, 25 bp, Homo sapien
gcacctcgcctcagctattaacgac

SEQ ID NO: 2946271 - DNA, 25 bp, Homo sapien
tcagccatggaactctccagctcga

SEQ ID NO: 2946272 - DNA, 25 bp, Homo sapien
ccggagcctactctcagccatggaa

SEQ ID NO: 2946273 - DNA, 25 bp, Homo sapien
catggaactctccagctcgaggcaa

SEQ ID NO: 2946274 - DNA, 25 bp, Homo sapien
actctccagctcgaggcaatcgtct

SEQ ID NO: 2946275 - DNA, 25 bp, Homo sapien
tgaatggcccccgtcaaaaactgga

SEQ ID NO: 2946276 - DNA, 25 bp, Homo sapien
ctggcattttcctagacacctggaa

SEQ ID NO: 2946277 - DNA, 25 bp, Homo sapien
aactggagattcttgccagcaggca

SEQ ID NO: 2946278 - DNA, 25 bp, Homo sapien
gcattttcctagacacctggaaact

SEQ ID NO: 2946279 - DNA, 25 bp, Homo sapien
agatataatccccatccaactcctg

SEQ ID NO: 2946280 - DNA, 25 bp, Homo sapien
aaccatagatataatccccatccaa

SEQ ID NO: 2946281 - DNA, 25 bp, Homo sapien
catagatataatccccatccaactc

SEQ ID NO: 2946282 - DNA, 25 bp, Homo sapien
ccatagatataatccccatccaact

SEQ ID NO: 2946283 - DNA, 25 bp, Homo sapien
ttctgggtttgacagcaaagagcct

SEQ ID NO: 2946284 - DNA, 25 bp, Homo sapien
cactgagtttctgcagtcctgagtt

SEQ ID NO: 2946285 - DNA, 25 bp, Homo sapien
gtttctgggtttgacagcaaagagc

SEQ ID NO: 2946286 - DNA, 25 bp, Homo sapien
gagtttctgggtttgacagcaaaga

SEQ ID NO: 2946287 - DNA, 25 bp, Homo sapien
ctttgctcagaaaaccctcaattac

SEQ ID NO: 2946288 - DNA, 25 bp, Homo sapien
ctggacacgatgtaacttacttctt

SEQ ID NO: 2946289 - DNA, 25 bp, Homo sapien
tggacacgatgtaacttacttcttt

SEQ ID NO: 2946290 - DNA, 25 bp, Homo sapien
tacttctttgctcagaaaaccctca

SEQ ID NO: 2946291 - DNA, 25 bp, Homo sapien
ggctgccttttggatcaaccatggc

SEQ ID NO: 2946292 - DNA, 25 bp, Homo sapien
ctagggctagggcagcctctatggc

SEQ ID NO: 2946293 - DNA, 25 bp, Homo sapien
gctagggcagcctctatggcttttc

SEQ ID NO: 2946294 - DNA, 25 bp, Homo sapien
gatgtttccactctgacctcactgg

SEQ ID NO: 2946295 - DNA, 25 bp, Homo sapien
agctccttccctctgcttagaggca

SEQ ID NO: 2946296 - DNA, 25 bp, Homo sapien
gtttctgatagccttctgcagcagc

SEQ ID NO: 2946297 - DNA, 25 bp, Homo sapien
gctccttccctctgcttagaggcac

SEQ ID NO: 2946298 - DNA, 25 bp, Homo sapien
ctggtttctgatagccttctgcagc

SEQ ID NO: 2946299 - DNA, 25 bp, Homo sapien
agaccaccggctctgtcccatcttg

SEQ ID NO: 2946300 - DNA, 25 bp, Homo sapien
gaccaccggctctgtcccatcttgc

SEQ ID NO: 2946301 - DNA, 25 bp, Homo sapien
ggagaccaccggctctgtcccatct

SEQ ID NO: 2946302 - DNA, 25 bp, Homo sapien
gctggagaccaccggctctgtccca

SEQ ID NO: 2946303 - DNA, 25 bp, Homo sapien
aacagccctggattttcacacaagg

SEQ ID NO: 2946304 - DNA, 25 bp, Homo sapien
tatacattgtgctctggccacctcg

SEQ ID NO: 2946305 - DNA, 25 bp, Homo sapien
ggaccactggtctgcctatacattg

SEQ ID NO: 2946306 - DNA, 25 bp, Homo sapien
cacagttctcttggtaggctccaga

SEQ ID NO: 2946307 - DNA, 25 bp, Homo sapien
tccccaagagcgggcattggtcagg

SEQ ID NO: 2946308 - DNA, 25 bp, Homo sapien
catccacgtgcagaatcctcactcc

SEQ ID NO: 2946309 - DNA, 25 bp, Homo sapien
atccacgtgcagaatcctcactccc

SEQ ID NO: 2946310 - DNA, 25 bp, Homo sapien
tccacgtgcagaatcctcactcccc

SEQ ID NO: 2946311 - DNA, 25 bp, Homo sapien
ccatgatccttctaaaagctgacac

SEQ ID NO: 2946312 - DNA, 25 bp, Homo sapien
gaccatgatccttctaaaagctgac

SEQ ID NO: 2946313 - DNA, 25 bp, Homo sapien
catgatccttctaaaagctgacact

SEQ ID NO: 2946314 - DNA, 25 bp, Homo sapien
atgaccatgatccttctaaaagctg

SEQ ID NO: 2946315 - DNA, 25 bp, Homo sapien
gatcaacatggcagctgagtatttc

SEQ ID NO: 2946316 - DNA, 25 bp, Homo sapien
ctttgtggatcaacatggcagctga

SEQ ID NO: 2946317 - DNA, 25 bp, Homo sapien
gcagctgagtatttctggcttccgg

SEQ ID NO: 2946318 - DNA, 25 bp, Homo sapien
tctggcttccggtgaccagaagctc

SEQ ID NO: 2946319 - DNA, 25 bp, Homo sapien
ccaggctcggctaatgcttctattt

SEQ ID NO: 2946320 - DNA, 25 bp, Homo sapien
gtagcaggtgacatgaaacggcatg

SEQ ID NO: 2946321 - DNA, 25 bp, Homo sapien
cctggccagtggtcatgaatattaa

SEQ ID NO: 2946322 - DNA, 25 bp, Homo sapien
catgttctagggacctcctgcggga

SEQ ID NO: 2946323 - DNA, 25 bp, Homo sapien
actattctagtgtaaacaggctgca

SEQ ID NO: 2946324 - DNA, 25 bp, Homo sapien
gagctgggtatgaaaccactcactg

SEQ ID NO: 2946325 - DNA, 25 bp, Homo sapien
ggtgggccacactacacactctggt

SEQ ID NO: 2946326 - DNA, 25 bp, Homo sapien
catctggaccaatcctctaaaatgg

SEQ ID NO: 2946327 - DNA, 25 bp, Homo sapien
gactgggtcctctatccctggaaca

SEQ ID NO: 2946328 - DNA, 25 bp, Homo sapien
taaggactttaaggcaccactgaag

SEQ ID NO: 2946329 - DNA, 25 bp, Homo sapien
gaactactcagctgtaccctcaggt

SEQ ID NO: 2946330 - DNA, 25 bp, Homo sapien
tgggctgcaggactaaactcgctgg

SEQ ID NO: 2946331 - DNA, 25 bp, Homo sapien
gacagctgttgcacgtgcatcatca

SEQ ID NO: 2946332 - DNA, 25 bp, Homo sapien
caagagacagctgttgcacgtgcat

SEQ ID NO: 2946333 - DNA, 25 bp, Homo sapien
ttcacacataaagacgcaagagaca

SEQ ID NO: 2946334 - DNA, 25 bp, Homo sapien
taaagacgcaagagacagctgttgc

SEQ ID NO: 2946335 - DNA, 25 bp, Homo sapien
ccttcagttcagcaggatgacctac

SEQ ID NO: 2946336 - DNA, 25 bp, Homo sapien
gtccttcagttcagcaggatgacct

SEQ ID NO: 2946337 - DNA, 25 bp, Homo sapien
tccttcagttcagcaggatgaccta

SEQ ID NO: 2946338 - DNA, 25 bp, Homo sapien
cgtgttcttgactctgctgctggac

SEQ ID NO: 2946339 - DNA, 25 bp, Homo sapien
ttgactctgctgctggacatgttcc

SEQ ID NO: 2946340 - DNA, 25 bp, Homo sapien
ctttccgtgttcttgactctgctgc

SEQ ID NO: 2946341 - DNA, 25 bp, Homo sapien
ttccgtgttcttgactctgctgctg

SEQ ID NO: 2946342 - DNA, 25 bp, Homo sapien
ttcatcttcgattttgaggaacggg

SEQ ID NO: 2946343 - DNA, 25 bp, Homo sapien
gctttcatcttcgattttgaggaac

SEQ ID NO: 2946344 - DNA, 25 bp, Homo sapien
ctgctttcatcttcgattttgagga

SEQ ID NO: 2946345 - DNA, 25 bp, Homo sapien
tttcatcttcgattttgaggaacgg

SEQ ID NO: 2946346 - DNA, 25 bp, Homo sapien
gcaacagagaaaacttccactttga

SEQ ID NO: 2946347 - DNA, 25 bp, Homo sapien
ctgcaacagagaaaacttccacttt

SEQ ID NO: 2946348 - DNA, 25 bp, Homo sapien
tgcaacagagaaaacttccactttg

SEQ ID NO: 2946349 - DNA, 25 bp, Homo sapien
gaaaggatttaaactgatgatggaa

SEQ ID NO: 2946350 - DNA, 25 bp, Homo sapien
ctggtatggtgcatgctgcccaggg

SEQ ID NO: 2946351 - DNA, 25 bp, Homo sapien
tggtatggtgcatgctgcccagggt

SEQ ID NO: 2946352 - DNA, 25 bp, Homo sapien
taaaccctgccgagtgaggtaactg

SEQ ID NO: 2946353 - DNA, 25 bp, Homo sapien
cagggtaagagtgctgtatctcagc

SEQ ID NO: 2946354 - DNA, 25 bp, Homo sapien
tagatatgagtttgagaaagcggtc

SEQ ID NO: 2946355 - DNA, 25 bp, Homo sapien
gtctggttgcaatggtccatgctct

SEQ ID NO: 2946356 - DNA, 25 bp, Homo sapien
tctggctgtccagcaaactcgacaa

SEQ ID NO: 2946357 - DNA, 25 bp, Homo sapien
gaatatcagccccatatttctaaca

SEQ ID NO: 2946358 - DNA, 25 bp, Homo sapien
gcaaactcgacaagtccaaaacact

SEQ ID NO: 2946359 - DNA, 25 bp, Homo sapien
cggccaagcctgaattcttatctga

SEQ ID NO: 2946360 - DNA, 25 bp, Homo sapien
catggtgtgggcagctgatcgtggg

SEQ ID NO: 2946361 - DNA, 25 bp, Homo sapien
gcctcctgacagcactcgcagtagc

SEQ ID NO: 2946362 - DNA, 25 bp, Homo sapien
gtgggcagctgatcgtgggcttggc

SEQ ID NO: 2946363 - DNA, 25 bp, Homo sapien
cctgacagcactcgcagtagccttt

SEQ ID NO: 2946364 - DNA, 25 bp, Homo sapien
gggacacggaagctgacctcccagc

SEQ ID NO: 2946365 - DNA, 25 bp, Homo sapien
gccatagcagcatagagatcgcata

SEQ ID NO: 2946366 - DNA, 25 bp, Homo sapien
gccctggaggacagccatagcagca

SEQ ID NO: 2946367 - DNA, 25 bp, Homo sapien
cataggaaggactcatccccagtga

SEQ ID NO: 2946368 - DNA, 25 bp, Homo sapien
ggcaaagctccggtgctgggcactc

SEQ ID NO: 2946369 - DNA, 25 bp, Homo sapien
ttccagggcaaagctccggtgctgg

SEQ ID NO: 2946370 - DNA, 25 bp, Homo sapien
aaagctccggtgctgggcactctga

SEQ ID NO: 2946371 - DNA, 25 bp, Homo sapien
tgggcttccagggcaaagctccggt

SEQ ID NO: 2946372 - DNA, 25 bp, Homo sapien
agacacagttgtgcctgccagcgtg

SEQ ID NO: 2946373 - DNA, 25 bp, Homo sapien
acacagttgtgcctgccagcgtggc

SEQ ID NO: 2946374 - DNA, 25 bp, Homo sapien
gttgtgcctgccagcgtggcactca

SEQ ID NO: 2946375 - DNA, 25 bp, Homo sapien
acagttgtgcctgccagcgtggcac

SEQ ID NO: 2946376 - DNA, 25 bp, Homo sapien
tcacaatcagaagctggggaacctg

SEQ ID NO: 2946377 - DNA, 25 bp, Homo sapien
agagagggtcacaatcagaagctgg

SEQ ID NO: 2946378 - DNA, 25 bp, Homo sapien
ctcaggacagagagggtcacaatca

SEQ ID NO: 2946379 - DNA, 25 bp, Homo sapien
gacagagagggtcacaatcagaagc

SEQ ID NO: 2946380 - DNA, 25 bp, Homo sapien
ctttccttatcctgggagatgctgc

SEQ ID NO: 2946381 - DNA, 25 bp, Homo sapien
ttctttccttatcctgggagatgct

SEQ ID NO: 2946382 - DNA, 25 bp, Homo sapien
tttccttatcctgggagatgctgcc

SEQ ID NO: 2946383 - DNA, 25 bp, Homo sapien
gtcttctttccttatcctgggagat

SEQ ID NO: 2946384 - DNA, 25 bp, Homo sapien
cctgcacgttcagctggtgcctgcg

SEQ ID NO: 2946385 - DNA, 25 bp, Homo sapien
cagtccctgcacgttcagctggtgc

SEQ ID NO: 2946386 - DNA, 25 bp, Homo sapien
cacgttcagctggtgcctgcgtgct

SEQ ID NO: 2946387 - DNA, 25 bp, Homo sapien
ttcagctggtgcctgcgtgctgtcc

SEQ ID NO: 2946388 - DNA, 25 bp, Homo sapien
ccctggggggtccacaaacacatca

SEQ ID NO: 2946389 - DNA, 25 bp, Homo sapien
tccgcttgtggccaaaaagtgccag

SEQ ID NO: 2946390 - DNA, 25 bp, Homo sapien
cataaaaccagagctaggcaggagg

SEQ ID NO: 2946391 - DNA, 25 bp, Homo sapien
cagggctcctggacactggtatccc

SEQ ID NO: 2946392 - DNA, 25 bp, Homo sapien
ctcttcttagcactgccactgggga

SEQ ID NO: 2946393 - DNA, 25 bp, Homo sapien
tcttagcactgccactggggaactg

SEQ ID NO: 2946394 - DNA, 25 bp, Homo sapien
tagcactgccactggggaactgaac

SEQ ID NO: 2946395 - DNA, 25 bp, Homo sapien
tctcttcttagcactgccactgggg

SEQ ID NO: 2946396 - DNA, 25 bp, Homo sapien
gggctattgggacaaaaaatgaagc

SEQ ID NO: 2946397 - DNA, 25 bp, Homo sapien
gacgcttgccactagttgtcctggt

SEQ ID NO: 2946398 - DNA, 25 bp, Homo sapien
gctattgggacaaaaaatgaagcct

SEQ ID NO: 2946399 - DNA, 25 bp, Homo sapien
aagagagggaagacgcttgccacta

SEQ ID NO: 2946400 - DNA, 25 bp, Homo sapien
cagaggcatcgggaacagctggctc

SEQ ID NO: 2946401 - DNA, 25 bp, Homo sapien
gaggtagacctgctctctacaggtg

SEQ ID NO: 2946402 - DNA, 25 bp, Homo sapien
cctcctgggatacagggccagtggc

SEQ ID NO: 2946403 - DNA, 25 bp, Homo sapien
tgcacactggtagctgagtacaggg

SEQ ID NO: 2946404 - DNA, 25 bp, Homo sapien
gagccaagcaccttggggactcgta

SEQ ID NO: 2946405 - DNA, 25 bp, Homo sapien
ctgtgaagagccaagcaccttgggg

SEQ ID NO: 2946406 - DNA, 25 bp, Homo sapien
tgaagagccaagcaccttggggact

SEQ ID NO: 2946407 - DNA, 25 bp, Homo sapien
tggggactcgtaggagcagctctct

SEQ ID NO: 2946408 - DNA, 25 bp, Homo sapien
gctctgtgagtggtgcagcccaagc

SEQ ID NO: 2946409 - DNA, 25 bp, Homo sapien
gattctctcccaaagacctggccag

SEQ ID NO: 2946410 - DNA, 25 bp, Homo sapien
cacatgctcgtgagaaaggaggccg

SEQ ID NO: 2946411 - DNA, 25 bp, Homo sapien
aagcccactgtagactctgcctggt

SEQ ID NO: 2946412 - DNA, 25 bp, Homo sapien
gtcccagagggggctctggccacat

SEQ ID NO: 2946413 - DNA, 25 bp, Homo sapien
agaaggggcgagaggggtcccagag

SEQ ID NO: 2946414 - DNA, 25 bp, Homo sapien
cagagaaggggcgagaggggtccca

SEQ ID NO: 2946415 - DNA, 25 bp, Homo sapien
ctgaggaggcagagaaggggcgaga

SEQ ID NO: 2946416 - DNA, 25 bp, Homo sapien
gagaatcgatagcaaacccatttct

SEQ ID NO: 2946417 - DNA, 25 bp, Homo sapien
aacagccgaacttcgggcaggcagc

SEQ ID NO: 2946418 - DNA, 25 bp, Homo sapien
tctgtctccagattaatggcttggc

SEQ ID NO: 2946419 - DNA, 25 bp, Homo sapien
aaaagtggccagagaatcgatagca

SEQ ID NO: 2946420 - DNA, 25 bp, Homo sapien
aaaggagacacagaatagcatcagg

SEQ ID NO: 2946421 - DNA, 25 bp, Homo sapien
tgacctctaaggtgggctgtacaca

SEQ ID NO: 2946422 - DNA, 25 bp, Homo sapien
taaatgcacggacgcagagaagggt

SEQ ID NO: 2946423 - DNA, 25 bp, Homo sapien
tagcatcaggcttccggaagcttca

SEQ ID NO: 2946424 - DNA, 25 bp, Homo sapien
gatcaaggaccgacatatggcattc

SEQ ID NO: 2946425 - DNA, 25 bp, Homo sapien
tggagggcagatcaaggaccgacat

SEQ ID NO: 2946426 - DNA, 25 bp, Homo sapien
gcagatcaaggaccgacatatggca

SEQ ID NO: 2946427 - DNA, 25 bp, Homo sapien
ggaccgacatatggcattccagccc

SEQ ID NO: 2946428 - DNA, 25 bp, Homo sapien
gcaggaggtcccatcacaccatcta

SEQ ID NO: 2946429 - DNA, 25 bp, Homo sapien
ctagtgattctgtccatcgctgctg

SEQ ID NO: 2946430 - DNA, 25 bp, Homo sapien
aggaggtcccatcacaccatctagt

SEQ ID NO: 2946431 - DNA, 25 bp, Homo sapien
cacaccatctagtgattctgtccat

SEQ ID NO: 2946432 - DNA, 25 bp, Homo sapien
taaaggtatccaagtctgagacagg

SEQ ID NO: 2946433 - DNA, 25 bp, Homo sapien
gcagttgacaatgagggcacccgaa

SEQ ID NO: 2946434 - DNA, 25 bp, Homo sapien
agtctacagccaggaagccgcaatg

SEQ ID NO: 2946435 - DNA, 25 bp, Homo sapien
tgaggcaaccccatgtcacaaaagg

SEQ ID NO: 2946436 - DNA, 25 bp, Homo sapien
catccatcctgggtcaagtctcagg

SEQ ID NO: 2946437 - DNA, 25 bp, Homo sapien
gggacctcattcacatcaagcagca

SEQ ID NO: 2946438 - DNA, 25 bp, Homo sapien
ctcacgccaaggagccactgcggga

SEQ ID NO: 2946439 - DNA, 25 bp, Homo sapien
gaaaggagtctgagcagtgctcacg

SEQ ID NO: 2946440 - DNA, 25 bp, Homo sapien
cactgggtctgggtaaaagtcatct

SEQ ID NO: 2946441 - DNA, 25 bp, Homo sapien
aagtcatctggtgcgatgtggaaag

SEQ ID NO: 2946442 - DNA, 25 bp, Homo sapien
agataaggcaatgcccactgggtct

SEQ ID NO: 2946443 - DNA, 25 bp, Homo sapien
tgcaagataaggcaatgcccactgg

SEQ ID NO: 2946444 - DNA, 25 bp, Homo sapien
tcttcagaaagaaacggcaacatgt

SEQ ID NO: 2946445 - DNA, 25 bp, Homo sapien
gatcttagtggaatgcttcaggcag

SEQ ID NO: 2946446 - DNA, 25 bp, Homo sapien
tggtcaccagtagcctgtccatgac

SEQ ID NO: 2946447 - DNA, 25 bp, Homo sapien
aatgaacgaacgagggaatgggcaa

SEQ ID NO: 2946448 - DNA, 25 bp, Homo sapien
gctcttcaggtgtctcggagctgac

SEQ ID NO: 2946449 - DNA, 25 bp, Homo sapien
aactgaggcccgagtaataaaggca

SEQ ID NO: 2946450 - DNA, 25 bp, Homo sapien
gggtggagctaccaatcggtcacat

SEQ ID NO: 2946451 - DNA, 25 bp, Homo sapien
catctgccgagaagtgaaaggctca

SEQ ID NO: 2946452 - DNA, 25 bp, Homo sapien
tcaggcttcaccaagggaggagttg

SEQ ID NO: 2946453 - DNA, 25 bp, Homo sapien
gatcccaggcacactcatcctttgg

SEQ ID NO: 2946454 - DNA, 25 bp, Homo sapien
caggcacactcatcctttgggaggt

SEQ ID NO: 2946455 - DNA, 25 bp, Homo sapien
tcccaggcacactcatcctttggga

SEQ ID NO: 2946456 - DNA, 25 bp, Homo sapien
ttggtacccatgctaggggaccaca

SEQ ID NO: 2946457 - DNA, 25 bp, Homo sapien
tggtacccatgctaggggaccacag

SEQ ID NO: 2946458 - DNA, 25 bp, Homo sapien
ttttggtacccatgctaggggacca

SEQ ID NO: 2946459 - DNA, 25 bp, Homo sapien
tttggtacccatgctaggggaccac

SEQ ID NO: 2946460 - DNA, 25 bp, Homo sapien
gctcgctcattcctcccggtccggg

SEQ ID NO: 2946461 - DNA, 25 bp, Homo sapien
gacagcagcagagccgcgaacgccc

SEQ ID NO: 2946462 - DNA, 25 bp, Homo sapien
cagcgacagcagcagagccgcgaac

SEQ ID NO: 2946463 - DNA, 25 bp, Homo sapien
gcgacagcagcagagccgcgaacgc

SEQ ID NO: 2946464 - DNA, 25 bp, Homo sapien
cagcagcagagccgcgaacgcccag

SEQ ID NO: 2946465 - DNA, 25 bp, Homo sapien
cgctcccctaccctcccgcgctccg

SEQ ID NO: 2946466 - DNA, 25 bp, Homo sapien
tccggaccggctgtcaccccgagca

SEQ ID NO: 2946467 - DNA, 25 bp, Homo sapien
tcccgcgctccggaccggctgtcac

SEQ ID NO: 2946468 - DNA, 25 bp, Homo sapien
gctccggaccggctgtcaccccgag

SEQ ID NO: 2946469 - DNA, 25 bp, Homo sapien
ggccatggctgcaggcagctgccca

SEQ ID NO: 2946470 - DNA, 25 bp, Homo sapien
gggaaacaaggccatggctgcaggc

SEQ ID NO: 2946471 - DNA, 25 bp, Homo sapien
ccatggctgcaggcagctgcccacc

SEQ ID NO: 2946472 - DNA, 25 bp, Homo sapien
ctggggaaacaaggccatggctgca

SEQ ID NO: 2946473 - DNA, 25 bp, Homo sapien
tggggtaagcccccccatcgcagag

SEQ ID NO: 2946474 - DNA, 25 bp, Homo sapien
ccagctggggtaagcccccccatcg

SEQ ID NO: 2946475 - DNA, 25 bp, Homo sapien
ggtaagcccccccatcgcagagctc

SEQ ID NO: 2946476 - DNA, 25 bp, Homo sapien
taagcccccccatcgcagagctcca

SEQ ID NO: 2946477 - DNA, 25 bp, Homo sapien
taaccagacggctgggttccgtgac

SEQ ID NO: 2946478 - DNA, 25 bp, Homo sapien
ctaaccagacggctgggttccgtga

SEQ ID NO: 2946479 - DNA, 25 bp, Homo sapien
ggcggacccttgtgtccagctgctg

SEQ ID NO: 2946480 - DNA, 25 bp, Homo sapien
tggctcctggcggacccttgtgtcc

SEQ ID NO: 2946481 - DNA, 25 bp, Homo sapien
tcctggcggacccttgtgtccagct

SEQ ID NO: 2946482 - DNA, 25 bp, Homo sapien
gctcctggcggacccttgtgtccag

SEQ ID NO: 2946483 - DNA, 25 bp, Homo sapien
acaccaccaccttgtgggccaggtg

SEQ ID NO: 2946484 - DNA, 25 bp, Homo sapien
ttctggaatcccctcccgcaaggag

SEQ ID NO: 2946485 - DNA, 25 bp, Homo sapien
aatcccctcccgcaaggagacacca

SEQ ID NO: 2946486 - DNA, 25 bp, Homo sapien
ctgaggacatctttctggaatcccc

SEQ ID NO: 2946487 - DNA, 25 bp, Homo sapien
ttgaaggctgggatgacgaaactca

SEQ ID NO: 2946488 - DNA, 25 bp, Homo sapien
gttgaaggctgggatgacgaaactc

SEQ ID NO: 2946489 - DNA, 25 bp, Homo sapien
tgaaggctgggatgacgaaactcac

SEQ ID NO: 2946490 - DNA, 25 bp, Homo sapien
agttgaaggctgggatgacgaaact

SEQ ID NO: 2946491 - DNA, 25 bp, Homo sapien
agtggcgctccacgtattgcgagga

SEQ ID NO: 2946492 - DNA, 25 bp, Homo sapien
gtcccctcccggctgaagtggcgct

SEQ ID NO: 2946493 - DNA, 25 bp, Homo sapien
tgaagtggcgctccacgtattgcga

SEQ ID NO: 2946494 - DNA, 25 bp, Homo sapien
cgctccacgtattgcgaggagagga

SEQ ID NO: 2946495 - DNA, 25 bp, Homo sapien
cccggtcccctgcagtggcactcac

SEQ ID NO: 2946496 - DNA, 25 bp, Homo sapien
ctgtgaccacagaaccacagaaaca

SEQ ID NO: 2946497 - DNA, 25 bp, Homo sapien
ccggccccggtcccctgcagtggca

SEQ ID NO: 2946498 - DNA, 25 bp, Homo sapien
acagaaacagcacctcccttccatc

SEQ ID NO: 2946499 - DNA, 25 bp, Homo sapien
ggagcttcccctggtagtagcagtg

SEQ ID NO: 2946500 - DNA, 25 bp, Homo sapien
cccggagcttcccctggtagtagca

SEQ ID NO: 2946501 - DNA, 25 bp, Homo sapien
ggagagggcggcgaaggagtgcggg

SEQ ID NO: 2946502 - DNA, 25 bp, Homo sapien
gagggcggcgaaggagtgcgggttc

SEQ ID NO: 2946503 - DNA, 25 bp, Homo sapien
tccacgatgtaagtcaagttcccat

SEQ ID NO: 2946504 - DNA, 25 bp, Homo sapien
atgtaagtcaagttcccatcagaga

SEQ ID NO: 2946505 - DNA, 25 bp, Homo sapien
gggctccacgatgtaagtcaagttc

SEQ ID NO: 2946506 - DNA, 25 bp, Homo sapien
tcttggggctccacgatgtaagtca

SEQ ID NO: 2946507 - DNA, 25 bp, Homo sapien
ggccacagctcccatgtcggatctg

SEQ ID NO: 2946508 - DNA, 25 bp, Homo sapien
cccaatgggaggtcacttatgggac

SEQ ID NO: 2946509 - DNA, 25 bp, Homo sapien
tatgggacagatgggacattggagc

SEQ ID NO: 2946510 - DNA, 25 bp, Homo sapien
gggcaaaggacattggagcccaatg

SEQ ID NO: 2946511 - DNA, 25 bp, Homo sapien
tcagcctcggccggtttggaggagc

SEQ ID NO: 2946512 - DNA, 25 bp, Homo sapien
actgggcaggcacagcaaacaggca

SEQ ID NO: 2946513 - DNA, 25 bp, Homo sapien
tctcagcctcggccggtttggagga

SEQ ID NO: 2946514 - DNA, 25 bp, Homo sapien
ttctcagcctcggccggtttggagg

SEQ ID NO: 2946515 - DNA, 25 bp, Homo sapien
ggtgggcacttggaatcagtccctt

SEQ ID NO: 2946516 - DNA, 25 bp, Homo sapien
ggcacttggaatcagtcccttccat

SEQ ID NO: 2946517 - DNA, 25 bp, Homo sapien
gggtgggtgggcacttggaatcagt

SEQ ID NO: 2946518 - DNA, 25 bp, Homo sapien
tgggtgggcacttggaatcagtccc

SEQ ID NO: 2946519 - DNA, 25 bp, Homo sapien
caattagctccacatacttggtttc

SEQ ID NO: 2946520 - DNA, 25 bp, Homo sapien
gtggtcgttgatcacaattagctcc

SEQ ID NO: 2946521 - DNA, 25 bp, Homo sapien
tcacaattagctccacatacttggt

SEQ ID NO: 2946522 - DNA, 25 bp, Homo sapien
cagctggtggtcgttgatcacaatt

SEQ ID NO: 2946523 - DNA, 25 bp, Homo sapien
tgaggaccaccgactgtcgcatctg

SEQ ID NO: 2946524 - DNA, 25 bp, Homo sapien
ccaggttcaccacggacttggcaaa

SEQ ID NO: 2946525 - DNA, 25 bp, Homo sapien
ctggtgaggaccaccgactgtcgca

SEQ ID NO: 2946526 - DNA, 25 bp, Homo sapien
acatcggccaggttcaccacggact

SEQ ID NO: 2946527 - DNA, 25 bp, Homo sapien
tcaggcagaccctcccgtcggtaga

SEQ ID NO: 2946528 - DNA, 25 bp, Homo sapien
aaccaggacgatgcgagtgttgagc

SEQ ID NO: 2946529 - DNA, 25 bp, Homo sapien
tcccgtcggtagaccatgagccggg

SEQ ID NO: 2946530 - DNA, 25 bp, Homo sapien
ccatggcaaccaggacgatgcgagt

SEQ ID NO: 2946531 - DNA, 25 bp, Homo sapien
cccacgtaggctgccccgctgctcg

SEQ ID NO: 2946532 - DNA, 25 bp, Homo sapien
cagggagcatatgccccccacgtag

SEQ ID NO: 2946533 - DNA, 25 bp, Homo sapien
tgccccgctgctcgtgctctggaag

SEQ ID NO: 2946534 - DNA, 25 bp, Homo sapien
cacccccgccgtgggacagggagca

SEQ ID NO: 2946535 - DNA, 25 bp, Homo sapien
tgggcaagggtcacggccatcgccc

SEQ ID NO: 2946536 - DNA, 25 bp, Homo sapien
tgccgagctccggtgtttgttccac

SEQ ID NO: 2946537 - DNA, 25 bp, Homo sapien
ccagcgtctgggcaagggtcacggc

SEQ ID NO: 2946538 - DNA, 25 bp, Homo sapien
gccgagctccggtgtttgttccaca

SEQ ID NO: 2946539 - DNA, 25 bp, Homo sapien
cagtgtcctccatgatgcagcccag

SEQ ID NO: 2946540 - DNA, 25 bp, Homo sapien
ctccatgatgcagcccagccagatg

SEQ ID NO: 2946541 - DNA, 25 bp, Homo sapien
ccagccagatgtctggacacttgca

SEQ ID NO: 2946542 - DNA, 25 bp, Homo sapien
gccagatgtctggacacttgcagtc

SEQ ID NO: 2946543 - DNA, 25 bp, Homo sapien
gaaactggttgtactcgtcgatgct

SEQ ID NO: 2946544 - DNA, 25 bp, Homo sapien
atgctacagcgcgagaacttgcggg

SEQ ID NO: 2946545 - DNA, 25 bp, Homo sapien
ggttgtactcgtcgatgctacagcg

SEQ ID NO: 2946546 - DNA, 25 bp, Homo sapien
tcgtcgatgctacagcgcgagaact

SEQ ID NO: 2946547 - DNA, 25 bp, Homo sapien
ctgcaccgagccgcagtcgcactcc

SEQ ID NO: 2946548 - DNA, 25 bp, Homo sapien
cgttcccgcactctggggggtccag

SEQ ID NO: 2946549 - DNA, 25 bp, Homo sapien
accgagccgcagtcgcactcctccc

SEQ ID NO: 2946550 - DNA, 25 bp, Homo sapien
gagccgcagtcgcactcctcccctg

SEQ ID NO: 2946551 - DNA, 25 bp, Homo sapien
gcgtcgtgagtcagggtgcatttct

SEQ ID NO: 2946552 - DNA, 25 bp, Homo sapien
agcagttgccacctgcgcggctgca

SEQ ID NO: 2946553 - DNA, 25 bp, Homo sapien
acagcagagcccgtcgctgcacatg

SEQ ID NO: 2946554 - DNA, 25 bp, Homo sapien
atttcttgcagcagttgccacctgc

SEQ ID NO: 2946555 - DNA, 25 bp, Homo sapien
cggtgcaggtctccgcgatgtcgca

SEQ ID NO: 2946556 - DNA, 25 bp, Homo sapien
ctagagtccccggtgcaggtctccg

SEQ ID NO: 2946557 - DNA, 25 bp, Homo sapien
gttcacggcctctcggcaggacaca

SEQ ID NO: 2946558 - DNA, 25 bp, Homo sapien
gcgatgtcgcactcgttcacggcct

SEQ ID NO: 2946559 - DNA, 25 bp, Homo sapien
cagccagacgatacattctggttta

SEQ ID NO: 2946560 - DNA, 25 bp, Homo sapien
gtttaatgattgaaggaacaaggcc

SEQ ID NO: 2946561 - DNA, 25 bp, Homo sapien
ccaggagcatgaagaacccctttct

SEQ ID NO: 2946562 - DNA, 25 bp, Homo sapien
tctgatcagtggaggtcgatgccag

SEQ ID NO: 2946563 - DNA, 25 bp, Homo sapien
caggcaccgggccaggcgctgggaa

SEQ ID NO: 2946564 - DNA, 25 bp, Homo sapien
gcaccgggccaggcgctgggaatac

SEQ ID NO: 2946565 - DNA, 25 bp, Homo sapien
accaggcaccgggccaggcgctggg

SEQ ID NO: 2946566 - DNA, 25 bp, Homo sapien
ggcaccgggccaggcgctgggaata

SEQ ID NO: 2946567 - DNA, 25 bp, Homo sapien
tcacagtagtaaccgtccagcttgt

SEQ ID NO: 2946568 - DNA, 25 bp, Homo sapien
ggtcacagtagtaaccgtccagctt

SEQ ID NO: 2946569 - DNA, 25 bp, Homo sapien
tcatggtcacagtagtaaccgtcca

SEQ ID NO: 2946570 - DNA, 25 bp, Homo sapien
atggtcacagtagtaaccgtccagc

SEQ ID NO: 2946571 - DNA, 25 bp, Homo sapien
aaagaacctggcactgccggtcccg

SEQ ID NO: 2946572 - DNA, 25 bp, Homo sapien
ggcactgccggtcccgggttttgca

SEQ ID NO: 2946573 - DNA, 25 bp, Homo sapien
tttgcagcgacctccgtagcagcgg

SEQ ID NO: 2946574 - DNA, 25 bp, Homo sapien
ccgggttttgcagcgacctccgtag

SEQ ID NO: 2946575 - DNA, 25 bp, Homo sapien
cacattcagcttctcgtagcagaag

SEQ ID NO: 2946576 - DNA, 25 bp, Homo sapien
agccagatcccttgcgcccacagct

SEQ ID NO: 2946577 - DNA, 25 bp, Homo sapien
cagcttctcgtagcagaagcgatca

SEQ ID NO: 2946578 - DNA, 25 bp, Homo sapien
ctcgtagcagaagcgatcagcagcc

SEQ ID NO: 2946579 - DNA, 25 bp, Homo sapien
acagaggaggaagccacacagcacg

SEQ ID NO: 2946580 - DNA, 25 bp, Homo sapien
ggagctccagagatgttgacacaga

SEQ ID NO: 2946581 - DNA, 25 bp, Homo sapien
accaggtcccctagccgaggagctc

SEQ ID NO: 2946582 - DNA, 25 bp, Homo sapien
cgaggagctccagagatgttgacac

SEQ ID NO: 2946583 - DNA, 25 bp, Homo sapien
cagctccttgccctggtggtagaag

SEQ ID NO: 2946584 - DNA, 25 bp, Homo sapien
gctccttgccctggtggtagaaggt

SEQ ID NO: 2946585 - DNA, 25 bp, Homo sapien
tgcagtccagctccttgccctggtg

SEQ ID NO: 2946586 - DNA, 25 bp, Homo sapien
tccttgccctggtggtagaaggtga

SEQ ID NO: 2946587 - DNA, 25 bp, Homo sapien
tggtgggagcaaatccggcgctccc

SEQ ID NO: 2946588 - DNA, 25 bp, Homo sapien
ggcacaacatgttaggcccgcaggc

SEQ ID NO: 2946589 - DNA, 25 bp, Homo sapien
aggtcagagccgtccgccagctgca

SEQ ID NO: 2946590 - DNA, 25 bp, Homo sapien
gcaggcagcgatggtccaggcacaa

SEQ ID NO: 2946591 - DNA, 25 bp, Homo sapien
gatgcacttcccttcattgctgcag

SEQ ID NO: 2946592 - DNA, 25 bp, Homo sapien
ggctgacagatgcacttcccttcat

SEQ ID NO: 2946593 - DNA, 25 bp, Homo sapien
agtctggctgacagatgcacttccc

SEQ ID NO: 2946594 - DNA, 25 bp, Homo sapien
ggttatggatactgcagtctttgcc

SEQ ID NO: 2946595 - DNA, 25 bp, Homo sapien
agccaatgatgatgttggtgccgct

SEQ ID NO: 2946596 - DNA, 25 bp, Homo sapien
ccagcccgtgccgcccaggacgatg

SEQ ID NO: 2946597 - DNA, 25 bp, Homo sapien
gcccgtgccgcccaggacgatggct

SEQ ID NO: 2946598 - DNA, 25 bp, Homo sapien
ccaatgatgatgttggtgccgctgg

SEQ ID NO: 2946599 - DNA, 25 bp, Homo sapien
cttttgcttctctcagggaggggcc

SEQ ID NO: 2946600 - DNA, 25 bp, Homo sapien
agggaggggcctttggctgccatgc

SEQ ID NO: 2946601 - DNA, 25 bp, Homo sapien
ttctctcagggaggggcctttggct

SEQ ID NO: 2946602 - DNA, 25 bp, Homo sapien
ggggcctttggctgccatgcgaccc

SEQ ID NO: 2946603 - DNA, 25 bp, Homo sapien
aaggggagaggaaaaggagacatct

SEQ ID NO: 2946604 - DNA, 25 bp, Homo sapien
tggaaggggagaggaaaaggagaca

SEQ ID NO: 2946605 - DNA, 25 bp, Homo sapien
gaaggggagaggaaaaggagacatc

SEQ ID NO: 2946606 - DNA, 25 bp, Homo sapien
gggagaggaaaaggagacatctgac

SEQ ID NO: 2946607 - DNA, 25 bp, Homo sapien
ccatcaacagaacgcggggtgacga

SEQ ID NO: 2946608 - DNA, 25 bp, Homo sapien
ccgctccccatcaacagaacgcggg

SEQ ID NO: 2946609 - DNA, 25 bp, Homo sapien
ggagacaaggacagcgggagggatg

SEQ ID NO: 2946610 - DNA, 25 bp, Homo sapien
atgacgtggccggcatcacactgcc

SEQ ID NO: 2946611 - DNA, 25 bp, Homo sapien
gaggcaggcggcaagtcacaggctg

SEQ ID NO: 2946612 - DNA, 25 bp, Homo sapien
cagggcagtcgagaaggacgtggcc

SEQ ID NO: 2946613 - DNA, 25 bp, Homo sapien
aagacaaaacagatgggacgcacag

SEQ ID NO: 2946614 - DNA, 25 bp, Homo sapien
cagggaagggatctgcgggaggtca

SEQ ID NO: 2946615 - DNA, 25 bp, Homo sapien
taaggcagcgcagcaatagtgcaac

SEQ ID NO: 2946616 - DNA, 25 bp, Homo sapien
aaaaatgtagatgtcagccccgtcc

SEQ ID NO: 2946617 - DNA, 25 bp, Homo sapien
gatctttaatcgatgctcctggccc

SEQ ID NO: 2946618 - DNA, 25 bp, Homo sapien
cccaaaatggtgtcagcgggtccca

SEQ ID NO: 2946619 - DNA, 25 bp, Homo sapien
cccgatggatcctcccccagttctt

SEQ ID NO: 2946620 - DNA, 25 bp, Homo sapien
cggccccccaagtctgcgaatacct

SEQ ID NO: 2946621 - DNA, 25 bp, Homo sapien
ggacttccagagcccgatggatcct

SEQ ID NO: 2946622 - DNA, 25 bp, Homo sapien
cccaagtctgcgaatacctccaggc

SEQ ID NO: 2946623 - DNA, 25 bp, Homo sapien
ccaaagcttctagctgccaattctt

SEQ ID NO: 2946624 - DNA, 25 bp, Homo sapien
cccaaagcttctagctgccaattct

SEQ ID NO: 2946625 - DNA, 25 bp, Homo sapien
ggagctgcttctctctcctgctgat

SEQ ID NO: 2946626 - DNA, 25 bp, Homo sapien
gaagccttgggctggagctgcttct

SEQ ID NO: 2946627 - DNA, 25 bp, Homo sapien
aagccttgggctggagctgcttctc

SEQ ID NO: 2946628 - DNA, 25 bp, Homo sapien
gctgcttctctctcctgctgatctt

SEQ ID NO: 2946629 - DNA, 25 bp, Homo sapien
aaggcctgaagagcctaggccgcag

SEQ ID NO: 2946630 - DNA, 25 bp, Homo sapien
gcctgaagagcctaggccgcaggca

SEQ ID NO: 2946631 - DNA, 25 bp, Homo sapien
caaaggcctgaagagcctaggccgc

SEQ ID NO: 2946632 - DNA, 25 bp, Homo sapien
ctgaagagcctaggccgcaggcact

SEQ ID NO: 2946633 - DNA, 25 bp, Homo sapien
gggccgctgagatgacggcgacatg

SEQ ID NO: 2946634 - DNA, 25 bp, Homo sapien
agatgacggcgacatggtgctttcg

SEQ ID NO: 2946635 - DNA, 25 bp, Homo sapien
aatggagtcgtagaacgtgttcctc

SEQ ID NO: 2946636 - DNA, 25 bp, Homo sapien
tttcgggggcggctgggatccagct

SEQ ID NO: 2946637 - DNA, 25 bp, Homo sapien
tagcggggaagatgggctgaaacgg

SEQ ID NO: 2946638 - DNA, 25 bp, Homo sapien
agcggggaagatgggctgaaacggg

SEQ ID NO: 2946639 - DNA, 25 bp, Homo sapien
ctagcggggaagatgggctgaaacg

SEQ ID NO: 2946640 - DNA, 25 bp, Homo sapien
tacccggcaacattctgtcttaaaa

SEQ ID NO: 2946641 - DNA, 25 bp, Homo sapien
caggcgaatcacgagacagatcacc

SEQ ID NO: 2946642 - DNA, 25 bp, Homo sapien
cactgtacccggcaacattctgtct

SEQ ID NO: 2946643 - DNA, 25 bp, Homo sapien
aatcacgagacagatcacctgggca

SEQ ID NO: 2946644 - DNA, 25 bp, Homo sapien
cgtcgacaaggatccgcagggtctg

SEQ ID NO: 2946645 - DNA, 25 bp, Homo sapien
cagtaagtgcaaattgttccgtgga

SEQ ID NO: 2946646 - DNA, 25 bp, Homo sapien
caaaccatcgggaagtgatcgagac

SEQ ID NO: 2946647 - DNA, 25 bp, Homo sapien
tgatcgagactggaagcgtcgacaa

SEQ ID NO: 2946648 - DNA, 25 bp, Homo sapien
cactaagtgttatgacatgggtagc

SEQ ID NO: 2946649 - DNA, 25 bp, Homo sapien
tctaatgtcatgtggtgtgcagttt

SEQ ID NO: 2946650 - DNA, 25 bp, Homo sapien
tacagaaatctctacctcaggcact

SEQ ID NO: 2946651 - DNA, 25 bp, Homo sapien
taaggaatcacctgttctagtgcca

SEQ ID NO: 2946652 - DNA, 25 bp, Homo sapien
gttccaccagggagcattttatttg

SEQ ID NO: 2946653 - DNA, 25 bp, Homo sapien
ctgttgtaagccacctctgacttgg

SEQ ID NO: 2946654 - DNA, 25 bp, Homo sapien
ggcgtctcacccttttctaatgaaa

SEQ ID NO: 2946655 - DNA, 25 bp, Homo sapien
gatgaatagtagaacactgcaccct

SEQ ID NO: 2946656 - DNA, 25 bp, Homo sapien
cagccatgaggagaacctcccagct

SEQ ID NO: 2946657 - DNA, 25 bp, Homo sapien
tcaggaacgcttggatctggcagtt

SEQ ID NO: 2946658 - DNA, 25 bp, Homo sapien
ggcagttcaggcctacagtcaccaa

SEQ ID NO: 2946659 - DNA, 25 bp, Homo sapien
tctgcagcgggagatcaggatggct

SEQ ID NO: 2946660 - DNA, 25 bp, Homo sapien
cctaagagatggctagaacgaggag

SEQ ID NO: 2946661 - DNA, 25 bp, Homo sapien
aagagatggctagaacgaggagaac

SEQ ID NO: 2946662 - DNA, 25 bp, Homo sapien
gatggctagaacgaggagaacgggc

SEQ ID NO: 2946663 - DNA, 25 bp, Homo sapien
tggctagaacgaggagaacgggcgg

SEQ ID NO: 2946664 - DNA, 25 bp, Homo sapien
tcccaggtatcccatctcaggtggc

SEQ ID NO: 2946665 - DNA, 25 bp, Homo sapien
tgagtactaaggaacacattctggt

SEQ ID NO: 2946666 - DNA, 25 bp, Homo sapien
tacttgaaaagatgtccctcccagg

SEQ ID NO: 2946667 - DNA, 25 bp, Homo sapien
cctatgggtgtgatccttgggccaa

SEQ ID NO: 2946668 - DNA, 25 bp, Homo sapien
gaggcactccacaatcagaactctg

SEQ ID NO: 2946669 - DNA, 25 bp, Homo sapien
tgagactcctatgctgcagccccgt

SEQ ID NO: 2946670 - DNA, 25 bp, Homo sapien
cgtcctagagagaggcactccacaa

SEQ ID NO: 2946671 - DNA, 25 bp, Homo sapien
ctgcagccccgtcctagagagaggc

SEQ ID NO: 2946672 - DNA, 25 bp, Homo sapien
agtcttcgtcgtcaggtggtaccca

SEQ ID NO: 2946673 - DNA, 25 bp, Homo sapien
ccagtggagattcccgagtcttcct

SEQ ID NO: 2946674 - DNA, 25 bp, Homo sapien
tacccaccagcgtctgttagcagac

SEQ ID NO: 2946675 - DNA, 25 bp, Homo sapien
tataggcaccagtggagattcccga

SEQ ID NO: 2946676 - DNA, 25 bp, Homo sapien
ttcccttgttccgtgagtaggacca

SEQ ID NO: 2946677 - DNA, 25 bp, Homo sapien
tgatttcattgtaagggtttgcccc

SEQ ID NO: 2946678 - DNA, 25 bp, Homo sapien
gtgttggtgctccaggttcctcata

SEQ ID NO: 2946679 - DNA, 25 bp, Homo sapien
tatcccatgtactcagttggctgcc

SEQ ID NO: 2946680 - DNA, 25 bp, Homo sapien
cctggtacagctgttttcctactct

SEQ ID NO: 2946681 - DNA, 25 bp, Homo sapien
cacctcctggtacagctgttttcct

SEQ ID NO: 2946682 - DNA, 25 bp, Homo sapien
ctcctggtacagctgttttcctact

SEQ ID NO: 2946683 - DNA, 25 bp, Homo sapien
tggtacagctgttttcctactctac

SEQ ID NO: 2946684 - DNA, 25 bp, Homo sapien
gctccgccctgggcccttgagccac

SEQ ID NO: 2946685 - DNA, 25 bp, Homo sapien
tccgccctgggcccttgagccacac

SEQ ID NO: 2946686 - DNA, 25 bp, Homo sapien
atttgctccgccctgggcccttgag

SEQ ID NO: 2946687 - DNA, 25 bp, Homo sapien
caatttgctccgccctgggcccttg

SEQ ID NO: 2946688 - DNA, 25 bp, Homo sapien
tcccctgatgagagataccttacca

SEQ ID NO: 2946689 - DNA, 25 bp, Homo sapien
gagataccttaccaggcaggctggg

SEQ ID NO: 2946690 - DNA, 25 bp, Homo sapien
tgatgagagataccttaccaggcag

SEQ ID NO: 2946691 - DNA, 25 bp, Homo sapien
cagcactcccctgatgagagatacc

SEQ ID NO: 2946692 - DNA, 25 bp, Homo sapien
cctgcgctgccactcgggtgtgaat

SEQ ID NO: 2946693 - DNA, 25 bp, Homo sapien
tagcatgattgcacccactgcacag

SEQ ID NO: 2946694 - DNA, 25 bp, Homo sapien
gacctcagccggtaaatcctgtatg

SEQ ID NO: 2946695 - DNA, 25 bp, Homo sapien
tcttggtggaaccacgagacctcag

SEQ ID NO: 2946696 - DNA, 25 bp, Homo sapien
gacgtaatcgctgtacattgtgtac

SEQ ID NO: 2946697 - DNA, 25 bp, Homo sapien
catcctcttgacgtaatcgctgtac

SEQ ID NO: 2946698 - DNA, 25 bp, Homo sapien
agcatcctgtgccatcctcttgacg

SEQ ID NO: 2946699 - DNA, 25 bp, Homo sapien
tcgctgtacattgtgtacacagcac

SEQ ID NO: 2946700 - DNA, 25 bp, Homo sapien
ggacagccccggctcctataggagt

SEQ ID NO: 2946701 - DNA, 25 bp, Homo sapien
aggaatgtaccagggattgagttag

SEQ ID NO: 2946702 - DNA, 25 bp, Homo sapien
gagttggacagccccggctcctata

SEQ ID NO: 2946703 - DNA, 25 bp, Homo sapien
ctgctttattaggaatgtaccaggg

SEQ ID NO: 2946704 - DNA, 25 bp, Homo sapien
tccacagggaattatactgagagcc

SEQ ID NO: 2946705 - DNA, 25 bp, Homo sapien
tgacatttcttttgggatcccctcc

SEQ ID NO: 2946706 - DNA, 25 bp, Homo sapien
taactctgggctggaatgcatttgg

SEQ ID NO: 2946707 - DNA, 25 bp, Homo sapien
ctatgtttgactagaggctcagcct

SEQ ID NO: 2946708 - DNA, 25 bp, Homo sapien
gcttattcagttagaacgcccacct

SEQ ID NO: 2946709 - DNA, 25 bp, Homo sapien
aggagactgctactctgccatggcc

SEQ ID NO: 2946710 - DNA, 25 bp, Homo sapien
gaaagctctaagtctgagcatggcc

SEQ ID NO: 2946711 - DNA, 25 bp, Homo sapien
taagatcctggatgcggtggttgcc

SEQ ID NO: 2946712 - DNA, 25 bp, Homo sapien
tacccactggatgctaatggcacct

SEQ ID NO: 2946713 - DNA, 25 bp, Homo sapien
aaacccctggtgcagagtttcttca

SEQ ID NO: 2946714 - DNA, 25 bp, Homo sapien
tgtaatgtatccagaattcagcctc

SEQ ID NO: 2946715 - DNA, 25 bp, Homo sapien
ggctgttttccggtgctcagatcaa

SEQ ID NO: 2946716 - DNA, 25 bp, Homo sapien
cctcttctatccgtgccgctttcag

SEQ ID NO: 2946717 - DNA, 25 bp, Homo sapien
ttgccaagttccctccgaagtcctc

SEQ ID NO: 2946718 - DNA, 25 bp, Homo sapien
gctttcagccgttctttgccaagtt

SEQ ID NO: 2946719 - DNA, 25 bp, Homo sapien
tccctccgaagtcctctgagctcct

SEQ ID NO: 2946720 - DNA, 25 bp, Homo sapien
gggcgcaggcgtttcctcggcgtgg

SEQ ID NO: 2946721 - DNA, 25 bp, Homo sapien
ggcagagggttgtcctcccgggcag

SEQ ID NO: 2946722 - DNA, 25 bp, Homo sapien
tggggcggaagcacgatctccggca

SEQ ID NO: 2946723 - DNA, 25 bp, Homo sapien
gcgtctgcggggtccttcctggcgg

SEQ ID NO: 2946724 - DNA, 25 bp, Homo sapien
cagtcccggccttggtccccttgct

SEQ ID NO: 2946725 - DNA, 25 bp, Homo sapien
ggtggccagtaaccgaaatcaggtg

SEQ ID NO: 2946726 - DNA, 25 bp, Homo sapien
acagccctagcgcaaggaagcagga

SEQ ID NO: 2946727 - DNA, 25 bp, Homo sapien
ggttctagtcgtggctctggcattt

SEQ ID NO: 2946728 - DNA, 25 bp, Homo sapien
ccaacgtagggaatctgaacgccaa

SEQ ID NO: 2946729 - DNA, 25 bp, Homo sapien
acaaagacaagttgaatttcacagt

SEQ ID NO: 2946730 - DNA, 25 bp, Homo sapien
aaagacaagttgaatttcacagtga

SEQ ID NO: 2946731 - DNA, 25 bp, Homo sapien
tacaaagacaagttgaatttcacag

SEQ ID NO: 2946732 - DNA, 25 bp, Homo sapien
caaagacaagttgaatttcacagtg

SEQ ID NO: 2946733 - DNA, 25 bp, Homo sapien
ctttctccaaagccttgaagttgat

SEQ ID NO: 2946734 - DNA, 25 bp, Homo sapien
tctccaaagccttgaagttgatgat

SEQ ID NO: 2946735 - DNA, 25 bp, Homo sapien
tggcagcattctcccgtttgtactt

SEQ ID NO: 2946736 - DNA, 25 bp, Homo sapien
gcagcattctcccgtttgtacttct

SEQ ID NO: 2946737 - DNA, 25 bp, Homo sapien
cctcataggaagccaccctctgttc

SEQ ID NO: 2946738 - DNA, 25 bp, Homo sapien
actcctcataggaagccaccctctg

SEQ ID NO: 2946739 - DNA, 25 bp, Homo sapien
tgaactcctcataggaagccaccct

SEQ ID NO: 2946740 - DNA, 25 bp, Homo sapien
tcataggaagccaccctctgttcca

SEQ ID NO: 2946741 - DNA, 25 bp, Homo sapien
cccatcttatccttccgctccagtg

SEQ ID NO: 2946742 - DNA, 25 bp, Homo sapien
cagatgtgatgcaaggacaataccc

SEQ ID NO: 2946743 - DNA, 25 bp, Homo sapien
gtgacagttccagggcacagttctc

SEQ ID NO: 2946744 - DNA, 25 bp, Homo sapien
tgaatagtgtgacagttccagggca

SEQ ID NO: 2946745 - DNA, 25 bp, Homo sapien
ggaaggaaagggagtcaggagctct

SEQ ID NO: 2946746 - DNA, 25 bp, Homo sapien
ggaaagggagtcaggagctcttcca

SEQ ID NO: 2946747 - DNA, 25 bp, Homo sapien
gggagtcaggagctcttccagctgt

SEQ ID NO: 2946748 - DNA, 25 bp, Homo sapien
ggagtcaggagctcttccagctgtt

SEQ ID NO: 2946749 - DNA, 25 bp, Homo sapien
caagctgcagtagagcctggtagcg

SEQ ID NO: 2946750 - DNA, 25 bp, Homo sapien
cagtgctcgccaggctgcataggat

SEQ ID NO: 2946751 - DNA, 25 bp, Homo sapien
tcagcaggcttaggttcagggtgaa

SEQ ID NO: 2946752 - DNA, 25 bp, Homo sapien
caatcacgatagaagtcagcagacg

SEQ ID NO: 2946753 - DNA, 25 bp, Homo sapien
tcagtcaacctggtacagctccagc

SEQ ID NO: 2946754 - DNA, 25 bp, Homo sapien
agcagctcctgcaggagcctctcct

SEQ ID NO: 2946755 - DNA, 25 bp, Homo sapien
agtcaacctggtacagctccagcag

SEQ ID NO: 2946756 - DNA, 25 bp, Homo sapien
tcaacctggtacagctccagcagct

SEQ ID NO: 2946757 - DNA, 25 bp, Homo sapien
ttcccagtggatgtacaagatgccc

SEQ ID NO: 2946758 - DNA, 25 bp, Homo sapien
gcattaaaggctcatagggctccta

SEQ ID NO: 2946759 - DNA, 25 bp, Homo sapien
caaaacagcgagacactgagggact

SEQ ID NO: 2946760 - DNA, 25 bp, Homo sapien
tgcatatctggccatccgggaggct

SEQ ID NO: 2946761 - DNA, 25 bp, Homo sapien
gatgtccacatcgtaggcgtaaaag

SEQ ID NO: 2946762 - DNA, 25 bp, Homo sapien
catagttaatgatggccagcacgcc

SEQ ID NO: 2946763 - DNA, 25 bp, Homo sapien
cagcaatagtagatgccccggtcat

SEQ ID NO: 2946764 - DNA, 25 bp, Homo sapien
tctcacagggtactaagcagctccg

SEQ ID NO: 2946765 - DNA, 25 bp, Homo sapien
ggacaacagtgaaataagtagcagc

SEQ ID NO: 2946766 - DNA, 25 bp, Homo sapien
ccttctctgacctaaatgtgaagtc

SEQ ID NO: 2946767 - DNA, 25 bp, Homo sapien
aggtcccagacctgcccatgaaaat

SEQ ID NO: 2946768 - DNA, 25 bp, Homo sapien
ccactggataaatctgagttcacac

SEQ ID NO: 2946769 - DNA, 25 bp, Homo sapien
cagatttgtccacatgttcctacca

SEQ ID NO: 2946770 - DNA, 25 bp, Homo sapien
cagactggtgggatctgtgcccaga

SEQ ID NO: 2946771 - DNA, 25 bp, Homo sapien
caagacttggtgtcctttccctcca

SEQ ID NO: 2946772 - DNA, 25 bp, Homo sapien
gaagacactggctcatattcctgca

SEQ ID NO: 2946773 - DNA, 25 bp, Homo sapien
tgctgcctttagtcgctgaggaaaa

SEQ ID NO: 2946774 - DNA, 25 bp, Homo sapien
gactcaagtgtctcagtccacctga

SEQ ID NO: 2946775 - DNA, 25 bp, Homo sapien
ggttgttctcctagactgaccctga

SEQ ID NO: 2946776 - DNA, 25 bp, Homo sapien
caggtgggagcttgattctcagcac

SEQ ID NO: 2946777 - DNA, 25 bp, Homo sapien
tcccagaaggacctcctgagcgatg

SEQ ID NO: 2946778 - DNA, 25 bp, Homo sapien
gcaactccaactaacaagaaactca

SEQ ID NO: 2946779 - DNA, 25 bp, Homo sapien
ctctcggagtatctgggaactgtgc

SEQ ID NO: 2946780 - DNA, 25 bp, Homo sapien
ttatgaggtgggatatccctatgct

SEQ ID NO: 2946781 - DNA, 25 bp, Homo sapien
cagcttgcgttagaatgaggaggaa

SEQ ID NO: 2946782 - DNA, 25 bp, Homo sapien
aggatagttgctccgcctctgctgg

SEQ ID NO: 2946783 - DNA, 25 bp, Homo sapien
gttgctccgcctctgctggcacatt

SEQ ID NO: 2946784 - DNA, 25 bp, Homo sapien
tgccccgtctcatgaggggcccgag

SEQ ID NO: 2946785 - DNA, 25 bp, Homo sapien
gaagcaggatagttgctccgcctct

SEQ ID NO: 2946786 - DNA, 25 bp, Homo sapien
agacacggcgctttgcccagcttga

SEQ ID NO: 2946787 - DNA, 25 bp, Homo sapien
tctcaaaagcctcacaatacgagtt

SEQ ID NO: 2946788 - DNA, 25 bp, Homo sapien
agattgtaaatggaacgccgccggc

SEQ ID NO: 2946789 - DNA, 25 bp, Homo sapien
caatacgagttataccaatacaggc

SEQ ID NO: 2946790 - DNA, 25 bp, Homo sapien
ttgccagctacatcgagaaggttcg

SEQ ID NO: 2946791 - DNA, 25 bp, Homo sapien
gcactcaatgctggcttcaaggaga

SEQ ID NO: 2946792 - DNA, 25 bp, Homo sapien
gatggagctcaatgaccgctttgcc

SEQ ID NO: 2946793 - DNA, 25 bp, Homo sapien
agacgtctaccaggctgagctgcga

SEQ ID NO: 2946794 - DNA, 25 bp, Homo sapien
caataaaccgtctccatccttggtg

SEQ ID NO: 2946795 - DNA, 25 bp, Homo sapien
gaggtctgttccacccttctacggc

SEQ ID NO: 2946796 - DNA, 25 bp, Homo sapien
tgggagtaattgcacctggaggtct

SEQ ID NO: 2946797 - DNA, 25 bp, Homo sapien
tgtctctctgtacacctagatagga

SEQ ID NO: 2946798 - DNA, 25 bp, Homo sapien
gagaatcctgaagatcttattaaag

SEQ ID NO: 2946799 - DNA, 25 bp, Homo sapien
gcagatcggtagctgttttctctgg

SEQ ID NO: 2946800 - DNA, 25 bp, Homo sapien
atgagctgccctgggttagaaacag

SEQ ID NO: 2946801 - DNA, 25 bp, Homo sapien
tgaaatgctctttccaaccaaggat

SEQ ID NO: 2946802 - DNA, 25 bp, Homo sapien
aattcaataggagccggtgtggtgg

SEQ ID NO: 2946803 - DNA, 25 bp, Homo sapien
caattcaataggagccggtgtggtg

SEQ ID NO: 2946804 - DNA, 25 bp, Homo sapien
gaatcgcttggaccggggactcgga

SEQ ID NO: 2946805 - DNA, 25 bp, Homo sapien
gagaatcgcttggaccggggactcg

SEQ ID NO: 2946806 - DNA, 25 bp, Homo sapien
aggagaatcgcttggaccggggact

SEQ ID NO: 2946807 - DNA, 25 bp, Homo sapien
caggagaatcgcttggaccggggac

SEQ ID NO: 2946808 - DNA, 25 bp, Homo sapien
caaacggatgtgaatttagcctaca

SEQ ID NO: 2946809 - DNA, 25 bp, Homo sapien
aaagagacgctggacagaggttgac

SEQ ID NO: 2946810 - DNA, 25 bp, Homo sapien
taactggtgctaagcctagacccgg

SEQ ID NO: 2946811 - DNA, 25 bp, Homo sapien
gaggttgacaatcccctcttgacaa

SEQ ID NO: 2946812 - DNA, 25 bp, Homo sapien
cattcttggcgtccgccggctttgc

SEQ ID NO: 2946813 - DNA, 25 bp, Homo sapien
gatggaattgccattcttggcgtcc

SEQ ID NO: 2946814 - DNA, 25 bp, Homo sapien
tgtcaaagccaagcggatggaattg

SEQ ID NO: 2946815 - DNA, 25 bp, Homo sapien
ctgtcaaagccaagcggatggaatt

SEQ ID NO: 2946816 - DNA, 25 bp, Homo sapien
ggaaatcagcatgaggtgggcccac

SEQ ID NO: 2946817 - DNA, 25 bp, Homo sapien
tcctaaaagtaatgagcacctggct

SEQ ID NO: 2946818 - DNA, 25 bp, Homo sapien
cagagagctgaagtgcctcgcagtc

SEQ ID NO: 2946819 - DNA, 25 bp, Homo sapien
gtgtactatggaggcagtgcacccc

SEQ ID NO: 2946820 - DNA, 25 bp, Homo sapien
caataggactgtttactgcccacct

SEQ ID NO: 2946821 - DNA, 25 bp, Homo sapien
cttcctgcgctctgagatgagctgc

SEQ ID NO: 2946822 - DNA, 25 bp, Homo sapien
gcggcgggtttgcttcctgcgctct

SEQ ID NO: 2946823 - DNA, 25 bp, Homo sapien
tgggggctggatagcttcccagcac

SEQ ID NO: 2946824 - DNA, 25 bp, Homo sapien
aacctaggcaacaactacgacgcgg

SEQ ID NO: 2946825 - DNA, 25 bp, Homo sapien
gcggccagcggcaagtttacgtgca

SEQ ID NO: 2946826 - DNA, 25 bp, Homo sapien
cccggaaggccactatgagatgctg

SEQ ID NO: 2946827 - DNA, 25 bp, Homo sapien
ccacgagggttacgaggtactcaag

SEQ ID NO: 2946828 - DNA, 25 bp, Homo sapien
tggtggggctggaaggcctgtggga

SEQ ID NO: 2946829 - DNA, 25 bp, Homo sapien
agggagtggggaggctgcgggccat

SEQ ID NO: 2946830 - DNA, 25 bp, Homo sapien
gggctggaaggcctgtgggagggag

SEQ ID NO: 2946831 - DNA, 25 bp, Homo sapien
ctggaaggcctgtgggagggagtgg

SEQ ID NO: 2946832 - DNA, 25 bp, Homo sapien
tcagctgccagggaggaacagcagg

SEQ ID NO: 2946833 - DNA, 25 bp, Homo sapien
agctgccagggaggaacagcaggga

SEQ ID NO: 2946834 - DNA, 25 bp, Homo sapien
cagctgccagggaggaacagcaggg

SEQ ID NO: 2946835 - DNA, 25 bp, Homo sapien
cccctagtgggcgtcaaagtcaggc

SEQ ID NO: 2946836 - DNA, 25 bp, Homo sapien
ggctggaagccaggactacgcttcc

SEQ ID NO: 2946837 - DNA, 25 bp, Homo sapien
ggactacgcttcctatcttactctt

SEQ ID NO: 2946838 - DNA, 25 bp, Homo sapien
ttggcaaaagtcaactggccccacc

SEQ ID NO: 2946839 - DNA, 25 bp, Homo sapien
tctcgggggagagcgagtcttaaac

SEQ ID NO: 2946840 - DNA, 25 bp, Homo sapien
agctgccccattggagaagccgact

SEQ ID NO: 2946841 - DNA, 25 bp, Homo sapien
gactttagaaattcaaatgaggctc

SEQ ID NO: 2946842 - DNA, 25 bp, Homo sapien
tagaaattcaaatgaggctctcggg

SEQ ID NO: 2946843 - DNA, 25 bp, Homo sapien
aacatcttggcgaaaaatatggctg

SEQ ID NO: 2946844 - DNA, 25 bp, Homo sapien
aattcttctcctgattgacacctgg

SEQ ID NO: 2946845 - DNA, 25 bp, Homo sapien
tccagctcagtgtccatgcgaggca

SEQ ID NO: 2946846 - DNA, 25 bp, Homo sapien
gattattagtaaccttgattccagc

SEQ ID NO: 2946847 - DNA, 25 bp, Homo sapien
agacatcacccgtggccgcgaggga

SEQ ID NO: 2946848 - DNA, 25 bp, Homo sapien
ggagggtccttgttgctgattcccg

SEQ ID NO: 2946849 - DNA, 25 bp, Homo sapien
gtccttgttgctgattcccgccgcg

SEQ ID NO: 2946850 - DNA, 25 bp, Homo sapien
ggccgcgagggaacagattttcaat

SEQ ID NO: 2946851 - DNA, 25 bp, Homo sapien
gcactgctggatgtgtaagacccta

SEQ ID NO: 2946852 - DNA, 25 bp, Homo sapien
cgttaggcttcatagtggaggacac

SEQ ID NO: 2946853 - DNA, 25 bp, Homo sapien
acttcctagtatcggcagcatgcca

SEQ ID NO: 2946854 - DNA, 25 bp, Homo sapien
acttcctcggtttggtgcgatccgc

SEQ ID NO: 2946855 - DNA, 25 bp, Homo sapien
taggtggtctaggataccaactccc

SEQ ID NO: 2946856 - DNA, 25 bp, Homo sapien
gctgaggcagcgtcacaccttcttg

SEQ ID NO: 2946857 - DNA, 25 bp, Homo sapien
gttcaggcactgtctaaagccccag

SEQ ID NO: 2946858 - DNA, 25 bp, Homo sapien
ttagaccagcgcagacataagcctt

SEQ ID NO: 2946859 - DNA, 25 bp, Homo sapien
gttcaaacagtcaacaaggccctcc

SEQ ID NO: 2946860 - DNA, 25 bp, Homo sapien
gagatcaagaaatagcctgctgtcc

SEQ ID NO: 2946861 - DNA, 25 bp, Homo sapien
tgtgccaggccatcccgtctttgga

SEQ ID NO: 2946862 - DNA, 25 bp, Homo sapien
gaccacgggaaatcatgttggacca

SEQ ID NO: 2946863 - DNA, 25 bp, Homo sapien
tgctcacccactaccttctgcctta

SEQ ID NO: 2946864 - DNA, 25 bp, Homo sapien
gccccaggcctccatctatctcctt

SEQ ID NO: 2946865 - DNA, 25 bp, Homo sapien
gaggctgaagccaggtaacacatcc

SEQ ID NO: 2946866 - DNA, 25 bp, Homo sapien
taccttctgccttacgcctagtggg

SEQ ID NO: 2946867 - DNA, 25 bp, Homo sapien
ctgctggccggacgtccggtctgca

SEQ ID NO: 2946868 - DNA, 25 bp, Homo sapien
gcctgctggccggacgtccggtctg

SEQ ID NO: 2946869 - DNA, 25 bp, Homo sapien
cgcctgctggccggacgtccggtct

SEQ ID NO: 2946870 - DNA, 25 bp, Homo sapien
gctggccggacgtccggtctgcagg

SEQ ID NO: 2946871 - DNA, 25 bp, Homo sapien
acggctgcgattatccccactttga

SEQ ID NO: 2946872 - DNA, 25 bp, Homo sapien
tattctttcaacaacgctgcacggc

SEQ ID NO: 2946873 - DNA, 25 bp, Homo sapien
ctgagtggcttgctaggcttgtatg

SEQ ID NO: 2946874 - DNA, 25 bp, Homo sapien
agatcgggggttagtctcactcttg

SEQ ID NO: 2946875 - DNA, 25 bp, Homo sapien
tctaggtagaaagtccaggtgcctg

SEQ ID NO: 2946876 - DNA, 25 bp, Homo sapien
gcttttgaggtatggcaatgagaat

SEQ ID NO: 2946877 - DNA, 25 bp, Homo sapien
cttagaaagtgaggagtgtgtgcct

SEQ ID NO: 2946878 - DNA, 25 bp, Homo sapien
tatgacttaggactggagcttagaa

SEQ ID NO: 2946879 - DNA, 25 bp, Homo sapien
ctccgcgccccactacatggggggt

SEQ ID NO: 2946880 - DNA, 25 bp, Homo sapien
ggctccgcgccccactacatggggg

SEQ ID NO: 2946881 - DNA, 25 bp, Homo sapien
gctccgcgccccactacatgggggg

SEQ ID NO: 2946882 - DNA, 25 bp, Homo sapien
cttgagttgcgagagcagggctccg

SEQ ID NO: 2946883 - DNA, 25 bp, Homo sapien
cggaggtgccggcggcttcactgct

SEQ ID NO: 2946884 - DNA, 25 bp, Homo sapien
aggtgccggcggcttcactgctgtc

SEQ ID NO: 2946885 - DNA, 25 bp, Homo sapien
gaggtgccggcggcttcactgctgt

SEQ ID NO: 2946886 - DNA, 25 bp, Homo sapien
ggaggtgccggcggcttcactgctg

SEQ ID NO: 2946887 - DNA, 25 bp, Homo sapien
tcctcattctcgcaatcgctgcagt

SEQ ID NO: 2946888 - DNA, 25 bp, Homo sapien
tgtagctgttgtcctcctcattctc

SEQ ID NO: 2946889 - DNA, 25 bp, Homo sapien
ctcgcaatcgctgcagtgctcatgg

SEQ ID NO: 2946890 - DNA, 25 bp, Homo sapien
ggttgtagctgttgtcctcctcatt

SEQ ID NO: 2946891 - DNA, 25 bp, Homo sapien
tagtgccagaattagactctctcct

SEQ ID NO: 2946892 - DNA, 25 bp, Homo sapien
tactgtgccgtgctgcattttccca

SEQ ID NO: 2946893 - DNA, 25 bp, Homo sapien
tctaccccagattcttagtgccaga

SEQ ID NO: 2946894 - DNA, 25 bp, Homo sapien
ttttcacccagaccataaccatgca

SEQ ID NO: 2946895 - DNA, 25 bp, Homo sapien
gctaggcatttcgaagacacaatcc

SEQ ID NO: 2946896 - DNA, 25 bp, Homo sapien
tcataaaaactgtagtgaggcttac

SEQ ID NO: 2946897 - DNA, 25 bp, Homo sapien
gaaactccactaatactgggctagg

SEQ ID NO: 2946898 - DNA, 25 bp, Homo sapien
gatgagacaggtaccagacacatta

SEQ ID NO: 2946899 - DNA, 25 bp, Homo sapien
caggatctcaatgacactgaagaca

SEQ ID NO: 2946900 - DNA, 25 bp, Homo sapien
tcaatagagaacaccatatttttgt

SEQ ID NO: 2946901 - DNA, 25 bp, Homo sapien
tcaagaatatgttgagcagtggctc

SEQ ID NO: 2946902 - DNA, 25 bp, Homo sapien
caaaagctctggtatactaaactcc

SEQ ID NO: 2946903 - DNA, 25 bp, Homo sapien
tactgagggtgaacgagccaattct

SEQ ID NO: 2946904 - DNA, 25 bp, Homo sapien
cgataactgctttttagaggtcaca

SEQ ID NO: 2946905 - DNA, 25 bp, Homo sapien
ccatggcactacgatctgggtgaca

SEQ ID NO: 2946906 - DNA, 25 bp, Homo sapien
tgcaccatggcactacgatctgggt

SEQ ID NO: 2946907 - DNA, 25 bp, Homo sapien
accatggcactacgatctgggtgac

SEQ ID NO: 2946908 - DNA, 25 bp, Homo sapien
actgcaccatggcactacgatctgg

SEQ ID NO: 2946909 - DNA, 25 bp, Homo sapien
ggttatgacaaattagtcgtaaaca

SEQ ID NO: 2946910 - DNA, 25 bp, Homo sapien
ccacgaccacgcttgtgaatagcca

SEQ ID NO: 2946911 - DNA, 25 bp, Homo sapien
caaaaaagctctaatgtaactactt

SEQ ID NO: 2946912 - DNA, 25 bp, Homo sapien
gagaagctaaaacaggtccagccag

SEQ ID NO: 2946913 - DNA, 25 bp, Homo sapien
acgatgtagtagtgccccacgacca

SEQ ID NO: 2946914 - DNA, 25 bp, Homo sapien
ctggccgggcctctcagtgcccctg

SEQ ID NO: 2946915 - DNA, 25 bp, Homo sapien
ggccgggcctctcagtgcccctgat

SEQ ID NO: 2946916 - DNA, 25 bp, Homo sapien
gggcctctcagtgcccctgatgcag

SEQ ID NO: 2946917 - DNA, 25 bp, Homo sapien
ctctcagtgcccctgatgcagaaag

SEQ ID NO: 2946918 - DNA, 25 bp, Homo sapien
gtccactcttgcctcccacagcttc

SEQ ID NO: 2946919 - DNA, 25 bp, Homo sapien
ctgtccactcttgcctcccacagct

SEQ ID NO: 2946920 - DNA, 25 bp, Homo sapien
gctgtccactcttgcctcccacagc

SEQ ID NO: 2946921 - DNA, 25 bp, Homo sapien
ccactcttgcctcccacagcttcca

SEQ ID NO: 2946922 - DNA, 25 bp, Homo sapien
tggatctctttgccttcacaatctt

SEQ ID NO: 2946923 - DNA, 25 bp, Homo sapien
ctggatctctttgccttcacaatct

SEQ ID NO: 2946924 - DNA, 25 bp, Homo sapien
tgaagaacccaggtccagaaagggc

SEQ ID NO: 2946925 - DNA, 25 bp, Homo sapien
ccagggtaatggcaccaaagacgaa

SEQ ID NO: 2946926 - DNA, 25 bp, Homo sapien
ggatctggagcacaagacagtatga

SEQ ID NO: 2946927 - DNA, 25 bp, Homo sapien
gaccttccttaatcaagcctgttgg

SEQ ID NO: 2946928 - DNA, 25 bp, Homo sapien
ctttttggctccagtgtcattggct

SEQ ID NO: 2946929 - DNA, 25 bp, Homo sapien
tgggagtcagtgtctgacctgctgt

SEQ ID NO: 2946930 - DNA, 25 bp, Homo sapien
cttgggagtcagtgtctgacctgct

SEQ ID NO: 2946931 - DNA, 25 bp, Homo sapien
ttgggagtcagtgtctgacctgctg

SEQ ID NO: 2946932 - DNA, 25 bp, Homo sapien
gctgcggtcagccatgttcgtactt

SEQ ID NO: 2946933 - DNA, 25 bp, Homo sapien
tcagccatgttcgtacttctgcact

SEQ ID NO: 2946934 - DNA, 25 bp, Homo sapien
gaggctgcggtcagccatgttcgta

SEQ ID NO: 2946935 - DNA, 25 bp, Homo sapien
tgcggtcagccatgttcgtacttct

SEQ ID NO: 2946936 - DNA, 25 bp, Homo sapien
taatcccagaggtcattacaaccag

SEQ ID NO: 2946937 - DNA, 25 bp, Homo sapien
cccagaggtcattacaaccagagaa

SEQ ID NO: 2946938 - DNA, 25 bp, Homo sapien
atcccagaggtcattacaaccagag

SEQ ID NO: 2946939 - DNA, 25 bp, Homo sapien
cctaatcccagaggtcattacaacc

SEQ ID NO: 2946940 - DNA, 25 bp, Homo sapien
tcccagaactggtagcttcgcttgc

SEQ ID NO: 2946941 - DNA, 25 bp, Homo sapien
tggtagcttcgcttgctagcctcct

SEQ ID NO: 2946942 - DNA, 25 bp, Homo sapien
tgcgtatcccagaactggtagcttc

SEQ ID NO: 2946943 - DNA, 25 bp, Homo sapien
actgagaacagctcaatggccttct

SEQ ID NO: 2946944 - DNA, 25 bp, Homo sapien
aaaagttcatctgcggctcttacag

SEQ ID NO: 2946945 - DNA, 25 bp, Homo sapien
tgtggagtgccctcgatgccaagaa

SEQ ID NO: 2946946 - DNA, 25 bp, Homo sapien
tactgcttccgttgacatgagtggg

SEQ ID NO: 2946947 - DNA, 25 bp, Homo sapien
caatgcggtgcaactgtgaaggact

SEQ ID NO: 2946948 - DNA, 25 bp, Homo sapien
aggtccaaagcatcccaggtgaagc

SEQ ID NO: 2946949 - DNA, 25 bp, Homo sapien
ggctcctggcggatattgtccttgt

SEQ ID NO: 2946950 - DNA, 25 bp, Homo sapien
tcctggcggatattgtccttgtcag

SEQ ID NO: 2946951 - DNA, 25 bp, Homo sapien
ggcggatattgtccttgtcaggctc

SEQ ID NO: 2946952 - DNA, 25 bp, Homo sapien
attcaggagggtgtacagttctttt

SEQ ID NO: 2946953 - DNA, 25 bp, Homo sapien
tcaggagggtgtacagttcttttag

SEQ ID NO: 2946954 - DNA, 25 bp, Homo sapien
ttcaggagggtgtacagttctttta

SEQ ID NO: 2946955 - DNA, 25 bp, Homo sapien
gctaatgaacccaaccaatttccga

SEQ ID NO: 2946956 - DNA, 25 bp, Homo sapien
tgtcatagatatggatgtttgctgg

SEQ ID NO: 2946957 - DNA, 25 bp, Homo sapien
caatttccgacttgagaccactcga

SEQ ID NO: 2946958 - DNA, 25 bp, Homo sapien
gctgggatggcgctaatgaacccaa

SEQ ID NO: 2946959 - DNA, 25 bp, Homo sapien
ctgcaggtgccaacgggctttggta

SEQ ID NO: 2946960 - DNA, 25 bp, Homo sapien
ctttggtagtaccaccccggcagtg

SEQ ID NO: 2946961 - DNA, 25 bp, Homo sapien
tgaacccgcctggtgatctctcgga

SEQ ID NO: 2946962 - DNA, 25 bp, Homo sapien
gacacacaggaagttgatctctacc

SEQ ID NO: 2946963 - DNA, 25 bp, Homo sapien
tcggtagagcttcatggtgcgctgc

SEQ ID NO: 2946964 - DNA, 25 bp, Homo sapien
tcaggtgggagaacttcacttcaat

SEQ ID NO: 2946965 - DNA, 25 bp, Homo sapien
tcacttcaatcagcttccgtgggtt

SEQ ID NO: 2946966 - DNA, 25 bp, Homo sapien
tccgtgggtttagggaccgatgcca

SEQ ID NO: 2946967 - DNA, 25 bp, Homo sapien
gcgctgccgtgtgtatgaaggttca

SEQ ID NO: 2946968 - DNA, 25 bp, Homo sapien
tctgaagactatgggctggttcgct

SEQ ID NO: 2946969 - DNA, 25 bp, Homo sapien
agaccctgtagtgcatctgcgctgg

SEQ ID NO: 2946970 - DNA, 25 bp, Homo sapien
ggtgttctctgagcctttcaacaga

SEQ ID NO: 2946971 - DNA, 25 bp, Homo sapien
tttaaggttgcccagtccttcagcc

SEQ ID NO: 2946972 - DNA, 25 bp, Homo sapien
aggttgcccagtccttcagccaaat

SEQ ID NO: 2946973 - DNA, 25 bp, Homo sapien
aaggttgcccagtccttcagccaaa

SEQ ID NO: 2946974 - DNA, 25 bp, Homo sapien
taaggttgcccagtccttcagccaa

SEQ ID NO: 2946975 - DNA, 25 bp, Homo sapien
aaagaatccctacctgaagccagcc

SEQ ID NO: 2946976 - DNA, 25 bp, Homo sapien
aaaagaatccctacctgaagccagc

SEQ ID NO: 2946977 - DNA, 25 bp, Homo sapien
aaaaagaatccctacctgaagccag

SEQ ID NO: 2946978 - DNA, 25 bp, Homo sapien
aagaatccctacctgaagccagcca

SEQ ID NO: 2946979 - DNA, 25 bp, Homo sapien
ggctcagatacacaaaggtggcctt

SEQ ID NO: 2946980 - DNA, 25 bp, Homo sapien
taccggggctggtagaacatcccca

SEQ ID NO: 2946981 - DNA, 25 bp, Homo sapien
tgtgatcctgtggagcaaataccgg

SEQ ID NO: 2946982 - DNA, 25 bp, Homo sapien
tccccagaggctcagatacacaaag

SEQ ID NO: 2946983 - DNA, 25 bp, Homo sapien
cctggatctatccatggcaaggaca

SEQ ID NO: 2946984 - DNA, 25 bp, Homo sapien
tcaccctggatctatccatggcaag

SEQ ID NO: 2946985 - DNA, 25 bp, Homo sapien
agatgagctgatcaccctggatcta

SEQ ID NO: 2946986 - DNA, 25 bp, Homo sapien
accctggatctatccatggcaagga

SEQ ID NO: 2946987 - DNA, 25 bp, Homo sapien
gagctggtgcactactggaatgtcc

SEQ ID NO: 2946988 - DNA, 25 bp, Homo sapien
tcctggctcatgacgggcgtaaggt

SEQ ID NO: 2946989 - DNA, 25 bp, Homo sapien
aaagtgtcgatgatattctcctggg

SEQ ID NO: 2946990 - DNA, 25 bp, Homo sapien
tttgtttccattggtcgcagcccag

SEQ ID NO: 2946991 - DNA, 25 bp, Homo sapien
gaggacaagggcgtcgctcatgagg

SEQ ID NO: 2946992 - DNA, 25 bp, Homo sapien
tctgggtgtgaacgttgtagaaaga

SEQ ID NO: 2946993 - DNA, 25 bp, Homo sapien
taagcagctttgagactcttgtggg

SEQ ID NO: 2946994 - DNA, 25 bp, Homo sapien
ggttggatggttcatgatggtggag

SEQ ID NO: 2946995 - DNA, 25 bp, Homo sapien
gaacaaggttccctcagaagctccg

SEQ ID NO: 2946996 - DNA, 25 bp, Homo sapien
gaagctccgctgcttccacgttaat

SEQ ID NO: 2946997 - DNA, 25 bp, Homo sapien
gttctcaggacactctgagcgcccc

SEQ ID NO: 2946998 - DNA, 25 bp, Homo sapien
agccacaagaacaaggttccctcag

SEQ ID NO: 2946999 - DNA, 25 bp, Homo sapien
catgagatccagtgcattgaacaca

SEQ ID NO: 2947000 - DNA, 25 bp, Homo sapien
taatactgcaggttgccgtccccta

SEQ ID NO: 2947001 - DNA, 25 bp, Homo sapien
ctccatgagatccagtgcattgaac

SEQ ID NO: 2947002 - DNA, 25 bp, Homo sapien
gttgccgtcccctatgccaaacttg

SEQ ID NO: 2947003 - DNA, 25 bp, Homo sapien
agggttcacacgtccatcagacctc

SEQ ID NO: 2947004 - DNA, 25 bp, Homo sapien
agctcacccctatgtcccctgtggc

SEQ ID NO: 2947005 - DNA, 25 bp, Homo sapien
ggaaaactggcccacgctccagctc

SEQ ID NO: 2947006 - DNA, 25 bp, Homo sapien
tccacaccagggttcacacgtccat

SEQ ID NO: 2947007 - DNA, 25 bp, Homo sapien
cgaattttcagtggctttatccaga

SEQ ID NO: 2947008 - DNA, 25 bp, Homo sapien
ccatttcctggttcgaattttcagt

SEQ ID NO: 2947009 - DNA, 25 bp, Homo sapien
tatccagaatcgcactggtgactgg

SEQ ID NO: 2947010 - DNA, 25 bp, Homo sapien
gtgtgtgaaaattggaccaacagtg

SEQ ID NO: 2947011 - DNA, 25 bp, Homo sapien
tggaaaacacggagaccagagacac

SEQ ID NO: 2947012 - DNA, 25 bp, Homo sapien
aatacaattgtcaagttcgctggcg

SEQ ID NO: 2947013 - DNA, 25 bp, Homo sapien
ggtaaagccggttcagttctgctcc

SEQ ID NO: 2947014 - DNA, 25 bp, Homo sapien
agcccacgccatcgcaatacaattg

SEQ ID NO: 2947015 - DNA, 25 bp, Homo sapien
agttacattcccttgatcacggctg

SEQ ID NO: 2947016 - DNA, 25 bp, Homo sapien
attcccttgatcacggctgcatgag

SEQ ID NO: 2947017 - DNA, 25 bp, Homo sapien
gatcacggctgcatgaggatgtaat

SEQ ID NO: 2947018 - DNA, 25 bp, Homo sapien
cagcagttacattcccttgatcacg

SEQ ID NO: 2947019 - DNA, 25 bp, Homo sapien
ttaactccattatatgccaatcacg

SEQ ID NO: 2947020 - DNA, 25 bp, Homo sapien
aactccattatatgccaatcacgag

SEQ ID NO: 2947021 - DNA, 25 bp, Homo sapien
cgttaactccattatatgccaatca

SEQ ID NO: 2947022 - DNA, 25 bp, Homo sapien
ccgttaactccattatatgccaatc

SEQ ID NO: 2947023 - DNA, 25 bp, Homo sapien
gagtcaaggagcaaacgtcagtcac

SEQ ID NO: 2947024 - DNA, 25 bp, Homo sapien
caaaggtctggacagggtgagccac

SEQ ID NO: 2947025 - DNA, 25 bp, Homo sapien
cagatcaagactaggacagggagcc

SEQ ID NO: 2947026 - DNA, 25 bp, Homo sapien
tgggtcaaccgaaacagagctcact

SEQ ID NO: 2947027 - DNA, 25 bp, Homo sapien
gagtccgtggtcaaatgcagagtca

SEQ ID NO: 2947028 - DNA, 25 bp, Homo sapien
acataaagcagagtccgaggagccg

SEQ ID NO: 2947029 - DNA, 25 bp, Homo sapien
tatacaggcctcgatccggagtgga

SEQ ID NO: 2947030 - DNA, 25 bp, Homo sapien
cttggtttgagacagccatggcgct

SEQ ID NO: 2947031 - DNA, 25 bp, Homo sapien
tgggccataggagcctgagtgactt

SEQ ID NO: 2947032 - DNA, 25 bp, Homo sapien
gttctctcagcccaaagctaagggc

SEQ ID NO: 2947033 - DNA, 25 bp, Homo sapien
caacacatagggctatgttctctca

SEQ ID NO: 2947034 - DNA, 25 bp, Homo sapien
catgggccataggagcctgagtgac

SEQ ID NO: 2947035 - DNA, 25 bp, Homo sapien
tttatgtagagatggcggggggggc

SEQ ID NO: 2947036 - DNA, 25 bp, Homo sapien
ttatgtagagatggcggggggggcg

SEQ ID NO: 2947037 - DNA, 25 bp, Homo sapien
taaattttatgtagagatggcgggg

SEQ ID NO: 2947038 - DNA, 25 bp, Homo sapien
aattttatgtagagatggcgggggg

SEQ ID NO: 2947039 - DNA, 25 bp, Homo sapien
caacactgacaagggtgggctctgg

SEQ ID NO: 2947040 - DNA, 25 bp, Homo sapien
gaaattaaaatctccactcccatgt

SEQ ID NO: 2947041 - DNA, 25 bp, Homo sapien
acacctggcagtcccactaagtcaa

SEQ ID NO: 2947042 - DNA, 25 bp, Homo sapien
gacgctgagccccaccaaaggaggg

SEQ ID NO: 2947043 - DNA, 25 bp, Homo sapien
cgagcgctgaggctccgggcttcca

SEQ ID NO: 2947044 - DNA, 25 bp, Homo sapien
gagcaggggcgagcgctgaggctcc

SEQ ID NO: 2947045 - DNA, 25 bp, Homo sapien
cgggcttccaggccaccgcctggcc

SEQ ID NO: 2947046 - DNA, 25 bp, Homo sapien
aggggcgagcgctgaggctccgggc

SEQ ID NO: 2947047 - DNA, 25 bp, Homo sapien
ttgacgtcgcggacaactacaccgc

SEQ ID NO: 2947048 - DNA, 25 bp, Homo sapien
gggttgacgtcgcggacaactacac

SEQ ID NO: 2947049 - DNA, 25 bp, Homo sapien
ccacgggttgacgtcgcggacaact

SEQ ID NO: 2947050 - DNA, 25 bp, Homo sapien
cacgggttgacgtcgcggacaacta

SEQ ID NO: 2947051 - DNA, 25 bp, Homo sapien
taaaaaaagtcatgtcctgtggtca

SEQ ID NO: 2947052 - DNA, 25 bp, Homo sapien
tcatgtcctgtggtcaggtgttcta

SEQ ID NO: 2947053 - DNA, 25 bp, Homo sapien
tcaggtgttctagaggaaggacatc

SEQ ID NO: 2947054 - DNA, 25 bp, Homo sapien
cctgtggtcaggtgttctagaggaa

SEQ ID NO: 2947055 - DNA, 25 bp, Homo sapien
actcagctctctagacacttaggca

SEQ ID NO: 2947056 - DNA, 25 bp, Homo sapien
ggtggaaatccgcatctgttcgctg

SEQ ID NO: 2947057 - DNA, 25 bp, Homo sapien
gatcatgcaaatagtttctcagagc

SEQ ID NO: 2947058 - DNA, 25 bp, Homo sapien
tagtgaaaggtcgtggcgtcctagc

SEQ ID NO: 2947059 - DNA, 25 bp, Homo sapien
atgagagagcctgtttcacattcgg

SEQ ID NO: 2947060 - DNA, 25 bp, Homo sapien
cctgtttcacattcggcttacctac

SEQ ID NO: 2947061 - DNA, 25 bp, Homo sapien
tcagggcggggcgaacagtctccca

SEQ ID NO: 2947062 - DNA, 25 bp, Homo sapien
ccgggatggcgacgcagatcgaggg

SEQ ID NO: 2947063 - DNA, 25 bp, Homo sapien
cagtgccagatgtgtccgtccccag

SEQ ID NO: 2947064 - DNA, 25 bp, Homo sapien
tcctttaggtgcacatctccaactc

SEQ ID NO: 2947065 - DNA, 25 bp, Homo sapien
tgccagatgtgtccgtccccagatg

SEQ ID NO: 2947066 - DNA, 25 bp, Homo sapien
cccagatgcgcctcctttaggtgca

SEQ ID NO: 2947067 - DNA, 25 bp, Homo sapien
ctgcaagaagcagccttcgtgtgag

SEQ ID NO: 2947068 - DNA, 25 bp, Homo sapien
agttgtggttgaggagcctcctttt

SEQ ID NO: 2947069 - DNA, 25 bp, Homo sapien
cagccttcgtgtgagggggcctcca

SEQ ID NO: 2947070 - DNA, 25 bp, Homo sapien
ttgtggttgaggagcctccttttcc

SEQ ID NO: 2947071 - DNA, 25 bp, Homo sapien
actgtttctggcagtcgggctctgg

SEQ ID NO: 2947072 - DNA, 25 bp, Homo sapien
ggcaggttctggatgacgctcactg

SEQ ID NO: 2947073 - DNA, 25 bp, Homo sapien
ggttctggatgacgctcactgcagc

SEQ ID NO: 2947074 - DNA, 25 bp, Homo sapien
aactgtttctggcagtcgggctctg

SEQ ID NO: 2947075 - DNA, 25 bp, Homo sapien
aagccagggcaaagcatcactccca

SEQ ID NO: 2947076 - DNA, 25 bp, Homo sapien
tgaatgcgagtccaaatgcgagtcc

SEQ ID NO: 2947077 - DNA, 25 bp, Homo sapien
catctggactaggataggaagcgga

SEQ ID NO: 2947078 - DNA, 25 bp, Homo sapien
aaactgcagtgatcaggaccattct

SEQ ID NO: 2947079 - DNA, 25 bp, Homo sapien
actgtagaatcgcagcatctcttca

SEQ ID NO: 2947080 - DNA, 25 bp, Homo sapien
cccatggtggcctgcttgtagtaac

SEQ ID NO: 2947081 - DNA, 25 bp, Homo sapien
aatcgcagcatctcttcataggagg

SEQ ID NO: 2947082 - DNA, 25 bp, Homo sapien
tatatcgtccaatggggtcccagaa

SEQ ID NO: 2947083 - DNA, 25 bp, Homo sapien
tgtgagagggctgcttgacagctga

SEQ ID NO: 2947084 - DNA, 25 bp, Homo sapien
gtgagagggctgcttgacagctgag

SEQ ID NO: 2947085 - DNA, 25 bp, Homo sapien
cttgcccagactgttccaggcgtcc

SEQ ID NO: 2947086 - DNA, 25 bp, Homo sapien
tctgtgccaccagtttcatttcagt

SEQ ID NO: 2947087 - DNA, 25 bp, Homo sapien
ttcagtgatgtaggcagacatggcc

SEQ ID NO: 2947088 - DNA, 25 bp, Homo sapien
cttctgtgccaccagtttcatttca

SEQ ID NO: 2947089 - DNA, 25 bp, Homo sapien
gtgccaccagtttcatttcagtgat

SEQ ID NO: 2947090 - DNA, 25 bp, Homo sapien
gggctcgaagtaaccaaacatgtcc

SEQ ID NO: 2947091 - DNA, 25 bp, Homo sapien
cacccaggggcactgtgtcgatcac

SEQ ID NO: 2947092 - DNA, 25 bp, Homo sapien
catgtcagggatcacctggtacagg

SEQ ID NO: 2947093 - DNA, 25 bp, Homo sapien
gggcctcggcatgtcagggatcacc

SEQ ID NO: 2947094 - DNA, 25 bp, Homo sapien
aaacagccccaacatctccattcac

SEQ ID NO: 2947095 - DNA, 25 bp, Homo sapien
ctgaaacagccccaacatctccatt

SEQ ID NO: 2947096 - DNA, 25 bp, Homo sapien
gaaacagccccaacatctccattca

SEQ ID NO: 2947097 - DNA, 25 bp, Homo sapien
tctgaaacagccccaacatctccat

SEQ ID NO: 2947098 - DNA, 25 bp, Homo sapien
gggagagcaggagtgtgcactgggc

SEQ ID NO: 2947099 - DNA, 25 bp, Homo sapien
agagcaggagtgtgcactgggcaga

SEQ ID NO: 2947100 - DNA, 25 bp, Homo sapien
ggagggagagcaggagtgtgcactg

SEQ ID NO: 2947101 - DNA, 25 bp, Homo sapien
gagagcaggagtgtgcactgggcag

SEQ ID NO: 2947102 - DNA, 25 bp, Homo sapien
aggggttggtagagttactgcccag

SEQ ID NO: 2947103 - DNA, 25 bp, Homo sapien
ttggtagagttactgcccagaggga

SEQ ID NO: 2947104 - DNA, 25 bp, Homo sapien
ggttggtagagttactgcccagagg

SEQ ID NO: 2947105 - DNA, 25 bp, Homo sapien
tggtagagttactgcccagagggaa

SEQ ID NO: 2947106 - DNA, 25 bp, Homo sapien
gaatcacagaaaacctcggagtcca

SEQ ID NO: 2947107 - DNA, 25 bp, Homo sapien
ggaatcacagaaaacctcggagtcc

SEQ ID NO: 2947108 - DNA, 25 bp, Homo sapien
aatcacagaaaacctcggagtccag

SEQ ID NO: 2947109 - DNA, 25 bp, Homo sapien
atcacagaaaacctcggagtccagg

SEQ ID NO: 2947110 - DNA, 25 bp, Homo sapien
tgggagtgggagcacagtggggtgg

SEQ ID NO: 2947111 - DNA, 25 bp, Homo sapien
tgggagcacagtggggtgggaaaag

SEQ ID NO: 2947112 - DNA, 25 bp, Homo sapien
agtgggagcacagtggggtgggaaa

SEQ ID NO: 2947113 - DNA, 25 bp, Homo sapien
ggagtgggagcacagtggggtggga

SEQ ID NO: 2947114 - DNA, 25 bp, Homo sapien
gggatcacgctttcctccagatgct

SEQ ID NO: 2947115 - DNA, 25 bp, Homo sapien
gatcacgctttcctccagatgctgc

SEQ ID NO: 2947116 - DNA, 25 bp, Homo sapien
cctgggatcacgctttcctccagat

SEQ ID NO: 2947117 - DNA, 25 bp, Homo sapien
tgggatcacgctttcctccagatgc

SEQ ID NO: 2947118 - DNA, 25 bp, Homo sapien
tctgagatttccaaacgggggagtc

SEQ ID NO: 2947119 - DNA, 25 bp, Homo sapien
aaattaggagaagatgtcatttctc

SEQ ID NO: 2947120 - DNA, 25 bp, Homo sapien
atacaggacctgacacacaacagga

SEQ ID NO: 2947121 - DNA, 25 bp, Homo sapien
cagagaatatggatgacttcctgag

SEQ ID NO: 2947122 - DNA, 25 bp, Homo sapien
caggaaagtgtaggagtggaaccca

SEQ ID NO: 2947123 - DNA, 25 bp, Homo sapien
cagcatggccgcttatgacacagat

SEQ ID NO: 2947124 - DNA, 25 bp, Homo sapien
ccaagtgtgattcttgcaaagtcca

SEQ ID NO: 2947125 - DNA, 25 bp, Homo sapien
ggaacccagtcgctgtaccaagtgt

SEQ ID NO: 2947126 - DNA, 25 bp, Homo sapien
tggggccccggcgggctgccccgca

SEQ ID NO: 2947127 - DNA, 25 bp, Homo sapien
ctgcatgctctcctgtagtgctcga

SEQ ID NO: 2947128 - DNA, 25 bp, Homo sapien
gtagtgctcgaactgtccccagcag

SEQ ID NO: 2947129 - DNA, 25 bp, Homo sapien
tgctctcctgtagtgctcgaactgt

SEQ ID NO: 2947130 - DNA, 25 bp, Homo sapien
tctcctgtagtgctcgaactgtccc

SEQ ID NO: 2947131 - DNA, 25 bp, Homo sapien
ggcggtttcaggataactggagaaa

SEQ ID NO: 2947132 - DNA, 25 bp, Homo sapien
aaaggcggtttcaggataactggag

SEQ ID NO: 2947133 - DNA, 25 bp, Homo sapien
tgtgtggtcctagcctggaaaaaca

SEQ ID NO: 2947134 - DNA, 25 bp, Homo sapien
aatgtgtggtcctagcctggaaaaa

SEQ ID NO: 2947135 - DNA, 25 bp, Homo sapien
tatcgaggaaccacccatgaggatg

SEQ ID NO: 2947136 - DNA, 25 bp, Homo sapien
cacctctgatgtagtctggtccaaa

SEQ ID NO: 2947137 - DNA, 25 bp, Homo sapien
ccagtggtccatgctagagttacta

SEQ ID NO: 2947138 - DNA, 25 bp, Homo sapien
gactggatattctccgactgcagga

SEQ ID NO: 2947139 - DNA, 25 bp, Homo sapien
aaaagaatgactgtggcagaccggg

SEQ ID NO: 2947140 - DNA, 25 bp, Homo sapien
gaatggccaaagttgtgactgtctg

SEQ ID NO: 2947141 - DNA, 25 bp, Homo sapien
gatccggtatgaaagggtcttgaat

SEQ ID NO: 2947142 - DNA, 25 bp, Homo sapien
aagattcatcaggtcgtgttataag

SEQ ID NO: 2947143 - DNA, 25 bp, Homo sapien
cactggacgacgaagggccacagga

SEQ ID NO: 2947144 - DNA, 25 bp, Homo sapien
aagagccactggacgacgaagggcc

SEQ ID NO: 2947145 - DNA, 25 bp, Homo sapien
ggtccgaaacattcggaagagccac

SEQ ID NO: 2947146 - DNA, 25 bp, Homo sapien
agcccaaggggccatggccgagcac

SEQ ID NO: 2947147 - DNA, 25 bp, Homo sapien
aagatagtctcagttggctgcagag

SEQ ID NO: 2947148 - DNA, 25 bp, Homo sapien
gcaagatagtctcagttggctgcag

SEQ ID NO: 2947149 - DNA, 25 bp, Homo sapien
caagatagtctcagttggctgcaga

SEQ ID NO: 2947150 - DNA, 25 bp, Homo sapien
gggacgtgtaccacaactgcagcct

SEQ ID NO: 2947151 - DNA, 25 bp, Homo sapien
tgtaagtgaatcttcaatgaagacg

SEQ ID NO: 2947152 - DNA, 25 bp, Homo sapien
gaggaaagcgagcaaactgcgctca

SEQ ID NO: 2947153 - DNA, 25 bp, Homo sapien
agtgaaacattcctttgtaagtgaa

SEQ ID NO: 2947154 - DNA, 25 bp, Homo sapien
tgcagcggcaggaacagtacgtaat

SEQ ID NO: 2947155 - DNA, 25 bp, Homo sapien
ggtaagtccagtgcgtgaaacccag

SEQ ID NO: 2947156 - DNA, 25 bp, Homo sapien
gttaaaactaccgatgacgctgcct

SEQ ID NO: 2947157 - DNA, 25 bp, Homo sapien
tcaagtcagtaaagggttaagcgcc

SEQ ID NO: 2947158 - DNA, 25 bp, Homo sapien
tgaggctggtgttgatattctgaca

SEQ ID NO: 2947159 - DNA, 25 bp, Homo sapien
acccaactgggggaacgctctcgat

SEQ ID NO: 2947160 - DNA, 25 bp, Homo sapien
aacgctctcgattgccacctactgt

SEQ ID NO: 2947161 - DNA, 25 bp, Homo sapien
gaggtggttgggattccaggctccc

SEQ ID NO: 2947162 - DNA, 25 bp, Homo sapien
cgcttggagtacaggccggttttga

SEQ ID NO: 2947163 - DNA, 25 bp, Homo sapien
tcatgacaaggctgggcgagcagct

SEQ ID NO: 2947164 - DNA, 25 bp, Homo sapien
aacttactggcctcggagtcatgac

SEQ ID NO: 2947165 - DNA, 25 bp, Homo sapien
ctccaaacttggaaagcggcgctcg

SEQ ID NO: 2947166 - DNA, 25 bp, Homo sapien
gatttggccaccttatagctccgtt

SEQ ID NO: 2947167 - DNA, 25 bp, Homo sapien
aacaggagaaagcacgcaagctaca

SEQ ID NO: 2947168 - DNA, 25 bp, Homo sapien
catatagctaaatttacgaaaccaa

SEQ ID NO: 2947169 - DNA, 25 bp, Homo sapien
tgcattataacttggtcaaattact

SEQ ID NO: 2947170 - DNA, 25 bp, Homo sapien
tatagagagcacgtagaattggaca

SEQ ID NO: 2947171 - DNA, 25 bp, Homo sapien
tagacttttgaatggccgaggcaga

SEQ ID NO: 2947172 - DNA, 25 bp, Homo sapien
cagggcctccctacgtttaagagca

SEQ ID NO: 2947173 - DNA, 25 bp, Homo sapien
gattgtagccactttccactcgcct

SEQ ID NO: 2947174 - DNA, 25 bp, Homo sapien
gaacctctgtgctagtgatttgagc

SEQ ID NO: 2947175 - DNA, 25 bp, Homo sapien
caaaagcatgcttcctaatgggagg

SEQ ID NO: 2947176 - DNA, 25 bp, Homo sapien
tgtgccagaacaggaccaactcagt

SEQ ID NO: 2947177 - DNA, 25 bp, Homo sapien
tgagcaacgcaattgccctcagaag

SEQ ID NO: 2947178 - DNA, 25 bp, Homo sapien
cacgagctcggtgcctgaaggtctc

SEQ ID NO: 2947179 - DNA, 25 bp, Homo sapien
agcaaccactaattccccctgggag

SEQ ID NO: 2947180 - DNA, 25 bp, Homo sapien
cgaccctcttaaactactgtagcaa

SEQ ID NO: 2947181 - DNA, 25 bp, Homo sapien
ggcacttggaaaccttcacgagctc

SEQ ID NO: 2947182 - DNA, 25 bp, Homo sapien
gcgacgccagattccagaggctggc

SEQ ID NO: 2947183 - DNA, 25 bp, Homo sapien
gagggactcccacttcgactggaga

SEQ ID NO: 2947184 - DNA, 25 bp, Homo sapien
gagaggctggtgaaacggcttccct

SEQ ID NO: 2947185 - DNA, 25 bp, Homo sapien
ccacaagtcggcgtggcagtcagct

SEQ ID NO: 2947186 - DNA, 25 bp, Homo sapien
cagggagggtgaaggttggagtctc

SEQ ID NO: 2947187 - DNA, 25 bp, Homo sapien
ctctcacagagtgcggggttcttcg

SEQ ID NO: 2947188 - DNA, 25 bp, Homo sapien
gtctcctcggccgagcccggtcctc

SEQ ID NO: 2947189 - DNA, 25 bp, Homo sapien
tcgcctctcacagagtgcggggttc

SEQ ID NO: 2947190 - DNA, 25 bp, Homo sapien
cagaaaatagatccggctaaggtgg

SEQ ID NO: 2947191 - DNA, 25 bp, Homo sapien
aggcgacgagaagctcggcggccat

SEQ ID NO: 2947192 - DNA, 25 bp, Homo sapien
gcagcaggcgcggagggatccttgg

SEQ ID NO: 2947193 - DNA, 25 bp, Homo sapien
cctttgaggaaggcgacgagaagct

SEQ ID NO: 2947194 - DNA, 25 bp, Homo sapien
agcctggacgcgcggtgcctgctgg

SEQ ID NO: 2947195 - DNA, 25 bp, Homo sapien
ctggtcaagccgctcaggccactaa

SEQ ID NO: 2947196 - DNA, 25 bp, Homo sapien
gtcaagccgctcaggccactaagat

SEQ ID NO: 2947197 - DNA, 25 bp, Homo sapien
tcaagccgctcaggccactaagatg

SEQ ID NO: 2947198 - DNA, 25 bp, Homo sapien
gtcggtgcaattcccaacgcctgag

SEQ ID NO: 2947199 - DNA, 25 bp, Homo sapien
tgtcaagggctatgcacaccactac

SEQ ID NO: 2947200 - DNA, 25 bp, Homo sapien
caccactacatctgtgtgcctttct

SEQ ID NO: 2947201 - DNA, 25 bp, Homo sapien
gtgtgcctttctgtgcgactgcctg

SEQ ID NO: 2947202 - DNA, 25 bp, Homo sapien
tccaccgctggttttcacacctcca

SEQ ID NO: 2947203 - DNA, 25 bp, Homo sapien
aggactcatgtcctgtactgtcctc

SEQ ID NO: 2947204 - DNA, 25 bp, Homo sapien
tgctcctcgggtccctcaccaggac

SEQ ID NO: 2947205 - DNA, 25 bp, Homo sapien
atgggattcaggggccgtcttctct

SEQ ID NO: 2947206 - DNA, 25 bp, Homo sapien
ttgaacaacaacagaaacctaaatc

SEQ ID NO: 2947207 - DNA, 25 bp, Homo sapien
ttccaaatctttcagcagacgcctg

SEQ ID NO: 2947208 - DNA, 25 bp, Homo sapien
gttccaaatctttcagcagacgcct

SEQ ID NO: 2947209 - DNA, 25 bp, Homo sapien
tccaaatctttcagcagacgcctgg

SEQ ID NO: 2947210 - DNA, 25 bp, Homo sapien
cattacaggcggtctggttcggagt

SEQ ID NO: 2947211 - DNA, 25 bp, Homo sapien
cggtctggttcggagtggccatcat

SEQ ID NO: 2947212 - DNA, 25 bp, Homo sapien
ctgcattacaggcggtctggttcgg

SEQ ID NO: 2947213 - DNA, 25 bp, Homo sapien
caggcggtctggttcggagtggcca

SEQ ID NO: 2947214 - DNA, 25 bp, Homo sapien
ttggcctcctccagggccactggtg

SEQ ID NO: 2947215 - DNA, 25 bp, Homo sapien
cttggcctcctccagggccactggt

SEQ ID NO: 2947216 - DNA, 25 bp, Homo sapien
gcctcctccagggccactggtgact

SEQ ID NO: 2947217 - DNA, 25 bp, Homo sapien
tggcctcctccagggccactggtga

SEQ ID NO: 2947218 - DNA, 25 bp, Homo sapien
gatcttcatcctctgagtggctctc

SEQ ID NO: 2947219 - DNA, 25 bp, Homo sapien
gtggctctccatccgcggtgtcagg

SEQ ID NO: 2947220 - DNA, 25 bp, Homo sapien
ctctgagtggctctccatccgcggt

SEQ ID NO: 2947221 - DNA, 25 bp, Homo sapien
cgacagccccagcaagatcttcatc

SEQ ID NO: 2947222 - DNA, 25 bp, Homo sapien
cgacggtgtttcttccgggccagca

SEQ ID NO: 2947223 - DNA, 25 bp, Homo sapien
tccaggtagggtcgccagtgccttt

SEQ ID NO: 2947224 - DNA, 25 bp, Homo sapien
ccacgggctggcctttggcgaacat

SEQ ID NO: 2947225 - DNA, 25 bp, Homo sapien
ggttctcctgacgaagccgctggtt

SEQ ID NO: 2947226 - DNA, 25 bp, Homo sapien
cacagggtgttgacggtggttttca

SEQ ID NO: 2947227 - DNA, 25 bp, Homo sapien
tagctgttctcagggcgcacagggt

SEQ ID NO: 2947228 - DNA, 25 bp, Homo sapien
tgggagtctgaaccgatttagctgt

SEQ ID NO: 2947229 - DNA, 25 bp, Homo sapien
gcctgagtgtgcacgaaatgggacc

SEQ ID NO: 2947230 - DNA, 25 bp, Homo sapien
tctgaccctattgcaggcagggtct

SEQ ID NO: 2947231 - DNA, 25 bp, Homo sapien
cctcatactctgaccctattgcagg

SEQ ID NO: 2947232 - DNA, 25 bp, Homo sapien
tccctcatactctgaccctattgca

SEQ ID NO: 2947233 - DNA, 25 bp, Homo sapien
ctctccctcatactctgaccctatt

SEQ ID NO: 2947234 - DNA, 25 bp, Homo sapien
caacacacctgaatgttttgtttgg

SEQ ID NO: 2947235 - DNA, 25 bp, Homo sapien
cagggtctcatcatgttgcacaggt

SEQ ID NO: 2947236 - DNA, 25 bp, Homo sapien
gcaatcttcccacctgggcctctca

SEQ ID NO: 2947237 - DNA, 25 bp, Homo sapien
gtctcatcatgttgcacaggttggt

SEQ ID NO: 2947238 - DNA, 25 bp, Homo sapien
tcatgacttagtctccttgagcaca

SEQ ID NO: 2947239 - DNA, 25 bp, Homo sapien
ctcctgaggcatcaggtaaggagag

SEQ ID NO: 2947240 - DNA, 25 bp, Homo sapien
gacttagtctccttgagcacatcct

SEQ ID NO: 2947241 - DNA, 25 bp, Homo sapien
catgacttagtctccttgagcacat

SEQ ID NO: 2947242 - DNA, 25 bp, Homo sapien
cgcgcccggcctacaacaataattt

SEQ ID NO: 2947243 - DNA, 25 bp, Homo sapien
ttaaaatctgctagaatctggagct

SEQ ID NO: 2947244 - DNA, 25 bp, Homo sapien
aaaatctgctagaatctggagctca

SEQ ID NO: 2947245 - DNA, 25 bp, Homo sapien
aatctgctagaatctggagctcagg

SEQ ID NO: 2947246 - DNA, 25 bp, Homo sapien
gattttcgaacttctgctgtcgctc

SEQ ID NO: 2947247 - DNA, 25 bp, Homo sapien
cgtgcgcgcaaaccgcagttcgccg

SEQ ID NO: 2947248 - DNA, 25 bp, Homo sapien
cccctcggcgattttcgaacttctg

SEQ ID NO: 2947249 - DNA, 25 bp, Homo sapien
tgtcgctccccgtgcgcgcaaaccg

SEQ ID NO: 2947250 - DNA, 25 bp, Homo sapien
ggcgagggggcagcggctggcggtg

SEQ ID NO: 2947251 - DNA, 25 bp, Homo sapien
ggtggcggcgggggtctcggcagcg

SEQ ID NO: 2947252 - DNA, 25 bp, Homo sapien
ggtctcggcagcggggggcgctcgg

SEQ ID NO: 2947253 - DNA, 25 bp, Homo sapien
agggggcagcggctggcggtggcgg

SEQ ID NO: 2947254 - DNA, 25 bp, Homo sapien
gtggtccccacccagccggccaggc

SEQ ID NO: 2947255 - DNA, 25 bp, Homo sapien
cacccagccggccaggcgcctccag

SEQ ID NO: 2947256 - DNA, 25 bp, Homo sapien
cccacccagccggccaggcgcctcc

SEQ ID NO: 2947257 - DNA, 25 bp, Homo sapien
ggtccccacccagccggccaggcgc

SEQ ID NO: 2947258 - DNA, 25 bp, Homo sapien
cggccgcgggcatcggctgcttggg

SEQ ID NO: 2947259 - DNA, 25 bp, Homo sapien
ccgcgggcatcggctgcttgggagg

SEQ ID NO: 2947260 - DNA, 25 bp, Homo sapien
ggccgcgggcatcggctgcttggga

SEQ ID NO: 2947261 - DNA, 25 bp, Homo sapien
cagggcgcggttgaacctctcctcc

SEQ ID NO: 2947262 - DNA, 25 bp, Homo sapien
gttcacgctccacaccctcagtcat

SEQ ID NO: 2947263 - DNA, 25 bp, Homo sapien
tggttcacgctccacaccctcagtc

SEQ ID NO: 2947264 - DNA, 25 bp, Homo sapien
gtggttcacgctccacaccctcagt

SEQ ID NO: 2947265 - DNA, 25 bp, Homo sapien
ggttcacgctccacaccctcagtca

SEQ ID NO: 2947266 - DNA, 25 bp, Homo sapien
agatcccacgtgtacacagaccagg

SEQ ID NO: 2947267 - DNA, 25 bp, Homo sapien
gcctcacgaacaccaggaaatctct

SEQ ID NO: 2947268 - DNA, 25 bp, Homo sapien
accagtgcctcacgaacaccaggaa

SEQ ID NO: 2947269 - DNA, 25 bp, Homo sapien
atctcttgcaaggagagtggacagc

SEQ ID NO: 2947270 - DNA, 25 bp, Homo sapien
gagccatcaccagtcaggccaaagt

SEQ ID NO: 2947271 - DNA, 25 bp, Homo sapien
agccatcaccagtcaggccaaagtg

SEQ ID NO: 2947272 - DNA, 25 bp, Homo sapien
gggagccatcaccagtcaggccaaa

SEQ ID NO: 2947273 - DNA, 25 bp, Homo sapien
ggagccatcaccagtcaggccaaag

SEQ ID NO: 2947274 - DNA, 25 bp, Homo sapien
agttttcctgttggggcatcatctc

SEQ ID NO: 2947275 - DNA, 25 bp, Homo sapien
ggggacctgagacacttctgggccc

SEQ ID NO: 2947276 - DNA, 25 bp, Homo sapien
cacttcttctcgttgtcatactggc

SEQ ID NO: 2947277 - DNA, 25 bp, Homo sapien
cttgtctgggggcaagttcatgcag

SEQ ID NO: 2947278 - DNA, 25 bp, Homo sapien
tctcgttgtcatactggctcagcag

SEQ ID NO: 2947279 - DNA, 25 bp, Homo sapien
ttgtcatactggctcagcagctgga

SEQ ID NO: 2947280 - DNA, 25 bp, Homo sapien
ccagagctaccccagggcaaatgac

SEQ ID NO: 2947281 - DNA, 25 bp, Homo sapien
ccattctcagctccgatctgaggtc

SEQ ID NO: 2947282 - DNA, 25 bp, Homo sapien
ggcaaatgaccagttctcgtcccag

SEQ ID NO: 2947283 - DNA, 25 bp, Homo sapien
taagacgcctctgaaataccaaagg

SEQ ID NO: 2947284 - DNA, 25 bp, Homo sapien
aggctgcggggggattcttgacttg

SEQ ID NO: 2947285 - DNA, 25 bp, Homo sapien
cggctgaccccaccagtatccacat

SEQ ID NO: 2947286 - DNA, 25 bp, Homo sapien
ctttcggctgaccccaccagtatcc

SEQ ID NO: 2947287 - DNA, 25 bp, Homo sapien
gctgaccccaccagtatccacatag

SEQ ID NO: 2947288 - DNA, 25 bp, Homo sapien
ccaggttggacatccaatcagctgc

SEQ ID NO: 2947289 - DNA, 25 bp, Homo sapien
caggttggacatccaatcagctgct

SEQ ID NO: 2947290 - DNA, 25 bp, Homo sapien
ccccaggttggacatccaatcagct

SEQ ID NO: 2947291 - DNA, 25 bp, Homo sapien
ggttggacatccaatcagctgctac

SEQ ID NO: 2947292 - DNA, 25 bp, Homo sapien
tctctcctagatatggactcaatgg

SEQ ID NO: 2947293 - DNA, 25 bp, Homo sapien
tgtccatgtaagcacacacaggatg

SEQ ID NO: 2947294 - DNA, 25 bp, Homo sapien
cacacacatccataagtggacaaag

SEQ ID NO: 2947295 - DNA, 25 bp, Homo sapien
tgtacacacagttactccagctgcc

SEQ ID NO: 2947296 - DNA, 25 bp, Homo sapien
aactcacaggctacatgtgctcccc

SEQ ID NO: 2947297 - DNA, 25 bp, Homo sapien
accctcctccaactggcacaagtgg

SEQ ID NO: 2947298 - DNA, 25 bp, Homo sapien
tacatgggcacacaaggtatacaca

SEQ ID NO: 2947299 - DNA, 25 bp, Homo sapien
tgtgctcccccatacatagacaagc

SEQ ID NO: 2947300 - DNA, 25 bp, Homo sapien
ctccagctcccgtagcacctgcgtg

SEQ ID NO: 2947301 - DNA, 25 bp, Homo sapien
cagctcccgtagcacctgcgtggac

SEQ ID NO: 2947302 - DNA, 25 bp, Homo sapien
gctcccgtagcacctgcgtggactc

SEQ ID NO: 2947303 - DNA, 25 bp, Homo sapien
tccagctcccgtagcacctgcgtgg

SEQ ID NO: 2947304 - DNA, 25 bp, Homo sapien
ccaggtactcgagcagcacatccag

SEQ ID NO: 2947305 - DNA, 25 bp, Homo sapien
caaaggccaggtactcgagcagcac

SEQ ID NO: 2947306 - DNA, 25 bp, Homo sapien
atccaggccacggttctcttcattg

SEQ ID NO: 2947307 - DNA, 25 bp, Homo sapien
ccaggccacggttctcttcattgag

SEQ ID NO: 2947308 - DNA, 25 bp, Homo sapien
ggagcggcatgagggctgggagcag

SEQ ID NO: 2947309 - DNA, 25 bp, Homo sapien
gaggagcggcatgagggctgggagc

SEQ ID NO: 2947310 - DNA, 25 bp, Homo sapien
ctgaggagcggcatgagggctggga

SEQ ID NO: 2947311 - DNA, 25 bp, Homo sapien
agcggcatgagggctgggagcaggg

SEQ ID NO: 2947312 - DNA, 25 bp, Homo sapien
cactgtgctgaacatagtggtggaa

SEQ ID NO: 2947313 - DNA, 25 bp, Homo sapien
tggggacaggatgcaatggggctgg

SEQ ID NO: 2947314 - DNA, 25 bp, Homo sapien
tgtgctgaacatagtggtggaagag

SEQ ID NO: 2947315 - DNA, 25 bp, Homo sapien
gggccacttaagagggggcagagga

SEQ ID NO: 2947316 - DNA, 25 bp, Homo sapien
ttggaagccccgttgtctgtgctct

SEQ ID NO: 2947317 - DNA, 25 bp, Homo sapien
tcaggtggcggcttttgggcacgga

SEQ ID NO: 2947318 - DNA, 25 bp, Homo sapien
gcacggaggagggtggacccttgct

SEQ ID NO: 2947319 - DNA, 25 bp, Homo sapien
tgaggtcttccacagactgctccag

SEQ ID NO: 2947320 - DNA, 25 bp, Homo sapien
gcttcttaacatactggtgtcccaa

SEQ ID NO: 2947321 - DNA, 25 bp, Homo sapien
tactcggacccctaatgcatggcta

SEQ ID NO: 2947322 - DNA, 25 bp, Homo sapien
tgtcccaaactctgtatgagtccct

SEQ ID NO: 2947323 - DNA, 25 bp, Homo sapien
tgggctggctagatgcagcagtgtg

SEQ ID NO: 2947324 - DNA, 25 bp, Homo sapien
tctggctgacgatgcgggaattccg

SEQ ID NO: 2947325 - DNA, 25 bp, Homo sapien
taggcacataatacagacgtggacg

SEQ ID NO: 2947326 - DNA, 25 bp, Homo sapien
cttctggctgacgatgcgggaattc

SEQ ID NO: 2947327 - DNA, 25 bp, Homo sapien
gtagttcatgatggcgcgtaggcac

SEQ ID NO: 2947328 - DNA, 25 bp, Homo sapien
tcaggcaccttggaaaccgtgaagc

SEQ ID NO: 2947329 - DNA, 25 bp, Homo sapien
tccaaatgaatcgacccgaggctgt

SEQ ID NO: 2947330 - DNA, 25 bp, Homo sapien
ccttcttggtaggtgagcccagtcc

SEQ ID NO: 2947331 - DNA, 25 bp, Homo sapien
tgaagctggcttaaaggcgggctaa

SEQ ID NO: 2947332 - DNA, 25 bp, Homo sapien
cattgacacaggctgggtggttcat

SEQ ID NO: 2947333 - DNA, 25 bp, Homo sapien
tctcattgacacaggctgggtggtt

SEQ ID NO: 2947334 - DNA, 25 bp, Homo sapien
ttgacacaggctgggtggttcatga

SEQ ID NO: 2947335 - DNA, 25 bp, Homo sapien
ggttcatgacaaggctgaagccaga

SEQ ID NO: 2947336 - DNA, 25 bp, Homo sapien
gcaccaagcacacggccgccagcag

SEQ ID NO: 2947337 - DNA, 25 bp, Homo sapien
atgatgtcatgtcctccccgcacca

SEQ ID NO: 2947338 - DNA, 25 bp, Homo sapien
ctccttgaagttgtcaaaggctgca

SEQ ID NO: 2947339 - DNA, 25 bp, Homo sapien
cttgaagttgtcaaaggctgcaagg

SEQ ID NO: 2947340 - DNA, 25 bp, Homo sapien
cttttcaaagcggtgctgctcccca

SEQ ID NO: 2947341 - DNA, 25 bp, Homo sapien
ttttcaaagcggtgctgctccccac

SEQ ID NO: 2947342 - DNA, 25 bp, Homo sapien
agcttttcaaagcggtgctgctccc

SEQ ID NO: 2947343 - DNA, 25 bp, Homo sapien
tttcaaagcggtgctgctccccaca

SEQ ID NO: 2947344 - DNA, 25 bp, Homo sapien
tattgcaggaagacacggaagttca

SEQ ID NO: 2947345 - DNA, 25 bp, Homo sapien
cgaatgtaccacaatgttgatgaac

SEQ ID NO: 2947346 - DNA, 25 bp, Homo sapien
ctccaccgaatgtaccacaatgttg

SEQ ID NO: 2947347 - DNA, 25 bp, Homo sapien
aggcccaagtgggtgaactcatatt

SEQ ID NO: 2947348 - DNA, 25 bp, Homo sapien
tgtcactctcggtgagccgaagcct

SEQ ID NO: 2947349 - DNA, 25 bp, Homo sapien
gcagcgcccccacatcaaaaatatt

SEQ ID NO: 2947350 - DNA, 25 bp, Homo sapien
tccaggtacgcctggatctgcacct

SEQ ID NO: 2947351 - DNA, 25 bp, Homo sapien
gtgctccagcacagcgttcttggtc

SEQ ID NO: 2947352 - DNA, 25 bp, Homo sapien
tgccctgtgggcctatgatgtgctg

SEQ ID NO: 2947353 - DNA, 25 bp, Homo sapien
ggcactcgaacccaagcaaataagg

SEQ ID NO: 2947354 - DNA, 25 bp, Homo sapien
gagaaagacacccaacagattcagg

SEQ ID NO: 2947355 - DNA, 25 bp, Homo sapien
aaccaaggtaccagtgatgcgggag

SEQ ID NO: 2947356 - DNA, 25 bp, Homo sapien
atggtgagccccgacccgcagcccg

SEQ ID NO: 2947357 - DNA, 25 bp, Homo sapien
gtagcaccagcacatggtgagcccc

SEQ ID NO: 2947358 - DNA, 25 bp, Homo sapien
ctgtagcaccagcacatggtgagcc

SEQ ID NO: 2947359 - DNA, 25 bp, Homo sapien
agcacatggtgagccccgacccgca

SEQ ID NO: 2947360 - DNA, 25 bp, Homo sapien
gtctccaactccttgcgcgcctggc

SEQ ID NO: 2947361 - DNA, 25 bp, Homo sapien
tgcaatcttggccatggattcgttc

SEQ ID NO: 2947362 - DNA, 25 bp, Homo sapien
tgcgcgcctggcttagctgtttttc

SEQ ID NO: 2947363 - DNA, 25 bp, Homo sapien
tggattcgttctccgcgtcccgaag

SEQ ID NO: 2947364 - DNA, 25 bp, Homo sapien
gttcttgggcgcctggcctaccacc

SEQ ID NO: 2947365 - DNA, 25 bp, Homo sapien
agatgtcaagcctagaagcctcagc

SEQ ID NO: 2947366 - DNA, 25 bp, Homo sapien
tcaagcctagaagcctcagctggcc

SEQ ID NO: 2947367 - DNA, 25 bp, Homo sapien
ggagatgtcaagcctagaagcctca

SEQ ID NO: 2947368 - DNA, 25 bp, Homo sapien
gccccatggcggtcgattcgctgaa

SEQ ID NO: 2947369 - DNA, 25 bp, Homo sapien
agcgggaggcgctttctcaggctct

SEQ ID NO: 2947370 - DNA, 25 bp, Homo sapien
gccgctcggagttgccacagcgacg

SEQ ID NO: 2947371 - DNA, 25 bp, Homo sapien
cgcagaatacggattaaccccttct

SEQ ID NO: 2947372 - DNA, 25 bp, Homo sapien
tctacgcatgcgctcctacctgagc

SEQ ID NO: 2947373 - DNA, 25 bp, Homo sapien
cttgacttgggtgggcccctctccg

SEQ ID NO: 2947374 - DNA, 25 bp, Homo sapien
ggaggcgcgagtcagctccttgact

SEQ ID NO: 2947375 - DNA, 25 bp, Homo sapien
tgagccgagcctacaatccaaacct

SEQ ID NO: 2947376 - DNA, 25 bp, Homo sapien
gccggctctgctgcaggtgcgagat

SEQ ID NO: 2947377 - DNA, 25 bp, Homo sapien
gcggcggtggcgctgctccgggagc

SEQ ID NO: 2947378 - DNA, 25 bp, Homo sapien
ggtggcgctgctccgggagccggct

SEQ ID NO: 2947379 - DNA, 25 bp, Homo sapien
gctgctccgggagccggctctgctg

SEQ ID NO: 2947380 - DNA, 25 bp, Homo sapien
gcggcaggtctccgggcagcggcgg

SEQ ID NO: 2947381 - DNA, 25 bp, Homo sapien
gcggcggaggcaccggcccgtcagt

SEQ ID NO: 2947382 - DNA, 25 bp, Homo sapien
cgtcagtgcccggaggtggtggcgg

SEQ ID NO: 2947383 - DNA, 25 bp, Homo sapien
ctagggcatcaggaggacctccggg

SEQ ID NO: 2947384 - DNA, 25 bp, Homo sapien
gggcccaattctgagtcgcgtcttc

SEQ ID NO: 2947385 - DNA, 25 bp, Homo sapien
tgggcccaattctgagtcgcgtctt

SEQ ID NO: 2947386 - DNA, 25 bp, Homo sapien
agtctggatgggcttcttggccttc

SEQ ID NO: 2947387 - DNA, 25 bp, Homo sapien
tggatgggcttcttggccttcactc

SEQ ID NO: 2947388 - DNA, 25 bp, Homo sapien
tctggatgggcttcttggccttcac

SEQ ID NO: 2947389 - DNA, 25 bp, Homo sapien
tcggaacttagtctggatgggcttc

SEQ ID NO: 2947390 - DNA, 25 bp, Homo sapien
agtgccggtgatctggctgggtttc

SEQ ID NO: 2947391 - DNA, 25 bp, Homo sapien
ggctgggtttcagtgccacccagtt

SEQ ID NO: 2947392 - DNA, 25 bp, Homo sapien
gggtttcagtgccacccagttcaag

SEQ ID NO: 2947393 - DNA, 25 bp, Homo sapien
tcagtgccacccagttcaagagtgg

SEQ ID NO: 2947394 - DNA, 25 bp, Homo sapien
ggcctcaatgagtgtcgccttgctg

SEQ ID NO: 2947395 - DNA, 25 bp, Homo sapien
tgatggccaagttcttggcccggtt

SEQ ID NO: 2947396 - DNA, 25 bp, Homo sapien
ttactcttgagagcgctgaggtcca

SEQ ID NO: 2947397 - DNA, 25 bp, Homo sapien
gaactgttcctcaaaatcactcatg

SEQ ID NO: 2947398 - DNA, 25 bp, Homo sapien
gctacccctgccttgattgaataaa

SEQ ID NO: 2947399 - DNA, 25 bp, Homo sapien
ccattgaggctcttttactaggatc

SEQ ID NO: 2947400 - DNA, 25 bp, Homo sapien
ggtgctcacagctaggcaaagaggc

SEQ ID NO: 2947401 - DNA, 25 bp, Homo sapien
tgatgaaagagctcaccattgaggc

SEQ ID NO: 2947402 - DNA, 25 bp, Homo sapien
gctcccgctcaaagcgggtgatgag

SEQ ID NO: 2947403 - DNA, 25 bp, Homo sapien
ggatgcggctgaagcatagcatgaa

SEQ ID NO: 2947404 - DNA, 25 bp, Homo sapien
catgaagcggtcctcctctgacagc

SEQ ID NO: 2947405 - DNA, 25 bp, Homo sapien
gaggctgcgctcatactctgtgggc

SEQ ID NO: 2947406 - DNA, 25 bp, Homo sapien
gaggctcaagtactcccaggttccc

SEQ ID NO: 2947407 - DNA, 25 bp, Homo sapien
catctggaggctcaagtactcccag

SEQ ID NO: 2947408 - DNA, 25 bp, Homo sapien
ggaggtaagataagttggagcctcc

SEQ ID NO: 2947409 - DNA, 25 bp, Homo sapien
tctggaggctcaagtactcccaggt

SEQ ID NO: 2947410 - DNA, 25 bp, Homo sapien
tccaggatctggcggagtttgtcag

SEQ ID NO: 2947411 - DNA, 25 bp, Homo sapien
gatctggcggagtttgtcagaggac

SEQ ID NO: 2947412 - DNA, 25 bp, Homo sapien
caggatctggcggagtttgtcagag

SEQ ID NO: 2947413 - DNA, 25 bp, Homo sapien
tctggcggagtttgtcagaggactt

SEQ ID NO: 2947414 - DNA, 25 bp, Homo sapien
ggaagccataggctgccccacgctt

SEQ ID NO: 2947415 - DNA, 25 bp, Homo sapien
tgccccacgcttgctactgttcatg

SEQ ID NO: 2947416 - DNA, 25 bp, Homo sapien
cttgctactgttcatgtagttgcca

SEQ ID NO: 2947417 - DNA, 25 bp, Homo sapien
tctggagccggaagccataggctgc

SEQ ID NO: 2947418 - DNA, 25 bp, Homo sapien
gaagcctgtgagttgcgggtacttc

SEQ ID NO: 2947419 - DNA, 25 bp, Homo sapien
ccaggtagtgcagcagcgtctgctt

SEQ ID NO: 2947420 - DNA, 25 bp, Homo sapien
tctgcttgcgatcagtcgacttcat

SEQ ID NO: 2947421 - DNA, 25 bp, Homo sapien
tgaccttcaccaggtagtgcagcag

SEQ ID NO: 2947422 - DNA, 25 bp, Homo sapien
gtgtcaactctaggcctcgctgcag

SEQ ID NO: 2947423 - DNA, 25 bp, Homo sapien
gaactccttgagcaccatgcagtca

SEQ ID NO: 2947424 - DNA, 25 bp, Homo sapien
atgcagtcatcctgccgcacaaact

SEQ ID NO: 2947425 - DNA, 25 bp, Homo sapien
ccatggtgggcgagttggccctcag

SEQ ID NO: 2947426 - DNA, 25 bp, Homo sapien
tccaggtgaggccagccctggcgca

SEQ ID NO: 2947427 - DNA, 25 bp, Homo sapien
ctccaggtgaggccagccctggcgc

SEQ ID NO: 2947428 - DNA, 25 bp, Homo sapien
ccaggtgaggccagccctggcgcac

SEQ ID NO: 2947429 - DNA, 25 bp, Homo sapien
atgtggtcttggggttctctccgaa

SEQ ID NO: 2947430 - DNA, 25 bp, Homo sapien
gttctctccgaagtactccaccaca

SEQ ID NO: 2947431 - DNA, 25 bp, Homo sapien
tctctccgaagtactccaccacaga

SEQ ID NO: 2947432 - DNA, 25 bp, Homo sapien
gggttctctccgaagtactccacca

SEQ ID NO: 2947433 - DNA, 25 bp, Homo sapien
gctcccctttgcccggggtatcagc

SEQ ID NO: 2947434 - DNA, 25 bp, Homo sapien
gggtatcagcgcctgcctcctgggc

SEQ ID NO: 2947435 - DNA, 25 bp, Homo sapien
cctttgcccggggtatcagcgcctg

SEQ ID NO: 2947436 - DNA, 25 bp, Homo sapien
ttgcccggggtatcagcgcctgcct

SEQ ID NO: 2947437 - DNA, 25 bp, Homo sapien
atggccccatcacggtcgctctcat

SEQ ID NO: 2947438 - DNA, 25 bp, Homo sapien
ccccatcacggtcgctctcataaat

SEQ ID NO: 2947439 - DNA, 25 bp, Homo sapien
ccatcacggtcgctctcataaatga

SEQ ID NO: 2947440 - DNA, 25 bp, Homo sapien
caatggccccatcacggtcgctctc

SEQ ID NO: 2947441 - DNA, 25 bp, Homo sapien
gcatagaaggacagactgaggataa

SEQ ID NO: 2947442 - DNA, 25 bp, Homo sapien
ggtagcaagaagcagtgtggcagcc

SEQ ID NO: 2947443 - DNA, 25 bp, Homo sapien
ccagtcccccagaggatagcgcatt

SEQ ID NO: 2947444 - DNA, 25 bp, Homo sapien
aggatagcgcattgggtcagaagaa

SEQ ID NO: 2947445 - DNA, 25 bp, Homo sapien
aggagccgggatgtccgcttgccgg

SEQ ID NO: 2947446 - DNA, 25 bp, Homo sapien
ccgcttgccggtgcgggccgtgaag

SEQ ID NO: 2947447 - DNA, 25 bp, Homo sapien
ccgggatgtccgcttgccggtgcgg

SEQ ID NO: 2947448 - DNA, 25 bp, Homo sapien
ggatgtccgcttgccggtgcgggcc

SEQ ID NO: 2947449 - DNA, 25 bp, Homo sapien
atctcttctcccaggctggcctcac

SEQ ID NO: 2947450 - DNA, 25 bp, Homo sapien
tagaggggcatctcttctcccaggc

SEQ ID NO: 2947451 - DNA, 25 bp, Homo sapien
ggcatctcttctcccaggctggcct

SEQ ID NO: 2947452 - DNA, 25 bp, Homo sapien
ctagaggggcatctcttctcccagg

SEQ ID NO: 2947453 - DNA, 25 bp, Homo sapien
ggctccagggcacaaagcttagcct

SEQ ID NO: 2947454 - DNA, 25 bp, Homo sapien
cctaaggactcagattgtgtgcaca

SEQ ID NO: 2947455 - DNA, 25 bp, Homo sapien
catttaccattcaggagtccgccca

SEQ ID NO: 2947456 - DNA, 25 bp, Homo sapien
gtttatgtttgccagacccctccac

SEQ ID NO: 2947457 - DNA, 25 bp, Homo sapien
gcggcctgtgtctgcgcggatgtag

SEQ ID NO: 2947458 - DNA, 25 bp, Homo sapien
tacagcgagaggtcggaggtgacct

SEQ ID NO: 2947459 - DNA, 25 bp, Homo sapien
gtctgcgcggatgtagggctggttc

SEQ ID NO: 2947460 - DNA, 25 bp, Homo sapien
gccgacgggcactgcggcggcctgt

SEQ ID NO: 2947461 - DNA, 25 bp, Homo sapien
ctcctgctgaggctaagtatggcta

SEQ ID NO: 2947462 - DNA, 25 bp, Homo sapien
aataaggtccatggacggtcctcgg

SEQ ID NO: 2947463 - DNA, 25 bp, Homo sapien
agaggaggatgcaccagcccgtttg

SEQ ID NO: 2947464 - DNA, 25 bp, Homo sapien
ggtgcactttataagttacaggcca

SEQ ID NO: 2947465 - DNA, 25 bp, Homo sapien
gaggggttggcgctcccggaacgca

SEQ ID NO: 2947466 - DNA, 25 bp, Homo sapien
aggggttggcgctcccggaacgcag

SEQ ID NO: 2947467 - DNA, 25 bp, Homo sapien
ggatcgtttgagccttgggaggttg

SEQ ID NO: 2947468 - DNA, 25 bp, Homo sapien
aggatcgtttgagccttgggaggtt

SEQ ID NO: 2947469 - DNA, 25 bp, Homo sapien
aggttgaggctgcagtgagccgaga

SEQ ID NO: 2947470 - DNA, 25 bp, Homo sapien
gatcgtttgagccttgggaggttga

SEQ ID NO: 2947471 - DNA, 25 bp, Homo sapien
ttaaatcgggctgttcattttctta

SEQ ID NO: 2947472 - DNA, 25 bp, Homo sapien
accacacttggctttgcccattttt

SEQ ID NO: 2947473 - DNA, 25 bp, Homo sapien
attaaagatgtaagccaccacactt

SEQ ID NO: 2947474 - DNA, 25 bp, Homo sapien
ccaccacacttggctttgcccattt

SEQ ID NO: 2947475 - DNA, 25 bp, Homo sapien
agccggggatcaagagggccaccat

SEQ ID NO: 2947476 - DNA, 25 bp, Homo sapien
gggccaccatcaaagggcaaatcca

SEQ ID NO: 2947477 - DNA, 25 bp, Homo sapien
gagggccaccatcaaagggcaaatc

SEQ ID NO: 2947478 - DNA, 25 bp, Homo sapien
tgacttcagcaagccggggatcaag

SEQ ID NO: 2947479 - DNA, 25 bp, Homo sapien
ggcaaacaagctcatccaggcctca

SEQ ID NO: 2947480 - DNA, 25 bp, Homo sapien
cctcttctgggcaaacaagctcatc

SEQ ID NO: 2947481 - DNA, 25 bp, Homo sapien
ttctgggcaaacaagctcatccagg

SEQ ID NO: 2947482 - DNA, 25 bp, Homo sapien
agcacctcttctgggcaaacaagct

SEQ ID NO: 2947483 - DNA, 25 bp, Homo sapien
ggacgtcacagaggcggcgacatca

SEQ ID NO: 2947484 - DNA, 25 bp, Homo sapien
ggcaccggcgcctctaatatttcca

SEQ ID NO: 2947485 - DNA, 25 bp, Homo sapien
gtccctcagccaaagagcacactgg

SEQ ID NO: 2947486 - DNA, 25 bp, Homo sapien
agccttcggaggacgcctcactcgg

SEQ ID NO: 2947487 - DNA, 25 bp, Homo sapien
tgcagagcgggtgcaagtcctgtcc

SEQ ID NO: 2947488 - DNA, 25 bp, Homo sapien
ctgggaccacgaaaagggcggcagc

SEQ ID NO: 2947489 - DNA, 25 bp, Homo sapien
tgcgcgcggcttgggttggtttagc

SEQ ID NO: 2947490 - DNA, 25 bp, Homo sapien
gggtgccttatcgaatctggctcca

SEQ ID NO: 2947491 - DNA, 25 bp, Homo sapien
cacattgagtcagactgctcccggg

SEQ ID NO: 2947492 - DNA, 25 bp, Homo sapien
gaagtccctcgccaaaatatgccag

SEQ ID NO: 2947493 - DNA, 25 bp, Homo sapien
gacaaatgtttccaggccatcggtg

SEQ ID NO: 2947494 - DNA, 25 bp, Homo sapien
caacgctgggctagtcattcagacc

SEQ ID NO: 2947495 - DNA, 25 bp, Homo sapien
gcgcctggtcccagaacttgaggtt

SEQ ID NO: 2947496 - DNA, 25 bp, Homo sapien
tgcctggagctagacagccattgag

SEQ ID NO: 2947497 - DNA, 25 bp, Homo sapien
ggtttcaagcaaaggtcccaatcac

SEQ ID NO: 2947498 - DNA, 25 bp, Homo sapien
cattgtcagttgatggagtcccaga

SEQ ID NO: 2947499 - DNA, 25 bp, Homo sapien
tcgtgcctcagcatcgacagcctct

SEQ ID NO: 2947500 - DNA, 25 bp, Homo sapien
caggagcaaattctctcgtgcctca

SEQ ID NO: 2947501 - DNA, 25 bp, Homo sapien
tccacttttccctgcagaattattc

SEQ ID NO: 2947502 - DNA, 25 bp, Homo sapien
gcttctaccgactgtgcaggaagaa

SEQ ID NO: 2947503 - DNA, 25 bp, Homo sapien
ctggaaataggtacgggcagccgtg

SEQ ID NO: 2947504 - DNA, 25 bp, Homo sapien
aaataggtacgggcagccgtggctg

SEQ ID NO: 2947505 - DNA, 25 bp, Homo sapien
cacccgcggaggccggtgtttctct

SEQ ID NO: 2947506 - DNA, 25 bp, Homo sapien
ataggtacgggcagccgtggctgca

SEQ ID NO: 2947507 - DNA, 25 bp, Homo sapien
ctcaccagagcggaaagcaaccgtc

SEQ ID NO: 2947508 - DNA, 25 bp, Homo sapien
tttctagtgggaggtctgaagagcc

SEQ ID NO: 2947509 - DNA, 25 bp, Homo sapien
gatgtgggaacccttacctctgtcc

SEQ ID NO: 2947510 - DNA, 25 bp, Homo sapien
cagccgagagagctttcgccaaggg

SEQ ID NO: 2947511 - DNA, 25 bp, Homo sapien
caacgcacattttgcaaggacacaa

SEQ ID NO: 2947512 - DNA, 25 bp, Homo sapien
agtcctctggagctgattctgtagt

SEQ ID NO: 2947513 - DNA, 25 bp, Homo sapien
cccatgccagaacaaacggtgcctg

SEQ ID NO: 2947514 - DNA, 25 bp, Homo sapien
tagttataaggatgagggtggtccc

SEQ ID NO: 2947515 - DNA, 25 bp, Homo sapien
tgccgagtgaaaagagaacccgaca

SEQ ID NO: 2947516 - DNA, 25 bp, Homo sapien
gaatgggacccagaacataatgcct

SEQ ID NO: 2947517 - DNA, 25 bp, Homo sapien
taaagccaggtaacactcaagagcc

SEQ ID NO: 2947518 - DNA, 25 bp, Homo sapien
aagcaactcggcgttcacagagcag

SEQ ID NO: 2947519 - DNA, 25 bp, Homo sapien
gagcacagagcttccagggcttggc

SEQ ID NO: 2947520 - DNA, 25 bp, Homo sapien
tggccattggcgaaccgcttaacct

SEQ ID NO: 2947521 - DNA, 25 bp, Homo sapien
tgtgcccagctaccagaagttctct

SEQ ID NO: 2947522 - DNA, 25 bp, Homo sapien
ggctcaaactcactaggaatccaag

SEQ ID NO: 2947523 - DNA, 25 bp, Homo sapien
cactagggtgctgacaggatgccag

SEQ ID NO: 2947524 - DNA, 25 bp, Homo sapien
caagggcacgggatacacaatttag

SEQ ID NO: 2947525 - DNA, 25 bp, Homo sapien
gagaagggccttgggtcaacatctt

SEQ ID NO: 2947526 - DNA, 25 bp, Homo sapien
tgtgcaggattgacctcacccagaa

SEQ ID NO: 2947527 - DNA, 25 bp, Homo sapien
tattagggaaccagaagggcgacat

SEQ ID NO: 2947528 - DNA, 25 bp, Homo sapien
tcacgcggtgtcctgcagatactgc

SEQ ID NO: 2947529 - DNA, 25 bp, Homo sapien
tatcaaagggaatgtcacgtgcgtg

SEQ ID NO: 2947530 - DNA, 25 bp, Homo sapien
tgcggtggccgtttccctcaaatgt

SEQ ID NO: 2947531 - DNA, 25 bp, Homo sapien
cagccccgcactttgagtaggcaga

SEQ ID NO: 2947532 - DNA, 25 bp, Homo sapien
ggctccaagcattgcatgaactagg

SEQ ID NO: 2947533 - DNA, 25 bp, Homo sapien
tttcgtgtatggagaatcaaggctc

SEQ ID NO: 2947534 - DNA, 25 bp, Homo sapien
tgtagacattttcaagctggccctg

SEQ ID NO: 2947535 - DNA, 25 bp, Homo sapien
gagattgcgtcactgcactccagcc

SEQ ID NO: 2947536 - DNA, 25 bp, Homo sapien
caggcagagcttgcagtgagccgag

SEQ ID NO: 2947537 - DNA, 25 bp, Homo sapien
ctggagaatggtgtaaacccggcag

SEQ ID NO: 2947538 - DNA, 25 bp, Homo sapien
aggctggagaatggtgtaaacccgg

SEQ ID NO: 2947539 - DNA, 25 bp, Homo sapien
ctttgacttgtgacagcttctgcat

SEQ ID NO: 2947540 - DNA, 25 bp, Homo sapien
cctgcatattgggtctttgtggatc

SEQ ID NO: 2947541 - DNA, 25 bp, Homo sapien
tctcctgcatattgggtctttgtgg

SEQ ID NO: 2947542 - DNA, 25 bp, Homo sapien
gcatattgggtctttgtggatccat

SEQ ID NO: 2947543 - DNA, 25 bp, Homo sapien
acatgttctcctgcatattgggtct

SEQ ID NO: 2947544 - DNA, 25 bp, Homo sapien
ttacttggtccagcttgtcaaagag

SEQ ID NO: 2947545 - DNA, 25 bp, Homo sapien
gctggttacttggtccagcttgtca

SEQ ID NO: 2947546 - DNA, 25 bp, Homo sapien
catgtcctcaagctggttacttggt

SEQ ID NO: 2947547 - DNA, 25 bp, Homo sapien
tcctcaagctggttacttggtccag

SEQ ID NO: 2947548 - DNA, 25 bp, Homo sapien
ggagcttggtaacagttgggcaact

SEQ ID NO: 2947549 - DNA, 25 bp, Homo sapien
cacttgtcagcttggagcgggagct

SEQ ID NO: 2947550 - DNA, 25 bp, Homo sapien
gcttggtaacagttgggcaacttca

SEQ ID NO: 2947551 - DNA, 25 bp, Homo sapien
cttgtaccacttgtcagcttggagc

SEQ ID NO: 2947552 - DNA, 25 bp, Homo sapien
aacccactcgcagcggtccgcgggc

SEQ ID NO: 2947553 - DNA, 25 bp, Homo sapien
cccgtccaacccactcgcagcggtc

SEQ ID NO: 2947554 - DNA, 25 bp, Homo sapien
gtccaacccactcgcagcggtccgc

SEQ ID NO: 2947555 - DNA, 25 bp, Homo sapien
tcgcacgcgctgccggtgccgcgct

SEQ ID NO: 2947556 - DNA, 25 bp, Homo sapien
ttgttttactgctgtcatctgcctt

SEQ ID NO: 2947557 - DNA, 25 bp, Homo sapien
tgttttactgctgtcatctgccttc

SEQ ID NO: 2947558 - DNA, 25 bp, Homo sapien
tttactgctgtcatctgccttctca

SEQ ID NO: 2947559 - DNA, 25 bp, Homo sapien
gttttactgctgtcatctgccttct

SEQ ID NO: 2947560 - DNA, 25 bp, Homo sapien
gccaatagatcccagccgtgtggat

SEQ ID NO: 2947561 - DNA, 25 bp, Homo sapien
tccaagtggatgaggtcaggctgct

SEQ ID NO: 2947562 - DNA, 25 bp, Homo sapien
gtgttccgattcctggcaatgccca

SEQ ID NO: 2947563 - DNA, 25 bp, Homo sapien
ccatttgtgggccaatagatcccag

SEQ ID NO: 2947564 - DNA, 25 bp, Homo sapien
acggggcagaggaccgtatttgtca

SEQ ID NO: 2947565 - DNA, 25 bp, Homo sapien
gggcagaggaccgtatttgtcatcc

SEQ ID NO: 2947566 - DNA, 25 bp, Homo sapien
agaggaccgtatttgtcatccagct

SEQ ID NO: 2947567 - DNA, 25 bp, Homo sapien
gcagaggaccgtatttgtcatccag

SEQ ID NO: 2947568 - DNA, 25 bp, Homo sapien
tcacacccggatgcggtgcagcttc

SEQ ID NO: 2947569 - DNA, 25 bp, Homo sapien
cacacccggatgcggtgcagcttca

SEQ ID NO: 2947570 - DNA, 25 bp, Homo sapien
accgagagccggggtctatctcggt

SEQ ID NO: 2947571 - DNA, 25 bp, Homo sapien
gagagccggggtctatctcggtggg

SEQ ID NO: 2947572 - DNA, 25 bp, Homo sapien
agccggggtctatctcggtggggca

SEQ ID NO: 2947573 - DNA, 25 bp, Homo sapien
gggtctatctcggtggggcagcagg

SEQ ID NO: 2947574 - DNA, 25 bp, Homo sapien
taagaacataggttctaagtaaatg

SEQ ID NO: 2947575 - DNA, 25 bp, Homo sapien
cacgctgagcaccagcctaaggtta

SEQ ID NO: 2947576 - DNA, 25 bp, Homo sapien
ttagccagacgcatcaccctagaag

SEQ ID NO: 2947577 - DNA, 25 bp, Homo sapien
agaagatggaggacccacgctgagc

SEQ ID NO: 2947578 - DNA, 25 bp, Homo sapien
ggaagtcaggtgccatgatctcttg

SEQ ID NO: 2947579 - DNA, 25 bp, Homo sapien
aagcacagggccagccgcacagaaa

SEQ ID NO: 2947580 - DNA, 25 bp, Homo sapien
agggccagccgcacagaaagtttcc

SEQ ID NO: 2947581 - DNA, 25 bp, Homo sapien
cctggaagtcaggtgccatgatctc

SEQ ID NO: 2947582 - DNA, 25 bp, Homo sapien
ggcgggcaggcgagggcacctccgg

SEQ ID NO: 2947583 - DNA, 25 bp, Homo sapien
aggaatgcggcctcgccaatcggcg

SEQ ID NO: 2947584 - DNA, 25 bp, Homo sapien
gggcagcgcgcaggaatgcggcctc

SEQ ID NO: 2947585 - DNA, 25 bp, Homo sapien
acctccgggctgagccgctgcgcgt

SEQ ID NO: 2947586 - DNA, 25 bp, Homo sapien
ttattcaacagacaatgacagctga

SEQ ID NO: 2947587 - DNA, 25 bp, Homo sapien
aagcattcggcttggattatcccat

SEQ ID NO: 2947588 - DNA, 25 bp, Homo sapien
tcaagaaaggaagcgtgaaccccag

SEQ ID NO: 2947589 - DNA, 25 bp, Homo sapien
ggcccgctttgccacgaagagctgg

SEQ ID NO: 2947590 - DNA, 25 bp, Homo sapien
tcacctcgtggaggccttcacagag

SEQ ID NO: 2947591 - DNA, 25 bp, Homo sapien
tcatgaggcagctctgatcacttcc

SEQ ID NO: 2947592 - DNA, 25 bp, Homo sapien
tgtggaaacaggactgacccagcct

SEQ ID NO: 2947593 - DNA, 25 bp, Homo sapien
cctactgtgcgtgtgcgatagcgtg

SEQ ID NO: 2947594 - DNA, 25 bp, Homo sapien
gaggctatgggaatccagtccgcag

SEQ ID NO: 2947595 - DNA, 25 bp, Homo sapien
agtgcatttcgggtcccttgcccca

SEQ ID NO: 2947596 - DNA, 25 bp, Homo sapien
aatgttctcaggctcactggtggag

SEQ ID NO: 2947597 - DNA, 25 bp, Homo sapien
ccaggccatgcctgttgggagtgca

SEQ ID NO: 2947598 - DNA, 25 bp, Homo sapien
gccacgtattgaggaatgctgaccc

SEQ ID NO: 2947599 - DNA, 25 bp, Homo sapien
agaactgggagccacgtattgagga

SEQ ID NO: 2947600 - DNA, 25 bp, Homo sapien
atattggtgcagttgttggcagtgc

SEQ ID NO: 2947601 - DNA, 25 bp, Homo sapien
tgttggcagtgctccggccacagct

SEQ ID NO: 2947602 - DNA, 25 bp, Homo sapien
tatctctggatgggcagccagttgt

SEQ ID NO: 2947603 - DNA, 25 bp, Homo sapien
catctttagtgcgtcctgggtcccg

SEQ ID NO: 2947604 - DNA, 25 bp, Homo sapien
tgtgacctttcactgacaagtttgt

SEQ ID NO: 2947605 - DNA, 25 bp, Homo sapien
tccccatgacctgtgatggcatctt

SEQ ID NO: 2947606 - DNA, 25 bp, Homo sapien
gggggtcccctgtgaggcatgaaag

SEQ ID NO: 2947607 - DNA, 25 bp, Homo sapien
ggtcccctgtgaggcatgaaaggag

SEQ ID NO: 2947608 - DNA, 25 bp, Homo sapien
tcccctgtgaggcatgaaaggaggg

SEQ ID NO: 2947609 - DNA, 25 bp, Homo sapien
ctgggggtcccctgtgaggcatgaa

SEQ ID NO: 2947610 - DNA, 25 bp, Homo sapien
cgtgaccagggcgtagctgatgatc

SEQ ID NO: 2947611 - DNA, 25 bp, Homo sapien
tgatcagggatgtggtcgagtctcc

SEQ ID NO: 2947612 - DNA, 25 bp, Homo sapien
gagctgactgcgtccagtacaggga

SEQ ID NO: 2947613 - DNA, 25 bp, Homo sapien
gaatgggaaagtccatgatcgtgac

SEQ ID NO: 2947614 - DNA, 25 bp, Homo sapien
ccatgatctcttcaggtctcgctgg

SEQ ID NO: 2947615 - DNA, 25 bp, Homo sapien
ttagtccttggctcccttcagcgcc

SEQ ID NO: 2947616 - DNA, 25 bp, Homo sapien
gatctcttcaggtctcgctggagcc

SEQ ID NO: 2947617 - DNA, 25 bp, Homo sapien
ctggctctcacctcttagtccttgg

SEQ ID NO: 2947618 - DNA, 25 bp, Homo sapien
gcagccccgactggaaggagcccgg

SEQ ID NO: 2947619 - DNA, 25 bp, Homo sapien
cttcttatacaagcagccccggagg

SEQ ID NO: 2947620 - DNA, 25 bp, Homo sapien
ttcttatacaagcagccccggaggc

SEQ ID NO: 2947621 - DNA, 25 bp, Homo sapien
gagagggtggatgtgaaagtcaggc

SEQ ID NO: 2947622 - DNA, 25 bp, Homo sapien
atgtgaaagtcaggcgtctgcttcc

SEQ ID NO: 2947623 - DNA, 25 bp, Homo sapien
tggatgtgaaagtcaggcgtctgct

SEQ ID NO: 2947624 - DNA, 25 bp, Homo sapien
aaagtcaggcgtctgcttccctttg

SEQ ID NO: 2947625 - DNA, 25 bp, Homo sapien
tatataacctactgcaggtgtgtgc

SEQ ID NO: 2947626 - DNA, 25 bp, Homo sapien
ttgaactgatgtgaggctgctgatg

SEQ ID NO: 2947627 - DNA, 25 bp, Homo sapien
aatgcaaatgagctcgatggtcggc

SEQ ID NO: 2947628 - DNA, 25 bp, Homo sapien
tattccgaagcgcatctgggcacgg

SEQ ID NO: 2947629 - DNA, 25 bp, Homo sapien
gcacgcccgcagtccctcatcagca

SEQ ID NO: 2947630 - DNA, 25 bp, Homo sapien
gccgaatgagcgctaccggctgctg

SEQ ID NO: 2947631 - DNA, 25 bp, Homo sapien
ctattccaggctcggtggtcttgac

SEQ ID NO: 2947632 - DNA, 25 bp, Homo sapien
ccttcgagtacaccggcaaggacgg

SEQ ID NO: 2947633 - DNA, 25 bp, Homo sapien
tcttgttgcccgcaggaaaacgccg

SEQ ID NO: 2947634 - DNA, 25 bp, Homo sapien
tccttccccacaaggatcaagaggg

SEQ ID NO: 2947635 - DNA, 25 bp, Homo sapien
gcaatctggccaggcgaacctgcgg

SEQ ID NO: 2947636 - DNA, 25 bp, Homo sapien
tggtgggagggcaatctggccaggc

SEQ ID NO: 2947637 - DNA, 25 bp, Homo sapien
tgggagggcaatctggccaggcgaa

SEQ ID NO: 2947638 - DNA, 25 bp, Homo sapien
atcagggcgaggctgcttgtccaga

SEQ ID NO: 2947639 - DNA, 25 bp, Homo sapien
gcaggctcagatcagggcgaggctg

SEQ ID NO: 2947640 - DNA, 25 bp, Homo sapien
aattctccaacagaagacccccaag

SEQ ID NO: 2947641 - DNA, 25 bp, Homo sapien
tccaacagaagacccccaaggcgga

SEQ ID NO: 2947642 - DNA, 25 bp, Homo sapien
gagattccaatccaacccccaagag

SEQ ID NO: 2947643 - DNA, 25 bp, Homo sapien
tggtttggagattccaatccaaccc

SEQ ID NO: 2947644 - DNA, 25 bp, Homo sapien
aaggaggacaggtggtttggagatt

SEQ ID NO: 2947645 - DNA, 25 bp, Homo sapien
ggtggtttggagattccaatccaac

SEQ ID NO: 2947646 - DNA, 25 bp, Homo sapien
tctgagatttcctgtccttaaaggc

SEQ ID NO: 2947647 - DNA, 25 bp, Homo sapien
aaagcgcccctgaggccacttgttt

SEQ ID NO: 2947648 - DNA, 25 bp, Homo sapien
tctgccaatctaggtgccccagctt

SEQ ID NO: 2947649 - DNA, 25 bp, Homo sapien
ctttcagattacaaggtggcaccct

SEQ ID NO: 2947650 - DNA, 25 bp, Homo sapien
tgtttccgcatcaggaacaatgaga

SEQ ID NO: 2947651 - DNA, 25 bp, Homo sapien
aaggagtccctgctgtacttgtaca

SEQ ID NO: 2947652 - DNA, 25 bp, Homo sapien
aagatgctgagtgacagccacggcg

SEQ ID NO: 2947653 - DNA, 25 bp, Homo sapien
acagtttgactggtcgtccgcccag

SEQ ID NO: 2947654 - DNA, 25 bp, Homo sapien
acaggcgctcaccactgcacccggc

SEQ ID NO: 2947655 - DNA, 25 bp, Homo sapien
tacaggcgctcaccactgcacccgg

SEQ ID NO: 2947656 - DNA, 25 bp, Homo sapien
caggcgctcaccactgcacccggct

SEQ ID NO: 2947657 - DNA, 25 bp, Homo sapien
caagccaccaaggattatgctgtgc

SEQ ID NO: 2947658 - DNA, 25 bp, Homo sapien
ctatcgttttgccaaggtgaaagga

SEQ ID NO: 2947659 - DNA, 25 bp, Homo sapien
tactgagggacattatgtgcttgat

SEQ ID NO: 2947660 - DNA, 25 bp, Homo sapien
tatgctgtgccagttgtatactatc

SEQ ID NO: 2947661 - DNA, 25 bp, Homo sapien
cagctgatttccagaggatggaaga

SEQ ID NO: 2947662 - DNA, 25 bp, Homo sapien
agctgatttccagaggatggaagaa

SEQ ID NO: 2947663 - DNA, 25 bp, Homo sapien
acagctgatttccagaggatggaag

SEQ ID NO: 2947664 - DNA, 25 bp, Homo sapien
gctgatttccagaggatggaagaag

SEQ ID NO: 2947665 - DNA, 25 bp, Homo sapien
gaactatggaagaatcaaagcagtg

SEQ ID NO: 2947666 - DNA, 25 bp, Homo sapien
gggcaatcctgtcgctaagtaaata

SEQ ID NO: 2947667 - DNA, 25 bp, Homo sapien
gggatgcgtgttggttataagcaaa

SEQ ID NO: 2947668 - DNA, 25 bp, Homo sapien
ccccgcaagatagcaaggatgactg

SEQ ID NO: 2947669 - DNA, 25 bp, Homo sapien
tgatgacttaaattacatggggcca

SEQ ID NO: 2947670 - DNA, 25 bp, Homo sapien
agtgatgacttaaattacatggggc

SEQ ID NO: 2947671 - DNA, 25 bp, Homo sapien
tttattagtgatgacttaaattaca

SEQ ID NO: 2947672 - DNA, 25 bp, Homo sapien
atgacttaaattacatggggccagg

SEQ ID NO: 2947673 - DNA, 25 bp, Homo sapien
cattaatgagagcacggaagcccag

SEQ ID NO: 2947674 - DNA, 25 bp, Homo sapien
agaactacattaatgagagcacgga

SEQ ID NO: 2947675 - DNA, 25 bp, Homo sapien
actacattaatgagagcacggaagc

SEQ ID NO: 2947676 - DNA, 25 bp, Homo sapien
cagaaagagaagtcgcttgaggtga

SEQ ID NO: 2947677 - DNA, 25 bp, Homo sapien
aatttaagaactagggtggacacag

SEQ ID NO: 2947678 - DNA, 25 bp, Homo sapien
gagacattccccctcagattagaga

SEQ ID NO: 2947679 - DNA, 25 bp, Homo sapien
cctgtttacagtgcccattcctgga

SEQ ID NO: 2947680 - DNA, 25 bp, Homo sapien
gctcagcctgcatcaacttatctaa

SEQ ID NO: 2947681 - DNA, 25 bp, Homo sapien
aaagcctacatctggctactctggg

SEQ ID NO: 2947682 - DNA, 25 bp, Homo sapien
cattaatgagagcacggaagcccag

SEQ ID NO: 2947683 - DNA, 25 bp, Homo sapien
actacattaatgagagcacggaagc

SEQ ID NO: 2947684 - DNA, 25 bp, Homo sapien
agaactacattaatgagagcacgga

SEQ ID NO: 2947685 - DNA, 25 bp, Homo sapien
cagaaagagaagtcgcttgaggtga

SEQ ID NO: 2947686 - DNA, 25 bp, Homo sapien
gggtgtacagctatggactgatgca

SEQ ID NO: 2947687 - DNA, 25 bp, Homo sapien
gcttggttacataaagtcagtgttg

SEQ ID NO: 2947688 - DNA, 25 bp, Homo sapien
tgagcagctagacaccaatgacgag

SEQ ID NO: 2947689 - DNA, 25 bp, Homo sapien
tggactgatgcatcccatcccatca

SEQ ID NO: 2947690 - DNA, 25 bp, Homo sapien
gccttataggacagatgtagatacg

SEQ ID NO: 2947691 - DNA, 25 bp, Homo sapien
ctgccttataggacagatgtagata

SEQ ID NO: 2947692 - DNA, 25 bp, Homo sapien
tataggacagatgtagatacggttt

SEQ ID NO: 2947693 - DNA, 25 bp, Homo sapien
cttataggacagatgtagatacggt

SEQ ID NO: 2947694 - DNA, 25 bp, Homo sapien
ctttttcccacacctgtggtagcgt

SEQ ID NO: 2947695 - DNA, 25 bp, Homo sapien
cagtccataggcttcaatgacacct

SEQ ID NO: 2947696 - DNA, 25 bp, Homo sapien
tgacacctttttcccacacctgtgg

SEQ ID NO: 2947697 - DNA, 25 bp, Homo sapien
agtccataggcttcaatgacacctt

SEQ ID NO: 2947698 - DNA, 25 bp, Homo sapien
gtcttgtatggaggagcttggtgtg

SEQ ID NO: 2947699 - DNA, 25 bp, Homo sapien
agtccgaggtcttgtatggaggagc

SEQ ID NO: 2947700 - DNA, 25 bp, Homo sapien
tccgaggtcttgtatggaggagctt

SEQ ID NO: 2947701 - DNA, 25 bp, Homo sapien
cttgtatggaggagcttggtgtggg

SEQ ID NO: 2947702 - DNA, 25 bp, Homo sapien
gacatcagcttcctttacatagcgg

SEQ ID NO: 2947703 - DNA, 25 bp, Homo sapien
tgtctatggcacatcgatatcatgc

SEQ ID NO: 2947704 - DNA, 25 bp, Homo sapien
cggagaggcgcaaacattaaagaca

SEQ ID NO: 2947705 - DNA, 25 bp, Homo sapien
gagcttcggtcacaaacatgcctta

SEQ ID NO: 2947706 - DNA, 25 bp, Homo sapien
caactttttgctgaagttatggatg

SEQ ID NO: 2947707 - DNA, 25 bp, Homo sapien
ttatagaaggaattggtttagacac

SEQ ID NO: 2947708 - DNA, 25 bp, Homo sapien
tactctattgtcagcagaatatgac

SEQ ID NO: 2947709 - DNA, 25 bp, Homo sapien
ccaacaccttttcaccgctgggtat

SEQ ID NO: 2947710 - DNA, 25 bp, Homo sapien
aaagtaattaactggcatcatctgt

SEQ ID NO: 2947711 - DNA, 25 bp, Homo sapien
attcaaagtaattaactggcatcat

SEQ ID NO: 2947712 - DNA, 25 bp, Homo sapien
tcatctgtccaagagatgggatgga

SEQ ID NO: 2947713 - DNA, 25 bp, Homo sapien
atctgtccaagagatgggatggata

SEQ ID NO: 2947714 - DNA, 25 bp, Homo sapien
caagtgtagacatgcagaggattgt

SEQ ID NO: 2947715 - DNA, 25 bp, Homo sapien
tctagcaaaatctaggagtgaagtg

SEQ ID NO: 2947716 - DNA, 25 bp, Homo sapien
aaaagcctaggatgtttcaacagag

SEQ ID NO: 2947717 - DNA, 25 bp, Homo sapien
cagatcagttgtaataggagtggaa

SEQ ID NO: 2947718 - DNA, 25 bp, Homo sapien
gagctgtgagaccagacatgatgac

SEQ ID NO: 2947719 - DNA, 25 bp, Homo sapien
agtcctttgaaccaaacacagttga

SEQ ID NO: 2947720 - DNA, 25 bp, Homo sapien
tcctatctgtaagatcataaagtcc

SEQ ID NO: 2947721 - DNA, 25 bp, Homo sapien
catgatgactcacgcttgaaatctc

SEQ ID NO: 2947722 - DNA, 25 bp, Homo sapien
tgtttaacgagtccctgaacagagt

SEQ ID NO: 2947723 - DNA, 25 bp, Homo sapien
aatgtcatagcctgtgcccaaagga

SEQ ID NO: 2947724 - DNA, 25 bp, Homo sapien
catttctggcactgacatattggcc

SEQ ID NO: 2947725 - DNA, 25 bp, Homo sapien
taagaggtggccctgattgctctca

SEQ ID NO: 2947726 - DNA, 25 bp, Homo sapien
aaattgtacagtgtacttcctgcca

SEQ ID NO: 2947727 - DNA, 25 bp, Homo sapien
aaaattgtacagtgtacttcctgcc

SEQ ID NO: 2947728 - DNA, 25 bp, Homo sapien
aattgtacagtgtacttcctgccaa

SEQ ID NO: 2947729 - DNA, 25 bp, Homo sapien
gtggtgttgccatcctatgattgca

SEQ ID NO: 2947730 - DNA, 25 bp, Homo sapien
agagaccatggtgccacttccgaag

SEQ ID NO: 2947731 - DNA, 25 bp, Homo sapien
ttctgtgctttagaggtggtgttgc

SEQ ID NO: 2947732 - DNA, 25 bp, Homo sapien
gaagcctaattaacatcctcggaag

SEQ ID NO: 2947733 - DNA, 25 bp, Homo sapien
caccaccacgccctgctagtttttg

SEQ ID NO: 2947734 - DNA, 25 bp, Homo sapien
ctagagtgcaatggcccggtctctg

SEQ ID NO: 2947735 - DNA, 25 bp, Homo sapien
ctcactgcaatctccgcctcccaga

SEQ ID NO: 2947736 - DNA, 25 bp, Homo sapien
ccgcctcccagattctcctgtctca

SEQ ID NO: 2947737 - DNA, 25 bp, Homo sapien
atttcctgttgccacttatgacccg

SEQ ID NO: 2947738 - DNA, 25 bp, Homo sapien
tatgacccgatttccttgaccagtt

SEQ ID NO: 2947739 - DNA, 25 bp, Homo sapien
cgatttccttgaccagttattcctc

SEQ ID NO: 2947740 - DNA, 25 bp, Homo sapien
ctactacatccttcttaaatttcct

SEQ ID NO: 2947741 - DNA, 25 bp, Homo sapien
ggcaaacttgttcttagggcaccaa

SEQ ID NO: 2947742 - DNA, 25 bp, Homo sapien
cattcttgtgtggacctcagtttac

SEQ ID NO: 2947743 - DNA, 25 bp, Homo sapien
ttgttcttggatactgactaggccc

SEQ ID NO: 2947744 - DNA, 25 bp, Homo sapien
cttgcgatgtgatatgagaccctga

SEQ ID NO: 2947745 - DNA, 25 bp, Homo sapien
aatagttgggcataggatggcatgc

SEQ ID NO: 2947746 - DNA, 25 bp, Homo sapien
tttgaggctctagtcagctatggac

SEQ ID NO: 2947747 - DNA, 25 bp, Homo sapien
tagtcagctatggactgtgccacca

SEQ ID NO: 2947748 - DNA, 25 bp, Homo sapien
agtttctccagtggcactagctgtt

SEQ ID NO: 2947749 - DNA, 25 bp, Homo sapien
tactttcagtaacaatagggaggtc

SEQ ID NO: 2947750 - DNA, 25 bp, Homo sapien
tctgcaggatggattgacaaggaca

SEQ ID NO: 2947751 - DNA, 25 bp, Homo sapien
gaggcatgtcctagttacgcagtga

SEQ ID NO: 2947752 - DNA, 25 bp, Homo sapien
tgttcaattctgctcacccatgggc

SEQ ID NO: 2947753 - DNA, 25 bp, Homo sapien
aggtccgaccggctttgggctccag

SEQ ID NO: 2947754 - DNA, 25 bp, Homo sapien
tatggtctccgaaggccttagacgc

SEQ ID NO: 2947755 - DNA, 25 bp, Homo sapien
gactaatttccctcggtcgctgcca

SEQ ID NO: 2947756 - DNA, 25 bp, Homo sapien
gcttcagtttccctagagggcggga

SEQ ID NO: 2947757 - DNA, 25 bp, Homo sapien
tcctctgcccgttcacctgcaccag

SEQ ID NO: 2947758 - DNA, 25 bp, Homo sapien
ctgggggtggcccgccatacttcct

SEQ ID NO: 2947759 - DNA, 25 bp, Homo sapien
ttcctctgcccgttcacctgcacca

SEQ ID NO: 2947760 - DNA, 25 bp, Homo sapien
gcccgccatacttcctctgcccgtt

SEQ ID NO: 2947761 - DNA, 25 bp, Homo sapien
cagccgcccgatgaacacctctgac

SEQ ID NO: 2947762 - DNA, 25 bp, Homo sapien
gccgcccgatgaacacctctgaccc

SEQ ID NO: 2947763 - DNA, 25 bp, Homo sapien
agccgcccgatgaacacctctgacc

SEQ ID NO: 2947764 - DNA, 25 bp, Homo sapien
gcagccgcccgatgaacacctctga

SEQ ID NO: 2947765 - DNA, 25 bp, Homo sapien
ctggaacagcaggatagctggtgct

SEQ ID NO: 2947766 - DNA, 25 bp, Homo sapien
gcagcgggtggttgtgcagcgggcg

SEQ ID NO: 2947767 - DNA, 25 bp, Homo sapien
gcgccgcgagctgcagcgggcatat

SEQ ID NO: 2947768 - DNA, 25 bp, Homo sapien
ccgcgagctgcagcgggcatatgcg

SEQ ID NO: 2947769 - DNA, 25 bp, Homo sapien
gcgggtggttgtgcagcgggcgatg

SEQ ID NO: 2947770 - DNA, 25 bp, Homo sapien
tgcgggtcagattcggcggcaggca

SEQ ID NO: 2947771 - DNA, 25 bp, Homo sapien
gcagcgcgggctgcagcgcggtgcg

SEQ ID NO: 2947772 - DNA, 25 bp, Homo sapien
gctgcagcgcggtgcgggtcagatt

SEQ ID NO: 2947773 - DNA, 25 bp, Homo sapien
cggcaggcagtcaacgctcagctca

SEQ ID NO: 2947774 - DNA, 25 bp, Homo sapien
ctgcccgggcgccggtccggggctg

SEQ ID NO: 2947775 - DNA, 25 bp, Homo sapien
cggggctgggcagcagccgcgcctc

SEQ ID NO: 2947776 - DNA, 25 bp, Homo sapien
ggtccggggctgggcagcagccgcg

SEQ ID NO: 2947777 - DNA, 25 bp, Homo sapien
tccggggctgggcagcagccgcgcc

SEQ ID NO: 2947778 - DNA, 25 bp, Homo sapien
caacccagatgaggccgctgaaggg

SEQ ID NO: 2947779 - DNA, 25 bp, Homo sapien
ccagcttcattcgttggcacagcaa

SEQ ID NO: 2947780 - DNA, 25 bp, Homo sapien
gaatcaccacctggtaccagaagcg

SEQ ID NO: 2947781 - DNA, 25 bp, Homo sapien
aagggcaccggatgcccaggaatca

SEQ ID NO: 2947782 - DNA, 25 bp, Homo sapien
gggtcagatagtggccacccaggtc

SEQ ID NO: 2947783 - DNA, 25 bp, Homo sapien
gacacaggctgtgcatgcccattcg

SEQ ID NO: 2947784 - DNA, 25 bp, Homo sapien
ggctgtgcatgcccattcgggctgc

SEQ ID NO: 2947785 - DNA, 25 bp, Homo sapien
ggcctgacacaggctgtgcatgccc

SEQ ID NO: 2947786 - DNA, 25 bp, Homo sapien
gggcaaggcccatcaccacaactta

SEQ ID NO: 2947787 - DNA, 25 bp, Homo sapien
gcccatcaccacaacttaagcaaaa

SEQ ID NO: 2947788 - DNA, 25 bp, Homo sapien
aaggcccatcaccacaacttaagca

SEQ ID NO: 2947789 - DNA, 25 bp, Homo sapien
gcaaggcccatcaccacaacttaag

SEQ ID NO: 2947790 - DNA, 25 bp, Homo sapien
ggaatggccagggaagataactggg

SEQ ID NO: 2947791 - DNA, 25 bp, Homo sapien
acaaggaatggccagggaagataac

SEQ ID NO: 2947792 - DNA, 25 bp, Homo sapien
cagaggggggaaggtatgatcgggt

SEQ ID NO: 2947793 - DNA, 25 bp, Homo sapien
tggcagaggggggaaggtatgatcg

SEQ ID NO: 2947794 - DNA, 25 bp, Homo sapien
cagaaaccaaaaccagaatgccatg

SEQ ID NO: 2947795 - DNA, 25 bp, Homo sapien
ataaatacaaccagcatagaaagac

SEQ ID NO: 2947796 - DNA, 25 bp, Homo sapien
taaatacaaccagcatagaaagacc

SEQ ID NO: 2947797 - DNA, 25 bp, Homo sapien
tctgggagggacttagctgggtggt

SEQ ID NO: 2947798 - DNA, 25 bp, Homo sapien
ttctcttgggatgtttcagtcaagc

SEQ ID NO: 2947799 - DNA, 25 bp, Homo sapien
cagttctcttgggatgtttcagtca

SEQ ID NO: 2947800 - DNA, 25 bp, Homo sapien
aggaatctgggagggacttagctgg

SEQ ID NO: 2947801 - DNA, 25 bp, Homo sapien
acctcgtacttatgttgttataaag

SEQ ID NO: 2947802 - DNA, 25 bp, Homo sapien
tgtaaaacagggtaataagtctcaa

SEQ ID NO: 2947803 - DNA, 25 bp, Homo sapien
gctagcggttttggtatcctgtaat

SEQ ID NO: 2947804 - DNA, 25 bp, Homo sapien
cagaagctagcggttttggtatcct

SEQ ID NO: 2947805 - DNA, 25 bp, Homo sapien
taatatcaaacagggaggttagtaa

SEQ ID NO: 2947806 - DNA, 25 bp, Homo sapien
aaagaatggagctggttatttcagc

SEQ ID NO: 2947807 - DNA, 25 bp, Homo sapien
gcaaagggcttagtgatgcatctta

SEQ ID NO: 2947808 - DNA, 25 bp, Homo sapien
ttttggacagtaacaccctcagatg

SEQ ID NO: 2947809 - DNA, 25 bp, Homo sapien
cacccgccggctaaccgtgcacttt

SEQ ID NO: 2947810 - DNA, 25 bp, Homo sapien
gcactttaacccgccctccagctgt

SEQ ID NO: 2947811 - DNA, 25 bp, Homo sapien
ccgtgcactttaacccgccctccag

SEQ ID NO: 2947812 - DNA, 25 bp, Homo sapien
actttaacccgccctccagctgtgt

SEQ ID NO: 2947813 - DNA, 25 bp, Homo sapien
cttgtccttgggcacgcatcgggca

SEQ ID NO: 2947814 - DNA, 25 bp, Homo sapien
cgcatcgggcacagttagtgcagcg

SEQ ID NO: 2947815 - DNA, 25 bp, Homo sapien
taggcatcgaagacgctcacttcag

SEQ ID NO: 2947816 - DNA, 25 bp, Homo sapien
cggccctttttggcacgaccattgt

SEQ ID NO: 2947817 - DNA, 25 bp, Homo sapien
gggtgttcggtccttgcgggcttca

SEQ ID NO: 2947818 - DNA, 25 bp, Homo sapien
ggtgttcggtccttgcgggcttcac

SEQ ID NO: 2947819 - DNA, 25 bp, Homo sapien
gggacctggggcagcacccgcaggt

SEQ ID NO: 2947820 - DNA, 25 bp, Homo sapien
tggtgggggacctggggcagcaccc

SEQ ID NO: 2947821 - DNA, 25 bp, Homo sapien
gctttggtgggggacctggggcagc

SEQ ID NO: 2947822 - DNA, 25 bp, Homo sapien
gtgggggacctggggcagcacccgc

SEQ ID NO: 2947823 - DNA, 25 bp, Homo sapien
ctccagagaatagcctgtcttcagt

SEQ ID NO: 2947824 - DNA, 25 bp, Homo sapien
agagaatagcctgtcttcagtcttt

SEQ ID NO: 2947825 - DNA, 25 bp, Homo sapien
gagaatagcctgtcttcagtcttta

SEQ ID NO: 2947826 - DNA, 25 bp, Homo sapien
ttttctccagagaatagcctgtctt

SEQ ID NO: 2947827 - DNA, 25 bp, Homo sapien
ttgtcccaggaccattgtttgaaaa

SEQ ID NO: 2947828 - DNA, 25 bp, Homo sapien
taatatgaggtgagggttcaacttc

SEQ ID NO: 2947829 - DNA, 25 bp, Homo sapien
cattctattgtgtgtgggtatccag

SEQ ID NO: 2947830 - DNA, 25 bp, Homo sapien
tagataatatgaggtgagggttcaa

SEQ ID NO: 2947831 - DNA, 25 bp, Homo sapien
tatgactgtgagccacattgtgacc

SEQ ID NO: 2947832 - DNA, 25 bp, Homo sapien
atgactgtgagccacattgtgacca

SEQ ID NO: 2947833 - DNA, 25 bp, Homo sapien
tgactgtgagccacattgtgaccaa

SEQ ID NO: 2947834 - DNA, 25 bp, Homo sapien
gactgtgagccacattgtgaccaat

SEQ ID NO: 2947835 - DNA, 25 bp, Homo sapien
atgtgttcttgctatgcgtttgtca

SEQ ID NO: 2947836 - DNA, 25 bp, Homo sapien
aggcgagagcccgagatcgcacctc

SEQ ID NO: 2947837 - DNA, 25 bp, Homo sapien
tgtcactgaggcttcgaagacttgg

SEQ ID NO: 2947838 - DNA, 25 bp, Homo sapien
gcgacagtttgactcttgacccaag

SEQ ID NO: 2947839 - DNA, 25 bp, Homo sapien
cttaagaggcatccaagtagcattc

SEQ ID NO: 2947840 - DNA, 25 bp, Homo sapien
gtcaggatataaagacaatactcag

SEQ ID NO: 2947841 - DNA, 25 bp, Homo sapien
caagtagcattcatagtgtcaggat

SEQ ID NO: 2947842 - DNA, 25 bp, Homo sapien
tccctcggttaccaagtataagcag

SEQ ID NO: 2947843 - DNA, 25 bp, Homo sapien
tcctaggaagcaaacacaagaggca

SEQ ID NO: 2947844 - DNA, 25 bp, Homo sapien
ctgatttgcaagagtgggacacacc

SEQ ID NO: 2947845 - DNA, 25 bp, Homo sapien
gatatagccaatcaatcctaggaag

SEQ ID NO: 2947846 - DNA, 25 bp, Homo sapien
gggacacaccctagtacctatgact

SEQ ID NO: 2947847 - DNA, 25 bp, Homo sapien
ggactctaatcccattatgacttgt

SEQ ID NO: 2947848 - DNA, 25 bp, Homo sapien
cagggaggactctaatcccattatg

SEQ ID NO: 2947849 - DNA, 25 bp, Homo sapien
ggaggactctaatcccattatgact

SEQ ID NO: 2947850 - DNA, 25 bp, Homo sapien
atcagggaggactctaatcccatta

SEQ ID NO: 2947851 - DNA, 25 bp, Homo sapien
ttggggcttgcatgtgagtcaatgt

SEQ ID NO: 2947852 - DNA, 25 bp, Homo sapien
catgtttggggcttgcatgtgagtc

SEQ ID NO: 2947853 - DNA, 25 bp, Homo sapien
tatggctgatagagagctcccgcag

SEQ ID NO: 2947854 - DNA, 25 bp, Homo sapien
tgtttggggcttgcatgtgagtcaa

SEQ ID NO: 2947855 - DNA, 25 bp, Homo sapien
tggagaaaagagtcacgtagcggct

SEQ ID NO: 2947856 - DNA, 25 bp, Homo sapien
cgtagcggctgatggctatcttcaa

SEQ ID NO: 2947857 - DNA, 25 bp, Homo sapien
cactggagatacttgtttgtgcaca

SEQ ID NO: 2947858 - DNA, 25 bp, Homo sapien
ctacagaagtcagcctagcagagtg

SEQ ID NO: 2947859 - DNA, 25 bp, Homo sapien
tagacactaggccatatgaagaaca

SEQ ID NO: 2947860 - DNA, 25 bp, Homo sapien
actaggccatatgaagaacagctgc

SEQ ID NO: 2947861 - DNA, 25 bp, Homo sapien
gagagcaaaggcattagacactagg

SEQ ID NO: 2947862 - DNA, 25 bp, Homo sapien
cagctgctataattggagattttac

SEQ ID NO: 2947863 - DNA, 25 bp, Homo sapien
gaacatcctgggaacgttatatggg

SEQ ID NO: 2947864 - DNA, 25 bp, Homo sapien
ctgggaacgttatatgggcagtgct

SEQ ID NO: 2947865 - DNA, 25 bp, Homo sapien
tacatcagtcagaacatcctgggaa

SEQ ID NO: 2947866 - DNA, 25 bp, Homo sapien
tcccacactctgagaccggggcaaa

SEQ ID NO: 2947867 - DNA, 25 bp, Homo sapien
tttgtgtttggctaagagtaagccc

SEQ ID NO: 2947868 - DNA, 25 bp, Homo sapien
aaagaacagtttgatcctaggctgc

SEQ ID NO: 2947869 - DNA, 25 bp, Homo sapien
agagtaagcccttaacacaaaaatg

SEQ ID NO: 2947870 - DNA, 25 bp, Homo sapien
cagttcctaggacatgggtgatacc

SEQ ID NO: 2947871 - DNA, 25 bp, Homo sapien
taacaacaatctgtcagccaggtgt

SEQ ID NO: 2947872 - DNA, 25 bp, Homo sapien
gggagacgcctttggcagtagttca

SEQ ID NO: 2947873 - DNA, 25 bp, Homo sapien
caacacaccctccaagcacaagaag

SEQ ID NO: 2947874 - DNA, 25 bp, Homo sapien
gcagtagttcatgtgacattaatga

SEQ ID NO: 2947875 - DNA, 25 bp, Homo sapien
cagtcactgctacattggctggagg

SEQ ID NO: 2947876 - DNA, 25 bp, Homo sapien
cacagacccagtcactgctacattg

SEQ ID NO: 2947877 - DNA, 25 bp, Homo sapien
cactgctacattggctggaggaagc

SEQ ID NO: 2947878 - DNA, 25 bp, Homo sapien
gacccagtcactgctacattggctg

SEQ ID NO: 2947879 - DNA, 25 bp, Homo sapien
taacaaggtgactcagagtgggccc

SEQ ID NO: 2947880 - DNA, 25 bp, Homo sapien
tcaggagcacgtccctggttggcaa

SEQ ID NO: 2947881 - DNA, 25 bp, Homo sapien
ggatgctaacaagatcacctctggg

SEQ ID NO: 2947882 - DNA, 25 bp, Homo sapien
tttgttatcatagcgggcccacacc

SEQ ID NO: 2947883 - DNA, 25 bp, Homo sapien
tgcaggtacgttctttgggaagtga

SEQ ID NO: 2947884 - DNA, 25 bp, Homo sapien
tagggctagccctctaaagcaaaac

SEQ ID NO: 2947885 - DNA, 25 bp, Homo sapien
aagcaaaacttgagacaaaagctta

SEQ ID NO: 2947886 - DNA, 25 bp, Homo sapien
agcattctagggctagccctctaaa

SEQ ID NO: 2947887 - DNA, 25 bp, Homo sapien
gctcatcgtcctctaacaagtaagt

SEQ ID NO: 2947888 - DNA, 25 bp, Homo sapien
actgcatttctgagctcatcgtcct

SEQ ID NO: 2947889 - DNA, 25 bp, Homo sapien
ttcccaggcctcatcaatctgctct

SEQ ID NO: 2947890 - DNA, 25 bp, Homo sapien
tctaacaagtaagttagcacttccc

SEQ ID NO: 2947891 - DNA, 25 bp, Homo sapien
gttgcggtgagccaaggtagcgcca

SEQ ID NO: 2947892 - DNA, 25 bp, Homo sapien
ttgcggtgagccaaggtagcgccat

SEQ ID NO: 2947893 - DNA, 25 bp, Homo sapien
ggaagttgcggtgagccaaggtagc

SEQ ID NO: 2947894 - DNA, 25 bp, Homo sapien
aagttgcggtgagccaaggtagcgc

SEQ ID NO: 2947895 - DNA, 25 bp, Homo sapien
gagcttgtccgttatctctgccgcg

SEQ ID NO: 2947896 - DNA, 25 bp, Homo sapien
ctctgccgcgttcatagtattaggg

SEQ ID NO: 2947897 - DNA, 25 bp, Homo sapien
ttcgtaaagcccatgtccagtagtg

SEQ ID NO: 2947898 - DNA, 25 bp, Homo sapien
tgccagtttctgtagcggagggaat

SEQ ID NO: 2947899 - DNA, 25 bp, Homo sapien
agcagaggctagctgatgtggccac

SEQ ID NO: 2947900 - DNA, 25 bp, Homo sapien
cagaggctagctgatgtggccacaa

SEQ ID NO: 2947901 - DNA, 25 bp, Homo sapien
aagctactgaaatggaaggtggtgt

SEQ ID NO: 2947902 - DNA, 25 bp, Homo sapien
aaggatgccaaagactaacaggact

SEQ ID NO: 2947903 - DNA, 25 bp, Homo sapien
ccagacgccagaccaggattgcaac

SEQ ID NO: 2947904 - DNA, 25 bp, Homo sapien
caaaaatgatcatcaaagctactga

SEQ ID NO: 2947905 - DNA, 25 bp, Homo sapien
taactcgagggcaataccaggtggg

SEQ ID NO: 2947906 - DNA, 25 bp, Homo sapien
gggaaaagttccaatctgagcctct

SEQ ID NO: 2947907 - DNA, 25 bp, Homo sapien
gccatcccaaaagtgaaccgtctgc

SEQ ID NO: 2947908 - DNA, 25 bp, Homo sapien
aatgcgccggagcttggtcttgaca

SEQ ID NO: 2947909 - DNA, 25 bp, Homo sapien
gcctggcactgtattaggtaagctg

SEQ ID NO: 2947910 - DNA, 25 bp, Homo sapien
acagtccctgcccatttgaggcgta

SEQ ID NO: 2947911 - DNA, 25 bp, Homo sapien
caataagtgtttaacgaggcctggc

SEQ ID NO: 2947912 - DNA, 25 bp, Homo sapien
agcaagttctttatcgtctgagcaa

SEQ ID NO: 2947913 - DNA, 25 bp, Homo sapien
tgtgccgtgaaaaggcaaggcgtac

SEQ ID NO: 2947914 - DNA, 25 bp, Homo sapien
aaaggctgtagtgggtgtgccgtga

SEQ ID NO: 2947915 - DNA, 25 bp, Homo sapien
agggcctaaggctgggacagcacat

SEQ ID NO: 2947916 - DNA, 25 bp, Homo sapien
cacatctcagtttgtcttccataaa

SEQ ID NO: 2947917 - DNA, 25 bp, Homo sapien
tctcagtgtaatgctcctcagggac

SEQ ID NO: 2947918 - DNA, 25 bp, Homo sapien
gaaaacttctcagtgtaatgctcct

SEQ ID NO: 2947919 - DNA, 25 bp, Homo sapien
tcagtgtaatgctcctcagggacca

SEQ ID NO: 2947920 - DNA, 25 bp, Homo sapien
acttctcagtgtaatgctcctcagg

SEQ ID NO: 2947921 - DNA, 25 bp, Homo sapien
gcatcctcctagagagggcttccca

SEQ ID NO: 2947922 - DNA, 25 bp, Homo sapien
ggttcgtccagcacttgtgtggcca

SEQ ID NO: 2947923 - DNA, 25 bp, Homo sapien
cagcggttcgtccagcacttgtgtg

SEQ ID NO: 2947924 - DNA, 25 bp, Homo sapien
tccagcggttcgtccagcacttgtg

SEQ ID NO: 2947925 - DNA, 25 bp, Homo sapien
atgctaattactggccaaatgcagg

SEQ ID NO: 2947926 - DNA, 25 bp, Homo sapien
caggagcttgtctaatagctactac

SEQ ID NO: 2947927 - DNA, 25 bp, Homo sapien
tagctactacatcaggacaccttgg

SEQ ID NO: 2947928 - DNA, 25 bp, Homo sapien
cacctagtggcaatgtgcagcagca

SEQ ID NO: 2947929 - DNA, 25 bp, Homo sapien
taccacaggcacagagatggattcc

SEQ ID NO: 2947930 - DNA, 25 bp, Homo sapien
ccacaggcacagagatggattcctc

SEQ ID NO: 2947931 - DNA, 25 bp, Homo sapien
caggcacagagatggattcctctac

SEQ ID NO: 2947932 - DNA, 25 bp, Homo sapien
cattaccacaggcacagagatggat

SEQ ID NO: 2947933 - DNA, 25 bp, Homo sapien
tccccttttgtaatgcagacataat

SEQ ID NO: 2947934 - DNA, 25 bp, Homo sapien
tcaagtgactagcacagtatctact

SEQ ID NO: 2947935 - DNA, 25 bp, Homo sapien
cttctaggatatccctgttttctgg

SEQ ID NO: 2947936 - DNA, 25 bp, Homo sapien
taatacacatgcctcgctcagtgca

SEQ ID NO: 2947937 - DNA, 25 bp, Homo sapien
tatgtgagccctgataacccagacc

SEQ ID NO: 2947938 - DNA, 25 bp, Homo sapien
cgtggtctccgctgacctaacagca

SEQ ID NO: 2947939 - DNA, 25 bp, Homo sapien
tgtggcctccagcaagtcaccttat

SEQ ID NO: 2947940 - DNA, 25 bp, Homo sapien
cagattccaaggcagtagggtgtac

SEQ ID NO: 2947941 - DNA, 25 bp, Homo sapien
ttctcttaaacaggagtgggctgct

SEQ ID NO: 2947942 - DNA, 25 bp, Homo sapien
tgactacagtccagttgcagaaact

SEQ ID NO: 2947943 - DNA, 25 bp, Homo sapien
tttgagatactgagctcccgggcac

SEQ ID NO: 2947944 - DNA, 25 bp, Homo sapien
catacagctttactgagggataacc

SEQ ID NO: 2947945 - DNA, 25 bp, Homo sapien
caacaggttaggatgatgggccaaa

SEQ ID NO: 2947946 - DNA, 25 bp, Homo sapien
cttcattagtatgaggcggctgcca

SEQ ID NO: 2947947 - DNA, 25 bp, Homo sapien
aaagcttggagggagatctgatgca

SEQ ID NO: 2947948 - DNA, 25 bp, Homo sapien
tatactagatgctgctactgcgctg

SEQ ID NO: 2947949 - DNA, 25 bp, Homo sapien
cctactgctttatgggagcccaacg

SEQ ID NO: 2947950 - DNA, 25 bp, Homo sapien
ggaaatcgggatctaagacagatga

SEQ ID NO: 2947951 - DNA, 25 bp, Homo sapien
ccttccgctttatgggagcccaaca

SEQ ID NO: 2947952 - DNA, 25 bp, Homo sapien
tgcagcactcaaggagaacccttcc

SEQ ID NO: 2947953 - DNA, 25 bp, Homo sapien
catggaaggcgtttagcacagtgcc

SEQ ID NO: 2947954 - DNA, 25 bp, Homo sapien
ccagaatgacgggattacaagaaaa

SEQ ID NO: 2947955 - DNA, 25 bp, Homo sapien
cagggccagagcaacaggaaagaga

SEQ ID NO: 2947956 - DNA, 25 bp, Homo sapien
gagatagacccattattcaagacag

SEQ ID NO: 2947957 - DNA, 25 bp, Homo sapien
caatagcagctctcttttcggtggg

SEQ ID NO: 2947958 - DNA, 25 bp, Homo sapien
ccccgtgacgatgatgaatcctgca

SEQ ID NO: 2947959 - DNA, 25 bp, Homo sapien
tcctggacgctgaggccaatagcag

SEQ ID NO: 2947960 - DNA, 25 bp, Homo sapien
tcctgcatcagcatggactaactgc

SEQ ID NO: 2947961 - DNA, 25 bp, Homo sapien
tagcctttgacgcatctccctgggt

SEQ ID NO: 2947962 - DNA, 25 bp, Homo sapien
tactggccatcacatagaactggag

SEQ ID NO: 2947963 - DNA, 25 bp, Homo sapien
cagttcaggtttcgtgagtgccttc

SEQ ID NO: 2947964 - DNA, 25 bp, Homo sapien
tcagttgggaacaagaggctccgct

SEQ ID NO: 2947965 - DNA, 25 bp, Homo sapien
gactgtgagatatcagtaacccctt

SEQ ID NO: 2947966 - DNA, 25 bp, Homo sapien
gcattgtcagtacaaaccaagggag

SEQ ID NO: 2947967 - DNA, 25 bp, Homo sapien
gtcataaaactagcccttcataggg

SEQ ID NO: 2947968 - DNA, 25 bp, Homo sapien
gacctgtggctatcacctgtgcagc

SEQ ID NO: 2947969 - DNA, 25 bp, Homo sapien
tcctgccttagcatggtctaccatg

SEQ ID NO: 2947970 - DNA, 25 bp, Homo sapien
ccttagcatggtctaccatgatggt

SEQ ID NO: 2947971 - DNA, 25 bp, Homo sapien
agcatggtctaccatgatggtttcc

SEQ ID NO: 2947972 - DNA, 25 bp, Homo sapien
cttttcctgccttagcatggtctac

SEQ ID NO: 2947973 - DNA, 25 bp, Homo sapien
caaacaggtgctttgaatgggatca

SEQ ID NO: 2947974 - DNA, 25 bp, Homo sapien
cgtagaagggtcttgactactgtcc

SEQ ID NO: 2947975 - DNA, 25 bp, Homo sapien
gaatgggatcatccgtagaagggtc

SEQ ID NO: 2947976 - DNA, 25 bp, Homo sapien
caagtgccaggttcatcaggggtgc

SEQ ID NO: 2947977 - DNA, 25 bp, Homo sapien
gacactgcactaggatcatagagat

SEQ ID NO: 2947978 - DNA, 25 bp, Homo sapien
cagacactgcactaggatcatagag

SEQ ID NO: 2947979 - DNA, 25 bp, Homo sapien
tcagacactgcactaggatcataga

SEQ ID NO: 2947980 - DNA, 25 bp, Homo sapien
acactgcactaggatcatagagatg

SEQ ID NO: 2947981 - DNA, 25 bp, Homo sapien
tgtaacccgacactgatccatttgg

SEQ ID NO: 2947982 - DNA, 25 bp, Homo sapien
tagcctggagtgtagctgtaacccg

SEQ ID NO: 2947983 - DNA, 25 bp, Homo sapien
cactgggaacattgtcagtagcctg

SEQ ID NO: 2947984 - DNA, 25 bp, Homo sapien
tgatccatttggatgcagggaaact

SEQ ID NO: 2947985 - DNA, 25 bp, Homo sapien
gaatgtagccatcaaagaagggagc

SEQ ID NO: 2947986 - DNA, 25 bp, Homo sapien
catcaaagaagggagcataccaaga

SEQ ID NO: 2947987 - DNA, 25 bp, Homo sapien
agaagggagcataccaagactgcat

SEQ ID NO: 2947988 - DNA, 25 bp, Homo sapien
tagccatcaaagaagggagcatacc

SEQ ID NO: 2947989 - DNA, 25 bp, Homo sapien
tacagaataggtggcccatgtgatg

SEQ ID NO: 2947990 - DNA, 25 bp, Homo sapien
gaaatatctacagatgcctaattca

SEQ ID NO: 2947991 - DNA, 25 bp, Homo sapien
gagccaagacctgctttgggtttaa

SEQ ID NO: 2947992 - DNA, 25 bp, Homo sapien
catgtgatgtgcgatgtgccacgga

SEQ ID NO: 2947993 - DNA, 25 bp, Homo sapien
ggcgttcaatggactttggccggca

SEQ ID NO: 2947994 - DNA, 25 bp, Homo sapien
gttcaatggactttggccggcagac

SEQ ID NO: 2947995 - DNA, 25 bp, Homo sapien
cacagtaggcgttcaatggactttg

SEQ ID NO: 2947996 - DNA, 25 bp, Homo sapien
cagtaggcgttcaatggactttggc

SEQ ID NO: 2947997 - DNA, 25 bp, Homo sapien
catggccctcagcattggcaccaaa

SEQ ID NO: 2947998 - DNA, 25 bp, Homo sapien
aggccatcgcccttcaactctccag

SEQ ID NO: 2947999 - DNA, 25 bp, Homo sapien
actggctcaggccatcgcccttcaa

SEQ ID NO: 2948000 - DNA, 25 bp, Homo sapien
ttctggcaccgtgtaaatctagagt

SEQ ID NO: 2948001 - DNA, 25 bp, Homo sapien
cagtgggtcgcagttccctgtaaca

SEQ ID NO: 2948002 - DNA, 25 bp, Homo sapien
tcaggaatggagactgaaaccaaac

SEQ ID NO: 2948003 - DNA, 25 bp, Homo sapien
gacagtggccgctaagttggacctt

SEQ ID NO: 2948004 - DNA, 25 bp, Homo sapien
ccataggctgattcaagggcattag

SEQ ID NO: 2948005 - DNA, 25 bp, Homo sapien
cagggtgagatcaagcaggatcgca

SEQ ID NO: 2948006 - DNA, 25 bp, Homo sapien
ccttgtagagcagcagaaccctgat

SEQ ID NO: 2948007 - DNA, 25 bp, Homo sapien
gctcaatcctgagtcctccctggag

SEQ ID NO: 2948008 - DNA, 25 bp, Homo sapien
taacctgcacatcttccttgtagag

SEQ ID NO: 2948009 - DNA, 25 bp, Homo sapien
ctgaatgtggcccaaactcgggctc

SEQ ID NO: 2948010 - DNA, 25 bp, Homo sapien
gctcctgcaggcctagcttccttcc

SEQ ID NO: 2948011 - DNA, 25 bp, Homo sapien
ggctcctgcaggcctagcttccttc

SEQ ID NO: 2948012 - DNA, 25 bp, Homo sapien
gccgggcactgcagcagagaaaaac

SEQ ID NO: 2948013 - DNA, 25 bp, Homo sapien
tgtggcacagggtccgtttgcggag

SEQ ID NO: 2948014 - DNA, 25 bp, Homo sapien
cgggcactgcagcagagaaaaactg

SEQ ID NO: 2948015 - DNA, 25 bp, Homo sapien
gtccgtttgcggagcacgtgggcct

SEQ ID NO: 2948016 - DNA, 25 bp, Homo sapien
aagagccagcttgagcgggggcaca

SEQ ID NO: 2948017 - DNA, 25 bp, Homo sapien
gcccagcccagaagacagcagagag

SEQ ID NO: 2948018 - DNA, 25 bp, Homo sapien
acagggaagaggtcttcccagccac

SEQ ID NO: 2948019 - DNA, 25 bp, Homo sapien
ggcacagggaagaggtcttcccagc

SEQ ID NO: 2948020 - DNA, 25 bp, Homo sapien
catggctcatcaccccaatgctggg

SEQ ID NO: 2948021 - DNA, 25 bp, Homo sapien
ctggatgtgccagcagatgaattcc

SEQ ID NO: 2948022 - DNA, 25 bp, Homo sapien
aactccatgccttcgcatgtgccgt

SEQ ID NO: 2948023 - DNA, 25 bp, Homo sapien
tgactacagccactccaatgccaat

SEQ ID NO: 2948024 - DNA, 25 bp, Homo sapien
gcctgactaagatctggtcccttta

SEQ ID NO: 2948025 - DNA, 25 bp, Homo sapien
tgtcctgaggcctgactaagatctg

SEQ ID NO: 2948026 - DNA, 25 bp, Homo sapien
ctcctccagatttgactggctcggc

SEQ ID NO: 2948027 - DNA, 25 bp, Homo sapien
gactggctcggcttctgtcctgagg

SEQ ID NO: 2948028 - DNA, 25 bp, Homo sapien
gcagcagaggttgacagaaacttca

SEQ ID NO: 2948029 - DNA, 25 bp, Homo sapien
caccgccaaccagtagctgtctgca

SEQ ID NO: 2948030 - DNA, 25 bp, Homo sapien
cttcagcgcagggaagtcgtatgga

SEQ ID NO: 2948031 - DNA, 25 bp, Homo sapien
gttgacagaaacttcagcgcaggga

SEQ ID NO: 2948032 - DNA, 25 bp, Homo sapien
agacgcgaacgctctgcaagatgag

SEQ ID NO: 2948033 - DNA, 25 bp, Homo sapien
gcggaacccagtgaggctgcgacct

SEQ ID NO: 2948034 - DNA, 25 bp, Homo sapien
gctgcgacctgcgtttgggcagttc

SEQ ID NO: 2948035 - DNA, 25 bp, Homo sapien
cactgatgtgcctggtgcgcgctga

SEQ ID NO: 2948036 - DNA, 25 bp, Homo sapien
aggagatgcccggctcggcgcttcc

SEQ ID NO: 2948037 - DNA, 25 bp, Homo sapien
agtctggccgccgtttcccgacgca

SEQ ID NO: 2948038 - DNA, 25 bp, Homo sapien
gggtcctacggacatcccagaggga

SEQ ID NO: 2948039 - DNA, 25 bp, Homo sapien
ggctcgctcggctaccgtcctgaat

SEQ ID NO: 2948040 - DNA, 25 bp, Homo sapien
cttgacgagacggagctgcgggtgc

SEQ ID NO: 2948041 - DNA, 25 bp, Homo sapien
cgagacggagctgcgggtgccctcc

SEQ ID NO: 2948042 - DNA, 25 bp, Homo sapien
gacggagctgcgggtgccctcccat

SEQ ID NO: 2948043 - DNA, 25 bp, Homo sapien
ttgacgagacggagctgcgggtgcc

SEQ ID NO: 2948044 - DNA, 25 bp, Homo sapien
ccacgaacttcagcgggcagacgct

SEQ ID NO: 2948045 - DNA, 25 bp, Homo sapien
ggcggcattcatctctccggactcg

SEQ ID NO: 2948046 - DNA, 25 bp, Homo sapien
gacgtgcggtctggctactttccta

SEQ ID NO: 2948047 - DNA, 25 bp, Homo sapien
ccccgagactgcgatattgatcaag

SEQ ID NO: 2948048 - DNA, 25 bp, Homo sapien
ggtggcattgcacacctgccgtaca

SEQ ID NO: 2948049 - DNA, 25 bp, Homo sapien
cctctaaccctggccttgaggtggc

SEQ ID NO: 2948050 - DNA, 25 bp, Homo sapien
ggcattgcacacctgccgtacaggt

SEQ ID NO: 2948051 - DNA, 25 bp, Homo sapien
gcctctaaccctggccttgaggtgg

SEQ ID NO: 2948052 - DNA, 25 bp, Homo sapien
agtaaacagtgtacctgcttaaaag

SEQ ID NO: 2948053 - DNA, 25 bp, Homo sapien
ctggccagtaaacagtgtacctgct

SEQ ID NO: 2948054 - DNA, 25 bp, Homo sapien
gtaaacagtgtacctgcttaaaaga

SEQ ID NO: 2948055 - DNA, 25 bp, Homo sapien
gccagtaaacagtgtacctgcttaa

SEQ ID NO: 2948056 - DNA, 25 bp, Homo sapien
ctggccctgctgggtcagctcctcc

SEQ ID NO: 2948057 - DNA, 25 bp, Homo sapien
ctgctgggtcagctcctccagatct

SEQ ID NO: 2948058 - DNA, 25 bp, Homo sapien
gccctgctgggtcagctcctccaga

SEQ ID NO: 2948059 - DNA, 25 bp, Homo sapien
tgctgggtcagctcctccagatctc

SEQ ID NO: 2948060 - DNA, 25 bp, Homo sapien
aggcagagacggggttcagccccag

SEQ ID NO: 2948061 - DNA, 25 bp, Homo sapien
gaggcagagacggggttcagcccca

SEQ ID NO: 2948062 - DNA, 25 bp, Homo sapien
ccagggacaggctctcgcagtgctg

SEQ ID NO: 2948063 - DNA, 25 bp, Homo sapien
gccagggacaggctctcgcagtgct

SEQ ID NO: 2948064 - DNA, 25 bp, Homo sapien
ctgagatgttgctggccagggacag

SEQ ID NO: 2948065 - DNA, 25 bp, Homo sapien
gggacaggctctcgcagtgctggtc

SEQ ID NO: 2948066 - DNA, 25 bp, Homo sapien
gggcattgtggtgaccaggaatctt

SEQ ID NO: 2948067 - DNA, 25 bp, Homo sapien
cattgtggtgaccaggaatcttgca

SEQ ID NO: 2948068 - DNA, 25 bp, Homo sapien
gaatcttgcaggagggggttgaggg

SEQ ID NO: 2948069 - DNA, 25 bp, Homo sapien
ggtagggggcattgtggtgaccagg

SEQ ID NO: 2948070 - DNA, 25 bp, Homo sapien
accatacgtcacgtgtactttgttc

SEQ ID NO: 2948071 - DNA, 25 bp, Homo sapien
gaccatacgtcacgtgtactttgtt

SEQ ID NO: 2948072 - DNA, 25 bp, Homo sapien
tgaccatacgtcacgtgtactttgt

SEQ ID NO: 2948073 - DNA, 25 bp, Homo sapien
agggacaggatgacaacaatgacca

SEQ ID NO: 2948074 - DNA, 25 bp, Homo sapien
cgttcccactcacaccagctaggga

SEQ ID NO: 2948075 - DNA, 25 bp, Homo sapien
tgaccagtgcagaaatgagctcatc

SEQ ID NO: 2948076 - DNA, 25 bp, Homo sapien
aacaatgaccagtgcagaaatgagc

SEQ ID NO: 2948077 - DNA, 25 bp, Homo sapien
agggcagggccgaaccactagctgc

SEQ ID NO: 2948078 - DNA, 25 bp, Homo sapien
cagcaggtgccaatgaggtccacgg

SEQ ID NO: 2948079 - DNA, 25 bp, Homo sapien
gcggacaccatagaaaaaggcaggg

SEQ ID NO: 2948080 - DNA, 25 bp, Homo sapien
gtccacggatgcgttgcactgcagt

SEQ ID NO: 2948081 - DNA, 25 bp, Homo sapien
actcggagtaattcacgcgggcggc

SEQ ID NO: 2948082 - DNA, 25 bp, Homo sapien
tcctggcactcggagtaattcacgc

SEQ ID NO: 2948083 - DNA, 25 bp, Homo sapien
ttggccaggcactcccggtagccat

SEQ ID NO: 2948084 - DNA, 25 bp, Homo sapien
tcctcattgaggatctcctggcact

SEQ ID NO: 2948085 - DNA, 25 bp, Homo sapien
tatgggcagccttgttcggctcagc

SEQ ID NO: 2948086 - DNA, 25 bp, Homo sapien
tgactccaagtagcaggcacaaaac

SEQ ID NO: 2948087 - DNA, 25 bp, Homo sapien
ggaactggatgtatctctcaggcat

SEQ ID NO: 2948088 - DNA, 25 bp, Homo sapien
gcttcactagagcagggccttgaca

SEQ ID NO: 2948089 - DNA, 25 bp, Homo sapien
gaatggaacgtctcccataggccaa

SEQ ID NO: 2948090 - DNA, 25 bp, Homo sapien
taaggtccgtgctattcccactgca

SEQ ID NO: 2948091 - DNA, 25 bp, Homo sapien
attatctgcgataccccagggcgct

SEQ ID NO: 2948092 - DNA, 25 bp, Homo sapien
gcagcaccgtggaagaactcgtgag

SEQ ID NO: 2948093 - DNA, 25 bp, Homo sapien
ccacacggtgagcagtgaaccttgg

SEQ ID NO: 2948094 - DNA, 25 bp, Homo sapien
cagacccccagaatccgtttcatgt

SEQ ID NO: 2948095 - DNA, 25 bp, Homo sapien
tgagcagtgaaccttggtccacaaa

SEQ ID NO: 2948096 - DNA, 25 bp, Homo sapien
tgaaccttggtccacaaaccagacc

SEQ ID NO: 2948097 - DNA, 25 bp, Homo sapien
tgaataagcaatttgtgcccggctg

SEQ ID NO: 2948098 - DNA, 25 bp, Homo sapien
aagtggaatgtatgccctacgccag

SEQ ID NO: 2948099 - DNA, 25 bp, Homo sapien
tcgatcctcaaagggtggcccctgg

SEQ ID NO: 2948100 - DNA, 25 bp, Homo sapien
taccctgagacaaatacatcctgcg

SEQ ID NO: 2948101 - DNA, 25 bp, Homo sapien
gatgatgactgcgacatggtagtgc

SEQ ID NO: 2948102 - DNA, 25 bp, Homo sapien
ggcccaggtagttgatgatgactgc

SEQ ID NO: 2948103 - DNA, 25 bp, Homo sapien
cagaaagaggacaaaggccaccagg

SEQ ID NO: 2948104 - DNA, 25 bp, Homo sapien
atgactgcgacatggtagtgcacct

SEQ ID NO: 2948105 - DNA, 25 bp, Homo sapien
acctgaaatggggcaccactccatg

SEQ ID NO: 2948106 - DNA, 25 bp, Homo sapien
cttcgaacctgaaatggggcaccac

SEQ ID NO: 2948107 - DNA, 25 bp, Homo sapien
ggtcaccccaatgggtgcagcctgg

SEQ ID NO: 2948108 - DNA, 25 bp, Homo sapien
ctgaaatggggcaccactccatgga

SEQ ID NO: 2948109 - DNA, 25 bp, Homo sapien
tgatgtttcgcaggcaccggatgct

SEQ ID NO: 2948110 - DNA, 25 bp, Homo sapien
gatgatgtttcgcaggcaccggatg

SEQ ID NO: 2948111 - DNA, 25 bp, Homo sapien
ggcgttgcgcaggatgaaggcggag

SEQ ID NO: 2948112 - DNA, 25 bp, Homo sapien
ggatgaaggcggagatgaggttcca

SEQ ID NO: 2948113 - DNA, 25 bp, Homo sapien
ttgctctggtggacctcggggctca

SEQ ID NO: 2948114 - DNA, 25 bp, Homo sapien
cacgttgctctggtggacctcgggg

SEQ ID NO: 2948115 - DNA, 25 bp, Homo sapien
tgctctggtggacctcggggctcat

SEQ ID NO: 2948116 - DNA, 25 bp, Homo sapien
cgttgctctggtggacctcggggct

SEQ ID NO: 2948117 - DNA, 25 bp, Homo sapien
gtgcaggtagcagccctcgccgaac

SEQ ID NO: 2948118 - DNA, 25 bp, Homo sapien
gaagtagttgtaggcggctgtcacc

SEQ ID NO: 2948119 - DNA, 25 bp, Homo sapien
agttggtcacatggaagtagttgta

SEQ ID NO: 2948120 - DNA, 25 bp, Homo sapien
gatgaacatccatttgcgcagccgg

SEQ ID NO: 2948121 - DNA, 25 bp, Homo sapien
ttctcattgtcgtagtacagcttcc

SEQ ID NO: 2948122 - DNA, 25 bp, Homo sapien
cccaatggcccaggccacaatgatg

SEQ ID NO: 2948123 - DNA, 25 bp, Homo sapien
tcattgtcgtagtacagcttcccaa

SEQ ID NO: 2948124 - DNA, 25 bp, Homo sapien
ttgtcgtagtacagcttcccaatgg

SEQ ID NO: 2948125 - DNA, 25 bp, Homo sapien
gctttgcattttcccgagtgtccct

SEQ ID NO: 2948126 - DNA, 25 bp, Homo sapien
gacaaactggaagcccttatgtcct

SEQ ID NO: 2948127 - DNA, 25 bp, Homo sapien
atgtcctcgtgggtatgaagacccc

SEQ ID NO: 2948128 - DNA, 25 bp, Homo sapien
ctgctgcaggaggtaattgctttgc

SEQ ID NO: 2948129 - DNA, 25 bp, Homo sapien
tgctggtgggagtggcaccacacct

SEQ ID NO: 2948130 - DNA, 25 bp, Homo sapien
tcacagcctgaacaaccttgagagg

SEQ ID NO: 2948131 - DNA, 25 bp, Homo sapien
agaggaatacttgcacaggttctac

SEQ ID NO: 2948132 - DNA, 25 bp, Homo sapien
atgggcccaacacgaggctgcatcc

SEQ ID NO: 2948133 - DNA, 25 bp, Homo sapien
ggtagatgtagtcggtgtacacccc

SEQ ID NO: 2948134 - DNA, 25 bp, Homo sapien
agatgtagtcggtgtacaccccagg

SEQ ID NO: 2948135 - DNA, 25 bp, Homo sapien
cagcaggaccaggatcatggggccc

SEQ ID NO: 2948136 - DNA, 25 bp, Homo sapien
gccctggtagatgtagtcggtgtac

SEQ ID NO: 2948137 - DNA, 25 bp, Homo sapien
tttgagcacaccagcgggccggagt

SEQ ID NO: 2948138 - DNA, 25 bp, Homo sapien
accagcgggccggagtgtgcaagag

SEQ ID NO: 2948139 - DNA, 25 bp, Homo sapien
cgggccggagtgtgcaagaggcttg

SEQ ID NO: 2948140 - DNA, 25 bp, Homo sapien
atttgagcacaccagcgggccggag

SEQ ID NO: 2948141 - DNA, 25 bp, Homo sapien
catgaggatgcggacgatgttgaaa

SEQ ID NO: 2948142 - DNA, 25 bp, Homo sapien
ctgtactgaatggtctcagacgtgg

SEQ ID NO: 2948143 - DNA, 25 bp, Homo sapien
atggtctcagacgtggtggatgccc

SEQ ID NO: 2948144 - DNA, 25 bp, Homo sapien
agacgtggtggatgcccggagcttg

SEQ ID NO: 2948145 - DNA, 25 bp, Homo sapien
aagacgacccgggagacctcatcct

SEQ ID NO: 2948146 - DNA, 25 bp, Homo sapien
gcagcagcaccagagtggctttcac

SEQ ID NO: 2948147 - DNA, 25 bp, Homo sapien
gcaccagagtggctttcacagcctt

SEQ ID NO: 2948148 - DNA, 25 bp, Homo sapien
gagttgaagtagatgaagacgaccc

SEQ ID NO: 2948149 - DNA, 25 bp, Homo sapien
agtagaacacagacacaaagaagcc

SEQ ID NO: 2948150 - DNA, 25 bp, Homo sapien
acagtagaacacagacacaaagaag

SEQ ID NO: 2948151 - DNA, 25 bp, Homo sapien
ctcactattgaggaaacagtagaac

SEQ ID NO: 2948152 - DNA, 25 bp, Homo sapien
aaacagtagaacacagacacaaaga

SEQ ID NO: 2948153 - DNA, 25 bp, Homo sapien
gccactcgggcacggatcgagtgct

SEQ ID NO: 2948154 - DNA, 25 bp, Homo sapien
cacggatcgagtgcttgtcctgcca

SEQ ID NO: 2948155 - DNA, 25 bp, Homo sapien
atggacatggcacgggccactcggg

SEQ ID NO: 2948156 - DNA, 25 bp, Homo sapien
gatgctgtgaaagctgacacgggtt

SEQ ID NO: 2948157 - DNA, 25 bp, Homo sapien
tcccagtggtgtcggaaggcatcac

SEQ ID NO: 2948158 - DNA, 25 bp, Homo sapien
acatgcgtgctgctgtaggtgtcca

SEQ ID NO: 2948159 - DNA, 25 bp, Homo sapien
tcatgagctagagtcctgcacggct

SEQ ID NO: 2948160 - DNA, 25 bp, Homo sapien
gctgtggccgcaagtctgatgatga

SEQ ID NO: 2948161 - DNA, 25 bp, Homo sapien
caggatgtgcactatggactgttac

SEQ ID NO: 2948162 - DNA, 25 bp, Homo sapien
tctatgacgaggaggacaatgtcct

SEQ ID NO: 2948163 - DNA, 25 bp, Homo sapien
cttggagaagcccacattgacacag

SEQ ID NO: 2948164 - DNA, 25 bp, Homo sapien
tgtggaacagtagcccaggatgtgc

SEQ ID NO: 2948165 - DNA, 25 bp, Homo sapien
acatctgcgggcggcagcccaatac

SEQ ID NO: 2948166 - DNA, 25 bp, Homo sapien
caacatctgcgggcggcagcccaat

SEQ ID NO: 2948167 - DNA, 25 bp, Homo sapien
ctgcgggcggcagcccaatacccct

SEQ ID NO: 2948168 - DNA, 25 bp, Homo sapien
tgcaacatctgcgggcggcagccca

SEQ ID NO: 2948169 - DNA, 25 bp, Homo sapien
agcccacggggaggaggaagcccag

SEQ ID NO: 2948170 - DNA, 25 bp, Homo sapien
ctgatgaggaggaggaagcccacgg

SEQ ID NO: 2948171 - DNA, 25 bp, Homo sapien
ggaggaggaagcccaggcacgccat

SEQ ID NO: 2948172 - DNA, 25 bp, Homo sapien
atgaggaggaggaagcccacgggga

SEQ ID NO: 2948173 - DNA, 25 bp, Homo sapien
cagaagatgatcacggttgcgcaca

SEQ ID NO: 2948174 - DNA, 25 bp, Homo sapien
gttcttgagagtgggcagccgcaca

SEQ ID NO: 2948175 - DNA, 25 bp, Homo sapien
gatctgacgggagcagacttgcaca

SEQ ID NO: 2948176 - DNA, 25 bp, Homo sapien
cagcggtcctcattgcggtaggcca

SEQ ID NO: 2948177 - DNA, 25 bp, Homo sapien
tgtgtgggcatctgctgcgccctcc

SEQ ID NO: 2948178 - DNA, 25 bp, Homo sapien
acagccgagcccacacatcttagct

SEQ ID NO: 2948179 - DNA, 25 bp, Homo sapien
ctagagccagccgaaggggcacagc

SEQ ID NO: 2948180 - DNA, 25 bp, Homo sapien
tctgcctagagccagccgaaggggc

SEQ ID NO: 2948181 - DNA, 25 bp, Homo sapien
cagccctcggagctatcactgcggt

SEQ ID NO: 2948182 - DNA, 25 bp, Homo sapien
cagatatggtgacaatctcagtggt

SEQ ID NO: 2948183 - DNA, 25 bp, Homo sapien
ggtgacaatctcagtggtgtcttct

SEQ ID NO: 2948184 - DNA, 25 bp, Homo sapien
ggagctatcactgcggtcctctgga

SEQ ID NO: 2948185 - DNA, 25 bp, Homo sapien
tcattaggatccaagtgggcgtcac

SEQ ID NO: 2948186 - DNA, 25 bp, Homo sapien
gaagggcagctcattaggatccaag

SEQ ID NO: 2948187 - DNA, 25 bp, Homo sapien
cagctcattaggatccaagtgggcg

SEQ ID NO: 2948188 - DNA, 25 bp, Homo sapien
gatgaagggcagctcattaggatcc

SEQ ID NO: 2948189 - DNA, 25 bp, Homo sapien
tcttgtggagtcccgcccagggcag

SEQ ID NO: 2948190 - DNA, 25 bp, Homo sapien
ctctgagggcgggggcatcaggggc

SEQ ID NO: 2948191 - DNA, 25 bp, Homo sapien
ctcttgtggagtcccgcccagggca

SEQ ID NO: 2948192 - DNA, 25 bp, Homo sapien
aagggagcctgggtcgacatgctct

SEQ ID NO: 2948193 - DNA, 25 bp, Homo sapien
cgaccttgccgcttgaacttgtgca

SEQ ID NO: 2948194 - DNA, 25 bp, Homo sapien
gaagctgccactctggattgggaag

SEQ ID NO: 2948195 - DNA, 25 bp, Homo sapien
ctttgagaggcgtgtgtcccagtgc

SEQ ID NO: 2948196 - DNA, 25 bp, Homo sapien
agtgagccctggatgcaaatcccga

SEQ ID NO: 2948197 - DNA, 25 bp, Homo sapien
gattgttggttggtaaagttgcttc

SEQ ID NO: 2948198 - DNA, 25 bp, Homo sapien
agaaatgtggcggttaagtgaagat

SEQ ID NO: 2948199 - DNA, 25 bp, Homo sapien
ctccgggtgtggtcaggtgtaccca

SEQ ID NO: 2948200 - DNA, 25 bp, Homo sapien
tactatgtgccaggtccagtgcatg

SEQ ID NO: 2948201 - DNA, 25 bp, Homo sapien
cgttccaggggcaaggactgggtct

SEQ ID NO: 2948202 - DNA, 25 bp, Homo sapien
ccaggggcaaggactgggtctggac

SEQ ID NO: 2948203 - DNA, 25 bp, Homo sapien
ccccagctgtctgcttcccttccag

SEQ ID NO: 2948204 - DNA, 25 bp, Homo sapien
ttagcagcccaaggttctctcagca

SEQ ID NO: 2948205 - DNA, 25 bp, Homo sapien
tctcttttggcttaagctactttga

SEQ ID NO: 2948206 - DNA, 25 bp, Homo sapien
cagagattatgaagctcggcgaggc

SEQ ID NO: 2948207 - DNA, 25 bp, Homo sapien
tgtgtcccttcaaatatgcttctct

SEQ ID NO: 2948208 - DNA, 25 bp, Homo sapien
ccagtggcatgacgagacaagggca

SEQ ID NO: 2948209 - DNA, 25 bp, Homo sapien
ctgggcaccggttgctactcccttg

SEQ ID NO: 2948210 - DNA, 25 bp, Homo sapien
ggcaccggttgctactcccttgccc

SEQ ID NO: 2948211 - DNA, 25 bp, Homo sapien
caccggttgctactcccttgcccaa

SEQ ID NO: 2948212 - DNA, 25 bp, Homo sapien
tgggcaccggttgctactcccttgc

SEQ ID NO: 2948213 - DNA, 25 bp, Homo sapien
tgatagtcgacagaggcgaggacgg

SEQ ID NO: 2948214 - DNA, 25 bp, Homo sapien
aagagggcgcgttcctgaggccggc

SEQ ID NO: 2948215 - DNA, 25 bp, Homo sapien
tgggtggcggtgactgcgagggcgc

SEQ ID NO: 2948216 - DNA, 25 bp, Homo sapien
cgctgctgttggtgccggagctggt

SEQ ID NO: 2948217 - DNA, 25 bp, Homo sapien
gcaactaaagtgacagcgcgtggac

SEQ ID NO: 2948218 - DNA, 25 bp, Homo sapien
gggatccgcgcactgttctcaggca

SEQ ID NO: 2948219 - DNA, 25 bp, Homo sapien
ggtgaaccctgcctttgcgagcgtg

SEQ ID NO: 2948220 - DNA, 25 bp, Homo sapien
cccatccgtgcgtggctgcggctgt

SEQ ID NO: 2948221 - DNA, 25 bp, Homo sapien
tgtggccgaagcaccagtaacctta

SEQ ID NO: 2948222 - DNA, 25 bp, Homo sapien
gaaattcagatcaacctgggcgacc

SEQ ID NO: 2948223 - DNA, 25 bp, Homo sapien
gatgcttgaatcgatccctgagccg

SEQ ID NO: 2948224 - DNA, 25 bp, Homo sapien
gccatttccttaaagcgcgcgcaga

SEQ ID NO: 2948225 - DNA, 25 bp, Homo sapien
aggatccgtgcccagacatttccag

SEQ ID NO: 2948226 - DNA, 25 bp, Homo sapien
gcgcaaaagctgcatccctcgaggt

SEQ ID NO: 2948227 - DNA, 25 bp, Homo sapien
tttccagaggcgcaccggctggttc

SEQ ID NO: 2948228 - DNA, 25 bp, Homo sapien
ctcggaatgtaagagctcccgcctg

SEQ ID NO: 2948229 - DNA, 25 bp, Homo sapien
tcctgtcggaggagcaatgcctgat

SEQ ID NO: 2948230 - DNA, 25 bp, Homo sapien
tacatcaatagaaggcaaggtccag

SEQ ID NO: 2948231 - DNA, 25 bp, Homo sapien
tcaaccgcggtaggaaagacatttc

SEQ ID NO: 2948232 - DNA, 25 bp, Homo sapien
caaatcgtccaaaggtgaacccaag

SEQ ID NO: 2948233 - DNA, 25 bp, Homo sapien
gatccgatccaggacaactctgttg

SEQ ID NO: 2948234 - DNA, 25 bp, Homo sapien
cgtcccacggttccatgaatttgtc

SEQ ID NO: 2948235 - DNA, 25 bp, Homo sapien
cacatgatttagaacgctggctcca

SEQ ID NO: 2948236 - DNA, 25 bp, Homo sapien
cacttcgttcttggcattctgtggc

SEQ ID NO: 2948237 - DNA, 25 bp, Homo sapien
tcaacgccatgaaagtaccctgtga

SEQ ID NO: 2948238 - DNA, 25 bp, Homo sapien
taattcgatatgcataaccccagcc

SEQ ID NO: 2948239 - DNA, 25 bp, Homo sapien
ccctgtgaggttgcaaattctaagt

SEQ ID NO: 2948240 - DNA, 25 bp, Homo sapien
cagaaactagggtgggatatcacat

SEQ ID NO: 2948241 - DNA, 25 bp, Homo sapien
catggggtccaggtgtcgatctctc

SEQ ID NO: 2948242 - DNA, 25 bp, Homo sapien
acagggtgttcgtggtctaaggcta

SEQ ID NO: 2948243 - DNA, 25 bp, Homo sapien
tagtagtggagtccccgtgacatgg

SEQ ID NO: 2948244 - DNA, 25 bp, Homo sapien
tgcagctcccgctgggatccatggg

SEQ ID NO: 2948245 - DNA, 25 bp, Homo sapien
acgcccagctgacttcgatttgtta

SEQ ID NO: 2948246 - DNA, 25 bp, Homo sapien
gggactgaccttctaattagtccag

SEQ ID NO: 2948247 - DNA, 25 bp, Homo sapien
tgaccttctaattagtccagattgg

SEQ ID NO: 2948248 - DNA, 25 bp, Homo sapien
cgatttgttattgggactgaccttc

SEQ ID NO: 2948249 - DNA, 25 bp, Homo sapien
tgaacagatcatggcaaacagtaca

SEQ ID NO: 2948250 - DNA, 25 bp, Homo sapien
ttcaggagaatctaaggcatttggc

SEQ ID NO: 2948251 - DNA, 25 bp, Homo sapien
gctaattctgacagccctacctggg

SEQ ID NO: 2948252 - DNA, 25 bp, Homo sapien
cagtggcattccagttttcaggaga

SEQ ID NO: 2948253 - DNA, 25 bp, Homo sapien
tcagagccttctttaagagatgcat

SEQ ID NO: 2948254 - DNA, 25 bp, Homo sapien
gacaatgcccgtttctctcaggaca

SEQ ID NO: 2948255 - DNA, 25 bp, Homo sapien
caatcacccatagatctgcaagaga

SEQ ID NO: 2948256 - DNA, 25 bp, Homo sapien
caaaggtcagcgctgggtgtcaaat

SEQ ID NO: 2948257 - DNA, 25 bp, Homo sapien
catggcacacgatggctgagaaacc

SEQ ID NO: 2948258 - DNA, 25 bp, Homo sapien
agaaggctttggaagatgtccagat

SEQ ID NO: 2948259 - DNA, 25 bp, Homo sapien
gtggatcgttaatgacgcccttggg

SEQ ID NO: 2948260 - DNA, 25 bp, Homo sapien
gaagatgtccagatgtggatcgtta

SEQ ID NO: 2948261 - DNA, 25 bp, Homo sapien
tccagatgtggatcgttaatgacgc

SEQ ID NO: 2948262 - DNA, 25 bp, Homo sapien
ccaggactcacgatgtggcgatgcc

SEQ ID NO: 2948263 - DNA, 25 bp, Homo sapien
ccatgaagccaggactcacgatgtg

SEQ ID NO: 2948264 - DNA, 25 bp, Homo sapien
gaagccaggactcacgatgtggcga

SEQ ID NO: 2948265 - DNA, 25 bp, Homo sapien
gactcacgatgtggcgatgccactt

SEQ ID NO: 2948266 - DNA, 25 bp, Homo sapien
ttggcttctcgttggacctggagct

SEQ ID NO: 2948267 - DNA, 25 bp, Homo sapien
tggcttctcgttggacctggagctc

SEQ ID NO: 2948268 - DNA, 25 bp, Homo sapien
cttggcttctcgttggacctggagc

SEQ ID NO: 2948269 - DNA, 25 bp, Homo sapien
gtctaaatccgacggccgtggagcg

SEQ ID NO: 2948270 - DNA, 25 bp, Homo sapien
ggaccgagcttccagtctaaatccg

SEQ ID NO: 2948271 - DNA, 25 bp, Homo sapien
tacaccgcgggcgcatcaagctggg

SEQ ID NO: 2948272 - DNA, 25 bp, Homo sapien
gggacctggaccgagcttccagtct

SEQ ID NO: 2948273 - DNA, 25 bp, Homo sapien
gggtggacgagaaaccccaggcatc

SEQ ID NO: 2948274 - DNA, 25 bp, Homo sapien
gacagctttggctgtcccctgaggt

SEQ ID NO: 2948275 - DNA, 25 bp, Homo sapien
tgaccctgggcatcactggggaatg

SEQ ID NO: 2948276 - DNA, 25 bp, Homo sapien
cgtgctgtttggaacatgtctgcca

SEQ ID NO: 2948277 - DNA, 25 bp, Homo sapien
cacagaggtgccctcggtgaatttg

SEQ ID NO: 2948278 - DNA, 25 bp, Homo sapien
tggatgggtagagagcaactgttca

SEQ ID NO: 2948279 - DNA, 25 bp, Homo sapien
gtgccctcggtgaatttggcagcag

SEQ ID NO: 2948280 - DNA, 25 bp, Homo sapien
ccgattggatgggtagagagcaact

SEQ ID NO: 2948281 - DNA, 25 bp, Homo sapien
gctagagttcgccaacagacatgtg

SEQ ID NO: 2948282 - DNA, 25 bp, Homo sapien
gacagatgtgattccctcagtggga

SEQ ID NO: 2948283 - DNA, 25 bp, Homo sapien
tatgtcgcttttgtgaatgggcctc

SEQ ID NO: 2948284 - DNA, 25 bp, Homo sapien
cccaagcctcttttgatcagacaga

SEQ ID NO: 2948285 - DNA, 25 bp, Homo sapien
ggtgtagcccccctgatctttcctg

SEQ ID NO: 2948286 - DNA, 25 bp, Homo sapien
ttggtcttggtgcatggtgtagccc

SEQ ID NO: 2948287 - DNA, 25 bp, Homo sapien
tccatcacttcgaactcctggcggg

SEQ ID NO: 2948288 - DNA, 25 bp, Homo sapien
tacgtcccagcgtgatcttccatca

SEQ ID NO: 2948289 - DNA, 25 bp, Homo sapien
ggagttccactgtgagatcagacac

SEQ ID NO: 2948290 - DNA, 25 bp, Homo sapien
ttttgcaaaagcctgcaaactgccg

SEQ ID NO: 2948291 - DNA, 25 bp, Homo sapien
cagctaatcctgaacaagcttccag

SEQ ID NO: 2948292 - DNA, 25 bp, Homo sapien
catgccctttgttaaaacactgtcc

SEQ ID NO: 2948293 - DNA, 25 bp, Homo sapien
gctgtgcaaaacaggctgggtacca

SEQ ID NO: 2948294 - DNA, 25 bp, Homo sapien
tgtcccttgggcgacaggaaggctc

SEQ ID NO: 2948295 - DNA, 25 bp, Homo sapien
gagaaaccaggaatggcccaggatg

SEQ ID NO: 2948296 - DNA, 25 bp, Homo sapien
ggtggtatcaccaacagcagtagag

SEQ ID NO: 2948297 - DNA, 25 bp, Homo sapien
ggttcctcagatccgtcctcagtgg

SEQ ID NO: 2948298 - DNA, 25 bp, Homo sapien
tagcatcagaggtttcagagcccgg

SEQ ID NO: 2948299 - DNA, 25 bp, Homo sapien
ttcagagcccggttcctcagatccg

SEQ ID NO: 2948300 - DNA, 25 bp, Homo sapien
cttccgctgttggagtgctcttagc

SEQ ID NO: 2948301 - DNA, 25 bp, Homo sapien
tccctcagccaaatggctgctctgg

SEQ ID NO: 2948302 - DNA, 25 bp, Homo sapien
ttccctcagccaaatggctgctctg

SEQ ID NO: 2948303 - DNA, 25 bp, Homo sapien
ctcatccactaagggtgctgtcaca

SEQ ID NO: 2948304 - DNA, 25 bp, Homo sapien
tgcgcggcagcctgcttgccgggag

SEQ ID NO: 2948305 - DNA, 25 bp, Homo sapien
cgggagctccctcatccactaaggg

SEQ ID NO: 2948306 - DNA, 25 bp, Homo sapien
ggttccttctgggatctccgtgtgg

SEQ ID NO: 2948307 - DNA, 25 bp, Homo sapien
gaattcaaataaggtccccatggag

SEQ ID NO: 2948308 - DNA, 25 bp, Homo sapien
gctttgactgtcacatgggactggc

SEQ ID NO: 2948309 - DNA, 25 bp, Homo sapien
tttaagaggtggcaactagcaggac

SEQ ID NO: 2948310 - DNA, 25 bp, Homo sapien
tccttgaaacctctgcagggagtgt

SEQ ID NO: 2948311 - DNA, 25 bp, Homo sapien
ggtcacgtgaccagcagcttcgtct

SEQ ID NO: 2948312 - DNA, 25 bp, Homo sapien
acgtgaccagcagcttcgtcttcca

SEQ ID NO: 2948313 - DNA, 25 bp, Homo sapien
gaccagcagcttcgtcttccaggct

SEQ ID NO: 2948314 - DNA, 25 bp, Homo sapien
cttgggtcacgtgaccagcagcttc

SEQ ID NO: 2948315 - DNA, 25 bp, Homo sapien
caaatgatcttttcagggcagagcc

SEQ ID NO: 2948316 - DNA, 25 bp, Homo sapien
tgagtagccaacctttgataagaac

SEQ ID NO: 2948317 - DNA, 25 bp, Homo sapien
cctggacttgtgaattagagctcag

SEQ ID NO: 2948318 - DNA, 25 bp, Homo sapien
cccaagtcatggcaggcaattccag

SEQ ID NO: 2948319 - DNA, 25 bp, Homo sapien
tcctcaacgaggcagagtctcctag

SEQ ID NO: 2948320 - DNA, 25 bp, Homo sapien
gatgacatggttaaggccttgctcc

SEQ ID NO: 2948321 - DNA, 25 bp, Homo sapien
gtgacatgagaaacatcagcctgct

SEQ ID NO: 2948322 - DNA, 25 bp, Homo sapien
cagggcagcctgcagtgagaatcgc

SEQ ID NO: 2948323 - DNA, 25 bp, Homo sapien
ctggtctctggacacttacagaaga

SEQ ID NO: 2948324 - DNA, 25 bp, Homo sapien
cacagtagtccaggtaagttaagcc

SEQ ID NO: 2948325 - DNA, 25 bp, Homo sapien
cgtatacaggccttcccatagctta

SEQ ID NO: 2948326 - DNA, 25 bp, Homo sapien
cagaagaaaagtccacccctcgtat

SEQ ID NO: 2948327 - DNA, 25 bp, Homo sapien
tcacagctcattgcaactttaactc

SEQ ID NO: 2948328 - DNA, 25 bp, Homo sapien
ctcattgcaactttaactccagggc

SEQ ID NO: 2948329 - DNA, 25 bp, Homo sapien
agctcattgcaactttaactccagg

SEQ ID NO: 2948330 - DNA, 25 bp, Homo sapien
acagctcattgcaactttaactcca

SEQ ID NO: 2948331 - DNA, 25 bp, Homo sapien
ctggtttgaagaggcagcgatagca

SEQ ID NO: 2948332 - DNA, 25 bp, Homo sapien
gcagcgatagcaaaaggttagcaag

SEQ ID NO: 2948333 - DNA, 25 bp, Homo sapien
aaaggttagcaagggcgcattaatc

SEQ ID NO: 2948334 - DNA, 25 bp, Homo sapien
tgaagaggcagcgatagcaaaaggt

SEQ ID NO: 2948335 - DNA, 25 bp, Homo sapien
gagatacgcagtggtggcgggcttc

SEQ ID NO: 2948336 - DNA, 25 bp, Homo sapien
ggacgtgggcgctaatctcattggc

SEQ ID NO: 2948337 - DNA, 25 bp, Homo sapien
gacggtgctgaggaaggctcgcggt

SEQ ID NO: 2948338 - DNA, 25 bp, Homo sapien
gcgctgggcaaacgggacggtgctg

SEQ ID NO: 2948339 - DNA, 25 bp, Homo sapien
tgcaggtctcctagaagctggtgct

SEQ ID NO: 2948340 - DNA, 25 bp, Homo sapien
gtgtcctcaggtcctgtccccgaag

SEQ ID NO: 2948341 - DNA, 25 bp, Homo sapien
ccgaaggttggcgtgtggcctctct

SEQ ID NO: 2948342 - DNA, 25 bp, Homo sapien
gagccccaggcatgccggacatgag

SEQ ID NO: 2948343 - DNA, 25 bp, Homo sapien
gaggactcatcgacgtcgcggtctt

SEQ ID NO: 2948344 - DNA, 25 bp, Homo sapien
gactcatcgacgtcgcggtcttcat

SEQ ID NO: 2948345 - DNA, 25 bp, Homo sapien
ggaggactcatcgacgtcgcggtct

SEQ ID NO: 2948346 - DNA, 25 bp, Homo sapien
ggtggcttctctggcggctgtctgg

SEQ ID NO: 2948347 - DNA, 25 bp, Homo sapien
tccacgtgaaacgtgaactccaggg

SEQ ID NO: 2948348 - DNA, 25 bp, Homo sapien
cttctgcacgttgggtgtgatttcc

SEQ ID NO: 2948349 - DNA, 25 bp, Homo sapien
ctttgagttgagggacccggctgac

SEQ ID NO: 2948350 - DNA, 25 bp, Homo sapien
tacactgggcccgtcgggctctgag

SEQ ID NO: 2948351 - DNA, 25 bp, Homo sapien
taaaataagaatgcttgtcacactc

SEQ ID NO: 2948352 - DNA, 25 bp, Homo sapien
agaatgcttgtcacactccattttc

SEQ ID NO: 2948353 - DNA, 25 bp, Homo sapien
taagaatgcttgtcacactccattt

SEQ ID NO: 2948354 - DNA, 25 bp, Homo sapien
ctgataaaatataaaataagaatgc

SEQ ID NO: 2948355 - DNA, 25 bp, Homo sapien
ttggcttttttgtcatcgcttccag

SEQ ID NO: 2948356 - DNA, 25 bp, Homo sapien
cttttttgtcatcgcttccagtccc

SEQ ID NO: 2948357 - DNA, 25 bp, Homo sapien
ttttttgtcatcgcttccagtcccg

SEQ ID NO: 2948358 - DNA, 25 bp, Homo sapien
tttttgtcatcgcttccagtcccgt

SEQ ID NO: 2948359 - DNA, 25 bp, Homo sapien
gtcctagggctggttttcaaacaca

SEQ ID NO: 2948360 - DNA, 25 bp, Homo sapien
taggtcttatctagagccatggtgg

SEQ ID NO: 2948361 - DNA, 25 bp, Homo sapien
tttccaggaaaaacgccactgtgca

SEQ ID NO: 2948362 - DNA, 25 bp, Homo sapien
cactgtgcaattacgggagcatttc

SEQ ID NO: 2948363 - DNA, 25 bp, Homo sapien
ggaacaggtcacactcttgggaaac

SEQ ID NO: 2948364 - DNA, 25 bp, Homo sapien
tggggaggctaagcctcgaagtgtt

SEQ ID NO: 2948365 - DNA, 25 bp, Homo sapien
aacaaagtggggaggctaagcctcg

SEQ ID NO: 2948366 - DNA, 25 bp, Homo sapien
aacaggtcacactcttgggaaacaa

SEQ ID NO: 2948367 - DNA, 25 bp, Homo sapien
tcgtcctgcccgtgggggattttga

SEQ ID NO: 2948368 - DNA, 25 bp, Homo sapien
gaagcagccagggacgggtgtctgc

SEQ ID NO: 2948369 - DNA, 25 bp, Homo sapien
gacgggtgtctgcacgcctgtccct

SEQ ID NO: 2948370 - DNA, 25 bp, Homo sapien
cgggtgtctgcacgcctgtccctat

SEQ ID NO: 2948371 - DNA, 25 bp, Homo sapien
acgggtgtctgcacgcctgtcccta

SEQ ID NO: 2948372 - DNA, 25 bp, Homo sapien
tttgtcagtgtaaacaacactgctt

SEQ ID NO: 2948373 - DNA, 25 bp, Homo sapien
tgtcagtgtaaacaacactgcttac

SEQ ID NO: 2948374 - DNA, 25 bp, Homo sapien
ttgtcagtgtaaacaacactgctta

SEQ ID NO: 2948375 - DNA, 25 bp, Homo sapien
ggttttagcagaggaacgtgtggat

SEQ ID NO: 2948376 - DNA, 25 bp, Homo sapien
caaggttttagcagaggaacgtgtg

SEQ ID NO: 2948377 - DNA, 25 bp, Homo sapien
ttcaaggttttagcagaggaacgtg

SEQ ID NO: 2948378 - DNA, 25 bp, Homo sapien
ttttagcagaggaacgtgtggatgt

SEQ ID NO: 2948379 - DNA, 25 bp, Homo sapien
ctggagggttggatcagagggtctg

SEQ ID NO: 2948380 - DNA, 25 bp, Homo sapien
tggagggttggatcagagggtctga

SEQ ID NO: 2948381 - DNA, 25 bp, Homo sapien
ggagggttggatcagagggtctgag

SEQ ID NO: 2948382 - DNA, 25 bp, Homo sapien
tgccagttcgggaagtgacagaaga

SEQ ID NO: 2948383 - DNA, 25 bp, Homo sapien
aagagacgtgtttaggagaggaagg

SEQ ID NO: 2948384 - DNA, 25 bp, Homo sapien
ctgccagttcgggaagtgacagaag

SEQ ID NO: 2948385 - DNA, 25 bp, Homo sapien
acagaagagacgtgtttaggagagg

SEQ ID NO: 2948386 - DNA, 25 bp, Homo sapien
cttgagtttcatctcctttgctcca

SEQ ID NO: 2948387 - DNA, 25 bp, Homo sapien
ttgagtttcatctcctttgctccag

SEQ ID NO: 2948388 - DNA, 25 bp, Homo sapien
tgagtttcatctcctttgctccaga

SEQ ID NO: 2948389 - DNA, 25 bp, Homo sapien
gagtttcatctcctttgctccagaa

SEQ ID NO: 2948390 - DNA, 25 bp, Homo sapien
tgtggcgatcttcgttttaccatca

SEQ ID NO: 2948391 - DNA, 25 bp, Homo sapien
cggtgtggcgatcttcgttttacca

SEQ ID NO: 2948392 - DNA, 25 bp, Homo sapien
gcgatcttcgttttaccatcagccc

SEQ ID NO: 2948393 - DNA, 25 bp, Homo sapien
ccgcggtgtggcgatcttcgtttta

SEQ ID NO: 2948394 - DNA, 25 bp, Homo sapien
tgggtggtgtctttggagcgggcgg

SEQ ID NO: 2948395 - DNA, 25 bp, Homo sapien
ttttgctggaatcctggtggcgttg

SEQ ID NO: 2948396 - DNA, 25 bp, Homo sapien
cggggtttttgctggaatcctggtg

SEQ ID NO: 2948397 - DNA, 25 bp, Homo sapien
tggaatcctggtggcgttggcctgg

SEQ ID NO: 2948398 - DNA, 25 bp, Homo sapien
ctcttggcggaagacggcgacttgg

SEQ ID NO: 2948399 - DNA, 25 bp, Homo sapien
gccgatcttggacttgacattcttc

SEQ ID NO: 2948400 - DNA, 25 bp, Homo sapien
cgcctcccggctggtgcttcaggtt

SEQ ID NO: 2948401 - DNA, 25 bp, Homo sapien
gcttcaggttctcagtggagccgat

SEQ ID NO: 2948402 - DNA, 25 bp, Homo sapien
cagtggaagcgcaggacagtttccc

SEQ ID NO: 2948403 - DNA, 25 bp, Homo sapien
gcttctggaggcgactttcgagaac

SEQ ID NO: 2948404 - DNA, 25 bp, Homo sapien
ccgaatgaggactggaaagtctgga

SEQ ID NO: 2948405 - DNA, 25 bp, Homo sapien
tgtccccagtggaagcgcaggacag

SEQ ID NO: 2948406 - DNA, 25 bp, Homo sapien
gcccagactagggagcagcagacac

SEQ ID NO: 2948407 - DNA, 25 bp, Homo sapien
ggcccagactagggagcagcagaca

SEQ ID NO: 2948408 - DNA, 25 bp, Homo sapien
tacacttggcatgaggtcgcctgac

SEQ ID NO: 2948409 - DNA, 25 bp, Homo sapien
taaccccgcattcaatgagggccgg

SEQ ID NO: 2948410 - DNA, 25 bp, Homo sapien
gaagctacttcccatgctaagctga

SEQ ID NO: 2948411 - DNA, 25 bp, Homo sapien
gaactcagggtcaacagggaagcta

SEQ ID NO: 2948412 - DNA, 25 bp, Homo sapien
cgcaggccaaacagggcggggatga

SEQ ID NO: 2948413 - DNA, 25 bp, Homo sapien
tggacacactcccactcccgcaggc

SEQ ID NO: 2948414 - DNA, 25 bp, Homo sapien
cggggatgagcttggcaaaggggat

SEQ ID NO: 2948415 - DNA, 25 bp, Homo sapien
gacacactcccactcccgcaggcca

SEQ ID NO: 2948416 - DNA, 25 bp, Homo sapien
tggacgttgctaagatccagcttct

SEQ ID NO: 2948417 - DNA, 25 bp, Homo sapien
ttgatattatcctttgagccacact

SEQ ID NO: 2948418 - DNA, 25 bp, Homo sapien
gcctcccgggacgtgtttgatatta

SEQ ID NO: 2948419 - DNA, 25 bp, Homo sapien
tgagccacacttggactggacgttg

SEQ ID NO: 2948420 - DNA, 25 bp, Homo sapien
cttctgtcccctcacagcagacaaa

SEQ ID NO: 2948421 - DNA, 25 bp, Homo sapien
ctcttctgtcccctcacagcagaca

SEQ ID NO: 2948422 - DNA, 25 bp, Homo sapien
tcttctgtcccctcacagcagacaa

SEQ ID NO: 2948423 - DNA, 25 bp, Homo sapien
cccgggacatctggtggctctctgc

SEQ ID NO: 2948424 - DNA, 25 bp, Homo sapien
cagacaagcagagcgcgggacacag

SEQ ID NO: 2948425 - DNA, 25 bp, Homo sapien
cagcccgggacatctggtggctctc

SEQ ID NO: 2948426 - DNA, 25 bp, Homo sapien
ggtcacaggctagaccgcagacaag

SEQ ID NO: 2948427 - DNA, 25 bp, Homo sapien
tggaggtcaccttgctcaggtcaac

SEQ ID NO: 2948428 - DNA, 25 bp, Homo sapien
ctcaggtcaactggtttgtagacta

SEQ ID NO: 2948429 - DNA, 25 bp, Homo sapien
tatgatggatgttgcctaatgagcc

SEQ ID NO: 2948430 - DNA, 25 bp, Homo sapien
gatgttgcctaatgagccacacttg

SEQ ID NO: 2948431 - DNA, 25 bp, Homo sapien
gccttatttcacttcactcccgcct

SEQ ID NO: 2948432 - DNA, 25 bp, Homo sapien
tcaccttgtcttgggcagcatggcc

SEQ ID NO: 2948433 - DNA, 25 bp, Homo sapien
ggagcgagctggagccaccacgcct

SEQ ID NO: 2948434 - DNA, 25 bp, Homo sapien
tgggctcccgcaagtttcacactca

SEQ ID NO: 2948435 - DNA, 25 bp, Homo sapien
tgctgccgatggtgaagtgtctccc

SEQ ID NO: 2948436 - DNA, 25 bp, Homo sapien
caagctcatgcatccatatagctga

SEQ ID NO: 2948437 - DNA, 25 bp, Homo sapien
ggccctgtggacagcttgcagggag

SEQ ID NO: 2948438 - DNA, 25 bp, Homo sapien
tatagctgaacctcgagtctgagag

SEQ ID NO: 2948439 - DNA, 25 bp, Homo sapien
atttcctccgccagggacgtgggtg

SEQ ID NO: 2948440 - DNA, 25 bp, Homo sapien
ccagggacgtgggtgatattgtcca

SEQ ID NO: 2948441 - DNA, 25 bp, Homo sapien
ggacccaatcttcgactggactctg

SEQ ID NO: 2948442 - DNA, 25 bp, Homo sapien
ggtgatattgtccagggacccaatc

SEQ ID NO: 2948443 - DNA, 25 bp, Homo sapien
cattgctgagatgccgtggagacgt

SEQ ID NO: 2948444 - DNA, 25 bp, Homo sapien
gggcgagtctaccatgtcgatgctg

SEQ ID NO: 2948445 - DNA, 25 bp, Homo sapien
gggaggcagacacctcgtcagctag

SEQ ID NO: 2948446 - DNA, 25 bp, Homo sapien
gacaccactggcgacttgtacacga

SEQ ID NO: 2948447 - DNA, 25 bp, Homo sapien
ttttgaagtcccgagccaaagccga

SEQ ID NO: 2948448 - DNA, 25 bp, Homo sapien
tactagcccacccatcaatttggaa

SEQ ID NO: 2948449 - DNA, 25 bp, Homo sapien
ccaattaaccgaactgcgaggagca

SEQ ID NO: 2948450 - DNA, 25 bp, Homo sapien
tccacaattattgaccgccccaggg

SEQ ID NO: 2948451 - DNA, 25 bp, Homo sapien
tgaggaaatgttggatgtggccatg

SEQ ID NO: 2948452 - DNA, 25 bp, Homo sapien
cctgaggaaatgttggatgtggcca

SEQ ID NO: 2948453 - DNA, 25 bp, Homo sapien
ctgaggaaatgttggatgtggccat

SEQ ID NO: 2948454 - DNA, 25 bp, Homo sapien
gaggaaatgttggatgtggccatgt

SEQ ID NO: 2948455 - DNA, 25 bp, Homo sapien
acaaggttgacatcgtctgcctgtg

SEQ ID NO: 2948456 - DNA, 25 bp, Homo sapien
ttgacatcgtctgcctgtggctcca

SEQ ID NO: 2948457 - DNA, 25 bp, Homo sapien
agtcccttgaaatcccccagaagca

SEQ ID NO: 2948458 - DNA, 25 bp, Homo sapien
gtggctccacgaacacaccaagttt

SEQ ID NO: 2948459 - DNA, 25 bp, Homo sapien
tgcaggtggcataggccttggctct

SEQ ID NO: 2948460 - DNA, 25 bp, Homo sapien
agggtggcacactgacccacagcag

SEQ ID NO: 2948461 - DNA, 25 bp, Homo sapien
cttggctctcccagcggcaaggagg

SEQ ID NO: 2948462 - DNA, 25 bp, Homo sapien
ccagcgctctcaagacatcaaggtc

SEQ ID NO: 2948463 - DNA, 25 bp, Homo sapien
tacaaagagaactggttagccctaa

SEQ ID NO: 2948464 - DNA, 25 bp, Homo sapien
gacagggaaccgaatcagatcatga

SEQ ID NO: 2948465 - DNA, 25 bp, Homo sapien
caaccagggtcattactgagaaggg

SEQ ID NO: 2948466 - DNA, 25 bp, Homo sapien
tagccctaaagtcccaggtctgcaa

SEQ ID NO: 2948467 - DNA, 25 bp, Homo sapien
cagctacaagctagggtgcaagtgg

SEQ ID NO: 2948468 - DNA, 25 bp, Homo sapien
tacaactcaacagggtgcagatggg

SEQ ID NO: 2948469 - DNA, 25 bp, Homo sapien
tggtgaatccaagcataaacagaca

SEQ ID NO: 2948470 - DNA, 25 bp, Homo sapien
ggagggcagggcaacatctatgtat

SEQ ID NO: 2948471 - DNA, 25 bp, Homo sapien
cagaagttttatgaagccgcaggtc

SEQ ID NO: 2948472 - DNA, 25 bp, Homo sapien
tgaacggcctccttagctgctagaa

SEQ ID NO: 2948473 - DNA, 25 bp, Homo sapien
tgagacttcgggctatgaccagaga

SEQ ID NO: 2948474 - DNA, 25 bp, Homo sapien
gcaatgttttgcaaaggcggcttcc

SEQ ID NO: 2948475 - DNA, 25 bp, Homo sapien
tccccttgcctgtggaacattgtct

SEQ ID NO: 2948476 - DNA, 25 bp, Homo sapien
tgtctggtcctagctgtggttccca

SEQ ID NO: 2948477 - DNA, 25 bp, Homo sapien
cctgctttggagctgtgtaatggca

SEQ ID NO: 2948478 - DNA, 25 bp, Homo sapien
cttcacatccagatccctgtcggtg

SEQ ID NO: 2948479 - DNA, 25 bp, Homo sapien
gaacagaggatagaggggttagtta

SEQ ID NO: 2948480 - DNA, 25 bp, Homo sapien
ccaggaacagaggatagaggggtta

SEQ ID NO: 2948481 - DNA, 25 bp, Homo sapien
cgtccaggaacagaggatagagggg

SEQ ID NO: 2948482 - DNA, 25 bp, Homo sapien
acagaggatagaggggttagttata

SEQ ID NO: 2948483 - DNA, 25 bp, Homo sapien
tctgggtatgagatcactaatcctc

SEQ ID NO: 2948484 - DNA, 25 bp, Homo sapien
taatcctcagctacagaactcaggc

SEQ ID NO: 2948485 - DNA, 25 bp, Homo sapien
gatgcatttcttgtagtgggatgta

SEQ ID NO: 2948486 - DNA, 25 bp, Homo sapien
tttattcttgaccaagatactggga

SEQ ID NO: 2948487 - DNA, 25 bp, Homo sapien
cataggcaggagtggctaaatttct

SEQ ID NO: 2948488 - DNA, 25 bp, Homo sapien
tcctggaaggcctaacattcagtcc

SEQ ID NO: 2948489 - DNA, 25 bp, Homo sapien
ctctggatcagtgagtagcctcaag

SEQ ID NO: 2948490 - DNA, 25 bp, Homo sapien
tcagtcctcgaaggcataacattca

SEQ ID NO: 2948491 - DNA, 25 bp, Homo sapien
gaattcatgcagatgatttggcatc

SEQ ID NO: 2948492 - DNA, 25 bp, Homo sapien
acacgtgcacaccatctgttgtgat

SEQ ID NO: 2948493 - DNA, 25 bp, Homo sapien
acatgatcactatagctcctcactc

SEQ ID NO: 2948494 - DNA, 25 bp, Homo sapien
tgggaccggtcgcgatggctcacgc

SEQ ID NO: 2948495 - DNA, 25 bp, Homo sapien
aaatctggcttttccaattagtgag

SEQ ID NO: 2948496 - DNA, 25 bp, Homo sapien
tgatacaaactatccatataggtga

SEQ ID NO: 2948497 - DNA, 25 bp, Homo sapien
tctgataccttagtttcccacagcc

SEQ ID NO: 2948498 - DNA, 25 bp, Homo sapien
gagaaaacttcatttatctgatacc

SEQ ID NO: 2948499 - DNA, 25 bp, Homo sapien
tactgtcaagtgtaggaaaatagct

SEQ ID NO: 2948500 - DNA, 25 bp, Homo sapien
gagttgataacaggaatgtcagaaa

SEQ ID NO: 2948501 - DNA, 25 bp, Homo sapien
actaatagtcgtatatctctaaaag

SEQ ID NO: 2948502 - DNA, 25 bp, Homo sapien
gattttcagaggagttgataacagg

SEQ ID NO: 2948503 - DNA, 25 bp, Homo sapien
ccagctggatgttactggttacagt

SEQ ID NO: 2948504 - DNA, 25 bp, Homo sapien
aaggattccttattggcgggcaaat

SEQ ID NO: 2948505 - DNA, 25 bp, Homo sapien
tacagtttggctaatgatcatgacc

SEQ ID NO: 2948506 - DNA, 25 bp, Homo sapien
tattagctccataatccagctggat

SEQ ID NO: 2948507 - DNA, 25 bp, Homo sapien
cagtctgccagtctgatgagagagc

SEQ ID NO: 2948508 - DNA, 25 bp, Homo sapien
ctcggattagacccagtctgccagt

SEQ ID NO: 2948509 - DNA, 25 bp, Homo sapien
gatgagagagccagttgtaagttac

SEQ ID NO: 2948510 - DNA, 25 bp, Homo sapien
tctgatgagagagccagttgtaagt

SEQ ID NO: 2948511 - DNA, 25 bp, Homo sapien
tctatgcttgacatcgtaccagtat

SEQ ID NO: 2948512 - DNA, 25 bp, Homo sapien
gcttgacatcgtaccagtatttgcc

SEQ ID NO: 2948513 - DNA, 25 bp, Homo sapien
taatttctatgcttgacatcgtacc

SEQ ID NO: 2948514 - DNA, 25 bp, Homo sapien
tgacatcgtaccagtatttgccagc

SEQ ID NO: 2948515 - DNA, 25 bp, Homo sapien
tagtttgctctacatgctctttggc

SEQ ID NO: 2948516 - DNA, 25 bp, Homo sapien
ggaacacttgataccttctcagtag

SEQ ID NO: 2948517 - DNA, 25 bp, Homo sapien
cagctgttcagcctagtgcatatca

SEQ ID NO: 2948518 - DNA, 25 bp, Homo sapien
agcatatagagttttgacccaggga

SEQ ID NO: 2948519 - DNA, 25 bp, Homo sapien
gatttcctagttcataacagaaggg

SEQ ID NO: 2948520 - DNA, 25 bp, Homo sapien
ccaagtagctgcttagctcttgaga

SEQ ID NO: 2948521 - DNA, 25 bp, Homo sapien
aagctagtatggatggagcacctcc

SEQ ID NO: 2948522 - DNA, 25 bp, Homo sapien
taagctgacctagcttgacaatcct

SEQ ID NO: 2948523 - DNA, 25 bp, Homo sapien
catggtccaaccaggtgatagttat

SEQ ID NO: 2948524 - DNA, 25 bp, Homo sapien
gatcttgagagataggaacgtttcc

SEQ ID NO: 2948525 - DNA, 25 bp, Homo sapien
gccattcagcatgtgaactcgtaaa

SEQ ID NO: 2948526 - DNA, 25 bp, Homo sapien
tcttcaaatcatgagagtgaccctc

SEQ ID NO: 2948527 - DNA, 25 bp, Homo sapien
ctggctaacacgtgaaacaccgtct

SEQ ID NO: 2948528 - DNA, 25 bp, Homo sapien
tggctaacacgtgaaacaccgtctc

SEQ ID NO: 2948529 - DNA, 25 bp, Homo sapien
aaaaaagaggcaagaatgggtgaga

SEQ ID NO: 2948530 - DNA, 25 bp, Homo sapien
agaaaaaaagaggcaagaatgggtg

SEQ ID NO: 2948531 - DNA, 25 bp, Homo sapien
tcatcatctctactactagccagga

SEQ ID NO: 2948532 - DNA, 25 bp, Homo sapien
tttcatcatctctactactagccag

SEQ ID NO: 2948533 - DNA, 25 bp, Homo sapien
gggtttcatcatctctactactagc

SEQ ID NO: 2948534 - DNA, 25 bp, Homo sapien
ggtttcatcatctctactactagcc

SEQ ID NO: 2948535 - DNA, 25 bp, Homo sapien
tccaacagtacaatgagatagataa

SEQ ID NO: 2948536 - DNA, 25 bp, Homo sapien
gctctttacctatctcctgggcata

SEQ ID NO: 2948537 - DNA, 25 bp, Homo sapien
ataagagatcaagataataatctag

SEQ ID NO: 2948538 - DNA, 25 bp, Homo sapien
ttgcctaagcagacaacagagttga

SEQ ID NO: 2948539 - DNA, 25 bp, Homo sapien
tgccttctttataaagacctcaggg

SEQ ID NO: 2948540 - DNA, 25 bp, Homo sapien
tgtgattactgaaatattgttgagg

SEQ ID NO: 2948541 - DNA, 25 bp, Homo sapien
tctcccaaccgttactctaggctta

SEQ ID NO: 2948542 - DNA, 25 bp, Homo sapien
aaacatttcattgtgattactgaaa

SEQ ID NO: 2948543 - DNA, 25 bp, Homo sapien
tctgaagtacatgctctttttgcac

SEQ ID NO: 2948544 - DNA, 25 bp, Homo sapien
acattttgggatcagttgaatcctc

SEQ ID NO: 2948545 - DNA, 25 bp, Homo sapien
tgtataagaacagccaaaggatggc

SEQ ID NO: 2948546 - DNA, 25 bp, Homo sapien
catgcgttagatcatatttgggtac

SEQ ID NO: 2948547 - DNA, 25 bp, Homo sapien
ggcaggataattgactagcagatct

SEQ ID NO: 2948548 - DNA, 25 bp, Homo sapien
gctggcttactagagaaggctgaaa

SEQ ID NO: 2948549 - DNA, 25 bp, Homo sapien
ttctctttgctagaggctggcttac

SEQ ID NO: 2948550 - DNA, 25 bp, Homo sapien
cactggagtgtttggttgttgagac

SEQ ID NO: 2948551 - DNA, 25 bp, Homo sapien
catgtacccctgtgagtagacctca

SEQ ID NO: 2948552 - DNA, 25 bp, Homo sapien
caaatgctgagttgacctagttacc

SEQ ID NO: 2948553 - DNA, 25 bp, Homo sapien
gagctgatcccgagcagcgtcatgt

SEQ ID NO: 2948554 - DNA, 25 bp, Homo sapien
gaatatttaatacatcgcctccaag

SEQ ID NO: 2948555 - DNA, 25 bp, Homo sapien
tgacaagaagggtgcaattcttcct

SEQ ID NO: 2948556 - DNA, 25 bp, Homo sapien
ctttctggaggcagtttagacaaca

SEQ ID NO: 2948557 - DNA, 25 bp, Homo sapien
tgtggtacagttagctccagagtgt

SEQ ID NO: 2948558 - DNA, 25 bp, Homo sapien
caacagcctcaagtagtgcttttgt

SEQ ID NO: 2948559 - DNA, 25 bp, Homo sapien
gtctccagccgtgctcgggccccgt

SEQ ID NO: 2948560 - DNA, 25 bp, Homo sapien
tcggtgcggagcaaggccgggaaag

SEQ ID NO: 2948561 - DNA, 25 bp, Homo sapien
tggcggcctgggtgcgggttcgggc

SEQ ID NO: 2948562 - DNA, 25 bp, Homo sapien
cagacggcggtgcttgtttgtgcgg

SEQ ID NO: 2948563 - DNA, 25 bp, Homo sapien
gcaccgtagcgaagccgactcgtct

SEQ ID NO: 2948564 - DNA, 25 bp, Homo sapien
cgggagaaccgagcaccgtagcgaa

SEQ ID NO: 2948565 - DNA, 25 bp, Homo sapien
gtagcgaagccgactcgtctcgccg

SEQ ID NO: 2948566 - DNA, 25 bp, Homo sapien
accgagcaccgtagcgaagccgact

SEQ ID NO: 2948567 - DNA, 25 bp, Homo sapien
aggtacaaaaacatcggccacggcg

SEQ ID NO: 2948568 - DNA, 25 bp, Homo sapien
agtgctgcgtgccgtcgccgcacgt

SEQ ID NO: 2948569 - DNA, 25 bp, Homo sapien
ccacggcgaggagccatgactgagg

SEQ ID NO: 2948570 - DNA, 25 bp, Homo sapien
gcgaggagccatgactgaggcggcg

SEQ ID NO: 2948571 - DNA, 25 bp, Homo sapien
gcgtcagtgcctcaggttagactca

SEQ ID NO: 2948572 - DNA, 25 bp, Homo sapien
cacagtgcaaacagttcctcgctca

SEQ ID NO: 2948573 - DNA, 25 bp, Homo sapien
tttactacacagtgcaaacagttcc

SEQ ID NO: 2948574 - DNA, 25 bp, Homo sapien
gcacggagggcatgtgacggcgtca

SEQ ID NO: 2948575 - DNA, 25 bp, Homo sapien
ctaaaaccgttctgtaacgactgtg

SEQ ID NO: 2948576 - DNA, 25 bp, Homo sapien
taaaaccgttctgtaacgactgtga

SEQ ID NO: 2948577 - DNA, 25 bp, Homo sapien
agtacaaatggaaattcgcagaaac

SEQ ID NO: 2948578 - DNA, 25 bp, Homo sapien
ttaggagtacaaatggaaattcgca

SEQ ID NO: 2948579 - DNA, 25 bp, Homo sapien
taggagtacaaatggaaattcgcag

SEQ ID NO: 2948580 - DNA, 25 bp, Homo sapien
ggagtacaaatggaaattcgcagaa

SEQ ID NO: 2948581 - DNA, 25 bp, Homo sapien
gtgccataaaccctgtgaactcttg

SEQ ID NO: 2948582 - DNA, 25 bp, Homo sapien
tatttaagtatacgctgcaaagggc

SEQ ID NO: 2948583 - DNA, 25 bp, Homo sapien
tgtgtaatttgaccctatgactcca

SEQ ID NO: 2948584 - DNA, 25 bp, Homo sapien
caacaggttgactgatttaagtgcc

SEQ ID NO: 2948585 - DNA, 25 bp, Homo sapien
ctaatcagaatagagtggatattgg

SEQ ID NO: 2948586 - DNA, 25 bp, Homo sapien
ggagagtcaacatgactattccaag

SEQ ID NO: 2948587 - DNA, 25 bp, Homo sapien
gttaaaactaatcagaatagagtgg

SEQ ID NO: 2948588 - DNA, 25 bp, Homo sapien
gtggatattggagagtcaacatgac

SEQ ID NO: 2948589 - DNA, 25 bp, Homo sapien
ttggtggcatcttcaggcttgctgc

SEQ ID NO: 2948590 - DNA, 25 bp, Homo sapien
cagtggcttaatgctatcaccaagg

SEQ ID NO: 2948591 - DNA, 25 bp, Homo sapien
gactgtagcagtttgaggtgtcact

SEQ ID NO: 2948592 - DNA, 25 bp, Homo sapien
ggcttgctgcaaaggtgactgtagc

SEQ ID NO: 2948593 - DNA, 25 bp, Homo sapien
tttggctaaatctttatacttgtga

SEQ ID NO: 2948594 - DNA, 25 bp, Homo sapien
cttgcatttggctaaatctttatac

SEQ ID NO: 2948595 - DNA, 25 bp, Homo sapien
tggctaaatctttatacttgtgaca

SEQ ID NO: 2948596 - DNA, 25 bp, Homo sapien
ctacttgcatttggctaaatcttta

SEQ ID NO: 2948597 - DNA, 25 bp, Homo sapien
aggccctccacaacttggctgctca

SEQ ID NO: 2948598 - DNA, 25 bp, Homo sapien
ccctccacaacttggctgctcacag

SEQ ID NO: 2948599 - DNA, 25 bp, Homo sapien
ggccctccacaacttggctgctcac

SEQ ID NO: 2948600 - DNA, 25 bp, Homo sapien
ctccacaacttggctgctcacagct

SEQ ID NO: 2948601 - DNA, 25 bp, Homo sapien
tccctttccaagaatggtatgctgc

SEQ ID NO: 2948602 - DNA, 25 bp, Homo sapien
tgccatgccatcagaacaagatttt

SEQ ID NO: 2948603 - DNA, 25 bp, Homo sapien
caagttgcatcataacttagaatca

SEQ ID NO: 2948604 - DNA, 25 bp, Homo sapien
cttccaaagtccctaggtttgccat

SEQ ID NO: 2948605 - DNA, 25 bp, Homo sapien
tccctgggattaagtcatacttagc

SEQ ID NO: 2948606 - DNA, 25 bp, Homo sapien
tttggcatcagagtaataatggctt

SEQ ID NO: 2948607 - DNA, 25 bp, Homo sapien
catcttggactaattttggttgaac

SEQ ID NO: 2948608 - DNA, 25 bp, Homo sapien
tagcaatggtgtataagccttttaa

SEQ ID NO: 2948609 - DNA, 25 bp, Homo sapien
gaacatcacattgtctttagggaat

SEQ ID NO: 2948610 - DNA, 25 bp, Homo sapien
tccatgctgtaacatacctgccatt

SEQ ID NO: 2948611 - DNA, 25 bp, Homo sapien
tcatatctcagtgggctcttagagg

SEQ ID NO: 2948612 - DNA, 25 bp, Homo sapien
tagaggtaatccaaggtaagaacca

SEQ ID NO: 2948613 - DNA, 25 bp, Homo sapien
ggtggtggtaatttatctgtcagca

SEQ ID NO: 2948614 - DNA, 25 bp, Homo sapien
cagaaagtttgtcggccaagagaaa

SEQ ID NO: 2948615 - DNA, 25 bp, Homo sapien
agcgtatggttctagctcacttttt

SEQ ID NO: 2948616 - DNA, 25 bp, Homo sapien
ccagaagacaggcaagcgtatggtt

SEQ ID NO: 2948617 - DNA, 25 bp, Homo sapien
tgactgtgctgtcaaaggtggtaag

SEQ ID NO: 2948618 - DNA, 25 bp, Homo sapien
tgagtgcttcctctggacccaggta

SEQ ID NO: 2948619 - DNA, 25 bp, Homo sapien
tagtttgctccactttgaacccagc

SEQ ID NO: 2948620 - DNA, 25 bp, Homo sapien
gagtgtgcatatgcagacctagcac

SEQ ID NO: 2948621 - DNA, 25 bp, Homo sapien
tcgctttgttgtccaggtgatcttg

SEQ ID NO: 2948622 - DNA, 25 bp, Homo sapien
tttgttgtccaggtgatcttggctc

SEQ ID NO: 2948623 - DNA, 25 bp, Homo sapien
gctttgttgtccaggtgatcttggc

SEQ ID NO: 2948624 - DNA, 25 bp, Homo sapien
tctcgctttgttgtccaggtgatct

SEQ ID NO: 2948625 - DNA, 25 bp, Homo sapien
accatttgtttactctgaaacttca

SEQ ID NO: 2948626 - DNA, 25 bp, Homo sapien
catgtgttacaaaagatgtgtcatt

SEQ ID NO: 2948627 - DNA, 25 bp, Homo sapien
cattaaccatttgtttactctgaaa

SEQ ID NO: 2948628 - DNA, 25 bp, Homo sapien
cttgcaaatcagtagctgattcatg

SEQ ID NO: 2948629 - DNA, 25 bp, Homo sapien
cggggcgccaggccgagccgaggtg

SEQ ID NO: 2948630 - DNA, 25 bp, Homo sapien
ctcggggcgccaggccgagccgagg

SEQ ID NO: 2948631 - DNA, 25 bp, Homo sapien
tcggggcgccaggccgagccgaggt

SEQ ID NO: 2948632 - DNA, 25 bp, Homo sapien
gccgagccgaggtgggacggaccga

SEQ ID NO: 2948633 - DNA, 25 bp, Homo sapien
tactttagataccatagttcaggat

SEQ ID NO: 2948634 - DNA, 25 bp, Homo sapien
ctttagataccatagttcaggattt

SEQ ID NO: 2948635 - DNA, 25 bp, Homo sapien
gtttactttagataccatagttcag

SEQ ID NO: 2948636 - DNA, 25 bp, Homo sapien
gataccatagttcaggatttaaact

SEQ ID NO: 2948637 - DNA, 25 bp, Homo sapien
agctctgcaagttgaccccgccctt

SEQ ID NO: 2948638 - DNA, 25 bp, Homo sapien
ccagcacagctctgcaagttgaccc

SEQ ID NO: 2948639 - DNA, 25 bp, Homo sapien
tctgcaagttgaccccgcccttctt

SEQ ID NO: 2948640 - DNA, 25 bp, Homo sapien
agcacagctctgcaagttgaccccg

SEQ ID NO: 2948641 - DNA, 25 bp, Homo sapien
cagagccaggctagataggattcag

SEQ ID NO: 2948642 - DNA, 25 bp, Homo sapien
gagtttcagagccaggctagatagg

SEQ ID NO: 2948643 - DNA, 25 bp, Homo sapien
gctccagattgtgagtttcagagcc

SEQ ID NO: 2948644 - DNA, 25 bp, Homo sapien
ccccagctccagattgtgagtttca

SEQ ID NO: 2948645 - DNA, 25 bp, Homo sapien
tctagccaggaaattagcaagaaaa

SEQ ID NO: 2948646 - DNA, 25 bp, Homo sapien
gaatccacaaaaccgtcagaacaag

SEQ ID NO: 2948647 - DNA, 25 bp, Homo sapien
caaagttgcaggtgtaagagtgata

SEQ ID NO: 2948648 - DNA, 25 bp, Homo sapien
cccacaggtaatacttaatgatgaa

SEQ ID NO: 2948649 - DNA, 25 bp, Homo sapien
tggcctgaactttcttattctaagg

SEQ ID NO: 2948650 - DNA, 25 bp, Homo sapien
cctgaactttcttattctaaggatt

SEQ ID NO: 2948651 - DNA, 25 bp, Homo sapien
ggcctgaactttcttattctaagga

SEQ ID NO: 2948652 - DNA, 25 bp, Homo sapien
gcctgaactttcttattctaaggat

SEQ ID NO: 2948653 - DNA, 25 bp, Homo sapien
cgggacgccggctcctggccggact

SEQ ID NO: 2948654 - DNA, 25 bp, Homo sapien
ctctggccctggccgcgggacgccg

SEQ ID NO: 2948655 - DNA, 25 bp, Homo sapien
acgccggctcctggccggactcggc

SEQ ID NO: 2948656 - DNA, 25 bp, Homo sapien
ccctggccgcgggacgccggctcct

SEQ ID NO: 2948657 - DNA, 25 bp, Homo sapien
gttgagcgtggtgggccgcttgggc

SEQ ID NO: 2948658 - DNA, 25 bp, Homo sapien
aagaggttgagcgtggtgggccgct

SEQ ID NO: 2948659 - DNA, 25 bp, Homo sapien
ctgcggaaagaggttgagcgtggtg

SEQ ID NO: 2948660 - DNA, 25 bp, Homo sapien
aggttgagcgtggtgggccgcttgg

SEQ ID NO: 2948661 - DNA, 25 bp, Homo sapien
ccgatcctgccaactgtactttttg

SEQ ID NO: 2948662 - DNA, 25 bp, Homo sapien
tgccaactgtactttttgcccagag

SEQ ID NO: 2948663 - DNA, 25 bp, Homo sapien
tcagtgtgtcctgagacaactgcac

SEQ ID NO: 2948664 - DNA, 25 bp, Homo sapien
attcagtgtgtcctgagacaactgc

SEQ ID NO: 2948665 - DNA, 25 bp, Homo sapien
tcaggggtgaggatgatcgagacac

SEQ ID NO: 2948666 - DNA, 25 bp, Homo sapien
tcttcaggggtgaggatgatcgaga

SEQ ID NO: 2948667 - DNA, 25 bp, Homo sapien
cttcaggggtgaggatgatcgagac

SEQ ID NO: 2948668 - DNA, 25 bp, Homo sapien
ctgtcttcaggggtgaggatgatcg

SEQ ID NO: 2948669 - DNA, 25 bp, Homo sapien
ggcagctcatcgctcaggcaaatgg

SEQ ID NO: 2948670 - DNA, 25 bp, Homo sapien
aggcaaatgggttcatgcggtggtg

SEQ ID NO: 2948671 - DNA, 25 bp, Homo sapien
caaatgggttcatgcggtggtgtct

SEQ ID NO: 2948672 - DNA, 25 bp, Homo sapien
gctcatcgctcaggcaaatgggttc

SEQ ID NO: 2948673 - DNA, 25 bp, Homo sapien
gtctctgaagcacggccgcaggctc

SEQ ID NO: 2948674 - DNA, 25 bp, Homo sapien
tagtctctgaagcacggccgcaggc

SEQ ID NO: 2948675 - DNA, 25 bp, Homo sapien
ctgtagtctctgaagcacggccgca

SEQ ID NO: 2948676 - DNA, 25 bp, Homo sapien
tgtagtctctgaagcacggccgcag

SEQ ID NO: 2948677 - DNA, 25 bp, Homo sapien
gactcatagggcgaggagacggagg

SEQ ID NO: 2948678 - DNA, 25 bp, Homo sapien
tcttggagaaatggacgtcgggttc

SEQ ID NO: 2948679 - DNA, 25 bp, Homo sapien
ggcactggaggagcgggagcggcca

SEQ ID NO: 2948680 - DNA, 25 bp, Homo sapien
gcactggaggagcgggagcggccac

SEQ ID NO: 2948681 - DNA, 25 bp, Homo sapien
ctcggcactggaggagcgggagcgg

SEQ ID NO: 2948682 - DNA, 25 bp, Homo sapien
tcggcactggaggagcgggagcggc

SEQ ID NO: 2948683 - DNA, 25 bp, Homo sapien
taggcctcgtaccagtagtcttcag

SEQ ID NO: 2948684 - DNA, 25 bp, Homo sapien
tccactagcagagggtcatccactt

SEQ ID NO: 2948685 - DNA, 25 bp, Homo sapien
gttcgtcttcgtgtcgaggcacaaa

SEQ ID NO: 2948686 - DNA, 25 bp, Homo sapien
caccagtgcgcatgttgtaggcctc

SEQ ID NO: 2948687 - DNA, 25 bp, Homo sapien
ccatgtgctcgggctccttggtgac

SEQ ID NO: 2948688 - DNA, 25 bp, Homo sapien
gccatgtgctcgggctccttggtga

SEQ ID NO: 2948689 - DNA, 25 bp, Homo sapien
ctgccatgtgctcgggctccttggt

SEQ ID NO: 2948690 - DNA, 25 bp, Homo sapien
tgccatgtgctcgggctccttggtg

SEQ ID NO: 2948691 - DNA, 25 bp, Homo sapien
tcacccggaactggtccacccagtc

SEQ ID NO: 2948692 - DNA, 25 bp, Homo sapien
cttcacccggaactggtccacccag

SEQ ID NO: 2948693 - DNA, 25 bp, Homo sapien
actggtccacccagtcactgttttt

SEQ ID NO: 2948694 - DNA, 25 bp, Homo sapien
cggaactggtccacccagtcactgt

SEQ ID NO: 2948695 - DNA, 25 bp, Homo sapien
gcctcctgggagtcatcggccttga

SEQ ID NO: 2948696 - DNA, 25 bp, Homo sapien
gctggagggcgggttaaagtgcacg

SEQ ID NO: 2948697 - DNA, 25 bp, Homo sapien
cccgcacgctgatctccaggacaca

SEQ ID NO: 2948698 - DNA, 25 bp, Homo sapien
acaccccgcacgctgatctccagga

SEQ ID NO: 2948699 - DNA, 25 bp, Homo sapien
acgtggcaggcaaaccggtggtcgg

SEQ ID NO: 2948700 - DNA, 25 bp, Homo sapien
agacgtggcaggcaaaccggtggtc

SEQ ID NO: 2948701 - DNA, 25 bp, Homo sapien
gtggcaggcaaaccggtggtcggcg

SEQ ID NO: 2948702 - DNA, 25 bp, Homo sapien
aaagacgtggcaggcaaaccggtgg

SEQ ID NO: 2948703 - DNA, 25 bp, Homo sapien
tgtggggcaggtgtactccacaaac

SEQ ID NO: 2948704 - DNA, 25 bp, Homo sapien
tggggcaggtgtactccacaaactg

SEQ ID NO: 2948705 - DNA, 25 bp, Homo sapien
tctgtggggcaggtgtactccacaa

SEQ ID NO: 2948706 - DNA, 25 bp, Homo sapien
ttctgtggggcaggtgtactccaca

SEQ ID NO: 2948707 - DNA, 25 bp, Homo sapien
tctaatcccatatattacaataaac

SEQ ID NO: 2948708 - DNA, 25 bp, Homo sapien
actctgccctccatagatgaatcta

SEQ ID NO: 2948709 - DNA, 25 bp, Homo sapien
gggcagggccgtgtgctcctggaac

SEQ ID NO: 2948710 - DNA, 25 bp, Homo sapien
tggaacggacatccttctctgccag

SEQ ID NO: 2948711 - DNA, 25 bp, Homo sapien
tagcctgtgtcagtcaggaagcctc

SEQ ID NO: 2948712 - DNA, 25 bp, Homo sapien
tgggatagggccttgcagcagctcc

SEQ ID NO: 2948713 - DNA, 25 bp, Homo sapien
tgccacaggctagcatgccagtgag

SEQ ID NO: 2948714 - DNA, 25 bp, Homo sapien
tctcctgctgggatagggccttgca

SEQ ID NO: 2948715 - DNA, 25 bp, Homo sapien
caggaaatggcactttaatagttgg

SEQ ID NO: 2948716 - DNA, 25 bp, Homo sapien
atggcactttaatagttggggccag

SEQ ID NO: 2948717 - DNA, 25 bp, Homo sapien
gccagggtgacaggaccaagatggg

SEQ ID NO: 2948718 - DNA, 25 bp, Homo sapien
cactttaatagttggggccagggtg

SEQ ID NO: 2948719 - DNA, 25 bp, Homo sapien
ttcctttgccaataatgtttttcaa

SEQ ID NO: 2948720 - DNA, 25 bp, Homo sapien
tctttcccctgctggctatcttgac

SEQ ID NO: 2948721 - DNA, 25 bp, Homo sapien
tcacccatcttgattatttactctt

SEQ ID NO: 2948722 - DNA, 25 bp, Homo sapien
catgactcccaagagtactatagta

SEQ ID NO: 2948723 - DNA, 25 bp, Homo sapien
agctaagtccctcccagattcctgg

SEQ ID NO: 2948724 - DNA, 25 bp, Homo sapien
gaagtccaggtagtaagccaatgaa

SEQ ID NO: 2948725 - DNA, 25 bp, Homo sapien
tagtcattcactctagctatgtggg

SEQ ID NO: 2948726 - DNA, 25 bp, Homo sapien
tacagcctgccaacaaccaatgagt

SEQ ID NO: 2948727 - DNA, 25 bp, Homo sapien
gcctgggcaacagagcaagactcca

SEQ ID NO: 2948728 - DNA, 25 bp, Homo sapien
gctgagatcgtgccattgcactcca

SEQ ID NO: 2948729 - DNA, 25 bp, Homo sapien
acgcaggaggtggatgttgcagcga

SEQ ID NO: 2948730 - DNA, 25 bp, Homo sapien
gaacgcaggaggtggatgttgcagc

SEQ ID NO: 2948731 - DNA, 25 bp, Homo sapien
tctccaccggagcttcgggggatga

SEQ ID NO: 2948732 - DNA, 25 bp, Homo sapien
ctctccaccggagcttcgggggatg

SEQ ID NO: 2948733 - DNA, 25 bp, Homo sapien
ttctctccaccggagcttcggggga

SEQ ID NO: 2948734 - DNA, 25 bp, Homo sapien
tctctccaccggagcttcgggggat

SEQ ID NO: 2948735 - DNA, 25 bp, Homo sapien
gctccgcgtccctgcgcggctgact

SEQ ID NO: 2948736 - DNA, 25 bp, Homo sapien
gggctccgcgtccctgcgcggctga

SEQ ID NO: 2948737 - DNA, 25 bp, Homo sapien
cgcgtccctgcgcggctgactgagg

SEQ ID NO: 2948738 - DNA, 25 bp, Homo sapien
ctccgcgtccctgcgcggctgactg

SEQ ID NO: 2948739 - DNA, 25 bp, Homo sapien
cgatttcgcgcttgcagaacgcctc

SEQ ID NO: 2948740 - DNA, 25 bp, Homo sapien
tccatgcccgcccggcaagcgcaag

SEQ ID NO: 2948741 - DNA, 25 bp, Homo sapien
cccgtccatgcccgcccggcaagcg

SEQ ID NO: 2948742 - DNA, 25 bp, Homo sapien
gcagaacgcctctcgcccgtccatg

SEQ ID NO: 2948743 - DNA, 25 bp, Homo sapien
gggatctcgcgtgcaggattctccg

SEQ ID NO: 2948744 - DNA, 25 bp, Homo sapien
tctcgcgtgcaggattctccgggac

SEQ ID NO: 2948745 - DNA, 25 bp, Homo sapien
tcgcgtgcaggattctccgggactc

SEQ ID NO: 2948746 - DNA, 25 bp, Homo sapien
gtgcaggattctccgggactcggaa

SEQ ID NO: 2948747 - DNA, 25 bp, Homo sapien
ggcgttggtttttagcaacagcgaa

SEQ ID NO: 2948748 - DNA, 25 bp, Homo sapien
cctgggcgttggtttttagcaacag

SEQ ID NO: 2948749 - DNA, 25 bp, Homo sapien
tgggcgttggtttttagcaacagcg

SEQ ID NO: 2948750 - DNA, 25 bp, Homo sapien
gcgttggtttttagcaacagcgaaa

SEQ ID NO: 2948751 - DNA, 25 bp, Homo sapien
ggcggttcatcttgtacagcccgtc

SEQ ID NO: 2948752 - DNA, 25 bp, Homo sapien
aggcggttcatcttgtacagcccgt

SEQ ID NO: 2948753 - DNA, 25 bp, Homo sapien
aagaagacgtcgggggtgagtgagg

SEQ ID NO: 2948754 - DNA, 25 bp, Homo sapien
agaagacgtcgggggtgagtgaggt

SEQ ID NO: 2948755 - DNA, 25 bp, Homo sapien
gaagacgtcgggggtgagtgaggta

SEQ ID NO: 2948756 - DNA, 25 bp, Homo sapien
aaactctggacacggtttattgcag

SEQ ID NO: 2948757 - DNA, 25 bp, Homo sapien
taaactctggacacggtttattgca

SEQ ID NO: 2948758 - DNA, 25 bp, Homo sapien
ttaaactctggacacggtttattgc

SEQ ID NO: 2948759 - DNA, 25 bp, Homo sapien
tctcttatggtagatgtggcccatc

SEQ ID NO: 2948760 - DNA, 25 bp, Homo sapien
tcttatggtagatgtggcccatcac

SEQ ID NO: 2948761 - DNA, 25 bp, Homo sapien
cttatggtagatgtggcccatcaca

SEQ ID NO: 2948762 - DNA, 25 bp, Homo sapien
tatggtagatgtggcccatcacaat

SEQ ID NO: 2948763 - DNA, 25 bp, Homo sapien
cgagattacagttgtaactatgcag

SEQ ID NO: 2948764 - DNA, 25 bp, Homo sapien
aattcaggaaaatgttttgtggact

SEQ ID NO: 2948765 - DNA, 25 bp, Homo sapien
gtcttgttgccgatgtctcttgtga

SEQ ID NO: 2948766 - DNA, 25 bp, Homo sapien
caggtcattcatagagtagctttgg

SEQ ID NO: 2948767 - DNA, 25 bp, Homo sapien
agtgcgcttactgttatgtgaagaa

SEQ ID NO: 2948768 - DNA, 25 bp, Homo sapien
actagtgcgcttactgttatgtgaa

SEQ ID NO: 2948769 - DNA, 25 bp, Homo sapien
tgcgcttactgttatgtgaagaatt

SEQ ID NO: 2948770 - DNA, 25 bp, Homo sapien
tagtgcgcttactgttatgtgaaga

SEQ ID NO: 2948771 - DNA, 25 bp, Homo sapien
gagaggaagttgcttggaggtcctg

SEQ ID NO: 2948772 - DNA, 25 bp, Homo sapien
agagcccagaggatgactgctggca

SEQ ID NO: 2948773 - DNA, 25 bp, Homo sapien
gatgactgctggcaactgctgatga

SEQ ID NO: 2948774 - DNA, 25 bp, Homo sapien
ccaacttgctggcagagcccagagg

SEQ ID NO: 2948775 - DNA, 25 bp, Homo sapien
tggtaactgtgaggtagaagccaag

SEQ ID NO: 2948776 - DNA, 25 bp, Homo sapien
gaaaggcctttggtggtaactgtga

SEQ ID NO: 2948777 - DNA, 25 bp, Homo sapien
gtggtaactgtgaggtagaagccaa

SEQ ID NO: 2948778 - DNA, 25 bp, Homo sapien
cctttggtggtaactgtgaggtaga

SEQ ID NO: 2948779 - DNA, 25 bp, Homo sapien
gttgcaatgccagcatcactcagtg

SEQ ID NO: 2948780 - DNA, 25 bp, Homo sapien
cagttgcaatgccagcatcactcag

SEQ ID NO: 2948781 - DNA, 25 bp, Homo sapien
acagctcatcatgtagggcccagaa

SEQ ID NO: 2948782 - DNA, 25 bp, Homo sapien
tgtagggcccagaatactgattttg

SEQ ID NO: 2948783 - DNA, 25 bp, Homo sapien
tgagtatgtctgtccacagtgccag

SEQ ID NO: 2948784 - DNA, 25 bp, Homo sapien
tccatttcggatcttgcagattttt

SEQ ID NO: 2948785 - DNA, 25 bp, Homo sapien
catgatcggtgtcagaattggtacc

SEQ ID NO: 2948786 - DNA, 25 bp, Homo sapien
taccatgggtgctgcattggcatct

SEQ ID NO: 2948787 - DNA, 25 bp, Homo sapien
ccatgtgagtgactttgtttgcaca

SEQ ID NO: 2948788 - DNA, 25 bp, Homo sapien
catgtgagtgactttgtttgcacat

SEQ ID NO: 2948789 - DNA, 25 bp, Homo sapien
cccatgtgagtgactttgtttgcac

SEQ ID NO: 2948790 - DNA, 25 bp, Homo sapien
atgtgagtgactttgtttgcacatg

SEQ ID NO: 2948791 - DNA, 25 bp, Homo sapien
tattccacccaagatacgtgggaga

SEQ ID NO: 2948792 - DNA, 25 bp, Homo sapien
aatgattgacagaaagatcttcggc

SEQ ID NO: 2948793 - DNA, 25 bp, Homo sapien
tatagggatagctccattatacgct

SEQ ID NO: 2948794 - DNA, 25 bp, Homo sapien
cgtgggagatattgagatccaagca

SEQ ID NO: 2948795 - DNA, 25 bp, Homo sapien
catgtaaactccaagaaggtgcttc

SEQ ID NO: 2948796 - DNA, 25 bp, Homo sapien
atgtaaactccaagaaggtgcttca

SEQ ID NO: 2948797 - DNA, 25 bp, Homo sapien
agcatgtaaactccaagaaggtgct

SEQ ID NO: 2948798 - DNA, 25 bp, Homo sapien
gcatgtaaactccaagaaggtgctt

SEQ ID NO: 2948799 - DNA, 25 bp, Homo sapien
tcaccagggcactcttatgtcacaa

SEQ ID NO: 2948800 - DNA, 25 bp, Homo sapien
gggcactcttatgtcacaatcccgc

SEQ ID NO: 2948801 - DNA, 25 bp, Homo sapien
atgtcaccagggcactcttatgtca

SEQ ID NO: 2948802 - DNA, 25 bp, Homo sapien
gcccaagcacgccttcccatcctgc

SEQ ID NO: 2948803 - DNA, 25 bp, Homo sapien
cacacactagtgccgggcactgagc

SEQ ID NO: 2948804 - DNA, 25 bp, Homo sapien
cacactagtgccgggcactgagcag

SEQ ID NO: 2948805 - DNA, 25 bp, Homo sapien
acacacactagtgccgggcactgag

SEQ ID NO: 2948806 - DNA, 25 bp, Homo sapien
gacacacactagtgccgggcactga

SEQ ID NO: 2948807 - DNA, 25 bp, Homo sapien
gagagtaggcgcatggggagattcc

SEQ ID NO: 2948808 - DNA, 25 bp, Homo sapien
gctgggagagtaggcgcatggggag

SEQ ID NO: 2948809 - DNA, 25 bp, Homo sapien
gggagagtaggcgcatggggagatt

SEQ ID NO: 2948810 - DNA, 25 bp, Homo sapien
ctgctgggagagtaggcgcatgggg

SEQ ID NO: 2948811 - DNA, 25 bp, Homo sapien
cccaggtgatcaaagtcccacgggt

SEQ ID NO: 2948812 - DNA, 25 bp, Homo sapien
agggccccaggtgatcaaagtccca

SEQ ID NO: 2948813 - DNA, 25 bp, Homo sapien
gccccaggtgatcaaagtcccacgg

SEQ ID NO: 2948814 - DNA, 25 bp, Homo sapien
gggccccaggtgatcaaagtcccac

SEQ ID NO: 2948815 - DNA, 25 bp, Homo sapien
cctcatgattcggtagagttagact

SEQ ID NO: 2948816 - DNA, 25 bp, Homo sapien
gatacggtgtatctgtactggaata

SEQ ID NO: 2948817 - DNA, 25 bp, Homo sapien
gaaggtccaacttgctcagagggcc

SEQ ID NO: 2948818 - DNA, 25 bp, Homo sapien
ttccaataatctcagcaaggctcca

SEQ ID NO: 2948819 - DNA, 25 bp, Homo sapien
acttcatgatgttctggaggctgac

SEQ ID NO: 2948820 - DNA, 25 bp, Homo sapien
gacctggaggtgaaactgtgacttc

SEQ ID NO: 2948821 - DNA, 25 bp, Homo sapien
aaatgatgagtttgatggtgacctg

SEQ ID NO: 2948822 - DNA, 25 bp, Homo sapien
ctaaatgatgagtttgatggtgacc

SEQ ID NO: 2948823 - DNA, 25 bp, Homo sapien
ctgaccctgagagccgagttgtagc

SEQ ID NO: 2948824 - DNA, 25 bp, Homo sapien
gaggcttcacagagacactgggtga

SEQ ID NO: 2948825 - DNA, 25 bp, Homo sapien
tagcctcctggtggactagagaagt

SEQ ID NO: 2948826 - DNA, 25 bp, Homo sapien
gagctgcacgtctggaggcttcaca

SEQ ID NO: 2948827 - DNA, 25 bp, Homo sapien
ctcctgatgggttagggaagactca

SEQ ID NO: 2948828 - DNA, 25 bp, Homo sapien
gatgggttagggaagactcaccctc

SEQ ID NO: 2948829 - DNA, 25 bp, Homo sapien
cctgatgggttagggaagactcacc

SEQ ID NO: 2948830 - DNA, 25 bp, Homo sapien
ctggatggcgggaggttctacatca

SEQ ID NO: 2948831 - DNA, 25 bp, Homo sapien
tggtgttggatttgttaccccttga

SEQ ID NO: 2948832 - DNA, 25 bp, Homo sapien
ctacaactacattagggaactctgg

SEQ ID NO: 2948833 - DNA, 25 bp, Homo sapien
tcaggtgtgaatgctctggaggttg

SEQ ID NO: 2948834 - DNA, 25 bp, Homo sapien
taccccttgatatactcgaagttgg

SEQ ID NO: 2948835 - DNA, 25 bp, Homo sapien
atgctttggagaaactatagtcctc

SEQ ID NO: 2948836 - DNA, 25 bp, Homo sapien
ttggagaaactatagtcctcttcgg

SEQ ID NO: 2948837 - DNA, 25 bp, Homo sapien
tggagaaactatagtcctcttcggg

SEQ ID NO: 2948838 - DNA, 25 bp, Homo sapien
caggatgctttggagaaactatagt

SEQ ID NO: 2948839 - DNA, 25 bp, Homo sapien
gtaggtggacctgtgacttcagtca

SEQ ID NO: 2948840 - DNA, 25 bp, Homo sapien
taggtggacctgtgacttcagtcag

SEQ ID NO: 2948841 - DNA, 25 bp, Homo sapien
cacagaggacaattgaggaaaagtg

SEQ ID NO: 2948842 - DNA, 25 bp, Homo sapien
gctgccatgtcaggcaggacacaga

SEQ ID NO: 2948843 - DNA, 25 bp, Homo sapien
aggacacagaggacaattgaggaaa

SEQ ID NO: 2948844 - DNA, 25 bp, Homo sapien
gacacagaggacaattgaggaaaag

SEQ ID NO: 2948845 - DNA, 25 bp, Homo sapien
agtttctcagtccaactgtatgctt

SEQ ID NO: 2948846 - DNA, 25 bp, Homo sapien
gtttctcagtccaactgtatgcttt

SEQ ID NO: 2948847 - DNA, 25 bp, Homo sapien
ttctcagtccaactgtatgctttcc

SEQ ID NO: 2948848 - DNA, 25 bp, Homo sapien
ctcagtccaactgtatgctttccat

SEQ ID NO: 2948849 - DNA, 25 bp, Homo sapien
tctagatcacaaaatcccttttaga

SEQ ID NO: 2948850 - DNA, 25 bp, Homo sapien
tgcaagtgaagccattcaacctttt

SEQ ID NO: 2948851 - DNA, 25 bp, Homo sapien
ttattatgaaagccccacatggaac

SEQ ID NO: 2948852 - DNA, 25 bp, Homo sapien
tatttcatgcctcctctctagatca

SEQ ID NO: 2948853 - DNA, 25 bp, Homo sapien
aatactggagggatagcaggccttc

SEQ ID NO: 2948854 - DNA, 25 bp, Homo sapien
ggccttcaaatgaatccttgtgtaa

SEQ ID NO: 2948855 - DNA, 25 bp, Homo sapien
gtgtaattcagtcaagttattttct

SEQ ID NO: 2948856 - DNA, 25 bp, Homo sapien
actggagggatagcaggccttcaaa

SEQ ID NO: 2948857 - DNA, 25 bp, Homo sapien
gtaacgttgtctggctgatatctcc

SEQ ID NO: 2948858 - DNA, 25 bp, Homo sapien
aacgttgtctggctgatatctccat

SEQ ID NO: 2948859 - DNA, 25 bp, Homo sapien
ggtgtaacgttgtctggctgatatc

SEQ ID NO: 2948860 - DNA, 25 bp, Homo sapien
atggtgtaacgttgtctggctgata

SEQ ID NO: 2948861 - DNA, 25 bp, Homo sapien
caaatgtatgtctttcaatagactg

SEQ ID NO: 2948862 - DNA, 25 bp, Homo sapien
tcaatagactgtattttattgcagg

SEQ ID NO: 2948863 - DNA, 25 bp, Homo sapien
cttcaaaaatggtagtggttcaaat

SEQ ID NO: 2948864 - DNA, 25 bp, Homo sapien
gtagtggttcaaatgtatgtctttc

SEQ ID NO: 2948865 - DNA, 25 bp, Homo sapien
agctgagttctgtaattacattgca

SEQ ID NO: 2948866 - DNA, 25 bp, Homo sapien
gctgagttctgtaattacattgcaa

SEQ ID NO: 2948867 - DNA, 25 bp, Homo sapien
ctgagttctgtaattacattgcaac

SEQ ID NO: 2948868 - DNA, 25 bp, Homo sapien
gacaagccaatatgtgagtgtactc

SEQ ID NO: 2948869 - DNA, 25 bp, Homo sapien
agccatcagtctggacctgtgtata

SEQ ID NO: 2948870 - DNA, 25 bp, Homo sapien
cagtaaggcatgtttgtgaccgaag

SEQ ID NO: 2948871 - DNA, 25 bp, Homo sapien
gcatgatatcgatgtgccatagaca

SEQ ID NO: 2948872 - DNA, 25 bp, Homo sapien
gcctctccgaatcagagaagaagct

SEQ ID NO: 2948873 - DNA, 25 bp, Homo sapien
taccgctatgtaaaggaagctgatg

SEQ ID NO: 2948874 - DNA, 25 bp, Homo sapien
taccaaaacatgatgacaataccct

SEQ ID NO: 2948875 - DNA, 25 bp, Homo sapien
tgccaggattccagtacataccaaa

SEQ ID NO: 2948876 - DNA, 25 bp, Homo sapien
tagcaaattacctagcgtctctgag

SEQ ID NO: 2948877 - DNA, 25 bp, Homo sapien
taaccgcatcgcaagagttgttgga

SEQ ID NO: 2948878 - DNA, 25 bp, Homo sapien
tggagctcactgctctacaggtcct

SEQ ID NO: 2948879 - DNA, 25 bp, Homo sapien
ctccagaagcgtgggattctcagag

SEQ ID NO: 2948880 - DNA, 25 bp, Homo sapien
gacctggaatctggcagacctgggt

SEQ ID NO: 2948881 - DNA, 25 bp, Homo sapien
tgacttgagtaatgaacatgagcct

SEQ ID NO: 2948882 - DNA, 25 bp, Homo sapien
ggaataaatgaaagagcacgtgtct

SEQ ID NO: 2948883 - DNA, 25 bp, Homo sapien
gcctttctgggtagcgtttacagca

SEQ ID NO: 2948884 - DNA, 25 bp, Homo sapien
gcaacgttgtgagtggttgcaccac

SEQ ID NO: 2948885 - DNA, 25 bp, Homo sapien
aggtggaggctgcaacgttgtgagt

SEQ ID NO: 2948886 - DNA, 25 bp, Homo sapien
taaaaactgagagactttgttgcta

SEQ ID NO: 2948887 - DNA, 25 bp, Homo sapien
ctttgttgctagaagacctgcccta

SEQ ID NO: 2948888 - DNA, 25 bp, Homo sapien
tctgtagactagagaactaaaggaa

SEQ ID NO: 2948889 - DNA, 25 bp, Homo sapien
taattgagattgttgactctgagga

SEQ ID NO: 2948890 - DNA, 25 bp, Homo sapien
ggttctcaatggcacattacagcag

SEQ ID NO: 2948891 - DNA, 25 bp, Homo sapien
gaaacgattcagttctgtagactag

SEQ ID NO: 2948892 - DNA, 25 bp, Homo sapien
tttaaaatcatgtcgtaagtgacat

SEQ ID NO: 2948893 - DNA, 25 bp, Homo sapien
cagtgaaaatggtggaataaagaca

SEQ ID NO: 2948894 - DNA, 25 bp, Homo sapien
gacatccaaaaattcatcccttcat

SEQ ID NO: 2948895 - DNA, 25 bp, Homo sapien
agtgagccttcagagatttaaaatc

SEQ ID NO: 2948896 - DNA, 25 bp, Homo sapien
tctattcctgaactgggctggtaca

SEQ ID NO: 2948897 - DNA, 25 bp, Homo sapien
tgctctattcctgaactgggctggt

SEQ ID NO: 2948898 - DNA, 25 bp, Homo sapien
gctctattcctgaactgggctggta

SEQ ID NO: 2948899 - DNA, 25 bp, Homo sapien
tattcctgaactgggctggtacacc

SEQ ID NO: 2948900 - DNA, 25 bp, Homo sapien
tagtctatggtcaatgagacttttt

SEQ ID NO: 2948901 - DNA, 25 bp, Homo sapien
tttattagtctatggtcaatgagac

SEQ ID NO: 2948902 - DNA, 25 bp, Homo sapien
tagtttattagtctatggtcaatga

SEQ ID NO: 2948903 - DNA, 25 bp, Homo sapien
taaatagtttattagtctatggtca

SEQ ID NO: 2948904 - DNA, 25 bp, Homo sapien
tgtcatccccgtgcctggcatgatg

SEQ ID NO: 2948905 - DNA, 25 bp, Homo sapien
ccctgtcatccccgtgcctggcatg

SEQ ID NO: 2948906 - DNA, 25 bp, Homo sapien
tcatccccgtgcctggcatgatgtc

SEQ ID NO: 2948907 - DNA, 25 bp, Homo sapien
accatgccctgtcatccccgtgcct

SEQ ID NO: 2948908 - DNA, 25 bp, Homo sapien
tagaagataaaggatagaacgcggg

SEQ ID NO: 2948909 - DNA, 25 bp, Homo sapien
tatgggaactaccaaggtctctaga

SEQ ID NO: 2948910 - DNA, 25 bp, Homo sapien
gaaatcaccattagactccgtaaag

SEQ ID NO: 2948911 - DNA, 25 bp, Homo sapien
cgtaaagcactattcctatgggaac

SEQ ID NO: 2948912 - DNA, 25 bp, Homo sapien
cggatcttcaacagttgtcagagga

SEQ ID NO: 2948913 - DNA, 25 bp, Homo sapien
taatgctggcaatttaaagagatac

SEQ ID NO: 2948914 - DNA, 25 bp, Homo sapien
agatattttaatgctggcaatttaa

SEQ ID NO: 2948915 - DNA, 25 bp, Homo sapien
gagatacggatcttcaacagttgtc

SEQ ID NO: 2948916 - DNA, 25 bp, Homo sapien
taaatcatctcttgactcatgagag

SEQ ID NO: 2948917 - DNA, 25 bp, Homo sapien
tctgtacctaacaattcaattttgg

SEQ ID NO: 2948918 - DNA, 25 bp, Homo sapien
atatgagccccaataaaaaattctg

SEQ ID NO: 2948919 - DNA, 25 bp, Homo sapien
tctctattaaacaagccagctcaag

SEQ ID NO: 2948920 - DNA, 25 bp, Homo sapien
taagtgttgtaagtgggactagcgt

SEQ ID NO: 2948921 - DNA, 25 bp, Homo sapien
gtcatcatgagaatgttcttaagtg

SEQ ID NO: 2948922 - DNA, 25 bp, Homo sapien
taagtgggactagcgttgttcccat

SEQ ID NO: 2948923 - DNA, 25 bp, Homo sapien
tttccagttcaacagtcatcatgag

SEQ ID NO: 2948924 - DNA, 25 bp, Homo sapien
aggcaaaagtataggaacagaaatc

SEQ ID NO: 2948925 - DNA, 25 bp, Homo sapien
tacacttaaaaagcgtgaatgttac

SEQ ID NO: 2948926 - DNA, 25 bp, Homo sapien
aacacaagaggctatgtgctatatg

SEQ ID NO: 2948927 - DNA, 25 bp, Homo sapien
tatacctcaatgaacctgacttaag

SEQ ID NO: 2948928 - DNA, 25 bp, Homo sapien
gaaaatcttttagacgctggattag

SEQ ID NO: 2948929 - DNA, 25 bp, Homo sapien
gctaacttaaagctggtcaaaatta

SEQ ID NO: 2948930 - DNA, 25 bp, Homo sapien
tagacaacaggttcttaaagatttc

SEQ ID NO: 2948931 - DNA, 25 bp, Homo sapien
aaatgctaacttaaagctggtcaaa

SEQ ID NO: 2948932 - DNA, 25 bp, Homo sapien
acaggccatctgcggttacgaggca

SEQ ID NO: 2948933 - DNA, 25 bp, Homo sapien
tcaaacttagtattacaggccatct

SEQ ID NO: 2948934 - DNA, 25 bp, Homo sapien
ccatctgcggttacgaggcaggaag

SEQ ID NO: 2948935 - DNA, 25 bp, Homo sapien
aaacttagtattacaggccatctgc

SEQ ID NO: 2948936 - DNA, 25 bp, Homo sapien
gcactgttgcaatgcagcttgactg

SEQ ID NO: 2948937 - DNA, 25 bp, Homo sapien
ggcagcaggccatatggctaggtaa

SEQ ID NO: 2948938 - DNA, 25 bp, Homo sapien
tgtttttaaattggcagaggcagca

SEQ ID NO: 2948939 - DNA, 25 bp, Homo sapien
gacaatgtgtggtgtttgtcagaca

SEQ ID NO: 2948940 - DNA, 25 bp, Homo sapien
aaaccgtatctacatctgtcctata

SEQ ID NO: 2948941 - DNA, 25 bp, Homo sapien
attttgtaatagtaactgagaacct

SEQ ID NO: 2948942 - DNA, 25 bp, Homo sapien
tatcactgtgggcaaagcatcaagc

SEQ ID NO: 2948943 - DNA, 25 bp, Homo sapien
tgtcctataaggcagagagtacttg

SEQ ID NO: 2948944 - DNA, 25 bp, Homo sapien
aaagcaacttttgtcagatgcctac

SEQ ID NO: 2948945 - DNA, 25 bp, Homo sapien
cttgaggtcctaaaatgcagaaggg

SEQ ID NO: 2948946 - DNA, 25 bp, Homo sapien
cccatcacagaagatgcgacatgga

SEQ ID NO: 2948947 - DNA, 25 bp, Homo sapien
tctggataaacattacttgaggtcc

SEQ ID NO: 2948948 - DNA, 25 bp, Homo sapien
gctgaatgcaatgaaaggcggtcct

SEQ ID NO: 2948949 - DNA, 25 bp, Homo sapien
tgtgttcgtgctaccatcacagctg

SEQ ID NO: 2948950 - DNA, 25 bp, Homo sapien
ctgtgttcgtgctaccatcacagct

SEQ ID NO: 2948951 - DNA, 25 bp, Homo sapien
atcacagctgaatgcaatgaaaggc

SEQ ID NO: 2948952 - DNA, 25 bp, Homo sapien
tgcatcagtccatagctgtacaccc

SEQ ID NO: 2948953 - DNA, 25 bp, Homo sapien
tgggatgggatgcatcagtccatag

SEQ ID NO: 2948954 - DNA, 25 bp, Homo sapien
gatgggatgcatcagtccatagctg

SEQ ID NO: 2948955 - DNA, 25 bp, Homo sapien
ggatgcatcagtccatagctgtaca

SEQ ID NO: 2948956 - DNA, 25 bp, Homo sapien
ctgtttcctgtggttggcagtttaa

SEQ ID NO: 2948957 - DNA, 25 bp, Homo sapien
gctggaggtagaaggcgcgcccttg

SEQ ID NO: 2948958 - DNA, 25 bp, Homo sapien
ggcagtttaatgaacggtagtaaca

SEQ ID NO: 2948959 - DNA, 25 bp, Homo sapien
cctgtggttggcagtttaatgaacg

SEQ ID NO: 2948960 - DNA, 25 bp, Homo sapien
cgattggtttagacgtcttcgtatt

SEQ ID NO: 2948961 - DNA, 25 bp, Homo sapien
tggtttagacgtcttcgtatttgta

SEQ ID NO: 2948962 - DNA, 25 bp, Homo sapien
tacgattggtttagacgtcttcgta

SEQ ID NO: 2948963 - DNA, 25 bp, Homo sapien
attggtttagacgtcttcgtatttg

SEQ ID NO: 2948964 - DNA, 25 bp, Homo sapien
agcatcagtctactcagataacttt

SEQ ID NO: 2948965 - DNA, 25 bp, Homo sapien
gcatcagtctactcagataactttt

SEQ ID NO: 2948966 - DNA, 25 bp, Homo sapien
catcagtctactcagataacttttc

SEQ ID NO: 2948967 - DNA, 25 bp, Homo sapien
gagcatcagtctactcagataactt

SEQ ID NO: 2948968 - DNA, 25 bp, Homo sapien
gtgttttgtattattcttctctata

SEQ ID NO: 2948969 - DNA, 25 bp, Homo sapien
cttgcagttgtgtgttttgtattat

SEQ ID NO: 2948970 - DNA, 25 bp, Homo sapien
tcagagatggttccttctggcatgt

SEQ ID NO: 2948971 - DNA, 25 bp, Homo sapien
tctataaaatgttctgaaagagcag

SEQ ID NO: 2948972 - DNA, 25 bp, Homo sapien
gactgtagctgctgggttagctgaa

SEQ ID NO: 2948973 - DNA, 25 bp, Homo sapien
cacattgttgttggggataagggac

SEQ ID NO: 2948974 - DNA, 25 bp, Homo sapien
gagccttctcacattgttgttgggg

SEQ ID NO: 2948975 - DNA, 25 bp, Homo sapien
tgttggggataagggactgtagctg

SEQ ID NO: 2948976 - DNA, 25 bp, Homo sapien
aggtcacttgcacatgggccccaga

SEQ ID NO: 2948977 - DNA, 25 bp, Homo sapien
attctatcttggatgcctttacttc

SEQ ID NO: 2948978 - DNA, 25 bp, Homo sapien
ccgtatcccattctatcttggatgc

SEQ ID NO: 2948979 - DNA, 25 bp, Homo sapien
gggccccagagcagtccatcttcaa

SEQ ID NO: 2948980 - DNA, 25 bp, Homo sapien
tctcattaatgtagttctcaatctt

SEQ ID NO: 2948981 - DNA, 25 bp, Homo sapien
tgctctcattaatgtagttctcaat

SEQ ID NO: 2948982 - DNA, 25 bp, Homo sapien
tgtgctctcattaatgtagttctca

SEQ ID NO: 2948983 - DNA, 25 bp, Homo sapien
ctgtgctctcattaatgtagttctc

SEQ ID NO: 2948984 - DNA, 25 bp, Homo sapien
caggtgagtagctgacaggttcttt

SEQ ID NO: 2948985 - DNA, 25 bp, Homo sapien
gagagctaactattcaaaaccccag

SEQ ID NO: 2948986 - DNA, 25 bp, Homo sapien
aaaccccagtattccaggtgagtag

SEQ ID NO: 2948987 - DNA, 25 bp, Homo sapien
tgcaatcaccgttcactagactcga

SEQ ID NO: 2948988 - DNA, 25 bp, Homo sapien
gtcagtatagccatatcctggaact

SEQ ID NO: 2948989 - DNA, 25 bp, Homo sapien
tcagtatagccatatcctggaactt

SEQ ID NO: 2948990 - DNA, 25 bp, Homo sapien
catatcctggaacttcttttttgag

SEQ ID NO: 2948991 - DNA, 25 bp, Homo sapien
agccatatcctggaacttctttttt

SEQ ID NO: 2948992 - DNA, 25 bp, Homo sapien
aatcaaaatcgttagtattccagta

SEQ ID NO: 2948993 - DNA, 25 bp, Homo sapien
cacaatgaggcagaaaagtataatc

SEQ ID NO: 2948994 - DNA, 25 bp, Homo sapien
gttagtattccagtaacaattaatg

SEQ ID NO: 2948995 - DNA, 25 bp, Homo sapien
aaatcgttagtattccagtaacaat

SEQ ID NO: 2948996 - DNA, 25 bp, Homo sapien
aaagacaggactgcattctgaaaac

SEQ ID NO: 2948997 - DNA, 25 bp, Homo sapien
ccacacaaagacaggactgcattct

SEQ ID NO: 2948998 - DNA, 25 bp, Homo sapien
ggttttcagtttgtgagctctgaat

SEQ ID NO: 2948999 - DNA, 25 bp, Homo sapien
gactgcattctgaaaacctgaatta

SEQ ID NO: 2949000 - DNA, 25 bp, Homo sapien
taaatgactgaagaagtatgtcaag

SEQ ID NO: 2949001 - DNA, 25 bp, Homo sapien
tacacctcagccttaaatgactgaa

SEQ ID NO: 2949002 - DNA, 25 bp, Homo sapien
gaaatatacactgcaataaaagaac

SEQ ID NO: 2949003 - DNA, 25 bp, Homo sapien
acaaagcatacacctcagccttaaa

SEQ ID NO: 2949004 - DNA, 25 bp, Homo sapien
tcaaatacttttcccatgtaccacc

SEQ ID NO: 2949005 - DNA, 25 bp, Homo sapien
tacttttcccatgtaccaccaataa

SEQ ID NO: 2949006 - DNA, 25 bp, Homo sapien
cctcaaatacttttcccatgtacca

SEQ ID NO: 2949007 - DNA, 25 bp, Homo sapien
aatacttttcccatgtaccaccaat

SEQ ID NO: 2949008 - DNA, 25 bp, Homo sapien
tatttacttagcgacaggattgccc

SEQ ID NO: 2949009 - DNA, 25 bp, Homo sapien
atttgcttataaccaacacgcatcc

SEQ ID NO: 2949010 - DNA, 25 bp, Homo sapien
ggagtgcagtgtcatcctctgttac

SEQ ID NO: 2949011 - DNA, 25 bp, Homo sapien
caggattgccctctgttgcttacgc

SEQ ID NO: 2949012 - DNA, 25 bp, Homo sapien
tcttgtaatgaccttcggtgacaac

SEQ ID NO: 2949013 - DNA, 25 bp, Homo sapien
cttgtaatgaccttcggtgacaaca

SEQ ID NO: 2949014 - DNA, 25 bp, Homo sapien
ttcttgtaatgaccttcggtgacaa

SEQ ID NO: 2949015 - DNA, 25 bp, Homo sapien
tctcacacccggtggccttcccttc

SEQ ID NO: 2949016 - DNA, 25 bp, Homo sapien
gagacaagtgccctctcacacccgg

SEQ ID NO: 2949017 - DNA, 25 bp, Homo sapien
taccttccatcagccttgaaggaga

SEQ ID NO: 2949018 - DNA, 25 bp, Homo sapien
ggactcacatatcctaccttccatc

SEQ ID NO: 2949019 - DNA, 25 bp, Homo sapien
tgcagccgtttcccacgtatctgac

SEQ ID NO: 2949020 - DNA, 25 bp, Homo sapien
ccgtttcccacgtatctgacaatgt

SEQ ID NO: 2949021 - DNA, 25 bp, Homo sapien
gccgtttcccacgtatctgacaatg

SEQ ID NO: 2949022 - DNA, 25 bp, Homo sapien
cagccgtttcccacgtatctgacaa

SEQ ID NO: 2949023 - DNA, 25 bp, Homo sapien
cccttcgcgaagagcatcccctcca

SEQ ID NO: 2949024 - DNA, 25 bp, Homo sapien
cttcgcgaagagcatcccctccatg

SEQ ID NO: 2949025 - DNA, 25 bp, Homo sapien
ccttcgcgaagagcatcccctccat

SEQ ID NO: 2949026 - DNA, 25 bp, Homo sapien
ttcgcgaagagcatcccctccatgg

SEQ ID NO: 2949027 - DNA, 25 bp, Homo sapien
cacagcaatgaatcctccaatgtac

SEQ ID NO: 2949028 - DNA, 25 bp, Homo sapien
gcggctgtccaaatgaggaaagtcc

SEQ ID NO: 2949029 - DNA, 25 bp, Homo sapien
aaaccagagcggctgtccaaatgag

SEQ ID NO: 2949030 - DNA, 25 bp, Homo sapien
cagagcggctgtccaaatgaggaaa

SEQ ID NO: 2949031 - DNA, 25 bp, Homo sapien
atctttaaaccagagcggctgtcca

SEQ ID NO: 2949032 - DNA, 25 bp, Homo sapien
ctcctcctcctccgttggggcttcg

SEQ ID NO: 2949033 - DNA, 25 bp, Homo sapien
tatggcagggcttcactctcctcct

SEQ ID NO: 2949034 - DNA, 25 bp, Homo sapien
tcctcctccgttggggcttcgctgt

SEQ ID NO: 2949035 - DNA, 25 bp, Homo sapien
cctcctcctccgttggggcttcgct

SEQ ID NO: 2949036 - DNA, 25 bp, Homo sapien
gcctgaggtgggctgtgttctcctc

SEQ ID NO: 2949037 - DNA, 25 bp, Homo sapien
tctatgtatttttgcaggaggcctg

SEQ ID NO: 2949038 - DNA, 25 bp, Homo sapien
taactgttgttgtttattctatgta

SEQ ID NO: 2949039 - DNA, 25 bp, Homo sapien
gaggcctgaggtgggctgtgttctc

SEQ ID NO: 2949040 - DNA, 25 bp, Homo sapien
aatgtagtcacgtggaatttggaat

SEQ ID NO: 2949041 - DNA, 25 bp, Homo sapien
gaggtagaagtcatcctttcctccc

SEQ ID NO: 2949042 - DNA, 25 bp, Homo sapien
cagcggggtgctgccaataaaatgt

SEQ ID NO: 2949043 - DNA, 25 bp, Homo sapien
caggctctggtggtcagctggactc

SEQ ID NO: 2949044 - DNA, 25 bp, Homo sapien
gagctctcatgtcgtaagccagtgg

SEQ ID NO: 2949045 - DNA, 25 bp, Homo sapien
tcccacagggacctgatacaacagt

SEQ ID NO: 2949046 - DNA, 25 bp, Homo sapien
aagccagtggagaagtccagggcta

SEQ ID NO: 2949047 - DNA, 25 bp, Homo sapien
aaataaggagcatattgagctctca

SEQ ID NO: 2949048 - DNA, 25 bp, Homo sapien
ccttctctggtgcagccgctgcttc

SEQ ID NO: 2949049 - DNA, 25 bp, Homo sapien
cttcacccagagggccttctctggt

SEQ ID NO: 2949050 - DNA, 25 bp, Homo sapien
tcagcctccgcccaaaaggaacgga

SEQ ID NO: 2949051 - DNA, 25 bp, Homo sapien
ttcttcagcctccgcccaaaaggaa

SEQ ID NO: 2949052 - DNA, 25 bp, Homo sapien
ggaatggcctaaaatgctctcagta

SEQ ID NO: 2949053 - DNA, 25 bp, Homo sapien
caggttgtgcaaccctcaaagcagg

SEQ ID NO: 2949054 - DNA, 25 bp, Homo sapien
ctgtaaaagcagatccaggttgtgc

SEQ ID NO: 2949055 - DNA, 25 bp, Homo sapien
tagatagactattggccgtacctgc

SEQ ID NO: 2949056 - DNA, 25 bp, Homo sapien
gtggccaacctaaatttatatgtaa

SEQ ID NO: 2949057 - DNA, 25 bp, Homo sapien
gatgtgtgaacatggcctcaaactc

SEQ ID NO: 2949058 - DNA, 25 bp, Homo sapien
gccactgtggccaacctaaatttat

SEQ ID NO: 2949059 - DNA, 25 bp, Homo sapien
taaattttttgcctgggcgcagtgg

SEQ ID NO: 2949060 - DNA, 25 bp, Homo sapien
tgtgcccataaactataacttctgt

SEQ ID NO: 2949061 - DNA, 25 bp, Homo sapien
gaaaactgttgcctagacccattat

SEQ ID NO: 2949062 - DNA, 25 bp, Homo sapien
gatggtatcagcctaattcccctga

SEQ ID NO: 2949063 - DNA, 25 bp, Homo sapien
gcagccaccaggttgtcacattttt

SEQ ID NO: 2949064 - DNA, 25 bp, Homo sapien
gcctattcagtggaattgtatatta

SEQ ID NO: 2949065 - DNA, 25 bp, Homo sapien
tatcgatggactcttgagttgcttc

SEQ ID NO: 2949066 - DNA, 25 bp, Homo sapien
gcctttattctatcctctgtctatg

SEQ ID NO: 2949067 - DNA, 25 bp, Homo sapien
tgaagattcatgtccaagtatctgt

SEQ ID NO: 2949068 - DNA, 25 bp, Homo sapien
tctggtgctctgctctatttacact

SEQ ID NO: 2949069 - DNA, 25 bp, Homo sapien
ttctggtgctctgctctatttacac

SEQ ID NO: 2949070 - DNA, 25 bp, Homo sapien
ctgctgagagaaagggcaggtgcgt

SEQ ID NO: 2949071 - DNA, 25 bp, Homo sapien
gctgagagaaagggcaggtgcgtgg

SEQ ID NO: 2949072 - DNA, 25 bp, Homo sapien
tgctgagagaaagggcaggtgcgtg

SEQ ID NO: 2949073 - DNA, 25 bp, Homo sapien
gaagtcattcccatcggcggcttct

SEQ ID NO: 2949074 - DNA, 25 bp, Homo sapien
catgggtaaagatgtagactggctt

SEQ ID NO: 2949075 - DNA, 25 bp, Homo sapien
gctctgaagtacactgtgatagtct

SEQ ID NO: 2949076 - DNA, 25 bp, Homo sapien
ttttacactgtatggtggaagtgga

SEQ ID NO: 2949077 - DNA, 25 bp, Homo sapien
ctgggagactgagcgtgccaaaaag

SEQ ID NO: 2949078 - DNA, 25 bp, Homo sapien
cgtcgtgccgacgtttctccctaat

SEQ ID NO: 2949079 - DNA, 25 bp, Homo sapien
tccctaatgcacttttggcgcttgg

SEQ ID NO: 2949080 - DNA, 25 bp, Homo sapien
accacgcttgttcgcgcccttgacg

SEQ ID NO: 2949081 - DNA, 25 bp, Homo sapien
gcgcccttgacgtcgtgccgacgtt

SEQ ID NO: 2949082 - DNA, 25 bp, Homo sapien
ctgcgggccagaaactggagggcgg

SEQ ID NO: 2949083 - DNA, 25 bp, Homo sapien
ttcggaaagggattgggctccgctg

SEQ ID NO: 2949084 - DNA, 25 bp, Homo sapien
agggattgggctccgctgttccttc

SEQ ID NO: 2949085 - DNA, 25 bp, Homo sapien
gcgggccagaaactggagggcggcg

SEQ ID NO: 2949086 - DNA, 25 bp, Homo sapien
gctgaaatcctaaaggccgcggagt

SEQ ID NO: 2949087 - DNA, 25 bp, Homo sapien
tcaagacctggctggatctccactt

SEQ ID NO: 2949088 - DNA, 25 bp, Homo sapien
taccttgagtggcaacaggtgagtc

SEQ ID NO: 2949089 - DNA, 25 bp, Homo sapien
tcggcggtgttgtaggtagcggtac

SEQ ID NO: 2949090 - DNA, 25 bp, Homo sapien
aaacaggtaggaggtggtctagcac

SEQ ID NO: 2949091 - DNA, 25 bp, Homo sapien
gcttgtaactctccttaatcctgtg

SEQ ID NO: 2949092 - DNA, 25 bp, Homo sapien
tacacttgtgcaccctggataacag

SEQ ID NO: 2949093 - DNA, 25 bp, Homo sapien
tctagcacgtggagtgatgttcagt

SEQ ID NO: 2949094 - DNA, 25 bp, Homo sapien
ggcccgccatcttcgcggacacgtc

SEQ ID NO: 2949095 - DNA, 25 bp, Homo sapien
cggcccgccatcttcgcggacacgt

SEQ ID NO: 2949096 - DNA, 25 bp, Homo sapien
gaggcgcagcagacgcgtgtaacga

SEQ ID NO: 2949097 - DNA, 25 bp, Homo sapien
tgggttcctgaagatccttcctaca

SEQ ID NO: 2949098 - DNA, 25 bp, Homo sapien
gaccctgcggctgtgtggaggacga

SEQ ID NO: 2949099 - DNA, 25 bp, Homo sapien
ccttgccccgaatgcagcagaggtg

SEQ ID NO: 2949100 - DNA, 25 bp, Homo sapien
gatttgtagtactgcacatgagcta

SEQ ID NO: 2949101 - DNA, 25 bp, Homo sapien
tactgaatattctggcctgccctag

SEQ ID NO: 2949102 - DNA, 25 bp, Homo sapien
gctatccacaatttacagcttgagt

SEQ ID NO: 2949103 - DNA, 25 bp, Homo sapien
cattcaggaaatggactaccaaaca

SEQ ID NO: 2949104 - DNA, 25 bp, Homo sapien
ggtcagtggtctcaagaagggatac

SEQ ID NO: 2949105 - DNA, 25 bp, Homo sapien
cagactacagagtagctaagcagaa

SEQ ID NO: 2949106 - DNA, 25 bp, Homo sapien
gcagaattaattggctcactatata

SEQ ID NO: 2949107 - DNA, 25 bp, Homo sapien
taaacatgcatagatgtagacagaa

SEQ ID NO: 2949108 - DNA, 25 bp, Homo sapien
caagatatacaattcttggttgaca

SEQ ID NO: 2949109 - DNA, 25 bp, Homo sapien
ggtttgatggttacaacattgagtg

SEQ ID NO: 2949110 - DNA, 25 bp, Homo sapien
gaaaatattactccctgtcttatgg

SEQ ID NO: 2949111 - DNA, 25 bp, Homo sapien
tccactagtagggaaggtttgatgg

SEQ ID NO: 2949112 - DNA, 25 bp, Homo sapien
ttattcagagatctgcaccttggat

SEQ ID NO: 2949113 - DNA, 25 bp, Homo sapien
aagtctatagtattgtgttatggca

SEQ ID NO: 2949114 - DNA, 25 bp, Homo sapien
aatttctaacttgcccacattatga

SEQ ID NO: 2949115 - DNA, 25 bp, Homo sapien
gcagcctaagcaaactaagtcagtg

SEQ ID NO: 2949116 - DNA, 25 bp, Homo sapien
aatatctataatgtcccaggcactg

SEQ ID NO: 2949117 - DNA, 25 bp, Homo sapien
gagacacccgagaatattagaagat

SEQ ID NO: 2949118 - DNA, 25 bp, Homo sapien
gactataagtgctgggtcatgggca

SEQ ID NO: 2949119 - DNA, 25 bp, Homo sapien
ttctacaagtgaacacacccagggt

SEQ ID NO: 2949120 - DNA, 25 bp, Homo sapien
gcggtggctgaaaactataatctca

SEQ ID NO: 2949121 - DNA, 25 bp, Homo sapien
tgcaaaaatgggcaagaggcagcat

SEQ ID NO: 2949122 - DNA, 25 bp, Homo sapien
cagcatggtatggaggaacgaacac

SEQ ID NO: 2949123 - DNA, 25 bp, Homo sapien
aaaagtatgaccatcctagagggtg

SEQ ID NO: 2949124 - DNA, 25 bp, Homo sapien
aaacaactgactggataacgaaact

SEQ ID NO: 2949125 - DNA, 25 bp, Homo sapien
actatgggtgatttccagctttcca

SEQ ID NO: 2949126 - DNA, 25 bp, Homo sapien
tgcctgcttcagactacaagtgtga

SEQ ID NO: 2949127 - DNA, 25 bp, Homo sapien
cacgctcagccttaaagcattattt

SEQ ID NO: 2949128 - DNA, 25 bp, Homo sapien
ctgtggtgctctaggctttggtttc

SEQ ID NO: 2949129 - DNA, 25 bp, Homo sapien
tgtggtgctctaggctttggtttca

SEQ ID NO: 2949130 - DNA, 25 bp, Homo sapien
ctgtcacccttatgaatccactggt

SEQ ID NO: 2949131 - DNA, 25 bp, Homo sapien
tgaactgtcacccttatgaatccac

SEQ ID NO: 2949132 - DNA, 25 bp, Homo sapien
ccacgcgttgggtatggctgtcacc

SEQ ID NO: 2949133 - DNA, 25 bp, Homo sapien
agtggcctccagtggcccatctact

SEQ ID NO: 2949134 - DNA, 25 bp, Homo sapien
gataccgcagatcgccaacatcaca

SEQ ID NO: 2949135 - DNA, 25 bp, Homo sapien
atgtggaagccaggtcccacgcgtt

SEQ ID NO: 2949136 - DNA, 25 bp, Homo sapien
aaagataattcatctgtaggacatc

SEQ ID NO: 2949137 - DNA, 25 bp, Homo sapien
ctgtaggacatcttgccgcttgcat

SEQ ID NO: 2949138 - DNA, 25 bp, Homo sapien
caattggttaaagataattcatctg

SEQ ID NO: 2949139 - DNA, 25 bp, Homo sapien
atctgtaggacatcttgccgcttgc

SEQ ID NO: 2949140 - DNA, 25 bp, Homo sapien
gaacacatgttccttatatcaacta

SEQ ID NO: 2949141 - DNA, 25 bp, Homo sapien
gcctagctcactatctttttaaaca

SEQ ID NO: 2949142 - DNA, 25 bp, Homo sapien
cattttgagtaaccccaccatgagt

SEQ ID NO: 2949143 - DNA, 25 bp, Homo sapien
ggcatgccctaacatgcctagctca

SEQ ID NO: 2949144 - DNA, 25 bp, Homo sapien
gggagaggtcctcacaatcacatgc

SEQ ID NO: 2949145 - DNA, 25 bp, Homo sapien
tgtgattgggagaggtcctcacaat

SEQ ID NO: 2949146 - DNA, 25 bp, Homo sapien
gaaccaccgatggatgtgtcttcag

SEQ ID NO: 2949147 - DNA, 25 bp, Homo sapien
aactgaatgcaatgctccctggaac

SEQ ID NO: 2949148 - DNA, 25 bp, Homo sapien
cacagtggtacaagactgtagtctc

SEQ ID NO: 2949149 - DNA, 25 bp, Homo sapien
aggcacagtggtacaagactgtagt

SEQ ID NO: 2949150 - DNA, 25 bp, Homo sapien
ttttgagggcttcaagagatcttca

SEQ ID NO: 2949151 - DNA, 25 bp, Homo sapien
gaaactgtcacacctcaagctattg

SEQ ID NO: 2949152 - DNA, 25 bp, Homo sapien
tggagaaccctggaatatcccaaac

SEQ ID NO: 2949153 - DNA, 25 bp, Homo sapien
caaacgtgaaagtggtctggataat

SEQ ID NO: 2949154 - DNA, 25 bp, Homo sapien
tatttcttgcccaatagaaagccca

SEQ ID NO: 2949155 - DNA, 25 bp, Homo sapien
tttcttgcccaatagaaagcccagc

SEQ ID NO: 2949156 - DNA, 25 bp, Homo sapien
ttcttgcccaatagaaagcccagcc

SEQ ID NO: 2949157 - DNA, 25 bp, Homo sapien
ttgcccaatagaaagcccagcccat

SEQ ID NO: 2949158 - DNA, 25 bp, Homo sapien
gaatgtttaagatctgaccactagt

SEQ ID NO: 2949159 - DNA, 25 bp, Homo sapien
tagatgtaaccagtcttctgataca

SEQ ID NO: 2949160 - DNA, 25 bp, Homo sapien
taggaacagaggtaccataactatt

SEQ ID NO: 2949161 - DNA, 25 bp, Homo sapien
ttatcaggtggctaaaaaatatacc

SEQ ID NO: 2949162 - DNA, 25 bp, Homo sapien
tagagtaggctacccagaaaagttc

SEQ ID NO: 2949163 - DNA, 25 bp, Homo sapien
taagaaaattcctgttcaagccaca

SEQ ID NO: 2949164 - DNA, 25 bp, Homo sapien
cacatgtagataagggcaaggacga

SEQ ID NO: 2949165 - DNA, 25 bp, Homo sapien
cccaggagggcaacttgattacgcc

SEQ ID NO: 2949166 - DNA, 25 bp, Homo sapien
tacctgtagtgtttctagtaactaa

SEQ ID NO: 2949167 - DNA, 25 bp, Homo sapien
caggagtacaaaatacctgtagtgt

SEQ ID NO: 2949168 - DNA, 25 bp, Homo sapien
aataatagtcactagagattttctt

SEQ ID NO: 2949169 - DNA, 25 bp, Homo sapien
taaatgaatcataaactacttcacc

SEQ ID NO: 2949170 - DNA, 25 bp, Homo sapien
gcaggaaatcaatctcgatggtcat

SEQ ID NO: 2949171 - DNA, 25 bp, Homo sapien
gctgccatcttgtcggtgtcataag

SEQ ID NO: 2949172 - DNA, 25 bp, Homo sapien
cataagggttggagtcaatgctttt

SEQ ID NO: 2949173 - DNA, 25 bp, Homo sapien
gtcattgtgccaatacactgtttgg

SEQ ID NO: 2949174 - DNA, 25 bp, Homo sapien
ccaaatttgctgagggaaaagctgc

SEQ ID NO: 2949175 - DNA, 25 bp, Homo sapien
gatatatatgtccacagggttccca

SEQ ID NO: 2949176 - DNA, 25 bp, Homo sapien
tggatgacagggtaacacaccatct

SEQ ID NO: 2949177 - DNA, 25 bp, Homo sapien
caccttggatatacgagttgatacg

SEQ ID NO: 2949178 - DNA, 25 bp, Homo sapien
ttcaggatgctaggatccatggctt

SEQ ID NO: 2949179 - DNA, 25 bp, Homo sapien
tcccttcaggatgctaggatccatg

SEQ ID NO: 2949180 - DNA, 25 bp, Homo sapien
ccttcaccagtaagccaaaaagctt

SEQ ID NO: 2949181 - DNA, 25 bp, Homo sapien
cttcaccagtaagccaaaaagcttt

SEQ ID NO: 2949182 - DNA, 25 bp, Homo sapien
tctcataactttcttctacaattct

SEQ ID NO: 2949183 - DNA, 25 bp, Homo sapien
cagactatcatctgagctactttta

SEQ ID NO: 2949184 - DNA, 25 bp, Homo sapien
ccttccagactatcatctgagctac

SEQ ID NO: 2949185 - DNA, 25 bp, Homo sapien
aaccttccagactatcatctgagct

SEQ ID NO: 2949186 - DNA, 25 bp, Homo sapien
ataagattaagtgacgaattttctg

SEQ ID NO: 2949187 - DNA, 25 bp, Homo sapien
caataagattaagtgacgaattttc

SEQ ID NO: 2949188 - DNA, 25 bp, Homo sapien
aataagattaagtgacgaattttct

SEQ ID NO: 2949189 - DNA, 25 bp, Homo sapien
taagattaagtgacgaattttctgc

SEQ ID NO: 2949190 - DNA, 25 bp, Homo sapien
tgggatatcttaacaaaaggtacac

SEQ ID NO: 2949191 - DNA, 25 bp, Homo sapien
cttacactctactgccctcttgtgg

SEQ ID NO: 2949192 - DNA, 25 bp, Homo sapien
tgaattgttttcgaatgcctatcca

SEQ ID NO: 2949193 - DNA, 25 bp, Homo sapien
cctttggaaagcgatgaaaaatatt

SEQ ID NO: 2949194 - DNA, 25 bp, Homo sapien
gcaaatgctcgtcggaaaatatctg

SEQ ID NO: 2949195 - DNA, 25 bp, Homo sapien
caatctctggaggaaatactcggga

SEQ ID NO: 2949196 - DNA, 25 bp, Homo sapien
cagtcaggattgataattgattggc

SEQ ID NO: 2949197 - DNA, 25 bp, Homo sapien
attttttcaaagttccagtcaggat

SEQ ID NO: 2949198 - DNA, 25 bp, Homo sapien
caagaataacttacaacatttggaa

SEQ ID NO: 2949199 - DNA, 25 bp, Homo sapien
tgtcttgatcgaaaatacacattac

SEQ ID NO: 2949200 - DNA, 25 bp, Homo sapien
gaaacagaatcattagactcttcct

SEQ ID NO: 2949201 - DNA, 25 bp, Homo sapien
cctgcactagatctcagttctgaaa

SEQ ID NO: 2949202 - DNA, 25 bp, Homo sapien
cacaaatagcaaactagtatctgaa

SEQ ID NO: 2949203 - DNA, 25 bp, Homo sapien
tgcacaaatagcaaactagtatctg

SEQ ID NO: 2949204 - DNA, 25 bp, Homo sapien
gcacaaatagcaaactagtatctga

SEQ ID NO: 2949205 - DNA, 25 bp, Homo sapien
cgttgcgcgtagcttcaagtgcagg

SEQ ID NO: 2949206 - DNA, 25 bp, Homo sapien
ttacgcattatctacccaacgcata

SEQ ID NO: 2949207 - DNA, 25 bp, Homo sapien
aacgcatactgacgttgcgcgtagc

SEQ ID NO: 2949208 - DNA, 25 bp, Homo sapien
attatctacccaacgcatactgacg

SEQ ID NO: 2949209 - DNA, 25 bp, Homo sapien
gaaaggttccttatcttctcagcag

SEQ ID NO: 2949210 - DNA, 25 bp, Homo sapien
aaaatgggcttacagagggagacac

SEQ ID NO: 2949211 - DNA, 25 bp, Homo sapien
ggtagatgtgaacctattcccagga

SEQ ID NO: 2949212 - DNA, 25 bp, Homo sapien
cactaggtggcctgaacatctacac

SEQ ID NO: 2949213 - DNA, 25 bp, Homo sapien
ttcatgaaggcggaaggatgtacct

SEQ ID NO: 2949214 - DNA, 25 bp, Homo sapien
cacagaaaacttcatgaaggcggaa

SEQ ID NO: 2949215 - DNA, 25 bp, Homo sapien
ggcggaaggatgtacctgtttcctg

SEQ ID NO: 2949216 - DNA, 25 bp, Homo sapien
aggccttttaccctgcactctcctc

SEQ ID NO: 2949217 - DNA, 25 bp, Homo sapien
ggtgtgtgcctaggagccttcttac

SEQ ID NO: 2949218 - DNA, 25 bp, Homo sapien
gagacgctaacttaccatgacggga

SEQ ID NO: 2949219 - DNA, 25 bp, Homo sapien
cccaagatacactactaggttgaaa

SEQ ID NO: 2949220 - DNA, 25 bp, Homo sapien
atgccaaccttgttctggtgtgtgc

SEQ ID NO: 2949221 - DNA, 25 bp, Homo sapien
taaatttggtaaatgctacactaga

SEQ ID NO: 2949222 - DNA, 25 bp, Homo sapien
cataccttgacaggagcaactgaaa

SEQ ID NO: 2949223 - DNA, 25 bp, Homo sapien
caaagggtttaataatagcgagagg

SEQ ID NO: 2949224 - DNA, 25 bp, Homo sapien
cactagattattccttaggtctctg

SEQ ID NO: 2949225 - DNA, 25 bp, Homo sapien
tctaaaagctgaggagaggactagg

SEQ ID NO: 2949226 - DNA, 25 bp, Homo sapien
taaacatagatctaagagtccctct

SEQ ID NO: 2949227 - DNA, 25 bp, Homo sapien
ctaattcacgttccagaaaacagtg

SEQ ID NO: 2949228 - DNA, 25 bp, Homo sapien
aaaactagctggatgatatactcca

SEQ ID NO: 2949229 - DNA, 25 bp, Homo sapien
gggtccatataacaggatgccttta

SEQ ID NO: 2949230 - DNA, 25 bp, Homo sapien
tgggggtccatataacaggatgcct

SEQ ID NO: 2949231 - DNA, 25 bp, Homo sapien
catataacaggatgcctttaacatg

SEQ ID NO: 2949232 - DNA, 25 bp, Homo sapien
aacctgggggtccatataacaggat

SEQ ID NO: 2949233 - DNA, 25 bp, Homo sapien
tctggcccattgaccactttgggct

SEQ ID NO: 2949234 - DNA, 25 bp, Homo sapien
tctcttgcattcaacatcttgccaa

SEQ ID NO: 2949235 - DNA, 25 bp, Homo sapien
caaaaagtttgcgaatgttagcctc

SEQ ID NO: 2949236 - DNA, 25 bp, Homo sapien
atctgtcgagccaagagagtcttac

SEQ ID NO: 2949237 - DNA, 25 bp, Homo sapien
gaactggctaatatctcgagaggaa

SEQ ID NO: 2949238 - DNA, 25 bp, Homo sapien
tgagttatgttcatcaggtgtcccc

SEQ ID NO: 2949239 - DNA, 25 bp, Homo sapien
gaacagtgacccagtataccaggag

SEQ ID NO: 2949240 - DNA, 25 bp, Homo sapien
cagccccagtgagagtatgtctact

SEQ ID NO: 2949241 - DNA, 25 bp, Homo sapien
gtagccaaattaacacttccaatgg

SEQ ID NO: 2949242 - DNA, 25 bp, Homo sapien
tctctgagaactacgtgttaaatcc

SEQ ID NO: 2949243 - DNA, 25 bp, Homo sapien
tatagaggatgccaattctttgtag

SEQ ID NO: 2949244 - DNA, 25 bp, Homo sapien
ttctcccagtttgagacatttgtat

SEQ ID NO: 2949245 - DNA, 25 bp, Homo sapien
aggatgttgtttagctgctccatgc

SEQ ID NO: 2949246 - DNA, 25 bp, Homo sapien
ggatgttgtttagctgctccatgcc

SEQ ID NO: 2949247 - DNA, 25 bp, Homo sapien
ccattttaacttccagtcttccagg

SEQ ID NO: 2949248 - DNA, 25 bp, Homo sapien
atcagatctggtctattggtcattc

SEQ ID NO: 2949249 - DNA, 25 bp, Homo sapien
ttccaggtctaagaagagcctcatc

SEQ ID NO: 2949250 - DNA, 25 bp, Homo sapien
ctatctccattttaacttccagtct

SEQ ID NO: 2949251 - DNA, 25 bp, Homo sapien
taatgtctacatcagcagagagtaa

SEQ ID NO: 2949252 - DNA, 25 bp, Homo sapien
cctccaattcagcaccactgaaatt

SEQ ID NO: 2949253 - DNA, 25 bp, Homo sapien
ggtctccacggccagttctttaatg

SEQ ID NO: 2949254 - DNA, 25 bp, Homo sapien
tagtcggcctttctcatctggcaag

SEQ ID NO: 2949255 - DNA, 25 bp, Homo sapien
ctttatgtgtctattcatagcagtg

SEQ ID NO: 2949256 - DNA, 25 bp, Homo sapien
tgtctattcatagcagtggactggg

SEQ ID NO: 2949257 - DNA, 25 bp, Homo sapien
tattcatagcagtggactgggctgc

SEQ ID NO: 2949258 - DNA, 25 bp, Homo sapien
tatgtgtctattcatagcagtggac

SEQ ID NO: 2949259 - DNA, 25 bp, Homo sapien
gctaatcaatatagaagaggcagca

SEQ ID NO: 2949260 - DNA, 25 bp, Homo sapien
ctagcaaatatcaagtggtcaccct

SEQ ID NO: 2949261 - DNA, 25 bp, Homo sapien
gaggcagcatctttcagcttatacc

SEQ ID NO: 2949262 - DNA, 25 bp, Homo sapien
taacttagagctttgactcaggtgg

SEQ ID NO: 2949263 - DNA, 25 bp, Homo sapien
catttttccctatatgctttgacat

SEQ ID NO: 2949264 - DNA, 25 bp, Homo sapien
tcatctataacttctatacttttaa

SEQ ID NO: 2949265 - DNA, 25 bp, Homo sapien
tcatttttccctatatgctttgaca

SEQ ID NO: 2949266 - DNA, 25 bp, Homo sapien
ctcatttttccctatatgctttgac

SEQ ID NO: 2949267 - DNA, 25 bp, Homo sapien
ggtttgatatcattctccaaagaag

SEQ ID NO: 2949268 - DNA, 25 bp, Homo sapien
ttaaataagatatcatggcataagt

SEQ ID NO: 2949269 - DNA, 25 bp, Homo sapien
gaacttgggtttgtcaggccaggaa

SEQ ID NO: 2949270 - DNA, 25 bp, Homo sapien
tctgggaaaaagacaccgctaagac

SEQ ID NO: 2949271 - DNA, 25 bp, Homo sapien
taggtagagctgttagatgaacacc

SEQ ID NO: 2949272 - DNA, 25 bp, Homo sapien
aaaccatggccaatccactacctgt

SEQ ID NO: 2949273 - DNA, 25 bp, Homo sapien
ggtcaaataatcaagaggacaaaac

SEQ ID NO: 2949274 - DNA, 25 bp, Homo sapien
cattttaacactagtcaaaaacagt

SEQ ID NO: 2949275 - DNA, 25 bp, Homo sapien
gtgattatcttgacttaaccttctg

SEQ ID NO: 2949276 - DNA, 25 bp, Homo sapien
catgtctggccaaataatggttttt

SEQ ID NO: 2949277 - DNA, 25 bp, Homo sapien
agtcattgatattttggccgggcgc

SEQ ID NO: 2949278 - DNA, 25 bp, Homo sapien
ctacaatgtggagtttatggcggac

SEQ ID NO: 2949279 - DNA, 25 bp, Homo sapien
gacagcacaggcagttggaaatata

SEQ ID NO: 2949280 - DNA, 25 bp, Homo sapien
gggaccagctctatcacctatacat

SEQ ID NO: 2949281 - DNA, 25 bp, Homo sapien
aaatgatgccaagtaactgtttcat

SEQ ID NO: 2949282 - DNA, 25 bp, Homo sapien
aaaatgatgccaagtaactgtttca

SEQ ID NO: 2949283 - DNA, 25 bp, Homo sapien
aatgatgccaagtaactgtttcatc

SEQ ID NO: 2949284 - DNA, 25 bp, Homo sapien
tgatgccaagtaactgtttcatcat

SEQ ID NO: 2949285 - DNA, 25 bp, Homo sapien
acattgccacagttcttgctggtga

SEQ ID NO: 2949286 - DNA, 25 bp, Homo sapien
attgccacagttcttgctggtgacc

SEQ ID NO: 2949287 - DNA, 25 bp, Homo sapien
cttggataacattgccacagttctt

SEQ ID NO: 2949288 - DNA, 25 bp, Homo sapien
tggataacattgccacagttcttgc

SEQ ID NO: 2949289 - DNA, 25 bp, Homo sapien
tcggaacatctaggaaacttcagaa

SEQ ID NO: 2949290 - DNA, 25 bp, Homo sapien
ctgtaacatgagtcacagtggagac

SEQ ID NO: 2949291 - DNA, 25 bp, Homo sapien
ccacgcctggcaatgaagactaatt

SEQ ID NO: 2949292 - DNA, 25 bp, Homo sapien
taaacgttgagtgctaccacggaga

SEQ ID NO: 2949293 - DNA, 25 bp, Homo sapien
ggagctgtttcaggcaagggcctga

SEQ ID NO: 2949294 - DNA, 25 bp, Homo sapien
cctgatgtgcaactgccttatgtct

SEQ ID NO: 2949295 - DNA, 25 bp, Homo sapien
tcaggcaagggcctgatgtgcaact

SEQ ID NO: 2949296 - DNA, 25 bp, Homo sapien
tgtttcaggcaagggcctgatgtgc

SEQ ID NO: 2949297 - DNA, 25 bp, Homo sapien
tgtaaatgaattgctaggtgcaacc

SEQ ID NO: 2949298 - DNA, 25 bp, Homo sapien
ccgaggatgttaattaggcttcaaa

SEQ ID NO: 2949299 - DNA, 25 bp, Homo sapien
taaactccagtcattcaagctaaca

SEQ ID NO: 2949300 - DNA, 25 bp, Homo sapien
gaggtgttctatggcttcaaaatca

SEQ ID NO: 2949301 - DNA, 25 bp, Homo sapien
gcctgagggccatgaatactagaaa

SEQ ID NO: 2949302 - DNA, 25 bp, Homo sapien
atgaaagcctactcccctccattag

SEQ ID NO: 2949303 - DNA, 25 bp, Homo sapien
caacgtcagttatcaattgagtacc

SEQ ID NO: 2949304 - DNA, 25 bp, Homo sapien
ctcttgttccactgaagcccttcta

SEQ ID NO: 2949305 - DNA, 25 bp, Homo sapien
taaggctacactcctatggacccca

SEQ ID NO: 2949306 - DNA, 25 bp, Homo sapien
caccctcctatgcatcaagggctgg

SEQ ID NO: 2949307 - DNA, 25 bp, Homo sapien
ggcacatatctcacatcacccagag

SEQ ID NO: 2949308 - DNA, 25 bp, Homo sapien
tcacccagagatttaattcatcagt

SEQ ID NO: 2949309 - DNA, 25 bp, Homo sapien
atcattgctacatgttggttaaaaa

SEQ ID NO: 2949310 - DNA, 25 bp, Homo sapien
gagtgatcattgctacatgttggtt

SEQ ID NO: 2949311 - DNA, 25 bp, Homo sapien
tgagtgatcattgctacatgttggt

SEQ ID NO: 2949312 - DNA, 25 bp, Homo sapien
taggaatgacaacggtcttaaatcc

SEQ ID NO: 2949313 - DNA, 25 bp, Homo sapien
caatagcaatctgggctatcttccc

SEQ ID NO: 2949314 - DNA, 25 bp, Homo sapien
cataggaatgacaacggtcttaaat

SEQ ID NO: 2949315 - DNA, 25 bp, Homo sapien
tcaatagcaatctgggctatcttcc

SEQ ID NO: 2949316 - DNA, 25 bp, Homo sapien
gaagtacttcaacgacgattaagaa

SEQ ID NO: 2949317 - DNA, 25 bp, Homo sapien
tgaagtacttcaacgacgattaaga

SEQ ID NO: 2949318 - DNA, 25 bp, Homo sapien
actgaagtacttcaacgacgattaa

SEQ ID NO: 2949319 - DNA, 25 bp, Homo sapien
agtacttcaacgacgattaagaaag

SEQ ID NO: 2949320 - DNA, 25 bp, Homo sapien
ccaggtttcctttgggcacaggcta

SEQ ID NO: 2949321 - DNA, 25 bp, Homo sapien
ggatacctttgcatactagggaggg

SEQ ID NO: 2949322 - DNA, 25 bp, Homo sapien
gactcaaatccatgtgtccagggct

SEQ ID NO: 2949323 - DNA, 25 bp, Homo sapien
tgttcagggactcgttaaacaccag

SEQ ID NO: 2949324 - DNA, 25 bp, Homo sapien
taatggtagcaacccacaatgagac

SEQ ID NO: 2949325 - DNA, 25 bp, Homo sapien
ataaagttagcaaggatgaattcag

SEQ ID NO: 2949326 - DNA, 25 bp, Homo sapien
tcttcatcatacacttcgatttttg

SEQ ID NO: 2949327 - DNA, 25 bp, Homo sapien
acttcctgcatataatggtagcaac

SEQ ID NO: 2949328 - DNA, 25 bp, Homo sapien
tcttcccatctgacatctacaatct

SEQ ID NO: 2949329 - DNA, 25 bp, Homo sapien
tctcttcactgggtctgtactccat

SEQ ID NO: 2949330 - DNA, 25 bp, Homo sapien
tgtactccatagctattttaccact

SEQ ID NO: 2949331 - DNA, 25 bp, Homo sapien
tgacatctacaatctcttcactggg

SEQ ID NO: 2949332 - DNA, 25 bp, Homo sapien
catgtgccaccatttctccatgttg

SEQ ID NO: 2949333 - DNA, 25 bp, Homo sapien
tgttacctttgagtttttatctcca

SEQ ID NO: 2949334 - DNA, 25 bp, Homo sapien
ggcatgtgccaccatttctccatgt

SEQ ID NO: 2949335 - DNA, 25 bp, Homo sapien
ctgtgcccggccctgttacctttga

SEQ ID NO: 2949336 - DNA, 25 bp, Homo sapien
tcaccagggcactcttatgtcacaa

SEQ ID NO: 2949337 - DNA, 25 bp, Homo sapien
gggcactcttatgtcacaatcccgc

SEQ ID NO: 2949338 - DNA, 25 bp, Homo sapien
atgtcaccagggcactcttatgtca

SEQ ID NO: 2949339 - DNA, 25 bp, Homo sapien
gcccaagcacgccttcccatcctgc

SEQ ID NO: 2949340 - DNA, 25 bp, Homo sapien
attctggcagctccgagacgctcgt

SEQ ID NO: 2949341 - DNA, 25 bp, Homo sapien
cattctggcagctccgagacgctcg

SEQ ID NO: 2949342 - DNA, 25 bp, Homo sapien
ttctggcagctccgagacgctcgtg

SEQ ID NO: 2949343 - DNA, 25 bp, Homo sapien
tctggcagctccgagacgctcgtgc

SEQ ID NO: 2949344 - DNA, 25 bp, Homo sapien
gagagtaggcgcatggggagattcc

SEQ ID NO: 2949345 - DNA, 25 bp, Homo sapien
gctgggagagtaggcgcatggggag

SEQ ID NO: 2949346 - DNA, 25 bp, Homo sapien
ctgctgggagagtaggcgcatgggg

SEQ ID NO: 2949347 - DNA, 25 bp, Homo sapien
gggagagtaggcgcatggggagatt

SEQ ID NO: 2949348 - DNA, 25 bp, Homo sapien
cccaggtgatcaaagtcccacgggt

SEQ ID NO: 2949349 - DNA, 25 bp, Homo sapien
agggccccaggtgatcaaagtccca

SEQ ID NO: 2949350 - DNA, 25 bp, Homo sapien
gccccaggtgatcaaagtcccacgg

SEQ ID NO: 2949351 - DNA, 25 bp, Homo sapien
gggccccaggtgatcaaagtcccac

SEQ ID NO: 2949352 - DNA, 25 bp, Homo sapien
acggtgtatctgtactggaatattc

SEQ ID NO: 2949353 - DNA, 25 bp, Homo sapien
ctcagcttgtcctttaaatcctgct

SEQ ID NO: 2949354 - DNA, 25 bp, Homo sapien
gaaggtccaacttgctcagagggcc

SEQ ID NO: 2949355 - DNA, 25 bp, Homo sapien
ttccaataatctcagcaaggctcca

SEQ ID NO: 2949356 - DNA, 25 bp, Homo sapien
cctcatgattcggtagagttagact

SEQ ID NO: 2949357 - DNA, 25 bp, Homo sapien
ctgctgcattgaagaaggttcttcc

SEQ ID NO: 2949358 - DNA, 25 bp, Homo sapien
gctgcattgaagaaggttcttcctc

SEQ ID NO: 2949359 - DNA, 25 bp, Homo sapien
tcggtagagttagactctccataga

SEQ ID NO: 2949360 - DNA, 25 bp, Homo sapien
acttcatgatgttctggaggctgac

SEQ ID NO: 2949361 - DNA, 25 bp, Homo sapien
gacctggaggtgaaactgtgacttc

SEQ ID NO: 2949362 - DNA, 25 bp, Homo sapien
aaatgatgagtttgatggtgacctg

SEQ ID NO: 2949363 - DNA, 25 bp, Homo sapien
ctaaatgatgagtttgatggtgacc

SEQ ID NO: 2949364 - DNA, 25 bp, Homo sapien
gatgctttggagaaactatagtcct

SEQ ID NO: 2949365 - DNA, 25 bp, Homo sapien
ggatgctttggagaaactatagtcc

SEQ ID NO: 2949366 - DNA, 25 bp, Homo sapien
tggagaaactatagtcctcttcggg

SEQ ID NO: 2949367 - DNA, 25 bp, Homo sapien
cacagaggacaattgaggaaaagtg

SEQ ID NO: 2949368 - DNA, 25 bp, Homo sapien
gctgccatgtcaggcaggacacaga

SEQ ID NO: 2949369 - DNA, 25 bp, Homo sapien
aggacacagaggacaattgaggaaa

SEQ ID NO: 2949370 - DNA, 25 bp, Homo sapien
gacacagaggacaattgaggaaaag

SEQ ID NO: 2949371 - DNA, 25 bp, Homo sapien
ttctcggtccaactgtatgctttcc

SEQ ID NO: 2949372 - DNA, 25 bp, Homo sapien
ccatacatttccatcaatgtaagaa

SEQ ID NO: 2949373 - DNA, 25 bp, Homo sapien
ctcggtccaactgtatgctttccat

SEQ ID NO: 2949374 - DNA, 25 bp, Homo sapien
agtttctcggtccaactgtatgctt

SEQ ID NO: 2949375 - DNA, 25 bp, Homo sapien
tctagatcacaaaatcccttttaga

SEQ ID NO: 2949376 - DNA, 25 bp, Homo sapien
tatttcatgcctcctctctagatca

SEQ ID NO: 2949377 - DNA, 25 bp, Homo sapien
tgcaagtgaagccattcaacctttt

SEQ ID NO: 2949378 - DNA, 25 bp, Homo sapien
ttattatgaaagccccacatggaac

SEQ ID NO: 2949379 - DNA, 25 bp, Homo sapien
aatactggagggatagcaggccttc

SEQ ID NO: 2949380 - DNA, 25 bp, Homo sapien
ggccttcaaatgaatccttgtgtaa

SEQ ID NO: 2949381 - DNA, 25 bp, Homo sapien
gtgtaattcagtcaagttattttct

SEQ ID NO: 2949382 - DNA, 25 bp, Homo sapien
actggagggatagcaggccttcaaa

SEQ ID NO: 2949383 - DNA, 25 bp, Homo sapien
gatggtgtaacgttgtctggctgat

SEQ ID NO: 2949384 - DNA, 25 bp, Homo sapien
tggtgtaacgttgtctggctgatgt

SEQ ID NO: 2949385 - DNA, 25 bp, Homo sapien
ctggatggtgtaacgttgtctggct

SEQ ID NO: 2949386 - DNA, 25 bp, Homo sapien
ggtgtaacgttgtctggctgatgtc

SEQ ID NO: 2949387 - DNA, 25 bp, Homo sapien
caaatgtatgtctttcaatagactg

SEQ ID NO: 2949388 - DNA, 25 bp, Homo sapien
cttcaaaaatggtagtggttcaaat

SEQ ID NO: 2949389 - DNA, 25 bp, Homo sapien
gtagtggttcaaatgtatgtctttc

SEQ ID NO: 2949390 - DNA, 25 bp, Homo sapien
tcaatagactgtattttattgcagg

SEQ ID NO: 2949391 - DNA, 25 bp, Homo sapien
agctgagttctgtaattacattgca

SEQ ID NO: 2949392 - DNA, 25 bp, Homo sapien
gctgagttctgtaattacattgcaa

SEQ ID NO: 2949393 - DNA, 25 bp, Homo sapien
ctgagttctgtaattacattgcaac

SEQ ID NO: 2949394 - DNA, 25 bp, Homo sapien
tcccggccaccagatttttatgagg

SEQ ID NO: 2949395 - DNA, 25 bp, Homo sapien
catttgtattgatgctacctaaacc

SEQ ID NO: 2949396 - DNA, 25 bp, Homo sapien
gagggactcccagttgtataaagtg

SEQ ID NO: 2949397 - DNA, 25 bp, Homo sapien
tcttggtggagggacctaatgagcc

SEQ ID NO: 2949398 - DNA, 25 bp, Homo sapien
gcctctccgaatcagagaagaagct

SEQ ID NO: 2949399 - DNA, 25 bp, Homo sapien
taccaaaacatgatgacaataccct

SEQ ID NO: 2949400 - DNA, 25 bp, Homo sapien
taccgctatgtaaaggaagctgatg

SEQ ID NO: 2949401 - DNA, 25 bp, Homo sapien
tgccaggattccagtacataccaaa

SEQ ID NO: 2949402 - DNA, 25 bp, Homo sapien
gagttgctaggtgtgacaatctcaa

SEQ ID NO: 2949403 - DNA, 25 bp, Homo sapien
gagaagacagcttgttacacaggtg

SEQ ID NO: 2949404 - DNA, 25 bp, Homo sapien
agcatttaccataggccaagcactg

SEQ ID NO: 2949405 - DNA, 25 bp, Homo sapien
cccaaaggacagactcgagttgttc

SEQ ID NO: 2949406 - DNA, 25 bp, Homo sapien
gacctggaatctggcagacctgggt

SEQ ID NO: 2949407 - DNA, 25 bp, Homo sapien
tgacttgagtaatgaacatgagcct

SEQ ID NO: 2949408 - DNA, 25 bp, Homo sapien
ggaataaatgaaagagcacgtgtct

SEQ ID NO: 2949409 - DNA, 25 bp, Homo sapien
gcctttctgggtagcgtttacagca

SEQ ID NO: 2949410 - DNA, 25 bp, Homo sapien
gcaacgttgtgagtggttgcaccac

SEQ ID NO: 2949411 - DNA, 25 bp, Homo sapien
aggtggaggctgcaacgttgtgagt

SEQ ID NO: 2949412 - DNA, 25 bp, Homo sapien
taaaaactgagagactttgttgcta

SEQ ID NO: 2949413 - DNA, 25 bp, Homo sapien
ctttgttgctagaagacctgcccta

SEQ ID NO: 2949414 - DNA, 25 bp, Homo sapien
taattgagattgttgactctgagga

SEQ ID NO: 2949415 - DNA, 25 bp, Homo sapien
ggttctcaatggcacattacagcag

SEQ ID NO: 2949416 - DNA, 25 bp, Homo sapien
tataggtggggtcttgcgaagttac

SEQ ID NO: 2949417 - DNA, 25 bp, Homo sapien
gaaacgattcagttctgtagactag

SEQ ID NO: 2949418 - DNA, 25 bp, Homo sapien
tcatgtcgtaagtgacatcagtgaa

SEQ ID NO: 2949419 - DNA, 25 bp, Homo sapien
tggaataaagacatgcaggctgggc

SEQ ID NO: 2949420 - DNA, 25 bp, Homo sapien
tcagtgaaaatggtggaataaagac

SEQ ID NO: 2949421 - DNA, 25 bp, Homo sapien
agtgagccttcagagatttaaaatc

SEQ ID NO: 2949422 - DNA, 25 bp, Homo sapien
tctattcctgaactgggctggtaca

SEQ ID NO: 2949423 - DNA, 25 bp, Homo sapien
gctctattcctgaactgggctggta

SEQ ID NO: 2949424 - DNA, 25 bp, Homo sapien
tgctctattcctgaactgggctggt

SEQ ID NO: 2949425 - DNA, 25 bp, Homo sapien
tattcctgaactgggctggtacacc

SEQ ID NO: 2949426 - DNA, 25 bp, Homo sapien
ccctgtcatccccgtgcctggcatg

SEQ ID NO: 2949427 - DNA, 25 bp, Homo sapien
tgtcatccccgtgcctggcatgatg

SEQ ID NO: 2949428 - DNA, 25 bp, Homo sapien
tcatccccgtgcctggcatgatgtc

SEQ ID NO: 2949429 - DNA, 25 bp, Homo sapien
accatgccctgtcatccccgtgcct

SEQ ID NO: 2949430 - DNA, 25 bp, Homo sapien
cggatcttcaacagttgtcagagga

SEQ ID NO: 2949431 - DNA, 25 bp, Homo sapien
taatgctggcaatttaaagagatac

SEQ ID NO: 2949432 - DNA, 25 bp, Homo sapien
agatattttaatgctggcaatttaa

SEQ ID NO: 2949433 - DNA, 25 bp, Homo sapien
gagatacggatcttcaacagttgtc

SEQ ID NO: 2949434 - DNA, 25 bp, Homo sapien
taagtgttgtaagtgggactagcgt

SEQ ID NO: 2949435 - DNA, 25 bp, Homo sapien
tttccagttcaacagtcatcatgag

SEQ ID NO: 2949436 - DNA, 25 bp, Homo sapien
gtcatcatgagaatgttcttaagtg

SEQ ID NO: 2949437 - DNA, 25 bp, Homo sapien
taagtgggactagcgttgttcccat

SEQ ID NO: 2949438 - DNA, 25 bp, Homo sapien
tatatatcctgcaaagaaggccagg

SEQ ID NO: 2949439 - DNA, 25 bp, Homo sapien
ggctggtggcacaattgaagttgca

SEQ ID NO: 2949440 - DNA, 25 bp, Homo sapien
tcaaccagccctagcataactgagt

SEQ ID NO: 2949441 - DNA, 25 bp, Homo sapien
tagggccccgcaggcatacatatac

SEQ ID NO: 2949442 - DNA, 25 bp, Homo sapien
tcatatggaatggacccggaaccgt

SEQ ID NO: 2949443 - DNA, 25 bp, Homo sapien
gacttcagtgtgcagcccctaagaa

SEQ ID NO: 2949444 - DNA, 25 bp, Homo sapien
tttgggcaaaagaggtgaccgagac

SEQ ID NO: 2949445 - DNA, 25 bp, Homo sapien
cattgtctactatgcggtccgtata

SEQ ID NO: 2949446 - DNA, 25 bp, Homo sapien
tgcccaactgaagggtaagcatggc

SEQ ID NO: 2949447 - DNA, 25 bp, Homo sapien
tatgcctagaataaagatggttggg

SEQ ID NO: 2949448 - DNA, 25 bp, Homo sapien
catggcagtgagtatggtatgccta

SEQ ID NO: 2949449 - DNA, 25 bp, Homo sapien
gcttagtttaacctggattgcggag

SEQ ID NO: 2949450 - DNA, 25 bp, Homo sapien
gcactgttgcaatgcagcttgactg

SEQ ID NO: 2949451 - DNA, 25 bp, Homo sapien
ggcagcaggccatatggctaggtaa

SEQ ID NO: 2949452 - DNA, 25 bp, Homo sapien
tgtttttaaattggcagaggcagca

SEQ ID NO: 2949453 - DNA, 25 bp, Homo sapien
gacaatgtgtggtgtttgtcagaca

SEQ ID NO: 2949454 - DNA, 25 bp, Homo sapien
aaaccgtatctacatctgtcctata

SEQ ID NO: 2949455 - DNA, 25 bp, Homo sapien
attttgtaatagtaactgagaacct

SEQ ID NO: 2949456 - DNA, 25 bp, Homo sapien
tgtcctataaggcagagagtacttg

SEQ ID NO: 2949457 - DNA, 25 bp, Homo sapien
tatcactgtgggcaaagcatcaagc

SEQ ID NO: 2949458 - DNA, 25 bp, Homo sapien
aaagcaacttttgtcagatgcctac

SEQ ID NO: 2949459 - DNA, 25 bp, Homo sapien
cttgaggtcctaaaatgcagaaggg

SEQ ID NO: 2949460 - DNA, 25 bp, Homo sapien
cccatcacagaagatgcgacatgga

SEQ ID NO: 2949461 - DNA, 25 bp, Homo sapien
tctggataaacattacttgaggtcc

SEQ ID NO: 2949462 - DNA, 25 bp, Homo sapien
gctgaatgcaatgaaaggcggtcct

SEQ ID NO: 2949463 - DNA, 25 bp, Homo sapien
ctgtgttcgtgctaccatcacagct

SEQ ID NO: 2949464 - DNA, 25 bp, Homo sapien
tgtgttcgtgctaccatcacagctg

SEQ ID NO: 2949465 - DNA, 25 bp, Homo sapien
atcacagctgaatgcaatgaaaggc

SEQ ID NO: 2949466 - DNA, 25 bp, Homo sapien
tgcatcagtccatagctgtacaccc

SEQ ID NO: 2949467 - DNA, 25 bp, Homo sapien
gatgggatgcatcagtccatagctg

SEQ ID NO: 2949468 - DNA, 25 bp, Homo sapien
ggatgcatcagtccatagctgtaca

SEQ ID NO: 2949469 - DNA, 25 bp, Homo sapien
tgggatgggatgcatcagtccatag

SEQ ID NO: 2949470 - DNA, 25 bp, Homo sapien
caatcagctcagtgcttgtgtagtt

SEQ ID NO: 2949471 - DNA, 25 bp, Homo sapien
tgagggctcctctggctcaacaatc

SEQ ID NO: 2949472 - DNA, 25 bp, Homo sapien
ggctcaacaatcagctcagtgcttg

SEQ ID NO: 2949473 - DNA, 25 bp, Homo sapien
cagtgcttgtgtagttcttccgggc

SEQ ID NO: 2949474 - DNA, 25 bp, Homo sapien
cctgtggttggcagtttaatgaacg

SEQ ID NO: 2949475 - DNA, 25 bp, Homo sapien
ctgtttcctgtggttggcagtttaa

SEQ ID NO: 2949476 - DNA, 25 bp, Homo sapien
ggcagtttaatgaacggtagtaaca

SEQ ID NO: 2949477 - DNA, 25 bp, Homo sapien
gctggaggtagaaggcgcgcccttg

SEQ ID NO: 2949478 - DNA, 25 bp, Homo sapien
cgattggtttagacgtcttcgtatt

SEQ ID NO: 2949479 - DNA, 25 bp, Homo sapien
tggtttagacgtcttcgtatttgta

SEQ ID NO: 2949480 - DNA, 25 bp, Homo sapien
tacgattggtttagacgtcttcgta

SEQ ID NO: 2949481 - DNA, 25 bp, Homo sapien
attggtttagacgtcttcgtatttg

SEQ ID NO: 2949482 - DNA, 25 bp, Homo sapien
agcatcagtctactcagataacttt

SEQ ID NO: 2949483 - DNA, 25 bp, Homo sapien
gcatcagtctactcagataactttt

SEQ ID NO: 2949484 - DNA, 25 bp, Homo sapien
catcagtctactcagataacttttc

SEQ ID NO: 2949485 - DNA, 25 bp, Homo sapien
gagcatcagtctactcagataactt

SEQ ID NO: 2949486 - DNA, 25 bp, Homo sapien
tcagagatggttccttctggcatgt

SEQ ID NO: 2949487 - DNA, 25 bp, Homo sapien
ggagcagatacttccagaaaagggt

SEQ ID NO: 2949488 - DNA, 25 bp, Homo sapien
cctaaggatgaaaaagccccttgtg

SEQ ID NO: 2949489 - DNA, 25 bp, Homo sapien
cttgcagttgtgtgttttgtattat

SEQ ID NO: 2949490 - DNA, 25 bp, Homo sapien
ccgtatcccattctatcttggatgc

SEQ ID NO: 2949491 - DNA, 25 bp, Homo sapien
tccggataacatgagcaatgagcct

SEQ ID NO: 2949492 - DNA, 25 bp, Homo sapien
gcaatgagccttctcacattgttgt

SEQ ID NO: 2949493 - DNA, 25 bp, Homo sapien
gggccccagagcagtccatcttcaa

SEQ ID NO: 2949494 - DNA, 25 bp, Homo sapien
tctcattaatgtagttctcaatctt

SEQ ID NO: 2949495 - DNA, 25 bp, Homo sapien
tgctctcattaatgtagttctcaat

SEQ ID NO: 2949496 - DNA, 25 bp, Homo sapien
tgtgctctcattaatgtagttctca

SEQ ID NO: 2949497 - DNA, 25 bp, Homo sapien
ctgtgctctcattaatgtagttctc

SEQ ID NO: 2949498 - DNA, 25 bp, Homo sapien
caggtgagtagctgacaggttcttt

SEQ ID NO: 2949499 - DNA, 25 bp, Homo sapien
gagagctaactattcaaaaccccag

SEQ ID NO: 2949500 - DNA, 25 bp, Homo sapien
aaaccccagtattccaggtgagtag

SEQ ID NO: 2949501 - DNA, 25 bp, Homo sapien
tgcaatcaccgttcactagactcga

SEQ ID NO: 2949502 - DNA, 25 bp, Homo sapien
cacaatgaggcagaaaagtataatc

SEQ ID NO: 2949503 - DNA, 25 bp, Homo sapien
aaatcgttagtattccagtaacaat

SEQ ID NO: 2949504 - DNA, 25 bp, Homo sapien
aatgccaagatgagtttgtcagtat

SEQ ID NO: 2949505 - DNA, 25 bp, Homo sapien
gagtttgtcagtatagccatatcct

SEQ ID NO: 2949506 - DNA, 25 bp, Homo sapien
aaagacaggactgcattctgaaaac

SEQ ID NO: 2949507 - DNA, 25 bp, Homo sapien
ccacacaaagacaggactgcattct

SEQ ID NO: 2949508 - DNA, 25 bp, Homo sapien
ggttttcagtttgtgagctctgaat

SEQ ID NO: 2949509 - DNA, 25 bp, Homo sapien
gactgcattctgaaaacctgaatta

SEQ ID NO: 2949510 - DNA, 25 bp, Homo sapien
gaatattcagggaaggtgtcaagaa

SEQ ID NO: 2949511 - DNA, 25 bp, Homo sapien
tgaggcaagtaaggttggactggtg

SEQ ID NO: 2949512 - DNA, 25 bp, Homo sapien
atgaacttgagttggcttttgagag

SEQ ID NO: 2949513 - DNA, 25 bp, Homo sapien
tggactggtggcatagcgtcaaggt

SEQ ID NO: 2949514 - DNA, 25 bp, Homo sapien
tcaaatacttttcccatgtaccacc

SEQ ID NO: 2949515 - DNA, 25 bp, Homo sapien
tacttttcccatgtaccaccaataa

SEQ ID NO: 2949516 - DNA, 25 bp, Homo sapien
cctcaaatacttttcccatgtacca

SEQ ID NO: 2949517 - DNA, 25 bp, Homo sapien
aatacttttcccatgtaccaccaat

SEQ ID NO: 2949518 - DNA, 25 bp, Homo sapien
atgttacagtgagctaggtcacacc

SEQ ID NO: 2949519 - DNA, 25 bp, Homo sapien
agctaggtcacaccattgctctcca

SEQ ID NO: 2949520 - DNA, 25 bp, Homo sapien
tgagctaggtcacaccattgctctc

SEQ ID NO: 2949521 - DNA, 25 bp, Homo sapien
agtttgatgttacagtgagctaggt

SEQ ID NO: 2949522 - DNA, 25 bp, Homo sapien
gggctgactgtatctaacttagggt

SEQ ID NO: 2949523 - DNA, 25 bp, Homo sapien
actgtatctaacttagggtcttgca

SEQ ID NO: 2949524 - DNA, 25 bp, Homo sapien
gagggctgactgtatctaacttagg

SEQ ID NO: 2949525 - DNA, 25 bp, Homo sapien
gctgactgtatctaacttagggtct

SEQ ID NO: 2949526 - DNA, 25 bp, Homo sapien
atttgcttataaccaacacgcatcc

SEQ ID NO: 2949527 - DNA, 25 bp, Homo sapien
tatttacttagcgacaggattgccc

SEQ ID NO: 2949528 - DNA, 25 bp, Homo sapien
ggagtgcagtgtcatcctctgttac

SEQ ID NO: 2949529 - DNA, 25 bp, Homo sapien
caggattgccctctgttgcttacgc

SEQ ID NO: 2949530 - DNA, 25 bp, Homo sapien
tcttgtaatgaccttcggtgacaac

SEQ ID NO: 2949531 - DNA, 25 bp, Homo sapien
cttgtaatgaccttcggtgacaaca

SEQ ID NO: 2949532 - DNA, 25 bp, Homo sapien
ttcttgtaatgaccttcggtgacaa

SEQ ID NO: 2949533 - DNA, 25 bp, Homo sapien
tactatctaaggtctccgtagttaa

SEQ ID NO: 2949534 - DNA, 25 bp, Homo sapien
tgaccatggggtaagtaagacactc

SEQ ID NO: 2949535 - DNA, 25 bp, Homo sapien
ataaaaggacaaactactatctaag

SEQ ID NO: 2949536 - DNA, 25 bp, Homo sapien
ttgagacagtttggctcattcccca

SEQ ID NO: 2949537 - DNA, 25 bp, Homo sapien
gccgtttcccacgtatctcacaatg

SEQ ID NO: 2949538 - DNA, 25 bp, Homo sapien
ccacaatatactggggggactttgt

SEQ ID NO: 2949539 - DNA, 25 bp, Homo sapien
tacttctctggtcttattaggacta

SEQ ID NO: 2949540 - DNA, 25 bp, Homo sapien
atgagtatctcagtccataatcaca

SEQ ID NO: 2949541 - DNA, 25 bp, Homo sapien
cttcgcgaagagcatcccctccatg

SEQ ID NO: 2949542 - DNA, 25 bp, Homo sapien
ccttcgcgaagagcatcccctccat

SEQ ID NO: 2949543 - DNA, 25 bp, Homo sapien
ttcgcgaagagcatcccctccatgg

SEQ ID NO: 2949544 - DNA, 25 bp, Homo sapien
cccttcgcgaagagcatcccctcca

SEQ ID NO: 2949545 - DNA, 25 bp, Homo sapien
cacagcaatgaatcctccaatgtac

SEQ ID NO: 2949546 - DNA, 25 bp, Homo sapien
atctttaaaccagagcggctgtcca

SEQ ID NO: 2949547 - DNA, 25 bp, Homo sapien
gcggctgtccaaatgaggaaagtcc

SEQ ID NO: 2949548 - DNA, 25 bp, Homo sapien
aaaccagagcggctgtccaaatgag

SEQ ID NO: 2949549 - DNA, 25 bp, Homo sapien
cagagcggctgtccaaatgaggaaa

SEQ ID NO: 2949550 - DNA, 25 bp, Homo sapien
aaggagcaattaagcttctcacccc

SEQ ID NO: 2949551 - DNA, 25 bp, Homo sapien
ctgggataagaataacaatgccaag

SEQ ID NO: 2949552 - DNA, 25 bp, Homo sapien
cttgaaaggagcaattaagcttctc

SEQ ID NO: 2949553 - DNA, 25 bp, Homo sapien
attcttgaaaggagcaattaagctt

SEQ ID NO: 2949554 - DNA, 25 bp, Homo sapien
tcctcctccgttggggcttcgctgt

SEQ ID NO: 2949555 - DNA, 25 bp, Homo sapien
ctcctcctcctccgttggggcttcg

SEQ ID NO: 2949556 - DNA, 25 bp, Homo sapien
tatggcagggcttcactctcctcct

SEQ ID NO: 2949557 - DNA, 25 bp, Homo sapien
cctcctcctccgttggggcttcgct

SEQ ID NO: 2949558 - DNA, 25 bp, Homo sapien
tctatgtatttttgcaggaggcctg

SEQ ID NO: 2949559 - DNA, 25 bp, Homo sapien
aactgttgttgtttattctatgtat

SEQ ID NO: 2949560 - DNA, 25 bp, Homo sapien
ttagtaactgttgttgtttattcta

SEQ ID NO: 2949561 - DNA, 25 bp, Homo sapien
agtaactgttgttgtttattctatg

SEQ ID NO: 2949562 - DNA, 25 bp, Homo sapien
aaatgctttgtttctctggcaggct

SEQ ID NO: 2949563 - DNA, 25 bp, Homo sapien
ttaaaaaatgctttgtttctctggc

SEQ ID NO: 2949564 - DNA, 25 bp, Homo sapien
aaaaaatgctttgtttctctggcag

SEQ ID NO: 2949565 - DNA, 25 bp, Homo sapien
tgctttgtttctctggcaggcttca

SEQ ID NO: 2949566 - DNA, 25 bp, Homo sapien
catatgcacgttcgttatatagcta

SEQ ID NO: 2949567 - DNA, 25 bp, Homo sapien
atgcacgttcgttatatagctaaac

SEQ ID NO: 2949568 - DNA, 25 bp, Homo sapien
tatgcacgttcgttatatagctaaa

SEQ ID NO: 2949569 - DNA, 25 bp, Homo sapien
tacatatgcacgttcgttatatagc

SEQ ID NO: 2949570 - DNA, 25 bp, Homo sapien
gatgtggaggtgtgatgcagagtgg

SEQ ID NO: 2949571 - DNA, 25 bp, Homo sapien
gggcaccaggacactccaagtgtaa

SEQ ID NO: 2949572 - DNA, 25 bp, Homo sapien
ggtggctgctcgtgacactcatttc

SEQ ID NO: 2949573 - DNA, 25 bp, Homo sapien
ccaagtgtaagtggggctctccagc

SEQ ID NO: 2949574 - DNA, 25 bp, Homo sapien
ggaatggcctaaaatgctctcagta

SEQ ID NO: 2949575 - DNA, 25 bp, Homo sapien
caggttgtgcaaccctcaaagcagg

SEQ ID NO: 2949576 - DNA, 25 bp, Homo sapien
ctgtaaaagcagatccaggttgtgc

SEQ ID NO: 2949577 - DNA, 25 bp, Homo sapien
tagatagactattggccgtacctgc

SEQ ID NO: 2949578 - DNA, 25 bp, Homo sapien
aggtccctttgggtggcagtagata

SEQ ID NO: 2949579 - DNA, 25 bp, Homo sapien
gaggtccctttgggtggcagtagat

SEQ ID NO: 2949580 - DNA, 25 bp, Homo sapien
ggtccctttgggtggcagtagatac

SEQ ID NO: 2949581 - DNA, 25 bp, Homo sapien
gtggccaacctaaatttatatgtaa

SEQ ID NO: 2949582 - DNA, 25 bp, Homo sapien
gatgtgtgaacatggcctcaaactc

SEQ ID NO: 2949583 - DNA, 25 bp, Homo sapien
gccactgtggccaacctaaatttat

SEQ ID NO: 2949584 - DNA, 25 bp, Homo sapien
taaattttttgcctgggcgcagtgg

SEQ ID NO: 2949585 - DNA, 25 bp, Homo sapien
atatagtttgtagaagagaggctgg

SEQ ID NO: 2949586 - DNA, 25 bp, Homo sapien
gccgtgagtggtcttggatgcagcc

SEQ ID NO: 2949587 - DNA, 25 bp, Homo sapien
agctgctggaagaatggacgtgccg

SEQ ID NO: 2949588 - DNA, 25 bp, Homo sapien
aatatagtttgtagaagagaggctg

SEQ ID NO: 2949589 - DNA, 25 bp, Homo sapien
ttaagtacattcaccgtgttttaca

SEQ ID NO: 2949590 - DNA, 25 bp, Homo sapien
tacattcaccgtgttttacaaccat

SEQ ID NO: 2949591 - DNA, 25 bp, Homo sapien
cacccctcattagcctttattctat

SEQ ID NO: 2949592 - DNA, 25 bp, Homo sapien
tatccattagcaataactgcccatt

SEQ ID NO: 2949593 - DNA, 25 bp, Homo sapien
tgaactggttgtttattctagagac

SEQ ID NO: 2949594 - DNA, 25 bp, Homo sapien
ccatctaacttgcttggctatctgt

SEQ ID NO: 2949595 - DNA, 25 bp, Homo sapien
ttcctatcctaacacagaagttcgg

SEQ ID NO: 2949596 - DNA, 25 bp, Homo sapien
ggttgattactttattatagtgcca

SEQ ID NO: 2949597 - DNA, 25 bp, Homo sapien
accacgcttgttcgcgcccttgacg

SEQ ID NO: 2949598 - DNA, 25 bp, Homo sapien
cgtcgtgccgacgtttctccctaat

SEQ ID NO: 2949599 - DNA, 25 bp, Homo sapien
ctgggagactgagcgtgccaaaaag

SEQ ID NO: 2949600 - DNA, 25 bp, Homo sapien
tccctaatgcacttttggcgcttgg

SEQ ID NO: 2949601 - DNA, 25 bp, Homo sapien
gctgaaatcctaaaggccgcggagt

SEQ ID NO: 2949602 - DNA, 25 bp, Homo sapien
tcaagacctggctggatctccactt

SEQ ID NO: 2949603 - DNA, 25 bp, Homo sapien
taccttgagtggcaacaggtgagtc

SEQ ID NO: 2949604 - DNA, 25 bp, Homo sapien
aaagggattgggctccgctgttcct

SEQ ID NO: 2949605 - DNA, 25 bp, Homo sapien
gcaaaacgatcttatgagtctagcg

SEQ ID NO: 2949606 - DNA, 25 bp, Homo sapien
gtcaagaagtgaagggcgaagtcat

SEQ ID NO: 2949607 - DNA, 25 bp, Homo sapien
gcgaagtcatgagacagggagacca

SEQ ID NO: 2949608 - DNA, 25 bp, Homo sapien
gagtctagcgtcagaaattcttact

SEQ ID NO: 2949609 - DNA, 25 bp, Homo sapien
ggctgcagctctgcgctcggcaaag

SEQ ID NO: 2949610 - DNA, 25 bp, Homo sapien
tgcgctcggcaaagcccgcccccgc

SEQ ID NO: 2949611 - DNA, 25 bp, Homo sapien
cggctgcagctctgcgctcggcaaa

SEQ ID NO: 2949612 - DNA, 25 bp, Homo sapien
ctctgcgctcggcaaagcccgcccc

SEQ ID NO: 2949613 - DNA, 25 bp, Homo sapien
tgggttcctgaagatccttcctaca

SEQ ID NO: 2949614 - DNA, 25 bp, Homo sapien
gaccctgcggctgtgtggaggacga

SEQ ID NO: 2949615 - DNA, 25 bp, Homo sapien
ccttgccccgaatgcagcagaggtg

SEQ ID NO: 2949616 - DNA, 25 bp, Homo sapien
gaggcgcagcagacgcgtgtaacga

SEQ ID NO: 2949617 - DNA, 25 bp, Homo sapien
gatttgtagtactgcacatgagcta

SEQ ID NO: 2949618 - DNA, 25 bp, Homo sapien
tactgaatattctggcctgccctag

SEQ ID NO: 2949619 - DNA, 25 bp, Homo sapien
gctatccacaatttacagcttgagt

SEQ ID NO: 2949620 - DNA, 25 bp, Homo sapien
cattcaggaaatggactaccaaaca

SEQ ID NO: 2949621 - DNA, 25 bp, Homo sapien
ttgtcatgcttgaaatctcttaaag

SEQ ID NO: 2949622 - DNA, 25 bp, Homo sapien
taaacctcagtggtaatcacatgga

SEQ ID NO: 2949623 - DNA, 25 bp, Homo sapien
catggatatatgttattcactgtgc

SEQ ID NO: 2949624 - DNA, 25 bp, Homo sapien
aaatacttagggcttccagaaatgg

SEQ ID NO: 2949625 - DNA, 25 bp, Homo sapien
ggtcagtggtctcaagaagggatac

SEQ ID NO: 2949626 - DNA, 25 bp, Homo sapien
cagactacagagtagctaagcagaa

SEQ ID NO: 2949627 - DNA, 25 bp, Homo sapien
gcagaattaattggctcactatata

SEQ ID NO: 2949628 - DNA, 25 bp, Homo sapien
taaacatgcatagatgtagacagaa

SEQ ID NO: 2949629 - DNA, 25 bp, Homo sapien
gaaaatattactccctgtcttatgg

SEQ ID NO: 2949630 - DNA, 25 bp, Homo sapien
caagatatacaattcttggttgaca

SEQ ID NO: 2949631 - DNA, 25 bp, Homo sapien
ggtttgatggttacaacattgagtg

SEQ ID NO: 2949632 - DNA, 25 bp, Homo sapien
tccactagtagggaaggtttgatgg

SEQ ID NO: 2949633 - DNA, 25 bp, Homo sapien
aaattgttgatactacttttagtca

SEQ ID NO: 2949634 - DNA, 25 bp, Homo sapien
tacttatctaaattgttgatactac

SEQ ID NO: 2949635 - DNA, 25 bp, Homo sapien
taaggccacactatacttatctaaa

SEQ ID NO: 2949636 - DNA, 25 bp, Homo sapien
atccgtaaggccacactatacttat

SEQ ID NO: 2949637 - DNA, 25 bp, Homo sapien
ccaactcataaggttgtgctgagaa

SEQ ID NO: 2949638 - DNA, 25 bp, Homo sapien
taattcccaacatcctgacaaagct

SEQ ID NO: 2949639 - DNA, 25 bp, Homo sapien
gattatccatagctagcatatagga

SEQ ID NO: 2949640 - DNA, 25 bp, Homo sapien
cacctagaaccaccaatagagtgtt

SEQ ID NO: 2949641 - DNA, 25 bp, Homo sapien
tcaagactgttgtggcaaatatggc

SEQ ID NO: 2949642 - DNA, 25 bp, Homo sapien
gtagataaatctgggtagcactgtc

SEQ ID NO: 2949643 - DNA, 25 bp, Homo sapien
ttccaagccatgaacacaggacgtc

SEQ ID NO: 2949644 - DNA, 25 bp, Homo sapien
gttaatgatcttggcgccctggtca

SEQ ID NO: 2949645 - DNA, 25 bp, Homo sapien
catttaaaatgtatacttgggtggt

SEQ ID NO: 2949646 - DNA, 25 bp, Homo sapien
tgtaacctcaaattcacaggctcaa

SEQ ID NO: 2949647 - DNA, 25 bp, Homo sapien
tgagagacagggtcatgctctatca

SEQ ID NO: 2949648 - DNA, 25 bp, Homo sapien
cacgcccagctgatatatttcacat

SEQ ID NO: 2949649 - DNA, 25 bp, Homo sapien
actatgggtgatttccagctttcca

SEQ ID NO: 2949650 - DNA, 25 bp, Homo sapien
tgcctgcttcagactacaagtgtga

SEQ ID NO: 2949651 - DNA, 25 bp, Homo sapien
aaacaactgactggataacgaaact

SEQ ID NO: 2949652 - DNA, 25 bp, Homo sapien
cacgctcagccttaaagcattattt

SEQ ID NO: 2949653 - DNA, 25 bp, Homo sapien
ctgtggtgctctaggctttggtttc

SEQ ID NO: 2949654 - DNA, 25 bp, Homo sapien
tgaactgtcacccttatgaatccac

SEQ ID NO: 2949655 - DNA, 25 bp, Homo sapien
ctgtcacccttatgaatccactggt

SEQ ID NO: 2949656 - DNA, 25 bp, Homo sapien
tgtggtgctctaggctttggtttca

SEQ ID NO: 2949657 - DNA, 25 bp, Homo sapien
agtggcctccagtggcccatctact

SEQ ID NO: 2949658 - DNA, 25 bp, Homo sapien
ccacgcgttgggtatggctgtcacc

SEQ ID NO: 2949659 - DNA, 25 bp, Homo sapien
gataccgcagatcgccaacatcaca

SEQ ID NO: 2949660 - DNA, 25 bp, Homo sapien
atgtggaagccaggtcccacgcgtt

SEQ ID NO: 2949661 - DNA, 25 bp, Homo sapien
aaagataattcatctgtaggacatc

SEQ ID NO: 2949662 - DNA, 25 bp, Homo sapien
ctgtaggacatcttgccgcttgcat

SEQ ID NO: 2949663 - DNA, 25 bp, Homo sapien
caattggttaaagataattcatctg

SEQ ID NO: 2949664 - DNA, 25 bp, Homo sapien
atctgtaggacatcttgccgcttgc

SEQ ID NO: 2949665 - DNA, 25 bp, Homo sapien
gcctagctcactatctttttaaaca

SEQ ID NO: 2949666 - DNA, 25 bp, Homo sapien
cattttgagtaaccccaccatgagt

SEQ ID NO: 2949667 - DNA, 25 bp, Homo sapien
gaacacatgttccttatatcaacta

SEQ ID NO: 2949668 - DNA, 25 bp, Homo sapien
ggcatgccctaacatgcctagctca

SEQ ID NO: 2949669 - DNA, 25 bp, Homo sapien
gaaccaccgatggatgtgtcttcag

SEQ ID NO: 2949670 - DNA, 25 bp, Homo sapien
gggagaggtcctcacaatcacatgc

SEQ ID NO: 2949671 - DNA, 25 bp, Homo sapien
tgtgattgggagaggtcctcacaat

SEQ ID NO: 2949672 - DNA, 25 bp, Homo sapien
aactgaatgcaatgctccctggaac

SEQ ID NO: 2949673 - DNA, 25 bp, Homo sapien
ttttgagggcttcaagagatcttca

SEQ ID NO: 2949674 - DNA, 25 bp, Homo sapien
gaaactgtcacacctcaagctattg

SEQ ID NO: 2949675 - DNA, 25 bp, Homo sapien
tggagaaccctggaatatcccaaac

SEQ ID NO: 2949676 - DNA, 25 bp, Homo sapien
caaacgtgaaagtggtctggataat

SEQ ID NO: 2949677 - DNA, 25 bp, Homo sapien
ttgcccaatagaaagcccagcccat

SEQ ID NO: 2949678 - DNA, 25 bp, Homo sapien
tatttcttgcccaatagaaagccca

SEQ ID NO: 2949679 - DNA, 25 bp, Homo sapien
tttcttgcccaatagaaagcccagc

SEQ ID NO: 2949680 - DNA, 25 bp, Homo sapien
ttcttgcccaatagaaagcccagcc

SEQ ID NO: 2949681 - DNA, 25 bp, Homo sapien
taggaacagaggtaccataactatt

SEQ ID NO: 2949682 - DNA, 25 bp, Homo sapien
tagatgtaaccagtcttctgataca

SEQ ID NO: 2949683 - DNA, 25 bp, Homo sapien
gaatgtttaagatctgaccactagt

SEQ ID NO: 2949684 - DNA, 25 bp, Homo sapien
ttatcaggtggctaaaaaatatacc

SEQ ID NO: 2949685 - DNA, 25 bp, Homo sapien
tagagtaggctacccagaaaagttc

SEQ ID NO: 2949686 - DNA, 25 bp, Homo sapien
taagaaaattcctgttcaagccaca

SEQ ID NO: 2949687 - DNA, 25 bp, Homo sapien
cacatgtagataagggcaaggacga

SEQ ID NO: 2949688 - DNA, 25 bp, Homo sapien
cccaggagggcaacttgattacgcc

SEQ ID NO: 2949689 - DNA, 25 bp, Homo sapien
tacctgtagtgtttctagtaactaa

SEQ ID NO: 2949690 - DNA, 25 bp, Homo sapien
caggagtacaaaatacctgtagtgt

SEQ ID NO: 2949691 - DNA, 25 bp, Homo sapien
aataatagtcactagagattttctt

SEQ ID NO: 2949692 - DNA, 25 bp, Homo sapien
taaatgaatcataaactacttcacc

SEQ ID NO: 2949693 - DNA, 25 bp, Homo sapien
gctgccatcttgtcggtgtcataag

SEQ ID NO: 2949694 - DNA, 25 bp, Homo sapien
cataagggttggagtcaatgctttt

SEQ ID NO: 2949695 - DNA, 25 bp, Homo sapien
gcaggaaatcaatctcgatggtcat

SEQ ID NO: 2949696 - DNA, 25 bp, Homo sapien
gtcattgtgccaatacactgtttgg

SEQ ID NO: 2949697 - DNA, 25 bp, Homo sapien
ccaaatttgctgagggaaaagctgc

SEQ ID NO: 2949698 - DNA, 25 bp, Homo sapien
gatatatatgtccacagggttccca

SEQ ID NO: 2949699 - DNA, 25 bp, Homo sapien
tggatgacagggtaacacaccatct

SEQ ID NO: 2949700 - DNA, 25 bp, Homo sapien
caccttggatatacgagttgatacg

SEQ ID NO: 2949701 - DNA, 25 bp, Homo sapien
ttcaggatgctaggatccatggctt

SEQ ID NO: 2949702 - DNA, 25 bp, Homo sapien
tcccttcaggatgctaggatccatg

SEQ ID NO: 2949703 - DNA, 25 bp, Homo sapien
cttcaccagtaagccaaaaagcttt

SEQ ID NO: 2949704 - DNA, 25 bp, Homo sapien
ccttcaccagtaagccaaaaagctt

SEQ ID NO: 2949705 - DNA, 25 bp, Homo sapien
caataagattaagtgacgaattttc

SEQ ID NO: 2949706 - DNA, 25 bp, Homo sapien
gtttccaacaaccagtcctacttca

SEQ ID NO: 2949707 - DNA, 25 bp, Homo sapien
taagattaagtgacgaattttctgc

SEQ ID NO: 2949708 - DNA, 25 bp, Homo sapien
ataagattaagtgacgaattttctg

SEQ ID NO: 2949709 - DNA, 25 bp, Homo sapien
gcaaatgctcgtcggaaaatatctg

SEQ ID NO: 2949710 - DNA, 25 bp, Homo sapien
caatctctggaggaaatactcggga

SEQ ID NO: 2949711 - DNA, 25 bp, Homo sapien
cagtcaggattgataattgattggc

SEQ ID NO: 2949712 - DNA, 25 bp, Homo sapien
attttttcaaagttccagtcaggat

SEQ ID NO: 2949713 - DNA, 25 bp, Homo sapien
caagaataacttacaacatttggaa

SEQ ID NO: 2949714 - DNA, 25 bp, Homo sapien
tgtcttgatcgaaaatacacattac

SEQ ID NO: 2949715 - DNA, 25 bp, Homo sapien
gaaacagaatcattagactcttcct

SEQ ID NO: 2949716 - DNA, 25 bp, Homo sapien
cctgcactagatctcagttctgaaa

SEQ ID NO: 2949717 - DNA, 25 bp, Homo sapien
tgcacaaatagcaaactagtatctg

SEQ ID NO: 2949718 - DNA, 25 bp, Homo sapien
cacaaatagcaaactagtatctgaa

SEQ ID NO: 2949719 - DNA, 25 bp, Homo sapien
gcacaaatagcaaactagtatctga

SEQ ID NO: 2949720 - DNA, 25 bp, Homo sapien
ttacgcattatctacccaacgcata

SEQ ID NO: 2949721 - DNA, 25 bp, Homo sapien
aacgcatactgacgttgcgcgtagc

SEQ ID NO: 2949722 - DNA, 25 bp, Homo sapien
attatctacccaacgcatactgacg

SEQ ID NO: 2949723 - DNA, 25 bp, Homo sapien
cgttgcgcgtagcttcaagtgcagg

SEQ ID NO: 2949724 - DNA, 25 bp, Homo sapien
aaaatgggcttacagagggagacac

SEQ ID NO: 2949725 - DNA, 25 bp, Homo sapien
cactaggtggcctgaacatctacac

SEQ ID NO: 2949726 - DNA, 25 bp, Homo sapien
ggtagatgtgaacctattcccagga

SEQ ID NO: 2949727 - DNA, 25 bp, Homo sapien
gaaaggttccttatcttctcagcag

SEQ ID NO: 2949728 - DNA, 25 bp, Homo sapien
aggccttttaccctgcactctcctc

SEQ ID NO: 2949729 - DNA, 25 bp, Homo sapien
ttcatgaaggcggaaggatgtacct

SEQ ID NO: 2949730 - DNA, 25 bp, Homo sapien
cacagaaaacttcatgaaggcggaa

SEQ ID NO: 2949731 - DNA, 25 bp, Homo sapien
ggcggaaggatgtacctgtttcctg

SEQ ID NO: 2949732 - DNA, 25 bp, Homo sapien
gaaagagacgtctagtaacacagga

SEQ ID NO: 2949733 - DNA, 25 bp, Homo sapien
cctggagccattacgacttataaga

SEQ ID NO: 2949734 - DNA, 25 bp, Homo sapien
aattggctccctcagtagtcacaga

SEQ ID NO: 2949735 - DNA, 25 bp, Homo sapien
tcacccatggtcatactgcaatagc

SEQ ID NO: 2949736 - DNA, 25 bp, Homo sapien
cactagattattccttaggtctctg

SEQ ID NO: 2949737 - DNA, 25 bp, Homo sapien
taaatttggtaaatgctacactaga

SEQ ID NO: 2949738 - DNA, 25 bp, Homo sapien
caaagggtttaataatagcgagagg

SEQ ID NO: 2949739 - DNA, 25 bp, Homo sapien
cataccttgacaggagcaactgaaa

SEQ ID NO: 2949740 - DNA, 25 bp, Homo sapien
ctgtcgagccaagagagtcttacca

SEQ ID NO: 2949741 - DNA, 25 bp, Homo sapien
caagagagtcttaccacaacctggg

SEQ ID NO: 2949742 - DNA, 25 bp, Homo sapien
catataacaggatgcctttaacatg

SEQ ID NO: 2949743 - DNA, 25 bp, Homo sapien
aacctgggggtccatataacaggat

SEQ ID NO: 2949744 - DNA, 25 bp, Homo sapien
tttgcgaatgttagcctctgattct

SEQ ID NO: 2949745 - DNA, 25 bp, Homo sapien
cagcatcagcaaaaagtttgcgaat

SEQ ID NO: 2949746 - DNA, 25 bp, Homo sapien
tctggcccattgaccactttgggct

SEQ ID NO: 2949747 - DNA, 25 bp, Homo sapien
tctcttgcattcaacatcttgccaa

SEQ ID NO: 2949748 - DNA, 25 bp, Homo sapien
tactagaagtagaactcccagactt

SEQ ID NO: 2949749 - DNA, 25 bp, Homo sapien
aatggatacccctttgtaagtcatc

SEQ ID NO: 2949750 - DNA, 25 bp, Homo sapien
tcttccaacaagcttctgcaactag

SEQ ID NO: 2949751 - DNA, 25 bp, Homo sapien
ggaacacatgactcaaatgacctaa

SEQ ID NO: 2949752 - DNA, 25 bp, Homo sapien
cactatactttaggtaagctctcta

SEQ ID NO: 2949753 - DNA, 25 bp, Homo sapien
gctcagggttcatatcatttctgca

SEQ ID NO: 2949754 - DNA, 25 bp, Homo sapien
tctattgagaagacagctactagct

SEQ ID NO: 2949755 - DNA, 25 bp, Homo sapien
ggaactttaaatacacgcaccagac

SEQ ID NO: 2949756 - DNA, 25 bp, Homo sapien
tcttccctagcctcaaatcttaaaa

SEQ ID NO: 2949757 - DNA, 25 bp, Homo sapien
tactcccctctgatctgtatcatca

SEQ ID NO: 2949758 - DNA, 25 bp, Homo sapien
ttttccaaataggtagtcaattatc

SEQ ID NO: 2949759 - DNA, 25 bp, Homo sapien
tcacttgtcatagagcaggctcttc

SEQ ID NO: 2949760 - DNA, 25 bp, Homo sapien
ccatttcctactaaggaagagtaat

SEQ ID NO: 2949761 - DNA, 25 bp, Homo sapien
aacatcctggtacatgtcatgttgt

SEQ ID NO: 2949762 - DNA, 25 bp, Homo sapien
aatagcatgacaatcaacatcctgg

SEQ ID NO: 2949763 - DNA, 25 bp, Homo sapien
tatttctgagtgttattcatgtcga

SEQ ID NO: 2949764 - DNA, 25 bp, Homo sapien
gacaacatacggataataaaaatta

SEQ ID NO: 2949765 - DNA, 25 bp, Homo sapien
tctgataaggatataatcgttgttt

SEQ ID NO: 2949766 - DNA, 25 bp, Homo sapien
taaatatgacaacatacggataata

SEQ ID NO: 2949767 - DNA, 25 bp, Homo sapien
tatccattaaatctctgataaggat

SEQ ID NO: 2949768 - DNA, 25 bp, Homo sapien
aggatgttgtttagctgctccacgc

SEQ ID NO: 2949769 - DNA, 25 bp, Homo sapien
tgttgtttagctgctccacgccatc

SEQ ID NO: 2949770 - DNA, 25 bp, Homo sapien
gttgtttagctgctccacgccatca

SEQ ID NO: 2949771 - DNA, 25 bp, Homo sapien
gatgttgtttagctgctccacgcca

SEQ ID NO: 2949772 - DNA, 25 bp, Homo sapien
atcagatctggtctattggtcattc

SEQ ID NO: 2949773 - DNA, 25 bp, Homo sapien
ttccaggtctaagaagagcctcatc

SEQ ID NO: 2949774 - DNA, 25 bp, Homo sapien
ccattttaacttccagtcttccagg

SEQ ID NO: 2949775 - DNA, 25 bp, Homo sapien
ctatctccattttaacttccagtct

SEQ ID NO: 2949776 - DNA, 25 bp, Homo sapien
cctccaattcagcaccactgaaatt

SEQ ID NO: 2949777 - DNA, 25 bp, Homo sapien
ggtctccacggccagttctttaatg

SEQ ID NO: 2949778 - DNA, 25 bp, Homo sapien
taatgtctacatcagcagagagtaa

SEQ ID NO: 2949779 - DNA, 25 bp, Homo sapien
tagtcggcctttctcatctggcaag

SEQ ID NO: 2949780 - DNA, 25 bp, Homo sapien
tgtctattcatagcagtggactggg

SEQ ID NO: 2949781 - DNA, 25 bp, Homo sapien
tattcatagcagtggactgggctgc

SEQ ID NO: 2949782 - DNA, 25 bp, Homo sapien
tatgtgtctattcatagcagtggac

SEQ ID NO: 2949783 - DNA, 25 bp, Homo sapien
ctttatgtgtctattcatagcagtg

SEQ ID NO: 2949784 - DNA, 25 bp, Homo sapien
gaggcagcatctttcagcttatacc

SEQ ID NO: 2949785 - DNA, 25 bp, Homo sapien
gctaatcaatatagaagaggcagca

SEQ ID NO: 2949786 - DNA, 25 bp, Homo sapien
ctagcaaatatcaagtggtcaccct

SEQ ID NO: 2949787 - DNA, 25 bp, Homo sapien
taacttagagctttgactcaggtgg

SEQ ID NO: 2949788 - DNA, 25 bp, Homo sapien
catttttccctatatgctttgacat

SEQ ID NO: 2949789 - DNA, 25 bp, Homo sapien
ctcatttttccctatatgctttgac

SEQ ID NO: 2949790 - DNA, 25 bp, Homo sapien
tcatctataacttctatacttttaa

SEQ ID NO: 2949791 - DNA, 25 bp, Homo sapien
tcatttttccctatatgctttgaca

SEQ ID NO: 2949792 - DNA, 25 bp, Homo sapien
gtggcgcgatctcggacgctgcaag

SEQ ID NO: 2949793 - DNA, 25 bp, Homo sapien
atctcggacgctgcaagctccacct

SEQ ID NO: 2949794 - DNA, 25 bp, Homo sapien
cgcgatctcggacgctgcaagctcc

SEQ ID NO: 2949795 - DNA, 25 bp, Homo sapien
ggtttgatatcattctccaaagaag

SEQ ID NO: 2949796 - DNA, 25 bp, Homo sapien
tattggagcttaaattgcacccttc

SEQ ID NO: 2949797 - DNA, 25 bp, Homo sapien
acagctgccaaaagtagtcaataac

SEQ ID NO: 2949798 - DNA, 25 bp, Homo sapien
ttatacctcccatcaaaacagctgc

SEQ ID NO: 2949799 - DNA, 25 bp, Homo sapien
tcctgaatacagaggaaggttctca

SEQ ID NO: 2949800 - DNA, 25 bp, Homo sapien
tgggtcaccccatttgatgataccg

SEQ ID NO: 2949801 - DNA, 25 bp, Homo sapien
tccagaagcacgctgaccaatggtg

SEQ ID NO: 2949802 - DNA, 25 bp, Homo sapien
tagaactcgagtaactgggtcaccc

SEQ ID NO: 2949803 - DNA, 25 bp, Homo sapien
tgtgcggtcactgttcttagtctgc

SEQ ID NO: 2949804 - DNA, 25 bp, Homo sapien
gatcttgatgaacgggaagttggat

SEQ ID NO: 2949805 - DNA, 25 bp, Homo sapien
attttatcaggagaacagatcttga

SEQ ID NO: 2949806 - DNA, 25 bp, Homo sapien
cagaaaagccaatcattttatcagg

SEQ ID NO: 2949807 - DNA, 25 bp, Homo sapien
tcaggagaacagatcttgatgaacg

SEQ ID NO: 2949808 - DNA, 25 bp, Homo sapien
cacacacatttaagagataggaaat

SEQ ID NO: 2949809 - DNA, 25 bp, Homo sapien
taatttggttccacttgagaagaac

SEQ ID NO: 2949810 - DNA, 25 bp, Homo sapien
gttgctatgggtttatatgtataca

SEQ ID NO: 2949811 - DNA, 25 bp, Homo sapien
tgagaagaacatagttgctatgggt

SEQ ID NO: 2949812 - DNA, 25 bp, Homo sapien
ctggaatcctgctacaagttcggct

SEQ ID NO: 2949813 - DNA, 25 bp, Homo sapien
ctgctacaagttcggcttcctccat

SEQ ID NO: 2949814 - DNA, 25 bp, Homo sapien
gcatctggcaatatttccttttcac

SEQ ID NO: 2949815 - DNA, 25 bp, Homo sapien
ccatccatctgaagtaccctgtgca

SEQ ID NO: 2949816 - DNA, 25 bp, Homo sapien
ggaaatcactggtcccagttattct

SEQ ID NO: 2949817 - DNA, 25 bp, Homo sapien
gggaaatcactggtcccagttattc

SEQ ID NO: 2949818 - DNA, 25 bp, Homo sapien
gaaatcactggtcccagttattcta

SEQ ID NO: 2949819 - DNA, 25 bp, Homo sapien
aatcactggtcccagttattctatt

SEQ ID NO: 2949820 - DNA, 25 bp, Homo sapien
gaaaaactaggaccatccacccaca

SEQ ID NO: 2949821 - DNA, 25 bp, Homo sapien
ttatagaaaaactaggaccatccac

SEQ ID NO: 2949822 - DNA, 25 bp, Homo sapien
aaactaggaccatccacccacatct

SEQ ID NO: 2949823 - DNA, 25 bp, Homo sapien
tagaaaaactaggaccatccaccca

SEQ ID NO: 2949824 - DNA, 25 bp, Homo sapien
tgatttccgtcaccttgttcgcttg

SEQ ID NO: 2949825 - DNA, 25 bp, Homo sapien
cttgtcaaagttgttaagcgtgatt

SEQ ID NO: 2949826 - DNA, 25 bp, Homo sapien
ccttgttcgcttgccgctggcactg

SEQ ID NO: 2949827 - DNA, 25 bp, Homo sapien
aagttgttaagcgtgatttccgtca

SEQ ID NO: 2949828 - DNA, 25 bp, Homo sapien
tcggtcagctttccatcatgctcca

SEQ ID NO: 2949829 - DNA, 25 bp, Homo sapien
gcattactggtgtcactctgaggga

SEQ ID NO: 2949830 - DNA, 25 bp, Homo sapien
gatctggcaatggatgttctcccag

SEQ ID NO: 2949831 - DNA, 25 bp, Homo sapien
aggatgatgagcaggctaccaccca

SEQ ID NO: 2949832 - DNA, 25 bp, Homo sapien
ctctggagaccggaaccagccagtg

SEQ ID NO: 2949833 - DNA, 25 bp, Homo sapien
tggcagggtgccctcgagggccagt

SEQ ID NO: 2949834 - DNA, 25 bp, Homo sapien
atggccagtatggcagggtgccctc

SEQ ID NO: 2949835 - DNA, 25 bp, Homo sapien
tctggagaccggaaccagccagtgc

SEQ ID NO: 2949836 - DNA, 25 bp, Homo sapien
tactattccagagactacaggtggg

SEQ ID NO: 2949837 - DNA, 25 bp, Homo sapien
taagcagtgaaggaacggttttagc

SEQ ID NO: 2949838 - DNA, 25 bp, Homo sapien
gcctggcaaggatgtagtaatttca

SEQ ID NO: 2949839 - DNA, 25 bp, Homo sapien
gatagatgtacgtataaaaccagac

SEQ ID NO: 2949840 - DNA, 25 bp, Homo sapien
gggatttgtacgcatcatcaaagat

SEQ ID NO: 2949841 - DNA, 25 bp, Homo sapien
tgtcatccacaaccacacaactgag

SEQ ID NO: 2949842 - DNA, 25 bp, Homo sapien
aatgtcatccacaaccacacaactg

SEQ ID NO: 2949843 - DNA, 25 bp, Homo sapien
ctgagctgggatttgtacgcatcat

SEQ ID NO: 2949844 - DNA, 25 bp, Homo sapien
taagaagttactgcaaaccatggcc

SEQ ID NO: 2949845 - DNA, 25 bp, Homo sapien
taccagtgaaatgtactcagagggc

SEQ ID NO: 2949846 - DNA, 25 bp, Homo sapien
tatgttataaagacaggcagcagcg

SEQ ID NO: 2949847 - DNA, 25 bp, Homo sapien
taagattggccctcagatggtaagg

SEQ ID NO: 2949848 - DNA, 25 bp, Homo sapien
caagatttgaaaatcgagggccaat

SEQ ID NO: 2949849 - DNA, 25 bp, Homo sapien
atttgaaaatcgagggccaataggg

SEQ ID NO: 2949850 - DNA, 25 bp, Homo sapien
atacaagatttgaaaatcgagggcc

SEQ ID NO: 2949851 - DNA, 25 bp, Homo sapien
agatttgaaaatcgagggccaatag

SEQ ID NO: 2949852 - DNA, 25 bp, Homo sapien
ctgaggaggtgcctttttcagtaaa

SEQ ID NO: 2949853 - DNA, 25 bp, Homo sapien
ttcttttatttgagcacgtgcacac

SEQ ID NO: 2949854 - DNA, 25 bp, Homo sapien
caagaccaaggcaatcacaaaggga

SEQ ID NO: 2949855 - DNA, 25 bp, Homo sapien
taacaacatagtgcccctgaaggga

SEQ ID NO: 2949856 - DNA, 25 bp, Homo sapien
taataagccaatttacaagaaggga

SEQ ID NO: 2949857 - DNA, 25 bp, Homo sapien
tctgtgtgacagtgagcacccccat

SEQ ID NO: 2949858 - DNA, 25 bp, Homo sapien
taccctccaagccaattgttagctt

SEQ ID NO: 2949859 - DNA, 25 bp, Homo sapien
cagtggtcttttaccctccaagcca

SEQ ID NO: 2949860 - DNA, 25 bp, Homo sapien
ctgcagtggtcttttaccctccaag

SEQ ID NO: 2949861 - DNA, 25 bp, Homo sapien
ggctgcaggaagagttacctggcct

SEQ ID NO: 2949862 - DNA, 25 bp, Homo sapien
ggattgctcctccataaattacgag

SEQ ID NO: 2949863 - DNA, 25 bp, Homo sapien
cataatctaaaaaggttgggaagca

SEQ ID NO: 2949864 - DNA, 25 bp, Homo sapien
tacgaggctaccctgttacatacag

SEQ ID NO: 2949865 - DNA, 25 bp, Homo sapien
tagagtgcggtggtaagaatcagct

SEQ ID NO: 2949866 - DNA, 25 bp, Homo sapien
tcttaactagagtcatggcacccat

SEQ ID NO: 2949867 - DNA, 25 bp, Homo sapien
tggcacccatggactactacgacgt

SEQ ID NO: 2949868 - DNA, 25 bp, Homo sapien
gaatcagcttcctgcggtcttgaac

SEQ ID NO: 2949869 - DNA, 25 bp, Homo sapien
gcaagtaacagctgatagcaaaacc

SEQ ID NO: 2949870 - DNA, 25 bp, Homo sapien
gattctgcaagtaacagctgatagc

SEQ ID NO: 2949871 - DNA, 25 bp, Homo sapien
tctgcaagtaacagctgatagcaaa

SEQ ID NO: 2949872 - DNA, 25 bp, Homo sapien
ttggattctgcaagtaacagctgat

SEQ ID NO: 2949873 - DNA, 25 bp, Homo sapien
aatttcaactatccagagcacagcc

SEQ ID NO: 2949874 - DNA, 25 bp, Homo sapien
ggacaacttacccactagacacagt

SEQ ID NO: 2949875 - DNA, 25 bp, Homo sapien
tcatttaaccctacagagcccacat

SEQ ID NO: 2949876 - DNA, 25 bp, Homo sapien
tatctggaggccaatctgctaaaca

SEQ ID NO: 2949877 - DNA, 25 bp, Homo sapien
tgtttaagctgaataccaaaggaag

SEQ ID NO: 2949878 - DNA, 25 bp, Homo sapien
tcagattttacattgggagcagctc

SEQ ID NO: 2949879 - DNA, 25 bp, Homo sapien
tactataggcaaaagcagacttcat

SEQ ID NO: 2949880 - DNA, 25 bp, Homo sapien
catcctcatggtgctgcaagcagga

SEQ ID NO: 2949881 - DNA, 25 bp, Homo sapien
cattttctctgtatcacccactggg

SEQ ID NO: 2949882 - DNA, 25 bp, Homo sapien
gaaattccaatcattcagttctagg

SEQ ID NO: 2949883 - DNA, 25 bp, Homo sapien
cattttgctggcactagattccttc

SEQ ID NO: 2949884 - DNA, 25 bp, Homo sapien
cactgggaacctcttagttggatac

SEQ ID NO: 2949885 - DNA, 25 bp, Homo sapien
tctcctgtggcaatgttgggcacgt

SEQ ID NO: 2949886 - DNA, 25 bp, Homo sapien
gaaagcgttaagcatttccatctcc

SEQ ID NO: 2949887 - DNA, 25 bp, Homo sapien
gaaggacatctttgcggctagtggt

SEQ ID NO: 2949888 - DNA, 25 bp, Homo sapien
tcccaatgataagaagcttgcggcc

SEQ ID NO: 2949889 - DNA, 25 bp, Homo sapien
tgctgtgcaattgtggtgcgttcct

SEQ ID NO: 2949890 - DNA, 25 bp, Homo sapien
taacttcttgattcctatccagacc

SEQ ID NO: 2949891 - DNA, 25 bp, Homo sapien
ccttatccttgaagttgcccaaaag

SEQ ID NO: 2949892 - DNA, 25 bp, Homo sapien
tagggacatctcgatcagcattagt

SEQ ID NO: 2949893 - DNA, 25 bp, Homo sapien
gggttcaaactcagaggcctatgaa

SEQ ID NO: 2949894 - DNA, 25 bp, Homo sapien
tgtcagtcgctgaagatcaggcctg

SEQ ID NO: 2949895 - DNA, 25 bp, Homo sapien
cactcagctgcacgaaatccatttg

SEQ ID NO: 2949896 - DNA, 25 bp, Homo sapien
aagaagcattaacttgatcactgac

SEQ ID NO: 2949897 - DNA, 25 bp, Homo sapien
ttctcacacggtattcaggatccat

SEQ ID NO: 2949898 - DNA, 25 bp, Homo sapien
tcttaagagggccaagaattttctc

SEQ ID NO: 2949899 - DNA, 25 bp, Homo sapien
tcttctcttaagagggccaagaatt

SEQ ID NO: 2949900 - DNA, 25 bp, Homo sapien
ccaagaattttctcacacggtattc

SEQ ID NO: 2949901 - DNA, 25 bp, Homo sapien
attgtgacaaggaagttttgcgaag

SEQ ID NO: 2949902 - DNA, 25 bp, Homo sapien
acagtacaaccaacttccttgcttg

SEQ ID NO: 2949903 - DNA, 25 bp, Homo sapien
acaaggaagttttgcgaagcaggac

SEQ ID NO: 2949904 - DNA, 25 bp, Homo sapien
accaacagtacaaccaacttccttg

SEQ ID NO: 2949905 - DNA, 25 bp, Homo sapien
ttggtcacttcccttggtcactgtg

SEQ ID NO: 2949906 - DNA, 25 bp, Homo sapien
tcactgtgtgtttcaaatagttcat

SEQ ID NO: 2949907 - DNA, 25 bp, Homo sapien
cttggtcacttcccttggtcactgt

SEQ ID NO: 2949908 - DNA, 25 bp, Homo sapien
ttggtcactgtgtgtttcaaatagt

SEQ ID NO: 2949909 - DNA, 25 bp, Homo sapien
ggaatcactttagcctgcatgggaa

SEQ ID NO: 2949910 - DNA, 25 bp, Homo sapien
tcaaaaggactcaacgggtgcttcc

SEQ ID NO: 2949911 - DNA, 25 bp, Homo sapien
tagagaacgttccacttagtccagt

SEQ ID NO: 2949912 - DNA, 25 bp, Homo sapien
taagacagtgaagatcctaggccat

SEQ ID NO: 2949913 - DNA, 25 bp, Homo sapien
gaatcacaggatctcacaatacaat

SEQ ID NO: 2949914 - DNA, 25 bp, Homo sapien
cataagttaacacaatgtgtgctgc

SEQ ID NO: 2949915 - DNA, 25 bp, Homo sapien
cttagaggaatccaggatactggcc

SEQ ID NO: 2949916 - DNA, 25 bp, Homo sapien
ccaccaggaatcacaggatctcaca

SEQ ID NO: 2949917 - DNA, 25 bp, Homo sapien
ggtccgtgagggagtagccatcaat

SEQ ID NO: 2949918 - DNA, 25 bp, Homo sapien
ggcaagtcttctctagctcaaatgg

SEQ ID NO: 2949919 - DNA, 25 bp, Homo sapien
aaataactccaggtagagcagttgg

SEQ ID NO: 2949920 - DNA, 25 bp, Homo sapien
taaataagcggtatcttcagaaggg

SEQ ID NO: 2949921 - DNA, 25 bp, Homo sapien
tatgaccaattttgccgactaggcc

SEQ ID NO: 2949922 - DNA, 25 bp, Homo sapien
gaggcgggcgcctggcttctaaata

SEQ ID NO: 2949923 - DNA, 25 bp, Homo sapien
ggctggagcacacccttgagagtct

SEQ ID NO: 2949924 - DNA, 25 bp, Homo sapien
gaagcacatgcagagacgatgaccg

SEQ ID NO: 2949925 - DNA, 25 bp, Homo sapien
ttcccatcttggtggacaccatctc

SEQ ID NO: 2949926 - DNA, 25 bp, Homo sapien
tcccatcttggtggacaccatctcc

SEQ ID NO: 2949927 - DNA, 25 bp, Homo sapien
atcctggctcaaaactttggccata

SEQ ID NO: 2949928 - DNA, 25 bp, Homo sapien
cttcccatcttggtggacaccatct

SEQ ID NO: 2949929 - DNA, 25 bp, Homo sapien
tgcccagaaccatggtcctcccggg

SEQ ID NO: 2949930 - DNA, 25 bp, Homo sapien
ggtcctcccgggctctcaggtggtc

SEQ ID NO: 2949931 - DNA, 25 bp, Homo sapien
cccacggctgcccagaaccatggtc

SEQ ID NO: 2949932 - DNA, 25 bp, Homo sapien
acggctgcccagaaccatggtcctc

SEQ ID NO: 2949933 - DNA, 25 bp, Homo sapien
tggggtatagtctgtggccaaaccc

SEQ ID NO: 2949934 - DNA, 25 bp, Homo sapien
tagtctgtggccaaacccttggctt

SEQ ID NO: 2949935 - DNA, 25 bp, Homo sapien
atagtctgtggccaaacccttggct

SEQ ID NO: 2949936 - DNA, 25 bp, Homo sapien
ggtatagtctgtggccaaacccttg

SEQ ID NO: 2949937 - DNA, 25 bp, Homo sapien
tttttccaggcttatcaacttcact

SEQ ID NO: 2949938 - DNA, 25 bp, Homo sapien
ttccaggcttatcaacttcactttc

SEQ ID NO: 2949939 - DNA, 25 bp, Homo sapien
ttttccaggcttatcaacttcactt

SEQ ID NO: 2949940 - DNA, 25 bp, Homo sapien
cctttttccaggcttatcaacttca

SEQ ID NO: 2949941 - DNA, 25 bp, Homo sapien
cagctcgccgtggagacagcctgtg

SEQ ID NO: 2949942 - DNA, 25 bp, Homo sapien
tgccctcagctcgccgtggagacag

SEQ ID NO: 2949943 - DNA, 25 bp, Homo sapien
aactgtggagctagcagctgtgtta

SEQ ID NO: 2949944 - DNA, 25 bp, Homo sapien
caaaggactcccaaactgtggagct

SEQ ID NO: 2949945 - DNA, 25 bp, Homo sapien
tctgccaaggtggacggaaacggag

SEQ ID NO: 2949946 - DNA, 25 bp, Homo sapien
tggatcagggaagttttgcttctgt

SEQ ID NO: 2949947 - DNA, 25 bp, Homo sapien
aaaacgcgagcgcagtagccggcct

SEQ ID NO: 2949948 - DNA, 25 bp, Homo sapien
gaggggcgtgcccaaatgcttcttc

SEQ ID NO: 2949949 - DNA, 25 bp, Homo sapien
tcactggaggagaatttgctgtcgt

SEQ ID NO: 2949950 - DNA, 25 bp, Homo sapien
gagaatttgctgtcgtccctttgcc

SEQ ID NO: 2949951 - DNA, 25 bp, Homo sapien
gaatttgctgtcgtccctttgccca

SEQ ID NO: 2949952 - DNA, 25 bp, Homo sapien
tggaggagaatttgctgtcgtccct

SEQ ID NO: 2949953 - DNA, 25 bp, Homo sapien
aacagagctgctcccgtccccagca

SEQ ID NO: 2949954 - DNA, 25 bp, Homo sapien
aaagacttgtctttgggatacacat

SEQ ID NO: 2949955 - DNA, 25 bp, Homo sapien
ctggcctgggcataatggatcctca

SEQ ID NO: 2949956 - DNA, 25 bp, Homo sapien
atggatcctcaataaagacttgtct

SEQ ID NO: 2949957 - DNA, 25 bp, Homo sapien
tgggatacacatttgctgtcaacct

SEQ ID NO: 2949958 - DNA, 25 bp, Homo sapien
aatctgatgtgttttccgtcatcag

SEQ ID NO: 2949959 - DNA, 25 bp, Homo sapien
atgtgttttccgtcatcagcctctt

SEQ ID NO: 2949960 - DNA, 25 bp, Homo sapien
tctgatgtgttttccgtcatcagcc

SEQ ID NO: 2949961 - DNA, 25 bp, Homo sapien
tgatgtgttttccgtcatcagcctc

SEQ ID NO: 2949962 - DNA, 25 bp, Homo sapien
tcagctttatttctccccgaggagc

SEQ ID NO: 2949963 - DNA, 25 bp, Homo sapien
aagcatgcttccctttatgtcctgg

SEQ ID NO: 2949964 - DNA, 25 bp, Homo sapien
aaaactcagaggtccacctgaagcc

SEQ ID NO: 2949965 - DNA, 25 bp, Homo sapien
agccacatccttgcacccgtgtgga

SEQ ID NO: 2949966 - DNA, 25 bp, Homo sapien
tgagttgacatcagcatttcccttt

SEQ ID NO: 2949967 - DNA, 25 bp, Homo sapien
cagcatttcccttttgcagcctggc

SEQ ID NO: 2949968 - DNA, 25 bp, Homo sapien
gctgagttgacatcagcatttccct

SEQ ID NO: 2949969 - DNA, 25 bp, Homo sapien
ctgctgagttgacatcagcatttcc

SEQ ID NO: 2949970 - DNA, 25 bp, Homo sapien
ggtggccgatctgttggtattcttc

SEQ ID NO: 2949971 - DNA, 25 bp, Homo sapien
attcttccgataggatcacattttg

SEQ ID NO: 2949972 - DNA, 25 bp, Homo sapien
ggagcaaaattggtggccgatctgt

SEQ ID NO: 2949973 - DNA, 25 bp, Homo sapien
cagagggagcaaaattggtggccga

SEQ ID NO: 2949974 - DNA, 25 bp, Homo sapien
ccttgtcagtcccagttagctcctg

SEQ ID NO: 2949975 - DNA, 25 bp, Homo sapien
ggaaacaacagcactgatttctcga

SEQ ID NO: 2949976 - DNA, 25 bp, Homo sapien
gatttctcgaattccccttgtcagt

SEQ ID NO: 2949977 - DNA, 25 bp, Homo sapien
tcccagttagctcctggtggagaaa

SEQ ID NO: 2949978 - DNA, 25 bp, Homo sapien
tcctggctcctctgataatcaccat

SEQ ID NO: 2949979 - DNA, 25 bp, Homo sapien
ctgataatcaccattttccctgctc

SEQ ID NO: 2949980 - DNA, 25 bp, Homo sapien
cctctgataatcaccattttccctg

SEQ ID NO: 2949981 - DNA, 25 bp, Homo sapien
ggctcctctgataatcaccattttc

SEQ ID NO: 2949982 - DNA, 25 bp, Homo sapien
ctgctcggtggcaccagggtcctcg

SEQ ID NO: 2949983 - DNA, 25 bp, Homo sapien
cagggtcctcgctggctacccaatt

SEQ ID NO: 2949984 - DNA, 25 bp, Homo sapien
tttggtggtaagactcgcctcttgt

SEQ ID NO: 2949985 - DNA, 25 bp, Homo sapien
tacccaatttggtggtaagactcgc

SEQ ID NO: 2949986 - DNA, 25 bp, Homo sapien
gacatcctcaaacccggctgctccg

SEQ ID NO: 2949987 - DNA, 25 bp, Homo sapien
gctgacatcctcaaacccggctgct

SEQ ID NO: 2949988 - DNA, 25 bp, Homo sapien
ctcgctgacatcctcaaacccggct

SEQ ID NO: 2949989 - DNA, 25 bp, Homo sapien
cttaggccgcgggcgctgattggct

SEQ ID NO: 2949990 - DNA, 25 bp, Homo sapien
tacggggggctcagatcaaaggcca

SEQ ID NO: 2949991 - DNA, 25 bp, Homo sapien
tgtctggccccctggcgtaagactt

SEQ ID NO: 2949992 - DNA, 25 bp, Homo sapien
agacttccttcagccatggccctca

SEQ ID NO: 2949993 - DNA, 25 bp, Homo sapien
gactcgggtcggctcattctctgcc

SEQ ID NO: 2949994 - DNA, 25 bp, Homo sapien
ggtgacatccgcctgccgctggcag

SEQ ID NO: 2949995 - DNA, 25 bp, Homo sapien
tggcagcctcccatatgtcagcgga

SEQ ID NO: 2949996 - DNA, 25 bp, Homo sapien
cagcggcccctgtgatctcgggatc

SEQ ID NO: 2949997 - DNA, 25 bp, Homo sapien
ggaagaactggtgacatccgcctgc

SEQ ID NO: 2949998 - DNA, 25 bp, Homo sapien
tgcagcttgctttcagtgggacgtt

SEQ ID NO: 2949999 - DNA, 25 bp, Homo sapien
tcttagagggctggtaaggctccca

SEQ ID NO: 2950000 - DNA, 25 bp, Homo sapien
aagaaactgcccgtcctttcatgca

SEQ ID NO: 2950001 - DNA, 25 bp, Homo sapien
caggactggcattcaggccttggca

SEQ ID NO: 2950002 - DNA, 25 bp, Homo sapien
ggcgctgcgccctctagcatctcct

SEQ ID NO: 2950003 - DNA, 25 bp, Homo sapien
cgctgcgccctctagcatctcctcg

SEQ ID NO: 2950004 - DNA, 25 bp, Homo sapien
cggcgctgcgccctctagcatctcc

SEQ ID NO: 2950005 - DNA, 25 bp, Homo sapien
tgcgccctctagcatctcctcgcgc

SEQ ID NO: 2950006 - DNA, 25 bp, Homo sapien
agcaggcagagcccggccagggcca

SEQ ID NO: 2950007 - DNA, 25 bp, Homo sapien
agcgccagcaggcagagcccggcca

SEQ ID NO: 2950008 - DNA, 25 bp, Homo sapien
agggccagcgcgggcggggggcgca

SEQ ID NO: 2950009 - DNA, 25 bp, Homo sapien
ggcagcgccagcaggcagagcccgg

SEQ ID NO: 2950010 - DNA, 25 bp, Homo sapien
ggcaccggcgtgaggatcccgagag

SEQ ID NO: 2950011 - DNA, 25 bp, Homo sapien
cggaggccaggatggcggcagacag

SEQ ID NO: 2950012 - DNA, 25 bp, Homo sapien
gaaggagtccgaggcaaggacggct

SEQ ID NO: 2950013 - DNA, 25 bp, Homo sapien
cgagagggcatcagagagcgggact

SEQ ID NO: 2950014 - DNA, 25 bp, Homo sapien
ttcccccattctccctggacgcgca

SEQ ID NO: 2950015 - DNA, 25 bp, Homo sapien
tcctctgccccgagaccgggaacag

SEQ ID NO: 2950016 - DNA, 25 bp, Homo sapien
tccctggacgcgcacgatcctctgc

SEQ ID NO: 2950017 - DNA, 25 bp, Homo sapien
tctgccccgagaccgggaacagccc

SEQ ID NO: 2950018 - DNA, 25 bp, Homo sapien
tatcaggatgccaaagcactttgtg

SEQ ID NO: 2950019 - DNA, 25 bp, Homo sapien
gttccgcatggcagacactcctttc

SEQ ID NO: 2950020 - DNA, 25 bp, Homo sapien
gctgtatcctgtaagctccttggca

SEQ ID NO: 2950021 - DNA, 25 bp, Homo sapien
catcagttccgcatggcagacactc

SEQ ID NO: 2950022 - DNA, 25 bp, Homo sapien
tcaaagctgtatcctgtaagctcct

SEQ ID NO: 2950023 - DNA, 25 bp, Homo sapien
aggccccacggatggcccacaccct

SEQ ID NO: 2950024 - DNA, 25 bp, Homo sapien
tgcaggccccacggatggcccacac

SEQ ID NO: 2950025 - DNA, 25 bp, Homo sapien
cggatggcccacacccttcgcccag

SEQ ID NO: 2950026 - DNA, 25 bp, Homo sapien
ccacggatggcccacacccttcgcc

SEQ ID NO: 2950027 - DNA, 25 bp, Homo sapien
gacaggttcttgaatgcaccctggg

SEQ ID NO: 2950028 - DNA, 25 bp, Homo sapien
tctggggaatgccttgtgcgtgacc

SEQ ID NO: 2950029 - DNA, 25 bp, Homo sapien
gtgcgtgaccccctcaatgatgagg

SEQ ID NO: 2950030 - DNA, 25 bp, Homo sapien
gccattgtttgcacaggctctaggc

SEQ ID NO: 2950031 - DNA, 25 bp, Homo sapien
ggcgtcaggacttcccgcccggtca

SEQ ID NO: 2950032 - DNA, 25 bp, Homo sapien
ccggggctgccgcagtgcccaatcc

SEQ ID NO: 2950033 - DNA, 25 bp, Homo sapien
gcgtcaggacttcccgcccggtcag

SEQ ID NO: 2950034 - DNA, 25 bp, Homo sapien
ggctgccgcagtgcccaatcctggg

SEQ ID NO: 2950035 - DNA, 25 bp, Homo sapien
gccgaggtgcgcagcatccctcagg

SEQ ID NO: 2950036 - DNA, 25 bp, Homo sapien
gcactcaagcaggccgaggtgcgca

SEQ ID NO: 2950037 - DNA, 25 bp, Homo sapien
ggccgaggtgcgcagcatccctcag

SEQ ID NO: 2950038 - DNA, 25 bp, Homo sapien
gaactgaaactggcactcaagcagg

SEQ ID NO: 2950039 - DNA, 25 bp, Homo sapien
gcttagaggttgcctgccgccctct

SEQ ID NO: 2950040 - DNA, 25 bp, Homo sapien
ctgtgatgggcaggacaagagaatg

SEQ ID NO: 2950041 - DNA, 25 bp, Homo sapien
gcggtggtggcagcgctgtgatggg

SEQ ID NO: 2950042 - DNA, 25 bp, Homo sapien
tacttgaggttgtcaccgcacacgc

SEQ ID NO: 2950043 - DNA, 25 bp, Homo sapien
agaggacaccgcgtacaggaaagct

SEQ ID NO: 2950044 - DNA, 25 bp, Homo sapien
agaaacttggtgctgtacttgaggt

SEQ ID NO: 2950045 - DNA, 25 bp, Homo sapien
ttgtttcctctcttggaccccagga

SEQ ID NO: 2950046 - DNA, 25 bp, Homo sapien
gcagaacagaggcgtggtcagaggc

SEQ ID NO: 2950047 - DNA, 25 bp, Homo sapien
gggaggcagaacagaggcgtggtca

SEQ ID NO: 2950048 - DNA, 25 bp, Homo sapien
aggcagaacagaggcgtggtcagag

SEQ ID NO: 2950049 - DNA, 25 bp, Homo sapien
gaggcagaacagaggcgtggtcaga

SEQ ID NO: 2950050 - DNA, 25 bp, Homo sapien
tgagtcctccatgtacaccaggtcc

SEQ ID NO: 2950051 - DNA, 25 bp, Homo sapien
gagtcatagcgcagtttcagcacct

SEQ ID NO: 2950052 - DNA, 25 bp, Homo sapien
cacaggagcctgatacgccatggca

SEQ ID NO: 2950053 - DNA, 25 bp, Homo sapien
catggcacttacacgtggtcctgag

SEQ ID NO: 2950054 - DNA, 25 bp, Homo sapien
ctgcagctggcctcccgggagcaca

SEQ ID NO: 2950055 - DNA, 25 bp, Homo sapien
gctctgggtgtcatagccccgcccg

SEQ ID NO: 2950056 - DNA, 25 bp, Homo sapien
cattgctggcactccacgtagcagc

SEQ ID NO: 2950057 - DNA, 25 bp, Homo sapien
ctagtgcttgcaggtgtacacaagc

SEQ ID NO: 2950058 - DNA, 25 bp, Homo sapien
tcagcggaggcatatttgaaaagcc

SEQ ID NO: 2950059 - DNA, 25 bp, Homo sapien
tcaagtaagagccaaagtgagggcc

SEQ ID NO: 2950060 - DNA, 25 bp, Homo sapien
tcgagacaagaatgaggcctcagcg

SEQ ID NO: 2950061 - DNA, 25 bp, Homo sapien
aaagccttaactagatgagcagcca

SEQ ID NO: 2950062 - DNA, 25 bp, Homo sapien
gcgtggcagggccagcaaagtggcc

SEQ ID NO: 2950063 - DNA, 25 bp, Homo sapien
caagggcttcccgaaagaagtcact

SEQ ID NO: 2950064 - DNA, 25 bp, Homo sapien
ctcctgggtggcatcgggccccact

SEQ ID NO: 2950065 - DNA, 25 bp, Homo sapien
cagggccagcaaagtggccaagggc

SEQ ID NO: 2950066 - DNA, 25 bp, Homo sapien
cagccgggcctctgcagtcaaaaat

SEQ ID NO: 2950067 - DNA, 25 bp, Homo sapien
gacatgtgcttaccagctccgagac

SEQ ID NO: 2950068 - DNA, 25 bp, Homo sapien
gccaaagcccctgagacatgggact

SEQ ID NO: 2950069 - DNA, 25 bp, Homo sapien
ttcaaaagcaagtaatgtccagggt

SEQ ID NO: 2950070 - DNA, 25 bp, Homo sapien
gactgtctcaacaagccccggtcct

SEQ ID NO: 2950071 - DNA, 25 bp, Homo sapien
ctagtgactgtctcaacaagccccg

SEQ ID NO: 2950072 - DNA, 25 bp, Homo sapien
agtgactgtctcaacaagccccggt

SEQ ID NO: 2950073 - DNA, 25 bp, Homo sapien
tcctggaagatggtggcattgagca

SEQ ID NO: 2950074 - DNA, 25 bp, Homo sapien
ttgtgatgagctgagatcttgccac

SEQ ID NO: 2950075 - DNA, 25 bp, Homo sapien
ttactcaggcagctgagacgggaga

SEQ ID NO: 2950076 - DNA, 25 bp, Homo sapien
aggttgtgatgagctgagatcttgc

SEQ ID NO: 2950077 - DNA, 25 bp, Homo sapien
atcgcttgaatccgggaggtggagg

SEQ ID NO: 2950078 - DNA, 25 bp, Homo sapien
tacacaaaatgctaaggcggccggg

SEQ ID NO: 2950079 - DNA, 25 bp, Homo sapien
gctgtgcatcctctgaagcgctgga

SEQ ID NO: 2950080 - DNA, 25 bp, Homo sapien
tcagggtcaagtacacacagctgtg

SEQ ID NO: 2950081 - DNA, 25 bp, Homo sapien
tagaattgggcatccctccgaacca

SEQ ID NO: 2950082 - DNA, 25 bp, Homo sapien
ccgcagtgccggcacttccgcccca

SEQ ID NO: 2950083 - DNA, 25 bp, Homo sapien
aggggacccccgcagtgccggcact

SEQ ID NO: 2950084 - DNA, 25 bp, Homo sapien
cgcagtgccggcacttccgccccat

SEQ ID NO: 2950085 - DNA, 25 bp, Homo sapien
gacccccgcagtgccggcacttccg

SEQ ID NO: 2950086 - DNA, 25 bp, Homo sapien
tagtcccctcaggaacgtgggagag

SEQ ID NO: 2950087 - DNA, 25 bp, Homo sapien
ttgtgggtcttctgtagtcccctca

SEQ ID NO: 2950088 - DNA, 25 bp, Homo sapien
gggcacacccattagcttgtgggtc

SEQ ID NO: 2950089 - DNA, 25 bp, Homo sapien
cctcaggaacgtgggagagtcacag

SEQ ID NO: 2950090 - DNA, 25 bp, Homo sapien
tgcgagaagcgggtatacactcttt

SEQ ID NO: 2950091 - DNA, 25 bp, Homo sapien
agttgaatgcgagaagcgggtatac

SEQ ID NO: 2950092 - DNA, 25 bp, Homo sapien
gaagcgggtatacactctttcctaa

SEQ ID NO: 2950093 - DNA, 25 bp, Homo sapien
cgggtatacactctttcctaaatgc

SEQ ID NO: 2950094 - DNA, 25 bp, Homo sapien
ctggaagtgggttattccaagcatc

SEQ ID NO: 2950095 - DNA, 25 bp, Homo sapien
ggaagtgggttattccaagcatcat

SEQ ID NO: 2950096 - DNA, 25 bp, Homo sapien
gaagtgggttattccaagcatcatc

SEQ ID NO: 2950097 - DNA, 25 bp, Homo sapien
agtgggttattccaagcatcatctt

SEQ ID NO: 2950098 - DNA, 25 bp, Homo sapien
cctgtgtctgaagcacaagggtcag

SEQ ID NO: 2950099 - DNA, 25 bp, Homo sapien
cagagcatgacatttccgcttcttc

SEQ ID NO: 2950100 - DNA, 25 bp, Homo sapien
caggtgccccgagtactcactgcca

SEQ ID NO: 2950101 - DNA, 25 bp, Homo sapien
gccacggtcaacctctctttaccag

SEQ ID NO: 2950102 - DNA, 25 bp, Homo sapien
tgaggcatagggtgagaggacccct

SEQ ID NO: 2950103 - DNA, 25 bp, Homo sapien
ccctgaggcatagggtgagaggacc

SEQ ID NO: 2950104 - DNA, 25 bp, Homo sapien
tgaaagggaagcgcccaggaccctg

SEQ ID NO: 2950105 - DNA, 25 bp, Homo sapien
caggaccctgaggcatagggtgaga

SEQ ID NO: 2950106 - DNA, 25 bp, Homo sapien
caggagacaagctgcattaatggcg

SEQ ID NO: 2950107 - DNA, 25 bp, Homo sapien
gagacaagctgcattaatggcgatc

SEQ ID NO: 2950108 - DNA, 25 bp, Homo sapien
caagctgcattaatggcgatcattt

SEQ ID NO: 2950109 - DNA, 25 bp, Homo sapien
tgcattaatggcgatcattttgcag

SEQ ID NO: 2950110 - DNA, 25 bp, Homo sapien
tggcagccagatggcggccacatct

SEQ ID NO: 2950111 - DNA, 25 bp, Homo sapien
tcaatatggttctttcattggcagc

SEQ ID NO: 2950112 - DNA, 25 bp, Homo sapien
ttggcagccagatggcggccacatc

SEQ ID NO: 2950113 - DNA, 25 bp, Homo sapien
tatggttctttcattggcagccaga

SEQ ID NO: 2950114 - DNA, 25 bp, Homo sapien
cactgaattcctagaaggtgatttc

SEQ ID NO: 2950115 - DNA, 25 bp, Homo sapien
tctttagtgatgacaccaatggcaa

SEQ ID NO: 2950116 - DNA, 25 bp, Homo sapien
gctgcacaattcttcactctacgta

SEQ ID NO: 2950117 - DNA, 25 bp, Homo sapien
tgaataaaatttcgccgatcagagt

SEQ ID NO: 2950118 - DNA, 25 bp, Homo sapien
aaaacgatggttagatcccacgaag

SEQ ID NO: 2950119 - DNA, 25 bp, Homo sapien
ggtggtaatgccttaaccgtatgcg

SEQ ID NO: 2950120 - DNA, 25 bp, Homo sapien
tagatcccacgaagtaggtggtaat

SEQ ID NO: 2950121 - DNA, 25 bp, Homo sapien
gtaatgccttaaccgtatgcgtgtt

SEQ ID NO: 2950122 - DNA, 25 bp, Homo sapien
tccggcttccggtcgcaggaccctc

SEQ ID NO: 2950123 - DNA, 25 bp, Homo sapien
gcttccggtcgcaggaccctccctc

SEQ ID NO: 2950124 - DNA, 25 bp, Homo sapien
ttcctcggaacacgtcctcacagcc

SEQ ID NO: 2950125 - DNA, 25 bp, Homo sapien
ctctggcttcctcggaacacgtcct

SEQ ID NO: 2950126 - DNA, 25 bp, Homo sapien
gtgcgtttgctggaacaggggatcc

SEQ ID NO: 2950127 - DNA, 25 bp, Homo sapien
ttgtgcgtttgctggaacaggggat

SEQ ID NO: 2950128 - DNA, 25 bp, Homo sapien
gcgtttgctggaacaggggatccat

SEQ ID NO: 2950129 - DNA, 25 bp, Homo sapien
tgcgtttgctggaacaggggatcca

SEQ ID NO: 2950130 - DNA, 25 bp, Homo sapien
tcgcctcgtctagcccctgcccgct

SEQ ID NO: 2950131 - DNA, 25 bp, Homo sapien
ctggcctcgcctcgtctagcccctg

SEQ ID NO: 2950132 - DNA, 25 bp, Homo sapien
ctgcccgctccccgaccggccctca

SEQ ID NO: 2950133 - DNA, 25 bp, Homo sapien
tgcccgctccccgaccggccctcac

SEQ ID NO: 2950134 - DNA, 25 bp, Homo sapien
gattaagcacttcggaggcatcccc

SEQ ID NO: 2950135 - DNA, 25 bp, Homo sapien
tctcgaggtctaccaaccaggagca

SEQ ID NO: 2950136 - DNA, 25 bp, Homo sapien
tgggagtcccgccaaggattaagca

SEQ ID NO: 2950137 - DNA, 25 bp, Homo sapien
caaagttttataacctgcaggtgcc

SEQ ID NO: 2950138 - DNA, 25 bp, Homo sapien
tagcagtattattctcaacagccca

SEQ ID NO: 2950139 - DNA, 25 bp, Homo sapien
gaatattattccgtcataaaacaga

SEQ ID NO: 2950140 - DNA, 25 bp, Homo sapien
acagcccaatggtggaaacaactca

SEQ ID NO: 2950141 - DNA, 25 bp, Homo sapien
gaaattctggtaacaggctacaata

SEQ ID NO: 2950142 - DNA, 25 bp, Homo sapien
ctttacatttcgctcattaaagggc

SEQ ID NO: 2950143 - DNA, 25 bp, Homo sapien
catttcgctcattaaagggcaaaat

SEQ ID NO: 2950144 - DNA, 25 bp, Homo sapien
tttgcctttacatttcgctcattaa

SEQ ID NO: 2950145 - DNA, 25 bp, Homo sapien
tacatttcgctcattaaagggcaaa

SEQ ID NO: 2950146 - DNA, 25 bp, Homo sapien
ggtaatatgatcaacacgaacagtg

SEQ ID NO: 2950147 - DNA, 25 bp, Homo sapien
tctaaggaagtcctgacgcaggctg

SEQ ID NO: 2950148 - DNA, 25 bp, Homo sapien
tggaaacaatatggcggcagtgcag

SEQ ID NO: 2950149 - DNA, 25 bp, Homo sapien
gaggaatgacttgtcccacctgcca

SEQ ID NO: 2950150 - DNA, 25 bp, Homo sapien
gtctccaggcgtcccatgcaagact

SEQ ID NO: 2950151 - DNA, 25 bp, Homo sapien
caggcgtcccatgcaagactggatc

SEQ ID NO: 2950152 - DNA, 25 bp, Homo sapien
gcaagactggatctcgtggacctgc

SEQ ID NO: 2950153 - DNA, 25 bp, Homo sapien
gtcccatgcaagactggatctcgtg

SEQ ID NO: 2950154 - DNA, 25 bp, Homo sapien
ggagtacattcctctaaggactagg

SEQ ID NO: 2950155 - DNA, 25 bp, Homo sapien
tcccatagggccatgtcaggttgag

SEQ ID NO: 2950156 - DNA, 25 bp, Homo sapien
taagatagatggaggcaagcgcttc

SEQ ID NO: 2950157 - DNA, 25 bp, Homo sapien
cattagcaccctgtcatcagagaaa

SEQ ID NO: 2950158 - DNA, 25 bp, Homo sapien
aaatctccagacgttctagacggct

SEQ ID NO: 2950159 - DNA, 25 bp, Homo sapien
tccagacgttctagacggctgaata

SEQ ID NO: 2950160 - DNA, 25 bp, Homo sapien
cagacgttctagacggctgaatatc

SEQ ID NO: 2950161 - DNA, 25 bp, Homo sapien
tctccagacgttctagacggctgaa

SEQ ID NO: 2950162 - DNA, 25 bp, Homo sapien
ttgcatggcgccgatgctggaagtt

SEQ ID NO: 2950163 - DNA, 25 bp, Homo sapien
gcatggcgccgatgctggaagtttc

SEQ ID NO: 2950164 - DNA, 25 bp, Homo sapien
ctgctcccttgcatggcgccgatgc

SEQ ID NO: 2950165 - DNA, 25 bp, Homo sapien
gctcccttgcatggcgccgatgctg

SEQ ID NO: 2950166 - DNA, 25 bp, Homo sapien
tttcagacagactcaggcaagcagt

SEQ ID NO: 2950167 - DNA, 25 bp, Homo sapien
cacgatctgtcaagtgcaggccgac

SEQ ID NO: 2950168 - DNA, 25 bp, Homo sapien
taagaactgacggtgtgcacagcat

SEQ ID NO: 2950169 - DNA, 25 bp, Homo sapien
gttggcacagcctgaaacacttggg

SEQ ID NO: 2950170 - DNA, 25 bp, Homo sapien
aattaactagttttctgcatgcagc

SEQ ID NO: 2950171 - DNA, 25 bp, Homo sapien
tgaactcctgaacaatccactgcct

SEQ ID NO: 2950172 - DNA, 25 bp, Homo sapien
catgcagctaatgcccagtgtgtca

SEQ ID NO: 2950173 - DNA, 25 bp, Homo sapien
gagctcctcacagataggcgtcagg

SEQ ID NO: 2950174 - DNA, 25 bp, Homo sapien
tgctctgtcttttggccaaggccaa

SEQ ID NO: 2950175 - DNA, 25 bp, Homo sapien
gtgaaagaatcagcggaccctaatg

SEQ ID NO: 2950176 - DNA, 25 bp, Homo sapien
tctgactactcactaacctagctgg

SEQ ID NO: 2950177 - DNA, 25 bp, Homo sapien
cattgggtgtctcctaaaggctttc

SEQ ID NO: 2950178 - DNA, 25 bp, Homo sapien
tgaggtcatccatgccgttgtgaac

SEQ ID NO: 2950179 - DNA, 25 bp, Homo sapien
cttcaaggtcagtctctgggtcctc

SEQ ID NO: 2950180 - DNA, 25 bp, Homo sapien
gaggagttaaactgcagtgattcgt

SEQ ID NO: 2950181 - DNA, 25 bp, Homo sapien
ccattggtatggtggtgtcagagtc

SEQ ID NO: 2950182 - DNA, 25 bp, Homo sapien
tgaggctaaaacaagaggccttctc

SEQ ID NO: 2950183 - DNA, 25 bp, Homo sapien
ttgaggacacgtaatcaaaatataa

SEQ ID NO: 2950184 - DNA, 25 bp, Homo sapien
caaaatatcacaatttgaggacacg

SEQ ID NO: 2950185 - DNA, 25 bp, Homo sapien
cacagttactaaactgttggatgag

SEQ ID NO: 2950186 - DNA, 25 bp, Homo sapien
tgattggacccctcgtagtagcact

SEQ ID NO: 2950187 - DNA, 25 bp, Homo sapien
taaagcgaggtaccaaaggacagcc

SEQ ID NO: 2950188 - DNA, 25 bp, Homo sapien
gaatggtgtaggtggaaaatcccga

SEQ ID NO: 2950189 - DNA, 25 bp, Homo sapien
gaaacgtactgaagtcctgtggagc

SEQ ID NO: 2950190 - DNA, 25 bp, Homo sapien
tcttctgagtacaatgggtgggtca

SEQ ID NO: 2950191 - DNA, 25 bp, Homo sapien
tttcagaggtgaaatggtccgggcc

SEQ ID NO: 2950192 - DNA, 25 bp, Homo sapien
tcaagtccatatttacaagagggtc

SEQ ID NO: 2950193 - DNA, 25 bp, Homo sapien
gaaacaagtataagtgaatgccggg

SEQ ID NO: 2950194 - DNA, 25 bp, Homo sapien
tgtgttggacaagcccagcatgttg

SEQ ID NO: 2950195 - DNA, 25 bp, Homo sapien
gcaatgtcaaggatcttcttctgag

SEQ ID NO: 2950196 - DNA, 25 bp, Homo sapien
gatgagccgcatcactgtgttggac

SEQ ID NO: 2950197 - DNA, 25 bp, Homo sapien
tggaaagcccgcttctcgatgagcc

SEQ ID NO: 2950198 - DNA, 25 bp, Homo sapien
cgaggaacatgaccacacaggtcag

SEQ ID NO: 2950199 - DNA, 25 bp, Homo sapien
tcatgtcaggtactgcaccacgagg

SEQ ID NO: 2950200 - DNA, 25 bp, Homo sapien
ggtactgcaccacgaggaacatgac

SEQ ID NO: 2950201 - DNA, 25 bp, Homo sapien
aggaacatgaccacacaggtcagca

SEQ ID NO: 2950202 - DNA, 25 bp, Homo sapien
aaggtgtgaaccgtgtggacagtcc

SEQ ID NO: 2950203 - DNA, 25 bp, Homo sapien
gggcacgcatcagctatgtgaacaa

SEQ ID NO: 2950204 - DNA, 25 bp, Homo sapien
atttcctaagcaccgcgcatggtgg

SEQ ID NO: 2950205 - DNA, 25 bp, Homo sapien
tccaccctatcaggagccagaaagg

SEQ ID NO: 2950206 - DNA, 25 bp, Homo sapien
cacattagatggacttcaggacaga

SEQ ID NO: 2950207 - DNA, 25 bp, Homo sapien
cactacagatgtctccacggtggga

SEQ ID NO: 2950208 - DNA, 25 bp, Homo sapien
tatggattaccaaaagtcctgcgct

SEQ ID NO: 2950209 - DNA, 25 bp, Homo sapien
tcaagactgaacactcccgggaaat

SEQ ID NO: 2950210 - DNA, 25 bp, Homo sapien
cctccaaagtgtgctgtctggcagg

SEQ ID NO: 2950211 - DNA, 25 bp, Homo sapien
cctgcagaccttcctccaaagtgtg

SEQ ID NO: 2950212 - DNA, 25 bp, Homo sapien
gctgtctggcaggatccttgggtgc

SEQ ID NO: 2950213 - DNA, 25 bp, Homo sapien
gaccttcctccaaagtgtgctgtct

SEQ ID NO: 2950214 - DNA, 25 bp, Homo sapien
tattccaaactagaggactggctct

SEQ ID NO: 2950215 - DNA, 25 bp, Homo sapien
cagcatgagggttcatcaaagccaa

SEQ ID NO: 2950216 - DNA, 25 bp, Homo sapien
cactgtcaagtgtggaaagcactgg

SEQ ID NO: 2950217 - DNA, 25 bp, Homo sapien
ctggtgcacaccacgaaaagatgtc

SEQ ID NO: 2950218 - DNA, 25 bp, Homo sapien
cagccgcaggtggtaaagacccaaa

SEQ ID NO: 2950219 - DNA, 25 bp, Homo sapien
gagagagtcacactgttaggccaag

SEQ ID NO: 2950220 - DNA, 25 bp, Homo sapien
ggctggctaccggagtttcttgcat

SEQ ID NO: 2950221 - DNA, 25 bp, Homo sapien
caaagggtgtacagaactccgcagt

SEQ ID NO: 2950222 - DNA, 25 bp, Homo sapien
tcagaatcaccttagaggccaggta

SEQ ID NO: 2950223 - DNA, 25 bp, Homo sapien
ccaatgtgatcatctttgagacaga

SEQ ID NO: 2950224 - DNA, 25 bp, Homo sapien
gaatctctggcctagaaacataaaa

SEQ ID NO: 2950225 - DNA, 25 bp, Homo sapien
gagacagtggttccaaaatacacac

SEQ ID NO: 2950226 - DNA, 25 bp, Homo sapien
gaattccaatgcagagccaaggttg

SEQ ID NO: 2950227 - DNA, 25 bp, Homo sapien
tctaagtacagcaggcctaaggcag

SEQ ID NO: 2950228 - DNA, 25 bp, Homo sapien
tatactatctgaagggtctgcagca

SEQ ID NO: 2950229 - DNA, 25 bp, Homo sapien
ttaagtgggcccatggttccaagct

SEQ ID NO: 2950230 - DNA, 25 bp, Homo sapien
cccattccgcaggaagcgtgcagta

SEQ ID NO: 2950231 - DNA, 25 bp, Homo sapien
tgttctgagaagaccaagcagtcca

SEQ ID NO: 2950232 - DNA, 25 bp, Homo sapien
tctgcaagtggttcccacggtgcgg

SEQ ID NO: 2950233 - DNA, 25 bp, Homo sapien
gctggcctgtcacatcaaggtgctt

SEQ ID NO: 2950234 - DNA, 25 bp, Homo sapien
taaccagtgcaaactgcggagggct

SEQ ID NO: 2950235 - DNA, 25 bp, Homo sapien
gatgaatgtcccctcttgtactgtc

SEQ ID NO: 2950236 - DNA, 25 bp, Homo sapien
tagaccaggtagctcggcatctctg

SEQ ID NO: 2950237 - DNA, 25 bp, Homo sapien
caaaagcactacgtgactcgggcct

SEQ ID NO: 2950238 - DNA, 25 bp, Homo sapien
taggcactttacaggcatggcagta

SEQ ID NO: 2950239 - DNA, 25 bp, Homo sapien
taaagggcagagctgatcttcacac

SEQ ID NO: 2950240 - DNA, 25 bp, Homo sapien
gcttgactccaatcactaaaggtct

SEQ ID NO: 2950241 - DNA, 25 bp, Homo sapien
agacctgggtcctatgcaatgctag

SEQ ID NO: 2950242 - DNA, 25 bp, Homo sapien
tgcttgattggctttgtcttcacca

SEQ ID NO: 2950243 - DNA, 25 bp, Homo sapien
catttcccctacgaggacactgagg

SEQ ID NO: 2950244 - DNA, 25 bp, Homo sapien
tcccatttcccctacgaggacactg

SEQ ID NO: 2950245 - DNA, 25 bp, Homo sapien
aagtaggccattattagcattccca

SEQ ID NO: 2950246 - DNA, 25 bp, Homo sapien
ccaaggcccagtcccgtgactggca

SEQ ID NO: 2950247 - DNA, 25 bp, Homo sapien
ccgtcagcccctatgttttgtggtg

SEQ ID NO: 2950248 - DNA, 25 bp, Homo sapien
actgagagctattgccgtcagcccc

SEQ ID NO: 2950249 - DNA, 25 bp, Homo sapien
gggtcacgtctgttctccaaggccc

SEQ ID NO: 2950250 - DNA, 25 bp, Homo sapien
ctgtcagcattaccctggcctggga

SEQ ID NO: 2950251 - DNA, 25 bp, Homo sapien
gaagctctccaatgctaagttccgg

SEQ ID NO: 2950252 - DNA, 25 bp, Homo sapien
tctgagtgtacctgggccccagaaa

SEQ ID NO: 2950253 - DNA, 25 bp, Homo sapien
tattgcaggaaccaaatatagccac

SEQ ID NO: 2950254 - DNA, 25 bp, Homo sapien
ccctacctgcaagaaagtctagagg

SEQ ID NO: 2950255 - DNA, 25 bp, Homo sapien
tgctagatcaacaaaagtggcgtgt

SEQ ID NO: 2950256 - DNA, 25 bp, Homo sapien
gaccagaattgggtgacctgacccc

SEQ ID NO: 2950257 - DNA, 25 bp, Homo sapien
tgttggtcaggaaaccagcagtgtc

SEQ ID NO: 2950258 - DNA, 25 bp, Homo sapien
gggacttaactgatattgccatctc

SEQ ID NO: 2950259 - DNA, 25 bp, Homo sapien
ttcaggcatggctcaatccagggac

SEQ ID NO: 2950260 - DNA, 25 bp, Homo sapien
ttcttctcggatcactttattctca

SEQ ID NO: 2950261 - DNA, 25 bp, Homo sapien
tccagggacttaactgatattgcca

SEQ ID NO: 2950262 - DNA, 25 bp, Homo sapien
ccccatcaacaagtgggcgaaggat

SEQ ID NO: 2950263 - DNA, 25 bp, Homo sapien
tgaactcaaacaaatttacaagaaa

SEQ ID NO: 2950264 - DNA, 25 bp, Homo sapien
aatatcaagaatctacaatgaactc

SEQ ID NO: 2950265 - DNA, 25 bp, Homo sapien
caagtgggcgaaggatatgaacata

SEQ ID NO: 2950266 - DNA, 25 bp, Homo sapien
tagcactgattgtatcatgtctctc

SEQ ID NO: 2950267 - DNA, 25 bp, Homo sapien
ccatggagatgtctggatcattagc

SEQ ID NO: 2950268 - DNA, 25 bp, Homo sapien
tccgtttcccctgagtgctcatcct

SEQ ID NO: 2950269 - DNA, 25 bp, Homo sapien
tcctgtccgatatctggcccatttc

SEQ ID NO: 2950270 - DNA, 25 bp, Homo sapien
aatcgagatactccttcatgctgcc

SEQ ID NO: 2950271 - DNA, 25 bp, Homo sapien
tacttagagttgtgtcatcatgaac

SEQ ID NO: 2950272 - DNA, 25 bp, Homo sapien
tacctttatcctcggcaaaatcagg

SEQ ID NO: 2950273 - DNA, 25 bp, Homo sapien
catgctgccactttgtagccaaatc

SEQ ID NO: 2950274 - DNA, 25 bp, Homo sapien
acataatgcagtggttgagagtgtg

SEQ ID NO: 2950275 - DNA, 25 bp, Homo sapien
ggttgagagtgtgaagtcccttatc

SEQ ID NO: 2950276 - DNA, 25 bp, Homo sapien
ctcccacttggccacataatgcagt

SEQ ID NO: 2950277 - DNA, 25 bp, Homo sapien
aagtcccttatcaagacttccttga

SEQ ID NO: 2950278 - DNA, 25 bp, Homo sapien
cactcccttgtcaagaacatatgtt

SEQ ID NO: 2950279 - DNA, 25 bp, Homo sapien
ggcacactcccttgtcaagaacata

SEQ ID NO: 2950280 - DNA, 25 bp, Homo sapien
cacactcccttgtcaagaacatatg

SEQ ID NO: 2950281 - DNA, 25 bp, Homo sapien
ctcccttgtcaagaacatatgttct

SEQ ID NO: 2950282 - DNA, 25 bp, Homo sapien
gtgagctcttattgtgctattgcac

SEQ ID NO: 2950283 - DNA, 25 bp, Homo sapien
ccttaatcaaggtctggctgtgcca

SEQ ID NO: 2950284 - DNA, 25 bp, Homo sapien
gaacacttggctgttgcgctcctag

SEQ ID NO: 2950285 - DNA, 25 bp, Homo sapien
catggacaccaggtatctgagggcc

SEQ ID NO: 2950286 - DNA, 25 bp, Homo sapien
catggcactctgtcttgctggacaa

SEQ ID NO: 2950287 - DNA, 25 bp, Homo sapien
catcaaataattcttgcaaggcagg

SEQ ID NO: 2950288 - DNA, 25 bp, Homo sapien
ggagttcgggtccattctgggcaac

SEQ ID NO: 2950289 - DNA, 25 bp, Homo sapien
cacagctaatagttgatagaaccag

SEQ ID NO: 2950290 - DNA, 25 bp, Homo sapien
cataatggccatttagagagggctc

SEQ ID NO: 2950291 - DNA, 25 bp, Homo sapien
agctcagctgacgactgattgtggc

SEQ ID NO: 2950292 - DNA, 25 bp, Homo sapien
ctcagctgacgactgattgtggctg

SEQ ID NO: 2950293 - DNA, 25 bp, Homo sapien
tgcaaaagctcagctgacgactgat

SEQ ID NO: 2950294 - DNA, 25 bp, Homo sapien
aaagctcagctgacgactgattgtg

SEQ ID NO: 2950295 - DNA, 25 bp, Homo sapien
tgtcctctgagtcggggatagtact

SEQ ID NO: 2950296 - DNA, 25 bp, Homo sapien
ctggttccatgcgtctcagggccta

SEQ ID NO: 2950297 - DNA, 25 bp, Homo sapien
gtctcagggcctaggtcaaatcccc

SEQ ID NO: 2950298 - DNA, 25 bp, Homo sapien
ggtagctggttccatgcgtctcagg

SEQ ID NO: 2950299 - DNA, 25 bp, Homo sapien
cacttccatgttaggccagaggtca

SEQ ID NO: 2950300 - DNA, 25 bp, Homo sapien
tggccccagtcaaccgacaaaatca

SEQ ID NO: 2950301 - DNA, 25 bp, Homo sapien
tctgggtacatggattatccccact

SEQ ID NO: 2950302 - DNA, 25 bp, Homo sapien
tcgttaactattccatgacctggag

SEQ ID NO: 2950303 - DNA, 25 bp, Homo sapien
ctgggattatgcagttggttctcca

SEQ ID NO: 2950304 - DNA, 25 bp, Homo sapien
atgcagttggttctccaggtcaggt

SEQ ID NO: 2950305 - DNA, 25 bp, Homo sapien
ggattatgcagttggttctccaggt

SEQ ID NO: 2950306 - DNA, 25 bp, Homo sapien
gcagttggttctccaggtcaggtgc

SEQ ID NO: 2950307 - DNA, 25 bp, Homo sapien
tcacttccgctttttcaggccggcg

SEQ ID NO: 2950308 - DNA, 25 bp, Homo sapien
tacctcaataaatctgcctaaaatg

SEQ ID NO: 2950309 - DNA, 25 bp, Homo sapien
gatttcagctgtatactaaggctca

SEQ ID NO: 2950310 - DNA, 25 bp, Homo sapien
taaaaaggaagtcatgagtggagca

SEQ ID NO: 2950311 - DNA, 25 bp, Homo sapien
ttagaagtaaattcattgtcttaac

SEQ ID NO: 2950312 - DNA, 25 bp, Homo sapien
tagaagtaaattcattgtcttaact

SEQ ID NO: 2950313 - DNA, 25 bp, Homo sapien
atacttagaagtaaattcattgtct

SEQ ID NO: 2950314 - DNA, 25 bp, Homo sapien
acttagaagtaaattcattgtctta

SEQ ID NO: 2950315 - DNA, 25 bp, Homo sapien
caaagaataagcatcactgtttgtc

SEQ ID NO: 2950316 - DNA, 25 bp, Homo sapien
tctgagggctagacatagatacaaa

SEQ ID NO: 2950317 - DNA, 25 bp, Homo sapien
gcattcaatgaccacctcattgcca

SEQ ID NO: 2950318 - DNA, 25 bp, Homo sapien
aaattcataattctagcattcaatg

SEQ ID NO: 2950319 - DNA, 25 bp, Homo sapien
aacttcctgcatatactggtcgcac

SEQ ID NO: 2950320 - DNA, 25 bp, Homo sapien
ctggtcgcaccccacaatgagacat

SEQ ID NO: 2950321 - DNA, 25 bp, Homo sapien
cagggaaccacgactctagggaatg

SEQ ID NO: 2950322 - DNA, 25 bp, Homo sapien
cccaggctgtagcaggaaagggtta

SEQ ID NO: 2950323 - DNA, 25 bp, Homo sapien
catgtaaactccaagaaggtgcttc

SEQ ID NO: 2950324 - DNA, 25 bp, Homo sapien
atgtaaactccaagaaggtgcttca

SEQ ID NO: 2950325 - DNA, 25 bp, Homo sapien
agcatgtaaactccaagaaggtgct

SEQ ID NO: 2950326 - DNA, 25 bp, Homo sapien
gcatgtaaactccaagaaggtgctt

SEQ ID NO: 2950327 - DNA, 25 bp, Homo sapien
ctagtgccgggcactgagcggaagt

SEQ ID NO: 2950328 - DNA, 25 bp, Homo sapien
gtgccgggcactgagcggaagtcat

SEQ ID NO: 2950329 - DNA, 25 bp, Homo sapien
acacacgctagtgccgggcactgag

SEQ ID NO: 2950330 - DNA, 25 bp, Homo sapien
gacacacgctagtgccgggcactga

SEQ ID NO: 2950331 - DNA, 25 bp, Homo sapien
aagtcccacgggtctgctgggagag

SEQ ID NO: 2950332 - DNA, 25 bp, Homo sapien
cgggtctgctgggagagtaggcgca

SEQ ID NO: 2950333 - DNA, 25 bp, Homo sapien
tcccacgggtctgctgggagagtag

SEQ ID NO: 2950334 - DNA, 25 bp, Homo sapien
tctgctgggagagtaggcgcatggg

SEQ ID NO: 2950335 - DNA, 25 bp, Homo sapien
gatacggtgtatctgtactggaata

SEQ ID NO: 2950336 - DNA, 25 bp, Homo sapien
cctcatgattcggtagagttagact

SEQ ID NO: 2950337 - DNA, 25 bp, Homo sapien
gaaggtccaacttgctcagagggcc

SEQ ID NO: 2950338 - DNA, 25 bp, Homo sapien
ttccaataatctcagcaaggctcca

SEQ ID NO: 2950339 - DNA, 25 bp, Homo sapien
taatgttgggcaagtgataataagc

SEQ ID NO: 2950340 - DNA, 25 bp, Homo sapien
gttgggcaagtgataataagcttga

SEQ ID NO: 2950341 - DNA, 25 bp, Homo sapien
caagtgataataagcttgatcctca

SEQ ID NO: 2950342 - DNA, 25 bp, Homo sapien
aagtgataataagcttgatcctcac

SEQ ID NO: 2950343 - DNA, 25 bp, Homo sapien
gcctgctggtggactaaagaatttc

SEQ ID NO: 2950344 - DNA, 25 bp, Homo sapien
tagcctgctggtggactaaagaatt

SEQ ID NO: 2950345 - DNA, 25 bp, Homo sapien
cctgctggtggactaaagaatttcc

SEQ ID NO: 2950346 - DNA, 25 bp, Homo sapien
cagagggcaattgaggaaaggtgat

SEQ ID NO: 2950347 - DNA, 25 bp, Homo sapien
gggcaattgaggaaaggtgattctt

SEQ ID NO: 2950348 - DNA, 25 bp, Homo sapien
tcagttgtccatatggcttggggag

SEQ ID NO: 2950349 - DNA, 25 bp, Homo sapien
gagataaagaaggcccaggaaggcc

SEQ ID NO: 2950350 - DNA, 25 bp, Homo sapien
catacatttccatcaatgtaagaaa

SEQ ID NO: 2950351 - DNA, 25 bp, Homo sapien
cactttccatacatttccatcaatg

SEQ ID NO: 2950352 - DNA, 25 bp, Homo sapien
agtttctcggtccaactgtacactt

SEQ ID NO: 2950353 - DNA, 25 bp, Homo sapien
tgtacactttccatacatttccatc

SEQ ID NO: 2950354 - DNA, 25 bp, Homo sapien
aatactggagggatagcaggccttc

SEQ ID NO: 2950355 - DNA, 25 bp, Homo sapien
gtgtaattcagtcaagttattttct

SEQ ID NO: 2950356 - DNA, 25 bp, Homo sapien
ggccttcaaatgaatccttgtgtaa

SEQ ID NO: 2950357 - DNA, 25 bp, Homo sapien
actggagggatagcaggccttcaaa

SEQ ID NO: 2950358 - DNA, 25 bp, Homo sapien
gatggtgtaacgttgtctggctgat

SEQ ID NO: 2950359 - DNA, 25 bp, Homo sapien
tggtgtaacgttgtctggctgatgt

SEQ ID NO: 2950360 - DNA, 25 bp, Homo sapien
ctggatggtgtaacgttgtctggct

SEQ ID NO: 2950361 - DNA, 25 bp, Homo sapien
ggtgtaacgttgtctggctgatgtc

SEQ ID NO: 2950362 - DNA, 25 bp, Homo sapien
caaatgtatgtctttcaatagactg

SEQ ID NO: 2950363 - DNA, 25 bp, Homo sapien
cttcaaaaatggtagtggttcaaat

SEQ ID NO: 2950364 - DNA, 25 bp, Homo sapien
gtagtggttcaaatgtatgtctttc

SEQ ID NO: 2950365 - DNA, 25 bp, Homo sapien
tcaatagactgtattttattgcagg

SEQ ID NO: 2950366 - DNA, 25 bp, Homo sapien
ctgagttctgtaattacattgcaac

SEQ ID NO: 2950367 - DNA, 25 bp, Homo sapien
gctgagttctgtaattacattgcaa

SEQ ID NO: 2950368 - DNA, 25 bp, Homo sapien
agctgagttctgtaattacattgca

SEQ ID NO: 2950369 - DNA, 25 bp, Homo sapien
cagctacccaataattgtatgagtt

SEQ ID NO: 2950370 - DNA, 25 bp, Homo sapien
tacccagctacccaataattgtatg

SEQ ID NO: 2950371 - DNA, 25 bp, Homo sapien
ttatacccagctacccaataattgt

SEQ ID NO: 2950372 - DNA, 25 bp, Homo sapien
cccaataattgtatgagtttttgta

SEQ ID NO: 2950373 - DNA, 25 bp, Homo sapien
gcctctccgaatcagagaagaagct

SEQ ID NO: 2950374 - DNA, 25 bp, Homo sapien
taccgctatgtaaaggaagctgatg

SEQ ID NO: 2950375 - DNA, 25 bp, Homo sapien
taccaaaacatgatgacaataccct

SEQ ID NO: 2950376 - DNA, 25 bp, Homo sapien
tgccaggattccagtacataccaaa

SEQ ID NO: 2950377 - DNA, 25 bp, Homo sapien
attaaactaaggtgcactgactccc

SEQ ID NO: 2950378 - DNA, 25 bp, Homo sapien
caaagactgtctcagagtaaaagtt

SEQ ID NO: 2950379 - DNA, 25 bp, Homo sapien
taaatatgccttattagatgaggaa

SEQ ID NO: 2950380 - DNA, 25 bp, Homo sapien
tctttatgggagtaaaatgtggcaa

SEQ ID NO: 2950381 - DNA, 25 bp, Homo sapien
ctctattcctgaactgggctgggac

SEQ ID NO: 2950382 - DNA, 25 bp, Homo sapien
actcgaaggatccttcttcctttgc

SEQ ID NO: 2950383 - DNA, 25 bp, Homo sapien
tgctctattcctgaactgggctggg

SEQ ID NO: 2950384 - DNA, 25 bp, Homo sapien
gaattcctggactcgaaggatcctt

SEQ ID NO: 2950385 - DNA, 25 bp, Homo sapien
gcactgttgcaatgcagcttgactg

SEQ ID NO: 2950386 - DNA, 25 bp, Homo sapien
tgtatggtgtttgtcagacatgcac

SEQ ID NO: 2950387 - DNA, 25 bp, Homo sapien
ggcagcaggccatatggctaggtaa

SEQ ID NO: 2950388 - DNA, 25 bp, Homo sapien
agacagcctcaatgctgtttttaag

SEQ ID NO: 2950389 - DNA, 25 bp, Homo sapien
cctgactctcagcaagggagtagtt

SEQ ID NO: 2950390 - DNA, 25 bp, Homo sapien
tcagcaagggagtagttcagaaatt

SEQ ID NO: 2950391 - DNA, 25 bp, Homo sapien
cagaaattgagggagtttaactctg

SEQ ID NO: 2950392 - DNA, 25 bp, Homo sapien
caacactgactttatgtaaccaagc

SEQ ID NO: 2950393 - DNA, 25 bp, Homo sapien
tgtcaaaaaagagactgctttgctc

SEQ ID NO: 2950394 - DNA, 25 bp, Homo sapien
tcaaaaaagagactgctttgctcat

SEQ ID NO: 2950395 - DNA, 25 bp, Homo sapien
gtcaaaaaagagactgctttgctca

SEQ ID NO: 2950396 - DNA, 25 bp, Homo sapien
ctgtcaaaaaagagactgctttgct

SEQ ID NO: 2950397 - DNA, 25 bp, Homo sapien
ttctggattccctacagattcttct

SEQ ID NO: 2950398 - DNA, 25 bp, Homo sapien
ggattccctacagattcttcttcag

SEQ ID NO: 2950399 - DNA, 25 bp, Homo sapien
gaatgctccttctggattccctaca

SEQ ID NO: 2950400 - DNA, 25 bp, Homo sapien
aatgctccttctggattccctacag

SEQ ID NO: 2950401 - DNA, 25 bp, Homo sapien
gcttgtgtaattcttccgggcttgt

SEQ ID NO: 2950402 - DNA, 25 bp, Homo sapien
caacagtcagctcagtgcttgtgta

SEQ ID NO: 2950403 - DNA, 25 bp, Homo sapien
tctgagggctcctccggctcaacag

SEQ ID NO: 2950404 - DNA, 25 bp, Homo sapien
ctgagggctcctccggctcaacagt

SEQ ID NO: 2950405 - DNA, 25 bp, Homo sapien
aatatggcaaatgtaacttagtgca

SEQ ID NO: 2950406 - DNA, 25 bp, Homo sapien
gtaacttagtgcactgataacctca

SEQ ID NO: 2950407 - DNA, 25 bp, Homo sapien
agaaatatggcaaatgtaacttagt

SEQ ID NO: 2950408 - DNA, 25 bp, Homo sapien
taacttagtgcactgataacctcac

SEQ ID NO: 2950409 - DNA, 25 bp, Homo sapien
ggcagtttaatgaacggtagtaaca

SEQ ID NO: 2950410 - DNA, 25 bp, Homo sapien
ctgtggttggcagtttaatgaacgg

SEQ ID NO: 2950411 - DNA, 25 bp, Homo sapien
gttggcagtttaatgaacggtagta

SEQ ID NO: 2950412 - DNA, 25 bp, Homo sapien
tggttggcagtttaatgaacggtag

SEQ ID NO: 2950413 - DNA, 25 bp, Homo sapien
gctggaggtagaaggcgcgcccttg

SEQ ID NO: 2950414 - DNA, 25 bp, Homo sapien
tgtgaaattggtttagaagccttca

SEQ ID NO: 2950415 - DNA, 25 bp, Homo sapien
gaaattggtttagaagccttcatat

SEQ ID NO: 2950416 - DNA, 25 bp, Homo sapien
gaatgtgaaattggtttagaagcct

SEQ ID NO: 2950417 - DNA, 25 bp, Homo sapien
tctggaatgtgaaattggtttagaa

SEQ ID NO: 2950418 - DNA, 25 bp, Homo sapien
cttttgggctcgggggacaggtcag

SEQ ID NO: 2950419 - DNA, 25 bp, Homo sapien
gctcgggggacaggtcagtgcccac

SEQ ID NO: 2950420 - DNA, 25 bp, Homo sapien
ctgagcaatgggtaattgaagcttt

SEQ ID NO: 2950421 - DNA, 25 bp, Homo sapien
tgggtaattgaagcttttgggctcg

SEQ ID NO: 2950422 - DNA, 25 bp, Homo sapien
attgttggggataagggactgtagc

SEQ ID NO: 2950423 - DNA, 25 bp, Homo sapien
gaaatgagccttctcacattgttgg

SEQ ID NO: 2950424 - DNA, 25 bp, Homo sapien
tatctcagatgcctttacttcctgc

SEQ ID NO: 2950425 - DNA, 25 bp, Homo sapien
gggccccagagcagtccatcttcaa

SEQ ID NO: 2950426 - DNA, 25 bp, Homo sapien
tctcattaatgtagttctgagtctt

SEQ ID NO: 2950427 - DNA, 25 bp, Homo sapien
tgctctcattaatgtagttctgagt

SEQ ID NO: 2950428 - DNA, 25 bp, Homo sapien
ccgtgctctcattaatgtagttctg

SEQ ID NO: 2950429 - DNA, 25 bp, Homo sapien
tgggcttccgtgctctcattaatgt

SEQ ID NO: 2950430 - DNA, 25 bp, Homo sapien
ctccctttgcgaagagcatctccgt

SEQ ID NO: 2950431 - DNA, 25 bp, Homo sapien
tccctttgcgaagagcatctccgtg

SEQ ID NO: 2950432 - DNA, 25 bp, Homo sapien
ccctttgcgaagagcatctccgtgg

SEQ ID NO: 2950433 - DNA, 25 bp, Homo sapien
cacagcaatgaatcctccaatgtac

SEQ ID NO: 2950434 - DNA, 25 bp, Homo sapien
aagccagagcggctttctgaatgaa

SEQ ID NO: 2950435 - DNA, 25 bp, Homo sapien
ttaagccagagcggctttctgaatg

SEQ ID NO: 2950436 - DNA, 25 bp, Homo sapien
ctttaagccagagcggctttctgaa

SEQ ID NO: 2950437 - DNA, 25 bp, Homo sapien
gctttctgaatgaaaaaagtccatc

SEQ ID NO: 2950438 - DNA, 25 bp, Homo sapien
cagggtccctgttgaggatcttgtc

SEQ ID NO: 2950439 - DNA, 25 bp, Homo sapien
tgcgtgattctttactcttgtggca

SEQ ID NO: 2950440 - DNA, 25 bp, Homo sapien
cagcttccatgcgtgattctttact

SEQ ID NO: 2950441 - DNA, 25 bp, Homo sapien
ccatgcgtgattctttactcttgtg

SEQ ID NO: 2950442 - DNA, 25 bp, Homo sapien
cctccttctctgttggggcttcact

SEQ ID NO: 2950443 - DNA, 25 bp, Homo sapien
tccttctctgttggggcttcactgt

SEQ ID NO: 2950444 - DNA, 25 bp, Homo sapien
ctcctccttctctgttggggcttca

SEQ ID NO: 2950445 - DNA, 25 bp, Homo sapien
ccttctctgttggggcttcactgtc

SEQ ID NO: 2950446 - DNA, 25 bp, Homo sapien
gatggtattgtttatgctatgtgtt

SEQ ID NO: 2950447 - DNA, 25 bp, Homo sapien
tttctgatggtattgtttatgctat

SEQ ID NO: 2950448 - DNA, 25 bp, Homo sapien
gccccctaccaagtcgggatgaaca

SEQ ID NO: 2950449 - DNA, 25 bp, Homo sapien
ttgccatcttgtaagggtgaaaagc

SEQ ID NO: 2950450 - DNA, 25 bp, Homo sapien
agtccattttccaccactgagagca

SEQ ID NO: 2950451 - DNA, 25 bp, Homo sapien
attttccaccactgagagcatctcc

SEQ ID NO: 2950452 - DNA, 25 bp, Homo sapien
atggcagcccgggggtccagtccat

SEQ ID NO: 2950453 - DNA, 25 bp, Homo sapien
gggtccagtccattttccaccactg

SEQ ID NO: 2950454 - DNA, 25 bp, Homo sapien
gctacttctgcatgcggttgtgttc

SEQ ID NO: 2950455 - DNA, 25 bp, Homo sapien
gattctaggatccagacgccagttt

SEQ ID NO: 2950456 - DNA, 25 bp, Homo sapien
caagctgtgaagtgaatagagtccc

SEQ ID NO: 2950457 - DNA, 25 bp, Homo sapien
tgactactgctaggtgattctagga

SEQ ID NO: 2950458 - DNA, 25 bp, Homo sapien
attagggaactgtaaaatgtcttct

SEQ ID NO: 2950459 - DNA, 25 bp, Homo sapien
gaccatgtctcaatacattgtactt

SEQ ID NO: 2950460 - DNA, 25 bp, Homo sapien
agtggctcaatctcactgtgcacaa

SEQ ID NO: 2950461 - DNA, 25 bp, Homo sapien
tctcactgtgcacaaggctcactgc

SEQ ID NO: 2950462 - DNA, 25 bp, Homo sapien
ggaggcaagttctccctatggaata

SEQ ID NO: 2950463 - DNA, 25 bp, Homo sapien
caccgagggccctggaagcggcagg

SEQ ID NO: 2950464 - DNA, 25 bp, Homo sapien
accgagggccctggaagcggcaggg

SEQ ID NO: 2950465 - DNA, 25 bp, Homo sapien
tcaccgagggccctggaagcggcag

SEQ ID NO: 2950466 - DNA, 25 bp, Homo sapien
gggcaaggatgatggtgaggcagag

SEQ ID NO: 2950467 - DNA, 25 bp, Homo sapien
gggtgggagcacgagtgggcaagga

SEQ ID NO: 2950468 - DNA, 25 bp, Homo sapien
cagaggaggcggccccgagggagcg

SEQ ID NO: 2950469 - DNA, 25 bp, Homo sapien
gaggaggcggccccgagggagcgcc

SEQ ID NO: 2950470 - DNA, 25 bp, Homo sapien
atggcgctcacgatgtgcccctgaa

SEQ ID NO: 2950471 - DNA, 25 bp, Homo sapien
gggagcagccgttggctctggtgcc

SEQ ID NO: 2950472 - DNA, 25 bp, Homo sapien
agccgcgcaggaaggtccgaggctg

SEQ ID NO: 2950473 - DNA, 25 bp, Homo sapien
ttctaggcttggttgagccgcgcag

SEQ ID NO: 2950474 - DNA, 25 bp, Homo sapien
acctaaatgaagagcatctattaac

SEQ ID NO: 2950475 - DNA, 25 bp, Homo sapien
ctaaatgaagagcatctattaacaa

SEQ ID NO: 2950476 - DNA, 25 bp, Homo sapien
cctaaatgaagagcatctattaaca

SEQ ID NO: 2950477 - DNA, 25 bp, Homo sapien
actccagtaaccttctcgtctatag

SEQ ID NO: 2950478 - DNA, 25 bp, Homo sapien
tcaactccagtaaccttctcgtcta

SEQ ID NO: 2950479 - DNA, 25 bp, Homo sapien
taaccttctcgtctatagcggcctc

SEQ ID NO: 2950480 - DNA, 25 bp, Homo sapien
cagtaaccttctcgtctatagcggc

SEQ ID NO: 2950481 - DNA, 25 bp, Homo sapien
gtggtctgtaaccttcaaaagtgtc

SEQ ID NO: 2950482 - DNA, 25 bp, Homo sapien
aaaggacattactgagacagttggc

SEQ ID NO: 2950483 - DNA, 25 bp, Homo sapien
tactatgcaaactcatactgaggga

SEQ ID NO: 2950484 - DNA, 25 bp, Homo sapien
ttagaaagtacgagtaatgggctgg

SEQ ID NO: 2950485 - DNA, 25 bp, Homo sapien
tggaaatggttcttaactctgggat

SEQ ID NO: 2950486 - DNA, 25 bp, Homo sapien
gattagccagagtatagtatgagtc

SEQ ID NO: 2950487 - DNA, 25 bp, Homo sapien
aaagtttggaagtctctgattagcc

SEQ ID NO: 2950488 - DNA, 25 bp, Homo sapien
tcactgagaaatatggtgacccatt

SEQ ID NO: 2950489 - DNA, 25 bp, Homo sapien
taatgggcatattgggactcgtatg

SEQ ID NO: 2950490 - DNA, 25 bp, Homo sapien
aaaagacgttgcctataacagtgac

SEQ ID NO: 2950491 - DNA, 25 bp, Homo sapien
taacagtgacttgattgccaaggaa

SEQ ID NO: 2950492 - DNA, 25 bp, Homo sapien
tcaaatatccctccatacagtgtac

SEQ ID NO: 2950493 - DNA, 25 bp, Homo sapien
ggaggattattcagattggcaagct

SEQ ID NO: 2950494 - DNA, 25 bp, Homo sapien
taaatgtgtattgtctgttcagcta

SEQ ID NO: 2950495 - DNA, 25 bp, Homo sapien
tcccaagtctggttgatccttgtgt

SEQ ID NO: 2950496 - DNA, 25 bp, Homo sapien
tgttcagctattttgcaggagttgc

SEQ ID NO: 2950497 - DNA, 25 bp, Homo sapien
aaaatagtgctagcttttgctgacc

SEQ ID NO: 2950498 - DNA, 25 bp, Homo sapien
tatagcagttgagttgtatcattct

SEQ ID NO: 2950499 - DNA, 25 bp, Homo sapien
tgttgttaatggattatgtctcatt

SEQ ID NO: 2950500 - DNA, 25 bp, Homo sapien
tagttacattgcctgaaagatggcc

SEQ ID NO: 2950501 - DNA, 25 bp, Homo sapien
agttgatccaaattacgcttatgcc

SEQ ID NO: 2950502 - DNA, 25 bp, Homo sapien
gaactgtttcagtctgcaacgggaa

SEQ ID NO: 2950503 - DNA, 25 bp, Homo sapien
ttgcaattaaattcttccagagagc

SEQ ID NO: 2950504 - DNA, 25 bp, Homo sapien
ccagagagctatccaagttgatcca

SEQ ID NO: 2950505 - DNA, 25 bp, Homo sapien
actctacaacactttggcatcttca

SEQ ID NO: 2950506 - DNA, 25 bp, Homo sapien
aaaagacttaacagacatggataaa

SEQ ID NO: 2950507 - DNA, 25 bp, Homo sapien
tcagaggttagaaggattgagaatt

SEQ ID NO: 2950508 - DNA, 25 bp, Homo sapien
aaagaatattctcagaggttagaag

SEQ ID NO: 2950509 - DNA, 25 bp, Homo sapien
ttctcaccactacaatactggttgg

SEQ ID NO: 2950510 - DNA, 25 bp, Homo sapien
taccttctcaccactacaatactgg

SEQ ID NO: 2950511 - DNA, 25 bp, Homo sapien
tcaccactacaatactggttgggta

SEQ ID NO: 2950512 - DNA, 25 bp, Homo sapien
accactacaatactggttgggtact

SEQ ID NO: 2950513 - DNA, 25 bp, Homo sapien
aatatccacaatcacacctcagatt

SEQ ID NO: 2950514 - DNA, 25 bp, Homo sapien
aaggaggaataactcaacctaacat

SEQ ID NO: 2950515 - DNA, 25 bp, Homo sapien
tcagaagggaaaatatccacaatca

SEQ ID NO: 2950516 - DNA, 25 bp, Homo sapien
taaatgatagcctggaaattacaaa

SEQ ID NO: 2950517 - DNA, 25 bp, Homo sapien
tagtctggactaatcttgtcccacc

SEQ ID NO: 2950518 - DNA, 25 bp, Homo sapien
agtaccctttgagtactctcctcaa

SEQ ID NO: 2950519 - DNA, 25 bp, Homo sapien
ttgtccagacaaaagtagccttagt

SEQ ID NO: 2950520 - DNA, 25 bp, Homo sapien
aagttgcttggaaacagcttgatcc

SEQ ID NO: 2950521 - DNA, 25 bp, Homo sapien
tgccaaaggatcagaatgttaccaa

SEQ ID NO: 2950522 - DNA, 25 bp, Homo sapien
ggcttgccaaaggatcagaatgtta

SEQ ID NO: 2950523 - DNA, 25 bp, Homo sapien
cttgccaaaggatcagaatgttacc

SEQ ID NO: 2950524 - DNA, 25 bp, Homo sapien
gccaaaggatcagaatgttaccaaa

SEQ ID NO: 2950525 - DNA, 25 bp, Homo sapien
taatgcctatgtagtgaagcctccg

SEQ ID NO: 2950526 - DNA, 25 bp, Homo sapien
tgataagattatcaccaacagccaa

SEQ ID NO: 2950527 - DNA, 25 bp, Homo sapien
gaggagctgaagattaagtttcacc

SEQ ID NO: 2950528 - DNA, 25 bp, Homo sapien
cgaattgactggtagctggcatccc

SEQ ID NO: 2950529 - DNA, 25 bp, Homo sapien
gcgaacatgagtaagcaaagacata

SEQ ID NO: 2950530 - DNA, 25 bp, Homo sapien
tctaaagaactaggatagcatctgt

SEQ ID NO: 2950531 - DNA, 25 bp, Homo sapien
caggtgtaacggtggtatgtttatc

SEQ ID NO: 2950532 - DNA, 25 bp, Homo sapien
gaacaagtaactctgcccatgggaa

SEQ ID NO: 2950533 - DNA, 25 bp, Homo sapien
tccatacaagtatgttttatagttt

SEQ ID NO: 2950534 - DNA, 25 bp, Homo sapien
cagaaaagccatgatgatattgtta

SEQ ID NO: 2950535 - DNA, 25 bp, Homo sapien
ttgaggccatgtgaactatgattgt

SEQ ID NO: 2950536 - DNA, 25 bp, Homo sapien
taatgaagaatatgtttacatgaac

SEQ ID NO: 2950537 - DNA, 25 bp, Homo sapien
gctgatgcaagaggctcacctgagt

SEQ ID NO: 2950538 - DNA, 25 bp, Homo sapien
tctccatagttagatgcactttggt

SEQ ID NO: 2950539 - DNA, 25 bp, Homo sapien
gagctgcagacacgtgtcactacac

SEQ ID NO: 2950540 - DNA, 25 bp, Homo sapien
ggagctgcagacacgtgtcactaca

SEQ ID NO: 2950541 - DNA, 25 bp, Homo sapien
tggagctgcagacacgtgtcactac

SEQ ID NO: 2950542 - DNA, 25 bp, Homo sapien
tttactggcaacctgttattaccgc

SEQ ID NO: 2950543 - DNA, 25 bp, Homo sapien
ggcaacctgttattaccgctcagga

SEQ ID NO: 2950544 - DNA, 25 bp, Homo sapien
tgttattaccgctcaggaaaggcat

SEQ ID NO: 2950545 - DNA, 25 bp, Homo sapien
ctcaggaaaggcatataaagcatat

SEQ ID NO: 2950546 - DNA, 25 bp, Homo sapien
gaagaggcgtctatctggtttaaaa

SEQ ID NO: 2950547 - DNA, 25 bp, Homo sapien
tctggaggatgcaaggttaaacccc

SEQ ID NO: 2950548 - DNA, 25 bp, Homo sapien
tgcctggcccagataatcaatttga

SEQ ID NO: 2950549 - DNA, 25 bp, Homo sapien
tatcaaggctaggtaaagaacagtc

SEQ ID NO: 2950550 - DNA, 25 bp, Homo sapien
tatccagaattctactaaagatgtg

SEQ ID NO: 2950551 - DNA, 25 bp, Homo sapien
gcccaaactcacagaaatatatgcg

SEQ ID NO: 2950552 - DNA, 25 bp, Homo sapien
tctaattgttgtaaggatctgttcc

SEQ ID NO: 2950553 - DNA, 25 bp, Homo sapien
cattttgaggcctttattgatccaa

SEQ ID NO: 2950554 - DNA, 25 bp, Homo sapien
tttgagggtcctagcccagagttca

SEQ ID NO: 2950555 - DNA, 25 bp, Homo sapien
taagtaattgctacctatggaactc

SEQ ID NO: 2950556 - DNA, 25 bp, Homo sapien
cttgtgtcaacatgtattcctaggt

SEQ ID NO: 2950557 - DNA, 25 bp, Homo sapien
tgggttttacatcccacactgcaaa

SEQ ID NO: 2950558 - DNA, 25 bp, Homo sapien
aaattgacatcacagtccactagtg

SEQ ID NO: 2950559 - DNA, 25 bp, Homo sapien
ccactagtgagttgagatttgctgt

SEQ ID NO: 2950560 - DNA, 25 bp, Homo sapien
tgttttaacgtaggctgataaccac

SEQ ID NO: 2950561 - DNA, 25 bp, Homo sapien
gagaacacgagatctcacaatgttg

SEQ ID NO: 2950562 - DNA, 25 bp, Homo sapien
cgagatgcggttttcctcgcagaac

SEQ ID NO: 2950563 - DNA, 25 bp, Homo sapien
tgcggttttcctcgcagaacgcctt

SEQ ID NO: 2950564 - DNA, 25 bp, Homo sapien
tcgcagaacgcctttatgcagaagg

SEQ ID NO: 2950565 - DNA, 25 bp, Homo sapien
tatgcagaaggtttgaaatctattc

SEQ ID NO: 2950566 - DNA, 25 bp, Homo sapien
tactcatttgcattccaatatgctt

SEQ ID NO: 2950567 - DNA, 25 bp, Homo sapien
actcatttgcattccaatatgcttc

SEQ ID NO: 2950568 - DNA, 25 bp, Homo sapien
ttactcatttgcattccaatatgct

SEQ ID NO: 2950569 - DNA, 25 bp, Homo sapien
tgtctgtaagttgtattagtttttc

SEQ ID NO: 2950570 - DNA, 25 bp, Homo sapien
gtattagtttttctagagctatttc

SEQ ID NO: 2950571 - DNA, 25 bp, Homo sapien
ctgtctgtaagttgtattagttttt

SEQ ID NO: 2950572 - DNA, 25 bp, Homo sapien
ttagtttttctagagctatttccat

SEQ ID NO: 2950573 - DNA, 25 bp, Homo sapien
gtgaatttcccaccggacaatgatg

SEQ ID NO: 2950574 - DNA, 25 bp, Homo sapien
caccagggtatgctttgacgcacag

SEQ ID NO: 2950575 - DNA, 25 bp, Homo sapien
tatcccacgtttcctttctcggtga

SEQ ID NO: 2950576 - DNA, 25 bp, Homo sapien
tgctgaggcgcaagcaccaatacca

SEQ ID NO: 2950577 - DNA, 25 bp, Homo sapien
cgtgagcggcttcggcgaaaataac

SEQ ID NO: 2950578 - DNA, 25 bp, Homo sapien
attacttcacccttagcgtgagcgg

SEQ ID NO: 2950579 - DNA, 25 bp, Homo sapien
tcacccttagcgtgagcggcttcgg

SEQ ID NO: 2950580 - DNA, 25 bp, Homo sapien
ccgagccaacgtccggccagccttt

SEQ ID NO: 2950581 - DNA, 25 bp, Homo sapien
tccaggtaatgataaccttcttctc

SEQ ID NO: 2950582 - DNA, 25 bp, Homo sapien
aggtaatgataaccttcttctctgg

SEQ ID NO: 2950583 - DNA, 25 bp, Homo sapien
cccgtccaggtaatgataaccttct

SEQ ID NO: 2950584 - DNA, 25 bp, Homo sapien
cgtccaggtaatgataaccttcttc

SEQ ID NO: 2950585 - DNA, 25 bp, Homo sapien
ggcctgagcctcgaggatgacggtg

SEQ ID NO: 2950586 - DNA, 25 bp, Homo sapien
gggcctgagcctcgaggatgacggt

SEQ ID NO: 2950587 - DNA, 25 bp, Homo sapien
taacggtcgctggtgagtttaaatg

SEQ ID NO: 2950588 - DNA, 25 bp, Homo sapien
aacggtcgctggtgagtttaaatga

SEQ ID NO: 2950589 - DNA, 25 bp, Homo sapien
tcgctggtgagtttaaatgagcagg

SEQ ID NO: 2950590 - DNA, 25 bp, Homo sapien
cggtcgctggtgagtttaaatgagc

SEQ ID NO: 2950591 - DNA, 25 bp, Homo sapien
gaagcactcggcaatcgctcggcct

SEQ ID NO: 2950592 - DNA, 25 bp, Homo sapien
tctccacttcgggtattcccgtgtc

SEQ ID NO: 2950593 - DNA, 25 bp, Homo sapien
gtattcccgtgtcccgctcggaagc

SEQ ID NO: 2950594 - DNA, 25 bp, Homo sapien
tctggttcccgctcggctttctcca

SEQ ID NO: 2950595 - DNA, 25 bp, Homo sapien
tccggcaacggttttctctctcgtc

SEQ ID NO: 2950596 - DNA, 25 bp, Homo sapien
caacggttttctctctcgtcgacca

SEQ ID NO: 2950597 - DNA, 25 bp, Homo sapien
cggtagcttccggtaatcttcgaca

SEQ ID NO: 2950598 - DNA, 25 bp, Homo sapien
gcttccggtaatcttcgacaatttc

SEQ ID NO: 2950599 - DNA, 25 bp, Homo sapien
tggcgtagcccaaccctgggacggc

SEQ ID NO: 2950600 - DNA, 25 bp, Homo sapien
ggacggccgattgggcgtggtgtgc

SEQ ID NO: 2950601 - DNA, 25 bp, Homo sapien
cagatttggcgtagcccaaccctgg

SEQ ID NO: 2950602 - DNA, 25 bp, Homo sapien
tgtgcgtggctgaaggcgtggctga

SEQ ID NO: 2950603 - DNA, 25 bp, Homo sapien
gatatgctaacagctacaaggaact

SEQ ID NO: 2950604 - DNA, 25 bp, Homo sapien
tcacactgagttatgaccgacctga

SEQ ID NO: 2950605 - DNA, 25 bp, Homo sapien
gttatgaccgacctgagactagaat

SEQ ID NO: 2950606 - DNA, 25 bp, Homo sapien
tcccagatatgctaacagctacaag

SEQ ID NO: 2950607 - DNA, 25 bp, Homo sapien
cttctcaaatatgccggagcagcca

SEQ ID NO: 2950608 - DNA, 25 bp, Homo sapien
ttctcaaatatgccggagcagccag

SEQ ID NO: 2950609 - DNA, 25 bp, Homo sapien
tctcaaatatgccggagcagccaga

SEQ ID NO: 2950610 - DNA, 25 bp, Homo sapien
tcccttcttgccaattggtggaaac

SEQ ID NO: 2950611 - DNA, 25 bp, Homo sapien
tcttgccaattggtggaaacccaga

SEQ ID NO: 2950612 - DNA, 25 bp, Homo sapien
aggctgatcccttcttgccaattgg

SEQ ID NO: 2950613 - DNA, 25 bp, Homo sapien
ctaggacaggctgatcccttcttgc

SEQ ID NO: 2950614 - DNA, 25 bp, Homo sapien
gagacgtggcgtctgggagatgaga

SEQ ID NO: 2950615 - DNA, 25 bp, Homo sapien
gagagacgtggcgtctgggagatga

SEQ ID NO: 2950616 - DNA, 25 bp, Homo sapien
aagaaaccgagagacgtggcgtctg

SEQ ID NO: 2950617 - DNA, 25 bp, Homo sapien
agaagaaaccgagagacgtggcgtc

SEQ ID NO: 2950618 - DNA, 25 bp, Homo sapien
ttgttgggatctttggcagaggagt

SEQ ID NO: 2950619 - DNA, 25 bp, Homo sapien
gttgtcttgttgggatctttggcag

SEQ ID NO: 2950620 - DNA, 25 bp, Homo sapien
tgtcttgttgggatctttggcagag

SEQ ID NO: 2950621 - DNA, 25 bp, Homo sapien
tcttgttgggatctttggcagagga

SEQ ID NO: 2950622 - DNA, 25 bp, Homo sapien
ttcttaggctcaggcttcttgggag

SEQ ID NO: 2950623 - DNA, 25 bp, Homo sapien
ccttcttaggctcaggcttcttggg

SEQ ID NO: 2950624 - DNA, 25 bp, Homo sapien
gcctccttcttaggctcaggcttct

SEQ ID NO: 2950625 - DNA, 25 bp, Homo sapien
ggctgcctccttcttaggctcaggc

SEQ ID NO: 2950626 - DNA, 25 bp, Homo sapien
ctttacactcttggggtcaaaggca

SEQ ID NO: 2950627 - DNA, 25 bp, Homo sapien
cactcttggggtcaaaggcaggttc

SEQ ID NO: 2950628 - DNA, 25 bp, Homo sapien
ttacactcttggggtcaaaggcagg

SEQ ID NO: 2950629 - DNA, 25 bp, Homo sapien
tacactcttggggtcaaaggcaggt

SEQ ID NO: 2950630 - DNA, 25 bp, Homo sapien
ccagcttcctgacccggttggagag

SEQ ID NO: 2950631 - DNA, 25 bp, Homo sapien
ggccagtcctctgcatgctacagat

SEQ ID NO: 2950632 - DNA, 25 bp, Homo sapien
cacagaaggaaaggcccgtctgggt

SEQ ID NO: 2950633 - DNA, 25 bp, Homo sapien
taggaacccaggctaaggccacaga

SEQ ID NO: 2950634 - DNA, 25 bp, Homo sapien
tcaatctggtcggcagtgaagtcta

SEQ ID NO: 2950635 - DNA, 25 bp, Homo sapien
caatctggtcggcagtgaagtctat

SEQ ID NO: 2950636 - DNA, 25 bp, Homo sapien
cttcaatctggtcggcagtgaagtc

SEQ ID NO: 2950637 - DNA, 25 bp, Homo sapien
ttcaatctggtcggcagtgaagtct

SEQ ID NO: 2950638 - DNA, 25 bp, Homo sapien
agtgtggtcacctgcttactagagc

SEQ ID NO: 2950639 - DNA, 25 bp, Homo sapien
gagaagcaagccaagggttagaagc

SEQ ID NO: 2950640 - DNA, 25 bp, Homo sapien
cacaaaagaaattgggaggccaggc

SEQ ID NO: 2950641 - DNA, 25 bp, Homo sapien
caatgagtccagtggtagtaacccc

SEQ ID NO: 2950642 - DNA, 25 bp, Homo sapien
caccacgccaggctaattatgtatt

SEQ ID NO: 2950643 - DNA, 25 bp, Homo sapien
gattacaggcattacaggcatgcgc

SEQ ID NO: 2950644 - DNA, 25 bp, Homo sapien
ggattacaggcattacaggcatgcg

SEQ ID NO: 2950645 - DNA, 25 bp, Homo sapien
taggattacaggcattacaggcatg

SEQ ID NO: 2950646 - DNA, 25 bp, Homo sapien
tgcagcaagaccaaaggaaggcact

SEQ ID NO: 2950647 - DNA, 25 bp, Homo sapien
catggactcgcatacagccttgggc

SEQ ID NO: 2950648 - DNA, 25 bp, Homo sapien
tgcaggtgggatcacaaagcacgcc

SEQ ID NO: 2950649 - DNA, 25 bp, Homo sapien
cagcatatggtaagggaatcgacaa

SEQ ID NO: 2950650 - DNA, 25 bp, Homo sapien
gtacatccccgcactggccgtaggt

SEQ ID NO: 2950651 - DNA, 25 bp, Homo sapien
cttcaggcttgggcttgcccagcac

SEQ ID NO: 2950652 - DNA, 25 bp, Homo sapien
ggtgatcttcatctctccagtcggg

SEQ ID NO: 2950653 - DNA, 25 bp, Homo sapien
gcagcacctcggcattggtagggtt

SEQ ID NO: 2950654 - DNA, 25 bp, Homo sapien
aggtctgccatgcagccgcactgac

SEQ ID NO: 2950655 - DNA, 25 bp, Homo sapien
caaggacgtgccgaagctcagcacc

SEQ ID NO: 2950656 - DNA, 25 bp, Homo sapien
aatgtgctgcaggatgggcaagaac

SEQ ID NO: 2950657 - DNA, 25 bp, Homo sapien
ccagggtggcaaggacgtgccgaag

SEQ ID NO: 2950658 - DNA, 25 bp, Homo sapien
ccctgctccttgttgcgggaaatgt

SEQ ID NO: 2950659 - DNA, 25 bp, Homo sapien
ccagctaacagctgctccacttcag

SEQ ID NO: 2950660 - DNA, 25 bp, Homo sapien
tccacttcagcctcagtcatcttct

SEQ ID NO: 2950661 - DNA, 25 bp, Homo sapien
atcctcttgcccagctaacagctgc

SEQ ID NO: 2950662 - DNA, 25 bp, Homo sapien
gatgcagccattggcatcctcttgc

SEQ ID NO: 2950663 - DNA, 25 bp, Homo sapien
tgggatgcaaggcgcggcttaatac

SEQ ID NO: 2950664 - DNA, 25 bp, Homo sapien
catccctggctgccctgggatgcaa

SEQ ID NO: 2950665 - DNA, 25 bp, Homo sapien
cctgggatgcaaggcgcggcttaat

SEQ ID NO: 2950666 - DNA, 25 bp, Homo sapien
tccctggctgccctgggatgcaagg

SEQ ID NO: 2950667 - DNA, 25 bp, Homo sapien
caccctgacatgatgtgcttgacaa

SEQ ID NO: 2950668 - DNA, 25 bp, Homo sapien
tcaccctgacatgatgtgcttgaca

SEQ ID NO: 2950669 - DNA, 25 bp, Homo sapien
cctgacatgatgtgcttgacaaagg

SEQ ID NO: 2950670 - DNA, 25 bp, Homo sapien
ccctgacatgatgtgcttgacaaag

SEQ ID NO: 2950671 - DNA, 25 bp, Homo sapien
tctagggcacatggtgttattctta

SEQ ID NO: 2950672 - DNA, 25 bp, Homo sapien
attcttaaggccctatgtgaccccg

SEQ ID NO: 2950673 - DNA, 25 bp, Homo sapien
tatgtgaccccggaagggaccagga

SEQ ID NO: 2950674 - DNA, 25 bp, Homo sapien
ctgatagggtcaagacagggtgaac

SEQ ID NO: 2950675 - DNA, 25 bp, Homo sapien
gagggaagggcattgccttgagaga

SEQ ID NO: 2950676 - DNA, 25 bp, Homo sapien
agggaagggcattgccttgagagat

SEQ ID NO: 2950677 - DNA, 25 bp, Homo sapien
gggaagggcattgccttgagagatc

SEQ ID NO: 2950678 - DNA, 25 bp, Homo sapien
tgagggaagggcattgccttgagag

SEQ ID NO: 2950679 - DNA, 25 bp, Homo sapien
agaagtgaggaagaacggggtcaag

SEQ ID NO: 2950680 - DNA, 25 bp, Homo sapien
gaagtgaggaagaacggggtcaaga

SEQ ID NO: 2950681 - DNA, 25 bp, Homo sapien
agaacggggtcaagagcacaggcca

SEQ ID NO: 2950682 - DNA, 25 bp, Homo sapien
aggaagaacggggtcaagagcacag

SEQ ID NO: 2950683 - DNA, 25 bp, Homo sapien
ggaaagggcatttcaccctcctaga

SEQ ID NO: 2950684 - DNA, 25 bp, Homo sapien
tcaccctcctagacccagcccctta

SEQ ID NO: 2950685 - DNA, 25 bp, Homo sapien
gcatttcaccctcctagacccagcc

SEQ ID NO: 2950686 - DNA, 25 bp, Homo sapien
tggtatggctaaagccaagggccag

SEQ ID NO: 2950687 - DNA, 25 bp, Homo sapien
gtatggctaaagccaagggccaggc

SEQ ID NO: 2950688 - DNA, 25 bp, Homo sapien
cctggtatggctaaagccaagggcc

SEQ ID NO: 2950689 - DNA, 25 bp, Homo sapien
atggctaaagccaagggccaggcac

SEQ ID NO: 2950690 - DNA, 25 bp, Homo sapien
ggtgataagtcgaggactccatctc

SEQ ID NO: 2950691 - DNA, 25 bp, Homo sapien
tagagctgtttattaacagggaggg

SEQ ID NO: 2950692 - DNA, 25 bp, Homo sapien
cagggagggcctgtaaggtccttgg

SEQ ID NO: 2950693 - DNA, 25 bp, Homo sapien
cagtggtgtggtgataagtcgagga

SEQ ID NO: 2950694 - DNA, 25 bp, Homo sapien
aagtggataatcttcaaggccttca

SEQ ID NO: 2950695 - DNA, 25 bp, Homo sapien
gaagtggataatcttcaaggccttc

SEQ ID NO: 2950696 - DNA, 25 bp, Homo sapien
tggaagtggataatcttcaaggcct

SEQ ID NO: 2950697 - DNA, 25 bp, Homo sapien
aagtggaagtggataatcttcaagg

SEQ ID NO: 2950698 - DNA, 25 bp, Homo sapien
ctctccgcggggtagtagaggctct

SEQ ID NO: 2950699 - DNA, 25 bp, Homo sapien
gcggggtagtagaggctctggcctc

SEQ ID NO: 2950700 - DNA, 25 bp, Homo sapien
tttctctccgcggggtagtagaggc

SEQ ID NO: 2950701 - DNA, 25 bp, Homo sapien
tccgcggggtagtagaggctctggc

SEQ ID NO: 2950702 - DNA, 25 bp, Homo sapien
caagggctgctctatttccaggtcc

SEQ ID NO: 2950703 - DNA, 25 bp, Homo sapien
atttccaggtcctgaccacttcctg

SEQ ID NO: 2950704 - DNA, 25 bp, Homo sapien
cccaagggctgctctatttccaggt

SEQ ID NO: 2950705 - DNA, 25 bp, Homo sapien
cacccccaagggctgctctatttcc

SEQ ID NO: 2950706 - DNA, 25 bp, Homo sapien
gaccacatcccaagcttgcgtaagc

SEQ ID NO: 2950707 - DNA, 25 bp, Homo sapien
cccaagcttgcgtaagcagtgatag

SEQ ID NO: 2950708 - DNA, 25 bp, Homo sapien
cttgcgtaagcagtgataggtccat

SEQ ID NO: 2950709 - DNA, 25 bp, Homo sapien
catcccaagcttgcgtaagcagtga

SEQ ID NO: 2950710 - DNA, 25 bp, Homo sapien
cccagcgccagcacagtcgcccaga

SEQ ID NO: 2950711 - DNA, 25 bp, Homo sapien
tcctacgccaacgcccgccagcgcc

SEQ ID NO: 2950712 - DNA, 25 bp, Homo sapien
agcgccagcacagtcgcccagagcg

SEQ ID NO: 2950713 - DNA, 25 bp, Homo sapien
ctcctacgccaacgcccgccagcgc

SEQ ID NO: 2950714 - DNA, 25 bp, Homo sapien
caaggatcccaccggcccaagggag

SEQ ID NO: 2950715 - DNA, 25 bp, Homo sapien
caattgccctgacggctgacggtgt

SEQ ID NO: 2950716 - DNA, 25 bp, Homo sapien
ccagtaccaaagaggccgaatgcca

SEQ ID NO: 2950717 - DNA, 25 bp, Homo sapien
tgacggtgtgcgcagcagccagaga

SEQ ID NO: 2950718 - DNA, 25 bp, Homo sapien
ctcaggaagggccaaggttcaggaa

SEQ ID NO: 2950719 - DNA, 25 bp, Homo sapien
aaggtcccactcaggaagggccaag

SEQ ID NO: 2950720 - DNA, 25 bp, Homo sapien
cctgagctccatcaggcacaatgaa

SEQ ID NO: 2950721 - DNA, 25 bp, Homo sapien
caggcacaatgaaggtcccactcag

SEQ ID NO: 2950722 - DNA, 25 bp, Homo sapien
ctctgtgctctgagcaaaaagctcc

SEQ ID NO: 2950723 - DNA, 25 bp, Homo sapien
ctgagcaaaaagctccagtaagcat

SEQ ID NO: 2950724 - DNA, 25 bp, Homo sapien
tctgtgctctgagcaaaaagctcca

SEQ ID NO: 2950725 - DNA, 25 bp, Homo sapien
gctctgagcaaaaagctccagtaag

SEQ ID NO: 2950726 - DNA, 25 bp, Homo sapien
aacaataccaatgatttctgtctgg

SEQ ID NO: 2950727 - DNA, 25 bp, Homo sapien
taacagtacccatttcaggacctta

SEQ ID NO: 2950728 - DNA, 25 bp, Homo sapien
tgaactactcctaacgtcttactgg

SEQ ID NO: 2950729 - DNA, 25 bp, Homo sapien
ggttcattgccttgcagaatattaa

SEQ ID NO: 2950730 - DNA, 25 bp, Homo sapien
aggagctcacacctcgcgtggtaca

SEQ ID NO: 2950731 - DNA, 25 bp, Homo sapien
gagctcacacctcgcgtggtacaga

SEQ ID NO: 2950732 - DNA, 25 bp, Homo sapien
cctcgcgtggtacagatgttgggcc

SEQ ID NO: 2950733 - DNA, 25 bp, Homo sapien
tcacacctcgcgtggtacagatgtt

SEQ ID NO: 2950734 - DNA, 25 bp, Homo sapien
tcatgggctgaagccttccccacgt

SEQ ID NO: 2950735 - DNA, 25 bp, Homo sapien
agtccgatccccctttcatgggctg

SEQ ID NO: 2950736 - DNA, 25 bp, Homo sapien
gaagtaagtagagtttctggaagcc

SEQ ID NO: 2950737 - DNA, 25 bp, Homo sapien
tgaggactaccctggcccaggcaag

SEQ ID NO: 2950738 - DNA, 25 bp, Homo sapien
gattctccttcaggtcacagcgagg

SEQ ID NO: 2950739 - DNA, 25 bp, Homo sapien
tgtcctctagtactcgggcctcact

SEQ ID NO: 2950740 - DNA, 25 bp, Homo sapien
ctcactcactgggaactcgatggat

SEQ ID NO: 2950741 - DNA, 25 bp, Homo sapien
ccggagccggagtgcaatcctctgg

SEQ ID NO: 2950742 - DNA, 25 bp, Homo sapien
tggatggagaaattcttcgaatcat

SEQ ID NO: 2950743 - DNA, 25 bp, Homo sapien
ttggatggagaaattcttcgaatca

SEQ ID NO: 2950744 - DNA, 25 bp, Homo sapien
caggttctggatgctccacagatca

SEQ ID NO: 2950745 - DNA, 25 bp, Homo sapien
catgtatggtgacacaggcttgtcc

SEQ ID NO: 2950746 - DNA, 25 bp, Homo sapien
tgagctttcgcatctgggtggccag

SEQ ID NO: 2950747 - DNA, 25 bp, Homo sapien
caagtagtagatgtccacagggtaa

SEQ ID NO: 2950748 - DNA, 25 bp, Homo sapien
tcagttagcgtcagcacgtgtttgt

SEQ ID NO: 2950749 - DNA, 25 bp, Homo sapien
ttagcgtcagcacgtgtttgtagcc

SEQ ID NO: 2950750 - DNA, 25 bp, Homo sapien
gcgtcagcacgtgtttgtagccaaa

SEQ ID NO: 2950751 - DNA, 25 bp, Homo sapien
cgtcagcacgtgtttgtagccaaac

SEQ ID NO: 2950752 - DNA, 25 bp, Homo sapien
tctcggttccgtgacacactctgct

SEQ ID NO: 2950753 - DNA, 25 bp, Homo sapien
atctcggttccgtgacacactctgc

SEQ ID NO: 2950754 - DNA, 25 bp, Homo sapien
gcatcagtggtaaacaccagcaagt

SEQ ID NO: 2950755 - DNA, 25 bp, Homo sapien
ccagccttccgtccaatgctatatg

SEQ ID NO: 2950756 - DNA, 25 bp, Homo sapien
caatgctatatgagtcttggcatca

SEQ ID NO: 2950757 - DNA, 25 bp, Homo sapien
tgggatgcatcattcctccagccaa

SEQ ID NO: 2950758 - DNA, 25 bp, Homo sapien
gtttttctgggatagcttctcagtc

SEQ ID NO: 2950759 - DNA, 25 bp, Homo sapien
gattgactacattttcagtcactgc

SEQ ID NO: 2950760 - DNA, 25 bp, Homo sapien
tcatcagccccaaagagggataatc

SEQ ID NO: 2950761 - DNA, 25 bp, Homo sapien
agatcaaattgatgtttttctggga

SEQ ID NO: 2950762 - DNA, 25 bp, Homo sapien
agctggtggtctccaaaagccctcc

SEQ ID NO: 2950763 - DNA, 25 bp, Homo sapien
caaaggaagctggtggtctccaaaa

SEQ ID NO: 2950764 - DNA, 25 bp, Homo sapien
gccctccccaaatcccactgagagt

SEQ ID NO: 2950765 - DNA, 25 bp, Homo sapien
aagccctccccaaatcccactgaga

SEQ ID NO: 2950766 - DNA, 25 bp, Homo sapien
atggacagaaccccaactgtggtcc

SEQ ID NO: 2950767 - DNA, 25 bp, Homo sapien
ccatggacagaaccccaactgtggt

SEQ ID NO: 2950768 - DNA, 25 bp, Homo sapien
catggacagaaccccaactgtggtc

SEQ ID NO: 2950769 - DNA, 25 bp, Homo sapien
tggacagaaccccaactgtggtccc

SEQ ID NO: 2950770 - DNA, 25 bp, Homo sapien
cataagcatcaacaatgagctggag

SEQ ID NO: 2950771 - DNA, 25 bp, Homo sapien
cccataagcatcaacaatgagctgg

SEQ ID NO: 2950772 - DNA, 25 bp, Homo sapien
taagcatcaacaatgagctggagga

SEQ ID NO: 2950773 - DNA, 25 bp, Homo sapien
catcaacaatgagctggaggacatt

SEQ ID NO: 2950774 - DNA, 25 bp, Homo sapien
caggtggcattgaaggatagagaca

SEQ ID NO: 2950775 - DNA, 25 bp, Homo sapien
tccaatcttgagtcccatacaagac

SEQ ID NO: 2950776 - DNA, 25 bp, Homo sapien
tgacctcattgttgaggcaggtggc

SEQ ID NO: 2950777 - DNA, 25 bp, Homo sapien
actcttcagggaggtcacgcacttc

SEQ ID NO: 2950778 - DNA, 25 bp, Homo sapien
ccacagatgctccaggacaaaggcc

SEQ ID NO: 2950779 - DNA, 25 bp, Homo sapien
cagaaatggcttacgcaacagaagc

SEQ ID NO: 2950780 - DNA, 25 bp, Homo sapien
cctcagaggaaaagattggtggatc

SEQ ID NO: 2950781 - DNA, 25 bp, Homo sapien
aattcctgagagtgaagttcacgta

SEQ ID NO: 2950782 - DNA, 25 bp, Homo sapien
gcaggcacagtcacaatcaaaggtg

SEQ ID NO: 2950783 - DNA, 25 bp, Homo sapien
tcaaaggtgacctggacgatcaggc

SEQ ID NO: 2950784 - DNA, 25 bp, Homo sapien
ccttggcctcaatgctgaagctcac

SEQ ID NO: 2950785 - DNA, 25 bp, Homo sapien
cacaggagaagtcgtcacactcgca

SEQ ID NO: 2950786 - DNA, 25 bp, Homo sapien
cctatgtttccagtggttgcaggta

SEQ ID NO: 2950787 - DNA, 25 bp, Homo sapien
cacctatgtttccagtggttgcagg

SEQ ID NO: 2950788 - DNA, 25 bp, Homo sapien
tgtttccagtggttgcaggtatatg

SEQ ID NO: 2950789 - DNA, 25 bp, Homo sapien
ttccagtggttgcaggtatatgagg

SEQ ID NO: 2950790 - DNA, 25 bp, Homo sapien
caggaaggtggacccgctggcgaga

SEQ ID NO: 2950791 - DNA, 25 bp, Homo sapien
gcccaggaaggtggacccgctggcg

SEQ ID NO: 2950792 - DNA, 25 bp, Homo sapien
aggtggacccgctggcgagagctcc

SEQ ID NO: 2950793 - DNA, 25 bp, Homo sapien
aaggtggacccgctggcgagagctc

SEQ ID NO: 2950794 - DNA, 25 bp, Homo sapien
agccggtccagtcggagtcacacag

SEQ ID NO: 2950795 - DNA, 25 bp, Homo sapien
tacagttgcagtagtagccggtcca

SEQ ID NO: 2950796 - DNA, 25 bp, Homo sapien
gcagcccattgctggacatgcaggt

SEQ ID NO: 2950797 - DNA, 25 bp, Homo sapien
catgcaggtgtcagtacgcgtggta

SEQ ID NO: 2950798 - DNA, 25 bp, Homo sapien
gccacattcacacttgccgcggccg

SEQ ID NO: 2950799 - DNA, 25 bp, Homo sapien
ggagcccggctggatacagacacag

SEQ ID NO: 2950800 - DNA, 25 bp, Homo sapien
gacacagctgccacattcacacttg

SEQ ID NO: 2950801 - DNA, 25 bp, Homo sapien
cacaggtgtccccataggagcccgg

SEQ ID NO: 2950802 - DNA, 25 bp, Homo sapien
tctcgtcacggcagtaacggttgca

SEQ ID NO: 2950803 - DNA, 25 bp, Homo sapien
tattttcgtcatgtagggctccccg

SEQ ID NO: 2950804 - DNA, 25 bp, Homo sapien
gctctttcactgactcaatctcgtc

SEQ ID NO: 2950805 - DNA, 25 bp, Homo sapien
ggtcaaacttcttacactccacaca

SEQ ID NO: 2950806 - DNA, 25 bp, Homo sapien
gaatctgacgacacagtcatcctca

SEQ ID NO: 2950807 - DNA, 25 bp, Homo sapien
ggactttccactagaatcttcatag

SEQ ID NO: 2950808 - DNA, 25 bp, Homo sapien
cttcatagtactggaatctgacgac

SEQ ID NO: 2950809 - DNA, 25 bp, Homo sapien
accacatacaggatggactttccac

SEQ ID NO: 2950810 - DNA, 25 bp, Homo sapien
gcgaattcttttcggtcgtggatgg

SEQ ID NO: 2950811 - DNA, 25 bp, Homo sapien
tgagcagggcggcaaggccaatgag

SEQ ID NO: 2950812 - DNA, 25 bp, Homo sapien
ttgctctggcgcgttcttcctcaaa

SEQ ID NO: 2950813 - DNA, 25 bp, Homo sapien
ttcttcctcaaatttagcgaattct

SEQ ID NO: 2950814 - DNA, 25 bp, Homo sapien
cctgccactatttctaagaggctga

SEQ ID NO: 2950815 - DNA, 25 bp, Homo sapien
gagatggaatgacatcctgccacta

SEQ ID NO: 2950816 - DNA, 25 bp, Homo sapien
ggctgaacatgaccacccaaagcat

SEQ ID NO: 2950817 - DNA, 25 bp, Homo sapien
gaaagacgatggtactggctgaaca

SEQ ID NO: 2950818 - DNA, 25 bp, Homo sapien
ttggtgaaggtagacgtggcctctt

SEQ ID NO: 2950819 - DNA, 25 bp, Homo sapien
taagtgccccggtacgtgatattgg

SEQ ID NO: 2950820 - DNA, 25 bp, Homo sapien
ccccggtacgtgatattggtgaagg

SEQ ID NO: 2950821 - DNA, 25 bp, Homo sapien
cctctttatacagtgggttgttggc

SEQ ID NO: 2950822 - DNA, 25 bp, Homo sapien
ggagctcagcttatcaggacacatc

SEQ ID NO: 2950823 - DNA, 25 bp, Homo sapien
taccatagctgctgagagtcaggcc

SEQ ID NO: 2950824 - DNA, 25 bp, Homo sapien
tcccttgcgagagaaccatagctgg

SEQ ID NO: 2950825 - DNA, 25 bp, Homo sapien
cagggactcctgcaatcgtggcaca

SEQ ID NO: 2950826 - DNA, 25 bp, Homo sapien
taaatacaatcagccccatggatgg

SEQ ID NO: 2950827 - DNA, 25 bp, Homo sapien
catttggtcatgagagacatcccca

SEQ ID NO: 2950828 - DNA, 25 bp, Homo sapien
tatttagctgtaacactgaggccag

SEQ ID NO: 2950829 - DNA, 25 bp, Homo sapien
tgaatgcagctacaggttatcccca

SEQ ID NO: 2950830 - DNA, 25 bp, Homo sapien
tcatcttctgagtatgtcaggcaag

SEQ ID NO: 2950831 - DNA, 25 bp, Homo sapien
gtacttcagtcccacactgttggtg

SEQ ID NO: 2950832 - DNA, 25 bp, Homo sapien
gatacccaagatcatttaacctgga

SEQ ID NO: 2950833 - DNA, 25 bp, Homo sapien
ggtcatgagtgaaagcaagataccc

SEQ ID NO: 2950834 - DNA, 25 bp, Homo sapien
tggactaccgaagccaagcgttaaa

SEQ ID NO: 2950835 - DNA, 25 bp, Homo sapien
taaaaggtctcagtctatgttcacg

SEQ ID NO: 2950836 - DNA, 25 bp, Homo sapien
aaatggcttatttgcagagcatacg

SEQ ID NO: 2950837 - DNA, 25 bp, Homo sapien
gcaatctgcttgtaattggtcccag

SEQ ID NO: 2950838 - DNA, 25 bp, Homo sapien
tcaggaaaggcaaagtccagcacac

SEQ ID NO: 2950839 - DNA, 25 bp, Homo sapien
ggagaaaacatactgggcacaatca

SEQ ID NO: 2950840 - DNA, 25 bp, Homo sapien
tgtgcccaactaaacagcagaagtt

SEQ ID NO: 2950841 - DNA, 25 bp, Homo sapien
cattggccaccaaagcgatatttac

SEQ ID NO: 2950842 - DNA, 25 bp, Homo sapien
tttttagccttcaaccgactacagc

SEQ ID NO: 2950843 - DNA, 25 bp, Homo sapien
taactctgcattcccgcctgcaaga

SEQ ID NO: 2950844 - DNA, 25 bp, Homo sapien
ggccaacagtttgactccaacctca

SEQ ID NO: 2950845 - DNA, 25 bp, Homo sapien
cacatattgagctatgagggctact

SEQ ID NO: 2950846 - DNA, 25 bp, Homo sapien
gatttagtgggctacttctaatgaa

SEQ ID NO: 2950847 - DNA, 25 bp, Homo sapien
cccgctgggagaaactagctgacat

SEQ ID NO: 2950848 - DNA, 25 bp, Homo sapien
tccaggatgattgcctcatctaaag

SEQ ID NO: 2950849 - DNA, 25 bp, Homo sapien
gctgacatgtcatgcagacactcaa

SEQ ID NO: 2950850 - DNA, 25 bp, Homo sapien
ggaattacacccaagaagtctcatc

SEQ ID NO: 2950851 - DNA, 25 bp, Homo sapien
ccatggcttttgtctcctggactaa

SEQ ID NO: 2950852 - DNA, 25 bp, Homo sapien
tcccaggctttgagtgtagaactgc

SEQ ID NO: 2950853 - DNA, 25 bp, Homo sapien
catcttccctggacttacgtagagg

SEQ ID NO: 2950854 - DNA, 25 bp, Homo sapien
gactctctagtatgttctattggcc

SEQ ID NO: 2950855 - DNA, 25 bp, Homo sapien
catggatatatggtttcccaacagt

SEQ ID NO: 2950856 - DNA, 25 bp, Homo sapien
gagtgttcttggctccttatcaaaa

SEQ ID NO: 2950857 - DNA, 25 bp, Homo sapien
tagtagttccagtcttacaggtaag

SEQ ID NO: 2950858 - DNA, 25 bp, Homo sapien
cagttactcaatatatgcccagaaa

SEQ ID NO: 2950859 - DNA, 25 bp, Homo sapien
tttcagttactcaatatatgcccag

SEQ ID NO: 2950860 - DNA, 25 bp, Homo sapien
tatatgcccagaaatagcatcgctg

SEQ ID NO: 2950861 - DNA, 25 bp, Homo sapien
cagaaatagcatcgctggatcatat

SEQ ID NO: 2950862 - DNA, 25 bp, Homo sapien
cattatctcagcgattgtgcataat

SEQ ID NO: 2950863 - DNA, 25 bp, Homo sapien
attccattatctcagcgattgtgca

SEQ ID NO: 2950864 - DNA, 25 bp, Homo sapien
tgattccattatctcagcgattgtg

SEQ ID NO: 2950865 - DNA, 25 bp, Homo sapien
tccattatctcagcgattgtgcata

SEQ ID NO: 2950866 - DNA, 25 bp, Homo sapien
actcttagcagttttgagatatacg

SEQ ID NO: 2950867 - DNA, 25 bp, Homo sapien
tacaatatggaacgactaagtcaag

SEQ ID NO: 2950868 - DNA, 25 bp, Homo sapien
tatccattgcatatgttgattcatg

SEQ ID NO: 2950869 - DNA, 25 bp, Homo sapien
ttagtatgtcctccaagttgattca

SEQ ID NO: 2950870 - DNA, 25 bp, Homo sapien
ggcaaaatacttaacgctccctgag

SEQ ID NO: 2950871 - DNA, 25 bp, Homo sapien
tactcaataatggacagcagctcga

SEQ ID NO: 2950872 - DNA, 25 bp, Homo sapien
taatcgctgttcattctccggtgcg

SEQ ID NO: 2950873 - DNA, 25 bp, Homo sapien
ccatgtgtcccacggctttgctgaa

SEQ ID NO: 2950874 - DNA, 25 bp, Homo sapien
cctatcggctgtcgagccggtgctg

SEQ ID NO: 2950875 - DNA, 25 bp, Homo sapien
gggcccaggaccctatcggctgtcg

SEQ ID NO: 2950876 - DNA, 25 bp, Homo sapien
ggaccctatcggctgtcgagccggt

SEQ ID NO: 2950877 - DNA, 25 bp, Homo sapien
ggagcggctgaactcaataccgcct

SEQ ID NO: 2950878 - DNA, 25 bp, Homo sapien
agcccctgccgcccctcgggcggcg

SEQ ID NO: 2950879 - DNA, 25 bp, Homo sapien
ccttcctctcggctggaggcccccg

SEQ ID NO: 2950880 - DNA, 25 bp, Homo sapien
ccctgccgcccctcgggcggcgctg

SEQ ID NO: 2950881 - DNA, 25 bp, Homo sapien
tcccttcctctcggctggaggcccc

SEQ ID NO: 2950882 - DNA, 25 bp, Homo sapien
cctgctcttacgaagccaacgactt

SEQ ID NO: 2950883 - DNA, 25 bp, Homo sapien
aggcttcccatagaccctgctctta

SEQ ID NO: 2950884 - DNA, 25 bp, Homo sapien
caagaacccacgctgaggaggcttc

SEQ ID NO: 2950885 - DNA, 25 bp, Homo sapien
cttccaagaacccacgctgaggagg

SEQ ID NO: 2950886 - DNA, 25 bp, Homo sapien
tatttcaatcctgtcttctatcggt

SEQ ID NO: 2950887 - DNA, 25 bp, Homo sapien
gagaaatggagggagtcgtatccct

SEQ ID NO: 2950888 - DNA, 25 bp, Homo sapien
gaacttgcaggaacaaatcaagaga

SEQ ID NO: 2950889 - DNA, 25 bp, Homo sapien
tagaaagtctattccctgtaactct

SEQ ID NO: 2950890 - DNA, 25 bp, Homo sapien
gcagagttgacacgttttgaataaa

SEQ ID NO: 2950891 - DNA, 25 bp, Homo sapien
tctgtaatttattgacgagattatc

SEQ ID NO: 2950892 - DNA, 25 bp, Homo sapien
tttgctggatgaatcaggtaccgca

SEQ ID NO: 2950893 - DNA, 25 bp, Homo sapien
tcttgaaaggaacaattgttctgta

SEQ ID NO: 2950894 - DNA, 25 bp, Homo sapien
gggactggtaacttatcattcttaa

SEQ ID NO: 2950895 - DNA, 25 bp, Homo sapien
tatagctcctataccaactatagcc

SEQ ID NO: 2950896 - DNA, 25 bp, Homo sapien
actactgtgcatagcacttactgcc

SEQ ID NO: 2950897 - DNA, 25 bp, Homo sapien
ccaactatagcctaaatttataaag

SEQ ID NO: 2950898 - DNA, 25 bp, Homo sapien
acacagatatgtgggcaaacactag

SEQ ID NO: 2950899 - DNA, 25 bp, Homo sapien
tatttacctacctgaagttatctct

SEQ ID NO: 2950900 - DNA, 25 bp, Homo sapien
gggtatgatacacaacatttcacca

SEQ ID NO: 2950901 - DNA, 25 bp, Homo sapien
gaaatcatacgcttgtttagaacac

SEQ ID NO: 2950902 - DNA, 25 bp, Homo sapien
acaagtatgaatgagcaatagtaca

SEQ ID NO: 2950903 - DNA, 25 bp, Homo sapien
tttctgtttagaggtaaattctgtc

SEQ ID NO: 2950904 - DNA, 25 bp, Homo sapien
ctttctgtttagaggtaaattctgt

SEQ ID NO: 2950905 - DNA, 25 bp, Homo sapien
ttgatgaacaagtatgaatgagcaa

SEQ ID NO: 2950906 - DNA, 25 bp, Homo sapien
ggcagaataaatgtactttagtttc

SEQ ID NO: 2950907 - DNA, 25 bp, Homo sapien
tggcagaataaatgtactttagttt

SEQ ID NO: 2950908 - DNA, 25 bp, Homo sapien
ctggcagaataaatgtactttagtt

SEQ ID NO: 2950909 - DNA, 25 bp, Homo sapien
tggttctttccagcgtctctctata

SEQ ID NO: 2950910 - DNA, 25 bp, Homo sapien
taaagtctctgcttactaagtccag

SEQ ID NO: 2950911 - DNA, 25 bp, Homo sapien
cttgagacacctacagatcttacgg

SEQ ID NO: 2950912 - DNA, 25 bp, Homo sapien
gatcttacggtcacagcattctttc

SEQ ID NO: 2950913 - DNA, 25 bp, Homo sapien
gtttcaaaaaggcaatttgatttgc

SEQ ID NO: 2950914 - DNA, 25 bp, Homo sapien
tgtttcaaaaaggcaatttgatttg

SEQ ID NO: 2950915 - DNA, 25 bp, Homo sapien
agttgtttcaaaaaggcaatttgat

SEQ ID NO: 2950916 - DNA, 25 bp, Homo sapien
tttcaaaaaggcaatttgatttgct

SEQ ID NO: 2950917 - DNA, 25 bp, Homo sapien
ggggaatataagagccacaatcaag

SEQ ID NO: 2950918 - DNA, 25 bp, Homo sapien
gggaatataagagccacaatcaagc

SEQ ID NO: 2950919 - DNA, 25 bp, Homo sapien
ggaatataagagccacaatcaagca

SEQ ID NO: 2950920 - DNA, 25 bp, Homo sapien
gaatataagagccacaatcaagcat

SEQ ID NO: 2950921 - DNA, 25 bp, Homo sapien
tggttaatagttcctgatgacaagt

SEQ ID NO: 2950922 - DNA, 25 bp, Homo sapien
ttgtggttaatagttcctgatgaca

SEQ ID NO: 2950923 - DNA, 25 bp, Homo sapien
cttctctattgttttagaaaacttg

SEQ ID NO: 2950924 - DNA, 25 bp, Homo sapien
gacaagtcagttgcaaaagaattag

SEQ ID NO: 2950925 - DNA, 25 bp, Homo sapien
tgttccaggcttactttacatttcc

SEQ ID NO: 2950926 - DNA, 25 bp, Homo sapien
taggctcttgagtccttctgatgaa

SEQ ID NO: 2950927 - DNA, 25 bp, Homo sapien
tatctccggaagacaagatgttcca

SEQ ID NO: 2950928 - DNA, 25 bp, Homo sapien
aaggtgggagactcttccagtaggc

SEQ ID NO: 2950929 - DNA, 25 bp, Homo sapien
ctcagttcttttactgtgctgttgt

SEQ ID NO: 2950930 - DNA, 25 bp, Homo sapien
ttcttctccacaaaagattattgat

SEQ ID NO: 2950931 - DNA, 25 bp, Homo sapien
gctgttgtacttgtaaactctttct

SEQ ID NO: 2950932 - DNA, 25 bp, Homo sapien
tcttctccacaaaagattattgatg

SEQ ID NO: 2950933 - DNA, 25 bp, Homo sapien
tggtgcctgaggtgagtgacactgg

SEQ ID NO: 2950934 - DNA, 25 bp, Homo sapien
gtgagtgacactggtaattcagcat

SEQ ID NO: 2950935 - DNA, 25 bp, Homo sapien
tttgacagcttcagaaaaggaggga

SEQ ID NO: 2950936 - DNA, 25 bp, Homo sapien
cttctcctttgacagcttcagaaaa

SEQ ID NO: 2950937 - DNA, 25 bp, Homo sapien
gacagcttcagaaaaggagggataa

SEQ ID NO: 2950938 - DNA, 25 bp, Homo sapien
ttctcctttgacagcttcagaaaag

SEQ ID NO: 2950939 - DNA, 25 bp, Homo sapien
aacgctgtactgattcggcaacttg

SEQ ID NO: 2950940 - DNA, 25 bp, Homo sapien
gctgtactgattcggcaacttgcat

SEQ ID NO: 2950941 - DNA, 25 bp, Homo sapien
tgtgaacgctgtactgattcggcaa

SEQ ID NO: 2950942 - DNA, 25 bp, Homo sapien
cagaagatgtacaaagaggtgatga

SEQ ID NO: 2950943 - DNA, 25 bp, Homo sapien
tacaagatccttatacagatgtgga

SEQ ID NO: 2950944 - DNA, 25 bp, Homo sapien
taagcatgttaggtcaatcggactc

SEQ ID NO: 2950945 - DNA, 25 bp, Homo sapien
catgacctactatccttcgactgtg

SEQ ID NO: 2950946 - DNA, 25 bp, Homo sapien
tctgcaaatagtgcccatgacctac

SEQ ID NO: 2950947 - DNA, 25 bp, Homo sapien
catgtagaggttagacagcatttcc

SEQ ID NO: 2950948 - DNA, 25 bp, Homo sapien
tccatgggttacttcatcatataat

SEQ ID NO: 2950949 - DNA, 25 bp, Homo sapien
taattcttttgagtgtaaatatcca

SEQ ID NO: 2950950 - DNA, 25 bp, Homo sapien
tcatcatataatgtcatgtagaggt

SEQ ID NO: 2950951 - DNA, 25 bp, Homo sapien
gggcacataggcaaaggcttccaca

SEQ ID NO: 2950952 - DNA, 25 bp, Homo sapien
ccaactggtgctaagggcagctgag

SEQ ID NO: 2950953 - DNA, 25 bp, Homo sapien
ccatcagtgttggtcaggagaatca

SEQ ID NO: 2950954 - DNA, 25 bp, Homo sapien
aactcctgtcgcgaaatcctgggct

SEQ ID NO: 2950955 - DNA, 25 bp, Homo sapien
aaaattttacaggctttatgaagtg

SEQ ID NO: 2950956 - DNA, 25 bp, Homo sapien
agtctttagtgcctgtcgcatttct

SEQ ID NO: 2950957 - DNA, 25 bp, Homo sapien
gaaattctcaagatgcaaaggatca

SEQ ID NO: 2950958 - DNA, 25 bp, Homo sapien
cataaatcttaccacttcgaatttt

SEQ ID NO: 2950959 - DNA, 25 bp, Homo sapien
gtgcctgtcgcatttctaaatcact

SEQ ID NO: 2950960 - DNA, 25 bp, Homo sapien
taacaacttgagagtgggttctcct

SEQ ID NO: 2950961 - DNA, 25 bp, Homo sapien
taaaggcgatcaattcaagggtggc

SEQ ID NO: 2950962 - DNA, 25 bp, Homo sapien
gaccatgcgtggaacaataatgaga

SEQ ID NO: 2950963 - DNA, 25 bp, Homo sapien
gaatatgccataatccagtctagta

SEQ ID NO: 2950964 - DNA, 25 bp, Homo sapien
tccaaaacagcaaacacgtcatcag

SEQ ID NO: 2950965 - DNA, 25 bp, Homo sapien
gaaaatcttcaaggcatcctggaat

SEQ ID NO: 2950966 - DNA, 25 bp, Homo sapien
tcacggtttatagggatacccatgc

SEQ ID NO: 2950967 - DNA, 25 bp, Homo sapien
tgaaactcgaccaccttttatccta

SEQ ID NO: 2950968 - DNA, 25 bp, Homo sapien
tgtcaatataggtatgttttgtcac

SEQ ID NO: 2950969 - DNA, 25 bp, Homo sapien
taaacagtgtcaatggcaaaaggta

SEQ ID NO: 2950970 - DNA, 25 bp, Homo sapien
tagactatttcttactatagacacc

SEQ ID NO: 2950971 - DNA, 25 bp, Homo sapien
tcacaaaattgatatccggaaaaaa

SEQ ID NO: 2950972 - DNA, 25 bp, Homo sapien
ctataacaattttagaaacctctca

SEQ ID NO: 2950973 - DNA, 25 bp, Homo sapien
cagtcaggccctccgtcaggccctc

SEQ ID NO: 2950974 - DNA, 25 bp, Homo sapien
tcagtcaggccctccgtcaggccct

SEQ ID NO: 2950975 - DNA, 25 bp, Homo sapien
tccaaatatataccctcatcctggg

SEQ ID NO: 2950976 - DNA, 25 bp, Homo sapien
caaatatataccctcatcctgggcc

SEQ ID NO: 2950977 - DNA, 25 bp, Homo sapien
ctccaaatatataccctcatcctgg

SEQ ID NO: 2950978 - DNA, 25 bp, Homo sapien
aatatataccctcatcctgggccat

SEQ ID NO: 2950979 - DNA, 25 bp, Homo sapien
ctgagtttaaggtcattagtgttca

SEQ ID NO: 2950980 - DNA, 25 bp, Homo sapien
ttagtgttcataatgctctgatagc

SEQ ID NO: 2950981 - DNA, 25 bp, Homo sapien
tgttcataatgctctgatagccaag

SEQ ID NO: 2950982 - DNA, 25 bp, Homo sapien
aaggtcattagtgttcataatgctc

SEQ ID NO: 2950983 - DNA, 25 bp, Homo sapien
agaaacgtagtgggtgttcttgctc

SEQ ID NO: 2950984 - DNA, 25 bp, Homo sapien
cagaaacgtagtgggtgttcttgct

SEQ ID NO: 2950985 - DNA, 25 bp, Homo sapien
agtacttctcgagggacaggttcca

SEQ ID NO: 2950986 - DNA, 25 bp, Homo sapien
gcccaccagctagaacaactgtgac

SEQ ID NO: 2950987 - DNA, 25 bp, Homo sapien
gatatgcaacgagtctagtcccctg

SEQ ID NO: 2950988 - DNA, 25 bp, Homo sapien
ctggagctgatctagcttccctgca

SEQ ID NO: 2950989 - DNA, 25 bp, Homo sapien
actaatacactgtcaacacaataga

SEQ ID NO: 2950990 - DNA, 25 bp, Homo sapien
gagcctgacaaagaccaccattctc

SEQ ID NO: 2950991 - DNA, 25 bp, Homo sapien
caatatgccaggctgcaagagcctg

SEQ ID NO: 2950992 - DNA, 25 bp, Homo sapien
ggctgcaagagcctgacaaagacca

SEQ ID NO: 2950993 - DNA, 25 bp, Homo sapien
ctggaagatgatagccattttcatc

SEQ ID NO: 2950994 - DNA, 25 bp, Homo sapien
ggaagatgatagccattttcatcta

SEQ ID NO: 2950995 - DNA, 25 bp, Homo sapien
gccattttcatctataaagtgaccc

SEQ ID NO: 2950996 - DNA, 25 bp, Homo sapien
tagccattttcatctataaagtgac

SEQ ID NO: 2950997 - DNA, 25 bp, Homo sapien
tattccttcctcagcattagagata

SEQ ID NO: 2950998 - DNA, 25 bp, Homo sapien
tcctcagcattagagataagaggag

SEQ ID NO: 2950999 - DNA, 25 bp, Homo sapien
ccttcctcagcattagagataagag

SEQ ID NO: 2951000 - DNA, 25 bp, Homo sapien
ctcagcattagagataagaggagag

SEQ ID NO: 2951001 - DNA, 25 bp, Homo sapien
tgtccagcactcttataacttccca

SEQ ID NO: 2951002 - DNA, 25 bp, Homo sapien
tcaattgtgcacagaggtagaaaat

SEQ ID NO: 2951003 - DNA, 25 bp, Homo sapien
gaggatgtgttcagatgcagtcacc

SEQ ID NO: 2951004 - DNA, 25 bp, Homo sapien
ggtagaaaatgctttgcccaatagt

SEQ ID NO: 2951005 - DNA, 25 bp, Homo sapien
aaatataatatccccaatatccacc

SEQ ID NO: 2951006 - DNA, 25 bp, Homo sapien
taaatataatatccccaatatccac

SEQ ID NO: 2951007 - DNA, 25 bp, Homo sapien
aatataatatccccaatatccacca

SEQ ID NO: 2951008 - DNA, 25 bp, Homo sapien
atataatatccccaatatccaccat

SEQ ID NO: 2951009 - DNA, 25 bp, Homo sapien
ctttttggatattgaaggttcaggg

SEQ ID NO: 2951010 - DNA, 25 bp, Homo sapien
acacttgataactttctgtctgaag

SEQ ID NO: 2951011 - DNA, 25 bp, Homo sapien
tatattttagatagcatcctgctac

SEQ ID NO: 2951012 - DNA, 25 bp, Homo sapien
gtaatttcattcaaaggtgatcctt

SEQ ID NO: 2951013 - DNA, 25 bp, Homo sapien
ttgtactactcttcaagctttgtgg

SEQ ID NO: 2951014 - DNA, 25 bp, Homo sapien
tgaatatggttcttggactcctaca

SEQ ID NO: 2951015 - DNA, 25 bp, Homo sapien
tatccagagacttactgaggcttgt

SEQ ID NO: 2951016 - DNA, 25 bp, Homo sapien
aatgctttcttacagctggcttctg

SEQ ID NO: 2951017 - DNA, 25 bp, Homo sapien
tagtgtctgtcacaatcttctggaa

SEQ ID NO: 2951018 - DNA, 25 bp, Homo sapien
tcctgttgaaggcaaaatagactga

SEQ ID NO: 2951019 - DNA, 25 bp, Homo sapien
tttctactagtgtctgtcacaatct

SEQ ID NO: 2951020 - DNA, 25 bp, Homo sapien
tgttgaaggcaaaatagactgaagt

SEQ ID NO: 2951021 - DNA, 25 bp, Homo sapien
aaaacttcgctccttggcgagagca

SEQ ID NO: 2951022 - DNA, 25 bp, Homo sapien
gctccttggcgagagcatttacaaa

SEQ ID NO: 2951023 - DNA, 25 bp, Homo sapien
catttacaaagtcatctaactccac

SEQ ID NO: 2951024 - DNA, 25 bp, Homo sapien
attcaggaaaacttcgctccttggc

SEQ ID NO: 2951025 - DNA, 25 bp, Homo sapien
cttcttaaattctggcttagaaagg

SEQ ID NO: 2951026 - DNA, 25 bp, Homo sapien
ttctgtgatcttcttaaattctggc

SEQ ID NO: 2951027 - DNA, 25 bp, Homo sapien
ttgaagacaagtatttagatcctca

SEQ ID NO: 2951028 - DNA, 25 bp, Homo sapien
caaaattttgaagacaagtatttag

SEQ ID NO: 2951029 - DNA, 25 bp, Homo sapien
gctcatcatagtatcaatgaattct

SEQ ID NO: 2951030 - DNA, 25 bp, Homo sapien
ttttcagagaagcattccgtgttgc

SEQ ID NO: 2951031 - DNA, 25 bp, Homo sapien
attccgtgttgctcatcatagtatc

SEQ ID NO: 2951032 - DNA, 25 bp, Homo sapien
aatttttcagagaagcattccgtgt

SEQ ID NO: 2951033 - DNA, 25 bp, Homo sapien
tccaatgcagctagaaattcatcct

SEQ ID NO: 2951034 - DNA, 25 bp, Homo sapien
tcgagggtttcaatagcatcaggca

SEQ ID NO: 2951035 - DNA, 25 bp, Homo sapien
tcaactgtcactagttccaatgcag

SEQ ID NO: 2951036 - DNA, 25 bp, Homo sapien
tctcctttctgagatcgtcgagggt

SEQ ID NO: 2951037 - DNA, 25 bp, Homo sapien
tattgaatagccaaacaatctgaac

SEQ ID NO: 2951038 - DNA, 25 bp, Homo sapien
ggcatttcaatcatattcgaacact

SEQ ID NO: 2951039 - DNA, 25 bp, Homo sapien
agtaacataccacacaacttgaagg

SEQ ID NO: 2951040 - DNA, 25 bp, Homo sapien
ctaatcatgccctctgtgttcattg

SEQ ID NO: 2951041 - DNA, 25 bp, Homo sapien
tcacagatcaacaggataagaattt

SEQ ID NO: 2951042 - DNA, 25 bp, Homo sapien
acagatcaacaggataagaattttt

SEQ ID NO: 2951043 - DNA, 25 bp, Homo sapien
ggtcacagatcaacaggataagaat

SEQ ID NO: 2951044 - DNA, 25 bp, Homo sapien
cagatcaacaggataagaatttttc

SEQ ID NO: 2951045 - DNA, 25 bp, Homo sapien
taacctggcagcatcacgcatattc

SEQ ID NO: 2951046 - DNA, 25 bp, Homo sapien
cctggcagcatcacgcatattcctt

SEQ ID NO: 2951047 - DNA, 25 bp, Homo sapien
ttctaacctggcagcatcacgcata

SEQ ID NO: 2951048 - DNA, 25 bp, Homo sapien
agcatcacgcatattccttactact

SEQ ID NO: 2951049 - DNA, 25 bp, Homo sapien
tcttagaaagtcttccaagttcttc

SEQ ID NO: 2951050 - DNA, 25 bp, Homo sapien
tctttaggtgacttaatcccaacat

SEQ ID NO: 2951051 - DNA, 25 bp, Homo sapien
aagttcttcccagctatcatgtcac

SEQ ID NO: 2951052 - DNA, 25 bp, Homo sapien
caaaatctgattgaagaattttctc

SEQ ID NO: 2951053 - DNA, 25 bp, Homo sapien
tggaaaatttctgggtgtccctcaa

SEQ ID NO: 2951054 - DNA, 25 bp, Homo sapien
gtctttaatgttcaccatgttatct

SEQ ID NO: 2951055 - DNA, 25 bp, Homo sapien
tacagtctttaatgttcaccatgtt

SEQ ID NO: 2951056 - DNA, 25 bp, Homo sapien
ttctgggtgtccctcaaagccctca

SEQ ID NO: 2951057 - DNA, 25 bp, Homo sapien
aagcctatcagtgttttcaagtaca

SEQ ID NO: 2951058 - DNA, 25 bp, Homo sapien
cattacttcttgaagtatgtcatca

SEQ ID NO: 2951059 - DNA, 25 bp, Homo sapien
tcttcaacaaaggagtcatccatta

SEQ ID NO: 2951060 - DNA, 25 bp, Homo sapien
ggagtccaatgtattgatagtctca

SEQ ID NO: 2951061 - DNA, 25 bp, Homo sapien
gcagtttctaatgtcacagatgctt

SEQ ID NO: 2951062 - DNA, 25 bp, Homo sapien
cttccaccaactccttaaatgtggc

SEQ ID NO: 2951063 - DNA, 25 bp, Homo sapien
caccaactccttaaatgtggcagtt

SEQ ID NO: 2951064 - DNA, 25 bp, Homo sapien
aatgtggcagtttctaatgtcacag

SEQ ID NO: 2951065 - DNA, 25 bp, Homo sapien
taattttagatttgaagcctctttc

SEQ ID NO: 2951066 - DNA, 25 bp, Homo sapien
ttttagatttgaagcctctttcctg

SEQ ID NO: 2951067 - DNA, 25 bp, Homo sapien
ttggtaattttagatttgaagcctc

SEQ ID NO: 2951068 - DNA, 25 bp, Homo sapien
agatttgaagcctctttcctgaaat

SEQ ID NO: 2951069 - DNA, 25 bp, Homo sapien
tttcaaggcatgctccaaatcaggt

SEQ ID NO: 2951070 - DNA, 25 bp, Homo sapien
gaagtcctcctcagttaaattaaca

SEQ ID NO: 2951071 - DNA, 25 bp, Homo sapien
ttgccattatcgacatgtgacaaga

SEQ ID NO: 2951072 - DNA, 25 bp, Homo sapien
gacgttacaacagttaagggcttca

SEQ ID NO: 2951073 - DNA, 25 bp, Homo sapien
tggacttttggaaatgtggactttc

SEQ ID NO: 2951074 - DNA, 25 bp, Homo sapien
tcttttaaatccacctccatattat

SEQ ID NO: 2951075 - DNA, 25 bp, Homo sapien
gaaatgtggactttctttcattttc

SEQ ID NO: 2951076 - DNA, 25 bp, Homo sapien
gaaatcttttaaatccacctccata

SEQ ID NO: 2951077 - DNA, 25 bp, Homo sapien
tctagccattctcttgaacaagaag

SEQ ID NO: 2951078 - DNA, 25 bp, Homo sapien
cattctcttgaacaagaagtattca

SEQ ID NO: 2951079 - DNA, 25 bp, Homo sapien
tcttgaacaagaagtattcacttac

SEQ ID NO: 2951080 - DNA, 25 bp, Homo sapien
tttctagccattctcttgaacaaga

SEQ ID NO: 2951081 - DNA, 25 bp, Homo sapien
gagttaatatacaccacaccagagg

SEQ ID NO: 2951082 - DNA, 25 bp, Homo sapien
gaaaagccaataacgtcagacaaga

SEQ ID NO: 2951083 - DNA, 25 bp, Homo sapien
tagacaatcgggtagaagagttcca

SEQ ID NO: 2951084 - DNA, 25 bp, Homo sapien
gacccttcaatgatatggacactga

SEQ ID NO: 2951085 - DNA, 25 bp, Homo sapien
tgcaattatctacctgataaaggtc

SEQ ID NO: 2951086 - DNA, 25 bp, Homo sapien
ggtgtaaaccttcaggagtttgcat

SEQ ID NO: 2951087 - DNA, 25 bp, Homo sapien
caaataacagagctaaaactagaag

SEQ ID NO: 2951088 - DNA, 25 bp, Homo sapien
ccttcaggagtttgcattatcttta

SEQ ID NO: 2951089 - DNA, 25 bp, Homo sapien
aatgtataacttttcactggtggct

SEQ ID NO: 2951090 - DNA, 25 bp, Homo sapien
tgtgtttatcctatggccccacaaa

SEQ ID NO: 2951091 - DNA, 25 bp, Homo sapien
tctggcattcatcagagatggacca

SEQ ID NO: 2951092 - DNA, 25 bp, Homo sapien
tgaactaagctaggctcctccaatg

SEQ ID NO: 2951093 - DNA, 25 bp, Homo sapien
cctcacctcccacacggggtcgcgg

SEQ ID NO: 2951094 - DNA, 25 bp, Homo sapien
tcctcacctcccacacggggtcgcg

SEQ ID NO: 2951095 - DNA, 25 bp, Homo sapien
tcacctcccacacggggtcgcggcc

SEQ ID NO: 2951096 - DNA, 25 bp, Homo sapien
gctcctcacctcccacacggggtcg

SEQ ID NO: 2951097 - DNA, 25 bp, Homo sapien
aaccctgagtacacatgtttcagag

SEQ ID NO: 2951098 - DNA, 25 bp, Homo sapien
taaccctgagtacacatgtttcaga

SEQ ID NO: 2951099 - DNA, 25 bp, Homo sapien
atttaaccctgagtacacatgtttc

SEQ ID NO: 2951100 - DNA, 25 bp, Homo sapien
ttaaccctgagtacacatgtttcag

SEQ ID NO: 2951101 - DNA, 25 bp, Homo sapien
ccagtacacggttgaacagaagtga

SEQ ID NO: 2951102 - DNA, 25 bp, Homo sapien
tgtcaagcagctctgataaatttgc

SEQ ID NO: 2951103 - DNA, 25 bp, Homo sapien
tattggcaatgagtaatggaaattc

SEQ ID NO: 2951104 - DNA, 25 bp, Homo sapien
tttgcctgtgatactggctaggact

SEQ ID NO: 2951105 - DNA, 25 bp, Homo sapien
gggcacaaaggcgttccctcggcag

SEQ ID NO: 2951106 - DNA, 25 bp, Homo sapien
ggcacaaaggcgttccctcggcagc

SEQ ID NO: 2951107 - DNA, 25 bp, Homo sapien
cgggcacaaaggcgttccctcggca

SEQ ID NO: 2951108 - DNA, 25 bp, Homo sapien
aagcgaaacaatggaccggggcgcg

SEQ ID NO: 2951109 - DNA, 25 bp, Homo sapien
tagcaggtaaaggtctaggtctaca

SEQ ID NO: 2951110 - DNA, 25 bp, Homo sapien
atccaccggggtgagagggatgaag

SEQ ID NO: 2951111 - DNA, 25 bp, Homo sapien
agccacgcatccaccggggtgagag

SEQ ID NO: 2951112 - DNA, 25 bp, Homo sapien
acgcatccaccggggtgagagggat

SEQ ID NO: 2951113 - DNA, 25 bp, Homo sapien
gcatccaccggggtgagagggatga

SEQ ID NO: 2951114 - DNA, 25 bp, Homo sapien
ctgagccgtcggttccgcgggtgcc

SEQ ID NO: 2951115 - DNA, 25 bp, Homo sapien
tgagccgtcggttccgcgggtgcct

SEQ ID NO: 2951116 - DNA, 25 bp, Homo sapien
agaagccctccgtgaattttcaggc

SEQ ID NO: 2951117 - DNA, 25 bp, Homo sapien
gagaagccctccgtgaattttcagg

SEQ ID NO: 2951118 - DNA, 25 bp, Homo sapien
tgagaagccctccgtgaattttcag

SEQ ID NO: 2951119 - DNA, 25 bp, Homo sapien
atgagaagccctccgtgaattttca

SEQ ID NO: 2951120 - DNA, 25 bp, Homo sapien
tggccaatgacattatctcatcaaa

SEQ ID NO: 2951121 - DNA, 25 bp, Homo sapien
tgggaactagattcatggtcagtac

SEQ ID NO: 2951122 - DNA, 25 bp, Homo sapien
gctgcctacagcaccttctaagtca

SEQ ID NO: 2951123 - DNA, 25 bp, Homo sapien
gggttctgggtagtagctgcctaca

SEQ ID NO: 2951124 - DNA, 25 bp, Homo sapien
tggtcagtacaataacctatagcac

SEQ ID NO: 2951125 - DNA, 25 bp, Homo sapien
agtagattctggtgcacttggctgc

SEQ ID NO: 2951126 - DNA, 25 bp, Homo sapien
caagtggtaagtgtggttatgaaat

SEQ ID NO: 2951127 - DNA, 25 bp, Homo sapien
tgttgaaatgtaagatccccatgga

SEQ ID NO: 2951128 - DNA, 25 bp, Homo sapien
caggccacgaaaaaggttcagaagt

SEQ ID NO: 2951129 - DNA, 25 bp, Homo sapien
ctttagcacgccgttcatcacgttc

SEQ ID NO: 2951130 - DNA, 25 bp, Homo sapien
tagcacgccgttcatcacgttcaag

SEQ ID NO: 2951131 - DNA, 25 bp, Homo sapien
acgccgttcatcacgttcaagtttc

SEQ ID NO: 2951132 - DNA, 25 bp, Homo sapien
gcacgccgttcatcacgttcaagtt

SEQ ID NO: 2951133 - DNA, 25 bp, Homo sapien
gtgagacttgtaggtctgtcagata

SEQ ID NO: 2951134 - DNA, 25 bp, Homo sapien
tcaaaattatgtccaatttgcgttt

SEQ ID NO: 2951135 - DNA, 25 bp, Homo sapien
aattatgtccaatttgcgtttacga

SEQ ID NO: 2951136 - DNA, 25 bp, Homo sapien
tcacggataagtgagacttgtaggt

SEQ ID NO: 2951137 - DNA, 25 bp, Homo sapien
attgtgctcgctctctcttaagagt

SEQ ID NO: 2951138 - DNA, 25 bp, Homo sapien
ctcgctctctcttaagagtttcctt

SEQ ID NO: 2951139 - DNA, 25 bp, Homo sapien
ctctcttaagagtttccttctttgc

SEQ ID NO: 2951140 - DNA, 25 bp, Homo sapien
tgctcgctctctcttaagagtttcc

SEQ ID NO: 2951141 - DNA, 25 bp, Homo sapien
tctttgggtactatcaagatacttc

SEQ ID NO: 2951142 - DNA, 25 bp, Homo sapien
tgggtactatcaagatacttccatc

SEQ ID NO: 2951143 - DNA, 25 bp, Homo sapien
ccagttctttgggtactatcaagat

SEQ ID NO: 2951144 - DNA, 25 bp, Homo sapien
gttctttgggtactatcaagatact

SEQ ID NO: 2951145 - DNA, 25 bp, Homo sapien
aaacagagccttaactgagttattc

SEQ ID NO: 2951146 - DNA, 25 bp, Homo sapien
aaaacagagccttaactgagttatt

SEQ ID NO: 2951147 - DNA, 25 bp, Homo sapien
gtcagagacatcaactagatcattc

SEQ ID NO: 2951148 - DNA, 25 bp, Homo sapien
gggtagtagctaagagtatctgtgt

SEQ ID NO: 2951149 - DNA, 25 bp, Homo sapien
tcaataatgtcttgaggtcagagac

SEQ ID NO: 2951150 - DNA, 25 bp, Homo sapien
cattacagtaagtatagcattagct

SEQ ID NO: 2951151 - DNA, 25 bp, Homo sapien
accttccacccctgtggtagaggat

SEQ ID NO: 2951152 - DNA, 25 bp, Homo sapien
ggatggtccttataagatagacgca

SEQ ID NO: 2951153 - DNA, 25 bp, Homo sapien
catccctgcatgtcctacccataga

SEQ ID NO: 2951154 - DNA, 25 bp, Homo sapien
agatagacgcattgaaactactaac

SEQ ID NO: 2951155 - DNA, 25 bp, Homo sapien
tgacttccccatttgtttggcccca

SEQ ID NO: 2951156 - DNA, 25 bp, Homo sapien
ttggcacacctgtaggggcagtacc

SEQ ID NO: 2951157 - DNA, 25 bp, Homo sapien
gggcagtaccagtgtccagcagtca

SEQ ID NO: 2951158 - DNA, 25 bp, Homo sapien
ctctgacttccccatttgtttggcc

SEQ ID NO: 2951159 - DNA, 25 bp, Homo sapien
cacctcctaggtactgtcagtggac

SEQ ID NO: 2951160 - DNA, 25 bp, Homo sapien
tatggatggcattctgattgaccac

SEQ ID NO: 2951161 - DNA, 25 bp, Homo sapien
taatgcttgaggtaacagataaccc

SEQ ID NO: 2951162 - DNA, 25 bp, Homo sapien
ggaccctgttttactctatggatgg

SEQ ID NO: 2951163 - DNA, 25 bp, Homo sapien
aatatggcagacaccacttcaagtg

SEQ ID NO: 2951164 - DNA, 25 bp, Homo sapien
gctacaggctagcaattcatctgcc

SEQ ID NO: 2951165 - DNA, 25 bp, Homo sapien
ggagaaacagaatacttgcacagtc

SEQ ID NO: 2951166 - DNA, 25 bp, Homo sapien
gatactcctccctctagaagaatag

SEQ ID NO: 2951167 - DNA, 25 bp, Homo sapien
caatatatcggataatttagtcata

SEQ ID NO: 2951168 - DNA, 25 bp, Homo sapien
ctgcagctttaggaattgtcaatat

SEQ ID NO: 2951169 - DNA, 25 bp, Homo sapien
tcttgaatgctaaccttgccacttt

SEQ ID NO: 2951170 - DNA, 25 bp, Homo sapien
aattcttgaatgctaaccttgccac

SEQ ID NO: 2951171 - DNA, 25 bp, Homo sapien
tgggcaataagtacatattaaataa

SEQ ID NO: 2951172 - DNA, 25 bp, Homo sapien
caataagtacatattaaataaaact

SEQ ID NO: 2951173 - DNA, 25 bp, Homo sapien
ctgggcaataagtacatattaaata

SEQ ID NO: 2951174 - DNA, 25 bp, Homo sapien
ggcaataagtacatattaaataaaa

SEQ ID NO: 2951175 - DNA, 25 bp, Homo sapien
tgtgctttaactatcgaatcctgta

SEQ ID NO: 2951176 - DNA, 25 bp, Homo sapien
taactatcgaatcctgtattgtttt

SEQ ID NO: 2951177 - DNA, 25 bp, Homo sapien
tttttaacatgtaaaccactgcttg

SEQ ID NO: 2951178 - DNA, 25 bp, Homo sapien
ttaacatgtaaaccactgcttgcct

SEQ ID NO: 2951179 - DNA, 25 bp, Homo sapien
tcatattgtattgcttcttacttac

SEQ ID NO: 2951180 - DNA, 25 bp, Homo sapien
caaacagaagttatgtaaactaatc

SEQ ID NO: 2951181 - DNA, 25 bp, Homo sapien
atatttgccttagaattcaaacaga

SEQ ID NO: 2951182 - DNA, 25 bp, Homo sapien
tgagtttgggttaagcttagcaata

SEQ ID NO: 2951183 - DNA, 25 bp, Homo sapien
ggaatttgtaatactgcaaccagaa

SEQ ID NO: 2951184 - DNA, 25 bp, Homo sapien
taccaaaagggcataagagacttct

SEQ ID NO: 2951185 - DNA, 25 bp, Homo sapien
aaaagtgtgatcaagagagtcgctg

SEQ ID NO: 2951186 - DNA, 25 bp, Homo sapien
catgcaatgactgccaaactcaaac

SEQ ID NO: 2951187 - DNA, 25 bp, Homo sapien
tgcccataaggaaattccccgcttc

SEQ ID NO: 2951188 - DNA, 25 bp, Homo sapien
cataaggaaattccccgcttcaaat

SEQ ID NO: 2951189 - DNA, 25 bp, Homo sapien
gcccataaggaaattccccgcttca

SEQ ID NO: 2951190 - DNA, 25 bp, Homo sapien
gagcaattctgatgtaagcacctgg

SEQ ID NO: 2951191 - DNA, 25 bp, Homo sapien
gacaaacatgagtacctaggcacca

SEQ ID NO: 2951192 - DNA, 25 bp, Homo sapien
gattctacaggttaccctacaggta

SEQ ID NO: 2951193 - DNA, 25 bp, Homo sapien
tagaagctgttttcacctagacaaa

SEQ ID NO: 2951194 - DNA, 25 bp, Homo sapien
aggtatcttagaaaaggtcgcagtt

SEQ ID NO: 2951195 - DNA, 25 bp, Homo sapien
gaaagagggaggaggtatcttagaa

SEQ ID NO: 2951196 - DNA, 25 bp, Homo sapien
gtcgcagtttttcctaagagtaaga

SEQ ID NO: 2951197 - DNA, 25 bp, Homo sapien
tcgcagtttttcctaagagtaagaa

SEQ ID NO: 2951198 - DNA, 25 bp, Homo sapien
aacatttcatctatctgcccattga

SEQ ID NO: 2951199 - DNA, 25 bp, Homo sapien
gatccagcggccttagtatcccaaa

SEQ ID NO: 2951200 - DNA, 25 bp, Homo sapien
tgcccattgatctcgtcctcatttc

SEQ ID NO: 2951201 - DNA, 25 bp, Homo sapien
ccaggtctaagcgattctcgtcatg

SEQ ID NO: 2951202 - DNA, 25 bp, Homo sapien
tctaagtagaaaactgtgggccagg

SEQ ID NO: 2951203 - DNA, 25 bp, Homo sapien
gtgtgtattcctacagagatacatg

SEQ ID NO: 2951204 - DNA, 25 bp, Homo sapien
gagatacatgtttctataaattcac

SEQ ID NO: 2951205 - DNA, 25 bp, Homo sapien
tgctaggtgtgggttattgctactc

SEQ ID NO: 2951206 - DNA, 25 bp, Homo sapien
tagtatacactgctagcatctgtgt

SEQ ID NO: 2951207 - DNA, 25 bp, Homo sapien
tgtcctctagaacttacactgtatt

SEQ ID NO: 2951208 - DNA, 25 bp, Homo sapien
tattagctgtatgtgagattgctca

SEQ ID NO: 2951209 - DNA, 25 bp, Homo sapien
aagggcctagtttggtgtctggcat

SEQ ID NO: 2951210 - DNA, 25 bp, Homo sapien
tattggagcattcataaggagcccc

SEQ ID NO: 2951211 - DNA, 25 bp, Homo sapien
aaaaagtttgtttaccatgcatggg

SEQ ID NO: 2951212 - DNA, 25 bp, Homo sapien
gagtgcaagtagcaggatcctagct

SEQ ID NO: 2951213 - DNA, 25 bp, Homo sapien
ggactaatttttgcccatctggtta

SEQ ID NO: 2951214 - DNA, 25 bp, Homo sapien
tttggcattccagatcgagggagct

SEQ ID NO: 2951215 - DNA, 25 bp, Homo sapien
gaaactgacatgatacagactgcag

SEQ ID NO: 2951216 - DNA, 25 bp, Homo sapien
ccatgcagctctgttatattcgatg

SEQ ID NO: 2951217 - DNA, 25 bp, Homo sapien
taatgcttaggtccctgggtgccct

SEQ ID NO: 2951218 - DNA, 25 bp, Homo sapien
tcctcgcggctcacatttcggcgga

SEQ ID NO: 2951219 - DNA, 25 bp, Homo sapien
attcccggccttcagaaagcctcgg

SEQ ID NO: 2951220 - DNA, 25 bp, Homo sapien
cctttgcgggaacaagatggcagcc

SEQ ID NO: 2951221 - DNA, 25 bp, Homo sapien
tctcgctggcgcgtgacaacagttg

SEQ ID NO: 2951222 - DNA, 25 bp, Homo sapien
ctccagagaaatcaggatgggaaaa

SEQ ID NO: 2951223 - DNA, 25 bp, Homo sapien
gagaaatcaggatgggaaaagggca

SEQ ID NO: 2951224 - DNA, 25 bp, Homo sapien
aaatcaggatgggaaaagggcagaa

SEQ ID NO: 2951225 - DNA, 25 bp, Homo sapien
ccagagaaatcaggatgggaaaagg

SEQ ID NO: 2951226 - DNA, 25 bp, Homo sapien
agatggcacattccaccccagaagt

SEQ ID NO: 2951227 - DNA, 25 bp, Homo sapien
gcagcagctgtaacgtgtctgctga

SEQ ID NO: 2951228 - DNA, 25 bp, Homo sapien
gtgtctgctgacacgcaagccctgg

SEQ ID NO: 2951229 - DNA, 25 bp, Homo sapien
ttcccaaacttctgctcagtttcag

SEQ ID NO: 2951230 - DNA, 25 bp, Homo sapien
tatgatgaaggggttccaaaggcca

SEQ ID NO: 2951231 - DNA, 25 bp, Homo sapien
ctgcggaatatgatgaaggggttcc

SEQ ID NO: 2951232 - DNA, 25 bp, Homo sapien
cggaatatgatgaaggggttccaaa

SEQ ID NO: 2951233 - DNA, 25 bp, Homo sapien
gaatatgatgaaggggttccaaagg

SEQ ID NO: 2951234 - DNA, 25 bp, Homo sapien
tggcgggcgggctgcctacggggaa

SEQ ID NO: 2951235 - DNA, 25 bp, Homo sapien
agggggcggcagctgccagccacat

SEQ ID NO: 2951236 - DNA, 25 bp, Homo sapien
agggagggggcggcagctgccagcc

SEQ ID NO: 2951237 - DNA, 25 bp, Homo sapien
gcgagggagggggcggcagctgcca

SEQ ID NO: 2951238 - DNA, 25 bp, Homo sapien
ggagggggcggcagctgccagccac

SEQ ID NO: 2951239 - DNA, 25 bp, Homo sapien
ggaggcggagggccgaggaagagca

SEQ ID NO: 2951240 - DNA, 25 bp, Homo sapien
ggaggaggcggagggccgaggaaga

SEQ ID NO: 2951241 - DNA, 25 bp, Homo sapien
ctgaagacgagaaggaggaggggag

SEQ ID NO: 2951242 - DNA, 25 bp, Homo sapien
ggcggagggccgaggaagagcaggc

SEQ ID NO: 2951243 - DNA, 25 bp, Homo sapien
gaggcccaggctgtggaggcggcgg

SEQ ID NO: 2951244 - DNA, 25 bp, Homo sapien
aggcagccgctcgaagggcctcttc

SEQ ID NO: 2951245 - DNA, 25 bp, Homo sapien
gcagccgctcgaagggcctcttctc

SEQ ID NO: 2951246 - DNA, 25 bp, Homo sapien
ggcagccgctcgaagggcctcttct

SEQ ID NO: 2951247 - DNA, 25 bp, Homo sapien
agcaagtcgggcttgaggcaaaggc

SEQ ID NO: 2951248 - DNA, 25 bp, Homo sapien
gcaagtcgggcttgaggcaaaggct

SEQ ID NO: 2951249 - DNA, 25 bp, Homo sapien
tccagcttgccctcgaaggtgaagt

SEQ ID NO: 2951250 - DNA, 25 bp, Homo sapien
caagtcgggcttgaggcaaaggctg

SEQ ID NO: 2951251 - DNA, 25 bp, Homo sapien
gatctcgactctgcaacctctgccc

SEQ ID NO: 2951252 - DNA, 25 bp, Homo sapien
tgccccccgggttcaagtgattctc

SEQ ID NO: 2951253 - DNA, 25 bp, Homo sapien
caggctggaatgcaggaatgcagtg

SEQ ID NO: 2951254 - DNA, 25 bp, Homo sapien
ctggaatgcaggaatgcagtggcgc

SEQ ID NO: 2951255 - DNA, 25 bp, Homo sapien
ctattgtgcaggatgtttgtcgggc

SEQ ID NO: 2951256 - DNA, 25 bp, Homo sapien
tacatagtatcataaatgcctattg

SEQ ID NO: 2951257 - DNA, 25 bp, Homo sapien
atagtatcataaatgcctattgtgc

SEQ ID NO: 2951258 - DNA, 25 bp, Homo sapien
ttgtcgggcatctatactgatggtc

SEQ ID NO: 2951259 - DNA, 25 bp, Homo sapien
cccaggatggagtgccaatgatgcg

SEQ ID NO: 2951260 - DNA, 25 bp, Homo sapien
tgatgcgatcttgcgatcttggctc

SEQ ID NO: 2951261 - DNA, 25 bp, Homo sapien
ccacgcctggcctcttgtgcatttt

SEQ ID NO: 2951262 - DNA, 25 bp, Homo sapien
aatgatgcgatcttgcgatcttggc

SEQ ID NO: 2951263 - DNA, 25 bp, Homo sapien
gacttcgctaaaacctagactgaga

SEQ ID NO: 2951264 - DNA, 25 bp, Homo sapien
cgtaagacttgaactaatatcacag

SEQ ID NO: 2951265 - DNA, 25 bp, Homo sapien
cacttacatctaaccaatgagccaa

SEQ ID NO: 2951266 - DNA, 25 bp, Homo sapien
ctgagaatttatgcatcaatggtac

SEQ ID NO: 2951267 - DNA, 25 bp, Homo sapien
caatctgattagtcgcctgcctcac

SEQ ID NO: 2951268 - DNA, 25 bp, Homo sapien
ttcatcacaatctgattagtcgcct

SEQ ID NO: 2951269 - DNA, 25 bp, Homo sapien
gaagctgtaataatatcaatatcag

SEQ ID NO: 2951270 - DNA, 25 bp, Homo sapien
ccttctggtgcatatgaagctgtaa

SEQ ID NO: 2951271 - DNA, 25 bp, Homo sapien
actggctatgattgatgagttataa

SEQ ID NO: 2951272 - DNA, 25 bp, Homo sapien
tatgattgatgagttataaacacca

SEQ ID NO: 2951273 - DNA, 25 bp, Homo sapien
atgattgatgagttataaacaccac

SEQ ID NO: 2951274 - DNA, 25 bp, Homo sapien
atctgtaactggctatgattgatga

SEQ ID NO: 2951275 - DNA, 25 bp, Homo sapien
tgatatcctaccaggaaagatgaac

SEQ ID NO: 2951276 - DNA, 25 bp, Homo sapien
aaagctcccctagatactagcaaac

SEQ ID NO: 2951277 - DNA, 25 bp, Homo sapien
tctatctaggtagcacagtgagact

SEQ ID NO: 2951278 - DNA, 25 bp, Homo sapien
gctgaggctataggccccagggaca

SEQ ID NO: 2951279 - DNA, 25 bp, Homo sapien
ccaggccccctttatgtctatacat

SEQ ID NO: 2951280 - DNA, 25 bp, Homo sapien
ctgtgccaggccccctttatgtcta

SEQ ID NO: 2951281 - DNA, 25 bp, Homo sapien
cccctttatgtctatacataataaa

SEQ ID NO: 2951282 - DNA, 25 bp, Homo sapien
ggccccctttatgtctatacataat

SEQ ID NO: 2951283 - DNA, 25 bp, Homo sapien
gttcacagctctacttccaatgcta

SEQ ID NO: 2951284 - DNA, 25 bp, Homo sapien
tgaagaacaatcctcattctatacc

SEQ ID NO: 2951285 - DNA, 25 bp, Homo sapien
gttgatgcttgattttgttcacagc

SEQ ID NO: 2951286 - DNA, 25 bp, Homo sapien
aaagatctgttctatcaacttgaag

SEQ ID NO: 2951287 - DNA, 25 bp, Homo sapien
tgcagagtactagggaaagacaagg

SEQ ID NO: 2951288 - DNA, 25 bp, Homo sapien
ggaaagacaaggtgactttttcatc

SEQ ID NO: 2951289 - DNA, 25 bp, Homo sapien
gaaagacaaggtgactttttcatct

SEQ ID NO: 2951290 - DNA, 25 bp, Homo sapien
ttgcagagtactagggaaagacaag

SEQ ID NO: 2951291 - DNA, 25 bp, Homo sapien
gatcatttccttagtgttgaacaaa

SEQ ID NO: 2951292 - DNA, 25 bp, Homo sapien
tattcctattagcagaattgctggg

SEQ ID NO: 2951293 - DNA, 25 bp, Homo sapien
tcagacacttctgggcataaagtat

SEQ ID NO: 2951294 - DNA, 25 bp, Homo sapien
tatttaggctcttgatatactgcca

SEQ ID NO: 2951295 - DNA, 25 bp, Homo sapien
cagtagagttggtgatatggctgca

SEQ ID NO: 2951296 - DNA, 25 bp, Homo sapien
ttctagacagattcaccagacaatg

SEQ ID NO: 2951297 - DNA, 25 bp, Homo sapien
tatgatcagcactcctcatggccca

SEQ ID NO: 2951298 - DNA, 25 bp, Homo sapien
aaagaaatctcagtggttataagcc

SEQ ID NO: 2951299 - DNA, 25 bp, Homo sapien
taaaggtagtatgctacctgccttc

SEQ ID NO: 2951300 - DNA, 25 bp, Homo sapien
aaaggtagtatgctacctgccttcc

SEQ ID NO: 2951301 - DNA, 25 bp, Homo sapien
tttaaaggtagtatgctacctgcct

SEQ ID NO: 2951302 - DNA, 25 bp, Homo sapien
aaggtagtatgctacctgccttccc

SEQ ID NO: 2951303 - DNA, 25 bp, Homo sapien
atctccaaggccatcaaaccataac

SEQ ID NO: 2951304 - DNA, 25 bp, Homo sapien
gatattgacagtgaccacttccaaa

SEQ ID NO: 2951305 - DNA, 25 bp, Homo sapien
ccacttccaaaaagtggcatactaa

SEQ ID NO: 2951306 - DNA, 25 bp, Homo sapien
accataacaagatattgacagtgac

SEQ ID NO: 2951307 - DNA, 25 bp, Homo sapien
taaggagctatagggaagaccaatg

SEQ ID NO: 2951308 - DNA, 25 bp, Homo sapien
gaccaatgatttgatcagcaacagg

SEQ ID NO: 2951309 - DNA, 25 bp, Homo sapien
catgcatagaaagagaaatgtagcc

SEQ ID NO: 2951310 - DNA, 25 bp, Homo sapien
cagcaacagggcataaaacaaattc

SEQ ID NO: 2951311 - DNA, 25 bp, Homo sapien
ttgtcattcagctctccaacaaaat

SEQ ID NO: 2951312 - DNA, 25 bp, Homo sapien
tgtcattcagctctccaacaaaatc

SEQ ID NO: 2951313 - DNA, 25 bp, Homo sapien
gttacagcagcatagcgcacctctc

SEQ ID NO: 2951314 - DNA, 25 bp, Homo sapien
gcagcatagcgcacctctccagaag

SEQ ID NO: 2951315 - DNA, 25 bp, Homo sapien
cagcatagcgcacctctccagaagg

SEQ ID NO: 2951316 - DNA, 25 bp, Homo sapien
agcagcatagcgcacctctccagaa

SEQ ID NO: 2951317 - DNA, 25 bp, Homo sapien
tagagacatacatcagccaaccatt

SEQ ID NO: 2951318 - DNA, 25 bp, Homo sapien
gtacctaggcaaaattatggatccc

SEQ ID NO: 2951319 - DNA, 25 bp, Homo sapien
tattttgcgggtagcatagtgatcc

SEQ ID NO: 2951320 - DNA, 25 bp, Homo sapien
caagtagccttgtctaaagttggta

SEQ ID NO: 2951321 - DNA, 25 bp, Homo sapien
catgtttgataaagctactctgtct

SEQ ID NO: 2951322 - DNA, 25 bp, Homo sapien
ccaatgagatatcaaaagttgcttt

SEQ ID NO: 2951323 - DNA, 25 bp, Homo sapien
gctactctgtctttaggaacaacca

SEQ ID NO: 2951324 - DNA, 25 bp, Homo sapien
tttaggaacaaccaatgagatatca

SEQ ID NO: 2951325 - DNA, 25 bp, Homo sapien
ccagcccaagaccttttgcttttag

SEQ ID NO: 2951326 - DNA, 25 bp, Homo sapien
tccagcccaagaccttttgctttta

SEQ ID NO: 2951327 - DNA, 25 bp, Homo sapien
taacaggtgtgcgggcaaacttcac

SEQ ID NO: 2951328 - DNA, 25 bp, Homo sapien
tacaaagtcatattcacccacaaca

SEQ ID NO: 2951329 - DNA, 25 bp, Homo sapien
gcgggcaaacttcacttccactaaa

SEQ ID NO: 2951330 - DNA, 25 bp, Homo sapien
taaattttcatcatcagggtatggt

SEQ ID NO: 2951331 - DNA, 25 bp, Homo sapien
caatggccaaactttaatccattta

SEQ ID NO: 2951332 - DNA, 25 bp, Homo sapien
caaaggaatcctgttgcaagccaat

SEQ ID NO: 2951333 - DNA, 25 bp, Homo sapien
ttcatattgaaacccacaaaggaat

SEQ ID NO: 2951334 - DNA, 25 bp, Homo sapien
gactgccttagctccaaactttgaa

SEQ ID NO: 2951335 - DNA, 25 bp, Homo sapien
gataaggaacattgaagtagtcctt

SEQ ID NO: 2951336 - DNA, 25 bp, Homo sapien
caaagtctgcaatagcaatgagatc

SEQ ID NO: 2951337 - DNA, 25 bp, Homo sapien
gagatcaattttaggtagaggataa

SEQ ID NO: 2951338 - DNA, 25 bp, Homo sapien
taaaaaggcaaggttttagcagcaa

SEQ ID NO: 2951339 - DNA, 25 bp, Homo sapien
atactcttgcatcaaaagtcacaaa

SEQ ID NO: 2951340 - DNA, 25 bp, Homo sapien
tactcttgcatcaaaagtcacaaaa

SEQ ID NO: 2951341 - DNA, 25 bp, Homo sapien
acaaggccccagttctccatggcac

SEQ ID NO: 2951342 - DNA, 25 bp, Homo sapien
ctataagtaacaaggccccagttct

SEQ ID NO: 2951343 - DNA, 25 bp, Homo sapien
taacaaggccccagttctccatggc

SEQ ID NO: 2951344 - DNA, 25 bp, Homo sapien
agtaacaaggccccagttctccatg

SEQ ID NO: 2951345 - DNA, 25 bp, Homo sapien
gataaatagctatgaaactactgca

SEQ ID NO: 2951346 - DNA, 25 bp, Homo sapien
tagctatgaaactactgcaatgaga

SEQ ID NO: 2951347 - DNA, 25 bp, Homo sapien
ctatgaaactactgcaatgagaaac

SEQ ID NO: 2951348 - DNA, 25 bp, Homo sapien
aaatagctatgaaactactgcaatg

SEQ ID NO: 2951349 - DNA, 25 bp, Homo sapien
tcagacagtaagtcagatggacaag

SEQ ID NO: 2951350 - DNA, 25 bp, Homo sapien
ttaaacaataaaagtgggcatgcat

SEQ ID NO: 2951351 - DNA, 25 bp, Homo sapien
ggcatgcataagttgggaagattca

SEQ ID NO: 2951352 - DNA, 25 bp, Homo sapien
ttcacgaagattaaagactacccca

SEQ ID NO: 2951353 - DNA, 25 bp, Homo sapien
gaagaacaggaattttttggatcaa

SEQ ID NO: 2951354 - DNA, 25 bp, Homo sapien
ttttggatcaataagcaatgcagtc

SEQ ID NO: 2951355 - DNA, 25 bp, Homo sapien
tggatcaataagcaatgcagtctcc

SEQ ID NO: 2951356 - DNA, 25 bp, Homo sapien
ttttttggatcaataagcaatgcag

SEQ ID NO: 2951357 - DNA, 25 bp, Homo sapien
ggagtaggatgaagataaatatatt

SEQ ID NO: 2951358 - DNA, 25 bp, Homo sapien
gtggagtaggatgaagataaatata

SEQ ID NO: 2951359 - DNA, 25 bp, Homo sapien
tggagtaggatgaagataaatatat

SEQ ID NO: 2951360 - DNA, 25 bp, Homo sapien
tgtggagtaggatgaagataaatat

SEQ ID NO: 2951361 - DNA, 25 bp, Homo sapien
caaagtagcaaacttgctgcattag

SEQ ID NO: 2951362 - DNA, 25 bp, Homo sapien
ggtacaaagtagcaaacttgctgca

SEQ ID NO: 2951363 - DNA, 25 bp, Homo sapien
agcaaacttgctgcattagaagaaa

SEQ ID NO: 2951364 - DNA, 25 bp, Homo sapien
tttggtacaaagtagcaaacttgct

SEQ ID NO: 2951365 - DNA, 25 bp, Homo sapien
gaaaactatcagagccaaataaaga

SEQ ID NO: 2951366 - DNA, 25 bp, Homo sapien
caacagataaatataggcaaataga

SEQ ID NO: 2951367 - DNA, 25 bp, Homo sapien
aactgagaaagagtactgcttatat

SEQ ID NO: 2951368 - DNA, 25 bp, Homo sapien
caaagaatatgagtgacagataaaa

SEQ ID NO: 2951369 - DNA, 25 bp, Homo sapien
agaattatatctgagggtcattttc

SEQ ID NO: 2951370 - DNA, 25 bp, Homo sapien
actcacatgtcccttccactatatt

SEQ ID NO: 2951371 - DNA, 25 bp, Homo sapien
tctactaatctaaaacactcacatg

SEQ ID NO: 2951372 - DNA, 25 bp, Homo sapien
aagagagaagactaaaagagatgtc

SEQ ID NO: 2951373 - DNA, 25 bp, Homo sapien
tatctaaggcgtcaagctcctgggc

SEQ ID NO: 2951374 - DNA, 25 bp, Homo sapien
ctcctgggcacgggtgtaatcagca

SEQ ID NO: 2951375 - DNA, 25 bp, Homo sapien
agcagtggtctacacacagatattc

SEQ ID NO: 2951376 - DNA, 25 bp, Homo sapien
ctctgggaagcagtggtctacacac

SEQ ID NO: 2951377 - DNA, 25 bp, Homo sapien
gaaccagtaaaatcacccatgctat

SEQ ID NO: 2951378 - DNA, 25 bp, Homo sapien
taggctaatggttagaaagtatggc

SEQ ID NO: 2951379 - DNA, 25 bp, Homo sapien
aagtccaaagtatctatgtaacaaa

SEQ ID NO: 2951380 - DNA, 25 bp, Homo sapien
taaatgagagcagtcataggctaat

SEQ ID NO: 2951381 - DNA, 25 bp, Homo sapien
tacccaataggtatgacttctccca

SEQ ID NO: 2951382 - DNA, 25 bp, Homo sapien
catagtgttacccaataggtatgac

SEQ ID NO: 2951383 - DNA, 25 bp, Homo sapien
acaatggaaccatagtgttacccaa

SEQ ID NO: 2951384 - DNA, 25 bp, Homo sapien
aattttccttgacataaacaatgga

SEQ ID NO: 2951385 - DNA, 25 bp, Homo sapien
gtgattcagggttatgacaggaagc

SEQ ID NO: 2951386 - DNA, 25 bp, Homo sapien
tgtgattcagggttatgacaggaag

SEQ ID NO: 2951387 - DNA, 25 bp, Homo sapien
tatatgatatagcatcaaatatctc

SEQ ID NO: 2951388 - DNA, 25 bp, Homo sapien
cagatgcacctttgctatatgatat

SEQ ID NO: 2951389 - DNA, 25 bp, Homo sapien
gcagcattcggatgacagatgcacc

SEQ ID NO: 2951390 - DNA, 25 bp, Homo sapien
aacctcagatggatggcccacactg

SEQ ID NO: 2951391 - DNA, 25 bp, Homo sapien
gtagtcaacttcaaataattgaatt

SEQ ID NO: 2951392 - DNA, 25 bp, Homo sapien
caaatactcaagtatcagatacact

SEQ ID NO: 2951393 - DNA, 25 bp, Homo sapien
atatatccttctgatgcctactgcc

SEQ ID NO: 2951394 - DNA, 25 bp, Homo sapien
aataatgcgtactctatgccttcta

SEQ ID NO: 2951395 - DNA, 25 bp, Homo sapien
ttatttaataatgcgtactctatgc

SEQ ID NO: 2951396 - DNA, 25 bp, Homo sapien
tggaacttggttaaatacatgttca

SEQ ID NO: 2951397 - DNA, 25 bp, Homo sapien
acatgttcattcctttcttaaagtc

SEQ ID NO: 2951398 - DNA, 25 bp, Homo sapien
tgtggcagcattcttttgttggaac

SEQ ID NO: 2951399 - DNA, 25 bp, Homo sapien
ttgttggaacttggttaaatacatg

SEQ ID NO: 2951400 - DNA, 25 bp, Homo sapien
caggaaacagtgagccaaattaaca

SEQ ID NO: 2951401 - DNA, 25 bp, Homo sapien
cacccctcttctgcaactaagtaaa

SEQ ID NO: 2951402 - DNA, 25 bp, Homo sapien
taacttttgacactacactgctaat

SEQ ID NO: 2951403 - DNA, 25 bp, Homo sapien
acactgctaattctttggttctttc

SEQ ID NO: 2951404 - DNA, 25 bp, Homo sapien
atcacagctgctataggtttaccac

SEQ ID NO: 2951405 - DNA, 25 bp, Homo sapien
ctataggtttaccactagcattttc

SEQ ID NO: 2951406 - DNA, 25 bp, Homo sapien
ttggtccaggtattcatcacagctg

SEQ ID NO: 2951407 - DNA, 25 bp, Homo sapien
aatcccatttgtttggtccaggtat

SEQ ID NO: 2951408 - DNA, 25 bp, Homo sapien
ttggcctcccagtattctaagtaca

SEQ ID NO: 2951409 - DNA, 25 bp, Homo sapien
ccagtattctaagtacaggcgtgag

SEQ ID NO: 2951410 - DNA, 25 bp, Homo sapien
tcccagtattctaagtacaggcgtg

SEQ ID NO: 2951411 - DNA, 25 bp, Homo sapien
ggcctcccagtattctaagtacagg

SEQ ID NO: 2951412 - DNA, 25 bp, Homo sapien
cttcttttgggacaacctcaataat

SEQ ID NO: 2951413 - DNA, 25 bp, Homo sapien
cagaacttcttttgggacaacctca

SEQ ID NO: 2951414 - DNA, 25 bp, Homo sapien
tcttttgggacaacctcaataatct

SEQ ID NO: 2951415 - DNA, 25 bp, Homo sapien
acctcaataatctgtcatcttctac

SEQ ID NO: 2951416 - DNA, 25 bp, Homo sapien
caatgtggattataggtaagaggca

SEQ ID NO: 2951417 - DNA, 25 bp, Homo sapien
ctgtcagtactacaatgtggattat

SEQ ID NO: 2951418 - DNA, 25 bp, Homo sapien
cggcaactgtgacacgtacagattt

SEQ ID NO: 2951419 - DNA, 25 bp, Homo sapien
aaaagagtaattctatggctgggca

SEQ ID NO: 2951420 - DNA, 25 bp, Homo sapien
cagagaagaacaaacaaattttgca

SEQ ID NO: 2951421 - DNA, 25 bp, Homo sapien
taagccagagaagaacaaacaaatt

SEQ ID NO: 2951422 - DNA, 25 bp, Homo sapien
gccagagaagaacaaacaaattttg

SEQ ID NO: 2951423 - DNA, 25 bp, Homo sapien
ctaagccagagaagaacaaacaaat

SEQ ID NO: 2951424 - DNA, 25 bp, Homo sapien
ttcactagtagagattgtgataggg

SEQ ID NO: 2951425 - DNA, 25 bp, Homo sapien
tttggcctggttggggtcttcacta

SEQ ID NO: 2951426 - DNA, 25 bp, Homo sapien
ctctggcttgtccattagaattttt

SEQ ID NO: 2951427 - DNA, 25 bp, Homo sapien
cacattcatctctggcttgtccatt

SEQ ID NO: 2951428 - DNA, 25 bp, Homo sapien
tatgaaaattcgtcctaagtttcac

SEQ ID NO: 2951429 - DNA, 25 bp, Homo sapien
cttccctaacataaggacaaatgtc

SEQ ID NO: 2951430 - DNA, 25 bp, Homo sapien
ccttagtcctatgcctttggatctg

SEQ ID NO: 2951431 - DNA, 25 bp, Homo sapien
tgcttctctaccactaccttcccta

SEQ ID NO: 2951432 - DNA, 25 bp, Homo sapien
tataggctatttaccaatagccaaa

SEQ ID NO: 2951433 - DNA, 25 bp, Homo sapien
aatggtaaaacagtaagatacaaat

SEQ ID NO: 2951434 - DNA, 25 bp, Homo sapien
ttctctataggctatttaccaatag

SEQ ID NO: 2951435 - DNA, 25 bp, Homo sapien
actgcattattctctataggctatt

SEQ ID NO: 2951436 - DNA, 25 bp, Homo sapien
tatatgaaaacacctggacagtgga

SEQ ID NO: 2951437 - DNA, 25 bp, Homo sapien
gcttaggcctttacaaacattgatc

SEQ ID NO: 2951438 - DNA, 25 bp, Homo sapien
gcacagagactgaacggaataacaa

SEQ ID NO: 2951439 - DNA, 25 bp, Homo sapien
caaagtgagggacagtagaaagaac

SEQ ID NO: 2951440 - DNA, 25 bp, Homo sapien
gcagagctgtactgggtccgataaa

SEQ ID NO: 2951441 - DNA, 25 bp, Homo sapien
gctgtactgggtccgataaaaccca

SEQ ID NO: 2951442 - DNA, 25 bp, Homo sapien
cagagaaaggtcacgaatgcctggt

SEQ ID NO: 2951443 - DNA, 25 bp, Homo sapien
cattctgtaatccaagtcgatccac

SEQ ID NO: 2951444 - DNA, 25 bp, Homo sapien
gggacaggtctctctcagcaattag

SEQ ID NO: 2951445 - DNA, 25 bp, Homo sapien
tctggaaattacctaacctacgctg

SEQ ID NO: 2951446 - DNA, 25 bp, Homo sapien
tcaaagccggacctgcaaactgtgt

SEQ ID NO: 2951447 - DNA, 25 bp, Homo sapien
cagcaattagatcagcagatgtgag

SEQ ID NO: 2951448 - DNA, 25 bp, Homo sapien
tataattgggctcattcacaaaagc

SEQ ID NO: 2951449 - DNA, 25 bp, Homo sapien
tagaacctctacagtgctaatgatt

SEQ ID NO: 2951450 - DNA, 25 bp, Homo sapien
gctcaggtcgctccatacagtataa

SEQ ID NO: 2951451 - DNA, 25 bp, Homo sapien
gacaagagagttgagagaatcccca

SEQ ID NO: 2951452 - DNA, 25 bp, Homo sapien
gtctctcccctataggtgaaaagac

SEQ ID NO: 2951453 - DNA, 25 bp, Homo sapien
cagtctctcccctataggtgaaaag

SEQ ID NO: 2951454 - DNA, 25 bp, Homo sapien
agtctctcccctataggtgaaaaga

SEQ ID NO: 2951455 - DNA, 25 bp, Homo sapien
tcttctaacgttgccttatgtcctg

SEQ ID NO: 2951456 - DNA, 25 bp, Homo sapien
gacgacgggcttcttctaacgttgc

SEQ ID NO: 2951457 - DNA, 25 bp, Homo sapien
cccctcaggagtgcatcgagatgac

SEQ ID NO: 2951458 - DNA, 25 bp, Homo sapien
aggactcctcagatcagcggagaga

SEQ ID NO: 2951459 - DNA, 25 bp, Homo sapien
ataatatctaaagtagtgccatcac

SEQ ID NO: 2951460 - DNA, 25 bp, Homo sapien
tatctaaagtagtgccatcaccatg

SEQ ID NO: 2951461 - DNA, 25 bp, Homo sapien
atctaaagtagtgccatcaccatgc

SEQ ID NO: 2951462 - DNA, 25 bp, Homo sapien
aatatctaaagtagtgccatcacca

SEQ ID NO: 2951463 - DNA, 25 bp, Homo sapien
aagtgcaaacgtgaggactttttga

SEQ ID NO: 2951464 - DNA, 25 bp, Homo sapien
gcgccaaggactctttcgattcggt

SEQ ID NO: 2951465 - DNA, 25 bp, Homo sapien
caggtcaggcaaaagagtagcgcca

SEQ ID NO: 2951466 - DNA, 25 bp, Homo sapien
tcgattcggtttttctcttcttgca

SEQ ID NO: 2951467 - DNA, 25 bp, Homo sapien
gaatcctccctggtatcggttataa

SEQ ID NO: 2951468 - DNA, 25 bp, Homo sapien
caattaccgatacagtgtcctgtgg

SEQ ID NO: 2951469 - DNA, 25 bp, Homo sapien
gctactccaccaattaccgatacag

SEQ ID NO: 2951470 - DNA, 25 bp, Homo sapien
ttagtctggatattaagaatcctcc

SEQ ID NO: 2951471 - DNA, 25 bp, Homo sapien
tcatggatgtcactaaataatatcc

SEQ ID NO: 2951472 - DNA, 25 bp, Homo sapien
gagcaaagaccacaatgtatgggtg

SEQ ID NO: 2951473 - DNA, 25 bp, Homo sapien
taatatccatgattagcaagctact

SEQ ID NO: 2951474 - DNA, 25 bp, Homo sapien
agcaagctactcaaagtttttcaca

SEQ ID NO: 2951475 - DNA, 25 bp, Homo sapien
ctgttataaaggatgtgtgatggga

SEQ ID NO: 2951476 - DNA, 25 bp, Homo sapien
tctgttataaaggatgtgtgatggg

SEQ ID NO: 2951477 - DNA, 25 bp, Homo sapien
agtaagtgaaaccaagaggctgaga

SEQ ID NO: 2951478 - DNA, 25 bp, Homo sapien
aacagtaagtgaaaccaagaggctg

SEQ ID NO: 2951479 - DNA, 25 bp, Homo sapien
caactgcaaatccctcaactgatag

SEQ ID NO: 2951480 - DNA, 25 bp, Homo sapien
tacagccctgcatgatgtctttctc

SEQ ID NO: 2951481 - DNA, 25 bp, Homo sapien
ggaaattcttaatatggcctataca

SEQ ID NO: 2951482 - DNA, 25 bp, Homo sapien
cacagagatgctacagtacattatc

SEQ ID NO: 2951483 - DNA, 25 bp, Homo sapien
tactagactgaaaagtgaagagtaa

SEQ ID NO: 2951484 - DNA, 25 bp, Homo sapien
gatgacaattgctactgttccaagg

SEQ ID NO: 2951485 - DNA, 25 bp, Homo sapien
tccattccatcgcagagtagtacca

SEQ ID NO: 2951486 - DNA, 25 bp, Homo sapien
caccagctggcaaaatgatagggct

SEQ ID NO: 2951487 - DNA, 25 bp, Homo sapien
cacaaatcagatcaaggcactgcct

SEQ ID NO: 2951488 - DNA, 25 bp, Homo sapien
tgaaacgatcatggctcatcacagc

SEQ ID NO: 2951489 - DNA, 25 bp, Homo sapien
gcgtgcactcccaggccaaattgtt

SEQ ID NO: 2951490 - DNA, 25 bp, Homo sapien
tcttcaggcatgagaatttaccact

SEQ ID NO: 2951491 - DNA, 25 bp, Homo sapien
gcacagagtacttaaggattcaaca

SEQ ID NO: 2951492 - DNA, 25 bp, Homo sapien
gaggccttccgctgaaggaggtact

SEQ ID NO: 2951493 - DNA, 25 bp, Homo sapien
ctgctggatggtacgctcagctgaa

SEQ ID NO: 2951494 - DNA, 25 bp, Homo sapien
tcgctttagccaggcagcattcagc

SEQ ID NO: 2951495 - DNA, 25 bp, Homo sapien
gagctgggtgactctcgaagaaagc

SEQ ID NO: 2951496 - DNA, 25 bp, Homo sapien
gactccaaattcttggcatatgaat

SEQ ID NO: 2951497 - DNA, 25 bp, Homo sapien
cttatccctgcagcgaagcagcaga

SEQ ID NO: 2951498 - DNA, 25 bp, Homo sapien
gcaggaaccagttaactacattcat

SEQ ID NO: 2951499 - DNA, 25 bp, Homo sapien
gaatcagctgttcggtagctccacc

SEQ ID NO: 2951500 - DNA, 25 bp, Homo sapien
tataggctccttgcagaacccactt

SEQ ID NO: 2951501 - DNA, 25 bp, Homo sapien
tacttttaaccactgacaaggcttc

SEQ ID NO: 2951502 - DNA, 25 bp, Homo sapien
gaattatgcactgactccaactatg

SEQ ID NO: 2951503 - DNA, 25 bp, Homo sapien
tatatcttcctgatcagtccccgtg

SEQ ID NO: 2951504 - DNA, 25 bp, Homo sapien
agttaccactgacttctcgcacgca

SEQ ID NO: 2951505 - DNA, 25 bp, Homo sapien
cgcacgcataaaatgaaccgggaga

SEQ ID NO: 2951506 - DNA, 25 bp, Homo sapien
taccactgacttctcgcacgcataa

SEQ ID NO: 2951507 - DNA, 25 bp, Homo sapien
tgacttctcgcacgcataaaatgaa

SEQ ID NO: 2951508 - DNA, 25 bp, Homo sapien
aaggaagcagtctcacaatctgatg

SEQ ID NO: 2951509 - DNA, 25 bp, Homo sapien
taaaactcattggattaaataggtg

SEQ ID NO: 2951510 - DNA, 25 bp, Homo sapien
cacaatctgatgaccttctgaaata

SEQ ID NO: 2951511 - DNA, 25 bp, Homo sapien
taagccacaccaaatatgaatttct

SEQ ID NO: 2951512 - DNA, 25 bp, Homo sapien
ggtgcctgaactagggtgcctcaaa

SEQ ID NO: 2951513 - DNA, 25 bp, Homo sapien
taagaacatttgagagcctaagggc

SEQ ID NO: 2951514 - DNA, 25 bp, Homo sapien
taaagggacacagacaacccatgtg

SEQ ID NO: 2951515 - DNA, 25 bp, Homo sapien
gaataatggcgtaatccagggctgg

SEQ ID NO: 2951516 - DNA, 25 bp, Homo sapien
tgggttcaagtagattctctcacct

SEQ ID NO: 2951517 - DNA, 25 bp, Homo sapien
tcccaagtgctgggaatactggcgt

SEQ ID NO: 2951518 - DNA, 25 bp, Homo sapien
tcacctcagactcccgagtagctgg

SEQ ID NO: 2951519 - DNA, 25 bp, Homo sapien
caccgcgcctggcctgtttatttta

SEQ ID NO: 2951520 - DNA, 25 bp, Homo sapien
ggcacatttagtttcatacagcaaa

SEQ ID NO: 2951521 - DNA, 25 bp, Homo sapien
ttcgtgacttaggacacgggtggca

SEQ ID NO: 2951522 - DNA, 25 bp, Homo sapien
ctttgttcacaagtagtctttggtg

SEQ ID NO: 2951523 - DNA, 25 bp, Homo sapien
tatgcatttgccagctgttactttg

SEQ ID NO: 2951524 - DNA, 25 bp, Homo sapien
ctgtgagtgagaggcggcgcgcagg

SEQ ID NO: 2951525 - DNA, 25 bp, Homo sapien
aggctgtgagtgagaggcggcgcgc

SEQ ID NO: 2951526 - DNA, 25 bp, Homo sapien
gctgtgagtgagaggcggcgcgcag

SEQ ID NO: 2951527 - DNA, 25 bp, Homo sapien
ggctgtgagtgagaggcggcgcgca

SEQ ID NO: 2951528 - DNA, 25 bp, Homo sapien
gcggcgactcctcctaagacgacgg

SEQ ID NO: 2951529 - DNA, 25 bp, Homo sapien
ggcggcgactcctcctaagacgacg

SEQ ID NO: 2951530 - DNA, 25 bp, Homo sapien
caaacccattcaccggctctgtctg

SEQ ID NO: 2951531 - DNA, 25 bp, Homo sapien
tgtctgggtagtcggtccggctccc

SEQ ID NO: 2951532 - DNA, 25 bp, Homo sapien
tctcgagaatggtgatcagctccat

SEQ ID NO: 2951533 - DNA, 25 bp, Homo sapien
tcttctcgagaatggtgatcagctc

SEQ ID NO: 2951534 - DNA, 25 bp, Homo sapien
agacacggtcttctcgagaatggtg

SEQ ID NO: 2951535 - DNA, 25 bp, Homo sapien
cacggtcttctcgagaatggtgatc

SEQ ID NO: 2951536 - DNA, 25 bp, Homo sapien
cggccgcacgctccaggaacttctg

SEQ ID NO: 2951537 - DNA, 25 bp, Homo sapien
cacggccgcacgctccaggaacttc

SEQ ID NO: 2951538 - DNA, 25 bp, Homo sapien
tccaggaacttctgcgccgcttcca

SEQ ID NO: 2951539 - DNA, 25 bp, Homo sapien
aggaacttctgcgccgcttccagct

SEQ ID NO: 2951540 - DNA, 25 bp, Homo sapien
tagcatcaatagcaagccacctctg

SEQ ID NO: 2951541 - DNA, 25 bp, Homo sapien
gttcttgatttgtagaccagctgca

SEQ ID NO: 2951542 - DNA, 25 bp, Homo sapien
cacctctgctgatattgtgccttga

SEQ ID NO: 2951543 - DNA, 25 bp, Homo sapien
caactctggcaacctgactgtttcc

SEQ ID NO: 2951544 - DNA, 25 bp, Homo sapien
tatcttggcaaatataaccgatggc

SEQ ID NO: 2951545 - DNA, 25 bp, Homo sapien
cactgtgaggcagaactaggccggt

SEQ ID NO: 2951546 - DNA, 25 bp, Homo sapien
ggaatgagttctggccactggttta

SEQ ID NO: 2951547 - DNA, 25 bp, Homo sapien
tccaatgtcgactccttcatgtgct

SEQ ID NO: 2951548 - DNA, 25 bp, Homo sapien
tctgtggattcaaacaactatggat

SEQ ID NO: 2951549 - DNA, 25 bp, Homo sapien
tgcatctgtactgcaccaaaaggtg

SEQ ID NO: 2951550 - DNA, 25 bp, Homo sapien
gtgctggaatcaatcccctccaaaa

SEQ ID NO: 2951551 - DNA, 25 bp, Homo sapien
cataaggagcttcacgacagaagca

SEQ ID NO: 2951552 - DNA, 25 bp, Homo sapien
ttgctttggtgaactccaatgagtt

SEQ ID NO: 2951553 - DNA, 25 bp, Homo sapien
cattggatttatcttgtagctgctc

SEQ ID NO: 2951554 - DNA, 25 bp, Homo sapien
caggagtgcattcgtagcagctagc

SEQ ID NO: 2951555 - DNA, 25 bp, Homo sapien
tatggcagtcagaatctcattggat

SEQ ID NO: 2951556 - DNA, 25 bp, Homo sapien
tccacactttggactgcaaaaggaa

SEQ ID NO: 2951557 - DNA, 25 bp, Homo sapien
ggatatctcacacaatacgaactcg

SEQ ID NO: 2951558 - DNA, 25 bp, Homo sapien
tgagaaacggcaaacactccatggg

SEQ ID NO: 2951559 - DNA, 25 bp, Homo sapien
tacgaactcgactaaactggaaaca

SEQ ID NO: 2951560 - DNA, 25 bp, Homo sapien
ggattactggatgtgagccccagca

SEQ ID NO: 2951561 - DNA, 25 bp, Homo sapien
ccttcctaaggtggtatgaaacaga

SEQ ID NO: 2951562 - DNA, 25 bp, Homo sapien
ggttttgttacgttgcacaggctag

SEQ ID NO: 2951563 - DNA, 25 bp, Homo sapien
cacaagagctcacaaaactggttaa

SEQ ID NO: 2951564 - DNA, 25 bp, Homo sapien
cctcgtatctggacactgtgtggct

SEQ ID NO: 2951565 - DNA, 25 bp, Homo sapien
cctgcataataaagtgcctttcaga

SEQ ID NO: 2951566 - DNA, 25 bp, Homo sapien
gcttcacagaccacctgcataataa

SEQ ID NO: 2951567 - DNA, 25 bp, Homo sapien
tggacactgtgtggcttcacagacc

SEQ ID NO: 2951568 - DNA, 25 bp, Homo sapien
gcaatagcaaagctgctttaatggc

SEQ ID NO: 2951569 - DNA, 25 bp, Homo sapien
gtagcaaagctgatcaaaaaccttt

SEQ ID NO: 2951570 - DNA, 25 bp, Homo sapien
acaatcacttgaataacctatggca

SEQ ID NO: 2951571 - DNA, 25 bp, Homo sapien
caggttttgggtatagcaatagcaa

SEQ ID NO: 2951572 - DNA, 25 bp, Homo sapien
gttagattcactcaaatgggccaat

SEQ ID NO: 2951573 - DNA, 25 bp, Homo sapien
tgaacagcagatcagatagtttact

SEQ ID NO: 2951574 - DNA, 25 bp, Homo sapien
tgggatacgttatcatttccctaaa

SEQ ID NO: 2951575 - DNA, 25 bp, Homo sapien
tactaaaataacaacgcaatctgac

SEQ ID NO: 2951576 - DNA, 25 bp, Homo sapien
gtctccatgtactgataatataagg

SEQ ID NO: 2951577 - DNA, 25 bp, Homo sapien
aatataaggacattatcttcaccag

SEQ ID NO: 2951578 - DNA, 25 bp, Homo sapien
gacccatatatgtctccatgtactg

SEQ ID NO: 2951579 - DNA, 25 bp, Homo sapien
aagagcaggacccatatatgtctcc

SEQ ID NO: 2951580 - DNA, 25 bp, Homo sapien
tcatcacagacattggaccagaatt

SEQ ID NO: 2951581 - DNA, 25 bp, Homo sapien
tgtcacttttcattgcttcgattgt

SEQ ID NO: 2951582 - DNA, 25 bp, Homo sapien
cacttttcattgcttcgattgtgat

SEQ ID NO: 2951583 - DNA, 25 bp, Homo sapien
agacattggaccagaattctatccc

SEQ ID NO: 2951584 - DNA, 25 bp, Homo sapien
tggaaccagatactgtagtgctccc

SEQ ID NO: 2951585 - DNA, 25 bp, Homo sapien
cagatactgtagtgctcccttcgca

SEQ ID NO: 2951586 - DNA, 25 bp, Homo sapien
tcccttcgcataaaacttgctggtg

SEQ ID NO: 2951587 - DNA, 25 bp, Homo sapien
gtgtgaggattggaaccagatactg

SEQ ID NO: 2951588 - DNA, 25 bp, Homo sapien
ggctctggtccttccaagatacaac

SEQ ID NO: 2951589 - DNA, 25 bp, Homo sapien
ccgccaatctgggttcttgatgtgt

SEQ ID NO: 2951590 - DNA, 25 bp, Homo sapien
aagcatgaggcacacccctgctgct

SEQ ID NO: 2951591 - DNA, 25 bp, Homo sapien
aactagtggtttgagctgactgggc

SEQ ID NO: 2951592 - DNA, 25 bp, Homo sapien
gcaatggcacgacttgtaatagcaa

SEQ ID NO: 2951593 - DNA, 25 bp, Homo sapien
catgcacataggaaaaagcttcaag

SEQ ID NO: 2951594 - DNA, 25 bp, Homo sapien
gggaatcagtgctaggtgcaaaaaa

SEQ ID NO: 2951595 - DNA, 25 bp, Homo sapien
ggaagagcctgttgcacacacatgc

SEQ ID NO: 2951596 - DNA, 25 bp, Homo sapien
acagtccatgcagctgtatctcgaa

SEQ ID NO: 2951597 - DNA, 25 bp, Homo sapien
ctgtatctcgaacaactacactggg

SEQ ID NO: 2951598 - DNA, 25 bp, Homo sapien
gcaggggagccaagtagacatcatt

SEQ ID NO: 2951599 - DNA, 25 bp, Homo sapien
catgcagctgtatctcgaacaacta

SEQ ID NO: 2951600 - DNA, 25 bp, Homo sapien
atcctgtctgataatctgacatctc

SEQ ID NO: 2951601 - DNA, 25 bp, Homo sapien
cagaaatcctgtctgataatctgac

SEQ ID NO: 2951602 - DNA, 25 bp, Homo sapien
aaatcctgtctgataatctgacatc

SEQ ID NO: 2951603 - DNA, 25 bp, Homo sapien
agaaatcctgtctgataatctgaca

SEQ ID NO: 2951604 - DNA, 25 bp, Homo sapien
ctgtctgtagtctctaggagcttct

SEQ ID NO: 2951605 - DNA, 25 bp, Homo sapien
gaagataagcagtaagtagctggtt

SEQ ID NO: 2951606 - DNA, 25 bp, Homo sapien
tgatcatcagcaacgtctgcagctt

SEQ ID NO: 2951607 - DNA, 25 bp, Homo sapien
ctaggagcttctgaactatgagttc

SEQ ID NO: 2951608 - DNA, 25 bp, Homo sapien
atataaaaatatggtagttggccgg

SEQ ID NO: 2951609 - DNA, 25 bp, Homo sapien
caagttcttcatcctatataaaaat

SEQ ID NO: 2951610 - DNA, 25 bp, Homo sapien
cccaagttcttcatcctatataaaa

SEQ ID NO: 2951611 - DNA, 25 bp, Homo sapien
tcctggcactttggggggcgaaggc

SEQ ID NO: 2951612 - DNA, 25 bp, Homo sapien
tgttgcagtcgttccatgatgacca

SEQ ID NO: 2951613 - DNA, 25 bp, Homo sapien
gcaggataacaatccttggcactgt

SEQ ID NO: 2951614 - DNA, 25 bp, Homo sapien
gattcatatgcagaactcctcaggt

SEQ ID NO: 2951615 - DNA, 25 bp, Homo sapien
caaagtcgttttctggacagcagga

SEQ ID NO: 2951616 - DNA, 25 bp, Homo sapien
ctgaagagttgcacagagtaaagac

SEQ ID NO: 2951617 - DNA, 25 bp, Homo sapien
agagttgcacagagtaaagactgaa

SEQ ID NO: 2951618 - DNA, 25 bp, Homo sapien
tgaaggtcattgaactggattctat

SEQ ID NO: 2951619 - DNA, 25 bp, Homo sapien
tatcggatgtgctctggatatgtga

SEQ ID NO: 2951620 - DNA, 25 bp, Homo sapien
tgccatcagggcatcctcttgtact

SEQ ID NO: 2951621 - DNA, 25 bp, Homo sapien
ctttggaacatccttaacagggagg

SEQ ID NO: 2951622 - DNA, 25 bp, Homo sapien
gatgttgcactttccgaagaacatt

SEQ ID NO: 2951623 - DNA, 25 bp, Homo sapien
cataaccacatcagagatctgcaaa

SEQ ID NO: 2951624 - DNA, 25 bp, Homo sapien
tccatgtacttgaggaattcaccac

SEQ ID NO: 2951625 - DNA, 25 bp, Homo sapien
catgtacttgaggaattcaccaccc

SEQ ID NO: 2951626 - DNA, 25 bp, Homo sapien
tacttgaggaattcaccacccaaca

SEQ ID NO: 2951627 - DNA, 25 bp, Homo sapien
tgtacttgaggaattcaccacccaa

SEQ ID NO: 2951628 - DNA, 25 bp, Homo sapien
tactattttgaaaagcacatcctac

SEQ ID NO: 2951629 - DNA, 25 bp, Homo sapien
aagcagctgcatcacctcgtcacag

SEQ ID NO: 2951630 - DNA, 25 bp, Homo sapien
gattgcagggcacggcacaagtctc

SEQ ID NO: 2951631 - DNA, 25 bp, Homo sapien
cctcgtcacagaaaggtatgatgtt

SEQ ID NO: 2951632 - DNA, 25 bp, Homo sapien
cagaaaggtatgatgttggattgca

SEQ ID NO: 2951633 - DNA, 25 bp, Homo sapien
tcacagacctgtggacgttctcatt

SEQ ID NO: 2951634 - DNA, 25 bp, Homo sapien
ctccaatagcaagggcaatatcacc

SEQ ID NO: 2951635 - DNA, 25 bp, Homo sapien
agagtattcaatacaacctctaagt

SEQ ID NO: 2951636 - DNA, 25 bp, Homo sapien
ggaggcctgctgaagagtattcaat

SEQ ID NO: 2951637 - DNA, 25 bp, Homo sapien
ttcccttagctcattcagataatcc

SEQ ID NO: 2951638 - DNA, 25 bp, Homo sapien
aatccctggacgattccagtatagg

SEQ ID NO: 2951639 - DNA, 25 bp, Homo sapien
tccaagcagctttcccttagctcat

SEQ ID NO: 2951640 - DNA, 25 bp, Homo sapien
tgatccccctttaatccctggacga

SEQ ID NO: 2951641 - DNA, 25 bp, Homo sapien
cactaggttcacaagcgagctacag

SEQ ID NO: 2951642 - DNA, 25 bp, Homo sapien
cagtagtctacagttttccccaagc

SEQ ID NO: 2951643 - DNA, 25 bp, Homo sapien
cttttaagcaacaggcactaggttc

SEQ ID NO: 2951644 - DNA, 25 bp, Homo sapien
ctaagtgcacattggcgagcggacg

SEQ ID NO: 2951645 - DNA, 25 bp, Homo sapien
ttgctgaatcccatcccttgtaata

SEQ ID NO: 2951646 - DNA, 25 bp, Homo sapien
gggacctgccactcatggttgatac

SEQ ID NO: 2951647 - DNA, 25 bp, Homo sapien
ccttgtaatactcaagaaatatgag

SEQ ID NO: 2951648 - DNA, 25 bp, Homo sapien
cctccaatttagcttgtggggatgg

SEQ ID NO: 2951649 - DNA, 25 bp, Homo sapien
agagaaggtattggtcgggtgcggt

SEQ ID NO: 2951650 - DNA, 25 bp, Homo sapien
gagagaaggtattggtcgggtgcgg

SEQ ID NO: 2951651 - DNA, 25 bp, Homo sapien
atgtggtcaatgaaagacagaataa

SEQ ID NO: 2951652 - DNA, 25 bp, Homo sapien
cctattagtccagcagcacaagcta

SEQ ID NO: 2951653 - DNA, 25 bp, Homo sapien
ctattagtccagcagcacaagctac

SEQ ID NO: 2951654 - DNA, 25 bp, Homo sapien
tccttcccaaatgctgtacataagt

SEQ ID NO: 2951655 - DNA, 25 bp, Homo sapien
tcgatctccgcccttcagttaacaa

SEQ ID NO: 2951656 - DNA, 25 bp, Homo sapien
ggatcattggcctagcttctactaa

SEQ ID NO: 2951657 - DNA, 25 bp, Homo sapien
cagttcttttgttgcccatgtagca

SEQ ID NO: 2951658 - DNA, 25 bp, Homo sapien
tagagctaggcaacgtctaaaagca

SEQ ID NO: 2951659 - DNA, 25 bp, Homo sapien
atcttctctagagctaggcaacgtc

SEQ ID NO: 2951660 - DNA, 25 bp, Homo sapien
tctctagagctaggcaacgtctaaa

SEQ ID NO: 2951661 - DNA, 25 bp, Homo sapien
agctaggcaacgtctaaaagcactg

SEQ ID NO: 2951662 - DNA, 25 bp, Homo sapien
ttttctatatcctctaacgccagag

SEQ ID NO: 2951663 - DNA, 25 bp, Homo sapien
tcacagttgaaccatattattagga

SEQ ID NO: 2951664 - DNA, 25 bp, Homo sapien
ggataggagctctgaccattcgtca

SEQ ID NO: 2951665 - DNA, 25 bp, Homo sapien
ggaaaggcgccttgatgaaaagatc

SEQ ID NO: 2951666 - DNA, 25 bp, Homo sapien
cattttcatcacaagacttctagtt

SEQ ID NO: 2951667 - DNA, 25 bp, Homo sapien
tgcttttgaagtgcagcaagagacc

SEQ ID NO: 2951668 - DNA, 25 bp, Homo sapien
gcaagagaccaataccgcattgtag

SEQ ID NO: 2951669 - DNA, 25 bp, Homo sapien
tttattaaccttcaacttcagtgga

SEQ ID NO: 2951670 - DNA, 25 bp, Homo sapien
gaaacaaggcattagaggaccaggc

SEQ ID NO: 2951671 - DNA, 25 bp, Homo sapien
catatggatgggcaaaactgagcca

SEQ ID NO: 2951672 - DNA, 25 bp, Homo sapien
cacttaggaatggaaggcttggaca

SEQ ID NO: 2951673 - DNA, 25 bp, Homo sapien
caagcccagtttttgctagagtgga

SEQ ID NO: 2951674 - DNA, 25 bp, Homo sapien
ttgtggcaaaccaaagcctagtccg

SEQ ID NO: 2951675 - DNA, 25 bp, Homo sapien
taaggacaaatacccagactatgga

SEQ ID NO: 2951676 - DNA, 25 bp, Homo sapien
gcattttgcacccagttgccttagg

SEQ ID NO: 2951677 - DNA, 25 bp, Homo sapien
tcttcccaagcagacggtaactaca

SEQ ID NO: 2951678 - DNA, 25 bp, Homo sapien
gatggaaggaaaaggtttcttgctc

SEQ ID NO: 2951679 - DNA, 25 bp, Homo sapien
aggaaaaggtttcttgctctctctg

SEQ ID NO: 2951680 - DNA, 25 bp, Homo sapien
ctttttggctcctgaggtgggatgg

SEQ ID NO: 2951681 - DNA, 25 bp, Homo sapien
tgggaatctccgagggggaggatgg

SEQ ID NO: 2951682 - DNA, 25 bp, Homo sapien
gtgagcgcaatggaaggcggctggg

SEQ ID NO: 2951683 - DNA, 25 bp, Homo sapien
cagcgcccgggtgagcgcaatggaa

SEQ ID NO: 2951684 - DNA, 25 bp, Homo sapien
cccagcgcccgggtgagcgcaatgg

SEQ ID NO: 2951685 - DNA, 25 bp, Homo sapien
gcgcccgggtgagcgcaatggaagg

SEQ ID NO: 2951686 - DNA, 25 bp, Homo sapien
cccgctgccagggtgttgacaagta

SEQ ID NO: 2951687 - DNA, 25 bp, Homo sapien
tcccgaaagcaggagtaggcagtga

SEQ ID NO: 2951688 - DNA, 25 bp, Homo sapien
aagtagggacaagtaagccaggccg

SEQ ID NO: 2951689 - DNA, 25 bp, Homo sapien
gaacgaattcccaaggctgtctcag

SEQ ID NO: 2951690 - DNA, 25 bp, Homo sapien
ggtgagggccgggccgcggcccaca

SEQ ID NO: 2951691 - DNA, 25 bp, Homo sapien
gtgagggccgggccgcggcccacac

SEQ ID NO: 2951692 - DNA, 25 bp, Homo sapien
tgagggccgggccgcggcccacacg

SEQ ID NO: 2951693 - DNA, 25 bp, Homo sapien
ccagccgttccttgatgtctccgta

SEQ ID NO: 2951694 - DNA, 25 bp, Homo sapien
tgggaggcggagcacatgtcgcccc

SEQ ID NO: 2951695 - DNA, 25 bp, Homo sapien
tctcgtagactttgaggcggcgtcg

SEQ ID NO: 2951696 - DNA, 25 bp, Homo sapien
ggagggtggcgttctccctctccag

SEQ ID NO: 2951697 - DNA, 25 bp, Homo sapien
cagcagggagccatccttgatttca

SEQ ID NO: 2951698 - DNA, 25 bp, Homo sapien
tgctgcaggctgaccttctccacct

SEQ ID NO: 2951699 - DNA, 25 bp, Homo sapien
tggaactggttgagccgttgctgca

SEQ ID NO: 2951700 - DNA, 25 bp, Homo sapien
ctcatgctggaactggttgagccgt

SEQ ID NO: 2951701 - DNA, 25 bp, Homo sapien
caagtcactcttctccacgcagagt

SEQ ID NO: 2951702 - DNA, 25 bp, Homo sapien
ttctcgtaggcctggatcatctctc

SEQ ID NO: 2951703 - DNA, 25 bp, Homo sapien
agctctgtctccaagtcactcttct

SEQ ID NO: 2951704 - DNA, 25 bp, Homo sapien
cacgcagagtttctcgtaggcctgg

SEQ ID NO: 2951705 - DNA, 25 bp, Homo sapien
cacagacaccgcaacatggataaca

SEQ ID NO: 2951706 - DNA, 25 bp, Homo sapien
tgtgtgacacatgggactgcactgt

SEQ ID NO: 2951707 - DNA, 25 bp, Homo sapien
attttgacctgctcaccggcacagc

SEQ ID NO: 2951708 - DNA, 25 bp, Homo sapien
ccctcacaagggcaaatgggcgggc

SEQ ID NO: 2951709 - DNA, 25 bp, Homo sapien
aaccacagatctgacgcaggtgcgt

SEQ ID NO: 2951710 - DNA, 25 bp, Homo sapien
tgcaggtctaaatcagtgcagggag

SEQ ID NO: 2951711 - DNA, 25 bp, Homo sapien
tgacgcaggtgcgtctccaccaggg

SEQ ID NO: 2951712 - DNA, 25 bp, Homo sapien
cagtgccaggtagtgcaggtctaaa

SEQ ID NO: 2951713 - DNA, 25 bp, Homo sapien
gccgctcgcactcggcctggagctg

SEQ ID NO: 2951714 - DNA, 25 bp, Homo sapien
tccaaagcctcttctagccgccgcc

SEQ ID NO: 2951715 - DNA, 25 bp, Homo sapien
caggtcactcacactgggtgtggag

SEQ ID NO: 2951716 - DNA, 25 bp, Homo sapien
cctctccctgcgcggcctccaaagc

SEQ ID NO: 2951717 - DNA, 25 bp, Homo sapien
cgccatgtctcgctccgactggttg

SEQ ID NO: 2951718 - DNA, 25 bp, Homo sapien
tttcacccacgccatgtctcgctcc

SEQ ID NO: 2951719 - DNA, 25 bp, Homo sapien
ccatgtctcgctccgactggttgga

SEQ ID NO: 2951720 - DNA, 25 bp, Homo sapien
tctcgctccgactggttggaggcca

SEQ ID NO: 2951721 - DNA, 25 bp, Homo sapien
aggaggaagttgctttgcaacaacc

SEQ ID NO: 2951722 - DNA, 25 bp, Homo sapien
gccgtggaacggacttgaggttgcg

SEQ ID NO: 2951723 - DNA, 25 bp, Homo sapien
tctcctcgaccagctatgactggtg

SEQ ID NO: 2951724 - DNA, 25 bp, Homo sapien
accacttcctttcgggcgccttgag

SEQ ID NO: 2951725 - DNA, 25 bp, Homo sapien
aagggcagtgggtctaccgtcccag

SEQ ID NO: 2951726 - DNA, 25 bp, Homo sapien
gagggcagtgggaaagacgagaagg

SEQ ID NO: 2951727 - DNA, 25 bp, Homo sapien
cagtgggaaagacgagaagggcagt

SEQ ID NO: 2951728 - DNA, 25 bp, Homo sapien
tgggaaagacgagaagggcagtggg

SEQ ID NO: 2951729 - DNA, 25 bp, Homo sapien
agagtcctcaagattctcccctgta

SEQ ID NO: 2951730 - DNA, 25 bp, Homo sapien
cctgtagggaactcaactcccgaag

SEQ ID NO: 2951731 - DNA, 25 bp, Homo sapien
tcggtgtaggccagcgccaaattca

SEQ ID NO: 2951732 - DNA, 25 bp, Homo sapien
cctccgtcagctcggtgtaggccag

SEQ ID NO: 2951733 - DNA, 25 bp, Homo sapien
gtccccatgaccaagatggttgcca

SEQ ID NO: 2951734 - DNA, 25 bp, Homo sapien
gtggtccccatgaccaagatggttg

SEQ ID NO: 2951735 - DNA, 25 bp, Homo sapien
caactccaggccacaggaaaggaaa

SEQ ID NO: 2951736 - DNA, 25 bp, Homo sapien
ataaagggtggtccccatgaccaag

SEQ ID NO: 2951737 - DNA, 25 bp, Homo sapien
gggagtggcgttgtgacagcggcga

SEQ ID NO: 2951738 - DNA, 25 bp, Homo sapien
tggcgttgtgacagcggcgagtgcc

SEQ ID NO: 2951739 - DNA, 25 bp, Homo sapien
tgtgacagcggcgagtgcctctggc

SEQ ID NO: 2951740 - DNA, 25 bp, Homo sapien
cgttgtgacagcggcgagtgcctct

SEQ ID NO: 2951741 - DNA, 25 bp, Homo sapien
ctgggggactggcacgacggcggca

SEQ ID NO: 2951742 - DNA, 25 bp, Homo sapien
gggcacgggggagccgctcgggcag

SEQ ID NO: 2951743 - DNA, 25 bp, Homo sapien
acgacggcggcaccggcgagcggcg

SEQ ID NO: 2951744 - DNA, 25 bp, Homo sapien
acgggggagccgctcgggcaggcgg

SEQ ID NO: 2951745 - DNA, 25 bp, Homo sapien
cgccagctcagagtagctgcggcgg

SEQ ID NO: 2951746 - DNA, 25 bp, Homo sapien
ggaagccggccttcacgtggtggct

SEQ ID NO: 2951747 - DNA, 25 bp, Homo sapien
gtggctgggcggcttggcgtaggcg

SEQ ID NO: 2951748 - DNA, 25 bp, Homo sapien
gaggcgcccgcgtaggccgcgccct

SEQ ID NO: 2951749 - DNA, 25 bp, Homo sapien
ctgcttctcgaagcgcagccggatg

SEQ ID NO: 2951750 - DNA, 25 bp, Homo sapien
agaaggaggcgcagcggatggtgcc

SEQ ID NO: 2951751 - DNA, 25 bp, Homo sapien
cctgccagggccgtagagctcgctg

SEQ ID NO: 2951752 - DNA, 25 bp, Homo sapien
ttgatggacggccaggactgcgcgt

SEQ ID NO: 2951753 - DNA, 25 bp, Homo sapien
tgcggatgtcggagcccaccgtctc

SEQ ID NO: 2951754 - DNA, 25 bp, Homo sapien
gtcaatgtgtttgatgagggcatca

SEQ ID NO: 2951755 - DNA, 25 bp, Homo sapien
catcatccgggtacccgacagggaa

SEQ ID NO: 2951756 - DNA, 25 bp, Homo sapien
tctccaggtgggagtcaatgtgttt

SEQ ID NO: 2951757 - DNA, 25 bp, Homo sapien
gagccccgtctgagaaagatggaca

SEQ ID NO: 2951758 - DNA, 25 bp, Homo sapien
ggcacacacgttgactcggtagcaa

SEQ ID NO: 2951759 - DNA, 25 bp, Homo sapien
gggtacctgccttgacgatctgtgc

SEQ ID NO: 2951760 - DNA, 25 bp, Homo sapien
tacaatgacgtgtccttggcccctt

SEQ ID NO: 2951761 - DNA, 25 bp, Homo sapien
tatttggactttcaacttgttcaga

SEQ ID NO: 2951762 - DNA, 25 bp, Homo sapien
tttatttggactttcaacttgttca

SEQ ID NO: 2951763 - DNA, 25 bp, Homo sapien
ttatttggactttcaacttgttcag

SEQ ID NO: 2951764 - DNA, 25 bp, Homo sapien
ggagctgttgctgcactcagctgat

SEQ ID NO: 2951765 - DNA, 25 bp, Homo sapien
gcactcagctgatctcctgacacag

SEQ ID NO: 2951766 - DNA, 25 bp, Homo sapien
ttgctgcactcagctgatctcctga

SEQ ID NO: 2951767 - DNA, 25 bp, Homo sapien
gctgttgctgcactcagctgatctc

SEQ ID NO: 2951768 - DNA, 25 bp, Homo sapien
gttggctcttagaaggcaaccaggg

SEQ ID NO: 2951769 - DNA, 25 bp, Homo sapien
aaccagggggcgcagccttgagcac

SEQ ID NO: 2951770 - DNA, 25 bp, Homo sapien
gggcgcagccttgagcactgagaat

SEQ ID NO: 2951771 - DNA, 25 bp, Homo sapien
gcagccttgagcactgagaatgtct

SEQ ID NO: 2951772 - DNA, 25 bp, Homo sapien
gagagttcggctcctgcaacaccca

SEQ ID NO: 2951773 - DNA, 25 bp, Homo sapien
gggagagttcggctcctgcaacacc

SEQ ID NO: 2951774 - DNA, 25 bp, Homo sapien
agaagggagagttcggctcctgcaa

SEQ ID NO: 2951775 - DNA, 25 bp, Homo sapien
cccatgaaaggggaggggcaagatc

SEQ ID NO: 2951776 - DNA, 25 bp, Homo sapien
tcccatccacagtgtgcttttgctg

SEQ ID NO: 2951777 - DNA, 25 bp, Homo sapien
cccatccacagtgtgcttttgctgt

SEQ ID NO: 2951778 - DNA, 25 bp, Homo sapien
ctcccatccacagtgtgcttttgct

SEQ ID NO: 2951779 - DNA, 25 bp, Homo sapien
tcctcaggcacaaccatttgccagt

SEQ ID NO: 2951780 - DNA, 25 bp, Homo sapien
agggagtcctgagaccctgtgcgaa

SEQ ID NO: 2951781 - DNA, 25 bp, Homo sapien
gaccctgtgcgaagtctcacctctg

SEQ ID NO: 2951782 - DNA, 25 bp, Homo sapien
tctgagctcagaggacgcagggagt

SEQ ID NO: 2951783 - DNA, 25 bp, Homo sapien
agagaaaggatgaacgagatgtgcc

SEQ ID NO: 2951784 - DNA, 25 bp, Homo sapien
agatgtgcctgagtaccagccacag

SEQ ID NO: 2951785 - DNA, 25 bp, Homo sapien
gatgaacgagatgtgcctgagtacc

SEQ ID NO: 2951786 - DNA, 25 bp, Homo sapien
ctgagtaccagccacagctcacagc

SEQ ID NO: 2951787 - DNA, 25 bp, Homo sapien
ccatttctttccaatcactggcatc

SEQ ID NO: 2951788 - DNA, 25 bp, Homo sapien
tctccttgctcaccgccatttcttt

SEQ ID NO: 2951789 - DNA, 25 bp, Homo sapien
tttctttccaatcactggcatcaga

SEQ ID NO: 2951790 - DNA, 25 bp, Homo sapien
tccttgctcaccgccatttctttcc

SEQ ID NO: 2951791 - DNA, 25 bp, Homo sapien
cactgggtccgtggtgagaacgcca

SEQ ID NO: 2951792 - DNA, 25 bp, Homo sapien
tggtgagaacgccatgtcgcttccc

SEQ ID NO: 2951793 - DNA, 25 bp, Homo sapien
gtccgtggtgagaacgccatgtcgc

SEQ ID NO: 2951794 - DNA, 25 bp, Homo sapien
agaacgccatgtcgcttccccaggg

SEQ ID NO: 2951795 - DNA, 25 bp, Homo sapien
aggcgggaaatatccagggctttgg

SEQ ID NO: 2951796 - DNA, 25 bp, Homo sapien
tggggaggcgggaaatatccagggc

SEQ ID NO: 2951797 - DNA, 25 bp, Homo sapien
caggagttgggctggggaggcggga

SEQ ID NO: 2951798 - DNA, 25 bp, Homo sapien
gctggggaggcgggaaatatccagg

SEQ ID NO: 2951799 - DNA, 25 bp, Homo sapien
gagttggctgcatcttgtagctcta

SEQ ID NO: 2951800 - DNA, 25 bp, Homo sapien
ccacatgtgctgagttggctgcatc

SEQ ID NO: 2951801 - DNA, 25 bp, Homo sapien
ccaccagaggtccacatgtgctgag

SEQ ID NO: 2951802 - DNA, 25 bp, Homo sapien
tgcatcttgtagctctagccctggg

SEQ ID NO: 2951803 - DNA, 25 bp, Homo sapien
aggcgcgcggcagctctcgggcttc

SEQ ID NO: 2951804 - DNA, 25 bp, Homo sapien
cagcgctttgctgtggctttatgaa

SEQ ID NO: 2951805 - DNA, 25 bp, Homo sapien
ctgtcactagagtcgcagcgctttg

SEQ ID NO: 2951806 - DNA, 25 bp, Homo sapien
gagcccgggctctgacgcctggctt

SEQ ID NO: 2951807 - DNA, 25 bp, Homo sapien
gggatgggcagggagcagggggcgg

SEQ ID NO: 2951808 - DNA, 25 bp, Homo sapien
ggatgggcagggagcagggggcggg

SEQ ID NO: 2951809 - DNA, 25 bp, Homo sapien
ctgggatgggcagggagcagggggc

SEQ ID NO: 2951810 - DNA, 25 bp, Homo sapien
tgggatgggcagggagcagggggcg

SEQ ID NO: 2951811 - DNA, 25 bp, Homo sapien
gcaccttcccgtagccgtcgaggac

SEQ ID NO: 2951812 - DNA, 25 bp, Homo sapien
ctccgcgcgcgagagggtcgcgtgg

SEQ ID NO: 2951813 - DNA, 25 bp, Homo sapien
ctggcaccttcccgtagccgtcgag

SEQ ID NO: 2951814 - DNA, 25 bp, Homo sapien
tccgcgcgcgagagggtcgcgtggg

SEQ ID NO: 2951815 - DNA, 25 bp, Homo sapien
gattaaacttggaccacaacaggtg

SEQ ID NO: 2951816 - DNA, 25 bp, Homo sapien
ggtgcccgtcagcatgtctccgcaa

SEQ ID NO: 2951817 - DNA, 25 bp, Homo sapien
aacaggtggttgttgagcgcgaccc

SEQ ID NO: 2951818 - DNA, 25 bp, Homo sapien
cgcgggtagcgcgtagtcctcacgc

SEQ ID NO: 2951819 - DNA, 25 bp, Homo sapien
aaacatcctgtagtggctggtgggc

SEQ ID NO: 2951820 - DNA, 25 bp, Homo sapien
acttgccgctctggtaccgccagtg

SEQ ID NO: 2951821 - DNA, 25 bp, Homo sapien
taaatgacaggaatgggaacatccg

SEQ ID NO: 2951822 - DNA, 25 bp, Homo sapien
tggtgctggtccaccaagaccacgt

SEQ ID NO: 2951823 - DNA, 25 bp, Homo sapien
ggacagttcacctctttgacatgca

SEQ ID NO: 2951824 - DNA, 25 bp, Homo sapien
atgcagcccccgggacagaaccctg

SEQ ID NO: 2951825 - DNA, 25 bp, Homo sapien
gacagttcacctctttgacatgcag

SEQ ID NO: 2951826 - DNA, 25 bp, Homo sapien
tgcagcccccgggacagaaccctgg

SEQ ID NO: 2951827 - DNA, 25 bp, Homo sapien
gcatccagtgcgctcctgtgttggg

SEQ ID NO: 2951828 - DNA, 25 bp, Homo sapien
tttcccaaatgaaacttcctggcgc

SEQ ID NO: 2951829 - DNA, 25 bp, Homo sapien
ggacgcccccttgttgtttgtgagc

SEQ ID NO: 2951830 - DNA, 25 bp, Homo sapien
ggtcacattgttggacgcccccttg

SEQ ID NO: 2951831 - DNA, 25 bp, Homo sapien
tacttatggagggactggagcacaa

SEQ ID NO: 2951832 - DNA, 25 bp, Homo sapien
aagatatgcgtgttggaagcgttgc

SEQ ID NO: 2951833 - DNA, 25 bp, Homo sapien
tcacggcaatgaactgggtttcttg

SEQ ID NO: 2951834 - DNA, 25 bp, Homo sapien
ttcacctcaacgatatgcagccggg

SEQ ID NO: 2951835 - DNA, 25 bp, Homo sapien
gcaaaggggttattatcaattttca

SEQ ID NO: 2951836 - DNA, 25 bp, Homo sapien
aaggggttattatcaattttcagct

SEQ ID NO: 2951837 - DNA, 25 bp, Homo sapien
caaaggggttattatcaattttcag

SEQ ID NO: 2951838 - DNA, 25 bp, Homo sapien
gaagcggctgggaacaggatactgg

SEQ ID NO: 2951839 - DNA, 25 bp, Homo sapien
gacctcctggcctcggtagtaggac

SEQ ID NO: 2951840 - DNA, 25 bp, Homo sapien
gactgctcgaaactcagcctcatag

SEQ ID NO: 2951841 - DNA, 25 bp, Homo sapien
taggagaggagagtagtgatctccc

SEQ ID NO: 2951842 - DNA, 25 bp, Homo sapien
cagtccacaccaaggggggaccctg

SEQ ID NO: 2951843 - DNA, 25 bp, Homo sapien
cagggccgggttccatgggcagagt

SEQ ID NO: 2951844 - DNA, 25 bp, Homo sapien
cctccagggccgggttccatgggca

SEQ ID NO: 2951845 - DNA, 25 bp, Homo sapien
gttccatgggcagagtccgcatagg

SEQ ID NO: 2951846 - DNA, 25 bp, Homo sapien
gaatcactggattccggccggatgg

SEQ ID NO: 2951847 - DNA, 25 bp, Homo sapien
ggacacgcgcctcctcttagagtct

SEQ ID NO: 2951848 - DNA, 25 bp, Homo sapien
agcttccttatcaaaaggagaaggg

SEQ ID NO: 2951849 - DNA, 25 bp, Homo sapien
ggagctgtcaccactggaaggatag

SEQ ID NO: 2951850 - DNA, 25 bp, Homo sapien
gctgtccaaagtcaggtgagtcctt

SEQ ID NO: 2951851 - DNA, 25 bp, Homo sapien
tcagggattaacacacatgccaacg

SEQ ID NO: 2951852 - DNA, 25 bp, Homo sapien
ccctggcgggctgatggttataaca

SEQ ID NO: 2951853 - DNA, 25 bp, Homo sapien
tcccaaattagtcggtgtcctccaa

SEQ ID NO: 2951854 - DNA, 25 bp, Homo sapien
taatgctaataagtcctgataaccc

SEQ ID NO: 2951855 - DNA, 25 bp, Homo sapien
tgctaataagtcctgataacccaat

SEQ ID NO: 2951856 - DNA, 25 bp, Homo sapien
taacccaataccatcagaccagccc

SEQ ID NO: 2951857 - DNA, 25 bp, Homo sapien
ataacccaataccatcagaccagcc

SEQ ID NO: 2951858 - DNA, 25 bp, Homo sapien
cacccggcctgctgcaccgagagcc

SEQ ID NO: 2951859 - DNA, 25 bp, Homo sapien
ctcagggcgcaggccatcgaggcca

SEQ ID NO: 2951860 - DNA, 25 bp, Homo sapien
cctgcgccttctccgcgtgctccga

SEQ ID NO: 2951861 - DNA, 25 bp, Homo sapien
gcgtctctggtcctccggctctgcc

SEQ ID NO: 2951862 - DNA, 25 bp, Homo sapien
aaccccgctgtgtgcggacggacca

SEQ ID NO: 2951863 - DNA, 25 bp, Homo sapien
ccctcgtcactgttggtgagcggaa

SEQ ID NO: 2951864 - DNA, 25 bp, Homo sapien
ccaagatgacggctgccagggacct

SEQ ID NO: 2951865 - DNA, 25 bp, Homo sapien
cagtagctagggtggtagagggcca

SEQ ID NO: 2951866 - DNA, 25 bp, Homo sapien
ttcttacaagacaacatgatggttt

SEQ ID NO: 2951867 - DNA, 25 bp, Homo sapien
cattttcttacaagacaacatgatg

SEQ ID NO: 2951868 - DNA, 25 bp, Homo sapien
tttcttacaagacaacatgatggtt

SEQ ID NO: 2951869 - DNA, 25 bp, Homo sapien
ttttcttacaagacaacatgatggt

SEQ ID NO: 2951870 - DNA, 25 bp, Homo sapien
tggacggaacaaagacgcgccggct

SEQ ID NO: 2951871 - DNA, 25 bp, Homo sapien
tgaagatgcctggacggaacaaaga

SEQ ID NO: 2951872 - DNA, 25 bp, Homo sapien
tatttcctcggcagcgtccagaggg

SEQ ID NO: 2951873 - DNA, 25 bp, Homo sapien
agggagggacgcgttgaagatgcct

SEQ ID NO: 2951874 - DNA, 25 bp, Homo sapien
cagagctggcggtctttgagtgcac

SEQ ID NO: 2951875 - DNA, 25 bp, Homo sapien
aggaccagaagacgccggaactgga

SEQ ID NO: 2951876 - DNA, 25 bp, Homo sapien
gaactggagagacccggagcgcctt

SEQ ID NO: 2951877 - DNA, 25 bp, Homo sapien
cttgcgcgcacgctctgggatggac

SEQ ID NO: 2951878 - DNA, 25 bp, Homo sapien
atctcagacacaggagagacatctc

SEQ ID NO: 2951879 - DNA, 25 bp, Homo sapien
ccatctcagacacaggagagacatc

SEQ ID NO: 2951880 - DNA, 25 bp, Homo sapien
gacacaggagagacatctccttcta

SEQ ID NO: 2951881 - DNA, 25 bp, Homo sapien
caggagagacatctccttctaccag

SEQ ID NO: 2951882 - DNA, 25 bp, Homo sapien
ccagcagaaccaacaggtaagggcc

SEQ ID NO: 2951883 - DNA, 25 bp, Homo sapien
aaccagcagaaccaacaggtaaggg

SEQ ID NO: 2951884 - DNA, 25 bp, Homo sapien
cagcagaaccaacaggtaagggcct

SEQ ID NO: 2951885 - DNA, 25 bp, Homo sapien
cagaaccaacaggtaagggcctgga

SEQ ID NO: 2951886 - DNA, 25 bp, Homo sapien
gccactcccacacctgggggccttc

SEQ ID NO: 2951887 - DNA, 25 bp, Homo sapien
agggtcaccaccagctctgccactc

SEQ ID NO: 2951888 - DNA, 25 bp, Homo sapien
tgggccagggtcaccaccagctctg

SEQ ID NO: 2951889 - DNA, 25 bp, Homo sapien
tgggggccttcccaaggcagcagca

SEQ ID NO: 2951890 - DNA, 25 bp, Homo sapien
gacactgttacagccgcattcctat

SEQ ID NO: 2951891 - DNA, 25 bp, Homo sapien
ccagcccagcagtgatcaacagcag

SEQ ID NO: 2951892 - DNA, 25 bp, Homo sapien
ggcctccaaggatgtggccctggct

SEQ ID NO: 2951893 - DNA, 25 bp, Homo sapien
caccatctgcgtggagtatcaggcc

SEQ ID NO: 2951894 - DNA, 25 bp, Homo sapien
tgatgagcaagtccaaaccatgggc

SEQ ID NO: 2951895 - DNA, 25 bp, Homo sapien
tcttcaggttgctgaaagatgcctc

SEQ ID NO: 2951896 - DNA, 25 bp, Homo sapien
catgggcactatggtccaggatgcc

SEQ ID NO: 2951897 - DNA, 25 bp, Homo sapien
gcctccaggccctaaggtatgtgga

SEQ ID NO: 2951898 - DNA, 25 bp, Homo sapien
cagttataatggagcctgcgtcccc

SEQ ID NO: 2951899 - DNA, 25 bp, Homo sapien
tatagacgggctgaactgagactcg

SEQ ID NO: 2951900 - DNA, 25 bp, Homo sapien
tacgttccacgggttcaaatctggc

SEQ ID NO: 2951901 - DNA, 25 bp, Homo sapien
tgtctgactcagcaaaagtgcccgg

SEQ ID NO: 2951902 - DNA, 25 bp, Homo sapien
tgccacagtagctcaaccaagcagt

SEQ ID NO: 2951903 - DNA, 25 bp, Homo sapien
accctcgaggtgtacgctgtgaaaa

SEQ ID NO: 2951904 - DNA, 25 bp, Homo sapien
ggatgttagttctccaccctcgagg

SEQ ID NO: 2951905 - DNA, 25 bp, Homo sapien
tctccaggtccaaggcagagatcct

SEQ ID NO: 2951906 - DNA, 25 bp, Homo sapien
tagccccgtcgcaatctgtaatttt

SEQ ID NO: 2951907 - DNA, 25 bp, Homo sapien
tattaaactccgcaagggcagaacc

SEQ ID NO: 2951908 - DNA, 25 bp, Homo sapien
ggtaatcacagcaacaacgtccaga

SEQ ID NO: 2951909 - DNA, 25 bp, Homo sapien
catgttcattcagcatagccagcag

SEQ ID NO: 2951910 - DNA, 25 bp, Homo sapien
cagttcctaggaagccggagtcgtt

SEQ ID NO: 2951911 - DNA, 25 bp, Homo sapien
taaattgatgtgaagggtctggagt

SEQ ID NO: 2951912 - DNA, 25 bp, Homo sapien
tcttggcggcccctaaggatggcag

SEQ ID NO: 2951913 - DNA, 25 bp, Homo sapien
ttgctaagagactggacgccgagtg

SEQ ID NO: 2951914 - DNA, 25 bp, Homo sapien
ctgacagttccccatcttcagggaa

SEQ ID NO: 2951915 - DNA, 25 bp, Homo sapien
cttcagggaaagtcaagttccgctt

SEQ ID NO: 2951916 - DNA, 25 bp, Homo sapien
tcaagttccgcttagtgataagggc

SEQ ID NO: 2951917 - DNA, 25 bp, Homo sapien
ggcttcagtgatgcagacgccccct

SEQ ID NO: 2951918 - DNA, 25 bp, Homo sapien
agaaaaaagcacttgttccatccac

SEQ ID NO: 2951919 - DNA, 25 bp, Homo sapien
ggagaaaaaagcacttgttccatcc

SEQ ID NO: 2951920 - DNA, 25 bp, Homo sapien
tcattcattccacaacattgctgag

SEQ ID NO: 2951921 - DNA, 25 bp, Homo sapien
attcattccacaacattgctgagtg

SEQ ID NO: 2951922 - DNA, 25 bp, Homo sapien
tgatagtagtaatcccctcccggtc

SEQ ID NO: 2951923 - DNA, 25 bp, Homo sapien
cagatagagactgtgaagattctgg

SEQ ID NO: 2951924 - DNA, 25 bp, Homo sapien
tctaagttcctgatagtagtaatcc

SEQ ID NO: 2951925 - DNA, 25 bp, Homo sapien
tgcagatagagactgtgaagattct

SEQ ID NO: 2951926 - DNA, 25 bp, Homo sapien
tgcctgcctgaacaccagggaatgg

SEQ ID NO: 2951927 - DNA, 25 bp, Homo sapien
ttcagatgagacagattaggtccac

SEQ ID NO: 2951928 - DNA, 25 bp, Homo sapien
gagaagtgcctaaagaacagtggaa

SEQ ID NO: 2951929 - DNA, 25 bp, Homo sapien
ggaccctatgtcattcgtctgggaa

SEQ ID NO: 2951930 - DNA, 25 bp, Homo sapien
tgaatgatgtacaggaatcttcata

SEQ ID NO: 2951931 - DNA, 25 bp, Homo sapien
tctgaatgatgtacaggaatcttca

SEQ ID NO: 2951932 - DNA, 25 bp, Homo sapien
ctgaatgatgtacaggaatcttcat

SEQ ID NO: 2951933 - DNA, 25 bp, Homo sapien
gaatgatgtacaggaatcttcatag

SEQ ID NO: 2951934 - DNA, 25 bp, Homo sapien
gaccatgtctactctgcagctggag

SEQ ID NO: 2951935 - DNA, 25 bp, Homo sapien
caatgagcatacaggaacttgacgg

SEQ ID NO: 2951936 - DNA, 25 bp, Homo sapien
atctggcactttgggaatgatcacc

SEQ ID NO: 2951937 - DNA, 25 bp, Homo sapien
gattccacaaccaaagagtgacctg

SEQ ID NO: 2951938 - DNA, 25 bp, Homo sapien
gccaggttctcaatttgctggatct

SEQ ID NO: 2951939 - DNA, 25 bp, Homo sapien
ggttctcaatttgctggatcttatt

SEQ ID NO: 2951940 - DNA, 25 bp, Homo sapien
ccaggttctcaatttgctggatctt

SEQ ID NO: 2951941 - DNA, 25 bp, Homo sapien
caggttctcaatttgctggatctta

SEQ ID NO: 2951942 - DNA, 25 bp, Homo sapien
gaggcagagctgaatcatggaacag

SEQ ID NO: 2951943 - DNA, 25 bp, Homo sapien
aggaaggggtacagaggcagagctg

SEQ ID NO: 2951944 - DNA, 25 bp, Homo sapien
gtacagaggcagagctgaatcatgg

SEQ ID NO: 2951945 - DNA, 25 bp, Homo sapien
gggaaggaaggggtacagaggcaga

SEQ ID NO: 2951946 - DNA, 25 bp, Homo sapien
ccagcttcaatgtttctatcaggtt

SEQ ID NO: 2951947 - DNA, 25 bp, Homo sapien
cacctgcctgatttggtttcctgcc

SEQ ID NO: 2951948 - DNA, 25 bp, Homo sapien
ccagaaactggaggcatgggaggtc

SEQ ID NO: 2951949 - DNA, 25 bp, Homo sapien
ctatcaggttctcagaaaggtccag

SEQ ID NO: 2951950 - DNA, 25 bp, Homo sapien
gtttccagacaggttgaggatgaga

SEQ ID NO: 2951951 - DNA, 25 bp, Homo sapien
cggtagccatcctggttggtgcagc

SEQ ID NO: 2951952 - DNA, 25 bp, Homo sapien
ttggtgcagctgtttccagacaggt

SEQ ID NO: 2951953 - DNA, 25 bp, Homo sapien
tgcagctgtttccagacaggttgag

SEQ ID NO: 2951954 - DNA, 25 bp, Homo sapien
tcctcctcatccgaaatccagcgct

SEQ ID NO: 2951955 - DNA, 25 bp, Homo sapien
caggctgcccgtccaggtccaggag

SEQ ID NO: 2951956 - DNA, 25 bp, Homo sapien
ctctgggaactcctcatcgcttgag

SEQ ID NO: 2951957 - DNA, 25 bp, Homo sapien
tcgcttgaggcttcatcctcctcat

SEQ ID NO: 2951958 - DNA, 25 bp, Homo sapien
tcagggccgtctgttgccggtgctc

SEQ ID NO: 2951959 - DNA, 25 bp, Homo sapien
ggtagcaggggcaggtcggtgaggg

SEQ ID NO: 2951960 - DNA, 25 bp, Homo sapien
gggccgtctgttgccggtgctccct

SEQ ID NO: 2951961 - DNA, 25 bp, Homo sapien
tgctctgtcagggccgtctgttgcc

SEQ ID NO: 2951962 - DNA, 25 bp, Homo sapien
gggaatcagactgcatggtttcttg

SEQ ID NO: 2951963 - DNA, 25 bp, Homo sapien
tcctccccttgcgcaggagtggcag

SEQ ID NO: 2951964 - DNA, 25 bp, Homo sapien
gaatcagactgcatggtttcttggt

SEQ ID NO: 2951965 - DNA, 25 bp, Homo sapien
ctcctccccttgcgcaggagtggca

SEQ ID NO: 2951966 - DNA, 25 bp, Homo sapien
cttctcttggccgtagttttggttg

SEQ ID NO: 2951967 - DNA, 25 bp, Homo sapien
tctcttggccgtagttttggttgtg

SEQ ID NO: 2951968 - DNA, 25 bp, Homo sapien
ctcttggccgtagttttggttgtgc

SEQ ID NO: 2951969 - DNA, 25 bp, Homo sapien
gactcgctctttagaatcaggtggc

SEQ ID NO: 2951970 - DNA, 25 bp, Homo sapien
tgacatgaaaagcatactcagggcc

SEQ ID NO: 2951971 - DNA, 25 bp, Homo sapien
tcagtgaactttatcccaggaccag

SEQ ID NO: 2951972 - DNA, 25 bp, Homo sapien
tgggtagctcccgaaagattccaga

SEQ ID NO: 2951973 - DNA, 25 bp, Homo sapien
agtggtggtaaagtggagcaatccc

SEQ ID NO: 2951974 - DNA, 25 bp, Homo sapien
tcttccaggccttcgtgaagaggga

SEQ ID NO: 2951975 - DNA, 25 bp, Homo sapien
ggagagccaggcttatgcgtaagct

SEQ ID NO: 2951976 - DNA, 25 bp, Homo sapien
tatgcgtaagcttcatagcttctgc

SEQ ID NO: 2951977 - DNA, 25 bp, Homo sapien
cagggttatggagaggcccgcctct

SEQ ID NO: 2951978 - DNA, 25 bp, Homo sapien
aggtggtgtttgtccccgcaggcac

SEQ ID NO: 2951979 - DNA, 25 bp, Homo sapien
tccttgcgcgtcttttacacgtgtg

SEQ ID NO: 2951980 - DNA, 25 bp, Homo sapien
tgttcctgcgactgctttgtctccg

SEQ ID NO: 2951981 - DNA, 25 bp, Homo sapien
ctatgagcgaccgtcagtagcgcac

SEQ ID NO: 2951982 - DNA, 25 bp, Homo sapien
gattgtctcgaaaaaacgcactccg

SEQ ID NO: 2951983 - DNA, 25 bp, Homo sapien
ccagaggaccgggacattgagaact

SEQ ID NO: 2951984 - DNA, 25 bp, Homo sapien
ttgagaactgggagtactagccggt

SEQ ID NO: 2951985 - DNA, 25 bp, Homo sapien
gcacttatagagtcccaggcaccat

SEQ ID NO: 2951986 - DNA, 25 bp, Homo sapien
ggagtagtgcaatgaacgaaacccc

SEQ ID NO: 2951987 - DNA, 25 bp, Homo sapien
aaagcacttatagagtcccaggcac

SEQ ID NO: 2951988 - DNA, 25 bp, Homo sapien
tccaagcactgggagtagtgcaatg

SEQ ID NO: 2951989 - DNA, 25 bp, Homo sapien
cagactcaaagattcggcagggtgc

SEQ ID NO: 2951990 - DNA, 25 bp, Homo sapien
ggtgtccagactcaaagattcggca

SEQ ID NO: 2951991 - DNA, 25 bp, Homo sapien
gactcaaagattcggcagggtgccg

SEQ ID NO: 2951992 - DNA, 25 bp, Homo sapien
tccagactcaaagattcggcagggt

SEQ ID NO: 2951993 - DNA, 25 bp, Homo sapien
acaaggtagggtggctctcagttca

SEQ ID NO: 2951994 - DNA, 25 bp, Homo sapien
ggctttcctgtaagagctgcccata

SEQ ID NO: 2951995 - DNA, 25 bp, Homo sapien
tggaagaccactggcaccttcggtg

SEQ ID NO: 2951996 - DNA, 25 bp, Homo sapien
caggagagcaatcacgtccagggca

SEQ ID NO: 2951997 - DNA, 25 bp, Homo sapien
ctgttggcatgagtcgatgccaggc

SEQ ID NO: 2951998 - DNA, 25 bp, Homo sapien
tggcatgagtcgatgccaggctgtc

SEQ ID NO: 2951999 - DNA, 25 bp, Homo sapien
atgagtcgatgccaggctgtcagat

SEQ ID NO: 2952000 - DNA, 25 bp, Homo sapien
gcatgagtcgatgccaggctgtcag

SEQ ID NO: 2952001 - DNA, 25 bp, Homo sapien
tctagagcttgctttcgctctcctt

SEQ ID NO: 2952002 - DNA, 25 bp, Homo sapien
ggcaggagaaggtttctctctagag

SEQ ID NO: 2952003 - DNA, 25 bp, Homo sapien
cggcaggcaggagaaggtttctctc

SEQ ID NO: 2952004 - DNA, 25 bp, Homo sapien
gaaggtttctctctagagcttgctt

SEQ ID NO: 2952005 - DNA, 25 bp, Homo sapien
cactcctgatgagcaataatttgtt

SEQ ID NO: 2952006 - DNA, 25 bp, Homo sapien
gcccagcactcctgatgagcaataa

SEQ ID NO: 2952007 - DNA, 25 bp, Homo sapien
tcagtttcacaagagcgaaacgaat

SEQ ID NO: 2952008 - DNA, 25 bp, Homo sapien
gagcgaaacgaattcgtttgaagta

SEQ ID NO: 2952009 - DNA, 25 bp, Homo sapien
tctcaggatgaaaggactgcctagg

SEQ ID NO: 2952010 - DNA, 25 bp, Homo sapien
gcctagggccattgtccttggcctc

SEQ ID NO: 2952011 - DNA, 25 bp, Homo sapien
ttagatggtgctttgagatctcagg

SEQ ID NO: 2952012 - DNA, 25 bp, Homo sapien
taattagatggtgctttgagatctc

SEQ ID NO: 2952013 - DNA, 25 bp, Homo sapien
gaagcagggatgtcatttgatgagg

SEQ ID NO: 2952014 - DNA, 25 bp, Homo sapien
aagcagggatgtcatttgatgaggt

SEQ ID NO: 2952015 - DNA, 25 bp, Homo sapien
ttcacaaacactctccacccctcca

SEQ ID NO: 2952016 - DNA, 25 bp, Homo sapien
ttcttcacaaacactctccacccct

SEQ ID NO: 2952017 - DNA, 25 bp, Homo sapien
agaggttcttccagacgttgattcc

SEQ ID NO: 2952018 - DNA, 25 bp, Homo sapien
tggcatcagggccatccagcgttgc

SEQ ID NO: 2952019 - DNA, 25 bp, Homo sapien
gcgttgctgcttcattgcctctggt

SEQ ID NO: 2952020 - DNA, 25 bp, Homo sapien
tgggctggaccaacaagtatatgca

SEQ ID NO: 2952021 - DNA, 25 bp, Homo sapien
ggccttgagtttccgggagaggaga

SEQ ID NO: 2952022 - DNA, 25 bp, Homo sapien
tctgtgtttatctgtctggccttga

SEQ ID NO: 2952023 - DNA, 25 bp, Homo sapien
tctcttccgcctggtagattagtga

SEQ ID NO: 2952024 - DNA, 25 bp, Homo sapien
tgtcaccgggcccataaataaagca

SEQ ID NO: 2952025 - DNA, 25 bp, Homo sapien
cttttccaagatcacggattccata

SEQ ID NO: 2952026 - DNA, 25 bp, Homo sapien
cagggtgctggtggtcttaaaccta

SEQ ID NO: 2952027 - DNA, 25 bp, Homo sapien
tttccaagatcacggattccataat

SEQ ID NO: 2952028 - DNA, 25 bp, Homo sapien
aaacctaaaagagatgttcatcagc

SEQ ID NO: 2952029 - DNA, 25 bp, Homo sapien
cagggtggcaacgaagatggatttc

SEQ ID NO: 2952030 - DNA, 25 bp, Homo sapien
gagatcttcagcagacagggtggca

SEQ ID NO: 2952031 - DNA, 25 bp, Homo sapien
gtcagcatgggcaacctcggagatc

SEQ ID NO: 2952032 - DNA, 25 bp, Homo sapien
caagttaggacccaactgccaaggc

SEQ ID NO: 2952033 - DNA, 25 bp, Homo sapien
tctgtcaaccttaaccaggggcgac

SEQ ID NO: 2952034 - DNA, 25 bp, Homo sapien
tggctgtgtctgtcaaccttaacca

SEQ ID NO: 2952035 - DNA, 25 bp, Homo sapien
gtgtctgtcaaccttaaccaggggc

SEQ ID NO: 2952036 - DNA, 25 bp, Homo sapien
tgtcaaccttaaccaggggcgacat

SEQ ID NO: 2952037 - DNA, 25 bp, Homo sapien
agaaggtcaggcagcggcttggaaa

SEQ ID NO: 2952038 - DNA, 25 bp, Homo sapien
gcttggaaatgcttgtgctctcccg

SEQ ID NO: 2952039 - DNA, 25 bp, Homo sapien
tggaaatgcttgtgctctcccggcc

SEQ ID NO: 2952040 - DNA, 25 bp, Homo sapien
cagcggcttggaaatgcttgtgctc

SEQ ID NO: 2952041 - DNA, 25 bp, Homo sapien
tcaggcccattggagtcttagagct

SEQ ID NO: 2952042 - DNA, 25 bp, Homo sapien
cattggagtcttagagcttccttca

SEQ ID NO: 2952043 - DNA, 25 bp, Homo sapien
tgaccacacaactcctcagagattt

SEQ ID NO: 2952044 - DNA, 25 bp, Homo sapien
ttatacttttgtcaggcccattgga

SEQ ID NO: 2952045 - DNA, 25 bp, Homo sapien
agccactgcacccggaggaagggga

SEQ ID NO: 2952046 - DNA, 25 bp, Homo sapien
cactgcacccggaggaaggggacac

SEQ ID NO: 2952047 - DNA, 25 bp, Homo sapien
tgagccactgcacccggaggaaggg

SEQ ID NO: 2952048 - DNA, 25 bp, Homo sapien
ccactgcacccggaggaaggggaca

SEQ ID NO: 2952049 - DNA, 25 bp, Homo sapien
cagaggacacactcttactggtgta

SEQ ID NO: 2952050 - DNA, 25 bp, Homo sapien
gggatccgtatctcctagataaagc

SEQ ID NO: 2952051 - DNA, 25 bp, Homo sapien
tagtaaagatccttcatgggatccg

SEQ ID NO: 2952052 - DNA, 25 bp, Homo sapien
caaactcctttctaggcaaagtcct

SEQ ID NO: 2952053 - DNA, 25 bp, Homo sapien
cgagcgacggcagccttcaccaata

SEQ ID NO: 2952054 - DNA, 25 bp, Homo sapien
cgctcattacgacatcttcctccct

SEQ ID NO: 2952055 - DNA, 25 bp, Homo sapien
aagcaaccgccaatcccggagcccg

SEQ ID NO: 2952056 - DNA, 25 bp, Homo sapien
ccttcaccaataagcgcttggaaca

SEQ ID NO: 2952057 - DNA, 25 bp, Homo sapien
ggccccgacgccagacccagcccca

SEQ ID NO: 2952058 - DNA, 25 bp, Homo sapien
cttccgggtgcctccgcccggctgg

SEQ ID NO: 2952059 - DNA, 25 bp, Homo sapien
tacagttaagagtgcaggaaggcct

SEQ ID NO: 2952060 - DNA, 25 bp, Homo sapien
cctgaatcgctggtgggcatctaca

SEQ ID NO: 2952061 - DNA, 25 bp, Homo sapien
agcgtccgggtctcaagcgttccct

SEQ ID NO: 2952062 - DNA, 25 bp, Homo sapien
gctgtcgtcgatgccgagcagtgcc

SEQ ID NO: 2952063 - DNA, 25 bp, Homo sapien
cagatatctagctggaagatcaagg

SEQ ID NO: 2952064 - DNA, 25 bp, Homo sapien
actccccggtgagaggtcatctgcc

SEQ ID NO: 2952065 - DNA, 25 bp, Homo sapien
cagggagtgctctcgtgtcctgaca

SEQ ID NO: 2952066 - DNA, 25 bp, Homo sapien
ccttaagattgtttgcgcctgagct

SEQ ID NO: 2952067 - DNA, 25 bp, Homo sapien
cattattgcagacaatgggtttctt

SEQ ID NO: 2952068 - DNA, 25 bp, Homo sapien
ttgtatcatccagaataccaactca

SEQ ID NO: 2952069 - DNA, 25 bp, Homo sapien
tgtgagccagccaacactctaaact

SEQ ID NO: 2952070 - DNA, 25 bp, Homo sapien
tgctgtggtctggactccaccatta

SEQ ID NO: 2952071 - DNA, 25 bp, Homo sapien
aatcgtcccagccaatgataatcca

SEQ ID NO: 2952072 - DNA, 25 bp, Homo sapien
tccatttccaacaggtattaacgcc

SEQ ID NO: 2952073 - DNA, 25 bp, Homo sapien
gaagccactggaacactgacatcat

SEQ ID NO: 2952074 - DNA, 25 bp, Homo sapien
gataggttgtctgatagattcgccc

SEQ ID NO: 2952075 - DNA, 25 bp, Homo sapien
ccctggaggaatttcacactgtgca

SEQ ID NO: 2952076 - DNA, 25 bp, Homo sapien
cagttgcctagcctggaagaattca

SEQ ID NO: 2952077 - DNA, 25 bp, Homo sapien
gcaaatgagaaaacgcgcctacaga

SEQ ID NO: 2952078 - DNA, 25 bp, Homo sapien
gccgtaagccaacaaagcagtttct

SEQ ID NO: 2952079 - DNA, 25 bp, Homo sapien
ggttcattagtgggatggtccctct

SEQ ID NO: 2952080 - DNA, 25 bp, Homo sapien
tgtgtggttcattagtgggatggtc

SEQ ID NO: 2952081 - DNA, 25 bp, Homo sapien
tggttcattagtgggatggtccctc

SEQ ID NO: 2952082 - DNA, 25 bp, Homo sapien
tgtggttcattagtgggatggtccc

SEQ ID NO: 2952083 - DNA, 25 bp, Homo sapien
ccaggctggggtgcatgatcttggt

SEQ ID NO: 2952084 - DNA, 25 bp, Homo sapien
aggctggggtgcatgatcttggttc

SEQ ID NO: 2952085 - DNA, 25 bp, Homo sapien
ggcatgaatcaccatgaccagccaa

SEQ ID NO: 2952086 - DNA, 25 bp, Homo sapien
tgaccagccaaaacaaagatttatt

SEQ ID NO: 2952087 - DNA, 25 bp, Homo sapien
gaaagcagaaccgttcacattttgg

SEQ ID NO: 2952088 - DNA, 25 bp, Homo sapien
aaggatacatattgggaaagcagaa

SEQ ID NO: 2952089 - DNA, 25 bp, Homo sapien
caggcttctctgtttggaagaacaa

SEQ ID NO: 2952090 - DNA, 25 bp, Homo sapien
gggatgcagtgactcgtgcctataa

SEQ ID NO: 2952091 - DNA, 25 bp, Homo sapien
gctgcaggtagtcactgggactcac

SEQ ID NO: 2952092 - DNA, 25 bp, Homo sapien
cctagggtatttatagtgagacagt

SEQ ID NO: 2952093 - DNA, 25 bp, Homo sapien
agagagtgttttcggtgagtctgtc

SEQ ID NO: 2952094 - DNA, 25 bp, Homo sapien
caactgcggcaccttaggtaaatgg

SEQ ID NO: 2952095 - DNA, 25 bp, Homo sapien
ggagggctacactttcgagacaatg

SEQ ID NO: 2952096 - DNA, 25 bp, Homo sapien
gtgagacaggaaggcccgctgcccg

SEQ ID NO: 2952097 - DNA, 25 bp, Homo sapien
agtgagacaggaaggcccgctgccc

SEQ ID NO: 2952098 - DNA, 25 bp, Homo sapien
gcagagaaaaggagtgagacaggaa

SEQ ID NO: 2952099 - DNA, 25 bp, Homo sapien
aacagcagagaaaaggagtgagaca

SEQ ID NO: 2952100 - DNA, 25 bp, Homo sapien
gcaggtttgatagggacaagtttcc

SEQ ID NO: 2952101 - DNA, 25 bp, Homo sapien
tctggatagcgaacaccagctgccc

SEQ ID NO: 2952102 - DNA, 25 bp, Homo sapien
gcttcaactgctggagggccaattt

SEQ ID NO: 2952103 - DNA, 25 bp, Homo sapien
gataggaggcgctcagttgtgaccc

SEQ ID NO: 2952104 - DNA, 25 bp, Homo sapien
gtcactggcgttcacaaggttgttg

SEQ ID NO: 2952105 - DNA, 25 bp, Homo sapien
gaccgcctggtactggatattggca

SEQ ID NO: 2952106 - DNA, 25 bp, Homo sapien
ttgcctgaatctgagggaccgcctg

SEQ ID NO: 2952107 - DNA, 25 bp, Homo sapien
tggtcgtactcgacttctggatggg

SEQ ID NO: 2952108 - DNA, 25 bp, Homo sapien
ctgcctggatgatgttgtccgcggt

SEQ ID NO: 2952109 - DNA, 25 bp, Homo sapien
gctttcttgttagtcttagacagcg

SEQ ID NO: 2952110 - DNA, 25 bp, Homo sapien
gtggtctcgatcagcaccgtctcca

SEQ ID NO: 2952111 - DNA, 25 bp, Homo sapien
tctgaacaatgagcaggttatttcc

SEQ ID NO: 2952112 - DNA, 25 bp, Homo sapien
taagaacattcttgttgaattcagc

SEQ ID NO: 2952113 - DNA, 25 bp, Homo sapien
gcatcccagtttggcaggaagcagt

SEQ ID NO: 2952114 - DNA, 25 bp, Homo sapien
aattcagcatcccagtttggcagga

SEQ ID NO: 2952115 - DNA, 25 bp, Homo sapien
tagagcacattaataaatgccaaaa

SEQ ID NO: 2952116 - DNA, 25 bp, Homo sapien
taaaaatgtacgtgtccttgaccca

SEQ ID NO: 2952117 - DNA, 25 bp, Homo sapien
taggtcatacattcctcgatggcag

SEQ ID NO: 2952118 - DNA, 25 bp, Homo sapien
tgggcacaattactggcacttagca

SEQ ID NO: 2952119 - DNA, 25 bp, Homo sapien
taaatatgccagaagggtgaattcc

SEQ ID NO: 2952120 - DNA, 25 bp, Homo sapien
gggacgctcttttcggagaattgca

SEQ ID NO: 2952121 - DNA, 25 bp, Homo sapien
ttcaggctgatgatgctcccggctg

SEQ ID NO: 2952122 - DNA, 25 bp, Homo sapien
agctgagtgctttttgctggtccca

SEQ ID NO: 2952123 - DNA, 25 bp, Homo sapien
tgttgatggtctgcattgcctgggc

SEQ ID NO: 2952124 - DNA, 25 bp, Homo sapien
gaaacattctgcactgtcagctgct

SEQ ID NO: 2952125 - DNA, 25 bp, Homo sapien
tgatggtcaggttgttcccagaaac

SEQ ID NO: 2952126 - DNA, 25 bp, Homo sapien
ccggccagggcttgttccatttgca

SEQ ID NO: 2952127 - DNA, 25 bp, Homo sapien
ccatccttgcagttgggacacgtgc

SEQ ID NO: 2952128 - DNA, 25 bp, Homo sapien
gctcgtcactccgtgtgaacctctt

SEQ ID NO: 2952129 - DNA, 25 bp, Homo sapien
gcagcaaggacgtcttacggaacgt

SEQ ID NO: 2952130 - DNA, 25 bp, Homo sapien
gagcatgccgttggagctcgtcact

SEQ ID NO: 2952131 - DNA, 25 bp, Homo sapien
aaccagttgcagacaaagggccgct

SEQ ID NO: 2952132 - DNA, 25 bp, Homo sapien
aagttcttcgtgaccaggtgggtct

SEQ ID NO: 2952133 - DNA, 25 bp, Homo sapien
gcttctgacactgggcgcactcgaa

SEQ ID NO: 2952134 - DNA, 25 bp, Homo sapien
tcatgaagcgcttctgacactgggc

SEQ ID NO: 2952135 - DNA, 25 bp, Homo sapien
gaccaggtgggtcttgtaatgcttg

SEQ ID NO: 2952136 - DNA, 25 bp, Homo sapien
tcagaaggaggacaatacagggaac

SEQ ID NO: 2952137 - DNA, 25 bp, Homo sapien
tcttcagggcctcccgccgcagttg

SEQ ID NO: 2952138 - DNA, 25 bp, Homo sapien
tgtggggacagttgcagaacaggag

SEQ ID NO: 2952139 - DNA, 25 bp, Homo sapien
ggacagttgcagaacaggagtgggg

SEQ ID NO: 2952140 - DNA, 25 bp, Homo sapien
tcctcgacggagtgaaatgcatgtt

SEQ ID NO: 2952141 - DNA, 25 bp, Homo sapien
caacgttctccatagaaaaagaggg

SEQ ID NO: 2952142 - DNA, 25 bp, Homo sapien
aggtggccccgagtttctccagagg

SEQ ID NO: 2952143 - DNA, 25 bp, Homo sapien
tagaacgtctcattgggcacggcca

SEQ ID NO: 2952144 - DNA, 25 bp, Homo sapien
cgttaataaaggataacaaatctgt

SEQ ID NO: 2952145 - DNA, 25 bp, Homo sapien
catacctcaagcagttacaactaaa

SEQ ID NO: 2952146 - DNA, 25 bp, Homo sapien
aaaaatttttgtcagcccagtgctg

SEQ ID NO: 2952147 - DNA, 25 bp, Homo sapien
tgtcacttaattcataaaacatacc

SEQ ID NO: 2952148 - DNA, 25 bp, Homo sapien
agctctccaagggaaaagacaaagg

SEQ ID NO: 2952149 - DNA, 25 bp, Homo sapien
cagtgtggatcgctctgagagacca

SEQ ID NO: 2952150 - DNA, 25 bp, Homo sapien
tctccgagctctccaagggaaaaga

SEQ ID NO: 2952151 - DNA, 25 bp, Homo sapien
cttggtcccagtgtggatcgctctg

SEQ ID NO: 2952152 - DNA, 25 bp, Homo sapien
agttttctagtcatgcagtccacgc

SEQ ID NO: 2952153 - DNA, 25 bp, Homo sapien
tttacatgcttgaggcggacttgcc

SEQ ID NO: 2952154 - DNA, 25 bp, Homo sapien
taaacacatgtactgagctagctcc

SEQ ID NO: 2952155 - DNA, 25 bp, Homo sapien
gattttcatcaagggcccatcagga

SEQ ID NO: 2952156 - DNA, 25 bp, Homo sapien
gaagactcaaatggagaacccgaac

SEQ ID NO: 2952157 - DNA, 25 bp, Homo sapien
tcagaccaggacagctttcatccat

SEQ ID NO: 2952158 - DNA, 25 bp, Homo sapien
gaaataatcaacagcttaacttctt

SEQ ID NO: 2952159 - DNA, 25 bp, Homo sapien
caatttctgggtgtggcaactttaa

SEQ ID NO: 2952160 - DNA, 25 bp, Homo sapien
agaaagaggggggttgaatagcagt

SEQ ID NO: 2952161 - DNA, 25 bp, Homo sapien
atagcagtggggcttgaggtgaacc

SEQ ID NO: 2952162 - DNA, 25 bp, Homo sapien
ctgaagagaaagaggggggttgaat

SEQ ID NO: 2952163 - DNA, 25 bp, Homo sapien
gaatagcagtggggcttgaggtgaa

SEQ ID NO: 2952164 - DNA, 25 bp, Homo sapien
gacattgaccacagtacttgctttg

SEQ ID NO: 2952165 - DNA, 25 bp, Homo sapien
cataccatcaactggccgaagcaga

SEQ ID NO: 2952166 - DNA, 25 bp, Homo sapien
attgagcaaacatggaaagatcaga

SEQ ID NO: 2952167 - DNA, 25 bp, Homo sapien
tatttgccctaagcagagggtcact

SEQ ID NO: 2952168 - DNA, 25 bp, Homo sapien
cagtcgcccaaccaagctaacaggt

SEQ ID NO: 2952169 - DNA, 25 bp, Homo sapien
gctaacaggtcctaagtcctcggag

SEQ ID NO: 2952170 - DNA, 25 bp, Homo sapien
tttcggtaacgaggccaattagagc

SEQ ID NO: 2952171 - DNA, 25 bp, Homo sapien
aattagagcgagaacagaggaaccc

SEQ ID NO: 2952172 - DNA, 25 bp, Homo sapien
tttgagttcggaaccaatttctcac

SEQ ID NO: 2952173 - DNA, 25 bp, Homo sapien
ctttgagttcggaaccaatttctca

SEQ ID NO: 2952174 - DNA, 25 bp, Homo sapien
gaccacacaggtgactgaggtagcc

SEQ ID NO: 2952175 - DNA, 25 bp, Homo sapien
aactcttgcgcatgggtcccaggtc

SEQ ID NO: 2952176 - DNA, 25 bp, Homo sapien
tggcagcactgcgaccacacaggtg

SEQ ID NO: 2952177 - DNA, 25 bp, Homo sapien
aggtagcctggccactcggcaggtc

SEQ ID NO: 2952178 - DNA, 25 bp, Homo sapien
cccgctgtagatgactccggggacc

SEQ ID NO: 2952179 - DNA, 25 bp, Homo sapien
ggcttcccctatgtcaggacactga

SEQ ID NO: 2952180 - DNA, 25 bp, Homo sapien
tcaggacactgaacagcctcctcaa

SEQ ID NO: 2952181 - DNA, 25 bp, Homo sapien
caaaccaggcagcaaactgtttcac

SEQ ID NO: 2952182 - DNA, 25 bp, Homo sapien
catggcattggcttcccctatgtca

SEQ ID NO: 2952183 - DNA, 25 bp, Homo sapien
gcaacatgcgagcagagggttttcc

SEQ ID NO: 2952184 - DNA, 25 bp, Homo sapien
tccttttcgactctcgaagttagtg

SEQ ID NO: 2952185 - DNA, 25 bp, Homo sapien
gtgaagaagcggaagccatctttcc

SEQ ID NO: 2952186 - DNA, 25 bp, Homo sapien
ttcagcagcaacatgcgagcagagg

SEQ ID NO: 2952187 - DNA, 25 bp, Homo sapien
ctgtagtgcgcaggcccacagcaga

SEQ ID NO: 2952188 - DNA, 25 bp, Homo sapien
gagagctgtagtgcgcaggcccaca

SEQ ID NO: 2952189 - DNA, 25 bp, Homo sapien
gaagtaaaagagaatccacagccag

SEQ ID NO: 2952190 - DNA, 25 bp, Homo sapien
gcaggagagctgtagtgcgcaggcc

SEQ ID NO: 2952191 - DNA, 25 bp, Homo sapien
ggctcccagtagaagacaagggaag

SEQ ID NO: 2952192 - DNA, 25 bp, Homo sapien
tggctcccagtagaagacaagggaa

SEQ ID NO: 2952193 - DNA, 25 bp, Homo sapien
ctcccagtagaagacaagggaagca

SEQ ID NO: 2952194 - DNA, 25 bp, Homo sapien
caagggaagcaaagggattagagtc

SEQ ID NO: 2952195 - DNA, 25 bp, Homo sapien
ggcagtttcttcacagggccttcca

SEQ ID NO: 2952196 - DNA, 25 bp, Homo sapien
ctcccgatcagggatcacagaactc

SEQ ID NO: 2952197 - DNA, 25 bp, Homo sapien
gtggaagtagcactcagcctcctcc

SEQ ID NO: 2952198 - DNA, 25 bp, Homo sapien
cacagaactctggtggctgaccaca

SEQ ID NO: 2952199 - DNA, 25 bp, Homo sapien
atcctggtagagctgttccagttcc

SEQ ID NO: 2952200 - DNA, 25 bp, Homo sapien
tgatcctggtagagctgttccagtt

SEQ ID NO: 2952201 - DNA, 25 bp, Homo sapien
cttgatcctggtagagctgttccag

SEQ ID NO: 2952202 - DNA, 25 bp, Homo sapien
ggcttgggcacctcttgatcctggt

SEQ ID NO: 2952203 - DNA, 25 bp, Homo sapien
gcaggcggttggtttgaccttgcca

SEQ ID NO: 2952204 - DNA, 25 bp, Homo sapien
cccgccgaaagactatccggtcatg

SEQ ID NO: 2952205 - DNA, 25 bp, Homo sapien
cacctgagggtacaggacatagcca

SEQ ID NO: 2952206 - DNA, 25 bp, Homo sapien
ggaatctcctgtgggtaggccccgc

SEQ ID NO: 2952207 - DNA, 25 bp, Homo sapien
tctcttgacacctagccctagctcc

SEQ ID NO: 2952208 - DNA, 25 bp, Homo sapien
ctgggtcccaatcccacaccctctc

SEQ ID NO: 2952209 - DNA, 25 bp, Homo sapien
tgggtcccaatcccacaccctctct

SEQ ID NO: 2952210 - DNA, 25 bp, Homo sapien
ccctctcttgacacctagccctagc

SEQ ID NO: 2952211 - DNA, 25 bp, Homo sapien
gctttaatgactcccaaggttctgg

SEQ ID NO: 2952212 - DNA, 25 bp, Homo sapien
tatgactcacatggtaacagacagg

SEQ ID NO: 2952213 - DNA, 25 bp, Homo sapien
gatcctgggaattgcaatagcagca

SEQ ID NO: 2952214 - DNA, 25 bp, Homo sapien
tatgctaggactaagctttggccag

SEQ ID NO: 2952215 - DNA, 25 bp, Homo sapien
aaaccccgtctcgctgggtgtggtg

SEQ ID NO: 2952216 - DNA, 25 bp, Homo sapien
acataatgaaaccccgtctcgctgg

SEQ ID NO: 2952217 - DNA, 25 bp, Homo sapien
taatgaaaccccgtctcgctgggtg

SEQ ID NO: 2952218 - DNA, 25 bp, Homo sapien
tgaaaccccgtctcgctgggtgtgg

SEQ ID NO: 2952219 - DNA, 25 bp, Homo sapien
tcccaatattgagatgaaacctgct

SEQ ID NO: 2952220 - DNA, 25 bp, Homo sapien
taaaaatatactatcccggccaagc

SEQ ID NO: 2952221 - DNA, 25 bp, Homo sapien
tggtaccagcacatgaagcccttct

SEQ ID NO: 2952222 - DNA, 25 bp, Homo sapien
cctgtaattctgtgggtcccttgta

SEQ ID NO: 2952223 - DNA, 25 bp, Homo sapien
tagcgggcatgtgctcaaggagaac

SEQ ID NO: 2952224 - DNA, 25 bp, Homo sapien
cctgcacgcaggcttaagagggata

SEQ ID NO: 2952225 - DNA, 25 bp, Homo sapien
gggtctgaatctctaaggcgctgcc

SEQ ID NO: 2952226 - DNA, 25 bp, Homo sapien
tgatgctcctggcttgtggaccacc

SEQ ID NO: 2952227 - DNA, 25 bp, Homo sapien
tacagactgggggcggtaacggctg

SEQ ID NO: 2952228 - DNA, 25 bp, Homo sapien
cacggctgataggcttttattacag

SEQ ID NO: 2952229 - DNA, 25 bp, Homo sapien
acggctgataggcttttattacaga

SEQ ID NO: 2952230 - DNA, 25 bp, Homo sapien
ctgggggcggtaacggctggacaga

SEQ ID NO: 2952231 - DNA, 25 bp, Homo sapien
caatgcatggttacctctgtgggca

SEQ ID NO: 2952232 - DNA, 25 bp, Homo sapien
aatgcacagggtgtttccctcccta

SEQ ID NO: 2952233 - DNA, 25 bp, Homo sapien
gctaaatgctagtgctggatgggat

SEQ ID NO: 2952234 - DNA, 25 bp, Homo sapien
tatgctaccagtcaatggtctgccc

SEQ ID NO: 2952235 - DNA, 25 bp, Homo sapien
ccagagcagtgtgcaggtctcttgt

SEQ ID NO: 2952236 - DNA, 25 bp, Homo sapien
cttcttccctccttgcgtcgcttta

SEQ ID NO: 2952237 - DNA, 25 bp, Homo sapien
gcgtcgctttaccatccagagcagt

SEQ ID NO: 2952238 - DNA, 25 bp, Homo sapien
gcagtgtgcaggtctcttgtggcac

SEQ ID NO: 2952239 - DNA, 25 bp, Homo sapien
cctaccaccaatccagtggcgttgt

SEQ ID NO: 2952240 - DNA, 25 bp, Homo sapien
cacttccgcttcaggctggagactg

SEQ ID NO: 2952241 - DNA, 25 bp, Homo sapien
ctccgtttagacacaaacgggcatc

SEQ ID NO: 2952242 - DNA, 25 bp, Homo sapien
cgttgtggccgagcctccgtttaga

SEQ ID NO: 2952243 - DNA, 25 bp, Homo sapien
tgggttgagccgcttccggagggag

SEQ ID NO: 2952244 - DNA, 25 bp, Homo sapien
cactcgcgcgctcatttcaacgtcc

SEQ ID NO: 2952245 - DNA, 25 bp, Homo sapien
cttccggagggagaccggagacaca

SEQ ID NO: 2952246 - DNA, 25 bp, Homo sapien
gaacggggccagagcgatgggctgg

SEQ ID NO: 2952247 - DNA, 25 bp, Homo sapien
gcgtgagcgcggagagaggacgtac

SEQ ID NO: 2952248 - DNA, 25 bp, Homo sapien
agcagcttgctggtctggatgtcga

SEQ ID NO: 2952249 - DNA, 25 bp, Homo sapien
cgagcagcttgctggtctggatgtc

SEQ ID NO: 2952250 - DNA, 25 bp, Homo sapien
cagcttgctggtctggatgtcgatg

SEQ ID NO: 2952251 - DNA, 25 bp, Homo sapien
ttgctggtctggatgtcgatgggca

SEQ ID NO: 2952252 - DNA, 25 bp, Homo sapien
agagctcccggctattggacacagg

SEQ ID NO: 2952253 - DNA, 25 bp, Homo sapien
cagtggtcagcatctcgactcaggc

SEQ ID NO: 2952254 - DNA, 25 bp, Homo sapien
gagaaaacgcaggtcaaacagactg

SEQ ID NO: 2952255 - DNA, 25 bp, Homo sapien
tgtacatatggttcgttcccgctgc

SEQ ID NO: 2952256 - DNA, 25 bp, Homo sapien
cattgatcttctcgcggatcgtcag

SEQ ID NO: 2952257 - DNA, 25 bp, Homo sapien
agcattgatcttctcgcggatcgtc

SEQ ID NO: 2952258 - DNA, 25 bp, Homo sapien
gcattgatcttctcgcggatcgtca

SEQ ID NO: 2952259 - DNA, 25 bp, Homo sapien
ttgatcttctcgcggatcgtcagca

SEQ ID NO: 2952260 - DNA, 25 bp, Homo sapien
ccagtgacagcccctaagcactcac

SEQ ID NO: 2952261 - DNA, 25 bp, Homo sapien
tcatttcatagtggaagaagccagc

SEQ ID NO: 2952262 - DNA, 25 bp, Homo sapien
taacaagagagtagctcagctgata

SEQ ID NO: 2952263 - DNA, 25 bp, Homo sapien
ataaaaatcgctccctctctaaagg

SEQ ID NO: 2952264 - DNA, 25 bp, Homo sapien
gccctggtggctaaataacaagaga

SEQ ID NO: 2952265 - DNA, 25 bp, Homo sapien
ttcttaggcagtgaaagtagtgaat

SEQ ID NO: 2952266 - DNA, 25 bp, Homo sapien
cttaggcagtgaaagtagtgaatgt

SEQ ID NO: 2952267 - DNA, 25 bp, Homo sapien
gattcttaggcagtgaaagtagtga

SEQ ID NO: 2952268 - DNA, 25 bp, Homo sapien
aggattcttaggcagtgaaagtagt

SEQ ID NO: 2952269 - DNA, 25 bp, Homo sapien
ctaagtaggtgttgtccttctcata

SEQ ID NO: 2952270 - DNA, 25 bp, Homo sapien
taggtgttgtccttctcatacagag

SEQ ID NO: 2952271 - DNA, 25 bp, Homo sapien
tctcatacagagctataatctcctg

SEQ ID NO: 2952272 - DNA, 25 bp, Homo sapien
catacagagctataatctcctgcca

SEQ ID NO: 2952273 - DNA, 25 bp, Homo sapien
taagcctggtatctcagaactctga

SEQ ID NO: 2952274 - DNA, 25 bp, Homo sapien
aagcctggtatctcagaactctgag

SEQ ID NO: 2952275 - DNA, 25 bp, Homo sapien
ctataagcctggtatctcagaactc

SEQ ID NO: 2952276 - DNA, 25 bp, Homo sapien
tataagcctggtatctcagaactct

SEQ ID NO: 2952277 - DNA, 25 bp, Homo sapien
caaccctcatcggtaaaacagcgac

SEQ ID NO: 2952278 - DNA, 25 bp, Homo sapien
ggcacttgatattcgctcccagaaa

SEQ ID NO: 2952279 - DNA, 25 bp, Homo sapien
acctgctcgctgaggcacggcgaat

SEQ ID NO: 2952280 - DNA, 25 bp, Homo sapien
ctcccgctaaccaagaggtgagtgg

SEQ ID NO: 2952281 - DNA, 25 bp, Homo sapien
ttgtggtggtgaagagcacgaagtc

SEQ ID NO: 2952282 - DNA, 25 bp, Homo sapien
gcacgaagtcagcttcccagcccca

SEQ ID NO: 2952283 - DNA, 25 bp, Homo sapien
agcacgaagtcagcttcccagcccc

SEQ ID NO: 2952284 - DNA, 25 bp, Homo sapien
tggtggtgaagagcacgaagtcagc

SEQ ID NO: 2952285 - DNA, 25 bp, Homo sapien
gcaggcatgccccaggatgcacaca

SEQ ID NO: 2952286 - DNA, 25 bp, Homo sapien
gagaagtgcccaggaaattcagccc

SEQ ID NO: 2952287 - DNA, 25 bp, Homo sapien
tgagaagtgcccaggaaattcagcc

SEQ ID NO: 2952288 - DNA, 25 bp, Homo sapien
aggacacccccacatgaggcaggca

SEQ ID NO: 2952289 - DNA, 25 bp, Homo sapien
actgcttgcaggagtggtagaactg

SEQ ID NO: 2952290 - DNA, 25 bp, Homo sapien
cagtgaggggatctcatagttgaca

SEQ ID NO: 2952291 - DNA, 25 bp, Homo sapien
tgcttgcaggagtggtagaactgct

SEQ ID NO: 2952292 - DNA, 25 bp, Homo sapien
tctgcttcttcagtgaggggatctc

SEQ ID NO: 2952293 - DNA, 25 bp, Homo sapien
acgcctggtacacgtcaatggcttc

SEQ ID NO: 2952294 - DNA, 25 bp, Homo sapien
gacgcctggtacacgtcaatggctt

SEQ ID NO: 2952295 - DNA, 25 bp, Homo sapien
ccacagacgcctggtacacgtcaat

SEQ ID NO: 2952296 - DNA, 25 bp, Homo sapien
cagacgcctggtacacgtcaatggc

SEQ ID NO: 2952297 - DNA, 25 bp, Homo sapien
caggttcaggtgtgtaaagagttca

SEQ ID NO: 2952298 - DNA, 25 bp, Homo sapien
ctgggccacatggtcaaatgggcaa

SEQ ID NO: 2952299 - DNA, 25 bp, Homo sapien
tatatgggaacaagacaactggaga

SEQ ID NO: 2952300 - DNA, 25 bp, Homo sapien
gaccatgcgtaaggccaacactggg

SEQ ID NO: 2952301 - DNA, 25 bp, Homo sapien
tgagtttccccgcttctgcacgaac

SEQ ID NO: 2952302 - DNA, 25 bp, Homo sapien
tgtcctccactcgtacaccgttgag

SEQ ID NO: 2952303 - DNA, 25 bp, Homo sapien
tccactcgtacaccgttgagtttcc

SEQ ID NO: 2952304 - DNA, 25 bp, Homo sapien
acaccgttgagtttccccgcttctg

SEQ ID NO: 2952305 - DNA, 25 bp, Homo sapien
agagtgttagctcatggaagatgga

SEQ ID NO: 2952306 - DNA, 25 bp, Homo sapien
ggaaagagagtgttagctcatggaa

SEQ ID NO: 2952307 - DNA, 25 bp, Homo sapien
gtgttagctcatggaagatggattt

SEQ ID NO: 2952308 - DNA, 25 bp, Homo sapien
aagagagtgttagctcatggaagat

SEQ ID NO: 2952309 - DNA, 25 bp, Homo sapien
ttccgggaagatgccccagtcgatt

SEQ ID NO: 2952310 - DNA, 25 bp, Homo sapien
aagatgccccagtcgattccagcag

SEQ ID NO: 2952311 - DNA, 25 bp, Homo sapien
tctgattccgggaagatgccccagt

SEQ ID NO: 2952312 - DNA, 25 bp, Homo sapien
agacactgcctctaccccaaagtcg

SEQ ID NO: 2952313 - DNA, 25 bp, Homo sapien
tgggttcctgcttccagcactgtga

SEQ ID NO: 2952314 - DNA, 25 bp, Homo sapien
ccagtctatcccatcacctccagga

SEQ ID NO: 2952315 - DNA, 25 bp, Homo sapien
aaagcaacagcatcgtctccccagt

SEQ ID NO: 2952316 - DNA, 25 bp, Homo sapien
cagcactgtgatctgcaaagcaaca

SEQ ID NO: 2952317 - DNA, 25 bp, Homo sapien
gaagcctcatcttagcgctgcattt

SEQ ID NO: 2952318 - DNA, 25 bp, Homo sapien
caagaagcctcatcttagcgctgca

SEQ ID NO: 2952319 - DNA, 25 bp, Homo sapien
cattttttgtttctagacacgtggg

SEQ ID NO: 2952320 - DNA, 25 bp, Homo sapien
ttgagcaccccacttttgccagggc

SEQ ID NO: 2952321 - DNA, 25 bp, Homo sapien
ggaaggctaccttgtcccaggtgtc

SEQ ID NO: 2952322 - DNA, 25 bp, Homo sapien
aggtgtctcagctctaatcaggtac

SEQ ID NO: 2952323 - DNA, 25 bp, Homo sapien
taatcaggtaccactttccaactcc

SEQ ID NO: 2952324 - DNA, 25 bp, Homo sapien
tgctaaagccacttcttgttctaat

SEQ ID NO: 2952325 - DNA, 25 bp, Homo sapien
tgtattcaagcagtgtcagggcatc

SEQ ID NO: 2952326 - DNA, 25 bp, Homo sapien
ctccatgagctcatcaaggaactga

SEQ ID NO: 2952327 - DNA, 25 bp, Homo sapien
gtcagggcatctgggcccctggcaa

SEQ ID NO: 2952328 - DNA, 25 bp, Homo sapien
ttccgggtctcagtgtattcaagca

SEQ ID NO: 2952329 - DNA, 25 bp, Homo sapien
gacagaactttcaggaggctctccg

SEQ ID NO: 2952330 - DNA, 25 bp, Homo sapien
aagaacgctggctccttacgctggg

SEQ ID NO: 2952331 - DNA, 25 bp, Homo sapien
taagcgctaggagagactactgtca

SEQ ID NO: 2952332 - DNA, 25 bp, Homo sapien
gaatctaagccctcggactactcga

SEQ ID NO: 2952333 - DNA, 25 bp, Homo sapien
taagcttgccaatcagatcctccag

SEQ ID NO: 2952334 - DNA, 25 bp, Homo sapien
ggttagctgtgcatcctgagcattc

SEQ ID NO: 2952335 - DNA, 25 bp, Homo sapien
gccttgcatcaaggggaagccagac

SEQ ID NO: 2952336 - DNA, 25 bp, Homo sapien
tcttcctgtatatgtgaaacctccc

SEQ ID NO: 2952337 - DNA, 25 bp, Homo sapien
gtcctactcaggaagcaagcagatt

SEQ ID NO: 2952338 - DNA, 25 bp, Homo sapien
gccgcctgctcctcaagtgcctcct

SEQ ID NO: 2952339 - DNA, 25 bp, Homo sapien
tccagtagcaggtccagcttaggct

SEQ ID NO: 2952340 - DNA, 25 bp, Homo sapien
cagctgggactgcttcagcttttgc

SEQ ID NO: 2952341 - DNA, 25 bp, Homo sapien
agcttaggctccagagccgcctgct

SEQ ID NO: 2952342 - DNA, 25 bp, Homo sapien
ctgaaagagtgataccaagtgggca

SEQ ID NO: 2952343 - DNA, 25 bp, Homo sapien
aagagtgataccaagtgggcagaag

SEQ ID NO: 2952344 - DNA, 25 bp, Homo sapien
gaaagagtgataccaagtgggcaga

SEQ ID NO: 2952345 - DNA, 25 bp, Homo sapien
gagtgataccaagtgggcagaagca

SEQ ID NO: 2952346 - DNA, 25 bp, Homo sapien
catcaggttcacagggcgcccgctg

SEQ ID NO: 2952347 - DNA, 25 bp, Homo sapien
atcaggttcacagggcgcccgctgt

SEQ ID NO: 2952348 - DNA, 25 bp, Homo sapien
ttcatcccaaaagcggagaagatgg

SEQ ID NO: 2952349 - DNA, 25 bp, Homo sapien
catcttcatcccaaaagcggagaag

SEQ ID NO: 2952350 - DNA, 25 bp, Homo sapien
atcccaaaagcggagaagatgggca

SEQ ID NO: 2952351 - DNA, 25 bp, Homo sapien
atcatcttcatcccaaaagcggaga

SEQ ID NO: 2952352 - DNA, 25 bp, Homo sapien
tggttttcgcctgatagaccacagg

SEQ ID NO: 2952353 - DNA, 25 bp, Homo sapien
ggttttcgcctgatagaccacaggg

SEQ ID NO: 2952354 - DNA, 25 bp, Homo sapien
ggagaatctgtggttttcgcctgat

SEQ ID NO: 2952355 - DNA, 25 bp, Homo sapien
aatctgtggttttcgcctgatagac

SEQ ID NO: 2952356 - DNA, 25 bp, Homo sapien
cagacccttcctccccaaaccgcat

SEQ ID NO: 2952357 - DNA, 25 bp, Homo sapien
tcagacccttcctccccaaaccgca

SEQ ID NO: 2952358 - DNA, 25 bp, Homo sapien
ttgtttatcagacccttcctcccca

SEQ ID NO: 2952359 - DNA, 25 bp, Homo sapien
tgtttatcagacccttcctccccaa

SEQ ID NO: 2952360 - DNA, 25 bp, Homo sapien
gaataatgagtggtgtcactccact

SEQ ID NO: 2952361 - DNA, 25 bp, Homo sapien
cccagaactgagataacaagcagca

SEQ ID NO: 2952362 - DNA, 25 bp, Homo sapien
ttaaaatcgaattgccagccacccc

SEQ ID NO: 2952363 - DNA, 25 bp, Homo sapien
aagtcattacgggagtcaacgccag

SEQ ID NO: 2952364 - DNA, 25 bp, Homo sapien
gctagtctgcggagtcttacctcca

SEQ ID NO: 2952365 - DNA, 25 bp, Homo sapien
ccctgctagtctgcggagtcttacc

SEQ ID NO: 2952366 - DNA, 25 bp, Homo sapien
tataccctgctagtctgcggagtct

SEQ ID NO: 2952367 - DNA, 25 bp, Homo sapien
cctctataccctgctagtctgcgga

SEQ ID NO: 2952368 - DNA, 25 bp, Homo sapien
caggtgctcatctgcaagcgcaggg

SEQ ID NO: 2952369 - DNA, 25 bp, Homo sapien
ggtcaggtgctcatctgcaagcgca

SEQ ID NO: 2952370 - DNA, 25 bp, Homo sapien
caggtcaggtgctcatctgcaagcg

SEQ ID NO: 2952371 - DNA, 25 bp, Homo sapien
tcaggtgctcatctgcaagcgcagg

SEQ ID NO: 2952372 - DNA, 25 bp, Homo sapien
caggagggctggactcaggaagcag

SEQ ID NO: 2952373 - DNA, 25 bp, Homo sapien
actcaggaagcaggcggcggtaaag

SEQ ID NO: 2952374 - DNA, 25 bp, Homo sapien
agaaccagccgggtggatcccttca

SEQ ID NO: 2952375 - DNA, 25 bp, Homo sapien
tcagtgccttcagcatggccaggag

SEQ ID NO: 2952376 - DNA, 25 bp, Homo sapien
tagtgcagaactttttattagatac

SEQ ID NO: 2952377 - DNA, 25 bp, Homo sapien
tacacaggagaagtttaaatattca

SEQ ID NO: 2952378 - DNA, 25 bp, Homo sapien
ttaagtagtgcagaactttttatta

SEQ ID NO: 2952379 - DNA, 25 bp, Homo sapien
aagtagtgcagaactttttattaga

SEQ ID NO: 2952380 - DNA, 25 bp, Homo sapien
tgccatgctcgtggtttgggcgaga

SEQ ID NO: 2952381 - DNA, 25 bp, Homo sapien
tggggcggcttgtcctttcagacac

SEQ ID NO: 2952382 - DNA, 25 bp, Homo sapien
agccagtggcgggagcggtttgaca

SEQ ID NO: 2952383 - DNA, 25 bp, Homo sapien
gtggcgggagcggtttgacaaatgg

SEQ ID NO: 2952384 - DNA, 25 bp, Homo sapien
catgatatcagagaaggccatgatt

SEQ ID NO: 2952385 - DNA, 25 bp, Homo sapien
gcatccatgatatcagagaaggcca

SEQ ID NO: 2952386 - DNA, 25 bp, Homo sapien
ccaggcatccatgatatcagagaag

SEQ ID NO: 2952387 - DNA, 25 bp, Homo sapien
caaaataccaggcatccatgatatc

SEQ ID NO: 2952388 - DNA, 25 bp, Homo sapien
tggtttctccacctacgagctggat

SEQ ID NO: 2952389 - DNA, 25 bp, Homo sapien
cattgcactccaactatgtatgtgg

SEQ ID NO: 2952390 - DNA, 25 bp, Homo sapien
cacattggctgttacttggttatag

SEQ ID NO: 2952391 - DNA, 25 bp, Homo sapien
tatagttgtccgtagatcactgggt

SEQ ID NO: 2952392 - DNA, 25 bp, Homo sapien
gcctccacagcaggccctaagcccg

SEQ ID NO: 2952393 - DNA, 25 bp, Homo sapien
ccggccggcctagagctcggagcct

SEQ ID NO: 2952394 - DNA, 25 bp, Homo sapien
gccggcctagagctcggagcctccg

SEQ ID NO: 2952395 - DNA, 25 bp, Homo sapien
ctaagcccgagtcccggcctcgccg

SEQ ID NO: 2952396 - DNA, 25 bp, Homo sapien
ggctgagaccaagtcgccatgccca

SEQ ID NO: 2952397 - DNA, 25 bp, Homo sapien
ggcggccagcgaacaagtgctactt

SEQ ID NO: 2952398 - DNA, 25 bp, Homo sapien
gccatgcccactctcggcgccggag

SEQ ID NO: 2952399 - DNA, 25 bp, Homo sapien
ccgagtccggctgagaccaagtcgc

SEQ ID NO: 2952400 - DNA, 25 bp, Homo sapien
tacaggaagaaaggactacttacac

SEQ ID NO: 2952401 - DNA, 25 bp, Homo sapien
tatagcaaccgatcatagaagaact

SEQ ID NO: 2952402 - DNA, 25 bp, Homo sapien
aataagcagacaataaccaggtcat

SEQ ID NO: 2952403 - DNA, 25 bp, Homo sapien
aaagaaagctactgatcacgaatga

SEQ ID NO: 2952404 - DNA, 25 bp, Homo sapien
tgtcctctctgtagattccaatgca

SEQ ID NO: 2952405 - DNA, 25 bp, Homo sapien
ctcaggaacagctgatggatttttt

SEQ ID NO: 2952406 - DNA, 25 bp, Homo sapien
gtcttgggtcagagtgtcccgcctc

SEQ ID NO: 2952407 - DNA, 25 bp, Homo sapien
ggagctacaggcctttcgtcttggg

SEQ ID NO: 2952408 - DNA, 25 bp, Homo sapien
tcacctctgaaagtacaactgttcc

SEQ ID NO: 2952409 - DNA, 25 bp, Homo sapien
ggtcctcaagggcccacgtgactta

SEQ ID NO: 2952410 - DNA, 25 bp, Homo sapien
gaacacaagggatgagctccctgac

SEQ ID NO: 2952411 - DNA, 25 bp, Homo sapien
caactgttcctaacccagtccaggt

SEQ ID NO: 2952412 - DNA, 25 bp, Homo sapien
cagaatgtttatgctttttggtttt

SEQ ID NO: 2952413 - DNA, 25 bp, Homo sapien
aggaccagaatgtttatgctttttg

SEQ ID NO: 2952414 - DNA, 25 bp, Homo sapien
gaaggaccagaatgtttatgctttt

SEQ ID NO: 2952415 - DNA, 25 bp, Homo sapien
ctgaaggaccagaatgtttatgctt

SEQ ID NO: 2952416 - DNA, 25 bp, Homo sapien
ctggagaagtccttccgttaagtat

SEQ ID NO: 2952417 - DNA, 25 bp, Homo sapien
tccttccgttaagtatttcttcaga

SEQ ID NO: 2952418 - DNA, 25 bp, Homo sapien
ttaagtatttcttcagagaaagcat

SEQ ID NO: 2952419 - DNA, 25 bp, Homo sapien
ttccgttaagtatttcttcagagaa

SEQ ID NO: 2952420 - DNA, 25 bp, Homo sapien
gacccctctgggtctcggtgaacca

SEQ ID NO: 2952421 - DNA, 25 bp, Homo sapien
caggcatttacctcagtggttggca

SEQ ID NO: 2952422 - DNA, 25 bp, Homo sapien
gccgccgggcagtgaagtaattgtc

SEQ ID NO: 2952423 - DNA, 25 bp, Homo sapien
tgaggtcaggtaagtatccacgtcc

SEQ ID NO: 2952424 - DNA, 25 bp, Homo sapien
taacagtcagagaactaagctcagg

SEQ ID NO: 2952425 - DNA, 25 bp, Homo sapien
gcgagagccatacaaacccagagct

SEQ ID NO: 2952426 - DNA, 25 bp, Homo sapien
tctttcccggctacttaaggctgga

SEQ ID NO: 2952427 - DNA, 25 bp, Homo sapien
tggcaggcagagaagcccatttctg

SEQ ID NO: 2952428 - DNA, 25 bp, Homo sapien
catgctccgtgctcaagctgcagag

SEQ ID NO: 2952429 - DNA, 25 bp, Homo sapien
ccaagtctccgctggagatgcggaa

SEQ ID NO: 2952430 - DNA, 25 bp, Homo sapien
gctgggctgcgcaaagagccaatcc

SEQ ID NO: 2952431 - DNA, 25 bp, Homo sapien
tgtcgttacctaggctgcgccgaga

SEQ ID NO: 2952432 - DNA, 25 bp, Homo sapien
cagccggtgccgggaagccggacag

SEQ ID NO: 2952433 - DNA, 25 bp, Homo sapien
agccggtgccgggaagccggacagg

SEQ ID NO: 2952434 - DNA, 25 bp, Homo sapien
cagggcagccggtgccgggaagccg

SEQ ID NO: 2952435 - DNA, 25 bp, Homo sapien
ccccagggcagccggtgccgggaag

SEQ ID NO: 2952436 - DNA, 25 bp, Homo sapien
ggccggctgcctttggcatggcccc

SEQ ID NO: 2952437 - DNA, 25 bp, Homo sapien
ctgggccacccggtgaccagccagc

SEQ ID NO: 2952438 - DNA, 25 bp, Homo sapien
ccagcaaagagttaaggggccggct

SEQ ID NO: 2952439 - DNA, 25 bp, Homo sapien
ccacccggtgaccagccagcaaaga

SEQ ID NO: 2952440 - DNA, 25 bp, Homo sapien
tactttagtctccccacatacacca

SEQ ID NO: 2952441 - DNA, 25 bp, Homo sapien
actttagtctccccacatacaccaa

SEQ ID NO: 2952442 - DNA, 25 bp, Homo sapien
ctttagtctccccacatacaccaac

SEQ ID NO: 2952443 - DNA, 25 bp, Homo sapien
aaaggatgtcaatcagatctatgtc

SEQ ID NO: 2952444 - DNA, 25 bp, Homo sapien
tgtcgccaaaggatgtcaatcagat

SEQ ID NO: 2952445 - DNA, 25 bp, Homo sapien
cgccaaaggatgtcaatcagatcta

SEQ ID NO: 2952446 - DNA, 25 bp, Homo sapien
ctgtcgccaaaggatgtcaatcaga

SEQ ID NO: 2952447 - DNA, 25 bp, Homo sapien
tccttctggcggtgactatagtcaa

SEQ ID NO: 2952448 - DNA, 25 bp, Homo sapien
atcctgctccttctggcggtgacta

SEQ ID NO: 2952449 - DNA, 25 bp, Homo sapien
tatagtcaaaaacctcacgcccagc

SEQ ID NO: 2952450 - DNA, 25 bp, Homo sapien
tgactatagtcaaaaacctcacgcc

SEQ ID NO: 2952451 - DNA, 25 bp, Homo sapien
tgtcctgctcgcctccatctcgcag

SEQ ID NO: 2952452 - DNA, 25 bp, Homo sapien
cgtgccagagcttccgcgccctcgc

SEQ ID NO: 2952453 - DNA, 25 bp, Homo sapien
ttccgtgccagagcttccgcgccct

SEQ ID NO: 2952454 - DNA, 25 bp, Homo sapien
ggttccgtgccagagcttccgcgcc

SEQ ID NO: 2952455 - DNA, 25 bp, Homo sapien
gtcttctctaaaggaagtttctgga

SEQ ID NO: 2952456 - DNA, 25 bp, Homo sapien
ccagcctggtttgtgtcagggtagt

SEQ ID NO: 2952457 - DNA, 25 bp, Homo sapien
gtcagggtagtagggacaagaagag

SEQ ID NO: 2952458 - DNA, 25 bp, Homo sapien
cttctctaaaggaagtttctggaag

SEQ ID NO: 2952459 - DNA, 25 bp, Homo sapien
taagtctgattgacctgggccttgg

SEQ ID NO: 2952460 - DNA, 25 bp, Homo sapien
tgtggcaacaggaactgtaagtctg

SEQ ID NO: 2952461 - DNA, 25 bp, Homo sapien
actgtctgttgccacggcctggcca

SEQ ID NO: 2952462 - DNA, 25 bp, Homo sapien
gaagcaagcaggaagatgctacatg

SEQ ID NO: 2952463 - DNA, 25 bp, Homo sapien
agcctaaggcactcttccagggaca

SEQ ID NO: 2952464 - DNA, 25 bp, Homo sapien
gcctaaggcactcttccagggacag

SEQ ID NO: 2952465 - DNA, 25 bp, Homo sapien
ggtggactctcactggagtcctgct

SEQ ID NO: 2952466 - DNA, 25 bp, Homo sapien
tggactctcactggagtcctgctca

SEQ ID NO: 2952467 - DNA, 25 bp, Homo sapien
ttggtggactctcactggagtcctg

SEQ ID NO: 2952468 - DNA, 25 bp, Homo sapien
ggactctcactggagtcctgctcac

SEQ ID NO: 2952469 - DNA, 25 bp, Homo sapien
gagcagggggctcactctcactagg

SEQ ID NO: 2952470 - DNA, 25 bp, Homo sapien
ctgttccaaatcaaatggtgactct

SEQ ID NO: 2952471 - DNA, 25 bp, Homo sapien
tctgtcccggtcagaagaggagaca

SEQ ID NO: 2952472 - DNA, 25 bp, Homo sapien
ggcactgcttctgttatgctggaaa

SEQ ID NO: 2952473 - DNA, 25 bp, Homo sapien
ccccagggacgcctgatgcaggctg

SEQ ID NO: 2952474 - DNA, 25 bp, Homo sapien
ggctgacattctgattgatgggagt

SEQ ID NO: 2952475 - DNA, 25 bp, Homo sapien
caaggctgtagttggtgctcagtgg

SEQ ID NO: 2952476 - DNA, 25 bp, Homo sapien
gggcactgtacaggatttcacttgc

SEQ ID NO: 2952477 - DNA, 25 bp, Homo sapien
agcgtggagctactggccacaggca

SEQ ID NO: 2952478 - DNA, 25 bp, Homo sapien
tggagccgaaggtggagttgaggct

SEQ ID NO: 2952479 - DNA, 25 bp, Homo sapien
agttgaggctggtagaattgctggg

SEQ ID NO: 2952480 - DNA, 25 bp, Homo sapien
gaaagaagagccctgtcaggttggt

SEQ ID NO: 2952481 - DNA, 25 bp, Homo sapien
agaactgccttcagagctgcttagg

SEQ ID NO: 2952482 - DNA, 25 bp, Homo sapien
ggctcgagtctaaggaaaggcctga

SEQ ID NO: 2952483 - DNA, 25 bp, Homo sapien
aagggctatggctcgagtctaagga

SEQ ID NO: 2952484 - DNA, 25 bp, Homo sapien
aatggccaggtccataaggctgatc

SEQ ID NO: 2952485 - DNA, 25 bp, Homo sapien
tatgtgtggttgtggcccacgtgct

SEQ ID NO: 2952486 - DNA, 25 bp, Homo sapien
catgcggcagaacttggaatactca

SEQ ID NO: 2952487 - DNA, 25 bp, Homo sapien
aagggatcttcatggctcgggctcg

SEQ ID NO: 2952488 - DNA, 25 bp, Homo sapien
ctggatcctggtagctcatgcggca

SEQ ID NO: 2952489 - DNA, 25 bp, Homo sapien
tagggtcgtccgttctcatctcgca

SEQ ID NO: 2952490 - DNA, 25 bp, Homo sapien
cgtactggagcgcatactgactggg

SEQ ID NO: 2952491 - DNA, 25 bp, Homo sapien
cgccggatgtctcggatgaggctca

SEQ ID NO: 2952492 - DNA, 25 bp, Homo sapien
tcagctgggcttcactcaactggta

SEQ ID NO: 2952493 - DNA, 25 bp, Homo sapien
cctgtccgtctaaatggtctggcca

SEQ ID NO: 2952494 - DNA, 25 bp, Homo sapien
gataagaaggcatttaagtccccgc

SEQ ID NO: 2952495 - DNA, 25 bp, Homo sapien
ttcctgtacactgacccgcagtcat

SEQ ID NO: 2952496 - DNA, 25 bp, Homo sapien
cccatctgagaagatatattggata

SEQ ID NO: 2952497 - DNA, 25 bp, Homo sapien
agtgttgtgctgaatcctgcctgga

SEQ ID NO: 2952498 - DNA, 25 bp, Homo sapien
ccccttcagggatgtcaaaatgcaa

SEQ ID NO: 2952499 - DNA, 25 bp, Homo sapien
ggctgttgcaacatgggaccacgtg

SEQ ID NO: 2952500 - DNA, 25 bp, Homo sapien
ctctgatggagacaatgggagcctc

SEQ ID NO: 2952501 - DNA, 25 bp, Homo sapien
attctcaatttaaattcaaagtggg

SEQ ID NO: 2952502 - DNA, 25 bp, Homo sapien
tattctcaatttaaattcaaagtgg

SEQ ID NO: 2952503 - DNA, 25 bp, Homo sapien
tctcaatttaaattcaaagtgggga

SEQ ID NO: 2952504 - DNA, 25 bp, Homo sapien
tggcttgagcccagtggcagttgca

SEQ ID NO: 2952505 - DNA, 25 bp, Homo sapien
caaacctttccaactggagactggg

SEQ ID NO: 2952506 - DNA, 25 bp, Homo sapien
catacatttctaggaagggtacaag

SEQ ID NO: 2952507 - DNA, 25 bp, Homo sapien
aaaggactgagctgaaccaggttac

SEQ ID NO: 2952508 - DNA, 25 bp, Homo sapien
tatgttggccgttaacacatgactg

SEQ ID NO: 2952509 - DNA, 25 bp, Homo sapien
tggtacaccaatatggaaacaggct

SEQ ID NO: 2952510 - DNA, 25 bp, Homo sapien
caaaatttctatacttggctgggaa

SEQ ID NO: 2952511 - DNA, 25 bp, Homo sapien
tagcgtgagcttctaaagttgttgc

SEQ ID NO: 2952512 - DNA, 25 bp, Homo sapien
tccaaagttcagagcgggaggcaag

SEQ ID NO: 2952513 - DNA, 25 bp, Homo sapien
tacctgttttcagatatgaccttat

SEQ ID NO: 2952514 - DNA, 25 bp, Homo sapien
atacctgttttcagatatgacctta

SEQ ID NO: 2952515 - DNA, 25 bp, Homo sapien
aatacctgttttcagatatgacctt

SEQ ID NO: 2952516 - DNA, 25 bp, Homo sapien
acctgttttcagatatgaccttata

SEQ ID NO: 2952517 - DNA, 25 bp, Homo sapien
tgagtactactcactcgtgcaaagc

SEQ ID NO: 2952518 - DNA, 25 bp, Homo sapien
ggccttcccgcacagaggtctgagt

SEQ ID NO: 2952519 - DNA, 25 bp, Homo sapien
tccggccaacttgtcatttttgtaa

SEQ ID NO: 2952520 - DNA, 25 bp, Homo sapien
caaatcagtgtaacagttgagtact

SEQ ID NO: 2952521 - DNA, 25 bp, Homo sapien
ccattgttggcagggttcagtcact

SEQ ID NO: 2952522 - DNA, 25 bp, Homo sapien
tgttcccacaaaggactaagcctgt

SEQ ID NO: 2952523 - DNA, 25 bp, Homo sapien
gaaagtctgaaacctataagccaag

SEQ ID NO: 2952524 - DNA, 25 bp, Homo sapien
gccttagaggtgctaattcccgaaa

SEQ ID NO: 2952525 - DNA, 25 bp, Homo sapien
gaagagccagtatagtttctgtgcc

SEQ ID NO: 2952526 - DNA, 25 bp, Homo sapien
gaaggagttctacttgtcttgacac

SEQ ID NO: 2952527 - DNA, 25 bp, Homo sapien
ccttctatgaaggacaaaacttgca

SEQ ID NO: 2952528 - DNA, 25 bp, Homo sapien
gtatagtttgcacacccatcccagt

SEQ ID NO: 2952529 - DNA, 25 bp, Homo sapien
tgtatttctaaactccataggtgat

SEQ ID NO: 2952530 - DNA, 25 bp, Homo sapien
tctgattctcatagaggtgaaggtt

SEQ ID NO: 2952531 - DNA, 25 bp, Homo sapien
tcagagttcgctttcctctgaattc

SEQ ID NO: 2952532 - DNA, 25 bp, Homo sapien
gttcttgactcagagttcgctttcc

SEQ ID NO: 2952533 - DNA, 25 bp, Homo sapien
gcccctatgcaaagacgacacacaa

SEQ ID NO: 2952534 - DNA, 25 bp, Homo sapien
tgtcaaagatacattgcattgtata

SEQ ID NO: 2952535 - DNA, 25 bp, Homo sapien
ggtgcttgcttaagcagcacatgta

SEQ ID NO: 2952536 - DNA, 25 bp, Homo sapien
tgcttgcttaagcagcacatgtact

SEQ ID NO: 2952537 - DNA, 25 bp, Homo sapien
gcttcgggccttgtagtcttggaca

SEQ ID NO: 2952538 - DNA, 25 bp, Homo sapien
tgtaactgtattcggaagacgccgg

SEQ ID NO: 2952539 - DNA, 25 bp, Homo sapien
taggttacaacgctctacgctgcaa

SEQ ID NO: 2952540 - DNA, 25 bp, Homo sapien
tcctgagccagagactgagtgcttg

SEQ ID NO: 2952541 - DNA, 25 bp, Homo sapien
ttgggacgccggagagtgcacgcag

SEQ ID NO: 2952542 - DNA, 25 bp, Homo sapien
ccggagagtgcacgcaggtgccggg

SEQ ID NO: 2952543 - DNA, 25 bp, Homo sapien
acgccggagagtgcacgcaggtgcc

SEQ ID NO: 2952544 - DNA, 25 bp, Homo sapien
gagtgcacgcaggtgccgggtgagg

SEQ ID NO: 2952545 - DNA, 25 bp, Homo sapien
attcccgcttccgaatagcgcggct

SEQ ID NO: 2952546 - DNA, 25 bp, Homo sapien
gtgggattcccgcttccgaatagcg

SEQ ID NO: 2952547 - DNA, 25 bp, Homo sapien
cgctggccaaggccccggactggag

SEQ ID NO: 2952548 - DNA, 25 bp, Homo sapien
tgagtgggattcccgcttccgaata

SEQ ID NO: 2952549 - DNA, 25 bp, Homo sapien
tgcacgacgggagacgccccaatcc

SEQ ID NO: 2952550 - DNA, 25 bp, Homo sapien
ggtgcacgacgggagacgccccaat

SEQ ID NO: 2952551 - DNA, 25 bp, Homo sapien
cacgacgggagacgccccaatcccg

SEQ ID NO: 2952552 - DNA, 25 bp, Homo sapien
cggtgcacgacgggagacgccccaa

SEQ ID NO: 2952553 - DNA, 25 bp, Homo sapien
tatagccagatcacggcttctcctt

SEQ ID NO: 2952554 - DNA, 25 bp, Homo sapien
tcacggcttctccttccgggtgagt

SEQ ID NO: 2952555 - DNA, 25 bp, Homo sapien
ccaccatatagccagatcacggctt

SEQ ID NO: 2952556 - DNA, 25 bp, Homo sapien
tccttccgggtgagtcgccggtgcc

SEQ ID NO: 2952557 - DNA, 25 bp, Homo sapien
agtccctccctaggatgtaaagcga

SEQ ID NO: 2952558 - DNA, 25 bp, Homo sapien
ccctccctaggatgtaaagcgatgc

SEQ ID NO: 2952559 - DNA, 25 bp, Homo sapien
cctaggatgtaaagcgatgccacca

SEQ ID NO: 2952560 - DNA, 25 bp, Homo sapien
gtaaagcgatgccaccatcccgagt

SEQ ID NO: 2952561 - DNA, 25 bp, Homo sapien
gacttcagccaatatgtactgccaa

SEQ ID NO: 2952562 - DNA, 25 bp, Homo sapien
actgacttcagccaatatgtactgc

SEQ ID NO: 2952563 - DNA, 25 bp, Homo sapien
tgacttcagccaatatgtactgcca

SEQ ID NO: 2952564 - DNA, 25 bp, Homo sapien
ttcagccaatatgtactgccaacaa

SEQ ID NO: 2952565 - DNA, 25 bp, Homo sapien
gcactaatcttgttacttctacaac

SEQ ID NO: 2952566 - DNA, 25 bp, Homo sapien
tcttgttacttctacaactattcca

SEQ ID NO: 2952567 - DNA, 25 bp, Homo sapien
tctacaactattccaacagcatcca

SEQ ID NO: 2952568 - DNA, 25 bp, Homo sapien
cttctacaactattccaacagcatc

SEQ ID NO: 2952569 - DNA, 25 bp, Homo sapien
ctgttctctgcagaccatactctta

SEQ ID NO: 2952570 - DNA, 25 bp, Homo sapien
tgttctctgcagaccatactcttac

SEQ ID NO: 2952571 - DNA, 25 bp, Homo sapien
cctaggaatgcctctgctgttgatt

SEQ ID NO: 2952572 - DNA, 25 bp, Homo sapien
tgaacaagagacgtaagtgcctgcc

SEQ ID NO: 2952573 - DNA, 25 bp, Homo sapien
ttagtcagaatggaaccccaatttc

SEQ ID NO: 2952574 - DNA, 25 bp, Homo sapien
gagccccactacgtgtcagacactg

SEQ ID NO: 2952575 - DNA, 25 bp, Homo sapien
caggagccctcattctgcactcggg

SEQ ID NO: 2952576 - DNA, 25 bp, Homo sapien
atccacataagagttccaggagccc

SEQ ID NO: 2952577 - DNA, 25 bp, Homo sapien
tcctgaacacgcactgtaatcacct

SEQ ID NO: 2952578 - DNA, 25 bp, Homo sapien
tgcactcgggggtcctgaacacgca

SEQ ID NO: 2952579 - DNA, 25 bp, Homo sapien
gtagcggcgccgcacacaggaagtc

SEQ ID NO: 2952580 - DNA, 25 bp, Homo sapien
acaggaagtcttggcagtaaaggct

SEQ ID NO: 2952581 - DNA, 25 bp, Homo sapien
tttctcagccacacgaactcacggt

SEQ ID NO: 2952582 - DNA, 25 bp, Homo sapien
acgaactcacggtagcggcgccgca

SEQ ID NO: 2952583 - DNA, 25 bp, Homo sapien
aaaagccagtcacagacccaagaag

SEQ ID NO: 2952584 - DNA, 25 bp, Homo sapien
caagttctcttcattgtcaactcca

SEQ ID NO: 2952585 - DNA, 25 bp, Homo sapien
gttgcaagttctcttcattgtcaac

SEQ ID NO: 2952586 - DNA, 25 bp, Homo sapien
ttctcttcattgtcaactccagttc

SEQ ID NO: 2952587 - DNA, 25 bp, Homo sapien
ggttgacttcccaggaagttcagga

SEQ ID NO: 2952588 - DNA, 25 bp, Homo sapien
tgtcgtcgcttctcaatgaactcat

SEQ ID NO: 2952589 - DNA, 25 bp, Homo sapien
gctgcagaccttgtcgtcgcttctc

SEQ ID NO: 2952590 - DNA, 25 bp, Homo sapien
tctgaggtgccgaagaaggttgact

SEQ ID NO: 2952591 - DNA, 25 bp, Homo sapien
caggaataggtgcaactggctgtct

SEQ ID NO: 2952592 - DNA, 25 bp, Homo sapien
acagtcatggtacttcggccctgga

SEQ ID NO: 2952593 - DNA, 25 bp, Homo sapien
gacacaggcttctatctcaggcacc

SEQ ID NO: 2952594 - DNA, 25 bp, Homo sapien
tgggcccagccacagtttgacatag

SEQ ID NO: 2952595 - DNA, 25 bp, Homo sapien
ggagcccacacttctaaatggtcct

SEQ ID NO: 2952596 - DNA, 25 bp, Homo sapien
ccttttcttcactgggaggcggtga

SEQ ID NO: 2952597 - DNA, 25 bp, Homo sapien
agggagagctcctcctacccgatct

SEQ ID NO: 2952598 - DNA, 25 bp, Homo sapien
ctcctacccgatcttggaagaaagc

SEQ ID NO: 2952599 - DNA, 25 bp, Homo sapien
cttccaaaatcacagcataatggtg

SEQ ID NO: 2952600 - DNA, 25 bp, Homo sapien
taactgaccagggtccaaaggcaca

SEQ ID NO: 2952601 - DNA, 25 bp, Homo sapien
aaggaaggaacctcagagtcaacaa

SEQ ID NO: 2952602 - DNA, 25 bp, Homo sapien
cagactgaagagtggaggttccctc

SEQ ID NO: 2952603 - DNA, 25 bp, Homo sapien
tgtcaatcagcccaagcagaggtga

SEQ ID NO: 2952604 - DNA, 25 bp, Homo sapien
tagaatttgccacatacgggtcccc

SEQ ID NO: 2952605 - DNA, 25 bp, Homo sapien
ccacagacagggtaggatagccaga

SEQ ID NO: 2952606 - DNA, 25 bp, Homo sapien
tctaaccctgcggaaaagatggcca

SEQ ID NO: 2952607 - DNA, 25 bp, Homo sapien
aatgcaggagggctacagagcacag

SEQ ID NO: 2952608 - DNA, 25 bp, Homo sapien
tgtgagaagagttggatcccagctc

SEQ ID NO: 2952609 - DNA, 25 bp, Homo sapien
tccagtggtgaacttgagctgcaca

SEQ ID NO: 2952610 - DNA, 25 bp, Homo sapien
tatacctaacaaggttcacgcccag

SEQ ID NO: 2952611 - DNA, 25 bp, Homo sapien
tgcctgttgacaaactttatttctc

SEQ ID NO: 2952612 - DNA, 25 bp, Homo sapien
tgcctctgtaggttttctatcctcg

SEQ ID NO: 2952613 - DNA, 25 bp, Homo sapien
tctgctgcatcatataaaggagaga

SEQ ID NO: 2952614 - DNA, 25 bp, Homo sapien
catcatataaaggagagacccaggg

SEQ ID NO: 2952615 - DNA, 25 bp, Homo sapien
ggttttctatcctcgccttgctctg

SEQ ID NO: 2952616 - DNA, 25 bp, Homo sapien
gagcaaacagaagaaggccaaccca

SEQ ID NO: 2952617 - DNA, 25 bp, Homo sapien
gccattagcttagcatctgtcgggt

SEQ ID NO: 2952618 - DNA, 25 bp, Homo sapien
caccaatcggcagagcggatgccat

SEQ ID NO: 2952619 - DNA, 25 bp, Homo sapien
tagggaattgacacagaccacctcc

SEQ ID NO: 2952620 - DNA, 25 bp, Homo sapien
gaaaggtgactacatcaggacagaa

SEQ ID NO: 2952621 - DNA, 25 bp, Homo sapien
caacctccacaagcttggaatcagt

SEQ ID NO: 2952622 - DNA, 25 bp, Homo sapien
ctagatgtgggccatggaggtatct

SEQ ID NO: 2952623 - DNA, 25 bp, Homo sapien
ggaatcagtcatcctgggtaatgga

SEQ ID NO: 2952624 - DNA, 25 bp, Homo sapien
ggactcggtagtatggatgtaaggc

SEQ ID NO: 2952625 - DNA, 25 bp, Homo sapien
cttggactcggtagtatggatgtaa

SEQ ID NO: 2952626 - DNA, 25 bp, Homo sapien
ttggactcggtagtatggatgtaag

SEQ ID NO: 2952627 - DNA, 25 bp, Homo sapien
tggactcggtagtatggatgtaagg

SEQ ID NO: 2952628 - DNA, 25 bp, Homo sapien
tccacatttagggtaccagaacttg

SEQ ID NO: 2952629 - DNA, 25 bp, Homo sapien
cacatttagggtaccagaacttgga

SEQ ID NO: 2952630 - DNA, 25 bp, Homo sapien
ttcaacatctccacatttagggtac

SEQ ID NO: 2952631 - DNA, 25 bp, Homo sapien
catctccacatttagggtaccagaa

SEQ ID NO: 2952632 - DNA, 25 bp, Homo sapien
gaagcaggctacagacatttccctt

SEQ ID NO: 2952633 - DNA, 25 bp, Homo sapien
gacacttgcagcctgatggtgagca

SEQ ID NO: 2952634 - DNA, 25 bp, Homo sapien
gacatctggttccactgtagacact

SEQ ID NO: 2952635 - DNA, 25 bp, Homo sapien
gagtcaccaaggtggcatatgcaca

SEQ ID NO: 2952636 - DNA, 25 bp, Homo sapien
gctttcctggtatgaggcttggcaa

SEQ ID NO: 2952637 - DNA, 25 bp, Homo sapien
taatgatgatgccaagaccgcaggt

SEQ ID NO: 2952638 - DNA, 25 bp, Homo sapien
ggcaaagcgccactgaaggaagcat

SEQ ID NO: 2952639 - DNA, 25 bp, Homo sapien
tgtgtgcattcagttccctcgtggg

SEQ ID NO: 2952640 - DNA, 25 bp, Homo sapien
ttttttatctaaacagaattatgta

SEQ ID NO: 2952641 - DNA, 25 bp, Homo sapien
tttatctaaacagaattatgtaagg

SEQ ID NO: 2952642 - DNA, 25 bp, Homo sapien
tttttatctaaacagaattatgtaa

SEQ ID NO: 2952643 - DNA, 25 bp, Homo sapien
ttttatctaaacagaattatgtaag

SEQ ID NO: 2952644 - DNA, 25 bp, Homo sapien
aaattagccagttgtggccaggcgc

SEQ ID NO: 2952645 - DNA, 25 bp, Homo sapien
tggctcacgcttgtaatcccagcac

SEQ ID NO: 2952646 - DNA, 25 bp, Homo sapien
acgcttgtaatcccagcactttggg

SEQ ID NO: 2952647 - DNA, 25 bp, Homo sapien
attagccagttgtggccaggcgcag

SEQ ID NO: 2952648 - DNA, 25 bp, Homo sapien
ttaaaatttcattcggggccaggca

SEQ ID NO: 2952649 - DNA, 25 bp, Homo sapien
taaaatttcattcggggccaggcac

SEQ ID NO: 2952650 - DNA, 25 bp, Homo sapien
aaaatttcattcggggccaggcacg

SEQ ID NO: 2952651 - DNA, 25 bp, Homo sapien
caggatgcatatggtctctgggact

SEQ ID NO: 2952652 - DNA, 25 bp, Homo sapien
tcagatcccgggacctgtaggtgct

SEQ ID NO: 2952653 - DNA, 25 bp, Homo sapien
gctttgattaagctcccaggctccc

SEQ ID NO: 2952654 - DNA, 25 bp, Homo sapien
tttcgggtatacagccaagggatga

SEQ ID NO: 2952655 - DNA, 25 bp, Homo sapien
gagcaattgtggactccccagcaat

SEQ ID NO: 2952656 - DNA, 25 bp, Homo sapien
aattgtggactccccagcaattcat

SEQ ID NO: 2952657 - DNA, 25 bp, Homo sapien
caattgtggactccccagcaattca

SEQ ID NO: 2952658 - DNA, 25 bp, Homo sapien
agcaattgtggactccccagcaatt

SEQ ID NO: 2952659 - DNA, 25 bp, Homo sapien
agttctcggccggatctcatttgca

SEQ ID NO: 2952660 - DNA, 25 bp, Homo sapien
gacaggagcagggttcattcagagc

SEQ ID NO: 2952661 - DNA, 25 bp, Homo sapien
gggtctgcctgactgagccagtact

SEQ ID NO: 2952662 - DNA, 25 bp, Homo sapien
caatttggcacttggaaacgagggc

SEQ ID NO: 2952663 - DNA, 25 bp, Homo sapien
tgctgatggtgagcgctgcgtctat

SEQ ID NO: 2952664 - DNA, 25 bp, Homo sapien
ccttgttgatggagattagcataaa

SEQ ID NO: 2952665 - DNA, 25 bp, Homo sapien
gcgtctatttcaggttcactcaatg

SEQ ID NO: 2952666 - DNA, 25 bp, Homo sapien
gcaacatgcccattgttggtggcca

SEQ ID NO: 2952667 - DNA, 25 bp, Homo sapien
caagtgctgagcttcgatcctttca

SEQ ID NO: 2952668 - DNA, 25 bp, Homo sapien
tacccaaggtttcagccaagtgctg

SEQ ID NO: 2952669 - DNA, 25 bp, Homo sapien
gaacaattcttgttcccagccttgt

SEQ ID NO: 2952670 - DNA, 25 bp, Homo sapien
tctcggcagttagaaggatgctgat

SEQ ID NO: 2952671 - DNA, 25 bp, Homo sapien
gcaatggcccttgaagtgcagtagg

SEQ ID NO: 2952672 - DNA, 25 bp, Homo sapien
tgtggagattcaaggcgcctctctc

SEQ ID NO: 2952673 - DNA, 25 bp, Homo sapien
cagatgggccgagcagattaaacat

SEQ ID NO: 2952674 - DNA, 25 bp, Homo sapien
gagaaatacgcagcacagatgggcc

SEQ ID NO: 2952675 - DNA, 25 bp, Homo sapien
tattctggcgaccttaccatgaccc

SEQ ID NO: 2952676 - DNA, 25 bp, Homo sapien
gacaccccctagagggatccaggaa

SEQ ID NO: 2952677 - DNA, 25 bp, Homo sapien
gaaatgaagctataagcggttgtca

SEQ ID NO: 2952678 - DNA, 25 bp, Homo sapien
cgttcatttattctggcgaccttac

SEQ ID NO: 2952679 - DNA, 25 bp, Homo sapien
gataatcgaaacattcaaattgtta

SEQ ID NO: 2952680 - DNA, 25 bp, Homo sapien
attatgttcagcaaggtcccgattt

SEQ ID NO: 2952681 - DNA, 25 bp, Homo sapien
aatggaacggactgggaaagataat

SEQ ID NO: 2952682 - DNA, 25 bp, Homo sapien
gcaaggtcccgatttataggaaata

SEQ ID NO: 2952683 - DNA, 25 bp, Homo sapien
gcccatccgaataattgttaaaaga

SEQ ID NO: 2952684 - DNA, 25 bp, Homo sapien
aaggctgtagcccatccgaataatt

SEQ ID NO: 2952685 - DNA, 25 bp, Homo sapien
tgtagcccatccgaataattgttaa

SEQ ID NO: 2952686 - DNA, 25 bp, Homo sapien
tccgaataattgttaaaagacagaa

SEQ ID NO: 2952687 - DNA, 25 bp, Homo sapien
atagatgagaatattctgaaccttt

SEQ ID NO: 2952688 - DNA, 25 bp, Homo sapien
tgagaatattctgaacctttctcat

SEQ ID NO: 2952689 - DNA, 25 bp, Homo sapien
tagatgagaatattctgaacctttc

SEQ ID NO: 2952690 - DNA, 25 bp, Homo sapien
gatgagaatattctgaacctttctc

SEQ ID NO: 2952691 - DNA, 25 bp, Homo sapien
actgtgctgtgatgacgaagatgat

SEQ ID NO: 2952692 - DNA, 25 bp, Homo sapien
ggtctgaggctcttccaaggaattg

SEQ ID NO: 2952693 - DNA, 25 bp, Homo sapien
tatacttacacggtggcttagctgg

SEQ ID NO: 2952694 - DNA, 25 bp, Homo sapien
gcaacaagttgggtacgcataagat

SEQ ID NO: 2952695 - DNA, 25 bp, Homo sapien
ggaaagcagccttggagcaacaagt

SEQ ID NO: 2952696 - DNA, 25 bp, Homo sapien
cattgttaagaatcgatggctgtcc

SEQ ID NO: 2952697 - DNA, 25 bp, Homo sapien
cctttccgggtagaagatcaataca

SEQ ID NO: 2952698 - DNA, 25 bp, Homo sapien
cattgccatctagttctgctgagaa

SEQ ID NO: 2952699 - DNA, 25 bp, Homo sapien
gcttctaaagcttggtttgtcgtct

SEQ ID NO: 2952700 - DNA, 25 bp, Homo sapien
agtgactcccaaacataagctgaac

SEQ ID NO: 2952701 - DNA, 25 bp, Homo sapien
tgaattctgtcgctacccagtgact

SEQ ID NO: 2952702 - DNA, 25 bp, Homo sapien
tgccaggccttattgacacgatcat

SEQ ID NO: 2952703 - DNA, 25 bp, Homo sapien
taagaggttgtactcaatgccaggc

SEQ ID NO: 2952704 - DNA, 25 bp, Homo sapien
gcaagagactcggaagcttttattg

SEQ ID NO: 2952705 - DNA, 25 bp, Homo sapien
aagagcaagagactcggaagctttt

SEQ ID NO: 2952706 - DNA, 25 bp, Homo sapien
gagactcggaagcttttattgacca

SEQ ID NO: 2952707 - DNA, 25 bp, Homo sapien
gactcggaagcttttattgaccatt

SEQ ID NO: 2952708 - DNA, 25 bp, Homo sapien
gctggttaaataggccgtgactcac

SEQ ID NO: 2952709 - DNA, 25 bp, Homo sapien
ttctcagtgggctagaacgcagctg

SEQ ID NO: 2952710 - DNA, 25 bp, Homo sapien
aatgtatcacactccaaagggtccc

SEQ ID NO: 2952711 - DNA, 25 bp, Homo sapien
tagccttgtgctctggtgttgccaa

SEQ ID NO: 2952712 - DNA, 25 bp, Homo sapien
gagaatcacgataattagttcctga

SEQ ID NO: 2952713 - DNA, 25 bp, Homo sapien
cagagaatcacgataattagttcct

SEQ ID NO: 2952714 - DNA, 25 bp, Homo sapien
gttttctcaatgcagtactctgatg

SEQ ID NO: 2952715 - DNA, 25 bp, Homo sapien
ccccagagaatcacgataattagtt

SEQ ID NO: 2952716 - DNA, 25 bp, Homo sapien
cattgtaaatcatgttgtcccagta

SEQ ID NO: 2952717 - DNA, 25 bp, Homo sapien
cccagtagcagagcaggtccagtgc

SEQ ID NO: 2952718 - DNA, 25 bp, Homo sapien
tcattacttggtgatttaggttttc

SEQ ID NO: 2952719 - DNA, 25 bp, Homo sapien
tggtctgacaaaagatgctttgcct

SEQ ID NO: 2952720 - DNA, 25 bp, Homo sapien
ctgacgtgcattggcatccaatatg

SEQ ID NO: 2952721 - DNA, 25 bp, Homo sapien
cgtgcattggcatccaatatgccat

SEQ ID NO: 2952722 - DNA, 25 bp, Homo sapien
tgcattggcatccaatatgccatcc

SEQ ID NO: 2952723 - DNA, 25 bp, Homo sapien
gacgtgcattggcatccaatatgcc

SEQ ID NO: 2952724 - DNA, 25 bp, Homo sapien
tagccatccaatatgtgcagcctct

SEQ ID NO: 2952725 - DNA, 25 bp, Homo sapien
catccaatatgtgcagcctcttttg

SEQ ID NO: 2952726 - DNA, 25 bp, Homo sapien
ccaatatgtgcagcctcttttgttc

SEQ ID NO: 2952727 - DNA, 25 bp, Homo sapien
cttagccatccaatatgtgcagcct

SEQ ID NO: 2952728 - DNA, 25 bp, Homo sapien
gatttggagcttaaaaatacctgag

SEQ ID NO: 2952729 - DNA, 25 bp, Homo sapien
aaggccagactggtgagatctttct

SEQ ID NO: 2952730 - DNA, 25 bp, Homo sapien
actgtgtgagcctgtttcagcttca

SEQ ID NO: 2952731 - DNA, 25 bp, Homo sapien
tgtgtagcatggtgtagccaaaaca

SEQ ID NO: 2952732 - DNA, 25 bp, Homo sapien
tgttccttcggttctgctttcgcag

SEQ ID NO: 2952733 - DNA, 25 bp, Homo sapien
aaagcctccgtctgcccaatggtgt

SEQ ID NO: 2952734 - DNA, 25 bp, Homo sapien
gcagatatatgttgtggcttgcacc

SEQ ID NO: 2952735 - DNA, 25 bp, Homo sapien
gcccaatggtgttccttcggttctg

SEQ ID NO: 2952736 - DNA, 25 bp, Homo sapien
ccgtgtgcagccagataaccttttc

SEQ ID NO: 2952737 - DNA, 25 bp, Homo sapien
tgaactgttatctgtggctgctgta

SEQ ID NO: 2952738 - DNA, 25 bp, Homo sapien
cttctagccagagcagactgggaga

SEQ ID NO: 2952739 - DNA, 25 bp, Homo sapien
attaagggcccacttagctctccat

SEQ ID NO: 2952740 - DNA, 25 bp, Homo sapien
tattttggtctttctgacagggcca

SEQ ID NO: 2952741 - DNA, 25 bp, Homo sapien
aataacctactagccttccaaacat

SEQ ID NO: 2952742 - DNA, 25 bp, Homo sapien
ggtctttctgacagggccaaaataa

SEQ ID NO: 2952743 - DNA, 25 bp, Homo sapien
tgacagggccaaaataacctactag

SEQ ID NO: 2952744 - DNA, 25 bp, Homo sapien
tcatttgaagatctcaaaaagtact

SEQ ID NO: 2952745 - DNA, 25 bp, Homo sapien
catttgaagatctcaaaaagtactt

SEQ ID NO: 2952746 - DNA, 25 bp, Homo sapien
ttcatttgaagatctcaaaaagtac

SEQ ID NO: 2952747 - DNA, 25 bp, Homo sapien
tttgaagatctcaaaaagtacttta

SEQ ID NO: 2952748 - DNA, 25 bp, Homo sapien
gaagggcagattgtcaagtcgaaat

SEQ ID NO: 2952749 - DNA, 25 bp, Homo sapien
gattgtcaagtcgaaattctttccc

SEQ ID NO: 2952750 - DNA, 25 bp, Homo sapien
gtggtggtgcggaatgtgaatttca

SEQ ID NO: 2952751 - DNA, 25 bp, Homo sapien
cctgggtctgagatactgaagggca

SEQ ID NO: 2952752 - DNA, 25 bp, Homo sapien
tatactggttgtcgattgtctttgc

SEQ ID NO: 2952753 - DNA, 25 bp, Homo sapien
gagggcatttgctgcaactcagggt

SEQ ID NO: 2952754 - DNA, 25 bp, Homo sapien
ctatactggttgtcgattgtctttg

SEQ ID NO: 2952755 - DNA, 25 bp, Homo sapien
gccctcagagggcatttgctgcaac

SEQ ID NO: 2952756 - DNA, 25 bp, Homo sapien
cctcttgcccgaaaatgcagagttc

SEQ ID NO: 2952757 - DNA, 25 bp, Homo sapien
ggcctcttgcccgaaaatgcagagt

SEQ ID NO: 2952758 - DNA, 25 bp, Homo sapien
tgcagagttcatccaggggtcagaa

SEQ ID NO: 2952759 - DNA, 25 bp, Homo sapien
tggagattcatcaggcctcttgccc

SEQ ID NO: 2952760 - DNA, 25 bp, Homo sapien
tgcacacagaggagtaaacacatac

SEQ ID NO: 2952761 - DNA, 25 bp, Homo sapien
cacatgcacacagaggagtaaacac

SEQ ID NO: 2952762 - DNA, 25 bp, Homo sapien
catgcacacagaggagtaaacacat

SEQ ID NO: 2952763 - DNA, 25 bp, Homo sapien
acacatgcacacagaggagtaaaca

SEQ ID NO: 2952764 - DNA, 25 bp, Homo sapien
gcttttatgcgagccatcagccagt

SEQ ID NO: 2952765 - DNA, 25 bp, Homo sapien
ccattactgccggattgtatttgca

SEQ ID NO: 2952766 - DNA, 25 bp, Homo sapien
gtgatggtgttgctgtgttagacca

SEQ ID NO: 2952767 - DNA, 25 bp, Homo sapien
gagaatggaggctgtaaatctgtaa

SEQ ID NO: 2952768 - DNA, 25 bp, Homo sapien
cattggagttgactgtatagtccag

SEQ ID NO: 2952769 - DNA, 25 bp, Homo sapien
aaggcttcattggagttgactgtat

SEQ ID NO: 2952770 - DNA, 25 bp, Homo sapien
actgtatagtccaggaaagctgcca

SEQ ID NO: 2952771 - DNA, 25 bp, Homo sapien
gagttgactgtatagtccaggaaag

SEQ ID NO: 2952772 - DNA, 25 bp, Homo sapien
cattcattcatcgattcagaaattt

SEQ ID NO: 2952773 - DNA, 25 bp, Homo sapien
tcagggtagcggatgtttaaccgaa

SEQ ID NO: 2952774 - DNA, 25 bp, Homo sapien
aatgttttatgggatgctgtggagt

SEQ ID NO: 2952775 - DNA, 25 bp, Homo sapien
gattttgagaactcaaagctctcat

SEQ ID NO: 2952776 - DNA, 25 bp, Homo sapien
tgctgtggagtcctttcagggtagc

SEQ ID NO: 2952777 - DNA, 25 bp, Homo sapien
aagctgtgaagattccgttttcact

SEQ ID NO: 2952778 - DNA, 25 bp, Homo sapien
tgttcattaagaaactccactaggc

SEQ ID NO: 2952779 - DNA, 25 bp, Homo sapien
tcctgctgcagaatagactttaacg

SEQ ID NO: 2952780 - DNA, 25 bp, Homo sapien
tcgtaaagacagtcaggatccaaca

SEQ ID NO: 2952781 - DNA, 25 bp, Homo sapien
ttgccaaaggagccctcagagcctc

SEQ ID NO: 2952782 - DNA, 25 bp, Homo sapien
cttcaattgccaaaggagccctcag

SEQ ID NO: 2952783 - DNA, 25 bp, Homo sapien
ggagccctcagagcctcctgtccca

SEQ ID NO: 2952784 - DNA, 25 bp, Homo sapien
tcaattgccaaaggagccctcagag

SEQ ID NO: 2952785 - DNA, 25 bp, Homo sapien
ggtcatctggcggtcaaaaccaaat

SEQ ID NO: 2952786 - DNA, 25 bp, Homo sapien
taatggtccgactgtccatcagact

SEQ ID NO: 2952787 - DNA, 25 bp, Homo sapien
tgaagctgttgactcgatgactgga

SEQ ID NO: 2952788 - DNA, 25 bp, Homo sapien
cctgttcctaaagcccctgaagctg

SEQ ID NO: 2952789 - DNA, 25 bp, Homo sapien
ccagtgctctttggcttagctgcca

SEQ ID NO: 2952790 - DNA, 25 bp, Homo sapien
tccagtgctctttggcttagctgcc

SEQ ID NO: 2952791 - DNA, 25 bp, Homo sapien
tctccagtgctctttggcttagctg

SEQ ID NO: 2952792 - DNA, 25 bp, Homo sapien
tttctccagtgctctttggcttagc

SEQ ID NO: 2952793 - DNA, 25 bp, Homo sapien
cacattttctttcacctgaacaaga

SEQ ID NO: 2952794 - DNA, 25 bp, Homo sapien
cagctgaaccggtgaattttattac

SEQ ID NO: 2952795 - DNA, 25 bp, Homo sapien
tttcacctgaacaagacctttgcac

SEQ ID NO: 2952796 - DNA, 25 bp, Homo sapien
tctaccagcgccctgaggatcttct

SEQ ID NO: 2952797 - DNA, 25 bp, Homo sapien
gtactcatatccaaatctccttcat

SEQ ID NO: 2952798 - DNA, 25 bp, Homo sapien
caaatctccttcatagatcatcacc

SEQ ID NO: 2952799 - DNA, 25 bp, Homo sapien
gcagaacccaccataggcccatgtg

SEQ ID NO: 2952800 - DNA, 25 bp, Homo sapien
gatcatcacctttgaaattggcaga

SEQ ID NO: 2952801 - DNA, 25 bp, Homo sapien
tgccagtacgcaaatttttcagaat

SEQ ID NO: 2952802 - DNA, 25 bp, Homo sapien
taagatgttcttgcatcctgctcac

SEQ ID NO: 2952803 - DNA, 25 bp, Homo sapien
ggaatctgcgttactgtttgcagaa

SEQ ID NO: 2952804 - DNA, 25 bp, Homo sapien
cctgctcactcatcttatcattgga

SEQ ID NO: 2952805 - DNA, 25 bp, Homo sapien
gctctgcagaaaacccgcagttgtg

SEQ ID NO: 2952806 - DNA, 25 bp, Homo sapien
gcagaaaacccgcagttgtgtttct

SEQ ID NO: 2952807 - DNA, 25 bp, Homo sapien
tagctgacactgtggcacttgcact

SEQ ID NO: 2952808 - DNA, 25 bp, Homo sapien
gtttctttagctgacactgtggcac

SEQ ID NO: 2952809 - DNA, 25 bp, Homo sapien
cctatatgcttatgtctctgttgtc

SEQ ID NO: 2952810 - DNA, 25 bp, Homo sapien
gaaaggaggatgtgtggaccctttc

SEQ ID NO: 2952811 - DNA, 25 bp, Homo sapien
ttgtcgtagattggcgtcctttgtg

SEQ ID NO: 2952812 - DNA, 25 bp, Homo sapien
gtggaccctttctcctatatgctta

SEQ ID NO: 2952813 - DNA, 25 bp, Homo sapien
gtatgcattgcatgctaaattactt

SEQ ID NO: 2952814 - DNA, 25 bp, Homo sapien
taagcatccgaaggtaggatccatc

SEQ ID NO: 2952815 - DNA, 25 bp, Homo sapien
tccagcgcagtcatgcatagattta

SEQ ID NO: 2952816 - DNA, 25 bp, Homo sapien
atccatctgtaaagtatgcattgca

SEQ ID NO: 2952817 - DNA, 25 bp, Homo sapien
gaactctctcacagtcccatgccat

SEQ ID NO: 2952818 - DNA, 25 bp, Homo sapien
cagaactctctcacagtcccatgcc

SEQ ID NO: 2952819 - DNA, 25 bp, Homo sapien
agaactctctcacagtcccatgcca

SEQ ID NO: 2952820 - DNA, 25 bp, Homo sapien
catccatggcaaccataaagtaggg

SEQ ID NO: 2952821 - DNA, 25 bp, Homo sapien
catggcaaccataaagtagggtcca

SEQ ID NO: 2952822 - DNA, 25 bp, Homo sapien
ttgcatccatggcaaccataaagta

SEQ ID NO: 2952823 - DNA, 25 bp, Homo sapien
aaagtagggtccatgactcttctct

SEQ ID NO: 2952824 - DNA, 25 bp, Homo sapien
gcatactctgcgtggacatattggt

SEQ ID NO: 2952825 - DNA, 25 bp, Homo sapien
tgcatacattgtgtgtcaggcaaca

SEQ ID NO: 2952826 - DNA, 25 bp, Homo sapien
catagctgcttgaacttttaacccc

SEQ ID NO: 2952827 - DNA, 25 bp, Homo sapien
gaaaaagccccacagacatctgttt

SEQ ID NO: 2952828 - DNA, 25 bp, Homo sapien
accttgtggctggaagacgacccag

SEQ ID NO: 2952829 - DNA, 25 bp, Homo sapien
tcagcaaaggtgtacatcgattggc

SEQ ID NO: 2952830 - DNA, 25 bp, Homo sapien
taaagccttgcagtattggagatca

SEQ ID NO: 2952831 - DNA, 25 bp, Homo sapien
tgtagtccgcctggagaactcagca

SEQ ID NO: 2952832 - DNA, 25 bp, Homo sapien
tccatatccgtaacctgagctgagt

SEQ ID NO: 2952833 - DNA, 25 bp, Homo sapien
aatggccatgcttctgtcgtttgca

SEQ ID NO: 2952834 - DNA, 25 bp, Homo sapien
tgtactccgagacgggaacagatgg

SEQ ID NO: 2952835 - DNA, 25 bp, Homo sapien
tgagtgttcctccatctaatggcca

SEQ ID NO: 2952836 - DNA, 25 bp, Homo sapien
ttatatatctttaactcaagtggaa

SEQ ID NO: 2952837 - DNA, 25 bp, Homo sapien
tatatatctttaactcaagtggaag

SEQ ID NO: 2952838 - DNA, 25 bp, Homo sapien
ttgtctgaaggggaacgcatgggga

SEQ ID NO: 2952839 - DNA, 25 bp, Homo sapien
catggggaatcttgtcaaaggtcat

SEQ ID NO: 2952840 - DNA, 25 bp, Homo sapien
gacagggattagtgacgactttcta

SEQ ID NO: 2952841 - DNA, 25 bp, Homo sapien
tacagagccctatggtttaaactga

SEQ ID NO: 2952842 - DNA, 25 bp, Homo sapien
tgtaccaaacttagcggacatgccc

SEQ ID NO: 2952843 - DNA, 25 bp, Homo sapien
taatgcattggaaggtctgttgcca

SEQ ID NO: 2952844 - DNA, 25 bp, Homo sapien
caggaagatttttaaaatgtggcat

SEQ ID NO: 2952845 - DNA, 25 bp, Homo sapien
atcaggaagatttttaaaatgtggc

SEQ ID NO: 2952846 - DNA, 25 bp, Homo sapien
tgatcaggaagatttttaaaatgtg

SEQ ID NO: 2952847 - DNA, 25 bp, Homo sapien
ctgatcaggaagatttttaaaatgt

SEQ ID NO: 2952848 - DNA, 25 bp, Homo sapien
cttgatttcttgatctgtgtcagat

SEQ ID NO: 2952849 - DNA, 25 bp, Homo sapien
gatttcttagatacctgctgggcct

SEQ ID NO: 2952850 - DNA, 25 bp, Homo sapien
ttttaatgtaaaggccgtgctttca

SEQ ID NO: 2952851 - DNA, 25 bp, Homo sapien
gtaaaggccgtgctttcatgagaca

SEQ ID NO: 2952852 - DNA, 25 bp, Homo sapien
tagaagaatatagaagcatgctgca

SEQ ID NO: 2952853 - DNA, 25 bp, Homo sapien
caaggttacaggctaacccatgcat

SEQ ID NO: 2952854 - DNA, 25 bp, Homo sapien
aatgcccacaatttgaaggcagaga

SEQ ID NO: 2952855 - DNA, 25 bp, Homo sapien
ccaccatcgggaacaaaaacttgct

SEQ ID NO: 2952856 - DNA, 25 bp, Homo sapien
tatctatgtcgttgtgtactttaca

SEQ ID NO: 2952857 - DNA, 25 bp, Homo sapien
gttttgctgcattgagttgtatatc

SEQ ID NO: 2952858 - DNA, 25 bp, Homo sapien
tcgttgtgtactttacagaggaact

SEQ ID NO: 2952859 - DNA, 25 bp, Homo sapien
tgagttgtatatctatgtcgttgtg

SEQ ID NO: 2952860 - DNA, 25 bp, Homo sapien
ttgcagtcatctttcaacataaagc

SEQ ID NO: 2952861 - DNA, 25 bp, Homo sapien
tcatctttcaacataaagcagcttc

SEQ ID NO: 2952862 - DNA, 25 bp, Homo sapien
cagattcttgaaatgctggcattgc

SEQ ID NO: 2952863 - DNA, 25 bp, Homo sapien
gctggcattgcagtcatctttcaac

SEQ ID NO: 2952864 - DNA, 25 bp, Homo sapien
atttctcttcacctgattgccaacc

SEQ ID NO: 2952865 - DNA, 25 bp, Homo sapien
accctctaacccaagtatcttacat

SEQ ID NO: 2952866 - DNA, 25 bp, Homo sapien
tcacctgattgccaacccaggaact

SEQ ID NO: 2952867 - DNA, 25 bp, Homo sapien
ctcaccctctaacccaagtatctta

SEQ ID NO: 2952868 - DNA, 25 bp, Homo sapien
gttactctttgccactagtccatac

SEQ ID NO: 2952869 - DNA, 25 bp, Homo sapien
actctttgccactagtccatacctt

SEQ ID NO: 2952870 - DNA, 25 bp, Homo sapien
ttactctttgccactagtccatacc

SEQ ID NO: 2952871 - DNA, 25 bp, Homo sapien
tactctttgccactagtccatacct

SEQ ID NO: 2952872 - DNA, 25 bp, Homo sapien
ccaggccttggatgcctccactggg

SEQ ID NO: 2952873 - DNA, 25 bp, Homo sapien
ccaccagatggtgctgttttcccat

SEQ ID NO: 2952874 - DNA, 25 bp, Homo sapien
ttctgttgttgggtgtcactggcca

SEQ ID NO: 2952875 - DNA, 25 bp, Homo sapien
acccctgggtcccaggccttggatg

SEQ ID NO: 2952876 - DNA, 25 bp, Homo sapien
cacagagctggtcacgtagtcatta

SEQ ID NO: 2952877 - DNA, 25 bp, Homo sapien
gtcattagcttttagatcaaagtcc

SEQ ID NO: 2952878 - DNA, 25 bp, Homo sapien
gctggtcacgtagtcattagctttt

SEQ ID NO: 2952879 - DNA, 25 bp, Homo sapien
cattagcttttagatcaaagtccat

SEQ ID NO: 2952880 - DNA, 25 bp, Homo sapien
tagccagtgtttctggcagttgtaa

SEQ ID NO: 2952881 - DNA, 25 bp, Homo sapien
gccagtgtttctggcagttgtaatc

SEQ ID NO: 2952882 - DNA, 25 bp, Homo sapien
agccagtgtttctggcagttgtaat

SEQ ID NO: 2952883 - DNA, 25 bp, Homo sapien
cagtgtttctggcagttgtaatcat

SEQ ID NO: 2952884 - DNA, 25 bp, Homo sapien
cagtggtgtgatcttggctcactgc

SEQ ID NO: 2952885 - DNA, 25 bp, Homo sapien
tgtgattacagatgtgagccactac

SEQ ID NO: 2952886 - DNA, 25 bp, Homo sapien
gtctcgctctgtcgctctgtcaccc

SEQ ID NO: 2952887 - DNA, 25 bp, Homo sapien
ggctaaagtgcagtggtgtgatctt

SEQ ID NO: 2952888 - DNA, 25 bp, Homo sapien
aatgaatgaattgaaccctatcttt

SEQ ID NO: 2952889 - DNA, 25 bp, Homo sapien
aatggcagcaattcactacccagag

SEQ ID NO: 2952890 - DNA, 25 bp, Homo sapien
ggactcagtaaagatcaggttaatg

SEQ ID NO: 2952891 - DNA, 25 bp, Homo sapien
tgcctgactggcacaaaggaaggac

SEQ ID NO: 2952892 - DNA, 25 bp, Homo sapien
ccatttgatctctgaccagggggct

SEQ ID NO: 2952893 - DNA, 25 bp, Homo sapien
aatgaagatgaggaccaaaaattaa

SEQ ID NO: 2952894 - DNA, 25 bp, Homo sapien
tcctttttcacaacgacttgagctg

SEQ ID NO: 2952895 - DNA, 25 bp, Homo sapien
gctgatcgcactactactgagtgaa

SEQ ID NO: 2952896 - DNA, 25 bp, Homo sapien
tcttagttaaggtagagattagatc

SEQ ID NO: 2952897 - DNA, 25 bp, Homo sapien
ttagcctgtgataagcattcaacaa

SEQ ID NO: 2952898 - DNA, 25 bp, Homo sapien
gatctatttcgtttactttttgtgc

SEQ ID NO: 2952899 - DNA, 25 bp, Homo sapien
tctttgctagactgtaaactcttag

SEQ ID NO: 2952900 - DNA, 25 bp, Homo sapien
gagtgtgactgccaaccaacaggct

SEQ ID NO: 2952901 - DNA, 25 bp, Homo sapien
agtgtgactgccaaccaacaggctt

SEQ ID NO: 2952902 - DNA, 25 bp, Homo sapien
gtgtgactgccaaccaacaggctta

SEQ ID NO: 2952903 - DNA, 25 bp, Homo sapien
ggagctgatgggagccaggttcggg

SEQ ID NO: 2952904 - DNA, 25 bp, Homo sapien
gttgggggagtgcactctttatccc

SEQ ID NO: 2952905 - DNA, 25 bp, Homo sapien
cttctgaaaactccttctctgctga

SEQ ID NO: 2952906 - DNA, 25 bp, Homo sapien
gggaatgactccattgagcagggct

SEQ ID NO: 2952907 - DNA, 25 bp, Homo sapien
taatggtctgataacttcagtgtac

SEQ ID NO: 2952908 - DNA, 25 bp, Homo sapien
ctaatggtctgataacttcagtgta

SEQ ID NO: 2952909 - DNA, 25 bp, Homo sapien
gtaatatattgtttaggatgtttgg

SEQ ID NO: 2952910 - DNA, 25 bp, Homo sapien
tatggtaatatattgtttaggatgt

SEQ ID NO: 2952911 - DNA, 25 bp, Homo sapien
aatatattgtttaggatgtttggcc

SEQ ID NO: 2952912 - DNA, 25 bp, Homo sapien
tatattgtttaggatgtttggccat

SEQ ID NO: 2952913 - DNA, 25 bp, Homo sapien
cttaacaatctctgttggtgctcag

SEQ ID NO: 2952914 - DNA, 25 bp, Homo sapien
gaatggagattaattgcatgtcgca

SEQ ID NO: 2952915 - DNA, 25 bp, Homo sapien
tctaaagcagaacctttgtttgctg

SEQ ID NO: 2952916 - DNA, 25 bp, Homo sapien
gcatgtcgcatacttctgtatcaag

SEQ ID NO: 2952917 - DNA, 25 bp, Homo sapien
attacagtaccatgtcacaaccagg

SEQ ID NO: 2952918 - DNA, 25 bp, Homo sapien
gctgccgcgattctcccaaatgttg

SEQ ID NO: 2952919 - DNA, 25 bp, Homo sapien
tcctgagggagaacagcacagtttg

SEQ ID NO: 2952920 - DNA, 25 bp, Homo sapien
gacaccaactgtcccttgaatgaga

SEQ ID NO: 2952921 - DNA, 25 bp, Homo sapien
tgcgtgaagggtcccggtggacaag

SEQ ID NO: 2952922 - DNA, 25 bp, Homo sapien
tgctgacagtgcgtgaagggtcccg

SEQ ID NO: 2952923 - DNA, 25 bp, Homo sapien
gtggacaaggcggtgtgttttctgc

SEQ ID NO: 2952924 - DNA, 25 bp, Homo sapien
aagaagctcagaggccaatatgggc

SEQ ID NO: 2952925 - DNA, 25 bp, Homo sapien
ccttgagaatacagttactattgcc

SEQ ID NO: 2952926 - DNA, 25 bp, Homo sapien
gcactacatatattagctctttgga

SEQ ID NO: 2952927 - DNA, 25 bp, Homo sapien
tgaggcatatggaagataagtaact

SEQ ID NO: 2952928 - DNA, 25 bp, Homo sapien
gctgcaggcaggtgtaagcactaca

SEQ ID NO: 2952929 - DNA, 25 bp, Homo sapien
cattgaatgaagtgtagataacacg

SEQ ID NO: 2952930 - DNA, 25 bp, Homo sapien
gcagaggctgtttagaggagatttc

SEQ ID NO: 2952931 - DNA, 25 bp, Homo sapien
tgaagtgtagataacacgggcacct

SEQ ID NO: 2952932 - DNA, 25 bp, Homo sapien
cacgggcaccttaataggctgagag

SEQ ID NO: 2952933 - DNA, 25 bp, Homo sapien
gaagctctgaactgctcatgcatga

SEQ ID NO: 2952934 - DNA, 25 bp, Homo sapien
catgcatgattatgggtcccaggag

SEQ ID NO: 2952935 - DNA, 25 bp, Homo sapien
tggtattctactcagctgagcagga

SEQ ID NO: 2952936 - DNA, 25 bp, Homo sapien
ggtcccaggacccaaggtgtgcaaa

SEQ ID NO: 2952937 - DNA, 25 bp, Homo sapien
aaatgaactcgccttgttcgacggg

SEQ ID NO: 2952938 - DNA, 25 bp, Homo sapien
gacagcggaactcaatcaacagcgg

SEQ ID NO: 2952939 - DNA, 25 bp, Homo sapien
atcccgccgtgcctctgaaaaatgg

SEQ ID NO: 2952940 - DNA, 25 bp, Homo sapien
taagcggtggtacgtcagtctgaaa

SEQ ID NO: 2952941 - DNA, 25 bp, Homo sapien
taatagacatttagcgggtgcctac

SEQ ID NO: 2952942 - DNA, 25 bp, Homo sapien
taaggccctgtggatgcaaagcaga

SEQ ID NO: 2952943 - DNA, 25 bp, Homo sapien
catatcatgctagcaggacccagag

SEQ ID NO: 2952944 - DNA, 25 bp, Homo sapien
ggatttttagcatggactgggcccc

SEQ ID NO: 2952945 - DNA, 25 bp, Homo sapien
cttcaccttcgcaagtgtttttttg

SEQ ID NO: 2952946 - DNA, 25 bp, Homo sapien
catcttcaccttcgcaagtgttttt

SEQ ID NO: 2952947 - DNA, 25 bp, Homo sapien
ttactgaagagagcaccagctttcc

SEQ ID NO: 2952948 - DNA, 25 bp, Homo sapien
ctgagaacacgccttcatctgaatc

SEQ ID NO: 2952949 - DNA, 25 bp, Homo sapien
tgaagctgagaacacgccttcatct

SEQ ID NO: 2952950 - DNA, 25 bp, Homo sapien
tgcaccacctatgaagctgagaaca

SEQ ID NO: 2952951 - DNA, 25 bp, Homo sapien
gaatgcaccacctatgaagctgaga

SEQ ID NO: 2952952 - DNA, 25 bp, Homo sapien
gatgaatgcggagaattttattact

SEQ ID NO: 2952953 - DNA, 25 bp, Homo sapien
ctgagtccttgcaaccaaggttgca

SEQ ID NO: 2952954 - DNA, 25 bp, Homo sapien
tgctgtacacttctcctaagtccca

SEQ ID NO: 2952955 - DNA, 25 bp, Homo sapien
ccttgcaaccaaggttgcatgaaaa

SEQ ID NO: 2952956 - DNA, 25 bp, Homo sapien
cattgcttgatccttcgtctctcca

SEQ ID NO: 2952957 - DNA, 25 bp, Homo sapien
gtcacattgcttgatccttcgtctc

SEQ ID NO: 2952958 - DNA, 25 bp, Homo sapien
tttctaccagtcacattgcttgatc

SEQ ID NO: 2952959 - DNA, 25 bp, Homo sapien
accagtcacattgcttgatccttcg

SEQ ID NO: 2952960 - DNA, 25 bp, Homo sapien
cagtgattctgttcaggttgtgaat

SEQ ID NO: 2952961 - DNA, 25 bp, Homo sapien
atgtaacttctcattctgggactca

SEQ ID NO: 2952962 - DNA, 25 bp, Homo sapien
ggttgtgaatcttgttcaggtctgc

SEQ ID NO: 2952963 - DNA, 25 bp, Homo sapien
tttgtggattggctgcagtgattct

SEQ ID NO: 2952964 - DNA, 25 bp, Homo sapien
atagttcccacatgggataatttcc

SEQ ID NO: 2952965 - DNA, 25 bp, Homo sapien
catagttcccacatgggataatttc

SEQ ID NO: 2952966 - DNA, 25 bp, Homo sapien
tagttcccacatgggataatttcca

SEQ ID NO: 2952967 - DNA, 25 bp, Homo sapien
tgcttgatataagaaagattggccc

SEQ ID NO: 2952968 - DNA, 25 bp, Homo sapien
cctcctcaggaatgtagataatctc

SEQ ID NO: 2952969 - DNA, 25 bp, Homo sapien
caggaggaagtagctgtggccttat

SEQ ID NO: 2952970 - DNA, 25 bp, Homo sapien
ggacccttgttcagcttgcttgata

SEQ ID NO: 2952971 - DNA, 25 bp, Homo sapien
gccagcaaaacacttactggaggct

SEQ ID NO: 2952972 - DNA, 25 bp, Homo sapien
acacttactggaggctccaagagct

SEQ ID NO: 2952973 - DNA, 25 bp, Homo sapien
cttggagccttgttggccagcaaaa

SEQ ID NO: 2952974 - DNA, 25 bp, Homo sapien
tggagccttgttggccagcaaaaca

SEQ ID NO: 2952975 - DNA, 25 bp, Homo sapien
tcctcatcaaggagcatcagctcct

SEQ ID NO: 2952976 - DNA, 25 bp, Homo sapien
ggaattcattccaccgcaaagacag

SEQ ID NO: 2952977 - DNA, 25 bp, Homo sapien
catcttctgtgcagctaggctcctc

SEQ ID NO: 2952978 - DNA, 25 bp, Homo sapien
ttttcagagacttcgaggagcagct

SEQ ID NO: 2952979 - DNA, 25 bp, Homo sapien
gagagctgagtacttacaacacaga

SEQ ID NO: 2952980 - DNA, 25 bp, Homo sapien
tgtttccagttaccacggtgggcaa

SEQ ID NO: 2952981 - DNA, 25 bp, Homo sapien
tgagactggtaactgcggtcagacc

SEQ ID NO: 2952982 - DNA, 25 bp, Homo sapien
tcattgtaagagcaggcatgcctcc

SEQ ID NO: 2952983 - DNA, 25 bp, Homo sapien
aaacctctaatagtccatggcttgg

SEQ ID NO: 2952984 - DNA, 25 bp, Homo sapien
tgtttgaacgtgactgatcttgcag

SEQ ID NO: 2952985 - DNA, 25 bp, Homo sapien
atcttgcagttgaaggttccagttt

SEQ ID NO: 2952986 - DNA, 25 bp, Homo sapien
ggtcttctccatgtttggaaagata

SEQ ID NO: 2952987 - DNA, 25 bp, Homo sapien
ggcagctattgtctccgggccggtc

SEQ ID NO: 2952988 - DNA, 25 bp, Homo sapien
cactggcaaacctttggtcggcgga

SEQ ID NO: 2952989 - DNA, 25 bp, Homo sapien
gctttccaaacaagccgacagcgcg

SEQ ID NO: 2952990 - DNA, 25 bp, Homo sapien
gcaacaaacctcgatcgctctctgg

SEQ ID NO: 2952991 - DNA, 25 bp, Homo sapien
cctgggctcaaggtgaaagccctgg

SEQ ID NO: 2952992 - DNA, 25 bp, Homo sapien
aaattggcacacagcttaacacccc

SEQ ID NO: 2952993 - DNA, 25 bp, Homo sapien
cagaggggtcgctgacaaactccaa

SEQ ID NO: 2952994 - DNA, 25 bp, Homo sapien
gtctccgggcactggacggcaggaa

SEQ ID NO: 2952995 - DNA, 25 bp, Homo sapien
gaggctgattatagcccagatcctc

SEQ ID NO: 2952996 - DNA, 25 bp, Homo sapien
aagtctctgacaagcacttgctggc

SEQ ID NO: 2952997 - DNA, 25 bp, Homo sapien
cactgcagatcttcttgggatgtac

SEQ ID NO: 2952998 - DNA, 25 bp, Homo sapien
tgagactccctaaacagcactgctg

SEQ ID NO: 2952999 - DNA, 25 bp, Homo sapien
ctttggtcaaaatgagagcaccctt

SEQ ID NO: 2953000 - DNA, 25 bp, Homo sapien
gagagcacccttcctcaatgccaaa

SEQ ID NO: 2953001 - DNA, 25 bp, Homo sapien
gcaggagagaattcctatcccccat

SEQ ID NO: 2953002 - DNA, 25 bp, Homo sapien
tcaaaatgagagcacccttcctcaa

SEQ ID NO: 2953003 - DNA, 25 bp, Homo sapien
gctgccgggacacccatggactcgg

SEQ ID NO: 2953004 - DNA, 25 bp, Homo sapien
acacccatggactcgggctgctggg

SEQ ID NO: 2953005 - DNA, 25 bp, Homo sapien
gctgagaaatgtggcgctgccggga

SEQ ID NO: 2953006 - DNA, 25 bp, Homo sapien
gcccggcagcgtcgcgaggcgctgg

SEQ ID NO: 2953007 - DNA, 25 bp, Homo sapien
tctttggtcctgagcgggtggttct

SEQ ID NO: 2953008 - DNA, 25 bp, Homo sapien
caaaggtgacccgattgatggccgc

SEQ ID NO: 2953009 - DNA, 25 bp, Homo sapien
aaaagtcgggagtttgcaggaagct

SEQ ID NO: 2953010 - DNA, 25 bp, Homo sapien
tgattaggttcagcggcccatatgg

SEQ ID NO: 2953011 - DNA, 25 bp, Homo sapien
ataccaaaacgagtgtttgtgttgg

SEQ ID NO: 2953012 - DNA, 25 bp, Homo sapien
aataccaaaacgagtgtttgtgttg

SEQ ID NO: 2953013 - DNA, 25 bp, Homo sapien
tataataccaaaacgagtgtttgtg

SEQ ID NO: 2953014 - DNA, 25 bp, Homo sapien
ataataccaaaacgagtgtttgtgt

SEQ ID NO: 2953015 - DNA, 25 bp, Homo sapien
ttgctggacctcaccgaaaggcagg

SEQ ID NO: 2953016 - DNA, 25 bp, Homo sapien
ccgcgtcgagatcgcggccttgctg

SEQ ID NO: 2953017 - DNA, 25 bp, Homo sapien
tgtgccggccacgccgcgtcgagat

SEQ ID NO: 2953018 - DNA, 25 bp, Homo sapien
ctcaccgaaaggcaggtcaaagtct

SEQ ID NO: 2953019 - DNA, 25 bp, Homo sapien
ccgtgggcggctctgaatgctttgc

SEQ ID NO: 2953020 - DNA, 25 bp, Homo sapien
gcccgtgggcggctctgaatgcttt

SEQ ID NO: 2953021 - DNA, 25 bp, Homo sapien
agttccgaattgaggggtccactgg

SEQ ID NO: 2953022 - DNA, 25 bp, Homo sapien
cctcgctccggttgagttggaaagt

SEQ ID NO: 2953023 - DNA, 25 bp, Homo sapien
cctgggatggggaagtagaatatcc

SEQ ID NO: 2953024 - DNA, 25 bp, Homo sapien
gggatggggaagtagaatatcccac

SEQ ID NO: 2953025 - DNA, 25 bp, Homo sapien
tccattcctgggatggggaagtaga

SEQ ID NO: 2953026 - DNA, 25 bp, Homo sapien
ggatggggaagtagaatatcccact

SEQ ID NO: 2953027 - DNA, 25 bp, Homo sapien
gagcatgtgaggcactggtgtagga

SEQ ID NO: 2953028 - DNA, 25 bp, Homo sapien
gtcccgtgaccacgaattccctgta

SEQ ID NO: 2953029 - DNA, 25 bp, Homo sapien
catggtgtcctggtcgtggtcctct

SEQ ID NO: 2953030 - DNA, 25 bp, Homo sapien
accaggcccagacgagcgattggcg

SEQ ID NO: 2953031 - DNA, 25 bp, Homo sapien
cctcttcctccaacgcggagatcct

SEQ ID NO: 2953032 - DNA, 25 bp, Homo sapien
tggaagcctctttcgactccctctt

SEQ ID NO: 2953033 - DNA, 25 bp, Homo sapien
ctttttcaaagagtggaagcctctt

SEQ ID NO: 2953034 - DNA, 25 bp, Homo sapien
aacgcggagatcctcactcatcttt

SEQ ID NO: 2953035 - DNA, 25 bp, Homo sapien
ccatacagcgatggaggccagaggc

SEQ ID NO: 2953036 - DNA, 25 bp, Homo sapien
tgggcagagaagagaacccagacca

SEQ ID NO: 2953037 - DNA, 25 bp, Homo sapien
taacagggatagtggtgtgatgatt

SEQ ID NO: 2953038 - DNA, 25 bp, Homo sapien
tctcactcctatgtgtctgcctggg

SEQ ID NO: 2953039 - DNA, 25 bp, Homo sapien
aaagtgaggaaagcaggggtacata

SEQ ID NO: 2953040 - DNA, 25 bp, Homo sapien
gggtacataaggggcagaggcagtg

SEQ ID NO: 2953041 - DNA, 25 bp, Homo sapien
aagcaggggtacataaggggcagag

SEQ ID NO: 2953042 - DNA, 25 bp, Homo sapien
ggaaagcaggggtacataaggggca

SEQ ID NO: 2953043 - DNA, 25 bp, Homo sapien
aggcttgagtgggtacatgcacatc

SEQ ID NO: 2953044 - DNA, 25 bp, Homo sapien
gcttgagtgggtacatgcacatctt

SEQ ID NO: 2953045 - DNA, 25 bp, Homo sapien
gatacagatacaagcttgaggcttg

SEQ ID NO: 2953046 - DNA, 25 bp, Homo sapien
tacagatacaagcttgaggcttgag

SEQ ID NO: 2953047 - DNA, 25 bp, Homo sapien
ataacgctgatctgaactttgagag

SEQ ID NO: 2953048 - DNA, 25 bp, Homo sapien
tgagagtgctctaagttaaaccaat

SEQ ID NO: 2953049 - DNA, 25 bp, Homo sapien
tgcacacacataacgctgatctgaa

SEQ ID NO: 2953050 - DNA, 25 bp, Homo sapien
tgctctaagttaaaccaatggctac

SEQ ID NO: 2953051 - DNA, 25 bp, Homo sapien
ctggagccgataagagcgagaagac

SEQ ID NO: 2953052 - DNA, 25 bp, Homo sapien
gaagcacgttcgatttcccctgcca

SEQ ID NO: 2953053 - DNA, 25 bp, Homo sapien
tcactaaataaaactcgaggcggag

SEQ ID NO: 2953054 - DNA, 25 bp, Homo sapien
aagatgaaatgtcaccgccgagtcg

SEQ ID NO: 2953055 - DNA, 25 bp, Homo sapien
tcttccacgaaacctaaacttcaca

SEQ ID NO: 2953056 - DNA, 25 bp, Homo sapien
gtcacgtgacccgaagcccaaccac

SEQ ID NO: 2953057 - DNA, 25 bp, Homo sapien
tgacccgaagcccaaccaccattgg

SEQ ID NO: 2953058 - DNA, 25 bp, Homo sapien
taaacttcacaatcctcttccggag

SEQ ID NO: 2953059 - DNA, 25 bp, Homo sapien
gggactcttggatgctctctgtagg

SEQ ID NO: 2953060 - DNA, 25 bp, Homo sapien
aaggacactgaagacccttccctgg

SEQ ID NO: 2953061 - DNA, 25 bp, Homo sapien
tgaactcagctcctaatcgtcactg

SEQ ID NO: 2953062 - DNA, 25 bp, Homo sapien
tgttagctcctttggccacagcgtc

SEQ ID NO: 2953063 - DNA, 25 bp, Homo sapien
gactgaaggtttgcccattctgctg

SEQ ID NO: 2953064 - DNA, 25 bp, Homo sapien
tgggcctgcagaagtccagcattgc

SEQ ID NO: 2953065 - DNA, 25 bp, Homo sapien
caactgtgagagatgtctgggcctg

SEQ ID NO: 2953066 - DNA, 25 bp, Homo sapien
cagaaagcagttggtgacacgaggt

SEQ ID NO: 2953067 - DNA, 25 bp, Homo sapien
tagaatccaagaagcgcccaaatta

SEQ ID NO: 2953068 - DNA, 25 bp, Homo sapien
ccaagaagcgcccaaattaacacac

SEQ ID NO: 2953069 - DNA, 25 bp, Homo sapien
ctcagggtagaatccaagaagcgcc

SEQ ID NO: 2953070 - DNA, 25 bp, Homo sapien
ggtagaatccaagaagcgcccaaat

SEQ ID NO: 2953071 - DNA, 25 bp, Homo sapien
cattttaaccgctacctgtgccggc

SEQ ID NO: 2953072 - DNA, 25 bp, Homo sapien
aggccaagggattggcctcgtcgtc

SEQ ID NO: 2953073 - DNA, 25 bp, Homo sapien
ggcctcgccgtgtagagatggccaa

SEQ ID NO: 2953074 - DNA, 25 bp, Homo sapien
ctcagcgagcggcagatcaagatct

SEQ ID NO: 2953075 - DNA, 25 bp, Homo sapien
ggcggcgtccaagcgggcgcggacg

SEQ ID NO: 2953076 - DNA, 25 bp, Homo sapien
tcggcggcgtccaagcgggcgcgga

SEQ ID NO: 2953077 - DNA, 25 bp, Homo sapien
cgcggacggcgtacacgagcgcgca

SEQ ID NO: 2953078 - DNA, 25 bp, Homo sapien
cggacggcgtacacgagcgcgcagc

SEQ ID NO: 2953079 - DNA, 25 bp, Homo sapien
tggtcacagcaccaactggcgtggc

SEQ ID NO: 2953080 - DNA, 25 bp, Homo sapien
ggaatacctctgtttctaacctaga

SEQ ID NO: 2953081 - DNA, 25 bp, Homo sapien
cagggaacctcagtcaacaggaata

SEQ ID NO: 2953082 - DNA, 25 bp, Homo sapien
ggaaagcactttccccgtctcagta

SEQ ID NO: 2953083 - DNA, 25 bp, Homo sapien
cctgcctccgataaccgttttggtg

SEQ ID NO: 2953084 - DNA, 25 bp, Homo sapien
gctggtagcttgtcgccagtcgccg

SEQ ID NO: 2953085 - DNA, 25 bp, Homo sapien
ctccttgggccatcgtaggtggctg

SEQ ID NO: 2953086 - DNA, 25 bp, Homo sapien
gcttgctcttcttcgcctccttggg

SEQ ID NO: 2953087 - DNA, 25 bp, Homo sapien
tattagcataatagttcactagtgg

SEQ ID NO: 2953088 - DNA, 25 bp, Homo sapien
aaagtcctggtgttccaattgcgaa

SEQ ID NO: 2953089 - DNA, 25 bp, Homo sapien
tccaattgcgaatgagtgcagaggg

SEQ ID NO: 2953090 - DNA, 25 bp, Homo sapien
tcagcctccaaatactacttctcat

SEQ ID NO: 2953091 - DNA, 25 bp, Homo sapien
gagtttacatacacccagagcagtg

SEQ ID NO: 2953092 - DNA, 25 bp, Homo sapien
tgtgtgtacccatcctcagcaggac

SEQ ID NO: 2953093 - DNA, 25 bp, Homo sapien
gagtgccctgcctcatgtcacatag

SEQ ID NO: 2953094 - DNA, 25 bp, Homo sapien
caatggcaagagttggactggacac

SEQ ID NO: 2953095 - DNA, 25 bp, Homo sapien
aaaatgtgacaaatagccatcttca

SEQ ID NO: 2953096 - DNA, 25 bp, Homo sapien
gcgtcttatatgtccatgtaaattt

SEQ ID NO: 2953097 - DNA, 25 bp, Homo sapien
cgcgtcttatatgtccatgtaaatt

SEQ ID NO: 2953098 - DNA, 25 bp, Homo sapien
tgtattcgtcaggaaaatcgcaggc

SEQ ID NO: 2953099 - DNA, 25 bp, Homo sapien
tttgagcctgaaatcgaaagacccc

SEQ ID NO: 2953100 - DNA, 25 bp, Homo sapien
taaataattaatgccgaggttgcag

SEQ ID NO: 2953101 - DNA, 25 bp, Homo sapien
cccggtcacgtgattcattaaataa

SEQ ID NO: 2953102 - DNA, 25 bp, Homo sapien
ctgtctgtcttctgtatataccctg

SEQ ID NO: 2953103 - DNA, 25 bp, Homo sapien
caaacgaagaaggcgcggaaagtag

SEQ ID NO: 2953104 - DNA, 25 bp, Homo sapien
ccctgtagatccgaatttgtgtaag

SEQ ID NO: 2953105 - DNA, 25 bp, Homo sapien
tgtggtcacaaattcgtatctaggg

SEQ ID NO: 2953106 - DNA, 25 bp, Homo sapien
cattgcccttcattcggaaatgaaa

SEQ ID NO: 2953107 - DNA, 25 bp, Homo sapien
cgtcattaaatatccggggccccat

SEQ ID NO: 2953108 - DNA, 25 bp, Homo sapien
tctcaggttgtaaacggaattgccc

SEQ ID NO: 2953109 - DNA, 25 bp, Homo sapien
tcggaaatgaaacgcctttgatctt

SEQ ID NO: 2953110 - DNA, 25 bp, Homo sapien
aggatggagataacctgagagtttc

SEQ ID NO: 2953111 - DNA, 25 bp, Homo sapien
tataggaggtacactgtgggcgttt

SEQ ID NO: 2953112 - DNA, 25 bp, Homo sapien
ggatggagataacctgagagtttct

SEQ ID NO: 2953113 - DNA, 25 bp, Homo sapien
ataggaggtacactgtgggcgtttt

SEQ ID NO: 2953114 - DNA, 25 bp, Homo sapien
cattctactgctcgccataggtctc

SEQ ID NO: 2953115 - DNA, 25 bp, Homo sapien
ccccgcatcgttgggacactgaact

SEQ ID NO: 2953116 - DNA, 25 bp, Homo sapien
gccccactcgggtgtcaaaaatgaa

SEQ ID NO: 2953117 - DNA, 25 bp, Homo sapien
tcccaatagaagagaccgctgaaaa

SEQ ID NO: 2953118 - DNA, 25 bp, Homo sapien
gaagttagatcgtaaaaatcgccga

SEQ ID NO: 2953119 - DNA, 25 bp, Homo sapien
cactggctcgagaaagtcacgtgag

SEQ ID NO: 2953120 - DNA, 25 bp, Homo sapien
gaagtcagacagatacccctcactg

SEQ ID NO: 2953121 - DNA, 25 bp, Homo sapien
caacttcttactggacttggaggga

SEQ ID NO: 2953122 - DNA, 25 bp, Homo sapien
agggcccaaagcttgtaaatatggg

SEQ ID NO: 2953123 - DNA, 25 bp, Homo sapien
gctgtgctacgtgtgaaatctgtct

SEQ ID NO: 2953124 - DNA, 25 bp, Homo sapien
ccaagaccatttgtagtgagcgagt

SEQ ID NO: 2953125 - DNA, 25 bp, Homo sapien
ggcctgtctcagtgattcgcttttg

SEQ ID NO: 2953126 - DNA, 25 bp, Homo sapien
atcgagatcgcccacgcactctgcc

SEQ ID NO: 2953127 - DNA, 25 bp, Homo sapien
ggcacaggccgaaggccacaacttt

SEQ ID NO: 2953128 - DNA, 25 bp, Homo sapien
caagtaggggaatgtaaagccacca

SEQ ID NO: 2953129 - DNA, 25 bp, Homo sapien
gggccactgggtatctctcaccctg

SEQ ID NO: 2953130 - DNA, 25 bp, Homo sapien
ttcccacctcaagtagcagatcagc

SEQ ID NO: 2953131 - DNA, 25 bp, Homo sapien
ttagctctggacgtgaaatacttcg

SEQ ID NO: 2953132 - DNA, 25 bp, Homo sapien
ttcttcagcaaaggcgagagccctg

SEQ ID NO: 2953133 - DNA, 25 bp, Homo sapien
gataaaggctggagcgatcagtcct

SEQ ID NO: 2953134 - DNA, 25 bp, Homo sapien
aaagatgtgaaaactcgacgctcgg

SEQ ID NO: 2953135 - DNA, 25 bp, Homo sapien
gggccttgaagactccctgatccca

SEQ ID NO: 2953136 - DNA, 25 bp, Homo sapien
gttcaatggtagattcgctgtcccc

SEQ ID NO: 2953137 - DNA, 25 bp, Homo sapien
gctcttgtccctgtcgcgtctcatt

SEQ ID NO: 2953138 - DNA, 25 bp, Homo sapien
ccccgtgcacggttcaatggtagat

SEQ ID NO: 2953139 - DNA, 25 bp, Homo sapien
gtgcctgacggagaggcagatcaag

SEQ ID NO: 2953140 - DNA, 25 bp, Homo sapien
cgcacgccctgtgcctgacggagag

SEQ ID NO: 2953141 - DNA, 25 bp, Homo sapien
cgcgcacgccctgtgcctgacggag

SEQ ID NO: 2953142 - DNA, 25 bp, Homo sapien
tgcctgacggagaggcagatcaaga

SEQ ID NO: 2953143 - DNA, 25 bp, Homo sapien
tattcgtcgggctatgcggacccgc

SEQ ID NO: 2953144 - DNA, 25 bp, Homo sapien
caagagcgtgttcggcgagacagaa

SEQ ID NO: 2953145 - DNA, 25 bp, Homo sapien
ttctaccgcgagaaagagtcggcct

SEQ ID NO: 2953146 - DNA, 25 bp, Homo sapien
cactccggtctacccgtggatgcag

SEQ ID NO: 2953147 - DNA, 25 bp, Homo sapien
ctctgggcttagataagagcgatga

SEQ ID NO: 2953148 - DNA, 25 bp, Homo sapien
caggcccgcctgtagtggctccatc

SEQ ID NO: 2953149 - DNA, 25 bp, Homo sapien
tttctttcatgcccgactccaggcg

SEQ ID NO: 2953150 - DNA, 25 bp, Homo sapien
taagagcgatgaggcgctattttct

SEQ ID NO: 2953151 - DNA, 25 bp, Homo sapien
gggcaaagtgtctcatctaaacagc

SEQ ID NO: 2953152 - DNA, 25 bp, Homo sapien
gatcactcagtacccctgggaacat

SEQ ID NO: 2953153 - DNA, 25 bp, Homo sapien
taaacagcctccctcaacctatggg

SEQ ID NO: 2953154 - DNA, 25 bp, Homo sapien
gagtccaggacgagaattgagttga

SEQ ID NO: 2953155 - DNA, 25 bp, Homo sapien
tgactttctggtggctataaggccc

SEQ ID NO: 2953156 - DNA, 25 bp, Homo sapien
tttatagctttcctgcggcgaggtg

SEQ ID NO: 2953157 - DNA, 25 bp, Homo sapien
tataaggcccgactcaaggagctgc

SEQ ID NO: 2953158 - DNA, 25 bp, Homo sapien
tggtattgaaacacttcagggccct

SEQ ID NO: 2953159 - DNA, 25 bp, Homo sapien
ctttcaagccgtaggaggaagctct

SEQ ID NO: 2953160 - DNA, 25 bp, Homo sapien
gaatattggcccctgtctcacgggt

SEQ ID NO: 2953161 - DNA, 25 bp, Homo sapien
cacgggttactgattagcttgggct

SEQ ID NO: 2953162 - DNA, 25 bp, Homo sapien
caggaaattgcctgcggtgccaggc

SEQ ID NO: 2953163 - DNA, 25 bp, Homo sapien
ttggttagtgggttttgccagctcc

SEQ ID NO: 2953164 - DNA, 25 bp, Homo sapien
gtccgtggtgaaggaattgaaccga

SEQ ID NO: 2953165 - DNA, 25 bp, Homo sapien
cattctcgatcttttcaagcgaagt

SEQ ID NO: 2953166 - DNA, 25 bp, Homo sapien
tgaaggaattgaaccgaattttctg

SEQ ID NO: 2953167 - DNA, 25 bp, Homo sapien
cccgtcagttccactcggttgtcaa

SEQ ID NO: 2953168 - DNA, 25 bp, Homo sapien
cggccccgtcagttccactcggttg

SEQ ID NO: 2953169 - DNA, 25 bp, Homo sapien
gtcagttccactcggttgtcaaaag

SEQ ID NO: 2953170 - DNA, 25 bp, Homo sapien
gttccactcggttgtcaaaagacaa

SEQ ID NO: 2953171 - DNA, 25 bp, Homo sapien
tagggcctggaatctccgccgaggc

SEQ ID NO: 2953172 - DNA, 25 bp, Homo sapien
cggtggcgctaagggacgtcctggt

SEQ ID NO: 2953173 - DNA, 25 bp, Homo sapien
gacgtcctggtttctatagggcctg

SEQ ID NO: 2953174 - DNA, 25 bp, Homo sapien
cctggtttctatagggcctggaatc

SEQ ID NO: 2953175 - DNA, 25 bp, Homo sapien
ctggtgcggatatcgctgggttccc

SEQ ID NO: 2953176 - DNA, 25 bp, Homo sapien
tatcgctgggttcccggcagcactg

SEQ ID NO: 2953177 - DNA, 25 bp, Homo sapien
tgcggatatcgctgggttcccggca

SEQ ID NO: 2953178 - DNA, 25 bp, Homo sapien
ggatatcgctgggttcccggcagca

SEQ ID NO: 2953179 - DNA, 25 bp, Homo sapien
ctccgagcctctcttcccgctctct

SEQ ID NO: 2953180 - DNA, 25 bp, Homo sapien
tgaccacgccacgcccggggcttcc

SEQ ID NO: 2953181 - DNA, 25 bp, Homo sapien
gccgctctcggagcctgaccacgcc

SEQ ID NO: 2953182 - DNA, 25 bp, Homo sapien
gctctcggagcctgaccacgccacg

SEQ ID NO: 2953183 - DNA, 25 bp, Homo sapien
tgatacagacgacccaaataaaact

SEQ ID NO: 2953184 - DNA, 25 bp, Homo sapien
tatctcgttctaaattgatacagac

SEQ ID NO: 2953185 - DNA, 25 bp, Homo sapien
atgagtccgggagcaagatcctaag

SEQ ID NO: 2953186 - DNA, 25 bp, Homo sapien
gggaagggaatgagtccgggagcaa

SEQ ID NO: 2953187 - DNA, 25 bp, Homo sapien
aggaactgaccgcaaacgaggccgc

SEQ ID NO: 2953188 - DNA, 25 bp, Homo sapien
tgtggactgtgggtctggactaacc

SEQ ID NO: 2953189 - DNA, 25 bp, Homo sapien
caggaaactcaaatcgaatagggaa

SEQ ID NO: 2953190 - DNA, 25 bp, Homo sapien
cgctctgcctcacggaaagacagat

SEQ ID NO: 2953191 - DNA, 25 bp, Homo sapien
tggatgcgaagctcaggtaacgccg

SEQ ID NO: 2953192 - DNA, 25 bp, Homo sapien
gacttggcggccgagagtaacttcc

SEQ ID NO: 2953193 - DNA, 25 bp, Homo sapien
agttccttcaacatgcactgcgcgc

SEQ ID NO: 2953194 - DNA, 25 bp, Homo sapien
tctaaatatccagcctcaagttcgg

SEQ ID NO: 2953195 - DNA, 25 bp, Homo sapien
gatcctgtgccctaggagcacctag

SEQ ID NO: 2953196 - DNA, 25 bp, Homo sapien
aaaggccttgccgtgcagaattggc

SEQ ID NO: 2953197 - DNA, 25 bp, Homo sapien
gtctctcgctcggtaacgggctgaa

SEQ ID NO: 2953198 - DNA, 25 bp, Homo sapien
taggaagacttgctccatctccgcc

SEQ ID NO: 2953199 - DNA, 25 bp, Homo sapien
tgtgtgtgagctaccgtggatctcc

SEQ ID NO: 2953200 - DNA, 25 bp, Homo sapien
ggttactttagttagcatgcgcgct

SEQ ID NO: 2953201 - DNA, 25 bp, Homo sapien
taatgaccaaggtaccgatttctgc

SEQ ID NO: 2953202 - DNA, 25 bp, Homo sapien
ccccgctagtggtagtatctcgtaa

SEQ ID NO: 2953203 - DNA, 25 bp, Homo sapien
tgctttgtcggtggctgtcgtgaaa

SEQ ID NO: 2953204 - DNA, 25 bp, Homo sapien
ggacattccagtagaagttttttgc

SEQ ID NO: 2953205 - DNA, 25 bp, Homo sapien
tctgggaaacagtcccgcgtgcaaa

SEQ ID NO: 2953206 - DNA, 25 bp, Homo sapien
atggcacctaagcatcagatggaag

SEQ ID NO: 2953207 - DNA, 25 bp, Homo sapien
ttcatctcctgtggattgctgctgc

SEQ ID NO: 2953208 - DNA, 25 bp, Homo sapien
ggaagctcgcagtcatgtaaatctc

SEQ ID NO: 2953209 - DNA, 25 bp, Homo sapien
catcttttgtcaaggggaaagagaa

SEQ ID NO: 2953210 - DNA, 25 bp, Homo sapien
ggcccagggaagctcgcagtcatgt

SEQ ID NO: 2953211 - DNA, 25 bp, Homo sapien
gctggtcggcctctgctcttcaaac

SEQ ID NO: 2953212 - DNA, 25 bp, Homo sapien
tcaaacctcggcctcactgttggct

SEQ ID NO: 2953213 - DNA, 25 bp, Homo sapien
tgctcttcaaacctcggcctcactg

SEQ ID NO: 2953214 - DNA, 25 bp, Homo sapien
aacctcggcctcactgttggctgct

SEQ ID NO: 2953215 - DNA, 25 bp, Homo sapien
ttgcataaagggtaaggattttgcg

SEQ ID NO: 2953216 - DNA, 25 bp, Homo sapien
gattttgcgatcttgtgtcctttcc

SEQ ID NO: 2953217 - DNA, 25 bp, Homo sapien
tggaggccgttttgcataaagggta

SEQ ID NO: 2953218 - DNA, 25 bp, Homo sapien
tgttttggaggccgttttgcataaa

SEQ ID NO: 2953219 - DNA, 25 bp, Homo sapien
tgccccctcccaaggagtcagccac

SEQ ID NO: 2953220 - DNA, 25 bp, Homo sapien
cctcccaaggagtcagccaccccca

SEQ ID NO: 2953221 - DNA, 25 bp, Homo sapien
ctcccaaggagtcagccacccccat

SEQ ID NO: 2953222 - DNA, 25 bp, Homo sapien
gccccctcccaaggagtcagccacc

SEQ ID NO: 2953223 - DNA, 25 bp, Homo sapien
actcagagcctgactgtcttccatc

SEQ ID NO: 2953224 - DNA, 25 bp, Homo sapien
tccatccctggtgtcccttggccac

SEQ ID NO: 2953225 - DNA, 25 bp, Homo sapien
tgcccagtcactcagagcctgactg

SEQ ID NO: 2953226 - DNA, 25 bp, Homo sapien
agcctgactgtcttccatccctggt

SEQ ID NO: 2953227 - DNA, 25 bp, Homo sapien
gtgcgggtgtgagcgtgagcacctg

SEQ ID NO: 2953228 - DNA, 25 bp, Homo sapien
cgatgggtgcgggtgtgagcgtgag

SEQ ID NO: 2953229 - DNA, 25 bp, Homo sapien
acagctgcgtttttgcgatgggtgc

SEQ ID NO: 2953230 - DNA, 25 bp, Homo sapien
cctcggcctgcacagctgcgttttt

SEQ ID NO: 2953231 - DNA, 25 bp, Homo sapien
tctgtggattttccgtgtaggcggc

SEQ ID NO: 2953232 - DNA, 25 bp, Homo sapien
ggcgggtgcttctgccgctcgtaaa

SEQ ID NO: 2953233 - DNA, 25 bp, Homo sapien
gccgagccgatcatagggtctgcgc

SEQ ID NO: 2953234 - DNA, 25 bp, Homo sapien
tctctccacgcggacaaagtgtgcg

SEQ ID NO: 2953235 - DNA, 25 bp, Homo sapien
caagtacccggcaataaacgggcag

SEQ ID NO: 2953236 - DNA, 25 bp, Homo sapien
ccttccagcaagtacccggcaataa

SEQ ID NO: 2953237 - DNA, 25 bp, Homo sapien
acccggcaataaacgggcagggctg

SEQ ID NO: 2953238 - DNA, 25 bp, Homo sapien
gagtcaccccgagtcttatcttctg

SEQ ID NO: 2953239 - DNA, 25 bp, Homo sapien
tccgctggagatctgcacctgtgtc

SEQ ID NO: 2953240 - DNA, 25 bp, Homo sapien
tcgccgaagtcgtgaccaggagttg

SEQ ID NO: 2953241 - DNA, 25 bp, Homo sapien
cctgggactgcgtggaatggaccaa

SEQ ID NO: 2953242 - DNA, 25 bp, Homo sapien
tgaagatctccgtgcacgctgctga

SEQ ID NO: 2953243 - DNA, 25 bp, Homo sapien
gcagaaggcggcgacccagagccgc

SEQ ID NO: 2953244 - DNA, 25 bp, Homo sapien
agaaggcggcgacccagagccgcca

SEQ ID NO: 2953245 - DNA, 25 bp, Homo sapien
ccaggggaacgcaggagcgtgagcc

SEQ ID NO: 2953246 - DNA, 25 bp, Homo sapien
gtcggcgtcgctgccccagacacag

SEQ ID NO: 2953247 - DNA, 25 bp, Homo sapien
catgtttacgtggatatagaataaa

SEQ ID NO: 2953248 - DNA, 25 bp, Homo sapien
atttttctctcagcggttcaagctc

SEQ ID NO: 2953249 - DNA, 25 bp, Homo sapien
tctcagcggttcaagctcaacagaa

SEQ ID NO: 2953250 - DNA, 25 bp, Homo sapien
tatttctatattcatgtttacgtgg

SEQ ID NO: 2953251 - DNA, 25 bp, Homo sapien
ttagaagagaagaaaggtctggcag

SEQ ID NO: 2953252 - DNA, 25 bp, Homo sapien
tagaagagaagaaaggtctggcagc

SEQ ID NO: 2953253 - DNA, 25 bp, Homo sapien
attagaagagaagaaaggtctggca

SEQ ID NO: 2953254 - DNA, 25 bp, Homo sapien
gatatttcaacattcttcacttggt

SEQ ID NO: 2953255 - DNA, 25 bp, Homo sapien
atatttcaacattcttcacttggta

SEQ ID NO: 2953256 - DNA, 25 bp, Homo sapien
ggatatttcaacattcttcacttgg

SEQ ID NO: 2953257 - DNA, 25 bp, Homo sapien
atgaagcaccaaaaatgatagcatt

SEQ ID NO: 2953258 - DNA, 25 bp, Homo sapien
tccagcctttagacacagattcaga

SEQ ID NO: 2953259 - DNA, 25 bp, Homo sapien
ggaccacatccaatcgattgaagaa

SEQ ID NO: 2953260 - DNA, 25 bp, Homo sapien
cagattcagactggagttatgccac

SEQ ID NO: 2953261 - DNA, 25 bp, Homo sapien
tcctgccagtagtggaaggctctcc

SEQ ID NO: 2953262 - DNA, 25 bp, Homo sapien
ttacaagagttcttataggctggat

SEQ ID NO: 2953263 - DNA, 25 bp, Homo sapien
attacaagagttcttataggctgga

SEQ ID NO: 2953264 - DNA, 25 bp, Homo sapien
tttgtttatccactcgtcgactgat

SEQ ID NO: 2953265 - DNA, 25 bp, Homo sapien
acagatctcaatgaatgtgcctatc

SEQ ID NO: 2953266 - DNA, 25 bp, Homo sapien
gcagattcacaaggcggttcaacaa

SEQ ID NO: 2953267 - DNA, 25 bp, Homo sapien
cctgtgcctgtgtgcagtcatttct

SEQ ID NO: 2953268 - DNA, 25 bp, Homo sapien
tcaaccacgtatctgtgtgaagaca

SEQ ID NO: 2953269 - DNA, 25 bp, Homo sapien
cattgaatgtaagtagaagcaggta

SEQ ID NO: 2953270 - DNA, 25 bp, Homo sapien
ggttccacattgcaattaaccttta

SEQ ID NO: 2953271 - DNA, 25 bp, Homo sapien
gctatcttctactcagccagacatt

SEQ ID NO: 2953272 - DNA, 25 bp, Homo sapien
gggatgataagcatattttaagtaa

SEQ ID NO: 2953273 - DNA, 25 bp, Homo sapien
ctccaagggatgataagcatatttt

SEQ ID NO: 2953274 - DNA, 25 bp, Homo sapien
ccaagggatgataagcatattttaa

SEQ ID NO: 2953275 - DNA, 25 bp, Homo sapien
aagggatgataagcatattttaagt

SEQ ID NO: 2953276 - DNA, 25 bp, Homo sapien
ggggtcagaaggaaatagccaatat

SEQ ID NO: 2953277 - DNA, 25 bp, Homo sapien
gggtcagaaggaaatagccaatatt

SEQ ID NO: 2953278 - DNA, 25 bp, Homo sapien
caatattcactatagagacaggacc

SEQ ID NO: 2953279 - DNA, 25 bp, Homo sapien
tgggcccagccggaagatgctaaga

SEQ ID NO: 2953280 - DNA, 25 bp, Homo sapien
tgaatggctctgtagaggcccgcag

SEQ ID NO: 2953281 - DNA, 25 bp, Homo sapien
caatcggcctaaagtcacgtagcta

SEQ ID NO: 2953282 - DNA, 25 bp, Homo sapien
aaacccgtagtcatattggattgcc

SEQ ID NO: 2953283 - DNA, 25 bp, Homo sapien
tggcaatccagtaaccacctaagga

SEQ ID NO: 2953284 - DNA, 25 bp, Homo sapien
actggtgcttggataccatggcggc

SEQ ID NO: 2953285 - DNA, 25 bp, Homo sapien
ccatggcggcgatgaagcctgagct

SEQ ID NO: 2953286 - DNA, 25 bp, Homo sapien
gctgcaccgtgcctggatatgagct

SEQ ID NO: 2953287 - DNA, 25 bp, Homo sapien
ctttgcggacccagctgtcaagggc

SEQ ID NO: 2953288 - DNA, 25 bp, Homo sapien
tatgagctgtatttgccgagatgta

SEQ ID NO: 2953289 - DNA, 25 bp, Homo sapien
ccgagatgtagcatgaaggtgagtt

SEQ ID NO: 2953290 - DNA, 25 bp, Homo sapien
cagacacgagtcttctacgaccgta

SEQ ID NO: 2953291 - DNA, 25 bp, Homo sapien
ggttgactccgcagattgtctccac

SEQ ID NO: 2953292 - DNA, 25 bp, Homo sapien
tatgtgtgtccttactgaggttgac

SEQ ID NO: 2953293 - DNA, 25 bp, Homo sapien
tgtctccactctagaccactaggat

SEQ ID NO: 2953294 - DNA, 25 bp, Homo sapien
gcttgatatatggaaggccaggcag

SEQ ID NO: 2953295 - DNA, 25 bp, Homo sapien
tggtttcccctaagcacaacggtga

SEQ ID NO: 2953296 - DNA, 25 bp, Homo sapien
acacactgggtgagacaagcctaac

SEQ ID NO: 2953297 - DNA, 25 bp, Homo sapien
gggctgcccctgcataaggtgataa

SEQ ID NO: 2953298 - DNA, 25 bp, Homo sapien
tgaaaccctccacttccccagctct

SEQ ID NO: 2953299 - DNA, 25 bp, Homo sapien
tctgcgtagttcagctcagacacca

SEQ ID NO: 2953300 - DNA, 25 bp, Homo sapien
gacatctctgaccacatgaaaccct

SEQ ID NO: 2953301 - DNA, 25 bp, Homo sapien
tcccatccattctgcgtagttcagc

SEQ ID NO: 2953302 - DNA, 25 bp, Homo sapien
ctgcaagttatgcccttgtggatct

SEQ ID NO: 2953303 - DNA, 25 bp, Homo sapien
aagttatgcccttgtggatctcacc

SEQ ID NO: 2953304 - DNA, 25 bp, Homo sapien
actcccctaaatgcaagcacaatga

SEQ ID NO: 2953305 - DNA, 25 bp, Homo sapien
aactcccctaaatgcaagcacaatg

SEQ ID NO: 2953306 - DNA, 25 bp, Homo sapien
cattgtcccctttagcaatcactgc

SEQ ID NO: 2953307 - DNA, 25 bp, Homo sapien
aaagacattgtcccctttagcaatc

SEQ ID NO: 2953308 - DNA, 25 bp, Homo sapien
attgtcccctttagcaatcactgcc

SEQ ID NO: 2953309 - DNA, 25 bp, Homo sapien
gacattgtcccctttagcaatcact

SEQ ID NO: 2953310 - DNA, 25 bp, Homo sapien
gtggggatcgccatgtacccaggtc

SEQ ID NO: 2953311 - DNA, 25 bp, Homo sapien
aagtcatgattgagggttccagggt

SEQ ID NO: 2953312 - DNA, 25 bp, Homo sapien
ggggatcgccatgtacccaggtccc

SEQ ID NO: 2953313 - DNA, 25 bp, Homo sapien
tcaagtcatgattgagggttccagg

SEQ ID NO: 2953314 - DNA, 25 bp, Homo sapien
cccctacttgcagctatgaggtggg

SEQ ID NO: 2953315 - DNA, 25 bp, Homo sapien
ggtcagggactttgccattgaactt

SEQ ID NO: 2953316 - DNA, 25 bp, Homo sapien
cagcaaaagagtttaatcgccccta

SEQ ID NO: 2953317 - DNA, 25 bp, Homo sapien
ccctagaataatgctggcgcccagc

SEQ ID NO: 2953318 - DNA, 25 bp, Homo sapien
tttataccattctcaccctcccgaa

SEQ ID NO: 2953319 - DNA, 25 bp, Homo sapien
aacttgcaataaagcccggaggcga

SEQ ID NO: 2953320 - DNA, 25 bp, Homo sapien
atttataccattctcaccctcccga

SEQ ID NO: 2953321 - DNA, 25 bp, Homo sapien
ttataccattctcaccctcccgaac

SEQ ID NO: 2953322 - DNA, 25 bp, Homo sapien
ttttgaatctcggttccagcacccg

SEQ ID NO: 2953323 - DNA, 25 bp, Homo sapien
tgaatctcggttccagcacccgcaa

SEQ ID NO: 2953324 - DNA, 25 bp, Homo sapien
ccgcaacgcagagcgcgaacctgag

SEQ ID NO: 2953325 - DNA, 25 bp, Homo sapien
ctttttgaatctcggttccagcacc

SEQ ID NO: 2953326 - DNA, 25 bp, Homo sapien
aacctgcgggcaggctttcatcgtc

SEQ ID NO: 2953327 - DNA, 25 bp, Homo sapien
atcgtccgcggagctacaggcttcc

SEQ ID NO: 2953328 - DNA, 25 bp, Homo sapien
cgacagaggctcaccactccaggag

SEQ ID NO: 2953329 - DNA, 25 bp, Homo sapien
tattccactggtgtgttaggaccat

SEQ ID NO: 2953330 - DNA, 25 bp, Homo sapien
ccaaagagtgtgagtgcatgcggac

SEQ ID NO: 2953331 - DNA, 25 bp, Homo sapien
cccgtggtccagcttaaggtcctcg

SEQ ID NO: 2953332 - DNA, 25 bp, Homo sapien
gtgggacgtgacttagacacctaca

SEQ ID NO: 2953333 - DNA, 25 bp, Homo sapien
ttaccaaagaggagcccgggactga

SEQ ID NO: 2953334 - DNA, 25 bp, Homo sapien
taaccagtactagctgccatgatcg

SEQ ID NO: 2953335 - DNA, 25 bp, Homo sapien
gaagaacagcgctaccccttaagag

SEQ ID NO: 2953336 - DNA, 25 bp, Homo sapien
tcatcaccaaggacaagaggcgcaa

SEQ ID NO: 2953337 - DNA, 25 bp, Homo sapien
cagaaccgccgggtcaaagagaaga

SEQ ID NO: 2953338 - DNA, 25 bp, Homo sapien
gagtttgctccagttgggagaacga

SEQ ID NO: 2953339 - DNA, 25 bp, Homo sapien
ggagaacgaaggcagcgggcgctca

SEQ ID NO: 2953340 - DNA, 25 bp, Homo sapien
catcgtcgccgccacagagtttgct

SEQ ID NO: 2953341 - DNA, 25 bp, Homo sapien
ctccagttgggagaacgaaggcagc

SEQ ID NO: 2953342 - DNA, 25 bp, Homo sapien
gcgtcgcgctgcagagaaatcctct

SEQ ID NO: 2953343 - DNA, 25 bp, Homo sapien
agaagataccaagcctaagacagag

SEQ ID NO: 2953344 - DNA, 25 bp, Homo sapien
ttcataaaatcgagaggagccgggc

SEQ ID NO: 2953345 - DNA, 25 bp, Homo sapien
cggagccagagagtgagcaataaca

SEQ ID NO: 2953346 - DNA, 25 bp, Homo sapien
acaatggaaaaactgggcgagagcg

SEQ ID NO: 2953347 - DNA, 25 bp, Homo sapien
gctccggccgctgagagctatagcc

SEQ ID NO: 2953348 - DNA, 25 bp, Homo sapien
ggccgctgagagctatagccccgca

SEQ ID NO: 2953349 - DNA, 25 bp, Homo sapien
gctgagagctatagccccgcaggcc

SEQ ID NO: 2953350 - DNA, 25 bp, Homo sapien
agccacactaggccgtcctccaggc

SEQ ID NO: 2953351 - DNA, 25 bp, Homo sapien
atctccagcgggtgctgttctagcc

SEQ ID NO: 2953352 - DNA, 25 bp, Homo sapien
catctccagcgggtgctgttctagc

SEQ ID NO: 2953353 - DNA, 25 bp, Homo sapien
ccagggcagggctccgcgaacccac

SEQ ID NO: 2953354 - DNA, 25 bp, Homo sapien
gttatatcatcaacacccacattcc

SEQ ID NO: 2953355 - DNA, 25 bp, Homo sapien
cctaatagttatatcatcaacaccc

SEQ ID NO: 2953356 - DNA, 25 bp, Homo sapien
ggtctacactagcagtcctgagagt

SEQ ID NO: 2953357 - DNA, 25 bp, Homo sapien
gaagactcgatctttatctctggca

SEQ ID NO: 2953358 - DNA, 25 bp, Homo sapien
ttgcccgcttgacctgcacggatct

SEQ ID NO: 2953359 - DNA, 25 bp, Homo sapien
gctggtcggcgtcagtctgtgcttt

SEQ ID NO: 2953360 - DNA, 25 bp, Homo sapien
cctgcacggatctcgggcagtgcaa

SEQ ID NO: 2953361 - DNA, 25 bp, Homo sapien
tttccctcgtccaaagcttggcctg

SEQ ID NO: 2953362 - DNA, 25 bp, Homo sapien
gtcaccttgaataacccaataatta

SEQ ID NO: 2953363 - DNA, 25 bp, Homo sapien
agtcaccttgaataacccaataatt

SEQ ID NO: 2953364 - DNA, 25 bp, Homo sapien
tggcttcttacgagctaggtgtagt

SEQ ID NO: 2953365 - DNA, 25 bp, Homo sapien
tatattccctggcttcttacgagct

SEQ ID NO: 2953366 - DNA, 25 bp, Homo sapien
gctgttgctccgtcactgtgtcttt

SEQ ID NO: 2953367 - DNA, 25 bp, Homo sapien
tctgcgtgtaaggacgcagctgctg

SEQ ID NO: 2953368 - DNA, 25 bp, Homo sapien
tctggtctggcaaaggaattaaccc

SEQ ID NO: 2953369 - DNA, 25 bp, Homo sapien
aaagcctggatcagctcatctgcgt

SEQ ID NO: 2953370 - DNA, 25 bp, Homo sapien
agatcttcggaccttttcgccctgg

SEQ ID NO: 2953371 - DNA, 25 bp, Homo sapien
gttgctgggcttcccgagttctcca

SEQ ID NO: 2953372 - DNA, 25 bp, Homo sapien
tctccaggtctttccgacagcgtag

SEQ ID NO: 2953373 - DNA, 25 bp, Homo sapien
tggagcccgctttaggagatcctgt

SEQ ID NO: 2953374 - DNA, 25 bp, Homo sapien
ttgcaccattcacaccaaaaactaa

SEQ ID NO: 2953375 - DNA, 25 bp, Homo sapien
cattcacaccaaaaactaagccaaa

SEQ ID NO: 2953376 - DNA, 25 bp, Homo sapien
ccattcacaccaaaaactaagccaa

SEQ ID NO: 2953377 - DNA, 25 bp, Homo sapien
gcaccattcacaccaaaaactaagc

SEQ ID NO: 2953378 - DNA, 25 bp, Homo sapien
tgcaacactagctccacccttagat

SEQ ID NO: 2953379 - DNA, 25 bp, Homo sapien
actgccaccaccgtgcaacactagc

SEQ ID NO: 2953380 - DNA, 25 bp, Homo sapien
gaaatccggtctgtcttgctgcagc

SEQ ID NO: 2953381 - DNA, 25 bp, Homo sapien
ttgctgcagctgcttgcttcgggca

SEQ ID NO: 2953382 - DNA, 25 bp, Homo sapien
cgtgagccgttctttagccagacag

SEQ ID NO: 2953383 - DNA, 25 bp, Homo sapien
cgtttccacagtcgcattcccgagg

SEQ ID NO: 2953384 - DNA, 25 bp, Homo sapien
tacaggcataagtaaccaagctcag

SEQ ID NO: 2953385 - DNA, 25 bp, Homo sapien
gaaactacgccccatgtgattgatg

SEQ ID NO: 2953386 - DNA, 25 bp, Homo sapien
ggcagaaccagtctaatcctttggg

SEQ ID NO: 2953387 - DNA, 25 bp, Homo sapien
tggagactctgagcctagtcaaggg

SEQ ID NO: 2953388 - DNA, 25 bp, Homo sapien
ctgttgccaggagctaacgtctcct

SEQ ID NO: 2953389 - DNA, 25 bp, Homo sapien
cagcacttgccttgtaactggtatt

SEQ ID NO: 2953390 - DNA, 25 bp, Homo sapien
cctgacatgtggctagccggcttga

SEQ ID NO: 2953391 - DNA, 25 bp, Homo sapien
tctcaaatgatgtgtcacagtgccc

SEQ ID NO: 2953392 - DNA, 25 bp, Homo sapien
tattgatcgctagtctgccacgtga

SEQ ID NO: 2953393 - DNA, 25 bp, Homo sapien
ccacgtgagaaggacttgccaggca

SEQ ID NO: 2953394 - DNA, 25 bp, Homo sapien
taaagatgtatcttgttccctccct

SEQ ID NO: 2953395 - DNA, 25 bp, Homo sapien
ggtatattcatcacccggacagtga

SEQ ID NO: 2953396 - DNA, 25 bp, Homo sapien
gcggactttagctccactggacaga

SEQ ID NO: 2953397 - DNA, 25 bp, Homo sapien
catacatttgtaagccggattcggg

SEQ ID NO: 2953398 - DNA, 25 bp, Homo sapien
gtcttgtcctgtcccggttactgca

SEQ ID NO: 2953399 - DNA, 25 bp, Homo sapien
ggttactgcaggcacttctcccatt

SEQ ID NO: 2953400 - DNA, 25 bp, Homo sapien
gctttagggtagtcttgtcctgtcc

SEQ ID NO: 2953401 - DNA, 25 bp, Homo sapien
taaattagaattgaatgctttaggg

SEQ ID NO: 2953402 - DNA, 25 bp, Homo sapien
ccagcagcggcgcgacagcaacagg

SEQ ID NO: 2953403 - DNA, 25 bp, Homo sapien
cagcagcggcgcgacagcaacaggg

SEQ ID NO: 2953404 - DNA, 25 bp, Homo sapien
agcagcggcgcgacagcaacagggc

SEQ ID NO: 2953405 - DNA, 25 bp, Homo sapien
ggcaaggcgcttcagggatcaaacc

SEQ ID NO: 2953406 - DNA, 25 bp, Homo sapien
tgctcagggtgacgcaacaaggctc

SEQ ID NO: 2953407 - DNA, 25 bp, Homo sapien
tatacgagtgggaacattagctccc

SEQ ID NO: 2953408 - DNA, 25 bp, Homo sapien
tccaggcgagggattacggaaccac

SEQ ID NO: 2953409 - DNA, 25 bp, Homo sapien
cagccttaaagaataccagcagtgg

SEQ ID NO: 2953410 - DNA, 25 bp, Homo sapien
gagcttggccaagtcacagtaccct

SEQ ID NO: 2953411 - DNA, 25 bp, Homo sapien
tgcgggcaactggaaactctgaaag

SEQ ID NO: 2953412 - DNA, 25 bp, Homo sapien
ttctgggacatcaggtgcgggcaac

SEQ ID NO: 2953413 - DNA, 25 bp, Homo sapien
ccaggaggcagaggttgcagtgagc

SEQ ID NO: 2953414 - DNA, 25 bp, Homo sapien
ccgggcacgatggcaggcacctgta

SEQ ID NO: 2953415 - DNA, 25 bp, Homo sapien
caggagaaccgcttgaacccaggag

SEQ ID NO: 2953416 - DNA, 25 bp, Homo sapien
atcccagctactcaggaggctgagg

SEQ ID NO: 2953417 - DNA, 25 bp, Homo sapien
ggtgatttctgggctttcatccagg

SEQ ID NO: 2953418 - DNA, 25 bp, Homo sapien
tgtggaacagagtaaggctcagaaa

SEQ ID NO: 2953419 - DNA, 25 bp, Homo sapien
tggaacagagtaaggctcagaaagc

SEQ ID NO: 2953420 - DNA, 25 bp, Homo sapien
gtgatttctgggctttcatccaggg

SEQ ID NO: 2953421 - DNA, 25 bp, Homo sapien
tggggggatctttgatggtctcctc

SEQ ID NO: 2953422 - DNA, 25 bp, Homo sapien
gatccagcaagacagctgatgtggg

SEQ ID NO: 2953423 - DNA, 25 bp, Homo sapien
gaaatgacagtgatccagcaagaca

SEQ ID NO: 2953424 - DNA, 25 bp, Homo sapien
agacagctgatgtggggggatcttt

SEQ ID NO: 2953425 - DNA, 25 bp, Homo sapien
tctaaagatgccaatccaatccttt

SEQ ID NO: 2953426 - DNA, 25 bp, Homo sapien
ctttcgacgagggatgaaatgctgg

SEQ ID NO: 2953427 - DNA, 25 bp, Homo sapien
tataatgacatgtgacgtcccctcc

SEQ ID NO: 2953428 - DNA, 25 bp, Homo sapien
atgccaatccaatcctttcgacgag

SEQ ID NO: 2953429 - DNA, 25 bp, Homo sapien
tggaggtagcagtgagacaaatcgt

SEQ ID NO: 2953430 - DNA, 25 bp, Homo sapien
gaggtagcagtgagacaaatcgtgc

SEQ ID NO: 2953431 - DNA, 25 bp, Homo sapien
ggtggaggtagcagtgagacaaatc

SEQ ID NO: 2953432 - DNA, 25 bp, Homo sapien
aggtggaggtagcagtgagacaaat

SEQ ID NO: 2953433 - DNA, 25 bp, Homo sapien
tgatcagacactggaagaggtcact

SEQ ID NO: 2953434 - DNA, 25 bp, Homo sapien
taccattctgtacttgaactgacgg

SEQ ID NO: 2953435 - DNA, 25 bp, Homo sapien
gtagtcagacgcacttattcaggaa

SEQ ID NO: 2953436 - DNA, 25 bp, Homo sapien
gaggtgtcaaaccaaaggtcactga

SEQ ID NO: 2953437 - DNA, 25 bp, Homo sapien
tagcactggcaaataggcacatgac

SEQ ID NO: 2953438 - DNA, 25 bp, Homo sapien
cttccgttgctcatcaataagcttg

SEQ ID NO: 2953439 - DNA, 25 bp, Homo sapien
caattatggaaaaggaattcaatga

SEQ ID NO: 2953440 - DNA, 25 bp, Homo sapien
cacagtgcagttgagaatggtgtct

SEQ ID NO: 2953441 - DNA, 25 bp, Homo sapien
cactctggtgggttggcacgccttt

SEQ ID NO: 2953442 - DNA, 25 bp, Homo sapien
catgatacttgccagtgtcctgctg

SEQ ID NO: 2953443 - DNA, 25 bp, Homo sapien
tactagacagtgaagctacagctcc

SEQ ID NO: 2953444 - DNA, 25 bp, Homo sapien
taccaggcaatgtgacctatacgct

SEQ ID NO: 2953445 - DNA, 25 bp, Homo sapien
catgatctgtacctgcattaaccaa

SEQ ID NO: 2953446 - DNA, 25 bp, Homo sapien
cattaaccaatgatagccactagcc

SEQ ID NO: 2953447 - DNA, 25 bp, Homo sapien
gaaatataacgatgttccaaaaaga

SEQ ID NO: 2953448 - DNA, 25 bp, Homo sapien
aaatccagttactcaggccgggtgc

SEQ ID NO: 2953449 - DNA, 25 bp, Homo sapien
ggagttgaatagtctgattaagact

SEQ ID NO: 2953450 - DNA, 25 bp, Homo sapien
ctggtgccagatactaccagtgtct

SEQ ID NO: 2953451 - DNA, 25 bp, Homo sapien
gttgaatagtctgattaagactaca

SEQ ID NO: 2953452 - DNA, 25 bp, Homo sapien
aggagttgaatagtctgattaagac

SEQ ID NO: 2953453 - DNA, 25 bp, Homo sapien
tccaatttgtcttggaaacatttaa

SEQ ID NO: 2953454 - DNA, 25 bp, Homo sapien
cctccatttgagtagttcttgttcc

SEQ ID NO: 2953455 - DNA, 25 bp, Homo sapien
tgagtagttcttgttccaatttgtc

SEQ ID NO: 2953456 - DNA, 25 bp, Homo sapien
ttggctcctccatttgagtagttct

SEQ ID NO: 2953457 - DNA, 25 bp, Homo sapien
caatctggtagtcgtaaaggcctct

SEQ ID NO: 2953458 - DNA, 25 bp, Homo sapien
tatgaggcaccagataagagattcc

SEQ ID NO: 2953459 - DNA, 25 bp, Homo sapien
tgcgggaatatgaaccctgatcctc

SEQ ID NO: 2953460 - DNA, 25 bp, Homo sapien
taagccttgtcatataccaacctgg

SEQ ID NO: 2953461 - DNA, 25 bp, Homo sapien
gggaaaatcctaattgggctacatc

SEQ ID NO: 2953462 - DNA, 25 bp, Homo sapien
ctgcaatgacaagaagttcttattt

SEQ ID NO: 2953463 - DNA, 25 bp, Homo sapien
caagaagttcttatttagtacctga

SEQ ID NO: 2953464 - DNA, 25 bp, Homo sapien
gggctacatcttcttaaaatcactt

SEQ ID NO: 2953465 - DNA, 25 bp, Homo sapien
ggtcaatgggcaaagtaacccacat

SEQ ID NO: 2953466 - DNA, 25 bp, Homo sapien
ggtgtaatactcacgggttgtcttc

SEQ ID NO: 2953467 - DNA, 25 bp, Homo sapien
cacatgaaggtgtaatactcacggg

SEQ ID NO: 2953468 - DNA, 25 bp, Homo sapien
gatttgttgtttaggtcaatgggca

SEQ ID NO: 2953469 - DNA, 25 bp, Homo sapien
tctgccccagaaagctcaagctgaa

SEQ ID NO: 2953470 - DNA, 25 bp, Homo sapien
ttatctgccccagaaagctcaagct

SEQ ID NO: 2953471 - DNA, 25 bp, Homo sapien
caacacctttgatccagtatttttc

SEQ ID NO: 2953472 - DNA, 25 bp, Homo sapien
gaattaattagtcttggctactgtc

SEQ ID NO: 2953473 - DNA, 25 bp, Homo sapien
gaactggtaatactcatcatccttg

SEQ ID NO: 2953474 - DNA, 25 bp, Homo sapien
tggaaaggaatacttgctccccgga

SEQ ID NO: 2953475 - DNA, 25 bp, Homo sapien
cctcattttctggacggaattggaa

SEQ ID NO: 2953476 - DNA, 25 bp, Homo sapien
tcctcatccacatagcagaactggt

SEQ ID NO: 2953477 - DNA, 25 bp, Homo sapien
cccgtaatggcagtaagggattgag

SEQ ID NO: 2953478 - DNA, 25 bp, Homo sapien
caaattccatcctatcctatattgc

SEQ ID NO: 2953479 - DNA, 25 bp, Homo sapien
cctatattgctacccgtaatggcag

SEQ ID NO: 2953480 - DNA, 25 bp, Homo sapien
catcctatcctatattgctacccgt

SEQ ID NO: 2953481 - DNA, 25 bp, Homo sapien
ctttgcaaagctccttgttgtgctg

SEQ ID NO: 2953482 - DNA, 25 bp, Homo sapien
tctttgcaaagctccttgttgtgct

SEQ ID NO: 2953483 - DNA, 25 bp, Homo sapien
catcaaagggacagactagttctat

SEQ ID NO: 2953484 - DNA, 25 bp, Homo sapien
gacttttgaatgagtatcttaggca

SEQ ID NO: 2953485 - DNA, 25 bp, Homo sapien
agggacagactagttctatgacttt

SEQ ID NO: 2953486 - DNA, 25 bp, Homo sapien
tgaatgagtatcttaggcaggcaac

SEQ ID NO: 2953487 - DNA, 25 bp, Homo sapien
tttcagttccaacttcttattgatg

SEQ ID NO: 2953488 - DNA, 25 bp, Homo sapien
actttcagttccaacttcttattga

SEQ ID NO: 2953489 - DNA, 25 bp, Homo sapien
cagttccaacttcttattgatgctc

SEQ ID NO: 2953490 - DNA, 25 bp, Homo sapien
tcagttccaacttcttattgatgct

SEQ ID NO: 2953491 - DNA, 25 bp, Homo sapien
tgaagctgatccactctgattccca

SEQ ID NO: 2953492 - DNA, 25 bp, Homo sapien
ctgaagctgatccactctgattccc

SEQ ID NO: 2953493 - DNA, 25 bp, Homo sapien
agctgatccactctgattcccatct

SEQ ID NO: 2953494 - DNA, 25 bp, Homo sapien
gaagctgatccactctgattcccat

SEQ ID NO: 2953495 - DNA, 25 bp, Homo sapien
gaggcttacctggtccaagaatgga

SEQ ID NO: 2953496 - DNA, 25 bp, Homo sapien
ctttctaggccaccaaattggagca

SEQ ID NO: 2953497 - DNA, 25 bp, Homo sapien
gcgcccggctgtgaatcatgatttt

SEQ ID NO: 2953498 - DNA, 25 bp, Homo sapien
gcctgtaaattagcacgcccagcta

SEQ ID NO: 2953499 - DNA, 25 bp, Homo sapien
gccaactgagtaaaattagacaaat

SEQ ID NO: 2953500 - DNA, 25 bp, Homo sapien
tagcaactcccaactgccaactgag

SEQ ID NO: 2953501 - DNA, 25 bp, Homo sapien
tagtgaacataaccaagatataaaa

SEQ ID NO: 2953502 - DNA, 25 bp, Homo sapien
taacgtacaataacaaagagatgtg

SEQ ID NO: 2953503 - DNA, 25 bp, Homo sapien
gctctgtcttatcttgatctccctg

SEQ ID NO: 2953504 - DNA, 25 bp, Homo sapien
ctgtcttatcttgatctccctgaac

SEQ ID NO: 2953505 - DNA, 25 bp, Homo sapien
tctgtcttatcttgatctccctgaa

SEQ ID NO: 2953506 - DNA, 25 bp, Homo sapien
ctctgtcttatcttgatctccctga

SEQ ID NO: 2953507 - DNA, 25 bp, Homo sapien
tctgagccctttcctaaagccagtg

SEQ ID NO: 2953508 - DNA, 25 bp, Homo sapien
tggaagggcctgctaagctaatgag

SEQ ID NO: 2953509 - DNA, 25 bp, Homo sapien
aagagatttcagtaccattgctggg

SEQ ID NO: 2953510 - DNA, 25 bp, Homo sapien
caagtcttctctcgtcagtttctga

SEQ ID NO: 2953511 - DNA, 25 bp, Homo sapien
actgtctgctcgagcttcttctggt

SEQ ID NO: 2953512 - DNA, 25 bp, Homo sapien
tgtctgctcgagcttcttctggtcc

SEQ ID NO: 2953513 - DNA, 25 bp, Homo sapien
ctgtctgctcgagcttcttctggtc

SEQ ID NO: 2953514 - DNA, 25 bp, Homo sapien
tcctgtccatcaaccggaaaatagg

SEQ ID NO: 2953515 - DNA, 25 bp, Homo sapien
tttcttctacatccctataggctcc

SEQ ID NO: 2953516 - DNA, 25 bp, Homo sapien
gcaaaacatctagaggtgaacactc

SEQ ID NO: 2953517 - DNA, 25 bp, Homo sapien
catattagaaatgcccacttctaaa

SEQ ID NO: 2953518 - DNA, 25 bp, Homo sapien
gcccctattgtaactctgtaagaag

SEQ ID NO: 2953519 - DNA, 25 bp, Homo sapien
tgtgagccctagtccaaggatctag

SEQ ID NO: 2953520 - DNA, 25 bp, Homo sapien
accattcatttgtctgcccctattg

SEQ ID NO: 2953521 - DNA, 25 bp, Homo sapien
ggatctagttaactacatcttgtca

SEQ ID NO: 2953522 - DNA, 25 bp, Homo sapien
ttgccttaaggcgttccacctcttg

SEQ ID NO: 2953523 - DNA, 25 bp, Homo sapien
tagtgccgctttcttgttcctaggc

SEQ ID NO: 2953524 - DNA, 25 bp, Homo sapien
tcttgtgctaactgctcctccacag

SEQ ID NO: 2953525 - DNA, 25 bp, Homo sapien
ccttaaggcgttccacctcttgtgc

SEQ ID NO: 2953526 - DNA, 25 bp, Homo sapien
taggcatctcggctcaagttacatg

SEQ ID NO: 2953527 - DNA, 25 bp, Homo sapien
taaacgtctcactcagcgaagcctg

SEQ ID NO: 2953528 - DNA, 25 bp, Homo sapien
tagccgaccctgaggtagtaatgcc

SEQ ID NO: 2953529 - DNA, 25 bp, Homo sapien
caaactgctgtgcatgtctagccga

SEQ ID NO: 2953530 - DNA, 25 bp, Homo sapien
tgtctctgcagagcattacatataa

SEQ ID NO: 2953531 - DNA, 25 bp, Homo sapien
taatttcgttctcactcagtctttt

SEQ ID NO: 2953532 - DNA, 25 bp, Homo sapien
acatataatttcgttctcactcagt

SEQ ID NO: 2953533 - DNA, 25 bp, Homo sapien
tataatttcgttctcactcagtctt

SEQ ID NO: 2953534 - DNA, 25 bp, Homo sapien
tttataccctctttcacacacttac

SEQ ID NO: 2953535 - DNA, 25 bp, Homo sapien
tgggccaccctgatccttcccctta

SEQ ID NO: 2953536 - DNA, 25 bp, Homo sapien
ttttataccctctttcacacactta

SEQ ID NO: 2953537 - DNA, 25 bp, Homo sapien
cactacatctctgggccaccctgat

SEQ ID NO: 2953538 - DNA, 25 bp, Homo sapien
tgtcttgcgcctccttcatctgaag

SEQ ID NO: 2953539 - DNA, 25 bp, Homo sapien
tctgaagtaggtacttgatacggca

SEQ ID NO: 2953540 - DNA, 25 bp, Homo sapien
catgtaactgagcaatctgctgttc

SEQ ID NO: 2953541 - DNA, 25 bp, Homo sapien
tgggtttccataggcaagtcctgga

SEQ ID NO: 2953542 - DNA, 25 bp, Homo sapien
gctgggggaagaactttcttggata

SEQ ID NO: 2953543 - DNA, 25 bp, Homo sapien
ctgctgttgctccaaggtgtgatca

SEQ ID NO: 2953544 - DNA, 25 bp, Homo sapien
gtagctgggaagatcttgtcacaaa

SEQ ID NO: 2953545 - DNA, 25 bp, Homo sapien
gcagatagggcatttcttgatggag

SEQ ID NO: 2953546 - DNA, 25 bp, Homo sapien
gaacacgtggtcttcaaagatctgc

SEQ ID NO: 2953547 - DNA, 25 bp, Homo sapien
gaaggaattctcaacctcggaccaa

SEQ ID NO: 2953548 - DNA, 25 bp, Homo sapien
tagaaagtgctaaccagaggtaccc

SEQ ID NO: 2953549 - DNA, 25 bp, Homo sapien
caagtcaggcctgttgtgaataccc

SEQ ID NO: 2953550 - DNA, 25 bp, Homo sapien
gacataactccactgttagcggcag

SEQ ID NO: 2953551 - DNA, 25 bp, Homo sapien
tcccatagcccttttgatcacaatt

SEQ ID NO: 2953552 - DNA, 25 bp, Homo sapien
atcacaattttcccatgagcttcaa

SEQ ID NO: 2953553 - DNA, 25 bp, Homo sapien
gtctgcccttcccatagcccttttg

SEQ ID NO: 2953554 - DNA, 25 bp, Homo sapien
gacaggtgaagagaaatcattggcg

SEQ ID NO: 2953555 - DNA, 25 bp, Homo sapien
gctgtagtgagtcaactgcgccatt

SEQ ID NO: 2953556 - DNA, 25 bp, Homo sapien
caaatttggatagagcgcattgaac

SEQ ID NO: 2953557 - DNA, 25 bp, Homo sapien
ttcacaaagggtgcgaaaatccaca

SEQ ID NO: 2953558 - DNA, 25 bp, Homo sapien
tgtagtgaccacctgatactgcctg

SEQ ID NO: 2953559 - DNA, 25 bp, Homo sapien
ggagcaacagaaattctgtagggag

SEQ ID NO: 2953560 - DNA, 25 bp, Homo sapien
gggagcaacagaaattctgtaggga

SEQ ID NO: 2953561 - DNA, 25 bp, Homo sapien
gatctggggagcaacagaaattctg

SEQ ID NO: 2953562 - DNA, 25 bp, Homo sapien
ctggggagcaacagaaattctgtag

SEQ ID NO: 2953563 - DNA, 25 bp, Homo sapien
tggctgcctagagcataatttcccc

SEQ ID NO: 2953564 - DNA, 25 bp, Homo sapien
gaactattgtttactactagtggct

SEQ ID NO: 2953565 - DNA, 25 bp, Homo sapien
agggtcattaacacctcaactggtt

SEQ ID NO: 2953566 - DNA, 25 bp, Homo sapien
gatgctttgttttacacccagcaaa

SEQ ID NO: 2953567 - DNA, 25 bp, Homo sapien
cacacctggctaattttttgtagtt

SEQ ID NO: 2953568 - DNA, 25 bp, Homo sapien
ttacaggtgcctgctgccacacctg

SEQ ID NO: 2953569 - DNA, 25 bp, Homo sapien
attacaggtgcctgctgccacacct

SEQ ID NO: 2953570 - DNA, 25 bp, Homo sapien
ttttcccaggtaatggactgcatcc

SEQ ID NO: 2953571 - DNA, 25 bp, Homo sapien
cgtgagcaccgactaagacttttga

SEQ ID NO: 2953572 - DNA, 25 bp, Homo sapien
catttgttcctaggagaccaggtta

SEQ ID NO: 2953573 - DNA, 25 bp, Homo sapien
taagccactgccaccgtagaaaatc

SEQ ID NO: 2953574 - DNA, 25 bp, Homo sapien
cattctaaactataaagcggtacaa

SEQ ID NO: 2953575 - DNA, 25 bp, Homo sapien
cttggaggattatgagaggcacaca

SEQ ID NO: 2953576 - DNA, 25 bp, Homo sapien
gagttaatagctgccttgtcttgga

SEQ ID NO: 2953577 - DNA, 25 bp, Homo sapien
agatagggtctcaactctctggccc

SEQ ID NO: 2953578 - DNA, 25 bp, Homo sapien
caaccggttagctcagttggtcaga

SEQ ID NO: 2953579 - DNA, 25 bp, Homo sapien
tcctggtctgatactagctctgcac

SEQ ID NO: 2953580 - DNA, 25 bp, Homo sapien
aaacaatgaatgtagtcccctggag

SEQ ID NO: 2953581 - DNA, 25 bp, Homo sapien
ctgactgggagagccctgaaaccga

SEQ ID NO: 2953582 - DNA, 25 bp, Homo sapien
tacattccccgtgtctgtctgccat

SEQ ID NO: 2953583 - DNA, 25 bp, Homo sapien
tcgcattctggtactgcttctcctt

SEQ ID NO: 2953584 - DNA, 25 bp, Homo sapien
gcagagaacctcagaatacattccc

SEQ ID NO: 2953585 - DNA, 25 bp, Homo sapien
gtccttcgcattctggtactgcttc

SEQ ID NO: 2953586 - DNA, 25 bp, Homo sapien
gaactatggccgagtacagtgctgg

SEQ ID NO: 2953587 - DNA, 25 bp, Homo sapien
tgggagacttgcaacctgggattct

SEQ ID NO: 2953588 - DNA, 25 bp, Homo sapien
aagcaggttttggagtgatgccaca

SEQ ID NO: 2953589 - DNA, 25 bp, Homo sapien
tacagcctcgggatggagccttgtc

SEQ ID NO: 2953590 - DNA, 25 bp, Homo sapien
ggacactgggtcagaacgtgttctg

SEQ ID NO: 2953591 - DNA, 25 bp, Homo sapien
ggtgcctggccccttgtagtacatt

SEQ ID NO: 2953592 - DNA, 25 bp, Homo sapien
tttgagatgttattcaagtaaatgt

SEQ ID NO: 2953593 - DNA, 25 bp, Homo sapien
caggaagtacaaggtggcaagcagg

SEQ ID NO: 2953594 - DNA, 25 bp, Homo sapien
tggttgcctcgtctaatcaatggtg

SEQ ID NO: 2953595 - DNA, 25 bp, Homo sapien
gaacaagacaggcatgcatcaaaat

SEQ ID NO: 2953596 - DNA, 25 bp, Homo sapien
aaatgcacttggttgcctcgtctaa

SEQ ID NO: 2953597 - DNA, 25 bp, Homo sapien
caagacaggcatgcatcaaaataaa

SEQ ID NO: 2953598 - DNA, 25 bp, Homo sapien
tgttaacaacataaaccctggtcca

SEQ ID NO: 2953599 - DNA, 25 bp, Homo sapien
gctaagccttggctccctcatctat

SEQ ID NO: 2953600 - DNA, 25 bp, Homo sapien
cagctgtgcggccttcaagtcttta

SEQ ID NO: 2953601 - DNA, 25 bp, Homo sapien
cagcacttgcttatagtaaatgccg

SEQ ID NO: 2953602 - DNA, 25 bp, Homo sapien
gggaagccctgagcaaattgttaaa

SEQ ID NO: 2953603 - DNA, 25 bp, Homo sapien
gacaccttggtaacaggcaggtctg

SEQ ID NO: 2953604 - DNA, 25 bp, Homo sapien
ccagcaacaaagagtgggaagccct

SEQ ID NO: 2953605 - DNA, 25 bp, Homo sapien
acagttgataagcaaggccccttca

SEQ ID NO: 2953606 - DNA, 25 bp, Homo sapien
atgaggtagatcagattcccattcg

SEQ ID NO: 2953607 - DNA, 25 bp, Homo sapien
gatcagattcccattcgacgggcaa

SEQ ID NO: 2953608 - DNA, 25 bp, Homo sapien
ccattcgacgggcaaccagtcaatg

SEQ ID NO: 2953609 - DNA, 25 bp, Homo sapien
ccacatcctgactactaccgtatag

SEQ ID NO: 2953610 - DNA, 25 bp, Homo sapien
ccactgctgcaagaaaaagagtctt

SEQ ID NO: 2953611 - DNA, 25 bp, Homo sapien
acagcccctcaaaggcgacaagatc

SEQ ID NO: 2953612 - DNA, 25 bp, Homo sapien
aaggcgacaagatcttcctgtttgt

SEQ ID NO: 2953613 - DNA, 25 bp, Homo sapien
gtagaacctccaaagtcactttgag

SEQ ID NO: 2953614 - DNA, 25 bp, Homo sapien
gcggtgctgggtgcccgcgtctcgg

SEQ ID NO: 2953615 - DNA, 25 bp, Homo sapien
gtgcggtgctgggtgcccgcgtctc

SEQ ID NO: 2953616 - DNA, 25 bp, Homo sapien
tctggatgaagtgggcccaggtgcg

SEQ ID NO: 2953617 - DNA, 25 bp, Homo sapien
caggtgcggtgctgggtgcccgcgt

SEQ ID NO: 2953618 - DNA, 25 bp, Homo sapien
ctgtaagatgtcgggcctcttggtg

SEQ ID NO: 2953619 - DNA, 25 bp, Homo sapien
tggtggtgacacgtggcttgttgct

SEQ ID NO: 2953620 - DNA, 25 bp, Homo sapien
caaccttggagtcatggagctgtgt

SEQ ID NO: 2953621 - DNA, 25 bp, Homo sapien
gcaggaactcaaccttggagtcatg

SEQ ID NO: 2953622 - DNA, 25 bp, Homo sapien
tggtgttcttgaggagtttatttgg

SEQ ID NO: 2953623 - DNA, 25 bp, Homo sapien
tgtttggtttggtgttcttgaggag

SEQ ID NO: 2953624 - DNA, 25 bp, Homo sapien
tatttggtcacacccagggtgagag

SEQ ID NO: 2953625 - DNA, 25 bp, Homo sapien
tcttgaggagtttatttggtcacac

SEQ ID NO: 2953626 - DNA, 25 bp, Homo sapien
ggccattccgtttccttgctactga

SEQ ID NO: 2953627 - DNA, 25 bp, Homo sapien
tgtgtcagcaactcacacagaggca

SEQ ID NO: 2953628 - DNA, 25 bp, Homo sapien
agagcctgaagcgagtgctggccat

SEQ ID NO: 2953629 - DNA, 25 bp, Homo sapien
tcctctgcgatgttctgtgtgtcag

SEQ ID NO: 2953630 - DNA, 25 bp, Homo sapien
atggttgttgcattccacaactatc

SEQ ID NO: 2953631 - DNA, 25 bp, Homo sapien
gcattccacaactatcggtagatta

SEQ ID NO: 2953632 - DNA, 25 bp, Homo sapien
cattccacaactatcggtagattat

SEQ ID NO: 2953633 - DNA, 25 bp, Homo sapien
gttgttgcattccacaactatcggt

SEQ ID NO: 2953634 - DNA, 25 bp, Homo sapien
ttctcattggccgtaatatccccgc

SEQ ID NO: 2953635 - DNA, 25 bp, Homo sapien
cgcgtccccattggttgacgtcatc

SEQ ID NO: 2953636 - DNA, 25 bp, Homo sapien
gacgtcatcgattccccactcttat

SEQ ID NO: 2953637 - DNA, 25 bp, Homo sapien
cacaggagcttcgtggcaattcccg

SEQ ID NO: 2953638 - DNA, 25 bp, Homo sapien
gctttagcccttggtctcagcgctc

SEQ ID NO: 2953639 - DNA, 25 bp, Homo sapien
tttagcccttggtctcagcgctcag

SEQ ID NO: 2953640 - DNA, 25 bp, Homo sapien
cagctttagcccttggtctcagcgc

SEQ ID NO: 2953641 - DNA, 25 bp, Homo sapien
ctcccagctttagcccttggtctca

SEQ ID NO: 2953642 - DNA, 25 bp, Homo sapien
tcgcccggctcaaggtgacagactc

SEQ ID NO: 2953643 - DNA, 25 bp, Homo sapien
gcccggctcaaggtgacagactcac

SEQ ID NO: 2953644 - DNA, 25 bp, Homo sapien
gctcgcccggctcaaggtgacagac

SEQ ID NO: 2953645 - DNA, 25 bp, Homo sapien
tgcttggcccacagcgctcgcccgg

SEQ ID NO: 2953646 - DNA, 25 bp, Homo sapien
tctagattgccatagcctctcccag

SEQ ID NO: 2953647 - DNA, 25 bp, Homo sapien
cccagccgaggcagtcaatcgttca

SEQ ID NO: 2953648 - DNA, 25 bp, Homo sapien
caggtgtcgcgcaggatcctgccca

SEQ ID NO: 2953649 - DNA, 25 bp, Homo sapien
cattaccgttggtaattaacattca

SEQ ID NO: 2953650 - DNA, 25 bp, Homo sapien
aagggaatggtctctcgggaagact

SEQ ID NO: 2953651 - DNA, 25 bp, Homo sapien
gcaaagtcatggagatcggaagtca

SEQ ID NO: 2953652 - DNA, 25 bp, Homo sapien
tgcttataatgacgacctttggtcg

SEQ ID NO: 2953653 - DNA, 25 bp, Homo sapien
gagaccctggttgtttgcttataat

SEQ ID NO: 2953654 - DNA, 25 bp, Homo sapien
tggagaaatgaataatgccccggcg

SEQ ID NO: 2953655 - DNA, 25 bp, Homo sapien
aaatgaataatgccccggcggtctg

SEQ ID NO: 2953656 - DNA, 25 bp, Homo sapien
gagaaatgaataatgccccggcggt

SEQ ID NO: 2953657 - DNA, 25 bp, Homo sapien
agaaatgaataatgccccggcggtc

SEQ ID NO: 2953658 - DNA, 25 bp, Homo sapien
cctaaatggagtgggccagtcagcc

SEQ ID NO: 2953659 - DNA, 25 bp, Homo sapien
caaatggtctaaggtgcagcctagg

SEQ ID NO: 2953660 - DNA, 25 bp, Homo sapien
tagccatccaaggagagccatctgt

SEQ ID NO: 2953661 - DNA, 25 bp, Homo sapien
tcattaaacactgatggcgtccaca

SEQ ID NO: 2953662 - DNA, 25 bp, Homo sapien
aggaggcagacacaggcctgattag

SEQ ID NO: 2953663 - DNA, 25 bp, Homo sapien
ggcagacacaggcctgattagaccc

SEQ ID NO: 2953664 - DNA, 25 bp, Homo sapien
gaggcagacacaggcctgattagac

SEQ ID NO: 2953665 - DNA, 25 bp, Homo sapien
ctattcaagaaggaggcagacacag

SEQ ID NO: 2953666 - DNA, 25 bp, Homo sapien
aggcaacttaagctgaaggacccct

SEQ ID NO: 2953667 - DNA, 25 bp, Homo sapien
tagaactattaaagcatacagattc

SEQ ID NO: 2953668 - DNA, 25 bp, Homo sapien
acccctgtctgggaacattccttga

SEQ ID NO: 2953669 - DNA, 25 bp, Homo sapien
cattcctaagagagctattcctccc

SEQ ID NO: 2953670 - DNA, 25 bp, Homo sapien
gcctggtaaatgcagaatactctga

SEQ ID NO: 2953671 - DNA, 25 bp, Homo sapien
gaaatttcatgggttaggcacacct

SEQ ID NO: 2953672 - DNA, 25 bp, Homo sapien
cagcagacaggactagggaaatttc

SEQ ID NO: 2953673 - DNA, 25 bp, Homo sapien
tagtatggcataaggacaggtggct

SEQ ID NO: 2953674 - DNA, 25 bp, Homo sapien
tggagtgggaagttgctgtaggaag

SEQ ID NO: 2953675 - DNA, 25 bp, Homo sapien
ggagtgggaagttgctgtaggaagg

SEQ ID NO: 2953676 - DNA, 25 bp, Homo sapien
ctggagtgggaagttgctgtaggaa

SEQ ID NO: 2953677 - DNA, 25 bp, Homo sapien
tgatcaagctgccaaacacggttcc

SEQ ID NO: 2953678 - DNA, 25 bp, Homo sapien
aatgtcccgggagacaacactggtc

SEQ ID NO: 2953679 - DNA, 25 bp, Homo sapien
tcaagctgccaaacacggttccaat

SEQ ID NO: 2953680 - DNA, 25 bp, Homo sapien
gctgccccagcaccaataaacttgg

SEQ ID NO: 2953681 - DNA, 25 bp, Homo sapien
cagagtgggccaacctggtaagttt

SEQ ID NO: 2953682 - DNA, 25 bp, Homo sapien
gtaagtttaagtgagccaggctgga

SEQ ID NO: 2953683 - DNA, 25 bp, Homo sapien
gatgaaatcaacctgaaggctcctg

SEQ ID NO: 2953684 - DNA, 25 bp, Homo sapien
agagggcctagcctgcacagatcct

SEQ ID NO: 2953685 - DNA, 25 bp, Homo sapien
tgaggaaggcgaccatcaaacagaa

SEQ ID NO: 2953686 - DNA, 25 bp, Homo sapien
ggaaggcgaccatcaaacagaaaag

SEQ ID NO: 2953687 - DNA, 25 bp, Homo sapien
agaggatgaggaaggcgaccatcaa

SEQ ID NO: 2953688 - DNA, 25 bp, Homo sapien
gatgaggaaggcgaccatcaaacag

SEQ ID NO: 2953689 - DNA, 25 bp, Homo sapien
tggagttgcagtagcaacaggccgg

SEQ ID NO: 2953690 - DNA, 25 bp, Homo sapien
gagttgcagtagcaacaggccggtg

SEQ ID NO: 2953691 - DNA, 25 bp, Homo sapien
tgcagtagcaacaggccggtgaccc

SEQ ID NO: 2953692 - DNA, 25 bp, Homo sapien
gttgcagtagcaacaggccggtgac

SEQ ID NO: 2953693 - DNA, 25 bp, Homo sapien
acacaccccagcaccaagaatggtg

SEQ ID NO: 2953694 - DNA, 25 bp, Homo sapien
ggtaaagcttaacacaccccagcac

SEQ ID NO: 2953695 - DNA, 25 bp, Homo sapien
aacacaccccagcaccaagaatggt

SEQ ID NO: 2953696 - DNA, 25 bp, Homo sapien
gtgtttaatggtaaagcttaacaca

SEQ ID NO: 2953697 - DNA, 25 bp, Homo sapien
aaagatagagcaaccaccttccctg

SEQ ID NO: 2953698 - DNA, 25 bp, Homo sapien
tttcacaggaaagatagagcaacca

SEQ ID NO: 2953699 - DNA, 25 bp, Homo sapien
caggaaagatagagcaaccaccttc

SEQ ID NO: 2953700 - DNA, 25 bp, Homo sapien
tcacaggaaagatagagcaaccacc

SEQ ID NO: 2953701 - DNA, 25 bp, Homo sapien
tattgcaacgcttgccaaacgttga

SEQ ID NO: 2953702 - DNA, 25 bp, Homo sapien
caacctgtgtgtcttattgcaacgc

SEQ ID NO: 2953703 - DNA, 25 bp, Homo sapien
caacgcttgccaaacgttgacgttc

SEQ ID NO: 2953704 - DNA, 25 bp, Homo sapien
gtgtcttattgcaacgcttgccaaa

SEQ ID NO: 2953705 - DNA, 25 bp, Homo sapien
tttcatctttgagccttggcactcc

SEQ ID NO: 2953706 - DNA, 25 bp, Homo sapien
cctcttgtgcttggcagggtagcca

SEQ ID NO: 2953707 - DNA, 25 bp, Homo sapien
tatacttcctcttgtgcttggcagg

SEQ ID NO: 2953708 - DNA, 25 bp, Homo sapien
acttcctcttgtgcttggcagggta

SEQ ID NO: 2953709 - DNA, 25 bp, Homo sapien
tctcccccctccaagcctttgccca

SEQ ID NO: 2953710 - DNA, 25 bp, Homo sapien
ctcccccctccaagcctttgcccat

SEQ ID NO: 2953711 - DNA, 25 bp, Homo sapien
ccacacatccggcaggaaaggcggc

SEQ ID NO: 2953712 - DNA, 25 bp, Homo sapien
tgccgctaacgccaacaacaccagc

SEQ ID NO: 2953713 - DNA, 25 bp, Homo sapien
tcagtcggactctccgccatcgctg

SEQ ID NO: 2953714 - DNA, 25 bp, Homo sapien
cttccgggactactcggcagcacgt

SEQ ID NO: 2953715 - DNA, 25 bp, Homo sapien
gtcccagtggctaagcagcgcggcc

SEQ ID NO: 2953716 - DNA, 25 bp, Homo sapien
tgcgctcgccgtcccagtcggagct

SEQ ID NO: 2953717 - DNA, 25 bp, Homo sapien
cgcttgatccggagtagacactgcg

SEQ ID NO: 2953718 - DNA, 25 bp, Homo sapien
tgatccggagtagacactgcggcgc

SEQ ID NO: 2953719 - DNA, 25 bp, Homo sapien
ggggcggggtcggatctgggcacac

SEQ ID NO: 2953720 - DNA, 25 bp, Homo sapien
gtcggatctgggcacacgaggcggg

SEQ ID NO: 2953721 - DNA, 25 bp, Homo sapien
tcgaggggcggggtcggatctgggc

SEQ ID NO: 2953722 - DNA, 25 bp, Homo sapien
cggggtcggatctgggcacacgagg

SEQ ID NO: 2953723 - DNA, 25 bp, Homo sapien
tacaagaaagaagctcctgagtggg

SEQ ID NO: 2953724 - DNA, 25 bp, Homo sapien
agtttcagttagaggtggcaatccc

SEQ ID NO: 2953725 - DNA, 25 bp, Homo sapien
gattaatagctaaagagcactgccc

SEQ ID NO: 2953726 - DNA, 25 bp, Homo sapien
tattacaatccagagtggcactggg

SEQ ID NO: 2953727 - DNA, 25 bp, Homo sapien
taactggaaaggcatcatcaactcc

SEQ ID NO: 2953728 - DNA, 25 bp, Homo sapien
gagaaagtggtgcttggtaccgcaa

SEQ ID NO: 2953729 - DNA, 25 bp, Homo sapien
gacagttgttatcacctcaatgagg

SEQ ID NO: 2953730 - DNA, 25 bp, Homo sapien
gatcccaatggcatcaaatgtcagc

SEQ ID NO: 2953731 - DNA, 25 bp, Homo sapien
caggtacaacgaacattcctggagg

SEQ ID NO: 2953732 - DNA, 25 bp, Homo sapien
cgaacattcctggaggaggctcctt

SEQ ID NO: 2953733 - DNA, 25 bp, Homo sapien
gaggaggctccttataaatggacat

SEQ ID NO: 2953734 - DNA, 25 bp, Homo sapien
tgtcaacagtatcaggtacaacgaa

SEQ ID NO: 2953735 - DNA, 25 bp, Homo sapien
ttgcaaccttatggcccccaatttc

SEQ ID NO: 2953736 - DNA, 25 bp, Homo sapien
tgcaaccttatggcccccaatttcc

SEQ ID NO: 2953737 - DNA, 25 bp, Homo sapien
taaactcaactggtctcaacatggc

SEQ ID NO: 2953738 - DNA, 25 bp, Homo sapien
gagcccaaggcgaaaactgaatcta

SEQ ID NO: 2953739 - DNA, 25 bp, Homo sapien
cagtgccagtaacacagcagggtta

SEQ ID NO: 2953740 - DNA, 25 bp, Homo sapien
taacactggtacttgactgaggacg

SEQ ID NO: 2953741 - DNA, 25 bp, Homo sapien
ggacaccgaaacacgaacaggaaga

SEQ ID NO: 2953742 - DNA, 25 bp, Homo sapien
tagaatactcaagcagactttccca

SEQ ID NO: 2953743 - DNA, 25 bp, Homo sapien
cactgtgttattgcccgttgtcatc

SEQ ID NO: 2953744 - DNA, 25 bp, Homo sapien
tgtcatcagtttgacccgaggtggg

SEQ ID NO: 2953745 - DNA, 25 bp, Homo sapien
tactagtcacataccatcctgagga

SEQ ID NO: 2953746 - DNA, 25 bp, Homo sapien
gaaactgctcggctacaagttccca

SEQ ID NO: 2953747 - DNA, 25 bp, Homo sapien
tgtaggtctaagatagggccccaga

SEQ ID NO: 2953748 - DNA, 25 bp, Homo sapien
gggactccggttgataaaggctgac

SEQ ID NO: 2953749 - DNA, 25 bp, Homo sapien
agacggggtttcgccaggctaggct

SEQ ID NO: 2953750 - DNA, 25 bp, Homo sapien
acggggtttcgccaggctaggctgg

SEQ ID NO: 2953751 - DNA, 25 bp, Homo sapien
gacggggtttcgccaggctaggctg

SEQ ID NO: 2953752 - DNA, 25 bp, Homo sapien
gagacggggtttcgccaggctaggc

SEQ ID NO: 2953753 - DNA, 25 bp, Homo sapien
ctgtaaacacatcagaaggaatgga

SEQ ID NO: 2953754 - DNA, 25 bp, Homo sapien
tcatcagggactggatagagatgag

SEQ ID NO: 2953755 - DNA, 25 bp, Homo sapien
tgataggggttctcagtcatcaggg

SEQ ID NO: 2953756 - DNA, 25 bp, Homo sapien
caaagccgggctcattgtgataggg

SEQ ID NO: 2953757 - DNA, 25 bp, Homo sapien
cagggactggatagagatgagcact

SEQ ID NO: 2953758 - DNA, 25 bp, Homo sapien
tctgatggtctcgtgccggatacat

SEQ ID NO: 2953759 - DNA, 25 bp, Homo sapien
ctcgtgccggatacattcattatag

SEQ ID NO: 2953760 - DNA, 25 bp, Homo sapien
ttccatcatgtcacagactgcaact

SEQ ID NO: 2953761 - DNA, 25 bp, Homo sapien
gactgcaactctgatggtctcgtgc

SEQ ID NO: 2953762 - DNA, 25 bp, Homo sapien
ctcgtagaagtcgtaatactccaga

SEQ ID NO: 2953763 - DNA, 25 bp, Homo sapien
aggtgcaggcgatctttgcaggcca

SEQ ID NO: 2953764 - DNA, 25 bp, Homo sapien
ctgcatagtttggccttgaaggtgc

SEQ ID NO: 2953765 - DNA, 25 bp, Homo sapien
tgcaggccacctcgtagaagtcgta

SEQ ID NO: 2953766 - DNA, 25 bp, Homo sapien
tttctgacgtatcagtcccaggcgc

SEQ ID NO: 2953767 - DNA, 25 bp, Homo sapien
tcaggctcccatgaaggtctgtctc

SEQ ID NO: 2953768 - DNA, 25 bp, Homo sapien
tgtcccagatgaactgctatcagag

SEQ ID NO: 2953769 - DNA, 25 bp, Homo sapien
tggtagtcaaagtggccccgcttct

SEQ ID NO: 2953770 - DNA, 25 bp, Homo sapien
tgaggccctgcatcacaagaatcgc

SEQ ID NO: 2953771 - DNA, 25 bp, Homo sapien
caaaattatgctggcctgtgggaaa

SEQ ID NO: 2953772 - DNA, 25 bp, Homo sapien
cagcttcttacggtgccatgcaggc

SEQ ID NO: 2953773 - DNA, 25 bp, Homo sapien
cacaccctgggatcggagcttgctt

SEQ ID NO: 2953774 - DNA, 25 bp, Homo sapien
tccaccatgttatgcaagtcttcgg

SEQ ID NO: 2953775 - DNA, 25 bp, Homo sapien
ctaacagttccaggcctaggtgagg

SEQ ID NO: 2953776 - DNA, 25 bp, Homo sapien
gactgccagagcatggaccccattt

SEQ ID NO: 2953777 - DNA, 25 bp, Homo sapien
tttagcaggatatagcctgggccca

SEQ ID NO: 2953778 - DNA, 25 bp, Homo sapien
tagtgattgccaggtccctctagcc

SEQ ID NO: 2953779 - DNA, 25 bp, Homo sapien
tgtaggtcatctgcaagttcatgga

SEQ ID NO: 2953780 - DNA, 25 bp, Homo sapien
gattaacacagagaacggcaagcac

SEQ ID NO: 2953781 - DNA, 25 bp, Homo sapien
gaaaacctcgctcgttcagtaagca

SEQ ID NO: 2953782 - DNA, 25 bp, Homo sapien
caaaggtagctaaacagtgatctct

SEQ ID NO: 2953783 - DNA, 25 bp, Homo sapien
tttccagctctaggaactgagtcta

SEQ ID NO: 2953784 - DNA, 25 bp, Homo sapien
tgatattggacagaaaccacccatt

SEQ ID NO: 2953785 - DNA, 25 bp, Homo sapien
caatcatgtttgctacccggaataa

SEQ ID NO: 2953786 - DNA, 25 bp, Homo sapien
gaagaatggctacgtgactgtcagt

SEQ ID NO: 2953787 - DNA, 25 bp, Homo sapien
gaaggaagcccagcacttctctgaa

SEQ ID NO: 2953788 - DNA, 25 bp, Homo sapien
tcttaaatgggagaccgagcgagcg

SEQ ID NO: 2953789 - DNA, 25 bp, Homo sapien
gaaggctactgctgccatgctagaa

SEQ ID NO: 2953790 - DNA, 25 bp, Homo sapien
tctgtcatgctgaaagtcacttctc

SEQ ID NO: 2953791 - DNA, 25 bp, Homo sapien
ctgtgttctctcatgcttgacagct

SEQ ID NO: 2953792 - DNA, 25 bp, Homo sapien
cgctggaacctttaaacattttctg

SEQ ID NO: 2953793 - DNA, 25 bp, Homo sapien
tctctctccccgctggaacctttaa

SEQ ID NO: 2953794 - DNA, 25 bp, Homo sapien
gcagggcaagggctgaatatttaaa

SEQ ID NO: 2953795 - DNA, 25 bp, Homo sapien
tgtcatgctctagagtgctttgcag

SEQ ID NO: 2953796 - DNA, 25 bp, Homo sapien
gctttgcagaagtctaactcagtat

SEQ ID NO: 2953797 - DNA, 25 bp, Homo sapien
tctttgggtagccagactctttgat

SEQ ID NO: 2953798 - DNA, 25 bp, Homo sapien
gagcagctacagtgcaaagcactgg

SEQ ID NO: 2953799 - DNA, 25 bp, Homo sapien
ttgagcagctacagtgcaaagcact

SEQ ID NO: 2953800 - DNA, 25 bp, Homo sapien
ttattgagcagctacagtgcaaagc

SEQ ID NO: 2953801 - DNA, 25 bp, Homo sapien
tattgagcagctacagtgcaaagca

SEQ ID NO: 2953802 - DNA, 25 bp, Homo sapien
tcagctcgtgctccccattatgcag

SEQ ID NO: 2953803 - DNA, 25 bp, Homo sapien
gagctcaatatggatcacaccgtgg

SEQ ID NO: 2953804 - DNA, 25 bp, Homo sapien
tcttttgctgagactatccagtgga

SEQ ID NO: 2953805 - DNA, 25 bp, Homo sapien
cagctggcagaggtactggtgcacc

SEQ ID NO: 2953806 - DNA, 25 bp, Homo sapien
gagggtggctaggtcctgtgaactg

SEQ ID NO: 2953807 - DNA, 25 bp, Homo sapien
tacgaactaggtgtccaaattatcg

SEQ ID NO: 2953808 - DNA, 25 bp, Homo sapien
atcgaagtgtgcctggcgctgaagc

SEQ ID NO: 2953809 - DNA, 25 bp, Homo sapien
cctggcgctgaagcatcggaatgga

SEQ ID NO: 2953810 - DNA, 25 bp, Homo sapien
gcgcctacgtgggtggaatgcacaa

SEQ ID NO: 2953811 - DNA, 25 bp, Homo sapien
tatggaaccttggatggccaacaca

SEQ ID NO: 2953812 - DNA, 25 bp, Homo sapien
catttgatgacctccaggcagtgga

SEQ ID NO: 2953813 - DNA, 25 bp, Homo sapien
tcaaggcgcttggtagtcagaatcc

SEQ ID NO: 2953814 - DNA, 25 bp, Homo sapien
gactctggaaactgctccatccttc

SEQ ID NO: 2953815 - DNA, 25 bp, Homo sapien
cctcatcagtctgagagtttcttgc

SEQ ID NO: 2953816 - DNA, 25 bp, Homo sapien
ctcctcatcagtctgagagtttctt

SEQ ID NO: 2953817 - DNA, 25 bp, Homo sapien
gctgtagtatcacgtcttacaacac

SEQ ID NO: 2953818 - DNA, 25 bp, Homo sapien
gagagtttcttgctgtagtatcacg

SEQ ID NO: 2953819 - DNA, 25 bp, Homo sapien
cccagaagttgtcccgagcccaggg

SEQ ID NO: 2953820 - DNA, 25 bp, Homo sapien
aaacccctccgagagggctggtgtg

SEQ ID NO: 2953821 - DNA, 25 bp, Homo sapien
agacggacgacacggcgcagcttct

SEQ ID NO: 2953822 - DNA, 25 bp, Homo sapien
cggcaggagccgcaaactttctttg

SEQ ID NO: 2953823 - DNA, 25 bp, Homo sapien
aaggcgtagccggatttgaccaaga

SEQ ID NO: 2953824 - DNA, 25 bp, Homo sapien
gtcacgctctcgttgaggttgccga

SEQ ID NO: 2953825 - DNA, 25 bp, Homo sapien
taggagatcttgtgctccgcaaaca

SEQ ID NO: 2953826 - DNA, 25 bp, Homo sapien
ttgaccaagaactggccgctgtagg

SEQ ID NO: 2953827 - DNA, 25 bp, Homo sapien
tgagtggatcgctctggaatcccga

SEQ ID NO: 2953828 - DNA, 25 bp, Homo sapien
gaatcccgatttgggaaaggtgcga

SEQ ID NO: 2953829 - DNA, 25 bp, Homo sapien
catttgtgtgggtgcgctgcctaca

SEQ ID NO: 2953830 - DNA, 25 bp, Homo sapien
agggctccccgttcctcagaaagtg

SEQ ID NO: 2953831 - DNA, 25 bp, Homo sapien
gaatgttcaatctctaagcgttttc

SEQ ID NO: 2953832 - DNA, 25 bp, Homo sapien
ttgttttttgggcaccgaatgttca

SEQ ID NO: 2953833 - DNA, 25 bp, Homo sapien
ttttgggcaccgaatgttcaatctc

SEQ ID NO: 2953834 - DNA, 25 bp, Homo sapien
caccgaatgttcaatctctaagcgt

SEQ ID NO: 2953835 - DNA, 25 bp, Homo sapien
cagatggtcccctggtaacaatggg

SEQ ID NO: 2953836 - DNA, 25 bp, Homo sapien
gatggtcccctggtaacaatgggct

SEQ ID NO: 2953837 - DNA, 25 bp, Homo sapien
aaaggatagtacagccaaggcatat

SEQ ID NO: 2953838 - DNA, 25 bp, Homo sapien
gggctcgaaaaggatagtacagcca

SEQ ID NO: 2953839 - DNA, 25 bp, Homo sapien
atccaccatgaattctcggtaagta

SEQ ID NO: 2953840 - DNA, 25 bp, Homo sapien
gaattctcggtaagtatgatggagg

SEQ ID NO: 2953841 - DNA, 25 bp, Homo sapien
tgcaagatttgaaatccaccatgaa

SEQ ID NO: 2953842 - DNA, 25 bp, Homo sapien
caagatttgaaatccaccatgaatt

SEQ ID NO: 2953843 - DNA, 25 bp, Homo sapien
aaatttaaaccatcctcaagagcaa

SEQ ID NO: 2953844 - DNA, 25 bp, Homo sapien
tgctggtgtcagtgtatgttcctta

SEQ ID NO: 2953845 - DNA, 25 bp, Homo sapien
ttccaactcaaaaaagagccctcag

SEQ ID NO: 2953846 - DNA, 25 bp, Homo sapien
gagccctcagtaatgcattttggag

SEQ ID NO: 2953847 - DNA, 25 bp, Homo sapien
ggaggaggcataagagccacaaaga

SEQ ID NO: 2953848 - DNA, 25 bp, Homo sapien
tctcaaacgctgctgggccaaggag

SEQ ID NO: 2953849 - DNA, 25 bp, Homo sapien
taagagccacaaagactgagtgacc

SEQ ID NO: 2953850 - DNA, 25 bp, Homo sapien
ctctcaaacgctgctgggccaagga

SEQ ID NO: 2953851 - DNA, 25 bp, Homo sapien
agctggggtggaatatttcggattt

SEQ ID NO: 2953852 - DNA, 25 bp, Homo sapien
tggaatatttcggatttgaattttc

SEQ ID NO: 2953853 - DNA, 25 bp, Homo sapien
cccatcggagctggggtggaatatt

SEQ ID NO: 2953854 - DNA, 25 bp, Homo sapien
ttcccatcggagctggggtggaata

SEQ ID NO: 2953855 - DNA, 25 bp, Homo sapien
tctactgtaccatactgagccagca

SEQ ID NO: 2953856 - DNA, 25 bp, Homo sapien
actgtaccatactgagccagcaggc

SEQ ID NO: 2953857 - DNA, 25 bp, Homo sapien
ttgctcacagttctctactgtacca

SEQ ID NO: 2953858 - DNA, 25 bp, Homo sapien
cttgctcacagttctctactgtacc

SEQ ID NO: 2953859 - DNA, 25 bp, Homo sapien
tcccggttggaataggtgacattca

SEQ ID NO: 2953860 - DNA, 25 bp, Homo sapien
tgcctggtctgctcccggttggaat

SEQ ID NO: 2953861 - DNA, 25 bp, Homo sapien
actgccgtctcactctcggtgttca

SEQ ID NO: 2953862 - DNA, 25 bp, Homo sapien
ggtgacattcaccactgccgtctca

SEQ ID NO: 2953863 - DNA, 25 bp, Homo sapien
cacaaatttgcgtgccatcttcgcg

SEQ ID NO: 2953864 - DNA, 25 bp, Homo sapien
ttcacaaatttgcgtgccatcttcg

SEQ ID NO: 2953865 - DNA, 25 bp, Homo sapien
aaatttgcgtgccatcttcgcgcag

SEQ ID NO: 2953866 - DNA, 25 bp, Homo sapien
acaaatttgcgtgccatcttcgcgc

SEQ ID NO: 2953867 - DNA, 25 bp, Homo sapien
catcagagagttgttaaattaatct

SEQ ID NO: 2953868 - DNA, 25 bp, Homo sapien
ggtgttgaagcagcaattgaggaat

SEQ ID NO: 2953869 - DNA, 25 bp, Homo sapien
tcagggcaacccatcagagagttgt

SEQ ID NO: 2953870 - DNA, 25 bp, Homo sapien
tctgccaggttgaacgccatcgtgg

SEQ ID NO: 2953871 - DNA, 25 bp, Homo sapien
ccttgccaataatggcacccacata

SEQ ID NO: 2953872 - DNA, 25 bp, Homo sapien
cacccacatactgggtgggcaccag

SEQ ID NO: 2953873 - DNA, 25 bp, Homo sapien
ccttcagggcatggttctccaactg

SEQ ID NO: 2953874 - DNA, 25 bp, Homo sapien
ttttgtgatgttgcggatggtggcc

SEQ ID NO: 2953875 - DNA, 25 bp, Homo sapien
ggtgtccttagcctctttatgcata

SEQ ID NO: 2953876 - DNA, 25 bp, Homo sapien
atcttacaagcggaggagcagccct

SEQ ID NO: 2953877 - DNA, 25 bp, Homo sapien
gcgttctccttcctatgcacgtcta

SEQ ID NO: 2953878 - DNA, 25 bp, Homo sapien
tatgcataatctccaagatcatctt

SEQ ID NO: 2953879 - DNA, 25 bp, Homo sapien
ggttccgtccttccttgccaatgag

SEQ ID NO: 2953880 - DNA, 25 bp, Homo sapien
gatggtgatttttgtctcggtatct

SEQ ID NO: 2953881 - DNA, 25 bp, Homo sapien
gagacgccctacaaagttattatgg

SEQ ID NO: 2953882 - DNA, 25 bp, Homo sapien
gatcttcaggggaacctcgtcagcc

SEQ ID NO: 2953883 - DNA, 25 bp, Homo sapien
tcggccctgcaacaattctcgatgg

SEQ ID NO: 2953884 - DNA, 25 bp, Homo sapien
cataggcctcccgaactttcttcat

SEQ ID NO: 2953885 - DNA, 25 bp, Homo sapien
tcattatttcctgctcggccctgca

SEQ ID NO: 2953886 - DNA, 25 bp, Homo sapien
taggcctcccgaactttcttcatta

SEQ ID NO: 2953887 - DNA, 25 bp, Homo sapien
cagtaacgctgctgggaggcggcgg

SEQ ID NO: 2953888 - DNA, 25 bp, Homo sapien
gcgggactgcgctggatgaagctgg

SEQ ID NO: 2953889 - DNA, 25 bp, Homo sapien
acagcagccaggttcaggccaggga

SEQ ID NO: 2953890 - DNA, 25 bp, Homo sapien
taacgctgctgggaggcggcgggac

SEQ ID NO: 2953891 - DNA, 25 bp, Homo sapien
gggcggggataaacacctgcaccat

SEQ ID NO: 2953892 - DNA, 25 bp, Homo sapien
aaaccgggagagctgtttgatgtgc

SEQ ID NO: 2953893 - DNA, 25 bp, Homo sapien
ttgatggaggcgctggcaaaccggg

SEQ ID NO: 2953894 - DNA, 25 bp, Homo sapien
tgcctgggcggggataaacacctgc

SEQ ID NO: 2953895 - DNA, 25 bp, Homo sapien
gatgataaccatacgaactttggag

SEQ ID NO: 2953896 - DNA, 25 bp, Homo sapien
tctggcggtccagtgatgataacca

SEQ ID NO: 2953897 - DNA, 25 bp, Homo sapien
cttgaattgggcctctggcggtcca

SEQ ID NO: 2953898 - DNA, 25 bp, Homo sapien
agtcaggtgtttcgggtggtgcaat

SEQ ID NO: 2953899 - DNA, 25 bp, Homo sapien
caattcctccatgttcagcttggaa

SEQ ID NO: 2953900 - DNA, 25 bp, Homo sapien
ctcaattcctccatgttcagcttgg

SEQ ID NO: 2953901 - DNA, 25 bp, Homo sapien
tcctccatgttcagcttggaaaaca

SEQ ID NO: 2953902 - DNA, 25 bp, Homo sapien
ccatgttcagcttggaaaacaataa

SEQ ID NO: 2953903 - DNA, 25 bp, Homo sapien
ggtgaagggcaaggctcaggtgggc

SEQ ID NO: 2953904 - DNA, 25 bp, Homo sapien
agctgctgatgctggcacacgtatg

SEQ ID NO: 2953905 - DNA, 25 bp, Homo sapien
ctccttgagtttgccatagattctt

SEQ ID NO: 2953906 - DNA, 25 bp, Homo sapien
tggcacacgtatgtgggtctccagc

SEQ ID NO: 2953907 - DNA, 25 bp, Homo sapien
caatgacccggccagctgctgatgc

SEQ ID NO: 2953908 - DNA, 25 bp, Homo sapien
gatgacctggtcgttctcatcaggg

SEQ ID NO: 2953909 - DNA, 25 bp, Homo sapien
gctgccgtcaaattctgcaactcgt

SEQ ID NO: 2953910 - DNA, 25 bp, Homo sapien
gggtctggtctcttggtactaccac

SEQ ID NO: 2953911 - DNA, 25 bp, Homo sapien
ctgactggcatagaaatgtccgatg

SEQ ID NO: 2953912 - DNA, 25 bp, Homo sapien
tgcctccagtggagcctgagtatcc

SEQ ID NO: 2953913 - DNA, 25 bp, Homo sapien
gcctccagtggagcctgagtatccc

SEQ ID NO: 2953914 - DNA, 25 bp, Homo sapien
gccaggatgtctcggatcttccgtt

SEQ ID NO: 2953915 - DNA, 25 bp, Homo sapien
tgtctcggatcttccgttgagccat

SEQ ID NO: 2953916 - DNA, 25 bp, Homo sapien
ggatgtctcggatcttccgttgagc

SEQ ID NO: 2953917 - DNA, 25 bp, Homo sapien
caggatgtctcggatcttccgttga

SEQ ID NO: 2953918 - DNA, 25 bp, Homo sapien
ctgggcctggttactctgtcccttc

SEQ ID NO: 2953919 - DNA, 25 bp, Homo sapien
cacgtttaaaagtgccttgcgctag

SEQ ID NO: 2953920 - DNA, 25 bp, Homo sapien
ttctcaatcaagtgggcaaacctga

SEQ ID NO: 2953921 - DNA, 25 bp, Homo sapien
cgctagaatttctgacaccccgagg

SEQ ID NO: 2953922 - DNA, 25 bp, Homo sapien
ggattcccactcattctcaggcctg

SEQ ID NO: 2953923 - DNA, 25 bp, Homo sapien
taaaatccgcctgagaacgatggga

SEQ ID NO: 2953924 - DNA, 25 bp, Homo sapien
taggaaccagcccttatgggagcac

SEQ ID NO: 2953925 - DNA, 25 bp, Homo sapien
gacataatgtgaaacctacacggga

SEQ ID NO: 2953926 - DNA, 25 bp, Homo sapien
catggaaccgagactttatcaaggg

SEQ ID NO: 2953927 - DNA, 25 bp, Homo sapien
caagggctaaacactccatgggatc

SEQ ID NO: 2953928 - DNA, 25 bp, Homo sapien
tatattaggaggagaggcctaacct

SEQ ID NO: 2953929 - DNA, 25 bp, Homo sapien
gaggtagtttacttcgcacacagca

SEQ ID NO: 2953930 - DNA, 25 bp, Homo sapien
tgactacgcccacatgttgcggttg

SEQ ID NO: 2953931 - DNA, 25 bp, Homo sapien
tactggctcatgttgtaagaaatta

SEQ ID NO: 2953932 - DNA, 25 bp, Homo sapien
ctctgggctctctcaaacctgggcc

SEQ ID NO: 2953933 - DNA, 25 bp, Homo sapien
gagatcagggccaaacaaggctctg

SEQ ID NO: 2953934 - DNA, 25 bp, Homo sapien
caggcctgttctccatagagagttc

SEQ ID NO: 2953935 - DNA, 25 bp, Homo sapien
caggtaggatattccagcagccgcc

SEQ ID NO: 2953936 - DNA, 25 bp, Homo sapien
aggtaggatattccagcagccgcca

SEQ ID NO: 2953937 - DNA, 25 bp, Homo sapien
gcccccagctccactaggcctttta

SEQ ID NO: 2953938 - DNA, 25 bp, Homo sapien
ccagctccactaggccttttaatcc

SEQ ID NO: 2953939 - DNA, 25 bp, Homo sapien
taacctaagcaagtggagctgccac

SEQ ID NO: 2953940 - DNA, 25 bp, Homo sapien
ccattgaagactgaaaaagggccca

SEQ ID NO: 2953941 - DNA, 25 bp, Homo sapien
gaaggcacccttgagagctaactga

SEQ ID NO: 2953942 - DNA, 25 bp, Homo sapien
gaaatggcttttatgtcccctggca

SEQ ID NO: 2953943 - DNA, 25 bp, Homo sapien
ggagtgttcgttcatccatcaaaga

SEQ ID NO: 2953944 - DNA, 25 bp, Homo sapien
gctgaaacaaccttcacgggaaaga

SEQ ID NO: 2953945 - DNA, 25 bp, Homo sapien
gaacaaactccaacgtgtgagccag

SEQ ID NO: 2953946 - DNA, 25 bp, Homo sapien
gaaggatacaatcaaaatcgggtgg

SEQ ID NO: 2953947 - DNA, 25 bp, Homo sapien
gattacttcattgatttcactgatg

SEQ ID NO: 2953948 - DNA, 25 bp, Homo sapien
gatctgattacttcattgatttcac

SEQ ID NO: 2953949 - DNA, 25 bp, Homo sapien
cagcgcagatctgattacttcattg

SEQ ID NO: 2953950 - DNA, 25 bp, Homo sapien
acttcattgatttcactgatgttca

SEQ ID NO: 2953951 - DNA, 25 bp, Homo sapien
tactgtccctcaacagaattcctct

SEQ ID NO: 2953952 - DNA, 25 bp, Homo sapien
ccgttgcagggtagataatcactct

SEQ ID NO: 2953953 - DNA, 25 bp, Homo sapien
gttctccccatgtacgtgttaataa

SEQ ID NO: 2953954 - DNA, 25 bp, Homo sapien
catggtgtataagcttctgaatccc

SEQ ID NO: 2953955 - DNA, 25 bp, Homo sapien
gaccaaagtgcagcctgtttaatga

SEQ ID NO: 2953956 - DNA, 25 bp, Homo sapien
tacaaacagccagtatcaagtgctg

SEQ ID NO: 2953957 - DNA, 25 bp, Homo sapien
cttggaagattttagcacagttgac

SEQ ID NO: 2953958 - DNA, 25 bp, Homo sapien
tcttgttacccctatgaggctggct

SEQ ID NO: 2953959 - DNA, 25 bp, Homo sapien
acttgtaactgttgctagatggagc

SEQ ID NO: 2953960 - DNA, 25 bp, Homo sapien
caggacaacttgaatttatgctccc

SEQ ID NO: 2953961 - DNA, 25 bp, Homo sapien
caggttgcaatcctcagtcttggcc

SEQ ID NO: 2953962 - DNA, 25 bp, Homo sapien
tagatggagcatatatattcaggac

SEQ ID NO: 2953963 - DNA, 25 bp, Homo sapien
atgtgcatatatcttcagcttcatt

SEQ ID NO: 2953964 - DNA, 25 bp, Homo sapien
ctctggcactggtcttgcggggcca

SEQ ID NO: 2953965 - DNA, 25 bp, Homo sapien
tggcactggtcttgcggggccaaag

SEQ ID NO: 2953966 - DNA, 25 bp, Homo sapien
tggtcttgcggggccaaaggacaaa

SEQ ID NO: 2953967 - DNA, 25 bp, Homo sapien
cttgcggggccaaaggacaaactct

SEQ ID NO: 2953968 - DNA, 25 bp, Homo sapien
cgtgcggccacataacgcctgtgtg

SEQ ID NO: 2953969 - DNA, 25 bp, Homo sapien
tgaatccttctaacgggcagggacc

SEQ ID NO: 2953970 - DNA, 25 bp, Homo sapien
ggcagggacccgtgcggccacataa

SEQ ID NO: 2953971 - DNA, 25 bp, Homo sapien
tccacacctactgtcctggcaaaag

SEQ ID NO: 2953972 - DNA, 25 bp, Homo sapien
tgtccccgtgccctccaacctcgcg

SEQ ID NO: 2953973 - DNA, 25 bp, Homo sapien
gtgccctccaacctcgcggccttga

SEQ ID NO: 2953974 - DNA, 25 bp, Homo sapien
ttcctcgctatgctgtgtccccgtg

SEQ ID NO: 2953975 - DNA, 25 bp, Homo sapien
cggccttgacccacccgcagctcat

SEQ ID NO: 2953976 - DNA, 25 bp, Homo sapien
gccgccctcagactgccggatgtca

SEQ ID NO: 2953977 - DNA, 25 bp, Homo sapien
tgccggatgtcacggagcctagcag

SEQ ID NO: 2953978 - DNA, 25 bp, Homo sapien
ccgcccgaagtcatcccgaatcccg

SEQ ID NO: 2953979 - DNA, 25 bp, Homo sapien
ctcagactgccggatgtcacggagc

SEQ ID NO: 2953980 - DNA, 25 bp, Homo sapien
ctctcgctctgctctgccccgggga

SEQ ID NO: 2953981 - DNA, 25 bp, Homo sapien
tcgctctgctctgccccggggacac

SEQ ID NO: 2953982 - DNA, 25 bp, Homo sapien
gctctgctctgccccggggacactc

SEQ ID NO: 2953983 - DNA, 25 bp, Homo sapien
tctgctctgccccggggacactcac

SEQ ID NO: 2953984 - DNA, 25 bp, Homo sapien
gtgcagagttcgttccgcacgcgcc

SEQ ID NO: 2953985 - DNA, 25 bp, Homo sapien
gcagagttcgttccgcacgcgccgt

SEQ ID NO: 2953986 - DNA, 25 bp, Homo sapien
gggggtgcagagttcgttccgcacg

SEQ ID NO: 2953987 - DNA, 25 bp, Homo sapien
gggtgcagagttcgttccgcacgcg

SEQ ID NO: 2953988 - DNA, 25 bp, Homo sapien
ccacggaaaagccagcgctccccat

SEQ ID NO: 2953989 - DNA, 25 bp, Homo sapien
cgagacacattcccggccgcgagag

SEQ ID NO: 2953990 - DNA, 25 bp, Homo sapien
agaggccacttccacgtggaatttt

SEQ ID NO: 2953991 - DNA, 25 bp, Homo sapien
cgagccgattcccacactcgggcgt

SEQ ID NO: 2953992 - DNA, 25 bp, Homo sapien
cttgaggagccacagaaatctcgag

SEQ ID NO: 2953993 - DNA, 25 bp, Homo sapien
gaggttcctgagacgttcctcaggc

SEQ ID NO: 2953994 - DNA, 25 bp, Homo sapien
gcttgaaggaacatgcttccgaaca

SEQ ID NO: 2953995 - DNA, 25 bp, Homo sapien
cagattccatcgtaggaaaagaggt

SEQ ID NO: 2953996 - DNA, 25 bp, Homo sapien
gttcctcaggcagaagcttcagctt

SEQ ID NO: 2953997 - DNA, 25 bp, Homo sapien
ccctgctctttgttggcttcacatt

SEQ ID NO: 2953998 - DNA, 25 bp, Homo sapien
tgaaagttgtaacctccctgctctt

SEQ ID NO: 2953999 - DNA, 25 bp, Homo sapien
tcgctttcaccgctgggaggtcgct

SEQ ID NO: 2954000 - DNA, 25 bp, Homo sapien
ggaggtcgctctggccataggcatc

SEQ ID NO: 2954001 - DNA, 25 bp, Homo sapien
tctccggaggataacagatgtggtc

SEQ ID NO: 2954002 - DNA, 25 bp, Homo sapien
tagtcatcctatatggatccccggg

SEQ ID NO: 2954003 - DNA, 25 bp, Homo sapien
taatgtagcactaacacacaggatc

SEQ ID NO: 2954004 - DNA, 25 bp, Homo sapien
gattgaccaatcagcctcaactgag

SEQ ID NO: 2954005 - DNA, 25 bp, Homo sapien
cactccgtggactgggtacccaaag

SEQ ID NO: 2954006 - DNA, 25 bp, Homo sapien
gggaaccgtgtgcaggggcatcacc

SEQ ID NO: 2954007 - DNA, 25 bp, Homo sapien
tcacctccactccgtggactgggta

SEQ ID NO: 2954008 - DNA, 25 bp, Homo sapien
gggatgggaaccgtgtgcaggggca

SEQ ID NO: 2954009 - DNA, 25 bp, Homo sapien
tttcggggggctgtttgcctccaga

SEQ ID NO: 2954010 - DNA, 25 bp, Homo sapien
ttggaggtcttttctggggcttgca

SEQ ID NO: 2954011 - DNA, 25 bp, Homo sapien
agaagccatgagcccacaagcagaa

SEQ ID NO: 2954012 - DNA, 25 bp, Homo sapien
tgtttgcctccagaagccatgagcc

SEQ ID NO: 2954013 - DNA, 25 bp, Homo sapien
catagacgggggcatcgggtccttc

SEQ ID NO: 2954014 - DNA, 25 bp, Homo sapien
tagacgggggcatcgggtccttcaa

SEQ ID NO: 2954015 - DNA, 25 bp, Homo sapien
ctcatagacgggggcatcgggtcct

SEQ ID NO: 2954016 - DNA, 25 bp, Homo sapien
cgggggcatcgggtccttcaaactg

SEQ ID NO: 2954017 - DNA, 25 bp, Homo sapien
cttgaatctggacaggggctccgtc

SEQ ID NO: 2954018 - DNA, 25 bp, Homo sapien
gaatgaggacaggacaccaagtgca

SEQ ID NO: 2954019 - DNA, 25 bp, Homo sapien
agagcagccacagttgagggaatga

SEQ ID NO: 2954020 - DNA, 25 bp, Homo sapien
acaggggctccgtcaaaggctgaga

SEQ ID NO: 2954021 - DNA, 25 bp, Homo sapien
ctggtgtatgtcacgtgctgaagaa

SEQ ID NO: 2954022 - DNA, 25 bp, Homo sapien
cacactgtctgggacatcagcaagg

SEQ ID NO: 2954023 - DNA, 25 bp, Homo sapien
tctgggacatcagcaagggtgttca

SEQ ID NO: 2954024 - DNA, 25 bp, Homo sapien
ccggtcactggtagaaatgatcagc

SEQ ID NO: 2954025 - DNA, 25 bp, Homo sapien
tggggtcaatggcaatgtggggata

SEQ ID NO: 2954026 - DNA, 25 bp, Homo sapien
gggtcaatggcaatgtggggatagt

SEQ ID NO: 2954027 - DNA, 25 bp, Homo sapien
ctatggggtcaatggcaatgtgggg

SEQ ID NO: 2954028 - DNA, 25 bp, Homo sapien
ggtcaatggcaatgtggggatagta

SEQ ID NO: 2954029 - DNA, 25 bp, Homo sapien
ggtgcaaagcgcacagcatgatttg

SEQ ID NO: 2954030 - DNA, 25 bp, Homo sapien
caggtgcaaagcgcacagcatgatt

SEQ ID NO: 2954031 - DNA, 25 bp, Homo sapien
tgcaaagcgcacagcatgatttgtt

SEQ ID NO: 2954032 - DNA, 25 bp, Homo sapien
gcaaagcgcacagcatgatttgttc

SEQ ID NO: 2954033 - DNA, 25 bp, Homo sapien
ctggtccagggtcgtatagcttggg

SEQ ID NO: 2954034 - DNA, 25 bp, Homo sapien
cagggtcgtatagcttgggtatgac

SEQ ID NO: 2954035 - DNA, 25 bp, Homo sapien
tgacaggatggcggatggtcactgg

SEQ ID NO: 2954036 - DNA, 25 bp, Homo sapien
cggatggtcactggaaacttggcca

SEQ ID NO: 2954037 - DNA, 25 bp, Homo sapien
gtcatcagccactattacggtcaag

SEQ ID NO: 2954038 - DNA, 25 bp, Homo sapien
tcccaaagggcatagtgtaatactc

SEQ ID NO: 2954039 - DNA, 25 bp, Homo sapien
gaatactccggagcatgatcatgag

SEQ ID NO: 2954040 - DNA, 25 bp, Homo sapien
ggtcaagtctgggtaatactctcga

SEQ ID NO: 2954041 - DNA, 25 bp, Homo sapien
gagaaaatcatcgtccacccagaga

SEQ ID NO: 2954042 - DNA, 25 bp, Homo sapien
ggtctcctcgttgaagagaaaatca

SEQ ID NO: 2954043 - DNA, 25 bp, Homo sapien
cagagaacgtatttggtggtgacct

SEQ ID NO: 2954044 - DNA, 25 bp, Homo sapien
tgagatatggccaggttcctaccag

SEQ ID NO: 2954045 - DNA, 25 bp, Homo sapien
tctttggagtcgctccgtgtgggcc

SEQ ID NO: 2954046 - DNA, 25 bp, Homo sapien
gaagaagttgaccacgccactggtc

SEQ ID NO: 2954047 - DNA, 25 bp, Homo sapien
ttgcaggcggggatcaaagccaact

SEQ ID NO: 2954048 - DNA, 25 bp, Homo sapien
ctgagtgagccactcgttgcaggcg

SEQ ID NO: 2954049 - DNA, 25 bp, Homo sapien
tcttgaagtagtggagggccagctt

SEQ ID NO: 2954050 - DNA, 25 bp, Homo sapien
gccagcttgaactggacccgggtga

SEQ ID NO: 2954051 - DNA, 25 bp, Homo sapien
cactggagaccgagactggtgacct

SEQ ID NO: 2954052 - DNA, 25 bp, Homo sapien
gtagggtccctagcccatcaatgaa

SEQ ID NO: 2954053 - DNA, 25 bp, Homo sapien
cagccagcctagtgtttctcctatg

SEQ ID NO: 2954054 - DNA, 25 bp, Homo sapien
tatagataccataaccagccagcct

SEQ ID NO: 2954055 - DNA, 25 bp, Homo sapien
cctatcaggagtccagtttttggtg

SEQ ID NO: 2954056 - DNA, 25 bp, Homo sapien
ctggtttggtacaacgttcacctat

SEQ ID NO: 2954057 - DNA, 25 bp, Homo sapien
tgtaaatagaattagacctggccag

SEQ ID NO: 2954058 - DNA, 25 bp, Homo sapien
aaccttgccacgagccagatgctga

SEQ ID NO: 2954059 - DNA, 25 bp, Homo sapien
cagcagtcaggagtagaatgcatcc

SEQ ID NO: 2954060 - DNA, 25 bp, Homo sapien
cattatctggaaacgtggcggtata

SEQ ID NO: 2954061 - DNA, 25 bp, Homo sapien
gatcctgaactaccctaggccacag

SEQ ID NO: 2954062 - DNA, 25 bp, Homo sapien
tgaaccccagttgaagggtcgctgg

SEQ ID NO: 2954063 - DNA, 25 bp, Homo sapien
caagaccgagctggtgtcggcaagt

SEQ ID NO: 2954064 - DNA, 25 bp, Homo sapien
ttaaggacgtggcagataactagcc

SEQ ID NO: 2954065 - DNA, 25 bp, Homo sapien
ggatcgctggattcaaagtccagag

SEQ ID NO: 2954066 - DNA, 25 bp, Homo sapien
aactcggatcgctggattcaaagtc

SEQ ID NO: 2954067 - DNA, 25 bp, Homo sapien
aggtcccaccgagatttgaactcgg

SEQ ID NO: 2954068 - DNA, 25 bp, Homo sapien
tcccaccgagatttgaactcggatc

SEQ ID NO: 2954069 - DNA, 25 bp, Homo sapien
tggttccattcatagcacagccagc

SEQ ID NO: 2954070 - DNA, 25 bp, Homo sapien
tcacactgttgattaggaggacaag

SEQ ID NO: 2954071 - DNA, 25 bp, Homo sapien
gcttctagataacagacacatggtg

SEQ ID NO: 2954072 - DNA, 25 bp, Homo sapien
caccctgggtctttactaggacagc

SEQ ID NO: 2954073 - DNA, 25 bp, Homo sapien
tctgataagctgatggcatggagcc

SEQ ID NO: 2954074 - DNA, 25 bp, Homo sapien
aggcccaagcaggaaacgatccttt

SEQ ID NO: 2954075 - DNA, 25 bp, Homo sapien
aatcaaggagtacgtggaggcccaa

SEQ ID NO: 2954076 - DNA, 25 bp, Homo sapien
cagggagccagtgaactgtcacctt

SEQ ID NO: 2954077 - DNA, 25 bp, Homo sapien
caggcatgctcattccgggacaaga

SEQ ID NO: 2954078 - DNA, 25 bp, Homo sapien
ctcagggatgagtcaccaagggaca

SEQ ID NO: 2954079 - DNA, 25 bp, Homo sapien
ttcctctgcgtgagacccaaacctg

SEQ ID NO: 2954080 - DNA, 25 bp, Homo sapien
tttccactcatggaaggcgggagga

SEQ ID NO: 2954081 - DNA, 25 bp, Homo sapien
gtcctcgcagtagtcagcgacccgc

SEQ ID NO: 2954082 - DNA, 25 bp, Homo sapien
cactgtggttgcccctcagagcctc

SEQ ID NO: 2954083 - DNA, 25 bp, Homo sapien
ccggccagtggggatctcaaactcc

SEQ ID NO: 2954084 - DNA, 25 bp, Homo sapien
agtagtcagcgacccgcagcagggc

SEQ ID NO: 2954085 - DNA, 25 bp, Homo sapien
ctggggtccccttgcttgagccctc

SEQ ID NO: 2954086 - DNA, 25 bp, Homo sapien
gcaggtagggggcaagtccagggtg

SEQ ID NO: 2954087 - DNA, 25 bp, Homo sapien
ccccttgcttgagccctcgggtgcc

SEQ ID NO: 2954088 - DNA, 25 bp, Homo sapien
gtccccttgcttgagccctcgggtg

SEQ ID NO: 2954089 - DNA, 25 bp, Homo sapien
ccctgcaggtccaacatgcgcagag

SEQ ID NO: 2954090 - DNA, 25 bp, Homo sapien
gtccaacatgcgcagagtgtgcccg

SEQ ID NO: 2954091 - DNA, 25 bp, Homo sapien
cctgggtagtgaaggccatggtctc

SEQ ID NO: 2954092 - DNA, 25 bp, Homo sapien
ccacgctggccagtgcctgggtagt

SEQ ID NO: 2954093 - DNA, 25 bp, Homo sapien
ttctctggggcgatgaccttctggc

SEQ ID NO: 2954094 - DNA, 25 bp, Homo sapien
ctggacagtggctaaggtgccgatc

SEQ ID NO: 2954095 - DNA, 25 bp, Homo sapien
tgatcccatggccaatgtcgtccag

SEQ ID NO: 2954096 - DNA, 25 bp, Homo sapien
gctaaggtgccgatctcccttcggg

SEQ ID NO: 2954097 - DNA, 25 bp, Homo sapien
tgctctttcgagacagggtgcctgt

SEQ ID NO: 2954098 - DNA, 25 bp, Homo sapien
ttcttgacagctgcgtgctgaggtc

SEQ ID NO: 2954099 - DNA, 25 bp, Homo sapien
tgatgctctttcgagacagggtgcc

SEQ ID NO: 2954100 - DNA, 25 bp, Homo sapien
ctgttcttgacagctgcgtgctgag

SEQ ID NO: 2954101 - DNA, 25 bp, Homo sapien
cactggctcgggaatccggggtggt

SEQ ID NO: 2954102 - DNA, 25 bp, Homo sapien
gaggaggcggcggagagtctgccgt

SEQ ID NO: 2954103 - DNA, 25 bp, Homo sapien
gcggcggagagtctgccgtcgggca

SEQ ID NO: 2954104 - DNA, 25 bp, Homo sapien
agagtctgccgtcgggcaccaccgg

SEQ ID NO: 2954105 - DNA, 25 bp, Homo sapien
ggccccaccgacaccttcggcgctg

SEQ ID NO: 2954106 - DNA, 25 bp, Homo sapien
ggccgctggaacacctcgacggctg

SEQ ID NO: 2954107 - DNA, 25 bp, Homo sapien
gccgctggaacacctcgacggctgc

SEQ ID NO: 2954108 - DNA, 25 bp, Homo sapien
aggccgctggaacacctcgacggct

SEQ ID NO: 2954109 - DNA, 25 bp, Homo sapien
ccgctggaacacctcgacggctgct

SEQ ID NO: 2954110 - DNA, 25 bp, Homo sapien
agccccaattcatctccatccaggg

SEQ ID NO: 2954111 - DNA, 25 bp, Homo sapien
tggaggcagccccaattcatctcca

SEQ ID NO: 2954112 - DNA, 25 bp, Homo sapien
ttctccaagtatgaggcaggcaccc

SEQ ID NO: 2954113 - DNA, 25 bp, Homo sapien
ggtggaggcagccccaattcatctc

SEQ ID NO: 2954114 - DNA, 25 bp, Homo sapien
gagtagcggcgagtgacacagatga

SEQ ID NO: 2954115 - DNA, 25 bp, Homo sapien
tcattgtccttctggctggtgtatg

SEQ ID NO: 2954116 - DNA, 25 bp, Homo sapien
gctggtgtatgggtacagtgtcacc

SEQ ID NO: 2954117 - DNA, 25 bp, Homo sapien
ggaagaatccagtcccctctgagct

SEQ ID NO: 2954118 - DNA, 25 bp, Homo sapien
tttattcaaagttgggacttgcagc

SEQ ID NO: 2954119 - DNA, 25 bp, Homo sapien
ctgtgactggagctggttttggctt

SEQ ID NO: 2954120 - DNA, 25 bp, Homo sapien
catgaaacccactcagtgcagacat

SEQ ID NO: 2954121 - DNA, 25 bp, Homo sapien
gcaggagaccctgtcctgcatggag

SEQ ID NO: 2954122 - DNA, 25 bp, Homo sapien
atgctgcttctaggtcagctggtgg

SEQ ID NO: 2954123 - DNA, 25 bp, Homo sapien
caagttgcagtcaatggctgcagag

SEQ ID NO: 2954124 - DNA, 25 bp, Homo sapien
ggctgcactttgtgggtactgagga

SEQ ID NO: 2954125 - DNA, 25 bp, Homo sapien
gcagcagccttagaactgggatgcc

SEQ ID NO: 2954126 - DNA, 25 bp, Homo sapien
aacacctttggcgtggagagctcgc

SEQ ID NO: 2954127 - DNA, 25 bp, Homo sapien
tttgtggcaaaacagggcgcctgct

SEQ ID NO: 2954128 - DNA, 25 bp, Homo sapien
ggcgcctgcttcgaggtgattctca

SEQ ID NO: 2954129 - DNA, 25 bp, Homo sapien
acaaggtgctcagcgactacctgcg

SEQ ID NO: 2954130 - DNA, 25 bp, Homo sapien
tgcaatttgaaggatcctgggccac

SEQ ID NO: 2954131 - DNA, 25 bp, Homo sapien
tgggtatctggaagctgcatgtcac

SEQ ID NO: 2954132 - DNA, 25 bp, Homo sapien
tgttgatgagaccagagggtgactc

SEQ ID NO: 2954133 - DNA, 25 bp, Homo sapien
cacaaggtgtgccaggccataagca

SEQ ID NO: 2954134 - DNA, 25 bp, Homo sapien
gtgtgactgccggacccctgagagc

SEQ ID NO: 2954135 - DNA, 25 bp, Homo sapien
cagtcaagcgttcatgaagcagtct

SEQ ID NO: 2954136 - DNA, 25 bp, Homo sapien
cccagaccccagctatggtatagta

SEQ ID NO: 2954137 - DNA, 25 bp, Homo sapien
gacccctgagagcaacagggaggcc

SEQ ID NO: 2954138 - DNA, 25 bp, Homo sapien
gagaaagtccacagccctagcaatt

SEQ ID NO: 2954139 - DNA, 25 bp, Homo sapien
gcaaatctcaagaaccgaagccctg

SEQ ID NO: 2954140 - DNA, 25 bp, Homo sapien
tgtccacagccgctctagtgagggt

SEQ ID NO: 2954141 - DNA, 25 bp, Homo sapien
tcccactgggtttaggacgcgacag

SEQ ID NO: 2954142 - DNA, 25 bp, Homo sapien
ccagctggagagcacgaggccacat

SEQ ID NO: 2954143 - DNA, 25 bp, Homo sapien
ctttgcatctcccaccaccaggaag

SEQ ID NO: 2954144 - DNA, 25 bp, Homo sapien
gaaggaggccagctggagagcacga

SEQ ID NO: 2954145 - DNA, 25 bp, Homo sapien
gaggccagctggagagcacgaggcc

SEQ ID NO: 2954146 - DNA, 25 bp, Homo sapien
tatggtagctatggccatgggtctg

SEQ ID NO: 2954147 - DNA, 25 bp, Homo sapien
gatttggtcaatatggtagctatgg

SEQ ID NO: 2954148 - DNA, 25 bp, Homo sapien
tcatcctctaagtataacttcaggc

SEQ ID NO: 2954149 - DNA, 25 bp, Homo sapien
tcaatatggtagctatggccatggg

SEQ ID NO: 2954150 - DNA, 25 bp, Homo sapien
ccctgcctggacatcgttctcctct

SEQ ID NO: 2954151 - DNA, 25 bp, Homo sapien
gccttggcacgagcttccccggccc

SEQ ID NO: 2954152 - DNA, 25 bp, Homo sapien
gcccctgcctggacatcgttctcct

SEQ ID NO: 2954153 - DNA, 25 bp, Homo sapien
cccctgcctggacatcgttctcctc

SEQ ID NO: 2954154 - DNA, 25 bp, Homo sapien
ccctggcagatgaattgcatctcct

SEQ ID NO: 2954155 - DNA, 25 bp, Homo sapien
cttgaagctgcccggtggccctggc

SEQ ID NO: 2954156 - DNA, 25 bp, Homo sapien
ttgaagctgcccggtggccctggca

SEQ ID NO: 2954157 - DNA, 25 bp, Homo sapien
cctggggccgcacccggcatgtggt

SEQ ID NO: 2954158 - DNA, 25 bp, Homo sapien
ccttggtaccccagatgagtcagca

SEQ ID NO: 2954159 - DNA, 25 bp, Homo sapien
cagacactgagtcagggaccaaggg

SEQ ID NO: 2954160 - DNA, 25 bp, Homo sapien
aaactgctggcctggtatcgcctcc

SEQ ID NO: 2954161 - DNA, 25 bp, Homo sapien
cagcaagatccagcctctgaggttc

SEQ ID NO: 2954162 - DNA, 25 bp, Homo sapien
ccacaagcagttgtagcagtgcaat

SEQ ID NO: 2954163 - DNA, 25 bp, Homo sapien
gcagtgcaattgtaaatctcaccag

SEQ ID NO: 2954164 - DNA, 25 bp, Homo sapien
catggtacgtgataaggaactgggt

SEQ ID NO: 2954165 - DNA, 25 bp, Homo sapien
ttgtaaatctcaccagaaggtgaca

SEQ ID NO: 2954166 - DNA, 25 bp, Homo sapien
agcagaggtcctggtgcaactttac

SEQ ID NO: 2954167 - DNA, 25 bp, Homo sapien
gatctcatggacagcagaggtcctg

SEQ ID NO: 2954168 - DNA, 25 bp, Homo sapien
ctttgatctcatggacagcagaggt

SEQ ID NO: 2954169 - DNA, 25 bp, Homo sapien
cttggcctggaactttgatctcatg

SEQ ID NO: 2954170 - DNA, 25 bp, Homo sapien
ctctaggatggaggcgggtgctcac

SEQ ID NO: 2954171 - DNA, 25 bp, Homo sapien
tcaatgattctcacagaatcctctc

SEQ ID NO: 2954172 - DNA, 25 bp, Homo sapien
tcacccccgtgattgcctggagaga

SEQ ID NO: 2954173 - DNA, 25 bp, Homo sapien
agtcagtacatgagtaactccctct

SEQ ID NO: 2954174 - DNA, 25 bp, Homo sapien
tgttggctgccgctcccattaagtg

SEQ ID NO: 2954175 - DNA, 25 bp, Homo sapien
gttccatgcgggcaacactgttcgt

SEQ ID NO: 2954176 - DNA, 25 bp, Homo sapien
taagtgtgagttccatgcgggcaac

SEQ ID NO: 2954177 - DNA, 25 bp, Homo sapien
tcccattaagtgtgagttccatgcg

SEQ ID NO: 2954178 - DNA, 25 bp, Homo sapien
ttcagatggtcaaatccaaggtggg

SEQ ID NO: 2954179 - DNA, 25 bp, Homo sapien
gcagaactcctcgtgttgaagtggg

SEQ ID NO: 2954180 - DNA, 25 bp, Homo sapien
cattgctaggaaccgtggatgtccc

SEQ ID NO: 2954181 - DNA, 25 bp, Homo sapien
gatgaatggagaaagctggagccca

SEQ ID NO: 2954182 - DNA, 25 bp, Homo sapien
tttgaagaatttgccgggtatcatc

SEQ ID NO: 2954183 - DNA, 25 bp, Homo sapien
tcagtcagaatcgcccacatcacaa

SEQ ID NO: 2954184 - DNA, 25 bp, Homo sapien
gtcagaatcgcccacatcacaaaca

SEQ ID NO: 2954185 - DNA, 25 bp, Homo sapien
gctttgaagaatttgccgggtatca

SEQ ID NO: 2954186 - DNA, 25 bp, Homo sapien
tataattgcaaatgggtcaaagatt

SEQ ID NO: 2954187 - DNA, 25 bp, Homo sapien
gattcagtatgtcgtacaaaactca

SEQ ID NO: 2954188 - DNA, 25 bp, Homo sapien
atcaagatgtggtctacagaccccc

SEQ ID NO: 2954189 - DNA, 25 bp, Homo sapien
tcctcctcggaggtaaacactctta

SEQ ID NO: 2954190 - DNA, 25 bp, Homo sapien
agaagctaggtttgggcctggcaca

SEQ ID NO: 2954191 - DNA, 25 bp, Homo sapien
aaatttttccactcagaagctaggt

SEQ ID NO: 2954192 - DNA, 25 bp, Homo sapien
gccaaggcaagaacattgaatccag

SEQ ID NO: 2954193 - DNA, 25 bp, Homo sapien
ccacagtgactagagttgactccca

SEQ ID NO: 2954194 - DNA, 25 bp, Homo sapien
ccaggagctatacttagtggatcat

SEQ ID NO: 2954195 - DNA, 25 bp, Homo sapien
tgggccgggcagtatggctcatcct

SEQ ID NO: 2954196 - DNA, 25 bp, Homo sapien
cctttgggatgcttcagaggaggta

SEQ ID NO: 2954197 - DNA, 25 bp, Homo sapien
taattttgggcttttgagctgacga

SEQ ID NO: 2954198 - DNA, 25 bp, Homo sapien
tgaaagccaggaccttcccataggg

SEQ ID NO: 2954199 - DNA, 25 bp, Homo sapien
cacaaggtgggtatctaagaaggca

SEQ ID NO: 2954200 - DNA, 25 bp, Homo sapien
taagggctcctatccgtggtcatca

SEQ ID NO: 2954201 - DNA, 25 bp, Homo sapien
tatataatatgatcgagcacctccg

SEQ ID NO: 2954202 - DNA, 25 bp, Homo sapien
tggattctagacttgagaccacaga

SEQ ID NO: 2954203 - DNA, 25 bp, Homo sapien
tggaatattcaggtagtcatctttg

SEQ ID NO: 2954204 - DNA, 25 bp, Homo sapien
caccacgtccaactgccttattttg

SEQ ID NO: 2954205 - DNA, 25 bp, Homo sapien
taaatttacagtattgggcagcaat

SEQ ID NO: 2954206 - DNA, 25 bp, Homo sapien
taggaaaatagtgctgaattcccat

SEQ ID NO: 2954207 - DNA, 25 bp, Homo sapien
tcaatggctacatccaaaaatatgc

SEQ ID NO: 2954208 - DNA, 25 bp, Homo sapien
tatgcacgtttcacggttaggaaaa

SEQ ID NO: 2954209 - DNA, 25 bp, Homo sapien
tccaaaaatatgcacgtttcacggt

SEQ ID NO: 2954210 - DNA, 25 bp, Homo sapien
gccgaggccgggtctgaggagcggc

SEQ ID NO: 2954211 - DNA, 25 bp, Homo sapien
cagcggccgaggccgggtctgagga

SEQ ID NO: 2954212 - DNA, 25 bp, Homo sapien
cggccgaggccgggtctgaggagcg

SEQ ID NO: 2954213 - DNA, 25 bp, Homo sapien
ccgaggccgggtctgaggagcggcc

SEQ ID NO: 2954214 - DNA, 25 bp, Homo sapien
tacggcgaatgaccactactgcttg

SEQ ID NO: 2954215 - DNA, 25 bp, Homo sapien
tagcggtcccattcatacggcgaat

SEQ ID NO: 2954216 - DNA, 25 bp, Homo sapien
tgcttgcatgctgccgagctgattt

SEQ ID NO: 2954217 - DNA, 25 bp, Homo sapien
cagtttttagcggtcccattcatac

SEQ ID NO: 2954218 - DNA, 25 bp, Homo sapien
aatccaatatcaaggcgccctcatc

SEQ ID NO: 2954219 - DNA, 25 bp, Homo sapien
atccaatatcaaggcgccctcatct

SEQ ID NO: 2954220 - DNA, 25 bp, Homo sapien
ccaatatcaaggcgccctcatctgg

SEQ ID NO: 2954221 - DNA, 25 bp, Homo sapien
atatcaaggcgccctcatctggtgt

SEQ ID NO: 2954222 - DNA, 25 bp, Homo sapien
tccagaaagggaccttgctagccct

SEQ ID NO: 2954223 - DNA, 25 bp, Homo sapien
tcttccaatcaggtcagatgtagga

SEQ ID NO: 2954224 - DNA, 25 bp, Homo sapien
ggaaaccaggacgacagaagcctga

SEQ ID NO: 2954225 - DNA, 25 bp, Homo sapien
ggtaacattggttggcagccctcat

SEQ ID NO: 2954226 - DNA, 25 bp, Homo sapien
gatgttaacaccagagtagtcaaaa

SEQ ID NO: 2954227 - DNA, 25 bp, Homo sapien
ttttgatgttaacaccagagtagtc

SEQ ID NO: 2954228 - DNA, 25 bp, Homo sapien
caggcccggcccatgaaatgcattt

SEQ ID NO: 2954229 - DNA, 25 bp, Homo sapien
tttgatgttaacaccagagtagtca

SEQ ID NO: 2954230 - DNA, 25 bp, Homo sapien
tgcagtagggtgtcatagagaagtc

SEQ ID NO: 2954231 - DNA, 25 bp, Homo sapien
tgtttgccagaattgtggctgtcca

SEQ ID NO: 2954232 - DNA, 25 bp, Homo sapien
tgtgtggcccttaaaatccagactg

SEQ ID NO: 2954233 - DNA, 25 bp, Homo sapien
ggctgtccatttgagtccaaacttt

SEQ ID NO: 2954234 - DNA, 25 bp, Homo sapien
tgtgttacacttggtagctgctcag

SEQ ID NO: 2954235 - DNA, 25 bp, Homo sapien
tttacagattgttgaagacgaggag

SEQ ID NO: 2954236 - DNA, 25 bp, Homo sapien
aatggtccttcattcccactttgtg

SEQ ID NO: 2954237 - DNA, 25 bp, Homo sapien
aaaatatcagtagaccaggtgaaca

SEQ ID NO: 2954238 - DNA, 25 bp, Homo sapien
catttcctagtactaatgaatctga

SEQ ID NO: 2954239 - DNA, 25 bp, Homo sapien
gcttctcagagtcagtgggcacctg

SEQ ID NO: 2954240 - DNA, 25 bp, Homo sapien
ctcagagtcagtgggcacctggttc

SEQ ID NO: 2954241 - DNA, 25 bp, Homo sapien
tctccatttcctagtactaatgaat

SEQ ID NO: 2954242 - DNA, 25 bp, Homo sapien
tgtctcaccaagatgagatgctgca

SEQ ID NO: 2954243 - DNA, 25 bp, Homo sapien
gtcttccaactgtctcaccaagatg

SEQ ID NO: 2954244 - DNA, 25 bp, Homo sapien
caactgtctcaccaagatgagatgc

SEQ ID NO: 2954245 - DNA, 25 bp, Homo sapien
cagaaaagtcttccaactgtctcac

SEQ ID NO: 2954246 - DNA, 25 bp, Homo sapien
gaggacaggcactaatgatgaaaac

SEQ ID NO: 2954247 - DNA, 25 bp, Homo sapien
agctagcagggaggacaggcactaa

SEQ ID NO: 2954248 - DNA, 25 bp, Homo sapien
tagcagggaggacaggcactaatga

SEQ ID NO: 2954249 - DNA, 25 bp, Homo sapien
gcccatgagctagcagggaggacag

SEQ ID NO: 2954250 - DNA, 25 bp, Homo sapien
cctggtttcgcgtctctctggaagg

SEQ ID NO: 2954251 - DNA, 25 bp, Homo sapien
ctgcgggcaccatgaggtcaggctc

SEQ ID NO: 2954252 - DNA, 25 bp, Homo sapien
gccagagaaggtgtggattctagaa

SEQ ID NO: 2954253 - DNA, 25 bp, Homo sapien
gaactggtaccctctgtgccagatg

SEQ ID NO: 2954254 - DNA, 25 bp, Homo sapien
gattgaagaatctgcccctgttgag

SEQ ID NO: 2954255 - DNA, 25 bp, Homo sapien
taactgtgtgaccagcggaaacagg

SEQ ID NO: 2954256 - DNA, 25 bp, Homo sapien
ggtccctctcagatacccagtggaa

SEQ ID NO: 2954257 - DNA, 25 bp, Homo sapien
tgtggcctccgtcctgtcactgatg

SEQ ID NO: 2954258 - DNA, 25 bp, Homo sapien
aaggtaaaatcacttcagatctcta

SEQ ID NO: 2954259 - DNA, 25 bp, Homo sapien
tcatgattggcttaaagtgaaggaa

SEQ ID NO: 2954260 - DNA, 25 bp, Homo sapien
ctgcagaggacatcgcgtaccagct

SEQ ID NO: 2954261 - DNA, 25 bp, Homo sapien
acagccccgatgattcttaacacag

SEQ ID NO: 2954262 - DNA, 25 bp, Homo sapien
cttccggcctgtcgccagccagctt

SEQ ID NO: 2954263 - DNA, 25 bp, Homo sapien
gcgcatcctcttccggcctgtcgcc

SEQ ID NO: 2954264 - DNA, 25 bp, Homo sapien
tcctcttccggcctgtcgccagcca

SEQ ID NO: 2954265 - DNA, 25 bp, Homo sapien
gcatcctcttccggcctgtcgccag

SEQ ID NO: 2954266 - DNA, 25 bp, Homo sapien
caattatctttgactgccgttctcg

SEQ ID NO: 2954267 - DNA, 25 bp, Homo sapien
ttgaccgattccgtggagtgcagga

SEQ ID NO: 2954268 - DNA, 25 bp, Homo sapien
gattccgtggagtgcaggacattgt

SEQ ID NO: 2954269 - DNA, 25 bp, Homo sapien
ccgttctcgaccacgtaatgtgcca

SEQ ID NO: 2954270 - DNA, 25 bp, Homo sapien
tgccaaagtgtttgagtccattggc

SEQ ID NO: 2954271 - DNA, 25 bp, Homo sapien
gttgcaggaggcgtggtgaactctg

SEQ ID NO: 2954272 - DNA, 25 bp, Homo sapien
cattggcaagtttggcctggcctta

SEQ ID NO: 2954273 - DNA, 25 bp, Homo sapien
cctggccttagctgttgcaggaggc

SEQ ID NO: 2954274 - DNA, 25 bp, Homo sapien
gataggcacgtgcatttagccccag

SEQ ID NO: 2954275 - DNA, 25 bp, Homo sapien
tcctcgcgttgatcaccaaagagaa

SEQ ID NO: 2954276 - DNA, 25 bp, Homo sapien
ggctttgcggcaacatcctcgcgtt

SEQ ID NO: 2954277 - DNA, 25 bp, Homo sapien
gcggcagtcttagcctctgtacagg

SEQ ID NO: 2954278 - DNA, 25 bp, Homo sapien
tacttgataatattagtgattctga

SEQ ID NO: 2954279 - DNA, 25 bp, Homo sapien
tcagtagaattaccattaattacat

SEQ ID NO: 2954280 - DNA, 25 bp, Homo sapien
tatgatgcatacagttttctagcaa

SEQ ID NO: 2954281 - DNA, 25 bp, Homo sapien
tacatacagattttacctatccaca

SEQ ID NO: 2954282 - DNA, 25 bp, Homo sapien
tagtgattggttatcagtcccacgc

SEQ ID NO: 2954283 - DNA, 25 bp, Homo sapien
ctccaaagatagtgattggttatca

SEQ ID NO: 2954284 - DNA, 25 bp, Homo sapien
ttggttatcagtcccacgcagacac

SEQ ID NO: 2954285 - DNA, 25 bp, Homo sapien
aaagatagtgattggttatcagtcc

SEQ ID NO: 2954286 - DNA, 25 bp, Homo sapien
caagcaaacttgtggctgatctcca

SEQ ID NO: 2954287 - DNA, 25 bp, Homo sapien
cagcagagacgaagtgacctcgatc

SEQ ID NO: 2954288 - DNA, 25 bp, Homo sapien
tcgatcgcttttggctagagacact

SEQ ID NO: 2954289 - DNA, 25 bp, Homo sapien
gagacacttctgtgccttattggag

SEQ ID NO: 2954290 - DNA, 25 bp, Homo sapien
gatttgatttgattcaggccccaaa

SEQ ID NO: 2954291 - DNA, 25 bp, Homo sapien
gaagtgccattccagccgctcagcg

SEQ ID NO: 2954292 - DNA, 25 bp, Homo sapien
tcagccggacagctgttctgcgcag

SEQ ID NO: 2954293 - DNA, 25 bp, Homo sapien
ggctgcagcggatttgatttgattc

SEQ ID NO: 2954294 - DNA, 25 bp, Homo sapien
gcttggcggtcaactccgcttcaca

SEQ ID NO: 2954295 - DNA, 25 bp, Homo sapien
ttggcggtcaactccgcttcacaga

SEQ ID NO: 2954296 - DNA, 25 bp, Homo sapien
cagcttggcggtcaactccgcttca

SEQ ID NO: 2954297 - DNA, 25 bp, Homo sapien
tggcggtcaactccgcttcacagag

SEQ ID NO: 2954298 - DNA, 25 bp, Homo sapien
gccatgcttctccctgataaatcca

SEQ ID NO: 2954299 - DNA, 25 bp, Homo sapien
agccatgcttctccctgataaatcc

SEQ ID NO: 2954300 - DNA, 25 bp, Homo sapien
catgcttctccctgataaatccacg

SEQ ID NO: 2954301 - DNA, 25 bp, Homo sapien
atgcttctccctgataaatccacga

SEQ ID NO: 2954302 - DNA, 25 bp, Homo sapien
agaggtcaccacattccttcaggaa

SEQ ID NO: 2954303 - DNA, 25 bp, Homo sapien
tcagaggtcaccacattccttcagg

SEQ ID NO: 2954304 - DNA, 25 bp, Homo sapien
cacattccttcaggaagcccatccc

SEQ ID NO: 2954305 - DNA, 25 bp, Homo sapien
cattccttcaggaagcccatccctt

SEQ ID NO: 2954306 - DNA, 25 bp, Homo sapien
ccccaagctaattctcctagtaaca

SEQ ID NO: 2954307 - DNA, 25 bp, Homo sapien
gccacctcggaggaaactggtccat

SEQ ID NO: 2954308 - DNA, 25 bp, Homo sapien
tgggcaccagtggtctgggtctcct

SEQ ID NO: 2954309 - DNA, 25 bp, Homo sapien
tccatagttgatcgtccagctctcc

SEQ ID NO: 2954310 - DNA, 25 bp, Homo sapien
tcgacttccagctcggtccgctttg

SEQ ID NO: 2954311 - DNA, 25 bp, Homo sapien
gtccgctttgcggactgatggggct

SEQ ID NO: 2954312 - DNA, 25 bp, Homo sapien
gctttgcggactgatggggctgcgc

SEQ ID NO: 2954313 - DNA, 25 bp, Homo sapien
ctcgacttccagctcggtccgcttt

SEQ ID NO: 2954314 - DNA, 25 bp, Homo sapien
agcaggcgcggcccgtccatggcgc

SEQ ID NO: 2954315 - DNA, 25 bp, Homo sapien
gcaggcgcggcccgtccatggcgcg

SEQ ID NO: 2954316 - DNA, 25 bp, Homo sapien
catggcgcggccggtggcacctgcc

SEQ ID NO: 2954317 - DNA, 25 bp, Homo sapien
cattcgagtgtcctcttccgaagaa

SEQ ID NO: 2954318 - DNA, 25 bp, Homo sapien
tctccagagaccgagatgctgaggg

SEQ ID NO: 2954319 - DNA, 25 bp, Homo sapien
agtcccttcgggatcccggcattcg

SEQ ID NO: 2954320 - DNA, 25 bp, Homo sapien
tctcgccttggttctgtcccacgac

SEQ ID NO: 2954321 - DNA, 25 bp, Homo sapien
cccccattgtctggccggtccccat

SEQ ID NO: 2954322 - DNA, 25 bp, Homo sapien
ttgtctggccggtccccattgtcct

SEQ ID NO: 2954323 - DNA, 25 bp, Homo sapien
cattgtctggccggtccccattgtc

SEQ ID NO: 2954324 - DNA, 25 bp, Homo sapien
cccattgtctggccggtccccattg

SEQ ID NO: 2954325 - DNA, 25 bp, Homo sapien
ggataccgcgctacagaatccgagg

SEQ ID NO: 2954326 - DNA, 25 bp, Homo sapien
tcggttcatggccataaagcaggcc

SEQ ID NO: 2954327 - DNA, 25 bp, Homo sapien
tcagtctccgtatctgtaaagccgg

SEQ ID NO: 2954328 - DNA, 25 bp, Homo sapien
gaccttccagggcattcggttcatg

SEQ ID NO: 2954329 - DNA, 25 bp, Homo sapien
gggaaaggcaagtgagggacagtgt

SEQ ID NO: 2954330 - DNA, 25 bp, Homo sapien
agtgagggacagtgtgcccgtgcag

SEQ ID NO: 2954331 - DNA, 25 bp, Homo sapien
aggcaagtgagggacagtgtgcccg

SEQ ID NO: 2954332 - DNA, 25 bp, Homo sapien
caagtgagggacagtgtgcccgtgc

SEQ ID NO: 2954333 - DNA, 25 bp, Homo sapien
cagggaggcgttaggaacatcaaag

SEQ ID NO: 2954334 - DNA, 25 bp, Homo sapien
tggatggagggagatcggagggtca

SEQ ID NO: 2954335 - DNA, 25 bp, Homo sapien
ctggatggagggagatcggagggtc

SEQ ID NO: 2954336 - DNA, 25 bp, Homo sapien
acacggtctggttggctccacaagg

SEQ ID NO: 2954337 - DNA, 25 bp, Homo sapien
ggctcacacacggtctggttggctc

SEQ ID NO: 2954338 - DNA, 25 bp, Homo sapien
gcactcaccgctgtgtgtgtacagg

SEQ ID NO: 2954339 - DNA, 25 bp, Homo sapien
gcctgtggggcatgcctccttggca

SEQ ID NO: 2954340 - DNA, 25 bp, Homo sapien
gctgcctcgggaaaactctgcttcc

SEQ ID NO: 2954341 - DNA, 25 bp, Homo sapien
tgctgcctcgggaaaactctgcttc

SEQ ID NO: 2954342 - DNA, 25 bp, Homo sapien
ctgctgcctcgggaaaactctgctt

SEQ ID NO: 2954343 - DNA, 25 bp, Homo sapien
aaggacgtcttcatggcgctctgac

SEQ ID NO: 2954344 - DNA, 25 bp, Homo sapien
ccacagtaaggacgtcttcatggcg

SEQ ID NO: 2954345 - DNA, 25 bp, Homo sapien
gtaaggacgtcttcatggcgctctg

SEQ ID NO: 2954346 - DNA, 25 bp, Homo sapien
cagtaaggacgtcttcatggcgctc

SEQ ID NO: 2954347 - DNA, 25 bp, Homo sapien
tgactgaagggaaagggttcccatc

SEQ ID NO: 2954348 - DNA, 25 bp, Homo sapien
ggttcccatcatttaggtcctggga

SEQ ID NO: 2954349 - DNA, 25 bp, Homo sapien
tgctgaaggtcctttgactgaaggg

SEQ ID NO: 2954350 - DNA, 25 bp, Homo sapien
aagggttcccatcatttaggtcctg

SEQ ID NO: 2954351 - DNA, 25 bp, Homo sapien
ggctttccggcataacccagctggt

SEQ ID NO: 2954352 - DNA, 25 bp, Homo sapien
gaataatctgaacgtggttcccacc

SEQ ID NO: 2954353 - DNA, 25 bp, Homo sapien
tgctaacccggtccaggcaaggtag

SEQ ID NO: 2954354 - DNA, 25 bp, Homo sapien
gagcgcagcggacaccagatttagt

SEQ ID NO: 2954355 - DNA, 25 bp, Homo sapien
agcgcccagtcgtctcatcctggta

SEQ ID NO: 2954356 - DNA, 25 bp, Homo sapien
catcctggtagtagccgtaggcgca

SEQ ID NO: 2954357 - DNA, 25 bp, Homo sapien
tcggtgtcctcgcacacggtgcagg

SEQ ID NO: 2954358 - DNA, 25 bp, Homo sapien
gcctcgtcggaatacgtgccgtcgg

SEQ ID NO: 2954359 - DNA, 25 bp, Homo sapien
gatgtggccacgtccactagcattc

SEQ ID NO: 2954360 - DNA, 25 bp, Homo sapien
catttccgggctgcatggagggacc

SEQ ID NO: 2954361 - DNA, 25 bp, Homo sapien
gggtgagtcaccatgttgacacctg

SEQ ID NO: 2954362 - DNA, 25 bp, Homo sapien
cacctgaaacgtaagtaaatgcggg

SEQ ID NO: 2954363 - DNA, 25 bp, Homo sapien
tcctgagtacctagagaggcctatc

SEQ ID NO: 2954364 - DNA, 25 bp, Homo sapien
cactcctgtcctaaggaaagaagag

SEQ ID NO: 2954365 - DNA, 25 bp, Homo sapien
gcttgtccttgatgaccctagtcac

SEQ ID NO: 2954366 - DNA, 25 bp, Homo sapien
aaacacacaaagaagcctgaccaca

SEQ ID NO: 2954367 - DNA, 25 bp, Homo sapien
cgtgtaatccaacggccagggatct

SEQ ID NO: 2954368 - DNA, 25 bp, Homo sapien
gaaggctatgtaggccacaaggccc

SEQ ID NO: 2954369 - DNA, 25 bp, Homo sapien
cagggatgaggttgtcggtggtgcc

SEQ ID NO: 2954370 - DNA, 25 bp, Homo sapien
tgtcggtggtgcctcgggtcaccac

SEQ ID NO: 2954371 - DNA, 25 bp, Homo sapien
ggagtggggcggcagatgatgagtg

SEQ ID NO: 2954372 - DNA, 25 bp, Homo sapien
gtgtatgttttcaggtcaaggtcac

SEQ ID NO: 2954373 - DNA, 25 bp, Homo sapien
cagatgatgagtgaggatgagcttg

SEQ ID NO: 2954374 - DNA, 25 bp, Homo sapien
tgtatgttttcaggtcaaggtcaca

SEQ ID NO: 2954375 - DNA, 25 bp, Homo sapien
gaagagacatatgcacacgcaggtg

SEQ ID NO: 2954376 - DNA, 25 bp, Homo sapien
cattcccagtgtgacaagcgaaggg

SEQ ID NO: 2954377 - DNA, 25 bp, Homo sapien
catatgcacacgcaggtgactgtgg

SEQ ID NO: 2954378 - DNA, 25 bp, Homo sapien
tctgggagttcgtgcacatcctgga

SEQ ID NO: 2954379 - DNA, 25 bp, Homo sapien
gctgttggctccttgcttgttctgc

SEQ ID NO: 2954380 - DNA, 25 bp, Homo sapien
ccacggagatgccactgtcgctgtg

SEQ ID NO: 2954381 - DNA, 25 bp, Homo sapien
tgccactgtcgctgtggagtttttc

SEQ ID NO: 2954382 - DNA, 25 bp, Homo sapien
gcgtctggttcactggccggctgtt

SEQ ID NO: 2954383 - DNA, 25 bp, Homo sapien
tctccacgaggtcggctcgctggat

SEQ ID NO: 2954384 - DNA, 25 bp, Homo sapien
gtagaggcctccgtcacccttgagg

SEQ ID NO: 2954385 - DNA, 25 bp, Homo sapien
agtctatgtgctcgggctggtagcc

SEQ ID NO: 2954386 - DNA, 25 bp, Homo sapien
cccgcagagccgttgagaagcttct

SEQ ID NO: 2954387 - DNA, 25 bp, Homo sapien
tgttagctccgggtccatgtcggga

SEQ ID NO: 2954388 - DNA, 25 bp, Homo sapien
cccacaggtcacagtcgaagtcaat

SEQ ID NO: 2954389 - DNA, 25 bp, Homo sapien
ctcatttagagaaggcggtgccagc

SEQ ID NO: 2954390 - DNA, 25 bp, Homo sapien
cattcctccacgtgtaagcccttga

SEQ ID NO: 2954391 - DNA, 25 bp, Homo sapien
tgtttttactggaagagcaagcctc

SEQ ID NO: 2954392 - DNA, 25 bp, Homo sapien
tcaggagcctgggttaggacctgcc

SEQ ID NO: 2954393 - DNA, 25 bp, Homo sapien
tggcgagcctctgacttgcctgtgg

SEQ ID NO: 2954394 - DNA, 25 bp, Homo sapien
acctgcccacgagagctacaaggga

SEQ ID NO: 2954395 - DNA, 25 bp, Homo sapien
tgacacagcccgcatggtccgaagc

SEQ ID NO: 2954396 - DNA, 25 bp, Homo sapien
acttgctgacacagcccgcatggtc

SEQ ID NO: 2954397 - DNA, 25 bp, Homo sapien
tgctgacacagcccgcatggtccga

SEQ ID NO: 2954398 - DNA, 25 bp, Homo sapien
ttgctgacacagcccgcatggtccg

SEQ ID NO: 2954399 - DNA, 25 bp, Homo sapien
gctatcgataaaacagttaatggta

SEQ ID NO: 2954400 - DNA, 25 bp, Homo sapien
tgtattaaacactaccatccacaga

SEQ ID NO: 2954401 - DNA, 25 bp, Homo sapien
gaactgaatgcactactggagaatg

SEQ ID NO: 2954402 - DNA, 25 bp, Homo sapien
tatacatgaacctccattcggaagg

SEQ ID NO: 2954403 - DNA, 25 bp, Homo sapien
tcatctggcccgttcatggctgtcc

SEQ ID NO: 2954404 - DNA, 25 bp, Homo sapien
gacaagcctggcctgtcacagatgc

SEQ ID NO: 2954405 - DNA, 25 bp, Homo sapien
tcagtcgccaggaactacccatttt

SEQ ID NO: 2954406 - DNA, 25 bp, Homo sapien
cattgaattgagaggagcgggtcac

SEQ ID NO: 2954407 - DNA, 25 bp, Homo sapien
aggtcccagatgtgcgccccgagcg

SEQ ID NO: 2954408 - DNA, 25 bp, Homo sapien
ctgctccagatctgcgctcggcgcc

SEQ ID NO: 2954409 - DNA, 25 bp, Homo sapien
tcccctggtccagctgcgcgcggca

SEQ ID NO: 2954410 - DNA, 25 bp, Homo sapien
gccgctctcgcccagatgtgctggg

SEQ ID NO: 2954411 - DNA, 25 bp, Homo sapien
aacacgaagcagcagcgagtcagtt

SEQ ID NO: 2954412 - DNA, 25 bp, Homo sapien
cgaagcagcagcgagtcagttgcat

SEQ ID NO: 2954413 - DNA, 25 bp, Homo sapien
cacgaagcagcagcgagtcagttgc

SEQ ID NO: 2954414 - DNA, 25 bp, Homo sapien
cagatagaggctaccctgcaccagg

SEQ ID NO: 2954415 - DNA, 25 bp, Homo sapien
tagacacagacgactttgaagggct

SEQ ID NO: 2954416 - DNA, 25 bp, Homo sapien
acttaggtgagatgtggccccgctt

SEQ ID NO: 2954417 - DNA, 25 bp, Homo sapien
cgatagtccgtgctgtagaaggcga

SEQ ID NO: 2954418 - DNA, 25 bp, Homo sapien
ttgatgttggagtagaagtcgcccc

SEQ ID NO: 2954419 - DNA, 25 bp, Homo sapien
tagtgtgggaggaccacaatcgtcc

SEQ ID NO: 2954420 - DNA, 25 bp, Homo sapien
caatcagcggtttcacaagacttcc

SEQ ID NO: 2954421 - DNA, 25 bp, Homo sapien
gaaccaagggcttagcttcctccca

SEQ ID NO: 2954422 - DNA, 25 bp, Homo sapien
aggctgactgttgagggacccctct

SEQ ID NO: 2954423 - DNA, 25 bp, Homo sapien
tacgccaaggtaagcaaagccctag

SEQ ID NO: 2954424 - DNA, 25 bp, Homo sapien
caaggtcctttgagtgggtctccca

SEQ ID NO: 2954425 - DNA, 25 bp, Homo sapien
taaaatgaatccatccctggtgcag

SEQ ID NO: 2954426 - DNA, 25 bp, Homo sapien
taacaaaccctctgggtgatccgcg

SEQ ID NO: 2954427 - DNA, 25 bp, Homo sapien
tccttcttcatttatgatcatcact

SEQ ID NO: 2954428 - DNA, 25 bp, Homo sapien
ccttcttcatttatgatcatcactg

SEQ ID NO: 2954429 - DNA, 25 bp, Homo sapien
tcttcatttatgatcatcactgtca

SEQ ID NO: 2954430 - DNA, 25 bp, Homo sapien
ctggaaatcactctttccttcttca

SEQ ID NO: 2954431 - DNA, 25 bp, Homo sapien
agagggagagtccgcagaggtccca

SEQ ID NO: 2954432 - DNA, 25 bp, Homo sapien
gaagagggagagtccgcagaggtcc

SEQ ID NO: 2954433 - DNA, 25 bp, Homo sapien
aagagggagagtccgcagaggtccc

SEQ ID NO: 2954434 - DNA, 25 bp, Homo sapien
gctggcctggcgtcctgcaagtttc

SEQ ID NO: 2954435 - DNA, 25 bp, Homo sapien
atcctgagtagacgagctggcctgg

SEQ ID NO: 2954436 - DNA, 25 bp, Homo sapien
ggaaaaagcatcctgagtagacgag

SEQ ID NO: 2954437 - DNA, 25 bp, Homo sapien
tctgagtaggattcactctggaaaa

SEQ ID NO: 2954438 - DNA, 25 bp, Homo sapien
ctgtaatgagacactaaaatgggca

SEQ ID NO: 2954439 - DNA, 25 bp, Homo sapien
tgtaatgagacactaaaatgggcac

SEQ ID NO: 2954440 - DNA, 25 bp, Homo sapien
tctgtaatgagacactaaaatgggc

SEQ ID NO: 2954441 - DNA, 25 bp, Homo sapien
caagttctctttgtgagctatcagc

SEQ ID NO: 2954442 - DNA, 25 bp, Homo sapien
tatgtctgaaatgcctaatgagtcg

SEQ ID NO: 2954443 - DNA, 25 bp, Homo sapien
gtcgcagggatttgttgagactccg

SEQ ID NO: 2954444 - DNA, 25 bp, Homo sapien
catatcctgatgagggatcaggccc

SEQ ID NO: 2954445 - DNA, 25 bp, Homo sapien
taaaaatgctgtgtgataaaatccc

SEQ ID NO: 2954446 - DNA, 25 bp, Homo sapien
tgccgcctgcataggagccagttct

SEQ ID NO: 2954447 - DNA, 25 bp, Homo sapien
cccagattgctcagctgtttgtacc

SEQ ID NO: 2954448 - DNA, 25 bp, Homo sapien
tgtttgtacctgacttgccgcctgc

SEQ ID NO: 2954449 - DNA, 25 bp, Homo sapien
ggaagagactgcattgtggccccag

SEQ ID NO: 2954450 - DNA, 25 bp, Homo sapien
ggattcagtttaggcgctggcccga

SEQ ID NO: 2954451 - DNA, 25 bp, Homo sapien
gactccgtttaatttccagaagcag

SEQ ID NO: 2954452 - DNA, 25 bp, Homo sapien
tatcccagcggtggtacttcggaga

SEQ ID NO: 2954453 - DNA, 25 bp, Homo sapien
tcatgcttcggatgtcttggagacc

SEQ ID NO: 2954454 - DNA, 25 bp, Homo sapien
gaagtcaatggtggtgtcacatccc

SEQ ID NO: 2954455 - DNA, 25 bp, Homo sapien
tggcttcagcacagtgcccttttct

SEQ ID NO: 2954456 - DNA, 25 bp, Homo sapien
tggtggctgaggcataccgctctct

SEQ ID NO: 2954457 - DNA, 25 bp, Homo sapien
taacctgtccgtggagaacgctgca

SEQ ID NO: 2954458 - DNA, 25 bp, Homo sapien
cagcttcagtagtggtcagcccaga

SEQ ID NO: 2954459 - DNA, 25 bp, Homo sapien
gttttacagtatgccctggagcgct

SEQ ID NO: 2954460 - DNA, 25 bp, Homo sapien
gaagcagactgatgcctcactgtaa

SEQ ID NO: 2954461 - DNA, 25 bp, Homo sapien
ccaagtgtgatggtgcacgcccata

SEQ ID NO: 2954462 - DNA, 25 bp, Homo sapien
agccaagtgtgatggtgcacgccca

SEQ ID NO: 2954463 - DNA, 25 bp, Homo sapien
aacatagactccatccctacaaaaa

SEQ ID NO: 2954464 - DNA, 25 bp, Homo sapien
agtgtgatggtgcacgcccatagtc

SEQ ID NO: 2954465 - DNA, 25 bp, Homo sapien
tagtccgctgcactacactaagtgg

SEQ ID NO: 2954466 - DNA, 25 bp, Homo sapien
gactcctatggtggaagaccgagaa

SEQ ID NO: 2954467 - DNA, 25 bp, Homo sapien
cagtgcccagggagtcaggaaattt

SEQ ID NO: 2954468 - DNA, 25 bp, Homo sapien
aaactagtgcgagggtcatgtcagc

SEQ ID NO: 2954469 - DNA, 25 bp, Homo sapien
cgaggcttgatagtcggagcattct

SEQ ID NO: 2954470 - DNA, 25 bp, Homo sapien
ttgttatcctattgggtttagtgac

SEQ ID NO: 2954471 - DNA, 25 bp, Homo sapien
gagagtcatgtaccttcttgttcat

SEQ ID NO: 2954472 - DNA, 25 bp, Homo sapien
tagtgacttgagagtcatgtacctt

SEQ ID NO: 2954473 - DNA, 25 bp, Homo sapien
taagtatttgtagccttccatgtgc

SEQ ID NO: 2954474 - DNA, 25 bp, Homo sapien
tttattttccagttagagaagacag

SEQ ID NO: 2954475 - DNA, 25 bp, Homo sapien
tactgtctaatctttcaagcacggg

SEQ ID NO: 2954476 - DNA, 25 bp, Homo sapien
tagatgactttatgcgctatagaaa

SEQ ID NO: 2954477 - DNA, 25 bp, Homo sapien
cagcagtacatgagagttcttgtct

SEQ ID NO: 2954478 - DNA, 25 bp, Homo sapien
agcttcttgactagtagctgggagt

SEQ ID NO: 2954479 - DNA, 25 bp, Homo sapien
caagtagttcccataatagttatgc

SEQ ID NO: 2954480 - DNA, 25 bp, Homo sapien
gttatgctgatttgcaccgcaccag

SEQ ID NO: 2954481 - DNA, 25 bp, Homo sapien
ggaatcctgaagtgttacaaatgaa

SEQ ID NO: 2954482 - DNA, 25 bp, Homo sapien
cctgctgcaagcgtttgagtaggac

SEQ ID NO: 2954483 - DNA, 25 bp, Homo sapien
taacaactagtttgggcagccacct

SEQ ID NO: 2954484 - DNA, 25 bp, Homo sapien
taaacctggctcctattcagagctt

SEQ ID NO: 2954485 - DNA, 25 bp, Homo sapien
taccggatcgttagtgcagtcactt

SEQ ID NO: 2954486 - DNA, 25 bp, Homo sapien
tgaacataatgtcaacacgaatggg

SEQ ID NO: 2954487 - DNA, 25 bp, Homo sapien
tgagaaccataaccttaagagaggg

SEQ ID NO: 2954488 - DNA, 25 bp, Homo sapien
gaaaataatgttgccttcacagacc

SEQ ID NO: 2954489 - DNA, 25 bp, Homo sapien
ctgtttcttgtgtttgttttcaggc

SEQ ID NO: 2954490 - DNA, 25 bp, Homo sapien
tgtttcttgtgtttgttttcaggca

SEQ ID NO: 2954491 - DNA, 25 bp, Homo sapien
gtttcttgtgtttgttttcaggcat

SEQ ID NO: 2954492 - DNA, 25 bp, Homo sapien
cacctctcatgagcaaacttgtttt

SEQ ID NO: 2954493 - DNA, 25 bp, Homo sapien
ttcttcgtgaaaggcagtatctctg

SEQ ID NO: 2954494 - DNA, 25 bp, Homo sapien
cccacctctcatgagcaaacttgtt

SEQ ID NO: 2954495 - DNA, 25 bp, Homo sapien
gtcttgaatattcttcgtgaaaggc

SEQ ID NO: 2954496 - DNA, 25 bp, Homo sapien
ggcgcatgcgcatcgcggtgttgca

SEQ ID NO: 2954497 - DNA, 25 bp, Homo sapien
tgccaaatactgagctgtcgcctgc

SEQ ID NO: 2954498 - DNA, 25 bp, Homo sapien
tcgcctgcggcgagatgggtgactg

SEQ ID NO: 2954499 - DNA, 25 bp, Homo sapien
catgcgcgagtgtgaacgcgctcgg

SEQ ID NO: 2954500 - DNA, 25 bp, Homo sapien
caagttcccgcctctttttactcag

SEQ ID NO: 2954501 - DNA, 25 bp, Homo sapien
gacttggccccgagacgcatgcgca

SEQ ID NO: 2954502 - DNA, 25 bp, Homo sapien
cccgagacgcatgcgcactaggaaa

SEQ ID NO: 2954503 - DNA, 25 bp, Homo sapien
catgcgcactaggaaagataggcgg

SEQ ID NO: 2954504 - DNA, 25 bp, Homo sapien
tagagtctggcgaagctgttacgat

SEQ ID NO: 2954505 - DNA, 25 bp, Homo sapien
tacagtaggttgtccatgcatccag

SEQ ID NO: 2954506 - DNA, 25 bp, Homo sapien
caaatgtgagggagctacagtaggt

SEQ ID NO: 2954507 - DNA, 25 bp, Homo sapien
tgttacgattagctccaaatgtgag

SEQ ID NO: 2954508 - DNA, 25 bp, Homo sapien
cactttgttgtctgtgtttcggatt

SEQ ID NO: 2954509 - DNA, 25 bp, Homo sapien
taccatcacaaggagcagtgaactg

SEQ ID NO: 2954510 - DNA, 25 bp, Homo sapien
aagatcctcgttggcatctcagagc

SEQ ID NO: 2954511 - DNA, 25 bp, Homo sapien
taaaatggagccgaagatcctcgtt

SEQ ID NO: 2954512 - DNA, 25 bp, Homo sapien
ctccccagttcaagtggttttcctg

SEQ ID NO: 2954513 - DNA, 25 bp, Homo sapien
tctacccgcttcagcctcccaaagt

SEQ ID NO: 2954514 - DNA, 25 bp, Homo sapien
tccccagttcaagtggttttcctgc

SEQ ID NO: 2954515 - DNA, 25 bp, Homo sapien
tgatctacccgcttcagcctcccaa

SEQ ID NO: 2954516 - DNA, 25 bp, Homo sapien
ttggtctgaatatgcctgactcccc

SEQ ID NO: 2954517 - DNA, 25 bp, Homo sapien
tccactctgtggcagtatgagcctg

SEQ ID NO: 2954518 - DNA, 25 bp, Homo sapien
gaagcgtgacttcattcagtgcctt

SEQ ID NO: 2954519 - DNA, 25 bp, Homo sapien
gccagtttctgacagacatggtcct

SEQ ID NO: 2954520 - DNA, 25 bp, Homo sapien
gataacggtcctgtaagacattggg

SEQ ID NO: 2954521 - DNA, 25 bp, Homo sapien
ggatcgtacccggagctggctctat

SEQ ID NO: 2954522 - DNA, 25 bp, Homo sapien
gtttgtcaactacccaactcaggtg

SEQ ID NO: 2954523 - DNA, 25 bp, Homo sapien
tctatctcctatctgggtgccatgg

SEQ ID NO: 2954524 - DNA, 25 bp, Homo sapien
cggtcgcatgcagctcctatgaggc

SEQ ID NO: 2954525 - DNA, 25 bp, Homo sapien
agttctggtagtgactgctgggccc

SEQ ID NO: 2954526 - DNA, 25 bp, Homo sapien
atctccagggcgagggatcagtctc

SEQ ID NO: 2954527 - DNA, 25 bp, Homo sapien
tggcagccatgagccggcagttctg

SEQ ID NO: 2954528 - DNA, 25 bp, Homo sapien
gcagcagctagacggcgctgaagct

SEQ ID NO: 2954529 - DNA, 25 bp, Homo sapien
cagtaaggaatttggcattaggacc

SEQ ID NO: 2954530 - DNA, 25 bp, Homo sapien
gcctagtgatgtgcctaggtaatga

SEQ ID NO: 2954531 - DNA, 25 bp, Homo sapien
caggtaaagtcgctgacgctgggca

SEQ ID NO: 2954532 - DNA, 25 bp, Homo sapien
gaatgttaatgttcgagttttctta

SEQ ID NO: 2954533 - DNA, 25 bp, Homo sapien
agtttgtatattttccgtactgcag

SEQ ID NO: 2954534 - DNA, 25 bp, Homo sapien
gcagatcttggtgttaatagaccaa

SEQ ID NO: 2954535 - DNA, 25 bp, Homo sapien
gtactgcagagcttacacaaaattg

SEQ ID NO: 2954536 - DNA, 25 bp, Homo sapien
gcatgggcttcatcttccgtaactg

SEQ ID NO: 2954537 - DNA, 25 bp, Homo sapien
tcctgtcctgacaagaacaaagtcc

SEQ ID NO: 2954538 - DNA, 25 bp, Homo sapien
gagcatttcccgttgtttagccata

SEQ ID NO: 2954539 - DNA, 25 bp, Homo sapien
caaagtccatttcaacccgactggc

SEQ ID NO: 2954540 - DNA, 25 bp, Homo sapien
cattagccgaaagaattgagagcca

SEQ ID NO: 2954541 - DNA, 25 bp, Homo sapien
aaccagattggatcgttcagaagcc

SEQ ID NO: 2954542 - DNA, 25 bp, Homo sapien
cgttagcaggcaccaaagagctcat

SEQ ID NO: 2954543 - DNA, 25 bp, Homo sapien
ccagcttaatactcaccagggcaga

SEQ ID NO: 2954544 - DNA, 25 bp, Homo sapien
tctctgagtcggagaagagttcttg

SEQ ID NO: 2954545 - DNA, 25 bp, Homo sapien
gcaacctaggcaaagtacattcact

SEQ ID NO: 2954546 - DNA, 25 bp, Homo sapien
tcaagggcatgatctaacaatacac

SEQ ID NO: 2954547 - DNA, 25 bp, Homo sapien
gattgtcacatcaaccccatgaggt

SEQ ID NO: 2954548 - DNA, 25 bp, Homo sapien
ccattacccctggtcagaatgaaag

SEQ ID NO: 2954549 - DNA, 25 bp, Homo sapien
aatgaaagactgtctaggcctggtg

SEQ ID NO: 2954550 - DNA, 25 bp, Homo sapien
ctggaagggctcaaccaagagctgg

SEQ ID NO: 2954551 - DNA, 25 bp, Homo sapien
caggctatggctacgcaaacagcag

SEQ ID NO: 2954552 - DNA, 25 bp, Homo sapien
tgaggtatccaactcgtctgaggaa

SEQ ID NO: 2954553 - DNA, 25 bp, Homo sapien
cccctatatgggcagaggtttcctg

SEQ ID NO: 2954554 - DNA, 25 bp, Homo sapien
aagagaaggagcgaggttcaccact

SEQ ID NO: 2954555 - DNA, 25 bp, Homo sapien
gagggacccagtgcactttggcttt

SEQ ID NO: 2954556 - DNA, 25 bp, Homo sapien
gatctagaactatgccagggattag

SEQ ID NO: 2954557 - DNA, 25 bp, Homo sapien
taagcacatatatgatggctgagtg

SEQ ID NO: 2954558 - DNA, 25 bp, Homo sapien
gaggaatccctcaaatgttcaaaaa

SEQ ID NO: 2954559 - DNA, 25 bp, Homo sapien
tgatgtccaaattggagaggaatcc

SEQ ID NO: 2954560 - DNA, 25 bp, Homo sapien
ttcattgtcttatctgccgtttgtg

SEQ ID NO: 2954561 - DNA, 25 bp, Homo sapien
attgtcttatctgccgtttgtgtgc

SEQ ID NO: 2954562 - DNA, 25 bp, Homo sapien
tcttatctgccgtttgtgtgccttc

SEQ ID NO: 2954563 - DNA, 25 bp, Homo sapien
gtcttatctgccgtttgtgtgcctt

SEQ ID NO: 2954564 - DNA, 25 bp, Homo sapien
tgttgaaatcctgcagaactcctct

SEQ ID NO: 2954565 - DNA, 25 bp, Homo sapien
tcttgcaaaggccatgtagatccca

SEQ ID NO: 2954566 - DNA, 25 bp, Homo sapien
gggctaggctatgtgctatttatgc

SEQ ID NO: 2954567 - DNA, 25 bp, Homo sapien
gtatgttccaatcagtaactgctag

SEQ ID NO: 2954568 - DNA, 25 bp, Homo sapien
tgagggtaggaggaatctttccaat

SEQ ID NO: 2954569 - DNA, 25 bp, Homo sapien
caggagaggcgacctcataagtatc

SEQ ID NO: 2954570 - DNA, 25 bp, Homo sapien
taagtatccttctgatatgaagctg

SEQ ID NO: 2954571 - DNA, 25 bp, Homo sapien
tatcttcaacactctttctggaagg

SEQ ID NO: 2954572 - DNA, 25 bp, Homo sapien
tgggagcataggcagcttctcttat

SEQ ID NO: 2954573 - DNA, 25 bp, Homo sapien
gctgttttaacctgcccagctgggt

SEQ ID NO: 2954574 - DNA, 25 bp, Homo sapien
aacggctgttttaacctgcccagct

SEQ ID NO: 2954575 - DNA, 25 bp, Homo sapien
tgtgattgggagcataggcagcttc

SEQ ID NO: 2954576 - DNA, 25 bp, Homo sapien
ccttgccttgaaggctgccaaccat

SEQ ID NO: 2954577 - DNA, 25 bp, Homo sapien
acagagtctgtgttccttgccttga

SEQ ID NO: 2954578 - DNA, 25 bp, Homo sapien
tgtgttccttgccttgaaggctgcc

SEQ ID NO: 2954579 - DNA, 25 bp, Homo sapien
tgttccttgccttgaaggctgccaa

SEQ ID NO: 2954580 - DNA, 25 bp, Homo sapien
tattcatcctggtcattgggcttga

SEQ ID NO: 2954581 - DNA, 25 bp, Homo sapien
ctattcatcctggtcattgggcttg

SEQ ID NO: 2954582 - DNA, 25 bp, Homo sapien
cagttggtggcaaagacgtggcatt

SEQ ID NO: 2954583 - DNA, 25 bp, Homo sapien
gtggcatttccatagatgtcattgc

SEQ ID NO: 2954584 - DNA, 25 bp, Homo sapien
tcaagtgcaatggaactcaccctgc

SEQ ID NO: 2954585 - DNA, 25 bp, Homo sapien
gtaggcacctcacgtttcaagttca

SEQ ID NO: 2954586 - DNA, 25 bp, Homo sapien
gtatactggaaattgtgtgcctgcc

SEQ ID NO: 2954587 - DNA, 25 bp, Homo sapien
tgagtcccttctgccgtatactgga

SEQ ID NO: 2954588 - DNA, 25 bp, Homo sapien
ttctgtacaggccaatcagcagccc

SEQ ID NO: 2954589 - DNA, 25 bp, Homo sapien
tgggtttccgcagtccaatgacagc

SEQ ID NO: 2954590 - DNA, 25 bp, Homo sapien
gccccgtacagcagataagcagcgg

SEQ ID NO: 2954591 - DNA, 25 bp, Homo sapien
tggcttggatcgctaggctcatcga

SEQ ID NO: 2954592 - DNA, 25 bp, Homo sapien
cacgtgacattatatttgcatacta

SEQ ID NO: 2954593 - DNA, 25 bp, Homo sapien
tcacgtgacattatatttgcatact

SEQ ID NO: 2954594 - DNA, 25 bp, Homo sapien
acgtgacattatatttgcatactac

SEQ ID NO: 2954595 - DNA, 25 bp, Homo sapien
aactgaggccccgttaagatggaga

SEQ ID NO: 2954596 - DNA, 25 bp, Homo sapien
accaattgcgactgggtggaaccca

SEQ ID NO: 2954597 - DNA, 25 bp, Homo sapien
gaggaccaagtcttgaccaattgcg

SEQ ID NO: 2954598 - DNA, 25 bp, Homo sapien
gctcagtcattaagttaggatcccg

SEQ ID NO: 2954599 - DNA, 25 bp, Homo sapien
gagtcagaaaagctttgaaccccat

SEQ ID NO: 2954600 - DNA, 25 bp, Homo sapien
cagagtcagaaaagctttgaacccc

SEQ ID NO: 2954601 - DNA, 25 bp, Homo sapien
agagtcagaaaagctttgaacccca

SEQ ID NO: 2954602 - DNA, 25 bp, Homo sapien
tgggcgtgggtagccattcttgttt

SEQ ID NO: 2954603 - DNA, 25 bp, Homo sapien
agaagcctgacagttgatgtaaacg

SEQ ID NO: 2954604 - DNA, 25 bp, Homo sapien
gcctgacagttgatgtaaacggttc

SEQ ID NO: 2954605 - DNA, 25 bp, Homo sapien
gacagttgatgtaaacggttctcat

SEQ ID NO: 2954606 - DNA, 25 bp, Homo sapien
caggaggcactagggatcgtccgca

SEQ ID NO: 2954607 - DNA, 25 bp, Homo sapien
gaggcactagggatcgtccgcagga

SEQ ID NO: 2954608 - DNA, 25 bp, Homo sapien
cgtccgcaggattgggactgataca

SEQ ID NO: 2954609 - DNA, 25 bp, Homo sapien
gatcgtccgcaggattgggactgat

SEQ ID NO: 2954610 - DNA, 25 bp, Homo sapien
gtccgcaggattgggactgatacag

SEQ ID NO: 2954611 - DNA, 25 bp, Homo sapien
tcgtccgcaggattgggactgatac

SEQ ID NO: 2954612 - DNA, 25 bp, Homo sapien
tcctgcggacgatccctagtgcctc

SEQ ID NO: 2954613 - DNA, 25 bp, Homo sapien
gtatcagtcccaatcctgcggacga

SEQ ID NO: 2954614 - DNA, 25 bp, Homo sapien
ctgtatcagtcccaatcctgcggac

SEQ ID NO: 2954615 - DNA, 25 bp, Homo sapien
tgtatcagtcccaatcctgcggacg

SEQ ID NO: 2954616 - DNA, 25 bp, Homo sapien
tatcagtcccaatcctgcggacgat

SEQ ID NO: 2954617 - DNA, 25 bp, Homo sapien
tgcggacgatccctagtgcctcctg

SEQ ID NO: 2954618 - DNA, 25 bp, Homo sapien
cgccgctgcccgaatcggaaccgtc

SEQ ID NO: 2954619 - DNA, 25 bp, Homo sapien
gccgctgcccgaatcggaaccgtcg

SEQ ID NO: 2954620 - DNA, 25 bp, Homo sapien
ccgccggagccaccgttcctgctgc

SEQ ID NO: 2954621 - DNA, 25 bp, Homo sapien
gagcccgccggagccaccgttcctg

SEQ ID NO: 2954622 - DNA, 25 bp, Homo sapien
atcggaaccgtcgggccgcagccgc

SEQ ID NO: 2954623 - DNA, 25 bp, Homo sapien
ccgccgctgcccgaatcggaaccgt

SEQ ID NO: 2954624 - DNA, 25 bp, Homo sapien
cgacggttccgattcgggcagcggc

SEQ ID NO: 2954625 - DNA, 25 bp, Homo sapien
acggttccgattcgggcagcggcgg

SEQ ID NO: 2954626 - DNA, 25 bp, Homo sapien
gcagcaggaacggtggctccggcgg

SEQ ID NO: 2954627 - DNA, 25 bp, Homo sapien
gacggttccgattcgggcagcggcg

SEQ ID NO: 2954628 - DNA, 25 bp, Homo sapien
caggaacggtggctccggcgggctc

SEQ ID NO: 2954629 - DNA, 25 bp, Homo sapien
gcggctgcggcccgacggttccgat

SEQ ID NO: 2954630 - DNA, 25 bp, Homo sapien
aatcggaaccgtcgggccgcagccg

SEQ ID NO: 2954631 - DNA, 25 bp, Homo sapien
cggagccaccgttcctgctgctgcc

SEQ ID NO: 2954632 - DNA, 25 bp, Homo sapien
ccgccggagccaccgttcctgctgc

SEQ ID NO: 2954633 - DNA, 25 bp, Homo sapien
gagcccgccggagccaccgttcctg

SEQ ID NO: 2954634 - DNA, 25 bp, Homo sapien
cgaatcggaaccgtcgggccgcagc

SEQ ID NO: 2954635 - DNA, 25 bp, Homo sapien
cgctgcccgaatcggaaccgtcggg

SEQ ID NO: 2954636 - DNA, 25 bp, Homo sapien
gctgcggcccgacggttccgattcg

SEQ ID NO: 2954637 - DNA, 25 bp, Homo sapien
gcagcaggaacggtggctccggcgg

SEQ ID NO: 2954638 - DNA, 25 bp, Homo sapien
caggaacggtggctccggcgggctc

SEQ ID NO: 2954639 - DNA, 25 bp, Homo sapien
gacggttccgattcgggcagcggcg

SEQ ID NO: 2954640 - DNA, 25 bp, Homo sapien
cggctgcggcccgacggttccgatt

SEQ ID NO: 2954641 - DNA, 25 bp, Homo sapien
cccgacggttccgattcgggcagcg

SEQ ID NO: 2954642 - DNA, 25 bp, Homo sapien
caccgtgacgcagttggccacgcct

SEQ ID NO: 2954643 - DNA, 25 bp, Homo sapien
ctcacagtgcttgggtcccaacttt

SEQ ID NO: 2954644 - DNA, 25 bp, Homo sapien
gaaccttgttcagctaccctctctt

SEQ ID NO: 2954645 - DNA, 25 bp, Homo sapien
gtgcttgggtcccaactttccgctc

SEQ ID NO: 2954646 - DNA, 25 bp, Homo sapien
agtcgattgagcaccgtgacgcagt

SEQ ID NO: 2954647 - DNA, 25 bp, Homo sapien
gacagtcgattgagcaccgtgacgc

SEQ ID NO: 2954648 - DNA, 25 bp, Homo sapien
aggcgtggccaactgcgtcacggtg

SEQ ID NO: 2954649 - DNA, 25 bp, Homo sapien
gagcggaaagttgggacccaagcac

SEQ ID NO: 2954650 - DNA, 25 bp, Homo sapien
gcgtcacggtgctcaatcgactgtc

SEQ ID NO: 2954651 - DNA, 25 bp, Homo sapien
actgcgtcacggtgctcaatcgact

SEQ ID NO: 2954652 - DNA, 25 bp, Homo sapien
aagagagggtagctgaacaaggttc

SEQ ID NO: 2954653 - DNA, 25 bp, Homo sapien
aaagttgggacccaagcactgtgag

SEQ ID NO: 2954654 - DNA, 25 bp, Homo sapien
tgcttgcctggatcggaggcgttct

SEQ ID NO: 2954655 - DNA, 25 bp, Homo sapien
ggcctatgcttgcaactattcccgc

SEQ ID NO: 2954656 - DNA, 25 bp, Homo sapien
gcctggatcggaggcgttcttatta

SEQ ID NO: 2954657 - DNA, 25 bp, Homo sapien
ggatcggaggcgttcttattaattg

SEQ ID NO: 2954658 - DNA, 25 bp, Homo sapien
tggcctcggcctatgcttgcaacta

SEQ ID NO: 2954659 - DNA, 25 bp, Homo sapien
ctctgcttgcctggatcggaggcgt

SEQ ID NO: 2954660 - DNA, 25 bp, Homo sapien
taataagaacgcctccgatccaggc

SEQ ID NO: 2954661 - DNA, 25 bp, Homo sapien
caattaataagaacgcctccgatcc

SEQ ID NO: 2954662 - DNA, 25 bp, Homo sapien
acgcctccgatccaggcaagcagag

SEQ ID NO: 2954663 - DNA, 25 bp, Homo sapien
cagagggcgggaatagttgcaagca

SEQ ID NO: 2954664 - DNA, 25 bp, Homo sapien
atagttgcaagcataggccgaggcc

SEQ ID NO: 2954665 - DNA, 25 bp, Homo sapien
gcgggaatagttgcaagcataggcc

SEQ ID NO: 2954666 - DNA, 25 bp, Homo sapien
attgattggctggtgacgccgcctg

SEQ ID NO: 2954667 - DNA, 25 bp, Homo sapien
tgtttgggctcaacggtcacctccc

SEQ ID NO: 2954668 - DNA, 25 bp, Homo sapien
cctgtttgggctcaacggtcacctc

SEQ ID NO: 2954669 - DNA, 25 bp, Homo sapien
atattgattggctggtgacgccgcc

SEQ ID NO: 2954670 - DNA, 25 bp, Homo sapien
gattggctggtgacgccgcctgttt

SEQ ID NO: 2954671 - DNA, 25 bp, Homo sapien
tggtgacgccgcctgtttgggctca

SEQ ID NO: 2954672 - DNA, 25 bp, Homo sapien
gaggtgaccgttgagcccaaacagg

SEQ ID NO: 2954673 - DNA, 25 bp, Homo sapien
caaacaggcggcgtcaccagccaat

SEQ ID NO: 2954674 - DNA, 25 bp, Homo sapien
ggcggcgtcaccagccaatcaatat

SEQ ID NO: 2954675 - DNA, 25 bp, Homo sapien
gggaggtgaccgttgagcccaaaca

SEQ ID NO: 2954676 - DNA, 25 bp, Homo sapien
tgagcccaaacaggcggcgtcacca

SEQ ID NO: 2954677 - DNA, 25 bp, Homo sapien
caggcggcgtcaccagccaatcaat

SEQ ID NO: 2954678 - DNA, 25 bp, Homo sapien
gaaggaataagtctcacgtcaaggc

SEQ ID NO: 2954679 - DNA, 25 bp, Homo sapien
caggcagtggcagatccagaatata

SEQ ID NO: 2954680 - DNA, 25 bp, Homo sapien
ttacagctgaactaacggaggccca

SEQ ID NO: 2954681 - DNA, 25 bp, Homo sapien
tattgactactttctgcgcggtggt

SEQ ID NO: 2954682 - DNA, 25 bp, Homo sapien
tcgacagcgcctagaaaatgcagtt

SEQ ID NO: 2954683 - DNA, 25 bp, Homo sapien
gagcagttaagtctgccctggagta

SEQ ID NO: 2954684 - DNA, 25 bp, Homo sapien
gcgcccactcgcaggggatccctct

SEQ ID NO: 2954685 - DNA, 25 bp, Homo sapien
ggtgggaagccagcgcccactcgca

SEQ ID NO: 2954686 - DNA, 25 bp, Homo sapien
aagccagcgcccactcgcaggggat

SEQ ID NO: 2954687 - DNA, 25 bp, Homo sapien
gtgggaagccagcgcccactcgcag

SEQ ID NO: 2954688 - DNA, 25 bp, Homo sapien
tgggaagccagcgcccactcgcagg

SEQ ID NO: 2954689 - DNA, 25 bp, Homo sapien
tggtgggaagccagcgcccactcgc

SEQ ID NO: 2954690 - DNA, 25 bp, Homo sapien
atcccctgcgagtgggcgctggctt

SEQ ID NO: 2954691 - DNA, 25 bp, Homo sapien
gcgagtgggcgctggcttcccacca

SEQ ID NO: 2954692 - DNA, 25 bp, Homo sapien
tgcgagtgggcgctggcttcccacc

SEQ ID NO: 2954693 - DNA, 25 bp, Homo sapien
gggatcccctgcgagtgggcgctgg

SEQ ID NO: 2954694 - DNA, 25 bp, Homo sapien
gagagggatcccctgcgagtgggcg

SEQ ID NO: 2954695 - DNA, 25 bp, Homo sapien
tcccctgcgagtgggcgctggcttc

SEQ ID NO: 2954696 - DNA, 25 bp, Homo sapien
ggctgtgacacccttaagccaggga

SEQ ID NO: 2954697 - DNA, 25 bp, Homo sapien
ccaccgcgcagaaagtagtcaatag

SEQ ID NO: 2954698 - DNA, 25 bp, Homo sapien
tatattctggatctgccactgcctg

SEQ ID NO: 2954699 - DNA, 25 bp, Homo sapien
gacgtgagacttattccttcctggc

SEQ ID NO: 2954700 - DNA, 25 bp, Homo sapien
tgggcctccgttagttcagctgtaa

SEQ ID NO: 2954701 - DNA, 25 bp, Homo sapien
aactgcattttctaggcgctgtcga

SEQ ID NO: 2954702 - DNA, 25 bp, Homo sapien
gcacatcccgacgatctgctcgagt

SEQ ID NO: 2954703 - DNA, 25 bp, Homo sapien
gccaggctaagccagagttctcaag

SEQ ID NO: 2954704 - DNA, 25 bp, Homo sapien
cagttcagaaagtgatggcacatcc

SEQ ID NO: 2954705 - DNA, 25 bp, Homo sapien
gaatgcaggcagtagttcagatgga

SEQ ID NO: 2954706 - DNA, 25 bp, Homo sapien
gttcagatggaaccgaagattccga

SEQ ID NO: 2954707 - DNA, 25 bp, Homo sapien
ttttctacagatctcgagcacacag

SEQ ID NO: 2954708 - DNA, 25 bp, Homo sapien
ggatgtgccatcactttctgaactg

SEQ ID NO: 2954709 - DNA, 25 bp, Homo sapien
gaactctggcttagcctggctgagg

SEQ ID NO: 2954710 - DNA, 25 bp, Homo sapien
aaatcggaatcttcggttccatctg

SEQ ID NO: 2954711 - DNA, 25 bp, Homo sapien
tgactcgagcagatcgtcgggatgt

SEQ ID NO: 2954712 - DNA, 25 bp, Homo sapien
tctgtgtgctcgagatctgtagaaa

SEQ ID NO: 2954713 - DNA, 25 bp, Homo sapien
gttccatctgaactactgcctgcat

SEQ ID NO: 2954714 - DNA, 25 bp, Homo sapien
cagaagtgctggacatcgggcagca

SEQ ID NO: 2954715 - DNA, 25 bp, Homo sapien
cgttccaaagaaaggttctgtggag

SEQ ID NO: 2954716 - DNA, 25 bp, Homo sapien
ccttgaagaagtatggtggtggaac

SEQ ID NO: 2954717 - DNA, 25 bp, Homo sapien
tgttgttggagagtgagcagttcct

SEQ ID NO: 2954718 - DNA, 25 bp, Homo sapien
tggacatcgggcagcatctatatca

SEQ ID NO: 2954719 - DNA, 25 bp, Homo sapien
ctttgagccctcagacaagtgtctg

SEQ ID NO: 2954720 - DNA, 25 bp, Homo sapien
ttaacagacacttgtctgagggctc

SEQ ID NO: 2954721 - DNA, 25 bp, Homo sapien
gatatagatgctgcccgatgtccag

SEQ ID NO: 2954722 - DNA, 25 bp, Homo sapien
cagacacttgtctgagggctcaaag

SEQ ID NO: 2954723 - DNA, 25 bp, Homo sapien
tgatatagatgctgcccgatgtcca

SEQ ID NO: 2954724 - DNA, 25 bp, Homo sapien
gttccaccaccatacttcttcaagg

SEQ ID NO: 2954725 - DNA, 25 bp, Homo sapien
aggaactgctcactctccaacaaca

SEQ ID NO: 2954726 - DNA, 25 bp, Homo sapien
aaacctaccgagtgctaacatggat

SEQ ID NO: 2954727 - DNA, 25 bp, Homo sapien
atccatgttagcactcggtaggttt

SEQ ID NO: 2954728 - DNA, 25 bp, Homo sapien
cctaccgagtgctaacatggatggg

SEQ ID NO: 2954729 - DNA, 25 bp, Homo sapien
ctgtggtgagctccaaccaagtgaa

SEQ ID NO: 2954730 - DNA, 25 bp, Homo sapien
ggcttattcaaacctaccgagtgct

SEQ ID NO: 2954731 - DNA, 25 bp, Homo sapien
gagctccaaccaagtgaataagttt

SEQ ID NO: 2954732 - DNA, 25 bp, Homo sapien
aaacctaccgagtgctaacatggat

SEQ ID NO: 2954733 - DNA, 25 bp, Homo sapien
gcactgtggtgagctccaaccaagt

SEQ ID NO: 2954734 - DNA, 25 bp, Homo sapien
cccatccatgttagcactcggtagg

SEQ ID NO: 2954735 - DNA, 25 bp, Homo sapien
gaaacttattcacttggttggagct

SEQ ID NO: 2954736 - DNA, 25 bp, Homo sapien
ttcacttggttggagctcaccacag

SEQ ID NO: 2954737 - DNA, 25 bp, Homo sapien
agcactcggtaggtttgaataagcc

SEQ ID NO: 2954738 - DNA, 25 bp, Homo sapien
acttggttggagctcaccacagtgc

SEQ ID NO: 2954739 - DNA, 25 bp, Homo sapien
atccatgttagcactcggtaggttt

SEQ ID NO: 2954740 - DNA, 25 bp, Homo sapien
ctatgattaaacatgtctctttata

SEQ ID NO: 2954741 - DNA, 25 bp, Homo sapien
gaatagttgcaatgtttatagggca

SEQ ID NO: 2954742 - DNA, 25 bp, Homo sapien
atagttgcaatgtttatagggcagt

SEQ ID NO: 2954743 - DNA, 25 bp, Homo sapien
aatagttgcaatgtttatagggcag

SEQ ID NO: 2954744 - DNA, 25 bp, Homo sapien
catggttatatactcctggattata

SEQ ID NO: 2954745 - DNA, 25 bp, Homo sapien
ggttatatactcctggattatagat

SEQ ID NO: 2954746 - DNA, 25 bp, Homo sapien
atggttatatactcctggattatag

SEQ ID NO: 2954747 - DNA, 25 bp, Homo sapien
tggttatatactcctggattataga

SEQ ID NO: 2954748 - DNA, 25 bp, Homo sapien
gcatggttatatactcctggattat

SEQ ID NO: 2954749 - DNA, 25 bp, Homo sapien
tataatccaggagtatataaccatg

SEQ ID NO: 2954750 - DNA, 25 bp, Homo sapien
ctataatccaggagtatataaccat

SEQ ID NO: 2954751 - DNA, 25 bp, Homo sapien
atctataatccaggagtatataacc

SEQ ID NO: 2954752 - DNA, 25 bp, Homo sapien
tctataatccaggagtatataacca

SEQ ID NO: 2954753 - DNA, 25 bp, Homo sapien
ataatccaggagtatataaccatgc

SEQ ID NO: 2954754 - DNA, 25 bp, Homo sapien
ctgccctataaacattgcaactatt

SEQ ID NO: 2954755 - DNA, 25 bp, Homo sapien
tgccctataaacattgcaactattc

SEQ ID NO: 2954756 - DNA, 25 bp, Homo sapien
tataaagagacatgtttaatcatag

SEQ ID NO: 2954757 - DNA, 25 bp, Homo sapien
actgccctataaacattgcaactat

SEQ ID NO: 2954758 - DNA, 25 bp, Homo sapien
ctatgattaaacatgtctctttata

SEQ ID NO: 2954759 - DNA, 25 bp, Homo sapien
gcaatgtttatagggcagttgtggt

SEQ ID NO: 2954760 - DNA, 25 bp, Homo sapien
ttaaaagtctctgtagtcatctctg

SEQ ID NO: 2954761 - DNA, 25 bp, Homo sapien
gaatagttgcaatgtttatagggca

SEQ ID NO: 2954762 - DNA, 25 bp, Homo sapien
atagttgcaatgtttatagggcagt

SEQ ID NO: 2954763 - DNA, 25 bp, Homo sapien
aatagttgcaatgtttatagggcag

SEQ ID NO: 2954764 - DNA, 25 bp, Homo sapien
cagagatgactacagagacttttaa

SEQ ID NO: 2954765 - DNA, 25 bp, Homo sapien
cacaactgccctataaacattgcaa

SEQ ID NO: 2954766 - DNA, 25 bp, Homo sapien
tgccctataaacattgcaactattc

SEQ ID NO: 2954767 - DNA, 25 bp, Homo sapien
tataaagagacatgtttaatcatag

SEQ ID NO: 2954768 - DNA, 25 bp, Homo sapien
accacaactgccctataaacattgc

SEQ ID NO: 2954769 - DNA, 25 bp, Homo sapien
actgccctataaacattgcaactat

SEQ ID NO: 2954770 - DNA, 25 bp, Homo sapien
ggcagactcgttcatctggttcaga

SEQ ID NO: 2954771 - DNA, 25 bp, Homo sapien
agagtgacccgtagtcagcagcagc

SEQ ID NO: 2954772 - DNA, 25 bp, Homo sapien
cagtgacaccgaaaaaataccctct

SEQ ID NO: 2954773 - DNA, 25 bp, Homo sapien
gagcaagtggttgatttttcagata

SEQ ID NO: 2954774 - DNA, 25 bp, Homo sapien
tactctaccagaagagtgacccgta

SEQ ID NO: 2954775 - DNA, 25 bp, Homo sapien
gaggagcctgcttactctaccagaa

SEQ ID NO: 2954776 - DNA, 25 bp, Homo sapien
ttctggtagagtaagcaggctcctc

SEQ ID NO: 2954777 - DNA, 25 bp, Homo sapien
tatctgaaaaatcaaccacttgctc

SEQ ID NO: 2954778 - DNA, 25 bp, Homo sapien
gactacgggtcactcttctggtaga

SEQ ID NO: 2954779 - DNA, 25 bp, Homo sapien
tctgaaccagatgaacgagtctgcc

SEQ ID NO: 2954780 - DNA, 25 bp, Homo sapien
agagggtattttttcggtgtcactg

SEQ ID NO: 2954781 - DNA, 25 bp, Homo sapien
ggctgctgctgactacgggtcactc

SEQ ID NO: 2954782 - DNA, 25 bp, Homo sapien
aagcgccgtcgcttccatgaaagct

SEQ ID NO: 2954783 - DNA, 25 bp, Homo sapien
gatcatgatgagtcaccgcctcgaa

SEQ ID NO: 2954784 - DNA, 25 bp, Homo sapien
gcctcgaactccaactggaaatgcg

SEQ ID NO: 2954785 - DNA, 25 bp, Homo sapien
tctcacgatgagagcattgccaagg

SEQ ID NO: 2954786 - DNA, 25 bp, Homo sapien
gaaatgcgccttcttctgagtctga

SEQ ID NO: 2954787 - DNA, 25 bp, Homo sapien
tccagccccaatgtatctcacgatg

SEQ ID NO: 2954788 - DNA, 25 bp, Homo sapien
ccttggcaatgctctcatcgtgaga

SEQ ID NO: 2954789 - DNA, 25 bp, Homo sapien
gagagttacagcctggtgtaggaca

SEQ ID NO: 2954790 - DNA, 25 bp, Homo sapien
catttccagttggagttcgaggcgg

SEQ ID NO: 2954791 - DNA, 25 bp, Homo sapien
tcgaggcggtgactcatcatgatca

SEQ ID NO: 2954792 - DNA, 25 bp, Homo sapien
tatgtcagactcagaagaaggcgca

SEQ ID NO: 2954793 - DNA, 25 bp, Homo sapien
tagctttcatggaagcgacggcgct

SEQ ID NO: 2954794 - DNA, 25 bp, Homo sapien
caggcacgtggctttcaagcttggc

SEQ ID NO: 2954795 - DNA, 25 bp, Homo sapien
gcacgtggctttcaagcttggcttt

SEQ ID NO: 2954796 - DNA, 25 bp, Homo sapien
ctacaggcacgtggctttcaagctt

SEQ ID NO: 2954797 - DNA, 25 bp, Homo sapien
ggcacgtggctttcaagcttggctt

SEQ ID NO: 2954798 - DNA, 25 bp, Homo sapien
acaggcacgtggctttcaagcttgg

SEQ ID NO: 2954799 - DNA, 25 bp, Homo sapien
aggcacgtggctttcaagcttggct

SEQ ID NO: 2954800 - DNA, 25 bp, Homo sapien
agccaagcttgaaagccacgtgcct

SEQ ID NO: 2954801 - DNA, 25 bp, Homo sapien
aagccaagcttgaaagccacgtgcc

SEQ ID NO: 2954802 - DNA, 25 bp, Homo sapien
aagcttgaaagccacgtgcctgtag

SEQ ID NO: 2954803 - DNA, 25 bp, Homo sapien
gccaagcttgaaagccacgtgcctg

SEQ ID NO: 2954804 - DNA, 25 bp, Homo sapien
ccaagcttgaaagccacgtgcctgt

SEQ ID NO: 2954805 - DNA, 25 bp, Homo sapien
aaagccaagcttgaaagccacgtgc

SEQ ID NO: 2954806 - DNA, 25 bp, Homo sapien
caggttggataacattgcacagtag

SEQ ID NO: 2954807 - DNA, 25 bp, Homo sapien
tttagtataggagagttacattcca

SEQ ID NO: 2954808 - DNA, 25 bp, Homo sapien
tataacctgattaatttagtatagg

SEQ ID NO: 2954809 - DNA, 25 bp, Homo sapien
tgttgacttcgtgacattttgagat

SEQ ID NO: 2954810 - DNA, 25 bp, Homo sapien
cctgttcatagtcttgggctttaat

SEQ ID NO: 2954811 - DNA, 25 bp, Homo sapien
ggataacattgcacagtagaaagaa

SEQ ID NO: 2954812 - DNA, 25 bp, Homo sapien
attaaagcccaagactatgaacagg

SEQ ID NO: 2954813 - DNA, 25 bp, Homo sapien
aatctcaaaatgtcacgaagtcaac

SEQ ID NO: 2954814 - DNA, 25 bp, Homo sapien
tggaatgtaactctcctatactaaa

SEQ ID NO: 2954815 - DNA, 25 bp, Homo sapien
tctttctactgtgcaatgttatcca

SEQ ID NO: 2954816 - DNA, 25 bp, Homo sapien
tctactgtgcaatgttatccaacct

SEQ ID NO: 2954817 - DNA, 25 bp, Homo sapien
tctcctatactaaattaatcaggtt

SEQ ID NO: 2954818 - DNA, 25 bp, Homo sapien
ttcaaagactgccagatccatcctg

SEQ ID NO: 2954819 - DNA, 25 bp, Homo sapien
caaagactgccagatccatcctgtg

SEQ ID NO: 2954820 - DNA, 25 bp, Homo sapien
tgttcaaagactgccagatccatcc

SEQ ID NO: 2954821 - DNA, 25 bp, Homo sapien
gactgccagatccatcctgtggaag

SEQ ID NO: 2954822 - DNA, 25 bp, Homo sapien
tgccagatccatcctgtggaagaaa

SEQ ID NO: 2954823 - DNA, 25 bp, Homo sapien
gccagatccatcctgtggaagaaaa

SEQ ID NO: 2954824 - DNA, 25 bp, Homo sapien
caggatggatctggcagtctttgaa

SEQ ID NO: 2954825 - DNA, 25 bp, Homo sapien
ttttcttccacaggatggatctggc

SEQ ID NO: 2954826 - DNA, 25 bp, Homo sapien
tcttccacaggatggatctggcagt

SEQ ID NO: 2954827 - DNA, 25 bp, Homo sapien
ttccacaggatggatctggcagtct

SEQ ID NO: 2954828 - DNA, 25 bp, Homo sapien
gatggatctggcagtctttgaacat

SEQ ID NO: 2954829 - DNA, 25 bp, Homo sapien
cacaggatggatctggcagtctttg

SEQ ID NO: 2954830 - DNA, 25 bp, Homo sapien
catgagagacatttctccatctcag

SEQ ID NO: 2954831 - DNA, 25 bp, Homo sapien
acatgagagacatttctccatctca

SEQ ID NO: 2954832 - DNA, 25 bp, Homo sapien
aacatgagagacatttctccatctc

SEQ ID NO: 2954833 - DNA, 25 bp, Homo sapien
tgagatggagaaatgtctctcatgt

SEQ ID NO: 2954834 - DNA, 25 bp, Homo sapien
ctgagatggagaaatgtctctcatg

SEQ ID NO: 2954835 - DNA, 25 bp, Homo sapien
gagatggagaaatgtctctcatgtt

SEQ ID NO: 2954836 - DNA, 25 bp, Homo sapien
catgagagacatttctccatctcag

SEQ ID NO: 2954837 - DNA, 25 bp, Homo sapien
caccttacaggaaaacatgagagac

SEQ ID NO: 2954838 - DNA, 25 bp, Homo sapien
acatgagagacatttctccatctca

SEQ ID NO: 2954839 - DNA, 25 bp, Homo sapien
caggaaaacatgagagacatttctc

SEQ ID NO: 2954840 - DNA, 25 bp, Homo sapien
aacatgagagacatttctccatctc

SEQ ID NO: 2954841 - DNA, 25 bp, Homo sapien
gacaccttacaggaaaacatgagag

SEQ ID NO: 2954842 - DNA, 25 bp, Homo sapien
ctctcatgttttcctgtaaggtgtc

SEQ ID NO: 2954843 - DNA, 25 bp, Homo sapien
tgagatggagaaatgtctctcatgt

SEQ ID NO: 2954844 - DNA, 25 bp, Homo sapien
gagaaatgtctctcatgttttcctg

SEQ ID NO: 2954845 - DNA, 25 bp, Homo sapien
gtctctcatgttttcctgtaaggtg

SEQ ID NO: 2954846 - DNA, 25 bp, Homo sapien
gagatggagaaatgtctctcatgtt

SEQ ID NO: 2954847 - DNA, 25 bp, Homo sapien
ctgagatggagaaatgtctctcatg

SEQ ID NO: 2954848 - DNA, 25 bp, Homo sapien
ataacctctcagctgacgaatgcaa

SEQ ID NO: 2954849 - DNA, 25 bp, Homo sapien
atgcccactgtatcataacctctca

SEQ ID NO: 2954850 - DNA, 25 bp, Homo sapien
tgcccactgtatcataacctctcag

SEQ ID NO: 2954851 - DNA, 25 bp, Homo sapien
taacctctcagctgacgaatgcaag

SEQ ID NO: 2954852 - DNA, 25 bp, Homo sapien
cataacctctcagctgacgaatgca

SEQ ID NO: 2954853 - DNA, 25 bp, Homo sapien
gatgcccactgtatcataacctctc

SEQ ID NO: 2954854 - DNA, 25 bp, Homo sapien
cttgcattcgtcagctgagaggtta

SEQ ID NO: 2954855 - DNA, 25 bp, Homo sapien
gagaggttatgatacagtgggcatc

SEQ ID NO: 2954856 - DNA, 25 bp, Homo sapien
tgagaggttatgatacagtgggcat

SEQ ID NO: 2954857 - DNA, 25 bp, Homo sapien
tgcattcgtcagctgagaggttatg

SEQ ID NO: 2954858 - DNA, 25 bp, Homo sapien
ctgagaggttatgatacagtgggca

SEQ ID NO: 2954859 - DNA, 25 bp, Homo sapien
ttgcattcgtcagctgagaggttat

SEQ ID NO: 2954860 - DNA, 25 bp, Homo sapien
tcacaggcaagatgacaacaacagg

SEQ ID NO: 2954861 - DNA, 25 bp, Homo sapien
cagagccgggataagcagatagaag

SEQ ID NO: 2954862 - DNA, 25 bp, Homo sapien
gccgggataagcagatagaagaaag

SEQ ID NO: 2954863 - DNA, 25 bp, Homo sapien
gataagcagatagaagaaaggatgc

SEQ ID NO: 2954864 - DNA, 25 bp, Homo sapien
gcacagagccgggataagcagatag

SEQ ID NO: 2954865 - DNA, 25 bp, Homo sapien
gaagaaaggatgctgtctcacaggc

SEQ ID NO: 2954866 - DNA, 25 bp, Homo sapien
tctatctgcttatcccggctctgtg

SEQ ID NO: 2954867 - DNA, 25 bp, Homo sapien
gcctgtgagacagcatcctttcttc

SEQ ID NO: 2954868 - DNA, 25 bp, Homo sapien
gcctgttgttgtcatcttgcctgtg

SEQ ID NO: 2954869 - DNA, 25 bp, Homo sapien
cctgttgttgtcatcttgcctgtga

SEQ ID NO: 2954870 - DNA, 25 bp, Homo sapien
tttcttctatctgcttatcccggct

SEQ ID NO: 2954871 - DNA, 25 bp, Homo sapien
tcctttcttctatctgcttatcccg

SEQ ID NO: 2954872 - DNA, 25 bp, Homo sapien
gcaccaacggagagacagcttcgat

SEQ ID NO: 2954873 - DNA, 25 bp, Homo sapien
caacggagagacagcttcgatataa

SEQ ID NO: 2954874 - DNA, 25 bp, Homo sapien
caccaacggagagacagcttcgata

SEQ ID NO: 2954875 - DNA, 25 bp, Homo sapien
gaaattctggactgagcaaagaaca

SEQ ID NO: 2954876 - DNA, 25 bp, Homo sapien
ccaacggagagacagcttcgatata

SEQ ID NO: 2954877 - DNA, 25 bp, Homo sapien
aagaaattctggactgagcaaagaa

SEQ ID NO: 2954878 - DNA, 25 bp, Homo sapien
tatatcgaagctgtctctccgttgg

SEQ ID NO: 2954879 - DNA, 25 bp, Homo sapien
tgttctttgctcagtccagaatttc

SEQ ID NO: 2954880 - DNA, 25 bp, Homo sapien
atcgaagctgtctctccgttggtgc

SEQ ID NO: 2954881 - DNA, 25 bp, Homo sapien
ttatatcgaagctgtctctccgttg

SEQ ID NO: 2954882 - DNA, 25 bp, Homo sapien
tatcgaagctgtctctccgttggtg

SEQ ID NO: 2954883 - DNA, 25 bp, Homo sapien
atatcgaagctgtctctccgttggt

SEQ ID NO: 2954884 - DNA, 25 bp, Homo sapien
tctcaggattctgggaatttgtagt

SEQ ID NO: 2954885 - DNA, 25 bp, Homo sapien
gattctgggaatttgtagtgtctct

SEQ ID NO: 2954886 - DNA, 25 bp, Homo sapien
attctgggaatttgtagtgtctctg

SEQ ID NO: 2954887 - DNA, 25 bp, Homo sapien
ttctgggaatttgtagtgtctctgg

SEQ ID NO: 2954888 - DNA, 25 bp, Homo sapien
caggattctgggaatttgtagtgtc

SEQ ID NO: 2954889 - DNA, 25 bp, Homo sapien
ggattctgggaatttgtagtgtctc

SEQ ID NO: 2954890 - DNA, 25 bp, Homo sapien
ccagagacactacaaattcccagaa

SEQ ID NO: 2954891 - DNA, 25 bp, Homo sapien
gagacactacaaattcccagaatcc

SEQ ID NO: 2954892 - DNA, 25 bp, Homo sapien
gacactacaaattcccagaatcctg

SEQ ID NO: 2954893 - DNA, 25 bp, Homo sapien
actacaaattcccagaatcctgaga

SEQ ID NO: 2954894 - DNA, 25 bp, Homo sapien
cagagacactacaaattcccagaat

SEQ ID NO: 2954895 - DNA, 25 bp, Homo sapien
agagacactacaaattcccagaatc

SEQ ID NO: 2954896 - DNA, 25 bp, Homo sapien
tggatcttttccgaagagcacaagc

SEQ ID NO: 2954897 - DNA, 25 bp, Homo sapien
acacagacagacctatgggaacaca

SEQ ID NO: 2954898 - DNA, 25 bp, Homo sapien
gaacacagacagacctatgggaaca

SEQ ID NO: 2954899 - DNA, 25 bp, Homo sapien
tcttttccgaagagcacaagcccgg

SEQ ID NO: 2954900 - DNA, 25 bp, Homo sapien
gacttggatcttttccgaagagcac

SEQ ID NO: 2954901 - DNA, 25 bp, Homo sapien
tttccgaagagcacaagcccgggct

SEQ ID NO: 2954902 - DNA, 25 bp, Homo sapien
tgttcccataggtctgtctgtgttc

SEQ ID NO: 2954903 - DNA, 25 bp, Homo sapien
gcttgtgctcttcggaaaagatcca

SEQ ID NO: 2954904 - DNA, 25 bp, Homo sapien
tgtgttcccataggtctgtctgtgt

SEQ ID NO: 2954905 - DNA, 25 bp, Homo sapien
ccgggcttgtgctcttcggaaaaga

SEQ ID NO: 2954906 - DNA, 25 bp, Homo sapien
gtgctcttcggaaaagatccaagtc

SEQ ID NO: 2954907 - DNA, 25 bp, Homo sapien
agcccgggcttgtgctcttcggaaa

SEQ ID NO: 2954908 - DNA, 25 bp, Homo sapien
aaacctccaaactgaaggccgcttg

SEQ ID NO: 2954909 - DNA, 25 bp, Homo sapien
actgaaggccgcttgtgaaaggtgc

SEQ ID NO: 2954910 - DNA, 25 bp, Homo sapien
aaatgattgcaaatcagtttgatgg

SEQ ID NO: 2954911 - DNA, 25 bp, Homo sapien
acctccaaactgaaggccgcttgtg

SEQ ID NO: 2954912 - DNA, 25 bp, Homo sapien
tgaaggccgcttgtgaaaggtgctt

SEQ ID NO: 2954913 - DNA, 25 bp, Homo sapien
ctccaaactgaaggccgcttgtgaa

SEQ ID NO: 2954914 - DNA, 25 bp, Homo sapien
ttcacaagcggccttcagtttggag

SEQ ID NO: 2954915 - DNA, 25 bp, Homo sapien
gcacctttcacaagcggccttcagt

SEQ ID NO: 2954916 - DNA, 25 bp, Homo sapien
aagcacctttcacaagcggccttca

SEQ ID NO: 2954917 - DNA, 25 bp, Homo sapien
cacaagcggccttcagtttggaggt

SEQ ID NO: 2954918 - DNA, 25 bp, Homo sapien
ccatcaaactgatttgcaatcattt

SEQ ID NO: 2954919 - DNA, 25 bp, Homo sapien
caagcggccttcagtttggaggttt

SEQ ID NO: 2954920 - DNA, 25 bp, Homo sapien
gttaaggctgcaaggccaaatcaca

SEQ ID NO: 2954921 - DNA, 25 bp, Homo sapien
aagttaaggctgcaaggccaaatca

SEQ ID NO: 2954922 - DNA, 25 bp, Homo sapien
ttaaggctgcaaggccaaatcacag

SEQ ID NO: 2954923 - DNA, 25 bp, Homo sapien
gaagttaaggctgcaaggccaaatc

SEQ ID NO: 2954924 - DNA, 25 bp, Homo sapien
aaggctgcaaggccaaatcacagag

SEQ ID NO: 2954925 - DNA, 25 bp, Homo sapien
agttaaggctgcaaggccaaatcac

SEQ ID NO: 2954926 - DNA, 25 bp, Homo sapien
ctgtgatttggccttgcagccttaa

SEQ ID NO: 2954927 - DNA, 25 bp, Homo sapien
ctctgtgatttggccttgcagcctt

SEQ ID NO: 2954928 - DNA, 25 bp, Homo sapien
tgatttggccttgcagccttaactt

SEQ ID NO: 2954929 - DNA, 25 bp, Homo sapien
tgtgatttggccttgcagccttaac

SEQ ID NO: 2954930 - DNA, 25 bp, Homo sapien
gatttggccttgcagccttaacttc

SEQ ID NO: 2954931 - DNA, 25 bp, Homo sapien
gtgatttggccttgcagccttaact

SEQ ID NO: 2954932 - DNA, 25 bp, Homo sapien
gctgggacgtctctatatgtgtgaa

SEQ ID NO: 2954933 - DNA, 25 bp, Homo sapien
gaatatgcacggctgggacgtctct

SEQ ID NO: 2954934 - DNA, 25 bp, Homo sapien
ggacgtctctatatgtgtgaattct

SEQ ID NO: 2954935 - DNA, 25 bp, Homo sapien
tgcacggctgggacgtctctatatg

SEQ ID NO: 2954936 - DNA, 25 bp, Homo sapien
attctccatatcctgaagaatatgc

SEQ ID NO: 2954937 - DNA, 25 bp, Homo sapien
cctgaagaatatgcacggctgggac

SEQ ID NO: 2954938 - DNA, 25 bp, Homo sapien
gtcccagccgtgcatattcttcagg

SEQ ID NO: 2954939 - DNA, 25 bp, Homo sapien
ttcacacatatagagacgtcccagc

SEQ ID NO: 2954940 - DNA, 25 bp, Homo sapien
acatatagagacgtcccagccgtgc

SEQ ID NO: 2954941 - DNA, 25 bp, Homo sapien
tagagacgtcccagccgtgcatatt

SEQ ID NO: 2954942 - DNA, 25 bp, Homo sapien
gcatattcttcaggatatggagaat

SEQ ID NO: 2954943 - DNA, 25 bp, Homo sapien
agaattcacacatatagagacgtcc

SEQ ID NO: 2954944 - DNA, 25 bp, Homo sapien
tatggcttgtgctgggtgccaccca

SEQ ID NO: 2954945 - DNA, 25 bp, Homo sapien
gaatatgaattacctctgcccacag

SEQ ID NO: 2954946 - DNA, 25 bp, Homo sapien
caactagtgtggacaactgatgccc

SEQ ID NO: 2954947 - DNA, 25 bp, Homo sapien
aatgacaggccacagcttaaggcgg

SEQ ID NO: 2954948 - DNA, 25 bp, Homo sapien
cagagacagcatggctcaccttcat

SEQ ID NO: 2954949 - DNA, 25 bp, Homo sapien
taatagtgatcagcctgtgacagat

SEQ ID NO: 2954950 - DNA, 25 bp, Homo sapien
tctataccccgccttaagctgtggc

SEQ ID NO: 2954951 - DNA, 25 bp, Homo sapien
cagttgtccacactagttgctaggg

SEQ ID NO: 2954952 - DNA, 25 bp, Homo sapien
gaggtaattcatattccaaggagga

SEQ ID NO: 2954953 - DNA, 25 bp, Homo sapien
taagctgtggcctgtcatttcctat

SEQ ID NO: 2954954 - DNA, 25 bp, Homo sapien
gatatgaaggtgagccatgctgtct

SEQ ID NO: 2954955 - DNA, 25 bp, Homo sapien
gcctgaacagatgccatcgctatgg

SEQ ID NO: 2954956 - DNA, 25 bp, Homo sapien
ggtgatgagatatatcgcaaaggtt

SEQ ID NO: 2954957 - DNA, 25 bp, Homo sapien
tgatgagatatatcgcaaaggttca

SEQ ID NO: 2954958 - DNA, 25 bp, Homo sapien
gtgatgagatatatcgcaaaggttc

SEQ ID NO: 2954959 - DNA, 25 bp, Homo sapien
gaacctttgcgatatatctcatcac

SEQ ID NO: 2954960 - DNA, 25 bp, Homo sapien
tgaacctttgcgatatatctcatca

SEQ ID NO: 2954961 - DNA, 25 bp, Homo sapien
aacctttgcgatatatctcatcacc

SEQ ID NO: 2954962 - DNA, 25 bp, Homo sapien
caaaggttcaatctctgtgtttgaa

SEQ ID NO: 2954963 - DNA, 25 bp, Homo sapien
tatatcgcaaaggttcaatctctgt

SEQ ID NO: 2954964 - DNA, 25 bp, Homo sapien
cacctggtgatgagatatatcgcaa

SEQ ID NO: 2954965 - DNA, 25 bp, Homo sapien
gaaacacccacctggtgatgagata

SEQ ID NO: 2954966 - DNA, 25 bp, Homo sapien
tgaagtggatggcaagaaaaacaag

SEQ ID NO: 2954967 - DNA, 25 bp, Homo sapien
ccaaatgtgtgtggaaacacccacc

SEQ ID NO: 2954968 - DNA, 25 bp, Homo sapien
caaacacagagattgaacctttgcg

SEQ ID NO: 2954969 - DNA, 25 bp, Homo sapien
gattgaacctttgcgatatatctca

SEQ ID NO: 2954970 - DNA, 25 bp, Homo sapien
tcatcaccaggtgggtgtttccaca

SEQ ID NO: 2954971 - DNA, 25 bp, Homo sapien
tgccatccacttcaaacacagagat

SEQ ID NO: 2954972 - DNA, 25 bp, Homo sapien
gcgatatatctcatcaccaggtggg

SEQ ID NO: 2954973 - DNA, 25 bp, Homo sapien
ggtgggtgtttccacacacatttgg

SEQ ID NO: 2954974 - DNA, 25 bp, Homo sapien
aggcctttatctgtttaggaatcag

SEQ ID NO: 2954975 - DNA, 25 bp, Homo sapien
agtggtgactttagaaaggagttga

SEQ ID NO: 2954976 - DNA, 25 bp, Homo sapien
ccatcacaccttgtgaaggacatag

SEQ ID NO: 2954977 - DNA, 25 bp, Homo sapien
cttctcttgccaaaatacacaatgt

SEQ ID NO: 2954978 - DNA, 25 bp, Homo sapien
agtggcccacacatgaactctgttt

SEQ ID NO: 2954979 - DNA, 25 bp, Homo sapien
tgaattttaggcctttatctgttta

SEQ ID NO: 2954980 - DNA, 25 bp, Homo sapien
ctatgtccttcacaaggtgtgatgg

SEQ ID NO: 2954981 - DNA, 25 bp, Homo sapien
tcaactcctttctaaagtcaccact

SEQ ID NO: 2954982 - DNA, 25 bp, Homo sapien
ctgattcctaaacagataaaggcct

SEQ ID NO: 2954983 - DNA, 25 bp, Homo sapien
acattgtgtattttggcaagagaag

SEQ ID NO: 2954984 - DNA, 25 bp, Homo sapien
aaacagagttcatgtgtgggccact

SEQ ID NO: 2954985 - DNA, 25 bp, Homo sapien
taaacagataaaggcctaaaattca

SEQ ID NO: 2954986 - DNA, 25 bp, Homo sapien
cccttcctgttctatgttatgacag

SEQ ID NO: 2954987 - DNA, 25 bp, Homo sapien
cagaggcggacaacactggctgtca

SEQ ID NO: 2954988 - DNA, 25 bp, Homo sapien
cactggctgtcacctgattggatat

SEQ ID NO: 2954989 - DNA, 25 bp, Homo sapien
aaactttttctggaccacaagacat

SEQ ID NO: 2954990 - DNA, 25 bp, Homo sapien
tttctggaccacaagacattatatt

SEQ ID NO: 2954991 - DNA, 25 bp, Homo sapien
tctatgttatgacagaggcggacaa

SEQ ID NO: 2954992 - DNA, 25 bp, Homo sapien
ctgtcataacatagaacaggaaggg

SEQ ID NO: 2954993 - DNA, 25 bp, Homo sapien
tgacagccagtgttgtccgcctctg

SEQ ID NO: 2954994 - DNA, 25 bp, Homo sapien
tgtccgcctctgtcataacatagaa

SEQ ID NO: 2954995 - DNA, 25 bp, Homo sapien
aatataatgtcttgtggtccagaaa

SEQ ID NO: 2954996 - DNA, 25 bp, Homo sapien
taatgtcttgtggtccagaaaaagt

SEQ ID NO: 2954997 - DNA, 25 bp, Homo sapien
aaatatccaatcaggtgacagccag

SEQ ID NO: 2954998 - DNA, 25 bp, Homo sapien
gaagaagctgtactctgggcaatga

SEQ ID NO: 2954999 - DNA, 25 bp, Homo sapien
cagggtgatccatgttcgcagttgg

SEQ ID NO: 2955000 - DNA, 25 bp, Homo sapien
ggatctggagattaagaagccaatg

SEQ ID NO: 2955001 - DNA, 25 bp, Homo sapien
ggccagagcagggtgatccatgttc

SEQ ID NO: 2955002 - DNA, 25 bp, Homo sapien
ctggagattaagaagccaatggcca

SEQ ID NO: 2955003 - DNA, 25 bp, Homo sapien
agttgggggctcaaatcactgacag

SEQ ID NO: 2955004 - DNA, 25 bp, Homo sapien
ccaactgcgaacatggatcaccctg

SEQ ID NO: 2955005 - DNA, 25 bp, Homo sapien
tcctgtcagtgatttgagcccccaa

SEQ ID NO: 2955006 - DNA, 25 bp, Homo sapien
tttgagcccccaactgcgaacatgg

SEQ ID NO: 2955007 - DNA, 25 bp, Homo sapien
tcattgcccagagtacagcttcttc

SEQ ID NO: 2955008 - DNA, 25 bp, Homo sapien
tggccattggcttcttaatctccag

SEQ ID NO: 2955009 - DNA, 25 bp, Homo sapien
gcgaacatggatcaccctgctctgg

SEQ ID NO: 2955010 - DNA, 25 bp, Homo sapien
tatgcctcagtacatgagacagggc

SEQ ID NO: 2955011 - DNA, 25 bp, Homo sapien
tccttactatgcctcagtacatgag

SEQ ID NO: 2955012 - DNA, 25 bp, Homo sapien
cctgtatccttactatgcctcagta

SEQ ID NO: 2955013 - DNA, 25 bp, Homo sapien
gcctcagtacatgagacagggctat

SEQ ID NO: 2955014 - DNA, 25 bp, Homo sapien
tactatgcctcagtacatgagacag

SEQ ID NO: 2955015 - DNA, 25 bp, Homo sapien
tatccttactatgcctcagtacatg

SEQ ID NO: 2955016 - DNA, 25 bp, Homo sapien
tagccctgtctcatgtactgaggca

SEQ ID NO: 2955017 - DNA, 25 bp, Homo sapien
tactgaggcatagtaaggatacagg

SEQ ID NO: 2955018 - DNA, 25 bp, Homo sapien
atagccctgtctcatgtactgaggc

SEQ ID NO: 2955019 - DNA, 25 bp, Homo sapien
tctcatgtactgaggcatagtaagg

SEQ ID NO: 2955020 - DNA, 25 bp, Homo sapien
ccctgtctcatgtactgaggcatag

SEQ ID NO: 2955021 - DNA, 25 bp, Homo sapien
catgtactgaggcatagtaaggata

SEQ ID NO: 2955022 - DNA, 25 bp, Homo sapien
caaggcagggaccatgtgaatattg

SEQ ID NO: 2955023 - DNA, 25 bp, Homo sapien
aagtcattagttccacaaggcaggg

SEQ ID NO: 2955024 - DNA, 25 bp, Homo sapien
catgcatgaggcttaaaatctggtc

SEQ ID NO: 2955025 - DNA, 25 bp, Homo sapien
tggaccctgtgcataatatactctg

SEQ ID NO: 2955026 - DNA, 25 bp, Homo sapien
cctgtggtctctgcaattcctggaa

SEQ ID NO: 2955027 - DNA, 25 bp, Homo sapien
aaaatctggtccttgatgctaggga

SEQ ID NO: 2955028 - DNA, 25 bp, Homo sapien
ttccaggaattgcagagaccacagg

SEQ ID NO: 2955029 - DNA, 25 bp, Homo sapien
gaccagattttaagcctcatgcatg

SEQ ID NO: 2955030 - DNA, 25 bp, Homo sapien
gaaatccctagcatcaaggaccaga

SEQ ID NO: 2955031 - DNA, 25 bp, Homo sapien
ccctgccttgtggaactaatgactt

SEQ ID NO: 2955032 - DNA, 25 bp, Homo sapien
cagagtatattatgcacagggtcca

SEQ ID NO: 2955033 - DNA, 25 bp, Homo sapien
tacatggattacctctagacaagtc

SEQ ID NO: 2955034 - DNA, 25 bp, Homo sapien
gacataagaggggaactatatatct

SEQ ID NO: 2955035 - DNA, 25 bp, Homo sapien
agaggggaactatatatctttgaat

SEQ ID NO: 2955036 - DNA, 25 bp, Homo sapien
ggaagtgacataagaggggaactat

SEQ ID NO: 2955037 - DNA, 25 bp, Homo sapien
taagaggggaactatatatctttga

SEQ ID NO: 2955038 - DNA, 25 bp, Homo sapien
ttcatttttaagtcacctgagaaga

SEQ ID NO: 2955039 - DNA, 25 bp, Homo sapien
tcatttttaagtcacctgagaagag

SEQ ID NO: 2955040 - DNA, 25 bp, Homo sapien
attcaaagatatatagttcccctct

SEQ ID NO: 2955041 - DNA, 25 bp, Homo sapien
tcttctcaggtgacttaaaaatgaa

SEQ ID NO: 2955042 - DNA, 25 bp, Homo sapien
aaagatatatagttcccctcttatg

SEQ ID NO: 2955043 - DNA, 25 bp, Homo sapien
tatagttcccctcttatgtcacttc

SEQ ID NO: 2955044 - DNA, 25 bp, Homo sapien
tatatagttcccctcttatgtcact

SEQ ID NO: 2955045 - DNA, 25 bp, Homo sapien
ctcttctcaggtgacttaaaaatga

SEQ ID NO: 2955046 - DNA, 25 bp, Homo sapien
gacataagaggggaactatatatct

SEQ ID NO: 2955047 - DNA, 25 bp, Homo sapien
gccaccttctttcatttttaagtca

SEQ ID NO: 2955048 - DNA, 25 bp, Homo sapien
gatgaactgggaagtgacataagag

SEQ ID NO: 2955049 - DNA, 25 bp, Homo sapien
cctgagaagagatgaactgggaagt

SEQ ID NO: 2955050 - DNA, 25 bp, Homo sapien
tcacctgagaagagatgaactggga

SEQ ID NO: 2955051 - DNA, 25 bp, Homo sapien
tcatttttaagtcacctgagaagag

SEQ ID NO: 2955052 - DNA, 25 bp, Homo sapien
cttctccgctacctgcataattttc

SEQ ID NO: 2955053 - DNA, 25 bp, Homo sapien
acttctccgctacctgcataatttt

SEQ ID NO: 2955054 - DNA, 25 bp, Homo sapien
tctccgctacctgcataattttcaa

SEQ ID NO: 2955055 - DNA, 25 bp, Homo sapien
ttctccgctacctgcataattttca

SEQ ID NO: 2955056 - DNA, 25 bp, Homo sapien
actctcagatctggggcttataagc

SEQ ID NO: 2955057 - DNA, 25 bp, Homo sapien
ctctcagatctggggcttataagct

SEQ ID NO: 2955058 - DNA, 25 bp, Homo sapien
ccactctcagatctggggcttataa

SEQ ID NO: 2955059 - DNA, 25 bp, Homo sapien
cactctcagatctggggcttataag

SEQ ID NO: 2955060 - DNA, 25 bp, Homo sapien
agcttataagccccagatctgagag

SEQ ID NO: 2955061 - DNA, 25 bp, Homo sapien
cttataagccccagatctgagagtg

SEQ ID NO: 2955062 - DNA, 25 bp, Homo sapien
ttataagccccagatctgagagtgg

SEQ ID NO: 2955063 - DNA, 25 bp, Homo sapien
gcttataagccccagatctgagagt

SEQ ID NO: 2955064 - DNA, 25 bp, Homo sapien
gaaaattatgcaggtagcggagaag

SEQ ID NO: 2955065 - DNA, 25 bp, Homo sapien
ttgaaaattatgcaggtagcggaga

SEQ ID NO: 2955066 - DNA, 25 bp, Homo sapien
aaaattatgcaggtagcggagaagt

SEQ ID NO: 2955067 - DNA, 25 bp, Homo sapien
tgaaaattatgcaggtagcggagaa

SEQ ID NO: 2955068 - DNA, 25 bp, Homo sapien
cagaacgtccactctcagatctggg

SEQ ID NO: 2955069 - DNA, 25 bp, Homo sapien
gggcttataagctatcgcagttact

SEQ ID NO: 2955070 - DNA, 25 bp, Homo sapien
cctgcataattttcaaggcaaagag

SEQ ID NO: 2955071 - DNA, 25 bp, Homo sapien
cgcagttactggaaagaagtacttc

SEQ ID NO: 2955072 - DNA, 25 bp, Homo sapien
tctccgctacctgcataattttcaa

SEQ ID NO: 2955073 - DNA, 25 bp, Homo sapien
tcgaagaaaaagttggctccccaga

SEQ ID NO: 2955074 - DNA, 25 bp, Homo sapien
gtaactgcgatagcttataagcccc

SEQ ID NO: 2955075 - DNA, 25 bp, Homo sapien
taagccccagatctgagagtggacg

SEQ ID NO: 2955076 - DNA, 25 bp, Homo sapien
gaaaattatgcaggtagcggagaag

SEQ ID NO: 2955077 - DNA, 25 bp, Homo sapien
ctctttgccttgaaaattatgcagg

SEQ ID NO: 2955078 - DNA, 25 bp, Homo sapien
tcttcgactttggaaagcaaataac

SEQ ID NO: 2955079 - DNA, 25 bp, Homo sapien
gaagtacttctttccagtaactgcg

SEQ ID NO: 2955080 - DNA, 25 bp, Homo sapien
gacattgtcagcactctgcaagccc

SEQ ID NO: 2955081 - DNA, 25 bp, Homo sapien
agacggctgtgaatcctgtggacat

SEQ ID NO: 2955082 - DNA, 25 bp, Homo sapien
cattgtcagcactctgcaagccctt

SEQ ID NO: 2955083 - DNA, 25 bp, Homo sapien
gagacggctgtgaatcctgtggaca

SEQ ID NO: 2955084 - DNA, 25 bp, Homo sapien
ggacattgtcagcactctgcaagcc

SEQ ID NO: 2955085 - DNA, 25 bp, Homo sapien
attgtcagcactctgcaagcccttc

SEQ ID NO: 2955086 - DNA, 25 bp, Homo sapien
atgtccacaggattcacagccgtct

SEQ ID NO: 2955087 - DNA, 25 bp, Homo sapien
gggcttgcagagtgctgacaatgtc

SEQ ID NO: 2955088 - DNA, 25 bp, Homo sapien
aagggcttgcagagtgctgacaatg

SEQ ID NO: 2955089 - DNA, 25 bp, Homo sapien
tgtccacaggattcacagccgtctc

SEQ ID NO: 2955090 - DNA, 25 bp, Homo sapien
gaagggcttgcagagtgctgacaat

SEQ ID NO: 2955091 - DNA, 25 bp, Homo sapien
ggcttgcagagtgctgacaatgtcc

SEQ ID NO: 2955092 - DNA, 25 bp, Homo sapien
agaggccaaaaggtccaactccaat

SEQ ID NO: 2955093 - DNA, 25 bp, Homo sapien
aggtccaactccaataaaaccatgg

SEQ ID NO: 2955094 - DNA, 25 bp, Homo sapien
aataaaaccatggatcccagctgct

SEQ ID NO: 2955095 - DNA, 25 bp, Homo sapien
caataaaaccatggatcccagctgc

SEQ ID NO: 2955096 - DNA, 25 bp, Homo sapien
gaggccaaaaggtccaactccaata

SEQ ID NO: 2955097 - DNA, 25 bp, Homo sapien
cagctgcttaaaatggacccctccc

SEQ ID NO: 2955098 - DNA, 25 bp, Homo sapien
catggttttattggagttggacctt

SEQ ID NO: 2955099 - DNA, 25 bp, Homo sapien
tattggagttggaccttttggcctc

SEQ ID NO: 2955100 - DNA, 25 bp, Homo sapien
gcagctgggatccatggttttattg

SEQ ID NO: 2955101 - DNA, 25 bp, Homo sapien
ccatggttttattggagttggacct

SEQ ID NO: 2955102 - DNA, 25 bp, Homo sapien
gggaggggtccattttaagcagctg

SEQ ID NO: 2955103 - DNA, 25 bp, Homo sapien
agcagctgggatccatggttttatt

SEQ ID NO: 2955104 - DNA, 25 bp, Homo sapien
ccagggactagtcatggtaatagca

SEQ ID NO: 2955105 - DNA, 25 bp, Homo sapien
atctgtattgggctaaccagagcca

SEQ ID NO: 2955106 - DNA, 25 bp, Homo sapien
tgcaggtgccaaagtaatgtccact

SEQ ID NO: 2955107 - DNA, 25 bp, Homo sapien
cactttttacgtttgcaggtgccaa

SEQ ID NO: 2955108 - DNA, 25 bp, Homo sapien
tgcctcaccgtaaagtactcactag

SEQ ID NO: 2955109 - DNA, 25 bp, Homo sapien
tgtcttggtgaaagggaacggatac

SEQ ID NO: 2955110 - DNA, 25 bp, Homo sapien
tccagtcactggttctctcctcatg

SEQ ID NO: 2955111 - DNA, 25 bp, Homo sapien
tctgtattagacttgagtgcaggtc

SEQ ID NO: 2955112 - DNA, 25 bp, Homo sapien
ggtactagtgcttgccacctggtca

SEQ ID NO: 2955113 - DNA, 25 bp, Homo sapien
ggtcaccagacctccaaatatggct

SEQ ID NO: 2955114 - DNA, 25 bp, Homo sapien
aggagttctgttatggtactgtacc

SEQ ID NO: 2955115 - DNA, 25 bp, Homo sapien
tgtcttctaagcgtggtactagtgc

SEQ ID NO: 2955116 - DNA, 25 bp, Homo sapien
tgaagacagcatgttggaggagacc

SEQ ID NO: 2955117 - DNA, 25 bp, Homo sapien
tcatgggctgagatacggaagtcac

SEQ ID NO: 2955118 - DNA, 25 bp, Homo sapien
gcagaagcactttaatcctagaggg

SEQ ID NO: 2955119 - DNA, 25 bp, Homo sapien
tcagtgcaaggtatatggaagtaca

SEQ ID NO: 2955120 - DNA, 25 bp, Homo sapien
gaatagaaggatggtgacaaatccc

SEQ ID NO: 2955121 - DNA, 25 bp, Homo sapien
cacaaatgaccggagtcagggattg

SEQ ID NO: 2955122 - DNA, 25 bp, Homo sapien
gaaaagtggacattactttggcacc

SEQ ID NO: 2955123 - DNA, 25 bp, Homo sapien
ccaatacagatcaaaaagaggtctc

SEQ ID NO: 2955124 - DNA, 25 bp, Homo sapien
tggctctggttagcccaatacagat

SEQ ID NO: 2955125 - DNA, 25 bp, Homo sapien
ctagtgagtactttacggtgaggca

SEQ ID NO: 2955126 - DNA, 25 bp, Homo sapien
gctattaccatgactagtccctggg

SEQ ID NO: 2955127 - DNA, 25 bp, Homo sapien
ttggcacctgcaaacgtaaaaagtg

SEQ ID NO: 2955128 - DNA, 25 bp, Homo sapien
ccacatgtggtagaatgtgctcttc

SEQ ID NO: 2955129 - DNA, 25 bp, Homo sapien
tccccacatgtggtagaatgtgctc

SEQ ID NO: 2955130 - DNA, 25 bp, Homo sapien
ttccccacatgtggtagaatgtgct

SEQ ID NO: 2955131 - DNA, 25 bp, Homo sapien
cccacatgtggtagaatgtgctctt

SEQ ID NO: 2955132 - DNA, 25 bp, Homo sapien
cacatgtggtagaatgtgctcttct

SEQ ID NO: 2955133 - DNA, 25 bp, Homo sapien
ccccacatgtggtagaatgtgctct

SEQ ID NO: 2955134 - DNA, 25 bp, Homo sapien
agaagagcacattctaccacatgtg

SEQ ID NO: 2955135 - DNA, 25 bp, Homo sapien
gaagagcacattctaccacatgtgg

SEQ ID NO: 2955136 - DNA, 25 bp, Homo sapien
aagagcacattctaccacatgtggg

SEQ ID NO: 2955137 - DNA, 25 bp, Homo sapien
tattacagagctatcacagctggct

SEQ ID NO: 2955138 - DNA, 25 bp, Homo sapien
tatgggaagcaaccaatagagtagg

SEQ ID NO: 2955139 - DNA, 25 bp, Homo sapien
tcctttggcaaaccagtgtacccat

SEQ ID NO: 2955140 - DNA, 25 bp, Homo sapien
tgcaggctatcaaggtagacagacc

SEQ ID NO: 2955141 - DNA, 25 bp, Homo sapien
ccaagaatggacttcaacggcacaa

SEQ ID NO: 2955142 - DNA, 25 bp, Homo sapien
gagcttgagcacactaaactagttg

SEQ ID NO: 2955143 - DNA, 25 bp, Homo sapien
tgcttgatcctggtacagctcgaga

SEQ ID NO: 2955144 - DNA, 25 bp, Homo sapien
cagctcgagactttgttttgaccca

SEQ ID NO: 2955145 - DNA, 25 bp, Homo sapien
gattttgttgcagataccacacagg

SEQ ID NO: 2955146 - DNA, 25 bp, Homo sapien
aacatttgtgaggagccatggagcc

SEQ ID NO: 2955147 - DNA, 25 bp, Homo sapien
cctatcagcaggaaacagtctggag

SEQ ID NO: 2955148 - DNA, 25 bp, Homo sapien
ttggcaccagggacatttctcatcg

SEQ ID NO: 2955149 - DNA, 25 bp, Homo sapien
caggcaggtgatgagcagtatctcg

SEQ ID NO: 2955150 - DNA, 25 bp, Homo sapien
aagccacatgaattctggagcaggc

SEQ ID NO: 2955151 - DNA, 25 bp, Homo sapien
tctcgacagcagaagaaggttgggc

SEQ ID NO: 2955152 - DNA, 25 bp, Homo sapien
gacttgaaagccaggataaacatga

SEQ ID NO: 2955153 - DNA, 25 bp, Homo sapien
tcatggaacgttgaagtggaggctt

SEQ ID NO: 2955154 - DNA, 25 bp, Homo sapien
cctgatactaactttggaaacactc

SEQ ID NO: 2955155 - DNA, 25 bp, Homo sapien
tagactaatcctgttgcacgttgag

SEQ ID NO: 2955156 - DNA, 25 bp, Homo sapien
tgggatctcagctgaccacagcctt

SEQ ID NO: 2955157 - DNA, 25 bp, Homo sapien
attcccgaaatgccttacaagttct

SEQ ID NO: 2955158 - DNA, 25 bp, Homo sapien
gaaacactcgtccattccctccttg

SEQ ID NO: 2955159 - DNA, 25 bp, Homo sapien
ccgaaatgccttacaagttctttca

SEQ ID NO: 2955160 - DNA, 25 bp, Homo sapien
agcccaggaaacactcgtccattcc

SEQ ID NO: 2955161 - DNA, 25 bp, Homo sapien
cagaggccacgtccccaaatggttt

SEQ ID NO: 2955162 - DNA, 25 bp, Homo sapien
gaaaggtcacagctcaagtgagcgg

SEQ ID NO: 2955163 - DNA, 25 bp, Homo sapien
caatagccatggaagtcacctcaat

SEQ ID NO: 2955164 - DNA, 25 bp, Homo sapien
taagtgcagatcactctgggaggaa

SEQ ID NO: 2955165 - DNA, 25 bp, Homo sapien
acacttcccatgatagagcagaacc

SEQ ID NO: 2955166 - DNA, 25 bp, Homo sapien
cttcccatgatagagcagaaccagt

SEQ ID NO: 2955167 - DNA, 25 bp, Homo sapien
ctcagcctcttcccgtgtgaccttg

SEQ ID NO: 2955168 - DNA, 25 bp, Homo sapien
gctcagcctcttcccgtgtgacctt

SEQ ID NO: 2955169 - DNA, 25 bp, Homo sapien
ggcaaagtggttttcatgagctttt

SEQ ID NO: 2955170 - DNA, 25 bp, Homo sapien
tttcagaaatgggtccaaatcccca

SEQ ID NO: 2955171 - DNA, 25 bp, Homo sapien
caaagtggttttcatgagcttttca

SEQ ID NO: 2955172 - DNA, 25 bp, Homo sapien
atgggtccaaatccccaaagagact

SEQ ID NO: 2955173 - DNA, 25 bp, Homo sapien
acctgtagtcatccctggagttggg

SEQ ID NO: 2955174 - DNA, 25 bp, Homo sapien
tttgggttaaatggatatggagggc

SEQ ID NO: 2955175 - DNA, 25 bp, Homo sapien
cccaacctgtagtcatccctggagt

SEQ ID NO: 2955176 - DNA, 25 bp, Homo sapien
tcccccaacctgtagtcatccctgg

SEQ ID NO: 2955177 - DNA, 25 bp, Homo sapien
gcctggcagacctccgaagtgtgtg

SEQ ID NO: 2955178 - DNA, 25 bp, Homo sapien
tcaggcgttccctaatcagacaagg

SEQ ID NO: 2955179 - DNA, 25 bp, Homo sapien
gacagataccaacaagccagagaca

SEQ ID NO: 2955180 - DNA, 25 bp, Homo sapien
tagaaatggagccacgggaagagcc

SEQ ID NO: 2955181 - DNA, 25 bp, Homo sapien
catgctgccttgcctcgccctgctt

SEQ ID NO: 2955182 - DNA, 25 bp, Homo sapien
caaatcccaattcccactcgtgagg

SEQ ID NO: 2955183 - DNA, 25 bp, Homo sapien
caaaggtgaggcaggtgttgcatca

SEQ ID NO: 2955184 - DNA, 25 bp, Homo sapien
tactgctaatttccagggagaggcc

SEQ ID NO: 2955185 - DNA, 25 bp, Homo sapien
caatgacgcttgaaacctgcagcca

SEQ ID NO: 2955186 - DNA, 25 bp, Homo sapien
ctctggcgctgacgaggtcgggacc

SEQ ID NO: 2955187 - DNA, 25 bp, Homo sapien
ggtcgggaccatgcaggatggctct

SEQ ID NO: 2955188 - DNA, 25 bp, Homo sapien
tgcctcatgcaggacggctctggcg

SEQ ID NO: 2955189 - DNA, 25 bp, Homo sapien
gaccagcgctccttcgaaggaataa

SEQ ID NO: 2955190 - DNA, 25 bp, Homo sapien
ttcctctatccagggacaggccttt

SEQ ID NO: 2955191 - DNA, 25 bp, Homo sapien
tgttcctctatccagggacaggcct

SEQ ID NO: 2955192 - DNA, 25 bp, Homo sapien
cagcctggatctcgccacgccggcg

SEQ ID NO: 2955193 - DNA, 25 bp, Homo sapien
cccagcctggatctcgccacgccgg

SEQ ID NO: 2955194 - DNA, 25 bp, Homo sapien
ttgacgaaagctaagagaaggccct

SEQ ID NO: 2955195 - DNA, 25 bp, Homo sapien
ggattatctgctgattggaggccca

SEQ ID NO: 2955196 - DNA, 25 bp, Homo sapien
taacgaggtggcgaactgatgctct

SEQ ID NO: 2955197 - DNA, 25 bp, Homo sapien
tgcgaggccgcaaacatcctagaaa

SEQ ID NO: 2955198 - DNA, 25 bp, Homo sapien
ccagcccctgggacacccgtgacat

SEQ ID NO: 2955199 - DNA, 25 bp, Homo sapien
atgcaggagcccagcacacacccca

SEQ ID NO: 2955200 - DNA, 25 bp, Homo sapien
ctgtgcgtgtcgcccgcatgcagga

SEQ ID NO: 2955201 - DNA, 25 bp, Homo sapien
cccaccagcccctgggacacccgtg

SEQ ID NO: 2955202 - DNA, 25 bp, Homo sapien
gctgaggtcatcacgagcacctccc

SEQ ID NO: 2955203 - DNA, 25 bp, Homo sapien
tcaggtctgaaagaagcggaccaag

SEQ ID NO: 2955204 - DNA, 25 bp, Homo sapien
gatgcctaaattctaagaggaccca

SEQ ID NO: 2955205 - DNA, 25 bp, Homo sapien
gacttggtgtgggagagagcgctct

SEQ ID NO: 2955206 - DNA, 25 bp, Homo sapien
gcggcccagtttagcggctccagcc

SEQ ID NO: 2955207 - DNA, 25 bp, Homo sapien
cacgccgcggcccagtttagcggct

SEQ ID NO: 2955208 - DNA, 25 bp, Homo sapien
cccaggacagcccactctccggccc

SEQ ID NO: 2955209 - DNA, 25 bp, Homo sapien
agtttagcggctccagcccgcggcc

SEQ ID NO: 2955210 - DNA, 25 bp, Homo sapien
tagtactggaccctcagattggagc

SEQ ID NO: 2955211 - DNA, 25 bp, Homo sapien
gattggagcctgaaaatatccggga

SEQ ID NO: 2955212 - DNA, 25 bp, Homo sapien
tatccgggaagaaacgcatgtctct

SEQ ID NO: 2955213 - DNA, 25 bp, Homo sapien
tatggacagacagagcgtcagcagg

SEQ ID NO: 2955214 - DNA, 25 bp, Homo sapien
tggagtttcccgagacagcagattc

SEQ ID NO: 2955215 - DNA, 25 bp, Homo sapien
ctgtggaattgggacctgattgctc

SEQ ID NO: 2955216 - DNA, 25 bp, Homo sapien
tgctcaaggattgggtgtgactcag

SEQ ID NO: 2955217 - DNA, 25 bp, Homo sapien
gatggaccataagaactgtctgtgg

SEQ ID NO: 2955218 - DNA, 25 bp, Homo sapien
ttcacctctctgatgtgtccctcca

SEQ ID NO: 2955219 - DNA, 25 bp, Homo sapien
catctctggtcctctagcctttgca

SEQ ID NO: 2955220 - DNA, 25 bp, Homo sapien
tgaggatccccatgtgggcccatct

SEQ ID NO: 2955221 - DNA, 25 bp, Homo sapien
tgtccctccagttgatgctccttgg

SEQ ID NO: 2955222 - DNA, 25 bp, Homo sapien
agacagaggctgactggcccctgca

SEQ ID NO: 2955223 - DNA, 25 bp, Homo sapien
gacagaggctgactggcccctgcac

SEQ ID NO: 2955224 - DNA, 25 bp, Homo sapien
tcagacagaggctgactggcccctg

SEQ ID NO: 2955225 - DNA, 25 bp, Homo sapien
cagacagaggctgactggcccctgc

SEQ ID NO: 2955226 - DNA, 25 bp, Homo sapien
caaagagtttctagtctcatccact

SEQ ID NO: 2955227 - DNA, 25 bp, Homo sapien
gagggccagcgacctcagatatacc

SEQ ID NO: 2955228 - DNA, 25 bp, Homo sapien
tgggaagtcactcgtggagggccag

SEQ ID NO: 2955229 - DNA, 25 bp, Homo sapien
tcaccctcgccccaggttaggattc

SEQ ID NO: 2955230 - DNA, 25 bp, Homo sapien
gcgtgagtgcgtgagtgacggccgc

SEQ ID NO: 2955231 - DNA, 25 bp, Homo sapien
gtgagtgcgtgagtgacggccgccg

SEQ ID NO: 2955232 - DNA, 25 bp, Homo sapien
gagtgcgtgagtgacggccgccgcg

SEQ ID NO: 2955233 - DNA, 25 bp, Homo sapien
cctcccgcgtgagtgcgtgagtgac

SEQ ID NO: 2955234 - DNA, 25 bp, Homo sapien
ccacaggctgggtacctgggcgcct

SEQ ID NO: 2955235 - DNA, 25 bp, Homo sapien
aggctgggtacctgggcgcctacct

SEQ ID NO: 2955236 - DNA, 25 bp, Homo sapien
gtgcggccaagaaagggttaatctg

SEQ ID NO: 2955237 - DNA, 25 bp, Homo sapien
atctggcagcgcctttcatcagcag

SEQ ID NO: 2955238 - DNA, 25 bp, Homo sapien
tgcccagtggagaatccccgtggtg

SEQ ID NO: 2955239 - DNA, 25 bp, Homo sapien
cgttagccaggcgtgtctagactcc

SEQ ID NO: 2955240 - DNA, 25 bp, Homo sapien
tcttaaggagggagcacatcagcat

SEQ ID NO: 2955241 - DNA, 25 bp, Homo sapien
tcagccctagggtcctaaggccaga

SEQ ID NO: 2955242 - DNA, 25 bp, Homo sapien
gctgcgagtaccaccactcacatgg

SEQ ID NO: 2955243 - DNA, 25 bp, Homo sapien
ctgtgctgcgagtaccaccactcac

SEQ ID NO: 2955244 - DNA, 25 bp, Homo sapien
ctgccggataccacctgtgctgcga

SEQ ID NO: 2955245 - DNA, 25 bp, Homo sapien
tgccggataccacctgtgctgcgag

SEQ ID NO: 2955246 - DNA, 25 bp, Homo sapien
tggctgtgacccctggcatagggac

SEQ ID NO: 2955247 - DNA, 25 bp, Homo sapien
gctgggactgtccactggcatcctg

SEQ ID NO: 2955248 - DNA, 25 bp, Homo sapien
tggcatagggacaaggaccatggct

SEQ ID NO: 2955249 - DNA, 25 bp, Homo sapien
gacccctggcatagggacaaggacc

SEQ ID NO: 2955250 - DNA, 25 bp, Homo sapien
aggccgggtctcctcccaggaatgg

SEQ ID NO: 2955251 - DNA, 25 bp, Homo sapien
gaggccgggtctcctcccaggaatg

SEQ ID NO: 2955252 - DNA, 25 bp, Homo sapien
tagctctgccaggtatggagcacat

SEQ ID NO: 2955253 - DNA, 25 bp, Homo sapien
tctgccaggtatggagcacatggcc

SEQ ID NO: 2955254 - DNA, 25 bp, Homo sapien
agaaacatgtagctctgccaggtat

SEQ ID NO: 2955255 - DNA, 25 bp, Homo sapien
caggaagtagggcagaaacatgtag

SEQ ID NO: 2955256 - DNA, 25 bp, Homo sapien
tcaacctggcgggcttctggcacga

SEQ ID NO: 2955257 - DNA, 25 bp, Homo sapien
cgggcttctggcacgaggcaagctt

SEQ ID NO: 2955258 - DNA, 25 bp, Homo sapien
tggcgggcttctggcacgaggcaag

SEQ ID NO: 2955259 - DNA, 25 bp, Homo sapien
cttctggcacgaggcaagcttggga

SEQ ID NO: 2955260 - DNA, 25 bp, Homo sapien
tgtccagtctcctggatgcccgcaa

SEQ ID NO: 2955261 - DNA, 25 bp, Homo sapien
aaggctggcactcagtgatgtttat

SEQ ID NO: 2955262 - DNA, 25 bp, Homo sapien
ggctggcactcagtgatgtttattt

SEQ ID NO: 2955263 - DNA, 25 bp, Homo sapien
ctggatgcccgcaaagacagctgtc

SEQ ID NO: 2955264 - DNA, 25 bp, Homo sapien
gcagcaccctgagccaattcttcaa

SEQ ID NO: 2955265 - DNA, 25 bp, Homo sapien
ctgagccaattcttcaatccaaggg

SEQ ID NO: 2955266 - DNA, 25 bp, Homo sapien
gagagggtttgctgttccaatccag

SEQ ID NO: 2955267 - DNA, 25 bp, Homo sapien
ctttgcaacctatgtcagaggcagc

SEQ ID NO: 2955268 - DNA, 25 bp, Homo sapien
ccacagcagctgtgactcccaacag

SEQ ID NO: 2955269 - DNA, 25 bp, Homo sapien
cagggctccccgcacacacacacac

SEQ ID NO: 2955270 - DNA, 25 bp, Homo sapien
acacacaccccacagcagctgtgac

SEQ ID NO: 2955271 - DNA, 25 bp, Homo sapien
cagcagctgtgactcccaacagcat

SEQ ID NO: 2955272 - DNA, 25 bp, Homo sapien
ctccggttttccagaatgtgggatc

SEQ ID NO: 2955273 - DNA, 25 bp, Homo sapien
ccagaatgtgggatcttctcatgat

SEQ ID NO: 2955274 - DNA, 25 bp, Homo sapien
tcttctcatgatgacaaagtccaca

SEQ ID NO: 2955275 - DNA, 25 bp, Homo sapien
tgtgggatcttctcatgatgacaaa

SEQ ID NO: 2955276 - DNA, 25 bp, Homo sapien
aggggccagttcacaacccaggatg

SEQ ID NO: 2955277 - DNA, 25 bp, Homo sapien
ggggccagttcacaacccaggatgc

SEQ ID NO: 2955278 - DNA, 25 bp, Homo sapien
ccccgcgtgcccttcgcagagcttc

SEQ ID NO: 2955279 - DNA, 25 bp, Homo sapien
ccgcgtgcccttcgcagagcttcct

SEQ ID NO: 2955280 - DNA, 25 bp, Homo sapien
gcaggcagacggcctcgaataccag

SEQ ID NO: 2955281 - DNA, 25 bp, Homo sapien
gtgcccttcgcagagcttcctggac

SEQ ID NO: 2955282 - DNA, 25 bp, Homo sapien
taagcgtcacatgagacaatcatcg

SEQ ID NO: 2955283 - DNA, 25 bp, Homo sapien
caatcatcgcgaaagggtttggcat

SEQ ID NO: 2955284 - DNA, 25 bp, Homo sapien
caactcttggggatcaatttcctca

SEQ ID NO: 2955285 - DNA, 25 bp, Homo sapien
cctggctcccagaattgtaagcgtc

SEQ ID NO: 2955286 - DNA, 25 bp, Homo sapien
ggccgggataagttctcggtgctgc

SEQ ID NO: 2955287 - DNA, 25 bp, Homo sapien
aaagtgcaggctgagaccagctggc

SEQ ID NO: 2955288 - DNA, 25 bp, Homo sapien
tgcaggctgagaccagctggcactg

SEQ ID NO: 2955289 - DNA, 25 bp, Homo sapien
ctggtggtggcagccgcccaccagg

SEQ ID NO: 2955290 - DNA, 25 bp, Homo sapien
tcagaggcacagacgttgctggtgg

SEQ ID NO: 2955291 - DNA, 25 bp, Homo sapien
cacagacgttgctggtggtagcagc

SEQ ID NO: 2955292 - DNA, 25 bp, Homo sapien
tgtcttcacccgaatcttctccttt

SEQ ID NO: 2955293 - DNA, 25 bp, Homo sapien
cgttgctggtggtagcagccattgt

SEQ ID NO: 2955294 - DNA, 25 bp, Homo sapien
tggacaagatgacctcacagggagc

SEQ ID NO: 2955295 - DNA, 25 bp, Homo sapien
gggcttggcggaccctctctatgga

SEQ ID NO: 2955296 - DNA, 25 bp, Homo sapien
cctttaagtgcggagaggactctgg

SEQ ID NO: 2955297 - DNA, 25 bp, Homo sapien
tgggctaccccagcagttagtgact

SEQ ID NO: 2955298 - DNA, 25 bp, Homo sapien
tcttatgtggcagactggaaacccg

SEQ ID NO: 2955299 - DNA, 25 bp, Homo sapien
taattaggatggagcggtgacttcc

SEQ ID NO: 2955300 - DNA, 25 bp, Homo sapien
cacttagagcaagaagcctgtgact

SEQ ID NO: 2955301 - DNA, 25 bp, Homo sapien
gaaacccgaagttatgatgctcccc

SEQ ID NO: 2955302 - DNA, 25 bp, Homo sapien
ctcagcctgttgttcctcatgttgg

SEQ ID NO: 2955303 - DNA, 25 bp, Homo sapien
ggagactttcttgtcacacttggat

SEQ ID NO: 2955304 - DNA, 25 bp, Homo sapien
gagactttcttgtcacacttggatt

SEQ ID NO: 2955305 - DNA, 25 bp, Homo sapien
gactttcttgtcacacttggatttg

SEQ ID NO: 2955306 - DNA, 25 bp, Homo sapien
ttctcatcaggtgggctctgaccca

SEQ ID NO: 2955307 - DNA, 25 bp, Homo sapien
tttgttctcatcaggtgggctctga

SEQ ID NO: 2955308 - DNA, 25 bp, Homo sapien
ctgacgtggtgcaggttatctttgt

SEQ ID NO: 2955309 - DNA, 25 bp, Homo sapien
atctttgttctcatcaggtgggctc

SEQ ID NO: 2955310 - DNA, 25 bp, Homo sapien
tcctttgtgcggttggtgaacagga

SEQ ID NO: 2955311 - DNA, 25 bp, Homo sapien
cctcctttgtgcggttggtgaacag

SEQ ID NO: 2955312 - DNA, 25 bp, Homo sapien
ctcctttgtgcggttggtgaacagg

SEQ ID NO: 2955313 - DNA, 25 bp, Homo sapien
ttctgtgtatttcgtaaaccattca

SEQ ID NO: 2955314 - DNA, 25 bp, Homo sapien
tctgtgtatttcgtaaaccattcat

SEQ ID NO: 2955315 - DNA, 25 bp, Homo sapien
tgtgtatttcgtaaaccattcattc

SEQ ID NO: 2955316 - DNA, 25 bp, Homo sapien
tgtatttcgtaaaccattcattcac

SEQ ID NO: 2955317 - DNA, 25 bp, Homo sapien
tgcgtgagctgtggctccatggagt

SEQ ID NO: 2955318 - DNA, 25 bp, Homo sapien
accacacctctcttgagggcagtgg

SEQ ID NO: 2955319 - DNA, 25 bp, Homo sapien
catagttggacagcagggtcaccac

SEQ ID NO: 2955320 - DNA, 25 bp, Homo sapien
ggtcaccacacctctcttgagggca

SEQ ID NO: 2955321 - DNA, 25 bp, Homo sapien
ccatctcatacccaaaaagcttcgg

SEQ ID NO: 2955322 - DNA, 25 bp, Homo sapien
ccaaaaagcttcgggacacaagcct

SEQ ID NO: 2955323 - DNA, 25 bp, Homo sapien
catacccaaaaagcttcgggacaca

SEQ ID NO: 2955324 - DNA, 25 bp, Homo sapien
aaaagcttcgggacacaagcctgct

SEQ ID NO: 2955325 - DNA, 25 bp, Homo sapien
gagggtgccactatcgaaccacatg

SEQ ID NO: 2955326 - DNA, 25 bp, Homo sapien
caaggtggagtctacattcagggct

SEQ ID NO: 2955327 - DNA, 25 bp, Homo sapien
gaagtttcccgcctgaggtgcggac

SEQ ID NO: 2955328 - DNA, 25 bp, Homo sapien
tgtaggtggcccaatccaggtagca

SEQ ID NO: 2955329 - DNA, 25 bp, Homo sapien
ggtaataattccttgcgcagcacaa

SEQ ID NO: 2955330 - DNA, 25 bp, Homo sapien
gatgtgccagcggaacagagattcc

SEQ ID NO: 2955331 - DNA, 25 bp, Homo sapien
cattccttgtttgatcaccccgagt

SEQ ID NO: 2955332 - DNA, 25 bp, Homo sapien
cccacggaggtgagatgcattcctt

SEQ ID NO: 2955333 - DNA, 25 bp, Homo sapien
tccgctgggtggacggtagtttgct

SEQ ID NO: 2955334 - DNA, 25 bp, Homo sapien
tcacagatcctctcgcttagcgcaa

SEQ ID NO: 2955335 - DNA, 25 bp, Homo sapien
gggcctgctcggaaaactccagcac

SEQ ID NO: 2955336 - DNA, 25 bp, Homo sapien
gcgcagggattggacctgatccgct

SEQ ID NO: 2955337 - DNA, 25 bp, Homo sapien
tgccccgcacgcgtgtggcgcgcac

SEQ ID NO: 2955338 - DNA, 25 bp, Homo sapien
ttagtcagcgcgtcggaatgcgccg

SEQ ID NO: 2955339 - DNA, 25 bp, Homo sapien
tgagcgccggcagtttgttggtaaa

SEQ ID NO: 2955340 - DNA, 25 bp, Homo sapien
cagtttgttggtaaatagacgccgg

SEQ ID NO: 2955341 - DNA, 25 bp, Homo sapien
ccccgggacagcccgctgtagagaa

SEQ ID NO: 2955342 - DNA, 25 bp, Homo sapien
cccgctgtagagaagtggtaaatgg

SEQ ID NO: 2955343 - DNA, 25 bp, Homo sapien
gacagcccgctgtagagaagtggta

SEQ ID NO: 2955344 - DNA, 25 bp, Homo sapien
ctcacggagacttgcagccgggccc

SEQ ID NO: 2955345 - DNA, 25 bp, Homo sapien
agcccccacacttaagatcccggag

SEQ ID NO: 2955346 - DNA, 25 bp, Homo sapien
cagaagggccatggcccggcacgta

SEQ ID NO: 2955347 - DNA, 25 bp, Homo sapien
acgtagtccgctcccgctgccaact

SEQ ID NO: 2955348 - DNA, 25 bp, Homo sapien
tgagcctctttcagcggagaacgcg

SEQ ID NO: 2955349 - DNA, 25 bp, Homo sapien
gacagctttggaggcgtcccggccg

SEQ ID NO: 2955350 - DNA, 25 bp, Homo sapien
ggacaggggcgaggtctgggaagac

SEQ ID NO: 2955351 - DNA, 25 bp, Homo sapien
ggaagacagctttggaggcgtcccg

SEQ ID NO: 2955352 - DNA, 25 bp, Homo sapien
aagacagctttggaggcgtcccggc

SEQ ID NO: 2955353 - DNA, 25 bp, Homo sapien
gacaagccaagcgggtaggcagccg

SEQ ID NO: 2955354 - DNA, 25 bp, Homo sapien
ggctgcggttgtaggggacaagcca

SEQ ID NO: 2955355 - DNA, 25 bp, Homo sapien
tggagtaggacaaattgggggaggc

SEQ ID NO: 2955356 - DNA, 25 bp, Homo sapien
ggaggctgcggttgtaggggacaag

SEQ ID NO: 2955357 - DNA, 25 bp, Homo sapien
gtgtaggggtaagacaggaggtggc

SEQ ID NO: 2955358 - DNA, 25 bp, Homo sapien
tcgctggctcggtgtaggggtaaga

SEQ ID NO: 2955359 - DNA, 25 bp, Homo sapien
gccgcgggttgctggcaggacaggt

SEQ ID NO: 2955360 - DNA, 25 bp, Homo sapien
taggagtctccggggttcgctggct

SEQ ID NO: 2955361 - DNA, 25 bp, Homo sapien
ctgtttttcagtgtttggcttgatc

SEQ ID NO: 2955362 - DNA, 25 bp, Homo sapien
tgtttggcttgatcactgctttctg

SEQ ID NO: 2955363 - DNA, 25 bp, Homo sapien
tttttcagtgtttggcttgatcact

SEQ ID NO: 2955364 - DNA, 25 bp, Homo sapien
ttgatcactgctttctgagacaaga

SEQ ID NO: 2955365 - DNA, 25 bp, Homo sapien
gcgcttagggcagcgttcgccgcat

SEQ ID NO: 2955366 - DNA, 25 bp, Homo sapien
ctctccaggaatctcggccgcggga

SEQ ID NO: 2955367 - DNA, 25 bp, Homo sapien
ctgcgggtctgtccagccgacctga

SEQ ID NO: 2955368 - DNA, 25 bp, Homo sapien
agcagccgcaatgcccgggcgctta

SEQ ID NO: 2955369 - DNA, 25 bp, Homo sapien
cgcacagagcggttccggcggcagg

SEQ ID NO: 2955370 - DNA, 25 bp, Homo sapien
cccttccttcgttgggcagcgcgca

SEQ ID NO: 2955371 - DNA, 25 bp, Homo sapien
gtgacccgggttccaagagcgcgca

SEQ ID NO: 2955372 - DNA, 25 bp, Homo sapien
cttcgttgggcagcgcgcacagagc

SEQ ID NO: 2955373 - DNA, 25 bp, Homo sapien
ggcccggctgagaggaccttgaata

SEQ ID NO: 2955374 - DNA, 25 bp, Homo sapien
agcgctgatagtgaccccgggtttg

SEQ ID NO: 2955375 - DNA, 25 bp, Homo sapien
acagaggaaggacattgcaggcaga

SEQ ID NO: 2955376 - DNA, 25 bp, Homo sapien
tgaataccagtctcgcagcgctgat

SEQ ID NO: 2955377 - DNA, 25 bp, Homo sapien
gcggcgcctgcggtgggaggtcgga

SEQ ID NO: 2955378 - DNA, 25 bp, Homo sapien
tgggaggtcggagttcagccacggg

SEQ ID NO: 2955379 - DNA, 25 bp, Homo sapien
gccacgggcggtggcgccagcttgg

SEQ ID NO: 2955380 - DNA, 25 bp, Homo sapien
tcggagttcagccacgggcggtggc

SEQ ID NO: 2955381 - DNA, 25 bp, Homo sapien
gaagaaagcgccgagggccacagcc

SEQ ID NO: 2955382 - DNA, 25 bp, Homo sapien
taggaagaaagcgccgagggccaca

SEQ ID NO: 2955383 - DNA, 25 bp, Homo sapien
agaaagcgccgagggccacagccag

SEQ ID NO: 2955384 - DNA, 25 bp, Homo sapien
ctaggaagaaagcgccgagggccac

SEQ ID NO: 2955385 - DNA, 25 bp, Homo sapien
cgttcaccgcgccaggtgatacaag

SEQ ID NO: 2955386 - DNA, 25 bp, Homo sapien
tggagcgtttcaacccccacgttca

SEQ ID NO: 2955387 - DNA, 25 bp, Homo sapien
caagacgcagttctgctcccaggga

SEQ ID NO: 2955388 - DNA, 25 bp, Homo sapien
cgccaggtgatacaagacgcagttc

SEQ ID NO: 2955389 - DNA, 25 bp, Homo sapien
catgccgtcggcagcaaatagcaaa

SEQ ID NO: 2955390 - DNA, 25 bp, Homo sapien
aagcttatttgcatctcgtctgcat

SEQ ID NO: 2955391 - DNA, 25 bp, Homo sapien
aaaaagcgcagccaccaggatcgcc

SEQ ID NO: 2955392 - DNA, 25 bp, Homo sapien
gcaaatagcaaaaagcgcagccacc

SEQ ID NO: 2955393 - DNA, 25 bp, Homo sapien
gtgggcagcacaacacggtgtaggg

SEQ ID NO: 2955394 - DNA, 25 bp, Homo sapien
gcacaacacggtgtagggggcgagg

SEQ ID NO: 2955395 - DNA, 25 bp, Homo sapien
caacacggtgtagggggcgaggagg

SEQ ID NO: 2955396 - DNA, 25 bp, Homo sapien
ggtgggcagcacaacacggtgtagg

SEQ ID NO: 2955397 - DNA, 25 bp, Homo sapien
tgcaggctggagtagatggtcctcg

SEQ ID NO: 2955398 - DNA, 25 bp, Homo sapien
actgcgtgtgctggaaacgctggtt

SEQ ID NO: 2955399 - DNA, 25 bp, Homo sapien
cctcggcttgcggagctttttggcg

SEQ ID NO: 2955400 - DNA, 25 bp, Homo sapien
tgagggcgccgctcggagggttccg

SEQ ID NO: 2955401 - DNA, 25 bp, Homo sapien
atggggaaggacgacactggcccca

SEQ ID NO: 2955402 - DNA, 25 bp, Homo sapien
agagatggggaaggacgacactggc

SEQ ID NO: 2955403 - DNA, 25 bp, Homo sapien
tggggaaggacgacactggccccac

SEQ ID NO: 2955404 - DNA, 25 bp, Homo sapien
agatggggaaggacgacactggccc

SEQ ID NO: 2955405 - DNA, 25 bp, Homo sapien
cagctatgaacattccctggagaac

SEQ ID NO: 2955406 - DNA, 25 bp, Homo sapien
tgggagaccagcagttccctaggct

SEQ ID NO: 2955407 - DNA, 25 bp, Homo sapien
tcctgcctctgagctagtatccatg

SEQ ID NO: 2955408 - DNA, 25 bp, Homo sapien
ggatccaggtgcaggcacagtcctg

SEQ ID NO: 2955409 - DNA, 25 bp, Homo sapien
tgatgctgataccaggctccaaagc

SEQ ID NO: 2955410 - DNA, 25 bp, Homo sapien
tgccttgggtagatcccagagggag

SEQ ID NO: 2955411 - DNA, 25 bp, Homo sapien
tcacatcatctgaggcgaagccagg

SEQ ID NO: 2955412 - DNA, 25 bp, Homo sapien
gcttcaggagcttcttatacttgga

SEQ ID NO: 2955413 - DNA, 25 bp, Homo sapien
tatacccgcactaatccagagagcc

SEQ ID NO: 2955414 - DNA, 25 bp, Homo sapien
gttcctttgaacagagacagctgca

SEQ ID NO: 2955415 - DNA, 25 bp, Homo sapien
ggagctgaatcaatgggcctaccca

SEQ ID NO: 2955416 - DNA, 25 bp, Homo sapien
tgacctccaaggaaaaatcgctggg

SEQ ID NO: 2955417 - DNA, 25 bp, Homo sapien
gtggcccagaccaagcgggcactca

SEQ ID NO: 2955418 - DNA, 25 bp, Homo sapien
ttctgccaactgcagctctcaaagc

SEQ ID NO: 2955419 - DNA, 25 bp, Homo sapien
agtccgcggaccgtgccctctgttt

SEQ ID NO: 2955420 - DNA, 25 bp, Homo sapien
ggcctccgggagtggcccagaccaa

SEQ ID NO: 2955421 - DNA, 25 bp, Homo sapien
gactagacttttaccaatgacccaa

SEQ ID NO: 2955422 - DNA, 25 bp, Homo sapien
ctgtggaaagcatgacggacctctt

SEQ ID NO: 2955423 - DNA, 25 bp, Homo sapien
cagttgcaaccttggcatcaggaaa

SEQ ID NO: 2955424 - DNA, 25 bp, Homo sapien
gtggcatgcccaagctgcaaagcag

SEQ ID NO: 2955425 - DNA, 25 bp, Homo sapien
tacacatggcatggaacatgtctga

SEQ ID NO: 2955426 - DNA, 25 bp, Homo sapien
gatcatcagatggttttggagaaag

SEQ ID NO: 2955427 - DNA, 25 bp, Homo sapien
ggcacatgtctaagctatctccttc

SEQ ID NO: 2955428 - DNA, 25 bp, Homo sapien
gagaagcattttggaggcacatgtc

SEQ ID NO: 2955429 - DNA, 25 bp, Homo sapien
actgcgctaactgcagccatggtca

SEQ ID NO: 2955430 - DNA, 25 bp, Homo sapien
gcgctaactgcagccatggtcaggg

SEQ ID NO: 2955431 - DNA, 25 bp, Homo sapien
ctggtggcgactgcgctaactgcag

SEQ ID NO: 2955432 - DNA, 25 bp, Homo sapien
gcgactgcgctaactgcagccatgg

SEQ ID NO: 2955433 - DNA, 25 bp, Homo sapien
ggccgtgtgaggtgcccacaacagc

SEQ ID NO: 2955434 - DNA, 25 bp, Homo sapien
aacagccacctcttctgggccagtt

SEQ ID NO: 2955435 - DNA, 25 bp, Homo sapien
gttcctcctcacacttagcacaatg

SEQ ID NO: 2955436 - DNA, 25 bp, Homo sapien
ccatggcccactctggtcccggcac

SEQ ID NO: 2955437 - DNA, 25 bp, Homo sapien
ctttctgccctggagaggtacacgt

SEQ ID NO: 2955438 - DNA, 25 bp, Homo sapien
cctgaggccccgggacccagtcctg

SEQ ID NO: 2955439 - DNA, 25 bp, Homo sapien
actcctgtgggccagatgccagggc

SEQ ID NO: 2955440 - DNA, 25 bp, Homo sapien
gctgtgagtcagaaggcacggggcc

SEQ ID NO: 2955441 - DNA, 25 bp, Homo sapien
taatatagaaactgtgtggaaggtc

SEQ ID NO: 2955442 - DNA, 25 bp, Homo sapien
ctgtgggcatgatcagatgctttcc

SEQ ID NO: 2955443 - DNA, 25 bp, Homo sapien
acaatgagggacactgtctcatctg

SEQ ID NO: 2955444 - DNA, 25 bp, Homo sapien
tgtccccgtgggtcctctcaggtcc

SEQ ID NO: 2955445 - DNA, 25 bp, Homo sapien
tccccgtgggtcctctcaggtccca

SEQ ID NO: 2955446 - DNA, 25 bp, Homo sapien
ccccgtgggtcctctcaggtcccat

SEQ ID NO: 2955447 - DNA, 25 bp, Homo sapien
gatgtccccgtgggtcctctcaggt

SEQ ID NO: 2955448 - DNA, 25 bp, Homo sapien
gtcatggacgtcagggacccctctg

SEQ ID NO: 2955449 - DNA, 25 bp, Homo sapien
agggccacgccctcaatggcagaac

SEQ ID NO: 2955450 - DNA, 25 bp, Homo sapien
gagtggaggagtcagatagggcttg

SEQ ID NO: 2955451 - DNA, 25 bp, Homo sapien
cttgtcatggacgtcagggacccct

SEQ ID NO: 2955452 - DNA, 25 bp, Homo sapien
gcaggtcttcaaccacggtgtgtcc

SEQ ID NO: 2955453 - DNA, 25 bp, Homo sapien
gcagcttctccgtcacatggcaggt

SEQ ID NO: 2955454 - DNA, 25 bp, Homo sapien
gagttccatcaccacgtactctatg

SEQ ID NO: 2955455 - DNA, 25 bp, Homo sapien
tatgctcagtgttgacccctgcgtt

SEQ ID NO: 2955456 - DNA, 25 bp, Homo sapien
tcagttgaccccttgttcgttaaca

SEQ ID NO: 2955457 - DNA, 25 bp, Homo sapien
atgctgatgaaacccgccaggctcc

SEQ ID NO: 2955458 - DNA, 25 bp, Homo sapien
gatgtttaactcttgccagccacct

SEQ ID NO: 2955459 - DNA, 25 bp, Homo sapien
tccatgtatccagaagtacttagca

SEQ ID NO: 2955460 - DNA, 25 bp, Homo sapien
tcaaccctcccccatggggaagaga

SEQ ID NO: 2955461 - DNA, 25 bp, Homo sapien
ttcgcggcggatctggcaagcgcac

SEQ ID NO: 2955462 - DNA, 25 bp, Homo sapien
cgtagcgctgatcggtttcgtgccc

SEQ ID NO: 2955463 - DNA, 25 bp, Homo sapien
cagtttcacagctgcgctctcggat

SEQ ID NO: 2955464 - DNA, 25 bp, Homo sapien
gatccgtgggtctatcttcctgcct

SEQ ID NO: 2955465 - DNA, 25 bp, Homo sapien
cgcggggcgcgcggctggggccggg

SEQ ID NO: 2955466 - DNA, 25 bp, Homo sapien
caggcgtggggcgcggggcgcgcgg

SEQ ID NO: 2955467 - DNA, 25 bp, Homo sapien
gggcgcggggcgcgcggctggggcc

SEQ ID NO: 2955468 - DNA, 25 bp, Homo sapien
cgtggggcgcggggcgcgcggctgg

SEQ ID NO: 2955469 - DNA, 25 bp, Homo sapien
cctccttcactaccaggaatcgggt

SEQ ID NO: 2955470 - DNA, 25 bp, Homo sapien
ctctgtctgccgatggagggcgacc

SEQ ID NO: 2955471 - DNA, 25 bp, Homo sapien
ccaccatcaaggcgagcgcacagag

SEQ ID NO: 2955472 - DNA, 25 bp, Homo sapien
tatccaggttgaaggcggagacgac

SEQ ID NO: 2955473 - DNA, 25 bp, Homo sapien
ccaaaggatctagcactcaggccaa

SEQ ID NO: 2955474 - DNA, 25 bp, Homo sapien
ggcacagtacccaggagaattcagg

SEQ ID NO: 2955475 - DNA, 25 bp, Homo sapien
ggatcccagctctatgccagccttg

SEQ ID NO: 2955476 - DNA, 25 bp, Homo sapien
gaattcagggtaccaggttggctca

SEQ ID NO: 2955477 - DNA, 25 bp, Homo sapien
tgcctggaaccagccttatgcctac

SEQ ID NO: 2955478 - DNA, 25 bp, Homo sapien
tctgaacttcccaaggtactgagca

SEQ ID NO: 2955479 - DNA, 25 bp, Homo sapien
cagattgaaatacttccccttacca

SEQ ID NO: 2955480 - DNA, 25 bp, Homo sapien
tcccaaggtactgagcaggcagagc

SEQ ID NO: 2955481 - DNA, 25 bp, Homo sapien
ggcatgttagggaacctggagcaga

SEQ ID NO: 2955482 - DNA, 25 bp, Homo sapien
ggctggacccaggaatttctgccct

SEQ ID NO: 2955483 - DNA, 25 bp, Homo sapien
tgccctggcatgttagggaacctgg

SEQ ID NO: 2955484 - DNA, 25 bp, Homo sapien
cctggcatgttagggaacctggagc

SEQ ID NO: 2955485 - DNA, 25 bp, Homo sapien
agctcccggggggcaccagccagga

SEQ ID NO: 2955486 - DNA, 25 bp, Homo sapien
gctcccggggggcaccagccaggag

SEQ ID NO: 2955487 - DNA, 25 bp, Homo sapien
ctcccggggggcaccagccaggagc

SEQ ID NO: 2955488 - DNA, 25 bp, Homo sapien
cgagctcccggggggcaccagccag

SEQ ID NO: 2955489 - DNA, 25 bp, Homo sapien
cacagcaccagtccggttggtgtag

SEQ ID NO: 2955490 - DNA, 25 bp, Homo sapien
tacacagcaccagtccggttggtgt

SEQ ID NO: 2955491 - DNA, 25 bp, Homo sapien
ggtacacagcaccagtccggttggt

SEQ ID NO: 2955492 - DNA, 25 bp, Homo sapien
aggtacacagcaccagtccggttgg

SEQ ID NO: 2955493 - DNA, 25 bp, Homo sapien
ttcactgtgatgttcatccgctcac

SEQ ID NO: 2955494 - DNA, 25 bp, Homo sapien
tcctcaataatgtgatggccagggt

SEQ ID NO: 2955495 - DNA, 25 bp, Homo sapien
actccaagccacatgtcctcaataa

SEQ ID NO: 2955496 - DNA, 25 bp, Homo sapien
ccacatgtcctcaataatgtgatgg

SEQ ID NO: 2955497 - DNA, 25 bp, Homo sapien
tcaataatgtgatggccagggtcat

SEQ ID NO: 2955498 - DNA, 25 bp, Homo sapien
gggagtcttctatcttgaaagaaag

SEQ ID NO: 2955499 - DNA, 25 bp, Homo sapien
acacccagctgggagtcttctatct

SEQ ID NO: 2955500 - DNA, 25 bp, Homo sapien
gggacaacagacgggcaccactgca

SEQ ID NO: 2955501 - DNA, 25 bp, Homo sapien
ccagctgggagtcttctatcttgaa

SEQ ID NO: 2955502 - DNA, 25 bp, Homo sapien
gggcgccgaagtacacagtgttctg

SEQ ID NO: 2955503 - DNA, 25 bp, Homo sapien
tgcccgtctccaggtagtctgtgtt

SEQ ID NO: 2955504 - DNA, 25 bp, Homo sapien
taggtcattgcctcgcacgtagcac

SEQ ID NO: 2955505 - DNA, 25 bp, Homo sapien
cacatctcgttgtggtaggtctgcc

SEQ ID NO: 2955506 - DNA, 25 bp, Homo sapien
cactccttgcgctgaatcatgtagc

SEQ ID NO: 2955507 - DNA, 25 bp, Homo sapien
tgggtccttgtaactatactcagat

SEQ ID NO: 2955508 - DNA, 25 bp, Homo sapien
gataagtcccactccttgcgctgaa

SEQ ID NO: 2955509 - DNA, 25 bp, Homo sapien
tgtaactatactcagataagtccca

SEQ ID NO: 2955510 - DNA, 25 bp, Homo sapien
ccgcgcccatatgtcggtgccgtgg

SEQ ID NO: 2955511 - DNA, 25 bp, Homo sapien
aatggcgctgccaaaataggcgccc

SEQ ID NO: 2955512 - DNA, 25 bp, Homo sapien
gaagctgcctacctgcatcgtgtac

SEQ ID NO: 2955513 - DNA, 25 bp, Homo sapien
tcagcaagaacaccgcgcccatatg

SEQ ID NO: 2955514 - DNA, 25 bp, Homo sapien
ggagatgccaatatgacccaccaaa

SEQ ID NO: 2955515 - DNA, 25 bp, Homo sapien
ggtcagcctccaatatgcagcatag

SEQ ID NO: 2955516 - DNA, 25 bp, Homo sapien
aaggacatgtgcatgggaaggacat

SEQ ID NO: 2955517 - DNA, 25 bp, Homo sapien
gaagacatatgtcatggagacgcca

SEQ ID NO: 2955518 - DNA, 25 bp, Homo sapien
tctcgaagtagtagggggcgcccac

SEQ ID NO: 2955519 - DNA, 25 bp, Homo sapien
tcgaagtagtagggggcgcccacca

SEQ ID NO: 2955520 - DNA, 25 bp, Homo sapien
ggaggttcccgcctggttcatgaag

SEQ ID NO: 2955521 - DNA, 25 bp, Homo sapien
gaaggaggttcccgcctggttcatg

SEQ ID NO: 2955522 - DNA, 25 bp, Homo sapien
gaggttcccgcctggttcatgaaga

SEQ ID NO: 2955523 - DNA, 25 bp, Homo sapien
agcagggaaggaggttcccgcctgg

SEQ ID NO: 2955524 - DNA, 25 bp, Homo sapien
taaggagccccttagagctactgtg

SEQ ID NO: 2955525 - DNA, 25 bp, Homo sapien
tcaaacggagctcccacagcaatat

SEQ ID NO: 2955526 - DNA, 25 bp, Homo sapien
gtgatagatgtacactttgcccaag

SEQ ID NO: 2955527 - DNA, 25 bp, Homo sapien
tttgcccaagccttcaaacggagct

SEQ ID NO: 2955528 - DNA, 25 bp, Homo sapien
tccatctgcccactgagggaatagc

SEQ ID NO: 2955529 - DNA, 25 bp, Homo sapien
tctgacaggcttcccactagaaggt

SEQ ID NO: 2955530 - DNA, 25 bp, Homo sapien
gagggaatagccgaaggtggccaac

SEQ ID NO: 2955531 - DNA, 25 bp, Homo sapien
cacaatgtggtctgacaggcttccc

SEQ ID NO: 2955532 - DNA, 25 bp, Homo sapien
tgtggacgatgttgatgacgggccg

SEQ ID NO: 2955533 - DNA, 25 bp, Homo sapien
gacgatgttgatgacgggccgggcc

SEQ ID NO: 2955534 - DNA, 25 bp, Homo sapien
aggtcttgtggacgatgttgatgac

SEQ ID NO: 2955535 - DNA, 25 bp, Homo sapien
caccaaggtcttgtggacgatgttg

SEQ ID NO: 2955536 - DNA, 25 bp, Homo sapien
cctagctctcgcctctgtactgggc

SEQ ID NO: 2955537 - DNA, 25 bp, Homo sapien
agggatgtacaggagggcgggtcac

SEQ ID NO: 2955538 - DNA, 25 bp, Homo sapien
cacgtccaggccctagctctcgcct

SEQ ID NO: 2955539 - DNA, 25 bp, Homo sapien
ggccctagctctcgcctctgtactg

SEQ ID NO: 2955540 - DNA, 25 bp, Homo sapien
ctctggttgtaagcaaagcacagct

SEQ ID NO: 2955541 - DNA, 25 bp, Homo sapien
gatgtttcgcctgtagttggggttc

SEQ ID NO: 2955542 - DNA, 25 bp, Homo sapien
tgtagttggggttcccggcactctg

SEQ ID NO: 2955543 - DNA, 25 bp, Homo sapien
tcccggcactctggttgtaagcaaa

SEQ ID NO: 2955544 - DNA, 25 bp, Homo sapien
cttctggcagcgcatctcgggcatg

SEQ ID NO: 2955545 - DNA, 25 bp, Homo sapien
gacagcggactcactgccggcaaag

SEQ ID NO: 2955546 - DNA, 25 bp, Homo sapien
aagaagccgtggaagacagcggact

SEQ ID NO: 2955547 - DNA, 25 bp, Homo sapien
cgcatctcgggcatggagaagaagc

SEQ ID NO: 2955548 - DNA, 25 bp, Homo sapien
atcgggtaggcgtccagggaccgca

SEQ ID NO: 2955549 - DNA, 25 bp, Homo sapien
cctggttgaggatcgggtaggcgtc

SEQ ID NO: 2955550 - DNA, 25 bp, Homo sapien
gcgatcgggcatccgcaaaggtaaa

SEQ ID NO: 2955551 - DNA, 25 bp, Homo sapien
tcgggcatccgcaaaggtaaagagt

SEQ ID NO: 2955552 - DNA, 25 bp, Homo sapien
tgcccgcatctgcaagttgctctca

SEQ ID NO: 2955553 - DNA, 25 bp, Homo sapien
gctgctgctctgacacgaaggctgc

SEQ ID NO: 2955554 - DNA, 25 bp, Homo sapien
tgacacgaaggctgcccgcatctgc

SEQ ID NO: 2955555 - DNA, 25 bp, Homo sapien
tctcacacttgttgtcaggcccgca

SEQ ID NO: 2955556 - DNA, 25 bp, Homo sapien
ggtgttcgtcacgttgatgctcagg

SEQ ID NO: 2955557 - DNA, 25 bp, Homo sapien
ggagcgctccgaggtccgggtgttc

SEQ ID NO: 2955558 - DNA, 25 bp, Homo sapien
cgtcctccccggagcgctccgaggt

SEQ ID NO: 2955559 - DNA, 25 bp, Homo sapien
tgagcagcgcctcgtgggcgtcctc

SEQ ID NO: 2955560 - DNA, 25 bp, Homo sapien
gcgaataaggtcagggtcgggtcaa

SEQ ID NO: 2955561 - DNA, 25 bp, Homo sapien
tcgggtcaaagtagggcttgtcctc

SEQ ID NO: 2955562 - DNA, 25 bp, Homo sapien
ctgaggaaagaaggcgaataaggtc

SEQ ID NO: 2955563 - DNA, 25 bp, Homo sapien
cagggtcgggtcaaagtagggcttg

SEQ ID NO: 2955564 - DNA, 25 bp, Homo sapien
ttccccagctcgcaaaagatggtct

SEQ ID NO: 2955565 - DNA, 25 bp, Homo sapien
gggttccccagctcgcaaaagatgg

SEQ ID NO: 2955566 - DNA, 25 bp, Homo sapien
cagctcgcaaaagatggtctcatta

SEQ ID NO: 2955567 - DNA, 25 bp, Homo sapien
caaaagatggtctcattagcttggc

SEQ ID NO: 2955568 - DNA, 25 bp, Homo sapien
agggtcaccccgatgacctcaaagg

SEQ ID NO: 2955569 - DNA, 25 bp, Homo sapien
tgtgcagggtcaccccgatgacctc

SEQ ID NO: 2955570 - DNA, 25 bp, Homo sapien
gatgacctcaaaggcgatgagcagc

SEQ ID NO: 2955571 - DNA, 25 bp, Homo sapien
accccgatgacctcaaaggcgatga

SEQ ID NO: 2955572 - DNA, 25 bp, Homo sapien
tggagtgtatagtccaccagcagag

SEQ ID NO: 2955573 - DNA, 25 bp, Homo sapien
aagcgaggtctggagtgtatagtcc

SEQ ID NO: 2955574 - DNA, 25 bp, Homo sapien
ggtctggagtgtatagtccaccagc

SEQ ID NO: 2955575 - DNA, 25 bp, Homo sapien
gagtgtatagtccaccagcagagtg

SEQ ID NO: 2955576 - DNA, 25 bp, Homo sapien
gttttcatgccagactcacccatca

SEQ ID NO: 2955577 - DNA, 25 bp, Homo sapien
agaagctttgtagccggtgatttac

SEQ ID NO: 2955578 - DNA, 25 bp, Homo sapien
tggaattcatacttgagggggcttc

SEQ ID NO: 2955579 - DNA, 25 bp, Homo sapien
gggcttcctacatcctccacagttt

SEQ ID NO: 2955580 - DNA, 25 bp, Homo sapien
ccatggacggtgatctccgtgggat

SEQ ID NO: 2955581 - DNA, 25 bp, Homo sapien
ggtgatctccgtgggatacagcagc

SEQ ID NO: 2955582 - DNA, 25 bp, Homo sapien
ttgagagggttgataaggtctccag

SEQ ID NO: 2955583 - DNA, 25 bp, Homo sapien
ttgctgacttcgtagggccactcca

SEQ ID NO: 2955584 - DNA, 25 bp, Homo sapien
agtctcagacttggcttttttggca

SEQ ID NO: 2955585 - DNA, 25 bp, Homo sapien
tcgccgcctgcgctgtggggatgat

SEQ ID NO: 2955586 - DNA, 25 bp, Homo sapien
cacagtctcagacttggcttttttg

SEQ ID NO: 2955587 - DNA, 25 bp, Homo sapien
ctgtggggatgatggcctgtcccca

SEQ ID NO: 2955588 - DNA, 25 bp, Homo sapien
ggcactctagccacacacagtgggc

SEQ ID NO: 2955589 - DNA, 25 bp, Homo sapien
tggggcactctagccacacacagtg

SEQ ID NO: 2955590 - DNA, 25 bp, Homo sapien
atggggcactctagccacacacagt

SEQ ID NO: 2955591 - DNA, 25 bp, Homo sapien
gggcactctagccacacacagtggg

SEQ ID NO: 2955592 - DNA, 25 bp, Homo sapien
gaaggtgctgttccacactcgtgcc

SEQ ID NO: 2955593 - DNA, 25 bp, Homo sapien
ctcgatgaaggtgctgttccacact

SEQ ID NO: 2955594 - DNA, 25 bp, Homo sapien
cgatgaaggtgctgttccacactcg

SEQ ID NO: 2955595 - DNA, 25 bp, Homo sapien
ggtgctgttccacactcgtgccttc

SEQ ID NO: 2955596 - DNA, 25 bp, Homo sapien
tttgttcattcatttctgcgtcagg

SEQ ID NO: 2955597 - DNA, 25 bp, Homo sapien
cacacaaatgcgcatcattcattta

SEQ ID NO: 2955598 - DNA, 25 bp, Homo sapien
cccaaaggatctgtcagccaggcct

SEQ ID NO: 2955599 - DNA, 25 bp, Homo sapien
tcatttctgcgtcaggtcctgtgct

SEQ ID NO: 2955600 - DNA, 25 bp, Homo sapien
gggatgctggttcggaggaataggg

SEQ ID NO: 2955601 - DNA, 25 bp, Homo sapien
gttcggaggaatagggtagcccagc

SEQ ID NO: 2955602 - DNA, 25 bp, Homo sapien
ccacgtggtcttgttctccatgttg

SEQ ID NO: 2955603 - DNA, 25 bp, Homo sapien
cacgtggtcttgttctccatgttga

SEQ ID NO: 2955604 - DNA, 25 bp, Homo sapien
tcctgaatcctactgagactggaat

SEQ ID NO: 2955605 - DNA, 25 bp, Homo sapien
catattgcccgtggcgggaagctca

SEQ ID NO: 2955606 - DNA, 25 bp, Homo sapien
gaagctcacaggtccatagtggatg

SEQ ID NO: 2955607 - DNA, 25 bp, Homo sapien
ttgctagcatgtaggaaacctaggg

SEQ ID NO: 2955608 - DNA, 25 bp, Homo sapien
tatcatcatcttttcacgtcaattg

SEQ ID NO: 2955609 - DNA, 25 bp, Homo sapien
tcatcttttcacgtcaattggtaaa

SEQ ID NO: 2955610 - DNA, 25 bp, Homo sapien
gtaaagatcagcctaatctcttctg

SEQ ID NO: 2955611 - DNA, 25 bp, Homo sapien
ttttcacgtcaattggtaaagatca

SEQ ID NO: 2955612 - DNA, 25 bp, Homo sapien
acttgactccagaggagcggcctca

SEQ ID NO: 2955613 - DNA, 25 bp, Homo sapien
ggttctggagccacattacctgggt

SEQ ID NO: 2955614 - DNA, 25 bp, Homo sapien
cagcctgggactggaaaaagcctgt

SEQ ID NO: 2955615 - DNA, 25 bp, Homo sapien
gaatagcagaacgaccaaaagcagg

SEQ ID NO: 2955616 - DNA, 25 bp, Homo sapien
accagccacagctcgatttcggccg

SEQ ID NO: 2955617 - DNA, 25 bp, Homo sapien
ccaccagctccgagtcaatgtccac

SEQ ID NO: 2955618 - DNA, 25 bp, Homo sapien
acagctcgatttcggccggcagctc

SEQ ID NO: 2955619 - DNA, 25 bp, Homo sapien
accagctccgagtcaatgtccacag

SEQ ID NO: 2955620 - DNA, 25 bp, Homo sapien
tagcttcatacagggcgcgagtgcg

SEQ ID NO: 2955621 - DNA, 25 bp, Homo sapien
cagtagtcgtcggtcagcctctctg

SEQ ID NO: 2955622 - DNA, 25 bp, Homo sapien
tgtctctgacggctggctcttcatc

SEQ ID NO: 2955623 - DNA, 25 bp, Homo sapien
tgcgggctcgcttgaagaagccgca

SEQ ID NO: 2955624 - DNA, 25 bp, Homo sapien
aaagccagaactcttgaccgaaacg

SEQ ID NO: 2955625 - DNA, 25 bp, Homo sapien
tcaaagccagaactcttgaccgaaa

SEQ ID NO: 2955626 - DNA, 25 bp, Homo sapien
aactcttgaccgaaacgcatcccat

SEQ ID NO: 2955627 - DNA, 25 bp, Homo sapien
gccagaactcttgaccgaaacgcat

SEQ ID NO: 2955628 - DNA, 25 bp, Homo sapien
agcgggtccgcttaaagaagtcaca

SEQ ID NO: 2955629 - DNA, 25 bp, Homo sapien
gatctgataatagcgggtccgctta

SEQ ID NO: 2955630 - DNA, 25 bp, Homo sapien
atagcgggtccgcttaaagaagtca

SEQ ID NO: 2955631 - DNA, 25 bp, Homo sapien
gataatagcgggtccgcttaaagaa

SEQ ID NO: 2955632 - DNA, 25 bp, Homo sapien
tccgcactgcgtggtacttgggcat

SEQ ID NO: 2955633 - DNA, 25 bp, Homo sapien
tcccggatccgcactgcgtggtact

SEQ ID NO: 2955634 - DNA, 25 bp, Homo sapien
tggaggtgggtagcgctcctcctcc

SEQ ID NO: 2955635 - DNA, 25 bp, Homo sapien
ccctggaggtgggtagcgctcctcc

SEQ ID NO: 2955636 - DNA, 25 bp, Homo sapien
tcagtagtattggtcccgagtctgc

SEQ ID NO: 2955637 - DNA, 25 bp, Homo sapien
agtagtattggtcccgagtctgcca

SEQ ID NO: 2955638 - DNA, 25 bp, Homo sapien
tggtcccgagtctgccagctggtca

SEQ ID NO: 2955639 - DNA, 25 bp, Homo sapien
agtattggtcccgagtctgccagct

SEQ ID NO: 2955640 - DNA, 25 bp, Homo sapien
tgctaccagccaaaggtggtggccc

SEQ ID NO: 2955641 - DNA, 25 bp, Homo sapien
ggccagacagcatgtgcatgctctt

SEQ ID NO: 2955642 - DNA, 25 bp, Homo sapien
tgacgaggtgtatgtgcctgagcct

SEQ ID NO: 2955643 - DNA, 25 bp, Homo sapien
tggactgtcagaggcataacttatg

SEQ ID NO: 2955644 - DNA, 25 bp, Homo sapien
ccagcacagtccacgagcagtgggc

SEQ ID NO: 2955645 - DNA, 25 bp, Homo sapien
gcactcggcgttgtaaggtccacag

SEQ ID NO: 2955646 - DNA, 25 bp, Homo sapien
cccacgtgcatctagggcacaggaa

SEQ ID NO: 2955647 - DNA, 25 bp, Homo sapien
gactgtggctcaagatggatccagt

SEQ ID NO: 2955648 - DNA, 25 bp, Homo sapien
cattgggggcccaccagccagcggc

SEQ ID NO: 2955649 - DNA, 25 bp, Homo sapien
tcattgggggcccaccagccagcgg

SEQ ID NO: 2955650 - DNA, 25 bp, Homo sapien
ctgctccctgtcagtagttttgaca

SEQ ID NO: 2955651 - DNA, 25 bp, Homo sapien
tgagcccaggctacgttgccgtttg

SEQ ID NO: 2955652 - DNA, 25 bp, Homo sapien
gaaagcaagccgttctgggtccttc

SEQ ID NO: 2955653 - DNA, 25 bp, Homo sapien
cattccctgcgagttcagtctgtgg

SEQ ID NO: 2955654 - DNA, 25 bp, Homo sapien
tttgctgttgggtctgagcacgcca

SEQ ID NO: 2955655 - DNA, 25 bp, Homo sapien
aggcccctgacgcatggtcagcgtg

SEQ ID NO: 2955656 - DNA, 25 bp, Homo sapien
gttttctggaactagcctcagcttc

SEQ ID NO: 2955657 - DNA, 25 bp, Homo sapien
gatagctaagaactccacctctagg

SEQ ID NO: 2955658 - DNA, 25 bp, Homo sapien
tctcaaatgggccttaggacacagc

SEQ ID NO: 2955659 - DNA, 25 bp, Homo sapien
ctgggagctgtttattggtcgccgt

SEQ ID NO: 2955660 - DNA, 25 bp, Homo sapien
tcttagcaaatattcgcagtctggg

SEQ ID NO: 2955661 - DNA, 25 bp, Homo sapien
tccactgggctagcaattaggacgt

SEQ ID NO: 2955662 - DNA, 25 bp, Homo sapien
gattggctgaaagctacctggacaa

SEQ ID NO: 2955663 - DNA, 25 bp, Homo sapien
tgccaagctgggttataggctccct

SEQ ID NO: 2955664 - DNA, 25 bp, Homo sapien
tatctcccatcgtgggtttagggcc

SEQ ID NO: 2955665 - DNA, 25 bp, Homo sapien
tcttgtggccgaatgtggtatctcc

SEQ ID NO: 2955666 - DNA, 25 bp, Homo sapien
tcttggagaaaatgtgacgcgccct

SEQ ID NO: 2955667 - DNA, 25 bp, Homo sapien
taaagccttggacatctagcgcgac

SEQ ID NO: 2955668 - DNA, 25 bp, Homo sapien
gacccagactgcgaatatttgcaaa

SEQ ID NO: 2955669 - DNA, 25 bp, Homo sapien
ggtgcaagcctatacgaatccgtcc

SEQ ID NO: 2955670 - DNA, 25 bp, Homo sapien
caaaattcggaaccagggtgcaagc

SEQ ID NO: 2955671 - DNA, 25 bp, Homo sapien
ttcccagtccggatgacagtgaccc

SEQ ID NO: 2955672 - DNA, 25 bp, Homo sapien
gcgggcattccaacgcccagccaat

SEQ ID NO: 2955673 - DNA, 25 bp, Homo sapien
tgcggcggccgcgactttggttgtg

SEQ ID NO: 2955674 - DNA, 25 bp, Homo sapien
agcgctcgcgcacctttcggcccag

SEQ ID NO: 2955675 - DNA, 25 bp, Homo sapien
tttcggcccagcgacgcggttcggc

SEQ ID NO: 2955676 - DNA, 25 bp, Homo sapien
tgccagggacgcattcttcagcagc

SEQ ID NO: 2955677 - DNA, 25 bp, Homo sapien
tgctctatgtacttgggcgcccctg

SEQ ID NO: 2955678 - DNA, 25 bp, Homo sapien
gggagaacttgctgaagtgctctat

SEQ ID NO: 2955679 - DNA, 25 bp, Homo sapien
cagggacgcattcttcagcagcgcc

SEQ ID NO: 2955680 - DNA, 25 bp, Homo sapien
cactggggcagctagggtccagctc

SEQ ID NO: 2955681 - DNA, 25 bp, Homo sapien
ataggcggcttgactccacatcacg

SEQ ID NO: 2955682 - DNA, 25 bp, Homo sapien
ccaagggaggtataggcggcttgac

SEQ ID NO: 2955683 - DNA, 25 bp, Homo sapien
gctgccaggccggaacagatttgat

SEQ ID NO: 2955684 - DNA, 25 bp, Homo sapien
cactcggtcgggaagcaggttgatc

SEQ ID NO: 2955685 - DNA, 25 bp, Homo sapien
aggtgaaggaggttttctcacaggc

SEQ ID NO: 2955686 - DNA, 25 bp, Homo sapien
cggagggtgtgctcagcactcggtc

SEQ ID NO: 2955687 - DNA, 25 bp, Homo sapien
gggaagcaggttgatctctttcatg

SEQ ID NO: 2955688 - DNA, 25 bp, Homo sapien
ggccatatcgcctcccacctacagc

SEQ ID NO: 2955689 - DNA, 25 bp, Homo sapien
tgctgacgggcaagggaggtttgtg

SEQ ID NO: 2955690 - DNA, 25 bp, Homo sapien
ttgtgcgaaggtgccggccatatcg

SEQ ID NO: 2955691 - DNA, 25 bp, Homo sapien
caagggaggtttgtgcgaaggtgcc

SEQ ID NO: 2955692 - DNA, 25 bp, Homo sapien
ggctcagggtgcgatggtcctcggg

SEQ ID NO: 2955693 - DNA, 25 bp, Homo sapien
gatggtcctcgggatccttgtccag

SEQ ID NO: 2955694 - DNA, 25 bp, Homo sapien
gtgcgatggtcctcgggatccttgt

SEQ ID NO: 2955695 - DNA, 25 bp, Homo sapien
ctcgggatccttgtccaggaactcc

SEQ ID NO: 2955696 - DNA, 25 bp, Homo sapien
ggtcatcgccgtaggtgtccttgta

SEQ ID NO: 2955697 - DNA, 25 bp, Homo sapien
aggtagaagcggtccaggaagtact

SEQ ID NO: 2955698 - DNA, 25 bp, Homo sapien
catggtgggcaccacgtcgttgtgc

SEQ ID NO: 2955699 - DNA, 25 bp, Homo sapien
caagcacgccttgtgccatggtggg

SEQ ID NO: 2955700 - DNA, 25 bp, Homo sapien
cgcccgctccccgccgctgtggccg

SEQ ID NO: 2955701 - DNA, 25 bp, Homo sapien
ctccccgccgctgtggccggcaccc

SEQ ID NO: 2955702 - DNA, 25 bp, Homo sapien
cccgctccccgccgctgtggccggc

SEQ ID NO: 2955703 - DNA, 25 bp, Homo sapien
cgctccccgccgctgtggccggcac

SEQ ID NO: 2955704 - DNA, 25 bp, Homo sapien
gttggagccattaactccatagtta

SEQ ID NO: 2955705 - DNA, 25 bp, Homo sapien
taactccatagttactggagtaact

SEQ ID NO: 2955706 - DNA, 25 bp, Homo sapien
aagagtggtctaggtcccctcagca

SEQ ID NO: 2955707 - DNA, 25 bp, Homo sapien
tctgaagagtggtctaggtcccctc

SEQ ID NO: 2955708 - DNA, 25 bp, Homo sapien
tttacattttgcaaacactgaaaac

SEQ ID NO: 2955709 - DNA, 25 bp, Homo sapien
taattttacattttgcaaacactga

SEQ ID NO: 2955710 - DNA, 25 bp, Homo sapien
aacattcttttaaagatgtgacata

SEQ ID NO: 2955711 - DNA, 25 bp, Homo sapien
ttcttttaaagatgtgacataattt

SEQ ID NO: 2955712 - DNA, 25 bp, Homo sapien
tgtaggctccagtcctaaagctgcc

SEQ ID NO: 2955713 - DNA, 25 bp, Homo sapien
cagtctgtcccagcgctccctcttc

SEQ ID NO: 2955714 - DNA, 25 bp, Homo sapien
tttcacctccaatgcctctgtaggc

SEQ ID NO: 2955715 - DNA, 25 bp, Homo sapien
tgggctgcagtctgtcccagcgctc

SEQ ID NO: 2955716 - DNA, 25 bp, Homo sapien
gggtcgatgctgccgatgtgtttgg

SEQ ID NO: 2955717 - DNA, 25 bp, Homo sapien
tcgatgctgccgatgtgtttgggat

SEQ ID NO: 2955718 - DNA, 25 bp, Homo sapien
ccacctcagagacgttgcagttggg

SEQ ID NO: 2955719 - DNA, 25 bp, Homo sapien
gaccacctcagagacgttgcagttg

SEQ ID NO: 2955720 - DNA, 25 bp, Homo sapien
tgtcacacaggagcttagccatgtc

SEQ ID NO: 2955721 - DNA, 25 bp, Homo sapien
caggagcttagccatgtcgtaggca

SEQ ID NO: 2955722 - DNA, 25 bp, Homo sapien
tgaggccatgtaatacttgtcacac

SEQ ID NO: 2955723 - DNA, 25 bp, Homo sapien
gtcaggtgaggccatgtaatacttg

SEQ ID NO: 2955724 - DNA, 25 bp, Homo sapien
aagttctgagtacatggctgcccag

SEQ ID NO: 2955725 - DNA, 25 bp, Homo sapien
ccaagggtcaggaaaccgtcaggag

SEQ ID NO: 2955726 - DNA, 25 bp, Homo sapien
tggctgcccagcgagagactaaatc

SEQ ID NO: 2955727 - DNA, 25 bp, Homo sapien
ggaggtcactgctcaaccaccttac

SEQ ID NO: 2955728 - DNA, 25 bp, Homo sapien
catgtgaatcggctgtttggagttg

SEQ ID NO: 2955729 - DNA, 25 bp, Homo sapien
agctcaaagagcatgtggtagaggt

SEQ ID NO: 2955730 - DNA, 25 bp, Homo sapien
tagaccatgtgaatcggctgtttgg

SEQ ID NO: 2955731 - DNA, 25 bp, Homo sapien
gggacgtagaccatgtgaatcggct

SEQ ID NO: 2955732 - DNA, 25 bp, Homo sapien
aggtaagagatgcatgggagaagcc

SEQ ID NO: 2955733 - DNA, 25 bp, Homo sapien
tccccgcaaagcaccggctcccagc

SEQ ID NO: 2955734 - DNA, 25 bp, Homo sapien
cagaggtaagagatgcatgggagaa

SEQ ID NO: 2955735 - DNA, 25 bp, Homo sapien
cagccctactcacgctccccgcaaa

SEQ ID NO: 2955736 - DNA, 25 bp, Homo sapien
gatggacagatcttcctcacccaag

SEQ ID NO: 2955737 - DNA, 25 bp, Homo sapien
caccatgaccttgatgggtgggaga

SEQ ID NO: 2955738 - DNA, 25 bp, Homo sapien
tttccacagtcgccctcatggcatt

SEQ ID NO: 2955739 - DNA, 25 bp, Homo sapien
gggagaatgaggctggactcatggc

SEQ ID NO: 2955740 - DNA, 25 bp, Homo sapien
aagagtcgctcaatcttcctcaagg

SEQ ID NO: 2955741 - DNA, 25 bp, Homo sapien
tgaagagtcgctcaatcttcctcaa

SEQ ID NO: 2955742 - DNA, 25 bp, Homo sapien
gctcaatcttcctcaagggaacacc

SEQ ID NO: 2955743 - DNA, 25 bp, Homo sapien
agtcgctcaatcttcctcaagggaa

SEQ ID NO: 2955744 - DNA, 25 bp, Homo sapien
ttgagatagatgacagcatcggtcc

SEQ ID NO: 2955745 - DNA, 25 bp, Homo sapien
gaagtacttggcgtagaggcgggaa

SEQ ID NO: 2955746 - DNA, 25 bp, Homo sapien
tgacagcatcggtcccaaagccttc

SEQ ID NO: 2955747 - DNA, 25 bp, Homo sapien
tacttggcgtagaggcgggaaatgg

SEQ ID NO: 2955748 - DNA, 25 bp, Homo sapien
aagtcacggactccgggcctcagtc

SEQ ID NO: 2955749 - DNA, 25 bp, Homo sapien
tcctgtgtcccgctcctgcccattc

SEQ ID NO: 2955750 - DNA, 25 bp, Homo sapien
tcctgcccattcaagcaagcagctc

SEQ ID NO: 2955751 - DNA, 25 bp, Homo sapien
ccctgagcaagtcacggactccggg

SEQ ID NO: 2955752 - DNA, 25 bp, Homo sapien
ctgacgcggtacgtggacgtgttct

SEQ ID NO: 2955753 - DNA, 25 bp, Homo sapien
agtcgccggcctcctggatggtctg

SEQ ID NO: 2955754 - DNA, 25 bp, Homo sapien
gttgtagacaggcaggcgctccacc

SEQ ID NO: 2955755 - DNA, 25 bp, Homo sapien
gcgccaggctgacttgttgtagaca

SEQ ID NO: 2955756 - DNA, 25 bp, Homo sapien
cacagaaggtcctagggagaaagcc

SEQ ID NO: 2955757 - DNA, 25 bp, Homo sapien
tccttatgatgtgccagtgaccaga

SEQ ID NO: 2955758 - DNA, 25 bp, Homo sapien
aaagtgacagccctggtctcagaga

SEQ ID NO: 2955759 - DNA, 25 bp, Homo sapien
gagatggactggcacttagggacca

SEQ ID NO: 2955760 - DNA, 25 bp, Homo sapien
gctttactctcacaaaggctcggtg

SEQ ID NO: 2955761 - DNA, 25 bp, Homo sapien
gaatctcggtggtctgcctgtagga

SEQ ID NO: 2955762 - DNA, 25 bp, Homo sapien
ggaggcgcatagcagagacacctga

SEQ ID NO: 2955763 - DNA, 25 bp, Homo sapien
tataggtgccaagctctacaacccc

SEQ ID NO: 2955764 - DNA, 25 bp, Homo sapien
gcgatgcctggaagcctactgacat

SEQ ID NO: 2955765 - DNA, 25 bp, Homo sapien
cggttttgtacggaccatgccctct

SEQ ID NO: 2955766 - DNA, 25 bp, Homo sapien
tacagcgaccctggtcttaggcaag

SEQ ID NO: 2955767 - DNA, 25 bp, Homo sapien
gggagggccgcatctctgtatataa

SEQ ID NO: 2955768 - DNA, 25 bp, Homo sapien
agggagatcgagttcctgaaaaagg

SEQ ID NO: 2955769 - DNA, 25 bp, Homo sapien
cctgtgcccagggagatcgagttcc

SEQ ID NO: 2955770 - DNA, 25 bp, Homo sapien
aaaaaggagactgcacagcgtcggg

SEQ ID NO: 2955771 - DNA, 25 bp, Homo sapien
aaggagactgcacagcgtcgggttc

SEQ ID NO: 2955772 - DNA, 25 bp, Homo sapien
caccatgatgggcaaagccatagtt

SEQ ID NO: 2955773 - DNA, 25 bp, Homo sapien
gatgtccagtattgttctcatcacc

SEQ ID NO: 2955774 - DNA, 25 bp, Homo sapien
gactgtgtcatcatcacacgctggc

SEQ ID NO: 2955775 - DNA, 25 bp, Homo sapien
ttgatcgttgttcttgtgcatctgc

SEQ ID NO: 2955776 - DNA, 25 bp, Homo sapien
gataccgaagcatgctaagttctgc

SEQ ID NO: 2955777 - DNA, 25 bp, Homo sapien
tataggcccattgataagtacagac

SEQ ID NO: 2955778 - DNA, 25 bp, Homo sapien
tcacattacactcgaggctatcagc

SEQ ID NO: 2955779 - DNA, 25 bp, Homo sapien
gagacaatggacctgtgcttcacat

SEQ ID NO: 2955780 - DNA, 25 bp, Homo sapien
cagcctctgctgagtacgagctgga

SEQ ID NO: 2955781 - DNA, 25 bp, Homo sapien
tccaacgaggattacgatcgtcgca

SEQ ID NO: 2955782 - DNA, 25 bp, Homo sapien
tcgtcgcaacgaggatgtggatccc

SEQ ID NO: 2955783 - DNA, 25 bp, Homo sapien
tctgctgagtacgagctggagaagc

SEQ ID NO: 2955784 - DNA, 25 bp, Homo sapien
ggttcgctgtgggcagtgtcagagg

SEQ ID NO: 2955785 - DNA, 25 bp, Homo sapien
tcggagccccatggcgcctgggttc

SEQ ID NO: 2955786 - DNA, 25 bp, Homo sapien
cctcggagccccatggcgcctgggt

SEQ ID NO: 2955787 - DNA, 25 bp, Homo sapien
gaggggtacaggagatgccaaggca

SEQ ID NO: 2955788 - DNA, 25 bp, Homo sapien
gtcgtggtgcgcttcaacggcagca

SEQ ID NO: 2955789 - DNA, 25 bp, Homo sapien
tcagcaagcggtcccgggtgttcca

SEQ ID NO: 2955790 - DNA, 25 bp, Homo sapien
caggtcaactcgaagctggtcagca

SEQ ID NO: 2955791 - DNA, 25 bp, Homo sapien
agctcagcgccgtcttcgagaaggc

SEQ ID NO: 2955792 - DNA, 25 bp, Homo sapien
tcggacgatgtgagccggcgacacc

SEQ ID NO: 2955793 - DNA, 25 bp, Homo sapien
accgtctcggacgatgtgagccggc

SEQ ID NO: 2955794 - DNA, 25 bp, Homo sapien
gacaccgtctcggacgatgtgagcc

SEQ ID NO: 2955795 - DNA, 25 bp, Homo sapien
ccgctgacaccgtctcggacgatgt

SEQ ID NO: 2955796 - DNA, 25 bp, Homo sapien
ccgccgctcgggcaaagccagagaa

SEQ ID NO: 2955797 - DNA, 25 bp, Homo sapien
tgcgagaagggcagccgctcggtct

SEQ ID NO: 2955798 - DNA, 25 bp, Homo sapien
agccagagaaagaccgaggctcggg

SEQ ID NO: 2955799 - DNA, 25 bp, Homo sapien
aatccgatccctttaggacccagag

SEQ ID NO: 2955800 - DNA, 25 bp, Homo sapien
tctcctagctgtgagaggaccctaa

SEQ ID NO: 2955801 - DNA, 25 bp, Homo sapien
cagctacgggctgtctgccttgcaa

SEQ ID NO: 2955802 - DNA, 25 bp, Homo sapien
ctgggtacagcagagggaaccagca

SEQ ID NO: 2955803 - DNA, 25 bp, Homo sapien
cccacaggcaggagtgaaaaaccct

SEQ ID NO: 2955804 - DNA, 25 bp, Homo sapien
ctgtatcaagcctccgacttccaag

SEQ ID NO: 2955805 - DNA, 25 bp, Homo sapien
tgtatcaagcctccgacttccaagg

SEQ ID NO: 2955806 - DNA, 25 bp, Homo sapien
tctgtatcaagcctccgacttccaa

SEQ ID NO: 2955807 - DNA, 25 bp, Homo sapien
catctgtatcaagcctccgacttcc

SEQ ID NO: 2955808 - DNA, 25 bp, Homo sapien
caaagactgcgacctggccagtccg

SEQ ID NO: 2955809 - DNA, 25 bp, Homo sapien
ccggtcttgcgcctgcgcgatgttg

SEQ ID NO: 2955810 - DNA, 25 bp, Homo sapien
gcctccagcgcaacaacaaagactg

SEQ ID NO: 2955811 - DNA, 25 bp, Homo sapien
tccgccacgagagggcgcgttcgct

SEQ ID NO: 2955812 - DNA, 25 bp, Homo sapien
gctgcccggcctggcccgcccggtg

SEQ ID NO: 2955813 - DNA, 25 bp, Homo sapien
aggagaggagtccagaagagtgtct

SEQ ID NO: 2955814 - DNA, 25 bp, Homo sapien
agaggagtccagaagagtgtctcag

SEQ ID NO: 2955815 - DNA, 25 bp, Homo sapien
ccacgaggagaggagtccagaagag

SEQ ID NO: 2955816 - DNA, 25 bp, Homo sapien
cacgaggagaggagtccagaagagt

SEQ ID NO: 2955817 - DNA, 25 bp, Homo sapien
ccagccctcagagctcccagcccct

SEQ ID NO: 2955818 - DNA, 25 bp, Homo sapien
ccctcagagctcccagccccttcat

SEQ ID NO: 2955819 - DNA, 25 bp, Homo sapien
agccctcagagctcccagccccttc

SEQ ID NO: 2955820 - DNA, 25 bp, Homo sapien
ctccagccctcagagctcccagccc

SEQ ID NO: 2955821 - DNA, 25 bp, Homo sapien
cccacaagtcccaaacacacaggcc

SEQ ID NO: 2955822 - DNA, 25 bp, Homo sapien
ggaccccacaagtcccaaacacaca

SEQ ID NO: 2955823 - DNA, 25 bp, Homo sapien
aagtcccaaacacacaggccagcct

SEQ ID NO: 2955824 - DNA, 25 bp, Homo sapien
caagtcccaaacacacaggccagcc

SEQ ID NO: 2955825 - DNA, 25 bp, Homo sapien
tcaggaaggctcagaaacgtctcat

SEQ ID NO: 2955826 - DNA, 25 bp, Homo sapien
cccacaagtgggtgtagcgtggtct

SEQ ID NO: 2955827 - DNA, 25 bp, Homo sapien
cacaaagacacggcccacaagtggg

SEQ ID NO: 2955828 - DNA, 25 bp, Homo sapien
ctcatggtccaaggtgtgcacaaag

SEQ ID NO: 2955829 - DNA, 25 bp, Homo sapien
ggagaggggattcgagtcacagcag

SEQ ID NO: 2955830 - DNA, 25 bp, Homo sapien
cctgggtgcctgtcaggccgctcac

SEQ ID NO: 2955831 - DNA, 25 bp, Homo sapien
gagccctgcggggtacaccccagcc

SEQ ID NO: 2955832 - DNA, 25 bp, Homo sapien
gaagcgaggagaggggattcgagtc

SEQ ID NO: 2955833 - DNA, 25 bp, Homo sapien
tgcgctgggtgtagcggagccaccg

SEQ ID NO: 2955834 - DNA, 25 bp, Homo sapien
cagagccgtagaggaagccagggtg

SEQ ID NO: 2955835 - DNA, 25 bp, Homo sapien
ggtggcagagccgtagaggaagcca

SEQ ID NO: 2955836 - DNA, 25 bp, Homo sapien
gctgcgctgggtgtagcggagccac

SEQ ID NO: 2955837 - DNA, 25 bp, Homo sapien
gtatcaaagctgtcccgattgtagg

SEQ ID NO: 2955838 - DNA, 25 bp, Homo sapien
tctgccgagtggtatcaaagctgtc

SEQ ID NO: 2955839 - DNA, 25 bp, Homo sapien
ctctgccgagtggtatcaaagctgt

SEQ ID NO: 2955840 - DNA, 25 bp, Homo sapien
agctgtcccgattgtaggctgtgac

SEQ ID NO: 2955841 - DNA, 25 bp, Homo sapien
caaggcagaggtgacgttgagcagc

SEQ ID NO: 2955842 - DNA, 25 bp, Homo sapien
gagcagctgaagctctccgggctcc

SEQ ID NO: 2955843 - DNA, 25 bp, Homo sapien
agagtccccccaaggctgagaggaa

SEQ ID NO: 2955844 - DNA, 25 bp, Homo sapien
gaactcggcttggtatggcagcagg

SEQ ID NO: 2955845 - DNA, 25 bp, Homo sapien
tggctatcgggggatgccaccatct

SEQ ID NO: 2955846 - DNA, 25 bp, Homo sapien
ggtgaggcagaacccaccttaatgt

SEQ ID NO: 2955847 - DNA, 25 bp, Homo sapien
gtgtcgtagcaagacagaagtggag

SEQ ID NO: 2955848 - DNA, 25 bp, Homo sapien
ttgcaccagtcaacgcggaagtggg

SEQ ID NO: 2955849 - DNA, 25 bp, Homo sapien
gacacagaggtccccaggaacatgg

SEQ ID NO: 2955850 - DNA, 25 bp, Homo sapien
cagaggtccccaggaacatggcagg

SEQ ID NO: 2955851 - DNA, 25 bp, Homo sapien
acagaggtccccaggaacatggcag

SEQ ID NO: 2955852 - DNA, 25 bp, Homo sapien
ctggacacagaggtccccaggaaca

SEQ ID NO: 2955853 - DNA, 25 bp, Homo sapien
cacagagagctcagggctgacgcag

SEQ ID NO: 2955854 - DNA, 25 bp, Homo sapien
agagctcagggctgacgcaggaagt

SEQ ID NO: 2955855 - DNA, 25 bp, Homo sapien
gagagctcagggctgacgcaggaag

SEQ ID NO: 2955856 - DNA, 25 bp, Homo sapien
gctcagggctgacgcaggaagtggc

SEQ ID NO: 2955857 - DNA, 25 bp, Homo sapien
aagaacgggtcatgctccaggatcc

SEQ ID NO: 2955858 - DNA, 25 bp, Homo sapien
gccggcagcacatgacataggccag

SEQ ID NO: 2955859 - DNA, 25 bp, Homo sapien
gggtgggcacctcatctgcaggctc

SEQ ID NO: 2955860 - DNA, 25 bp, Homo sapien
caagaagtcacggtctggggcctca

SEQ ID NO: 2955861 - DNA, 25 bp, Homo sapien
tcggaggtagccaggtctctcttca

SEQ ID NO: 2955862 - DNA, 25 bp, Homo sapien
cggaggtagccaggtctctcttcag

SEQ ID NO: 2955863 - DNA, 25 bp, Homo sapien
ggaggtagccaggtctctcttcagc

SEQ ID NO: 2955864 - DNA, 25 bp, Homo sapien
tcaagacataggctgtgggtgtaga

SEQ ID NO: 2955865 - DNA, 25 bp, Homo sapien
atggtgcctgctcagtgcccagtgg

SEQ ID NO: 2955866 - DNA, 25 bp, Homo sapien
ctctatggtgcctgctcagtgccca

SEQ ID NO: 2955867 - DNA, 25 bp, Homo sapien
cataggctgtgggtgtagacagcct

SEQ ID NO: 2955868 - DNA, 25 bp, Homo sapien
tcctccccaccacttatgtggggag

SEQ ID NO: 2955869 - DNA, 25 bp, Homo sapien
actgcctctgagccaccctgcggtc

SEQ ID NO: 2955870 - DNA, 25 bp, Homo sapien
tgcctctgagccaccctgcggtcct

SEQ ID NO: 2955871 - DNA, 25 bp, Homo sapien
gagagactcagacacatgatgcagg

SEQ ID NO: 2955872 - DNA, 25 bp, Homo sapien
gtggccggggcacctcgcggctggc

SEQ ID NO: 2955873 - DNA, 25 bp, Homo sapien
cagctcctctgtgttcccgtggatg

SEQ ID NO: 2955874 - DNA, 25 bp, Homo sapien
agggtggagagtggccggggcacct

SEQ ID NO: 2955875 - DNA, 25 bp, Homo sapien
agctcctctgtgttcccgtggatgg

SEQ ID NO: 2955876 - DNA, 25 bp, Homo sapien
ctgggcgctgtccacgcggggaggc

SEQ ID NO: 2955877 - DNA, 25 bp, Homo sapien
ggcgctgtccacgcggggaggcagc

SEQ ID NO: 2955878 - DNA, 25 bp, Homo sapien
cgctgtccacgcggggaggcagccg

SEQ ID NO: 2955879 - DNA, 25 bp, Homo sapien
tgggcgctgtccacgcggggaggca

SEQ ID NO: 2955880 - DNA, 25 bp, Homo sapien
tcagtgctggtccagaatgaggggc

SEQ ID NO: 2955881 - DNA, 25 bp, Homo sapien
gtgccactcgtggtgtggacagaga

SEQ ID NO: 2955882 - DNA, 25 bp, Homo sapien
tctgaatgtccttactccacacact

SEQ ID NO: 2955883 - DNA, 25 bp, Homo sapien
ggtgggatgtgccactcgtggtgtg

SEQ ID NO: 2955884 - DNA, 25 bp, Homo sapien
atttattctgaatgtccttactcca

SEQ ID NO: 2955885 - DNA, 25 bp, Homo sapien
cagctgggccaagtctcccggtgga

SEQ ID NO: 2955886 - DNA, 25 bp, Homo sapien
gcagctgggccaagtctcccggtgg

SEQ ID NO: 2955887 - DNA, 25 bp, Homo sapien
tgggccaagtctcccggtggaggtg

SEQ ID NO: 2955888 - DNA, 25 bp, Homo sapien
caagtctcccggtggaggtggcggt

SEQ ID NO: 2955889 - DNA, 25 bp, Homo sapien
tgggtaacaggggcaatgccatcat

SEQ ID NO: 2955890 - DNA, 25 bp, Homo sapien
gtaacaggggcaatgccatcatggg

SEQ ID NO: 2955891 - DNA, 25 bp, Homo sapien
ggtaacaggggcaatgccatcatgg

SEQ ID NO: 2955892 - DNA, 25 bp, Homo sapien
taacaggggcaatgccatcatggga

SEQ ID NO: 2955893 - DNA, 25 bp, Homo sapien
tgagggaatgtctgagcgtcaggcc

SEQ ID NO: 2955894 - DNA, 25 bp, Homo sapien
aatgtctgagcgtcaggccacgtgt

SEQ ID NO: 2955895 - DNA, 25 bp, Homo sapien
agggaatgtctgagcgtcaggccac

SEQ ID NO: 2955896 - DNA, 25 bp, Homo sapien
caggtctggctgatagagaggtggt

SEQ ID NO: 2955897 - DNA, 25 bp, Homo sapien
cgtgcaagttctggatgaattcact

SEQ ID NO: 2955898 - DNA, 25 bp, Homo sapien
tgtggggcaaactctgcccgcaggc

SEQ ID NO: 2955899 - DNA, 25 bp, Homo sapien
ggccagggcttcgctgctgagttca

SEQ ID NO: 2955900 - DNA, 25 bp, Homo sapien
gggcttcgctgctgagttcacggag

SEQ ID NO: 2955901 - DNA, 25 bp, Homo sapien
cattttagagagggaggccacatac

SEQ ID NO: 2955902 - DNA, 25 bp, Homo sapien
taaaacattttagagagggaggcca

SEQ ID NO: 2955903 - DNA, 25 bp, Homo sapien
aacattttagagagggaggccacat

SEQ ID NO: 2955904 - DNA, 25 bp, Homo sapien
aaacattttagagagggaggccaca

SEQ ID NO: 2955905 - DNA, 25 bp, Homo sapien
accaggctcctgatttttggctgat

SEQ ID NO: 2955906 - DNA, 25 bp, Homo sapien
ggctgatttttcagtcaagcccaga

SEQ ID NO: 2955907 - DNA, 25 bp, Homo sapien
ttcagtcaagcccagatggaaaatt

SEQ ID NO: 2955908 - DNA, 25 bp, Homo sapien
ttctctgtgagaaggaccaggctcc

SEQ ID NO: 2955909 - DNA, 25 bp, Homo sapien
aaggtgctatttaacatgggaggag

SEQ ID NO: 2955910 - DNA, 25 bp, Homo sapien
ggaagcaaaagactctgtacctatt

SEQ ID NO: 2955911 - DNA, 25 bp, Homo sapien
ctctgtccccgggtttcagagacaa

SEQ ID NO: 2955912 - DNA, 25 bp, Homo sapien
tcctagtctgtcctgcgtcctctgt

SEQ ID NO: 2955913 - DNA, 25 bp, Homo sapien
caaagaagccttgccatctggcgct

SEQ ID NO: 2955914 - DNA, 25 bp, Homo sapien
tccacttgcttgaagacccatgcgg

SEQ ID NO: 2955915 - DNA, 25 bp, Homo sapien
gaattcggcttcgacgttggccctg

SEQ ID NO: 2955916 - DNA, 25 bp, Homo sapien
gaacgcgtgtcaatcccttgtgccg

SEQ ID NO: 2955917 - DNA, 25 bp, Homo sapien
aacagccgcttcacctacagcgtca

SEQ ID NO: 2955918 - DNA, 25 bp, Homo sapien
cgcgccgagggcaacagccgcttca

SEQ ID NO: 2955919 - DNA, 25 bp, Homo sapien
tcacctacagcgtcactgtcgatgg

SEQ ID NO: 2955920 - DNA, 25 bp, Homo sapien
cagcgtcactgtcgatggctgcacg

SEQ ID NO: 2955921 - DNA, 25 bp, Homo sapien
cagtaagcactctctatacagattc

SEQ ID NO: 2955922 - DNA, 25 bp, Homo sapien
cagattcatactccttctacaaaca

SEQ ID NO: 2955923 - DNA, 25 bp, Homo sapien
gcctggcgagcctggagcttcagta

SEQ ID NO: 2955924 - DNA, 25 bp, Homo sapien
ctctcctatagaagaactcccaggc

SEQ ID NO: 2955925 - DNA, 25 bp, Homo sapien
tccaagtgtgcctcttagacccggg

SEQ ID NO: 2955926 - DNA, 25 bp, Homo sapien
gaactggaaagagttacagcctccc

SEQ ID NO: 2955927 - DNA, 25 bp, Homo sapien
tcaggtaccatgaccgagacgtgtg

SEQ ID NO: 2955928 - DNA, 25 bp, Homo sapien
gaagccaccgcggactaaagctttg

SEQ ID NO: 2955929 - DNA, 25 bp, Homo sapien
taaggagaccgtctgtctgatggga

SEQ ID NO: 2955930 - DNA, 25 bp, Homo sapien
ctttaaggagaccgtctgtctgatg

SEQ ID NO: 2955931 - DNA, 25 bp, Homo sapien
tttaaggagaccgtctgtctgatgg

SEQ ID NO: 2955932 - DNA, 25 bp, Homo sapien
ttaaggagaccgtctgtctgatggg

SEQ ID NO: 2955933 - DNA, 25 bp, Homo sapien
cagagcccaagctggagaccaggag

SEQ ID NO: 2955934 - DNA, 25 bp, Homo sapien
cttcacccttgctaaatacttcctc

SEQ ID NO: 2955935 - DNA, 25 bp, Homo sapien
cctcttctttccagcagagcccaag

SEQ ID NO: 2955936 - DNA, 25 bp, Homo sapien
tcacccttgctaaatacttcctctt

SEQ ID NO: 2955937 - DNA, 25 bp, Homo sapien
caggaagtctttcaggaggatatca

SEQ ID NO: 2955938 - DNA, 25 bp, Homo sapien
tctggttgcctcagggaagtaagaa

SEQ ID NO: 2955939 - DNA, 25 bp, Homo sapien
tgagctccaaatacatccagagatg

SEQ ID NO: 2955940 - DNA, 25 bp, Homo sapien
gatgagaagaaagacggtgacctga

SEQ ID NO: 2955941 - DNA, 25 bp, Homo sapien
tcagccctgaagtcatcaggtaggc

SEQ ID NO: 2955942 - DNA, 25 bp, Homo sapien
aggccagagcgaggttggcacccat

SEQ ID NO: 2955943 - DNA, 25 bp, Homo sapien
catcaggtaggccagagcgaggttg

SEQ ID NO: 2955944 - DNA, 25 bp, Homo sapien
agccctgaagtcatcaggtaggcca

SEQ ID NO: 2955945 - DNA, 25 bp, Homo sapien
aatcattgctctcagtctttactcc

SEQ ID NO: 2955946 - DNA, 25 bp, Homo sapien
tataatcattgctctcagtctttac

SEQ ID NO: 2955947 - DNA, 25 bp, Homo sapien
tccttcctcgggcttttcatgggcc

SEQ ID NO: 2955948 - DNA, 25 bp, Homo sapien
ctcgggcttttcatgggccatggcg

SEQ ID NO: 2955949 - DNA, 25 bp, Homo sapien
tcattcacaataggcttttattagt

SEQ ID NO: 2955950 - DNA, 25 bp, Homo sapien
cttttattagtttactgagtggtgt

SEQ ID NO: 2955951 - DNA, 25 bp, Homo sapien
ttattagtttactgagtggtgtatg

SEQ ID NO: 2955952 - DNA, 25 bp, Homo sapien
tattagtttactgagtggtgtatgc

SEQ ID NO: 2955953 - DNA, 25 bp, Homo sapien
ctgtctctgtttcattgagtggttg

SEQ ID NO: 2955954 - DNA, 25 bp, Homo sapien
aattggtagtggagcctgatgatgt

SEQ ID NO: 2955955 - DNA, 25 bp, Homo sapien
agcaaggaactagaattggtagtgg

SEQ ID NO: 2955956 - DNA, 25 bp, Homo sapien
ctttgagggattcaacagttcagtg

SEQ ID NO: 2955957 - DNA, 25 bp, Homo sapien
tgagggattcaacagttcagtggag

SEQ ID NO: 2955958 - DNA, 25 bp, Homo sapien
tgttttcctgcctgcgaacacagca

SEQ ID NO: 2955959 - DNA, 25 bp, Homo sapien
gttttcctgcctgcgaacacagcat

SEQ ID NO: 2955960 - DNA, 25 bp, Homo sapien
tcctgcctgcgaacacagcatccat

SEQ ID NO: 2955961 - DNA, 25 bp, Homo sapien
tttcctgcctgcgaacacagcatcc

SEQ ID NO: 2955962 - DNA, 25 bp, Homo sapien
atgaaggctgagagaaacgaggaag

SEQ ID NO: 2955963 - DNA, 25 bp, Homo sapien
agggcaaggcctcttcaattctatg

SEQ ID NO: 2955964 - DNA, 25 bp, Homo sapien
cctaatccagggcaaggcctcttca

SEQ ID NO: 2955965 - DNA, 25 bp, Homo sapien
taatccagggcaaggcctcttcaat

SEQ ID NO: 2955966 - DNA, 25 bp, Homo sapien
cagtaccagggggagcgcttcgatt

SEQ ID NO: 2955967 - DNA, 25 bp, Homo sapien
cctcagcagtaccagggggagcgct

SEQ ID NO: 2955968 - DNA, 25 bp, Homo sapien
agaaacaaatccagctcgactgcct

SEQ ID NO: 2955969 - DNA, 25 bp, Homo sapien
cagggggagcgcttcgatttttcca

SEQ ID NO: 2955970 - DNA, 25 bp, Homo sapien
tctccatcggagagccgaggcagcg

SEQ ID NO: 2955971 - DNA, 25 bp, Homo sapien
cgaggcagcggattccagagggaaa

SEQ ID NO: 2955972 - DNA, 25 bp, Homo sapien
tctttccaccgggatggagagggct

SEQ ID NO: 2955973 - DNA, 25 bp, Homo sapien
tccagatggtctctccatcggagag

SEQ ID NO: 2955974 - DNA, 25 bp, Homo sapien
ctcttcatccggaagttccaccaga

SEQ ID NO: 2955975 - DNA, 25 bp, Homo sapien
ctgatggaacatgcatttggggaga

SEQ ID NO: 2955976 - DNA, 25 bp, Homo sapien
cctcttcatccggaagttccaccag

SEQ ID NO: 2955977 - DNA, 25 bp, Homo sapien
ttgctgatggaacatgcatttgggg

SEQ ID NO: 2955978 - DNA, 25 bp, Homo sapien
ggtggtcgtgtgtgctcctctttgc

SEQ ID NO: 2955979 - DNA, 25 bp, Homo sapien
gaagtgtgagctgctcagtaggcag

SEQ ID NO: 2955980 - DNA, 25 bp, Homo sapien
tggctccattggaggaagtgtgagc

SEQ ID NO: 2955981 - DNA, 25 bp, Homo sapien
ctctggtgaaaggtgtatgtggtgg

SEQ ID NO: 2955982 - DNA, 25 bp, Homo sapien
tcagggtgcttctagcctgatggag

SEQ ID NO: 2955983 - DNA, 25 bp, Homo sapien
ggaagccctcccacatttggcctgg

SEQ ID NO: 2955984 - DNA, 25 bp, Homo sapien
agtggccagtcatgatggcatcccc

SEQ ID NO: 2955985 - DNA, 25 bp, Homo sapien
tacctttgtctgatggagcaggcac

SEQ ID NO: 2955986 - DNA, 25 bp, Homo sapien
tggccctccagacactgtgatgctg

SEQ ID NO: 2955987 - DNA, 25 bp, Homo sapien
tctgtggccggctctttctcggtcc

SEQ ID NO: 2955988 - DNA, 25 bp, Homo sapien
ttctcggtccacctccttgccgccc

SEQ ID NO: 2955989 - DNA, 25 bp, Homo sapien
cattccctggacatctctgtggccg

SEQ ID NO: 2955990 - DNA, 25 bp, Homo sapien
cagtgcctgctgctaggtaaccgag

SEQ ID NO: 2955991 - DNA, 25 bp, Homo sapien
tgttactgctactggggagagacct

SEQ ID NO: 2955992 - DNA, 25 bp, Homo sapien
tgtgggcaatcctggtccccaaggc

SEQ ID NO: 2955993 - DNA, 25 bp, Homo sapien
tgctaggtaaccgaggtcctgctcc

SEQ ID NO: 2955994 - DNA, 25 bp, Homo sapien
gtggaggagatcacttctagagtca

SEQ ID NO: 2955995 - DNA, 25 bp, Homo sapien
ggaggagatcacttctagagtcagc

SEQ ID NO: 2955996 - DNA, 25 bp, Homo sapien
gaggagatcacttctagagtcagct

SEQ ID NO: 2955997 - DNA, 25 bp, Homo sapien
ggagatcacttctagagtcagctcc

SEQ ID NO: 2955998 - DNA, 25 bp, Homo sapien
gaagatggctccgtagggattgagc

SEQ ID NO: 2955999 - DNA, 25 bp, Homo sapien
tggctccgtagggattgagcgactc

SEQ ID NO: 2956000 - DNA, 25 bp, Homo sapien
gatggctccgtagggattgagcgac

SEQ ID NO: 2956001 - DNA, 25 bp, Homo sapien
aagatggctccgtagggattgagcg

SEQ ID NO: 2956002 - DNA, 25 bp, Homo sapien
gcttgggggccactgagctttcctg

SEQ ID NO: 2956003 - DNA, 25 bp, Homo sapien
cttgggggccactgagctttcctgt

SEQ ID NO: 2956004 - DNA, 25 bp, Homo sapien
tggcttgggggccactgagctttcc

SEQ ID NO: 2956005 - DNA, 25 bp, Homo sapien
cctggcttgggggccactgagcttt

SEQ ID NO: 2956006 - DNA, 25 bp, Homo sapien
cgcgaggccggggacccaagcttgg

SEQ ID NO: 2956007 - DNA, 25 bp, Homo sapien
agcaggctgaacagcaaggtgggcg

SEQ ID NO: 2956008 - DNA, 25 bp, Homo sapien
ctgaacagcaaggtgggcgcgaggc

SEQ ID NO: 2956009 - DNA, 25 bp, Homo sapien
ggccagccagcaggctgaacagcaa

SEQ ID NO: 2956010 - DNA, 25 bp, Homo sapien
ggatgagaccacatttggctgcaat

SEQ ID NO: 2956011 - DNA, 25 bp, Homo sapien
aggatgagaccacatttggctgcaa

SEQ ID NO: 2956012 - DNA, 25 bp, Homo sapien
agctgtcaccacagcatttgaatcc

SEQ ID NO: 2956013 - DNA, 25 bp, Homo sapien
ggccagggaagagctcgttctcctg

SEQ ID NO: 2956014 - DNA, 25 bp, Homo sapien
gggccagggaagagctcgttctcct

SEQ ID NO: 2956015 - DNA, 25 bp, Homo sapien
gtcaccacagcatttgaatcctttg

SEQ ID NO: 2956016 - DNA, 25 bp, Homo sapien
tgcaaaagacggacaggatgaccag

SEQ ID NO: 2956017 - DNA, 25 bp, Homo sapien
aagggatactctgaccctctctggg

SEQ ID NO: 2956018 - DNA, 25 bp, Homo sapien
ggccacagatgcaaaagacggacag

SEQ ID NO: 2956019 - DNA, 25 bp, Homo sapien
ccggctctctgcagttgcgacagaa

SEQ ID NO: 2956020 - DNA, 25 bp, Homo sapien
tcagaaggccgggttgtcaatgccc

SEQ ID NO: 2956021 - DNA, 25 bp, Homo sapien
agaaggccgggttgtcaatgcccct

SEQ ID NO: 2956022 - DNA, 25 bp, Homo sapien
gaaggccgggttgtcaatgcccctc

SEQ ID NO: 2956023 - DNA, 25 bp, Homo sapien
cagaaggccgggttgtcaatgcccc

SEQ ID NO: 2956024 - DNA, 25 bp, Homo sapien
tcaacatcctcctgctatcacggtg

SEQ ID NO: 2956025 - DNA, 25 bp, Homo sapien
agtctctagcttgatccaggaggca

SEQ ID NO: 2956026 - DNA, 25 bp, Homo sapien
cagatggccctctagaaaggtgaca

SEQ ID NO: 2956027 - DNA, 25 bp, Homo sapien
taaaaggctgcatagggagctctgg

SEQ ID NO: 2956028 - DNA, 25 bp, Homo sapien
gaaagatctccctaagtgcagtgtg

SEQ ID NO: 2956029 - DNA, 25 bp, Homo sapien
tcattaggcatccaagaggaggcgt

SEQ ID NO: 2956030 - DNA, 25 bp, Homo sapien
tgttttagcctacacagctgggcga

SEQ ID NO: 2956031 - DNA, 25 bp, Homo sapien
taaatatgtgaatctgagtcccagg

SEQ ID NO: 2956032 - DNA, 25 bp, Homo sapien
ggtgagggtgctgtcaatcacagtg

SEQ ID NO: 2956033 - DNA, 25 bp, Homo sapien
tggtgagggtgctgtcaatcacagt

SEQ ID NO: 2956034 - DNA, 25 bp, Homo sapien
gtgagggtgctgtcaatcacagtgc

SEQ ID NO: 2956035 - DNA, 25 bp, Homo sapien
tcctggtgagggtgctgtcaatcac

SEQ ID NO: 2956036 - DNA, 25 bp, Homo sapien
agcacatcagagtcgccggctgcgt

SEQ ID NO: 2956037 - DNA, 25 bp, Homo sapien
tcgccggctgcgttgaagttgctgc

SEQ ID NO: 2956038 - DNA, 25 bp, Homo sapien
ccggctgcgttgaagttgctgccaa

SEQ ID NO: 2956039 - DNA, 25 bp, Homo sapien
gggaagcacatcagagtcgccggct

SEQ ID NO: 2956040 - DNA, 25 bp, Homo sapien
tccttagtagttagaaccttgtctc

SEQ ID NO: 2956041 - DNA, 25 bp, Homo sapien
agcagtccttagtagttagaacctt

SEQ ID NO: 2956042 - DNA, 25 bp, Homo sapien
gcagtccttagtagttagaaccttg

SEQ ID NO: 2956043 - DNA, 25 bp, Homo sapien
cagtccttagtagttagaaccttgt

SEQ ID NO: 2956044 - DNA, 25 bp, Homo sapien
cacatccctgttgatccttgaggag

SEQ ID NO: 2956045 - DNA, 25 bp, Homo sapien
ggattaactttgactggacagctga

SEQ ID NO: 2956046 - DNA, 25 bp, Homo sapien
tgaaaagaaactggcctggattggc

SEQ ID NO: 2956047 - DNA, 25 bp, Homo sapien
ccacagagtggtcttcaaccctgga

SEQ ID NO: 2956048 - DNA, 25 bp, Homo sapien
cctgcagctcccaccttttcctttc

SEQ ID NO: 2956049 - DNA, 25 bp, Homo sapien
tgcagctcccaccttttcctttcat

SEQ ID NO: 2956050 - DNA, 25 bp, Homo sapien
gtgcctgcagctcccaccttttcct

SEQ ID NO: 2956051 - DNA, 25 bp, Homo sapien
cagtgcctgcagctcccaccttttc

SEQ ID NO: 2956052 - DNA, 25 bp, Homo sapien
gagccacaggcgtctgcttaaaaac

SEQ ID NO: 2956053 - DNA, 25 bp, Homo sapien
tgagagccacaggcgtctgcttaaa

SEQ ID NO: 2956054 - DNA, 25 bp, Homo sapien
gccacaggcgtctgcttaaaaacct

SEQ ID NO: 2956055 - DNA, 25 bp, Homo sapien
acaggcgtctgcttaaaaacctgga

SEQ ID NO: 2956056 - DNA, 25 bp, Homo sapien
agtcccacgcgggtaagctctcggt

SEQ ID NO: 2956057 - DNA, 25 bp, Homo sapien
ggcttgagcgcgtgccttctgcgct

SEQ ID NO: 2956058 - DNA, 25 bp, Homo sapien
agggtctgcggcacaacctctcttg

SEQ ID NO: 2956059 - DNA, 25 bp, Homo sapien
cttcagtcccggcagtcgcgggcgt

SEQ ID NO: 2956060 - DNA, 25 bp, Homo sapien
cggccgcgagcgcgcgcacgggcgc

SEQ ID NO: 2956061 - DNA, 25 bp, Homo sapien
ctgcccgggacgcggggcgcgcgcc

SEQ ID NO: 2956062 - DNA, 25 bp, Homo sapien
gcccgggacgcggggcgcgcgccca

SEQ ID NO: 2956063 - DNA, 25 bp, Homo sapien
ccgggacgcggggcgcgcgcccagc

SEQ ID NO: 2956064 - DNA, 25 bp, Homo sapien
cgggacgcggggcgcgcgcccagcc

SEQ ID NO: 2956065 - DNA, 25 bp, Homo sapien
agcttctgcactcgcgcgctcgcca

SEQ ID NO: 2956066 - DNA, 25 bp, Homo sapien
agcttgtagcgccgcaccagcttct

SEQ ID NO: 2956067 - DNA, 25 bp, Homo sapien
atggccagcgccgtggcaatcgcca

SEQ ID NO: 2956068 - DNA, 25 bp, Homo sapien
ggcaatcgccagcttgtagcgccgc

SEQ ID NO: 2956069 - DNA, 25 bp, Homo sapien
tccaggccgctgaagctccacacta

SEQ ID NO: 2956070 - DNA, 25 bp, Homo sapien
ccaggccgctgaagctccacactac

SEQ ID NO: 2956071 - DNA, 25 bp, Homo sapien
cagccccgccaggaccccgcgcgcc

SEQ ID NO: 2956072 - DNA, 25 bp, Homo sapien
cgcagccccgccaggaccccgcgcg

SEQ ID NO: 2956073 - DNA, 25 bp, Homo sapien
cttccccggctggggccgcccgcag

SEQ ID NO: 2956074 - DNA, 25 bp, Homo sapien
cccgcagccccgccaggaccccgcg

SEQ ID NO: 2956075 - DNA, 25 bp, Homo sapien
tccggagacccatccaggttcttca

SEQ ID NO: 2956076 - DNA, 25 bp, Homo sapien
gctgaggaagccacacctcgggaat

SEQ ID NO: 2956077 - DNA, 25 bp, Homo sapien
aatactccagttctctccttcggcg

SEQ ID NO: 2956078 - DNA, 25 bp, Homo sapien
tgttccttcagttcccgggtacaca

SEQ ID NO: 2956079 - DNA, 25 bp, Homo sapien
cagatagagtctctgacccggagcc

SEQ ID NO: 2956080 - DNA, 25 bp, Homo sapien
gacagcagcagatagagtctctgac

SEQ ID NO: 2956081 - DNA, 25 bp, Homo sapien
ttccagactggcgagatgcggtaag

SEQ ID NO: 2956082 - DNA, 25 bp, Homo sapien
caggccttccagactggcgagatgc

SEQ ID NO: 2956083 - DNA, 25 bp, Homo sapien
tctcccaaaaaaaggcaagggcagc

SEQ ID NO: 2956084 - DNA, 25 bp, Homo sapien
aggcaagggcagctcttctgtctcc

SEQ ID NO: 2956085 - DNA, 25 bp, Homo sapien
caaaaaaaggcaagggcagctcttc

SEQ ID NO: 2956086 - DNA, 25 bp, Homo sapien
ggcaagggcagctcttctgtctcca

SEQ ID NO: 2956087 - DNA, 25 bp, Homo sapien
cttcccatgcaccccgttatgctgc

SEQ ID NO: 2956088 - DNA, 25 bp, Homo sapien
tcccatccgagaagagatacctgca

SEQ ID NO: 2956089 - DNA, 25 bp, Homo sapien
caaacgtgaagtcaagagagaccca

SEQ ID NO: 2956090 - DNA, 25 bp, Homo sapien
tgtccaaggagcatcgtcatcacag

SEQ ID NO: 2956091 - DNA, 25 bp, Homo sapien
tttcagccgcacagaatggaacctt

SEQ ID NO: 2956092 - DNA, 25 bp, Homo sapien
ccttcagaatacatgtggaatgcca

SEQ ID NO: 2956093 - DNA, 25 bp, Homo sapien
caccttcagaatacatgtggaatgc

SEQ ID NO: 2956094 - DNA, 25 bp, Homo sapien
tcagtaaatcccatcggggccacct

SEQ ID NO: 2956095 - DNA, 25 bp, Homo sapien
ggccaccttcagaatacatgtggaa

SEQ ID NO: 2956096 - DNA, 25 bp, Homo sapien
ttccctaacttctctgagcatgctc

SEQ ID NO: 2956097 - DNA, 25 bp, Homo sapien
agttccctaacttctctgagcatgc

SEQ ID NO: 2956098 - DNA, 25 bp, Homo sapien
ctaacttctctgagcatgctccccc

SEQ ID NO: 2956099 - DNA, 25 bp, Homo sapien
aacttctctgagcatgctcccccag

SEQ ID NO: 2956100 - DNA, 25 bp, Homo sapien
gtcttcagaagactctaacttccag

SEQ ID NO: 2956101 - DNA, 25 bp, Homo sapien
tatctacgtgtgtcccaagggaagg

SEQ ID NO: 2956102 - DNA, 25 bp, Homo sapien
ccaccgagggtacaagtgtccacct

SEQ ID NO: 2956103 - DNA, 25 bp, Homo sapien
ccagcactcccaccgagggctggaa

SEQ ID NO: 2956104 - DNA, 25 bp, Homo sapien
ggctggctctctgccggctggttac

SEQ ID NO: 2956105 - DNA, 25 bp, Homo sapien
cagacagtgcgtccttgcccacgat

SEQ ID NO: 2956106 - DNA, 25 bp, Homo sapien
cgctccctgtatctccgtgtggtgg

SEQ ID NO: 2956107 - DNA, 25 bp, Homo sapien
acattggcgatctcctgctggcact

SEQ ID NO: 2956108 - DNA, 25 bp, Homo sapien
tggatgtaaaagaagtgctgctcgt

SEQ ID NO: 2956109 - DNA, 25 bp, Homo sapien
gccttgaggagacgcttcagctggc

SEQ ID NO: 2956110 - DNA, 25 bp, Homo sapien
gaagtgctgctcgtgataaacggcc

SEQ ID NO: 2956111 - DNA, 25 bp, Homo sapien
aaccaccagcatgtaggcgattcgc

SEQ ID NO: 2956112 - DNA, 25 bp, Homo sapien
tccgcaggtacatcctcaggaggct

SEQ ID NO: 2956113 - DNA, 25 bp, Homo sapien
gggcgtcacccgcacgttatcatag

SEQ ID NO: 2956114 - DNA, 25 bp, Homo sapien
cctcccggtgcaggtagtcggaacg

SEQ ID NO: 2956115 - DNA, 25 bp, Homo sapien
cagatggtaaccatgcgccagggcg

SEQ ID NO: 2956116 - DNA, 25 bp, Homo sapien
agttgtcccggccatgtgacttgag

SEQ ID NO: 2956117 - DNA, 25 bp, Homo sapien
tcccggttcttggataggaatgcca

SEQ ID NO: 2956118 - DNA, 25 bp, Homo sapien
catgtgacttgaggaaattcttgtc

SEQ ID NO: 2956119 - DNA, 25 bp, Homo sapien
tcttgtcccggttcttggataggaa

SEQ ID NO: 2956120 - DNA, 25 bp, Homo sapien
gcagcagagaggccatggctgggga

SEQ ID NO: 2956121 - DNA, 25 bp, Homo sapien
gggcagcagagaggccatggctggg

SEQ ID NO: 2956122 - DNA, 25 bp, Homo sapien
tgggcagcagagaggccatggctgg

SEQ ID NO: 2956123 - DNA, 25 bp, Homo sapien
agcagagaggccatggctggggatc

SEQ ID NO: 2956124 - DNA, 25 bp, Homo sapien
gtgtcagcacgaaccagtcagaacc

SEQ ID NO: 2956125 - DNA, 25 bp, Homo sapien
tgagtcgcactcatggaagagccgg

SEQ ID NO: 2956126 - DNA, 25 bp, Homo sapien
tgtatgtgtagaactggcgcagctg

SEQ ID NO: 2956127 - DNA, 25 bp, Homo sapien
gctgggccacaagcgggtcatctgt

SEQ ID NO: 2956128 - DNA, 25 bp, Homo sapien
tccctggccttcatgcctgctgggc

SEQ ID NO: 2956129 - DNA, 25 bp, Homo sapien
cctggccttcatgcctgctgggcta

SEQ ID NO: 2956130 - DNA, 25 bp, Homo sapien
ctgcaagcagcaagggagagtggaa

SEQ ID NO: 2956131 - DNA, 25 bp, Homo sapien
ctgcaggcagcccaacccacgccct

SEQ ID NO: 2956132 - DNA, 25 bp, Homo sapien
gcttgcggttccagttggtgacccg

SEQ ID NO: 2956133 - DNA, 25 bp, Homo sapien
cggttccagttggtgacccgcaggt

SEQ ID NO: 2956134 - DNA, 25 bp, Homo sapien
gtccacgagggtctcacaggccagg

SEQ ID NO: 2956135 - DNA, 25 bp, Homo sapien
tccacgagggtctcacaggccaggc

SEQ ID NO: 2956136 - DNA, 25 bp, Homo sapien
cagcagtggcggcatggtgcaggct

SEQ ID NO: 2956137 - DNA, 25 bp, Homo sapien
cgactcgaacttccgggcgaagaag

SEQ ID NO: 2956138 - DNA, 25 bp, Homo sapien
gttctcccagtaggccttgagggct

SEQ ID NO: 2956139 - DNA, 25 bp, Homo sapien
catcagccgcgtcgtaggtgttctc

SEQ ID NO: 2956140 - DNA, 25 bp, Homo sapien
tgcaccgcctgcgtcaccaggtagc

SEQ ID NO: 2956141 - DNA, 25 bp, Homo sapien
gccctggaaatggtcgtcatagaaa

SEQ ID NO: 2956142 - DNA, 25 bp, Homo sapien
tcatagaaatacaggtgcacgctgg

SEQ ID NO: 2956143 - DNA, 25 bp, Homo sapien
aacagcttcagcgacccttggggca

SEQ ID NO: 2956144 - DNA, 25 bp, Homo sapien
gcccctctaggcgaaatctctgtag

SEQ ID NO: 2956145 - DNA, 25 bp, Homo sapien
tcatggcccaactcgaatgtccctg

SEQ ID NO: 2956146 - DNA, 25 bp, Homo sapien
gacaatacggcagggatgaggttca

SEQ ID NO: 2956147 - DNA, 25 bp, Homo sapien
tctgagattcgttctaggcttccat

SEQ ID NO: 2956148 - DNA, 25 bp, Homo sapien
gatgtcataagatgtggccaccaca

SEQ ID NO: 2956149 - DNA, 25 bp, Homo sapien
gccaccacataggttgggtcgatcc

SEQ ID NO: 2956150 - DNA, 25 bp, Homo sapien
ctttggggtcccaatcagtgccaac

SEQ ID NO: 2956151 - DNA, 25 bp, Homo sapien
cataggttgggtcgatccagaccac

SEQ ID NO: 2956152 - DNA, 25 bp, Homo sapien
ggcttgtattgcgtgacctcagtct

SEQ ID NO: 2956153 - DNA, 25 bp, Homo sapien
tgaaggagtcgaacagtccagggcc

SEQ ID NO: 2956154 - DNA, 25 bp, Homo sapien
aggaagcgggtctcacccagcggtt

SEQ ID NO: 2956155 - DNA, 25 bp, Homo sapien
tcctgagaggtagtttgcggttgaa

SEQ ID NO: 2956156 - DNA, 25 bp, Homo sapien
ttcacgtgctaagactgaggcccag

SEQ ID NO: 2956157 - DNA, 25 bp, Homo sapien
tgaggaacaagatagccccagagag

SEQ ID NO: 2956158 - DNA, 25 bp, Homo sapien
gcaggaccctgcatgctacaggaaa

SEQ ID NO: 2956159 - DNA, 25 bp, Homo sapien
ttgtgttgcatgaaccaggaggtcc

SEQ ID NO: 2956160 - DNA, 25 bp, Homo sapien
aactctgctccatgtactcgttgtg

SEQ ID NO: 2956161 - DNA, 25 bp, Homo sapien
catgtactcgttgtggggtggccct

SEQ ID NO: 2956162 - DNA, 25 bp, Homo sapien
tgtccaggcctcgagcgcagggcct

SEQ ID NO: 2956163 - DNA, 25 bp, Homo sapien
cgcgagctccggctgaggcaggttc

SEQ ID NO: 2956164 - DNA, 25 bp, Homo sapien
agtcgcccgtctgctttgacaggcc

SEQ ID NO: 2956165 - DNA, 25 bp, Homo sapien
ctgagtcgcccgtctgctttgacag

SEQ ID NO: 2956166 - DNA, 25 bp, Homo sapien
gagaggggcctatggcacacagtcc

SEQ ID NO: 2956167 - DNA, 25 bp, Homo sapien
gctttgacaggccccagctctgatt

SEQ ID NO: 2956168 - DNA, 25 bp, Homo sapien
tatcacctgttcttcgggccttaga

SEQ ID NO: 2956169 - DNA, 25 bp, Homo sapien
aaaagaactgtcctgctagagccca

SEQ ID NO: 2956170 - DNA, 25 bp, Homo sapien
tcgtgcagaacaatagcaggtgggc

SEQ ID NO: 2956171 - DNA, 25 bp, Homo sapien
tgcacacctggaaactctgcatggg

SEQ ID NO: 2956172 - DNA, 25 bp, Homo sapien
ccaagaggcaccgtcagggggcagc

SEQ ID NO: 2956173 - DNA, 25 bp, Homo sapien
ccccaagaggcaccgtcagggggca

SEQ ID NO: 2956174 - DNA, 25 bp, Homo sapien
cttcccccaagaggcaccgtcaggg

SEQ ID NO: 2956175 - DNA, 25 bp, Homo sapien
cccaagaggcaccgtcagggggcag

SEQ ID NO: 2956176 - DNA, 25 bp, Homo sapien
cagcactgggggtcgcgctggtgca

SEQ ID NO: 2956177 - DNA, 25 bp, Homo sapien
gcgcagaggacctggcagcactggg

SEQ ID NO: 2956178 - DNA, 25 bp, Homo sapien
gaagaagtggcaggcgcagaggacc

SEQ ID NO: 2956179 - DNA, 25 bp, Homo sapien
tattggctgggactccggaagaagt

SEQ ID NO: 2956180 - DNA, 25 bp, Homo sapien
tgggagctggaaaaagaccttgtct

SEQ ID NO: 2956181 - DNA, 25 bp, Homo sapien
ggagctggaaaaagaccttgtcttc

SEQ ID NO: 2956182 - DNA, 25 bp, Homo sapien
ctgggagctggaaaaagaccttgtc

SEQ ID NO: 2956183 - DNA, 25 bp, Homo sapien
tggacctcggtgtggcatcccatgg

SEQ ID NO: 2956184 - DNA, 25 bp, Homo sapien
catcccatggtgctgaagtagggag

SEQ ID NO: 2956185 - DNA, 25 bp, Homo sapien
ccttgggactctcggctcctttcca

SEQ ID NO: 2956186 - DNA, 25 bp, Homo sapien
cctttccactggctggacctcggtg

SEQ ID NO: 2956187 - DNA, 25 bp, Homo sapien
gagcccgaagctctgtgcaatcagc

SEQ ID NO: 2956188 - DNA, 25 bp, Homo sapien
ccgaagctctgtgcaatcagctggt

SEQ ID NO: 2956189 - DNA, 25 bp, Homo sapien
gctctgtgcaatcagctggtgaatc

SEQ ID NO: 2956190 - DNA, 25 bp, Homo sapien
cccggagcccgaagctctgtgcaat

SEQ ID NO: 2956191 - DNA, 25 bp, Homo sapien
tgtgtgttaaaatgcgatatgtgaa

SEQ ID NO: 2956192 - DNA, 25 bp, Homo sapien
gcctctaattgggtattgtgtgtta

SEQ ID NO: 2956193 - DNA, 25 bp, Homo sapien
catatccttgagttctccactagtg

SEQ ID NO: 2956194 - DNA, 25 bp, Homo sapien
gatatgtgaaaagctcggttaccca

SEQ ID NO: 2956195 - DNA, 25 bp, Homo sapien
ttcctgggatgactgagtagagcca

SEQ ID NO: 2956196 - DNA, 25 bp, Homo sapien
cctgggatgactgagtagagccaca

SEQ ID NO: 2956197 - DNA, 25 bp, Homo sapien
tgactgagtagagccacagctggcc

SEQ ID NO: 2956198 - DNA, 25 bp, Homo sapien
ctgagtagagccacagctggccggt

SEQ ID NO: 2956199 - DNA, 25 bp, Homo sapien
gatgggggctacctccacaggctca

SEQ ID NO: 2956200 - DNA, 25 bp, Homo sapien
ccaaggcccagctggggtagtcttt

SEQ ID NO: 2956201 - DNA, 25 bp, Homo sapien
cccagctggggtagtctttaggcag

SEQ ID NO: 2956202 - DNA, 25 bp, Homo sapien
tactttggcaccctgtgtgggggca

SEQ ID NO: 2956203 - DNA, 25 bp, Homo sapien
cttctttcagggactctactgtgcc

SEQ ID NO: 2956204 - DNA, 25 bp, Homo sapien
gacataacgatactgtactctccac

SEQ ID NO: 2956205 - DNA, 25 bp, Homo sapien
tatagggtaggacagttctttgtta

SEQ ID NO: 2956206 - DNA, 25 bp, Homo sapien
cattagatgtgtggctatgtcaaca

SEQ ID NO: 2956207 - DNA, 25 bp, Homo sapien
tgagctagacagtattctaggccct

SEQ ID NO: 2956208 - DNA, 25 bp, Homo sapien
gccactctttcaactgccacgcagg

SEQ ID NO: 2956209 - DNA, 25 bp, Homo sapien
ctgcaacttctcccgccactctttc

SEQ ID NO: 2956210 - DNA, 25 bp, Homo sapien
tctttcaactgccacgcagggcccg

SEQ ID NO: 2956211 - DNA, 25 bp, Homo sapien
ttctcccgccactctttcaactgcc

SEQ ID NO: 2956212 - DNA, 25 bp, Homo sapien
cactgcttagcaacctgactggctg

SEQ ID NO: 2956213 - DNA, 25 bp, Homo sapien
tctgggacaggtggtgaaaataact

SEQ ID NO: 2956214 - DNA, 25 bp, Homo sapien
gaaaggcaaatgttggcaactcctc

SEQ ID NO: 2956215 - DNA, 25 bp, Homo sapien
cacaatctgagatgtcaaccactac

SEQ ID NO: 2956216 - DNA, 25 bp, Homo sapien
gatcaggtccttgttatctgctgca

SEQ ID NO: 2956217 - DNA, 25 bp, Homo sapien
gcactcctctctggggtatcatgga

SEQ ID NO: 2956218 - DNA, 25 bp, Homo sapien
gctgacagcatggatctaagatcag

SEQ ID NO: 2956219 - DNA, 25 bp, Homo sapien
acttcagggatctttggaaagggct

SEQ ID NO: 2956220 - DNA, 25 bp, Homo sapien
tggatccagcactacaatgatgtgt

SEQ ID NO: 2956221 - DNA, 25 bp, Homo sapien
ttcatcctggtaaccagtgctgcat

SEQ ID NO: 2956222 - DNA, 25 bp, Homo sapien
ggtgctttccttctgccttgcttgt

SEQ ID NO: 2956223 - DNA, 25 bp, Homo sapien
accttctgactcggcttggttttct

SEQ ID NO: 2956224 - DNA, 25 bp, Homo sapien
agatggaaaagggactgtcagtggg

SEQ ID NO: 2956225 - DNA, 25 bp, Homo sapien
tgtcagtggggggtccagaacgcag

SEQ ID NO: 2956226 - DNA, 25 bp, Homo sapien
tggggggtccagaacgcagataact

SEQ ID NO: 2956227 - DNA, 25 bp, Homo sapien
ggtccagaacgcagataactcagca

SEQ ID NO: 2956228 - DNA, 25 bp, Homo sapien
agcggcactccatggtctgcagtgc

SEQ ID NO: 2956229 - DNA, 25 bp, Homo sapien
gtgctcctaggagctggcccccacc

SEQ ID NO: 2956230 - DNA, 25 bp, Homo sapien
ctccatggtctgcagtgctcctagg

SEQ ID NO: 2956231 - DNA, 25 bp, Homo sapien
gctcctaggagctggcccccacctt

SEQ ID NO: 2956232 - DNA, 25 bp, Homo sapien
tccaagtgacactgcaaggcacagc

SEQ ID NO: 2956233 - DNA, 25 bp, Homo sapien
caagtgacactgcaaggcacagcct

SEQ ID NO: 2956234 - DNA, 25 bp, Homo sapien
gtgacactgcaaggcacagcctgcg

SEQ ID NO: 2956235 - DNA, 25 bp, Homo sapien
cctccaagtgacactgcaaggcaca

SEQ ID NO: 2956236 - DNA, 25 bp, Homo sapien
ccattgtcgatcatggacacaaatg

SEQ ID NO: 2956237 - DNA, 25 bp, Homo sapien
ttgtcgatcatggacacaaatgcct

SEQ ID NO: 2956238 - DNA, 25 bp, Homo sapien
tctgcccggagcaacaccagtactg

SEQ ID NO: 2956239 - DNA, 25 bp, Homo sapien
gagcaacaccagtactgttggctcc

SEQ ID NO: 2956240 - DNA, 25 bp, Homo sapien
ctttcatagtgctgtccaggcttcc

SEQ ID NO: 2956241 - DNA, 25 bp, Homo sapien
tacaaagccctgaagcgtttccttc

SEQ ID NO: 2956242 - DNA, 25 bp, Homo sapien
tcaccagtgacagagctttccctgc

SEQ ID NO: 2956243 - DNA, 25 bp, Homo sapien
gagtgacctacatctgcaatgaata

SEQ ID NO: 2956244 - DNA, 25 bp, Homo sapien
gaagaagactggaccagagcatccc

SEQ ID NO: 2956245 - DNA, 25 bp, Homo sapien
aagagctgccccttttaacatgaaa

SEQ ID NO: 2956246 - DNA, 25 bp, Homo sapien
gagatggactaccttgcagagtgac

SEQ ID NO: 2956247 - DNA, 25 bp, Homo sapien
ggaggaaatcaaagaacagcagctc

SEQ ID NO: 2956248 - DNA, 25 bp, Homo sapien
ctggtgcaggggaggaaatcaaaga

SEQ ID NO: 2956249 - DNA, 25 bp, Homo sapien
gaaatcaaagaacagcagctccagg

SEQ ID NO: 2956250 - DNA, 25 bp, Homo sapien
ggggaggaaatcaaagaacagcagc

SEQ ID NO: 2956251 - DNA, 25 bp, Homo sapien
taccctggataccatggaccctatg

SEQ ID NO: 2956252 - DNA, 25 bp, Homo sapien
cagcgtctaccctggataccatgga

SEQ ID NO: 2956253 - DNA, 25 bp, Homo sapien
taccatggaccctatgctggcctct

SEQ ID NO: 2956254 - DNA, 25 bp, Homo sapien
cttcagcgtctaccctggataccat

SEQ ID NO: 2956255 - DNA, 25 bp, Homo sapien
tgaatgcgcatgtgaagtcggccag

SEQ ID NO: 2956256 - DNA, 25 bp, Homo sapien
ttccagctctgcacaatttgagcct

SEQ ID NO: 2956257 - DNA, 25 bp, Homo sapien
tgtgaagtcggccagctctttccag

SEQ ID NO: 2956258 - DNA, 25 bp, Homo sapien
agctctgcacaatttgagcctgggc

SEQ ID NO: 2956259 - DNA, 25 bp, Homo sapien
taacctggcctatgatatcagcctg

SEQ ID NO: 2956260 - DNA, 25 bp, Homo sapien
gacaagtcaatctcttcaggcctca

SEQ ID NO: 2956261 - DNA, 25 bp, Homo sapien
ttaatcctggtaacttggcctatgg

SEQ ID NO: 2956262 - DNA, 25 bp, Homo sapien
tgttcccctcaagtggcaactgaaa

SEQ ID NO: 2956263 - DNA, 25 bp, Homo sapien
ggagggataggcattcacaactgca

SEQ ID NO: 2956264 - DNA, 25 bp, Homo sapien
ggctgactcggttcagctgctgaat

SEQ ID NO: 2956265 - DNA, 25 bp, Homo sapien
gtctcctccagactagtgcgagtcc

SEQ ID NO: 2956266 - DNA, 25 bp, Homo sapien
gagaaggtagtttcatctcggagct

SEQ ID NO: 2956267 - DNA, 25 bp, Homo sapien
tctttatccgaaaaacactgctgat

SEQ ID NO: 2956268 - DNA, 25 bp, Homo sapien
tagatacgcctggatagttctggtc

SEQ ID NO: 2956269 - DNA, 25 bp, Homo sapien
tgtctgcgagcaaattctggcgttc

SEQ ID NO: 2956270 - DNA, 25 bp, Homo sapien
caatgcggcgagaagtggatgtcac

SEQ ID NO: 2956271 - DNA, 25 bp, Homo sapien
gccaggagaggaacattaaatgcca

SEQ ID NO: 2956272 - DNA, 25 bp, Homo sapien
taagacccaagaaagactgggcctc

SEQ ID NO: 2956273 - DNA, 25 bp, Homo sapien
caatatagaagtccgcatagtcatc

SEQ ID NO: 2956274 - DNA, 25 bp, Homo sapien
tagtcatcataatcccgttccttgg

SEQ ID NO: 2956275 - DNA, 25 bp, Homo sapien
ccccggagggagcaagaatctcata

SEQ ID NO: 2956276 - DNA, 25 bp, Homo sapien
gactgcaactcatgactatcctgat

SEQ ID NO: 2956277 - DNA, 25 bp, Homo sapien
tgaccttttggatgggactgcaact

SEQ ID NO: 2956278 - DNA, 25 bp, Homo sapien
gcgtaggtctacatcttactcagaa

SEQ ID NO: 2956279 - DNA, 25 bp, Homo sapien
gttttttgagacttccctgagcaaa

SEQ ID NO: 2956280 - DNA, 25 bp, Homo sapien
tgactatgaagagcactactttcct

SEQ ID NO: 2956281 - DNA, 25 bp, Homo sapien
tacattgctaccatgataatctgga

SEQ ID NO: 2956282 - DNA, 25 bp, Homo sapien
tattagttctacattgctaccatga

SEQ ID NO: 2956283 - DNA, 25 bp, Homo sapien
tgggctccaagcttacactctatcc

SEQ ID NO: 2956284 - DNA, 25 bp, Homo sapien
tccacccaccatagcgagaatcttt

SEQ ID NO: 2956285 - DNA, 25 bp, Homo sapien
gtagtcaggattgcgttgggctcca

SEQ ID NO: 2956286 - DNA, 25 bp, Homo sapien
ttctcgatcagaaaatcggctcaga

SEQ ID NO: 2956287 - DNA, 25 bp, Homo sapien
taagcagcagtacttactgagcaca

SEQ ID NO: 2956288 - DNA, 25 bp, Homo sapien
gaatatacatgtctgtctcgtgcgc

SEQ ID NO: 2956289 - DNA, 25 bp, Homo sapien
aatacttcttatgatgggtgtgtgc

SEQ ID NO: 2956290 - DNA, 25 bp, Homo sapien
aaaggagatccttttgctggtctgc

SEQ ID NO: 2956291 - DNA, 25 bp, Homo sapien
tactagctctgaccaggtaagacct

SEQ ID NO: 2956292 - DNA, 25 bp, Homo sapien
cagagccctgaggagtcggcattac

SEQ ID NO: 2956293 - DNA, 25 bp, Homo sapien
tgagcaccagatgactaacttggct

SEQ ID NO: 2956294 - DNA, 25 bp, Homo sapien
gaatcaggtcgtctgtctgcaggaa

SEQ ID NO: 2956295 - DNA, 25 bp, Homo sapien
catctcagtggtcgcggaaggtgac

SEQ ID NO: 2956296 - DNA, 25 bp, Homo sapien
actgccagcaataatgcccgcgggc

SEQ ID NO: 2956297 - DNA, 25 bp, Homo sapien
gccacgggtgaacgtgaaccgagct

SEQ ID NO: 2956298 - DNA, 25 bp, Homo sapien
tcagtattggatgtcaacccagtct

SEQ ID NO: 2956299 - DNA, 25 bp, Homo sapien
agagccaggatgaatacccagtgga

SEQ ID NO: 2956300 - DNA, 25 bp, Homo sapien
gactgaagcctggtgattgtctacg

SEQ ID NO: 2956301 - DNA, 25 bp, Homo sapien
tggaaatctacacagcatctaggcc

SEQ ID NO: 2956302 - DNA, 25 bp, Homo sapien
acccagtggataggtattagtgcca

SEQ ID NO: 2956303 - DNA, 25 bp, Homo sapien
ggctcgctttgccctgcgtcccggc

SEQ ID NO: 2956304 - DNA, 25 bp, Homo sapien
gctttgccctgcgtcccggcccgag

SEQ ID NO: 2956305 - DNA, 25 bp, Homo sapien
tttgccctgcgtcccggcccgagta

SEQ ID NO: 2956306 - DNA, 25 bp, Homo sapien
tcgctttgccctgcgtcccggcccg

SEQ ID NO: 2956307 - DNA, 25 bp, Homo sapien
ctggcttcctgccaactccgagaga

SEQ ID NO: 2956308 - DNA, 25 bp, Homo sapien
gcttcctgccaactccgagagaggg

SEQ ID NO: 2956309 - DNA, 25 bp, Homo sapien
ttcctgccaactccgagagagggcg

SEQ ID NO: 2956310 - DNA, 25 bp, Homo sapien
tgccaactccgagagagggcggccc

SEQ ID NO: 2956311 - DNA, 25 bp, Homo sapien
cccagtgcactcgtccagaggtggg

SEQ ID NO: 2956312 - DNA, 25 bp, Homo sapien
ccccagtgcactcgtccagaggtgg

SEQ ID NO: 2956313 - DNA, 25 bp, Homo sapien
agaggtggggcttccgaagctcgcc

SEQ ID NO: 2956314 - DNA, 25 bp, Homo sapien
gaagctcgccgggacctccaagttc

SEQ ID NO: 2956315 - DNA, 25 bp, Homo sapien
gaatcgagagtcttggaccagaact

SEQ ID NO: 2956316 - DNA, 25 bp, Homo sapien
caggagactgctaagtttagtggcc

SEQ ID NO: 2956317 - DNA, 25 bp, Homo sapien
gctgatccccaagtttgcccatgaa

SEQ ID NO: 2956318 - DNA, 25 bp, Homo sapien
taaagccatgttagtgagcagctga

SEQ ID NO: 2956319 - DNA, 25 bp, Homo sapien
agaggcagtgaagctactgggaact

SEQ ID NO: 2956320 - DNA, 25 bp, Homo sapien
tgcagaggcagtgaagctactggga

SEQ ID NO: 2956321 - DNA, 25 bp, Homo sapien
cagtgaagctactgggaactgaaat

SEQ ID NO: 2956322 - DNA, 25 bp, Homo sapien
gaactgaaatcctctgcctgccagc

SEQ ID NO: 2956323 - DNA, 25 bp, Homo sapien
aggactggtcacaccgggaaggcag

SEQ ID NO: 2956324 - DNA, 25 bp, Homo sapien
tcacaccgggaaggcagctttactt

SEQ ID NO: 2956325 - DNA, 25 bp, Homo sapien
actggtcacaccgggaaggcagctt

SEQ ID NO: 2956326 - DNA, 25 bp, Homo sapien
tggtcacaccgggaaggcagcttta

SEQ ID NO: 2956327 - DNA, 25 bp, Homo sapien
ccatagacttagtatctggccgagt

SEQ ID NO: 2956328 - DNA, 25 bp, Homo sapien
tggtaggacaggctcagtagtgcac

SEQ ID NO: 2956329 - DNA, 25 bp, Homo sapien
gaaagtgctgtcctgaccatagact

SEQ ID NO: 2956330 - DNA, 25 bp, Homo sapien
taacagccctgataacatgagtggc

SEQ ID NO: 2956331 - DNA, 25 bp, Homo sapien
agggggcagccatgagtccagagga

SEQ ID NO: 2956332 - DNA, 25 bp, Homo sapien
gtcaggggagggccgaacttgtcta

SEQ ID NO: 2956333 - DNA, 25 bp, Homo sapien
ccatgagtccagaggagaggcttaa

SEQ ID NO: 2956334 - DNA, 25 bp, Homo sapien
ccagaggagaggcttaagagactag

SEQ ID NO: 2956335 - DNA, 25 bp, Homo sapien
tgtggcctgatttagtgtgataaaa

SEQ ID NO: 2956336 - DNA, 25 bp, Homo sapien
cctgtggcctgatttagtgtgataa

SEQ ID NO: 2956337 - DNA, 25 bp, Homo sapien
cccctgtggcctgatttagtgtgat

SEQ ID NO: 2956338 - DNA, 25 bp, Homo sapien
ccctgtggcctgatttagtgtgata

SEQ ID NO: 2956339 - DNA, 25 bp, Homo sapien
cagacccaaggactggacatgtagc

SEQ ID NO: 2956340 - DNA, 25 bp, Homo sapien
catgtagctgggtggaagtcaccat

SEQ ID NO: 2956341 - DNA, 25 bp, Homo sapien
agaggaggacgtccagcagacccaa

SEQ ID NO: 2956342 - DNA, 25 bp, Homo sapien
tcaaacggagaggaggacgtccagc

SEQ ID NO: 2956343 - DNA, 25 bp, Homo sapien
tgcccaatctcactggtaatcaggg

SEQ ID NO: 2956344 - DNA, 25 bp, Homo sapien
agcataataatgctggacacggtgg

SEQ ID NO: 2956345 - DNA, 25 bp, Homo sapien
gcacagtctcgccagggcaatacct

SEQ ID NO: 2956346 - DNA, 25 bp, Homo sapien
gcatggactgctatacagcaggtaa

SEQ ID NO: 2956347 - DNA, 25 bp, Homo sapien
caggaatgtaccagcagacctagat

SEQ ID NO: 2956348 - DNA, 25 bp, Homo sapien
tgacacgtcgggaatgtaatgattc

SEQ ID NO: 2956349 - DNA, 25 bp, Homo sapien
aaaggaacactgagtatctcctctg

SEQ ID NO: 2956350 - DNA, 25 bp, Homo sapien
gataagcactctcagagaggaaggc

SEQ ID NO: 2956351 - DNA, 25 bp, Homo sapien
tgatggcctggaaggtctggaagcc

SEQ ID NO: 2956352 - DNA, 25 bp, Homo sapien
agggactgcctagcccatatccaat

SEQ ID NO: 2956353 - DNA, 25 bp, Homo sapien
ccaccagggactgcctagcccatat

SEQ ID NO: 2956354 - DNA, 25 bp, Homo sapien
accagggactgcctagcccatatcc

SEQ ID NO: 2956355 - DNA, 25 bp, Homo sapien
ggagaggagctatgggtttgactgt

SEQ ID NO: 2956356 - DNA, 25 bp, Homo sapien
tatgggtttgactgtcccagatcag

SEQ ID NO: 2956357 - DNA, 25 bp, Homo sapien
gagctatgggtttgactgtcccaga

SEQ ID NO: 2956358 - DNA, 25 bp, Homo sapien
gtttgactgtcccagatcagtctcc

SEQ ID NO: 2956359 - DNA, 25 bp, Homo sapien
taagatgctttttggtgcacccctg

SEQ ID NO: 2956360 - DNA, 25 bp, Homo sapien
gacgaccaaggcctctcgttctggg

SEQ ID NO: 2956361 - DNA, 25 bp, Homo sapien
caacctgacgtcttcatggaggacg

SEQ ID NO: 2956362 - DNA, 25 bp, Homo sapien
gcacccctgaacgtagctgaggcct

SEQ ID NO: 2956363 - DNA, 25 bp, Homo sapien
tagcccggagttctcatcacagtca

SEQ ID NO: 2956364 - DNA, 25 bp, Homo sapien
gagctagtacttgcccactttgagg

SEQ ID NO: 2956365 - DNA, 25 bp, Homo sapien
ctgcatagttaacaggtgccccagg

SEQ ID NO: 2956366 - DNA, 25 bp, Homo sapien
gctgatacaggaggcattggacccc

SEQ ID NO: 2956367 - DNA, 25 bp, Homo sapien
ggcggtggccaactgcatgagcacc

SEQ ID NO: 2956368 - DNA, 25 bp, Homo sapien
cagccggtcacctttgcagaggcca

SEQ ID NO: 2956369 - DNA, 25 bp, Homo sapien
gcagaggccaatgctcaggaggcca

SEQ ID NO: 2956370 - DNA, 25 bp, Homo sapien
catgcataggagttaggtccccaca

SEQ ID NO: 2956371 - DNA, 25 bp, Homo sapien
tgatgttcccccatgcacaccaagc

SEQ ID NO: 2956372 - DNA, 25 bp, Homo sapien
accaagctgtgccaagcaagcccct

SEQ ID NO: 2956373 - DNA, 25 bp, Homo sapien
gttcccccatgcacaccaagctgtg

SEQ ID NO: 2956374 - DNA, 25 bp, Homo sapien
caagctgtgccaagcaagcccctcc

SEQ ID NO: 2956375 - DNA, 25 bp, Homo sapien
cttcttgaggacatactccagttcc

SEQ ID NO: 2956376 - DNA, 25 bp, Homo sapien
tcttgaggacatactccagttccat

SEQ ID NO: 2956377 - DNA, 25 bp, Homo sapien
tgaggacatactccagttccatagc

SEQ ID NO: 2956378 - DNA, 25 bp, Homo sapien
ttgaggacatactccagttccatag

SEQ ID NO: 2956379 - DNA, 25 bp, Homo sapien
cccctccccgacaaatgagctgtac

SEQ ID NO: 2956380 - DNA, 25 bp, Homo sapien
agagtctgtgcagccccctgtgcca

SEQ ID NO: 2956381 - DNA, 25 bp, Homo sapien
cagagtctgtgcagccccctgtgcc

SEQ ID NO: 2956382 - DNA, 25 bp, Homo sapien
gcccctccccgacaaatgagctgta

SEQ ID NO: 2956383 - DNA, 25 bp, Homo sapien
tcaggacgttgtagtattgctgggt

SEQ ID NO: 2956384 - DNA, 25 bp, Homo sapien
tgcttcaggacgttgtagtattgct

SEQ ID NO: 2956385 - DNA, 25 bp, Homo sapien
gcttcaggacgttgtagtattgctg

SEQ ID NO: 2956386 - DNA, 25 bp, Homo sapien
cttcaggacgttgtagtattgctgg

SEQ ID NO: 2956387 - DNA, 25 bp, Homo sapien
ggttggggacgatggtgagagacag

SEQ ID NO: 2956388 - DNA, 25 bp, Homo sapien
gttggggacgatggtgagagacagg

SEQ ID NO: 2956389 - DNA, 25 bp, Homo sapien
ggggttggggacgatggtgagagac

SEQ ID NO: 2956390 - DNA, 25 bp, Homo sapien
ctggggttggggacgatggtgagag

SEQ ID NO: 2956391 - DNA, 25 bp, Homo sapien
catccaccgagatgactgtggtcag

SEQ ID NO: 2956392 - DNA, 25 bp, Homo sapien
tgctggttgtattggagctggtcca

SEQ ID NO: 2956393 - DNA, 25 bp, Homo sapien
ggcaaaggggcatccaccgagatga

SEQ ID NO: 2956394 - DNA, 25 bp, Homo sapien
ctgctggttgtattggagctggtcc

SEQ ID NO: 2956395 - DNA, 25 bp, Homo sapien
gtgaatctgccactgcaccgggaac

SEQ ID NO: 2956396 - DNA, 25 bp, Homo sapien
cagtctcagtaaagaaggcatgctc

SEQ ID NO: 2956397 - DNA, 25 bp, Homo sapien
gataaggtctccgttctcatgccac

SEQ ID NO: 2956398 - DNA, 25 bp, Homo sapien
gcaaaaggtctaccacgataccagg

SEQ ID NO: 2956399 - DNA, 25 bp, Homo sapien
gttggagttgttgacaatgttgtag

SEQ ID NO: 2956400 - DNA, 25 bp, Homo sapien
caggcgctctcctaaaatgttggag

SEQ ID NO: 2956401 - DNA, 25 bp, Homo sapien
catgcagtttcaggcgctctcctaa

SEQ ID NO: 2956402 - DNA, 25 bp, Homo sapien
tcctaaaatgttggagttgttgaca

SEQ ID NO: 2956403 - DNA, 25 bp, Homo sapien
ccacggaacccaggcaatggtacag

SEQ ID NO: 2956404 - DNA, 25 bp, Homo sapien
gacacatcattgtgcctgccacgga

SEQ ID NO: 2956405 - DNA, 25 bp, Homo sapien
gatgagggtggcaccgtacatcaga

SEQ ID NO: 2956406 - DNA, 25 bp, Homo sapien
ggatcatccgcaactgctctggtgt

SEQ ID NO: 2956407 - DNA, 25 bp, Homo sapien
aactgcagcaaagggaataggcagg

SEQ ID NO: 2956408 - DNA, 25 bp, Homo sapien
actgcagcaaagggaataggcagga

SEQ ID NO: 2956409 - DNA, 25 bp, Homo sapien
tcagaatgtccacgaacatcgtggg

SEQ ID NO: 2956410 - DNA, 25 bp, Homo sapien
agtctggctggttcagaatgtccac

SEQ ID NO: 2956411 - DNA, 25 bp, Homo sapien
tccacacatggtcgagatgtcataa

SEQ ID NO: 2956412 - DNA, 25 bp, Homo sapien
tgtcataactggagaagtctggctg

SEQ ID NO: 2956413 - DNA, 25 bp, Homo sapien
ggaggtgcaggggacccagcaatga

SEQ ID NO: 2956414 - DNA, 25 bp, Homo sapien
ggtgcaggggacccagcaatgacac

SEQ ID NO: 2956415 - DNA, 25 bp, Homo sapien
ctggaggtgcaggggacccagcaat

SEQ ID NO: 2956416 - DNA, 25 bp, Homo sapien
aggtgcaggggacccagcaatgaca

SEQ ID NO: 2956417 - DNA, 25 bp, Homo sapien
tatcttgttgatgatggctcggatc

SEQ ID NO: 2956418 - DNA, 25 bp, Homo sapien
caccaggtccttcatatttatcttg

SEQ ID NO: 2956419 - DNA, 25 bp, Homo sapien
tcttgttgatgatggctcggatcaa

SEQ ID NO: 2956420 - DNA, 25 bp, Homo sapien
caggtccttcatatttatcttgttg

SEQ ID NO: 2956421 - DNA, 25 bp, Homo sapien
catccccatgtctgtccatctgctg

SEQ ID NO: 2956422 - DNA, 25 bp, Homo sapien
caggacatcggtgctttgctgtcca

SEQ ID NO: 2956423 - DNA, 25 bp, Homo sapien
ctgccaggacgttctagcaggacat

SEQ ID NO: 2956424 - DNA, 25 bp, Homo sapien
cgttctagcaggacatcggtgcttt

SEQ ID NO: 2956425 - DNA, 25 bp, Homo sapien
gacatcggtgctttgctgtccatct

SEQ ID NO: 2956426 - DNA, 25 bp, Homo sapien
ctcccaggatcatccttcctctgtt

SEQ ID NO: 2956427 - DNA, 25 bp, Homo sapien
cctcccaggatcatccttcctctgt

SEQ ID NO: 2956428 - DNA, 25 bp, Homo sapien
tcagaaccacaacaggttggtcatc

SEQ ID NO: 2956429 - DNA, 25 bp, Homo sapien
accctcccaggatcatccttcctct

SEQ ID NO: 2956430 - DNA, 25 bp, Homo sapien
tgtccctctggctatctccaaggtg

SEQ ID NO: 2956431 - DNA, 25 bp, Homo sapien
tctggctggacaacaccaacctgga

SEQ ID NO: 2956432 - DNA, 25 bp, Homo sapien
gaccctctggctggacaacaccaac

SEQ ID NO: 2956433 - DNA, 25 bp, Homo sapien
cgccttgtcacatccctaccctaat

SEQ ID NO: 2956434 - DNA, 25 bp, Homo sapien
cagcacgtcatctgcgacaaggtgg

SEQ ID NO: 2956435 - DNA, 25 bp, Homo sapien
caacaacaagatccgtgagctgcgc

SEQ ID NO: 2956436 - DNA, 25 bp, Homo sapien
gaacctcgtgtcattgcacctgcag

SEQ ID NO: 2956437 - DNA, 25 bp, Homo sapien
gaagatccccaaggtgtcagagaag

SEQ ID NO: 2956438 - DNA, 25 bp, Homo sapien
agggagacgcatccagctgtccggc

SEQ ID NO: 2956439 - DNA, 25 bp, Homo sapien
ccctttaaagcgcaggcagctggcc

SEQ ID NO: 2956440 - DNA, 25 bp, Homo sapien
ggcgccgcacaagcgcccctttaaa

SEQ ID NO: 2956441 - DNA, 25 bp, Homo sapien
caagcgcccctttaaagcgcaggca

SEQ ID NO: 2956442 - DNA, 25 bp, Homo sapien
agcttcggcgcgtcgagtctgaagt

SEQ ID NO: 2956443 - DNA, 25 bp, Homo sapien
agtctgaagtgggagaccgacgccg

SEQ ID NO: 2956444 - DNA, 25 bp, Homo sapien
agggccagcttcggcgcgtcgagtc

SEQ ID NO: 2956445 - DNA, 25 bp, Homo sapien
tctgaagtgggagaccgacgccggg

SEQ ID NO: 2956446 - DNA, 25 bp, Homo sapien
acaggaatccggacatcgtggctgg

SEQ ID NO: 2956447 - DNA, 25 bp, Homo sapien
cctttccacaggaatccggacatcg

SEQ ID NO: 2956448 - DNA, 25 bp, Homo sapien
ggcgggactgcccacagaacttagg

SEQ ID NO: 2956449 - DNA, 25 bp, Homo sapien
ggcacacagaaatctggcgggctgg

SEQ ID NO: 2956450 - DNA, 25 bp, Homo sapien
aagcttcccccatatcagctgctct

SEQ ID NO: 2956451 - DNA, 25 bp, Homo sapien
caagcttcccccatatcagctgctc

SEQ ID NO: 2956452 - DNA, 25 bp, Homo sapien
tttaatcaacggataccagatctca

SEQ ID NO: 2956453 - DNA, 25 bp, Homo sapien
tcccctttaatcaacggataccaga

SEQ ID NO: 2956454 - DNA, 25 bp, Homo sapien
taatcaacggataccagatctcatc

SEQ ID NO: 2956455 - DNA, 25 bp, Homo sapien
tcaacggataccagatctcatccat

SEQ ID NO: 2956456 - DNA, 25 bp, Homo sapien
ctagagggtccagaaagggtgtttg

SEQ ID NO: 2956457 - DNA, 25 bp, Homo sapien
ctcagcacgtgcagagggatcaggt

SEQ ID NO: 2956458 - DNA, 25 bp, Homo sapien
gtttgaagagggctcagcacgtgca

SEQ ID NO: 2956459 - DNA, 25 bp, Homo sapien
tccagaaagggtgtttgaagagggc

SEQ ID NO: 2956460 - DNA, 25 bp, Homo sapien
tgcgcgaatgtcacgggactgttct

SEQ ID NO: 2956461 - DNA, 25 bp, Homo sapien
cctcagggaagtgcgcgaatgtcac

SEQ ID NO: 2956462 - DNA, 25 bp, Homo sapien
tgtcctcagggaagtgcgcgaatgt

SEQ ID NO: 2956463 - DNA, 25 bp, Homo sapien
aagtgcgcgaatgtcacgggactgt

SEQ ID NO: 2956464 - DNA, 25 bp, Homo sapien
tgtgaggcataattctgcccacgct

SEQ ID NO: 2956465 - DNA, 25 bp, Homo sapien
cgtgtgaggcataattctgcccacg

SEQ ID NO: 2956466 - DNA, 25 bp, Homo sapien
ctccgtgtgaggcataattctgccc

SEQ ID NO: 2956467 - DNA, 25 bp, Homo sapien
gaggcataattctgcccacgctttc

SEQ ID NO: 2956468 - DNA, 25 bp, Homo sapien
gagacctgagctgggcatgaaagaa

SEQ ID NO: 2956469 - DNA, 25 bp, Homo sapien
gggagacaaaggctagagtcgaccc

SEQ ID NO: 2956470 - DNA, 25 bp, Homo sapien
agagacctgagctgggcatgaaaga

SEQ ID NO: 2956471 - DNA, 25 bp, Homo sapien
ctagagtcgacccaaagccagtgag

SEQ ID NO: 2956472 - DNA, 25 bp, Homo sapien
tcaggttggggcttcctatcctctt

SEQ ID NO: 2956473 - DNA, 25 bp, Homo sapien
caggttggggcttcctatcctcttg

SEQ ID NO: 2956474 - DNA, 25 bp, Homo sapien
ctcaggttggggcttcctatcctct

SEQ ID NO: 2956475 - DNA, 25 bp, Homo sapien
acgcagtaccctcggatgcacagct

SEQ ID NO: 2956476 - DNA, 25 bp, Homo sapien
gtagcccagcatgacgcagtaccct

SEQ ID NO: 2956477 - DNA, 25 bp, Homo sapien
ccccgggcgtgttcagctttgccag

SEQ ID NO: 2956478 - DNA, 25 bp, Homo sapien
cctgcctccatgttcatgatccggg

SEQ ID NO: 2956479 - DNA, 25 bp, Homo sapien
ctgtccaataccacttgtcctgatc

SEQ ID NO: 2956480 - DNA, 25 bp, Homo sapien
gtccaataccacttgtcctgatcca

SEQ ID NO: 2956481 - DNA, 25 bp, Homo sapien
taccacttgtcctgatccactgctt

SEQ ID NO: 2956482 - DNA, 25 bp, Homo sapien
caataccacttgtcctgatccactg

SEQ ID NO: 2956483 - DNA, 25 bp, Homo sapien
tcttggtgttatttatcgatgttgg

SEQ ID NO: 2956484 - DNA, 25 bp, Homo sapien
atcgatgttgggcatcatctgtctt

SEQ ID NO: 2956485 - DNA, 25 bp, Homo sapien
ttctctgtccactcaatctaaggga

SEQ ID NO: 2956486 - DNA, 25 bp, Homo sapien
tttcctctggacctctagcggcgag

SEQ ID NO: 2956487 - DNA, 25 bp, Homo sapien
ggcccacgatcttgcagaagccctg

SEQ ID NO: 2956488 - DNA, 25 bp, Homo sapien
tgcacttcctgcaccttcgggtgtg

SEQ ID NO: 2956489 - DNA, 25 bp, Homo sapien
gatgatcatatccttagagcggccc

SEQ ID NO: 2956490 - DNA, 25 bp, Homo sapien
tgtgaaagaagtcctcgagctctgc

SEQ ID NO: 2956491 - DNA, 25 bp, Homo sapien
agacatcaccgtgttcatgtgtgtt

SEQ ID NO: 2956492 - DNA, 25 bp, Homo sapien
cagacatcaccgtgttcatgtgtgt

SEQ ID NO: 2956493 - DNA, 25 bp, Homo sapien
ttcagccgaatgcaggcacaaatct

SEQ ID NO: 2956494 - DNA, 25 bp, Homo sapien
cccatccgatcgtccttcactccca

SEQ ID NO: 2956495 - DNA, 25 bp, Homo sapien
tccttcagccgaatgcaggcacaaa

SEQ ID NO: 2956496 - DNA, 25 bp, Homo sapien
ccccgtccttcagccgaatgcaggc

SEQ ID NO: 2956497 - DNA, 25 bp, Homo sapien
agtcagcttcgtcaagggcagagca

SEQ ID NO: 2956498 - DNA, 25 bp, Homo sapien
cctggccaggagtcagcttcgtcaa

SEQ ID NO: 2956499 - DNA, 25 bp, Homo sapien
taaggcgtgaggctgcgcaagctca

SEQ ID NO: 2956500 - DNA, 25 bp, Homo sapien
cagctaggttgagcggaggctccca

SEQ ID NO: 2956501 - DNA, 25 bp, Homo sapien
gggtagtttgtgacaaacacgatgt

SEQ ID NO: 2956502 - DNA, 25 bp, Homo sapien
tttgtgacaaacacgatgtacttcg

SEQ ID NO: 2956503 - DNA, 25 bp, Homo sapien
gacaaacacgatgtacttcggaatc

SEQ ID NO: 2956504 - DNA, 25 bp, Homo sapien
gatgtacttcggaatcttgaagtga

SEQ ID NO: 2956505 - DNA, 25 bp, Homo sapien
ccccagcctcctccaccttacacac

SEQ ID NO: 2956506 - DNA, 25 bp, Homo sapien
cagagcccaggctgccctccccagc

SEQ ID NO: 2956507 - DNA, 25 bp, Homo sapien
cctccccagcctcctccaccttaca

SEQ ID NO: 2956508 - DNA, 25 bp, Homo sapien
ctatggggccccagagcccaggctg

SEQ ID NO: 2956509 - DNA, 25 bp, Homo sapien
catctgctctcgaagtttgaatttc

SEQ ID NO: 2956510 - DNA, 25 bp, Homo sapien
gatttagatgtcgttccatctgctc

SEQ ID NO: 2956511 - DNA, 25 bp, Homo sapien
gatgtcgttccatctgctctcgaag

SEQ ID NO: 2956512 - DNA, 25 bp, Homo sapien
tcacagatttagatgtcgttccatc

SEQ ID NO: 2956513 - DNA, 25 bp, Homo sapien
tctaggtgcataaagccaggttgca

SEQ ID NO: 2956514 - DNA, 25 bp, Homo sapien
caggagctcttagttcgttcagtca

SEQ ID NO: 2956515 - DNA, 25 bp, Homo sapien
ttgacatttgatgtgcctggctcag

SEQ ID NO: 2956516 - DNA, 25 bp, Homo sapien
tctttatgccaaatcacaaggacag

SEQ ID NO: 2956517 - DNA, 25 bp, Homo sapien
aatggtagattgtcccagcactttg

SEQ ID NO: 2956518 - DNA, 25 bp, Homo sapien
agctatgatcatgtcgctacagtga

SEQ ID NO: 2956519 - DNA, 25 bp, Homo sapien
ggagataatagttaaagagtatggg

SEQ ID NO: 2956520 - DNA, 25 bp, Homo sapien
ctgaattctatactttaaatggtag

SEQ ID NO: 2956521 - DNA, 25 bp, Homo sapien
cagcgcggcgcactgacccgagcag

SEQ ID NO: 2956522 - DNA, 25 bp, Homo sapien
gcggcgcactgacccgagcaggaga

SEQ ID NO: 2956523 - DNA, 25 bp, Homo sapien
agcaggagacgcgcgcagggatcac

SEQ ID NO: 2956524 - DNA, 25 bp, Homo sapien
gcgcggcgcactgacccgagcagga

SEQ ID NO: 2956525 - DNA, 25 bp, Homo sapien
ctgcgttctccacgcggcggcgcct

SEQ ID NO: 2956526 - DNA, 25 bp, Homo sapien
tctccacgcggcggcgcctctgggc

SEQ ID NO: 2956527 - DNA, 25 bp, Homo sapien
gtgtacgtaaagcgccgcgcgccgg

SEQ ID NO: 2956528 - DNA, 25 bp, Homo sapien
cgttctccacgcggcggcgcctctg

SEQ ID NO: 2956529 - DNA, 25 bp, Homo sapien
gagcttcggtcaccagacacttctg

SEQ ID NO: 2956530 - DNA, 25 bp, Homo sapien
cctccaggcggcgagggatgtactt

SEQ ID NO: 2956531 - DNA, 25 bp, Homo sapien
ttgaagttgcagtaactgcagcgct

SEQ ID NO: 2956532 - DNA, 25 bp, Homo sapien
tgagccgcagcagcgtctgagcttc

SEQ ID NO: 2956533 - DNA, 25 bp, Homo sapien
ctggaggcctatagacaacctgtta

SEQ ID NO: 2956534 - DNA, 25 bp, Homo sapien
aatgtgacttccaagtctgcaggca

SEQ ID NO: 2956535 - DNA, 25 bp, Homo sapien
gcccggagctgaagtaggattagcc

SEQ ID NO: 2956536 - DNA, 25 bp, Homo sapien
tatagacaacctgttaacccctgct

SEQ ID NO: 2956537 - DNA, 25 bp, Homo sapien
gaaatgcaacactgacacaacacca

SEQ ID NO: 2956538 - DNA, 25 bp, Homo sapien
tccaatatgataggtagtagccaca

SEQ ID NO: 2956539 - DNA, 25 bp, Homo sapien
gatctcatgctgtctgttcttacca

SEQ ID NO: 2956540 - DNA, 25 bp, Homo sapien
cagattggctgtataacactgtgct

SEQ ID NO: 2956541 - DNA, 25 bp, Homo sapien
ggaaggtcaagctggcaccaagagc

SEQ ID NO: 2956542 - DNA, 25 bp, Homo sapien
agaacgcagcacgtggcaggcagct

SEQ ID NO: 2956543 - DNA, 25 bp, Homo sapien
gtgtaagcataccagcagctcagag

SEQ ID NO: 2956544 - DNA, 25 bp, Homo sapien
agacacagatacagggagaacgcag

SEQ ID NO: 2956545 - DNA, 25 bp, Homo sapien
gacctcatactggtggaagccagcc

SEQ ID NO: 2956546 - DNA, 25 bp, Homo sapien
tacatctcagctgcgagctccgggt

SEQ ID NO: 2956547 - DNA, 25 bp, Homo sapien
gccggagctcagtgtcatctaggga

SEQ ID NO: 2956548 - DNA, 25 bp, Homo sapien
ccgggcaaagttggagacctcatac

SEQ ID NO: 2956549 - DNA, 25 bp, Homo sapien
aacgccctggtcacactgcagtctg

SEQ ID NO: 2956550 - DNA, 25 bp, Homo sapien
ggccccaggttagaatgtcccacca

SEQ ID NO: 2956551 - DNA, 25 bp, Homo sapien
gttagaatgtcccaccatctcggcc

SEQ ID NO: 2956552 - DNA, 25 bp, Homo sapien
tcttcagaaggtcacaacgccctgg

SEQ ID NO: 2956553 - DNA, 25 bp, Homo sapien
tccaattgtgggtactgagcgcccc

SEQ ID NO: 2956554 - DNA, 25 bp, Homo sapien
aacgccaaggtactgaccacactgc

SEQ ID NO: 2956555 - DNA, 25 bp, Homo sapien
caacgccaaggtactgaccacactg

SEQ ID NO: 2956556 - DNA, 25 bp, Homo sapien
agtaagtccaattgtgggtactgag

SEQ ID NO: 2956557 - DNA, 25 bp, Homo sapien
cagattagaggcacatgacaccagg

SEQ ID NO: 2956558 - DNA, 25 bp, Homo sapien
gagtcaccctttctgtagttcacgg

SEQ ID NO: 2956559 - DNA, 25 bp, Homo sapien
tgagaaccctagtgcaaggtgcaac

SEQ ID NO: 2956560 - DNA, 25 bp, Homo sapien
aggagattctcatacacactaaagg

SEQ ID NO: 2956561 - DNA, 25 bp, Homo sapien
tccagtgtctggatccgagcctccc

SEQ ID NO: 2956562 - DNA, 25 bp, Homo sapien
cctggggcataaatcgtccatgggc

SEQ ID NO: 2956563 - DNA, 25 bp, Homo sapien
tggggcataaatcgtccatgggccc

SEQ ID NO: 2956564 - DNA, 25 bp, Homo sapien
cagtgtctggatccgagcctcccgg

SEQ ID NO: 2956565 - DNA, 25 bp, Homo sapien
cagggggacacgcttccgggtgcca

SEQ ID NO: 2956566 - DNA, 25 bp, Homo sapien
ggacacgcttccgggtgccatggcc

SEQ ID NO: 2956567 - DNA, 25 bp, Homo sapien
ggggacacgcttccgggtgccatgg

SEQ ID NO: 2956568 - DNA, 25 bp, Homo sapien
agggggacacgcttccgggtgccat

SEQ ID NO: 2956569 - DNA, 25 bp, Homo sapien
gaggaggctaacagggaccatacag

SEQ ID NO: 2956570 - DNA, 25 bp, Homo sapien
cagggaccatacagtatgtggcaag

SEQ ID NO: 2956571 - DNA, 25 bp, Homo sapien
tccaaattctacactgggatgcatt

SEQ ID NO: 2956572 - DNA, 25 bp, Homo sapien
gaaaaatcaccaaggagtcttagag

SEQ ID NO: 2956573 - DNA, 25 bp, Homo sapien
gtgagtgatccccacatcggtgcgt

SEQ ID NO: 2956574 - DNA, 25 bp, Homo sapien
acatcggtgcgtagccccagggcca

SEQ ID NO: 2956575 - DNA, 25 bp, Homo sapien
ctggtgagtgatccccacatcggtg

SEQ ID NO: 2956576 - DNA, 25 bp, Homo sapien
gtgatccccacatcggtgcgtagcc

SEQ ID NO: 2956577 - DNA, 25 bp, Homo sapien
aaagcagaaccaggccaatgggcca

SEQ ID NO: 2956578 - DNA, 25 bp, Homo sapien
ttcagtgctccctaaaaacaagtgg

SEQ ID NO: 2956579 - DNA, 25 bp, Homo sapien
tatctactgtgcttcctatgagagg

SEQ ID NO: 2956580 - DNA, 25 bp, Homo sapien
tcactcctattccactgagactgga

SEQ ID NO: 2956581 - DNA, 25 bp, Homo sapien
cacatagttggggtatggtgagagg

SEQ ID NO: 2956582 - DNA, 25 bp, Homo sapien
ggccacatagttggggtatggtgag

SEQ ID NO: 2956583 - DNA, 25 bp, Homo sapien
cagttcagcatggagatctcagcag

SEQ ID NO: 2956584 - DNA, 25 bp, Homo sapien
tctgggccacatagttggggtatgg

SEQ ID NO: 2956585 - DNA, 25 bp, Homo sapien
agctgcagtaggccccgctccagca

SEQ ID NO: 2956586 - DNA, 25 bp, Homo sapien
cacctccttgttcgctccaaacaca

SEQ ID NO: 2956587 - DNA, 25 bp, Homo sapien
tccttgttcgctccaaacacatccc

SEQ ID NO: 2956588 - DNA, 25 bp, Homo sapien
ttcgctccaaacacatcccacaggg

SEQ ID NO: 2956589 - DNA, 25 bp, Homo sapien
tggagagctgtagtcagggctccct

SEQ ID NO: 2956590 - DNA, 25 bp, Homo sapien
tgggtctgtggagagctgtagtcag

SEQ ID NO: 2956591 - DNA, 25 bp, Homo sapien
gggctccctggtatgcctcagcccc

SEQ ID NO: 2956592 - DNA, 25 bp, Homo sapien
ttctcacttctcctgggtctgtgga

SEQ ID NO: 2956593 - DNA, 25 bp, Homo sapien
cagcaagagagagtccagcacagcc

SEQ ID NO: 2956594 - DNA, 25 bp, Homo sapien
cacagccagaccctcccaggaacac

SEQ ID NO: 2956595 - DNA, 25 bp, Homo sapien
gtcagcaagagagagtccagcacag

SEQ ID NO: 2956596 - DNA, 25 bp, Homo sapien
cagaccctcccaggaacaccgaaga

SEQ ID NO: 2956597 - DNA, 25 bp, Homo sapien
cacaggggagggggttctctgctgc

SEQ ID NO: 2956598 - DNA, 25 bp, Homo sapien
acaggggagggggttctctgctgcc

SEQ ID NO: 2956599 - DNA, 25 bp, Homo sapien
tggcacaggggagggggttctctgc

SEQ ID NO: 2956600 - DNA, 25 bp, Homo sapien
ggggagggggttctctgctgccagg

SEQ ID NO: 2956601 - DNA, 25 bp, Homo sapien
cagggctgagcaataaccacaagga

SEQ ID NO: 2956602 - DNA, 25 bp, Homo sapien
agagatgtctgcagtaccgacccag

SEQ ID NO: 2956603 - DNA, 25 bp, Homo sapien
tttaaagtccactaatgagaggcac

SEQ ID NO: 2956604 - DNA, 25 bp, Homo sapien
tggtttcccgaagataagaggcaag

SEQ ID NO: 2956605 - DNA, 25 bp, Homo sapien
attaccacagggtcaaggaaggact

SEQ ID NO: 2956606 - DNA, 25 bp, Homo sapien
ttaccacagggtcaaggaaggactg

SEQ ID NO: 2956607 - DNA, 25 bp, Homo sapien
tattaccacagggtcaaggaaggac

SEQ ID NO: 2956608 - DNA, 25 bp, Homo sapien
catattaccacagggtcaaggaagg

SEQ ID NO: 2956609 - DNA, 25 bp, Homo sapien
gctccccgagcagcacgggtgaccc

SEQ ID NO: 2956610 - DNA, 25 bp, Homo sapien
tcggccccgtgctcgcttcttgaat

SEQ ID NO: 2956611 - DNA, 25 bp, Homo sapien
aatgtcaagatcaggggaagtctca

SEQ ID NO: 2956612 - DNA, 25 bp, Homo sapien
cgcttcttgaatgtcaagatcaggg

SEQ ID NO: 2956613 - DNA, 25 bp, Homo sapien
tgtccccaacttcatcaccaaaggg

SEQ ID NO: 2956614 - DNA, 25 bp, Homo sapien
tcaccccttttacttgcatccatgt

SEQ ID NO: 2956615 - DNA, 25 bp, Homo sapien
ttttacttgcatccatgtagagcag

SEQ ID NO: 2956616 - DNA, 25 bp, Homo sapien
catacccacatgtactatatgtccc

SEQ ID NO: 2956617 - DNA, 25 bp, Homo sapien
ttttatagtgatgaatgtctcacca

SEQ ID NO: 2956618 - DNA, 25 bp, Homo sapien
catgcctggccccttctgcttcttt

SEQ ID NO: 2956619 - DNA, 25 bp, Homo sapien
aaaattttttatagtgatgaatgtc

SEQ ID NO: 2956620 - DNA, 25 bp, Homo sapien
tagtgatgaatgtctcaccatgttg

SEQ ID NO: 2956621 - DNA, 25 bp, Homo sapien
gaggacacggcataaattattgctt

SEQ ID NO: 2956622 - DNA, 25 bp, Homo sapien
cagaggacacggcataaattattgc

SEQ ID NO: 2956623 - DNA, 25 bp, Homo sapien
acacggcataaattattgcttcatg

SEQ ID NO: 2956624 - DNA, 25 bp, Homo sapien
ttgacagaggacacggcataaatta

SEQ ID NO: 2956625 - DNA, 25 bp, Homo sapien
tcctcccagcgccacaactctgagc

SEQ ID NO: 2956626 - DNA, 25 bp, Homo sapien
cccagcgccacaactctgagcaact

SEQ ID NO: 2956627 - DNA, 25 bp, Homo sapien
cagcgccacaactctgagcaacttc

SEQ ID NO: 2956628 - DNA, 25 bp, Homo sapien
ctcccagcgccacaactctgagcaa

SEQ ID NO: 2956629 - DNA, 25 bp, Homo sapien
cttcaagagcgacggacccctagaa

SEQ ID NO: 2956630 - DNA, 25 bp, Homo sapien
accgatcaacttgggcggagacggc

SEQ ID NO: 2956631 - DNA, 25 bp, Homo sapien
actgcgtccacagcaaccggtgccc

SEQ ID NO: 2956632 - DNA, 25 bp, Homo sapien
gggcgcgcatccaccgatcaacttg

SEQ ID NO: 2956633 - DNA, 25 bp, Homo sapien
aggcctctaataatctggtcggagt

SEQ ID NO: 2956634 - DNA, 25 bp, Homo sapien
tcggagttattctgaggcgggaatc

SEQ ID NO: 2956635 - DNA, 25 bp, Homo sapien
aatctggtcggagttattctgaggc

SEQ ID NO: 2956636 - DNA, 25 bp, Homo sapien
gaggcgggaatccttctttagagac

SEQ ID NO: 2956637 - DNA, 25 bp, Homo sapien
aaataatcccatcaaggtggctggt

SEQ ID NO: 2956638 - DNA, 25 bp, Homo sapien
catgtccatggaagtcagtccgcta

SEQ ID NO: 2956639 - DNA, 25 bp, Homo sapien
tcatccagctggaaagtgcacgtgg

SEQ ID NO: 2956640 - DNA, 25 bp, Homo sapien
gagtttcttgaggaccagggtcaca

SEQ ID NO: 2956641 - DNA, 25 bp, Homo sapien
gccccttctatgtgctataaactac

SEQ ID NO: 2956642 - DNA, 25 bp, Homo sapien
gagagtgcttaccaagccccttcta

SEQ ID NO: 2956643 - DNA, 25 bp, Homo sapien
tcttaaagttaaattgctcctcgag

SEQ ID NO: 2956644 - DNA, 25 bp, Homo sapien
gccagtgcgcccagggatatatatg

SEQ ID NO: 2956645 - DNA, 25 bp, Homo sapien
aaggaatggattaagagttgcaaga

SEQ ID NO: 2956646 - DNA, 25 bp, Homo sapien
gaatgtcatctccttgtaggacatt

SEQ ID NO: 2956647 - DNA, 25 bp, Homo sapien
cattgctaacaggttcaggctcttc

SEQ ID NO: 2956648 - DNA, 25 bp, Homo sapien
aggctcttcctgaattgtgggtgtg

SEQ ID NO: 2956649 - DNA, 25 bp, Homo sapien
tgtgggtgtgggttgttcaggtccc

SEQ ID NO: 2956650 - DNA, 25 bp, Homo sapien
tcgcaggacgtgctacaaggtggca

SEQ ID NO: 2956651 - DNA, 25 bp, Homo sapien
agaccttcctcctaggatccatggg

SEQ ID NO: 2956652 - DNA, 25 bp, Homo sapien
tctgggtgatgacacgtttatcttc

SEQ ID NO: 2956653 - DNA, 25 bp, Homo sapien
tggcttcatcaggattcgcaggacg

SEQ ID NO: 2956654 - DNA, 25 bp, Homo sapien
tgaagccagggctgagactgggtgt

SEQ ID NO: 2956655 - DNA, 25 bp, Homo sapien
ccatgagttgaaagacagtgaagcc

SEQ ID NO: 2956656 - DNA, 25 bp, Homo sapien
atgagttgaaagacagtgaagccag

SEQ ID NO: 2956657 - DNA, 25 bp, Homo sapien
aagccagggctgagactgggtgtac

SEQ ID NO: 2956658 - DNA, 25 bp, Homo sapien
ttaaaatcctggagactccccaaga

SEQ ID NO: 2956659 - DNA, 25 bp, Homo sapien
tcttaaaatcctggagactccccaa

SEQ ID NO: 2956660 - DNA, 25 bp, Homo sapien
aaaatcctggagactccccaagatg

SEQ ID NO: 2956661 - DNA, 25 bp, Homo sapien
aatcctggagactccccaagatgtg

SEQ ID NO: 2956662 - DNA, 25 bp, Homo sapien
cagggctgtgttacgctgccagttt

SEQ ID NO: 2956663 - DNA, 25 bp, Homo sapien
cagagatgagggtcatcagacaggg

SEQ ID NO: 2956664 - DNA, 25 bp, Homo sapien
gtgaggtaggtatccgctcagccag

SEQ ID NO: 2956665 - DNA, 25 bp, Homo sapien
acagggtgaggtaggtatccgctca

SEQ ID NO: 2956666 - DNA, 25 bp, Homo sapien
gagcagctcactcactggcttcttt

SEQ ID NO: 2956667 - DNA, 25 bp, Homo sapien
gcagctcactcactggcttctttag

SEQ ID NO: 2956668 - DNA, 25 bp, Homo sapien
tcactcactggcttctttaggtgtt

SEQ ID NO: 2956669 - DNA, 25 bp, Homo sapien
gctcactcactggcttctttaggtg

SEQ ID NO: 2956670 - DNA, 25 bp, Homo sapien
gatccgtctgtaggtctccccggtg

SEQ ID NO: 2956671 - DNA, 25 bp, Homo sapien
tatcacgccgggttggaagtgtgca

SEQ ID NO: 2956672 - DNA, 25 bp, Homo sapien
gtgtgcagtcaatgagctcccgctc

SEQ ID NO: 2956673 - DNA, 25 bp, Homo sapien
cgctcctcctggatccgtctgtagg

SEQ ID NO: 2956674 - DNA, 25 bp, Homo sapien
catctcccaagtattccagtcgact

SEQ ID NO: 2956675 - DNA, 25 bp, Homo sapien
ggtcatgaccagacctgtcatctca

SEQ ID NO: 2956676 - DNA, 25 bp, Homo sapien
agtcgactccagaacccactgttct

SEQ ID NO: 2956677 - DNA, 25 bp, Homo sapien
tccatgaggccacgctgagtttttg

SEQ ID NO: 2956678 - DNA, 25 bp, Homo sapien
tcagaaacagactccgatcccaggt

SEQ ID NO: 2956679 - DNA, 25 bp, Homo sapien
tatgaagcgtccctctgggctggta

SEQ ID NO: 2956680 - DNA, 25 bp, Homo sapien
ccttgcgtcggtagatcagaaacag

SEQ ID NO: 2956681 - DNA, 25 bp, Homo sapien
ccaggtgtagcggtatgaagcgtcc

SEQ ID NO: 2956682 - DNA, 25 bp, Homo sapien
gaaaggtaagatgagctgactgaag

SEQ ID NO: 2956683 - DNA, 25 bp, Homo sapien
agaaaggtaagatgagctgactgaa

SEQ ID NO: 2956684 - DNA, 25 bp, Homo sapien
ctttcaaacactgtgtagtcttcca

SEQ ID NO: 2956685 - DNA, 25 bp, Homo sapien
tccacagtaacagccgagaagggcc

SEQ ID NO: 2956686 - DNA, 25 bp, Homo sapien
tttcaaacactgtgtagtcttccac

SEQ ID NO: 2956687 - DNA, 25 bp, Homo sapien
ttcaaacactgtgtagtcttccaca

SEQ ID NO: 2956688 - DNA, 25 bp, Homo sapien
gctgtgtcttcagaggagcttccct

SEQ ID NO: 2956689 - DNA, 25 bp, Homo sapien
gtgtcttcagaggagcttccctgac

SEQ ID NO: 2956690 - DNA, 25 bp, Homo sapien
tatgctgtgtcttcagaggagcttc

SEQ ID NO: 2956691 - DNA, 25 bp, Homo sapien
aagtatgctgtgtcttcagaggagc

SEQ ID NO: 2956692 - DNA, 25 bp, Homo sapien
ctgtggattactgcctctgatccag

SEQ ID NO: 2956693 - DNA, 25 bp, Homo sapien
cagagaagggccgagaataggcatg

SEQ ID NO: 2956694 - DNA, 25 bp, Homo sapien
tctgatccagcaagctggcttccca

SEQ ID NO: 2956695 - DNA, 25 bp, Homo sapien
cttgtcctgtggattactgcctctg

SEQ ID NO: 2956696 - DNA, 25 bp, Homo sapien
gctgtcaccattttcagacgtgctg

SEQ ID NO: 2956697 - DNA, 25 bp, Homo sapien
gcttatgacactcgcagccttgtga

SEQ ID NO: 2956698 - DNA, 25 bp, Homo sapien
gaatgcacgaccagataaaaaccca

SEQ ID NO: 2956699 - DNA, 25 bp, Homo sapien
tgcaggctgctggtaactgccagtc

SEQ ID NO: 2956700 - DNA, 25 bp, Homo sapien
aggtcaagtgagcagcaatcccaac

SEQ ID NO: 2956701 - DNA, 25 bp, Homo sapien
tcaagtgagcagcaatcccaacctg

SEQ ID NO: 2956702 - DNA, 25 bp, Homo sapien
aaaggtcaagtgagcagcaatccca

SEQ ID NO: 2956703 - DNA, 25 bp, Homo sapien
caaaggtcaagtgagcagcaatccc

SEQ ID NO: 2956704 - DNA, 25 bp, Homo sapien
tcaaagtaaaatcgctgcatcctgt

SEQ ID NO: 2956705 - DNA, 25 bp, Homo sapien
taaggtcttggaaagtgtccggctg

SEQ ID NO: 2956706 - DNA, 25 bp, Homo sapien
tgctgccgtcgccagtcataccaaa

SEQ ID NO: 2956707 - DNA, 25 bp, Homo sapien
ggccacggtgccattattgaccaca

SEQ ID NO: 2956708 - DNA, 25 bp, Homo sapien
gagaccgcgtggagattgacctgca

SEQ ID NO: 2956709 - DNA, 25 bp, Homo sapien
catcctcaaaaacgtcctgggtcag

SEQ ID NO: 2956710 - DNA, 25 bp, Homo sapien
gaagaccccagcagtcaaagacttg

SEQ ID NO: 2956711 - DNA, 25 bp, Homo sapien
gagtaggatgggttcgaaactccca

SEQ ID NO: 2956712 - DNA, 25 bp, Homo sapien
acttcgcgaacgacggtgactgcct

SEQ ID NO: 2956713 - DNA, 25 bp, Homo sapien
cggaggatttctgtgccggaacaag

SEQ ID NO: 2956714 - DNA, 25 bp, Homo sapien
tccacaggtgatggtgtgcgctccg

SEQ ID NO: 2956715 - DNA, 25 bp, Homo sapien
tcttcctcggtgagataggcatcca

SEQ ID NO: 2956716 - DNA, 25 bp, Homo sapien
ggacccttgacgcagggcacacatg

SEQ ID NO: 2956717 - DNA, 25 bp, Homo sapien
ccttgacgcagggcacacatgaggg

SEQ ID NO: 2956718 - DNA, 25 bp, Homo sapien
tgacgcagggcacacatgagggggc

SEQ ID NO: 2956719 - DNA, 25 bp, Homo sapien
acccttgacgcagggcacacatgag

SEQ ID NO: 2956720 - DNA, 25 bp, Homo sapien
cgccacagttggtgcaggctttgca

SEQ ID NO: 2956721 - DNA, 25 bp, Homo sapien
catgatgctcttccgctgaggactc

SEQ ID NO: 2956722 - DNA, 25 bp, Homo sapien
ggctcctaaagcgtggtaacagctc

SEQ ID NO: 2956723 - DNA, 25 bp, Homo sapien
ggcagggtcatgtactggcgccaca

SEQ ID NO: 2956724 - DNA, 25 bp, Homo sapien
gttgagcctcatcaacgcatcctct

SEQ ID NO: 2956725 - DNA, 25 bp, Homo sapien
ttgttgagcctcatcaacgcatcct

SEQ ID NO: 2956726 - DNA, 25 bp, Homo sapien
catcaacgcatcctctctgtggttc

SEQ ID NO: 2956727 - DNA, 25 bp, Homo sapien
ctcatcaacgcatcctctctgtggt

SEQ ID NO: 2956728 - DNA, 25 bp, Homo sapien
cacattcaaatagatggtctccttc

SEQ ID NO: 2956729 - DNA, 25 bp, Homo sapien
tgtcaatcacatctcgccacagctg

SEQ ID NO: 2956730 - DNA, 25 bp, Homo sapien
tcttcaggcacattcaaatagatgg

SEQ ID NO: 2956731 - DNA, 25 bp, Homo sapien
ttgctcttcaggcacattcaaatag

SEQ ID NO: 2956732 - DNA, 25 bp, Homo sapien
ccttcacttccatgataggaggtga

SEQ ID NO: 2956733 - DNA, 25 bp, Homo sapien
cacttccatgataggaggtgatttt

SEQ ID NO: 2956734 - DNA, 25 bp, Homo sapien
ctttcccgagcagcttggctccttt

SEQ ID NO: 2956735 - DNA, 25 bp, Homo sapien
taccttcacttccatgataggaggt

SEQ ID NO: 2956736 - DNA, 25 bp, Homo sapien
tgcagattttatgactttcttgtca

SEQ ID NO: 2956737 - DNA, 25 bp, Homo sapien
aagaaaacctgtcctgacttgcaga

SEQ ID NO: 2956738 - DNA, 25 bp, Homo sapien
gatgtcaggggtagggtcttccaaa

SEQ ID NO: 2956739 - DNA, 25 bp, Homo sapien
tctatgggttcttgagaagagagga

SEQ ID NO: 2956740 - DNA, 25 bp, Homo sapien
tgttctcccaaggaacgcatctgcc

SEQ ID NO: 2956741 - DNA, 25 bp, Homo sapien
caaggaacgcatctgccaggatgca

SEQ ID NO: 2956742 - DNA, 25 bp, Homo sapien
agttgatgggaatgcaccctgcatg

SEQ ID NO: 2956743 - DNA, 25 bp, Homo sapien
ttgatgggaatgcaccctgcatggt

SEQ ID NO: 2956744 - DNA, 25 bp, Homo sapien
agccatggaagggttgacgttgacc

SEQ ID NO: 2956745 - DNA, 25 bp, Homo sapien
taaggacctgctacttaagaacgga

SEQ ID NO: 2956746 - DNA, 25 bp, Homo sapien
gacgtcgccaatagacatactgaca

SEQ ID NO: 2956747 - DNA, 25 bp, Homo sapien
tgatgtcaccagtggcaaatggaac

SEQ ID NO: 2956748 - DNA, 25 bp, Homo sapien
ctacaggtgagtgtcaccatgcctg

SEQ ID NO: 2956749 - DNA, 25 bp, Homo sapien
ggactacaggtgagtgtcaccatgc

SEQ ID NO: 2956750 - DNA, 25 bp, Homo sapien
agcgattattgtgcctcagccaccc

SEQ ID NO: 2956751 - DNA, 25 bp, Homo sapien
gcgattattgtgcctcagccaccca

SEQ ID NO: 2956752 - DNA, 25 bp, Homo sapien
gcacctatatatgaactatgctgtg

SEQ ID NO: 2956753 - DNA, 25 bp, Homo sapien
aacatcacaggcagagtttactctg

SEQ ID NO: 2956754 - DNA, 25 bp, Homo sapien
tatgctgtgagagaatagctggaga

SEQ ID NO: 2956755 - DNA, 25 bp, Homo sapien
caacatcacaggcagagtttactct

SEQ ID NO: 2956756 - DNA, 25 bp, Homo sapien
ggaccatcaggtcagtcaccagggt

SEQ ID NO: 2956757 - DNA, 25 bp, Homo sapien
caggaccatcaggtcagtcaccagg

SEQ ID NO: 2956758 - DNA, 25 bp, Homo sapien
aagcctcctcgacattctttatggg

SEQ ID NO: 2956759 - DNA, 25 bp, Homo sapien
ctgcagaggcgcaaagcctcctcga

SEQ ID NO: 2956760 - DNA, 25 bp, Homo sapien
tccagaaggttgcttgggcccgaga

SEQ ID NO: 2956761 - DNA, 25 bp, Homo sapien
ttccagaaggttgcttgggcccgag

SEQ ID NO: 2956762 - DNA, 25 bp, Homo sapien
ccagaaggttgcttgggcccgagag

SEQ ID NO: 2956763 - DNA, 25 bp, Homo sapien
tcacactttgtcatacttggtgatg

SEQ ID NO: 2956764 - DNA, 25 bp, Homo sapien
cttggtgatgacacttcgggaagac

SEQ ID NO: 2956765 - DNA, 25 bp, Homo sapien
gtgatgacacttcgggaagacctgg

SEQ ID NO: 2956766 - DNA, 25 bp, Homo sapien
cacactttgtcatacttggtgatga

SEQ ID NO: 2956767 - DNA, 25 bp, Homo sapien
agcccgagtagcctctgcggtgacc

SEQ ID NO: 2956768 - DNA, 25 bp, Homo sapien
gtagcagctcttcccgcgtgcgttt

SEQ ID NO: 2956769 - DNA, 25 bp, Homo sapien
gcgtgcgtttgcctcctagccagcg

SEQ ID NO: 2956770 - DNA, 25 bp, Homo sapien
tcgggagcgtctccagagccatcca

SEQ ID NO: 2956771 - DNA, 25 bp, Homo sapien
tcagatccagcctgagcagtgggga

SEQ ID NO: 2956772 - DNA, 25 bp, Homo sapien
agtggggaatgacagtgcccttctt

SEQ ID NO: 2956773 - DNA, 25 bp, Homo sapien
gagcagtggggaatgacagtgccct

SEQ ID NO: 2956774 - DNA, 25 bp, Homo sapien
gggaatgacagtgcccttcttgatg

SEQ ID NO: 2956775 - DNA, 25 bp, Homo sapien
cggccgataaggcggtggcggtagc

SEQ ID NO: 2956776 - DNA, 25 bp, Homo sapien
tgggtatggaattactgcagtgacc

SEQ ID NO: 2956777 - DNA, 25 bp, Homo sapien
ggtatggaattactgcagtgacctt

SEQ ID NO: 2956778 - DNA, 25 bp, Homo sapien
ctgggtatggaattactgcagtgac

SEQ ID NO: 2956779 - DNA, 25 bp, Homo sapien
cgaacacgatatgcccagaaataaa

SEQ ID NO: 2956780 - DNA, 25 bp, Homo sapien
gggttttatcgaacacgatatgccc

SEQ ID NO: 2956781 - DNA, 25 bp, Homo sapien
acacgatatgcccagaaataaaagg

SEQ ID NO: 2956782 - DNA, 25 bp, Homo sapien
tatcgaacacgatatgcccagaaat

SEQ ID NO: 2956783 - DNA, 25 bp, Homo sapien
tctttccttccagcgggtcgtgggc

SEQ ID NO: 2956784 - DNA, 25 bp, Homo sapien
ccatggtcaggccactgggcaacag

SEQ ID NO: 2956785 - DNA, 25 bp, Homo sapien
gggctcagagtattaaatgggcccg

SEQ ID NO: 2956786 - DNA, 25 bp, Homo sapien
agccatggtcaggccactgggcaac

SEQ ID NO: 2956787 - DNA, 25 bp, Homo sapien
ggtggggctcagagtattaaatggg

SEQ ID NO: 2956788 - DNA, 25 bp, Homo sapien
ctgccgtgttagcagagcagctgca

SEQ ID NO: 2956789 - DNA, 25 bp, Homo sapien
ctgcatccttgggttccacatgggg

SEQ ID NO: 2956790 - DNA, 25 bp, Homo sapien
cagctgcatccttgggttccacatg

SEQ ID NO: 2956791 - DNA, 25 bp, Homo sapien
gccgtgttagcagagcagctgcatc

SEQ ID NO: 2956792 - DNA, 25 bp, Homo sapien
agggccactgtggcgaggtcacagt

SEQ ID NO: 2956793 - DNA, 25 bp, Homo sapien
tgagggccactgtggcgaggtcaca

SEQ ID NO: 2956794 - DNA, 25 bp, Homo sapien
ctgagggccactgtggcgaggtcac

SEQ ID NO: 2956795 - DNA, 25 bp, Homo sapien
cgcccccgccggaggtggagggctg

SEQ ID NO: 2956796 - DNA, 25 bp, Homo sapien
tggcgccggagtgcggaggtcgtca

SEQ ID NO: 2956797 - DNA, 25 bp, Homo sapien
ctggcgccggagtgcggaggtcgtc

SEQ ID NO: 2956798 - DNA, 25 bp, Homo sapien
ggcgccggagtgcggaggtcgtcat

SEQ ID NO: 2956799 - DNA, 25 bp, Homo sapien
caggtagtccagcaatgttagagcc

SEQ ID NO: 2956800 - DNA, 25 bp, Homo sapien
aaggtcaggtcagcgatctcggaca

SEQ ID NO: 2956801 - DNA, 25 bp, Homo sapien
cagcatgcccatgacttcggtgaag

SEQ ID NO: 2956802 - DNA, 25 bp, Homo sapien
tgttagagccttgtacacgtgccgc

SEQ ID NO: 2956803 - DNA, 25 bp, Homo sapien
gtcggaggtatagcggggtgacgaa

SEQ ID NO: 2956804 - DNA, 25 bp, Homo sapien
ggtcggaggtatagcggggtgacga

SEQ ID NO: 2956805 - DNA, 25 bp, Homo sapien
caggtcggaggtatagcggggtgac

SEQ ID NO: 2956806 - DNA, 25 bp, Homo sapien
tccaggtcggaggtatagcggggtg

SEQ ID NO: 2956807 - DNA, 25 bp, Homo sapien
cctcttcccctgacgtctgaggccg

SEQ ID NO: 2956808 - DNA, 25 bp, Homo sapien
cttcccctgacgtctgaggccgggc

SEQ ID NO: 2956809 - DNA, 25 bp, Homo sapien
ctcttcccctgacgtctgaggccgg

SEQ ID NO: 2956810 - DNA, 25 bp, Homo sapien
tcctcttcccctgacgtctgaggcc

SEQ ID NO: 2956811 - DNA, 25 bp, Homo sapien
tgctcctgccggctcaggcgcagag

SEQ ID NO: 2956812 - DNA, 25 bp, Homo sapien
cttctcgtgctcctgccggctcagg

SEQ ID NO: 2956813 - DNA, 25 bp, Homo sapien
cgtgctcctgccggctcaggcgcag

SEQ ID NO: 2956814 - DNA, 25 bp, Homo sapien
tctcgtgctcctgccggctcaggcg

SEQ ID NO: 2956815 - DNA, 25 bp, Homo sapien
tctgtcccgctgatggtggaccacg

SEQ ID NO: 2956816 - DNA, 25 bp, Homo sapien
aggctctctgtcccgctgatggtgg

SEQ ID NO: 2956817 - DNA, 25 bp, Homo sapien
cggcccctgcaccattggccatggg

SEQ ID NO: 2956818 - DNA, 25 bp, Homo sapien
tgatggtggaccacggcccctgcac

SEQ ID NO: 2956819 - DNA, 25 bp, Homo sapien
ggccagggcaggtacgaagatgtca

SEQ ID NO: 2956820 - DNA, 25 bp, Homo sapien
gggcaggtacgaagatgtcagccaa

SEQ ID NO: 2956821 - DNA, 25 bp, Homo sapien
aggtacgaagatgtcagccaagtcc

SEQ ID NO: 2956822 - DNA, 25 bp, Homo sapien
ccagggcaggtacgaagatgtcagc

SEQ ID NO: 2956823 - DNA, 25 bp, Homo sapien
ctgaggggatcggagaccaggggtc

SEQ ID NO: 2956824 - DNA, 25 bp, Homo sapien
aggggatcggagaccaggggtctgc

SEQ ID NO: 2956825 - DNA, 25 bp, Homo sapien
tgaggggatcggagaccaggggtct

SEQ ID NO: 2956826 - DNA, 25 bp, Homo sapien
gaggggatcggagaccaggggtctg

SEQ ID NO: 2956827 - DNA, 25 bp, Homo sapien
gaggctccccaagggtcagccccag

SEQ ID NO: 2956828 - DNA, 25 bp, Homo sapien
ggaggctccccaagggtcagcccca

SEQ ID NO: 2956829 - DNA, 25 bp, Homo sapien
cagggaggctccccaagggtcagcc

SEQ ID NO: 2956830 - DNA, 25 bp, Homo sapien
caggtgtgtcggaggtctccaggga

SEQ ID NO: 2956831 - DNA, 25 bp, Homo sapien
ctgtggattctggaggtttggcaaa

SEQ ID NO: 2956832 - DNA, 25 bp, Homo sapien
ctctgtggattctggaggtttggca

SEQ ID NO: 2956833 - DNA, 25 bp, Homo sapien
ggtctctgtggattctggaggtttg

SEQ ID NO: 2956834 - DNA, 25 bp, Homo sapien
aatgggtcaaaggtcgaggcaccac

SEQ ID NO: 2956835 - DNA, 25 bp, Homo sapien
tgggttagtgcttcccctagtatgc

SEQ ID NO: 2956836 - DNA, 25 bp, Homo sapien
agtcaaggttgaccaaggaggaagc

SEQ ID NO: 2956837 - DNA, 25 bp, Homo sapien
agtccggcaagctcgggcctctttg

SEQ ID NO: 2956838 - DNA, 25 bp, Homo sapien
ggtgccttgaccaacgagtcaaggt

SEQ ID NO: 2956839 - DNA, 25 bp, Homo sapien
ctcgcccgcgccgaacgggttggtg

SEQ ID NO: 2956840 - DNA, 25 bp, Homo sapien
atctggtttagcgtcggcctgcccg

SEQ ID NO: 2956841 - DNA, 25 bp, Homo sapien
agggtcaagccagctggcacgctgc

SEQ ID NO: 2956842 - DNA, 25 bp, Homo sapien
cgagccggtgcgcatctggtttagc

SEQ ID NO: 2956843 - DNA, 25 bp, Homo sapien
cggcccggctgagctcggcgtgggc

SEQ ID NO: 2956844 - DNA, 25 bp, Homo sapien
cagcggctgcggtgcgaaggctccg

SEQ ID NO: 2956845 - DNA, 25 bp, Homo sapien
ctccggcctgcgggaagacgctaac

SEQ ID NO: 2956846 - DNA, 25 bp, Homo sapien
cccggctgagctcggcgtgggcagc

SEQ ID NO: 2956847 - DNA, 25 bp, Homo sapien
gcgcaggccggtatgggacggggcg

SEQ ID NO: 2956848 - DNA, 25 bp, Homo sapien
gggccgcggagcgtccggcgcaggc

SEQ ID NO: 2956849 - DNA, 25 bp, Homo sapien
cggggccgcggagcgtccggcgcag

SEQ ID NO: 2956850 - DNA, 25 bp, Homo sapien
gcaggcgcaggccggtatgggacgg

SEQ ID NO: 2956851 - DNA, 25 bp, Homo sapien
gccgcgggataccagccgccactgg

SEQ ID NO: 2956852 - DNA, 25 bp, Homo sapien
taccagccgccactggctcggcgtt

SEQ ID NO: 2956853 - DNA, 25 bp, Homo sapien
cagtttctagctcccgggccgtggt

SEQ ID NO: 2956854 - DNA, 25 bp, Homo sapien
gtggtccgcgtccagcttccagagc

SEQ ID NO: 2956855 - DNA, 25 bp, Homo sapien
aacgagggttccagtctttattatg

SEQ ID NO: 2956856 - DNA, 25 bp, Homo sapien
gagggttccagtctttattatgcgg

SEQ ID NO: 2956857 - DNA, 25 bp, Homo sapien
gggttccagtctttattatgcgggc

SEQ ID NO: 2956858 - DNA, 25 bp, Homo sapien
gttccagtctttattatgcgggcgt

SEQ ID NO: 2956859 - DNA, 25 bp, Homo sapien
cagtttcctaaacagccggtgatcc

SEQ ID NO: 2956860 - DNA, 25 bp, Homo sapien
gcagcatctggaagcgaaggtgcct

SEQ ID NO: 2956861 - DNA, 25 bp, Homo sapien
tgaccgaattgagtgacagcctggc

SEQ ID NO: 2956862 - DNA, 25 bp, Homo sapien
tgagccccacagattatgtagccgg

SEQ ID NO: 2956863 - DNA, 25 bp, Homo sapien
tccagtggtccagtgatcagggagc

SEQ ID NO: 2956864 - DNA, 25 bp, Homo sapien
tcctgtgtggctaagactgagtttc

SEQ ID NO: 2956865 - DNA, 25 bp, Homo sapien
aaaaatgggagtagtgccggctgca

SEQ ID NO: 2956866 - DNA, 25 bp, Homo sapien
ggtgagatacctgtgcaatcgcact

SEQ ID NO: 2956867 - DNA, 25 bp, Homo sapien
gactctggtggaaggccatttgtcc

SEQ ID NO: 2956868 - DNA, 25 bp, Homo sapien
cgactctggtggaaggccatttgtc

SEQ ID NO: 2956869 - DNA, 25 bp, Homo sapien
cctgtttgtaactgcattgtgggac

SEQ ID NO: 2956870 - DNA, 25 bp, Homo sapien
gaaccctgtaagtctgactcctgag

SEQ ID NO: 2956871 - DNA, 25 bp, Homo sapien
tgattcttgttagggtcaaaccttg

SEQ ID NO: 2956872 - DNA, 25 bp, Homo sapien
cttggagcagaactttgaaccctgt

SEQ ID NO: 2956873 - DNA, 25 bp, Homo sapien
gaggcagaggtacagtttgtgcaaa

SEQ ID NO: 2956874 - DNA, 25 bp, Homo sapien
caaaggtcccgtggcttgtcagtga

SEQ ID NO: 2956875 - DNA, 25 bp, Homo sapien
atcacatttgtgaagccatggagaa

SEQ ID NO: 2956876 - DNA, 25 bp, Homo sapien
gcaaaggatgaaggcttccctgagg

SEQ ID NO: 2956877 - DNA, 25 bp, Homo sapien
cgggcacctacggagccgcgggcgg

SEQ ID NO: 2956878 - DNA, 25 bp, Homo sapien
tcttcgccgggacttgggacagtgt

SEQ ID NO: 2956879 - DNA, 25 bp, Homo sapien
gcgggccgggcacctacggagccgc

SEQ ID NO: 2956880 - DNA, 25 bp, Homo sapien
cagtgtggctggtctccgagcgtcg

SEQ ID NO: 2956881 - DNA, 25 bp, Homo sapien
ggctgctcggggccgtgggcccggc

SEQ ID NO: 2956882 - DNA, 25 bp, Homo sapien
ctgctcggggccgtgggcccggccg

SEQ ID NO: 2956883 - DNA, 25 bp, Homo sapien
gctgctcggggccgtgggcccggcc

SEQ ID NO: 2956884 - DNA, 25 bp, Homo sapien
tcgcggcgaggcctgcaccggcgcg

SEQ ID NO: 2956885 - DNA, 25 bp, Homo sapien
gcgaggcctgcaccggcgcggggca

SEQ ID NO: 2956886 - DNA, 25 bp, Homo sapien
gctcgcggcgaggcctgcaccggcg

SEQ ID NO: 2956887 - DNA, 25 bp, Homo sapien
gcgcggggcagcagaaggacgcggc

SEQ ID NO: 2956888 - DNA, 25 bp, Homo sapien
tggcactggggaccggtgtccggaa

SEQ ID NO: 2956889 - DNA, 25 bp, Homo sapien
gggagtgccctaggggcccgctcgc

SEQ ID NO: 2956890 - DNA, 25 bp, Homo sapien
gcaggggtggtccagactggcactg

SEQ ID NO: 2956891 - DNA, 25 bp, Homo sapien
gcaggcaggcgcagggagtgcccta

SEQ ID NO: 2956892 - DNA, 25 bp, Homo sapien
gggaatcagagacctcagggagttc

SEQ ID NO: 2956893 - DNA, 25 bp, Homo sapien
agttcagcctggaagtgggactgca

SEQ ID NO: 2956894 - DNA, 25 bp, Homo sapien
cctcagggagttcagcctggaagtg

SEQ ID NO: 2956895 - DNA, 25 bp, Homo sapien
tcagagacctcagggagttcagcct

SEQ ID NO: 2956896 - DNA, 25 bp, Homo sapien
ggtcctgggccagactccaggacac

SEQ ID NO: 2956897 - DNA, 25 bp, Homo sapien
tgctgggactcctgtggggccaggt

SEQ ID NO: 2956898 - DNA, 25 bp, Homo sapien
caggtcctgggccagactccaggac

SEQ ID NO: 2956899 - DNA, 25 bp, Homo sapien
gggccaggtcctgggccagactcca

SEQ ID NO: 2956900 - DNA, 25 bp, Homo sapien
ggagaggtggctcattgggggctcc

SEQ ID NO: 2956901 - DNA, 25 bp, Homo sapien
ggctcattgggggctccttgccagg

SEQ ID NO: 2956902 - DNA, 25 bp, Homo sapien
gtggctcattgggggctccttgcca

SEQ ID NO: 2956903 - DNA, 25 bp, Homo sapien
tggctcattgggggctccttgccag

SEQ ID NO: 2956904 - DNA, 25 bp, Homo sapien
gaactactgaccgtcgcacttcggt

SEQ ID NO: 2956905 - DNA, 25 bp, Homo sapien
gggcactgaactactgaccgtcgca

SEQ ID NO: 2956906 - DNA, 25 bp, Homo sapien
tgaccgtcgcacttcggtccttgtc

SEQ ID NO: 2956907 - DNA, 25 bp, Homo sapien
cactgaactactgaccgtcgcactt

SEQ ID NO: 2956908 - DNA, 25 bp, Homo sapien
gggtgtagatgaaggatggcttcct

SEQ ID NO: 2956909 - DNA, 25 bp, Homo sapien
ggtgtagatgaaggatggcttcctt

SEQ ID NO: 2956910 - DNA, 25 bp, Homo sapien
gatgaaggatggcttcctttccctc

SEQ ID NO: 2956911 - DNA, 25 bp, Homo sapien
ctggggtgtagatgaaggatggctt

SEQ ID NO: 2956912 - DNA, 25 bp, Homo sapien
cacaggattgtaggcatgttgtagg

SEQ ID NO: 2956913 - DNA, 25 bp, Homo sapien
attgtaggcatgttgtaggaggtat

SEQ ID NO: 2956914 - DNA, 25 bp, Homo sapien
cagtccacaggattgtaggcatgtt

SEQ ID NO: 2956915 - DNA, 25 bp, Homo sapien
tctcgtggatcaggcggttggggac

SEQ ID NO: 2956916 - DNA, 25 bp, Homo sapien
ggaccccagcgattccaggcagggc

SEQ ID NO: 2956917 - DNA, 25 bp, Homo sapien
aggaccccagcgattccaggcaggg

SEQ ID NO: 2956918 - DNA, 25 bp, Homo sapien
ctggccttgtcgaaggcttcctgtc

SEQ ID NO: 2956919 - DNA, 25 bp, Homo sapien
tgagaggaaaatcggcttgttttcc

SEQ ID NO: 2956920 - DNA, 25 bp, Homo sapien
tcctcactgagcaggcggccaatct

SEQ ID NO: 2956921 - DNA, 25 bp, Homo sapien
tcacggtctaccttcacactcacaa

SEQ ID NO: 2956922 - DNA, 25 bp, Homo sapien
cttccatcatgtggcaccagtggca

SEQ ID NO: 2956923 - DNA, 25 bp, Homo sapien
tgcacgaacgtcatgtacaccttgt

SEQ ID NO: 2956924 - DNA, 25 bp, Homo sapien
cggaagccgactcgggtcaagccat

SEQ ID NO: 2956925 - DNA, 25 bp, Homo sapien
ggttgggagtcagccacacattcat

SEQ ID NO: 2956926 - DNA, 25 bp, Homo sapien
tgttctcgtattctcagcaacactg

SEQ ID NO: 2956927 - DNA, 25 bp, Homo sapien
taggtgcccccgacaaagggctgga

SEQ ID NO: 2956928 - DNA, 25 bp, Homo sapien
gaagccaccgtattcctcatcatag

SEQ ID NO: 2956929 - DNA, 25 bp, Homo sapien
ctggaagcagcgattgttcacggtg

SEQ ID NO: 2956930 - DNA, 25 bp, Homo sapien
ctgatctctgatcgggccagcaggg

SEQ ID NO: 2956931 - DNA, 25 bp, Homo sapien
gcagctggcggtcacccacgctgat

SEQ ID NO: 2956932 - DNA, 25 bp, Homo sapien
ggcccgagagccatcctgagtcagt

SEQ ID NO: 2956933 - DNA, 25 bp, Homo sapien
catcattttcagggtatgcaaggcc

SEQ ID NO: 2956934 - DNA, 25 bp, Homo sapien
ggatgcccccgttagccatcatttt

SEQ ID NO: 2956935 - DNA, 25 bp, Homo sapien
ctgagccagtaggagaacaggaagc

SEQ ID NO: 2956936 - DNA, 25 bp, Homo sapien
tgcggatacaaagctggaggccagt

SEQ ID NO: 2956937 - DNA, 25 bp, Homo sapien
ctgtgcggatacaaagctggaggcc

SEQ ID NO: 2956938 - DNA, 25 bp, Homo sapien
tgctgcccctccagggaacacccag

SEQ ID NO: 2956939 - DNA, 25 bp, Homo sapien
ccagggaacacccagtgcccgtcac

SEQ ID NO: 2956940 - DNA, 25 bp, Homo sapien
aaggcctgcgaataggccacagcga

SEQ ID NO: 2956941 - DNA, 25 bp, Homo sapien
tggaaggcctgcgaataggccacag

SEQ ID NO: 2956942 - DNA, 25 bp, Homo sapien
ggcctgcgaataggccacagcgagc

SEQ ID NO: 2956943 - DNA, 25 bp, Homo sapien
gaaggcctgcgaataggccacagcg

SEQ ID NO: 2956944 - DNA, 25 bp, Homo sapien
ccagagtgagatgcctgttctctgg

SEQ ID NO: 2956945 - DNA, 25 bp, Homo sapien
gcagccagagtgagatgcctgttct

SEQ ID NO: 2956946 - DNA, 25 bp, Homo sapien
agccagagtgagatgcctgttctct

SEQ ID NO: 2956947 - DNA, 25 bp, Homo sapien
gggcagccagagtgagatgcctgtt

SEQ ID NO: 2956948 - DNA, 25 bp, Homo sapien
tcagagtagaattcatcaccagaga

SEQ ID NO: 2956949 - DNA, 25 bp, Homo sapien
caggctccgagccacgtactgcagg

SEQ ID NO: 2956950 - DNA, 25 bp, Homo sapien
ccgagccacgtactgcaggatgcct

SEQ ID NO: 2956951 - DNA, 25 bp, Homo sapien
tgcctttggccacgtcagagtagaa

SEQ ID NO: 2956952 - DNA, 25 bp, Homo sapien
tggggaggggagagttggctggccc

SEQ ID NO: 2956953 - DNA, 25 bp, Homo sapien
gaggggagagttggctggccccggc

SEQ ID NO: 2956954 - DNA, 25 bp, Homo sapien
tgtggggaggggagagttggctggc

SEQ ID NO: 2956955 - DNA, 25 bp, Homo sapien
ggagagttggctggccccggcccac

SEQ ID NO: 2956956 - DNA, 25 bp, Homo sapien
agctgctgaacctctttgaccgtcc

SEQ ID NO: 2956957 - DNA, 25 bp, Homo sapien
tctgtgaggccgtagtgcttcatga

SEQ ID NO: 2956958 - DNA, 25 bp, Homo sapien
tcttctgcgctatagaagcctccgg

SEQ ID NO: 2956959 - DNA, 25 bp, Homo sapien
tagtaggcgccctctttgggccgct

SEQ ID NO: 2956960 - DNA, 25 bp, Homo sapien
ggcccgtcaggtgaccccagaagtc

SEQ ID NO: 2956961 - DNA, 25 bp, Homo sapien
tggcctttgtctgcgagctcacacg

SEQ ID NO: 2956962 - DNA, 25 bp, Homo sapien
aggagaatggcctttgtctgcgagc

SEQ ID NO: 2956963 - DNA, 25 bp, Homo sapien
ctgaggagaatggcctttgtctgcg

SEQ ID NO: 2956964 - DNA, 25 bp, Homo sapien
gaatggcctttgtctgcgagctcac

SEQ ID NO: 2956965 - DNA, 25 bp, Homo sapien
agagcttctccagccctgaattgag

SEQ ID NO: 2956966 - DNA, 25 bp, Homo sapien
gcagtcagctccagcgagtaccgga

SEQ ID NO: 2956967 - DNA, 25 bp, Homo sapien
taccggacggtcagcacattctggc

SEQ ID NO: 2956968 - DNA, 25 bp, Homo sapien
ggaagagcttctccagccctgaatt

SEQ ID NO: 2956969 - DNA, 25 bp, Homo sapien
gagtgagcatttagccgctgccgga

SEQ ID NO: 2956970 - DNA, 25 bp, Homo sapien
gcgggttactcaagctccttaagcc

SEQ ID NO: 2956971 - DNA, 25 bp, Homo sapien
gatcctacagacaggctcggtctca

SEQ ID NO: 2956972 - DNA, 25 bp, Homo sapien
taacgctaatcaagggagagtgagc

SEQ ID NO: 2956973 - DNA, 25 bp, Homo sapien
cagtcacagcatagcctgacaccat

SEQ ID NO: 2956974 - DNA, 25 bp, Homo sapien
tggtggcatagttgatcagcctgtc

SEQ ID NO: 2956975 - DNA, 25 bp, Homo sapien
ccggtgtagcaggtccgcatcaggc

SEQ ID NO: 2956976 - DNA, 25 bp, Homo sapien
tggccacatcaaacatgtgccgctt

SEQ ID NO: 2956977 - DNA, 25 bp, Homo sapien
tttgttcacttaaccctccagatga

SEQ ID NO: 2956978 - DNA, 25 bp, Homo sapien
gaggaggccctttcacgcatttgtt

SEQ ID NO: 2956979 - DNA, 25 bp, Homo sapien
ccagatgaaccctcttgggcaggtg

SEQ ID NO: 2956980 - DNA, 25 bp, Homo sapien
aatgggcccagggaagctacaaact

SEQ ID NO: 2956981 - DNA, 25 bp, Homo sapien
tgtgaggcctcatacaggtccagca

SEQ ID NO: 2956982 - DNA, 25 bp, Homo sapien
accacgaaggcgtagtcctccagga

SEQ ID NO: 2956983 - DNA, 25 bp, Homo sapien
agcctcactgcagaagtagccgcca

SEQ ID NO: 2956984 - DNA, 25 bp, Homo sapien
tcgagccacgcactctcctgtgagg

SEQ ID NO: 2956985 - DNA, 25 bp, Homo sapien
gttgtgggctgacacggaattggcg

SEQ ID NO: 2956986 - DNA, 25 bp, Homo sapien
ggctgacacggaattggcgctgggc

SEQ ID NO: 2956987 - DNA, 25 bp, Homo sapien
tgtgggctgacacggaattggcgct

SEQ ID NO: 2956988 - DNA, 25 bp, Homo sapien
tgacacggaattggcgctgggctct

SEQ ID NO: 2956989 - DNA, 25 bp, Homo sapien
cccgtgaagccatgcagccggagca

SEQ ID NO: 2956990 - DNA, 25 bp, Homo sapien
cagtccttgtggcccgtgaagccat

SEQ ID NO: 2956991 - DNA, 25 bp, Homo sapien
tgtggcccgtgaagccatgcagccg

SEQ ID NO: 2956992 - DNA, 25 bp, Homo sapien
cttgtggcccgtgaagccatgcagc

SEQ ID NO: 2956993 - DNA, 25 bp, Homo sapien
cgcatgcgctcggaaaaggcggtca

SEQ ID NO: 2956994 - DNA, 25 bp, Homo sapien
aaaggcggtcaataggcacacacac

SEQ ID NO: 2956995 - DNA, 25 bp, Homo sapien
gagggcgcggaccatctcgggcaac

SEQ ID NO: 2956996 - DNA, 25 bp, Homo sapien
accgggacacgacgcatgcgctcgg

SEQ ID NO: 2956997 - DNA, 25 bp, Homo sapien
cctgacggtctccacagatcacgat

SEQ ID NO: 2956998 - DNA, 25 bp, Homo sapien
tggcctgacggtctccacagatcac

SEQ ID NO: 2956999 - DNA, 25 bp, Homo sapien
ggcctgacggtctccacagatcacg

SEQ ID NO: 2957000 - DNA, 25 bp, Homo sapien
gcctgacggtctccacagatcacga

SEQ ID NO: 2957001 - DNA, 25 bp, Homo sapien
tggcctggtcttccaaccgtcggag

SEQ ID NO: 2957002 - DNA, 25 bp, Homo sapien
cttccaaccgtcggagggtactcag

SEQ ID NO: 2957003 - DNA, 25 bp, Homo sapien
gtggcctggtcttccaaccgtcgga

SEQ ID NO: 2957004 - DNA, 25 bp, Homo sapien
tcttccaaccgtcggagggtactca

SEQ ID NO: 2957005 - DNA, 25 bp, Homo sapien
tttcgtaattcgcagggatcagtga

SEQ ID NO: 2957006 - DNA, 25 bp, Homo sapien
ttcgtaattcgcagggatcagtgat

SEQ ID NO: 2957007 - DNA, 25 bp, Homo sapien
tgagtatggccgaggtcacctggtg

SEQ ID NO: 2957008 - DNA, 25 bp, Homo sapien
tctctagtcagttgggatgcttcac

SEQ ID NO: 2957009 - DNA, 25 bp, Homo sapien
ggatggccacaggttctatagggcc

SEQ ID NO: 2957010 - DNA, 25 bp, Homo sapien
acaggttctatagggccctgcaggg

SEQ ID NO: 2957011 - DNA, 25 bp, Homo sapien
gtttattctagggtgagtgggtgcc

SEQ ID NO: 2957012 - DNA, 25 bp, Homo sapien
tattctagggtgagtgggtgcccaa

SEQ ID NO: 2957013 - DNA, 25 bp, Homo sapien
tgttaagtttattctagggtgagtg

SEQ ID NO: 2957014 - DNA, 25 bp, Homo sapien
aagtttattctagggtgagtgggtg

SEQ ID NO: 2957015 - DNA, 25 bp, Homo sapien
ctgcttccatcctttcgaggctggg

SEQ ID NO: 2957016 - DNA, 25 bp, Homo sapien
ttagtcgtgacaatagcagctccca

SEQ ID NO: 2957017 - DNA, 25 bp, Homo sapien
gggactaaattcattcaggctacaa

SEQ ID NO: 2957018 - DNA, 25 bp, Homo sapien
tcttaacctctttctgagggcaagg

SEQ ID NO: 2957019 - DNA, 25 bp, Homo sapien
ggcgggatgggtcggatgacctcca

SEQ ID NO: 2957020 - DNA, 25 bp, Homo sapien
gattttggggcgcttgcgccactgc

SEQ ID NO: 2957021 - DNA, 25 bp, Homo sapien
gcttgcgccactgcggagaggcggc

SEQ ID NO: 2957022 - DNA, 25 bp, Homo sapien
tcagttccctctccggagattttgg

SEQ ID NO: 2957023 - DNA, 25 bp, Homo sapien
agcacttccccaacatctgcgagag

SEQ ID NO: 2957024 - DNA, 25 bp, Homo sapien
acatctgcgagaggtagacacggcg

SEQ ID NO: 2957025 - DNA, 25 bp, Homo sapien
tagacgccgggaagcacttccccaa

SEQ ID NO: 2957026 - DNA, 25 bp, Homo sapien
aacagcgaggattagacgccgggaa

SEQ ID NO: 2957027 - DNA, 25 bp, Homo sapien
ttttgaagggcgtggactccacgca

SEQ ID NO: 2957028 - DNA, 25 bp, Homo sapien
aggcaggtcgcgctggaccgcagag

SEQ ID NO: 2957029 - DNA, 25 bp, Homo sapien
gggcttcgtgcttgaacacgtggcc

SEQ ID NO: 2957030 - DNA, 25 bp, Homo sapien
gaccttttgaagggcgtggactcca

SEQ ID NO: 2957031 - DNA, 25 bp, Homo sapien
cctggagttgagcttggctgcggga

SEQ ID NO: 2957032 - DNA, 25 bp, Homo sapien
cgaagaatcagagtattcggcgcgg

SEQ ID NO: 2957033 - DNA, 25 bp, Homo sapien
ctttgtccacgacccctgatttggg

SEQ ID NO: 2957034 - DNA, 25 bp, Homo sapien
ctgatttgggcagcagccggaggac

SEQ ID NO: 2957035 - DNA, 25 bp, Homo sapien
gactcccttggagggagcccgaaga

SEQ ID NO: 2957036 - DNA, 25 bp, Homo sapien
tttgttccggcttcttcgcttcgcg

SEQ ID NO: 2957037 - DNA, 25 bp, Homo sapien
gcccaggctccggttgccggattcg

SEQ ID NO: 2957038 - DNA, 25 bp, Homo sapien
ttcggcgctaccttcggcgaagccg

SEQ ID NO: 2957039 - DNA, 25 bp, Homo sapien
gaagccgccccgagagggcgaacga

SEQ ID NO: 2957040 - DNA, 25 bp, Homo sapien
ccccgggagggccagttcagcccag

SEQ ID NO: 2957041 - DNA, 25 bp, Homo sapien
ggctctagggcgcaagctgagcccc

SEQ ID NO: 2957042 - DNA, 25 bp, Homo sapien
cgggcgatccggagaggggcaagcg

SEQ ID NO: 2957043 - DNA, 25 bp, Homo sapien
tcagaggaggtgtcctcacgcaacc

SEQ ID NO: 2957044 - DNA, 25 bp, Homo sapien
ccccgacaggtcgttgagccgcatg

SEQ ID NO: 2957045 - DNA, 25 bp, Homo sapien
tcgttgagccgcatgaagctccggg

SEQ ID NO: 2957046 - DNA, 25 bp, Homo sapien
acaggtcgttgagccgcatgaagct

SEQ ID NO: 2957047 - DNA, 25 bp, Homo sapien
cgacaggtcgttgagccgcatgaag

SEQ ID NO: 2957048 - DNA, 25 bp, Homo sapien
agacaccagctccgcgggcggctgt

SEQ ID NO: 2957049 - DNA, 25 bp, Homo sapien
cggagtccgcgctgcccgggtcctt

SEQ ID NO: 2957050 - DNA, 25 bp, Homo sapien
cgtgcggagacaccagctccgcggg

SEQ ID NO: 2957051 - DNA, 25 bp, Homo sapien
gccagcgccgggtacggcagcccct

SEQ ID NO: 2957052 - DNA, 25 bp, Homo sapien
cgcgcctggccgtcgtgccccgaag

SEQ ID NO: 2957053 - DNA, 25 bp, Homo sapien
cgcctggccgtcgtgccccgaagga

SEQ ID NO: 2957054 - DNA, 25 bp, Homo sapien
cccgcgcctggccgtcgtgccccga

SEQ ID NO: 2957055 - DNA, 25 bp, Homo sapien
gcctggccgtcgtgccccgaaggat

SEQ ID NO: 2957056 - DNA, 25 bp, Homo sapien
gcggtgcggcccgtcccccttctga

SEQ ID NO: 2957057 - DNA, 25 bp, Homo sapien
ttctgttgccataacgacaggagga

SEQ ID NO: 2957058 - DNA, 25 bp, Homo sapien
ccaggtggtgtggatttgttgtcat

SEQ ID NO: 2957059 - DNA, 25 bp, Homo sapien
caggaggatgtgtcaccaggtggtg

SEQ ID NO: 2957060 - DNA, 25 bp, Homo sapien
gccataacgacaggaggatgtgtca

SEQ ID NO: 2957061 - DNA, 25 bp, Homo sapien
gatgtcctcgcatggccggaacatg

SEQ ID NO: 2957062 - DNA, 25 bp, Homo sapien
ggagtcacaggcgatgtcctcgcat

SEQ ID NO: 2957063 - DNA, 25 bp, Homo sapien
tgcaggatccggcagcgctgggagt

SEQ ID NO: 2957064 - DNA, 25 bp, Homo sapien
aggcgatgtcctcgcatggccggaa

SEQ ID NO: 2957065 - DNA, 25 bp, Homo sapien
ccatctccacggcaaagaaggcaaa

SEQ ID NO: 2957066 - DNA, 25 bp, Homo sapien
cctgcgatgacgatgaaaaagtcaa

SEQ ID NO: 2957067 - DNA, 25 bp, Homo sapien
cgatgaaaaagtcaagccggttcca

SEQ ID NO: 2957068 - DNA, 25 bp, Homo sapien
agtcaagccggttccaagtgtctcc

SEQ ID NO: 2957069 - DNA, 25 bp, Homo sapien
cacccggttaatggccctgagcggt

SEQ ID NO: 2957070 - DNA, 25 bp, Homo sapien
tgagcggtcgcagcacacggactgt

SEQ ID NO: 2957071 - DNA, 25 bp, Homo sapien
acacggactgtcctgacagctgaga

SEQ ID NO: 2957072 - DNA, 25 bp, Homo sapien
gcaggtccagcgagtactccagcat

SEQ ID NO: 2957073 - DNA, 25 bp, Homo sapien
gcgtatccagcagcaacgtgacaag

SEQ ID NO: 2957074 - DNA, 25 bp, Homo sapien
cagctggacgccgacgatgccgaag

SEQ ID NO: 2957075 - DNA, 25 bp, Homo sapien
agcaacgtgacaaggatgcgcatgc

SEQ ID NO: 2957076 - DNA, 25 bp, Homo sapien
gaagcatcggttccgaagcagccct

SEQ ID NO: 2957077 - DNA, 25 bp, Homo sapien
tcatagtccagaccgcaaggtgggc

SEQ ID NO: 2957078 - DNA, 25 bp, Homo sapien
gttctctgtctggtaatagcgctcc

SEQ ID NO: 2957079 - DNA, 25 bp, Homo sapien
cccgctgagcagttggtgtagtact

SEQ ID NO: 2957080 - DNA, 25 bp, Homo sapien
gaagatggcgatccaggcatagcca

SEQ ID NO: 2957081 - DNA, 25 bp, Homo sapien
acaaagtacatgatgtcgacccagc

SEQ ID NO: 2957082 - DNA, 25 bp, Homo sapien
cacaaagtacatgatgtcgacccag

SEQ ID NO: 2957083 - DNA, 25 bp, Homo sapien
catcacaaagtacatgatgtcgacc

SEQ ID NO: 2957084 - DNA, 25 bp, Homo sapien
tcacaaagtacatgatgtcgaccca

SEQ ID NO: 2957085 - DNA, 25 bp, Homo sapien
ctgtaggggtggggacaggaagagg

SEQ ID NO: 2957086 - DNA, 25 bp, Homo sapien
tgtaggggtggggacaggaagagga

SEQ ID NO: 2957087 - DNA, 25 bp, Homo sapien
ggtggggacaggaagaggaaatgtc

SEQ ID NO: 2957088 - DNA, 25 bp, Homo sapien
tgctggcgttggacaggaaccgcac

SEQ ID NO: 2957089 - DNA, 25 bp, Homo sapien
gatgtacaccaggtacttgagcagc

SEQ ID NO: 2957090 - DNA, 25 bp, Homo sapien
ttcccgctgcttggtctctgagaac

SEQ ID NO: 2957091 - DNA, 25 bp, Homo sapien
tcagagaagctagccagggtgctgg

SEQ ID NO: 2957092 - DNA, 25 bp, Homo sapien
tgcccgagagacctgagccagcctg

SEQ ID NO: 2957093 - DNA, 25 bp, Homo sapien
ctgctgcccgagagacctgagccag

SEQ ID NO: 2957094 - DNA, 25 bp, Homo sapien
tgctgcccgagagacctgagccagc

SEQ ID NO: 2957095 - DNA, 25 bp, Homo sapien
ctgagccagcctgcgggctgcctta

SEQ ID NO: 2957096 - DNA, 25 bp, Homo sapien
ggtggacggataggcggcggtggga

SEQ ID NO: 2957097 - DNA, 25 bp, Homo sapien
ggtggtggacggataggcggcggtg

SEQ ID NO: 2957098 - DNA, 25 bp, Homo sapien
tggtggacggataggcggcggtggg

SEQ ID NO: 2957099 - DNA, 25 bp, Homo sapien
caggtggtggacggataggcggcgg

SEQ ID NO: 2957100 - DNA, 25 bp, Homo sapien
ggccctgagcgtcccattgcccagg

SEQ ID NO: 2957101 - DNA, 25 bp, Homo sapien
tgagcgtcccattgcccaggtggta

SEQ ID NO: 2957102 - DNA, 25 bp, Homo sapien
cggggggccctgagcgtcccattgc

SEQ ID NO: 2957103 - DNA, 25 bp, Homo sapien
cgtcccattgcccaggtggtagtgg

SEQ ID NO: 2957104 - DNA, 25 bp, Homo sapien
ccggagagggcaggcgtcgagggtg

SEQ ID NO: 2957105 - DNA, 25 bp, Homo sapien
gagagggcaggcgtcgagggtggtg

SEQ ID NO: 2957106 - DNA, 25 bp, Homo sapien
ggcgggacccattggcatccctgtc

SEQ ID NO: 2957107 - DNA, 25 bp, Homo sapien
gtggcagcatgagccggcgggaccc

SEQ ID NO: 2957108 - DNA, 25 bp, Homo sapien
tgccggatgcctcagatggggacct

SEQ ID NO: 2957109 - DNA, 25 bp, Homo sapien
acggtgggatacaccttcccgctgc

SEQ ID NO: 2957110 - DNA, 25 bp, Homo sapien
gcagcggactggctctaagtggcag

SEQ ID NO: 2957111 - DNA, 25 bp, Homo sapien
gcagccacctctactagtgccttct

SEQ ID NO: 2957112 - DNA, 25 bp, Homo sapien
gattccccggccaaagtacttgctg

SEQ ID NO: 2957113 - DNA, 25 bp, Homo sapien
tgagtcaggcatttcacggtcggcg

SEQ ID NO: 2957114 - DNA, 25 bp, Homo sapien
gtgtcacagattagcctccagaagg

SEQ ID NO: 2957115 - DNA, 25 bp, Homo sapien
tgctttcaagcaagggctggagatc

SEQ ID NO: 2957116 - DNA, 25 bp, Homo sapien
ccccagccccaggcgaaaagcagct

SEQ ID NO: 2957117 - DNA, 25 bp, Homo sapien
ctgccaggtgggctagcagcatgga

SEQ ID NO: 2957118 - DNA, 25 bp, Homo sapien
ccagccccaggcgaaaagcagctgg

SEQ ID NO: 2957119 - DNA, 25 bp, Homo sapien
tgccctgggtctgtgtgactcagct

SEQ ID NO: 2957120 - DNA, 25 bp, Homo sapien
gtgcaatcaaaacctccaccagcag

SEQ ID NO: 2957121 - DNA, 25 bp, Homo sapien
gcagcatcggctgggcagggactgc

SEQ ID NO: 2957122 - DNA, 25 bp, Homo sapien
ctgctgggtgctccccccggggtag

SEQ ID NO: 2957123 - DNA, 25 bp, Homo sapien
cctcagcaccaggtatgcggacaaa

SEQ ID NO: 2957124 - DNA, 25 bp, Homo sapien
tcagcaccaggtatgcggacaaaac

SEQ ID NO: 2957125 - DNA, 25 bp, Homo sapien
gggccctcagcaccaggtatgcgga

SEQ ID NO: 2957126 - DNA, 25 bp, Homo sapien
agcaccaggtatgcggacaaaaccc

SEQ ID NO: 2957127 - DNA, 25 bp, Homo sapien
cagtaggccacataaaggctgccct

SEQ ID NO: 2957128 - DNA, 25 bp, Homo sapien
tctcctctgcggctctggaagtgct

SEQ ID NO: 2957129 - DNA, 25 bp, Homo sapien
tgcacagcgtctagcccatggtggg

SEQ ID NO: 2957130 - DNA, 25 bp, Homo sapien
gctgcccttctgacgaagactttca

SEQ ID NO: 2957131 - DNA, 25 bp, Homo sapien
tgtagggattcttgatgtagccaaa

SEQ ID NO: 2957132 - DNA, 25 bp, Homo sapien
accacaatgacaccatcgaagatgt

SEQ ID NO: 2957133 - DNA, 25 bp, Homo sapien
tctagggcgttggtaagctcctcgg

SEQ ID NO: 2957134 - DNA, 25 bp, Homo sapien
agggaccatacacaagcagcttcag

SEQ ID NO: 2957135 - DNA, 25 bp, Homo sapien
gcacacgcatcaggcggaaggtccg

SEQ ID NO: 2957136 - DNA, 25 bp, Homo sapien
acgcatcaggcggaaggtccgcagc

SEQ ID NO: 2957137 - DNA, 25 bp, Homo sapien
cagcacacgcatcaggcggaaggtc

SEQ ID NO: 2957138 - DNA, 25 bp, Homo sapien
acacgcatcaggcggaaggtccgca

SEQ ID NO: 2957139 - DNA, 25 bp, Homo sapien
gagcaaggagtcaaaattcttccgg

SEQ ID NO: 2957140 - DNA, 25 bp, Homo sapien
acgatggcccagagcaaggagtcaa

SEQ ID NO: 2957141 - DNA, 25 bp, Homo sapien
gaggcaaacttgcagccgaagagat

SEQ ID NO: 2957142 - DNA, 25 bp, Homo sapien
aaaattcttccggtctggcagggtg

SEQ ID NO: 2957143 - DNA, 25 bp, Homo sapien
ggacgacgtggaggccataccattg

SEQ ID NO: 2957144 - DNA, 25 bp, Homo sapien
caccagaatggcgaccagcaaattg

SEQ ID NO: 2957145 - DNA, 25 bp, Homo sapien
caatgaaataaagggccgcccagga

SEQ ID NO: 2957146 - DNA, 25 bp, Homo sapien
caaattgaagagcacgtagttgccg

SEQ ID NO: 2957147 - DNA, 25 bp, Homo sapien
aggccatgggcatcgaaggacactc

SEQ ID NO: 2957148 - DNA, 25 bp, Homo sapien
gccatgggcatcgaaggacactccc

SEQ ID NO: 2957149 - DNA, 25 bp, Homo sapien
ccaggccatgggcatcgaaggacac

SEQ ID NO: 2957150 - DNA, 25 bp, Homo sapien
catgggcatcgaaggacactcccca

SEQ ID NO: 2957151 - DNA, 25 bp, Homo sapien
tcgcatcttcccgtttgctgatttc

SEQ ID NO: 2957152 - DNA, 25 bp, Homo sapien
cgacaggcagctgaatacagcttaa

SEQ ID NO: 2957153 - DNA, 25 bp, Homo sapien
cactcgcatcttcccgtttgctgat

SEQ ID NO: 2957154 - DNA, 25 bp, Homo sapien
gaatacagcttaactgtccactcgc

SEQ ID NO: 2957155 - DNA, 25 bp, Homo sapien
gtgagaagaaatcgggctctgattc

SEQ ID NO: 2957156 - DNA, 25 bp, Homo sapien
ctgattcggacttgttggcatctcc

SEQ ID NO: 2957157 - DNA, 25 bp, Homo sapien
cgggctctgattcggacttgttggc

SEQ ID NO: 2957158 - DNA, 25 bp, Homo sapien
gaaatcgggctctgattcggacttg

SEQ ID NO: 2957159 - DNA, 25 bp, Homo sapien
cggtgacttcatctcgtgggccgcc

SEQ ID NO: 2957160 - DNA, 25 bp, Homo sapien
tgggcagcgacatgggtgtggcggc

SEQ ID NO: 2957161 - DNA, 25 bp, Homo sapien
ctgctggtgcggcgcgacgcagggc

SEQ ID NO: 2957162 - DNA, 25 bp, Homo sapien
agcgacatgggtgtggcggccgtgt

SEQ ID NO: 2957163 - DNA, 25 bp, Homo sapien
ctggtttgcatcaccggcgcagatt

SEQ ID NO: 2957164 - DNA, 25 bp, Homo sapien
tacagaagcagatcagagcggtggc

SEQ ID NO: 2957165 - DNA, 25 bp, Homo sapien
cagagtcagtacctagatgagggtc

SEQ ID NO: 2957166 - DNA, 25 bp, Homo sapien
gtcactcagctagggtacagaagag

SEQ ID NO: 2957167 - DNA, 25 bp, Homo sapien
aggcgccctgaagccgacttgccat

SEQ ID NO: 2957168 - DNA, 25 bp, Homo sapien
tgtgtctggcaggtcaaaggaactc

SEQ ID NO: 2957169 - DNA, 25 bp, Homo sapien
ggttgccctcgtcatcggcgtcatc

SEQ ID NO: 2957170 - DNA, 25 bp, Homo sapien
ctgtggcgatggtcactgcccgcag

SEQ ID NO: 2957171 - DNA, 25 bp, Homo sapien
gctgaccaggagtctcgctcgaggc

SEQ ID NO: 2957172 - DNA, 25 bp, Homo sapien
gagtctcgctcgaggcagcaggcag

SEQ ID NO: 2957173 - DNA, 25 bp, Homo sapien
gaccaggagtctcgctcgaggcagc

SEQ ID NO: 2957174 - DNA, 25 bp, Homo sapien
ctcggatccacgcgcggacccgttc

SEQ ID NO: 2957175 - DNA, 25 bp, Homo sapien
tgatccggtgacacaggaggcggaa

SEQ ID NO: 2957176 - DNA, 25 bp, Homo sapien
ggtcaattttggggcgctccatggc

SEQ ID NO: 2957177 - DNA, 25 bp, Homo sapien
aaggaccacgtggtcgaacatcttg

SEQ ID NO: 2957178 - DNA, 25 bp, Homo sapien
accacgtggtcgaacatcttgtggg

SEQ ID NO: 2957179 - DNA, 25 bp, Homo sapien
gatgatgacaaggaccacgtggtcg

SEQ ID NO: 2957180 - DNA, 25 bp, Homo sapien
aaagactgcggtgaagatgtaattg

SEQ ID NO: 2957181 - DNA, 25 bp, Homo sapien
agaaagactgcggtgaagatgtaat

SEQ ID NO: 2957182 - DNA, 25 bp, Homo sapien
agccagaaagactgcggtgaagatg

SEQ ID NO: 2957183 - DNA, 25 bp, Homo sapien
ccagaaagactgcggtgaagatgta

SEQ ID NO: 2957184 - DNA, 25 bp, Homo sapien
ccaggatcttggtgccgctgtcaga

SEQ ID NO: 2957185 - DNA, 25 bp, Homo sapien
gcacgttccaactgctccgcaggta

SEQ ID NO: 2957186 - DNA, 25 bp, Homo sapien
tggacaccagaatgtcgatgacgga

SEQ ID NO: 2957187 - DNA, 25 bp, Homo sapien
acggagatgagcaccaacagcccgt

SEQ ID NO: 2957188 - DNA, 25 bp, Homo sapien
gcacagcagatgactacaatgttgc

SEQ ID NO: 2957189 - DNA, 25 bp, Homo sapien
ccccaagatgccgaaaatgatgaag

SEQ ID NO: 2957190 - DNA, 25 bp, Homo sapien
caatgttgccgatgggtttcagtga

SEQ ID NO: 2957191 - DNA, 25 bp, Homo sapien
tcagtgaggacatcagcgtctccac

SEQ ID NO: 2957192 - DNA, 25 bp, Homo sapien
tgatgttcctggtatcctcgccctg

SEQ ID NO: 2957193 - DNA, 25 bp, Homo sapien
tgtgccggacccaccggtaactggc

SEQ ID NO: 2957194 - DNA, 25 bp, Homo sapien
tcggcacagtccgatttattggtga

SEQ ID NO: 2957195 - DNA, 25 bp, Homo sapien
caaagttgtacttgtgccggaccca

SEQ ID NO: 2957196 - DNA, 25 bp, Homo sapien
gatggactgggctttgcgacatgct

SEQ ID NO: 2957197 - DNA, 25 bp, Homo sapien
ggtatcactaagcatggccctgtgc

SEQ ID NO: 2957198 - DNA, 25 bp, Homo sapien
gaagggctgatctcttcgtggagcc

SEQ ID NO: 2957199 - DNA, 25 bp, Homo sapien
tttaaggacggctagagaccccatg

SEQ ID NO: 2957200 - DNA, 25 bp, Homo sapien
cccactgccacgtgtgcttcctgct

SEQ ID NO: 2957201 - DNA, 25 bp, Homo sapien
ccgaggagattctattatgactcca

SEQ ID NO: 2957202 - DNA, 25 bp, Homo sapien
tgaggccctggtaagtcagctgctc

SEQ ID NO: 2957203 - DNA, 25 bp, Homo sapien
accagttaatgaaactgaggccctg

SEQ ID NO: 2957204 - DNA, 25 bp, Homo sapien
ccaaccatccttggaggccaaaacg

SEQ ID NO: 2957205 - DNA, 25 bp, Homo sapien
ccaaaacgaacagggacatcagggc

SEQ ID NO: 2957206 - DNA, 25 bp, Homo sapien
ttggaggccaaaacgaacagggaca

SEQ ID NO: 2957207 - DNA, 25 bp, Homo sapien
gcccacagcatccagcccatcgtac

SEQ ID NO: 2957208 - DNA, 25 bp, Homo sapien
aataaaacatgcccagatttggccc

SEQ ID NO: 2957209 - DNA, 25 bp, Homo sapien
agcccatgctgagtgacctgagccc

SEQ ID NO: 2957210 - DNA, 25 bp, Homo sapien
gggactccagatgataccaccacac

SEQ ID NO: 2957211 - DNA, 25 bp, Homo sapien
tgttaaacatgttgtagaccaataa

SEQ ID NO: 2957212 - DNA, 25 bp, Homo sapien
tttttctccagtcttcgtaggcgct

SEQ ID NO: 2957213 - DNA, 25 bp, Homo sapien
ccacaatgagcaggaacgagatgaa

SEQ ID NO: 2957214 - DNA, 25 bp, Homo sapien
tccagtcttcgtaggcgcttctcct

SEQ ID NO: 2957215 - DNA, 25 bp, Homo sapien
cacaatgagcaggaacgagatgaag

SEQ ID NO: 2957216 - DNA, 25 bp, Homo sapien
aaagaacgaaacacgacattggtca

SEQ ID NO: 2957217 - DNA, 25 bp, Homo sapien
ctaaaagaacgaaacacgacattgg

SEQ ID NO: 2957218 - DNA, 25 bp, Homo sapien
gagctgccggaagcaattacatcgt

SEQ ID NO: 2957219 - DNA, 25 bp, Homo sapien
tgccggaagcaattacatcgtccag

SEQ ID NO: 2957220 - DNA, 25 bp, Homo sapien
gcaattacatcgtccagcattagat

SEQ ID NO: 2957221 - DNA, 25 bp, Homo sapien
gaagcaattacatcgtccagcatta

SEQ ID NO: 2957222 - DNA, 25 bp, Homo sapien
caactgtggctctgtttgttcgaga

SEQ ID NO: 2957223 - DNA, 25 bp, Homo sapien
ccagcatcggccttgaggtgtggat

SEQ ID NO: 2957224 - DNA, 25 bp, Homo sapien
ccttaggcatgcatgaggccatctt

SEQ ID NO: 2957225 - DNA, 25 bp, Homo sapien
gttttcagagatcggccagccaact

SEQ ID NO: 2957226 - DNA, 25 bp, Homo sapien
tagtcggagtagtaaggtttgcact

SEQ ID NO: 2957227 - DNA, 25 bp, Homo sapien
ggtgcacaagtggtggacgaggagc

SEQ ID NO: 2957228 - DNA, 25 bp, Homo sapien
atggtgaccacgttcagcccgatga

SEQ ID NO: 2957229 - DNA, 25 bp, Homo sapien
ttcagcccgatgacacctgtgatga

SEQ ID NO: 2957230 - DNA, 25 bp, Homo sapien
acagtgaagatgtagttgcagatct

SEQ ID NO: 2957231 - DNA, 25 bp, Homo sapien
aggcgttgacctcgatttcctccag

SEQ ID NO: 2957232 - DNA, 25 bp, Homo sapien
ggcagcgaggcgttgacctcgattt

SEQ ID NO: 2957233 - DNA, 25 bp, Homo sapien
ggttgatgggcagcgaggcgttgac

SEQ ID NO: 2957234 - DNA, 25 bp, Homo sapien
gacctcgatttcctccagcgtgatg

SEQ ID NO: 2957235 - DNA, 25 bp, Homo sapien
agcagcgcccgcatgcccacagcca

SEQ ID NO: 2957236 - DNA, 25 bp, Homo sapien
cagcagcgcccgcatgcccacagcc

SEQ ID NO: 2957237 - DNA, 25 bp, Homo sapien
gcagcgcccgcatgcccacagccat

SEQ ID NO: 2957238 - DNA, 25 bp, Homo sapien
ccagcagcgcccgcatgcccacagc

SEQ ID NO: 2957239 - DNA, 25 bp, Homo sapien
gtctccaaagagctccacgcccaga

SEQ ID NO: 2957240 - DNA, 25 bp, Homo sapien
aggtctccaaagagctccacgccca

SEQ ID NO: 2957241 - DNA, 25 bp, Homo sapien
ctccaaagagctccacgcccagagc

SEQ ID NO: 2957242 - DNA, 25 bp, Homo sapien
ccaggtctccaaagagctccacgcc

SEQ ID NO: 2957243 - DNA, 25 bp, Homo sapien
ctcggaagagggttaggaaggccat

SEQ ID NO: 2957244 - DNA, 25 bp, Homo sapien
ccattccaattgtcacctgtggaga

SEQ ID NO: 2957245 - DNA, 25 bp, Homo sapien
aaggccatgccaaagttccgaaagg

SEQ ID NO: 2957246 - DNA, 25 bp, Homo sapien
gttccgaaaggtggcatgacggccc

SEQ ID NO: 2957247 - DNA, 25 bp, Homo sapien
gttgactagcacgaactgggccgtc

SEQ ID NO: 2957248 - DNA, 25 bp, Homo sapien
cacaaagtagataggcgagatgacc

SEQ ID NO: 2957249 - DNA, 25 bp, Homo sapien
cacggcgatcaccacgttgactagc

SEQ ID NO: 2957250 - DNA, 25 bp, Homo sapien
tcctggtcacagtcccggagggtgt

SEQ ID NO: 2957251 - DNA, 25 bp, Homo sapien
agggatatggtgtcaaacagctgcc

SEQ ID NO: 2957252 - DNA, 25 bp, Homo sapien
ggatatggtgtcaaacagctgcctg

SEQ ID NO: 2957253 - DNA, 25 bp, Homo sapien
tggatcagcagggatatggtgtcaa

SEQ ID NO: 2957254 - DNA, 25 bp, Homo sapien
cagcagggatatggtgtcaaacagc

SEQ ID NO: 2957255 - DNA, 25 bp, Homo sapien
gtcatcaggcaaagagtcatccgtc

SEQ ID NO: 2957256 - DNA, 25 bp, Homo sapien
gagagcaggacggttcagacacaat

SEQ ID NO: 2957257 - DNA, 25 bp, Homo sapien
catccgtcagagctagagagcagga

SEQ ID NO: 2957258 - DNA, 25 bp, Homo sapien
tctccagggcactaagtaagagtgt

SEQ ID NO: 2957259 - DNA, 25 bp, Homo sapien
aaagcgtgggccaccgaggtcctga

SEQ ID NO: 2957260 - DNA, 25 bp, Homo sapien
ggtcctgacagttgatgcctctggg

SEQ ID NO: 2957261 - DNA, 25 bp, Homo sapien
tgctcctatacccttcagggcaagg

SEQ ID NO: 2957262 - DNA, 25 bp, Homo sapien
aagaccttgtgccagcaaagcgtgg

SEQ ID NO: 2957263 - DNA, 25 bp, Homo sapien
ccaggacaaggtagagatgggcatg

SEQ ID NO: 2957264 - DNA, 25 bp, Homo sapien
cccaggacaaggtagagatgggcat

SEQ ID NO: 2957265 - DNA, 25 bp, Homo sapien
tgtgcgtgggtttggtaactgaggc

SEQ ID NO: 2957266 - DNA, 25 bp, Homo sapien
gaggcagcgctgacaacagaaagca

SEQ ID NO: 2957267 - DNA, 25 bp, Homo sapien
gggtgtgcgtgggtttggtaactga

SEQ ID NO: 2957268 - DNA, 25 bp, Homo sapien
ctgaggcagcgctgacaacagaaag

SEQ ID NO: 2957269 - DNA, 25 bp, Homo sapien
gcagctccgtggggtggggctgcat

SEQ ID NO: 2957270 - DNA, 25 bp, Homo sapien
tggcagctccgtggggtggggctgc

SEQ ID NO: 2957271 - DNA, 25 bp, Homo sapien
ctggcagctccgtggggtggggctg

SEQ ID NO: 2957272 - DNA, 25 bp, Homo sapien
ggcagctccgtggggtggggctgca

SEQ ID NO: 2957273 - DNA, 25 bp, Homo sapien
ttccgcacagtcagtaagtctggtc

SEQ ID NO: 2957274 - DNA, 25 bp, Homo sapien
agtgcgttcggctgaccccagactt

SEQ ID NO: 2957275 - DNA, 25 bp, Homo sapien
gcagtgctcccatgccgacacatgt

SEQ ID NO: 2957276 - DNA, 25 bp, Homo sapien
ctgtcattgggcagagagtgcgttc

SEQ ID NO: 2957277 - DNA, 25 bp, Homo sapien
tgggagtgaacggacaagacggagc

SEQ ID NO: 2957278 - DNA, 25 bp, Homo sapien
ctctgagccaaaggggagcgtcctg

SEQ ID NO: 2957279 - DNA, 25 bp, Homo sapien
ggagcagatgaggtgcatctttggg

SEQ ID NO: 2957280 - DNA, 25 bp, Homo sapien
gctggctgggagtgaacggacaaga

SEQ ID NO: 2957281 - DNA, 25 bp, Homo sapien
accctgaacgtccaaggagtcagtc

SEQ ID NO: 2957282 - DNA, 25 bp, Homo sapien
gaccctgaacgtccaaggagtcagt

SEQ ID NO: 2957283 - DNA, 25 bp, Homo sapien
caggaggtctcctgaaatccagctc

SEQ ID NO: 2957284 - DNA, 25 bp, Homo sapien
tcagctccgtgtccaactctaagct

SEQ ID NO: 2957285 - DNA, 25 bp, Homo sapien
tgctgtgcctgggtacttgactggc

SEQ ID NO: 2957286 - DNA, 25 bp, Homo sapien
tgactggccccagaaagagtaggcc

SEQ ID NO: 2957287 - DNA, 25 bp, Homo sapien
gtagcacttcttcaggtcccgtggg

SEQ ID NO: 2957288 - DNA, 25 bp, Homo sapien
caagggatccttggagtcgctggac

SEQ ID NO: 2957289 - DNA, 25 bp, Homo sapien
cagctgacggcgatagagtgtctcc

SEQ ID NO: 2957290 - DNA, 25 bp, Homo sapien
tctatggtgatactaggcgggctga

SEQ ID NO: 2957291 - DNA, 25 bp, Homo sapien
caacagcttctggtgtcgggaacct

SEQ ID NO: 2957292 - DNA, 25 bp, Homo sapien
cttttgtcaggaatatagcccagga

SEQ ID NO: 2957293 - DNA, 25 bp, Homo sapien
tagagattctgcacaaacgtattgc

SEQ ID NO: 2957294 - DNA, 25 bp, Homo sapien
ttgcaggtacccagagccactgagg

SEQ ID NO: 2957295 - DNA, 25 bp, Homo sapien
aatgtgctcgcggtcccagcttgtg

SEQ ID NO: 2957296 - DNA, 25 bp, Homo sapien
gtcacaaaatgtcgtacatcccgca

SEQ ID NO: 2957297 - DNA, 25 bp, Homo sapien
aaatggttctcgctctccgctgaag

SEQ ID NO: 2957298 - DNA, 25 bp, Homo sapien
taaaatagccaagagacagacgcct

SEQ ID NO: 2957299 - DNA, 25 bp, Homo sapien
ggtccctgcagatctctacagagca

SEQ ID NO: 2957300 - DNA, 25 bp, Homo sapien
taagcaactctccagtactctagtg

SEQ ID NO: 2957301 - DNA, 25 bp, Homo sapien
caggcatgctaagactcaacctaag

SEQ ID NO: 2957302 - DNA, 25 bp, Homo sapien
gaacgcacaaagaaccaggcatgct

SEQ ID NO: 2957303 - DNA, 25 bp, Homo sapien
gcaaggaaggcgagcgcggtcggac

SEQ ID NO: 2957304 - DNA, 25 bp, Homo sapien
ggaaggcgagcgcggtcggacccag

SEQ ID NO: 2957305 - DNA, 25 bp, Homo sapien
aaggcgagcgcggtcggacccagcg

SEQ ID NO: 2957306 - DNA, 25 bp, Homo sapien
cgagcgcggtcggacccagcggcgg

SEQ ID NO: 2957307 - DNA, 25 bp, Homo sapien
ttggagccgagctccccggaaccgc

SEQ ID NO: 2957308 - DNA, 25 bp, Homo sapien
cttggagccgagctccccggaaccg

SEQ ID NO: 2957309 - DNA, 25 bp, Homo sapien
ccccggaaccgcacagggcgtccat

SEQ ID NO: 2957310 - DNA, 25 bp, Homo sapien
ggctgattgcgaaacgccccttccg

SEQ ID NO: 2957311 - DNA, 25 bp, Homo sapien
ctccatcaggaacccgcggctgatt

SEQ ID NO: 2957312 - DNA, 25 bp, Homo sapien
cagccacgcactgtgcctttgcgcc

SEQ ID NO: 2957313 - DNA, 25 bp, Homo sapien
ggctgggatggagccgactcaccca

SEQ ID NO: 2957314 - DNA, 25 bp, Homo sapien
tgcacagcacgaactcttgggtaac

SEQ ID NO: 2957315 - DNA, 25 bp, Homo sapien
ttagctcacctgaactgtgctggag

SEQ ID NO: 2957316 - DNA, 25 bp, Homo sapien
tagagattgggattcacaagccctg

SEQ ID NO: 2957317 - DNA, 25 bp, Homo sapien
gtgcgtacacacacaaagggcatat

SEQ ID NO: 2957318 - DNA, 25 bp, Homo sapien
taaatggagggtgccaactccagcc

SEQ ID NO: 2957319 - DNA, 25 bp, Homo sapien
tatttcctgttgcttagagcagggc

SEQ ID NO: 2957320 - DNA, 25 bp, Homo sapien
tatgctccacgaagacagattcttt

SEQ ID NO: 2957321 - DNA, 25 bp, Homo sapien
agtgttctctccctggtaccaaggc

SEQ ID NO: 2957322 - DNA, 25 bp, Homo sapien
aacgggacaacactcagggaagcgg

SEQ ID NO: 2957323 - DNA, 25 bp, Homo sapien
tatgggacacgtcatacaaaacacg

SEQ ID NO: 2957324 - DNA, 25 bp, Homo sapien
gcaaagcacttcgatggcaacggga

SEQ ID NO: 2957325 - DNA, 25 bp, Homo sapien
tgagctaggacatcaactatgggac

SEQ ID NO: 2957326 - DNA, 25 bp, Homo sapien
ttctgcagatacagtggcacgttgg

SEQ ID NO: 2957327 - DNA, 25 bp, Homo sapien
gatcaggtactccagttagttgcca

SEQ ID NO: 2957328 - DNA, 25 bp, Homo sapien
tcaaacaatgtgagccaaggaccca

SEQ ID NO: 2957329 - DNA, 25 bp, Homo sapien
ggacacacctctaggcctgatcagg

SEQ ID NO: 2957330 - DNA, 25 bp, Homo sapien
acttgctgacatgtaagctctttga

SEQ ID NO: 2957331 - DNA, 25 bp, Homo sapien
aaacattagcctggtctggtgacag

SEQ ID NO: 2957332 - DNA, 25 bp, Homo sapien
ttcctttacttgctgacatgtaagc

SEQ ID NO: 2957333 - DNA, 25 bp, Homo sapien
tttacttgctgacatgtaagctctt

SEQ ID NO: 2957334 - DNA, 25 bp, Homo sapien
ccctcaggagcatttagtgaccaag

SEQ ID NO: 2957335 - DNA, 25 bp, Homo sapien
caagtaagggtacctgacagggcac

SEQ ID NO: 2957336 - DNA, 25 bp, Homo sapien
gacagggcacactgtgccaattgtt

SEQ ID NO: 2957337 - DNA, 25 bp, Homo sapien
tcggaagtagaactccagtgaccct

SEQ ID NO: 2957338 - DNA, 25 bp, Homo sapien
gaggatgatgtagccacgacaatgg

SEQ ID NO: 2957339 - DNA, 25 bp, Homo sapien
cagggcgacccacaggtagatgcag

SEQ ID NO: 2957340 - DNA, 25 bp, Homo sapien
caatggtgccgcaggtagagcaagt

SEQ ID NO: 2957341 - DNA, 25 bp, Homo sapien
tgaggtccgggttttctgtgtgcac

SEQ ID NO: 2957342 - DNA, 25 bp, Homo sapien
gggcccggccatggaccaggccatg

SEQ ID NO: 2957343 - DNA, 25 bp, Homo sapien
aggagacgcaccacagcaggacacc

SEQ ID NO: 2957344 - DNA, 25 bp, Homo sapien
caggccatggaaggagtaaaaaagg

SEQ ID NO: 2957345 - DNA, 25 bp, Homo sapien
catggtgacccccaccaccaagggg

SEQ ID NO: 2957346 - DNA, 25 bp, Homo sapien
tctgccttggctaaaaggatcttgg

SEQ ID NO: 2957347 - DNA, 25 bp, Homo sapien
gaatgggacgatggcgcagaccaca

SEQ ID NO: 2957348 - DNA, 25 bp, Homo sapien
cagccgctcatactgtatcagcagg

SEQ ID NO: 2957349 - DNA, 25 bp, Homo sapien
cagaagataatgaggacccccgaag

SEQ ID NO: 2957350 - DNA, 25 bp, Homo sapien
agggtcgacattctttgcggagaaa

SEQ ID NO: 2957351 - DNA, 25 bp, Homo sapien
cattctttgcggagaaaaatggagg

SEQ ID NO: 2957352 - DNA, 25 bp, Homo sapien
gaagcggaaggggtctgagatctca

SEQ ID NO: 2957353 - DNA, 25 bp, Homo sapien
gggcagagagtaccagggcaaagtg

SEQ ID NO: 2957354 - DNA, 25 bp, Homo sapien
agaaagccagcgctggtctcagggt

SEQ ID NO: 2957355 - DNA, 25 bp, Homo sapien
aaaacaggcgggagagaaagccagc

SEQ ID NO: 2957356 - DNA, 25 bp, Homo sapien
ttgtgaaccaccagaaaaacaggcg

SEQ ID NO: 2957357 - DNA, 25 bp, Homo sapien
gaaagccagcgctggtctcagggta

SEQ ID NO: 2957358 - DNA, 25 bp, Homo sapien
cctggctggtggaagagccaactca

SEQ ID NO: 2957359 - DNA, 25 bp, Homo sapien
ggcctggctggtggaagagccaact

SEQ ID NO: 2957360 - DNA, 25 bp, Homo sapien
ctggcctggctggtggaagagccaa

SEQ ID NO: 2957361 - DNA, 25 bp, Homo sapien
ctctggcctggctggtggaagagcc

SEQ ID NO: 2957362 - DNA, 25 bp, Homo sapien
ggggggaggtgaagcccggcaggca

SEQ ID NO: 2957363 - DNA, 25 bp, Homo sapien
cggcaggcagccccgcagagggtca

SEQ ID NO: 2957364 - DNA, 25 bp, Homo sapien
ctggggggaggtgaagcccggcagg

SEQ ID NO: 2957365 - DNA, 25 bp, Homo sapien
cagccccgcagagggtcagggttta

SEQ ID NO: 2957366 - DNA, 25 bp, Homo sapien
ttagggaccagaggtccttctcctc

SEQ ID NO: 2957367 - DNA, 25 bp, Homo sapien
cctccaggggatgccggtagccata

SEQ ID NO: 2957368 - DNA, 25 bp, Homo sapien
tgcaccaccatctgggatctgtcct

SEQ ID NO: 2957369 - DNA, 25 bp, Homo sapien
atgccggtagccatagatggccatc

SEQ ID NO: 2957370 - DNA, 25 bp, Homo sapien
aaacattgaactcctaggcctggat

SEQ ID NO: 2957371 - DNA, 25 bp, Homo sapien
ggaagatcatctcattcagccgccg

SEQ ID NO: 2957372 - DNA, 25 bp, Homo sapien
ccaacagctggtgacaaccggaagc

SEQ ID NO: 2957373 - DNA, 25 bp, Homo sapien
caagccatgaaagccaggatactgc

SEQ ID NO: 2957374 - DNA, 25 bp, Homo sapien
tcgccggaggcatttttcccaggtg

SEQ ID NO: 2957375 - DNA, 25 bp, Homo sapien
ctcgccggaggcatttttcccaggt

SEQ ID NO: 2957376 - DNA, 25 bp, Homo sapien
cccaggtgctgctgaagccttgtgt

SEQ ID NO: 2957377 - DNA, 25 bp, Homo sapien
tttcccaggtgctgctgaagccttg

SEQ ID NO: 2957378 - DNA, 25 bp, Homo sapien
gcaggtcctggataagcttgaagca

SEQ ID NO: 2957379 - DNA, 25 bp, Homo sapien
ctggataagcttgaagcaggcactg

SEQ ID NO: 2957380 - DNA, 25 bp, Homo sapien
ggtcctggataagcttgaagcaggc

SEQ ID NO: 2957381 - DNA, 25 bp, Homo sapien
tcctggataagcttgaagcaggcac

SEQ ID NO: 2957382 - DNA, 25 bp, Homo sapien
gaacaaattaatgcatgcacggagg

SEQ ID NO: 2957383 - DNA, 25 bp, Homo sapien
ttgttaacgtacacaccacggtgcc

SEQ ID NO: 2957384 - DNA, 25 bp, Homo sapien
gacagagcacctcagtcggagctca

SEQ ID NO: 2957385 - DNA, 25 bp, Homo sapien
tatccctagtatcgagcaccattct

SEQ ID NO: 2957386 - DNA, 25 bp, Homo sapien
agctagctgggaatctccccttgga

SEQ ID NO: 2957387 - DNA, 25 bp, Homo sapien
tcagctcagcaaaagatccatcgtc

SEQ ID NO: 2957388 - DNA, 25 bp, Homo sapien
gagagtttgacttccagctagctgg

SEQ ID NO: 2957389 - DNA, 25 bp, Homo sapien
tgctcctgaatacttgtctcattcc

SEQ ID NO: 2957390 - DNA, 25 bp, Homo sapien
gggctctagattccgccacatgacc

SEQ ID NO: 2957391 - DNA, 25 bp, Homo sapien
gggtcaacccagtactgcctcaaga

SEQ ID NO: 2957392 - DNA, 25 bp, Homo sapien
tgctgcacgccctatcgatgacgct

SEQ ID NO: 2957393 - DNA, 25 bp, Homo sapien
ttcttacctcctgacatatggcggg

SEQ ID NO: 2957394 - DNA, 25 bp, Homo sapien
cttcctgtagatgacacccatgatc

SEQ ID NO: 2957395 - DNA, 25 bp, Homo sapien
catgatcccagtacgaaacttcacc

SEQ ID NO: 2957396 - DNA, 25 bp, Homo sapien
gttggagataaacctgatcaggatg

SEQ ID NO: 2957397 - DNA, 25 bp, Homo sapien
tgttgtaagatcagcgactgcatca

SEQ ID NO: 2957398 - DNA, 25 bp, Homo sapien
tgcaggtagacagtagtgggtggac

SEQ ID NO: 2957399 - DNA, 25 bp, Homo sapien
tggctgcgagcctcttgcaagctgc

SEQ ID NO: 2957400 - DNA, 25 bp, Homo sapien
gtggacttggctgcgagcctcttgc

SEQ ID NO: 2957401 - DNA, 25 bp, Homo sapien
gtagacagtagtgggtggacttggc

SEQ ID NO: 2957402 - DNA, 25 bp, Homo sapien
ccccacagtggacgcacgtttgact

SEQ ID NO: 2957403 - DNA, 25 bp, Homo sapien
tgccagaggaagtagatcgccagga

SEQ ID NO: 2957404 - DNA, 25 bp, Homo sapien
tgactgagttggtgataaccagagc

SEQ ID NO: 2957405 - DNA, 25 bp, Homo sapien
caaggtccatgaagcgctgggcatc

SEQ ID NO: 2957406 - DNA, 25 bp, Homo sapien
tccagaataatcctctcttgccact

SEQ ID NO: 2957407 - DNA, 25 bp, Homo sapien
tatatcccctctgctaacccagaat

SEQ ID NO: 2957408 - DNA, 25 bp, Homo sapien
ccagccagctcttgtgtcaattcta

SEQ ID NO: 2957409 - DNA, 25 bp, Homo sapien
acaatcgtggcgcactgcagccaga

SEQ ID NO: 2957410 - DNA, 25 bp, Homo sapien
cagcaagaccatgaaagcgactcca

SEQ ID NO: 2957411 - DNA, 25 bp, Homo sapien
aagaccatgaaagcgactccagcca

SEQ ID NO: 2957412 - DNA, 25 bp, Homo sapien
cgttgagtggaatcagcaagaccat

SEQ ID NO: 2957413 - DNA, 25 bp, Homo sapien
tcacggccacagctccgttgagtgg

SEQ ID NO: 2957414 - DNA, 25 bp, Homo sapien
atcagcttgatgcgcgagtccttca

SEQ ID NO: 2957415 - DNA, 25 bp, Homo sapien
cttgatgcgcgagtccttcaatttc

SEQ ID NO: 2957416 - DNA, 25 bp, Homo sapien
agcttgatgcgcgagtccttcaatt

SEQ ID NO: 2957417 - DNA, 25 bp, Homo sapien
tcagcttgatgcgcgagtccttcaa

SEQ ID NO: 2957418 - DNA, 25 bp, Homo sapien
ggttgtggtgtggaggtaggccgcc

SEQ ID NO: 2957419 - DNA, 25 bp, Homo sapien
aggtaggccgccgtgcgcagcagct

SEQ ID NO: 2957420 - DNA, 25 bp, Homo sapien
gccgccgtgcgcagcagctggagct

SEQ ID NO: 2957421 - DNA, 25 bp, Homo sapien
ggtgtggaggtaggccgccgtgcgc

SEQ ID NO: 2957422 - DNA, 25 bp, Homo sapien
agggtagagtccaatgagccctggc

SEQ ID NO: 2957423 - DNA, 25 bp, Homo sapien
tcagggtagagtccaatgagccctg

SEQ ID NO: 2957424 - DNA, 25 bp, Homo sapien
ggtagagtccaatgagccctggcca

SEQ ID NO: 2957425 - DNA, 25 bp, Homo sapien
gtgtcagggtagagtccaatgagcc

SEQ ID NO: 2957426 - DNA, 25 bp, Homo sapien
ctgagtcaggttgctgattaactgg

SEQ ID NO: 2957427 - DNA, 25 bp, Homo sapien
acacaaaggccttctcggcgtccag

SEQ ID NO: 2957428 - DNA, 25 bp, Homo sapien
cacattgtttgggtccacgtacacg

SEQ ID NO: 2957429 - DNA, 25 bp, Homo sapien
cacgtacacgtacacccagagggtg

SEQ ID NO: 2957430 - DNA, 25 bp, Homo sapien
gggtcaagttcctcttggctcagga

SEQ ID NO: 2957431 - DNA, 25 bp, Homo sapien
ggatccgtttcagagacacactggc

SEQ ID NO: 2957432 - DNA, 25 bp, Homo sapien
tcttggctcaggaattgctggatcc

SEQ ID NO: 2957433 - DNA, 25 bp, Homo sapien
tcaggaattgctggatccgtttcag

SEQ ID NO: 2957434 - DNA, 25 bp, Homo sapien
ccactgtgtatggtgatggcatagc

SEQ ID NO: 2957435 - DNA, 25 bp, Homo sapien
gtgccactgtgtatggtgatggcat

SEQ ID NO: 2957436 - DNA, 25 bp, Homo sapien
tgggcccaggtgaaggtgccactgt

SEQ ID NO: 2957437 - DNA, 25 bp, Homo sapien
tgaaggtgccactgtgtatggtgat

SEQ ID NO: 2957438 - DNA, 25 bp, Homo sapien
ccctttcgggacctggatgtctagg

SEQ ID NO: 2957439 - DNA, 25 bp, Homo sapien
cacggccaccagtgcccctttcggg

SEQ ID NO: 2957440 - DNA, 25 bp, Homo sapien
ttcatgtgcactttgccttctagct

SEQ ID NO: 2957441 - DNA, 25 bp, Homo sapien
cagggcagacaccagggaggacttc

SEQ ID NO: 2957442 - DNA, 25 bp, Homo sapien
gctggggcacataggccacggagcc

SEQ ID NO: 2957443 - DNA, 25 bp, Homo sapien
ctgctggggcacataggccacggag

SEQ ID NO: 2957444 - DNA, 25 bp, Homo sapien
tgctggggcacataggccacggagc

SEQ ID NO: 2957445 - DNA, 25 bp, Homo sapien
ccaggtcagctagcaaggcacaggc

SEQ ID NO: 2957446 - DNA, 25 bp, Homo sapien
atctccaggtcagctagcaaggcac

SEQ ID NO: 2957447 - DNA, 25 bp, Homo sapien
tagcaaggcacaggcctccagagtc

SEQ ID NO: 2957448 - DNA, 25 bp, Homo sapien
gtcagctagcaaggcacaggcctcc

SEQ ID NO: 2957449 - DNA, 25 bp, Homo sapien
ttctctccaatctctgtctgatccc

SEQ ID NO: 2957450 - DNA, 25 bp, Homo sapien
cttctctccaatctctgtctgatcc

SEQ ID NO: 2957451 - DNA, 25 bp, Homo sapien
tctctccaatctctgtctgatcccc

SEQ ID NO: 2957452 - DNA, 25 bp, Homo sapien
tctccaatctctgtctgatccccac

SEQ ID NO: 2957453 - DNA, 25 bp, Homo sapien
gcacagggagacaacggcctgtcca

SEQ ID NO: 2957454 - DNA, 25 bp, Homo sapien
gggaaaaatggggtcagacaggcac

SEQ ID NO: 2957455 - DNA, 25 bp, Homo sapien
ggcacagggagacaacggcctgtcc

SEQ ID NO: 2957456 - DNA, 25 bp, Homo sapien
tggggtcagacaggcacagggagac

SEQ ID NO: 2957457 - DNA, 25 bp, Homo sapien
aaatatcggcatcactgtaaacagc

SEQ ID NO: 2957458 - DNA, 25 bp, Homo sapien
tgtaaacagctcgagccagactgac

SEQ ID NO: 2957459 - DNA, 25 bp, Homo sapien
cacatgagagtccaccgcggacagt

SEQ ID NO: 2957460 - DNA, 25 bp, Homo sapien
ggcccgatgacgtggtcaaagatgt

SEQ ID NO: 2957461 - DNA, 25 bp, Homo sapien
cttagcccccttagcctctggcagg

SEQ ID NO: 2957462 - DNA, 25 bp, Homo sapien
ggcaggaagctaatgccgtgcgtca

SEQ ID NO: 2957463 - DNA, 25 bp, Homo sapien
taatgccgtgcgtcaccagcactcg

SEQ ID NO: 2957464 - DNA, 25 bp, Homo sapien
gaagctaatgccgtgcgtcaccagc

SEQ ID NO: 2957465 - DNA, 25 bp, Homo sapien
caggaagctaatgccgtgcgtcacc

SEQ ID NO: 2957466 - DNA, 25 bp, Homo sapien
agttggcaaaggagccgttgcgctg

SEQ ID NO: 2957467 - DNA, 25 bp, Homo sapien
gcaaaggagccgttgcgctgcagca

SEQ ID NO: 2957468 - DNA, 25 bp, Homo sapien
cttggtcctcatcgggggcatagtt

SEQ ID NO: 2957469 - DNA, 25 bp, Homo sapien
atagttgcagagaaagttggcaaag

SEQ ID NO: 2957470 - DNA, 25 bp, Homo sapien
aaactatttatccatgaagcagcct

SEQ ID NO: 2957471 - DNA, 25 bp, Homo sapien
aggctctgagatcgggcaaggtggc

SEQ ID NO: 2957472 - DNA, 25 bp, Homo sapien
aacaggctctgagatcgggcaaggt

SEQ ID NO: 2957473 - DNA, 25 bp, Homo sapien
caaactatttatccatgaagcagcc

SEQ ID NO: 2957474 - DNA, 25 bp, Homo sapien
aatcagcagtgcctccttatcctct

SEQ ID NO: 2957475 - DNA, 25 bp, Homo sapien
tccttatcctctgcaccttccaacg

SEQ ID NO: 2957476 - DNA, 25 bp, Homo sapien
cttcaatcagcagtgcctccttatc

SEQ ID NO: 2957477 - DNA, 25 bp, Homo sapien
ctccttatcctctgcaccttccaac

SEQ ID NO: 2957478 - DNA, 25 bp, Homo sapien
tctggaccacataggtgactggatc

SEQ ID NO: 2957479 - DNA, 25 bp, Homo sapien
ctgtcagatccgtgtggttgctgag

SEQ ID NO: 2957480 - DNA, 25 bp, Homo sapien
ctggaccacataggtgactggatca

SEQ ID NO: 2957481 - DNA, 25 bp, Homo sapien
agatccgtgtggttgctgagtgtgt

SEQ ID NO: 2957482 - DNA, 25 bp, Homo sapien
cccatctgaggacagggcactcagc

SEQ ID NO: 2957483 - DNA, 25 bp, Homo sapien
catctgaggacagggcactcagctg

SEQ ID NO: 2957484 - DNA, 25 bp, Homo sapien
tacaggccgaccctgtccctcccca

SEQ ID NO: 2957485 - DNA, 25 bp, Homo sapien
aggccgaccctgtccctccccatct

SEQ ID NO: 2957486 - DNA, 25 bp, Homo sapien
caccttctctgatggacccaggtgc

SEQ ID NO: 2957487 - DNA, 25 bp, Homo sapien
tgcaccttctctgatggacccaggt

SEQ ID NO: 2957488 - DNA, 25 bp, Homo sapien
ctgcaccttctctgatggacccagg

SEQ ID NO: 2957489 - DNA, 25 bp, Homo sapien
gcaccttctctgatggacccaggtg

SEQ ID NO: 2957490 - DNA, 25 bp, Homo sapien
agtgccccatctgccttcgcctctg

SEQ ID NO: 2957491 - DNA, 25 bp, Homo sapien
tgggtcagtgccccatctgccttcg

SEQ ID NO: 2957492 - DNA, 25 bp, Homo sapien
ccccatctgccttcgcctctgtcac

SEQ ID NO: 2957493 - DNA, 25 bp, Homo sapien
cctcctgggtcagtgccccatctgc

SEQ ID NO: 2957494 - DNA, 25 bp, Homo sapien
caggcactgagccacacattggctc

SEQ ID NO: 2957495 - DNA, 25 bp, Homo sapien
gtctgccatggcatcatttgtccag

SEQ ID NO: 2957496 - DNA, 25 bp, Homo sapien
tttgacccacatacaggagacagat

SEQ ID NO: 2957497 - DNA, 25 bp, Homo sapien
aatggcagccgcactttgacccaca

SEQ ID NO: 2957498 - DNA, 25 bp, Homo sapien
agcagtgcctggtgcaacacacggg

SEQ ID NO: 2957499 - DNA, 25 bp, Homo sapien
cgagcgtatcttgttgtgcagcagt

SEQ ID NO: 2957500 - DNA, 25 bp, Homo sapien
gaagcagttcaggatgcggcctgat

SEQ ID NO: 2957501 - DNA, 25 bp, Homo sapien
caaagaaggactgtggcgagcgtat

SEQ ID NO: 2957502 - DNA, 25 bp, Homo sapien
tgcactaaggtgtagagcacagcca

SEQ ID NO: 2957503 - DNA, 25 bp, Homo sapien
ggagatggcgttgaagaaggaattg

SEQ ID NO: 2957504 - DNA, 25 bp, Homo sapien
ctgcactaaggtgtagagcacagcc

SEQ ID NO: 2957505 - DNA, 25 bp, Homo sapien
tggagatggcgttgaagaaggaatt

SEQ ID NO: 2957506 - DNA, 25 bp, Homo sapien
cagtcactgtctccgaaaagtggga

SEQ ID NO: 2957507 - DNA, 25 bp, Homo sapien
gttgtaggcccggatgacactggca

SEQ ID NO: 2957508 - DNA, 25 bp, Homo sapien
tccagccgcttcagttgccgtgatg

SEQ ID NO: 2957509 - DNA, 25 bp, Homo sapien
tgatgatctcaaaatcccggctgcg

SEQ ID NO: 2957510 - DNA, 25 bp, Homo sapien
ttggagatgatgtaggggtagcagc

SEQ ID NO: 2957511 - DNA, 25 bp, Homo sapien
ggttggagatgatgtaggggtagca

SEQ ID NO: 2957512 - DNA, 25 bp, Homo sapien
tggagatgatgtaggggtagcagct

SEQ ID NO: 2957513 - DNA, 25 bp, Homo sapien
cggttggagatgatgtaggggtagc

SEQ ID NO: 2957514 - DNA, 25 bp, Homo sapien
ggcagggccagttttctgcttaggg

SEQ ID NO: 2957515 - DNA, 25 bp, Homo sapien
cagggccagttttctgcttagggga

SEQ ID NO: 2957516 - DNA, 25 bp, Homo sapien
gcagggccagttttctgcttagggg

SEQ ID NO: 2957517 - DNA, 25 bp, Homo sapien
gggcagggccagttttctgcttagg

SEQ ID NO: 2957518 - DNA, 25 bp, Homo sapien
tgctcctcccgatgacggcaaatag

SEQ ID NO: 2957519 - DNA, 25 bp, Homo sapien
aatagtgcagcaaagagcaccacgc

SEQ ID NO: 2957520 - DNA, 25 bp, Homo sapien
agcaccacgcagttccccacgaact

SEQ ID NO: 2957521 - DNA, 25 bp, Homo sapien
acgaactccactccgatgctcagcc

SEQ ID NO: 2957522 - DNA, 25 bp, Homo sapien
cagggaggggcactcgggagatgcc

SEQ ID NO: 2957523 - DNA, 25 bp, Homo sapien
agtccttgagaacagaccctgtggc

SEQ ID NO: 2957524 - DNA, 25 bp, Homo sapien
tccttgagaacagaccctgtggctg

SEQ ID NO: 2957525 - DNA, 25 bp, Homo sapien
ggcactcgggagatgcctggaacac

SEQ ID NO: 2957526 - DNA, 25 bp, Homo sapien
gactctttgacagtacaagctggca

SEQ ID NO: 2957527 - DNA, 25 bp, Homo sapien
tgtgtacgttctctgcaagcatgtg

SEQ ID NO: 2957528 - DNA, 25 bp, Homo sapien
tgtaatcacgaatgactcccttggg

SEQ ID NO: 2957529 - DNA, 25 bp, Homo sapien
gatcctagcccatggatgacccagg

SEQ ID NO: 2957530 - DNA, 25 bp, Homo sapien
ctgtctctgtcttggagtactcctt

SEQ ID NO: 2957531 - DNA, 25 bp, Homo sapien
ctctgtcttggagtactccttgacc

SEQ ID NO: 2957532 - DNA, 25 bp, Homo sapien
tctgtcttggagtactccttgaccc

SEQ ID NO: 2957533 - DNA, 25 bp, Homo sapien
tggagaatgtcaaggcactgacggc

SEQ ID NO: 2957534 - DNA, 25 bp, Homo sapien
ttggctacataatttgggaggccca

SEQ ID NO: 2957535 - DNA, 25 bp, Homo sapien
cagagcattactctaaacgcgcagt

SEQ ID NO: 2957536 - DNA, 25 bp, Homo sapien
ggctttgagataggattggctacat

SEQ ID NO: 2957537 - DNA, 25 bp, Homo sapien
tgcagactcaggtctctcagcacca

SEQ ID NO: 2957538 - DNA, 25 bp, Homo sapien
cacagaataattccggaactccacc

SEQ ID NO: 2957539 - DNA, 25 bp, Homo sapien
cggccggtagcgcacagaataattc

SEQ ID NO: 2957540 - DNA, 25 bp, Homo sapien
agcaccaggtctaggcccggccggt

SEQ ID NO: 2957541 - DNA, 25 bp, Homo sapien
ctccaggatgcggaacaggcaaagg

SEQ ID NO: 2957542 - DNA, 25 bp, Homo sapien
caaagggtcatggaagacttgccag

SEQ ID NO: 2957543 - DNA, 25 bp, Homo sapien
tggaggccgatgtctgccacattga

SEQ ID NO: 2957544 - DNA, 25 bp, Homo sapien
tcaatgcggatttcaccctttgccg

SEQ ID NO: 2957545 - DNA, 25 bp, Homo sapien
ctggggatacaacgtggcctcagag

SEQ ID NO: 2957546 - DNA, 25 bp, Homo sapien
ggatacaacgtggcctcagagggag

SEQ ID NO: 2957547 - DNA, 25 bp, Homo sapien
gccggctgggagctcacaaacgtgt

SEQ ID NO: 2957548 - DNA, 25 bp, Homo sapien
ttcatgcgcagggtccccgagaaca

SEQ ID NO: 2957549 - DNA, 25 bp, Homo sapien
ccgaaggggtccaggttcatgcgca

SEQ ID NO: 2957550 - DNA, 25 bp, Homo sapien
tcacaaacgtgtgcaggtgggacag

SEQ ID NO: 2957551 - DNA, 25 bp, Homo sapien
ccagctgtgcaacttaggtcaagcc

SEQ ID NO: 2957552 - DNA, 25 bp, Homo sapien
ccctgaccggtgaagtgggatcatg

SEQ ID NO: 2957553 - DNA, 25 bp, Homo sapien
ccagggagggttgcagttcctgacc

SEQ ID NO: 2957554 - DNA, 25 bp, Homo sapien
tatgctcaatacgaaaggacagccc

SEQ ID NO: 2957555 - DNA, 25 bp, Homo sapien
gaggtgactactggcccctccagtg

SEQ ID NO: 2957556 - DNA, 25 bp, Homo sapien
ggtatctccaacctttagactcagt

SEQ ID NO: 2957557 - DNA, 25 bp, Homo sapien
gctagcacaggtataggtatctcca

SEQ ID NO: 2957558 - DNA, 25 bp, Homo sapien
cctttagactcagtaagaggtgact

SEQ ID NO: 2957559 - DNA, 25 bp, Homo sapien
tgcgaggaaatcatttcaaaccgtg

SEQ ID NO: 2957560 - DNA, 25 bp, Homo sapien
gaggaaatcatttcaaaccgtggag

SEQ ID NO: 2957561 - DNA, 25 bp, Homo sapien
gaaatcatttcaaaccgtggaggct

SEQ ID NO: 2957562 - DNA, 25 bp, Homo sapien
tcatttcaaaccgtggaggctcgtt

SEQ ID NO: 2957563 - DNA, 25 bp, Homo sapien
cctccagaacggagcagaggtctgg

SEQ ID NO: 2957564 - DNA, 25 bp, Homo sapien
aggtctggacaccattgggataatg

SEQ ID NO: 2957565 - DNA, 25 bp, Homo sapien
ctggacaccattgggataatgaggg

SEQ ID NO: 2957566 - DNA, 25 bp, Homo sapien
ccctccagaacggagcagaggtctg

SEQ ID NO: 2957567 - DNA, 25 bp, Homo sapien
catgatagtgttaagccggtgtgcg

SEQ ID NO: 2957568 - DNA, 25 bp, Homo sapien
taaaaccaggatgcggctcttgcgg

SEQ ID NO: 2957569 - DNA, 25 bp, Homo sapien
tgcaggtatcaaactgggtgcggat

SEQ ID NO: 2957570 - DNA, 25 bp, Homo sapien
gcagctgtggcctcgtctaaaacca

SEQ ID NO: 2957571 - DNA, 25 bp, Homo sapien
cctagcgcaagaattagagcaaggg

SEQ ID NO: 2957572 - DNA, 25 bp, Homo sapien
caggatcacctgcagtttaaatatc

SEQ ID NO: 2957573 - DNA, 25 bp, Homo sapien
gggaggacactgtcatttcccagga

SEQ ID NO: 2957574 - DNA, 25 bp, Homo sapien
tccttggagggcctagcgcaagaat

SEQ ID NO: 2957575 - DNA, 25 bp, Homo sapien
gctactactcctttgtccaggacca

SEQ ID NO: 2957576 - DNA, 25 bp, Homo sapien
agaagatgcctctagctgcaatgag

SEQ ID NO: 2957577 - DNA, 25 bp, Homo sapien
tggagaatcaaattcagctactact

SEQ ID NO: 2957578 - DNA, 25 bp, Homo sapien
agcatctctggccatcccgtagaag

SEQ ID NO: 2957579 - DNA, 25 bp, Homo sapien
cactcagttgggaatcgggagaccg

SEQ ID NO: 2957580 - DNA, 25 bp, Homo sapien
gggactagtctaactggctcaaact

SEQ ID NO: 2957581 - DNA, 25 bp, Homo sapien
ttaggcgtgtcattcaccacttggg

SEQ ID NO: 2957582 - DNA, 25 bp, Homo sapien
cattctgcggacatatttggtgtca

SEQ ID NO: 2957583 - DNA, 25 bp, Homo sapien
gagttcctaggggtggcctgaccca

SEQ ID NO: 2957584 - DNA, 25 bp, Homo sapien
ccagagtacaggactgagttcctag

SEQ ID NO: 2957585 - DNA, 25 bp, Homo sapien
gcagcaccccagagtacaggactga

SEQ ID NO: 2957586 - DNA, 25 bp, Homo sapien
ttttaatggattcaggcagcacccc

SEQ ID NO: 2957587 - DNA, 25 bp, Homo sapien
cattaacgtggaggtgttcacagca

SEQ ID NO: 2957588 - DNA, 25 bp, Homo sapien
tctggaacagacttcgaaatgagca

SEQ ID NO: 2957589 - DNA, 25 bp, Homo sapien
gaggcctcactggttataggaactg

SEQ ID NO: 2957590 - DNA, 25 bp, Homo sapien
gagcaggagctactggcaattaccc

SEQ ID NO: 2957591 - DNA, 25 bp, Homo sapien
ttgtgtttcaaccaatcggaagtga

SEQ ID NO: 2957592 - DNA, 25 bp, Homo sapien
tgggcttagcgacagaggcaagcaa

SEQ ID NO: 2957593 - DNA, 25 bp, Homo sapien
ttcagccacccagattaattaaagt

SEQ ID NO: 2957594 - DNA, 25 bp, Homo sapien
ggtcaactgactactgcgtatcgca

SEQ ID NO: 2957595 - DNA, 25 bp, Homo sapien
taactggtgtttggccagttacagt

SEQ ID NO: 2957596 - DNA, 25 bp, Homo sapien
tctgtaactggtgtttggccagtta

SEQ ID NO: 2957597 - DNA, 25 bp, Homo sapien
acatctgtaactggtgtttggccag

SEQ ID NO: 2957598 - DNA, 25 bp, Homo sapien
tgtaactggtgtttggccagttaca

SEQ ID NO: 2957599 - DNA, 25 bp, Homo sapien
tagggtaactcacatcctgcccatg

SEQ ID NO: 2957600 - DNA, 25 bp, Homo sapien
gaagtacggacgacagtgcaggaaa

SEQ ID NO: 2957601 - DNA, 25 bp, Homo sapien
caaacaggtctgttaatcatgcaca

SEQ ID NO: 2957602 - DNA, 25 bp, Homo sapien
tgaaccatagccttagaagtacgga

SEQ ID NO: 2957603 - DNA, 25 bp, Homo sapien
tcctacacacaggagccgacaagac

SEQ ID NO: 2957604 - DNA, 25 bp, Homo sapien
aaacacgggcgacaccgtcgccaat

SEQ ID NO: 2957605 - DNA, 25 bp, Homo sapien
tccttcgggcggctgttcccaccag

SEQ ID NO: 2957606 - DNA, 25 bp, Homo sapien
caggcacccgccaacgaaaacacgg

SEQ ID NO: 2957607 - DNA, 25 bp, Homo sapien
cacgttgctgcgcttctcgtccggg

SEQ ID NO: 2957608 - DNA, 25 bp, Homo sapien
catccaacaactgcgcggccgaaat

SEQ ID NO: 2957609 - DNA, 25 bp, Homo sapien
ctcgtggtcccaccgcacgttgctg

SEQ ID NO: 2957610 - DNA, 25 bp, Homo sapien
ggcccattaactcatccaacaactg

SEQ ID NO: 2957611 - DNA, 25 bp, Homo sapien
ttgaaactgcgcttcgcaagtgctg

SEQ ID NO: 2957612 - DNA, 25 bp, Homo sapien
gcgcttcgcaagtgctgcttgctca

SEQ ID NO: 2957613 - DNA, 25 bp, Homo sapien
taaatggtcgatgattttgcatcac

SEQ ID NO: 2957614 - DNA, 25 bp, Homo sapien
tacaaataaatggtcgatgattttg

SEQ ID NO: 2957615 - DNA, 25 bp, Homo sapien
ttactatggagtaaggtaggaaatg

SEQ ID NO: 2957616 - DNA, 25 bp, Homo sapien
tattttactatggagtaaggtagga

SEQ ID NO: 2957617 - DNA, 25 bp, Homo sapien
actatggagtaaggtaggaaatgcc

SEQ ID NO: 2957618 - DNA, 25 bp, Homo sapien
tatggagtaaggtaggaaatgccag

SEQ ID NO: 2957619 - DNA, 25 bp, Homo sapien
taatattgctaaattgggcatgggt

SEQ ID NO: 2957620 - DNA, 25 bp, Homo sapien
caatgaccgctttaaggttgacaat

SEQ ID NO: 2957621 - DNA, 25 bp, Homo sapien
ccatgcccggtcggctatgtttttt

SEQ ID NO: 2957622 - DNA, 25 bp, Homo sapien
gacaataacagaattgcttcaaaat

SEQ ID NO: 2957623 - DNA, 25 bp, Homo sapien
taaagaccactttgtctgacaggcc

SEQ ID NO: 2957624 - DNA, 25 bp, Homo sapien
tgatctttgcgcatgctagctcccc

SEQ ID NO: 2957625 - DNA, 25 bp, Homo sapien
agtggaagcagtctgggaccctcac

SEQ ID NO: 2957626 - DNA, 25 bp, Homo sapien
tcaggctggtaaggtgtcttctctc

SEQ ID NO: 2957627 - DNA, 25 bp, Homo sapien
cagtaaaactgacagggacttaaat

SEQ ID NO: 2957628 - DNA, 25 bp, Homo sapien
tattcaatatatacttctgattatc

SEQ ID NO: 2957629 - DNA, 25 bp, Homo sapien
aatctaaatagccaatcctaattac

SEQ ID NO: 2957630 - DNA, 25 bp, Homo sapien
ccttgaataatgtgatgaggggaaa

SEQ ID NO: 2957631 - DNA, 25 bp, Homo sapien
ggtacttttgtaactccttcagata

SEQ ID NO: 2957632 - DNA, 25 bp, Homo sapien
tactaggtggattattactatatat

SEQ ID NO: 2957633 - DNA, 25 bp, Homo sapien
gttactaggtggattattactatat

SEQ ID NO: 2957634 - DNA, 25 bp, Homo sapien
tgtttaattctctcccactggtact

SEQ ID NO: 2957635 - DNA, 25 bp, Homo sapien
tcagactcctgaatttcgataaaag

SEQ ID NO: 2957636 - DNA, 25 bp, Homo sapien
gaataaatctgcagtactcgtatta

SEQ ID NO: 2957637 - DNA, 25 bp, Homo sapien
tgtttcaaccaatgtaagaatttca

SEQ ID NO: 2957638 - DNA, 25 bp, Homo sapien
catttgttgaatcatattaggtaaa

SEQ ID NO: 2957639 - DNA, 25 bp, Homo sapien
gaacaattccgcaggacaaaaacca

SEQ ID NO: 2957640 - DNA, 25 bp, Homo sapien
tatttgtgaacaattccgcaggaca

SEQ ID NO: 2957641 - DNA, 25 bp, Homo sapien
caagatcagaacgtgtatttgtgaa

SEQ ID NO: 2957642 - DNA, 25 bp, Homo sapien
gaacgtgtatttgtgaacaattccg

SEQ ID NO: 2957643 - DNA, 25 bp, Homo sapien
tatcataaatttgataaaagttaca

SEQ ID NO: 2957644 - DNA, 25 bp, Homo sapien
tcataaatttgataaaagttacaca

SEQ ID NO: 2957645 - DNA, 25 bp, Homo sapien
aacttcacagaattataatcagttt

SEQ ID NO: 2957646 - DNA, 25 bp, Homo sapien
ttcacagaattataatcagtttttt

SEQ ID NO: 2957647 - DNA, 25 bp, Homo sapien
tgctgacatctctaatgttatctcc

SEQ ID NO: 2957648 - DNA, 25 bp, Homo sapien
aatttgctgacatctctaatgttat

SEQ ID NO: 2957649 - DNA, 25 bp, Homo sapien
tttgctgacatctctaatgttatct

SEQ ID NO: 2957650 - DNA, 25 bp, Homo sapien
tgacatctctaatgttatctcctct

SEQ ID NO: 2957651 - DNA, 25 bp, Homo sapien
tcgcttctgtttagtatccccttct

SEQ ID NO: 2957652 - DNA, 25 bp, Homo sapien
aatcctgagcctgtccagggttctg

SEQ ID NO: 2957653 - DNA, 25 bp, Homo sapien
caggcttttagggtacaggttgctc

SEQ ID NO: 2957654 - DNA, 25 bp, Homo sapien
tctgctgatcaaacactcgcttctg

SEQ ID NO: 2957655 - DNA, 25 bp, Homo sapien
tctcaagatctagactggtcctgcc

SEQ ID NO: 2957656 - DNA, 25 bp, Homo sapien
taatatgctcctaatgctctaaggc

SEQ ID NO: 2957657 - DNA, 25 bp, Homo sapien
gagagtaagatcaacagatgcacag

SEQ ID NO: 2957658 - DNA, 25 bp, Homo sapien
gatgcacaggaccacctacactagt

SEQ ID NO: 2957659 - DNA, 25 bp, Homo sapien
cagagatcacttctcaggaactgtt

SEQ ID NO: 2957660 - DNA, 25 bp, Homo sapien
agagatcacttctcaggaactgttc

SEQ ID NO: 2957661 - DNA, 25 bp, Homo sapien
gagatcacttctcaggaactgttca

SEQ ID NO: 2957662 - DNA, 25 bp, Homo sapien
agatcacttctcaggaactgttcac

SEQ ID NO: 2957663 - DNA, 25 bp, Homo sapien
tgatcacttgtaggacctgctcaac

SEQ ID NO: 2957664 - DNA, 25 bp, Homo sapien
ttcctgagaaaaggcccgtgggaga

SEQ ID NO: 2957665 - DNA, 25 bp, Homo sapien
caagttccctctttatggcatcgta

SEQ ID NO: 2957666 - DNA, 25 bp, Homo sapien
tactgaccagtcttaggccattctg

SEQ ID NO: 2957667 - DNA, 25 bp, Homo sapien
tcatcatgaattttttcacacggac

SEQ ID NO: 2957668 - DNA, 25 bp, Homo sapien
attttcatcatgaattttttcacac

SEQ ID NO: 2957669 - DNA, 25 bp, Homo sapien
tgttttcgtagattttcatcatgaa

SEQ ID NO: 2957670 - DNA, 25 bp, Homo sapien
tttcatcatgaattttttcacacgg

SEQ ID NO: 2957671 - DNA, 25 bp, Homo sapien
gataatgccaaacgagcatggcctc

SEQ ID NO: 2957672 - DNA, 25 bp, Homo sapien
gcatggcctcgtctgatcctacgtt

SEQ ID NO: 2957673 - DNA, 25 bp, Homo sapien
caagtaagctctgtaagtatcgcaa

SEQ ID NO: 2957674 - DNA, 25 bp, Homo sapien
gatcctacgttctacttctgcaagt

SEQ ID NO: 2957675 - DNA, 25 bp, Homo sapien
aagtacatcaattttgtctgttaga

SEQ ID NO: 2957676 - DNA, 25 bp, Homo sapien
acatcaattttgtctgttagaacct

SEQ ID NO: 2957677 - DNA, 25 bp, Homo sapien
caattttgtctgttagaacctgaat

SEQ ID NO: 2957678 - DNA, 25 bp, Homo sapien
tcaattttgtctgttagaacctgaa

SEQ ID NO: 2957679 - DNA, 25 bp, Homo sapien
cgacgttgtggaccttagcagttct

SEQ ID NO: 2957680 - DNA, 25 bp, Homo sapien
catcccctgggcttcttctactttt

SEQ ID NO: 2957681 - DNA, 25 bp, Homo sapien
ttccttcagaccctaattcttcaat

SEQ ID NO: 2957682 - DNA, 25 bp, Homo sapien
gctcaactaatttcatcatcccctg

SEQ ID NO: 2957683 - DNA, 25 bp, Homo sapien
gtagctttaattttggcatagccca

SEQ ID NO: 2957684 - DNA, 25 bp, Homo sapien
gggactgggcatctcctactattaa

SEQ ID NO: 2957685 - DNA, 25 bp, Homo sapien
tcaaatggtcatctacccgggactg

SEQ ID NO: 2957686 - DNA, 25 bp, Homo sapien
tattaaaaaggctccacatacttca

SEQ ID NO: 2957687 - DNA, 25 bp, Homo sapien
gcttctccttttttagacgctcatc

SEQ ID NO: 2957688 - DNA, 25 bp, Homo sapien
cttgcttctccttttttagacgctc

SEQ ID NO: 2957689 - DNA, 25 bp, Homo sapien
ttctccttttttagacgctcatcac

SEQ ID NO: 2957690 - DNA, 25 bp, Homo sapien
ctgtcacgagccctttctttttctc

SEQ ID NO: 2957691 - DNA, 25 bp, Homo sapien
ggtcccgagacctgctgcatcttct

SEQ ID NO: 2957692 - DNA, 25 bp, Homo sapien
gatgttcggcttgagtgtctacttc

SEQ ID NO: 2957693 - DNA, 25 bp, Homo sapien
tgtctacttcgtgaacgacttctct

SEQ ID NO: 2957694 - DNA, 25 bp, Homo sapien
ttctctacttcgtgaccttttgtgg

SEQ ID NO: 2957695 - DNA, 25 bp, Homo sapien
gatcttcttcgatcccgacttcgag

SEQ ID NO: 2957696 - DNA, 25 bp, Homo sapien
tatgactttcgatcccggctttttg

SEQ ID NO: 2957697 - DNA, 25 bp, Homo sapien
tgtcccgacttttgctcctgtgctt

SEQ ID NO: 2957698 - DNA, 25 bp, Homo sapien
ctttctgatcgatcatggcttctgc

SEQ ID NO: 2957699 - DNA, 25 bp, Homo sapien
cagataaactgtcattttcacaaat

SEQ ID NO: 2957700 - DNA, 25 bp, Homo sapien
tagtagtcagtccaataatcttatc

SEQ ID NO: 2957701 - DNA, 25 bp, Homo sapien
agtagtcagtccaataatcttatct

SEQ ID NO: 2957702 - DNA, 25 bp, Homo sapien
ctagtagtcagtccaataatcttat

SEQ ID NO: 2957703 - DNA, 25 bp, Homo sapien
gtagtcagtccaataatcttatctt

SEQ ID NO: 2957704 - DNA, 25 bp, Homo sapien
gagtcgtcttgttgtcccgtagagg

SEQ ID NO: 2957705 - DNA, 25 bp, Homo sapien
gtcctccctttgtgccttatgggct

SEQ ID NO: 2957706 - DNA, 25 bp, Homo sapien
tccggtgcacaggtagcttcaatga

SEQ ID NO: 2957707 - DNA, 25 bp, Homo sapien
gcttcaatgaggaagagtcgtcttg

SEQ ID NO: 2957708 - DNA, 25 bp, Homo sapien
cacttgtgagaactgtgccaggaca

SEQ ID NO: 2957709 - DNA, 25 bp, Homo sapien
cttactaagaatagctggtctggca

SEQ ID NO: 2957710 - DNA, 25 bp, Homo sapien
gcaatgtccaagtagttaagcgcaa

SEQ ID NO: 2957711 - DNA, 25 bp, Homo sapien
gggcacccactcagagaactgaaga

SEQ ID NO: 2957712 - DNA, 25 bp, Homo sapien
tcactctgcttttctcgactaccgg

SEQ ID NO: 2957713 - DNA, 25 bp, Homo sapien
tcgactaccggacttcacactactt

SEQ ID NO: 2957714 - DNA, 25 bp, Homo sapien
ccattgacctcattcttagtatcac

SEQ ID NO: 2957715 - DNA, 25 bp, Homo sapien
ccttcgattcagtgtttgtgtcttc

SEQ ID NO: 2957716 - DNA, 25 bp, Homo sapien
ctctgtctgatctgaggtcttatca

SEQ ID NO: 2957717 - DNA, 25 bp, Homo sapien
tctgtctgatctgaggtcttatcag

SEQ ID NO: 2957718 - DNA, 25 bp, Homo sapien
gatctgaggtcttatcagatcagtt

SEQ ID NO: 2957719 - DNA, 25 bp, Homo sapien
tctgatctgaggtcttatcagatca

SEQ ID NO: 2957720 - DNA, 25 bp, Homo sapien
ctgtcaaacagtaacaaaaagccct

SEQ ID NO: 2957721 - DNA, 25 bp, Homo sapien
cagtaacaaaaagccctaatcaaag

SEQ ID NO: 2957722 - DNA, 25 bp, Homo sapien
caaaaagccctaatcaaagtgagaa

SEQ ID NO: 2957723 - DNA, 25 bp, Homo sapien
tgtcaaacagtaacaaaaagcccta

SEQ ID NO: 2957724 - DNA, 25 bp, Homo sapien
ctcaaaatgttttgcaggactacac

SEQ ID NO: 2957725 - DNA, 25 bp, Homo sapien
tgttttgcaggactacactgtcttt

SEQ ID NO: 2957726 - DNA, 25 bp, Homo sapien
ttgtatgtcttcttactcggcttag

SEQ ID NO: 2957727 - DNA, 25 bp, Homo sapien
cttactcggcttagttccatcttca

SEQ ID NO: 2957728 - DNA, 25 bp, Homo sapien
tccaaagaggcacactaatgggggc

SEQ ID NO: 2957729 - DNA, 25 bp, Homo sapien
cacgagtctgctacaaaatagctga

SEQ ID NO: 2957730 - DNA, 25 bp, Homo sapien
aatgtgggcgataatttccaaagag

SEQ ID NO: 2957731 - DNA, 25 bp, Homo sapien
ttacaaatgtgggcgataatttcca

SEQ ID NO: 2957732 - DNA, 25 bp, Homo sapien
ggctctcgagttacagaacaaactg

SEQ ID NO: 2957733 - DNA, 25 bp, Homo sapien
caacatgtgcctccgaaatatttaa

SEQ ID NO: 2957734 - DNA, 25 bp, Homo sapien
aagcatatgtctctgccaatgtacc

SEQ ID NO: 2957735 - DNA, 25 bp, Homo sapien
gaggtatggtagtcagctgcaataa

SEQ ID NO: 2957736 - DNA, 25 bp, Homo sapien
gcttagtttgactgaatccttgatt

SEQ ID NO: 2957737 - DNA, 25 bp, Homo sapien
ctgcttagtttgactgaatccttga

SEQ ID NO: 2957738 - DNA, 25 bp, Homo sapien
tttcatgggccgctcacaacaccaa

SEQ ID NO: 2957739 - DNA, 25 bp, Homo sapien
tttggcttttcatgggccgctcaca

SEQ ID NO: 2957740 - DNA, 25 bp, Homo sapien
gatacacaacagttaagcgtaaaga

SEQ ID NO: 2957741 - DNA, 25 bp, Homo sapien
tataagttttcacgcaatacacaaa

SEQ ID NO: 2957742 - DNA, 25 bp, Homo sapien
tcacaggcaatagcattcaaacatg

SEQ ID NO: 2957743 - DNA, 25 bp, Homo sapien
caaacatggatgtgggtagagaaag

SEQ ID NO: 2957744 - DNA, 25 bp, Homo sapien
catgtgcctgtgtatgcttgcctaa

SEQ ID NO: 2957745 - DNA, 25 bp, Homo sapien
ctacatacctatggctgactgcaaa

SEQ ID NO: 2957746 - DNA, 25 bp, Homo sapien
cagccagtgagtgactattcctaca

SEQ ID NO: 2957747 - DNA, 25 bp, Homo sapien
tatgagaaagtgttggcccagtcac

SEQ ID NO: 2957748 - DNA, 25 bp, Homo sapien
tcttccaaaaatcttcgaacagtag

SEQ ID NO: 2957749 - DNA, 25 bp, Homo sapien
gccgttctcagtattcttccaaaaa

SEQ ID NO: 2957750 - DNA, 25 bp, Homo sapien
ttccaaaaatcttcgaacagtagtc

SEQ ID NO: 2957751 - DNA, 25 bp, Homo sapien
tcactttatgccgttctcagtattc

SEQ ID NO: 2957752 - DNA, 25 bp, Homo sapien
aaatctggtaggtcacatcagtcct

SEQ ID NO: 2957753 - DNA, 25 bp, Homo sapien
tacaggacctaagttttcagtggca

SEQ ID NO: 2957754 - DNA, 25 bp, Homo sapien
actaactgagctttatactttttct

SEQ ID NO: 2957755 - DNA, 25 bp, Homo sapien
tcagtggcatatatactattaacac

SEQ ID NO: 2957756 - DNA, 25 bp, Homo sapien
cacgaatactaacgtttaatcctgt

SEQ ID NO: 2957757 - DNA, 25 bp, Homo sapien
acttgcaattaaacactgagcaagc

SEQ ID NO: 2957758 - DNA, 25 bp, Homo sapien
agtccaagattgaaaacttgcaatt

SEQ ID NO: 2957759 - DNA, 25 bp, Homo sapien
tcacacgaatactaacgtttaatcc

SEQ ID NO: 2957760 - DNA, 25 bp, Homo sapien
tccaaaggctaagtagagcagagtt

SEQ ID NO: 2957761 - DNA, 25 bp, Homo sapien
gtagagcagagttgtaaaaatgaaa

SEQ ID NO: 2957762 - DNA, 25 bp, Homo sapien
taaatccaaaggctaagtagagcag

SEQ ID NO: 2957763 - DNA, 25 bp, Homo sapien
aatccaaaggctaagtagagcagag

SEQ ID NO: 2957764 - DNA, 25 bp, Homo sapien
aacttttcaatgacagagacaatca

SEQ ID NO: 2957765 - DNA, 25 bp, Homo sapien
cttttcaatgacagagacaatcaac

SEQ ID NO: 2957766 - DNA, 25 bp, Homo sapien
agattaatactaaaacttttcaatg

SEQ ID NO: 2957767 - DNA, 25 bp, Homo sapien
aaaacttttcaatgacagagacaat

SEQ ID NO: 2957768 - DNA, 25 bp, Homo sapien
taacaggcactggaccatgaggcag

SEQ ID NO: 2957769 - DNA, 25 bp, Homo sapien
tcaaactacacaaagcagtgcctgg

SEQ ID NO: 2957770 - DNA, 25 bp, Homo sapien
gctgccggttttcctagatgtgaca

SEQ ID NO: 2957771 - DNA, 25 bp, Homo sapien
ctatagatagaaacatgctgccggt

SEQ ID NO: 2957772 - DNA, 25 bp, Homo sapien
catcccctggtacgcatgtgtaaga

SEQ ID NO: 2957773 - DNA, 25 bp, Homo sapien
cagcaagactcagaacatacgggta

SEQ ID NO: 2957774 - DNA, 25 bp, Homo sapien
tatccgggaatgaatggctacgaga

SEQ ID NO: 2957775 - DNA, 25 bp, Homo sapien
gactggtcggtcctcttgaaaggct

SEQ ID NO: 2957776 - DNA, 25 bp, Homo sapien
gtttgaccctaatccaacacagaga

SEQ ID NO: 2957777 - DNA, 25 bp, Homo sapien
catctctgagtgaggcagtcatgca

SEQ ID NO: 2957778 - DNA, 25 bp, Homo sapien
gcttctgtgccaagtcaaacaagag

SEQ ID NO: 2957779 - DNA, 25 bp, Homo sapien
taagccaagttccttggtgaggcgc

SEQ ID NO: 2957780 - DNA, 25 bp, Homo sapien
ccccggcatatacctgccctgccat

SEQ ID NO: 2957781 - DNA, 25 bp, Homo sapien
tccagcccccggcatatacctgccc

SEQ ID NO: 2957782 - DNA, 25 bp, Homo sapien
gaatttttccagcccccggcatata

SEQ ID NO: 2957783 - DNA, 25 bp, Homo sapien
agcccccggcatatacctgccctgc

SEQ ID NO: 2957784 - DNA, 25 bp, Homo sapien
tcaccacggtgtgggaaaccacaga

SEQ ID NO: 2957785 - DNA, 25 bp, Homo sapien
cagccacaccccaaggagctggcat

SEQ ID NO: 2957786 - DNA, 25 bp, Homo sapien
tgacagatgattcaggggctgcagc

SEQ ID NO: 2957787 - DNA, 25 bp, Homo sapien
ctcaagccttcaccacggtgtggga
